United States Patent Application Publication US 2004/0031072 A1 - sequence listing, part 37

SEQ ID NO: 210092 - protein, 87 aa, Glycine max
  Clone ID: PAT_MRT3847_31741C.1.pep
PRQFGCSALTGTNPVTVVTFCSYMNARSLAPCTVGIFASYALLYRKRPVFSVPLAALPHFSTTASVSCQSVVVTNTAATTGLPWRHV

SEQ ID NO: 210093 - protein, 121 aa, Glycine max
  Clone ID: PAT_MRT3847_31742C.1.pep
MATTTRLLLRSSKPIQLAPSPPSSSSNSLYMKCVRYQSMASLNENHHNIGSVKGERKPVGAVKATIATTNHITTSKPVIQQGLSDLATLIASIRNAVLVFLRTFVKRKPRNLSHRCSLKRQ

SEQ ID NO: 210094 - protein, 82 aa, Glycine max
  unsure (1)..(82): unsure at all Xaa locations
  Clone ID: PAT_MRT3847_31743C.1.pep
LGAPRXAPWPGVLSLPXFXSAFPRWPSGAFXGVVPRLGAAGLXLLSGVLCLVPRRXVPAXXAVGLXCFXALGFVPCFPFLVV

SEQ ID NO: 210095 - protein, 303 aa, Glycine max
  unsure (1)..(303): unsure at all Xaa locations
  Clone ID: PAT_MRT3847_31744C.1.pep
MPATTENNNQGSFLGRISIRRNQVMSMDGSHDQEMEDLELFQKHIGDRFSELLSSTSEDSSSSSSSSSGDALLSIAWLRRLLDEFLCCEAEFEAVVLMGRDPSQITKPPLDKLLPDLLDRGVKSLDVCNAVTLGLDAVKNLQRLAEIAVAALEQTPLGDGQVRRAKKALSALVAAMLNDDSNAAAKGTERTRSFGRRAGNTNTTKYKSLSWSMAKNWSAAKQIHAMMSNLTAPRGAESSGLAQPMYMMSTVLVFVMWTLVAAVPCQERNGLGTHFPLPRQLGWAQPMIGLQEKXAEEWKKKEK

SEQ ID NO: 210096 - protein, 211 aa, Glycine max
  Clone ID: PAT_MRT3847_31745C.1.pep
LLYIYASSSSLIVASSKSEEVHELANLLREPALLEAVMLVVVVVVVILAAVTVFADGIESLNRRRKPRLGGGLNPNPARMNPARGGGVAEQDGVVAVGDLAAVAVAATAVGGAERQRQRTAGLEVAVDRTEAEERQRNGIDGADGKRNGFRFGMMGSRFGVRFGFGEGVRNIAGACEGEEEEEGEENGNGRRDSSGHGFGACLDVVVKMRK

SEQ ID NO: 210097 - protein, 52 aa, Glycine max
  Clone ID: PAT_MRT3847_31746C.1.pep
FVRIVVIMINQSKSINIICRIIIIKVYHISIHDGLLLYNVNKHTYFEGDKIF

SEQ ID NO: 210098 - protein, 48 aa, Glycine max
  Clone ID: PAT_MRT3847_31747C.1.pep
KLYLLDTEIGPPLSLLLDVYEVCLVLIINRRSKRGGGSHIHHNPLFSP

SEQ ID NO: 210099 - protein, 393 aa, Glycine max
  unsure (1)..(393): unsure at all Xaa locations
  Clone ID: PAT_MRT3847_31748C.1.pep
VMSHYSADSAWLKRHSSSQVLPSRSKKLWWKMILWSHRNTRRTLPSNSTLVPTSAALNSGYSSVTLGLKQGEALRPVTSSVSLTMESFIKRRIGKNIGNRRGSRFQCGQWFALSSESSSFSRVDAWVKGLEIHQILPEDDFDDDNARRSIVFPPSPNAGGSMMRTTSQLTYPDANLLSGTGIKAIPSLSLLPSLRAVNLSNIFIVPIPPGVLPXGIQTLNLSKNKISTLEGLSRFAQFQVLYLVCNNICGVGQLLSRWTLTVLLLRFGNNTRAVAGLQSFTNIKVLXLLFNNITTIERLLRVDPITNALRGLNLMXAPCELTPKMMNQTKQPVRAHRTRGILSDSVARAALGSSTRSCNRRSIRRVGHGGSNLSRGNRRSTSVSQKSTNRTRK

SEQ ID NO: 210100 - protein, 77 aa, Glycine max
  unsure (1)..(77): unsure at all Xaa locations
  Clone ID: PAT_MRT3847_31749C.1.pep
PRGFXFQXMKGXXXXRVPSIFTLSGXYXKSXPMXXSXSHXDNIXKSIXXCTLPWAXEXSCFKNYXXLSCCCSSMLLP

SEQ ID NO: 210101 - protein, 199 aa, Glycine max
  unsure (1)..(199): unsure at all Xaa locations
  Clone ID: PAT_MRT3847_3174C.1.pep
MEFTSSFDLTFFYDYATPSKVVLWLASIFSGIILCVLAYTSTAILSSLLFKGYGKLSSEEKIEWNNRGFSTFHALFVSSASFYLLILSDVFNVNSQDDIVINRSSRLSDTVLGVSIGYFLTDLAMILWNFPALGGLEYVLHHGISIGSITLCLLSGQVHIYILMVLFSESTTPFVNLXWYLDVAGLKSCXXYIWNGIAL

SEQ ID NO: 210102 - protein, 65 aa, Glycine max
  Clone ID: PAT_MRT3847_31750C.1.pep
CPEGGKKSYMFKKRAFQGGGGTLFPPPLIRLFSGGGGGVALLLGRGQRFIKFVWGETKQVLIPRG

SEQ ID NO: 210103 - protein, 74 aa, Glycine max
  Clone ID: PAT_MRT3847_31751C.1.pep
TPTFSKILLVLNLTFSLKFSFSPFYGIGIGKREFFAIFNKPITPPLVPKAPYHPKDNVGGISHIPIIKTFFPNR

SEQ ID NO: 210104 - protein, 122 aa, Glycine max
  Clone ID: PAT_MRT3847_31752C.1.pep
MAVGLAIANEGRGYSGKITSIVILSCMVAATGGIIFGYDIGISGGVTSMVPFLEKFFPDVYTKMKQDTKVSNYCKFDSQLLTAFTSSLYIAGLIASFFASSVTRAFGRKPSILIGGAAFLIG

SEQ ID NO: 210105 - protein, 120 aa, Glycine max
  Clone ID: PAT_MRT3847_31753C.1.pep
KGFDVLTSKKENKGTKDLQSWDQRLPLIPIPNLMKSIEDVVKDWIQEEAPSEEVKKETLSIGVEGAGLDGVVVAHTKPSGAEMVSDFWVVEQGDRPNQHRRGTSSCQRIQNLDDSIQEES

SEQ ID NO: 210106 - protein, 139 aa, Glycine max
  Clone ID: PAT_MRT3847_31754C.1.pep
LNSSSIYKPHLSKKKKKKKKKKKEKKKKKKKKKKKKGGGEKKGKKTNERGKEKEKAVKKGKTKDKLNGRWIKKGPEGENPVETEVNELEKHAPFEHWKKSEKGLKEGSYKKWEVKKEKGTRNETAQKTRWMRGKRQKKR

SEQ ID NO: 210107 - protein, 82 aa, Glycine max
  Clone ID: PAT_MRT3847_31755C.1.pep
PWFTMLVKVLTGYADSILKSDLETWNTETLSALKRARLRFRWLYTIIHMTVGGIRLPYTDHAYAVPLKLCWTMQRLDHTLPL

SEQ ID NO: 210108 - protein, 57 aa, Glycine max
  unsure (1)..(57): unsure at all Xaa locations
  Clone ID: PAT_MRT3847_31756C.1.pep
QTSAEDASFPQLLHPASLSGMVKCMCRYFRHCYSSKPVLELTIXAIPADTWEHKIVE

SEQ ID NO: 210109 - protein, 424 aa, Glycine max
  Clone ID: PAT_MRT3847_31757C.1.pep
MAQNDSNPTPPPEPHVAAEPITEDLVQDKEEEDDSSKIVIPVPESESLSLKEDSNRVSDSEKNAIDELKKLLKEELEDEEVSIWGVPLFKDDRTDVILLKFLRARELKVKDALVMFQNTLRWRKDFNIDALLDEDLGDHLEKVVFMHGHGREGHPVCYNVYGEFQNKDLYHKAFSSQDNRNKFLRWRIQLLERSIRHLDFTPSSGINTIFQVNDLKNSPGPAKRELRLATKQALQLLQDNYPEFVAKQVFINVPWWYLAFYTMINPFLTSRTKSKFVFAGPSKSPDTLFKYISPEQVPVQYGGLSVDFCDCNPDFTMSDPVTEIPIKPTTKQTVEIAIYEKCIIVWELRVVGWEVSYNAEFKPDVEDAYTVIIQKATKMSPTDEPVVSNSFKVVELGKLLLTIDNPTLKKKRLLYRFKIKPYSD

SEQ ID NO: 210110 - protein, 37 aa, Glycine max
  Clone ID: PAT_MRT3847_31758C.1.pep
FSTIAIATTYFTTTGVLAATEAAASCYQSLAYHNHPR

SEQ ID NO: 210111 - protein, 80 aa, Glycine max
  Clone ID: PAT_MRT3847_31759C.1.pep
KLRLVHTYFCSVHTFFGARVYVHTCVYVLEITSCLYIILCMYVHTRVRTRLIIPFILQQIHIFSGVEKRKINGSHRLSRA

SEQ ID NO: 210112 - protein, 62 aa, Glycine max
  Clone ID: PAT_MRT3847_3175C.1.pep
EKVKLEGSSQARTWVADKRISWLRVSVVSIGSVLVQSRITCWSSTSSETSMESSYSLRWCCL

SEQ ID NO: 210113 - protein, 409 aa, Glycine max
  Clone ID: PAT_MRT3847_31760C.1.pep
MDIEEDIRSLQLDSADPKQDVEAEPKAVEAEPKVKDKEVPSVQDEEDEPEMTKRHLNVVFIGHVDAGKSTTGGQILFLSGQVDERTIQKYEKEAKDKSRESWYMAYIMDTNEEERVKGKTVEVGRAHFETETTRFTILDAPGHKSYVPNMISGASQADIGVLVISARKGEFETGYERGGQTREHVQLAKTLGVSKLLVVVNKMDEPTVQWSKERYDEIESKMVPFLKQSGYNVKKDVLFLPISGLMGANMKTRVDKSVCPWWNGPCLFEALDAIEVPLRDPKGPFRMPIIDKFKDMGTVVMGKVESGSVREGDSLLVMPNKDQVKVVAIFIDEDRVKRAGPGENLRIRLSGVEDEDILSGFVLSSVANPIPAVTEFVAQLVILELLDNAIFTAGYKAVLHIHSVVEECE

SEQ ID NO: 210114 - protein, 64 aa, Glycine max
  Clone ID: PAT_MRT3847_31761C.1.pep
MPEQGGEQGLKYVVCKTHHNAESSYIKDGFMAVPSEVLSNSYNLGQRQVRQLKYQGNSDALVNP

SEQ ID NO: 210115 - protein, 47 aa, Glycine max
  Clone ID: PAT_MRT3847_31762C.1.pep
MVCEKREKKLSKVIVPDKWKEGASNTTEGGGRKINENKLLSKKNRSF

SEQ ID NO: 210116 - protein, 505 aa, Glycine max
  unsure (1)..(505): unsure at all Xaa locations
  Clone ID: PAT_MRT3847_31763C.1.pep
MDIEEDIRSLQLDSAEDNNGVVNAEDGRPEEVEKSDKMDEDPKQDVEAEPKAVEAEPKVKDKEVPSVQDEEDEPEMTKRHLNVVFIGHVDAGKSTTGGQILFLSGQVDERTIQKYEKEAKDKSRESWYMAYIMDTNEEERVKGKTVEVGRAHFETETTRFTILDAPGHKSYVPNMISGASQADIGVXLVISARKGEFETGYERGGQTREHVQLAKTLGVSKLLVVVNKMDEPTVQWSKERXDEIESKMVPFLKQSGYNVKKDVLFLQKSMSSCXPISGLMGANMKTRVDKSVCPWWNGPCLFEALDAIEVPLRDPKGPFRMPIIDKIEKVGSGSVREGESWLVLPKKDPVKVVAIFIDEDRVKRAGPGENLRIRLSGVEEEDILSGFVLSSVANPIPAVTEFVAQLVILELLDNAIFTAGYKAVLHIHSVVEECEIVELLQQIDTKTKKPMKKKVLFVKNGAVVVCRVQVNNSICIEKFSDFPQLGRFTLRTEGKTVAVGKVTGL

SEQ ID NO: 210117 - protein, 175 aa, Glycine max
  Clone ID: PAT_MRT3847_31764C.1.pep
NIHFSEAECYKIDNKNNKVYCRASKDKKLGGQEDFSIDYDYLVIAMGGRSNTFNTPGVQEHAHFLKEVDEALKIRHSVVDLFERASLPSLPVEEKKKLLSFVVVGGGPTGVEFAAELHDFVLEDMAKLYPSLKDYVKITLLEAGDHILNMFDKRITEIAEHKFARDGIDCDVGIY

SEQ ID NO: 210118 - protein, 97 aa, Glycine max
  unsure (1)..(97): unsure at all Xaa locations
  Clone ID: PAT_MRT3847_31765C.1.pep
MFLGSAARLRQRVAPEMXGAPGPGIFLFEFRRARVAVEELKGEFEEAEGGVKEKVESVRVCFGVLRSGAENIVCQLDDFFYEIVEGRKKLLDFCRHR

SEQ ID NO: 210119 - protein, 88 aa, Glycine max
  Clone ID: PAT_MRT3847_31766C.1.pep
LPILIPPMSARSLNWPCSPNGYKLISAIGEGSLGTVWKAKVKEGKYEGTFVAIKKINLEKCADNKIEDIRKSILLANLLQHPNILSSK

SEQ ID NO: 210120 - protein, 103 aa, Glycine max
  Clone ID: PAT_MRT3847_31767C.1.pep
GRRQKRAFNKLTAILRAQTGSGNPGRPGGHYLLCTKKGLPGTIQKARATSPGLYIYIRAGGKLPGALISSISSNKGESRGGLTKKWGGAIKSFEIYGEKIPGV

SEQ ID NO: 210121 - protein, 55 aa, Glycine max
  Clone ID: PAT_MRT3847_31768C.1.pep
TNKTMTFTSYLNKFLLPSDFILYAYQQFNEYQHNFRPATKSLIPKIDTYTHQLHT

SEQ ID NO: 210122 - protein, 47 aa, Glycine max
  Clone ID: PAT_MRT3847_31769C.1.pep
FFFLKGTARTQAPTITNYDVGSASWADLRIIPLQSAMEITILGHGPS

SEQ ID NO: 210123 - protein, 166 aa, Glycine max
  Clone ID: PAT_MRT3847_3176C.1.pep
GKFEWKYGYPYLACILNFSQTWALYCLVRFYSVTKDKLEPIKPLAKFLTFKSIVFLTWWQGVAVAFLFSMGAFKGSLAQELKTRIQDYIICIEMGVAAVVHLYVFPAVPYKRGERCVRNVAVMTDYASLGSPPDPAEVQDSERSTRMRLGRHDDRERRMKLTHNVS

SEQ ID NO: 210124 - protein, 57 aa, Glycine max
  Clone ID: PAT_MRT3847_31770C.1.pep
GEQILYFVTLPEYVLMLHYGPLFERSSYQLFRSHAFHPCYNILESLSFVVETFNSFW

SEQ ID NO: 210125 - protein, 101 aa, Glycine max
  Clone ID: PAT_MRT3847_31771C.1.pep
LFPGLVTQVLGPGCVVWRRTLSSGISTLTHPTWLTLSASSWRLSNHVYATYFCISLSLSGPSLLGMTLYRIGSSPSTDSIPHLRTGLRGLSSAAALWNCTV

SEQ ID NO: 210126 - protein, 130 aa, Glycine max
  unsure (1)..(130): unsure at all Xaa locations
  Clone ID: PAT_MRT3847_31772C.1.pep
TPEPYACEPSNLXKYPPTKELDIKLRDEEARRQKALSGKTNAVDGARRVRVRERGLAIPGPEANVEIQNNVDVCQKFPLYLSCLHIYLELTLIMLLLSLTVCSFCTPKFMHTIFMYILSPIYSMYLHQYS

SEQ ID NO: 210127 - protein, 47 aa, Glycine max
  Clone ID: PAT_MRT3847_31773C.1.pep
AAEFEINLPFWSPLGGIKKLFSKTKGCLYVSSFFKPQIEISPFVVFC

SEQ ID NO: 210128 - protein, 62 aa, Glycine max
  Clone ID: PAT_MRT3847_31774C.1.pep
PFPIPCPCYKEKKHKVIYLSKIRDLRLNPNSILLCLKYRFNKTNPCDLMHEMTIVVEDAPKD

SEQ ID NO: 210129 - protein, 110 aa, Glycine max
  unsure (1)..(110): unsure at all Xaa locations
  Clone ID: PAT_MRT3847_31775C.1.pep
MTQILLHGTLQATIYELDRLNAGXGNFFSKLKQNIEETIGIGKGVTKLYATIDLDKARVGRTRIIXNEHTNPKWYESFHIYCAHMASNIIFTVKDDNPIGATLIGRAYVP

SEQ ID NO: 210130 - protein, 36 aa, Glycine max
  Clone ID: PAT_MRT3847_31776C.1.pep
AKVARFFKKKISLEMLRNIYIGENNLSCISFYFIIF

SEQ ID NO: 210131 - protein, 87 aa, Glycine max
  unsure (1)..(87): unsure at all Xaa locations
  Clone ID: PAT_MRT3847_31777C.1.pep
DLSTFNGGTNFVTPXRPRVQSLSASIIAHIVLIYTIVSATDARLNASDSLVPILAPLXPIEFAMFLVHLATIAISDTGIKAARILSA

SEQ ID NO: 210132 - protein, 274 aa, Glycine max
  Clone ID: PAT_MRT3847_31778C.1.pep
KSSYKKLSKWLQAKSTSGLISVKEDKHKEEVMLFSVNRKHADYSSFKPEKRRVEKSEQHSVQSANEIRSSKTLEVAEIYKPSVHVNSIFSPVGADTGKLFSASEATDIVFKYVEKENLVKPTNKSVVVLDVILCDALFKGAIKKGTTYPTEIHKKDLGSTFVSRMQPHHVVTRGNESVVCKGALKTIQLLTERRQGNKKVTKLSGMESFLIDAEALASELQKKFACSTTVAELPGKKGNEVLVQGGVIDDLARHLIDQYGVPKRYIEVLDKTKK

SEQ ID NO: 210133 - protein, 129 aa, Glycine max
  Clone ID: PAT_MRT3847_31779C.1.pep
EHGSSALNSDIPLLTYGEEDPEISSDRHALIDPPYVNHGSRVHPMPYTDPSIPLQPRPMVPKKDIAVYGYGSVAWKDRMEDWKKRQSDKLQVVKHEGSNDGNFGDDFEDPDLPMMDEGRQPLSRKLPIP

SEQ ID NO: 210134 - protein, 51 aa, Glycine max
  Clone ID: PAT_MRT3847_3177C.1.pep
GSIPGIIGLFGGCFGTFVLKRRKVSGVWLAPLHGFYSTIHLVYTPSQFLYF

SEQ ID NO: 210135 - protein, 89 aa, Glycine max
  Clone ID: PAT_MRT3847_31780C.1.pep
FGLLQMWLLYTKSQSIIGNCFLHLFILLPAHPIESSMDKNVPPFFMAQHTLTLAISTHRTTTFLFANSPSRNNATTFLFDSEEHQSPDS

SEQ ID NO: 210136 - protein, 87 aa, Glycine max
  Clone ID: PAT_MRT3847_31781C.1.pep
AKATLLSIVFKLFHASSHNPEADYYYHYIIIREGKKIEEACSDFSVYSFGQRTLIFLYFIFYFFLFLDFSDFLRPQILKTKTENRER

SEQ ID NO: 210137 - protein, 84 aa, Glycine max
  Clone ID: PAT_MRT3847_31782C.1.pep
GVLKQFITRHIWFQFYIFSINILSHLCKATSTEALSTTKLEGIIFRFLFYFFILMMGLGAKMAMLIVVGGVLSFDGSRCLGLIY

SEQ ID NO: 210138 - protein, 62 aa, Glycine max
  Clone ID: PAT_MRT3847_31783C.1.pep
FGSSENCREHVFRLPSIVSEGRYFSRYLGLGLNTAQSKPNPDIRTSSKADGDQQQLYYICLS

SEQ ID NO: 210139 - protein, 160 aa, Glycine max
  Clone ID: PAT_MRT3847_31784C.1.pep
MKDKETFPIAKKEASDSGLFGRGSYKFWALAAMLLLAFWSMFTGTVSLRWSGTLNTFSHASLHDHLDVLEIEEREKLVRHMWDVYTNNRRIRLPRFWEKAFEAAYEDLTSDAADVRDVAVAEIVNMSLRSLDLQLPPRARKLSKNLKEVEKGKGATSERA

SEQ ID NO: 210140 - protein, 300 aa, Glycine max
  Clone ID: PAT_MRT3847_31785C.1.pep
MWKLRSARISYLLCRLSQIKVSEAQIKHHRFCHSQVSSVLPPPSNLQHQQTQCDPPHTAVPRNYIGENVSRKDKNKYLYTTLLELNDSKEAVYGALDAWVAWEQNFPIASLKTILISLEKDQQWHRVVQVIKWMLSKGQGMTMGTYGQLIRALDMDHRVEEAQKFWEIKIGSDLHSVPWQLCHLMISVYYRNNMLQDLVKLFKGLEAFDRKPRDKSIIQKVANAYEVLGLVKEKERVLEKYNHLFTETGPTKRHKRNSFEAKKHVHPTKEKRHQKQSRKASSEEKYKSEQKDPKLDIGHI

SEQ ID NO: 210141 - protein, 45 aa, Glycine max
  Clone ID: PAT_MRT3847_31786C.1.pep
ALRYSRTNFMTTLLAIAVRSCCSWDFGNLDNVQFGIRTLAIWSVS

SEQ ID NO: 210142 - protein, 500 aa, Glycine max
  Clone ID: PAT_MRT3847_31787C.1.pep
MASLTCSPTSLQLRLALAAPKFPHTPHLRMRNFKLNRVRPLRAAQDGGPGPGPKLDGFSGWSDTDAEQRPNNAPKKESYGGVGGVGVAGVLLLSGLTFAALSLGKQTGSRPEQHMKPLTSQQEELLSSDDHNNEITEQGNVDNTVEQGNGKMEGDVPNYDDAKPLHLNTEQHDEITSSSGSVSAEGNEPSFEERSILHHDTEQHDEITTSSGSVSAEGNEPSFEERNVPGNDLFEESSISSSVNTLVDEQVTNDNYEVDEVKSKSPNSGSFFSVPGIPAPSVVSASVQVLPGKVLVPAAVDQVQGQALAALQVLKVIEPAREPSDLCTRREYARWLVSASSALSRSTVSKVYPAMYIDNATELAFDDVTPEDPDFSSIQGLAEAGLIESRLSRRDIQLFGDGDDSPFHFSPESPLSRQDLVSWKMALQKRQLPEADRKVLYQLSGFIDTDKIHPNACPALVADLSAGEQGIIALAFGYTRVFQPDKPVTKAQAAMALLLE

SEQ ID NO: 210143 - protein, 70 aa, Glycine max
  Clone ID: PAT_MRT3847_31788C.1.pep
SVSQEQSQDRYTSPWVQAFSKWYVGTARNSQRPVEIIECLTVAREQPSQRRHSLRVYVQVKLSRGDPFIH

SEQ ID NO: 210144 - protein, 61 aa, Glycine max
  Clone ID: PAT_MRT3847_31789C.1.pep
RLHFRIKILVLCMALGHESDSVAAVEDLDGDHVGHCQLTISILAYVVERSCPMHYHAGVLV

SEQ ID NO: 210145 - protein, 129 aa, Glycine max
  Clone ID: PAT_MRT3847_3178C.1.pep
VAKQHIKQFQPNIPNQSNIPTHIYTMQPLIYSHQPSHHQLHLDHIRRQQTTHIPTYKILQYYKQHIMQTRISNNSTLPHHTIVHNILLLVHPPFHQPILHPHHRLTNIKLNLLQQHLCLRLSHFQFHKT

SEQ ID NO: 210146 - protein, 116 aa, Glycine max
  Clone ID: PAT_MRT3847_31790C.1.pep
TPRQDGVKVFLLVILLLFQAFAEASSITGVANSLEITNEGSQTVALNNEHIHLHKINCNHECSRRCSKASKRKRCKRACKSCCHTCHCVPPGTYGHKEVCPCYARLKTHGDKPKCP

SEQ ID NO: 210147 - protein, 365 aa, Glycine max
  unsure (1)..(365): unsure at all Xaa locations
  Clone ID: PAT_MRT3847_31791C.1.pep
MVLTMPLNIYLFKKIYRMCQLLITRDVPNYDDAKPLHLNTEQHDEITSSSGSVSAEGNEPSFEERSIPGNDLFEKSSISTSVNTLVDEQVTNDNYEVDEVKSESPNSGSFFSVPGIPAPLVVSTAVQVLPGKVLVPAAFDQAQVKTPCALLVSKVIEPDDQPSDLCTRREYARWLVSASSALSRSTVSKVYPAMYIDNATELAFDDVTPEDPDFSSIQGLAEAGLIESRLSRRDIXSCLVNGDDSPFYFSPESPLSRQDLVSWKMALQKRQLPEADSKVLYQXXSGFIDTDKIHPNACPALVADLSAGEQGIIALAFGYTRLFQPDKPVTKAQAAMALATGDAXEIVSEELARIEAESIAXNAVA

SEQ ID NO: 210148 - protein, 150 aa, Glycine max
  Clone ID: PAT_MRT3847_31792C.1.pep
MIVDGCFLLELLIRLGDFICNNSSSYANDPILKNEEKMVSVLNDITLLENQIPFIVLKKLYRKVFPDGSDINNYHRVADIVCKAFGYTEVKNPVHILHLMHLSTVEQTQQEGKRVKQELLRCATRLQAARVTIEAANTTAGHELVELVQF

SEQ ID NO: 210149 - protein, 100 aa, Glycine max
  unsure (1)..(100): unsure at all Xaa locations
  Clone ID: PAT_MRT3847_31793C.1.pep
VXXGGXXXXXGMXXXXXNXXNRXCTHXXXCXGXSRHXXXIRXXXVXAXVRXCXRVVXXXXXLVXXCXXXWYGGXXXXXXRMXCGRXLEQNSEXTYACXRX

SEQ ID NO: 210150 - protein, 279 aa, Glycine max
  Clone ID: PAT_MRT3847_31794C.1.pep
MTGCCFPVTFHRSGSRRVSFRLVRSSSSGSSKHRGRESHKGPLVVCFGEMMINLVPTVARVSLADATAYKKFPSGATANVAVGICRLGGSAAFIGKVGNDEFGHLLSDILKQNGVDNSGLLFDDHARTALGFYALKSNGEPEFMFYRNPSSDVLLRPDEIDMDLIKKATIFHYGSVSLIKEPCRSAHLAAMNAAKVSGCFLSYAPNLALILWPSKEAARRNIMTIGEVSQGILRIKQRRLMKEDTMSFASSNFSRSVSQIEEQQVELSKITPMNHREMG

SEQ ID NO: 210151 - protein, 71 aa, Glycine max
  Clone ID: PAT_MRT3847_31795C.1.pep
LPFSLRYYQNSKSKPTPKVRSPPGSFCIHANHLSTLDEEEEAVKQRWILLTQDHKLPFHQESCLTEKEPFR

SEQ ID NO: 210152 - protein, 300 aa, Glycine max
  unsure (1)..(300): unsure at all Xaa locations
  Clone ID: PAT_MRT3847_31796C.1.pep
MERVAEPTVLPRTLPILVEVSNSRTAAARESGQRLNRQEVSGVGGISLREVNQLSRTRDVRVPITHLASLREVAQLTNARIYLVQEDTGFDARSSEESLTFEPTMAWKGNGSSPEEAKEFVPDVETLKGSNDSFEDGGLSLFAGASHPPXPVDTDLMRLVCVPIGQNKSEAGCLIKNLPTQGPFLEDLSVRVPAKKPSXSVLCSEERLVEELTGIGTLSFLGPRTSHNTENSILLVDAGEKECVCDASLPASGIVSPLSSIDSIXIGTAMSIANTCASTYRTDAVTIDGMLSLDRTCGSA

SEQ ID NO: 210153 - protein, 61 aa, Glycine max
  Clone ID: PAT_MRT3847_31797C.1.pep
NFTVFFGEGPKPFFFSTLKSITILLNPPFFNFSIIGKGLFIGTFHIKKNGSWFHAFPPQFF

SEQ ID NO: 210154 - protein, 120 aa, Glycine max
  unsure (1)..(120): unsure at all Xaa locations
  Clone ID: PAT_MRT3847_31798C.1.pep
QRGAFQSREANTHAREGGREKESPGATGKEPSQEPNAPDVAKTQGDHFTATIIGGTGSRTDAXEPVRISPDTKPLGRIYHHADGAAKPGSMPPNVTAADNGAATAGTLSGQLLXGWPGDK

SEQ ID NO: 210155 - protein, 122 aa, Glycine max
  Clone ID: PAT_MRT3847_31799C.1.pep
LNKKNRIFKKKTKTNTDGWSFIFFGGSGSDGPCLLPHSLGLPPFFLVSRLLNPGALAFPRVVWDSPCFPLPHFPWGPFPVGPAGCFRPWPVPWALHDCWALCWEVVSRPVLFFLTRRVRVFL

SEQ ID NO: 210156 - protein, 193 aa, Glycine max
  Clone ID: PAT_MRT3847_3179C.1.pep
MYPTVDEHDEVYAAHHRHPGYVLPVVVPPNYGPPQIPSYAPPYISNSVSVRGPVIRTQRWSTGLCRCTDDPGNCLVTCFCPCVTFGLIAEIVDKGNTTCTYAGAIYGTLLALSGLACLYSCYYRSKLRVQYDLPEAPCMDCLVHFCCETCALCQEYRELKNRGFDLSIGWEANMERQRQGAIVSPVMSQSMTR

SEQ ID NO: 210157 - protein, 82 aa, Glycine max
  Clone ID: PAT_MRT3847_317C.1.pep
GKSNIISRFNGHRTRAKFLSWETEDQLVVTLLSLFPKALEYGVRNISPRIAEVHSIPYRSVNKILNRESQEEDPIVQVQGFV

SEQ ID NO: 210158 - protein, 52 aa, Glycine max
  Clone ID: PAT_MRT3847_31800C.1.pep
SKNPIGEGKEGQKVTGINRWMTDRSLVAIEMALKTHMVGLMNDDTIHPYLPI

SEQ ID NO: 210159 - protein, 90 aa, Glycine max
  Clone ID: PAT_MRT3847_31801C.1.pep
SAIGFVGHLDAEQEQFFFIQTKNLKLQRVGMFDHVLGDISDKDVPSGCNNRPSTCLSKDRSHDVDFQRSIFRGCKKSDNDTVINVVCSSK

SEQ ID NO: 210160 - protein, 91 aa, Glycine max
  unsure (1)..(91): unsure at all Xaa locations
  Clone ID: PAT_MRT3847_31802C.1.pep
YPFSLCISLPXPFKMQIFVKTLTGKTITLEVXSSDTIDXVXXKIQDKEGIPXDXQRXIXAXKXXEXXRXXXDXNXQXXCTLHXVLRLXXGQ

SEQ ID NO: 210161 - protein, 55 aa, Glycine max
  unsure (1)..(55): unsure at all Xaa locations
  Clone ID: PAT_MRT3847_31803C.1.pep
LTYSLRDRQFWTAVHSQDYGKDYQXPAPALLVDPTEITLWSFYLALIAFFVVTFM

SEQ ID NO: 210162 - protein, 69 aa, Glycine max
  unsure (1)..(69): unsure at all Xaa locations
  Clone ID: PAT_MRT3847_31804C.1.pep
YPSFLSVFFLWYHITYYIYHFSLCYFFLYQGIDXYQGVHGTFSVEKAPTYPKRKSQATSQLLXFSRSNK

SEQ ID NO: 210163 - protein, 62 aa, Glycine max
  Clone ID: PAT_MRT3847_31805C.1.pep
SYNERGNCTLSKWAVQSVESAACSHSQPDGPKTKEQSRDQDPRACVLRLKARRPVMRVTTRK

SEQ ID NO: 210164 - protein, 52 aa, Glycine max
  Clone ID: PAT_MRT3847_31806C.1.pep
EREREREREREREREREREREREREREREREREREDSLPLSFILNKTPLIVS

SEQ ID NO: 210165 - protein, 198 aa, Glycine max
  Clone ID: PAT_MRT3847_31807C.1.pep
MEFVGKTVRKEVKGVGFITGTVKSYDPSSGFFEIVYDDGDSEELESSQVASLLQFQPGSVKAKPRVGRKPKKRRRRVEQKPDAEASSGNVGDNLVEEGSAFRGDLDGNVSSASGGDLDLGCEGIDRTIDVDVGNGGNSIGNVNGSVKENGGGEEIGFEDGLNKSVSANGSCVKDGLDLNARLNLNEDFNLNDACSLPL

SEQ ID NO: 210166 - protein, 73 aa, Glycine max
  Clone ID: PAT_MRT3847_31808C.1.pep
RQRQSRNNVSIEKDISKKKIEPTKINPHDIITKKAFNYISPKQNCPLNQNEMNQSNFTFCWMSIRDRKTQEYV

SEQ ID NO: 210167 - protein, 37 aa, Glycine max
  unsure (1)..(37): unsure at all Xaa locations
  Clone ID: PAT_MRT3847_31809C.1.pep
KMVNNXKLXDSKPNSFILFXSSKSEFVMTCLSVDKFN

SEQ ID NO: 210168 - protein, 147 aa, Glycine max
  Clone ID: PAT_MRT3847_3180C.1.pep
SVSVRGPVIRTNRWSTNLCHCTEDPGNCLVTCFCPCVTFGLIAEIVDKGNTPCTYAGAIYGTLLALSGLSCLYSCYYRSKLRAQYDLPEAPCMDCLVHFCCETCALCQEYRELKNRGFDLSIGWEANMERQRQGAIVSPVMSQSMTR

SEQ ID NO: 210169 - protein, 149 aa, Glycine max
  unsure (1)..(149): unsure at all Xaa locations
  Clone ID: PAT_MRT3847_31810C.1.pep
XGSSRAAAWFFFFFFFFXHYSKICILRLFNSTHPHSNDSIPQQSHTITTAILAGKNIIYCKSITKNKIVNKMIQWEGSIIHLDNSDTAQKKAKFYTRFYCLNWKGNLGKEIQFQDQVTNIERVEDGGEMHITRALHQIYCIFGYSTTTS

SEQ ID NO: 210170 - protein, 261 aa, Glycine max
  Clone ID: PAT_MRT3847_31811C.1.pep
MADPKAYSIVVLLHFFPPPPPPPQLPPRMAATATAEAKTYWCHECDMSVSLTLPPSPLLCPHCHTHFLELMDSPSLSQENDAESSLFDVVFQDALLLLNPNPNPNPKPLPSKPLPLPSLYVTPSLLSSLDPNGVVLCAVCKDQITLNAQAKQLPCQHLYHSDCITPWIELNSSCPLCRFRLEEEEEEGGDADADADAVMTEIRREIIARLTELTEEDFYGLRTTLSHIASRHALIEENQNHRAQIGEPRGGGGGGGGDSAC

SEQ ID NO: 210171 - protein, 112 aa, Glycine max
  Clone ID: PAT_MRT3847_31812C.1.pep
MWSTLICIYVTSTSEIITSVSSDSLVIQDVLSEKYAFYFLVVGAAIWASSWAEISCWIWSGDRQSTTMILQYLVLEASQEGSEKKKKPCSISLKKVGLRISLLFVSQEKGCV

SEQ ID NO: 210172 - protein, 75 aa, Glycine max
  Clone ID: PAT_MRT3847_31813C.1.pep
SYKYSTTNFNKTFLKNTLQEKKPPVIKLKHKISRQLEAIICKRSDIDIVLETRFKSTFTNMRLHQEDNQTNVGVQ

SEQ ID NO: 210173 - protein, 87 aa, Glycine max
  unsure (1)..(87): unsure at all Xaa locations
  Clone ID: PAT_MRT3847_31814C.1.pep
QYLRSPPLFQXPTPCRLARXXCAVGSSRARPSSAGGSGARPXASLPEXSYVRHPSSSAQLHGPQSWRGRLLRARGRSAALHSWSAWL

SEQ ID NO: 210174 - protein, 220 aa, Glycine max
  unsure (1)..(220): unsure at all Xaa locations
  Clone ID: PAT_MRT3847_31815C.1.pep
MGRDQKSVVAMVGQERKTNKKNGSLGFRSIFMHADGKDLFLMVLGTIGAVGEGLTTPLVLYISSRMMNNIGSSSNMDGNTFIHSINKNAVSWLYLAGASFAVCFLEGYCWTRTSERQAARMRCRYLKAVLRQDVEYFDLHXVTSTSEIITSVSSDSLVIQDVLSEKVPNFLMNMSLFVGSYIAAFAMLWRLAIVGFPFVVLLVIPGLIYGKTLIGLSSKL

SEQ ID NO: 210175 - protein, 202 aa, Glycine max
  unsure (1)..(202): unsure at all Xaa locations
  Clone ID: PAT_MRT3847_31816C.1.pep
MHNNMSTLSFFILLSTLLTVGYGGRDLGDKNPFTPKAYVARYWDKHVRNNLPKPSFLLSKASPMSASDTASFAKLAATNKLSTRLPEFCSAAHLLCFPEVRPSLEKHTEDAGFQTYNDGQNFTNYGTDFAGGIDTFKNYSNEISTTPVNDFRRYNRGAPGHQERFSAYASDSNVADQSFXTYGTNAARGSXEFKNYSSNSHV

SEQ ID NO: 210176 - protein, 48 aa, Glycine max
  Clone ID: PAT_MRT3847_31817C.1.pep
ISPSLIFYSHHKLFVHSYAEPRILSPYYTISMYENQILGNNIVQNERK

SEQ ID NO: 210177 - protein, 51 aa, Glycine max
  Clone ID: PAT_MRT3847_31818C.1.pep
QHQPIFTKPALKNNRGQHFFFHQSHERVLQIAGMSNNLSPPPHLTFLLEPQ

SEQ ID NO: 210178 - protein, 67 aa, Glycine max
  unsure (1)..(67): unsure at all Xaa locations
  Clone ID: PAT_MRT3847_31819C.1.pep
ISRVLNIICHLSKFFTPVATRLRNPVISLSFIYIXKIGGCRKFVLNHLTVCISSPFSLLNHCVCLXL

SEQ ID NO: 210179 - protein, 174 aa, Glycine max
  unsure (1)..(174): unsure at all Xaa locations
  Clone ID: PAT_MRT3847_3181C.1.pep
GGRLELEIDRNARLXSRVSRKHIISILVXISYGLELEAKFYTTVCYPEIVDSFLHDRDKKKIGSKXNATLKLYLQCACXAGDPAFSECLCXELQMNVFQPRXNYPRIARPNINQKLNPDIPENNPXFLPRRILTAVRHLIRKKLGKCILDNINRLRNKRMSSVADLLXDQFGLA

SEQ ID NO: 210180 - protein, 57 aa, Glycine max
  Clone ID: PAT_MRT3847_31820C.1.pep
NKTFALPVNPYILKEGSIPISIDVLRKDLPSDFGTTSFFIERLQVHVCMLSVLLVFL

SEQ ID NO: 210181 - protein, 64 aa, Glycine max
  Clone ID: PAT_MRT3847_31821C.1.pep
PGTQFCHPRRSATSLVLSMREPFYHSVQTVFSTTPISFPPRITKSSSCAPLHFPQAQSVRPKCQ

SEQ ID NO: 210182 - protein, 87 aa, Glycine max
  Clone ID: PAT_MRT3847_31822C.1.pep
FLKGGAREGYAFGPQPVLSPPPIKRVSGGFFPGGVFPTPLPGAEKNYFPPVTIFSGANQLGETIWGGQKTSSVRRIFRETIPKPLWG

SEQ ID NO: 210183 - protein, 141 aa, Glycine max
  unsure (1)..(141): unsure at all Xaa locations
  Clone ID: PAT_MRT3847_31823C.1.pep
FPRPVQIPLMGQAEILSSSASDSRTAKASKNCLPQATAMHVGAIEIIIASHTRPDCYIVGALLLVETYHTNAVNAVRSIYVAPFIGGRPIRVQAQAGDNLALGPPLYXMVQTSRAATNGDVVQGKDLAMVNAXVACAAVGL

SEQ ID NO: 210184 - protein, 57 aa, Glycine max
  Clone ID: PAT_MRT3847_31824C.1.pep
LSFQHFPFHFMCEPTRFSMRSTYPCKAHFCSLASLAPCYHLLLCYFYCCCNNSSFSE

SEQ ID NO: 210185 - protein, 147 aa, Glycine max
  Clone ID: PAT_MRT3847_31825C.1.pep
MGTDNEGTFTTHQVSGGDPNNNNNNSNIVHPLEVGSDGGGLTNWAALDRLVASQLNGQTDASRQLGCAFNDPTMYCTSVDHHDLHHQIPTLRSSSTSANTRPSPAPAFINPPTQDFTSEIDLWNFTRSTSSLLASSEPLCHVSNTSV

SEQ ID NO: 210186 - protein, 125 aa, Glycine max
  Clone ID: PAT_MRT3847_31826C.1.pep
QGRQSVRLSGGEGNSPRRLDRGIINGDTTSARAWRPVLARWFLEAIPPSDAPRTASTPASQAHWSGSAPAANHARAPPGPIKPFIGAGKKAYLPVHVEGSSWSLFRWCRRVFPSVSKTKQEKKKR

SEQ ID NO: 210187 - protein, 57 aa, Glycine max
  Clone ID: PAT_MRT3847_31827C.1.pep
PREAMTVHAELHPDLAMYIGFLEGCPLGPTHDIQGQPSIESWITVKSKRFVLPSLRN

SEQ ID NO: 210188 - protein, 62 aa, Glycine max
  unsure (1)..(62): unsure at all Xaa locations
  Clone ID: PAT_MRT3847_31828C.1.pep
GKATKIFIFIVTVLVVVGIVFXFSLMRRNHHHNNAAKCSDAACNISPPLSPITTLPADSNPY

SEQ ID NO: 210189 - protein, 135 aa, Glycine max
  Clone ID: PAT_MRT3847_31829C.1.pep
PGAVHPHNSLIVGTNKWLNTTVPNAPRLRHLVEFWNKPLKLLKLPLVFLVLRNLLKRAHNDDTALQTLMAAARGHGPKLAGHAPAALWHPLIAAQHYDTAALNHEFSANMELPMACNTNNNLGPRNLGTSMFLKF

SEQ ID NO: 210190 - protein, 224 aa, Glycine max
  Clone ID: PAT_MRT3847_3182C.1.pep
MGKYMKKAKPKGELALVESTTSNTTTSYMGVRTRAKTLALQKSHAQQHELAATSDSYLQLRSRRLQKPPILVHSPKRPKHPNPKSPIPEPPRLGLASERDATLNHNKDNTLHENAEPQEASFGENVLDFEGRERSTRESTPCSLIRDSDTVRTPGSTTRPTCSAEAYRRTEHAARRQIPTSREMDEFFAEIEEAQQKKFIEKYNFDPVNEKPLSGRYEWEKLKP

SEQ ID NO: 210191 - protein, 379 aa, Glycine max
  Clone ID: PAT_MRT3847_31830C.1.pep
MRKSYTFQRVPLLLLLCFCFANSAAVTANEDSTAGTEVNIDGKPLHTKPFPIEEKTLPIPLFKPLPKLVPIVTPIPNPLPIPVFQKPIPKWIPDIKPIPNPIPIPVFPIPVFKKPIPDVMPIPKPSPIVEKPKPKPKPCPVAEKPIPTPVIKKPIPKPIPIVKPIPKPSPIVKKPLPIPVIKPVPKSTPTVKPVPIPVFKPIPKPFTIVKKPLPIPVIKPVPVPVPIIKPIPIPVFKPIPKPFPIPLFKPIPKPFPIPFFKPIPKPIPTVKKPQPIPVTKPLPNPVPVVKPIPKPTPMVKKPLPIPVTKPIPKPIPIVKPIPIPVFKPIPKPIPIVKKPLPISVTKPIPKPVPIIKAIPIPVFKPVPIIKPIPIPVFKP

SEQ ID NO: 210192 - protein, 101 aa, Glycine max
  unsure (1)..(101): unsure at all Xaa locations
  Clone ID: PAT_MRT3847_31831C.1.pep
IVPQPYPVPLPPSXPPSSPPPLSPSPLLNVNPTPDAXPHAPPPLSHIDCPSHHPSPPXIPPPPPPPPPPPPPPPPPSPLPPPPTPPPPPSPPPLSPPLPPP

SEQ ID NO: 210193 - protein, 135 aa, Glycine max
  Clone ID: PAT_MRT3847_31832C.1.pep
PTCSAGKAFPNKSGFVDRLVLAYTQEFFDGNFPVDSWVPIFVNCLYPVSQLPSEAGVVNVTCGTGRGGLPTSAWIRTGVGKRSSDVNRWCCAGLGNGKKNGLLTRVGLSPVALLAVVFGVKNEIWRSNAIYPWRA

SEQ ID NO: 210194 - protein, 118 aa, Glycine max
  unsure (1)..(118): unsure at all Xaa locations
  Clone ID: PAT_MRT3847_31833C.1.pep
DKSSATLPLIKLADRDCLKRNFKPMSNVSWVAPDDMASLWSQLHYVXCHNMAMQEAYVGNLLHVLRELYLHSPNEAPQLRRKALSLIEWLQKADVPTIAQIEXFHSMQMMMNAPDSND

SEQ ID NO: 210195 - protein, 40 aa, Glycine max
  Clone ID: PAT_MRT3847_31834C.1.pep
KKRPPRSGKFYLFSNYFFLSLLKVLVYSNLFLQHKVFSTS

SEQ ID NO: 210196 - protein, 79 aa, Glycine max
  unsure (1)..(79): unsure at all Xaa locations
  Clone ID: PAT_MRT3847_31835C.1.pep
XXXXXXXAMGXGVVXXPTRFSSFFQMXXXTISPXVIERSSKKPXXKLXHXXXAXNEXAEVXVSHPKRHXHRRNRARDVE

SEQ ID NO: 210197 - protein, 251 aa, Glycine max
  Clone ID: PAT_MRT3847_31836C.1.pep
MEFEDQEEQEEELCMGGGAGYDPTQMKIPVAAEPVRSSSSNGGGCGRARYRECLKNHAVGIGGHALDGCGEFMAAGMEGTLDALKCAACSCHRNFHRKEADSSAVVSLSGGDPYFLPHHHHHHHPPPPQFSGYYRHPAGYLHMGGQLRSAVGGTLALPSTSGGGGTQSTREDQEDISNNPSAGGTGSKKRFRTKFTVEQKDKMLELAEKLGWRIQKHDEAVVQAFCDETGVKRHVLKVWMHNNKHTLGKKP

SEQ ID NO: 210198 - protein, 34 aa, Glycine max
  Clone ID: PAT_MRT3847_31837C.1.pep
ELPLWPREPVVPIAKEAAGTAALEINEQNTEHTN

SEQ ID NO: 210199 - protein, 160 aa, Glycine max
  unsure (1)..(160): unsure at all Xaa locations
  Clone ID: PAT_MRT3847_31838C.1.pep
QLEAQHRWLRPAEICEILRNYRMFQITSXPPNRPPCISLFAITXRSSASMVTTCRNWXKKNVIIGCLVSHQKPHNRTTKWFTFYYAHGEENENFQRRSYWMLELDMMHIVFVHYLDVKCNKTNIGGKTYSDERTSNSPKSKPLSSGTGSDYHSIRPLRTG

SEQ ID NO: 210200 - protein, 65 aa, Glycine max
  unsure (1)..(65): unsure at all Xaa locations
  Clone ID: PAT_MRT3847_31839C.1.pep
SDLEAPLRPKRKKVGVDYFXSVAXILDIFGGAHIAFTMFLLTYLGDVRSERKSYRTRQKEHDENV

SEQ ID NO: 210201 - protein, 241 aa, Glycine max
  Clone ID: PAT_MRT3847_3183C.1.pep
MTTGDLLSIEPLELKFLFELKKQISCSLILSNKTDSYIAFKVKTTNPKKYCVRPNTGVVMPQSACDVIVTMQAQKDAPADMQCKDKFLLQSVKVDDGTTAKDITAEMFNKEVGHVVEECKLRVVYVSPTQPPSPVPEGSEEGSSPRGSVSDNGNASGADSAAVARAFVERHEAQEKISEARALSQGGLKKRNNAIQQNSKLPQELELLKREGNKSRGGVSFVIVVLIGLLGIIMGYLMKKT

SEQ ID NO: 210202 - protein, 84 aa, Glycine max
  Clone ID: PAT_MRT3847_31840C.1.pep
RTDYFGIMPVSGHEETGVKSYAGKFSGLIAGVPIKKRRFPTIQPSSAPVSEEPYSLTEETELQRKENSSTSQGPTLPNVAGAPI

SEQ ID NO: 210203 - protein, 81 aa, Glycine max
  Clone ID: PAT_MRT3847_31841C.1.pep
YYFLLYRYTEIKERERDSFLSLSRSFLVVSSTLQSLLDPKPFFLCFLSFFPQPIRSMLLLCLYLGSESKARIIFTSKGEAF

SEQ ID NO: 210204 - protein, 85 aa, Glycine max
  unsure (1)..(85): unsure at all Xaa locations
  Clone ID: PAT_MRT3847_31842C.1.pep
LVCGVLVLCSAGLVFVLPFPFFGYEXXLXXXPFPRLPSPPPPXXPXAAPRPPTPPPPXPPPRPPPXPPPPXXXXXXPPPPPPPPP

SEQ ID NO: 210205 - protein, 397 aa, Glycine max
  Clone ID: PAT_MRT3847_31843C.1.pep
MEGLINGFINVALGADGGDREEQQHGRDDRSRSSWAEVVSQDQQDHPLPHHQHKEQYRPQYEEPQSQSSYKPQKVDEGEDGWQTVGRKPSRHPHKVQKDNWNSYKRPADEQEYSNEVEVGADVEPSEDELADLSRACEKLWALDLNRLIPGLHYEIDCGEGKKVYQKEDMAQGSLFTWVSDDVFRKPTFARFLSLLDNYNPHQGCKEVVTSEERQEQASFIEEISRTAPIKYLHKYLASKQIVSGNYQDFKRMITSLWFDLYGRGGTSGSSSAFEHVFVGETKQCGEVSGFHNWLQFYLEEAKGRVDYQGYIFPRRRGETPDSEAQLLTIQFEWNGVLKSVSSTLVGVSPEFEIALYTLCFYVGREDNHIQLGPYGVNIKCYRLGDRIGSVFPIADS

SEQ ID NO: 210206 - protein, 100 aa, Glycine max
  Clone ID: PAT_MRT3847_31844C.1.pep
VNICGIVFCNYLIFKVLGHRNLQPDSEAQLLTIHFEWNGVLKSVSSTLVGVSPEFEIALYTLCFYVGREDNHIQLGPYGVNIKCYRLGDRIGSVFPIADS

SEQ ID NO: 210207 - protein, 327 aa, Glycine max
  Clone ID: PAT_MRT3847_31845C.1.pep
MIGSFLTWALVMVFGYAYPAYECYKVVEKNKPEIEQLRFWCQYWILVAVLTVCERVGDTFISWVPMYSEAKLAFFIFLWYPKTKGTTYVYDSFFRPYVAKHETEIDRNLLELRTRAGDIAVLYWQRAFSYGQTRIYDILQFVAAQSTPAPRPAQQRPGVRVRQPAPAKPAAAAAAEPQVEEPPSPTSSTSSSLLQREVEEELGSSPQVPKAPPSSVASLSNQKTPVAGLSTQKSAGASLSTQKSTGVSLNIQKSTGASLSTQKSNVAPETTNHFAQAEAEPKQIEAAPSSCKRKWESPPTSTKETLMEESIRVTRGRLRKTRSAGTR

SEQ ID NO: 210208 - protein, 42 aa, Glycine max
  unsure (1)..(42): unsure at all Xaa locations
  Clone ID: PAT_MRT3847_31846C.1.pep
IGAGYLGRPTMTFIALKCPSIEVXVDIYKCRIAAWNSDHLTI

SEQ ID NO: 210209 - protein, 97 aa, Glycine max
  unsure (1)..(97): unsure at all Xaa locations
  Clone ID: PAT_MRT3847_31847C.1.pep
VQKDNWNSYKRPADEQEYSNEVEVGADVEPSEDELADLSRACEKLWALDLNRLVPGLHYEIDCGEGKKVYQKEDMAQGKLVYXWVSDDVFRKPTFAR

SEQ ID NO: 210210 - protein, 76 aa, Glycine max
  Clone ID: PAT_MRT3847_31848C.1.pep
SPILLFLHYFKRLSFMIVVLIVLVIYLSYSLSYLLCLLFVLMFMFLYCFLYFLLIILFIFPFLTIFFFFLIYFIFF

SEQ ID NO: 210211 - protein, 71 aa, Glycine max
  Clone ID: PAT_MRT3847_31849C.1.pep
CEPSCECTKFGGNADLCFLASTWNMSSFNNEYSLNEWKSAKNMTMSTYCITLSSQCQKLKRCFDLHGSSGR

SEQ ID NO: 210212 - protein, 44 aa, Glycine max
  Clone ID: PAT_MRT3847_3184C.1.pep
GSLIDKLFLLYSSSFLLAINKWVSGITIIHNHRHKSIRHDQDQD

SEQ ID NO: 210213 - protein, 111 aa, Glycine max
  Clone ID: PAT_MRT3847_31850C.1.pep
FTYPILQAWDCVHMYHRNGFQLQVGGSDQYGNIIAGIDAINYVRDTILDPVVREAVWDLEKPQDNYMKDPYGLTVPLLTTSSGEKFGKSAVNAIWLSPEMTPSFDLYGFWI

SEQ ID NO: 210214 - protein, 122 aa, Glycine max
  Clone ID: PAT_MRT3847_31851C.1.pep
YRRPDRGNLLYRTIKGLNPGRSEAHAMREERDHQCKWIDLSIDFEGDNMKHENRASHFLSLIMLQATTIKYALGCMPLSPTHRPDLGLKYPSSAKTKKRTIGILVLGLALFYTNSITSAEQG

SEQ ID NO: 210215 - protein, 104 aa, Glycine max
  Clone ID: PAT_MRT3847_31852C.1.pep
KRWDPAPEGPPSLWLSPTGGNFLRKETLTLGFNLWAGGSEWVVSLGVVFAFFFLFPMSFRGLRCNGYHLKPFPLESFLSFLKYRYHVGRIIKVIEVCYKNHKKI

SEQ ID NO: 210216 - protein, 100 aa, Glycine max
  Clone ID: PAT_MRT3847_31853C.1.pep
VMIQFQITERRRIGLFSVLMREDLMINFKCKTGPLCQASPNLKRVSLGTKVRLLALKGCNLIREIFSPLVSRDVNRARRGRGVLPNSHSPPPTNPPSPIP

SEQ ID NO: 210217 - protein, 114 aa, Glycine max
  Clone ID: PAT_MRT3847_31854C.1.pep
QSSNLLPSSGHSAGDTPPHKQSAYDEAAEYQAISVIMPDLPFEQLVTEIHTRIHATSATMDTNIDSNMSGDIAPTKDPSGKLDDIDHAIDQPNILINPLHAAQAHSQDSSTSAH

SEQ ID NO: 210218 - protein, 100 aa, Glycine max
  Clone ID: PAT_MRT3847_31855C.1.pep
SKWILPSSSHQRENESSLRMPGPRLSLPTSSITVNSTFSESNSLCTISYCISSYIHVYTLPSSLCLISSLATKSSNISKLRRITQLVHGPLIRHRTCFYN

SEQ ID NO: 210219 - protein, 76 aa, Glycine max
  Clone ID: PAT_MRT3847_31856C.1.pep
GLIPVHGFDQSDCFFKFCSTSEGWYADRVLHECGQENQLKMFFGDICMDEVRIFLLPSVFSFGMMSYFESRFLILT

SEQ ID NO: 210220 - protein, 64 aa, Glycine max
  Clone ID: PAT_MRT3847_31857C.1.pep
SILLLNSLYIYINIFCQCSFLPLTTPLSVKQELHVLLINYTPKLNFQSLNYYFSFIYSHFLKNY

SEQ ID NO: 210221 - protein, 229 aa, Glycine max
  Clone ID: PAT_MRT3847_31858C.1.pep
HEQQRALREFEACVLLWLFFMSSDPPFFHKIISNAWKSIAIPTFGYEGNLPLSLPSIAIPTFGYEGNLPLSLPSIITRTRSLTLALPQNHGSEALPMYHFINATETEKLDYNPKKRASNLSAKIVCMIFAALANQTMSTPQNQPSILGPAIVIAFVASLFVMLVSKNDTIKPSYLRLVAIMEITGSLSFTLIFWLMTKPFFSGNLTLWIIMGVLAMACNMLALCIRFST

SEQ ID NO: 210222 - protein, 35 aa, Glycine max
  Clone ID: PAT_MRT3847_31859C.1.pep
KNGQFHEQVSNDMQTDEKVIRDRNPSSGRLTCAQA

SEQ ID NO: 210223 - protein, 126 aa, Glycine max
  Clone ID: PAT_MRT3847_3185C.1.pep
MESRTNADSFWTWNANNDNNQKQFSVTKFLGNNKPPKPQTSVLGPGFGAGIGCGAGIGLGLVGGFGYGGWPFNHMHLVFGLGMGCGVGVGFGFGQGIGYDFNFRTRKSRKSKKNFSDPQNTIVIQI

SEQ ID NO: 210224 - protein, 109 aa, Glycine max
  Clone ID: PAT_MRT3847_31860C.1.pep
NKVNCFHFKQKKKKKKKKKKKKKKKKKKKKKKNKQKNKKKYGRPKTGDRPNHEINSEPVPPGVPIFHIMNLMKTGINNGQTLQPGQKCYQLKIPHKIQPDNIKCQPWDA

SEQ ID NO: 210225 - protein, 55 aa, Glycine max
  Clone ID: PAT_MRT3847_31861C.1.pep
LKTFGRYKSYTTHKGRCFFYCGQATRQLEGENTKSSVLAGKAMISTPIFLPSLLE

SEQ ID NO: 210226 - protein, 38 aa, Glycine max
  Clone ID: PAT_MRT3847_31862C.1.pep
KIRPQMEHGTIMFAFDECSLTHLNKRSFITGTKIRPHK

SEQ ID NO: 210227 - protein, 72 aa, Glycine max
  Clone ID: PAT_MRT3847_31863C.1.pep
PYKPIIHTLSNNQTEFKNILYRNSNHYITLVETPTYKTIPSYPLPNIRITSIPPFPLYTTLQPYLLFPQIYS

SEQ ID NO: 210228 - protein, 56 aa, Glycine max
  Clone ID: PAT_MRT3847_31864C.1.pep
GLHNRGLDNVSETVSEVDTHVRRSHVIITGKSSGLQMFPAVIVSQCSPAYEKHPGY

SEQ ID NO: 210229 - protein, 95 aa, Glycine max
  Clone ID: PAT_MRT3847_31865C.1.pep
AVRTRVRKRQKGAEKGTTNMRWMETRAGAGSHIRECSALWETLIVTLDIFFLRRAKRIGIDVGDVAMHPRDTKCAHAQSPSNEHGKITSRHSSQN

SEQ ID NO: 210230 - protein, 53 aa, Glycine max
  Clone ID: PAT_MRT3847_31866C.1.pep
GRGPYEESLRKPEAWYNNTKNSSSRKLIKGLWSSEEDDRFMNYMLNHGHGWLE

SEQ ID NO: 210231 - protein, 65 aa, Glycine max
  Clone ID: PAT_MRT3847_31867C.1.pep
KVECQHNMNCMRGRVGYKTILVLPSNLSFWNTRFMATSLYKTVLTVRILLISLQKLSNKAMKARA

SEQ ID NO: 210232 - protein, 76 aa, Glycine max
  Clone ID: PAT_MRT3847_31868C.1.pep
APAAKPKPAPKAAAKPKPAPRPAPKARPAKAAKTSAKDAPAKKAAAPAKKAIVPPPAKKAVPAKKAVPAAIPKKAV

SEQ ID NO: 210233 - protein, 116 aa, Glycine max
  Clone ID: PAT_MRT3847_31869C.1.pep
DPRVRLVRSVSTLPFSFFFSFYSLVLPQTPPNQPPFACPKTSVYKLRSSCCLAPQTRIRPLAIVPLLRNTDHSQLPSRSLHLTWSWLNSAALPRRLHRRLCVTPARGSSRAMNSTP

SEQ ID NO: 210234 - protein, 59 aa, Glycine max
  Clone ID: PAT_MRT3847_3186C.1.pep
SAEQRSSVFSRSFFHCHRGTSEGLPIHRRLCCPAPKLSHLLPHCLDWRPSRLPMTGPVH

SEQ ID NO: 210235 - protein, 386 aa, Glycine max
  unsure (1)..(386): unsure at all Xaa locations
  Clone ID: PAT_MRT3847_31870C.1.pep
MLRGLFVFGGTCCRRLTLARQSTQKQKQWWDHLHHHLRSKNLHWAGLMESNGNSVKDAEKQITRVLFCGPRFPASHEYTIEYLQNHSHIKVDVLPLEDVPKDIANYHVCIVKNMRLDSEIISRAVQMQLIMQYGVGLEGVDIDAATKHGIKVARIPGDVSGNSASCAEMAIYLMLGLLRKQNELQVSIQQKKLGEPITETLLGKTIFILGFGNIGMDLAKRLQPFGVKVIATKRSWASYAQHASKLSRNDAEDLVDVKGSHEDIYEFARKADIVVCCLTLNRETAGILTNKFISSMKXGVVNVACLVDYEAVXQLESGHLGGLGTDVAWTEPFNPDDQIFKFKNVIMTPHVAGVTEHSYRSMAKAVGDVVLQLHAGLPLTGIELVN

SEQ ID NO: 210236 - protein, 185 aa, Glycine max
  Clone ID: PAT_MRT3847_31871C.1.pep
MGLLSIIRKIKRKEKEMRILMVGLDNSGKTTIVLKINGEDSSVISPTLGFNIKTITYQKYTLNIWDVGGQKTIRSYWRNYFEQTDGLVWVVDSSDLRRLDDCKFELDNLLKEERLSGASLLILANKQDIKGALTPEEIAKVLNLEAMDKSRHWQIVGCSAYTGEGLLEGFDWLVQDIASRIYMLD

SEQ ID NO: 210237 - protein, 44 aa, Glycine max
  Clone ID: PAT_MRT3847_31872C.1.pep
LITLGDQEPRWQVGKLYTPADAVAQGLKSLSLNDTKILARTISD

SEQ ID NO: 210238 - protein, 117 aa, Glycine max
  Clone ID: PAT_MRT3847_31873C.1.pep
MLRGLFVFGGTCCRRLTLARQSTQKQKQWWDHLHHHLRSKNLHWAGLMESNGNSVKDAEKQITRVLFCGPRFPASHEYTIEYLQNHSHIKVDVLPLEDVPKDIANYHVCIVKNMRLD

SEQ ID NO: 210239 - protein, 226 aa, Glycine max
  Clone ID: PAT_MRT3847_31874C.1.pep
SASCAEMAIYLMLGLLRKQNELQVSIQQKKLGEPITETLLGKTIFILGFGNIGMDLAKRLQPFGVKVIATKRSWASYAQHASKLSRNDAEDLVDVKGSHEDIYEFARKADIVVCCLTLNRETVGPFFISSMKKGGLLVNVARGGLVDYEAVINHLESGHLGGLGTDVAWTEPFNPDDQIFKFKNVIMTPHVAGVTEHSYRSMAKAVGDVVLQFHAGLPLTGIELVN

SEQ ID NO: 210240 - protein, 73 aa, Glycine max
  Clone ID: PAT_MRT3847_31875C.1.pep
SGTAVSASPSITLSSSAVASESQARFGFVWCDAAEIQQRREVTAPPSTVSPSKVTADRDLKGLGRVEGAHLQT

SEQ ID NO: 210241 - protein, 44 aa, Glycine max
  unsure (1)..(44): unsure at all Xaa locations
  Clone ID: PAT_MRT3847_31876C.1.pep
MATTNPXDTLGDDALDPSQLIASEQLKAMAATATAPPKKDQDKP

SEQ ID NO: 210242 - protein, 93 aa, Glycine max
  unsure (1)..(93): unsure at all Xaa locations
  Clone ID: PAT_MRT3847_31877C.1.pep
MGRVEYSPLFETRRCRGRFIYRSFAISLFVTICFIWHYRFXHITKGEDGNWAWLGMLASELWFGFYWVLTQALRWNLVFRQEAFGDISLFGHI

SEQ ID NO: 210243 - protein, 49 aa, Glycine max
  Clone ID: PAT_MRT3847_31878C.1.pep
WTLCIDHSRMRMDFFTCIIAPKKPLVRTSCKILNSVTYCIQPFVKWLLS

SEQ ID NO: 210244 - protein, 645 aa, Glycine max
  unsure (1)..(645): unsure at all Xaa locations
  Clone ID: PAT_MRT3847_31879C.1.pep
MDHRKPLLPTSSDDAPNPRTRKDLVLMICGLFLLSSLVAFGGYRASNAPHADVSSPASNDEQPSPTSVPSPKWYPVSRGVSSGVSEKSSSMLFAVKDGASEAFPWDNSMLSWQRTAFHFQPEKNWMNDPNGPMYYKGWYHFFYQYNPNGAVWGDIVWGHAVSRDMIHWLHLPLAMVADQWYDXKGVWTGSATILPNGEIIMLYTGSTNESVQVQNLAYPADPSDPLLVDWIKYPGNPVLVPPPGIGTKDFRDPTTAWLTSEGKWRITIGSKLNKTGIALVYDTEDFKSYELKEGLLRAVDGTGMWECVDFFPVSKKNENGLDTSVNGDEVKHVMKVSLDDDRHDYYAIGTYDEKSVLFTPDDAKNDVGVGLRYDYGIFYASKTFYDQNKERRLLWGWIGESDSEYADVAKGWASVQSIPRTVELDRKTGSNLLQWPVAEVESLRLRSDEFKNLKAKPGSVVSIDIETATQLDIVAEFEIDKETLEKTPESNEEYTCGNSGGSKQRGALGPFGLLVLADEGLFEYTPQYFYVIKGSNGNLKTSFCADQSRSSQANDVRKQIVGSAVPVLKDEKFSLRILVDHSIVESFAQGGRTVVTSRVYPTKAIYGAARLFLFNNATEATVTASLNVWQMNSAFIRPFHPDQKN

SEQ ID NO: 210245 - protein, 74 aa, Glycine max
  Clone ID: PAT_MRT3847_3187C.1.pep
CAHVPEKKNDTRDFKINSTHHVSYFYLDMHDIIVCGACKTNCMCQTIIFCFNIFIQYTWNEIKSSSALKQMISK

SEQ ID NO: 210246 - protein, 81 aa, Glycine max
  Clone ID: PAT_MRT3847_31880C.1.pep
FFLTTGRVNWCFRGEGCTIPYGYSMSIGLDSLSWRCLCMVCRISDSLAELDYGLSDTIIYPLMSYVKPSYSGCMHGQGSGQ

SEQ ID NO: 210247 - protein, 144 aa, Glycine max
  Clone ID: PAT_MRT3847_31881C.1.pep
DPHVRRRQKGRTENVDDEHNAIAVVESERGRNHSRRHDDPRGRSKSQLHPQRDMSNIQCYYCGENDHVQVRCKQMKEDLKKLRDMNKDDANSQTNVVKSVEDEDDVFLATNDGVAKTKWMMDSAVSKHICRDRDMFDTLKIDGE

SEQ ID NO: 210248 - protein, 69 aa, Glycine max
  Clone ID: PAT_MRT3847_31882C.1.pep
FDHYNFIFTRPGLTGTLGQIYTNILGNIRDSVKDHNAYVGFHSSIRLIFPPTRPNLDRIQRYRYEPTAK

SEQ ID NO: 210249 - protein, 60 aa, Glycine max
  unsure (1)..(60): unsure at all Xaa locations
  Clone ID: PAT_MRT3847_31883C.1.pep
GTNGYEFFICTLNTEWLLAKHVVXGQFVKGMDVVKEIKKVGSRSGRTANPVVVPEGGHLS

SEQ ID NO: 210250 - protein, 51 aa, Glycine max
  Clone ID: PAT_MRT3847_31884C.1.pep
RFLSLIVFFFIHDPCNVEPFVFILLFFNMELNKYFCSKRQKKKRKGLSITK

SEQ ID NO: 210251 - protein, 137 aa, Glycine max
  unsure (1)..(137): unsure at all Xaa locations
  Clone ID: PAT_MRT3847_31885C.1.pep
MIISPVPTIIANLPNPHSSSHDSNLRRVIISLLHKNRKNPKHVQSIHCHAIKTRTSQDPFVAFELLRVYCKVNYIDHAIKLFRCTQNPNVYLYTSLIDGFVSFGSYTDAINLXCQMVRKHVLADNYAVTAMLKACVL

SEQ ID NO: 210252 - protein, 91 aa, Glycine max
  unsure (1)..(91): unsure at all Xaa locations
  Clone ID: PAT_MRT3847_31886C.1.pep
AVDGDIGANPCAEGGEDEGVDDAAVEGADIVDTFRLQEQPGFDKKQSGTNMNRYIKNWTPGLGGNETEXWLKRHXIEGADAYLLSEMKDRQ

SEQ ID NO: 210253 - protein, 33 aa, Glycine max
  Clone ID: PAT_MRT3847_31887C.1.pep
SICHLDGQLGVIRKAHHRDLMLEHCYVKSYERF

SEQ ID NO: 210254 - protein, 70 aa, Glycine max
  Clone ID: PAT_MRT3847_31888C.1.pep
ARNSAREQIKKQTALAELVKHKPKATEDQLKTVMGDFAQFVDKCCKAADKDNCFATEGPNLVARSKEALA

SEQ ID NO: 210255 - protein, 88 aa, Glycine max
  unsure (1)..(88): unsure at all Xaa locations
  Clone ID: PAT_MRT3847_31889C.1.pep
YDVNLKIKKYIFGVCDGYTRRRYGEDDVIRGXHRRSYYRCTHNNCRVKKRVERLSEDCRMVITTYEGRHNHSPCDDSNSSENECFTSF

SEQ ID NO: 210256 - protein, 34 aa, Glycine max
  Clone ID: PAT_MRT3847_3188C.1.pep
MGPLQKANEKSEPEREVGLELGRTKYKYTTVTHG

SEQ ID NO: 210257 - protein, 105 aa, Glycine max
  unsure (1)..(105): unsure at all Xaa locations
  Clone ID: PAT_MRT3847_31890C.1.pep
FPPAIFWGFGWQNCGPPSRDTQNLPFLGDLGLSNNFVFFALXNQVFGWVETNFFSTLKVRDKRPGPAPFVGFPHLFFAWGLNTTLGMILFFLALLHKWGFLNEPP

SEQ ID NO: 210258 - protein, 102 aa, Glycine max
  Clone ID: PAT_MRT3847_31891C.1.pep
MGLFSRKNYLEVVGKTVLLTGASTGLARGVAKTLAKKGENIVIVARNQARLAEALAVVSAAAKDPAKQRFTTIFADVSSAEENVRIVAETTAWNNGLAPDIV

SEQ ID NO: 210259 - protein, 136 aa, Glycine max
  unsure (1)..(136): unsure at all Xaa locations
  Clone ID: PAT_MRT3847_31892C.1.pep
ARGAGLYVSKIKTKSSVELTTDSDPLYQGIDFCSTAAGARVEELNMDLFTRCMEPXGKCLWDAEMDSRSVDDAVLVGGSTRTAMAKQRLHDYXWETISCPIINPEQADAYGVSDQAATLREAGYVKVHDLVLLDVT

SEQ ID NO: 210260 - protein, 88 aa, Glycine max
  Clone ID: PAT_MRT3847_31893C.1.pep
SCAVKKQGKGGPQIGTFKGFFFWPLKKKIKEKGGLSGIKPPPLASHFIKGPNLISKIGVTPPPKSMGVIGSRKKTFVFKLNFWPDSLF

SEQ ID NO: 210261 - protein, 172 aa, Glycine max
  unsure (1)..(172): unsure at all Xaa locations
  Clone ID: PAT_MRT3847_31894C.1.pep
KFPFYVEKAXINNYDLTYGQFLNILLIGSKIFSFYDGQRKHAFLKREIISPVESQVSNKLMPADFPQRGVGGKTLFXSFHFRMPHDLFVSEDIYWFSVISGTPLSXGQIVHFERTYCQHLXNMNIPYTEGKNLHQYLNFHPPMGLIHPPCFGKSLPSKREKKKKKKKGRSRG

SEQ ID NO: 210262 - protein, 55 aa, Glycine max
  Clone ID: PAT_MRT3847_31895C.1.pep
EFQDLTEVMRTTLSQSDPAHHCIEGLSTVKSWYKIRIERSKMRLKLLKIQHRTFR

SEQ ID NO: 210263 - protein, 105 aa, Glycine max
  Clone ID: PAT_MRT3847_31896C.1.pep
MTLCSVHGYTPFFGTKETLYPLCRLPNVVTHLISLALTGRFTLLIPDDTAAFLHMPKEGQWAGWQPGALAIALNTGHHTRDYSYGRSDILSHRLLSTPPGNQRTI

SEQ ID NO: 210264 - protein, 146 aa, Glycine max
  Clone ID: PAT_MRT3847_31897C.1.pep
MKAIAGPIQKKIHRNLGREKGTGKLTTPQGTNRRAKRMPVGIGGGAGAKNAMPKNMPKAGISMGRDLVGELANETSKKTKRYIKCTEAFFIAVGNTADDTINPEDLAHKVEQHGEIQEKVALKVSHEELLTDGPTEASPATTVWAD

SEQ ID NO: 210265 - protein, 180 aa, Glycine max
  unsure (1)..(180): unsure at all Xaa locations
  Clone ID: PAT_MRT3847_31898C.1.pep
CFFGFAPVNCATLVPPYLRGAVFPGSGSLGLRVPYSKTPFGEGEGXLPVAVPGAHGAPPPLPXPWLGGVVLCSFCSAPFFSLVGCLLLLSPASLVPPVLALGLLAPVVGCRGVSLPLALFSLSAVPFLAACVGSWSFLGVLLWCLGFFVPLVCFVSSPFCFPPPSCFSRFWLQILKFGGR

SEQ ID NO: 210266 - protein, 38 aa, Glycine max
  unsure (1)..(38): unsure at all Xaa locations
  Clone ID: PAT_MRT3847_31899C.1.pep
SRCXXYXXLPXMKXLSNELXXEPKXXXNVTDSXTASLG

SEQ ID NO: 210267 - protein, 80 aa, Glycine max
  unsure (1)..(80): unsure at all Xaa locations
  Clone ID: PAT_MRT3847_3189C.1.pep
NTNELTADGTSTAIIXPGGMIKSGLLTFAITANPISLKKGMDXTAKDLLKYSNDRNVPDXRTEHIRALCSISAGNDDYVP

SEQ ID NO: 210268 - protein, 53 aa, Glycine max
  Clone ID: PAT_MRT3847_318C.1.pep
SSTFPSTITVITAHIARNRKTSQYHVPVQLPRLFFSHNSQDQSGMPLVQLLTM

SEQ ID NO: 210269 - protein, 33 aa, Glycine max
  Clone ID: PAT_MRT3847_31900C.1.pep
EFRNRYPSLVFYQPTPFVVYSHPYLNVVFLQQS

SEQ ID NO: 210270 - protein, 63 aa, Glycine max
  Clone ID: PAT_MRT3847_31901C.1.pep
RFYAQLLLALRQIGKDKVHISIVVIGHVDSGKSTTTGHLIYKLGGTDKRANERLEQAAAVTYK

SEQ ID NO: 210271 - protein, 721 aa, Glycine max
  Clone ID: PAT_MRT3847_31902C.1.pep
MRRLESSFRSFSRPVLHAAARVVQEMGKSRAAAFALGIQDVEEGAHVNTFAEATDYNDSDESTHPESIRRTSSVSNLTAGRDTVAGMLASLMEVVRTTVACECVYVRAMVIKALIWMQGPFDSFDELEFIIASELSDPAWPAALLNDVLLTLHARFKASPDMAVTLLEIARIFATKVPGKVDADVLQLLWKTCLVGAGPDGKHKALEAVTIVLDLPPPQPGSMLGLTSVDRVSASDPKSALALQRLVQAAVWFLGENANYAASEYGSRSATPPGTALMMLDADKMVAAASSRNPTLAGALTRLQRCAFNGSWEIRIIAAQALTTMAIRSGEPFRLQIYEFLHTLGQGGLQSQFSDMHLSNGEDQGASGTGLGVLLSPMIKVLDEMYRAQDDLIKEIRNHDNAKKEWTDDELKKLYETHERLLDLVSLFCYVPRTKYLPLGPISAKLIDIYRTRHNISSSTGLSDPAVATGISDLVYESQPPPAEPDTLDDDLVNAWAANLGDDGLWGNNAPAMNRVNEFLAGAGTDAPEVDEENMISRPSVSYDDMWAKTLLESSELEEDDAKSLGSSSPDSTGSVETSISSHFGGMSYPSLFSSRPQTTDKAPASRGSMYEGYGSPIREEPPSYSSSVMQRHESFENPLAGNGLHSFGSQDDERASSGNPQHGSALYDFTAGGDDELSLTAGEEVDIEYEVDGWFYVKKKRPGRDGKMAGLVPVLYVSQS

SEQ ID NO: 210272 - protein, 186 aa, Glycine max
  Clone ID: PAT_MRT3847_31903C.1.pep
AISGLLLKGGDYIETLSGIKTVAFDKTGTITRGEFTVTDFSVSVDDISIETLLYWVSSVESKSSHPMAAALVEYGMLNSVKPIPENVENFQNFPGEGVYGIINGKDIYIGNRRIGARAGSERVDCRTQCQSHEISTPKQYCGPTLVGVFRLADTCRSGALEAIEELKLLGVRSVMLTEDSSQAAMY

SEQ ID NO: 210273 - protein, 104 aa, Glycine max
  unsure (1)..(104): unsure at all Xaa locations
  Clone ID: PAT_MRT3847_31904C.1.pep
PPHPPPPPTPPPTHHPPTPPPPHTPPPSSPPPTPNKISNVAPRLVRVHLYRAPPPPYIPNRKPFKSPNAHVGVHGMISVIAHEMAXLXTNPLXNAWYAGQKPLS

SEQ ID NO: 210274 - protein, 184 aa, Glycine max
  Clone ID: PAT_MRT3847_31905C.1.pep
MGISTRTLEITVISCENLHGVKDDAYVVVRAESLNCCTTRRVKVDDGTKKLLSWNQKFLLDMPMHARSITFEVQCNRFKGSRPLGVARIAASDFLGGAALPENRLQVLSYGLRDWEGKRNGVIHFSVRVAASSKTTEEECLNMKPAVELVVARKGCGDRINVGGKRSNEVAVGVPFWWNYPNII

SEQ ID NO: 210275 - protein, 611 aa, Glycine max
  Clone ID: PAT_MRT3847_31906C.1.pep
KNIALVLSKLPNTSTQHNSNIWRLNNWLAERVKDHAGKAMGDIGGRGKARETHELGAHFESLADKVTDHAAANVVGNKESQREARGGVRDVGKFEMRTEGGEKGNKDRPELKTRTREVIGRTEKERGRESGGQVVAEKGRETETARGRVGAENEGARTTAVITCTLEKGGGTQKPIREEERESESERSAWEQISNYSDQATQGVKEKYERAKQAASETLNTTTQTAQEKSAQAKNLAAQAKDATLEKGQQGYAVTKDTISSAAKTASEKTAPVAEKAKDYTLQAAEKAKSAGGTTASYVGEKAVQAKDVAVESGKSAAGYAAKVAADLRDKATAVGWAAAHFSAEKTVEGTKAAAHVVEGAAGYAGHKAAELASMSAGAVKGLAASAGETAKEYTAKKKEEAQRELEAKKPSQPQEAEERPSEGIGETVRQYAQKPKPSERNPQKEGTGSIVFTAIGETVSSAGEKVKKPFKNTMGGESEGGGGKEEGKSVIGKSLTSIGEKLGDAKQREELLDNVTGNITEGGGEVLGAVGETVAEIGQNMMKPAEIVQERAHVRQAGGVLDAIGETIAEIAETTRVMVSGEDERVLRQSVVLETRVTGRAKHEEGSHGA

SEQ ID NO: 210276 - protein, 52 aa, Glycine max
  Clone ID: PAT_MRT3847_31907C.1.pep
WPFFTYISLNEPFKSLKSTLRVTLLLSKNYIGLSSSSQLRICRSKSHTLVDL

SEQ ID NO: 210277 - protein, 528 aa, Glycine max
  unsure (1)..(528): unsure at all Xaa locations
  Clone ID: PAT_MRT3847_31908C.1.pep
MASEQLARRENTTTEKEIHVEKHRVPKMATHFEHLAEQAKESDITAGKDTPQGSIEALQAGERVKDHAGKAMGDIGGRGKARETHELGAHFESLADKVTDHAAANVVGNKESQREARGGVRDVGKFEMRTEGGEKGNKDRPELKTRTREVIGRTEKERGRESGGQVVAEKGRETETARGRVGAENEGARTTAVITCTLEKGGGTQKPIREEERESESERSAWEQISNYSDQATQGVKEKYERAKQAASETLNTTTQTAQEKSAQAKNLAAQAKDATLEKGQQGYAVTKDTISSAAKTASEKTAPVAEKAKDYTLQAAEKAKSAGGTTASYVGEKAVQAKDVAVESGKSAAGYAAKVAADLRDKATAXSERNPQKEGTGSIVFTAIGETVSSAGEKVXKPFKNTMGGESEGGGGKEEGKSVIGKSLTSIGEKLGDAKQREELLDNVTGNITEGGGEVLGAVGETVAEIGQNMMKPAEIVQERAHVRQAGGVLDAIGETIAEIAETTRVMVSGEDERVVRQSVVLETVEV

SEQ ID NO: 210278 - protein, 73 aa, Glycine max
  Clone ID: PAT_MRT3847_31909C.1.pep
GSAQVSYGFKETKNWDCSIHGLSSSSENRSVTGPSCLYPTSPELLSHKLSLRLSPNLTSPPPSLTTYTIGFLF

SEQ ID NO: 210279 - protein, 54 aa, Glycine max
  Clone ID: PAT_MRT3847_3190C.1.pep
FDVDSVIGGKLRYWRVYLRNFWSSSFVILAIWFLQLKLSADCKQLSSKLLLCFF

SEQ ID NO: 210280 - protein, 82 aa, Glycine max
  Clone ID: PAT_MRT3847_31910C.1.pep
TSLFLQNFGKDLSFGLSVKHNLFHRTDLLCTRYYGVVVFFFFLWGLEIFFLAGIGDSTDATLLGSGSGCFTKMAGLFFCGLI

SEQ ID NO: 210281 - protein, 84 aa, Glycine max
  Clone ID: PAT_MRT3847_31911C.1.pep
EREQMSEAEVGVFVQRLRGLMNDIAAFPAPTIAAMDGFALGGGLELALACDLRVAASSAVMGLIETTRGLLPGARGTQRLPRCL

SEQ ID NO: 210282 - protein, 116 aa, Glycine max
  unsure (1)..(116): unsure at all Xaa locations
  Clone ID: PAT_MRT3847_31912C.1.pep
DMHPVGKNXTHNNKQNKNFLLLLQCDNWWWLLPFGPFPPNAKGWSFEKAFNRFIPVSGFSPWCWFLSCRFFSTNQHPSMMIXKPINFVSLSLCLKTLKSLAKTLEPQFGDFVLATG

SEQ ID NO: 210283 - protein, 99 aa, Glycine max
  unsure (1)..(99): unsure at all Xaa locations
  Clone ID: PAT_MRT3847_31913C.1.pep
DGDKXXTSEPTEVVQARNYXSHGXXFPDXXEXYXMEXSVLQRXFXIXVTVXXDNSVDILTNDIGVVXXVMDDXGGAXKGFNIXVGGGMGGTHRLETXFP

SEQ ID NO: 210284 - protein, 96 aa, Glycine max
  Clone ID: PAT_MRT3847_31914C.1.pep
RTIRDSRGVQSKFPFYVESHCNDCIGFCLSWLHQGLAKNEVASLRQFLKPLHGLFYYKILPSKHSFLPLKFTEDNMAAFFKSRERFLSKNVTFKLD

SEQ ID NO: 210285 - protein, 130 aa, Glycine max
  unsure (1)..(130): unsure at all Xaa locations
  Clone ID: PAT_MRT3847_31915C.1.pep
VTTPTTRPKRELVLNSTTIGAGVASLILLLXLDXRGGTRKSGEEGPPTDAGAWPIIGHLPFXLASKTPHKTXGGLXADKNGPIISIKDGAKNARVVSNREMDKECHTTHDRDDPSLPEQTSLTHXCYNRS

SEQ ID NO: 210286 - protein, 94 aa, Glycine max
  Clone ID: PAT_MRT3847_31916C.1.pep
GRIDIQRKLFCSIQLTGGVALTSGLIAAVEERVLHAIPPNEAIDTVEILGVLDLGRDAWISREDWIHNGVHVGSNRKYKDSYYLQAQAMCYMNS

SEQ ID NO: 210287 - protein, 63 aa, Glycine max
  Clone ID: PAT_MRT3847_31917C.1.pep
SYVIETFWQNLNFIAGNSISECVAGDLPVVISCASLALADAGIMMYDIVASVSVVWILLTFAL

SEQ ID NO: 210288 - protein, 83 aa, Glycine max
  Clone ID: PAT_MRT3847_31918C.1.pep
CVLVSVHLLRNPRVAISATFITLSGWLTGCTMRPAFQPPVPPHLPVGLFVLPLDQFLLYLQSSRSSHGTVYGSLCYAMTSAGN

SEQ ID NO: 210289 - protein, 78 aa, Glycine max
  Clone ID: PAT_MRT3847_31919C.1.pep
PRLTATLSNDFYLIHCLLTNRTQIEDTRDLRLSYIHPFTHFLYITHHYTFYITHYTNSILRLSKFYIHCTHLHASAIS

SEQ ID NO: 210290 - protein, 131 aa, Glycine max
  unsure (1)..(131): unsure at all Xaa locations
  Clone ID: PAT_MRT3847_3191C.1.pep
NFFFGAPKLKSLARVLKTRDWKKPWVSQIKSLXKNSPFPKWGKNQKAPTRSPFQKVANPNWQLEPPFNRPLNPGGWGGTPQGARLFCKPLRPRSFGFFPFFFGKFPGFPPKSLKWGAPLRVPIKGLTAPGP

SEQ ID NO: 210291 - protein, 111 aa, Glycine max
  unsure (1)..(111): unsure at all Xaa locations
  Clone ID: PAT_MRT3847_31920C.1.pep
MDYLKSALPSQIMSERGSNLVVINPGSANVRIGLASQDTPFNIPHCIARHTEQIPNFTVIDKMLNSTVTTQQHIDREKAYDVXXPLLKIPFLDEEGPSNSXPRRMXRVDGH

SEQ ID NO: 210292 - protein, 591 aa, Glycine max
  Clone ID: PAT_MRT3847_31921C.1.pep
MDYLKSALPSQIMSERGSNLVVINPGSANVRIGLASQDTPFNIPHCIARHTEQIPNFTVIDKMLNSTVTTQQHIDREKAYDVIAPLLKIPFLDEEGPSNSFPRKMGRVDGHNPHIIRKDLPFTWTNVYEEATNSSVSLETSSKDETDEFLDPKEGTDSKEPNASERKFKEFICGEEALRISPTEPYCFCRPIRRGHLNISQHYSMQQVLDDLHTIWDWILIEKLHIPRNERNMYSAVLVMPETFDNREIKEILSLVLRELCFGSAVVHQEGLAAVFGNGLSTACVVNIGAQVTSLICIEDGGALPSTGKTLPFGGEDISRAFLWTQRQRQTWPPIHSDVFGKPIDLLVLNQLKETYCEVKEGEFDAVAVVHSYENKVPAGPHKTRLSALNVPPMGLFCPMLLTPDAYPPPPRTWFHDYEDMLEDTWHIDFSRRADMSDTFYPNVNGGLPMWESYPVFSTKPKKEEKVGLAEAITNCILSTGRIDIQRKLFCSIQLTGGVALTSGLIAAVEERVLHAIPPNEAIDTVEVLQSRANPTFVSWKGGAILGVLDLGRDAWISREDWIHNGVHVGSNRKYKDSYYLQAQAMCYMNS

SEQ ID NO: 210293 - protein, 44 aa, Glycine max
  Clone ID: PAT_MRT3847_31922C.1.pep
RYGFFKTTMNCFNLSVILKIPFWFTLRSPQACYKSIQYDKILID

SEQ ID NO: 210294 - protein, 58 aa, Glycine max
  Clone ID: PAT_MRT3847_31923C.1.pep
KTHPVQYNSHTQLEQWLPFFIFLIGLSQSLNRTRGLITKLLTVFWAQIFRILSLVSSY

SEQ ID NO: 210295 - protein, 200 aa, Glycine max
  Clone ID: PAT_MRT3847_31924C.1.pep
SFNQISGPIPLWLGTLPQLFYMDLSVNLLTGVFPVELTELPALASQQANDKVERTYFELPVFANANNVSLLQYNQLSGLPPAIYLGSNHLNGSIPIEIGKLKVLHQLDLKKNNFSGNIPVQFSNLTNLEKLDLSGNQLSGEIPDSLRRLHFLSFFSVAFNNLQGQIPTGGQFDTFSNSSFEGICAIVRLRYSALLSFGFK

SEQ ID NO: 210296 - protein, 73 aa, Glycine max
  Clone ID: PAT_MRT3847_31925C.1.pep
GTNKHQGMNHSPGSFFIIALKELNLKYITNKEKGKLDHLGTELTNKQKRANTRKHYLYDTTVKSGIQIGGLKT

SEQ ID NO: 210297 - protein, 106 aa, Glycine max
  Clone ID: PAT_MRT3847_31926C.1.pep
RYWKASVGLKDDFSIGPDSINHSSIHSWGSPSLGRIKVNIDGAIRIRDHLATCGGVARNHHYGRCMYRFMIHLGNVHVIFEELWVIFHGLKLALDRGQWSLMLSIW

SEQ ID NO: 210298 - protein, 114 aa, Glycine max
  Clone ID: PAT_MRT3847_31927C.1.pep
MGCAGSSQSKPDGAVKKIRKPKPWKHPQPITKTQLTQLRDEFWDTAPHYGGRKEIWDALRAAAEADLTLAQVIVDSAGVIVQSSDLTVCYDERGAKYELPKYVLSEPTNLIRDS

SEQ ID NO: 210299 - protein, 58 aa, Glycine max
  Clone ID: PAT_MRT3847_31928C.1.pep
HASSHASGRLEYTLRMVESGISYNCVVRVLTNMEYKDSEREKNLRFMSMARIIGFYRS

SEQ ID NO: 210300 - protein, 89 aa, Glycine max
  Clone ID: PAT_MRT3847_31929C.1.pep
TAVRPPVRRKWGSIGGKVPEELGEPEFYQDLNSLTKHHLPTGPGLIKVEKKGNAFNIKPDNATGGHNFGRGNPAPKDGVPVPSTEGGLN

SEQ ID NO: 210301 - protein, 119 aa, Glycine max
  unsure (1)..(119): unsure at all Xaa locations
  Clone ID: PAT_MRT3847_3192C.1.pep
ASFKVACVVAMMYMVVAMSVTPITQARITCXQVANNISPYLSYLRXNEKPVNTYYNKIKSLSRAGKTTSNHQTAYNXLKNLTNNIKQNLNTGNAASLPGKYSINIRYKIXTCTNYATIK

SEQ ID NO: 210302 - protein, 132 aa, Glycine max
  Clone ID: PAT_MRT3847_31930C.1.pep
GGGIELSILSQEFDIEIASINVQDLRVDRFNETRSKRCILVYSGIHYDTIALVPYGSPTYDPENDIKQFDVDDDVVLEAARQLCGELKKKNYFTDTQKFSIKCNTCGWKGAGEQGATQHAMDTGHTDFGEAS

SEQ ID NO: 210303 - protein, 183 aa, Glycine max
  Clone ID: PAT_MRT3847_31931C.1.pep
MDGRRGGGGGSRGEAELWLYTANKVLSARDLHGARSFAIRARDSDPRYEPTELLLAVIDTLMAGEARINDQLDWYAILQVLRYTQNIDYIAAQYRRLATQLDPHHNPFAFASHAFTLVNDAWSVLSNPTKKTFYDNQLRLLTQPAPPPQPPPPPPLASPAPVAFFPIQPPQPNLNPNQFPQRE

SEQ ID NO: 210304 - protein, 60 aa, Glycine max
  unsure (1)..(60): unsure at all Xaa locations
  Clone ID: PAT_MRT3847_31932C.1.pep
FXFSXKFXVXTVESIIHKSGVXEIQXCCXCWLXGLVXVEXXVXXXAXXILXLLQWRXRXX

SEQ ID NO: 210305 - protein, 61 aa, Glycine max
  unsure (1)..(61): unsure at all Xaa locations
  Clone ID: PAT_MRT3847_31933C.1.pep
YLXXXAREXXASIXXPLDGXKXLFXXXPFXHTEXRFXLTCXCMRLYTMXWXKPNSXGQXXP

SEQ ID NO: 210306 - protein, 67 aa, Glycine max
  Clone ID: PAT_MRT3847_31934C.1.pep
VNALSMGFGTPNLKIAEFQVASLKKVKLVWQKKLNNQYFVMRLMFIELIFLMFGREKKKKKKNQKIP

SEQ ID NO: 210307 - protein, 98 aa, Glycine max
  unsure (1)..(98): unsure at all Xaa locations
  Clone ID: PAT_MRT3847_31935C.1.pep
HHVKYLLVEEDDESVTQERIGSYKSAWWTVEYVAKXSITEVXLKSCYGKNQTVFIHLFHLGMTGHMGFHMLLYELDITVEWEPRKDGGRVKLYVPFRE

SEQ ID NO: 210308 - protein, 46 aa, Glycine max
  Clone ID: PAT_MRT3847_31936C.1.pep
CPVRVKEFSDAHVFCSHHPVSKNFSHLSGDLYFDGIVFFFSLRPKF

SEQ ID NO: 210309 - protein, 74 aa, Glycine max
  Clone ID: PAT_MRT3847_31937C.1.pep
VISLRGLWRAGGVFFIRGKGGFVCIKGLVAPEKEFVFPQFLWKEKRGYLNKGGCYLWCLSVGLKWFFFFGAPKK

SEQ ID NO: 210310 - protein, 133 aa, Glycine max
  Clone ID: PAT_MRT3847_31938C.1.pep
RHKGSAMGAPIKIWHEAEAHIVTLETTLGEVSRGKLTEAEANMNGQMSDVTETLRDGRTQTLDNVFIRGSQIRFLVLPDMLKNAPMFKNIGRAQRGAQGMGRGGAPSRTRQCFSWWVVGAADEAVADLDAVVG

SEQ ID NO: 210311 - protein, 189 aa, Glycine max
  unsure (1)..(189): unsure at all Xaa locations
  Clone ID: PAT_MRT3847_31939C.1.pep
AAKLKTATRTGAVKVNPFQGQGKGDEDNGQKDVGAMGNGKYTMGKDSSEGPDREKYQGPFSVRTPSYMKGEYTGEYGWDSAGVSADPETFAKNRDLEVIRGRWAMLGALGRTPHRCYRRDDSGVQEKVRLKNGDQILAQRGRDXWGNPKPCQAQSIREEMSAPRYHNGPRWKGAAIKGLEGEGEGNDTY

SEQ ID NO: 210312 - protein, 279 aa, Glycine max
  Clone ID: PAT_MRT3847_3193C.1.pep
MLDNGTDEHIIRNLCSLNTERNILEEFDGGKILTVDASDAESNMPRLSDGSKCCDNDDDDDSDEVLILDPSGVDKEIFGRKRKRESKSEMLSWITSIAKNPCDSTVGSIPEKSKWKFYSSQEIWKQVLLFREAVFLKKDFETTSEQLNWQGQKMHPSMYDDRVGAMYNLRQRLKCDKRVLLGKTTSGGVSLASSGGTHVDLERTPSSHAEDRAEKLLPDSGTAHSSLDRCARVHIPLGPNHQAEVPEWTVITYEVDSKWLGTQIWPKNCNKCRLFEGTP

SEQ ID NO: 210313 - protein, 65 aa, Glycine max
  Clone ID: PAT_MRT3847_31940C.1.pep
LSTISVARNLLCGWAALGTIIDRTISVYALSFISTIILVALLICPLGFLISIQRSYLPHMFFVFL

SEQ ID NO: 210314 - protein, 91 aa, Glycine max
  Clone ID: PAT_MRT3847_31941C.1.pep
CHIKGTGPGICPGEAFRPCLCLQLAQISLFIGEFRVLFPGKITLVTLDFVFLPVFCFCIQDMCMFVPLREVGTLEPWLGSLLFLLSVAPLH

SEQ ID NO: 210315 - protein, 232 aa, Glycine max
  Clone ID: PAT_MRT3847_31942C.1.pep
MAPKITRKVSRNPELIRGIGKYSRSQMYHKRGIWAIKAKNGGVLPRHDPKPKPETPAEKPPKFYPADDIKKPLVNKHKPKPAKLRASITPGTVLILLAGRFKGKRVVFLKQLPSGLLLVTGPFKVNGVPLRRVNQAYVIGTSTKVDVSAVNVNSFDDKYFAKEAQRKKKKGEGEFFEAEKEEKSVLPQQKKDDQKTVDAALLKAIESVPDLKSYLGARFSLKAGVKPHELVF

SEQ ID NO: 210316 - protein, 75 aa, Glycine max
  Clone ID: PAT_MRT3847_31943C.1.pep
ELSWPLLHQVSLSAFYSFYIGQKLISFIIIWGSQFRTTAHDPILAISGYQKDDLEADHMRVLAAERDINSRRAQA

SEQ ID NO: 210317 - protein, 265 aa, Glycine max
  Clone ID: PAT_MRT3847_31944C.1.pep
MAPKITRKVSRNPELIRGIGKYSRSQMYHKRGIWAIKAKNGGVLPRHGPKPKPETPAEKPPKFYPADDVKKPLVNKHKPKPAKLRASITPGTVLILLAGRFKGKRVVFLKQLPSGLLLVTVVVDNCFHLTLAFLRCTMCSVHFWSGLCLSLATSGPFKINGVPLRRVNQSYVIGTSTKANVSAVNVEQFDDKYFTKEAQKKKKGEGEFFEAEKEEKSVLPQQKKDDQKTVDSALIKAIGSVPDLKTYLGARFSLKAGVKPHELVF

SEQ ID NO: 210318 - protein, 78 aa, Glycine max
  Clone ID: PAT_MRT3847_31945C.1.pep
GLTLNAHAKQFSLLPIQAVRPGNMKVCRMMTILTSRARDDRLWHQAGESIKNAHEAFAYHTNSSHIIVRMYEYVDLIT

SEQ ID NO: 210319 - protein, 171 aa, Glycine max
  Clone ID: PAT_MRT3847_31946C.1.pep
EVVDVRFATDYTGKFKGFGRAFEGLVLTYGCFTGPFKINGVPLRRVNQSYVMGTSTKVDVSAVNVDQFYDKYFAKEAQKKKKKGEGEFFEAEKEEKSVLPQQKKDDQKTVDSALIKAIGSVPDLKTYLGARFSLKAGVKPHELVFYRKEWCFSCLQILLFLLSLVLIDALL

SEQ ID NO: 210320 - protein, 87 aa, Glycine max
  Clone ID: PAT_MRT3847_31947C.1.pep
TVRERVRGRAARALGCPMGALSTDRTPNQGRPMCFSVSILEHGWEIASGSHYIGLSQPYHYVILSQQYHGVSLWKRYRIVVCAQQYR

SEQ ID NO: 210321 - protein, 44 aa, Glycine max
  unsure (1)..(44): unsure at all Xaa locations
  Clone ID: PAT_MRT3847_31948C.1.pep
RXSXXPLQXXVXPTHIEXINFTASXLLXRFRKMTDSXEFXXLXX

SEQ ID NO: 210322 - protein, 47 aa, Glycine max
  Clone ID: PAT_MRT3847_31949C.1.pep
IKKMVMVFSYSECNFFTIGLLRLFKGECKTVSSHKFLIRRVYLKNII

SEQ ID NO: 210323 - protein, 49 aa, Glycine max
  Clone ID: PAT_MRT3847_3194C.1.pep
VLTNDYNGPGHKNLRPTPYTNPGYAHFHWFIVELITYYGHNRAFKNSVR

SEQ ID NO: 210324 - protein, 108 aa, Glycine max
  unsure (1)..(108): unsure at all Xaa locations
  Clone ID: PAT_MRT3847_31950C.1.pep
KQHEGENSELSVTTHLACVSSAGTVGQTXAVPFXICAAKQIIXYNHTTSVLTFDGRCKVPLEYTGIIDAFIKTFHHEGFCALYKGLFPNSLKMVPSIAIAFLTYNVCK

SEQ ID NO: 210325 - protein, 97 aa, Glycine max
  Clone ID: PAT_MRT3847_31951C.1.pep
DSPTEIGCLEILHGDREICRLILRSTDVMFGLTGCNHHVLDYGMIFITVYDMGLPFVLTFHRCASSCSPCSLITLWKKRFQLPQFPSNPSSNSVSNI

SEQ ID NO: 210326 - protein, 135 aa, Glycine max
  Clone ID: PAT_MRT3847_31952C.1.pep
MTSQTFFLIFIPILAIILLAVNLIFAPHNPYEEKDSAFECGFHSFLGQNRSEFSISFFIFALLFLLFDLEILLVYPYVVSAYANGIFGLIIMLLFFLVLTLGFAFELGKNALSIESRQSNYKKIKKKKKDDKGRT

SEQ ID NO: 210327 - protein, 60 aa, Glycine max
  unsure (1)..(60): unsure at all Xaa locations
  Clone ID: PAT_MRT3847_31953C.1.pep
PGGSRRLCHNFIVIDRWLXGLIGXGTGIAAKTLXSIGINRKDARVEVDNIIGRCSGFGAV

SEQ ID NO: 210328 - protein, 232 aa, Glycine max
  Clone ID: PAT_MRT3847_31954C.1.pep
VYGALLIRPRVGHSYPFPKVYQEVPILLGEWWNANVVEVEHNATESQTAPIPSAAYTINGLPGDSYNCSENQMYQLKVKQGKTYLLRIINAALNEQHFFKIANHTFTVVAIDALYTQHYKTDVVVLAPGQTVDVLFSTNQHVDSYYMAFTPYHSAPQIPINNSTTRGLVIYEGATSVEKPILPNLPAQTDTPTAHKFYTNITGLAGGPHWVPVPRQVDEHMFITFGLNFDLC

SEQ ID NO: 210329 - protein, 100 aa, Glycine max
  unsure (1)..(100): unsure at all Xaa locations
  Clone ID: PAT_MRT3847_31955C.1.pep
GGAPPGESFFERRPPTLVFKWGRAKPTPPARVLPRQGPTRVGSQGVTPPPFRGRGDSQKPIDFPXPGPFGGGRPGRGKQKNQRAAFKKAAGGAGDEGEEN

SEQ ID NO: 210330 - protein, 247 aa, Glycine max
  Clone ID: PAT_MRT3847_31956C.1.pep
MATANAEASSFQQLPMKSHIAVLPSPGIGHVTPLLELSKLLVTHHQCHVTFLNVTTESSAAQNNLLHSPTLPPNLHVVDLPPVDLSTMVNDQTTIVARLSVNLRETLRPLNTILSQLPDKPQALIIDMFGTHVFDTILENIPIFTFFTASAHLLAFSLFLPQLDRDVAGEFVDLPNPVQVPGCKPIRTEDLMDQVRNRKIDEYKWYLYHVSRMTMSTGILLNTWQDLEPVTLKALSEHSFYRSINTP

SEQ ID NO: 210331 - protein, 203 aa, Glycine max
  unsure (1)..(203): unsure at all Xaa locations
  Clone ID: PAT_MRT3847_31957C.1.pep
MPTLRIHGYALLVSSCFIILIAASQTDPSEVNALIDIKKSLIDPMGNMRNWNSGDPCMANWAGVWCSDREEANGYFHVQKLYLMTMNLSGSLAPQLGQLSHLKILSFMRNNLTGTIPKEIGNITSLELLLLSGNKLSGTLPDELGNLTNLDRFQVDENQLSGPIPESFVKMVKVKHLHMKYNSFNNQLPXPKLSKLPNLVHLL

SEQ ID NO: 210332 - protein, 122 aa, Glycine max
  unsure (1)..(122): unsure at all Xaa locations
  Clone ID: PAT_MRT3847_31958C.1.pep
VTLTLSHLXTSNSEYDTLYTLKQXLSYPNNVLHIXNPTLVSRYTXFHVTYDQDNQVTRVDLSNSNLSGHVVPELENLKHLXYLXVDKNNMSKTISARLRNLNSLMSLDLYNSNISSTMPPAL

SEQ ID NO: 210333 - protein, 72 aa, Glycine max
  Clone ID: PAT_MRT3847_31959C.1.pep
LLLGDPARSRDGTPRRKRTGRLRVDRLDLRLEKRGIGSGPFATVSRQPCPRSSRFPPLKGFAGSRYESGEGV

SEQ ID NO: 210334 - protein, 66 aa, Glycine max
  Clone ID: PAT_MRT3847_3195C.1.pep
PLLPNTLLRPKLLHHLDSSMICSSSNTSCNRATPILITSITFLNFKAVFHTKNTNILHKPTFLATI

SEQ ID NO: 210335 - protein, 72 aa, Glycine max
  Clone ID: PAT_MRT3847_31960C.1.pep
REAIARLTLLKLIKVVYEHHPRPKQLIVENDLPQKLQNLIEERRDGQRGGQQVLVKQMATSLLKALHINTVL

SEQ ID NO: 210336 - protein, 156 aa, Glycine max
  Clone ID: PAT_MRT3847_31961C.1.pep
YGGFGKGEPRTFGGQQRFFCRFFFFPRFSFFKKGVVLGMGLPPPEVLPPSRGFQPPWGGHIYPLNSSKAPPPDFKKGPGRGFLMDSKTGRSKYDPRIWPPFSNPWWFSSPHVLPPNQIFPCRPLFQNFSTPMVGFFFKKECPPFCLLTTKSFNVLC

SEQ ID NO: 210337 - protein, 117 aa, Glycine max
  Clone ID: PAT_MRT3847_31962C.1.pep
KIQISMTSIKSLRWLMRKKSGLSDGGKSSFKMKHLPFLAVLCTIMLFIVYRTTKYQYHQEEIDKKWSFWGQPKVYPSTYGKLKGSPRGIIHDNSDLELRPLWSRSSSRSKAVTLTLT

SEQ ID NO: 210338 - protein, 206 aa, Glycine max
  unsure (1)..(206): unsure at all Xaa locations
  Clone ID: PAT_MRT3847_31963C.1.pep
KIQFSMTSIKSLRWLMRKKSGLSDGGKSSFKMKQLPFLAVLCTIMLFIVYRTTKYQYHQEEIDKKWSFWGQPKVDPSIYEKYQVIERGIIHDNSDVXXRPLWSKDETASFSVSTLPKTXLSLCIGLQSIKITDARLQKYLVANLTIILLHYDGNIHGWXKPDWSRKXLHIVGRHQTKWWXAKRFLHADIGSIYDYIFLWDDDLGVE

SEQ ID NO: 210339 - protein, 131 aa, Glycine max
  Clone ID: PAT_MRT3847_31964C.1.pep
TSPTLAFLRYTSRRLFFLNLKRNHALTITLGIHTMTSFEASLCLPTLVVLNCTKPISFSPSPFASPLSSSTLSSELILLSNFSTNPSASFAQMELAHKPWDRHTLPVALKYWAGLSAMGLGQQGHGAGLGN

SEQ ID NO: 210340 - protein, 90 aa, Glycine max
  unsure (1)..(90): unsure at all Xaa locations
  Clone ID: PAT_MRT3847_31965C.1.pep
LYQFLTPSMSLLANHTVTFALCLVLSPFPLFLLLLSFLIPLLLPGRVXXXXXXXXXXXXXXXXXXXXXXXXXXXXXXXXXXXXXXXXXXX

SEQ ID NO: 210341 - protein, 74 aa, Glycine max
  unsure (1)..(74): unsure at all Xaa locations
  Clone ID: PAT_MRT3847_31966C.1.pep
THSSSEKNHAALQLHVYQXVMMIGPYCQQSSLYGHAEFGNFTSMLTISRPDHTTVGVCVDIQYRMVCCVAVPLI

SEQ ID NO: 210342 - protein, 184 aa, Glycine max
  unsure (1)..(184): unsure at all Xaa locations
  Clone ID: PAT_MRT3847_31967C.1.pep
KIQISMTSIKSLRWLMRKKSGLSDGGKSSFKMKHLPFLAVLCTIMLFIVYRTTKYQYHQEEIDKKWSFWGQPKVYPSTYGKLKGLPRGIIHDNSDLELRPLWSRSSSRSKAVYSNSNLLAVPVGIKQKQNVDAMVQKFLQENFTIILFHYDGNVDGWWNLDWSSRXIHIIAXNQXKWWFAKRFL

SEQ ID NO: 210343 - protein, 54 aa, Glycine max
  unsure (1)..(54): unsure at all Xaa locations
  Clone ID: PAT_MRT3847_31968C.1.pep
LEQRNTXLNHTLKNPQTTKNRTFIQNQGPQKIGYTNTKTSIIHKNXINRSTIVL

SEQ ID NO: 210344 - protein, 99 aa, Glycine max
  Clone ID: PAT_MRT3847_31969C.1.pep
SFLKSCSSTWRIAYVDIGRIQDYCFRNTIRYPKLKDVVELLDILIIPGSDNGTSIPKIFEGGVLIKNGIEVFKQTYVMLFFSSLDNIGDEISLLNSINN

SEQ ID NO: 210345 - protein, 59 aa, Glycine max
  Clone ID: PAT_MRT3847_3196C.1.pep
QYERTCIIYPLPWIFTTDGHCIHVRKTSPQANLCYPTSCTTWSYQVRYIEDLVVIAYEL

SEQ ID NO: 210346 - protein, 97 aa, Glycine max
  Clone ID: PAT_MRT3847_31970C.1.pep
MKATTLATFALSAVSALAAPTKTFAKRAAITDGPDVGYATLNGGTTGGAGGSTTTVSSLAQFTAAAEADGAAVIVVSGNISGAAKVRVGSDKTIIGK

SEQ ID NO: 210347 - protein, 84 aa, Glycine max
  Clone ID: PAT_MRT3847_31971C.1.pep
KITPTLFSPFTRNRDAVERHEDELLQMALKEQAHADVNYGGKSCSNSRKPVANYVQPLKKPAPPPKQSQGKGRVTDDDDDSEIE

SEQ ID NO: 210348 - protein, 116 aa, Glycine max
  Clone ID: PAT_MRT3847_31972C.1.pep
MNYESRVVFSGVSVRGKKFKQSTKMKGLFKSKPRTPADVVRQTRDLLLFVDRSPETRESKREEKMSELFKNIRELKSILYGNSESEPVSEACAQLTQEFFKEDTLRLLIKCLPKLN

SEQ ID NO: 210349 - protein, 74 aa, Glycine max
  Clone ID: PAT_MRT3847_31973C.1.pep
NYKSPKFNFNKKKPPPPPFYMGLRGHNKKKPLFIPPRAIFFILVKTPPNFGLNFHPPTSEGAKKSGASQWEAPP

SEQ ID NO: 210350 - protein, 94 aa, Glycine max
  Clone ID: PAT_MRT3847_31974C.1.pep
VPKDDLVTQVLHGGGGHGGGGHFHGSGGGFRGGGGHFGGFHGGGFRAAPAFHGGGIRYGGIHHYGGYHRYGIYRPHYGYRHFHRRYYYGGYYPY

SEQ ID NO: 210351 - protein, 70 aa, Glycine max
  Clone ID: PAT_MRT3847_31975C.1.pep
MKGLFKSKPRTPADVVRQTRDLLLFVDRSPETRESKREEKMSELFKNIRELKSILYGNSESEPVSEACAQ

SEQ ID NO: 210352 - protein, 130 aa, Glycine max
  Clone ID: PAT_MRT3847_31976C.1.pep
MWQLMYTAWLYMLLHYVLYVGFIIFFCLIFKIVSVTRLIKTLSGLFYLVVELDFSYPSEGIHRRWDNGYRITATAATWDQSALILSIPRRRPGDETQETLRTSQFPSTHVKEKWSKNLYLACLCYGRTVC

SEQ ID NO: 210353 - protein, 92 aa, Glycine max
  Clone ID: PAT_MRT3847_31977C.1.pep
GRRIIKNKGKKRVLILTLKHIQANCLDALSLNKHWKLRNQKHSLSFSMRTCNYKKNAIGEFYTRCTELITRVEYTPETVLTYTKRSVDTGSQ

SEQ ID NO: 210354 - protein, 45 aa, Glycine max
  Clone ID: PAT_MRT3847_31978C.1.pep
PFELKRRTYVFTFQHHIPLSVGVCGFTVCVVDSAFLNLHAYGPGG

SEQ ID NO: 210355 - protein, 47 aa, Glycine max
  Clone ID: PAT_MRT3847_31979C.1.pep
DQRGFSKEGGIKGHPKRWEFRPRNPAPPENKIKLMKPTQPVLYLVSM

SEQ ID NO: 210356 - protein, 79 aa, Glycine max
  unsure (1)..(79): unsure at all Xaa locations
  Clone ID: PAT_MRT3847_3197C.1.pep
HKGEFYLRDYVRHKGKFGHXFLEFEFLPYSKLRYSINFNYKNYTIIRKEVYLIPAVLLECRRIITYSEIINEDDNNCSE

SEQ ID NO: 210357 - protein, 70 aa, Glycine max
  Clone ID: PAT_MRT3847_31980C.1.pep
ISQNQFIKGCTYYVGQFKKNGMPSVNLLMLQLNLAIELNQVCKLKLESGKWYVIKEVPSKLMPKRAQAST

SEQ ID NO: 210358 - protein, 92 aa, Glycine max
  Clone ID: PAT_MRT3847_31981C.1.pep
MLMFGLKSASYCTHNVAIGSGVLKPNMSTFGADQFDDFRPKEKVLKFSYFNWWSFNTAFGTLAATLFVVYIQERFGWGLGYGISALKHFIWT

SEQ ID NO: 210359 - protein, 93 aa, Glycine max
  Clone ID: PAT_MRT3847_31982C.1.pep
MGSYIHIDSISIDLADSIGKRDAGKCEHFSIRGYVSEMRKKDWKNCWPFTVHESDKQPSFLPLDVPKYRCRHCQNSAQEIAAKDIQRDDQTNF

SEQ ID NO: 210360 - protein, 410 aa, Glycine max
  unsure (1)..(410): unsure at all Xaa locations
  Clone ID: PAT_MRT3847_31983C.1.pep
LYYVNAPPHMGSAYTTIAADAIARFQRLLGKSVIFITGTDEHGEKIATAAMAQGSTPPDHCGLISRSYKTLWKDLDISYDKFIRTTDSKHEAIVKEFYSRVLANGDIYRADYXSGLYCVNCEEYKDEKELLDNNCCPVHLKPCVSRKEDNYFFALSKYQKALEDTLYRNPNFVQPSFRLNEVQSWIKSGLRDFSISRASVEWGIPVPDDKTQTIYVWFDALLGYISALSDDQEQPDLLKTVSSGWPASLHLIGKDILRFHAVYWPAMLMSAGLSLPKMVFGHGFLTKDGMKMGKSLGNILEPNDLVNKFGTDAVRYFFLREVEFGNDGDYSEERFINIVNAHLANTIGNLLNRTLGLLKKNCQSILVVDSTTAAEGNEFKDNVEKLVDKAHIHYENLSLSSACEAALGGE

SEQ ID NO: 210361 - protein, 587 aa, Glycine max
  unsure (1)..(587): unsure at all Xaa locations
  Clone ID: PAT_MRT3847_31984C.1.pep
MAVRINSSIQNTLCLLNPPLFSLRYRASSLKLKPQLHFRQNPSRGALFCTCATTDITPQSTEHFVLTTPLYYVNAPPHMGSAYTTIAADAIARFQRLLGKSVIFITGTDEHGEKIATAAMAQGSTPPDHCNLISRSYKTLWKDLDISYDKFIRTTDSKHEAIVKEFYSRVLANGDIYRADYDGLYCVNCEEYKDEKELLDNNCCPVHLKPCVSRKEDNYFFALSKYQKALEDTLYRNPILHPFIDTNHGFVFLYVQMKCFNADTPYPNPHPDLFCMYTTNSVAVKVSNAVLHDHQSDAAFEKVAGKKIPLKMCPRRPGDATAVYASTDKAEKELGWKAKYGIEEMCRDXVELDKQKSMGIPGEALNEIGLYLEEVFLHHXSYHLHSRYNMLMFLLLIQLIDXILYTTYVVGLNNCLIIIFYIVERTTLMSHIXINLNDFPRIRNREMKYVTKIXAPLEIGNVGNLYMDQRAPWSLFKQGGTAAEAAAKDLVIILETVRIIAIALFPVTPSLSWRIYAQLGYSRDQFDAATWRDTKWGGLKGGQVMAQPKPVFARIENQTEVEDKGVAVRKTKKSKAKPKQPQEVAGA

SEQ ID NO: 210362 - protein, 63 aa, Glycine max
  Clone ID: PAT_MRT3847_31985C.1.pep
LAYLLRDVIILEQTEEIVPQQNTSKNKLNMLFRSKKEKKKTPQEFINKPNQHIYSYEYEKNKL

SEQ ID NO: 210363 - protein, 85 aa, Glycine max
  Clone ID: PAT_MRT3847_31986C.1.pep
PRVRCVCHCHSLGRTNHKPIPFGLLLATTIFLRCSLSAPKRKVQFFLSFSPAPLHTFSMPSHPFDQRPKMSPFFGGVSLPSPSRV

SEQ ID NO: 210364 - protein, 112 aa, Glycine max
  Clone ID: PAT_MRT3847_31987C.1.pep
KGKTTNTRSRGEGQPTRTGKRRTREGRGSRRARRGRKAEGNKRRNGRTKAEDNSQKEGTRDRGQGRQGGTEKHEQDADRGRARTQKPRRGKPRRTRKGRPRTRRGNRRSRRG

SEQ ID NO: 210365 - protein, 37 aa, Glycine max
  Clone ID: PAT_MRT3847_31988C.1.pep
KNPNCIQPPYYFKQQGRATTFEKIAKKHLQYLTLNNF

SEQ ID NO: 210366 - protein, 394 aa, Glycine max
  Clone ID: PAT_MRT3847_31989C.1.pep
MALLKVHAPTPTPTSASAQLQWRCSVSVAPTTLAFPNSYSISAERGRREWNWRVKCSSSSAEIEKGAASFGPGSPVRATNILVVGATGTLGRQIVRRALDEGYDVRCLVRPRPAPADFLRDWGATVVNADLSKPETIPATLVGIHTVIDCATGRPEEPIKTVDWEGKVALIQCAKAMGIQKYVFYSIHNCDKHPEVPLMEIKFCTEKFLRDSGLNHVIIRLCGFMQGLIGQYAVPILEEKSVWGTDAPTRIAYMDTQDIARLTFIAIRNDKLNGKLLTFAGPRAWTTQEVITLCERLAGQDANVTTVPVSILRLTRQLTRFFEWTNDVADRLAFSEVLTSDTVFSVPMAETYSLLGVDSKDIVTLEKYLQDYFTNILKKLKDLKAQSKQTDIIF

SEQ ID NO: 210367 - protein, 116 aa, Glycine max
  unsure (1)..(116): unsure at all Xaa locations
  Clone ID: PAT_MRT3847_3198C.1.pep
RNSARGYFDVFVNQFVNIDKAHWVGASSTYELEHGVVDWLVKIWPLKPIRACLPSIYLDTRLRDDREYGVNMYYPHSXSRIQWFEEKPKGPGAPVSFESMAGLSEEQTVELACCLG

SEQ ID NO: 210368 - protein, 58 aa, Glycine max
  Clone ID: PAT_MRT3847_31990C.1.pep
LPADVAACVLDNESNPLDNGRTYRNLSDIAAFRWLRAAPTGHERCPLTVVQSRNELDK

SEQ ID NO: 210369 - protein, 34 aa, Glycine max
  Clone ID: PAT_MRT3847_31991C.1.pep
RCGEPILYEIVSKYIVCNNKTMAYVFTSLRSSLC

SEQ ID NO: 210370 - protein, 125 aa, Glycine max
  unsure (1)..(125): unsure at all Xaa locations
  Clone ID: PAT_MRT3847_31992C.1.pep
PRYSALGAFFLEPLPRRHYCKGCRLQDMASIITQDVYNQMLPNRDNTQCPANGFYTYDAFIQAVNFFPXFDTSSSTDELNKHELATFFGQTSHXTTGGTTGAPYQLQWGYCFKEDINKATSSPYY

SEQ ID NO: 210371 - protein, 94 aa, Glycine max
  unsure (1)..(94): unsure at all Xaa locations
  Clone ID: PAT_MRT3847_31993C.1.pep
SILTNPVMRISXESKKNHGDIPTYHMRKNRDLRVRSITKKEQPSQAATAVTPPAGEPKPQAVSTPSPKVSADLAKSVAFXEPAPERINGRVARI

SEQ ID NO: 210372 - protein, 77 aa, Glycine max
  Clone ID: PAT_MRT3847_31994C.1.pep
DSEQCIHNGSSNDGHRAQNGSGCLGIGFGCRRRRQILNGGGGGGEKKRPDDNGGEGLEGDCLISHHYPPTFKCRNDV

SEQ ID NO: 210373 - protein, 388 aa, Glycine max
  unsure (1)..(388): unsure at all Xaa locations
  Clone ID: PAT_MRT3847_31995C.1.pep
MEEYTNNNHLSENTGPSPSTPRPNFLYSSASGGNHNHQHQHHSHHHHHHHQFPINTFHLQSGGSDHCFQSDQVSPHPSVKSEASTSQLHAPIFHYPLMRGNLHNTMHHHHPQQQQGGSPTSSTGEVEAIKAKIIAHPQYSNLLEAYMFNLXIGAPPEVVARMAAAKQEFEARQRSSVGSRETSKDPELDQFMEAYYDMLVKYREELTRPIQEAMDFMRRIETQLNMLCNGPVRIFSDDKCEGAGSSEEDQDNSGGETELPEIDPRAEDRELKNHLLKKYSGYLSSLKQELSKKKKKGKLPKDARQKLLNWWELHYKWPYPSESEKVALAESTGLDQKQINNWFINQRKRHWKPSEDMQFMVMDGLHPQSATLYMDGHYMADGHYRLGP

SEQ ID NO: 210374 - protein, 198 aa, Glycine max
  Clone ID: PAT_MRT3847_31996C.1.pep
VKEHETVAVNCVLQLHKTLYDGSGGALRDFLGLIRSTNPSVVVVAEQEAEHNENRLEGRVCNSLKYYSALFDSIDESGLPQESAVRVKIEEMYAKEIRNIVACEGRERVERHESFGNWRRMMVEQGGFRCMGVTERELSQSQMLLKMYSCESYSVKKQEKEGATGVTLSWLEQPLYTVSAWGPVDAAAGTSSSFSQPS

SEQ ID NO: 210375 - protein, 120 aa, Glycine max
  unsure (1)..(120): unsure at all Xaa locations
  Clone ID: PAT_MRT3847_31997C.1.pep
TSKLRAPSRLTTWGRQTRRKKTPDGGFGEPTVMAIHIAVEKRTTTEKVATQGPSNPQKPTFLKEEGTKKLIKGVQQHWRAAPXKPHGKTWGGQTAFGHHPWRRSKGQHLANQTFHYXPNE

SEQ ID NO: 210376 - protein, 106 aa, Glycine max
  unsure (1)..(106): unsure at all Xaa locations
  Clone ID: PAT_MRT3847_31998C.1.pep
XNPXDXXXSXXXXRXXXXKSVPXXXXXXLXXHXPXLNXTXXVEXXXRSSNRXXXXXSXXXXXXXXRXVGXXQQCXLXAXXLXXXXFXXXXHXXYSXSXISDXXXXH

SEQ ID NO: 210377 - protein, 42 aa, Glycine max
  Clone ID: PAT_MRT3847_31999C.1.pep
VGTCRKTLLFCIVVGFRISEDGSLLASFSDTEFLYFEFVHPQ

SEQ ID NO: 210378 - protein, 148 aa, Glycine max
  unsure (1)..(148): unsure at all Xaa locations
  Clone ID: PAT_MRT3847_3199C.1.pep
VTKHILKELKDLPKDPPTCCIAGPTAEDMSHWQATIMGPDDSTYTRGASLATIHXPADYPKKPSKVDYRTIRVLXTNINTNGHIXHDILNEHWSPALTIXKVLLYICSLLTDPNTDDPLGHVIANMYKTDRTKYDVTERSWTHKYAMG

SEQ ID NO: 210379 - protein, 44 aa, Glycine max
  Clone ID: PAT_MRT3847_319C.1.pep
IKINYDSCWVLSNLVKSKYNGIYKVDNVFNYILIIRIMRKENWC

SEQ ID NO: 210380 - protein, 123 aa, Glycine max
  unsure (1)..(123): unsure at all Xaa locations
  Clone ID: PAT_MRT3847_31C.1.pep
MFPFHSQGAPKHTCTLLAVTCGTSSAEHKLSHAERTYPFPEFVSAGRLEVQTLRSPEKEQFRKVLESYQPNFVYLQGDQLENGEVGSLVCRXVELSTCEDITELFGSTLPTAVYLEIPNGEKF

SEQ ID NO: 210381 - protein, 39 aa, Glycine max
  Clone ID: PAT_MRT3847_32000C.1.pep
KILRDFGTSTNTIDNNEVNTNVTVQMTCMHKTKVNQNET

SEQ ID NO: 210382 - protein, 535 aa, Glycine max
  Clone ID: PAT_MRT3847_32001C.1.pep
MAILLGEILQSLELWLKLIKNPQPQPYVNPNLDPVLLVPGVGGSMLHAVDESEGSRERVWVRFLNAEYTLKTKLWSRYDPSTGKTESMDPNSRIIVPEDRHGLHAIDILDPDLMLGSDSVYYFHDMIVEMRKWGFEEGKTLFGFGYDFRQSNRLQETMDRLAAKLESIYNAAGGKKINIITHSMGGLLVKCFMCLQSDIFEKYVKNWVAICAPFQGAPGTINSTFLNGMSFVEGWEQNFYISKWSMHQLLIECPSIYELMGCPNSHWKHIPALELWRERHDSDGKSHIVLESYPPCDSIKVLEQALVNNTVNYNGEDLPLPFNFEILKWANKTWEIHNGVDLPSPVNLEIIYGTSLETPHSVCFGSGDKPVTDLQQLRYFQAKYVCVDGDGTVPIESAKADGLNAEARVGVPGEHQRILREPHVFRLLKHWLKAGEPDPFYNPVNDYVILPTAFEMERHKEKGVEVASLKEEWEIISKVQDDQSSTADKVCSISVSQEGANQSYSEAHATVIVHPDSEGKQHVQLNALAVSVDAS

SEQ ID NO: 210383 - protein, 102 aa, Glycine max
  Clone ID: PAT_MRT3847_32002C.1.pep
NSRDNPCQRVAPIFAPIWSINTMSIVCLLVVPSPSFVFWPPSNEVTKGCSSHLHSSSGHLPSCSGQKKIEEGNENGIWKGAKWNSNPTTLPDAWADAWADAW

SEQ ID NO: 210384 - protein, 144 aa, Glycine max
  unsure (1)..(144): unsure at all Xaa locations
  Clone ID: PAT_MRT3847_32003C.1.pep
METNLLKLSLEDVETPKGSMLDHKIYQAKIALSKNTVGGTILRIELLANYXTEGNFRAXLIXQRTHRIKGMIKMVATVGNPEKTGIAVACAMNSFIRGRANSDNYTICCQDCEIRNPACTKAMTYXFNPXPCSDAWGWNNRNDP

SEQ ID NO: 210385 - protein, 127 aa, Glycine max
  unsure (1)..(127): unsure at all Xaa locations
  Clone ID: PAT_MRT3847_32004C.1.pep
VQAVFKNSEEHHVSDKKEEQPPAMKALELISMSKGMNLENLFDPEQGFQRESRFTSXSPADEIIFKIEEAAKPFGFHVQKGNCXMRLANVKGGRKGNLNVATEISQEALSLHMVKVRKAKVVRDQFL

SEQ ID NO: 210386 - protein, 43 aa, Glycine max
  unsure (1)..(43): unsure at all Xaa locations
  Clone ID: PAT_MRT3847_32005C.1.pep
XXXALAXMXAXPLXLTRXXXXXXXCGYRIXXXXNXELXLLXAT

SEQ ID NO: 210387 - protein, 77 aa, Glycine max
  Clone ID: PAT_MRT3847_32006C.1.pep
NIMQLQKHIFNKNHLPELIPYNEACTAKVLKLLRTLWKPSTMMKPPPPLLCFASKALNVIFPFFQFFPILCTGVSAN

SEQ ID NO: 210388 - protein, 84 aa, Glycine max
  Clone ID: PAT_MRT3847_32007C.1.pep
MVLGKKTKFFLFQTQGVKAKWAWTCHSPPWFPSSPHFLVRGPHPESGTGKNGNKDIKSTAPSSFPHKDGIFGERKNRIKKHHNK

SEQ ID NO: 210389 - protein, 71 aa, Glycine max
  Clone ID: PAT_MRT3847_32008C.1.pep
SLRYQRQCPHNLVHDHNDTQVLACGTVSAEVRLFEHCVVPGGAASPLLYLPDFEWRCDLKNFMLPVGGLAP

SEQ ID NO: 210390 - protein, 118 aa, Glycine max
  unsure (1)..(118): unsure at all Xaa locations
  Clone ID: PAT_MRT3847_32009C.1.pep
GFCGTRRMGKLTFPQWTSRSGKIMPLSIRGGAGAKNAIIMNMPNADLSMXRILDGDLHTXVYKMTSTYIKXTVSFLIEFGNLPVDTINIEAYPHKLVLFGQIQEKVVYKFSQEEILTH

SEQ ID NO: 210391 - protein, 58 aa, Glycine max
  Clone ID: PAT_MRT3847_3200C.1.pep
FGISTHCNACMTAHSNVMCVFIQWATGRIGVFSGSLFVVVVPGRGLGCLYYCLIGLTS

SEQ ID NO: 210392 - protein, 158 aa, Glycine max
  Clone ID: PAT_MRT3847_32010C.1.pep
AASVVTETEITELKVNVEKELVSQAEEEDMEALLGTYVMGIGEAEEFSERLKRELQALEAANVHALLESEPLMDEVLQGLDAATSCVEDMDEWLSIFNVKLRHMREDIASVRTCARQFKNINFLDTIYSLVVMAVFAGSMIHMFSFLCSFVKARQFMH

SEQ ID NO: 210393 - protein, 307 aa, Glycine max
  Clone ID: PAT_MRT3847_32011C.1.pep
MENFPEINLENLNGEERKATLNQIEDACQNWGFFELVSHGIPLELLDTVERLTKEHYRKCMEKRFKEAVSSKGLEAEVKDMDWESTFFLRHLPTSNISEIPDLSQEYRDAMKEFAQKLEKLAEELLDLLCENLGLEKGYLKNAFYGSRGPNFGTKVANYPACPKPELVKGLRAHTDAGGIILLLQDDKVSGLQLLKNGQWVDVPPMRHSIVVNLGDQIEVITNGRYKSVEHRVIAQTNGTRMSVASFYNPASDALIYPAPALLEQKAEDTEQVYPKFVFEDYMKLYATLKFQPKEPRFEAMKAIGSF

SEQ ID NO: 210394 - protein, 71 aa, Glycine max
  Clone ID: PAT_MRT3847_32012C.1.pep
VDSILLLQYILLFIYTILFHWSAHRLEVFQLQMAIDGSYSLHSSLQRFLHRCPKLHRFPSLELLARMGYLV

SEQ ID NO: 210395 - protein, 46 aa, Glycine max
  unsure (1)..(46): unsure at all Xaa locations
  Clone ID: PAT_MRT3847_32013C.1.pep
KEREKRXQQFRVLKKIKRXDGKRDSXIDTKKRISIRYSSMQETRYP

SEQ ID NO: 210396 - protein, 475 aa, Glycine max
  Clone ID: PAT_MRT3847_32014C.1.pep
MESIAAQLKRGISRQFSSGSLRRNLSWQFTRQASLDPRRNNQRFSFGRQSSLDPIRRSPCSGNAELTVPENLDSTMQLLFMACRGDVKGVEDLLNEGIDVNSIDLDGRTALHVAACEGHVEVARLLLSRKANLDARDRWGSTAAADAKYYGNTEIYYMLKARGAKVPKTRKTPMTVANPREVPEYELNPVELQVRKSDGISKGTYQVAKWNGTKVAVKILDKDSYSDPDTINAFKHELTLLERVRHPNVVQFVGAVTQNIPMMIVREYHSKGDLASYLQKKGRLSPSKVLRFALDIARGMNYLHECKPDPVIHCDLKPKNILLDNGGQLKIAGFGTVRFSLISPDEAKLVQPEPNIDLSSLYVAPEIYKDEVFDRSVDAYSFGLIIYEMIEGTHPFHPKSSEEAVRLMCLEGKRPAFKIKTKHYPPELKELIEECWDPTPVVRPTFSQVIARLDKIVANCSKQGWWKDTFKLPWK

SEQ ID NO: 210397 - protein, 58 aa, Glycine max
  Clone ID: PAT_MRT3847_32015C.1.pep
TCCLISLTQGNRAPCLPVAVDSLQRSVLRFCTQPWIRKALVQLRSALEGSMQSLKRTR

SEQ ID NO: 210398 - protein, 30 aa, Glycine max
  Clone ID: PAT_MRT3847_32016C.1.pep
TFSQVIARLDKIVANCSKQGWWKDTFKLPW

SEQ ID NO: 210399 - protein, 35 aa, Glycine max
  Clone ID: PAT_MRT3847_32017C.1.pep
CCAWRQICRNYYHVWCFASYSHTEMKGAGSLFEIW

SEQ ID NO: 210400 - protein, 103 aa, Glycine max
  Clone ID: PAT_MRT3847_32018C.1.pep
YKHRNNYGSRYGTGEHGYTADGIWGQLRNGGTVYVRQCLYCRWEGGLCHLWQIVTRGITNSKEDGTRDQEIYVKGMPVASQETFLSMINFDQHTGQDLLLVHK

SEQ ID NO: 210401 - protein, 33 aa, Glycine max
  unsure (1)..(33): unsure at all Xaa locations
  Clone ID: PAT_MRT3847_32019C.1.pep
YVXXXNIXFSWMISQFCFKIXLTCXLKLXIAHP

SEQ ID NO: 210402 - protein, 39 aa, Glycine max
  Clone ID: PAT_MRT3847_3201C.1.pep
QTLTGIIVPPVLLSNRNKGEPYLNKKITFLQNIIYDFKR

SEQ ID NO: 210403 - protein, 72 aa, Glycine max
  unsure (1)..(72): unsure at all Xaa locations
  Clone ID: PAT_MRT3847_32020C.1.pep
RILSNRESXILSRMRNQAHLTDLDTQVSQLRTENSSVIKQLTDVSHKYNNTAFYNRILNTDVATLITNVKIC

SEQ ID NO: 210404 - protein, 264 aa, Glycine max
  Clone ID: PAT_MRT3847_32021C.1.pep
ELGRVLVNRLRNNKEPYIALHLRYEKDMLSFTGCSHNLTAEEAEELRVMRYEVKHWKEKEIDSVDRRLQGGCPMSPREAAIFLKAMGYPSTTTIYIVAGPIYGANSLEGFQSEFPNVFSHSTLATEEELEPFKPYQNRLAALDYIVALESDVFVYTYDGNMAKAVQGHRRFEGFQKTINPDRLNFVKLIDQLDEGAISWEAFASEVKNLHSNRLGAPYLRQVGESPRMEENFYANPFPGCVCNKSQEQITSQKLDHQFGIGAQR

SEQ ID NO: 210405 - protein, 39 aa, Glycine max
  unsure (1)..(39): unsure at all Xaa locations
  Clone ID: PAT_MRT3847_32022C.1.pep
FLEFPSSILPLFIYTDKXYMCRLTIEIIETENLKSLFIV

SEQ ID NO: 210406 - protein, 136 aa, Glycine max
  unsure (1)..(136): unsure at all Xaa locations
  Clone ID: PAT_MRT3847_32023C.1.pep
ASSLISSPAATTVNRAGAGLVAPFTGLKSMAGFPTRKTNNDITSIASNGGRVRCMQVWPPIGKKKFETLSYLPYLDDAQLAKEVEYRVKKRLMPYLEFEVKHDCVYREHNRSPRCYNRLYXTMIKLAMFSCTEACQ

SEQ ID NO: 210407 - protein, 87 aa, Glycine max
  Clone ID: PAT_MRT3847_32024C.1.pep
TVGVRELTSVLELSSMPHGVSHSFLHARLSGPFRYAYSSSLKTKVHESGTFCSIRKQGRERVIASIGLYTKAPRQLIYVFLQDSFIL

SEQ ID NO: 210408 - protein, 56 aa, Glycine max
  Clone ID: PAT_MRT3847_32025C.1.pep
MDLVASCKEKLQHFRIKELKDVLTHLGLSKQGKKQDLVDRILAILSEDQGMILFFL

SEQ ID NO: 210409 - protein, 101 aa, Glycine max
  Clone ID: PAT_MRT3847_32026C.1.pep
HRPKYCRNPWSPQRSPIHEPTNTGGTGLHQGIHPLLMVENKGGTDQGPLPGKKMEALLEGMITDAGLSFPDRSPPPENYILWYKKSIFVSIFRKKYARVML

SEQ ID NO: 210410 - protein, 79 aa, Glycine max
  unsure (1)..(79): unsure at all Xaa locations
  Clone ID: PAT_MRT3847_32027C.1.pep
KQGPPALGISNKALGIINSFIKAIFXKLVQEFFKFARFNKKPPLPSREIHTPVRIFLPGELAKHPVFXGTKAVPKFTRF

SEQ ID NO: 210411 - protein, 45 aa, Glycine max
  unsure (1)..(45): unsure at all Xaa locations
  Clone ID: PAT_MRT3847_32028C.1.pep
XPXMFQTDLRFXIYNCXILLFDPYKLXPSLIKKILFSFFXNGQLQ

SEQ ID NO: 210412 - protein, 66 aa, Glycine max
  Clone ID: PAT_MRT3847_32029C.1.pep
CPTFSLFLILLAVSLAAPFHPSSFSRQAVFSVLVRFCVSVVDKPALWILLWFRLYLVSAVRKDGRM

SEQ ID NO: 210413 - protein, 39 aa, Glycine max
  Clone ID: PAT_MRT3847_3202C.1.pep
PQGQSQWVNGGTISPAHNSIRHRINVARLHFASLNFGCI

SEQ ID NO: 210414 - protein, 67 aa, Glycine max
  unsure (1)..(67): unsure at all Xaa locations
  Clone ID: PAT_MRT3847_32030C.1.pep
YEMQYFTYWRNITPLPISFWISNAVFHVLEKHNTTIWKLPPHSVSTFCLASXXFRPLLPPSLNPTPV

SEQ ID NO: 210415 - protein, 51 aa, Glycine max
  Clone ID: PAT_MRT3847_32031C.1.pep
LTICSLHLPFLFIFSLHSPATPQFLKKKTTFQNEDVHLNIRYSSSPLGTIR

SEQ ID NO: 210416 - protein, 39 aa, Glycine max
  Clone ID: PAT_MRT3847_32032C.1.pep
LANTKPKPLFSGAPSYVYASIVTCFLPSKWPPPEKHTTV

SEQ ID NO: 210417 - protein, 142 aa, Glycine max
  Clone ID: PAT_MRT3847_32033C.1.pep
QCVYANYFLIILHQLLPHQVVGTQGYAAPEYVETGHLKIQSDIWSFGVVLYEILTGRRALNRNRPIGEKKLIEWVKNYPANSSRFSTIIDPRLKNQYSLGAARKVAKLADSCLKKNPEDRPSMSQIVESLKQALQDSETKNA

SEQ ID NO: 210418 - protein, 126 aa, Glycine max
  Clone ID: PAT_MRT3847_32034C.1.pep
NYNSGHGLKNLHGIVFHNDTDDWWVQIDTFSAMNGISRFCESEFPWRYSKEEQISLQEFHQRNFTFLINEHPAINGFKCLFTEDGFSRVRLKPGYPPILLVKEPKVYVHGNLENQNIFSQNWPGCP

SEQ ID NO: 210419 - protein, 28 aa, Glycine max
  Clone ID: PAT_MRT3847_32035C.1.pep
PARLLWRNEGVSLLTIMGTGPSLCLNPP

SEQ ID NO: 210420 - protein, 45 aa, Glycine max
  unsure (1)..(45): unsure at all Xaa locations
  Clone ID: PAT_MRT3847_32036C.1.pep
XVTKRLXXKRXXXPXIRESXIRFXXAQCLHCNGDXXNPXTEENFD

SEQ ID NO: 210421 - protein, 53 aa, Glycine max
  Clone ID: PAT_MRT3847_32037C.1.pep
AHTLKGRLIILCQNLFWGGGAIHKLIFKEGHWQRGGAQLFRGPEYSRGRDKQQ

SEQ ID NO: 210422 - protein, 72 aa, Glycine max
  Clone ID: PAT_MRT3847_32038C.1.pep
SMSYSLIAGNYPIRILSTMTEGTSAHTHFNVENGALFSTITMIRLALVGLPSKASGSLIPFTSAPNALLADL

SEQ ID NO: 210423 - protein, 77 aa, Glycine max
  Clone ID: PAT_MRT3847_32039C.1.pep
GLHALVLSQAFVKFFKLFVVLYFQASSLQFEFMSYYLAELSLLEYCCLKFLPSLVAASVVFLARFIIWPDLQPWVRI

SEQ ID NO: 210424 - protein, 107 aa, Glycine max
  unsure (1)..(107): unsure at all Xaa locations
  Clone ID: PAT_MRT3847_3203C.1.pep
MPITLIQLQASILDPLLAKRSVPLAPRPTTQDAHLLAPNMGRVEDVFATHLTFMEGAKEPSGENIAGHNLRHRKVDDEDYPTEPEWTXLLPVPRFRVSGLTPGSVFI

SEQ ID NO: 210425 - protein, 82 aa, Glycine max
  unsure (1)..(82): unsure at all Xaa locations
  Clone ID: PAT_MRT3847_32040C.1.pep
SLYFINCVNAIIQNLEGIHRDHHRLIYGXKQLEDRRSLTYVHIQKELTITLALRLRGGMQILVNTLTGGTISLDVACSDTID

SEQ ID NO: 210426 - protein, 97 aa, Glycine max
  Clone ID: PAT_MRT3847_32041C.1.pep
CEAISGTRTSWLGPSCKALTRRTRTRIPNPWLGMQSCLCFRPQGKNQGFVNLNWFFWFAIMVGIQLVILYQRCCTCGGTVEGSSVGCFRYISLCARL

SEQ ID NO: 210427 - protein, 61 aa, Glycine max
  Clone ID: PAT_MRT3847_32042C.1.pep
NQTHFTDHYDSFLRGVEILSIGRASFSRGSCRISSSVLKDRSCDSAFEWQIMQRMPYFQKR

SEQ ID NO: 210428 - protein, 77 aa, Glycine max
  Clone ID: PAT_MRT3847_32043C.1.pep
MASALQLQGVQGNYLCVSVRRGLHHCKPQIGFAAFGAPVCARRVWGNRVAFNVTTCKASTTSDVIEKSVTENRVVSI

SEQ ID NO: 210429 - protein, 111 aa, Glycine max
  Clone ID: PAT_MRT3847_32044C.1.pep
RAKLGIRLEQEPPELLQPPEPIKPGEIQKQSPADNPQQDAEGDKQEPSDRDAANHSQDEEEEDETPASTAETKNEEEDRRGRATRREGKNAQERERPRGGSDVRRQAQRDP

SEQ ID NO: 210430 - protein, 118 aa, Glycine max
  Clone ID: PAT_MRT3847_32045C.1.pep
MKVHHSDQLLLSLFLLLAFHVPHMAVGTAELTALMELKSPLDPDGKILGSWISDGDPCNGFFEGVACNDHRKGANIYLQGKGLSGWISSTLAELKCLSALYLHYNNLSGEIPPHISNL

SEQ ID NO: 210431 - protein, 64 aa, Glycine max
  Clone ID: PAT_MRT3847_32046C.1.pep
TIEEFDQLVSYHRYQNSFNKQEFSKGSSHSTRNGIISFKAMVDLLIKKSQTSHRKRGVGNTTPS

SEQ ID NO: 210432 - protein, 155 aa, Glycine max
  Clone ID: PAT_MRT3847_32047C.1.pep
ILLSNRKIVDIGETLSLFMELQTLARAALKKLAFDHVVHSIRRMNQKHKNEAKNRALQNVLFDLLQKEAEEPAKRALVTLCELHRRKVWFDERTANAICTASFHPTSRIMIATLSFLLDYEKIQDDDDDSDNSDSDDEKTESPQVVLSRETVYKG

SEQ ID NO: 210433 - protein, 91 aa, Glycine max
  unsure (1)..(91): unsure at all Xaa locations
  Clone ID: PAT_MRT3847_32048C.1.pep
LFRHLQRRTFEQILRESCPSVTLFLAPPLRTTXVIRFQRRTSTTSSSSSSFSSLCLVMVQSQQNSGWKEGFNFPTNQGSCKEKYLKGENPG

SEQ ID NO: 210434 - protein, 89 aa, Glycine max
  unsure (1)..(89): unsure at all Xaa locations
  Clone ID: PAT_MRT3847_32049C.1.pep
FCGKITTDGNAITNAVDVYRNPAXAAKHRTLSLKFLFLVXLVTEPSLCSGSLRVITANNDSQLRVFDAENFASLGCFKYDWSVNVSVIN

SEQ ID NO: 210435 - protein, 145 aa, Glycine max
  Clone ID: PAT_MRT3847_3204C.1.pep
MSPVRTMTVAAADVAVSSDGEAEYSFAVAYNGPPPAYDLPRAVPIAAGKIPAAVTLAQVPFSDALSLPMVQPLSKELKTPSSEPAVSPTSDRLRPEPRRRLRESHGCRDLRIRVRRRPRRRCSGRPTTRSSEKLGLGQFNNTKAL

SEQ ID NO: 210436 - protein, 58 aa, Glycine max
  Clone ID: PAT_MRT3847_32050C.1.pep
GSRSYAACVKYIAKSTYRSVAIGSIEPKPAPPIHLSRFNCNIFAAGITFGRCIFHVSI

SEQ ID NO: 210437 - protein, 145 aa, Glycine max
  Clone ID: PAT_MRT3847_32051C.1.pep
MINNHVNGANDVDMERTENESFGELNQRLIALKAEKNNKESATLAVKVLAFFVNCDNLSAAQDFVEALKNLPESASNSDWARWFYYLGRIEALKGTDAETYKAAEKHFEVALRKAPQNGAVGFKQEVNKWVVLVKLLIGEIPERS

SEQ ID NO: 210438 - protein, 112 aa, Glycine max
  Clone ID: PAT_MRT3847_32052C.1.pep
EQPVILAKHNQQPYIHFRKDWQRYVRVHFDQAGKKKSRRNARQAKAATVAPRPVDKLRPVDRCPTNKYNRRVRAGRGFSLAELKAAGISRKLARTICIFVDPRRQNLSEESL

SEQ ID NO: 210439 - protein, 66 aa, Glycine max
  Clone ID: PAT_MRT3847_32053C.1.pep
FQESLNFFLLLCVRFLKGKKITLCAGHRLRESFSFPLLVYLLNTLLFDIGFRVRIKLLLFFFQISV

SEQ ID NO: 210440 - protein, 88 aa, Glycine max
  unsure (1)..(88): unsure at all Xaa locations
  Clone ID: PAT_MRT3847_32054C.1.pep
MQHRGVAVLGVPIFLPRPCNFIVFFWGPLILFHWPGFYTLFLGKPLRLPNLSALHSFPFSPVGVXWKGPAPLAFPTICAAFLAIGPPL

SEQ ID NO: 210441 - protein, 96 aa, Glycine max
  Clone ID: PAT_MRT3847_32055C.1.pep
SSASSYMVSNASGLSFIFMYCTSYLSFCGRLPVIIFYSNVIYPLFSSVIFFPHYRVIYFIFVPQYSGYTSCMHFGGVERICLKFSPCPLVVSSRNH

SEQ ID NO: 210442 - protein, 105 aa, Glycine max
  Clone ID: PAT_MRT3847_32056C.1.pep
FHCCLATCVFPTEPNPRVMGLASVVHIHAPPFRCSVLHHPISSFCSMYHYRPPRRFPLLCSRRIGHDNYASEVKRISAQQNDDIGKVEKSPTQESLGNEGYNSFG

SEQ ID NO: 210443 - protein, 113 aa, Glycine max
  Clone ID: PAT_MRT3847_32057C.1.pep
WGDTFGYIRGEVRGSTGGPPDSPVGPWGFPWGGHGPPGMGGPSFGPPVPGFPPLGPTPPFPPRFHPPGVLGSPLVSPFPPLGLPLPPPGLFLSPFKGFLTGLQRFSVFPPGPP

SEQ ID NO: 210444 - protein, 106 aa, Glycine max
  Clone ID: PAT_MRT3847_32058C.1.pep
GPTGTALNFRAGKQMTFHNTSLFGTKLEGFNPSGNTHHPCFCFGPTPFFTVKKRVNTNMLKGQALNNFGTLMGHYFPQFGKVQTVGVGRLFRRGIFLKSFGTRPFK

SEQ ID NO: 210445 - protein, 219 aa, Glycine max
  unsure (1)..(219): unsure at all Xaa locations
  Clone ID: PAT_MRT3847_32059C.1.pep
MGYCNYLLWAPMSLPTLCYVFVSPICLLRGIPLFPQLSSIWVLPFAYAFLATYGFSLCEYLICGSTAKGWWNLQRIKFIHRTTSYLFGFIDTMKKQLGLSATNFVITDKVVTKDVQKRYEQEIIEFGGSSIMLTILATVALLNLFGLLWGMKRIMMDLNGIQLXQLMMQITLSSLVVMISLPVYEALFIRSDKGCIPSSVMLKSIVLASLACCLAPFIC

SEQ ID NO: 210446 - protein, 151 aa, Glycine max
  Clone ID: PAT_MRT3847_3205C.1.pep
FNHIIIPSGKRSKMAKEKTPSWVVDLLLIAAFVLALAFSASVAAILRWRRLRKGIPQISHREIQPLDLSSAEARNALEDHEVHFGGRPNFKDIFGKLHDESDGSNIGVLVCGPESMKESVAFACQQESECFKASGKRTESCFTFHTLNFTL

SEQ ID NO: 210447 - protein, 48 aa, Glycine max
  Clone ID: PAT_MRT3847_32060C.1.pep
CALVSSVKMTVELFEESVLPAPVYAQVTRLWNWTILKGQRSVLIVSMG

SEQ ID NO: 210448 - protein, 93 aa, Glycine max
  Clone ID: PAT_MRT3847_32061C.1.pep
QRPKGEPLGPGSPFKPPLTPPGPWPPKTNPFLTNWGKGKPLGGDTHLNPPGPPKKGGVLGPPPKNPWAKKGEKGAPGEPKGGRYSNPQKLGDP

SEQ ID NO: 210449 - protein, 102 aa, Glycine max
  unsure (1)..(102): unsure at all Xaa locations
  Clone ID: PAT_MRT3847_32062C.1.pep
LTFPVGLAKPGAPWQFRKLADGDFLKRNFKQMSNVLWVAPEDKASLWHNSLWFVYNLGMQKAILSSRNVYEIVLHSXEKARIEKEALSRXEWLQKLMCSIHR

SEQ ID NO: 210450 - protein, 68 aa, Glycine max
  Clone ID: PAT_MRT3847_32063C.1.pep
MLKKPVLPEVVADSHAASGIGTESLDAAQAGRSGKKKGKKGKQIDPSLLGFKVSSNRIMMGEIQRPED

SEQ ID NO: 210451 - protein, 66 aa, Glycine max
  Clone ID: PAT_MRT3847_32064C.1.pep
TLQSTNPKSHTFNHTSYNNNNNNTRTRSGKFKTFFSPFPFFTITGFKPRPGAYNPNPIISPRIGPQ

SEQ ID NO: 210452 - protein, 150 aa, Glycine max
  unsure (1)..(150): unsure at all Xaa locations
  Clone ID: PAT_MRT3847_32065C.1.pep
PQPIGGILTHCGWNSNTXKGIGAGLPMITWXPLFADQFLNEKLVTKVLKIGVSVGVEVPMKFGEEEKTGVLVKKEDINRAICMVMDDDGEESKERRERATKLSEMAKRAVENGGSSHLDLSLLIQDIMQQSSSKEEIMSTPKESQFSCNV

SEQ ID NO: 210453 - protein, 112 aa, Glycine max
  unsure (1)..(112): unsure at all Xaa locations
  Clone ID: PAT_MRT3847_32066C.1.pep
XXXRXXXXXXDFVXDXXXXXXXXFPIXXIXLPXVPFXXXYXXSXXXXRXXXXXXTXHSGXFXXLVXXXINSRLAXXXCPXXXXFDEFXXXXXSXQRXXXSXRIPSLRTRXLR

SEQ ID NO: 210454 - protein, 27 aa, Glycine max
  unsure (1)..(27): unsure at all Xaa locations
  Clone ID: PAT_MRT3847_32067C.1.pep
MMFCYKXQSDIGSAHCKQIKIACEYGT

SEQ ID NO: 210455 - protein, 192 aa, Glycine max
  Clone ID: PAT_MRT3847_32068C.1.pep
MESTVTFETDLNLKATELRLGLPGTEEIVEKPLPASARITNKRPLSETSEECASKGSSAPHVETEAAPPAKAKIVGWPPIRSYRKNSLQENDGAGIYVKVSMDGAPYLRKIDLKVYGGYTQLLKALENMFKLTIGEYSEKEGYKGSDYAPTYEDKDGDWMLVGDVPWDMFVTSCKRLRIMKGSEARGLGCAV

SEQ ID NO: 210456 - protein, 42 aa, Glycine max
  unsure (1)..(42): unsure at all Xaa locations
  Clone ID: PAT_MRT3847_32069C.1.pep
XFFCVKKKNNILFNNGFHLEYGLSQKWGEQLLLTIPYTDPYI

SEQ ID NO: 210457 - protein, 38 aa, Glycine max
  Clone ID: PAT_MRT3847_3206C.1.pep
APKGRHLRISAFLLSKHSNSHSHHSFAIPWLRDITHRR

SEQ ID NO: 210458 - protein, 114 aa, Glycine max
  unsure (1)..(114): unsure at all Xaa locations
  Clone ID: PAT_MRT3847_32070C.1.pep
SFSVLDGAMVVLCTYFPIVLFLTLAIDLXLGTSLFYTGMYNIIIRCHXGLPIPVQTMKFIIDCGLAYPTFFIPEIIGFGILTGATMLVLGVTGLHSISLQLIPLCVVRGIQLAQ

SEQ ID NO: 210459 - protein, 25 aa, Glycine max
  Clone ID: PAT_MRT3847_32071C.1.pep
HFLLFVCPLILEAITSYRSRSKFRP

SEQ ID NO: 210460 - protein, 56 aa, Glycine max
  Clone ID: PAT_MRT3847_32072C.1.pep
IKVWALTGDNQDTAISIGLSFKLLSANMQQIIINCPLKVYFTNLFTYSKNKKSVKS

SEQ ID NO: 210461 - protein, 57 aa, Glycine max
  unsure (1)..(57): unsure at all Xaa locations
  Clone ID: PAT_MRT3847_32073C.1.pep
DVDVSVGELVEVSDEFFASAPRHREGTIAEXREXRVRXDYTENAHYDATNRVTHDAI

SEQ ID NO: 210462 - protein, 65 aa, Glycine max
  Clone ID: PAT_MRT3847_32074C.1.pep
LHERLTYKEFPLDFTFWGGRAYNTKILGQKKKGWPNHCPLELQAGPISAPTHTGFYLKTPTCFSS

SEQ ID NO: 210463 - protein, 50 aa, Glycine max
  Clone ID: PAT_MRT3847_32075C.1.pep
IKFENQTLETYTHLKQNLRNYMLIFDNFYCSPFILLNSTSMIISTLCTGI

SEQ ID NO: 210464 - protein, 120 aa, Glycine max
  Clone ID: PAT_MRT3847_32076C.1.pep
FNVVGQQLRFPESPATSYASRDLIRGLLVKEPQHRLGVKRGATEIKQHPFFEGVNWALIRCSTPPEVPRPVEFDPPAKFEPVDTVGVGNNNINNNNSSKRMVGNNNDMKSGGKYLDFEFF

SEQ ID NO: 210465 - protein, 128 aa, Glycine max
  Clone ID: PAT_MRT3847_32077C.1.pep
MRLTHAAIAAILAFTVTASPVPEHPQPSSFYPAADPPAEHPKPTTVHPAAEHPKPTSEHPPPEHAKPTPEHPKPTPEHPKPTPEHAKPTPEHPIPTTEHSKPTPEHAKPTTEHPKPTTEHPKPTTEHP

SEQ ID NO: 210466 - protein, 67 aa, Glycine max
  Clone ID: PAT_MRT3847_32078C.1.pep
MAEYWKSTPKYWCKFCQTYVRDTKFERQQHEATGKHQSAIQRSLRDLHRTREREDRERQRAKDEVAR

SEQ ID NO: 210467 - protein, 99 aa, Glycine max
  unsure (1)..(99): unsure at all Xaa locations
  Clone ID: PAT_MRT3847_32079C.1.pep
GTCNKAVIGQILICGPDKDRDNYHVKEDFIRAKLKFVGRQKISVSRKWGVARCNRSNDIRFQLXNKIVPCCANSKHFSSRGPLGNSDPARHFLEGRKEF

SEQ ID NO: 210468 - protein, 45 aa, Glycine max
  Clone ID: PAT_MRT3847_3207C.1.pep
MSFIRALSSLLIIPFPRTAETFMIISIIITPFYPRVRPRVRGRMG

SEQ ID NO: 210469 - protein, 37 aa, Glycine max
  Clone ID: PAT_MRT3847_32080C.1.pep
WPIVTSIDSLSVPLCFSCPQTSVKALVVLSWTLLAAS

SEQ ID NO: 210470 - protein, 65 aa, Glycine max
  Clone ID: PAT_MRT3847_32081C.1.pep
YFSLLCWKLSFHLRGMGLKYINTAYSYTGINCLESSLRAGYPKLYLEDAKIYIQGKGGPPSSHPT

SEQ ID NO: 210471 - protein, 43 aa, Glycine max
  Clone ID: PAT_MRT3847_32082C.1.pep
LYFFFFFFSFFFFFIFQLWGFFCIFFLLFFLLSFAPLWGGHHI

SEQ ID NO: 210472 - protein, 45 aa, Glycine max
  Clone ID: PAT_MRT3847_32083C.1.pep
QAVLQPIDLLMRELVEPYDGDATDLSPEETDSMTGGYGESINHVI

SEQ ID NO: 210473 - protein, 43 aa, Glycine max
  Clone ID: PAT_MRT3847_32084C.1.pep
LLIYSGNSPLIKMTPPYDFKVFFFFNIKIQASIKPLQNGTAGN

SEQ ID NO: 210474 - protein, 218 aa, Glycine max
  unsure (1)..(218): unsure at all Xaa locations
  Clone ID: PAT_MRT3847_32085C.1.pep
MISTMSWDENNDEFEIPLTQTTTAFHAALASIDDDNNQRPSKKPKRKTSEGGCEIDNCCSLDFIPSTIGCVSACSVQPLGEEDSVSPSSSTASLSELKTKGNYLRNSIESKLVVSRANALNRADADSDSELDLLMNLCDELEEVDSSVRCPLCEVDISNLTEEQRHLHTNNCLDDVAVVPDDNEKGAQQVPKVASVGDWLHGLGLXKYEDVFLREEVD

SEQ ID NO: 210475 - protein, 83 aa, Glycine max
  Clone ID: PAT_MRT3847_32086C.1.pep
TWLLHPCIMCLWCSCLPRTHLPRLFSMHSLSPVSALLDPEARGAPPSYSGPCDSSLAPSAMAPYLRPLVPHMSLRFLARRCLL

SEQ ID NO: 210476 - protein, 164 aa, Glycine max
  Clone ID: PAT_MRT3847_32087C.1.pep
RSIVKKESITNGGFVKASIPAQTAIPEVTTTRTGRKPTCNSCLPPPPPPMPPSIPSRPIAKANNTQRAPAFVKLFHTLKNQEGMKSTTGSGKQQRPVAVNVHSSIVGEIQNRSAHLLAIRADIETKGEFINDLIKKVVEAAYTDIEDVLNFVNWLDGELSSLAD

SEQ ID NO: 210477 - protein, 89 aa, Glycine max
  Clone ID: PAT_MRT3847_32088C.1.pep
YTSLIFDFLYDASKLTAASVEKQSKCSSINHYLQPSDESRCKILLYTIPHPIFVFLSSSLYSPSQSLRQHFRHSPTCLPSPTNSPASTT

SEQ ID NO: 210478 - protein, 49 aa, Glycine max
  Clone ID: PAT_MRT3847_32089C.1.pep
GDPFCTEYNATACRTEEMCNMLTVVHRIFTMQSPSIRDALKLHVFQTSE

SEQ ID NO: 210479 - protein, 43 aa, Glycine max
  Clone ID: PAT_MRT3847_3208C.1.pep
GDGRGDSGGEGQMGCAIARTMLTREPIRRIHHNHACEDDYSAN

SEQ ID NO: 210480 - protein, 37 aa, Glycine max
  Clone ID: PAT_MRT3847_32090C.1.pep
DVKELGSSSASAFHDDAFPCQVYVLTFQTSFYVKCPA

SEQ ID NO: 210481 - protein, 134 aa, Glycine max
  Clone ID: PAT_MRT3847_32091C.1.pep
MKTQAGTLQHPPQPASSDYAFPIFVIVVLSILATVLLLLSYFTFLTKYCSNWRQVNPMRWISILRARHEEDPFIAFSPAMWNRGLDESIIREIPTFQFIKGEEGEDQSVYGCVVSLTEVKEQDVLKVLPNCNHA

SEQ ID NO: 210482 - protein, 148 aa, Glycine max
  Clone ID: PAT_MRT3847_32092C.1.pep
MFMFLCLQPLPPSKRLRLEAQRVLKERVQDIADKKGIKLRFCNLKECESHIHSVDSPCANIRMEIGWPLGVPFVHPHDLPNKAKLGFLEAYEPGWTEAHQNSDRHRSPSKPRQESVPLISNVWATMDQVVKIALYSSQGALNLSVARL

SEQ ID NO: 210483 - protein, 38 aa, Glycine max
  unsure (1)..(38): unsure at all Xaa locations
  Clone ID: PAT_MRT3847_32093C.1.pep
XMDTGMFXXXAQQCHXFRXGQXXTSPVNMDLPNTRCLP

SEQ ID NO: 210484 - protein, 59 aa, Glycine max
  unsure (1)..(59): unsure at all Xaa locations
  Clone ID: PAT_MRT3847_32094C.1.pep
THTHTPIQPSIPXYNFPTSKYNTHPPPHHLPXPKKHYIKPSITHIPPLMQPLKPPIYLK

SEQ ID NO: 210485 - protein, 82 aa, Glycine max
  Clone ID: PAT_MRT3847_32095C.1.pep
MAGQRSYLQIGEFKEAFTLFYKDGDGCLTTNELGTVMRSLGQNPTDADLQDMINEVDADGNSTIDFPEFLHLMARMMKYTDS

SEQ ID NO: 210486 - protein, 84 aa, Glycine max
  Clone ID: PAT_MRT3847_32096C.1.pep
FSRVTIVLNTACQEHTQKTSDRKINTISRHALQPCLCILYIRYGIYDILSSHETEWRLRFGKGQRVSEVARMRMRLTDLEKDHV

SEQ ID NO: 210487 - protein, 55 aa, Glycine max
  Clone ID: PAT_MRT3847_32097C.1.pep
HITLCNRLHTIGNRLPEATKHPVSIFKPCNRLPTNGNRLPEGIFQITPKINSWPA

SEQ ID NO: 210488 - protein, 36 aa, Glycine max
  Clone ID: PAT_MRT3847_32098C.1.pep
RHVDIYLGHPKRNNLHLNCYRTIVPTTKWTNTLIGT

SEQ ID NO: 210489 - protein, 75 aa, Glycine max
  Clone ID: PAT_MRT3847_32099C.1.pep
GGCHLTSQTDGYGRIILRFHPLMLTSCSRGTPSSHHDSLSTSDASCLAFTTWTTTRELSCPPWLTHATRLQALFF

SEQ ID NO: 210490 - protein, 52 aa, Glycine max
  Clone ID: PAT_MRT3847_3209C.1.pep
ILTINFCLKLQNTDPQHHKSQYQFLLNLIIINLSRIFPVSVSVSVSLPFHVH

SEQ ID NO: 210491 - protein, 86 aa, Glycine max
  unsure (1)..(86): unsure at all Xaa locations
  Clone ID: PAT_MRT3847_320C.1.pep
VSLSNCVSKMGLKKMEQFGLAKLIEVAANLLNDRLPEARDXARSIATSMYEALTKDSEEMMELWQSFCQSKLPPIHALSILKIVKP

SEQ ID NO: 210492 - protein, 156 aa, Glycine max
  Clone ID: PAT_MRT3847_32100C.1.pep
MSQPQPQSQPQHGQAALEQVQCFGRKKTAVAVTYCKRGRGLIKINGCPIELVEPEILRFKAFEPILLLGKSRFAGVDMRIRVKGGGHTSQIYAIRQSIAKALVAFYQKYVDEQSKKEIKDILVRYDRTLLVADPRRCEPKKFGGRGARARFQKSYR

SEQ ID NO: 210493 - protein, 70 aa, Glycine max
  Clone ID: PAT_MRT3847_32101C.1.pep
VLFSDTSNEGNQVSLFSSVCSAYLKKSTPSSIVVMKCEAQCLLNKLLGLVCIKHTPGRASTEQDPSLGNA

SEQ ID NO: 210494 - protein, 148 aa, Glycine max
  Clone ID: PAT_MRT3847_32102C.1.pep
FGSSARRRQKGDTYGVFADPVDPEELPDYHDVIEHPMDFATVRKKLGNGSYTTLEQFETDVFLICSNAMQYNAPETIYHKQARSIQELGRKKFEKLRIGFERSQNELKSEQKAGSNYLVKKQPKKPLARASQEPRLTDLVLVFFLATI

SEQ ID NO: 210495 - protein, 35 aa, Glycine max
  Clone ID: PAT_MRT3847_32103C.1.pep
FHILTIVTFATKRTIRHITAIKFLKALIAGMLGCQ

SEQ ID NO: 210496 - protein, 74 aa, Glycine max
  unsure (1)..(74): unsure at all Xaa locations
  Clone ID: PAT_MRT3847_32104C.1.pep
IWNPVCTKSMTKSQKPNPCFDAWREELLKRTGFXLPYIRVTGRTATPMXQEVQVYIERFIPSQERGPQTYSILN

SEQ ID NO: 210497 - protein, 57 aa, Glycine max
  Clone ID: PAT_MRT3847_32105C.1.pep
WVGNGEKENRKKYLHLCFFLLRRNVTTLAIVISFINFLIFLTFPSVNVTSYMVNEYD

SEQ ID NO: 210498 - protein, 38 aa, Glycine max
  Clone ID: PAT_MRT3847_32106C.1.pep
LPTLTDKPTKKIHCKSNRFVLWLAQELMGLINFYLQGY

SEQ ID NO: 210499 - protein, 23 aa, Glycine max
  Clone ID: PAT_MRT3847_32107C.1.pep
TVITVYTGDPLITKHIYFDFHYS

SEQ ID NO: 210500 - protein, 97 aa, Glycine max
  unsure (1)..(97): unsure at all Xaa locations
  Clone ID: PAT_MRT3847_32108C.1.pep
PGWFYQNVGHLAQAGLIVRKRPTIHSRSHRLRMKEANKRGQHSAYGERSGTREAMHSTESLXMMRXRLLKRWVGPCRGASKMDXHMCHDMYMKVKGN

SEQ ID NO: 210501 - protein, 93 aa, Glycine max
  unsure (1)..(93): unsure at all Xaa locations
  Clone ID: PAT_MRT3847_32109C.1.pep
QNSGSEEDSQAMMEHQRKTTRMISNRYSARRSPMKKQSHFHYLVPPVAQPRXEIRHIPATGHITTQQCLSVEAENSVLTAHVGELSHMLESLN

SEQ ID NO: 210502 - protein, 165 aa, Glycine max
  Clone ID: PAT_MRT3847_3210C.1.pep
MMQGCEVDAIGINYTIHTHKSEHPFKIFSNKSAHLDTEQDGKEPEEEAEVEQSCSGVRHVLKNVSFQAKPWEILAIVGPSGAGKSSLLEILAGKHSPQSGTVFLNHKPVDKAQFKKLSGYVTQKDTLFPLLTVEETLMFSAKLRLKLSQEQLCSRVKSLIQELGL

SEQ ID NO: 210503 - protein, 21 aa, Glycine max
  Clone ID: PAT_MRT3847_32110C.1.pep
MIDNIDCGFPICISEFFLLEH

SEQ ID NO: 210504 - protein, 61 aa, Glycine max
  Clone ID: PAT_MRT3847_32111C.1.pep
KEWATCQFQPRTTVFSILIFRASKLSRGTPTPSTLRTSHSAETELHGPHDTKAGSLNVKVI

SEQ ID NO: 210505 - protein, 80 aa, Glycine max
  unsure (1)..(80): unsure at all Xaa locations
  Clone ID: PAT_MRT3847_32112C.1.pep
LIKTTLTVHAEKPVQFKVRAVVIVRNKIKXDFKETILKHLDAINDRIGTRNIVLELMSTEIDPSKPAFHNSPFESFSFSS

SEQ ID NO: 210506 - protein, 87 aa, Glycine max
  unsure (1)..(87): unsure at all Xaa locations
  Clone ID: PAT_MRT3847_32113C.1.pep
LLKSLVDFLASANALENHFGNTDIKKDLYGNIVVXGSTMFRGIADRMSKEITTLAPSSMKIKVVAPPKRKYSVWIRGSILASLNTFQ

SEQ ID NO: 210507 - protein, 367 aa, Glycine max
  unsure (1)..(367): unsure at all Xaa locations
  Clone ID: PAT_MRT3847_32114C.1.pep
MQPTSNGSDSKATEQRTPPPQPVAVPPQWMPMQYPAAAMVMQHHMMPPQHYAPPQPYMAYHQYQQQVPQAHHLGSSAENKTVWVGDLHHWMDENYLHRCFASTGEISSIKVIRNKQTGLSEGYGFVEFYSHGTADKVLQNYAGILMPNTEQPFRLNWATFSTGDKRSDNVPDLSIFVGDLAADVTDSMLHETFTNRYPSVKAAKVVFDANTGRSKGYGFVRFGDDNERSQAMTEMNGVYCSSASSEQYSRXLKHPLSQYGEIVTVKITVGKGCGFVQFANRNNAEEALQKLNGTTIGKQMVRLSWGRSPANKQFRADFGNAWSGAYYGGPVYDGYGYALPPPYDPSIYAAAAYGAYPIYGGYQQQVS

SEQ ID NO: 210508 - protein, 116 aa, Glycine max
  Clone ID: PAT_MRT3847_32115C.1.pep
MFYSQFILAKKGPLGTIWIAAHLERKLRKNQVADTDIGVSVDSILFPEVPIALRLSSHLLLGVVRIYSRKVNYLFDDCSEALLKIKQAFRSTAVDLPPEESTAPYHSITLPETFDL

SEQ ID NO: 210509 - protein, 93 aa, Glycine max
  unsure (1)..(93): unsure at all Xaa locations
  Clone ID: PAT_MRT3847_32116C.1.pep
LDNFANRNNAEEXALQKVNGPTIGKQMVCLSWGRNPANKQXRADFGNAWSGAYYGGPVYDGYGYALPPSHDPSIYAAAYGAYPIYGGHQQQVS

SEQ ID NO: 210510 - protein, 52 aa, Glycine max
  Clone ID: PAT_MRT3847_32117C.1.pep
VSSSIRRFQVLKFMLGGYISGVVKVWGTNRVLPVLVLGPMPLNWPLVVSVCC

SEQ ID NO: 210511 - protein, 56 aa, Glycine max
  unsure (1)..(56): unsure at all Xaa locations
  Clone ID: PAT_MRT3847_32118C.1.pep
MGSDGVRKPRFLCLHGFRTSGEILNTQLHKWPQTVXDNVDLVYVDAPXLRKADCRG

SEQ ID NO: 210512 - protein, 67 aa, Glycine max
  Clone ID: PAT_MRT3847_32119C.1.pep
VESVLMMGIQGSVIHVHVKEFIDEIKAYVIVSLTHGLLDGLGIHVWNEVNVVRWNLFWWVFSISTRG

SEQ ID NO: 210513 - protein, 52 aa, Glycine max
  Clone ID: PAT_MRT3847_3211C.1.pep
LCCIFVSQNHNVQWHCRTGLLPQKGMRYIKCTIFCFYIVYWCKFSFPLLGGS

SEQ ID NO: 210514 - protein, 70 aa, Glycine max
  Clone ID: PAT_MRT3847_32120C.1.pep
PTRPLLPTFFKLHFHCFCLLGLQFTLHFIFSVLVGFCLWDEELAIVIEYNNLMILLVSYLSGSRSHVFLN

SEQ ID NO: 210515 - protein, 69 aa, Glycine max
  Clone ID: PAT_MRT3847_32121C.1.pep
HHQIILIQTRHNFHVPNPTPVRPPVLQIPHPPAPFPDLKPLPAAQVPEGPPGLWRQRRGGAGPVALRPS

SEQ ID NO: 210516 - protein, 36 aa, Glycine max
  Clone ID: PAT_MRT3847_32122C.1.pep
PSPTSHPPYYYKSPPPPMSSAPAPYHYVSPPPPTKY

SEQ ID NO: 210517 - protein, 336 aa, Glycine max
  unsure (1)..(336): unsure at all Xaa locations
  Clone ID: PAT_MRT3847_32123C.1.pep
MAPILQSSQPWVEKYRPKQVKDVAHQDEVVRVLTNTLETGSCPHMLFYGPPGTGKTSTALAITHQLYGPELYKSRVLELNACDYRGINXVRAAVAVVTNQGKSGYPWPQFKFIVLDEADSMTEDAQNALRRTMETYSKVTRFFFICNYVSRIIEPLASRCAKFRFKPLSEEIMSSRILYIGCEKTTEGDAEALSTLSSISHGDLRRAITYLQSAARLFGSSISSENLISVSGVVPAKVVEELLKACKSGNFDLANKEVNNFIAEGYPASQMLTQLFESIVEENDLSDEQKARISKKLGEADKCLVDGADEYLQLLDVVSNTIKAFNSLPEAFAYEC

SEQ ID NO: 210518 - protein, 64 aa, Glycine max
  Clone ID: PAT_MRT3847_32124C.1.pep
VHLIRHRQCLPYANALRAYHISWLYFRKHGTCQPSVGTWRKATDQYYRNWYPKLDLCLVTTQIL

SEQ ID NO: 210519 - protein, 329 aa, Glycine max
  unsure (1)..(329): unsure at all Xaa locations
  Clone ID: PAT_MRT3847_32125C.1.pep
MATEPSESTQRNTLVVRKPCFGLPTGCPRVRPRXAHASAXRVGFNLDYHPNYPDSDQIPYFEDGDSVTYNNEKEGIIECLKRNVGGDLDSEVSSLPDWIPTKVMATTWLADALEYELWVGCDGSSAYSIYYSDLPWPIGKVLFWKKAYWVKQKHGISEENVEVKEEEIYGRANSAYDALSTWLGEQNYLFENRPSSLDAIFLAHALVVLQALPESSILRTNFLEHANLVRYVQRCKTELIVAGTSASNDPYFHADPSSSASRGRSTSSSKPKTKPKRQPPTKEEKTLRRRAKYFVVAQLVAVVLFVSVLSGYRNNAADMELDNDDLGYE

SEQ ID NO: 210520 - protein, 155 aa, Glycine max
  Clone ID: PAT_MRT3847_32126C.1.pep
MATEPNESTQRNTLVVRKPCFGLPTGCPQCLSAYIFLKLSQFPFNLDYHPNYPDSDQIPYFEVGDSVTYNNEKEGIIECLKRNVDDDLDTGVSSLPDWITTKVMLTTWLADALEYELWVGCDGSSAYNIYYSDLPWPIGKILFWKKAYWVNQKPG

SEQ ID NO: 210521 - protein, 255 aa, Glycine max
  Clone ID: PAT_MRT3847_32127C.1.pep
WILEKDLPASIFVRVFESRMDLLRAVIIGAEGTPYHDGLFFFDVFFPSAYPNVPPKVHYHSGGLRLNPNLYACGKVCLSLLNTWSGSKNEKWLPGVSTILQVLVSIQGLILNTKPYFNEPGYAHMSGSANGEKMSFQYNEDTFILSLRTMMYMIRKPPKNFEDFVKGHFCSRASDILVACKAYMEGAQVGCLVKGGVQDVDEGDRSCSQRFKDSLSGYMNMLVKEFAKVGAKDIEKLLPPATTPVVNKPSGLSIA

SEQ ID NO: 210522 - protein, 53 aa, Glycine max
  Clone ID: PAT_MRT3847_32128C.1.pep
HSDLHLISVLRSNISLCLQICLTYCTWVSVSPDQTSFFINSGDTLTEMSNERI

SEQ ID NO: 210523 - protein, 476 aa, Glycine max
  unsure (1)..(476): unsure at all Xaa locations
  Clone ID: PAT_MRT3847_32129C.1.pep
MGNKTTLLLLLFVLCHGVATTTMAFHDDEGGDKKSPKSLFLMSNSTRVFKTDAGEMRVLKSHGGRIFYRHMHIGFISMEPKSLFVPQYLDSNLIIFIRRGEAKLGFIYDDELAERRLKTGDLYMIPSGSAFYLVNIGEGQRLHVICSIDPSTSLGLETFQSFYIGGGANSHSVLSGFEPAIIENAFNESSNVEEKIVXEXIERAVMLLIELAWLILXRKLPQLXQDVKEQQITKMMQDQEEDEEETLRRRSXEEALGLHFICMLKEIREKKQREVGGNCSTVLYDXDQGSMARKLFMSLVSLVPLLQNEAGYVDLLLYTMKISVIESXHVINMQKECHQVHVAVVKFSNRVKCGFHAVFVTEKQGXIVVQRDFSFCQAASSDVPLDFFDLDTSARNNQPHFLAIAVSLLRALMGPELSAAFGVSEDTLERAVDAQHEAVILPSAWAAPPENAGKLKMEEEPNAIRSFANDVVMDVF

SEQ ID NO: 210524 - protein, 44 aa, Glycine max
  Clone ID: PAT_MRT3847_3212C.1.pep
KSSFRISYRSLPWRRSLSMMKATELKTRIKTIYHLPARGADFVY

SEQ ID NO: 210525 - protein, 83 aa, Glycine max
  Clone ID: PAT_MRT3847_32130C.1.pep
DSGFFSLTKGFFLLRGVGFAIPIVPPFLPTQQIGGFLVALKKHFLLLLLEKFLWPPCQTHKGFRILKVMPFLVPTNYFSTKLL

SEQ ID NO: 210526 - protein, 70 aa, Glycine max
  Clone ID: PAT_MRT3847_32131C.1.pep
WVLPCPPFFSFFLITATCIPWGYLNLPNLRRKDQKGPPNYSWIDTALFKKKKLRQSTAAPPPILTRNILI

SEQ ID NO: 210527 - protein, 215 aa, Glycine max
  unsure (1)..(215): unsure at all Xaa locations
  Clone ID: PAT_MRT3847_32132C.1.pep
MEFSVLPLLYSLVFLLSNPTWVCGNGELRALMDMKASLDPESLYLPSWSINGDPCDGSFEGVACNEKGQVANISLQGKGLFGKLSAAIAGLKHLTGLYLHYNSLYGEIPREIANLTELVDLYLNVNNLSGEIPRKIASMENLQVLQLCYNQLTGSIPTQLGALEKLSXLLLLQSNNLTGAIPANLGELGMLVRLDLSSNNLFGSISTSLADAPSL

SEQ ID NO: 210528 - protein, 78 aa, Glycine max
  Clone ID: PAT_MRT3847_32133C.1.pep
KKQWEKGGLKTQDPQKGRGAKKKKKFSHNYKRKKKRVLKGPNFWALFSGSGAFFRPPPKGRWGGPQKKTLKKAWKALF

SEQ ID NO: 210529 - protein, 65 aa, Glycine max
  Clone ID: PAT_MRT3847_32134C.1.pep
ILTWYGIQKLLCSLDNFDNVINLMGSYWSCKHHLAFRYFICLYLESPLLSVYHVLAWSSGHNDSL

SEQ ID NO: 210530 - protein, 50 aa, Glycine max
  Clone ID: PAT_MRT3847_32135C.1.pep
MPLIQQFFSTYALPLDHKGNPKGFKPRDSGKKNHLRLKTWGQLRGLNPSF

SEQ ID NO: 210531 - protein, 105 aa, Glycine max
  unsure (1)..(105): unsure at all Xaa locations
  Clone ID: PAT_MRT3847_32136C.1.pep
XXFASXXXSXXXLLXSXPXXLXXVXCXYPFXSSFPXXVXFXFXXFXPXXPLLLLXSXPCXALXXLXAPSPXXPLXXXXXXSFLSXXXXXXLFXIXXLLFPXFLXV

SEQ ID NO: 210532 - protein, 166 aa, Glycine max
  Clone ID: PAT_MRT3847_32137C.1.pep
MSSDSDEDELLQMALKDQAQRDVNYGKSSSNSRKPVANYVQQPKKPAPPPKQSLGKGRVAADDDDSEIEMLSISSGDEDNVQYPVAASRNKGATAAAAGRPVREDDRTWDGEEPSRWKHVDEAELARKVREMRETRSAPAPQKFVGSKFEKKGPAVGRKGAYLPAV

SEQ ID NO: 210533 - protein, 72 aa, Glycine max
  unsure (1)..(72): unsure at all Xaa locations
  Clone ID: PAT_MRT3847_32138C.1.pep
FPGGQYFDPMGQENVPDTFAVLKVKKFKKXALPMLMMPGFFGLAKVTGNGPGEAFLGHPVNPVVNNAGVYPP

SEQ ID NO: 210534 - protein, 120 aa, Glycine max
  Clone ID: PAT_MRT3847_32139C.1.pep
FWCCLHIFKEPVTFQMQMSQKHKMSYDSSRFTSEPVQNLGSCCFLQSGNLDYYSSSDNSSHATYPSVCTFEQYCTLESSTNNNLPSLNSSSTVSFSPNNSPVSKLQSKSNVLSSQNSLEL

SEQ ID NO: 210535 - protein, 88 aa, Glycine max
  Clone ID: PAT_MRT3847_3213C.1.pep
EVDEFHDADWSDLTEAQLEELVLSNLDTIFKSAVKKIVACGYIEDVATKAILRSGICYGCKDAVSNVVDKGLAFLEMAKRLILTRALF

SEQ ID NO: 210536 - protein, 545 aa, Glycine max
  Clone ID: PAT_MRT3847_32140C.1.pep
MQMSQKHKMSYDSSRFSIEPAQNLGSCCFLQSGNLDYYSSSDNGSHATYPSVCIFEQYCTLESSTNNNFPSLNSPSTVSFSPNNSPVSKLQSKPNVLSSQNSLEIVDESLENKSFLTLNDDELRHKIRELESAMLGHDTDILDTYDTIIPEESDSFLKEAERWKRMMEMISRGDLKEMLCTCAKAVAGNDMETTEWLMSELRKMVSVSGNPIQRLGAYMLEALVARLASSGSTIYKVLKCKEPTGSELLSHMHLLYEICPYLKFGYMSANGAIAEVMKEESEVHIIDFQINQGIQWVSLIQAVAGRPGAPPKIRITGFDDSTSAYAREGGLEIVGARLSRLAQSYNVPFEFHAIRAAPTEVELKDLALQPGEAIAVNFAMMLHHVPDECVDSRNHRDRLVRLAKCLSPKIVTLVEQESHTNNLPFFPRFVETMNYYLAIFESIDVALPREHKERINVEQHCLAREVVNLIACEGEERVERHELLKKWRSRFTMAGFAPYPLNSFITCSIKNLQRSYRGHYTLEERDGALCLGWMNQVLITSCAWR

SEQ ID NO: 210537 - protein, 140 aa, Glycine max
  unsure (1)..(140): unsure at all Xaa locations
  Clone ID: PAT_MRT3847_32141C.1.pep
KQKGQQHDQKKKPTSAFXVYSRKKGYTKXWALLTRNESCIEECNAAHGQTWMASETETGITIPAAHTGGSIEQDSKDPDTQPQQGRTIQIEEEASTNLHADAIAQWEMAKQLGMSCRKDQTRIIDKIAEMEIRDKQEAEK

SEQ ID NO: 210538 - protein, 46 aa, Glycine max
  unsure (1)..(46): unsure at all Xaa locations
  Clone ID: PAT_MRT3847_32142C.1.pep
SLNAYYILICLFYPCLSYCXFEKHMQWARLGHSLIGEISIITDTPR

SEQ ID NO: 210539 - protein, 39 aa, Glycine max
  Clone ID: PAT_MRT3847_32143C.1.pep
TTGKHGFDLSLNPTSKFFYVEYEPIGYWLQQKNFFTKTL

SEQ ID NO: 210540 - protein, 80 aa, Glycine max
  Clone ID: PAT_MRT3847_32144C.1.pep
RKKKKIKKRKDEKRYKIKRAGVQKRYRLLYPGIKLLRWPIVSHHFIYMALVLQHRDGENLDGTKINCREHNNVCPIGRYH

SEQ ID NO: 210541 - protein, 229 aa, Glycine max
  Clone ID: PAT_MRT3847_32145C.1.pep
MRRHMHAANSPNMNHLTSTARSRRSLLLFAASTVFLRFGNKIADAREAKGTPKPDNLLSPDAALKRLLMGNDRYVQGTSRADDFRRERSALVEGQNPYAAVLSCADSRVAPELVFDSGLGDLFVCRVAGNFANDDTLASMEYAVAVLNTPLILVLGHDHCGAIDATIKSLHQDKPPPGHISSLVTALAPAVNASLGQAGDISAHATRKNVIDNVNKLRSTGPILTAAVE

SEQ ID NO: 210542 - protein, 55 aa, Glycine max
  Clone ID: PAT_MRT3847_32146C.1.pep
RREKLSLLWNSKLTGGGHISHDGLNCINSSGVKVSSHGWLTRLSTKVPGQIGYNS

SEQ ID NO: 210543 - protein, 133 aa, Glycine max
  unsure (1)..(133): unsure at all Xaa locations
  Clone ID: PAT_MRT3847_32147C.1.pep
SAVRRRPCVQQVYIHLARGPRSWSVGNTATYRSQGIFRLFDSHSRPELKSFLCFVSRLCRAKTPFSELSHRRGHLEAKYFRTATVSASHRVYAHLRTVSHRRLLCVCQGAELFSXVVSSFRFVSLFSTVVASR

SEQ ID NO: 210544 - protein, 48 aa, Glycine max
  Clone ID: PAT_MRT3847_32148C.1.pep
VIQNNLMLSKKKKTKQNNLRSKPQLDFNAKNKVSHHYGLLREIIFSSK

SEQ ID NO: 210545 - protein, 79 aa, Glycine max
  Clone ID: PAT_MRT3847_32149C.1.pep
SSWNINSSRKLIAPLQMLLQLDLSHNSIRGGIPQWLQEKLWHSWKNIRYMDLRFNKLQGDLPIPPDGNHYFLVSKNELT

SEQ ID NO: 210546 - protein, 45 aa, Glycine max
  Clone ID: PAT_MRT3847_3214C.1.pep
AHKKGCASLSSEPRPEGKATHDPDKLKRPPRAFFGFMEEMWKVYN

SEQ ID NO: 210547 - protein, 56 aa, Glycine max
  Clone ID: PAT_MRT3847_32150C.1.pep
CCCLSISHNYIFAYLTFIGMWMYVISLFAQVTCTLELISKSAQSEIACSTRLVGLP

SEQ ID NO: 210548 - protein, 47 aa, Glycine max
  unsure (1)..(47): unsure at all Xaa locations
  Clone ID: PAT_MRT3847_32151C.1.pep
IRVNVCFVALLSLRQECPCQXVXTPINYPLCVSRTAHGPPRSGTRGS

SEQ ID NO: 210549 - protein, 73 aa, Glycine max
  Clone ID: PAT_MRT3847_32152C.1.pep
CLNVYASLAGTQSQLHYSHYLVDGKLSQELYVLILKYTLFLMLQAWDRELHFSMVDGDFKKFEGKWSVKSGTR

SEQ ID NO: 210550 - protein, 50 aa, Glycine max
  Clone ID: PAT_MRT3847_32153C.1.pep
CFCQLTSYSKNNVLLIMTFTLMEQKHDCVELKIYTNKMVFLRILHKMVLT

SEQ ID NO: 210551 - protein, 79 aa, Glycine max
  Clone ID: PAT_MRT3847_32154C.1.pep
KTAFFLPFQKFSFWPLRKSRGFFSLPRCLLRRGHLFKMVASFFIDKVFFVFPPKNKKKPKKPKKKKKKKKKKKKKKKKK

SEQ ID NO: 210552 - protein, 182 aa, Glycine max
  Clone ID: PAT_MRT3847_32155C.1.pep
MNFRFQNLLGAPYRGGNVVISSNTVLLSPVGNRVAVTDLLKSETTTLPLQSSSNVTRITVSPDATFLLAIDDRNRCLFINLRRRALLHRITFKHRVAASKFSPDGALIAVAAGKLVQIWRSPAFRREYFPFELVRTFADFDAKGTSLDWSPDSKYLIAGSKDLTARILCLKKLNSGGGKKRP

SEQ ID NO: 210553 - protein, 90 aa, Glycine max
  unsure (1)..(90): unsure at all Xaa locations
  Clone ID: PAT_MRT3847_32156C.1.pep
VRVNAAFHNARPENTXVPGVNDLPITRNXLIGGDDYTSGHTATKSGYVETLETAMIKSTSIGSPNRSGCSDGMNVSAAKPCALRHSPRAV

SEQ ID NO: 210554 - protein, 109 aa, Glycine max
  Clone ID: PAT_MRT3847_32157C.1.pep
PPPNQRKGKESLGLLWWRKGNKTQAHPKKKSNGANSTKPLPEAPGINGPVEVPRPSNTPVSIFKFGSVAPSNEKVTLPGYCPVSKNLEPCRWEILPPVQSNPPQFGVVF

SEQ ID NO: 210555 - protein, 65 aa, Glycine max
  Clone ID: PAT_MRT3847_32158C.1.pep
TEHGLAMSIELSKVLSLCRKANKPMAAGRSVWVRCGMWLVAHTNLAYTSTGGLAAGLKYGFRLTG

SEQ ID NO: 210556 - protein, 80 aa, Glycine max
  unsure (1)..(80): unsure at all Xaa locations
  Clone ID: PAT_MRT3847_32159C.1.pep
RSDIRDIDXKKYLVPADLTVGQFVYVIRKRIKLSPEKAIFIFINNVLPPTAALMSNIYEEQKDVDGFLYITYSGENTFGQ

SEQ ID NO: 210557 - protein, 636 aa, Glycine max
  unsure (1)..(636): unsure at all Xaa locations
  Clone ID: PAT_MRT3847_3215C.1.pep
MGKSSKKSAIKVDAAPAVVPPSKSAKKGGKRQAQDEIEKQVSAKKQKIEEVAQKQKKEAKVQKKKESSSDDSSESEEEKPAPKSVLSKKVPAKNGSALTKKKKLSFSLLMTVEEISSDDSSSDSEDEKPAAKVAVPSKKXSAKNGTLSTLAKKGKPAASSSSSESSDDNSDEDEAPKTKVAPAAGKNGHASTKKTQPSESSDSDSSDSDSSSDEDKSKKKPTTAKLPTLPVAPALKVESSDDESSESSDEDNDAKPAVTDVSKPSALAKKKVDSSDSDDSSSDEDKGKMDIDDDSSDESEEPQKKKTVKNPKESSDSSEEDSEDESEEEPSKTPQKRDRDVEMVDAASSEKKAPKTPVTPXEIGASKTLFVGNLPFSVERADVEDFFKDAGEVVDVRFATDDTGKFKGFGHVEFATAEAAQNALGLNGQQLFNRELRLDLARERGAYTPNSSNWNNSSQKSERGQSQTIFVRGFDTSLGEDEIRGSLQEHFGSCGDITRVSIPKDYESGAVKGFAYVDFGDADSMGKALELHETELGGYTLTVDEAKPRDNQGSGGRGAGGRSGGGXRFGARGGGGGRFGARGGGGRFGGSGGGGRFGGSGGGRFGGRGGGGRGRGNRPNLAAEGTGKKTKFADDE

SEQ ID NO: 210558 - protein, 46 aa, Glycine max
  Clone ID: PAT_MRT3847_32160C.1.pep
MFVFHSTSCTSQTLPLVVEFHPRRKAAMEVTEISFLSECLTGIMAF

SEQ ID NO: 210559 - protein, 158 aa, Glycine max
  unsure (1)..(158): unsure at all Xaa locations
  Clone ID: PAT_MRT3847_32161C.1.pep
MADETFEQVTSGASLTFPQQASALRKNGFVLLKGFPCKIVDMSTSKTGKHGHAKISITGVDIFTGKKYEDVTPSTHNMDVPHVSRLDYQLIDIXEGEKAPVSLLTEAGETKDDLNLPDDAELAGEIRAAFDEGKDIIVSVLAAMGIEQIISWKVDTKA

SEQ ID NO: 210560 - protein, 48 aa, Glycine max
  Clone ID: PAT_MRT3847_32162C.1.pep
LADLENALCLSTAIKNNVLGINFKEPVTLRVILKACQKTVPPGFQSPS

SEQ ID NO: 210561 - protein, 114 aa, Glycine max
  Clone ID: PAT_MRT3847_32163C.1.pep
KFIKSYTLLGGQKKENGDTKKILAKPKKTPTQKRDGGNKLIPKPSPEILQKNGDKNPAKGTTTTQRREPRPGGCPKPKKGGWGKKNGPTTRKKNDKKNTPQFPKMILRGSAPLI

SEQ ID NO: 210562 - protein, 126 aa, Glycine max
  Clone ID: PAT_MRT3847_32164C.1.pep
EKVEHPQICWHCHKQEILIVGMGKHVLRIDTTKVGNGEAFVVDDPLRCPVDKLIDGVQLVGTHDGEVTDLSMCQWMTNQLVSASQDGTIKIWEDRKTQPLAILRPHDGNPVFSATFFTAPHQPDHI

SEQ ID NO: 210563 - protein, 49 aa, Glycine max
  unsure (1)..(49): unsure at all Xaa locations
  Clone ID: PAT_MRT3847_32165C.1.pep
LXTYLVXFFXXLPXXLLRREGXXIGESVGDSDCHTVYRGVIPNSVSLTN

SEQ ID NO: 210564 - protein, 83 aa, Glycine max
  Clone ID: PAT_MRT3847_32166C.1.pep
GPGKGPKHRLRWENKPIYFPKKAKPRVKVKLGKTFSTIYISLVYDANQKVMFYTQFSVPLPRCPVPNLYINERLLWFSPGRHE

SEQ ID NO: 210565 - protein, 130 aa, Glycine max
  Clone ID: PAT_MRT3847_32167C.1.pep
VEESKNHNHNHPLTLLSPISDRKIVYPHGTNSPVLWNLLEFRVIELCKSYTTNISSAAVSKVVFFPNSPWIGAQDSVACCIFLEGKLGFMKHGDEKWTLVDYKNFFYDDVIVFQGQFYVTDDRGTILWID

SEQ ID NO: 210566 - protein, 110 aa, Glycine max
  Clone ID: PAT_MRT3847_32168C.1.pep
PFVFFVPNFLLMAARGPSLPFPVPRLGQATVFLFKFCSPGPPPGVLCVPHLFWFLFESPFFFSLFSNVLSRFVRPLPGNLGFGVYPYTSRFLVGGFTFWLRHNDRYKVLF

SEQ ID NO: 210567 - protein, 174 aa, Glycine max
  Clone ID: PAT_MRT3847_32169C.1.pep
PSRPHNHNLNLARLWIALLAVSTTVVHCKTASQDVSALNVMYTSLNSPSKLSGWKSSGGDPCGDSWEGIKCSGSSVTEINLSDLGLSGSMGYQLSSLKSVTDFDLSNNNFKGDIPYQLPPNARYIDLSKNDFTGSIPYSFSEMDDLNYLNLAHNQLKNQLGDMFGKLSKLKQLD

SEQ ID NO: 210568 - protein, 65 aa, Glycine max
  Clone ID: PAT_MRT3847_3216C.1.pep
LVFVSLPKSLSSPLYLFSVIALWQFLCPPSHRSPPAVTSSGRRSYSNGFSSRHHCHKAPTIYLQI

SEQ ID NO: 210569 - protein, 42 aa, Glycine max
  Clone ID: PAT_MRT3847_32170C.1.pep
GFSGMTTGCRYLEWRKNGNTKRAVLNIRWGYLPDIEDTPSAN

SEQ ID NO: 210570 - protein, 146 aa, Glycine max
  Clone ID: PAT_MRT3847_32171C.1.pep
RGSLFSRFILINPRAESYRSTHLSAFTPPHYPMAPEYCLRHCTDTHSSGSDSPITMLTLSLYTRAPASILALIPFPPTCILVTCFALCSASHVRSSMAGRSISHTASDHSSFLCLILLSVQSSTQRLFIIIPRKPSRPLMRLPGSD

SEQ ID NO: 210571 - protein, 56 aa, Glycine max
  Clone ID: PAT_MRT3847_32172C.1.pep
ALTNQQDCQWQYIIAKFQSWGFSTMFFFSPHSIPSDIFIILCRYSLIKSPWVTEHN

SEQ ID NO: 210572 - protein, 143 aa, Glycine max
  unsure (1)..(143): unsure at all Xaa locations
  Clone ID: PAT_MRT3847_32173C.1.pep
DDATNFWDYASQNPESVHQFMVLFGDRGIPDGYRKMHGYIGHTHKLLNKNGDWVYMQLHFKSKQGTGFITQEDSFNYGPDYSTKDLYQAIDKGDFPGWDVCVQTMTAKEAEELWEKQKINVFDLTHVWXQGQFPLRKVGEFFL

SEQ ID NO: 210573 - protein, 39 aa, Glycine max
  Clone ID: PAT_MRT3847_32174C.1.pep
DCLLGEAQIANQVDMRVGLCHSYADPDPDAEEGGALESM

SEQ ID NO: 210574 - protein, 127 aa, Glycine max
  Clone ID: PAT_MRT3847_32175C.1.pep
MSFSFTDLLSTNNNNSLNMDDDPFGLEFANNFKSASLPLSPSSIYPSSYAEFPPGFVPTSQSLNSHHFFSSQIVPASYTTEQSSSMSYNMRNTSTEGQQGNKEEERNYSDLSFLTKTNHVPLFQSST

SEQ ID NO: 210575 - protein, 104 aa, Glycine max
  unsure (1)..(104): unsure at all Xaa locations
  Clone ID: PAT_MRT3847_32176C.1.pep
MESPWSILLRGTGLLQNNGDQDKIDSLXGKKLGLNYXASWRGTCQTLTPTLEDVFNEAAKLGEXQRALIAVDEHDEYFQRNCFKTHMCLQVPFSDSDTHSRLDE

SEQ ID NO: 210576 - protein, 63 aa, Glycine max
  unsure (1)..(63): unsure at all Xaa locations
  Clone ID: PAT_MRT3847_32177C.1.pep
TLKNSRLCRIAMRFLXVFSSSHLRHRLYYPNMRSTFVSFNMLTLLPLVSSSLXLDVTLIHMDL

SEQ ID NO: 210577 - protein, 61 aa, Glycine max
  unsure (1)..(61): unsure at all Xaa locations
  Clone ID: PAT_MRT3847_32178C.1.pep
SLLFXGFPLXAPSRXXRRFVALLGFXXGGXVPXAXXVGXAAXXFXXAXXXGCXXXXAXRVG

SEQ ID NO: 210578 - protein, 535 aa, Glycine max
  Clone ID: PAT_MRT3847_32179C.1.pep
ARARAQDGILKYILKIMEVCKAQGFVYGIIPEKGTPVTGASDNLREWWKDKVRFDRNGPAAITKYQADNAIPGKNDGCNPIGPTPHTLQELQDTTLGSLLSALMQHCDPPQRRYPLEKGVPPPWWPNGNEEWWPQIGLPKDQGPPPYKKPHDLKKAWKVGVLTAVIKHMSPDIAKIRKLVRQSKCLQDKMTAKESATWLAIINQEEALARELYPDYCPPLAASSGGSGSMVINDCNEYDVEGGDDEPNFDVEDRKPENLHAPNLGMDRMMGRLPSFPIKGEAVTNLDFIRKRKISGDFNMIMDQKIYTCEQPQCPYSEIHHGFADRNSRDNHRLSCPYRGSASTDYGGSNFHVNEAKPVIFPQQSFVQPKPTTTPSVVNLVPSVIDLTGLGVPEDGKKMITDLMSIYDTNVQSNKNLSSSNHVSAENPNLPQPGIQQQHDNFFRSQGISMEGNFFEEANMSNNNHHMFAREEGQFDRFKALNAPPFETNHNNNNFHLMFGSPCDLASFDFKEDMQGGVVGMDALQKQPDISIWYQ

SEQ ID NO: 210579 - protein, 163 aa, Glycine max
  unsure (1)..(163): unsure at all Xaa locations
  Clone ID: PAT_MRT3847_3217C.1.pep
MLLGKRPRPPIMKRTTSMSEITFDLNTSLDDDPNNSVKGPGGDGPPVGLNGLDQNRVWAMVSPRNHHRRQYSEDTPGFLRVCFLCKRRLVPGRDIFMYKVSINXNYCRGDSAFCSSECREQQMKHDERKDKCRVASSKKQVAAKPNSGSQVTTNTKGETVVAL

SEQ ID NO: 210580 - protein, 274 aa, Glycine max
  Clone ID: PAT_MRT3847_32180C.1.pep
MGRLATLSEEPINDQDINYNKRNSSSGSKKWPNWNWIKTHFFHKKPDLKILLSVLACPLFPVPLHTQPDPPPLNQLSSSAQYIIQHFTAATGCRKLEGTVKNVFATGKVEMWAVDEVGNTGVSERGCFVIWQMLPDKWQIELAVAGHKVVAGSDGTVAWRHTPWLGAHAAKGGIRPLRRAVQGLDPLAVSAVFSAAQYMGEKQISGIDCFVLKLSPDQKDLVDRSDNTAEMIKHVAFGYFSQRNGLLVHLEDSYLTRIQSPGTHPTYWETTMST

SEQ ID NO: 210581 - protein, 53 aa, Glycine max
  unsure (1)..(53): unsure at all Xaa locations
  Clone ID: PAT_MRT3847_32181C.1.pep
SSQVIAQYYQLIRLGFEGYRDVSENCMDNMLVLREGLEXQGRYQLCAKASGVP

SEQ ID NO: 210582 - protein, 43 aa, Glycine max
  Clone ID: PAT_MRT3847_32182C.1.pep
DGLKRAISSYVPGPPCLSFVMLLSLGRRSLEYRKAQRTEKRES

SEQ ID NO: 210583 - protein, 45 aa, Glycine max
  Clone ID: PAT_MRT3847_32183C.1.pep
IYCFNFHSEPFRRQFALCRTTGFLPSAYCCFICTTPSHIRLLLRS

SEQ ID NO: 210584 - protein, 79 aa, Glycine max
  unsure (1)..(79): unsure at all Xaa locations
  Clone ID: PAT_MRT3847_32184C.1.pep
LALSNACFDSKWIPFSIPFGLGFLERRSRCVXTTPFRKRRLGIGPPLSQRAYRSCGRGSLIGQLKFVSYRSHLQGIRYL

SEQ ID NO: 210585 - protein, 81 aa, Glycine max
  unsure (1)..(81): unsure at all Xaa locations
  Clone ID: PAT_MRT3847_32185C.1.pep
LLGCLGVGVVVLRAXSRGVPVGXVSSRXGWLGVLRWXAWFRXGCPXCXXGVCVARGXRPLAAXXWXGAGGWVFVLSLLPWV

SEQ ID NO: 210586 - protein, 91 aa, Glycine max
  Clone ID: PAT_MRT3847_32186C.1.pep
DDNKNIDDEIEEIELEIKRLTTRLDALRLEKAKRGKRVVMGRVVPAKFMEPRPSAVVSRKPEETPKTKVRVSSSSNNDNNAWPRRMSLGPN

SEQ ID NO: 210587 - protein, 138 aa, Glycine max
  Clone ID: PAT_MRT3847_32187C.1.pep
MIACRSLIGVERVLKFTNTYVASRSYCFQGQSAYHCLSCNFMMSGRKKKICLEDHSIKQKKMNYIWRPIATNASSSAEAMSEIAESDTSPSQLLDNVENRVLEGDSSVSTEKHSISVLVGASLFRFIKGKGGSVYVLR

SEQ ID NO: 210588 - protein, 133 aa, Glycine max
  Clone ID: PAT_MRT3847_32188C.1.pep
PDHVTFVGVLSACSHVGLVDEGFEHFKSMGEVYELAPRIEHFSCMVDLLGRAGDVKKLEEFIKTMPMNPNALIWRTILGACCRANSRNTELGRRAAKMLIELESLNAVNYVLLSNMHAAGGKWEDVEEARLAM

SEQ ID NO: 210589 - protein, 167 aa, Glycine max
  unsure (1)..(167): unsure at all Xaa locations
  Clone ID: PAT_MRT3847_32189C.1.pep
MQSFGKTLTGXTISLEVECCYTMDHVNAKIHDXEGMPPDQHRLMLAGKQLEDGRTLADYNIHKEIALHLVLRLMGGMQIFVKTLTGXTITLEVESSDTIDDVMDTIQHXDGITPDHHRLIFAGEQLEDGRTRADDNIQNESALHLDLRLIRGMHYCRLDCDRKDHLL

SEQ ID NO: 210590 - protein, 57 aa, Glycine max
  Clone ID: PAT_MRT3847_3218C.1.pep
HWLFEKVCFFFYLNFFICSWYYCFFVISYAFLFIYDSFALLPWLGLGFSTCFLFPCI

SEQ ID NO: 210591 - protein, 58 aa, Glycine max
  Clone ID: PAT_MRT3847_32190C.1.pep
SNMINHPWHREARDFIIGSHGYKYHIASYLYAVQDDRPKSFPHWERACLFIDHLKLLR

SEQ ID NO: 210592 - protein, 53 aa, Glycine max
  Clone ID: PAT_MRT3847_32191C.1.pep
REDDRRGTYFTLNRLFLLLEYMKISIIQYYLDHLRSSHSISFPISLFYDLFPI

SEQ ID NO: 210593 - protein, 51 aa, Glycine max
  Clone ID: PAT_MRT3847_32192C.1.pep
PYLGIQIPNWDGVFFPEGRRLKKWITMPILNPLTLLPLPVFCLTNHLITQN

SEQ ID NO: 210594 - protein, 112 aa, Glycine max
  unsure (1)..(112): unsure at all Xaa locations
  Clone ID: PAT_MRT3847_32193C.1.pep
IVSQAESSAIVFQLFASXSAIKREANLNVVKNYNVTPLVTTVQTSLQVTIYVTEDKPATEQNGRGLPRMSCAKDSGALKLTPPAAPQGGSPWLLVLNNTEIDPLWCNADANQ

SEQ ID NO: 210595 - protein, 155 aa, Glycine max
  unsure (1)..(155): unsure at all Xaa locations
  Clone ID: PAT_MRT3847_32194C.1.pep
MYWQIKCMKCGGKSERQERMMDLTXFTSAETLDGENKYRCVRCKSYEKAKKKMTVLEAPNVLTIALKRFQSGKFGKLNKPIRFPEILDLAPFMSGTSDLPIYRLYGVVVHLDIMNAAFSGHYVCYVKNFQSRWFKVDDSVVTAVELESVLAKGAY

SEQ ID NO: 210596 - protein, 231 aa, Glycine max
  unsure (1)..(231): unsure at all Xaa locations
  Clone ID: PAT_MRT3847_32195C.1.pep
FRLVDLEVVALVDWDAELAVARVEEWREKEYSEKWLSEFETKFAFPVSFPTGFKXRGFKERLKNWQRLPYAKPYERKEVVRVRTCGGIERYEKRAVAVLHELLSLTVEKMVEVDQLAHFRRDFGVEVNVRELLLRHPGIFYLSTKGKTLTVFLREAYRKGGLVEPNPVYETRRNMLDLVLLGCRKTKLLLDCDESNKEESNVVACEVNEEGERQGDWVIPFLEKCEENRSP

SEQ ID NO: 210597 - protein, 42 aa, Glycine max
  Clone ID: PAT_MRT3847_32196C.1.pep
RRRPHSIPAHSKNPYTWNLDKIGRSRTPQSWFQANPMASMTF

SEQ ID NO: 210598 - protein, 100 aa, Glycine max
  Clone ID: PAT_MRT3847_32197C.1.pep
EKTLKTCWTMRTYLHEDRASLGLHQINENDNGMLREAEGNVFCITNSTPFYNTLVSEGGRLFIPSTRFEPSKLKGGLFEDQINKHSNFNSKTYILFHCDF

SEQ ID NO: 210599 - protein, 90 aa, Glycine max
  unsure (1)..(90): unsure at all Xaa locations
  Clone ID: PAT_MRT3847_32198C.1.pep
PHAXVSTESXXXGHXXIXGEFQDFXXXQXXXXXXIRXXXXXXXXNWXXLVXGXGXXXGXLNRXXRXXSXSXXXTXDXXXXXXMNLXXSXH

SEQ ID NO: 210600 - protein, 73 aa, Glycine max
  Clone ID: PAT_MRT3847_32199C.1.pep
TVSERTSLRSCGMPSQCPIVAVDADTMMYNMLHGTHTPNGVGCNGAACIKLMYAETYRSMALVYLITCDAWSL

SEQ ID NO: 210601 - protein, 84 aa, Glycine max
  unsure (1)..(84): unsure at all Xaa locations
  Clone ID: PAT_MRT3847_3219C.1.pep
XKPKNSPCXAXGLNSXSAXSSXFSSXXXPMQXRQTXXTRLGFLQRLSFSTLLGRHGCDAELGFGLKTKTTDRGTAHDTTQHNAT

SEQ ID NO: 210602 - protein, 63 aa, Glycine max
  Clone ID: PAT_MRT3847_321C.1.pep
LVILRISYRDPALRIFTFHQLMGEESGVVTPVAKRTASTWLTKVVDHTNTNRQQEMMGIVSLL

SEQ ID NO: 210603 - protein, 203 aa, Glycine max
  Clone ID: PAT_MRT3847_32200C.1.pep
MTVMNPPSGEPLMRCAMANPAAIPIACRSAALAQPASVALGPRERAEVFRKAPDLAQRSFAELALYVARETGGALFKGEHEVREAIVLLHQAAGLLSQPHGVVLPSAAGRLSYARRQPHGVVGVISPFNFPLVLSLRSVAPALAAGNAVVLKPDPQTPVSGGFLIARLFEEAGLPKGLLQVMPGAAPAGEALCRDPNVRMIAF

SEQ ID NO: 210604 - protein, 91 aa, Glycine max
  Clone ID: PAT_MRT3847_32201C.1.pep
GSHPRLHTQWNSLRLASERVPLMPPKRSISSSSRAVQWKKLQAVRANPHAHHRSQDCGQELRREDIRGAVPQRGSSIGSSGLLQRERILRE

SEQ ID NO: 210605 - protein, 469 aa, Glycine max
  Clone ID: PAT_MRT3847_32202C.1.pep
MAATRPVQCLLRRVCRGSRTFGVATEVNASSSSSSQKIIDKEYEHSAHNYHPLPIVFSQAKGTSVWDPEGNKYLDFLSGYSAVNQGHCHPKILKALQEQAQRLTVSSRAFYNDRFPVFAEYVTNMFGYDMVLPMNTGAEGVETALKLARKWGYEKKRIPKDEAIIVSCCGCFHGRTLGVISLSCDNEATRGFGPLLPGNLKVDFGDAEALEQIFKEKGEHIAAFILEPVQGEAGVIFPPDGYLKAVRDLCSKYNVLMIADEIQTGLARTGKMLACEWEEVRPDVLILGKALGGGVIPVSAVLADKDVMLCIQPGQHGSTFGGNPMASAVAIASLEVLKNERLVERSAQMGEELTGQLLKIQQQYPDYVKEVRGRGLFIGVEFNSKKLFPVSGYELCKKLKYRGVLAKPTHDAIIRFTPPLCISVDEIQQGSKALADVLEIDLPKLQKTKPIDAAPVATSACDRCGRVLY

SEQ ID NO: 210606 - protein, 52 aa, Glycine max
  Clone ID: PAT_MRT3847_32203C.1.pep
LWVVPIARTTNPIGPYPKSGLSKKLRLLRVFSILVSKLYSIIKHQSDCYLFP

SEQ ID NO: 210607 - protein, 81 aa, Glycine max
  Clone ID: PAT_MRT3847_32204C.1.pep
SLAWHITYLASYSLFNLRLFIRIPGRGNQRPSNSSAACDMLAGAFEPFNPAAVGINGAVSVPVPVRVSLDRTTQLPSACMR

SEQ ID NO: 210608 - protein, 63 aa, Glycine max
  Clone ID: PAT_MRT3847_32205C.1.pep
VLPKHVRWMLCPKTPTESLKMLDCAERRAGPVTHKGVGCYLLIKAYGSHSYPETNTLGHPLKV

SEQ ID NO: 210609 - protein, 50 aa, Glycine max
  Clone ID: PAT_MRT3847_32206C.1.pep
IPHIFNCLSIYVKKSMPWKTCIRMPKHWVDEKQGEKITHLPQSKLLMVAK

SEQ ID NO: 210610 - protein, 568 aa, Glycine max
  unsure (1)..(568): unsure at all Xaa locations
  Clone ID: PAT_MRT3847_32207C.1.pep
VLTRIWLNVDVYTFYAAMKTSISPTLKGKPIAERIMYTLFTASYXEARVRSMNXDKPGYIPPKLGPEXIIVPKNFKXYTYYRDMTRKIFGRYDPNFIAGSLDEAYLDITEVCRERNVKSEEIAQELRAGVYEETGLTCSAGVAPNRLLAKVCSDINKPNGQYVLPNDRMAVMTFVSSLPIRKIGGIGKVTEHILKGVFGINTCEQMLEKSSYICAFFSQSTADFFCSVGLGLGQTDSPQVRFRKSISSERTFSATKDEVLLHKKLEELAEMLSADMQKEGLSGRTLTLKLKTASFEVRTRAVTLQKYISSSEDILKHAKKLLQAELPISVRLIGLRVSQFNGDKCSAKSDPTQKTITNFITSGDVNRNCSSFPDVADHDFVSNAETDMSIDSRQTGQLDWRDPFDGNYLSDVDYQSCTVQKSDGVEEVQTSSNDATSSHYSGLTEVLGSTSYLGQVEGINVKNGSNLLEDERLDSCCQEKTMLWLNDYKCSLCGIELPPSFVEERLEHSDFHLAEKLQKEESSIHQKSVPSQSKGQKDGVTRQSKSKKQKLSQKEGSYTPIDYFFVKK

SEQ ID NO: 210611 - protein, 100 aa, Glycine max
  Clone ID: PAT_MRT3847_32208C.1.pep
APVSKQLLHSSFETFFPCFLYVIEKVFVFVSRGKEVEGERRFASTFCYRSSNLLFNLEILQDLYLYLRSVESLYNLCIFSKLSFPHFMENSIPQTLVVLV

SEQ ID NO: 210612 - protein, 50 aa, Glycine max
  Clone ID: PAT_MRT3847_32209C.1.pep
RVVLRLSVGCSISSIMVQLKKDFDLNASLVICFNLTGLHLLLTQSENSCH

SEQ ID NO: 210613 - protein, 63 aa, Glycine max
  unsure (1)..(63): unsure at all Xaa locations
  Clone ID: PAT_MRT3847_3220C.1.pep
NVVNVAESPTVSMVXIAATGVCRFTEIIAFLDEKQTLKPASGFFNCKKQLDFRARAIKMRITN

SEQ ID NO: 210614 - protein, 58 aa, Glycine max
  Clone ID: PAT_MRT3847_32210C.1.pep
SPFSVRISNYSFGDEKNEDQKGGNGNGHVNDQAEDFIKRFYEHLKKQNRIQLLEYQKM

SEQ ID NO: 210615 - protein, 90 aa, Glycine max
  Clone ID: PAT_MRT3847_32211C.1.pep
KILQPCWISFGNLFLSAASVVSFTFLSYTSCSLCLKTCVAIFFVRCYMHLIFRQRITKPRLPFYNLGYEHQSASSCCIQVLKRFSPAFCT

SEQ ID NO: 210616 - protein, 93 aa, Glycine max
  unsure (1)..(93): unsure at all Xaa locations
  Clone ID: PAT_MRT3847_32212C.1.pep
FIHHLSFSRIVSSWESLPTVSXDYQKXXEKAKKKLRGFIAEKRCAPLMLRLAWHSAGTFDKGTKTGGPFGXTIKHXAELAHSAXNGLDIVLGF

SEQ ID NO: 210617 - protein, 228 aa, Glycine max
  Clone ID: PAT_MRT3847_32213C.1.pep
KSLRVTLKKVNQLIPQLFSDKKYTKKIYNDEETCVKQARQSLYFKTEEKAKFFSPGEDENSREVFSLIKKFNVPDIKRKGKTTSIFAMPSIGQNINISSKSSFVGRASDHFMPTSRKQGSCKVRSYIFGRDDSNSRSSILMSEDSSDTIQTESQPPKAASAKFQRNMQNKNTTLNSASKESSVSLLDILRKSLHHADHSFQNVNVQPKTSIFDAFKLVKKPTKAEARV

SEQ ID NO: 210618 - protein, 55 aa, Glycine max
  Clone ID: PAT_MRT3847_32214C.1.pep
KGARFWHLAFGSGFKGNSVVWGPMRRVPKPFRNPWVFCIHKFPAPFPNLNRIFRP

SEQ ID NO: 210619 - protein, 55 aa, Glycine max
  Clone ID: PAT_MRT3847_32215C.1.pep
LDQYRWIWFIEFFKDSSDHSMLLGSIYSMKLSMSLSAPYSNMGHSCVYTSFDVVF

SEQ ID NO: 210620 - protein, 318 aa, Glycine max
  Clone ID: PAT_MRT3847_32216C.1.pep
SLKGKDSVPFLEKLVIADVAGLAPGTGSLTVFTNEKGGAIDDSVITKVKDDHIYLVVNAGCRDKDLAHIEEHMKAFKAKGGDVSWHIHDERSLLALQGPLAAPVLQHLTKADLSKMYFGGFQVLDINGVQCFLTRTGYTGEDGFEISIPSESAVDLAKAILEKSEGKIRLTGLGARDSLRLEAGLCLYGNDLEQHITPIEAGLTWAIGKRRRAEGGFLGADVILKQLEEGPKIRRVGFFSSGPPPRSHSEIQDEGGNNIGEVSSGGFSPCLKKNIAIGYVKSGLHKAGTKVKIIIRGKSNEGVVTKMPFVPTKYYKPS

SEQ ID NO: 210621 - protein, 107 aa, Glycine max
  Clone ID: PAT_MRT3847_32217C.1.pep
RAEGGFLGADVILKQLEEGPKIRRVGFFSSGPPPRSHSEIQDEGGNNIGEVTSGGFSPCLKKNIAIGYVKSGLHKAGTKVKIIIRGKSNEGVVTKMPFVPTKYYKPS

SEQ ID NO: 210622 - protein, 112 aa, Glycine max
  Clone ID: PAT_MRT3847_32218C.1.pep
FPWGGSFAFAFGAVFLGLRRFSFLLICFFVASEVWVFFPVRVFCCSFVGCCCCLWGGVFGRCFGAGGWSPSLHLRLRFLGVFVAPPGFFLWGPACVCPFGREEGRVVGPGCS

SEQ ID NO: 210623 - protein, 78 aa, Glycine max
  Clone ID: PAT_MRT3847_32219C.1.pep
RHDRKLHTLRCDDQRHLRTAFDGLQRHERHAPLSFSPLSLYHPLQYPSKSTAAMPTTPPPLDRAEIFSTADAADRKDP

SEQ ID NO: 210624 - protein, 52 aa, Glycine max
  Clone ID: PAT_MRT3847_3221C.1.pep
LMIHHSTSLVWRAIYNCLEDTSIAMSVLHGVPLQMQALNPFPPIQQCKSAVQ

SEQ ID NO: 210625 - protein, 539 aa, Glycine max
  unsure (1)..(539): unsure at all Xaa locations
  Clone ID: PAT_MRT3847_32220C.1.pep
MGYLSKASKTLRQSNYLSLLCNSNFNFNPLTNRITHERFSVTRALLCSQTRQNSTTREKSTIDLSQYPKELVRNFSIIAHVDHGKSTLADRLLELTGTIKKGHGQPQYLDKLQVERERGITVKAQTATMFYKHGVNGDDCSDGKESPKFLLNLIDTPGHVDFSYEVSRSLAACQGVLLVVDAAQGVQAQTVANFYLAFESNLAIVPVIKPEIDXHKIDQPTADPDCAKAQLKXHMVFSGLYPADGSDFEALNHAIERLTCNDASVSITKETSTALGLGFRXGFLGLLHMDXFHQRLEQEYGAHVISTVPTVPYIFEFHDGSKLEVQNPASLPSNPKHKVTACWEPTVLATIIIPSEYVGPVITLVSERRGQQLEYSFIDSQRVFMKYRLPLREIVVDFYNELKSITSGYASFDYEDSDYQQADMVKLDILLNGQPVDAMATIVHSAKAYRVGRELTEKLKGVLDRPMFEVNISAAIGSKIIARETISAMRKNVLAKCYGGDITRKRKLLEKQKEGKKRMKRVGSVDIPQEAFHELLKVS

SEQ ID NO: 210626 - protein, 77 aa, Glycine max
  unsure (1)..(77): unsure at all Xaa locations
  Clone ID: PAT_MRT3847_32221C.1.pep
VLEKKNDNTEKLSILPTFXFFLISERIILTDDEFKIPSEEETKAVREVVSKTTNLYLKEDVSKTPSVGPALAGISLK

SEQ ID NO: 210627 - protein, 79 aa, Glycine max
  Clone ID: PAT_MRT3847_32222C.1.pep
TGCPFLMLERNNFSKQHAKKKPQGSKMGSLTRERPQNNGPALGGRPTFPKGGGIKTWLESLELAVNMWKMLCAPKFTHK

SEQ ID NO: 210628 - protein, 87 aa, Glycine max
  Clone ID: PAT_MRT3847_32223C.1.pep
PRDPPPASWTECRFEVGAVTIGGSVVAEDARCRWEEGSTARNWGLGFGRGRWREGEEREKGNSIGWWWPWRLEAEKSCMFISSYYIG

SEQ ID NO: 210629 - protein, 109 aa, Glycine max
  unsure (1)..(109): unsure at all Xaa locations
  Clone ID: PAT_MRT3847_32224C.1.pep
MPNVLYKSGVFGMNINACKGWYDCLKSNLGSKGTIXMLVGGAVDIKLTXDGNSVLKEMRSLYPTAXIMDAISALAQDDARGVFTTTTVIFIVDLLIQSYPFIGECLLSP

SEQ ID NO: 210630 - protein, 90 aa, Glycine max
  Clone ID: PAT_MRT3847_32225C.1.pep
PKGIKKQKEWRPPLGPIVIPRRPIPMTPAAHHSRVVGGVGGTQRRGPARRPRTKKIYLSPPAGAGRQLATKATPSRRLRGRPPLLCFFQS

SEQ ID NO: 210631 - protein, 49 aa, Glycine max
  Clone ID: PAT_MRT3847_32226C.1.pep
RTCVKKLLIDCGSGKDYSSNHTKTYFLSIYRDIHSLIYMRMQSLLSITK

SEQ ID NO: 210632 - protein, 131 aa, Glycine max
  unsure (1)..(131): unsure at all Xaa locations
  Clone ID: PAT_MRT3847_32227C.1.pep
HSISFHHTRGSIITRGHGKTDNARGQANGADYGPCIPPTKTAYHRTGRRGCLGCCCGCLFRRITKLMLTVNIIIGIGEILLWLIVRPNVEKCHVTEATLTQMNYTPNNTLHYDRALNITXRNPNKRLGIYY

SEQ ID NO: 210633 - protein, 65 aa, Glycine max
  Clone ID: PAT_MRT3847_32228C.1.pep
FLHCCKSIFDFVCPLMPTLNPWASHSYAEGVRQSHNGQAFFSEGRIPCLLKLTIYCMSVIPSNLS

SEQ ID NO: 210634 - protein, 91 aa, Glycine max
  Clone ID: PAT_MRT3847_32229C.1.pep
RRQPRRSPGPEKRGVYRKPGTRAHEEADTHQRCSGRTQEESENEQKAQKTALGEQRETEEECRTKEERTARQRALREQANREARQTGTKGE

SEQ ID NO: 210635 - protein, 47 aa, Glycine max
  Clone ID: PAT_MRT3847_3222C.1.pep
FLSSLSSFSFCSYVPKIELCISLLLILYKTVKDFFFRHTFNKNNSFI

SEQ ID NO: 210636 - protein, 89 aa, Glycine max
  Clone ID: PAT_MRT3847_32230C.1.pep
RIRRRVKFFFCEYVYELQGVGPLLCNGTLSIQKFEIKSLSDHCITIMCDIKGVIQGLLIFSKRLVPFEERASNALFAKKRLESFYGLKF

SEQ ID NO: 210637 - protein, 71 aa, Glycine max
  Clone ID: PAT_MRT3847_32231C.1.pep
ELSFAAKTSRHHMSIVTSFHGLIFHNKFTCYSPALTNIGVHNFNPWHSGRIYMKNNSDQAINFDFDQHHSH

SEQ ID NO: 210638 - protein, 126 aa, Glycine max
  unsure (1)..(126): unsure at all Xaa locations
  Clone ID: PAT_MRT3847_32232C.1.pep
DCTKVRPQCRPQDLVQTTPEGQCASHKLGVLSHKDHKRQNVPADCRENIADYGLRDQCGSYYNTGNQQADFCPKCLKLHQHTXFVLDADHTTLYNRQDSANYESGEEPHNTTAFKNWVLDGQAFPL

SEQ ID NO: 210639 - protein, 89 aa, Glycine max
  Clone ID: PAT_MRT3847_32233C.1.pep
FFFFFFFFLCDFGTYSTRPNNGKKHTKHKPIDTPQHANQKNDKDLLPTLKTKAKQGQPPHPKERTRTKEKPHSHWPGPGFASTLATPKY

SEQ ID NO: 210640 - protein, 87 aa, Glycine max
  Clone ID: PAT_MRT3847_32235C.1.pep
KKITARNSTQSIHYTLLCLVKLGIKNLLSTPFAQTPCHIEHIRNLVMHFHDRTHLISVPKIICMVANAKRSQHGNNTFRVSTGVAGT

SEQ ID NO: 210641 - protein, 96 aa, Glycine max
  Clone ID: PAT_MRT3847_32236C.1.pep
MVCEKCEKKLSKVIVPDKWKEGASNTTEGGGRKINENKLLSKKNRWTPYGNTKCTICKQQVHQNAKYCHTCAYSKGVCAMCGKQVLDTKFYKQSNV

SEQ ID NO: 210642 - protein, 47 aa, Glycine max
  Clone ID: PAT_MRT3847_32237C.1.pep
ILMSSGVFFSLAQVSQHSIQMHVSLFLSIDEMLSSYKKKKKEGAPPT

SEQ ID NO: 210643 - protein, 83 aa, Glycine max
  unsure (1)..(83): unsure at all Xaa locations
  Clone ID: PAT_MRT3847_32238C.1.pep
DPEWLRAGAQILYEGCLYYTGNLNLGHAQSILGVLGFQDILRELAERSLLNVLDGEEEGNNLXPEWHFFHPPSVIENPDKFPE

SEQ ID NO: 210644 - protein, 124 aa, Glycine max
  unsure (1)..(124): unsure at all Xaa locations
  Clone ID: PAT_MRT3847_32239C.1.pep
METVAAAFFFAAVVLSAVGGSPVTLTLERAFPSNDGVELSELRARDSLRHRRMLQSTNYVVDFPVKGTFDPSQVGLYYTKVKLGTPPKEFYVQIDTXGSDGLWVSCGAGHGCPQTNGLSIQLNY

SEQ ID NO: 210645 - protein, 88 aa, Glycine max
  Clone ID: PAT_MRT3847_3223C.1.pep
IIKQTTIPIHICCTLESECQIDAYTLWNSGGHESENNFQLVHDTPGNSPFPICFSFHQDNGKTSRNISCRARFYLLILFTICNEQYSL

SEQ ID NO: 210646 - protein, 68 aa, Glycine max
  Clone ID: PAT_MRT3847_32240C.1.pep
FHRRLCGRYEPSKEGQGPSREREPFPGWAPNGAPRSRERGARALEERLAPKRLAVAPRELQRGAGENV

SEQ ID NO: 210647 - protein, 85 aa, Glycine max
  Clone ID: PAT_MRT3847_32241C.1.pep
LIVWAPTREKAIERMKRALDDTIITGVPTTIDYHKLILDIEDFRNGKVDTAFIPKHEEELAMVRTQYNLENINVPNNGFKNYFRC

SEQ ID NO: 210648 - protein, 36 aa, Glycine max
  unsure (1)..(36): unsure at all Xaa locations
  Clone ID: PAT_MRT3847_32242C.1.pep
HRKYLHIHXXYMKHLVVVXALGMXGGAXAXXLWFSX

SEQ ID NO: 210649 - protein, 539 aa, Glycine max
  Clone ID: PAT_MRT3847_32243C.1.pep
MEVTLSACKSISSPSVPVAALFAGKAGTKSSQCSFLAGANKVRFPRQVGQVSHVRKQRQTRHCGALHATCSGDKILIANRGEIAVRVIRTAHELGIPCVAVYSTIDKDALHVKLADEAVCIGEAPSSQSYLLIPNVLSAAISRRCTMLHPGYGFLAENAVFVEMCREHGINFIGPNPDSIRVMGDKATARETMKKAGVPTVPGSDGLLQSTEEAIRLANEIGFPVMIKATAGGGGRGMRLAKEPDEFVKLLQQAKSEAAAAFGNDGVYLEKYIQNPRHIEFQVLADKYGNVVHFGERDCSIQRRNQKLLEEAPSPALTPELRKAMGDAAVAAAASIGYIGVGTIEFLLDERGSFYFMEMNTRIQVEHPVTEMISSTDLIEEQIRVAMGEKLRYKQEDIVLRGHSIECRINAEDAFKGFRPGPGRITAYLPSGGPFVRMDSHVYPDYVVPPSYDSLLGKLIVWAPTREKAIERMKRALDDTIITGVPTTIDYHKLILDIEDFRNGKVDTAFIPKHEEELAMPPQKMVLANRVNELAGSTA

SEQ ID NO: 210650 - protein, 540 aa, Glycine max
  unsure (1)..(540): unsure at all Xaa locations
  Clone ID: PAT_MRT3847_32244C.1.pep
MEVTLSACKSVSSPSVPVAGLFAGNAGIKSSQCSFLAGASKVRFPRQVGQVSHLRKQRQTRHCGALHATCSGDKILIANRGEIAVRVIRTAHELGIPCVAVYSTIDKDALHVKLADEAVCIGEAPSSQSYLLIPNVLSAAISRRCTMLHPGYGFLAENAVFVEMCREHGINFIGPNPDSIRVMGDKATARETMKKAGVPTVPGSDGLLQSTEEAIRLANEIGFPVMIKATAGGGGRGMRLAKEPDEFVKFLQQAKSEAAAAFGNDGVYLEKYIQNPRHIEFQVLADKYGNVVHFGERDCSIQRRNQKLLEEAXPSPALTPELRKAMGDAAVAAAASIGYIGVGTVEFLLDERGSFYFMEMNTRIQVEHPVTEMISSTDLIEEQIRVAMGEKLRYKQEDIVLRGHSIECRINAEDAFKGFRPGPGRITAYLPSGGPFVRMDSHVYPDYVVPPSYDSLLGKLIVWAPTREKAIERMKRALDDTIITGVPTTIDYHKLILDIEDFRNGKVDTAFIPKHEEELAMPPQKMVLANRVNELAGSTA

SEQ ID NO: 210651 - protein, 83 aa, Glycine max
  Clone ID: PAT_MRT3847_32245C.1.pep
LRATDLWLRSCSSIEEVVVVLLPQAGAAAHDDNFTVGARTSSSESARTARVGVEWAPSSCSNVKDPGISGQPYIVRSRLESRA

SEQ ID NO: 210652 - protein, 31 aa, Glycine max
  Clone ID: PAT_MRT3847_32246C.1.pep
LAQFTKVIYLGILKSVSQLTPFLGYKSLGSV

SEQ ID NO: 210653 - protein, 48 aa, Glycine max
  Clone ID: PAT_MRT3847_32247C.1.pep
AFQKVAQERRRKVALGPILSSPSSESQVALETFKGGSTITGIKAFQSS

SEQ ID NO: 210654 - protein, 184 aa, Glycine max
  Clone ID: PAT_MRT3847_32248C.1.pep
MKGKGQQPASGLTEPSRLYIKKKYCTLLRAPGISNSRPLSNLQSSYCGSSIFQLKLAEQPSVCEGDMMDDSQKHRILMVSDFFYPNFGGVENHIYYLSQCLLKLGHKVVVATHAYGNRSGVRYMTGGLKVYYIPWSPFVMQNTLPTFYGLLPIIRTILIRERITVVHGHQAFSTFCHEALMHAR

SEQ ID NO: 210655 - protein, 50 aa, Glycine max
  Clone ID: PAT_MRT3847_32249C.1.pep
SIQVSLHSSVAQILKSSHTLVPFFATRAPLIQFLYLSVWPEGLIESVSSK

SEQ ID NO: 210656 - protein, 244 aa, Glycine max
  Clone ID: PAT_MRT3847_3224C.1.pep
MASTQPNNVYFPNFPPPSPSHPFNPPPPPPHSFSPPPPPFATPPPPLRPISPPPPKVLPPPPPRPVLPSPPPPRPVRPSPPPPRPIRPSPPPPPRPVRPPPLPPAPLPPSPSPNNPTIVIVVVASLGGLLLLSMLAFALFCCIQRRKKKTQETEVIHFDEHKTVKETIVPGPFGRNTVVVTVEDDVHIDEEIKKKNEKGGHGLHAKSSSPEADQGTSSSIVEVAATPPPPENHDDHHHQPENKL

SEQ ID NO: 210657 - protein, 69 aa, Glycine max
  unsure (1)..(69): unsure at all Xaa locations
  Clone ID: PAT_MRT3847_32250C.1.pep
VRHGDNVKAXXKXRGSEEGXNXNXGXRGFVLLSXLQSXRXDLGKXSWXXQLVQLGYXLAVVHSPKGGPN

SEQ ID NO: 210658 - protein, 128 aa, Glycine max
  Clone ID: PAT_MRT3847_32251C.1.pep
LEPIRLECYCKYCNCCYFGTCWRRVSHYWGDFFFFCSKSKAFASEGKSCARWMLYATRVKIFKRKKMGFLLLLVIQLTNVLLLLLAGLFGRLHSPNAPNQMKKKMNLFLTWKNQKLPLSVPKCQELMQ

SEQ ID NO: 210659 - protein, 156 aa, Glycine max
  unsure (1)..(156): unsure at all Xaa locations
  Clone ID: PAT_MRT3847_32252C.1.pep
YHTSTNDHTFFIKHSHDGNFTLLLYVEDMIIASNDXNKKKVMREKLGTXFEMKELGKLKYFLRIEVAYSKQGTFITQRKFLLDLLKETSKXGCKTFKVPIEQNHKIXKWGLRPTVEKSQYQTPVGKFIYLSHTRPDTAYAVSVVSQFMHDPQELHL

SEQ ID NO: 210660 - protein, 77 aa, Glycine max
  Clone ID: PAT_MRT3847_32253C.1.pep
LSLYFTCQYCLGSVAVLLSCKKLYIPLIKTMVYYTISELLCHMGYLCKEKCTFFPFATLWFLNLPNDVMTHVADRIL

SEQ ID NO: 210661 - protein, 76 aa, Glycine max
  Clone ID: PAT_MRT3847_32254C.1.pep
GLMLIIFFLFSPIKNGELSLPFGAHIYFTFPFLFLAKSIFTFFYSYIFTSEFGKKKMEATFSELVSGSNPIITHLA

SEQ ID NO: 210662 - protein, 102 aa, Glycine max
  unsure (1)..(102): unsure at all Xaa locations
  Clone ID: PAT_MRT3847_32255C.1.pep
FLKRKKGIPRPFYGKEPQPPKPGLDFGGGGGPHLEKPKTGGRNPWAWKGRAPNPTRGKRPPKPPPKKGPPQKNXGVTPPRPLGKIKAPPNPQRVDPPPGGGG

SEQ ID NO: 210663 - protein, 76 aa, Glycine max
  Clone ID: PAT_MRT3847_32256C.1.pep
KKEICLNLGFGQKPRIPKWGSLIKEMWSHPVYPPPGFIHMIPRLSVGKQTPLVKGTPEFFPINFFKNNHCFFQSLM

SEQ ID NO: 210664 - protein, 99 aa, Glycine max
  Clone ID: PAT_MRT3847_32257C.1.pep
GIYLLHRWSAAFLGGGGGGGGGGRSRRQRRKREATGNRKLVNRTLENLTWCNPQSACVTINGGTAFLTRLEGLDALKVLTPLGFALLVNGKSTRLNRLS

SEQ ID NO: 210665 - protein, 59 aa, Glycine max
  unsure (1)..(59): unsure at all Xaa locations
  Clone ID: PAT_MRT3847_32258C.1.pep
XXSGXXNDSRXLXPAQXRDGLXLKKSYTKKXEXNCRNSXNQVTRLLFPXLXTATCDRRS

SEQ ID NO: 210666 - protein, 241 aa, Glycine max
  Clone ID: PAT_MRT3847_32259C.1.pep
GVFVSGYSFSIVSKDEIPTDEYALELNGVTIKETAKLGPRPEKPIEIYEFESCPFCRKVREIVAILDLDVLFYPCPRNGPNFRQKVLEMGGKLQFPYMVDPNTGASMYESDDIIRYLVDKYGDGNVPLSLSLGFLTTLTAGLGMLSRISKGTTYTPAKFPPKPLKLWAYEGSPFCKLVREVLVELELPHLLVSCARGSPKRHILYQKTGTFQAPFLEDPNTGIEMFESAEIIEYLRATYAL

SEQ ID NO: 210667 - protein, 76 aa, Glycine max
  Clone ID: PAT_MRT3847_3225C.1.pep
VLSVVVIHIRKEGGAIICFHSFYTLGRWGCSKSSIFFYPLWMRPSMLLPGVFKIRQKGGQKLGEYMVSYLIYFNRF

SEQ ID NO: 210668 - protein, 156 aa, Glycine max
  unsure (1)..(156): unsure at all Xaa locations
  Clone ID: PAT_MRT3847_32260C.1.pep
YISLWATPSTTDKQVWQLKFHKYFTYKFADKRPLIFPPAVVGSSTSIHSETSAPSLVIPGRLLQPGPSIVSSAQPSQAPHKDXEVVQVFSTSSSDPSGPVLAETHPPILPLPVTSRPSQGGAPPVPKFPEDFDFMAMNEKFKKDEVWGHLGKSKSH

SEQ ID NO: 210669 - protein, 180 aa, Glycine max
  unsure (1)..(180): unsure at all Xaa locations
  Clone ID: PAT_MRT3847_32261C.1.pep
QTCLSDILCCGLILDSIQVREIVAILDLDVLFYPCPRNGPNFRQKVLEMGGKLQFPYMVDPNTGASMYESDDIIRYLVDKYGDGNVPLSLSLGFLTTLTAGLGMLSRISKGTTYTPAKFPPKPLKLWAYEXCARGSPKRNILYQKTGTFQAPFLEDPNTGIEMFESAEIIEYLRATYALQ

SEQ ID NO: 210670 - protein, 75 aa, Glycine max
  Clone ID: PAT_MRT3847_32262C.1.pep
VVDVSNEKGVVELRRYKKDHPFAQLSGSDNIIAFTTRRYRNQPLIVRGPGAGAQVTAGGIFNDILRLATYLGAPS

SEQ ID NO: 210671 - protein, 165 aa, Glycine max
  Clone ID: PAT_MRT3847_32263C.1.pep
MSPALTTLSPPLSLSVTSAARRPRLTAMVKTEKKQSLGFGSDKKETKWHCVEGCGSCCKLQKGPSFPSPEEIFDDPSDVQLYKSLIGPDGWCIHYEKSTRKCSIYPERPYFCRVEPEVFKSLFGVKEKNFHKEACSFCRDTIKSIYGPNSKELHNQRSFIISTAQ

SEQ ID NO: 210672 - protein, 325 aa, Glycine max
  unsure (1)..(325): unsure at all Xaa locations
  Clone ID: PAT_MRT3847_32264C.1.pep
MTMAGALSLSQFPVRGSVSLPKRRIPRRSFCIRGMSEISSTFSVSTQQEEPTSNASSVTIAPPPNFKPPEPKRFAIRPDKTSEVFGALLPLLFRFATGVFVSGYSFSIVSKDEIPPDEYALELNGVTIKETAKLGPRPEKPIEIYEFERXTLFSLTLIYSLCIHAWTKYFLIPSSFPKAKXITSFLFCLRTFTLDFWLFTCHTTEFANSKSCCLFCRILRIFKAGLGMLSRISKGTTYTPAKFPPKPLKLWAYEGSPFCKLVREVLVELELPHLLVSCARGSPKRHILYQKTGTFQAPFLEDPNTGIEMFESAEIIEYLRATYAL

SEQ ID NO: 210673 - protein, 165 aa, Glycine max
  Clone ID: PAT_MRT3847_32265C.1.pep
MSPALTTLSPPLSLSVTSAARRPRLTAMVKTEKKQSLGFGSDKKETKWHCVEGCGSCCKLQKGPSFPSPEEIFDDPSDVQLYKSLIGPDGWCIHYEKSTRKCSIYPERPYFCRVEPEVFKSLFGVKEKNFHKEACSFCRDTIKSIYGPNSKELHNFNSSIRNSSS

SEQ ID NO: 210674 - protein, 136 aa, Glycine max
  Clone ID: PAT_MRT3847_32266C.1.pep
MASESASRSSSAADSYIGSLISLTSKSEIRYEGILYNINTEESSIGLRNVRSFGTEGRKKDGPQIPPGDKVYEYILFRGTDIKDLQGKSSSPVQPTPQVNNDPAIIQAHYPYLICNMTHLASSQRGSLTEPSSHTT

SEQ ID NO: 210675 - protein, 73 aa, Glycine max
  Clone ID: PAT_MRT3847_32267C.1.pep
DSLSSNVHGNASQNGRTRDSEQIKFDTETFGDFVRHRGGRGGRGGRTRGGYYGRGGYGYNGRGRGRGMPSRNL

SEQ ID NO: 210676 - protein, 380 aa, Glycine max
  unsure (1)..(380): unsure at all Xaa locations
  Clone ID: PAT_MRT3847_32268C.1.pep
MASESASRSSSAADSYIGSLISLTSKSEIRYEGILYNINTEESSIGLRNVRSFGTEGRKKDGPQIPPSDKVYEYILFRGTDIKDLQVKSSPPVQPTPQVNNDPAIIQSHYPFPVTTSTSLPSAVSGSLTDPSSHTTQLGLPGSNFQGPLPLYQPGGNIGSWGASPPAPNANGGRLAMPPMYWQGYYGAPNGLPQLHQQSLLQPPPGLSMPSSMQQSMQYXKIQLMLLQGLHPVTKFTEDFDFTAMNEKFKKDEVWGHLGKSKSHSKEKDGEENAFDEDYQDEDNDDVSNFEVKPIYNKDDFFDSLSSNVHGNTSQNGRTRYSEQIKIDTETFGDFVRHRGGRGGRGPGRGGRTRGGYYGRGGGYGYNGRGRGRGMPSRTL

SEQ ID NO: 210677 - protein, 99 aa, Glycine max
  Clone ID: PAT_MRT3847_32269C.1.pep
LLYYSLKTPGHSQPNHIYHVYVNLAREGLSGCLPPPPLTTSPTHPRFISGQLPLPMSLSSFTPQLPSSPPFMLLGIPPPPPPKEGGRHTVMTGNLPGTE

SEQ ID NO: 210678 - protein, 79 aa, Glycine max
  Clone ID: PAT_MRT3847_3226C.1.pep
MLQLALGASHLIVALIWGFGIGSFPEVGHLVFRAGLAQILCLSCVFNNVTFSRITYNLHHHLHSLASHTQAHRRGILPF

SEQ ID NO: 210679 - protein, 33 aa, Glycine max
  Clone ID: PAT_MRT3847_32270C.1.pep
VLSLTVSVVYYSKVTVLTDRTRAMQPSCTLCCD

SEQ ID NO: 210680 - protein, 87 aa, Glycine max
  Clone ID: PAT_MRT3847_32271C.1.pep
HPPPPYLPVLVIISLYIFSISSSLCTSGSPCSHSCGFDVLLSGYGIPAVPWPSFPLFYVIAFACVAAYPFKVCISWSTHLCAVAGSL

SEQ ID NO: 210681 - protein, 214 aa, Glycine max
  Clone ID: PAT_MRT3847_32272C.1.pep
MDASSSSSSQPEFDYLFKLLLIGDSGVGKSTLLLSFTSDTFEDLSPSIGVDFKFGYVTIGGKKLKLAIWDTAGQERFRTLTSSYYRGAQGIIMVYDVTRRETFTNLSDIWAKEIDLYSTNQDCIKMLVGNKVDKESERVVSKKEGIDFAREYGCLYTECSAKTRVNVTQCFDELVMKILETPSLLAEGSSGVKKNIFKQKPPLSDASSSGCCSW

SEQ ID NO: 210682 - protein, 66 aa, Glycine max
  Clone ID: PAT_MRT3847_32273C.1.pep
GSRIVSMMGGRCYSSYQYNAEAAQMNVHTPLFTLHSEISISSLQPNQTPLLSPNHEKLTREETCRS

SEQ ID NO: 210683 - protein, 111 aa, Glycine max
  Clone ID: PAT_MRT3847_32274C.1.pep
KSLQYDPTSICAVDRRLYSERFRDFILKVFGEPFTYSFYSSIANHHIDIPMHKMVATSLVVGYFMIIDSRGHMFLMSVHLHPLFKFCVFYIIVPGNVCYTVPQCCSLLHPK

SEQ ID NO: 210684 - protein, 65 aa, Glycine max
  Clone ID: PAT_MRT3847_32275C.1.pep
AVSTQSVPFTSQQLLLRLRNEKGFGVLFARRPKSRGSLLRSLKRNPQRINRNSSYSVKLSWIWWF

SEQ ID NO: 210685 - protein, 167 aa, Glycine max
  Clone ID: PAT_MRT3847_32276C.1.pep
TMPPEALEITRKFMNKPVRILVKRDELTLEGIKQFFVNVDKEDWKLETLCDLYETLAITQSVIFVNTRRKVDWLTDKMRSRDHTVSATHGDMDQNTRDIIMREFRSGSSRVLITTDLLARGIDVQQVSLVINYDLPTQPENYLHRIGRISGMRCCNFVACLFVCLTK

SEQ ID NO: 210686 - protein, 38 aa, Glycine max
  Clone ID: PAT_MRT3847_32277C.1.pep
APFYLPLLWIGAIRFKKLKGFLPTWKPSFEWVSQPWPS

SEQ ID NO: 210687 - protein, 69 aa, Glycine max
  Clone ID: PAT_MRT3847_32278C.1.pep
NKNLPKQNGTYYFTIKDPLLNITNHTSLFKFADTKLSIILMGSNICVKPWFILLVLEREFYVLQEAASF

SEQ ID NO: 210688 - protein, 331 aa, Glycine max
  Clone ID: PAT_MRT3847_32279C.1.pep
QAQSGTGKTATFCSGVLQQLDYSLVECQALVLAPTRELAQQIEKVMRALGDYLGVKVHVCVGGTIVREDQRILSSGVHVVVGTPGRVFDMLCRQSLRPDNIRMFVLDEADEMLSRGFKDQIYDIFQLLPPKIQVGVFSATMPPEALEITRKFMNKPVRILVKRDELTLEGIKQFFVNVDKEDWKLETLCDLYETLAITQSVIFVNTRRKVDWLTDKMRSRDHTVSATHGDMDQNTRDIIMREFRSGSSRVLITTDLLARGIDVQQVSLVINYDLPTQPENYLHRIGRSGRFGRKGVAINFVTGDDERMLFDIQKFYNVQIEELPANVADLI

SEQ ID NO: 210689 - protein, 73 aa, Glycine max
  Clone ID: PAT_MRT3847_3227C.1.pep
DHGGSLLSLHQSGLSADPGTSPHPTLLPNYKTAIQLNPWHNAYYMFIHHNLPMNPNYCMRSSFSAPIACVNLL

SEQ ID NO: 210690 - protein, 413 aa, Glycine max
  Clone ID: PAT_MRT3847_32280C.1.pep
MAGLAPEGSQFDARQYDAKMNELLGTDGQDFFTSYDEVCESFDAMGLQENLLRGIYAYGFEKPSAIQQRGIVPFCKGLDVIQQAQSGTGKTATFCSGVLQQLDYSLVECQALVLAPTRELAQQIEKVMRALGDYLGVKVHACVGGTSVREDQRILSSGVHVVVGTPGRVFDMLRRQSLRSDNIRMFVLDEADEMLSRGFKDQIYDIFQLLPPKIQVGVFSATMPPEALEITRKFMNKPVRILVKRDELTLEGIKQFFVNVDKEDWKLETLCDLYETLAITQSVIFVNTRRKVDWLTDKMRSRDHTVSATHGDMDQNTRDIIMREFRSGSSRVLITTDLLARGIDVQQVSLVINYDLPTQPENYLHRIGRSGRFGRKGVAINFVTGDDERMLFDIQKFYNVQIEELPANVADLI

SEQ ID NO: 210691 - protein, 207 aa, Glycine max
  Clone ID: PAT_MRT3847_32281C.1.pep
RLIDSRDFGLTFNFRCSKTRFHIEFRHQHHDSIGKNCLRCVLVSDFLISSARGKIYRARELDSCAGNYYQIMSVPNSSCNIHEKEEQGDDEKGKLVSLGQMNSLSVKEDSRTSKNISSEGERRTPEIMGRCASWWATFTFFVCLCSLKFSKPLLQPQGPNSLWLAILGMFSFTVFVSAASVMVVVEAQFTRMQITVMLSAFLALLLA

SEQ ID NO: 210692 - protein, 102 aa, Glycine max
  Clone ID: PAT_MRT3847_32282C.1.pep
NVLHGHQQPGQHGLRQHMVSGVPLLPPHRVEQPLQLVQEGLGAAVEVVAQALEDCGEHDGVLRLVLQQQPVLSVLTHAVGVPRQQHQESAHESAHESRTRGS

SEQ ID NO: 210693 - protein, 97 aa, Glycine max
  unsure (1)..(97): unsure at all Xaa locations
  Clone ID: PAT_MRT3847_32283C.1.pep
MRSFENDRQYTLSSSQSHSIDVCGEGPIATDREPSHVRRKASTSGLETGETAVDGSRRYGAERRTLRKHRAATYSGASNRTTLYTXKLHDDTERLAN

SEQ ID NO: 210694 - protein, 56 aa, Glycine max
  unsure (1)..(56): unsure at all Xaa locations
  Clone ID: PAT_MRT3847_32284C.1.pep
HRGEEATQLRTKALSPMRCLQKADVPTIAHIEELHSMQKMINAADXKDNIDTRLSI

SEQ ID NO: 210695 - protein, 95 aa, Glycine max
  Clone ID: PAT_MRT3847_32285C.1.pep
APSLCQKAAMVVVHSAVLLSPNSPRIKWSCPAIQPVQVLWTCIWSMLRSSSPHLFFLHDWPLVPSEPSPVNFNNEPHLLLFSTLNKITKRHELEP

SEQ ID NO: 210696 - protein, 48 aa, Glycine max
  Clone ID: PAT_MRT3847_32286C.1.pep
RNFIDFGGWILGGFSGPLVILIVHCFCNKLIRPGYLFSASYDKSMIRA

SEQ ID NO: 210697 - protein, 105 aa, Glycine max
  unsure (1)..(105): unsure at all Xaa locations
  Clone ID: PAT_MRT3847_32287C.1.pep
SVESGSSIIMVHRVDLVDVVVGGPVPQVQPFEVSGPSPSQEATVFWRCMDPFVVPPSPSSNWRSSAAGSSQLAMLSSWPVGSGGPQEPPAKQYPGVWXLSLVRAE

SEQ ID NO: 210698 - protein, 70 aa, Glycine max
  Clone ID: PAT_MRT3847_32288C.1.pep
MLCSSHYSKAHNNNSKLEKERSKNYWGQLNNKILLQTKIGEISPIVHTTYITTLLELSAVTFSIERNGLS

SEQ ID NO: 210699 - protein, 62 aa, Glycine max
  unsure (1)..(62): unsure at all Xaa locations
  Clone ID: PAT_MRT3847_32289C.1.pep
MNQTAIANFEKAIGCYSPSVQELIVIDDVLFAMVGVEGRYILIKQFXGKSDXITFLGDPAMD

SEQ ID NO: 210700 - protein, 73 aa, Glycine max
  Clone ID: PAT_MRT3847_3228C.1.pep
SFSYNVQRACHWILLKVGPSNRDMTMHIPRKGCFVNTFRDGAIGYLIMARRKSRTQWKVTHSSKESSSSSVQS

SEQ ID NO: 210701 - protein, 107 aa, Glycine max
  unsure (1)..(107): unsure at all Xaa locations
  Clone ID: PAT_MRT3847_32290C.1.pep
NDSASPVSIPSPPINDDGRDSGLHNGKDTSDGMMFSHHSTTETCDWFKKQTYYDGGMRSXLXKNXXHPSKWQXKCPLTXMLGKGIVCFTWLQRYLMRISLCVXLIMT

SEQ ID NO: 210702 - protein, 39 aa, Glycine max
  Clone ID: PAT_MRT3847_32291C.1.pep
TMGEPSGLPCLNTLKLHCFLSSFILNDSERREVAHFVLV

SEQ ID NO: 210703 - protein, 25 aa, Glycine max
  Clone ID: PAT_MRT3847_32292C.1.pep
VNHIWSLYFRSCLNKFLTSTNERRN

SEQ ID NO: 210704 - protein, 410 aa, Glycine max
  Clone ID: PAT_MRT3847_32293C.1.pep
MGWKGGLKNVVTMFTFMVALVVVQHVKCGDSARMLLQHGGFVQRSGTNFVLSNRHFYFNGFNAYWLMYMASDPATRPKVTAVLQQASSHGLTVARTWAFSDGGYRALQVSPGSYDEKVFRGLDFVVSEAGKYGVRLILSLVNNWKDFGGKNQYVQWVKEHGQYVNSEDDFFSHPIAKQHYKNHIKAVLTRKNTITGVAYKDDPAIFAWELINEPRSQHDNSGKVIQQWVIEMAAYVKSIDNNHLLEIGLEGFYGETMPEKKQFNPGYQLIGTDFISNNLVHQVDFATMHLYPEQWLPGSNEAAQVAFVDKWLQTHIQDAKNVLGKPIVVGEFGKSSKSYSVVERDNYLSKMYNAIYSSASSGGPCAGGLFWQLMAKGMDGLRDGYEVIFEESPSTTRIIDQQSHKMSSIA

SEQ ID NO: 210705 - protein, 72 aa, Glycine max
  Clone ID: PAT_MRT3847_32294C.1.pep
VSSGIRLEGPHVTRFKDTYFVTGIVSWGEGCARKGKYGIYTKVTAFLKWIDRSMKARVGPTSETPRLTHPPY

SEQ ID NO: 210706 - protein, 81 aa, Glycine max
  unsure (1)..(81): unsure at all Xaa locations
  Clone ID: PAT_MRT3847_32295C.1.pep
MASSVMASVALKPAPFTVEKSSVRGLPSLSRNSSSFRVVASGKKIKTDKPYGINGGMALKEXTDSSGKKRKGKGVYQSVDK

SEQ ID NO: 210707 - protein, 133 aa, Glycine max
  Clone ID: PAT_MRT3847_32296C.1.pep
QVLFASFCSPCCTCCVRSPAHVFLVPLSSVLSYESSLVYSFSLVPVQDVSYWSRQLRIIHVIVSGAVSYASRFTILVLSRSLSGQLHVRCSTVRLRFAQSMSLLIHIPLVALIVCPPRCLTCHTISLNKIYDF

SEQ ID NO: 210708 - protein, 129 aa, Glycine max
  unsure (1)..(129): unsure at all Xaa locations
  Clone ID: PAT_MRT3847_32297C.1.pep
GCPKENLHEGDRPKKVSGGHPPQKEGPKEGRSNPPPKGDPTRQPVNKQRSRPAGGGTHTRGGTPKKEGKGGFFARPGSPPTKKARPGQFXPTKRDLKPQKPTRGGNFKKTRGDMGARKQRSLQTLLRMA

SEQ ID NO: 210709 - protein, 90 aa, Glycine max
  Clone ID: PAT_MRT3847_32298C.1.pep
AGDIELERKRVRPWEKGKPIGHKGGKQGASQCTCSLAGSFQSGKEGGSSTGSELGKGQGAPMPAREIGAGFYEIKRGKERGMRCKEGVVR

SEQ ID NO: 210710 - protein, 65 aa, Glycine max
  unsure (1)..(65): unsure at all Xaa locations
  Clone ID: PAT_MRT3847_32299C.1.pep
KQNALMRFKKVVHGKQKVVSGTLDTITLXTKVCGQKKVYEAKVWDXSWLNFKQAQEFKLVAHALG

SEQ ID NO: 210711 - protein, 76 aa, Glycine max
  Clone ID: PAT_MRT3847_3229C.1.pep
LFFMFVSSFFAIFSSPFMFLFLLFFEVCVFHSLLSALSSVFSQISFLFCYLWCSFFASLSLDLFVAIVVLTSFSVF

SEQ ID NO: 210712 - protein, 82 aa, Glycine max
  Clone ID: PAT_MRT3847_322C.1.pep
KQKSFTGKLLHKQYFWTMLQVSEPYIRKCRCPILTTYPVMSSQEQVNFKSSKNIYHSFHLSRPPGIWFFNCSLSKYMLDATH

SEQ ID NO: 210713 - protein, 55 aa, Glycine max
  Clone ID: PAT_MRT3847_32300C.1.pep
DPQFFYNKRERVQNSILKSEFLAILLPRDFKPFIEAPAASLLFSFMISSRNLKTI

SEQ ID NO: 210714 - protein, 36 aa, Glycine max
  Clone ID: PAT_MRT3847_32301C.1.pep
RDWPRTLTPFVCAGRESETTQLVTVKVWRELVPQAE

SEQ ID NO: 210715 - protein, 110 aa, Glycine max
  Clone ID: PAT_MRT3847_32302C.1.pep
FLPEMGSFFQWTRYRRYLFKQKSLSVCVGHICSLFFSTCMVVVQWKLVLGFKMRAVHREVRGVQFFQNTNVRMVVHGSLLLVARYSFLHLWVLSVVILLWLWKGMWVFLC

SEQ ID NO: 210716 - protein, 59 aa, Glycine max
  Clone ID: PAT_MRT3847_32303C.1.pep
PTTSYWTCFKLDYLMVLMQTSDTMGCKLGVFGHATSCAQCSTVCDDPSHDRQSRLLHLE

SEQ ID NO: 210717 - protein, 133 aa, Glycine max
  unsure (1)..(133): unsure at all Xaa locations
  Clone ID: PAT_MRT3847_32304C.1.pep
MLGIFSSSVVSPPEELVAAGSRTPSPKTTAEKLLNRFVESKASAVSLQVGEHVQLAYTHHNESPWHPRSFAVKDEIFCLFEGALYNLGSLRQQYGLAKSANEVIXVIEAYKAXAVIVCDKSTSTLFVASDQAG

SEQ ID NO: 210718 - protein, 191 aa, Glycine max
  unsure (1)..(191): unsure at all Xaa locations
  Clone ID: PAT_MRT3847_32305C.1.pep
MANEKDRFYQPFHYNHHHDQQLNHSSSSFPLFFRDNNNNSAPIGSQLNFQGFDDHNNNPSSDHHHTTFTDCLHGSMDYNTLSRAFDMSCSSSEVISSNIVENPKKPSAGGDSVGVRGNQQSTPNSSVSSPSNEAEAIIEEDSTKSQKDKQPKACEADGDEKPKKENKPQKKEKKPREPXFCLLTXSEIDHL

SEQ ID NO: 210719 - protein, 59 aa, Glycine max
  Clone ID: PAT_MRT3847_32306C.1.pep
HLECNKSQTCMIETSPPHARPDPFFSQIYLKYRKTLPIAHFTTNALTPNIALLYWTDGQ

SEQ ID NO: 210720 - protein, 236 aa, Glycine max
  Clone ID: PAT_MRT3847_32307C.1.pep
MLGIFSSSVVSPPEELVAAGSRTPSPKTTAGKLLNRFVENKASAVSLQVGEHVQLAYTHHNESPWHPRSFAVKDEIFCLFEGALDNLGSLRQQYGLAKSANEVVLVIEAYKALRDRAPYPANRVVCHLSGSFAFIVFDKSTSTLFVASDQAGKVPLYWGITADGYVAFADDADLLKGSCGKSLASFPQGCFYSTAVGGLRCYENPKNKITAIPAEEEEIWGAFFKVEGSAVLAGTE

SEQ ID NO: 210721 - protein, 236 aa, Glycine max
  Clone ID: PAT_MRT3847_32308C.1.pep
MLGIFSSSVVSPPEELVAAGSRTPSPKTTAGKLLNRFVESEASAVSLQVGEHVQLAYTHHNESPWHPRSFAVKDEIFCLFEGALDNLGSLRQQYGLAKSANEVILVIEAYKALRDRAPYPANRVVCHLSGSFAFIVFDKSTSTLFVASDQAGKVPLYWGITADGYVAFADDADLLKGSCGKSLASFPQGCFYSTAVGGLRCYENPKNKITAVPAEEEEIWGAFFKVEGSTVLAATK

SEQ ID NO: 210722 - protein, 159 aa, Glycine max
  Clone ID: PAT_MRT3847_32309C.1.pep
MEDNGIKQQSSASAAGVYELPGEPAIVINGVPDIIPGGCTIAPGNASSKVEMHAPSGLGEWFEGRDVQKWFMGRYFSGMVTDFDKDSGWYRVHYEDGDSEDLDWQELEEVLLPLDVTVPLKALARRIVRKDKKSVPKSVKKEAAHSQNLQIKRSTTKGK

SEQ ID NO: 210723 - protein, 130 aa, Glycine max
  unsure (1)..(130): unsure at all Xaa locations
  Clone ID: PAT_MRT3847_3230C.1.pep
MVLGRGHASVAEAIESTDTEDDYDEVQKLLEEMAKAEHKVDSSSYKYKLLKRRQIESETEAWAEAAREYXELLEDMRDKKLAPNFADMKSLFLGWXFEPLRNAILADQDLCRISKCXMSHAPYFNDLPAD

SEQ ID NO: 210724 - protein, 107 aa, Glycine max
  unsure (1)..(107): unsure at all Xaa locations
  Clone ID: PAT_MRT3847_32310C.1.pep
FPANRRAYTAGSSFIGYGVNKDLESEAPTYHEGASVXRLTKRVEDSLLPSAQLLFKIEHTXVSLNYYTGILGMPGVTAFASLLEGXSLQKGKKVFASAASGTIWSTL

SEQ ID NO: 210725 - protein, 59 aa, Glycine max
  Clone ID: PAT_MRT3847_32311C.1.pep
LISRDIIEDHIKQGSITQTLELNPSLYLSRKALCYRTFAYISKTCGSHKQHAHTLPAAL

SEQ ID NO: 210726 - protein, 45 aa, Glycine max
  Clone ID: PAT_MRT3847_32312C.1.pep
SSLIERKNKFVNIPYSGECIIQGKNKIWINISRLVGYKCKKCWNY

SEQ ID NO: 210727 - protein, 401 aa, Glycine max
  Clone ID: PAT_MRT3847_32313C.1.pep
SSGVMPLLKLLIEASSPAAQGASADALVNITTNQDRVVTFIVESHAVPIIVQVLGDSPMRVRVSVANLVSAMAEQHELAREEFVRANVTRPLVSLLSMDMGTVLADPMAGRASIHSLVLNLSNVGEANSDGSSRGSSHQRRDREVESPELRNEVKISCAKALWKLSKGCLSSCRKITETKGLLCLAKIIESESGELQLNCLMAVMEIAAVAESNADLRRAAFKRTAPAAKAVLDQLLRVVQEESDPALRIPAIKAIGSLARNFSGKVPQVIGPLVAQLGNRDVDVASEAAIALGKFVCPDNYNCIDHSKAILELDGIPKLMSLLQINDRQQVHGLKLLCYLALNVGNSRVLEQERALNTLERFARPVQAQHPDLKDLFAKALHHLTLYQPGAQLHRQPLGL

SEQ ID NO: 210728 - protein, 30 aa, Glycine max
  Clone ID: PAT_MRT3847_32314C.1.pep
TFTSTCLMNVGLAYPGSIFRRSKLMNVGLA

SEQ ID NO: 210729 - protein, 209 aa, Glycine max
  Clone ID: PAT_MRT3847_32315C.1.pep
TCEERVARDLELVVGEGEKPKAVIIGGSIAGISSAHALTLAGWDVLVLEKTTSPPTGSPTGAGLGLNSLSQQIIHSWLPPHQKQLLHNTTLTLTIDQNHATDSEKKFSWTLTRDESFNFRAAHWADLHGLLYNALPPNVFLWGHLFLSVHVADDKGSVIVKAKVLETGKIIEIVGDFLVAADGCLSSLRQKYLPDFKLRYSGYCAWRGV

SEQ ID NO: 210730 - protein, 141 aa, Glycine max
  Clone ID: PAT_MRT3847_32316C.1.pep
PNGGFKYVRSNNRTIWFYKFWFYSRNVYPGHHEQSVLNNIKMHPLVSRMKLKMRLLSTSYFGGFCQLAEDFNRVSTMHANCCVGLESKVNDLKILLEDWKKYMAMSENEKKHSHPSWSVPQLCRTSFQRAKKKKQITKRRL

SEQ ID NO: 210731 - protein, 52 aa, Glycine max
  Clone ID: PAT_MRT3847_32317C.1.pep
MPRERFRPLLEYKIDLKMQNLNKKKNLGNKFSPSPNNFFVPGICNALLTVIS

SEQ ID NO: 210732 - protein, 75 aa, Glycine max
  Clone ID: PAT_MRT3847_32318C.1.pep
KIILQIICTVNIKITVFIFIGVEPFDIDLKEQKVTVKGNVEPYEVLQAGAKSCKKTSFWVDEAPQSKNQPFESAP

SEQ ID NO: 210733 - protein, 185 aa, Glycine max
  Clone ID: PAT_MRT3847_32319C.1.pep
MAHSPFLLLPNLQGFWPSLLAMITCFIIMIKALRNNFIENYSNKQKPKLPPGPKPWPIVGNLPEMLANKPAHKWIHNLMKEMNTEIACIRLGNAYVIPVTCPTIAREFLRKQDATFASRSQSVSTDLISNGYSTTIFGPFGAQWKKMKKFLTNDLLSPHKHLWLHGQRTEEADNLMFHVYNKCKN

SEQ ID NO: 210734 - protein, 61 aa, Glycine max
  Clone ID: PAT_MRT3847_3231C.1.pep
VQTETWYTIGVTFELFHCAIQDDIHLYFVECKYFSSIKGIHEEKKKKKKKKKKKKKKNGEV

SEQ ID NO: 210735 - protein, 97 aa, Glycine max
  Clone ID: PAT_MRT3847_32320C.1.pep
TVLNIRADYQHHHLPSSMGCSYQLFDLSSIWRRSRTRTAATRNSPPDASGACTKIVHLHLFGASEPPNVTLLNMADKYSHSVTLRLTSDKPLIVSKC

SEQ ID NO: 210736 - protein, 86 aa, Glycine max
  Clone ID: PAT_MRT3847_32321C.1.pep
GKKKGQKKLRLKTNYPFGEGPFFYLKIFLGSNMFFWGQAPFFGQKIFPKAKYFFFGNPKILISLGGQGNRFYLVFPRGLFTPKRPF

SEQ ID NO: 210737 - protein, 183 aa, Glycine max
  Clone ID: PAT_MRT3847_32322C.1.pep
MPEPESQNGHEPAPEPEPEPQPQPETKPEPTEQTQPHLEPKSESVPELEPNPQPESEPVPTEQTQAPLEPKSGSEADPVVNDADLRETTIHSNEANANPSPTPKLRKDEGSRTFTMRELLNGLKTGSEPEKEDANSPYSPEQQQHQADQNNAAMDLINSVVGVDDESRSRQRILTFAGRRYAT

SEQ ID NO: 210738 - protein, 66 aa, Glycine max
  unsure (1)..(66): unsure at all Xaa locations
  Clone ID: PAT_MRT3847_32323C.1.pep
XXFNELLASXXXKISAVAGGXXAVAVAAAPAGGAGXGAAPAAEAQEXKXVXXKXESDDDXXFSLFD

SEQ ID NO: 210739 - protein, 126 aa, Glycine max
  unsure (1)..(126): unsure at all Xaa locations
  Clone ID: PAT_MRT3847_32324C.1.pep
CXLVCXPXCCWCRXSXACCAAXSLCLXCCXCCLGSSSAFAXXXLVPXPFXLGRXLVPSCFFASSPVLWGSVFLFSSXFXXSPLWRKALAAVFRXFVLALXFVSFLLWXVCCCLWCVGCPSXXLFPV

SEQ ID NO: 210740 - protein, 87 aa, Glycine max
  unsure (1)..(87): unsure at all Xaa locations
  Clone ID: PAT_MRT3847_32325C.1.pep
KPKVLLSSVFFSLLLSFWLALLQVQLPRSAVPSHHSTFNRSLFPSSXXFGIGSXAYQAEGXASVXGRGPSXWEXYXXEDXEKXWGHS

SEQ ID NO: 210741 - protein, 184 aa, Glycine max
  unsure (1)..(184): unsure at all Xaa locations
  Clone ID: PAT_MRT3847_32326C.1.pep
ARGEINPVLNPRAAGPEGSLIAMPGSNQGSNNLTLKGWPLTGLEQLRSGLLQQQKPPFIQSPQQFHQLPMLTPQHQQQLMLAQQNLASPSASDDSRRIRMLLNNRNMGVTKDGLSNPVGDIVSNVGSPLPAGGPAFXRSDTDMLMKLKLAQLQHQQQQNANPPQQALQQHTLSNQQSQTSNHSM

SEQ ID NO: 210742 - protein, 164 aa, Glycine max
  Clone ID: PAT_MRT3847_32327C.1.pep
LWVGWGFFFFFFFFFFFFFFFFFFFRKTRSFLTLIFFLGQQIPTLTIQTGGRTWGGDTKGLNGMEQLQSIFQGVDTPTAIYSPTKGFLLLTTRSLYFPQNMGKIHFPRLPFTENLPKPHRGDTKTYLFWTFILWGILGYAGEPAWSHEANKTKVFGTDSSRRNF

SEQ ID NO: 210743 - protein, 73 aa, Glycine max
  Clone ID: PAT_MRT3847_32328C.1.pep
CATRWPLLGSPCVSSPLLSCAWGEQFSLFFPSPPPVNKNEKEKKKKEKISKPKKNKKKKKKKKKKKKKKKDER

SEQ ID NO: 210744 - protein, 171 aa, Glycine max
  Clone ID: PAT_MRT3847_32329C.1.pep
ARAATSLAELEKIFEIAIGGSEDEKISAAAILCGASLIRGWNIQEHTVHFILRLLSPPVPAENTEGNNYLINYAPILNVLFVGIASVDCVQIFSLHGLVPQLACSLMPICEVFGSCVPNISWTLTSGEEISAHAVFSNAFILLLKLWRFNRPPLEYGIGDVPTVGSQLNSR

SEQ ID NO: 210745 - protein, 40 aa, Glycine max
  Clone ID: PAT_MRT3847_3232C.1.pep
MTSIFIYFQNFKVLQKHLYSSKSNYILKKINKAVIIKRVK

SEQ ID NO: 210746 - protein, 28 aa, Glycine max
  Clone ID: PAT_MRT3847_32330C.1.pep
FLINVSGDQIERIHSGLMGNMNDVARLS

SEQ ID NO: 210747 - protein, 159 aa, Glycine max
  Clone ID: PAT_MRT3847_32331C.1.pep
RKLSGRTEPKRELKSSRSIKFAAVKGQKSTRKFYESNYGSDDQNWKSASDAGNKLQRVITRRLSLKPVRILAKMPTFKSKNSSMERGNQISQSPYTSLLRATCTSALKDSHFPEKIDLPQEGSDSQGVSAVKVCPYSYCSLHGQRHTNLPPPLLSSSTV

SEQ ID NO: 210748 - protein, 64 aa, Glycine max
  Clone ID: PAT_MRT3847_32332C.1.pep
TVSFNPTNSQFFGFYTNKHNWFFMGMLLRSVPPKQKKRNIRISGPRGGKKMNFQLHGLLGRWGF

SEQ ID NO: 210749 - protein, 52 aa, Glycine max
  unsure (1)..(52): unsure at all Xaa locations
  Clone ID: PAT_MRT3847_32333C.1.pep
XQEIXKTVXXXKAHKXXRXIFHRXXALTPXXXXLGVSXLEXNXRAYVXVXAT

SEQ ID NO: 210750 - protein, 228 aa, Glycine max
  unsure (1)..(228): unsure at all Xaa locations
  Clone ID: PAT_MRT3847_32334C.1.pep
MSILSVPSPTQRCSISISRLPLPLPLPFQLQVRRRAKGGKVVMSMEAGIGVMGTKLGMMSYFESDGEVVPVTVVGFKEGNIVTQIKTEATDGYDAVQVGYRRVRDRKLTKPEMGHLHKVGAIPMRHLQEFRLQAIDGFDLNQRLLFDETFKEGDLVDVSGTTIGKGFQGGIKRHNFKRGPMTHGSKSHRQLGSIGCWTTPXRVYKGKEMPXXMGGTKRKIRKLKIVKI

SEQ ID NO: 210751 - protein, 93 aa, Glycine max
  Clone ID: PAT_MRT3847_32335C.1.pep
PYFLTRSLGWHVQCTPLTNTGITTTLCATCHRRGIYYPSVPFPFSVNVTLVFTLFFLIAPRCSTVTILHITYDTYTYILLNNGYPLLLSYTIY

SEQ ID NO: 210752 - protein, 266 aa, Glycine max
  Clone ID: PAT_MRT3847_32336C.1.pep
MPAMSIFSIPSPTYRCSISISISRQPLPCSFTAQVRRRGKGKVVMSMEAGIGVMGTKLGMMSYFESDGEVVPVTVVGFKEGNIVTQIKTEATDGYDAVQVGYRRVRDRKLTKPEIGHLQKVGAIPMRHLQEFRLQAIDGFDLNQRLVFDEIFKEGDLVDVSGTTIGKGFQGGIKRHNFKRGPMTHGSKSHRQLGSIGAGTTPGRVYKGKKMPGRMGGTKRKIRKLKIVKIDKDLNVVMIKGAVPGKPGNLLRITPAKIVGKNIPKN

SEQ ID NO: 210753 - protein, 74 aa, Glycine max
  Clone ID: PAT_MRT3847_32337C.1.pep
QQFSWSKSRCLALHSALTLYSSQTLSTHEHVCGSKSLFCHLHSFFVLYSSHVSTGRLQVHEYSCNSRCLASPRA

SEQ ID NO: 210754 - protein, 88 aa, Glycine max
  unsure (1)..(88): unsure at all Xaa locations
  Clone ID: PAT_MRT3847_32338C.1.pep
SQGGWELDESVQEAACMESLEEARVLGIIEXGELRQWNFISXTYGIYYEGHMFPMFVKEQLDTWPEKNLPRRIWVCLGPTLILHMYVT

SEQ ID NO: 210755 - protein, 60 aa, Glycine max
  Clone ID: PAT_MRT3847_32339C.1.pep
VNGRQTYIPFYRITEGQNKVIITDRMWARLLSSTNQPSFTIAKTVSEEKREEEANGHISE

SEQ ID NO: 210756 - protein, 57 aa, Glycine max
  Clone ID: PAT_MRT3847_3233C.1.pep
KKHHHHFNHHRGDDWPGRVDNRRGGRHHRHFGHLGELGAAVAVANPLHEKQVAKKDP

SEQ ID NO: 210757 - protein, 87 aa, Glycine max
  Clone ID: PAT_MRT3847_32340C.1.pep
DSTCCDRPYSALWAFSDGEDPKLPASALSDGHTISSCDSNSRAAKPVENDDNKKLLPPLVPISPVENLDGSCVIKERMTQALHYFKE

SEQ ID NO: 210758 - protein, 556 aa, Glycine max
  Clone ID: PAT_MRT3847_32341C.1.pep
HASGKPKEGFDAVKQRQSQEQARRKKMSRAQDGILKYMLKMMEVCKAQGFVYGIIPEKGKPVTGASDNLREWWKDKVRFDRNGPAAIAKYQADNAIPGKNDGCNPIGPTPHTLQELQDTTLGSLLSALMQHCDPPQRRFPLEKGVCPPWWPTGNEEWWPQIGLPKDQGPPPYKKPHDLKKAWKVGVLTAVIKHMSPDIAKICKLVRQSKCLQDKMTAKESATWLAIINQEEDLARELYPDYCPSLTTSGGSGSMVINDCNEYDVEGGDDEPNFDVEDRKPENLHASNLGMDRMRGRLPVQQPSFPIKGEVVTNFDFIRKRKISGDFNMIMDQKIYTCEQPQCPYSETRHGFADRNSRDNHQLSCPYRGAASDYGASNFQVNEVKPVIFPQSFVQPKPTTQSVNLVPSVIDLTGLGVPEDGQKMISDLMSIYDTNFQSNKNLSSSNHVAAENPSLPQPGIRQQQDNFFRSQGITMEGNFYEEANMPNNHHMFAREESQFDRFKALNAPPFESNHNNNFHLMFGSPCDLASFDFKEDMQGGGGMDALQKQADISIWYQ

SEQ ID NO: 210759 - protein, 64 aa, Glycine max
  Clone ID: PAT_MRT3847_32342C.1.pep
SCLKSNFKIFSVFMLHFFKVILTNSSLSIILKKKKKKKKKKGGAPVKGAVEPGIYFGPGTGGGT

SEQ ID NO: 210760 - protein, 149 aa, Glycine max
  Clone ID: PAT_MRT3847_32343C.1.pep
AGNHILGMFDKRITAFAEDKFRRDGIDVKTGSMVVKVSEKEISTKELKNGEIKTIPYGMAVWSTGIGTRPFIKDFMAQIGQASRRALATDEWLRVEGCNNVYALGDCATINQRKVMEDIVAIFKKADKDNSGTLTVIQFQEVMKDICER

SEQ ID NO: 210761 - protein, 97 aa, Glycine max
  Clone ID: PAT_MRT3847_32344C.1.pep
PLAQTHTHFLHSYSSQLLLPEHKFVALLGKRPQPRIGKISELLVFGDCATKLFDSLGRSPINPVDMMNLEMPSPKGLKSYDPGGGSLRIGGALGKKS

SEQ ID NO: 210762 - protein, 39 aa, Glycine max
  Clone ID: PAT_MRT3847_32345C.1.pep
SVDLAPWVQSHRSPRHLSSQCSLLICGSNARTRVHPVCS

SEQ ID NO: 210763 - protein, 119 aa, Glycine max
  unsure (1)..(119): unsure at all Xaa locations
  Clone ID: PAT_MRT3847_32346C.1.pep
LWWPDKSRKMKIDXLKAYGISVETFLTAIATIPNYKGLTIVRSYSPDHYEGGAWNTGGSCTGKANPLAPGELVENVHTNIMHVQHATGSNRAVQKATNGTNQTLMDIPAAFQYRHAGHP

SEQ ID NO: 210764 - protein, 78 aa, Glycine max
  Clone ID: PAT_MRT3847_32347C.1.pep
MTRTRIKIKKIDNITARQVTFSKRRRGLFKKAEELSVLCDAEVGLIVFSSTGKLFDYSSSRYVYGRRLVYYNTPLLSF

SEQ ID NO: 210765 - protein, 61 aa, Glycine max
  Clone ID: PAT_MRT3847_32348C.1.pep
VWVGFLKSAFTIIIGTSFFGFNKLANKKKKKKSEIRAYLISSFLKGVSIAKKGRKQKGGTT

SEQ ID NO: 210766 - protein, 109 aa, Glycine max
  Clone ID: PAT_MRT3847_32349C.1.pep
SSRLWYWVKLVLCFLCLGLLALVAFKWVVPLFTKKVIIPIINWETNTFSSPVLAVLVFASISLFPTLILPSSPSMWVAWLTVVNGLEFLLIISATAPGVSLPFLISTIF

SEQ ID NO: 210767 - protein, 84 aa, Glycine max
  unsure (1)..(84): unsure at all Xaa locations
  Clone ID: PAT_MRT3847_3234C.1.pep
NSTFEHPSKATRADGLALLWERRGSQPQSDDGSLGLFNRPLKDKSLQTMAIESAACSNKKWDPXDRHIGIDENSIKAGDKVSGW

SEQ ID NO: 210768 - protein, 219 aa, Glycine max
  Clone ID: PAT_MRT3847_32350C.1.pep
PGLISTSIRSALDCPLNYARNYLANLLPSCVLKIVYLDSDLVLVDDIAKLAATPLGDNNNTVLAAPEYCNANFSAYFTPSFWSNPSLSLTFAGRTPCYFNTGVMVIHLQRWRAGDYTTKIQEWMELQKRMRIYELGSLPPFLLVFAGNIVPVDHRWNQHGLGGDNFRGLCRDLHPGPVSLLHWSGKGKPWARLDANRPCPLDALWAPYYLLLTPLALEA

SEQ ID NO: 210769 - protein, 71 aa, Glycine max
  Clone ID: PAT_MRT3847_32351C.1.pep
LGCFCCRSRPRSVLGGVLFPPARRSCPVRACRRRRPVGPPCFGGFGVPPPSALGVFSLKPAGGDVPAVLGG

SEQ ID NO: 210770 - protein, 74 aa, Glycine max
  Clone ID: PAT_MRT3847_32352C.1.pep
CCLTKARSLKLGVPIRKRSRRMCAYENLDPQWESALLERCCMLLSVLVSQCMYCALKIMCWVLCTKDNVRPYVF

SEQ ID NO: 210771 - protein, 71 aa, Glycine max
  Clone ID: PAT_MRT3847_32353C.1.pep
IALEQVIYQENDDPKGKDAIQLNLEGTELQVLRPGYEETLPNRSILLKRYKERAHLEACEKAEHTHGQQAF

SEQ ID NO: 210772 - protein, 46 aa, Glycine max
  unsure (1)..(46): unsure at all Xaa locations
  Clone ID: PAT_MRT3847_32354C.1.pep
ARRAGRDLGKGGLNDPMKNESYWKIPGMLXLLVRGAQPTGTVHDIS

SEQ ID NO: 210773 - protein, 46 aa, Glycine max
  Clone ID: PAT_MRT3847_32355C.1.pep
IKFVGTFDILWVLIVRDTKKKKNSILLAKRNTLNKSLLKGQLYRMV

SEQ ID NO: 210774 - protein, 57 aa, Glycine max
  unsure (1)..(57): unsure at all Xaa locations
  Clone ID: PAT_MRT3847_32356C.1.pep
LPEISGQQLGNXVVKXXDAXXXXSXSFTGXXFXTIVXLRXRXXXXXAXDXXFXHQXX

SEQ ID NO: 210775 - protein, 57 aa, Glycine max
  Clone ID: PAT_MRT3847_32357C.1.pep
LNSSKSESGLESTLAPAVRCRPSVGASALQRHVPLVTLVRRISPTRRLEAQFSSSGG

SEQ ID NO: 210776 - protein, 454 aa, Glycine max
  Clone ID: PAT_MRT3847_32358C.1.pep
MEMFILQSCIEDLEQKNLALLTECEKHVEASKFSYKVISELETENFMQLMEEEFLLHEIRKLKMAIHQVCGALQIDPYGVHDKGIKQEEMPILHILDNIEGLKSSYVKSQEEKQKLLVENSVLLTSLEQNRSDREKMESEKKIMEQEFESMRQKNAMLQKEKVELLEKNRQLRTEVANGEERDNASKYKLATLHAELIDLQTKNQVFQEENSMMLEEKNSLLRSVLDLKDAMSVAEDENSVILHEVLALSNLNLVYESFLTQKVIEQKALSEHLSSNLSRLNSDLNQELGVLRKKFELKEEESVYLNEATKRMDKELREIKNANCRLSHQVENSENLLKKKDIELLETETRLKAAEKLNGEFCRYIEEMKMDKKESRLTRENLDRQILELSENGMNQKREIEHLNEENRSFQSVMRSLLHEVEQHKAREQALNTELQDKTNECQHCEAEAASFL

SEQ ID NO: 210777 - protein, 128 aa, Glycine max
  unsure (1)..(128): unsure at all Xaa locations
  Clone ID: PAT_MRT3847_32359C.1.pep
HPDGAPEKGPVNWQPNHHPIGITDGKQDGKHDDNAGSNASASATEGGAKVGDHERNDGHHVGGHVGRRKMYTRETXVVPDVQAQRAAQNADFYPDEVDREEGGAHRGEQKAEVYVAVSTTTNTKTTSK

SEQ ID NO: 210778 - protein, 96 aa, Glycine max
  unsure (1)..(96): unsure at all Xaa locations
  Clone ID: PAT_MRT3847_3235C.1.pep
FHQDYXGAFDLLSPSEVLSHSKINYLCINLSIEKVSQLVVNQFSVYFTLSQYRKLINIVNLYIVTILHSYVKKTGYHLVTILHIFIYGSSTSQIVL

SEQ ID NO: 210779 - protein, 48 aa, Glycine max
  Clone ID: PAT_MRT3847_32360C.1.pep
HSFSFSLATMKGVSMSPKINLTLWSCIVRSIPCNMEKPIASHIMKVMH

SEQ ID NO: 210780 - protein, 34 aa, Glycine max
  Clone ID: PAT_MRT3847_32361C.1.pep
HPLSRQPDGPARPPGMAPSHRPWLRSLGRSVTCR

SEQ ID NO: 210781 - protein, 174 aa, Glycine max
  unsure (1)..(174): unsure at all Xaa locations
  Clone ID: PAT_MRT3847_32362C.1.pep
NTIFFALSLFIAFTTSYLPAAIAVSALDDESNPLDIGGTYYILSDITAFVGIRAAPTGNERCPLTGVHSAIELYKRIATIILFSFRIRIIAECNPLRLKFDLLAVIMLCVXIPTRWSVVDELPQGPDVKIAANTNAQYGWHTIDRASDDQSNSYYLVYCSHYSDDDNCSDIVTI

SEQ ID NO: 210782 - protein, 90 aa, Glycine max
  Clone ID: PAT_MRT3847_32363C.1.pep
DAHIQLSVELCITLLTGHALTPVKVSHPSVVLSIESPPARVNKIGGWLVADGFREQGVANQRHQRGIINMFFFYNKRCVTGKLFSVSQVL

SEQ ID NO: 210783 - protein, 124 aa, Glycine max
  Clone ID: PAT_MRT3847_32364C.1.pep
MESLSFSLHSNLHSLTLLQHSNQNKKRRKITHQNSLALTPWTSHTQHRLYSSNGLLALRRNSNPTASLQVRADADRVLAATAKGRTRWSRAILANTFGRWRKQRQRHHKKVKNCSANKCMKEEP

SEQ ID NO: 210784 - protein, 47 aa, Glycine max
  Clone ID: PAT_MRT3847_32365C.1.pep
LKNIKKLKIILCTCSVNGSDITIVWLVMDRLVSYSLMDAHVISWRGK

SEQ ID NO: 210785 - protein, 229 aa, Glycine max
  Clone ID: PAT_MRT3847_32366C.1.pep
ARDLFYPGWAWSLATWILGVPYSLVEAVIWSCVVYYTVGFAPAPGRFFRYMLLLFMLHQMALGLFRFMAALARDMVIANTFGTAALMIIFLLGGFIIPKGMIKPWWIWGYWLSPLTYGQRAISVNEFTATRWMQHSAFGSNTVGLNILKGFDIPAEDYWYWVGLGVLTLYALIFNCLVTLGLSYLNPLQKARAILFGDEDDSKESSNKNGSKSSGDDGKAKGMSLPFEP

SEQ ID NO: 210786 - protein, 31 aa, Glycine max
  Clone ID: PAT_MRT3847_32367C.1.pep
VELTRGIAPSFHHRIYFILWPIIKCRTQNLA

SEQ ID NO: 210787 - protein, 42 aa, Glycine max
  Clone ID: PAT_MRT3847_32368C.1.pep
AVCYCMLWVADDPFMESTSLANLLVSNNTVQAELMRSEHVYR

SEQ ID NO: 210788 - protein, 52 aa, Glycine max
  Clone ID: PAT_MRT3847_32369C.1.pep
HSSIQNHQVTNINYKKKSVKSPSTNTILSIGHNEIVLTFDIQTTLRSSMKQG

SEQ ID NO: 210789 - protein, 92 aa, Glycine max
  Clone ID: PAT_MRT3847_3236C.1.pep
WEPHVRAGFVRVEGCHDPPPFPMGEGNWPRLYRSKMRCGPGLPTNTPIGHFISQATRWISGTWEGFALKKKNKEEEIIKKNKGTKKKKKKKK

SEQ ID NO: 210790 - protein, 381 aa, Glycine max
  unsure (1)..(381): unsure at all Xaa locations
  Clone ID: PAT_MRT3847_32370C.1.pep
MLLLLSLRFGIFPIVVPDGXEELEFVAETSLELLLNLSHVSVAIVEFELIVVRKFNLIAIPGXTLRVSKLVSEHLINIFVLLLDRPXDFQIPKGLGLFLVGVNSDITRSVFLDSLGELSVTLVDARKLSYIFYGKTDPYVILSLGNQVIRSKKNSQTTVIGPPGMPIWNQDFHMLVSNPRKQKLFIQVKDVLGFADLTIGTGEVDLGSLKDTVPTDRIVVLQGGWGFLGKRSSGEILLRLTYKAYVEDEEDDKTEVYAIYTDISDDELSDSEANGTNGKDERDSAYETDKESFMDVLAALIVSEEFQGIVASETGFSKVLDSGSNAGPRVSKSQVPNVEPIPSSSDNSEGXGGSALLWLAVITSISLLIALNVGGSSLFNP

SEQ ID NO: 210791 - protein, 93 aa, Glycine max
  Clone ID: PAT_MRT3847_32371C.1.pep
SPGEETKELGPGSKEKGDLFLKEERKGGGKKREGKEKREGGGFPFFLGRPAKTAVVPSWTSLLFWEKMVPFGFYFLQFFILERKKGGVPPPFF

SEQ ID NO: 210792 - protein, 179 aa, Glycine max
  unsure (1)..(179): unsure at all Xaa locations
  Clone ID: PAT_MRT3847_32372C.1.pep
SSVGVLMSYGFVDQLIYYVRNGEVSIQPRVRALKVAFRLCGTSEEAKKAMGDAGPEPVKVIFAKSFEVRVIEMAAQAGSVMVIRPRKRIVQDDHNIALILQLQLLEEGKGNNKKFLILISILMSLTKRGXSGGKKIVSSGYAKNIEKLADAEVSSDAKQQVKKLSTNRFRSMLSGIWHS

SEQ ID NO: 210793 - protein, 138 aa, Glycine max
  Clone ID: PAT_MRT3847_32373C.1.pep
AYVEDEEDDKTEVYAIYTDVSNDELSDSEVNGTNEKDERDSAYETDKESFMDVLPALIVSEEFQGIVAFETGFSKVLDSGSNAGPRVSKSQVPNVEPIPSSSDNSEGFGGSALLWLAVITSISLLIALNVGGSSLFNP

SEQ ID NO: 210794 - protein, 192 aa, Glycine max
  Clone ID: PAT_MRT3847_32374C.1.pep
MASERILKPSKWFSNKTLRISLHRRRSRSSSNNSLSSNSPSPRSPMSNNGEITGLMEAFRHFDNDGDGKISAYELRSYFGSIGDHMSHEEAEGVIHDLDSDGDNLLDFKDFTKLMKRDVGDDHDDEGDLRRAFEMFVWEKEGSGCITPKGLQRMLHRLGDDKSYDECVTMIDAFDIDHNGVLDFDEFYQMMA

SEQ ID NO: 210795 - protein, 104 aa, Glycine max
  unsure (1)..(104): unsure at all Xaa locations
  Clone ID: PAT_MRT3847_32375C.1.pep
KEEKRPRCKISAKPKTRSTQAPMEINLXVRQKSXNCVRHIMKRRDKHTWQVGINPSPMEWTGLDNIIPEKGQPILCXGEYASSDGVITKPVISKMAKMINMSCG

SEQ ID NO: 210796 - protein, 45 aa, Glycine max
  Clone ID: PAT_MRT3847_32376C.1.pep
IKNLLSLFQRFRIIEQVIVSEWWNTNFYPCKLGMPSFAMSVGPMR

SEQ ID NO: 210797 - protein, 144 aa, Glycine max
  Clone ID: PAT_MRT3847_32377C.1.pep
DLTAVHDILLKTGYKDEEGAENELSFQEWTQQVQDILNTKKFGDIAFRDKDFKNAIEYYSKLVVMMSVPSATVFARRAFSYLMNDQAELALRDAMQAQVCIPDWPTAFYLQALALSKLGMETDAHDMLNDGAAFEAKRSNSWRG

SEQ ID NO: 210798 - protein, 144 aa, Glycine max
  unsure (1)..(144): unsure at all Xaa locations
  Clone ID: PAT_MRT3847_32378C.1.pep
GSVEHGGGLSRGKFGAEGNGKVIGPEQAAKLSXNAVARILLGVGFEGAMEGSVEDFSEVLSGRICKIGTNLRVLADSYKKQCSAIELLKMLLKTVGFNNFAPLVDVVKDGSKNNVHQSQQQVHGMQPQLQQQQSSLRLPQQVQM

SEQ ID NO: 210799 - protein, 68 aa, Glycine max
  Clone ID: PAT_MRT3847_32379C.1.pep
TMRNIITLYRRFFIPTLLIFVTLLAFSLIMLFIYKHYKLRKHMMYMSQINAGFHEFNTMRDPYKSYHI

SEQ ID NO: 210800 - protein, 396 aa, Glycine max
  Clone ID: PAT_MRT3847_3237C.1.pep
MQTIARRLGQQSLRPSTSLKSIYPISDHHYGMDHERYVSTLATKGVGHLVRKGTGGRSSVSGIIATVFGATGFLGRYVVQQLAKMGSQVLVPFRGSEDNPRHLKLMGDLGQIVPMKYNPRDESSVKAVMAKANVVINLIGRDYETRNYSFEEVHYHMAEQLAKISKEHGGILRFIQVSCLGASPSSPSRMLRTKSAAEEMILRELPEATILKPAVMIGTEDRILNPWAHFAKKYGFLPLFGDGSTKIQPVYVIDVAAALTSLLKDDGTSMGKIYELGGPEIFTVHELADVMFDTIREWPRYVKVPFPIAKALATPREILLNKVPFPLPVPEILNLDKIQALTTDTVVSENALTFNDLGIVPHKLKGYPIEFLISYRKGGPQFGSTISERVTPDSWP

SEQ ID NO: 210801 - protein, 33 aa, Glycine max
  Clone ID: PAT_MRT3847_32380C.1.pep
LSEASLSLIPAGTRVVAIFGLSWQVDASEYRNT

SEQ ID NO: 210802 - protein, 94 aa, Glycine max
  unsure (1)..(94): unsure at all Xaa locations
  Clone ID: PAT_MRT3847_32381C.1.pep
MSIASMRMATIGSIKARQIFYRSGNPTVVEDLTCSDGTFDRAAVPSGAYTGIDEALELREGRSDYLGKGXDXAAGNANTAIGPDLIGGGPTEQT

SEQ ID NO: 210803 - protein, 149 aa, Glycine max
  Clone ID: PAT_MRT3847_32382C.1.pep
KVKGEAKKEKQMLAEKGHVKPATYLDSHEKFLISVATKGVVKLFNAVNKAQTAQRGLDPSRTKDAKEIRKRTKQAFFSELGKPSLPAIGTTTKAKESTDRVEDEQPAWAPLRDNYMLTSSKLKDWDKMPDKNVSDDMGKTSEDSSSDED

SEQ ID NO: 210804 - protein, 132 aa, Glycine max
  unsure (1)..(132): unsure at all Xaa locations
  Clone ID: PAT_MRT3847_32383C.1.pep
RIIRGPNPIGETGHPQLTLXELFIPGGXLQLEVPAEQGASXLXXWKNXQFNEEFGSFLXRTHVMGISCFSKCYIEICMLPKLKSGEYYTIXCDYXXPKSFLILVQNQSICKNPEQSKLPEKFAPGTHTLLXX

SEQ ID NO: 210805 - protein, 98 aa, Glycine max
  Clone ID: PAT_MRT3847_32384C.1.pep
SLLLAAKNLILAGVKSVTLHDEENVELWDLSSNFVFSENDVGKNRAEASVSKLQELNNAVVVLSLTSKLTKEQLSNFQVLPILFSTPVLFLELHFFLS

SEQ ID NO: 210806 - protein, 58 aa, Glycine max
  Clone ID: PAT_MRT3847_32385C.1.pep
WILLYCPCREINHCLVLKLWSLVDLANVAKISIKCLFQLLGKVDSKSIHLVHCKVKLC

SEQ ID NO: 210807 - protein, 66 aa, Glycine max
  Clone ID: PAT_MRT3847_32386C.1.pep
DLLELYLTRNFTADTGEHAGKSSSIPYTYARIHEPEELHNLGSLLGDVQCSFPEILANNHEHVDED

SEQ ID NO: 210808 - protein, 66 aa, Glycine max
  Clone ID: PAT_MRT3847_32387C.1.pep
GDHASSHAFLNLSHWLFSNTTPFWAGDTWTTTTTILIWTISTNITTTNKSCPFPPPLSLSPFPFPV

SEQ ID NO: 210809 - protein, 42 aa, Glycine max
  Clone ID: PAT_MRT3847_32388C.1.pep
HGSNVAFMWWSYNIITIFGETITGMKCKGIFPAGAVGKSMSA

SEQ ID NO: 210810 - protein, 84 aa, Glycine max
  Clone ID: PAT_MRT3847_32389C.1.pep
QLLCNLLFACNTISAISGILAPILLLEFVCKLPFFVWLFPHVNITQNHSKHSILYLIVKLCWCIQGKISWFIIDKTGINIRSDW

SEQ ID NO: 210811 - protein, 129 aa, Glycine max
  unsure (1)..(129): unsure at all Xaa locations
  Clone ID: PAT_MRT3847_3238C.1.pep
MQTIARRLGQQSLRPSTSLKSIYPISDHHYGMDHERYVSTLATKGVGHLVRKGTGGRSSVSGIIATVFGATGFLGRYVVQQLAKMGSQVLVPFRGSEDNPRHLKLMGDXGQIVPMKYNPRDESSVKAVM

SEQ ID NO: 210812 - protein, 76 aa, Glycine max
  Clone ID: PAT_MRT3847_32390C.1.pep
KTLGNRGGFNQNLNQAFFFALFSVRGTRGFQKMDAFYSIPGLGPGPFQNKGFKKRGLNPPGENFLAKNPCAILKMG

SEQ ID NO: 210813 - protein, 41 aa, Glycine max
  Clone ID: PAT_MRT3847_32391C.1.pep
TKNERKQPLFDCGSRTSHICCYVPSLKSAFDHGMNNFILSL

SEQ ID NO: 210814 - protein, 103 aa, Glycine max
  Clone ID: PAT_MRT3847_32392C.1.pep
LCIWGRCSLISPSCSGWGFFFPPGGGSPILPVKRLGVSFLLSPKALFFAPNVAPPGGGMGGNFFFRVFVFFSPPPIFFPRVLKGGGPFFFPFLGGVPTPLCFF

SEQ ID NO: 210815 - protein, 73 aa, Glycine max
  unsure (1)..(73): unsure at all Xaa locations
  Clone ID: PAT_MRT3847_32393C.1.pep
NSPXKTTYLTESSRKCENIATWKLVFPVHWFAEDLTQRXRGASRPEKKEAGVISASQHLVXXEPNSELTXVCX

SEQ ID NO: 210816 - protein, 91 aa, Glycine max
  Clone ID: PAT_MRT3847_32394C.1.pep
SSNLVAVGFTINLDPPMKFQSPLKLTQLLTMRPLQSSAALLLIGKAKLCPFPTEPQGFIALNVNGEWQKQEETDMIEGITDSAAVATSSYI

SEQ ID NO: 210817 - protein, 325 aa, Glycine max
  Clone ID: PAT_MRT3847_32395C.1.pep
PHNTLCSDQFLLSTFSIEEMSSSVTNGDDSLTGHIISTTIGGKNGEPKQTISYMAERVVGTGSFGIVFQAKCLETGEAVAIKKVLQDRRYKNRELQLMRVLDHPNVISLKHCFFSTTSTDELFLNLVMEYVPESMYRVIKHYTNANQRMPIIYVKLYMYQIFRGLAYIHTVPKVCHRDLKPQNILVDPLTHQVKLCDFGSAKVLVKGEANISYICSRFYRAPELIFGATEYTSSIDIWSAGCVLAELLLGQPLFPGENAVDQLVHIIKVLGTPTREEVRCMNPNYNDFRFPQIKAHPWHKIFHKKMPPEAICSSGRIMMISLEGA

SEQ ID NO: 210818 - protein, 353 aa, Glycine max
  unsure (1)..(353): unsure at all Xaa locations
  Clone ID: PAT_MRT3847_32396C.1.pep
MAEDKEMSTSVIDGNDSLTGHIISTTIGGINAEPXQTISYMAERVVGTGSFGIVFQAKCLETGEAVAIKKVLQDRRYKNRELQLMRVLDHPNXSMYRVIKHYTNANQRMPIIYVKLYMYQIFRGLAYIHTVPKVCHRDLKPQNILVDPLTHQVKLCDFGSAKVLVKGEANISYICSRFYRAPELIFGATEYTSSIDIWSAGCVLAELLLGQPLFPGENAVDQLVHIIKVLGTPTREEVRCMNPNYNDFRFPQIKAHPWHKIFHKKMPPEAIDLASRLLQYSPSLRCTALEACAHPFFDELREPHARLPNGRPFPPLFNFKQELSEASPVLVNKLIPDHVKRQIGLQFVPPAGS

SEQ ID NO: 210819 - protein, 78 aa, Glycine max
  Clone ID: PAT_MRT3847_32397C.1.pep
RKFYFIAHYISQGTGQQHYKSPITLTRGNQTQQPHHQNSCGPSFPPSLLPSKAFVFPSQKQSKFCHFRPNILYYYMTC

SEQ ID NO: 210820 - protein, 324 aa, Glycine max
  Clone ID: PAT_MRT3847_32398C.1.pep
MTHQFPNKLYLSVDAFGEKIKINGWKEDAKLNLFDYVAKIEHLPLGGVIYTDISKDGKLSGPNFDLTGRLALYTSLPVIASGDVKDGRVVKGIQFQSLRDIGNPVDLALYYNEAGADELVFLDISKTEAGHDLMIEVIEATAKQLFIPLTVGGGIQNLDDITQLLNHGADKISLNSSALKHPELIRQASEKFGRQCICIAIDSFYDKDRKDYFCTTHGGKKLTDVRVYDWVQEVELLGAGELLITSMHHDGMKQGFDIEHLAKIKQLVNIPIIASGGGGNAQHFVELFQQTDVSAGLAASILHDQETTVAEIKDKMREGGILVR

SEQ ID NO: 210821 - protein, 113 aa, Glycine max
  Clone ID: PAT_MRT3847_32399C.1.pep
MQQQQQLPPMKKLATDGPGGVVAMNSMLVDMQGSTGGYSSMMGVSSMSMARQISIDNVPGREVGDQQRKVSSTLAQAWKDDIDTGNLVSSVVELFGESVLPFVVSNPEACMFL

SEQ ID NO: 210822 - protein, 55 aa, Glycine max
  unsure (1)..(55): unsure at all Xaa locations
  Clone ID: PAT_MRT3847_3239C.1.pep
DGKEIKVVADRNPANLPWKDLGIDXVIEGTWVFEDIDCARKLVQAGAESGLYAGA

SEQ ID NO: 210823 - protein, 143 aa, Glycine max
  Clone ID: PAT_MRT3847_323C.1.pep
MFLSRTLGRTLFAAAARSKQYATTAAAATGREGHNPLQEFFEADRSPDDDKPVVYGRSWKASELRLKSWDDLHKLWYVLLKEKNMLMTQRQMLNAQNLRFPNPERIPKVRKSMCRIKHVLTERAIEEPDPRRSAEMKRMINAL

SEQ ID NO: 210824 - protein, 220 aa, Glycine max
  Clone ID: PAT_MRT3847_32400C.1.pep
MTEDKEMSSSVTNGDDSLTGHIISTTIGGKNGEPKQTISYMAERVVGTGSFGIVFQAKCLETGEAVAIKKVLQDRRYKNRELQLMRVLDHPNVISLKHCFFSTTSTDELFLNLVMEYVPESMYRVIKHYTNANQRMPIIYVKLYMYQIFRGLAYIHTVPKVCHRDLKPQNILVDPLTHQVKLCDFGSAEVLVKGEANISYICSRFYRAPRLIFCAPEYTS

SEQ ID NO: 210825 - protein, 48 aa, Glycine max
  Clone ID: PAT_MRT3847_32401C.1.pep
RKWVIIHHRGATQYINHEKKGILLLSLSEDISWPRITIFLKIYAFIIF

SEQ ID NO: 210826 - protein, 83 aa, Glycine max
  Clone ID: PAT_MRT3847_32402C.1.pep
HWSCQIKRRGPKNTIDDLYLYLTRRKLCKVPYERSLHELLTHNSEMPINPSVYKAGGLALILSLPGVFSMHARGEDRPNADPI

SEQ ID NO: 210827 - protein, 69 aa, Glycine max
  Clone ID: PAT_MRT3847_32403C.1.pep
PLPPQVCPLYKQGLRIAGICLFHKGLWAPNWGVLEFACKFSLWSIQQYCPRKTFNQKKTVNKNERPKKN

SEQ ID NO: 210828 - protein, 385 aa, Glycine max
  Clone ID: PAT_MRT3847_32404C.1.pep
AAGLPADGQLPVPHLFTRGRLLVFVALAALSVLVPASVPFRRALVSLSADSGVHPLVPYFTFFVADEVAPNLNNLAVLFALMRLVRSLLQNSQIHIELYLHQLMPPIITCIVAKRIGNRLSDEHWELRNFSANLVTSICQRFGHIYHNLQPRVMKTFLHSFLDPTKALPQHYGAIKGIEALGSRLIRLLILPNLEPYLHLLEPEMQPEKQENEMKRHEAWQVYGALLGAAGQCVHEKVKTFGNLFSPPTQVTSRGSGKSVIAMPGKRKASTVNLMQQQQLPPMKKLVTDGTGGAVPMNSMSVDMQGSTGGYSSMMGVSSMSMARQISNDNVPGRDIGDQQRKVSSTLAQAWKDDIDAGNLVSSVVELFGESVLPFVPNPEAYMFL

SEQ ID NO: 210829 - protein, 380 aa, Glycine max
  Clone ID: PAT_MRT3847_32405C.1.pep
MAEDKEMSTSVINGNDSLTGHIISTTIGGKNGEPKQTISYMAERVVGTGSFGIVFQAKCLETGEAVAIKKVLQDRRYKNRELQLMRVMDHPNVISLKHCFFSTTSTDELFLNLVMEYVPESMYRVLKHYSNANQRMPIIYVKLYMYQIFRGLAYIHTVPKVCHRDLKPQNILVDPLTHQVKLCDFGSAKVLVKGEANISYICSRFYRAPELIFGATEYTSSIDIWSAGCVLAELLLGQPLFPGENAVDQLVHIIKVLGTPTREEVRCMNPNYNDFRFPQIKAHPWHKIFHKKMPPEAIDLASRLLQYSPSLRCTALEACAHPFFDELREPNARLPNGRPFPPLFNFKQELSGASPELVNKLIPDHVKRQMGLQFMHLGGS

SEQ ID NO: 210830 - protein, 89 aa, Glycine max
  Clone ID: PAT_MRT3847_32406C.1.pep
PHNTLCSDQFLLSTFSIEEMSSSVTNGDDSLTGHIISTTIGGKNGEPKQTISYMAERVVGTGSFGIVFQAKCLETGEAVAIKKVLQDRR

SEQ ID NO: 210831 - protein, 380 aa, Glycine max
  unsure (1)..(380): unsure at all Xaa locations
  Clone ID: PAT_MRT3847_32407C.1.pep
MAEDKEMSSSVTNGDDSLTGHIISTTIGGKNGEPKQTISYMAERVVGTGSFGIVFQAKCLETGEAVAIKKVLQDRRYKNRELQLMRVLDHPNVISLKHCFFSTTSTDELFLNLVMEYVPESMYRVIKHYTNANQRMPIIYVKLYMYQIFRGLAYIHTVPKVCHRDLKPQNILVDPLTHQVKLCDFGSAKVLVKGEANISYICSRFYRAPELIFGATEYTSSIDIWSAGCVLAELLLGQPLFPGXNAVDQLGHIIKVLGTPTREEVRCMNPNYNDFRFPQIKAHPWHKIFHKKMPPEAIDLASRLLQYSPSLRCTALEACAHPFFDELREPNARLPNGRPFPPLFNFKQELSEASPELVNKVIPDHMKRQIGLQFVRPAGS

SEQ ID NO: 210832 - protein, 380 aa, Glycine max
  Clone ID: PAT_MRT3847_32408C.1.pep
MAEDKEMSTSVINGNDSLTGHIISTTIGGKNGEPKQTISYMAERVVGTGSFGIVFQAKCLETGEAVAIKKVLQDRRYKNRELQLMRVMDHPNVISLKHCFFSTTSTDELFLNLVMEYVPESMYRVLKHYSNANQRMPIIYVKLYMYQIFRGLAYIHTGPKVCHRDLKPQNILVDPLTHQVKLCDFGSAKVLVEGEANISYICSRFYRAPELIFGATEYTSSIDIWSAGCVLAELLLGQPLFPGENAVDQLVHIIKVLGTPTREEVRCMNPNYNDFRFPQIKAHPWHKIFHKKMPPEAIDLASRLLQYSPSLRCTALEACAHPFFDELREPNARLPNGRPFPPLFNFKQELSGASSELVNKLIPDHVKRQMGIQFMHLGGS

SEQ ID NO: 210833 - protein, 81 aa, Glycine max
  Clone ID: PAT_MRT3847_32409C.1.pep
SAPAAVGSKTTISRPSVNHSPPPPPISCSGFQDSHGTLLYTTVSLTRTYTREITCHRAIEPIMRTEADWGHPPGLGTVQRP

SEQ ID NO: 210834 - protein, 71 aa, Glycine max
  unsure (1)..(71): unsure at all Xaa locations
  Clone ID: PAT_MRT3847_3240C.1.pep
STMIFTMRSPIKYPSELARSHVLPMLLNSVFXSLLPHANCYASLSITPAEVLLTTERMLSCSVCPHSSLHA

SEQ ID NO: 210835 - protein, 106 aa, Glycine max
  unsure (1)..(106): unsure at all Xaa locations
  Clone ID: PAT_MRT3847_32410C.1.pep
DDVELAAANDPFITTDHMKHLLXHNSFSVLWNPFYATVNYXNTPLLGDYPATIFAHRNPEQSLGGPLAPHIIVESTGGFTDNDKAPEHLNVGVKKXIISAPRKDAP

SEQ ID NO: 210836 - protein, 65 aa, Glycine max
  Clone ID: PAT_MRT3847_32411C.1.pep
PKAWGGKKKKFKKAQETPLVKTKANSKATLGTSKGNSQPSDGASKNPPVLNSRPWSIKIGVVLKN

SEQ ID NO: 210837 - protein, 47 aa, Glycine max
  Clone ID: PAT_MRT3847_32412C.1.pep
GSSSLSFYPFAALSPNLTGPRRYIIDNPAQTIHYLSVPILYTTFPIN

SEQ ID NO: 210838 - protein, 80 aa, Glycine max
  unsure (1)..(80): unsure at all Xaa locations
  Clone ID: PAT_MRT3847_32413C.1.pep
MAYARHAPTDVFLLATSIKLFPTNIDTADCIGSCTSFYIPPCLSRDCRSVSIXLITGFCIHPSGLTSVANIIDXHPSLCQ

SEQ ID NO: 210839 - protein, 175 aa, Glycine max
  Clone ID: PAT_MRT3847_32414C.1.pep
LEQEREAAALLEWRVSLDNQSQASLSSWSSGVSPCTWKGIVCDESNSVTAINVANLGLKGTLHSLKFSSFPKLLTLDISNNSFNGIIPQQISNLSRVSQLKMDANLFSGSIPISMMKLASLSLLDLTGNKLSGTIPSIRNLTNLEHLKLANNSLSGPIPPYIGEFVNLKFLILKV

SEQ ID NO: 210840 - protein, 110 aa, Glycine max
  unsure (1)..(110): unsure at all Xaa locations
  Clone ID: PAT_MRT3847_32415C.1.pep
ADFFDHPLKAKAHCNSRVTIIALSHPFKRLYVAISHTNYGLITLLSTYNVSFLQIFKYSDTKPQKIYYLSPLKVTFIFKLVDMLXHLNNYIFNSTLHIVLRNYQRNIFYY

SEQ ID NO: 210841 - protein, 103 aa, Glycine max
  Clone ID: PAT_MRT3847_32416C.1.pep
SDHLLSTSEYTLIPAIGGAYIRLVFVHIWVIPTTCSVVIILVRRFHALWTVVISKEKKLYIYIRSHKLQGLSGCYVFLSTFVIVGIPISDTVLWQYKQFNRCL

SEQ ID NO: 210842 - protein, 79 aa, Glycine max
  Clone ID: PAT_MRT3847_32417C.1.pep
CRNNKTTEIFSACLTSLVHLNSYFELQWCLVFSALTKEKRLIGHEQRKKTGNLYKKKKKKKKKKKKKKKKKKKKKKKKK

SEQ ID NO: 210843 - protein, 137 aa, Glycine max
  unsure (1)..(137): unsure at all Xaa locations
  Clone ID: PAT_MRT3847_32418C.1.pep
SWTSYILVEAEVARIVAIISSKMSELVLQIRAELEEICXKTHXDSINITCIXSADVAIDSVSVDPASIIEQIELXISHVKDEAFGREEILETAEKWVPTCDEXSRLDEYHRXDHRYIAXRHGAALTLKQAEEAGALG

SEQ ID NO: 210844 - protein, 56 aa, Glycine max
  Clone ID: PAT_MRT3847_32419C.1.pep
VRLFRKSIFGAADEIELKFMNRRNHEDLNLFILILNLEIRKLSTQVCSFLPRRRYL

SEQ ID NO: 210845 - protein, 99 aa, Glycine max
  Clone ID: PAT_MRT3847_3241C.1.pep
GDADSPPAEHVAEVYGAGDAPEDFDSLPKQGSRIYLKGNDNQKGPVWPGENVLRMSVPAHKGCLIIVRRGWILKTITDDTNGRMKILDGAPVISQRAVM

SEQ ID NO: 210846 - protein, 105 aa, Glycine max
  Clone ID: PAT_MRT3847_32420C.1.pep
MGGKEQDVSFLANKFPERQPIGTAAHSQDDCKDYQEPAPAPLVDPTEFTSWTFYRAWIALFVFTFLFLYITVLTFMEFAGAMYKIITIGNSMNFLFLRLLYFFLF

SEQ ID NO: 210847 - protein, 43 aa, Glycine max
  unsure (1)..(43): unsure at all Xaa locations
  Clone ID: PAT_MRT3847_32421C.1.pep
CDDTYWIIWVCNLRGNEWFCVINDDVMQXDFNLCGLSSQVPYY

SEQ ID NO: 210848 - protein, 74 aa, Glycine max
  Clone ID: PAT_MRT3847_32422C.1.pep
RGKLTPFFLEIMPFKIAGPGVVIFLQVPILGRCKTVWALFLLRSVPKCYARKGYDFCFSYKKFRTSLSVRLTKT

SEQ ID NO: 210849 - protein, 52 aa, Glycine max
  Clone ID: PAT_MRT3847_32423C.1.pep
SKNLTFNDNIWAQILNSKILTLQNLNMIAYKIAFKSTRVAALPIMLKTPKLS

SEQ ID NO: 210850 - protein, 91 aa, Glycine max
  Clone ID: PAT_MRT3847_32424C.1.pep
GILFIPRAKGQNSGPSKPPPPGNKHPAHKIFSGHLEKTSNRNPRSWNQLFGGDLGMGRRPRDKILIFTPPQPIAFRRTGLLLYSHPTFGQP

SEQ ID NO: 210851 - protein, 85 aa, Glycine max
  unsure (1)..(85): unsure at all Xaa locations
  Clone ID: PAT_MRT3847_32425C.1.pep
LNSTIFFALLLFCPFTTRRASLSXATHFVLYNDGSPLYNAGIYYILSGIRSFGAYKTPPQGSAACPLSVMYSPNDLDFGIVNNHL

SEQ ID NO: 210852 - protein, 176 aa, Glycine max
  Clone ID: PAT_MRT3847_32426C.1.pep
MGFFTINGFGIGLIMGIGFGTGLIIGIGLTTGIIFGTGLITGIGLTTGISFGLGEFESATSMQSALEASPPVTLDGRRLSIEERRANNDRGRYSSGRGGYRNDRNDNFRGRGNFSGGRGGGGYGNRNDSFEKRSEFSGRPRGGNNNGGGRSNGEAVPRSYQNGGGAKVTRQSVKVQ

SEQ ID NO: 210853 - protein, 65 aa, Glycine max
  Clone ID: PAT_MRT3847_32427C.1.pep
SLNASTVSSTQAWSTNCSITTPSNTHLSFVHLNLSTLSMNRTKGIYSITRCFVITCSASHSQTVE

SEQ ID NO: 210854 - protein, 198 aa, Glycine max
  Clone ID: PAT_MRT3847_32428C.1.pep
GNSLIPWLKNLSTASSSASSPKLPHLYLHSGSISAPVTPPLSSPTSRTPRINVEWDEQSARPGWTRQQHYSFLPSSSPPSPGRQVVDPEWFAGIKLPHVSPTSPTFSLVSSNPFAFKEDGLPGSGSRMWTPAQSGTCSPAIPPGSDQNADIPMSEAVSDEFAFGSNMLGLVKPWEGERIHEEFGSDDLELTLGNSKTR

SEQ ID NO: 210855 - protein, 41 aa, Glycine max
  Clone ID: PAT_MRT3847_32429C.1.pep
CSNKLIYRESVKSLCSHFVWIKIWWGWWVMECLLIELTPLC

SEQ ID NO: 210856 - protein, 116 aa, Glycine max
  unsure (1)..(116): unsure at all Xaa locations
  Clone ID: PAT_MRT3847_3242C.1.pep
XXXPTXSTDXAXHAXXFRXXXXXXXXXQXXXXYXXXARXXCXXXXATXPRXHXXLEPPXHTTXKXXSPXDHXEXAXXHPNXXTQXARHXXXXXXHXXXAPRPCEPXSEXTSXXXXR

SEQ ID NO: 210857 - protein, 62 aa, Glycine max
  Clone ID: PAT_MRT3847_32430C.1.pep
YGCEKTTEGQNADIPMSDAVSDEFAFGSNVLGLVKPWEGERIHEEFGSDDLELTLDEVTNMN

SEQ ID NO: 210858 - protein, 63 aa, Glycine max
  Clone ID: PAT_MRT3847_32431C.1.pep
MLPAVMARGFERPPGQVFGFMQTSLFLVYMACMCYGFFLMLGTVGFRAALFFVRHIYRSIKCE

SEQ ID NO: 210859 - protein, 45 aa, Glycine max
  Clone ID: PAT_MRT3847_32432C.1.pep
WSSLTVLMTSNAPNLTSLTIEESCGIAIKSNVSIHPFVLLTFCLL

SEQ ID NO: 210860 - protein, 94 aa, Glycine max
  unsure (1)..(94): unsure at all Xaa locations
  Clone ID: PAT_MRT3847_32433C.1.pep
LPVPWFSWGLPFVPCGVCVLSLLLLXPGVFCSPLPPVVGVFCGXVSXXXSPPFQREIPAFRRPGGFRGLLVRFCLLCSXGCVLRVLXLWWAPLL

SEQ ID NO: 210861 - protein, 80 aa, Glycine max
  Clone ID: PAT_MRT3847_32434C.1.pep
GWRLLSGWKGDDSGYGDFIRSVCVCERERERENNVIFSSFPDMGVSKDVADEKSSQFHGRLWLTLMCFQQLEAPQSSWCN

SEQ ID NO: 210862 - protein, 67 aa, Glycine max
  Clone ID: PAT_MRT3847_32435C.1.pep
SLVLGSLTDSLPPVLSSSMKNLFDYTFINLWGPALFLSCNTPFFSNNRTRGSTRESRPVFSHLNKHR

SEQ ID NO: 210863 - protein, 152 aa, Glycine max
  Clone ID: PAT_MRT3847_32436C.1.pep
MNKSQSKNSKSSTQFDSPLSFYSPMHGDGTESPEYRSPENWPEKRDNSMAIVTAGKLKQFTPEKRAEHRKPPENPPSTAVMVFNASSAEEAQRPAAKAAPVIGGERRSRSAATEETVSKAALGFRLSEVVVCLISFSVMAAVKTQGWSGDYL

SEQ ID NO: 210864 - protein, 88 aa, Glycine max
  Clone ID: PAT_MRT3847_32437C.1.pep
MSSAQQNFNAGQTQGQTQVKAEEFVQSTKETASGGRARAKAAWNARGPPAGRTRGETAGRPRPRGDREKDRAQGAVDSVKHTLGMDKK

SEQ ID NO: 210865 - protein, 155 aa, Glycine max
  Clone ID: PAT_MRT3847_32438C.1.pep
LPFPATQSMPTKYSNIGSSTITVSEALRASGITTPQPNAQTLSGAGVATGPALPQHLAVHPYSQPTLPLGHFANMISYPFLPQSYTYMPSAFQQTFAGNNTYPQSLAAVLPQYKNNVSASSLPQSAAIPPGYGFGSSTSIPGGNFSLNPPAAPTG

SEQ ID NO: 210866 - protein, 36 aa, Glycine max
  Clone ID: PAT_MRT3847_32439C.1.pep
ISRGHSIACTITYSYLRDHIIPKMSPTFNSMASILQ

SEQ ID NO: 210867 - protein, 118 aa, Glycine max
  unsure (1)..(118): unsure at all Xaa locations
  Clone ID: PAT_MRT3847_3243C.1.pep
MGKSPCDSSHDPXVRKGPWIMVDDLFLINYLADHGECVWNSPAEACGLKRTXKSCRLRLLNYLCPDVRXDTLHPEXQLLIIELHTXWGYTWSKIAKDLPXRTDCVIKCFWRPRIQKPI

SEQ ID NO: 210868 - protein, 192 aa, Glycine max
  Clone ID: PAT_MRT3847_32440C.1.pep
MSSFTHATTLLHAHIKTKHKKPSTTTTTTTPLPHNHSPNRRKLISTFLATSTAALLVHGVTSTPQALAQSWGTHSFIKEHFFEPGLSPEDAVARIKQTAEGLHSIREALETMSWRYIMFYIRIKQAYLDQDLRTAFTTLPESRRKEYVKTANELVSNFGEFDRHIRTPKVYESYLYYEKTLKSIDQLVAILA

SEQ ID NO: 210869 - protein, 78 aa, Glycine max
  Clone ID: PAT_MRT3847_32441C.1.pep
HYTGERGCALCAWGILLLSVSRGDFPRFFINAVKRLFVQSMHLVLFSCGGLKGRLCVLQLVSTLPLLSRLRVFSDSEA

SEQ ID NO: 210870 - protein, 52 aa, Glycine max
  Clone ID: PAT_MRT3847_32442C.1.pep
NWIKAPTDPYFTGKIKGPKMATSNRKFFFSDPNYQEICFTRLKYKEFWISKD

SEQ ID NO: 210871 - protein, 232 aa, Glycine max
  Clone ID: PAT_MRT3847_32443C.1.pep
PRVRSDETNVPNKETKVPVATKSPPPHSPSSFSSDSDDAHVLLHSESETEDAEKEEFQLFTHARYDYAHSARYPPFSPPRGYSGSKPPSPPPPSGSAWDFLNFFEPYEKYHVPYFPGGGDADVAENEKGKVEKRDGSKSKEENGEAKKKKGDSKEKKVVSEKAEVVLVSEQCSDSAKGFSEAVKEIQILFEKASESGNPVLEMLDAGKLRYHRKFDLNPGKYGGACVFFCYL

SEQ ID NO: 210872 - protein, 107 aa, Glycine max
  Clone ID: PAT_MRT3847_32444C.1.pep
PLFAVKTGPSVSSAALGKMNLTVKAISEGGFESLYKQTFTTYPNEKLKKSFACYLSTSTGPVAGTLYLSNIHVAFCSDRPLCFTAPSGQETWTYYKVLIYPKYLIKA

SEQ ID NO: 210873 - protein, 86 aa, Glycine max
  Clone ID: PAT_MRT3847_32445C.1.pep
AYFLKTRAIHIFIFLCLQCENNFKRAHVINVTGPYNFLFLRCIALYRILSFLNHMHVTLLKMSFGNIISPCHVTHWFRTYLIIHKA

SEQ ID NO: 210874 - protein, 109 aa, Glycine max
  Clone ID: PAT_MRT3847_32446C.1.pep
RTFVDALTAGKAGTQAGGWSYTDRILGRTILVIPSQVLVVEKYLITPLWEEQYFFGRISIVPVFFYSTFTFSSVLSVLLPASYFLTFFLRASIIFSRPCKHINQPKGSI

SEQ ID NO: 210875 - protein, 50 aa, Glycine max
  Clone ID: PAT_MRT3847_32447C.1.pep
QTSAVNPSNITLSLPSIHSHHILYLLSIIPLLTFNSSISTIDTYLFSTQP

SEQ ID NO: 210876 - protein, 82 aa, Glycine max
  unsure (1)..(82): unsure at all Xaa locations
  Clone ID: PAT_MRT3847_32448C.1.pep
DLIHTSLNHNPVWSYSYSGGGNNNQXYSFPVLPYHISPHITYHFHRHIITSFNPNNLLKSLKLSPYRFFFLTSSYYNTLHLF

SEQ ID NO: 210877 - protein, 45 aa, Glycine max
  Clone ID: PAT_MRT3847_32449C.1.pep
SSLHTRNSILILTLGPNSTPTHIAKGLSSWWWDTQSPKSNDFTTK

SEQ ID NO: 210878 - protein, 160 aa, Glycine max
  Clone ID: PAT_MRT3847_3244C.1.pep
VLAGLGFKRETYIYLAGSHIYGGNSRMEPFTSLYPNVITKETLLTYNELEPFRNFSSQLAALDFIACASADVFAMTDSGSQLSSLVSGFRTYYGGDHAPTLRPNKTRLAAILRENDTIRWNRFEVRVNKMIRESQKAGIRSYGRSIYRNPRCPECMCKHH

SEQ ID NO: 210879 - protein, 57 aa, Glycine max
  Clone ID: PAT_MRT3847_32450C.1.pep
AKGSALVEHKGFFSTIRIRVDSVQLVVPQNTIFLELQRICYVCKKDKRISAILQAAR

SEQ ID NO: 210880 - protein, 86 aa, Glycine max
  Clone ID: PAT_MRT3847_32451C.1.pep
DQVQRRRRRVLPSPLDTLKIPRHNNKNTHINKSSYIDISGKNKNKKKKKGSKLVSDLCCLLVGWLLWVELESKPRQKKVWKTKISV

SEQ ID NO: 210881 - protein, 72 aa, Glycine max
  Clone ID: PAT_MRT3847_32452C.1.pep
KPAESLQFELDSLDHNLANNGAGDIIGTITHLSGVDATACQPYIEVFGLQMFRECELIHGRWGMLATLGCLT

SEQ ID NO: 210882 - protein, 121 aa, Glycine max
  Clone ID: PAT_MRT3847_32453C.1.pep
QTFFFTSNRGPFTHGGFLKLKLKIIKKFLQKTGGGRGQTLGPPKKKNNFSREKSMNLNQPNAPPLFVLAAFFEHKPNGGVPLPWAPLPPHFLGKKKKVFEPKSKRFSLLIKLWGANRKKGG

SEQ ID NO: 210883 - protein, 217 aa, Glycine max
  Clone ID: PAT_MRT3847_32454C.1.pep
SSFSTPSSALVYFPVPPPPSDQVTDFSVYPKVKVRHDDDDAELGLKAFLSLYLKPSPSPVMDQKVVSTASIVKAPKCYVPVTIPRVLVTEEDSGDFSSVSDSSGATGSEKDDSTDENKVNIRASSIPRPRAVISSPENDMMIGNRNKNGDGRLSASKNGGVLENRHAHCKVKSHDVTDIPPDTRKQREPGSKDKADPVGKKKVHKGSVKFENAPWKF

SEQ ID NO: 210884 - protein, 262 aa, Glycine max
  unsure (1)..(262): unsure at all Xaa locations
  Clone ID: PAT_MRT3847_32455C.1.pep
PTRPPTRPALLIRDDGGGMDPEAMRQCMSFGFSNKSKIAIGQYGNGFKTGSMRLGADVIVFSRHQNNMKLTQSIGLLSYTYLMQTQQDRVVVPMVNYKFDTSTGYLERLNDGEHFRSNLSILLHWSPYLSEEELLKQFDDIGNHGTKIIIFNLWFNDDGNLELDFNSDPEDIHIVGDIKKIDTHSASKIVNEGHIANRFHYSLHAYLSILYLRIPESFRMILRGQVXKLHNIADDLKYTEFVLYRPQCGSSKEGVSVTTLDC

SEQ ID NO: 210885 - protein, 84 aa, Glycine max
  Clone ID: PAT_MRT3847_32456C.1.pep
MLELTHMPLRMCFGGEGTDDDLVWRTDLKPHASWDYSIAAVHAHSSWEDQAQAFTCLYATLVGVYDGQGGPEASGLITNHIFSL

SEQ ID NO: 210886 - protein, 63 aa, Glycine max
  Clone ID: PAT_MRT3847_32457C.1.pep
ELNLFISEHSSSDDESSKPCCDLCMCTESMPPQCHCADITLNSCDSACDYCDCSHSMSGLCRC

SEQ ID NO: 210887 - protein, 60 aa, Glycine max
  Clone ID: PAT_MRT3847_32458C.1.pep
ENGYGPMMTSSKCRGSSSTPICLSYIRYKLSVPTIACLIALLLYYSGTSFAPHPGKLKGA

SEQ ID NO: 210888 - protein, 135 aa, Glycine max
  Clone ID: PAT_MRT3847_32459C.1.pep
APEVMLGLQYDEKIDIWSLGCILAELCSGEVLFPNDAVVMILARMIGMFGSIDMEMLVKGQETHKYFTKEYDIYYVNEETDQLEYIIPEESSLEQHLQVTDTTFIDFVRYLLSINPKRRPTARQALRHPWLSYVY

SEQ ID NO: 210889 - protein, 60 aa, Glycine max
  Clone ID: PAT_MRT3847_3245C.1.pep
IHLLKRLKMPKVVLNPCGHKQNASRKQKRSEIIASKWDEYLIKCIQVIPLKGQLPMKYFR

SEQ ID NO: 210890 - protein, 482 aa, Glycine max
  unsure (1)..(482): unsure at all Xaa locations
  Clone ID: PAT_MRT3847_32460C.1.pep
GKAEKHTVACSCEVPFCKSSPGSGGSCSLDPTNFGYPNLKEIHLNGFPLKVVGDINSFDSTSELTVNQSFDYYTKNDSSKEYNGPYDLTIKVNQKDLPNGLDTYKARDGGELAEECQDPEITADGEDTTDDELLKYTQEEEYEVFDLRIIHXKYRTGFEENKELPIVLNTVLAGRYYVTEYLGSAAFSRVVQAHDLQTGIDVCLKIIKNDKDFFDQSLDEIKLLKLVNKHDPADKHHILRLYDYFYHQEHLFIVTELLQANLYEFQKFKQESGGEEYFTLNRLQLITRQCLEALQYLHSLGIVHCDLKPENILIKSYRRCEIKVIDLGSSCFQTDNLCLYVQSRSYRAPEVMLGLQYDEKIDIWSLGCILAELCSGEVLFPNDAVVMILARMIGMLGSIDMEMLVKGQETHKYFTKEYDIYYVNEETDQLEYIIPEESSLEQHLQVTDTMFIDFVRYLLSINPKRRPSARQALRHPWLSYVY

SEQ ID NO: 210891 - protein, 65 aa, Glycine max
  Clone ID: PAT_MRT3847_32461C.1.pep
VLACPAPMSQVLVVVPISVDQVWVHLSASVAGAVNGGATAATVSMSARRFSCDLRTEHAFPITRK

SEQ ID NO: 210892 - protein, 95 aa, Glycine max
  Clone ID: PAT_MRT3847_32462C.1.pep
KTSVINVDGETFKLNTSVIAYDLLLLLFCVSICFIFMCLYIFCLFPYLFILYCFFMLKLIYFTLLLPIFFVLYVFIFVSLFFFLLFLYFFFFLFF

SEQ ID NO: 210893 - protein, 73 aa, Glycine max
  Clone ID: PAT_MRT3847_32463C.1.pep
RVRPLVQSYTFISSLSSILSWSPKNSMVTLFQTSFQFHPKLPMIDLESIHSNLLPILTSLNSPENLHMTMSTP

SEQ ID NO: 210894 - protein, 41 aa, Glycine max
  Clone ID: PAT_MRT3847_32464C.1.pep
AKDSYFLSIVQSHTQSLLLSEQWNHLEIPFSHTLSQNQKIH

SEQ ID NO: 210895 - protein, 179 aa, Glycine max
  Clone ID: PAT_MRT3847_32465C.1.pep
FATLGTLSSLKVLSLVSLGLWGNLPESIAQLSSLEILNISSNHFNGAIPSQLSLLRNLQSVVLDDNNFNGEISNWVGSLQGLAVLSMRNNWLSGSLPTSLNALHTLRVLDLSNNQLSGELPHLKNLANLQVLNLENNTFGPHFPSLPTKLVSLVLRNNSFRLSVPSNLSSFYLLQRLDL

SEQ ID NO: 210896 - protein, 103 aa, Glycine max
  unsure (1)..(103): unsure at all Xaa locations
  Clone ID: PAT_MRT3847_32466C.1.pep
MAPKGVILLAVLCFSALTLSRCLAEDHRLVMNFYKESCSQAEDIIEEQVKLLYKRHTNTAFSWLRHIFHDCAVHSXDASLVLDSTXRSLSDKVTDRNFGLRNF

SEQ ID NO: 210897 - protein, 38 aa, Glycine max
  Clone ID: PAT_MRT3847_32467C.1.pep
YQYKFQGFQDSTSVDATQNLPSHPPSLVILLELVMQVM

SEQ ID NO: 210898 - protein, 38 aa, Glycine max
  Clone ID: PAT_MRT3847_32468C.1.pep
PLMRTFCIHSDELLKRWQIILRHTLIITAIGNMILSLV

SEQ ID NO: 210899 - protein, 66 aa, Glycine max
  unsure (1)..(66): unsure at all Xaa locations
  Clone ID: PAT_MRT3847_32469C.1.pep
PRWGPEAPQKTQGLAVALKFGPPHAPFXGPGGKHPPPPKKFVTIRAITRGEPGNVRGKPKANLLKV

SEQ ID NO: 210900 - protein, 51 aa, Glycine max
  unsure (1)..(51): unsure at all Xaa locations
  Clone ID: PAT_MRT3847_3246C.1.pep
MYYSXISYDLXXXTXCLXEXSEIVPQTQTXSXLPXIQXXTXPXSQKXTCRT

SEQ ID NO: 210901 - protein, 82 aa, Glycine max
  unsure (1)..(82): unsure at all Xaa locations
  Clone ID: PAT_MRT3847_32470C.1.pep
XRKRREEKEKEXXLVXGYLVXXXNDGALHDPHNXEGTRAMXSXITSXTXSXXXFLGWGSKXAFGXXXXEFNWSXXSPHXGEX

SEQ ID NO: 210902 - protein, 56 aa, Glycine max
  Clone ID: PAT_MRT3847_32471C.1.pep
EKTQHIRRVHFYHSERRVPFRTLLEPPNHLPSNNYIIIISNMHFASKRIHAFPFSS

SEQ ID NO: 210903 - protein, 50 aa, Glycine max
  Clone ID: PAT_MRT3847_32472C.1.pep
DATFILPDPNSHSLIIHILFTQYSKLKLDSQNAHHTYLTDHLLKYRFIYI

SEQ ID NO: 210904 - protein, 63 aa, Glycine max
  Clone ID: PAT_MRT3847_32473C.1.pep
TPVKARSITGIKRLILIHGNPCTIMLPRTRKLAIICPTRGDCDRQDFKSIVNLLAKSEVMTLL

SEQ ID NO: 210905 - protein, 90 aa, Glycine max
  Clone ID: PAT_MRT3847_32474C.1.pep
IASVSTLGLKGLLLIRCSRIFNCTYYSHNPRAEKISTYLFEYYNIKPINKGKDTLQFLIQKIDVSEFHYPGCSKDIQQTIAVQMITSSLR

SEQ ID NO: 210906 - protein, 53 aa, Glycine max
  unsure (1)..(53): unsure at all Xaa locations
  Clone ID: PAT_MRT3847_32475C.1.pep
GSRLLRYKWFLVHSDKKAADWGEHSSDPATLXCLSLVKSKIPVAKSFHCSSKC

SEQ ID NO: 210907 - protein, 134 aa, Glycine max
  unsure (1)..(134): unsure at all Xaa locations
  Clone ID: PAT_MRT3847_32476C.1.pep
QVLNKLXXSXXKIXXFLKDKRLENVNRAXXTLAXKRSHXIKAVADYGIYHNKKVPVEXXALLFTDKMAAFEACTGSVEGEKIVSKNSWPHITLWTAEGVAAKDANMLPQLLAEGKANRIDFNPPINISGTLDFY

SEQ ID NO: 210908 - protein, 53 aa, Glycine max
  Clone ID: PAT_MRT3847_32477C.1.pep
LAFNRSYVGVIDEFLHISMKPIYEIDVPVIRLLPGKARSESSSTYCSRSHTEE

SEQ ID NO: 210909 - protein, 108 aa, Glycine max
  Clone ID: PAT_MRT3847_32478C.1.pep
RKPFPNMIRSAPVCNNCTEHIYIILKPFHTGHSLPNSTPFSFSSAPSIPCPLLLISLPITGYTSHVPNGFTTTTFFIASIACSSFVTTSLLWFYHSGKLHRAASEVVP

SEQ ID NO: 210910 - protein, 145 aa, Glycine max
  unsure (1)..(145): unsure at all Xaa locations
  Clone ID: PAT_MRT3847_32479C.1.pep
SSLLHPRKPKLGQIPGHPRPAQRLPEEGPGNPTQNGQIQAPPNLAPNPGRAKSYXGRPRRVNSRTDPQESYIDQKRTPRGWKEWSGDQGQDTPYHGEYANYGPGSGTDNRVNWAGLHAMXXDRAYNFTGSEPIRXXARLGSTSFP

SEQ ID NO: 210911 - protein, 68 aa, Glycine max
  Clone ID: PAT_MRT3847_3247C.1.pep
KGHSSLIKSYMVLGCYKKTRGKTWRELIKIKKFLRIINMCIFKNTVLFIKKHLLLFCGPTLGSGNERP

SEQ ID NO: 210912 - protein, 49 aa, Glycine max
  Clone ID: PAT_MRT3847_32480C.1.pep
TNSLTFCRGIYFQEGGRVNMTMNVKEAFRRSLQTWKSWTLHNLDPRSFV

SEQ ID NO: 210913 - protein, 169 aa, Glycine max
  Clone ID: PAT_MRT3847_32481C.1.pep
MGISRDNWHKRRKTGGKRKPYHKKRKYELGRPAANTKIGPRRIHTVRVRGGNKKYRALRLDAGNFSWGSECCTRKTRIIDVVYNASNNELVRTKTLVKNCILLVDSTPFRQWFEAHNALPLGRKKGTKLTPEEEEILNKKRSTKTQMKCEEMKKTAKLTHFLENISPQA

SEQ ID NO: 210914 - protein, 69 aa, Glycine max
  unsure (1)..(69): unsure at all Xaa locations
  Clone ID: PAT_MRT3847_32482C.1.pep
AHYMGSFCKTSYTIKLLLTHYTVQTEKHDDXSTXANTHXDRAVSSTSVMHALPYAMRVILYCTSSTNYH

SEQ ID NO: 210915 - protein, 131 aa, Glycine max
  unsure (1)..(131): unsure at all Xaa locations
  Clone ID: PAT_MRT3847_32483C.1.pep
GQPLSGPDIGGFAGNATPRLFGRWMGVGSLFPFCRGHSEAGTTDHEPWSXFYFAHTRGTPVSTPTFFADPKDPSLRKLENSFLLGPVLVYASTLRRQGLDKLEITLPKGIWSKFDFNDAHPDLPALYLKGG

SEQ ID NO: 210916 - protein, 90 aa, Glycine max
  Clone ID: PAT_MRT3847_32484C.1.pep
RCHEQYCQPLQVGPPYLIPCLHCPITLRHLRLPLPNLVRIISQIRNRAHGEQLIHDQRRPQTVHQLRQPQREPIERKVRPDWRGPIIRAP

SEQ ID NO: 210917 - protein, 117 aa, Glycine max
  unsure (1)..(117): unsure at all Xaa locations
  Clone ID: PAT_MRT3847_32485C.1.pep
FSSSVTSPTEMGDVLEILSTTTELAQLPVPPVEEQVERKLINHLRLSFENPRVTDPNAKANAWLTAHFSRLLGGVNLASDQIDVLXSATRLLQAMVDATSNTGCLSLTLLAMDDTQM

SEQ ID NO: 210918 - protein, 658 aa, Glycine max
  Clone ID: PAT_MRT3847_32486C.1.pep
TRPVKDFIPNGVDGIWNDMNEPAIFKVLTKTMPESNVHRGDSELGGCQNHFFYHNVYGLLMARSTYEGMKLANEKKRPFVLTRAGFSGSQRYAATWTGDNLSTWEHLHMSISMVLQLGLSGQPLSGPDIGGFAGNATPRLFGRWMGVGSLFPFCRGHSEAGTTDHEPWSFGEECEEVCRLALKRRYRLIPLIYTLFYFAHTRGTPVSTPTFFADPKDPSLRKLENSFLLGPVLVYASTLRRQGLDKLEITLPKGIWLNFDFNDAHPDLPALYLKGGSIIPVGLPHQHVGEANPSDDLTLFVALDEHGKAEGVLFEDDGDGYEFTKGSYLLTHYVAELKSSVVTVSVHKTDGSWERPKRRLHIQLLLGGGAMLDTWGTDGEVLQLILPSEDEVLKLVSTSEKNYKDRLENATPIPDVEEVSGPKGTELSRTPIELKNGEWNLKVVPWIGGRIMSMTHIPSGTQWLHSRIEINGYEEYSGMEYRSAGCSEEYSVIDREPGLVVLEGDIGGGLVLKRHIYVPKNVPNAIQIDSSIIARSVGAGSGGFSRLVCLRVHPTFSVLHPSESFVSFTSMDGSKHEVFPDGMEQFFEGDLIPNGEWRLVDKCLGLALVNRFSVSEVFKCLVHWDCGTVNLELWSQSRPVSEQSPLRISHQYEVIGIS

SEQ ID NO: 210919 - protein, 63 aa, Glycine max
  Clone ID: PAT_MRT3847_32487C.1.pep
NRRPHKHIFPNHLKSHSLQILLHIGFLVQRNIFIINHSNTFIQLLINIYCINFPLQKFQPSST

SEQ ID NO: 210920 - protein, 53 aa, Glycine max
  Clone ID: PAT_MRT3847_32488C.1.pep
FNVVLYKTLTQFYIFSNTMLLFAACMFSLTTINPNCINCCIQSQIRNYGSLTM

SEQ ID NO: 210921 - protein, 52 aa, Glycine max
  unsure (1)..(52): unsure at all Xaa locations
  Clone ID: PAT_MRT3847_32489C.1.pep
XXRXSXMXAXVSXELGSXGKXCXSKMXXIHEXXXKSXTSXNXRXKXXXXLXH

SEQ ID NO: 210922 - protein, 119 aa, Glycine max
  unsure (1)..(119): unsure at all Xaa locations
  Clone ID: PAT_MRT3847_3248C.1.pep
MTYIVTGMKYTFMKNASSAPSVSYYEYEYIVIGGGTAGCPLAATLSEKHKVLVLERGPSPYGNPNITNLDAFGAALSDTCPNSPSQRFISQDGVINSRAXXLGGGSCLNAGFYTRASPY

SEQ ID NO: 210923 - protein, 140 aa, Glycine max
  Clone ID: PAT_MRT3847_32490C.1.pep
MAISDEPETVATALNHSSLRRRPTAAGLFNSPETTTDSSGDDLAKDSGSDDSISSDAANSQPQQKQDTDFSVLKFAYRPSVPAHRKVKSHAGLFNLCIVVLVAVNSRLIIENLMKYGWLIKSGFWFSSKSLRDWPLFMCL

SEQ ID NO: 210924 - protein, 233 aa, Glycine max
  unsure (1)..(233): unsure at all Xaa locations
  Clone ID: PAT_MRT3847_32491C.1.pep
MAISDEPESVATALNHSSLRRRPSATSTAGLFNSPETTTDSSGDDLAKDSGSDDSINSDAAAVNSQQQNEKQDTDFSVLKFAYRPSVPAHRKVKESPLSSDTIFRQSHAGLFNLCIVVLVAVNSRLIIENLMKYGWLIKSGFWFSSKSLRDWPLFMCCLSLVVFPFAAFIEXELAQQKCIPEPGVVVVVLHIIITSASLFYPVLVILRCDSAFLSGVTLMLFACGVXXKLVSY

SEQ ID NO: 210925 - protein, 68 aa, Glycine max
  Clone ID: PAT_MRT3847_32492C.1.pep
TTKFQFMPTSAENNKCLESSCKMACTSVSLYSLKYNRVVGEVYQKSCECRILSLTNIRLQIFPPPLGG

SEQ ID NO: 210926 - protein, 39 aa, Glycine max
  Clone ID: PAT_MRT3847_32493C.1.pep
FTESKDLTVIGIIFSTYSIRKLVLRMRMLTHSHMLHQRL

SEQ ID NO: 210927 - protein, 94 aa, Glycine max
  Clone ID: PAT_MRT3847_32494C.1.pep
MSSISRIIDGESRTGTCAVSDLHEDSHAFEKFGTCWSLSNYASMTGRLLHVTPYTVGLRRMVHINIAMQVMMSASASWVPARPGCNRSLHSALK

SEQ ID NO: 210928 - protein, 67 aa, Glycine max
  Clone ID: PAT_MRT3847_32495C.1.pep
KSIHIPPCFLKFHYPATNSGGLKQNKIWVCTLSFYCKIIRPNLKYAGLPCMKEHWYPRIKVMQKGSL

SEQ ID NO: 210929 - protein, 122 aa, Glycine max
  unsure (1)..(122): unsure at all Xaa locations
  Clone ID: PAT_MRT3847_32496C.1.pep
TEPNSWIIPGDKPRSFKLKELVAKGKTLYVSGKRKLRQKIVADVVEALIGAFLSTGGEKAALLFMDWVGIKVSFNKIPSDRHFDLHPEKLVNVSFLESXLNYSFHDRPLLVEAXTHGLYTAA

SEQ ID NO: 210930 - protein, 68 aa, Glycine max
  Clone ID: PAT_MRT3847_32497C.1.pep
LRLTKGTETKTTFLILKKNDYISHNLNSFISLFSVESCSSHLTFFLIIEFQYYESMLCLCFDISIHHY

SEQ ID NO: 210931 - protein, 77 aa, Glycine max
  Clone ID: PAT_MRT3847_32498C.1.pep
PNVETSATVLAREALQMQSSPGALHITEKACSDWSHNYVVSRLVTQAFVPVPPSVALRQDHLVVSLAPVGVLCRMLC

SEQ ID NO: 210932 - protein, 131 aa, Glycine max
  unsure (1)..(131): unsure at all Xaa locations
  Clone ID: PAT_MRT3847_32499C.1.pep
QASAHRKATIYAGAICGLNXILIISEPTACXIANGLDKTATSSGENNALTFDLRGGTVEVSLXLTIQEGKYXVKATAHDTHSRSDYFDNRMDNHYDHEFMRKNMIEISGNARAPMRLRTACEPPKKTLSFT

SEQ ID NO: 210933 - protein, 91 aa, Glycine max
  Clone ID: PAT_MRT3847_3249C.1.pep
NGRTLAAKTSFFPASFKSAIIPLFHVASLSSLHMKKSAKHCQIAIQIFDRIFVRESCSELQVGETPNFQVESEEGTKIMASKLPKWNRTTI

SEQ ID NO: 210934 - protein, 108 aa, Glycine max
  unsure (1)..(108): unsure at all Xaa locations
  Clone ID: PAT_MRT3847_324C.1.pep
MGLQHFTTCVLLALCILSQGLAKGAHGFACNWGTRLTHPLPPQITVKLMKDNGFKQVKLFEADPAALKALGNSGIQVMVGIPNDLLATLASNVDAAIAWVXQNVSSYI

SEQ ID NO: 210935 - protein, 49 aa, Glycine max
  Clone ID: PAT_MRT3847_32500C.1.pep
FGFFFFFFFAPFNPKLKNVYKLKSKYNCTRIKKLFYSSRTKLQNIKLWD

SEQ ID NO: 210936 - protein, 67 aa, Glycine max
  Clone ID: PAT_MRT3847_32501C.1.pep
LNLNCKTATLIERQSNYLYTPLSTLFVQITKDVLYALFSNLMNMICLGETQINPILSKNHFSLLMKN

SEQ ID NO: 210937 - protein, 84 aa, Glycine max
  Clone ID: PAT_MRT3847_32502C.1.pep
KLQAQKALSENTRACHTCQKESDTLLKCTRCGISWYCNKACQEIGWKDKGHKDECRLLKNETLKQILLFDWKHFKDFVQFPLSA

SEQ ID NO: 210938 - protein, 80 aa, Glycine max
  Clone ID: PAT_MRT3847_32503C.1.pep
FFFFFFFFFFFFFFFFFFFFFFFLFMFYFSLKKPKNLERGRGNPGNLYNKKKKGAPFPKKGTPPRGKRGPKNLKRIIFGP

SEQ ID NO: 210939 - protein, 68 aa, Glycine max
  Clone ID: PAT_MRT3847_32504C.1.pep
NHSFSLTKEIVYRCQLNDNKYVLGEFVEFKARQEYIEAIVRLSRFKVSRIIILKTLMGRLANLTRQYH

SEQ ID NO: 210940 - protein, 93 aa, Glycine max
  unsure (1)..(93): unsure at all Xaa locations
  Clone ID: PAT_MRT3847_32505C.1.pep
DRFIYSLMGFGILALCITFLGCTAVQMMNGCCLSLYSILEVVLLLLEACLVGFIALDSXWEKDIAFDPTAQLDXLQAFIGDNIDTCTWVRIAE

SEQ ID NO: 210941 - protein, 66 aa, Glycine max
  unsure (1)..(66): unsure at all Xaa locations
  Clone ID: PAT_MRT3847_32506C.1.pep
DGNLSELSLHENPYIHQRHKHKREFSPKMKWITKYSCFLLYKFTSLETKFHHCGRVGRPREXXGPR

SEQ ID NO: 210942 - protein, 163 aa, Glycine max
  Clone ID: PAT_MRT3847_32507C.1.pep
EWFYLLCVSFSFHLGIGLPGTAYARRQHLWLSGANEVDSKTFSRAILAKSAHIQTVVCIPVLEGVVELGTTDKIEEDLNFIQHIKSFFIDQQPPPPTAKPALSEHSTSNLTSSYPLVIVPVTAAATANNVLIQNDMNIVDKGEAIILNNNNNNTEAELLADPN

SEQ ID NO: 210943 - protein, 87 aa, Glycine max
  Clone ID: PAT_MRT3847_32508C.1.pep
LPARSTSSPADASSSPLPFLFFLFLFPSPQCDGAAKLMHLRRCLGDMHLFRYFSSFASFSCCFPPKPVKLLLGSRGFLCKIHCATLE

SEQ ID NO: 210944 - protein, 95 aa, Glycine max
  unsure (1)..(95): unsure at all Xaa locations
  Clone ID: PAT_MRT3847_32509C.1.pep
TSFFAGSVAEEMFHWQVTIMGPADSPYAGGGFLVTINFPPDYPFKPPKGAFRTNVFHPNINSNXSICLDILKEQXXPALTISKGLLSICSLLTDP

SEQ ID NO: 210945 - protein, 40 aa, Glycine max
  Clone ID: PAT_MRT3847_3250C.1.pep
QNSHLFSHYSRKSLRGRSSFSFGQIIQYIILLLPYLYNDL

SEQ ID NO: 210946 - protein, 48 aa, Glycine max
  Clone ID: PAT_MRT3847_32510C.1.pep
GVFPKALLNPLLFPMIWGFQCPPAGIVVLNVHGFKAWVSGFYWVSGSL

SEQ ID NO: 210947 - protein, 45 aa, Glycine max
  Clone ID: PAT_MRT3847_32511C.1.pep
ILKAKLECIMEPPKSRFYYLLSSKKWGIFDVAKKFSRAIKNVMKN

SEQ ID NO: 210948 - protein, 82 aa, Glycine max
  unsure (1)..(82): unsure at all Xaa locations
  Clone ID: PAT_MRT3847_32512C.1.pep
TGHRFLTNFPWPIFIIRILILLLSLARFVRAYFNKQGLLTLYLFCIALLIALLLLLLVFAFVVTRPDXSLLCPXRGYKEYRL

SEQ ID NO: 210949 - protein, 166 aa, Glycine max
  Clone ID: PAT_MRT3847_32513C.1.pep
MASNSASALYFLLCLSPITLLLSAFRAQAQSHAPAPTFKYCEKNADYAVKVSGVEILPDPVERGVPFTFKIPAYTPEPIQSGDLLYEISYAGIEAQPATFLHDLCEEAPCPVPAGNFVLVHTELLPPVTPPGTYNVKLNFKDHNDKLLTCIIFPFKIGSKSSVSAI

SEQ ID NO: 210950 - protein, 63 aa, Glycine max
  Clone ID: PAT_MRT3847_32514C.1.pep
WRSNIVSKCMVQDFWGAQRLTNNLENHRNLSSTPPTCWLTCIPQNIRSGLMVESLSCCLELDK

SEQ ID NO: 210951 - protein, 152 aa, Glycine max
  Clone ID: PAT_MRT3847_32515C.1.pep
KGEKIFSLKKKKRTPFFGGKGEKNILKKKKKRAFKPQSPKTKGGGAPPKTKKKLETPLKGGSPFTPPPRGREKKPGGPPKKFGNGGGETLLNWFPKKKRPLGGGGGPSSGRRFPLQGGKKYGPPPPEGGGSLGREHNKFLYPPERLNTKGGG

SEQ ID NO: 210952 - protein, 109 aa, Glycine max
  Clone ID: PAT_MRT3847_32516C.1.pep
ETMNQCTDVPIVDSCMLEERLLRGLKLVSWKRLDVSFHNSKVRSAAHSVIQRRCRCHKPYDRPFRPIVNQLRYLEASLSEERQLLTADLPSLVSKFIAKSRFRLCDKWH

SEQ ID NO: 210953 - protein, 261 aa, Glycine max
  unsure (1)..(261): unsure at all Xaa locations
  Clone ID: PAT_MRT3847_32517C.1.pep
MYLFKPLSSSPGFRNLEPTASMFGRRFGAIKQIIPTNATDTTTQVNMLCFFCGTRGHQLSDCLAIAENKLEDLQKNIDSYGGLEEHHCLCIKCFQPDPWGRTGSTSIGKQIAEKILPLSPSKLAXGQISQVPKEIFEAVKKLRXSRPDILKMFNTRXNLTXLGTFFLQLMLGNGENSQVGGXYHGARIDXDPGPETVIRTEYKXTLAVKVGSMKCMVDTKNISKQDFLGEESMEWWSNTSQAGAEISSEEYIIEKFKKKEM

SEQ ID NO: 210954 - protein, 121 aa, Glycine max
  unsure (1)..(121): unsure at all Xaa locations
  Clone ID: PAT_MRT3847_32518C.1.pep
SSSVGVVPAGDNGPNIGKRRYYEPGSWINSHLCLRLMSSMPXEQSLIGGRKAAVLAGSNGAYRLRDFGGMTQATYPMQYMPDRWITPRDRYMNMIPTNHYYAAIPETPSRHPIHMIPAPEL

SEQ ID NO: 210955 - protein, 224 aa, Glycine max
  unsure (1)..(224): unsure at all Xaa locations
  Clone ID: PAT_MRT3847_32519C.1.pep
MYMFKPLSSSPGLRNLEPMASMFARRFSAIKHIIPTNATDTTTQVNMLCLFCGTKGHQLSDCSAIAENKLEDLQKNIDSYGGLEEHSCLCIKCFQPNHWAISCPTSISTRKHELKANALVNDXNPTLSPSKLAERQISQVPKEIFEAVKKLQLSRTDILKDXQSQRQCSEQNTRKSLSVKVGSIKCMVESQYISNHDFLEEEIMEWWSNTSQAGAEISSEEYII

SEQ ID NO: 210956 - protein, 50 aa, Glycine max
  Clone ID: PAT_MRT3847_3251C.1.pep
HGAASSFLNFIDCILPNHPPFICIFWAAETGACNNLATNPVYFMGLSLLD

SEQ ID NO: 210957 - protein, 72 aa, Glycine max
  Clone ID: PAT_MRT3847_32520C.1.pep
KKKGKKLLKKPKGGPQIHYKGGPPFFGFGRKPPMGFFFKKNQKKKGAQPLKFRGKILERFLGDREPNKNGEP

SEQ ID NO: 210958 - protein, 214 aa, Glycine max
  Clone ID: PAT_MRT3847_32521C.1.pep
VLQSIFINQDIHMYYEETDKPALARTSNLNEELGQVDTILSDKTGTLTMNSMEFIKCSVAGVAYGRGVTEVEQAMGKSNGLPIFHEHINGLESKLNEIRDSPDRKEPIKGFNFTDERIMNGNWVNEPYADVIQNFFRLLAICHTAIPEVDEETGKVSYEAESPDEAAFVIAAREVGFKFYKRTQTCLSIYELDPASGNEVERSYKLNCFVFFFS

SEQ ID NO: 210959 - protein, 100 aa, Glycine max
  Clone ID: PAT_MRT3847_32522C.1.pep
FFFFFFFFFFFFFFFFFFFFFIEPLLTLLMVASFRQTLPDVSGPPPPLSLNGHLRALTEEPGCRPRTHKGHNLSPKGPPKTLAHLRPHLALTARPPKPPR

SEQ ID NO: 210960 - protein, 103 aa, Glycine max
  unsure (1)..(103): unsure at all Xaa locations
  Clone ID: PAT_MRT3847_32523C.1.pep
SVFEINERDRGSPAYFKLGQKTGNSFGNLSPFKNKXFLVVCKKRGGKKLGIWGLFPKKNPKKGELVREIFKFSFGGTGAILKGGFYPRPLRHSFFLKQGESPF

SEQ ID NO: 210961 - protein, 49 aa, Glycine max
  Clone ID: PAT_MRT3847_32524C.1.pep
SDYAKNVLDRLTTLLVSRRSVIIDIIGPQSRVTRHDEKSSRWKKPKPKP

SEQ ID NO: 210962 - protein, 85 aa, Glycine max
  Clone ID: PAT_MRT3847_32525C.1.pep
PTGPLTLADLARAPMKIEKNSRTLISLGSLTTGKLLNPVGQLQEKLNPPGGGHGLSDNKNLKNGDPQGQNFPPPSQVGTLMRTAH

SEQ ID NO: 210963 - protein, 177 aa, Glycine max
  Clone ID: PAT_MRT3847_32526C.1.pep
HASDEALDILMPFQCPRKNYSPHAVHQKMVVDVAKHDFPELNSDRSSILLQSMSNMMNVEQQKLVGMRPVNESKFEGNSGCEDKSLESGKNVSSFLHNLVMDNNGVNDLACPSENVGVDPVSFSSGFLDAAVCVSDKFQYVDINEKGVLNVPRPSDANFQIKSEKSKFQTEPCYKDT

SEQ ID NO: 210964 - protein, 95 aa, Glycine max
  unsure (1)..(95): unsure at all Xaa locations
  Clone ID: PAT_MRT3847_32527C.1.pep
VSSEFGSSSSRKTVAENPVVLYSKTWCSYSSEVKILFKKLGVDPLVFELDEMGPQGPQLHXGGKHIGGCTDTLKLYRKGELEPLLSEANAKKTGS

SEQ ID NO: 210965 - protein, 96 aa, Glycine max
  Clone ID: PAT_MRT3847_32528C.1.pep
QIIIVIDLFNFPNNKLQQVTTTACHSSSKLCCQSWPSRPLLRRSGAARPPSATGMDIAARFNVAVGAAAITAKRRGIWTGFLRRYIEAVEILKTLA

SEQ ID NO: 210966 - protein, 81 aa, Glycine max
  unsure (1)..(81): unsure at all Xaa locations
  Clone ID: PAT_MRT3847_32529C.1.pep
SYLFLSFIVSFRIYGHXDSVTPFSYAGSCPYNCFICIDLLLCLFHSFLLLLGQAEVVFFIXYLLFLYFFSAVPKLTVTCGA

SEQ ID NO: 210967 - protein, 107 aa, Glycine max
  Clone ID: PAT_MRT3847_3252C.1.pep
LRLLTTTTPSPRRRASPCWRLHHRRPLPRVSCHHAFQQHLIHLLFLLCLGLRRLHADLRQEHRRRDFPSNCTVGYLDRNAQEPPCPAHRPGLLRPASRACRQASDVG

SEQ ID NO: 210968 - protein, 166 aa, Glycine max
  Clone ID: PAT_MRT3847_32530C.1.pep
MALALGNAIPLSNLKPCPKLSCCCMKKLFFTHSVPISRIPTTPKRTPTTVVRATSSFGSRLEDTIKKTVAENPVVLYSKTWCSYSSEVKILFKKLGVDPLVFELDEMGPQGPQLHKVLERITGQHTVPNVFIGGKHIGGCTDTLKLYRKGELEPLLSKANAKKTGS

SEQ ID NO: 210969 - protein, 70 aa, Glycine max
  Clone ID: PAT_MRT3847_32531C.1.pep
SFILLHLICWWLLSFCYATSFFYYSRIIICNCLLLNITTTMTIIIIIVVVIIVIIIFLLILIIHVMHLSR

SEQ ID NO: 210970 - protein, 71 aa, Glycine max
  unsure (1)..(71): unsure at all Xaa locations
  Clone ID: PAT_MRT3847_32532C.1.pep
MSGNIHKIEETLHVGRHKKXDPKGVHHSEHXGVHKGXDHGEHIGEPPGVRHHGTHNEGLEXKIQDKIPGAG

SEQ ID NO: 210971 - protein, 53 aa, Glycine max
  Clone ID: PAT_MRT3847_32533C.1.pep
VLEFTLFYDDCIRMLPPPTQLTKENKNKVGIKHNGRKTSYEIIQYKDTEVIER

SEQ ID NO: 210972 - protein, 54 aa, Glycine max
  Clone ID: PAT_MRT3847_32534C.1.pep
IPLYVNYWFMVSANWWFTWDIYYGDTWWLVPQEDTIARRLMHLYSEILLASKDV

SEQ ID NO: 210973 - protein, 67 aa, Glycine max
  Clone ID: PAT_MRT3847_32535C.1.pep
LIKCFFHQGHIIIIITRISRWTDNHLRLKTVAREYYQRIGIFFISDIVEEKNKELPKIRLSSPCINS

SEQ ID NO: 210974 - protein, 137 aa, Glycine max
  Clone ID: PAT_MRT3847_32536C.1.pep
MMIQCERSSSVLKSLLQIVSPCKRDLGSFRRLWQHSESTFCVIDDRNLLRPSLNSKTGLHVLDLIDCGSLEPDRTLYNTLLKRCTQLGKLKEGKLVHFHVLNSNFKHDLVIQNSLLFMYARCGSLEGARRLFDEMPH

SEQ ID NO: 210975 - protein, 104 aa, Glycine max
  Clone ID: PAT_MRT3847_32537C.1.pep
CLGVGVCVCVCRCFFFSCLAWFDASGLDFCTACQLVMLSAVLNSFLLYSTLDRLGVHSPVLTCLALLDFAVPYTTLRSISHLVKGRVVMFPGICCGASSPLFSP

SEQ ID NO: 210976 - protein, 58 aa, Glycine max
  unsure (1)..(58): unsure at all Xaa locations
  Clone ID: PAT_MRT3847_32538C.1.pep
PMLLGKWLAFAKKIFPKDKGRGHRTVLLESSLKQQALHLRPILHNEYPFDYILVKVGX

SEQ ID NO: 210977 - protein, 219 aa, Glycine max
  Clone ID: PAT_MRT3847_32539C.1.pep
MVVCFLVAILALTSSVVSAYDPSPLQDFCVAAKEKDGVFVNGKFCKDPKLVKPEDFFLHVEPGNTDNPNNAQVTPVSVDQLPGLNTLGISLARIDFAPKGINPPHTHPRATEILLVLEGTLYVGFVTSNQDGNRLFTKVLNKGDVFVFPIGLIHFQLNVGYGNAVAIAALGSQNAGTITIANALFKANPPISPEVLTKAFQVDQKIIDELQKKSWYNTN

SEQ ID NO: 210978 - protein, 58 aa, Glycine max
  Clone ID: PAT_MRT3847_3253C.1.pep
KSKLYFLKKEELIITLAERQTHTRNIRTNHNSGHVLKEISQPIKIDERKNWAFGSSLI

SEQ ID NO: 210979 - protein, 96 aa, Glycine max
  Clone ID: PAT_MRT3847_32540C.1.pep
NKGTQAKSCKTASDLLSISKEIGSRKNVESLLFKGKKVAENTNMDKLELFGGELIKEQERRKTSILPTVVLKNNNASPSPSRTSSATTLSTLSSTS

SEQ ID NO: 210980 - protein, 137 aa, Glycine max
  Clone ID: PAT_MRT3847_32541C.1.pep
KIIVDTYGGGGAHGGGAFSGKAPAKVDRSGAYIARQAAKSIVANGLARRCIVQISYAIGVPEPLSVFVDTFGTGKIPDKDILKLVKEKFDFRPGIISINLDLKRGASGRFLKTAAYGHFGRDDPDFTWEVVKPLKWE

SEQ ID NO: 210981 - protein, 75 aa, Glycine max
  Clone ID: PAT_MRT3847_32542C.1.pep
KPQPQSSDCEWGVDSRKKKSLFFYSVAKPGFRQSYFVYEAYGGVEDCTVFYSPQFLSWVLASFFFLDISKEILGL

SEQ ID NO: 210982 - protein, 65 aa, Glycine max
  Clone ID: PAT_MRT3847_32543C.1.pep
WGFLNPNHDADRTAFIAFGDKILVSDGSLFLLYAIIYRIFFCLICVFSFCNQIIEVAFLSAFCVF

SEQ ID NO: 210983 - protein, 82 aa, Glycine max
  Clone ID: PAT_MRT3847_32544C.1.pep
QLRVTLKGTPIFGNPFPKKNPPPKKGGEKGCNFFYKTFWPGGKKGFFLLFSPPPGFKKSQSRPPRLGPRNGTFFFFFKEILG

SEQ ID NO: 210984 - protein, 116 aa, Glycine max
  unsure (1)..(116): unsure at all Xaa locations
  Clone ID: PAT_MRT3847_32545C.1.pep
GSSRDRTSPFKTRNLNKSSGGAGEXNGQGAGRRKIEKKTRIHDTSPGTPTAPDCATDDDLITQGAGAEWPGDTIXHAHRTGEGKRQPKGGTTPGTLKELEIEQNHYWPIQEKAPRK

SEQ ID NO: 210985 - protein, 37 aa, Glycine max
  Clone ID: PAT_MRT3847_32546C.1.pep
MGAWFQPIYPGPGPIRTLFGPLADPAHGTIFGAFPPK

SEQ ID NO: 210986 - protein, 213 aa, Glycine max
  Clone ID: PAT_MRT3847_32547C.1.pep
MKSTTLFALFLLCALTSSYLPSATADVVLDMDGNPLGNGWQNEYFMLPVTRGSGGGIALAATGNERCPVTVVQSHIERDKGYAATFRAPFHLPFIAEGLPLTISFDNFEVLPRCVPTPLWWAIVDGLAEGPAVKIEYRDIVEGWFKIQKAYPLGYKLLFCPVPLEDSTCGDIGIYTDDKGFRRLVVTKNKPLVVQFQKFDPLAKNNLVLPASE

SEQ ID NO: 210987 - protein, 57 aa, Glycine max
  Clone ID: PAT_MRT3847_32548C.1.pep
KVFAVLSSNEASVCKILQEKEKEVLHKGLPNVQNRKVSFGNIFGCGDVDFFFQLIYK

SEQ ID NO: 210988 - protein, 125 aa, Glycine max
  unsure (1)..(125): unsure at all Xaa locations
  Clone ID: PAT_MRT3847_32549C.1.pep
MLLLYKNTLSNLIDQKISLHPLTLSIEESASAAKEADDELKVVXVDMKKRALNDRLIAEKGFLDADGLQASLVFGPSXQPWEVNFFPGISDSITRSSXSSIQYEIWRVAKAIRRAAGAALSGEFT

SEQ ID NO: 210989 - protein, 43 aa, Glycine max
  Clone ID: PAT_MRT3847_3254C.1.pep
HESQLAVFEVLHCLWVVSTPSSDKSHLIAACGILERMEGHQNA

SEQ ID NO: 210990 - protein, 87 aa, Glycine max
  Clone ID: PAT_MRT3847_32550C.1.pep
KRCTPSQLALSWVHHQGKDVCPIPGTTKLENFNQNIGALSVKLTPEEMAELESLAALDAVKGDRYADDGLSTWKDSETPPLSSWKAA

SEQ ID NO: 210991 - protein, 89 aa, Glycine max
  unsure (1)..(89): unsure at all Xaa locations
  Clone ID: PAT_MRT3847_32551C.1.pep
CFFWAGWGASVGFGGLSWLGLGFAFWGSAFLVVPALXVFLVALVXFGAGGVPGVVLFVGRAVLCPFNGPLSLGFGCGCINGCVGRPGSS

SEQ ID NO: 210992 - protein, 77 aa, Glycine max
  Clone ID: PAT_MRT3847_32552C.1.pep
FSYSSFDGIYYSHNRSNSTANTRPKPRLQAGMHLLDNRATHAMPVAMMIHEYSSDRTVFVPATHHSKVCLFNLSIVC

SEQ ID NO: 210993 - protein, 281 aa, Glycine max
  Clone ID: PAT_MRT3847_32553C.1.pep
MARSTTPPTIKPENYGHSPVHYAVALGDHTTLSRITSSLPRLPDPSLARSDALSLPRADLAVLFLRRRDHTHDVPSGSLLVLNRDDRKIFDAFENAGGPMNESDLAGFCSQTSVYRPGMDVTKAELVGRTNRRRQENTESVGEWKAQVYEMHNVVFSFRSRKVAGGESDVAGSEQVLPLELDEDDDGFLVAENPNFGFPMPDKRRHSSCVREETESVPMGRTSLHLTFVTAPHPLRSPHSVTMPQTKEKEYVRSLRPSVWLTEQLPLKTEELLPLLDILAN

SEQ ID NO: 210994 - protein, 122 aa, Glycine max
  unsure (1)..(122): unsure at all Xaa locations
  Clone ID: PAT_MRT3847_32554C.1.pep
LKKLRVENLLLAVIGNVTGLSRRRRRPPSSQTKSKLSEKTPQKPPRVSSPRLPSPQKARRVSTLTLWFKTAGPIKAASTSERPASKRPPTREPSGPPPAISNGGSPRTNXTSPRETKPFTYP

SEQ ID NO: 210995 - protein, 51 aa, Glycine max
  unsure (1)..(51): unsure at all Xaa locations
  Clone ID: PAT_MRT3847_32555C.1.pep
MASKRILKELXDLQKDPPTSCSAGPAGEDMFHWQATIMGPPDSPYAGGVFL

SEQ ID NO: 210996 - protein, 44 aa, Glycine max
  unsure (1)..(44): unsure at all Xaa locations
  Clone ID: PAT_MRT3847_32556C.1.pep
HFLLISNYIMSQAFLLEPVFHARVGYRKAPSRLDLGXSCELTCA

SEQ ID NO: 210997 - protein, 56 aa, Glycine max
  Clone ID: PAT_MRT3847_32557C.1.pep
YFFFFFFFFFFFFFLFFWGKFGTPLVIYSRTKAQVLSRGSYRWDKRFPIFPGVGLL

SEQ ID NO: 210998 - protein, 64 aa, Glycine max
  unsure (1)..(64): unsure at all Xaa locations
  Clone ID: PAT_MRT3847_32558C.1.pep
GSRSGVCYYESPDITLPEXHRGKPIKVAAHHATNEERVVTARLLPTQSTDSDHPDASKTEEEFI

SEQ ID NO: 210999 - protein, 425 aa, Glycine max
  unsure (1)..(425): unsure at all Xaa locations
  Clone ID: PAT_MRT3847_32559C.1.pep
MLPFAHPNPTMGSRNNNNNNATAETVFAAANAIVAAESRVQPTDAPKKRWGGCWSQYWCFGSCKSSKSSKRIGHAVLVPEPAAPTGPAAAAAAPNPSTAIVMPFIAPPSSPASFLQSDPPSGIQSPXGLLSLSALAANAYSSAGSPGGRLIXPGSAFSTSGTSTPFPDRPPTLEFPKGETPKILGVEHFSTRRWGSRLGSGSLTPDGAWQGSRLGSGSLTPDGVGLASRLGSGCVTPDGLGQESRLGSGCLTPDSAGPTNQNNISVQNQISKEATLADSDNGHPSNATLVDHRVSFELTGEDVARCLANKTGVLLRNMSGSSQGILTKDPVDRERVQIDTNSSCNACTEKTDDKPDNPVGKGEQCLHKQNSVNSSKEFNFDNRKGDVSVTTGSGYEWWTNRKVAGKEGRSANSWAFFPMLQSEMN

SEQ ID NO: 211000 - protein, 43 aa, Glycine max
  Clone ID: PAT_MRT3847_3255C.1.pep
GLRLINSSTTREVVPGVFSLELKKPMLAWPFYLELDPNQMHEH

SEQ ID NO: 211001 - protein, 187 aa, Glycine max
  Clone ID: PAT_MRT3847_32560C.1.pep
GISNGLPDVDSVFYFTRKSVLETFDIRFDEHAPKVALPQGMMVPVNSFNTMYHSSAFWALMLPVSVSTMASDVLRGYWGQRLLWEVGGYVVVYPPTVHRYDRIEAYPFSEEKDLHVNVGRLINYLISWRSDKHRLFEKILDLSFAMAEEGFWTEKDVKLTGAWLQDLLALGYHHPRLISFDFERTRA

SEQ ID NO: 211002 - protein, 90 aa, Glycine max
  Clone ID: PAT_MRT3847_32561C.1.pep
LLHAMRRRPMQTHQAVVDDDNGALVIMDLFINFMSNTMDGSIKGYAELRHTLDISVRRNRKFVRSALHSIHDNLQAVFDFTSNHFLISHD

SEQ ID NO: 211003 - protein, 97 aa, Glycine max
  Clone ID: PAT_MRT3847_32562C.1.pep
PNSASRPNATTRGVEEDCAELTKSYSRQVGGDASILAPTDDPQSEKPVADDNPKPTDDDEEEDIIARIRNDGTEMNDEKRSGISRRSGNKTESECTK

SEQ ID NO: 211004 - protein, 42 aa, Glycine max
  Clone ID: PAT_MRT3847_32563C.1.pep
INPPARSWLAAGKACTLSLYTSFVALDPAPGVFVLHNRDVVS

SEQ ID NO: 211005 - protein, 80 aa, Glycine max
  unsure (1)..(80): unsure at all Xaa locations
  Clone ID: PAT_MRT3847_32564C.1.pep
GEEKVYIYIVCFVHVYSVHVHSTVHLIYKLVGLDKLVIQRVXDGCCLDEHEXVMYAWVLHMLEAARERGITLAIAWWKYE

SEQ ID NO: 211006 - protein, 63 aa, Glycine max
  Clone ID: PAT_MRT3847_32565C.1.pep
CDSREVAMARFHLDQPYCNAVFGFLAAHTLYYNLITPVQPYNDEDRPRDTWTQLSRATHKEVD

SEQ ID NO: 211007 - protein, 223 aa, Glycine max
  unsure (1)..(223): unsure at all Xaa locations
  Clone ID: PAT_MRT3847_32566C.1.pep
KNSIRGYTCNGANHSCQSYLTFRSQPIYNSVKTISTLLGSDPSQLAKINSVSMNDTFETNKLVIVPVNCSCAGEYYQTNTSYEFHNSETYFLIANNTFEGLTTCQALENQNHNPANIYPGRRLLVPLRCACPTKNQTEKGIRYLLSYLVNWGDSVSFISEKFGVNXMTTLEANTLTLTQATIYPFTTILVPLHDKPSSSQTVSPTSRTPPPSPXSSDHSSNKT

SEQ ID NO: 211008 - protein, 294 aa, Glycine max
  unsure (1)..(294): unsure at all Xaa locations
  Clone ID: PAT_MRT3847_32567C.1.pep
VITIWKMQGNHFLILCLYIRYLIFXGPTTHNMEEFKKTMMQEYEMTDLGLMRYFLGMQVKQRPGQIFVSQEKYADDLLKKFNMQDCKPLATPMAMNEKLSKDDGQNKVDATVYRSLVGSLIYLNNSRSEIIHAVSIVSRFMSNPSKAHFAAAKRILRYVKGTKDFGILYEVDRDFNLTGYTNSNWARSTDDRKSTSGYVFLLGNKAISWAXKEAEYMVATSVACEATWLRKILQDVQQDSKTPTVIHCDNMSAIAMTKNPIFHSRTKHIEIRYHFIRELVERGEIKMEFRKTEE

SEQ ID NO: 211009 - protein, 89 aa, Glycine max
  Clone ID: PAT_MRT3847_32568C.1.pep
KGKTFPFYYQIFPPTKLGAKFSLNKKSSRVVLTLLSIKGYAIGSISFPFDLPNKQTDLFILQSMFLLFFRPSNGALQTQKPTLPFFSTK

SEQ ID NO: 211010 - protein, 75 aa, Glycine max
  Clone ID: PAT_MRT3847_32569C.1.pep
CMALISLQNSVFPLPLPTTHSSAKSFPYVTMRRGTIFGSSLVAISTQHHPELHSSCRMIMMSFSNKRSTLCNSLR

SEQ ID NO: 211011 - protein, 37 aa, Glycine max
  Clone ID: PAT_MRT3847_3256C.1.pep
STNHVWLKWLQKNHMIYNDCSDTKRFPQGLSRESNTA

SEQ ID NO: 211012 - protein, 49 aa, Glycine max
  unsure (1)..(49): unsure at all Xaa locations
  Clone ID: PAT_MRT3847_32570C.1.pep
MGVFTFXDEIISPVAPATLYKVLITYSDNVITKALESFMSVENFEGNGS

SEQ ID NO: 211013 - protein, 66 aa, Glycine max
  unsure (1)..(66): unsure at all Xaa locations
  Clone ID: PAT_MRT3847_32571C.1.pep
GPASKSLYGPCKQMFKPDMDPKCLLNTIYQAVLSSVDSDCMSGWKGHVYGVMPPEVKXRIFKGRMD

SEQ ID NO: 211014 - protein, 212 aa, Glycine max
  Clone ID: PAT_MRT3847_32572C.1.pep
MSSLVLLSVLFLLLQRPLSSFSANSEGNALHALRSRLSDPSNVLQSWDPNLVNACTWFHVTCDSNNHVIRLDLGNSKLSGTLGPELAQLPHLQYLELYRNNISGNIPRELSKLKNLISMDLYDNQFHGKIPKSFGNLNSLKFLRLNNNKLTGAIPRELTHLKNLKILDVSNNDLCGTIPVDGNFESFPMESFENNKLSGPELKGLVPYDFGC

SEQ ID NO: 211015 - protein, 104 aa, Glycine max
  Clone ID: PAT_MRT3847_32573C.1.pep
FLSCFVGNALHALRSRLSDPSNVLQSWDPNLVNACTWFHVTCDSNNHVIRLDLGNSKLSGTLGPELAQLPHLQYLFVSVSFVAPNPTIHHGLTYSLLRVHGALS

SEQ ID NO: 211016 - protein, 62 aa, Glycine max
  unsure (1)..(62): unsure at all Xaa locations
  Clone ID: PAT_MRT3847_32574C.1.pep
ASPAXXFGDGXXMPAATXSSGGDTXELMKXPNXXXXXXXTXNKQEDPXKLXLXXRSXGFARK

SEQ ID NO: 211017 - protein, 64 aa, Glycine max
  Clone ID: PAT_MRT3847_32575C.1.pep
HPSIRVCVHLQKPTLTVPLPLLSLSRDSKTYSSISIKLICPYSSTTLLLENPISLHEKLLFFLT

SEQ ID NO: 211018 - protein, 87 aa, Glycine max
  Clone ID: PAT_MRT3847_32576C.1.pep
MEMMAYHFSRLPYSDSLKLLEADIQHANALAAAIPRAKGGTLLQMKLVYNHLAPLFLLLLQWMECSCTCFLHRYLDLFHIVVYKVNT

SEQ ID NO: 211019 - protein, 82 aa, Glycine max
  Clone ID: PAT_MRT3847_32577C.1.pep
LEHDEKSSLFEFFQNRFSEQLQSRPTLDGVHFKTISQGQSDQLITPFSDQEIKEAVWGCGGDKCPGPDGLNFNFIKHFWDVL

SEQ ID NO: 211020 - protein, 255 aa, Glycine max
  Clone ID: PAT_MRT3847_32578C.1.pep
MHLRTPNMEERGNQHKHEQEEEEEIVCLDASFFVDDNYQLTKFTFGSQDIQLFCLHSASTDFDLTGQLVWPGAMLLNEYLSKNVNLLQGCTAIELGSGVGITGILCSRFCHKVVMTDHNEEVIKILKKNIELHSCPENITSISHGLVAEKLEWGNTDQINEILQKHPGGFDFILGADICFQQSSIPMLFDSVKQLLQAREDRKCKFILAYISRAKTMDSMILIEASKLQMQMKEVPGTRCTVKNLEGVIFVVTLE

SEQ ID NO: 211021 - protein, 380 aa, Glycine max
  Clone ID: PAT_MRT3847_32579C.1.pep
HGFLESPSPAGFKISVFNSNPDIVMVGFRVHVGNTSASHIPSSISIFQRVVKFDEGMRSWYDIPFTVAESLLADEEFTISVGPTCNGSTLVRIASSEVRPPTRPEGCGKETEGAVLDMEARVLGSNSSLSGSAKKRRSMQSAPIQEQVIADGLRLITKFYSSCKQQDISRFEEARTELGKLKCKPILETIFECDREPILQASASRVLQAVFPKKEIYHQVKDTMQLLGVVKSSSLLSSRLGIGGAAGSWIIEEFTIQMHAVCKIALQRRSNLATFLETKGSEVVDVLMQVLWGILDFEQPDTQTMNNIVMSAVELIYCYAECLALHGKDAGVHSVAPAVVLLKKLLFSSNEAVQTASSLAISSRLLQVPFPKQTMLATDD

SEQ ID NO: 211022 - protein, 144 aa, Glycine max
  Clone ID: PAT_MRT3847_3257C.1.pep
KTHTTLSHSASLIKVIIESPPARDNHTRNSLKPHLTYLIIILQENYNHNTTFIIFMAINSSIPFQHQFLHDERGEHILPPIPIPSRDPNHTNCNNNNNNISGHDLKPPELLIPVPNMPHFMPQDNTKFDSSSIGSDHLESLWDS

SEQ ID NO: 211023 - protein, 75 aa, Glycine max
  unsure (1)..(75): unsure at all Xaa locations
  Clone ID: PAT_MRT3847_32580C.1.pep
XATRTXXVRKLGIRLEXELQTXCHXKXXIVXXXXXHXSRLXXRXXEXXSXAXGXVXXRSDXVXPXLXXLTVVYVC

SEQ ID NO: 211024 - protein, 106 aa, Glycine max
  unsure (1)..(106): unsure at all Xaa locations
  Clone ID: PAT_MRT3847_32581C.1.pep
PELLSRNGVKFGEAVWFKAGSQIFSEGGLFYLGNPSLMGAQSILAIWATQVILMGAGEGYXXAGGPXGEGTXPXYPGGXXXPWGLAXDPXAXGGXXGXXXXNGRGL

SEQ ID NO: 211025 - protein, 62 aa, Glycine max
  Clone ID: PAT_MRT3847_32582C.1.pep
LGTFSPTISNTTTSPATFANSTPMYVSYTHHVSLLFLNFYSYVLPRQSYSIHYETLNIRDRT

SEQ ID NO: 211026 - protein, 285 aa, Glycine max
  unsure (1)..(285): unsure at all Xaa locations
  Clone ID: PAT_MRT3847_32583C.1.pep
GFLESPSPAGFKISVFNSNPDIFMVGFRVHVGNTSASHIPSSISIFQRVVKFDERMRSWYDIPFTVAESLLADEEFTISVGPTFNGSTLPRIDSLEVYGRAKDEFGWKEKMDAVLDMEARVLGSNSSLIGSAKKRRSMQSAPIQEQVIADGLRLITKFYSSCKQQDCSRFEEARTDLGKLKCKPLLEIIFECDREPILQASASRVLQAVVPKKXEYHQVKDTMQLLGFLKSSSLLSSRRLINGAAPNFIIEEFTIHMHALCKIALQRRSNLATFLETKGTVVFTD

SEQ ID NO: 211027 - protein, 46 aa, Glycine max
  Clone ID: PAT_MRT3847_32584C.1.pep
GFTIKFQTKLGWKKIREEEGEEEEEDEGNKKLHLVLYFLSFSNIKN

SEQ ID NO: 211028 - protein, 50 aa, Glycine max
  Clone ID: PAT_MRT3847_32585C.1.pep
VHIPANCNHNILYGNNIRRVKFWDPYFFFMRPKPVYEVTFLDPYAGSDIC

SEQ ID NO: 211029 - protein, 46 aa, Glycine max
  Clone ID: PAT_MRT3847_32586C.1.pep
DLLSGLLVSEFLNYAASNMASWSLSGVHISIIAGYSECHIIHVSLI

SEQ ID NO: 211030 - protein, 48 aa, Glycine max
  unsure (1)..(48): unsure at all Xaa locations
  Clone ID: PAT_MRT3847_32587C.1.pep
GKAPCFCARXCIPSCHXXSXMXGNXXXECDGSEXWGYXQXDQKPTCXG

SEQ ID NO: 211031 - protein, 184 aa, Glycine max
  Clone ID: PAT_MRT3847_32588C.1.pep
MKKGFQFAGYDKATIGTITLDCQSPYGEKRNRCALLPPNVPILAHSLERTQRNWIARSNSPTDIIIQVGDSSFHLHKLAIASRSEYLNRLVFQRGSNREKAGDSLIIQMKNLPGGKKTFELVVKFCYGRKIDITAANIVPLYCSAHFLEMSEDVEDGNLISKTESFLTFLILSSWKDTFRILRA

SEQ ID NO: 211032 - protein, 109 aa, Glycine max
  Clone ID: PAT_MRT3847_32589C.1.pep
MSRRNESGPKLDLKLNLSPPRADRRLDSPTRSATASPTSPPSSCVSSELNQEDKSYSNSPEATSMVLVGCPRCLMYVMLSEDDPKCPKCKSTVLLDFLHDTKNPTIRRS

SEQ ID NO: 211033 - protein, 169 aa, Glycine max
  unsure (1)..(169): unsure at all Xaa locations
  Clone ID: PAT_MRT3847_3258C.1.pep
QPRQFHSRIASNGRTTAPLPGYTPPPQQVPQIIETXPPQEQNRTPQFTLPERHSSRQPXPQSQQQPAGPRHYPQPQQQPPQQQRQPQPQAGRPNRHAQAAQNSPIKPAQSFDDLVAQPSAMPGQNNRVDSLSIIPNAPEDKKSDGKSKDKKDGSEGGPRKTSWGWFGGD

SEQ ID NO: 211034 - protein, 110 aa, Glycine max
  unsure (1)..(110): unsure at all Xaa locations
  Clone ID: PAT_MRT3847_32590C.1.pep
MSRRNESGPKLDLKLNLSPPRADRRLESPTRSATASPTSPPSSCVSSELNQEDKSYSNSPEATSMVLVGCPRCLMYVMLSEDDPKCPKCKSTVXLLDFLHDTKNPTIRRS

SEQ ID NO: 211035 - protein, 77 aa, Glycine max
  unsure (1)..(77): unsure at all Xaa locations
  Clone ID: PAT_MRT3847_32591C.1.pep
PPFPLGKQNGGLYVSKVVFPPPPPVLIINSWSLSPKNFFFPMWGRRNKVHQEHSSPAINTILVIKCTLPCVXAKKRI

SEQ ID NO: 211036 - protein, 89 aa, Glycine max
  unsure (1)..(89): unsure at all Xaa locations
  Clone ID: PAT_MRT3847_32592C.1.pep
IRHVLKKNCNPDWNEELTLSEQDIQTPIXLTGYDKDTCSEDDTMGEAXIDLKPYLQCKQMVIGKLPKGRSLKRSQPDGTNYLADESICF

SEQ ID NO: 211037 - protein, 41 aa, Glycine max
  Clone ID: PAT_MRT3847_32593C.1.pep
YDQKIYVEVARVTNVFVVAISSHTLSAGNHMTYITYGLMIS

SEQ ID NO: 211038 - protein, 52 aa, Glycine max
  unsure (1)..(52): unsure at all Xaa locations
  Clone ID: PAT_MRT3847_32594C.1.pep
KYMVIXGEPGAVIRGKKGPGXXTVKKXGAAXXIGXYDEPMXPGQCNMVXERX

SEQ ID NO: 211039 - protein, 134 aa, Glycine max
  unsure (1)..(134): unsure at all Xaa locations
  Clone ID: PAT_MRT3847_32595C.1.pep
GLMTSGXSKGAPTGEHKGNAPGRANTKGQKKGTGTYPQANMQSATGQTPPERTESQTMRARQTEPPTTEQAAGLGHNTVKTENYKPEWPGSTSWQEDGEYTKRKHGHKEARNLSVKKTREPKEGKNSAWPHYKE

SEQ ID NO: 211040 - protein, 96 aa, Glycine max
  Clone ID: PAT_MRT3847_32596C.1.pep
MNDENGTTPTMVSPPSPHSSCASTDPSQEDNNNNNDNNKDGDNNNDDDNNNNNDDNDNNNNDPNNNNPEAPSLVLVGCPHCLMYLMISEDNLKCPK

SEQ ID NO: 211041 - protein, 204 aa, Glycine max
  unsure (1)..(204): unsure at all Xaa locations
  Clone ID: PAT_MRT3847_32597C.1.pep
MRCCIPTLLLVTTVLLSAVHGVFLPLERSIPPTGHRVEVAALKARDRARHARMLRGVAGGVVDFSVQGTSDPNSVGLYYTKVKMGTPPKEFNVQIDTGSDILWVNCNTCSNCPQSSQLGIELNFFDTVGSSTAALIPCSDPICTSRVQGAAAECSPRVNQCSYTFQYGDGSGTSXGYYVSDAMYFSLIMGAASAVNSSATIVFG

SEQ ID NO: 211042 - protein, 42 aa, Glycine max
  Clone ID: PAT_MRT3847_32598C.1.pep
LHLGASKHTYKPFQAKAHSPKIHIHITSWLLLILSTEKAAHH

SEQ ID NO: 211043 - protein, 59 aa, Glycine max
  Clone ID: PAT_MRT3847_32599C.1.pep
ERRVITRKKGKEKMPCLYISTNINLDGVNIDPIFSQATTAVSTIIGKPEKVCHSILFSL

SEQ ID NO: 211044 - protein, 204 aa, Glycine max
  Clone ID: PAT_MRT3847_3259C.1.pep
NGIGIVKLMGRHSGFISMYATLASRDVDLLIPESPFYLDGPGGLFEFIRKRLAENGHMVIVIAEGAGHELISESLSATNKQDASGNKLFLDVGLWLSQKIKDHFTKSRKMDITLKYIDPTYMIRAVPSIASDNVYCTLLAQSAVHGAMAGYTGFAAGAVNGKHAYIPFYRINEIEKKVVITDRMWARLLSSTNQPSFLKPLSSH

SEQ ID NO: 211045 - protein, 86 aa, Glycine max
  Clone ID: PAT_MRT3847_325C.1.pep
PFSDREQLVRKGVGCFQGPQGDLSPQDTRAFLGSGVFRLLTSLGGFALSGRRAGFLLPWLQRKPCMGLQRLLTTTGLFLLRHMPWL

SEQ ID NO: 211046 - protein, 67 aa, Glycine max
  Clone ID: PAT_MRT3847_32600C.1.pep
NPPHYIILYEPKWTTVFWLNTTSLFCTMIEKTTFGSLDIAFVWLRILFMTCQKFPIEKKKKQNKKKT

SEQ ID NO: 211047 - protein, 106 aa, Glycine max
  unsure (1)..(106): unsure at all Xaa locations
  Clone ID: PAT_MRT3847_32601C.1.pep
KNQHNEDMIEFSRYSKHSGTVQRKADKIPEYGHKKQELKGEETMRCLKKINAVRLEARVTQGEQINQLAKDKILKCSKDFGTTKTKKVEEIYKCDNTXIEVMQERT

SEQ ID NO: 211048 - protein, 93 aa, Glycine max
  Clone ID: PAT_MRT3847_32602C.1.pep
LTFMLFLVPRMGWSIVQAEMDLQVSTTKKAVQPEKGLNNASLNGMHKELMRLPRMIDIKKCCRMIELTQGCYDMTCWLTKQKVLSKGTCKQVD

SEQ ID NO: 211049 - protein, 405 aa, Glycine max
  unsure (1)..(405): unsure at all Xaa locations
  Clone ID: PAT_MRT3847_32603C.1.pep
VATVVRIRSSLSFATHTFFNEHAFIDVQVPIITSTDSEGFSNMLKVNTLEQKAEKEKLDTIYETEGVSLEHVKAAAKEKSNIIEHLKRTESNREALAAAVQDLRKTNELASQMEAREKRKLGASFKDDDKVDSSKEFFPFQTYLTVSGRLHLESYACALGNVYSFGPRFLADKTDSAKHAAEMWMVEVEMAFSLLKDSMNCANDFFKYLCNWVLIHCSEEMKFVAKRIDNTCVNRLQQIILGSPVMMTYHEAIDVLRKXSTAEGSKFETNFESGFALTSEHLSYLTDTIYQKPVVIYNYPKEAKPFYARQNDDGTVAAFDLVVPKLGTIISGSQNEERLNMISSRIDELGLPREKYEWYLDLRRNGTVKNSGFTLRFDLMVLFATGLGNVRDVIPFPRSYGKANN

SEQ ID NO: 211050 - protein, 62 aa, Glycine max
  Clone ID: PAT_MRT3847_32604C.1.pep
SMDTSKITLYTYRVCTCIGYLMSTRGYVQGMTKKNFQKNNFGTSLGCIWILFRYVSSYKKNN

SEQ ID NO: 211051 - protein, 161 aa, Glycine max
  Clone ID: PAT_MRT3847_32605C.1.pep
IALTLRFAFQSHLHTYLYPHSTISIHVSVLSSNGSVLAAAVNACTLALVDAGIPMPGLLCGCTAGMSGSASTPRDPMNDTLDPLLDVSLPEEQELPFLTVATTSAPAVMTDGDEDDMKVSMLTMDSKVHYSYIETKLPVGVDGCKQVHHILDSVIKGSNRR

SEQ ID NO: 211052 - protein, 51 aa, Glycine max
  Clone ID: PAT_MRT3847_32606C.1.pep
RRTQANSYCCASLLGLGFQRMVPDFQPFVIKSFFNLNRSTLSMFRIEHYGF

SEQ ID NO: 211053 - protein, 133 aa, Glycine max
  Clone ID: PAT_MRT3847_32607C.1.pep
FNSTALTPEREMEQDYLLDFEDYFPSMIARMGAEGFIGELCNGFRLLMDVNKGLITFESLKLNCYLLGLDVMDDELACMLMEGDLDGDGALSQMEFCILMFRLSSCLCTPHGGGGGDGGSGGSGGDPMLMNVM

SEQ ID NO: 211054 - protein, 390 aa, Glycine max
  Clone ID: PAT_MRT3847_32608C.1.pep
METFLFTSESVNEGHPDKICDQVSDAILDACLEQDPESKVACETCTKTNMVMVFGEITTKAKVNYEKIVRDTCRGIGFVSADVGLDADKCNVLVNIEQQSPDIAQGVHGHLTKKPEEIGAGDQGHMFGYATDETPELMPLTHVLATKLGAKLTEVRKNKTCPWLRPDGKTQVTVEYRNDGGAMVPIRVHTVLISTQHDETVTNDQIAKDLKEHVIKPVIPAEYLDDNTIFHLNPSGRFVIGGPHGDAGLTGRKIIIDTYGGWGAHGGGAFSGKDPTKVDRSGAYIVRQAAKSVVASGLARRCIVQVSYAIGVPDPLSVFVDTYKTGKIPDSDILALIKEHFDFRPGMISINLDLMRGGNFRYQKTAAYGHFGRDDPDFTWETVKILKPSA

SEQ ID NO: 211055 - protein, 69 aa, Glycine max
  Clone ID: PAT_MRT3847_32609C.1.pep
GQVGHPIWPLWPQRPKWSYDGSKKTAVKGVGRRTVVWLGGKRPRTFLPLFFLHMGLMDRGSNLTMSVSC

SEQ ID NO: 211056 - protein, 279 aa, Glycine max
  unsure (1)..(279): unsure at all Xaa locations
  Clone ID: PAT_MRT3847_3260C.1.pep
SSTQLILLFLTKLLSKNSSGDSISTMSNSEHNIITGHAGYVLEDVPHLSDYIPHLTTYPNPLQDNPSYSVVKEHSVDVDDTIAQKAIVHKNSPRETHFRRAGPRQKVYFESEDVYACIVTCGGLCPGVNTVIREIVCGLYHMYGVHKVLGIEGGYRGFYSCNTIPLTPKVVNDIHKRGGTILGTSQGEGGNDTLKIVDSIQDRGINQVYILGGDGTQRGASVIFEEIRRRGLKGSVVGIPESVDNDIPVIDKSXFXFDTAGEEAQRAINAAHVEAESTE

SEQ ID NO: 211057 - protein, 81 aa, Glycine max
  Clone ID: PAT_MRT3847_32610C.1.pep
YCHEVRETTAFMVPMVAGEGTKTQALAICPSNTFGMNHPMLHPLMGVDSGTNPVCHFLGSQALLWGPHLSVGPAYQTNNGA

SEQ ID NO: 211058 - protein, 52 aa, Glycine max
  Clone ID: PAT_MRT3847_32611C.1.pep
ENFDFRPGMISINLDLMRGGNFRYQKTAAYGHFGRDDPDFTWETVKILKPSA

SEQ ID NO: 211059 - protein, 110 aa, Glycine max
  unsure (1)..(110): unsure at all Xaa locations
  Clone ID: PAT_MRT3847_32612C.1.pep
LCSIKMADESIPKEAAYHIIHDKXMLDGNPWXNQASFVTTRMEPECDKLIMAAINKNQGNFYYYNGNTSLCTTHEPTRRKACRVPHANSERDLGECIVCVQHAINWMDWI

SEQ ID NO: 211060 - protein, 110 aa, Glycine max
  Clone ID: PAT_MRT3847_32613C.1.pep
NNFFAFFLLLFITGGDAEYDHGPKYPESEHEKHGPCGKFSTLRILTHKLRHCEKAARDVRAPVSSQCCKDLVNVSIPCLYDVFSSDAFKKVGVDPKIAITIPHRCHFAKP

SEQ ID NO: 211061 - protein, 50 aa, Glycine max
  Clone ID: PAT_MRT3847_32614C.1.pep
YNLYCYLHNSDYRFSWNNKGIKMKFMREKKKTYPTHNQRLAPSLRDLPHS

SEQ ID NO: 211062 - protein, 48 aa, Glycine max
  Clone ID: PAT_MRT3847_32615C.1.pep
LPTPTHTCAKAIALLFNGSKMPSYKWKNWLILKYFTNILTSLQQYILS

SEQ ID NO: 211063 - protein, 126 aa, Glycine max
  Clone ID: PAT_MRT3847_32616C.1.pep
SRSRAAALSSFLTNANSAEEVQAKQGWPCPEAPPTCRNFILTNERDDCLTQTPWERRARYCLPSLPSPLQRGSPRLMSLHSLVRTTLALTLRRETPSLCPTTSRQLVPAHAFLSWTSWPTGSHYYS

SEQ ID NO: 211064 - protein, 114 aa, Glycine max
  Clone ID: PAT_MRT3847_32617C.1.pep
NGSAPTSHFITSLGNGSLTGSKMTNSSSSSQLAKESPLMDEISSIGRSQRQIMHQLDNLNNLLRGSLGEKSHPTRTNSRKSIDMSSDSVGARVMVVATVGCLGIFLMKGFLNKK

SEQ ID NO: 211065 - protein, 41 aa, Glycine max
  Clone ID: PAT_MRT3847_32618C.1.pep
EQTFIMYTPDGVKRGFMAKIISRFERKGLNLRELNSVTVDR

SEQ ID NO: 211066 - protein, 98 aa, Glycine max
  Clone ID: PAT_MRT3847_32619C.1.pep
SPQFRSSNRRQIPRAQVGSSRARPRISRRGFVLRPPKLLAESWWLLGGSAVVPYRPAAVVAARRGLSSIDDLEKVHGVVLSLCMHLQQSSKGLIIECA

SEQ ID NO: 211067 - protein, 447 aa, Glycine max
  unsure (1)..(447): unsure at all Xaa locations
  Clone ID: PAT_MRT3847_3261C.1.pep
VLASLHHLSNYMTNLTTXLNRLQDFPCYSVLEEHSVDVHDTIAVVVHKNSPRETHFRRAGPRQKVYFESEDVYACIVTCGGLCPGVNTVIREIVCGLYHMYGVHKVLGIEGGYRGFYSCNTIPLTPKVVNDIHKRGGTILGTSQGEGGNDTLKIVDSIQDRGINQVYILGGDGTQRGASVIFEEIRRRGLKVSVVGIPESVDNDIPVIDKSFGFDTAVEEAQRAINAAHVEAESTENGIGVVKLMGRHSGFISMYATLASRDVDCCLIPESPFYLEGPGGLFEFIRKRLAENGHMVIVISEGAGHELISESLSATNKQEASGNKLLQDVGLWLSQKIKDHFTKSQKMDITLKYIDPTYMIRAVPSIASDNVHCTLLAQSAVHGAMAGYTGFAVGTVNGKHAYIPFYRINEIEKKVVITDRMWARLLSSTNQPSFLNPKDITTHQTGN

SEQ ID NO: 211068 - protein, 267 aa, Glycine max
  Clone ID: PAT_MRT3847_32620C.1.pep
NQPKKEKWQVYQILQYVELYQRENRLKPMPIILCGDWNGSKRGHVYKFLRSQGFVSSYDIANQYSDSYADSHKWVSHRNHRGNICGVDFIWLCNPNQARKPLKTSWAEAVFSILKFQLRKASLSEDDAFAFLKGDNYADSVTYFSFSEALRQVKLIGVPYGLRFQQLQDLWNQADADGNGVIDFEEFKQKIWNSTCPEHVLENLNGCTEDCNTEQEQEAIGFKVKNAMLYPREVEKGLWPEDYSLSDHARLTAVFSPARMRCSASQN

SEQ ID NO: 211069 - protein, 36 aa, Glycine max
  Clone ID: PAT_MRT3847_32621C.1.pep
THPPLISLLFPFKSPTHLYLSSLILHLPSFNHSFQY

SEQ ID NO: 211070 - protein, 92 aa, Glycine max
  Clone ID: PAT_MRT3847_32622C.1.pep
LLNKVVIIDFALQQKIWNSTCPEHVLENLNGCTEDCNTEQEQEAIGFKVKNAMLYPREVEKGLWPEDYSLSDHARLTAVFSPARMRCSASQN

SEQ ID NO: 211071 - protein, 300 aa, Glycine max
  unsure (1)..(300): unsure at all Xaa locations
  Clone ID: PAT_MRT3847_32623C.1.pep
LIVNTHLLFPRDSSLGVLRLNHVDQILQYVESYHRENRLKPMPIILCGVDFMFYLMXTDWNGSKRGHVYKFLTSHGWVSSYDIANRYSDSHAHAHKWVSHRNXRGNICGVDFIWLCNPNQARKPLKTSWAEAVFSILKFQLRKASVSEDDAFTFLKGDNYADSVTYFSFSEALRQVKLVGVPYGLCFQQLQDLWNQADVDGNGVIDFEEFKQKIWNSTCPEHVLENVNGCMEDGNTEQEQEAIGFKVKNAMLYPREVEKGLWPEDYSLSDHATHSCVFNSKDDVPGVQLNVLHATNSRLH

SEQ ID NO: 211072 - protein, 63 aa, Glycine max
  Clone ID: PAT_MRT3847_32624C.1.pep
RYISYYDLRVYRTSSPYGSYKDIYETTRCVFANGNLKGYHLPKKRAELGLGLIRVMAVPWEKS

SEQ ID NO: 211073 - protein, 184 aa, Glycine max
  Clone ID: PAT_MRT3847_32625C.1.pep
MVVAGGAKFNLRRGNGSSHNVVNGYSSDGDLCRISKSGCFSSVAEVDRDPSCVSFTTFNILAPIYKRIDPQNQGLRESDFRAFWLARNERILDCLLSESSSIMCLQEFWVGNEELVNMYEERLGDAGYNLFKLARTNNRGDGLLTAIRKECLRVMDYKELLLNDCGDRVAQLLHVSHTHSIFSC

SEQ ID NO: 211074 - protein, 65 aa, Glycine max
  Clone ID: PAT_MRT3847_32626C.1.pep
LFGFFRWRSKTVSSASHFLLICHQQCLSFLSFSHMQYRDRISRDPRYSSCCSSVALLIQCSWLPS

SEQ ID NO: 211075 - protein, 52 aa, Glycine max
  Clone ID: PAT_MRT3847_32627C.1.pep
TLAKGAGQSANDYPTQTAMNGDSKGTDKMPSGTDCFPTECQTSIALSFRPVA

SEQ ID NO: 211076 - protein, 215 aa, Glycine max
  unsure (1)..(215): unsure at all Xaa locations
  Clone ID: PAT_MRT3847_32628C.1.pep
SILNVLLEVGMTPSLPKIFLPGPPEALTVLLDGCVVGCIASSEVEKVVAHIRELKVSSVAVIPDDMEVGYVPLSMGGAYPGLYLCTSPSRFVRPVRNISIPSNGSENIEFIGPFEQVFMEIRCPDGGDGGRKSSFPATHEEIHPTVMLSVVANLTPWSDHNQSPRNMYQCQMAKQTMAFSSQTIQHXPDQKLYHLQTPQTPIVRTSTYTKYNIDE

SEQ ID NO: 211077 - protein, 57 aa, Glycine max
  Clone ID: PAT_MRT3847_32629C.1.pep
SLAGTLRHGRSNRCLTQSRSILVSRETRTYNSTGAGLRRIPRFKIAKVPHRGFLSLS

SEQ ID NO: 211078 - protein, 263 aa, Glycine max
  unsure (1)..(263): unsure at all Xaa locations
  Clone ID: PAT_MRT3847_3262C.1.pep
MLGATRRVVGFIPRRLRSVRQVHGDGDGEEALRFHKSRGQHILINPRILDTIVRRSAINPTDTVLEIGPGTGNLTLKLLEAAHKVVAIEIDHRMVQVLEKRVLQRGLKDKLRVIERDAMRAPFPRFDLVVANIPYRISSPLVIKLVYGATPFRSATLLLQKEFARRLLTCPGDSXGFNRLSANVKLVADXVELVMDVSKRAFLPSPKVDSSVVIIRPKPQIPNVDLHEWRAFTRTCFSSNRNKTLGALFKLKGKVFELFKIFN

SEQ ID NO: 211079 - protein, 37 aa, Glycine max
  Clone ID: PAT_MRT3847_32630C.1.pep
SLYARFKYLFCALYNSTYINHSDYWREREKKSFLVFG

SEQ ID NO: 211080 - protein, 107 aa, Glycine max
  Clone ID: PAT_MRT3847_32631C.1.pep
SFWAPPLYSFPERAKSSPNPKGGGPSQRGPLKGGGGSFGIETRFQGPHFQKGSKVRPVLGALENRGPFFFFPPPVLVEPVFPGFPLVLFKKISNPGNPPKGGKGGCV

SEQ ID NO: 211081 - protein, 91 aa, Glycine max
  unsure (1)..(91): unsure at all Xaa locations
  Clone ID: PAT_MRT3847_32632C.1.pep
FNTIVQIEPHMNSGLXLLSTTTNGDFVHGKDLRLSIANXACAADGLTSSXTPTTLPECGLLYDSGTTAAYFVLMSYASDTARTSPIEATRP

SEQ ID NO: 211082 - protein, 48 aa, Glycine max
  Clone ID: PAT_MRT3847_32633C.1.pep
GAVCYIINNGKAKADLKLRSGGKNGLTPGPMGGGTREMGGEIGGWREL

SEQ ID NO: 211083 - protein, 35 aa, Glycine max
  Clone ID: PAT_MRT3847_32634C.1.pep
RKELNRWVRSVGEIMLIVCLVMGRMICVYDLYEWN

SEQ ID NO: 211084 - protein, 81 aa, Glycine max
  Clone ID: PAT_MRT3847_32635C.1.pep
KNPSAKKTTRKGSTKRGPPQSPTVPQQVEAPQKEDDSKRETQRRRPSTSHPKHPTPPPPGTPRGRQKQKIKKHPCPQAPTE

SEQ ID NO: 211085 - protein, 58 aa, Glycine max
  Clone ID: PAT_MRT3847_32636C.1.pep
HAYGHTFMRCLQCWLHSALHGILHVCHFIAHHLEVDMTHAQLGLTIMPNYATPNRHMV

SEQ ID NO: 211086 - protein, 131 aa, Glycine max
  unsure (1)..(131): unsure at all Xaa locations
  Clone ID: PAT_MRT3847_32637C.1.pep
PWCWFLPLRXFXXXAASLXPXPPLPXXGPXXXXXFXXXLPLXXXXXXXRPFALPXXXFPXPAXPAXFSGXFXXXXLXRXXXLWPFXXGGCLSPSAPLLPLRVSCWSPVFGSFFFFFPCWLSPSPLFPPPPP

SEQ ID NO: 211087 - protein, 80 aa, Glycine max
  Clone ID: PAT_MRT3847_32638C.1.pep
NKCMMDLVKKTHTFHISLTLIRGVGIFSYGQRILHKRVTHNLLYCFTSPPEEKNTHITAHAEDCAFSEDGAVACEQKKGA

SEQ ID NO: 211088 - protein, 84 aa, Glycine max
  Clone ID: PAT_MRT3847_32639C.1.pep
SIQITSTTHTHWRSLSIDTIVSINARHISCHSRQLQPSTVDSTCTDGTYARAAVPSGASNGIYDDLVISRSTICLPWNMCIKGC

SEQ ID NO: 211089 - protein, 563 aa, Glycine max
  Clone ID: PAT_MRT3847_3263C.1.pep
GTVGVSCYCHHKTNGFVDHRTLDEIGCKYFMSSLADQDMWNSEQSSLSLDVNIIQLGWWLQGDQCLCSDHANCTTLQSPMDGKPGFRCRCRDGFVGDGFLAGTGCRKASSCNPAKYISGRCGGTTRFIVLIGGFVVGVSLMVTLGSLCCFYRRRSKLRVTNSTKRRLTEATGKNSVPIYPYKDIEKATNSFSEKQRLGTGAYGTVYAGKLYNNEWVAIKRIKHRDTDSIEQVMNEIKLLSSVSHTNLVRLLGCSIEYGEQILVYEFMPNGTLSQHLQKERGSGLPWPIRLTIATETAQAIAHLHSAICPPIYHRDIKSSNILLDYNFRSKVADFGLSRLGMTEISHISTAPQGTPGYVDPQYHQDFHLSDKSDVYSLGVVLVEIITGLKVVDFSRPHNEVNLASLAADRIGKGLLNEIIDPFLEAEARSDAWTLSSIHKVAELAFRCIAFHRDMRPSMTEVASELEQLRLSRWTTLGDNNCATSTELSSCSSSSNECEKPLSIATRNFGAKGKGHLKLQTGPINLKSLQRPNSNSPVSVQDQDLWLSEQSSPSSSSFPSKSFD

SEQ ID NO: 211090 - protein, 181 aa, Glycine max
  Clone ID: PAT_MRT3847_32640C.1.pep
MATELLQIEPAELRFVFELKKQSSCLVQLANTTDHFIAFKVKTTSPKKYCVRPNIGIVKPNDKCDFTVTMQAQRMAPPDMLCKDKFLIQSTVVPFGTTEDDITSDMFSKDSGKYIEEKKLRVVLISPPSSPVLLPVNGDMKHDPSNEIYVQKDRVPSGVENIPPAFVKFLMRLKVWNQPKI

SEQ ID NO: 211091 - protein, 68 aa, Glycine max
  Clone ID: PAT_MRT3847_32641C.1.pep
IQIFKPKLGKCQIITKFFFLTQKLLWGGEIQPEYNGFSPLLEGRGGICSEIDAKRRNGVYCLNSFRGI

SEQ ID NO: 211092 - protein, 223 aa, Glycine max
  Clone ID: PAT_MRT3847_32642C.1.pep
MATHLLHIEPAELRFVFELKKQSSCLVQLANNTDHFLAFKVKTTSPKKYCVRPNIGIIKPNDKCDFTVTMQAQRMAPPDMLCKDKFLIQSTVVPVGTTEDDITSDMFAKDSGKFIEEKKLRVVLISPPSSPVLLPVNGDMKHDPSNEINVQKDRLPSGVENIPPPRKVSEEVKGLEPAQDMKEDRADEDIVPRQAENVGDMKPAKDDVQSNLANESEELKSKL

SEQ ID NO: 211093 - protein, 87 aa, Glycine max
  unsure (1)..(87): unsure at all Xaa locations
  Clone ID: PAT_MRT3847_32643C.1.pep
KSEDEYDEEDMKNLELXAQARXILCRAMNQDAFEKFSKDKTAKQTWDELXREMTXVDFPTQQQXPQMGNAASARHNRPNLEFIEATD

SEQ ID NO: 211094 - protein, 47 aa, Glycine max
  Clone ID: PAT_MRT3847_32644C.1.pep
SADVIDNSKCDGRTRFWCVCRNRIDMIYGGRLWCSSSLWQSCEHCTW

SEQ ID NO: 211095 - protein, 171 aa, Glycine max
  Clone ID: PAT_MRT3847_32645C.1.pep
MNNHKFIEFYDVRAAEAALRALNKIDISGKQIKLEPGHPSLMHQSRKGQEERDLGQSIIDNLSSRQKATVPSGVIGSGCFENGYNQRFQSTVRQPLNAFMDNAFIHVNSGIHNTVRGAPAGKVSSVCESSSFIDAMNFASGSRFHPHSLPEYRDSLANGSPYNFSSSISNM

SEQ ID NO: 211096 - protein, 119 aa, Glycine max
  unsure (1)..(119): unsure at all Xaa locations
  Clone ID: PAT_MRT3847_32646C.1.pep
YGCEKTTKGTLISWKCKKQDRVSKSSTEAEYRSMSSACSEIVWLRSILEELGFSQPNSTPLYANNASAIQIAANPMFHEXTKHIEVDCHYIKEVISLPYISTDLQAADIFTKAMTRQHH

SEQ ID NO: 211097 - protein, 54 aa, Glycine max
  unsure (1)..(54): unsure at all Xaa locations
  Clone ID: PAT_MRT3847_32647C.1.pep
GGRELEGMLVGEYGGYLGSLSRGFVEERXXGELPKDARMILMGWWNTRYRWPYP

SEQ ID NO: 211098 - protein, 56 aa, Glycine max
  Clone ID: PAT_MRT3847_32648C.1.pep
PRLMVITLHSTHNNGTAAKKMIDTSQKTIKAGQLDPLTDRDTGGAISTAMPGIETE

SEQ ID NO: 211099 - protein, 298 aa, Glycine max
  unsure (1)..(298): unsure at all Xaa locations
  Clone ID: PAT_MRT3847_32649C.1.pep
FGSRKLFDEYKIDYIIHGDDPXFVREKTTEDGTDAYAHAKKAGRYKQIKRTEGVSSTDIVGRMLLCVRERSITEKNHNHSSLQRQFSNGHSPKFEAGASAATASGTRISHFLPTSRRIVQFYKWERTTEDSRIVYIDGAFDLFHAGHVEILRLARDLGDFLLVGIHTDQTVSATRGSHRPIMNLHERSLSVLACRYVDEVIIGAPWEISKDMLTTFNISLVVHGTIAESNDFQKEECNPYAVPISMGIFKVLESPLDITTTTIIRRIVSNHEAYQNRNKKKGESEKRYYEGKSHVSEE

SEQ ID NO: 211100 - protein, 39 aa, Glycine max
  Clone ID: PAT_MRT3847_3264C.1.pep
NQLKYGLQKDHMGETGSALLDDSWISADSFLHHLCKVFH

SEQ ID NO: 211101 - protein, 45 aa, Glycine max
  Clone ID: PAT_MRT3847_32650C.1.pep
FVGFFFFVFLGLVFFLKKKKITKTQYRRTIWVTEHNCIRRSSMDH

SEQ ID NO: 211102 - protein, 446 aa, Glycine max
  Clone ID: PAT_MRT3847_32651C.1.pep
MVLNCKSKNILLLVLLAIAIETGWSSEEESSIISRFQQYLKINTAQPTPRYHEAADFLISQGKALSLESQSIEFVAGKPLVLLKWEGSNPNLPSILLYSHTDVVPSEHSKWTHHPFSAHLDSSGRIFSRGSQDMKCVGMQYLEALRLLKSHNFRPLRSLYLAFSPDEEIGGHDGAEKFADSSIFQSMNVGVVLDEGLASPDPHYRSFYAERSPWWLVIKAFGVPGHGAKLYDNSAMENLFKSIESIRRFRSSQFDLIKAGFKAEGDVVSVNMVFLKAGTPSPTGFVMNLQPSEAEAGFDIRVPPTADPESLERRIAEEWAPSSRNMSFTFKQKAHTRDKSGKPILTKTDSSNPWWALLENAVQKAGGKLGKPEVFPAATDSRYFRERGLPAIGFSPMANTPVLLHDHNEFLHKDEYLKGIKIYESIIKVYASLDDNGRDGASKDEL

SEQ ID NO: 211103 - protein, 53 aa, Glycine max
  Clone ID: PAT_MRT3847_32652C.1.pep
RFSSQVLSLYCYCKSSVFHILTCLGLESDLFARNLMFFEFKLFISLNSNIMLS

SEQ ID NO: 211104 - protein, 70 aa, Glycine max
  Clone ID: PAT_MRT3847_32653C.1.pep
LLAIGAISIFLTSSMLLSLSYVPFIFPGSRYIVKRIIAPTVMRQIISAPNESTKWRCASWCYNSEVSRIR

SEQ ID NO: 211105 - protein, 345 aa, Glycine max
  unsure (1)..(345): unsure at all Xaa locations
  Clone ID: PAT_MRT3847_32654C.1.pep
GSRAFFEEPIMLIAFVLLGRNLEQRAKIKAASDMTGLLSLLPPKARLLLNNGETEVGSVVEVPSDSLSVGDQIIVLPGDRXPADGVVRSGRSTVDESSFTGEPLPVTKVPGSEVAAGSINLNGTLTMEVQRPGSETAMANIVRLVEEAQSREAPVQRLADKVAGHFTYGVMATSAATFTFWSLYGTHILPPALYQGRAVSLALQLACSVLVVACPCALGLATPTAVLAGTSLGAKRGLLLRGGNIFFNFAMVDTVVFDKLWTLTAGRPVVTNTDIPHRIKNAISSQTEENASSEVEASRLAAAEETNSGHPVGKPTVDAAQAANPYNVKGKQGTSPEKPGSGAVG

SEQ ID NO: 211106 - protein, 153 aa, Glycine max
  unsure (1)..(153): unsure at all Xaa locations
  Clone ID: PAT_MRT3847_32655C.1.pep
XXXNXXXYXXSXXXXVXXXXXXXXCXXXCAXCXXSXXXXXXXAXXRXLXXXXXXXXXXXXXXXISXXXLXXXXXGHXXXVAXARPXXXXRXXHXXXXSXADXXXXXXXXXNXFXXKXVXXIXIXXXQXXXXVXXXXRAXSXXXXXXKGNLXFX

SEQ ID NO: 211107 - protein, 50 aa, Glycine max
  unsure (1)..(50): unsure at all Xaa locations
  Clone ID: PAT_MRT3847_32656C.1.pep
KTXXHLYPTIYXNDVAISPSSHFSFSLNQKLYTLSRDTKYFEPIKISMAY

SEQ ID NO: 211108 - protein, 51 aa, Glycine max
  Clone ID: PAT_MRT3847_32657C.1.pep
KSYDIHSDQFKSIQQNPIYRVTMTRSNEKESFSPSHFFHCHSLPSQVLKLI

SEQ ID NO: 211109 - protein, 45 aa, Glycine max
  Clone ID: PAT_MRT3847_32658C.1.pep
IDDAWVALLQLLPSLIQFHTSPFERFAGGGKVRKPTKNSIYLAPI

SEQ ID NO: 211110 - protein, 108 aa, Glycine max
  unsure (1)..(108): unsure at all Xaa locations
  Clone ID: PAT_MRT3847_32659C.1.pep
HAHASPEAGPSPSRTFGVPPTKTATRAQKPPNXPSPPTPKNGAPQKPTENSGRREDKGPGARPEKEGHKKTGEGQKTGARRQARREAADQQTGGQHPRPGGTQRPTAT

SEQ ID NO: 211111 - protein, 282 aa, Glycine max
  Clone ID: PAT_MRT3847_3265C.1.pep
MDPNTTETEWGSKAWRLLSEVRSQSPLIQCITNFVSMDIVANTLLSAGASPAMLHAAEELPDFTPRAAALVVNVGTLSPSWLPAMKAAARLCMTLATPWVLDPVAASASAFRLDACRELLKLRPTVVRGNASEIIALSQASAAAQPHTNAASKGVDSVHKSMDAVEAAKLLARTSGAIVAVSGATDIVTDGNRVVGAHNGVAMMQKITATGCSVTALIAAFVAVDKSHALDAAVSALAVFGVAGELGMKMAKGPASLRMHLIDELYGLDESALNSHVNVTSL

SEQ ID NO: 211112 - protein, 79 aa, Glycine max
  unsure (1)..(79): unsure at all Xaa locations
  Clone ID: PAT_MRT3847_32660C.1.pep
THANDFERGSEQRVFSVGSTKGNWFRKVFFHSPRDHPLLSERDPPXANAPFNLGQGTELKSMXPGPLSXXSSXXHTLAT

SEQ ID NO: 211113 - protein, 80 aa, Glycine max
  Clone ID: PAT_MRT3847_32661C.1.pep
KLNLNLRPKTTPKKLGFWKPKKQFLPPPKVLLKPLPLPILDMVEVMAQFMGQTMGYKLGRATKAAIIEIYKAGHRINVII

SEQ ID NO: 211114 - protein, 78 aa, Glycine max
  Clone ID: PAT_MRT3847_32662C.1.pep
SMFINVELTQGNICCIYILPQQQSLSANGEFNPKSSKLRTPTKRELLVSESQPKPVPFEDLSSIQLSCSKLSNHIKSE

SEQ ID NO: 211115 - protein, 57 aa, Glycine max
  Clone ID: PAT_MRT3847_32663C.1.pep
VVDAQYSTVRRSLAHSRVMVHFFPTYLLGKGGLFFFPKESGNRDVVVDLTSWESHGH

SEQ ID NO: 211116 - protein, 184 aa, Glycine max
  unsure (1)..(184): unsure at all Xaa locations
  Clone ID: PAT_MRT3847_32664C.1.pep
PSHQYLKKKKKKKKKKKKKKKKKKKKKKNPKKISPPPPFWNPNSPIRNGKFKIPPKKKGKNTMGCLFGPLKKMVFKKRETIPPAPKGNARVNLSFKKKPKGVKQQKEEKPPGFNNPIPNLNEGVIAVNAKGPVKINKSXRNAFPQPIQKKPGANWGAPKKQPLPQEENWGKFFPQQKKTPEPPS

SEQ ID NO: 211117 - protein, 94 aa, Glycine max
  unsure (1)..(94): unsure at all Xaa locations
  Clone ID: PAT_MRT3847_32665C.1.pep
VLLVCTLVTVARVGLTSFRREQSSCYDEEDYSNPCCDLCMCTRSMPPQCRCEDXGLNSCHSDCKIYMCTRSQPGQCRCLDTNDYCYKPCMSRDD

SEQ ID NO: 211118 - protein, 85 aa, Glycine max
  Clone ID: PAT_MRT3847_32666C.1.pep
VVAIAGSKVPACKGAYLVDPVGRIVSRFLADRGPYGINPLCVRWLHRGGCCRLRRRLRVLLWWIMAHGSRRHAGSWMLHHLAPQI

SEQ ID NO: 211119 - protein, 67 aa, Glycine max
  Clone ID: PAT_MRT3847_32667C.1.pep
KYNLCVRPSKHSYSSLMMKTMGTMSRGRLIHALCALKIVIFMSYDGISTRTMPGKPSLRCVLGVPCG

SEQ ID NO: 211120 - protein, 53 aa, Glycine max
  Clone ID: PAT_MRT3847_32668C.1.pep
LSKMTLPDPNTRGDLINRIAGMLNPINTAYLNRYDPLLYTVKSISTLMQYTDI

SEQ ID NO: 211121 - protein, 92 aa, Glycine max
  unsure (1)..(92): unsure at all Xaa locations
  Clone ID: PAT_MRT3847_32669C.1.pep
VVSTEEEQMEESRNRGTSADVSDNSANGFRNRDGHEXLEEQTPAGAKECATKAIQVVKQMCQGHNADGALKLCTGGPVSDDKQCAVFMPRSC

SEQ ID NO: 211122 - protein, 107 aa, Glycine max
  Clone ID: PAT_MRT3847_3266C.1.pep
KRKKLKKKKKPHLLKGGALSKNKAFSQKGCCKRLNRPLKVQGGICPREAFQGKLNLVKKQKSHPMDQGQCVLLKKVTFFLTNKKRSLKVASSGKSSPTVKKLKTRKR

SEQ ID NO: 211123 - protein, 138 aa, Glycine max
  unsure (1)..(138): unsure at all Xaa locations
  Clone ID: PAT_MRT3847_32670C.1.pep
ARALAQSARSAFGKIIIDTYGGWGAHGGXSFSRKDPSKVYRCGAYTVGRLYLWPLIALXKVVELVIYSIERDVPLLNIMVSYGTGKIPDMEILHIGKDXFDFIPGMNTINLDLKRGGHRFLITTVYGHFGRDDAILNL

SEQ ID NO: 211124 - protein, 45 aa, Glycine max
  Clone ID: PAT_MRT3847_32671C.1.pep
LKKDEEHEMLGLGCFNLTRFSHYPSTTSLPSSHSELLKVAPCKST

SEQ ID NO: 211125 - protein, 101 aa, Glycine max
  unsure (1)..(101): unsure at all Xaa locations
  Clone ID: PAT_MRT3847_32672C.1.pep
FGGNFKKPESNWNFPPPPGVPFLRDIRFFFFPPKRVKVFKKTLFPFPQGKIFQFVLFPGLSRVDFLVCFFYLVKKKKXKKXKKKXKXKKXKKXKKKKKKGK

SEQ ID NO: 211126 - protein, 170 aa, Glycine max
  Clone ID: PAT_MRT3847_32673C.1.pep
AQVAEKHHIPRISFHGFSCFCLHCLLMVHTSNICESITSESEYFTIPGIPGQIQATKEQIPMMISNSDEEMKHFGDQMRDAEMKSYGLIINTFEELEKAYVTDYKKVRNDKVWCIGPVSFCNKDDLDKAQRGDQASINEHHCLKWLDLQKSKSVVYVCFGSLCNLIPSNL

SEQ ID NO: 211127 - protein, 155 aa, Glycine max
  Clone ID: PAT_MRT3847_32674C.1.pep
NVQRFNKQALNTPPRSEDEQRDSSYSRLTSARESPMASNKDWTPRSHYKPSGSRGYYPSEPLDHGGGSGQYHAGPSMEPARDTTASRDEPSISNASEMETEWVEQDEPGVYITIRQLADGTRELRRVRFSRERFGEVNAKTWWEENRERIQAQYL

SEQ ID NO: 211128 - protein, 178 aa, Glycine max
  unsure (1)..(178): unsure at all Xaa locations
  Clone ID: PAT_MRT3847_32675C.1.pep
MAAELVGGALLSAFLQVAFEKLTSPQVLDFFHGRKLDEKLLSKMEIKLHSIQALADDAEQKQFRDPHVRNWLLKVKNVVLDAEDVLDEIQYEISKCQMEAESESQTSTGCSCKGPNFFKTSHASFFNKEIKSRIEQVLDSLEFLSSQKGDLGLKKASGGDYGSGSGSGMSQKXPSSSL

SEQ ID NO: 211129 - protein, 103 aa, Glycine max
  Clone ID: PAT_MRT3847_32676C.1.pep
VKGLIISSCSTKSSCDSGSLGNNSSGGIGRIDKDEESAPDIPMLLSCLELSMKKVGCASIIFQQNTTQLDFCYWYRTRLFVINLQIPKRIGIETREDEWNRFW

SEQ ID NO: 211130 - protein, 52 aa, Glycine max
  Clone ID: PAT_MRT3847_32677C.1.pep
RQKSVLFWVIRIQNGTERTTPGTLIHSIPCRGAHDPSMRHNPVLCSRGHNVT

SEQ ID NO: 211131 - protein, 130 aa, Glycine max
  unsure (1)..(130): unsure at all Xaa locations
  Clone ID: PAT_MRT3847_32678C.1.pep
VVFCWEIMEAHPTFSIERSKQLNNMGSLEHFLHPCNPSNTPRRDVPKLPQSQLDFVEQELMTRPFTHSSYLNSGGVVWSLCIASFSRFFYLLRYFTPYRIALHFPNSSSLRCLLRWXCYQLXFSFSLFFF

SEQ ID NO: 211132 - protein, 78 aa, Glycine max
  Clone ID: PAT_MRT3847_32679C.1.pep
RSFDKRLTSSARPIYALVSMTTKSAARKARLMCNASSASMGRMGFSRKSCRRIGGYWEPRSLVQDLSRVSAVIIIMNR

SEQ ID NO: 211133 - protein, 57 aa, Glycine max
  Clone ID: PAT_MRT3847_3267C.1.pep
GLFLKPNIESEKKAAVIHYSGQTKPWVQIGFEHLPPFWTKYVNYSNDNFFNCSWLES

SEQ ID NO: 211134 - protein, 44 aa, Glycine max
  Clone ID: PAT_MRT3847_32680C.1.pep
QGGVLQKVGVFMELTRFGGLSSFSRAETNSIQKLSCVPIVNLVY

SEQ ID NO: 211135 - protein, 41 aa, Glycine max
  Clone ID: PAT_MRT3847_32681C.1.pep
NPTIFFSISHLASTPVAEQLYFVTFNRGRRQVGNPTIFLSI

SEQ ID NO: 211136 - protein, 63 aa, Glycine max
  Clone ID: PAT_MRT3847_32682C.1.pep
MPSSQFWPPSGASGGGDFFPQFSSRRFFLSLKKKKKKKKKKKKKRKKEKKEKKRKKEKKETKK

SEQ ID NO: 211137 - protein, 74 aa, Glycine max
  Clone ID: PAT_MRT3847_32683C.1.pep
QIGHCDLKWCQITVPLRHLILGNFFCFLFLSIYVCSIKNVFFVHNLWYSSQLLHPTIYYPAIALEWSLCAAIQN

SEQ ID NO: 211138 - protein, 58 aa, Glycine max
  Clone ID: PAT_MRT3847_32684C.1.pep
IKRTFFLIRIPGFFKIIYSLRSRLFGYFRKKLVPKIDSFLLNPLLVVKYFFFFKTFLN

SEQ ID NO: 211139 - protein, 322 aa, Glycine max
  Clone ID: PAT_MRT3847_32685C.1.pep
MGFSKEQLLARLKELQVPFSQYEHPVVLTVDAQAQYVGHLGGGLSKNLFLKDKKSRLYIVSALAGTKVDLKVLSQRLGLGKGGLRMAPEEALGEVLQVPLGCVTPFALVNESARDVSLLLDQGFKSQKHCFFHPLSNDMSISLNACDLDKFLKSIGRNPSYVDLETNPTVGKDQPPDLAALVPSGSIVLPDQPQKQSSSQVPKDANHVSVDNGANTVSAKVVKPSSGGKNTKGTPAKNVNSSGSFADAGQFVEEILQKTSQLLLSEVKDENIKLHGEQLGTVLSDKLQKNLNAEFKSLAMIFKNTAYTEGFHAGTHYRPPLM

SEQ ID NO: 211140 - protein, 51 aa, Glycine max
  Clone ID: PAT_MRT3847_32686C.1.pep
ISTLRAQVLKLLHQTRSMVSKVTGSWDEAQRAVISQCKDLVITGVHKAIRC

SEQ ID NO: 211141 - protein, 133 aa, Glycine max
  unsure (1)..(133): unsure at all Xaa locations
  Clone ID: PAT_MRT3847_32687C.1.pep
VRFLHRKAVKDVNYKGYDIPCGWKVLPVIAAAHLVPXLFDQPQQFKIWGWQNNGSRGGSCSSKNTANNNFLPFGGGPRLCAGSELAKLEMAVFIHHLILNYHWELADTDQAFAYPFVDFPKGLPIRVQAHSLL

SEQ ID NO: 211142 - protein, 50 aa, Glycine max
  Clone ID: PAT_MRT3847_32688C.1.pep
LIHHNQITQATWHEIVVLLETKITSKEATSHIVYIQTLLFKAHASLIYST

SEQ ID NO: 211143 - protein, 77 aa, Glycine max
  Clone ID: PAT_MRT3847_32689C.1.pep
YHIEVISPVITWNEKKQEGRKKQKNAEGKLRISILIDLQESLQKLSLLVTSYTQIYRKNNRKLLNIVNIIIVTELTK

SEQ ID NO: 211144 - protein, 72 aa, Glycine max
  Clone ID: PAT_MRT3847_3268C.1.pep
RLNWVFCADSLRMVISVFICFKVDCKELVDRIYGPLAHFSEVGATISDCNNILLSFPNFTVKFVKRQPNMAA

SEQ ID NO: 211145 - protein, 36 aa, Glycine max
  Clone ID: PAT_MRT3847_32690C.1.pep
AIPHMQFNQHSQVFIGCNMLGPCYILCEIEKTHFFL

SEQ ID NO: 211146 - protein, 37 aa, Glycine max
  unsure (1)..(37): unsure at all Xaa locations
  Clone ID: PAT_MRT3847_32691C.1.pep
EENLPLSQDFWSDXVVLDDXXVLRRSSESXTTRGQXK

SEQ ID NO: 211147 - protein, 55 aa, Glycine max
  Clone ID: PAT_MRT3847_32692C.1.pep
EAEAPPPLRSFGFLPPEVAEGHEEQQGHGDGKPQVIKGLVLLGPMGTARAFWWAA

SEQ ID NO: 211148 - protein, 65 aa, Glycine max
  Clone ID: PAT_MRT3847_32693C.1.pep
PISSGNPPIIKKTPPYDIRVFYFFNIKIQASKKPLQNVTPGTYLFPKVQNKKSLFSMTGPIAPSA

SEQ ID NO: 211149 - protein, 74 aa, Glycine max
  Clone ID: PAT_MRT3847_32694C.1.pep
CRKLLIGDAQGAFISKIPESLKQDMIERLRSFSQEKKYNFQDLDPRMVRGDLVFYSTDFPFYKSSILFYRFSIL

SEQ ID NO: 211150 - protein, 49 aa, Glycine max
  unsure (1)..(49): unsure at all Xaa locations
  Clone ID: PAT_MRT3847_32695C.1.pep
FLSRQALFPIRALIIKPLLSTDTMLSYSNNSNXCPIKXARIVTVIIGYN

SEQ ID NO: 211151 - protein, 75 aa, Glycine max
  unsure (1)..(75): unsure at all Xaa locations
  Clone ID: PAT_MRT3847_32696C.1.pep
MGXYLPKXLXTLDLKESXALXXSXSEXAXSTXXRGRGSXXXSSXNQGPTLQXHCVXECXPCXQKXHXKWKXYQXE

SEQ ID NO: 211152 - protein, 76 aa, Glycine max
  unsure (1)..(76): unsure at all Xaa locations
  Clone ID: PAT_MRT3847_32697C.1.pep
ITXXLHXNFSNKSPXFAHXTIVXXXXATXXNPXSPLIXXPXLXHVXLXCSNXQKXXSFXQXXSSRIPSLRTXACDX

SEQ ID NO: 211153 - protein, 41 aa, Glycine max
  Clone ID: PAT_MRT3847_32698C.1.pep
SVNSDICGTYHIFSCALSYLSSVCVISHLPLACVAACGRTL

SEQ ID NO: 211154 - protein, 73 aa, Glycine max
  Clone ID: PAT_MRT3847_32699C.1.pep
SVLLVAVLVFVAWSVLLCGRGSVFRGLGAGWCCCLSWLAPCGGFSWLWPVVCLSSREFHLCPPFWGVCWFAKL

SEQ ID NO: 211155 - protein, 102 aa, Glycine max
  unsure (1)..(102): unsure at all Xaa locations
  Clone ID: PAT_MRT3847_3269C.1.pep
GQXTXSHPNTXHRARPLARQMIASIEEFLPLFCKSKESLDRYLIGRTKAVTAVTYSSHFCIVTQEIEQLVSENFKTIRDFKDRFLELQEHDLDRSTARKVLI

SEQ ID NO: 211156 - protein, 45 aa, Glycine max
  Clone ID: PAT_MRT3847_326C.1.pep
LAFLWNKKGLKSYYVSEFKKKNALENYHNFTQKNPLNNIVSDFQE

SEQ ID NO: 211157 - protein, 99 aa, Glycine max
  Clone ID: PAT_MRT3847_32700C.1.pep
LPKTIRFFSLPTIPIQLAILLFSIDTQHKLHTSNSSVFSFPTFRLLLIIILLFNIHGVSFDRCEKYPFFNAAEEVQESAYRMESTYQHGFINERCVQPM

SEQ ID NO: 211158 - protein, 342 aa, Glycine max
  Clone ID: PAT_MRT3847_32701C.1.pep
SIYVVELQVQVGTVVLLKIVEYIHMGNAPGSFRLLGNGTSSYHFQLGQLASISMKKGEEKWEDNGKRSQKGSSSYNVEGLTCTFSITKSTGINSDEELKIEMEDNTCREKINRHAIKQYSSGFTQIVGRAEAGLLVEDMICFHANSTKDVRGYVKGASMYVPYTRNTTNSSGGVTSTTICPYGSSGTRKGLYVTEWKKKKENEKPYMGTIAHYYANNGENLFTRGIDVGLSMMVKIRVSNGALFGVDELDFTVDGPVQHPSSAILYMIKEVTRTGMWTPRACPHCANIQRQRRWQFESDDSDNLPVAPGHGHGNSQNARNHGVFNGDGNGSNYERNIMFFIN

SEQ ID NO: 211159 - protein, 106 aa, Glycine max
  Clone ID: PAT_MRT3847_32702C.1.pep
HTWDWSWRLLVFLKMETILTIHYEKVGTVVLLKIVEYIHMGNVPGSFRILGNGASPYHFQLGKLASISMKEGERKWEDNGKRSQKWEVSYNVEGLTCTFFITKSTG

SEQ ID NO: 211160 - protein, 40 aa, Glycine max
  Clone ID: PAT_MRT3847_32703C.1.pep
FEKCILSVLLSHIAGGCIPINTKRGPILILMALSLYPIGL

SEQ ID NO: 211161 - protein, 154 aa, Glycine max
  Clone ID: PAT_MRT3847_32704C.1.pep
MVKAVAVLRGDSNIKGTVTFEQADESSNTTISWNITGHDANAERGMHVHAFGDNTNGCTSAGPHFNPHNKTHGAPEDEERHVGDLGNFKTDGQGNAQGSVTDKLIKLIGSESVIGRTIVVHAGTDDLGKGGHEESKKTGNAGARPACGVIGISN

SEQ ID NO: 211162 - protein, 86 aa, Glycine max
  Clone ID: PAT_MRT3847_32705C.1.pep
QRTPFLSFFKKKTGVSKTKNFLGPKNNGSQALCKVPPLIFKKGFFSKNFYFKFPPCRNHNFNLDLHQVHGLFWGPLNSPNKTHWWA

SEQ ID NO: 211163 - protein, 89 aa, Glycine max
  Clone ID: PAT_MRT3847_32706C.1.pep
LIPQPLPQVQKKLTPLGNPDLGLPLGPPQKPPGGGTHFVNPFKSLRHPKDWFGVLKGFCKIFYSLALKPFFLAPKMFYPFAPSPKKIIF

SEQ ID NO: 211164 - protein, 71 aa, Glycine max
  Clone ID: PAT_MRT3847_32707C.1.pep
AFCFASPPFPRFLRRKGAIILFLSWPQSKVQQQQQQQQFQRPGPLFQNFKRWFPQMPLLFQKPFGFSNKGL

SEQ ID NO: 211165 - protein, 163 aa, Glycine max
  unsure (1)..(163): unsure at all Xaa locations
  Clone ID: PAT_MRT3847_32708C.1.pep
MPMPMAASTSTSTSTSLSVVGTGLAFPRHPPAVFSSARFHTRLRSNNRFFLSSSLPSERRRHKAVCGGGLGLLRRNKSRGGHAFVVGEPSFLLPQHSCASCCCLARKRRSNLSTFVPXAFLDKSSFCLSNNKLNRSXVQIPRATVGPDEPHAASTTWPDXSAE

SEQ ID NO: 211166 - protein, 178 aa, Glycine max
  Clone ID: PAT_MRT3847_32709C.1.pep
MWWRSASFIMDRQRNEEADLKGDSSNPNPNPNISAYYETRAAHHGVVTSDWLAQAQAAIGPDPVPDPNPEPEPQLRPDPDKPFSVIDEFNSWRKQPHLAEAVAAIRALAAVIRSSKATTMMQLEIELKKASDFLKSWDTTSISLTAGCDLFMRYVTRTSALEYEDFNSAKSRLIERAE

SEQ ID NO: 211167 - protein, 46 aa, Glycine max
  unsure (1)..(46): unsure at all Xaa locations
  Clone ID: PAT_MRT3847_3270C.1.pep
GLLISSLKFWIYTTRATPYXXKWGKLVKLYSIIFINHVLRLMDFRS

SEQ ID NO: 211168 - protein, 67 aa, Glycine max
  Clone ID: PAT_MRT3847_32710C.1.pep
IFCSKNSQFWDKIDYTHCFWASKLDTNKQKSLQIQSQGKYKGNNGSFGGSIKESHPEHPHLGSYVAK

SEQ ID NO: 211169 - protein, 369 aa, Glycine max
  Clone ID: PAT_MRT3847_32711C.1.pep
MWWRSASFIMDRQQQQNQGDSSNPNISAYYETRAAHHGVVTSDWLAQAQAAIGPEPQPQPQLSPDPDKPFSVIDQFNSWRKQPHLAEAVAAIRALAAVIRSSQATTMMQLEIELKKASDSLKSWDTSSISLTAGCDLFMRYVTRTSALEYEDFNSAKSRLIERAEKFGEISYKARKVIAMLSQDFIFDGCTILVHGFSRVVFEVLKLAAQNNKLFRVFCTEGRPDRTGLRLSNELAKLDVSVKLLIDSAVAYTMDEVDMVFVGADGVVESGGIINMMGTYQIALVAHSMNKPVYVAAESYKFARLYPLDQKDLAPALRPIDFGVPIPSKVEVERSARDYTPPQYLTLLFTDLGVLTPSVVSDELIQLYL

SEQ ID NO: 211170 - protein, 69 aa, Glycine max
  Clone ID: PAT_MRT3847_32712C.1.pep
HQSKLLIINWEINLKDTIKIGYIIMNIRLKLWRRMIHEHAYPLSCTLSLMSKCHVQLTQTDDAKLNSLP

SEQ ID NO: 211171 - protein, 83 aa, Glycine max
  Clone ID: PAT_MRT3847_32713C.1.pep
GGFQVNPLFQGGFFPKNGFFQPRLKRSFFLSRVPKWGWGQRALKVFPPEAIANKVRLSPHRTNIKITKSFHGLKQDQNIKKKS

SEQ ID NO: 211172 - protein, 66 aa, Glycine max
  unsure (1)..(66): unsure at all Xaa locations
  Clone ID: PAT_MRT3847_32714C.1.pep
TGSQYFIWFLQFNASVLNQAELAVSDFSGXNGAGILSAASTVASTFLXVFVAEWGDKSFFSTIGEF

SEQ ID NO: 211173 - protein, 50 aa, Glycine max
  Clone ID: PAT_MRT3847_32715C.1.pep
YLFISFDVLCECMTINYREFTCKNLMKKIISKNGNFHCNIPKSPSGVVSH

SEQ ID NO: 211174 - protein, 65 aa, Glycine max
  Clone ID: PAT_MRT3847_32716C.1.pep
YSTITSLRKYVTLKKELKQKDKNCFSRYFNNHILFLQRVLLNGLQLTPKTLIVSSCRPRAESARG

SEQ ID NO: 211175 - protein, 189 aa, Glycine max
  Clone ID: PAT_MRT3847_32717C.1.pep
LIHSIRHEYVAALDSYMKDVDEPVHAFSFINRAFSQLTDNNHAAFRSAIILRIPELVELSREGAFHMVISHFRDESSRIITELHSHPRSLFLYLKTLIELHLFGTLDLSNLRKDDTMNPLNRKQVKDHPQGVKDYLENISNFPKYICENPIQVPDDLIELYLEVNFCTNAFARPKNNLIFFKFVVFAIY

SEQ ID NO: 211176 - protein, 69 aa, Glycine max
  Clone ID: PAT_MRT3847_32718C.1.pep
MSSTSPNLQKAIDLASKAAQEDKAGNYEEALQLYQHAVQYFLHVVKCEAIGYILFKNTKRKIYSVSFLN

SEQ ID NO: 211177 - protein, 71 aa, Glycine max
  Clone ID: PAT_MRT3847_32719C.1.pep
RTCVLLAWPLAISSNGIIFLFFSNVYSSILLPIYESNASDGPSLTLRQGKVVEKNDTDEEATDTENGRDSR

SEQ ID NO: 211178 - protein, 252 aa, Glycine max
  Clone ID: PAT_MRT3847_3271C.1.pep
MLHASNILCNGHPEKLVSSSSYGLLHDERNGHIIQRLVGEAVNSGHDIARDKGESSIISNILSMDFDTWDDSLTSPHNLAKLLGDNTDNQPGPLNKSSSWKGHSNNQSRFSFARQEESKIQMFDPHASYGVSHQRPNRTVFLNCAERDLYMDKLGIANGFSTSNFEEAENMVSGHSIASSNKFSAISRAQVSAPPGFSIPSRLPPPGFSFHERVEHAFDSISGNSLLDHSSLLRNSYQTPSTGNLGSAGDIE

SEQ ID NO: 211179 - protein, 203 aa, Glycine max
  unsure (1)..(203): unsure at all Xaa locations
  Clone ID: PAT_MRT3847_32720C.1.pep
MASSMISSPAXVTTXXTVPXXRHGCFHFHXXLKSMXLASPXRKDXNNDXXTSIASXRWXECXCMQXVWPTSWQERSXETLFLYLPDPXMNAXXLAKEXVEXYLLKGRXMDXPCLXNSSWSHGFVYXREHXNRSXRIXYDGRYWTMXESCLCXGCTLMLLXVLKXELQEAXDXHTPNGFIRIIGFDNVRQVQCISFIAYKPPGF

SEQ ID NO: 211180 - protein, 69 aa, Glycine max
  unsure (1)..(69): unsure at all Xaa locations
  Clone ID: PAT_MRT3847_32721C.1.pep
RQAAGSLGPDVESRTDALDNSIGAHVVFVRVAANPPGIQESDXLTPTDLLKLLEILNALDKPRWITITT

SEQ ID NO: 211181 - protein, 60 aa, Glycine max
  Clone ID: PAT_MRT3847_32722C.1.pep
VFRGWIRYCVHALPNSTYATLQEILLREYMIYSYHSSEQSSSSALSCSSFIFNICNFLYM

SEQ ID NO: 211182 - protein, 64 aa, Glycine max
  Clone ID: PAT_MRT3847_32723C.1.pep
SNHSKAFAMEKVGCCVMLCKTIEYPAYPHFSQYPLCLQCSTHLSLLNIWYLCLFVGEKQSRVEN

SEQ ID NO: 211183 - protein, 63 aa, Glycine max
  Clone ID: PAT_MRT3847_32724C.1.pep
FFFFFFFFFFFFFFFFFFFFFFFLKKKRETPGANWISRQISKQGGKWGPKIPHSFGTFGTNIQ

SEQ ID NO: 211184 - protein, 264 aa, Glycine max
  unsure (1)..(264): unsure at all Xaa locations
  Clone ID: PAT_MRT3847_32725C.1.pep
MAQRAQPALATTDVFQKGDIHWKQFNVETSTASSSPPKPLLIFTPTVPGLYPVILFCHGFCIRTSYYSKLLAHIVSHGFILVAPQLVYLGLLILANFSSSSICAPLDLYTTLFNNLKPENXIFRVLSLLFYLISNNXVRNDKKKTMLGPEQASSLFPPCAPNGVNHKEFFSECKPPSAYFVATDYGHMDMLDDETPGVIGTMMSKCMCKNGKKGPRDLMRRTVGGLVVAFLRAQLNEQWKDFDAILASPNLAPAKLDDVRYLPT

SEQ ID NO: 211185 - protein, 58 aa, Glycine max
  Clone ID: PAT_MRT3847_32726C.1.pep
IIHLDSIIFVGITLYKMVELEGFMLLLAPESREFLFTNVIHVDRGTRMKACHIMCHIP

SEQ ID NO: 211186 - protein, 58 aa, Glycine max
  Clone ID: PAT_MRT3847_32727C.1.pep
QRGKFPGLELLDVNDGDLFVPGEFSSNFPLKLEHHQSFVGGLNRNPGPMRAIDSIQER

SEQ ID NO: 211187 - protein, 72 aa, Glycine max
  Clone ID: PAT_MRT3847_32728C.1.pep
GSLSIHYADSGFPLCFFTSLSLFNSIVNPSVEVPSFTSSFTNRAKWLTLSRPPYEDEMASWERPRSVKTPIS

SEQ ID NO: 211188 - protein, 321 aa, Glycine max
  unsure (1)..(321): unsure at all Xaa locations
  Clone ID: PAT_MRT3847_32729C.1.pep
MALPPLCILLFLVFLLSATSTQQEEEFTEELLLKPLPDRKVLAHFHFQSDSPPLAAADESSSFDRHHHLFPKSISQLVQXKYHIKAMELSFTQGRWNYERWGGFDSISSYNAKPPGVELWAVFDVPLHQVDASWKNLTHSLSGLFCASINFLESSTSYSDPEWAFQSALGSLRYGTLPREAVCTENLTPWLKLLPCRDKAGLSSLMDRPSIYKSFYHSQQLHLTMSTDPSDGSRSGIIXEQTLTVVLQPNDQKAGMSHLSKTKIQPSWSLSSIFGRKISGRCVLAKLSNVYLHAERSLVNQLENLQKNTVKFAAMTQVLKI

SEQ ID NO: 211189 - protein, 808 aa, Glycine max
  unsure (1)..(808): unsure at all Xaa locations
  Clone ID: PAT_MRT3847_3272C.1.pep
PKRTTAGVVQQFPNNTCSVYITYSKEEEAIRCIQNVHGFVLEGRPLRACFGTTKYFHACLFDMPCSXPNGLYLQEISNLEVIFTKDEIIPAXLASHVQQITGAANNIQRQAGNVLPPPLDDCMDNSSGKPIVKNSSSTSVSIVRSSPPNGTSGRPIALSAVAWGTRATNCQPAADNLLCPNGLSGPKPNPISXAALPFSSDVACTIQASLNSDVTKRPLLIDGIRSMTPQIKDKXRPILSDKIEAXKMQSSGIRNWMSEVRLSVVKVNNLFSSLTFARDSGRDIFSATNTTSSIDITCQPLNFGPXRKHFHLPVNLSIPSSSPDNVLVKSMQSQELQYNTDKLKDLMIKNADSKAAALYNEVCNLKEQCDLSLDSQSQVVSANTEVEDDVTTFDNQRLKDPEVIGSYLPESASFLHVSNHSSPLLLQRGDPCNVISTSSYWFRHDASNEHHIGRLVSDAVNIGSDAVMDKGESSIISNILSMEFDAWDDSLASHESLTKLLGDNTDSQNGPLKKSSSRKVQSNNQSRFSFAWQEESKFQANVPPSSGATQPFPKNGSLIQDFVERDFSLNKLGFANGFPSNNLKESGNLGSGHFIASNNKLSAVSRAQISAPPGFSVPNRAPPPGFSSVERMGQAFDSLSGNSLLDPSFLLRNSYQTPSNGNIGGPGDVEFMDPAILAVSKGPEQFNYFENEARVQLLMQRSPSPQQDLRFSEIGNSFSQFGDSYGISSRLNQSQVSNLASFPQLSLQQSRNAVLSNGQLDGRNGNGLGVAELLRNERLGFNKFYRGYDDSKYRMPNSMDVFNRTFGI

SEQ ID NO: 211190 - protein, 48 aa, Glycine max
  Clone ID: PAT_MRT3847_32730C.1.pep
AVSSQIILAINGKHPYRECLIKNPYLHRPPVYVISRSPFPHWSIRLQT

SEQ ID NO: 211191 - protein, 228 aa, Glycine max
  Clone ID: PAT_MRT3847_32731C.1.pep
MTLSHFSAAIFISFLLLTLHHHAESTQPPYSCDSSSNSPYYPFCNTRLPISKRAQDLVSRLTLDEKLAQLVNTAPAIPRLGIPSYQWWSEALHGVADAGFGIRFNGTIKSATSFPQVILTAASFDPNLWYQISKTIGKEARAVYNAGQATGMTFWAPNINVFRDPRWGRGQETAGEDPLMNAKYGVAYVRGLQGDSFEGGKLGERLQASACCKHFTAYDLDHWKGLDR

SEQ ID NO: 211192 - protein, 233 aa, Glycine max
  Clone ID: PAT_MRT3847_32732C.1.pep
GGSEDRKGKELHIKTEDMLLKLQAKLVSPLDACNHIIQFFNYVDGVSDFPASAISSKDLSTSKANLAMDTTTSSLPQSTSLIQKYTYDMSYTRSNDLQQKDLKSSLLSEHKNESDFHLEALLGKGGGLESLESIVRIKEAEARMYQNKADEARREAEGFQKMIKTKAAQMEEEYAERIGKICLNEAEERRKNKFDELNVLQNSHYDYFNMKSRMQDEIHGLLKRMEATKHQRV

SEQ ID NO: 211193 - protein, 56 aa, Glycine max
  Clone ID: PAT_MRT3847_32733C.1.pep
GNNAHTSNGIHGMPIMLNANPTDMNTGMTLSIPNPHLVEIELPHCSYMNGYYMTTE

SEQ ID NO: 211194 - protein, 97 aa, Glycine max
  unsure (1)..(97): unsure at all Xaa locations
  Clone ID: PAT_MRT3847_32734C.1.pep
MEKENMLKTPPKVPIQPQTPEPECKTPAPVQQQDPNDHNNSSNELHKPVTPNRLRVPKAFKYPERYTSPIDLIMSPVTKGLLARTRRGGGAVLPPXW

SEQ ID NO: 211195 - protein, 162 aa, Glycine max
  unsure (1)..(162): unsure at all Xaa locations
  Clone ID: PAT_MRT3847_32735C.1.pep
LICGRTRGVGIPEITGISLACAMNSFFRGRASSDIHTICSHDCELWNPACTKAMTMSFNPIPCPDAWSMEFLKRTGFHSDIICVTGCTVTPMHDVQVTIDWIISSQEXVPRTYCXLITTKSFVLIRGRKTDFSPGTFRSXKRMPFSTGXGACAKNGNFINIP

SEQ ID NO: 211196 - protein, 42 aa, Glycine max
  Clone ID: PAT_MRT3847_32736C.1.pep
LAMFSAGIILLSVCHVALILALSRVLNRVATLYSCFYCFSNI

SEQ ID NO: 211197 - protein, 58 aa, Glycine max
  Clone ID: PAT_MRT3847_32737C.1.pep
KNLGHLRVIEISFWELKVPVEFGIAVQSQIRQIPFLFTNSTFYGFHNYWKSFPKGGRE

SEQ ID NO: 211198 - protein, 55 aa, Glycine max
  Clone ID: PAT_MRT3847_32738C.1.pep
VNSNTYVPCIWLLPPTSCLVLLARGEKQLGIFFFREHGIIWLNQFQLIKIYHLTS

SEQ ID NO: 211199 - protein, 35 aa, Glycine max
  Clone ID: PAT_MRT3847_32739C.1.pep
LEPICIWCCQTDAIRETNMLSYGSISSFVGSFSGS

SEQ ID NO: 211200 - protein, 49 aa, Glycine max
  Clone ID: PAT_MRT3847_3273C.1.pep
LDGRNGNGLGVAELLRNERLGFNKFYRGYDDSKYRMPNSMDVFNRTFGI

SEQ ID NO: 211201 - protein, 46 aa, Glycine max
  unsure (1)..(46): unsure at all Xaa locations
  Clone ID: PAT_MRT3847_32740C.1.pep
MQNHRXKQQXXQQHQALMXQALLQQQXXYHPGLLAPPQIEPYPSGN

SEQ ID NO: 211202 - protein, 108 aa, Glycine max
  unsure (1)..(108): unsure at all Xaa locations
  Clone ID: PAT_MRT3847_32741C.1.pep
TCAKXLMDYIMLNAPAKVYNSMTYISVEISPSLAEVQRETVGEVRSHIPKFRVECRDAADRIGWGQVEQQPCWVIMLEVLDNLPHDLIYAENQISSWMEVWVERQHDQ

SEQ ID NO: 211203 - protein, 82 aa, Glycine max
  Clone ID: PAT_MRT3847_32742C.1.pep
ASSAYSFYFHTHPVYHSPLYLSQSNPITESKQLHRDTTCTGLLAFTTTNPSCPFSLNEKPVTPIELKTYLKSLMSTHTLSLH

SEQ ID NO: 211204 - protein, 63 aa, Glycine max
  Clone ID: PAT_MRT3847_32743C.1.pep
RSIAMRHALSRGNSKLVDGAFFRTRTNSPSYQYCCVEYTLPNILHTMPMNHTWLFVGSLHEPH

SEQ ID NO: 211205 - protein, 124 aa, Glycine max
  Clone ID: PAT_MRT3847_32744C.1.pep
SPLGAACIASRRNNTHFSTPVTSPYRHLDRITMAVNRAFIKKWLPTETWPIFGIVGIACGGAGYYLYKLAMGPEVVWDRKGDWRPWDKVKHDQNLKFLSYNPDFWAKRKEEAAAREKQRMVDAI

SEQ ID NO: 211206 - protein, 72 aa, Glycine max
  Clone ID: PAT_MRT3847_32745C.1.pep
KLNSNFGQPFSWIVKWTCSHQIGLQSNRPIILIIRSMKVLLPKDTETSTARARLSAQDTTPGHAFSIDVFML

SEQ ID NO: 211207 - protein, 66 aa, Glycine max
  Clone ID: PAT_MRT3847_32746C.1.pep
KLVGVIVLCFSRTEVFVIYYFRMYLSLVLLGFLHGLVFLPVVLSIFGPPSRCSIIEQEEDRSSTSS

SEQ ID NO: 211208 - protein, 110 aa, Glycine max
  Clone ID: PAT_MRT3847_32747C.1.pep
FPLLQHLLKTPKMGKTEKKQLLKQKELPLHPNQRMPPPITLPQIFPRRKLPQPLWSNFLQNFDFQTSAFPVIFLVSHFPLQFFMDPFVGQLDFKAFLVCNLVSSLRVWIN

SEQ ID NO: 211209 - protein, 78 aa, Glycine max
  unsure (1)..(78): unsure at all Xaa locations
  Clone ID: PAT_MRT3847_32748C.1.pep
GSKTHELHEHEPXLTRRRVYYCDACNEEGHIWSYYCGDCDFDLHPKCALEKEDKEGSKDDAKEEKSKDEWVGDGEVSN

SEQ ID NO: 211210 - protein, 570 aa, Glycine max
  Clone ID: PAT_MRT3847_32749C.1.pep
MADSADVTHDVVSLLSSPQRDFLLRNNGDQVKIDSLKGKKLGLYFSASWCGPCQTFTPTLVDVYNEVAKKGDFQIVFITADEDDESFNGYFSKMPWLAIPFSDSDTRSRLDELFHVRGIPHLALLDEAGNVVTEDGVDVIREYGVEGYPFTSARIQELRDQEEEARRNQSVRSLLVSPSRDFVISSDGKKTLVSELEGKTVGLYFCVKSFGSCSDFTPKLVEVYEKLKAQGENFEVVLIPLDDDEESFKELLESVPWLSLPFKDKICGKLARYFELSTLPTLVIIGPDGKTLHSNVAEAIEDHGVAAYPFTPEKFAELDEILKAKEAAQTLESILVSDDQDFVIGKDGVKIPVSELKGKVVLLYFSAHWCPPCRAFLPKLIDAYNKIKEKGNALEVVFISSDRDQTSFDEFFAGMPWLALPFGDSRKKFLSRKFRVSGIPMLVAIASSGQTLTTKARDLVSLYGADAYPFTEERIKEIETEQEETAKGWPEKLKHELHEHELVLTRRRVYYCDACNEEGHIWSYYCGDCDFDLHPKCALEKEDKEGSKDDAKEEKSKDEWVCDGEVCKKA

SEQ ID NO: 211211 - protein, 147 aa, Glycine max
  unsure (1)..(147): unsure at all Xaa locations
  Clone ID: PAT_MRT3847_3274C.1.pep
PPTAPFESTPHTDEPRAEEWLPAHATHYAATDAVGGXCGYGDLLNGGYGMATAALSEALFGRGQICGACFEVRCREEDSDFDRRWCISGTTVAVTATNFCAPNYGSDAESVAGHCNPPKQHLVLPIEAFEKIAIWKTGTGNMPVEYR

SEQ ID NO: 211212 - protein, 55 aa, Glycine max
  Clone ID: PAT_MRT3847_32750C.1.pep
RHAMPCKPMKMRGWAEPQGAMNQQLCNPQGRGMTDHASQDLRYTAKRRHRAWCLA

SEQ ID NO: 211213 - protein, 123 aa, Glycine max
  Clone ID: PAT_MRT3847_32751C.1.pep
SYTQQSLSVSARASLAAYKPRPMLFTWRRYCYCSTAWGSFFVFCFGFCFVYLICLVTPKIIGPLCSLFKVVLNLIPVYRYHASEFYTNFVLSVAFYVSLVYLLLITVSYYQHRPPPPPPSRRH

SEQ ID NO: 211214 - protein, 82 aa, Glycine max
  Clone ID: PAT_MRT3847_32752C.1.pep
ESYSLCPGNPPPLPPGKPPPPLGEPPTSPGKPPTPPGKPPRPGGVPPTSPGKPPTPPRKPPRPGGEPPRPRGVPPPLGKVPT

SEQ ID NO: 211215 - protein, 99 aa, Glycine max
  unsure (1)..(99): unsure at all Xaa locations
  Clone ID: PAT_MRT3847_32753C.1.pep
TRANKYLITNNEKQISSSMISSPXVSTVNRAGCPIVSPFTGLNFIACFPTMNTNNYISFISINRVRVQFIPVLPPLCKKKFDTLFYLPYLDYSQFSNEI

SEQ ID NO: 211216 - protein, 98 aa, Glycine max
  Clone ID: PAT_MRT3847_32754C.1.pep
MEGQQIWSQSQAQYLETELTKMLPNVVLQMSEVNEQCIYKVPQKFREGNPKAYTPQVVSIGPFHKPRDPNGENNTLVRMEELKLEYLLRFLNRSKQFC

SEQ ID NO: 211217 - protein, 74 aa, Glycine max
  Clone ID: PAT_MRT3847_32755C.1.pep
MGELTQAEVYSPRTQQVWRALLSWLAFFFQIFFQIIRALGHYPLLSFSSSSNAASSSNASFKPLPSVELSEHDS

SEQ ID NO: 211218 - protein, 130 aa, Glycine max
  Clone ID: PAT_MRT3847_32756C.1.pep
CRQSIVGRVLGRLKVQLRLAHATQSEYGLIVAHATKSLADLHTAVVLGLLDGLGEMPLVLPTPAVLALGALVASGLTQERVIVGSKDHCALAALEHLLGTERAQPIGLKPWEPTFPLAGLFRPIASVIGA

SEQ ID NO: 211219 - protein, 58 aa, Glycine max
  Clone ID: PAT_MRT3847_32757C.1.pep
IPPNLKIPPIKLPITPQSPHIIPSLQHGTAHGSNKHYTKSTPFTINSFPDGSKKRTRG

SEQ ID NO: 211220 - protein, 545 aa, Glycine max
  Clone ID: PAT_MRT3847_32758C.1.pep
MKMWLGKKIIFLQTLLCFSIVGTNSHGLKEYHFVLKEAHYRRLCSSKPILTVNGQFPGPTVRAYYGETIYVNVHNKGKYNITLHWHGVKQPRNPWSDGPEYITQCPIKPGGKFRQMLIFSIEEGTIWWHAHSDWARATVHGAIYIYPRKGESYPFPTPDEEVPIVLGEWWKSDVSDVYEEFLRNGGSPNESDAITINGQPGDLYPCSKSETFKLNVHYGKTYHLRMVNAAMNLVLFFAVSKHNLTVVGVDSAYSKPLTRDYICIAPGQTADVLLHANQEPNDYYMAARAYSSALGVAFNNGITTARIHYHENHAPNKSPSLPYLPLYNDTKAVFDYYVSIKGLNEADPYQVPTNITTHMLTTLSINTFPCPENQTCAGPNGTRLASSVNNISFENPTIDILEAYYYHIKGVYHKGLPKFPPLKFDFNAEYLPLELQIPKKGTKVAVIKFGSTVELVFQGTNLVTGIDHPMHLHGTSFFAVGYGFGNFDKHKDRKTYNLIDPPLMNTILVPKNGWASIRYRASNPGMWHEKIDLFKCYFLFYCFSR

SEQ ID NO: 211221 - protein, 98 aa, Glycine max
  Clone ID: PAT_MRT3847_32759C.1.pep
FKDPNAPKRPPSAFFLFCSEYRPKIKGEHPGLSIGDVAKKLGEMWNNTAADDKQPYEKKAAKLKEKYEKDIAAYRAKGKPDAAKKGVVKAEKSKKKKK

SEQ ID NO: 211222 - protein, 44 aa, Glycine max
  Clone ID: PAT_MRT3847_3275C.1.pep
NPSPTNLKATTNIHKQKPFFTSLFQRFHIRLPSFITNKNGKHKS

SEQ ID NO: 211223 - protein, 87 aa, Glycine max
  Clone ID: PAT_MRT3847_32760C.1.pep
MQPIQALDATMPCNGKWCIVHTIFSYFCDLIFWFFSVCGKHKLTVIATYPSAGGRREGSQVRLPRKEGAWSRHQRLFEDPSVVFSQP

SEQ ID NO: 211224 - protein, 76 aa, Glycine max
  Clone ID: PAT_MRT3847_32761C.1.pep
LSRTFFKIKNPLFHHSRDSAMTAMTGRHNAAISNPQRHRYLVAFFQNSATPFRHGRFLITLLLKQFRFILFFRVFL

SEQ ID NO: 211225 - protein, 346 aa, Glycine max
  Clone ID: PAT_MRT3847_32762C.1.pep
MIASTSTNVGPHPLRFLSKPTTHSATRFLSLRLHSRGSAVALSSSTRTTPLKPTCHFNGKDGSFEQHEEEGEREVHCEVQVISWRERRVNAQITVDADTESVWNALTDYEHLADFIPNLVWSGRIPCPYPGRIWLEQRGFQRAMYWHIEARVVLDLREVVNSAWDRELHFSMVDGDFKKFDGKWSVKSGTRSSTAILSYEVDVIPRFNFPAIFLERIIRSDLPVNLRALAYRAERNFVGYQKLPVSENHLHKTYAAINGSSVKKINGASSESFKKINGALCGSDKLPPAENKKEIATSVSGSMLTSSSEVRSNWGVFGKICRLDRPRMVDEVHLRRFDGLLENGGV

SEQ ID NO: 211226 - protein, 40 aa, Glycine max
  Clone ID: PAT_MRT3847_32763C.1.pep
AALISALHLGRGVFVVSLPAKSGKFVLLQGFLLILRAGGV

SEQ ID NO: 211227 - protein, 42 aa, Glycine max
  Clone ID: PAT_MRT3847_32764C.1.pep
NEPYTSYFISISNAIYNQMSMQNFTMSSRDSSISISNEKSGR

SEQ ID NO: 211228 - protein, 132 aa, Glycine max
  unsure (1)..(132): unsure at all Xaa locations
  Clone ID: PAT_MRT3847_32765C.1.pep
DVDEDDEQQLESEESEDSGLRXHKNENAFLLGLTGSKRLFENQSGRIRVLQRFNXRWPQLENLRDYRILEFKYERNTLLLPKHADAEXLIVILNGTAILSLANNVHRDFYRLESGDTLRVLVRTTYYVVKPD

SEQ ID NO: 211229 - protein, 102 aa, Glycine max
  Clone ID: PAT_MRT3847_32766C.1.pep
GTPSFTIKGFGSDVVWDCEPTPNSPQEQLWPQDRQTLRPVYIGQNGTPAGPGPGLIPGGTRPSRGGRPLCLYVSLFLFLCCSFPLLVVRSFFFFFFFFFFSS

SEQ ID NO: 211230 - protein, 84 aa, Glycine max
  Clone ID: PAT_MRT3847_32767C.1.pep
CCGYFCTSLGFCQPSCVLQSHMSSPSRLSVLELQYRALLLLEPKYQRLEWFSCISSVFVLIVSCLCVGASPSSFRSSWVGDLDQ

SEQ ID NO: 211231 - protein, 45 aa, Glycine max
  Clone ID: PAT_MRT3847_32768C.1.pep
LCIVCDKGVYISKHKHTNRASLDHHKEHKTRRQEPWKGDHYPPIS

SEQ ID NO: 211232 - protein, 85 aa, Glycine max
  Clone ID: PAT_MRT3847_32769C.1.pep
VELKDQNPTDHRVFTISWTSLESQAMHHRTRQTLLYTHSIQMHIHAFMIASIAKDILVIASPSTLTAAADPIASLIDTAFIRHLH

SEQ ID NO: 211233 - protein, 195 aa, Glycine max
  Clone ID: PAT_MRT3847_3276C.1.pep
MLVLLTGNSLLDHSSLLRNSYQTPSAGNLGSAGDIEFMDPAIMAVGKGRLQGALNSPALDIRSNFMPQLNYFENDARLQLLMQRSLVPQQNLRFSEIGNTFSQLGDSYAVSSRLDQSQVSNLGPFQQLSLQVDSRGSPANEQLYGWNEVPSGNGLGVAELLRNERLGFNKFYRGYDDSKYRMPNSMDLFNRTFGI

SEQ ID NO: 211234 - protein, 81 aa, Glycine max
  Clone ID: PAT_MRT3847_32770C.1.pep
NSNNDFFIFFLILFWFRLPKNLSIFPIKSSCSCEGPIKKRAMPFLYSEGPYSKFHQTSFYSFETSFFPNTRKNSFQFQLCL

SEQ ID NO: 211235 - protein, 152 aa, Glycine max
  unsure (1)..(152): unsure at all Xaa locations
  Clone ID: PAT_MRT3847_32771C.1.pep
MGWRYNAGLFLIVTVVIIWVTSAEVTQDIFTDYKQPFAVTYLGASLMVVYLPIAFIKDWFCNLLKSRSSKSGKNAECVDEFSVRISSPLKSNGVHKNFELELGSVNRKDSDLDLSTLAEVKPLVAKYNDNTVLKVERQLTXREVAAYGXYIA

SEQ ID NO: 211236 - protein, 131 aa, Glycine max
  unsure (1)..(131): unsure at all Xaa locations
  Clone ID: PAT_MRT3847_32772C.1.pep
MGWRYNAGLFLIVTVVIIWVTSAEVTQDIFTDYKQPFAVTYLGASLMVVYLPIAFIKDWVCNLLKSRSSKSGKNAECVDEFSVRISSPLKSNGVQKNFELEXXSVNRKDSDLDLSTLAEVKPLVAKYNDNT

SEQ ID NO: 211237 - protein, 40 aa, Glycine max
  Clone ID: PAT_MRT3847_32773C.1.pep
RWVNPLHEDFYNEAPDFLIMNYVSWMNGDLYVHDASFFDL

SEQ ID NO: 211238 - protein, 76 aa, Glycine max
  Clone ID: PAT_MRT3847_32774C.1.pep
TLPSLVSTNAKNRIQKMLVDDPMRIMTIPEIRQHPWSQAPLPSDLPRAPPDTMHQAKTIDEDILHEEEKMGFDRNQ

SEQ ID NO: 211239 - protein, 84 aa, Glycine max
  Clone ID: PAT_MRT3847_32775C.1.pep
RDTYLSRAGTEWIRGYEFSDEWCKLDAHDMGVLRTSVGERRRGWLTAVIDGPIKEEKRDCGSGHGKQRIQAHGCAYGSGWASSN

SEQ ID NO: 211240 - protein, 99 aa, Glycine max
  Clone ID: PAT_MRT3847_32776C.1.pep
RCSPPSRCSRWTTRRPKCHSASSKPPTPAISPWHSAALSIPPSTSTSPAPSRSRSPPPTSSSSRSPPAKSASTSRNSSPTSRRSSSPSTPPTPPSSESY

SEQ ID NO: 211241 - protein, 59 aa, Glycine max
  unsure (1)..(59): unsure at all Xaa locations
  Clone ID: PAT_MRT3847_32777C.1.pep
GPSTXNESEFFFLFSLPNHTILIESTTFSITTFNDPLLPLFPPSPPSPTIPTSNSNNLK

SEQ ID NO: 211242 - protein, 148 aa, Glycine max
  Clone ID: PAT_MRT3847_32778C.1.pep
NSRADPSVHPRVRDSTQKGLLAAGDGHKVKFWNMDSVELWTSTDVDAELLENPCIRFNKKGTLLAVAAKGNKIKILAIDDILQKQNETHSIHVPNNQHEALKCTQSPILVDAGAGIAGEGIVMNGYQKAWMGGIIQLRSLITTQSFGM

SEQ ID NO: 211243 - protein, 186 aa, Glycine max
  unsure (1)..(186): unsure at all Xaa locations
  Clone ID: PAT_MRT3847_32779C.1.pep
VTRLLYYTPVAILASIILSSLPGLIDLREACYIWKVDKLDFLACIGAFLGVLFALLHIGPFVAAIISFGKILIQLIPPAIELLRRVPTTEAFCDVTQYPMAISTPRIIVIRISSGSLCSPNANFVRQRILTWVSHHEHDLNETPTGLILAVILDMTNLMNVDTSGILLLDELHNRVVXRRAELPVL

SEQ ID NO: 211244 - protein, 37 aa, Glycine max
  Clone ID: PAT_MRT3847_3277C.1.pep
PKYQVLQQKRCHSMYRDKAITLITNLLHNCVLGALQH

SEQ ID NO: 211245 - protein, 572 aa, Glycine max
  unsure (1)..(572): unsure at all Xaa locations
  Clone ID: PAT_MRT3847_32780C.1.pep
MVKKSKKSKSKRVSLKKKYKVIRKVREHNRKKTKEAKKLRLSGKKKVEKDPGIPNDWPFKEQELKALEARRAKAIEELEQKKAERKERARKRKLGLLEDEDNSKLSEMNTLKGSTVGKTKDSSDRAFYKDLDXVIEASDVLLEXLDARDPLGTRCVDIKKMVMKSAPDKRTRLXLTQINIIPTEALEKWLKYLREELPTVAFKCSTQQQRSNLSDCLGADTLIKLLKNYSRSHEIKKSITVGLIGLPNVGKSSLINSLKRSHVVNVGSTPGLTRSMQEVHLDKNVKLLDCPGVVMPKSQENDASVVLKNCKRIEKLDNPINPVKEILKLCPPEQLVTHYKIGSFKLGDVDDFLLKVGTVRGKLKKGGIVDINAAARIVLHDWNEGKIIYYTMPPNRDQGEPSEANIVSDFSKEFNIDEVYSSESSYIGSLISVDNFNAVEVPSSHPLTLDEMMLEDETQIKPAEQGEGPGNLAEVDESMEEDDVGKNKGNSEAGMQNEKLYAADGMLNTKMRRAEKKKRKKAKKAGASSDPVDGDYDFKVDYFQKGASMDDAEESKSEDDYEQVNSEVPMNE

SEQ ID NO: 211246 - protein, 125 aa, Glycine max
  unsure (1)..(125): unsure at all Xaa locations
  Clone ID: PAT_MRT3847_32781C.1.pep
EXLYTLEKDALFVNAFQHKQHQVKKKSACPNPATENTGRSFSFLLKNSGPSPKFGERNFTTPGKITGGYSNNRPLKEAGDNGGLRTRGCTTGAFKLGDETQRAVQPTRYLESMSQDRKRSQGKLI

SEQ ID NO: 211247 - protein, 60 aa, Glycine max
  unsure (1)..(60): unsure at all Xaa locations
  Clone ID: PAT_MRT3847_32782C.1.pep
MRECISIFIGQAGIHVGNACWELLCLEHGSGHDGQMPSDKTVGGSDDAFNTFFSEXGAGK

SEQ ID NO: 211248 - protein, 94 aa, Glycine max
  Clone ID: PAT_MRT3847_32784C.1.pep
TPGETILLLQTHHCCSKLRSQIWLIIWVPKSSFSMDSSSHYKKPAPSSSTIFLSNVSRNSSSTKREQRTDSSLSLSSQSKLPFNSTLIPRDRCS

SEQ ID NO: 211249 - protein, 59 aa, Glycine max
  unsure (1)..(59): unsure at all Xaa locations
  Clone ID: PAT_MRT3847_32785C.1.pep
PVLVDPPILYTIQRAVRFIMYPTDTNTXGAYVYEAEICMHRLRDEKDRTSHHPLIFWIH

SEQ ID NO: 211250 - protein, 73 aa, Glycine max
  Clone ID: PAT_MRT3847_32786C.1.pep
QNLICVLLMKFSFMAKFLYSIFQFNDVNPWSTFPLEICVGIVLKVVVVLLFIIRIISYFTLVLHPQVFSYSDS

SEQ ID NO: 211251 - protein, 60 aa, Glycine max
  Clone ID: PAT_MRT3847_32787C.1.pep
RHCGFLLLRNTIDYCTADRGGGSETCGSVPKNSGSVYVEDSCSYGFSLDTLSCRAIARCD

SEQ ID NO: 211252 - protein, 212 aa, Glycine max
  Clone ID: PAT_MRT3847_32788C.1.pep
MTTTVVPVAAAATWLNHPPNQALTWRLSVLPRNAAFLSHHHLMKEKKKKLMSWSIGAQPSPFDLSPPPIDHDFLDTVKTAGGEISGEGIIETFHNDDEALAAVDNGVVVVDLSHFGRIRVSGEDRIQFLHNQSTANFESLHEGQGCDTVFVTPTARTIDIAHAWLMKNAITLVVSPETCTTITEMLNKYIFFADEVEMQDITKQTSFFVLVG

SEQ ID NO: 211253 - protein, 122 aa, Glycine max
  unsure (1)..(122): unsure at all Xaa locations
  Clone ID: PAT_MRT3847_32789C.1.pep
INLMHAVRYYAYWGGPFYLKHVXISVPSPKANDFLIKLXAFIINPIYLKIHKSFLRPLFFPITFPHIPCTDLAGKIIDIXNSCQDFKVCDQVLAKLTHQXLGWFSQFAFATESLTTSKPSYV

SEQ ID NO: 211254 - protein, 61 aa, Glycine max
  Clone ID: PAT_MRT3847_3278C.1.pep
KSCHFVFCLVYWNGFQSILIVFEYDSTYLVPVFCVIISEPSKSSLMSDTSSSLESHFNSHS

SEQ ID NO: 211255 - protein, 112 aa, Glycine max
  Clone ID: PAT_MRT3847_32790C.1.pep
LEEVFFSDKDKQTKRTEEEGNAGIYATSAVWHKRNTQEIFEGPTLQNFFTQPRRKAKKIVLFMAHSMFPLLTSTSCFVGWVATVTFTFLEMLVPPLAHLLLRPSLIYSDLAQ

SEQ ID NO: 211256 - protein, 83 aa, Glycine max
  Clone ID: PAT_MRT3847_32791C.1.pep
STRSNLILTVGYTPTSKFWKINIAYQKVIYAREVIHLTILITANLYNFFFVYFSFQHHLLPFNFHNFSLLVVQIIIQLTFSFM

SEQ ID NO: 211257 - protein, 62 aa, Glycine max
  Clone ID: PAT_MRT3847_32792C.1.pep
CLLWSPSACKFRRVMLQSKSLQAFPHFVVKVTKLNSRSSRFPEKDILLCLQNQSHVTDMFQL

SEQ ID NO: 211258 - protein, 91 aa, Glycine max
  Clone ID: PAT_MRT3847_32793C.1.pep
LTRIHSLPLFTSSIMASLLNTVSPAANLSHKTKRPTCGGFLHSQVPNLHTFTLHKGFSRVSASTQIAISPKDTIFNLPNWRIGRNDQKGKS

SEQ ID NO: 211259 - protein, 120 aa, Glycine max
  Clone ID: PAT_MRT3847_32794C.1.pep
MKQQRVEFMGLGLLVVMMACGSASGADDLATKCSAVIQKVIPCLDFAKGKEETPKKQCCDAATSIKESNPECLCYIIEETHKGSPQVKSLGIQEAKLLQLPSVCNVKNASITNCPKLLGL

SEQ ID NO: 211260 - protein, 201 aa, Glycine max
  Clone ID: PAT_MRT3847_32795C.1.pep
MKQQRVEFMGMGMGMGMGLGLLVVMMACGSASGADDLATKCSAVIQKVIPCLDFAKGKEETPKKQCCDAATSIKESNPECLCYIIEETHKGSPQVKSLGIQEAKLLQLPSVCNVKNASITNCPKLLGLSPSSPDAAIFTSNSSKTTPSAPATSNSQTTTPQSQNASYGSMVQPSSTVTYAIVMALAIVLIALPTEIVSIYT

SEQ ID NO: 211261 - protein, 55 aa, Glycine max
  Clone ID: PAT_MRT3847_32796C.1.pep
WKNEAEVIEDKKELAVTADKKEIELTHENNEAELIHETTEVQLTDDKNDLELTQQ

SEQ ID NO: 211262 - protein, 113 aa, Glycine max
  Clone ID: PAT_MRT3847_32797C.1.pep
PQRVEWFRDLFLLRVITVISANIKHDNYLKVCMVPSKIMRILVRLFFNQKIIMLFIFSLIKEFFVFSKLVLTFLLIKKITKYQNPRNFSRVHRDSLTIFSTYWWINLTCLKSG

SEQ ID NO: 211263 - protein, 135 aa, Glycine max
  Clone ID: PAT_MRT3847_32798C.1.pep
MVQGPKNPTAGGGGNKGAPKKGAKVTKKFIINATQPVNDRIFDASAFTTFLQQRIKVDGLTGNLGEKINVTNLGDGRIEVVAHQEFSGRYIKYLTKKFLKKQQLRDWLRVVATNKGEYTLKFFNVVGEEGEEEED

SEQ ID NO: 211264 - protein, 67 aa, Glycine max
  unsure (1)..(67): unsure at all Xaa locations
  Clone ID: PAT_MRT3847_32799C.1.pep
CLGDTPIIFNNILQPYNHHTMPPHLHPRXRMTTSLFTTTLMVSFLVVAAPHLIPCPVDPRTLADAPD

SEQ ID NO: 211265 - protein, 43 aa, Glycine max
  Clone ID: PAT_MRT3847_3279C.1.pep
GEPSIWYPYHAYNQDFHTFYDHWVNCENQKPPPHLNFKQIHSP

SEQ ID NO: 211266 - protein, 87 aa, Glycine max
  unsure (1)..(87): unsure at all Xaa locations
  Clone ID: PAT_MRT3847_327C.1.pep
SQRGKXTIKKEERTMYKAQQKRKDQFQAQRKANKNIDKDLFILLYEIFINFLCDFKTTIYARACIQWVADDLFKFFSIKVNKRDYIN

SEQ ID NO: 211267 - protein, 53 aa, Glycine max
  Clone ID: PAT_MRT3847_32800C.1.pep
VNTRRHRRRSGTCDPVRTIREQARSSNRRRSSGRALQASGAWRCGSARGTSRA

SEQ ID NO: 211268 - protein, 71 aa, Glycine max
  Clone ID: PAT_MRT3847_32801C.1.pep
EIERDEINVLFWLFAHRRISVESLFTVQGKKRHRRRSKMALQLIKIKSIHVEENFSEKILIKRENVKRVSE

SEQ ID NO: 211269 - protein, 94 aa, Glycine max
  Clone ID: PAT_MRT3847_32802C.1.pep
KHPFLKITRATKVAGIPWNKCFTFSYPNLIKIFFLTQIHSQQHTDFPSITKFLVVTYITPPTTNLYSAPIITLILIPFNFTFFNSQSFSIQIQL

SEQ ID NO: 211270 - protein, 44 aa, Glycine max
  Clone ID: PAT_MRT3847_32803C.1.pep
FGGPPVFGFWSAFFFISIFSSFFFCFFCFFFFFFFNYNSILMLH

SEQ ID NO: 211271 - protein, 252 aa, Glycine max
  unsure (1)..(252): unsure at all Xaa locations
  Clone ID: PAT_MRT3847_32804C.1.pep
DSGSRIWEAIIRDLLPLGLGKARKALLSGCSAGGLATFHHCDNFAKYLPTNASVKCLSDAGFFLDERDISLNHTMRYNFKSLVQLQGIEKNLNRNCTRALYFPDLCFFPQYALRYISTPYFILNSAYDVFQQFTHILVPPSADMRGHWKHCKANLAECTTEQIDTLQGFRLDMLGALRPFYMNSRRXGGMFINSCFAHCQSELQETWFGDDSPRINNKTIAEAIGDWYFSRNISKEIDCAYPCDATCHNLIP

SEQ ID NO: 211272 - protein, 298 aa, Glycine max
  Clone ID: PAT_MRT3847_32805C.1.pep
MEFDEHEDQEQEEEEEEEEMGFSVAAAASYDSLGNAAVRSKISGGDGVAATVNSGRKGTVRYRECQKNHAVSIGGHAVDGCCEFLAAGEEGTLEAVICAACNCHRNFHRKEIDGETSPYQHRSQPQPQPLHPQYHHQFSPYYHRAPPPSAAGYLHHHLVTPPVSQHRPLALPPLASGGVFSREEEDMSNPSSSGGGGGGGFSGGGGSGSGTKKRFRTKFTQEQKDKMLAFAEKLGWRIQKHDEAAVEQFCAETCIKRHVLKVWMHNNKHTLANSEQHSAGNGSNHLNSTTIIENSQFS

SEQ ID NO: 211273 - protein, 39 aa, Glycine max
  Clone ID: PAT_MRT3847_32806C.1.pep
LGRKRVEEHVYTQLDTKTLTESTTHMNCEHEAGVLDAYR

SEQ ID NO: 211274 - protein, 113 aa, Glycine max
  unsure (1)..(113): unsure at all Xaa locations
  Clone ID: PAT_MRT3847_32807C.1.pep
MAADVVSLNKNVNWMESRGFWTFYVILIACVYAAMPLFVPAREAWTYVSVVHGVVSFGIMHWIKGSPXEQNSMGDYRELTFYXQIDXGHPWTPXEKFLMLVPTXLFMAGSVAK

SEQ ID NO: 211275 - protein, 503 aa, Glycine max
  Clone ID: PAT_MRT3847_32808C.1.pep
MDTLFRLVSFHQQQQPQQQPDPSLNSTTSRTSSSSRSSRQNYYPYSHQEEEECFNFYMDEEDLSSSSSKHYYHPYQPHHHQQHNVSNISTNTFSTTPNTDYSYSYSFSPTQPVQDFNFEFSSPNWSHNLLLESARAVADNNSTRLHHLLWMLNELSSPYGDTEQKLAAYFLRALFSRVTEAGDRTYRSLASASEKTCSFESTRKTVLKFQEVSPWTTFGHVASNGAILEALEGNSKLHILDISNTYCTQWPMLLEALATRSEETPHLCLTTIVTGSRIGNNVQRVMKEIGTRMEKFARLMGVPFKFNVVHHYGDLSEFNFSELDIKDDEALAVNCVNSLHSVSALGNNRDALISALQALQPRIVTVVEEEADLDVGIDGYEFVKGFEESLRWFRVYFEALDESFVKTSNERLMLERAAGRAVVDLVACSPADSVERRETAARWAARLHNGGLNAAPFSDEVCDDVRALLRRYKEGWSMAACSDAGIFLSWKDTPVVWASAWRP

SEQ ID NO: 211276 - protein, 57 aa, Glycine max
  Clone ID: PAT_MRT3847_32809C.1.pep
LSNVPVACSCGRGISICMYPLLKQAQGPYPSLSCCSLLLNHCLSQKSLNCVKIVHAH

SEQ ID NO: 211277 - protein, 67 aa, Glycine max
  unsure (1)..(67): unsure at all Xaa locations
  Clone ID: PAT_MRT3847_3280C.1.pep
FPITFSKIHSQTLNLTTHRGSLLVSFSAIAVALHSFTRKKLVHLITVILXPQPLTKVSEVHGEVYLL

SEQ ID NO: 211278 - protein, 103 aa, Glycine max
  Clone ID: PAT_MRT3847_32810C.1.pep
GGFFFFFFFFFFFFFFFFFFFWGGNPPFKKLTGQTLSKGKETPPLRGALKKTQKGGNLSHKLKKKKQPGGAPLTGLQPIFKRGPPHTLGNTGGIINKQNPPFY

SEQ ID NO: 211279 - protein, 42 aa, Glycine max
  Clone ID: PAT_MRT3847_32811C.1.pep
NIYLFCFSKSCTYIRPFLPFQKWFKRCVFSKKLFLKFFTSNR

SEQ ID NO: 211280 - protein, 129 aa, Glycine max
  unsure (1)..(129): unsure at all Xaa locations
  Clone ID: PAT_MRT3847_32812C.1.pep
FVPGNDYAQSGGEVIKQVVSPMAEIMDCLWPGDERSVQDRTHLMEGYGSKNXMGNKDVGRVEXRTPCGLSLAGIKSYTITERLFTCSSEKLLHIDEHTILLLQSCHNSVAHAEYRENYLISVNEYPNPY

SEQ ID NO: 211281 - protein, 36 aa, Glycine max
  Clone ID: PAT_MRT3847_32813C.1.pep
IFSLFSTDGRHPHHPSNQSPNNSYIPVERPIGCSKN

SEQ ID NO: 211282 - protein, 183 aa, Glycine max
  unsure (1)..(183): unsure at all Xaa locations
  Clone ID: PAT_MRT3847_32814C.1.pep
DIKLGHHRRHQLWFANKFLNERDKEXXXVDIVRFICCAHHPPNEIIQSDIFPRWALIGWLLTCCRKKHVEESVKLALFYDWLFFDERMDSIMNIEPAILLMVHSVPKFINMTHALLEFLLHLVDRYDVGRRSVIVKGVSSAFQLLVRKGVVRSLNVLTSCSALNPGLREGLKRLLSDGKVGSS

SEQ ID NO: 211283 - protein, 63 aa, Glycine max
  Clone ID: PAT_MRT3847_32815C.1.pep
DDYLMEQIILKNLDLDPILAYVSRQKHYQALRVAERVLVATNVYCSRSLCLVNARVMLFKTQE

SEQ ID NO: 211284 - protein, 44 aa, Glycine max
  Clone ID: PAT_MRT3847_32816C.1.pep
ARGRKSSTRFTHFVTAPTSRRTLEVYSSPHSGVPHSLQKPSLEP

SEQ ID NO: 211285 - protein, 172 aa, Glycine max
  Clone ID: PAT_MRT3847_32817C.1.pep
TRESEQQLHEVFDSAIQAAPAVVFIDELDAIAPARKDGGEELSQRLVATLLNLMDGISRSEGLLVIAATNRPDHIEPALRRPGRFDKEIEIGVPSPDQRSDILLTLLSEMDHTLSEFQIEHLGTATHGFVGADLAALCNEAALICLRHYANKKTYGSCSDYITEQPALMNSA

SEQ ID NO: 211286 - protein, 42 aa, Glycine max
  unsure (1)..(42): unsure at all Xaa locations
  Clone ID: PAT_MRT3847_32818C.1.pep
PTXPLYHMCTFKVLSITFGQVFFLRQGRLFKITPHHWRMCAW

SEQ ID NO: 211287 - protein, 99 aa, Glycine max
  unsure (1)..(99): unsure at all Xaa locations
  Clone ID: PAT_MRT3847_32819C.1.pep
MEGMKLKRWLVSVLFLIVATVSNAAGAFVGVNIGTDVTDLPSASNVVAILKAHQITHVRLYNANEHMLRALSNTGIEVXVGVTDEEILGIGESASVAAA

SEQ ID NO: 211288 - protein, 67 aa, Glycine max
  Clone ID: PAT_MRT3847_3281C.1.pep
RCPPNFLTRNPLPPNLRSYYSHKSPWKSPHLLEVAFLFTTAELRYSPISPLPPPNAHSPKITPPFPR

SEQ ID NO: 211289 - protein, 162 aa, Glycine max
  Clone ID: PAT_MRT3847_32820C.1.pep
YGCEKTTEGLQIVDSKDKPAMGFLYQAMYKAKEEMIRRFQKNKKVEPYLNILDRHWDSLCKSIHAAGYWLNPACHFNEEFAKHKSTTSGLLDVIERYAHGDPDLQFNLASEMRIFKNAELDFGRLVATRERNTVMPDEWWESYGCGTPNLQKLAILVLSQTC

SEQ ID NO: 211290 - protein, 48 aa, Glycine max
  Clone ID: PAT_MRT3847_32821C.1.pep
ISLDEIQQGSKVLADVLEIDLPKLQKTKPKDAAPVASSACDRCGRVLY

SEQ ID NO: 211291 - protein, 103 aa, Glycine max
  Clone ID: PAT_MRT3847_32822C.1.pep
HAEPVGVSGFHSRPKGDCASCEAASATNVLIHLRSQKITDNKPWMNGTSELADPDLQVDQTARNSAPSLWSPNTASGAALHWASAGSASRGSTEGIVLSNQAS

SEQ ID NO: 211292 - protein, 125 aa, Glycine max
  Clone ID: PAT_MRT3847_32823C.1.pep
QVFYHEVNAQGQAHQHPRNYQEEELVCVVFSATSSFSATESGSTVSLELKQDKILSVEGTKRSNMLRQNLGGKGGSRKPLSDGRDCSGSESLSLMAGIAPAPVLAPEGCRSQRRSGGGRGKSHAC

SEQ ID NO: 211293 - protein, 146 aa, Glycine max
  unsure (1)..(146): unsure at all Xaa locations
  Clone ID: PAT_MRT3847_32824C.1.pep
DYGGGHVDLNKVTDPVLVYDMKNSDYIRFLCSMGYNKHRXSILTGFPTKCHKSHKFLLNMNLPSITIPELKQPLTVSRTVTNVGPVKSNYTARVVAPIGISVXLKPSTLAFSSKRKKMKFKVTFSSKLRVQSRFSFGYLLWEDGLQ

SEQ ID NO: 211294 - protein, 93 aa, Glycine max
  unsure (1)..(93): unsure at all Xaa locations
  Clone ID: PAT_MRT3847_32825C.1.pep
LFKTNDFFAPSTQDFEKMSYSIRVLKKENLFLKSKSEKSHATLIKLVHHRERIKPPLENTKHQKXTLESLGRSLQAKSKHNFSQYKRHTSVQT

SEQ ID NO: 211295 - protein, 256 aa, Glycine max
  unsure (1)..(256): unsure at all Xaa locations
  Clone ID: PAT_MRT3847_32826C.1.pep
MMKGKGTEDDRPWQSYHTVYTTAKAGMELVDKEKVQRVVYEMSKGSKYFQNEERKEAFIKQKIDNLRIQCANLTQEDLAHYQKVADRRIVELEASRDLSRIWLHVDMDAFYAAVETLSNPTLKGKPMAVGSMSMLSTAXYEARKFGVRAAMPGFIARKLCPELIFVPTDFKKYTYYSDLTRKVFGRYDPNFIAGSLDEAYLDITEVCRERNVKSEEIAQELRAGVYEETGLTCSAGVAPNRLLAKVLGSISQTFSP

SEQ ID NO: 211296 - protein, 374 aa, Glycine max
  unsure (1)..(374): unsure at all Xaa locations
  Clone ID: PAT_MRT3847_32827C.1.pep
KIVGRNISQHHTAGMHSHTSRQSSTMDEQSVNRKYFPFKQGYPFVATLRVGSEGIQMTVDGKHITSFAFRETLEPWLVSEIKISGDLKLISILASGLPTSEDSEHIIDLESLKSSPISARLXLDLFMMVFSFPNNLIPRRCSFCGRNFWSINMQNVVVIVXMIEDWSGYNLQKINKKKRLGSFVXMIRIVSLYNSLILLLYVXCRFGTQVSAKFVMNSDVDAFVRVYEVLDSLHRINADHGLLYGLINLDSRPHRNTDSKWYISPEEWSEGTYPPWAHGPGYVVSHDIARTVSKKFRENHLKMFKLEDVAMGIWIADMKKEGLEVRYENEVRVYPEGCKDGYVVAHYQGPREMLCLWQKLQVDKRAKCCGDSRK

SEQ ID NO: 211297 - protein, 74 aa, Glycine max
  Clone ID: PAT_MRT3847_32828C.1.pep
DTFDRTFQLIAYNDAISPAVQGLYKNCARTSHEAGLLDSCFMSPTILKLLFQGLGIGSQFHIWDRSSLEVNVRQ

SEQ ID NO: 211298 - protein, 206 aa, Glycine max
  unsure (1)..(206): unsure at all Xaa locations
  Clone ID: PAT_MRT3847_32829C.1.pep
RPSVRIFLGILFAQTPTYTFKTQIFGKTLTGKTSPLRWKVSDTIDNXKAKIQDKEGIPPDHQRFILNRKHFLYVRTLADYNIHKEPTLDLVPPLRGGMQIFHKTLTGQTITQEVESSDTIDNVKAKIQDKDRNPPTPATVSCLDRKQLEDGXRTLADYNIXQKESTLDLELRLRGGMQIFYKTLTGQTITLEGXSSYTIDNVKAKI

SEQ ID NO: 211299 - protein, 107 aa, Glycine max
  unsure (1)..(107): unsure at all Xaa locations
  Clone ID: PAT_MRT3847_3282C.1.pep
XXXLXXAXPXXHLXXXRXVXRXXXLXSVXXAXFXXXGXXFXXAXXXGXXXYXLLXXXXDLXLXXXXXLXXXRXXYXXRXXXCGXLXXLXVXXXVXVXGXXXXMSARL

SEQ ID NO: 211300 - protein, 46 aa, Glycine max
  Clone ID: PAT_MRT3847_32830C.1.pep
DVSREFKSTLEREIGLDDNLSPTQNTYNSNVRNTTPTSSSTVDPSE

SEQ ID NO: 211301 - protein, 168 aa, Glycine max
  unsure (1)..(168): unsure at all Xaa locations
  Clone ID: PAT_MRT3847_32831C.1.pep
CTQPRRVAAMSVAARVSQEMGVKLGHEVGYSIRFEDCTSEKTILKYMTDGMLLREFLGEPDLASYSVVMVDEAHERTLSTDILFGLVKDIARFRPDLKLLISSATLDAEKFSDYFDSAPIFRIPGRRYPVEISYTKASEADYLDAAIVTSLXIHVTQPSGDIWEFLLV

SEQ ID NO: 211302 - protein, 97 aa, Glycine max
  Clone ID: PAT_MRT3847_32832C.1.pep
DKPYEGNPASRTARAQLHFSIWHMLTTMFEVTRPDWAQSLKHPKHDCCYHLKACKRKTWKLHNGLHRNLYATWWWQRTHRSPMGEEHSTSSLRDRGC

SEQ ID NO: 211303 - protein, 70 aa, Glycine max
  Clone ID: PAT_MRT3847_32833C.1.pep
HYHRVPDIHVNVRHFTWTLWKTMHTNLIHCINPDLPSCIIRHKAPADSPCQKIGTLIGEWDPPFIGALNP

SEQ ID NO: 211304 - protein, 407 aa, Glycine max
  Clone ID: PAT_MRT3847_32834C.1.pep
MRGGLWQLVQSITRRVAQGDKKAAARRYSASNAELKKTVADDFHVANGGKMVPFAGWSMPIQYKDSIIDSTLNCRENGSLFDVSHMCGLSLKGKDAVPFLEKLVIADVAGLAPGTGTLTVFTNEKGGAIDDSVITKVTDDHIYLVVNAGCRDKDLAHIEEHMKAFKAKGGDVSWHIHDERSLLALQGPLAAPVLQHLTKEDLSKLFFGEFRVLDINGSQCFLTRTGYTGEDGFEISVPSEHGLDLAKAILEKSEGKVRLTGLGARDSLRLEAGLCLYGNDMEQHITPIEAGLTWAIGKRRRAEGGFLGADVILKQLEEGPKIRRVGFFSSGPPPRSHSEIQDEGGNNIGEITSGGFSPCLQKNIAMGYVKSGLHKAGTKVKIIIRGKPNEGVLTKMPFVPTKYYKPS

SEQ ID NO: 211305 - protein, 407 aa, Glycine max
  unsure (1)..(407): unsure at all Xaa locations
  Clone ID: PAT_MRT3847_32835C.1.pep
MRGGLWQLGQSITRRLAQGDKKAVARRYFASEAELKKTVVYDFHVANGGKMVPFAGWSMPIQYKDSIMDSTLNCRENGSLFDVSHMCGLSLKGKDSVPFLEKLVIADVAGLAPGTGSLTVFTNEKGGAIDDSVITKVKDDHIYLVVNAGCRDKDLAHIEEHMKAFKAKGGDVSWHIHDERSLLALQGPLAAPXLQHLTKEDLSKLYFGEFRVLDINGSECFLTRTGYTGEDGFEISVPSEHGVDLAKAILEKSEGKVRLTGLGARDSLRLEAGLCLYGNDMEQHITPIEAGLTWAIGKRRRAEGGFLGADVILKQLEEGPKIRRVGFFSSGPPPRSHSEIQDEGGNNIGEITSGGFSPCLQKNIAMGYVKSGLHKAATKVKIIIRGKPNEGVVTKMPFVPTKYYKPS

SEQ ID NO: 211306 - protein, 150 aa, Glycine max
  unsure (1)..(150): unsure at all Xaa locations
  Clone ID: PAT_MRT3847_32836C.1.pep
MEAGVGGGRVGGACDNEISDGMQCMNHPHNNSNNNPGGICAFCLQDKLRNLLSSSPPLSSSSSPSPSFTPPPPPSVKTDHDHNTRSRLPFLVPKKNNNKKPSSYTNISSSANIIFKRSKSTATTQRTSFSXEGLQSQKKNGFWSFLYPSS

SEQ ID NO: 211307 - protein, 94 aa, Glycine max
  unsure (1)..(94): unsure at all Xaa locations
  Clone ID: PAT_MRT3847_32837C.1.pep
STRAPLWPFLKCHXSTFVAPXXCSQSSTMIGIGGFLGCHYAFIXXMKKGWIGIYTWMHICTSRGTRDCLIHLSGFYYCDVDLQICSSFWPAFPK

SEQ ID NO: 211308 - protein, 50 aa, Glycine max
  Clone ID: PAT_MRT3847_32838C.1.pep
RIFVHPRCFFQDRAFLTIILMSAKKKPPETHCCIRGLPTGNRMGTKSSGC

SEQ ID NO: 211309 - protein, 80 aa, Glycine max
  Clone ID: PAT_MRT3847_32839C.1.pep
NIQIPTTNPTTPNASCSSSPSSSSPPPSSSTSSPPASNSTPSPNSPTPAPTPLPSPSAPAPTPFVSSSFTSLAPSLTPLL

SEQ ID NO: 211310 - protein, 95 aa, Glycine max
  unsure (1)..(95): unsure at all Xaa locations
  Clone ID: PAT_MRT3847_3283C.1.pep
PILQNSXLCPFHTAIAYYFLRIGFEXTTGXLPPFPQINKSVSXXXIRAXCQRLVDLGATHLEETSAGLWSLEPAVXYNQILHRYMLPKVLAEAPS

SEQ ID NO: 211311 - protein, 149 aa, Glycine max
  unsure (1)..(149): unsure at all Xaa locations
  Clone ID: PAT_MRT3847_32840C.1.pep
ATETXQQQRDAAQPAKPKAAEXRPQGKXEEAQAQPTKANXXNPQPAKXQAXTASNHTKXKKPFFFLXDADTALKINFSPPKGYKKQXNVKAYVRNYXKEPLSDLHTASKLNYHEEISMELKKVNLMPLKTRSNTRKYERLKKQKRQKKS

SEQ ID NO: 211312 - protein, 275 aa, Glycine max
  Clone ID: PAT_MRT3847_32841C.1.pep
MVRAPCCEKMGLKKGPWAPEEDQILTSYIDKHGHGNWRALPKQAGLLRCGKSCRLRWINYLRPDIKRGNFTIEEEETIIKLHDMLGNRWSAIAAKLPGRTDNEIKNVWHTNLKKRLLKSDQSKSKPSSKRAIKPKIERSDSNSSIITQSEPDNFNFREMDTITSSACTTSSSDFSSVTVGDSKNIKSEDTESTETMPVIDESFWSEAAIDDETPTMSSSQSLTISNEMRLQYPFANYEETFQQGHHAYDSNFDDGMDFWYDIFTRTNDSIELLEF

SEQ ID NO: 211313 - protein, 49 aa, Glycine max
  unsure (1)..(49): unsure at all Xaa locations
  Clone ID: PAT_MRT3847_32842C.1.pep
FXLMSXHQLLXLTFCSQFAIIIRNLSRXSISXXPNRXIGSPRCRSRXRT

SEQ ID NO: 211314 - protein, 51 aa, Glycine max
  Clone ID: PAT_MRT3847_32843C.1.pep
FWNNINALKMIHCSTMLSITLMVYVFDMETFEITTYKHQLYSKVHIQQHYS

SEQ ID NO: 211315 - protein, 270 aa, Glycine max
  unsure (1)..(270): unsure at all Xaa locations
  Clone ID: PAT_MRT3847_32844C.1.pep
VDCDEAIKTSHGEDGLKVLDKELSSEFGRPGLVXTLEPSGRDAFIANEATKMLTXNNWVILEIXSTRSSLDLLKAKQAYQARFKKSLEEDVAYHTKGDIRKXLLVPLVSTFRYEGDEVNMTLAKSEAKLLHQKIAEKAYNDEDLIRILSTRSKAQLTATLNQYNNXFGNAINKDLKXDPKDEYLQLLXAAIKCLTYPEKYFAKVLRLAINKLGTDEGXITRVVTTRAEVDLQRIAEEYQRRTFSLHGLAIGSDTSGDYQSILLALVCGIC

SEQ ID NO: 211316 - protein, 43 aa, Glycine max
  Clone ID: PAT_MRT3847_32845C.1.pep
VCADMKYLFMSSSSFRHLMSSSVGCNHLMSTWARINQSSCNSG

SEQ ID NO: 211317 - protein, 78 aa, Glycine max
  unsure (1)..(78): unsure at all Xaa locations
  Clone ID: PAT_MRT3847_32846C.1.pep
KWXRVENXGNDXKRKXVXIEVVEVMLIXXIXXVVXXVDXFKXXRGGXXGXXXKRXCXLIYKQPQXXLWNNYNQIIVLF

SEQ ID NO: 211318 - protein, 56 aa, Glycine max
  unsure (1)..(56): unsure at all Xaa locations
  Clone ID: PAT_MRT3847_32847C.1.pep
ERRSEGQVTEYLVATFGDYFGDVKMYIEERSFRRFVEACLEETVVVYVDRXLTQVM

SEQ ID NO: 211319 - protein, 42 aa, Glycine max
  unsure (1)..(42): unsure at all Xaa locations
  Clone ID: PAT_MRT3847_32848C.1.pep
KNISXEPRNMGKKGKKKKFPFENSECISLSSLTSANQRRQKF

SEQ ID NO: 211320 - protein, 701 aa, Glycine max
  Clone ID: PAT_MRT3847_32849C.1.pep
MKEGEKVLDPQLWHACAGGMVQMPQMNSKVFYFPQGHAEHAHTNIHLRLPPFILCNVEAVKFMANPETDEVFAKLSLLPLRNSELGADSDGAGGDDVAEPSCCEKPASFAKTLTQSDANNGGGFSVPRYCAETIFPRLDYTAEPPVQTVVAKDVHGETWRFRHIYRGTPRRHLLTTGWSSFVNQKKLVAGDSVVFLRAENGDLCVGIRRAKKGISEGSGSGSSSVWSSASGSGNGNCGIGPYGPFSFFLKEENKMLRNGCGGNLSGRVKVRAEDVVEAVTLAASNKPFEVVYYPRASTPEFCVKASSVGAAMRIQWCSGMRFKMAFETEDASRISWFMGTIASVQVVDPICWPNSPWRLLQVTWDEPDLLQNVKRVSPWLVELVSNIPLINFTPFSPPRKKLRPQHPDFPLDVQFPIPMFSGNQLGPNSPLCGFSDNAPAGIQGARHAQFGKSLSDLHLNNKLQLGMLPTNIHQLGVYNEISNGNMMTNHDKSKESLSCFLTMGKSTKSLEKSDDVKKHQFLLFGQPILTEQQISSCSGDVLSHRKRSVSDDKDKAKCLMDDSQSTLSQQFSPGKASSAEFSWQLGLDTGHCKVFLESEDVGRTLDLSLFGSYEDLYRRLAIMFGIERSEILNHVLYHDAAGAAKKTGEEPFSDFMKTAKRLTILTDSSSKNIKRAFITGTRNGEHGLDASNKTGPLSIFA

SEQ ID NO: 211321 - protein, 91 aa, Glycine max
  Clone ID: PAT_MRT3847_3284C.1.pep
FVKTGKKNEKAIGHPGPGGDCRVSTRKTGPAPGRKPIFQKGGRGKTRIKHEKSCSLGKRDCPQQIAKKKQPEDKGEKPGAPKGGPNPKKSG

SEQ ID NO: 211322 - protein, 97 aa, Glycine max
  Clone ID: PAT_MRT3847_32850C.1.pep
VLFKFLKAKEVSEAMGDSKRRTVIININWFWKKVNQQKNRYHFYEHNYTFNFNSGAQSEHESMPYRFSSTFAAPGLRQNESCYIFITSIHFHFDNTF

SEQ ID NO: 211323 - protein, 66 aa, Glycine max
  Clone ID: PAT_MRT3847_32851C.1.pep
NILYHKVKVVTFFCIESPHFVSSLSFYYHITFPPKSVFCRAFITGTRNGEHGLDPSNKTGPLSIFA

SEQ ID NO: 211324 - protein, 55 aa, Glycine max
  Clone ID: PAT_MRT3847_32852C.1.pep
FVQFKNCVWGNQAVNLKKCDVKEGCFRGSVLILLVYTICCNECITRICVSISVKN

SEQ ID NO: 211325 - protein, 45 aa, Glycine max
  Clone ID: PAT_MRT3847_32853C.1.pep
GRKEINGVNEEIDRGIIVYRGECKVEDGPILNNEDEKVFISKLRK

SEQ ID NO: 211326 - protein, 32 aa, Glycine max
  Clone ID: PAT_MRT3847_32854C.1.pep
GLKDQRTRSPLQTICNAKNTNICLLVKLCKAP

SEQ ID NO: 211327 - protein, 101 aa, Glycine max
  unsure (1)..(101): unsure at all Xaa locations
  Clone ID: PAT_MRT3847_32855C.1.pep
PRVRPRXXATRPPRVQMTRSERRRTNQFFSLNTTKHRHHSYYFFRNTLKLSWWAFKNLFRAPGEFSGSFLAQKKKNPPWCFIKKGGALPLPWGGVFFKKGG

SEQ ID NO: 211328 - protein, 63 aa, Glycine max
  Clone ID: PAT_MRT3847_32856C.1.pep
NRTDLSLCQIQSFPERQKQSQDRVQIHSHTNKTTNPQSLTFPEKILVSIFMSPSDSRKIYSQH

SEQ ID NO: 211329 - protein, 293 aa, Glycine max
  unsure (1)..(293): unsure at all Xaa locations
  Clone ID: PAT_MRT3847_32857C.1.pep
MFENHKNMVQLKVVASTLVVLWSWWSFDGAIGDPQLFLLKWECSVVAVHDLLNFNQNLNARLVDLRAQVSNQRKHFATAQSTSGADPVHAMFQCRNYLSXTDCTTCFDAAAANIRNCSTGNTAHLVYDGCILRYLNSVFLDNSIIFSSHTFCGNQTADESTAFGTVGLQVLMDLQIATPKISGYFAATKTHVAGGAIYAFAQCAETLTPDTCLNCLSNQLSNIQDCLPNTNGRAIDPSGCFMRYSETPYFADNQTTDISLFLKQGPRGSMRKWVTIGGGLAGALLDPSIIIFL

SEQ ID NO: 211330 - protein, 165 aa, Glycine max
  Clone ID: PAT_MRT3847_32858C.1.pep
GPWKRTKKGKGTKKSQTGRGKRAGFFGQKKMFFLKQNPIFKKKKKFILKPGKSLGNQNYIQKPPKKVGFWANPNFRSSFFKGKLSFIWKGGAKFKSFYRGLHIRPTRGGKSSPKPGPFKGPSKTPFTKKKKKGAGGRNQGPQNGVKTKKRPGGQILGNGFAPLEK

SEQ ID NO: 211331 - protein, 68 aa, Glycine max
  Clone ID: PAT_MRT3847_32859C.1.pep
SYNIKLPSQPMDNTRDFRKVTDQLRVDSGPATRSLNEYLIGSNIHSYKRPDQRTHLDGKGSDLNNDCN

SEQ ID NO: 211332 - protein, 64 aa, Glycine max
  Clone ID: PAT_MRT3847_3285C.1.pep
KSQNEANKVENIIDLPMNIVRKWNISVVSQCHQRQSRPISLAMDLDLAKKKTFRPMGLCSIILY

SEQ ID NO: 211333 - protein, 101 aa, Glycine max
  Clone ID: PAT_MRT3847_32860C.1.pep
KKKLYLSKKWLILTTSIVVYNPVYRIDAGYTNPAKPYHITHSTLTSSPYYNTLLYYFFLSCIMHGYYIMKDHSRKKKVPDIPSPVHVMWHSFQRDRKSRNQ

SEQ ID NO: 211334 - protein, 97 aa, Glycine max
  unsure (1)..(97): unsure at all Xaa locations
  Clone ID: PAT_MRT3847_32861C.1.pep
MQIFVKTLTGMTITLEVESSYTIDNVKAMIQDMEXIPPDQQRLIFAGKQLEDRRSLADYNIQMESTLHHVSRLRGGMHIFVXTLTLLTIILLVVSSY

SEQ ID NO: 211335 - protein, 197 aa, Glycine max
  Clone ID: PAT_MRT3847_32862C.1.pep
DRRAIFQFLQEISHACGLARNADKGGSPTNDLLNISQGPEIKDKIVLDGDASCLLLDEYLLQTQVTAGTVQGAILDDVTTPSSPDGISCYNDALLSWIFSCSPIGDQLTSWLRTREDKLNKGKEIVQLLEKEFYHLQGLCEKKGERIAYEEALQTVEDLCLEEGKKRETVGEFVQRSYESVLRKRTEELIESDNDMM

SEQ ID NO: 211336 - protein, 189 aa, Glycine max
  unsure (1)..(189): unsure at all Xaa locations
  Clone ID: PAT_MRT3847_32863C.1.pep
RITKQLWKIAGPIVIANENLNPNDTRRKTVNYLQKAAVAYGPGKPFVVERVLVHPPQKMEFRIKILFTSISHTDLSSWQGENEAHRAYPRIFGHEASGIVESVGEGVSEMKEGDLVVPIFNGGCRDCKYCMCEKTNMSQRFGVNPMKKVMASDGTTXFSTMDGKPIFHFLXTLIFAEYTVVDSACVVKS

SEQ ID NO: 211337 - protein, 301 aa, Glycine max
  Clone ID: PAT_MRT3847_32864C.1.pep
MAAGLSTAAILKPYNLVQPPIPLSKPTTSLFFNPLRCFHHSTILRVRPRRRMSGFTVCVLTEDSKEIKTVEQEQEQVIPQAVSAGVAEKLARKKSQRFTYLVAAVMSSFGITSMAVFAVYYRFSWQMEGGDVPWSEMLGTFSLSVGAAVAMEFWARWAHRALWHASLWHMHESHHRPREGPFELNDVFAIINAVPAIALLSYGIFHKGLVPGLCFGAGLGITVFGMAYMFVHDGLVHKRFPVGPIANVPYFRRVAAAHQLHHSDKFNGAPYGLFLGPKEVEEVGGLEELEKEISRRIRSGS

SEQ ID NO: 211338 - protein, 117 aa, Glycine max
  Clone ID: PAT_MRT3847_32865C.1.pep
RSKNSRADPRVRDDIRGALTLAIGGTRDQQTLTHTLCRSSNLNFFSIFSTIIAIEIESNPNTQRSTYTHTHSLCCDFYFGFNGYEWCLSQSFTQARLLFAMEPNCLCSSTSLLLNAV

SEQ ID NO: 211339 - protein, 96 aa, Glycine max
  unsure (1)..(96): unsure at all Xaa locations
  Clone ID: PAT_MRT3847_32866C.1.pep
QTQQHKAGDCVQATISLSLALRSGRNFPVXXGHPDKLXDQISDAVLDACLXQDPDSKVACETCXKTNMVMVXGXITTXANVDYEKIVRDTCRXLCL

SEQ ID NO: 211340 - protein, 45 aa, Glycine max
  unsure (1)..(45): unsure at all Xaa locations
  Clone ID: PAT_MRT3847_32867C.1.pep
KRHALFFFFFLLLQNEETIMWNSIQIEVHMINKIQPNXEKATTGA

SEQ ID NO: 211341 - protein, 85 aa, Glycine max
  Clone ID: PAT_MRT3847_32868C.1.pep
RNTRGDSTSALLIRARRSIGGGRHITKRRLVQPEGRAYTIKSRGSGFRRHRERSYRMVKENGMGNKLNACPSCTWGHIAREQCEI

SEQ ID NO: 211342 - protein, 80 aa, Glycine max
  Clone ID: PAT_MRT3847_32869C.1.pep
KGCSYGNGVEQRKEEKRWGKRKKVYEVADDCAQITWIITRKSMKCLSNLSFYVAYSILNTFVLLVVMSLRKKEGKKKERD

SEQ ID NO: 211343 - protein, 108 aa, Glycine max
  Clone ID: PAT_MRT3847_3286C.1.pep
PWVLFLISLVSPFASLSVRLRFVVFAFPLAFSVVVVFLLWVLGLPFASRPSFFGLLFFRLASFSVLSLFRLSVLLGLLFSCPFGFCLPVVWVPAGLFLYAPLCVALLR

SEQ ID NO: 211344 - protein, 106 aa, Glycine max
  Clone ID: PAT_MRT3847_32870C.1.pep
PAALHVCSPCPQGAMHTLPTRPTMLWVHATAAASTPSSTPTKERCRSPLSAVTLLPHFRASLPPSTFSTPGSAPVVYRTLPPCGLAPGGSSQNPSRPPPSRARAYA

SEQ ID NO: 211345 - protein, 97 aa, Glycine max
  unsure (1)..(97): unsure at all Xaa locations
  Clone ID: PAT_MRT3847_32871C.1.pep
FKLLTDGKLYEGKHIPVSNISAGENHVVQMPLMGQEETLISSASDFRTATASKNTRPHATALHVGAIEIXIDRYPRPDCNIXGAMLLVDTYHTNPEN

SEQ ID NO: 211346 - protein, 115 aa, Glycine max
  Clone ID: PAT_MRT3847_32872C.1.pep
MEEESKSKWEGKAMVEVVGTGAEVAWAVLEDFCNIHKWISLDTCYQVDGILGQPGLIRYCASTVEEGVGAEKTTTIKWAKEKILAIDPVQRWLTYEVVENNMGFKSYVATLKVLP

SEQ ID NO: 211347 - protein, 43 aa, Glycine max
  Clone ID: PAT_MRT3847_32873C.1.pep
SSLISLLTINRSHVLQKAIQSMNQQNRLKEKSVVKLQFNQMLI

SEQ ID NO: 211348 - protein, 59 aa, Glycine max
  Clone ID: PAT_MRT3847_32874C.1.pep
WVWKRGMGVFFPLPHQGGVLSQNLGVSKKKQERGNQGFSFRFNPSLIRGSPCPLKKKSF

SEQ ID NO: 211349 - protein, 116 aa, Glycine max
  Clone ID: PAT_MRT3847_32875C.1.pep
NDELPDMNLGNGYSTYVDLHATVDQGAVKVWSEVQEGKFALDKGWNIDSISVLGLEGSGAVSSLEPLMGGSNVNVTTSAHEHLNSEGEGEKKTVMVVLKGLSIPVGKNFAMTWKMG

SEQ ID NO: 211350 - protein, 548 aa, Glycine max
  unsure (1)..(548): unsure at all Xaa locations
  Clone ID: PAT_MRT3847_32876C.1.pep
SHASDPGIAVNTXYGVYQRGVANDVFIKYVGEPFLAQVWPXVNFPDFLNPKTVSWWVDEIHXHELVPVDGLWIDMNEVSNFCSGKCKIPEGQCPTGTGPGWICCLDCKNITKTRWDDPPYKINASGIKAPIGFKTIATSAYHYNGVLEYDAHSLYGFSQTIATHKGLQGLQGKRPFILSRSTYVGSGKYAAHWTGDNQGTWENLRYSISTMLNFGIFGVPMVGSDICGFYPQPTEELCNRWIEVGAFYPFSRDHANYYSPRQELYQWQSVAESARNALGIRYKLLPFLYTLNYEAHVSGAPIARPLFFSFPTYTECYGLSTQFLLGGSLMVSPVLEQGKTQVKSLFPPGSWYSLLDWTHTITSKDGVYVTLDAPLHVVNVHLYQNAILPMQQGGMVSKEARMTPFTLIVTFPSGATQGEAKGNIFVDDDELPDMNLGNGYSTYVDLHATVDQGAVKVWSEVQEGKFALDKGWIIDSISVLGLEGSGAVSSLEIDGKPLMGGGSNVNVTTSAHEHLNNEGEGEKKTVMVALRGLNIVVGKNFAMTWKMG

SEQ ID NO: 211351 - protein, 123 aa, Glycine max
  unsure (1)..(123): unsure at all Xaa locations
  Clone ID: PAT_MRT3847_32877C.1.pep
MERSRSKRNYYYDQDYDSETLARTRPRYNHHYTTAGNQRHRGGGAARHAKTQQDSPLTVTTSYRILCHDLKAGGVIGKSGSIIKSIRQHTGAWINVHELMPGDEERIIEISDTRXRDPEGRMP

SEQ ID NO: 211352 - protein, 644 aa, Glycine max
  Clone ID: PAT_MRT3847_32878C.1.pep
MERSRSKRNYYYDQDYDSETLARTRPRYNHHYSTGGNHRHRGGGAARHAKTQQDSPLTVTTSYRILCHDLKAGGVIGKSGSIIKSIRQHTGSWIIVQSIMPGDEERIIEISDTRRRDPEGRMPSFSPAQEALLLIHERILESDAAFGVAEEDEEYGGRGGGRDRIATRLVVSRMHVGCLLGKGGKIIEQMRMETKTQIRILPRDHNLPRCVSMSEEIVQVVGDVNAVKNALVIISSRLRESQHRDRSHFHGRVHSPERFFSPDDDYVPHVTSGSRRSSVDGASFGSRGSNTNSRNNNHPSLNYAMEPGAAPVVDDAQGFYGEELVFRILCPIEKVDRIIGESEGIVEFLQNEVGVDVKVTDPVGGSDEQIIIITSEEGPDDELFPAQEALLHVQTRIVDLVLDKDNTITTRLVVPSSEIECLDGKDVSLSEIRRLTGANIQILPRDELPLCVAKTDELVQIVGEIKAARDAVVEVTSRLRSYLYRDFFQRDTVPLPAPLPGAAASSSNNIVPVTETPTTYQNLQTVAAALPSKETGGSSTETGKQKESDRRDDLLSGLNRIAVPLVTRSTLEVVLPEYAVPKLVAKSKSKLAQISELSGANVTLVEDRPDVTQKIIQISGTPEQAERAQSLLQGFILSTQEDGP

SEQ ID NO: 211353 - protein, 110 aa, Glycine max
  unsure (1)..(110): unsure at all Xaa locations
  Clone ID: PAT_MRT3847_32879C.1.pep
RLFPRVRPRVRKSVPTLVGTECPLDEKLARTRIVDKXPKTRCFTIVPMECNLVVRQELLNFGRVIMKKRDMLSXGVGISPYSMGWSGLANXTTEYGPRILCCDDARIDGL

SEQ ID NO: 211354 - protein, 64 aa, Glycine max
  Clone ID: PAT_MRT3847_3287C.1.pep
GKGDFFPRHLIWVTPGFFHYQGFKKGAKKLIFGAPKKKLIFSKPGEENSKLGPGFIPKRKRPQP

SEQ ID NO: 211355 - protein, 42 aa, Glycine max
  Clone ID: PAT_MRT3847_32880C.1.pep
NLFQGSKLDFIFGEWSKLDFVVKWLSLKLETSSEAQNHYKKK

SEQ ID NO: 211356 - protein, 117 aa, Glycine max
  Clone ID: PAT_MRT3847_32881C.1.pep
DDGGICRLMAISDAVARNFSTIFVGLMACFEAYGFASGRRFSGGYVVIVSTAAVILFLVATLTWDVSRKATCAFHRDHADSQEDVCKGGICWHGVAPRSPASQVRVRLPSHLPLAPL

SEQ ID NO: 211357 - protein, 114 aa, Glycine max
  Clone ID: PAT_MRT3847_32882C.1.pep
TLLLQPPVFPLSSSPPLNIASSTASSKPFVHSDQASALLLLLRFSLLLPPLLRSSFIPARLGGSSFLAPGNPSTRGRKRGPVFGHDDGEVGIRRRVGRLQRKREKATEMRGFGN

SEQ ID NO: 211358 - protein, 154 aa, Glycine max
  Clone ID: PAT_MRT3847_32883C.1.pep
MQIVVKTLTGKTITLDVESSDTIDNVKAKIQDKECIPPDQQRLIFAGKQLEDGRTLADYNIQKESTLHLVLRLRGGAKKRKKKTYTKPKKITHKHKKAKLAILQSYNADHSGNVQRLRKECPPLQRGAGTFMANPFHRHHRAQCGLTYLSPKAD

SEQ ID NO: 211359 - protein, 48 aa, Glycine max
  Clone ID: PAT_MRT3847_32884C.1.pep
FCQSSVFFFTRTRTCSISFIILVVSINTWTPKLRILKFNDTVNYSMSL

SEQ ID NO: 211360 - protein, 65 aa, Glycine max
  Clone ID: PAT_MRT3847_32885C.1.pep
LQALKSGQLPADLLLDNVDEKHEDMIHDDRGQADGESNDTQEQRNTDSASMEQVYGHIDMCPSKH

SEQ ID NO: 211361 - protein, 81 aa, Glycine max
  Clone ID: PAT_MRT3847_32886C.1.pep
VLNTYSDKQKHHRCIREYRRGMNLLRVHSEEEDHPLEPQSIWQCHYKHNNHKFMGRRGTLQSFRTSSHCWLPNQTFLWLIL

SEQ ID NO: 211362 - protein, 137 aa, Glycine max
  Clone ID: PAT_MRT3847_32887C.1.pep
EGEEKDEQVGLIRKKAFLNTHSASLFLSLWVVILVVLLFLCGAANQPTSTRNILCRGRGVVVFWRKTSTSLSLTPDNMDSDQHLPTYDPLSHVAQRDLSRLRSAQNAVHLIPLLVLLCAVILWFFSAPTSSPNNHSS

SEQ ID NO: 211363 - protein, 49 aa, Glycine max
  Clone ID: PAT_MRT3847_32888C.1.pep
SYTSKHWYYYYFLSRYGVPLCRSGFGTRGTWLAQAYLKYQVLHRQNHEL

SEQ ID NO: 211364 - protein, 96 aa, Glycine max
  unsure (1)..(96): unsure at all Xaa locations
  Clone ID: PAT_MRT3847_32889C.1.pep
LVEGHTEVPNWRFNCNVELVQSPQKHGGMILIQPXGRHAVRLVNDSEISQHLPVEKGXSIYSLTFSAVRTCPHFESINISVLPASNTIDLQTLYNV

SEQ ID NO: 211365 - protein, 470 aa, Glycine max
  Clone ID: PAT_MRT3847_3288C.1.pep
MALPDTLTSTPTSSMDERESLKNDTPICSNACKDVTKEKTFYLQPVSPFSSGVGLPYAPEGWPSPGDVWGWKVAKRMNNSGYFTDRFLTLPRSLEKSRRKAEFRSKADISRYLQSNYPDMKIEAFFALFSWQIPSTQQTPTKAIESLETGEDATDEIGTPRKKLKQETGSLSVPTHKSLALLALPSSEAGEDATDEIGTLGKKLKRKTRSVGRPPKKSFGLVQGRPHLTPDQVVNLDDYLDTLEDMLVMPEIETTPSDHLTPPTVLDDNEMIESCKKKLSSLLAIDFPSLVSRSDVAEVATLAAHIREDPSLSVDQLFKLKLVEQVPLAGEAFVEAKENIEEVNNFLADLEAKKLKVPSLRKEYNELKDKIGQQEAEMDISTLTIREIDDQIRQLQAKRNRITNGLETMKKTKAELTSELTNVANSISTIGHDIKHGLSQKSKLELKKANNIRRVAEIQEKFITLRGLTF

SEQ ID NO: 211366 - protein, 83 aa, Glycine max
  Clone ID: PAT_MRT3847_32890C.1.pep
MQRSWSGSVWRKTSTSLSLTPDNMDSDQHLPTYDPLSHVAQRDLSRLRSAQNAVHLIPLLVLLCAVILWFFSAPTSSPNNHSS

SEQ ID NO: 211367 - protein, 75 aa, Glycine max
  Clone ID: PAT_MRT3847_32891C.1.pep
SLFFFFFKKKKREKLSWLCHATVFAYNLVAYCKHLILYIEPEKYIKLSTRQDKGLHCSIWIMGDEYWITSETYLS

SEQ ID NO: 211368 - protein, 118 aa, Glycine max
  Clone ID: PAT_MRT3847_32892C.1.pep
VPRGFQYSILSADYRGYSSIQKGVTGTLKSTYYFSGQTAQTSTEYSFVGPVTGECLKHEEADSTWIVWSPCGAAGMLNINSQVRLTSSNSSATGLLATDSPDVKFTQVVYVQWQKCNK

SEQ ID NO: 211369 - protein, 66 aa, Glycine max
  Clone ID: PAT_MRT3847_32893C.1.pep
QIFVKTLTGKTITLEVESFHTIDNCWGKIHDRDGILLDQQRIIFDGEQCRDGRILADYSISIVITS

SEQ ID NO: 211370 - protein, 58 aa, Glycine max
  Clone ID: PAT_MRT3847_32894C.1.pep
VLLNTSSILINTVFYLDVIPQSVAITRDYYTAFSFFFVFAFFFFFFSQNCDCVVVESA

SEQ ID NO: 211371 - protein, 51 aa, Glycine max
  Clone ID: PAT_MRT3847_32895C.1.pep
WGGGGGGGGGGGRRRDGGKEENAVTGMNLQAYRLTAGITRLTELVNHAVNV

SEQ ID NO: 211372 - protein, 56 aa, Glycine max
  Clone ID: PAT_MRT3847_32896C.1.pep
MARHSLLLALLLFAAGATGAMAGAASDADDILIPQVVPDVGEAQKEGNLVDAQHHF

SEQ ID NO: 211373 - protein, 97 aa, Glycine max
  Clone ID: PAT_MRT3847_32897C.1.pep
KDHRRRSWLSSNLCSVWFWKHIYHYKPKYSTVMEDYLSGERTLWLGEFYPRKRLQNMGVCKTYMVIKIFLIFYKIFRSVKMIACDSIHTREIGEFFF

SEQ ID NO: 211374 - protein, 90 aa, Glycine max
  Clone ID: PAT_MRT3847_32898C.1.pep
INQQYIYETLLLFMLFATDIQTRLPAFQFRTDLRTSKDRAISFIPTNATVFKVTIVCLLYNSRHVQTRFEMLYPRALYLTSNRMFITLVA

SEQ ID NO: 211375 - protein, 96 aa, Glycine max
  unsure (1)..(96): unsure at all Xaa locations
  Clone ID: PAT_MRT3847_32899C.1.pep
PCKVDPLLIHIGYIHVPPMRYSGSSSVSLSDSYSGYXGTSRXIXRVAAHXSXXASXLAXSRTLSYSSCSPYLARHSVVSRXXPARSXSLEPLEPAR

SEQ ID NO: 211376 - protein, 94 aa, Glycine max
  Clone ID: PAT_MRT3847_3289C.1.pep
MALPDTLTSTATSSMDERESLKNDTPICGNACKDVTKEKTFYLQPGSPFSSGVGEPYAPEGWPSPGDVWGWKVAKRMNSSGYCIDGCLTLPRAL

SEQ ID NO: 211377 - protein, 71 aa, Glycine max
  Clone ID: PAT_MRT3847_328C.1.pep
PLVRDHVRRMPEDHRRRLHSQLTPSSAVRFQTLHSGGGFTGSRLTYTRMRARTSVIVAPKYSSRGRHTTPA

SEQ ID NO: 211378 - protein, 84 aa, Glycine max
  Clone ID: PAT_MRT3847_32900C.1.pep
PPAGHHCLVRRHFRSSNLIMAALAPLWGRRSMLSWGHLVSSRMQSVRQVVVFSLLSLLRLFSRLRCPGYKRVSFTGWLLARQHP

SEQ ID NO: 211379 - protein, 55 aa, Glycine max
  Clone ID: PAT_MRT3847_32901C.1.pep
NMQLHRMRSFPVLTCSFRRTFPGQPNPYVTNSNLRLGFILQSVSFPSQFLAFRRP

SEQ ID NO: 211380 - protein, 53 aa, Glycine max
  unsure (1)..(53): unsure at all Xaa locations
  Clone ID: PAT_MRT3847_32902C.1.pep
NXFXSLNHLXXLLKTNXXQKIXPNXFXFVNXLXXFXFFXXXXIXTFYXXXXPL

SEQ ID NO: 211381 - protein, 172 aa, Glycine max
  Clone ID: PAT_MRT3847_32903C.1.pep
VGVESSALASLFVGLTNFAGALCALYLIDREGRQKLLIGSYLGMAISMFLVASGIIFPLDEQLGNNLSILGTIMYIFSFAIGAGPVTGIIIPELSSTRTRGKIMGFSFSTHWVCNFVVGLFFLELVDKFGVAPVYASFGAISLLAATFAYYFIVETKGRSLEEIERSLNLKA

SEQ ID NO: 211382 - protein, 75 aa, Glycine max
  Clone ID: PAT_MRT3847_32904C.1.pep
KMGPRGEPKEVNPKKLSWLKSKTRGQNAMLISVLCITNESYESKGEKGSRKEIFSMLEPKGMVSDLFKDLKLNLK

SEQ ID NO: 211383 - protein, 109 aa, Glycine max
  Clone ID: PAT_MRT3847_32905C.1.pep
TPSLRALVEALAAPGDDILAPVAENATEQARVMTCTLTTKRPTVSTVGTERVGNTLLNTVGRRRTVVVGEQQQHKQHNQQQEKNKIVKTRIAAIWIEYKRINYDTGDYD

SEQ ID NO: 211384 - protein, 79 aa, Glycine max
  unsure (1)..(79): unsure at all Xaa locations
  Clone ID: PAT_MRT3847_32906C.1.pep
VPLWRXFLPCLSQSPSHAIPALNWSGVGHGKEVKPWLCPAEAQLVKTIMGLYMRLVVAACWRTKCRKYCSVSNDPAGLA

SEQ ID NO: 211385 - protein, 50 aa, Glycine max
  unsure (1)..(50): unsure at all Xaa locations
  Clone ID: PAT_MRT3847_32907C.1.pep
TLNLGLXLSNLVGKTFGLRESSFMSGLDDQIPTAFDPFADANADDSGAGS

SEQ ID NO: 211386 - protein, 72 aa, Glycine max
  Clone ID: PAT_MRT3847_32908C.1.pep
DWFCQNWDFGLRGFSPSFCSIFWVLMNPLTFLRYWGRNVSYCFNDCRDIEGFIESCVMFMIGCGFLLYLLLL

SEQ ID NO: 211387 - protein, 120 aa, Glycine max
  unsure (1)..(120): unsure at all Xaa locations
  Clone ID: PAT_MRT3847_32909C.1.pep
RADSLELAASIVEPIQGERGIXYSATEEFLQPLRSAXDEAGALIAFDEVQRGLCRSWFLWAHEALGDFPDMMTLAKPLAAGLPMGACLATDRVACYINDGDHGSTDASKPYEEVAAALAG

SEQ ID NO: 211388 - protein, 137 aa, Glycine max
  Clone ID: PAT_MRT3847_3290C.1.pep
PSSPGASVRGGRYGIPRNSPSSVDEQQRIQYNQMLSGRNIQQSMSVTGTLSGSDHGVRILPGGNGMGLMGGINKNMAMRPGFQGMASPSMLNSGSMLSSSMVGMPSPVNMHSGVGPGQGNSILRPHENLHMMRPGHN

SEQ ID NO: 211389 - protein, 49 aa, Glycine max
  Clone ID: PAT_MRT3847_32910C.1.pep
MGFARDSTQIRRGTGGKKKACRKKRTSELGRQPANTKLSGNMTVTEDPC

SEQ ID NO: 211390 - protein, 117 aa, Glycine max
  Clone ID: PAT_MRT3847_32911C.1.pep
ISLREKKARFLLVARIFFLGVPFPLRRPPGRKNHKPMEMGFLMGAIWKREGILDWGTTFLRGPNFAVKGPLPFFPFLARMVFFLTKRGPWWFWNISLLRKNGIIVNPLNSKNFPPSA

SEQ ID NO: 211391 - protein, 88 aa, Glycine max
  Clone ID: PAT_MRT3847_32912C.1.pep
ALPKKRGDETNDQYKNPLKCYNTKGNLGTGTFYLKILFQSPTLRLKKITYRCFYCTRLQNYNLGKIKTWDLNFNPPPNPQKKLGGGSP

SEQ ID NO: 211392 - protein, 179 aa, Glycine max
  unsure (1)..(179): unsure at all Xaa locations
  Clone ID: PAT_MRT3847_32913C.1.pep
ALQGALIAFSNTSVYDDKLALAYTHELYDGNYAEDYWLPNQVNCVYPVSRLPQDADSVDVSCTCTTTNLVMVFGEITTKANVDYEKIVRDTCRNIGFVSNDVGLDADNCKVLVNIEQQSPDIAQGVHGNLTXRPEEIGXGDQGHCLLCTDETPDXAMSHXLXINSVSSTEARRFGWAME

SEQ ID NO: 211393 - protein, 184 aa, Glycine max
  Clone ID: PAT_MRT3847_32914C.1.pep
MSSTQLPFPIRMQSATRAEAERLLGIAEKLLQNRDLVGSREFAFLAQETEPLLEGSDQILAIVDVLLAADKRVNNHPDWYAVLQVDRRSDDLDLIKKQYRRLALLLHPDKSRFHFADHAFQLVADAWALLSDPIKKSVYDKELSFFSRVDLSVPGWVQQQEKLPVRRTGPGPRPGPGPTAGRIA

SEQ ID NO: 211394 - protein, 125 aa, Glycine max
  Clone ID: PAT_MRT3847_32915C.1.pep
MKGYFLKGMEKEAMECYEEVLGKKKMSAVGYNSVLDALSKNGRLDEALRLFDRMMKEYQPPKRLRVNFFIFNEIADGYSGDFFPPPPPGEEGRTGAGDKLRPNKKKNPSGEGGGNPPGSERRNAG

SEQ ID NO: 211395 - protein, 57 aa, Glycine max
  Clone ID: PAT_MRT3847_32916C.1.pep
WFLGYEESHLAPAVVVWAYTLELQIGAFCAHSTLLCSSDGLFLMCKHYSLAELGDRT

SEQ ID NO: 211396 - protein, 172 aa, Glycine max
  Clone ID: PAT_MRT3847_32917C.1.pep
NFPTALLIFFIGFVSSSLFQVSVAYIVSTGDFNKDFFVIWSPTHVNTSADGHARSLKLDQESGSGFASNQMFLFGQIDMQIKLVPGDSAGTVLAYYLTSDQPNRDEIDFEFLGNVSGQPYILQTNIFADGTDNREERIYLWFDPTKDFHTYSVLWNMHQIVLMVDMIPIRVY

SEQ ID NO: 211397 - protein, 79 aa, Glycine max
  Clone ID: PAT_MRT3847_32918C.1.pep
PPPFLGGPPRGFRRFPKPKFFFLGTQVGFPRVNPGGAKFFFSPGWVEPLFIDGGGPFPMEGPGYYPERGVFFFRVRASL

SEQ ID NO: 211398 - protein, 134 aa, Glycine max
  Clone ID: PAT_MRT3847_32919C.1.pep
SRRGSPAGTCGCSSDPNGGGGQGLLRGHYVGAWVFGSGWATVVSFCWCLGRCGVWSKVAVLGLFVMLGAAGCCLYTVLGVAVPVLSLVVVVRRWRSGCWLGRAPPLLLAPRSVLNVCLSCVQPAVNRAPGSRRY

SEQ ID NO: 211399 - protein, 52 aa, Glycine max
  Clone ID: PAT_MRT3847_3291C.1.pep
IRGAQNVIINDRFLLGLRLSSSFQAFVYSLKLLWQTIPSIMDGKRGGENFAF

SEQ ID NO: 211400 - protein, 83 aa, Glycine max
  unsure (1)..(83): unsure at all Xaa locations
  Clone ID: PAT_MRT3847_32920C.1.pep
ANLLSWARHCARNGKLVELVDXSIEXXDKEQALLCIRVALLCLLKSPARRPSMKEVVGMLSGELEPPQLPVEYSPSTPSRFPF

SEQ ID NO: 211401 - protein, 45 aa, Glycine max
  Clone ID: PAT_MRT3847_32921C.1.pep
HLNMSACPKFIRTSIIYTYCYSSKSKIDEKIGCPDLTYDTKPYSK

SEQ ID NO: 211402 - protein, 45 aa, Glycine max
  Clone ID: PAT_MRT3847_32922C.1.pep
MDIMLKCSKSTYPPTNMEQIWQHDIFQEIHLRASALYYGIAIPSW

SEQ ID NO: 211403 - protein, 40 aa, Glycine max
  Clone ID: PAT_MRT3847_32923C.1.pep
AHRPDEYHGCLQSFVSRVYVYPLLDWVVQFPLSQVKEKEA

SEQ ID NO: 211404 - protein, 79 aa, Glycine max
  unsure (1)..(79): unsure at all Xaa locations
  Clone ID: PAT_MRT3847_32924C.1.pep
XFTPSNPNLHPHLXXLXLXPPNSTRXTXSRASXTLDSLFXAACFNSPALVXXLLTFLQHISAXXLXXRXLSLXLHLSLD

SEQ ID NO: 211405 - protein, 48 aa, Glycine max
  Clone ID: PAT_MRT3847_32925C.1.pep
LVPKSLYFLCPVSYHTSRGKWRRKDRSLMHIEGILKPLQCVGVLRFLG

SEQ ID NO: 211406 - protein, 83 aa, Glycine max
  Clone ID: PAT_MRT3847_32926C.1.pep
LYLHRHWPVKERPPRLLKQTLKVDPFCTFYMTLSERSPAPIVHAPLGLKADHWKKGMPASLGQEKTPWNLTNTLSRPLKGCTS

SEQ ID NO: 211407 - protein, 242 aa, Glycine max
  unsure (1)..(242): unsure at all Xaa locations
  Clone ID: PAT_MRT3847_32927C.1.pep
PRVRENAVLGSVTVLVESEGQTGPVWHTLDSPSGKVSLQIGTEKLSANASRIHCCGGATVVHQKPGPLQTIFDLPPDEVVDHRYICALEMSFLYQGHLYVSAWHICFYSNILKQMKVVIPFEDIDEIQRSELALINPAITIILRKGAGGHGVPPSSPLASADGRVGYMFASFWDRNKALENLQRVSKNFNEMLEAEKENAEPQLCAHSSSVPDKVLEDSXAKTGKLKPFIKEEALVGMNNDC

SEQ ID NO: 211408 - protein, 54 aa, Glycine max
  Clone ID: PAT_MRT3847_32928C.1.pep
SLSNIYFSPSLIHPGLIWITKRQRRYKFDRRTETQSEIVSRRGRSLRHSSYIQT

SEQ ID NO: 211409 - protein, 54 aa, Glycine max
  Clone ID: PAT_MRT3847_32929C.1.pep
MHAYVSWSLGGRFFFFFFFFGKETGFILLSCIMHIRPTKVPNFSLYVYTNTTIR

SEQ ID NO: 211410 - protein, 45 aa, Glycine max
  Clone ID: PAT_MRT3847_3292C.1.pep
HPSEMFSQCYLGNKLKISRQGLGLSLIKKAFFVSIWYLVWSPENT

SEQ ID NO: 211411 - protein, 77 aa, Glycine max
  unsure (1)..(77): unsure at all Xaa locations
  Clone ID: PAT_MRT3847_32930C.1.pep
AQHXEQXXXCQMIHLRQLTTILQXXVVRSFINGTSPSPGEVKCNVKAQSSSCTWPVQSSFFFQPLMWLAVAAQENTL

SEQ ID NO: 211412 - protein, 70 aa, Glycine max
  Clone ID: PAT_MRT3847_32931C.1.pep
KLMNSKTGYTGLDVKLTKPTQGSPAGLKKNPTTGEEDFFIHCDIEKEKQSYRGQPRVQREELVPGEKGPP

SEQ ID NO: 211413 - protein, 85 aa, Glycine max
  Clone ID: PAT_MRT3847_32932C.1.pep
TIQASLNIYVTKMPLFSYGSRSMAPQVKNEVLIPVEQNRSIDILDIAGDRTLVSDVSRSAVRFNNQVSSLPLAVHSGRGSFTAAN

SEQ ID NO: 211414 - protein, 392 aa, Glycine max
  Clone ID: PAT_MRT3847_32933C.1.pep
EIYADSDDESDGSSGTVTSADESSVICLEDPATFSSLQLPYYDARAGFQHNITEKEKGKIQNIQAISVKFLRLVLRISLSLEDSLVSKVLYRLVADIERRLNQEFIIKSAKTSAKKLEENCQDDLDFSLNILLLGRSGVGKSATINSMFGDMKVVTNACEPATTSVKEVSGTIDGIKIRILDTPGLKSCIKEQAYNRKILSSVKRYMKKFPPDVILYVDRVDAQTRDLNDLPILRSITSSLGPSIWQHAILTLTHAASVPFDGPSGSPLSYEVFVAQKSYLVQQSITQAVRNLCQLSPSFMCPVALVENHPLCGKNMFGDCVLPNGLRWRSQLLALCFSLKIVSEVSSISGSQTLFDNWKNCFFQDHPQPLCHLFSSLLKSPAHLKFSANWN

SEQ ID NO: 211415 - protein, 48 aa, Glycine max
  Clone ID: PAT_MRT3847_32934C.1.pep
VLLHRHSVFAVYVYLTCIEQGRQRDLIEIYLKATFRVDTLSKSSPYPN

SEQ ID NO: 211416 - protein, 86 aa, Glycine max
  unsure (1)..(86): unsure at all Xaa locations
  Clone ID: PAT_MRT3847_32935C.1.pep
NLXXSSVSLSLXPRXPLIARWITXAIAXXYTCDLXYXFXPLXSIXXSXLXXWXINXXXSXXXQDXXAXVFIXPRAEFRAYVRVRAT

SEQ ID NO: 211417 - protein, 244 aa, Glycine max
  Clone ID: PAT_MRT3847_32936C.1.pep
MATVNPQPLQFEDPAIPVDDDDDDDDDGGDDDAMDELEDANVNSVNVTANAAASVNHEAVVAMPSRTSELTLSFEGEVYVFPAITPQKVQAVLLLLGGRDVQAGANLSEPPVTHPLSISFTSLLSLSPTNSQTYFLPAYDHSTKHSTTWVILQNSARDEGAERMDTVNGQFAYLKDRAVSVDGDAAESEDHGGAYASDYLEEANVSFVSETNTPAMRRGPAGPRTLCNGCGLMWVNRGTFERSQ

SEQ ID NO: 211418 - protein, 54 aa, Glycine max
  Clone ID: PAT_MRT3847_32937C.1.pep
VLYWTIFTFVKYFIAVYLRFVLTDLQLQDGFFLRSELLLLEVIFFIDRNQNTYL

SEQ ID NO: 211419 - protein, 80 aa, Glycine max
  Clone ID: PAT_MRT3847_32938C.1.pep
IYNEIYSITGTSNVELVKGRILVITESVLSLKSIHPFTFYTLLLINKTSLSNYFSPYEDCFHKNLQRVFMTIIDDLDTLV

SEQ ID NO: 211420 - protein, 90 aa, Glycine max
  Clone ID: PAT_MRT3847_32939C.1.pep
SYIITDPIMDFSTIFKICLESLKPMKANKHRLCTPSPFIHCKLMNLYTRCNLGCKHSGLVKYTLCYLVSHSYQPLCCYRLPVLNIMPSAK

SEQ ID NO: 211421 - protein, 70 aa, Glycine max
  Clone ID: PAT_MRT3847_3293C.1.pep
NKVQKVTSDGSGDFESVPVGEVCYRLVKKAAGVGAMASIPCGVCPRINSCTPDGVISPTTCQYYQKWLDF

SEQ ID NO: 211422 - protein, 100 aa, Glycine max
  unsure (1)..(100): unsure at all Xaa locations
  Clone ID: PAT_MRT3847_32940C.1.pep
GDNTINFEAVSHTLAQFGEIQEKDVLKFSQEEILTGRSHKVLPATTLLADGGTYLNAMVHDSXIVYITXDIGIVVKLSTIDNVCAYGLNPGISGSRLLGT

SEQ ID NO: 211423 - protein, 88 aa, Glycine max
  unsure (1)..(88): unsure at all Xaa locations
  Clone ID: PAT_MRT3847_32941C.1.pep
MSSSRTXAVAASXGVVEALKDQGLCRXNNALXXAXXXVKNHXRSLXXXXKASSYXSSXXDSSPLKEEGXKQXEESLRTXMYLXXXXXN

SEQ ID NO: 211424 - protein, 87 aa, Glycine max
  Clone ID: PAT_MRT3847_32942C.1.pep
RSMTGSLSLFLSVTPAFCLATYTLSIFVMAYGLSWSYCIWPCLLFTMRGRPHFFVYGNRPSVLHRLLLRASSPSSFTVSSTHACKFV

SEQ ID NO: 211425 - protein, 53 aa, Glycine max
  Clone ID: PAT_MRT3847_32943C.1.pep
MSMAAPSSLLKVEEIQGRGRGMVASQPLKAGQIVLRDSPILLYSALPLVRQSL

SEQ ID NO: 211426 - protein, 60 aa, Glycine max
  Clone ID: PAT_MRT3847_32944C.1.pep
VCNKPTFFYEGCKAPPTALPLYFTTTRVCVAFSSQIRPRPFFKPQTLITSPNPISSDPLT

SEQ ID NO: 211427 - protein, 53 aa, Glycine max
  Clone ID: PAT_MRT3847_32945C.1.pep
YQAPMSPERWKCQVEELTSKSCSTQVTVFSQVDWSSHARGNMSRLNYDGFPPC

SEQ ID NO: 211428 - protein, 158 aa, Glycine max
  Clone ID: PAT_MRT3847_32946C.1.pep
MGAITPATIASSNNSSSTVVASSSSATSFFKFGSSPVRSVGLPVSSSGGSEPPEIKSRQDAGTGGLSSTAFGSSSAGSGIFGFSSSAMTTVNSSQSQSSAVGASSGSVLGAQASFTSGFATSTQTQSVSFGSSASSSSFGLSGNTPLSSSSSFSSSSP

SEQ ID NO: 211429 - protein, 58 aa, Glycine max
  Clone ID: PAT_MRT3847_32947C.1.pep
FLRGIGSLGILFFQLVNYLGSERPFHLDMGWIKIQLDRDQSLGDPVKNERVMTDNMCL

SEQ ID NO: 211430 - protein, 30 aa, Glycine max
  Clone ID: PAT_MRT3847_32948C.1.pep
CKVSPNVFMRVLLVRSGHMDKLFSLSSGLE

SEQ ID NO: 211431 - protein, 48 aa, Glycine max
  Clone ID: PAT_MRT3847_32949C.1.pep
CLLKSLFKHHYALMIEGFLKFISIFLVILGVKSHNIWAYVIMFWYHLL

SEQ ID NO: 211432 - protein, 71 aa, Glycine max
  Clone ID: PAT_MRT3847_3294C.1.pep
RVRRRVLFPTLFYFFQSSHYKISHGGIFNHPQSTHNDSHALTPFLQCLITLHFELTDNLTVSHPHSNLPIL

SEQ ID NO: 211433 - protein, 117 aa, Glycine max
  unsure (1)..(117): unsure at all Xaa locations
  Clone ID: PAT_MRT3847_32950C.1.pep
GGPPPWEKFIFRDPQDPSPPNAVFSNTPGKKKFIRRGSPIVGIIGDQWRVFLGGPKGEKRPFKLPNXPCNTIRSSFPSQQLRGVPXYLNVKKGVQKGAPASLYVVSPVGTKSCKKLP

SEQ ID NO: 211434 - protein, 146 aa, Glycine max
  unsure (1)..(146): unsure at all Xaa locations
  Clone ID: PAT_MRT3847_32951C.1.pep
FQAQLLHHHHFPLPLTNQYYKPGLFSNYRGNIIQLTLVSTTSTYTPYSSLYXLYYTSSYYLVTISTTFSYLYSTQPINFIYATDLHQSSSSNSNSSYYDFQRXKLRIKIMIYKIKQKLLIILICNNNNDHAHTTTSPTTYTNHPSY

SEQ ID NO: 211435 - protein, 65 aa, Glycine max
  Clone ID: PAT_MRT3847_32952C.1.pep
SGLLIENGAKRETFADLIEQKGRESSFSSEYLPSETTHGEHTRSSTDDSSSSPSVGCPVQEIAAS

SEQ ID NO: 211436 - protein, 49 aa, Glycine max
  Clone ID: PAT_MRT3847_32953C.1.pep
GGVFLSRGPTAEFLARPWNPPTFPYSGPILPIGNQFQSCFHNENCFPLQ

SEQ ID NO: 211437 - protein, 34 aa, Glycine max
  Clone ID: PAT_MRT3847_32954C.1.pep
YHDILGIIKNASEDEIKKAYRKAVLKNHPDKGGN

SEQ ID NO: 211438 - protein, 111 aa, Glycine max
  Clone ID: PAT_MRT3847_32955C.1.pep
NVCFSVSDKLQHFPSFIFYLPTRYRCNYSLSFPLGSDSDLQVDGALPRIRIRSAVSLIYLPYRVVMIVSELLLRFLSKNRSINNRRLQRRSREESGVTFFAFQCRWCMLWY

SEQ ID NO: 211439 - protein, 100 aa, Glycine max
  Clone ID: PAT_MRT3847_32956C.1.pep
PILIKKKPIYQKANLLLTCLVFLSDFPVAGTLSQCIWNFWIARDIIRLFAKKKTCGLCSVECFFKHSLSHFFINILFITTQTSLQKKKKNRMSTTNVDYY

SEQ ID NO: 211440 - protein, 102 aa, Glycine max
  Clone ID: PAT_MRT3847_32957C.1.pep
LRKNIRLGEYGGRELGPMQKELAEQLGLSTGEKEKLPGELEPVQAAQNKTGKYVPPSLRDGASRRGESMQPNRRADDNATIRVTNLSEDTRETDLQELFRPF

SEQ ID NO: 211441 - protein, 96 aa, Glycine max
  unsure (1)..(96): unsure at all Xaa locations
  Clone ID: PAT_MRT3847_32958C.1.pep
LIHIIALARRTIHQSILRAKYVLRRCAYXTGRSVKSIPHGERKPVIGMSVFVQPREIASNPASDTGPFISSRVLPGKTPSSRKSLQVLSPRSSLHV

SEQ ID NO: 211442 - protein, 355 aa, Glycine max
  unsure (1)..(355): unsure at all Xaa locations
  Clone ID: PAT_MRT3847_32959C.1.pep
MGICISVAEEAHDDDNVTIFEARKVLNGSQRLCSVYSKQGSKGLNQDAASVHEGYGMEDGTFCGVYDGHGGNGHKVSKIVSSRLSSLILDQKNVLERIDEIENGYNNTTKKHVNSVKEELPARNFQKWKEAIVSAFKVMDKEVKLQKNLDCFSSGTTAVVIIKQGEGLVIANLGDSRAVLGTIYDEKLVAIQLTTDLXKPDYLKDLCVINWNAGEAERIRRCNGCVCGSNEEPDIQRVWMPNNENSPGLAMSRSLGDFLLKDHGVIAIPDVSYHPLTSTDQFIVFASDGVWDVLSNNEVASIVWSVDSEEAAAMAVVEAATAAWNEKYPSYMADDCTVVCLFLHKKSQLTNLSAP

SEQ ID NO: 211443 - protein, 121 aa, Glycine max
  unsure (1)..(121): unsure at all Xaa locations
  Clone ID: PAT_MRT3847_3295C.1.pep
SXNYXWWAKSLGKGVMGINWLINHSLCXXXFPKFGFAIFXPXSFPXXQGSGPFXTRARPLKGXKLKXNXPLXSKFLGINSEXDXXPFFGGGSXTPRFKGXPXXPXRXGPGKFXPPESLXTG

SEQ ID NO: 211444 - protein, 154 aa, Glycine max
  Clone ID: PAT_MRT3847_32960C.1.pep
MENQFFLNAGVPPQLHFEPSPHGHQPCPPPSWQSSLSSAMDVQVTVLNCSTEQTQDCFYNTTPTWDKSTDHGLQFDSALSSMVSSPAASNSNISSENFVIRELIGKLGNIGGGGGSDEISPHSQPLVGASFYINCNNNSTNTSCYSNPLSSPPK

SEQ ID NO: 211445 - protein, 118 aa, Glycine max
  Clone ID: PAT_MRT3847_32961C.1.pep
DYYWGWVFNVEYTDPTSGHTHVASAETANETLTRYITPKRCAPLMTHYTCNSNETYDVSYTTGGPFVTIQHNMLLDHWSNYCLDLTVMLSQSLTSYYPILCYANSFQPNGIATLHFMC

SEQ ID NO: 211446 - protein, 122 aa, Glycine max
  Clone ID: PAT_MRT3847_32962C.1.pep
MSKEVIATQSPAPFEYEILDSDAEVLRTVRASSNHTNPWIEPGRLKLRHRIGRGPFGDVWLATHHQSTEDYDEYHEAAAKMLHPIKEDHVKIVLEKVNELYFKCQGVASIFLASLEFQALNG

SEQ ID NO: 211447 - protein, 103 aa, Glycine max
  Clone ID: PAT_MRT3847_32963C.1.pep
MSKEVIATQSPTPFEYEVLDSDAEVLRTVRASSNCANPWIEPERLKLRHRIGRGPFGDVWLATHHQSTEDFDEYHEVAAKMLHPIREDPVKIVLEKFNELYFK

SEQ ID NO: 211448 - protein, 358 aa, Glycine max
  Clone ID: PAT_MRT3847_32964C.1.pep
MLPGSLTFWVQHFSSVSPRFHRKESRMSKEVIATQSPAPFEYEILDSDAEVLRTVRASSNHTNPWIEPERLKLRHRIGRGPFGDVWLATHHQSTEDYDEYHEVAAKMLHPIKEDHVKIVLEKFNELYFKCQGVASISWLHGISVLNGRICIIMNLYEGSMGDKMAGLKEGRISLHDVLRYGINLAQGVQELHSKGIFILNLKPFNVLLNGNDQAILGDVGIPSLLLGSSFISSDMAKRFGTPNYMAPEQWEPEVRGPISFETDSWGFGCTIVEMLTGNQPWYGCPVGRIYQSVVEKHEKPNIPSGLPSSVENVLSGCFEYDLRNRPLMVDILSVFQRLLNNFPFILVFGVLLEMAVAV

SEQ ID NO: 211449 - protein, 201 aa, Glycine max
  Clone ID: PAT_MRT3847_32965C.1.pep
MPSRQLSTPSDTPHPLPPPRHHHHHHHHFLTPLLAATVSTCSLFLLLLLFCHRTLTRKRATTYPPSPATTSPPHRLSFSVLRRATNSFSTRLGHGGFGPVFAGTLAGAPVAVKLMDSATNHHQGEREFHNELFFASKLLSRHVITATHFCSDPKRRRFLLVYELMHNGNLQDALLHRKCPELSNWNTRFSIILNIAKGVHF

SEQ ID NO: 211450 - protein, 84 aa, Glycine max
  Clone ID: PAT_MRT3847_32966C.1.pep
NFGILKQNFKQLKIWNFNFLLKDEKLKFSFYSLLHKTPSELVEHRSSVSVEEHIELAYQSYLLFFSFIFFHPHNFNFFYPNTKF

SEQ ID NO: 211451 - protein, 49 aa, Glycine max
  Clone ID: PAT_MRT3847_32967C.1.pep
TQWLISHFRGNFLELVNKFQLLIPKFQPPIFFFLPLLIPTFIANLKIFP

SEQ ID NO: 211452 - protein, 56 aa, Glycine max
  Clone ID: PAT_MRT3847_32968C.1.pep
MIASPAAGCVIADPRGPIISPLISATKCELLAIENSIASYSIIASYSVITKYPILL

SEQ ID NO: 211453 - protein, 117 aa, Glycine max
  Clone ID: PAT_MRT3847_32969C.1.pep
MASFTKLAWVVLVCMVVMGAHNTVQGITCGQVQGNLAPCLGFLHNGGAVTRGCCNGVRSIVSNARTTADRRGVCNCLMVAAGAVRRFNTYNAQALPGKCGVYIPYKISTSTNCNSIR

SEQ ID NO: 211454 - protein, 159 aa, Glycine max
  Clone ID: PAT_MRT3847_3296C.1.pep
QKLKLDTGTAMLELNQILRANEINFAVLTALPAFFLSLLLMMLVRGWFKQDTKAEGRGRIARIQRRLLVIEVKKRIMQYQNYVDQGLERDAQYMFGLALYSLDRLYQSVKWHAEATGEWERLREDIIDLAKPRLQTAHKESVISHMVTFECLLPSRNRQ

SEQ ID NO: 211455 - protein, 67 aa, Glycine max
  Clone ID: PAT_MRT3847_32970C.1.pep
TQDRKQEREGLYSVPSGDLYTTMSITSTATATRTTFPESTDSEPRLTSCSPTSAGGPSISWTTRPGN

SEQ ID NO: 211456 - protein, 107 aa, Glycine max
  Clone ID: PAT_MRT3847_32971C.1.pep
FSCAVYGGNQFYSYSDHCPILIKAKNVDWGPKPFRILNCWLTDNSFKEVVNQCWNSAQVSGWGAYVLKEKIKRLKCRLKIWNKEECGDIFKKVQHLEVELNKLEEDT

SEQ ID NO: 211457 - protein, 90 aa, Glycine max
  unsure (1)..(90): unsure at all Xaa locations
  Clone ID: PAT_MRT3847_32972C.1.pep
TSFRVFLQPALPFIPPFGPPFFPRVFIPPLPNPLNSPGAPPPSPVVWNSLGPASPPVSQETHPAXFHKVSPVSEWEERKGNSEERLFVGT

SEQ ID NO: 211458 - protein, 41 aa, Glycine max
  Clone ID: PAT_MRT3847_32973C.1.pep
NAALSLDDNPFMESTSLANLLGSNNTVQPELTRNDHVYHQR

SEQ ID NO: 211459 - protein, 43 aa, Glycine max
  Clone ID: PAT_MRT3847_32974C.1.pep
TQVTVTPGVRGRMASRAHAGSTMRVLRTGRWLSHTGSTLKKAT

SEQ ID NO: 211460 - protein, 56 aa, Glycine max
  Clone ID: PAT_MRT3847_32975C.1.pep
IFIFTDIGSSSKPQHVVLNHVFIEKNLALKSVVALGLTHRFQSKYVTVVLYKPLKR

SEQ ID NO: 211461 - protein, 154 aa, Glycine max
  Clone ID: PAT_MRT3847_32976C.1.pep
GCDGRVGRYLGFSQGAKVAASLLYDQQIREERGLEVDPRYTFGVLMAGRNPLVSFGEHSRSEALVSAGQLSEGFVFEGTSPHILKLPTLHVHGLRDNGLHLHRRLLKQYCDPETSEVVEWDGDHRVPIKSTDVKPIKDWVYDIARRERIPLRET

SEQ ID NO: 211462 - protein, 283 aa, Glycine max
  Clone ID: PAT_MRT3847_32977C.1.pep
MGNANGREDGSIPPAAADPSAAARGTHAPPVSLPPVRAFSSDSMANSPPHSPRRSRSPILFGPQVPLAPLQRGNGPPFLNQMWQNESHGIVNHPPEQGIPVMITWNYGGNNVAVEGSWDNWTSRKALQRAGKDHSFLIVLPPGIYHYRFIADGEERFIPELPNVADEMGHVCNLLDVNDYVPENPDGVSEFEAPPSPESSYGQAFPAEEDFAKEPMAVPSQLHLTVLGMENSDIGSSSKPQHVVLNHVFIEKNLASKSVVALGLTHRFQSKYVTVVLYKPLKR

SEQ ID NO: 211463 - protein, 108 aa, Glycine max
  Clone ID: PAT_MRT3847_32978C.1.pep
MGNANGREDGSIPGPADPSVADPAARGTHAPDSRPPVRAFSSDSMANSPPQSPRRSRSPILFGPQVPLAPLQRGNGPPFLNQMWQNESHGIVNQLPEQGIPVMITWNY

SEQ ID NO: 211464 - protein, 86 aa, Glycine max
  unsure (1)..(86): unsure at all Xaa locations
  Clone ID: PAT_MRT3847_32979C.1.pep
ADPGSFNNSVAEQQAVLETVARVTPNKNDTKDEKSFQLHHVFNRAEETPMLIDRKDNVFIISNFKSKYXVLQLDLRLISDLVVAIF

SEQ ID NO: 211465 - protein, 85 aa, Glycine max
  unsure (1)..(85): unsure at all Xaa locations
  Clone ID: PAT_MRT3847_3297C.1.pep
NETQWCNDEDCELVNCDHHRHQTQQYTNGDRRLCWQRCDRTXSYVQERDEQIPEETRDKKDVESRDREXKQSEHHEEQDENPYIF

SEQ ID NO: 211466 - protein, 48 aa, Glycine max
  Clone ID: PAT_MRT3847_32980C.1.pep
KQNANVSMLDCWQVHQIITNTKLKWKFEYRIYKNFICTYVGEYIIVRQ

SEQ ID NO: 211467 - protein, 60 aa, Glycine max
  Clone ID: PAT_MRT3847_32981C.1.pep
GAEIDFRTCQLLSSCVRSTNWYSLFLFVVVHLALILIYFSYKKLSIKKNHKIIIKYNFLM

SEQ ID NO: 211468 - protein, 72 aa, Glycine max
  Clone ID: PAT_MRT3847_32982C.1.pep
PSGRIRKSVDGFKEPSASSPFTLGFLVISHILWLLHPTEIFYVSGSSFGESARCMPVRECKFFIMHVWTIDV

SEQ ID NO: 211469 - protein, 178 aa, Glycine max
  unsure (1)..(178): unsure at all Xaa locations
  Clone ID: PAT_MRT3847_32983C.1.pep
VKRFTISIVDIDHVDSVKNTTTGHLIYKLXGIDKRXIERVEKEAVDMNNRTFTIAXQHDKLMAERERGITIDIVLWKFETTXDYRTIIEATGHRDIMKNMITGTSQADXCAGLIIDSTTEGXEAGIVEDGQTNEXHALLLLTLGVKHMIXRVNMMDATDTRGXEAMFDEIVKEDSYYL

SEQ ID NO: 211470 - protein, 266 aa, Glycine max
  unsure (1)..(266): unsure at all Xaa locations
  Clone ID: PAT_MRT3847_32984C.1.pep
MDLIISDSDWETSSGSNSSEDQDEIDFLYGGKAQSILSSLEESIGRIDDFLSFERAFVHGDVVCSLSDPSGQMGRVTSVDLFVDLESIKGKVLKNVNSKKLLRIRSISEGDYVIKGPWLGRVQRVVDKVAVLFDDGAKCDITALEREKLLPLTGNFPEDSQFPYYPGQRVKVKSSSASKSTRWLCDTWRDNHDEGTVCAVEAGLVYVNWISHVLVGCDFSVSAPKCWQDSKTLTVLSXLSHANWQLADWCILSVADHRNTLLITLL

SEQ ID NO: 211471 - protein, 107 aa, Glycine max
  unsure (1)..(107): unsure at all Xaa locations
  Clone ID: PAT_MRT3847_32985C.1.pep
VRVAVKAXNSQRAATLAHGXYFAAYTDYKWLARTARNRTGCLKTPPGPVSSALGQHRYSRLGFNFLGFAFRFIITLNXCFLFFSSTAPRLKVPIPRPLRAYFASKFK

SEQ ID NO: 211472 - protein, 37 aa, Glycine max
  Clone ID: PAT_MRT3847_32986C.1.pep
EDYSTQAESLIGTSLIRFRSHHMGTLITYITEFVSFE

SEQ ID NO: 211473 - protein, 69 aa, Glycine max
  unsure (1)..(69): unsure at all Xaa locations
  Clone ID: PAT_MRT3847_32987C.1.pep
ENTWIYANGVSPDXHWALLVLSRWRLPFVLTKLQKMAILVMDRRLSEEETAGLRKCCWLLDTDDKVAVS

SEQ ID NO: 211474 - protein, 66 aa, Glycine max
  Clone ID: PAT_MRT3847_32988C.1.pep
SLEINNDNCSSEAKTLILLVTGSQYQMKGKGRVGKGETDTQVPPKKSKSLLAGRFKNTFEQLNSSR

SEQ ID NO: 211475 - protein, 69 aa, Glycine max
  unsure (1)..(69): unsure at all Xaa locations
  Clone ID: PAT_MRT3847_32989C.1.pep
LQHEPYCSCDSMLQLICFHHSFKELKFSSLYYSWKSLLMSLMGDPADENLETKEMDARKLHXHMVRKHM

SEQ ID NO: 211476 - protein, 51 aa, Glycine max
  unsure (1)..(51): unsure at all Xaa locations
  Clone ID: PAT_MRT3847_3298C.1.pep
MFGRAPKKXSDNTRYHEILGVSKNASHDDLKKAYKKAAIKYHPDKGGDPEK

SEQ ID NO: 211477 - protein, 70 aa, Glycine max
  unsure (1)..(70): unsure at all Xaa locations
  Clone ID: PAT_MRT3847_32990C.1.pep
QDLSQPKSEVSPPEGLLXVPLLRHXXIALSWMVQKETSSLYCSGGILADDQGLGKTVSTIALILKRPPFT

SEQ ID NO: 211478 - protein, 50 aa, Glycine max
  Clone ID: PAT_MRT3847_32991C.1.pep
YRSKERFRTQIQSVKLVRKREPIKAINNNSMKEYRGFDTKQNLLLMKSGF

SEQ ID NO: 211479 - protein, 80 aa, Glycine max
  unsure (1)..(80): unsure at all Xaa locations
  Clone ID: PAT_MRT3847_32992C.1.pep
MEKMRVIVITVCLSLXAAIAEDVGIGLLSEAEAYVSPKLKKFITPCTSHVGETCSTTSSSGSEALMQNQGGLPPCLFDSM

SEQ ID NO: 211480 - protein, 47 aa, Glycine max
  Clone ID: PAT_MRT3847_32993C.1.pep
KITKEHTNNIIGGRGEKLTAVRDVESYGYLTFYQGHASKNFQHRAVE

SEQ ID NO: 211481 - protein, 86 aa, Glycine max
  Clone ID: PAT_MRT3847_32994C.1.pep
RLVITHNWAWYKGGGLFSLFWGKTPYNWALETGVIKTPCFRGGAFSLFFDQCSSSKMDHLGHLASIFWQGEKKIFLFSPPNSKKIF

SEQ ID NO: 211482 - protein, 78 aa, Glycine max
  Clone ID: PAT_MRT3847_32995C.1.pep
TYFGGGTSTCYAGRVLIWNNSDLKDFYFICSLLYRADIKGCGKRNIPPITTTLKRLLQLTLRSLSLVLWPPLKNKADA

SEQ ID NO: 211483 - protein, 36 aa, Glycine max
  Clone ID: PAT_MRT3847_32996C.1.pep
KVTVKVMVLLWIIVWNFNFGYIKKLLEDLRPRRFGD

SEQ ID NO: 211484 - protein, 44 aa, Glycine max
  Clone ID: PAT_MRT3847_32997C.1.pep
STPPTVSFFSPQDPPLTLEMAVFYFNKAFGNNQPPWANLAFLPR

SEQ ID NO: 211485 - protein, 366 aa, Glycine max
  Clone ID: PAT_MRT3847_32998C.1.pep
MVRSYPMQVVSDEAIMTTRVQSLAQSGLSRVPPQYIQPPQTRPVRHTAPEPDSIPVIDLSSFDPTQRASTRDSIARACREWGAFHVTNHGVPPSLLASLRRAGLSFFSDTPIPDKLRYSCSAAASEGYGSKMLATTTSDQNDAVQVLDWRDYFDHHTLPLSRRNPTRWPESPSDYRELVARYSDEMNVLAQKLLALISESLGLRASCIEDAVGEFYQNITISYYPPCPEPDLTLGLQSHSDMGAITLLIQDDVGGLQVLKGGNKWVTVQPLSDAILVLLADQTEIITNGKYRSCEHRAITNPDRARLSVATFHDPAKTVKISPASELINDSSLAKYRDVVYGDYVSSWYTKGPGGKRNIDALLLDP

SEQ ID NO: 211486 - protein, 47 aa, Glycine max
  Clone ID: PAT_MRT3847_32999C.1.pep
GTCKIKFASYRVIYSLRCAVILNLFLICVIHICVCTSLCYKIIILCD

SEQ ID NO: 211487 - protein, 69 aa, Glycine max
  Clone ID: PAT_MRT3847_3299C.1.pep
MGGNRGSSGGGKGGGGGNSSKGGGGGGGGGSGGYMKAPGGDGAYISRGTFENNPQGYFSGLHAGEKGNK

SEQ ID NO: 211488 - protein, 173 aa, Glycine max
  Clone ID: PAT_MRT3847_329C.1.pep
HPPMLNDEVWRLEKIGKDGAFHKKLSKEGINSVQDFLKLYFVDFHRLKKILGVGMSDKMWDVTIKHAKTCEKGNKYYAYRGHNFTVFLNSICQLVRADINGQTFPGRELSNMTRSYMEKLVREAYARWNDLEEIDAALLTQGETLEEFPNNHQASLIAYDQNDYFGDKSAQSW

SEQ ID NO: 211489 - protein, 160 aa, Glycine max
  unsure (1)..(160): unsure at all Xaa locations
  Clone ID: PAT_MRT3847_32C.1.pep
FINITLFNSLLLRRECCTFSNGEYVKSGLAELEKWIANAKEEYAGTSWHELNYIRQAVGFLVIHQKRKKSLEEIRQDLCPALTVRQIYRISTMYWDDKYGTQSVSNEVVSEMREIVSKDNQSLSSNSFLXDDDMSIPFSAEDIDKAIPAINTVDIDLPAF

SEQ ID NO: 211490 - protein, 121 aa, Glycine max
  Clone ID: PAT_MRT3847_33000C.1.pep
MILANGVFDNDEEKVGADIVKRALSYPLKLIAKNAGVNGSVVSEKVLSSDNPRYGYNAATGKYEDLMSAGIIDPTKVVRCCLEHAASVAKTFLMSDCVVVEIKEPEPVPAGNPMDNSGYGI

SEQ ID NO: 211491 - protein, 141 aa, Glycine max
  unsure (1)..(141): unsure at all Xaa locations
  Clone ID: PAT_MRT3847_33001C.1.pep
LINNPLEFRPWANRLELPSLLAILPCRNKALLPGAINRLRCTSPTRAKMAEQELWQREQKGSNGLLPQRDGDETKPVEPTECERADSPDQNSYVXSGTSDCHKLDTXKQTDVHWHNKGVAARPLHLSWXVDKPSGRVTYTA

SEQ ID NO: 211492 - protein, 592 aa, Glycine max
  Clone ID: PAT_MRT3847_33002C.1.pep
MASSSTFTAMSACKLSSSAAISSFPSRRRSNAVVLSRRSRAARVSAMAKELHFNKDGTAIKKLQSGVNKLADLVGVTLGPKGRNVVLESKYGSPKIVNDGVTVAKEVELEDPVENIGAKLVRQAAAKTNDLAGDGTTTSVVLAQGLIAEGVKVVAAGANPVLITRGIEKTAKALVSELKQMSKEVEDSELADVAAVSAGNNYEVGNMIAEALSRVGRKGVVTLEEGKSADNSLYVVEGMQFDRGYISPYFVTDSEKMAVEYENCKLLLVDKKITNARDLINILEDAIRSGHPILIIAEDIEQEALATLVVNKLRGSLKIAALKAPGFGERKSQYLDDIAILTGGTVIREEVGLTLDKAGKEVLGYASKVVLTKDTTTIVGDGSTQEAVNKRVAQIRNLIEAAEQEYEKEKLNERIAKLSGGVAVIQVGAQTETELKEKKLRVEDALNATKAAVEEGIVVGGGCTLLRLASKVDAIKDSLDNDEEKVGADIVKRALSYPLKLIAKNAGVNGSVVSEKVLSSDNPRYGYNAATGKYEDLMSAGIIDPTKVVRCCLEHAASVAKTFLMSDCVVVEIKEPEAIPAGNPMDNSGYGL

SEQ ID NO: 211493 - protein, 95 aa, Glycine max
  unsure (1)..(95): unsure at all Xaa locations
  Clone ID: PAT_MRT3847_33003C.1.pep
EITGNVYVDYEKIVRDTCRNIVYVYDDVXLDADNXMLLLTLSRHDRXIAQSVHCNLTEISNQICTTYQSLMFGYTTVDTPELMQFSNKLSSNTGF

SEQ ID NO: 211494 - protein, 83 aa, Glycine max
  Clone ID: PAT_MRT3847_33004C.1.pep
GLGCKPCFASAAFLRVHDYGAGGFISRKALYFFRVSDLVFMGFTLFISGVGFPLLLVILFFSYGGNARKIPPKIVLWVRGLNI

SEQ ID NO: 211495 - protein, 59 aa, Glycine max
  Clone ID: PAT_MRT3847_33005C.1.pep
TRCTQRSSFRLEEYDIVHDHNNPQRGFTLGKVLHKTHPYIYSNIVFMSLLIIVLKNTFF

SEQ ID NO: 211496 - protein, 56 aa, Glycine max
  unsure (1)..(56): unsure at all Xaa locations
  Clone ID: PAT_MRT3847_33006C.1.pep
SRPSVSQYDDLELKSSLSQNDDFXPGPNISKYDDFASRSKTKDDFEPKTRAPQYSG

SEQ ID NO: 211497 - protein, 53 aa, Glycine max
  Clone ID: PAT_MRT3847_33007C.1.pep
KTHWWGIHTNRESVFFVVHVKNVKGSIQISKYEEEVRNTHSKKRGGVWIINIL

SEQ ID NO: 211498 - protein, 89 aa, Glycine max
  unsure (1)..(89): unsure at all Xaa locations
  Clone ID: PAT_MRT3847_33008C.1.pep
CGVPGATHASDGEKGDTYTAAGNGALGKXXGIIXSSCVEGWGILCAQLGKNNGGVESDRYLXFHEFGMXLYSEAVEETITSDEAQXVFG

SEQ ID NO: 211499 - protein, 72 aa, Glycine max
  Clone ID: PAT_MRT3847_33009C.1.pep
PHFLSPGEIFKKPLCRAPICFCAPLFLLKKARPLGPLFPPQFKARCFGDPKMGPQGGLFGKKMFFQPLSFFP

SEQ ID NO: 211500 - protein, 92 aa, Glycine max
  Clone ID: PAT_MRT3847_3300C.1.pep
MPLYELYRLAREKLGKETTSTRAPDQCSSPENDFFELVWENGQISSQGQFSRVRKSPSCKSLPIHCLPFYSPKARDKDVRYGSYTRLGKFGD

SEQ ID NO: 211501 - protein, 47 aa, Glycine max
  Clone ID: PAT_MRT3847_33010C.1.pep
PSLTARLVLSTLIAIPCYYPGAPTFLPPPKLHFYSPPPPPKKEDVIQ

SEQ ID NO: 211502 - protein, 59 aa, Glycine max
  unsure (1)..(59): unsure at all Xaa locations
  Clone ID: PAT_MRT3847_33011C.1.pep
ARGSIQAIGYYFDYKECHRXVRGRLPYEKLKPNPDMWNLLLSLPYERRGKLYMINRVEQ

SEQ ID NO: 211503 - protein, 93 aa, Glycine max
  unsure (1)..(93): unsure at all Xaa locations
  Clone ID: PAT_MRT3847_33012C.1.pep
XXXGXXXXXXEVSXXXXXXXELXRDXYIXIEXXXXXXXVRXGEMXXLXXMXXXXXRVXXXXDXXCXXXXXNXXXSTXXXXIXXXRXXXXXXXX

SEQ ID NO: 211504 - protein, 481 aa, Glycine max
  unsure (1)..(481): unsure at all Xaa locations
  Clone ID: PAT_MRT3847_33013C.1.pep
PRVRFEFEFSSNSLGVVPLDVDFLESECTNHVVGSTYTSDLLYEVQAKEPSSSPTLVPPTVQPPPTLELKXLXPSTLKYAYLEDKEKFPVIISASLDAEQEEKLLLVLKKHKKAIGWTLAEIPGISPSTCMHMILLEDGAKPVRQPQXXLNPVILDMVKKEVTKLLQAGIIYLISNSQWVSPVQVVPKKTGLTVIKNERDELIPTRVMNNCRVYIDYRRLNQVTRKDHFPLPLIDQMLERLAGFYRRFIKDFSKVALPLSNLLQKEVELDFDDRCKKAFDCLKRAVTTTPIIQALDWTAPFELMCNASNYTLGAVLAQNIDKLPHVIYYASRTLDVAQENYTTTENELLAIVFALEKIRSYLLGTRVIVYIDHAALKWMLWLQEFDLEIRNRSGAQNLMADHLSRIECASEDSPIRDDFSDDHLYILYSISDSFPTPWFANIVNYLVASVCHSFAPCGHLGIQRTTRKVLDFGFYWPTVIP

SEQ ID NO: 211505 - protein, 58 aa, Glycine max
  Clone ID: PAT_MRT3847_33014C.1.pep
IFIFNDNNLNHYHNNKKQTTTFTQLYTSYHLNYCCNNNKQLIFHNFIYLTLTINFTLT

SEQ ID NO: 211506 - protein, 193 aa, Glycine max
  unsure (1)..(193): unsure at all Xaa locations
  Clone ID: PAT_MRT3847_33015C.1.pep
MTCKLVIYFTFFFCLLFTLVPYVHMYPSYPYSGNYQLDLNFYDRSCPNLQRIVGYGVWLALKNDNRMAASLLRLHFHDCIVNGCDASVLLDDTPYFTGEKNALPNRNSLRGFEVIDDIKEHLERICPSTVSCADILALAAREAIDQIGGPSWQVQLGPRDATTTSKEAAEQQIPSPIEPLENITAXFFSRVLT

SEQ ID NO: 211507 - protein, 120 aa, Glycine max
  Clone ID: PAT_MRT3847_33016C.1.pep
LPESLGMLSSLSYFKASNNHFNSEFPQWIGNMTNLEYLELSNNQFTGSIPQSIGELRSLTHLSISNNKLVGTIPSSLSSCTKLSVVQLRGNGFNGTIPEALFGLGLEDIDLILVELSGRV

SEQ ID NO: 211508 - protein, 92 aa, Glycine max
  unsure (1)..(92): unsure at all Xaa locations
  Clone ID: PAT_MRT3847_33017C.1.pep
LQPTPSITKPKTFSSSQPFKPLWEPNQRDPGGAIAWVPRGRRGTHPMKRKSEAKFYSRELLSQSSVIFPLLGTFASFQSSLSFLGFFFFXQD

SEQ ID NO: 211509 - protein, 305 aa, Glycine max
  unsure (1)..(305): unsure at all Xaa locations
  Clone ID: PAT_MRT3847_33018C.1.pep
MEEQIPFKNLHSREYSGHKKKVHSVAWNCIGTKLASGSVDQTARIWHIEPHGHGKVKDIELKGHTDSVDQLCWDPKHADLIATASGDKTVRLWDARSGKCSQQAELSGENINITYKPDGTHVAVGNRDDELTILDVRKXNYEVNEIAWNMTGEMFFLTTGNGTVEVLSYPSLRPLDTLMAHTAGCYCIAIDPVGRYFAVGSADSLVSLWDISEMLCVRTFTKLEWPVRTIGFNYTGDFIASASEDLFIDISNVHTGRTVHQIPCRAAMNSVEWNPKYNLLAYAGDDKNKHQADEGVFRIFGFKNA

SEQ ID NO: 211510 - protein, 126 aa, Glycine max
  Clone ID: PAT_MRT3847_33019C.1.pep
AHTAGCYCIAIDPVGRYFAVGSADSLVSLWDISEMLCVRTFTKLEWPVRTIGFNYSGDFIASASEDLFIDISNVHTGRTVHQIPCRGAMNSVEWNPKYNLLAYAGDDKNKHQADEGVFRIFGFKNA

SEQ ID NO: 211511 - protein, 62 aa, Glycine max
  Clone ID: PAT_MRT3847_3301C.1.pep
IFPKFPSLQHKSGFFFPEFFKKFPLFFGNLDVVLQNIYFLYDETKKNVLSRFKLEICHNLQL

SEQ ID NO: 211512 - protein, 103 aa, Glycine max
  unsure (1)..(103): unsure at all Xaa locations
  Clone ID: PAT_MRT3847_33020C.1.pep
TGNLSTXXXXAIQXPTXTGXXXXPXLXLXQXHGXXXXHSXXDVXLLMGCTXVXHXKKXXRTTDTTXXSTQKLQYXXGVXXXXXXXXXXELEPNSELTYACMRX

SEQ ID NO: 211513 - protein, 181 aa, Glycine max
  Clone ID: PAT_MRT3847_33021C.1.pep
VQLQGVEVTRVRLKGDGDTLGASALALHYANLVMVLEKMIKSPQLVGVEARDDLYGMLPRSIRSCLRGRLRGVGFSACDDHVLAGEWRDALGRILRWLGPLAHNMIKWQSERSYEHQNLVPKTNVLLLQTLFFANKEKTEAAITELLVGLNYVWRFEREMTAKALFQCTNFNGLLSLHKPC

SEQ ID NO: 211514 - protein, 90 aa, Glycine max
  Clone ID: PAT_MRT3847_33022C.1.pep
RLCISRSCLHLTQRLLNFALRDAPTRIVSLRSSCVATPILFKVRPACLHLITPYESPLISLLEAQVRVLSHQIIHAHHFSCTATTKLAPL

SEQ ID NO: 211515 - protein, 38 aa, Glycine max
  Clone ID: PAT_MRT3847_33023C.1.pep
GLCLYTNSLISTISKTHLHFFSPKSICIVDEHKERNLD

SEQ ID NO: 211516 - protein, 34 aa, Glycine max
  Clone ID: PAT_MRT3847_33024C.1.pep
MLCGRGWKFTTQMSRVRIVSACNLQTKIKMSQNI

SEQ ID NO: 211517 - protein, 86 aa, Glycine max
  Clone ID: PAT_MRT3847_33025C.1.pep
NHLQSIRGDFRGDLGKIMVKNTLMKRLAKMHADKTYNNVNLILIGIVGGNVRLSDTKGDTEEVTEDDAKDTAGAAARAALDAPIDA

SEQ ID NO: 211518 - protein, 205 aa, Glycine max
  Clone ID: PAT_MRT3847_33026C.1.pep
RDLNFVGYSYTIPHKQNGLRCCDEVDPIAKAIGAISCMIKRPNDGRLIGYNFDYLGAIAAIEERLHLQDSNGRSISGCSPLYGKLFVVMGAGGAGKALAYGGKEKGARVVVANRTYAKAKELATKVGGEAITLSELESFHPEQGMILANTTSVGMKPKIDLTPIPKEALKHYSLVFDAIYTPKLTRLLREAQETGAAIVYGTEMF

SEQ ID NO: 211519 - protein, 366 aa, Glycine max
  Clone ID: PAT_MRT3847_33027C.1.pep
MAEDLMARSFCNVDKHFGMHPMPSTCYDQSSMKSSERFSFCAKIKDKLQNPKNYFSKHVDIYSKEKTTRQELPSSTTDFPRKFPDLMKGFNECVTQCKKMNESSRDEEHVQKQIKLEDWNRDRHHDGYDRVKETVSDCRKRDKSTVVANKNVSGRKLSLYASKKKNSAKSVRELDLSICEKCTPSYYLLPKEFQIPSSSRRTKLDAEVLNDHWKCVAPSIKDYSSKHMSKNLNEMTLFECEDDRIELDMCLETAKSTTKQVEELIEKINTNMIERDNPINIEKHLIAQNLRCIEQLYGDHGIDVLDVLRKNASQVLPVILTRLKQKHEEWARCRADLNKLWAEVYAKNYHKSLNHDRVPSTRNQEL

SEQ ID NO: 211520 - protein, 89 aa, Glycine max
  Clone ID: PAT_MRT3847_33028C.1.pep
LRFIPHHCAYTNIKMECLSGHRFNMILLMFSFTNYCIPFSQSHMNLLGEHPLTKIAIHKTRMALHNSSCLISGLFALGTHGEDTHRVTG

SEQ ID NO: 211521 - protein, 67 aa, Glycine max
  Clone ID: PAT_MRT3847_33029C.1.pep
PFPHIHFFLVGFAPLTSCGSHPYRALTKHELTQQTLDAKNLMCTENPHTGRSLRSSAIFGEKMITKE

SEQ ID NO: 211522 - protein, 299 aa, Glycine max
  unsure (1)..(299): unsure at all Xaa locations
  Clone ID: PAT_MRT3847_3302C.1.pep
FYPFPILSLSAPSSSTLTLTLIPSSSSCLPPLSYPSPSPSAFMTSREKLDVARQLAKLGVDIIEAGFPAASMDDCKVVKMIAQXVGNAVDDGYVPAICGLSRCNEKDIXTAWEAVKYAKRPRIHTFIATSAIHMEYKLRMSKDKVVDIARNMVKFARSLGCEDVEFSPEDAGRSDREFLYEILGEVIKAGATTLNIPDTVGITMPSEFGKLIADIKANTPGIENVIISTHCQNDLGLSTANTIEGARAGARQLEVTINGIGERAGNAXLEEVVMALRCGAHVNGNLYTGINTKHIFLTS

SEQ ID NO: 211523 - protein, 79 aa, Glycine max
  Clone ID: PAT_MRT3847_33030C.1.pep
EKIHYTTIYNITRLNSIHVISTLYHLNFIFQSLITLFMNHPLNQGITTLVDFIINNSHALCNNYTKTQVYPFCCLLAAA

SEQ ID NO: 211524 - protein, 42 aa, Glycine max
  Clone ID: PAT_MRT3847_33031C.1.pep
LIAKFVLKNNDNGCQSKMLHVHKVGFKTGPDNPFFLTIFFFY

SEQ ID NO: 211525 - protein, 69 aa, Glycine max
  Clone ID: PAT_MRT3847_33032C.1.pep
TNKQCLDKIVKHVAFSKPNEKSTLLMMWWWWCWCHHESTASNTALAMITVGINVVIVFKGSLQTTRYSC

SEQ ID NO: 211526 - protein, 46 aa, Glycine max
  Clone ID: PAT_MRT3847_33033C.1.pep
NYGRINYDGKKNHGGIETNRSNFNFYQNQLCKIIINLNTHLSCYQS

SEQ ID NO: 211527 - protein, 71 aa, Glycine max
  Clone ID: PAT_MRT3847_33034C.1.pep
AFLVCLRSYLICFNKLEQLDLGKMFDMSACGCFKTCTQTKLFVVKEKIPFQQRKKKKKKKKKKKGGSPPVS

SEQ ID NO: 211528 - protein, 105 aa, Glycine max
  unsure (1)..(105): unsure at all Xaa locations
  Clone ID: PAT_MRT3847_33035C.1.pep
VXXXHWXXXNXLXTNLWXHVXXXXPXGXYXXTXLXXHXXXXXXQXXXXLXSXXVEXXTXCNXSHXXXXTXXXRXHMXXXXPXXRXXXXRIXXSSRXPSLRTRACD

SEQ ID NO: 211529 - protein, 61 aa, Glycine max
  Clone ID: PAT_MRT3847_33036C.1.pep
HASVQLREDDTRGKSVLEVVLPTLLNSWSSMTTKTHFIMHKSYFCILEFIHINNEMIISRE

SEQ ID NO: 211530 - protein, 221 aa, Glycine max
  unsure (1)..(221): unsure at all Xaa locations
  Clone ID: PAT_MRT3847_33037C.1.pep
SKEHIEGKPQITCVFGLYIWCAASDPADPGVFKSKKYLKIPDSKKLDGLKNSKLGGESTSSMHDGNASTVGPKSVDKEELGTEASFKDAAISTEKKNASSPSLSRLLLVCSPCAYICGCSSSSNESSDQQASEDGMFYCSLCEVEVFKYSKHCRVCDKCVDRFDHHCRWLNNCIXGKRNYRKFFTLMVASLLLVCAWFVHLLGIAAYSSVVDWDTAYLLFC

SEQ ID NO: 211531 - protein, 69 aa, Glycine max
  Clone ID: PAT_MRT3847_33038C.1.pep
VIFQGSGIVKLNRVSVVEDGSGSRCCNTSDHSMLNHMVYIVLHIMVPSHAQSTSDPTCERTPGARPLYR

SEQ ID NO: 211532 - protein, 36 aa, Glycine max
  unsure (1)..(36): unsure at all Xaa locations
  Clone ID: PAT_MRT3847_33039C.1.pep
XCLVAAVSDLLFVRFQLDSYLDCTLLRCWCFIVVFI

SEQ ID NO: 211533 - protein, 84 aa, Glycine max
  Clone ID: PAT_MRT3847_3303C.1.pep
RYGNQFNTSVQLIIPEGLSSTTLDSVHSMLYMCGTDPSRMLQTSTHTYVLPHQILVHNKVGSNCSTLIFKLRRFLLAPLRMGHL

SEQ ID NO: 211534 - protein, 50 aa, Glycine max
  unsure (1)..(50): unsure at all Xaa locations
  Clone ID: PAT_MRT3847_33040C.1.pep
TVQNVLEQETLKXFFVGGXGGVGKRKCSSILSILFATVGSSVFIISTDPA

SEQ ID NO: 211535 - protein, 63 aa, Glycine max
  Clone ID: PAT_MRT3847_33041C.1.pep
FSFGSFKPAQIIHRIVGTSIQSIKLYSEFLKETHDRFTKTSKLRRKGHRSSGREMIRVRILRK

SEQ ID NO: 211536 - protein, 80 aa, Glycine max
  Clone ID: PAT_MRT3847_33042C.1.pep
LGGHHQIWVLTIITKISYRSDSISTPWTVAPFARRENSDIDHSVVESLPAFRFRALREQNEGLFCVVCLTKFEAAKGKQN

SEQ ID NO: 211537 - protein, 61 aa, Glycine max
  unsure (1)..(61): unsure at all Xaa locations
  Clone ID: PAT_MRT3847_33043C.1.pep
AKFQSDRRLLKCKLKFXIQDYGANKINDSMHLSVLNIFLSLXSVSLSKPRFTGXLTSGXMF

SEQ ID NO: 211538 - protein, 100 aa, Glycine max
  unsure (1)..(100): unsure at all Xaa locations
  Clone ID: PAT_MRT3847_33045C.1.pep
AFXXXTXXIFXXDPTTXILXHXTLHLYLSLXXSFHLHHLHTLSLLXLLFLLLLLXXXXXXFXXLLXLXCXXXXLLLXXXXSKXXXXXXIXXXXFXAYYXX

SEQ ID NO: 211539 - protein, 441 aa, Glycine max
  Clone ID: PAT_MRT3847_33046C.1.pep
MAPKRKRQMAVKDQNKGKAFKSHPTIQLARHLAEITSQIPPCVSSHAISHPTDPPARTSDVIPPPSILGEHSPCTSQPTNPDAECSLDMASEKTTSVRKKFVRQQVAEKDPNKGKASKSHPTKHRTAYLSQMTSQNPPCASRPTNSMEGAHLPARISDVSLPPSVEGVHSPCTSQPMNSDAGRTDRSLAALETQRNDAKPILYLDEQGFLPSRSAANGIGDILKRNFTDPWPSWKKIPISTRNSWFEEFLENFSVSPPDYNWAKKNFEMRGSVLLKNNLNKARTTMDKPHWITDGVWERLCNHWRSEGFKKKSTQAKTNRASNCGASHTGGSISASQHRANMMKETGTIPTPLELFRRMHQRKDNTWVDRRSQHVNEVFTRTLKQLTKRASAQGKPPPSELDVWCDVARSKKGKVYGFGMESTVVATSPCYRCSSSYQWSG

SEQ ID NO: 211540 - protein, 76 aa, Glycine max
  Clone ID: PAT_MRT3847_33048C.1.pep
TSLLSLRSLIYNDAICSIVIRVIALEIKFEPGVDACVPFLGTDLPLESGSSSVEGFNSTALLCSVALIVKDSISPF

SEQ ID NO: 211541 - protein, 38 aa, Glycine max
  Clone ID: PAT_MRT3847_33049C.1.pep
GATQANSVQSADAIMAYQQVIMSFKCNLMYQDFGKSNV

SEQ ID NO: 211542 - protein, 134 aa, Glycine max
  Clone ID: PAT_MRT3847_3304C.1.pep
MGTERKRKVSLFDVVDDSAAKMAKTNGGAANNLINHWTSRPYSQRYFEILEKRKTLPVWHQKEEFLQVLKDNQTLILVGETGSGKTTQIPQFVLDAVELETPDKRKKMMIACTQPRRVAAMSVSRRVAEEMDVT

SEQ ID NO: 211543 - protein, 82 aa, Glycine max
  Clone ID: PAT_MRT3847_33050C.1.pep
ARRDFWRPSELISCHQVCQTVLRVPTLHAELIHFWVKVYSERTQIQHIVEETNLFFFSAQMPALKMHQHHYYITWFKASGRR

SEQ ID NO: 211544 - protein, 108 aa, Glycine max
  Clone ID: PAT_MRT3847_33051C.1.pep
DIIFSGETCADTWIEKEVAALKEDGCPKVWVVTSDHCHQQAAHGAGAFIWSCKALVTEIKASQKEVERMLQEQRSTSFQGRLLKHNLDAEVVDALKDLRQKLSENELK

SEQ ID NO: 211545 - protein, 87 aa, Glycine max
  Clone ID: PAT_MRT3847_33052C.1.pep
YTLEMYRKLRLVIHKLHLFGSMLISMASRYLKRFRVHVILIHAKIHRLNHIQAINEQKFLVSKLWTILLGNTMVVKTQCCELAQVSM

SEQ ID NO: 211546 - protein, 52 aa, Glycine max
  Clone ID: PAT_MRT3847_33053C.1.pep
MHMPTNLLLTTLIQMLQILISKKLIKTYLITCYHIRNNEREKHDNLLSDIKN

SEQ ID NO: 211547 - protein, 54 aa, Glycine max
  Clone ID: PAT_MRT3847_33054C.1.pep
ILYNHPPFTWHFWNTYISHIAFLRGGAFFTFILCTNITRAGRETPKLKPRFFCC

SEQ ID NO: 211548 - protein, 94 aa, Glycine max
  unsure (1)..(94): unsure at all Xaa locations
  Clone ID: PAT_MRT3847_33055C.1.pep
GETKKRREREREREREKGMXLGYWHXAVXRXGGGKEAGGRRASFPXPVXRADQAKVPSDRTSIKKGXASSSRRWDSIDPTGPKNLPSPKEHSPP

SEQ ID NO: 211549 - protein, 74 aa, Glycine max
  Clone ID: PAT_MRT3847_33056C.1.pep
ITGCRALISRRQTPPLLDDKSVPTFSYFLVYEFLRERESLSERADRLRESFCFAHSKIIMLNNSSYNDIRTSVV

SEQ ID NO: 211550 - protein, 59 aa, Glycine max
  Clone ID: PAT_MRT3847_33057C.1.pep
EMLHKVTKNFMKYDPRSFGHTDVGLRTISHHHSEHLLQTIESGLNTSNKAHSMWNIPYP

SEQ ID NO: 211551 - protein, 145 aa, Glycine max
  Clone ID: PAT_MRT3847_33058C.1.pep
SKKGPPLSREHNKKSLFSFLKRERRHSFSLTKGAYEYRYCPGYGTFRKAPKKPTGLTKEEGETPTPYASLATLKGSLAGLVSSKGHLPPFSEDFKLPGWKALTIEARTLIPTPPGSIAGPCGFEDLVVLGPLPPRWGWPGKKQWG

SEQ ID NO: 211552 - protein, 79 aa, Glycine max
  Clone ID: PAT_MRT3847_33059C.1.pep
AIKNKKKKKKKKKKKKKKKKKKKKKKKKKKKKKKKKKKKKKKKKKKKKKKKKKGGGFLKKSIFFPGFWKNIIFFMGPQN

SEQ ID NO: 211553 - protein, 104 aa, Glycine max
  Clone ID: PAT_MRT3847_3305C.1.pep
LFISHSTPFACFLFTNHSWHTLHKLNPHQINPLRHFSHFHTFNLHHHHLCTKDQSPSTWISDNATFYLFTLCCYKTIKYFYIYFIYYHTLYLSIILSLGLLYIC

SEQ ID NO: 211554 - protein, 133 aa, Glycine max
  unsure (1)..(133): unsure at all Xaa locations
  Clone ID: PAT_MRT3847_33060C.1.pep
GKGETPAGTGPEDPGRPKPSPPRPKHKSTGRGRLKEPXPHPPXEGKPERDHARAARQGGRKPGRGETQATTGHPPREEPERANQKATQNHRGPREPRDGERPGEAHRRERAPPTEEASRRKRRQQDRRRGAER

SEQ ID NO: 211555 - protein, 73 aa, Glycine max
  Clone ID: PAT_MRT3847_33061C.1.pep
TCEKKEEAKSGVGPAVTVTCGTPHPALWPLRGVHSISCALWKASVGLCIPTAKGCRSISGTQVSVSVSRGSDD

SEQ ID NO: 211556 - protein, 45 aa, Glycine max
  Clone ID: PAT_MRT3847_33062C.1.pep
LKHNLPSGTLKPSILKPPKTLYTRKIPIPNEPTSCSNPPAISYTH

SEQ ID NO: 211557 - protein, 123 aa, Glycine max
  unsure (1)..(123): unsure at all Xaa locations
  Clone ID: PAT_MRT3847_33063C.1.pep
XCXXCXXQAGXXEAGASVAIASVXXASISRAVDPGTVGLMIAGXMCAWRXXGVRPGLLRQSLQKKSPCKASXCNACCVRCCLRWCPMGQDRRVMNGRLSDIIFSELPAVHPPPVQEIKSTHDK

SEQ ID NO: 211558 - protein, 55 aa, Glycine max
  Clone ID: PAT_MRT3847_33064C.1.pep
YIYRLQSSYQKYVVVHQHGSGKLILLNCMPVRPWVSPNETLSFLPSCASWMLNRN

SEQ ID NO: 211559 - protein, 53 aa, Glycine max
  Clone ID: PAT_MRT3847_33065C.1.pep
NIFTSPQCKIQYSNVLISKSFMNGQKYSFNHISSKLQLLIFSRVQSIIEFFTN

SEQ ID NO: 211560 - protein, 38 aa, Glycine max
  Clone ID: PAT_MRT3847_33066C.1.pep
FFDLTQCREGVNERLVAARELPTRLFIHAWLNMHRKIC

SEQ ID NO: 211561 - protein, 86 aa, Glycine max
  Clone ID: PAT_MRT3847_33067C.1.pep
SLQKVLVLITPSAGPDKIRYTRSASKVGSHCYVYFDQARTQFKFPPPVCKLSIVYDIKVMVVMEAIFVFNSYIFFTCPRLLVGFCY

SEQ ID NO: 211562 - protein, 106 aa, Glycine max
  unsure (1)..(106): unsure at all Xaa locations
  Clone ID: PAT_MRT3847_33068C.1.pep
MGCSIRECCVLFLVLLVSCARGEDPYRFYTRNVTYGDIYPLGVKQQGILINWQFPXPQIEAVTNDNLIIHVYNSLXEPFLLSWDGVLHRTNSWQDGVDGPQLSKFS

SEQ ID NO: 211563 - protein, 234 aa, Glycine max
  Clone ID: PAT_MRT3847_33069C.1.pep
VVDIVLELLKVYQIEFVSSSDIGFLKSINGKSNKATKGLFKLLNDNKVEPSTKKPYGSIVKDLVTIKSFASGIMVPKEYIWPVKPDKYLGLPTTLVADAHKSGLEVYASGFANDFFTSYSYDYDPVAEYLQFVDRGDSVDGVVTDFPATASNAIACFAHNNTLPKKAPTLIISNNGASGVYPGSSDLAYQKAIDDGADIIDCSVQMTKDGIAFCSESTDLTSDTTGMPKFMSRS

SEQ ID NO: 211564 - protein, 119 aa, Glycine max
  unsure (1)..(119): unsure at all Xaa locations
  Clone ID: PAT_MRT3847_3306C.1.pep
HPNFKIFHTSSTMHGRIYIPEINWSLMLLCLTTTEAVKSSCQHGKSNALGSHTCDAFDTARVMALGIDLVXALELTVHPEANRAITGXLEAPYSTESLMKILEGAWVPIGLLTYVLTNR

SEQ ID NO: 211565 - protein, 114 aa, Glycine max
  unsure (1)..(114): unsure at all Xaa locations
  Clone ID: PAT_MRT3847_33070C.1.pep
LVSSKSGKRTHTNDVHQFDVKAGRLIREELKLQXDAQRLMHEQLEIQRKLQWRIEEQSRQQKKMLDHQQKSSNKVSNTQISTIDETSSSHKDGENASEGAANNSFIASMNSPSQ

SEQ ID NO: 211566 - protein, 75 aa, Glycine max
  Clone ID: PAT_MRT3847_33071C.1.pep
GCPFSWWSNPEKRVFGQYYRKRFLGAPVTSKCMVHQAGRQKKKIVVFKKICGKGPYERTVSFHVFGGKRKWLKFM

SEQ ID NO: 211567 - protein, 60 aa, Glycine max
  Clone ID: PAT_MRT3847_33072C.1.pep
MRLRVLQALGHVNIHQLGDPFLTIYMLSFYLIYIYYAFICYYVATVRTENIILISLIIGN

SEQ ID NO: 211568 - protein, 127 aa, Glycine max
  Clone ID: PAT_MRT3847_33073C.1.pep
DQSHSHISSSLFSTIDQGLLRVALTFNNRIGLQPFLNQRQLFPKGASTYQIAKAVLCMYMYVLKSLEEILNLKQKVVPHSTIVSYSSTSTARYPRTGTPRNRKLYPTPLLSHTPPLHHPLSLVSGLF

SEQ ID NO: 211569 - protein, 108 aa, Glycine max
  Clone ID: PAT_MRT3847_33074C.1.pep
FWKIVMKGEQNMEPYAAPDQYSKLKDEEAAKPEPAVEPNKEKRKRSKRKMTKPQSLKGYPIKYGCPASSFLKTKSQIFGSLKVVSWYQFFKNKIPNLWVVKSCLLGAF

SEQ ID NO: 211570 - protein, 87 aa, Glycine max
  Clone ID: PAT_MRT3847_33075C.1.pep
ECLSISCPNFNSGDSVLVQRSNHAMIMYTGLLCKVKKTDWFKMHLSDSTFFGTIAYATASRKERTDSSHYAITKYMDGKRKELTAAY

SEQ ID NO: 211571 - protein, 239 aa, Glycine max
  Clone ID: PAT_MRT3847_33076C.1.pep
NKTHIISIVIMGRVEYSPLFETRRCRGRFIYRSFAISLFVAICFIWHYRFSHITKGEDGNWAWLGMLASELWFGFYWVLTQALRWNLVFRQPFKNRLSQRYEKKLPRVDIFVCTADPDIEPAMMVINTVLSVMAYDYPTEKLSVYLSDDAGSQITFYALLEASNFAKHWVPFCKRFKVEPRSPSAYFKSLVSSGYPTDPSQAKELGNIKKLYDEMEKRIEDATKFGEVAKEARLKHMGV

SEQ ID NO: 211572 - protein, 28 aa, Glycine max
  Clone ID: PAT_MRT3847_33077C.1.pep
TFPFRSPQINYALLSSCASLCEWGREDT

SEQ ID NO: 211573 - protein, 150 aa, Glycine max
  Clone ID: PAT_MRT3847_33078C.1.pep
HVSFLLDTYPVSAFYRSPHPLPILKASEAANIIFISSIAGVLSIGIGSTYGATKGAMNQLTKNLACEWAKDNIRTNCVAPGPIKTPLGDKHFKNEKLLNAFISQTPLGRIGEAEEVSSLVAFLCLPAASYITGQTICVDGGLTVNGLYIN

SEQ ID NO: 211574 - protein, 39 aa, Glycine max
  Clone ID: PAT_MRT3847_33079C.1.pep
NLTPTVYIDYVIQLNDRLRTNNISLLTESAYQWLYTTIF

SEQ ID NO: 211575 - protein, 68 aa, Glycine max
  unsure (1)..(68): unsure at all Xaa locations
  Clone ID: PAT_MRT3847_3307C.1.pep
QCRSSLWNLCLILDSLPSXSAFCAFPRRPLPASFGTNYVLTWAFDHITYFNARSEIPLHLDNYTGTGF

SEQ ID NO: 211576 - protein, 72 aa, Glycine max
  Clone ID: PAT_MRT3847_33080C.1.pep
KKIFRPPFFQNYRNFFLFSKMGGPFKKGINSSLFPILWAQLFFFLKREGQKIFLSWTSTKGGYSPSLFPLDG

SEQ ID NO: 211577 - protein, 57 aa, Glycine max
  Clone ID: PAT_MRT3847_33081C.1.pep
FYICQAGECQTQHLCNYFYKMFTSVNPGSWVSQFLAFDLHDAKVASDSHIFIYYTYV

SEQ ID NO: 211578 - protein, 70 aa, Glycine max
  Clone ID: PAT_MRT3847_33082C.1.pep
YFIRPPKLWSKVPPAPVNFFRRVPSLTNSMLLNGNPLCSRILETYLLRPVFELIFGSGCRIMGAISLCVV

SEQ ID NO: 211579 - protein, 328 aa, Glycine max
  Clone ID: PAT_MRT3847_33083C.1.pep
STSGAEDFSYPWTFIPFQKINFSIDNILDCLRDENVIGKGCSGVVYKAEMPNGELIAVKKLWKASKADEAVDSFAAEIQILGYIRHRNIVRFIGYCSNRSVNLLLYNYIPNGNLRQLLQGNRNLDWETRYKIAVGSAQGLAYLHHDCVPAILHRDVKCNNILLDSKFEAYLADFGLAKLMHSPNYHHAMSRVAGSYGYIAPEYGYSMNITEKSDVYSYGVVLLEILSGRSAVESHVGDGQHIVEWVKRKMGSFEPAVSILDTKLQGLPDQMVQEMLQTLGIAMFCVNSSPAERPTMKEVVALLMEVKSQPEEMGKTSQPLIKQSSNQS

SEQ ID NO: 211580 - protein, 94 aa, Glycine max
  unsure (1)..(94): unsure at all Xaa locations
  Clone ID: PAT_MRT3847_33084C.1.pep
GVGCLLXVPRSLPSVSCPWAAWLAGAPFLVVPWLSLRRPXGVSAPPRCSPPGPSASRXPXXALGSGPCVVRVASRVXPVQLSCPRAXGPVKSTV

SEQ ID NO: 211581 - protein, 132 aa, Glycine max
  Clone ID: PAT_MRT3847_33085C.1.pep
IWHLCPGYCHSNVNKYCRRPTLLRLTHANSNYLYNPSRGYYAANNNTSTTTQPPLQQRSTTTTTLGNNTRTNPIHGTILRLYNHSLAPYYPYYSTTPRITIGSVSYISSHSIIFTTLLIHPYRISALDVFFL

SEQ ID NO: 211582 - protein, 118 aa, Glycine max
  unsure (1)..(118): unsure at all Xaa locations
  Clone ID: PAT_MRT3847_33086C.1.pep
LPSQPLSPFKGTVKTYFAKPYLNKIQQPTPLISIINKTTSLSSPITTPNINVQFSLNNLQPQPISQNKTKIRNREIFAEQXDKLXFNIRNHKSRSQPNIEKNFETIQIPLYHLIPKLR

SEQ ID NO: 211583 - protein, 118 aa, Glycine max
  unsure (1)..(118): unsure at all Xaa locations
  Clone ID: PAT_MRT3847_33087C.1.pep
SSRLIRVHEYLKPYFSGSKLKSCLASHNITITDGIDKTSAALQSTKLADCDYLNRNFKQMYNVXWVAPEDKASLWSQLHYVSGNNPEMQEAYLDNLVNVLREFDLHKPQEARSLRRKA

SEQ ID NO: 211584 - protein, 72 aa, Glycine max
  Clone ID: PAT_MRT3847_33088C.1.pep
CLSCLQPPICITIFRTKHYLIGKQMDAAVFMSIIRNIYINPHVQMDSTWILYIVLPCLNKLKVKSIQIHHIA

SEQ ID NO: 211585 - protein, 101 aa, Glycine max
  unsure (1)..(101): unsure at all Xaa locations
  Clone ID: PAT_MRT3847_33089C.1.pep
DAGEVEKALEVFGKMGDGSCLPNLDTYNVLISAMFVRKKSEDLVVAGKLLMDMVDRGFLPRKFTFNXVXLNGPCITGNHDFAKEILRMQSRCGRIVRRLKL

SEQ ID NO: 211586 - protein, 51 aa, Glycine max
  Clone ID: PAT_MRT3847_3308C.1.pep
KEITYNLCSVSVLILWILVVVKFFFSINVVLTICFRGRFDRIYLNLFMSYT

SEQ ID NO: 211587 - protein, 322 aa, Glycine max
  unsure (1)..(322): unsure at all Xaa locations
  Clone ID: PAT_MRT3847_33090C.1.pep
MAQEMKEPAVNIIEQSQVAPPQDSLHSTILPLTFLDIPWFLTRHARRIFFYEFPFPTTHFLQTALPTLKHSLSLTLQHFFPFASNLILPPRLHVPYIRYLNGDSVSFTVSEFSPANFTLLTSNSPQDVNDWQPLAPAFPSPRTTHDGTCEFPLMAIQVTVIPNSGFSICVIFNHVAGDGRTLHHFMKFWASVCKAKGDLNFPGSVPLPLYDRDIVKDPKGLMHVYVQEMRNSALQNKHFGGFLRGVYADKVRAAFMFSREQAEKLKKWVSLKCNSSXTLHISTFVVTCSLIWVCMLKSEXKEEEGNNYVTKGYFDEPCNIGF

SEQ ID NO: 211588 - protein, 77 aa, Glycine max
  Clone ID: PAT_MRT3847_33091C.1.pep
RKNVLFKHMCGYINSGDTKHKGVEISRKRGGLIGPHQCVALSAHLSMNTPNFKGRYKHTTRYMRTSKTQCAKRNLFF

SEQ ID NO: 211589 - protein, 74 aa, Glycine max
  unsure (1)..(74): unsure at all Xaa locations
  Clone ID: PAT_MRT3847_33092C.1.pep
FLIVKFKVLLNYVGSHSPSEWLLWPMGIDFLCCNIPCLLLAYVSICVCXKKCQLLELCCILTFLMTICIFFLKK

SEQ ID NO: 211590 - protein, 88 aa, Glycine max
  Clone ID: PAT_MRT3847_33093C.1.pep
MGASQSVQSLEDSEEEEQEEEEEDDERNLNGPLMGRAQLGNHMVKKVLEQEPEMLPCHASASPLSPQLSSLGTPRLGPSIKVWDPYNV

SEQ ID NO: 211591 - protein, 65 aa, Glycine max
  Clone ID: PAT_MRT3847_33094C.1.pep
YIQKHSLPLLHLDPYTVCRRSPYLELLVNYKRYLWIHEDVKIKITVVDIQVCACTAAYDWIILDM

SEQ ID NO: 211592 - protein, 61 aa, Glycine max
  Clone ID: PAT_MRT3847_33095C.1.pep
SGIVHMNRDASDLCSATLVSFQWRDRKRLAPLKFHTCLNAACYGKTSITKPGIVCTLSVVR

SEQ ID NO: 211593 - protein, 83 aa, Glycine max
  Clone ID: PAT_MRT3847_33096C.1.pep
KYIRIRLILPCQQRIHIVDLALSLAINMPAKFQQGATHHQFYAMKKKGTCHITIKPTTGLNLTISQSSGEHCQNRHPGPPSKF

SEQ ID NO: 211594 - protein, 252 aa, Glycine max
  Clone ID: PAT_MRT3847_33097C.1.pep
MPISRIAIGNPSEFGQADALKAALAEFISMLIFVFAGEGSGMAYNKLTDNGSATPAGVVAASLSHAFALFVAVSVGANISGGHVNPAVTFGAFIGGHISLLRGILYWIAQLLGSVVACLLLKFATGGLETSAFSLSPGVGAANALVFEIVMTFGLVYTVYATAVDPKKGNLGIIAPIAIGFIVGANILAGGAFDGASMNPAVSFGPAVVSGTWANHWVYWVGPLIGSAIAAIIYETFFITPNSYEHLPVTDY

SEQ ID NO: 211595 - protein, 341 aa, Glycine max
  Clone ID: PAT_MRT3847_33098C.1.pep
QRAYSFSGPNSTNSGADSLGNKNSSYVKGPVVEEFTFPERSTPFNSCHASTIVEVGKGHFLVAYFGGSSEGAPDVKIWLQTYKSGRWKSPIIADEEPNVPMWNPVLFKLPSNELLLFYKIGLDVQKWSGFMKRSYDKGITWTEREQLPSGILGPIKNKPLLLENGDLLCGSSVESWNSWGAWAEVTTDFGGAWRKYGPIYIENKPHGVIQPVPYQTAKGTLRVLLRSFDGIGRVCMSESSDGGKTWGYAKPTQLPNPNSGIDGVKLRDGRLLLAYNTVSRSVLKVALSKDDGDSWCEVLTLEDTSGMEFSYPAVIQDSDGRIHITYTYNRTQIKHVVLRPS

SEQ ID NO: 211596 - protein, 78 aa, Glycine max
  unsure (1)..(78): unsure at all Xaa locations
  Clone ID: PAT_MRT3847_33099C.1.pep
XLNYDKMIGYSLLPDLFPHYSRFLFLFVYISVAVLFKHQRNKNVVGPEPILDLLLGHLHLPHSRPVALNMRRSVEKLP

SEQ ID NO: 211597 - protein, 110 aa, Glycine max
  unsure (1)..(110): unsure at all Xaa locations
  Clone ID: PAT_MRT3847_3309C.1.pep
MDSHSTWERLENCLYPVSXLPLEAVVVNVTCGSGRGGSPTTFCICSAVYNRSSDINKRIXTSLGERXKIVFLTIVDPFPVFLLGCYFXGFKNEILCSIAINPILTRLLEN

SEQ ID NO: 211598 - protein, 94 aa, Glycine max
  Clone ID: PAT_MRT3847_330C.1.pep
CGSVNPRYVLVNQCVAKLFYNHKSFHFKIHRDINIFHSVAVINLYESNSIGETLEEFPNNHQASLIAYDQNDYFGDKSAEVGNYVPTHNAQMEC

SEQ ID NO: 211599 - protein, 180 aa, Glycine max
  Clone ID: PAT_MRT3847_33100C.1.pep
RPLNYDQVNHVNDPIKEKTSHLSPDDKSDNHSDQLKHSKNEETGNKSSTRNHPLPSERNNEVRERRRRESDKIVRKPTSSRSSVRSNQVKEKSSHDRENREERSEFSRRGGTSGSSGGVPFRGGRREYRSTRLPSGEKPTHYNNDDKYSKNISSNSRKITRTSHKRSSISETYEKDERKR

SEQ ID NO: 211600 - protein, 67 aa, Glycine max
  Clone ID: PAT_MRT3847_33101C.1.pep
LIPVLLLIFKSGGFFSHLKISYFFGNFRYRNSFKCCNTCLCCKMYPDFIYTESTTTYTFFILYSPVK

SEQ ID NO: 211601 - protein, 93 aa, Glycine max
  Clone ID: PAT_MRT3847_33102C.1.pep
QAFNQFEQGHSLFSSILGPLKSSFKRVSLSSQISWQIIPFVQEPFLLNLSSQERFKLLNFLLFVRLIFVKLCFHYLIFYCYLLLTHTYSWFYF

SEQ ID NO: 211602 - protein, 363 aa, Glycine max
  Clone ID: PAT_MRT3847_33103C.1.pep
MGTPQSNNLPPGFRFHPTDEELILHYLRKKVASIPLPVAIIAEVDIYKFDPWELPAKAAFGEKEWYFFSPRDRKYPNGARPNRAAASGYWKATGTDKNIVASLAGGVREHFGVKKALVFYKGKPPKGVKTNWIMHEYRLVDTNRPIRIKDTSMRLDDWVLCRIYKKFKHAVSPTTEAASTLQVINEQLDQAVVEEEEQIKDTLLPILKNNNTFVPPPQATILMSQKSLSFSNLLDATDYSMLSTILSENHSNNYPTPSETSLFNNCENLDQEITPQNYYINDTNSINNNSYLFQKNPSNMENIARPKRHLPNMDHEDNMLLYPLKKYHSSSCNFPNTNLQNQNPQWNFMFKQPLMSPQYLQFQ

SEQ ID NO: 211603 - protein, 195 aa, Glycine max
  Clone ID: PAT_MRT3847_33104C.1.pep
ARGRIYKKTKHAVSPTTEAASSTLHVINEQLDQAEEEEQIKDNLLPILKNNTTLVPPQQTTLLMSQKSLSFSNLLDATDYSMLSTILSENNHSNNYLTPSEALFNNCENLDQEITPQNYYYNNNTNSYLFQKNPSHMENMARPKRHLSNMDHEDNMILYPSKKYQSSSCNFPNSNPQWNFMFKQPLMSPQYLPFQ

SEQ ID NO: 211604 - protein, 93 aa, Glycine max
  Clone ID: PAT_MRT3847_33105C.1.pep
RYPNPMSHAYSKICGGKTIGPRVLLWRSITPAPTLYRVCEKNPTGGPLSLSHGCALYSKALEILYAHIDTRDTLLIPLHTLVCHIDTVHRDIY

SEQ ID NO: 211605 - protein, 104 aa, Glycine max
  Clone ID: PAT_MRT3847_33106C.1.pep
RLVKGDMDEQRGLSAADTDSYPSQSSDSRSTTSSAVSSAFTCSAICSSPEKLECASSRSWRIESTRPELTIAAAVAVEVMCAAAAVSFTMRMRNRDRDSERELN

SEQ ID NO: 211606 - protein, 69 aa, Glycine max
  Clone ID: PAT_MRT3847_33107C.1.pep
LLQRFFPLLSSLVPLMNLEVLPLAFSTSPAQTSEFSFSEYFLFNKPNFTLPAPLTSVFPPLLKGFFFEM

SEQ ID NO: 211607 - protein, 91 aa, Glycine max
  unsure (1)..(91): unsure at all Xaa locations
  Clone ID: PAT_MRT3847_33108C.1.pep
SKTFPSLLTPTLPSAXTPRIQQCXSPFXPTLQARSPXPQTKPKAKVRXHXXHRLQHXXXXXXXXXVXRLKAFSXVVAXXXILXPSLXPXAX

SEQ ID NO: 211608 - protein, 58 aa, Glycine max
  unsure (1)..(58): unsure at all Xaa locations
  Clone ID: PAT_MRT3847_33109C.1.pep
SQVVEFWDHLSREIIXXPFIRKGKPCFVDLFLSLVFNYSIEGKKKIHLHCIQILLYRD

SEQ ID NO: 211609 - protein, 42 aa, Glycine max
  Clone ID: PAT_MRT3847_3310C.1.pep
SGFPGRPTRPPFFFFFFFFFFFFFFFFFLNSITLNFKILKQC

SEQ ID NO: 211610 - protein, 207 aa, Glycine max
  Clone ID: PAT_MRT3847_33110C.1.pep
LVPNSARGETVQEAVNAAPDEGEKRFVIYIKEGVYEERVRVPLKKRNVVFLGDGMGKTVITGSANVGQPGMTTYNSATVGVAGDGFIAKDLTIQNTAGANAHQAVAFRSDSDLSVIENCEFIGNQDTLYAHSLRQFYRSCRIIGNVDFIFGNSAAIFQDCEILVRPRQARPEKGENNAITAHGRTDPAQSTGFVFQNCMGYGTEEYM

SEQ ID NO: 211611 - protein, 50 aa, Glycine max
  Clone ID: PAT_MRT3847_33111C.1.pep
HYNLPKSKSYQVAKIRKDSKTTEIENTQELSKLPCLTCYCTIYLFSLWCS

SEQ ID NO: 211612 - protein, 104 aa, Glycine max
  Clone ID: PAT_MRT3847_33112C.1.pep
QIVHVKAIHQHFHLLDLNPSAMSVPYCKKWCLGICGIAVFKLTQDIDSHHRGRVLVQLKNKCAAPSSIFLHNGQSMSYLSYLLTCVYILDLGPRSTKLEKRKTP

SEQ ID NO: 211613 - protein, 46 aa, Glycine max
  Clone ID: PAT_MRT3847_33113C.1.pep
NICINFELNQHFVGFLKGSSLTHDLLINTFLLREGEKTGRVNAAFL

SEQ ID NO: 211614 - protein, 64 aa, Glycine max
  unsure (1)..(64): unsure at all Xaa locations
  Clone ID: PAT_MRT3847_33114C.1.pep
SFFPLHLVLXXEGXTNMNQGLGTCTDASYNXSTKIALYNEPYRYKPVYXXMQPELPSFNTXPRA

SEQ ID NO: 211615 - protein, 37 aa, Glycine max
  unsure (1)..(37): unsure at all Xaa locations
  Clone ID: PAT_MRT3847_33115C.1.pep
LFRYSDXSTCYEITLXASTRVLALRRARXXVXAXXLL

SEQ ID NO: 211616 - protein, 90 aa, Glycine max
  unsure (1)..(90): unsure at all Xaa locations
  Clone ID: PAT_MRT3847_33116C.1.pep
NKRTKENXXYKIIXXNEQFAYEAYKYSFRIKLLIYSMKNLSRAKPRRIWVLLQTEAYECPQQSMSLSSLTSPIHPTTVGSSSPIHIHQSS

SEQ ID NO: 211617 - protein, 83 aa, Glycine max
  Clone ID: PAT_MRT3847_33117C.1.pep
HQRSWNFSSPLCWEIKPLKKPYIVYRGEKILSYTILCHIFSILVFSETFQEVFWSRFTPRRTFFGNNRVVATQLFCSKLLWEL

SEQ ID NO: 211618 - protein, 61 aa, Glycine max
  Clone ID: PAT_MRT3847_33118C.1.pep
LEKLQHVTTSILTLHHSYTLSWLSNTLFLILPNPKLLSKTKHQVYTLHLTTYLQQKLSYYL

SEQ ID NO: 211619 - protein, 81 aa, Glycine max
  Clone ID: PAT_MRT3847_33119C.1.pep
LDKADMAKCPMWYVICLSERVSLSTHSSAPVVVVRHVCLPVILPMCRGLSSWTVRDSNIGSQQSKPLEVMCVMCPPPGLAV

SEQ ID NO: 211620 - protein, 119 aa, Glycine max
  unsure (1)..(119): unsure at all Xaa locations
  Clone ID: PAT_MRT3847_3311C.1.pep
MEVGRAPRRRVSPAAAAAAVPSLLLFAVLFAGRAAAFGHLQGAGATALYKHASFFDRDGDGVVSFSETYGAFRALGFGFGLSSVSAALINGALGSKCRPXNATSSKLDIYIEDIQKGKH

SEQ ID NO: 211621 - protein, 72 aa, Glycine max
  Clone ID: PAT_MRT3847_33120C.1.pep
MWRSLTLSAYSPCQLLLSSACLAISSSKLNECQLKNLNALEPDHRAESESGLIRTWYSQHPELTCAGVTVPK

SEQ ID NO: 211622 - protein, 191 aa, Glycine max
  unsure (1)..(191): unsure at all Xaa locations
  Clone ID: PAT_MRT3847_33121C.1.pep
PDHPLAANCVARKEAEAEETMKILVTGASGFLGGKLCDALVRQGYSVRVLVRSTSDISALSPHIEIFYGDITDYASLLAACFSCTLVFHLAALVEPWLPDPSKFFSVNVGGLKNVLAAVKETRTVEKLLYTSSFFALGPTDGIVADENQVHHEKYFCTEYEKSHAAPAXIAVLAAPGRGPPVLLYPGVIYG

SEQ ID NO: 211623 - protein, 82 aa, Glycine max
  Clone ID: PAT_MRT3847_33122C.1.pep
LILTGTGPKIPLGKKILSHRSPYPRALILGPHQKIGLKEKNPTHQDLQRSQSIRPLDKKGWPPRGPNGETYYKPHLPIPSFN

SEQ ID NO: 211624 - protein, 84 aa, Glycine max
  Clone ID: PAT_MRT3847_33123C.1.pep
FLSPIPTGMLNNFKGFSIAAFGTKGWVTCPKGLSFLFHFFQTLGGPLPFFNFFNKPNKLLPVFWFKQMRIPLLWFFRTQAEFRA

SEQ ID NO: 211625 - protein, 77 aa, Glycine max
  Clone ID: PAT_MRT3847_33124C.1.pep
LEKQTTFAAFVGTLIFFTPGRIFPPPTFYIFRENCVPSCSLAPTDHLFLSYPWSWLTVLTSSLFFFGRGAYEEPVGF

SEQ ID NO: 211626 - protein, 184 aa, Glycine max
  Clone ID: PAT_MRT3847_33125C.1.pep
MNMAFFMNMPGVAVLLLLLILPPPLFIAADNKLIQTLCHNSETPETCMRCVQSSKKAVNVNSTVGVAMIVINCIKDKANALALNMTKLASTSNGHLKSICKKCAKDYGHHIAKKEFFSSKHALRNHRYDKAESAVARALSIDLACHSILTSLHHDEVPSHVFDGMKTYEELSEAACRIMEKIYE

SEQ ID NO: 211627 - protein, 60 aa, Glycine max
  Clone ID: PAT_MRT3847_33126C.1.pep
SSPERITKPRGWCLFLTEERKRYVRDRPTMGGLFFLEAPYQFHPWFLLLITSQPLVLFAS

SEQ ID NO: 211628 - protein, 62 aa, Glycine max
  Clone ID: PAT_MRT3847_33127C.1.pep
CWFLAPVCLFVGRLFGGPCLASPPSSRLFCSQVWGLAPRRKKSFDRSVFMCCGCENPSLHFC

SEQ ID NO: 211629 - protein, 48 aa, Glycine max
  Clone ID: PAT_MRT3847_33128C.1.pep
LCITAMFIMASQSTLIFCLSRFSGMATSSKIWSLLVDFFTFSAMWYHR

SEQ ID NO: 211630 - protein, 50 aa, Glycine max
  Clone ID: PAT_MRT3847_33129C.1.pep
MVWRTLSMLPSKECSKGFRDRDHRRFINWNYGQAKVFWLFLDLEEFLLIN

SEQ ID NO: 211631 - protein, 265 aa, Glycine max
  unsure (1)..(265): unsure at all Xaa locations
  Clone ID: PAT_MRT3847_3312C.1.pep
RNAQKGVPVVKQYVVFIPGNEQETLNLSLKMHPNPQMXATDAQINAIELFKINDPTGNLAGPNPDTHPQSPKRVPLQSSNKKSQGSTTRTLAAVAGAVSGVLMLSLIAFLIKRRKNVAVNESSNKKEGTSRDDGSLSVPTGLCRHFSIKEIRTATNNFDELFVVGMGGFGNVYKGHIDDGSTTVAIKRLKPGSRQGVDEFTNEIEMLSQLRHRNLVSLIGYCYESNEMILVYEFMDQGTLRDHLYDTDNPTLXMKHRLQICIGVA

SEQ ID NO: 211632 - protein, 83 aa, Glycine max
  Clone ID: PAT_MRT3847_33130C.1.pep
ITGRSRNVGLRNCPVESYGDSMPIDRLLLLRMILGVHMNTSRKARRGDNTSPVLKSLIIGLHKRILPRAQRGLLLREKGHMSR

SEQ ID NO: 211633 - protein, 105 aa, Glycine max
  Clone ID: PAT_MRT3847_33131C.1.pep
SLTPGKGNKDKMAKISFVLVFAFVLLALPLCSVLGQEDWKDLLDQGGFSQDSLKKAQMAFGAASAQAAVNDYFGGDDSPQEADDGEASSLADFLDADEITNNNPH

SEQ ID NO: 211634 - protein, 68 aa, Glycine max
  Clone ID: PAT_MRT3847_33132C.1.pep
EVETKQSEVTEQVVKPAFVSPSASALTCILVQATYHPNVFSISQYLGLPNLLQLEATENSTYLDMLQL

SEQ ID NO: 211635 - protein, 68 aa, Glycine max
  Clone ID: PAT_MRT3847_33133C.1.pep
RNRMTETKELFEWILKQPCFEKTSFMLFLNKFDIFEKKILKVPLNVCEWFKDYQPVSTGKQEIEHAYE

SEQ ID NO: 211636 - protein, 166 aa, Glycine max
  Clone ID: PAT_MRT3847_33134C.1.pep
MRAVLVSVLPLPPSHRLSTQNHNPNSHLRFPSSSSVTSSTSSNRTIVFGVNPSDSKKDPSFFDENGAVNDMEGYLNHLSLEYDSVWDTKPSWCQPWTIALTGVSIIAISWLILHSVIITSLISSLICAWWYIFLYSYPKAYSDMIAERRERVTNGVEDTFGQKKNQ

SEQ ID NO: 211637 - protein, 262 aa, Glycine max
  unsure (1)..(262): unsure at all Xaa locations
  Clone ID: PAT_MRT3847_33135C.1.pep
IQERIKDNKSRTEFSFIRSCIQIVVWRFLQRSKGSDVLATKQALLFIILLQYVPRFLRMVPLTSELKRTAGVFAETAWAGAAYYLLLYMLASHIVGAFWYLLAIERNDTCWQKACSDIGCKENFLYCGNRHMEGYSAWNKTSEDIQSRCSADGDPAHFDYGIFGQVLSSGIISSKKFISKYCYCLWWGLQNLSTLGQGLQTSTYPGEVIFSIALAISGLILFALLIGTCSXYLQSLTIRLEXMRVAVKRRDSEQWMHHRLLP

SEQ ID NO: 211638 - protein, 39 aa, Glycine max
  Clone ID: PAT_MRT3847_33136C.1.pep
PWLKLLLVLCTIDKKNRSVIQYYSVLIVNFISRFSINSI

SEQ ID NO: 211639 - protein, 67 aa, Glycine max
  Clone ID: PAT_MRT3847_33137C.1.pep
LWKFGRVKNFPREKPLPWFPQSLKRAPFAETCSPSGTRPEINPRAPRPLIGGPPCFFFFFFFFFSRA

SEQ ID NO: 211640 - protein, 67 aa, Glycine max
  Clone ID: PAT_MRT3847_33138C.1.pep
AFSHLGWLGIVERCHTSKRRHVRNHALYVVNYKYLLPRSNLSDKEALEFESRCLCQASLGRVEFWDR

SEQ ID NO: 211641 - protein, 95 aa, Glycine max
  Clone ID: PAT_MRT3847_33139C.1.pep
VGHDGDACVRPLSRYIGILVLELRCIFNAGRIGSRRLQRWNGLYAERTDCSSIIGGYDRLILDLLELISVDVGLSLWSRVRLTRLAGIAGAFFVL

SEQ ID NO: 211642 - protein, 119 aa, Glycine max
  Clone ID: PAT_MRT3847_3313C.1.pep
GWLHLFLGSCRCICCFKIQGLYASVLRHILLDRSTGELLQEYKGHPNKSYKLDCCLTNTDAHVTGGSEDGFIYFWDLVDASVVSRFRAHTSVVTSVSYHPKENCMVTSSVDGPIRVWKT

SEQ ID NO: 211643 - protein, 94 aa, Glycine max
  Clone ID: PAT_MRT3847_33140C.1.pep
EQEKEAQDERRVQEGYELFREMKGKGCLVDRVIYGALVEAFVAEGKVGLAFDLLKDLVSSGYRADLGIYICLIEGLCNLNRVQKAYKLFQLTVR

SEQ ID NO: 211644 - protein, 76 aa, Glycine max
  Clone ID: PAT_MRT3847_33141C.1.pep
HASALLSLSLLELRCTLPSLPFTPTQISISDPFSLFSTTFLFTSIFIPSPYLFFLIFNVGLTISFNFCFPICSTAI

SEQ ID NO: 211645 - protein, 104 aa, Glycine max
  Clone ID: PAT_MRT3847_33142C.1.pep
ERERERATSTSSSTPSRYSGPTRTTTLPPTLSPRSPRSRSRPSRTSLTPSRLLPALSPSRTLPSRLFHDGMGSKSTAVMTDHIPWMEKAQEVATMIYSYITTAR

SEQ ID NO: 211646 - protein, 338 aa, Glycine max
  Clone ID: PAT_MRT3847_33143C.1.pep
MPLASFFIINAFFFWKCAFSWVRCERLGAVKVPVLSIVVIVGGIRVINQEANPASCNEPKERWSLVFSVCNQEDLLLKIITKSRFLEKLFIDEDQWMYESIMFEEADMDYQNEEACGANEPHVDCSDAFNTYQVFDSREDVLRWARSIAHENGFVAVIIRRDTRTRKCGCPFKLCCKPVVGGEGWMVKLICAVHNHELVNSLVGHPYAERLTKAEKTLIVDMTKSMVKPRNILLTLKEHNANSCTTIKQIYNARSAFCSSIRGSDIEMQHLMKLLERDQYIHWHEIKDEDVVRDIFWCHPDTVRQHLQNKPVQTSTARFCWGDTDWDDILCRFCICGV

SEQ ID NO: 211647 - protein, 58 aa, Glycine max
  Clone ID: PAT_MRT3847_33144C.1.pep
QKPNFGNKSWGVLGATLNYLRKTSYLETKTRGQKTIFYCDPKKPPPPGGQTRPFFFFF

SEQ ID NO: 211648 - protein, 66 aa, Glycine max
  Clone ID: PAT_MRT3847_33145C.1.pep
TARCRRFEKEEFLHALPQAHKMSQLFWRIQGPRLMTTKCRKAKHENRQNKIIQTSVANPPSIGKRK

SEQ ID NO: 211649 - protein, 53 aa, Glycine max
  Clone ID: PAT_MRT3847_33146C.1.pep
AVYVKVKVCKNVCGVLRISCVSAQCISSDLCCKWKVSQPILCDTIGMLMLLYE

SEQ ID NO: 211650 - protein, 83 aa, Glycine max
  Clone ID: PAT_MRT3847_33147C.1.pep
RVFPPRVCEKRPIKRAFSKFYKKGEGGPKFGGGKTLPRKADPLGGFGDPESVKGFLAAFGKKIKKGSVSPLNFPLEDLRGRNP

SEQ ID NO: 211651 - protein, 107 aa, Glycine max
  unsure (1)..(107): unsure at all Xaa locations
  Clone ID: PAT_MRT3847_33148C.1.pep
APSENALIPVSPSKNLTLATTTFFVQKENVFCDVVPATATAYPLPPVVVVGRSRSQGFTTRGVTAAGATGGSGDEERGLPNGDFYAGSYCXDVPDGSGKYLWTNGCM

SEQ ID NO: 211652 - protein, 61 aa, Glycine max
  Clone ID: PAT_MRT3847_33149C.1.pep
DFYNKGEYRLIFLYTNVLMLKVSKYQQFDILKIKIFLKITEIIYIKIKHLLDFCVYHIQAI

SEQ ID NO: 211653 - protein, 262 aa, Glycine max
  unsure (1)..(262): unsure at all Xaa locations
  Clone ID: PAT_MRT3847_3314C.1.pep
MSVKNDVPGKEVNVLKGHEGGVLAARFNTDGNYVLSCGKDRTIRLWNPHRGIHIKTYKSHAREVRDVHVTQDNSKLCSCGGDRQIFYWDVATGRVIRKFRGHDGEVNXVKFNEYSSVVVSAGYDQSLRAWDCRSHSTEPIQIIDTFADSVMSVCLTKTEIIGGSVDGTVRTFDIRIGREISDNLGQSVNCVSMSNDGNCILAGCLXSTLRLLDRSTGELLQEXGKVLLTDAHVSLVTRHSSHPKDYCMVTSSVDGTIRVWKT

SEQ ID NO: 211654 - protein, 71 aa, Glycine max
  unsure (1)..(71): unsure at all Xaa locations
  Clone ID: PAT_MRT3847_33150C.1.pep
KEPQFFKNGDAGFVKMIPPXPLVVETFSEDPPLGRFAVRALRPTVAVGVLKNVXKKGPPGAKVPKAAPKKK

SEQ ID NO: 211655 - protein, 167 aa, Glycine max
  unsure (1)..(167): unsure at all Xaa locations
  Clone ID: PAT_MRT3847_33151C.1.pep
MLSISHSSLFRLHSAASITTLLKASKKSEHLKQMQACVIHHALEQDHFLVSLFISCAHTLLSTFSYAFSIFYHVLALPTFLWNTLVKSHCQKNLFSHTLSVFARMKAHGELPYSFTYPFVIKAYSGACKVREGKLLHGFAFLCSIDHDLYXGTILINMYRKCXEIAD

SEQ ID NO: 211656 - protein, 64 aa, Glycine max
  Clone ID: PAT_MRT3847_33152C.1.pep
RGVLSGRGTGTNVWLLEAASPGAEVTLHGRWEILTLFGSILPPSAPPAARGLAIYLAGGQGQVV

SEQ ID NO: 211657 - protein, 51 aa, Glycine max
  unsure (1)..(51): unsure at all Xaa locations
  Clone ID: PAT_MRT3847_33153C.1.pep
GEVIQKMLKNAEFSGRNNGKGVFQTIVGLKIRDVYEXIIARKVEIPVEAKA

SEQ ID NO: 211658 - protein, 171 aa, Glycine max
  Clone ID: PAT_MRT3847_33154C.1.pep
CHLFKVNSCLCTRNIKKELFPLYRELGIGIVPYSPLGRGFFGGKGVVENVPTNSSLKAHPRFQAENLDKNKNIYERIEGLAKKHQATPAQLALAWVLQQGEDVVPIPGTTKIKNLDQNIGALAVKLSEKDLREISEAVPIGDVAGGRYYNGLDHFSWKYANTPPKDSKIST

SEQ ID NO: 211659 - protein, 57 aa, Glycine max
  Clone ID: PAT_MRT3847_33155C.1.pep
WIKTVINVPADSAKALTVIGETTLCFVVCWIALEHRTEFHSERLRLARATTSQGSVI

SEQ ID NO: 211660 - protein, 72 aa, Glycine max
  Clone ID: PAT_MRT3847_33156C.1.pep
TRSFPHYGHSGIVEAARELFMQIEASGGNADSESYGLLSKLLGFGCECFGYNVRIVGHSLGGAIAALLGLQV

SEQ ID NO: 211661 - protein, 70 aa, Glycine max
  Clone ID: PAT_MRT3847_33157C.1.pep
VGCCYMQQLVLKEQWVCLSFVERTYTNMRVYQKAFVLHSESRDNDLMGTYRGNKKLSKSKDFFYQNTLDY

SEQ ID NO: 211662 - protein, 83 aa, Glycine max
  Clone ID: PAT_MRT3847_33158C.1.pep
TICSGWNYSPVSLSYPSMALVSNDVKTATCNQLEKKVSFFTNKIAHCDQFQSGIYPPESRTYSSLILTCFQKVNSDYFCPSTL

SEQ ID NO: 211663 - protein, 52 aa, Glycine max
  Clone ID: PAT_MRT3847_33159C.1.pep
PRGARKDKPGADSVHLNVYELTPINVYAYGIGRGEDHSGGEGHVIEIDVLRR

SEQ ID NO: 211664 - protein, 62 aa, Glycine max
  Clone ID: PAT_MRT3847_3315C.1.pep
TATLQENTNTGRQIQSLKKDSYGPAFHSLFLQYKILHPVTDPTALWLTLSSDKVKNMKKNDG

SEQ ID NO: 211665 - protein, 66 aa, Glycine max
  Clone ID: PAT_MRT3847_33160C.1.pep
MQHAGIFHMAVSCWALLTFGPQVCKGYGSFTFFLIYILGGVACNFISFLHTPDPTVGGTVSIMLKF

SEQ ID NO: 211666 - protein, 506 aa, Glycine max
  Clone ID: PAT_MRT3847_33161C.1.pep
MAAFPMFYKTPYKDQNLPTQNVMRQNEKRFMYECDNMKRFISSTPGQICRSSQPWNKVNNVLTKSNTKERNVPRSILHGRCSLHKNVTKLCGSDSHLSLIKECYSKTENLSRVWCSAGSSSTEKQLRSLDSYFGKLQDNAKLRTFDSSHKVIQLHHIDRQARSKTGLESLEEYLGKLNHEANQEPCVPSYVENHSEENLAPKRSLSKDIERSNFRKQNAFVDIRRLKRLHDPRSAIDSQQQVETSSLYLSGILASVNIAVFLFEIASPIRTSDLELFSIPLLYGAKINHLIMVGEWWRLVTPMFLNWHAGIFHMAVSCWALLTFGPQVCKGYGSFTFFLIYILGGVACNFTSFLHTSDPTVGGTGPVFAIIGAWLMYQIQNKHVIASDASENLFQKAVIMTALIFILSHFGPIDEWSHFGAAFSGMAYGFLTSPILQLNDSSSGTGQEEGLKLVRKYGDSCKSLLIFTMFIIVLSSFLFFMEPPPNALASVNAAAVDALEYMLIFG

SEQ ID NO: 211667 - protein, 75 aa, Glycine max
  unsure (1)..(75): unsure at all Xaa locations
  Clone ID: PAT_MRT3847_33162C.1.pep
IGLKXRCSYLLVCSPSGRLFICHDSXASRPVAXLQPPRMRSXKXWRDRARXWPAXRLGWXCADDXAPPVPPGAHG

SEQ ID NO: 211668 - protein, 418 aa, Glycine max
  Clone ID: PAT_MRT3847_33163C.1.pep
MLSSNVVPSSSPVTFSKPNHHFFINASPNPKPNLLRFQAQHRTTPLKSSKLSFMPTSQIQHSIAKLGSFSRFLSHPFELSSKPRYQIVKAASEANPEGENVAPTEPNSKNLKLGLVFGLWYFQNIVFNIYNKKVLNIFPFPWLLASFQLFVGSIWMLVLWSLKLQPCPKISKPFIIALLGPALFHTIGHISACVSFSKVAVSFTHVIKSAEPVFSVMFSSVLGDKYPIQVWLSILPIVLGCSLAAVTEVSFNVQGLWCALISNVGFVLRNIYSKRSLQNFKEVDGLNLYGWITILSLLYLFPVAIFVEGYQWIPGYYKAIEAIGKASTFYTWVLVSGVFYHLYNQSSYQALDEISPLTFSVGNTMKRVVVIVSSVLVFRNPVRPLNGLGSAIAILGTFLYSQATSKKKAMKIEGEKSS

SEQ ID NO: 211669 - protein, 69 aa, Glycine max
  Clone ID: PAT_MRT3847_33164C.1.pep
TFKLARFTHFPVCTLSTSGLYFGFRIHYIRRSMSQAGVCNLVSCTPAAFFFFFFFFRLLICLNSAGSPA

SEQ ID NO: 211670 - protein, 49 aa, Glycine max
  Clone ID: PAT_MRT3847_33165C.1.pep
RLREDDRRGPLQLKPVIYSTFFLGIRSLFCFDISFGSILPCHYDVHEDI

SEQ ID NO: 211671 - protein, 269 aa, Glycine max
  unsure (1)..(269): unsure at all Xaa locations
  Clone ID: PAT_MRT3847_33166C.1.pep
MSGVSLAVSGPPAATVAEAAGTKPKRRTEQAPMGGMMGSLRVIELQLVAFILVFSASGLXVPLLDLVFPAFASAYILALSQFAFPSASSSGTEIFKGSRLFRMYVVFGTTVGLFLPLAYVLGGFARGDEHAVRSATPHLFLLSFQILTENIIGGLXLCFSPPVRALVPIIYTIRRIFVDIDWIHDVWLNKTLPVNAKFQDLAWYWFGKGLAVANLAYFSINLFGFLIPRFLPRAFERYFQEKGEIYTKSAEDKRSVVVNRTQLSEKKTD

SEQ ID NO: 211672 - protein, 75 aa, Glycine max
  Clone ID: PAT_MRT3847_33167C.1.pep
GNNKGKNGLLIQMNAIFAIKTLVKQIGSLVQGLILMWLDSLRACQRKRSRCDWPKGQTVKPQLLNKKLAIDRRNP

SEQ ID NO: 211673 - protein, 82 aa, Glycine max
  Clone ID: PAT_MRT3847_33168C.1.pep
QFRCLPPGLKWLQWKQCPLRYMPSSYSPLELAVMDLSESNIETLWSRSNNKVCFLKPNYEKYAKNIFSVILFSTFFLFVEIY

SEQ ID NO: 211674 - protein, 111 aa, Glycine max
  unsure (1)..(111): unsure at all Xaa locations
  Clone ID: PAT_MRT3847_33169C.1.pep
RSFTNRFANIYINNTKXLRSQHITFLASFSSPTHIFKQLSIIYTLPHLFITSFTLVLPFFATKSFKQIRKEEDIAATLTLTXILANIPISRGDPTSXVIYDIHTLARKVLF

SEQ ID NO: 211675 - protein, 80 aa, Glycine max
  Clone ID: PAT_MRT3847_3316C.1.pep
GRAKAFLDSKQFLQIIFSLLALHKREGLFMLGMRITLSLYFLCIPSILLIIHVDQPFSIQFHLTRIAPKYHYYTIFLFYK

SEQ ID NO: 211676 - protein, 89 aa, Glycine max
  unsure (1)..(89): unsure at all Xaa locations
  Clone ID: PAT_MRT3847_33170C.1.pep
AASARAGLRTIXRVEQTMQDLGVNLNPKVPTRAGGTEHLELRKEILTWLSLLFQAQYKEAERTSSGDGPYGETPGTPKHVHRVGDHDRT

SEQ ID NO: 211677 - protein, 71 aa, Glycine max
  Clone ID: PAT_MRT3847_33171C.1.pep
GKHPKKSLSFCPKLREHFFILIMGKVPNLGRVRHPFFNKQENQGLCCSFPFPLHPPLIEKQTLFWLFGILT

SEQ ID NO: 211678 - protein, 115 aa, Glycine max
  Clone ID: PAT_MRT3847_33172C.1.pep
SGKGGGGKASPRCCWPRKLESYPHPFLGSAPQKTFSGQAPRWKRLWLGLTLPPPQQRIRGGAPHVKKFRGLSSLCGKVFPRVGDFIQAVVILPFAIDPRTLLLPRPAKKKKKKKI

SEQ ID NO: 211679 - protein, 50 aa, Glycine max
  Clone ID: PAT_MRT3847_33173C.1.pep
LVLACSILWDLANMVSADKRLMWCKARFFRSVRCLSLATIFNLGQSIELI

SEQ ID NO: 211680 - protein, 76 aa, Glycine max
  Clone ID: PAT_MRT3847_33174C.1.pep
ANPSSKKGMWYWDDDEQEYPITDVIKFRVTNVSYPQIPVEQPKESKPFAPMLVSGAIDDDGLGPISWWFGDEDEDE

SEQ ID NO: 211681 - protein, 41 aa, Glycine max
  Clone ID: PAT_MRT3847_33175C.1.pep
FKHSFSDSSLLLSNTLKSLIKTFQIIIICMDYCYPQNEELW

SEQ ID NO: 211682 - protein, 76 aa, Glycine max
  Clone ID: PAT_MRT3847_33176C.1.pep
PNNYVVIRGPDIFNSVHGIKAYSLQGAVKQLGTCKTSSPGQPSSFFFMVPFPPVSNRTGHLHQSFPDSSFSSSVQS

SEQ ID NO: 211683 - protein, 87 aa, Glycine max
  Clone ID: PAT_MRT3847_33177C.1.pep
TIELCSPPPKKTAPKQWYSYKINKKMLLDFPLPIPNLGSPPPPIIHETGSASCKLRNSVYFNNIFTFFQPNLFLFSHNSKRGGLLEK

SEQ ID NO: 211684 - protein, 78 aa, Glycine max
  Clone ID: PAT_MRT3847_33178C.1.pep
EFPQEPQSHFLRLPDRSHKKTDSSKASLNISAPLFLEKCAIWNFPRKAHLISCGFRIGLVRKPIIANSPYEHCCLLIY

SEQ ID NO: 211685 - protein, 320 aa, Glycine max
  Clone ID: PAT_MRT3847_33179C.1.pep
QKIQASMCKRPHKEDTRLVVTDPQVHIVEPKESTEWDVKLLNQSVYDQTSTIDMAEHSGEKEAVNSNESCGTPSSVISLTDESNSRLSELPQKNIKEHCSPTRSGILSATIEEGEEKSCYNGDRKELNDIVSSQGSVFSSQISGDFSNDQNPEKIGSCSDSNSEVEVLSSTAKYNHFGSNTSFSKLLEMVSSTKFYEDNSQKSESIENSGMLEVNGFDPFKTEASTSDLKKKDENGMNRSSLQTTEPAGQVAITHSQSIASQVHPREQSNHQQQSFFNISGQTQDLMQKERGSGLGEQKNATRNGTNEISSAPIKLKTKE

SEQ ID NO: 211686 - protein, 268 aa, Glycine max
  unsure (1)..(268): unsure at all Xaa locations
  Clone ID: PAT_MRT3847_3317C.1.pep
TKSNSKPRLICWVLLLXEFDLEIKYKKGNENVVADHLSKFNNSEVTIKEAEIQEEFPNEKLLAVQQRPXFVDMANFKAVGVILKEXNWHXKKKFFKDANHYVRDNPHLFKIRANKLIXRCVIXSILWHYHNSPYGGHFNGERSAAKVLQAGILWPMLFKDAHLYVKQYDKCQRKGGISRRNEMALNNILEVEGFDYXXRXIDFVGPLPFSHSNEYILVIVDYVXKWVEVIATKKADTKTIIQFLKKNIFCRFGTLRVLINNERVSRTR

SEQ ID NO: 211687 - protein, 63 aa, Glycine max
  unsure (1)..(63): unsure at all Xaa locations
  Clone ID: PAT_MRT3847_33180C.1.pep
HTISCGSCLLXRAWFPTHRERMGRKMVDLARDVGKGGTPSYRRHLHVVVTGXDDEDRYIDIPQ

SEQ ID NO: 211688 - protein, 70 aa, Glycine max
  Clone ID: PAT_MRT3847_33181C.1.pep
MSLVANEDFQHILRVLNTNVDGKQKIMFAMTSIKGIGRRFANIACNKADVDMNKRAGELTRAELDSVMTV

SEQ ID NO: 211689 - protein, 101 aa, Glycine max
  Clone ID: PAT_MRT3847_33182C.1.pep
ISTFCSPNTLSPPLACSFISIQLIRVPSGILWFVVRLINPLEARIDGSLLGTHTGVLVYSPVSTPRRSYSICFTSPFFSLHMAYGLTDYLGSPLPCSRSTQ

SEQ ID NO: 211690 - protein, 36 aa, Glycine max
  Clone ID: PAT_MRT3847_33183C.1.pep
FFLLDHALCILFKIKKLYDIICYFSLLFAFANKFCI

SEQ ID NO: 211691 - protein, 67 aa, Glycine max
  Clone ID: PAT_MRT3847_33184C.1.pep
VQYSQTPGYPHQSLIPLISLKENLIGGGQEPQAHPPHSLLLLPLLIRTSITIIWSGSTLGSSVISAT

SEQ ID NO: 211692 - protein, 55 aa, Glycine max
  Clone ID: PAT_MRT3847_33185C.1.pep
VRARQFSCLVFMVATNTIKKLASDKHTTKVWWICSKEFRALYYIAPKSKLSTSCL

SEQ ID NO: 211693 - protein, 52 aa, Glycine max
  Clone ID: PAT_MRT3847_33186C.1.pep
IGINLGYEFLKRNSRAPSFVNGVLHASFLEVGIMDQVNLWFSWIQPPCIVAS

SEQ ID NO: 211694 - protein, 130 aa, Glycine max
  Clone ID: PAT_MRT3847_33187C.1.pep
PSARVLTYQNFCTRRSIKQLGWLLAVVQSLLIVASRKHYTVDVVVAWYTVNLVVFFIDKKLPELPDRSIAAATLLPLSTKDKDNRTKEENHKLLNGNSGDPADWRQRTQVNGKIMEDGNTLHADSAMNGA

SEQ ID NO: 211695 - protein, 154 aa, Glycine max
  Clone ID: PAT_MRT3847_33188C.1.pep
MKLSSLNKDEKIKVDLIVIGSVAVDPKTGARLGKGEGFAELEYGMLRYMGAIDDSTRVVTSVHDCQLVDDIPVEKLLIHDVPVDIICTPTQVIFTNTSIPKPQGIYWDKLSPEKLGQVRILRELKKRIEQETGQKLPTGPSEKLPPTAQRSRRG

SEQ ID NO: 211696 - protein, 54 aa, Glycine max
  Clone ID: PAT_MRT3847_33189C.1.pep
ATLDKTLLKKNDEGAYLKTIMEIFYTTLIKILLIGYILHTCNEMKNITIIKIIK

SEQ ID NO: 211697 - protein, 56 aa, Glycine max
  Clone ID: PAT_MRT3847_3318C.1.pep
QDYFCSTFWSYLNYEIPRYVLFLFSVDFDLKRICVIGLGLYFLYFLLLKILLSLRY

SEQ ID NO: 211698 - protein, 97 aa, Glycine max
  Clone ID: PAT_MRT3847_33190C.1.pep
FCMGLGVIPNILCSEIFPTSVRGICISICSLTFWICTLIVTSLFPFLLHLLGLTGVFGLFVVGCIIAWIFVYLKVPETKGMPLEVIIEFFSIGAKPE

SEQ ID NO: 211699 - protein, 68 aa, Glycine max
  unsure (1)..(68): unsure at all Xaa locations
  Clone ID: PAT_MRT3847_33191C.1.pep
FLLTPLLISIFNLGFHSPFRSFSRCTWKIKALFLNYINPVFYFLKNPXXGGRPPTLLVAPRIIIPAGP

SEQ ID NO: 211700 - protein, 99 aa, Glycine max
  Clone ID: PAT_MRT3847_33192C.1.pep
AAATPMASQLKCTFTKTLVTAKGLSASSPLHLLPSKRQFSYTVRAIQSENPTYQVIQPIKGDPFIGRLETTITSNTLIAWHLSNLTAYTTAGNTLLTGT

SEQ ID NO: 211701 - protein, 271 aa, Glycine max
  Clone ID: PAT_MRT3847_33193C.1.pep
MGKKGGSWFSSVKKVFKSSSKDSPQPEKKKDNTQKLQHEVAEVVSFEHFPAESSPDNVSNAEMSTTSTPVTNEDRSHAIAVAAATAAAAEAAVVAAQAAARVVRLAGSYGRQSKEERAATLIQSYYRGYLARRALRALKGLVRLQALVRGHNVRKQAQMTMRCMQALVRVQARVRARRFQLSHADQEREKKEEPKPIPVPVPMSPLRRIDDINDWDNRRQSSYKIKENDLRKHEAVMKRERALAYAFNYQQQQQKQFLQPDWNGNDDVGTN

SEQ ID NO: 211702 - protein, 168 aa, Glycine max
  unsure (1)..(168): unsure at all Xaa locations
  Clone ID: PAT_MRT3847_33194C.1.pep
HVIKPVIPAKYLDDKTIFHLNPSGRFVIGGPHGDAGLTGRKIIIDTYGGWGAHGGGAFSGKDPTKVDRSGAYIVRQAAKSVVASGLARRCIVQVSYAIGVPEPLSPNGEDXLALIXEKFDFRPGMIAIHLDLMRGGNFRYQKTAAYGHFGRDDPDFTWETVKILKPNA

SEQ ID NO: 211703 - protein, 78 aa, Glycine max
  Clone ID: PAT_MRT3847_33195C.1.pep
SWYLIRSTVRITLMIESWSQRCTLLQKIRGLFHRFQFEMRFVFSDSDVLLTDRSSVPSERVFFSLFFFWLVSLFFFFV

SEQ ID NO: 211704 - protein, 56 aa, Glycine max
  unsure (1)..(56): unsure at all Xaa locations
  Clone ID: PAT_MRT3847_33196C.1.pep
PRGLPPKKGPGXFNPKGPPQKKNPPGENKQKGGVCRPFFHPNKLPNLRGGLGNFFF

SEQ ID NO: 211705 - protein, 390 aa, Glycine max
  Clone ID: PAT_MRT3847_33197C.1.pep
METFLFTSESVNEGHPDKLCDQVSDAILDACLEQDPESKVACETCTKTNMVMVFGEITTKASVNYEKIVRDTCKGIGFVSPDVGLDADNCKVLVNIEQQSPDIAQGVHGHMTKKPEEIGAGDQGHMFGYATDETPELMPLTHVLATKLGARLTEVRKNKTCPWLRPDGKTQVTVEYKNDGGAMIPIRVHTVLISTQHDETVTNEQISKELKEHVIKPVIPAKYLDDKTIFHLNPSGRFVIGGPHGDAGLTGRKIIIDTYGGWGAHGGGAFSGKDPTKVDRSGAYIVRQAAKSVVASGLARRCIVQVSYAIGVPEPLSVFVDTYQTGKIPDKDILALIKEKFDFRPGMIAIHLDLMRGGNFRYQKTAAYGHFGRDDPDFTWETVKILKPNA

SEQ ID NO: 211706 - protein, 129 aa, Glycine max
  Clone ID: PAT_MRT3847_33198C.1.pep
MLTSFFMKEFIGFKIYSKTPPICWVLWMRIILMGKPLFRGLKKILFLINWDPNLRALGFWKICRDKHAPFFQDLFVGPFIFFPDPLFFCPKASFDFCFFDIFFPGPPFLKFSRCLLFIFLANPEWFFLP

SEQ ID NO: 211707 - protein, 204 aa, Glycine max
  Clone ID: PAT_MRT3847_33199C.1.pep
MEEEEDEVGWCSSDSGDGDGDDDIEERKSQNVDALLRGNLVVKRQSLLPRLLSVSQGAAVCRKPFKPPCSKSHASASAYNQDLTRKLSARKRFVPWGSSSPIPIPIPRSALDDSKFNVAVAVADVAEELKPSLPPGIDPLVLWHPQDSEDANANFTTITVDPVLVRYLRPHQREGVQFMFDCVSGLSTTPNIHGCILADDMGLG

SEQ ID NO: 211708 - protein, 163 aa, Glycine max
  unsure (1)..(163): unsure at all Xaa locations
  Clone ID: PAT_MRT3847_3319C.1.pep
RDGYEGNPYLGCIDIDECKTGHHTCISEKYCLNTNGSHICFCPKSGNGTKGSXGCHKQDVVTKVVIGVGAGTIILVVGTTLLYLIYQKKKLNKLREKYFQQNGGSILLQKLSTRENSSQIQIFTEEQLNKATDNFDESLIIGKGGFGTVFKGHLSDNRIVAIK

SEQ ID NO: 211709 - protein, 185 aa, Glycine max
  Clone ID: PAT_MRT3847_331C.1.pep
FFFLVIKLEPDLGARSFWIHNTGPIGCLPYILANFLSAERDAYGCAKTYNDIAQYFNHKLKEVVVQLRKDLPLAAITYVDIYSVKYSLFSHPKKYGFKLPLVACCGYGGEYNYSGSVGCGENIEGNGTEIFVGSCGRPSARVNWDGIHYTEAASKFIFDQISTGAFSETAIPLNMACHRSYTKSY

SEQ ID NO: 211710 - protein, 136 aa, Glycine max
  Clone ID: PAT_MRT3847_33200C.1.pep
TGVEHFCLHTGGKAVIDGIGKSLDLCEYDLEPARMTLHRFGNTSASSLWYVLGYMEAKKRLKKGDRVLMISFGAGFKCNSCLWEVMKDLGDHTNVWSYCIDDYPPESLANPFMETFGWINNVEDATNFKLPDLFLK

SEQ ID NO: 211711 - protein, 152 aa, Glycine max
  Clone ID: PAT_MRT3847_33201C.1.pep
GCFGGRVGAPPVERYLHDLLQYALGVLHIVTLVPSSREMIVNVTLSNNRVGIAVILDAANIASNHVDPEIIQPALNVLVNLVCPPPSISNKPAMFAQGQQFAFSQTSIGPPSEARDRNAERNVSDRAVHSTSQIDPRERSGEPNAVDRGSAA

SEQ ID NO: 211712 - protein, 72 aa, Glycine max
  Clone ID: PAT_MRT3847_33202C.1.pep
RGKQLKSPDCMILIKPANPSRAGVFHRIHRFKKKISRQGPFQTPLPFSAGFSPKLPGWPREPRPTWGCRGGN

SEQ ID NO: 211713 - protein, 105 aa, Glycine max
  Clone ID: PAT_MRT3847_33203C.1.pep
HATVQVRAAPNVPHASLVTIEPHTEDDWEILELNADQAEAQILSQVRIVHEGMRFPLWLHGHTVITFQVASVFPKNVVGKMMPISVCIVLYHHMLCQSRQSCKDH

SEQ ID NO: 211714 - protein, 118 aa, Glycine max
  unsure (1)..(118): unsure at all Xaa locations
  Clone ID: PAT_MRT3847_33204C.1.pep
CGTLVIPKLGVQISEQTVTGETITLPVXPSDTHLNAYAKIQDMEGLPTDQQXINVDAXQLYYRQTVPDYNIQKECTLHLLLHLHLRMQNLLNTLTGKTITTRGGALPHKSSREIHDSL

SEQ ID NO: 211715 - protein, 99 aa, Glycine max
  Clone ID: PAT_MRT3847_33205C.1.pep
SQLIPHYVSFVHSLPTLPFFISSGINLSLPVFGLWFGVWIISRMALSFPHIYSQKSWPNTRWFQGFEKMVWFLLLSLYAWPKVSWVVSAGALRECHSCL

SEQ ID NO: 211716 - protein, 192 aa, Glycine max
  Clone ID: PAT_MRT3847_33206C.1.pep
VGEASWDNIIVLKSMLRGFEMVSGLRINYAKSQFGIVGFQPNWAHDAAQLLNCRQLDIPFHYLGMPIAVKASSRMVWEPLINKFKAKLSKWNQKYLSMGGRVTLIKSVLNALPIYLLSFFKIPQRIVDKLVSLQRTFMWGGNQHHNRISWVKWADICTPKIDGGLGIKDLVQFNTALRGRWIWDLISQHNQL

SEQ ID NO: 211717 - protein, 102 aa, Glycine max
  unsure (1)..(102): unsure at all Xaa locations
  Clone ID: PAT_MRT3847_33207C.1.pep
GSRAGGLLLDVGVSEGAVVLQLVLRIRRGAKMRKKKTYTMPRMIMHKHHKVMLVILQFCTVDESGQVQXRIRRECPHIECGAGTVMANHFDRHYSGKCGLPM

SEQ ID NO: 211718 - protein, 77 aa, Glycine max
  Clone ID: PAT_MRT3847_33208C.1.pep
QVWLSRSVMTARKIFVSMMPPVRGPVPGSESEILAFFRRCKPYWPQFIPCSLQREGFFFVVTISLRFSPRVNIMRRF

SEQ ID NO: 211719 - protein, 39 aa, Glycine max
  Clone ID: PAT_MRT3847_33209C.1.pep
LCPLPLPYHGMSESFIAAQSLFIDALAFSCGGTNLLMVD

SEQ ID NO: 211720 - protein, 84 aa, Glycine max
  unsure (1)..(84): unsure at all Xaa locations
  Clone ID: PAT_MRT3847_3320C.1.pep
PHHGAAPLAALCXHRKKKAVNVSLGSLIAYPFVKDGVVNKTMSLKGGSYDSVKGSLELWGLHFGLASSFSVGTSTINKDIVLVP

SEQ ID NO: 211721 - protein, 126 aa, Glycine max
  Clone ID: PAT_MRT3847_33210C.1.pep
GKCGMDAVESGIKPCDLAKEALHQHPLTPLTLTKSIIVGYLGIFSIYLIFCFLRFFAQLKDTLEIRHFYYNNLHVTDNEIQTMPWATILEKVVLGQRSRQLCVVKDLSAHDIVMRLMRKENYLIGM

SEQ ID NO: 211722 - protein, 105 aa, Glycine max
  unsure (1)..(105): unsure at all Xaa locations
  Clone ID: PAT_MRT3847_33211C.1.pep
NLKRHPGEQHLLGCKIRNIWAVGGPKRTREVXLKRWGEXFKRAGFGPVSLKGKPAAQTNLFLGMFPWKGETLVKKNGSPKLGWKNLSLLIPPPWQPANFMITYPD

SEQ ID NO: 211723 - protein, 105 aa, Glycine max
  Clone ID: PAT_MRT3847_33212C.1.pep
CRREGRVIKKRMTCSVDFNNKDLEISFYVFKPTVVIVDHLVHGLQQFSLLTQNLGCVQSSIFRSIHGNMIIWYGAWQKRSSEEKDKLTENLVSLIPNYWFSFLKH

SEQ ID NO: 211724 - protein, 42 aa, Glycine max
  Clone ID: PAT_MRT3847_33213C.1.pep
QWLPRPIDTQLHALALCRVKLKLLTSARSAFMCPHASPHAWA

SEQ ID NO: 211725 - protein, 75 aa, Glycine max
  unsure (1)..(75): unsure at all Xaa locations
  Clone ID: PAT_MRT3847_33214C.1.pep
RESPKEPGKRSRLWSNEEHXEVLQEKKGTGKIEIICMNFSSFGKEVEWDGDALKKMENLKTLIIKSACFSKGPKH

SEQ ID NO: 211726 - protein, 38 aa, Glycine max
  Clone ID: PAT_MRT3847_33215C.1.pep
FLELRTPSSGSLKQRTLRLFSESEDGLKRKDPSETSDQ

SEQ ID NO: 211727 - protein, 50 aa, Glycine max
  Clone ID: PAT_MRT3847_33216C.1.pep
LPLFPFNSNKSGFLSFHYLFHKNRSLLIWIGPFPRKLFVGTFNPNLDEPG

SEQ ID NO: 211728 - protein, 137 aa, Glycine max
  unsure (1)..(137): unsure at all Xaa locations
  Clone ID: PAT_MRT3847_33217C.1.pep
MTMSVKECYLHTGKKRKIGGHVFRCLVVPLFIVLFTILFIWAILRPTKPTFTLQDVTGYAFXATVPNFLTWNFQVTLISLNPNDRIIVYYDRHXTFLTYRSQHVTFLTGIPATYXGHLENNILSPLVYGTNILFSPF

SEQ ID NO: 211729 - protein, 71 aa, Glycine max
  unsure (1)..(71): unsure at all Xaa locations
  Clone ID: PAT_MRT3847_33218C.1.pep
MGASSSKMDDDDKALQLCRERKKFVKQALDGRCSFAASHVSYVQSXNSTGPALXGSWXLEAPMESSLDTST

SEQ ID NO: 211730 - protein, 89 aa, Glycine max
  unsure (1)..(89): unsure at all Xaa locations
  Clone ID: PAT_MRT3847_33219C.1.pep
ESLRVNNFPSRIDVVDDDNAAALRKFCLTXYDIRALILDLALKLDMMRHLDYLPRYXQIISMEVMKIHAPLAHAVGTTYLSLELEDLSF

SEQ ID NO: 211731 - protein, 80 aa, Glycine max
  Clone ID: PAT_MRT3847_3321C.1.pep
TIGRIHHQNVVQLIGYCVEGSKRALVYEFMPNGSLDKFIFPKDGNIHLTYDEIYNIAIGVKKKKKKKKKKKKKKTVLPPT

SEQ ID NO: 211732 - protein, 213 aa, Glycine max
  Clone ID: PAT_MRT3847_33220C.1.pep
MFSLFCFNFNFDMDVVVQIYISPFVRKEIFRNFLPGFRSSLPHYLLATQSRRNGYTYCVVADESIGRQLPMAFLERVKDEFVSKYGGGKAATAPANSLNKEFGPKLREHMQYCVDHPEEISKLAKVKAQVSEVKGVMMENIEKVLDRGDKIELLVDKTENLHNQAQDFRTSGTRIRRKMWLQNMKIKLIVLGILIALILIIVLSVCRGFNCGK

SEQ ID NO: 211733 - protein, 93 aa, Glycine max
  Clone ID: PAT_MRT3847_33221C.1.pep
MKPNFSFLFKLLILQYLADLSISQEFDFFYFVQQWPGAYCDTKHSCCYPKTGKPSADFIIHGLWPNYNDGSWPSNCDPDSVFDKSQISYLISN

SEQ ID NO: 211734 - protein, 74 aa, Glycine max
  Clone ID: PAT_MRT3847_33222C.1.pep
LFKCSNSQMSNKTTLFFRRTHDLFLSPSFSLFLRPPSKSCNFESLDNLTLGVFGSWKKLATYEHVSCNHIFICI

SEQ ID NO: 211735 - protein, 75 aa, Glycine max
  Clone ID: PAT_MRT3847_33223C.1.pep
MTAGLNMHGWYKWEQCYMKTGAVTDQEHKQHTGIENVLSGYTTWTHIKHGEYFTISDIRDCWADYATTADDGILT

SEQ ID NO: 211736 - protein, 80 aa, Glycine max
  Clone ID: PAT_MRT3847_33224C.1.pep
SISMGNAIRFLKSRIAKLPLTLSESESKTSLQSDIERFIYEKIILANKVIVKHAVTKLRDGDVLLTYGSSSAVEMILLHA

SEQ ID NO: 211737 - protein, 346 aa, Glycine max
  Clone ID: PAT_MRT3847_33225C.1.pep
MESGSSEGEEVQQRVPLRERVEWSDVTPVPQNDGPNPVVPIQYTEEFSEVMDYFRAVYLTDERSPRALALTAEAVQFNSGNYTVWHFRRLLLESLKVDLNDELEFVERMAAGNSKNYQMWHHRRWVAEKLGPEARNNELEFTKKILSVDAKHYHAWSHRQWALQTLGGWEDELNYCTELLKEDIFNNSAWNQRYFVITRSPFLGGLKAMRESEVLYTIEAIIAYPENESSWRYLRGLYKGETTSWVNDPQVSSVCLKILRTKSNYVFALSTILDLICFGYQPNEDIRDAIDALKTADMDKQDLDDDEKGEQQNLNIARNICSILKQVDPIRTNYWIWRKSRLPLSA

SEQ ID NO: 211738 - protein, 46 aa, Glycine max
  Clone ID: PAT_MRT3847_33226C.1.pep
LKIYLKYLFINSTIQIDLSYNLISFIIHFPYILIKIFLNIHFILFI

SEQ ID NO: 211739 - protein, 208 aa, Glycine max
  Clone ID: PAT_MRT3847_33227C.1.pep
MKEGEQQRVPLRERAEWSDVTPLAQNDGPNPVVPIQYTEDFSQVMDYFRAVYLASRCSPSALALTAEAVQFNSGNYTVCQVRIKCFRLHLFLFISSLLQVWHFRRLLLESLKVDLNAELDFVERMAAGNSKNYQMWHHRRWVAEKLGPEARKNELEFTKKILSVDAKHYHAWSHRQWVLQALGGWEDELNYCTELLKEDIFNNSAWNQ

SEQ ID NO: 211740 - protein, 53 aa, Glycine max
  Clone ID: PAT_MRT3847_33228C.1.pep
VLLLQNHTLVPSLQDDTSVLSATTPHYGTAAIQSQKGMRVMCRMLMKRFIPLH

SEQ ID NO: 211741 - protein, 60 aa, Glycine max
  Clone ID: PAT_MRT3847_33229C.1.pep
LCFSKAGRAMAGINKRGNLVKTSAAMHMNQKLSALTPITFASNKNHVICKAIPPMYFLPH

SEQ ID NO: 211742 - protein, 96 aa, Glycine max
  Clone ID: PAT_MRT3847_3322C.1.pep
KKALYWAHLRPFCRKGGVLEKLRGIFPGVGGLGIFFGGGFNPEKFGAPIIPIIFPRNLGGFLKINFFLGGGAPQMLPPPGVPKVFLKLGPPQFVSP

SEQ ID NO: 211743 - protein, 150 aa, Glycine max
  Clone ID: PAT_MRT3847_33230C.1.pep
LYSTKVNKLAKMMNLIQSVVGDLKLVTDGKTDEGKHIAVPNISAGENHVVQIPLMAQEETLASSASDFTTAMVSEKSRPKATAMHAGALESIIDSFASPDCSIDCAMLLAETYDTNPENAARSTFGAPFRGGRPIRMATLANTIAHTEPD

SEQ ID NO: 211744 - protein, 57 aa, Glycine max
  Clone ID: PAT_MRT3847_33231C.1.pep
SETNNVKCEEPSFYTITIKMYYPKIFYRIFEYIETIMKKEERTYLVLDFDCEISLLC

SEQ ID NO: 211745 - protein, 91 aa, Glycine max
  Clone ID: PAT_MRT3847_33232C.1.pep
RIKCYVPIGSVFVLNGNGADIAKHCIPSVSSKRISITFRKMDESKLPYKFSPDPDLVGIKPLIISPLNKGQDEVGNLDNKADSVESESDTG

SEQ ID NO: 211746 - protein, 97 aa, Glycine max
  Clone ID: PAT_MRT3847_33233C.1.pep
AQFLEKSLLPRVPNFNVLGWWKLNKLKAPSLSKMAGKKLSVPVSSFPPESVFETKVKKMVQYKSSLRPKTVGALVCAKNWIQYGAPKASNGLGKREF

SEQ ID NO: 211747 - protein, 60 aa, Glycine max
  Clone ID: PAT_MRT3847_33234C.1.pep
PFERSSCGLQRDHSGDVLFCFAAKVDYCFVLHAESWTIYIGLIIAWEEGFKNLIIESDSN

SEQ ID NO: 211748 - protein, 75 aa, Glycine max
  Clone ID: PAT_MRT3847_33235C.1.pep
IHQYSLCNFTLYRVGHACSMEAETNSPEDASAMVCLSTKVFNDWIHADFACYYMYLAEVNTLISYLCPKSYVCFC

SEQ ID NO: 211749 - protein, 87 aa, Glycine max
  unsure (1)..(87): unsure at all Xaa locations
  Clone ID: PAT_MRT3847_33236C.1.pep
SKSYSLTSKTFPQQTLTIRKNFYILINNKPFNIFXFSTYKTIKHXHPKSHLFIIDIFTLKNLQYIIPSYHNYHPSHFNLIYYQLINI

SEQ ID NO: 211750 - protein, 40 aa, Glycine max
  Clone ID: PAT_MRT3847_33237C.1.pep
FIQQSLNNPYYTLTLPIPLSSPIPQGPKNAYMLVTCPRIS

SEQ ID NO: 211751 - protein, 66 aa, Glycine max
  Clone ID: PAT_MRT3847_33238C.1.pep
SACYFSRLHLHLENILKPFQYLKNVYIEHRKVLRTCCDRLLISSRTRICCIDCITTKAKKNSLQAP

SEQ ID NO: 211752 - protein, 35 aa, Glycine max
  Clone ID: PAT_MRT3847_33239C.1.pep
KMSTQVIREYLQTEPVFGEKPHSLYGDARAEFRVN

SEQ ID NO: 211753 - protein, 54 aa, Glycine max
  Clone ID: PAT_MRT3847_3323C.1.pep
YHCPFSFSFYHKHNRIQGNHWITISESITEPINFKPRLTKPSSFSYPNNRPIIN

SEQ ID NO: 211754 - protein, 64 aa, Glycine max
  unsure (1)..(64): unsure at all Xaa locations
  Clone ID: PAT_MRT3847_33240C.1.pep
RYCRVMKPFLRGFPREPPATTAPPAIVTGLGRSVRGXRREDWSXIXTRXXXVALGEXXXXGXSV

SEQ ID NO: 211755 - protein, 36 aa, Glycine max
  unsure (1)..(36): unsure at all Xaa locations
  Clone ID: PAT_MRT3847_33241C.1.pep
PQKGRYLIRIPKTRWTIVYHLNEVXCIFSFPSTIKP

SEQ ID NO: 211756 - protein, 214 aa, Glycine max
  Clone ID: PAT_MRT3847_33242C.1.pep
MASVLPIYHNYVNLPCPLPLSKPSTTFNTPIILFFPKTKPSLTLKCSSSASSLTPELDQEEETFGNFDEPPLSESWKEIQGLNNWDGLIDPTMNPHLRREIIRYGELAQACYDSFDFDPHSKYCGTCKYHPSQLFEKLNMSQTGYMISRYLYATSNVNLPNFFQKSRLSTSVWSPHANLMGYVAVSTDRDQIKRLGRRDIVIAWRGTVTYVRWI

SEQ ID NO: 211757 - protein, 106 aa, Glycine max
  unsure (1)..(106): unsure at all Xaa locations
  Clone ID: PAT_MRT3847_33243C.1.pep
CPGVAVSKFLGWSGFFLFLDDDGRHLFFLFNFSPFFQPQCCFSPFFGLFFXXXXHPSMHKIVFCLANEGVSVIVSLLQQLLKDVRFLPLGYKDTMLFFSFSXYIMA

SEQ ID NO: 211758 - protein, 148 aa, Glycine max
  unsure (1)..(148): unsure at all Xaa locations
  Clone ID: PAT_MRT3847_33244C.1.pep
IQLQQQSHQLQHQDHQKHQDHQRHDQHGDPQQMRAHQWQQQQEDHQKQHNQKHQLQLQNQSHQLHXRTTKGRAAKGTDYNLRAHQRQGHQGHQLQLQNQSHQLHLQDHQRQGHQGHRLQLRGHQRQGRQEHRLQLRGHQRQDHQEHQL

SEQ ID NO: 211759 - protein, 96 aa, Glycine max
  Clone ID: PAT_MRT3847_33245C.1.pep
PYVPPRLGAFPLCSFRFAVCMVPLFYFLVPSLGPSPSVPSVSWAVFSLSSTVMEILLSVVEKTKVVSARTLTNKSGFSPPRLQWCGSGPLPSFRAR

SEQ ID NO: 211760 - protein, 61 aa, Glycine max
  Clone ID: PAT_MRT3847_33246C.1.pep
DPLIHPRVQNKHYFIIITSQKINKPDFYIKKRRTPIHVFLPCLHQLLKHQLFFHSPARQLL

SEQ ID NO: 211761 - protein, 61 aa, Glycine max
  Clone ID: PAT_MRT3847_33247C.1.pep
KRKFIIPFHCVERSNSIENSYRQVIVTWFFEPDLPGCDLLSALNRFAFWRVEIINGTEGLS

SEQ ID NO: 211762 - protein, 202 aa, Glycine max
  unsure (1)..(202): unsure at all Xaa locations
  Clone ID: PAT_MRT3847_33248C.1.pep
MAAKPLTTEAIALTEKKMDMTLDDIIKMSKNTKNKKQRRVPNKSQKFSNNFTQDKSAKVQRYXESRSSLRQGALAKRRSNFQGNQFPAAVEVARKAVTAPLHNRVPNRNRVANWNKTRFQVPVGQRRAANGGFAAKQQPLPSPQKQQENVDIMPKQKPQTLDSLFANMKEQRMRVLSMQNNAVQRNGGGNRRLPWGRGRFGN

SEQ ID NO: 211763 - protein, 68 aa, Glycine max
  unsure (1)..(68): unsure at all Xaa locations
  Clone ID: PAT_MRT3847_33249C.1.pep
IKTTEGHLTVNHVGPDTGSIHAALDSNAAGWCVMVSNWMGETEDNXFIADLSDGXASGQIKTVAPCTR

SEQ ID NO: 211764 - protein, 111 aa, Glycine max
  Clone ID: PAT_MRT3847_3324C.1.pep
MTTPFPRSLSCVANTALHRTKSEQLTHFVSNTVTRLLCSSTQPQHENPLREQAQTPPQESLHDENKQSHEPEEDHEDGDSINKETGEIGGPKGPEPTRYGDWERNGRCSDF

SEQ ID NO: 211765 - protein, 128 aa, Glycine max
  unsure (1)..(128): unsure at all Xaa locations
  Clone ID: PAT_MRT3847_33250C.1.pep
ANSNLPRRIIKETQRLLSEPARGISASPSEEKMFFFXEXRXGXTQXXKEGGARQREREKAEEKKKAAPKGREGRKTEQPNREKRGRKRQEKQKEKRRPAQQRRTGARRRRGTRRGEKPEERRXENTAR

SEQ ID NO: 211766 - protein, 53 aa, Glycine max
  Clone ID: PAT_MRT3847_33251C.1.pep
LPSELLSLYYKSSRMKLKHADHGIGGPIGCSLQLHLSCSGMNQQNCPTSTPGE

SEQ ID NO: 211767 - protein, 44 aa, Glycine max
  Clone ID: PAT_MRT3847_33252C.1.pep
KDAIYLLGRVANGKNNLRFQREKSYITTYKHHFGTLLLINGVLA

SEQ ID NO: 211768 - protein, 43 aa, Glycine max
  unsure (1)..(43): unsure at all Xaa locations
  Clone ID: PAT_MRT3847_33253C.1.pep
VSWVPNPVVGFYTPENIXGIDVAEIKATALGKKFIPIGCTKFQ

SEQ ID NO: 211769 - protein, 43 aa, Glycine max
  Clone ID: PAT_MRT3847_33254C.1.pep
RYILLAKAMRFCVYVCSVIKGGCFWGSLTNTVPTSSEQRSLNN

SEQ ID NO: 211770 - protein, 53 aa, Glycine max
  Clone ID: PAT_MRT3847_33255C.1.pep
KKGPCKGHFILRVIFFLGPFKGLSFWGFGNHGPKFFNFFGAIYSGVPVPLKGP

SEQ ID NO: 211771 - protein, 74 aa, Glycine max
  Clone ID: PAT_MRT3847_33256C.1.pep
RKLGSSRAAAFLFFFFHFTLPRSLKSLLPGRRRRTLLWSFLTLSMLSSSRNQRTRVSSWYFQTSALRQTIIIDS

SEQ ID NO: 211772 - protein, 83 aa, Glycine max
  Clone ID: PAT_MRT3847_33257C.1.pep
PPPIRLRTNTITTTPTIPFSLTSTVALFFCWGHLLSSIERAVMSTSTRATSNILLSLPLPSPKAAPPSCPDLYGKRREMAKIQ

SEQ ID NO: 211773 - protein, 63 aa, Glycine max
  Clone ID: PAT_MRT3847_33258C.1.pep
KLCSCCCLFVGSGEHTRGLGLTLCTWEGQGLLWWWVSPTTPSLRRLELAMTGRGMHTRTSSRK

SEQ ID NO: 211774 - protein, 51 aa, Glycine max
  Clone ID: PAT_MRT3847_33259C.1.pep
KGGIETSPPFNAFKTIFFFSTPANPLSGLRKPHPNLVLQMLVKICEGPPLN

SEQ ID NO: 211775 - protein, 90 aa, Glycine max
  unsure (1)..(90): unsure at all Xaa locations
  Clone ID: PAT_MRT3847_3325C.1.pep
VGPVQRLKPXTDEGFEELQQKSVKRLIAVTERGVSEHITTLEEIDMNYKELTLESAIYNRSRVPALGDTTCLITPLADEVIKALQSVTAI

SEQ ID NO: 211776 - protein, 70 aa, Glycine max
  Clone ID: PAT_MRT3847_33260C.1.pep
LCRSNCPRSCHTQSSERAGVSLLNIDSQDTLSVAIVASNSLVMKIRQDRLSINRKHQNPLRKPARIAANP

SEQ ID NO: 211777 - protein, 178 aa, Glycine max
  Clone ID: PAT_MRT3847_33261C.1.pep
MSAYVKSSLLPHSPSPSLKWKLRSDTILAVLKNLGADFFCLQEVDEFDSFYKGNMQDLEYSSIYMKRSGQKRDGCGLFYKHNRAELVLEEKIEYNDLVKSVPDGNSSNNDEHTNIQTVQPDKQKDVPPKNGSKSNSKDRGDPNDPCVRLKRDCVGIMAAFKLKDRSHHIVIVANTHFY

SEQ ID NO: 211778 - protein, 50 aa, Glycine max
  Clone ID: PAT_MRT3847_33262C.1.pep
THYTTGLGVAAIDRKPDTWKVSESAYDDHPRTAKKCRALCTGENGISPSY

SEQ ID NO: 211779 - protein, 190 aa, Glycine max
  unsure (1)..(190): unsure at all Xaa locations
  Clone ID: PAT_MRT3847_33263C.1.pep
MSSFSPAFPKFISVEGADIHSRTKPDGFRFSLVSYNILAQAYVKSSLFPHSPSPSLKWKLRSDTILAVLKNLGADFFCLQEVDEFDSFYKGNMQDLGYSSIYMKRSGQKRDGCGLFYKHNRAEXTELVLEEKIEYNDLVKSVPDGNSSNDDEHANIQTVQSDKQKDVAPKNGILIGLMSSLHKLNIFYSG

SEQ ID NO: 211780 - protein, 71 aa, Glycine max
  Clone ID: PAT_MRT3847_33264C.1.pep
AHVVIEVASLFMSSHYLCFKYAYVKECQDHSSEELSHCCVSRSMFLKPILIRHPFNLKPNSNYKSRGMQCL

SEQ ID NO: 211781 - protein, 190 aa, Glycine max
  unsure (1)..(190): unsure at all Xaa locations
  Clone ID: PAT_MRT3847_33265C.1.pep
MEPLLDPLKDRAIKSVKAPPHRPLSRQLMFPDRLKNKPDWKVIRDHLQKEGRIDKEDLIKLINDANKLFKSEGNLIYVEDPLTVVGDIHGQFYDAIKIVEIGGDPANSKYLFLGDXVDRGSFSIEVLVLLYSLKINFPKTINMLRGNHECXQMTTFFNFRNXCLYXYDQEIYXLFMDSXDLMPLACIING

SEQ ID NO: 211782 - protein, 87 aa, Glycine max
  Clone ID: PAT_MRT3847_33266C.1.pep
AGPPLFHPFYAFVLFCQLPPLQRPRHLFGLPHVYHCSCRRHLPCSVISLFLVNFRRYVSIYVCFCLCITSFAIPLPLIRTSTSSHSS

SEQ ID NO: 211783 - protein, 38 aa, Glycine max
  Clone ID: PAT_MRT3847_33267C.1.pep
EERRASAEAKRGTKVARVLEIASLMRAVGRPPAKKSFF

SEQ ID NO: 211784 - protein, 145 aa, Glycine max
  Clone ID: PAT_MRT3847_33268C.1.pep
AGNSALAIIFSQFDVSEAFIVCWGQFDSISQSRMFGTAIRCLAKKPKPKMGPVILKTPPEQRQTITRTLFDIIKEHGPITVANTWERVQEVGLKDLTSKNHMKIVLKWMRERQKIRLLCNHVGAHKQFLYTTWFTKPVTPPKNSS

SEQ ID NO: 211785 - protein, 63 aa, Glycine max
  Clone ID: PAT_MRT3847_33269C.1.pep
MCCGGRICMLCTCLVLVVIAIGLVFGFGVFKHGFHKIKDTVSFCDSCGGGGRPFIGYAPPPLF

SEQ ID NO: 211786 - protein, 185 aa, Glycine max
  Clone ID: PAT_MRT3847_3326C.1.pep
FMVLIIAILNDGTIMTISKDRVKPSPLPDSWKLKEIFAPGIVLGAYMAIITAVFFYVVHDTSFFSNIFGVSPIAESEEQLNSALYLQVSIISQALIFVTRSRSWSYFERPGIMLCVAFICAQLVATVIAVYAHWDFARINGVGWRWAGVIWIYSIITYIPLDILKFLIRMGLTGSAWDNMHQNKV

SEQ ID NO: 211787 - protein, 62 aa, Glycine max
  unsure (1)..(62): unsure at all Xaa locations
  Clone ID: PAT_MRT3847_33270C.1.pep
LSLLLFGNVRSYKGEVXFLIXXICPCCFVKNVNXLCSELKMRTFQNLALIFVAFAFFLLPLY

SEQ ID NO: 211788 - protein, 66 aa, Glycine max
  Clone ID: PAT_MRT3847_33271C.1.pep
SQAGSPQLISTTSNLHPQINSLVGVMEMPKAKASEGYSNCIYNYDYSAYKVPSICPPLIKKCKRSR

SEQ ID NO: 211789 - protein, 47 aa, Glycine max
  Clone ID: PAT_MRT3847_33272C.1.pep
THTHTLLISLSTGLCLYLGRCVLLNLHRENVANHVPDQNGLTHLEAG

SEQ ID NO: 211790 - protein, 101 aa, Glycine max
  Clone ID: PAT_MRT3847_33273C.1.pep
APQVLLSGSLDHTVDLRDGTMPSHSRYKWSDTADVKSLAWDPHTEHSVAESLEDRIVKGYDIRTDKSHYSSDTTSTFTLHAQYKAVTLKSYNPLALNLLVT

SEQ ID NO: 211791 - protein, 155 aa, Glycine max
  Clone ID: PAT_MRT3847_33274C.1.pep
MHICGCVPPWLCQILACMGGCLGCFPNPKGQSTNKDNRSEDFWSSSAFEIDQGALQSQKSISSIGIPSDPQSSADIQIDSPEYVNHGLLLWNQMRRQWVGNRRRENKKQVGEPIISWNATYESLMGTNKPFHRPIPLGEMVDFLVDIWEMEGLYD

SEQ ID NO: 211792 - protein, 81 aa, Glycine max
  unsure (1)..(81): unsure at all Xaa locations
  Clone ID: PAT_MRT3847_33275C.1.pep
PTRTTRPSTRPTTRSYGCEKTTEGLLMDLTALHEVMDKTGYQHDHCAATXELSFPMWTNHMLETLNFRKKGDASFLHRDFK

SEQ ID NO: 211793 - protein, 232 aa, Glycine max
  unsure (1)..(232): unsure at all Xaa locations
  Clone ID: PAT_MRT3847_33276C.1.pep
MSPKITPIDTEQDLMNLMGAIFAAVFFLGGSNTSTVQPIVAIERTVFYRERAAGMYSALPYAIAQVAIECIYVAIQTFTFSLILFSMMGFLWRVDKFLWFYFFMFISFVYFTLYGMMTAALTPNPQIAAIIMAFFIVIIALSFSILSGNFHLWVGFGHCSSPEVWHLHILPKCTNDKDCFCRIXLTLKVCLEEESCYEYGFLGVVAVAHIAFVAFFIFVFAYSIKVFNFQKR

SEQ ID NO: 211794 - protein, 77 aa, Glycine max
  Clone ID: PAT_MRT3847_33277C.1.pep
QMKSIICWVRCAKAKECSISWSKIVLLSWPFSYTDTAVLTRETPRPKSACVPSEKYSETSERSTQVTQPSWYASQLQ

SEQ ID NO: 211795 - protein, 52 aa, Glycine max
  Clone ID: PAT_MRT3847_33278C.1.pep
VSYKNVWYCDTFVRELCFTSEGLEALSAVEWSVAQLPISSQDSMTAFASRKR

SEQ ID NO: 211796 - protein, 61 aa, Glycine max
  Clone ID: PAT_MRT3847_33279C.1.pep
STMYFSNRCSVSPDSDSICVYSSISHCAVSGSVYDMAVAHAMRMSRRCLLVTATIVGLLLS

SEQ ID NO: 211797 - protein, 65 aa, Glycine max
  Clone ID: PAT_MRT3847_3327C.1.pep
KPCQGTNTDTTSESLHDENKQRYEPKEDDGDGDSINKETGEIGGPKGPEPTRYGDWERNGRCSDF

SEQ ID NO: 211798 - protein, 62 aa, Glycine max
  Clone ID: PAT_MRT3847_33280C.1.pep
DHRPHACVPKDHFFLIFFFFTNLWRKLGYISKLNVTLAFMFEENLVICHYHDHARKKKTIIK

SEQ ID NO: 211799 - protein, 103 aa, Glycine max
  Clone ID: PAT_MRT3847_33281C.1.pep
PPWRPPGFLPLGSGPYSGRHCPPNPFPPGFPPWPRIPPRFKPPPFGKSGAPPGPRPEFPGGPPGPGVFLKKKIFFTPRCFPPPRVLNWAKGKPPLTGFPGAFF

SEQ ID NO: 211800 - protein, 68 aa, Glycine max
  unsure (1)..(68): unsure at all Xaa locations
  Clone ID: PAT_MRT3847_33282C.1.pep
LSTLEDIHLSFTFVNHNGLNSPCXHSTHKSLNFDARHITVTGLASLTNLTGLTXLELYGARRTDFGTN

SEQ ID NO: 211801 - protein, 53 aa, Glycine max
  Clone ID: PAT_MRT3847_33283C.1.pep
LREETEGHVTCMTDKYPKVSGVIFFPGKHCDYKVVHPSQIVIIGLASLEGSAK

SEQ ID NO: 211802 - protein, 310 aa, Glycine max
  unsure (1)..(310): unsure at all Xaa locations
  Clone ID: PAT_MRT3847_33284C.1.pep
NGDRFITLKNGVGCVNKLVFTDNSRWIRSRKFRLGAKVVPPISIEANIKEGRSEPFVVKDYRGEAFXKHHPPSLNDDVWRLEQIAKDGKIHDRLSLHGIHTVQDLLRLYTTNPSSLLEKVGNITKRSWITIIEHAKTCAIDDDETFVYHTAEQSIGLLFNSIYILVGVTFDGQNYLSPDILNPNEKHLVETLKQHAYKNTDNFKSIHETSLSCSKPLTFLGVGQSDATEQSLQRFNISTEQEGHQGTWVGNGQPYASTSYTDESVHSYQIYADPVPDITDMPLNNPYGSNSMKDFFSGLCIEGDSWVPYG

SEQ ID NO: 211803 - protein, 64 aa, Glycine max
  unsure (1)..(64): unsure at all Xaa locations
  Clone ID: PAT_MRT3847_33285C.1.pep
MTTDGEPITHLKIASSTREREEHQATSLIXSETLLSTFLYTPRDYECLTTHSVNIVPDIVNNRD

SEQ ID NO: 211804 - protein, 51 aa, Glycine max
  Clone ID: PAT_MRT3847_33286C.1.pep
RKNSPFSVPLISLIRIQISLLMGRVYYLVSETPLLFSFPIPLNPISSYIDC

SEQ ID NO: 211805 - protein, 159 aa, Glycine max
  unsure (1)..(159): unsure at all Xaa locations
  Clone ID: PAT_MRT3847_33287C.1.pep
MNASAGAAAGFATVAVMHPLDVVRTRFQVNDGRVSNFPIYKNTAHAVFSIARSEGLRGLYAGFLPGVLGSTISWSLYFFFYDRAKQRYARNREGKLSPGLHLASAAEAGAIVSFFTNPVWMVXKTRLQLQTPLHQTRPYSGVYDAFRMLLLIKPARRND

SEQ ID NO: 211806 - protein, 67 aa, Glycine max
  Clone ID: PAT_MRT3847_33288C.1.pep
KQPILIVMCHITAKKGALSLPRTALERKGKVYDGEGAMKKDNIVVMLVSWIGLTQMGGGTTHMHCNI

SEQ ID NO: 211807 - protein, 98 aa, Glycine max
  Clone ID: PAT_MRT3847_33289C.1.pep
RSWESPIHFVSIFRLLLKSTKSETASEIARRYEAGTKEPPTTATKRSTDTTDTVPAAKTAPMLTTLLFRNLRYACETCLPPTLSSITGRVSYITLRSF

SEQ ID NO: 211808 - protein, 81 aa, Glycine max
  Clone ID: PAT_MRT3847_3328C.1.pep
IRVFLWLLSTDKPFPVDAFHVKGIILENLCYFPLPRHVIKIEFLHCPFSSHQKNACACSLCQRRTALSFLNSTSFTLVPNS

SEQ ID NO: 211809 - protein, 136 aa, Glycine max
  Clone ID: PAT_MRT3847_33290C.1.pep
RISITSFVLDKNSMLIHPLPFEFMTDHVFVWYDGRICKQIMELVKERRAISSGDPKLRFKFFIQTRHNQEAVNIKECGFRWICSFEEGGCKPERSREIHEVEANVVTNKVEGSESNEQKETSHLKAEETKKLELSS

SEQ ID NO: 211810 - protein, 78 aa, Glycine max
  Clone ID: PAT_MRT3847_33291C.1.pep
KPNFPSIHNQPRNPFRSQKLSFPSITPILLLHLQWQTPPRQNPSIPIPTSIHPLSPLSSTWRLRRRRRHRSRVSRLLP

SEQ ID NO: 211811 - protein, 469 aa, Glycine max
  Clone ID: PAT_MRT3847_33292C.1.pep
MGGAKSYSCFAVIAVALVLLLLNVAVVCNGGKTSTFIRKVEKTEDMPLHSDVFVAPSGYNAPQQVHITQGDQVGRAMIVSWVTVDEPGKSLVHYWSDASQHKRVAKGNHVTYRYFNYSSGFIHHCTLRDLEFNTKYYYEVGIGHTTRQFWFVTPPEVHPDAPYTFGLIGDLGQTFDSNKTLVHYESNPHKGQAVLYVGDLSYADNHPNHDNVRWDTWGRFVERSTAYQPWIWTTGNHELDYAPEIDETEPFKPFRHRYYVPYKASGSTEPFWYSVKIASAHIIVLASYSAYGKYTPQYEWLEAELPKVDRTKTPWLIVLVHSPWYNSYNYHYMEGETMRVMFEPWFVKYKVDVVFAGHVHAYERSERISNTGYNITNGRCRPLKDQSAPVYINIGDGGNIEGLASNMTNPQPEYSAYREASFGHAILEIKNRTHAHYSWHRNEDEYAVTADSMWFFNRYWHPVDDSTTK

SEQ ID NO: 211812 - protein, 56 aa, Glycine max
  Clone ID: PAT_MRT3847_33293C.1.pep
GRIFGSDLKAKEPVIQLINHPNAGVTSNALLCIQRLLLGAKYASFLQVQFCLCGAA

SEQ ID NO: 211813 - protein, 38 aa, Glycine max
  Clone ID: PAT_MRT3847_33294C.1.pep
IELGPFTRGILVWVISHHKNTKTTLNREKYLATSKQVQ

SEQ ID NO: 211814 - protein, 286 aa, Glycine max
  unsure (1)..(286): unsure at all Xaa locations
  Clone ID: PAT_MRT3847_33295C.1.pep
TRPHNSIYYYLLICEYIITDEQKTIVDTIMSVVNTQSAAVYFLYGYGGTGKTFVWTTLSSGIRSNGGIVCTVASSGIASLLLPGGRTAHSKFAILVPATENSTCNIHQGSXELAELLKVTKLIVWDEAPMCHKFAFEALDKSLKDIMQNNLPFGGKIMVFGVDFRQILPIVPRGNRSDIVHATINASYIWDHCQILKLTKNMRLLSNAPQQPNNEELKQFSHWLLDIGDGKIGQYNDGFSEITIPDEFLIKNYDDPIHAIVEATYPSLIDNYSDTDYLQKRAVLAS

SEQ ID NO: 211815 - protein, 108 aa, Glycine max
  Clone ID: PAT_MRT3847_33296C.1.pep
MGAGHHLFSLLILFLAAIVAAHIYSSEAAGSKGSFEDNLSILWSEDHSTTSKDGQKRHLSLDTYPGFGFQTKQRFRFRWIHIKLNFVTGDSSCVATTYYICSKNCSGP

SEQ ID NO: 211816 - protein, 88 aa, Glycine max
  unsure (1)..(88): unsure at all Xaa locations
  Clone ID: PAT_MRT3847_33297C.1.pep
MASNRGQGGIQQLLAAEQEAQRIVNAAXNEKLARLKQAKEEAEKEIAEYRAKLEYEFQKKVSQSSGDSGANVKRLEQETEEKIHHLKT

SEQ ID NO: 211817 - protein, 197 aa, Glycine max
  Clone ID: PAT_MRT3847_33298C.1.pep
AMYQVPCTNRDNSQFVSKSSNISSSSPSSSGAVVQNVVIRIVFTDWFISSVPSTTVIRVLVSGFITLHVVIIRVILFVSASVTYSSPGSNTTHTKGLQADMRTTASATSLSISSKITPGSALSAGTAAVVTTGTDHILVFQSAASSNYFSTCAPTSSSANPNSNLLHHNQDRTWTLSLPMQSYRLSLSQPQVALLWP

SEQ ID NO: 211818 - protein, 78 aa, Glycine max
  unsure (1)..(78): unsure at all Xaa locations
  Clone ID: PAT_MRT3847_33299C.1.pep
RCSGRAPQTIDLTRCYEILGVWNNASHDDLKKAYTDSRHXNHAEQGGDPEKLKELAQAYEVLSDLEKRESLISIAIMR

SEQ ID NO: 211819 - protein, 251 aa, Glycine max
  Clone ID: PAT_MRT3847_3329C.1.pep
SHFIMVLRHAVRSIRNFVRLVVDEMRSAGWDIDAAVDAIEQNVVYMAEDHKCFAMEAFVCREMFDAFHIPNFSLSSESPLEKNRRQQWFFGKFNEMKSMKAKYYLAEKPRSSFAKFCRVKYSRLVHPKMESSFFGNQSHRNLVNAGGFPDTEFFASFAEMAKRVWLLHCLAFSYEPQASIFQVGKGCRFSDVYMESVNDEVFLYSEVESDPQVAFTVVPGFRIGKTVLQCQVYLSQHQTKVKKKITSTKQR

SEQ ID NO: 211820 - protein, 64 aa, Glycine max
  Clone ID: PAT_MRT3847_332C.1.pep
SNRDHYIHALCSHLPLMEQVEWTSENFGLREPVRLPDSEHLTGPLNLIDQRTGWTLGIYVDHAS

SEQ ID NO: 211821 - protein, 88 aa, Glycine max
  unsure (1)..(88): unsure at all Xaa locations
  Clone ID: PAT_MRT3847_33300C.1.pep
VTFPNTIVQIXXDMXSRFQLXSTXXXGDXXQGXXLXXVKXNXSXXCCWXAIXXTXPPPLLESGLQKXRGXXAEXFGRMXXXAHNVNQP

SEQ ID NO: 211822 - protein, 64 aa, Glycine max
  unsure (1)..(64): unsure at all Xaa locations
  Clone ID: PAT_MRT3847_33301C.1.pep
PPEEXAAAGSRTPTPKTTAGKXPNRXRENKETAATQQXGEHEQRANTHHNEPPGHPRTPXAKDE

SEQ ID NO: 211823 - protein, 53 aa, Glycine max
  Clone ID: PAT_MRT3847_33302C.1.pep
MQNLADHFDNRLFFFPQNYNPKISDFGLAKLGPSEGQSHVSTKVMDTYGYAAP

SEQ ID NO: 211824 - protein, 374 aa, Glycine max
  Clone ID: PAT_MRT3847_33303C.1.pep
MQRLKLQLVLFLSISTCHTVFSFTDGLLPNGNFEQGPKPSQLKGSVVTGHDAIPNWTISGFVEYIKSGQKQGDMLLVVPEGDYAVRLGNEASIKQKLKLIKGSFYSITFSAARTCAQEEKLNVSVVPTTEKRDWGIIPIQTMYGSNGWESFTCGFRADFPEAEIVIHNPGKKEDPACGPLIDSVALKVLYPPKRTRANLLKNGNLEEGPYIFPNSSWGALIPPHIEDSHGPLPGWIVESLKAVKYIDSDHFAVPEGKRAIELVAGKESALAQVVITTVGKTYDLTFAVGDANNACESSMMVEAFAGTNTVQVPYQSKGKGGFVRGKLRFKAVSTRTRLRFLSTFYTMKSDNSGSLCGPVIDDVKLLGVRYPTLA

SEQ ID NO: 211825 - protein, 197 aa, Glycine max
  Clone ID: PAT_MRT3847_33304C.1.pep
KSEQCLVKGCHKRIRIVHTIEFINGGSDIQILRVALYEEEWVSPASIDDQSDTEFDAKPFSQRKRTKPSELTGSWKVFEVSATPVYDEESTEEGNAAPYVYLCMENLKKRSLPENTNYFGEEERLDMQDVTMLWLPGGVTCYVDINKDGILCIGVGWYSDEGINLVMERDYGLDGKLKEVRWKSEVKRRWSNPPPIE

SEQ ID NO: 211826 - protein, 374 aa, Glycine max
  Clone ID: PAT_MRT3847_33305C.1.pep
MQRLKLQLVLFLSISTCHTVFSFTDGLLPNGNFEQGPKPSQLKGSVVTGHDAIPNWTISGFVEYIKSGQKQGDMLLVVPEGDYAVRLGNEASIKQKLKLIKGSFYSITFSAARTCAQEEKLNVSVKRDTEKRDWGIIPIQTMYGSNGWESFTCGFRADFPEAQIVRRGSSLWSPHACGPLIDSVALKVLYPPKRTRANLLKNGNLEEGPYIFPNSSWGALIPPHIEDSHGPLPGWIVESLKAVKYIDSDHFAVPEGKRAIELVAGKESALAQVVITTIGKTYDLTFAVGDANNECEASMMVEAFAGANTVQVPYQSKGKGGFVRGKLRFKAVSTRTRLRFLSTFYTMKSDNSGSLCGPVIDDVKLLGVRYPTHA

SEQ ID NO: 211827 - protein, 64 aa, Glycine max
  Clone ID: PAT_MRT3847_33306C.1.pep
RHMQCEEDFQRVRIQCQMVSDLRLRLCWRYAQSSQTSLQICFRKSQGNFRMYKVQWSVSTFSIL

SEQ ID NO: 211828 - protein, 29 aa, Glycine max
  Clone ID: PAT_MRT3847_33307C.1.pep
ICQSRRAARIRKVKVSYLSLVIIKYNSSR

SEQ ID NO: 211829 - protein, 71 aa, Glycine max
  Clone ID: PAT_MRT3847_33308C.1.pep
HSSNSFTLISKLNLEQLFYKNYTSTPILHLSFQITIPLPHSQIFFFKHIPTFTTTKTLTHHPLISFPNHPL

SEQ ID NO: 211830 - protein, 96 aa, Glycine max
  unsure (1)..(96): unsure at all Xaa locations
  Clone ID: PAT_MRT3847_33309C.1.pep
XXXXXXNLXIXLXXKHHXTXLXXXXNXXXPXXQTXXLXXNXXXHTTXXNXXXXXXXXXXXYXXXTXXSXXHXXXXXXXTXXPNXXXXXXXPXXXTX

SEQ ID NO: 211831 - protein, 227 aa, Glycine max
  unsure (1)..(227): unsure at all Xaa locations
  Clone ID: PAT_MRT3847_3330C.1.pep
MSLRPNARTEVRRNRYKVAVDADEGRRRREDNMVEIRKSKREESLQKKRREGLQAQQQFPTPLQAASIVEKKLESLPAMVAGVWSDDNSQQLEATTQFRKLLSIERSPPIEEVIQAGVVPRFVEFLVREDFPQLQFEAAWALTNIASGTSEHTXVVIDHGAVPIFVKLLSSPSDDVREQAVWALGKXAGDSXKCSXDFVLSHXAPDPTXPQLNEHAKTFMLRNATWT

SEQ ID NO: 211832 - protein, 54 aa, Glycine max
  Clone ID: PAT_MRT3847_33310C.1.pep
LFILIIYVNNIVECYSMIPKIIKCWSLRILWLNFMNMCMLYLMNIIENVIRWLM

SEQ ID NO: 211833 - protein, 156 aa, Glycine max
  Clone ID: PAT_MRT3847_33311C.1.pep
MTSVCEFLYQLYAKTIVLLTYMLIELILIIQYLKSDTRPISTAQYLNFIEEKNPTIQFTRRLKAENIDCRVCLSEFQEGEKVRNLNCRHTFHKDCLDQWLQQYCATCPLCRNKVLPDDVVANHNLLQNQAEYDGNDDQLIFLLSALRGGSTLHRYL

SEQ ID NO: 211834 - protein, 59 aa, Glycine max
  Clone ID: PAT_MRT3847_33312C.1.pep
YASESRYIILYTLMLLNLISRRCEIKTGTEIIHLNVYHLIPINLFSYWLSLAFYYSRLQ

SEQ ID NO: 211835 - protein, 60 aa, Glycine max
  Clone ID: PAT_MRT3847_33313C.1.pep
RAQSDSDGCPKYNIMAPLSNTQTHALYYHWWGVIRSFELSHAQMHHQLMRLAFLRCISTS

SEQ ID NO: 211836 - protein, 72 aa, Glycine max
  unsure (1)..(72): unsure at all Xaa locations
  Clone ID: PAT_MRT3847_33314C.1.pep
SVPACILAVAPYYSLAHKGVVPIDVIMLAHNPGGIQTPYKEFKVLAEGFRFRGLQVLXCAINTNVMQFLKKA

SEQ ID NO: 211837 - protein, 54 aa, Glycine max
  Clone ID: PAT_MRT3847_33315C.1.pep
ANTFNCRLCNSFPYRQRWGNLLPRQLLQQIGFRLKPIQIWPIWRICYWRLRREL

SEQ ID NO: 211838 - protein, 158 aa, Glycine max
  Clone ID: PAT_MRT3847_33316C.1.pep
LMHGTCSNPSAQAVFMMYISFMHGPFAIIYNAYIILKKSCYYSQVVMKHAQSVVEAVVKTMASHRQNIGPLPKSKLNNLAESSLEPKNISKSLLTESVPVLNKDEPNYSSGRSGLDAIDEEEQLIDANEHITSSVVNDITEGELWYELEKELKNRTIS

SEQ ID NO: 211839 - protein, 50 aa, Glycine max
  Clone ID: PAT_MRT3847_33317C.1.pep
VLQNDKTCESILILQKYVKESKHFEYFKIIIVFMPYSFQFMDTSNTSNCI

SEQ ID NO: 211840 - protein, 297 aa, Glycine max
  Clone ID: PAT_MRT3847_33318C.1.pep
MEMFPLLPYFLLSSLVFLLTFKLLFSQRRKHKNLPPGPPPLPIIGNLNLLERPLHRFLTRTSKTYGDIFSLWFGSRLAVVVSSPSAFQECFTRNDVALANRPRSLSGKHIFYNYTTVGSCSYGEHWRNLRRITSLDVLSTQRIHSFSGIRKDETERFIRMLAKDSCIDYAHVELSSMFHDMTYNNMMRMLSGKRYYGDESQIKDVEEAKEFRETVEELLQVAGVSNKADYLPFLRWFDFHNLEKRLKSINKRFDTFLDKLIHEQRSKKERENTMIDHLLHLQESQPEYYTDQIIKGL

SEQ ID NO: 211841 - protein, 71 aa, Glycine max
  Clone ID: PAT_MRT3847_33319C.1.pep
QISHACDKKRVLPSPQSSGYCCFEKVLCINLTIEVYSNTPNVKRQRLGARLSILPIGGPRNGICYEGGRCA

SEQ ID NO: 211842 - protein, 448 aa, Glycine max
  unsure (1)..(448): unsure at all Xaa locations
  Clone ID: PAT_MRT3847_3331C.1.pep
VSSESVPGISPPCFFASPPPAISIGAAFQSXLAHPGLMSLLVSLIYPVAISPTFAAVGRSFYSSGFPLVGTRSGIRAVQILVVIVFSLYLRKISVLGHRIFLIYAVPLGLAITWAFAFLLTEAGVYNYKGCDINIPTSNMVSEHCRKHFSRMKHCRVDTSHALKSSSWFRFPYPLQWGTPVFHWKMAIVMCVVSLISSVDSVGSYHASSLLVASRPPTPGVLSRGIGLEGLSSVLAGLWGTGTGSTTLTENVHTIAVTKMGSRKAVQLGACFLIVLSLVGKVGGFIASIPKVMVAGLLCFMWAMLTALGLSNLRYSEAGSSRNIIIVGLSLFFSLSIPAYFQQYGISPNSNLSVPSYFQPYIVTSHGPFHSKYGGLNYVLNTLFSLHMVIAFLVAFILDNTVPGSKQERGVYVWSKAEVARREPAVANDYELPLKVGRIFRWVKWVGL

SEQ ID NO: 211843 - protein, 60 aa, Glycine max
  Clone ID: PAT_MRT3847_33320C.1.pep
QSLLRSVNLTMVYRHLSPNPCLQLKCCPAFVASMNHAVCFIVLVYVSISKCRWPPMCMMR

SEQ ID NO: 211844 - protein, 57 aa, Glycine max
  Clone ID: PAT_MRT3847_33321C.1.pep
LPPLTSLSFQFIDSVGSRCSEAVLNPDRCQHTHREQYDCLGGRNKGTRPLSFKTLLL

SEQ ID NO: 211845 - protein, 67 aa, Glycine max
  Clone ID: PAT_MRT3847_33322C.1.pep
VRDFRGDPRVPGLPIKSSWCYPLSLAAPCFYSPWPPQKGFMGRALKQGPGGPLFRTSHVPSRVVPPV

SEQ ID NO: 211846 - protein, 92 aa, Glycine max
  Clone ID: PAT_MRT3847_33323C.1.pep
FQKPGCKWKGPLKSLDKKKKWMEKAKNMKSSNNEICPWKYYIIWRDFWTKMLEFSFLVPRLIQLLDLGKWLQGPTAPVKILVIFAPHNLFKR

SEQ ID NO: 211847 - protein, 74 aa, Glycine max
  Clone ID: PAT_MRT3847_33324C.1.pep
MLDLRLEQCSLLKKVLESVKELDNTYTSLHPMCSTPSTGFYYVNLIAHHNLYAGFYQYDCDSNISMGMNLNKMA

SEQ ID NO: 211848 - protein, 65 aa, Glycine max
  Clone ID: PAT_MRT3847_33325C.1.pep
ARGQFGPLSSDIAFFLSSKVPCGSGGYSSNRSLKFTTQNFTVRISFTNFFHTFVSHQSALSRPCR

SEQ ID NO: 211849 - protein, 68 aa, Glycine max
  Clone ID: PAT_MRT3847_33326C.1.pep
TTPVTEASATEQPASVVAAAEQPVAEAPAPESTTEAPKDETTEAPTETVDKATTEVALEEPKEVTGET

SEQ ID NO: 211850 - protein, 53 aa, Glycine max
  unsure (1)..(53): unsure at all Xaa locations
  Clone ID: PAT_MRT3847_33327C.1.pep
WSFHFWPGFINPSLLNLVSYPWIPDRVRKELLFLHGGYYNFFKWFFXKWTLDF

SEQ ID NO: 211851 - protein, 88 aa, Glycine max
  Clone ID: PAT_MRT3847_33328C.1.pep
GRLVNQQRHHESGISLLDVVCLRETALTNSLLLLCLSFSVPFPSLSRGSGSSKTSSMGANNFPFTKSCWSITNYPNLNLSYPSSLIYI

SEQ ID NO: 211852 - protein, 453 aa, Glycine max
  unsure (1)..(453): unsure at all Xaa locations
  Clone ID: PAT_MRT3847_33329C.1.pep
FRSYKSGFVWHDLCEDDIILPAHGNEYVLKGSELFDESNSDRFSPISNVKTQSVKLLPGPASSRSLDEGSSSSSMNGKETRISQDDELSQDPHTGSSDVSPESRAEKSDAXFGLGLTEYKIYKTDGLADASTQTEENASRSRAQKTCTRGVSTEDGLLESECHEICQAEAPRVKDTPRICRDAVSHPQLTSISSAIVGQNVTLDSLIRADASEVNSFRILEEEGMHMPTNTRMKASNLLMQLISCGSISVKNHSFGLIPSYKPRFSSSKFPSPLFSTSFVLGEFDCLAENPKLMSLRLEDKEYFSGSLVETKLKEGDGHNVLKRSSSYNDERTFKDQKPQEDKEESSSGHSKCIPRSIKASLTKHPRSESMRSPVSDVPRNSSDRIDGSGISPVTSNGSSKRITEPLTGKKQSKRIDSFKEEEEVIKIEERLASGARVIIQSKPFSDTASSSC

SEQ ID NO: 211853 - protein, 90 aa, Glycine max
  Clone ID: PAT_MRT3847_3332C.1.pep
LHIPACTGITPEGVLGAVKTLCQRSNCLKTLSITGIYNIQKEHLDMLIMNLGKNQPLEEQQKQQQPVYYHERCSFSVFKQEESWRLIDLE

SEQ ID NO: 211854 - protein, 469 aa, Glycine max
  Clone ID: PAT_MRT3847_33330C.1.pep
MDEEAETERVPHPHSPKLGFPLPSAAGDANLLTALSTILVASIQDAKDRISQIEYVFCSQLYPHLKPDDASKRCCIEQLKRDADENAKLLLHAEERRNAAFLKSESCEGDKATLLARIAELDETLRLKTREIEEAETKRIEEEGKLLERVEALACELRDEKAKRNRVTEAYKRLKSQHVYLRRKVGLGEENVVQEKKLESGTELGVHQSPVVEPGLAFENPNMTMDAGDSDTAEGRNEIPEEDFGGLETKTPDVFVATCVIRRVKEKPSEIDRGCNLSSPSSGFRDVPKCPSNTKLVSVSSTKRPVSSWRQTRSHQSRAGPDPHDDFLDTSLENIRENFNKDLNKEDQPCLIQKDISVDSSDDETQDMNAKSSPQKKQKQSSVTVANTRSFKYVEPVRKKAERENLKGVECKQCRKFYDAVLPNAAGKDTDSKQNFRCEHLDGVSRHRYRYVPPMTPEGFWNIGFESEM

SEQ ID NO: 211855 - protein, 314 aa, Glycine max
  unsure (1)..(314): unsure at all Xaa locations
  Clone ID: PAT_MRT3847_33331C.1.pep
MIEKKTQCEKKEKMEGEETEMKQQSRFKRICVFCGSSPGNKSSYKDAAIELGKELVSRNIDLVYGGGSIGLMGLVSQAVYEGGRHVIGVIPKTLMPREITGETVGEVMAVADMHQRKAEMAGHSDAFIALPGGYGTLEELVEVITWAHLGIHEKPMRSDAVIAXPGCYGTLEELLEVITWAQLGIHDKPVGLLNVDGYYNTFLSFIDKPVEEGFISPTARHIIVSAPTPKELVKEMEEYVPPRGGVGSLLGWGGYCYFRPPFAFPFGAFAVAGEGSLRSGLQSSCEAELLVSSILGDHFFLEPDSLCSVLSLLV

SEQ ID NO: 211856 - protein, 125 aa, Glycine max
  Clone ID: PAT_MRT3847_33332C.1.pep
MAAATAATASWMRFKGGKERKLTKMNKSRINCSYSSSSSVIDPYKTLRIKRGASESEYHPDVCRGSNCGVQFHEINEAYDVVMSKLRGESNEAESYEAYYDAGGIDEPLRGMNDPDWDMWEEWMG

SEQ ID NO: 211857 - protein, 84 aa, Glycine max
  unsure (1)..(84): unsure at all Xaa locations
  Clone ID: PAT_MRT3847_33333C.1.pep
VSFQNLXGLETLSLYYCGILLLXSXIVKMPXLXSLXALXRKXFQWVXSXQGDXKVGIVDDXSSVDGCXLYDDXXSXGFMQXHHX

SEQ ID NO: 211858 - protein, 92 aa, Glycine max
  unsure (1)..(92): unsure at all Xaa locations
  Clone ID: PAT_MRT3847_33334C.1.pep
MAAATAATASWMRFKGGKEMKLTKMNKSRINCSYSSSSSVIDPYKTLRIKRGASESEVRKAFRQLAXADVCRGSNCGVQFHEINEAYDVRYI

SEQ ID NO: 211859 - protein, 153 aa, Glycine max
  Clone ID: PAT_MRT3847_33335C.1.pep
MAAATAATASWMRFKGGKERKLTKMNKSRINCSYSSSSSVIDPYKTLRIKRGASESEVRKAFRQLALQYHPDVCRGSNCGVQFHEINEAYDVVMSKLRGESNEAESYEAYYDAGGIDEPLRGMNDPDWDMWEEWMGWEGAGIRDYSSHINPYI

SEQ ID NO: 211860 - protein, 495 aa, Glycine max
  unsure (1)..(495): unsure at all Xaa locations
  Clone ID: PAT_MRT3847_33336C.1.pep
MDLRESLVLLVVGSFVVQFCCNANANLVFPVVRKFKGPVENLAAIKAHDAGRRGRFLSVVDLALGGNGRPTSTGLYYTKIGLGXNDYYVQVDTGSDTLWVNCVGCTTCPKKSGLGMELTLYDPNSSKTSKVVPCDDEFCTSTYDGPISGCTKGMSCPYSITYGDGSTTSGSYIKDDLTFDRVVGDLRTVPDNTSVIFGCGSKQSGTLSSTTDTSLDGIIGFGQANSSVLSQLAAAGKVKRIFSHCLDSISGGGIFAIGEVVQPKVKTTPLLQGMAHYNVVLKDIEVAGDPIQLPTDIFDSTSGRGTIIDSGTTLAYLPVSIYDQLLEKTLAQRSGMELYLVEDQFTCFHYSDEKSLDDAFPTVKFTFEEGLTLTAYPHDYLFPFKVKKADSSQITGTKKEDMWCIGWQXSTAQTKDGKDLILLGDLVLTNKLFIYDLDNMSIGWTDYNCSSSIKLKDNKTGTVYTRGAQDLSSASTVLIGKILTFFVLLITMLST

SEQ ID NO: 211861 - protein, 153 aa, Glycine max
  Clone ID: PAT_MRT3847_33337C.1.pep
GFGAIPSDTYLDLIVVDTNWTGIMHRNSLKRSNDSTRIIITAIMGIAFGFFIGISISSVHLTKISLLSSPVGNSFDVPVAESEIDRFSAEVNRSPAVIDESSGTKNLETLGSIRLPKIFVASNPRGAESLPPGIVVSESDFYLRRLWGEPSEV

SEQ ID NO: 211862 - protein, 492 aa, Glycine max
  Clone ID: PAT_MRT3847_33338C.1.pep
ISIALVEVGPSITLASVSEVLAFAVGSFISMPAIRVFSMFAALAVLLDFLLQVTAFVALIVLDSLRAEDKRVDCFPCIKVHADPDIGTGRRKPGLLARYMKEVHAPILSIWGVKIVVIAIFVGFALASIALSTRIEPGLEQEIVLPRDSYLQGYFNNVSEYLRIGPPVYFVVKNYNYSSESTHTNQLCSISHCNSDSLLNEIARAALVPDTSYIAKPAASWLDDFLVWVSPEAFGCCRKFTNGSYCPPDDQPPCCAPGESSCVSVGTCKDCTTCFRHSDLHNDRPSTTQFREKLPWFLSSLPSADCAKGGHGAYTSSVELKGYDNGIIQASSFRTYHTPLNKQVDYVNSMRAAREFSSRVSDSLKIEIFPYSVFYMFFEQYLHIWKTALINLAIAIGAVFIVCLIFTSSLWSSSIILLVLAMIVVDLMGLMAILNIQLNALSVVNLVMSVGIAVEFCVHMTHSFTVASGDRDQRAKEALGTMGASVFSGITL

SEQ ID NO: 211863 - protein, 36 aa, Glycine max
  Clone ID: PAT_MRT3847_33339C.1.pep
MQLPTVSESIEVWDFLSVDSQTYIFSNSFSIMETLS

SEQ ID NO: 211864 - protein, 62 aa, Glycine max
  Clone ID: PAT_MRT3847_3333C.1.pep
MSPFFVEENKFKQRVWIRGSRPEEEEIFQFTMAQKVGGCWDGYWLTESLLHDTDTFAGGLAY

SEQ ID NO: 211865 - protein, 102 aa, Glycine max
  Clone ID: PAT_MRT3847_33340C.1.pep
MGSASLLNPSQPGVKKNDKSKQKSVVSKTEEEVMFKDKQKKRSLSESSEQTAAMRKMPKRAAACKNLKEKSFLIYEKSCLIETEKDHIVEEESLAVRMTGGQ

SEQ ID NO: 211866 - protein, 62 aa, Glycine max
  Clone ID: PAT_MRT3847_33341C.1.pep
FSVEAETGLEASPTSYLAEATSCTCSAQSFSSYKRCFSTHEIFVRCFPSWNSTSKGPIGDHS

SEQ ID NO: 211867 - protein, 396 aa, Glycine max
  Clone ID: PAT_MRT3847_33342C.1.pep
MAAFSVTATTSPSSCLLQRHRFSTPSFYLHGSPRPQNKKIGIFGPFSFNLRRRTLMCAVNQDAMEAMKDTGETDSLIGVLGETDSHQDGSRTIPKVRNESIEAWSQFAKRASGEWDGFGADFSNEGKAIELPESVVPETYREWEVKVFDWQTQCPTLAEPEERVLQYKSIQLLPTVGCEADAATRYNVDERKVGGENNGLTAFAYQSSGSYVAIWQKKDNLLELEYCLINPQDCESRVRIIQLIDVLNNTEIVLKGIKVYREQWYGPFRNGDQLGGCASRESAFAPTAPMTAPDVTGIWKGSKAVAASGTPNTVREIFQELFDDKVQNSVRDGDNNILLPKQLWCSLKKSKEGETLSEVGWLLDHGQAITSSCLFSSTAKPQEISIALETRALEYA

SEQ ID NO: 211868 - protein, 75 aa, Glycine max
  unsure (1)..(75): unsure at all Xaa locations
  Clone ID: PAT_MRT3847_33343C.1.pep
SCCNGNCGSSSSCKNGYGCXSINTYPNFTYTNTTNTXTLVLAPAPAKVQFDETEMPAPNDNYECKPKPNCSCYPC

SEQ ID NO: 211869 - protein, 69 aa, Glycine max
  Clone ID: PAT_MRT3847_33344C.1.pep
TNILTSVLLENRCQRSSCVHFFLLMLIVFNIGYLENRCCHMYVNIGSPKPMLTFMHSTSLLSISILEPM

SEQ ID NO: 211870 - protein, 79 aa, Glycine max
  unsure (1)..(79): unsure at all Xaa locations
  Clone ID: PAT_MRT3847_33345C.1.pep
PKSYKXIIPGNITTNLKILRGKDIMITLMFHKISTSSTWKNYIRVAKKKKNTKKHQIECQVKNKKRKKICYYGMCCFDP

SEQ ID NO: 211871 - protein, 50 aa, Glycine max
  unsure (1)..(50): unsure at all Xaa locations
  Clone ID: PAT_MRT3847_33346C.1.pep
RPRCWQQVPEPEPRMSGEEQEQSMPTSXNFLFPXIVVFFASPSRARIGST

SEQ ID NO: 211872 - protein, 99 aa, Glycine max
  Clone ID: PAT_MRT3847_33347C.1.pep
SLCEPRGFPLFRSRALLTLSMRLHLWLRCSPISNPQHHRRRREWRHARLPGNTLAGLPVRFIQQPSASTSDRALTIADRGRHSRTGPLSQRPCPCAYRP

SEQ ID NO: 211873 - protein, 219 aa, Glycine max
  Clone ID: PAT_MRT3847_33348C.1.pep
MEAEHHHQTSNAGGIIGGLYVKVMTDDQMELLRQQISVYATICQQLVEMHKAVTIQQDLAGLRLGNLYCDPLMACSGHKITARQRWTPTPLQLQVLERIFDEGNGTPSKQKIKDITIELGQHGQISETNVYNWFQNRRARSKRKQLTPALNVVEPEVETEVEVESPKEKKTRAEGFQVQPYEKSSPHRIKDMYIQSPDIGFDQLMSKIEVAGCYSSYFL

SEQ ID NO: 211874 - protein, 90 aa, Glycine max
  Clone ID: PAT_MRT3847_33349C.1.pep
SSSHPAPPSRNFHWKLGIFPLQWQVLPHRNSLSRWFAPPPASTMHVLSHHDGICILAAPMTQTRMITNHRCSSYKSRIDTQSLTNFRSEK

SEQ ID NO: 211875 - protein, 113 aa, Glycine max
  Clone ID: PAT_MRT3847_3334C.1.pep
MLAVFSGQVVEVPAELVAAGSRTPSPKTKASQLVGRFLAASEPAVSVQLGDHGHLAYSHTNQALLRPRSFAAKDEVFCLFEGVLDNLGRLSQQHGLSSKGANEVLLVIEALQT

SEQ ID NO: 211876 - protein, 50 aa, Glycine max
  Clone ID: PAT_MRT3847_33350C.1.pep
MAGGKPLGGFLIPQGVVLGKGGGLAFKINKKIFNFGRVYHSPFTNGHRLD

SEQ ID NO: 211877 - protein, 91 aa, Glycine max
  Clone ID: PAT_MRT3847_33351C.1.pep
LSNLWWPSWGLCFFSKCCKNIMNGLESNHIPQSRFRYVTAPRTNIWGSVALEGGPFFFSTQGVTDVWGKFYFLKTSVGIWVHVNKTLLVDI

SEQ ID NO: 211878 - protein, 96 aa, Glycine max
  unsure (1)..(96): unsure at all Xaa locations
  Clone ID: PAT_MRT3847_33352C.1.pep
IRLETLHKFPTLKPRHVFTTTAXGTTIDFSPLRREARHQIPXLIHPMMPKAYFHLDHPTKWNNNHSLSTTDHNKKGLPSLKLALPRKNSLRLFLKL

SEQ ID NO: 211879 - protein, 50 aa, Glycine max
  Clone ID: PAT_MRT3847_33353C.1.pep
FIMHYNYFTLIYYFNILSFKEFFMIFYIFENIILIILKIFVINANILFNC

SEQ ID NO: 211880 - protein, 59 aa, Glycine max
  Clone ID: PAT_MRT3847_33354C.1.pep
MFGLTMNFLTGDELLSNSFGYKEIEIGMLWEVEGKWVVKGAVDVDIGANPSAEGEGEIK

SEQ ID NO: 211881 - protein, 73 aa, Glycine max
  Clone ID: PAT_MRT3847_33355C.1.pep
VRSRCLEGAGLFYILFLPFALMRHKELVIARGRAWMRYLSLEGRTLIMLGLCNSGEEIVGSSVAFGTDERRYL

SEQ ID NO: 211882 - protein, 372 aa, Glycine max
  Clone ID: PAT_MRT3847_33356C.1.pep
FAFCYTKFFLMSFISLELPQQENLYDCGLFLLHYVERFLEEAPINFNPFMITKSSIFLNSNWFPPLEVSLKRSHIQSVIYDIFENNSLQAPHTDCLDKDLLLEDPAIIVNPKLEEDSLRGCCYPTASPIRVASCLTGPGLVSKDLVAVVTSRSACLQMSACHQRGFLSPLEEIEESSEETVLSLERENSQVGILAYDFPATYVSNDHGASETFQVGFSVNFVEAVESHSHSRTSTGVSWIPSNTATHEDQPLEKIEESSIPDKTALEYLSTSVSGEELTDYTVPDSPVANDVDVSVESHSSFRNNMNSVTHQIFDLTHNTSLEDNTLVSKEESLAFESDERDAKRPKLMNAGGPSRRFTRSMVKKACVMSCE

SEQ ID NO: 211883 - protein, 70 aa, Glycine max
  unsure (1)..(70): unsure at all Xaa locations
  Clone ID: PAT_MRT3847_33357C.1.pep
RVTTRRKLRGVSGRTCILQHTKITDGYKNIPASTSSNPXHNLIIIITIMREKYHNNISXFSLXIVAXXNS

SEQ ID NO: 211884 - protein, 60 aa, Glycine max
  Clone ID: PAT_MRT3847_33358C.1.pep
LGALTGLRLMLFFEGTWPELRLSHFLQVISLGCGLYSLLNTLTGLLLIIFPDGALGALLL

SEQ ID NO: 211885 - protein, 172 aa, Glycine max
  Clone ID: PAT_MRT3847_33359C.1.pep
MMQKSINQRKFLNGEAPHPKKPYRIELVGVVCDGYLAVVRGIRRAIMTGSAVRVNSQLKSHKRFANAFPRYCKLVDNARLYCTNAVGGPPKLIGRKDGDHNLLVDREEIKCLETLGSLNAGADSIYELHKEPSPIMEPGSVWNDIVMSPSRPSDQKELKESIQKIEKSIRKM

SEQ ID NO: 211886 - protein, 60 aa, Glycine max
  Clone ID: PAT_MRT3847_3335C.1.pep
HPAHPPTPIPARIPNKKPLFRHFPTQSPRWWHQRKLHGKMNWACSLAHVRQVVDVLRDPL

SEQ ID NO: 211887 - protein, 534 aa, Glycine max
  unsure (1)..(534): unsure at all Xaa locations
  Clone ID: PAT_MRT3847_33360C.1.pep
MDQDSSIGKVFKFTHVLAASFAGSVAAAAASSYRRAPSTVVGEQKKVIPELRRTESGRLGEMEKFSHYVARQMGFEDADEVPELCILAQEYLKKSKGCDESIFEYISSGNVENTDSLYAKLVEELERCILSYLAFHWNQATSVISQVLGVESHQSARMSXDYINTGDESIFELQKEPSPIMEPGSVKIDIVMSPSGPNDKTEXMNLYRKKRNPFRKKRQRMLVVLFMGGVVGAGKSTVLKDILKGSFWSGAASNAVVVEPDAFKENDVIYRALSSRGHHDDMLQTAELVHQSSTDAASSLLVTALNEGRDVIMDGTLSWEPFVEQTITMARNVHKHRYRMGVGYKVSEDGTIITEDYWEQVNDAEEHLQSEENCNGESRTRKPYRIELVGVVCDGYLAVVRGIRRAIMTGRAVRVNSQLKSHKRFANAFPRFCKLVDDARLYCTNDVGGPPQLIWRKDGDQNQNLPDREDIKCLERIGSVNAEADSIYELHKEPSPIMEPGSVWNDIVMSPSRPSDQTKLKESIQKIEKSIRKM

SEQ ID NO: 211888 - protein, 117 aa, Glycine max
  unsure (1)..(117): unsure at all Xaa locations
  Clone ID: PAT_MRT3847_33361C.1.pep
IQAFDPLGLADDPEAFAELKVKELKNGRLAMFSMFGFFXVQAIVTGKGPLENLADHLADPVNNNAWAYATNFVPGKATNNHTRGKQYDNKIRPLLSLSSNSNFFSSLKQVCICNCNF

SEQ ID NO: 211889 - protein, 210 aa, Glycine max
  Clone ID: PAT_MRT3847_33362C.1.pep
MASFAAPNNIGSAVLPSRQRKPSRPPPLKCSLLPSSNNNDSLSNPSSSHTPPLFKAIAISSAASILLQCTPLSPFFPNPLTKLGGGGNTGGGGGDDGWFGGHGGGGGGGNGGFWSRMFAAVADENQPQEWDSHGLPANIVVQLNKMSGFKKYKVSDISFFDRNRKTKVGTEDSFFEMVSLRPGGVYTKAQLQKELETLATSGMFEKGDLE

SEQ ID NO: 211890 - protein, 56 aa, Glycine max
  Clone ID: PAT_MRT3847_33363C.1.pep
SIDAVHLDSFTFLIEGHLASSRYSKHRHQLLYIQEHFVSICIIVRVHSVLYAIRHT

SEQ ID NO: 211891 - protein, 114 aa, Glycine max
  Clone ID: PAT_MRT3847_33364C.1.pep
EVWTYRHFPREVWLYNIGLGSLVYNVEKICDESGEDPDCSRSVTGNSIADHLVYYGVDMGSDEPSSCRIVMDSHVQNTSIRDSRGNLILSRDPATPLIKLGGEGDNQENPINVD

SEQ ID NO: 211892 - protein, 141 aa, Glycine max
  unsure (1)..(141): unsure at all Xaa locations
  Clone ID: PAT_MRT3847_33365C.1.pep
RVAWLRLELEIMKMNSSMGYLIPXAGSEAITSGSGSNITGMIVGVSVGVVGAVVLAGLFFVLCMKRXRLVHTQAKTWVALSIHDGTTSHSMGSKYSNGSTLSACSIFDFRAPFVAVHEATNNFYERWVIGIGGFGKIYNGE

SEQ ID NO: 211893 - protein, 47 aa, Glycine max
  Clone ID: PAT_MRT3847_33366C.1.pep
GQGNFYWYITENIIHFIYKLPTENGFLQMTIWTLFFFLDKINLLPFY

SEQ ID NO: 211894 - protein, 61 aa, Glycine max
  Clone ID: PAT_MRT3847_33367C.1.pep
SKVCVARYKRFWSLLGMFLRCKVEQFKISSACNGLLKVVWLQTAAVHSAFVYMAHDETYVA

SEQ ID NO: 211895 - protein, 76 aa, Glycine max
  Clone ID: PAT_MRT3847_33368C.1.pep
NQPTPCVKNSPPGKFFQLGNFPKLFLEKKEKLVFLGRGCFLLVGLKKNQKMFLKKSFNPFFSSRVFIPKKKAPPKI

SEQ ID NO: 211896 - protein, 52 aa, Glycine max
  Clone ID: PAT_MRT3847_33369C.1.pep
ITLAHCAFDYDTISLETSRAASVSLITVTDTKYFVACNRKVYTYNLFTHAQQ

SEQ ID NO: 211897 - protein, 40 aa, Glycine max
  Clone ID: PAT_MRT3847_3336C.1.pep
VVINPLSIGSILFNHSSFGETQKLEDRPRQKPQSQKKKPF

SEQ ID NO: 211898 - protein, 56 aa, Glycine max
  unsure (1)..(56): unsure at all Xaa locations
  Clone ID: PAT_MRT3847_33370C.1.pep
RNPDRDLPVGIXNSVXICCILSMLVSADLVGLHPYDKLNSDTPICSAFSTYAMQWA

SEQ ID NO: 211899 - protein, 132 aa, Glycine max
  unsure (1)..(132): unsure at all Xaa locations
  Clone ID: PAT_MRT3847_33371C.1.pep
ADLICIGLDEHSPRNSLHMCGMEFLSMLDGLDEERCGDXPRHYSVKRLRLTVLQVYAMXKNFDXDNTLAPETKVKLAQELGLPPTPVAIWIQNLRTRWRTILLERDYGDLIANDDALKLNYGTLNEDNLILL

SEQ ID NO: 211900 - protein, 84 aa, Glycine max
  Clone ID: PAT_MRT3847_33372C.1.pep
WQADSIIQYQNNPIYTHRHERKEWDKKKIGGIATSKRSCGEVKKELGYATMDGKREYEQAKLRCVLTDEKQGLATGRQELKVFG

SEQ ID NO: 211901 - protein, 492 aa, Glycine max
  Clone ID: PAT_MRT3847_33373C.1.pep
MAETLNLPLLLSVCIIFTTLSLTTSRTITTPSHTNVLDVSSSLHQAHQILSFNPQLLEEQSSETETPTSPSSSSSSFSLQLHPRETLLNEQHPNYKTLVLSRLARDTARVNSLNTKLQLALSSLNRSDLYPTETELLRPEDLSTPVSSGTAQGSGEYFSRVGVGQPSKPFYMVLDTGSDVNWLQCKPCSDCYQQSDPIFDPTASSSYNPLTCDAQQCQDLEMSACRNGKCLYQVSYGDGSFTVGEYVTETVSFGAGSVNRVAIGCGHDNEGLFVGSAGLLGLGGGPLSLTSQIKATSFSYCLVDRDSGKSSTLEFNSPRPGDSVVAPLLKNQKVNTFYYVELTGVSVGGEIVTVPPETFAVDQSGAGGVIVDSGTAITRLRTQAYNSVRDAFKRKTSNLRPAEGVALFDTCYDLSSLQSVRVPTVSFHFSGDRAWALPAKNYLIPVDGAGTYCFAFAPTTSSMSIIGNVQQQGTRVSFDLANSLVGFSPNKC

SEQ ID NO: 211902 - protein, 129 aa, Glycine max
  unsure (1)..(129): unsure at all Xaa locations
  Clone ID: PAT_MRT3847_33374C.1.pep
AVCPLCGQGQENVGHLFXNCERTTKLWWESMGWIKAVGSLSASPLNHFAQFCDGFGANINQSRWRAWWVALTSTIWQHRNLLIFQEKPFDPYKVMDEALYLLWSWCKSKEKGFDISFNHWSSNISESFG

SEQ ID NO: 211903 - protein, 125 aa, Glycine max
  unsure (1)..(125): unsure at all Xaa locations
  Clone ID: PAT_MRT3847_33375C.1.pep
TTGPPRFPPLKTGRGPPPLNVGXAPPLGPPGFSLFSSGPFFLGNFYRKPIFPRKHLFPFFPPAFIRPPIRKIGSPPGPRPEFPGGPPGPMKKNFFFFMWRPPPFFAPFWANDFLGNLKPQNFFGF

SEQ ID NO: 211904 - protein, 54 aa, Glycine max
  Clone ID: PAT_MRT3847_33376C.1.pep
KKYEVCTHAKKNEFDNGTGMKEERAGGEVHLWGAGSSSLITSQIPLPDLPGTLP

SEQ ID NO: 211905 - protein, 194 aa, Glycine max
  Clone ID: PAT_MRT3847_33377C.1.pep
MACTDKTATVTDEASGGGATTIFAVHPDIIQTHILTCLDGRALASVASTCSQLHALSDHEPLWENICHSTWPSTNSPRVRHVISTFPCASRSFFSDSFPSFAAREGSNIDRAPELISAVDIFHRRRVVLSRVVETETESGWFRCSPFRIDVLDQKEAVATAMEYPLSDGACEIPGEDLRLSWIVVNPKGKRAVN

SEQ ID NO: 211906 - protein, 65 aa, Glycine max
  Clone ID: PAT_MRT3847_33378C.1.pep
CTWAARSRGIITFNMFEISLPVRQPNIPEWDGAKLHMKRIYEHTVSCTCTGLRNGVVRFTVVRYR

SEQ ID NO: 211907 - protein, 102 aa, Glycine max
  Clone ID: PAT_MRT3847_33379C.1.pep
PFTRMSYAIETRLPFEFFKALSLKAQAPIIIARNLEIVTPHPLPSCFKFEVIIICHCLRVFSLFSLEHIGQCSLLLWFVSCTLVKSRKGMIFIVKLVKNFSD

SEQ ID NO: 211908 - protein, 77 aa, Glycine max
  Clone ID: PAT_MRT3847_3337C.1.pep
STCTTGHIRTLHIDYVAEFIFHQDSDALATDRAYYSGNVLVSAYAPSLRVSNSLHRYACYGSVAKPHSLTFAGLIIA

SEQ ID NO: 211909 - protein, 251 aa, Glycine max
  Clone ID: PAT_MRT3847_33380C.1.pep
SILAAWPQNVPVEVFGSQNIFSNFNLLSGTPRAGPQGGGVAAPSRGAHPDWSVAAIRTAIMPPPDMFDNTMGLIKDVGDDYKPATPLAMGAGHVNPNRALDPGLVYDVGVQDYVNLLCALGYTQKNITVITGTSSNDCSKPSLDLNYPSFIAFFKSNSSSTTQEFERTVTNVGEGQTIYVASVTPVKGYHVSVIPKKLVFKEKNEKQSYKLRIEGPRKKKEKNVAFGYLTWTDLKHVIRSPIVVSTLTFDF

SEQ ID NO: 211910 - protein, 46 aa, Glycine max
  Clone ID: PAT_MRT3847_33381C.1.pep
ECFIIRTVDSQCEQCYTEIMFRRMRMESLILTNCSEIQIYFQEPTK

SEQ ID NO: 211911 - protein, 62 aa, Glycine max
  Clone ID: PAT_MRT3847_33382C.1.pep
VKKKFACSKHHAWWWVLVVGGVENENVIGEYWWAFEKRLVGSPILHKEIKRYRGQKKKNFYY

SEQ ID NO: 211912 - protein, 71 aa, Glycine max
  Clone ID: PAT_MRT3847_33383C.1.pep
STLMHKQTPKILGSTARTAYSGGPLHTLLNSESLTQRFTNIRRTIKVYKKTLHEPLFFHTPKHISMALNLI

SEQ ID NO: 211913 - protein, 195 aa, Glycine max
  Clone ID: PAT_MRT3847_33384C.1.pep
MASSSSASGSGSASAVTERRGIPGAQFVEDVQTYLTQSGLDVGSALAFLQERLQQYKVVEMKLLAQQRDLQAKIPDIEKCLDVVATLKAKKGTGEELIADFEVSEGIYSRARIEETNSVCLWLGANVMLEYSLEEATGLLQKNLDNARASLEVVIANLQFVRDQVTITQVTIARVYNWDVHQRRVQHAVATTAQD

SEQ ID NO: 211914 - protein, 58 aa, Glycine max
  unsure (1)..(58): unsure at all Xaa locations
  Clone ID: PAT_MRT3847_33385C.1.pep
FDIEGRTCDVVEAYTFTTGXHCHAKCHFAVIDIYTXRSLKMMCAVXHNCDCWHVNRSD

SEQ ID NO: 211915 - protein, 152 aa, Glycine max
  unsure (1)..(152): unsure at all Xaa locations
  Clone ID: PAT_MRT3847_33386C.1.pep
MTRALNAIAYVALIFLAFAMSCSTSTRILDEVERPEAEEANNAAESHVADQHHTLSFFMHDILGGSNPTARAVTGVVTNPALNAQVAFAKPNGANLPLNNGVPQNNNNGGILNNXNLPFLTGLGGTTANVFNNGGTGFPVTNTNQLPAGMTL

SEQ ID NO: 211916 - protein, 202 aa, Glycine max
  Clone ID: PAT_MRT3847_33387C.1.pep
MSSSLIANPTADRSRDSHRTKKKKKSLKQHQLQHEQSHAKWKSHAQQQLYSSKLHHALARVNISGDAPRRGRAVREAADRVLAVAAKGRTRWSRAILTNRLKLKFRKPIHTKRTVVVGPGRPKKARFSVLRLKGKTLPAVQRKVRVLGRLVPGCRKEPLPVILEEAIDYIPALEMQVRAMQALADLLLGSSSASTSAAAPPS

SEQ ID NO: 211917 - protein, 33 aa, Glycine max
  Clone ID: PAT_MRT3847_33388C.1.pep
KIPDFLQPKILNNLLSGRSRCQNQHAEQSKYLL

SEQ ID NO: 211918 - protein, 92 aa, Glycine max
  Clone ID: PAT_MRT3847_33389C.1.pep
AAMVYMSEFWPSTIFCHPPLITLDRTNVLAAHYHWETECNQHSPSCQYFRFIVQGATLFSSLLLVVISKILQKFYLSNLNSISIDPSKASDT

SEQ ID NO: 211919 - protein, 108 aa, Glycine max
  Clone ID: PAT_MRT3847_3338C.1.pep
WGSQKGKGFCFLGPGLFPPPFSFIPPGGRQRFFPFGPPAPAFYGAKGGMIFSGQMGLGPGTLVKGFPFYGALGAPAPFFFGKITLFLSFLGVPRGAKNLFFLGWGGGF

SEQ ID NO: 211920 - protein, 79 aa, Glycine max
  Clone ID: PAT_MRT3847_33390C.1.pep
RQNKVNNDNIHFSFLMPTKSSPLYLWLPTKNTRKILHLSQITHSLPPYLSQPFKLTIVTRIGGKRNRTVNELHSNKHKH

SEQ ID NO: 211921 - protein, 83 aa, Glycine max
  Clone ID: PAT_MRT3847_33391C.1.pep
LDKEQGRSYIYLSIPITSCLCYTTSYFHRFGSVYARQCHNTYKFVRIVGTCNQRVTPAQLLSYFCYVYSIHTVKLEAIRAGSG

SEQ ID NO: 211922 - protein, 67 aa, Glycine max
  Clone ID: PAT_MRT3847_33392C.1.pep
SCPMVRRDKIWSFCTLMSSRGGGPDEARRYLTVISTVLSSRGVGHDVKQRPMWSFCTFRQSRPTSPM

SEQ ID NO: 211923 - protein, 130 aa, Glycine max
  Clone ID: PAT_MRT3847_33393C.1.pep
SRGYVSFAGNGIELRRGYSPSNSPKPTQDELRQQKEEDMDDYCSQVPVRHLVFMVHGIGQRLEKSNLVDDVGNFRHITASLAEQHLTPHQRGTQRVLFIPCQWRRGLKLSGETAVEKITLDGVRGLRVTL

SEQ ID NO: 211924 - protein, 42 aa, Glycine max
  Clone ID: PAT_MRT3847_33394C.1.pep
MWFNFAHLRTLFPFPFVIKHTKLLLYLPSTSRKRSLPWFLRN

SEQ ID NO: 211925 - protein, 167 aa, Glycine max
  Clone ID: PAT_MRT3847_33395C.1.pep
MATNHSKSVFDFTVKDAKGDDVDLATYKGKVLLIVNVASKCGMTNSNYVELNQLFEKYKDKGLEILAFPCNQFGEEEPGSNDQIQEFVCTRFKSEFPIFDKIEVNGDSACPLYKFLKSGKWGIFGDDIQWNFAKFLIDKDGQVVDRYYPTTSPLSLERDIRKLIGIV

SEQ ID NO: 211926 - protein, 68 aa, Glycine max
  unsure (1)..(68): unsure at all Xaa locations
  Clone ID: PAT_MRT3847_33396C.1.pep
LRTSNLCWSXVVFNSFXNFXTXPKISXEXPXSVXLLGSRFXVLLTQXXXXPXXLLNFYXGXXFXAXXF

SEQ ID NO: 211927 - protein, 167 aa, Glycine max; identical to SEQ ID NO: 211925
  Clone ID: PAT_MRT3847_33397C.1.pep

SEQ ID NO: 211928 - protein, 205 aa, Glycine max
  unsure (1)..(205): unsure at all Xaa locations
  Clone ID: PAT_MRT3847_33398C.1.pep
RKKKPRPKGXQSXXKIINXXTXXXXNIXXIHPLXXTSXSHPLXNRFXXXXXLPKSXXSHXTXXXPXXTHXPXXHXXXXXXXXXXPPSLSPXXPXXYXXTLXXSXXXLNHPXQXXLTPXXHSXXPPMXXNPPPXPISLAXXSXPIXHPXPXXLXXYXXHHSXXLXLXIIHNNXPXHXPXPXLXLSXLXNTHVLXPHTSXLPXHHPS

SEQ ID NO: 211929 - protein, 42 aa, Glycine max
  unsure (1)..(42): unsure at all Xaa locations
  Clone ID: PAT_MRT3847_33399C.1.pep
SCXLFEGFYSSCCKKHFRIICLYFGQNYYISVINCYIEIMKL

SEQ ID NO: 211930 - protein, 373 aa, Glycine max
  unsure (1)..(373): unsure at all Xaa locations
  Clone ID: PAT_MRT3847_3339C.1.pep
MSSTEEAPNPRGYLTEAIFSHVPLIHLVPAXTVSNSWKRAVVLXSSAHVRPIKPWLIVLTQSLRPSHVTTLHAYDPRSHVWLQINNSKYCHTSPVRSSHSTLFYTLTPSEFAFSLDALHLNWHHAPSPRVWRTDPVVARVGSRVVVAGGACEFEDDPLAVEMYDVNSQAWEACPSMPALLKSSTASSWLSVAVAGEIMHVTEKHSGVTYSFETISKTWKGPFSLRPHESVFHCVTGTLXERLMVAGLIGKVGNVKGVKLWEVRVRGGLGSGMEEVGEMPKEMVRKLFSGSELGSVEVTWIGDFVYVRNTSEPEELVLCEVLNHLNGVGCEWRSVRNAAVRCGARMVFCGGSVCMEDLQRAVMSENPTFSMKHV

SEQ ID NO: 211931 - protein, 212 aa, Glycine max
  unsure (1)..(212): unsure at all Xaa locations
  Clone ID: PAT_MRT3847_333C.1.pep
PTPPHPPPPPPPXXPXXPXXPPPPXPPPXPPPPPPPXPPPPPPPPPPPPPPPPPPPXXPPPPPPHPPPXPPXPPPPPPPXXPPPTPPPPPPPPPXXPPPPXPPPPPPPPPPPTHNPPPTTTPQXPPHYXHNPXPPQPPXPXPXXPPKTPILXXXPXPNXXXIXKPNLXXSXSHPXXXXXSXSLXXPXTPPTXXXSSKNFTLTTPLPPITTTF

SEQ ID NO: 211932 - protein, 150 aa, Glycine max
  Clone ID: PAT_MRT3847_33400C.1.pep
VGGGSHSAEDFTVPEDEEKPKKIEARSRQRIDPQHNEVQAQMETNLLKWTLDDVETPNGSMLDLRISQSEVALPKNTGGGTILRCDLLANFLTEGNCRACVDSQRTHRIKGMTNMVATGGIPENTGISLACAMYRFFRGRASFDIYTICS

SEQ ID NO: 211933 - protein, 119 aa, Glycine max
  unsure (1)..(119): unsure at all Xaa locations
  Clone ID: PAT_MRT3847_33401C.1.pep
PKPHRTGGGGGGGEKEKKKQRTGSTKEXDRAQPRANGEXNQNQQKEQRKQQQQQGQXAAAAQTNQXQKKRRAKQKPPTKRATKQQQXXRNPQXXTPKTHXQDQRPKRERAPPPPPPPQT

SEQ ID NO: 211934 - protein, 60 aa, Glycine max
  Clone ID: PAT_MRT3847_33402C.1.pep
YGDTYSSASALNQTKNRALHGNAALLKTYEKKRHCNLVKCFKKDLLYLEGWTHLMILKLL

SEQ ID NO: 211935 - protein, 61 aa, Glycine max
  Clone ID: PAT_MRT3847_33403C.1.pep
GVYFGHLCLCLVYLLISPICNCILVLDSDFRPFVCLPCILIPTSLVIRSLFSEFWCFQYLL

SEQ ID NO: 211936 - protein, 67 aa, Glycine max
  Clone ID: PAT_MRT3847_33404C.1.pep
MVCIRKATVKDLLAMQACNLFCLPENYQMKYYLYHILSWPHLLYVAQDGECHGTAIPLSLSIYKLQM

SEQ ID NO: 211937 - protein, 102 aa, Glycine max
  Clone ID: PAT_MRT3847_33405C.1.pep
LYIAIYWRKPSESNFFFKIFKRKLIMVDTNTIVPLHFYLFPFQHRVVSQLCELSATSQLHELFFIIVKSGNDYNKKVYIKMSYTSLVMDYCVGFSIFFGIIG

SEQ ID NO: 211938 - protein, 55 aa, Glycine max
  Clone ID: PAT_MRT3847_33406C.1.pep
CPSVVFLLLVALFRPFLSVPRRSSCSSQWPVKSSYSSQALQSSSPTGSLRILSPS

SEQ ID NO: 211939 - protein, 231 aa, Glycine max
  Clone ID: PAT_MRT3847_33407C.1.pep
MDRQWRPAPPPNVCPSCFHPHFPFCPPPPPYYHPHPPFPYANFKRPRIDDNPINFSDDERRLKLIRDHGFHTYAPHPNHKDFPPHNAQFRSSPHPFHAYPDPSQHRVPDAYHHAHAPHVAMHEGNHQHNFNGRVVHYPYPYPAAGNNSNDNNNNNNMEPSRFFRGQPQPPLPSSPPPPLPMEPSMNQLKPPSLPVAESQPMSQPYYHPSAFPFEQKHRSSSTWEIPNLFSL

SEQ ID NO: 211940 - protein, 48 aa, Glycine max
  Clone ID: PAT_MRT3847_33408C.1.pep
CVTLLLFVHFRFNTVAYLQQIWWFEVDGEFSFPFPADIYTLSFRLHLG

SEQ ID NO: 211941 - protein, 124 aa, Glycine max
  unsure (1)..(124): unsure at all Xaa locations
  Clone ID: PAT_MRT3847_33409C.1.pep
DNTGKGSMLDLKISKSKXALAKNTVGGTILRSDLLANXFLTEGNFRASVDXQSTYRVKGMPKMVATVGIPEMTGLSMGCAMNRSFRGRASTDIYTICSQDCELWNPGRTKGMAMLFIQNPVLMH

SEQ ID NO: 211942 - protein, 143 aa, Glycine max
  Clone ID: PAT_MRT3847_3340C.1.pep
LVTGTGHRRAINFIINSCAGLRCLRLNSAALTPPLVAFTLSRCQVKLEWVLLTARPYRPFPFRCCSSPLLLVVSCPFSFSFHWLYITPILPPYSSLSSSGGSLSLVLFPTPHPPILLLPPTFPPPPPQRRWTSTHASTANCPA

SEQ ID NO: 211943 - protein, 56 aa, Glycine max
  Clone ID: PAT_MRT3847_33410C.1.pep
EELTDRPFITFKATTTHVRDPTQMAVATHTLSTLIEITKTVLPDQRFEPFRRLSNE

SEQ ID NO: 211944 - protein, 94 aa, Glycine max
  Clone ID: PAT_MRT3847_33411C.1.pep
EEQKSVKPPFTESSHRRKRCRHQFTNEVMLPSASENQKQLSNFQPRHATNQELKYHNSPFPESLCVEAILVRKKKIVIQRVKKMGNFGDLWKNI

SEQ ID NO: 211945 - protein, 100 aa, Glycine max
  Clone ID: PAT_MRT3847_33412C.1.pep
VSITRLPQRCDVTNSCSKKVSSHRLEAGFPHQSVALSGLQNPASPGPTMNLWLSVTGSPSVEGGLSIGFLLRQDQVWSFVHGEKSSLSFGKRALDNQHPP

SEQ ID NO: 211946 - protein, 60 aa, Glycine max
  Clone ID: PAT_MRT3847_33413C.1.pep
VLLRNLWEGLKGRINCNHKREDWGIKCFYVKLMCKYFMGVLVILKGIVVDIRSTEDRNYN

SEQ ID NO: 211947 - protein, 60 aa, Glycine max
  Clone ID: PAT_MRT3847_33414C.1.pep
IGCNLGHCLFWHGRYTSTHISWIQHSRAYNLTAPWLSSALNEATKRNHYAFRGYSYNSVM

SEQ ID NO: 211948 - protein, 84 aa, Glycine max
  unsure (1)..(84): unsure at all Xaa locations
  Clone ID: PAT_MRT3847_33415C.1.pep
QNPQIQTNPMASIPRPAAMDERKRKRMESNRESDXRSRMKKQKLLEDLSDVXSRLQGENVRLAQSIKAKEGAYVEIEAANDILR

SEQ ID NO: 211949 - protein, 113 aa, Glycine max
  Clone ID: PAT_MRT3847_33416C.1.pep
PRVRWETVATNFDEFQDVSEKLFTSKNRTEASVGKKVKIDMLPEIEKVHRRKEKLLKKQHRQALLLDNFLGVDGLAPGRSLRDRKPVTYTFDDYDRSISAVSKIEPNGNHTRT

SEQ ID NO: 211950 - protein, 152 aa, Glycine max
  Clone ID: PAT_MRT3847_33417C.1.pep
MASIPRPASSGSSEGGGDPAAMDERKRKRMESNRESARRSRMKKQKLLEDLSDVASRLQGENVRLAQSIKAKEEAYVEIEAANDILRAQTMELADRLRFLNSILEIADEVGGGGESFEIPQIPDPLFMPWQIPHPMMASPDMLLHGNQGLFA

SEQ ID NO: 211951 - protein, 42 aa, Glycine max
  Clone ID: PAT_MRT3847_33418C.1.pep
SLISTFSNNHVKNVDGPTLLNYIITPRSILDYQDDVVYFVPP

SEQ ID NO: 211952 - protein, 67 aa, Glycine max
  Clone ID: PAT_MRT3847_33419C.1.pep
EKGKESLSLEIRLRGLKRIYLSLSHLYLLPPTTLKAKMVNTNKTMMVQPPTCFSTDTYTISCISIIF

SEQ ID NO: 211953 - protein, 68 aa, Glycine max
  Clone ID: PAT_MRT3847_3341C.1.pep
NFSSILPLSRISMSSDVRSVRDAAVSEIAKMSLHSLPLHHLKSHSIVQNIMGSRKMKQAESSMAGHYN

SEQ ID NO: 211954 - protein, 65 aa, Glycine max
  Clone ID: PAT_MRT3847_33420C.1.pep
IMTSKIYYICHHKELKKDEGPLFAPNNTHPLSQYWVSKFFFKCLFLINNYKIYLLLFYNYFVEKK

SEQ ID NO: 211955 - protein, 86 aa, Glycine max
  unsure (1)..(86): unsure at all Xaa locations
  Clone ID: PAT_MRT3847_33421C.1.pep
EKRVLETNVLRLVKVGTIRSLEQVYLHSLPMXEHQIIRTLGGPTLNDEVMNIMPVQKHTRAGKGTLVIVLLVVXDYNRHVRLGVKC

SEQ ID NO: 211956 - protein, 226 aa, Glycine max
  Clone ID: PAT_MRT3847_33422C.1.pep
MMATTAPVRWQPPNIRFRIEPKRAMRVKAFGKGGRDMDRVWSEAWRSANDGFERFVFEAKKTAERIDRRYSLSRRLSSVARAAADRAREIDREFEIGQRYRTLSIDFQRNWPKYRKQLKDFLDSPLGKSFATLLFIWLALSGWLFRILIIATWVLPFAGPLLIGTLANTLVIKGTCPACKMQFGGYKNQIIRCTGCGNIVWQPKGRTNSKSNKSDPDIIDVDFEER

SEQ ID NO: 211957 - protein, 53 aa, Glycine max
  Clone ID: PAT_MRT3847_33423C.1.pep
INFIPTNLIRLQSFFSSSQSQTSRQEVGLLSPSASGLPREMEESSTKKSKTVP

SEQ ID NO: 211958 - protein, 107 aa, Glycine max
  Clone ID: PAT_MRT3847_33424C.1.pep
PIQELPGHTHWTWTVKCNPEYDGMILVTLDSSTVNLWLASTNHDELTTERQVDSSARWVDPLLNTYSDYEDSIYGLTWSSREPWIFASLSYDGRVVVESVKPFISKK

SEQ ID NO: 211959 - protein, 121 aa, Glycine max
  unsure (1)..(121): unsure at all Xaa locations
  Clone ID: PAT_MRT3847_33425C.1.pep
ASMDAHQNVPGSDQIALMKSVSSRPGSADIIVERRLGPVVIRXVAHGDSSTDLDHGVELVGYGASAMKVRSWIVGYSRGPXSGDTGHFRRLSSMSIKRVVCAIFVLASYSYGFSDYGPTGP

SEQ ID NO: 211960 - protein, 350 aa, Glycine max
  Clone ID: PAT_MRT3847_33426C.1.pep
MQAASSGIGYGLKYQARCISDVKADTDHTSFLAGTLSLKEENEVHLIRLSSSGTELFCEGLFSHPNEIWDLVSCPFDQRIFSTVYSNGETYGAAIWQIPELYGELNSPQLERITSLDTDSGKIKCILWWPSGRHDKLISINEENLYLWNLDVSKKTAQVQSQDSAGMLHKLSGGAWDPHDVSSVAATCESYLQFWDVRTMKKTMSIECSHVCSVDYHPQKQHILVTAEHESGIHIWDLRKPKVPIQELPGHTHWTWTVKCNPEYDGMILSAGTDSTVNLWLASINHDELTTERQANSSARWVDPLLNTYSDYEDSIYGLTWSSCEPWIFASLSYDGRVVVESVKPFISKK

SEQ ID NO: 211961 - protein, 54 aa, Glycine max
  unsure (1)..(54): unsure at all Xaa locations
  Clone ID: PAT_MRT3847_33427C.1.pep
SSARWVDPLLNTYSDYEDSIYGXTWSSREPWIFASLSYDGRVVVESVKPFISKK

SEQ ID NO: 211962 - protein, 171 aa, Glycine max
  Clone ID: PAT_MRT3847_33428C.1.pep
MWISQQENSSSWFFLPVVTFIILFLLRTFLNLLSNRNNDSKKPSPPSPPKLPIIGNLHQLGTHIHRSLQSLAQTYGSLMLLHLGKVPVLVVSTAEAAREVLKTHDPVFSNKPHRKMFDILLYGSKDVASAPYGNYWRQTRSILVLHLLSAKKVQSFEAVREEEISIMMGKY

SEQ ID NO: 211963 - protein, 110 aa, Glycine max
  unsure (1)..(110): unsure at all Xaa locations
  Clone ID: PAT_MRT3847_33429C.1.pep
KTTDVVLHIYDATNRGFTKTNNTXVQINMIFIDGIVLGIIFHNANHFFXYDEWSLVFXEQGTGAFTLPSRKNPMSSYAEXLLYGNTNCTIVKVNEILCTTLLRLAMRCSY

SEQ ID NO: 211964 - protein, 51 aa, Glycine max
  Clone ID: PAT_MRT3847_3342C.1.pep
FFFFFFFFFFYNCKFVIYYKYLIDDLAMLIWSTTSFGIKKLLVTFRMVALH

SEQ ID NO: 211965 - protein, 43 aa, Glycine max
  Clone ID: PAT_MRT3847_33430C.1.pep
LLKTTFNAQPCRSTSSSLKSLKRGCIKMMPQQICGSCEDNFFL

SEQ ID NO: 211966 - protein, 64 aa, Glycine max
  Clone ID: PAT_MRT3847_33431C.1.pep
SSRCCSRYFMLLAPGLAVAFGVVVAGDTADMVTVGLASAGVPSPLARAVPSCLMVPDRQTASFT

SEQ ID NO: 211967 - protein, 228 aa, Glycine max
  unsure (1)..(228): unsure at all Xaa locations
  Clone ID: PAT_MRT3847_33432C.1.pep
PRVRCKQGIIVFASVMATLGLQILIESGXQVISKAKPHMDPTKLHWMIGIMVSVTVVKFILMIYCXRFKNEIIRAYAQDHFFYIITNSVGXVLAVKFYWXIDPTGAIDGNSXTTIALYTINTWAKTVIENVGSLIGRTAPPGFPAKLIYLIWNPHEQIKHMDNVRAYTFGAHYFVEVDIVLPEDMLLHQAHNIGETLQEKLEQLQEVERAFVYIDFEFTHRPEHKAVV

SEQ ID NO: 211968 - protein, 49 aa, Glycine max
  Clone ID: PAT_MRT3847_33433C.1.pep
LIYHTSTNSWVTVKENVQVLSSSNLHPTPEKSSLIHCNDTTRFLHLHVA

SEQ ID NO: 211969 - protein, 260 aa, Glycine max
  Clone ID: PAT_MRT3847_33434C.1.pep
LLPLEWKRRLSIALDVARGVEYLHGLAQQIFIHRDIKPSNILLGDDMRAKVSDFGLVRLAPEGKASFETRLAGTFGYLAPEYAVTGRVTTKVDVYSYGVILMEMITGRKAIDNSQPEENVHLVTWFRRMLLNKDSFTKLIDPIMDVDEETLPSFRTVAELAGHCCAREPYQRPDMSHVVNVLAPLVEIWKPSEADDDDIYAIDLDMTLPQALSKWQAIEGKNTFDVSCTSSMLTSGDTTQSSILTRPSGFADSFTSNDGR

SEQ ID NO: 211970 - protein, 22 aa, Glycine max
  Clone ID: PAT_MRT3847_33435C.1.pep
LELKSIVEMAISRIMIILDKKC

SEQ ID NO: 211971 - protein, 109 aa, Glycine max
  Clone ID: PAT_MRT3847_33436C.1.pep
KPFIQPFLFFLYHNPSPNRNRHFYSLTLTLNFLNNIYFHDLFFNPLFLTNINSLIYILFIILHLFNNTILTPIILSFYYFNLFLKIIIISFFIYYYIYNLFFFILIIYT

SEQ ID NO: 211972 - protein, 65 aa, Glycine max
  Clone ID: PAT_MRT3847_33437C.1.pep
RFLHNFLLHWKTVSNCEKLFKVTLRPLIHFFHFVDNYFVIVRSSICFTFFRSISFVFKSFGVSTI

SEQ ID NO: 211973 - protein, 90 aa, Glycine max
  Clone ID: PAT_MRT3847_33438C.1.pep
QALKVDSTRMLIAEGGVNNLASLHNNYANGPNTSSEKGILVNYTPTANHSNSDLEKLQILSDSKKILSQTALAALIRKMNELVKLFIAFF

SEQ ID NO: 211974 - protein, 103 aa, Glycine max
  unsure (1)..(103): unsure at all Xaa locations
  Clone ID: PAT_MRT3847_33439C.1.pep
APTPSAPFRVFLLLLIXRVRPRXVARYIDMQEMNSQQXXESQPLWMLQKKAFEKSTTDLETLLSPFCGPRRIFTXXGQXGECTFGEGKFKGLLSFQNYPGGCD

SEQ ID NO: 211975 - protein, 73 aa, Glycine max
  Clone ID: PAT_MRT3847_3343C.1.pep
KSASDKLARLSSEMPTRACYGTYTASQLATRSDAFPKGQALLNQRTYTPDMPANMTAGPHYLGRPLSEPHGMQ

SEQ ID NO: 211976 - protein, 103 aa, Glycine max
  Clone ID: PAT_MRT3847_33440C.1.pep
ASKNQCVEHQAPPKLCSVYPLYYGSSNNIQLGNSQHHHGFKVSHVSVSHTGGPALVGGDGARNLLAHNLKNSSNGGSQSFIINGDFENPCTRKCDLSLRLGPP

SEQ ID NO: 211977 - protein, 39 aa, Glycine max
  Clone ID: PAT_MRT3847_33441C.1.pep
RPLLPFHQVYSFSVGSILLNGEVQNRQMVKSSSVCTAIA

SEQ ID NO: 211978 - protein, 227 aa, Glycine max
  unsure (1)..(227): unsure at all Xaa locations
  Clone ID: PAT_MRT3847_33442C.1.pep
MHKVWWRLILFRSHITKENDNITGRFDYLTEKDCWKMGGCCCSARKPHLHGTPVYYYCPPTLEERESLTSNDGRAMSLTTGLLVGLNLETSTPDTYQPPPAPLPYDMVLGGPASTDSESXRETVSGSSFETLITCKDPEESDCKVKANSAPISPSKAGLSKSERISXIRTEEEDGCPICLEEYDVENPKTLTKSQLSSVMVIILEWMERSDSCPICDQEMIFDQTMN

SEQ ID NO: 211979 - protein, 132 aa, Glycine max
  unsure (1)..(132): unsure at all Xaa locations
  Clone ID: PAT_MRT3847_33443C.1.pep
LGTDRSFVYYDHDSSIPYWTRINSLPRAIAYATWTILSLIYDGAXYPLDIELSXPRPDGDDSGSERLEALPASEGLDNSIWILSTADVIDNDSWDDHLVSHGTYTHALIEPLVIPTNTHLSVLHPXDELLYP

SEQ ID NO: 211980 - protein, 93 aa, Glycine max
  unsure (1)..(93): unsure at all Xaa locations
  Clone ID: PAT_MRT3847_33444C.1.pep
QIFGKTWTGEDNHPGGESSDTIDNVKARIQDKEGIPPDQQRLMXAGKQLEDGRTVADYNISEGSTSSLVLRLRGGMQIXVKTVTGKTVTFAAD

SEQ ID NO: 211981 - protein, 59 aa, Glycine max
  Clone ID: PAT_MRT3847_33445C.1.pep
FYQENVKVGTYDGGTMHNNQSVLMFVGNCRKRLGDTLGIDHLSLTFIYLVLVMLYISWI

SEQ ID NO: 211982 - protein, 70 aa, Glycine max
  Clone ID: PAT_MRT3847_33446C.1.pep
YNLGSSVIIPAVSSPEGAQKRKHPAYHMPAPVSASICSIRRALVCCAHGVSVLPRESSALWISPSPHSRT

SEQ ID NO: 211983 - protein, 175 aa, Glycine max
  Clone ID: PAT_MRT3847_33447C.1.pep
RHFVQRWNYAKRNKAPYEQAIPLLMPQHHMVIPHYLGRSREIQIESRNTDNHRVLKREDSFSSSSQDQDIPLLLPQEPDGLDTHEGDQKLNGVISFSHHLDKPRRISSGLPFSFRKAKIVAVGPDTPMKGFVDDLDSEHGLEKMSLDRVAHFDLQSTKPQWWETQERGDQGGFAE

SEQ ID NO: 211984 - protein, 59 aa, Glycine max
  Clone ID: PAT_MRT3847_33448C.1.pep
VELASTGFHADSDPAALTGMAALHLIGDPFDVASTTVSFADRCTRGSSLVPAVPTEMCL

SEQ ID NO: 211985 - protein, 111 aa, Glycine max
  unsure (1)..(111): unsure at all Xaa locations
  Clone ID: PAT_MRT3847_33449C.1.pep
EACILVAGYGHADDMFHNRVNTAYRARTPERECASCRLAVEPHNIFCFETIXPEECVEATKEYMHGEQYRSCSKTCXQHAYLYSRDLVVHPKDTFVDSIFGTVPSYIPYYI

SEQ ID NO: 211986 - protein, 89 aa, Glycine max
  unsure (1)..(89): unsure at all Xaa locations
  Clone ID: PAT_MRT3847_3344C.1.pep
YLNCXXILGXMVKXSSVVLSXXASAMAASXCTWXSWKHVKNLXVXGDXYTQTGXDLQRXSXAXLRSPSATQXTLAGHPPRPQLXDXSPX

SEQ ID NO: 211987 - protein, 245 aa, Glycine max
  Clone ID: PAT_MRT3847_33450C.1.pep
MASTDKSPDPTPAKGPDPTPGKPMSVGQHVIDKSAMMVQSLDPIKQMSQHVCSFAIYSHDMSRQIETHHYCSRLHQNFIQCAVYDSDESKARLLGVEYIVPADVFEAFPPEEQKLWHSHAYEIKSGLLVNPRVPEVVAMPELENLAQTYGKFWCTWQVDRGDRLPMGAPALMMSPQAASPGLVRAELVLERDAKYNFSSKSLKSSRLEIPEPEMINPLADYWKQHGKGFVIDIEETEMKLRPPFP

SEQ ID NO: 211988 - protein, 86 aa, Glycine max
  Clone ID: PAT_MRT3847_33451C.1.pep
LPTDYKCHGFIERLSEAHFERSPSSEHVMYFSSFVYYDRAKLTRVVPLFVGHERMRSVIVVLSWMLTTKSLICWLLCLCYLASLKF

SEQ ID NO: 211989 - protein, 125 aa, Glycine max
  Clone ID: PAT_MRT3847_33452C.1.pep
MASTDKSPDPTPAKGPDPTPGKPMSVGQHVIDKSAMMVQSLDPIKQMSQHVCSFAIYSHDMSRQIETHHYCSRLHQNFIQCAVYDSDESKARLLGLLFFSLSVSIAFTSLNCFASKYYFSCVVGV

SEQ ID NO: 211990 - protein, 101 aa, Glycine max
  unsure (1)..(101): unsure at all Xaa locations
  Clone ID: PAT_MRT3847_33453C.1.pep
RHAYVSSEFGSXTAARRRQXGGKXEFXXGXWRXXXXGIRAQXHLVXXSVLCXXXXSYSXWXXXPXXXXQIXXXPDQXRXAXEXXVSSPSNXLPSRLITKXX

SEQ ID NO: 211991 - protein, 49 aa, Glycine max
  Clone ID: PAT_MRT3847_33454C.1.pep
GRRLLFIMLFACRNWLACQFPLALEFEIETSLIALGHMYIQDLVGIHGS

SEQ ID NO: 211992 - protein, 52 aa, Glycine max
  Clone ID: PAT_MRT3847_33455C.1.pep
TETGSNLFQNLKSNWFNGSTPAQSITMIGNCPPFNNNLGAGSSPKFNLQASF

SEQ ID NO: 211993 - protein, 52 aa, Glycine max
  Clone ID: PAT_MRT3847_33456C.1.pep
SFLVQVRNIDTSSEKLTGYVSFYIHSRFSKASCFNSTESSRPLLFPQSSHNV

SEQ ID NO: 211994 - protein, 114 aa, Glycine max
  Clone ID: PAT_MRT3847_33457C.1.pep
MAAGLSTAANLKPYNLLQPPIPISKPTPPLFFNPLRCFRRSTILRVRPRRRRMSGFTVCVLTEDPKQIKKDEQEEQVNPQVVSARVADKLARKKSQRFTYLVAADMSSFGITSM

SEQ ID NO: 211995 - protein, 67 aa, Glycine max
  Clone ID: PAT_MRT3847_33458C.1.pep
IRKYIKGTIPRYFSIVPNDNLNPLTSEKHTCFNGFKGDVYWKWKTCLKKQQDKLWHYSLCLAVLQAF

SEQ ID NO: 211996 - protein, 83 aa, Glycine max
  Clone ID: PAT_MRT3847_33459C.1.pep
LFFVLFFFFDEKPHEMVLWGYPGESSLQDYPMRRTERKIQVVRALLRNGSLTNLLERWRPVHGILTFSHEYWHNDSAQIKNYH

SEQ ID NO: 211997 - protein, 88 aa, Glycine max
  Clone ID: PAT_MRT3847_3345C.1.pep
RLLHRAFLILTFILSYYISPNIKIPKHDKLPIKQYIRVRFISFFYKNILHQHQVGQLWFSHLVAGMLNQKKKNWSKLIINLFLLKKIN

SEQ ID NO: 211998 - protein, 55 aa, Glycine max
  Clone ID: PAT_MRT3847_33460C.1.pep
PIRSTIEDKTIVKMELRATLIIHYNKMGLFTSTRFETMQPQQYVVLSNVERVADA

SEQ ID NO: 211999 - protein, 73 aa, Glycine max
  Clone ID: PAT_MRT3847_33461C.1.pep
YELHQRKLPPLYILYLFQFLTYTFSFMIILGVGGIFLLYFVLYNIQDSEAVPNTGLNEQWLWYCNFYKAYIVQ

SEQ ID NO: 212000 - protein, 97 aa, Glycine max
  Clone ID: PAT_MRT3847_33462C.1.pep
NVGASVAKLIAKHMDGWTFRGICNTILNAKRMINTYALPLPPAYAALLQVQYAKRNDNEWVDYDIHMPRGLPYGKTHLEANHLERLLRGHILTIGDG

SEQ ID NO: 212001 - protein, 66 aa, Glycine max
  Clone ID: PAT_MRT3847_33463C.1.pep
GEGSESPVYGMAYREGHEIMGYNTLRLGHIAGWPYLKMVTYARKKVHRLKGKGVPYGLNLGPKGIE

SEQ ID NO: 212002 - protein, 159 aa, Glycine max
  Clone ID: PAT_MRT3847_33464C.1.pep
MDGDREKERERRDKDKEREGEKEARERSTRSRIRSERDRDRERDFEMRDGRRFRVKKEASEPEADPERDQRTVFAYQMPLKATERDVYEFFSKAGKVRDVRLIMDRNSRRSKGVGYIEFYDAMSVPMAIALSGQLLLGQPVMVKPSEAEKNLVQSNAFG

SEQ ID NO: 212003 - protein, 43 aa, Glycine max
  Clone ID: PAT_MRT3847_33465C.1.pep
LSQVILCSITNEPHICYEAYMTQVKKTKTLHNDKQAFSHLQNC

SEQ ID NO: 212004 - protein, 76 aa, Glycine max
  Clone ID: PAT_MRT3847_33466C.1.pep
SPNIILDPIHILVWGVSSSTYSLTHILNSCHSNIFLHGSKFIPPLLVTGPILLVSDGPHIFVVVSHLGQKLKSLAD

SEQ ID NO: 212005 - protein, 46 aa, Glycine max
  unsure (1)..(46): unsure at all Xaa locations
  Clone ID: PAT_MRT3847_33467C.1.pep
ELFKGFYXSVHGFSSPYKVKICGTVVRNFWLLALLTLIIIRPDGKT

SEQ ID NO: 212006 - protein, 268 aa, Glycine max
  unsure (1)..(268): unsure at all Xaa locations
  Clone ID: PAT_MRT3847_33468C.1.pep
PFLNLSLFCVRSNMQPQFSQINISVTWRGKKFVVEMNIGANVKDLGQELQKLTNIKEDTMRFIVPQISARTSKLLAPFSKEHALLSLQETSITEARSIIMMGVPTNEVEEVLQNAKTDLRIAGFEDEEKRQKQRISHGPHISLKLPQGQYIFCDFRTLQIPGIELNPPPSEALKRMHMLAADPGIVAVMNKHRWHVGIMTEMAPIGYVGVSPKCILGFNKNHGEEISLRLRTDDLKGXRKYESIKKTLLHELAHMIYSEHDVNFYALY

SEQ ID NO: 212007 - protein, 578 aa, Glycine max
  Clone ID: PAT_MRT3847_33469C.1.pep
MECRRKKENQKSNSTFPDEVLERILGMLKSRKDKSTVSLVCKEWFNAERWSRRSVFIGNCYSVSPEILTRRFPNIRSVTLKGKPRFSDFNLVPANWGADIHSWLVVFAEKYPWLEELRLKRMTVTDESLEFLALKFPNFKALSLLSCDGFSTDGLASIATNCKNLTELDIQENGIEDKSGNWLSCFPDSFTSLEVLNFANLHNDVNFDALEKLVSRCKSLKTLKVNKSVTLEQLQRLIVHVPQLGELGTGSFSQELTSQQCSDLESALKNCKNLHTLSGLWVATAQYLPVLYSACTNLTFLNFSYAPLDSDGLAKLLVHCPKLQRIWVVDTVEDKGLEAVGSHCPLLEELRVFPADPFDEGIVHGVTESGFIAVSQGCPRLHYVLYFCRQMTNAAVATVVQNCPDFTHFRLCIMHPGQLDYLTQESMDEAFGAVVKTCTKLQRLAVSGYLTDLTFEYIGKYAKNLETLSVAFAGSSDWGMRCVLDGCPKLRKLEVRDCPFGNGALLSGLGKYESMRSLWMSDCNLTMNGVRLLAQEMPRLNVEVIKEESYETHQAKKVYVYRSVAGPRRDAPPFVLTL

SEQ ID NO: 212008 - protein, 33 aa, Glycine max
  Clone ID: PAT_MRT3847_3346C.1.pep
ALETRHSYKDRLECDHAFIPHKSALIRILKRRP

SEQ ID NO: 212009 - protein, 103 aa, Glycine max
  Clone ID: PAT_MRT3847_33470C.1.pep
SDGGMRCVLDGCPKLRKLEVRDCPFGNGALLSGLGKYESMRSLWMSDCNLTMNGVRLLAQEMPRLNVEVIKEESYETHQAKKVYVYRSVAGPRRDAPPFVLTL

SEQ ID NO: 212010 - protein, 132 aa, Glycine max
  unsure (1)..(132): unsure at all Xaa locations
  Clone ID: PAT_MRT3847_33471C.1.pep
MAKKKNPLVFMDVSIDGDPVERMVFELFYDIAPKTAENFRALCTGDXLHYKGSFFHRIKGSFAQXTGGESIYGSKFPDESPRLKHDGPGLLSMAVADRDMLGSYFTPHFKAGPPLDRXNNVAFGKLVQGHDV

SEQ ID NO: 212011 - protein, 43 aa, Glycine max
  Clone ID: PAT_MRT3847_33472C.1.pep
TYNTNKLGAIGPIFSLKFMMLQIYKLVTTPIRVPYELHPFTQG

SEQ ID NO: 212012 - protein, 62 aa, Glycine max
  Clone ID: PAT_MRT3847_33473C.1.pep
DLDFLKFQPLHPPFFFIPPPTFGFIRVAIKGVLWLLFPTALWPLGLGPFWGLVFFLTQGFEP

SEQ ID NO: 212013 - protein, 104 aa, Glycine max
  unsure (1)..(104): unsure at all Xaa locations
  Clone ID: PAT_MRT3847_33474C.1.pep
XSYYTXNDSYRPPTAGSETYSPNSKSVRICCMNECPPAXEXPENRDAVRIXPAIISLSRNGTEKTLLSLFSLXXXXXXXXXXAFSLYNKXSLSRNRQSKNEKKK

SEQ ID NO: 212014 - protein, 408 aa, Glycine max
  unsure (1)..(408): unsure at all Xaa locations
  Clone ID: PAT_MRT3847_33475C.1.pep
AYEALENRAQARMWYKAAIKADPLCYEALECLIENHMLTCEEEANLISSLQFGSEDGWLSSFYSCLIKKXYDKENIVVAKFRDLENESCKSDQSDSSFLRTLKSNTDLLACKAEYYHQCGEYQKCFELTNDLLEKDLFHLKTTLVHLAAAVELGHSNELYLMSCNLVKDYPQMALSWFAVGCYYYCIKKYDQSRRYFSKATSLDGTFPPAWIGYGNAYAAQEEGDQAMSAYRTAARLFPGCHLATLYIGMECMRTHSYKLAEQFFTQAKSICSSDPLVYNELGVVAYHMEEYKKAVWWFEKTLALVPTTLSEIWESTVVNLAHAYRKLKMYREAISYYEKALALSTRSVSTYAGLAYTYHLQDDFTTAIAYYHKALWLKPDDQFCTEMLSWALIDESRRGVDPSLEFR

SEQ ID NO: 212015 - protein, 36 aa, Glycine max
  unsure (1)..(36): unsure at all Xaa locations
  Clone ID: PAT_MRT3847_33476C.1.pep
MATWCGRMTELQDRVNLMVWNASXYNLXTAQLPQIG

SEQ ID NO: 212016 - protein, 373 aa, Glycine max
  Clone ID: PAT_MRT3847_33477C.1.pep
MLFSVPFHVTDQQGKKITDSKTIDLIEKALGPKSKSTEGVKNWPSKHVGVHSVGDYTAIELIGRDRPGLLSEISAVLANLHFNVFAAEVWTHNRRIACVLYVNDATNQVADDPKRLSLMEEQLNNILRGCDGEKVARTSFSMGSTHMDRRLHQMLFADRDYESYAVAREVDSPPSLRPRITIERCEEKGYSVVSVKCKDRAKLMFDIVCTLTDMQYVVFHATVSSDGPYALQEYFIRHMDGCTLDTQGEKERVIQCIEAAIRRRVSEGVSLELCAKDRVGLLSEVTRILRENGLSVCRAGVSTRGEQALNVFYVRDASGNPVDMKTMEALCKEIGKTMMVDVKRVPSNTKAPETRGWAKTSFFFGNLLERFLT

SEQ ID NO: 212017 - protein, 98 aa, Glycine max
  Clone ID: PAT_MRT3847_33478C.1.pep
VRIKKKVAALVSPFCSQKKPPLYKMGVGGQVQMVNCFYQVSSFEYPCPDGINPFLSPRNFPIWFLSLKWEFFEEKKNLFFFIPNEGIYRKEKPPRGLF

SEQ ID NO: 212018 - protein, 63 aa, Glycine max
  Clone ID: PAT_MRT3847_33479C.1.pep
IKMIDSRGIKANYASQVTVLHSGGKKVIHIFCSIQLCTHFFLCDNLSFVFTAQKICSVGSYIF

SEQ ID NO: 212019 - protein, 52 aa, Glycine max
  Clone ID: PAT_MRT3847_3347C.1.pep
VPLGSSKAMALLEVPVTSKLCGSNRSTALPLSASVSKVCSVPTMIEPIQRGT

SEQ ID NO: 212020 - protein, 78 aa, Glycine max
  Clone ID: PAT_MRT3847_33480C.1.pep
KFRKKNRNVNSYTSEQDQDTDIAQENLAESPPSSTVFNIDGLVPSPTSSSKRRLVLLSPSCYLHIYLITFRLKSKHYI

SEQ ID NO: 212021 - protein, 67 aa, Glycine max
  Clone ID: PAT_MRT3847_33481C.1.pep
QWRNRFVSTGFSSVHFSSRAYKQASMLLALFAGGDGYRVEENNGCLMLGWHTRPLIATSAWQLAATR

SEQ ID NO: 212022 - protein, 113 aa, Glycine max
  unsure (1)..(113): unsure at all Xaa locations
  Clone ID: PAT_MRT3847_33482C.1.pep
LNIDKEKAQCVVHELTKGRLSNSLIQAVSLLKQRNREEIISSLNNLLTYDKAXPSQRVSXKIPKKLSNLYTIYLKSNPTAKNLSHLQYVLDINNSTSTTLRKIRNRLLNTTSE

SEQ ID NO: 212023 - protein, 79 aa, Glycine max
  unsure (1)..(79): unsure at all Xaa locations
  Clone ID: PAT_MRT3847_33483C.1.pep
MDAYKLRTXRACNRLLWTTNRDDSVTDTSWCSTFAYRGPIYXEDYHVDEKLADXDRERIQXRTVHAPGAKTKRPFEATH

SEQ ID NO: 212024 - protein, 98 aa, Glycine max
  Clone ID: PAT_MRT3847_33484C.1.pep
ATFYPQVHRTLPSHHGIAEHKRKASQYAVQDGRGSHVAPSRWNLLEFRRRYPPQQSGWRIQYVLRSFAQRLSLYYRPSRLIAIITLLSFWQWTVNDQR

SEQ ID NO: 212025 - protein, 80 aa, Glycine max
  unsure (1)..(80): unsure at all Xaa locations
  Clone ID: PAT_MRT3847_33485C.1.pep
GGDEGVIFERTHLLSPXCTRMAXSKXDAWRVESGIPSGIPLTVIRNSIXNEMLILYSYDKXLGQAKALKMILQTFKNFVF

SEQ ID NO: 212026 - protein, 116 aa, Glycine max
  Clone ID: PAT_MRT3847_33486C.1.pep
MEEFRSKSYGDGRMQIEAYRGTNMQDLRCYSASYASSVHPTTTQQTQMGNNDAKFKKGKSTNGSTSKSWSFSDPELQRKKRVASYKVYAVEGKLKGSLRKSFKWFKDRCNRVVYGW

SEQ ID NO: 212027 - protein, 99 aa, Glycine max
  unsure (1)..(99): unsure at all Xaa locations
  Clone ID: PAT_MRT3847_33487C.1.pep
NFLFSWGPFLVAKACLIAGAPKNAFPPQYRGMIYAPNFSCEALRKGVFLSGAVFVVAPLIFYGYFSLFFPEAMAPPVFFXANRVGSPVGMAGFALWALA

SEQ ID NO: 212028 - protein, 82 aa, Glycine max
  unsure (1)..(82): unsure at all Xaa locations
  Clone ID: PAT_MRT3847_33488C.1.pep
PKSIGNXLELFKELILTIIKILCFLKSLRMLTQLHILRAEENSLEVPPREIADKGXHAVAQHMSDLVEKREKKDVNAHPLTQ

SEQ ID NO: 212029 - protein, 58 aa, Glycine max
  Clone ID: PAT_MRT3847_33489C.1.pep
LNPPQFMSLRALQLEGTEKVALKSSIRLCKQPLLQASMLVPCRLPLVLTFAAIYDDSM

SEQ ID NO: 212030 - protein, 215 aa, Glycine max
  Clone ID: PAT_MRT3847_3348C.1.pep
MSSSSSSFFPAHITTDQEFSLIVAALTNVVSGSTSSSSVPEFRFPHSSPPLSSASLMPPPPPSIHTCRECNIAGCLGCNFFPEEQRKKYRGVRQRPSGKWAAEIRDRHRSARVWLGTFETAEDAARAYDKASFELRGPRAKLNFPLVDESLTLQPEMAATEEQINNEDNLNQGMGMDSHEFWDRINEADFHPFMMMMDFTGDSSDSAATGYTLSS

SEQ ID NO: 212031 - protein, 64 aa, Glycine max
  Clone ID: PAT_MRT3847_33490C.1.pep
RHRRAESDSRVQMCQDLIMWMIVLVRDHDPTSNIITMSTMRCAISKSSHTLKCDKKDYDMLYIA

SEQ ID NO: 212032 - protein, 198 aa, Glycine max
  Clone ID: PAT_MRT3847_33491C.1.pep
MVPSEIRGVHYLAPENPFLVPPNFSLLQSDIPNLHLNTLLSNFPNCHFPPSGHEFVVPPSSCLSSNSTSDEADEIQFNIIDERKHRRMISNRESARRSRMRKQKHLDELWSQVVRLRTENHNLIDKLNHVSESHDRVLQENARLKEEASALRQMLADMQIGTAFACTMEDLEDLPCNTSQLKPDPLNQSITPADMIHE

SEQ ID NO: 212033 - protein, 122 aa, Glycine max
  unsure (1)..(122): unsure at all Xaa locations
  Clone ID: PAT_MRT3847_33492C.1.pep
LMVKIFISGNPPVKRSFWAPLVQVFFSNSPSPEPFFACKWAKLEPPFWELIFPKKGWGPKNGFXMWSFEGANQTSGGLGFLFDNPQQFPVFYFFLGIFQNFXIGGKTFMPAFFFSQGFARFF

SEQ ID NO: 212034 - protein, 97 aa, Glycine max
  unsure (1)..(97): unsure at all Xaa locations
  Clone ID: PAT_MRT3847_33493C.1.pep
PKPTQLQQRLGFMHAKNDEATFFFFLPLSSQNQASALFLSLHPLNFHSFRPPSIWARIWXYFSVHASIPRIKPHKNFSPHPGSSLVNQKNTFSFFLS

SEQ ID NO: 212035 - protein, 282 aa, Glycine max
  Clone ID: PAT_MRT3847_33494C.1.pep
MATQLSDRLEPWHTLAGKVVMVTGASSGLGRDFCLDLGRAGCRVVVAARRVDRLESLCDEINSMAAGDGGRSRRAVAVELDVAADDPAVDKYVQKAWEAFGHIDALINNAGVRGNVKSPLELSEEEWNHAFRTNLTGTWLVSKYVCKRMRDAQRKGSIINIASIAGLNRGQLPGGAAYSSSKAGVNMLTRVMSLELGAHKIRVNSISPGLFKSEITEKLMEKNWLNNVAMKTVPLRKFGTSDPALTSLARYLIHDSSEYVSGNNFVVDAGATLPGVPIYSSL

SEQ ID NO: 212036 - protein, 53 aa, Glycine max
  Clone ID: PAT_MRT3847_33495C.1.pep
FLRKKIMIQLNLRIIILLINFNKFNYMSYESFSFLFYDPGYSYKYSLTLFVRI

SEQ ID NO: 212037 - protein, 305 aa, Glycine max
  Clone ID: PAT_MRT3847_33496C.1.pep
MEAQEFFQNTFCPQFPSDSNITPSNANPSAATTDHFLVEDFFDFSNDDDATFDSLPTDVDSPTVTPVDTTTNSNFPASADAHFPGDLSVPYDDLAELEWLSKFADESFSSEDLQKLQLITGVRAQNDAASSETRDPNPVMFNPQVSVRGKARSKRTRGPPCNWTSRLVVLSPNTKSSSSSHSGAEGGSEGRKCLHCATDKTPQWRTGPMGPKTLCNACGVRYKSGRLVPEYRPAASPTFVLTKHSNSHRKVLELRRQKEMVKVQHQQHQFLQLQHQQNMMFDVPSSNGEDFLIHQHVGPNFTHLI

SEQ ID NO: 212038 - protein, 193 aa, Glycine max
  unsure (1)..(193): unsure at all Xaa locations
  Clone ID: PAT_MRT3847_33497C.1.pep
MEAQEFFQNTFCPQFPSGTNITPSNANPSAATADHFLVEDFFDFSNDDNDATAVTDATFDSLPTDVDSPNVTPLDSTTKNSNLPSSSSADAHFSGDLSVPYDDLAELEWLSKFAEESFSSEDLQKLQLISGVRAQNDAASSETRDPNPVMFNPQVSVRGKARSKRTRGPXCNWTSRLVVLSPTPRGRLLLRRR

SEQ ID NO: 212039 - protein, 84 aa, Glycine max
  Clone ID: PAT_MRT3847_33498C.1.pep
STAIEDLISCFPVGYALKSLEWDRKKQFRHRCVCLSLHSGLAPVSPLFGCRTSKPSFGRVLDSEADISPREGGTHFFSPKTWWY

SEQ ID NO: 212040 - protein, 73 aa, Glycine max
  Clone ID: PAT_MRT3847_33499C.1.pep
TQFIIFRLRVVRNNFFSLCYVPLKDRVLWADQFLLSQFRSSLPLNNRDCRIFCHHNMYHGMFPRAGFRACARV

SEQ ID NO: 212041 - protein, 34 aa, Glycine max
  Clone ID: PAT_MRT3847_3349C.1.pep
TWSRVSAQQYPCLLIAGFGCSSLCEWSGTFALEP

SEQ ID NO: 212042 - protein, 55 aa, Glycine max
  Clone ID: PAT_MRT3847_334C.1.pep
SLSLLVPSPPDTYLQPSVISPLNNDSHPLAYAGTYSIRDTTQQNFGGMRPIPTGK

SEQ ID NO: 212043 - protein, 151 aa, Glycine max
  Clone ID: PAT_MRT3847_33500C.1.pep
SISSKVMEALDNRPLSIRLKGLECMKGSLAKARVLYAPVEEIASEGRLLRACQVIIDAYVEAGLVLENDAKQKLKLHATVMNARHRKRNKNTWTRKVDSFDARGIFKQYGSEDWGQYLIREAHLSQRFSFDENGYYHCCASIPFPENMQVE

SEQ ID NO: 212044 - protein, 70 aa, Glycine max
  Clone ID: PAT_MRT3847_33501C.1.pep
LICFNQELKKFPYFLIFVLISKIYKSGGENSILLFSLFTLQVLKKHKIKGKEGICIIMPAPKNRRRVGKV

SEQ ID NO: 212045 - protein, 59 aa, Glycine max
  Clone ID: PAT_MRT3847_33502C.1.pep
QIMDLLHAMSIQIKGSPAWETEQRESIFSVLSHFVFFCASSQFIISFGAYSDKHRFLFE

SEQ ID NO: 212046 - protein, 198 aa, Glycine max
  unsure (1)..(198): unsure at all Xaa locations
  Clone ID: PAT_MRT3847_33503C.1.pep
PIKVSDRLHQVLRWXALGSVEILLTKHCPIWYGYGCGLKWLERFSYINSIIYPLTXLALIAYCTLPAVCLLTGKFIVPEIINYASIILKAMPKRIALTSSLEMHLGGVGQHDCRWNEHFWVIVLTKHHPFGYFYGFLMNLVEVYTNLTSTSYPADALDFAELYTLPAACLLIPHLTVPDISIFASIVFMALAINXGYD

SEQ ID NO: 212047 - protein, 84 aa, Glycine max
  Clone ID: PAT_MRT3847_33504C.1.pep
QGKKGNTGFLKRNQGWCKTKLTLPFKRTNPNKKKDKKINKKKKGGKQTRMHKCGPGSQKSYAPRVWSRKTAAFIFHLSKPNFCW

SEQ ID NO: 212048 - protein, 37 aa, Glycine max
  Clone ID: PAT_MRT3847_33505C.1.pep
SCVRPFLKLCCIQDLIECAVYKKQCLICFTLIPSPIP

SEQ ID NO: 212049 - protein, 62 aa, Glycine max
  unsure (1)..(62): unsure at all Xaa locations
  Clone ID: PAT_MRT3847_33506C.1.pep
XKRXYLSSFCSSLRSXSFVRXPSRRSAMGGEPRXXXSRLRSXSSSVSSSTPSXPTRKSSFVN

SEQ ID NO: 212050 - protein, 38 aa, Glycine max
  Clone ID: PAT_MRT3847_33507C.1.pep
RSSFFWSLNSIVIMCDMKTDQNYMINMRLSNYFSPPTR

SEQ ID NO: 212051 - protein, 54 aa, Glycine max
  Clone ID: PAT_MRT3847_33508C.1.pep
ALCTIYKPKTCHMSHQPINKYVDKSTTQPRARARVMSIHPYNNVRDEKFLGNSH

SEQ ID NO: 212052 - protein, 72 aa, Glycine max
  Clone ID: PAT_MRT3847_33509C.1.pep
KKGTKIGSPENPEAPTPGWAPTPSFKIQGQSFGPLSVLARFSLPLQPEKFPKKLLIFGGGQDSKLPLGGPLI

SEQ ID NO: 212053 - protein, 71 aa, Glycine max
  Clone ID: PAT_MRT3847_3350C.1.pep
TIFKRVLVDCRSSQQCHIFTPSVVSFIGSNSGSNINWSRHMAIACSRSIETSFLSPHRFRIYSAIATKIQI

SEQ ID NO: 212054 - protein, 52 aa, Glycine max
  Clone ID: PAT_MRT3847_33510C.1.pep
HGVCLRFSVRFISFGRTVLLATVSLSLSRFNFRLCTDWSKWLDDFAVQYSPC

SEQ ID NO: 212055 - protein, 293 aa, Glycine max
  Clone ID: PAT_MRT3847_33511C.1.pep
MPSLSVFPSLPSLQNPNLSQPNFFNFRLPSLCHRPLVKSTATFHRRILCKAFRDSGEDIKAVLKSDDGGGSGDGGGDGGGGGDRDAEKKEGPLPEWLNFSSDDAKTVLVALAISLAFRTFVAEPRYIPSLSMYPTFDVGDRIVAEKVSYYFRKPCASDIVIFKSPPVLQEVGYSDDDVFIKRVVAKAGDIVEVRKGHLVVNGVERNEEYILEPPAYEMKPTRVPENYVFVMGDNRNNSYDSHVWGPLPAKNIIGRSVFRYWPPNRIAGTVSKETCSVETTQTQESAETALPSQ

SEQ ID NO: 212056 - protein, 37 aa, Glycine max
  unsure (1)..(37): unsure at all Xaa locations
  Clone ID: PAT_MRT3847_33512C.1.pep
PPKVAARXGXCSPLRPLIDLSCXQNPISCPTAVLAQR

SEQ ID NO: 212057 - protein, 138 aa, Glycine max
  Clone ID: PAT_MRT3847_33513C.1.pep
LAVARSKQTARESTGGKAPRKQLATKAAPKSAPSAGGVNKPHRDRPGAVALREIRRYQKSTELLIRKLPFQRLVREIAQDFKTDLRFQSAAIGALQEASEAYLVGLFEDTNLCAIHAKRVTIMPNDIQLARRIRGERA

SEQ ID NO: 212058 - protein, 81 aa, Glycine max
  unsure (1)..(81): unsure at all Xaa locations
  Clone ID: PAT_MRT3847_33514C.1.pep
AAASSMDLSSPSLAGKDMKLVPSTHRIAKGEHDRTYDLNRSPSRSPWKSPHRIKNEGPFSDQPPNXLTRELPSHYGWDTAG

SEQ ID NO: 212059 - protein, 92 aa, Glycine max
  Clone ID: PAT_MRT3847_33515C.1.pep
LSSEELVICELSQSYITSFGFHGSRKKFRKLEVLKFDYCRILTEVPDVAVLVNLKELSFNRCGNLITVHHSIGCLNRLKILSAYGYSKLTTF

SEQ ID NO: 212060 - protein, 83 aa, Glycine max
  unsure (1)..(83): unsure at all Xaa locations
  Clone ID: PAT_MRT3847_33516C.1.pep
CHHRXPNQGXRXTDMTTXTVEXQLDDLLXSXSXIFHPSHXXPXAFRDDLHADAEPRFRXNESAPXXXKTXTGSEXXRGKCXMS

SEQ ID NO: 212061 - protein, 77 aa, Glycine max
  Clone ID: PAT_MRT3847_33517C.1.pep
HALSAQAIPLLPASDPAMVNANSKLNFLATGSNAENKQRTWLARSLDNVRGQIPSRVHEHAIAEAADTVEEASSDHR

SEQ ID NO: 212062 - protein, 145 aa, Glycine max
  unsure (1)..(145): unsure at all Xaa locations
  Clone ID: PAT_MRT3847_33518C.1.pep
MVSIFTIALFLLGAGKAKEVCYEQIGCLSDAEPXAGTAIMPLKVLPWSPERIGTCLLLYTNKNPNNFQTLLPSDPSTIEASNFQTDMKTRFMIHGFIDNGEENWLLDMCKNMFNVEEVNCMCLDWKKGSQTXYTQAYNNFLIVGA

SEQ ID NO: 212063 - protein, 57 aa, Glycine max
  Clone ID: PAT_MRT3847_33519C.1.pep
LLCVRGYAYSPDFKVKVIWYKHYYFENRKLQTDSGMSSWVATMTPLLENNQTFFAAD

SEQ ID NO: 212064 - protein, 165 aa, Glycine max
  Clone ID: PAT_MRT3847_3351C.1.pep
TTAFVPSKLNPLHSGYQVSPFAHITPLRKKINQPVARLFGPAIFEVSKLEVLFLGMDQKKHPADLPRTYTLTHSDITSKITLSISQTINNSQVLNAFSHGDKNLFKDYPELHDALVWVYFHSNISEFNKVECWGPLKDACAFPSGSHEVVIDGAPQSCQENCECC

SEQ ID NO: 212065 - protein, 77 aa, Glycine max
  Clone ID: PAT_MRT3847_33520C.1.pep
EHKFNGRGGPSKFKEACTLDTIFCIYLVLKQCKLYFHQHDLTTGRTVLHTTVIIFGSPATTKAYSKSVKKNSYKIKG

SEQ ID NO: 212066 - protein, 138 aa, Glycine max
  Clone ID: PAT_MRT3847_33521C.1.pep
SSSSCDNTTSTVSLSLSLSLFQCFTNHTQGRSEWMRCETSQLITIAFFLPLFLTNLQIPCFFRYETLFPSFLFFVLTFYNLSIILFFPSLEIICNVCLAMDSPIFQKSNYLTVKYAFASLFSVFGFIRLRLFSCELTS

SEQ ID NO: 212067 - protein, 53 aa, Glycine max
  Clone ID: PAT_MRT3847_33522C.1.pep
EFLYSGTLIYHVAAMINRSPTLYFQVFNYLLFSSSGWSVLPSHSIVVLEQQPK

SEQ ID NO: 212068 - protein, 181 aa, Glycine max
  Clone ID: PAT_MRT3847_33523C.1.pep
NKTEALFGRPGGDFGGWSRGGGGSNCGESDVVPHTQVSVIKDVIVPYMHLLPRLDLSENKGGIIREKLWDLLVSEPGVIMEEGFPNATGREQSIKGMRTSEFCLHPAGDTPTSCRLFDAIQSLCIPVIVSDIIELPFEGMVDYAEFSVFPAVNDARKPSWLGNHLQSFSKEQKDRFRQNMA

SEQ ID NO: 212069 - protein, 71 aa, Glycine max
  Clone ID: PAT_MRT3847_33524C.1.pep
AFGNFGLPNLCVTTPTPIFGKIGHLPPPMVKLKFRTSMGKAFGPFLTKAFFYKGMGWGNAILAFFLFLIWL

SEQ ID NO: 212070 - protein, 564 aa, Glycine max
  Clone ID: PAT_MRT3847_33525C.1.pep
IRPKGGESREAANFDSELREKGRILDEANEVMKKQEAELEELKRVVREKEEEIEVLLVQREVEREKLRVAEANLEKQAMDWMLAQEELKRLGEDAARHAEESSETLEDFRRVKKLLNDVRSELVSSQQALASSRSKMEEQERLLELQLSELGEQRASVMSYMENLKDAQIEVESERTKLRVAESRNRELERDLKMEKELISELEEELKKERTSLEQAVKEVALLQEELEKKTAEFRETSAVLQVKESELVDAKLEIQRLKSEKASLQGILEEKDLELSSARKMLGDVNQEIYDLKMLMHSKETQLIEANSMLRDKDEHVKVIQNKLNNTNQKAFEAETVVERILDLTNRLVASIKDEDMNSSKPLLDEMGNQLLDQLLEKPANELKWQQKSLENELELAKVTLKEKEMEVLAAQRALTIKDEELKMTLSRLDSKEEELKKVREEVTEDSNDLKRLYAWAQERIGEKSLGDLAIEKLQLEAAQLEVEAATNALQKLAEMSRQLLNKAIMSVEADNYISVPDGNKAPDLIPDTNNPECFEEVKARVARLSSLSEQLVMQAGIVPAN

SEQ ID NO: 212071 - protein, 115 aa, Glycine max
  Clone ID: PAT_MRT3847_33526C.1.pep
MESQTQSELPVVDFTNKNLKPGTDAWVSASQVVRGALEDHGGFLALYDKVSLETYDSVYSEMMNFFDLSIKTKRRKTTEKPIFSYSGQLPGIPLYESVGIMNPLSFDCQKYTHVM

SEQ ID NO: 212072 - protein, 92 aa, Glycine max
  Clone ID: PAT_MRT3847_33527C.1.pep
GVALFVGVLFFPHEFGMERDLCDCFSSQPKVLFAQVFPVAIFFFFQSLTGNFAFLLRLINSSPGFAFLLVPVSPFHNSHVYINPKSSMLVFY

SEQ ID NO: 212073 - protein, 83 aa, Glycine max
  Clone ID: PAT_MRT3847_33528C.1.pep
STLLCSGGKNIFGFAVPPVDKQTVGNCSKGDVARCNLNSPFGQAPPGFCKGNVPYKINRPPNCASTRFLTNHGHLCSFFHRDF

SEQ ID NO: 212074 - protein, 71 aa, Glycine max
  Clone ID: PAT_MRT3847_33529C.1.pep
HESLSLASSITLTVVKRVTTYLLYFFPCVPLVKLLNSCTRNICSCDGINYYFTNYAIYETKEHTFICFHVL

SEQ ID NO: 212075 - protein, 125 aa, Glycine max
  Clone ID: PAT_MRT3847_3352C.1.pep
MRGSHSAQGASIHQHYWSYDCHSCHCDSFHIVNNIQEKVVMFRISALNSKRDEERMGVYSRWRLHYVGLKRAVSLDKYAQELPEVVSFSVEQSGCLRENNWAESMIKTIFSRVIDSGHGKAASPR

SEQ ID NO: 212076 - protein, 82 aa, Glycine max
  unsure (1)..(82): unsure at all Xaa locations
  Clone ID: PAT_MRT3847_33530C.1.pep
PQAEENLTKNTKISFTRIRNXKRERXLRYIERVXMKRKREFRPKKKAGSHGEEAFAEEENIPQGRIKMYDARIVVQKETDGI

SEQ ID NO: 212077 - protein, 86 aa, Glycine max
  Clone ID: PAT_MRT3847_33531C.1.pep
ISFQISIFQMSCTMVKYSKNKSALQLLSYKIAIFLTYHFEAHSSKECSLFCVDKKNCHRKIIRTMIRTKHFIHRITKIPKKMEHTS

SEQ ID NO: 212078 - protein, 157 aa, Glycine max
  unsure (1)..(157): unsure at all Xaa locations
  Clone ID: PAT_MRT3847_33532C.1.pep
RRAMALNRLAQXXARLYALAKLPLPSINMHLIKLIIWWRFLCGSLIKLQLQTTLGAMYCAGAGSYAAALLPEAYGSAACVVYHPAMLLLACVQPLILPASASAKLSFATLTIAMLRYTSSWAALRNPAFVTLLVGYFAVAYPQPPCRASLALPVTDL

SEQ ID NO: 212079 - protein, 80 aa, Glycine max
  Clone ID: PAT_MRT3847_33533C.1.pep
KLPGLYGVNISSWGLPALCSNCWKAAGYTVCNGVSRSLTYWCGLVQSYAFSGLGFLVWLPAHLRFVVKRVVFLILRLLPG

SEQ ID NO: 212080 - protein, 137 aa, Glycine max
  Clone ID: PAT_MRT3847_33534C.1.pep
YIRSENNRLRLKPTPLNMLGGIEATICSATTTRFLFKLVGTTAALTGYFIANVFDIAPFYMNKFKPSCNPNTLIKTSNGMKQDPLTCNNRINSWIRPKGCTKGINDPTLWTTAKKSMPRNYSYLRTALMNCRNLLYA

SEQ ID NO: 212081 - protein, 97 aa, Glycine max
  Clone ID: PAT_MRT3847_33535C.1.pep
IKDITLFFSEPIMEGDWQRISSYAYTIRQTITTQAFAHACHNQNTPPILIKNISSAMSSEAHDHRPGEWGVVKLQTVIIHHLIMFQACCSVALQFEE

SEQ ID NO: 212082 - protein, 48 aa, Glycine max
  Clone ID: PAT_MRT3847_33536C.1.pep
ESYLEVVGRSPTLKLACRWLLTVIGLMLMSCFVKFPFKQNHRPVICQC

SEQ ID NO: 212083 - protein, 53 aa, Glycine max
  Clone ID: PAT_MRT3847_33537C.1.pep
FTTRWFWYLKDQTKLLKDVQFNTQNYFPFSCQSLMKIKSATQLKSKMAKDFII

SEQ ID NO: 212084 - protein, 179 aa, Glycine max
  unsure (1)..(179): unsure at all Xaa locations
  Clone ID: PAT_MRT3847_33538C.1.pep
EFGTRTQRSKGNPKAGGKSNFNPKLYEKPGLTEDEILEIKEAFDLFDTDGGGSIDPKELKAAMVSLGFEAQNQXTIYQMISDLDADGSGAIDFKEFLDMMTARMSDRDTREDIEKVFKLFDHDKAGRINIKDLRRVAQELGETMDDAELLEMIERADSDGDGLVSLDDFYNIMTKKTFA

SEQ ID NO: 212085 - protein, 35 aa, Glycine max
  Clone ID: PAT_MRT3847_33539C.1.pep
VNFIHALGTLLLHILRYHCSLLIIFIYCIPLYPFL

SEQ ID NO: 212086 - protein, 100 aa, Glycine max
  Clone ID: PAT_MRT3847_3353C.1.pep
DRKTRCKMSQVQSITLKHLSLPTHTFVPSKFKIPLNRNFSLTPRFTFSSSLSVKCYHPNLVQPKPFPPLPQRPPFAELPQQRLYVGYSVYTKKGMLTVIP

SEQ ID NO: 212087 - protein, 65 aa, Glycine max
  Clone ID: PAT_MRT3847_33540C.1.pep
YSIAIYTSLYLYIYPASEKFIAASATLHTPTLTPTTPISLCLSLIQGLKTLITARLILSEPHRVT

SEQ ID NO: 212088 - protein, 109 aa, Glycine max
  Clone ID: PAT_MRT3847_33541C.1.pep
IKKRGGIFFLYPKDFFFNSIWKKKICVGGGGKKIFPPPREKKIPPERGFLYGGVKEKKKGGAALKFRIWFWSSGKTKICSMPLGFCLPLIESNNCFFLPRSNQIKSVRE

SEQ ID NO: 212089 - protein, 55 aa, Glycine max
  Clone ID: PAT_MRT3847_33542C.1.pep
CGKHHGSINFIGHALSLYSADGYLTNPALGPVARANLSAPYIARPQGGPPYVYAL

SEQ ID NO: 212090 - protein, 72 aa, Glycine max
  unsure (1)..(72): unsure at all Xaa locations
  Clone ID: PAT_MRT3847_33543C.1.pep
QIRIQRDSAVXIILYAVYYDIYRSFSHYSNSNSNLEILLPLSVPAFSPLSHYYMSVRHYPPYGYTCKLLKTL

SEQ ID NO: 212091 - protein, 94 aa, Glycine max
  Clone ID: PAT_MRT3847_33544C.1.pep
YTLFFFGFNSNPVLLNYQQFLLEKFFFLSKVSFKAKHFVLITVCNGITYQMTCYIQGHKPCTILWADLGVLGTLCTKVAAIFTQNYLFGSSREC

SEQ ID NO: 212092 - protein, 206 aa, Glycine max
  unsure (1)..(206): unsure at all Xaa locations
  Clone ID: PAT_MRT3847_33545C.1.pep
PGPLLFGPPESESKVXLDRVCEAFISLKQKIFEIXKENSSFSPNVLKGAPLPPSLFRGGGGANPSSREFAPFPAXWGPGXKFGPPPGGVYNGSGAPPLFCPLLPASQVVKKQTSPPPKGVQMPPFFFSRGPKTFFPFQPVLAPLENCFPIWEKDDNPPLLSFSPPPGPKKSNWVNCCGFFFLGRFFRPFCPQNVKKRIFFLLPELF

SEQ ID NO: 212093 - protein, 102 aa, Glycine max
  Clone ID: PAT_MRT3847_33546C.1.pep
IASFRKDEESSIYDSVLQGPQNGLNIVECNHFSNLEQTGETGSSSVRGNPPSPGPQDWVGQTQRSRARNSSTIETLSGVSFKKKNSLTGISPEGANKECPLR

SEQ ID NO: 212094 - protein, 70 aa, Glycine max
  unsure (1)..(70): unsure at all Xaa locations
  Clone ID: PAT_MRT3847_33547C.1.pep
HHFQQHFIFPFHSNTLGKCFKRNVAVPILSFFNYTLYLKFLFFSSNXLQQPPPFFFFFYPNSNFYFHINL

SEQ ID NO: 212095 - protein, 52 aa, Glycine max
  Clone ID: PAT_MRT3847_33548C.1.pep
KVQSCHHQWHHALCAIRSNLYSLDLSLVIYVYNASASRLDIADFKQCKEHRD

SEQ ID NO: 212096 - protein, 108 aa, Glycine max
  Clone ID: PAT_MRT3847_33549C.1.pep
NSPFNPVNKDPQTPLKPWEKKQEAFGGIPLFFLKFKGGGPQSFPPFFLVTANLQFDPTFFPFWGLKGGPFWGGDNLPVLRGGHFLFQGGQNVPHGGPFLPIWKKTKFF

SEQ ID NO: 212097 - protein, 70 aa, Glycine max
  unsure (1)..(70): unsure at all Xaa locations
  Clone ID: PAT_MRT3847_3354C.1.pep
PVATVGISENTGIALACAMNSSFRGRASSDIYTICSQDCELWNPACTKAMTMSFNPNPCSXDAWSSGNFL

SEQ ID NO: 212098 - protein, 51 aa, Glycine max
  Clone ID: PAT_MRT3847_33550C.1.pep
TPSHIGPKQPSRQSLAHSVPILNIEPFIAQRHNRSAENGGGHSRSLSAGSS

SEQ ID NO: 212099 - protein, 153 aa, Glycine max
  unsure (1)..(153): unsure at all Xaa locations
  Clone ID: PAT_MRT3847_33551C.1.pep
MDAKRFIQLVEEKKKKIMERKEAPLKWEQKLEAAAEAKERKLKVAKHTKRSGSDSDSDYDSDDESRKTSKRSHRKHRKHSHYDSGDHEKRXKKSSKRKTKKWSSESSDYSSDDSESSFEEERRRKKKQSKKLRDRGSRSDSSNYDSTADELSK

SEQ ID NO: 212100 - protein, 333 aa, Glycine max
  Clone ID: PAT_MRT3847_33552C.1.pep
MDAKRFIQLVEEKKKKIMERKEAPLKWEQKLEAAAEAKERKLKVAKHTKRSGSDSDSDYDSDDESRKTSKRSHRKHRKHSHYDSGDHEKRKEKSSKRKTKKWSSESSDYSSDDSESSFEEERRRKKKQSKKLRDRGSRSDSSNYDSIADELSKRKRQHKRQRPSKFSGSDYSTDEGDSLVQKRNHGMHSKRHRQSESSESDLSSDDAPHKKGHRKHHKHHKRSHNVELRLSDSDYRSHGQRSRSKSLEENSEDESKKRSMDKKSGRHHHHRHHHHRHHHHRHHLDDERNYMQQHSPKFNGKHGEELDKTETEKKDGGHHESRAMVENNDGQIF

SEQ ID NO: 212101 - protein, 185 aa, Glycine max
  unsure (1)..(185): unsure at all Xaa locations
  Clone ID: PAT_MRT3847_33553C.1.pep
MDAKRFIQLVEEKKKKIMERKEAPLKWEQKLEAAAETKERKLKATKHKKRSGSDSDSDNDSDDESRKTSKRSHRKHRKHSHYDSGDHEKRKEKSSKRKTKKSSSETSDYDDFESSSEEERRKKKQSKKLRDRGSRSDSSDSDSIADELSKKKRHHXRQRPSKFSGSDYSTEEGDSLVRKRNHGKH

SEQ ID NO: 212102 - protein, 86 aa, Glycine max
  Clone ID: PAT_MRT3847_33554C.1.pep
MDAKRFIQLVEEKKKKIMERKEAPLKWEQKLEAAAETKERKLKATKHKKRSGSDSDSDNDSDDESRKTSKRSHRKHRKHSHYDSGD

SEQ ID NO: 212103 - protein, 160 aa, Glycine max
  Clone ID: PAT_MRT3847_33555C.1.pep
WFAIGQGLSSCTLIKELYLVGNKISDVEGLHRLLKLTVLELSFNKITTAKALGQLVANYNSLKALNLLGNPIQSNINDDQLSKAVCGLLPKVVYLNKQPLKANRTREILSDSVARAALGNSTRSCERRSVRRVGHGGSNLSRGNSRNASVSQKSMNRTRR

SEQ ID NO: 212104 - protein, 40 aa, Glycine max
  Clone ID: PAT_MRT3847_33556C.1.pep
LVIISKLAKILPMLFCKQVAPKAVLVEIDVEPSAAHVPLT

SEQ ID NO: 212105 - protein, 98 aa, Glycine max
  unsure (1)..(98): unsure at all Xaa locations
  Clone ID: PAT_MRT3847_33557C.1.pep
HVPHDMIIVPTGSTRAGGMCXLHKLKYGSPYGAESQSGNGSSQPSEIXIXQAFHQGXCFAGIAKKIEGSQWFVSAKDLPLHIVCQIAPHGMRANRIKV

SEQ ID NO: 212106 - protein, 59 aa, Glycine max
  Clone ID: PAT_MRT3847_33558C.1.pep
NTNRFYTDNKELKNDQLHQAPSKFRLHTYTNILFLLIIHMTIQHLTHSKTLKHHINAYN

SEQ ID NO: 212107 - protein, 101 aa, Glycine max
  Clone ID: PAT_MRT3847_33559C.1.pep
KYGGWRSKKWRMVQPFKRGCATTFAFVRVQGRCGIAFAGSSAGARRRQVPVLVATGSCVQAVGSSLLGARWLLRAGSLQGAGCRSWLRAAFCAAFPRCAFE

SEQ ID NO: 212108 - protein, 141 aa, Glycine max
  unsure (1)..(141): unsure at all Xaa locations
  Clone ID: PAT_MRT3847_3355C.1.pep
RPLVRPLFRPRVREKVVLKFSQEDLLTAWSTNVXVPYLSLLPYGCAYXYAMWHDSSVSTIPGDLVFGVKLTTIIYMIAFGLKSEISGSLLXAPFLFHSTYTVLNHMATXRTPLNVXSSKQSFCXYFIDLLSGRILLYKSGD

SEQ ID NO: 212109 - protein, 74 aa, Glycine max
  Clone ID: PAT_MRT3847_33560C.1.pep
KQKKISEKEHENIKRAEDAWSGGGGETECAAAWDEVEEVSETASHDREKQKQSDPLVNDCKRNTETDERRTYEN

SEQ ID NO: 212110 - protein, 52 aa, Glycine max
  Clone ID: PAT_MRT3847_33561C.1.pep
KTINYRTSTHHHPNKKIKQLGKGLRSLLIIVELIGRLIQTDLNKFILQQIGT

SEQ ID NO: 212111 - protein, 85 aa, Glycine max
  unsure (1)..(85): unsure at all Xaa locations
  Clone ID: PAT_MRT3847_33562C.1.pep
MPIRNIYVGRPEEATHPNTLKAALTEFIXTFIFAFCVSCSRISYNKLTDNGADTPAGLISCFIVHALRLFVAVYVSANISGGHVN

SEQ ID NO: 212112 - protein, 84 aa, Glycine max
  unsure (1)..(84): unsure at all Xaa locations
  Clone ID: PAT_MRT3847_33563C.1.pep
MAXXVSIEVWXPXGXYXXXSTKXMPGXRWXXLLXXXDXRXEICXXKXTXLXVXDIIAXXXDKXXGLXGQLXEDWGRXXXXPLSK

SEQ ID NO: 212113 - protein, 70 aa, Glycine max
  Clone ID: PAT_MRT3847_33564C.1.pep
MEKMNKAFEKVKIMVGMDVEDEEQQAAALDNSNSFAFMDDFNRNCTLSTTQSMLVFFKPIKFAIAFTLGN

SEQ ID NO: 212114 - protein, 262 aa, Glycine max
  unsure (1)..(262): unsure at all Xaa locations
  Clone ID: PAT_MRT3847_33565C.1.pep
LVKVLGCCVXREEKMLLYEYMPNRSLDSFIFDPAQSKLLDWPTRFNILCAIARGLLYLHQDSRFXIIHRDLKASNILLDNNMNPKISDFGLAKMCGGDQVEGNTNRIVGTYGYMAPEYAIDGLFSIKSDVFSFGVLLLEIISGKKNRTVTYEEHSDNLIGHAWRLWKEGIPEQLIDASLVDSCNISELVRCIQVGLLCLQHHPEDRPNMTTVVVMLSSENSLSQPKVPGFLIKNISIEGEQPCGRQESCSTNEVTVSLLNAR

SEQ ID NO: 212115 - protein, 178 aa, Glycine max
  Clone ID: PAT_MRT3847_33566C.1.pep
MEKMNKAFEKVKIMVGMDVEDEEQQAAALDNSNSFAFMDDFNRNCTLSTTQRLYGFAICFASGLTCTLLSMLVFFKPIKFAIAFTLGNLLSLGSTAFLIGPKRQVTMMLDPARIYATAIYIASMIIALFCALYVHNKLLTLLAIILEFGALVWYSLSYIPFARAMVSKIMVSCFDTEF

SEQ ID NO: 212116 - protein, 143 aa, Glycine max
  Clone ID: PAT_MRT3847_33567C.1.pep
MRHQWRLLHHLLRSRPRITYHSQVLPYSSSIPRRFAANSTFPLNPSFRRFSSEPVLAQADTDHLLVADIFSKPVDSEDFKTLLGSNRVSITHDAVLAVLGKFDSNVDAARRFFQWVSENHPERLSSKCYNSMLCVLGTNGFVD

SEQ ID NO: 212117 - protein, 238 aa, Glycine max
  Clone ID: PAT_MRT3847_33568C.1.pep
LQAVPESILKKRKRRDERKQRQLFRSVKGNLNRIRKRRQIFLRAEKYVKEYRMKERAELKIARDARKQGNFYIPGEAKLAFVVRLKGINKIPPKPRKVMQLFRLRQINNGVFIKLNKATLNMLRIIAPYVTWGYPNLKSVRELLYKRGFGRIRGQRIPITSNRMIETHLKRYNIIRMEDLVHEIFTVGRNFKYATHFLWPFKLNTPTGGWKRKSVHYNDGGDFGNREDLINKLLRSMV

SEQ ID NO: 212118 - protein, 87 aa, Glycine max
  unsure (1)..(87): unsure at all Xaa locations
  Clone ID: PAT_MRT3847_33569C.1.pep
SKPHFFELIFPINVWGLNNGVGMSRSDWANQTSWHLSFLIDNPKQSTVFDILLXISQDFEIAGNTLMPAFSVPQATAIFFEYAKFSH

SEQ ID NO: 212119 - protein, 38 aa, Glycine max
  Clone ID: PAT_MRT3847_3356C.1.pep
NALMGRVALVLSRGPWLINSAIPSFSTIIAPKLFLRGP

SEQ ID NO: 212120 - protein, 53 aa, Glycine max
  Clone ID: PAT_MRT3847_33570C.1.pep
EPVLIAVWRENHFRGLWPKRFRIIFPTEIHVIFLSPISDVNSIGRMHIHINTK

SEQ ID NO: 212121 - protein, 42 aa, Glycine max
  Clone ID: PAT_MRT3847_33571C.1.pep
YKPDSSLRRNFTVRCLYENETYGGGGVEEVSVGVEDRTSAAE

SEQ ID NO: 212122 - protein, 58 aa, Glycine max
  Clone ID: PAT_MRT3847_33572C.1.pep
VDDSNNLGLRIHRMLKLGLRVAEGAPDAHADMPAHEDADAHAHGSTTEQADEHSLICL

SEQ ID NO: 212123 - protein, 106 aa, Glycine max
  unsure (1)..(106): unsure at all Xaa locations
  Clone ID: PAT_MRT3847_33573C.1.pep
MELSVVARNMEEVVLLVDDLRSLSGISRCRICHEXTLRALKPCKXPCACSGTVKFAHRDCIQTWCIEKGNTTCEICLXQHESGYTAALERSQVADAALIIRDSMQI

SEQ ID NO: 212124 - protein, 57 aa, Glycine max
  Clone ID: PAT_MRT3847_33574C.1.pep
LYRLMILPLPMASLRILLYRASHVFADHPTAEAGLNIAEWVHPDGNLTVRDESVLIQ

SEQ ID NO: 212125 - protein, 48 aa, Glycine max
  Clone ID: PAT_MRT3847_33575C.1.pep
PRRLIQPLRPALILRWSLRTTRPRDPRIDDAGRHYLGLARGVLGVRAR

SEQ ID NO: 212126 - protein, 58 aa, Glycine max
  Clone ID: PAT_MRT3847_33576C.1.pep
AKDVEVQKQRRELSDKDYHHPPPSPLFDPQEHTQCSFYIALIAELIPTLLLLYVTALT

SEQ ID NO: 212127 - protein, 99 aa, Glycine max
  Clone ID: PAT_MRT3847_33577C.1.pep
SRCKRECHLILALGASVSARKAVPSTTSPFRRLLSPYKKQVRSGVMGTAAPEFQPVHGSQPYGFKLAHASKRMNEILLLRSHRAPTHHADASSICRQQA

SEQ ID NO: 212128 - protein, 51 aa, Glycine max
  Clone ID: PAT_MRT3847_33578C.1.pep
LVVDRERTNMTNAVLLMRRYIVGKFILDVYRKTALKLKRAFVHAWALKKKL

SEQ ID NO: 212129 - protein, 64 aa, Glycine max
  Clone ID: PAT_MRT3847_33579C.1.pep
ARTAAEKERGWRPGEASTPINHSGIPQRQGTEHWGGHSKGWDDDQSTSHAIKEVVITKGRRTNI

SEQ ID NO: 212130 - protein, 63 aa, Glycine max
  Clone ID: PAT_MRT3847_3357C.1.pep
FSCLSQSLHSPMRVTMIMSLSMFGSSQASFHCHVETHHAHPCYVPWGGVLMHCLTQILHFFHF

SEQ ID NO: 212131 - protein, 80 aa, Glycine max
  Clone ID: PAT_MRT3847_33580C.1.pep
SMKVIRIKFSRYLFIIVVLYHKRNFQTWNRSCGLIIYRVIPMALKTILGTSSTYAHSSRLTVICGLCATTCLHFKCEIKI

SEQ ID NO: 212132 - protein, 108 aa, Glycine max
  unsure (1)..(108): unsure at all Xaa locations
  Clone ID: PAT_MRT3847_33581C.1.pep
MKDDFVFLKCLSLVWATYIGPADPSFFHLHDPSSLLWLPSSKTNTYIMLFVINRGNKLFFQMLTPHAKNKFDTIFFLPNTFFAQFAKEVXYPLKKGRIPFFEIQFEHR

SEQ ID NO: 212133 - protein, 56 aa, Glycine max
  Clone ID: PAT_MRT3847_33582C.1.pep
KLTLIGDSKNDWDGIKSEEVKNSDLERSYIIRNDFSVCFRLSNLGSATQAKGNMCP

SEQ ID NO: 212134 - protein, 86 aa, Glycine max
  Clone ID: PAT_MRT3847_33583C.1.pep
TPKGFGFILKGYFFPLVKNPKKIFGNPFFKNPLKTGGFLPKFGSRFFFLPFIRAGEQEVSKGWPFLIQPGGGILPLFKKRVKKRGF

SEQ ID NO: 212135 - protein, 109 aa, Glycine max
  unsure (1)..(109): unsure at all Xaa locations
  Clone ID: PAT_MRT3847_33584C.1.pep
RYEDKVDCIYXPVPGAFVINIGDLLQFITNDRFKSAEHRVLANDVGPRISVACFFSPSAKTSLKLCGPIKELLSEENPPKFRDITFGDYEAYYLAKGLDGTSALTRYRI

SEQ ID NO: 212136 - protein, 101 aa, Glycine max
  unsure (1)..(101): unsure at all Xaa locations
  Clone ID: PAT_MRT3847_33585C.1.pep
LTQSGGFCFEEGPTRGXPXRPRHNQQPEGKRTTPGAHYTSPLEMNRLCXLELHITWEYHNSNRTKGGSKTSPGIKDLKITHFPLLYCSHKNKGQYSQFLTV

SEQ ID NO: 212137 - protein, 70 aa, Glycine max
  Clone ID: PAT_MRT3847_33586C.1.pep
DTQLVSKKQARVGLPLGLVLMVTHVKAYRFGRWTNAHATLYRRRDPSVTMDGACHYGNLHSQRYGTDTSE

SEQ ID NO: 212138 - protein, 109 aa, Glycine max
  unsure (1)..(109): unsure at all Xaa locations
  Clone ID: PAT_MRT3847_33587C.1.pep
XLCXXXXCFXXXXWXLXXXXXXXMXXXXVXXXXCLXXXVVXXXCVXXXXCXXXXVXGFXSXXXVXXXXCXXXXXXXXXXGXXXCXGSLXFVXXVXFXXXTDXXXXRXCD

SEQ ID NO: 212139 - protein, 54 aa, Glycine max
  Clone ID: PAT_MRT3847_33588C.1.pep
IFFFFFLFFFFFFFFFFFFFLFFIFLFFFLKFKKIKKKKKKKSLKTRTRGGTGG

SEQ ID NO: 212140 - protein, 64 aa, Glycine max
  Clone ID: PAT_MRT3847_33589C.1.pep
LCGAQAAGGIYVSDIFSIPIPKARSFYYGFYAKGFNRMRNLPLTPDLCILLVRLTMVAAEEVLE

SEQ ID NO: 212141 - protein, 84 aa, Glycine max
  Clone ID: PAT_MRT3847_3358C.1.pep
KRMKPQGPLINRKTSLSLKARPPGFYLKGPIGGWEEPPNQKEKAPPFSFLKFFLNKGVREGYFQIKGGRASQKVVGPIDSRFFN

SEQ ID NO: 212142 - protein, 103 aa, Glycine max
  unsure (1)..(103): unsure at all Xaa locations
  Clone ID: PAT_MRT3847_33590C.1.pep
INLFLRVLSSVVFSCRKFYCDDSRNLQHIQQLEFGKNEEENKWPPWLRPFLXKQAFFVQCKVHTDFHKSECNTYCSDCMNGALCSDCLASNREHKAIQVKTLG

SEQ ID NO: 212143 - protein, 43 aa, Glycine max
  Clone ID: PAT_MRT3847_33591C.1.pep
TKEVFKCFPSNALVRRPFQPVKSSLELYDVQTKHYKSVHALEH

SEQ ID NO: 212144 - protein, 83 aa, Glycine max
  Clone ID: PAT_MRT3847_33592C.1.pep
FLHTLQHFIRIDPLCCWCYIDPTIIIIIVIVVSFLMNGKSSCLPVIALGKQRQTRFCAGNENHHIAVFFKHRWQLYCIAKCTS

SEQ ID NO: 212145 - protein, 28 aa, Glycine max
  Clone ID: PAT_MRT3847_33593C.1.pep
HECFLTFFIFKKSSLSEKLNMIVHAVNC

SEQ ID NO: 212146 - protein, 147 aa, Glycine max
  unsure (1)..(147): unsure at all Xaa locations
  Clone ID: PAT_MRT3847_33594C.1.pep
MGGGGRDVXLGANKFPGRQPIGTGGHSQYDGEGYQEPGPGPLGDPTGVYVMGLGEGGVXXFVATFLCLYITGLTVMGGAGAXSKCGTGGIQGIGWGFGGVIXPLXYGAGXISXGHINPGGTFGLVLARXVXLPXGIFYIVMRCLGGI

SEQ ID NO: 212147 - protein, 78 aa, Glycine max
  Clone ID: PAT_MRT3847_33595C.1.pep
MGLLMIMILAFPEGKHKGSTKSLLGCNSVLATVREIPKVAESMALRLASGYAQAKTQWVFSKTGELFLRFKVYVVLYD

SEQ ID NO: 212148 - protein, 87 aa, Glycine max
  Clone ID: PAT_MRT3847_33596C.1.pep
KFGPVCFFSGILGPQALICFFPSPKGLIKKNRFSLRFFFQKRPRPAFLVPPPCLFGRGGLGFPRSQERIPLFHLCKVFPEKKKNNRF

SEQ ID NO: 212149 - protein, 146 aa, Glycine max
  unsure (1)..(146): unsure at all Xaa locations
  Clone ID: PAT_MRT3847_33597C.1.pep
MGQWLGLAQIDQTTVAIIENCGKFREALXPGCHLLPCRIXQQIAGYLSLRVKQLDVRCETKTNDSVFDTVVASVQYRALADKAYDAFYILSSTTEQIQSHVXDALRATGTKLNLDDACEQTNDLAQAAXDDLEKALCAYGYEIVPL

SEQ ID NO: 212150 - protein, 93 aa, Glycine max
  Clone ID: PAT_MRT3847_33598C.1.pep
LGFLWSHLVHLLSITATHCLAYAFALASVVHVTSLLLLWILIVLTYLLSNLPKRKFINLGLPPFVCVVTRFISRLNLLSNLCCSLVLSPLPPK

SEQ ID NO: 212151 - protein, 64 aa, Glycine max
  Clone ID: PAT_MRT3847_33599C.1.pep
CYDRGYVSIRNAIAYLMHRTKPKVAVNMCSGGSSTGLVSVTQSNRYEVKDKRRDVISQAGWLYV

SEQ ID NO: 212152 - protein, 92 aa, Glycine max
  Clone ID: PAT_MRT3847_3359C.1.pep
PREEDEPYDSYLKLLRSMDTCVISGDADATLEVAHQDTAAVADDGCDQYVAGTLPMSPVNDALKECAECPTAYDQGINNGDDHHNLNSDTVN

SEQ ID NO: 212153 - protein, 74 aa, Glycine max
  Clone ID: PAT_MRT3847_335C.1.pep
RPQPIAKGLSCRKGAFTPKQKESPILKKPHISNIVAFHSLGREQVLNLLGFALNRVQSYGTHFIRRIVYRTILC

SEQ ID NO: 212154 - protein, 95 aa, Glycine max
  unsure (1)..(95): unsure at all Xaa locations
  Clone ID: PAT_MRT3847_33600C.1.pep
GILELWNCFGNKCEGGYLSLDDMFLLAMLDDVFWSCFMCVCVCVCVCVYIYIYCLIVALFFKCFQLLLFMFKXKIQXKKKKKKKKSGRFRGSSYV

SEQ ID NO: 212155 - protein, 72 aa, Glycine max
  unsure (1)..(72): unsure at all Xaa locations
  Clone ID: PAT_MRT3847_33601C.1.pep
MHAQVVAXPVWQEVKFETSFLYLPDLDXCXNWAKGSRIPFLGRGWIXPCLEFELEHGFVYREHNRSPGYYDG

SEQ ID NO: 212156 - protein, 54 aa, Glycine max
  unsure (1)..(54): unsure at all Xaa locations
  Clone ID: PAT_MRT3847_33602C.1.pep
XGKFMCYNFVLPNCRRPDISDGLXRLKCRTLIFVKKXXKQTKXXXPKXXGXAXX

SEQ ID NO: 212157 - protein, 502 aa, Glycine max
  Clone ID: PAT_MRT3847_33603C.1.pep
QTSNGYIKLKIDRARECESACSRNCSCVAYAYYLNSSICQLWHGQVLSLKNISTYLDNSDNTNPIFYLRLDASELVTADSNPTNATELATDFRKHENLLRNLLLIVILILLLAFLILGLLVYWTRRQRRKGEDLLRFHVSMSMKVEDSELAEAHRGAKVKKKEVKLPLFSFVSVAAATNNFSDANKLGEGGFGPVYKGILLNGDEVAVKRLSRRSGQGWEELRNEALLIAKLQHNNLVRLLGCCIDRDEKMLIYELMPNKSLDVFLFDATKRRMLDWGTRVRIIDGIAQGILYLHQYSRFRIIHRDLKASNILLDTNMNPKISDFGMARIFGDNELQANTNRIVGTYGYMSPEYAMEGLFSIKSDVFSFGVLLLEILSGKKNTGFYQTNSFNLLGYAWDLWTNNSGMDLMDPALDDSDTTSSSMHTVPRYVNIGLLCVQESPADRPTMSDVVSMIGNDTVALPSPKPPAFLNVRGNQNSILPASMPESFSLNLITDTMVEAR

SEQ ID NO: 212158 - protein, 71 aa, Glycine max
  Clone ID: PAT_MRT3847_33604C.1.pep
RNRKCSGSDPTRPFTRFAHSFSYASGETNTYELLIMGTDVSIYTDANGSFIDKNSLFVFELGGLLSEAGAQ

SEQ ID NO: 212159 - protein, 94 aa, Glycine max
  unsure (1)..(94): unsure at all Xaa locations
  Clone ID: PAT_MRT3847_33605C.1.pep
PEVRXEDIDEWLTRFVHPIRQLAXPXKRSIEDRHAYGQHRPXSQLRRNMTPLXSQNHPVNRFEKDHVVLVLRVGARAGGGNALAAHTIVSLGLV

SEQ ID NO: 212160 - protein, 97 aa, Glycine max
  Clone ID: PAT_MRT3847_33606C.1.pep
MAARSYSPIMVALSLLLLVTFSNVAEAYTRSGTLRPSDCKPKCTYRCSATSHKKPCMFFCQKCCAKCLCVPPGTYGNKQICPCYNSWKTKEGGPKCP

SEQ ID NO: 212161 - protein, 47 aa, Glycine max
  Clone ID: PAT_MRT3847_33607C.1.pep
IENISLLFLFFMKENVTIRGIWVPLGQIVVFPTAYMELSCTGAANYI

SEQ ID NO: 212162 - protein, 135 aa, Glycine max
  unsure (1)..(135): unsure at all Xaa locations
  Clone ID: PAT_MRT3847_33608C.1.pep
PEEETPRPIRHHNGGPKNRPEPRXPEARSRQEKSQTRTVSMTPSKPFQHRRVEGTQEEKARAQWIRKEACGLRRLEGQKIIKPTQIWWGTSIMNSRRIYNTGNKXNNANRKEAVTPGRPXFPDHGRDEPPIKPIQ

SEQ ID NO: 212163 - protein, 51 aa, Glycine max
  Clone ID: PAT_MRT3847_33609C.1.pep
QLHLWIISHIYLSPILSVILYSLANFNSAIASFMYAPVNFNQRISPPFRVN

SEQ ID NO: 212164 - protein, 73 aa, Glycine max
  Clone ID: PAT_MRT3847_3360C.1.pep
FKPNPPPQELVFSWNPPKRESLFKQGPQTGNSLGKNPFLWGCKIYPPGIWEGFFNPPRKLFSPKGFKIVIRKP

SEQ ID NO: 212165 - protein, 64 aa, Glycine max
  Clone ID: PAT_MRT3847_33610C.1.pep
PRVRTMYFFSYPSHNTSQGPGLYIGLALYTNNASPPLSTSFTFDTQGPETTGYLTLIKITYYTI

SEQ ID NO: 212166 - protein, 74 aa, Glycine max
  Clone ID: PAT_MRT3847_33611C.1.pep
PSYVSLADALNSSPRSSSSCLVLLLRCFWFEEFLVLFGFYSDLKQRLVSICLLFFFFLLQVSWIKMKCILHMRI

SEQ ID NO: 212167 - protein, 54 aa, Glycine max
  Clone ID: PAT_MRT3847_33612C.1.pep
GFKRQSLFLWGKKLTSPMKTGIVHLKNQIIIPINWMGFQMTKFILMGDEINFTL

SEQ ID NO: 212168 - protein, 147 aa, Glycine max
  Clone ID: PAT_MRT3847_33613C.1.pep
ARDEAMQKAMVARSALEIANNALSLVANREESSLNLPPKMDAVKVLDGSELTFELHPRFNSLPRISKSCCLLNVSYLDTPKRWTSSVDLSCKTSKSRNASDRDKHEISNDSVGAALDSGSLTDLNLLCMGTSGMETGLRAAEFGSEG

SEQ ID NO: 212169 - protein, 67 aa, Glycine max
  Clone ID: PAT_MRT3847_33614C.1.pep
IYGLCVLLDIQFLYSCSPPFYSNKFPFPYMPSRSYIGRHNPQTEDCGKLEKLSRESVIVKSSYCKEG

SEQ ID NO: 212170 - protein, 102 aa, Glycine max
  Clone ID: PAT_MRT3847_33615C.1.pep
MASLNSYHYYTTTSLLIILLLHDLLSLSLVSASNHPQSAISPRELLFGEKNRLGSIPPSCHNKCNDCHPCMAVQVPTLLSHDSNPPDLTKTAAMASFLNPSS

SEQ ID NO: 212171 - protein, 82 aa, Glycine max
  Clone ID: PAT_MRT3847_33616C.1.pep
MIWDLQQCGLTATFKDHYLKECKRSRAGVHTACPGMGLTDLLISGSTVRNRQKLNIICELPETVARTLCAQMQVVHGTCKAI

SEQ ID NO: 212172 - protein, 55 aa, Glycine max
  Clone ID: PAT_MRT3847_33617C.1.pep
AFCRLSAHVHVGDTLRSLTITFIVSKIANGNRCHHYVLGMSVSLSIESMQLPFDF

SEQ ID NO: 212173 - protein, 53 aa, Glycine max
  Clone ID: PAT_MRT3847_33618C.1.pep
CFKLSFPFPVMIITHLLKVSILFPNEAGIKGSLHSIPLILVVVCDTLLVSLQF

SEQ ID NO: 212174 - protein, 139 aa, Glycine max
  Clone ID: PAT_MRT3847_33619C.1.pep
WSGALSFFLIASTSIFLLPQMVLLMHVPCPWGTYSYHLWYPGTRISYPCTEALPIKGRRFPFESLTPKGRQYPLKCRDRPIQWGRCETYLPKPLDCLWSNDLDIANPGRLELIMSTQSHNALDWRRNVVLPCKKIVPIV

SEQ ID NO: 212175 - protein, 126 aa, Glycine max
  Clone ID: PAT_MRT3847_3361C.1.pep
VTGSNSHFSRDCEEHETRPTRQASSKTTRRVSGDEIGCKANGELCVACHVCGCPVCQPCYEYNMSERNQTCPQRNTRYKRHQGSPTVAGDDEDNFDAHDLHDEFSVKNHCDDLNRNLDDDHVAHAD

SEQ ID NO: 212176 - protein, 76 aa, Glycine max
  Clone ID: PAT_MRT3847_33620C.1.pep
DSLSNIFRQSGPPSFSISNSLFSMTLCMHPRTHPPPQHTIQERKTGTFSLYLSPKKHPILVGPFLGPSLQISLRGR

SEQ ID NO: 212177 - protein, 84 aa, Glycine max
  Clone ID: PAT_MRT3847_33621C.1.pep
AFIKKTGRVKLAQTVEGEDQVKNLKIPNTRGEPRLKAQKTAGREGRPRKSGQKPGGEPSHPIVSAIKSWRIKSKNSFLGERVMC

SEQ ID NO: 212178 - protein, 70 aa, Glycine max
  Clone ID: PAT_MRT3847_33622C.1.pep
LNYCHFLKPLYWSGHFSYVVGFARYSIQIASSTMLLALSTSADSTTFTRWNPTTVLSPNVDRYTHGTLIT

SEQ ID NO: 212179 - protein, 44 aa, Glycine max
  unsure (1)..(44): unsure at all Xaa locations
  Clone ID: PAT_MRT3847_33623C.1.pep
XLLLLRKLXXKXWGVREESSLERSFPCSMPGLCLPXXSCPFTFF

SEQ ID NO: 212180 - protein, 97 aa, Glycine max
  Clone ID: PAT_MRT3847_33624C.1.pep
YGCEKTTEGGTENWGTHIMGTPAVPSSHPDNKKAALQSGQPQPVQYYHDQHQHPYVQHSPVDKPSNSPMESILNMFDSWSKKAEATAHNVWHNRESS

SEQ ID NO: 212181 - protein, 176 aa, Glycine max
  Clone ID: PAT_MRT3847_33625C.1.pep
MGECKRCSLTIAAIEQPSSSQHSISKKRKTTASFQLRSSDTQFPDTIVSPEASVSSTGTVVSGDFCSDRSCCSSSHFKDLHSVPSDLQTKGFQTVEDSTNRYFKPFSLLSEFSGDSEESAKSSAAVRKLKTPPQAEIEEFFAMAEKYERKRFTEKYNFDIVRDLPLEGRYQWVRLH

SEQ ID NO: 212182 - protein, 68 aa, Glycine max
  Clone ID: PAT_MRT3847_33626C.1.pep
GVPMIILILNNSLERLTELTESYSTQVTLITSKECESEPAKGKGHRKESGRVPNAKHPCPRYLLPCQH

SEQ ID NO: 212183 - protein, 60 aa, Glycine max
  Clone ID: PAT_MRT3847_33627C.1.pep
MTFKRATGGQNKHGRGHVKLIRCSNCGKCCQKDKGIKTTLGRNIAEQAATRDAQDACVYE

SEQ ID NO: 212184 - protein, 25 aa, Glycine max
  Clone ID: PAT_MRT3847_33628C.1.pep
YTTGFFLLDTWLRTIGVWSTVTEED

SEQ ID NO: 212185 - protein, 151 aa, Glycine max
  Clone ID: PAT_MRT3847_33629C.1.pep
MLLHYHLSLIMMKNMAYYSNNKVFFLFVMIFSSSLLDLGMCDSAASLDQLVPGLAHGDFLHDAQCMQRLLPCQEFLRSPNSPSPACCEPLKAMHENNTQCLCKIVNNTPLFQSLDAYKDEILKLPKACGIDIELSKSNNTAAGGGSSQESS

SEQ ID NO: 212186 - protein, 255 aa, Glycine max
  Clone ID: PAT_MRT3847_3362C.1.pep
MKLMVLKLLAFVFLWLWWSTCIHVKAENDRLKPGDSLNFSQSLISKSGKYSTIIFRILDEDEYHLGIQSKDKNFDWVEIRKPFSKDYEFLSLNTSGVLKIESRYGKKPIILYSPPQAINNTMAILLDTGNFVLQQLHPNGTNTLLWQNFDYPSTLIPTMKLGVNHKTGHQWVLVSSLTDLVLNPGAFSLEWEPKGQELVIRRRGKVCWQSGKLRNNRFEYIPEEAQRMLKYTIVSNGDEDSFSFTLRMTSLHHGG

SEQ ID NO: 212187 - protein, 36 aa, Glycine max
  Clone ID: PAT_MRT3847_33630C.1.pep
RSLMRVLEFHFLLIVLAILCILTNPCFHYENSSSMH

SEQ ID NO: 212188 - protein, 38 aa, Glycine max
  Clone ID: PAT_MRT3847_33631C.1.pep
PPSSLTTIIISTLTHSYIGRLSENYFISEKTPASIFAH

SEQ ID NO: 212189 - protein, 96 aa, Glycine max
  Clone ID: PAT_MRT3847_33632C.1.pep
LVATWLMDEFACLRDWDLEAIVRGSTGEAITMDDPNADFSYFFSEQDELLDSFPEFSETTRVLDDLEELYKPFYPVLHPLSPHTIVTTSLPINMRT

SEQ ID NO: 212190 - protein, 74 aa, Glycine max
  Clone ID: PAT_MRT3847_33633C.1.pep
MEVISASSLNPNAPMFVPLAYRTVEDFSDQWWDLVHSSPWFRDYWLRECFQDPQFQNDDAFDFDFDLDLRNSLT

SEQ ID NO: 212191 - protein, 51 aa, Glycine max
  Clone ID: PAT_MRT3847_33634C.1.pep
GGPDNSFLFSHHFCIYSPQRNRLCRSLFTSPPKPHLPGPPLCCNCTNTMEC

SEQ ID NO: 212192 - protein, 48 aa, Glycine max
  Clone ID: PAT_MRT3847_33635C.1.pep
FCVFFFFFFFGQKETRRFFLLVKMDQKGPFSIDCSWPALIPMTNTLEI

SEQ ID NO: 212193 - protein, 89 aa, Glycine max
  Clone ID: PAT_MRT3847_33636C.1.pep
MEVISASSLNPNAPMFVPLAYRTVEDFSDQWWDLVHSSPWFRDYWLRECFQDPQYQYDDVFDFDFDLDLRNSLTCLSPFISLIFKCFSY

SEQ ID NO: 212194 - protein, 125 aa, Glycine max
  Clone ID: PAT_MRT3847_33637C.1.pep
MEVISASSLNPNAPMFVPLAYRTVEDFSDQWWDLVHSSPWFRDYWLRECFQDPQYQYDDVFDFDFDLDLQDKDENEGKEGKEVVSLGVLKWRSCGGGWAEAPRYVEKAPKFVKPKVSPRAIHQPR

SEQ ID NO: 212195 - protein, 189 aa, Glycine max
  Clone ID: PAT_MRT3847_33638C.1.pep
IPTLRCSCHSPIGRWRISPTSGGTSFTPPPGSATTGSASASKIPSSKTTTLSLFNTHILILFLSMEVISASSLNPNAPMFVPLAYRTVEDFSDQWWDLVHSSPWFRDYWLRECFQDPQFQNDDAFDFDFDLDLQDEDERERKEGKEVVSLGLLKWRSCGGGWAQAPRYVEKAPKFVKPKVSPRAIHQPR

SEQ ID NO: 212196 - protein, 72 aa, Glycine max
  unsure (1)..(72): unsure at all Xaa locations
  Clone ID: PAT_MRT3847_33639C.1.pep
MFPALMIPLARCWKPFGQGDDAANAAAVAGSHCKDGLLQFRDIGNFAAGXFSMAVVQANHVLERQSQIESVA

SEQ ID NO: 212197 - protein, 64 aa, Glycine max
  Clone ID: PAT_MRT3847_3363C.1.pep
VSTALLCISCFVFYASSHHSDIFLSRLRLLLRWGLLMPASSPRTYSLPMREPLVGLLYESRRVN

SEQ ID NO: 212198 - protein, 49 aa, Glycine max
  Clone ID: PAT_MRT3847_33640C.1.pep
TSTPTLIPSPHTKPYYSFSFPFPFQFLTNNVSPLPLHDLFKPSVGFSQP

SEQ ID NO: 212199 - protein, 387 aa, Glycine max
  Clone ID: PAT_MRT3847_33641C.1.pep
MASSRVDLDGNPIKPITICMIGAGGFIGSHLCEKLMSETPHSVLALDVYNDKIKHLLEPHTLPWASRIQFHRLNIKHDSRLEGLIKMSDLTINLAAICTPADYNTRPLDTIYSNFIDALPVVKYCSENNKRLIHFSTCEVYGKTIGSFLPKDSPLRQDPAYYVLKEDESPCIFGSIEKQRWSYACAKQLIERLVYAEGAENGLEFTIVRPFNWIGPRMDFIPGIDGPSEGVPRVLACFSNNLLRGEPLKLVDGGQSQRTFVYIKDAIEAVLLMIENPARANGHIFNVGNPNNEVTVRQLAEMMTQVYSKVSGEAPLEKPTIDVSSKEFYGEGYDDSDKRIPDMTIINRQLGWNPKTSLWDLLESTLTYQHRTYAEAVKKVIAKPVAS

SEQ ID NO: 212200 - protein, 116 aa, Glycine max
  Clone ID: PAT_MRT3847_33642C.1.pep
KLVDGGQSQRTFVYIKDAIEAVLLMIENPARANGHIFNVGNPNNEVTVRQLAEMMTQVYSKVSGEAPLEKPTIDVSSKEFYGEGYDDSDKRIPDMTIINRQLGMFPCSTLPLRLLK

SEQ ID NO: 212201 - protein, 60 aa, Glycine max
  Clone ID: PAT_MRT3847_33643C.1.pep
ALCSSVCGMVTSSHVNIVYLLMATTNHVCIALAPSKSSQDYATSFAWVPIHHPLVVLVIW

SEQ ID NO: 212202 - protein, 191 aa, Glycine max
  Clone ID: PAT_MRT3847_33644C.1.pep
MAPFLINHLFVFLFCLRAINTLSTTVSISETSNSNQTLICVLQHPNQQGQSNLNCTSFPQAQAITLDVNPNVSYSQIVGGNGFVCALGPLSSSISVMGCWRFSANATYNVPYKRIYRGPIVEDIDSGNSHVCGLVRKGNKNNSLELECWQWHGFNSSMSMPMSSVAVGENFVCGLSERGDVNAGKRKGNGS

SEQ ID NO: 212203 - protein, 84 aa, Glycine max
  unsure (1)..(84): unsure at all Xaa locations
  Clone ID: PAT_MRT3847_33645C.1.pep
SGIWLENCNSGICMWVFIWNAFXKKXIXXWKRKXXXXXXXXXXXXXXKXKRQIKERNIYLSLKVKEEXXLFVILTYVFVTNHFF

SEQ ID NO: 212204 - protein, 78 aa, Glycine max
  Clone ID: PAT_MRT3847_33646C.1.pep
IFLSSSGGVKITWPRNKGASSQGQGLSTKKWVIHKNGVFKKFLPPKNFSPGELFVWPLKCPNLSAFPNFFFPGGVWGK

SEQ ID NO: 212205 - protein, 87 aa, Glycine max
  Clone ID: PAT_MRT3847_33647C.1.pep
RPSPLLGGPFAPPFQYPDFEPPNPSFPPPRFPPFPPPGPGFPFPQGPPPPLCFAFGPFKKQKNPPPLFLKKPPFPPRKNPPQGGGVV

SEQ ID NO: 212206 - protein, 90 aa, Glycine max
  Clone ID: PAT_MRT3847_33648C.1.pep
IFKSAPPFLFKTQAELVLACAALHNFLRKECRSDEFPVEPTDESSSSSSVLPNYEDNDHEPIVQTQEQEREDANIWRTNIGSDMWRNANN

SEQ ID NO: 212207 - protein, 80 aa, Glycine max
  unsure (1)..(80): unsure at all Xaa locations
  Clone ID: PAT_MRT3847_33649C.1.pep
WSLIHDIMHLYQPFHLXSGTPGIILHLASTGVCILKQFAMLVXDKPNNFCPHXFQPSIHHLIQFLPTTPQILIFSPIFPV

SEQ ID NO: 212208 - protein, 66 aa, Glycine max
  unsure (1)..(66): unsure at all Xaa locations
  Clone ID: PAT_MRT3847_3364C.1.pep
NFINGLALKGKDKLLDNKELSDLKNAPMESIHIQGDVSFSQPMSETNTYFXTFGHLPDYHFYGGFY

SEQ ID NO: 212209 - protein, 92 aa, Glycine max
  Clone ID: PAT_MRT3847_33650C.1.pep
EIRTLWKSKKMKKILRAFFSEVRKNKFNHTRDFSPFKKFLILCTSKGATEARLIIGGNLTRVCSFIFHTMSIFFNPLCRLLAGAPFCGFATV

SEQ ID NO: 212210 - protein, 52 aa, Glycine max
  Clone ID: PAT_MRT3847_33651C.1.pep
MTSHNNMVIRKVLTVLLLPITFTNALIEPNILKTDQPSNYHDDHYSKHICDL

SEQ ID NO: 212211 - protein, 436 aa, Glycine max
  Clone ID: PAT_MRT3847_33652C.1.pep
AGGSHLPDITVITPVFFNGKLVFFVANREASAEIGGTTPGSMPPFSKSILEEGAAIKAFKLVEKGIFQEEGIIKLLQFPSSDGRGNKIAGTRRIQDNLSDLRAQVAANQRGISLVLELIEQYGLETVQAYMNYVQVNAEAAVREMLKSVGHRISSKSNELVTIEEEDYMDDGSIIHLKLSIDSNKGEAVFDFAGTSSEVYGNWNAPKAVTAAAVIYCVRCLVNVDIPLNQGCLAPVKILIPEGSFLSPSDTAAVVGGNVLTSQRITDVIFTAFQACACSQGCMNNFTFGDDTFGYYETIGGGSGAGPTWDGTSGVQCHMTNTRMTDPEIFEQRYPVILHKFGLRENSGGDGFHKGGDGLLREIEFRRPVIVSILSERRVHAPRGLKGGKDGARGANYLVKKDKRKIYLGGKNTVEVLPGEILQILTPGGGGWGSPL

SEQ ID NO: 212212 - protein, 46 aa, Glycine max
  Clone ID: PAT_MRT3847_33653C.1.pep
QINKFCYWQKVCPRKMNDDLSQGCMSFWLPFPSQLNFMSDLHNVAN

SEQ ID NO: 212213 - protein, 56 aa, Glycine max
  Clone ID: PAT_MRT3847_33654C.1.pep
TLTGTDVGYPGGLRVDPLSSRSGYSDTTTELITTAITSGLLLMFDGTGTYVQRIYT

SEQ ID NO: 212214 - protein, 131 aa, Glycine max
  Clone ID: PAT_MRT3847_33655C.1.pep
LIQLRNLPFGGRASTVATYPLTGGRCGTHKCVFHERKMRGVATNFYLRKASGKLKRCGLRTLSVNSSGVVFTHREGISTPRIRHKGRQPLIKCANMTSKCFIFPFLCLFVLLCFFMFLILVWSTRVFRTRR

SEQ ID NO: 212215 - protein, 79 aa, Glycine max
  unsure (1)..(79): unsure at all Xaa locations
  Clone ID: PAT_MRT3847_33656C.1.pep
TPNAKSFLALLSETLIKQVYDIVAMLVDLWSNLLGSLIGECRTFXFLIPCTTFSSSFPSQQSSLXPIYLYVIRCVQIGA

SEQ ID NO: 212216 - protein, 70 aa, Glycine max
  Clone ID: PAT_MRT3847_33657C.1.pep
NRVAPAFLTPVLFSVVCIFLGIFLAGKDHPSEGITGLSSDTFKENWSSDYQRTNNAGIPETDGSVTWNFK

SEQ ID NO: 212217 - protein, 187 aa, Glycine max
  unsure (1)..(187): unsure at all Xaa locations
  Clone ID: PAT_MRT3847_33658C.1.pep
AXSVAXFRXWGXXLXACVCCLVXXAXXXXXCXXLPXXXFPALXPCALXLXLLLVLPCXPLSFXAXXFXXCXXAXFFXXGXXXXLWXXXVXXSAPSXXXXPFXXXAPCXXXWFXCXXAVPXVAXFXXGXPKRKKIGVTGRKKKQVKPQIMNEKLEKIIERGIKKIAMKRAMYRKDHHILHALFPPRVR

SEQ ID NO: 212218 - protein, 40 aa, Glycine max
  Clone ID: PAT_MRT3847_33659C.1.pep
PGELAKKLEWDEKFTDFDEAIPVTAKYGSGGGGCYRTGYL

SEQ ID NO: 212219 - protein, 99 aa, Glycine max
  unsure (1)..(99): unsure at all Xaa locations
  Clone ID: PAT_MRT3847_3365C.1.pep
TPCDPTLIXXXHXXXQXLCXXFXPITXXLXATRXXLPXTSXYXXTXXXXHXXXRXXXXLXXLRPXPXXXXXXQXXXXXXXXXWXXXXXXXXXXXXXYXX

SEQ ID NO: 212220 - protein, 108 aa, Glycine max
  Clone ID: PAT_MRT3847_33660C.1.pep
FNVDPEAVISQALQTGGGPNVSDAYTINGLPGPLYNCSSKDTYTLKVKPGKTYLLRLINAALNEELFFSIANHTLTVVEADARYTKPFDTDTLLIAPGQTTNVLLKTK

SEQ ID NO: 212221 - protein, 105 aa, Glycine max
  Clone ID: PAT_MRT3847_33661C.1.pep
VTCGRTREDSMVDHACTMPHDRTGKKGAQDWNHRHIEGLPAAGSTRRQGYAKQSPCGAPTARAKSADIHSDFAAHSAIRHETAGHIEAWTAGVSVPRPTKSTRGG

SEQ ID NO: 212222 - protein, 53 aa, Glycine max
  Clone ID: PAT_MRT3847_33662C.1.pep
RRINKLEKCIDDFNKKISRKTLILISITINNSIAIQRNTHVNSKEKSTKIRWQ

SEQ ID NO: 212223 - protein, 196 aa, Glycine max
  Clone ID: PAT_MRT3847_33663C.1.pep
MSSAPMTDNNKVQNKGLLSSSSSSSVRIEEEIMKQGIITILNSNTNTPSSSSSSSSSLRRTLSADMSSKNYLHAKTIADSEKEEEDDEDEAERERLEIWSSIQRNKKEEQEKSGAFDIWSSIVSLKGKDEISKSMPITPYVHPLVKRSKSCLSGKSLEICTESLGSETGSDALLLSSHSSSSETGDATEQEQDEQV

SEQ ID NO: 212224 - protein, 97 aa, Glycine max
  Clone ID: PAT_MRT3847_33664C.1.pep
DVEKESVGVNKEVPARRNGAKKSRSAEVHNLSERRRRDRINEKMRALQELIPNCNKVDLCLISRLCFGTLWKVFNIVVCWLSLRIEASIEYIMVCLI

SEQ ID NO: 212225 - protein, 538 aa, Glycine max
  Clone ID: PAT_MRT3847_33665C.1.pep
MSSAPMTDNNNKVQSQGLSSFSSSSSYVRIEEEIMKQGIITILNTNTPSSLRRTLSADMSSKNYWLSQNIAPSEEQDLHAKTIAPSEEDEEANNNNKELEEEDEAERERLEIWSSIQRNKKEEQEKSGAFDTWSSIMSLKGKDEISKSMPITPYVHPLVKRSKSCLSGKSLEICTESLGSETGSDALLLSSHSSSSETGDATEQEQDKEQVNEEEEEELCNYASVVATKKASASASASASPPRAFPPPLPSLSHHQASSSVTHMRSHRDNGRLVLQAVSVPSHNNFSIQRQDGRLVLTFSNHQEEEEEEEEEEEENGDHVEELGEECFGGFEFGEEEDYYDEGEDEEEEEYFLGTKPQVSSIEPNSVLMGYESVIEKAPLLPTGVTSSVHELALMMNIKNKPIGVVNRNPKWSEKFNEMTNFDDVNVAAQSLPPRPRVARLIPSAPAASFNFNAYEYYWRTKSASSKGTSVNLNQLDQEKLKSKVVVSGDMNKVVSREQQQLLVLRGKNGDYLVHNLKSCKDSRRSFLFWEPYCIATS

SEQ ID NO: 212226 - protein, 74 aa, Glycine max
  Clone ID: PAT_MRT3847_33666C.1.pep
THESRNKKLTMKKKNKKKKKKIKKKKEKKNERQPRGSLFRWLDTKISLAANVGPLNSRRGPSFYWPSFGNIMGL

SEQ ID NO: 212227 - protein, 465 aa, Glycine max
  unsure (1)..(465): unsure at all Xaa locations
  Clone ID: PAT_MRT3847_33667C.1.pep
MKFLQSLIAQSRYAARTRPLNRVSGLRFFSVSTEEYSKRNYANNVAEYNTXLGSLTAQRRNFLLRDVYDDMMLDGVKPTRDTFHSLVVGTMKGARMQDAFXFAEQMKINGLLPDVXLFYLSLLPSCMPYVTFYYFLISTCGNCNNSNEVHEKLDEINCLEENPNILTSLCIQRACCSERRMDRVYAIVRDMTAAGLGLNEFCYAGLIVAHKNKTPLPDDFAAKVIEFVERSKMWSSVETNSANAENVMMGVSDEELYSLPTAEYAHRRGGFVVRQFTAYHTAFHAAADLKNVELTDTLLEMLNKQGKTPDIFILMQVIRCYCHAGDIERGLQNFENHLRQDRSVPAELFVTLAEGAMVGYTEKGMQMAQDILVRMNERNIFLNNKLGSELLFTAAGEKTGGYITANYIWDLMQARGITPSFPAVEAYYQGLKDREIPEDDPRLVLVSRIHKNLSVRFGNRTNINL

SEQ ID NO: 212228 - protein, 45 aa, Glycine max
  Clone ID: PAT_MRT3847_33668C.1.pep
GHDQMSARERSGCGTNELSMLFFENYLFEATSRTESVHKCNAKKR

SEQ ID NO: 212229 - protein, 245 aa, Glycine max
  unsure (1)..(245): unsure at all Xaa locations
  Clone ID: PAT_MRT3847_33669C.1.pep
FKLTKGFAAKESVKGHMVNVVKGLKLYEDIFTDSELCKLTDFVNEIHAAGQNGELSGETFILFNKQMKGNKRELIQLGVPIFGXNRQNXNIEPIPALLQGVIDHLIQWQLLPEYKRPNGCIINFFEEGEFSQPFLKPPHLDQPVSTLLLSESTMAFGRILMSENDGNYKGPLTLSLKQGSLLVMRGNSADMARHVMCPSPNRKVSITFFRVRPDSNQCQSPTPTMMPSAMTVWQPGQGGSFDMLR

SEQ ID NO: 212230 - protein, 53 aa, Glycine max
  Clone ID: PAT_MRT3847_3366C.1.pep
GDLNTARLLFSLPSHYTGRQLFPGDPQILATLLASNTPSSAYDYANLRKRKRE

SEQ ID NO: 212231 - protein, 78 aa, Glycine max
  Clone ID: PAT_MRT3847_33670C.1.pep
QLPLAVISMQLFLYLRADCEFLKDVYYNSESSISLVTSHFHPNTDEEVEALLLAREPRIDRSCIHALGPITLSQGLGS

SEQ ID NO: 212232 - protein, 100 aa, Glycine max
  Clone ID: PAT_MRT3847_33671C.1.pep
QQSQHLAAGSAFMSQQQMRQRPSSSCQFGSMVTVPPQAALQRVTPPVSCNSSCTTTNVFYPGAISSSTTMSTTTSTTSSAAAAAAAAVALATNARMKGDV

SEQ ID NO: 212233 - protein, 70 aa, Glycine max
  Clone ID: PAT_MRT3847_33672C.1.pep
WDKALLLFYLLTGHVFSSEKVSNIICLSYCSCTVQCIVFILFIYSPLLCCNTLEFRGIFNFIICVHTVQY

SEQ ID NO: 212234 - protein, 109 aa, Glycine max
  unsure (1)..(109): unsure at all Xaa locations
  Clone ID: PAT_MRT3847_33673C.1.pep
LILFLSTSQNIYIYIYIYIYIYILIKIKTNKILLIKKIINNYLKILQSKRKRGSISSKQMMIKILNPDSSHATVVTKVSINDSLAQKEYXICLRLIKYYNMARHFMGVN

SEQ ID NO: 212235 - protein, 162 aa, Glycine max
  Clone ID: PAT_MRT3847_33674C.1.pep
PAIIVGSRVGKKKRGENNFWVGPYKQNLAKGGGFLFGNPLKSQNKNTPGGLTKFGKNIGQERLNLGPQPKIPKRVPWGPISFQKKKANPKPPPGGLKFSKTNPLEGRGGAPQGKRFFTEAPRARPSKFRAGPGGPFFGGGLGPPPMELVGKRAQITKRFKAR

SEQ ID NO: 212236 - protein, 202 aa, Glycine max
  Clone ID: PAT_MRT3847_33675C.1.pep
MEAVSDQDTSICTHCDRAIPAANIDLHYAHCSRKLEKCKVCGDMVPRKNAEDHYLSTHAPVSCSLCSETMERDILDIHKGENCPQRIVTCQFCEFPLPAIDLAEHQEVCGNRTELCHLCNKYVRLRERFSHEARCNGIQDSSVGTSRNVREAEREQGARRRPLPPQNDFSTKRLLFTIAITGIAVILGSFFLQRKADPSDVH

SEQ ID NO: 212237 - protein, 188 aa, Glycine max
  Clone ID: PAT_MRT3847_33676C.1.pep
MAMLASPSVKLSLSFPLSASKPNPRRPFTIRATEPETPLSGSDPSQPEPDPSDDAFDDRINQLRLRYRSGTGKKAELRKNKKSKKGTSGSGSGMYLPPVPLKEPVSGGVKVELGFSQYSERLNGRIAILGLAALVLVELATGKGVINYHTPAIILIQIYFVAAVGAVFVKYEKEKISVWPQTDSSTNK

SEQ ID NO: 212238 - protein, 96 aa, Glycine max
  unsure (1)..(96): unsure at all Xaa locations
  Clone ID: PAT_MRT3847_33677C.1.pep
QRARIIEIDAARDIDIALAQNRVWARFSRETNXMIMVLXVSPEEAIWSLLYMHNNDQLITVMVSASDNYSLVQCRISWIEXTRRVKPMAGFAILES

SEQ ID NO: 212239 - protein, 74 aa, Glycine max
  unsure (1)..(74): unsure at all Xaa locations
  Clone ID: PAT_MRT3847_33678C.1.pep
KPLILALSNPTSQSECTAEEAYTWSXRNSHYIIMLSTRNIISRGKSICASGSPFDPVEYEGKXFVPGQVKFNTC

SEQ ID NO: 212240 - protein, 89 aa, Glycine max
  Clone ID: PAT_MRT3847_33679C.1.pep
FPNPIGKKPPRGERFPSLFFYFLQIFGPQINSIQKLVKAFFFFLCHKKNTTPFFNHFKPPWQLISPHHPKNIQLLFCIKRPCQYWYPKP

SEQ ID NO: 212241 - protein, 44 aa, Glycine max
  Clone ID: PAT_MRT3847_3367C.1.pep
KCLTVLHLYIFPTGFDSALKYQKRASHIGANVSYHSFQILINGT

SEQ ID NO: 212242 - protein, 149 aa, Glycine max
  Clone ID: PAT_MRT3847_33680C.1.pep
NSAPVKNGKYTYPILLDADWGSGIVKDREALCLYAASYGNAARGTVKDREALCLYAASYGNAARFINHRCLDANLVEIPVEVEGPTHHYYHFAFFTSRKVAAQEELTWDYGINFDEHDDQPIELFQCRCSSKFCRNIKRLNRSMRSSSS

SEQ ID NO: 212243 - protein, 112 aa, Glycine max
  unsure (1)..(112): unsure at all Xaa locations
  Clone ID: PAT_MRT3847_33681C.1.pep
MAKDVEVADRGSFSAKDYHDPPPAPLIDAEELTKWSFYKALIAEFIATLLFLYITGLTAIGYKHQTDLNENGEIXGGAGILGIAWAFRGMIFILVYCTGGISRGHINPAATF

SEQ ID NO: 212244 - protein, 34 aa, Glycine max
  Clone ID: PAT_MRT3847_33682C.1.pep
FLSKLYHLYFSSSFITSLIIFFFLIHHIYKYLAK

SEQ ID NO: 212245 - protein, 77 aa, Glycine max
  Clone ID: PAT_MRT3847_33683C.1.pep
SLDWTHHTLQIVRHIRTVMMSKGCFSNITCAAFIQQSKNTRMNSSAIGVSKLCQQFFPPLASANCTMRCYLISVVAV

SEQ ID NO: 212246 - protein, 82 aa, Glycine max
  unsure (1)..(82): unsure at all Xaa locations
  Clone ID: PAT_MRT3847_33684C.1.pep
RDDGERSKEGDDDVGGRSYHEGDSSDESDFGDDLYKNEDDRHKLSEMTELQREMILSERATKKHDKDLLGKIASKREXGKTT

SEQ ID NO: 212247 - protein, 75 aa, Glycine max
  Clone ID: PAT_MRT3847_33685C.1.pep
FEIFLYFCIHKSRSLGLICMIVLWEFFFCFFFFFFFFFFFFFFFFFFFFFFFLKMRFHIDISNVTKKTLSSPLRK

SEQ ID NO: 212248 - protein, 129 aa, Glycine max
  unsure (1)..(129): unsure at all Xaa locations
  Clone ID: PAT_MRT3847_33686C.1.pep
NCHTLRXGQAAQRSEVERCLGRPTPPKXMKHGCLDTARRSQATARQGVSKGQPHSRGEPTAPAKAGRRAKTCAIRKRQTPHAGSLTRRVPNRSPAFYQRPVATGHRFMPPARPPRERSDGTHPSRLNHI

SEQ ID NO: 212249 - protein, 56 aa, Glycine max
  unsure (1)..(56): unsure at all Xaa locations
  Clone ID: PAT_MRT3847_33687C.1.pep
PVDQNRYLEESRKPNCENPLLPYLTCFKRIHGDDSGQKHXNAQYFDYWTCIDTCVG

SEQ ID NO: 212250 - protein, 43 aa, Glycine max
  unsure (1)..(43): unsure at all Xaa locations
  Clone ID: PAT_MRT3847_33688C.1.pep
LLAIQLRLGFPVLPVMFQFQCPFLYYSGNTPVFIRFXXPPPLL

SEQ ID NO: 212251 - protein, 114 aa, Glycine max
  Clone ID: PAT_MRT3847_33689C.1.pep
IHPIKRNRLELKKLQDLVFVKYNLLLKQRYNARDEIDSNSLNDIHVCNEWLVGEMDEDNDNDAGNDLVFEDDDALNWATVYEASGVGERRMYTRLKKKKKRYFPPAADLEDPSL

SEQ ID NO: 212252 - protein, 41 aa, Glycine max
  Clone ID: PAT_MRT3847_3368C.1.pep
KKKKGAALFFVGYVGSCIGKINPVSIDCIAVQHSFIRREGI

SEQ ID NO: 212253 - protein, 500 aa, Glycine max
  Clone ID: PAT_MRT3847_33690C.1.pep
METWFIILVSLSLCILIRAIFSLNKKTITTPPGPSNIPIITSILWLRKTFSELEPILRSLHAKYGPVITLRIGSHRAVFIADRSLAHQALIQNGSLFSDRPKALAVSKIISSNQHNISSASYGATWRTLRRNLASEMLHPSRVKSFSEIRKWVLHTLLTRLKSDSSQSNNSIKVIHHFQYAMFCLLVFMCFGEQLDDGKVRDIERVLRQMLLGFNRFNILNFWNRVTRVLFRKRWKEFLRFRKEQKDVFVPLIRARKQKRDKKGCDGFVVSYVDTLLDLELPEEKRKLSEEEMVSLCSEFMNAGTDTTSTALQWITANLVKYPHVQERVVEEIRNVLGESVREVKEEDLQKLPYLKAVILEGLRRHPPGHFVLPHAVTEDVVFNDYLVPKNGTVNFMVAEMGWDPKVWEDPMAFKPERFLNDEGFDITGSKEIKMMPFGAGRRICPGYNLALLHLEYFVANLVLNFEWKVPEGLDVDLSEKQEFTVVMKNALLVHLSPRI

SEQ ID NO: 212254 - protein, 308 aa, Glycine max
  Clone ID: PAT_MRT3847_33691C.1.pep
MAVAAARPIVSVQTLEGDATPTVPLPDVMKASIRPDIVNFVHSNISRGHRIESVPELPLVVSDTVESVEKSKEAVKILQKIGAFTDAEKAKLSHGIRPGKGKMRNRRYISGKGPLIVYGTEGAKAIKAFRNIPGVEVANVDRLNLLKLAPGGHLGRFIIWTKSAFEKLDSIYGSFDKTSEKKKGYLLPRPKMINSDLARIINSDEVQSVVRPIKKDVKRAPLKKNPLTNLNAMLKLNPYAKTAKRMALLAEKQRIVAKKEKLHKKRNIVSKEEASAIKAAGKSWYQTMVSDSDYAEFDNFSKWLGVSQ

SEQ ID NO: 212255 - protein, 121 aa, Glycine max
  unsure (1)..(121): unsure at all Xaa locations
  Clone ID: PAT_MRT3847_33692C.1.pep
FQGRRRTLQYLRSKAEPIRKNCCTDIIGRPCKVVPVTTSNTVKLGPAXASLVGMDIHSANNLEDIVPWSHKCDVPHVNRTDYQLIDIAEDGFLSLLTDNGNTXDDLKLPTDDSLLTHINDR

SEQ ID NO: 212256 - protein, 162 aa, Glycine max
  unsure (1)..(162): unsure at all Xaa locations
  Clone ID: PAT_MRT3847_33693C.1.pep
FCGKKATLGVGNVXAIQSIPEGAVMCNVEHHVGERGVPDRGCGDYDIGIRHNRDXDTCRIKLPFGVKKIEPSVCRPMIALHAGGGRTEKTVMNAGNAYHKIRVNRNXWPMVRGVAMNPDEHAHGGGNHEHIVHASTKRRDAPSRQKVGLIAARRTGRLTGQA

SEQ ID NO: 212257 - protein, 72 aa, Glycine max
  Clone ID: PAT_MRT3847_33694C.1.pep
LKWWLGGPKAFQWTTFNGKINSGGELGFWVESFCGILFTNAKEGGGGCKEKAKAIVMAIYPAGVMSTCSDYP

SEQ ID NO: 212258 - protein, 170 aa, Glycine max
  Clone ID: PAT_MRT3847_33695C.1.pep
NGEGNVVGWAASSNDPNAGVGGHGSCCAEMDIWEANSISTAVTPHACSTIEQSRCDGDTCGGTYSADRYAGVCDPDGCDFNSYRMGVKDFYGKGKTVDTSKKFTVVTQFIGTGDAMQIKRFYVQGGKTIAQPNSAIAGVEGNTITTKFCDQQKEVFKDRYTYKEKGGTAN

SEQ ID NO: 212259 - protein, 472 aa, Glycine max
  unsure (1)..(472): unsure at all Xaa locations
  Clone ID: PAT_MRT3847_33696C.1.pep
MAGGAYVDSGNAKQFDGKVTAFVLVTCFVAAMGGLLFGYDLGITGGVTSMEPFLIKFFPGVYKQMQDDVGHRSQYCKFDNELLTLFTSSLYLAALVASFFASTTTRMMGRKKPPKXHGGLFFLVGALLNGVSGNIEMIIIWKPMXNANLISYGTYKIENSWRDSLGVLGSPAICKSFGALFLGVTHCSHIXRQPWEAYTKILQKIRGIDNVEEELQELVLASESAKEVEHPWKNITAPKYRPQLTFCTLIPFFQQLTGINVVMFYAPVLFKTLGFGNDASLMSSVITGGVNVVATLVSILTVDKVGRKVLFLEGGVQMLICQIATGVMIAMKFGVSGEGSFSSGEANLILFFICAFVAAFAWSWGPLGWLVPSEICPLEVRSAGQAINVAVNMLFTFAIAQVFLVMLCHLKFGLFFFFAAFVLIMTIFIAMLLPETKNIPIEEMHTVWRSHWFWSKIVPHADDDRKPEAAQS

SEQ ID NO: 212260 - protein, 274 aa, Glycine max
  Clone ID: PAT_MRT3847_33697C.1.pep
MAGGGYVDSGNAKQFEGKVTAFVLVTCFVAAMGGLLFGYDLGITGGVTSMEPFLIKFFPGVYKQMQDDVGHRSQYCKFDNELLTLFTSSLYLAALVASFFASSTTRMMGRKASMFLGGLFFLVGALLNGFAVNIEMLIIGRLLLGFGVGYCNQSVPVYLSEMAPAKIRGALNMGFQMMITIGILIANLINYGTSKLENGWRISLGVGAVPAVLLCFGALFLGDTPNSLIERGQKEEARKMLQKIRGIDNVEEELQELVLASESAKEVEHPWKNI

SEQ ID NO: 212261 - protein, 55 aa, Glycine max
  Clone ID: PAT_MRT3847_33698C.1.pep
YFIFNNLIYIYNQFNHMILVWSNHIFTMCYLIHTLNRCKQVGLNFISILKKFKLS

SEQ ID NO: 212262 - protein, 43 aa, Glycine max
  Clone ID: PAT_MRT3847_33699C.1.pep
WGTVRDLSMSTGHPTFHSVHYIHSTISVHMLLLLLGTGQHTCP

SEQ ID NO: 212263 - protein, 408 aa, Glycine max
  Clone ID: PAT_MRT3847_3369C.1.pep
MVFLIFSTRSPSPKPSHIPRNTNIQRSVVRLRLFQDMKIPCFSCFLPSTTEENNNNNDYPDEDGSFRLFTYNQLKLATCNFHSSEKVGEGGFGSVFKGKLVDGSFVAVKVLSVEVESMRGEREFVAELATLANIKHQNLVSLKGCCVEGVHRYLVYDYMENNSLYNAFLGSEERRMKFTWERRRDISIGVARGLDFLHEQLKPHIVHRDIKAKNILLDSNFIPKVSDFGLAKLLRDETSHISTRVAGTLGYLAPEYANSGQVSRKSDVYSFGVLLLQIVSGLAVVDAYQDIERFIVEKAWTAYQGNDLLKLVDPMLNMNFPEEEALKFLKLGLLCVQETAKFRPPMSEVLERLTKDIDMIDVHISKPGFVADLRNIRIKQQNLNSSQESSSAGATFTSSIWSSVNLAR

SEQ ID NO: 212264 - protein, 179 aa, Glycine max
  Clone ID: PAT_MRT3847_336C.1.pep
MSVPNEENLSYSQLSYFFLDLLDSIIVDVASECHRVARLGLDSNLEEEDEELKLSAQARVRVADPSNSNEANGKYVVDIFGQTHPPVANEIFDCLNCGRSIMAGRFAPHLEKCMGKGRKARLKVTRSSTATQNRYSRGGPSPGSTHSPYSNYSTNSMNRLAYGTSTFAGEEHSNGTLES

SEQ ID NO: 212265 - protein, 121 aa, Glycine max
  Clone ID: PAT_MRT3847_33700C.1.pep
GGLWLGHFFPGLCPLVRPLLISCPGGGSQPYLFQGVFSPGLISLACPCGGGTRFLFFLVADVPSFSFMRCGSSLGYGPLFLVFFQWVSLSVPSVWCHCFLQGSVNNVPVVPYQFVRSQKHQ

SEQ ID NO: 212266 - protein, 94 aa, Glycine max
  Clone ID: PAT_MRT3847_33701C.1.pep
NPPVVFETRGEAPNPGRQRAAGSAGDAALGRSTGSDAANAVAPAGAGEAGEGEARRVRQPSLRHLPLLLLLLLHAPALYLSLGNGVRGGGRGRF

SEQ ID NO: 212267 - protein, 91 aa, Glycine max
  Clone ID: PAT_MRT3847_33702C.1.pep
GFTFWNCWNPNIPRIEIDFPLGQSEEPLIRYIQLPYPFGTSPLSHKGLLLPITPTFKGMINTAATTGHSAITLTTLVPAVQRLFPWLVVQH

SEQ ID NO: 212268 - protein, 73 aa, Glycine max
  unsure (1)..(73): unsure at all Xaa locations
  Clone ID: PAT_MRT3847_33703C.1.pep
QDATPVANEHHPPGXSIGFVHECCLRFYIDRSLRDRALNIQLSNTVGVSEVSTIEWKVRSNSREWAQRARPAA

SEQ ID NO: 212269 - protein, 78 aa, Glycine max
  Clone ID: PAT_MRT3847_33704C.1.pep
FQIPYFLRDISCCCIDSQLLKLDLVLPCTRSSFKIFTILVFYFLIIIFHFLLLKIYNFSFHGQFQTLTVYFFLLLYIN

SEQ ID NO: 212270 - protein, 47 aa, Glycine max
  Clone ID: PAT_MRT3847_33705C.1.pep
MRTDLIVIATTIAPTIRLRRQCWRCSVPSWHYPRTFCLALCDTVIFS

SEQ ID NO: 212271 - protein, 68 aa, Glycine max
  Clone ID: PAT_MRT3847_33706C.1.pep
LIHVITGRNKSYWHFSFYSKSNVWELKSNLSRKKNSPAGFLVVLLRDLPNKIGLNNNGLVLGQHTFYL

SEQ ID NO: 212272 - protein, 64 aa, Glycine max
  Clone ID: PAT_MRT3847_33707C.1.pep
KPAAAEPMLLGFANQQRAELTMAALGCGATGVAGRALRMENDTNTGHKRWPIATFKASGWTYGY

SEQ ID NO: 212273 - protein, 37 aa, Glycine max
  Clone ID: PAT_MRT3847_33708C.1.pep
HSALQWCKRVTIVDMLCMGKVELMLSCPYYVKSLYNT

SEQ ID NO: 212274 - protein, 69 aa, Glycine max
  unsure (1)..(69): unsure at all Xaa locations
  Clone ID: PAT_MRT3847_33709C.1.pep
IKCINVILIGIHTNGYELPRLIYELVVKRLPYISTSTQRXDMNASTSNYDCLTNGAYAMNVDWENYKNN

SEQ ID NO: 212275 - protein, 49 aa, Glycine max
  Clone ID: PAT_MRT3847_3370C.1.pep
KLDNPSSLLISQDERGYSHESHSATMQFAHTRTHGITTILFHSRLKSTD

SEQ ID NO: 212276 - protein, 83 aa, Glycine max
  unsure (1)..(83): unsure at all Xaa locations
  Clone ID: PAT_MRT3847_33710C.1.pep
VPASASAHSSPSTGMAYXPHGNAXCNXFIPQICKFPCGYXXXXCTXNRGTKNLVAFFKQRXHSLPLWXKMGXRXPLPYQXKGX

SEQ ID NO: 212277 - protein, 65 aa, Glycine max
  Clone ID: PAT_MRT3847_33711C.1.pep
HAKHRRAKPATAIPDSFPAVPPAPLQVASVQSRVNHLSFHNYSCLLLSSWSVPAPRRIHRAILYC

SEQ ID NO: 212278 - protein, 215 aa, Glycine max
  Clone ID: PAT_MRT3847_33712C.1.pep
MKVVYFLVAILALASSLVSAHDPSPLQDFCVATKERDGVYVNGKFCKEPKDVKAEDFYKEVEPGNPSNQLGSAVTPVFVDQLPGLNTLGLSLARIDYESMGLNPPHIHPRATEIIIVLEGILLVGFATSNQDGNRLFSKMLKKGDVFVSPMGLIQFQYNPGRGRAVSISAFSSQNPGTVTVANAVFRSNPRISTDILTKSFQVDKKVIDELQNQN

SEQ ID NO: 212279 - protein, 53 aa, Glycine max
  Clone ID: PAT_MRT3847_33713C.1.pep
TGIDTFEDDITSAAAHATLYKDVVTDADNIIPNALNSFNSEGNREGKSSPGTN

SEQ ID NO: 212280 - protein, 411 aa, Glycine max
  Clone ID: PAT_MRT3847_33714C.1.pep
SFTAILHSSIHGTTMLLLLYLSLLCSLPHIALSSHCTVETATKTFKKCMNLPTQQASIAWTFHPHNSTLELVFFGSFISPSGWVGWGINPTSPEMTGTRALIAFPDPNSGQIVLLPYILDPTVKLQKSPLLSRPLDIHLLSSTATMYGGKMATVHNGAAIQILGTVKLQTNKTKIHLVWNRGLYVQGYSPTIHPTTSTDLSSIVTFDVLSGSSAPQHTDLTTLRVIHGTVNAISWGILLPMGAITARYLRHIQALGPAWFYAHAGMQVFGFVLGTVGFVIGIRLGQLSPGVEYRLHRKLGMAVFCLGGLQTLALLFRPNTRNKFRKYWKSYHHFVGYSCVVLGFVNVFQGFEVMGASRSYAKLTYCLGLSTLIGLCIALEVNSWVVFCRKSKEDKMRREGLIGTSHKPIHN

SEQ ID NO: 212281 - protein, 90 aa, Glycine max
  Clone ID: PAT_MRT3847_33715C.1.pep
RTWASGLFSFYIVCCCWLLQDCFGASPEPPPIPVAPPQAPPPPVSGPPGPLSLPPSLAPDPFRPPGTPIGPPNWASDGPPGSSSGTPPSY

SEQ ID NO: 212282 - protein, 69 aa, Glycine max
  Clone ID: PAT_MRT3847_33716C.1.pep
YFVSTIKCLSYCPVLTPVGAFLTLVFLLYIYSNGSICLDILKEHGTPGLTTSIELGASFWSLLIDTSPL

SEQ ID NO: 212283 - protein, 62 aa, Glycine max
  Clone ID: PAT_MRT3847_33717C.1.pep
SSGSGISSSALPYKRTPPSWLKISSQDVEQYICRFAKKGRTPSHIWVTLTDSHYLPHAISLA

SEQ ID NO: 212284 - protein, 71 aa, Glycine max
  unsure (1)..(71): unsure at all Xaa locations
  Clone ID: PAT_MRT3847_33718C.1.pep
TLXNYLIPHVTLYTIIFIFYVHTYLKNIYSQIKMDNILLSFLMFTLHNIFSVATTARTEHEVMFSDHYGSN

SEQ ID NO: 212285 - protein, 58 aa, Glycine max
  Clone ID: PAT_MRT3847_33719C.1.pep
VCDDYPKSKEYLERAILANPDDGHILSLYAELIWQLEKDANRAEGYFDQAIKSAPYDR

SEQ ID NO: 212286 - protein, 223 aa, Glycine max
  Clone ID: PAT_MRT3847_3371C.1.pep
MALPHSIILPFSSIISPCCLPKHKPTNFTRPVKLNASDGCEKTTEGRVQALKSDGGKWKKRGQEASSDTDDDDDDDDAPQRFNKNDPYLMSPEERLEWRRNIRQVLDRKPDVEEELDPLEKKKKLEKLLEDYPLVVDEDDPDWPGDADGWGFSLGQFFDKITIKNKKKDDDDDDDNDDVDRPEIMWQDDNYIRPIKDIKTAEWEETVFKDISPLIILVHNRYK

SEQ ID NO: 212287 - protein, 39 aa, Glycine max
  Clone ID: PAT_MRT3847_33720C.1.pep
FKRGVAFSLSLSELSTWSIFSPSKKNVHLTVSRVQSPNV

SEQ ID NO: 212288 - protein, 196 aa, Glycine max
  Clone ID: PAT_MRT3847_33721C.1.pep
EHLFIPLIIYSTLKKYNGGWICGGCNGSGRGSGGGHGKRWGFHEGNDHGRDRTEAYYQNMIEANPSDALLLGNYAKFLKEVCDDYPKSKEYLERAILANPDDGHILSLYAELIWQLEKDANRAEGYFDQAIKSAPYDSYVLASYANFLWDAEEDEEDKDCKNKSNHSHTYPTDLFHGANHHIHLTAAIETSPLFLK

SEQ ID NO: 212289 - protein, 96 aa, Glycine max
  unsure (1)..(96): unsure at all Xaa locations
  Clone ID: PAT_MRT3847_33722C.1.pep
NCPNMPSENHIYNHPSTIKVIXHFTSCYKNCLASHTHSTKLGYPFPSCVNSVSFHFVTSKIQKYLTLTPVNKGCNCYYVRTLFIKHSNMFLHYISW

SEQ ID NO: 212290 - protein, 130 aa, Glycine max
  Clone ID: PAT_MRT3847_33723C.1.pep
CVLQVWDLYESGEVEKLVDAFLEGDFNIEEAVRFCKIGLLCTQDSPQLRPSMSSVLEMLLGEKDVNEENVTKPGMIFEFVEAKSAGKQKCKAEVDSKSLLAEGKQDDSSSSGTMSSFATMTFTAIYDRSD

SEQ ID NO: 212291 - protein, 71 aa, Glycine max
  Clone ID: PAT_MRT3847_33724C.1.pep
GASIHRMVDLVLSIDEDAAESYPVMPPVENADSTAEGSKHARSLINSDLIACYAFRNNDWRNSPFNMLYVV

SEQ ID NO: 212292 - protein, 117 aa, Glycine max
  unsure (1)..(117): unsure at all Xaa locations
  Clone ID: PAT_MRT3847_33725C.1.pep
AHAYQQLQLLAPTTSGASCYKPQLSTIFWFLFPNTTTTASATVHTDTTRASKSTDQSPHTSEKTCKTTRFENQTQATAXSRSKRPRDHHTAEPPDHVVNKEPCSGNNYTHVSDEDKA

SEQ ID NO: 212293 - protein, 75 aa, Glycine max
  Clone ID: PAT_MRT3847_33726C.1.pep
NIISSPLSLSKPSLHANGKGLSEFSDLRSSSSFLTFSRKSSYDFHSLIDFQTYAFGSRGRYKNAMTESKLDVCIN

SEQ ID NO: 212294 - protein, 123 aa, Glycine max
  unsure (1)..(123): unsure at all Xaa locations
  Clone ID: PAT_MRT3847_33727C.1.pep
AKENLKQLGRMVAKLAHANPMTVLRTIVHQIEAYREMITPVVDAFKYLTQLEYDILEYVVIERLALGGRDKLKDDGLNLSDWLQSLASFWGHLCKKYPSMELRXLFQYLVNQLKKGQGIELVL

SEQ ID NO: 212295 - protein, 405 aa, Glycine max
  unsure (1)..(405): unsure at all Xaa locations
  Clone ID: PAT_MRT3847_33728C.1.pep
VFGKVRTMRAKDHYEMREYNIDVLEDGKDLSFFAKERPYPIYPSKGRLNPIFLRDTIARFVLQIXALQALPVNVDPIPKDITQQFGLPSLHDAYFGIHKPKHINEADLARKRLIFDEFVYVQLGRLFQMLESLGSQMEKDVLLDKYRRPVNNAVCTEQWSSLTKKVLDVLPYTLTTSQQLAVSEIIWDLQRPVPMNRLLQGDVGCGKTVVAFLACIEVIGSGYQAAFMVPTELLAIQHYEQIRLELENLDEVVFKPTVALLTGSTPLKQSRMIRKGIQTGEISMVIGTHSLIADSVEFAALRITVVDEQHRFGVIQRGRFNSKLYCASSNSNMEDAITDDSSKSDAYMAPHVLAMSATPIPRTLALALYGDMTMTQITDLPSGRIPVQTFIIERNDKGLEDVYKM

SEQ ID NO: 212296 - protein, 73 aa, Glycine max
  Clone ID: PAT_MRT3847_33729C.1.pep
MIEVVLNDRLGKKVRVKCNDDDTIGDLKKLVAAQTGTRADKIRIQKWYTIYKDHITLKDYEIHDGMGLELYYN

SEQ ID NO: 212297 - protein, 68 aa, Glycine max
  Clone ID: PAT_MRT3847_3372C.1.pep
LMGCVLGVSLVLSCSGSIRNVLSQSHKRAAWWYQECLSRASCCGGLIRSWWPSEIQYLNIPRAAHASP

SEQ ID NO: 212298 - protein, 59 aa, Glycine max
  Clone ID: PAT_MRT3847_33730C.1.pep
TMLGKFCSSTVCSYFIILNGEGINSLLEFHVVLLTWNLTSILDDDKSMSQLFDTKLPPL

SEQ ID NO: 212299 - protein, 77 aa, Glycine max
  Clone ID: PAT_MRT3847_33731C.1.pep
KRHSRHTSLRQLKEVCKFSTRESILHNWVMRHFLCSICPMHQRNKIQIPDHPQDTAFSEGLAVACGTEKAGIREKPA

SEQ ID NO: 212300 - protein, 111 aa, Glycine max
  Clone ID: PAT_MRT3847_33732C.1.pep
HGKADLHWWTCWPVALVVAMAEGSRENLNSNLFAFSPKFRRSQIVLAVAEHGKPSLIEIPHFVTFLLCHRELALGFPPQKCCSLGDVVSSDDNFSSPFNFNCMIMGLWVYV

SEQ ID NO: 212301 - protein, 86 aa, Glycine max
  Clone ID: PAT_MRT3847_33733C.1.pep
LLSTLVPGTGGFESRMTLAAAKWPTKVAGVSYSSGSTLCFHASGNYSSYYYLYYYSSVPADSVFTSPSRSIIFSRPACTKSAKVPS

SEQ ID NO: 212302 - protein, 65 aa, Glycine max
  Clone ID: PAT_MRT3847_33734C.1.pep
VTAAVLTQKLSLTVLPIAAAELPIMALRVPLLFSSGCEPVNDASKLVGALGVDPTFKNAVVEDEC

SEQ ID NO: 212303 - protein, 58 aa, Glycine max
  Clone ID: PAT_MRT3847_33735C.1.pep
QRNPQIATTKNKMIKVKKFGMKVQKTLEESLVFNLPSEFQLAKTKFPDVTEKIILFIL

SEQ ID NO: 212304 - protein, 79 aa, Glycine max
  unsure (1)..(79): unsure at all Xaa locations
  Clone ID: PAT_MRT3847_33736C.1.pep
SVLSCYIPLYHRYPNPNHWFFGPXSSLYFSRTKPRATYLSLAGSINDFDCNCKKXGLNEVIQEIETLDVSHIQKEDPPT

SEQ ID NO: 212305 - protein, 58 aa, Glycine max
  Clone ID: PAT_MRT3847_33737C.1.pep
CYGTHFLKGYSSVMENIFWKAIRSVMESIFQKIYLPFRNGNSKCLFFFKKNYFLEKFI

SEQ ID NO: 212306 - protein, 163 aa, Glycine max
  Clone ID: PAT_MRT3847_33738C.1.pep
PEVIYLGDHLFSDLRGPSKAGWRTAAIIHELESEILIQNEDTYRSEQAKLHIIQELLGKLHATASSSSRTTAFNSLLEELNEERQKARSKMKMMFNRSFGATFLASTGQESAFAYNIHQYADVYTSKPENFLLHSPEAWLHVPFDVKIMPHHVKVPSSLFKTG

SEQ ID NO: 212307 - protein, 57 aa, Glycine max
  Clone ID: PAT_MRT3847_33739C.1.pep
GFCPRRKGKSPPPVIFKFRCLTTPLDGCLILFQIVEGFALVQLIPLRPQFFIHQSPR

SEQ ID NO: 212308 - protein, 74 aa, Glycine max
  Clone ID: PAT_MRT3847_3373C.1.pep
FGEMHDKLALKFSQAAFVTAWSTYARPATTLLADACPYLYAMEHDTSVSTIPGDLAIGVKVTTINNMCAYGLTP

SEQ ID NO: 212309 - protein, 207 aa, Glycine max
  Clone ID: PAT_MRT3847_33740C.1.pep
GSALCSSISVMTNLEKLRIESYGVQVIDLPFISSLPMLRKLSLFGKLKKLPEWVPQLQNLVKLSLEYSELTNDPLKSLQNMPYLLFLGMYKAYKGESLYFEDGGFQQLRELSLGGLRNLESIIIDKGALHSLKKLKFWGIRKLKKVPPGIQHLKKLEVLDIRNMPYEFNECIAPDGGPEHPIIQHVGLVEITTDFAQTRIISHLSTH

SEQ ID NO: 212310 - protein, 43 aa, Glycine max
  Clone ID: PAT_MRT3847_33741C.1.pep
AQGHDVSFKTSPDEYRDPELHNLIVETASLQSWNHTSLSDSSA

SEQ ID NO: 212311 - protein, 81 aa, Glycine max
  Clone ID: PAT_MRT3847_33742C.1.pep
KKGRKLSEQRFQKPLDRVKSLVQYPEARIQYHRVWNVVSEIQENPVKHESSYINSQEPKEFGAHNDLKALLDEEFFMPQQT

SEQ ID NO: 212312 - protein, 49 aa, Glycine max
  Clone ID: PAT_MRT3847_33743C.1.pep
INYKFRQLAELGYNRSANHVQGEIRDRLQADRRTPFCRLLAPVASRFGS

SEQ ID NO: 212313 - protein, 122 aa, Glycine max
  Clone ID: PAT_MRT3847_33744C.1.pep
EFELQVLIQDAASHYLNNSSISILLSSYRITNFFQLRNPKSNVSALSITHHVPSLAPIDQNSRHLIKRNYRLHVHLRHQDKKGLNICRQKILIPECFSRKFFTAFHLQFPLAQGVRDKRPPL

SEQ ID NO: 212314 - protein, 54 aa, Glycine max
  Clone ID: PAT_MRT3847_33745C.1.pep
FAQQSVRSAKDHIFKSNTLFKIHHYTIAAGSPTCPESIHSHPSTFHVVTKTQLN

SEQ ID NO: 212315 - protein, 47 aa, Glycine max
  Clone ID: PAT_MRT3847_33746C.1.pep
NVLNYVISGYEADLVAHRREIALMKLSLDKTDPREIISDVLKNGHMA

SEQ ID NO: 212316 - protein, 72 aa, Glycine max
  unsure (1)..(72): unsure at all Xaa locations
  Clone ID: PAT_MRT3847_33747C.1.pep
CGCCSSCKCGCGCXAXTMYPELTYAEPTTTXTLVMLVAPVXGIIKXADMGVPTENQGXTLXPYCLCNHCTCK

SEQ ID NO: 212317 - protein, 87 aa, Glycine max
  Clone ID: PAT_MRT3847_33748C.1.pep
MGLNMQPTDWSLKDPQIHTGLKTQAMASLVILAGFFWWPPHSKLAHQLLKSVHLFQMHISYVIDCTAEPSLLTFGILLFVSKNRSMR

SEQ ID NO: 212318 - protein, 259 aa, Glycine max
  Clone ID: PAT_MRT3847_33749C.1.pep
SDCLTDPSHPLSPSHLSSTRPLALLSQWYNLLPRLFRSRVRPRVRTAARRRQKGFAVSSIAAGIQFGWALQLSLLTPYVQTLGVPHAWASFIWLCGPISGLLVQPIVGYSSDRCRSRFGRRRPFIFVGAIAVAIAVFLIGYAADIGHAAGDDLTKKTRPRAVVVFVVGFWILDVANNMLQGPCRAFLGDLAAGDHRKTRTANAFFSFFMAIGNVLGYAAGSYDKLHRAFKFTQTEACDVFCANLKELFFFSMPFSRLWF

SEQ ID NO: 212319 - protein, 79 aa, Glycine max
  Clone ID: PAT_MRT3847_3374C.1.pep
VKRQVPEGSYYEISPVGLCPHDQVLEVINFIKRGWIRNIEFQGCFSLPMLEGIGSLKLANARELEFVREGLTKSVMVRF

SEQ ID NO: 212320 - protein, 69 aa, Glycine max
  Clone ID: PAT_MRT3847_33750C.1.pep
NPSSPFGTQLHTLVVYIFVDEIIALVAPATVCSRTLDIITHVMLASYEACGSCLDGLCTSCVSNYLVYS

SEQ ID NO: 212321 - protein, 132 aa, Glycine max
  unsure (1)..(132): unsure at all Xaa locations
  Clone ID: PAT_MRT3847_33751C.1.pep
IHGQHTEMLSLVHLDPNHQKTTTXAASKNEEEEEEESNSDSNKVNXNVFVREEEKQLEMDDVEFCDIGVPYYRPISKMNNYLQLDQGLFAEFGEIEKDQSVNLLSPPQGFDDQQRESNALDSFHFFDWRGDI

SEQ ID NO: 212322 - protein, 101 aa, Glycine max
  unsure (1)..(101): unsure at all Xaa locations
  Clone ID: PAT_MRT3847_33752C.1.pep
ITYPVLIIXAXQXPSAFXXXSPXXISXXXXSPFKHFLXCXXPIXVAICPXXSSLXISXCXSXFFRXVPXSXCSAXXSXXVSXXGXRWXPEPXAEFRAYVXV

SEQ ID NO: 212323 - protein, 64 aa, Glycine max
  Clone ID: PAT_MRT3847_33753C.1.pep
ALRDRAYIPMGGAILCLEVETHGTVSYVLLQCKIIALHYRLLVTYSRPKTRSAHGLWICLLNSA

SEQ ID NO: 212324 - protein, 69 aa, Glycine max
  Clone ID: PAT_MRT3847_33754C.1.pep
LSIPFIISTYICEKRGCHTLLREADCNIYVYTIFFSLTPPKIHAPSCRPLAFLPNHMYIEAACDVITPF

SEQ ID NO: 212325 - protein, 692 aa, Glycine max
  Clone ID: PAT_MRT3847_33755C.1.pep
MTSFLKPENALKRAEELINVGQKQDALQTLHDLITSKRYRAWQKTLERIMFKYVELCVDMRKGRFAKDGLIQYRIICQQVNVSSLEEVIKHFMQLSTEKAEQARSQAQALEEALDVDDLEADKRPEDLMLSYVSGEKGKDRSDRETVTPWFKFLWETYRTVLEILRNNSKLEALYAMTAHRAFQFCKQYKRTTEFRRLCEIIRNHLANLNKYRDQRDRPDLSAPESLQLYLDTRFEQLKIATELGLWQEAFRSVEDIHGLMCLVKKTPKPSLMVVYYVKLTEIFWISSSHLYHAYAWFKLFLLQKSFNKNLSQKDLQLIASSVVLAALSVPPHDHTHGASHLELEHEKERNLRMANLIGFNLETKPESREMLSRASLLAELASKGVMSCVTQEVKDIYHLLEHEFYPSDLALKALPLITKISKLGGKLSTASSVPEVQLAQYVPALERLATMRLLQQVSNVYQSMKIETLSGMIPFFDFSQVEKISVDAVKQKFVSMKVDHMKNAVIFSKKSLESDGLRDHLGNFAEQLNKARQMIYPPDGRPSKLGALLPTLTEVVAKEHKRLLARKSIIEKRKEEQERQLLEMEREEESKRLRLQKITEEAEQRRLATEYEQRKNQRILREIEERENEEAQALLQEAEKRIKKKGKKPIIEGDKITKQTLMELTLTEQLRERQEMEKKLQKLAKTMDYLE

SEQ ID NO: 212326 - protein, 119 aa, Glycine max
  unsure (1)..(119): unsure at all Xaa locations
  Clone ID: PAT_MRT3847_33756C.1.pep
GREEESKRLRLQKITEEAEQRMLAGGDEQRKRERILXEIEERENEEAQALLQEAEKRIKKKGKKPIIEGDKITKQTLMELTLTEQLRERQEMEKKLQKLAKTMDYLERGKEKRKKGRKK

SEQ ID NO: 212327 - protein, 164 aa, Glycine max
  unsure (1)..(164): unsure at all Xaa locations
  Clone ID: PAT_MRT3847_33757C.1.pep
TTIKDGLGVYYVKLTEIFWISSSHLYHAYAWFKLFLLQKSFNKNLSQKDLQLIASSVVLAALSVPPHDRTHGASHLELEHEKERNLRMANLIGFNLETKPESREMLSRASLLAELASKGVMSCVTQEVKDIYHLXEHEFYPSDLALKALPLITKISKLGGKLST

SEQ ID NO: 212328 - protein, 447 aa, Glycine max
  Clone ID: PAT_MRT3847_33758C.1.pep
MLTMASSSCSAATIHFILLSISLFSVSSLPLPDESTSKPKKIFFLPIKIDAATNMFYTTIGIGTPQHSTNLVIDLGGENLWHDCSNRRYNSSSKRKIVCKSKKCPEGAACVSTGCIGPYKPGCAISDCTITVSNPLAQFSSSYTMVEDTIFLSHTYIPGFLAGCVDLDDGLSGNALQGLPRTSKGIIGFSHSELALPSQLVLSNKLIPKFSLCFPSSNNLKGFGNIFIGAGGGHPQVESKFLQTTPLVVNPVATGAVSIYGAPSIEYFIDVKAIKIDGHVLNLNSSLLSIDKKGNGGTKISTMTPWTELHSSLYKPFVQEFINKAEGRRMKRVAPVPPFDACFDTSTIRNSITGLAVPSIDLVLPGGAQWTIYGANSMTVMTSKNVACLAFVDGGMKPKEMHSIQLEASVVIGGHQLEDNLLVIDMASSKLSFSSSLLLRNATCSHV

SEQ ID NO: 212329 - protein, 77 aa, Glycine max
  unsure (1)..(77): unsure at all Xaa locations
  Clone ID: PAT_MRT3847_33759C.1.pep
MGVPERDPAAQASQATGCRSYPTDDERLVQVLCRKAAGHHLSVAVVADDDLYKYDPWALSGXAVFGEKEWFFLRPGD

SEQ ID NO: 212330 - protein, 32 aa, Glycine max
  Clone ID: PAT_MRT3847_3375C.1.pep
ATAALMKVLVACSQYQNYNFGTELAIWRDYFI

SEQ ID NO: 212331 - protein, 55 aa, Glycine max
  Clone ID: PAT_MRT3847_33760C.1.pep
VPGGSSLRLWCSAVSAVWWLSVLCAWCGSCPVVSGGLVFVGDCWLRCGLPLGSSR

SEQ ID NO: 212332 - protein, 52 aa, Glycine max
  unsure (1)..(52): unsure at all Xaa locations
  Clone ID: PAT_MRT3847_33761C.1.pep
VAHRELXILVCQLYNEMXIQLNNICSQNPHNYYYNQYXKSSNXETSHQKLNS

SEQ ID NO: 212333 - protein, 68 aa, Glycine max
  Clone ID: PAT_MRT3847_33762C.1.pep
ERTSLEFFFFFFNLNPILYVIYGTRIINNHNLGQSQSNPKKNQSQNNPKKTNDSMYTFPTHIETYYEA

SEQ ID NO: 212334 - protein, 82 aa, Glycine max
  Clone ID: PAT_MRT3847_33763C.1.pep
MHVGFITSKVACCGQGPYNGIGLCTPASNLCPNRDVFAFWDPFHPSERANRLIVDTFMIGDSKYMHPMNLSTMLLLDATSRT

SEQ ID NO: 212335 - protein, 51 aa, Glycine max
  Clone ID: PAT_MRT3847_33764C.1.pep
MTCKTTRNIPHIKKKKKKKKKKKKKKKKKKKKKKKKKKKKKKKKKKKGGPL

SEQ ID NO: 212336 - protein, 62 aa, Glycine max
  Clone ID: PAT_MRT3847_33765C.1.pep
FSTFQWATQPTIYVVKSVSEQIDSRLYLPWGQTIGTLRALQNNHTAYHLTPQISRNCYWKPC

SEQ ID NO: 212337 - protein, 130 aa, Glycine max
  unsure (1)..(130): unsure at all Xaa locations
  Clone ID: PAT_MRT3847_33766C.1.pep
PLPSSVPSGTPVISTNVPINTHLSSNSSITNSYQTIEVPNKAASNSHSYASSPNTDSPSIKPPPIITNKTPTPQPTTNKVYLIXNNKTISIRKKRISVPKYQVHNKSSXISHTTSLIDKVTGASNQISKL

SEQ ID NO: 212338 - protein, 107 aa, Glycine max
  unsure (1)..(107): unsure at all Xaa locations
  Clone ID: PAT_MRT3847_33767C.1.pep
GGGRAPQHGKSLDRKHARIGDNYKSLDQVTDALAXAGLETANPIEAIDCTKSNQWTGGRSYHRIRLHHIAHEHNSYEQAISIIGKTXASSGEDHLIPCFGSGDASTH

SEQ ID NO: 212339 - protein, 89 aa, Glycine max
  Clone ID: PAT_MRT3847_33768C.1.pep
KSGVTPSQPAAGGFFFSSLSNRHFLFGGFPKCNSQFLFSSHHIFAHSLCRHYPACEAFWHGFLFVSLSPVIVIILFSFLSCYRLRHPAY

SEQ ID NO: 212340 - protein, 70 aa, Glycine max
  Clone ID: PAT_MRT3847_33769C.1.pep
NFYLEKNIINKRARSNQQFKPLILPLNMYITEGRPQVTELRKDHTQDNVSTDIIKPEDFTIHIDFTITLH

SEQ ID NO: 212341 - protein, 68 aa, Glycine max
  unsure (1)..(68): unsure at all Xaa locations
  Clone ID: PAT_MRT3847_3376C.1.pep
AISTFPLTFIHEHQMNHVAXMRNILTSIQKVWNWYKICFYALKSETATIXTLGLIDLNSKTHHVFGEI

SEQ ID NO: 212342 - protein, 60 aa, Glycine max
  Clone ID: PAT_MRT3847_33770C.1.pep
IMLLLLCPISGLLEGVQTWLAQVCLHVLNYSNEPRNTPIGCSIMAWLVCWCLYAPAKGPD

SEQ ID NO: 212343 - protein, 111 aa, Glycine max
  unsure (1)..(111): unsure at all Xaa locations
  Clone ID: PAT_MRT3847_33771C.1.pep
PRPRNSFRPTRARNDKHGAHESHTDQISAADRQIPTKDDRNAEIIYLRQRAAGEQKLXPEGKEIEGNHVPVLXNNAGENHVIQVPVTERDEMRSYRASTCTTAMVSTNRKP

SEQ ID NO: 212344 - protein, 92 aa, Glycine max
  Clone ID: PAT_MRT3847_33772C.1.pep
IGNFAITGLRGLNSITWFINNVLQLISIAPGLSPTTPHFQTSVTFSPSYSSLRIGNPNRPGFLGGPTIILRLLLCWSHCPQHQRFSALYWVP

SEQ ID NO: 212345 - protein, 61 aa, Glycine max
  Clone ID: PAT_MRT3847_33773C.1.pep
MVHSREATRWISVCEKAVDVACILRGSILTPVLIETLAAVLQMDEILYELKEHLLGINCGR

SEQ ID NO: 212346 - protein, 117 aa, Glycine max
  Clone ID: PAT_MRT3847_33774C.1.pep
MAVSDAVVSNLTLLYVALILSIKAYGFLCGPSFSGCFVLVASTAAVALILVATLTWDVSRKATYAFAAVQPPPPPPPPPHHTHETCKGGICWHGVAVRSPASQVRFRLPQNLPYTTL

SEQ ID NO: 212347 - protein, 67 aa, Glycine max
  Clone ID: PAT_MRT3847_33775C.1.pep
RSMCGGAIISDSIGGKRCRNLFAHELRDELDPFYDLLDFDTTTTTINQPPLADKKGVLSCEKKRRKV

SEQ ID NO: 212348 - protein, 312 aa, Glycine max
  Clone ID: PAT_MRT3847_33776C.1.pep
FKGHLVSALEFFYDMVAKGFEPNVITYTILINGFCKQGRLEEAAEIVNSMSAKGLSLNTVRYNCLICALCKDGKIEEALQIFGEMSSKGCKPDLYAFNSLINGLCKNDKMEEALSLYHDMFLEGVIANTVTYNTLVHAFLMRDSVQQAFKLVDEMLFRGWHVDNITESEYSGVQLLALGTVKGLGLFEEMLGKGIFPTIISCNILISGLCRTGKVNDALKFLQDMIHRGLTPDIVTYNSLINGLCKMGHVQEASNLFNKLQSEGIRPDAITYNTLISRHCHEGMFNDACLLLYKGVDSGFIPNEVTWSILIN

SEQ ID NO: 212349 - protein, 85 aa, Glycine max
  Clone ID: PAT_MRT3847_33777C.1.pep
ALLCNITILKQENPELKSSPSQTMYASNVKVTKCSYIHIDVEFRRGDLEKDRNEYHRQNFENGKCFLIQLNVVHRLCKGSIILYV

SEQ ID NO: 212350 - protein, 74 aa, Glycine max
  Clone ID: PAT_MRT3847_33778C.1.pep
LGDTLSTHFSCIWKRRGSLYVGDSILTMWVSASCLFLRIGHSIKRHTTLVPCDTSRFHMDKNIGGCLRNPKLLF

SEQ ID NO: 212351 - protein, 431 aa, Glycine max
  Clone ID: PAT_MRT3847_33779C.1.pep
MKHFALVFLLAILVPQECFHVSVEARDDFVRTRGIHFTLNGYPYYANGFNAYWLMYTASDPSQRFKVSNAFREAASHGLTVARTWAFSDGGYRPLQYSPGFYNEQMFTGLDFVVSEARKYGIKLILSLVNNYENFGGKKQYVNWARSHGQYLTSDDDFFRSPVVKGYYMNHVRTVLNRYNRFTGMHYKDDPTIMAWELMNEPRCTSDPSGRTIQAWITEMASFLKSIDRNHLLEAGLEGFYGQSTPQRKTMNPGFNIGTDFIANNRIPAIDFATVHCYPDQWVSSSNIQYQLSFLNNWLSAHFIDAQYHIKKPILVAEFGKSFKGSSSYERDEVFNSVYYKIYASAKRGGAASGALFWQLLTEGMESFQDGYGIILGQSSSTANLIARQSRKLYLIRKIFARVANMRRWQRARARGFSGSGGGNGGRYIDN

SEQ ID NO: 212352 - protein, 83 aa, Glycine max
  unsure (1)..(83): unsure at all Xaa locations
  Clone ID: PAT_MRT3847_3377C.1.pep
MGTETPXINIVVIXHVASGKSTTTGHLIYKLGGIDQAXDCXXXXXAAXMNXRSFKYAXXLXKLKXERXXGITIDIALXQFETT

SEQ ID NO: 212353 - protein, 48 aa, Glycine max
  Clone ID: PAT_MRT3847_33780C.1.pep
QIKGQKIFKGSSRTREMYIKTRGALYSRKNSLLPRCYINASRGFDRIN

SEQ ID NO: 212354 - protein, 96 aa, Glycine max
  unsure (1)..(96): unsure at all Xaa locations
  Clone ID: PAT_MRT3847_33781C.1.pep
PCVAWRPTRWQFRFTCMAKPKTVRKVCHIFKKQLXLPXESSVTGHSKSAALGAHSLDTLEIVIGLDDEFRITVEEEIAQTITTVQETANMIYKLLE

SEQ ID NO: 212355 - protein, 94 aa, Glycine max
  Clone ID: PAT_MRT3847_33782C.1.pep
TNPIWVVKTRLQLSARKKHISPTFYSATPSKSPLPGPIAASAAALSKAGPSATAVPAQAPTKAAANAISTTLDIVRNEGFRGLYRSMSASYLGV

SEQ ID NO: 212356 - protein, 36 aa, Glycine max
  Clone ID: PAT_MRT3847_33783C.1.pep
TPIELKTFNVFHLLKKINIPLLPKGSYLAKVHWRVT

SEQ ID NO: 212357 - protein, 399 aa, Glycine max
  Clone ID: PAT_MRT3847_33784C.1.pep
MPINIQSSPKKEQGKNRTETEMGCNSSKAEPPPLENTMHHHHHADVAEFQKPKTLKEEVVLQIPGCKVHLMDQGEALELAQGHFTIMKIMEQNVALATIIKVGNSVQWPLTKDEPVVKVDALHYLFSLPVKDGGEPLSYGVTFPEQCYGNMEMLDSFLKDHSCFSGLERNKKSDLKWEEFAPRVEDYNHFLARAIAGGTGQIVKGIFLCSNAYTNQVQKGGETILNTAAEKNNGGMVTESMNHRSDATKNNATNDNLKRVRKLTNMTEKLTKSLLDGVGIMSGSVMTPVLKSQPGQAFLNMLPGEVLLASLDAVNRVFEAAEAAEKQTFSATSQAATRMVSNRFGEEAGEATEHVFATAGHAVNTAWNVSKIRKAINPASSANAAGALRNSAKNRNVIY

SEQ ID NO: 212358 - protein, 108 aa, Glycine max
  Clone ID: PAT_MRT3847_33785C.1.pep
CLLGCPLRIDNTKASEDPQALSISSHVVTEGISIFCPDASFLVKMDKVKGKPQSLVFSHGREKREHNLRGCYVREKLKLVKKEKKAEDSAWKGKGRRAMWLQKNHWDK

SEQ ID NO: 212359 - protein, 39 aa, Glycine max
  Clone ID: PAT_MRT3847_33786C.1.pep
YQIYIFIIEYTSTLQSYLKYGIITLSIFIIHCLFFLLFL

SEQ ID NO: 212360 - protein, 85 aa, Glycine max
  Clone ID: PAT_MRT3847_33787C.1.pep
VGKGCGFVQFADRKNAEEAIHALNGTVIGKQTVRLSWGRSPGNKHWRSDSNGGYFGGQSYGGHGFAVRQNQDIAMQPATAIQGAS

SEQ ID NO: 212361 - protein, 57 aa, Glycine max
  Clone ID: PAT_MRT3847_33788C.1.pep
LPVSQSLTISSNLCTAQHISHLYPALVSSQHRTVPHPLPPRPSYQQNQLLPFSGRLG

SEQ ID NO: 212362 - protein, 202 aa, Glycine max
  Clone ID: PAT_MRT3847_33789C.1.pep
MRYILGEHNILFLKSFAFTILFLSCIAIRLNLCLSSIPSSLKSIPLEGHLKFDQVSLSHAARDFGNRYQYNPMAVLQPESVSDIVATIRHIWLMGPGSHLTIAARGHGHSLQGQAQAHGGLVINMESLKVPEMQIHVDEGNKSPPYVDVSGGELWINILHETLRYGLAPRSWTDYLHLTVGGTLSNAGVSGQTFMHGAQISN

SEQ ID NO: 212363 - protein, 99 aa, Glycine max
  Clone ID: PAT_MRT3847_3378C.1.pep
FNVKIESGECRVHSSALASLKHCRPFTSVACVIPLALLLVSWWWFHRHRGPFITVVLLETLVLLSTSICEPYSSTTVLRNVSTTSVLSSLEISRALPLP

SEQ ID NO: 212364 - protein, 76 aa, Glycine max
  Clone ID: PAT_MRT3847_33790C.1.pep
GCFFFFFFFFFFFFFYPAQDKCNCLKGIFEFSTQKIHQIEHWLYNIVKGPNNAEGGSNKQNWPVQLTRDHSIGHFL

SEQ ID NO: 212365 - protein, 153 aa, Glycine max
  Clone ID: PAT_MRT3847_33791C.1.pep
MSSLYRGESRRYNNKPRGRHNLTTQKKQEIKEAFELFDTDGSGTIRALGFEMTEEQINKMIEDVDKDGSGAIDYDEIEYMMTAKIGERDTKEELMKAFNIIDHDKNGKISALDIKRIAKELGQNFTDREIQEMVDEADQDNDREVSAEEFIIV

SEQ ID NO: 212366 - protein, 115 aa, Glycine max
  unsure (1)..(115): unsure at all Xaa locations
  Clone ID: PAT_MRT3847_33792C.1.pep
KSSSKVAGWCIYLNGKDWNGPSDGKWNLGTSARMKVEGVKIWNACSLSNFIAXGIPGAYVLGHRPLYRALRTDRAPNFGWXSLFYLLYLGYWILTAVATSIALKGKSLTGMLPVI

SEQ ID NO: 212367 - protein, 193 aa, Glycine max
  Clone ID: PAT_MRT3847_33793C.1.pep
MSSLYRGESRRYNNKPRGRHNLTTQKKQEIKEAFELFDTDGSGTIDAKELNVAMRALGFEMTEELINQMKADLDKDGSGAIDYEEFEYMMTTKIGERDSKEGKISASDIKCIAKEPGQNFTNRDIQEMVDEADQDSKLFQSYPCQHSNFTAKLLLLILWIFILRFTGCGCMGVMGPWTSDFADIMCVYKKNTI

SEQ ID NO: 212368 - protein, 83 aa, Glycine max
  Clone ID: PAT_MRT3847_33794C.1.pep
YELKVYRISSMDRQCPSLLLPFVQQVVGYPFAGLYALISYFADPSAWADLNHLISKLLAYISSAPHVHTYLGHAQRVRLIAPS

SEQ ID NO: 212369 - protein, 67 aa, Glycine max
  Clone ID: PAT_MRT3847_33795C.1.pep
LIHSIGQEHTLLLIVTRRCIMNRDKGNKVHVIFRPRQIPDNGLVIVGGGLIIAGGDDESKVDPIYNL

SEQ ID NO: 212370 - protein, 76 aa, Glycine max
  Clone ID: PAT_MRT3847_33796C.1.pep
MAVAPIPPVPRWRKRQEASSAVAASSAPAAASSEAPVSSAAPQSSAAPALSEAPTSSAAPQSSQAAQSSAAPPTST

SEQ ID NO: 212371 - protein, 121 aa, Glycine max
  Clone ID: PAT_MRT3847_33797C.1.pep
MARTFVLMLVAAAALLLSSTMAQSPASSPALSPTNTPVATPPRRALSPSPVPAAVPPSSSPPAPPTSSPSEPPIAAATPNIPPSTISTPPSEAPGPAANGAVFNRVGGSALILIIASAMLV

SEQ ID NO: 212372 - protein, 74 aa, Glycine max
  Clone ID: PAT_MRT3847_33798C.1.pep
STQPHEVEHQFRASTMHCLISSFMHFHSDRLYVVRHGMLKKMIDFVSLSDAPPDILEWSSQIKSHSHILLIARA

SEQ ID NO: 212373 - protein, 58 aa, Glycine max
  Clone ID: PAT_MRT3847_33799C.1.pep
GAGKAAGKVRPALNGNLTGMAFRVPTVDVYGGDLPARLEKEASYYEIKNAIKEESEGK

SEQ ID NO: 212374 - protein, 33 aa, Glycine max
  Clone ID: PAT_MRT3847_3379C.1.pep
DHHVRLIFIEKHIRLGNIWLTSPHLTDYKTVAT

SEQ ID NO: 212375 - protein, 75 aa, Glycine max
  unsure (1)..(75): unsure at all Xaa locations
  Clone ID: PAT_MRT3847_337C.1.pep
DFGRIADDLPTPTKAVELIKRYGLNRVKLYDTDSTVVNRALXNSGKTVVVAMPEELLXNSVAEQVLNDTWVQANI

SEQ ID NO: 212376 - protein, 37 aa, Glycine max
  Clone ID: PAT_MRT3847_33800C.1.pep
KRLKRGPRNIKSSTHLRTFPSIWDKERSKAFRGQNEA

SEQ ID NO: 212377 - protein, 52 aa, Glycine max
  Clone ID: PAT_MRT3847_33801C.1.pep
MVILFLASFYYFIFFKKFSFPIASFQILANVEQPFRDVRIQTGFGELGISKQ

SEQ ID NO: 212378 - protein, 43 aa, Glycine max
  Clone ID: PAT_MRT3847_33802C.1.pep
TKTFSYMSTAGCWRYTKNLRPMTLKSLNRPMRASSVTRVPANP

SEQ ID NO: 212379 - protein, 98 aa, Glycine max
  unsure (1)..(98): unsure at all Xaa locations
  Clone ID: PAT_MRT3847_33803C.1.pep
QRNKQSPSKTDXXXKEXXEQXXEKAKTPPPXQXNEDPXXXXGXXKQATXGXXNXQPPGRGNXRDRXKXXAXKXXEGKXKDEAXRXXXXKGKQXXEAAG

SEQ ID NO: 212380 - protein, 72 aa, Glycine max
  Clone ID: PAT_MRT3847_33804C.1.pep
ILFNLKDHLQYQSNGCCTIKESPVLGRANKKGNTGLYVVTLACLVAALRRAEPRSRRSVTDLQMVMAAANQQ

SEQ ID NO: 212381 - protein, 92 aa, Glycine max
  Clone ID: PAT_MRT3847_33805C.1.pep
RSIGMPFYFCHNLLKCNKYEGFCTQETKCLNPPVVGVLLLLTYDKRAHQIFHYRGTDCYLGPPKPHAFLSCRALMSTSVLGNFFYACTNTLV

SEQ ID NO: 212382 - protein, 87 aa, Glycine max
  Clone ID: PAT_MRT3847_33806C.1.pep
VIFAEGFNKGFWFQSMLVFYMDYVVVNKRELVFRTKFEISGQHLATVAPGTRLLTNGGRIGFLLNRVPPPSVGWDPANTPLKNKEFL

SEQ ID NO: 212383 - protein, 55 aa, Glycine max
  Clone ID: PAT_MRT3847_33807C.1.pep
VQAHLPFEGKVWEDLTSLNGNNSKNWLFVFCVLTEVLFPHNSSFVGILILHKNTI

SEQ ID NO: 212384 - protein, 69 aa, Glycine max
  Clone ID: PAT_MRT3847_33808C.1.pep
LLMPKVTTVVGGRAMPQSISAMHHHRQSYDNFMSDAHGRRLHSSDYSQELRTRSSSLMINDVDRVVTIG

SEQ ID NO: 212385 - protein, 281 aa, Glycine max
  unsure (1)..(281): unsure at all Xaa locations
  Clone ID: PAT_MRT3847_33809C.1.pep
MENGSFQEISKGKYDCLLFDLDDTLFLXFRTSEQVKKNIQEYMLQKLWISEAKVPELCFSLYKTYGTTMAGLKAIGYDFDYDDFHGFVHGRLPYDMLKPDPVLRGILLSLPVRKVVFTNSDKAHASRVLHRLGLEDCFERVISFETLNSSNEDGSEYKQSSTEIFDFYEYIGRPDSDIVLPRTPVVCKPFQDAYEKVFNMADIDPQRTLFFDDSLRNLQTGKSLGLHTVLVGTSVRTTGVDHALESIHNMKEAFPELWEANEKPESVECSRKVSIETSVIA

SEQ ID NO: 212386 - protein, 96 aa, Glycine max
  Clone ID: PAT_MRT3847_3380C.1.pep
FENHNNTMQLKLVALTLSIFWPWWSFEGAVGDPQLFFLTFECSTVSARDLSNLHQNRNASFAALRSQVSNQSKHFSAAQSTSGSDPVYATFQCRNY

SEQ ID NO: 212387 - protein, 67 aa, Glycine max
  Clone ID: PAT_MRT3847_33810C.1.pep
ARTQTALSEKGRTITELTSVAHNRFEIPQNSAELYAEKVNNTGLCAITHAETLRYQLLAGLAVRRAC

SEQ ID NO: 212388 - protein, 56 aa, Glycine max
  Clone ID: PAT_MRT3847_33811C.1.pep
ETSGHAGLPAEFKQINTRRSPAAYYMRSFERPLYRIQGYLVLHPTSYLSLSVIQSH

SEQ ID NO: 212389 - protein, 172 aa, Glycine max
  Clone ID: PAT_MRT3847_33812C.1.pep
ARVAAHVKKQRLVTCPVCNANWKQLLQNADENKPHAELKTTKSFKPHNYNDDEPLMSPTSVSRFNPIPESNENEEEEDEEEQNDEQIKFNLSSSLVKTRNIEAFFSPEAAIVASNWSSETYVTVLNVKVQPRNAAANRPPVDLVMVIDVRGSVTGEELWMLKRSMQVVISSL

SEQ ID NO: 212390 - protein, 70 aa, Glycine max
  unsure (1)..(70): unsure at all Xaa locations
  Clone ID: PAT_MRT3847_33813C.1.pep
GRPRRXKKDHRSKRVKAPHGDEEEQRGKGKGGVAEXTMTLFKNRMVYPISRLPTPRETHYEIRGSLWRQP

SEQ ID NO: 212391 - protein, 61 aa, Glycine max
  Clone ID: PAT_MRT3847_33814C.1.pep
IKRKLLNVSASKVAFQSPLCLSGRHRFVYNMGHDQQKTAQGTVFLLSTKVLKERSLEERLE

SEQ ID NO: 212392 - protein, 264 aa, Glycine max
  unsure (1)..(264): unsure at all Xaa locations
  Clone ID: PAT_MRT3847_33815C.1.pep
MENIPESSSRGTKRRRDEDSDAGNTSSLEDDLTFTDTLVALRIMRAQFPHVHKWCGDACFQSSVEPFILKSQLYSIVKDRTQVDRELESLRRDKVLRVFKLNTGQDDHAIMFLDDYLNQIDHVVKRMEEKKIGECEAFGWFKTHVLDSKLEPGINHQELCSLLSLGGKVKDSHISLLINAGILTRQLIDPNMYWXFAIPNIGSLLKGLVQGRKEIISLLSRHRYKEXMMLASLEKKRLRMSXLDIRFLLRDLXGSGHLKLTRLQ

SEQ ID NO: 212393 - protein, 113 aa, Glycine max
  unsure (1)..(113): unsure at all Xaa locations
  Clone ID: PAT_MRT3847_33816C.1.pep
TLXHHLEXSSSCVIFSXSSSVVHXSSSGPLSIIPSRSSTTXEHXXLPAVRDFLQLRIASIARRASLCALLQPPSGKASTHKEPGVHGSCEVGXCIGHWGFPLGRSVVTRCRIX

SEQ ID NO: 212394 - protein, 115 aa, Glycine max
  Clone ID: PAT_MRT3847_33817C.1.pep
MENIPESSSRGTKRRRDEDSDAGNTSSLEDDLTFTDTLVALRIMRAQFPHVHKSSVEPFILKSQLYSIVKDRTQVDRELESLRRDKVLRVFKFTSIVDWYDALFTLVFFRENIKD

SEQ ID NO: 212395 - protein, 66 aa, Glycine max
  Clone ID: PAT_MRT3847_33818C.1.pep
LLNRYPAFGHSVLIFPCASEVFNIFQLSSWVSRMEKVVLDIGIGIMFLCLFPDLLILLFITQLMCV

SEQ ID NO: 212396 - protein, 66 aa, Glycine max
  Clone ID: PAT_MRT3847_33819C.1.pep
HMIYKGDRTLHIQFRYGCNPFRTNLRYMDPLCPGLTVSLQLNPALERTPCGGHLIVFYPAVRLCLL

SEQ ID NO: 212397 - protein, 45 aa, Glycine max
  Clone ID: PAT_MRT3847_3381C.1.pep
PTRQPTRPSHCSAITASSQFLTSSALLHLITDRRDQLHVLQGCES

SEQ ID NO: 212398 - protein, 103 aa, Glycine max
  unsure (1)..(103): unsure at all Xaa locations
  Clone ID: PAT_MRT3847_33820C.1.pep
FQQTSFIVSPKINPLAPVLPRQEXKNPAVTQFNRLNKNALFPSWRNKKKVRHTLPYQQFPNLKGQRAPPCRGPLSPSGLGDTPNGTVTFAKTETPRLLHFFPF

SEQ ID NO: 212399 - protein, 116 aa, Glycine max
  Clone ID: PAT_MRT3847_33821C.1.pep
MGIGEKSPSKSFNLHHHHHREGKNKQQEFRGVPKGCMAIKVGQGEEQQRFVVPVIYINHPLFMQLLKEAEEEYGFDQKGTITIPCHVEEFRNVRGLIDRDKSLHHHHHHHVGCFGF

SEQ ID NO: 212400 - protein, 48 aa, Glycine max
  Clone ID: PAT_MRT3847_33822C.1.pep
TGLLYLLMPYSSLVSRIMFRLPHFQPQASSLLRCSCGLMFRQVRSHNS

SEQ ID NO: 212401 - protein, 43 aa, Glycine max
  Clone ID: PAT_MRT3847_33823C.1.pep
YYFINFVFILEGLLKKKKRACLSKRSNLTYPCIPNSYTFSINL

SEQ ID NO: 212402 - protein, 91 aa, Glycine max
  unsure (1)..(91): unsure at all Xaa locations
  Clone ID: PAT_MRT3847_33824C.1.pep
AALQSSHDKESADEGPADGXSIQLSHDLESMQNNKIKMDVKASEEEFRDVSRGKQTLGMPRKDSLGELLLQLPRIASLSKFLFDISEDSDN

SEQ ID NO: 212403 - protein, 52 aa, Glycine max
  Clone ID: PAT_MRT3847_33825C.1.pep
ACAPRVTLLIKDRSMEQHKSTTQAINPNPYLTMILPRTANLQGQAYRATRGQ

SEQ ID NO: 212404 - protein, 61 aa, Glycine max
  Clone ID: PAT_MRT3847_33826C.1.pep
MKFNIANPTTGCQKKLEIGQHGELRPFWDKRISQDVVGDALGEESKGYVSKILNVATSNDF

SEQ ID NO: 212405 - protein, 83 aa, Glycine max
  unsure (1)..(83): unsure at all Xaa locations
  Clone ID: PAT_MRT3847_33827C.1.pep
ALLCLVRSLSLLFTLGLARXSRARPXHVWLAVWSHTPIPSSLRNLLKPVPSGVEFADHPFQIAAPLYPTTFFSNEDLLPCPTM

SEQ ID NO: 212406 - protein, 81 aa, Glycine max
  Clone ID: PAT_MRT3847_33828C.1.pep
GRARGRERIGIGASNYHDSSRKQTRQHDTTQGSTKHICTETPDACHNQTKSPVSLSLAARELIPFPLKINLSHLISFKLFI

SEQ ID NO: 212407 - protein, 89 aa, Glycine max
  Clone ID: PAT_MRT3847_33829C.1.pep
GLCTSTVETHMKGLLLMNKEEDWLVFDVEKNNDNNVNLELYLVGNFLTKEVLRVSIMKERMFSIWRPKRGVSRKMLHGHSYFNFFTNWT

SEQ ID NO: 212408 - protein, 49 aa, Glycine max
  Clone ID: PAT_MRT3847_3382C.1.pep
GLLFVILSFCQILLSEVRNIILFLSSKTSKFSMAYVVRVKTLVFSTNKK

SEQ ID NO: 212409 - protein, 182 aa, Glycine max
  Clone ID: PAT_MRT3847_33830C.1.pep
MISNPMLMLLVVVLLVVGFAKSDLSKDREECADKLIDLASCVPYVGGEAKTPTIDCCTGLKAVLDRSKKCLCILIKDRDDPNLGIKINATLAIQLPSACHSPANITQCVDLLHLAPNSPDAKVFEGFQKSAKTNSSTPVSVSSGAEKGSSSSAQEKSGAVSTITKAHHLFYSILPLPLLFLV

SEQ ID NO: 212410 - protein, 70 aa, Glycine max
  unsure (1)..(70): unsure at all Xaa locations
  Clone ID: PAT_MRT3847_33831C.1.pep
GDDDKSSWAFFHERIAQAPEQVSKYYRNTNAIPFWPVSSGRPSDADLPKCRCXSGPMLCRIDIVPLLLYC

SEQ ID NO: 212411 - protein, 40 aa, Glycine max
  Clone ID: PAT_MRT3847_33832C.1.pep
VLFMHCPQYYHCLKVLRYHNKNVRLLCNCDRYGVHFLFLK

SEQ ID NO: 212412 - protein, 51 aa, Glycine max
  unsure (1)..(51): unsure at all Xaa locations
  Clone ID: PAT_MRT3847_33833C.1.pep
SLSXIKRKLIIFKFKRSGQIFLLSFIRSNYNHMIISYIYFGKIYPQASLNS

SEQ ID NO: 212413 - protein, 109 aa, Glycine max
  unsure (1)..(109): unsure at all Xaa locations
  Clone ID: PAT_MRT3847_33834C.1.pep
MASKLILNELKDXPVDPSTSCVANPXXEDIFHLQATIIGPADIPYTRGVFLISIHFPPDYPFKPPKDAFLTKVFHPNININFSIFLYILKEQXWNPTLTISNVLFFKFP

SEQ ID NO: 212414 - protein, 59 aa, Glycine max
  Clone ID: PAT_MRT3847_33835C.1.pep
PSVIRCSSVGNGFQEVRFEERGILLPRFRSCQCEREHAGFLFALSNTKRNPVVRFCLIV

SEQ ID NO: 212415 - protein, 99 aa, Glycine max
  Clone ID: PAT_MRT3847_33836C.1.pep
TVEVTVTCSSVRPSTALGSVRRASTGDEFQHAAACARCFTLHAASTQWDFIDGFQQLTTTTSKHSKLQDLWQSSVVVEGGATQERGERETREYVNAAMH

SEQ ID NO: 212416 - protein, 59 aa, Glycine max
  Clone ID: PAT_MRT3847_33837C.1.pep
TTTFLNFTKRPSLNFRRIRRAMTRPGPPRGHTKASPFYQAVRKTQLTASRHNQVPKVSQ

SEQ ID NO: 212417 - protein, 61 aa, Glycine max
  Clone ID: PAT_MRT3847_33838C.1.pep
MTRKKIPIKKIDNINARQVTFSKRRKGLFKKAQELSTLCDAEIALIVFFATGKLFEYASSS

SEQ ID NO: 212418 - protein, 195 aa, Glycine max
  Clone ID: PAT_MRT3847_33839C.1.pep
MKKVFVAIFHLLVVFVLTATASEPEPPVTPSGPPKAGPPRAPISTSGPPKEGPPRVLITTSRSPKAGPPRTLVTASEPEPPVTTSGPPKAGPPRAPISTSRPPKEGPPRVPITTSGPPKAGPPRAPVTASEPEPPITPSGPPKAGQPRAPITTSGPPKAGPPRAPITTSGPPKAGPPRAPITTSGPPRTPITTSG

SEQ ID NO: 212419 - protein, 51 aa, Glycine max
  Clone ID: PAT_MRT3847_3383C.1.pep
ARDYLLTKRASLWRWCVKPTIISNSVYRTGRQRCYPDIEEFMICNSLYTET

SEQ ID NO: 212420 - protein, 131 aa, Glycine max
  Clone ID: PAT_MRT3847_33840C.1.pep
MLHQFTLFAPIFSGGNNAGRCSFAGNSSVRDVRSLRFMKQASGRQSNNEHGVFSETMDRAKHRATTAYGGRAQEGVLEEESSKVIESRPSWKAFPGQSFPLGVSEVDSGINFAIFSQNATAVTLCLVLPER

SEQ ID NO: 212421 - protein, 90 aa, Glycine max
  Clone ID: PAT_MRT3847_33841C.1.pep
KKAFGKLVPTLKNPPPKTVIPKKVFKPPKSKGGPLSEFGGKKIGNFSPGPPIRVFKRANFKVKICQKFFTGTLGNNKGPCFPLGGTNKNF

SEQ ID NO: 212422 - protein, 50 aa, Glycine max
  Clone ID: PAT_MRT3847_33842C.1.pep
CEDSTDDSLSLTRIVFRCVLFQIVVRHFVVREVGSDSNCSIPLLRVMSLF

SEQ ID NO: 212423 - protein, 400 aa, Glycine max
  Clone ID: PAT_MRT3847_33843C.1.pep
MQAAATTPLYQLVSFKPKLQTFPSKSQLCPLGTPFCRLGMASVSGFRLRPLRAVGGSSSSSASGDDGFVTLIEYVAKEGMNVKDDLVVLLDHIQYACKRIAALVASPFNYSLGKQTGHGSVGSDRDAPKPLDIVSNEIILSSLRKSRKVAVMASEENDAPTWISDDGPYVVVTDPLDGSRNIDASIPTGTIFGIYKRLEELDNLPTEEKAMLNSLQSGSKLIAAAYVLYSSATILCITFGSGTQAFTLDHSTGDFILTNPSIKIPPRGQIYSVNDARYFDWPEGLRQYIDTVRQGKGRYPKKYSARYICSLVADLHRTLLYGGVTMNPRDHLRLVYEANPLSFIVEQAGGRGSDGKNRILSLQPVKLHQRLPLFLGSLEDMEELESYGDIQQKVNPGYEV

SEQ ID NO: 212424 - protein, 120 aa, Glycine max
  Clone ID: PAT_MRT3847_33844C.1.pep
TGCLNIHVGANDETAVTTTKPYQRWMLFFLRLFRRLLSFFFLLLFFLIFLLLLLLRPPQATFNNFTFGCHPKCEPIHDTSASYRLNTTCYALHTPTPPTLILPLMQVYRYLGTLPIHRST

SEQ ID NO: 212425 - protein, 55 aa, Glycine max
  Clone ID: PAT_MRT3847_33845C.1.pep
KKLLCHVKTRYCLREEFYYFLDALNITNDFNALAYKMVFLFLAWLAINDGLIVET

SEQ ID NO: 212426 - protein, 160 aa, Glycine max
  Clone ID: PAT_MRT3847_33846C.1.pep
VEVRYTDVDYLDFSDAAALMAVGDSPYKRTTYRYSPLLAFLLIPNSFIHRSWGKFLFSASDLLVGYFIYYILKLRKVPENLCNYSVMTWLFNPFTFTIGTRGNCEPIVCAVVLWIIICLMKGTCPKAAFWCGRRENFRRYPIIYSIPIILVLDPNFFPSN

SEQ ID NO: 212427 - protein, 161 aa, Glycine max
  unsure (1)..(161): unsure at all Xaa locations
  Clone ID: PAT_MRT3847_33847C.1.pep
NKKKQKEGKKNIEXQLEKLKKYATVVRVFSHSHIRKFKGGKHNKAHIMEIHVNDGSIAQKVDFAYSFFXKXLPIDALSHKDEMIDIIGATNGKGYEAVVTRXSVTRLPRNTHXYYKKATIIGPCHSTTFSFTVSTAGHNGFHPLTDLNKKVYKLXKPRDES

SEQ ID NO: 212428 - protein, 67 aa, Glycine max
  Clone ID: PAT_MRT3847_33848C.1.pep
PRSLMSGVRDQLIPAAATFMAPKLILARYNADGKPCVPLMLTIPLRCVYKSRPTPSKCAKGRTPDGH

SEQ ID NO: 212429 - protein, 79 aa, Glycine max
  Clone ID: PAT_MRT3847_33849C.1.pep
EFTIWKMLIRIKKGVLLLQTCYDERSDLSAEVQDTLFHQHGLCMKKGHALNASIKRSNELKTLDKEYSKESNHCETTNT

SEQ ID NO: 212430 - protein, 54 aa, Glycine max
  unsure (1)..(54): unsure at all Xaa locations
  Clone ID: PAT_MRT3847_3384C.1.pep
KININKYIXXFNICYKPHIYKNTTMVXRNFRKIYLTDLSLSNPGRVRSXGFPAG

SEQ ID NO: 212431 - protein, 68 aa, Glycine max
  Clone ID: PAT_MRT3847_33850C.1.pep
TVDLWYNDRKEVLQWQEERKKEARVLHCVYTLLGRARRFPLMAQANTYQKGHIERAAINTPVQVLSSF

SEQ ID NO: 212432 - protein, 63 aa, Glycine max
  Clone ID: PAT_MRT3847_33851C.1.pep
MAGNQDQFEIKFRLTDGSDIGPKSFPAATSIATLKESVLAQWPKGYLCNCCLFLYASLFGLLV

SEQ ID NO: 212433 - protein, 64 aa, Glycine max
  Clone ID: PAT_MRT3847_33852C.1.pep
KLQRDWAKPITGERRGGSHSNPRGELKWGRGGHRSIRPQWTSVREKPKRGWKNKRALGYLGKSI

SEQ ID NO: 212434 - protein, 93 aa, Glycine max
  Clone ID: PAT_MRT3847_33853C.1.pep
GISQVGDSAIKLFGADIRNILHFPIKPTTHFTDFQLSLTQCEIQRLPQPIIIMNGLEESTNDEVDVPLNEVSSKQIDPQKDGNSAPNIYKNPT

SEQ ID NO: 212435 - protein, 105 aa, Glycine max
  unsure (1)..(105): unsure at all Xaa locations
  Clone ID: PAT_MRT3847_33854C.1.pep
HASAHASAHASGTYKKNGTAAAIQYGTGAISGFFSYDSVRVGDIFVKNQEFIEATREPGVTFLAAKFDGILGLGFXEILCGKACLVLYYFVFYSFIKLTIFLYFY

SEQ ID NO: 212436 - protein, 64 aa, Glycine max
  Clone ID: PAT_MRT3847_33855C.1.pep
HFFFLPYHFLHSNSNTYYFSNLNKSLYDLKPSPRQWNRTFNEFMAHIQFHRSHYDDCVYFKFPF

SEQ ID NO: 212437 - protein, 344 aa, Glycine max
  Clone ID: PAT_MRT3847_33856C.1.pep
MAMSVGVALPSTTTSLSFLRYRSRSPIQNKIRFPRQIVSKLNSAEVQVQTCVWDWRGYSIRYQHSGNIGPALVLVHGFGANSDHWRNNISVLAQSHRVYSIDLIGYGYSDKPNPRQIGDHSFYTFETWATQLNEFCLDVIKDEAFFICNSIGGVVGLQAAVLAPHICQGIILLNISLRMLHIKKQPWYGKPFIRSLQRLLRDTDVGKFFFKTIATKESVRNILCQCYHDTSKVTDELVQIILGPGLEPGAAEVFLEFICYSGGPLPEELLPQVKCPILIAWGDKDPWEPIDIGRNYENFDSVEDFIVLPNVGHCPQDEAPHLVNPLVESFVARHAKSSTSTSHC

SEQ ID NO: 212438 - protein, 42 aa, Glycine max
  Clone ID: PAT_MRT3847_33857C.1.pep
TFICSLTKDNSITHKVEGTYSFFMTFFQDKVKKKCKSLAFNL

SEQ ID NO: 212439 - protein, 65 aa, Glycine max
  Clone ID: PAT_MRT3847_33858C.1.pep
NSLQALYCSVWDWRGYSIRYQHSGNIGPALVLVHGFGANSDHWRNNISVLAQSHRVYSIDLDGYG

SEQ ID NO: 212440 - protein, 205 aa, Glycine max
  Clone ID: PAT_MRT3847_33859C.1.pep
RAEGKYICLYGGDDIEWIRKFTNTAYSLARTLQLPLEMIYVGKSNPGKKVQEINNAVQTEKLSNVLPDLAISWFFWVRLESMWHSKSQQSKTVENDHIMHEVMRILTYDSGDPGWAVISQGTGKMAQGKGDTFLKCLNEHEQWKDAAKDKGLLPAMDDYIKELQTPHHCNRLILPGTSGGIPDKVSCAECGQTMEKFYMYRCCNE

SEQ ID NO: 212441 - protein, 111 aa, Glycine max
  Clone ID: PAT_MRT3847_3385C.1.pep
SYRFKTRLTGLKNLLDKLKKMAVKVGGRAKDMIDKIIHIISQFVSRLREWACKTGKQAEELKQSAISKAGKSAHEVQQSALEFGFTIKEEAKRVAGDCKKGVEKLTQKFKP

SEQ ID NO: 212442 - protein, 112 aa, Glycine max
  unsure (1)..(112): unsure at all Xaa locations
  Clone ID: PAT_MRT3847_33860C.1.pep
LVLVVVRYPEYLRLSREGAGFEDSPLGTLWRYEIDLDEGGVTERALDDAGIELPRINEARTGRAYRYCYAVEQPNNREMRGVERYDLXTGARQQYAVPPGDQNSEPVFVPRP

SEQ ID NO: 212443 - protein, 111 aa, Glycine max
  Clone ID: PAT_MRT3847_33861C.1.pep
LIFLHRKWRHPNLRCLYQVIRSWSGSHQAPSTSHSGFNYYVTYVDAHSGFTWLYLLKSKSDTPTVFRQFHTMVQTQFSLTGEVNTDLSPNFLLNLGVIHRLICPHSHHQNG

SEQ ID NO: 212444 - protein, 73 aa, Glycine max
  Clone ID: PAT_MRT3847_33862C.1.pep
FLLCVISSNVGPKKDIILTFGPTGAILRHILWSIVNAGNPTFLLFINTSFSNNKFNLVKAVNPKTIVYLIYSI

SEQ ID NO: 212445 - protein, 213 aa, Glycine max
  unsure (1)..(213): unsure at all Xaa locations
  Clone ID: PAT_MRT3847_33863C.1.pep
MAASSTFCVLHSPLYQFPSSSSSSSSSSSSSGLRKLRASTTSSCLGQRDKDPVWNKRTILLASIALLPCXRLKRAPALESPPPPPTPTEETEVKTQEDNQEAEKASEVDQPSNSFLTLLNGIGIFSSGVVGALYTLAQKEKATGGATIETMSSKLKDKEELIVSLEXDYELKLLSKQEEQAKLGEKAKEEALGLINQLRSANRTIKRLGQGLK

SEQ ID NO: 212446 - protein, 115 aa, Glycine max
  Clone ID: PAT_MRT3847_33864C.1.pep
IQSSKYVYYGFFDFSSFITLSCSINLFSIIKAATNLIHTIENMASYEGGPLVMEMEGEEGFEEEAGSSGCGCGCFGLKKWWQGHEEEGKGLLVDQKGEGESWVVEKLRQANEVSE

SEQ ID NO: 212447 - protein, 67 aa, Glycine max
  Clone ID: PAT_MRT3847_33865C.1.pep
HQTRPRLPCSSSSRVKGVTKFVGEGFLDLYDLSEGPHDMNGCLRKRAKASKGKRLSFQDTDYRDPNF

SEQ ID NO: 212448 - protein, 414 aa, Glycine max
  unsure (1)..(414): unsure at all Xaa locations
  Clone ID: PAT_MRT3847_33866C.1.pep
MENSEKVVAVIMVGGPTKGTRFRPLSFNIPKPLFPLAGQPMVHHPISACKKIPNLAQIFLLGFYEEREFALYVSSISNELKLPVRYLKEDKPHGSAGGLYYFRDIIMEDCPSHIFLLNCDVCCSFPLPSMLDAHKRYGGMGTMLVIKVSAESANQFGELVSDPTTNELLHYTEKPETFVSDLINCGVYVFTPDIFTAIHDVYINQQGTPNLRRVSNFETFQSATRTIPVDFVRLDQDIXSPLAGKKQLYTYETTDFWEQIKTPGMSLKCSELYLAQFRYTSLDLLASGDGKKKATIVGDVYIHPSAKVHPSAKLGPNVSISANVRVGAGVRLSSCIILDDVEIKENAFVTNSIIGWKSSLGRWSHVQADGNYDSKLGTTILGEAVTVEDEVVVFNCIVLPNKTLNVRVQEEIIL

SEQ ID NO: 212449 - protein, 78 aa, Glycine max
  unsure (1)..(78): unsure at all Xaa locations
  Clone ID: PAT_MRT3847_33867C.1.pep
NRRTQRDIHIIHLFYCGGFXICTKHDKKLVLTTLXDMKTVKNRGLLAQDLAXELXEQTKHVVHESLKDQIPPDDKCDS

SEQ ID NO: 212450 - protein, 95 aa, Glycine max
  unsure (1)..(95): unsure at all Xaa locations
  Clone ID: PAT_MRT3847_33868C.1.pep
RQAKIRTCIQRESEPKLAVNNKGAATKAWXPASSGNAIKDPNQPMRPTRAVFSIMEDCRKAYNKEHPANKANDRVLGKSCSEQQGRPWTDAEKAP

SEQ ID NO: 212451 - protein, 71 aa, Glycine max
  Clone ID: PAT_MRT3847_33869C.1.pep
ALPFGSRYFCSFTDEDRVNTSIKTDNTDGINPGIALREILYASCHQTYWQGPIPLRVQTLLLMSMVTELFT

SEQ ID NO: 212452 - protein, 127 aa, Glycine max
  Clone ID: PAT_MRT3847_3386C.1.pep
MFGFSRRRMKLGRLKVQLSEANPGTRTPVRPPKRNGTEIGDAAGGSSGHSDEVDCQPSTEITSCGSSENWMVLSIAGDKPIPRSNHAAAVIGNKMIVVGGESRTGLLDDVHVLKFDRFSWTTASSKL

SEQ ID NO: 212453 - protein, 60 aa, Glycine max
  Clone ID: PAT_MRT3847_33870C.1.pep
SLFGRSFVGLFLIRSSVIGLSYFCSSSSHFSCILTVLLPSRVLLLLDEPIIFVNNNHANL

SEQ ID NO: 212454 - protein, 108 aa, Glycine max
  unsure (1)..(108): unsure at all Xaa locations
  Clone ID: PAT_MRT3847_33871C.1.pep
MSPKNNMRELNVCTLPLYHVGVTAARMELSLLMRDQSLRYDHDEYXNHAEDLSMCTRLMDWXCSCQYLMLKSCHSDRXNWMCTRLQPGQRQCLDNNDYCYESCKCRYH

SEQ ID NO: 212455 - protein, 284 aa, Glycine max
  Clone ID: PAT_MRT3847_33872C.1.pep
MLSIIPLDISVSSTLAKVSPFNNSFKKPTSFPSKLSPSSDEFSLLSLSHSGICRASQVVDLFPTVSPEIIVREARLEDYWGVAETHCKCFFPEYSFPLDFVLRIDRLVVAMLAAMLAGFFRPRDCRRICLVAVIDSSLDESFSFESEGLKIGGFDGKFSLNKGYVAGILTVDNNADFLPRKGPRRHRRTGIAYISNVAVRENFRRKGIAKKLIAKAECHARSWGCRAIALHCDLNNPVATMLYKGQGYKCIENPEGANWPQPRTSPDIRFNFMMKLLKNSLGRK

SEQ ID NO: 212456 - protein, 53 aa, Glycine max
  unsure (1)..(53): unsure at all Xaa locations
  Clone ID: PAT_MRT3847_33873C.1.pep
SEKKKKIFXXXFFWPAVLKVPSGTFSSIQRFPSLIGAPKFNELAVLFQLRDWK

SEQ ID NO: 212457 - protein, 443 aa, Glycine max
  Clone ID: PAT_MRT3847_33874C.1.pep
KTLPLLFPLAGRILLISNRLNPSNGREECGVLESCKKTVPLHHLQNKRVCVDLSCWMVQLHSVSKSHACVKEKVYLRGLFHRLRALIALNCSLIFVSDGAIPAIKLSTYRRRLNVGKEQVQVAQNETNLQKATSLQRNMGSEFSCMIKEAKVLGMALGISCLNGIEEAEAQCALLNFESLCDGCFSSDSDIFLFGARTVYRDICLGDGGYVVCYEMTDIERKLGFGRDSLIALSLLLGSDYYQGVHGLGPESACQIVKSIGDKYILKKFASEGLGWVKKRKGGKNDLRPDDNILQVINAYMKPKCHQADSDIVHKALAQYPFQRTKLQQICVGFFEWPSEKTDGYILPNIAERNLRRFANLRLTSSEVGLNLPLHEIPVKCPVSEIIKSRRVQGRECYEVSWEGMDGLETSIVPADLIESACREKILEFEERKAQRKKQNFRK

SEQ ID NO: 212458 - protein, 36 aa, Glycine max
  unsure (1)..(36): unsure at all Xaa locations
  Clone ID: PAT_MRT3847_33875C.1.pep
LTHFRTSSTQLXXPTKGPTDAQKVIVNNVNPETNRA

SEQ ID NO: 212459 - protein, 122 aa, Glycine max
  Clone ID: PAT_MRT3847_33876C.1.pep
LEGISCLNGIEEAEAQCALLNFESLCDGCFSSDSDIFLFGARTVYRDICLGDGGYVVCYEMTDIERKLGFGRDSLIALSLLLGSDYYQGVHGLGPESACQIVKSIGDKYISKKFASDGLGWV

SEQ ID NO: 212460 - protein, 89 aa, Glycine max
  Clone ID: PAT_MRT3847_33877C.1.pep
EPFFKQGKNTPTEEVWDFNYPPYSNKESCSIRGEKSFETPTPKNYFVHKFPKKLKLGRIKEGGYIFFFSSEGENLGSNIFQKPVTVWKI

SEQ ID NO: 212461 - protein, 107 aa, Glycine max
  Clone ID: PAT_MRT3847_33878C.1.pep
KEKKPVPPALKKKPTPREKRFFILSATGVFFFSTEKANNCLSSTNRPPKKKNKKAPPVCSPQEKKKFLKVVKKRKKKKKKVFLKVLVSPTHQKKKMGQKQTKPGTFI

SEQ ID NO: 212462 - protein, 89 aa, Glycine max
  Clone ID: PAT_MRT3847_33879C.1.pep
CHRVCLQQNSWLPFLPRSGSGVFNAPPILSIFKWSLLQACALETDYSLSNLVDFISSSRYAPIPPGAELRSTLLLARFCWPFRSVRTRG

SEQ ID NO: 212463 - protein, 76 aa, Glycine max
  Clone ID: PAT_MRT3847_3387C.1.pep
REEERNTRDSSEINLTNESYLSFFLITTCAERILICFLLIHSTNSLNTFKEVLNEKIIHLIFRNIKCIQLSLLFGK

SEQ ID NO: 212464 - protein, 115 aa, Glycine max
  Clone ID: PAT_MRT3847_33880C.1.pep
LLRFQEGFFRSFLSATTMAKPGVKSVAPPPIPVSGSSSGFFFPLRLPFLLSLSGPVLPRAPNPLPPPTHLHLEASRSLSCPPLRSHCKGVLERRQNHRVPGVSPSVVFSQPSDAW

SEQ ID NO: 212465 - protein, 73 aa, Glycine max
  Clone ID: PAT_MRT3847_33881C.1.pep
PKTQCRVLVTGACRAILGMLLVPMIARGVMLGPDQPVILHMLDIPPAAESLNGDKMELVDAAFPLLRGDVAST

SEQ ID NO: 212466 - protein, 158 aa, Glycine max
  Clone ID: PAT_MRT3847_33882C.1.pep
MAVAENVGAKIGSSSQSLENGLVSADSGEVEKSKTKGDQNLNNGVFNHQERVPGTMPVPNGNFSYKAQMHANGVNNDGYGMNGVTSGENGGESFKRDMRDLEELLSKLNPMAEEFVPPSLANTHGFLAGPNAGFGYTNNIILPTNYGNTNGQTNNRRV

SEQ ID NO: 212467 - protein, 77 aa, Glycine max
  Clone ID: PAT_MRT3847_33883C.1.pep
GTKRPNNFEFVKFFTSGPQKKTLKVCLVNALKLKTWVKHLPQNPYRKTPPQPGGPLFQTGKPKFRPFLLPLVLSRPR

SEQ ID NO: 212468 - protein, 227 aa, Glycine max
  Clone ID: PAT_MRT3847_33884C.1.pep
PNNYGNTNGQTNNRRRKNGYNPGKRRMNHKMDMEKREEMIRRTVYVSDIDQLVTEEQLAALFLNCGQVVDCRVCGDPNSILRFAFIEFTDDEGARAALNLSGTMLGYYPLRVLPSKTAIAPVNPTFLPRSEDEREMCSRTIYCTNIDKKLTQADVKHFFESICGEVQRLRLLGDYHHSTRIAFVEFTVAESAIAALSCSGVILGSLPIRVSPSKTPVRSRAPRPPMH

SEQ ID NO: 212469 - protein, 156 aa, Glycine max
  Clone ID: PAT_MRT3847_33885C.1.pep
RVCGDPNSILRFAFIEFTDEEGARAALNLSGTMLGYYPLRVLPSKTAIAPVNPTFLPRSEDEREMCSRTIYCTNIDKKLTQADVKHFFESICGEVQRLRLLGDYHHSTRIAFVEFTVAESAIAALSCSGVILGSLPIRVSPSKTPVRSRAPRPTMH

SEQ ID NO: 212470 - protein, 103 aa, Glycine max
  Clone ID: PAT_MRT3847_33886C.1.pep
KELINNLPFLYKKKKGYTILQDFTTEESILTDYLSTQFLLESKPTILHKGNSSWKGCKNDRFTLRIRGQLFCLSTNMIDRYAFELLEAWQKRGGRQKTTVIDR

SEQ ID NO: 212471 - protein, 42 aa, Glycine max
  Clone ID: PAT_MRT3847_33887C.1.pep
LSYIFFRFAQIGYIFLKKILLKCPFNNEQIETDYFFNLYILI

SEQ ID NO: 212472 - protein, 50 aa, Glycine max
  Clone ID: PAT_MRT3847_33888C.1.pep
KNEVSALGIEVGRTCGSNLCYLRSPRRKNVATVLVQVSITSSLCYIVCCP

SEQ ID NO: 212473 - protein, 110 aa, Glycine max
  Clone ID: PAT_MRT3847_33889C.1.pep
MHAADRDFLKRNNKTPPIPTGSANLPEARLWSQLDYATTHNVTSAEAYLDNLANVLRESYWYMTHDSRQLRRKALSRIEWLQKADVPTIAQIDTQHLIFTMMNAPDSNDN

SEQ ID NO: 212474 - protein, 219 aa, Glycine max
  Clone ID: PAT_MRT3847_3388C.1.pep
RYLLSLPVEERLKKMLEDRPLHRFSAIKHFAPEYSENELLGFLQQHAILVWGLWTAKSSLLYPDGGVETLARDYSLLLFSKSLKVQFSDVSIRGGELVNRVRNCLKIFGVERNDLDKSTGKPNPYWKFRELPDESFKKLYPDIVEKQEELFKGLEKQLSGFSSNVGKRKIGKNAVANQGVNTEVHKSESSDQRVTSLGRVPPAKMTLSNETRHALPIAL

SEQ ID NO: 212475 - protein, 48 aa, Glycine max
  Clone ID: PAT_MRT3847_33890C.1.pep
KLFYRWAPDALASVRAMLSRHGAHMFLSKIVLSRVLMPMRVPQILDSF

SEQ ID NO: 212476 - protein, 81 aa, Glycine max
  unsure (1)..(81): unsure at all Xaa locations
  Clone ID: PAT_MRT3847_33891C.1.pep
WKGLAYDVSDDHQDITRRKGVVDSLFQAAQDTXAHYAIMSSYQYLITGLKQYNLDNNMDGFHIAPAXMDKLVIHISKNFMT

SEQ ID NO: 212477 - protein, 64 aa, Glycine max
  unsure (1)..(64): unsure at all Xaa locations
  Clone ID: PAT_MRT3847_33892C.1.pep
XSRRKHXFYTXXTXVQNDTCXYMRDLXKXYDXXDQLFXNCLQQKYXXLRDHHLXXNRXQXKXMT

SEQ ID NO: 212478 - protein, 69 aa, Glycine max
  Clone ID: PAT_MRT3847_33893C.1.pep
RNNNTSTYNLNLLVSESQEKFGAQQQWRNRTRNFIVFTVLVCSVCGLQQCRPQSQARTVISCPPLPFCL

SEQ ID NO: 212479 - protein, 61 aa, Glycine max
  Clone ID: PAT_MRT3847_33894C.1.pep
HVHVPCNGWCSLLHLSTPCKKFCFKFLFFLATECYILSFVMQKFIFVIGRQVFRQYPSYLS

SEQ ID NO: 212480 - protein, 35 aa, Glycine max
  Clone ID: PAT_MRT3847_33895C.1.pep
YSSLPRNLASSTGPRCQIAVLVGTWYYSYLLIWQC

SEQ ID NO: 212481 - protein, 85 aa, Glycine max
  Clone ID: PAT_MRT3847_33896C.1.pep
FLSVQKNRRELFSWQISMNLFLYIPFQFPSGEGKKKKKREREGYDLGVNVKEGFCLCGELVQRRGCNVFYGNGESATGLVLRVES

SEQ ID NO: 212482 - protein, 64 aa, Glycine max
  unsure (1)..(64): unsure at all Xaa locations
  Clone ID: PAT_MRT3847_33897C.1.pep
SYXVNYWFXGLSKMIMIMRWXDXKCPXCCDLRXSXNXILALVIDSKTAQLPYXLXTLALXLXXP

SEQ ID NO: 212483 - protein, 68 aa, Glycine max
  Clone ID: PAT_MRT3847_33898C.1.pep
LRQHRLHAPVSCEYVHILSIQVLVTTSISNCASMGARKDRLVSRSLPYHGHQVNVLLMRRRNLESDFL

SEQ ID NO: 212484 - protein, 393 aa, Glycine max
  Clone ID: PAT_MRT3847_33899C.1.pep
MTEEDRSAQETVHNGVASTELGGEEMDIAEVTAAGRVKGPWSPEEDALLSRLVAQFGARNWSMIARGVPGRSGKSCRLRWCNQLDPCVKRKPFTEEEDSIIVSAHAIHGNKWAAIARLLPGRTDNAIKNHWNSTLKRRCMEMGRYVPAHADVMEDGTGSFDKTKASSEETMSIGDINSKNPAEVRNVMMDNENKPPTKDDAKVEEHPTLHRPVARVSAFSVYNTPGRSTMGSCSKMFPRQSPLIQSPKPDVGSCKLFDDIDCEPMVPSQCGHGCCTGDSRESHSHGSLLGPEFVDYLESPSSSHAFISIATDLNNIAWIKSGLENCSTGVTENTANLTASRGVASALQTNFLGQDLKNGYGQFEEGHGMFLGAMQEVLSTKMARQHYAMPAEV

SEQ ID NO: 212485 - protein, 302 aa, Glycine max
  Clone ID: PAT_MRT3847_3389C.1.pep
FPEFPHPLSRVKQQAGYRLSYQIVDSLIWLGIRDMINDLRKKKLKLRPVTYLSGSQGSETDVPHAYIWSPHLVPKPKDWGPKIDVVGFCFLDLALNYEPPESLVKWLEEGDKPIYIGFGSLPVQEPKKMTQIIVDALEITGQRGIINKGWGGLGNLAEPKDSIYLLDNCPHDWLFLRCKAVVHHGGAGTTAAGLKAACPTTIVPFFGDQPFWGERVHARGVGPPPIPVDEFSLPKLVDAIKLMLDPKVKERAIELAKAMENEDGVTGAVKAFFKQLPQKKSESDADPQPTGFFSVRRCFGCS

SEQ ID NO: 212486 - protein, 80 aa, Glycine max
  Clone ID: PAT_MRT3847_338C.1.pep
SFLLKKHQLSFSPFLTQIIRHFVFFFFIHENSHKFIFSKFDTKKRRLRGSKNATKKNFVPAALHCSKVKMRTTKFKFLQR

SEQ ID NO: 212487 - protein, 82 aa, Glycine max
  Clone ID: PAT_MRT3847_33900C.1.pep
TAARRRQKGKDRKSGSIGGRQTNMFSDDFDGSSQQSYRNSRGSRENDHNRKSFEDFDGPSRQSYGYGRGSRGNNGNGSSRQS

SEQ ID NO: 212488 - protein, 135 aa, Glycine max
  Clone ID: PAT_MRT3847_33901C.1.pep
FFFFFFFFFFFFFFFFFFFFFFFFFKKKKKGPGLAQRAGKKPSLIKIPNPNYKKSGGGFKRGPPKGPRKKKSFLDLAPLETPPGGFFGGPNLEKPPFAPREGAKPFFIPWAPPGPGGPQKKIWPKPVFPPPPQPS

SEQ ID NO: 212489 - protein, 367 aa, Glycine max
  Clone ID: PAT_MRT3847_33902C.1.pep
MATTNPFDLLGDDAEDPSQLIAAEQLKAAAAAAAATAAPKKAPAQQIKPAQLPSKPLPPAQAVRDARNESVRGGRGGGRGGGRGFGRGRGFSRDSSNDENSFPTSGAPYNQVSFEGDAGKSSERRSYGGPRGPYRGGGGRRGGFSNGETGEAEEGRPRRAFDRRSGTGRGNEFKREGSGRGNWGAQTDELAQVTDEVANETEKNLGDEKPAVEEDVADGNKDSPTNETEEKEPEDKEMTLEEYEKVLEERRKAFQALKTEERKVDTKEFESMQALSSKKDNHDIFIKLGSDKDKRKEAFEKEEKSKKSVSITEFLKPAEGEAYYNPGRGRGRGRGSRGGGGYHGSATNNAPAPSIEDPGHFPNLSAK

SEQ ID NO: 212490 - protein, 97 aa, Glycine max
  unsure (1)..(97): unsure at all Xaa locations
  Clone ID: PAT_MRT3847_33903C.1.pep
DLVNSLGKSGMHXXLKDRFSSTRVSYXAXHDXQYKXVSARWPIWTGXVHVXDNLIRSPADPXDFHRRYXXXICXVFRANXXXCKQXPTXMXXXKTXX

SEQ ID NO: 212491 - protein, 166 aa, Glycine max
  Clone ID: PAT_MRT3847_33904C.1.pep
MASQASLLLQKQLKDLCKNPVDGFSAGLVDETNIFEWSVTIIGPPDTLYEGGFFNAIMSFPSNYPNSPPSVKFTSEIWHPNVYPDGRVCISILHPPGEDPNGYELASERWTPVHTVESIVLSIISMLSSPNDESPANVEAAKEWRDRRDDFKKKVSRCVRKSQEML

SEQ ID NO: 212492 - protein, 127 aa, Glycine max
  unsure (1)..(127): unsure at all Xaa locations
  Clone ID: PAT_MRT3847_33905C.1.pep
YERPSQFHFFTSEVFQLPFTNHQPLPNPHSFHLNHSLKTATFNNAHCQSIPNLYKLFHTRLILFERFQRCIFCQDSFFTEPRVSRVLAGKQKKSHLQSFESVAQKYGSATSFVPQYLPFFSLSVFMX

SEQ ID NO: 212493 - protein, 85 aa, Glycine max
  unsure (1)..(85): unsure at all Xaa locations
  Clone ID: PAT_MRT3847_33906C.1.pep
KTPVPADKHFSRGSFDRKISLADLDKEKELFYVNAWEERDNAKSDNRPYKHLSFIDAWENSXKAAFETELKKLDEQLEKKKAEFX

SEQ ID NO: 212494 - protein, 521 aa, Glycine max
  unsure (1)..(521): unsure at all Xaa locations
  Clone ID: PAT_MRT3847_33907C.1.pep
YGCEKTTEGGETKVVSDKAVEKFDWNPLHYIKKSSDVGVENKTEQGDSIAMKGRIILYTKLGCQESKAIRLFLRMKRLRYVEINIDVFPGRKVELEKISGSASVPKVFFNEILIGGWNELKNLDESGKLDEKVDFLITEAPLFEAPSPPLSGEDDVSSSGPLDELAIIVRKMKESIAVKDRLYKMRRFTNSFLSSEAIDFLSEDQYLERPEAVEFAQKLADKLXFLLCFSEDIFEDGNHLYRFLDDDPTVVSQCHNITRGIITLKLKPLAEIASRLRFLSRAMFEAYVYEDGRRIDYTSIHGSEEFARYLRIVEELQRVEISDSSREEKLAFFINLYNMMAIHAILVLGHPDGALERRKLFGEFKYVIGGSTYSLSAIQNGILRGNQRPPYNLKKPFGVKDKRLTVALPYPEPLIHFALVYGTRSGPALRCYSPGNIDEELLDAARNFLRNGGIAVDLTAKAVNASKILKWYSIDFGKNEVEVIKHVSNYLDSADSEVLLDLLATSELKVTYQPYDWGLNC

SEQ ID NO: 212495 - protein, 49 aa, Glycine max
  unsure (1)..(49): unsure at all Xaa locations
  Clone ID: PAT_MRT3847_33908C.1.pep
KXRQFQLPRVIIYSLPTTHGISFCILXLEFLSGFRLRKLIXWCYXIYNS

SEQ ID NO: 212496 - protein, 90 aa, Glycine max
  unsure (1)..(90): unsure at all Xaa locations
  Clone ID: PAT_MRT3847_33909C.1.pep
RKDLGWTKYFDHGGXKVTAVETAEEWNVDLSKLFVGVRFAHGAHSRLYHGMYKDEAVAVKIITVPDDDENGMLVDRLEKQFIREVSLLSC

SEQ ID NO: 212497 - protein, 150 aa, Glycine max
  Clone ID: PAT_MRT3847_3390C.1.pep
ARGNLAEPKDSIYLLDNCPHDWLFLRCKAVHHGGAGTTAAGLKAACPTTIVPFFGDQPFWGERVHARGVGPPPIPVDEFSLPKLVDAIKLMLDPKVKERAIELAKAMENEDGVTGAVKAFFKQLPQKKSELVADLHQTGFFSVRRCFGCS

SEQ ID NO: 212498 - protein, 67 aa, Glycine max
  Clone ID: PAT_MRT3847_33910C.1.pep
VHAFVKHYILLYILMLLNLISKVQLNNTGWVTIHLIFYHLTTINVYTYFLFLAIYHSYHQVHLFKYN

SEQ ID NO: 212499 - protein, 33 aa, Glycine max
  Clone ID: PAT_MRT3847_33911C.1.pep
VKWSRNSYIRGRSKFIFHMPPLRILSRRYRVYA

SEQ ID NO: 212500 - protein, 48 aa, Glycine max
  Clone ID: PAT_MRT3847_33912C.1.pep
LRKLHPPKINSTMDNSFIQLYYLITYTTSLTPTTETFSQTNSSIVTII

SEQ ID NO: 212501 - protein, 250 aa, Glycine max
  unsure (1)..(250): unsure at all Xaa locations
  Clone ID: PAT_MRT3847_33913C.1.pep
MTTKTTSLLLLHVILLATAEAAAAGGHWKVLQQSIGIVAMHMQLLYTDTVVIFDRTDFGLSNLSLPDGLCRHDAAEMAVKTDCTAHSLEYDVSSNTFRPLFLQTNVWCSSASVASDGTLIQTGGFNDGEKKVRTFSPCPTTAATCDWLELPSDTLSARRWYSTNHLLPDGRQIIIGGRRQFNYEFFPKTHTRAKNAYSLPFLVQTNDPHEEXNLYPFVFLNVDSTLFIFANNRAILFDFTKNAVVRTFPY

SEQ ID NO: 212502 - protein, 44 aa, Glycine max
  unsure (1)..(44): unsure at all Xaa locations
  Clone ID: PAT_MRT3847_33914C.1.pep
IPFAXPKXXPEXVRRXNLXAFXHXPXAYLXFYXXXRASXLPASF

SEQ ID NO: 212503 - protein, 91 aa, Glycine max
  unsure (1)..(91): unsure at all Xaa locations
  Clone ID: PAT_MRT3847_33915C.1.pep
STKHALLRLALQFLADVSPMADALTCTPTEFSPCLTAITFGAKPLNACCTKLKHHKPCLCGYLKNASLKQDANSPNARKTAAXCGIPFPTC

SEQ ID NO: 212504 - protein, 72 aa, Glycine max
  Clone ID: PAT_MRT3847_33916C.1.pep
LQELLVQISLAGLSAWVLLHQLLHLWQLKFHVHPRPVFGPIDIVRGELNVLKVFSHEEVRKCETTAFPKLEP

SEQ ID NO: 212505 - protein, 172 aa, Glycine max
  Clone ID: PAT_MRT3847_33917C.1.pep
MLGIRLEEHRRRSPNRMLNQMESCTSPLSSIYLVNIGEGQRLHVICSIDPSTSLGLETFQSFYIGGGANSHSVLSGFEPAILETAFNESRTVVEEIFSKELDGPIMFVDDSHAPSLWTKFLQLKKDDKEQQLKKMMQDQEEDEEEKQTSRSWRKLLETVFGKVNEKIENKDT

SEQ ID NO: 212506 - protein, 101 aa, Glycine max
  Clone ID: PAT_MRT3847_33918C.1.pep
GGNRGKYRPFYIPFLYTWVITFSLWAKEGGIFFPNIKIKPGGANGLKETTKLSTFLVITIKRFGMVGPPKGGHRSNFIPYGKKRFLNLASLFLRGSHMEEG

SEQ ID NO: 212507 - protein, 105 aa, Glycine max
  Clone ID: PAT_MRT3847_33919C.1.pep
NVATRGKPPFYFVDRGFFKVWGSFPGEPQGGWGGSPRKKGPSGNFELLISKGGGTWCTFGSPRGARKKVFFPPGGNPKFLNPPPPHLVFPPQGGKRGPSTPWQGE

SEQ ID NO: 212508 - protein, 395 aa, Glycine max
  unsure (1)..(395): unsure at all Xaa locations
  Clone ID: PAT_MRT3847_3391C.1.pep
MSFRSIVREVRDGFGSLSRRSFEVRLPGHNRGKSRSLVHELQDQPPVIQNSRWASLPPELLRDVINRLEASESTWPXRKHVVACAAVCKSWREMCKEIVTSPEFCGKITFPVSMKQPGYRDGPIQCFIKRDKSNLTYHLFLGLSPALLVENGKFLLSAKRTRRTTCTEYVISMDADNISRSSSTYIGKLRSNILGTMFIIDDTQLXLKQCYPDVTCXRRSLSNIGYELNLFWHFGPCGVYCCIDXEPLCPGLSKMEVTVNSFSAYSTHPKIDSLSMSLALISAKHEACSERICLLVLKKKSRRGHEKVECCCFNFRGRVTVASVKNFQLIAATQPPATGAPMPSSQPAQSDHDKIILQFGKVGKDIFTMDYRYPLSAFQAFAICLTSFDTKLACE

SEQ ID NO: 212509 - protein, 138 aa, Glycine max
  unsure (1)..(138): unsure at all Xaa locations
  Clone ID: PAT_MRT3847_33920C.1.pep
LETQVPLTVKPAKPVKNPLYQMPPPTREEIEILDSTPKADIGNLEELLEEENLYLNIEKGEQGRLPVMILKLKRSNKQRKKRLGYFGTIRRSCTLRPDXFLRACASRGYIAIAVDSRYHGERATNTTTYIDALISAWK

SEQ ID NO: 212510 - protein, 165 aa, Glycine max
  Clone ID: PAT_MRT3847_33921C.1.pep
CEATRIIGVDVNPEKYETGKKFGLTDFVHAGESENKSVSQVIIEMTGGGADYCFECVGMATLVQEAYASCRKGWGKAIVLGVEKPGSMLSLSCNEVLHSGKSLVGCLFGGLKPKSDVPILLKRYMDKELNLDEFVTHEVEFKDINKAFDLLIEGQCLRCVIWMDR

SEQ ID NO: 212511 - protein, 662 aa, Glycine max
  Clone ID: PAT_MRT3847_33922C.1.pep
MAQKRFIIEVEKAKEASEGRPSRGPVYRSLFAKDGFPAPIQGLNSCWDVFRLSVEKYPSNPMLGRREIVDGKPGKYKWLTYKEVYDQVMKVGNSIRSCGYGEGVKCGIYGANSAEWIMSMQACNAHGLYCVPLYDTLGAGAIEFIICHAEVSIAFAEEKKIPELLKTFPNATKYLKTIVSFGKVTPEQKQEVENSGLEIYSWDEFLQVGQNQSFDLPIKKRSDICTIMYTSGTTGDPKGVLISNESIITLLAGVKRLLESVNEQLTEKDVYISYLPLAHIFDRVIEETFIWHGASIGFWRGDVKLLIEDVGELKPTIFCAVPRVLDRVYSGLTQKISSGGFLKKTLFNFAYSYKLNNMKKGLRHGEASPLLDKIVFDKVKQGLGGRVRLILSGAAPLSAHVEGYLRVVTCAHVLQGYGLTETCAGTFVSLPNEIEMLGTVGPPVPNVDVCLESVPEMGYDALASTPRGEICVKGKTLFAGYYKREDLTKEVLIDEWFHTGDIGEWQPNGSMKIIDRKKNIFKLSQGEYVAVENLENIYGQVSSIESIWVYGNSFEAFLVAVVNPSKQALEHWAQENGISMDFNSLCEDARAKSYIIEELSKIAKEKKLKGFEFIKAVHLDSIPFDMERDLITPTYKKKRPQLLKYYQNAIDNMYKSGSKPSA

SEQ ID NO: 212512 - protein, 181 aa, Glycine max
  unsure (1)..(181): unsure at all Xaa locations
  Clone ID: PAT_MRT3847_33923C.1.pep
MNFSFIAADTISKFIIMVVLALWAKCTPKCTFCWSIISFSLCNLTNAVVVGVPMVKPMYXFLGVDLVVQSSVLQATIWLPLLLFVMEFWRTGIEGTTTTTVKPRSKTMINKNEGGGGKDVEAVDVKEELMLEESVTSRLPFCKVMKLVWRKLATNPNSYGCVIGISWAFISNRWNLEMPSM

SEQ ID NO: 212513 - protein, 54 aa, Glycine max
  Clone ID: PAT_MRT3847_33924C.1.pep
MQLILWECLGDIEALPWSGHKAFGRNSFPMGAIVILLNKVLLNCGRLQLVLKVI

SEQ ID NO: 212514 - protein, 156 aa, Glycine max
  Clone ID: PAT_MRT3847_33925C.1.pep
KYLPNSKELHCIDCPRLPDSWVRRGMIIDSDLQQDSTTTEKELLCSVTTTFNQLSDLVLSSKLRELGLSGVGVKGLFQFQIREHGSNTELAPLNLDLTHADLWDLPELEFIWKGPTNFLSLQMLDVINVNRCPKLKTIFSPTIVKLNNGEKMTFTI

SEQ ID NO: 212515 - protein, 222 aa, Glycine max
  unsure (1)..(222): unsure at all Xaa locations
  Clone ID: PAT_MRT3847_33926C.1.pep
GRASVRLREDDRRGFKRICVFCGSEAXGNKSSYKDAAIELGKELVSRNIDLVYGGGSIGLMGLVSQAVYEGGRHVIGVIPKTLMPREITGETVGEVMAVADMHQRKAEMAKHSDAFIALPGGYGTLEELLEVITWAQLGIHDKPVGLLNVDGYYNSLLCFIDKAVEEGFISPKARHIIVSAPSTKELVKKMEEYFPQHERVASKLSWETEQIDYSSNCGMSR

SEQ ID NO: 212516 - protein, 118 aa, Glycine max
  unsure (1)..(118): unsure at all Xaa locations
  Clone ID: PAT_MRT3847_33927C.1.pep
IIVLRTKXAVKTFSGNMHLSLGAGLSAAVGIVGRSVEADVRAGDGGYAACYTYSCSKGAFVGCSLEGSMVTTRTQENSLFYGSQSITATDILLGSLPRPPAAAILYRTLVDLYSKFDD

SEQ ID NO: 212517 - protein, 132 aa, Glycine max
  Clone ID: PAT_MRT3847_33928C.1.pep
EIEEEINNVTGDDVLLHLKNGDAEEFAVALLRLKKFIRGGKLDSGLINVEAAVSILFNRLFSCKTGNRLTIIQLLRSVALQNDEMKEKMTKNELLSAVVKSLTRDTEERKESVGLLLELSDLPCSRRKIGKN

SEQ ID NO: 212518 - protein, 540 aa, Glycine max
  Clone ID: PAT_MRT3847_33929C.1.pep
MEGKILDSQNQVKFVENLSARVSSCSLGDKISYSDSPLDDEVDGRRSNCVTKEYCDSFFNDSTEGHCINSSRLYLESPEKQMEKNNEDMESSANLQKRGKYFYYDTPLQEDTGVWIPVSVPPMLEDDHKEWTKGFHSNGGYFPDDDMGWNQYVGDERELTMWDVLAEMLLVARGKVTSLASGDIHTCNFSWISSHVLEQAWREMAQTLTEANFGNVKELLEAEPPKWLADSAAASCMLCGVRFHPIMCSRHHCRFCGGIFCGECSKGRSLLPSKFQVSDPQRVCDVCCVRLDSVQPYLMDHVSNAAQLPTHDLTDLSTLRSWINFPWGQSMEYEIYKATNTIKAYNQIGFLKLEKSIPDAILRQAKGLAIITVVKVGVGVTYNIGTGLVVARREDGSWSPPSAVSTFGVGWGAQAGGELTDFIIVLRTNDAVKTFGGNMHLSLGAGLSAAVGFVGRSVKADVRAGDGGYAACYTYNCSKGAFVGCSLEGSMVTTRTQENSRFYGSQSITATDILFGSLPRPPAAAILYRALADLYSKFDD

SEQ ID NO: 212519 - protein, 89 aa, Glycine max
  unsure (1)..(89): unsure at all Xaa locations
  Clone ID: PAT_MRT3847_3392C.1.pep
VLAAAYAHELPRYGITLGLTNYAAAYATGLLLARRVLTKLNLADKYKGXVNVTGEDYNVEEIDDAPRPFLALLDVGLRRTPPGCRVFAA

SEQ ID NO: 212520 - protein, 37 aa, Glycine max
  unsure (1)..(37): unsure at all Xaa locations
  Clone ID: PAT_MRT3847_33930C.1.pep
LFVRPSXFXGXCXVXGRLGRGRGSVCRVPGGWVGXVL

SEQ ID NO: 212521 - protein, 99 aa, Glycine max
  Clone ID: PAT_MRT3847_33931C.1.pep
YFFGNEFNLTCFILNIISQVGTVGGGTQLASQSACLNLLGVKGANKESPGANSRLLATIVAGSVLAGELSLMSAIAAGQLVKSHMKYNRSSRDISTIVQ

SEQ ID NO: 212522 - protein, 35 aa, Glycine max
  Clone ID: PAT_MRT3847_33932C.1.pep
PFYICCDFLILKNIFGTSFCHILNLYWVPILHLHP

SEQ ID NO: 212523 - protein, 82 aa, Glycine max
  Clone ID: PAT_MRT3847_33933C.1.pep
KKVVGPKILYTPLGHVETLYAMANLFLKKISGHVIGSSKCFPSHIFFIYKYKGLYIYIYMNIIFCLTYCQVLWKKLMYFFFI

SEQ ID NO: 212524 - protein, 587 aa, Glycine max
  Clone ID: PAT_MRT3847_33934C.1.pep
MDVHRRPIPSSGEHRQTQKLKTTTTTTTDSKSQSQALLPLYLTNALFFGVFFSVAYFLLHRWREKIRTATPLHAVSPAETAAIVSLVASAVYLLGFFGVASRASLDELSDDEIILKEDSRALGPCPAALADSSCLLPNKIQNQFPLSPKAIHSVTKEPQVDSPVPISSFSDEDEEIVQAVVSGSIPSYSLESRLGDTRRATAIRHEVVQRLTSRSLSGLPLEGFNYDSILGQCCEMPIGFVQIPVGVAGPLLLDGKEYTVPMATTEGCLVASTNRGCKAIHVSGGASSVLLRDGMTRAPVVRLPSAQRAAQLKFFLEDPLNFDSLAVVFNKSSRFARLQNIQCAIAGKNLYMRFRCSTGDAMGMNMVSKGVQNVLDFLQDDFPDMDVIGISGNFCSDKKAAAVNWIEGRGKSVVCEAIIKEDVVKKVLKTSVEALVELNMLKNLTGSAMAGALGGFNAHASNIVSAIYIATGQDPAQNVESSHCITMMEAINDGKDLHVSVTMPSIEVGTVGGGTQLASQSACLNLLGVKGANKESPGANSRLLATIVAGSVLAGELSLMSAIAAGQLVKSHMKYNRSSRDISTIVQ

SEQ ID NO: 212525 - protein, 143 aa, Glycine max
  unsure (1)..(143): unsure at all Xaa locations
  Clone ID: PAT_MRT3847_33936C.1.pep
KXTXDXXWTDKXXXXSXXXSXPXSTXIXLTXTXYDLRXAXXXTTWXXXSHSXIXNXEXTLXTXXGMXTEHXLAXXXXXXXXXXSTXXNQXXXXNXPXXXTRXKSIAXXXXXXRXLXXXPXXSFXXXXXHXXXXXXQXXXXVXX

SEQ ID NO: 212526 - protein, 51 aa, Glycine max
  Clone ID: PAT_MRT3847_33937C.1.pep
ISNKSALPPGTIEATSSLFVLLPIQVRKPTICKCCHSLAIIRPLSCSSSAS

SEQ ID NO: 212527 - protein, 95 aa, Glycine max
  unsure (1)..(95): unsure at all Xaa locations
  Clone ID: PAT_MRT3847_33938C.1.pep
MCSDHARFIVHTRDTLSCQAILNPISLEWPGLTDIXLRNASEILCCDYASDDRSITKQDVSKIAQLMYSLCRGDAQLVPPTTHLLLACCSRMAIC

SEQ ID NO: 212528 - protein, 47 aa, Glycine max
  Clone ID: PAT_MRT3847_33939C.1.pep
PPFFFFFGFGYFYFFNFLLSGVTEIKNIIESHHYCHYGNGFKRKLVR

SEQ ID NO: 212529 - protein, 63 aa, Glycine max
  Clone ID: PAT_MRT3847_3393C.1.pep
WEVFQPATSLFPLLLSPLSPPSQSSSQSHISNQQTIKLTITFFFSFTTLESKTLLERSVPNVT

SEQ ID NO: 212530 - protein, 45 aa, Glycine max
  Clone ID: PAT_MRT3847_33940C.1.pep
LEVRISDIGFSLYTNSFVCGTYRKPMRIYRWICILNIDLTDLFFF

SEQ ID NO: 212531 - protein, 68 aa, Glycine max
  Clone ID: PAT_MRT3847_33941C.1.pep
ICISSYEYGGDIHVLPCHHHFHYTCIVKWLKMNAPCPLCKSSILKANDTGVKSIRRSQIYNIELSFNI

SEQ ID NO: 212532 - protein, 41 aa, Glycine max
  Clone ID: PAT_MRT3847_33942C.1.pep
TQPQLSSLHQTTRARPQTICTPFTYLLNKEHNHTLWTLHWN

SEQ ID NO: 212533 - protein, 64 aa, Glycine max
  Clone ID: PAT_MRT3847_33943C.1.pep
QYRHRHTLDRGLCIHTTLFTLDHPLQAHDKHPCSRPCQLLPLLDATEKQDQKQWSILFHQTHFR

SEQ ID NO: 212534 - protein, 61 aa, Glycine max
  Clone ID: PAT_MRT3847_33944C.1.pep
FSHPHRHSNMKFFWFLQVLFFLAMLLINPSVAPNAPAPPSSGDPHTETLRPPPRKVSGSWP

SEQ ID NO: 212535 - protein, 88 aa, Glycine max
  Clone ID: PAT_MRT3847_33945C.1.pep
KKKGAISKAITLQRVGPFFGHGRNKIFFFLKTGTSTTTTTTGVFTIFGNNTFMFSNTYKRFPWPPNTLKDFPFKGALPNKHMGAAPKG

SEQ ID NO: 212536 - protein, 72 aa, Glycine max
  Clone ID: PAT_MRT3847_33946C.1.pep
IIARRKKLLNNLNETHIDTSAITRISGFECQKYTESIETRHAIDTGQTQERDQDQQAHTQKQKKKVRKFLEC

SEQ ID NO: 212537 - protein, 56 aa, Glycine max
  Clone ID: PAT_MRT3847_33947C.1.pep
WSPKDGSPIWTNNFSGQKPPHLVLKSLGLPNLLDSVGNFFLEFFLAVVKPPKIVEV

SEQ ID NO: 212538 - protein, 59 aa, Glycine max
  Clone ID: PAT_MRT3847_33948C.1.pep
PRVRTAARRRQKGLTLELTPVLPRSCNETLHIEELMAALLVANYLYSAIAISAFQSFIV

SEQ ID NO: 212539 - protein, 49 aa, Glycine max
  Clone ID: PAT_MRT3847_33949C.1.pep
SGGMRKMRNISFLKCFYYFVLVKISLVWKIRHCFYVLSFLAYVRNNLGV

SEQ ID NO: 212540 - protein, 40 aa, Glycine max
  Clone ID: PAT_MRT3847_3394C.1.pep
LEDEYAVGQLKEFEGKKLVSATKEGLKLDESEDEKKKQEE

SEQ ID NO: 212541 - protein, 75 aa, Glycine max
  Clone ID: PAT_MRT3847_33950C.1.pep
KGYHKNPLFLLNSRIPRVCMYAPPALLMVLSEWHVPHSHGAPRSSMSDIGFLIDPAGFPGLMWLSWYSCDTCCHT

SEQ ID NO: 212542 - protein, 98 aa, Glycine max
  Clone ID: PAT_MRT3847_33951C.1.pep
SATAARPIPLCRWSSFLEVFALTPLLKPVNNNFNLTSTSTKNITITNTTTTNSSRTFAAGLRILFLPLYHLLTTMQADKQAHKQAHKQAHKSAQRFQA

SEQ ID NO: 212543 - protein, 42 aa, Glycine max
  Clone ID: PAT_MRT3847_33952C.1.pep
NTGHLFVLSSSAWGKHRNCSSFNYLQSYFSSFGHRFIFLVLM

SEQ ID NO: 212544 - protein, 179 aa, Glycine max
  unsure (1)..(179): unsure at all Xaa locations
  Clone ID: PAT_MRT3847_33953C.1.pep
NPYLAHVDITLDDXSLRCCIRRLHSILQHSQCLQNMTYQLLGSQTDLTSIHRSTFPXLNLKAYYFDPEIVPNLMSTCARQALQQPLNYARNDLSDLLQPCGERDIYLDSELAADDDIAKTRSTSSCSISIGAPEYCHAHFTRCYTETFWSDTLFARAYTGRMPCYLHTGVMVIDLVLWR

SEQ ID NO: 212545 - protein, 52 aa, Glycine max
  Clone ID: PAT_MRT3847_33954C.1.pep
NLDYIMHTSLYRSQDSNPKTFFTLVFIVSFNSLSFTYYLSLVFIGTPTCCSG

SEQ ID NO: 212546 - protein, 43 aa, Glycine max
  Clone ID: PAT_MRT3847_33955C.1.pep
VVKSSPRILFGGDLWLSKDFLIHKFFGCKPHCLVEVKNASPQL

SEQ ID NO: 212547 - protein, 88 aa, Glycine max
  Clone ID: PAT_MRT3847_33956C.1.pep
HASENFVGLSVLDGYIAWGSESNEVYCYHKSLPVPIATHKFESVDPISGHLNSGDNNGQFVSSVCWRKKSNMLVAANSVGIVKLLQMV

SEQ ID NO: 212548 - protein, 368 aa, Glycine max
  Clone ID: PAT_MRT3847_33957C.1.pep
QKIHRELDVDPGSCILQSSLGCVRSFFEGLCKFARYSKFEECGRLRNRDLLSSANVMCALSFDRDEDHIAAGGVSKKIKIFDLNAIASDSVDIQYPVIEMSNKSKLSCVCWNTYIKNHLASTDYDGAVQMWDADTGQPLSQYMEHQKRAWSVHFSLSDPKMFASGSDDCSVKLWSISERNSLGTIWKPANICCVQFSAYSTNLLFFGSADYKVYGYDLRHTRIPWCTLAGHGKAVSYVKFIDSEAVVSASTDNSLKLWDLNKTSSSGLSSDACAMTFKGHSNEKNFVGLSVLDGYIACGSESNEVYCYHKSLPVPIATHKFESIDHISGHLNSGDNNGQFVSSVCWRKKSNMLVAANSVGIVKLLQMV

SEQ ID NO: 212549 - protein, 216 aa, Glycine max
  Clone ID: PAT_MRT3847_33958C.1.pep
FGSSSSRSDIFNVYIIFWKRNSSLETGNWTRSPTHTEHNTASNTMFSSSPPFPSSSSPSVTMLHEQAAPAVASWSSSSAAQHFPTSVLLQEQRDEYKPLLHVHNKETTLNTRQMDMTSVHEKGNMSNGDQLVHDFVQQLHLRSHLQNLLTCSPTRGIAASSILQPVDIDSEWPADGLPGNAISLAQQALAASKQAVSNNWRDENGLKSMMMIPLSF

SEQ ID NO: 212550 - protein, 560 aa, Glycine max
  Clone ID: PAT_MRT3847_33959C.1.pep
LSAANTMFSSSPPFPSSSSPSVTMLHEQAAPAVASWSSSSAAQHFPTSVLLQEQRDEYKPFLHVHNKETTLNTRQMDMTSVHEKGNTSNADQLVHDFVQQLHLRSHLQNLLTCSPTRGIAASSILQPVDIDSEWPADGLPRNAISLAQQALSASKQAVSTTGEMKLIEIDDDDPLPSGLASTSLTDSSLKKNKVVRSTRIIERLSKQRKSSKSKIIDEESYLERKSDVQRRLRLEKKLKEGYDPNDPLRLFLSGPESRQLLTREEESLLITQLQDLSRFEEVKIRLQSQLRREPTLAEWADAVGLSCYALQTQLHCANRSKEKLFHANLRMVVHIAKHYQGRGLSLQDLFQEGSTGLMKSIQKFKPEAGCRFGTYAYWWIRHAIRKAIFLHSRTIRLPENLYTLLGKLIEAKKSYIQEGNLHPTKEELARRVGITVEKLDNLLFASRNPISMQQTLWVDQDTTFQEITADSAIEIPGVTVSKQLMRRHVHNLLNILSPKEKGIIRLRFGIEDGKEKTLSDIGKVFGLTKERVRQLECRALSKLKQCLESQGLDAYIDLLV

SEQ ID NO: 212551 - protein, 204 aa, Glycine max
  unsure (1)..(204): unsure at all Xaa locations
  Clone ID: PAT_MRT3847_3395C.1.pep
MSFRSIVRDVRDGFGSLSRRSFDVRISGGGKLNSLVHEAHERQLVIQNSRWASLPPELLCDVIKRLEESESTWPARKHVVACAAVCKSWREMCKEIVTSPEFCGKITFPVSLKQPXSRDGTIQCFIKRDKSNLTYHLFLCLSPALLVENGKFLLSAXRTKTTCTEYIISMNADNISRSSSTYIGKLRINGFLSTLLLHVENFTF

SEQ ID NO: 212552 - protein, 238 aa, Glycine max
  unsure (1)..(238): unsure at all Xaa locations
  Clone ID: PAT_MRT3847_33960C.1.pep
MASFAAPNNLGSAVLPSRPPPVKCTLFPSCNNNNNHSLSNPSPSHPPPLFKAIAISSAASILMHCTPLSPFLPNPLAKLGGGGGNTGGGGGGGDGWFGGGGGGNGGFWSRMFAAVADESQSQEWDSHGLPANIVVQLNKMSGFKKYKVSDISFFDRNRKMKVGTEDXFFEMVSLRPGGXVYTKGQLQKXELETLATSGNVRERLILEXGKTNPDGXLGVTISFSESTLAVGRMGFRCI

SEQ ID NO: 212553 - protein, 77 aa, Glycine max
  Clone ID: PAT_MRT3847_33961C.1.pep
IQMQTLGTAWNQMTISSKMRLNISINMIIKESLPRVRTNLDCSPSIVPSSSLIELCTRCIIMLVVYNPVEHLFFPQS

SEQ ID NO: 212554 - protein, 68 aa, Glycine max
  Clone ID: PAT_MRT3847_33962C.1.pep
KKPRKNMSVKVFTALIGKQIFFNCLNNRKKKSKVETIFSQQSSEMIVYTSARVISLTMQGYDSVAKVV

SEQ ID NO: 212555 - protein, 190 aa, Glycine max
  Clone ID: PAT_MRT3847_33963C.1.pep
MNKIEMAATINLSLPLLSLCKPPKFLKPPTTRFLQHEYVNSLSLSLRRRITESNTCRKRRGIVCGLPLPVDPWAPTIDSQSIASQLFAFSLFPYIGFLYFITKSKTAPNLTLFGFYFLLAFVGATIPAGIYAKVHYGTSLSNVDWLHGGAESLLTLTNLFIVLGLREGLRKAENSQRDQNASTPNSGLDE

SEQ ID NO: 212556 - protein, 64 aa, Glycine max
  Clone ID: PAT_MRT3847_33964C.1.pep
ERAILLIDQTGSRSPSAPWRSLSTEASSLTYTDAWLKSPESQPPLSADDDDGYHARWIAFRPSN

SEQ ID NO: 212557 - protein, 72 aa, Glycine max
  Clone ID: PAT_MRT3847_33966C.1.pep
TRFSTVLLQVLLFMITLWPNQVSNFLSLFFLCFDVCNADSTTTIFLFLPYDLKFNLVGARGHAEFRSEMCST

SEQ ID NO: 212558 - protein, 223 aa, Glycine max
  unsure (1)..(223): unsure at all Xaa locations
  Clone ID: PAT_MRT3847_33967C.1.pep
TFKIISKCIKGKGFSWTKRYFGDLGKTLRSAGSNIAFAVVAEISDSVLKGAEANGFNGLVSGFHQGILKLAMEPSVLGTALMEGGPDRKILLDRSPXVDELYIEGYIQAMLDTVYRQEYLRVRVIDNQVILKNLPPNHSLINEITGRVKEFLVSKALLKGDPSTTSRPLSRLRGESEWRIGPTVLTLCEHLFVSFAIRILRRQANKFMFSIKWGKKSEDVGND

SEQ ID NO: 212559 - protein, 55 aa, Glycine max
  Clone ID: PAT_MRT3847_33968C.1.pep
GTGILLCFSNSTLFVSITGDAHQSGSWPEHLFVNKNEGLGRAVFPIGARLDSNMR

SEQ ID NO: 212560 - protein, 37 aa, Glycine max
  Clone ID: PAT_MRT3847_33969C.1.pep
PGPNSLNSYKVLSAAKISPISSLQRIVHNCITLDFCS

SEQ ID NO: 212561 - protein, 136 aa, Glycine max
  Clone ID: PAT_MRT3847_3396C.1.pep
FGSRDKWLPLHTLSACGEFYLLDSLLKHNVDINVLKNEDSGPLKESTSLIKHRKWDGLYCLPSEKSEIVSDEYLPTNDPKSNNNINDEAAELVKLTEQSLFLKKRTNQTKPRPIVVRLDDGDVAPISVKRPEPMDD

SEQ ID NO: 212562 - protein, 114 aa, Glycine max
  Clone ID: PAT_MRT3847_33970C.1.pep
ISTRQKNYPRGAPWLSWRKDFLPQKILLFPRAFNGANPLEELGASFPPGFSGCGEPFFTLWNRKVSPVFKCFWFKNPLFCPLVFFYPVFTNKLFWPFSFLSKPIFIFWGFFLPP

SEQ ID NO: 212563 - protein, 94 aa, Glycine max
  unsure (1)..(94): unsure at all Xaa locations
  Clone ID: PAT_MRT3847_33971C.1.pep
CCVLISLSPNTKKQSHAHKTMSAHRRQPSRLLRRRFSPPNPSQSHLPCPTKFLIKLAPXKAPLFPPHTXHPSAAKSLLRRPPLRTHSPRENPPE

SEQ ID NO: 212564 - protein, 57 aa, Glycine max
  Clone ID: PAT_MRT3847_33972C.1.pep
EDHFAGWPTLTSWWRKHLHQQHPARGPCMTDRLHAIESHPICPLSLYVMVTMDGVAT

SEQ ID NO: 212565 - protein, 616 aa, Glycine max
  Clone ID: PAT_MRT3847_33973C.1.pep
MTEEHENGANASEEEQVIGPGPAPRARPKRPLQFEHAYLDALPSANMYEKSYMHRDVVTHVAVSAAEFFITGSADGHLKFWKKRPIGIEVSKHFRSHLGPIEGLAVSIDGLLCCTISNDRSVKIYDVVNFDMMVMIRLPYIPGAVDWVYKQGDVKARLAISDRNSSFVHIYDARAGSNDPIISKEIHMGPIKVMKYNPVCDSVLSADAKGIIEYWSPATLQFPENVVDFKLKSDTNLFEIAKCKTSVSAIEVSPDGKQFSITSPDRRIRVFWFSTGKLRRVYDESLEVAQDLQRSDAPLYRLEAIDFGRRMAVEKEIEKTESALLPNAVFDESSNFLIYATLLGIKIVNLHTNKVARILGKVENNDRFLRIALYQGDRNSKKVRKIPSAAANANESKEPLTDPTLLCCAFKKHRIYLFSRREPEEPEDATKGRDVFNEKPPADELLAVSDIGKSVTTSLPDNVILHTTMGDIHMKLYPEECPKTVENFTTHCRNGYYDNLIFHRVIKGFMIQTGDPLGDGTGGQSIWGREFEDEFHKSLRHDRPFTVSMANAGPNTNGSQFFITTVATPWLDNKHTVFGRVAKGMDVVQAIEKVKTDKTDKPYQDVKILNVTVPKS

SEQ ID NO: 212566 - protein, 78 aa, Glycine max
  Clone ID: PAT_MRT3847_33974C.1.pep
GSSGSTCVHGDDNLISVHEYVKPYLSGSKLKSFLAGHNITITDGIDTTSATLQFTELADCEFLKRNFKQMSNALWVAP

SEQ ID NO: 212567 - protein, 61 aa, Glycine max
  Clone ID: PAT_MRT3847_33975C.1.pep
RLDLEPIRLDRTKRRARNSESNAMLAIIELPNMLSLPLASNAVVRLLVADALWQCGANAPL

SEQ ID NO: 212568 - protein, 95 aa, Glycine max
  Clone ID: PAT_MRT3847_33976C.1.pep
PNSAIRSAVTSFFAQRKPLTGSLRDQKKASLNGVFRNFPTLSFHGRPSGGPFAPGQGTPCVLIGFINKIVICPVFANTFIQKRISSLEKKGALFP

SEQ ID NO: 212569 - protein, 96 aa, Glycine max
  Clone ID: PAT_MRT3847_33977C.1.pep
QAPMLGGQAGERSAALSGWVPGLLSASCPESLRVRKQLKGQVGARMGDVFIKWHPTVHGRLCDRSIHYRDMRKRVPHSSTWHKKFLGVSRKGRGWT

SEQ ID NO: 212570 - protein, 70 aa, Glycine max
  Clone ID: PAT_MRT3847_33978C.1.pep
RSSGSTSRGVVSSSRDTTGVNECEHSYPFTVDVSQEALCKISGAQIRSLSKSCQHRVASFEGNTSHINRF

SEQ ID NO: 212571 - protein, 147 aa, Glycine max
  unsure (1)..(147): unsure at all Xaa locations
  Clone ID: PAT_MRT3847_33979C.1.pep
AIGWYDKCMLRYSNRSIHGVLXTPFLFYLSEITNATDVSXFSPTLGNLMSNLTGIAASGNSPLPSXSAANATAPNSQTIYGAAQCTPDLSEQDCHSCLVEAFSRITSCCIGNISGRVAAPSCNITYENFRFYDEHEHATEDAPPPSL

SEQ ID NO: 212572 - protein, 101 aa, Glycine max
  unsure (1)..(101): unsure at all Xaa locations
  Clone ID: PAT_MRT3847_3397C.1.pep
MSFRSIVREVRDGFGSLSRRSFEVRLSGHNRGKSRSLVHELQDQPPVIQNSRWASLAPELLRDVINRLEASESTWPGRKHVVACAVVCKFWREMCXEIVSS

SEQ ID NO: 212573 - protein, 104 aa, Glycine max
  Clone ID: PAT_MRT3847_33980C.1.pep
YGIVYLSRHPLSSVRTHNLGSGMWVGDLYFFLLSLAQSGIFQYYQHTCSVHYASNFAFYPFFLLLKLNILVPNPVNRPHPTSPPPPPKEGGRHTVMTGNLPGTE

SEQ ID NO: 212574 - protein, 66 aa, Glycine max
  Clone ID: PAT_MRT3847_33981C.1.pep
FFKFPGCRSFRRKYLNLYKAKLDFLQQEQLVDDDVLRDLEQMEKESDLDDILNYRSAAEYEMQEFL

SEQ ID NO: 212575 - protein, 401 aa, Glycine max
  unsure (1)..(401): unsure at all Xaa locations
  Clone ID: PAT_MRT3847_33982C.1.pep
NLISAERDSTKFVVSPITGELIPISEMSEHMRISLIDPKYKEQKERMFAKIRETTLAADDEISRNIVGLARTRPDIFGTTEEEVSNAVKAEIEKINDEQPKQVIWDGHTGSIGRTANQAMSQTIGSEDQNDAFNNEAKNLLGPAAPPPRPGMPSIRPLPPPPGLALNLPRVPVQYSVPHSGALPMPPPRPMMPSIRPAPPPPMSMNSGQQSVMAGQPHPMHPSIHMNNQGIPXPPPPGSQFTPVPVPRPFVPLSVPPSVMPMMHPPPLPQGVPPPPPPEEAPPPLPEEPEPKRQKLDDSALIPEDQFLAQHPGPVCICVSVPNVDEGNLKGQVLEITVQSLSETVGSLKEKIAGEIQLPANKQKLSGKPGFLKDNMSLAHYNVGGGETLTLTLRERGGRKR

SEQ ID NO: 212576 - protein, 217 aa, Glycine max
  unsure (1)..(217): unsure at all Xaa locations
  Clone ID: PAT_MRT3847_33983C.1.pep
MSIIPRRLFSLRSVSTYSLTPFTRPQPSLPLTRLLLHARPSSTSPSRTPSEKQFETWVQALKPGFTPSDVAQALQAQSDPDLALDIFRWTAQQRHYKHTHHTYLIIIKHLIAGRRYHHAETLIEEVIAGACDDASIPLYNSIIRFCCGRXFLFNRAFDVYKKMLNSRDCRPNLETYSLLFNSLLRRFNKLNVCYVYLHAVRSLTKQMKAXRVIPDSF

SEQ ID NO: 212577 - protein, 94 aa, Glycine max
  unsure (1)..(94): unsure at all Xaa locations
  Clone ID: PAT_MRT3847_33984C.1.pep
FFHTPLQRSQIPMDPAPAVGVCVFLLISYMPALTQTVYSCVLLASHRQHSTWISFARPSSPFGWPPSAFLLHPSNLTTPFCPTLXHPNRRSPSP

SEQ ID NO: 212578 - protein, 56 aa, Glycine max
  Clone ID: PAT_MRT3847_33985C.1.pep
LLMGQFKSMFRRMVGCISTYLFLRLPNILGQLLCLTMGINYMAKANVSTKSLVVHG

SEQ ID NO: 212579 - protein, 101 aa, Glycine max
  unsure (1)..(101): unsure at all Xaa locations
  Clone ID: PAT_MRT3847_33986C.1.pep
QLARGPRLRELIKHSQSAPLSVEEQIITIYTGTNGYLDSLEIGQVRKFLDELRASLDTNKPQFKEVISSTKTFSGEAEVLMKEAXQEQMELFWLQEQVEKK

SEQ ID NO: 212580 - protein, 65 aa, Glycine max
  Clone ID: PAT_MRT3847_33987C.1.pep
LRETATSGDAFFSFYYINSFLMEIFLSQGKEFTQTSGDSALPKSFKPFTAVNIVQGQHIKRCSLV

SEQ ID NO: 212581 - protein, 80 aa, Glycine max
  unsure (1)..(80): unsure at all Xaa locations
  Clone ID: PAT_MRT3847_33988C.1.pep
PELGWVRSHASGLQKDRGATXDLLVGLHHVAHNVDQPQAKDSLEGKFXSFDFKSRSRLEKVSSTKAHLVSGQTFKNGIMG

SEQ ID NO: 212582 - protein, 104 aa, Glycine max
  unsure (1)..(104): unsure at all Xaa locations
  Clone ID: PAT_MRT3847_33989C.1.pep
LVTFSDRATKQSLERRALQSAFGXSKKPDFLRKAAAPPPXKQRSNKPLWLTSKLSISYLDSILPGDYGYDPLGLSXPLXTRGFIHPKWLAFGEIINVRYAMYGA

SEQ ID NO: 212583 - protein, 138 aa, Glycine max
  unsure (1)..(138): unsure at all Xaa locations
  Clone ID: PAT_MRT3847_3398C.1.pep
MSFRSIVRDVRDGFGSLSRRSFEVRLPGHNRGKSRSSVHELQDQPPVIQNSRWASLPPELLRDVINRLEASESTWPGRKHVVACAAVCKSWREMCKEIVSSPEFCGKITFPVSLKQPXHRDGPIQCFIKRDKFKLTYH

SEQ ID NO: 212584 - protein, 111 aa, Glycine max
  unsure (1)..(111): unsure at all Xaa locations
  Clone ID: PAT_MRT3847_33990C.1.pep
HLXYYPALGGKWVVFPQYSTFFLPLPSLLYGVGTTTSTVTYYYCPPIPSPYLPSLFFLNFKPTNPKLSSLTPFPALEWSSFLFHIFFGGYLPCLPYQTFHRLSRTFLLLLF

SEQ ID NO: 212585 - protein, 68 aa, Glycine max
  unsure (1)..(68): unsure at all Xaa locations
  Clone ID: PAT_MRT3847_33991C.1.pep
LDWVEWYQKXGVLTPISYXIIELTDQLALVIEHFFLDFQKFSGKNLEXIFICESIPTYFXVLEVSGGL

SEQ ID NO: 212586 - protein, 108 aa, Glycine max
  unsure (1)..(108): unsure at all Xaa locations
  Clone ID: PAT_MRT3847_33992C.1.pep
LRFVSGDGEEMTLITGTSVEEAYNMVIVELEKSVPTXVALNCSTDEKLPHDKIVXKPKTRCFTILPMEDNFVDRQKILNFARCIMNKRDTLSCHSGITHYSWYGLVCA

SEQ ID NO: 212587 - protein, 52 aa, Glycine max
  Clone ID: PAT_MRT3847_33993C.1.pep
MKKSESGGYVRADQIDLKSLDEQLQRHLSRAWTMEKNKEKKKKKGAPSRGSS

SEQ ID NO: 212588 - protein, 206 aa, Glycine max
  Clone ID: PAT_MRT3847_33994C.1.pep
DHKVVPRFLAAVEAEAPTNEQTSVSIREEEIGKAPAWKRLNYEELGIRNSMIGSTTKKVLNGLKKKGYDVYLVGGCVRDLILKKTPKDFDIITSAELKEVTRTFSWSEIVGKRFPVCHVHMDDTIVEVSSFDTTKCKAGMEFSHHIEAPSGCGKKDHLRWMNCLNRDFTINGLMLDPYARIAYDYFGGIEDIRKAKVRTVIPAETS

SEQ ID NO: 212589 - protein, 81 aa, Glycine max
  Clone ID: PAT_MRT3847_33995C.1.pep
LNYDSLVFYFLGGGLVLSFFSFFFFAMRETGRAKHYRGIRGRENLKKNPEHYPRGGGEQPKSTTNHQSFLLDAAFVNNPPP

SEQ ID NO: 212590 - protein, 56 aa, Glycine max
  unsure (1)..(56): unsure at all Xaa locations
  Clone ID: PAT_MRT3847_33996C.1.pep
GRFRISYYRNXQHRKILENRNLWQAPPQYYTLSHAPRNTNKANSITLQAQRQKSYC

SEQ ID NO: 212591 - protein, 51 aa, Glycine max
  Clone ID: PAT_MRT3847_33997C.1.pep
VKLGTRLLVIEERNCIHKNQKIASFVCVVRTNAVYLDLRLRRKLTTEKKVY

SEQ ID NO: 212592 - protein, 557 aa, Glycine max
  Clone ID: PAT_MRT3847_33998C.1.pep
MDFTQDLHCLLSEQRRKLAAAEAMELDLDFAFRLQLKEALAASLAAQPSSSSAAAAAIIEQPVVVIHDDDVNAMTLQREELARMEREMKDREQSEAETLKMREELCRRIHDEKVAREISAIPEKDWQQWGDNFEKPFGEGSSSSSLSREEGVVRVYFKGLVSEENVRGRKVVLSGIGVAICDLSDNLIFEVSKSLIGNGTSKVAAEIKALIEAFNAAIALDLKRVVYCCDYYPLFQFVSGKWPAKQRKIAILVDQVNLLQRKFSYCNPRFVARHDVKFAFKLARDAIESQSTRLAESGSRSLNETCVICLEETDVGQIFSVDGCQHRYCFSCMKQHVEVKLLHGMVPKCPHQGCKYELLVDSCQKFLTQKLTETMQQRKLEASIPVAEKIYCPYPTCSALMSKTEVLEYSKDITGQSEQSEPKICLKCRGLFCFNCKVPWHSGMTCNTYKRMNPIPPAEDLKLKFLASRSLWQQCLKCNHMIELAEGCYHMTCRCGYEFCYNCGAEWKDKKATCACPLWAEENIWLDDHEEELEEEEEDDDDDYDDYRSDYPDDYYY

SEQ ID NO: 212593 - protein, 44 aa, Glycine max
  Clone ID: PAT_MRT3847_33999C.1.pep
MDFICNQDDVYPIFVQLMNRFMEAIFNLTILNYYLDELVHLSIS

SEQ ID NO: 212594 - protein, 53 aa, Glycine max
  Clone ID: PAT_MRT3847_3399C.1.pep
HYNNLLAKYMSEKTHPRSELKTGHYNRKSRRNLHQCVASVLITTCTFKERRFR

SEQ ID NO: 212595 - protein, 79 aa, Glycine max
  unsure (1)..(79): unsure at all Xaa locations
  Clone ID: PAT_MRT3847_339C.1.pep
XAFSLPIHXIHERLKSVLANQXNHPNFKNNTLIINNHSSKNPRTCTTVTNGITAEKTLRDLGKIELTRHTVFSNNASLL

SEQ ID NO: 212596 - protein, 61 aa, Glycine max
  Clone ID: PAT_MRT3847_33C.1.pep
LHFMLLQMCVNKSCKRLHYVVFSFVALINYAPLFQRKKITHNKKKIKKKIMPVCNNQFNVN

SEQ ID NO: 212597 - protein, 92 aa, Glycine max
  unsure (1)..(92): unsure at all Xaa locations
  Clone ID: PAT_MRT3847_34000C.1.pep
MDHAGLTYGQVLRRDIPWETYMFTTLIXGPNLQLLRCYNHLPQSHRGHLLDDYGASYVRVYGRVLRDILKEDTVEIVWHFIYEMLVANPNRA

SEQ ID NO: 212598 - protein, 226 aa, Glycine max
  unsure (1)..(226): unsure at all Xaa locations
  Clone ID: PAT_MRT3847_34001C.1.pep
SGRPEVLPTRYPRISHPKPGRRDTRETDGNTKAHRTQTTEATAKQGDQVQKRRKSQQEKKRVKPHSQETARDNKEPNDRQEPPRGHKDQEREGPKTTGTRSQGQHREREHHXEPHGDQDHRHKETGKKPQDRERTRKRXRRKTNHRPQRQARENKGSRGKDKRKRNEEKGEPPREGQGEKRKKXDKKEGGKGARGHEGRETPQQKKAGRRKRNRHERGQERKEKNE

SEQ ID NO: 212599 - protein, 230 aa, Glycine max
  unsure (1)..(230): unsure at all Xaa locations
  Clone ID: PAT_MRT3847_34002C.1.pep
HASATNYNGVPLSIPAAVDCHDDIEHLTNAVLGDKRTTSNQQEGAPKTMTELSQGTPVSRTGNVMDPPEQVQHLSVESSPHHDISGEMLHSSRQPELLSSAVDVAPADQSNHVSLIVKPVEQVQQVSSAELPSSHLDSTNLPFTTELEHQPTVVPNQDVQPDSNLEVDSHSHSHEVFVHPASXSDPNTVTPSEVRVQSADTTXLSTPLEINYQNMQAETHSSFRMVHLKL

SEQ ID NO: 212600 - protein, 89 aa, Glycine max
  Clone ID: PAT_MRT3847_34003C.1.pep
SFGLPSILASVGFYLPSFQVPKIEKIVVNCGIGDAAQNAKGLDAAISDLALITGQRPIKTRARASLATFKIREGQPLGIAVTLRGNVSI

SEQ ID NO: 212601 - protein, 52 aa, Glycine max
  Clone ID: PAT_MRT3847_34004C.1.pep
VDPIAKKVLKYPRYVSIDTAMVFISMGCYRVAMRCSLCQKNIDSRYCQKKRK

SEQ ID NO: 212602 - protein, 63 aa, Glycine max
  Clone ID: PAT_MRT3847_34005C.1.pep
PPPTTHNHFAFLKRDEYRGIFVQGRLLFPLYFLPPFPFVFFYLLMCRGTVPFCFTRLVNVLLL

SEQ ID NO: 212603 - protein, 73 aa, Glycine max
  Clone ID: PAT_MRT3847_34006C.1.pep
KVAQGLNKGRIFEQYNPSFYTSEGLTPTKRGYGRNLPPRKQLAILPFRAPSFLGTSAATLVSVSVLLNKGRSF

SEQ ID NO: 212604 - protein, 66 aa, Glycine max
  Clone ID: PAT_MRT3847_34007C.1.pep
FDLTIVLRLSFEDQYWKIIINCITNLDFNPLRSWLIICTIRSCVCCLHCTAYNNSMINVYTKIRNG

SEQ ID NO: 212605 - protein, 76 aa, Glycine max
  Clone ID: PAT_MRT3847_34008C.1.pep
KKHLHTSLYSIYNHLHTFFSTQITTSPYYPPLLHINKPPSFNNILQKKKSLTKNNHTPKKYHTKIPLTPKQHFFLF

SEQ ID NO: 212606 - protein, 87 aa, Glycine max
  Clone ID: PAT_MRT3847_34009C.1.pep
SSDYEYKKERKLMRKLKASLEAHWGGLITWMSFGNCIQDGIRSPVGSALDAYLHTSDPTLASDISSDYARHYHGLYLTFHLNFYGWV

SEQ ID NO: 212607 - protein, 70 aa, Glycine max
  Clone ID: PAT_MRT3847_3400C.1.pep
MSFRSIVRDVRDGFGSLSRRSFDVRISGGGKLNSLVHEAHERQLVIQNSRWASLPPELLCDVIKRLEESE

SEQ ID NO: 212608 - protein, 92 aa, Glycine max
  Clone ID: PAT_MRT3847_34010C.1.pep
INFFFFFHILIKRKACLVGGGVRPFKCNGFPMQGKFIGGGGGVRHTNIWDGGPPPPSPHQKSGIVRFSPPLFCFVWQEKKGFNFFFFLKGCF

SEQ ID NO: 212609 - protein, 43 aa, Glycine max
  Clone ID: PAT_MRT3847_34011C.1.pep
VRKANSNFRLVPCLLKNIRTHQQVPVLKHSKGRGVGLNQSQLF

SEQ ID NO: 212610 - protein, 177 aa, Glycine max
  unsure (1)..(177): unsure at all Xaa locations
  Clone ID: PAT_MRT3847_34012C.1.pep
LHLLTAVMKCFFKRPPETQKALGAALAAGIATDFHQDVHDRALFYYRLLQYNVSVAESVVNPPKQAVSVFADTQSSEIKDRIFDEFNSLSVVYQXDELGNLSISAESADSVVPAQRVEANDKDLLLSTSEKDEGRDPGSNGSVYNAPSYNGSSAPTTSQPLADLAFPSTGISGQAPA

SEQ ID NO: 212611 - protein, 65 aa, Glycine max
  Clone ID: PAT_MRT3847_34013C.1.pep
ICPFYRFSWKIQHFILRSEVRRRKGYGDDQLIQLVKCQSRSNFRFRARGLQLYIHIMVSGKPCSE

SEQ ID NO: 212612 - protein, 118 aa, Glycine max
  Clone ID: PAT_MRT3847_34014C.1.pep
KAVLDPGTFQQKWRQLPISLSEEYSLSLQGVASLTTPHALLRHMQSHSMHCIESGGQSPNFKFFFFAQKAEAASMYLVECIINTSSAKSQIKIKADDQSSSQAFSTLFQSALSKFGLP

SEQ ID NO: 212613 - protein, 536 aa, Glycine max
  unsure (1)..(536): unsure at all Xaa locations
  Clone ID: PAT_MRT3847_34015C.1.pep
PRVRPRVREQSYAVLSHLHLLVMRAPYIFSSDYKHFYCQYNEPSYVKKLKLEMLTAVANESNTYEIVTELCEYAANVDIPIARESIRAVGKIALQQYDVNAIVDRLLQFLEMEKDYVTSEALVLVKDLLRKYPQWSQDCIAVVGNISSKNVQEPKAKAALIWMLGEYSQDMHDAPYVLESLVENWDEEHSAEVRLHLLTAVMKCFFKRPPETQKALGAALAAGIATDFHQDVHDRALFYYRLLQYNVSVAESVVNPPKQAVSVFADTQSSEIKDRIFDEFNSLSVVYQKPSYMFTDKEHRGTFEFADELGNLSISAESSDSVVPAERVEANDKDLLLSTSEKDEGRDPGSNGSVYNAPSYNGSSAPTTSQPLADLAFPXPGISGQAPASSLAIDDLLGLDFPVETAAMPSPPPLNLNPKAVLDPGAFQQKWRQLPISLSEEYSLSPQGVTSLTTPHALLRHMQSHSIQCIASGGQSPNFKFFFFAQKAEAASMYLVECIINTSSAKSQIKIKADDQSSSQAFSTLFQSALSKFGLP

SEQ ID NO: 212614 - protein, 103 aa, Glycine max
  unsure (1)..(103): unsure at all Xaa locations
  Clone ID: PAT_MRT3847_34016C.1.pep
MGGEKAPLVQADITCGHGTNSLINCIGYLQNGGTPPSGCCNAQKSLNAAAKTTVDRQTARNCLRXAASQIYVFKVNNAASLPGXCGVYMPYTISTSTNCATIK

SEQ ID NO: 212615 - protein, 43 aa, Glycine max
  unsure (1)..(43): unsure at all Xaa locations
  Clone ID: PAT_MRT3847_34017C.1.pep
SXLASTYWDIPSXQTYSQXNHRNELPLHHXLIIFXNCVYVLVM

SEQ ID NO: 212616 - protein, 304 aa, Glycine max
  Clone ID: PAT_MRT3847_34018C.1.pep
MLRESKTIHLRRAVAASFFFATVSLSCLVLLGDVDSHRFLSSFHSSYSLSGFTRIFPSVYNDPVATSNEYPLEKILNDAAMKDRTVILTTLNEAWATPNSVIDLFLESFRIGDRTSTFLNHLVIIALDQKAFARCQVIHTHCFSLVSEEADFHEEAYFMTPRYLMMMWKRIDFLRTVLEMGYNFVFTDADIMWFRDPFPQFDLHADFQIACDHFTGGFDDVQNRPNGGFNYVKSNNRSIEFYKFWYSSRETYPGYHDQDVLNFIKVHPFITDIGLKMRFLDTTNFGGLCKPSRDVNQCYTIHTD

SEQ ID NO: 212617 - protein, 82 aa, Glycine max
  Clone ID: PAT_MRT3847_34019C.1.pep
KLPSFLQNTGVLDISEYPCIPCCTPITLNFSCCITSNVITSVCLVHKCSDGVSSWNRNYTAACLLLSNKNENGPGRLSELEP

SEQ ID NO: 212618 - protein, 52 aa, Glycine max
  Clone ID: PAT_MRT3847_3401C.1.pep
ALMNGEFLLRVVKKPIYLMFSSSPKQFVLILLLSRTWNYTLVMYFIYVCEYI

SEQ ID NO: 212619 - protein, 81 aa, Glycine max
  Clone ID: PAT_MRT3847_34020C.1.pep
LIVLVMPSDSSMSNPRIWEIRDSTHLLPLSTRAKKIIVPTEIGPRLVFICHTECSGVCGFVSIESMRRNWYESNVLFTNFK

SEQ ID NO: 212620 - protein, 105 aa, Glycine max
  unsure (1)..(105): unsure at all Xaa locations
  Clone ID: PAT_MRT3847_34021C.1.pep
GKGEWQVFLFSTQNXSGGKLWGRGVTFISSKIIHPIWQHWIIMKPSRFLIKHPHLILTSKSPVTISLRLLNKSQNKLPPVHLFYFDCPFSIFSSITPKLHSFYLI

SEQ ID NO: 212621 - protein, 100 aa, Glycine max
  Clone ID: PAT_MRT3847_34022C.1.pep
SGVSTTIVTTPLNVATIRGTIGKETETDIEILTVKFPSAEAGLPEGCENTESIPSPDLVLTLYREQDPTILMIEILVYHIQILGTERIENFIEYHTKVWW

SEQ ID NO: 212622 - protein, 318 aa, Glycine max
  Clone ID: PAT_MRT3847_34023C.1.pep
LFSSRIGSRNALVPLGEQPTASPVSQQNALVLFDMFSNGNNAPTSVNSQPPHPANVAGQTSPYAPQFQQQQTVTSQGGFYPNGNAPNAGSPQQYEQSLYTQNTGPAWNGQVAQQQQQQPPSPVYGTQSGSLPPPPWEAQPAADNGSPLAGAQYPHMQNSGHPMGPQTMGNDQGVGMYMQPNANSHMSGMNNHVGSNQMGLQPQHMQGVAGPYMGMAPHQMQGGPVMYPQQMYGNQFMGYGYDQRQGVHYQQQGVPYIERQMYGMSVRDDSSLRNPYQASTTSYAPSGKPSKPEDKLFGDLVDMAKVKPKPTPGRAGSM

SEQ ID NO: 212623 - protein, 53 aa, Glycine max
  Clone ID: PAT_MRT3847_34024C.1.pep
NKMVISVDQVVYAFGELEGVRKPSIVIDIKRCRHCHCFNRHRTRSRTRNSESG

SEQ ID NO: 212624 - protein, 70 aa, Glycine max
  unsure (1)..(70): unsure at all Xaa locations
  Clone ID: PAT_MRT3847_34025C.1.pep
FVVKSFAKGGVKQNLGVFDWSLPGDGFKKISGIPQEGVIKGPTKPFFDDLWDEXMSSPLNFKGWGVSGYS

SEQ ID NO: 212625 - protein, 67 aa, Glycine max
  Clone ID: PAT_MRT3847_34026C.1.pep
DERNMSRLTLMAHKLNCFLAAHNFTRTDGLDKPSTTFANKKLTNCRFIQGRTLLNDIRICGRVQRTR

SEQ ID NO: 212626 - protein, 57 aa, Glycine max
  Clone ID: PAT_MRT3847_34027C.1.pep
CCLPCFSPWFFLTPFFGFVVAPICLIGFSRCTPPPLSINLNRNILLKIYIKFIIFKI

SEQ ID NO: 212627 - protein, 64 aa, Glycine max
  Clone ID: PAT_MRT3847_34028C.1.pep
LFQLILIELWSVILYHFCFCCHLSFLYLLYSILRLFIGEISKFILSHFVDTTHPSFIYLFGCEV

SEQ ID NO: 212628 - protein, 66 aa, Glycine max
  Clone ID: PAT_MRT3847_34029C.1.pep
MSFKKKNSGRTSGFDRTYSFMRCQMSSMKSPSFKLMTAPFQSHDWYHPDATHLTRLAAQRPFNSWR

SEQ ID NO: 212629 - protein, 73 aa, Glycine max
  Clone ID: PAT_MRT3847_3402C.1.pep
SVKNFQLIAATQPPAAGAPTPSSQPAQSDHDKIILQFGKVGKDIFTMDYRYPLSAFQAFAICLTSFDTKLACE

SEQ ID NO: 212630 - protein, 50 aa, Glycine max
  Clone ID: PAT_MRT3847_34030C.1.pep
HARTRTLAMGFDIIHYIVLFAPYSKTIFVTELFTQERWVLNFTPIKKFHG

SEQ ID NO: 212631 - protein, 74 aa, Glycine max
  Clone ID: PAT_MRT3847_34031C.1.pep
PLRILDCSPAPSWVLADMGLRWLSCPHIWLLWILFASCSYAFYLPGSSSRPILRSHILICSVLSRILSQAIHRR

SEQ ID NO: 212632 - protein, 68 aa, Glycine max
  Clone ID: PAT_MRT3847_34032C.1.pep
PEVQNEIMKPFSPRANHILQTRGRKKYFCKNINRELIDQGTTEGSQHLESLPPPKGWHQKHPYGDFNW

SEQ ID NO: 212633 - protein, 66 aa, Glycine max
  Clone ID: PAT_MRT3847_34033C.1.pep
RFKATKNKVFGKQIISRGMEGFPRVLVGDYLSAPRAPFTPFPQLSLGPKFWMKCAPLRVLSRPFIS

SEQ ID NO: 212634 - protein, 306 aa, Glycine max
  Clone ID: PAT_MRT3847_34034C.1.pep
FNSFSRYGNKIVAIKVLHRGSTSEERASLENRFAREVNMMSRVHHDNLVKFIGACKDPLMVIVTELLPGMSLRKYLTSIRPKLLDLDVAINFALDIARAMDWLHANGIIHRDLKPDNLLLTADQKSVKLADFGLAREETVTEMMTAETGTYRWMAPELYSTVTLRQGEKKHYNNKVDVYSFGIVLWELLTNRMPFEGMSNLQAAYAAAFKQERPGIPDDISPELAFVIQSCWVEDPNLRPSFSQIIRMLNAFLFTLSPPSPPLPVPPDNEPEVATTSNGTITEFSARNRGKFGFLRQLFSSKRTKN

SEQ ID NO: 212635 - protein, 57 aa, Glycine max
  Clone ID: PAT_MRT3847_34035C.1.pep
GKPWRSTSFFISLAKRGSDGWPRWPQAPLHFLKKMGWWLKLNKERGKEGLASSQKKG

SEQ ID NO: 212636 - protein, 49 aa, Glycine max
  Clone ID: PAT_MRT3847_34036C.1.pep
LFRWCFYCGLLLLATLSAILFPSGRTHGGVGRSRRSVRVRACVRAFFTF

SEQ ID NO: 212637 - protein, 81 aa, Glycine max
  unsure (1)..(81): unsure at all Xaa locations
  Clone ID: PAT_MRT3847_34037C.1.pep
LTLYLDSLQNKSPSRIASGPHXIGNVIGHETATISDGYLVGPVVTIGTGCVVASGVMLSRCTIMIGFLRNKHTCISNSIIW

SEQ ID NO: 212638 - protein, 100 aa, Glycine max
  unsure (1)..(100): unsure at all Xaa locations
  Clone ID: PAT_MRT3847_34038C.1.pep
PLSSSSSXVRFSILFSGNYAXPKVFFXMXIGGPTCRPHRDGALRRPXTPSXRRRXSATLCTRRXRAAGPXGKXPSXRXGWXFXRGDXEXHLXRXGXFPXG

SEQ ID NO: 212639 - protein, 194 aa, Glycine max
  unsure (1)..(194): unsure at all Xaa locations
  Clone ID: PAT_MRT3847_34039C.1.pep
APTRPDFIIVPFMELLLPVFLKLFPNMLPSTFQDKMKEQEALKRRLKARIEYARFLQDTVKEMAKEVQNSRSGELKKTAEDLDEFLNTIRRGATVSNEEILGFAKLFNDELTLDNISRPRLVNMCKYMGISPFGTDAYLRYMLRKHLRRIKEDDKLIQAEGVDSLSEDELQEDCRERGMLGMLSVEXXMRQQPF

SEQ ID NO: 212640 - protein, 71 aa, Glycine max
  Clone ID: PAT_MRT3847_3403C.1.pep
GGVAGGLESGPTNGLKKARGAHACKSRAVAGAINGATLALTLEDSPHGQIVPCAHTGAAISPAGNPPPGIF

SEQ ID NO: 212641 - protein, 108 aa, Glycine max
  unsure (1)..(108): unsure at all Xaa locations
  Clone ID: PAT_MRT3847_34040C.1.pep
MVMCVSLNGTAISKAGVHYDGGIEGFIQGYQQVFYHRSTDHILTPESPAITPTLEPAXEKHLTXAAYKIASKADSETSLVYLELWDKQYYTKDYPDLYTDPTATSSAM

SEQ ID NO: 212642 - protein, 40 aa, Glycine max
  Clone ID: PAT_MRT3847_34041C.1.pep
PEMCWEEDSYAANREGEKVGAAVENLRSDPSGVIYNLILG

SEQ ID NO: 212643 - protein, 91 aa, Glycine max
  Clone ID: PAT_MRT3847_34042C.1.pep
TRNSSSISSASSDAVNDEQNKTLLDQAQEDDDEQQGPHTTPKHLKPKNTNQKRHREPRFSFMTESEVDPPEHGYTCRKYRPKAVKKPPLPQ

SEQ ID NO: 212644 - protein, 126 aa, Glycine max
  unsure (1)..(126): unsure at all Xaa locations
  Clone ID: PAT_MRT3847_34043C.1.pep
GSILNPNKFQGGFFFLLFSIPAEKEEKSVSFPPLKEPTNLNRALIDSWPGPIFGGIXRPVTSPFDVIKIQFRVSLEPTSSWXLLRNDLAAASNTLVVSSTKDILEKKRQGFGGKWPHAMLSISAYI

SEQ ID NO: 212645 - protein, 97 aa, Glycine max
  Clone ID: PAT_MRT3847_34044C.1.pep
NNSDSSFTFLRKKKNSWPTGNLCYYPPPTTDPPTLHNGTPCGPTGTTCWRHDGPPDPCNRCCESNKTHLRPHIKGADPNLSRLLHAGPTTLPLTQTA

SEQ ID NO: 212646 - protein, 75 aa, Glycine max
  Clone ID: PAT_MRT3847_34045C.1.pep
QVMKATILTNHILTTCFLFMNFSKSVHILLRKIRCFFNVIFRGAVLEWSRKSGVFNVEVTTQQTNEILQTLVLDD

SEQ ID NO: 212647 - protein, 32 aa, Glycine max
  Clone ID: PAT_MRT3847_34046C.1.pep
GGQDQSSYANSMSYQNSQHKNFKVLGMPQLSG

SEQ ID NO: 212648 - protein, 95 aa, Glycine max
  Clone ID: PAT_MRT3847_34047C.1.pep
TRPAHKKDKADSDSMELTEIQTSKENKRSEDDNRKQRKKRQSPVYEMDKEKTKKSRRHASGHESDEGRHERHKRDHRREGDLEDGEFGDDHVDRW

SEQ ID NO: 212649 - protein, 101 aa, Glycine max
  Clone ID: PAT_MRT3847_34048C.1.pep
GGKKQKIVFSRAFLKKGPTLKLEEATRALYPARKQFVQDVFTPLRKGGAPFVKAPRLSPVQKANQIALFFEGGVAKQGPPFWFLGKKGQFFSLVGPQRVAF

SEQ ID NO: 212650 - protein, 58 aa, Glycine max
  Clone ID: PAT_MRT3847_34049C.1.pep
MKKRSVNWDKRNKKKQKIMGAAPANGRALPGFGFGAVPAAVPLSPRGVSSMRLGPRSA

SEQ ID NO: 212651 - protein, 287 aa, Glycine max
  Clone ID: PAT_MRT3847_3404C.1.pep
MSFRSIVRDVRDGFGSLSRRSFDVRLSGGGKSNSLVHEEHECLPVVQNSRWASLPPELLRDVIKRLEESETTWPARKHVVACAAVCRSWRGMCKEIVTSPEFCGKITFPVSLKQPGSRDGTIQCFIKRDKSNLTYHLFLCLSPALLVENGKFLLSAKRTRRTTCTEYIISMDADNISRSNSTYIGKLRSNFLGTKFIIYDTQPPYHNAMLSPPARSRRFSKKVSTKVPSGSYNIAHVTYELNVLGTRGPRRMNCTMYSIPASSMEPNGIVPGQPELLPRALEDSFGD

SEQ ID NO: 212652 - protein, 63 aa, Glycine max
  Clone ID: PAT_MRT3847_34050C.1.pep
QCHSLDQSGRQYSQMVCISIDSHTSSMSIHNQGMYGSTWSHSLPIRGPFLCITTESPSRCHNN

SEQ ID NO: 212653 - protein, 90 aa, Glycine max
  unsure (1)..(90): unsure at all Xaa locations
  Clone ID: PAT_MRT3847_34051C.1.pep
RLDYNKRTXEREKRVPTWAGPQRPKDEKLPRRKITDKPKTRGCTIHPMECNQEARQKXTNPARLIMKKRDKLSXQVGINPHSMEWTGLAN

SEQ ID NO: 212654 - protein, 48 aa, Glycine max
  unsure (1)..(48): unsure at all Xaa locations
  Clone ID: PAT_MRT3847_34052C.1.pep
PALSESDITSLAPSSPSRXPKRRAYYVRRPSRDTHDGNGDASMLAIPL

SEQ ID NO: 212655 - protein, 50 aa, Glycine max
  Clone ID: PAT_MRT3847_34053C.1.pep
KFRYHIHWLQDRLNNISNNSNSPMNLCASVFLENVELRFTKMIIYSRRAC

SEQ ID NO: 212656 - protein, 95 aa, Glycine max
  Clone ID: PAT_MRT3847_34054C.1.pep
LNPPGTWLGSAKKVTKLSSTFFSVVCVVMVVVAPDGNKICCLNRPEQRLICMVPPILFNGLCSGAHQGRVSSYLALNRPGTCMLYLMHIVGHSYR

SEQ ID NO: 212657 - protein, 32 aa, Glycine max
  Clone ID: PAT_MRT3847_34055C.1.pep
RSRFILVIWIFSILLNSSYNSPNYSYHNFDKT

SEQ ID NO: 212658 - protein, 48 aa, Glycine max
  Clone ID: PAT_MRT3847_34056C.1.pep
LVEGVHYVSLFVLIGVGRLLEAGPFSASSGIEVCFAPCCLGLHGIQIP

SEQ ID NO: 212659 - protein, 86 aa, Glycine max
  Clone ID: PAT_MRT3847_34057C.1.pep
GTLFTTAPLFPSFVVYSLKFALANVYFITCHIYLLSISVPIPWCLIDDLSHPYDICRVLYAYYHFFNCCARTRNELIMAAGRTSFY

SEQ ID NO: 212660 - protein, 119 aa, Glycine max
  unsure (1)..(119): unsure at all Xaa locations
  Clone ID: PAT_MRT3847_34058C.1.pep
PPSCLEKWKTKYEEYRKDMTDALNLKDKSKSHEEAAEVNRKYKEEFYGPTLEMEGCLKSIGDIFNEALAVYNVSYEYAMLXERIKRCGFAWXIAGSALTRLYIIKQNEKALNYDPSVVR

SEQ ID NO: 212661 - protein, 91 aa, Glycine max
  Clone ID: PAT_MRT3847_34059C.1.pep
PPPPSTPKHHHKPPKSRTRHDTIKTITLNSHISNFGPFCDKPTTLENRGRNLQRTNAATKAELLTKNGRRHCIQQTPLHTKPHAIVLNQPT

SEQ ID NO: 212662 - protein, 167 aa, Glycine max
  Clone ID: PAT_MRT3847_3405C.1.pep
MGNSLRCCLACVLPCGALDLIRIVHLNGYVEEITRPITAGEVLKANPNHVLSKPSSQGVVRRILILSPETELKRGSIYFLIPESSLPEKKRLAGKGRNVGGDNDIKKKPSTLKGNKGSSDDDYSSLSQGCLNKATHKGSKEKKSSCRDRRKGRIGIWRPHLESILED

SEQ ID NO: 212663 - protein, 54 aa, Glycine max
  Clone ID: PAT_MRT3847_34060C.1.pep
LCRSVSPFYNLHTFSPSSSLPIHASLLILFNFLLYAVQFGYVLASFLTELITLQ

SEQ ID NO: 212664 - protein, 65 aa, Glycine max
  Clone ID: PAT_MRT3847_34061C.1.pep
HVAYILSLSWDNIFICCILSNILGWLQTLNLRGIFTMSRYVLDSSGQHIFLHMNLVGWIMVQITV

SEQ ID NO: 212665 - protein, 55 aa, Glycine max
  Clone ID: PAT_MRT3847_34062C.1.pep
TIYNLLVVISDSGMLSMVKFCNGINRFFPIKHFPLFNPGNKIDQLRRMLLAADSR

SEQ ID NO: 212666 - protein, 64 aa, Glycine max
  Clone ID: PAT_MRT3847_34063C.1.pep
VFFSLSCTSVCVVRNLHVSAQMWYEFTIPIINYRDFFLTEIICISRQGADINGLNYLQSLGCYF

SEQ ID NO: 212667 - protein, 128 aa, Glycine max
  Clone ID: PAT_MRT3847_34064C.1.pep
ACGKVRVLQKMPKGRDVEDDDLFVFNDGFTAPLYRIKVNAIQLKETVEENTSTTERVFHDRQYQIDAALVRIMKTRKVLSHTLLITELFQQLKFPIKPADLKKRIESLIDREYLERDKSNPQIYNYLA

SEQ ID NO: 212668 - protein, 477 aa, Glycine max
  unsure (1)..(477): unsure at all Xaa locations
  Clone ID: PAT_MRT3847_34065C.1.pep
FLFLTTVEKQLXLERYIIYVLDKGFAMLMDGNRIEDLQRMCSPLIVINALESLRQAISSYIRRTGQGIVMDEEKDKDMVSSLLEFKASLDTTWEESFSKNEAFCNTIKDSFEHLINLRQNRPAELIAKFLDEKLRAGNKGTSEEELEGTLDKVLVLFRFIQGKDVFEAFYKKDLAKRLLLGKSASIDAEKSMISKLKTECGSQFTNKLEGMFKDIELSKEINESFKQSSQARTKLPSGIEMSVHVLTTGYWPTYPPMDVRLPHELNVYQDIFKEFYLSKYSGRRLMWQNSLGHCVLKAEFPKGKKELAVSLFQTVVLMLFNDAEKLSFQDIKDSTGIEDKELRRTLQSLACGKVRVLQKLPKGRDVEDDDSFVFNEGFTAPLYRIKVNAIQLKETVEENTSTTERVFQDRQYQVDAAIVRIMKTRKVLSHTLLITELFQQLKFPIKPADLKKRIESLIDREYLERDKNNPQIYNYLA

SEQ ID NO: 212669 - protein, 286 aa, Glycine max
  Clone ID: PAT_MRT3847_34066C.1.pep
MADNLDDGEFWLPPQFLTDDDDDTSFNNAKNDAVSKSLFFSSSSETESDEEDHHLAELTRRVALELDLNNNNNSAKPKGVFGGGSPQSILSAFGSSGKGSSPNGAVPHVNSSSTWDLLRAAAGEVERMRDGYSFLTPSPVAAAAQPNAVNGVVLGFYYQQPQLHQQQPSHSQQQLQIAQFEMMRKQQQQRQMVPPNRGRNNNSSNNVVRVGNVVNGIGLSASAWPPNGSGMRAVFLSGKRERSTGTGVFLPRCVDTRNNNESRKKPVCNTVLVSDRVAQALNLEGV

SEQ ID NO: 212670 - protein, 44 aa, Glycine max
  Clone ID: PAT_MRT3847_34067C.1.pep
WVIREPYMSKRAHVHVVKSSGSQMGSRLHMRSPCRLTKYHHAPS

SEQ ID NO: 212671 - protein, 51 aa, Glycine max
  Clone ID: PAT_MRT3847_34068C.1.pep
SDNRSNSRASTCNKPRLLEGMHLLDNRSTQALPVALMIHDKSSDRTAIVPA

SEQ ID NO: 212672 - protein, 160 aa, Glycine max
  Clone ID: PAT_MRT3847_34069C.1.pep
MDQAKLARMQASVRIGGKGTPRRKVKKVHRAAGTDDKKLQTALKKLNVQPIQAIEEVNMFKSDGNVIHFSAPKVHASVPANTFAIYGHGEDKELTELVPGILNQLGPDSLASLRKLAESYQSMQKEKGEDGEKKDDDDEDDDDIPELVAGENFESKAEVE

SEQ ID NO: 212673 - protein, 39 aa, Glycine max
  Clone ID: PAT_MRT3847_3406C.1.pep
CYSYLNEKKKLMHLTCFNWNKIYVTHLLVVRGFVRTKYR

SEQ ID NO: 212674 - protein, 315 aa, Glycine max
  Clone ID: PAT_MRT3847_34070C.1.pep
MEGLDSNNSTHNSIAKGKRTKRMRLLSPCGVIVAAITTTTTVTSSTSSANSGASSTTTYESEEEDMANCLILLAQGGESRHHPRHDKQQVEDHGLENCDDGAIKTEEKGNSSNVNTTTAATTTAANNNTKVGFYIYECKTCNRTFPSFQALGGHRASHKKPKLAAEEKKQPLPPSPLPPPTPSQLQHMIVTNYDRFEEGSVKSGPPISLQLGNNGNNNKGKIHECSICGSEFTSGQALGGHMRRHRASTNANNVVDTTSCNTVITTTITAVPPRNILQLDLNLPAPEDDLREAKFQFTATSQVLVGTPALVDCHY

SEQ ID NO: 212675 - protein, 57 aa, Glycine max
  Clone ID: PAT_MRT3847_34071C.1.pep
KLIHILYYLFNFKYVLKKIYPINIMIKTSNNKLYNLLFNIVFQLFLIIFYHINNLKL

SEQ ID NO: 212676 - protein, 42 aa, Glycine max
  Clone ID: PAT_MRT3847_34072C.1.pep
MASKNQEERAEAVAKVVAKELDQVTREGKNRDFGVVVEHHHH

SEQ ID NO: 212677 - protein, 104 aa, Glycine max
  Clone ID: PAT_MRT3847_34073C.1.pep
AMAKPSSPANLASAIICFFASKKFPHRLKASPGRFCKAKPFTTPFPSWSMFMDFSKSALPLVVCHEIWRAHWIYYWWIVCKKSRQNSFSRCPFYFFRILRISPL

SEQ ID NO: 212678 - protein, 69 aa, Glycine max
  Clone ID: PAT_MRT3847_34074C.1.pep
FNLFFFVFFFFLLFFGVWFGGGAFYKLPSESFQMQGGFISTNHPPTPICPTVHNDLLKNSGFFLKTITI

SEQ ID NO: 212679 - protein, 50 aa, Glycine max
  Clone ID: PAT_MRT3847_34075C.1.pep
QSSPSLLSFLSFFLPMDIQQQLLKFMIHIGGALPSEPFRSFQSFLTLRGS

SEQ ID NO: 212680 - protein, 44 aa, Glycine max
  Clone ID: PAT_MRT3847_34076C.1.pep
NLKPKIAFFIPHLFDQSGFSFSEPNTFPGTFVPAPLFFFKSNLF

SEQ ID NO: 212681 - protein, 145 aa, Glycine max
  Clone ID: PAT_MRT3847_34077C.1.pep
SRVRSIQIRDVEEEDNNPDWVKIKDWLDKQESSSVVYIGFGSELRLSQQDVTELAHGIELSGLRFFWALRNLHKEDLPHGFEERTKERGIVWKSWAPQIKILGHAAIGGCITHCGTNSLVEMLNSGHVLETLPYVLDHALFSRVL

SEQ ID NO: 212682 - protein, 91 aa, Glycine max
  unsure (1)..(91): unsure at all Xaa locations
  Clone ID: PAT_MRT3847_34078C.1.pep
XKSLTYNDLSHGLHKSTKVIEKHTTQLYGSWEDYNQPNYIKLSKGLGADHNIILLTMRSAKTLREXTSWCNMDCKKKAKRITGCSYVVIKD

SEQ ID NO: 212683 - protein, 72 aa, Glycine max
  Clone ID: PAT_MRT3847_34079C.1.pep
FPPPEWVLFHSLPLAKEKCFFKKDLFKKKRPPIYIWAGDCALKRPRIGWLIYDKTFFVRASKHVGVPPTVAE

SEQ ID NO: 212684 - protein, 171 aa, Glycine max
  unsure (1)..(171): unsure at all Xaa locations
  Clone ID: PAT_MRT3847_3407C.1.pep
MMQRLVDHVLAVTKESLKAITYESLNNIVRLINGVSALLLALLPGKANILEGIHGWELKPTFRGPRFPRWMENGVSSFNQFIHELSVDSDNSSPEYSSGEEDTDRYSDRFDFPPSPASQSSRTSEAGFAKYSRHQMDWIQYIILLIWFPVKLLLWIPLHXXRLVYYGVSKA

SEQ ID NO: 212685 - protein, 412 aa, Glycine max
  unsure (1)..(412): unsure at all Xaa locations
  Clone ID: PAT_MRT3847_34080C.1.pep
MVLFGSHWKEGDLVLKKATEYGAVEIWMNERVRRACASSCADFVYGFLESSSKKAAEYWLIWRFEGDATLADLMQSRDFPYNVETLILGEVQDLPKGLERENRIIQTIVRQILFALDGLHSTGIVHRDIKPQNVIFSEESRTFKIIDLGAATDLRVGINYIPKEFLLDPRYAAPEQYIMSTQTPSAPSVPVATALSPVLWQLNLPDRFDIYSAGLIFLQMAFPSLRSDNSLIQFNRQLKRCDYDLAXWRKTAEARSELRKGLELLDLDGGIGWELLKSMVRYKARQRLSAKAALAHPYFVREGLLALSFMQTLRLQLLRATQQDYSEAARWIIQLMAKSGTQKDGGFTEAQLQELREIEPKKKASAPRNALASALKLQRKIIRTIRTLNESMDELTRRRKSFWWSRWIPREE

SEQ ID NO: 212686 - protein, 210 aa, Glycine max
  Clone ID: PAT_MRT3847_34081C.1.pep
MLEAMVAGAFLSASLQVTFDRLASSDIKDYFHGRKLKDEMLKKLDIVLNSINQVLEDAEERQYRSPNVMKWLDELKEAIYEAELLLDEVATEASRQKLEAEFQPATSKVRGFFMAFINPFDKQIESRVKELLENIEFLAKQMDFLGLRKGICAGNEVGISWKLPNRLPTTSLVDESSICGREGDKEEIMKILLSDSVTCNQVPVVSIVGW

SEQ ID NO: 212687 - protein, 122 aa, Glycine max
  Clone ID: PAT_MRT3847_34082C.1.pep
MEEFRSKSYGDGRMQIEAYRGANIQDLRCCSASYASSVHPTTTTTTTTQTQMGGNNNNEAKFKKGKSTNGSTSKSWSFSDPELQRKKRVASYKVYAVEGKLKGSLRKSFKWLKDRCNRVVYG

SEQ ID NO: 212688 - protein, 55 aa, Glycine max
  Clone ID: PAT_MRT3847_34083C.1.pep
KALKFPFKFFLVQLKRDKVLTPIQSVKMKKLPRKQPCVGKTYGMKIFSTKQIKRG

SEQ ID NO: 212689 - protein, 117 aa, Glycine max
  Clone ID: PAT_MRT3847_34084C.1.pep
ICVPSLKKLHLKCHDKRVQVVTPSLEYLQVQETKVRDSLVGNLPNLLQAHADIYFDQHEKEYVFNFFNAIRQTKFFGAVYLYNRGEVLSADHFFYPITLANLFIFVVLYAILLKGNG

SEQ ID NO: 212690 - protein, 177 aa, Glycine max
  Clone ID: PAT_MRT3847_34085C.1.pep
RGMEHKKTQGGGGGGQMIKEKCRARPRRRRRGQQCKVQLSILISQYRIGYWHRGVVCKNAREPVPPPEPEPPDREGILPPPSLDSRPAKCVGFRLSAAGSSLLLSDAAANAAAAAAAAAAAKPGFPSLVPLLLANNLFVGIPFLPTLAILPSGPRPSCSPFIGPLHRIAPLLFSGAK

SEQ ID NO: 212691 - protein, 120 aa, Glycine max
  unsure (1)..(120): unsure at all Xaa locations
  Clone ID: PAT_MRT3847_34086C.1.pep
MKIIPVPCLDDNYAYLIVDESTKKAAAVDPVEPEKVLKAAGEVGAYVDCVLTTHHHWDHAGGNEKMRLQVPGIKVFGGSLDNVKGCTDXVENGMKVSLGKDIEILCLHTPLHTKGHISYY

SEQ ID NO: 212692 - protein, 79 aa, Glycine max
  unsure (1)..(79): unsure at all Xaa locations
  Clone ID: PAT_MRT3847_34087C.1.pep
AIDKAVAAGVNVLSISLGGGISTYCRDNSAVAAFXPMDRGVFASCSAVKCXPDPAILTNVSPGITXVGRLTPDTDFPLA

SEQ ID NO: 212693 - protein, 136 aa, Glycine max
  Clone ID: PAT_MRT3847_34088C.1.pep
LFFFFFFFFFFFFFFFFWHTQAKMHFHSNYNYVSVHQNQKGIKKCLFYDICTPKNNKEESNLPLVNLFTLFFLLSLFYLCLCSLYVVGWRIASVYIHSGLLVSHCKLCTKRQTKIKSWIGEKQTQNNIKTNQRMTH

SEQ ID NO: 212694 - protein, 335 aa, Glycine max
  Clone ID: PAT_MRT3847_34089C.1.pep
MAAPQGGSGSGPERDKSTAPSSSPISVVSAFWKDFELEKEKSILDEQGLRIAENQESSQKNRRKLAENTRDFKKASPEDKLSLFNSLLKGYQEEVDNLTKRAKFGENAFLNIYQKLYEAPDPYPALVSIAEQDLKISELESENRKMKVELEEFRTEATHLKNQQATIRRLEERNRQLEQQMEEKVKEIVEIKQRSLAEENQKTMEVLKEREQALQDQLQHAKDSVSTMQKLHELAQNQLFELCAQSEEERASKQSEVNLLMDEVERAQSMLLSLEREKGVLRNQLQTANEETETKNSDNFDLNSALENSLNAKKKQISDLNMELHNIETALSNER

SEQ ID NO: 212695 - protein, 205 aa, Glycine max
  unsure (1)..(205): unsure at all Xaa locations
  Clone ID: PAT_MRT3847_3408C.1.pep
QLLKETEKYLQKLGSKLQEAKTAAGRFGQDVDETGNVSFLENSETENVDESDQAKHYMESNEKYYKMAHSIKESIAEQPSSLLGGKLREYQMNGLRWLVSLYNNHLNGILADEMGLGKTVQVISLICYLMEAKNDRGPFLVVVPSSVLPGWDSEINFWAPXVHKXVYAGPPEERRRLFKERIVHQKFNVLLTTYEYLMNKHDRPK

SEQ ID NO: 212696 - protein, 55 aa, Glycine max
  Clone ID: PAT_MRT3847_34090C.1.pep
KVPINFWPLSLTWVPGHPVPVWLPPWGNSLFLEKLGVKALVNQPFRPFQTNFNQP

SEQ ID NO: 212697 - protein, 91 aa, Glycine max
  Clone ID: PAT_MRT3847_34091C.1.pep
KGGFPRFFQWPKSRGTGAPKKVWRDPPFKRGAPFGFGVPFQFPQKLFKKGGFFFPLGKKGPFFWGRSLNRVKNPALPWLRFPQGKPEKVWA

SEQ ID NO: 212698 - protein, 79 aa, Glycine max
  Clone ID: PAT_MRT3847_34092C.1.pep
FIEYVAKTLNRGSYSWSLGLRAFYLSFPLVLWIYGPIPMFACCCFTSFILYFLDTTTQIARDLHTKSFTMRETGGTQAA

SEQ ID NO: 212699 - protein, 203 aa, Glycine max
  Clone ID: PAT_MRT3847_34093C.1.pep
MSMKLYASLTLTVWLFMATFSRAQYVIDTNGEPVDNDDEYYIRPAITDNGGRFTLINRNGSCPLYVGLENTDTPLGYPVKFTHFALNVQDEDIRVNSDLRIEFVEVSTTCVQSTEWRVGENDTRSGRRLIITGLDDNFGSIGNYFRIVETQSVGIYNIEWCPMEICSDCGFVCSTGGILREDGRIFFALDGTPLPVVFQKKDD

SEQ ID NO: 212700 - protein, 64 aa, Glycine max
  unsure (1)..(64): unsure at all Xaa locations
  Clone ID: PAT_MRT3847_34094C.1.pep
PGNDPRVFFCHSPRVGGGGDKAIRNSLTGQLLXRRSSGAGARVMPSSASWGRSIEPAPKDPILG

SEQ ID NO: 212701 - protein, 52 aa, Glycine max
  Clone ID: PAT_MRT3847_34095C.1.pep
GSRYSFSFVIKGFYISMAVLGIHLKQSCGAISQGIFEALPAVWTSTYVVISS

SEQ ID NO: 212702 - protein, 215 aa, Glycine max
  unsure (1)..(215): unsure at all Xaa locations
  Clone ID: PAT_MRT3847_34096C.1.pep
GRPPTRPPTRPYGCEKTTEGEYDYIFLWDEDLGVEHFHPDKYVSIIKREGLEISQPALDXKKSEVHHQITARGRRSSVHRRTYKASNDGKGCDKSSTAPPCTGWIEMMAPVFSRAAWRCVWYMIQNDLIHAWGLDIQLGYCAQGDRTKNVGVVDAEYIVHYNRPTLGGIDNTMVSSQEKDHRVDVRRLSYQELDVFRKRWEKAVEEDKCWVDPFQ

SEQ ID NO: 212703 - protein, 132 aa, Glycine max
  unsure (1)..(132): unsure at all Xaa locations
  Clone ID: PAT_MRT3847_34097C.1.pep
MDSTNIDGYISMSALIGXIPPDVILEGPTLVKHGLNEAIVKGGWDKVEAELLGGGRWDERDIFFFTKRGEREXHIIYALENGVERCILGLDMEGEDCGRKSGERSAIGTASEIEGVALYMESKDGGEEDKRR

SEQ ID NO: 212704 - protein, 147 aa, Glycine max
  unsure (1)..(147): unsure at all Xaa locations
  Clone ID: PAT_MRT3847_34098C.1.pep
VPELEIYXDLLGLLILTDQRRYDXAKAWSSSSIGQLKSLNIRTASGVASTLYFYHSYTYELTGNLAKIQGYXLLAWHRIATLRHDELGQETLLNLXLYNYLPYNLYDQAEKMRPMAPSCEAHSNQQFXRYVFSSGKILSIHLEHTDA

SEQ ID NO: 212705 - protein, 96 aa, Glycine max
  Clone ID: PAT_MRT3847_34099C.1.pep
MEASAGLVAGSHNRNELVVIHGHEEHKPLKNLDGQVCEICGDDVGLTVDGDLFVACNECGFPACRPCYEYERREGRQVCPQCKTRYKRLKGSPRVE

SEQ ID NO: 212706 - protein, 119 aa, Glycine max
  Clone ID: PAT_MRT3847_3409C.1.pep
MGFHCEEKDSIHLQPCAACRMLRRRCDSKCVLASYFPTNEVDKFAGVHRVFGASNVIKMIQMVEETKRGDAVKAMVHEATARLRDPVYGSAGAIYQLQKMIEELKAQLESIKTPVSEQK

SEQ ID NO: 212707 - protein, 49 aa, Glycine max
  Clone ID: PAT_MRT3847_340C.1.pep
VVRNSSCKEFKAAFFMNLSKTAPACGEKPRNIVVSTAEFPDAMGDVAVH

SEQ ID NO: 212708 - protein, 70 aa, Glycine max
  unsure (1)..(70): unsure at all Xaa locations
  Clone ID: PAT_MRT3847_34100C.1.pep
MSSENNMVVLKVCLLLLFLAGVTAARMELIFFNSDHASSYYDDXFSHPSLDLCLCTLSMLSYFYLPLYYS

SEQ ID NO: 212709 - protein, 188 aa, Glycine max
  Clone ID: PAT_MRT3847_34101C.1.pep
FPQMGARVPVQHYNLNSPSSFIESPLHVLNAVDARTAASAIDNPNDDSASAVDCMNESHRSCLPLHSVEVDEDRASLDTNESSRTTSYDILTAEDISPIESARARFLQIIVDHFIDDRVIEVPDSEADYTGQDKMSKRRTREIQYEGDPNFTLPLMYVANMYESLVSDVNNRLACLDGIREKTIGVDP

SEQ ID NO: 212710 - protein, 86 aa, Glycine max
  Clone ID: PAT_MRT3847_34102C.1.pep
CHTWGRRLRGWFILSPYILASCCTKTTEPVGESKTRTSKCTTTIENLTCYTQNWSQHTDAWKFNGVRCTKLQSIRNQQLVGLTYTE

SEQ ID NO: 212711 - protein, 57 aa, Glycine max
  unsure (1)..(57): unsure at all Xaa locations
  Clone ID: PAT_MRT3847_34103C.1.pep
SLLHHTISVITNDVRNIVAVLXGFDQATNNNLDKTHEHVYSTNECVQQLALGLDIIL

SEQ ID NO: 212712 - protein, 56 aa, Glycine max
  Clone ID: PAT_MRT3847_34104C.1.pep
VLYFLGFCANTKSTYIPLIYIPYINTPINFHSSTHNNFSLNLPPYLSYLIHYSYIP

SEQ ID NO: 212713 - protein, 44 aa, Glycine max
  Clone ID: PAT_MRT3847_34105C.1.pep
SLMSQLTHLTHINLTALIAHFKPVKPAAPIKLTNRPKSRYTHFA

SEQ ID NO: 212714 - protein, 260 aa, Glycine max
  Clone ID: PAT_MRT3847_34106C.1.pep
MAAVVSASSHLLFVLRSQPLSSSPSFISLLKPLLVSSPYAVSTPLRHIQVPPLRKPLFSTSSSPSLTVSQDSEELEEKEIADDDDELETPRRDFEDTQLGPTCSPLERKRKESVKLEVPSLSVKERKELASYAHSLGDKLKTQLVGKSGVTPNLATSFIETLEANELLKIKIHRTCPGELDDVVKQLEEATGSVAVGQIGRTLIIYRPSLSKMKAEEKKKQARNLILKKQVKQRLVNKSKEQVPKLSWPGSSWSGKKRRA

SEQ ID NO: 212715 - protein, 69 aa, Glycine max
  Clone ID: PAT_MRT3847_34107C.1.pep
GNPVVIYAAAPHIDLTQIQIQPLAFQVFLSLPHRISFQKKKKGGRGLVDVMLVGTYFGWVRAATTPTPM

SEQ ID NO: 212716 - protein, 115 aa, Glycine max
  Clone ID: PAT_MRT3847_34108C.1.pep
IYRGVRTRDCVKRVADIQRPKNQTRVWMGTLNTDYEATLAYYKGAHKLGGDYARLNSTKLRHHCCDTGGDLREYNPVHSVPDAKLNAMSEGLSLLQIQVTTGNPPKKTRSKLNSA

SEQ ID NO: 212717 - protein, 78 aa, Glycine max
  Clone ID: PAT_MRT3847_34109C.1.pep
IGDPSNGLPKRAFLPYWLERQSLQHQFLRIRLHFYATNHKKPAFIREKNKCGDNTQHHFFFLVIWYHPGKPGTIGPKE

SEQ ID NO: 212718 - protein, 94 aa, Glycine max
  Clone ID: PAT_MRT3847_3410C.1.pep
TCSTLVRYINSMLEPTITYFCRHIVQEINAPADALANYGMSLDNGNLRIFQVQGILILCNRSQLQPHQPYLSARFFWLPTRRRQFKSMGFSIVS

SEQ ID NO: 212719 - protein, 62 aa, Glycine max
  Clone ID: PAT_MRT3847_34110C.1.pep
GVRGVLQKQIELFQLLHNFLIIGLNFSTQIELLPPPKKSQGNYPIFSLNKAVFFGAAFPILR

SEQ ID NO: 212720 - protein, 120 aa, Glycine max
  unsure (1)..(120): unsure at all Xaa locations
  Clone ID: PAT_MRT3847_34111C.1.pep
MPSHIINRRSFDRTNMEQKPPRMKLISKLPGSEVETIKKNSHMLVLPTTSQNSLMSPTSQTITRNNSNGRLNCLCSPTTHAGSFRCRHHRSSGFRRGKSVGSNLAELGSKAXSISDSLHA

SEQ ID NO: 212721 - protein, 66 aa, Glycine max
  Clone ID: PAT_MRT3847_34112C.1.pep
TRFGQRIARVFKLRLNSGYLFSSIPGMISFYGSRIRAKFKVKHTKPWIFYKKGQASSYKLQPLRNS

SEQ ID NO: 212722 - protein, 98 aa, Glycine max
  unsure (1)..(98): unsure at all Xaa locations
  Clone ID: PAT_MRT3847_34113C.1.pep
GEEEAYEEGEEEAPKDEGEIEGVGLVPQQLLVLGLVYFSYGFGSKCDDTFLLGSLGFGLPQKRWSYRKLMRFNIGIGXKKRGRKKKNLFXNKKRRRIK

SEQ ID NO: 212723 - protein, 192 aa, Glycine max
  Clone ID: PAT_MRT3847_34114C.1.pep
MDLSEEVRAAHKREFSDFLDQDVGKGIYMDEIKTLINHKRHRLIVNISDLHNFRDLGNRILRSPSEYMQPFCDAVTEATRAIDPKYLKEGEQVLVGFEGPFVSRRVTPRDLLSQFIGSMVCVEGIVTKCSLVRPKVVKSVHFCPTTGSFTSREYRDITSNLGLPTGSVYPTRDENGNLLVTEFGLCKYKDHQ

SEQ ID NO: 212724 - protein, 81 aa, Glycine max
  Clone ID: PAT_MRT3847_34115C.1.pep
SSPCRLVACLGVCTGNRHRIGRRLCGRCSKWRFILCLRRLHRISHQCCNQIWFPGGECSLALSIDSSSRLRRCCCTGGIYG

SEQ ID NO: 212725 - protein, 122 aa, Glycine max
  unsure (1)..(122): unsure at all Xaa locations
  Clone ID: PAT_MRT3847_34116C.1.pep
GTGRTPLLTTNIQKGEYPLHLVPSVSVVXMXRSSLRPPHRQXPXNXXEVERLRXPSITVKGXXIQDKXXXIPPDPATSHFFAGKQXRGPAAPFRRLQXSRRNXXPSPRPLRLRGWHCXXSSL

SEQ ID NO: 212726 - protein, 241 aa, Glycine max
  unsure (1)..(241): unsure at all Xaa locations
  Clone ID: PAT_MRT3847_34117C.1.pep
QAFADRQSSTVAAFQSLTSEPPSQTSLLIDQLVLLFPEMTRDEIAKIKLTLVTDKPYDARNEGHLETRTPLLTELILAGEPEEDPFFVAQQWVNTRLFGEKKYAFTHPTISQETFEERIKKLPRIKPLVAPAVDQYLADSRRAQETVIKLMIANAPLDVRTGLESGDVEIFTLREETGESLAQDQGSDSKVVEKRAKQGVLLRYKNKGPEGGYTCLEMXPXSMKVCKRNLLFSTLKXDXVI

SEQ ID NO: 212727 - protein, 86 aa, Glycine max
  unsure (1)..(86): unsure at all Xaa locations
  Clone ID: PAT_MRT3847_34118C.1.pep
MSSEETYSVFFFWRRGLTLALGEAPSELNPLFGVFSEYVYMTPAYLKVFLVGVQRQERATGGDAHHIIEIFSYLSRRGGXXTLDFS

SEQ ID NO: 212728 - protein, 106 aa, Glycine max
  Clone ID: PAT_MRT3847_34119C.1.pep
LSIFRKTSEDDNRRLHACLYLTFIQRNNQSSVFVQFYSTVMAPPPIMQNVRFSIWQTLLSALECRSCEQAKRERTFISNEAKYKSAKDIHERKRYQASIHIINIAI

SEQ ID NO: 212729 - protein, 85 aa, Glycine max
  Clone ID: PAT_MRT3847_3411C.1.pep
KSFNLFFEKTHLFKLFVKGTMSLYICVRLTSKRRAFSGNLIVKMSLNNYGQTLANLLRIFLGSSICIIYSKGEKSFCTSYKTRLV

SEQ ID NO: 212730 - protein, 83 aa, Glycine max
  Clone ID: PAT_MRT3847_34120C.1.pep
NFVTFSRFGHSQTRNLDIIEYLERKRVNNDLAPESVETVFRAFCFAPSSGKSNLSTNFFMFLFYPSMFFRGMLLCVQIKGREM

SEQ ID NO: 212731 - protein, 76 aa, Glycine max
  Clone ID: PAT_MRT3847_34121C.1.pep
KKEEEKKEEPKKEEEKKEEPKFGARKKEEEKKKEAPPPPPDPVLELVKAYRAYNPHMTTYYYVQSMEENPNACVVC

SEQ ID NO: 212732 - protein, 176 aa, Glycine max
  Clone ID: PAT_MRT3847_34122C.1.pep
MKKFVLKLDLPDDKAKQKALKTVSTLSGIDAISMDMKEKKLTVIGTVDPVNVVSKLRKYWQTDILSVGPAKEPEKKEEPKKEEPKKEEEKKEEPKKEGEAKKEEEKKEEPKKEEEKKEETKKEEEKKEEEKKKEAPPPPPDPVLELVKAYRAYNPHMTTYYYVQSMEENPNACVIC

SEQ ID NO: 212733 - protein, 146 aa, Glycine max
  unsure (1)..(146): unsure at all Xaa locations
  Clone ID: PAT_MRT3847_34123C.1.pep
RIIPSIFGGQPLLIGRGVNPLLLFSTTWSTFAKIRNXLGQEPFLTLARMGWGLTGFLXLFLLEIFNAGKIINRFTRIAGEIFGMLITVLFIQEAIKGMVGEFSVPEEGDPTLEKYKFHWLYANGLLGIIFTFGLSTLFXKQKSKSW

SEQ ID NO: 212734 - protein, 74 aa, Glycine max
  Clone ID: PAT_MRT3847_34124C.1.pep
FFFLQTNIFHFILQHFFYYLQLFGCLLHRVQLLSYATLIVMQELALPPSSLYAATRTITHHLAGHQGTRYAEFV

SEQ ID NO: 212735 - protein, 53 aa, Glycine max
  Clone ID: PAT_MRT3847_34125C.1.pep
VGESLKNGTSIVKPRLIIQCTKTYLSLDAVNVNSGSNPSFCMDERAPPIFNSN

SEQ ID NO: 212736 - protein, 53 aa, Glycine max
  Clone ID: PAT_MRT3847_34126C.1.pep
SEINNFFHNSQFQKKNASMILRDAREKSKSVANDNISYKELAFCSNSLEGEET

SEQ ID NO: 212737 - protein, 89 aa, Glycine max
  Clone ID: PAT_MRT3847_34127C.1.pep
PPPPFETGWGFSLASPEARKPQKALKKKGGDQPLMAPKGPHALNREPREMGAPGPGINPRSQKGCPPPPPRSYQKKGWGGPPPLYPRGV

SEQ ID NO: 212738 - protein, 74 aa, Glycine max
  Clone ID: PAT_MRT3847_34128C.1.pep
IAVCADDPEYRHYNDIKDLPPHRLAEIRRFFEDSKKNENKEVAVNDFLPASAAYEAIKHSMTLYAEYVVENLRR

SEQ ID NO: 212739 - protein, 216 aa, Glycine max
  Clone ID: PAT_MRT3847_34129C.1.pep
MAPPIETPNKVSSYQQSPNPRLNERILSSISRGHVAAHPWHDLEIGPEAPKIFNCVVEIGKGSKVKYELDKRTGLIMVDRILYSSVVYPHNYGFIPRTICEDGDPMDVLVIMQEPVLPGCFLRAKAIGLMPMIDQGEKDDKIIAVCADDPEYRHYNDIKELPPHRLAEIRRFFEDYKKNENKEVAVNDFLPASAAYEAIKHSMTLYAEYVVENLRR

SEQ ID NO: 212740 - protein, 45 aa, Glycine max
  Clone ID: PAT_MRT3847_3412C.1.pep
LAESLHVIGEKRLMRPCCEPHTPCASHDSRVALDSTSLQMSTSHI

SEQ ID NO: 212741 - protein, 37 aa, Glycine max
  Clone ID: PAT_MRT3847_34130C.1.pep
HESGPVHCVTVAPGELKPAFGINFDVLVGPHPLTIVS

SEQ ID NO: 212742 - protein, 110 aa, Glycine max
  unsure (1)..(110): unsure at all Xaa locations
  Clone ID: PAT_MRT3847_34131C.1.pep
GYVISHVCVRTGGPKRPALKCIVNGMPSYHGLXNSYLNTLIGMVPXEQAGMYLGGLKCLISYWDNEDISHKYFEVMMLDDAHSAVINDPPINWICNPDHIHTELRGLTSA

SEQ ID NO: 212743 - protein, 79 aa, Glycine max
  unsure (1)..(79): unsure at all Xaa locations
  Clone ID: PAT_MRT3847_34132C.1.pep
MRVSTGPTLGILRAILYLHTGRCGTLLASPXLELFCDAHRIDTAGTSPTKSDVQLERTDLYYNKRSWGRITRLTELIKL

SEQ ID NO: 212744 - protein, 61 aa, Glycine max
  unsure (1)..(61): unsure at all Xaa locations
  Clone ID: PAT_MRT3847_34133C.1.pep
RVPQTQNCKAAPKKLTPXLVXHXFXLTPHNQEKRXSCTTSIISSETTIYGDKKSLVLDNIT

SEQ ID NO: 212745 - protein, 32 aa, Glycine max
  Clone ID: PAT_MRT3847_34134C.1.pep
QGNLRASFIIVSRFATFRQININSHALYFRDA

SEQ ID NO: 212746 - protein, 39 aa, Glycine max
  unsure (1)..(39): unsure at all Xaa locations
  Clone ID: PAT_MRT3847_34135C.1.pep
XGVPFFFFFVREVNSLYLSFFDKKNIQECVSKSLALATL

SEQ ID NO: 212747 - protein, 56 aa, Glycine max
  Clone ID: PAT_MRT3847_34136C.1.pep
ASQLTEMEIDECEETTMHDVNNIEEEMRRKAQAAQEAYDEDDEMPGGAQRVQCAQQ

SEQ ID NO: 212748 - protein, 38 aa, Glycine max
  Clone ID: PAT_MRT3847_34137C.1.pep
IITSKSGFGFKGGRSCKKEEQVFKVRERRCSFHLFIFF

SEQ ID NO: 212749 - protein, 56 aa, Glycine max
  Clone ID: PAT_MRT3847_34138C.1.pep
PRELHIYTSKGNGLASALTHKGVYMRDQPLITGTHKPMEQRYLLPCSGACTLLNGW

SEQ ID NO: 212750 - protein, 97 aa, Glycine max
  unsure (1)..(97): unsure at all Xaa locations
  Clone ID: PAT_MRT3847_34139C.1.pep
YFLFAYAILRSIPNKLGGVLALLISILILFLLPLIRKTKIKQGTQFKVFGQIIFXNFCKNFLFINXIGGEPVEDPFVLIGQILTVLYFFVLMNLPTI

SEQ ID NO: 212751 - protein, 88 aa, Glycine max
  Clone ID: PAT_MRT3847_3413C.1.pep
TVHSCYFVNRYLRRAVSCIQFLSSFVCYERLALTQGMNIGEPKCSSETCMVVGYTAEKCYIISSKDCISICLFRLKCSASIGWEEISF

SEQ ID NO: 212752 - protein, 86 aa, Glycine max
  unsure (1)..(86): unsure at all Xaa locations
  Clone ID: PAT_MRT3847_34140C.1.pep
CRLNAEPYHCQYTSHSPNASTAAYVHLNSVYYYYHQTNXTQFFHSNSLFQHPLLCIDPHLVILSASKYYTNSNPQVRTIYRHIHMY

SEQ ID NO: 212753 - protein, 409 aa, Glycine max
  Clone ID: PAT_MRT3847_34141C.1.pep
WHGLLSIHMPAYSDSIIKGVSTVMVSYSSWNGVRMHANRDLVTGFLKNTLKFKGFVISDWQGIDRLTSPPSSNYTYSVQASIEAGVDMVMVPFEYGKFIQDLTLLVKSNIIPMERIDDAVERILLVKFTMGLFENPLADTSLVNELGSQEHRDLAREAVRKSLVLLKNGKNESASLLPLPKKVPKILVAGSHADNLGYQCGGWTIKWQGFSGNSDTRGTTILNAIKSAVDTSTEVVFRDNPDNEFVKSNNFEYAIVVVGEPPYAETAGDSTTLTMMESGPNVINNVCGTVKCVVVIISGRPIVIEPYISSIDALVAAWLPGTEGQGMTDVLFGDYGFTGKLARTWFKSVDQLPMNVGDPHYDPLFPFGFGLTTESVKDLVARSTSAAVGARACIFTIIVTLIISLYLPG

SEQ ID NO: 212754 - protein, 91 aa, Glycine max
  unsure (1)..(91): unsure at all Xaa locations
  Clone ID: PAT_MRT3847_34142C.1.pep
NPNKVKFRQIRISYQSFQTIVGTLTADFEFLINCGFDNIERGEXLLLPRVRINMTGINSRGSFIXSAMTSPMFGLLWMRVLLQSKDKKIKV

SEQ ID NO: 212755 - protein, 42 aa, Glycine max
  Clone ID: PAT_MRT3847_34143C.1.pep
PHHAPSIIRGLLESLHSRWAPQRVTSKSHRWRLQYSHLSPFF

SEQ ID NO: 212756 - protein, 268 aa, Glycine max
  unsure (1)..(268): unsure at all Xaa locations
  Clone ID: PAT_MRT3847_34144C.1.pep
MSRGAKKKKARGGQENPNPLGLFVSEASLESGNTALIDSKAVCGFRHRRDAAAVWNWKTVAVVAPSQHALETEMGSCATSSVLTNQFIPWSTTNTESPLDSKLGVIFYKMYRNTNKRQLSLSFAWDSYKIRSIGAIKSYKDVSYFQTEQVGSWEDPDTGSDSECDDEEYEEVEDENFGFESDSEEEGMKASVATDVNITSGDNYEELIKKEIEQLLEPEERAILQQNITPNLEKISTEKWSPLHTLVLSMQMSCVDKLLXNGVDIDLP

SEQ ID NO: 212757 - protein, 118 aa, Glycine max
  unsure (1)..(118): unsure at all Xaa locations
  Clone ID: PAT_MRT3847_34145C.1.pep
NPGPSGSRLLGPIPQSIPQHTVWNQMATARTPLHFDSSTASFSHCPIXLSSGGILLDKTGDRITLIQNXSPVRIIARAAGRQKGXLMAQTAPPGTATDSWSDWAXLAQGFLTISHSTQ

SEQ ID NO: 212758 - protein, 257 aa, Glycine max
  unsure (1)..(257): unsure at all Xaa locations
  Clone ID: PAT_MRT3847_34146C.1.pep
MSVQVVSAAAAAKVPEVELKDLSPSEAEPQLGLSAAAVGAMVPPAGGGDPEAPAPAPAAERPPAPGPGSGPTAALSPAAGKVPQASAMKRSDPHHQHQRHRDGGEALVSPDGTVTEAPRTVKKIQFADQKQEFNKRPTKIGRRSLSRSISQSSTDSYSSAASYTDSSDDETSPRDKQQKNSKGSSDFCVKNIKQAEFGRREIEIAEQEMPALMAXRKRAQGEKPLAGAKIVGCTHITAQTAVLMETLGALGAQCRWA

SEQ ID NO: 212759 - protein, 52 aa, Glycine max
  Clone ID: PAT_MRT3847_34147C.1.pep
RGPCGPFFMHALVWFPSVLVYVPPGQISCSMRSKLCKSVKKKKNRKKKKKKR

SEQ ID NO: 212760 - protein, 94 aa, Glycine max
  Clone ID: PAT_MRT3847_34148C.1.pep
SPAGAKHLIQLVYFGGKEMVQIPALVLLSYIAMHVPDSEELAQAEVLGVIEWASKQSSIANDQAIEALLLESKTKLDLYQSRGPRGFHKLHLHQ

SEQ ID NO: 212761 - protein, 133 aa, Glycine max
  Clone ID: PAT_MRT3847_34149C.1.pep
MAAPHKVYDAIIIGGGPAGLSAALGLSRICRSSILFDSGEYRNQGSTAMHTYLTRDGIEPGDFRSTGRREIERKYSAYATFVNNKIVSVKNTDILPDYKGFEAVDSSNTTYRRKLVLAPEPRMFYHQTLDIKR

SEQ ID NO: 212762 - protein, 53 aa, Glycine max
  Clone ID: PAT_MRT3847_3414C.1.pep
KKIGHSQEYCLNLNLEWDRSKIGVPPECFVFYIYKKISFFSKAFIILFVFYFI

SEQ ID NO: 212763 - protein, 47 aa, Glycine max
  unsure (1)..(47): unsure at all Xaa locations
  Clone ID: PAT_MRT3847_34150C.1.pep
PLPLSPAKHAPPXRFQXQMLLPHSLLLPLSSSFYFIVPWFRLKSASQ

SEQ ID NO: 212764 - protein, 94 aa, Glycine max
  Clone ID: PAT_MRT3847_34151C.1.pep
KKKRTLGPLFNVWGGVRLKPHPKGKNPPLFWGGPELDGAKKKGGGPTGIRGKKRGKTGEKNIILLGGFSFKTLTWKREFPKKKRGVKKKFWFPL

SEQ ID NO: 212765 - protein, 73 aa, Glycine max
  Clone ID: PAT_MRT3847_34152C.1.pep
MASARPYSNGLAEAIDDGKIGPRDDPNVRLKILYEEFAWDKVLALKNWWFGPETLGPIMVVDLSLGVQDLLEF

SEQ ID NO: 212766 - protein, 63 aa, Glycine max
  unsure (1)..(63): unsure at all Xaa locations
  Clone ID: PAT_MRT3847_34153C.1.pep
KTKESYMVEKRGMRWFYTGDIGRXNPDGCLEIIDSKKDIVKLQHGPYVSLGKLWILLLFFFRI

SEQ ID NO: 212767 - protein, 110 aa, Glycine max
  Clone ID: PAT_MRT3847_34154C.1.pep
FFFFFFFSFFFFFFFFLAQKKAQGPFFTSHRTGSPHFFIKQKPPGVPILNKINPKQMGVINFGPNLLSQFDCWGVLTQIFGTKKGPIWGQKRTKLWGIYALPMTYFHIGN

SEQ ID NO: 212768 - protein, 154 aa, Glycine max
  Clone ID: PAT_MRT3847_34155C.1.pep
MRSSNSHIQFQMFFSMQLLCFYKHPPPLFVHNINEGIFKYKRFFTNPSSSSRGIVHAVKEDSQSQQYEVDPDKAREALKKLDEQIQSLSNKKQVSTPKLRVSDMKLPTEQASRNDEKLEISDSFLTTLAAGLVLFTVFYNVLFYAVIKPAIDGS

SEQ ID NO: 212769 - protein, 533 aa, Glycine max
  unsure (1)..(533): unsure at all Xaa locations
  Clone ID: PAT_MRT3847_34156C.1.pep
MWDLNXSPDQRINKDEESEEGCSSLKITSFDGDDENNNNKGKRVGXVSNSSSSAVVIGDGSEEEYEEEEEDEEGVGVGGGRSMKKRSSKIFGFSVTQNEEESMDSDHPPVTRQFFPVEDADVAVATGGGGTGVSSTFPRAHWVGVKFCQSETLGTGKSSVEVSQPMKKSRRGPRSRSSQYRGVTFYRRTGRWESHIWDCGKQVCLGGFDTAHAAARAYDRAAIKFRGVEADINFNIEDYEDDLKQMSNLTKEEFVHVLRRQSTGFPRGSSKYRGVTLHKCGRWEARMGQFLGKKYVYLGLFDTEIEAARAYDKAAIKCNGKEAVTNFDPSIYNNELNTESTGNAPDHNLDLSLGNATSKPGNNQALGNHATNAVTHDQHLPSESNWRNGGNKPKLVNILPKPCNRSNNKDSHGRDVHGESETLRMLSQTHLHSPAFNEMQQRYGPYRSPGGESQMLQNFAHIHPPNFHFPRSSIGGRIGSDLSLSVADQQQWQTGPSRYLATAAASSSFQQEIRPSSQGWLQKNGLHSLMRPS

SEQ ID NO: 212770 - protein, 186 aa, Glycine max
  Clone ID: PAT_MRT3847_34157C.1.pep
LEPNRLEQNHPQEAFADDNARRSIVFPPSPNAGGSMMRTTSQLTYPDANLSKEALTAISVVQSLNPASTIAHISGIGVKAIPAISHLSNLRSVNLSNNFIVHISPGVLPKGIQTLNLSKNKISALEGLRELTKLRVLDLSYNRISRIGQGVSRCTLIKELYLVGNKLSDVEGLHRLLKLTVLELSF

SEQ ID NO: 212771 - protein, 74 aa, Glycine max
  Clone ID: PAT_MRT3847_34158C.1.pep
APYPPLLISGYGSVDLNQGGGGQSSSSRTRYRQVQARRRRRHRGISLPYRPHDRPCIASSRLARRPQVRHLDPK

SEQ ID NO: 212772 - protein, 48 aa, Glycine max
  Clone ID: PAT_MRT3847_34159C.1.pep
CVYIRKKKKKKKKKKKKKKKKKKKEKKKKTKKKKKKKKKTGAAQKDQT

SEQ ID NO: 212773 - protein, 60 aa, Glycine max
  Clone ID: PAT_MRT3847_3415C.1.pep
KQLLNERRRLLKHQKNLSILRMLEHNQSISSKSINTLVSLLVRMLEHHQPTSIDHTSDRI

SEQ ID NO: 212774 - protein, 59 aa, Glycine max
  Clone ID: PAT_MRT3847_34160C.1.pep
ARVDLAKGKRPDENIRDFQELIRQNYKQHPPWIMTSSVTGMGRDELLLHMSHLRNYWDQ

SEQ ID NO: 212775 - protein, 108 aa, Glycine max
  unsure (1)..(108): unsure at all Xaa locations
  Clone ID: PAT_MRT3847_34161C.1.pep
LGRVRLEEGLSRKLHNSGGCEGKDRVERCXVFGKWGGGFSMAGFXFKPLSQRMAESIKLGLPPANNRVNLGLAVKKKNGGVFFGWMGKTLPVGFGWGLPGPPFFPFFF

SEQ ID NO: 212776 - protein, 90 aa, Glycine max
  Clone ID: PAT_MRT3847_34162C.1.pep
GSQFYKDFFYPRHSLSIPGIKNIYGKTLNIKQKLFCLTSPISRYKFFTSPTNPTKGKCFNYNQKPKKKKLLQYASNRDEAQKKLFFLKGG

SEQ ID NO: 212777 - protein, 61 aa, Glycine max
  Clone ID: PAT_MRT3847_34163C.1.pep
MGRGKIAIRRIDNSTSRQVTFSKRRNGLLKKARELSILCDAEVGLMVFSSTGKLYDYASTR

SEQ ID NO: 212778 - protein, 77 aa, Glycine max
  Clone ID: PAT_MRT3847_34164C.1.pep
TAEPLQQEAAEFAAAPQPYPINFRPCFRNCSEEWGSVRSGFRTRNPSIRTAPTPRKRRSARRRRSGTSRRSSSSLPN

SEQ ID NO: 212779 - protein, 297 aa, Glycine max
  Clone ID: PAT_MRT3847_34165C.1.pep
SRLDPASGCEKTTEGGSYINKSLLTLGTVISKLTEGRASHIPYRDSKLTRLLQSSLSGHGRISLICTVTPSSSNAEETHNTLKFAHRTKHIEIQAAQNTIIDEKSLIKKYQHEIQCLKEELEQMKRGIVSVQPKETGEVDFVLLKQKLEDGQVKLQSRLEEEEEAKAALLGRIQRLTKLILVSTKAPHTTRFSNRPGPRRRHSFGEEELAYLPYKRRDLISDDENPDMHVNLEGNTETADDSFKEEKKTKKHGLLNWLKIRKRDTGLSALSGTSDKSCGAKSVSTPSTPQAETVNNL

SEQ ID NO: 212780 - protein, 190 aa, Glycine max
  Clone ID: PAT_MRT3847_34166C.1.pep
GHAGTRKTLARLSKNFIWQGLREDVARCVANCLDCQLTKYEAKKFAGLLCPLPVPQRPWEDLSMDFIVGLPPYHGHTTIFVVVNRFSKGIHLGTLPTSHTAHMVASLFLNIVIKLHGFPRSIVSDRDPLFISHFWQDLFRLSGTVLRMSSAYHPQTDGQTEVLNRVIEQYLRAFVHGRPRNLGRFIPWVE

SEQ ID NO: 212781 - protein, 108 aa, Glycine max
  Clone ID: PAT_MRT3847_34167C.1.pep
SNVLKDVLLDFSCYRSPPLSISIFIVPLSFQIIFKDFSMKLRLKSGTFTTTKVILTTLNPRQYFQNCHRPKLGSIFCKLLNHFNDNFIKIILKIKCFMTIPSVVFSQP

SEQ ID NO: 212782 - protein, 79 aa, Glycine max
  unsure (1)..(79): unsure at all Xaa locations
  Clone ID: PAT_MRT3847_34168C.1.pep
VKIKAMSPNKRLLLVAFLLLCFITMTASARSLRDIKDDAVKKSTQTSFFKPNHEGVQDSNDELDTMDYTPAKRNPPIHX

SEQ ID NO: 212783 - protein, 56 aa, Glycine max
  Clone ID: PAT_MRT3847_34169C.1.pep
LSRTSLSQWIILVPYGCAYNDRHDPGSIVRIFWGPIPIILFNKTLIKNSKNFWFSH

SEQ ID NO: 212784 - protein, 51 aa, Glycine max
  Clone ID: PAT_MRT3847_3416C.1.pep
TAREDDRRALPQSHTPLLISSSVKMSTSKLFSCCPINKFNFYFPGEIHLPL

SEQ ID NO: 212785 - protein, 55 aa, Glycine max
  Clone ID: PAT_MRT3847_34170C.1.pep
HLYFIQNLHLFFLFKKSVYLKVVAGLASKLFLKSALERVSKMIPVPPPLPIFLPH

SEQ ID NO: 212786 - protein, 127 aa, Glycine max
  unsure (1)..(127): unsure at all Xaa locations
  Clone ID: PAT_MRT3847_34171C.1.pep
GAPRGAYQNALSGKFVPALETCARIKITDPNPKWDMETMPGARVMSDMVLLPNGDVLIVNGAAVXTAGWELGRNPLLSPFLYKPNNRVGSRFEVQTSSDIPRMYPSSAVLLRDGRVLVAGSNPHIYY

SEQ ID NO: 212787 - protein, 71 aa, Glycine max
  Clone ID: PAT_MRT3847_34172C.1.pep
IEKIFHFLALGNLGECLKIHNSILNESIKVQKSIKNREKSGAFYTFLEFSIFKMKKLLHKFWKNSFFEKKN

SEQ ID NO: 212788 - protein, 60 aa, Glycine max
  Clone ID: PAT_MRT3847_34173C.1.pep
ANAASGMAAHDDCKMRLMELKAKRTHRFIVLKIEEQQKQVIVEKLGEPAQGYEDLTVILS

SEQ ID NO: 212789 - protein, 94 aa, Glycine max
  unsure (1)..(94): unsure at all Xaa locations
  Clone ID: PAT_MRT3847_34174C.1.pep
FDALLEFLTVRKHLELYAXRIKGVPHLAIDSVVMGKLTSFDILKHANKPAFSLNGGNRRXLSVAIAMSGDPPIVNLDHPSTCMDHIAKRFMWEV

SEQ ID NO: 212790 - protein, 142 aa, Glycine max
  unsure (1)..(142): unsure at all Xaa locations
  Clone ID: PAT_MRT3847_34175C.1.pep
ARGDRGSEMVCILHRTHEVNGIRMHVATKGEGPLVLVLHGLPELWYSWRHQILSLISLGYRATNDALRGCCDTQGPPSIRSYSCFHIAGDHNALIDSLGVQQVFLVAHDWGAMTXGYLCMYRPDKVKAYVCLRVSFLRTDPN

SEQ ID NO: 212791 - protein, 83 aa, Glycine max
  Clone ID: PAT_MRT3847_34176C.1.pep
MFFHCVYLSFLGMVQAPVGRIFFTGEHTSERFSGYVHGAYLAGINSSKELLEEMRKDNKRKNKSQSRVLEPLSALTECNIPRQ

SEQ ID NO: 212792 - protein, 292 aa, Glycine max
  Clone ID: PAT_MRT3847_34177C.1.pep
MVSLRPCFLFILICIAIINHAHSNNDRKTYIVYMGDHPKGMDSTSIPSLHTSMAQKVLGSDFQPEAVLHSYKNFNAFVMKLTEEEAKRMAEMDNVISVFPNKKNRLHTTRSWDFVGLPQNVKRATTESDIIVGVLDTGVWPESESFSDKGFGPPPTKWKGSCHNFTCNNKIIGAKYFNLENHFTKDDIISPRDSQGHGSHCASTVAGNSVNSASLFGFGSGTARGGVPSARIAVYKVCWLTGCGDADNLAAFDEAISDGVDIISISTGASGIVHDPYFHDSNNIGSFHAMKR

SEQ ID NO: 212793 - protein, 54 aa, Glycine max
  Clone ID: PAT_MRT3847_34178C.1.pep
YFMVYTVDWVTFVAWDYGRCLSPKVSINSPISHQMFPFFIIKRVVNIFSAPLAP

SEQ ID NO: 212794 - protein, 72 aa, Glycine max
  unsure (1)..(72): unsure at all Xaa locations
  Clone ID: PAT_MRT3847_34179C.1.pep
SQSNKNEPDYFPPPPQGDAQSPELLAPIPMLPTPKVCLPPFLDXRSAFLAPFGEKAQAEFAQIGGDALQGLD

SEQ ID NO: 212795 - protein, 215 aa, Glycine max
  unsure (1)..(215): unsure at all Xaa locations
  Clone ID: PAT_MRT3847_3417C.1.pep
MVLPLFTAFILFAFIPNGLLAVPSTVPAFLWSSHYELASENILKESVNYQVISPKDLAKSILSEAGWSNFLCKGKKFHEPLDLALLFVGRELQSSDLSMNKHANSALLDLLKNSFARSNTSVAFPYVSTSEDVLLENSLVSGFAEACGDMGIGNVAFHGSCSIDDANHEEITTLHSVQDYLTKRMEESHRGKTDXLVVFCNEGSQALENVDRTQS

SEQ ID NO: 212796 - protein, 58 aa, Glycine max
  unsure (1)..(58): unsure at all Xaa locations
  Clone ID: PAT_MRT3847_34180C.1.pep
REKKLVQHNIVKHNRKCTAVTKRKESSFSLSKNSIHVICMQIKRRNKKXNTKKTGNAY

SEQ ID NO: 212797 - protein, 59 aa, Glycine max
  Clone ID: PAT_MRT3847_34181C.1.pep
LSPITDHRRHHNLHLPYFDAIPTYLTRVIPLFHYASAFCSAMKHLNKSTISLAANIPAS

SEQ ID NO: 212798 - protein, 353 aa, Glycine max
  unsure (1)..(353): unsure at all Xaa locations
  Clone ID: PAT_MRT3847_34182C.1.pep
MEWHRGHTIGQGSSATVSTATCCGGVLAVKSTELPQSEPLKREQKILSSLSSPYVVAYKGCDITMENNKLLFNLFMEYMPFGTLAQAXTRRCAGRLXESVIARYTRQIVQGLDYLHSKGLVHCDIKGANILIGEDGAKIGDLGCAKSAADSTGAIGGTPMFMAPEVARGEEQGCASDIWSLGCTVIEMVTGGAPWPNVEDPFSVLYHIAYSSEVPEIPCFLSKEAKDFLGKCLRRNPQERWKASELLKHPFIEKLCFNKEVLESNTSSPTSVLEQGYWSCVEESESLGDLIHKTRKFETLAAGRVRMLALSSGVPYWARHDDENWITARGNGVEGFANCGAETASSASHGLSH

SEQ ID NO: 212799 - protein, 55 aa, Glycine max
  Clone ID: PAT_MRT3847_34183C.1.pep
DRNHLIWTFVLCPITFTSIRVDYVKVYFLIRHPCHAIRGVVVYLWNYKFIQVLYL

SEQ ID NO: 212800 - protein, 71 aa, Glycine max
  Clone ID: PAT_MRT3847_34184C.1.pep
PREKKTLPFFITKIFPYPKGNPSNGFGPLYKPFKCLKNPFFARGIKAQNWDQKTKVQFWYNRGGRDLPRKV

SEQ ID NO: 212801 - protein, 46 aa, Glycine max
  Clone ID: PAT_MRT3847_34185C.1.pep
MVTSSIQSITINLTQQFFELKRAFVLCPFIFLSRSFCIHLKAIICI

SEQ ID NO: 212802 - protein, 56 aa, Glycine max
  Clone ID: PAT_MRT3847_34186C.1.pep
VGEGSGASVEPLASETAGSTAVVAILTQTHIIVANCGDSRRVLCRGKPALPLSDDH

SEQ ID NO: 212803 - protein, 148 aa, Glycine max
  Clone ID: PAT_MRT3847_34187C.1.pep
TTSSLANHTHNMGPKDNVADSDQLKFQIREKVIERARMVFRLNDLENYNLYRRNYGIARKMDILRHLHLALDNFSCANKPHKGRAIKSCTTEELDNKVQMKYSSYNHHCKQKNCDKLHKEIKRFEVTRKKSAQLKQGIRNHVKIMSDE

SEQ ID NO: 212804 - protein, 45 aa, Glycine max
  Clone ID: PAT_MRT3847_34188C.1.pep
SDRGDMAEALFHHPRGLILKDRGLGLRNPDTANSYGNMVLFYHGL

SEQ ID NO: 212805 - protein, 40 aa, Glycine max
  Clone ID: PAT_MRT3847_34189C.1.pep
FGVSDLLRQKYPKSSSLSQRKIAWTFAQALNFKEVQQKLL

SEQ ID NO: 212806 - protein, 318 aa, Glycine max
  Clone ID: PAT_MRT3847_3418C.1.pep
MVLPLFAAFILFFAFIPNGLLAVPSTVPAFLWSSHYELASENGLKESVNYQVISPKDLAKSVFSEAGWSNFLCKGKKLHEPLDLALLFVGRELQSSDLNMNKHADSALLDLLKISFARSNTSVAFPYVSTSEDVLLENSLISGFAEACGDMGIGNVAFHGSCSMDGANHEEITTLHSVQDYLIKRMEESHRGKTDLVVFCNEGSQAVKNVDKTQSEGEVLSNLISSVEESGAKYAVLYVSDPSRSIQYPSYRDLQRFLAESTAGNESTNSTICDEVCQLKSSLLEGILVGIVLLIILISGLCCMMGIDTPTRFETPQE

SEQ ID NO: 212807 - protein, 104 aa, Glycine max
  Clone ID: PAT_MRT3847_34190C.1.pep
KSRISKACFPPPFGLFPPGGAPAPENPPAFSFFPFKPGVYSGAFDFSFSLLQAFSLFKGLVYGLFSYELFGSRTPLEGKNSRGPLLGPPNELKAFGKLKALPPR

SEQ ID NO: 212808 - protein, 103 aa, Glycine max
  Clone ID: PAT_MRT3847_34191C.1.pep
IFQGTDDCIFSFSFISGVSGTSLFNSVSLMAYNVFYTSVPVLVSVLDKDLSEETVMQHPQILFYCQAGRFVIMLLLALLFKCHKVFLFFCNWQFSASEQFFLS

SEQ ID NO: 212809 - protein, 57 aa, Glycine max
  Clone ID: PAT_MRT3847_34192C.1.pep
TGPDMPSFFVSVFSFLHIQVYMKFFTKWMFDNPCIWFFLVSTHRLILLPCNLVYLNQ

SEQ ID NO: 212810 - protein, 111 aa, Glycine max
  unsure (1)..(111): unsure at all Xaa locations
  Clone ID: PAT_MRT3847_34193C.1.pep
RHAHAFCFARADLPRTHSLKGMIEMVATVGIPENTGVGSPLCVLIEPFRGSASYDIHTICYQHCXYDILLCTKAPTMPSKANPGXCAWSLDLLQATGAHRDIIXAPGWTAT

SEQ ID NO: 212811 - protein, 59 aa, Glycine max
  Clone ID: PAT_MRT3847_34194C.1.pep
NSGQRVSQSRFACSSFLSGFDVVGHASSAWKKELVTSSISMVPRATLTFDPPTTTSEHT

SEQ ID NO: 212812 - protein, 184 aa, Glycine max
  Clone ID: PAT_MRT3847_34195C.1.pep
MALAVSTTSSSSAAAAAAASSSFFSRLGSSSDAKAPQIGSFRFPERPQVSSGVVNLTQRRSSVRPLNAEPQRNDSVVPLAATIVAPEVEKEKEDFEQLAKDLENSSPLEIMDKALEKFGNDIAIAFRKFMSVLHERMDFTFKRCLMAQIIDVALIEYAHLTGRPYRVFSLDTGRLNPETYKFFD

SEQ ID NO: 212813 - protein, 102 aa, Glycine max
  unsure (1)..(102): unsure at all Xaa locations
  Clone ID: PAT_MRT3847_34196C.1.pep
KLGIRLVKSEKRNYFVFAMEFPKXELFHPISPGVPPAITPFRGSRQQTDWNSEKTQHGNGGRRKALLRFKEKPSRSNGTFEWTPSGPWVPRLYSEKGDEKYR

SEQ ID NO: 212814 - protein, 53 aa, Glycine max
  Clone ID: PAT_MRT3847_34197C.1.pep
HVPPPFSLTVWVFKSFSVVVFSSTVPFVLCPVEKSGNVPVFPPFLVVINCVFT

SEQ ID NO: 212815 - protein, 121 aa, Glycine max
  Clone ID: PAT_MRT3847_34198C.1.pep
IAQTSDIPSSILTAEKLLSSGLSQDPQMLNMLQQQHLLQLHSQAAAAPSQPMPLIDKLLLLKQQQQQEEQQLLLRQQQQQEEQQLLLRQQQQLLSQVLQEHQSHQRFGNLSHQQLQGGGIP

SEQ ID NO: 212816 - protein, 90 aa, Glycine max
  unsure (1)..(90): unsure at all Xaa locations
  Clone ID: PAT_MRT3847_34199C.1.pep
NSPXLSWPQQAAPXQXPSFXHQLVXKXNPGKXXSPXLLTXTRFGXXXVXGMPPHXMYKADXDIGXXGTLFDFXRQRSAXMHLLEMFYQSL

SEQ ID NO: 212817 - protein, 129 aa, Glycine max
  Clone ID: PAT_MRT3847_3419C.1.pep
MWLSCSTMKPYKADEETFESSHEAFKSAFPRGFAWEVIKVYSGPPEIAFKFRHWGFFEGPFKGHAPTGKMAQFYGLGTVKVDDSLKVEEVEIYYDPAELLGGLLSGNHEARDSASGATWWREAYQWSHL

SEQ ID NO: 212818 - protein, 55 aa, Glycine max
  Clone ID: PAT_MRT3847_341C.1.pep
RKTPKLFRTPSKNSQNIPSTRTHAKPEVSNTTHPNLNTPLPEQTFIFTALSNKKF

SEQ ID NO: 212819 - protein, 106 aa, Glycine max
  Clone ID: PAT_MRT3847_34200C.1.pep
NCPVEKLLDLSHKNSLSQRHKSRGHAMNFTTLEPFGKFFVEPPEAGFPLGKGPPKTPKEGHAISCNPEKWGNIFPLNHGGPYQDCELLAKFMPAPKKIFCLGIFLF

SEQ ID NO: 212820 - protein, 58 aa, Glycine max
  Clone ID: PAT_MRT3847_34201C.1.pep
AFFSSILKNSFSFMRSLTKFYKHTMLSFFLSRTTLRNTNFMVPHTKYNVSLPNPPRSL

SEQ ID NO: 212821 - protein, 45 aa, Glycine max
  Clone ID: PAT_MRT3847_34202C.1.pep
TEPSSHALSLFHDTNSTYLARASFPVIVPRLGYVKPVIRLCRTRG

SEQ ID NO: 212822 - protein, 151 aa, Glycine max
  Clone ID: PAT_MRT3847_34203C.1.pep
VSSEFGSSFGLLFRGKDSLGEEVVKPYTPTTLDTDVGYFELVVKMYPQGRMSHHFREIREGDYMAVKGPKEELDAFAIKFPNQFKVYYVLNQPPEIWDGGVGFVTKEMIQTDLPAPASDIKILRCGPPSMNKAMAANLEALGYSPQMQFQF

SEQ ID NO: 212823 - protein, 278 aa, Glycine max
  unsure (1)..(278): unsure at all Xaa locations
  Clone ID: PAT_MRT3847_34204C.1.pep
MEFSQSHRVEMISMAVALVAIVGGTAYYYYVTKKPKGCLDPENFKEFKLVKRTQLSHNVATFRFDLPTPKSVLGLPIGQHISCRGKDSLGEEVVKPYTPTTLDTDVGYFELVVKMYPQGRMSHHFREIREGDYMAVKGPKGRFKYQPNQVRALGMIAGGTGITPMFQVTRAILENQQDKTNINLIYANVTFDDILLKEXLDAFAIKFPNQFKVYYVLNQPPEIWDGGVGFVTKEMIQTDFPAPASDIKILRCGPPPMNKAMAANLEALGYSPQMQFQF

SEQ ID NO: 212824 - protein, 205 aa, Glycine max
  unsure (1)..(205): unsure at all Xaa locations
  Clone ID: PAT_MRT3847_34205C.1.pep
MHVASRDPVELYREMCSVERGPRLDSTEVEVLLEVCHWFAKSGWASNQALAIFIGLSFFPTAAHKFRKFLKKCPADVAKYLVYLGPSDEAMRFLFPIFVEFCLENFPDEIKRFRGMVESADLTKPHTWFPFARVMKRKIIYHCGPTNSGKTYNALQRFMEAKTGIYCSPLRLLAMEVFDKVNAKGIYCSLLTGQEKSXVPFSNHV

SEQ ID NO: 212825 - protein, 63 aa, Glycine max
  Clone ID: PAT_MRT3847_34206C.1.pep
ILQDTRTKIGSHISQFVNTNSHNHPKIITRIIINLHPVSIMHLCNLCLGKSQLQINALQSFPY

SEQ ID NO: 212826 - protein, 108 aa, Glycine max
  unsure (1)..(108): unsure at all Xaa locations
  Clone ID: PAT_MRT3847_34207C.1.pep
XXARVRXLGIRXEKNXXXXXFXXQKXXXRXXXGXVXXXXXXXRXSTGXXXXPXXXKXXKXWEXXXGXSRKALRREXXXAESTXKXRRXRXQGXGXXXXKGXSVKGGGX

SEQ ID NO: 212827 - protein, 72 aa, Glycine max
  Clone ID: PAT_MRT3847_34208C.1.pep
LSEPQDRCVLDLYKLWKHETGNTMLRFPPQSAMPHIDVAEHHIGNKEEVDTELLDEEQLAKSGDILETLNMT

SEQ ID NO: 212828 - protein, 123 aa, Glycine max
  Clone ID: PAT_MRT3847_34209C.1.pep
QSASQLAEVTLLVLFVSQLKHGFLLIRASLLHYANQSLTSLTSVNSQLVATLAAKFIFMCHALLCGPVLSKSITRCPSLSCPSSRLDTLVFPSLDNQLYFSILSTLAVSFMTPTLLYSYRSLW

SEQ ID NO: 212829 - protein, 169 aa, Glycine max
  Clone ID: PAT_MRT3847_3420C.1.pep
ELRCAGSGPRGFAPRGVIDIFISLPGGVSHSRLVPLVVLHLKDMNFLTEVLIFSSHSEEATDSGVDTYFGFCTYPGRELRHRIDLKVYPRDIYAFGLVAWTGNDVLNRRLRLQAESKGFRLDDTGLFPATQGSGGKRGAKGSASLKFNTEKEIFDFLDFPCLEPHERNL

SEQ ID NO: 212830 - protein, 124 aa, Glycine max
  Clone ID: PAT_MRT3847_34210C.1.pep
KGRLFDFQGSGRPDPALDFSLLSKLQNTCPNEDASNSNLAPLDATSTMMFDNEYYRNIVYNTALLESDQALLKDRRTAPTVYYYSNNRFSFYNDFAKSMVKLSNVGVLTGAEGQIRYKCGSVNY

SEQ ID NO: 212831 - protein, 151 aa, Glycine max
  Clone ID: PAT_MRT3847_34211C.1.pep
APFNNQHIKMYVEHSINKYRKFEGAVGRRVLSLKESINGIPGSDHLDAVNMNSAEGAFWNFERPIFEHNKKWMFERYEDASGQECWKIAHKPLLAKLLHRIKEAQAGRRVMSVSNECLKDERRGLNKIYCEKPGTRSVSILAVDYNLAVCM

SEQ ID NO: 212832 - protein, 71 aa, Glycine max
  Clone ID: PAT_MRT3847_34212C.1.pep
MATEPKAATDDVKIDLFEDDDEFEEFEINEEWDDKEEGKEVTQQWEDDWDDDDVSDDFSLQLKRELESNTN

SEQ ID NO: 212833 - protein, 73 aa, Glycine max
  Clone ID: PAT_MRT3847_34213C.1.pep
MATEPKAVTEDVKIDLFEDDDEFEEFEINEEWDDKEEGKEVTQQWEDDWDDDDVSDDFSLQLKRELESNTNKN

SEQ ID NO: 212834 - protein, 121 aa, Glycine max
  Clone ID: PAT_MRT3847_34214C.1.pep
FSKILHPKGSWPGPIPFQNGPGFFYHRMGSRCASQPVSLFPNRVPLVFQASCPPPHKSGAPPLGPKPPPVYATWLRILFQILGGFRAPPVEKYPLVFFSPILFGVPLAHFPGVCPYVSVGY

SEQ ID NO: 212835 - protein, 76 aa, Glycine max
  Clone ID: PAT_MRT3847_34215C.1.pep
FTQGPNKSFVIPRLLNSTVFLALFLFCPFTAAGLPAAIAHFVFKNDGSPLYNGGTYSILSGTRSLGAQRLPPQGSG

SEQ ID NO: 212836 - protein, 44 aa, Glycine max
  Clone ID: PAT_MRT3847_34216C.1.pep
HANELYMFIIISHTIQAKARAFTLGRNLPLYLKRAAFLLHECPH

SEQ ID NO: 212837 - protein, 46 aa, Glycine max
  Clone ID: PAT_MRT3847_34217C.1.pep
LGPENSIKNRGQIRVYSIWLKKQSAMCILERILKVHITEKTITKFD

SEQ ID NO: 212838 - protein, 244 aa, Glycine max
  Clone ID: PAT_MRT3847_34218C.1.pep
MGVVNRRNSAAHTSNQNKTTSIQLPLGIFGTVLAVLFIGFVAWSYQTIQPPPSKICGSLNGPTITIRRIKLRDGRNLAYKEHGVPKDVAKHKIIFVHGFDACRHDAYVAKTLSPDVAEVLGVYIVSFDRPGYGESDPHPNQTVKSLALDIEELTDKLGLGSKFYIIGFSLGGQVVWRCLKYIPHRLAGAVLIAPVLNYWWAGLPANLTNEVFYQQKLQDQWTVRVAHYIPWLTYWWNTQNWLHF

SEQ ID NO: 212839 - protein, 71 aa, Glycine max
  Clone ID: PAT_MRT3847_34219C.1.pep
MGSDVAAVSSTPKGEKFRIAEVTTCPPAPKKKPRLLSNCSLRRSPLAFFAPPDLETFFCFALQDLPVSFVC

SEQ ID NO: 212840 - protein, 240 aa, Glycine max
  Clone ID: PAT_MRT3847_3421C.1.pep
MSAHMETELTTDQNGAAYQHSLPVPEDKVLVPVEVTLKPSSTAKIDDVRSAVEGMLEKRSLSYNDGPVPVPLDDAFLADNVQRICVCGCDTDEGMHNDNVLLFWQVKPVVHVFQLSEEGPCEDISCDGQSSSFNEWILPAKEFDGMWESLIYESGLKQRLLRYAASALLFTEKGVDPFLVSWNRIILLHGPPGTGKTSLCKALAQKLSIRFNSRYPQAQLVEVNAHSLFSKWFSESGKLV

SEQ ID NO: 212841 - protein, 55 aa, Glycine max
  Clone ID: PAT_MRT3847_34220C.1.pep
VVSTIEFCNWFLILICMFLFGKNIRKIFFVEIYVVYVGIKQHRYILTALNTSLIG

SEQ ID NO: 212842 - protein, 41 aa, Glycine max
  Clone ID: PAT_MRT3847_34221C.1.pep
RSRSNSRRSRMSVNFCTGKVPFTLVMAHSNHDRGMCHQWIT

SEQ ID NO: 212843 - protein, 139 aa, Glycine max
  Clone ID: PAT_MRT3847_34222C.1.pep
MDTTTPSVTTWSAGSTINYTIAGTAIHGGGSCQISMSYDHGSTWNVIYSIIGGCVIESLTENVKIPSDAPSGEALFSWSWFNLIGNREMYQNCAPVTIIDGGNGLNSADYPAPFVANVDVAPGCKTIEGTEVVFPNPGK

SEQ ID NO: 212844 - protein, 47 aa, Glycine max
  Clone ID: PAT_MRT3847_34223C.1.pep
NSPSQKLTMYSCYHLKKRRNDLIEGVQFFFFFFSPWLTLLLEHVLSF

SEQ ID NO: 212845 - protein, 45 aa, Glycine max
  unsure (1)..(45): unsure at all Xaa locations
  Clone ID: PAT_MRT3847_34224C.1.pep
AIPSFSCGLTVLEGTTNPCGGGHFQICIEDAPESSISRXPXEGFS

SEQ ID NO: 212846 - protein, 45 aa, Glycine max
  Clone ID: PAT_MRT3847_34225C.1.pep
MGKSYPTGSADYHKGGENAMKKLRGFIGAKRCASLMLRLAWDSAG

SEQ ID NO: 212847 - protein, 66 aa, Glycine max
  Clone ID: PAT_MRT3847_34226C.1.pep
RYEIDYASAAAALYLSSSGYSLPLRICHSENIHGESELTSDDSIFLHRGGVIFRLLISLLSSSRSR

SEQ ID NO: 212848 - protein, 81 aa, Glycine max
  Clone ID: PAT_MRT3847_34227C.1.pep
FIYVYISTQQIIYNFVSSLYFFSLCFSFLGLCLLPHFKFYFDLLCFLECTHFRENIHALDHFISLYLYPFIILFFCWFWLC

SEQ ID NO: 212849 - protein, 570 aa, Glycine max
  Clone ID: PAT_MRT3847_34228C.1.pep
MVMASLIQFSPTSLSAVPITTRFTRTHKSRLRCSLDANVSDMSVNAPKGLFPPEPEHYRGPKLKVAIIGAGLAGMSTAVELLDQGHEVDIYESRPFIGGKVGSFVDKGGNHIEMGLHVFFGCYNNLFRLMKKVGADNNLLVKDHTHTFVNKGGQIGELDFRFPIGAPIHGIRAFLSTNQLNTYDKARNAVALALSPVVKALVDPDGALRDIRNLDSISFSDWFLSKGGTRMSITKMWDPVAYALGFIDCDNISARCMLTIFALFATKTEASLLRMLKGSPDVYLSGPIRKYITDRGGRFHLRWGCREVLYDKSADGSIYVTGLSMSKATAKKIVKADAYVAACDVPGIKRLLPSEWREQEFFNNIYELVGVPVVTVQLRYNGWVTELQDLEKSRRLGKAVGLDNLLYTPDADFSCFADLALSSPEDYYIEGQGSLLQCVLTPGDPYMPLPNDEIIARVAKQVLALFPSSQGLEVTWSSVVKIGQSLYREGPGKDPYRPDQKTPVKNFFLAGSYTKQDYIDSMEGATLSGRQASAYICDAGEGLVALRKKLDDEFKDDLTISNTKDELSLV

SEQ ID NO: 212850 - protein, 90 aa, Glycine max
  Clone ID: PAT_MRT3847_34229C.1.pep
SAQISIAHFWVSIISARQFLSSVLALLTAAQPWLPLRLFVSIMAPNGHQAPAKKGIHKSSDSSSVFWEDKHGHREFMDWKEANQNGPFPS

SEQ ID NO: 212851 - protein, 48 aa, Glycine max
  Clone ID: PAT_MRT3847_3422C.1.pep
MPAAARIIRDMQSDAGNKMCIDCSQENPQWDSVSDGDCKCLEFSGKHR

SEQ ID NO: 212852 - protein, 49 aa, Glycine max
  Clone ID: PAT_MRT3847_34230C.1.pep
MLRQKLSPDMPFQLASDTILRTLRARVHHHCQGQVKIFFWVKFYFGLNQ

SEQ ID NO: 212853 - protein, 128 aa, Glycine max
  Clone ID: PAT_MRT3847_34231C.1.pep
CEKTTEGDDILVVVTSGENVTEVQPQFDAISKCPGRGIIVSGIAPPGSGFDFYSRFFCPKDGVNEDHVCGSAHCALASYWSKKLGKCDFNAYQASPRGGILNIHLDEQNKRVLLRGKAVIMMEGCVLV

SEQ ID NO: 212854 - protein, 211 aa, Glycine max
  Clone ID: PAT_MRT3847_34232C.1.pep
MANLSNSHSESFVKIPTVKFAKLFINGEFLDSVSGKTFETVDPRTEEVIAEIAEANKEDVDIAVKAAREAFDFGPWPRMPGAERAKIMLKWSELIEQNAKEIAALDTIDGGKLFSWCKAVDVPEASNILRYYAGAADKIHGDVFKTSRNLHLYSLMEPVGVVGHIIPWNFPTVMFFAKVAPALAAGCTVVIKPSEQTPLSSLFYAHLSKLA

SEQ ID NO: 212855 - protein, 31 aa, Glycine max
  Clone ID: PAT_MRT3847_34233C.1.pep
PPQYSPYILQNSMLCGMLSGNVFESEFSKDH

SEQ ID NO: 212856 - protein, 129 aa, Glycine max
  Clone ID: PAT_MRT3847_34234C.1.pep
GIIPKIKHKMGEKKVLILIVFVMAYGLAATTFTASQLPPTCNGNEGLLTFCGPYCGNIQPNPTSDCCKSAASVFQRAMASGQGIRDLCNCLRAAVPFLNFKETKLISLPDACGIKLSFSMPLCVLGPGP

SEQ ID NO: 212857 - protein, 34 aa, Glycine max
  Clone ID: PAT_MRT3847_34235C.1.pep
YITCCQLVSSCTQLKYTVKLRPYSFPNAWANAWV

SEQ ID NO: 212858 - protein, 151 aa, Glycine max
  Clone ID: PAT_MRT3847_34236C.1.pep
NNKGTPLEIGKGTSVRQGSTVAILGYGSVVQQCLQAAQMLKPLDLSVTVADARFCKPLDLYLIKLLGKELEFLLTVEEGSIGGFGSHVSHFLSIVGLLDGPLKWRPMMLPDRYIEHGSPQDQTEEAGLSSKNIAATVLSLLERPKEALLFK

SEQ ID NO: 212859 - protein, 90 aa, Glycine max
  unsure (1)..(90): unsure at all Xaa locations
  Clone ID: PAT_MRT3847_34237C.1.pep
KDGPLLVVACGRDTISTASSVKRGASXNAFDVQIQNPRLHLNRFDMVITPKHDYYPLTSERQKQVPWFLRSWITARDPPDCHVVLTMGAL

SEQ ID NO: 212860 - protein, 112 aa, Glycine max
  unsure (1)..(112): unsure at all Xaa locations
  Clone ID: PAT_MRT3847_34238C.1.pep
MSQSTLFLTLLLYPLVHALSYEAAHIKDGLKFYYQLDLAHSDLGSESVAYHCHGKGPXAVEADGRILKWQETWREWIDYADTSPHRIMKLCDGLQKDMMESMHGRPLGLKFN

SEQ ID NO: 212861 - protein, 62 aa, Glycine max
  Clone ID: PAT_MRT3847_34239C.1.pep
LNLADSLGYMVKGYRKPDYEMMEYESLELYYMHHLFHFLHLKFAPKNKERQFSFKSLRSWLC

SEQ ID NO: 212862 - protein, 244 aa, Glycine max
  Clone ID: PAT_MRT3847_3423C.1.pep
MMSPNLQNKLTTYTKIFVGGLAWETKRDTLKRYFDQFGEILEAVVITDRITGRSKGYGFVIFRDPNSAIRACHNPYPVIDGRRANCNLAALGAQKFDPSITTGRQKFSSPSWNMAPIPLQGTSTHYNQHIPHYPFPHPVYRYPGYPHPQDLYEMNYNNAYGGQQLPLCWFPAYCQPFYGLSRQFIPTAYVKKAQTPDVSPQEFTVVGFSEPISASPSICSTGLDTGTVPATGVLESHQEQKSST

SEQ ID NO: 212863 - protein, 163 aa, Glycine max
  Clone ID: PAT_MRT3847_34240C.1.pep
MAFSFTQRFFLSPSLLLLLLLIALSASSLTPTCFSDSVFDSQAAHAGRNLLQAKKSCPVNFEFLNYTVITSKCKGPQYPPKQCCAAFKEFACPYANALNDSTNDCAAIMFSYINLYGKYPFGFFASVCRQGKKGITINCPASAASPPSVSEDDTGMKTHQIRV

SEQ ID NO: 212864 - protein, 76 aa, Glycine max
  unsure (1)..(76): unsure at all Xaa locations
  Clone ID: PAT_MRT3847_34241C.1.pep
PLFGGWNSTFVSGYGLALQDFLFESPDGRRYLNXTCGCPRVERVVARLSGNIVLREGCKDARVESPFEVKQHLEMK

SEQ ID NO: 212865 - protein, 127 aa, Glycine max
  Clone ID: PAT_MRT3847_34242C.1.pep
FLQFHAQWSDFPVFQFFVFANGVISGYAILSLPFSYVCIVQPHAVRPRLLLMTFDTVMMGLISVAAAGAAAIVYVGHNGSQDANWMAFCQGFTNFCQAASEAVVLSFVAAAFFLCLVPLSALALKSN

SEQ ID NO: 212866 - protein, 56 aa, Glycine max
  Clone ID: PAT_MRT3847_34243C.1.pep
HGVNRHSTDNRHSLIATTHFSVFPMSHCPRELDIPGWPPKLHPSTGTVLLPSLTFP

SEQ ID NO: 212867 - protein, 36 aa, Glycine max
  Clone ID: PAT_MRT3847_34244C.1.pep
VKSGHNLSYLFQIKATNDSFSPSYLVFNGATKQQPS

SEQ ID NO: 212868 - protein, 51 aa, Glycine max
  Clone ID: PAT_MRT3847_34245C.1.pep
DFIPIPTQKTYFQNLQMFQPIIIIHQHSYNFHFTPTLIYLTRVPISLLLQQ

SEQ ID NO: 212869 - protein, 385 aa, Glycine max
  Clone ID: PAT_MRT3847_34246C.1.pep
MARVDLDGNPMKALTICMIGAGGFIGSHLCEKLMSETPHTVLALDVYNDNIKHLLEPSDSPWAGRITFHRLNIKHDSRLEGLIKMADLTINLAAICTPADYNTRPLDTIYSNFIDALPVVKYCSENNKRLIHFSTCEVYGKTIGAFLPKDSPLRKDPAYYVLKEDESPCIFGSIEKQRWSYACAKQLIERLIFAEGAENGLEFTIVRPFNWIGPRMDFIPGIDGPSEGVPRVLACFINNLLRGEPLKLVDGGQSQRTFVYIKDAIEAVLLMIENPARANGHIFNVGNPNNEVTVRQLAEIMIKVYSKVSGEQTPETPTVDVSSKEFYGEGYDDSDKRIPDMTIINRQLGWNPKTSLWDLLESTLPYQHRTYAEAVKKVIAKPVAS

SEQ ID NO: 212870 - protein, 114 aa, Glycine max
  Clone ID: PAT_MRT3847_34247C.1.pep
TQIEPSLPETLCHVHPHRVSQILALFATDIRKLTCSSFLLLMAWNPEPDTSLSRQLCVLSVSCRSMRCCTRRNLHDGDLLKYEDTALGLDSTSSHREPLERDPEYYDPNTVFPG

SEQ ID NO: 212871 - protein, 194 aa, Glycine max
  unsure (1)..(194): unsure at all Xaa locations
  Clone ID: PAT_MRT3847_34248C.1.pep
DTSFILARDAIGDTYLFIAWRLNGSHXTPSYLNGDYDDCEHYESFPPGHLYSIKHESVADDCTIASWFXDAILLSHLMITLALRHAFEMAVVKRMMTDVPSAGSLSQGSYSTLSAVXLYLYLSGSRCSXQRASKLHSLCVCLEGAPDLMASLEVTYYIGTVHHEYXYSVQEGIYTIDDEIYHIYSSWVDTIRAS

SEQ ID NO: 212872 - protein, 55 aa, Glycine max
  Clone ID: PAT_MRT3847_34249C.1.pep
LYFFFFFFFFFLPIKFTRAESPKILTQKPLFHLQYPLLIKIFCQTFYPPLDGNRP

SEQ ID NO: 212873 - protein, 62 aa, Glycine max
  Clone ID: PAT_MRT3847_3424C.1.pep
LVVIIVLIQRATLPCPPISRALNKRLPRSTIGELLQAGTHVRPVSIKPRFTLVLALSLLVEI

SEQ ID NO: 212874 - protein, 66 aa, Glycine max
  Clone ID: PAT_MRT3847_34250C.1.pep
LNNLKWVSSHTVSFFDKIHDLFGDVTKRLIALSFTVSVKRIVKILPMLSWIEPKTFYCFKKQKKLN

SEQ ID NO: 212875 - protein, 81 aa, Glycine max
  Clone ID: PAT_MRT3847_34251C.1.pep
SNWFGNDHPLCFLDIHLQCVQSVLPLHVFQKFEKWQHAKKWQLVGFTVNFHFPAVCMKTEFNLSCKRLRIYNKIITPNMCV

SEQ ID NO: 212876 - protein, 89 aa, Glycine max
  Clone ID: PAT_MRT3847_34252C.1.pep
ECLFYRHQYQPRKGSFFNSTLACIYLGIFVRIVADDSTACYSLPSDPSAPVSTIAEITLSSNERTVRRSAELWSIHNSAARFELTRTPP

SEQ ID NO: 212877 - protein, 63 aa, Glycine max
  Clone ID: PAT_MRT3847_34253C.1.pep
PAALYPEILEAMVMELHYDYECRKRRTRMDVLSKMNQLKLLMLNKVNYYGNLNYISNELRYLC

SEQ ID NO: 212878 - protein, 63 aa, Glycine max
  Clone ID: PAT_MRT3847_34254C.1.pep
QISLIWLTPMSYVMHMFFIEILIQNILIFFLGTLSCVLAFNNKLKNIKKTSRQLQKFHKKILS

SEQ ID NO: 212879 - protein, 72 aa, Glycine max
  Clone ID: PAT_MRT3847_34255C.1.pep
HASQCLVNKGISWELGFSLTGKLFSPKSSEFVSCSTPDAVISAIQSFDGVYLNGKSNQSLLTRFLAQPGLRI

SEQ ID NO: 212880 - protein, 42 aa, Glycine max
  Clone ID: PAT_MRT3847_34256C.1.pep
QVFVKFSGLFRLSRGQFSHLDLSPLLSQVVSSFGANRLMWGT

SEQ ID NO: 212881 - protein, 103 aa, Glycine max
  Clone ID: PAT_MRT3847_34257C.1.pep
GRDALTAFLQLTILCGEKLKPYRLVRTIPCPDNIIIVATTAGLSTMRSTQELFNMQCASCFLRRLESTAMPQMVERYFISNWDGLDKHHLKHSVSLTPNSLRT

SEQ ID NO: 212882 - protein, 107 aa, Glycine max
  Clone ID: PAT_MRT3847_34258C.1.pep
FCFLFFMLGVFFFFFFFFISFFFFCFFLAGGEPPTPKFFFVPPKNSPFLPNPKFSALKKRLPFAITEGNLSFYAKKLAYKKKKNPLKLKKKQNETGKLLKLKNFFTF

SEQ ID NO: 212883 - protein, 37 aa, Glycine max
  Clone ID: PAT_MRT3847_34259C.1.pep
HTCHCLHQVADALPGTMPRLAIAYSKHPSIGGTCVPA

SEQ ID NO: 212884 - protein, 53 aa, Glycine max
  Clone ID: PAT_MRT3847_3425C.1.pep
IVGCKFTQSVFHPYTYYIGSYVGGHSCRSIRLQYLRLTNSRHYDPFSYGDIDN

SEQ ID NO: 212885 - protein, 71 aa, Glycine max
  Clone ID: PAT_MRT3847_34260C.1.pep
TKKRGGHHYKKGRRTKKGRGGLYSLCIQQATYATQQTDMRKATPKQKLGSETRQINRYSEKDRPRNGNDIS

SEQ ID NO: 212886 - protein, 96 aa, Glycine max
  Clone ID: PAT_MRT3847_34261C.1.pep
GGKRGGGGKLLKGTLTLCSQGTPPYPKNLFGAKSFLAQIIYFFNTPPHLGESVSPPKLICGGGEPPPGKGGKKFMSRKFFKKGGGPYKKKGSLHLL

SEQ ID NO: 212887 - protein, 110 aa, Glycine max
  Clone ID: PAT_MRT3847_34262C.1.pep
MAMEIKVCVIPIVGIGGLGKTTLAKLVFNDNRMDELFPLKMWVCISDEFDIRQIIIKIINSASASAPIIALSHQENINSFNIEQLQSRLRHNLSGKKYLLVNGFKELQTL

SEQ ID NO: 212888 - protein, 141 aa, Glycine max
  Clone ID: PAT_MRT3847_34263C.1.pep
ILHGHAMNHEFALQTPASAQRTYPSQIPYILMKLEWTPTVTELGGLTQYTRCQSLLKTTGKRLFSYMHHSCIKIQREFTTGVTLDFLQANHVYMKTRNIGIRPSRKTLTLGPFIQIKNVPIKTNKNAWKQHLMRPVLNQKP

SEQ ID NO: 212889 - protein, 64 aa, Glycine max
  Clone ID: PAT_MRT3847_34264C.1.pep
IHFPWCSRPIRNSLVVAAMQTTAQAIGAWRVSGPCGENVFFFSAPPRPIRFFTIYVRLCLGCIN

SEQ ID NO: 212890 - protein, 125 aa, Glycine max
  Clone ID: PAT_MRT3847_34265C.1.pep
RGHLPRLPQHRELLSQLTPIHAKLSNERSIARKHPVHRCNEVQAEAATQFLNIMWHYLESLCSDLKSHTITSVQSNNDRVSLLLKDSFIDSFPARDQPFIKLFVDTQLFTVLSDSRLSSFESGES

SEQ ID NO: 212891 - protein, 123 aa, Glycine max
  Clone ID: PAT_MRT3847_34266C.1.pep
RLVELELFFHYRILHPVNDAYGLWWTSDICEIWFAVSWIMDQFPKWCPIQRETYLDRLSLRYEKEGKPSELSSVDVFVSTVDPMKEPPLITANTVLSILAGDYPVDKVACYVSNDGAAMLTFE

SEQ ID NO: 212892 - protein, 96 aa, Glycine max
  unsure (1)..(96): unsure at all Xaa locations
  Clone ID: PAT_MRT3847_34267C.1.pep
VATGGLPENTGLSLACAMNSSLRGRASSDIYTICSEDCESWNPGGTKAMTMSCNPNPCSDAWRLELLKTAGHSXEIYNCATGWTATPMQDCSRTLD

SEQ ID NO: 212893 - protein, 113 aa, Glycine max
  Clone ID: PAT_MRT3847_34268C.1.pep
YYCIVVVAMGTFNHYVIVKFKDGVAVDDLIQGLEKMVFGIDHVKSFEWGKDIESHDMLRQGFTHAFLMTFNGKEEFNAFQTHPNHLEFSGVFSPAIEKIVVLDFPSNLVKAPA

SEQ ID NO: 212894 - protein, 75 aa, Glycine max
  Clone ID: PAT_MRT3847_34269C.1.pep
PQFQSLGVAINENPPPPSFFQEFDPPATRKGPPLWLNLRITLLPAFMFCQEKLPREFRLVMSQSLCPNPKKNKTG

SEQ ID NO: 212895 - protein, 61 aa, Glycine max
  Clone ID: PAT_MRT3847_3426C.1.pep
MRWAEKKISVFIQQDAGNLQYYQPCSVLSDEKFLQFLKIQRFHIVAQENSSFPSPSKYCIG

SEQ ID NO: 212896 - protein, 85 aa, Glycine max
  Clone ID: PAT_MRT3847_34270C.1.pep
KKEGAETGGGGRPRVWGGRQRRSSPRPFDIRQCGRRGGEANRGKSTTPPVRGVGRSGTDPSKEARKGEPRKGGQGEGHGTDSHNA

SEQ ID NO: 212897 - protein, 52 aa, Glycine max
  Clone ID: PAT_MRT3847_34271C.1.pep
VANQVRHRTSRLLHIRFFIVLLSVSFPHLWDTGRNIGSKMHLRSSASGEEGH

SEQ ID NO: 212898 - protein, 68 aa, Glycine max
  Clone ID: PAT_MRT3847_34272C.1.pep
APNLLKGLNGFFWKIGGTNFVFYKVPVNCYNPLATGGRNSFNSTLLAKNGTGKAHPLWQYFLKPFKKL

SEQ ID NO: 212899 - protein, 128 aa, Glycine max
  unsure (1)..(128): unsure at all Xaa locations
  Clone ID: PAT_MRT3847_34273C.1.pep
SHNRPDAWIIDIMYTWGSTLINSLPTPVYRPMPVFALRVGVATNRHTKTLAADSSLAYAVPXEVLTHYVTLNCNPXPTMLDKMASTLLHTKEKSMHRAIVITLPELSNGYTENYDELTRAKVWHLVML

SEQ ID NO: 212900 - protein, 299 aa, Glycine max
  Clone ID: PAT_MRT3847_34274C.1.pep
MEAQAVQVLRYSATLHSNNPKLEKTGTNGSLRMFGGFKKQLFVSSKLQSAKPSANIRRRTASLVVACSHNNIPASALEYGSFHSSVEEKLILKIKSQEIEPYLSGRCIYLVGMMASGKTTVGRILSEALSYSFYDSDALVVKEVGGISVTDIFKHYGEPFFRNKETEVLQKVSIMHRHLISTGGGAVVRPINWKYMQQGISVWLDVPVEVLTQRITAEGTDSRPLLHYEGGDAYTKTITHLSSLFEERSEAYANANVKVSLENMAAKLGRRDVLDLSPTAIAMEALEQIKGFLIGEDGF

SEQ ID NO: 212901 - protein, 89 aa, Glycine max
  unsure (1)..(89): unsure at all Xaa locations
  Clone ID: PAT_MRT3847_34275C.1.pep
LVLAXXLEFFDGXXPXXSWLPIXVXXXXIXXSRXXSXXXXXNXXXGSGRGGLPTTXWXSSXVSNRAXDIDXXIXTALGXGXEIXFLIEL

SEQ ID NO: 212902 - protein, 220 aa, Glycine max
  unsure (1)..(220): unsure at all Xaa locations
  Clone ID: PAT_MRT3847_34276C.1.pep
MEAQAVQVLRYSATLHSNNPKLEKTGTNGSLRMFGGFKKQLFVSSKLQSAKPSANIRRRTASLVVACSHNNIPASALEYGSFHSSVEEKLILKIKSQEIEPYLSGRCIYLVGMMASGKTTVGRILSEALSYSFYDSDALVVKEVGGISVTDIFKHYGEPLFRNKETEVLHKVSIMHRHLISTGGGAVVRPINWEYMQQGISVWLDVPVEVLTXXNTAERT

SEQ ID NO: 212903 - protein, 57 aa, Glycine max
  Clone ID: PAT_MRT3847_34277C.1.pep
RVYYSFIICILDNIHLLLCYVLLYRYGSKTGPKRCVRFISNCYCNGGAGTDQRLSYR

SEQ ID NO: 212904 - protein, 95 aa, Glycine max
  Clone ID: PAT_MRT3847_34278C.1.pep
KFVWKKIFPQGKQLPWNSPKFIGPQKRKNGKPPWTRSANNFGGGGPLKGGRPLFFFLNIFYFSFFFFIIIFIFFFFIYFFHFFPFFFFFFIIFFF

SEQ ID NO: 212905 - protein, 51 aa, Glycine max
  Clone ID: PAT_MRT3847_34279C.1.pep
RNRALSCGTVDLVLEVEFGSEILIRFGLIVFALYLHMVLHEINVGVCSIQQ

SEQ ID NO: 212906 - protein, 96 aa, Glycine max
  Clone ID: PAT_MRT3847_3427C.1.pep
LLLSIPDPENVNTATKQPVNSTQPHCAVFNLKQHVDNSHLVCSVGGLPVCTDSSCFAFNSTTTSASLTFQTFSFKCAASTDQFASTTINLHTETRL

SEQ ID NO: 212907 - protein, 101 aa, Glycine max
  Clone ID: PAT_MRT3847_34280C.1.pep
ETQILGARFFFLTTKTVRAFKPSNAVRTYLISRFFFWGWPDGRRLYGTYNLFTTAKSFILHTKLLSRPSIQSLTYILSGLPCSVMCRSRRSPLLHLRSSFW

SEQ ID NO: 212908 - protein, 74 aa, Glycine max
  Clone ID: PAT_MRT3847_34281C.1.pep
LIQLYNTVLLSVTLAFSVDFSFSHYVNEYLYSLNTLQVEHQILPLPHWRREQGINQEKEIQPKPKQTHTISNCQ

SEQ ID NO: 212909 - protein, 143 aa, Glycine max
  unsure (1)..(143): unsure at all Xaa locations
  Clone ID: PAT_MRT3847_34282C.1.pep
MPPNLRFFGLRREASGSGMAAYLKRYHSHLPRRPHSVGVYAALSSNGRPTKSFDYDSMIIGACIGRHGASLHAAEKGSKTATAERDVEGGTCVNRGXVPSKALLTVSGRMRELRSDHHLKSYGXHVTAAGYDRTRVADHAHNL

SEQ ID NO: 212910 - protein, 149 aa, Glycine max
  unsure (1)..(149): unsure at all Xaa locations
  Clone ID: PAT_MRT3847_34283C.1.pep
MRARFLLLLVLPEFTTQNHVSLVIDHWEREHPRHYQSLQRYANKRDMFRNHSCYARCIIANVETDDCDEXGLTRPPRLPPHQEREPYXPAEKDEDEDEQPTSMTLTSAQSXETMSMSRERDRNXAVMDEVRGQGGCEEEEDDDDEEHDD

SEQ ID NO: 212911 - protein, 77 aa, Glycine max
  Clone ID: PAT_MRT3847_34284C.1.pep
SRYQKMINVQCKAKLQPIYIRQKSNQTLKVHIDTPSSSKQINQTEVLVLRLLLQLGHGDLQQPVFERAANMDAVGIL

SEQ ID NO: 212912 - protein, 68 aa, Glycine max
  Clone ID: PAT_MRT3847_34285C.1.pep
DYRNWKAFCWERHSFSLSSSWAISSYVGWSLWVVMVPTSHLYRVGHVLRCAFLQVLLVQVCFLMICHL

SEQ ID NO: 212913 - protein, 57 aa, Glycine max
  Clone ID: PAT_MRT3847_34286C.1.pep
GKAKITTITTQKPLRVGHLTTLESLHSILNTLSAKSFMNNCQPTEPTIFLYGVDQPS

SEQ ID NO: 212914 - protein, 35 aa, Glycine max
  Clone ID: PAT_MRT3847_34287C.1.pep
VMGVAPVKSQFEGASMGMPAKNDGRKCGPKWSCNP

SEQ ID NO: 212915 - protein, 164 aa, Glycine max
  Clone ID: PAT_MRT3847_34288C.1.pep
KQPEEDDVGFVFSVDCRSRLNPPIPATYFGNCVAGQKVVAVTKNLVGISDGFISALEGISEALNIVKGEGVLSGAETWVSLMLERGESVPRLFSIAGSPLFEVYGTDFGWGRPKKVDMTSIDGTGAFSLSESRDNSGGIEIGLMLCQREMEAFSTLFVGGHESF

SEQ ID NO: 212916 - protein, 48 aa, Glycine max
  Clone ID: PAT_MRT3847_34289C.1.pep
QTTLLPPNTPNQTIILPSNIPILNHINLRYYQLNFLIIYNVNLQYPIN

SEQ ID NO: 212917 - protein, 49 aa, Glycine max
  Clone ID: PAT_MRT3847_3428C.1.pep
HAVRKKKKKKKKKKKKKKKNKKKKKKKKKKKNKKKKKKKKKKKKKGGPA

SEQ ID NO: 212918 - protein, 53 aa, Glycine max
  Clone ID: PAT_MRT3847_34290C.1.pep
GNFIWSLLLEKSHGPSNVCLSSLIAEVRWAIRLNWGVRGGIEYFVTPPQNRSN

SEQ ID NO: 212919 - protein, 58 aa, Glycine max
  Clone ID: PAT_MRT3847_34291C.1.pep
MAKFKNPPGPNQSFKAPKNGLQKPQRDRPPSPQGMGPQFFRNQRDPRKPPQKSGEIAP

SEQ ID NO: 212920 - protein, 91 aa, Glycine max
  Clone ID: PAT_MRT3847_34292C.1.pep
HSVGDGKAIEWIVHNPDSYGLGSSQKLLQMWQGSCNSVVGLEILLKQIRVFEACSTGIKEDHLLNSQHQTTFDEVNVFDYIIHMLKVMWET

SEQ ID NO: 212921 - protein, 58 aa, Glycine max
  Clone ID: PAT_MRT3847_34293C.1.pep
MAFDPVQPVAKKARSGGEIVSAREPLLNGVHDSESYSVSAAILPCLFPALGGLLFGYD

SEQ ID NO: 212922 - protein, 110 aa, Glycine max
  Clone ID: PAT_MRT3847_34294C.1.pep
GRCPMIYFNLKGWLPTELGWAIGLRVSIWEPFGFLTKTLGHIFLGSTFGRHPIQNVPTKLAWSKEFFPQLTSREPEFSSKFFKAFGRRDFRPLDFLKAWKYQQGFLSILL

SEQ ID NO: 212923 - protein, 105 aa, Glycine max
  Clone ID: PAT_MRT3847_34295C.1.pep
GETVVGFRFGGQWGLRKLGGFKFEGDCFGRRANLNLYALGKKGRFMAQPWGGGSVRANNMSVVGMWLFLSKHWGSEFRYLLRVTWAKRGLWSKQKCFIVWFVKYS

SEQ ID NO: 212924 - protein, 54 aa, Glycine max
  Clone ID: PAT_MRT3847_34296C.1.pep
GLSRMNHHTYLASKSCAGTPEWMAPEVLINEPANEKCDVYSFGEILLGLVCSSI

SEQ ID NO: 212925 - protein, 769 aa, Glycine max
  unsure (1)..(769): unsure at all Xaa locations
  Clone ID: PAT_MRT3847_34297C.1.pep
MTGFPGPRRDHASSSSSSHNSNSSGSNVFNLLARREISPRTRYVAKWHWGEPGEASKSKSSPYSRPKKEVVRDARRGLLSWVEAESLRQLTSHLHLSTYYLRMVGAMVLFLKVLVIDGETGYPIYTVLDCXLVLDIGLVRVHRRTPWVVSFHPLHPHILASGSLWNKVRLWDANTTMSVLSHHFYRPIASIAFHAKGEIIAVASGHKLYIWHHNKKGEASSPIFVLKTKRSLRAVHFHPHAAPYLLTAEVNDLDSSDSSMTEATSLGYLQYPPPAVFVTNIHPTEHINLSSELPYVSLPFYVMPAYNVDESRAELQHASHDVVSGSMQIXAAAMVQLHADPSAAAHYETTVSPMDTFSEMPSSSQTGAEYPAHTAFSNGMGIGLSNLTMDGMETDETRPAEGSQHGNLTNTYSLNGMLHGLSRQTANRGVLSEFGQFHQFFPSRDPSGWEIPFLHGWIMGQSQVGVPSMLPHMGASRDNLSQHIGSSSYIKASNHSTSNVDAAMPSSAIPGGISIQTISMRSGLENHFSQSRVPVSESGNLAASINTPHDGFDMQTIVSRIQSELATSVAATAAELPCTVKLRVWSHDIKNPCAPLNAADPGLQTPVHQDPGVATSPTRHPISAHQVWDARMLPPLEEATFGSVLASRAIRAAHCLTSIQFSPTSEHILLAYGRRHGSLLKSIVIDGETTLPIYTVLEVYKVSDMELVRVLPSAEDEVNVACFHPFAGGGLVYGTKEGKLRVLQYDGAHAVNGTGPSYFPEETIVGVSQ

SEQ ID NO: 212926 - protein, 206 aa, Glycine max
  Clone ID: PAT_MRT3847_34298C.1.pep
MTGFPQPRRDHASSSSSSSSHNSNSSGSNVFNLLARREISPRSRYVAKRHWGEPGEASKSKSSPYSHPKNEVVRDARRGLLSWVEAESLRHLSAKYCPLLPPPRSTIAAAFSPDGKVLASTHGDHTVKIIDCETGSCLKVLVGHRRTPWVVRFHPLHPHILASGSLDQEGRLWDANTSECIISHHFYRPIASIAFHAKGEIIAVAS

SEQ ID NO: 212927 - protein, 96 aa, Glycine max
  Clone ID: PAT_MRT3847_34299C.1.pep
PAAGYYIATSVEPNVKDGAANANETLTLLAPNDNDYAAFEPIISQLASTIDSLTSSLATPSSGDSAKILTKAQDDLAALSDRLIEVKKTEKERLEK

SEQ ID NO: 212928 - protein, 82 aa, Glycine max
  unsure (1)..(82): unsure at all Xaa locations
  Clone ID: PAT_MRT3847_3429C.1.pep
XYXXIXXLNXXXXLKKXXXXXXEFXKXXFXXXXXYVCXHQXXKLXXKXLMXXXTIXHXXXXXXXXXXXXXXXXHXXSTXVXD

SEQ ID NO: 212929 - protein, 83 aa, Glycine max
  Clone ID: PAT_MRT3847_342C.1.pep
IPLPLFFFLSFLFVLLRAQEAPLRSLSLCSPSLLFVPAAASSFCFFFSSDLCCYPPHLSVIMTSSSQPNTGPMTFFGLTIIFR

SEQ ID NO: 212930 - protein, 281 aa, Glycine max
  Clone ID: PAT_MRT3847_34300C.1.pep
VVLSRVPVSESGNLAASINAPHDGFDIQTIVSRIQSELATSVAATAAELPCTVKLRVWSHDIKNPCAPLNADRCRLTIPHAVLCSEMGAHFSPCGRFLAACVACVLPHIEADPGLQTPVHQDPGVATSPTRHPISAHQVMYELRIYSLEEATFGSVLASRAIRAAHCLTSIQFSPTSEHILLAYGRRHGSLLKSIVIDGETTLPIYTVLEVYKVSDMELVRVLPSAEDEVNVACFHPFAGGGLVYGTKEGKLRVLQYDGAHAVNGTGPSYFPEETIVGVSQ

SEQ ID NO: 212931 - protein, 159 aa, Glycine max
  Clone ID: PAT_MRT3847_34301C.1.pep
MSIELDSESIPTPTAQAQDRSNSRCALLFSYSCLGPRRRSSWWERVRSHSHSTPASTGDRWWSRGLRALKKLREWSEIVAGPKWKTFIRRFNRNRPNKRIPTYQYDPFSYALNFDEGPNGDFNDDDDAALRNFSTRYAAANNVKSLSPKARDTDDAVLV

SEQ ID NO: 212932 - protein, 162 aa, Glycine max
  unsure (1)..(162): unsure at all Xaa locations
  Clone ID: PAT_MRT3847_34302C.1.pep
MVENSTLGRFHHQRLDLRRWVPAFFTSHKTLLTFLWIAAFASVFLWQRNIAGGFLVYGGIPARPMPMLRPMAFNLTDFGGVGDGVTLNTEAFKRAVSAVSKFGKKGGAQLNVPPGRWLTAPFNLTSHMTLFLAEDAGILGIDDENYWPLMPXLPSYGYGKGA

SEQ ID NO: 212933 - protein, 189 aa, Glycine max
  Clone ID: PAT_MRT3847_34303C.1.pep
MISGHWNVTDVCNALLGGFAAITAGCSVVEPWTAIVCGFVASVVLIACNKLAEKVKFDDPLEAAQLHGGCGAWGVIFTALFAKKEYVSQVYGEGRAHGLFMRGGGKLLAAHVIQILVIVGWVSATMGPLFWGLNKLKLLRISSEDELAGMDLTRHGGFAYAYEDDESHKHGIQLRKVGPNASSTPTTDE

SEQ ID NO: 212934 - protein, 71 aa, Glycine max
  Clone ID: PAT_MRT3847_34304C.1.pep
QASIHGKNKIPKFSIYKTLKYRLRTVPITDTFKAFDYFTISNITVSKLRNLFGFFIGTSINKKVTRSISSN

SEQ ID NO: 212935 - protein, 43 aa, Glycine max
  Clone ID: PAT_MRT3847_34305C.1.pep
FRGSIFELLVGEAFLVVGFKAFCGIHENFQCAVLTTIAPPYQP

SEQ ID NO: 212936 - protein, 88 aa, Glycine max
  unsure (1)..(88): unsure at all Xaa locations
  Clone ID: PAT_MRT3847_34306C.1.pep
FPGRTHARPPHRPSRTRLXXEDRXRRXDLLLPXXESVLVXMSXXVNWDAAPSXXSRRGCFXSLLXSTXWFXGSXINNPTTPRRXCQVX

SEQ ID NO: 212937 - protein, 646 aa, Glycine max
  Clone ID: PAT_MRT3847_34307C.1.pep
VVAEEFLEICGMEGSIPTGFKWRSRREVVDWLTSTLSKQNLQGDRSVSAGHNLVPSHEATNDSVNEIIGLSAQITDDKDFPTSNSKLSNSDIVWSGVAWRCGKQLKHYPAFFRNGIKIAIQSFVFVMGKGENHYIAYVEDMYEDRRGQKKIKVRWFHHNQEVKGVVPVRNPHPREVFITPYSQVISSECVDGSATVLTREDFEKCMPFFSPTSRDRIHLCFRQFRSNKIKPFDLSKLRGYYAQPILSCLHLDSIQHPEFLAREDEELSAGDDVKVGVKRRRGDKGSPQSWISRQGVRKLSRNKQMMVYKTFQVANYARSERILLSRKQVECQPWSNHTYKVDDKIELLCQDSGIRGCWFRCTVVQVARKQLKVQYDDVQDEDGSGNLEEWIPSFKLARPDKLGMRHSGRPTIRPAPTYEEQELAVEVGSAVDAWWSDGWWEGVVTRIDNCGDDSVEVHFPGECLLMNVCKKDLRISRDWLGDSWINIKAKPEITKSIFTANNSFNTKLSVSPSIAKDVDSVGFANSCHGDPVSKKSNEPVVIKEENFVSCDGSDKEENFVSCDGSAEDGDCVQDNKPSSEKSTQADNIDTHINCDNEENCGDNDNDNNSNDGGGNKNDDDNGNKDMGVFGTSGPDQETVELMEVAV

SEQ ID NO: 212938 - protein, 52 aa, Glycine max
  Clone ID: PAT_MRT3847_34308C.1.pep
PQLVGNFISIHGMDKLVLPSTNPLVCSYRFIVNKRSEVFTYRCCIVCSVSNR

SEQ ID NO: 212939 - protein, 40 aa, Glycine max
  Clone ID: PAT_MRT3847_34309C.1.pep
KNANANICKRKSIRNGRGRLYKLLTQYDAILEQLANNRCV

SEQ ID NO: 212940 - protein, 710 aa, Glycine max
  Clone ID: PAT_MRT3847_3430C.1.pep
FGSSAHTGSEIFKECVRGALKGKTIILVTHQVDFLHNVDQILVTRDGMIVQSGKYDELLDSGMDFKALVVAHETSMALVEQGQGVVMPGENLNKPMKSPEARNSGESNSLDRPVSSKKSSKLIKEEERETGKVSLHIYKLYCTEAFGWWGITVVLIFSLLWQASMMASDYWLAYETSEERAKMFNPSLFISIYAIITAVSIILVVIRSYIFTLLGLKTAQIFFTQILRSILRAPMSFFDTTPSGRILSRASTDQTNVDVLLPLFTGIVIAMYITVLSILIITCQNSWPTSFLIIPLIWLNIWYRGYYLATSRELTRLDSITKAPVIHHFSESIAGVMTIRSFRKQKNFCEENLKRVNDNLRMDFHNYSSNVWLGVRLELLGSFVFCISAMFMIILPSSIIKPENVGLSLSYGLSLNASLFWAVFMSCFIENKMVSVERIKQFTNIPSEPAWNIKDRMPPSNWPSQGNVDIKDLQVRYRLNTPLVLKGITLSISGGEKVGVVGRTGSGKSTLIQVFFRLVEPSRGKIIIDGIDISALGLHDLRSRFGIIPQEPVLFEGTIRSNIDPIGQYTDEEIWKSLERCQLKEVVATKPEKLDSLVVDNGENWSVGQRQLLCLGRVMLKRSRLLFMDEATASVDSQTDGVVQKIIREDFAACTIISIAHRIPTVMDCDRVLVVDAGRAKEFDKPSNLLQRQSLFGALVQEYANRSTEL

SEQ ID NO: 212941 - protein, 95 aa, Glycine max
  unsure (1)..(95): unsure at all Xaa locations
  Clone ID: PAT_MRT3847_34310C.1.pep
QLCIWVYLDYFYINSNISXWRSFYICGYISKTLLIPVIHNLCISIFTLNANFYFATAISYVCFHIILLFYSVSAILNHYIKLTNLYTPKLQYIKS

SEQ ID NO: 212942 - protein, 42 aa, Glycine max
  unsure (1)..(42): unsure at all Xaa locations
  Clone ID: PAT_MRT3847_34311C.1.pep
AYTAPNSXQRFRSLYTLHSRHRRSASNRSTLLHVTPIHPTDL

SEQ ID NO: 212943 - protein, 80 aa, Glycine max
  Clone ID: PAT_MRT3847_34312C.1.pep
RIVLDIERVLRKTIRLECDSLLVIQAFKKPSLVPWQFAGCWENCPFFFCKNIGFCLLSYIQGGGILALTFLTNYGYDSRD

SEQ ID NO: 212944 - protein, 96 aa, Glycine max
  unsure (1)..(96): unsure at all Xaa locations
  Clone ID: PAT_MRT3847_34313C.1.pep
CIPTIRSFFLRLKVVQLVSLLETKLLFSVNGPIXLNELFPXLNHMLKPNVEVVPPPKKDADKKEKEGGGGGGGGEKKEGGGEKKEKEGVGEKKKKK

SEQ ID NO: 212945 - protein, 64 aa, Glycine max
  unsure (1)..(64): unsure at all Xaa locations
  Clone ID: PAT_MRT3847_34314C.1.pep
KYTYKILIIHIITPNAIYLIHXSTISLQYDSSNDYITHVFHSHPTIIHTIKYTTFSTNYNPIHI

SEQ ID NO: 212946 - protein, 63 aa, Glycine max
  Clone ID: PAT_MRT3847_34315C.1.pep
KKNLLWQKKNKVRRLGFPGFAQNVERLLKKQRESSFVYAHPHQKEEGSKGKKGPFPSILGALS

SEQ ID NO: 212947 - protein, 57 aa, Glycine max
  Clone ID: PAT_MRT3847_34316C.1.pep
REATVNLISTLASSSVLQDNACRLTCIYRLKTRSYPKEQHSSQVVAQVCLLLMSLCS

SEQ ID NO: 212948 - protein, 79 aa, Glycine max
  Clone ID: PAT_MRT3847_34317C.1.pep
CSRMNCQTLIRVWHNGASISKCRDVERNRSFVEDAKQMAFSDHYIIACTIREVECYPKFQQASAVSNPSSRLFKSSTSC

SEQ ID NO: 212949 - protein, 128 aa, Glycine max
  unsure (1)..(128): unsure at all Xaa locations
  Clone ID: PAT_MRT3847_34318C.1.pep
PPVRAIGVNRLFILDSHEAFFPNWPKINSLPMAKANATGPILFWKDEGSLRPLVFELSRPAPVGKGVWPAPEGVXDLIGWWAKANVMGNDFGYXKLLGHGLNPHAGMEPLALAPNRHLRGLNPIIKLF

SEQ ID NO: 212950 - protein, 36 aa, Glycine max
  Clone ID: PAT_MRT3847_34319C.1.pep
HVQHSLAHAAGLSLLCYDPYGEDPPSIFATHQHYYV

SEQ ID NO: 212951 - protein, 112 aa, Glycine max
  Clone ID: PAT_MRT3847_3431C.1.pep
KKKKGTLHIPKRIFLKTKTPRNPPFSTQRGLINSFHKTFFYFRPQLAKPFFGSQTKGFTKTLEFSYSPATKKLNPLIPPQKMSPNPKWAKFFFPAGQILPKLVPVKKTLIFI

SEQ ID NO: 212952 - protein, 111 aa, Glycine max
  unsure (1)..(111): unsure at all Xaa locations
  Clone ID: PAT_MRT3847_34320C.1.pep
NWARDGCEKPTEGKKEAEVIEKKKEVEVTEEKKDIEVTEEKKEAEVIEQKKEVEVSEEKKEIEVPEEKKEAXVKEEKKEGEVTEEKKEVEVTEEKKEAEVIVEEKKEVEVP

SEQ ID NO: 212953 - protein, 106 aa, Glycine max
  Clone ID: PAT_MRT3847_34321C.1.pep
YTALFYLYFVFCMIVFLLISTSLTRDQPYAALCLYVRTTAVCSTATQKDLFYPCRSAHATSYILPQIPLSPQAHHLHFRMLRLCSSAAMIHHHNLIYTLIIHIVSS

SEQ ID NO: 212954 - protein, 57 aa, Glycine max
  Clone ID: PAT_MRT3847_34322C.1.pep
CNGGSSYTHISLGLIKGACSVGGVFRCGCTFGVIGEFFHSQALMKRKHPARLDYLRR

SEQ ID NO: 212955 - protein, 57 aa, Glycine max
  Clone ID: PAT_MRT3847_34323C.1.pep
ATCVFGVSRRCGWKYDMHRLSKNVPLPLSFPHLSVLNFLVTRGIRASVSGCRGQFVF

SEQ ID NO: 212956 - protein, 48 aa, Glycine max
  Clone ID: PAT_MRT3847_34324C.1.pep
LEHKIQSHTMSALVHSISSLQYYVFLLWALLKTEHTISQGIYRGNEKW

SEQ ID NO: 212957 - protein, 193 aa, Glycine max
  Clone ID: PAT_MRT3847_34325C.1.pep
MGQAFRKLFDTFFGNTEMRVVMLGLDAAGKTTILYKLHIGEVLSTVPTIGFNVEKVQYKNVIFTVWDVGGQEKLRPLWRHYFNNTDGLIYVVDSLDRERIGKAKQEFQTIINDPFMLNSVILVFANKQDLRGAMTPMEVCEGLGLFDLKNRKWHIQGTCALKGDGLYEGLDWLASTLKERKAAGYSSIGTSSF

SEQ ID NO: 212958 - protein, 94 aa, Glycine max
  Clone ID: PAT_MRT3847_34326C.1.pep
NPDSRCKSQSPKTHTYYLLQNISYKYHTFPLCKPTLRVRGFPEPPSHPSLFSSFLHRPHCNTHILLTPKPSQRKPSLVVKSTVEVADPSPSSSS

SEQ ID NO: 212959 - protein, 122 aa, Glycine max
  Clone ID: PAT_MRT3847_34327C.1.pep
SEDPEISSNNHALIVPAHMNHGNRVHPMPYNDPSIPLQPKPMAPKKDIAVYGYGSVAWKDRMEEWKKRQSDKLQVVKHERSNDGNFGDDFEDSDLPMMDESRQPLSRKLPIPSSKINPYRMI

SEQ ID NO: 212960 - protein, 120 aa, Glycine max
  Clone ID: PAT_MRT3847_34328C.1.pep
SQSHPRRRRKNRGRKKSPNQRRRNSSTRFSWSHYLTRYSWSSSTVSSSPSMSAMPSPSTSTPSRTIEGVLVPIKSESLSTSKVLFFYFFSHLIFTHLCIASMAQIQVQARQSVEGRIISP

SEQ ID NO: 212961 - protein, 169 aa, Glycine max
  unsure (1)..(169): unsure at all Xaa locations
  Clone ID: PAT_MRT3847_34329C.1.pep
GTLKSVAPGNFEXRHWGIFEFDGKPKYELDLIGQHKEKGLVPVEDIKYMEKRWCILNPDVTKLDDLAGSIDYACTFSDCTSLGYGSTCNNLSVQGNASYAFNMYYQVNNQQNWDCDFSGLAVITHKDPSQNGCQFPVMISSSSSLLLHGGLSEILKKALRVYIFVMFLL

SEQ ID NO: 212962 - protein, 63 aa, Glycine max
  Clone ID: PAT_MRT3847_3432C.1.pep
VKDQYITQAKNKNQLKINIFHLCYALFWNFEKFHNVSVIGSVIYIFLEYPSVVFSQPYGRVGA

SEQ ID NO: 212963 - protein, 50 aa, Glycine max
  Clone ID: PAT_MRT3847_34330C.1.pep
KNKTRGSRLLLITPQELYITVSVAIHLKGMFHLSCSNEYRIPLFCTFRIA

SEQ ID NO: 212964 - protein, 131 aa, Glycine max
  Clone ID: PAT_MRT3847_34331C.1.pep
LISLQTPCILSFFTTMTFEEKTIYQTSLASIPNYTLLECVLGLCFKVITILLQLPYEYIDNNPIPTIVFKGRPRTFHAFITCIIFAFSGATNALVAFNKSRFSRLCGYYAMASMASALAILLWAVCCTGIN

SEQ ID NO: 212965 - protein, 87 aa, Glycine max
  Clone ID: PAT_MRT3847_34332C.1.pep
MVHRDRPYLFADFSKESCPTVKNILLLDSEGKRVAVKYFSDDWPTNASKLAYEKSVFTKTLKTNARTEAEITLFDGYIVVYKFVHDL

SEQ ID NO: 212966 - protein, 51 aa, Glycine max
  Clone ID: PAT_MRT3847_34333C.1.pep
IQRIFPGPGVEIVFPVFSPPFKEFKGVSPRKVRGAKLFYLRDKLPRFSPFK

SEQ ID NO: 212967 - protein, 56 aa, Glycine max
  unsure (1)..(56): unsure at all Xaa locations
  Clone ID: PAT_MRT3847_34334C.1.pep
MRLLSTKATCNSHGQDSSYFLGWQEYEMNPYDEVLNPXGIIQMGLAENQLSFDLLE

SEQ ID NO: 212968 - protein, 110 aa, Glycine max
  unsure (1)..(110): unsure at all Xaa locations
  Clone ID: PAT_MRT3847_34335C.1.pep
MRLLSTKATCNSHGQDSSYFLGWQEYEKNPYDEVLNPKGIIQMGLAENQLSFDLLESWLEKNPDVAGFKSEGKSIFRELALXQDYHGLPSFKKALVDFMAEIRGNKVTFD

SEQ ID NO: 212969 - protein, 63 aa, Glycine max
  Clone ID: PAT_MRT3847_34336C.1.pep
KKKQKLNKSGNGDGRETSVIENNISFPTLTSPDLIESQPSAQKNSNTYNCKYLPQCSNQTEPR

SEQ ID NO: 212970 - protein, 74 aa, Glycine max
  Clone ID: PAT_MRT3847_34337C.1.pep
PRKTTQGFIFFKKKIQGPTNTPNKRELFLFLKTFLLGETFFFWKNLKKKNPPEKGGAGFITNFTKGKTGYSLTP

SEQ ID NO: 212971 - protein, 38 aa, Glycine max
  Clone ID: PAT_MRT3847_34338C.1.pep
EVVQFLCLPRKKVKLGRLMGRARGGTKTHLGQPHVLIC

SEQ ID NO: 212972 - protein, 80 aa, Glycine max
  Clone ID: PAT_MRT3847_34339C.1.pep
SCSALYPALFDRFFFCFFVGVSVSVGPPYIFLRAFCPLLKGPSNRPVFLVLFGGFNYLGFSLFTLVLQKKQIIKKHKMSK

SEQ ID NO: 212973 - protein, 62 aa, Glycine max
  Clone ID: PAT_MRT3847_3433C.1.pep
HKEAIVLLAAQIRGRKGIKYIQLKSMGTILICSMGCIFTNLREHWCPFFLEFPRGLRAYHTS

SEQ ID NO: 212974 - protein, 69 aa, Glycine max
  Clone ID: PAT_MRT3847_34340C.1.pep
IYLYVAARPDISTQVRPTTQPLTYTTIIQHLLLGKSVSGISVTTTLKDTHVSSVFFFGVVCPLHPTPFV

SEQ ID NO: 212975 - protein, 28 aa, Glycine max
  Clone ID: PAT_MRT3847_34341C.1.pep
PVRIFGRRTPIYCSTILYCTNISAILKL

SEQ ID NO: 212976 - protein, 76 aa, Glycine max
  unsure (1)..(76): unsure at all Xaa locations
  Clone ID: PAT_MRT3847_34342C.1.pep
CTYEENTLWGKKMGLQYGCAVQDVITGLSIKCRXWKSVYYNPQRRAFLGVSPTTLLESLVQLKRRSEGGFQIVLSR

SEQ ID NO: 212977 - protein, 294 aa, Glycine max
  unsure (1)..(294): unsure at all Xaa locations
  Clone ID: PAT_MRT3847_34343C.1.pep
PRVRAEGRGSRNLKIRFREGGKHWTDAVPIGNGRLGAMVCGHVHSETIHLNEDTLWTGTPADYTNSKAPPALSHVRNLVHRQHYPQATAASSALTGNPSEAYLLLGDIQLDFDYSHLTPGLQQPYERELDLDTATVKVRYSVGDVQFTREHFASYPDQLIVTQISSSKPAKLSFTVSLLSKIINQTYVNAPNQIIMKGSCPGKRIQHNPHGIQFSAILGFEXSVAQNGVIHILDNNKLKVEAXNWAVYFLGASSXFSGPFTAPSDSXKDXYVFMVSXIELIKHVSYSHLYARHL

SEQ ID NO: 212978 - protein, 42 aa, Glycine max
  Clone ID: PAT_MRT3847_34344C.1.pep
LFHPLKFFRQITGFNYSVPRTPSLKPTSKACPEKGRNQKPFQ

SEQ ID NO: 212979 - protein, 69 aa, Glycine max
  unsure (1)..(69): unsure at all Xaa locations
  Clone ID: PAT_MRT3847_34345C.1.pep
ITLIFVIAIRIEDLMIWPHQLEPLNLDSPTKQATNSDNLESKPVHMIEMLHRTYYLLMILTRXYEKDDS

SEQ ID NO: 212980 - protein, 205 aa, Glycine max
  Clone ID: PAT_MRT3847_34346C.1.pep
MAVPVEEAIAALSTFSLEDEQPEVQGPGVWVSTERGATESPIEYSDVSAYRLSLSEDTKALNQLNALTQEGKEMASVLYTYRSCVKALPQLPDSMKQSQADLYLETYQVLDLEMSRLREIQRWQASASSKLAADMQRFSRPERRINGPTISHLWSMLKLLDVLVQLDHLKNAKASIPNDFSWYKRTFTQVSGQWADTDSMREGIR

SEQ ID NO: 212981 - protein, 84 aa, Glycine max
  unsure (1)..(84): unsure at all Xaa locations
  Clone ID: PAT_MRT3847_34347C.1.pep
SSAVNNRSSDIKKKIRTALVKGKKIAFHTRGDPFPVAXLAVLYGVKXEILSSNATNPMLTRLRWNCNSLKYLVXDQSPIAFVTS

SEQ ID NO: 212982 - protein, 70 aa, Glycine max
  Clone ID: PAT_MRT3847_34348C.1.pep
NNKFLFFPFWRGGLLTWSSKSLKCPFCLSVGLGESLDFCWYPRSADIVIKLEYHLKISIMVNESTVFAHP

SEQ ID NO: 212983 - protein, 142 aa, Glycine max
  Clone ID: PAT_MRT3847_34349C.1.pep
MHASHLNQPECGSYSSCQLNLVAQDTSNQMSRRDPLRCYMDVIDDMLTQMFREDPSFKPQGGRLGESDIDYDTDEKSMATLRRHLRGATEEYYSVYMTYVLEALQLEDKIKNYERRNSTGWKYISSFRPARTGKFGSLCDTL

SEQ ID NO: 212984 - protein, 21 aa, Glycine max
  Clone ID: PAT_MRT3847_3434C.1.pep
RIEECTFCIRETSIVGVYSLK

SEQ ID NO: 212985 - protein, 189 aa, Glycine max
  unsure (1)..(189): unsure at all Xaa locations
  Clone ID: PAT_MRT3847_34350C.1.pep
MDAASQLVSCGIDPFPRATSPSPRHRRKSNLLNLRQRSSRVFAVSAEPKPAPPKTAVNGANSRPPPTRAVNGVSTRIGDVSKEIKRVRAQMEEDEQLATLMRGLRGQNLRDSLFAEDDVELRLVEVDESSEFLPLVYDPASISAYWGKRPRLRCTRIGQLLSVARGFLSRIAWDVINKKXKEIEVARAI

SEQ ID NO: 212986 - protein, 295 aa, Glycine max
  Clone ID: PAT_MRT3847_34351C.1.pep
MGCGSSKLEDLPAVALCRERCGFLDEAIHQRYALAAAHMAYINSLKAIGHSLHLFIQQDMDAPPSPSPSPSPSPPHKPSKHASSSHSDSAGSHLHFHSDSDSDHLPSLHHSPDPSSPLPHHLHMNYMKNKAAPSIVYEQRPLSPQTMYLGESSSSSSFYPYQYPPYPYPYDPYSAVGSSSPQLHAVSKPPPPPPSPPRSSTWDFLNFFDNSDDKYYPQTHYPATATPSRDSREVREEEGIPDLEDEDYHHEVVKQVHGDQKLVQPTMHEPPASSRHHDEDDDDDDDDDDDDDEVE

SEQ ID NO: 212987 - protein, 235 aa, Glycine max
  unsure (1)..(235): unsure at all Xaa locations
  Clone ID: PAT_MRT3847_34352C.1.pep
EKMEPEKLYDSVDFILSLQSKNGGIPAWEPVRSQKWLEXSAIQSLVFFKSLYPEYRKKEIENFINKAVQFLEDEQSTDGSWSGKWGVYSTYSSWFALRGLAAAGKTYTNCVTIRKAVKFLLSIQTEDGGWGESYLSGAKNTYVPLEGNRSNVVQTAWALMALIHAGQAEKDPTPIHNAAKLLINSQLEDGDWPQQEVTGLFLKTGALHYPLYRNYFPMWALSEYRKKVMLPCTAA

SEQ ID NO: 212988 - protein, 53 aa, Glycine max
  Clone ID: PAT_MRT3847_34353C.1.pep
FNFLLFFFFIFFYFFFFRNVIHRYIPQLMTRNNKSLFYYFRQPMSNTHKILLP

SEQ ID NO: 212989 - protein, 42 aa, Glycine max
  Clone ID: PAT_MRT3847_34354C.1.pep
MMKIRNNSFRVTLKITYPSYLYIICEYYYCFCLANAPQTLVT

SEQ ID NO: 212990 - protein, 213 aa, Glycine max
  Clone ID: PAT_MRT3847_34355C.1.pep
MAYVDVIRLQFQSFFFSPSPLSAKRLFYPLAYSSSRPAPPATLAFPPRKHLLSFKVSATVAETGQPKWWEKNAPNMIDIHSTQEFLSAMSQAGDRLVIVEFYGTWCASCRALFPKLCRTAEEHPEIVFLKVNFDENKPMCKRLNVKVLPYFHFYRGTEGQLESFSCSLAKFQKIKDAIEIHNTARCSIGPPVSIGDLLAEPSSVAKDRPAESV

SEQ ID NO: 212991 - protein, 79 aa, Glycine max
  Clone ID: PAT_MRT3847_34356C.1.pep
KFSRELSLELGGRLIACGSRKVEGIRKKRAKKFDTIMNTKVRSPLVFAAVIRVFNPSSKKSSCNHCCGYTHSYTHHFLT

SEQ ID NO: 212992 - protein, 148 aa, Glycine max
  Clone ID: PAT_MRT3847_34357C.1.pep
MIISQLSKLFIFFFICITLICFSSSSNFPVQYSILGPNLDKLPSQDETIQLFQLWRKEHGLVYKDLKEMAKRFEIFLSNLNYIIEFNAKRSSPSGYLLGLNNFADWSPSEFQEIYLHSLDMPTDSAPKLNGPLLSCIAPASVDWRIKE

SEQ ID NO: 212993 - protein, 253 aa, Glycine max
  Clone ID: PAT_MRT3847_34358C.1.pep
MDRSSMHGFISSRVDATGPGSFPVKSSAKNRDPRPGFINSDASAVDNLSTLINNMSKVEYSGTTISRKQKAAEEPSLDVTVSKRLKSSLENTEHNMSEVRTGSGGWLEENTGPGAQLIERNHLMDKFGPEAKKTLNTVSSSCTGSDNFNATSIRNEQAPITASNVLASLPALLKEASVNPIMLVNILRLAEAQKKSADSAAIMLLHPTSSNPAMGTDSTARYWFINGHWSSSKFCWNASCFITINFHGTNPTR

SEQ ID NO: 212994 - protein, 75 aa, Glycine max
  Clone ID: PAT_MRT3847_34359C.1.pep
PGPSPGWPPDLKIYPLATGLRDFFPRNPGGPTYPFFFNLDPKKESFERGGLELGPIPFLSFLGLGKTPLKNWAKF

SEQ ID NO: 212995 - protein, 147 aa, Glycine max
  Clone ID: PAT_MRT3847_3435C.1.pep
MFGVLRSKAGPLRRLPSLSVPLRRRSSKAAAAMGEVDMAEYDVALKHFDDLIQRILVKKNTPDWLPFVPGSSFWVPPRPSHSNVADLVHKLTYEDHRRHPHDCSPLLSTLRGWPSVNFFIDDGTNGTVKVKVLTFSENVAHSEDEEG

SEQ ID NO: 212996 - protein, 159 aa, Glycine max
  unsure (1)..(159): unsure at all Xaa locations
  Clone ID: PAT_MRT3847_34360C.1.pep
VCHRGRPTEKTQAKTAHPGETQKKKRPPHGHKPKRRGRRGGPEKAGPPNGTRRQRGGPHRGPKHRRAPQTKRNPKGXKTGTKNSPRRAKKSGGSPEQAPTNGGPYRLEPNRGHRPILSAPKRRPTCKXPREGPRKSQGKTLKRGTPGRPEGPPRKPGTG

SEQ ID NO: 212997 - protein, 125 aa, Glycine max
  Clone ID: PAT_MRT3847_34361C.1.pep
MESNHSMRQNTMETEFEDLLPVMAEKLDVESFVSELCGGFKLLSDPETGLITSESLRTNSALLGMEGMSKEDAEAMVRQGDLDGDGKLNETEFCILMVRLSPGMMEDAESWLEKAIDEELSKSSS

SEQ ID NO: 212998 - protein, 125 aa, Glycine max
  Clone ID: PAT_MRT3847_34362C.1.pep
MESSHNMRQSTMETEFEDLLPVMAEKLDVESFVSELCGGFKLLSDPETGLITSESLRTNSALLGMEGMSKEDADAMVRQGDLDGDGKLNETEFCILMVRLSPGMMEDAESWLEKAIDEELRKSSS

SEQ ID NO: 212999 - protein, 85 aa, Glycine max
  Clone ID: PAT_MRT3847_34363C.1.pep
EKKTRQSTVWFVSSYVNKTKTTSPTKRACERACVNRVVQLLLCINLHNDLLSLHQKKKKKNLFKEAFTKEQGRKVVEEEKEGGGK

SEQ ID NO: 213000 - protein, 97 aa, Glycine max
  unsure (1)..(97): unsure at all Xaa locations
  Clone ID: PAT_MRT3847_34364C.1.pep
MSSFVGVLVSDPWLQSQFTQVELQTLKSKXRTQSGRVTVGNFRPIFKKLKGFSELFTEDEIKDALAESHQNMDEEIDFESFLRVSFCFLFLFYPLRS

SEQ ID NO: 213001 - protein, 47 aa, Glycine max
  Clone ID: PAT_MRT3847_34365C.1.pep
MSLIWGIFIFKLDIYNLYLKFSHSSYLLSHYSVFWVGLSSLLSGIDN

SEQ ID NO: 213002 - protein, 135 aa, Glycine max
  unsure (1)..(135): unsure at all Xaa locations
  Clone ID: PAT_MRT3847_34366C.1.pep
LKLGLAPFPEFEAFAPFAFGFGKGSPNPFPRGPPLGGVVXQSPTGPLSGGGPVIPFFSGAEGFFFSFKIGPGREFLVGVRGFFTPDYPPFQEIFFFSPPFPGGAEGPFKGGFPDPGGPFFFPGPGGKKWFSPLNP

SEQ ID NO: 213003 - protein, 81 aa, Glycine max
  Clone ID: PAT_MRT3847_34367C.1.pep
IAGMSSIGPYVKQPGEPTRGQTGREHKKGPCFLLNLNQKLVFPRPPVFCFKSASRENTIPPQVFKEALRKILVPIYPLVAP

SEQ ID NO: 213004 - protein, 124 aa, Glycine max
  Clone ID: PAT_MRT3847_34368C.1.pep
GSRPYVGDSKRAMDEYTSEIFMGGKNTIVLHNTCEDSLLAAPIILDLVLLAELSTRIQFKAENEGKFHSFHPVATILSYLTKAPLVPPGTPVVNALSKQRAMLENIMRACVGLAPENNMILEYK

SEQ ID NO: 213005 - protein, 126 aa, Glycine max
  Clone ID: PAT_MRT3847_34369C.1.pep
MPFWAPLKSSLSTKLLNITGYSLCKAKQILNAETAIVDGIRLGVLPDVVTYNTLIDAYCRFATLDVAYSVLARMHDAGIPTDVVSFNTLICGAVRETLISKSLDLFDEMLRRGINPDAWSHSILMN

SEQ ID NO: 213006 - protein, 166 aa, Glycine max
  Clone ID: PAT_MRT3847_3436C.1.pep
MLGVLRSKAGFLRRLTSLSVPLRHRSSKAAAAGGHVVEVDMAEYDVALKHFDDLIQRILVKKNTPDWLPFVPGSSFWVPPRLSPSNVADLVHKLSYEDHRHPHDCSPLLSTLRGWPSDNFFIDENESTDGEDTDIEINGPDGTNGTVKVKVLTFSENVAHSEDEEG

SEQ ID NO: 213007 - protein, 38 aa, Glycine max
  Clone ID: PAT_MRT3847_34370C.1.pep
SGKCAGEKVGFPGHLIYHKRDCGDLKHIRSWADILERK

SEQ ID NO: 213008 - protein, 78 aa, Glycine max
  unsure (1)..(78): unsure at all Xaa locations
  Clone ID: PAT_MRT3847_34371C.1.pep
CFFSSLLRSLCCGDCSREIPTPFHPVATILXSYLTKAPLVPPGTPVVNALSKQRAMLENIMRACVGLAPENNMILEYK

SEQ ID NO: 213009 - protein, 511 aa, Glycine max
  unsure (1)..(511): unsure at all Xaa locations
  Clone ID: PAT_MRT3847_34372C.1.pep
MFIENFKVECPNVKYTETEIQSVYNYETTELVHENRNGTYQWIVKPKSVKYEFKTNIHVPKLGVMLVGWGXGNNGSTLTGGVIANREGISWATKDKIQQANYFGSLTQASAIRVGSFQGEEIYAPFKSLLPMVNPDDIVFGGWDISNMNLADAMARAKVFDIDLQKQLRPYMESMLPLPGIYDPDFIAANQEERANNVIKGTKQEQVQQIIKDIKAFKEATKVDKVVVLWTANTERYSNLVVGLNDTMENLLAAVDRNEAEISPSTLYAIACVMENVPFINGSPQNTFVPGLIDLAIARNTLIGGDDFKSGQTKMKSVLVDFLVGAGIKPTSIVSYNHLGNNDGMNLSAPQTFRSKEISKSNVVDDMVNSNAILYEPGEHPDHVVVIKYVPYVGDSKRAMDEYTSEIFMGGKSTIVLHNTCEDSLLAAPIILDLVLLAELSTRIEFKAENEGKFHSFHPVATILSYLTKAPLVPPGTPVVNALSKQRAMLENIMRACVGLAPENNMILEYK

SEQ ID NO: 213010 - protein, 56 aa, Glycine max
  unsure (1)..(56): unsure at all Xaa locations
  Clone ID: PAT_MRT3847_34373C.1.pep
NSXXSSKISKKNILLLXLXLNAAYLCLFFPEEIYQFCHFLLFFPELFITLTRNKKR

SEQ ID NO: 213011 - protein, 51 aa, Glycine max
  unsure (1)..(51): unsure at all Xaa locations
  Clone ID: PAT_MRT3847_34374C.1.pep
AGDLIYPLPLEKYXNSXDXGFXXKTMISPGXWQXXPXXXYYIXSHXDNQIX

SEQ ID NO: 213012 - protein, 96 aa, Glycine max
  unsure (1)..(96): unsure at all Xaa locations
  Clone ID: PAT_MRT3847_34375C.1.pep
RCLQLEEIGLSILLRKLTFLNLRNSKSLIRLPQFGEDLILKKLYLEGCQSLRHIDQSIGFLXNLGHLNIENCRRLIRIDPSICLLERLRELDLKNC

SEQ ID NO: 213013 - protein, 58 aa, Glycine max
  Clone ID: PAT_MRT3847_34376C.1.pep
CSMSSVQRSWSPWIPPVSWIFTYKMWMASMLYASSESLLHVTVYTNMSVAHINLHIST

SEQ ID NO: 213014 - protein, 60 aa, Glycine max
  unsure (1)..(60): unsure at all Xaa locations
  Clone ID: PAT_MRT3847_34377C.1.pep
YLTQNERARIICSIAFKISMNAPLMGXLAAETDPLXLLRXELQEHNMPFTIQNSLPYGCY

SEQ ID NO: 213015 - protein, 70 aa, Glycine max
  Clone ID: PAT_MRT3847_34378C.1.pep
STDGDLANGNSYLEVLNLYLIIIIIAYYCGILLVRLRFELNTVVRDSTSGPRTGESSMECIAESRLYVCV

SEQ ID NO: 213016 - protein, 81 aa, Glycine max
  Clone ID: PAT_MRT3847_34379C.1.pep
APTRPRVCSIIAVKLGRKNKMHLIMAGSEILKDIGSRNGAVFKLFLHNWTHTLLGDKALGSGQKIYYDVQREIYNHISLQH

SEQ ID NO: 213017 - protein, 164 aa, Glycine max
  Clone ID: PAT_MRT3847_3437C.1.pep
MFGVLRSKAGPLRRLPSLSVPLRRRSSKAAAAMGEVDMAEYDVALKHFDDLIQRILVKKNTPDWLPFVPGSSFWVPPRPSHSNVADLVHKLTYEDHRRHPHDCSPLLSTLRGWPSVNFFIDENESTDGEDTDIEINGPDGTNGTVKVKVLTFSENVAHSEDEEG

SEQ ID NO: 213018 - protein, 53 aa, Glycine max
  Clone ID: PAT_MRT3847_34380C.1.pep
VLKDYADALLYSGCTCGTETKQPGNHVVGICLNQDTTVRLKICSIEDGTLLKP

SEQ ID NO: 213019 - protein, 106 aa, Glycine max
  Clone ID: PAT_MRT3847_34381C.1.pep
IHKKHASFIFLVKPPFQTRHYLTFVPFTKNPKKGFHPLKPPLKAGTPPFWAPKTPLINGGPWPPNKTQKKSSLNTHGPPPKPPNKTPPGGKKTPPLTPSPGKKTPL

SEQ ID NO: 213020 - protein, 66 aa, Glycine max
  Clone ID: PAT_MRT3847_34382C.1.pep
PIVDKFPLMNKSNAFRYTKIMLVHWCIDFVLKLLIGVQAVLSMAEHDRRLKFHHINTSLHLMVPPW

SEQ ID NO: 213021 - protein, 99 aa, Glycine max
  unsure (1)..(99): unsure at all Xaa locations
  Clone ID: PAT_MRT3847_34383C.1.pep
MPNPKVVFDMTIGGQSAGRIEMELYADVTPRTDENFRALCTGEKGVRRSGKPLHYKGSAFHRGIPSFMCQGGDFTVGNGTGGGDEXGAKFGHTNLVKKH

SEQ ID NO: 213022 - protein, 151 aa, Glycine max
  Clone ID: PAT_MRT3847_34384C.1.pep
MAGTVTVPSASVPSTPLLKDELDIVIPTIRNLDFLEMWRPFFQPYHLIIVQDGDPTKTIRVPEGFDYELYNRNDINRILGPKASCISFKDSACRCFGYMVSKKKYVFTIDDDCFVAKDPSGKDINALEQHIKNLLSPSTPFFFNTLYDPYR

SEQ ID NO: 213023 - protein, 64 aa, Glycine max
  Clone ID: PAT_MRT3847_34385C.1.pep
WFCFVRYDNITGTGLVNLHYNSITHEPKILEMDLEILIFTSPSEKDGGHNMLCDLCLMQASCMA

SEQ ID NO: 213024 - protein, 142 aa, Glycine max
  unsure (1)..(142): unsure at all Xaa locations
  Clone ID: PAT_MRT3847_34386C.1.pep
SATASTKLATLGLXFWLTEXDISKTLDEDAQANYSEEVLREGFSHPSVNGIMLWTALHPNGCYQMCLTDNNFKNLPAGDAVDKLLQEWQTGRVEGVSDVHGSYSFYGFLGEYRISVKYGNKTTKSTFSLSRGDETRHFTITI

SEQ ID NO: 213025 - protein, 41 aa, Glycine max
  Clone ID: PAT_MRT3847_34387C.1.pep
KFAKIMNLRQCVYGEFQLLTYWKLYEGKHIPVSNISAGDIL

SEQ ID NO: 213026 - protein, 47 aa, Glycine max
  Clone ID: PAT_MRT3847_34388C.1.pep
LMHLLAELVRECSPSVGQKDVMGRKLAWYHNTGVHVMDAVTTIGKDA

SEQ ID NO: 213027 - protein, 211 aa, Glycine max
  Clone ID: PAT_MRT3847_34389C.1.pep
MEESKKRVRDESSYSPESQTQLVDSPESESQRVDSPESKIRRVDSSESQLDSVLDSEVRLQDDIFNILDDADNVPERDSVQGLDSVIKSFEDEINAPGSDSGSGDPTQEPDSGELQSNLGYLLEASDDELGLPPTVVDGEETGRVGPEMTELARLMGFEDDIPSYDAFGFGSGFAAESDGGAGGFVTVDGLFDYSDPAADVLWRSESLQAM

SEQ ID NO: 213028 - protein, 111 aa, Glycine max
  Clone ID: PAT_MRT3847_3438C.1.pep
SPSPHAPTILEDPMTSWFPCRKEENVPPLGDACTKQYSGRHGMQDHFPFSLRVHKSPRPISERLDNSTPSSHLAQRGFLRLNQQTVVYKISKWKSATSSGKINPFKKKKKD

SEQ ID NO: 213029 - protein, 207 aa, Glycine max
  Clone ID: PAT_MRT3847_34390C.1.pep
MENHGNKRVWDQSSDSNTQRVDSPESKIRRVDSSDSGINSSESQLESVLDSSEVQLQDDIFNMLDDTDNVPERDSVQGLDSVIKSFEDEINAPGSDSGSGDPAQEPDSGELQSNLGYLLEASDDELGLPPTVGDGEEMGRAAPEMAELARFVGFEDDIPSYDAFGFGSGFTAENDGGAGGFVTVDGLFDYSDPSADVLWRSESLQAM

SEQ ID NO: 213030 - protein, 74 aa, Glycine max
  unsure (1)..(74): unsure at all Xaa locations
  Clone ID: PAT_MRT3847_34391C.1.pep
XFARPTVVLNQXXSXXRXXQHMXNRKCXCXMSXXGRRRKRRSDRWEENVQASVYXXGXVXGSSVLRVSLTAXXC

SEQ ID NO: 213031 - protein, 550 aa, Glycine max
  unsure (1)..(550): unsure at all Xaa locations
  Clone ID: PAT_MRT3847_34392C.1.pep
EEDPGWYSRASNSVLDPVVDVQMNHNSKVEPVIENANAYPEIKTISTENGSHVGTQDKDVVIEGFGSVGVYDQWVAPPVSGQRPKARYEHGAAVVQDKLYIYGGNHNGRYLNDLHVLDLRSWTWSKIEAETSLDEILETCPPLTLCKGFRLWEQKLLSIAGHTKNPSESIGVKDFXIFNATWSTLKNYGKAPVSRGEQSVNIVGKILVIFGGQDAKRTLLNDLHILDLETMTWDEIDAVGVPPSPRSDHTAAVHVDRYLLIFGGGSHATCYNDLHVLDLQTMEWSRPTQLGEIPSPRAGHAGVTVGENWFIVGGGDNKSGVSETVVLNMSTLTWSVVTSVQGRVPVASEGLSLVVSSYDGEDVLVSFGGYNGRYNNEVYVLKPSHKSTLQSKIIENSIPDSVSAIPNVTNELVMDSVDSIKSKGDVITVLKVEKEDLESSLYKEKLQTLQLKQELSETETRNSDLCKELQSIRGQLASEQSRCFKLEVEVAELSQKLQTIGTLQKELELLQRQKAASELAALNAKQKQGSGGVWGWLAGAPPPTQKEDDG

SEQ ID NO: 213032 - protein, 239 aa, Glycine max
  unsure (1)..(239): unsure at all Xaa locations
  Clone ID: PAT_MRT3847_34393C.1.pep
EEDPGWYSRASNSVLDPVVDVQMNHNSKVEPVIENANAYPEIKTISTENGSHVGTQDKDVVIEGFGSVGVYDQWVAPPVSGQRPKARYEHGAAVVQDKLYIYGGNHNGRYLNDLHVLDLRSWTWSKIEAEVVESTNSSSITFPCAGHSLIPWENKLLSIAGHTKDPNESIQVKVFDLPNATWTTLKTYGKPPVSRGGQSVTFVGYSLVIFGXENMQRETLLNDLHILDLETMTXDENDA

SEQ ID NO: 213033 - protein, 66 aa, Glycine max
  Clone ID: PAT_MRT3847_34394C.1.pep
GFPPWLPSLVLFYNPPLGFFMLINLFDGLFSLYQRKTHQRNFELSKQKNQQNRIRISPKKNKQNTK

SEQ ID NO: 213034 - protein, 42 aa, Glycine max
  Clone ID: PAT_MRT3847_34395C.1.pep
RAVKISPASCLFPGHQTQFTDPPHEDMREHLLIRIWKVFPLR

SEQ ID NO: 213035 - protein, 52 aa, Glycine max
  Clone ID: PAT_MRT3847_34396C.1.pep
FGSCSSSQVRYKHNMHPSQWSAAVTQVCQYDFKMFYFACPTTLCDFYAFQCN

SEQ ID NO: 213036 - protein, 84 aa, Glycine max
  Clone ID: PAT_MRT3847_34397C.1.pep
NIFSDKFSRHGSTRCNNDKYARASYDRPNGLVAKLLGEKLLVKITDSRNHFIRLFFFLSYFNKLFDSFYFLAPPWSIGGGEKVL

SEQ ID NO: 213037 - protein, 61 aa, Glycine max
  unsure (1)..(61): unsure at all Xaa locations
  Clone ID: PAT_MRT3847_34398C.1.pep
XEXKPLNCPIXPNXXXXXXPLWILMXGXSXXRXWVLTPXRXRKSDPPXVFXXNLXHQRSRG

SEQ ID NO: 213038 - protein, 102 aa, Glycine max
  unsure (1)..(102): unsure at all Xaa locations
  Clone ID: PAT_MRT3847_34399C.1.pep
YALCITWNIASXVNSTRIQGEGVNIWMLAIIYVIAXIPGAYVSRHRPLYQTFRTDSSSNLGWMILFYLLYLRFCILTARATLISFKGKSLTGMLLVIHVVGD

SEQ ID NO: 213039 - protein, 62 aa, Glycine max
  unsure (1)..(62): unsure at all Xaa locations
  Clone ID: PAT_MRT3847_3439C.1.pep
FCYIRINKTNSLIISNFWDVSFFFYSXQWHXVIXVAYLTQXYKTLHXCSFIXIFFIYLFSKD

SEQ ID NO: 213040 - protein, 67 aa, Glycine max
  Clone ID: PAT_MRT3847_343C.1.pep
IVRGIHIKIRIIHLFTNNTGKYFSTKDLKISRSLFHIIHNIKMNTYITKLHRQCVCKYIYPSCSSFQ

SEQ ID NO: 213041 - protein, 127 aa, Glycine max
  unsure (1)..(127): unsure at all Xaa locations
  Clone ID: PAT_MRT3847_34400C.1.pep
MSLLRASIRRLAYANVDYDHIVGWRTSSIIRETEPAKSXDANNETYPHVGYEEHCKXCADAEQWDSSECNSYLKIDEDLDTRLSRISWEKGDTTFHIRQHIFHSHSIIHVIVQITQILGADVIHHMI

SEQ ID NO: 213042 - protein, 66 aa, Glycine max
  Clone ID: PAT_MRT3847_34401C.1.pep
KTTEWPSYLWDILPTHFPLRRRSVLLHQLGSHCLEFAVTGTFYGSYILNPRSVTNAHVPNHLDAIF

SEQ ID NO: 213043 - protein, 65 aa, Glycine max
  Clone ID: PAT_MRT3847_34402C.1.pep
PIRELAARLHHSQRSILVSSLCYCYSTASSCYHWQHAVIDTVLKLIAVTVVHMIIISVGMMVDMS

SEQ ID NO: 213044 - protein, 74 aa, Glycine max
  Clone ID: PAT_MRT3847_34403C.1.pep
IIRVFENLCSTKKHGDIRLSHACVHLSRYFTPLFQLHQFLCYDVKRKKQKMMLLSELHQLLRRKANMWGQEFIH

SEQ ID NO: 213045 - protein, 68 aa, Glycine max
  Clone ID: PAT_MRT3847_34404C.1.pep
SIIFRKKKKISEQSEALPMGLIYNRQELGFPFHTYFLKNFTPLWMLPANVVFDFYKPTLSYSVRGPRL

SEQ ID NO: 213046 - protein, 40 aa, Glycine max
  Clone ID: PAT_MRT3847_34405C.1.pep
CRDDEVMKTLSIPYYQTNSLVIPGWIPLWDLPEKFYPPLK

SEQ ID NO: 213047 - protein, 48 aa, Glycine max
  Clone ID: PAT_MRT3847_34406C.1.pep
LKTAFEVFERDGIKLVVDNISYDFVKGATVDYVEELSSHSFLHSGTPD

SEQ ID NO: 213048 - protein, 67 aa, Glycine max
  Clone ID: PAT_MRT3847_34407C.1.pep
QILPQLFRKDQEGFPNCSLQASHLELFACPKKYLLVFMGWAKKIGPARRWGPIKQQAKFVLSFIKNQ

SEQ ID NO: 213049 - protein, 40 aa, Glycine max
  unsure (1)..(40): unsure at all Xaa locations
  Clone ID: PAT_MRT3847_34408C.1.pep
EAQQVAHRNAFPLLLEILVCDRGFLINEFGKRLADPQIXS

SEQ ID NO: 213050 - protein, 123 aa, Glycine max
  unsure (1)..(123): unsure at all Xaa locations
  Clone ID: PAT_MRT3847_34409C.1.pep
NLDVSLTPILSLSPLAHTHLXXXCQPSLVQKSVQAGTFACEFYISRRGGMKDSDKLTWDQGRCLSPAQARSSASQKLMVSLMFLVSLTYMAYTLKLVSTSTSSYECSHAPFIIXHLFPSSNVT

SEQ ID NO: 213051 - protein, 74 aa, Glycine max
  unsure (1)..(74): unsure at all Xaa locations
  Clone ID: PAT_MRT3847_3440C.1.pep
XXXVXXMSRVXXXLXKEGINVVXXTSIRRDGRFIXXIRSEDPNHLNMTGXDYSELQIKLXXAISLQETLPEHEN

SEQ ID NO: 213052 - protein, 79 aa, Glycine max
  Clone ID: PAT_MRT3847_34410C.1.pep
AWPSVQAPPMPAPSHSSSFPPFQLRPPPPPQQDMSGAGGTKWPGGNQIYNPFAPTAVAAAHRAEADPEYEDLMALVCMK

SEQ ID NO: 213053 - protein, 78 aa, Glycine max
  unsure (1)..(78): unsure at all Xaa locations
  Clone ID: PAT_MRT3847_34411C.1.pep
MLKLSENPTLRSIIHFRTSNACCFWPYFWIPKLFECKELPIRXDEDMYRIICNMPGMGNLLRCRDLPSFCRPGTEGNL

SEQ ID NO: 213054 - protein, 80 aa, Glycine max
  Clone ID: PAT_MRT3847_34412C.1.pep
IHDGCVWQDGGGECHLTDGPSCFQRRATEKTPRLFSIGSVLVPIRTDAPLELQPKRQRGNGSRRAIRDGRCGRSSRPNST

SEQ ID NO: 213055 - protein, 43 aa, Glycine max
  Clone ID: PAT_MRT3847_34413C.1.pep
YQPSINCSKTFFLYFWLIYVKSSVEQTWLISTMRIDTKKLENY

SEQ ID NO: 213056 - protein, 44 aa, Glycine max
  Clone ID: PAT_MRT3847_34414C.1.pep
VIRMAVLVAICNGYRTYRHTAVGCHAYDTLTIGGLREENFIRFI

SEQ ID NO: 213057 - protein, 41 aa, Glycine max
  Clone ID: PAT_MRT3847_34415C.1.pep
KPMHAPYSNHTSPATWMDPLGTVGRHPTIMMSLKSETFKIM

SEQ ID NO: 213058 - protein, 112 aa, Glycine max
  Clone ID: PAT_MRT3847_34416C.1.pep
FGVPSHTPFSPIAQLSGGQKARVVFPFISMSNPPLFLFDEPPPLLALQSIFPLAHPLDEFPGGGVFFSPDSRLISRVCEDEKRSPIWVVENGPVQNFPGPFWGSKGAFFREI

SEQ ID NO: 213059 - protein, 99 aa, Glycine max
  Clone ID: PAT_MRT3847_34417C.1.pep
KRGLCPNLSCLQCLFTASGEGEASAYQTDSLGSGAERDGFPMGSGTSTESQSPSPKERVQPLPSLLMGHLDLGQPHLQLKQLTAGPRPTRAMFAFDEPD

SEQ ID NO: 213060 - protein, 85 aa, Glycine max
  Clone ID: PAT_MRT3847_34418C.1.pep
FQLTDLHGPSTKHPIVSTCHVRVWTLPRSWMLLVASTEHVGDRPPKAYWSRCLISQASCCPALAGTVCRPSCRSATCVWKATSLE

SEQ ID NO: 213061 - protein, 170 aa, Glycine max
  unsure (1)..(170): unsure at all Xaa locations
  Clone ID: PAT_MRT3847_34419C.1.pep
DLVPYPKRISIDAGKEETTVEAILEELAREIHSSVGVRMHRLGVVVWEVKLWMATCGQANGAGRVIADSVTGHTCTVHIYREKXDTVTHEVVYVSVSSKGALHGVPVNERHQPLGVIERWRVSVRLSSTXTYCYEXFLAFDTALXYTSWAVGRPGFQGASDRTVVVAEEL

SEQ ID NO: 213062 - protein, 40 aa, Glycine max
  Clone ID: PAT_MRT3847_3441C.1.pep
LGLAILLLSIVYKKVELVCNHGATESCDSFCRHFVVFSRV

SEQ ID NO: 213063 - protein, 65 aa, Glycine max
  Clone ID: PAT_MRT3847_34420C.1.pep
IKSSPLMKELLEKSKLNKEKNRKEIENKYCIRGAEWGVGDCSTQGMSSEEREKFIAMLKQKAGEE

SEQ ID NO: 213064 - protein, 178 aa, Glycine max
  unsure (1)..(178): unsure at all Xaa locations
  Clone ID: PAT_MRT3847_34421C.1.pep
GGVFFFFFFFFFVLFFFFFFFFVFFQPRPGGGGNRRAKKGKEKTAAPAQGAQKEEGPGPGGGAGQGGGPPRKQKKQMGHEAEKPPTRRGGKKAAPQYGGGHKKGPKELPKNESPGAVGGNPERXGRRLEIPPPPKGAGGITTKPRGTGSKKKGNPEETRTKPSPAPPGGGREERGRPP

SEQ ID NO: 213065 - protein, 181 aa, Glycine max
  unsure (1)..(181): unsure at all Xaa locations
  Clone ID: PAT_MRT3847_34422C.1.pep
FKGGSTASVALISTPTPAPFWHPAAQSTLLCAHVGDSRILLCDTATGLAQPLTSDHHPSSPTESRRLRRYAPAGSMVSGDSFGEERIAGLANSRAFGDMKSKRIGVSAEPELTRVEMGPAQYSFLVLMTDGISGTLSDQXIVDVVKEARTPEDGARNIVKYATEVSSDGDNATCQVVRLGG

SEQ ID NO: 213066 - protein, 109 aa, Glycine max
  Clone ID: PAT_MRT3847_34423C.1.pep
RTHFRYSAPFRVCRVYRVMHRTLMAAIVPRWVRISTLGYSLLKPSSYSITNFIYNNPKPPIFKPSQFLPPIMFVSSNNKDSCYTLDCDETQPPSPGPRPSPYPSHDPYF

SEQ ID NO: 213067 - protein, 42 aa, Glycine max
  Clone ID: PAT_MRT3847_34424C.1.pep
YEGTRSCSETMNSLATENFENSLSDSLEASWVQPICRQLAAE

SEQ ID NO: 213068 - protein, 79 aa, Glycine max
  Clone ID: PAT_MRT3847_34425C.1.pep
ENPSKKTKGVVISSPRSILSFMVFIQVLNFDCGFIGILNIIGNCEQDSENLDVVVSKTLDFFTRIQKPKHPTWWWWWWW

SEQ ID NO: 213069 - protein, 54 aa, Glycine max
  unsure (1)..(54): unsure at all Xaa locations
  Clone ID: PAT_MRT3847_34426C.1.pep
NDTITGNAKPNKHTVNDIVARVDSVTTNRGRGKAGVKDRTGXEKGGHAKYECPH

SEQ ID NO: 213070 - protein, 142 aa, Glycine max
  Clone ID: PAT_MRT3847_34427C.1.pep
VCFSCLLSLYNALSPLPSCDFFFPFCTSSSPSSLTHQNNQILKNYPQNINHSTKSLMMPPQQETSITSNIPAIPNRPENSYVHAEPPSSATNDIKPTFTSNDIHSNNSSQHHQAAPSAPRFSVLQQSLRPVTLKFEDVSYSI

SEQ ID NO: 213071 - protein, 60 aa, Glycine max
  Clone ID: PAT_MRT3847_34428C.1.pep
LTYWEREMIIPRDKKQGAFGQKPKNNLFFSPFHIFLNTWYRFHWGGIITCWHIQFGGMPW

SEQ ID NO: 213072 - protein, 64 aa, Glycine max
  unsure (1)..(64): unsure at all Xaa locations
  Clone ID: PAT_MRT3847_34429C.1.pep
TGDLSLTSCYWFTTQETXSXFKGWPSWSETWGHVMYVQKNRLXAXXXFTQTIHGSSWAFSPVRL

SEQ ID NO: 213073 - protein, 65 aa, Glycine max
  Clone ID: PAT_MRT3847_3442C.1.pep
TCEADFNELLKEILQQRFSQLMFLLFFEQRSFPEKIMIKNETFSDEYCVGSNLHFFSHQHYLLET

SEQ ID NO: 213074 - protein, 36 aa, Glycine max
  Clone ID: PAT_MRT3847_34430C.1.pep
CLQDCPGHYFVLAAQQYGNPAQQLLMIESQHPKHCL

SEQ ID NO: 213075 - protein, 67 aa, Glycine max
  Clone ID: PAT_MRT3847_34431C.1.pep
AHASGICMRAYNCGCVLTSLSVSFPFFFTFGVFLSSLRNFTTLEAPPQCNSLLTSFHSLCFKFSHSL

SEQ ID NO: 213076 - protein, 125 aa, Glycine max
  unsure (1)..(125): unsure at all Xaa locations
  Clone ID: PAT_MRT3847_34432C.1.pep
QRASLQKIKTKTENLKSKGGSHLKRNSTPKWLTFAAHTQCAPAQEGPKTHRGGDFRASWKXXXPHPFLPSXPXXQPPSXXSXXXPHQXPXPPQPPHQPPPTHPXPXXXKPXXPPQTPPPPXPPAP

SEQ ID NO: 213077 - protein, 55 aa, Glycine max
  Clone ID: PAT_MRT3847_34433C.1.pep
RGPLAVGPPFFYFFFSVHKLHFYKIYIIQVYHFPIKTLAMGKINFIPSYNYFPHC

SEQ ID NO: 213078 - protein, 114 aa, Glycine max
  Clone ID: PAT_MRT3847_34434C.1.pep
RVVNGAIALVFVVVALEVRVVFHSFARYIQVPPPLNFVLVTITMLGGASATAAYAMGMVSDALSSVAFTTSAIVVSAAGALVVGFPLLSAKRCLMLVMATGLLFNLMQATPPVS

SEQ ID NO: 213079 - protein, 56 aa, Glycine max
  Clone ID: PAT_MRT3847_34435C.1.pep
ISNQIHILHFTSINPQQKILSTTIIYSIQVLIHFIIYQSLAPRLCFLSEKFGAGFF

SEQ ID NO: 213080 - protein, 320 aa, Glycine max
  unsure (1)..(320): unsure at all Xaa locations
  Clone ID: PAT_MRT3847_34436C.1.pep
AILCSEEFVVKHNLQSQAVEILALTMATDTETSFKDSCIKMVGFDMSKLAADKAYKIAGVTANDVQVIELHDCFSANELVTYEALGLCPEGKAGQLVDTGAVTYGGKWVVNPSGGLISKGHPLGATGLAQCAELCWQVRGMAGPRQVKGAKIALQHNIGLGGAAVVGLYRLGFPEKFVPYPSDKPNPAVEDLATKGQVSNENASGPFKSEAVFAEIXKKIAENASLVKSIDAVYQFDITHGPGGKAQSWTVDLKNGNGSVKVGKTEAADLVLTIADEDFVGMMTGQLNSHQLYMKGKLKIKGKMALASKLQLLSSAKAKL

SEQ ID NO: 213081 - protein, 109 aa, Glycine max
  Clone ID: PAT_MRT3847_34437C.1.pep
MESILLFFSSFKFALSLSLILHSPFSSAQIMQGFVSLDCGGTEKFADEIGLHWTPDDKLTYGQISTISVVNETRKQYTTLRHFPADSRKYCYTLEVVSKTRYLLRASFL

SEQ ID NO: 213082 - protein, 75 aa, Glycine max
  Clone ID: PAT_MRT3847_34438C.1.pep
QLCLAMLASIGRRSYMSGFCHSTWIQCWVHESLRLYVKVPSNRERCSYKVSFIQSLETVVEVIQLKTQLCKSRGQ

SEQ ID NO: 213083 - protein, 124 aa, Glycine max
  Clone ID: PAT_MRT3847_34439C.1.pep
KTRVILWSYVAGYFSGPAARNPLKGGSYWAFPLRVPLAKRVLQLLGRAFFLALFFFSPGGLSWVFSRVFQLGFPRVFPVTPLLNVPLFVVFWCLSPWVLSFFGLVLMLLFRFPPFVPSHFSSSY

SEQ ID NO: 213084 - protein, 98 aa, Glycine max
  Clone ID: PAT_MRT3847_3443C.1.pep
FAFKYKPKRILLSDWITIHGTTVQWNFKYHFDLKEWHYFNPTSSNVCPTHLILPMIRSLTLFIWLTSMMMKLATPINFTTLSPTLSCGVNPRFPQPVS

SEQ ID NO: 213085 - protein, 42 aa, Glycine max
  Clone ID: PAT_MRT3847_34440C.1.pep
VDFSNKALLLSMVCTSGTAATTLAISAEDSTTESPVYSTSTF

SEQ ID NO: 213086 - protein, 50 aa, Glycine max
  Clone ID: PAT_MRT3847_34441C.1.pep
SLRFFYCEGDMKEKETPLEEIKYKVDKWVIYEKETGPSLVPTYDIYEILL

SEQ ID NO: 213087 - protein, 85 aa, Glycine max
  Clone ID: PAT_MRT3847_34442C.1.pep
LQLRAHQRQGHQRHQLQLQNQSHQLHLQGHQEHQFQLQGHQRQGHQGHRLQLRAHQRQGHQGHQLQLQNKNHQLQLQNQSHQLHL

SEQ ID NO: 213088 - protein, 165 aa, Glycine max
  Clone ID: PAT_MRT3847_34443C.1.pep
FGTRFGNAAVVFQNCVILVRKPLNGQANMITAQGRYDPFQNTGFSIHNSQIRAAPDLRPIVGKFNTFLGRPWQRYSRGVVMKSFLDSLVSPGGWSPWGDSNFALNTLYYGEYRNFGPGSSTRNRVRWPGFHRISSPAEASRFTVANLLAGRTWLPATGVPFTSGL

SEQ ID NO: 213089 - protein, 91 aa, Glycine max
  unsure (1)..(91): unsure at all Xaa locations
  Clone ID: PAT_MRT3847_34444C.1.pep
IPRPTHSYSHSYNTYTTPLLSFHLTYLSTTLYHTHSDLXHLSLLYSKFTTSTLIFLQTFSPHSLSHFHLIQNLPFIYPKIFRPLIFHLRPL

SEQ ID NO: 213090 - protein, 216 aa, Glycine max
  Clone ID: PAT_MRT3847_34445C.1.pep
PTRPPTRPPTRPGKIELNLHSNIFPHNTTMSRKRDRSAYFSRHDAAKRRLPLPEPAEEETPTMRPAPPSAVVVMGLPQDCSVLDLKSRFEIYGAISRIRIDRDAVGYITYRTKDSADAAIAAGLDPTFGITVNSKMVQVLWATDPLAMWREGVGNSRNKGSMSKLVRAEVPLSKHGRGNRLASPIGNTKLSEASSGSSVLEVSFKGREIVAYDDIL

SEQ ID NO: 213091 - protein, 409 aa, Glycine max
  Clone ID: PAT_MRT3847_34446C.1.pep
TRPGFPIDEAKRGSLGKFSRMLKRLLNDLEVRQIMKAERFCEANQLPPEYVCVNGHPLSYEELVTLQNCPNPPKKLKPGNYWYDKVSGLWGKEGQKPSQIISPHLNVGGPIQPDASNGNTQVFINGREITTRAVRMLQLAGVQCAGNPHFWVNEDGSYQEEGQKNTRGYIWGKAGTKLVCAFLSLPVPSKSSNSLGEQPSSLASRTMPDYLEHGIVQKLLLVGCSGSGTSTIFKQAKILYKSVPFSEDEHENIKLIIQTNVYAYLGILLEGRERFEEESFGNLKKNQSSVLDTTGTSPKLGDKTIYSIGTRLKAFSDWLLKTMVSGKLDAIFPAATREYAPLIEELWDDAAIKATYERRNEIELLPSVASYFLERAVEILRTEYEPSDLDILYAEGVTSSNGMASVEFS

SEQ ID NO: 213092 - protein, 54 aa, Glycine max
  Clone ID: PAT_MRT3847_34447C.1.pep
LVCVLISYPSAYLGQSLLHPPLRSAFCGSFNQNMRLKLPFSESIDHTACSDLFT

SEQ ID NO: 213093 - protein, 79 aa, Glycine max
  Clone ID: PAT_MRT3847_34448C.1.pep
KKSSGSTALLCSRLGGRTSLNMPIGGGAMERKIMAPARISHQRIQKQPLAVALETLLIILSGGVSLLEAPQFKERGCAR

SEQ ID NO: 213094 - protein, 81 aa, Glycine max
  Clone ID: PAT_MRT3847_34449C.1.pep
TLPRVQRVSAISSVVSIVTLSSLSVAAAVAVMERARRLADRAILTRLASEAKQHQKSESVLHSSTYCMLGYSSCRCMSSVL

SEQ ID NO: 213095 - protein, 63 aa, Glycine max
  Clone ID: PAT_MRT3847_3444C.1.pep
ESECIASARLSQINDASTTEKKVCCYRYQRGAKEAAYNSLYNPHLVSILKWPTVHLSLVLHIA

SEQ ID NO: 213096 - protein, 58 aa, Glycine max
  Clone ID: PAT_MRT3847_34450C.1.pep
GAPLQELTDLVKEVAPAARRRNAKLSFAFVFPDKTGRFKVQEVGKTLSYGNGRLDDDR

SEQ ID NO: 213097 - protein, 157 aa, Glycine max
  unsure (1)..(157): unsure at all Xaa locations
  Clone ID: PAT_MRT3847_34451C.1.pep
LDWSKAPTLRDALDQPSETLRPPDKPLMLTLXDVFKITCFVTAPTRRVKILTIXKISMRGDLGTNGTSQXINCVKMQHKYLTKAHAKDNVEWNDQNEIMXDXNPSYVCXNSQDNRAQEATNLTHQXIMMKHPVQNVNSDDNNLHCTLVTIGERYANV

SEQ ID NO: 213098 - protein, 151 aa, Glycine max
  Clone ID: PAT_MRT3847_34452C.1.pep
MSDGGKRQGGRALPPPPRGPPPPPPSRPRLEPVDREKTCPLLLRVFTKIGSHHSMEDFAVRGKEPKDEVQIYTWKDATLRELTDLVKEVAPAARRRNAKLSFAFVFPDKNGRFKVQEVGKTLSYGNGRLDDGKALAELGFEIGDYLDVAIL

SEQ ID NO: 213099 - protein, 47 aa, Glycine max
  unsure (1)..(47): unsure at all Xaa locations
  Clone ID: PAT_MRT3847_34453C.1.pep
XPDGPTRPTHPILLKRQRSPFILLLPYSAVLFTRGEQFPSYFNSNTH

SEQ ID NO: 213100 - protein, 199 aa, Glycine max
  unsure (1)..(199): unsure at all Xaa locations
  Clone ID: PAT_MRT3847_34454C.1.pep
MSLPSFATTSFSFLFTSFFVFFILCGNSSSSLAIHANTTRPPRQLSVSYYAKSCPQVEQLVGSVTSQQFKESPVSGPATIRLLFHDCFVGGCDASILIASKPGSKELAEKDAEDNRDLKVEAFETVRKAKEQVERKCPGVVSCADILVIAARDYVHLAGGPYYQVKKGRWDGKISTASRVASNIPHANSTXDQLIKLFT

SEQ ID NO: 213101 - protein, 165 aa, Glycine max
  Clone ID: PAT_MRT3847_34455C.1.pep
KLSFSNFYKKAFVKSFAPKNGKICQGGGGKNPPPGAPPWGGAPPEKRGFGPKSPMKTPPPLPPRIFVSLSLGAGRAPNKRPVGNFPQNPMALGVNQKVFSSNPFSPAPWGSPLGGFKGREGFVFPSDDKERDWWGFLGPAFANFLGFDSSPQMNLLWPKFKENVP

SEQ ID NO: 213102 - protein, 75 aa, Glycine max
  Clone ID: PAT_MRT3847_34456C.1.pep
APIPLQRYVLLLTVFLGLSCQVRWWLSLYACPAGIRYFPVTQVPIFPSSSSPPPPPKEGGRHTVMTGNLPWNRNR

SEQ ID NO: 213103 - protein, 100 aa, Glycine max
  Clone ID: PAT_MRT3847_34457C.1.pep
TPPKGNPFSVAPKAPGLASFSCKGKEKPLVFERTHLTGGPPFWGLPGSHMGDPRGGFGPLGLHPKFFHLATGGGYENSRGGPKKGTLFWGGHQPLGVGTG

SEQ ID NO: 213104 - protein, 79 aa, Glycine max
  Clone ID: PAT_MRT3847_34458C.1.pep
GVFTFVVRKSGSKWTANQHSGNFKASANSTFNFQRRLLQPVFAVNSSGGVKSFFFPGFPTSVGSQGILGGPYFLEGGGG

SEQ ID NO: 213105 - protein, 208 aa, Glycine max
  Clone ID: PAT_MRT3847_34459C.1.pep
MSSATKNAANAVGGKTARACDGCITKRARWYCAADDAFLCQACDSSVHLANPLARRHERVRLKTASYKSTDERRQPPTWHTKKPRTPRHGKHSRNNNPFHLVPEEGSEEANSHDENEEQLVYRVPIVDPFVAELCGTNSSPSSVTSTDQGVVAAAAAASAEVEYKGIQSNDFCSNSNEIENLHGMLSSDAELAEFAADVESFWVRGLE

SEQ ID NO: 213106 - protein, 63 aa, Glycine max
  Clone ID: PAT_MRT3847_3445C.1.pep
CIKGRLYISQKYMVGQCSTIKELGVFVSHDHTASVVVSVIKSLIISSQSQSKSNHHAGLYNHQ

SEQ ID NO: 213107 - protein, 90 aa, Glycine max
  unsure (1)..(90): unsure at all Xaa locations
  Clone ID: PAT_MRT3847_34460C.1.pep
MINSLRGGDEKSMRETXHTKMMASXSRMAISKIELLGVECGMHKGLPLTAVRNSIEKETLTRYSFEKTLCQAKAASMSEQYFKNFVSMCV

SEQ ID NO: 213108 - protein, 419 aa, Glycine max
  Clone ID: PAT_MRT3847_34461C.1.pep
MSSATKNAANAVGAKTARACDSCITKRARWYCAADDAFLCQACDSSVHSANPLARRHERVRLKTASYKSTDEQQQQQQQQPPTWHTKKPRTPRHRKHSRNNNPFHLVPEEGSEEANSHDENEEQLLYRVPIFDPFVAELCGTNSSPSPVTSTDQGVVAAAEVEYKGIQSNGFCSNSNEMENLHGMLPSDAELAEFAADVESLLGRGLENKCVGMEELGLVDAKEEECSVGSGKVKMEDQEESPLVEMEMDMVVGRDDQSFELSFDYETCEEVKVCDLGLGNELGAKKENDDEVKKNKISLQLDYEAVIIAWASQKSPWTTADKPNLDPDECWKQCMGSCETAYHHPCGEMGGFGIHPVIIDGGREARVSRYREKRRTRLFSKKIRYEVRKLNAEKRPRMKGRFVKRASFAPPTFPLLNK

SEQ ID NO: 213109 - protein, 103 aa, Glycine max
  Clone ID: PAT_MRT3847_34462C.1.pep
LVYQDLLTGDELIYDSFRYKEIENGMLWEVEGKWVDKGAFDVDIAANPYADGGGKNEGVDDASAKVADIDDTFKLEEQPAFNKNQLCTFMKRYINNLTSNLDA

SEQ ID NO: 213110 - protein, 118 aa, Glycine max
  Clone ID: PAT_MRT3847_34463C.1.pep
HIKKEQIILGRAKLNQNSPVKRNNRDYPATNWCLKTASIPTKGLSTSWLKFKPWPNQSQPYQKMEPLFKGKIANAFGTPNPSHPSTNHLIRALERMGPLQGPHANYKKTATYGRPFLF

SEQ ID NO: 213111 - protein, 180 aa, Glycine max
  unsure (1)..(180): unsure at all Xaa locations
  Clone ID: PAT_MRT3847_34464C.1.pep
GRIPGFNQSSLRYLNVSNNRLSGEIPVSSALIRFNASSFWGNPGLCGEQIEEACKNGSLAPSTSPSYPLIPRTMGKSSTSSLNRTKLIKIIGGSVGGVVLVLVCTTVVWVVICKKKKKGGAEXQKGKLVWREEGEKKKGFCVGKEGVXKLVFCGGGDREMSYSLEELLKASAETLGRGIV

SEQ ID NO: 213112 - protein, 42 aa, Glycine max
  Clone ID: PAT_MRT3847_34465C.1.pep
LKGTAEAASQVESQRRVPQNNDLHICGSVAKDSARTQKSERE

SEQ ID NO: 213113 - protein, 73 aa, Glycine max
  Clone ID: PAT_MRT3847_34466C.1.pep
LELFYLMYLTHILNKLLNSNFLDWINSTKDNQFSFITEISFIDISYYSYFKKPPFLIFFTYYKSIKKAVKQLN

SEQ ID NO: 213114 - protein, 45 aa, Glycine max
  unsure (1)..(45): unsure at all Xaa locations
  Clone ID: PAT_MRT3847_34467C.1.pep
DSEMNIKCATWNTLLKAFQXXMRVLFWLCKFXXMIRLESRCPKML

SEQ ID NO: 213115 - protein, 86 aa, Glycine max
  Clone ID: PAT_MRT3847_34468C.1.pep
KGKELLSSNCVWKLREAESIINRGKVAHNLCYEDDFNERSEWTIESPQLQNQRERERERQHSGLGLETETDRERDDRVRVSFVCCC

SEQ ID NO: 213116 - protein, 105 aa, Glycine max
  unsure (1)..(105): unsure at all Xaa locations
  Clone ID: PAT_MRT3847_34469C.1.pep
XTQRKPLXXXXXQXXXXXXSSEXXQXKPXXEXXRLNXXEQXXQXXXXXKXWSXSXXKXAXXXXXXXXXAXXXXRXTXXXRXLXXVGSTXXXXXXXSXXCRXXXXX

SEQ ID NO: 213117 - protein, 103 aa, Glycine max
  unsure (1)..(103): unsure at all Xaa locations
  Clone ID: PAT_MRT3847_3446C.1.pep
CGILGIFGMAGTYNLLFIYTAELFPTVVRNAALXXATQAAQMGAILAPLXXVLGGSLPFLVFALCGIVGGVFAFYLPETLNQPLYDTLTGMEAKENTAISTKV

SEQ ID NO: 213118 - protein, 43 aa, Glycine max
  Clone ID: PAT_MRT3847_34470C.1.pep
VDMEVEDMNSSGNTTVIDVSVAKDSMHIDQLVQLNPPVDYHSV

SEQ ID NO: 213119 - protein, 235 aa, Glycine max
  Clone ID: PAT_MRT3847_34471C.1.pep
LVRRKHYFKQEIEEKRLGSKPAAELLEKLKPHYWFSAHLHCKFAALVQHGEGGPLTKFLALDKCIPGRDFLQIVEIESDAGPYEIQYDEEWLAITRKFNPIFPLTYKGADFRGINLEMEDCLEWVRSKLQERGCKPFEFVRTAPCYDPSRSNFDGAFAVNPRNPQTESFVRLLELPYLFDRNPEAKDLSPYPSPSIQRGTAYDSEDIPIDDVADDDDDDEELPKVDNVETETSNL

SEQ ID NO: 213120 - protein, 123 aa, Glycine max
  Clone ID: PAT_MRT3847_34472C.1.pep
IENKTKMLVSMSVCGQDEIELSRDGSHYSLSTGILPSLGAKSNRRLKLKPFIISPYDRRYRIWETFLVILVVYTAWVSPFEFGFLKKPQAPLSITDNIVNGFFFVDIVLTFFVAYIDKSTYLI

SEQ ID NO: 213121 - protein, 54 aa, Glycine max
  unsure (1)..(54): unsure at all Xaa locations
  Clone ID: PAT_MRT3847_34473C.1.pep
NXSTXNXHHYSXSXXVVXITAHXXXCKXHXHSXXIXFXXISSRXPXLRTRXCXV

SEQ ID NO: 213122 - protein, 54 aa, Glycine max
  Clone ID: PAT_MRT3847_34474C.1.pep
KQGLDLKRQKKNPYKFIPHFHTKSPKYELPNLKITQHNHPPKTLIKQPQTSFTL

SEQ ID NO: 213123 - protein, 59 aa, Glycine max
  Clone ID: PAT_MRT3847_34475C.1.pep
PFIGAPIAAFWHQFMFRAVADEALGSFRGNPHNSNVYLIMMVALVERGYLFKRGLKWQG

SEQ ID NO: 213124 - protein, 124 aa, Glycine max
  Clone ID: PAT_MRT3847_34476C.1.pep
LESQFHIHILWLDLTSNHFPTYSIICFPSFLFQIIMHTHTYIYIYIYIYIYINHGLELQIVSKKGEEGGTKEWTKSSNAAFGCQSWGGDDCRSFGLVVTGVSHCSANRGHDEEDDTCNLLLLHN

SEQ ID NO: 213125 - protein, 229 aa, Glycine max
  Clone ID: PAT_MRT3847_34477C.1.pep
MPKKMGVNTKAEAARARKSAADTERKEKESREKEDQYWREAEGSKSRAAKKKEEEAEKRAEAAARKAEARRLAEQEEKELEKSMKKVDKKATRVSIPVPKVTEVELRRRREEEQAEAERKAEEAKKQQSRTAAEEEYERMVLISNTNRDDSIIEARTLDDAIAQMTVVDNLPPDRHPERRLKASFKAFEEAELPKLKEEKPGLTHTQYKDMIWKLWKKSPDNPLNQIAE

SEQ ID NO: 213126 - protein, 46 aa, Glycine max
  Clone ID: PAT_MRT3847_34478C.1.pep
KRRNMHERAMLHYGISLDLKPSATDAAAIKAAIEKLHVPDEMEDNL

SEQ ID NO: 213127 - protein, 64 aa, Glycine max
  Clone ID: PAT_MRT3847_34479C.1.pep
RQYYKTCLFSSCGTPVSLNVKWLTSLYSPYFDYMANIFINTTFHFWSSFMSRWNIVGGAHDFIP

SEQ ID NO: 213128 - protein, 353 aa, Glycine max
  Clone ID: PAT_MRT3847_3447C.1.pep
MASATPLLKDELDIVIPTIRNLDFLEMWRPFFEPYHLIIVQDGDPSKIIKVPEGFDYELYNRNDINRILGPKANCISFKDSACRCFGYMVSKKKYIYTIDDDCFVATDPSGHKINALKQHIENLLCPSTPFFFNTLYEPFREGADFVRGYPFSLREGVPTAVSHGLWLNIPDYDAPTQLVKPLERNTRYVDAILTIPKGTLFPMCGMNLAFDRDLIGAAMYFGLMGDGQPIGRYDDMWAGWCCKVICDHLGLGIKTGLPYIYHSKASNPFVNLRKEYKGIFWQEDIIPFFQSIVLPKEATTVQKCYIELAKQVKEKLSKVDPYFDKLADAMVTWIEAWDELNPAGASVANGKA

SEQ ID NO: 213129 - protein, 242 aa, Glycine max
  unsure (1)..(242): unsure at all Xaa locations
  Clone ID: PAT_MRT3847_34480C.1.pep
MPKKMGVNTKADAARARKSAVDTERKEKETREKEDQYWREAEGSKSRAAKKKEEEAEKRAEAAARKAEARRLAEQEEKELEKSMKKVDKKATRVSIPVPKVTEVELRRRREEEQAEAERKAEEAKKRQSRTAAEEEYERMVLVSNTNRDNSIIEARSLDDAIAQMTVVDNLPPDRHPERRLKASFKVXIELDPIRYLLTLILTLHSAEQAFEEAELPKLKEEKPGLTHNQYKDIYGSWEEIS

SEQ ID NO: 213130 - protein, 203 aa, Glycine max
  Clone ID: PAT_MRT3847_34481C.1.pep
MAVKVYIVYYSMYGHVEKLAEEIKKGASSVEGVEAKLWQVPETLLDEVLGKMSAPPKSDVPVITPNELSEADGFVFGFPTRFGMMAAQFKAFLDATGGLWRAQQLAGKPAGLFYSTGSQGGGQETTALTAITQLVHHGMIFVPIGYTFGAGMFEMEKVKGGSPYGAGTYAGDGSRQPSELELQQAFHQGKYIAGITKKLKQAA

SEQ ID NO: 213131 - protein, 203 aa, Glycine max
  Clone ID: PAT_MRT3847_34482C.1.pep
MAVKVYIVYYSMYGHVEKLAEEIKKGASSVEGVEAKLWQVPETLQDEVLGKMSAPPKSDVPVITPNELSEADGFVFGFPTRFGMMAAQFKAFLDATGGLWRAQQLAGKPAGIFYSTGSQGGGQETTALTAITQLVHHGMIFIPIGYTFGAGMFEMEKVKGGSPYGSGTYAGDGSRQPTKLELEQAFHQGKYIAGITKKLKEAA

SEQ ID NO: 213132 - protein, 100 aa, Glycine max
  unsure (1)..(100): unsure at all Xaa locations
  Clone ID: PAT_MRT3847_34483C.1.pep
FLRVGKILAMTGLEMKESMLNKRMPADVPAKRAHEFAKDVDIYSLKVRFPAVVKKXPTKVDKSAEILDRIQRVAGDLKLSTEGKMYDGKLFPDSYIHRQG

SEQ ID NO: 213133 - protein, 62 aa, Glycine max
  Clone ID: PAT_MRT3847_34484C.1.pep
VLQCRGAPRSPPPEVSHGRPKHILMGGRGPPFICPGAQNNHTLFLFQRPPIPRLILGVQTTL

SEQ ID NO: 213134 - protein, 99 aa, Glycine max
  Clone ID: PAT_MRT3847_34485C.1.pep
IDIPRQSTVFHSLLGISQEFVIAGNPLMPAFSVPQAFARYSANPVSSALSEICGINRVFVGLIQSRVLHLTLLLSMICQFENFRSSFYCRIYVLSVCSF

SEQ ID NO: 213135 - protein, 55 aa, Glycine max
  Clone ID: PAT_MRT3847_34486C.1.pep
KRKLVFKFWNLSLKVYIGLGFLNSRVLGLSNYGPFPPLPVGGIFFFCFGARLPIN

SEQ ID NO: 213136 - protein, 49 aa, Glycine max
  Clone ID: PAT_MRT3847_34487C.1.pep
NLNFNSFLLTLCLCLMVLLATGDFITRPRGEYLLYSACYYVLLVLHILS

SEQ ID NO: 213137 - protein, 182 aa, Glycine max
  unsure (1)..(182): unsure at all Xaa locations
  Clone ID: PAT_MRT3847_34488C.1.pep
PLCAELLAEIVDGDVAEGYGDGXCNKSGAGIMSPIINPTTRKTQSRAQAGAHEEVNMVMDLPKSCPKIWLXTPLWLRAELLDMVTDLLKEHAEPLAKCLAKEIADAATDAVTDGDRSGDPADYTAEKRVKILGEGKDLLSDSYPANDWTTYCLXTFEMTLGVTPSISPFNYAVNHAASELAA

SEQ ID NO: 213138 - protein, 71 aa, Glycine max
  Clone ID: PAT_MRT3847_34489C.1.pep
VENFFILEIIKKKGQVICKNSHFHNIIWAKRNGTLNIRPPGTNKLGQKPGPKKDQCPPFREGKRNFKKVVL

SEQ ID NO: 213139 - protein, 71 aa, Glycine max
  unsure (1)..(71): unsure at all Xaa locations
  Clone ID: PAT_MRT3847_3448C.1.pep
ALCXEXGWXVEEDGTTYRKXCXRPTXXIGXXPLSLSXCSSIQAXPQSSXXXXRXPSYHVQPLLSSAWRPPL

SEQ ID NO: 213140 - protein, 49 aa, Glycine max
  unsure (1)..(49): unsure at all Xaa locations
  Clone ID: PAT_MRT3847_34490C.1.pep
TLQFRLAXLAALMRLISLFRFEKLISALFFLLLFCSDELNSLTHLDRKF

SEQ ID NO: 213141 - protein, 40 aa, Glycine max
  Clone ID: PAT_MRT3847_34491C.1.pep
FNKIVVNYAYSFLRKNFREGDKSMAIPRNKLLKVGMTYEI

SEQ ID NO: 213142 - protein, 127 aa, Glycine max
  Clone ID: PAT_MRT3847_34492C.1.pep
KLKQGEPGKPTLGFTLKWETGLPFGGTKKRLNGQTKKGILVNSKKTHLKREKSNGPTPGNGASKTKKNRGPKKKRGIFGKNLGIQLLKRGAYLKKKLAKKGLHKPQRGETPRVLFTYIKSPPFFLPI

SEQ ID NO: 213143 - protein, 202 aa, Glycine max
  Clone ID: PAT_MRT3847_34493C.1.pep
PVGGVALEIPIDISVLNNMRQFVKYSRLKQFALRALASTLNEGELSDLKDQFDAIDVDKNGSISLEEMRQALAKDQPWKLKESRVLEILQAIDSNTDGLVDFTEFVAATLHVHQLEEHDSDKWQQRSQAAFEKFDLDKDGFITPDELRMHTGLRGPIDPLLEEADIDKDGKISLPEFRRLLRTASMGSRTVMSPSHRHHRKI

SEQ ID NO: 213144 - protein, 91 aa, Glycine max
  Clone ID: PAT_MRT3847_34494C.1.pep
GPPPPLFFGGVNQGLFPLFWRYTSPPPGELEALYNKRAGCPFFFLKNTRAFFLLIKKVALCKRILSKMKIVFAQTASHNRFSKFTIPCSQQ

SEQ ID NO: 213145 - protein, 46 aa, Glycine max
  Clone ID: PAT_MRT3847_34495C.1.pep
CVIDETKQKIRGAGTVDDKHGKLQPWERWLFFVQTIKNCVHDFARA

SEQ ID NO: 213146 - protein, 55 aa, Glycine max
  Clone ID: PAT_MRT3847_34496C.1.pep
GCTSSPFRNHPTNRFGIAYFVFAVGLCCGQCWVKSIRLDRTRRRWVSKYRLNYSI

SEQ ID NO: 213147 - protein, 90 aa, Glycine max
  unsure (1)..(90): unsure at all Xaa locations
  Clone ID: PAT_MRT3847_34497C.1.pep
KLTRKSHPSVGRVSFTPNKEXTSVNHYCGGSTSSQSXSSESESTTXSHLSSERXFANLRSFMSKPIHPMSFNDLTTTRDAFDPAVDFTEF

SEQ ID NO: 213148 - protein, 78 aa, Glycine max
  Clone ID: PAT_MRT3847_34498C.1.pep
IFSEITFILITFLGIILSRITLQTLPSFTTSQKYINKKMNEQKIQGDETHGELKSYLKLYESKSILLRKKSFINKRGD

SEQ ID NO: 213149 - protein, 75 aa, Glycine max
  Clone ID: PAT_MRT3847_34499C.1.pep
MLLYPLYASMRAIESPSTLDDQQWLTYWVLYSFMTLFELSTHKILAWFPIWGYLKLMFCVWLVLPMFNGAAYIYE

SEQ ID NO: 213150 - protein, 84 aa, Glycine max
  Clone ID: PAT_MRT3847_3449C.1.pep
LSNFFLIGSFELKWREPLYRLKLPINQGCTIIYRDRLLTYMKPAPTHKLQQNQKRSKLHTTSTSAGTISRLEETTQATARIRPT

SEQ ID NO: 213151 - protein, 72 aa, Glycine max
  Clone ID: PAT_MRT3847_344C.1.pep
PTLYLTHPPPSFMLHHFSYYRNQTFYYSSFINPSNPLITLPPSTTLFFSFFSTLQSSTALFLLKSPLTFSDF

SEQ ID NO: 213152 - protein, 64 aa, Glycine max
  unsure (1)..(64): unsure at all Xaa locations
  Clone ID: PAT_MRT3847_34500C.1.pep
RLIEISNYYXELMIXXTNWXXGFXSXEXXRLRLKXXGXGXGXXNXGPLXXMSRAEFRAYVRVXA

SEQ ID NO: 213153 - protein, 217 aa, Glycine max
  Clone ID: PAT_MRT3847_34501C.1.pep
MASVAVMATSSDSRWSMASLRSALPSHSPPVSSSLRFPVLPSSPSSSSTKLRISRTKPKSLLTSFTGLAPLNPIFLSAPSSEYTGCDHSFTIIDNGGRVTAMRHGRRVPKLNRPPDQRRALIRGLTTQLLKYGRIKTTRARASAIRKYVDKMITLAKDGSLHKRRQALGFIYEKQIVHALFAEVPERYGERNGGYTRIIRTLPRRGDNAPMAYIELV

SEQ ID NO: 213154 - protein, 271 aa, Glycine max
  Clone ID: PAT_MRT3847_34502C.1.pep
GIGLIEKKLKNRIQWKGLDVSRPGEADDSFASLQAEVENLTMKERQLDEQIREMQERLRDLSEDENNDKLLFVTEEDIKNLPCFQNETLIAIKAPHGTTLEVPDPDEAVDYLQRRYRIVLRSTMGSIDLYLVSQFEEKFEEINGADVAPKLPSSPDGTKHQSTVVPEDRGKHIEVQGQAAPGPSSDFTPSQDFVSGIMKIVPSDVASEADYWLLSDADVSITDMWRTEPGVEWNELEPLQEDYCMTDENTTTPSHPSNVGEVSSASKPTGG

SEQ ID NO: 213155 - protein, 279 aa, Glycine max
  Clone ID: PAT_MRT3847_34503C.1.pep
GEEEEERNVQFEINTYDFKIDSGPVSLVVNACASRDLQDNIVGVCFVAQGITAQKTMMEKFPRIEGDYKAIVQNPNPLIPPLFNTDEFGWCCEWNSAMAKLTGWKREEVMDKMLLGEIFGTQIAGCRLRNHEAVVNFSIVLNTAMAGLETEKVPIGFFTRDGKHVECLLSVTKKLDAEGVVTGVFCFLQLASAELQQALHIQLLSEQTSLKRLKDLTYLKRQIQNPLYGIMFSRKLLEGTELGAEQKQFLQTGTRCQRQISKILDDSDLDSIIDGFKHC

SEQ ID NO: 213156 - protein, 71 aa, Glycine max
  unsure (1)..(71): unsure at all Xaa locations
  Clone ID: PAT_MRT3847_34504C.1.pep
WKXFGRMSYXAXXVNQXQEKDLLEGNXXXDIKSXSSIXKFXTRKAQXVSGEXXKYXIIGAXSHXSXDXXEK

SEQ ID NO: 213157 - protein, 219 aa, Glycine max
  Clone ID: PAT_MRT3847_34505C.1.pep
QIQNPLYGIMFSRKLLEGTELGAEQKQFLQTGIRCQRQISKILDDSDLDSIIDGKDLDMVEFTLHEVLVASLSQVMTKSNAKGIRVVNDVEEKITTETLYGDSIRLQQVLADFLLISINFTPTGGQVVVAATLTQQQLGKLVHLANLEFSITHDSFGVPETLLNQMFGRDGHESEEGISMLISRKLLKLMNGDVRYLREAGKSSFILSVELAAAHKSNT

SEQ ID NO: 213158 - protein, 89 aa, Glycine max
  unsure (1)..(89): unsure at all Xaa locations
  Clone ID: PAT_MRT3847_34506C.1.pep
GSSSSLPIGRKELISSVITITLLWYVALARESHGHAXVPEEEYWDVVWAHALITTALGELIGPLDARVEDDELAKEVDDTEPPWPYFMK

SEQ ID NO: 213159 - protein, 859 aa, Glycine max
  unsure (1)..(859): unsure at all Xaa locations
  Clone ID: PAT_MRT3847_34507C.1.pep
MEVNNQIVERSKRVKGRVVLMKKGVLDFHDIKANVLDRVHELLGKGVSLQLISATTPDPAKGLLRGKVANLERWVSTITSLTSTTDTEFSVTFEWDESMGVPGAFIIRNNHHSQFYLKTLTIEDIPGHDGPVNFVCNSWVYPAHRYAHDRVFFANKAYLPCHTPEPLRKFREQELKTLCGKGFGKLNEWDRVYDYAYYNDLGLPDDGPDYARPVLGGSQFPYPRRGRTSRPHCKTDPKTESRLHLLNLNVYVPRDEQFGHVKFSDFLAYSLKSVAQVLLPEIKSLCDKTINEFDTFEDVLDIYEGSIKLPSGPLASKLRELVPYELLRELIRNDGERFLKFPVPDVIKVSKTAWRTDEEFAREMLAGVNPVIIRRLQEFPPASKLDSRVYGDQTSSIRATHIENSLDGLTIDEAIQNMRLFILDHHDSLMPYISRINSTNTKXTYASRTLLFLQDDGTLEPLAIELSLPHPQGEQHGAVSKVFTPAQEGVSASVWQLAKAYAAVNDSGYHQLVSHWLYTHAVIEPFIIATNRQLSILHPIHKLLKPHFRDTMHINALARHTLINAGGVLEITVFPGKFALEMSSVIYKSWVFTEQALPADLLKRGMAIPDSSSRHGLRLVIEDYPFAVDGIEIWDAIETWVTEYCNFYYTSNDMVEEDSELQSWWKEVRNEGHGDLKDRNWWPDMKTKEELIHSCTIIIWLASAFHAAVNFGQYPFAGYLPNRPTVSRRFMPEQGTPEYEELKSDPELAFLKTITAQFQTLVGVSLIEVLSRHSTEEVYLGQCENPEWTLDAEPLAAFERFRQKLLEIENNIMERNKDKRFKNRNGPVKMPYTLLYPNTSDYSREGGLTGKGIPNSISI

SEQ ID NO: 213160 - protein, 84 aa, Glycine max
  Clone ID: PAT_MRT3847_34508C.1.pep
WTSVWVRMGLSALLLRCISGVDWLFSYSLIVNWLDSLIATVLRSMTCLVARVLELQVMTFNVYISESCVYLAIHLICIDLPLHV

SEQ ID NO: 213161 - protein, 187 aa, Glycine max
  unsure (1)..(187): unsure at all Xaa locations
  Clone ID: PAT_MRT3847_34509C.1.pep
MGASLPPKEANLFKLIVKSYETKQYKKGLKAADAILKKFPDHGETLSMKGLTLNCMDRKSEAYELVRQGLKNDLKSHVCWHVYGLLYRSDREYREAIKCYRNALRIDPDNIEILRDLSLLQAQMRDLSGFVETRQQLLTLKPNHRMNWIGFSVAHHLNSNSFKAVEILEAYEGXTLDEDHPPENETV

SEQ ID NO: 213162 - protein, 350 aa, Glycine max
  Clone ID: PAT_MRT3847_3450C.1.pep
MAVPTSESESVENRTFLSQFYSHYLGNRIQTLYPYFSTNFLSTFALRFRSTQRRECLPLPLPSSSLDSPLFMTKRSRVHDVLEDILERVLINLHSVQKNLHFWQSRAKSTDSEKARFMIFERGPRAFIDETVKLLCGLTVQGSSTQNLSQSASDYIGERVGFLNSLRYSLATFLAQVYMEVDKIGEELVEDPETKLPLLLVTINVLFSTLEASIGHLHATRQSDSSVDGSYSTPLLFEKLPEINQEGSQWTDCEIRDAINSVYQNLDKLDSYISFLVIKHKKPRKITQYWIRYTCGAVGLSVCSIWLLRHSRLVGSSDLDNWVEEARNSTYSFFKNHVEEPILSIKDELF

SEQ ID NO: 213163 - protein, 202 aa, Glycine max
  Clone ID: PAT_MRT3847_34510C.1.pep
MERSKRVKGRVVLMKKGVLDFHDIKANVLDRVHELLGKGVSLQLISATTPDPGLRGKLGKVAHLERWVSTITSLTSATDTEFTVTFEWDESMGVPGAFIIRNNHHSQFYLKTVTIEDIPGHGPVNFVCNSWIYPAHRYAHDRVFFANKAYLPYQTPEPLRKFREQELIALRGKGFGKLNEWDRVYDYAYYHDLGLSDDVPDY

SEQ ID NO: 213164 - protein, 34 aa, Glycine max
  Clone ID: PAT_MRT3847_34511C.1.pep
NKDPTLDHLLIETLISCHPKLNLFGKHTRMILYF

SEQ ID NO: 213165 - protein, 83 aa, Glycine max
  unsure (1)..(83): unsure at all Xaa locations
  Clone ID: PAT_MRT3847_34512C.1.pep
VGMPAMQLHCTTSDHPSEMWGFVKNDDRNIAKAXSADTLWKELVYVRRMLSASKDMRGRELHEIPEQVLPRFASKSNRPAGLR

SEQ ID NO: 213166 - protein, 68 aa, Glycine max
  Clone ID: PAT_MRT3847_34513C.1.pep
INGKHTLALFINKLALEDLPSYYQCLIQMYSDYKTYTVFPFMNISGLSLIKLVRTQASKSFMINSERM

SEQ ID NO: 213167 - protein, 137 aa, Glycine max
  unsure (1)..(137): unsure at all Xaa locations
  Clone ID: PAT_MRT3847_34514C.1.pep
LSSQWIAGTKSLRLGLHSLLVSNIIANLVSPLSLFLSLLFSIYPNLFYFIIFIGGRVGGAAQYSADCDGISAGLLKLRDDVQMCGYRDVQVMWNMLNVSLQHDQMPMEAARRSSNNAKFRKRGCSKQRSIXEGLVLD

SEQ ID NO: 213168 - protein, 52 aa, Glycine max
  Clone ID: PAT_MRT3847_34515C.1.pep
MPVDDDECTSQELKRRRLTHHTAVSTHLQVTSSSRSTFLRYVMSHMCMPGAP

SEQ ID NO: 213169 - protein, 132 aa, Glycine max
  unsure (1)..(132): unsure at all Xaa locations
  Clone ID: PAT_MRT3847_34516C.1.pep
MEKKVLFFVSILLFIALLFHGGKVLAFKSQDGSEEWGYVQVRPKAHMFWWHYKSPYRVEDPSKPWPIVLWLQGGPGASGVGIGNFEEVGPLDTSLKPRNSTWLKKADLLFVDNPVGTGYSFVEDKKLXVKTD

SEQ ID NO: 213170 - protein, 68 aa, Glycine max
  Clone ID: PAT_MRT3847_34517C.1.pep
TREREIRHISIYFYFYSMVFFFLCQKTRNQVGKKPHFQHLEGAINDLHPKGKEKLDIGLTRFHHLFDY

SEQ ID NO: 213171 - protein, 104 aa, Glycine max
  Clone ID: PAT_MRT3847_34518C.1.pep
INCPPFGGGPFWENHVIYPFLATCISFFFWPYVKLGGRFLPIGIGKTPGFSQFKWVGPCSPFLRWGYLEVAPTDTPFLTRALPNGQLAPPLYLLLKRGGLGVTP

SEQ ID NO: 213172 - protein, 46 aa, Glycine max
  Clone ID: PAT_MRT3847_34519C.1.pep
GSSFCSTIPTLTPCCHHLFVLTVTGDRKTLNTNFIMFLLYSTAGIS

SEQ ID NO: 213173 - protein, 53 aa, Glycine max
  unsure (1)..(53): unsure at all Xaa locations
  Clone ID: PAT_MRT3847_3451C.1.pep
LGXARETSVXPNXRGIGXCXSXFXLTXFFXNRVXAHTSXVLEPNSELTYACMR

SEQ ID NO: 213174 - protein, 43 aa, Glycine max
  Clone ID: PAT_MRT3847_34520C.1.pep
CEVTILIAKIHTTSSSLSDYISFSLSLELIPHVMGCKATDTIP

SEQ ID NO: 213175 - protein, 72 aa, Glycine max
  Clone ID: PAT_MRT3847_34521C.1.pep
MATNGPLKRKSPPDDDSVNLKIKLQNLDYETLKFIYDGFNIKGKHTARMLNMEDDAEIVAIRSQIGGGAAAL

SEQ ID NO: 213176 - protein, 57 aa, Glycine max
  Clone ID: PAT_MRT3847_34522C.1.pep
CSTADMKYKTIFKLTALLFFFFLKNTVCNCVAYACNCFSSHLSILYVTLNKFWNKIL

SEQ ID NO: 213177 - protein, 31 aa, Glycine max
  Clone ID: PAT_MRT3847_34523C.1.pep
HASAKCLHSRHLIFLVKFMKLLLLNIKEYED

SEQ ID NO: 213178 - protein, 75 aa, Glycine max
  Clone ID: PAT_MRT3847_34524C.1.pep
HLGKGRVYLIHAGRDCTTSVFGRKNISHMFFAGLFLWPRKFKRIVVDVAELLSKEFILPPVYFSAQNVDTFFGAE

SEQ ID NO: 213179 - protein, 200 aa, Glycine max
  Clone ID: PAT_MRT3847_34525C.1.pep
MLDKFPEKYEPAVWWPSSHQFQRRSKTQESNNGWSEDLEMEMREVIEVVYGCQKTTEGDYERLGNIALKVNRSLAIAGPLLSGIAAVGTSFVGNGSWAALVPLMAGSLASVVNAFEHGGQIGMVFEMYRNCGGFFTLLEQTIQATLEEKNLDKRENGEVFEMKVAMKLGRSVLELRRLASKSASCCMKGITVDEFASKLF

SEQ ID NO: 213180 - protein, 197 aa, Glycine max
  Clone ID: PAT_MRT3847_34526C.1.pep
MLDKFPEKYEPAVWWPSSHQFQRRSKTQESNNGWSEDLEMEMREVIEVVKNKDLEDYERLGNIALKVNKSLAIAGPLLSGIAAVGSSFVGNGSWAALVPLVAGSLASAVNAFEHGGQVGMVFEMYRNCGGFFTLLEQTIQATLEEKNLDKRENGQVFEMKVAMKLGRSVSELRRLASKSASCRMEGIAVDEFASKLF

SEQ ID NO: 213181 - protein, 64 aa, Glycine max
  Clone ID: PAT_MRT3847_34527C.1.pep
DSSDQVGHSRSPVHTWSADDVPFSDPHEDARDVSESSPAMTSRSASTSHDAPNWVSFRIHSLIS

SEQ ID NO: 213182 - protein, 40 aa, Glycine max
  unsure (1)..(40): unsure at all Xaa locations
  Clone ID: PAT_MRT3847_34528C.1.pep
MRKMREVVMMSKCELTHDRESEWIRKVDXWARVPYVEICL

SEQ ID NO: 213183 - protein, 33 aa, Glycine max
  Clone ID: PAT_MRT3847_34529C.1.pep
RLAPRAPMPTCARSSVHACSRNILDQFRARPSL

SEQ ID NO: 213184 - protein, 62 aa, Glycine max
  unsure (1)..(62): unsure at all Xaa locations
  Clone ID: PAT_MRT3847_3452C.1.pep
HNXGRREEGQAXXXRXXXHXXAXRFWXSXRXAGGGXXXTHXYDKGEDLSGXRIXWVGXXKHA

SEQ ID NO: 213185 - protein, 82 aa, Glycine max
  Clone ID: PAT_MRT3847_34530C.1.pep
VITWAQLGIHDKPVGLLNVDGYYKTFLSFIDKAVEEGFISPTARHIIVSAPTPKELVKEMEEYFPQHERVVSKLSWESEQLH

SEQ ID NO: 213186 - protein, 312 aa, Glycine max
  Clone ID: PAT_MRT3847_34531C.1.pep
RRRPGAESIFSSDYNSGVRSQFLVSLQRLTESAQILLAEFESTIQKGTSKPAVNGGGVHSLTIQTMNYLSVLADYLNVLSDIFPRDWLPPQKSSSLPESYLYSPESDYSASTPALTARFAWLILVLLCKLDGKAKHCKDVSLSYLFLANNLWYVVARVRSSNLQYVLGDDWILKHEAKAKRFVSNYEKVAWGEVVSSLPENPAAAEAREVFESFNRKFEEGYRKQNSFVVADRELRDEIKGSIARSIVPRYREWYNVLLAKVGSVRDLTATEYVTFTPEDIENYLVNLFFFGTSSSAVSSSSVSSSPLRRWS

SEQ ID NO: 213187 - protein, 100 aa, Glycine max
  Clone ID: PAT_MRT3847_34532C.1.pep
WVERVIIYCPRVYSLDDFPNFQNLNAIYIKFTLIQTNNFLRSLSYKSKGVPFLWELADKLDECPISWPKFFDSLGGAIFSAATDLVSSGACCFFKCFNRR

SEQ ID NO: 213188 - protein, 191 aa, Glycine max
  Clone ID: PAT_MRT3847_34533C.1.pep
MASNSILLLCIFLVVATKVFSYDEDLKTVVPAPAPPVKAPTLAPPVKSPSYPPGPVTTPTVPTPTVKVPPPPQSPVVKPPTPTVPPPTVKVPPPPQSPVVKPPTPTPTSPVVYPPPVAPSPPAPVVKSNKDCIPLCDYRCSLHSRKKLCMRACITCCDRCKCVPPGTYGNREKCGKCYTDMLTHGNKFKCP

SEQ ID NO: 213189 - protein, 119 aa, Glycine max
  unsure (1)..(119): unsure at all Xaa locations
  Clone ID: PAT_MRT3847_34534C.1.pep
MYLSLVLLGFLHGPVSCPVGSSSLAPPAARPFFGRGGHRSSSSGFALATIALSTXMQPGLEQVFGLPRDSYLQGYFNHVSEHLRIGPPVYFVVKNYNYSSESTHTNQLCSIAIADQTLF

SEQ ID NO: 213190 - protein, 83 aa, Glycine max
  Clone ID: PAT_MRT3847_34535C.1.pep
KRDIKLFMKGGNFFYHEAAICNKPLGLNNASGGGCVPRNGPKTCTQQPFVFPPLRKHGKAYIEFRPLKQGPKKIKLGRMGRNI

SEQ ID NO: 213191 - protein, 182 aa, Glycine max
  Clone ID: PAT_MRT3847_34536C.1.pep
MASNSILLLCIFLVVATKVFSYDEDLKTVVPAPAPPVKAPTPASPVKSPSYPPGSVTTPTVKVPPPPQSPVVKPPTPTPAPVKVPPPQSPVVKPPTPTSPVVYPPPPVAPSPPAPVVKSKKDCIPLCDYRCSLHSRKRLCMRACMTCCDRCKCVPPGTYGNREKCGKCYTDMLTHGNKFKCP

SEQ ID NO: 213192 - protein, 72 aa, Glycine max
  Clone ID: PAT_MRT3847_34537C.1.pep
LHSSAITKSFLKFIKTRRLLFYIFIAIPLPPMTISSIMLGFIQQSSNSYYLIQAQGPRSPKFTKEECGRVQV

SEQ ID NO: 213193 - protein, 60 aa, Glycine max
  Clone ID: PAT_MRT3847_34538C.1.pep
RIPKTKPILTICKEHREKVTHVPANNIELVPINYVFTYKQSCVVRKKDIRCFDNLLSKVG

SEQ ID NO: 213194 - protein, 75 aa, Glycine max
  Clone ID: PAT_MRT3847_34539C.1.pep
VSVSMGGDNGAYPVVKFLGIKTILWGPNLSMDVCLTSQRCCLIRPRIGLWGPKKWDRKNIRGFWVRWSKPEPSPF

SEQ ID NO: 213195 - protein, 85 aa, Glycine max
  unsure (1)..(85): unsure at all Xaa locations
  Clone ID: PAT_MRT3847_3453C.1.pep
MASSPSSENKNLEGVAGGAGEKPIPLGENVLQKHAAFFDLNKDGVIYPWETFKGXFPSILFPIEIKNIQRGKHGSDTGVYDTEGR

SEQ ID NO: 213196 - protein, 97 aa, Glycine max
  unsure (1)..(97): unsure at all Xaa locations
  Clone ID: PAT_MRT3847_34540C.1.pep
LCLLYYVHVFTLMFMLLSTRLIGDVCMRKHIMEMTDLVTQLKSLQVEISEPFMVHLILNSLSSQYGPFXISYNTHKEKWSINELLTMCVQEEGRLAQ

SEQ ID NO: 213197 - protein, 331 aa, Glycine max
  Clone ID: PAT_MRT3847_34541C.1.pep
MKMGIVQRLCSSWSNVFRLGNRNSYSSFNKSVDPTNPSCSSSSFLTHGIHVFQCPDAVGIVANLSDCIASRGGNILSADVFVPQNKRVFYSRNVFVFDPVMWPRMQMEEDFLRISKTFNAMRSVIRVPALDPKYKIAILVAKQDHCLIDLLHGWQDGRLSVDITCVISNHYRSPENEVIRFLDMHGVPYHYLRTTAENKREEEILELVQNTDFLVLARSMRILSSFFLRSYGKDIINIHHGLLPSFSGSNPSKQAVDAGVKLIGATSHFVTEGLDAGPIIEQMVERVSHRDNLQSYVQKSENLEKQCLTSAIRSYCELRVLPYEKKNTVVF

SEQ ID NO: 213198 - protein, 58 aa, Glycine max
  unsure (1)..(58): unsure at all Xaa locations
  Clone ID: PAT_MRT3847_34542C.1.pep
VSLTXNKFPDRQPIRTAAKSQDDGKDYQVPLSAPAXDTTRFTSWSFYIAGIAGFVAIF

SEQ ID NO: 213199 - protein, 46 aa, Glycine max
  unsure (1)..(46): unsure at all Xaa locations
  Clone ID: PAT_MRT3847_34543C.1.pep
CLYXMCLXKYGILTSSMHCVNTHFSXLXRSGLINXPIRXYTHXHGX

SEQ ID NO: 213200 - protein, 177 aa, Glycine max
  unsure (1)..(177): unsure at all Xaa locations
  Clone ID: PAT_MRT3847_34544C.1.pep
MEGLNGNSVDNSQKRAVPPMHSCKYSQKRSKKTKESQFDLSPSVGGISVATREDGDRELVNLVLMTYDSLRRRLCQLEDAKELNTTMAIKRADLRASNAMTVKAFRTNTRRRVGAVPGVEIGDIFFLRMEMCLVGLHGQSMSGIDYMTIKDELQEEPVALSIVSSGVYDNDAXDNDV

SEQ ID NO: 213201 - protein, 81 aa, Glycine max
  Clone ID: PAT_MRT3847_34545C.1.pep
PCGEWRGLWLRRKATPFLASGGGRTFLFSDNRIRLLSVGAMTNFRAFFCDRGSDLAGWGAASSHTQTGVMFAATSLMNAVY

SEQ ID NO: 213202 - protein, 78 aa, Glycine max
  Clone ID: PAT_MRT3847_34546C.1.pep
LEHGFVSREHNRSPGYYNGRYWPMWKPPMFGCTNASQVLKELQEAKTASPKGFTRIMGFDNVPQVQCISFFAYKPPGF

SEQ ID NO: 213203 - protein, 44 aa, Glycine max
  Clone ID: PAT_MRT3847_34547C.1.pep
FFNIFSSKKNFYMVQIVHFLVMKQSWFGPLFIFNLGDPTSCGFL

SEQ ID NO: 213204 - protein, 79 aa, Glycine max
  Clone ID: PAT_MRT3847_34548C.1.pep
TYSLRSKSLAYCFLYIHMQTIRSNKFKTGMGLFQRAKAVLLQRHTYKSLLDEDNRDLGTTRTKGSLESSPGTREYREVC

SEQ ID NO: 213205 - protein, 67 aa, Glycine max
  Clone ID: PAT_MRT3847_34549C.1.pep
GRMRSKFRACRSLWQSVRAFRVDRRSPSHSCSRAPTPKLGPSHSMVVLGLVMQRFRTYAPSTGNSRP

SEQ ID NO: 213206 - protein, 200 aa, Glycine max
  unsure (1)..(200): unsure at all Xaa locations
  Clone ID: PAT_MRT3847_3454C.1.pep
MASSPSSENKNLEGVAGGAGEKPIPLGENVLQKHAAFFDLNKDGVIYPWETFKGLREIGTGVLLSVGGAIFINVFLSQRKXPSILFPIEIKNIQRGKHGSDTGVYDTEGRFVPSKFEEIFNKHAHTHPNALTYDELTEMIKANREPKDFSGRIGSVVEWKILYKLAKDKSGLLQKETIRGVYDGSLFEQLKKQHSSGKEK

SEQ ID NO: 213207 - protein, 161 aa, Glycine max
  unsure (1)..(161): unsure at all Xaa locations
  Clone ID: PAT_MRT3847_34550C.1.pep
AHASDQYNEVQAQMETNLLKLSLDDVQTPKGSMSDLKISQSNIARSKDTDGGTILRTDLLADFLTEGNFRASVDLQATHPINGMTNTASTVGIPENTGIALACAMNSSFRXGRASSDIDTICSQDCELWNPACTKAMTMSFNANPXSDAWSVEFLKQTGLH

SEQ ID NO: 213208 - protein, 57 aa, Glycine max
  Clone ID: PAT_MRT3847_34551C.1.pep
FFRSECCAITHNVLRTRVLVNVSSSMPGYALSHIISSACSHNALWLLALRCTCLTTR

SEQ ID NO: 213209 - protein, 170 aa, Glycine max
  unsure (1)..(170): unsure at all Xaa locations
  Clone ID: PAT_MRT3847_34552C.1.pep
TRPEQLKVRDRNYHLPPLHTKQAPMKFQFHAVPFVLLSFTVSLFGLIEADLNSDRQALLEFFSNVPHAPRLNWSDSTPICTSWAGVTCNQNGTSVIEIHLPGAGFKGSIPKNSLGKLDSLKILSLHSNGLRGNLPSDILSIPSLQYVNLRQNNFSGLIPXTISPGLXXWV

SEQ ID NO: 213210 - protein, 96 aa, Glycine max
  unsure (1)..(96): unsure at all Xaa locations
  Clone ID: PAT_MRT3847_34553C.1.pep
MRITKLIMEQKRCSFVTIYRDFKPYLLMVLVQVGLSILYLITKASFNHGMSXVYVTYRQIVAVVVMLPFAYFLERKARPHLTFSLFVQIFVLSLLG

SEQ ID NO: 213211 - protein, 58 aa, Glycine max
  Clone ID: PAT_MRT3847_34554C.1.pep
RGTPSPPIKGGKCFSLTPTIVEGEQRHPLSALQTTFPGPPFVNYLPRPPKYTLLTYCA

SEQ ID NO: 213212 - protein, 503 aa, Glycine max
  unsure (1)..(503): unsure at all Xaa locations
  Clone ID: PAT_MRT3847_34555C.1.pep
AAVGEAKSRGVNAAVNCKPKKKKGTTITLSEFNRGGFDQGLTRDEMLALPTGPKERSADEMPFNRLGGGFSSYDRSGGSLAXRDGGNNEGSWGGGGRRSYGGFDEERRGPNPRVSELDQPSRADEVDNWASVKKSLPAFDSGRQNRFGGGGYGGSGGGGFGGGGGGGGFGGASRADDVDSWAAGKKPVPVRSSNFGSGFRDSGVEPDRWTRGGPPREVDRTERPRLVLDPPRGDGVVNESPVKALDKANPFGAARRXRGKVLAEKGLDWKKMDSEIETKTVWCGLRXSSTFDXREPNTTILLLVFSNTDAVLKSGNWRNPFGDAKPREAVLGERGMDWRKIDLELEHRSVDRPETMEEKLLKEEIDNLKKELEKESTINSNKESVDEAGGDQTSTHAILQQKEKELELLIRDLDDKVRFGQKAIERPGSSAGKSSTFSDRPHSRSGSFEDSRSVDFTDRPRSRGTGDMWMHPSDDRRQFQGSRERGWFSGSRDLNRSTSRERW

SEQ ID NO: 213213 - protein, 190 aa, Glycine max
  Clone ID: PAT_MRT3847_34556C.1.pep
PTRPTGSSSSPSDADLQSLFELLQQILMKVSVSRSENLWLKALKFYANQRRYFDKLVEISVVTLVRDGGSENGFSLSSAIVSFILQKDGIQKTRDIYKRFLALPLPGLALYRRCIDLETNLASIGDKDGLINARKLYESSLATYDQNVSLWQDYYRLEIKMGTSEKATAIYWRARKVLKDASEFVTAPDM

SEQ ID NO: 213214 - protein, 655 aa, Glycine max
  Clone ID: PAT_MRT3847_34557C.1.pep
MADVVQYRLERMVDELDDLEQRGLFSRREIAEIVKQRRKFEYRLKRPSPLKEDFLAYVEYETQLDALRRLRKKSVARELMKQGNKKLKKSKSDFAGLLRIMDIYELALKRYKGDIDLWFRYLEFCRLRKNGRMKKALANVIRFHPKVPGIWIYAAAWEFDHNLNVAAARALMQEGLRVCPTSEDLWVEYLRMELTYLNKLKARKVALGEDQGTLTRDPRSSDEKHWRDENSELFMPLGERGDGDGDDDRANVGSDESEKKQELFEERGMNIFQTVYGGAVEAVPSSLSLRKRFFEILEGTNLSHYEDMCKEILNDMKRDFSTQPEFWDWLARHECDLENDLEISEEGIIPQVEKAVQVYEEALENVPSGTMFCLYANFLTDIVAHKEGETNINGSSGHAANYISHLLLIYERAESMGCITEDLACKHVSLHLQLRQLDEARKLAAKLCSGKLAESVELWGLRITIEIRCTTKSSSPSDADLQSLFELLQQILMKVSVSKSENLWLKALKFYANQRQYFDKLVEISVVTLVRDGGSENGFSLSFAIVSFIFQKDGIQKTRDIYKRFLALPRPGLAHASDCIDLETNLASIGDKDGLINARKLYESALATYDQNVSLWQDYYRMETKMGTSEKANAIYWRARKVLKDASEFVTATDM

SEQ ID NO: 213215 - protein, 62 aa, Glycine max
  Clone ID: PAT_MRT3847_34558C.1.pep
PVFFMLWLPSQFKLQLSPIRQCRRVLNRRHPFGLPHQPNTVARATLLLVLLFTCYINHAVQL

SEQ ID NO: 213216 - protein, 149 aa, Glycine max
  unsure (1)..(149): unsure at all Xaa locations
  Clone ID: PAT_MRT3847_34559C.1.pep
KKKEKKIIKDKNKKKRKKXKIKDKNNKEKXEXKIKKIKRNQQTRKKNKKKKKKKNKRXKKKKIKKKKKENRKKRXKKKKKVKKKKKRNEKNKKRXIRKKNEIEIKKKKRERTTLHIMICPYIILFGNKGNIRHGWLMINSLTKCMLIVA

SEQ ID NO: 213217 - protein, 176 aa, Glycine max
  unsure (1)..(176): unsure at all Xaa locations
  Clone ID: PAT_MRT3847_3455C.1.pep
ERSEKHAAFFDLNKDGVIYPWETFKGLREIGTGVLLSVGGAIFINVFLSQSTRPGKXHLYFFPIEIKNIQRGKHGSDTGVYDTEGRFVPSKFEEIFNKHAHTHPNALTYDELTEMIKANREPKDFSGRIGSVVEWKILYKLAKDKSGLLQKETIRGVYDGSLFEQLKKQHSSGKEK

SEQ ID NO: 213218 - protein, 52 aa, Glycine max
  Clone ID: PAT_MRT3847_34560C.1.pep
IKRGGFTSAKSESQTSLKGSGQVFPYSKLDFFARERDMKTSWAIQFFITNVR

SEQ ID NO: 213219 - protein, 67 aa, Glycine max
  unsure (1)..(67): unsure at all Xaa locations
  Clone ID: PAT_MRT3847_34561C.1.pep
KHTHPHTQPLNNINTTTQSNPPLTFTGINPPFIKSQQRQSINQXQPTPSPNTHTKPHTPLXQHTKKT

SEQ ID NO: 213220 - protein, 117 aa, Glycine max
  unsure (1)..(117): unsure at all Xaa locations
  Clone ID: PAT_MRT3847_34562C.1.pep
MKGWLQTLVLAASLAGRVVANEFNIQQDDAHRQRCSGMYSRKAWGGDIDPFILTKFVKAEDDTADQDVLVSLVIFEWGDEALIGRQVPGTDELATICDQVKVDASLCTXEEISSFIL

SEQ ID NO: 213221 - protein, 87 aa, Glycine max
  Clone ID: PAT_MRT3847_34563C.1.pep
WEFSRSLVKDLVGCGIYSTRSGTDVDDIITTSLFVPLGMLNATSPTGVTCAFVSLSVVSTGCFRAARLTPIRISSSKVPYPYARIIE

SEQ ID NO: 213222 - protein, 51 aa, Glycine max
  Clone ID: PAT_MRT3847_34564C.1.pep
NEPHPSEELNSFSPTLHKMNFSSFVRGVTLAEIHLEPSPLRHRPTHSDIVQ

SEQ ID NO: 213223 - protein, 52 aa, Glycine max
  Clone ID: PAT_MRT3847_34565C.1.pep
KHKLSNPFVGKGRKQLMNDTNANGFNRNTKNRMHGYYSSNKWPLSLGRHQIK

SEQ ID NO: 213224 - protein, 174 aa, Glycine max
  unsure (1)..(174): unsure at all Xaa locations
  Clone ID: PAT_MRT3847_34566C.1.pep
MIKMNLAFAFLCLFTVEPWRVCSQQQQQRLLVNMTLVPSARASGALCLDGSLPAYHLHRGFGAGKDNWXLQFEGGGWCNDLKSCLDRAKTRRGSTRYMTKWEVFSGILSNNATLNADFYNWNRVKLRYCDGASFTGDAVFTNKTTTPHFQGLKIWEAIIRDLLPLGLGKARKAL

SEQ ID NO: 213225 - protein, 73 aa, Glycine max
  Clone ID: PAT_MRT3847_34567C.1.pep
ETRGVSCWRSQATFLDISWFFLWRGLECLEFYKISIALGLNTCQWSRKRVIEPPTSPSFGFRKKKNKTYPNAW

SEQ ID NO: 213226 - protein, 51 aa, Glycine max
  Clone ID: PAT_MRT3847_34568C.1.pep
MDASRRHVLICFARVSLFLCALSLSAAHGSSTVQDIAIKLTLGDNHLLRMY

SEQ ID NO: 213227 - protein, 277 aa, Glycine max
  unsure (1)..(277): unsure at all Xaa locations
  Clone ID: PAT_MRT3847_34569C.1.pep
HACSIQEVCYQPLNIPEQIWEEISMDFITGLPKSKGYXVILVVVDRQSKYSHFIPLKHPYSARVLAEIFAREVVRLHGIPASILSDTDLIFVSSFWKELFKLQGTALKMNTAYHPQMDGQTXVVXLETFFRCFLADQPKIWVLWLSWAEYXYNTNFHVSTGMTPFEVVYVRKPPMLRRFLPGEVHVEAVRRELQDRDEAISQLKYQLRXAQNRMKNQADRKRADRHFEVGEWVFLKLRPHGQLTLGARINHXLAPCYYGTYXVLPRVXAVAYRQQLP

SEQ ID NO: 213228 - protein, 60 aa, Glycine max
  unsure (1)..(60): unsure at all Xaa locations
  Clone ID: PAT_MRT3847_3456C.1.pep
XIFHLSKYFCLDMLHTIQEEKRKLKKYNIDFPSLFLLPREQVHFSVFLKISYQKSAFNMT

SEQ ID NO: 213229 - protein, 95 aa, Glycine max
  Clone ID: PAT_MRT3847_34570C.1.pep
PAPQRRQRGAFLRDALHFLTPDGRNVSNLLREGQVHCVATTECVGPGPMEFKFTLDFALYEWLGKLSLPHSTFLIWQKNAPFYRGRSMGKILLSS

SEQ ID NO: 213230 - protein, 78 aa, Glycine max
  Clone ID: PAT_MRT3847_34571C.1.pep
GDITEAIKKANGVHFPEERLCKLLVQLLMALDYLHANHILHRDVKCSNIFLTKDQDIRLGDFGLAKMLTCDDLASSVV

SEQ ID NO: 213231 - protein, 57 aa, Glycine max
  Clone ID: PAT_MRT3847_34572C.1.pep
RGQNFWGIRGFIYPNALMVVKTTAPGKIPERRPRGRVFYRGGAPGCKFGGLGEWGNP

SEQ ID NO: 213232 - protein, 109 aa, Glycine max
  Clone ID: PAT_MRT3847_34573C.1.pep
GRPLCTVCVRIGWIEFLCLITLALCHINLLAYELISSTYKCRPLMMDHFIFGRWFTTKKTFYFQVVKRTFLGNIIWNSSAWSIIRAIRTERETILIARTNQGALPTFIL

SEQ ID NO: 213233 - protein, 57 aa, Glycine max
  Clone ID: PAT_MRT3847_34574C.1.pep
SAQYDSSFMRLQAQHKHLLYTNKINKKKKSMSQPLVNLVAKLHGVHNFLYVGPPCHK

SEQ ID NO: 213234 - protein, 50 aa, Glycine max
  Clone ID: PAT_MRT3847_34575C.1.pep
FIDHTKSRSSSLKNLVKCSLHFIFIFLKLSQAICPFSHTPQKQDKGTQFH

SEQ ID NO: 213235 - protein, 66 aa, Glycine max
  Clone ID: PAT_MRT3847_34576C.1.pep
GQSSPRGSATKFASEGPKLLLLVGKRTAGARVASSPDSDLEAFSHNPTHGSFAPLAFQPSAMANCA

SEQ ID NO: 213236 - protein, 44 aa, Glycine max
  Clone ID: PAT_MRT3847_34577C.1.pep
YKKVFTFIIGLNFTILCKHCNFCFISVSKKYNNSGLIFKYAPVF

SEQ ID NO: 213237 - protein, 49 aa, Glycine max
  Clone ID: PAT_MRT3847_34578C.1.pep
AAHRVIFFPLRNGTQTSTKKVSNSCNQVSSAIVPRFKQRPPVISVDQNI

SEQ ID NO: 213238 - protein, 144 aa, Glycine max
  unsure (1)..(144): unsure at all Xaa locations
  Clone ID: PAT_MRT3847_34579C.1.pep
PGSTRATLNSLFVTHLXTTLHTRIPLIILSAVPTANPFTTPPFYTLTTLTVNGRTSXYVKGLLTCHFHVPPYSHNRYTYMCFPFYTRALISLSVPALLSCFPLPPYRSYPYLRICCPRLRIFVPPPPPQRRRTSYSDDGKPSLE

SEQ ID NO: 213239 - protein, 47 aa, Glycine max
  Clone ID: PAT_MRT3847_3457C.1.pep
TKSFLSEFTNFQVIYFQSFRRDHGSQVLNGSHFCVGFAFSHLWQWQG

SEQ ID NO: 213240 - protein, 220 aa, Glycine max
  unsure (1)..(220): unsure at all Xaa locations
  Clone ID: PAT_MRT3847_34580C.1.pep
MAKHFLLLLFAVCVAAIDEEPFIGVNIGRDLSDMPHPTQVVALLKAQQIRHVRLYDADQAMLIALANTRIQVAVSVPNQEILAIGQSNTTAAKWVSHNVIAHYPXATNITTIWVGSEVLTTLPYAAKVLVSALKFLHSALVASNLDHQIKVSTPLSSSMILDSFPPSQAFFNRSLNPVLVPMLDFLQTTDSYLMLNIYPYYDYMQSNGVIPLDYALFNHS

SEQ ID NO: 213241 - protein, 99 aa, Glycine max
  unsure (1)..(99): unsure at all Xaa locations
  Clone ID: PAT_MRT3847_34581C.1.pep
XXARVRKLGIRLEEXEKIXXXXXFXKXXXXRQSXXXXAXXXWPXXTXSXXXXXAVXRNXXGXLXEXXXXXALXXXGIVXHXXXSWGSWIXXRXXISWXX

SEQ ID NO: 213242 - protein, 69 aa, Glycine max
  unsure (1)..(69): unsure at all Xaa locations
  Clone ID: PAT_MRT3847_34582C.1.pep
GINHIMSFAIISNVWMNNHQRSEASSQACVSXPSDPRNSQQESCSEESLTVTYTNVTQTLINGTLRYIG

SEQ ID NO: 213243 - protein, 190 aa, Glycine max
  unsure (1)..(190): unsure at all Xaa locations
  Clone ID: PAT_MRT3847_34583C.1.pep
KKKKRKKKKMKRXXKQKKKXNKKNKKKKKKKKKXKIIEGKGKKKKKKKKSQKKKKKKKKKKKKRKXHYXEKKKKKXKKQKKXKLKKKKXEKXKRLIKXEEKKYKXIEQKKRKXNXXXTXKKXKEXKKXKKKEXNKKXXXRXNKKEXIQNKKKXKTXKKKKKKPXNIKIKKRKKPKHENXTKPRPIVCNTA

SEQ ID NO: 213244 - protein, 243 aa, Glycine max
  unsure (1)..(243): unsure at all Xaa locations
  Clone ID: PAT_MRT3847_34584C.1.pep
MSSSLIANPTADRSRDSHRTKKKKKSIKQHQQQHDAKWKTHAQQQLYSSKLHQALARVNISGDAPRRGRAVRDAADRVLAVAAKGRTRWSRAILTNRLKVKFRKPVHKRQKVVVVGPGRPKKKARFSVLRLRGKTLPAVQRKVRVLGRLVPGCRKEPLPVILEEAIDYIPALEMQVRAMQALADLLXALPPPPPPPPPRRLVDLTFRRLCHVSYIFFPYFCYYLPRFHPHSTRLMLIAKYIHN

SEQ ID NO: 213245 - protein, 85 aa, Glycine max
  unsure (1)..(85): unsure at all Xaa locations
  Clone ID: PAT_MRT3847_34585C.1.pep
RLPGGAQAYACVRRGSGALVSIACIPWAVVRIAKRCSIGVAFLFFYGIFPGGGEDRFFFCLXRXAKGSLIFYFSTTPAGAAIPLV

SEQ ID NO: 213246 - protein, 54 aa, Glycine max
  unsure (1)..(54): unsure at all Xaa locations
  Clone ID: PAT_MRT3847_34586C.1.pep
SSSRKCFFFHLLXILPGATMHSAILGILCDTLNWCTCVPIIXLNXILSFTKTFR

SEQ ID NO: 213247 - protein, 88 aa, Glycine max
  Clone ID: PAT_MRT3847_34587C.1.pep
LFTFFFCTGQLRTISMEPIRFPRPANTYSKLHRGPGDLFGTKILSDGLLTQLELRGKIAGHWISNRNLKGYQGFNATGPPPQIMGTYF

SEQ ID NO: 213248 - protein, 57 aa, Glycine max
  Clone ID: PAT_MRT3847_34588C.1.pep
TQITKEKFYAILRNLIRCFNPKNGAQLSFQWCTQTHSTIDPKNNCIQLLILHKNGES

SEQ ID NO: 213249 - protein, 96 aa, Glycine max
  unsure (1)..(96): unsure at all Xaa locations
  Clone ID: PAT_MRT3847_34589C.1.pep
IEGQEQDLSLASNNFPGRQPTATSAQSQDXAGSAYSRGHQPTGYPRASSGWTSYIARIAXLAATRPMIYIPVLADMGVSSAKSQCSADVTLRMNLA

SEQ ID NO: 213250 - protein, 140 aa, Glycine max
  unsure (1)..(140): unsure at all Xaa locations
  Clone ID: PAT_MRT3847_3458C.1.pep
LTLPLTHSLYFKGLKLSTGDRSFYNKRCAYLHTKPLFIPISHSIISGTHFPLILIHKQLKHNFQTNYRIHTPTSMYSSXILEYLTHXHLKLTYKSNKDLKVNRLTPSLLHLSITLYLELLTLIKGTIANDVPISYIHNSL

SEQ ID NO: 213251 - protein, 44 aa, Glycine max
  Clone ID: PAT_MRT3847_34590C.1.pep
VFMISATGSYSGISAGESGALVEIIELSLGLAAECPPIVCVGGD

SEQ ID NO: 213252 - protein, 249 aa, Glycine max
  Clone ID: PAT_MRT3847_34591C.1.pep
MSTMSEGYYNSKKSGDIYGQQGTRAALSMSRLRCILRGLNFKTYMFLFLVVPMGIFSLYFHGLKISYFLRPLWESPPKPFHEIPHYYHENVSMETLCRLHGWRIRESPRRVFDAVLFSNEVDILTIRWKEMYPYVTHYVILESNSTFTGLPKPSIFASNRDNFRFVESRLTYGMIGGRFKKGENPFVEEAYQRVASDRLLKIAGIEDDELLIMSDVDEIPCAHTINLLRWCNGIPPVLHLQMRNYLYSF

SEQ ID NO: 213253 - protein, 45 aa, Glycine max
  Clone ID: PAT_MRT3847_34592C.1.pep
GSSVCDCCDSFVFLFIFFFCCLCFCFFSHLKMSCFCGNCCCLSSC

SEQ ID NO: 213254 - protein, 161 aa, Glycine max
  unsure (1)..(161): unsure at all Xaa locations
  Clone ID: PAT_MRT3847_34593C.1.pep
LERFEHPHASLYLFSLTGLQKARGVITIIKEGPLAIAKVELXQSPYPLNVPNPVMNPHTLVFYCGKHHKTYVVNHKKQVLGTELDGKPLEDIIVTSYNKGYILPSLNNATQVWNHDLFWESMKPCGGGKPSWELLKLNDRDCGSLCKIHDELKAAASTQFG

SEQ ID NO: 213255 - protein, 57 aa, Glycine max
  Clone ID: PAT_MRT3847_34594C.1.pep
KDNVPPHVSYCCCIVSGFALLQGFCYCMCCCFLLILRCCFKFDNENMVWSPLLTTYI

SEQ ID NO: 213256 - protein, 57 aa, Glycine max
  Clone ID: PAT_MRT3847_34595C.1.pep
SVVATFSHLISHNLKLRVFICLSIRTWALTLLLSSVFTLIAIALSLPLSLFLTKFHV

SEQ ID NO: 213257 - protein, 90 aa, Glycine max
  Clone ID: PAT_MRT3847_34596C.1.pep
FLASQKLNWIKATLTCNPPLLSNLSTFKYIHQFSSTNNPILREVEESYFPMGSMVSTHNLLHLSLLRYLKYCIIIANHQLIAIQAGFDGI

SEQ ID NO: 213258 - protein, 187 aa, Glycine max
  Clone ID: PAT_MRT3847_34597C.1.pep
MQTVKLISIGNSGVGKTSMLIGYTARVFPTEFIPTVFDDYAANIMVDGRPVYIALWDTNGSEDFDRLRPMSYPQTDVFLVCFSVASPTSFDAVRNKWWPEMTKHADPNTPWVLVATKTDLRNDAALVAELRERQMAPITQAQGQALATELGAATYCETSTLTLTNLSDTFDAAYRAALAPRRYAARK

SEQ ID NO: 213259 - protein, 75 aa, Glycine max
  unsure (1)..(75): unsure at all Xaa locations
  Clone ID: PAT_MRT3847_34598C.1.pep
LPASCRSXXXXPXXXXXXPVXXVXXSXARXXLXXXPXXLXSXRXXXXPLXXXXAXXSXXSCCSCXTRXXVRVXQL

SEQ ID NO: 213260 - protein, 34 aa, Glycine max
  Clone ID: PAT_MRT3847_34599C.1.pep
GYICAMQASHTLDSQASAEYTIMGKLCITVEVSG

SEQ ID NO: 213261 - protein, 58 aa, Glycine max
  unsure (1)..(58): unsure at all Xaa locations
  Clone ID: PAT_MRT3847_3459C.1.pep
CYKIYPYLNYTXSTTTDTLVMGVAPIKAQFKSAXYDVPTQNDRCXIXSNCTYNPCTCK

SEQ ID NO: 213262 - protein, 195 aa, Glycine max
  unsure (1)..(195): unsure at all Xaa locations
  Clone ID: PAT_MRT3847_345C.1.pep
MLSLSNVHLSTAVLLKPIFLHGLSGFLHLLLLVAVVLSWVWRKFTAGPGDESKKKPNNSLFKTTVFSSLALSAFNFLLCFINYFYWYTSGWSEEKLVTLLXWLKTLAWGVVCVCLQKAFFSSGQRRFSFFFSAWFTFYLSVSCYCIVVDIVVMSGRRVSLPTHFYLHVSLVRARSQNWCERDGFVREAFKEGLGN

SEQ ID NO: 213263 - protein, 42 aa, Glycine max
  unsure (1)..(42): unsure at all Xaa locations
  Clone ID: PAT_MRT3847_34600C.1.pep
MVKHNNVISNGHSRKRWQNYVKTWFNQPARKXRRRLARQKKL

SEQ ID NO: 213264 - protein, 92 aa, Glycine max
  unsure (1)..(92): unsure at all Xaa locations
  Clone ID: PAT_MRT3847_34601C.1.pep
RCNHSRLRQNAMLQPSVYHHHGLLTAPQIEPTLSGNLPPRYYXSSCRTDYVRIIYNQATDSLLXKPLFIYKAPFTDGNLIRKEKPSYALSDY

SEQ ID NO: 213265 - protein, 52 aa, Glycine max
  Clone ID: PAT_MRT3847_34602C.1.pep
PGEFTMLELAQVSYSSSLLSLSFVHCFCLQLCLFLISVRICYDMCILFLFIP

SEQ ID NO: 213266 - protein, 65 aa, Glycine max
  Clone ID: PAT_MRT3847_34603C.1.pep
HCYLKIKPNSYLFCLVSLVYIYYSLSTFCSRTRVKLIVNFLPGIVAVYIKTANFKCYQCCYIMGA

SEQ ID NO: 213267 - protein, 48 aa, Glycine max
  Clone ID: PAT_MRT3847_34604C.1.pep
RADRRVRPVAKKHQMGLSLLNKNTGICLFKIGCRPIYICSLDPSNCCT

SEQ ID NO: 213268 - protein, 212 aa, Glycine max
  Clone ID: PAT_MRT3847_34605C.1.pep
RRRRKWFLTHTVSVTLNQFIRHHSTEPAAEETPPLELEKEPSNTDETSPLTESEGGVLKEAQVLETCAQVEEKPEPVSTPVAAEVDESQKEPEKQSLEQRVEEEKPDTSVVPQHSEESGDATEVKTRELEFEAEVLEKTNNSETEKPEPVEAEVAESQREAEKAEPVAAKVDEKQSETVKAEPVAAKVDENQSEPEKQEKEEKPKKAPLTRS

SEQ ID NO: 213269 - protein, 156 aa, Glycine max
  Clone ID: PAT_MRT3847_34606C.1.pep
SVRYQCKNYYKLRTDGDGEAMPCSLPHVHLRVRFTSPADVGKEGMLMMMSPSPRVYTLNNEKQWINKAVGDKLPECEAVCGKPKNPANPVQRILGGHLDAKGSFPWQAKMVSHHNLTTGATLINEQWLLTTAKNLFLNHSENATAKDIAPTLTLYV

SEQ ID NO: 213270 - protein, 81 aa, Glycine max
  Clone ID: PAT_MRT3847_34607C.1.pep
ELKKECCINIIVFTTHMILVTKDILSNNLRNINNWLLNFGAPASTATTFLIFAMLCEQRQWSCSPMSRCTMGISDINRSLM

SEQ ID NO: 213271 - protein, 137 aa, Glycine max
  Clone ID: PAT_MRT3847_34608C.1.pep
INLQLTTFSHPHGLPAAYATRFVVAGANFGCGSSREHAPVKPSSPSSFSVEKYRFKTSYDCNTARTIWNKICVDRFSDALARAREKAKQVTVSENVADYKGHGPRGMRTEIWDGLVGIWNTPGWKNKSIKAKMNRVA

SEQ ID NO: 213272 - protein, 98 aa, Glycine max
  Clone ID: PAT_MRT3847_34609C.1.pep
FSPSNNFSHVCAKRLIHSIKVKLGIRQGPGQILIPGAWGSQGGAAPIFFMFPDIWLPETSRILFFCLCHFLYFAFESIFFGLFYLSGTNRRLFSHSSK

SEQ ID NO: 213273 - protein, 92 aa, Glycine max
  Clone ID: PAT_MRT3847_3460C.1.pep
MASIIMSFAPATGRVFAATAAKGAGGSKEKGLLDWIIGGLQKEDQLVETDPILKKVEEKNGGTTTTTTGRNKNSVAVPQKKKGGFGGLFAKN

SEQ ID NO: 213274 - protein, 47 aa, Glycine max
  Clone ID: PAT_MRT3847_34610C.1.pep
FNASGLTMSWDTSGIRRVVQAIINVLTCNVQDQMGALACYIRVLPPN

SEQ ID NO: 213275 - protein, 50 aa, Glycine max
  Clone ID: PAT_MRT3847_34611C.1.pep
TSTGFVGRTAFCFYKNEYFLSVKINKARKWTVYDGIFMIFPLAYVCISQL

SEQ ID NO: 213276 - protein, 218 aa, Glycine max
  Clone ID: PAT_MRT3847_34612C.1.pep
HEVLSRAFDSSVSAKDPPSYKGVALGGTGTGAIQSLLISPVELTKVRLQLQNAGQMTETAKGPLMLAKNIWRKEGLRGIYRGLGVTVMRDGPSHGLYFWTYEYMREQLHPGCRKSGEESLNTMLIAGGLAGVTSWISCYPFDVVKTRLQAQTPSSIKYKGIIDCFKKSVNEEGYGVLWRGLGTTVARAFLVNGAIFSAYEISLRLLFNNGNIQMQETL

SEQ ID NO: 213277 - protein, 51 aa, Glycine max
  unsure (1)..(51): unsure at all Xaa locations
  Clone ID: PAT_MRT3847_34613C.1.pep
QRLGCHNTGATQLNRLVTHPPIPSCRNSGXARTERPSXLLHILNGKWHFAL

SEQ ID NO: 213278 - protein, 348 aa, Glycine max
  Clone ID: PAT_MRT3847_34614C.1.pep
MGSASESVCVTGASGFIGSWLVMRLIERGYTVRATVRDPVNMKKVKHLVELPGAKSKLSLWKADLAEEGSFDEAIKGCTGVFHVATPMDFESKDPENEVIKPTINGVLDIMKACLKAKTVRRLIFTSSAGTLNVIERQKPVFDDTCWSDVEFCRRVKMTGWMYFVSKTLAEKEAWKFAKEQGLDFITIIPPLVVGPFLMPTMPPSLITALSPITGNEDHYSIIKQGQFVHLDDLCLAHIFLFEEPEVEGRYICSACDATIHDIAKLINQKYPEYKVPTKFKNIPDQLELVRFSSKKITDLGFKFKYSLEDMYTGAIDTCRDKGLLPKPAEKGLFTKPAETPVNAIMHK

SEQ ID NO: 213279 - protein, 107 aa, Glycine max
  Clone ID: PAT_MRT3847_34615C.1.pep
GLPLYSLDRTHHSAKWHADATGEWERMHEDITDVAKPRLLASHTESEISHMGTLDCLLASRNRLYHIRAYYSAHNTFKDVHLATPKSTFGGNVCIYSSYSARYITNV

SEQ ID NO: 213280 - protein, 354 aa, Glycine max
  Clone ID: PAT_MRT3847_34616C.1.pep
MGSSSASESVCVTGASGFIGSWLVMRLIERGYTVRATVRDPANMKKVKHLVELPGAKTKLSLWKADLAQEGSFDEAIKGCTGVFHVATPMDFDSKDPENEVIKPTINGLLDIMKACVKAKTVRRLVFTSSAGTVDVTEHPNPVIDENCWSDVDFCTRVKMTGWMYFVSKTLAEQEAWKYAKEHNIDFISVIPPLVVGPFLMPTMPPSLITALSLITGNESHYHIIKQGQFVHLDDLCLGHIFVFENPKAEGRYICCSHEATIHDIAKLLNQKYPEYNVLTKFKNIPDELDIIKFSSKKITDLGFKFKYSLEDMFTGAVETCREKGLLPKPEETTVNNELLPKPAETTVNDTMQK

SEQ ID NO: 213281 - protein, 68 aa, Glycine max
  Clone ID: PAT_MRT3847_34617C.1.pep
ISDCNTTTRIPYLCESLNRNTATRGHCKSPSVIVRHHRRFPSTAMKPEAAICSLSALTHEPRVPNPSF

SEQ ID NO: 213282 - protein, 129 aa, Glycine max
  Clone ID: PAT_MRT3847_34618C.1.pep
MPLQRTTLPSSNRRRLFRHSAANSPAAALMSPESTATALNLRRILGAALLFFLVSLSCVLLFRNAYYSVFVSSNPLSRFTTVFPPNDSAAVTNEYSLENILSEAAMQDRTVILTTLNEAWAAPRSIIDL

SEQ ID NO: 213283 - protein, 115 aa, Glycine max
  unsure (1)..(115): unsure at all Xaa locations
  Clone ID: PAT_MRT3847_34619C.1.pep
ARGILILVYCTADISSGHSHPEGTYVLVLDRKVXMTQAVVCMDTQGLXAIWIFRMIDAFHMTYSNMYRTRARLLSAEYRTITGXWASTIVTFDTFYTDGCATDPMTNARDSHEPV

SEQ ID NO: 213284 - protein, 69 aa, Glycine max
  unsure (1)..(69): unsure at all Xaa locations
  Clone ID: PAT_MRT3847_3461C.1.pep
HYQCTTDGTKIADVLLSQDIDTGVKVNKRTLPQACANXEARCQGIDGLGFSMGAYYHAGALVKTSQTVA

SEQ ID NO: 213285 - protein, 230 aa, Glycine max
  Clone ID: PAT_MRT3847_34620C.1.pep
MEGGVPDADISAFRECLSLSWKNPYVLRLAFSAGIGGLLFGYDTGVISGALLYIRDEFPAVDRKTWLQESIVSTAIAGAIIGAAVGGWMNDRFGRRKSILVADVLFIVGSAVMAAAPVPAVLIIGRVFVGLGVGMASMASPLYISEASPTKVRGALVALNSFLITGGQFLSYLINLAFTKAPGTWRWMLGVAAAPAIIQVVLMFTLPESPRWLFRRGKEEEAKAILRKIY

SEQ ID NO: 213286 - protein, 135 aa, Glycine max
  unsure (1)..(135): unsure at all Xaa locations
  Clone ID: PAT_MRT3847_34621C.1.pep
IDSGNRWFFADFLLIFHLEKSVPTLVGIECPKDEKLSRRKICDIPKTRCLLFSLGVNLVVRQKRLQFXVRVIMKKRDKLSRQGGINPYSMEWTGLANRLLSKGHXLSCCEYACFDGLITKQVMSMMGRNIYRLFG

SEQ ID NO: 213287 - protein, 132 aa, Glycine max
  Clone ID: PAT_MRT3847_34622C.1.pep
AILFPINALQSHSLHRMEVVHHEQDLLDKADSTKVVDAMTRAFLRSKAVLVAVYYCFHQQLESAMNCGLQVIMVYPLPFFDIPSMATSFMHVLGWIGKVDQSDILCCFPYEVLALVIMTKLVVVVMTDLKVI

SEQ ID NO: 213288 - protein, 87 aa, Glycine max
  Clone ID: PAT_MRT3847_34623C.1.pep
SARSISVIASISYIVRVRSRSLPQIILAQTKTMKVALKPKPMTVVTKLVSIPIVPTSQNQFPRPGHKPQKKLKQRRQSEEPKHDTHP

SEQ ID NO: 213289 - protein, 90 aa, Glycine max
  unsure (1)..(90): unsure at all Xaa locations
  Clone ID: PAT_MRT3847_34624C.1.pep
PIHVTPPRLHCFTPEAFHDRKRVEGATCRKXSKLRHVELLISRXHTCQRITEDINPDLYHYNPFVSLDSRHLGFHRCRCESIQGEPMYPH

SEQ ID NO: 213290 - protein, 53 aa, Glycine max
  unsure (1)..(53): unsure at all Xaa locations
  Clone ID: PAT_MRT3847_34625C.1.pep
EAANKNIKKNIXKMTVSYKDWHEMFSFALHMYRTLVRTSTGATPYSLVYGKEA

SEQ ID NO: 213291 - protein, 48 aa, Glycine max
  Clone ID: PAT_MRT3847_34626C.1.pep
FVEVVVNRLGYWLGYTSVPKNMVQSRSGYVPGRGVVILEDAASTDEEV

SEQ ID NO: 213292 - protein, 37 aa, Glycine max
  Clone ID: PAT_MRT3847_34627C.1.pep
SKKLQLLVQQSTSLYYHFQTKGRLIVRDNIIDVAHKH

SEQ ID NO: 213293 - protein, 44 aa, Glycine max
  unsure (1)..(44): unsure at all Xaa locations
  Clone ID: PAT_MRT3847_34628C.1.pep
FSPLLFSLINVVSRGFPAILIDLQFHQLRANNYQHLXXVXXXXX

SEQ ID NO: 213294 - protein, 119 aa, Glycine max
  Clone ID: PAT_MRT3847_34629C.1.pep
MSQADISYSCGSCGYPLNLTSSNRITSNIASEYQKSVKKGSLSFASVDLSRFTQIDQINCFPVSWFNRSKTKLLCRKCGVHIGYGYGGESHVLCGFESPTSSTSQRKFTIKIRSLQPSS

SEQ ID NO: 213295 - protein, 73 aa, Glycine max
  Clone ID: PAT_MRT3847_3462C.1.pep
IIHIVSTKGYIDNDYCADLIIIIILYRYFDYLFYVDFETSMADQSAQNALRHLKEFATFLRVLGSYPVDTSSM

SEQ ID NO: 213296 - protein, 142 aa, Glycine max
  Clone ID: PAT_MRT3847_34630C.1.pep
RLLTELRNSLIRRSSVESEFRALDPSAERVTNFTYPTLIYSIWLSYRNSTVYLLKSQKQPFYVSHLQTYSTYFPLYKKYWKKKDLLLIQLTELKLLLKKKDLLSDYALDETTNIVLPQITKRAYQASKEPQILFIAPENTTH

SEQ ID NO: 213297 - protein, 118 aa, Glycine max
  Clone ID: PAT_MRT3847_34631C.1.pep
VAYDRVREEIIRVLGPRVKKGYVYGGVADMCFDGNAMEIGRLLRDVAFEFEKGVEIVVPKERVLADVGGGVHCLGIGRSERLGAASNIIGNFHQQNLWVEFDLANRRIGFGVADCSRS

SEQ ID NO: 213298 - protein, 46 aa, Glycine max
  Clone ID: PAT_MRT3847_34632C.1.pep
FWASISILSLFFSQEMNTSRDCFIFTDALETSSNQLFKIALHDCSL

SEQ ID NO: 213299 - protein, 319 aa, Glycine max
  unsure (1)..(319): unsure at all Xaa locations
  Clone ID: PAT_MRT3847_34633C.1.pep
MATLKVPAQLPSPLEDSEQLRKAFQGWGTNEGLIISILGHRNAAQRKLIREAYSTTHGEDLLKDLDKELSSDFERAVLVWTLDPAERDAFLANEATKMLTSNNWVILEIASTRSSLDLLKAKQAYQARFKKSLEEDVAYHTKGDIRKLLVPLVSIFRYEGDXEVNMTLAKSEAKLLHEKIAEKAYNDEELIRILSTRSKAQLTATLNQYINEFGNAINKDLKXELKKNVNICNLLRAXAIKCLTYPEKYFAKVLRLAINKLGTDEGALTRVVTTRAEVDLQRIAEEYQRRNSIPLDRAIASDTSGDYQSILLALVGHED

SEQ ID NO: 213300 - protein, 184 aa, Glycine max
  Clone ID: PAT_MRT3847_34634C.1.pep
KTRKSVKLADFGLAREESVTEMMTAETGTTRWMAPELYSTVTLCQGEKKHYNNKVDVYSFGIVLWELLTNRMPFEGMSNLQAAYAAAFKQERPNLPDDISPDLAFIIQSCWVEDPNMRPSFSQIIRLLNEFHFTLQQPSPSMPLEPENEPEAITSNGTITDFSTRNKVKFSFIRHLFSSKRTKS

SEQ ID NO: 213301 - protein, 54 aa, Glycine max
  Clone ID: PAT_MRT3847_34635C.1.pep
NPPWLFGKFSLTVGSASVTNYKIYITTSSITGSAAPSLGRVGEKINRTIGGRVW

SEQ ID NO: 213302 - protein, 65 aa, Glycine max
  Clone ID: PAT_MRT3847_34636C.1.pep
KRKYLLSSSIRYATTRPINVHRYFIDTEARTVSPSNKILSQSQLVSDKTVHNLYESGCEFKHSCY

SEQ ID NO: 213303 - protein, 51 aa, Glycine max
  Clone ID: PAT_MRT3847_34637C.1.pep
NKYSDLIHWLFVINYHPKYSLKNVGSERERNNSCNMGDKQFPLVCQEVKGR

SEQ ID NO: 213304 - protein, 60 aa, Glycine max
  Clone ID: PAT_MRT3847_34638C.1.pep
LPPQPLRYKTQAHWFSSLHRSLVVHGLTICSHTLSVLVYVSGLNRPHAYFMNLRAIKGLL

SEQ ID NO: 213305 - protein, 206 aa, Glycine max
  Clone ID: PAT_MRT3847_34639C.1.pep
MNCCSAMASLLKSPSFLSPLNQKLNYVSFSPMTTNLQSKFCRASVRNGRWHVPSLTIKSQAAVEGDVLEKESVSINEESDYGVVCMHHVGILCENLERSLEFYQNVLGLKINEARPHDKLPYRGAWLWVGSEMIHLMELPNPDPLTGRAQHGGRDRHTCIAIRDVSKLKAIFDKAGIPYTLSHSGRPAIFARDPDANALEFTQVDG

SEQ ID NO: 213306 - protein, 174 aa, Glycine max
  unsure (1)..(174): unsure at all Xaa locations
  Clone ID: PAT_MRT3847_3463C.1.pep
GPPPPHKTRGGPRAKKAQPPPPKGGGRANLPXPPKKTPPGKREKKGPKPGGKRGPGRRDSPPGGQVPKGEDPPGPRNPAKRGPHGPRKKGRPPQEHXAPKAXKGRARGKPRTSQGAPEPPPPAPEKTQGGEGPKTQNAGKKTSPENPRGKGEXGGKRGGRPRQLDPPKIGVXGT

SEQ ID NO: 213307 - protein, 127 aa, Glycine max
  unsure (1)..(127): unsure at all Xaa locations
  Clone ID: PAT_MRT3847_34640C.1.pep
GRPRVRPRVRTAQDVSFLFLXGQKTIVFRIIYFPYTIXVEIHDVPYNVIKNWNYTGFIDAIHICXCKCFTAKVFCXKELVESISTSTEPNKDSLYFIXVIVHNDDTSXXLLEWGSRVSSSNIRPPNP

SEQ ID NO: 213308 - protein, 57 aa, Glycine max
  Clone ID: PAT_MRT3847_34641C.1.pep
PMYKSMFGMNSRTQVATVSPRLSIKIRGIPQDNAESNMLVNQLLHTKAQKFKFKMFG

SEQ ID NO: 213309 - protein, 135 aa, Glycine max
  Clone ID: PAT_MRT3847_34642C.1.pep
MLQRLLSTHQTRNLLHATRSLPFRPSRSFSRMATSPIVKRMKSTKTIGTHSGTFHCDEALAVFMLRQTEEFKDADLVRSRDPKVLDTADIVVDVGGIYSPEAHRYDHHQRGFAEVFGSGGHDQIKLSSAGLVYKH

SEQ ID NO: 213310 - protein, 106 aa, Glycine max
  unsure (1)..(106): unsure at all Xaa locations
  Clone ID: PAT_MRT3847_34643C.1.pep
SRSRLEKDAFTKAQFASGKTFKYDITGAGSHYSEDFTEKEDQEKPKKIDARLXQRIDPEYIEVQAQMETNVFNLCLDDVETPKGSMMDLKISQSKMALTKNTGGGT

SEQ ID NO: 213311 - protein, 428 aa, Glycine max
  unsure (1)..(428): unsure at all Xaa locations
  Clone ID: PAT_MRT3847_34644C.1.pep
RGARLRALETKVTTDSGIRTPEYLQGFINKLEQSYDLCRVYIRLLSQSDALGIMKQYIAVTMPLYSSYGLLPDNSTWQECLIVLLNFWMRLADDMKEIALEENSAETSSFNPQCLMSCLKVFMKLVMEDIISPNQGWGSIYGYVNCGLNGDSSAEIINXFGAMIFSGCGFGAVAEVFSVASSETGSASDHGTCCQDLPHFYLDILEAVLTELINGSHESQNLYHILSSLSKLEGDLKVMQCVRHVIWERMVQFSDNLQLPSSVRVFVLELMQFISGKNIKGFSTEILANVQPWEEWNELIYASRKSETDVDKQLPDHKDSSSRVTNTLVALKSSQLVASISPSIEITLDDLLNADTAVSCFMRLCGEATEDLHLDALLAILEEWDGLFTAGKDEETTVETSDGGNDWNNDDWDEGWESLEEVDNPEKE

SEQ ID NO: 213312 - protein, 116 aa, Glycine max
  unsure (1)..(116): unsure at all Xaa locations
  Clone ID: PAT_MRT3847_34645C.1.pep
GCGVLXAXXRWARFFLLCXWVLVGTRVLGRXVCTLPPPRAPGFFVLGDRPWGGGGVPXGGSWAGLRFQNFFLIHPSSIPSRGCPFGGPCRSWSKQPLLELALTLGWVGPSFWAHTR

SEQ ID NO: 213313 - protein, 110 aa, Glycine max
  unsure (1)..(110): unsure at all Xaa locations
  Clone ID: PAT_MRT3847_34646C.1.pep
VMNTLLELKKHPRVVSVSGALQFLLAGSVRFIRLMAQTSLEGIQFNEEIQGLMAAPEPETDYSLKALLELPTTQAXELLHSPDRARKPXRHRPKPTTPPAPNPSSXACFT

SEQ ID NO: 213314 - protein, 149 aa, Glycine max
  unsure (1)..(149): unsure at all Xaa locations
  Clone ID: PAT_MRT3847_34647C.1.pep
LEGGSGSDPPGLVNKPNQTLQVSRQRHPFRSHSTHHTVTLLQSLLQTAVSFIGFISLTHWLCFASSLAQLLQAFPPTRWQELMGKKVRKKTRGSAKEMGVATHLPIKVIESSNPTVESFDEVAKETNSCPHLVKGVNXDRLSTKVGSSG

SEQ ID NO: 213315 - protein, 139 aa, Glycine max
  Clone ID: PAT_MRT3847_34648C.1.pep
ADDVFEPLVGLSCKKVCSRNAEWWRISTAGSDRLFKKSLFHNSQEELRIDQPRVTSLTESNPKRNNYVTPANQRTQKCKPTSSRAASKWNNYLTEDNENLELGWKKSFNFEDHSGPRNNTVLETMTSEIVEDDIHPDFM

SEQ ID NO: 213316 - protein, 80 aa, Glycine max
  Clone ID: PAT_MRT3847_34649C.1.pep
RALLVTQTGVKVFTGRFQTSPHVFPWLNSKLGESWRQKLVVFEYPPIYRPPFFGLHFWVSLLGIMFVSFSKKPKQNSIEF

SEQ ID NO: 213317 - protein, 102 aa, Glycine max
  Clone ID: PAT_MRT3847_3464C.1.pep
VIDFRFMDPLTTGDYPKSMRSLVRTRLPKFTTEQSKLLIGSFDFIGLNYYSTTYASDAPQLSNARPNYITDSLVSPACKDSNLLSFYQFPKLHVYIIKNDHG

SEQ ID NO: 213318 - protein, 77 aa, Glycine max
  Clone ID: PAT_MRT3847_34650C.1.pep
YLYCADSCSMHWSYCGPFMIPFGASGPRITCDNIPKLGYIMNCDIFSVSHKRYDHSPEFPNHGSHIDDYYVSTLQLA

SEQ ID NO: 213319 - protein, 43 aa, Glycine max
  Clone ID: PAT_MRT3847_34651C.1.pep
IQVPTGWKFFGNLMVAGNLSVSGEHNFGRGSDNIRDKHGIWAV

SEQ ID NO: 213320 - protein, 110 aa, Glycine max
  unsure (1)..(110): unsure at all Xaa locations
  Clone ID: PAT_MRT3847_34652C.1.pep
SYFSIDLLQGGILVDTTGDWITLIQNSPISDFGRVAAWKKGCLMVKIVMCVNATVKRREWALLVQGFLTYSSCSXHFGACXWTKLGPHSWELIFSMEVCGPNNGFEKWEF

SEQ ID NO: 213321 - protein, 57 aa, Glycine max
  Clone ID: PAT_MRT3847_34653C.1.pep
IKGGDYLLGGQAQNLLFMAQIFKKPKNGGSNPVCNKSHCGKIFFPIFLNPKNFFFLV

SEQ ID NO: 213322 - protein, 53 aa, Glycine max
  Clone ID: PAT_MRT3847_34654C.1.pep
LHYAVFEILISFHIFSCYIPTLLFQPPDMSNLDIRLIDIDNTTTAIHIIINYF

SEQ ID NO: 213323 - protein, 94 aa, Glycine max
  Clone ID: PAT_MRT3847_34655C.1.pep
NLGHRILPPARWEWHLEASNGVNPPNEGNQHHMPLEGPVTLLIIRKETADEHFDNITHSVLEAITPKPTHGMSSPLDNASCTMTNLANKLMLYD

SEQ ID NO: 213324 - protein, 69 aa, Glycine max
  Clone ID: PAT_MRT3847_34656C.1.pep
KSINPFYKRMSGVHIGWILQVDEHPLFVGGHQPPYYSIFGLPVRGRLSPLNRYRGLKAKIDDGTHFFSI

SEQ ID NO: 213325 - protein, 150 aa, Glycine max
  unsure (1)..(150): unsure at all Xaa locations
  Clone ID: PAT_MRT3847_34657C.1.pep
MVPNFLIARLTASLSSVTHHRSTQTQLGSLLQHKHNAFLFFFNSFSSGTSSDSESDGNYHKGDTFTVSYLINSCGVSPRKAKELGNRINLATHPGXNALIDLQDLXNFTNPNLAKLVGEHPLVLVADAENTLLPKLKFFRSIGPSNTDMR

SEQ ID NO: 213326 - protein, 76 aa, Glycine max
  unsure (1)..(76): unsure at all Xaa locations
  Clone ID: PAT_MRT3847_34658C.1.pep
YRSEIPEYLIGEVPVDYCHDPIGRGWMPDDLCMHHPLELIYAKWAVLDAAGCMIPEASNMYXANCGPESCLYTTGT

SEQ ID NO: 213327 - protein, 59 aa, Glycine max
  Clone ID: PAT_MRT3847_34659C.1.pep
LPKRATRKLYHETTPIKKENVIKKNIPVDGHFKTSWGMILKHHLVCYEKLFKFLAKKPF

SEQ ID NO: 213328 - protein, 526 aa, Glycine max
  unsure (1)..(526): unsure at all Xaa locations
  Clone ID: PAT_MRT3847_3465C.1.pep
MAFKGYFLLGLVTLVLVKSSKVTCEEESVNTVSPIIDISLNRKSFPEGFIFGAGSSSYQFEGAAKEGGRGPSVWDTFTHNYPGKIMDRSNGDMAIDSYHNYKKDVGMMKDMNLDSYRFSISWSRILPKGKLSGGINQEGINYYNNLINELVANGIQPLVTLFHWDLPQALEDEYGGFLSPRIVKDFRDYAELCFKEFGDRVKHWVTLNEPWSYSQNGYANGRMAPGRCSAWMNLNCTGGDSSTEPYLVTHHQLLAHAAAVRVYKTKYQASQNGLIGITLVANWFLPFRDTKSDQKATERAIDFMYGWFMDPLTSGDYPKSMRSLVRTRLPKFTTEQSKLLIGSFDFIGLNYYSTTYASDAPDLSNARPSYLTDSLVTPAYERDGKPIGIKIASDWLYVYPRGIRDLLLYTKEKYNNPLIYITENGINEYDEPTQSLEESLMDIFRIDYHYXRHLFYLLSVIRNGANVKGYYVWSLFDNFEWSSGYTSRFGMIFVDYKNGLKRYQKLSAQWFKNFLKKERRLYSSSK

SEQ ID NO: 213329 - protein, 94 aa, Glycine max
  Clone ID: PAT_MRT3847_34660C.1.pep
GSTSIASSSQPMKLSANPEEIDALRNQINALNESLQRHVQEKLEMKQELTQTKEQVIALMQHFGFVGSLRPSSSPQHNSVNDDDYSDTISDHID

SEQ ID NO: 213330 - protein, 35 aa, Glycine max
  Clone ID: PAT_MRT3847_34661C.1.pep
CSIIHSLCPVYLHDLLWRRPRKHLCNPLVTTMYDL

SEQ ID NO: 213331 - protein, 82 aa, Glycine max
  Clone ID: PAT_MRT3847_34662C.1.pep
PAPPSHPPHSPRFPPPTPMSPTHATSHVYHTRAQLPQNKKWFRPSPTICLYPVANFQLVPSLTHAVGTHSCVWQPMFVPVAG

SEQ ID NO: 213332 - protein, 53 aa, Glycine max
  Clone ID: PAT_MRT3847_34663C.1.pep
MTKFTILLISLLFCIPHTCSASKWHYHHYICRTHVQGFNLTPCHMSIMLHIQG

SEQ ID NO: 213333 - protein, 67 aa, Glycine max
  Clone ID: PAT_MRT3847_34664C.1.pep
VECCSSSLRLPFSYNHLTGLRYITGGRRTPPRVPHNPCTMQPTPSTGSAATTVTCPPILHSSSCCQV

SEQ ID NO: 213334 - protein, 152 aa, Glycine max
  Clone ID: PAT_MRT3847_34665C.1.pep
MGNPKTEEERIERVIRSLLKLPENRRCINCNLLGPQYVCTTFSTFVCTNCSGIHREFTHRVKSVSMAKFTPEEVTALQAGSNERAKQIYFKEWNPLRHSYPDSCNIHKLRDFIKHVYVERRYTGESCGSSLPRIKMSEKEESFAVRKEFISF

SEQ ID NO: 213335 - protein, 101 aa, Glycine max
  unsure (1)..(101): unsure at all Xaa locations
  Clone ID: PAT_MRT3847_34666C.1.pep
RVTCKEKNILEKLKGPQYVCTTFSTFVCTNCSGIHREFTHRVKSVSMAKFSPEEVTALQXGGNERAKQIYLKNXNPLRHSHPESGNIHXLRDFIRHVYVER

SEQ ID NO: 213336 - protein, 76 aa, Glycine max
  Clone ID: PAT_MRT3847_34667C.1.pep
MPPSSFTLLLTLLLLYLPYEAESGETPPPTPPPPFRPGIAVLVCVLTTIISLTSLLLLYIKHCNGGIPDGGGGNSA

SEQ ID NO: 213337 - protein, 106 aa, Glycine max
  unsure (1)..(106): unsure at all Xaa locations
  Clone ID: PAT_MRT3847_34668C.1.pep
KSVQEAYKGVXDCKDGGPFGAVIVHNDEMVASCHNMVLCNTDPTAXHAAVTAIREKFAHDGHALAPLDSKACKKLKKIELADCEXIYASCEPCPMCXFGAIHLFSN

SEQ ID NO: 213338 - protein, 397 aa, Glycine max
  Clone ID: PAT_MRT3847_34669C.1.pep
MATAPGNQMLEGGGGAPQPPGTDMTGICFRDQLWLNSFPLDRNLVFDYFALSPFYDWTCNNEQLRMRSVHPLDISQLSKMTGTEYMLSEVMEPHLFVIRKQKRDSPDKVTPMLAYYVLDGSIYQAPQLCNVFAARIGRALYYIQKAFTTAASKLEKIGYAGSADSENAEYHTYSASGRTGSTLCTAFTFSYLVLLTQPQPVSPRITSNASVMEEVNVVETKDGTVSVAAAFAGHQEAVQDRDHKFLRKAVEEAYKGVDCKDGGPFGAVIVHNDEIVASCHNMVLCNTDPTAHAEVTAIREACKKLKQIELADCEIYASCEPCPMCFGAIHLSRIKRLVYGAKAEAAIAIGFDDFIADALRGTGFYQKATLEIKRADGNEAIIAEEVFEKTKEKFQMY

SEQ ID NO: 213339 - protein, 48 aa, Glycine max
  Clone ID: PAT_MRT3847_3466C.1.pep
TRVSPPSTISILTLPNNLTILHSNLQSITIHTPYIHSTTIHQKKTRHK

SEQ ID NO: 213340 - protein, 311 aa, Glycine max
  Clone ID: PAT_MRT3847_34670C.1.pep
MASLALLRRTTLSHSHVRARAFSEGKSSNRHRIEKILVANRGEIACRITRTARRLGIQTVAVYSDADKDSLHVASADKAIRIGPPPARLSYLNGASIVDAAIRSGAQAIHPGYGFLSESADFAKLCEDSGLTFIGPPASAIRDMGDKSASKRIMGAAGVPLVPGYHGDDQDIEKMKLEADRIGYPVLIKPTHGGGGKGMRIVHAPDEFVESFLAAQREAAASFGVNTILLEKYITRPRHIEVQIFGDKHGNVLHLYERDCSVQRRHQKIIEEAPAPNISANFRAHLGQAAVSAAKAVNYYNAGTVEFIVDT

SEQ ID NO: 213341 - protein, 87 aa, Glycine max
  unsure (1)..(87): unsure at all Xaa locations
  Clone ID: PAT_MRT3847_34671C.1.pep
IRLRGRGAHNYVLRGKLKQDISTYVLEPIGSGKNRDYKQLTRKKLKELHEWIVEMDVQYVEXIWPYLLASNQISLQGVILFTVTHSN

SEQ ID NO: 213342 - protein, 70 aa, Glycine max
  Clone ID: PAT_MRT3847_34672C.1.pep
NGPIIFLRCYNPHTEIFPLLFFKICAKGRLGPPVYCKKVQVWYFKKGPGFHVHLFGEILRNFLFKFLCRR

SEQ ID NO: 213343 - protein, 43 aa, Glycine max
  Clone ID: PAT_MRT3847_34673C.1.pep
LNWHLLHPFCPFYPLHSSGKTLDSKSGVPFCIVRFRQWVLGTG

SEQ ID NO: 213344 - protein, 127 aa, Glycine max
  Clone ID: PAT_MRT3847_34674C.1.pep
RTHWIKGMLKVVATVGVPVNTDIASTWALNSAFRGQARPDMDTIWSEDCEVWNPACTKAMTMSLNANPGADAWSWVSLKRSEVHCDMICGTGWTATPMQDVQVTSDWMTSSQECVARTDCVLIPQNP

SEQ ID NO: 213345 - protein, 106 aa, Glycine max
  unsure (1)..(106): unsure at all Xaa locations
  Clone ID: PAT_MRT3847_34675C.1.pep
PALKERATKELEQVCLDMKRLYTERAEITLDPERIVTAWAELTKCIEELDDQRDXLRVHRELLHADRIEIYAQTEQLYKLVDLIAVSDDNALSVVLKSDVESNQKI

SEQ ID NO: 213346 - protein, 81 aa, Glycine max
  unsure (1)..(81): unsure at all Xaa locations
  Clone ID: PAT_MRT3847_34676C.1.pep
KSLDPGENLPPLLGXNAGHGKHGYSDKGLASAVESHLTDFSGPFRVAQYKAGWLLITHVAVKSRLESGKLVPAYFRICIWL

SEQ ID NO: 213347 - protein, 47 aa, Glycine max
  Clone ID: PAT_MRT3847_34677C.1.pep
KLIMTSNSLIKVHIILAQVWLQCLFPPFLWTLQPVIVLPISLFMRSN

SEQ ID NO: 213348 - protein, 94 aa, Glycine max
  unsure (1)..(94): unsure at all Xaa locations
  Clone ID: PAT_MRT3847_34678C.1.pep
GLVLGMVTLGNMLSSVLAGKVKPPDLVTKVIYKQFTHVNLADSLXKLSRILDTDHFALVLHEQIHYHIVGSSSNKQMAFGVVTAIDKLNVITTD

SEQ ID NO: 213349 - protein, 95 aa, Glycine max
  Clone ID: PAT_MRT3847_34679C.1.pep
FLEPITSTLGLKITSSTCLTAGPDILQQTGVSDLAKCMCFWIQGAWGILPRFLFNWSGYGPARTIAGGHILHNPLPHVVARLPCSYRGLGIASRD

SEQ ID NO: 213350 - protein, 63 aa, Glycine max
  Clone ID: PAT_MRT3847_3467C.1.pep
KGRRGLGSGGAKRDRTVLRDNSQGTTKPAIRRLARRDSLKRITGHSYHQTRSVLNIFHDNVIR

SEQ ID NO: 213351 - protein, 83 aa, Glycine max
  unsure (1)..(83): unsure at all Xaa locations
  Clone ID: PAT_MRT3847_34680C.1.pep
PRVRAVRLRIVLFASGVASRGSCQELIFXGKATVNGTLCNTPQTKVHPAKDVIYVNWYRLXRGNLIMIIFALNKLKGFICSSA

SEQ ID NO: 213352 - protein, 155 aa, Glycine max
  Clone ID: PAT_MRT3847_34681C.1.pep
MTELHSHDNAAVATDSKPEVSSTEEFRVSVCSDANTSSSTVDTDKFHGFDSKSLLPEFDEYVAAERHVSQDLGFEFEVGDMVWGRVKSHPWWPGHLYNEAFASPSVRRSKHEGHVLVAFFGDSSYGWFEPEELIPFDANFAEKSQQTNSRTFLKA

SEQ ID NO: 213353 - protein, 64 aa, Glycine max
  Clone ID: PAT_MRT3847_34682C.1.pep
GFGSCQKAGSSCNTARPIDRHVRRSIKGSGRGVNVFPISCASTDVVFSVVGKLKNTSSVGLVNR

SEQ ID NO: 213354 - protein, 83 aa, Glycine max
  Clone ID: PAT_MRT3847_34683C.1.pep
NFTRFFFFPLGDLPNVREKMKNQLEVSGQVIKIKALVAKFKNLNLLIWFNNGNHLLMKFDPPPIKNKGPNPLGFHNSRLGQLF

SEQ ID NO: 213355 - protein, 65 aa, Glycine max
  Clone ID: PAT_MRT3847_34684C.1.pep
FFFSDSSPQKHVVVCSGHNWLVKICHVHGIHHEIIIIVIIIIIIVIIIVMIKSGGRVDEIDDIIE

SEQ ID NO: 213356 - protein, 71 aa, Glycine max
  Clone ID: PAT_MRT3847_34685C.1.pep
MVKICCIVAGYLGGPTMAAIALKCPSMEGAGADMSKCRIADWNSDQLPIYEPGLDGGWKQCRGKNLLYSTD

SEQ ID NO: 213357 - protein, 83 aa, Glycine max
  Clone ID: PAT_MRT3847_34686C.1.pep
RNPDYTLFYIPVTEFGQKKGHALAYHEIISLCTWWSGQSYALVIKEMSKTAQIAKSVKMAKEAFYKSIMTVQEARTVALEDEA

SEQ ID NO: 213358 - protein, 82 aa, Glycine max
  unsure (1)..(82): unsure at all Xaa locations
  Clone ID: PAT_MRT3847_34687C.1.pep
ARPNPNPNPNPSPSGLCRCDTLKLRVCANVLNLGNVTVGQPPNAPXWTLVDGVDDLEAVASLCTALKAHIVGMNLNLAIGLS

SEQ ID NO: 213359 - protein, 571 aa, Glycine max
  Clone ID: PAT_MRT3847_34688C.1.pep
QPPPPPPPAPMYYPSNNQYSNQPPPPPPPLSPPPPPPPVSPPPPPPVTQNNEERHFKEPSTSGRREYEHSNHGIAHKQHKQQPPVPVKKMNNGPPGRAETDEEKRLRKKREFEKQRQEEKHRQQLKESQNTVLQKTHMLSSGKGHGMIAGSRMGERRSTPLLGAERVENRLKKPTTFLCKLKFRNELPDPSAQPKLMASKKDKDQYAKYTITSLEKMYKPKLFVEPDLGIPLDLLDLSVYNPPSVRPPLAPEDKELLRDDEAVTPIKKDGIKRKERPTDKGVAWLVKTQYISPLSMESTKQSLTEKQAKELREMKGGRGILDNLNSRERQIREIEASFEAAKSDPVHATNKDLYPVEVMPLLPDFDRYDDQFVVAAFDNAPTADSEMHAKMDKSVRDAFESKAVMKSYVATGSDPANPEKFLAYMVPAPGELSKDIYDENEDVSYSWIREYHWDVRGDDADDPATFLVAFDESEARYLPLPTKLVLRKKRAKEGRSGDEVEQCPVPARVTVRRRSSVAAIERKDSGVYTSSKGNSSKRGGLEMDDGLEDQHRGAPHQDNYQSSGAEDYMSD

SEQ ID NO: 213360 - protein, 90 aa, Glycine max
  Clone ID: PAT_MRT3847_34689C.1.pep
SIQQTVSKISLSKEWHLLLLLPLFSYILSPSYTPRFIHKLTPMVHKHFYELSCGVVEMAWIMLSVDYSRLLWQLFGVFSYENHEWKPRII

SEQ ID NO: 213361 - protein, 37 aa, Glycine max
  Clone ID: PAT_MRT3847_3468C.1.pep
KKSYSRRLINVPQDLGVGLEWGWPAERLSFLVNLGES

SEQ ID NO: 213362 - protein, 110 aa, Glycine max
  Clone ID: PAT_MRT3847_34690C.1.pep
TPLNMGKKVKGPGGAGTNGGQRGRAPRLLKLARSPNHRGRGPPWEKPPSVLQQSNLVHKKNDFKPGTKKGEPFFFFFFFKEGGVPWEKKTPPKKAIEFPGGEKLQGAQKN

SEQ ID NO: 213363 - protein, 52 aa, Glycine max
  unsure (1)..(52): unsure at all Xaa locations
  Clone ID: PAT_MRT3847_34691C.1.pep
GSLPRRLETRNLXGYXDEEMELSXHVFDPPQLFREPNQQNHXNSLLKKSPTV

SEQ ID NO: 213364 - protein, 38 aa, Glycine max
  unsure (1)..(38): unsure at all Xaa locations
  Clone ID: PAT_MRT3847_34692C.1.pep
AISSIEWLQKADVPTIXQIEEIHSSQRMMNAPCSNDNF

SEQ ID NO: 213365 - protein, 29 aa, Glycine max
  Clone ID: PAT_MRT3847_34693C.1.pep
SVIQHMAKEKSFLYIIENDSTGAIWRKLH

SEQ ID NO: 213366 - protein, 44 aa, Glycine max
  unsure (1)..(44): unsure at all Xaa locations
  Clone ID: PAT_MRT3847_34694C.1.pep
RVXCIXXYLCEHHSRSSSLREYLISPFSSFFVESSIVNVVLIYT

SEQ ID NO: 213367 - protein, 557 aa, Glycine max
  unsure (1)..(557): unsure at all Xaa locations
  Clone ID: PAT_MRT3847_34695C.1.pep
IRLEAVSKEPNSTSKPHNNLSLTFIKNTHHXSCSSPPNNNSLAFSLSNHFPNPSSSPLSLFHSFTYPSLSLTGSHTADAPPEPIAGGGATNLSIFTGAPKFEDFLGGSSATATATTCAPPQLPQFSTDNNNHLYDSELKTTIAACFPRAFAAEPTTEPQKPSPKKTVDTFGQRTSIYRGVTRHRWTGRYEAHLWDNSCRREGQSRKGRQVYLGGYDKEDKAARAYDLAALKYWGPTTTTNFPISNYEKELEEMKNMTRQEFVASLRRKSSGFSRGASIYRGVTRHHQHGRWQARIGRVAGNKDLYLGTFSTQEEAAEAYDIAAIKFRGLNAVTNFDMSRYDVKSIANSTLPIGGLSGKNKNSTDSASESKSHEASRSDERDPSAASSVTFASQQQPSSSTLSFAIPIKQDPSDYWSILGYHNSPLDNTGIRNTTSVTATSFPSSNNGTTSSLTPFHMEFSNAPTSTGSDNDAAFFSGGGIFVQQQSGHGNGHGSGSSGSSSSSLSCSIPFATPIFSLNSNTSYENSAGYGNWIGPTLHTFQSHAKPSLFQTPIFGME

SEQ ID NO: 213368 - protein, 111 aa, Glycine max
  Clone ID: PAT_MRT3847_34696C.1.pep
TCKRGKPERRATPNDTRTTDPTTTSGRERHRKRSKEDIPEERKANGTKTRDKDKSKYKPMLIRAYASVRKIGGSDANIYMGHPHSTARVEDIQTYMARELLNLLKRAHEER

SEQ ID NO: 213369 - protein, 82 aa, Glycine max
  unsure (1)..(82): unsure at all Xaa locations
  Clone ID: PAT_MRT3847_34697C.1.pep
ARRSAERCSDDLLRAHTRTYEYLPYFDYTISEYXRTSTKVSWKTFPRQCIETTLVIANFDTTVSTFXIESGELKGDLLETDS

SEQ ID NO: 213370 - protein, 105 aa, Glycine max
  Clone ID: PAT_MRT3847_34698C.1.pep
AAVSLIFAAKLHLLRNAVVRLLQMFPRCLRMIFLQHLVLISHLKTTALRQVYSRSFLGSHHIFLKVIYVIAHIETIAFNRVRKRGLGALKLLLQGALLSCFNAGA

SEQ ID NO: 213371 - protein, 99 aa, Glycine max
  Clone ID: PAT_MRT3847_34699C.1.pep
MGNRFICMTKKESKDVGSRGSKRMGRSQRKLVTVSEEELHLQALSMALQQHQLSQRFEGSMSWRVGFFRKHAVSESFLANKQVSVNLENIKIKKFCLIH

SEQ ID NO: 213372 - protein, 116 aa, Glycine max
  Clone ID: PAT_MRT3847_3469C.1.pep
MTATMIKLYFFSLAILVIFLANPKGVTSSSSTSEPTISASPGVLPYVTTPEISSFFPTPSAIQPMSSGFEAEAPAPAPSSGEFEGKRSSGSARLDCAGAIVGVLLCCALLSSIVVV

SEQ ID NO: 213373 - protein, 177 aa, Glycine max
  Clone ID: PAT_MRT3847_346C.1.pep
MPKKIRDYLFKIKNPRPQVRLPSKNWILSGCKHPRTPSFALYSGRNQSHHNPVLNNNNNNDAATLADVDRFLMENFKSLYLKDEHDHQNHDQEITTPRDLPGSTRFFVKPAGFSGSLVEDAFTSDEAASISTINDVSSSNSYEKEALPDNSIALLTRSTSPYEDFKRSMQEMVNNHE

SEQ ID NO: 213374 - protein, 87 aa, Glycine max
  Clone ID: PAT_MRT3847_34700C.1.pep
VGFSVGYGFVVPGVVGCTTGTASNLVPNSYEISWCSSSLSVVALHRPELKTRHKENNTWRQLLTPISALCRLFCLDSDFSFWVWMSN

SEQ ID NO: 213375 - protein, 110 aa, Glycine max
  unsure (1)..(110): unsure at all Xaa locations
  Clone ID: PAT_MRT3847_34701C.1.pep
VGISVGGDAYLIGFEKYWGRVKVPRFFFQSLKNLVFWGGIGVVTXIGVQEIVRPYFRGFKLKSFLAGLNITIPVGFAKTGATLQFKKVANGDFFKGNFKQLFNGLGGVPG

SEQ ID NO: 213376 - protein, 107 aa, Glycine max
  unsure (1)..(107): unsure at all Xaa locations
  Clone ID: PAT_MRT3847_34702C.1.pep
XXXXPTNTXHLYXXPXNFXXXXLLXIHXLYLQXXXTIXXNXXPXTSXPSIXPPTXXXXCXLXPXXXXHHXLXXIXXLQPXYXPXXXXXNXXXXHLAPKXSIXXTCIX

SEQ ID NO: 213377 - protein, 313 aa, Glycine max
  Clone ID: PAT_MRT3847_34703C.1.pep
GEPTSPSPPPAWTTDSARIPKPTSLRDILKEQEKKSSAVLPNQLPTPQKSQTAQAARSSGSSRPISASSPSKTAPSSQINSQASLSKYRGDDDMFWGPVEQSKQENKQSNFPQLARQGSWGSKSVPMKGNSPGSLSRQKSGSGKPTEQSLSSSPASSQSLLKLKKDAMTKNSEAMDFRVWCENECARLIGTKDTSFLEFCLKQTRSEAEIFLTENLGLYDHDHEFIDKFLNYMDLLPSDVLEIAFQTVNDRKAAGGMISANTDVLELGYTDGSFSKVGKKKGGNKGKKVSSSVLGFNVVSNRIMMGEIQTVED

SEQ ID NO: 213378 - protein, 93 aa, Glycine max
  unsure (1)..(93): unsure at all Xaa locations
  Clone ID: PAT_MRT3847_34704C.1.pep
QNXKXARGTLFSGSCLFGRXEXKXXEXXXAQTQMAMSRXQATRDVRCVTPXXSXWXXXLHSHQRXTCXXNXDVXLXSPLMXNFXGLRPQXNGX

SEQ ID NO: 213379 - protein, 33 aa, Glycine max
  Clone ID: PAT_MRT3847_34705C.1.pep
SQKGSDPWACCSLFNQLMQGSFECIFMYKSNEK

SEQ ID NO: 213380 - protein, 109 aa, Glycine max
  Clone ID: PAT_MRT3847_34706C.1.pep
VVLLLCCLAHQARQDHICAGVRTNIMYIISAPILAPAGLARRWFVYVRAHVRGSGCSSSPRRHRLYRLIFFLGRCRSTFSCRSCAACHFPRRHAFLYGLPFQVLEVVVG

SEQ ID NO: 213381 - protein, 314 aa, Glycine max
  unsure (1)..(314): unsure at all Xaa locations
  Clone ID: PAT_MRT3847_34707C.1.pep
LCNPRDKQVLLKIKKELGNPTTLSSWLPTTDCCNNWVGVSCDTVTQTYRVHNLDLSDLNLPKPYSIPFSIGNIPYLEFLSITGTPNIIGTIPPTITKLTKLRNLYIKYTNVSGQIPRFLSQIKTLEFLDLSYNKLSGNLPAWLPSLPNLVGISFDGNRISGAIPDSFGYFPKSFVMLSLSRNRLTGKIPATLAKLDVKFVYLSKNMLEGDXASLLFGSEKHTRHMYLGNNSFAFDLGKLGLSKTLEGLDLSHNRLYGTLPKGLTSLKDLYYLDVSYNNLCGKIPRGGKLQEFDASTYAHNKCLCGSPLPSCKRF

SEQ ID NO: 213382 - protein, 42 aa, Glycine max
  Clone ID: PAT_MRT3847_34708C.1.pep
AIVRLEAMDFDGAPVWEVNFACTKNEQLASNYLLCHMREFDE

SEQ ID NO: 213383 - protein, 104 aa, Glycine max
  unsure (1)..(104): unsure at all Xaa locations
  Clone ID: PAT_MRT3847_34709C.1.pep
FVPKENQANPPSGKGLFVXKRKSVFPTIKQFGGFVKNFSVGEEAPPLKASFAGTKWAYPVEKNQKRAGPSFVYPVAQDNAPFEYAKRVKEKGFLFDIENDPPPV

SEQ ID NO: 213384 - protein, 99 aa, Glycine max
  Clone ID: PAT_MRT3847_3470C.1.pep
AGIYYLFNLKLELLPIIKSTLLKENYKWNLASLLKTCHYRIVSSIPDQIHMNMQINMSKRQQICYTVHTCFFLCLLISACIQDPRFQKLIKQSDSSNKM

SEQ ID NO: 213385 - protein, 97 aa, Glycine max
  Clone ID: PAT_MRT3847_34710C.1.pep
HVCSFKWYLWFGLLSCLGASRQSCGASLKVQFQCSYPAPCPNAASFHWFQVIFEGVLLSKWRGIGSLGWFPALECWSQFCHLSCRDSIINLRQFTNQ

SEQ ID NO: 213386 - protein, 54 aa, Glycine max
  Clone ID: PAT_MRT3847_34711C.1.pep
VVVVVASALCSILVASAVRTLCDSTPQDSLDSHAAASLISFPPNFIFLLRPFHF

SEQ ID NO: 213387 - protein, 263 aa, Glycine max
  Clone ID: PAT_MRT3847_34712C.1.pep
MASLGSPSSFWCYRCNRIVRVPQNHAVLLCPDCNSGFLEELQTPPHSRRSTRGGGGSPFNPVIVLRNANDVVSPETRNFELYYNDAVSGSSGPSSLRPLPQGVSEFLMGSGFDNVLDQLDAAAGGAGALPPTAASKAAIESMPVVKILASHTYAESHCAVCMENFEINCDAREMPGGHVYHSECIVPWLSVRNSCPVCRHEVPSDEVEESNNNTVGLTIWRLAEGGFAVGRFIGGRELPLVYTEMDGGFNGANGVPRRVAWDS

SEQ ID NO: 213388 - protein, 92 aa, Glycine max
  unsure (1)..(92): unsure at all Xaa locations
  Clone ID: PAT_MRT3847_34713C.1.pep
LEAIVPRTGSCRSPSIGYRVSVTVPLPPNNVXKSTSLISRTAHQATNDYIDTVTVEGLCYTQVWRTVEVVYACLSPNIRIHMGNAVMILSPN

SEQ ID NO: 213389 - protein, 155 aa, Glycine max
  Clone ID: PAT_MRT3847_34714C.1.pep
RGGPPPLFFPQGGFCRCFLGERFFFWAVSAQTVGRFLKKNCSPLGVLFKPGTLFFFGLPPWVHHARLQHPPVFSRPFFNQKEAVAPFAASQTVSLGLLFLPSLDQFTVSTLPPPARRFFFFPRPLGGGGLFPGFVFFRNERPKQTLGPKKGQYPA

SEQ ID NO: 213390 - protein, 38 aa, Glycine max
  Clone ID: PAT_MRT3847_34715C.1.pep
PKLCPLEYGRIVPSTSPMFLKSISHLAMCHVICLVFIK

SEQ ID NO: 213391 - protein, 105 aa, Glycine max
  Clone ID: PAT_MRT3847_34716C.1.pep
MENHRRRTQVTTSDDEDEQEKEEVLKRSRPVEDAKPIGEPLKYSGKGKSKKWHYDSFEFNGIQYTIGDHVLFKPEEKGQKPYAGIINDITQGNNGNVVVTGQWFY

SEQ ID NO: 213392 - protein, 93 aa, Glycine max
  Clone ID: PAT_MRT3847_34717C.1.pep
RFMLEAMCAYSLSVIPSPSLNPFHFLFIYFFFVFIFLLSLLVLGLTLSSSLGPHYKQNNIHIKSISYISQVCAFFRLFLISSCNLLSMLTCST

SEQ ID NO: 213393 - protein, 125 aa, Glycine max
  unsure (1)..(125): unsure at all Xaa locations
  Clone ID: PAT_MRT3847_34718C.1.pep
SXPSFELLMPRRHITIPKTITLLDLXTDVTFQLQYSSDGSKSGVQQQGERSNNKPLPAAATAPVAFSQGTEASKLIFIQQKLQGMTLMLEEASGGGKSPDMMAKLESEMKALLEDVNKMVEASLF

SEQ ID NO: 213394 - protein, 152 aa, Glycine max
  unsure (1)..(152): unsure at all Xaa locations
  Clone ID: PAT_MRT3847_34719C.1.pep
AHTSAHASGEIQGKVVLKFSHEEFLTAWSTQVRPTSTLLADGCPYLYAMGHDSAVSTIPGDFDIGVKLTTINNMGAYGLNPGIERAGIWGTIPQFXSRQTVWTQMASVRTPLXHDSSMQSFCQWSIDLLGGGILVDKTGDCITLIQHSPISN

SEQ ID NO: 213395 - protein, 63 aa, Glycine max
  Clone ID: PAT_MRT3847_3471C.1.pep
KKLQPKTSRPFHQYQIVHPGCRKMGAQVLKLAPIYRFSERIEGIRLKIELKQIKYISKTFRSD

SEQ ID NO: 213396 - protein, 110 aa, Glycine max
  Clone ID: PAT_MRT3847_34720C.1.pep
IVTLQPQIGIKGLQFADIEASLVAIDEALTIALQVVSLNSFSYENEDIPKTKEEMEIHATHLPSWVFLLFKSRYIILAYILKTNKQSHISFIQRPLIQCHMCLLAMSCIL

SEQ ID NO: 213397 - protein, 96 aa, Glycine max
  unsure (1)..(96): unsure at all Xaa locations
  Clone ID: PAT_MRT3847_34721C.1.pep
VCHSIAFKANIPQYSVGIYLFDTVESTMNDTTCCSFLLDAVDPTNPNLTVSMLESYLHCCVTQLVDLNLAQQRSLMHSLDAGPAQKECTDPXNLVG

SEQ ID NO: 213398 - protein, 100 aa, Glycine max
  unsure (1)..(100): unsure at all Xaa locations
  Clone ID: PAT_MRT3847_34722C.1.pep
GVCLARASVXFFXFLXVLALRRXAFCFFLSFLAWALASLFGGLCLVSSRGGNPCXWFXFFVFVQREDFXXAXPSFVFFLVPXWLWXXLXXGPLGPFPACF

SEQ ID NO: 213399 - protein, 81 aa, Glycine max
  Clone ID: PAT_MRT3847_34723C.1.pep
HKNKAGFHTHFATLKPTNSPFRDKKLFTLSKPVFTPNKAKNFPPCKNCSMQVCNTKQPALPKHYYSLQARKKLKTSTPGTV

SEQ ID NO: 213400 - protein, 62 aa, Glycine max
  unsure (1)..(62): unsure at all Xaa locations
  Clone ID: PAT_MRT3847_34724C.1.pep
DPLERAXXFFFFFFFFGSPSAGVQTKTGGLEKTFQTTKSSTENKPLFTILADLERLIKTCIF

SEQ ID NO: 213401 - protein, 45 aa, Glycine max
  Clone ID: PAT_MRT3847_34725C.1.pep
KNPIRVPSFFPLEHLNERVKREPTQVWGEKEVVNFCITHQEQVCI

SEQ ID NO: 213402 - protein, 70 aa, Glycine max
  Clone ID: PAT_MRT3847_34726C.1.pep
RLRIDHFHWEQRVIQKKQVLVQSRSFKSLEHQMSQSICLRQKGPIRAPRFFLYQHTLFAKETIGRKNLEP

SEQ ID NO: 213403 - protein, 454 aa, Glycine max
  unsure (1)..(454): unsure at all Xaa locations
  Clone ID: PAT_MRT3847_34727C.1.pep
MVKSLFLISRIPMSSTTIHHNGSHIPKKPKLSSLEIESEFGHHDSSVARINNGSFGCCPASILSAQRRWQLQYLRQPDHFYFNDLKSGVLQSRTLIKDLVNADHVDEISIVDNATTAAAIVLQHTAWNFREGKFQKGDVVLMLHYAYGAVKKSMEAYVTRAGGNVAEVPLPFPVNSNDEIVSEFRKALERGKSNGNRVRLAVRLEVTSMPCVVIPVKELIQICREEGVDQVFVDAAHSIGCTDVDMKEIGADFYTSNLHKWFFCPPSIAFLYTRRNLKGTDPGSDLHHPVVSHEYGNGLAVESAWIGTRDYSAQLVVPAAVEFVNRFEGGIEGIKKRNHEAVVEMGEMLAKAWGTRLGSPPXMCASMVMVGLPACLGIGSDSDALKLRTHLRDAFGVEVPIYYRSPREGEVGVVTGYARISHQVYNKVDDYYKFRDAVNQLVQNGFTCVVLSSD

SEQ ID NO: 213404 - protein, 161 aa, Glycine max
  Clone ID: PAT_MRT3847_34728C.1.pep
MSSTTIHENNHHNGSHIPKKPKLSSTFITPSEIESEFGHHDAAVARINNGSFGCCPASILAAQRRWQLQYLRQPDHFYFNDLQSGILQSRTLIKDLVNADHVNEISIVDNATTAAAIVLQHTAWNFREGKFQKGDVVLMLHYAYGAVKKSMEAYVTRAGGN

SEQ ID NO: 213405 - protein, 56 aa, Glycine max
  Clone ID: PAT_MRT3847_34729C.1.pep
KNAQMVSLLKFENVLEIEQGFIWLTKLFNEILRSNKMLVEWRKRNFGSYFLEQRRY

SEQ ID NO: 213406 - protein, 67 aa, Glycine max
  Clone ID: PAT_MRT3847_3472C.1.pep
TIFTPFSNAHPNLLELNYAYFSRTAHGAPVLQSMGLEMNCVTRIVLCSRILPWILLQEQDQWPPLRK

SEQ ID NO: 213407 - protein, 73 aa, Glycine max
  Clone ID: PAT_MRT3847_34730C.1.pep
RPSTRPRIHTLPENIFHSISERQSATTTSLSFPQDTKQSSQLFLFFHLDSRTGSSSDCGLLDFILSYTTPPRL

SEQ ID NO: 213408 - protein, 28 aa, Glycine max
  Clone ID: PAT_MRT3847_34731C.1.pep
RFKTILPTVRTLGQFSPYLICPDTQILF

SEQ ID NO: 213409 - protein, 523 aa, Glycine max
  Clone ID: PAT_MRT3847_34732C.1.pep
MACNGFCLRLIALVLVISISSVNCIETDAVEPIIDIASLNRDSFPPDFIFGAGSSSYQFEGAANEGGRGLSIWDTFTHKYPEKIQDKSNGDVAIDAYHRYKEDVKIVKDMNLDSYRFSISWSRILPKGKLSRGINQEGIDYYNNLINELVANGIQPLVTLFHWDLPQSLEDEYGGFLSPRIVKDFRDYAELCFKEFGDRVKYWVTLNEPWSYSQHGYANGGMAPGRCSAWVNPNCTGGDSGTEPYLVTHYQLLAHAAAVRVYKTKYQVSQKGLIGITLVANWYLPFSNTKADQKATERAIDFMFGWFMDPLTSGDYPKIMRSLVRTRLPKFTTEQSKLLIGSFDFIGLNYYSSTYASDAPHLSNARPNYVTDSLVTPEFERDGKPIGIKIASDWLYVCPRGILDLLLYTKEKYNNPLIYITENGINEFRDETLSLEESLLDTFRIDYHYRHLFYLRSAIRHGVNVKGYYIWSLFDNFEWSSGYTVRFGMILVDYKNNLKRYHKLSAIWIKNFLKKTSLYDSSI

SEQ ID NO: 213410 - protein, 65 aa, Glycine max
  Clone ID: PAT_MRT3847_34733C.1.pep
EGLLLDVMQMLREVRIEVIGVQSSLNNGVFVAELRAKVKEHANGKKVSIVEVKRALNQIIPHAVD

SEQ ID NO: 213411 - protein, 165 aa, Glycine max
  unsure (1)..(165): unsure at all Xaa locations
  Clone ID: PAT_MRT3847_34734C.1.pep
MFSASLNTISPLSVSGNPLLCGSVVNHSCPSVHPKPIVLNPNSSYSNSGSSLQNNHHKMMLSISVIIAIGAAIFIVIGVVVVTVLNIHARSSMLSSAAPFVFSGGEDYSGSPANDPNYGKLVMFSXGDAEFVDGAHXFLTKTSELGXGGFGVCYCTGLRDCHCVA

SEQ ID NO: 213412 - protein, 73 aa, Glycine max
  Clone ID: PAT_MRT3847_34735C.1.pep
MPPAPPPSAPPACMPATPDPPPSNLGLQLYSWVSEAHELPITQMIDALRGKMMETIYTRRVESNQWMTKLTPS

SEQ ID NO: 213413 - protein, 74 aa, Glycine max
  unsure (1)..(74): unsure at all Xaa locations
  Clone ID: PAT_MRT3847_34736C.1.pep
KIVVELNGRLNQRGVISPRFDVGVKKNXRWAGKVSPQNKLGKIGWPPPAGSMGHKKARKKNVGGKVLGFFYKVK

SEQ ID NO: 213414 - protein, 97 aa, Glycine max
  unsure (1)..(97): unsure at all Xaa locations
  Clone ID: PAT_MRT3847_34737C.1.pep
DYHVNLSTKGYDTLIFSREHDMKITLLETRSWISTMNYCIGDDCTQWHTDGHLAGYTLTYYNRMTFVTEKGXGHTAPEYKPDXCLAMYMRWISSRAM

SEQ ID NO: 213415 - protein, 57 aa, Glycine max
  Clone ID: PAT_MRT3847_34738C.1.pep
NPRPSFHALIYSSQDESPSERKITKLCECCKKPFPDSKGILLFYFACVLVISSLNKE

SEQ ID NO: 213416 - protein, 135 aa, Glycine max
  Clone ID: PAT_MRT3847_34739C.1.pep
SARDKNGYALKEGKQWKTILRNFVTVNDIQKLTFASRCILNKYSIDELLSESDRSTMLRVLNFHPRKSEKFGIGPQDIKVGWHPKYKDSRCFHIVRIDGTVEDFSYRKCILGALDIVDPKKSKIQEKKWSGHGNT

SEQ ID NO: 213417 - protein, 64 aa, Glycine max
  Clone ID: PAT_MRT3847_3473C.1.pep
EVVNKHRLIFVSSAGNSGPGLSTVGAPGGTSSSIIGVGAYVSPAMTHNHIFLLLLLSHQFQTTA

SEQ ID NO: 213418 - protein, 61 aa, Glycine max
  unsure (1)..(61): unsure at all Xaa locations
  Clone ID: PAT_MRT3847_34740C.1.pep
KSNFSTVPLXDEVRENTRLFIFXTYSIIHQLIYMGVLAXKLNFNYEEAXRWIVNFILSSNL

SEQ ID NO: 213419 - protein, 44 aa, Glycine max
  Clone ID: PAT_MRT3847_34741C.1.pep
SCGQLTSQKKEKEKKKKKKKKKKKKKKKKKKEKKIKDKKNEKKL

SEQ ID NO: 213420 - protein, 39 aa, Glycine max
  Clone ID: PAT_MRT3847_34742C.1.pep
RCIAFGKLRPSSLYRLPRKAARPGYTYAQKTLLRELLHA

SEQ ID NO: 213421 - protein, 64 aa, Glycine max
  Clone ID: PAT_MRT3847_34743C.1.pep
NMRLSSSRVILTSDIIGIEIVRYRCRLLLQKFLDKSLGEGGREGGGRRRRTDQGHAHRFPLGVL

SEQ ID NO: 213422 - protein, 196 aa, Glycine max
  Clone ID: PAT_MRT3847_34744C.1.pep
MEFWNRRLLLQNEDVPLSMPPLSHTHTKHATNASSSSPPQSSAFQFQSPLQVSIPPVFSSSVAYVFLILFTTFFFVGFVFLYFRQFASDAAAAGSYRRRWEEGAAAAAEAKKCLPVVAHCGEGCAECAICLEELREGDAVKMIPYCKHVFHPHCIDTWLDKHVTCAVCRCSELLCGEEVVGSVSARRQEEVVLNLD

SEQ ID NO: 213423 - protein, 109 aa, Glycine max
  unsure (1)..(109): unsure at all Xaa locations
  Clone ID: PAT_MRT3847_34745C.1.pep
FNGEFQTLLKYLCKLWNLQILKLDCCLGLKKFTENLIHIKALQQLSLNDCWKLSSLPTXIGKLTSLRSLSMYLVGKERKFILVELGPLKPKGDLHIKHMKKVKSVINSK

SEQ ID NO: 213424 - protein, 71 aa, Glycine max
  unsure (1)..(71): unsure at all Xaa locations
  Clone ID: PAT_MRT3847_34746C.1.pep
YLAATTPSLTCLAQGQRRVEAILFLLWCLVDRGGCFLRWISGILEVNSCPQHLIHLQPTSXFLPLDLCTKP

SEQ ID NO: 213425 - protein, 59 aa, Glycine max
  Clone ID: PAT_MRT3847_34747C.1.pep
SPPGSISTGILLIAPRLPGRRLFGAFLPFQKAVQRMAYGRTLPVFNTHRNLPIMRRHIG

SEQ ID NO: 213426 - protein, 88 aa, Glycine max
  Clone ID: PAT_MRT3847_34748C.1.pep
YVNLLQLVPFLNFLINIFCQTSVYDISGVGRYITNWFFVNRAWVLTFVGSIKPSIKYSSFRVIIWILRLRISKSIEFYCMTIHAPNSL

SEQ ID NO: 213427 - protein, 58 aa, Glycine max
  Clone ID: PAT_MRT3847_34749C.1.pep
SLSHTPTIVIPVKLLGPRAGVEVELKKGNTNAPEEGHTETGRRSEKLGKWLLLKPGKN

SEQ ID NO: 213428 - protein, 136 aa, Glycine max
  Clone ID: PAT_MRT3847_3474C.1.pep
MKNYGDDRHLPQLKKEVNIAGVYNGILNMNENVNEIIVDKQGKPSRMNAAYRQLLSLYKIYCGKEIEVLNIYGDLEDGSHSDGRVSNSSSQSLQYLLRGSTKSYQEMKFKGAKAQHSQLHENKDVANEIIQFLWET

SEQ ID NO: 213429 - protein, 71 aa, Glycine max
  Clone ID: PAT_MRT3847_34750C.1.pep
IWGIGRQRSVAPTKNGKGMPLVGDMGPSNKLVIDDFEKMGIGWADHNCSSSIKVKDEAAGIGQPGVAPQIF

SEQ ID NO: 213430 - protein, 228 aa, Glycine max
  unsure (1)..(228): unsure at all Xaa locations
  Clone ID: PAT_MRT3847_34751C.1.pep
MSTRSVSSSSYRRMFGGSGTSSRPSSNRSYVTTSTRTYSLGSALRPSTSRSLYSSSPGGAYVTRSSAVRLRSSVPGVRLLQDSVDFSLADAINTEFKNTRTNEKVELQELNDRFANYIDKVRFLEQQNKILLAELEQLKGQGKSRLGDLYEEEMRELRRQVDQLTNDKARVEVERDNLAEDIMRLREKLQEEMLQREEAESTLQSFRQXDVDXASLARLDLERKVGSL

SEQ ID NO: 213431 - protein, 88 aa, Glycine max
  Clone ID: PAT_MRT3847_34752C.1.pep
LGFPQLPLSPTVPLPLSETSEFARRWVPLCNTYNIEPPAPEWYFGQKMGYLKNKAYPAFVTERTATKRDYEQFKGRINSLGANNTKGS

SEQ ID NO: 213432 - protein, 219 aa, Glycine max
  Clone ID: PAT_MRT3847_34753C.1.pep
MEQKNVLLSALSVGVGVGVGIGLAGKGVTKWGANEYSSSNGVTPENMEREMQRLVVDGRESKVTFDQFPYYLREQTRVLLTSAAYVHLKHAEVSRYTRNLAPASRTILLSGPAELYQQMLAKALAHYFEAKLLLLDLTDFSLKIQSKYGFSNMESSFRRSTSETTLERLSDLFGSFSIFSQREEPKGKMNRPSSGVDLQSMGAEASCNPPILRRNASSS

SEQ ID NO: 213433 - protein, 44 aa, Glycine max
  unsure (1)..(44): unsure at all Xaa locations
  Clone ID: PAT_MRT3847_34754C.1.pep
LVSHGITAPNGTFELARTNXETTTPGLDLLSRLCAKYYDAGARF

SEQ ID NO: 213434 - protein, 180 aa, Glycine max
  Clone ID: PAT_MRT3847_34755C.1.pep
MMNKNTDIIMSYSYSYSPATPFSSSSSHSMDPIIWSKLPPEILEYILSFLPLKTFLNLRSTCKGFWSLIFSPPFISKHCSPTASSPFSSFLLLSHPQFHRHFPLYDCTLGTWRNFSLSLSDSFHSFPSFSTLISSGGLFCLSDSTSCSLLVCNLLAKSSRKIQYPSFSLYLEHLTFVTTP

SEQ ID NO: 213435 - protein, 50 aa, Glycine max
  Clone ID: PAT_MRT3847_34756C.1.pep
PIYKLALGQLLDSSRRTEAALLRLLLEKPEVIGVPCDPPVAENLLYPCST

SEQ ID NO: 213436 - protein, 68 aa, Glycine max
  Clone ID: PAT_MRT3847_34757C.1.pep
NSARAQFPKATRTGILFLVLLSCTCFTSADAYNPLDPNGNITIKWDVISWTPDGYVVSMFLYAYYLLI

SEQ ID NO: 213437 - protein, 520 aa, Glycine max
  unsure (1)..(520): unsure at all Xaa locations
  Clone ID: PAT_MRT3847_34758C.1.pep
MKTTAITINPSLSPPFCSKATTPPSCSSSSSSFPPSFPRFHLSGAKPISLSCRGTRLCSLKGSKTLWGRKSFVLGAGNMTMAEVDSHEEGENEGALVGSENENNSRPRRIALFVEPSPFAYVSGYKNRFQNFIRCLREMGDEVMVVTTHEGVPQEFYGAKLIGSWSFPCPLYQKVPLSLALSPRIISEVARFKPDIIHASSPGIMIFGALTIAKLLCVPIVMSYHTHVPVXVLFRYIPRYTFSWLVKPMWLIIKFLHRAADLTLVPSAAIAGDLLAARVTAANKIRLWNKGVDSEKFHPKYRSHEMRLRLSNDEPDKPLIIHVGRLGVEKSLDFLKRLMDRLPDARIAFVGDGPYREELEKMFEGMPAVFTGMLGGEELSQAYASGDVFVMPSESETLGFVVLEAMSSGIPVVAARAGGIPDIIPADQDGKTSYLYDPRDLEDCLSKLRPLLHNKELRETMGKAAREEMEKYDWKAATRKIRNEQYNAAIWFWRKKRAQLLRPFQRLAKRFFPSPQVNYR

SEQ ID NO: 213438 - protein, 89 aa, Glycine max
  unsure (1)..(89): unsure at all Xaa locations
  Clone ID: PAT_MRT3847_34759C.1.pep
FPGXRPXRVRTKHTAAHAIITXPPISVRLRAATTVASFIMHIDLLLLHDGRREARYLAQAFLRPLNQRRPSLPDQAPHHELTGSEPEHE

SEQ ID NO: 213439 - protein, 92 aa, Glycine max
  Clone ID: PAT_MRT3847_3475C.1.pep
AAKVSVITVRCTSSGDGDRPWHKSDTLRVHEYGSHWQAQSSGTSRSQVDNGGFNRSLTRNHDRVAAHRYGDQFVHRKHSSCEHHGQPCDYYV

SEQ ID NO: 213440 - protein, 59 aa, Glycine max
  unsure (1)..(59): unsure at all Xaa locations
  Clone ID: PAT_MRT3847_34760C.1.pep
MAQETFLXTSESVNXGHPDXLCDQISDAVLXXCXEQDPDSXXACETCTKXXMVXVFGHN

SEQ ID NO: 213441 - protein, 91 aa, Glycine max
  Clone ID: PAT_MRT3847_34761C.1.pep
PPLLRPPPPPPPPGAAGGPQPHPPRGGAPPPPPKKGPWAPPGWIPPPGGGVPPPGPAGPKRLPPPRPPFAPGFSRPPLGPPPWALPIPPPF

SEQ ID NO: 213442 - protein, 604 aa, Glycine max
  Clone ID: PAT_MRT3847_34762C.1.pep
MHTTIFGRPPLLFRLFIAPRPPLPLHLSLPLLPHASSSPPPPTLPPLPPSTPAPHPLAPSPLSHQPLLPPPPSPPPQHPLGPVPVRIRKMILGIQRDQRQLPDQLTDSWTNDEVLALFRIRSSMENWLPELTWDHVSRRLAEVGFKKSAEKCKEKFEDESRYFDNINNYGKNNFRFLISELEELCQNSDPGAHDHNGVVVRSEKTHHLGGHALEENSRDIETTTATKRCDIGSDTVVEKSNSKVRKRKRRDRFEMFKGFCESVVNKMMAQQEETHNKLLEDMVKRDQEKFAREEAWKKQELDRMKKELEIMAQEQAIAGDRQATIIEFLKKCATTTITSLSPPSQNAKYYITNDSNLPNCASHSQNPNNPSNEDNNLEPTPSSKMIQNHGQTTLGAENPSTSDTLLQVPSSSNSSPTTHNPSSSLNSHNNIIPLESNSVSTYKPTSTTPMASSENSKDDMGRRWPRDEVLALINLRCTSLSSNEEKEGNKGPLWERISQGMSALGYKRSAKRCKEKWENINKYFRKTKDNVNKKRSLNSRTCPYFHQLSCLYGQGKIVPQSEREGNYCLNPTPNSGQVPPDDDHQVQDDESSQVGSAGLVQYAC

SEQ ID NO: 213443 - protein, 63 aa, Glycine max
  Clone ID: PAT_MRT3847_34763C.1.pep
RDIPQHNTGKTHDKLKKILAHMFVANAQFKRNKSILLIGGALNANFNSERGRCKKSHLQKTCP

SEQ ID NO: 213444 - protein, 141 aa, Glycine max
  Clone ID: PAT_MRT3847_34764C.1.pep
FAATEKPSRLDFMSGCSDEEEISFSESDRHRYEGGSDGDDDDSEIRKNEHRSSRRRMGSAFGKVVVRQFTKAKKQVRRIRSRTSLLAKSEEGKVVIVEAGVSGRSGCRFCFSRPKVLESPNEESPSSDPNDPNFTHGMLRT

SEQ ID NO: 213445 - protein, 43 aa, Glycine max
  Clone ID: PAT_MRT3847_34765C.1.pep
TSKGLSSVTSGFNVHSIFGAVFCFKKCLRQPLHREFCAVYVLV

SEQ ID NO: 213446 - protein, 220 aa, Glycine max
  Clone ID: PAT_MRT3847_34766C.1.pep
MEELRKLEKVHSMLEFMESRGVSNLDHHSNRFLANFILFLIEPSGDLAINDKCSLLSQLIPTLSSSFLEDAYQHHLDTTKRENSGFQQSLVENALLGCNQTKEYSSLQNCNENTAMVRLDSMQMANSTLEDFCRSYFMFHGLDVSKPQSIFKYLPILSFTESYIYQLDKMNEKLLQTPYNGKCVFGEKDEWQRETKLLVSCFSNDPVRPLATILEHKGLL

SEQ ID NO: 213447 - protein, 88 aa, Glycine max
  unsure (1)..(88): unsure at all Xaa locations
  Clone ID: PAT_MRT3847_34767C.1.pep
PFSREHSFPHQHYSSACHLRLYCFTCALXFTNQXGVTKFYACLHLGFHAIGHTTKLPEKSRLASRLARAPLLYALLLPGNATAALNIH

SEQ ID NO: 213448 - protein, 51 aa, Glycine max
  Clone ID: PAT_MRT3847_34768C.1.pep
RFSSQTPHLQVWGFQVQLAPHWQPSFSAEHTHFSTLELSLTWGHSRSGRVA

SEQ ID NO: 213449 - protein, 57 aa, Glycine max
  Clone ID: PAT_MRT3847_34769C.1.pep
RFFFHAETRDHLSKPALIRVWVKNWKRALNIMDWDDTCVTKVAIPKEKGTAVEDNQE

SEQ ID NO: 213450 - protein, 41 aa, Glycine max
  Clone ID: PAT_MRT3847_3476C.1.pep
NNTTDMSDYVVNKAIKQFAKRSRQAAICNNSPRADTLCSSR

SEQ ID NO: 213451 - protein, 83 aa, Glycine max
  Clone ID: PAT_MRT3847_34770C.1.pep
MTPSTNTNPLLLLILSFLLLSIQSIRFNPDGEFTIVQFTDLHFCEEAEQDMRSQQLQRNILDWVKPDLVVISGDGASDYADGS

SEQ ID NO: 213452 - protein, 92 aa, Glycine max
  unsure (1)..(92): unsure at all Xaa locations
  Clone ID: PAT_MRT3847_34771C.1.pep
GXXDXSTXAACSEERLCLMLNNSGWLADIIXIMDFKSMTNTGKCCGGSILDNFLGDCITWKGLIWCKFICKGLSXKGFXGNSAVSVGYADAT

SEQ ID NO: 213453 - protein, 63 aa, Glycine max
  Clone ID: PAT_MRT3847_34772C.1.pep
ARPSVLRSLLDASPVPSDSSLCSWSLDMFLLFGHLVPSHHFWGSPFIFRFAFFFQIGFQFSNS

SEQ ID NO: 213454 - protein, 84 aa, Glycine max
  unsure (1)..(84): unsure at all Xaa locations
  Clone ID: PAT_MRT3847_34773C.1.pep
PIIPGPTSSLSAARPRSRTCYICGWHCLASMGVEALGPVKAXCPSVGECQGGEMGGSGWXVSTLIEAGGDXWVSGGETRKGDNI

SEQ ID NO: 213455 - protein, 133 aa, Glycine max
  unsure (1)..(133): unsure at all Xaa locations
  Clone ID: PAT_MRT3847_34774C.1.pep
SXPXCGXXXXSXXXXXXFSAXXXXPSLGSXSXXSAXVXXXLXSPFXXXXSXXPXXXXXLPVCXFXGXXXPPWPXCFXPXXXLXXXXXRFSXFRGXXXXXXAXLGXXXFSSXRWRXXRVXPPVCQXXXGVSKVR

SEQ ID NO: 213456 - protein, 74 aa, Glycine max
  Clone ID: PAT_MRT3847_34775C.1.pep
GFSVTTYRKIKQEVDFVPLSLCMHKNLYVLRTSKLQISGTPTLSAPLLSLSYSVSGMDICVCKNVGIKCVIITC

SEQ ID NO: 213457 - protein, 74 aa, Glycine max
  Clone ID: PAT_MRT3847_34776C.1.pep
MIEEIHEGSFGAHAGGHAMARKILRADYYWLTMESDCCAHVRKCHKCQAYPDNVNVSPHSLNVMFAPWPFSIWG

SEQ ID NO: 213458 - protein, 58 aa, Glycine max
  unsure (1)..(58): unsure at all Xaa locations
  Clone ID: PAT_MRT3847_34777C.1.pep
SCFFCLLXSPYTAKKHRAPGAPPWVGLFPSKWLFXGFTRSGHRIFPLCVICQSGYFPP

SEQ ID NO: 213459 - protein, 42 aa, Glycine max
  Clone ID: PAT_MRT3847_34778C.1.pep
TKPNTKNSPHPARVGYISNPMKSKTSASDFRAMEQELTCQDA

SEQ ID NO: 213460 - protein, 56 aa, Glycine max
  Clone ID: PAT_MRT3847_34779C.1.pep
NQRPVFGVLSSDSVFYAPLLGFFVFTGIPSSAFLWFKSVQAANKEAEEQDKKDGYL

SEQ ID NO: 213461 - protein, 272 aa, Glycine max
  Clone ID: PAT_MRT3847_3477C.1.pep
MQHKIFATMRSLKIMDGCKGTQVYAINPSGAGGADGPTGGGIGEKLLQQLHDHIKGQTLRTKSVRNLQATNHTTPSEVVLSDGSLLPYGLSMTDLLEPKIEPSLMSVDFVETLAGVHRRTGDCPQFDRSEVYLEQCAVFQGLADPKLFRRSLRAARQHAVHVHAKVVLAAWLRHERREDELIGSSSSDCSGRNLECPRATLTPGYDPESVFDSCACTRAHAGNRDIDDDAMTIVVDEQCSTSEEEEEEDGDMSFFVGDDEDKWYKFNIASLS

SEQ ID NO: 213462 - protein, 103 aa, Glycine max
  Clone ID: PAT_MRT3847_34780C.1.pep
VSHSLTRRAKKGIIYWRTGVNPHTDSHHTHHYPMPGTRWSCNYSGSTPDSTNSKTTDDPNTGTSGTSHGIIFDTITTATTTPTTSFWTDTIYITITDCESNDA

SEQ ID NO: 213463 - protein, 81 aa, Glycine max
  Clone ID: PAT_MRT3847_34781C.1.pep
YAVMSPDTTNKDSVHRTQGQSSLDQPQQVVAWEKTQGLAEESTYYASPVQFPQRCSPLHHPRTHRHDVAPQQYPPPSDREG

SEQ ID NO: 213464 - protein, 68 aa, Glycine max
  Clone ID: PAT_MRT3847_34782C.1.pep
KIRIGYVFSCPNTGEKGLQKKITLFNCYFLRHLLNSQKFRVNVREANRWWFRIGFRQECCVFKCTVLF

SEQ ID NO: 213465 - protein, 81 aa, Glycine max
  Clone ID: PAT_MRT3847_34783C.1.pep
AIVQASKCAHVSDILDRHSTLSYFTTTAESASTTCAHSTLDFTLQRDHVTPFLYNAGLHPLRLTPPVLGIRSLLLRSLQTH

SEQ ID NO: 213466 - protein, 186 aa, Glycine max
  Clone ID: PAT_MRT3847_34784C.1.pep
REGGEKDGKSYIIDVKKGRMRIRLKVALALGVVVICTGVGVGVMHFVEKLGWLDSFYLSVMSVTTVGYGDHAFKTMHGRIFAAIWLLVSTLAVARAFLYLAEARVDKRHRRMAKWILGQDMTVSEFLAADIDNNGFVSKSEYVIYKLKEMGKVSEKDIMQVSEKFDRLDAGNCGKITLADLMGNHN

SEQ ID NO: 213467 - protein, 233 aa, Glycine max
  Clone ID: PAT_MRT3847_34785C.1.pep
MNASMRKKVQRKCKIRGYNLKVDALNEILSFASRFEGPDEDEAIDLLLVELDSSLKSTIIDKETVQRVVSLLLEATEATEETSDAAAAIRVVDAFLIPKYKYDYSRKQFYEHTGSLSIHGEASAKSDLYRERFLLLFQRLSRDQHFSAPAFESEFSHFGSCEISPIQSLVGQTGRRWVMGVISQLEDGHYYLEDLTAAVKINLSNARITTGLFSEIFVFLLKGSFLISLNVLQ

SEQ ID NO: 213468 - protein, 243 aa, Glycine max
  Clone ID: PAT_MRT3847_34786C.1.pep
MMRALNKDLYSSFLVGKQKVPTNILQYVDDTVFIGEASWENAVVLKSMLRGFEMASGLKINFAKSQIGVVGVQTSWIQEVADFLNCRHMDFPFYYLGMPIGIKSSSRVVWEPMISKFEAKLSKWNQKNLSMGGRVTLIKSVLNALPIYLLSFFKIPKRVVDKLESLQRNFMWGGTQQLKRIPWVKWEVICLPKSDGGLGIKDLAKFNAALMGRWIWDLVANHNQLWPEFSFPNRRLGRPAGMQ

SEQ ID NO: 213469 - protein, 154 aa, Glycine max
  Clone ID: PAT_MRT3847_34787C.1.pep
LPRASLPLHHSTSCLLRGNLASLLGPSNQKRTAVSPLLRGIEGLAHGYLLVGPFVKAGPLRNTEIAGQAGSLAAGGLVVILSLCLTIYGISSFNEGDPSTAPSLTLTGRKKEPDQLQTADGWAKFTGGFFFGGISGVIWAYFLLYVLDLPYYIK

SEQ ID NO: 213470 - protein, 160 aa, Glycine max
  unsure (1)..(160): unsure at all Xaa locations
  Clone ID: PAT_MRT3847_34788C.1.pep
PKGLSASSPLHLLPSKRQFSFTVKAIQSEKPTYQVIQPINGDPFIGSLESPVTSSPLIAWFLSNLPAYKTAVIPLLRGIEVGLSHGYLLVGPFMKAGPLRNTEIAGQAGSIAAGGLEVILILCLSIYRISCFNXGDPSTVPSLILTSQMIEPDHLSTVVG

SEQ ID NO: 213471 - protein, 122 aa, Glycine max
  Clone ID: PAT_MRT3847_34789C.1.pep
AVSPLLRGIEVGLAHGYLLVGPFVKAGPLRNTEIAGQAGSLAAGGLVVILSLCLTIYGISSFNEGDPSTAPSLTLTGRKKEPDQLQTADGWAKFTGGFFFGGISGVIWAYFLLYVLDLPFFT

SEQ ID NO: 213472 - protein, 91 aa, Glycine max
  unsure (1)..(91): unsure at all Xaa locations
  Clone ID: PAT_MRT3847_3478C.1.pep
KMTSCYDGWTYCVPIPFGNLDEDTINFGVLSLKLVLLVEIQEKAVXEIXHEEFRTERKAQVAAATAVVGDGCLYTSALVHNNSVSAIPSDY

SEQ ID NO: 213473 - protein, 183 aa, Glycine max
  unsure (1)..(183): unsure at all Xaa locations
  Clone ID: PAT_MRT3847_34790C.1.pep
AAASPMANQLKSTFTRTLVAPKGLSASSPLHLMPSRKQFSFTVKAIQSEKPTYQVIQPINSDPFIESLETPXTSSPLITWYLSNLPTYRTTVSPLLRRIXVGLAHRYLLVGPFIKARPLKNTKITKQTNSLTTNRLIIILNLDLTIYKISSFNERTPSTTPSLTLTSHKKNPDQLQTSDNKPK

SEQ ID NO: 213474 - protein, 131 aa, Glycine max
  unsure (1)..(131): unsure at all Xaa locations
  Clone ID: PAT_MRT3847_34791C.1.pep
SYWIRKVWCREIYNTKKLGHLKILVQELCGEKKKRMKIQKXCLRMKPHLGTEKLRGSTLXDLQQAEPSRTVKHVGGATRGAGAKQISELGRSMGESKTSKNALNMFYPRGLKLDLELLRGGGSLNLHRGAQ

SEQ ID NO: 213475 - protein, 48 aa, Glycine max
  Clone ID: PAT_MRT3847_34792C.1.pep
YSCSTMIEPKGNTDKNAPYASPPPPLPQISEYYYSRRGAVWIGFENEC

SEQ ID NO: 213476 - protein, 172 aa, Glycine max
  unsure (1)..(172): unsure at all Xaa locations
  Clone ID: PAT_MRT3847_34793C.1.pep
QLKSTFTKTLVAPKGLSASSPLHLLPSKRQFSFTVRAIQSEKPTYQVIQPINGDPFIGSLETPVTSSPLIAWYLSNLPTYKTTXSPLLIRIKVGLTHSYLLVDPFIKAKPLKNTNIAEQPNSLTTNRLIMILXLYLTIYKISSFNKRNPSTTPSLTLTDHKKEPDQLQTTNK

SEQ ID NO: 213477 - protein, 215 aa, Glycine max
  unsure (1)..(215): unsure at all Xaa locations
  Clone ID: PAT_MRT3847_34794C.1.pep
MAAASPMASQLKSTFTRTLVAPKGLSASSPLHLVPSRRQFSFTVKAIQSEKPTYQVIQPINGDPFIGSLETPVTSSPLIAWYLSNLPAYRTAVSPLLRGIEVGLAHGYLLVGPFVKXAGPLRNTEIAGQAGSLAAGGLVVILSLCLTIYGISSFNEGAPSTAPSLTLTGRKKEPDQLQTADGWAKFTGGFFFGGISGVIWAYFLLYVLDLPYYIK

SEQ ID NO: 213478 - protein, 214 aa, Glycine max
  Clone ID: PAT_MRT3847_34795C.1.pep
MAAASPMASQLKSTFTKTLVAPKGLSASSPLHLLPSKRQFSFTVRAIQSEKPTYQVIQPINGDPFIGSLETPVTSSPLIAWYLSNLPAYRTAVSPLLRGIEVGLAHGYLLVGPFVKAGPLRNTEIAGQAGSLAAGGLVVILSLCLTIYGISSFNEGDPSTAPSLTLTGRKKEPDQLQTADGWAKFTGGFFFGGISGVIWAYFLLYVLDLPYYIK

SEQ ID NO: 213479 - protein, 161 aa, Glycine max
  Clone ID: PAT_MRT3847_34796C.1.pep
PRVRKKKKKKKKKKKKKREGGKKEKKRGGRFSGTRFTFPCWRLLSFSLGSLTCISLAGVLHGRAWVALGFIPFNPLALFPLWAFWVCPERARPGLLFPRLAHLGWPLGRALLGAFTRGVCGVSPPSIPYPFRPFISRSFRFFPFLFRPFPGFSLSGFIFGA

SEQ ID NO: 213480 - protein, 233 aa, Glycine max
  Clone ID: PAT_MRT3847_34797C.1.pep
PTRPDPKIIASGLYSDVFYKPVKVYAVRYLDEILLATSGSKMLALELRTGVVKTLELGLGLRVDKVNTAIHSAVSEKIEFLGMELQAVLPSILRPPMSEKAIRARKKYLRQKEVRALELRNARARNRRKLGLKIFSHVYKKIKQSDGFKFDFSIENQVREIFRSWADEVVQEFLGNIDECQEWHRSLSAGDFLQLRHIRNQLPPELVDAYDKFQEQVDKHLNPIEARKAIEEE

SEQ ID NO: 213481 - protein, 57 aa, Glycine max
  Clone ID: PAT_MRT3847_34798C.1.pep
FSVFMKKKKSGCAWGPFHETFLFYYFLFKTLSSLGCPGVIKSFLVECGWPQLLPPLK

SEQ ID NO: 213482 - protein, 97 aa, Glycine max
  Clone ID: PAT_MRT3847_34799C.1.pep
LVRPMLEMERLVRATRLSSLTECSPTIGHPGLISGFAERWHGETNTFHLPHREPTNTLDDLSALHHVPICGTLHRTQRFSMEDARQLLERHVGGNCR

SEQ ID NO: 213483 - protein, 68 aa, Glycine max
  Clone ID: PAT_MRT3847_3479C.1.pep
EKNVKSTQLLAQAAALASFSPIKKLLVNTRMLKSPTKNTLGIKSKRSQPFQMEAYPSLKDLPFKKHQP

SEQ ID NO: 213484 - protein, 72 aa, Glycine max
  Clone ID: PAT_MRT3847_347C.1.pep
MLNTCSARFIVGYGSFSGSTAYKELTEPLNERVRALGLESELGSHPNSAMYFMCDMFFGLRFHLWNEDNIAL

SEQ ID NO: 213485 - protein, 60 aa, Glycine max
  Clone ID: PAT_MRT3847_34800C.1.pep
SSRSSGSSSSPMRGDEFPSGKLYMNTESNTNWLSSVLLFNRYRGCKDFDIAVDCIRLIQN

SEQ ID NO: 213486 - protein, 46 aa, Glycine max
  Clone ID: PAT_MRT3847_34801C.1.pep
LSIFEEAFNGTLRATFFLANILPGLVNLSVKPLLGSSNPAFLILLV

SEQ ID NO: 213487 - protein, 42 aa, Glycine max
  Clone ID: PAT_MRT3847_34802C.1.pep
FATCKRGEEPRQPSLLLALQSFYNLYRCILNRWDKCSSRIVR

SEQ ID NO: 213488 - protein, 104 aa, Glycine max
  unsure (1)..(104): unsure at all Xaa locations
  Clone ID: PAT_MRT3847_34803C.1.pep
DERLVVHATAAAAAGGLAAVVTTPLEVVKTQLHCQGVCGCDXFTSGSRGDVMTTRLGKDGYRRVMRGSIPRMVXHAPAAATCWSTYEAGKSLLEDCGQQTDTGT

SEQ ID NO: 213489 - protein, 72 aa, Glycine max
  Clone ID: PAT_MRT3847_34804C.1.pep
QNALLGTASLYVIPITIHIYGHHERITAFPWDILERVATIGLATKTVCDGPTCGGLFPEVEEDPCGIPALHS

SEQ ID NO: 213490 - protein, 88 aa, Glycine max
  unsure (1)..(88): unsure at all Xaa locations
  Clone ID: PAT_MRT3847_34805C.1.pep
CSPSASSTIIHCXSTLCNPPHSTPKQPSTCLSRIEPRPSCRSSTRSCPSTPHSTTLRSKRRFPRSTWSRSSRPLLLPHLLQHCWRIPR

SEQ ID NO: 213491 - protein, 112 aa, Glycine max
  Clone ID: PAT_MRT3847_34806C.1.pep
LLPSFSFGLLRIGQQKRDLDLDSIRAARMVREKLRLGRPVLGANDQYMGKPTDEGIAPVKNYLDAQYYGEIGIGTPPQKCNVISDTGSSNLWVPSSKCYVSTACYTHHWYMS

SEQ ID NO: 213492 - protein, 58 aa, Glycine max
  Clone ID: PAT_MRT3847_34807C.1.pep
AIDKIERDLAGFFFAGSFKGGLSVGITIASGFKAADLVISYMNFASFNTVLDKPRCRN

SEQ ID NO: 213493 - protein, 68 aa, Glycine max
  Clone ID: PAT_MRT3847_34808C.1.pep
VPCNGVWLSIPISNVCPYAAPKAFCHAFYAFEKGNGVFVESIMSGYTMNVVANEPQPSWCLVGVSSFP

SEQ ID NO: 213494 - protein, 148 aa, Glycine max
  unsure (1)..(148): unsure at all Xaa locations
  Clone ID: PAT_MRT3847_34809C.1.pep
LPLLARRVWIHAPLNFATVAAIPSCAIFQFELRFQTIAAFFLRRTVIVGRFRRNSEFAVRVFGFCVVSLAMGEGGEGEGDCAPKNAXRCRKLLLRRRSWRGSLILPARRSIRSCRNRRSYRXAVLPLQPQAPHARGWETRISKIKIKT

SEQ ID NO: 213495 - protein, 140 aa, Glycine max
  Clone ID: PAT_MRT3847_3480C.1.pep
AGRLDSFWIPWLIWIQLLLFLLLLTILFCHSIITLDPSHHTTSPSASATDSDLHTQQPSNHGSTAVTNRLQSTRGVENTSIKGEIGIVREEFAEGEASSSSVYFLHPCYYFNLAKEAFLKCLGLDSTSSKSDAPSSHILR

SEQ ID NO: 213496 - protein, 38 aa, Glycine max
  unsure (1)..(38): unsure at all Xaa locations
  Clone ID: PAT_MRT3847_34810C.1.pep
SHAXTCARNAARGHDSNITIGSRLSRRDHSLARRTGRA

SEQ ID NO: 213497 - protein, 43 aa, Glycine max
  Clone ID: PAT_MRT3847_34811C.1.pep
LEFKSELTGPKKINITLLNANPFRKHPLFPFYMRATTLKWPPP

SEQ ID NO: 213498 - protein, 52 aa, Glycine max
  Clone ID: PAT_MRT3847_34812C.1.pep
VPVAEEDVLYVTMLMCPYVVSCTARPQFLMIAYPSPDQALSLDSSCKTKPNH

SEQ ID NO: 213499 - protein, 28 aa, Glycine max
  Clone ID: PAT_MRT3847_34813C.1.pep
YIFCYNHDLFNILRLTSCMPSLGSISAA

SEQ ID NO: 213500 - protein, 52 aa, Glycine max
  Clone ID: PAT_MRT3847_34814C.1.pep
FLYLSSLSILDLLWTFLVLGIGRSVLRIQTIIISFCDSYYKLFSVFIQVFQQ

SEQ ID NO: 213501 - protein, 86 aa, Glycine max
  Clone ID: PAT_MRT3847_34815C.1.pep
LSQILFITHKRLRERALNYNQIEAIHYHRLLRHLPPEEDTGVTAENSSQFRSPYTENAPYGLLRFHIGSFLSDMYMTRISVPRQNL

SEQ ID NO: 213502 - protein, 71 aa, Glycine max
  Clone ID: PAT_MRT3847_34816C.1.pep
LYIVLSTLWECCRLDHRRLVLLVGVPGHDLWRLPLADSEGTLRGDDVRISKMASPPLVKSAQARWISFPDG

SEQ ID NO: 213503 - protein, 70 aa, Glycine max
  unsure (1)..(70): unsure at all Xaa locations
  Clone ID: PAT_MRT3847_34817C.1.pep
PEAEKDDIDMMVCDFRDQACRRRSYRRRSVLGPMXVVLAPLEVSGLVHGPASVWEKKANAPSEAPLAPHT

SEQ ID NO: 213504 - protein, 43 aa, Glycine max
  Clone ID: PAT_MRT3847_34818C.1.pep
CGVVASVRQWQNKLSLWTKTAANEAAQMSIGRKWKEIIDIQLS

SEQ ID NO: 213505 - protein, 129 aa, Glycine max
  Clone ID: PAT_MRT3847_34819C.1.pep
LYDQVFKPSKLQINADFHLFKTGIEPKWEDPECANEGKWSVTSNSGRKANLDNMWLETMMALIGEQFEDAEDICGVVASVRQWQDKLSLWTKTAANEAAQVCYYLVNDTLQLKPYVMLSVILSVYDFLL

SEQ ID NO: 213506 - protein, 81 aa, Glycine max
  unsure (1)..(81): unsure at all Xaa locations
  Clone ID: PAT_MRT3847_3481C.1.pep
GRDPNIPQKTEVVGKKRQDGNVPAKPGKHVWVLKRHEKGAKPTEHDILPSEDRQEVSQGXKALRNSNNVVRKSKPKDHKEV

SEQ ID NO: 213507 - protein, 203 aa, Glycine max
  Clone ID: PAT_MRT3847_34820C.1.pep
MGEMATSEEVVAAAPEAAAPEAGLKHKLERKWTFWCDNQSKPKQGAAWGTSLRKVYTFDTVEEFWCLYDQVFKPSKLQINADFHLFKTGIDPKWEDPECANGGKWSITSNSGRKANLDNMWLETMMALIGEQFEDAEDICGVVASVRQWQDKLSLWTKTAANEAAQMSIGRKWKEIIDVNDKITYNFHDDSRSKGATKGRYTV

SEQ ID NO: 213508 - protein, 73 aa, Glycine max
  Clone ID: PAT_MRT3847_34821C.1.pep
TPVRAEAAGKLVQRTLHVTEKKRPDLALLLNNNTYIIRRSTETCVIWSCLRPARHLHIPMKLSWKKEATNSRQ

SEQ ID NO: 213509 - protein, 182 aa, Glycine max
  Clone ID: PAT_MRT3847_34822C.1.pep
TMRLGHFLLLTTLAVIACCSTSAIAEDFVQVNSLPTDFRHELTHGSRRNLKGSVSEINFAQNSAISNFMEKLKMQGQSLSAFWKDFKQAAKVKLPEFYKFLISHVKMKKKQPNMAETPPRSPSSAGLDRQHSTPNHAVPPQEVTASVKPNMELTSPGMSPPKNSPALSEGTSPQILPKPDGQ

SEQ ID NO: 213510 - protein, 80 aa, Glycine max
  Clone ID: PAT_MRT3847_34823C.1.pep
LIWPNEIAKEGGVISAILTRVLSAPSIPHSGSGSAASVLGIILGFSSEYYLEVPVAVLVTLLLSGLDSTVVASLTALPVL

SEQ ID NO: 213511 - protein, 52 aa, Glycine max
  Clone ID: PAT_MRT3847_34824C.1.pep
NNPDFTPLHTVSPMVFISARFKHVWYCLVKNSEANIIYCFYGISQAKQPNPL

SEQ ID NO: 213512 - protein, 194 aa, Glycine max
  Clone ID: PAT_MRT3847_34825C.1.pep
MFANVVGAQVISQLNAPNTSLETTDKTERSSFTDNDPDSSEHQNSTLDRGESAVTSSEGGEATEFNMTVGELMDAYEVCISNLRKAQSRRRISSLKRISPVNFTKEARLQVPEEILHKIRSLNDLDLQLYEYAKAIFNKQHKTSLLITEESWDNISGSAYGLWRVVTLAITCVFFIFLFLLIVNVRRRTSKVKK

SEQ ID NO: 213513 - protein, 58 aa, Glycine max
  unsure (1)..(58): unsure at all Xaa locations
  Clone ID: PAT_MRT3847_34826C.1.pep
ERALXSLANGXREAGXXDFXXSAFLISTYNXEXSQPXFIHKHNFXXPXXRGEIINPHS

SEQ ID NO: 213514 - protein, 43 aa, Glycine max
  Clone ID: PAT_MRT3847_34827C.1.pep
GVAKNSCLTSVMSHEHSGLLRLTTHLRHKLLMSGRSAGPSYQD

SEQ ID NO: 213515 - protein, 84 aa, Glycine max
  Clone ID: PAT_MRT3847_34829C.1.pep
NITSTSVAITYNLIYVLHNNKHSATFTFIPLPLHHPKITLYTTNSLSNSNTQINSSFNYNATSSLTSTIVTPYILHPYLPHTPK

SEQ ID NO: 213516 - protein, 184 aa, Glycine max
  Clone ID: PAT_MRT3847_3482C.1.pep
MMDKPKILIKKNLRKEKQIAVHPLSQRKPSVTPSNATLSLLQPSFKFLATNSTTSSPRALSMNKVTKSLEPSSSEVRNISFNYELQEIIPKSDRVEEEGFTCSALCMHLPGFGKTKPVKARKAETQMHAAVNPVPVLSKPNSLEKFERSSLVSKARIHENEGDNSFSSYFDLPSELFKFRSHNA

SEQ ID NO: 213517 - protein, 273 aa, Glycine max
  Clone ID: PAT_MRT3847_34830C.1.pep
SGSLNDAITKWTNLRYLSLAQNKFSGNLPSWLFTFNAIEMMDFSHNKFTGFIPDINFKGSLIFNTRNVTVKEPLVAARKVQLRVSAVVSDSNQLSFTYDLSSMVGIDLSSNSLHGEIPRGLFGLAGLEYLNLSCNFLYGQLPGLQKMHSLKALDLSHNSLSGHIPGNISSLQDLSILNLSYNCFSGYVPQKQGYGRFPGAFAGNPDLCMETSSGVCDDGRTQSAQGSSFSEDRMDGPISVGIFFISAFVSFDFGVVVLFCSARARNYILQTKV

SEQ ID NO: 213518 - protein, 68 aa, Glycine max
  Clone ID: PAT_MRT3847_34831C.1.pep
EQNGYSILTNTLLIASHINIVIKRFFNYHTIHSSKPFCLFAGAVFAVKIGELISMCYNSLTLLLLLII

SEQ ID NO: 213519 - protein, 77 aa, Glycine max
  Clone ID: PAT_MRT3847_34832C.1.pep
HASASLVSSIFFFCPSDMTRNQKKDGYRYMYSSAASWSWLFKKLYTLFFFSVRTLRYIFYLRKTHLGMSHYFFLIQH

SEQ ID NO: 213520 - protein, 87 aa, Glycine max
  unsure (1)..(87): unsure at all Xaa locations
  Clone ID: PAT_MRT3847_34833C.1.pep
LGREPYIRTIGEIRVHSTWXLLKHSSVCTIERILKVHVRENSISKFEQSRDTIRANATTLSMNHPHCSSNXDELLTFHCTSFNCSLG

SEQ ID NO: 213521 - protein, 115 aa, Glycine max
  unsure (1)..(115): unsure at all Xaa locations
  Clone ID: PAT_MRT3847_34834C.1.pep
MSCSLSFSRLYARSERTLPSENEKPRLNVRCPVRVTKFLGTRLRSSGKSLGXERFHVWQSEGPGSVTEAEXCGXRSAMSAVPNKPLGLYDPAMDKDSCGVGFVAELSGESSRKTG

SEQ ID NO: 213522 - protein, 65 aa, Glycine max
  Clone ID: PAT_MRT3847_34835C.1.pep
FVSTMTDLQVFNQGLSRFDECIMKLLERIDTPTHMPHSCPFAVLRSHILKDLCGLRHCEIINSST

SEQ ID NO: 213523 - protein, 79 aa, Glycine max
  unsure (1)..(79): unsure at all Xaa locations
  Clone ID: PAT_MRT3847_34836C.1.pep
MSCCGGNCGYRSACKCGNGCRGCTMSPYVSYIESTTTDTLVMGVASVKAQFESAEXGVHAETHGCICGAHCTCNSCTCK

SEQ ID NO: 213524 - protein, 238 aa, Glycine max
  Clone ID: PAT_MRT3847_34837C.1.pep
FDFPKEHKIWPRAPLTTKRRNRNLQGPKRICFSFAAYAGDLLNCLKASKVAIDEGLSDAELSNIESKLKFSFPPDLRAILQQGLPVSQGFPNWRSSSTQQLQILLNLPASSILRRVSSTRFWHPSWGPEPSDPTRVIARLLHDAPPLVPIYRHCYIPSSPGAAGNPVFHVDNDGDVRLLSFDVAGFFREFLAPGTEEPVWAATAARRVRFWSEVADAQGGELGGCLERVVWKLREGGW

SEQ ID NO: 213525 - protein, 84 aa, Glycine max
  unsure (1)..(84): unsure at all Xaa locations
  Clone ID: PAT_MRT3847_34838C.1.pep
GNVEPNXVLQPVSKFGKKIAFWVDXAPQFKNNPFKSAPVASKNKPSKAATVASVEPENNPSKAAIFFSVGPENNPSKTVFETVA

SEQ ID NO: 213526 - protein, 157 aa, Glycine max
  Clone ID: PAT_MRT3847_34839C.1.pep
PRADSARGIVGLMLLLLLAKALFHVYCYHKMKGEDQARIEKFLEDYSAMKPTRFTYADIKRMTNGLSESLGEGAHGAVFKGMLSREILVAVKILNNAVGDGKDFMNEVGTIGKIHHVNVVRLLGFCAEGFHHALGYDFFPNGSLQRFLAPPDNKDVF

SEQ ID NO: 213527 - protein, 87 aa, Glycine max
  unsure (1)..(87): unsure at all Xaa locations
  Clone ID: PAT_MRT3847_3483C.1.pep
GSPXVXXXPXXXXSTPLDSPVGSMFSTLMXAKRXHCPCXLIAXXNTFPRMPMYAALXISSXWYLPLKXDMIEXXEXEVVEREEKEVX

SEQ ID NO: 213528 - protein, 63 aa, Glycine max
  Clone ID: PAT_MRT3847_34840C.1.pep
PGKKNGFYQGGWVFVIILTNMRPKGGVFSKKRFMKTYDLVFGKKKKETCFPFIVLFLGNNNIG

SEQ ID NO: 213529 - protein, 53 aa, Glycine max
  Clone ID: PAT_MRT3847_34841C.1.pep
KKLFFGAVCPQAPPLTNVIKAALPILYFNMCLGVLFGFIPNRPYNIFLNLPLV

SEQ ID NO: 213530 - protein, 194 aa, Glycine max
  Clone ID: PAT_MRT3847_34842C.1.pep
MAETSSTEEDHNHIPIEIISDDEMALIEAAFAFASTRTFSSLRSSSSSKLPLCTNALSITPLSKRKLSSDIEDLPTCKKKHTLSDSFLHRFRNKRGLSVTDLTSTEWCPKQMEFSLLLGGRKVNEAMRAGIARHAKLEQEVISCLLPHSFSFLLHPSYFTLHVPSSLVIGDTMGFFFFFGLIIVIRTFISSVGS

SEQ ID NO: 213531 - protein, 175 aa, Glycine max
  Clone ID: PAT_MRT3847_34843C.1.pep
ARGFFFGVHTKDGLAMGLLLNTKGAMALIMLNIAWDRAIFSVPTYAVMASAVLLMTVVVSPVINAVYRPRKRFEQNKLKTIQKLRVDAELRILACVHNTRQATSMISIIETFNATRLTPIHVFAMYLIELTGRAAALVAAHIEKPSSQPGEQNLTKSQAELENIANAFDAGEAYD

SEQ ID NO: 213532 - protein, 62 aa, Glycine max
  Clone ID: PAT_MRT3847_34844C.1.pep
MAMASLIQCSATSLSAVPITTRFTRTHKSRLRCSLDANVSDMSVNAPKGLFPPEPEHYRGPK

SEQ ID NO: 213533 - protein, 287 aa, Glycine max
  Clone ID: PAT_MRT3847_34845C.1.pep
LAFAKARQLRSELRRLSKGPLTIESFMERVREINESLISIGDPVPLRNLIEIVLDALPEEYDPIVATVNSKEDLSSLDELESYLLAHESRLEKHRKMILTEPVSVNLTQAQPSDSSSPMEPSSPATESFPTGTSHVTAHAENNNYNFRGGRSGRGGGRFGRGGGRFGKSQCQICHKSGHDASICYYRYSQSASMPFSPQRAPFNPFLMNARPVYAPSFGYASPRPAAPRPSPPQAFMASSDPTFSNQWWYPDSGASHHVTPDSSNVSDAHSVTGSEQVFMGNGQGFF

SEQ ID NO: 213534 - protein, 34 aa, Glycine max
  unsure (1)..(34): unsure at all Xaa locations
  Clone ID: PAT_MRT3847_34846C.1.pep
DLAXXSSXKXDHGSLGTEVSXNLSEXRRIEFIKR

SEQ ID NO: 213535 - protein, 64 aa, Glycine max
  unsure (1)..(64): unsure at all Xaa locations
  Clone ID: PAT_MRT3847_34847C.1.pep
MPSLEEELFPSTSGKCKIERTHHMIRRLYRCFVXTSTMYLWALLLIGLTAYYLNFQGFVDCGSL

SEQ ID NO: 213536 - protein, 345 aa, Glycine max
  Clone ID: PAT_MRT3847_34848C.1.pep
MSSSIRPSLSSFMLPSLASCNPSQKLSLFRLGSGIRQFHKFGLKASRFLRHDDKCMRVMAFGNMSTAATQENVLDWVKHDKRRMLHVVYRVGDLDKSIKFYRECLGMKLLRKRDMQEQKYTNAFLGYGPEDAHFVVELTYSYGIEKYDIGDGFGHFGIAIDDISRIVELVRAKGGKITREPSPVKGGNTTIAYIEDPDGYQFELLERVPSPEPLCKVMLRVGDLDRSIKFYEKAFGMELLRTQDDPEFKSTIAILGYGPKEKNTVLELTYNYGVPDYDKGDAYAQITIGTDDVYKTAEAIKLAGGKITREPGPVPGIKTKIPLCVDPDGWKTVFVDNVDFRRELE

SEQ ID NO: 213537 - protein, 189 aa, Glycine max
  unsure (1)..(189): unsure at all Xaa locations
  Clone ID: PAT_MRT3847_34849C.1.pep
FTSLCTLFSPSMASSIRPSLSSFMLPSLRSCNPSEKLSLFHLGSGIRLYHKFGLKSSRLLRHDDNKCMRVMASGNMSTAATQENVLDWVKHDKRRMLHVVYRVGDLDKSIKYAQYXISYKIVISMILYSDHCHGRTNLLXFRFYRECLGMKLLRKRDMQEQRYTNAXFLGYGPXDAHLVAELTYNYGID

SEQ ID NO: 213538 - protein, 102 aa, Glycine max
  unsure (1)..(102): unsure at all Xaa locations
  Clone ID: PAT_MRT3847_3484C.1.pep
MSTKFVTIVWTNCRWSEEYTLGCIDSVALSETANYQRMTELLMLNLLLHMLNWEVAHELKTXDLCSQIHAVLAWXEAAEVYLVGLFEDTNLCAIHAKRETNY

SEQ ID NO: 213539 - protein, 94 aa, Glycine max
  Clone ID: PAT_MRT3847_34850C.1.pep
MSGFNFGGTGAPTGGFTFGTAKTATTTPATGFSFSTSGTGGFNFGAPFQPATSTPFTGLFSLATHTPATQTTGFTFGTATLASGGTGFSLGISA

SEQ ID NO: 213540 - protein, 333 aa, Glycine max
  Clone ID: PAT_MRT3847_34851C.1.pep
MRMRKQSTMQCALFRFWVPLLLLASFSYAPSVLATTEISGNQVNMDGKVVNEELGKPNLKGQDEEEKFKGLFPKPIPIVKPFPKLIPIIKPIPKPIPVVKPIPIPLYKPFPKSIPIVKPIPKPIPNGKPIPTEEAKFKGFFPKPIPIVKPIPVAKPIPIVKPFPKLIPIIKPIPKPIPIVKPIPIPVYKPIPKSIPIVKPIPNGKPIPTEEAKFKGFFLKPIPIVKPIPVAKSIPIVKPIPITVYKPITKSFPTVKPIPKPIPILKPIPKPISIVKPISKPFIVQKPIPAVEPEKFLKPKPFFKKPLPKFPLNPKFKKPLLPPFPIHKAIPTP

SEQ ID NO: 213541 - protein, 51 aa, Glycine max
  Clone ID: PAT_MRT3847_34852C.1.pep
MSAVAPQWWRSTSGLRSFSFVPSTPHTMDSAIPEFVLSSDCNRHEYGGTYY

SEQ ID NO: 213542 - protein, 60 aa, Glycine max
  Clone ID: PAT_MRT3847_34853C.1.pep
VAVCEPLCSLGAEVVGVGGWSRVLPWTCGGAICPSGILYIYEGFRIEEATEQNPKIVGKK

SEQ ID NO: 213543 - protein, 110 aa, Glycine max
  Clone ID: PAT_MRT3847_34854C.1.pep
VRRKTLGLELGNKVVCVPKKIQVVFNDSFGKKVGVKFNDDYPIGDLKKLVAGQTGPKTDKIRIQKWFPIIKDSIPFKDFEIPGGMGFELFFNLTQGVFYALYNSMIWEWD

SEQ ID NO: 213544 - protein, 66 aa, Glycine max
  unsure (1)..(66): unsure at all Xaa locations
  Clone ID: PAT_MRT3847_34855C.1.pep
SYNAAPKKLTCXAFYPGTQTVPLSHDIELNKELPEWVRVGISASTGQRKQTKAIPSWSLAFHNSIG

SEQ ID NO: 213545 - protein, 65 aa, Glycine max
  unsure (1)..(65): unsure at all Xaa locations
  Clone ID: PAT_MRT3847_34856C.1.pep
KSTRVIITEYFLEPNLCLSPRXLVLRAPDGLLEGAERGPTALSLYMCRHSYQDHDVKYEKQGDGG

SEQ ID NO: 213546 - protein, 73 aa, Glycine max
  Clone ID: PAT_MRT3847_34857C.1.pep
YSCAHSKMLGGEIHGVEGKPPSKPEQVDSTMEHGESLPSVNLNKLGGTMSERLGHNEHVLHERPTTCDSKVFP

SEQ ID NO: 213547 - protein, 61 aa, Glycine max
  Clone ID: PAT_MRT3847_34858C.1.pep
KLILSTWLVIPVFTGTAHVSEHYVSPLFVSPQDVSMWYVLSQKASLGKTEAVFNPAHKCNR

SEQ ID NO: 213548 - protein, 305 aa, Glycine max
  unsure (1)..(305): unsure at all Xaa locations
  Clone ID: PAT_MRT3847_34859C.1.pep
HASDEIASKLPTQHPDLPNRLDRMLRLLASYSLLTTSTRTTHHGATETVYGLSQVGQYFVPDGTRGYLASFTAFVCYPPLLQVWLNFKEAVVDADIDLFKKILGVTMYQYMENDPKMNQIFNKSMANLCATEMSRILEIYTGFEGISTLVDVGGGNGQNLKMIISKYPLIKGINFDLPQVIENALPLPGIEHVGGDMFAKVPQGDTIILKAVCHNWSDEKCIEFLRNCHKALSPNGKVIVVEFILPEEPEPTEESQLVSTLDNLMFITVGGRERTQKQYETLCKLSGFSNFQVACRAFSXLGVME

SEQ ID NO: 213549 - protein, 55 aa, Glycine max
  Clone ID: PAT_MRT3847_3485C.1.pep
KYTHRSLNLSVSPISNRRVFSACTKNDKHNHSLSLCPAHRVIFFPLINRPQDSSK

SEQ ID NO: 213550 - protein, 76 aa, Glycine max
  Clone ID: PAT_MRT3847_34860C.1.pep
NKQGQTRLAQYYEYLTLEERRALEGEIVRKCLARNEQQNELAILEFIHLLVETMDRHFGNVQDILHTLISSNTQAL

SEQ ID NO: 213551 - protein, 132 aa, Glycine max
  Clone ID: PAT_MRT3847_34861C.1.pep
PRVRKCVAFLATPIWKRFHVSPPQTQCRFYCSPPSHASSNKLFVGGLSWSVDHKSLKEAFSSFGDVTEDSGRSRGFGFVIFSNEDDAKCAKDAMDGKALLGRPLRINFALEKARGVPVVVPRLSDIGHVNRH

SEQ ID NO: 213552 - protein, 361 aa, Glycine max
  unsure (1)..(361): unsure at all Xaa locations
  Clone ID: PAT_MRT3847_34862C.1.pep
MGESNVMTKTEDGACLSAMLLSTNLVYPAVLNAAIELNLFEIIAKATPAGSFMSSHEIASKLPTQHPDLPNRLDRMLRLLASYSVLTTSTRTTHHGATETVYGLSQVGQYFVPDGTRGYLASFTAFVCYPPLLQVWLNSKNAMVXDAGISLFKKIHGVTMYQYMENDPKMNQIFNKSMANLCATEMSRILEIYTGFEGISTLVDVGGGNGQNLKMIISKYPLIKGINFDLPQVIENAPPLPGIEHVGGDMFARVPQGDAIILKAVCHNWSDEKCIEFLRNCHKALSPNGKVIVVEFILPEEPEPTEESQLVSTLDNLMFITVGGRERTQKQYETLCKLSGFSNFQVACRAFSSLGVMEFYK

SEQ ID NO: 213553 - protein, 54 aa, Glycine max
  Clone ID: PAT_MRT3847_34863C.1.pep
IILQDLYLIPHQLSSAFSSPCNQKSKSCTTAISGYLPRQNGTRPRGATRRIRHE

SEQ ID NO: 213554 - protein, 56 aa, Glycine max
  Clone ID: PAT_MRT3847_34864C.1.pep
RGGLFFLKPWGVLPMFGQLQATPRGGGHIYNITSPPFYMLHHISQIISFIKFWAIS

SEQ ID NO: 213555 - protein, 39 aa, Glycine max
  Clone ID: PAT_MRT3847_34865C.1.pep
SLLLVMKVVIKRPSLYIFVKITIMSPCIFQQRFLLNCRS

SEQ ID NO: 213556 - protein, 358 aa, Glycine max
  Clone ID: PAT_MRT3847_34866C.1.pep
MGKKAKGSRKGKKAWRANISTEEIEDFFEKSTKDALSGGSLQAVSSDSLFYEDKSKDLAVKKKIEKHRERVLRCDSLLQKNQFVKPVPSSILKKCSKNRNVASKSNLKVANQDGDKDDSAMFDLWDDKGKDDKKVKKVAKPTLIPAVEIDPPGCSFNPSYESHQDTLASAVAEVMQKIYKNELGPEPVPLTVPGEAIAEEDMYFLDVDNRSDNDESTPENEDDDALEKKPIKTKRVTRVELNKRARRKEQQRKEAEAKKIKELSKEIDSIPEIVQEIEHEDEEKKKRHLRRQVAKQEMLKTRPPRLGKHKFEPAPVQVLLSEEITGSIRKLKGCCTLIKDRYKSIEKRGLIVPAKRRN

SEQ ID NO: 213557 - protein, 362 aa, Glycine max
  unsure (1)..(362): unsure at all Xaa locations
  Clone ID: PAT_MRT3847_34867C.1.pep
MGKKAKGSRKGKKAWRANISTEEIEDFFEKSTKDALSGGSLQAVSSDSLFYEDKSKDLAVKKKIEEHRERVLRCDSLLQKNQFVKPVPSSILKKCSKNRNVASKSNMKEVNQDGDKDDSVVFGLWGDKGEDNKKVKKVSKPALIPAVEVDPPGCSFNPSHESHQDTLASAVAEEMQKIYKNELGPEPVPLTVPGEAIAEEDMYFLDVDNGSDNDESTLENEGENEDGTLEKKPIKTKRVTRVELNKRARRKEQQRKEGEAKKMKELSKEIDSIPEIIQGIEEEDEEKKKRHLRRQVAKQEMLKTRPPRLGKHKFEPXPVQVLLSEEITGSIRKLKGCCTLIKDRYKSIEKRGLIAPAKRRRN

SEQ ID NO: 213558 - protein, 46 aa, Glycine max
  Clone ID: PAT_MRT3847_34868C.1.pep
ECQRHFKLKAPTEPMYQNTHYNHVLYYEPWFSYILCAQYPIMLYYN

SEQ ID NO: 213559 - protein, 166 aa, Glycine max
  Clone ID: PAT_MRT3847_34869C.1.pep
MKPEIDVGDLKRRVSMFNDGMFIEKKEKTKEAFVNRLSQFSGPSDHRKEINLNKAITEARTADDVLEVTYETIVAVAKGLSPSPLSPLNIATALHRIAKNMEKVSMMRTRRLAFARQREMSMLVSIAMTALPECSAQGVSNISWALSKIGGELLYLSEMDRIAEVA

SEQ ID NO: 213560 - protein, 142 aa, Glycine max
  Clone ID: PAT_MRT3847_3486C.1.pep
ILNPGNKPPQEKKKLIRNPRPKGHDLPQETQNYKNFGGGGRKPNFFKVGKKGPKGKNPGGGYFFNLGTNWRDRAQTQKKNPPALTGQREPPGGKGDYWKPKGPSLGNGNFPGNNPQQKKKLGILPPPKRIAEKAFGGVPVPE

SEQ ID NO: 213561 - protein, 52 aa, Glycine max
  Clone ID: PAT_MRT3847_34870C.1.pep
LTLEALDGAYMACWVMSSVALNPARLSVETYSVRGRSSLSMELLFIQSRVHW

SEQ ID NO: 213562 - protein, 230 aa, Glycine max
  Clone ID: PAT_MRT3847_34871C.1.pep
IEANEILSSFDDRLRRYATKQLTKSGVRLVRGIVKDVKPQKISLNDGSEVPYGLLVWSTGVGPLPMIQSLDLPKAPGGRIGVDEWLRVPSVQDVFSIGDCSGFVESTGRQTLPALAQVAERQGKYLAALLNKIGKAGAGHANSAKEIEFGDPFVYRHLGSMATIGRYKALVDLRQTKEAKGLAQAGYLSFFIRRSAYITRVISWRNRFYVFVNWITTVVFGRDISRLWKS

SEQ ID NO: 213563 - protein, 68 aa, Glycine max
  Clone ID: PAT_MRT3847_34872C.1.pep
EGAKRKKKKKGLKRMLITCDIRLPARFFPFKIRKAESLLVSNLDHHCLSFLLLQDQYPAYLEPQSQTY

SEQ ID NO: 213564 - protein, 82 aa, Glycine max
  Clone ID: PAT_MRT3847_34873C.1.pep
KGNFFFSNLRKPWNPFSQTCGPLAKKKTLIPKLQHQGEVGYLKTKLLKFFRAPRGKPPDGEPRGGPKRGVPPHNATKGLTLI

SEQ ID NO: 213565 - protein, 37 aa, Glycine max
  Clone ID: PAT_MRT3847_34874C.1.pep
TVRLGSQPNVYRMQTYACFDRSPSASISADEVATTYE

SEQ ID NO: 213566 - protein, 82 aa, Glycine max
  Clone ID: PAT_MRT3847_34875C.1.pep
DISMYLGHCIGIFHLLQITLYIFITKKHTLSQQLVLYLLLPYFTLNVQASLYLLITVTIYVCVPHANDSRIPKIITCLIYMQ

SEQ ID NO: 213567 - protein, 34 aa, Glycine max
  Clone ID: PAT_MRT3847_34876C.1.pep
LSIRENNLGKKGDLHDHRNHSDAAHRKTTKCKKS

SEQ ID NO: 213568 - protein, 139 aa, Glycine max
  unsure (1)..(139): unsure at all Xaa locations
  Clone ID: PAT_MRT3847_34877C.1.pep
GSRSNNLILALLRPVMRFTMLQLLKNLRSHSQGRAISDADILYWLNLPMNNRVRTSHIXSFEQKSLTTELLTLELLSAVYPKAVHLHLVIMGLRYDETRLNASYIYSVAHXLRRSIHVIPHDITAVKQMMILTLAVSIM

SEQ ID NO: 213569 - protein, 56 aa, Glycine max
  unsure (1)..(56): unsure at all Xaa locations
  Clone ID: PAT_MRT3847_34878C.1.pep
YMALHLTFEKGMVELSFWDCVGSREEIARLSXLDNRCVPXRYMNRSHLWQLALQMR

SEQ ID NO: 213570 - protein, 82 aa, Glycine max
  unsure (1)..(82): unsure at all Xaa locations
  Clone ID: PAT_MRT3847_34879C.1.pep
KGCLHKWDFETEKDWAPFIDXEEAMPIAAFQFGVKMPXGRKSPPAPAWFQKLHNVLHKIXNKILARQKMVKFSLWCQGYPFC

SEQ ID NO: 213571 - protein, 53 aa, Glycine max
  Clone ID: PAT_MRT3847_3487C.1.pep
GKPSKSLYAKATDTGIDPELAAKKLNIDWDSAAEIEETNADDETEVPSVVVSS

SEQ ID NO: 213572 - protein, 67 aa, Glycine max
  unsure (1)..(67): unsure at all Xaa locations
  Clone ID: PAT_MRT3847_34880C.1.pep
VYIAIFTNTTXIXKKEALLRQVILTNSSSSKHFYACKXTKSEPHSGQNIYPIYSCGTNNSFEILISE

SEQ ID NO: 213573 - protein, 74 aa, Glycine max
  unsure (1)..(74): unsure at all Xaa locations
  Clone ID: PAT_MRT3847_34881C.1.pep
LTKALFQAQIMLGMVQAPXTVPKVRPMVAQNRVXVYXPTQKPSIQHAPLMSELGGAQDQACVFETIIPLWKHRS

SEQ ID NO: 213574 - protein, 194 aa, Glycine max
  Clone ID: PAT_MRT3847_34882C.1.pep
MPKPSELHAKFIYLLIEKLWELRDENVKKMWDLLEDEERFIIGIDGMGGVGKTCHGHFISRMRLKERGTFKDVFWVTVSHDFTNFKLQHDIAETIQVKLYGDEMTRATILTSELEKREKALLILDDVWEYIDLQKVGIPLKVNGIKLIITTRLKHVCLQMDCHPYNIITIFPFEEVEEQAWELFLLKLGHRGTP

SEQ ID NO: 213575 - protein, 179 aa, Glycine max
  Clone ID: PAT_MRT3847_34883C.1.pep
MVSSKIFFLFLLFLAHLHQHASVEGDSSLIKRTCKNTKYYNLCFSSLKSDPSSPNADPKGLAVIMIGIGMTNATSTSSYLSSKLPTPSNNTTLKRVLKECADKYSYAGDALQDSVQDLANEAYDYAYMHITAAKDYPNACHNAFKRYPGLVYPRDLARREDGLKHICDVAMGIIDNLDW

SEQ ID NO: 213576 - protein, 49 aa, Glycine max
  Clone ID: PAT_MRT3847_34884C.1.pep
RCYFGHMVTGITGNMAGKIISRRTMSEVLSGDHHGWYRNGDILHGLHVT

SEQ ID NO: 213577 - protein, 223 aa, Glycine max
  unsure (1)..(223): unsure at all Xaa locations
  Clone ID: PAT_MRT3847_34885C.1.pep
MANAAEDFSQFGISKEEKDKLVGELIRYMLFKTHQNSGCPIKREELTQLVTKNYHQRNLPTFVINEAKEKLSFVFGYEMRELQRAHPSSKAQTRSSQQSVADSKSYILISQLPPNVYEKYVVDVNTAHLSGFTFVIISIVYLAGGKIPEENLWSQMRRMGLGEXDTSHPVLGNVKQALELLVQQRYLQRDEVNGPEGNTVYYELAERALDGPMNDRVKEYISP

SEQ ID NO: 213578 - protein, 57 aa, Glycine max
  Clone ID: PAT_MRT3847_34886C.1.pep
ELDKEAKTRLIKLLSEIAELGAVAILRYYRAIVQSWIRVDSYTVNLIERISTGGLHW

SEQ ID NO: 213579 - protein, 62 aa, Glycine max
  Clone ID: PAT_MRT3847_34887C.1.pep
LPFPSGFGGALTSACPKPFLTKAANIHGFFLPACDGFLSEKIHVCVSENVILNKAGTKNGRI

SEQ ID NO: 213580 - protein, 317 aa, Glycine max
  Clone ID: PAT_MRT3847_34888C.1.pep
STLPLKANLTELESRHSNNYTEEELHSVKKLSKKLPPIQEAPKSYTPYIKYTKLQFKVDTFFAVGSPLGVFLALRNIRIGIGRGQEYWEQENIREEMPACRQMFNIFHPYDPVAYRIEPLVCKEYISQRPVLIPYHRGGKRLHIGFQEFTEDLAVRTHAIKNYMKSARDKVITVCQSRKMENIEGESSEEEEQPSYGSFMMERLTGSMSGRIDHMLQDKTFEHPYLQAIGAHTNYWRDYDTALFILKHLYGEIPEDSDLLVGFTGDNSKSESTSVSWYEPRDTVEEDLPLTFSDKVMARSFSSKAKKVLQKHTAFNF

SEQ ID NO: 213581 - protein, 123 aa, Glycine max
  Clone ID: PAT_MRT3847_34889C.1.pep
PLSRTAAQFISGATRASLRRARSFFFFTQKLPKHMRLLLYNHRRTDIIEDQKKCDINDATTSIITIGKTGYDQKGIQPYCPVLCTLHNTPETCTRDEPRKLIQLADSLKSYILRPTLTSGRLS

SEQ ID NO: 213582 - protein, 118 aa, Glycine max
  Clone ID: PAT_MRT3847_3488C.1.pep
MEGKGFTEEQEALVVKSWNEMKKNSQELGLKFFKKILEIAPAAQQLFSFLKDSTVPLEENPKLKPHAMAVFVMVTKLALLETIKEAVPEMWSPAMKNAWEEAHDQLAEAIKSEMKPSD

SEQ ID NO: 213583 - protein, 65 aa, Glycine max
  Clone ID: PAT_MRT3847_34890C.1.pep
SCKTGLNLMTNCTYEYNYRQNDLLSVLRVCLYLLLLQTCILLLMKMRHVYIKHTRAWILSIRHAI

SEQ ID NO: 213584 - protein, 60 aa, Glycine max
  Clone ID: PAT_MRT3847_34891C.1.pep
KPYTFFKKKAKPKINYPFFLFGKINNPWLLGALTLGGAIQIMARENHFSLNPWILEGNPK

SEQ ID NO: 213585 - protein, 54 aa, Glycine max
  Clone ID: PAT_MRT3847_34892C.1.pep
DVNHRDNQPFIGAEGDVSALSIFDHELMDRFFCDRCRSTHLAGMCTWISQFSGG

SEQ ID NO: 213586 - protein, 51 aa, Glycine max
  Clone ID: PAT_MRT3847_34893C.1.pep
NIHVVCLCRINLSPGDVNLGTVLWFVTFYQTYACSSQLYLSNLIQLIRENP

SEQ ID NO: 213587 - protein, 47 aa, Glycine max
  Clone ID: PAT_MRT3847_34894C.1.pep
LKVNHTLSSHQEVDVVSSLHSGICKKLLMYSFQNLFKGKMEKSCQKH

SEQ ID NO: 213588 - protein, 52 aa, Glycine max
  Clone ID: PAT_MRT3847_34895C.1.pep
EKGETVYQMAEQLKRVDRRVINCKRGRVCNFVEIKILNCSYSLTFVTIIDIT

SEQ ID NO: 213589 - protein, 143 aa, Glycine max
  Clone ID: PAT_MRT3847_34896C.1.pep
MASKLLSISPLATKNQKVTTPQIPRCFVLKFVKYLCFSSALHPEHFVNHDHCFNSDSFYASLIDNSTHKRHLDQIHNRLVISGLQHNGFLMTKLVNGSSNLGQICYARKLFDEFCYPDVFMWNAIIRSYSRTIFRDTVERLDG

SEQ ID NO: 213590 - protein, 200 aa, Glycine max
  Clone ID: PAT_MRT3847_34897C.1.pep
MEPVLLPSLVIMLALVLCFESLPSVRAQSTTTSPGSSSTREEAKALDALLQQFAYKDLVNPKTGIIYNATQLPSNLTGIEVAALRLRSGSLRRKGFQAYNEFEIPKGLIVSPYVERLVLVYQNLDNRSSSYYYPLPNYTYLAPVLGLLAYEGSNLSATNLSELDIDASESPILVKFTDVKPAPHGAVAKSIWFDLQGFFQ

SEQ ID NO: 213591 - protein, 71 aa, Glycine max
  unsure (1)..(71): unsure at all Xaa locations
  Clone ID: PAT_MRT3847_34898C.1.pep
FQVQAGEILDESSHYRIWYRTWWRDSCIDSPYFHSLLLTDPHSQSQWPYLKNTWSEAQCLLXNCLWRHRGT

SEQ ID NO: 213592 - protein, 157 aa, Glycine max
  Clone ID: PAT_MRT3847_3489C.1.pep
REGKGFTEEQEALVVKSWNEMKKNSQELGLKFFKKILEIAPAAQQLFSFLKDSTVPLEENPKLKPHAMAVFVMTCESAVQLRKAGKVTVRESNLKRLGATHFKAGVAAEHFEVTKLALLETIKEAVPEMWSPAMKNAWEEAHDQLAEAIKSEMKPSD

SEQ ID NO: 213593 - protein, 272 aa, Glycine max
  Clone ID: PAT_MRT3847_348C.1.pep
MLLMASTLPFPTLSILPHKAHCKSTPKLHPLPHISSRLNVVSKDPPILLDQSCNVLKNASLSLTSITLPFLLEQKDVALAVEGEFGILEGRTFALIHPIVMASLFLYTLWAGYLGWQWRRVRTIQNEINELKKQVKPTPVTPEEVPPPSEIELKIQQLTEERKELLKGSYKDRHYNAGSILLGFGVLEAVGGGLNTWIRTGKLFPGPHLFGGAAIAVLWALSAALVPSMQRGSETARSLHIALNTLNVLLFVSQLPTGFDILLKVFEFTNWP

SEQ ID NO: 213594 - protein, 77 aa, Glycine max
  Clone ID: PAT_MRT3847_34900C.1.pep
TKADAHGKGKAVKDTFLEWSNTTIPNLPAGKSEFNIDYEWDRSMRIRAAYNMKNYMQVEGLLTSLTLEDMMNHGWMR

SEQ ID NO: 213595 - protein, 62 aa, Glycine max
  Clone ID: PAT_MRT3847_34901C.1.pep
MEAEEQFELPHQSHDSPVQGMERVVATVSGYHGSERFNLIKLISQAGGNYVGAMSKSIIIWC

SEQ ID NO: 213596 - protein, 59 aa, Glycine max
  Clone ID: PAT_MRT3847_34902C.1.pep
LAISPSGPLVRIICSPGLWIFPSGKWIPAPDLQEPGLFYSLYLSLFSPGVFSATNPFPP

SEQ ID NO: 213597 - protein, 65 aa, Glycine max
  Clone ID: PAT_MRT3847_34903C.1.pep
CSEPREFAVPTQVSTNFSHTVKFKWHISKSKILQGAVIYFLCIKKLQKIGIKSLGGYTIQSTHES

SEQ ID NO: 213598 - protein, 98 aa, Glycine max
  Clone ID: PAT_MRT3847_34904C.1.pep
LCSMDSQEMESSIVDALAASRKRTRDEEEEEELEQAFFIIVSVATMLLSALTWYHDKYFVKEPARNLELERHSFLNRLYRGTKTDCIEQLRVSKKAFF

SEQ ID NO: 213599 - protein, 74 aa, Glycine max
  unsure (1)..(74): unsure at all Xaa locations
  Clone ID: PAT_MRT3847_34905C.1.pep
GFFAIHQTYGVSAAIVGLFMSPDKTYLFSFLSIATRWPLLRLRIDQLLNLGXQYLLPISLGNVXLTTSFRLFSL

SEQ ID NO: 213600 - protein, 86 aa, Glycine max
  unsure (1)..(86): unsure at all Xaa locations
  Clone ID: PAT_MRT3847_34906C.1.pep
FMNRVVXASMFNTVSNEKLGMLGYALXKDTXVHTRETPTINISQGVLRDKANLTLYDAQVTEAQIQTDLSMTKCDWDHPIHLQPTS

SEQ ID NO: 213601 - protein, 62 aa, Glycine max
  Clone ID: PAT_MRT3847_34907C.1.pep
GLPLIFQSSQKFQCNDLILIQCVANLTSTSRYCQLYKAPQSNGLLFDTVPSYQSSNEKGQFT

SEQ ID NO: 213602 - protein, 64 aa, Glycine max
  Clone ID: PAT_MRT3847_34908C.1.pep
GTDTEEQTLRRLRNADALIEQGCSYQIFDPVLYHDNLDECHERLMVNASEPKTSRVFWMSHDHI

SEQ ID NO: 213603 - protein, 120 aa, Glycine max
  Clone ID: PAT_MRT3847_34909C.1.pep
MDFDKLVGSASLYAFLQIVLDKLASTEVVNLIRGEKKLLQKLKTTLIKVSAVLDDAEKKQITDDSRVKDWLNDLKDAVYKADDLLDELSTKAVTQKQVSNCFSHFVNNKKMAGQFALYRE

SEQ ID NO: 213604 - protein, 47 aa, Glycine max
  unsure (1)..(47): unsure at all Xaa locations
  Clone ID: PAT_MRT3847_3490C.1.pep
TAVLCKLKRGEIITTIPTIGXNVETGEHKNISFTVWDDGWKDKIAQL

SEQ ID NO: 213605 - protein, 71 aa, Glycine max
  unsure (1)..(71): unsure at all Xaa locations
  Clone ID: PAT_MRT3847_34910C.1.pep
LSLLLMVHPDDVVFGGXDISXLDLAHAMATARVFDIDLPPTPTPYIVSIDPLTAIYVPYCIAGNQGDRVNN

SEQ ID NO: 213606 - protein, 111 aa, Glycine max
  unsure (1)..(111): unsure at all Xaa locations
  Clone ID: PAT_MRT3847_34911C.1.pep
FLTAVVRKNSAPNATAMHVGAIEIIIDSYASPDCNIVGAMLLVDTYHTNPENAARNICAAPFRGGKPIQVVTSTDTIVHIAPHTNSRLXLLSTTTNGDLVQGKDLAMVHDD

SEQ ID NO: 213607 - protein, 37 aa, Glycine max
  unsure (1)..(37): unsure at all Xaa locations
  Clone ID: PAT_MRT3847_34912C.1.pep
IKTFLECTYXKTIFFGXNRLRISEYIFFXNIYSKTVL

SEQ ID NO: 213608 - protein, 112 aa, Glycine max
  unsure (1)..(112): unsure at all Xaa locations
  Clone ID: PAT_MRT3847_34913C.1.pep
MDSLLLCQVMENSKMVKICXIGAGYVGGPTIALIALKCPSIEAAVVDIYKCRIAVWNSDQIPIYEPGLDGEEKHSRNKNLLFSTDVDKHVFGADIVLVSVNTPTKTNGLGAG

SEQ ID NO: 213609 - protein, 292 aa, Glycine max
  Clone ID: PAT_MRT3847_34914C.1.pep
DPPPSKFVIEASEALALAESAAVTLPELLPTLVPAAQPLARPPISKFSVAAVGLAPSGRIFVGVNLEFPGLPLHHSVHAEQFLITNLSLNAEPHLVSLAVSAAPCGHCRQFLQELRAAADVKILVTSEATAEFRALSDFLPHRFGPHDLLPLEAPLLLEPHHNTLTLQHYLNAHVPNHKLKIAALEAANKSHAPYSGSPSGVALLDCHGNVFKGSYMESAAFNPSLGPVQAALVAFVAGGGGDYDRIVGAALVEMDGAVVKQEHTARLLIHSISPNCQFDTFLCHNNNNNEY

SEQ ID NO: 213610 - protein, 213 aa, Glycine max
  Clone ID: PAT_MRT3847_34915C.1.pep
MATATVSISTLCATFGTHCAISHNPKPLFSQPFNLNHFPSNSYKLAFSPRSPLSPLPKASESAVAETEPGSAEPEPAQISPAQPPSWEPGLFAVVMIGGRQYIVHPGRHLTVQRLKGANVNDKIALHKVLLVGTDTSCYIGKPIVTNAVVYATVEEQGLDPKVIVFKYKKKKHYRRNIGHRQPNTRIRINSIMGYENYPKVTMDDIKSDEPES

SEQ ID NO: 213611 - protein, 95 aa, Glycine max
  Clone ID: PAT_MRT3847_34916C.1.pep
LEFQDVTLMLSLSFHGCLPWLPYQLPIPQPMLLAKRSFYGCLPWLPLTKRSFHGCHTNFNYRNSYYSPNGASMTAFHGLPFQPKPLQSTTTANPP

SEQ ID NO: 213612 - protein, 59 aa, Glycine max
  Clone ID: PAT_MRT3847_34917C.1.pep
FQVFFIFFNKLIEVVLVEMTLVFKNNNNKVLFVLDHDFKSLIFFNKTIETTLLFFLFEI

SEQ ID NO: 213613 - protein, 173 aa, Glycine max
  unsure (1)..(173): unsure at all Xaa locations
  Clone ID: PAT_MRT3847_34918C.1.pep
LLSFDMIERSLAQSDVHQNRNQYPLETGIPDYLGGLRTXTLHHPHESLELAHCSHRQIDWLLTHGILLAELEPELMPGRYYAYSSPDAYAHDDEDLVICGXMIDLVAHMCWMLPADRCQPVALPLPAAYDCYMEREPDSRPALLPSEDDPYAFXLRNMEACITPYSDHDNTSK

SEQ ID NO: 213614 - protein, 53 aa, Glycine max
  Clone ID: PAT_MRT3847_34919C.1.pep
LFSGKYHVQDIDYKRYQIRLTDAGIAEDTACSIPRYVLQRFNFSDDDRYFLRM

SEQ ID NO: 213615 - protein, 69 aa, Glycine max
  Clone ID: PAT_MRT3847_3491C.1.pep
MSFTSNSITIKSYTNYMAVPKKRTSISKKRIRNTLWKKKGYFTTLKAFSLAQSIFTGNSKSFFCNKYKR

SEQ ID NO: 213616 - protein, 40 aa, Glycine max
  Clone ID: PAT_MRT3847_34920C.1.pep
IPFFFEIGKFKNLGAIGNANKKNFPFFGNVDVSGNSFPQF

SEQ ID NO: 213617 - protein, 87 aa, Glycine max
  Clone ID: PAT_MRT3847_34921C.1.pep
QLHTHTVMKMATHRLEWAHGRLKRVAKTYTHWLYDTHTPTVTNILLANSTNGSPDYTLMAMEARLRRHGHFTECSYKSADTGYKTQH

SEQ ID NO: 213618 - protein, 64 aa, Glycine max
  Clone ID: PAT_MRT3847_34922C.1.pep
KLFLNLSVRFRTAPHEVQLSTQGDRIPDLCKVCLDSREININYFHMTRRSEDIKEENDTGDLDP

SEQ ID NO: 213619 - protein, 333 aa, Glycine max
  Clone ID: PAT_MRT3847_34923C.1.pep
MGEKKEAAKNEADKKPESGAKQNDEPVPVVLKLDMHCEGCVKKINRAVRHFEGVEDVKADLSSNKLTVIGKLDPAEVRDKLAEKTRKKVELVSPQPKKDSAGDKPPEKKTEEKKTEEKKSEDKKAEEKAPKESTVVLKIRLHCDGCVQKIRKIILKGVESVNIEGGKDLVSVKGTMDVKEIVPYLNDKLKRNVEVVPPKKEGGDNKKENKEGGGGDSKKEGGKKQEGEDGAAKVEVNKMEHYGYGYGYPPPPMYWYGHGGYAPGESSSYEAEVQPGYNSYSNQGYDGNYGNYHYQGYNNNYMMAQPPPPFYLNPHHPPPQMFSDENPNACSVM

SEQ ID NO: 213620 - protein, 76 aa, Glycine max
  Clone ID: PAT_MRT3847_34924C.1.pep
RIISSLRTSDTHRTGQTTRTKVTENIDTPCIMHTWRVHALTSSLSSATRIDAAPISLHMSLYLSPVSCTLAFHCLF

SEQ ID NO: 213621 - protein, 41 aa, Glycine max
  Clone ID: PAT_MRT3847_34925C.1.pep
WGRINVSRKHLKHNITQEPVSKYNNVKYKRIAIYYFKVVNS

SEQ ID NO: 213622 - protein, 64 aa, Glycine max
  unsure (1)..(64): unsure at all Xaa locations
  Clone ID: PAT_MRT3847_34926C.1.pep
HPLDWKNLGVPNFNRLAXHPLFTTWCKMEKALTDRLSQNLRSLNAQWDPPFSGPLSAGGVGFPP

SEQ ID NO: 213623 - protein, 352 aa, Glycine max
  Clone ID: PAT_MRT3847_34927C.1.pep
MMAGVSGSSTTPLLCSLFFISSLLFASCTHASSQAPPPIVDGLSWDFYRTSCPMLEGIVSKHLQKVFKKDNGQAPALLRIFFHDCFVQGCDGSILLDGSPNEKDQPANIGIRPEALQTIENLRSLVHKQCGRVVSCADLVVLAARDAVSLSGGPIFPVPLGRKDGLTFSIDGTGNLPGPSSRTGQLLDRFAGRNFDATDVVALSGAHTFGRAHCATFFSRINQTDPPIDPTLNNNLIKTCPSSQSPNTAVLDVRTPNVFDNKYYVNLANRQGLFTSDQDLFGDARTKGIVNSFAENQKLFFEKFSNAVVKLSQLDVLTGKQGQIRAKCSVPNKKKVVTSVVEEEGVDLSAQM

SEQ ID NO: 213624 - protein, 153 aa, Glycine max
  Clone ID: PAT_MRT3847_34928C.1.pep
FEWRVWFFSTVPFPKGGGGCFLICSFPFPSPERIVFFFTPVPCGFLVLWSTPPQLDSAPRFYLGFPPPHTFFFFLKGNCFVWCCCVPPPQVFFVSPLSLFFFVARPPGFFFLFFYNPRFSFWTLLFFVFCGSLHFMKHGLCPFPLDTNLNIIL

SEQ ID NO: 213625 - protein, 127 aa, Glycine max
  Clone ID: PAT_MRT3847_34929C.1.pep
RKDRQRVKMNLPLMSFLKKKRGWNNFMRARFSSGVHGDGSNVVTKFGQVKRKASLRRLVRVPSKILVLRLKLKMIKCLIIKKAPKQFEQRAEDEDRELCKKRILLGERCRPLSSPSPGYDTSNFFYP

SEQ ID NO: 213626 - protein, 74 aa, Glycine max
  Clone ID: PAT_MRT3847_3492C.1.pep
RWQGKTFPVAFDVPATSIASEPMDIMTALQLVLRKSLAYSGHAPCLYERAKVIDKHASHFLVLTEQCDQPYYVK

SEQ ID NO: 213627 - protein, 44 aa, Glycine max
  Clone ID: PAT_MRT3847_34930C.1.pep
HPHILVYWFYSIISLYFSYLRKTIERFVKLFNILLLKNLDIRYL

SEQ ID NO: 213628 - protein, 125 aa, Glycine max
  unsure (1)..(125): unsure at all Xaa locations
  Clone ID: PAT_MRT3847_34931C.1.pep
ASSLISSPAVISVNPAGAGMVAPLTGLKCMAGFPTRKTNNDLPFIATNGGRVECMRVWPPVGKKKFETLSYLPYLDDARLAKEIKFLLRKGWIPCLEFXMEHCFSYREHSQSPGYYDGTYWTMRN

SEQ ID NO: 213629 - protein, 39 aa, Glycine max
  Clone ID: PAT_MRT3847_34932C.1.pep
IPGSLSIYEKANAIIVVWNKFLNKHNYFLYESSNLLWNG

SEQ ID NO: 213630 - protein, 90 aa, Glycine max
  Clone ID: PAT_MRT3847_34933C.1.pep
IHSRGVSNAILMNLSWHAKGCSHRPIPDLWLDYHHNVLQAMGTRMLAKPHGHHLLLNGIREQIAFAVDESGRLVGTLCDTHHDPIWVIPL

SEQ ID NO: 213631 - protein, 109 aa, Glycine max
  Clone ID: PAT_MRT3847_34934C.1.pep
LPDISKSKFLFSVFGQVFLQQLNCFSILISSFLAAKFLSRIVIKVLTQWYGYMTEFWSSIGLYSSASPKGLSCPYLNNSSVRAPRLPTCNGLTSEMLKHCLKHYNNREI

SEQ ID NO: 213632 - protein, 59 aa, Glycine max
  Clone ID: PAT_MRT3847_34935C.1.pep
MDFDEYEYLEKAVENPEVNHRANGGDKNVKSEERGRNGSSKHKDDDDDDVVDLHPRHSK

SEQ ID NO: 213633 - protein, 77 aa, Glycine max
  Clone ID: PAT_MRT3847_34936C.1.pep
KTSYCPFYNFQIPSHYLFIPTNTNPISFNKTTTIHSPTFPPSLTPLPIPKIIIPIPTPSPNSPSNPTPPLPTNIPSS

SEQ ID NO: 213634 - protein, 61 aa, Glycine max
  Clone ID: PAT_MRT3847_34937C.1.pep
IMVQNFDELVSKLCNIYTFSFLSGIMECVLLATCFPYKNDFCYNYYVRYFKTHIHICLIYL

SEQ ID NO: 213635 - protein, 87 aa, Glycine max
  Clone ID: PAT_MRT3847_34938C.1.pep
RHVEHLWGLVGALISALSEEDEAAELLEEPVSISTASILCFWHAASSRSLMPIGAAIRYVFMRRCCKTVLLLLQTACPCSAWNSCSW

SEQ ID NO: 213636 - protein, 176 aa, Glycine max
  Clone ID: PAT_MRT3847_34939C.1.pep
TRPGSEGYVIKMRDGKNLRCVHSNFQGRNIPESAPQPAIVLRIEDGSGTLLPIIVLEMPSVLLMAAIRNVHIARPTIYQVVKEMIDKMGYEVKLVRVNKRIQEAYCAELYLTKVNDPTDNITFDLRPSDAINIAVRCKVPVQVHRSLAYSDGIRPVEPARMAVAAGLSDGLLFTEL

SEQ ID NO: 213637 - protein, 55 aa, Glycine max
  Clone ID: PAT_MRT3847_3493C.1.pep
DVRINSKLLMKPSVRVKIKLAIPRALSYHMNMISTVRSKEKNEHNSCPPPSSLKL

SEQ ID NO: 213638 - protein, 66 aa, Glycine max
  Clone ID: PAT_MRT3847_34940C.1.pep
MHCCGGNCGPGSLYTCYNGCTLYVICPDLRFTESTHTVTLFMTIAPEYAESADAYMHVHHYNSGCK

SEQ ID NO: 213639 - protein, 436 aa, Glycine max
  unsure (1)..(436): unsure at all Xaa locations
  Clone ID: PAT_MRT3847_34941C.1.pep
MSIRRLSAEESQTLYSLLRAEQRSLHEILSQFNAAIPSTRHFTLSSYLLILLQDNKVLSTTERLIAFALLVEAYSSQKPASNPFISFIVNASCNEGSEKVERAFILQLLGLDSSNSGKEFLKQSASDYVKGFDQSLHEFPPLDQLKQQFSDKVHLELYRCLFKDGSVKNVVPDPDVPPSCDADSIEFDLRPGTKPKHGAGDCRTGLXDLLSNLSLEGLSPHWIRPLPPRLPILDGAPGWLVPEGNHELMWDYGMCVDTSRGAAVRDLIAKALKGALAPAQQEQVLVELANDPKLVYHCGLTPRKLPDLVENNPLIAVDVLTKLINSPEIAEYFTVLVNMDMSLHSMEVVNRLTTAVELPSQFIHMYITNCIASCVGIKDKYMQNRLVRLVCVFLQSLIRNNIINVKDLFIEVQAFCIEFSRIREAAALFRLLKSLE

SEQ ID NO: 213640 - protein, 60 aa, Glycine max
  unsure (1)..(60): unsure at all Xaa locations
  Clone ID: PAT_MRT3847_34942C.1.pep
FVXPLGRTGTGXXLDFSXXFLNMLRILMILSNLIVMRIHRWLQLPIIIHSFVRSAPAINF

SEQ ID NO: 213641 - protein, 84 aa, Glycine max
  unsure (1)..(84): unsure at all Xaa locations
  Clone ID: PAT_MRT3847_34943C.1.pep
VRIRGCSETETDESASGDXMLNLSPMEADAADGAHPREKPKTSQKDKTLLLPDPVXPPAKAQLVRWSPMRTLRKNMFTADHSSC

SEQ ID NO: 213642 - protein, 99 aa, Glycine max
  unsure (1)..(99): unsure at all Xaa locations
  Clone ID: PAT_MRT3847_34944C.1.pep
MTPLKVGPFKARNWHCTLYRGSTKLYIMNGHGIKARTNPLPSVCTRXILKSTKNKGKPDLRNKALPAVIPRQCMPRLRKDRIYMYFEDKARGLLNPKGE

SEQ ID NO: 213643 - protein, 50 aa, Glycine max
  Clone ID: PAT_MRT3847_34945C.1.pep
GRIGRPRVDDSTLTHQLFLIQPNHALFYLHLFSWFSSVCTILFLTLFKLP

SEQ ID NO: 213644 - protein, 42 aa, Glycine max
  Clone ID: PAT_MRT3847_34946C.1.pep
CLVKRGSQLGTLGLKFFWRKNNIRNNYERFKVKNDHILLLSL

SEQ ID NO: 213645 - protein, 50 aa, Glycine max
  Clone ID: PAT_MRT3847_34947C.1.pep
TEISRHRRHYYRVYATPHKTNMSNNMIRKSSRCAQLNSEKLIRESYNDND

SEQ ID NO: 213646 - protein, 183 aa, Glycine max
  Clone ID: PAT_MRT3847_34948C.1.pep
MTLVERVVVLFIVMTIVKVSYAAVYKVGDSAGWTTLGTIDYRKWAATKNFQIGDTIIFEYNAKFHNVMRVTHAMYKTCNASSPIATFTTGKDSINITNHGHHFFFCGVPGHCQAGQKVDINVLKVSAEAPTPSGSALASPTVQASTVPAPSPSNATPLISLNGSFGLVGLAMGILSLAFSSYV

SEQ ID NO: 213647 - protein, 102 aa, Glycine max
  Clone ID: PAT_MRT3847_34949C.1.pep
AVKVLAFHWKRKYTGGCSHQLNPPHTVRKGLSIIYAISRHHTNKNIPFIYPQMDYLSPPIAKGGATNPKQRETTGDLSLANPTLKSGPQCTFPSSTIIFWRT

SEQ ID NO: 213648 - protein, 96 aa, Glycine max
  unsure (1)..(96): unsure at all Xaa locations
  Clone ID: PAT_MRT3847_3494C.1.pep
LVAAVGVFVFQIPFFIQYMGLLGRXGXVXEGSLVSHLDLSCRMINTIAGCCWSFCFSYTFLHTISXXFLPXSLPPPXXSXPXXTXIPTPFPPFSPP

SEQ ID NO: 213649 - protein, 304 aa, Glycine max
  unsure (1)..(304): unsure at all Xaa locations
  Clone ID: PAT_MRT3847_34950C.1.pep
YHFVIHFRYIEELSENESREHNPRXVNSNKTMGLGHVSPTSNVRPARNAFSEARTYGTRLDSLGGSDVQIPCVSRVRRSRPRKDIASLMKFHPTGMGEAEKLSNKLLEHSSDAGSDFSDKVLKSRMPAKFHQPSSSEPVKEQCPVICPIELRQELRPKRADPSSHTSDDNNIVTVPTAKGGMRRKHHRAWTLVEVIKLVEGVSRCGAGRWSEIKRLSFASYSYRTSVDLKDKWRNLLKASFALTPAPADEGINLRKHGTAPIPEKILLRVRELAEMNSQVPPNYSSSQLASGGGSVHGDRSGYL

SEQ ID NO: 213650 - protein, 74 aa, Glycine max
  Clone ID: PAT_MRT3847_34951C.1.pep
CTRARETILSAKNVESFLQAVGDIPVLVIAGAGGSLVSLESWEAMASKLLNSVSMLLPSCHELYAKLINAVSVY

SEQ ID NO: 213651 - protein, 70 aa, Glycine max
  Clone ID: PAT_MRT3847_34952C.1.pep
LPGTKSTTRGFRKSQQPSQQHFGSLGYPNFYHSQIGISLEHQQQNPREASLVGFQSQPPKQSQQIWQNSY

SEQ ID NO: 213652 - protein, 168 aa, Glycine max
  unsure (1)..(168): unsure at all Xaa locations
  Clone ID: PAT_MRT3847_34953C.1.pep
KKRKTDXXWDIKFKDGKLRIPRLLIHDGTKSLFLNLIAXEQCHLDCSNDITSYVIFMDNLINSPEDVGYLHYRGIIEHWLGSDAEVADLFNRLCQEVVFDINNSYLSPLSEDVNRYYNHRWNTWCASLRHNYFSNPWAIISLVAAVVLLLLTLAQTYYGIYGYYRPAR

SEQ ID NO: 213653 - protein, 46 aa, Glycine max
  Clone ID: PAT_MRT3847_34954C.1.pep
RLKTEAVHSWTCLDLYVFATPYRITWDYYFSAREHTLKFDLWEDPA

SEQ ID NO: 213654 - protein, 69 aa, Glycine max
  Clone ID: PAT_MRT3847_34955C.1.pep
AQFKLRCQFSENSSSSYSNHFYHTFLTYASIEKRHNHVPYPNNVMSRFMLPKSLCLQIKSLTARFFREG

SEQ ID NO: 213655 - protein, 45 aa, Glycine max
  Clone ID: PAT_MRT3847_34956C.1.pep
PPGIFGDTLKILTPAPYQALNSAQRRWTSNCMPGIPMLPPTAETI

SEQ ID NO: 213656 - protein, 111 aa, Glycine max
  Clone ID: PAT_MRT3847_34957C.1.pep
IGCQVFLRGGLLKSPRVFFSGGHFFPIFYCGPNKFAQKNFFFLKVLSLSQGPKLFGEMGGNIFGISHFFGAKKNFWFLNFFPNFFKLGPFPLKFWVQGPPQFEFGAFPFFP

SEQ ID NO: 213657 - protein, 60 aa, Glycine max
  Clone ID: PAT_MRT3847_34958C.1.pep
AIRTRGFFFFFFFFFFFFFFFFFFFFFIFFLFFFYFFLLFYIFFYFIYFWKVFMFFTRKG

SEQ ID NO: 213658 - protein, 49 aa, Glycine max
  Clone ID: PAT_MRT3847_34959C.1.pep
TSSPLLLLKPWYETQNHVQTQPKYQTMIFPNFLFVMKVSLLSQTRIWGV

SEQ ID NO: 213659 - protein, 66 aa, Glycine max
  Clone ID: PAT_MRT3847_3495C.1.pep
PNSDSDPLQCTHFTHSHSQFLHETLSPQWPPPPPNPLQWPQDLKTSMSSLTLPQNPKAQKRSNKSV

SEQ ID NO: 213660 - protein, 30 aa, Glycine max
  Clone ID: PAT_MRT3847_34960C.1.pep
IRGQGLPNKVICGINFHLEHSTSLLWGQKK

SEQ ID NO: 213661 - protein, 392 aa, Glycine max
  Clone ID: PAT_MRT3847_34961C.1.pep
MEEEHAAKAPLPDAFLQFLETNGLDPSIYTAIDSTPRYIRLKPGFESCIEEVEAEVKCKLEKLEWLPGFYSLPPHVQIAGSRAYREGKIYGIDAASGAAVMALNISPGDHVLDLCAAPGAKLCMILDLLGDSGSVAGVDVARHRLAACRTMLQKYMIGGRCRLFVADGTAFSVIPSGFCSDCKSCESGLEGRVDVFKEWTSRRPWKERKKANKSGTAQLVSRSQPPELIYYGQHSGVVGLTKGELYRTLSDNEIANHGYDKVLVDAECTHDGSVKHIQKFEDWGWGTLQRRVLDAERTDDLHTLQLNLLTNGFRLLKVGGSLVYSTCSLTIAQNEDVVEQFLKENETAELTEIDAASDWPCKGGRIPKTWRFDPLTSQTSGLFVAKFTKVVI

SEQ ID NO: 213662 - protein, 50 aa, Glycine max
  unsure (1)..(50): unsure at all Xaa locations
  Clone ID: PAT_MRT3847_34962C.1.pep
MIDQFFLKNFCVRVLSLKGVAKEFKVEPMPTFVLWKEGKEVXRVVGAKKE

SEQ ID NO: 213663 - protein, 60 aa, Glycine max
  unsure (1)..(60): unsure at all Xaa locations
  Clone ID: PAT_MRT3847_34963C.1.pep
MRHPLTGGGMTGAWADIVVQIKMLSSLGDLNDAPTLWKYLEXLYTLSNPDSSTINTSTSA

SEQ ID NO: 213664 - protein, 41 aa, Glycine max
  Clone ID: PAT_MRT3847_34964C.1.pep
NFCCHVIYLIIIFIHSVLYLGIYRFCNRIDYLPPPLFCLIP

SEQ ID NO: 213665 - protein, 114 aa, Glycine max
  Clone ID: PAT_MRT3847_34965C.1.pep
VFPRVRDSILVYQDSENNNYVIQAKKASDQDEFMEETSDTINDIFLNDYEVNKPGCFNVTYPAVNDTGMSFIYETTFSNDSPLDFLGGSMTNFSRIGPVETFGSVENLSLDDFY

SEQ ID NO: 213666 - protein, 103 aa, Glycine max
  unsure (1)..(103): unsure at all Xaa locations
  Clone ID: PAT_MRT3847_34966C.1.pep
SSRPFNDLLEGNXXVDIKSRSRWEKVTSTKAQFVSGKTFKYDIMGAGSHSSGDLPETEDQEKPKKIDTTLRQRIDPQYTARHAKRATNLFKPYVDDVETPKGS

SEQ ID NO: 213667 - protein, 83 aa, Glycine max
  Clone ID: PAT_MRT3847_34967C.1.pep
FLSLYSFLYTPTVVFLSLLRSPPNRLVSGSSVFSLLFQAHKLTHPRASFSPSVWEVLLVLDGCFWQGRIQSYRASEVGGGGGG

SEQ ID NO: 213668 - protein, 160 aa, Glycine max
  Clone ID: PAT_MRT3847_34968C.1.pep
MEDQPLSSKSKTAALDQTLHSIGFEIEDLSPEKISGRLPVTQKCCQPFKVLHGGVSALIAESLASMGAHMASGYKRVAGIQLSINHLKRAEIGDLVYAEATPLNVGKTIQVWEVRLWKIDASNSQNRSLVSSSRVTLLSNMPVPDHAKDAAKPLKNFAKL

SEQ ID NO: 213669 - protein, 67 aa, Glycine max
  Clone ID: PAT_MRT3847_34969C.1.pep
SKTRSSLLRAATIRWLRPMQRTSSLRFLPSRVLCPSMSLVHARILLESIYRFHVLEITDFALLLRGT

SEQ ID NO: 213670 - protein, 88 aa, Glycine max
  Clone ID: PAT_MRT3847_3496C.1.pep
SSDTRRVEHFFSSLLPLLIGKRGRILPPRRRCLPACYETSRIVQQCFLLTSGTLWNFTYCATMGAKYLEAVKQRMHAIKQWSPNEIRV

SEQ ID NO: 213671 - protein, 68 aa, Glycine max
  Clone ID: PAT_MRT3847_34970C.1.pep
SFKCWIFFCNLIKVSLLENGELIVIIWRTISLSHLKESVLLSLDIEFNLLRISKSWLKTSSLCSIVGF

SEQ ID NO: 213672 - protein, 83 aa, Glycine max
  Clone ID: PAT_MRT3847_34971C.1.pep
AQALTSYMYFPLEMIKTYKFINLHHLRVIFLSLYFYICTENCFKLPYSNNNLIHPLRLCCNHKSGSFICYMHKLKIKKREVFL

SEQ ID NO: 213673 - protein, 63 aa, Glycine max
  Clone ID: PAT_MRT3847_34972C.1.pep
YWGTLFSRMCSSFCTSTYIRMFCSVPVSEQRMFILGRMTPFVYFICKNIDLVHYTAVSTRCDS

SEQ ID NO: 213674 - protein, 72 aa, Glycine max
  Clone ID: PAT_MRT3847_34973C.1.pep
DPLVRFLLKPTPISFFSIPNFKVKWEIFTILMTLYLYFTLQSLFHYLYYLLPMSSTLSFLTINLLTYQTSLI

SEQ ID NO: 213675 - protein, 126 aa, Glycine max
  Clone ID: PAT_MRT3847_34974C.1.pep
RKKDLTYIGRPKAGGAALWGPTLISGPWVWFAIFCGGPYFPFFACFFPREDLENRGCSQTYGPGSAFPFFPLGGFIRGPARAGFLKSGRSRGPFPSPRSSGFFPGVGAFSFLSLPFPLGGRLPLGF

SEQ ID NO: 213676 - protein, 126 aa, Glycine max
  Clone ID: PAT_MRT3847_34975C.1.pep
MESNQSAKEITVEVEEFEDLLPVVAEKLDVETFVSELCGGFKLLADPETGLITGESLMRNSAMLGMDGMSKEEAETMVRQGDLDGDGKLNETEFCILMVRLSPGIMEDAETWLHKALEQELTKSST

SEQ ID NO: 213677 - protein, 54 aa, Glycine max
  Clone ID: PAT_MRT3847_34976C.1.pep
NKKCYSIVVSFSLSMWQPSLNYSPSFSVGDSSLYREPWLKPGLSYLVETSSVKD

SEQ ID NO: 213678 - protein, 85 aa, Glycine max
  unsure (1)..(85): unsure at all Xaa locations
  Clone ID: PAT_MRT3847_34977C.1.pep
RKNSTTYCYDXPLALETALEHSWAIQXAXFQRATDKNLLKVTELTFADKDGSXGSPLVPVENYPGLNDVGMVAWIMEMCTPEFPS

SEQ ID NO: 213679 - protein, 60 aa, Glycine max
  Clone ID: PAT_MRT3847_34978C.1.pep
KYKICIRANIELKIGWSKKEVMWCIKGRLERNCMPLKPIKGCVQQASLINLNRSGRGSPI

SEQ ID NO: 213680 - protein, 49 aa, Glycine max
  Clone ID: PAT_MRT3847_34979C.1.pep
KYYDEITCMSFFFCLQGSKHKIIYKYITYRGSYTSTILNYKINECLASR

SEQ ID NO: 213681 - protein, 66 aa, Glycine max
  Clone ID: PAT_MRT3847_3497C.1.pep
MSGTGKKGSDEAFKEGRNIDWDGMAKLLVYEEARREFSKLRCACDEGNSQRQTKFSQEHEPKEWDE

SEQ ID NO: 213682 - protein, 42 aa, Glycine max
  Clone ID: PAT_MRT3847_34980C.1.pep
GSGRVSITHNSFAACQPLIYYTLFFVGEGNVVSLGAKTFPET

SEQ ID NO: 213683 - protein, 33 aa, Glycine max
  Clone ID: PAT_MRT3847_34981C.1.pep
ISSQVVFFFTSHFLFEYCQLRTKLLIDNGEVHV

SEQ ID NO: 213684 - protein, 104 aa, Glycine max
  Clone ID: PAT_MRT3847_34982C.1.pep
RSTTTSKTGHRAPRRGYDSLRIRQCRNSSDKISCIANCFVTKAVTSVKISCSDSGRDFIRANFAVNFFFGDIDGMDFLLCRSIFMVSLGGRSINEGVYLEGALK

SEQ ID NO: 213685 - protein, 50 aa, Glycine max
  Clone ID: PAT_MRT3847_34983C.1.pep
HPESNRKDSRSKSRLFLAESRILPLVRYYKKPNELPPVWKYESTIGSTLV

SEQ ID NO: 213686 - protein, 94 aa, Glycine max
  Clone ID: PAT_MRT3847_34984C.1.pep
NNQCICRSRCTSGILGVLPFSPLVPGRYRDSPSSSLLSNSGPPPTNSYAFFAKCQIRSPLRWCSPFQCDRIGMECARIDMHIDVNIHMKFRLAP

SEQ ID NO: 213687 - protein, 82 aa, Glycine max
  Clone ID: PAT_MRT3847_34985C.1.pep
HTTHITHHIISTSLYISTFIPIHHLITILPLALPLHFHQSHQQSLTSNTIYTTINLLTTLTLSHRPYLFKYLTPLSNHSTYY

SEQ ID NO: 213688 - protein, 104 aa, Glycine max
  Clone ID: PAT_MRT3847_34986C.1.pep
SYPSTGSALVVVLLKCHLDVLCGSLCWMVLGSVTTSVGPRLMMVSLCTVKLVIFFWVLGGFFQSFVLSMWEYGLAILPRIGSIAPLICGRVLAHLSHDLGLLLL

SEQ ID NO: 213689 - protein, 48 aa, Glycine max
  unsure (1)..(48): unsure at all Xaa locations
  Clone ID: PAT_MRT3847_34987C.1.pep
HIHYSXSLSYXXATKRXXLEITRIXETSRQPDLDFQRTYSNFKEGSIQ

SEQ ID NO: 213690 - protein, 31 aa, Glycine max
  Clone ID: PAT_MRT3847_34988C.1.pep
DFLMRNFKQMSHVLWVASEDKASLYSQLHYG

SEQ ID NO: 213691 - protein, 62 aa, Glycine max
  Clone ID: PAT_MRT3847_34989C.1.pep
VTHRLYLSSMQLAMGSFPLYRNSCLVFRNKEGRIEIEQIELQDKPRRKKEWSHQLVSSISSI

SEQ ID NO: 213692 - protein, 40 aa, Glycine max
  Clone ID: PAT_MRT3847_3498C.1.pep
GLCHNQYLIKYATSINNCREMTVYTHSAFRSQRPHGRQKT

SEQ ID NO: 213693 - protein, 43 aa, Glycine max
  Clone ID: PAT_MRT3847_34990C.1.pep
TESISSFHIIGLASNADSDARLATKVDGQDVDRKFVLIIFRYP

SEQ ID NO: 213694 - protein, 60 aa, Glycine max
  Clone ID: PAT_MRT3847_34991C.1.pep
GVIFRGVLKEKEGFKFQDPIFSKNSLFHVTQGIPFQKLVAVAMGRPHPSSFSQTIFEFSP

SEQ ID NO: 213695 - protein, 241 aa, Glycine max
  Clone ID: PAT_MRT3847_34992C.1.pep
PRVREYTPAGRALKAKYGKLRARQKERLARIKAIKESNPAEGFPGNELLSHSPAIAKGGDPVAGPMHSDQEGPSINLEDRQLSEAKNSNTDSFSRINKLSKHKMTSHFDASVSNLGRSLPDIFLPSHPKVGLSMTNSMPTNNLLPVLGLCAPNANQIESSESNISKLNWRHRHGSRQEFPFSLAPCSGTSMDAEVRSKEVAANTKLADASTENLQPSFKNSIPDNSLTFVPFSTLCARKGI

SEQ ID NO: 213696 - protein, 36 aa, Glycine max
  Clone ID: PAT_MRT3847_34993C.1.pep
FTPVIWSICCHWSVFDGGGPWLVLFFNNVASFFLPP

SEQ ID NO: 213697 - protein, 90 aa, Glycine max
  unsure (1)..(90): unsure at all Xaa locations
  Clone ID: PAT_MRT3847_34994C.1.pep
SDAHADSTVDWARGEGGVGALGCAVGAQGGEVVVEGLDHGSAVLANDKRDQLLEGETLAKVTNXEQAXAEQCTAEXMPEIWAATAPAMAA

SEQ ID NO: 213698 - protein, 121 aa, Glycine max
  unsure (1)..(121): unsure at all Xaa locations
  Clone ID: PAT_MRT3847_34995C.1.pep
SKLQKDDRRGTQKPHYHSITLRNPPLTLLVRNLNLSLSLKKIKVVPALLLAVLGGNKNPSNDYIHGILRSVGIEADXDMNETFLSEVYGYEIIEPIAAGXEKLGSVPSGGRCSVALAAAPG

SEQ ID NO: 213699 - protein, 57 aa, Glycine max
  Clone ID: PAT_MRT3847_34996C.1.pep
RWRTKAWEKNADEDAPMMVIVNPRAMLKPPVPAGYYNNACAYPAAVTTAGKLGENPV

SEQ ID NO: 213700 - protein, 95 aa, Glycine max
  Clone ID: PAT_MRT3847_34997C.1.pep
KTVHKQFWIQHQVFWGQHNHHCGHIDHICPQFPTISKITTNRNPYVQLFIELPSDGKGQCSVLTELAFSTMKTNYSTDKRQTTRQMQCPEHRGSK

SEQ ID NO: 213701 - protein, 227 aa, Glycine max
  unsure (1)..(227): unsure at all Xaa locations
  Clone ID: PAT_MRT3847_34998C.1.pep
MAILPSLAVPSTPISRVKLFQCQPCQFHRCTELYLPHQTYYTRTTSIKVSMADQNEPSEVNMQIGIMREKLKETLPVSVQEFPWXKAEHILLDRLLNLAQETVKWSLVLFFIFSSVSDVVYTFSINRELVIPVGLFVGCLAADFLKEISQELFHKSEEKDLKRHLLGMYCLFVFVKFMSTWFAALPQVFLLHVANGGLMQVLWHLRIFMEDGKNKQETSSSSSLEAS

SEQ ID NO: 213702 - protein, 116 aa, Glycine max
  unsure (1)..(116): unsure at all Xaa locations
  Clone ID: PAT_MRT3847_34999C.1.pep
XLLXXXXXXXXXXCXXVVXXPXSAXXXCSXXSXXRGCXLXLSLXXXXXCXXXVXXFXXXXXDXDXXISSLAXIAXXIAXQXRVLNNXXXVXXXXQQNWNYSXXSSXXPSXXTRAXD

SEQ ID NO: 213703 - protein, 92 aa, Glycine max
  Clone ID: PAT_MRT3847_3499C.1.pep
NLLSLTYQFNNSSITICILQRTKKIPMTFFLTNYKMSTCYWSRITTICTDSTNKPPTTNNIPLRHCQITFPATFSNYRPQIHNKDTNKQTQT

SEQ ID NO: 213704 - protein, 101 aa, Glycine max
  Clone ID: PAT_MRT3847_349C.1.pep
PVFGCPPSPLGVEFFELLPKIARRFGKKLEKDPQFFKKGDPGFVKMIPPHPPGGGTFLGSPPLGRFFVRDMGPTVAVGVTKNVGKKGPFGAKVPKAAQKKK

SEQ ID NO: 213705 - protein, 176 aa, Glycine max
  Clone ID: PAT_MRT3847_34C.1.pep
DTVEDSILMPDPLPSATSSNNSLFTSVSSTRNSGRLGASFDGSSLTASGSGFTSNILNVSTAEETPQRNHLWPGGTLSRLHAPRASYNFKDDMEVFSPLVDVQPLAPSLWDENGIKKDNLFADRKPLLFPSSSRRFSNSEDVTSDHPVSDWKSGSTAKQVIVSQGPGFEFNCSVKY

SEQ ID NO: 213706 - protein, 65 aa, Glycine max
  unsure (1)..(65): unsure at all Xaa locations
  Clone ID: PAT_MRT3847_35000C.1.pep
MVLFKMLNRWVFHXISIGCISTWKGKPNGYYATKSDWSELAIKVYITSCLVFKDXDRYVPGDFPF

SEQ ID NO: 213707 - protein, 71 aa, Glycine max
  Clone ID: PAT_MRT3847_35001C.1.pep
YMKRNCYLDLRLQSSSPHPYRSMNRTLNIHNKLVAILHNGRQCIFDTAELQARVIIWLASREMEGSTSLHS

SEQ ID NO: 213708 - protein, 91 aa, Glycine max
  Clone ID: PAT_MRT3847_35002C.1.pep
DFCRNRTLNIHNKLVAILHNGRQCIFDTAELQARVIIWLASREMEGSTGLHSETLLIHVSRGLSIKKSLQNFLQRRIRKKRSQPHLPCNPK

SEQ ID NO: 213709 - protein, 62 aa, Glycine max
  Clone ID: PAT_MRT3847_35004C.1.pep
TYIELGFYFLLIILHLVASNLSSLFAPLPLIDAPTFRSVVGGASDGGQSAEALLIFRTHSSG

SEQ ID NO: 213710 - protein, 48 aa, Glycine max
  Clone ID: PAT_MRT3847_35005C.1.pep
CSFSMHVICASGENFDVSIVQLYLTLKVSKLQDIVAQVPKIEVVKIPS

SEQ ID NO: 213711 - protein, 73 aa, Glycine max
  Clone ID: PAT_MRT3847_35006C.1.pep
RNHIMSNKAMGNYSTPYYLSAGHLNLGPLMDPALQYDITDNDYGTFLCGIAYSPKAIQVITRTPARCTLRRPA

SEQ ID NO: 213712 - protein, 148 aa, Glycine max
  unsure (1)..(148): unsure at all Xaa locations
  Clone ID: PAT_MRT3847_35007C.1.pep
MLHHGSDSTFKHDDSKWKKQAAYYKKLSPELGTDKIRNIMDMNTVYGGFAAALIDDPVWVMNVVSSYATNTLPMVYDRGLIGTFHDWCEAFSTYPRTYDXLHLDRLFTLESHRVFFVVNSFKLRLIXCEMKYVLLEMDRILPANGYAI

SEQ ID NO: 213713 - protein, 172 aa, Glycine max
  Clone ID: PAT_MRT3847_35008C.1.pep
MDAKELFSTNLIDGTVTSHIKRQCNSPPTLIVIGAGISGIAAARCLHDASFKVIVLESRDRIGGRIYTDYSFGCPVDMGASWLHGACNENPLAPLIRALGLTLYHTGGDNSVIFDHDLESCMLFNIDGHQVPQHIMMAVGDTYKRILAETVKVRDEHPDDMPILQAISIALN

SEQ ID NO: 213714 - protein, 86 aa, Glycine max
  unsure (1)..(86): unsure at all Xaa locations
  Clone ID: PAT_MRT3847_35009C.1.pep
MIKLLIYNSISQGYFIVQPTFECISFTTPLLETSNFVSCWHKLIKNRSISNIKRQGIILFWIESRXQXXXCSRXHAXLGVHLYPLL

SEQ ID NO: 213715 - protein, 116 aa, Glycine max
  Clone ID: PAT_MRT3847_3500C.1.pep
MYSTKSIADSASWCCALALLCLILLGSIRDNHVPEEEDPAAAATTRGRSNLFERPCDEIYVVGEGETLHTISDKCGDPFIVERNPHIHDPDDVFPGLVIKITPTPTYTNTKKLFKR

SEQ ID NO: 213716 - protein, 141 aa, Glycine max
  Clone ID: PAT_MRT3847_35010C.1.pep
FLSRGSQGSTFEGRGESVDIVDIDNWDCSCKGWQLTGMTAGHTIAVFECVGRSPYDYCSRYFTVENYRLTYAESIHPVPNVDKPPVQGESTSLVMVTPPPTKRPPGRPKMKQVESIDIIKRQLQCSKCKGLGHNRKTCKLS

SEQ ID NO: 213717 - protein, 50 aa, Glycine max
  Clone ID: PAT_MRT3847_35011C.1.pep
LCTLQCTSPPPTNQTEPQRHPHLIPISLKLSVLGFCSPQRQIQAASSNSS

SEQ ID NO: 213718 - protein, 124 aa, Glycine max
  unsure (1)..(124): unsure at all Xaa locations
  Clone ID: PAT_MRT3847_35012C.1.pep
PILVFKKLRRYAAPLQMVMALGNLIELHYEYSTSDKSYGDLYYRWRIQHTVSXSSDTSTSCXNLIKATVMHVHNAIMMDEPNELKLIXHRDMTNHGIRSTDASSKVDDGILYQGSHTRQPDLNG

SEQ ID NO: 213719 - protein, 106 aa, Glycine max
  Clone ID: PAT_MRT3847_35013C.1.pep
TLQAFKKKKKESPFLTGGGLKKKIFKPFFNLFGKPPRGLKFWKIKTPSLSRKKSKLPPTFFLTFKSPFFEKPRKGFFEPSFFCFFNWRGFPRAWGPKKSGGFFWVG

SEQ ID NO: 213720 - protein, 113 aa, Glycine max
  Clone ID: PAT_MRT3847_35014C.1.pep
LDACWKYNNDFPIGEGVVPDVVDVEEEEGPPRGAGKELIPEGQGDRFFIHGDDIFFFGEGGVGNNVDPPQENQTQPPNNQDVRSLCPWPPPPEPFSCSCCEVLRQINYTNGNR

SEQ ID NO: 213721 - protein, 70 aa, Glycine max
  Clone ID: PAT_MRT3847_35015C.1.pep
TATFSSSIARTRSISTALLRVKASLTQILLRSVGFDCESHSDARLRSYEMTIIPKGDSAQIREVCNDHTQ

SEQ ID NO: 213722 - protein, 64 aa, Glycine max
  unsure (1)..(64): unsure at all Xaa locations
  Clone ID: PAT_MRT3847_35016C.1.pep
HHLLNAELYFSAFKTKFLRRYLTHEDHYHPFRIFKXNLLRAKLYHKLDPYVDHGGTIISLSHYV

SEQ ID NO: 213723 - protein, 138 aa, Glycine max
  Clone ID: PAT_MRT3847_35017C.1.pep
PRRALFRMGNHKIVMCEAFDNKMQPHVTNNRARCKQTLDAAAKEHAWLGMEQEYTLLDVDQHTFGWPKAPFGFPGPQGPYYCGAGANKAYGRDIEDSHYRACLYAGILIWGTNAEVMPGQWEFQVGPCEGIQMGDQLW

SEQ ID NO: 213724 - protein, 45 aa, Glycine max
  Clone ID: PAT_MRT3847_35018C.1.pep
IKHVIKGSEVTKCAVRMIFWVKIGFKNFCSKRPAGYWTLKLRVLL

SEQ ID NO: 213725 - protein, 128 aa, Glycine max
  unsure (1)..(128): unsure at all Xaa locations
  Clone ID: PAT_MRT3847_35019C.1.pep
LRLFAKGGAKVRADHQQVGDVCVXDGIIAYMKDHYYDTEMRSHAIDATGKVGMPGGTDPHXTHLEIEMMGAETEHGYTGGHAVAYAGETTMHIDFVIPQKGRITAGIEAYEKRARTTCKDDGFHIAMT

SEQ ID NO: 213726 - protein, 88 aa, Glycine max
  Clone ID: PAT_MRT3847_3501C.1.pep
GCEKTTEGGIRICSKAHWSDIVFTLSITIPSRHLPIVLCFLNPSQSIAESLNCSNHSCKSLRNRTFSIALISIGSVEVGERQASLLVA

SEQ ID NO: 213727 - protein, 142 aa, Glycine max
  Clone ID: PAT_MRT3847_35020C.1.pep
LFIIRLPAIVRVIAQTFIQVLKPSTRKKLKLGGEVYRKVLYDNFPTLPSYLGGSCSCMRCSKIGNWDILQPHATGTSRIDREEDISDNRGLPSLHQSNELDGHQTSNSDQLLRKAVISILVFWVFIALGAGIYDPGSLHLPP

SEQ ID NO: 213728 - protein, 112 aa, Glycine max
  Clone ID: PAT_MRT3847_35021C.1.pep
LQVPVDSGRPRVRGPGPGSTGFGGAGGMGGGGGGVGGGAGGGLGGAGGGSSMYRLPGSGGMPAGGTGGYPDSGHYGLSASSGYQNQHHPPSGASPMPRVPPGSMYPNMPPYY

SEQ ID NO: 213729 - protein, 58 aa, Glycine max
  Clone ID: PAT_MRT3847_35022C.1.pep
HAFFYIWADARAYKNAAVSCLSEALMAESAGGEPGGDSNNVCNTFIRSKVRNQTCTLS

SEQ ID NO: 213730 - protein, 55 aa, Glycine max
  Clone ID: PAT_MRT3847_35023C.1.pep
ADTWIQDAAKLHLRLHFINRCRLLEEHPCPKEDRSLSFYCVRDCDGPHDIYKYIL

SEQ ID NO: 213731 - protein, 69 aa, Glycine max
  Clone ID: PAT_MRT3847_35024C.1.pep
TFFSMCVPKKFAKPLTLRILYSRRKHQNLDILYKRLVNELMTCNMGQKILSILHLRKNYRCRRHLLIDR

SEQ ID NO: 213732 - protein, 58 aa, Glycine max
  Clone ID: PAT_MRT3847_35025C.1.pep
GFGFKLNVGSLLYANKVMFNQTVGEPYQCRSKKAMFTECFLLSFNTFKILIGVYNEFY

SEQ ID NO: 213733 - protein, 138 aa, Glycine max
  Clone ID: PAT_MRT3847_35026C.1.pep
SSFFCAFLKYHLARDFPSGQVDERPVSNLLLQADEPKCNMEENPSPSKHCNGDIDTGIVNQVVEIEDGLYTRVEHTIECKGSGALGINLISSGISPSQKLESTAENDLQTFNYEATCAATSAVLVSKFSENNKKNPGQ

SEQ ID NO: 213734 - protein, 86 aa, Glycine max
  unsure (1)..(86): unsure at all Xaa locations
  Clone ID: PAT_MRT3847_35027C.1.pep
LPEETGNXXLPANPGCYPTSGQLXFFPXLQATLMGLKDIIIDAHPGVSGARRAAXXNFRVPGXTGRSHSYGATLHRLVPEIPPGLA

SEQ ID NO: 213735 - protein, 63 aa, Glycine max
  unsure (1)..(63): unsure at all Xaa locations
  Clone ID: PAT_MRT3847_35028C.1.pep
YEIMGRSPTCVIFPTCKGAPSKWGPHFLGVAIERKLTEFKKKKKKXKXXKNYXKKXKNFFFKI

SEQ ID NO: 213736 - protein, 76 aa, Glycine max
  Clone ID: PAT_MRT3847_35029C.1.pep
HDSPGQLHDLYLIRSTQSFRKNSKLSGNPVLSRVSQFNDKVKDFLGSLPIDDGGSSLACKVQQALDVRVVYSQDKI

SEQ ID NO: 213737 - protein, 63 aa, Glycine max
  Clone ID: PAT_MRT3847_3502C.1.pep
TYLNGQKNIYTQLVLTSFKYTCSPLAHICSMEIHIQASIVVSSTGTHPLYAFDCYAYALSSSG

SEQ ID NO: 213738 - protein, 311 aa, Glycine max
  Clone ID: PAT_MRT3847_35030C.1.pep
MAVQAQYPSNVLLFLNSKTGQEAHDYSLQSPPGQQLLDQSHMLFNNGGTNSRKRGRETTAATGIAPNVINSFSLQSQSPQAQLIELTQLHNQNVVSTGLRLSFGDQQQQRQQLQHHQQQHGGLSSQIKQQRDEIDQFLQAHGEQLRRALAEKRQRHYRTLLRAAEESVLRRLREKEAELEKATRHNAELEARATQLSVEAQLWQARAKAQEATAAALQAQLQQAMMIGDGENGGGGGLSCAGGGAEDAESAYVDPDRVGPTPKCRGCAKRVASVVVLPCRHLCICAECDTHFRACPVCLTVKNSTVEVYLS

SEQ ID NO: 213739 - protein, 80 aa, Glycine max
  Clone ID: PAT_MRT3847_35031C.1.pep
SGTCMFFPFTKCMLSCTTRATLAHDSALKAITSCSMEFFSEEIKCIHLRFKLYQHGQLHDHWVRTTTFVSLRIFFHPHPR

SEQ ID NO: 213740 - protein, 256 aa, Glycine max
  Clone ID: PAT_MRT3847_35032C.1.pep
MLHITCILLMCLLSSFSPPINALLNLTLPHQHPHPESVVHDLQRKVNASLWRREMLSKEDQQEGMSSSSCLTGNPIDDCWRCDPNWAADRQKLAECGLGFGKYAMGGKGGQIYIVTDSSDRDPANPVPGTLRHAVIQDEPLWIVFAADMTINLKHELIFNSYKTLDGRGANVHVTGHGCITLQYVSNIIIHNIHVHHCTPSGNTNIRASPTHVGWRGKSDGGGISKLGSWKLLREHQWRTEDREVVHGGLWASRRG

SEQ ID NO: 213741 - protein, 59 aa, Glycine max
  Clone ID: PAT_MRT3847_35033C.1.pep
FFNRTNFHPHLRCLCNIISILNDVFTWWPVRLYYSMSWLPLWQLLLNPPATHYHKIRIL

SEQ ID NO: 213742 - protein, 86 aa, Glycine max
  Clone ID: PAT_MRT3847_35034C.1.pep
GSLPKNFGHMEEDARSNASSCNVVARGVIHLEILRRRSDIFGSGHPPPSYVQATTSNCAENGPAVLIIKPDSHVRGLAYADQGFEV

SEQ ID NO: 213743 - protein, 69 aa, Glycine max
  Clone ID: PAT_MRT3847_35035C.1.pep
LRNPFGPNFYTWHPLNPVPWGNFAETGIPWSFENKNSRGSFSRKGLIKTQRNTHEIKRGLCTPEQKCLN

SEQ ID NO: 213744 - protein, 92 aa, Glycine max
  unsure (1)..(92): unsure at all Xaa locations
  Clone ID: PAT_MRT3847_35036C.1.pep
DGIHLLYDTFTHIIPSKALILITRSLLPIKPLQLERNKSNLLALLTHIYKHLNTRDTQTXHRNNALXKIIIDYSTIPQHYLTYIPYYESTII

SEQ ID NO: 213745 - protein, 71 aa, Glycine max
  Clone ID: PAT_MRT3847_35037C.1.pep
FRGFFSITKLVLHGVCFFFGGFPFAPFVEVLKSYFWALFHIFFFFWVFYIFSGFWPLPFFPGFFFLVWFLL

SEQ ID NO: 213746 - protein, 78 aa, Glycine max
  Clone ID: PAT_MRT3847_35038C.1.pep
REWFLLVQKQRKMDEENGYSGSISSNLETTKAERSVWLMKCPLVVAKSWQTHPPSQPLAKVVPSLDPLNPEEDIPPAA

SEQ ID NO: 213747 - protein, 134 aa, Glycine max
  Clone ID: PAT_MRT3847_35039C.1.pep
MRKHGWQLPYHPLQVVAAAVFLALGFAFYVFFAPFVGEKMYQYIVIGLYSPLIISVFGLYIWCAAADPGDPGVFKSKKYLKIPDSKKLAELKNSKLGEESSSSMHEVNASIVGAKSVDKEALGTKGTSKDASIQ

SEQ ID NO: 213748 - protein, 89 aa, Glycine max
  unsure (1)..(89): unsure at all Xaa locations
  Clone ID: PAT_MRT3847_3503C.1.pep
YKLVYREENMKLLVFFVAAVLLVPWPCHGARTQRLPLRMPTGYGERSSDVQCASFRLAVEAHNIRAFXIIPEHCLDPTXDYINGGRFRS

SEQ ID NO: 213749 - protein, 118 aa, Glycine max
  Clone ID: PAT_MRT3847_35040C.1.pep
GCVPWLCLWPRNLGPLPLSALSSLGGSFWPFAVSPGLFLALGPPPFGPMVSRLSPRSPLSFPAPLSVSPAFLFLVRRLWWLRGCAVVRRGPFLSGRGVGCPCFSLYPPPAFLWPRAER

SEQ ID NO: 213750 - protein, 104 aa, Glycine max
  Clone ID: PAT_MRT3847_35041C.1.pep
HFCGKQGFCLCWEHFSKPYPGQFGQGNFPQKFLGCHCFPLQKRMPFLFRYLGVSFEGKGKPKSGFNVFWNWRKGEKKFCLFRTFPLPVGLTCFLKMVFFGLVFF

SEQ ID NO: 213751 - protein, 70 aa, Glycine max
  Clone ID: PAT_MRT3847_35042C.1.pep
RKNIKQRKDIQKTNNNNKNEEKVKRIYLSIQSPMQSSRSVFIACFFTTFPNTSLAILKTFSLSTTPPPFF

SEQ ID NO: 213752 - protein, 66 aa, Glycine max
  unsure (1)..(66): unsure at all Xaa locations
  Clone ID: PAT_MRT3847_35043C.1.pep
KEYGKEKVRKRRLIVGEGWDTSEDGDXDQVYYTGKPDEGTKNSSSRDWGTSFSLTLXGQRQGIKGW

SEQ ID NO: 213753 - protein, 86 aa, Glycine max
  unsure (1)..(86): unsure at all Xaa locations
  Clone ID: PAT_MRT3847_35044C.1.pep
MLEATRWLLGAGILMWMLAWLGESAIGVNWGTVSFHKLKPSTVVGLLKDNKIPKLNVFDAYADLLKALMGSDIQXLLGIPNEFFLF

SEQ ID NO: 213754 - protein, 63 aa, Glycine max
  unsure (1)..(63): unsure at all Xaa locations
  Clone ID: PAT_MRT3847_35045C.1.pep
FLFXIIXXWGLGGNIVGGVXXXRVLNPGTLNFWGRRTIISPPVKKVPKLFPQTVKRGGLFPLP

SEQ ID NO: 213755 - protein, 62 aa, Glycine max
  Clone ID: PAT_MRT3847_35046C.1.pep
LFIKKKKFQPRLILYIFDVLVTSILDNSHVRVSMLCFVSRLESVLHRLRMLFCPLVKVVGNC

SEQ ID NO: 213756 - protein, 51 aa, Glycine max
  Clone ID: PAT_MRT3847_35047C.1.pep
SSCNLLSCCFQYTERVTVPSSPTSNGHLSCHPLAHFYSDLDNRGKLPPPYS

SEQ ID NO: 213757 - protein, 256 aa, Glycine max
  Clone ID: PAT_MRT3847_35048C.1.pep
ADPLNINLDYALFESKTVTVKDPVSGLVYTNLFDQMVDAVYFAMKRLGFPGVRIFIAETGWPNGGDLDQIGANTYNAATYNRNFIKKVTKKPRVGTPARPGSALPSFLFALFNENQKPGPSTERHFGLLHPNGSRVYDVDLSGETPEAEFRPLPVPENNEKFKGRIWCVAARRDNATALTAALAYACSQGNGTCDPIQSKGKCFKPDSVFWHASYAFSAYWAQFRKVGGTCYFNGLATQTAKDPSYGSCKFPSVTL

SEQ ID NO: 213758 - protein, 125 aa, Glycine max
  Clone ID: PAT_MRT3847_35049C.1.pep
MMGYPSRLYLVLLLSICGVVSLASPIEDQKRDRITQLPGQPKNVGFAQYSGYVTVNEQRGRSLFYWLGEAPVKRGPKSRPLVLWLNGGPGCSSIAYGASEEIGPFHIKPDGKSLYLNPYAWNNLA

SEQ ID NO: 213759 - protein, 107 aa, Glycine max
  Clone ID: PAT_MRT3847_3504C.1.pep
MYKNRLQELAQRSCFNLPAYSCIREGPDHAPRFKATVNFNGETFESPTFCSTLRQAEHAAAGVALNTLAKRGPSGALAARVLDETGVYKNLLQETAHRAGLNLPVYT

SEQ ID NO: 213760 - protein, 42 aa, Glycine max
  Clone ID: PAT_MRT3847_35050C.1.pep
GPLPYLDYLILKPTLFFAPFAADSAFALYSRKGRWLTCTYEC

SEQ ID NO: 213761 - protein, 45 aa, Glycine max
  Clone ID: PAT_MRT3847_35051C.1.pep
LTIWLLYSWFYLIISQFFSNLFGFSFFLGPDPKDKNFGSVIYLQF

SEQ ID NO: 213762 - protein, 47 aa, Glycine max
  Clone ID: PAT_MRT3847_35052C.1.pep
ADSAFTRPKGAKTRGKQNDVIPNGHDRKHWQNKEKTWTKQPARRKRR

SEQ ID NO: 213763 - protein, 79 aa, Glycine max
  unsure (1)..(79): unsure at all Xaa locations
  Clone ID: PAT_MRT3847_35053C.1.pep
ISDXIPSTFNXLNKQTSIFSSFLFFSYHILRNIIMHMSSNFPQSILLHINLFTSYIHISVFQLIFFYFTGKNFGYSSFF

SEQ ID NO: 213764 - protein, 79 aa, Glycine max
  Clone ID: PAT_MRT3847_35054C.1.pep
GTCLKKNKETSQNIWGFYKHHPQITFFFAGGVFTNRSRDVAWGFDQKLMHVADLSRVKRETMGCPSIFLVPFGPIQSTN

SEQ ID NO: 213765 - protein, 64 aa, Glycine max
  Clone ID: PAT_MRT3847_35055C.1.pep
MAGDGAATCIDILLAIILPPLGVFLKYGCQVDNKQMSWAFLSFNSDISVSLIYRQCCHILMFCF

SEQ ID NO: 213766 - protein, 57 aa, Glycine max
  Clone ID: PAT_MRT3847_35056C.1.pep
MAGDGAATCIDILLAIILPPLGVFLKYGCQVEFWICLVLTLFGYIPGIIYAVYAITK

SEQ ID NO: 213767 - protein, 63 aa, Glycine max
  Clone ID: PAT_MRT3847_35057C.1.pep
FGAFVGGNINLLRGIVYVIAQILGSIVDSLLHDFETVILCSAFGLSAGNGLGNAKELETVIFF

SEQ ID NO: 213768 - protein, 50 aa, Glycine max
  Clone ID: PAT_MRT3847_35058C.1.pep
PVGVPVFELSQVLCSVPNSYGISKVLYRVACLSYTMLSANTFYRDMYSYH

SEQ ID NO: 213769 - protein, 76 aa, Glycine max
  Clone ID: PAT_MRT3847_35059C.1.pep
ETTISIYPGFHSPRFLYKFTFKHYFLVWKTTNRACDTIIAIKIFTSSEQGKHAEHIILVGPVIDTVTHEKKTNETK

SEQ ID NO: 213770 - protein, 80 aa, Glycine max
  Clone ID: PAT_MRT3847_3505C.1.pep
YADLVEELSRADGKIVKITSSMEMGLTTTVLVRGSNQLVLDDAERSMHDAMCVVRCLVAKRNIIAGGGAPEIELSRQLGA

SEQ ID NO: 213771 - protein, 75 aa, Glycine max
  unsure (1)..(75): unsure at all Xaa locations
  Clone ID: PAT_MRT3847_35060C.1.pep
SGGVSGVSXSCSDGFERRLKFDSVDVALPRLRRITFSSSLDEXVAYGSIKDMEMTLGEQKVLSLDFMCFFMTVWC

SEQ ID NO: 213772 - protein, 45 aa, Glycine max
  Clone ID: PAT_MRT3847_35061C.1.pep
FIFIRSRVYYKALFRKYIFRARVPLSPLPLKTLLFLAPLSADNIH

SEQ ID NO: 213773 - protein, 77 aa, Glycine max
  unsure (1)..(77): unsure at all Xaa locations
  Clone ID: PAT_MRT3847_35062C.1.pep
EPICLGKPVIVNLNWGMEYKGXLVSVDSYMNLQLANTEEYIEGQFTGNLGEILIRCNNVLYLPGVPEHEEIEDVAED

SEQ ID NO: 213774 - protein, 54 aa, Glycine max
  Clone ID: PAT_MRT3847_35063C.1.pep
VTFFFWVGKTKTRVTSYILKEYGKMFESITLAPPETIYQPNFANDSTLPHSRQN

SEQ ID NO: 213775 - protein, 88 aa, Glycine max
  Clone ID: PAT_MRT3847_35064C.1.pep
MATIPVNPKPFLNNLTGKPVIVKLKWGMEYKGYLVSVDSYMNLQLANTEEYIEGQFTGNLGEILIRCNNVLYLRGVPEDEEIEDVAED

SEQ ID NO: 213776 - protein, 62 aa, Glycine max
  Clone ID: PAT_MRT3847_35065C.1.pep
ILMVILIYYFMYFYSIVSMILRKSHKIKIKKKKKKKKKKKKNNNKKIVIKIYHVKKPKIKSK

SEQ ID NO: 213777 - protein, 68 aa, Glycine max
  Clone ID: PAT_MRT3847_35066C.1.pep
QLLIHVNFLLWHPFFGDPLSAVSDFRSFRVSGGIFAFALWLFPASFNIALPLLRRSHSKKENVWADAW

SEQ ID NO: 213778 - protein, 88 aa, Glycine max
  Clone ID: PAT_MRT3847_35067C.1.pep
MATIPVNPKPFLNNLTGKPVIVKLKWGMEYKGYLVSVDSYMNLQLANTEEYIEGQFTGNLGEILIRCNNVLYLRGVPEDEEIEDAAED

SEQ ID NO: 213779 - protein, 268 aa, Glycine max
  unsure (1)..(268): unsure at all Xaa locations
  Clone ID: PAT_MRT3847_35068C.1.pep
MLRTRLLLQGKSLPSTPVNVACCCIMIVAVDLNASPVPEDDQDDFGDQAHVEEYHTPEERVESPVDIARREREERKRKLKRERSDDKPVQVSQSPGHDQLFHTKILKSYDRSKLPPGWLDCPSFGQEIYCMIPSKVPLGESFNDYIIPGKRYSFKQVIHQQRVLGRKLGLVIDLTNTSRYYPVADLKKEGIKHVKIQCKGRNSVPDNLSVNHFVYEVTQFLFRQKHSRKYILVHCTHGHNRTGYMIIHYLMRTMSMSVTXAIKIFSDV

SEQ ID NO: 213780 - protein, 66 aa, Glycine max
  Clone ID: PAT_MRT3847_35069C.1.pep
NLHLSPRDYEDHGRQLTWGVDIFNILITRCRLLPHGWLHVSESVIHALELMLLTQQTVAPSHRHLR

SEQ ID NO: 213781 - protein, 196 aa, Glycine max
  unsure (1)..(196): unsure at all Xaa locations
  Clone ID: PAT_MRT3847_3506C.1.pep
MEAAAVDPYTTNPGPIDGSVLYDQDKHVSAAVWDGQERGALRCHEHTSKLDQWTLTHKQVELVDKAGFGYLRSIPAISLDNPLISALVERWRRETNTFHLNVGEMTVTLKDVALLLGLGIDGEPVIGITYTACSSVCEKYLGRSPESGYTSGGMVKLSWLKEFFSRCPEDAPLEVIEQHTRAYLLYLVXSTIFSTT

SEQ ID NO: 213782 - protein, 133 aa, Glycine max
  unsure (1)..(133): unsure at all Xaa locations
  Clone ID: PAT_MRT3847_35070C.1.pep
RIDSKRATAVSLMKVGKRSRLKMSCVKPCAEDSLTKSELNFDVLKEAKMFYFNTHSLLDRNMRSTTLQAIKISKHFGGVIFYDLNLPIPLWHSSEETMMFIQQACNLXDIIEVTKQDLEFLCGIKPSEEFDHQ

SEQ ID NO: 213783 - protein, 100 aa, Glycine max
  Clone ID: PAT_MRT3847_35071C.1.pep
IISIRENLNPTFSFSFNFFNIVTYTIICLFLLIPIFNFPNITLIWKLRLLLNSLARSMQLPCIMVLNYLIFRESGRKTNARIVIFIKPLWLTNIVLIGKC

SEQ ID NO: 213784 - protein, 63 aa, Glycine max
  Clone ID: PAT_MRT3847_35072C.1.pep
MAPKGLSFLAVLICVPALSLSPSDAAEGQNNGLVMNFYNELCPYADDIITYHVKLTYMRHKNT

SEQ ID NO: 213785 - protein, 60 aa, Glycine max
  unsure (1)..(60): unsure at all Xaa locations
  Clone ID: PAT_MRT3847_35073C.1.pep
VFGPIAPGFVFMYAKGALVHWXVGEGMQEGVFSGAGGVFAALERVFEEVGVESGEGQDED

SEQ ID NO: 213786 - protein, 97 aa, Glycine max
  unsure (1)..(97): unsure at all Xaa locations
  Clone ID: PAT_MRT3847_35074C.1.pep
TLPGKESFFFPAPVDHGGKMXTAAMAQGSTPPDHXNLIFKSYMTLWKDLNFSYNKFIRPPVSRLEAFGKEFSSKGLAIGAIYRAVFDGLFWVTWEDF

SEQ ID NO: 213787 - protein, 79 aa, Glycine max
  unsure (1)..(79): unsure at all Xaa locations
  Clone ID: PAT_MRT3847_35075C.1.pep
MVPVNGQKRVKSLVQKVSKNKKLSNRHSLAAAGTSWTSGLRRSTRIRTRPLEYWKGERLVYGXVHKSLATVIGVKCISP

SEQ ID NO: 213788 - protein, 273 aa, Glycine max
  Clone ID: PAT_MRT3847_35076C.1.pep
MTSEGDASIPKGNLERSNLARENKDSVDDSDNCCAPPVLSSETIEVPDTQFFDFDAGRALEKFQIGQIWAFYSDEDGLPKYYGQIKKIATSPDLELHVYWLTCCWLPENTIKWEDKDILISCGRFKVNETHDFLSVYSTTSCVSHQVHADAVGKNKNYAIFPRKGDVWALYRKWTNKMKCFEMENCEYDIVEVVEETDLFINVLVLEFVSGYTSVFRGKSNEGSSVNLRIPRKELLRFSHQIPAFKLTEEHGNLKGFWELDPGALPMHYYGLK

SEQ ID NO: 213789 - protein, 60 aa, Glycine max
  Clone ID: PAT_MRT3847_35077C.1.pep
SHRTHHQHHGHAENDESWHPLPEKLFRSLDTVTRMLRFTAPFPLLAFPVYLVSYSALTII

SEQ ID NO: 213790 - protein, 96 aa, Glycine max
  unsure (1)..(96): unsure at all Xaa locations
  Clone ID: PAT_MRT3847_35078C.1.pep
DVLKITNNFNTIVGKGGFGTVYLGYIDDTPVAVKMLSPSTIQGYQQFQAEVKLLMRVHHKNLTSLVGYCNEGTNKALIYEYMANGNLQEHLSGXRS

SEQ ID NO: 213791 - protein, 134 aa, Glycine max
  Clone ID: PAT_MRT3847_35079C.1.pep
HASLTCSTYPSPTSNLMQKVSFLLSQMLSITMEEEEEQEPKLIHGSKAMRMHTPTPNPNPSQTIMRLASLAISFNVRLKSSHMPLHMQEHALRHTRSPLAIHHSHSPKPSKGVLAKVCKKEALRDREEFRVVCE

SEQ ID NO: 213792 - protein, 70 aa, Glycine max
  Clone ID: PAT_MRT3847_3507C.1.pep
PPITCAKTRVRAKEKKSRASHFAQFKTQFKFSAANRAGSFEGVRKLEYLKVLAISVRSINSDFVLGFSRD

SEQ ID NO: 213793 - protein, 55 aa, Glycine max
  Clone ID: PAT_MRT3847_35080C.1.pep
LPIARRPCELSAFIAVPVKLRLIVRSPSYSPPCFVASLAFLMGPGEGRASFIFLR

SEQ ID NO: 213794 - protein, 94 aa, Glycine max
  Clone ID: PAT_MRT3847_35081C.1.pep
YLSSTSEAAEEKFSLLRENETLLNANKRLNQEKENLLKNKDMADAQIVTLTKSLDAMQKDLKDKENLVQVLKQSLEHQRKELNDCRAEITSLKV

SEQ ID NO: 213795 - protein, 81 aa, Glycine max
  Clone ID: PAT_MRT3847_35082C.1.pep
RTSARSWFQHAARCGLRYQASRRAISPHEGHQWNVPLEGRSPYCWIANGSCAHASLLARLLSCKRSAIILRTVASRNWLFN

SEQ ID NO: 213796 - protein, 68 aa, Glycine max
  Clone ID: PAT_MRT3847_35083C.1.pep
LCTVRVCVKHSAILYPSSISILAQRTKGKGSASITLAPQMVIGVTPRQETTKRGAANAFTPVIVFARP

SEQ ID NO: 213797 - protein, 51 aa, Glycine max
  Clone ID: PAT_MRT3847_35084C.1.pep
SACQNQKIIHSAKIEKTIKFNQMFDANENAMTKNVNSQLCIEQGNVRKLST

SEQ ID NO: 213798 - protein, 72 aa, Glycine max
  Clone ID: PAT_MRT3847_35085C.1.pep
RKKGIGSFQKPQNRGLTRNFHPPKAQKESRRFPRGKMGKGPPPKFCRGKKNPPDFCHLKGPNPWGNLIAGNN

SEQ ID NO: 213799 - protein, 161 aa, Glycine max
  Clone ID: PAT_MRT3847_35086C.1.pep
DFQNLNMALGFEGYSYTTTLGRKRVVLLHSEASSLNSNSPVNSLKRMCSKKFTFDSERSRLEALPLDVLIRVLCGVDHEDLKQLVRVSKTVREAAEVARRMHFEYSTPKKKNFAIPKPFDIEGAGGFEEIDTPKAPSKKAKSKLIGKNLASISVALFASPN

SEQ ID NO: 213800 - protein, 144 aa, Glycine max
  Clone ID: PAT_MRT3847_35087C.1.pep
QIQLPSSREQFHISKAIKKTKGTTATKKTKAPQQQPRTTTNQPTTHGENRKKKHCRTKEDEQAPSPENRGRRSTREKRKKKALPFQKLKAFNCALESLPRLSLFNTDSSTLQRALSKSLLLLSPYHTHTSAVFNPWPHRREPTV

SEQ ID NO: 213801 - protein, 131 aa, Glycine max
  Clone ID: PAT_MRT3847_35088C.1.pep
MTMDIESGWDGSDLTEKEKEKKCELDIQWLTVDIIIMKMKTKSLRVILMIFVSIEVMHCEGCWKEERDALLGLNLRFDSDTDCCQWERIKCNSSTGRVARLNLYHLLLDGYLINYSDFFAFKDLKSLNWDS

SEQ ID NO: 213802 - protein, 155 aa, Glycine max
  Clone ID: PAT_MRT3847_35089C.1.pep
MTLGFEGYSYTTTLGRKRVVLLHNEASSLNSNSAVNPLKRMCSGKFTFDSERSRLEALPLDVLIRVLCGVDHEDLEQLVRVSKTVREAAEIARRMHFEYSTPKKKTFALPKPFDIEGAGGFEEIDTPNAPLRKPKSKLIGKNLASISVALFASAN

SEQ ID NO: 213803 - protein, 48 aa, Glycine max
  unsure (1)..(48): unsure at all Xaa locations
  Clone ID: PAT_MRT3847_3508C.1.pep
FLIRKGKNDPWGHYQANGACFKNNDLKAXQYHFEHDIEIQGINGQLEN

SEQ ID NO: 213804 - protein, 836 aa, Glycine max
  unsure (1)..(836): unsure at all Xaa locations
  Clone ID: PAT_MRT3847_35090C.1.pep
VLGNKGIRSRRAENELNRGGDRKVKGTLESFWKNILSLNSVTDTNADAHGKGKVGKDTFLEGINTSLPTLGAGESAFNIHFEWDGSMGIPGAFYIKNYMQVEFFLKSLTLEAISNQGTIRFVCNSWVYNTKLYKSVRIFFANHTYVPSETPAPLVXSYREEELKSLRGNGTGERKEYDRIYDYDVYNDLGNPDKSEKLARPVLGGSSTFPYPRRGRTGRGPTVTDPNTEKQGEVFYVPRDENLGHLKSKDALEIGTKSLSQIVQPAFESAFDLKSTPIEFHSFQDVHDLYEGGIKLPRDVISTIIPLPVIKELYRTDGQHILKFPQPHVVQVSKSAWMTDEEFAREMIAGVNPCVIRGLQEFPPKSNLDPAIYGDQSSKITADSLDLDGYTMDEALGSRRLFMLDYHDIFMPYVRQINQLNSAKTYATRTILFLREDGTLKPVAIELSLPHSAGDLSAAVSQVVLPAKEGVESTIWLLAKAYVIVNDSCYHQLMSHWLNTHAAMEPFVIATHRHLSVLHPIYKLLTPHYRNNMNINALARQSLINANGIIETTFLPSKYSVEMSSAVYKNWVFTDQALPADLIKRGVAIKDPSTPHGVRLLIEDYPYAADGLEIWAAIKTWVQEYVPLYYARDDDVKNDSELQHWWKEAVEKGHGDLKDKPWWPKLQTLEDLVEVCLIIIWIASALHAAVNFGQYPYGGLIMNRPTASRRLLPEKGTPEYEEMINNHEKAYLRTITSKLPTLISLSVIEILSTHASDEVYLGQRDNPHWTSDSKALQAFQKFGNKLKEIEEKLVRRNNDPSLQGNRLGPVQLPYTLLYPSSEEGLTFRGIPNSISI

SEQ ID NO: 213805 - protein, 205 aa, Glycine max
  Clone ID: PAT_MRT3847_35091C.1.pep
TNQNQHALPFCHTEAIAVGIVPEGKKHKRVSKEVLSIGIVCGTFGGVAIVALLFFIIRRESVKSKIKNPPTKLISENAASGYTSKLISDARYISQTMKFGTVGLPPYRVFSLEEIVAATNNFDSASFMGEGSQGKMHRGQLKDGLLVAIRSVKMNRSYSTQDFMHNIEQISKYRHRHLVSVLGHCFECYLDDSSVSSIFVVFEYV

SEQ ID NO: 213806 - protein, 145 aa, Glycine max
  Clone ID: PAT_MRT3847_35092C.1.pep
FLINKFFIRTSIRMISKFLLRTWSMGIFVFITLRHHFLLHFHLFSTHEFLALTIPPYFCFSALFKNHSYIPNLSAILLPLGQFFVDFAKINCIFLDSIVIFLLYFAFYRSVPFFMIRNHCLNKKRSSSWLPKHPSPVQSSLGTIP

SEQ ID NO: 213807 - protein, 65 aa, Glycine max
  Clone ID: PAT_MRT3847_35093C.1.pep
RRATTLENHFGLFAPAKGTPHSKEIPQTPVLPRLLRIKVGAQFYVEVAMIAKSRREERYVLYIIR

SEQ ID NO: 213808 - protein, 104 aa, Glycine max
  Clone ID: PAT_MRT3847_35094C.1.pep
LVVCRSVKFFKILDPNLQPGWCLQIKIRRSCPGELDDVVKQLEAATGSVAVGQIGRTLIIYRPSLSKMKAEEKKKQNRNLILKKQVKPRLVNKKVTVVVPLCCA

SEQ ID NO: 213809 - protein, 37 aa, Glycine max
  Clone ID: PAT_MRT3847_35095C.1.pep
SAMLKSGAIFGCKVGAARMDLGLNSEETLRLMSQRKR

SEQ ID NO: 213810 - protein, 64 aa, Glycine max
  Clone ID: PAT_MRT3847_35096C.1.pep
KNVFCDAVDKDRAAMLVVGSHGYGAIKRAVLGRVRDFWALHAPCPVMFVKKPKINPCFVMGGFF

SEQ ID NO: 213811 - protein, 90 aa, Glycine max
  unsure (1)..(90): unsure at all Xaa locations
  Clone ID: PAT_MRT3847_35097C.1.pep
PCFRQKALTSYLSDLDEQIDVIPKSDAMXGESAKEFAPLFTRILHYLTNDDVVEEDSIWSXEAELKDADEADKAIVQQAQEIIHRPKEAP

SEQ ID NO: 213812 - protein, 188 aa, Glycine max
  Clone ID: PAT_MRT3847_35098C.1.pep
TRPAKQSHLDVQRIAIRCLGLFGLLERKPSAELLKQLRISYIKGPHSISIEACKALIDLVMWYGPQEVDKMLNLSIPCQLNSEKTTFSPLNFSDSEEELDVGTLDILYGGFENDDWASPLPSNEDECVHAILGEGFAKILLLSDNYPSIPASLHPVILSKLIYLYFTDVSGHLHRLKQCLSVFFELYP

SEQ ID NO: 213813 - protein, 70 aa, Glycine max
  Clone ID: PAT_MRT3847_35099C.1.pep
PRVRLPSKKKKKKKKKKKKKKEKKKKKIKKKKKKKKKGGAVQKEQIPSLEGGERKNFFIGEKKANTGGGG

SEQ ID NO: 213814 - protein, 70 aa, Glycine max
  Clone ID: PAT_MRT3847_3509C.1.pep
VPSQAGTKKDTWARGRQALPPCGMIYPPIYERNLYDHSMLRSPTRRGTNMDFFCTGATCSGTIIAAGSSV

SEQ ID NO: 213815 - protein, 187 aa, Glycine max
  Clone ID: PAT_MRT3847_350C.1.pep
MAMLLLIPLFLSSILLSPISSATTFSPQPGICYGQLGDNLPPPRESVSLITSVHAKRVKLYDANPSILHALQDTRLQVSIMVPNDLILNISTNQTLSDQWVSDNVVPYHPRTLIRYLLVGNEVTSTTAATATWPHLVPAMRRIKRSLKSHGIRKIKVGTSSAMDVLQTSFPPSNGAFRKDLTAPVMK

SEQ ID NO: 213816 - protein, 71 aa, Glycine max
  unsure (1)..(71): unsure at all Xaa locations
  Clone ID: PAT_MRT3847_35100C.1.pep
LTHKLINPXLFSLNSPPTQNTDKFIINFNFLYSFPIINSNSLFLFIIIICLQKILLLQFHHNLILIPFYYL

SEQ ID NO: 213817 - protein, 93 aa, Glycine max
  Clone ID: PAT_MRT3847_35101C.1.pep
FPLFMLPNTITQVVNANVSLKRLEDLLLAEERVLLPNPPIEPGLPAISIKNGYFSWDAKAERASLSNINLDIPVGCLVAVVGSTGEGKTSLVS

SEQ ID NO: 213818 - protein, 72 aa, Glycine max
  Clone ID: PAT_MRT3847_35102C.1.pep
ASFLSLDADANHRRAPTVRRRASQGHTAPLGLSVSEIIKICACSTGCRRALFLFLSFSFSFLKLSQQVLFIG

SEQ ID NO: 213819 - protein, 46 aa, Glycine max
  Clone ID: PAT_MRT3847_35103C.1.pep
CDNDDHPLLLSFIQPQVTKKSNSHNRCCYFILGMYLRPISHNNVKL

SEQ ID NO: 213820 - protein, 631 aa, Glycine max
  unsure (1)..(631): unsure at all Xaa locations
  Clone ID: PAT_MRT3847_35104C.1.pep
MDSSEIKSPAEGSQQGTPGNSLRRKKLAIYFIESEDRRMAFGRGYTAGSTPVDIHGKSIVDLSKTGGWIAAFFIFGNEIAERMAYFGFXFNMVSSRFYVMHRPFTSSSNAVNNFLGISQASSVLGGFLADAYLGRYWTIAIFTTIYLAGLTGITLCATISKFVPNQEECDQFSLLLGNCEAAKPWQMTYLYTALYITAFGAAGIRPCVSSFGADQFDERSKNYKAHLDRFFNIFYLSVTIGAIVAFTVVVYVQMKFGWGSAFGSLAIAMGISNMVFFIGTPLYRHRLPGGSPLTRVAQVLVAAFRKRNASFGSSEFIGLYEVPGRQSAIKGSRKISHTDDFRFLDKAALQLKEDGANPSPWRLCTVTQVEEVKILMKLIPIPACTIMLNVVLTEFLTLSVQQAYTLNTHLGRLKLPVTCMPVFPGLSVFLILSLYYSIFVPVFRRITGHPHGASQLQRVGIGLAVSILSVAWAAIFERYRRNYAIKHGYLASFLTAMPNLSAYWLLIQYCLIGVAEVFCIVGLLEFLYEEAPDAMKSIGSAYAALAGGLGCFVATIINNIIKSATGNLDKGQPSWLSQNINTGRFDYFYWLLTALSIINFAIFVYSAHRYKYREHQVHEMEKHEMTYVGSS

SEQ ID NO: 213821 - protein, 101 aa, Glycine max
  Clone ID: PAT_MRT3847_35105C.1.pep
NRVLSKIHQYQVALDKDHKTGGRYLTHEKIKVPFIITTVRLDHAICAVVQHVLRANRNFPYYNPSDRSIVATCAEWCGPFTFCRGRNFELYNALYSAQCIS

SEQ ID NO: 213822 - protein, 65 aa, Glycine max
  Clone ID: PAT_MRT3847_35106C.1.pep
LCVQRVSKTKPQKFEITLSVSRILLRLPLHHFVTPQPHHQPTRRDLNHRTFSNPPRSNKGESDGG

SEQ ID NO: 213823 - protein, 85 aa, Glycine max
  Clone ID: PAT_MRT3847_35107C.1.pep
MGDEKGEKKETSPSASASAGNDKKNEKKKKGFISRIWNAIFRSNRDDFEKRLQYISKEENAVVTRMSNRSRSWRRTSRQLILFSG

SEQ ID NO: 213824 - protein, 92 aa, Glycine max
  unsure (1)..(92): unsure at all Xaa locations
  Clone ID: PAT_MRT3847_35108C.1.pep
PVESFRRVIKRFIDFVXLNIAFVQKKRXQVPLSRNDHPSVESFLXVEKRNGDHSVTQYCKSMTNKASSMESISYRKSPCKGMKNMLHPIGHI

SEQ ID NO: 213825 - protein, 79 aa, Glycine max
  Clone ID: PAT_MRT3847_35109C.1.pep
ARESLMLVSTFSWVNLPLWAATSGELFGPTTKNGVNKPKTATLSSLIQPHTKYKPPYVQMTPDLSFGQCRWSYYAASCT

SEQ ID NO: 213826 - protein, 90 aa, Glycine max
  Clone ID: PAT_MRT3847_3510C.1.pep
GLIFLLDPPKLFQNLKVNSNDLHVGRTDVSSALGFTFTIFSRGDLALCFLASTYIFLKFPQTWASFVQNPLYTARDIRICVPRHMTSSTP

SEQ ID NO: 213827 - protein, 465 aa, Glycine max
  unsure (1)..(465): unsure at all Xaa locations
  Clone ID: PAT_MRT3847_35110C.1.pep
MPIIEYISPSSNQATHHRVFVDLPIHNLGTIIMEINGEGASPHSINSIKFKVPEKQPYRTXHHIQPPQKWMNDPNAPMYYKGVYHFFYQHNPYAPTFGEKMVWAHSVSYDLINWIHLNHAIEPSDSYDINSCWSGSATILPGEEEQPVILYTGIDNNKYQVQNMAMPKDLSDPFLREWVKHPQNPAMTPPSGVEVNNFRDPSTAWQGKDGKWRVVIGAQNGDEGKTILYQSEDFVNWRVELNPFFATDNTGVCECPDFFPVSINSTNGVDASVQSQSVRHVLKISYLRRHQDYYFLGKYVYDEGNFVPDVKFTGTSSDLRLDYGKFYASKSFFDHAKNRXRDILGVGVNECDTRQXDIEKGWXAGLQCIPRAXWLDESGXRQLXQSPIEEIEKLRDKQISILEGETGWGDQLLEVSGITGSQADVEVLFELPELENVEWLDGSEVDPTCWVVKSCTRSGHRAFGW

SEQ ID NO: 213828 - protein, 134 aa, Glycine max
  Clone ID: PAT_MRT3847_35111C.1.pep
FGIVSPITVTGSTNTSGTARRTSLRLVRMSPGSQKFNTPPKKGEGGFPAPMSMEESVQAFEHLGIYPQIEQWHDQLWQWFSLLLLNPLLNKIETSHIKVSFILHFFSYVQSKVKQTRKILTLEVNICDGNNNFQ

SEQ ID NO: 213829 - protein, 114 aa, Glycine max
  Clone ID: PAT_MRT3847_35112C.1.pep
MPSNRLTYRRRAPYNTKSQKVRVIKTPGGELRYLPIKKKGTAPKCGDCGSKLQGVPALRPREYAQVSRPKKTVQRAYGGSRCAGCVQDRIVRAFLIEEQKVVKKVLQESQQKKR

SEQ ID NO: 213830 - protein, 93 aa, Glycine max
  unsure (1)..(93): unsure at all Xaa locations
  Clone ID: PAT_MRT3847_35113C.1.pep
QESRLLFICGFMAPEYXMFGQFSEKSDVYSFGVMVLEIISGKKNISSYEPRRVVDDGLLKFFWRHWRDETPFNTLDAKLKERYSEIEVIKCIQ

SEQ ID NO: 213831 - protein, 316 aa, Glycine max
  Clone ID: PAT_MRT3847_35114C.1.pep
MDFDLENPLGNFHDLPCDAVPSLFLIESDHIPPPNYCQSLKASDFDISVRRDVVSLISQLSCTFDPVLPYLAINYLDRFLANQGILQPKPWANKLLAVSCFSLAAKMLKTEYSATDVQVLMNHGDGGAIFETQTIQRMEGIVLGALQWRMRSITPFSFIPFFVNLFRLKDPALRQVLKDRASEIILKSQREIKVLEFKPSTVAASALLYASHELFPFQYPCFLRAISDCSYINKETVVQCYNVIQDIAREEYESVLNINSTSDTPVNVLDEHFLSLESEKTNGTNVVVTQEQDFKRRKTTDYGNNRRVPFSHFHQC

SEQ ID NO: 213832 - protein, 44 aa, Glycine max
  Clone ID: PAT_MRT3847_35115C.1.pep
VSVRFFSGEEYETVLTMMRRLSGYINRWYYLLCSGKEWELEEMK

SEQ ID NO: 213833 - protein, 45 aa, Glycine max
  unsure (1)..(45): unsure at all Xaa locations
  Clone ID: PAT_MRT3847_35117C.1.pep
HXEVERRIXSQLLTLMDXXKSRAHVIVIGATNRPNSINPNFKFQV

SEQ ID NO: 213834 - protein, 94 aa, Glycine max
  Clone ID: PAT_MRT3847_35118C.1.pep
VVAHSTYAFNAYYQKMDKSPGSCDFKGVATVTTTDPSHGSCIFPGSHGRKGTRTNGTSLAPSNSTSSGCLSQYHDNGGFFTSSLILVLLLCAVV

SEQ ID NO: 213835 - protein, 539 aa, Glycine max
  unsure (1)..(539): unsure at all Xaa locations
  Clone ID: PAT_MRT3847_35119C.1.pep
MAEEAPNQTTTPPPPQESVAQVEEVVVTDVPQPPEKTTTTVPVEETVTLETHLSKPNNADDNDNIIPEFKEESTKLSELPENENKALQDLKKLVQDALNNHHFSSKEDNKNPPPQTAAHKEEVVTETKTDAAPAKTEEEQAETKEEEEKKEEVKETNEEAAVDDDGAKTVEAIEETVVAVSSTVQPQAEEKASSPLPPEEVSIWGIPLLADDRSHVILLKFLRCGVFRXKEAFTMLKNKIQWRKKYGLEELMEEMIRDELDKGVFMHGFDKEGHPVCYNIYGEFQNKELYKKTFSDEEKREKFLRWRIQFLEKSIRKLDFNPGGICTIVHVNDLKNSPGLAKWELRQATKHALQLLQDNYPEFVAKQVFINVPWWYLAVNRMISPFLTQRTKSKFVFAGPSKSTETLLRYIAPEQLPVKYGGLSKDGEFGIIDAVTEITVRPAAKHSVEFSVTENCLLSWELRVIGWEVTYGAEFVPSSEGSYTVIVQKARKVASSEEPVLCNSFKVGEPGKVVLTIDNTSSKKKKLLYRLKTKPSPSD

SEQ ID NO: 213836 - protein, 65 aa, Glycine max
  Clone ID: PAT_MRT3847_3511C.1.pep
HALLPNLRNSVRGRLIHRVLEHSIDPTTHQKDLDEILCALSTHTHDQYRNNDDDDGLKHVRSHRA

SEQ ID NO: 213837 - protein, 38 aa, Glycine max
  unsure (1)..(38): unsure at all Xaa locations
  Clone ID: PAT_MRT3847_35120C.1.pep
RPGLVSCHIILSTPKVVTLKDNLWIHALRLVXEYLSVP

SEQ ID NO: 213838 - protein, 199 aa, Glycine max
  unsure (1)..(199): unsure at all Xaa locations
  Clone ID: PAT_MRT3847_35121C.1.pep
MFPLFRFYEYFHLLQXVLMTSGWGCAYRXLLQTIISWFRLQNYTSIEVPSHREIQQTLVEIGDKDPFFVGSRDWIGAIELSFVLDKLLGVTCKVINVRSGAELPEKCRELAMHFENQSTPVMIGGGVLAYTLLGVDYNEASGDCAFLILDPPYTGSDDLKKIVNGGWCGWKKAVDSKGKNFFLHDKFYNLLLPQRPNMV

SEQ ID NO: 213839 - protein, 98 aa, Glycine max
  Clone ID: PAT_MRT3847_35122C.1.pep
CYLFIFVCIGDVQNCLLSWELRVIGWEVTYGAEFVPSSEGSYTVIVQKARKVASSEEPVLCNSFKVGEPGKVVLTIDNTSSKKKKLLYRLKTKPSPSD

SEQ ID NO: 213840 - protein, 414 aa, Glycine max
  Clone ID: PAT_MRT3847_35123C.1.pep
MAEETPNQTTTPPPPQESVVQVEEVVVTDVPQPDKTTTTVPVERDSQPQPYEPEKKKPVEETVTLETHLSKPNNADHTNNIPEFIEESTKLSDLPENENKALQELKKLVQDALNNHHFSSKHDNKNPPPQTAAHKEEHVVTETKTDAAPAKTEEEQAETKEEEEKKEEVKETNEEAAVDDDGAKTVEAIEETVGAVSSTVQPQAEEKASEPEATKEESSPPLPPEEASIWGIPLLADERSDVILLKFLRAREFKVKEAFTMLKNTIQWRKEFGMEELMEEKLGDELEKVVFMHGFDKEGHPVCYNIYGEFQNKELYKKTFSDEEKREKFLRWRIQFLEKSIRKLDFNPGGICTIVHVNDLKNSPGLAKWELRQATKHALQLLQDNYPEFVAKQVLSHTPSNSLFLMINCWNFKY

SEQ ID NO: 213841 - protein, 47 aa, Glycine max
  Clone ID: PAT_MRT3847_35124C.1.pep
TIANARSTIKSAHKVGAHLTRPLQCRSSVAACPMVAKSILKDHCYHI

SEQ ID NO: 213842 - protein, 55 aa, Glycine max
  Clone ID: PAT_MRT3847_35125C.1.pep
NADIINMDIYVLKSLFDHASNISDILHKLGVCQRRNLWLAIFVKDNIEFCDAYRF

SEQ ID NO: 213843 - protein, 86 aa, Glycine max
  Clone ID: PAT_MRT3847_35126C.1.pep
PEQNPPLKRDNQPATGRGGMLYIFKPPEYIPKFKIPYRGGQTPPPPFPPKTQPQKGGHPGPGDTLTQERSWCSQPKGTPFGPCLPR

SEQ ID NO: 213844 - protein, 72 aa, Glycine max
  unsure (1)..(72): unsure at all Xaa locations
  Clone ID: PAT_MRT3847_35127C.1.pep
LVLLLLLFCVCVCFFSQLKVSCCGGNCGCXSSCKCFIGCXGCLMYPDLCYTDLTITETFVMXVSPVKAHFEG

SEQ ID NO: 213845 - protein, 88 aa, Glycine max
  unsure (1)..(88): unsure at all Xaa locations
  Clone ID: PAT_MRT3847_35128C.1.pep
RPPTMRQSWPLEKKXXLALAXPIRWGQKNLDRTRHLLQQSTLLLSPSIHHKTTTMNNPIPSNHTLLNLISTFPNSLPTTQFSFRFPRE

SEQ ID NO: 213846 - protein, 154 aa, Glycine max
  unsure (1)..(154): unsure at all Xaa locations
  Clone ID: PAT_MRT3847_35129C.1.pep
CCYKTTTEGGIRRSNRNQACPPLIIKTELCRFAGAIIYPXGNVSYHAHGDSYDSLXITSXCERYFNTRLMPSNLTCTTLYSKKHIKDIAQEAVQKGRRADKYLYXKRFFQFFWVKKMGVWGPPQCGSYPKKKYDKPEVRDANREAVLFEIKERN

SEQ ID NO: 213847 - protein, 29 aa, Glycine max
  Clone ID: PAT_MRT3847_3512C.1.pep
LTWHWSMHQLSAPAWQWHHLNILEIDNFS

SEQ ID NO: 213848 - protein, 87 aa, Glycine max
  Clone ID: PAT_MRT3847_35130C.1.pep
ILLIESLAYLSALVVAIVVAIAVETESFFVLYDLRLPLFDFDDDFRLLLPFREDFLSLRGLLLLLGRLSRPFNIRLCSGAGGSGPCG

SEQ ID NO: 213849 - protein, 122 aa, Glycine max
  unsure (1)..(122): unsure at all Xaa locations
  Clone ID: PAT_MRT3847_35131C.1.pep
MRGFTYYTTILKFNALAVSLQKLDCENNGATHPNRLQTHTTLATXVIANITITDHPSQHMLHLNDQWDPPXPGTLLAAHRDDTHLISASHASTQPPDPQHFFPFYLPTLTDFPRAAQNRWPP

SEQ ID NO: 213850 - protein, 377 aa, Glycine max
  Clone ID: PAT_MRT3847_35132C.1.pep
ATDGFSRSNLLGQGGYGYVHTGVLPNGKIVAVKQLKSESRQGEREFHAEVDVISRVHHRHLVSLVGYCVSDSQKMLVYEYVENDTLEFHLHGKDRLPMDWSTRMKIAIGSAKGLAYLHEDCNPKIIHRDIKASNILLDESFEAKVADFGLAKFSSDTDTHVSTRVMGTFGYMAPEYAASGKLTEKSDVFSFGVVLLELITGRKPVDKTQTFIDDSMVEWARPLLSQALENGNLNGLVDPRLQTNYNLDEMIRMTTCAATCVRYSARLRPRMSQVVRALEGNISLEDLNDGIAPGHSRVFGSFESSSYDSVQYREDLKNFKKLALESQEQGISEYSGPSSEYGRHPSVSTSSDQQNTQEMEMGNKKGSNHDSGIQVLD

SEQ ID NO: 213851 - protein, 305 aa, Glycine max
  Clone ID: PAT_MRT3847_35133C.1.pep
MDHVRETSAWVASRSSHVLVDSAGIEKVVSTIDSIPKVEWDFEGIHYFDNGPLTVQYLFVLDALNFCFWPDKDLNYDDLASGLKAALQNDKSAFDADRLQKYTGPQLRELLRWPRPLPLEDERVRLLHEVGIELERNFEGKASNNVECCGKSAMNLVALVARHFPGFRDHTVYKGRQVFLYKRAQIFAADLWGAFRGHGYGEFEDIGSLTIMADYIVPAVLRQLGVLKFSPTLASTIEARGEIGPGTEEEVELRACSVHAVEKMRELISVKSGRQVLSVELDLWLWASGVQSASLQHHRTLSIYY

SEQ ID NO: 213852 - protein, 91 aa, Glycine max
  unsure (1)..(91): unsure at all Xaa locations
  Clone ID: PAT_MRT3847_35134C.1.pep
LRTVCRPHNLAYINNDXELLFXGRPTMGAPIKESKITEVKQPNIGEVKPSFVTAEVTYSLSSYRAHITPXCDALKEHDVMPLPSIRLITRA

SEQ ID NO: 213853 - protein, 103 aa, Glycine max
  Clone ID: PAT_MRT3847_35135C.1.pep
PKGIDSRLPQTMDPQYNEDHAQLVTILFQLPLDDGQTSTGHMLDLKMAHTKTALAKNTAGGTILPWDLSANFLTDGTCRASVDSQRTHRIIGRIKMAVTEGTC

SEQ ID NO: 213854 - protein, 244 aa, Glycine max
  Clone ID: PAT_MRT3847_35136C.1.pep
MNPPPTTSFPLKGECGNCSSKERRLLHRLWMRGMNRHLCTSCVLRLHPSSFCPSCFDFFDQPLSVTSSAFAHRFVSCTKCSSLTHLSCLPSPPPSPFLCPPCSQQTFSFFPDSTAPLDKRRAIILLCACKIAAASVSKSLALARTRVERTVREAALARKRARDALDHCSIVDKIKRLGLEGTFEASNSKYLGMNHNHNNVVSNKKEELNGFGGGQGKVKTEAMSLTAPVNKNGNNHAKFAESSS

SEQ ID NO: 213855 - protein, 174 aa, Glycine max
  unsure (1)..(174): unsure at all Xaa locations
  Clone ID: PAT_MRT3847_35137C.1.pep
MPLCRHHIRSAHALADPELRRTADSDDSEVLLEAVAMSGLVGFLRQLGDLAQSVRILSLSNFXSLKPLPSSLRWLRNSSCARGLLDRDXLLNLMSLVQLLEVXVPPLECGVLSQTHHSSFFTKGGIEWHPNLRSEQNLVTRGDLPRFIMDSYEECRGPSRLYLLERLMWQGAGP

SEQ ID NO: 213856 - protein, 98 aa, Glycine max
  unsure (1)..(98): unsure at all Xaa locations
  Clone ID: PAT_MRT3847_35138C.1.pep
MARDSVMKMKVLVXLIATIFLAWECHAYYMFASRMNTGYGAXRTPDVKRASWMLVLEAHNIXRFHTIPEECVEATNEYIYGEQYRSDSKRDRQQAYFY

SEQ ID NO: 213857 - protein, 47 aa, Glycine max
  Clone ID: PAT_MRT3847_35139C.1.pep
YHEREWRYISAHGRMPQATIDRIIPSQLRVPRTYCVLTPHNLSVLNW

SEQ ID NO: 213858 - protein, 78 aa, Glycine max
  Clone ID: PAT_MRT3847_3513C.1.pep
CSTHALANAAFFGSVECIASIACSNGGWYCTCTVLPFLILRNLIEPFSKRHILWWRWCFYLHIMDLKSLMFCHEYSQN

SEQ ID NO: 213859 - protein, 67 aa, Glycine max
  Clone ID: PAT_MRT3847_35140C.1.pep
KTNIPYISFFKLLSTVTILTLQFIFLNLFHNIFLYNISIITFPNSITPYLTYIFYIIYIYFYYHILL

SEQ ID NO: 213860 - protein, 36 aa, Glycine max
  Clone ID: PAT_MRT3847_35141C.1.pep
GPELMRHASDTDTDLLSMTHSVTRRAPRQTHVSADG

SEQ ID NO: 213861 - protein, 110 aa, Glycine max
  Clone ID: PAT_MRT3847_35142C.1.pep
MEKETEMKQSKFKRICVFCGSSPGNKTSYKDAAIELGRELVSRNIDLVYGGGSIGLMGLISQAVYEGGRHVTGVIPKTLMPRELTLETVGEHFIGNKLKDHTHLQGDTQN

SEQ ID NO: 213862 - protein, 378 aa, Glycine max
  unsure (1)..(378): unsure at all Xaa locations
  Clone ID: PAT_MRT3847_35143C.1.pep
MGSAGGTDYGAYTYENLEREPYWPSEKLKISITGAGGFIASHIARRLKTEGHYIIASDWKKNEHMTEDMFCDEFHLVDLRVMNNCLKVTEGVDHVFNLAADMGGMGFIQSNHSVIMYNNTMISFNMIEAARINGIKRFFYASSACIYPEFKQLETNVSLKESDAWPXAEPQDAYGLEKLATEELCKHYNKDFGIECRIGSFHNIYGPYGTWNGGREKAPAAFCRKIITSYDRFEMWGDGLQTRSFTFIDGSVERVLRLTKSDFREPVNIGSDEMVSMNEMAEIILGFENKNIPIHHIPGPEGVRXGRNSDNTLIKEKLGWAPTMRLKDGLRITYFWIKEQIEKEKAQGIDISVYGSSKVVQTQAPVQLGSLRAADGKE

SEQ ID NO: 213863 - protein, 115 aa, Glycine max
  unsure (1)..(115): unsure at all Xaa locations
  Clone ID: PAT_MRT3847_35144C.1.pep
AFVTYTTREGAXKAAEELPNKQKKKNQKPKLTXRKTKTSKPEADGSDQARKNAPAAHSGWKDKRQRYXQKQNQDQTQGMGYYNKTAGPPPGEEERSHYPPMDAKRMGDIVASQDG

SEQ ID NO: 213864 - protein, 141 aa, Glycine max
  Clone ID: PAT_MRT3847_35145C.1.pep
SIFLPLFSPNPNPLTSSLLFLLLLLLLLPFSLPPRHRDPPCCTTTLLSLTSTPPPFPASLPCPSSDCSKKLQNETSSTSTETWASFFAALIPGINIFRMLVIGLGILKDEATVKSMSRFGDYRLQYCTLEFQREILESVKQ

SEQ ID NO: 213865 - protein, 47 aa, Glycine max
  Clone ID: PAT_MRT3847_35146C.1.pep
SKIMIYYSVCRWRVSIYIPWYKKGLLGRGSNSRHKCDTPIVIHALRL

SEQ ID NO: 213866 - protein, 51 aa, Glycine max
  unsure (1)..(51): unsure at all Xaa locations
  Clone ID: PAT_MRT3847_35147C.1.pep
PNSSVELISEGWHSYERPLCSQCLTYSLLLSXRYLSCVLWSQMRKGLTSDL

SEQ ID NO: 213867 - protein, 319 aa, Glycine max
  Clone ID: PAT_MRT3847_35148C.1.pep
MMFLSFNMISGGNTLQRFDPVACVSSVPLLLAPTTRPTFHFPSPFLSKPKPTYLFTSFSSSSSSSSSFFSSTTPPRSTMLHHDPLVSDVYATAISGVVALSFLRLFQETAKRDLFDQKLNRKLVHISIGLIFMLCWPLFSTETWASFFAALIPGINIFRMLVIGLGILKDEATVKSMSRFGDYRELLKGPLYYAATITLAAIIYWRTSPISIAAICNLCAGDGMADIVGRRLGGEKIPYNKNKSFAGSIAMATAGFLTSIGYMWYFSSFGFIEGSWKLVLGFLLVSIVTAFVESLPISTELDDNLTVPLTSILVGSIIL

SEQ ID NO: 213868 - protein, 143 aa, Glycine max
  unsure (1)..(143): unsure at all Xaa locations
  Clone ID: PAT_MRT3847_35149C.1.pep
GHGILWYVQLXIIRSVRSTKMFVRNLREGNTWYEGKRKKQSVTLGFLRKFLLEXKEDKTKICLLYQGYNLWIVYVQRLKRHNEDFVENAFQSKFKLRSQLKKMVERKMEKFLEIHKILEISLRPIKKNIEGLLASWKTTMSLL

SEQ ID NO: 213869 - protein, 88 aa, Glycine max
  Clone ID: PAT_MRT3847_3514C.1.pep
SQPAETAGRILWPMKQSKNKGQCPQRGPFTNTPLGVQNANRELNPRLTMAWALAPRGQNGAPNTYGESSQLDHLKDDAPERKCAELTP

SEQ ID NO: 213870 - protein, 133 aa, Glycine max
  Clone ID: PAT_MRT3847_35150C.1.pep
VINLISSFLYVFIQDFFKSLVTAGGKRITLTFLPEKPRLQKEELPPGGPPFWAPQGHPPPPQKKKKKPPPGGKVKGGPPQNSPEDPGGGGPPKKSPQPPPLGPPQKGVSPPREKTRVVPKMPRQKAPPQRGGG

SEQ ID NO: 213871 - protein, 226 aa, Glycine max
  unsure (1)..(226): unsure at all Xaa locations
  Clone ID: PAT_MRT3847_35151C.1.pep
RTFEKLDLGDYQWLTYGKVFESVSSFASGLASLGHRREERVAIFADTRERWFIALQGCFRRNVTVVTMYSSLGKEALCHSLNETEVTTVICGRKELKSLVNISGQLDSVKRVICMDDDIPSDASSAQHGWKITTFSNVERLGRENPVEADLPLSADVAVIMYTSGSTGLPKGVMMTHGNVLATVSSVMIIVPNXXPKDVYLAYLPMAHILELVAENLIAAVXGCIG

SEQ ID NO: 213872 - protein, 76 aa, Glycine max
  Clone ID: PAT_MRT3847_35152C.1.pep
KTFTIILNTNFYRLLIRMMKIHFRNQHLGEDKACIENNIKLVTFVESNDSAFNLYIPFVISTTFFNNNIYNSQLFR

SEQ ID NO: 213873 - protein, 186 aa, Glycine max
  Clone ID: PAT_MRT3847_35153C.1.pep
GPHHGLGPMGQASLYRSEVNRKPAGQTDLLRIETLHHADKDKTEAYILELVIWLHHLVSQVRVGNGGIRSPVKSPICSPTQKTGQLFTQKACSSPMLTVEDQQMLRDVSKRKLTPGISKSQEFDSAKTRLSKHHRLSKSSSHSPISESKNDIFSTRRVPSVPVIDFDIDRMKALDVIDRVDTIGSS

SEQ ID NO: 213874 - protein, 74 aa, Glycine max
  unsure (1)..(74): unsure at all Xaa locations
  Clone ID: PAT_MRT3847_35154C.1.pep
SCPTGXXPXXAXPXKXXSXCXXXLIHXLSPFCCPLXSXNPIHVLVHFLPXTXKRAWIKEXVQXEPXLXLAQTRL

SEQ ID NO: 213875 - protein, 84 aa, Glycine max
  Clone ID: PAT_MRT3847_35155C.1.pep
VHLHHVYKRESFKFQNEGILPKSITTLSRVAHCTELQPKCSSDTKETYQKIIKFLGTSANPRKSKIYILKFICFSQRNFKNVAE

SEQ ID NO: 213876 - protein, 54 aa, Glycine max
  Clone ID: PAT_MRT3847_35156C.1.pep
QMCSTSLFQGPSLHTNNIEPPKYHILKNKITCFNPLSTTTQFQTSLKLKKIGFP

SEQ ID NO: 213877 - protein, 125 aa, Glycine max
  unsure (1)..(125): unsure at all Xaa locations
  Clone ID: PAT_MRT3847_35157C.1.pep
KGAARRLVQTFTARRNEISALLLGVEVNGKGILXHHSVMADPVDIPAENIRKLSDCAYGEVXKSRQDALALPTWVALAVRTGPCVWAVLRAHVHALVREEWQFDEYLHYKEELVVGCSHGYSVLE

SEQ ID NO: 213878 - protein, 151 aa, Glycine max
  Clone ID: PAT_MRT3847_35158C.1.pep
SKPTRKKGYFPTWGHRCDHFAFPPPPPADRRRAGPRPCPVCYIPVEQAIASMPSSPSESPILRTLTYVHDENPIESEPHGGSDFGGYPSLEERDAAFNIKETMKVHCGFVKGSRPGRQTGFDFDEADLLELDQYHDVIVASAIFGNYDVIQ

SEQ ID NO: 213879 - protein, 109 aa, Glycine max
  Clone ID: PAT_MRT3847_35159C.1.pep
MSTLCSALPPSSSSSPSIAKFISDQPCLTMLQTQCTNMKDLQKIHAHIIKTGLAHHTVAASRVLTFCASSSGDINYAYLLFTTIPSPNLYCWNTIIRGFSRSSTPHLAI

SEQ ID NO: 213880 - protein, 204 aa, Glycine max
  unsure (1)..(204): unsure at all Xaa locations
  Clone ID: PAT_MRT3847_3515C.1.pep
VFEKAPFIKVPQXNPHGQPKXGYAFIEFASFEDAKEALNSCNKMEIEGRTIRLELQGSNSRSQPSKTLFVKGLSEDTTEETLKESFEGSVRARIVTDRETGSSKGFGFVDFNSEEDAKAAKEAMEDGEIDGNKVTLDWAKPKGEGGFGGRGGGRGGFGGRGGGRGGRGGFGGRGRGGFGGRGGFRGGRGGGGDFKPQGKKTKFE

SEQ ID NO: 213881 - protein, 53 aa, Glycine max
  unsure (1)..(53): unsure at all Xaa locations
  Clone ID: PAT_MRT3847_35160C.1.pep
SKTASAADIKRAYKKLALXWHPDKNVDKREEAEAKFREIAAAYEVYYYYLMVT

SEQ ID NO: 213882 - protein, 111 aa, Glycine max
  unsure (1)..(111): unsure at all Xaa locations
  Clone ID: PAT_MRT3847_35161C.1.pep
MGTEKVHIIIVVIGHVDSGKSTTIXITLIYKPGGTDKRVTDRFKKEAAYMNKRSFNSALVLDNPTAERDRXITIDIALWNSESTSXHCTVIDAPAHTDLIKNMTTGTSQSD

SEQ ID NO: 213883 - protein, 145 aa, Glycine max
  unsure (1)..(145): unsure at all Xaa locations
  Clone ID: PAT_MRT3847_35162C.1.pep
GDCISLIHISLFSNLLRVAACKTGCLLVYIVISGNAPLSRCYWASLVHLFFPHLDITHHFVACMWSLSDPHSCVLIFPLXVCAPHNGFDLSSSEWAHLSFCHLNFLVCSPYPSTLFVILLGFSQDFXLVCIPLLPAVSVPLASAQ

SEQ ID NO: 213884 - protein, 154 aa, Glycine max
  unsure (1)..(154): unsure at all Xaa locations
  Clone ID: PAT_MRT3847_35163C.1.pep
MSGVWGFKNGVVRLVENPEGEAAXGSRGGRRTVLVHRASSEVLIYYAALEHTLDSLDWETDYDHANLLQFHKRCTYHLIYVTIDFIMFMPMLMSDILMKNKIPFEVRDIQSMSGKRLNIIHIRTNMPTTCKAYVHCTLPATTVQRQLIVTICTT

SEQ ID NO: 213885 - protein, 86 aa, Glycine max
  Clone ID: PAT_MRT3847_35164C.1.pep
HYSYCPFVLSDHDCMHACIIQDKRGSIAGYGPNGSEWYFGHLAIFKSKLLFAFFLKRKNYYFLLLTKKDILFATCMSMWSTHLSPN

SEQ ID NO: 213886 - protein, 54 aa, Glycine max
  Clone ID: PAT_MRT3847_35165C.1.pep
VVLKAEHDLYLPCTSRSVTPPCLFHYKISGSPFHSVRRPNAADGIMHLRQAHLP

SEQ ID NO: 213887 - protein, 289 aa, Glycine max
  unsure (1)..(289): unsure at all Xaa locations
  Clone ID: PAT_MRT3847_35166C.1.pep
TSTNHFHQSSWHYSSRIIRVSRASGGKDRHSKVMTXKGLRDRRVRLSVTTAIQFYDLQDRLGYDQPSKAVEWLIKAASEAISELPSLNNPFPDTPKQPSDEKRPTSGGGQQQQQQGFDDADGDTNYQQNQSQNLSLSKSACSSTSETSKGSGLSLSRSEIRVNRVKARERARERAAKEKEKEKEKESDFNIAHHHHHHNVNNMSHTASFTELLTGGIGSTVTVNPNTTTTTTTTATSPNGSSVHQIHEGHDHEANLFNKGSQQQQQQQHHHWSQTVTPMDYFSAGLLVG

SEQ ID NO: 213888 - protein, 57 aa, Glycine max
  Clone ID: PAT_MRT3847_35167C.1.pep
LNGVRAGVTWLEPDPIIRCFSEGNLVTGSAWPRHPEFIAQLVALLGIRVSFNMHFVL

SEQ ID NO: 213889 - protein, 87 aa, Glycine max
  Clone ID: PAT_MRT3847_35168C.1.pep
RRRIMACLLVKHSMSSGVLHCVDRIEGLVVSLHCQFPELSVTSFRHCYSGSGGQGNKHWSEILNTTSRVLETLSQSTCIHTCLHIQF

SEQ ID NO: 213890 - protein, 251 aa, Glycine max
  Clone ID: PAT_MRT3847_35169C.1.pep
MTSSLVKIQGEQVLTNDFQDLSIKDLSEKGTEAEIHKVGSYGSHGGICAICLDKIVLQETALVKGCEHAYCVTCILHWATYREKVTCPQCKHPFEFLNVHRSLDGSIQDYMFEESVCLLLRASWFTPLSVEEHVVHEDAYEDLEDYYQYEDDDDDDDMDEVYYGGSSSLRVIGNRRWGDNGYVRAGRQEARPVHRPNFQDSGASSSSHEPKKKEAGKIITGRRAKRAQKREAADKAAEAKHQQHLVRLGRK

SEQ ID NO: 213891 - protein, 114 aa, Glycine max
  unsure (1)..(114): unsure at all Xaa locations
  Clone ID: PAT_MRT3847_3516C.1.pep
CKRRTKAPQPMEKKQRGIHGFHVHFCLVSIGQHGLCGKHDTYLNRFTTCLLFGSLEVLALAMLTVQAASKHLHPEACGKSSCVKGGIAVMFYTSLCLLALXMGRVRGSMTAFGA

SEQ ID NO: 213892 - protein, 110 aa, Glycine max
  Clone ID: PAT_MRT3847_35170C.1.pep
CRRLAILAGTFALMVNATLVEVHPKYHCAFANKECSGHDWASTVRASPQSTHTVFIAVSLKENAAATCDSLIYQSASNLTAAHLTLEQINKIFRSNENMNAVTFFLEEED

SEQ ID NO: 213893 - protein, 184 aa, Glycine max
  Clone ID: PAT_MRT3847_35171C.1.pep
MNEYTFGQRKHEGTERETLREREYETPTTRISQNLLNSIEKLTKLKEFREMEFEDQEEQEEELCMGGGGAGYDPTRMKVPVAAEPVRSTNGGGGRARYRECLKNHAVGIGGHALDGCGEFMAAGMEGTLDALKCAACSCHRNFHRKEADSSARGPPFSGGDPVFKFLTTTPPASLLYLPSIPAG

SEQ ID NO: 213894 - protein, 69 aa, Glycine max
  Clone ID: PAT_MRT3847_35172C.1.pep
VGTLLNARQPSFIFTHQYIWNRVDVHLLWGGQILLKQNFNQKTLTYNLLSHISNYLIKIPKQKSSTLSS

SEQ ID NO: 213895 - protein, 201 aa, Glycine max
  unsure (1)..(201): unsure at all Xaa locations
  Clone ID: PAT_MRT3847_35173C.1.pep
RTEGARPSSTNPTPSANSNDDAKCRRLGLQVVSSLRCVRANVKKAAAMDSEXLSSEVSKLSKGIAHIAEVVQLDEAGGSDESSQKFRESMNKFMRMAEEEILKVQAQESVALSLVKEITEYFHGNLSKEEAHPFRIFMVVRDFLTVLDRVCKEVGMINERTMVSSAHRFPVPVNPMLPQPLPGLVGKRQYNSSDDDDSSSP

SEQ ID NO: 213896 - protein, 188 aa, Glycine max
  Clone ID: PAT_MRT3847_35174C.1.pep
QERMAARLKHLGIRVKSIEEDEHCVIPMGGPLPVLPQRVVGIGGTAGMVHPSTGYMVARTLAAAPIVANSIVQCLGSDRGFSGDEISAQVWKDLWPIQRRRQREFFCFGMDILLKLDLPGTKRFFDAFFDLEPHYWHGFLSSRLFLHELLFFGLSLFSYASNTSRVEIMAKGTLPLVNMINNLVKDTE

SEQ ID NO: 213897 - protein, 67 aa, Glycine max
  Clone ID: PAT_MRT3847_35175C.1.pep
SITHHQTKQSTQHNHNSQNNTQPPNTKTPHKNNHHKHTLSHPHIQESKTNPPPPLNLTSHTSTMSIT

SEQ ID NO: 213898 - protein, 386 aa, Glycine max
  Clone ID: PAT_MRT3847_35176C.1.pep
MKDVCNVVQGLKPVLLMVVVQIAFAGVNVFYKFAVNDGMSLRVGVAYRFVFATVFIAPLALIVERKKRTKMTWTVLFQSFLCGLFGGSLAQNFYLQALALTSATFASAMSNLIPGITFILAVCFGMERLNLRTAAGKAKIVGTLIGIGGAMVLTFVKGVHIEFGSFHLNLLHPQNGTHAHSATGAHTLLGSLCALASGISYALWLIIQAKMSESYPRPYSSTALMSLWGSLLSIVLALCVERDWSQWRLGWNIRLLTAAYTGIVVSGVMVVVISWCVHMRGPLFASVFSPLMLVTVALAGSTILNEKLHLGCVIGAVLIVCGVYVALWGYSKEMKKKNQLVPAQSPHDNESNTVVEIVVRSAQEDKSNQNKTHEIVAKVVRDNDDS

SEQ ID NO: 213899 - protein, 42 aa, Glycine max
  Clone ID: PAT_MRT3847_35177C.1.pep
SYSQLHQWTSPFVGSYFSSLLLKKVLGNFVKLSVGRSQSDSK

SEQ ID NO: 213900 - protein, 68 aa, Glycine max
  Clone ID: PAT_MRT3847_35178C.1.pep
RFQAERKHFRCFVKPLCLFVFSFQCLKSFYGTMLVLYSFINLLNTLYKLSKKSCRKKLEEDLKFLILA

SEQ ID NO: 213901 - protein, 43 aa, Glycine max
  Clone ID: PAT_MRT3847_35179C.1.pep
FLIRSYLPSIKPQDPNNCCLLMQIYELLSKFLQKRIIKNLETN

SEQ ID NO: 213902 - protein, 161 aa, Glycine max
  Clone ID: PAT_MRT3847_3517C.1.pep
MADHDAKEEQRPLNQWRRSKGGFMASMFIFVLSALDNMGFVANMVSIVLYFYGVMHFDLASSANTLTNFMGSTYLLSLVGGFISDTYLNRFTTCLLFGSLEVLALAMLTVQAASKHLHPEACGKSSCVKGGIAVMFYTSLCLLALGMGGVRGSMTALELTI

SEQ ID NO: 213903 - protein, 62 aa, Glycine max
  Clone ID: PAT_MRT3847_35180C.1.pep
GHLKDSLTRNVDSSRSSLIYLLHGLLAYDPPKRLSACQAVAKYSLGIILKNPDFWNKFLFKD

SEQ ID NO: 213904 - protein, 58 aa, Glycine max
  Clone ID: PAT_MRT3847_35181C.1.pep
ESYLPKSLSSYVWNTFWQGLHLNTAPATVYKDSPLPSKVTMPICLPPYTMAQKYLFCR

SEQ ID NO: 213905 - protein, 174 aa, Glycine max
  Clone ID: PAT_MRT3847_35182C.1.pep
DRRRDRYEDDRRDYRRRGRDRDDEDDRRDYGRRGRDRDDEDDRRDYGRRGRDKYDRDRDRYERRRRDEHEEEHGRGRENGDRDGNRKGLQHGSGELELYAVYKGRISRVMETGCFVQLDDFRGKEGLVHVSQMATRRITNAKDVVKRDQKVYVKVISVSGQKLSLSMRDVDQHT

SEQ ID NO: 213906 - protein, 78 aa, Glycine max
  Clone ID: PAT_MRT3847_35183C.1.pep
NSARVRLREDDRRAHLINTNEVFPLLPVYVSDLIITATKPFSWATIRAHCKTSSQVANTYNATLTYYFLHKSYIKPNN

SEQ ID NO: 213907 - protein, 88 aa, Glycine max
  Clone ID: PAT_MRT3847_35184C.1.pep
CFAVRSREHAQLNECHIQGLNALTPDDRIETDGGLLLTGHPKPTPLQRASVALSRCTLNRDALHRPYYNNWPQAIYMLHGKGISGAIY

SEQ ID NO: 213908 - protein, 35 aa, Glycine max
  Clone ID: PAT_MRT3847_35185C.1.pep
PWGERLGFDLSYECGTPASTRTFGGYILLNAYLSV

SEQ ID NO: 213909 - protein, 84 aa, Glycine max
  Clone ID: PAT_MRT3847_35186C.1.pep
SFPEFTFQFKEGAKMSHPLSNYFSFVGDAKVLCFPVVSPGGAGQPKTPGPAIILGNYQQQNFYVEYDLEKERFGFGPRNCKRKA

SEQ ID NO: 213910 - protein, 116 aa, Glycine max
  unsure (1)..(116): unsure at all Xaa locations
  Clone ID: PAT_MRT3847_35187C.1.pep
LKPFLFKPNCPYTRGRFGKHSTTITLSAHNNHXSDINKKILTSLRKRKKISFLTRLNPFPVSILPVLFIVNNKILSSNATNPMLTRLLXNCNNLKYLVNEFPIAFVKLELIFYSLK

SEQ ID NO: 213911 - protein, 205 aa, Glycine max
  Clone ID: PAT_MRT3847_35188C.1.pep
MEREEGKQPPQKTPLHNQHEQANSDNNFVQQNNLQEQSGTFTTFASFESETEGESSFDDNDYDADFFLSQEFESELQFLESERSNDNGDDYDNEDDEHMEEDEIDVDELTYEELIELGDFIGQEKRGLSAHEICSCLHSHTFHSAENKSGIDRCVICQVEYEEGESLVAIQCEHPYHTDCISKWLQIKKVCPICNIEISAPKMVS

SEQ ID NO: 213912 - protein, 142 aa, Glycine max
  unsure (1)..(142): unsure at all Xaa locations
  Clone ID: PAT_MRT3847_35189C.1.pep
MGKTHGMGAARKLKSHRRRQRWADKSYKKSHLGNEWKKPFAGSSHAKGIVLEKIGIEAKQPNSAIRKCARVQLIKNGKKIAAFVPNDGCLNYIEENDEVLIAGFGRKGHAVGDIPGVRFKVVKVSGXSLLALFKEKKEKPRS

SEQ ID NO: 213913 - protein, 95 aa, Glycine max
  unsure (1)..(95): unsure at all Xaa locations
  Clone ID: PAT_MRT3847_3518C.1.pep
MANHDAKEEQRPLNQWRRSKGGFMASMFIFVLSALDNMGFVANMVSIVLYFYGVMHFDXGSSANTLTNFMASTYLLSLVGGFISDTYLNRFTHAC

SEQ ID NO: 213914 - protein, 65 aa, Glycine max
  Clone ID: PAT_MRT3847_35190C.1.pep
WQGVFCSIMCGLGLSLLFIDPSPLSPERPVSWCYIRPVVVPREAVLGQELVGEISHVWGGRVSPA

SEQ ID NO: 213915 - protein, 150 aa, Glycine max
  Clone ID: PAT_MRT3847_35191C.1.pep
GSRTVVSWNLMMSCLAKNNKEEKALELFNEMLEQGFEPDDASLVTVLPVCARLGAVDIGEWIHSYANSKGFLQDTINVGNSLVDFYCKCGNLQAEWSIFNDMASKNVVSWNAMISGLAYNGEGEVGVNLFEEMVHGSFEPNDSTIAGDIA

SEQ ID NO: 213916 - protein, 54 aa, Glycine max
  Clone ID: PAT_MRT3847_35192C.1.pep
STGVSMQSSRKALVSAPPQSLYDIYHHSQQSLQDEHSSSCKLGCSAWTTILNNE

SEQ ID NO: 213917 - protein, 60 aa, Glycine max
  unsure (1)..(60): unsure at all Xaa locations
  Clone ID: PAT_MRT3847_35193C.1.pep
FPGSPGWYVFPFCAAPAFCDPPESLRPSPRIPCLGWSRSLVPAPXVVXPXAGFHPTLPLG

SEQ ID NO: 213918 - protein, 524 aa, Glycine max
  unsure (1)..(524): unsure at all Xaa locations
  Clone ID: PAT_MRT3847_35194C.1.pep
MVSDASKKKAAQKKAAAAAKRGGKAAAAAVMAATSSKAADKVANGIADIQISDRTCTGVLCSHPLSRDIRIESLSVTFHGHDLIVDSELELNYGRRYGLLGLNGCGKSTLLTAIGCRELPIPDHMDIYHLTREIDASDMSALEAVISCDEERLKLEKEAEALAAQDDGGGESLERIYERLDALDVTSAENRHADACHGXTRDFSGGXRKRIPLAGALFINPAIALLSEPTNHLDLEACVWLEENLKKFERILVVVSHXSQDFLNRLCTNLILVRGKKLEVXTCNDYQYVLTRPELEENEMKLPQGWITLYGVRVAQVSYNAAHKAQSKHRPLSKMVRCQLGEKVIRYXVLVFRFTDIWNLPLPVLQFVEVAIGXDTLIYKNIDFGVGXDSRVALFAPNGAGXCTSTLMKIWTGDLLXSDSRVRRHRHVQDEQYHQEMGRXLDMQITALQXLIKECRGDEEEKMWAAFGKLELPGXAQVMTIKNFRGGEWSRVGFAXLGWRQPHWLLLVEPTXNHVDIEIIGAFE

SEQ ID NO: 213919 - protein, 296 aa, Glycine max
  Clone ID: PAT_MRT3847_35195C.1.pep
MRMSCNGCRVLRKGCSENCSIRPCLQWIKSPESQANATVFLAKFYGRAGLMNLVNAGPEHLRPAIFRSLLYEACGRIVNPIYGSVGLLWSGSWQLCQAAVENVLKGAPITPITSEAAASGRCPPLKAYDIRHVFKDENSAAASNETQHQRVKTRSRVKRPLAKPKSTANQNNNINTKNTGTEFGSDEPGLVACDWTEEALNRSGSHDSTLSHQSEAANAVESESILSAETSILFRDEPESNPKRLDRTDDVGLELTLGFEPVSGAQHVVPVKKRRIDLKDFSGSSCKMELGLECSA

SEQ ID NO: 213920 - protein, 593 aa, Glycine max
  Clone ID: PAT_MRT3847_35196C.1.pep
MVSDASKKKAAQKKAAAAAKRGGKAAAAAVMDASSKAADKVANGIADIQISDRTCTGVLCSHPLSRDIRQSLSVTFHGHDLIVDSELELNYGRRYGLLGLNGCGKSTLLTAIGCRELPIPDHMDIYHLTREIDASDMSALEAVISCDEERLKLEKEAEALAAQDDGGGESLERIYERLDALDAATAEKRAAEILHGLGFDKQMQAKKTRDFSGGWRMRIALARALFMNPTILLLDEPTNHLDLEACVWLEESLKKFERILVVISHSQDFLNGVCTNIIHMQSKKLKLYTGNYDQYVQTRSELEENQMKQFKWEQEHIASMKEYIARFGHGSAKLARQAQSKEKTLAKMERGGLAEKVVRDKVLVFRFTDVGKLPPPVLQFVEVSFGYTPDNLIYKNIDFGVDLDSRIALVGPNGAGKSTLLKLMTGDLMPSDGMVRRHNHLRIAQYHQHLAEKLDMEMSALQFMIKEYPGNEEEKMRAAIGKFGLSGKAQVMPMKNLSDGQRSRVIFAWLAWRQPQMLLLDEPTNHLDIETIDSLAEALNEWDGGLVLVSHDFRLINQVAHEIWVCANQSVTRWEGDIMEFKAHLKSKAGLSD

SEQ ID NO: 213921 - protein, 301 aa, Glycine max
  Clone ID: PAT_MRT3847_35197C.1.pep
MRMSCNGCRVLRKGCSENCSIRPCLQWIKSPESQANATVFLAKFYGRAGLMNLVNAGPEHLRPAIFRSLLYEACGRILNPIYGSVGLLWSGSWQLCQAAVENVLKGAPITPITSEAAASGRGPPLKAYDIRHVSKDENSAAASNETQHQRVKTRSRVKRPLANNNAKPKSTTNENNNNKGTELGSAEPSLVACEWTEEVMNRSGSHDSTLSHQSEAANAVESESMLSAETPETSILFREEPETNPKRVSDDVGLELTLGFEPVSRARPVVPVKKRRIELKNFSGSAESGSCKMELGLECSA

SEQ ID NO: 213922 - protein, 112 aa, Glycine max
  Clone ID: PAT_MRT3847_35198C.1.pep
MNGLLRKMACYILNENHTYMIKFHENLCKIPQMREWTADLEAVSLAGNEIEEIAEGTSPNCPRLSTFILSRNSISHIPKCFFRHMNALTQLDLSYNRRLTSLPTKSNKVAMP

SEQ ID NO: 213923 - protein, 122 aa, Glycine max
  Clone ID: PAT_MRT3847_35199C.1.pep
YDMHGSQTDASFWRSDRAAPCRRRGRGEKLRRRRFTRRPLVACPVFSTASATTITGALVDSLHSVRWAPHHIWLRNLSLEIVLATHITNRIILCRCAYTQERAGLIRTPRAPDIRSQPTMNG

SEQ ID NO: 213924 - protein, 86 aa, Glycine max
  unsure (1)..(86): unsure at all Xaa locations
  Clone ID: PAT_MRT3847_3519C.1.pep
MTPATARHDKGGCRTELCRKNSTLQNKGXKETTWLKSGTTIRRAVGQDGVNLGADTKATEGPIVADKNREKNDDMAPNIYCRGTGT

SEQ ID NO: 213925 - protein, 37 aa, Glycine max
  unsure (1)..(37): unsure at all Xaa locations
  Clone ID: PAT_MRT3847_351C.1.pep
XXCPHLLPSTCCXXGXHRHSXWNAXLLGLWLXDFTXP

SEQ ID NO: 213926 - protein, 86 aa, Glycine max
  Clone ID: PAT_MRT3847_35200C.1.pep
IITTTEFKYNNHENLKNQLPHHTFSTVCKCKDIAHNYKQHVQYFDNILDRISTLFLLNTRNNNFIVSCDPINPTYFNILWSSNTSL

SEQ ID NO: 213927 - protein, 70 aa, Glycine max
  Clone ID: PAT_MRT3847_35201C.1.pep
ARQTSLRPMNFHLLLYTRGHRNLKKVKYHWPSYIVNSRLFILFLYVFTQHNMPNDKNLQCMKASEIWHIV

SEQ ID NO: 213928 - protein, 127 aa, Glycine max
  unsure (1)..(127): unsure at all Xaa locations
  Clone ID: PAT_MRT3847_35202C.1.pep
XXXLFXCGVXXXXFFXXXXXXFXXXXCCXXXXXXXCXXGFXXXXLXXXCXCFCXXXXVXFXVXVFXXXXXXVXXXXXFXXXXFXLXGXXLXCXXWXFVXXXXVXXXXXXXXXXXCXCXXRVLXCXLX

SEQ ID NO: 213929 - protein, 193 aa, Glycine max
  Clone ID: PAT_MRT3847_35203C.1.pep
MTTISNCSLLFLFLFLSTLHIASTLSTPTNFIKSSCSTTQYPALCIQSLSVYASTIQQDPHELVQTALSLSLNHTEATKTFVAKCNKFRGLKPREYAALKDCAEEISDSVDRLSRSLKELKLCKVKGEDFTWHISNVETWVSSALTDESTCGDGFAGKALNGKIKEAIRARMVNVAQVTSNALSLINQYAAQH

SEQ ID NO: 213930 - protein, 76 aa, Glycine max
  Clone ID: PAT_MRT3847_35204C.1.pep
HHKKWQNLSPLLWHMLSGVLDTWKECYSTIFFLESCIMKCIAHTSVPKVFCCCNFEKRISMLFNWFELCCSIFVCI

SEQ ID NO: 213931 - protein, 44 aa, Glycine max
  unsure (1)..(44): unsure at all Xaa locations
  Clone ID: PAT_MRT3847_35205C.1.pep
GSRVTYKPVFLSALLLHXLTLHTHTNFTSVRRAKTMCEFKAHTL

SEQ ID NO: 213932 - protein, 48 aa, Glycine max
  Clone ID: PAT_MRT3847_35206C.1.pep
TNPAGACLKKHGFIFCGKICLAPHSRYENKKKLYRQTLYYEPLIWIKF

SEQ ID NO: 213933 - protein, 43 aa, Glycine max
  Clone ID: PAT_MRT3847_35207C.1.pep
SPDAIFVSTWTCTCQSSRELIFLHIISQCALKIQCMQVLVLEP

SEQ ID NO: 213934 - protein, 75 aa, Glycine max
  Clone ID: PAT_MRT3847_35208C.1.pep
VLSILCVFFYLVRFSPLFVLFLLFNYILFYLPLSLSFFSELYIVLISFYLFYKYTINIRTKKKKKKKKKSGRSRE

SEQ ID NO: 213935 - protein, 58 aa, Glycine max
  Clone ID: PAT_MRT3847_35209C.1.pep
RCKVHRPRQTSQIHQSTHELCNTGSSYPLRNLHKIPVFVNPLKELWLRSDSELIYELM

SEQ ID NO: 213936 - protein, 52 aa, Glycine max
  Clone ID: PAT_MRT3847_3520C.1.pep
DKCPYALRSNSFFFLFFHTGVTSKYLVYVYIKLRTLSLRAHYLNLRTILRIP

SEQ ID NO: 213937 - protein, 75 aa, Glycine max
  unsure (1)..(75): unsure at all Xaa locations
  Clone ID: PAT_MRT3847_35210C.1.pep
MASKGPRSRIDHESRAKRQXALEAPREPRRPKTHWDHVLEEMVWLSKDFESERNGISSGKKVXLRAARMLDQLQS

SEQ ID NO: 213938 - protein, 140 aa, Glycine max
  unsure (1)..(140): unsure at all Xaa locations
  Clone ID: PAT_MRT3847_35211C.1.pep
RHKXDKXXPKPDKGEAEARQXKRERAXLTQAXRKKXXHKRLRNNKKGEHPKRKXQKXXNQSPKKKGKRPRQHHNRQQXRKGKNHRKRRKXXHQHARTERHNKKRKRXKTHQRKAGQNQPRSKRXKREGRRNPHQHQHQHQ

SEQ ID NO: 213939 - protein, 63 aa, Glycine max
  Clone ID: PAT_MRT3847_35212C.1.pep
FFQKNYSPNNLSWLKDSCTEIELLYIYTSYLHFKSSTPAREETIEHSPLVRIRHEASCRIRHE

SEQ ID NO: 213940 - protein, 59 aa, Glycine max
  Clone ID: PAT_MRT3847_35213C.1.pep
LFFMKYNQFKQTSVPQKNNQHLVIKPCRVPIPLHTHKPHNSFFNYPGPPGDGERMNSWG

SEQ ID NO: 213941 - protein, 97 aa, Glycine max
  Clone ID: PAT_MRT3847_35214C.1.pep
RYVRFDIKSKKFFELEKKKKKKKKKKKKKKKKKKKKKIDKKKKKKKPKNTRKRQKNTNNIKNKKKLGGRALKETQFLTPVWRNQFLFYGAPHNTFIG

SEQ ID NO: 213942 - protein, 74 aa, Glycine max
  unsure (1)..(74): unsure at all Xaa locations
  Clone ID: PAT_MRT3847_35215C.1.pep
LGLMTMAYLMHCAEHIHPGTAMNFWIPFETITKPKNXTRSPESPXKPNKPAVVLVHGLXAEGIMTWQLHVGPLT

SEQ ID NO: 213943 - protein, 122 aa, Glycine max
  Clone ID: PAT_MRT3847_35216C.1.pep
RPRFRASGEAQARPLGRRDQRSPSTLPSSRYACPTPQSTARATLHTDTTRPRKSTRQAPQTSEKTVKTTPGENQTQTTAATRSKIPSDHHTAKPPDHGGNKEPSSGNNHTQVSDEDKAAKKT

SEQ ID NO: 213944 - protein, 68 aa, Glycine max
  Clone ID: PAT_MRT3847_35217C.1.pep
GTFLLDLVLKRLRLTARLWEPDLAELAMQGLADAHLVGALDDTEVCGGPVIPFTTVREDIPVPPPIGR

SEQ ID NO: 213945 - protein, 73 aa, Glycine max
  unsure (1)..(73): unsure at all Xaa locations
  Clone ID: PAT_MRT3847_35218C.1.pep
WDKAGATYLRTACGHWTLESMHEAGQAHVNAARCYQETHIIECVSCLNRAVNXLXDMGRLSMAARCLKEIAES

SEQ ID NO: 213946 - protein, 39 aa, Glycine max
  Clone ID: PAT_MRT3847_35219C.1.pep
QIELELKKPLMGCISSIISILYFPNNTSGCISRFHRRHS

SEQ ID NO: 213947 - protein, 113 aa, Glycine max
  Clone ID: PAT_MRT3847_3521C.1.pep
LNPLNHTILTYVQSLPIAIHLTLAYVQQDPWATQYGPISRNFIIGPGPECMPYCIEVHNMITCSMTMVTSHPEKYPRDTEYLWLRQLSHDSIINCSVSHRIGSMQVFDPYVNT

SEQ ID NO: 213948 - protein, 61 aa, Glycine max
  Clone ID: PAT_MRT3847_35220C.1.pep
LPLILLCSSSFGLRNHRSCFNIFLGFVFLFLSLRNISSEFHFVSPISSFSLDMNCESVIPY

SEQ ID NO: 213949 - protein, 348 aa, Glycine max
  Clone ID: PAT_MRT3847_35221C.1.pep
MATDSSNGNGHHQTTTKQPPLPSPLRFSKFFQSNMRILVTGGAGFIGSHLVDRLMENEKNEVIVADNYFTGSKDNLKKWIGHPRFELIRHDVTEPLLIEVDQIYHLACPASPIFYKYNPVKTIKTNVIGTLNMLGLAKRVGARILLTSTSEVYGDPLVHPQPESYWGNVNPIGVRSCYDEGKRVAETLMFDYHRQHGIEIRIARIFNTYGARMNIDDGRVVSNFIAQALRGEPLTVQCPGTQTRSFCYVSDLVDGLIRLMEGSNTGPINLGNPGEFTMTELAETVKELINPGVEIKMVENTPDDPRQRKPDITKAKELLGWEPKVKLRDGLPRMEEDFRLRLGVGKKN

SEQ ID NO: 213950 - protein, 101 aa, Glycine max
  Clone ID: PAT_MRT3847_35222C.1.pep
LGLAKRVGARILLTSTSEVYGDPLVHPQPESYWGNVNPIGVRSCYDEGKRVAETLMFDYHRQHGIEIRIARIFNTYGPRMNIDDGPCVSNFIWSSTGGGNH

SEQ ID NO: 213951 - protein, 64 aa, Glycine max
  Clone ID: PAT_MRT3847_35223C.1.pep
WCLIVGGEFQRDRIDLILVDVYTCKLCMQFLDSDVIQWFTYWIMRSLRNFPSTLNILLIHLSQP

SEQ ID NO: 213952 - protein, 129 aa, Glycine max
  Clone ID: PAT_MRT3847_35224C.1.pep
IQSLKCQKALNCQKDAALEIQRFIRGHLTRNQLLGSKSHTVTPISCISRPFGFRSFQLELFLFSVVKLQRWWKGLLLLKLKNKSAIIIQSCTRGWIARRKATVFRHHVVIQEDAALVIQRYIMGHLIRN

SEQ ID NO: 213953 - protein, 124 aa, Glycine max
  Clone ID: PAT_MRT3847_35225C.1.pep
FSTNEKKHWGRKQCFTMTVLRPCLERKLDLRGGENPWTLSICPYGYTSDLPLVIEQNILFRNKKFCTAGGYWRGVMGCSHKPPIVSLTILSLKKLCFYGKLGLAENSKRKKPVTKPFSRLNSPP

SEQ ID NO: 213954 - protein, 153 aa, Glycine max
  unsure (1)..(153): unsure at all Xaa locations
  Clone ID: PAT_MRT3847_35226C.1.pep
MAPNLRLRLCVPLLFLLLSFLLNSNAELDHQVSHKVIAAPHKDVGTNVIDGTGVENAFNFENANSVVGSRKGGSSKVSVSTVALFTLAMAAATGLGAVPFFFVELDPQWAGLCNGMAAGVMLAASFDLIQEGQEFGAGNWVXTGILAGGIFIW

SEQ ID NO: 213955 - protein, 314 aa, Glycine max
  unsure (1)..(314): unsure at all Xaa locations
  Clone ID: PAT_MRT3847_35227C.1.pep
MLRHGVPFRHSKNASFSIRQKSSGGRRPKKKTYHRVPELDRVMELRKKPSMILHLSSLIQSQPQTLXLRDLEKHVGFVRKWAFMGLMEKHPSLFRVAGTPPSVSLTARALRLAQEETHARAQMEPLLVTNLRKLLMLCVDCRVPLETVELLGPELGLPSDFKDCLVPKYPQFFAVRRFRGRDSLALEDWDSTLALTARESRLAQEGVVNLKADGNRRKVKISRDGNYLGPFAFKMNFPAGFRPNVGYLEQLERWQKLEFPSPYLNARRFDAADPKARKRAVAVIHELLSLTMEKRMTSLQLDAFHAECLFPSNL

SEQ ID NO: 213956 - protein, 96 aa, Glycine max
  unsure (1)..(96): unsure at all Xaa locations
  Clone ID: PAT_MRT3847_35228C.1.pep
MGRGIPAQRNGAGYALKCLTHQQKGPCPLQSLHMRERNGYLKGGATDDIHHPGRGADHCYQGLWRPLKYXKQNKLFMNDYIVYIGNWIYCVQNSIL

SEQ ID NO: 213957 - protein, 201 aa, Glycine max
  unsure (1)..(201): unsure at all Xaa locations
  Clone ID: PAT_MRT3847_35229C.1.pep
FSHLTPVSNTFTTTRVTSPIQPSASPQPCWCTHTKNPSHLCSHCGCANHSHHDCHCLNARHTQCECDHLLTTSSAWPHQECTSRATTTHIQIDNQTANAKHIITTHQTSHRHSAPDTRQTHTQHQTHTITHTLAHTPPATTRQQNPTLTXTAPQNPTDTQQDTQSHQTSTPTQQQTQTTPKTQHAPPPPQARRHSNDVAAA

SEQ ID NO: 213958 - protein, 51 aa, Glycine max
  Clone ID: PAT_MRT3847_3522C.1.pep
YYARIRSYETSCINLICRIYRLNILHMSRILHKSTMTQILFRWTRNLLYEI

SEQ ID NO: 213959 - protein, 248 aa, Glycine max
  Clone ID: PAT_MRT3847_35230C.1.pep
MASSLGIACGGNNAKLGIPKQRCGSVLQPPCSLAMGRSTARVGRITAAMATATAVMTTATAKEQETTTPMMMAMELFGKRDGGAKNDAVEGQERLDRWMRESVVEIVKNLKEAPLLVQVFPKSATMTTEKRMVVEDWPAVKERWESGETPVPEGVIFVEELDGDTAEDGGGERTTRAWGVVVQGKGVGCGPVCYLLKTVRVGSGPGSGMGICSTHFCLVKVKDFRETVQSQLKNCWLLQSQCQWNNYK

SEQ ID NO: 213960 - protein, 101 aa, Glycine max
  Clone ID: PAT_MRT3847_35231C.1.pep
RAPPRNKPLGRRVITGGRPFFLGVFRTNRDFNTQQSSPYNSLTNTGHASKYRCYTQAHTHIYTHRFRSYHELQYQDMGSVKKDNTYIYTYIYIYLYIYIYI

SEQ ID NO: 213961 - protein, 555 aa, Glycine max
  Clone ID: PAT_MRT3847_35232C.1.pep
MAKLFRAFFFKSLFFFWYRFLFRQLRNLVRFHRTISNSFSGATTQFNKYLKFPSLIHRSDLNDHTLIFDVENALLKSSSLFPYFMLVAFEAGGLIRAIVLVLLYPFVCVLGKEMGLKIMVMACFFGIKASSFRVGRSVLPKFFLEDVGAEMFEALKKGGKTVGVTNLPHVMVESFLREYLDIDFVVGRELKVFCGYYVGLMDDTKTMHALELVKEGKGCSDMIGITRFRNIRDHDDFFSHCKEVYVVSEADKRSWQKLARERYPRALIFHDGRLALRPTPKESIAMFMWLPYAIILAVIRISLALSLPFTISTPFLVFSGIRLTTTASSAPTGSHNIKQNKGNVGNLYVCNHRTLLDPLYISFSLQNNLTAVTYSLSRMSEILAPIKTVRLTRKRDEDAKMMKNLLGQGDLVVCPEGTTCRVRYLLRFSPLFSEMCDEIVPVAVDTHVSMFHGTTAGGLKCLDPFFFLMNPAPVYTVRLLNHVFTNSQLLSSHTSNLYQEAHNSRFQVANRVQTQIGTALAFECTKLTRKDKYLMLAGNEGIVNSNTKCISKSNS

SEQ ID NO: 213962 - protein, 84 aa, Glycine max
  Clone ID: PAT_MRT3847_35233C.1.pep
VFLVPGCFFFQGGACMSGPNTFFRSVVLPCYWVPAPVVASKACSRWCLSRVCKPGRPKKITLFPDQEHCAFLNFKKARALRLFF

SEQ ID NO: 213963 - protein, 69 aa, Glycine max
  Clone ID: PAT_MRT3847_35234C.1.pep
MEPRVGNKLRLGRKIGSGSFGEIYLGTNIHTNEEVAVQLESVKTKHPQLLYESKLCSILPGRNGIPNVK

SEQ ID NO: 213964 - protein, 34 aa, Glycine max
  Clone ID: PAT_MRT3847_35235C.1.pep
QEAIRSSPSKSLEFGIGFQRVQVSLGLLKENRTL

SEQ ID NO: 213965 - protein, 69 aa, Glycine max
  Clone ID: PAT_MRT3847_35236C.1.pep
CIIRGASPSILFFLRAFCCGQRPLVIHGWHPKGAVADFFRPHGWWACFLSLLLRVFRACVLPGCLSCHS

SEQ ID NO: 213966 - protein, 270 aa, Glycine max
  Clone ID: PAT_MRT3847_35237C.1.pep
QEGIHIWGKGGKDKNTAILWHGTVHAREWVTTMTVEYLAYQLIAGYGKDSNVTSFVDNYDFYLIPVVNPDGFVYSQTQDRLWRKNRAPPLPGANTSHPCWGVDLNRNWPHEWSGVGSSNNSCTQTYRGPSPGSEPEMSGMQHFADKLADSHGLKLFIDWHSYSQLILSPYGYSCEVVPETNAEHVELMGATADAIESVYGTKYTTGPTCQTIYATNGGSSDYVYDISGAEWSLAFELRDTGTYGFILPPEQILPNCEEVWAGIQVMLSLI

SEQ ID NO: 213967 - protein, 102 aa, Glycine max
  Clone ID: PAT_MRT3847_35238C.1.pep
DGRCTAALFRAQPWCILFWVFSSILFSPPSPRRGRFLSAPLIVGCPPPLTRFLPPSFVCAVFVRSGRFLALSCFVCVWATALLCHPQSNAFRVMGGCILLPF

SEQ ID NO: 213968 - protein, 34 aa, Glycine max
  Clone ID: PAT_MRT3847_35239C.1.pep
FNKNRKHTLLLQFNNNTRCKINSYSYIYINLMNK

SEQ ID NO: 213969 - protein, 147 aa, Glycine max
  unsure (1)..(147): unsure at all Xaa locations
  Clone ID: PAT_MRT3847_3523C.1.pep
EQGKWIHNYIDENRIKVDAVVGTALIEMYAKCGCIEKSFEIFNGLKEKDTTSWTSIICGLAMNGKPSEALELFKAMQTCGLKPDDITFVAVLSACSHAGLVEEGRKLFHSMSSMYHIEPNLEHYGCFIDLLXRAGLLQEAEELVKKY

SEQ ID NO: 213970 - protein, 149 aa, Glycine max
  Clone ID: PAT_MRT3847_35240C.1.pep
MVGIAWLLFFAFLADLCGLPVTVQIAASTLVEKKEASKLLYKLWKDNYLYMEKVGATAGAKQITILMWKVNKPLLWEYVLDEMYHAALNLSLRMAFEQEKDEELLKVPKDKRQGPGPLQKKYKRLLNVWLLLGSSLMKLDDALMLFHDF

SEQ ID NO: 213971 - protein, 105 aa, Glycine max
  Clone ID: PAT_MRT3847_35241C.1.pep
AKERFIKNISGHMETVTDKEIIKRQIAIFREVSEDIASRMEKATGVQGYPGISGLRFNGTHNGMAKSKDNKVANGMTGISAKYAEKNKTNGAPKAGTHKELIESQ

SEQ ID NO: 213972 - protein, 70 aa, Glycine max
  Clone ID: PAT_MRT3847_35242C.1.pep
ASQKSLQESALHQHILELRLSLSDIRTIMPMSVKRTTLAINSISILSSQRDVNSMVNKLYSYEIAEPDTI

SEQ ID NO: 213973 - protein, 90 aa, Glycine max
  Clone ID: PAT_MRT3847_35243C.1.pep
SYRRTSLSEPPSTCRRPRRPSSLAATAAAMVSLLSILLYAGNKTRLQLRRSVTWVRVSLVSLPQSRRKWHERERRCSTVRELGALGFHQG

SEQ ID NO: 213974 - protein, 115 aa, Glycine max
  unsure (1)..(115): unsure at all Xaa locations
  Clone ID: PAT_MRT3847_35244C.1.pep
PTATRPPTTXKXXAENLSEEERNGXKERXKXXDTDNXGTXTXEEGKAXRPKXGTKXXEAEARQXXEAADAXGNGTXEXXEGRTATTHXXRXEREXHRXKAXEXXDXXKSGDXTKE

SEQ ID NO: 213975 - protein, 220 aa, Glycine max
  Clone ID: PAT_MRT3847_35245C.1.pep
MEANKEEALKAIEIAEKRFALRDFAGAKNYAVKAKTLCPGLEGISQMVATFEVYIASEVKHNGELDYYSILGLKPFADKEAVKKQYKKLAVLLHPDKNKCVGADEAFKLISEAWTWLSDSAMRSSYDLKRNVQLGGTNQTNLSPAHATGAAGYNKCSNLSTPCGGLDTFWTICTSCKVQYEYLRKYVNKRLSCKNCRGTFVAVETGAAPQMVRFHILGHM

SEQ ID NO: 213976 - protein, 73 aa, Glycine max
  Clone ID: PAT_MRT3847_35246C.1.pep
RLLVFPYSKPQAMKLMGPKPPTFLFLWVGGSTWIHGKAENDPLKPGESLNFSKSLISKSRQYSTIIFPILEED

SEQ ID NO: 213977 - protein, 45 aa, Glycine max
  Clone ID: PAT_MRT3847_35247C.1.pep
DRMPTPASILSRLCIKLPTSLLTIQCSLSSDLRLGVLDIRYHIPS

SEQ ID NO: 213978 - protein, 40 aa, Glycine max
  Clone ID: PAT_MRT3847_35248C.1.pep
HQHQLTLPTCELSHDSIKDHSALISRNFVINCVCRLLSSA

SEQ ID NO: 213979 - protein, 53 aa, Glycine max
  Clone ID: PAT_MRT3847_35249C.1.pep
ALAVVYALIRGLLPILPSSLTSNWFPTCYPENAITDFATTCSSIIQAPNRLLL

SEQ ID NO: 213980 - protein, 50 aa, Glycine max
  Clone ID: PAT_MRT3847_3524C.1.pep
MGSSFPYTDLCHYRSDHDSISCFKRTYIKCATQHHTHDRTLTHSLDREFN

SEQ ID NO: 213981 - protein, 61 aa, Glycine max
  Clone ID: PAT_MRT3847_35250C.1.pep
FKFHFGQTHFTFKIKFKTQKNKNSQCPALFSYFDGLIQDCLLLSSDARCTSSIACAPNIFH

SEQ ID NO: 213982 - protein, 64 aa, Glycine max
  unsure (1)..(64): unsure at all Xaa locations
  Clone ID: PAT_MRT3847_35251C.1.pep
VGERDPYEWSGRDPNFVSRAERDLFSHRLEXPRSVKRTRKVNLFKPLPTQHKPCVNHRIDGVNP

SEQ ID NO: 213983 - protein, 105 aa, Glycine max
  Clone ID: PAT_MRT3847_35252C.1.pep
GIMAVSRGKNRKLGGTIELQMGWKNSDPQRARRLRGFVRLPNILGPRRKIGMLGDAHHVEKAGKIGLDWLDVEALKRLTKIKRLGRKLAKRAHAFLAFEAVIKQI

SEQ ID NO: 213984 - protein, 94 aa, Glycine max
  unsure (1)..(94): unsure at all Xaa locations
  Clone ID: PAT_MRT3847_35253C.1.pep
MGIHLISIKTEEPLEDGENDCLTYGPSSKQGWRAALEDAHAADTALDETTXNMGVYHGNASQEGWKERAMFNNDQEQQGEPDSSGGIGTDLDDA

SEQ ID NO: 213985 - protein, 80 aa, Glycine max
  unsure (1)..(80): unsure at all Xaa locations
  Clone ID: PAT_MRT3847_35254C.1.pep
KASTLHVALRLRDGMQIFVQTLTGXSITLEVESSDTIDNVKAKIQDKEGIPPDQQRLIFAGKQLEDVRTLADYNIQKDST

SEQ ID NO: 213986 - protein, 54 aa, Glycine max
  Clone ID: PAT_MRT3847_35255C.1.pep
FSISAFTNYKELFIRWLSVKITILSKYLNLYALVLYNIIKYRRNFLMNTHHNKL

SEQ ID NO: 213987 - protein, 139 aa, Glycine max
  Clone ID: PAT_MRT3847_35256C.1.pep
MVGTWLFFQVKAICNARKAIKVFQRHTAPIIEVSFSSVLPKSPSSPSCSLFQSLFTPGSTFIITAKWQLHRVKAQTRLIQKKYKQGYKDRKEPLKLYQWCPTVKDCGSDIDMGMSKNSCHTSTGCFKMQGDISIASKIT

SEQ ID NO: 213988 - protein, 52 aa, Glycine max
  unsure (1)..(52): unsure at all Xaa locations
  Clone ID: PAT_MRT3847_35257C.1.pep
IQSLKCQXCRSIARXMPLVEIXRFIRGHXTXNQLXXSKSXXXTPIXGISVPI

SEQ ID NO: 213989 - protein, 954 aa, Glycine max
  unsure (1)..(954): unsure at all Xaa locations
  Clone ID: PAT_MRT3847_35258C.1.pep
MVFTFPTLLSMKLQPLSLLLVMYFCAFATSSEIASEANALLKWKASLDNHSQASLSSWIGNNPCNWLGIACDVSSSVSNINLTRVGLRGTLQSLNFSLLPNILILNMSYNSLSGSIPPQIDALSNLNTLDLSTNKLSGSIPNTIGNLSKLQYLNLSANGLSGPVPCEVGNLKSLLTFDIFTNNLSGPIPPLLGNLPHLQSIHIFENQLSGSIPSTLGNLSKLTMLSLSSNKLTGTIPPSIGNLTNAKVICFIGNDLSGEIPIELEKLTGLECLQLADKNFIGQIPQNVCLGGNLKFYTAGNNNFTVXKPKSLRKCYSLXRIRHQQKLLSGDITDFFDVLPNLNYIDLSDNSFHGQVSPKWGKFHSLTSLMISNNNLSGLIAPEIAGALNLCVFHLFSNPLTGTVLMEKLXNVSLIQQSPLXGCGINCKHSNSLPSLKVHDLALPWSMLPMSXNVMELIFNGLALDLSQNRFEGNIPLEIGNLDYLTSLDLSGNLLSGTIPPTLGGIQHLERLNLSHNSLSGGLSSLEGMISLTSFDVSYNQFEGPLPNILAFQNTTIDTLRNNKGLCGNVSGLTPCTLLSGKKSHNHVTKKVLISVLPLSLAILMLALFVFGVWYHLRQNSKKKQDQATDLLSPRSPSLLLPMWSFGGKMMFENIIEATEYFDDKYLIGVGGQGRVYKALLPTGELVAVKKLHSIPDGEMLNQKAFTSEIQALTEIRHRNIVKLHGFCSHSQYSFLVCEFLEKGDVKKILKDDEQAIALDWNKRVDIVKGVANALCYMHHDCSPPIVHRDISSKNVLLDSDDVAHVADFGTAKFLNPDSSNWTSFAGTYGYAAPELAYTMEANEKCDVYSFGVFALEILFGEHPGDVTSSLLLSSSSTMTSTLDHMSLMVKLDERLPHPTSPIDKEVISIVKIAIACLTESPRSRPTMEQVAKELAMSSRSSSMSPQTHTEMKD

SEQ ID NO: 213990 - protein, 354 aa, Glycine max
  unsure (1)..(354): unsure at all Xaa locations
  Clone ID: PAT_MRT3847_35259C.1.pep
LLYNLHYNNVLLKIPRQLTSLPIXELLRLWTGYFDYLMELNSNKSANYASLVTAQLVVLASHMSSCIFSGLGLPDNDAWYMIETIAERNSIGSNQFIKIRGFLSHIQQLHNGYWGITSMKAQSVLLLALPSPHSKDTKDENQQPSEATGVGRNWVQSMFSRNKTTRSSSFSRVHRWTSDGGNSATNENGTSRKQDLSSGGQKKLHTNVRILRGHNGAITALHCVTKREVWDLVGDREDAGFFISGSTDCSVKIWDPSLRGSELRATLKGHTRTIRAISSDRGKVVSGSDDQSVLVWDKQTTQLLEELKGHDGPVSCVRTLSGERVLTASHDGTVKMWDVRTDRCVATVGRCSSA

SEQ ID NO: 213991 - protein, 41 aa, Glycine max
  Clone ID: PAT_MRT3847_3525C.1.pep
EAPGLTNPDTSAYAFATTSSIQTAAKGLALPDRMQGRTPHN

SEQ ID NO: 213992 - protein, 102 aa, Glycine max
  Clone ID: PAT_MRT3847_35260C.1.pep
GGKKRFFLFLFLSLLSLSTTSDVPSLLHCLLPRPLSPVVVVGKGRVFLAAMEGEPSQLKRAAIDASAGAISGGISRTVTSPLDVIKIRFQVSVLLSPSHFTF

SEQ ID NO: 213993 - protein, 180 aa, Glycine max
  unsure (1)..(180): unsure at all Xaa locations
  Clone ID: PAT_MRT3847_35261C.1.pep
DRTNWLLYRGGLGDKGEESWDAGWEEELARSRSSGSRIAXPMLSPRLAIFQYRIVSNASVKGTRSLLTAHGXSWAVLAXLITLFQGIHLYARRYGAYFQLVSRFIHRIYLLAALAGSIVAGILSELSLPDIYDYMWARIPTGGGMLPNAGELNPVMNRCGLWKSDTSIARLCHASMGMLK

SEQ ID NO: 213994 - protein, 75 aa, Glycine max
  Clone ID: PAT_MRT3847_35262C.1.pep
TRCFLFFFLSVNKLQLMCYINNKYLMKTVPNYKAEPNLPLLQGLLYLVTYILLTYGRYYMTTDHPYVNSYLFLLT

SEQ ID NO: 213995 - protein, 65 aa, Glycine max
  Clone ID: PAT_MRT3847_35263C.1.pep
YILFSFNFSKYVSIQGCKRFDLISDPVQFNLIQLDLILVIHTPNSPKYTPNPPLVPLNYILYLFS

SEQ ID NO: 213996 - protein, 88 aa, Glycine max
  Clone ID: PAT_MRT3847_35264C.1.pep
FSYILCIPNTVIAIKACLSLKKRGFIKKNIQTKHKSSDIPGDVTAWEKVLIKFLQPRGRAKVVECDCHACYIYVNSSVIKTQTKAAQA

SEQ ID NO: 213997 - protein, 69 aa, Glycine max
  Clone ID: PAT_MRT3847_35265C.1.pep
KILGRVLLKLPGTEFQKNNPSFKTQISILYPKYTKLIIFFLPLFNLSLFILRHSLFRILHIGHLVFNIF

SEQ ID NO: 213998 - protein, 59 aa, Glycine max
  Clone ID: PAT_MRT3847_35266C.1.pep
MDKGKTKKSHGHGSDRKKSRRHSSGHESDEGRHKRHKRDHCREGDLEDGEFGDDHVDRC

SEQ ID NO: 213999 - protein, 71 aa, Glycine max
  Clone ID: PAT_MRT3847_35267C.1.pep
FDSEMETATPFTMLIILFTFYRLQFENQWRLQWPFHLFSSLLNLLLPCFQIFLWYGATVAVAIKAYMIISI

SEQ ID NO: 214000 - protein, 74 aa, Glycine max
  Clone ID: PAT_MRT3847_35268C.1.pep
PTRPVVSFGGYNGRYNNEKGKGDIVSVLKAEKEELESSLIKEKHHALQLKQDLAEAESCNSDLYKVVITMASPS

SEQ ID NO: 214001 - protein, 72 aa, Glycine max
  unsure (1)..(72): unsure at all Xaa locations
  Clone ID: PAT_MRT3847_35269C.1.pep
VRCKDSNRHHAQEAHRRAKFKFPXGRRQVIVRRYLGLHPLSRTDYLNFKXRNSVVLDGVATKLTGVPLISGS

SEQ ID NO: 214002 - protein, 49 aa, Glycine max
  Clone ID: PAT_MRT3847_3526C.1.pep
CRKLSSRNVNALTMEPPLSVTIHVDSLCCQWLRQPYQSQAVAGVGLWVC

SEQ ID NO: 214003 - protein, 72 aa, Glycine max
  Clone ID: PAT_MRT3847_35270C.1.pep
NLELLMGICALCVIVCISYYCLRYSSPNPYEQHPLRKRNDLAHRRLTSVLPHIILIKHTAPDPTGNLPTPAD

SEQ ID NO: 214004 - protein, 64 aa, Glycine max
  Clone ID: PAT_MRT3847_35271C.1.pep
RRHENENPFHFNSRRFQTLFKNQYGHVRVLQRGSRRSQQRQNLRDYRSLEFNSKPDTLLLPQHA

SEQ ID NO: 214005 - protein, 332 aa, Glycine max
  unsure (1)..(332): unsure at all Xaa locations
  Clone ID: PAT_MRT3847_35272C.1.pep
AMTMLMVGGCHVLMPKFDAESGVGAREQYAVTSFITVPAIMASLISIIRHKETWQGGDTVKKILNGGGSLSHELIKDTSIFFHKAKLISAYGMTETCSSLTFLTLYEPMHETTSQSLQAFGVAGSKLIHQQQGVCVGKAAPHIELKISADASGHIGRILTRGPHIMLRYWDQTLTNPLNPNNEAWLDTGDIGSSKCCCCGNPRCSPDRDGSSMYPTKGKLAMVRAVVCFKXIVSAIFKETLDALFRELFKACIHPRENYXWSEQLSASNEEFLLSRKNIQQYCIENHLSRFKIPKMFIVWRKPFQLTTIGKIKRDQVRKEVMSQLQSLHSNL

SEQ ID NO: 214006 - protein, 41 aa, Glycine max
  unsure (1)..(41): unsure at all Xaa locations
  Clone ID: PAT_MRT3847_35273C.1.pep
PCRCXXXXHXXCARXXXXXCXVPVSPSRAAKPLLNKGFXLS

SEQ ID NO: 214007 - protein, 74 aa, Glycine max
  Clone ID: PAT_MRT3847_35274C.1.pep
KLAIIRPFLKKKKKKKKKKKKEKKKKKKKKKKKKKKKKKKKKKKKKKKTKKKKKKKKKKNRGSGYRRIRCTSRR

SEQ ID NO: 214008 - protein, 60 aa, Glycine max
  unsure (1)..(60): unsure at all Xaa locations
  Clone ID: PAT_MRT3847_35275C.1.pep
LCSENHIQGNTYLETLLPIFLEPLEGHXVPFIPAFKXSLRFRFIAASFWRWLWLFLLLHE

SEQ ID NO: 214009 - protein, 104 aa, Glycine max
  Clone ID: PAT_MRT3847_35276C.1.pep
LYSASFYIIFLKRDGGAHYEIGSFPLSLWPAHKEKKGRAFPFLRVKKKAGYQSIASFQICLTRSPQLPLKVCPPNSEPPPKKKKKRLKLLKSPPLRGCNYLNLS

SEQ ID NO: 214010 - protein, 67 aa, Glycine max
  Clone ID: PAT_MRT3847_35277C.1.pep
DEISQSTKLVPMFENNIDLSNIARIFNSHLRQCPHTSHLLEWLILVNLMYNLLESCLMVRVYFEFFI

SEQ ID NO: 214011 - protein, 90 aa, Glycine max
  Clone ID: PAT_MRT3847_35278C.1.pep
ARPLCLLRGHVPKRNTFAPDAVGSKCNHAISEVCQKHQQELGYSGFGRQCIQVGLVGKGLFFFLEEDTLCPSNSAAPEWITARSHMQQSS

SEQ ID NO: 214012 - protein, 92 aa, Glycine max
  Clone ID: PAT_MRT3847_35279C.1.pep
MSSRRSRSRQTSSSRNITDDQINDLVSKLQQLLPEIRDRRSDKVSASKVLQETCNYIRSLHREVGDLSERLSELLDTTDTAQAAIIRNLLMQ

SEQ ID NO: 214013 - protein, 66 aa, Glycine max
  Clone ID: PAT_MRT3847_3527C.1.pep
CKLLLVLSLLLVSLMLGVRSLDSLQNGRAISPTCQRLKWSNYEGIQFGHRFQIRRYYLTGWNLNKP

SEQ ID NO: 214014 - protein, 91 aa, Glycine max
  unsure (1)..(91): unsure at all Xaa locations
  Clone ID: PAT_MRT3847_35280C.1.pep
RAAAQAITFSAEGCKTKSDQDHSNLHLASPEKPPFLLRQGDTFFFKQGXDRXXXXAAKQSPPPPGGSPPXDXGXDXXGXXDXEGTGGXXEP

SEQ ID NO: 214015 - protein, 63 aa, Glycine max
  unsure (1)..(63): unsure at all Xaa locations
  Clone ID: PAT_MRT3847_35281C.1.pep
MLVSLGSGPWDQLFGGGNSSLXVAAVAALASGLIAVLFIPRPGGQKPSLEAQYEVLCSFCIWH

SEQ ID NO: 214016 - protein, 43 aa, Glycine max
  Clone ID: PAT_MRT3847_35282C.1.pep
NETLEGDFSIDIKSRSILEKVIRTDAQCGRRKTSLDDMMRGGP

SEQ ID NO: 214017 - protein, 126 aa, Glycine max
  Clone ID: PAT_MRT3847_35283C.1.pep
CPYYGFVVGNRMDNTGGMPSEVSNAKKHRLHGLRGETSSKSLEAMVKNTGKESLQWGLAAGIYSGLTYGLKEARGANDWKNSAMAGGITGATLALTSGDTSQEHMVHCAITGAAISTAANLLTGIF

SEQ ID NO: 214018 - protein, 200 aa, Glycine max
  Clone ID: PAT_MRT3847_35284C.1.pep
MKATLLRPCSGPLILDTHSNRTSSTMRHASTVVCCSSKNQPYIPKLEPFSRTKFERAVKDPPLIEKSEKEILDYCSTLEGDQSYSCWQAYFELKDLEKESPRADIERLILETGGVKSLIGCLHGISIMHKVKKGDMNLSKDVKSEEGERMCPIPDGLPKSADELREEEQARMPDSPYTKLLRTMGRHPAWYSPAPDHETD

SEQ ID NO: 214019 - protein, 175 aa, Glycine max
  Clone ID: PAT_MRT3847_35285C.1.pep
FGRETQMYIAAGEIYGGERRLAQLRASFPQIVKKDTLLTWDDLRQFQNHSSQMAALDFMVSEASNTFVPTYDGNMAKLVEGHRRYSGFKRTILLDRKKVVELVDMHQNGTLSWIEFADAVRRVHETRIAQPTRRRVILDKPKEEDYFYANPHECLCEENNCDDLLGPHNSSQVSS

SEQ ID NO: 214020 - protein, 200 aa, Glycine max
  Clone ID: PAT_MRT3847_35286C.1.pep
MKATLLCPCSSAPLILDTHSNRTSATRHASTVVCCSSRNQPYIPKLEPFSRTKFERAVKDPPLIEKSEREILDYCSTLEGDQSYSCWQAYFELKDLEKESPKADIERLILETGGVKSLIGCLHGISIMHKLKKGDMNLSKDVKSEEGERLCPIPDGLPKSADELREEEQARMPDSPYTKLLRTMGRHPAWYSPAPDHETD

SEQ ID NO: 214021 - protein, 81 aa, Glycine max
  Clone ID: PAT_MRT3847_35287C.1.pep
HGRSTSVCHYFNPTNGFTMKQTYASLSNSIDKSYHSLRNCLIIEICLLFFKYITLLKLIVTFMIFKTQSIIRRFLKFTFIQ

SEQ ID NO: 214022 - protein, 136 aa, Glycine max
  Clone ID: PAT_MRT3847_35288C.1.pep
NSNSNFVCLCLVTSMADNLDDGEFWLPPQFLTDEDDDDTSFCNNLTAQNYAVSRSLFFSSSSSETESDEEDHLAELTRRVALELDLNNKGVFGDGGGSPQSTLSVFENSGKGSSPNDAVPPHVNSSSTWDLLRAAA

SEQ ID NO: 214023 - protein, 52 aa, Glycine max
  Clone ID: PAT_MRT3847_35289C.1.pep
DDRIRESIVEIAIAKTLARDRYCFRFRFCYTKRSKRKRKKLIRKAVYIEDKL

SEQ ID NO: 214024 - protein, 255 aa, Glycine max
  Clone ID: PAT_MRT3847_3528C.1.pep
MVLKTESGIAYPTRPYGCEKTTEGHGCEKTTEGDSSTTSLSSKLTMKPTLLLSLSFLPLFAFLALSEDVEQVVDISGNPIFPGGTYYIMPSTWGAAGGGLKLGRTGNSNCPVTVLQDYSEIFRGTPVKFSIPGISPGIIFTGTPLEIEFAEKPYCAESSKWVAFVDNEIQKACVGIGGPEGHPGQQTFSGTFSIQKYKFGYKLVFCITGSGTCLDIGRFDAKTILEGLLNLTEHEAFDIVFIEASKVDGIIKSVV

SEQ ID NO: 214025 - protein, 180 aa, Glycine max
  unsure (1)..(180): unsure at all Xaa locations
  Clone ID: PAT_MRT3847_35290C.1.pep
AVGKNRRIFKGKKGGKKKAADPFAKKDWYDVKAPSLLQVKNIGKTLDSRTQGTRIASEGLTHRVFDVSLSDLHGDEDHSFXMIRLRADDVQRKNVLTHYWGMDVTADTVKSLVRKWRTFIXELMLMLXTTDDYTLRIFVIGSTKMTSNYVMMISYAQSTLIRHDPRKMRDMMVTLALHVD

SEQ ID NO: 214026 - protein, 58 aa, Glycine max
  Clone ID: PAT_MRT3847_35291C.1.pep
SRADSARAKLEITKPVSGVLYFGYMLLLSYGFFVVTGTIGFYSCFWFIKLIYASVKID

SEQ ID NO: 214027 - protein, 55 aa, Glycine max
  Clone ID: PAT_MRT3847_35292C.1.pep
KLKQYYVFILIYHGKYHGCINFKCVYIERGFTYFKSNYKRVTSDLHPFIHSNPTK

SEQ ID NO: 214028 - protein, 228 aa, Glycine max
  Clone ID: PAT_MRT3847_35293C.1.pep
MAFPILFLLFISLPFSSAKLNVDYYKNTCPDFEKIVRENVFTKQSASVATAPGLLRLFFHDCITDGCDASLLITSNAYNPHAERDADLNLSLSGDAFDIIVKIKNALELACPGVVSCSDIVAQATRDLVKMVGGPFYPVRLGRKDSTESDAARVSASLPTPSMTMDQIIEKFTSKGFTVKEMVALTGAHTIGFTHCKEFIHRIYNFSKTSDADPMMHPKLVQGLRSVC

SEQ ID NO: 214029 - protein, 66 aa, Glycine max
  Clone ID: PAT_MRT3847_35294C.1.pep
STNSFHPSRFLPSPSASSLPLGRGSDTAHTGRSFTPSRLRQLYKKESASLTKCALKQITPLPHSHS

SEQ ID NO: 214030 - protein, 81 aa, Glycine max
  Clone ID: PAT_MRT3847_35295C.1.pep
GIFPPLNYIPQKRSLSHINCRGPSFFVVKRTLVSMLLGFKNLKPIKAPKGWDFFEKNYFFPPNPKPQKKKKKKKKKKKKKK

SEQ ID NO: 214031 - protein, 124 aa, Glycine max
  Clone ID: PAT_MRT3847_35296C.1.pep
CASFRVFHWKVPAPYSGTLAVLGTVLYVLSFSLGAGPVPALLLPEIFASRIRAKAISLSLGTHWISNFVIGLYFLSVVNKFGISIVYLGFSIVCLLTVVYIARNVVETKGRSLEEIERALSPAT

SEQ ID NO: 214032 - protein, 103 aa, Glycine max
  unsure (1)..(103): unsure at all Xaa locations
  Clone ID: PAT_MRT3847_35297C.1.pep
XLXRXXXPLXFXXXAXXXXLXYERIXXXXXLXCDXXXXXGAXXXXXXNLXKXXIGXXXXXXXAXXNXXXXXXCGXGXKXRXCXXXISCCASRIXSXTYXVXXD

SEQ ID NO: 214033 - protein, 268 aa, Glycine max
  unsure (1)..(268): unsure at all Xaa locations
  Clone ID: PAT_MRT3847_35298C.1.pep
FSFFLNLIQIVAEMKAIGKISGPTALTGLILYSRAMISMVFLGYLGEMELAGGSLSIGFANITGYSVISGLAMGMEPICGQAYGAKQLKTLGLTLQRTVLLLLSTSLPISLTWLNMKNILLWCGQDQQISSTAQTFIIFSIPDLFLLSLLHPLRIYLRTQSITLPLTYCSAISVLLHVPLNFLLVVHFKMGVSGVAIAMVWTNLNLFIFLSSFVYFSRVYXDSWVPPSTDCLRGWSSLLALAVPNCVSVCLEWWXWYELMIILCGLLL

SEQ ID NO: 214034 - protein, 94 aa, Glycine max
  Clone ID: PAT_MRT3847_35299C.1.pep
GVFSNILTPRMVNASAWGWAAHTAWLYAGTNALCFIWCWFRLPETKDRSFGEIHMLFQAKVPARKFKSTKVDQFSTESYGNDEQKLDVDHVEKA

SEQ ID NO: 214035 - protein, 53 aa, Glycine max
  Clone ID: PAT_MRT3847_3529C.1.pep
HVSCLFNYDSQLMTIGQQNRTLPQWWRPMTSKSMLGFLEAHELDCVLVTGLYV

SEQ ID NO: 214036 - protein, 121 aa, Glycine max
  unsure (1)..(121): unsure at all Xaa locations
  Clone ID: PAT_MRT3847_352C.1.pep
LCKXKLXSNFIFSTRAFTTTSFSDLIASPTDNNKPPHGGGGGLPERAGSGGRKVTATPPPGMAPSCATKSGDSHCGVATALSTCYITSSAVPLKSSNTCAVSNNWSSCWSDPQVAEEDKTE

SEQ ID NO: 214037 - protein, 53 aa, Glycine max
  Clone ID: PAT_MRT3847_35300C.1.pep
EQEGEGNWVFKKVKVENAQQFKPLEEDHIEQMIEELLHYGSIELCSVIPAQAL

SEQ ID NO: 214038 - protein, 197 aa, Glycine max
  Clone ID: PAT_MRT3847_35301C.1.pep
MSAAAEEANAPAVEKPVEEVKAPNPAKEKKPKAPKEKKPKQAKTASHPPYFQMIKEALIALNEKGGSSPYAIAKYMEEKHKAVLPANFKKILGLQLKNQAARGKLVKIKASYKLTEAAKKENTAKVTKANAEKKESRPKRSKTATAAAPKKTEAVKRAAKKVGPKKTKKVSTPAKPKQPKSIRSPTKRARKAAVAAA

SEQ ID NO: 214039 - protein, 166 aa, Glycine max
  unsure (1)..(166): unsure at all Xaa locations
  Clone ID: PAT_MRT3847_35302C.1.pep
MVSLEESRSNSSRFPLARSYQYHSSVSSKTQRQIGRSMRTIRSNFFQDDNSSSCSFTEKSTCLSENLTDSVVDLRLGELALRNSKSVKYSPTEEELLDLSQAFSDFSACSSDISGELQRLATLPSPKKSDFSGENEAPEPEIEPCMGFLQRENFSXEIIESISPED

SEQ ID NO: 214040 - protein, 52 aa, Glycine max
  Clone ID: PAT_MRT3847_35303C.1.pep
GCCLVTGLNIRNNLSTCRGKVAYIYPSQITLGGDLMHQVALNCLLIRLTSST

SEQ ID NO: 214041 - protein, 66 aa, Glycine max
  Clone ID: PAT_MRT3847_35304C.1.pep
DRERLFSSIHCKVSVFMSTGCYRLYDVFSSGDHDRNAGCDKRALQLSNMDTYVVLGDVEWTICFSI

SEQ ID NO: 214042 - protein, 48 aa, Glycine max
  Clone ID: PAT_MRT3847_35305C.1.pep
YGLRKIEGTFDTKTESITDTEYLVMNTFYMLQRFNANNVALEGRSTNS

SEQ ID NO: 214043 - protein, 331 aa, Glycine max
  unsure (1)..(331): unsure at all Xaa locations
  Clone ID: PAT_MRT3847_35306C.1.pep
ESNAMEQPPTEAVESLSVSDPQIPQSSNPSPTHLLTPEEKFQIVRSVGEECIQEDELLNLLTKKPEPVCYDGFEPSGRMHIAQGVMKTINVNKLTSAGCLVKIWIADWFAKLNNKMGGDLKKIETVGRYLIEIWKAVGMDLDSGKVEFLWSSKEINARADEYWPLVLYIAHKNNLKRITRYKPXIWGRSEPDEITRPKXLYTCKTDKMLYSLMDGAYLTGFNSHXLMELACQCICSSNKESFYIRLKRRTYTLSGHKRCLCEDDQHQENQSKCGPSSFIYMEDKKAXVNMKIKKANTPSKLVKGYPCFWYIQYLVLPWFNEFSVEGTENHC

SEQ ID NO: 214044 - protein, 92 aa, Glycine max
  Clone ID: PAT_MRT3847_35307C.1.pep
QKDEQNLQLQSLIKSSLNPSIKLCYYGLTLKLFHSSHFLLLAFGLLLSCLGTLAKTSYSNSISFWCCLTCTFSVLSQLLDEGDIYISVKRYI

SEQ ID NO: 214045 - protein, 74 aa, Glycine max
  Clone ID: PAT_MRT3847_35308C.1.pep
FTGSLFVGNQWNLMRLKKVILHYLSYSRRLICCLWWLFDICICPSHPVVVTYMGSNSIFWKLSTNKHHSACWLL

SEQ ID NO: 214046 - protein, 68 aa, Glycine max
  unsure (1)..(68): unsure at all Xaa locations
  Clone ID: PAT_MRT3847_35309C.1.pep
MPNDSVXGLFFFVXLLXCXXSXNFHXXHIFLTSQLHDXDSVXWNGTGPNLXXKPVXGILTNXAVVVFN

SEQ ID NO: 214047 - protein, 73 aa, Glycine max
  Clone ID: PAT_MRT3847_3530C.1.pep
LKEPSELLPFHIHVGASFGIGVTAPLMLRITSSLLCGISNNNKPQIHIIGELSCLTRKDKTVKREWLRLAKLR

SEQ ID NO: 214048 - protein, 52 aa, Glycine max
  Clone ID: PAT_MRT3847_35310C.1.pep
ILCLLLQNWVCINLSTNKVHVDSTLGLSLTLLLVTIWYTCQRVNQCIWIKIA

SEQ ID NO: 214049 - protein, 231 aa, Glycine max
  unsure (1)..(231): unsure at all Xaa locations
  Clone ID: PAT_MRT3847_35311C.1.pep
MGQGTPGGLNRQGLPGDRKPDGGDKKEKKFEPAAPPARVGRKQRKQKGPEAAARLPTVTPLSKCKLRLRLKPQEEKAEEDRSKVDDLRGSPMSVGNLEELIDESHAIVRSSVGPEYYVGILSFVDKDQLEPGCAILMHNKVLSVVGLLQDEVDPMVSVMKVEKAPLESYADIGGXLDAQIQEIKEAVELPLTHPELYEDIGIKPSKGVILYGEPGLXKTLLAKAVAXSTSA

SEQ ID NO: 214050 - protein, 44 aa, Glycine max
  unsure (1)..(44): unsure at all Xaa locations
  Clone ID: PAT_MRT3847_35312C.1.pep
RKPKGVEVIKCSILLFELIVLTXNYYTTMQEHLNLFTLLALPAL

SEQ ID NO: 214051 - protein, 448 aa, Glycine max
  unsure (1)..(448): unsure at all Xaa locations
  Clone ID: PAT_MRT3847_35313C.1.pep
MGQGTPGGLNRQGLPGDRKPDGGDKKEKKFEPAAPPARVGRKQRKQKGPEAAARLPTVTPVSKCKLRLLKLERIKDYLLMEEEFVANQERLKPQEEKAEEDRSKVDDLRGSPMSVGNLEELIDENHAIVSSSVGPEYYVGILSFVDKDQLEPGCAILMHNKVLSVVGLLQDEVDPMVSVMKVEKAPLESYADIGGLDAQIQEIKEAVELPLTHPELYEDIGIKPPXKGVILYGEPGTGKTLLAKAVANSTSATFLRVVGSELIQKYLGDGPKLVRELFRVADDLSPXSIVFIDEIDAVGTKRYDAHSGGEREIQRTMLELLNQLDGFDSRGDVKVILATNRIESLDPALLRPGRIDRKIEFPLPDIKTRRRIFQIHTSRMTLADDVNLEEFVMTKDEFSGADIKAICTEAGLLALRERRMKVTHADFKKAKDKVMFKKKEGVPEGLYM

SEQ ID NO: 214052 - protein, 40 aa, Glycine max
  Clone ID: PAT_MRT3847_35314C.1.pep
FIKNYIYLSEIHLIRFALVHASGAHLILTTCGINLTLFTF

SEQ ID NO: 214053 - protein, 98 aa, Glycine max
  unsure (1)..(98): unsure at all Xaa locations
  Clone ID: PAT_MRT3847_35315C.1.pep
SGKTWKFVSHIASXGEXRPNNGLTPVWEPFLMLYKNKLICFYSDQRDPKYGQKMVHQTTTDLKTWGPVVDDVKYPTYTDRPGMPTVALLPNGKYIMSY

SEQ ID NO: 214054 - protein, 46 aa, Glycine max
  Clone ID: PAT_MRT3847_35316C.1.pep
WWWLCAGVQLVSLDGSKDLVTVKGTMDVKEMLPYLNEKLKRNVEEA

SEQ ID NO: 214055 - protein, 33 aa, Glycine max
  Clone ID: PAT_MRT3847_35317C.1.pep
PPDSLHYALPTNMPLLSTFFCFCLSQLLMIFIS

SEQ ID NO: 214056 - protein, 52 aa, Glycine max
  Clone ID: PAT_MRT3847_35318C.1.pep
CDQINRVQCISLLLRYSQDGCAYFHDLCRIVRTYLDLDPGAVSFDRELVRIS

SEQ ID NO: 214057 - protein, 192 aa, Glycine max
  unsure (1)..(192): unsure at all Xaa locations
  Clone ID: PAT_MRT3847_35319C.1.pep
MDQETEPQPLTSKISTVVPATPRGDEDGAYHLSNMDLLMKLHYIRAVYFFINDAAQGLSIYDLKKPMFPLLDQVVQLSGRIRVSESGRPFLKCNDAGVRIAEYHHDHTLGEWFQKNGCSLQGLVHDHVLGPDLGFSPLVFVKFTWFKCGGLSLXLSWSHVLGDAFSAFSFITKWSQILAGHAPPRMLACHQL

SEQ ID NO: 214058 - protein, 54 aa, Glycine max
  Clone ID: PAT_MRT3847_3531C.1.pep
REDDRRVRYEIIQTSFSLILSNSNGEVGQRQVLAHILLLILLEFTLHVYLRVQY

SEQ ID NO: 214059 - protein, 68 aa, Glycine max
  unsure (1)..(68): unsure at all Xaa locations
  Clone ID: PAT_MRT3847_35320C.1.pep
GSLEKIARYFEVGXCIISEREYSCYRMDPKLERANIDQNTMGEFVIRGITYTGHYEPVEGMCDILDAF

SEQ ID NO: 214060 - protein, 254 aa, Glycine max
  Clone ID: PAT_MRT3847_35321C.1.pep
MLAIFHKAFAHPPEELNSPASYKGSKKPKVPEETLKDFLSHHPHNTCSMSFGDAAVLAYVRPDQSFSRHQRLFCGIDDIYCLFLGSLNNLSLLNKQYGLSKSTDEAMFVIEAYKTLRDRGPYPADQVVKELDGSFAFVVYDSKVGSVFAALGSDGGVKLYWGIAADGSVVISDDLEVIKEGCAKSFAPFPTGCMFHSEGGLMSFEHPMNKLKAMPRVDSEGAMCGANFKVDKFARVNSIPRVGSQSNWMEWDQH

SEQ ID NO: 214061 - protein, 55 aa, Glycine max
  Clone ID: PAT_MRT3847_35322C.1.pep
FRKIFYSSSLLKKENLFLEEEKPKEIFFWGRGFIRAIQVSHIFTFGTKKNAIKFF

SEQ ID NO: 214062 - protein, 122 aa, Glycine max
  Clone ID: PAT_MRT3847_35323C.1.pep
AEVITIYIVCILLACWTCLDSFVEVYVRKKFEQKLRIKTLLQITLYAKKKKKKKKKKKKKKKKKKKKKKKKKKKKKKKKKKKKKKKKKKKKKFKKKNKKKKKRGRPKKFTVFFTGCEGLKLL

SEQ ID NO: 214063 - protein, 64 aa, Glycine max
  unsure (1)..(64): unsure at all Xaa locations
  Clone ID: PAT_MRT3847_35324C.1.pep
XAYTLXRXRXPXYHXKLRXXXSXDYMXSXKPAXELVKXNPTSDYAPXLEDTLXXTXXGIAXGMQ

SEQ ID NO: 214064 - protein, 48 aa, Glycine max
  unsure (1)..(48): unsure at all Xaa locations
  Clone ID: PAT_MRT3847_35325C.1.pep
MSCCGGKCGCGSSCKCGNGCGGCKXSYPDLSYTESTTTDTLGMGVAPG

SEQ ID NO: 214065 - protein, 51 aa, Glycine max
  Clone ID: PAT_MRT3847_35326C.1.pep
DREKTGVTQIKILVEHTPFSTCGKSEKTPTDSPFQNIRIFNGERDTPCIGA

SEQ ID NO: 214066 - protein, 60 aa, Glycine max
  Clone ID: PAT_MRT3847_35327C.1.pep
RILGKWASWVATLPIFGGLGSIKISQPLSPPQGPQSLRPAQIRKVQFTGVGTAGSGKGGG

SEQ ID NO: 214067 - protein, 54 aa, Glycine max
  Clone ID: PAT_MRT3847_35328C.1.pep
SLIPITMMKMAGIILKKGSRMLPVLPWSSVSIPTLAGLQIMIKYLIHIYIYSTY

SEQ ID NO: 214068 - protein, 69 aa, Glycine max
  Clone ID: PAT_MRT3847_35329C.1.pep
PKKIYNKSFRLSLFFWVQSKKKGWPPLGRRAKEIVKRKTNGGGEIKLAKLGKQFCKNFRLKGEKKIQFL

SEQ ID NO: 214069 - protein, 75 aa, Glycine max
  Clone ID: PAT_MRT3847_3532C.1.pep
NSNRMKGGLSNLVRPYILAYFYSWTEDTPCPSHSCSECPWVPSDALCSRLCLTLTLLSIPCGLLRMLARTGLTGG

SEQ ID NO: 214070 - protein, 75 aa, Glycine max
  Clone ID: PAT_MRT3847_35330C.1.pep
DNLYYSKFRSYCQPGLEGKNCIADEHYLPTFFQMVDPGGIANWSLTHVDWSERKWHPKSYRAQDVTYELLKNITV

SEQ ID NO: 214071 - protein, 78 aa, Glycine max
  unsure (1)..(78): unsure at all Xaa locations
  Clone ID: PAT_MRT3847_35331C.1.pep
MTNESDPLITFEVSALIMDNKFCLNLSLDDVETPKGFMSDLKLXQSKIALTKNTMGGTILCCDLXANFLTEVHFRASV

SEQ ID NO: 214072 - protein, 89 aa, Glycine max
  unsure (1)..(89): unsure at all Xaa locations
  Clone ID: PAT_MRT3847_35332C.1.pep
LVFNDDIQGKKEXLAGLLAALKMVSGTLAEMTYLFLGAGEAGTGIAELIALEISKQTNAPIEECRKLVWLVDSKGLIVDXRKGSLQPFK

SEQ ID NO: 214073 - protein, 112 aa, Glycine max
  Clone ID: PAT_MRT3847_35333C.1.pep
MCTLEPDVIGIRGFELRLIRCTITFSQPSDSRHELESLDGHINDLLNSIERGNYVEALTSEPSFSLVFRLDGHESLPLDADRVYSELVHRAESFLRDAAAAEQRRRAILVMC

SEQ ID NO: 214074 - protein, 40 aa, Glycine max
  Clone ID: PAT_MRT3847_35334C.1.pep
FIFLTITVTRVLNRRTIAINVTMCCPSFNSYSVLNYSLRF

SEQ ID NO: 214075 - protein, 41 aa, Glycine max
  unsure (1)..(41): unsure at all Xaa locations
  Clone ID: PAT_MRT3847_35335C.1.pep
KNQRNQENSCLTCSSLKGKTPPINPXXXLSSVFXPPRAAAA

SEQ ID NO: 214076 - protein, 43 aa, Glycine max
  unsure (1)..(43): unsure at all Xaa locations
  Clone ID: PAT_MRT3847_35336C.1.pep
GVPIEQNSNGDALSIFGTKLVFAVALQPKNQSVRPWGAPXXGA

SEQ ID NO: 214077 - protein, 74 aa, Glycine max
  Clone ID: PAT_MRT3847_35337C.1.pep
GKNSLFPWIDRWGNRHMASRLRHSTLIFVGGLVTYVGAGSPTLTVFLVILYALLPNFVDSHALVMHRANLLKCP

SEQ ID NO: 214078 - protein, 351 aa, Glycine max
  Clone ID: PAT_MRT3847_35338C.1.pep
MDKGKGAKALATSLQNLDLNPPSNIKSKSSITIAHPQFPGLLPKKAKPLSLVSLCVGVLGRHLEDIIADLSEIAINLPADIKIAVAAIARRRKLLNDDVLIALADTSWEILDVSGSDVSDFGLIKAAEVCRFIKALDISRCTKITANGISELVKHCHLLETLRCGGCPRSDNTARRCLGIFKPKFDDYVEEDSWEELDTKEIASGAQSLRWLVWPNIDKNSLEDFSTECPRVVVNPKSSPFGFKGTEVPQEALQNILLDDEVVKDIDPRTWTMHGFALKPMSPSLSSTELSVAEKFRLAFVERDNRLAPKRAKNARQHQRRAVRELMLISTRAKAMVLASQVSKSLHGRSS

SEQ ID NO: 214079 - protein, 77 aa, Glycine max
  unsure (1)..(77): unsure at all Xaa locations
  Clone ID: PAT_MRT3847_35339C.1.pep
KGAFGYGPHFSLPKRGRPPPSGMSVXKTIDLVYKGLMEIKSRLVVAPPPFVFKILAKEGPKKYPWRESVKDTPVPSA

SEQ ID NO: 214080 - protein, 106 aa, Glycine max
  unsure (1)..(106): unsure at all Xaa locations
  Clone ID: PAT_MRT3847_3533C.1.pep
FKLWTTDEINFDLTEXERREVIKSRGIDGDDLAKXADEFEQHVANESLKDQIHAGDKVNLTKVNKTGIRYEPIXQSVGGEDKLLTDGKLYEGQHMAALNIGGRGRH

SEQ ID NO: 214081 - protein, 50 aa, Glycine max
  Clone ID: PAT_MRT3847_35340C.1.pep
VTKPKKMQDILGEHSGTVIVLEHAVLTMCYRLRIYYFARIPDSKKALPFR

SEQ ID NO: 214082 - protein, 180 aa, Glycine max
  Clone ID: PAT_MRT3847_35341C.1.pep
HELSVGDPSRKIVEMIFQKAWFNKSKPVKKVRTVLRVSYSEEVLERFEKYREYVKKVASEQNPRNPRSAVDGNELLQFYGTTMRCFQGKSAKKVHDLCKDPSCYLCQIIQFNFNTRYAEIHLNTSDKESRNRTTATARVHNVKKAAIICRIIAGTAVNAVDGEYEGSHSTGVGEMQFPLP

SEQ ID NO: 214083 - protein, 35 aa, Glycine max
  Clone ID: PAT_MRT3847_35342C.1.pep
NTSEKTTECYHYVIILGLSALIKSRRNYSTYDECI

SEQ ID NO: 214084 - protein, 132 aa, Glycine max
  Clone ID: PAT_MRT3847_35343C.1.pep
MGRLFVTHLEGQIYSCKHCRTHLALYEDIVSKSFHSRHGRAYLFSNVVNVTVGVNEDRQMLTGMHTVADIFCVGCGSIVGWRYETAHEKSQKYKEGKSVLERYKVSGPDGNNNNNYWVSHEAHVGGSDADDA

SEQ ID NO: 214085 - protein, 44 aa, Glycine max
  Clone ID: PAT_MRT3847_35344C.1.pep
KKKDLLQIKIQTPLKAFNNDPLSPMSILGKKKINWGFHFGVPSI

SEQ ID NO: 214086 - protein, 106 aa, Glycine max
  Clone ID: PAT_MRT3847_35345C.1.pep
HMLYIVILKGLELQVLHVILPSVIKVIREIGSPHSLVLKGLCVHFFFYFLGRIMVPPKRWCLFYIKRAYASKAQYVVFGFALYKYPNIVVIQKLLKISHKIVVVLA

SEQ ID NO: 214087 - protein, 83 aa, Glycine max
  Clone ID: PAT_MRT3847_35346C.1.pep
VRSGAKRIGSILRRSLHKKIQVKSPLQQHMRKVGVNVGMEKVRVSIGSRGRLAPRGQVGSGRRGGAKDIQQKNSQKEKERGWI

SEQ ID NO: 214088 - protein, 222 aa, Glycine max
  unsure (1)..(222): unsure at all Xaa locations
  Clone ID: PAT_MRT3847_35347C.1.pep
MTSPLVAEGAAITAFRSVMLRVHQAAERSGSKPDRVRVVAVSKTKPVTLIQQLYDAGHRYFGENYVQEIIEKAPQXGVPNLAMVQSVDNQKVANHLDRMVSTLGRNPLKVLVQVNTSGEESKSGIDPSNCVELAKHVKLSCPNLVYSGLMTIGMPDYTSTPQNFQSLSNCRTEVCKALEMPEEECELSMGMSGDFELAIEMGSTNVRIGSTIFGPREYAKKQ

SEQ ID NO: 214089 - protein, 531 aa, Glycine max
  Clone ID: PAT_MRT3847_35348C.1.pep
ARYITRYGIRRLFPFGPHSSCYLFSTSKVTCELEADTVSPVIDISLNRNSFPEGFIFGAGSSSYQFEGAAKDGGRGPSVWDTFTHNYPGKIMDRSNGDVAIDSYHHYKEDVGMMKDMNLDSYRFSISWSRILPKGKLSGGINQEGINYYNNLINELMANGIQPLVTLFHWDLPQALEDEYGGFLSPRIVKDFRDYADLCFKEFGDRVKHWVTLNEPWSYSQNGYANGRMAPGRCSAWMNLNCTGGDSSTEPYLVTHHQLLAHATAVRVYKTKYQASQKGLIGITLVANWFLPLRDTKSDQKATERAIDFMYGWFMDPLISGDYPKSMRSLVRTRLPKFTTEQSKLLISSFDFIGLNYYSTTYASDSPQLSNARPSYLTDSLVTPAYERDGKPIGIKIASDWLYVYPRGIRDLLLYTKEKYNNPLIYITENGINEYDEPILSLEESLMDTFRIDYHYRHLFYLQSAIRNGANVKGYYVWSLFDNFEWSSGYTSRFGMIFVDYKNELKRYQKLSALWFKNFLKRKTRLYASSK

SEQ ID NO: 214090 - protein, 223 aa, Glycine max
  Clone ID: PAT_MRT3847_35349C.1.pep
MTSPLVAEGAAITAFRSVMLRVHQAAERSGSKPDRVRVVAVSKTKPVTLIQQLYDAGHRYFGENYVQEIIEKAPQLPQDVEWHFIGHLQSNKVKTLLGGVPNLAMVQSVDNQKVANHLDRMVSTLGRNPLKVLVQVNTSGEESKSGIDPSNCVELAKHVKLSCPNLVFSGLMTIGMPDYTSTPQNFQTLSNCRTEVCKALEMPEEECELSMGMSGDFELAGMN

SEQ ID NO: 214091 - protein, 89 aa, Glycine max
  Clone ID: PAT_MRT3847_3534C.1.pep
FCLGEAGPTSEGQISQISGLARPSSRHKPKPHTRDIPLSHLLTLIANMESETLYDNPMLLFTPHQSTSRRDLSMSPTPQVTSATADEDL

SEQ ID NO: 214092 - protein, 120 aa, Glycine max
  unsure (1)..(120): unsure at all Xaa locations
  Clone ID: PAT_MRT3847_35350C.1.pep
MSSIELNVKQQGEPTRVQPAQETEKGLYFLSNLDQNIAVPVRTVYCFKSGSRGNEDAAQVIKEALSKILVPYYPMAGTLMISLEGKLIVDNPGEGAVFVEAEAXCDIEEIGDLTKPDPDA

SEQ ID NO: 214093 - protein, 436 aa, Glycine max
  Clone ID: PAT_MRT3847_35351C.1.pep
MSDGQESDKNIEIWKIKKLIKALEAARGNGTSMISLIMPPRDQISRVTKMLGDEFGTASNIKSRVNRQSVLGAITSAQQRLKLYNKVPPNGLVLYTGTIVTEDGKEKKVTIDFEPFKPINASLYLCDNKFHTEALNELLESDDKFGFIVMDGNGTLFGTLSGNTREVLHKFTVDLPKKHGRGGQSALRFARLRMEKRHNYVRKTAEYATQYFINTATSQPNVSGLILAGSADFKTELSQSDMFDPRLQAKILNVVDVSYGGENGFNQAIELSAEILSNVKFIQEKRLIGKYFEEISQDTGKYVFGVEDTLKALEMGAVETLIVWENLDINRYVLKNGTTSEIIIKHLNKEQDADQSNFRDSATSAELEVQEKMPLLEWFANEYKKFGCSLEFVTNKSQEGSQFCRGFGGIGGILRYQLDIRSFDELSDDEVYEDSD

SEQ ID NO: 214094 - protein, 51 aa, Glycine max
  Clone ID: PAT_MRT3847_35352C.1.pep
IGHKFQGASKFQEGSQFCRGFGGIGGILRYQLDIRSFDELSDDGEVYEDSD

SEQ ID NO: 214095 - protein, 67 aa, Glycine max
  unsure (1)..(67): unsure at all Xaa locations
  Clone ID: PAT_MRT3847_35353C.1.pep
FPTMVENASIRDIHGVYLEQYLVLDDLTVGHLAYEDLKLIMLNAXKAIFIFARNTLPPTALLMSAIY

SEQ ID NO: 214096 - protein, 36 aa, Glycine max
  Clone ID: PAT_MRT3847_35354C.1.pep
ASKNYWKIIQFDNQSLLFGHDLKQNLQSLLDGAGYK

SEQ ID NO: 214097 - protein, 65 aa, Glycine max
  Clone ID: PAT_MRT3847_35355C.1.pep
GFKRHTVQPSLYFAISQPWLLTFVYEPYGWMNLTGQTCKIESHLYRFLHLCTCIEELFGRELTND

SEQ ID NO: 214098 - protein, 53 aa, Glycine max
  Clone ID: PAT_MRT3847_35356C.1.pep
SAHHMNIYYYAFKGKRELTSLTEEYNERREDTFVVTRFTTVRAMEEAKERCSC

SEQ ID NO: 214099 - protein, 43 aa, Glycine max
  Clone ID: PAT_MRT3847_35357C.1.pep
HQKSEHSCHLNHKFSLPHSIMLPIHNLDTCYLDFYHGPCSLSQ

SEQ ID NO: 214100 - protein, 109 aa, Glycine max
  Clone ID: PAT_MRT3847_35358C.1.pep
GSSTNTTHIITIAKPNHCFLATGSIDPKPSNPNPFIIPNYNSSKPCSPTNHQSFTVLIGYRTNLSPPAENGCHLAVNSKPLNSHTSKTVLFQRLELFRTKRNLSVREES

SEQ ID NO: 214101 - protein, 47 aa, Glycine max
  Clone ID: PAT_MRT3847_35359C.1.pep
HLICLIMSLNLNQHRYSSMSSSMSSPPSSQFSPQILSLTYIHLFMSS

SEQ ID NO: 214102 - protein, 52 aa, Glycine max
  Clone ID: PAT_MRT3847_3535C.1.pep
SFSRRMDGRRMEYHLSRNILLFPQSRSSKIRLSSVWAPSVVFSQPYSSRIPS

SEQ ID NO: 214103 - protein, 78 aa, Glycine max
  unsure (1)..(78): unsure at all Xaa locations
  Clone ID: PAT_MRT3847_35360C.1.pep
XGSXLPXFXKPQXDXXPXXXNIIXXRWNCNXLHFXGTLIPKXCQYXPXDXDSLXPKNLYXSIRRQLYTXDQIMHAPIX

SEQ ID NO: 214104 - protein, 592 aa, Glycine max
  Clone ID: PAT_MRT3847_35361C.1.pep
INSRLDIVQAFVEDTALRQDLRQHLKRISDIERLMHNIQKRRAGLQHIVKLYQSSIRLPYIKSALERYDGQFSTMMRSRYLEPIELWTDDEHLNKFIGLVEASVDLDQLENREYMISPSYDSILANLKDQQELLESQIQNLHRQTADDLDLPMDKALKLDKGTQFGHVFRITKKEEPKIRKKLNTQFIILETRKDGVKFTNTKLKKLGDQYQQILEEYKSCQKKLVDRVVQTAATFSEVFESLAEIISELDVLLSFADLASSCPTPYTRPDITSSDEGDITLEGCRHPCVEAQDWVNFIPNDCKLVRGKTWFQIITGPNMGGKSTFIRQVGVNILMAQVGSFVPCDNASISVRDCIFARVGAGDCQLRGVSTFMQEMLETASILKGATDKSLIIIDELGRGTSTYDGFGLAWAICEHIVEVIKAPTLFATHFHELTALALENVSNDSQKQIVGVANYHVSAHIDSSTRKLTMLYKVEPGACDQSFGIHVAEFANFPESVVTLAREKAAELEDFSPSATSLNHTTQEVGSKRKRAFEPDDMSQGAAKARQFLEAFVALPLETMDKMQALQEVKKLTDTLEKDAENCNWLQQFL

SEQ ID NO: 214105 - protein, 70 aa, Glycine max
  Clone ID: PAT_MRT3847_35362C.1.pep
LGVNYSQRAYPRIFGHEASVIVESVREGASVFDEGVILVAILNLECGVVISVKVDITNLGEGPTLQSKHK

SEQ ID NO: 214106 - protein, 70 aa, Glycine max
  Clone ID: PAT_MRT3847_35363C.1.pep
TTNKETKNGGRGVIIKQRIQFLIRHHNTLTTSNTIIIHYRTLKKNDIMNKMCLSSLGKHNIFIYISGSSI

SEQ ID NO: 214107 - protein, 62 aa, Glycine max
  Clone ID: PAT_MRT3847_35364C.1.pep
YIKVSNIYLKLHPKKVLLSLCPSPHSLQLYMFQAFRFKLSNALLLKMFDLLKLRSSDLIELL

SEQ ID NO: 214108 - protein, 143 aa, Glycine max
  Clone ID: PAT_MRT3847_35365C.1.pep
MGRGRGKGKKLTISNEEDPISGEDEKVPKQKRRGRPQKLFKDDFDEEEIEEILEEDACGGDNVKNVVSSKEMKNLNTTKHGRKRKRNLQEKIEPIDEKINVVVNGSNTDELTKCNGFRHNGSRRKSKPRRAAEAGVQCKQDYA

SEQ ID NO: 214109 - protein, 41 aa, Glycine max
  unsure (1)..(41): unsure at all Xaa locations
  Clone ID: PAT_MRT3847_35366C.1.pep
NLVLGREXGEXKVDRVXXAXVXLLRFCFASSMPGNHVETGS

SEQ ID NO: 214110 - protein, 91 aa, Glycine max
  Clone ID: PAT_MRT3847_35367C.1.pep
QDVYKIGGIGTVPVGRVETGVLKPGMVVTFAPVNVTTEVKSVEMHHEALSEALPGDNVGFNVKNVSVKDVRRGNVAGDSKNDPPMEAAGFT

SEQ ID NO: 214111 - protein, 159 aa, Glycine max
  unsure (1)..(159): unsure at all Xaa locations
  Clone ID: PAT_MRT3847_35368C.1.pep
AIQAEYIWIDGDGGLRCKTMTIEKGKPSSVSELKEWNFDGSSTNQAPGENSDVYLRPVAMFKDPFRGGDNILVLCECYDNDGTVNKSNYRAHAKKVMDSAKEHEPWFGLEQEYTLFDADGQVYGWPKMGFPGPQGPYYCGVXAGKVFARDFMEGHYQAS

SEQ ID NO: 214112 - protein, 48 aa, Glycine max
  Clone ID: PAT_MRT3847_35369C.1.pep
LDHSFDPFSESLSRKANTWLLKGALSLCSLDTLLTVKSMFSNTKKEQR

SEQ ID NO: 214113 - protein, 165 aa, Glycine max
  Clone ID: PAT_MRT3847_35370C.1.pep
ISPDNSSSDGADVPKGRPMSPGTLALMCDEQDTMFMTAASPIAPMAHACNTSSQFPYGQGMTEVYPEQERIVLTKFRDFLNRVITMGEINETKCSSLTRNELESQKDPIINGIGNASSEIVLQQGATSNGVTKPAVSPLATTSTSMIPGNIAENGETKVKIEKEI

SEQ ID NO: 214114 - protein, 45 aa, Glycine max
  Clone ID: PAT_MRT3847_35371C.1.pep
SKIGGINKNLQGLCSVKGVSQYAIKLGNFLKKLFVGGFFVIKPFL

SEQ ID NO: 214115 - protein, 50 aa, Glycine max
  Clone ID: PAT_MRT3847_35372C.1.pep
RLEYLTHTHRTFSNLYDYLLLPSSNGEIVYPKWVVKHKHTLLRKPLNFSS

SEQ ID NO: 214116 - protein, 254 aa, Glycine max
  Clone ID: PAT_MRT3847_35373C.1.pep
MATRRYEFGRMNEASHPDSIRAALAEFLSTCIFVFAGEGSALALRQIYKEPGSSAGELVVIALAHAFALFAAISASMHVSGGHVNPAVTFGALLGGRISVLRAVYYWVAQLLGSIVAALLLRLVTNNMRPQGFSVSIGLGAFHGLVLEIALTFGLMYTVYATAIDPKRGSIGSIAPLAIGFVVGANILAGGPFDGACMNPARAFGPAMVGWRWHYHWIFWVGPFIGAALAALLYEYVMVPIEPPHHQPLAGVDY

SEQ ID NO: 214117 - protein, 116 aa, Glycine max
  unsure (1)..(116): unsure at all Xaa locations
  Clone ID: PAT_MRT3847_35374C.1.pep
NLGGSMGATAQSIWKSNVLQSGVHHAVNSDSYRGIFGSDGEKYAGYVQHIIYFGTSGNVACFISEAIQGVGEILELAPGXLPAAHNPIKKAGGLFIADVCQAGFGRTGSHCWGFEA

SEQ ID NO: 214118 - protein, 63 aa, Glycine max
  Clone ID: PAT_MRT3847_35375C.1.pep
NEVLARKNWKIKAKRRTGRKVKDKRGKREKKKRMKRMKRTGKNYDKKRKITKSKTRESKKNKA

SEQ ID NO: 214119 - protein, 48 aa, Glycine max
  Clone ID: PAT_MRT3847_35376C.1.pep
HCESTPCLLGHIYHYIGWLIILFSLCLYLTPSSELTFSFFRRHISLIM

SEQ ID NO: 214120 - protein, 780 aa, Glycine max
  unsure (1)..(780): unsure at all Xaa locations
  Clone ID: PAT_MRT3847_35377C.1.pep
MGSTKLNLGFFFTTTLVFLCGTVLQDGVPSALEHSVILVEFLLQFVSMEKNSLDYSPLLSPRGDENGSETTASPLVSATKWTLKTLILMIFVLWAAFIFCLPAKPVNTVFSIWNXSQPFFLFWTAPILIIAFLAIAHLILTGEDQLQGKKTSKLPRFRLWTFPVLVKGPFGVVSATELIGIVLVLLYVIWALYAYTVRALDFISEFDVSSFRDKSIIMFKVMGLRTGAIGLMCLAFLFIPVSRGSVLLRYIDIPFEHATRYHVWLGHLTMVIFTVHGLLYVVAWAMEGHLVQELVQWKDIGVANLPGVISLLAGLLMWVTSLPGVRTWNFELFFYTHQLYVVFIVFLALHVGDFVFTMAAGGIFLFVLDRFLRFCQSRRTVNVISSRCLPCCTXELVLMRKPGMGXYNALSLRYNALSFIFVQVRELSWLQWHPFSVSSSPLDGKNHLAVLIKVLGKWTEKLRQRITDVDAQKDSCVITTSVEGPYGHEVPYHLMYENLILVAGGIGLSPFLAILSDILHRVREGKPCQSRNILLVWAVKKSNELPLLSTIDMESICPSFSNKVNIDIHIYVTRESDPPLEEGYSYKPIKSSFCPMASDCGMSVLVGTGDNFWSGLYVISSTVGFVILLALLYVYYVTPFHIETWWYRGLLYVICMVASVVIFGGSVVAMWHIWEKQNSLKDKSNDTKVDKIHQNGSLATKDQSQVSSIAKSTVIHYGSRPNFKEIYDSISEKWGLVDVGVIVCGPSTLQTSVAEEIRSHSMTRQRHHSIFHFHSHSFDL

SEQ ID NO: 214121 - protein, 223 aa, Glycine max
  unsure (1)..(223): unsure at all Xaa locations
  Clone ID: PAT_MRT3847_35378C.1.pep
MEKNSVDYSPLLSPRGDETAIKTTSFLVSATKWTLKTLILVIFVLWTTFIFSLPAKPVNELFSKWNDLNRDTPFGVTGSIFLVFTAPILIIAFLAIAHLILTGEDQLHGKKTSKLPRFRLWTFPVFVKGPFGVVSATELIGIVLVLLYVIWALYAYTVRALDFISEFDVPSFRDKSIIMFKVMGLRTGAIGLMCLTFLFIPVSRGSVLLRYIDIPFXHATRYH

SEQ ID NO: 214122 - protein, 208 aa, Glycine max
  unsure (1)..(208): unsure at all Xaa locations
  Clone ID: PAT_MRT3847_35379C.1.pep
METEERNQKDCKASEPEFFLQWGNRKRLRCVRVKDPRISARLNGGIRRKLGSAMEHHRSGLTVPEKEHHHHHHHQQLNRLTRNSDGAILRSSAGETRKSASPEKEDRYYTSXGGEGINGEERALVWPKLYITLSSKEKEEDFLAMKGCKLPQRPKKRAKXQKKSLLLVSPGAWLTDMCQERYEVREKKSNKKRPRGLKAMGSMESDSE

SEQ ID NO: 214123 - protein, 55 aa, Glycine max
  Clone ID: PAT_MRT3847_3537C.1.pep
TACRRRQMAIVRNPSIRKDTEGFILAKFGLGSYNACTDEEGGLLARRQGGDLTNL

SEQ ID NO: 214124 - protein, 218 aa, Glycine max
  Clone ID: PAT_MRT3847_35380C.1.pep
METEERNQKGCKASEPEFFLQWGNRKRLRCVRVKDPRISARLNGGIRRKLGSALDHHRSGFTVPEKEISHHHHHHQQPNRLTRNSDGAILRSSAGETRKSASPEKEDRYYTTRGSAEENGKVTGDGNNGEERALVWPKLYITLSSKEKEEDFLAMKGCKLPQRPKKRAKIIQRSLLLVSPGAWLSDMCQERYEVREKKSNKKRPRGLKAMGSMESDSE

SEQ ID NO: 214125 - protein, 84 aa, Glycine max
  Clone ID: PAT_MRT3847_35381C.1.pep
NKRNFDKKRPTTSANYVQCDLLQLLHTKTQFFFNNPSEHAEPSLGTRNPLATLPFSLLHYLFPNRRQFLKLKKADHKRQAFIFE

SEQ ID NO: 214126 - protein, 110 aa, Glycine max
  Clone ID: PAT_MRT3847_35382C.1.pep
ICIIDNFFTKGCCLFRETQILRLEAKSFTHFGGYGNRREEPERLQGFGARVFFVEGEQEEAEMCEGEGPSDFSEAQRWNQKETWFLNGASSLWPHCARKRTSSPSSSSTT

SEQ ID NO: 214127 - protein, 218 aa, Glycine max
  Clone ID: PAT_MRT3847_35383C.1.pep
METEERNQKDCKASEPEFFLQWGNRKRLRCVRVKDPRISARLNGGIRRKLGSAMEHHRSGLTVPEKEHHHHHHHQQLNRLTRNSDGAILRSSAGETRKSASPEKEDRYYTTRGSAEENGKVTGGEGINGEERALVWPKLYITLSSKEKEEDFLAMKGCKLPQRPKKRAKIIQRSLLLVSPGAWLTDMCQERYEVREKKSNKKRPRGLKAMGSMESDSE

SEQ ID NO: 214128 - protein, 57 aa, Glycine max
  Clone ID: PAT_MRT3847_35384C.1.pep
KTIKSDGVAGLNSVYNVSFVQRIENRGLYFAMYDSLNPGILDVGLKDIHFAQILLGW

SEQ ID NO: 214129 - protein, 53 aa, Glycine max
  Clone ID: PAT_MRT3847_35385C.1.pep
IAQSKEQHYSQKKQHTHKTDKHTNNNAGQSKLNRNKTHELLTLTHNLQKVINN

SEQ ID NO: 214130 - protein, 106 aa, Glycine max
  Clone ID: PAT_MRT3847_35386C.1.pep
MEELRKLEKVQSMLEFMESHSRGVSNSDQHSNRFLANFILFLIEPCGDLSINHKCSLLSHFIPTVSSTSSFEFAFAFAFSFHFPFAFAALICIPRRRVSTPPFHHL

SEQ ID NO: 214131 - protein, 165 aa, Glycine max
  unsure (1)..(165): unsure at all Xaa locations
  Clone ID: PAT_MRT3847_35387C.1.pep
LQSISQQTVWDQMVTGRTPLNFDSSKQSFCQFSIDLLGGGILVDKSGDWITLIHNCPIRNLLXVAAWKRGCLMVKIVMSGNAAANRSEWASLVQVFLTNSNRTEHFDACKWTKVEPHSWELIFAXEVCGPNNGIEMWGSVWADHSSWNLSFLIDIPKQSTVFDIL

SEQ ID NO: 214132 - protein, 68 aa, Glycine max
  Clone ID: PAT_MRT3847_35388C.1.pep
PSPFKIEKRVQSCSQSGFFPFWKVGRGGLFCYLGKLGKAEVVPSPKRKKRPGFAQFKCLECHSPWCAF

SEQ ID NO: 214133 - protein, 45 aa, Glycine max
  Clone ID: PAT_MRT3847_3538C.1.pep
YSNLEFIRVINKNYGTHWQMHIIRANTPKDQITLDLYLTRRLSVK

SEQ ID NO: 214134 - protein, 44 aa, Glycine max
  Clone ID: PAT_MRT3847_35390C.1.pep
RPSFIIIPAPHPCNSHATLHCRFSAYLLPPDLQGICSAMGANTT

SEQ ID NO: 214135 - protein, 42 aa, Glycine max
  Clone ID: PAT_MRT3847_35391C.1.pep
MSNCGCGSICSCGSNCGCNKYSFDLSYVEKTITETPVLGCGP

SEQ ID NO: 214136 - protein, 139 aa, Glycine max
  Clone ID: PAT_MRT3847_35392C.1.pep
RPSKKEWSDIVAATKNGFGLTGTVATGGIGPTMGLVDIGECEDAYLFRLSLPGVKRNEREFSCEVGTDGKVLIFGVTTTGENTVSRYSQVFEMQTRNLCPPGQFFVSFQLPGPVDPHQFSGNFGIDGIFEGVVMKGKCT

SEQ ID NO: 214137 - protein, 169 aa, Glycine max
  Clone ID: PAT_MRT3847_35393C.1.pep
ARDFASSPATLPLNPQPSESAPDPLPQSATPPSSTPIATNPNPNPTLLPPPPALLFPAGTPPQVPGVLPPSFRPLAPQFSPVPSPNPAFQSPAVPPPGVTGAAVAVPPTQMQQMLSYQIQPGNPALRTFAPIPNGYAAAPTITPAGGSFIHSFNRLMFLCESAFKFDLI

SEQ ID NO: 214138 - protein, 88 aa, Glycine max
  unsure (1)..(88): unsure at all Xaa locations
  Clone ID: PAT_MRT3847_35394C.1.pep
YTFEEVVQHNQTNDCWLIIPGQVLDVTHFMEDHPGRDQVLXCATGKDATNDFPYVWHIHSPRDMMVKYYIGQIDASTKPLKQTYIAPH

SEQ ID NO: 214139 - protein, 84 aa, Glycine max
  Clone ID: PAT_MRT3847_35395C.1.pep
PFLNKWKWQYYFSHTNTNNITLYILHITLDIHLNNLTQRLQQLILPLITLPHHLHVFTTIVLLPIPRLQNALLCAPISNFHNTQ

SEQ ID NO: 214140 - protein, 57 aa, Glycine max
  Clone ID: PAT_MRT3847_35396C.1.pep
PLIISLFKLGSPILLFLVQCVMFPGVGLKRKFRLICLFFFFFLSLKQFVLKTPRLSP

SEQ ID NO: 214141 - protein, 65 aa, Glycine max
  Clone ID: PAT_MRT3847_35397C.1.pep
NPPKVECNLQSNLWYNPLKLEPAPQWGGKKNLIFQSFGLVFNWGQVPKNRHKFQKQVIFNGKRPR

SEQ ID NO: 214142 - protein, 79 aa, Glycine max
  Clone ID: PAT_MRT3847_35398C.1.pep
VYWASGLGYCMTLMQTFLTFLDYWNAIHCCFQFIEFIWRRFLVIYKDTYLCIFFRPPRHAPFYATPSHLSLWWLFGFPL

SEQ ID NO: 214143 - protein, 159 aa, Glycine max
  Clone ID: PAT_MRT3847_35399C.1.pep
MQKRNALALQQRMIEDEIALCDKKIQRMLTSGEDDLELSIESLIEGCNDTWVRNQGRTCQHLEDQHLPPYIKQRRLTEAVLIMQSPCEELDGICRENSWLLPIYRVSESNGGFQATVAVKGLDFECSCGGNLCAHPHEARDSAAAQMLANLRNMAKSDH

SEQ ID NO: 214144 - protein, 88 aa, Glycine max
  Clone ID: PAT_MRT3847_3539C.1.pep
EEEKLLFFARYITKTLFLNNTVGDDIFQILSNFYGTFYRYNLSDNGTHMDPIGCASLDHFLKFLYRRISPYISSQQTIWANSSHSAAF

SEQ ID NO: 214145 - protein, 210 aa, Glycine max
  Clone ID: PAT_MRT3847_353C.1.pep
MGGVFYHEEKPPNHTKRCKFIAGTLKEVFSHCQTFSCLRLSTASLEEECPIIDDVDEVIVSEVRSQVMEKQKHKPSPLREGFSLAYSPATRELYVTHSHTMAPQARVVVGDEEHDEREEFFSVKSCLSCCSSSAVSDQAFYSVKTNLSRCSSMNEVEVSEYWRRSIIQEFCHCEGWPFGPTRKAVLLPPLPKSPSESWLSRKIQRSTKVT

SEQ ID NO: 214146 - protein, 354 aa, Glycine max
  Clone ID: PAT_MRT3847_35400C.1.pep
MAMHGTSCLVPSVLELAKQPIIEVPERYVHANQDPHILSNTISLPQVPIIDLHQLLSEDPSELEKLDHACKEWGFFQLINHGVDPPVVENMKIGVQEFFNLPMEEKQKFWQTPEDMQGFGQLFVVSEEQKLEWADMFYAHTFPLHSRNPHLIPKIPQPFRENLENYCLELRKMCITIIGLMKKALKIKTNELSELFEDPSQGIRMNYYPPCPQPERVIGINPHSDSGALTILLQVNEVEGLQIRKDGKWIPVKPLSNAFVINVGDMLEILTNGIYRSIEHRGIVNSEKERISIAMFHRPQMSRVIGPAPSLVTPERPALFKRIGVADYLNGFLKRELKGKSYMDVIRIQNEIGK

SEQ ID NO: 214147 - protein, 102 aa, Glycine max
  Clone ID: PAT_MRT3847_35401C.1.pep
NHRLPQCVLLFGGHWFKVKHGQPGGKHLRYSRNFLNPMIMWLGRGKHPRSRLLQVSLTSPPERVVYVRNKRSQSKFESWPISLPPLLQAYGAYTKCPRNASG

SEQ ID NO: 214148 - protein, 106 aa, Glycine max
  unsure (1)..(106): unsure at all Xaa locations
  Clone ID: PAT_MRT3847_35402C.1.pep
MRTTTPGAINNLEWGFEDKTLFKKANLTIXRCKKITIICPNGYGKSTLLKLIMGFEKPTGVQIFLTEHKVLPNYFXHNHASALYLEKTPLNTVDEAPHDLMIDDIK

SEQ ID NO: 214149 - protein, 63 aa, Glycine max
  unsure (1)..(63): unsure at all Xaa locations
  Clone ID: PAT_MRT3847_35403C.1.pep
IDPKKGNLGIIAPIAIGFIVGAKILLAGAFXGRTMNPTATLRLTVMIWTWTNPSDRMDKASHA

SEQ ID NO: 214150 - protein, 72 aa, Glycine max
  Clone ID: PAT_MRT3847_35404C.1.pep
SQKPKETLWKRSRLALVHRDKREKNALAGPCQIITIIFQILLDPFRTVKALNNIMLPYPFFCCSIIIITMYY

SEQ ID NO: 214151 - protein, 265 aa, Glycine max
  Clone ID: PAT_MRT3847_35405C.1.pep
MAKESGSSKIEMLEISNEAMAEAQSSKIEMLEINNEAMAEAQSSKTVTMKPAEAEESKTETQKITDEESKNVPIAATEEESKKLSITKVEESKNAATATTEGEKEEAKVSLKTLDGVTFEVEAWIAKEMETVQAYIDDTSADTSAAIAIPLHNVAGRELARMVEYCKEHRRASVSAGNLKEFEERFAAALNLYEMKDLIIAANYLNTKKLLESLSRCIAKAIKNKSVEFVRDYFGVTNDYTTEEEAQYRETNAWAFRNVDEDSRN

SEQ ID NO: 214152 - protein, 67 aa, Glycine max
  Clone ID: PAT_MRT3847_35406C.1.pep
GSSRERPPFFFFFGYHHEPKTMGCICVFYMWLANAVTILYLLPCDCYYDHYELNAICLGLQNKKTDN

SEQ ID NO: 214153 - protein, 310 aa, Glycine max
  Clone ID: PAT_MRT3847_35407C.1.pep
SAKASVEEKTKIFPEIIPHARALMTDVFGNYVIQKFFEHGTESQRKELANQLTGHVLPLSLQMYGCRVIQKALEVVDVDQQGQMVSELNGAIMKCVRDQNGNHVIQKCIECVPQDKIQFIVSSFYGQVVALSTHPYGCRVIQRVLEHCDDQNTQQIIMEEIMQSVSTLAQDQYGNYVIQHIVEHGKPHERTTIISKLAGQIVKMSQQKFASNVIEKCLAFGSPEERQILVNEMLGTSDENEPLQAMMKDPFGNYVVQKVLETCDDRSLELILSRIKVHLNALKRYTYGKHIVSRVEKLITTGERRIGLLA

SEQ ID NO: 214154 - protein, 318 aa, Glycine max
  unsure (1)..(318): unsure at all Xaa locations
  Clone ID: PAT_MRT3847_35408C.1.pep
LNEHVNLLKKTASSANLRSKLHSTGNASSFPKARVTGHVPSAYLVNSKLNSVYNNNLETALRLRRDGQSLDAQGNHVGPELHSSTLNPHLIQCLQQSSDYSMQGMSSSGYPLQMRNFPDASHGDLEGLRKAYLETLLTQQKQQYELPLLSKSGLTNGFYGSQPYGLGMPYSGKQIANSTLPSLGSGNPLFENERISRLSSMMSRPFELPXXIDHVVQFSTDQYGSRFIQQKLETASVEEKTKIFPEIIPHARALMTDVFGNYVIQKFFEHGTDSQRKELASQLTGHVLPLSLQMYGCRVIQKVPFKLYVILLFTIYEH

SEQ ID NO: 214155 - protein, 71 aa, Glycine max
  Clone ID: PAT_MRT3847_35409C.1.pep
NEPLQAMMKDPFGNYVVQKVLETCDDRSLELILSRIKVHLNALKRYTYGKHIVSRVEKLITTGEKRIGLLV

SEQ ID NO: 214156 - protein, 59 aa, Glycine max
  unsure (1)..(59): unsure at all Xaa locations
  Clone ID: PAT_MRT3847_3540C.1.pep
FTNHDNKHITTLLYMLKHLILAQHHSTQNPTSDEXSIIIINYKAFNLQLHQIASQITKN

SEQ ID NO: 214157 - protein, 238 aa, Glycine max
  Clone ID: PAT_MRT3847_35410C.1.pep
TTRPPTPSAHASGCEKTTEGGLTNGFYGSQPYGLGMPYSGKQIANSTLPSLGSGNPLFENERISRLNSMMRSSVGGSGGSWHADIGNNIEGRFASSLLDEFKNKKTRPFELPDIIDHVVQFSTDQYGSRFIQQKLETASVEEKTKIFPEIIPHARALMTDVFGNYVIQKFFEHGTDSQRKELASQLTGHVLPLSLQMYGCRVIQKALEVVDADQQGQLVSELNGAIMKCVRDQNGHHV

SEQ ID NO: 214158 - protein, 78 aa, Glycine max
  unsure (1)..(78): unsure at all Xaa locations
  Clone ID: PAT_MRT3847_35411C.1.pep
WEASEPLGAQGSRKSYNRGLIYPPFSNFRKKSAHIVGKITARANNLGRAXNMPGPKDLVKYAKSCMASPGNQNHRWVF

SEQ ID NO: 214159 - protein, 58 aa, Glycine max
  Clone ID: PAT_MRT3847_35412C.1.pep
LYFEHTNCTGLQHPSNVICNKTITIVTRASTTDMTKTTDPQWCKEIHIRYSVHQGNHI

SEQ ID NO: 214160 - protein, 74 aa, Glycine max
  Clone ID: PAT_MRT3847_35413C.1.pep
KKKKKKKKKKKKKKKKKKKKKKKKKKKKKKKKKKKKKKKKKKKKKKKKKKKKKRGALFKKKKFSTPGPLKQFFF

SEQ ID NO: 214161 - protein, 108 aa, Glycine max
  Clone ID: PAT_MRT3847_35414C.1.pep
RLREDDRRVCTSNCFLHSFSTSVMTNLKCKITFQINYRFWLLEWLILKVKKYIYFRKSAGSHCPICSCRNSPIGATPDMKSRELFLFSLYKFVQKTRLKNADIWWRQL

SEQ ID NO: 214162 - protein, 120 aa, Glycine max
  Clone ID: PAT_MRT3847_35415C.1.pep
SNQCDTQSCSLSLVRYNHGSINSSGDPVYTYHSCSRSFCSRFTLNPSIIHIKCGLGHTLRVLVGCGLCCRVLLHQVLPGFLILITISLTCYFLVFRRRGRFWAHGAKLRVVLGVAQPLWH

SEQ ID NO: 214163 - protein, 78 aa, Glycine max
  Clone ID: PAT_MRT3847_35416C.1.pep
QKLFVGFCSKGPPGNWGPISNQIGRFPSPGFNAEQVSFMPKRFPITGAFYGGFSMIGLSSQSFPFLGDAILPLVPPLF

SEQ ID NO: 214164 - protein, 33 aa, Glycine max
  unsure (1)..(33): unsure at all Xaa locations
  Clone ID: PAT_MRT3847_35417C.1.pep
GLSRDGGEISMKLVPIFYVMEXSFYYIVQKCVV

SEQ ID NO: 214165 - protein, 97 aa, Glycine max
  Clone ID: PAT_MRT3847_35418C.1.pep
VGFKISTLRASGPGFGFFVIVVAFVQAAFHCFSVLVVVGVNFLGCARPLSVLFLGPGPCFCLCSRDCHLWPPFFSFVLYGESSKNPPLLGRPARGLR

SEQ ID NO: 214166 - protein, 72 aa, Glycine max
  Clone ID: PAT_MRT3847_35419C.1.pep
CCSLYYNFFVFCRVILLCRKTNLEKGDIDRKVLVLIRESAVLLCWQFLALVASLYLLACSVILIVIVPAIFC

SEQ ID NO: 214167 - protein, 43 aa, Glycine max
  Clone ID: PAT_MRT3847_3541C.1.pep
VFLDSISYLNEVSFSIYFLFISFGDESKWLLFQFLYVFRLISH

SEQ ID NO: 214168 - protein, 53 aa, Glycine max
  Clone ID: PAT_MRT3847_35420C.1.pep
QSKTQTWLPNNFNLQTVKLNDQQPILIYLSPDEQKNILHTYILYVYSSSPSPT

SEQ ID NO: 214169 - protein, 46 aa, Glycine max
  Clone ID: PAT_MRT3847_35421C.1.pep
GSSSIRSDRELRLFFFFLYWRGRDYINIPHILIHQLIIYFSPLNYC

SEQ ID NO: 214170 - protein, 170 aa, Glycine max
  Clone ID: PAT_MRT3847_35422C.1.pep
WCCKECLLFITNVLPPRGAFFIWVTLPFWQAPSGPPNSCKGFGRAGSPAFSFLPPAKQEPNLVFFRTPPPNPGGFFCPGLGWGLPQVSRKKLPVPRFFWFKVDPNALSPPGFFWRVRPSPGPQILAPGGWGLGLLPPWGGWVFPNIGKFPGLKKGSLGFFDLSPRGGFFF

SEQ ID NO: 214171 - protein, 66 aa, Glycine max
  Clone ID: PAT_MRT3847_35423C.1.pep
KMSVRHVCLPSCQVGVWEGLYISAVTSEVVSITATNSVPPMIQGVANYPRIQTYICKWFPKKLYAS

SEQ ID NO: 214172 - protein, 122 aa, Glycine max
  unsure (1)..(122): unsure at all Xaa locations
  Clone ID: PAT_MRT3847_35424C.1.pep
GTTKASISLSSWEEFSSAHRNCIFYSGPSVLLLSASGLVCLCILDGMEGESVSSSSKSQNDVIEKMSLNEGMEDGNGEAPEHGLQKLVQFNEEVEEPKVGMTFPSEQEXFNYYTNFAQHKGF

SEQ ID NO: 214173 - protein, 53 aa, Glycine max
  Clone ID: PAT_MRT3847_35425C.1.pep
CISLDAMQQTNFSLLDLFGLKPQSCLAPGKKMAMILSVKCFNSVSPEKKKHNK

SEQ ID NO: 214174 - protein, 43 aa, Glycine max
  Clone ID: PAT_MRT3847_35426C.1.pep
IKTLKLCSYWLDLRLKIMVSSASIHLKQKNIYKKILNQYLPWC

SEQ ID NO: 214175 - protein, 49 aa, Glycine max
  Clone ID: PAT_MRT3847_35427C.1.pep
AYPHCTPCGVYSRITARFDIDANGILNVSGKNKTTALKNKIRITNDKGR

SEQ ID NO: 214176 - protein, 97 aa, Glycine max
  unsure (1)..(97): unsure at all Xaa locations
  Clone ID: PAT_MRT3847_35428C.1.pep
SSRIFSSCDIICVTGWTATPMHYVQATIDWSRTSYGCVPRTYSVLNGQNPLVLNRXKRKLTFPHSTCRSVXRTPDYICCGAGAKYSFTVELPNAGFS

SEQ ID NO: 214177 - protein, 94 aa, Glycine max
  Clone ID: PAT_MRT3847_35429C.1.pep
FLINIFFFYNFYFLRWFLKIFFPSSSSYGKHLMHYLVQTVSGQTIKLTKKPPPINPFFTPPHGGPKRYASSFIVSLFFIHITFAPCPKMTFFTY

SEQ ID NO: 214178 - protein, 36 aa, Glycine max
  unsure (1)..(36): unsure at all Xaa locations
  Clone ID: PAT_MRT3847_3542C.1.pep
NPSQSNFTYSKLRXSKXXIPXNLQMSLXMXLIWXLE

SEQ ID NO: 214179 - protein, 59 aa, Glycine max
  Clone ID: PAT_MRT3847_35430C.1.pep
ITLFAKIGLHQITIKQKGRGSSCTCIKMYYIIFCIECTTLNMITSLFLTSCSHVGWIFR

SEQ ID NO: 214180 - protein, 182 aa, Glycine max
  Clone ID: PAT_MRT3847_35431C.1.pep
GIPGSTQRPQKADANLQSKPPQERAEDKASSSSGTRPKEVVESVPVQNQAAAQKLLQKLNHPSQNDRHHRGWKHRGKGKQEDPVVFTLEEYENRKAQTKPSIKDWDLDISRDEHLARQLQNQLDLEDSRVGRGTYEDKAQDIRMSMFAYERDSDSSHQMGQGGRGRGRGRGKGRGRGRGRHG

SEQ ID NO: 214181 - protein, 109 aa, Glycine max
  Clone ID: PAT_MRT3847_35432C.1.pep
FAEESVTASITGTTEPSEPPYSILSFSLPASPLFLLSFSFLPSPLMMDFRSSIASCTTINHDFRIYNCGLFSSARDFPMRFQPNTLICNLFSILCLDLCAGGSVWWHCH

SEQ ID NO: 214182 - protein, 240 aa, Glycine max
  Clone ID: PAT_MRT3847_35433C.1.pep
MESLLSVTSSSLKFLVRASWDTQQRLPYNPNAPRKLKNNIVATPTPTAPITRKREQYISDLLKRATPLPTIGHIEEVQDETYLGYEKWLPTPPKVVKPRSVFNAATLAYIGDCIYELYARRHFLFPPLSIEEYNDRVMAVVRCEAQDALLQKLLESNFLSDQERDVLRWGKNIVSSKTKTKKRAGAAVYNRASSLETLVGYLYLTNVNRLEKLMLELGFSVDSSVALNVEEIVAGELNNG

SEQ ID NO: 214183 - protein, 88 aa, Glycine max
  Clone ID: PAT_MRT3847_35434C.1.pep
HRVTAKPDHWIKHLISHIIHRHLTDNEEKREKVGIDRWIKSIYFKLYIYISIGVLNIHTKASSLVSHLTSTCMIGMDNKESLLQSLYH

SEQ ID NO: 214184 - protein, 299 aa, Glycine max
  Clone ID: PAT_MRT3847_35435C.1.pep
LLDHFKHSGPNGQHVCMVFEYLGDNLLTLIKYSDYRGLPIAMVKEICFHILAGLDYLHQQLSIIHTDLKPENILLLSTIDPSKDPRKSGAPLILPNSKDKMAMESAGMKDTKMLNGDLVKNHKKKIKRKAKQAAHGCVEKEASEGVEGNAETSGAVESSPNASSAREQTSSSAGTSQLSDADGTKLKEQGNKRGSRSMRQKLLASVDLKCKLVDFGNACWTYKQFTNDIQTRQYRCPEVILGSKYSTSADLWSFACICFELATGDVLFDPHSGDNFDRDEMFKVLFKFRDSCWFSCAAT

SEQ ID NO: 214185 - protein, 91 aa, Glycine max
  Clone ID: PAT_MRT3847_35436C.1.pep
IFRIHTCSWRRTCVVLSKKVDLFCETKNRITSNAFTLGYFFNPHLKVVLNQILDLTKLFNTFVSFVFISLWHFIFVIEVALAAPDKNLLCF

SEQ ID NO: 214186 - protein, 79 aa, Glycine max
  Clone ID: PAT_MRT3847_35437C.1.pep
LYTTIFIKMSIFMLGTYDPKSLGLKSFILYIICSLVLNPSVSTCHIHYILLNVLSLASCITTNCYKFAFVFLIIYVVHS

SEQ ID NO: 214187 - protein, 107 aa, Glycine max
  Clone ID: PAT_MRT3847_35438C.1.pep
MDIRNCCLSCKRTIMKSGSYCCNEIEHANCKSSKMRWKVLWMKLKKEKKKLFESASSPLQVPYDPYTYSQNFDQGTAKDEPDNFSRSFSVRFADPSTSRVLMKKRVV

SEQ ID NO: 214188 - protein, 91 aa, Glycine max
  unsure (1)..(91): unsure at all Xaa locations
  Clone ID: PAT_MRT3847_35439C.1.pep
XKXLPXDLHPHNQXHXQPRTPLXLFAXRAXXXXTTDXXQXPQRXLPYXXXXXYPXXWXTQXPLPEAPGKXSPXXALXNPXXXPGPXXXPXI

SEQ ID NO: 214189 - protein, 128 aa, Glycine max
  Clone ID: PAT_MRT3847_3543C.1.pep
MVTYVVTTTLFLFLAMAITTLCLQEIEVLQMAQNHVSQAKNLIGNSLRLHGLGSLSLSDQTSATIALSDCAKLYEESESRLSHMMSQESYYAKEDALTWMSAVMTNHRTCLDGLKEKGYIEAHVLDRN

SEQ ID NO: 214190 - protein, 51 aa, Glycine max
  Clone ID: PAT_MRT3847_35440C.1.pep
ENKLFSLNWETTHTQHFWGSPQTGGIMEHIVRFALTYIDGGRGITENWDPA

SEQ ID NO: 214191 - protein, 134 aa, Glycine max
  unsure (1)..(134): unsure at all Xaa locations
  Clone ID: PAT_MRT3847_35441C.1.pep
GCVLGRQEGILGDKTGDCITLIQNLPISNXMRAAAWNIGXLMVKIAMSENASDKRIDCTSLVQGIVTNNGXTEHSCACYRTKSEPHSWEXSSPIKVSDPNTGSDKHSAELANXNSXHLILLIVKPKQLTGSDIL

SEQ ID NO: 214192 - protein, 57 aa, Glycine max
  Clone ID: PAT_MRT3847_35442C.1.pep
HDLYLLSFNYILPLFSFFMNVKRYTLPAPSYIFPLGLTYHCRGHGCPCNPLLYAFAN

SEQ ID NO: 214193 - protein, 98 aa, Glycine max
  Clone ID: PAT_MRT3847_35443C.1.pep
KPNRPPSISLGNPCFTAQSFSLPNLYSVRGTLQGGEYSLSLPRKPPSRMGPLLNPQTYALHEHIPLNYLQAFSIYTSINRWPLGCITTFHDNGPPTPQ

SEQ ID NO: 214194 - protein, 111 aa, Glycine max
  Clone ID: PAT_MRT3847_35444C.1.pep
TTETSLLEFVLTWTSIREPRGKIEDGQIFTITINNDKYISKYIKIQKLLSSSQEAKSKIELVNPLVPTFYFLHEQDTKSQLDKHIMCRQATLQYTTLKRLFGNEYKQVNDT

SEQ ID NO: 214195 - protein, 245 aa, Glycine max
  unsure (1)..(245): unsure at all Xaa locations
  Clone ID: PAT_MRT3847_35445C.1.pep
PRVRLVEVINNTNNTSFAQENGSAQREANSALVEPSKSSLSIAGGLSASRGASKGYNTDLSSSQNLNSPVRDVENPYGTSGVTTRSSFLGLTGLLNLGNTCYMNSAIQCLVHTPEFARYFREDYHREINWQNPLGMVGELALAFGELLRKLWAPXRTPIAPRPFKAKLVRFAPQFSGHNQHDSQELLAFLLDGLHEDLNRVKHKPYIKSRDADGRPDEEVADELWNHCLNSSADQVFLMQRLELH

SEQ ID NO: 214196 - protein, 210 aa, Glycine max
  unsure (1)..(210): unsure at all Xaa locations
  Clone ID: PAT_MRT3847_35446C.1.pep
TRPEKQNFRISFRPRFDIKWTAPTAEGSXTDARGDTHXSHTDSITVNSASAAFDLYMRVQTSYPDDXTHKREEYNIPRAIPLTIDGVELDLRMRGFEFFSLVSAYAMDSPRPLHLKASGRIKFQGKVLKPNGNISEQNFEMTRQHVQMLEKGIADSLIGEVSISGLKLNQLMLAPQLSGLLRLSPXGIKLDASGRTDESLAVEFVGPLQP

SEQ ID NO: 214197 - protein, 97 aa, Glycine max
  unsure (1)..(97): unsure at all Xaa locations
  Clone ID: PAT_MRT3847_35447C.1.pep
QFSYTALEIEFIKSXVVAGILGTFFXVWYALQKHWLANNTLGLAFCIQGIEMLSLGSFKTGAILLVVVFLSIFSNYWFSKLLFKKTYIPIILWLKIN

SEQ ID NO: 214198 - protein, 57 aa, Glycine max
  Clone ID: PAT_MRT3847_35448C.1.pep
TRPGPSLRSPTVTLQLRPNSRGVLIEFIEKGWRASYCLKTTSLQTTHFLKPTMFATE

SEQ ID NO: 214199 - protein, 91 aa, Glycine max
  unsure (1)..(91): unsure at all Xaa locations
  Clone ID: PAT_MRT3847_35449C.1.pep
MNAPDRYERFVVPEGTKKFSYEMDTKIINASSFTIEXEEHTINNILRXLHRDPNVLIVRYKLPHALQYKIIVRVSVFSLLLLLLPSFNFME

SEQ ID NO: 214200 - protein, 42 aa, Glycine max
  Clone ID: PAT_MRT3847_3544C.1.pep
FVHSSGNAARDTAQLLVYLKKMGQEKEHHKIVVIGHVHYGKF

SEQ ID NO: 214201 - protein, 52 aa, Glycine max
  Clone ID: PAT_MRT3847_35450C.1.pep
KNFNDIFVVVMYPSLFPSHFFSFLFLMKFVFHSYWLTYMETIHKILCYQFLW

SEQ ID NO: 214202 - protein, 47 aa, Glycine max
  Clone ID: PAT_MRT3847_35451C.1.pep
AFNEETTTSDYWSLTVTGLMQQIYATRDLSDYLWDSTDVANNINDRL

SEQ ID NO: 214203 - protein, 41 aa, Glycine max
  Clone ID: PAT_MRT3847_35452C.1.pep
LDRVDDGGSIPCLGVVVMNEVVDDVILGFWINQGEVEAIVS

SEQ ID NO: 214204 - protein, 62 aa, Glycine max
  unsure (1)..(62): unsure at all Xaa locations
  Clone ID: PAT_MRT3847_35453C.1.pep
DIIQEMFNELVYYHCLTEVYLEAFTDCALNDIDLGEYVXTHDDCMDVMSSKGLSLLSVDVAG

SEQ ID NO: 214205 - protein, 113 aa, Glycine max
  Clone ID: PAT_MRT3847_35454C.1.pep
GCLLFFLSCYSFLLFFSLFSKKTSAPLFFSQVNIKKKFVSCPAPKLILAIAAAIPFLFFVLPPGGKTLFFPGKENPTFLFPQLPPLGRTSGPPFNKKGVGSPQSLAFIVKPPN

SEQ ID NO: 214206 - protein, 70 aa, Glycine max
  Clone ID: PAT_MRT3847_35455C.1.pep
FKSITSYMNNNNNSANKKNLNNNQKVWKQPKYYTTNRSSDKKHNYTTKILITLLQSRLSTSVLQDFLHQF

SEQ ID NO: 214207 - protein, 138 aa, Glycine max
  unsure (1)..(138): unsure at all Xaa locations
  Clone ID: PAT_MRT3847_35456C.1.pep
SAFSFPLLVLRLLERAGVXLRLSWLLCVGLVSVGWGFAAFXWGLVVGGVGVRFRSPFGFFCVRLAGPLAPPRSSFSAPLLRPPPSFSLLWLLLGCLLRWPCGSCGWGCRSGSRAGRLSVSGAHWLNXLLWLPWLKKGV

SEQ ID NO: 214208 - protein, 86 aa, Glycine max
  unsure (1)..(86): unsure at all Xaa locations
  Clone ID: PAT_MRT3847_35457C.1.pep
MAAASSMALSSPSLAGKAVKLGPSAXPEVGRVSMRKXVHQAVSSXSPWLRPRRSXXNLGQFXWXXPSXLTGEFPGXXGWDTXGFPT

SEQ ID NO: 214209 - protein, 114 aa, Glycine max
  Clone ID: PAT_MRT3847_35458C.1.pep
EMDDEDVNESLRETNQFDEEFLRDILQQPEEGGEDLKNSSIMSSLFPTTYILSFDKSAAELLPTETDHRDYSSSQLPSSSNSRANHGTNKKPRSASESLDHIMSERNRRQELNS

SEQ ID NO: 214210 - protein, 32 aa, Glycine max
  Clone ID: PAT_MRT3847_35459C.1.pep
ASIKTLRGERYYISKEPYGAALLQMTITNPSA

SEQ ID NO: 214211 - protein, 45 aa, Glycine max
  unsure (1)..(45): unsure at all Xaa locations
  Clone ID: PAT_MRT3847_3545C.1.pep
GQXRHVAHRGGADVMYESGLKHGSYKRRRGSVSSGTXLTQSETTX

SEQ ID NO: 214212 - protein, 337 aa, Glycine max
  Clone ID: PAT_MRT3847_35460C.1.pep
MAKETSVVYLYPSKSQVWGENFDHKKLVITTLAANGKKEESNGAPNDTYPAFPGWYADVSWPGEAHTYKIEKILFHGKSEFQELLVFESSRQGKVAILDGHIQLTENDEFAYQEMLTHLALCSIPDPKKVLLIGGGDGGILREISRHSSVEHIDICELDQMVIDVYSEFFPDIAVGYEDPRVHVHISDGVAFINSVPEGTYDVIISDAFPAMGHSADVLADECFLESVAKALRPGGVFSAPADSLWHKNFVVADTIANCKKIFKGSVNYAWTTVPTYASGVIGFMLCSTEGPPVNFKHPINKLNPEKNGVAKGPTKFYNPEIHAAAFCLPSFVDKVD

SEQ ID NO: 214213 - protein, 92 aa, Glycine max
  Clone ID: PAT_MRT3847_35461C.1.pep
MERRRVMEHLKTYPAFPGWYADVSWPGEAHIYKMEKILFHGKSEFQELLVFESDTSRHGKIAIPDGYIQLTENDEFAYQEMLIHLALCSIPN

SEQ ID NO: 214214 - protein, 187 aa, Glycine max
  unsure (1)..(187): unsure at all Xaa locations
  Clone ID: PAT_MRT3847_35462C.1.pep
FDAGHSADVLADECFLESVGKALRPGGVFSAPADSLWHKNFVVADTIANCKKIFKGSVNYAWTTVPTYARHFLSNYMFTFLNFIYXEKLLVTSVSLFLFTSGVIGFMLCSTEGPPVNFKHPINKLNPEKNGVAKGPTKFYNPEVIFQITCLFCLYKNLNLFLSCLLFLLLLQIHANFSHQSFVDKVD

SEQ ID NO: 214215 - protein, 37 aa, Glycine max
  Clone ID: PAT_MRT3847_35463C.1.pep
TLRELNQDQAPFVQLIVSLVMSCLVREVGMRIGDKMN

SEQ ID NO: 214216 - protein, 95 aa, Glycine max
  unsure (1)..(95): unsure at all Xaa locations
  Clone ID: PAT_MRT3847_35464C.1.pep
YGCEKTTKGPHIGHSFLHILNGDDPIKTTATSKNNLLFNFCHYSDXVKHSXHRYCQNNTAIFSMDCQTNKKYLFXYLIEHIKSITFLPRLKEIYV

SEQ ID NO: 214217 - protein, 61 aa, Glycine max
  Clone ID: PAT_MRT3847_35465C.1.pep
CPGFLQRSLRLFCKPNIRIFFAGLSSSVDLLDISYKVTSWVAKNLYVNCAHVVNIPGLLFT

SEQ ID NO: 214218 - protein, 123 aa, Glycine max
  unsure (1)..(123): unsure at all Xaa locations
  Clone ID: PAT_MRT3847_35466C.1.pep
GSSAAFSALSAFKFDHVQIVVTESGGPSXGDCHVVLANSKQQLMRTSGISSGRSXTVGGSPLMPIADLLVYLFTLFNENQXPKPSSESKLELAYPDERRGDTDAITSVDLVVYLYHAARVKSE

SEQ ID NO: 214219 - protein, 105 aa, Glycine max
  Clone ID: PAT_MRT3847_35467C.1.pep
MDTNQQRRRVSEAKKKKGFGVSEAKKLKGVLQSKSLVRTCSNRKERRVFKKEFPGSKKYLRSTKLRQERGLRAIGQFELVYGRVEVEAARVLDLATLGVRIAFDR

SEQ ID NO: 214220 - protein, 44 aa, Glycine max
  Clone ID: PAT_MRT3847_35468C.1.pep
PEAKPKKKPAKASRVSTRSSPGKRTAPVAKPATNKVAPAKKAPC

SEQ ID NO: 214221 - protein, 105 aa, Glycine max
  Clone ID: PAT_MRT3847_35469C.1.pep
NIILETVKPNSSSPNSNLCMVMADPKTRILICFPTHFFWAAKIGLQKIKFETDFKVVTGYFSKPSIGSSDFNVILSKCRAKLSFVPNLTVSLIRRQTNLVNPYSS

SEQ ID NO: 214222 - protein, 168 aa, Glycine max
  Clone ID: PAT_MRT3847_3546C.1.pep
MAGVREQDQYMPIANVIRIMRRILPAHAKISDDAKETIQECVSEYISFITAEANERCQREQRKTVTAEDVLWAMEKLGFDNYAHPLSLYLHRYRESEGEPASVRRASSAMGINNNMVHPPYINSHGFGMFDFDPSSQGFYRDDHNAASGSGGFVAPFDPYANIKRDAL

SEQ ID NO: 214223 - protein, 122 aa, Glycine max
  unsure (1)..(122): unsure at all Xaa locations
  Clone ID: PAT_MRT3847_35470C.1.pep
LQGTHRIIGVKHMGATGGVPEMTGTLMDLAXNCSCRGPAMFDVYTFXSKDCEVCNPACTESMTMALNPSPCSDAWSMINLQHSGLHXDIIRVTRWTVTPMQDVQVAVDWCIYFQECAPRTYS

SEQ ID NO: 214224 - protein, 39 aa, Glycine max
  Clone ID: PAT_MRT3847_35471C.1.pep
ARARVSPSCQSTSPGNRNNRSWCENTTEWDDTHVSEIAG

SEQ ID NO: 214225 - protein, 99 aa, Glycine max
  unsure (1)..(99): unsure at all Xaa locations
  Clone ID: PAT_MRT3847_35472C.1.pep
DDYGWDTARLSADPETFYGDRELXVIHSSWAMLGALDCVFPDLCDRYWVEYXEAVWCKARAQIFMEGGLDYXGNPILVHAHSILAICASQVIANGCCEG

SEQ ID NO: 214226 - protein, 281 aa, Glycine max
  Clone ID: PAT_MRT3847_35473C.1.pep
MAFLFFPSKGIFLSSFLLCFAILSLGAEARRSPSPISSLISKELFDSIFIHKDNNACPARNFYTYDSFINASKRFPRFGTTGSPATRKREIAAFLAQISHETTGGWATAPDGPYAWGLCFKEEISPQSNYCDSTNTQWPCYPGQSYKGRGPIQLSWNYNYGPAGKALGFDGLRNPDVVSNNSLIAFQTGLWFWMTEQKPKPSCHNVMVGKYVPTQADIAANRTKGYGLVTNIINGGLECGIPDDSRVNDRIEYFKRYATLFKVDTGPNLDCAYQKSFQTVA

SEQ ID NO: 214227 - protein, 118 aa, Glycine max
  unsure (1)..(118): unsure at all Xaa locations
  Clone ID: PAT_MRT3847_35474C.1.pep
MAVLTIITHDSSAVVGQLRSVSVYSVKSDHEYHGGLSLASAALMAVLTTSLYNTDESPRRTFEASITDLTDHVVMYVRMLEATVMVXMLLLSMMIDXLSHYMRKLRSLKMTMGTIHKH

SEQ ID NO: 214228 - protein, 111 aa, Glycine max
  Clone ID: PAT_MRT3847_35475C.1.pep
AIFLLTLQYCGARHYTSFAAHHGLVNILITTPAGHRLYLQYTSTSRFLPLIILKIKLLIQHAFEVFLKGVVAVFCMWKSAPQFMLKGAGYNPSYNGFMWSSMSIKPFPGQA

SEQ ID NO: 214229 - protein, 44 aa, Glycine max
  Clone ID: PAT_MRT3847_35476C.1.pep
LHKVFIPNSHWFNLDLDKNLERCIVDIQAQTQFYNPLMQSGQSN

SEQ ID NO: 214230 - protein, 168 aa, Glycine max
  Clone ID: PAT_MRT3847_35477C.1.pep
MSCNGCRVLRKRCSERCSLRSSLNWIDCPHAQAHATLFLAKFFGRSDLMFFISSVPLNNRPALFQSLLFEACGRTVNPVNGAVGLLLSGNWHVCQAAVHTVLAGGVLRPLSEVVAPSESMFSHQFQSLASDSLKRSSDATAPVMSTMVSGESEICSSDDGKKLLNLFV

SEQ ID NO: 214231 - protein, 96 aa, Glycine max
  Clone ID: PAT_MRT3847_35478C.1.pep
KGRLSAIKKSLKEAKMFAQKFFGLENTFRHDQPQSEDSLKLELSLGPQRKSLFFPMQNMYIQESSQLETSFQPLKNLRENGKTVLKLNANSLHQNQ

SEQ ID NO: 214232 - protein, 70 aa, Glycine max
  Clone ID: PAT_MRT3847_35479C.1.pep
HVVDACLIINKHIIKSLAILAHHAWAKLKRSPHLTPCEGRDEGLTPPLALERPTPPGFFSNGGPLREFQL

SEQ ID NO: 214233 - protein, 177 aa, Glycine max
  Clone ID: PAT_MRT3847_3547C.1.pep
MGCTSLLRSPKKEEQEVPDANSNQPYTYEDFNILDELEGVLSTKEEQDSSLPQQKSSSSEFHWDFMEWEEFQPPNIEEEGEDENEGKENRRSKCLFDEEEQEMKIENNNNIVGFWEMDDEKMVALNLNLNYQEVLDAWSDRGSLWADDCSLSFATNNAYYMGEVPVLEEERARREAC

SEQ ID NO: 214234 - protein, 90 aa, Glycine max
  unsure (1)..(90): unsure at all Xaa locations
  Clone ID: PAT_MRT3847_35480C.1.pep
HTVPKLTVLYEYHVAHGXEMVPTIAWSMPIEYIDXTDVHNLNXRKNATLMHRAHMNQLILNGNDSVQIVDKMATVAAALLARRTAFIDAF

SEQ ID NO: 214235 - protein, 68 aa, Glycine max
  Clone ID: PAT_MRT3847_35481C.1.pep
VICFWASISLFLFKKISFVRKTSHQSCCLPRQNSTFQLLYFNNVQEIYIDKKITSRLSRKEIHGGTIM

SEQ ID NO: 214236 - protein, 139 aa, Glycine max
  Clone ID: PAT_MRT3847_35482C.1.pep
DQLLDDADSTSKKLGKDRAEKESYLFRSLLNNNALVAFGSDWPVVDINPLSGIKTAMKRRPPNWQSAWIPSECISLDDAIKAYTISAARASFLDKDLGSLSPGKLADFVILSTDSWKDFAEDASANVEETYVSGVRAYP

SEQ ID NO: 214237 - protein, 119 aa, Glycine max
  Clone ID: PAT_MRT3847_35483C.1.pep
LPFRHPSSPWPGLSPRFGLARPACLGYLIGQSFCLGSRLSVGGRAVTSFPSRPCTAIPVPWVRIAPVTGIWLVLANSHSAPVVALFSLVFFRGGITLVVLHSYMIRVYRTLIFYNSLLS

SEQ ID NO: 214238 - protein, 40 aa, Glycine max
  Clone ID: PAT_MRT3847_35484C.1.pep
IKRERERQREIDPITSTCTLRALLTKQCLRKHMGRYLVVH

SEQ ID NO: 214239 - protein, 99 aa, Glycine max
  Clone ID: PAT_MRT3847_35485C.1.pep
QKEGGRRAHFTPPDACRRLLLCLKSQREGTKENLEIKKQMKPTRAQRGACTKTQTRAPFVAMVTHNPCGNLEKKTPSRRGALAGGIPQRKGGATKPFFK

SEQ ID NO: 214240 - protein, 35 aa, Glycine max
  Clone ID: PAT_MRT3847_35486C.1.pep
IRLELQRHYSVQSQTFKRRSHTTQSIAILIRLLFR

SEQ ID NO: 214241 - protein, 67 aa, Glycine max
  unsure (1)..(67): unsure at all Xaa locations
  Clone ID: PAT_MRT3847_35487C.1.pep
YHLTLGNFLLKKVPLRXPSQILXDPHQRXXLIPPSRRLPNGTWESCXXXYXXXXQXXLXXPXQXPXA

SEQ ID NO: 214242 - protein, 132 aa, Glycine max
  Clone ID: PAT_MRT3847_35488C.1.pep
TACVKFLQFSYLVSRSVSHIPLLQLILPLYPAISLQCVRSRTTVASCTMRSLPLDFPGLFLFFVFRGCYGSLSWFVFVFFSVVVTVLFVCMVSLCLCPLRFLSLSLALSTQYSVFAPPPPQAGATATRVERQ

SEQ ID NO: 214243 - protein, 364 aa, Glycine max
  Clone ID: PAT_MRT3847_35489C.1.pep
MQDPSSNPNSNPNPNPHNANAASQLPRPPQATASTAVAGAFSSSLFARSGGPHHRRAHSEMSFRLPDDMMDLSPSDPFAGGSSTASMEEIGSEDDLFSTYIDVDKLSGANGSGGAGNGADPTGEREKSPARPRHRQSSSVDFGEIMDAKKAMPPDKLAELWTIDPKRAKRILANRQSAARSKERKARYIQELERKVQTLQTEATTLSAQLTLYQRDTSGLSTENTELKLRLQAMEQQAQLRDALNEALKKEVERLKVATGEGMSHTESFNLGMHQMPFSGSNFIPIPPQSGPSGHQNMQMPPFGHSPSTMPTHQLHQTSSHPYSEILQNEQLGRFQGLDISSKGSTLVKSEGPSLSASESSSTF

SEQ ID NO: 214244 - protein, 120 aa, Glycine max
  unsure (1)..(120): unsure at all Xaa locations
  Clone ID: PAT_MRT3847_3548C.1.pep
LGIRLEDLHETPFTTTVALHYATXFSSALGPLPATPVYKSDFDWPMEPARAYRWNLTAHAARPNPQWSFHYRMTTTASVGMVATTAPLMNGKVPSVCNSDSYAHPDTTLKPADDFNIPGM

SEQ ID NO: 214245 - protein, 68 aa, Glycine max
  Clone ID: PAT_MRT3847_35490C.1.pep
SIFTNTLPTSQQQYNISSIAHVHSSVLVGGLNSRTFLVAYYPLVAIKIHLFITFFKFSPSLHESPNPS

SEQ ID NO: 214246 - protein, 36 aa, Glycine max
  unsure (1)..(36): unsure at all Xaa locations
  Clone ID: PAT_MRT3847_35491C.1.pep
MCLVFVCNEEERVLGRQTTPXACPYCGGMVQAINVE

SEQ ID NO: 214247 - protein, 108 aa, Glycine max
  unsure (1)..(108): unsure at all Xaa locations
  Clone ID: PAT_MRT3847_35492C.1.pep
NKQTKTQKKKIKKKKKKKKKKQKIKTKQNNKKNNQNQKQKKKKTQXKKKSHNHLTLTSNLNTITMLQIIPNYLNNKTTPFLLSHSLTPTVSFKIQTTIKSPYTPSTPS

SEQ ID NO: 214248 - protein, 148 aa, Glycine max
  unsure (1)..(148): unsure at all Xaa locations
  Clone ID: PAT_MRT3847_35493C.1.pep
VFGDHKLPTDGTGYEGKHIPVSSISAWENTCWSNTPKGQEETLSAXASASRTAMVSTHSKPQATAMHEGAIEIIIDSFAGPDCNICXGQQLQADTYHTNPDTASCLIXDAPCRRGRPIPVVTSPNTTDPIGPYMSSKLQHTSATTHGD

SEQ ID NO: 214249 - protein, 62 aa, Glycine max
  Clone ID: PAT_MRT3847_35494C.1.pep
LPLTSRPIKLIIPIIYNNHLECDHIHHTNSHCSTTSSHKDPFLLISPIPQHHIQFLPWLHLQ

SEQ ID NO: 214250 - protein, 33 aa, Glycine max
  Clone ID: PAT_MRT3847_35495C.1.pep
ERNVFKGDLKEFVIDGGCRVNRINYFSCQRGLK

SEQ ID NO: 214251 - protein, 119 aa, Glycine max
  Clone ID: PAT_MRT3847_35496C.1.pep
LLKIKKSIYYGMDYYKSKIRKNLALWSRLSLMQRLTPPRGSPTFAAAAHRVRLLLPSRRTLLRSRRISVSLEICPFPNYTSSENDPPAPSRSSTDRPCATKRHRRKESHRSPNLRRSQS

SEQ ID NO: 214252 - protein, 59 aa, Glycine max
  Clone ID: PAT_MRT3847_35497C.1.pep
METGRPVGDVTIYDLTKAYTFKLKSSSETERSNLINVAISAKQKELARYLPIWHYITTV

SEQ ID NO: 214253 - protein, 529 aa, Glycine max
  Clone ID: PAT_MRT3847_35498C.1.pep
NFEIKFLRPPYSNSVNPQMAVENIKVHEESNVAPPPSSTQSLSLPFTLYDTLFLRFPSIDWIFFYSLNAQQSEPSFFYANVIPKLKASLSHTLQHYPPLAGNILWPSDSTIPIISYTPGDAVSVVVAESNAEFNHFIDYSVPHEATESRFLVPHLESSDSRASALALQITLFPNKGFSIGISIHHAAVDGRSSTMFIKAWASLCQQIIMNDETTSQSVVVPSLVPELEPSFDRTLIKDPGNWNRFLLAKWCPNIANGNSDGDDNGKRTVKILPSPPRLKEAFSATSVIKPTIEEAVRATFVLTREDLEKIKKRVFSKWDQVKDPEPEPESESESKSTVNSSSKPPTLSSFVLACAYSVVCIAKAVHGVEKEKQKFGFWFPVDYRARLEPPIPDTYFGNCVWSHLVDAEPLDFIKEEGLVLVAKSINRKVKTLHKEEVFGKSSSRFMALAKEGAEMLGVSMSNKFMVYETDFGWGKPAKVDIINLDRASNLTMGLLDSKDGDGGVEVGLVMHQKVMDLFGTIFHGGLKDE

SEQ ID NO: 214254 - protein, 63 aa, Glycine max
  Clone ID: PAT_MRT3847_35499C.1.pep
LRNCYIHKLRTFDYLSNTRGGTAYHIDYPKPYDYSSDWIGATPYSLSRHLCYWRLANTKLDHD

SEQ ID NO: 214255 - protein, 96 aa, Glycine max
  Clone ID: PAT_MRT3847_3549C.1.pep
LLFWIRRKKRLVLQEKPFATPRGLGFVTTPYQSHSCLEKKTHAVLLQSINGSEDAERDLYVAGETPSKGWSLNRRVRGPKKKGFCGGPPRKRNQFP

SEQ ID NO: 214256 - protein, 67 aa, Glycine max
  unsure (1)..(67): unsure at all Xaa locations
  Clone ID: PAT_MRT3847_354C.1.pep
LXXAXXEXVXXAXSXCXHRIGXRCWLPEXVXXXXLGLXNRXRVXXLPXLVGISETPQRPRHXHQPPX

SEQ ID NO: 214257 - protein, 64 aa, Glycine max
  Clone ID: PAT_MRT3847_35500C.1.pep
YCCDVINPVSYYKYLCWKSHFKYCDKVIIKTSLIYVVLEPVINLLSLSQSICTKLHLTYLDIQS

SEQ ID NO: 214258 - protein, 82 aa, Glycine max
  unsure (1)..(82): unsure at all Xaa locations
  Clone ID: PAT_MRT3847_35501C.1.pep
TXRAFSLXGSATRSLWLCXYTHHPIXXXRVTXXYXXSYNCLPNFHKFYYXXRXXXXISSLXPFLLRXXXSXLRXLTLTQLTN

SEQ ID NO: 214259 - protein, 55 aa, Glycine max
  Clone ID: PAT_MRT3847_35502C.1.pep
QFSIDGSKQVNLSIFVVGFCSCFLQCHVREFFIIISELGTFPSPRAPITECEALG

SEQ ID NO: 214260 - protein, 69 aa, Glycine max
  Clone ID: PAT_MRT3847_35503C.1.pep
QAKKVKVATGRHIQVSSLALSANAYTRAKATPLDSTSTICPITLRSTALLALSATKCILPSSQVSAITA

SEQ ID NO: 214261 - protein, 122 aa, Glycine max
  Clone ID: PAT_MRT3847_35504C.1.pep
PRVRFFYPTFIIRVEPFNFRIDLEALVILSCLTGRLLADTVLTSFATTAGVATAPHLYFYYEQEGGSSSPTKITDDFTGMGAIGQVCQIIGSYVDVIFYEGATAIMIVLDELDHYLRIELEV

SEQ ID NO: 214262 - protein, 41 aa, Glycine max
  Clone ID: PAT_MRT3847_35505C.1.pep
FSFSPRLQVWPGFPPAFRCFPIGHAGPLAGTISEFSGRPPG

SEQ ID NO: 214263 - protein, 70 aa, Glycine max
  Clone ID: PAT_MRT3847_35506C.1.pep
DPVYHYALSNSMCKNKTASMSKSVAIAPLGRADPNGRYHGMSLFYGEWRPMAMQLNIIALFHKGRETMTE

SEQ ID NO: 214264 - protein, 105 aa, Glycine max
  Clone ID: PAT_MRT3847_35507C.1.pep
NTKPTFLKSFQKKGKGTPKNRKEKRKDWERKKKWLRTPTIWENSCCECCSVFFLLCSCKKKTKKTNVQRCCVFLKTEQELLTLSLLSLLVVMMAFFSPEIFKFFR

SEQ ID NO: 214265 - protein, 98 aa, Glycine max
  unsure (1)..(98): unsure at all Xaa locations
  Clone ID: PAT_MRT3847_35508C.1.pep
DGIQTQPLHPSIQILHLLQLHPDQFLNSPIIPFCETYKPPTLLHPRTPSPSPLPPSSSPTXPPPPPLPXSSVSAVPPPPPPPRAYHLFFLFVSSPNTL

SEQ ID NO: 214266 - protein, 75 aa, Glycine max
  Clone ID: PAT_MRT3847_35509C.1.pep
LFRHRHGFLIGTSAIIRCKVSEPLRTCKRGLNRSNNFFFHYQRTSVPSSILLSYSAKCVPPSKLQSGFLLWKVKM

SEQ ID NO: 214267 - protein, 79 aa, Glycine max
  Clone ID: PAT_MRT3847_3550C.1.pep
AEDDAAGGQLRPTAQERRHKEGSRRSPRCKRARKAVGESPGCPRRGAEGAWPRPQPSHPGAAGGKGWAPLRTFAGDGAV

SEQ ID NO: 214268 - protein, 135 aa, Glycine max
  unsure (1)..(135): unsure at all Xaa locations
  Clone ID: PAT_MRT3847_35510C.1.pep
ESAVLLASFWRTSLNESESQRFYFDHFEIHPIKIIANFIPGESRSSYSSTQEALRSLIHSVIKVPPIKNMVVELNGVLITHALITMRELFIKCAQHYHXYTMRAIYIAKRSPLLPTNFGSIFDDLALSSLEVFFD

SEQ ID NO: 214269 - protein, 68 aa, Glycine max
  Clone ID: PAT_MRT3847_35511C.1.pep
GSVLRRSNNRRVARNTRSADITQSCVKNSEEKEKTQEKERRKNESSQGRDLHPPNEHEVTKTTQTNAS

SEQ ID NO: 214270 - protein, 48 aa, Glycine max
  Clone ID: PAT_MRT3847_35512C.1.pep
KSFEGTTKHEKDLRSLKKSFEKNDWAKEEIFDPFFTDLLVEFDPNLKI

SEQ ID NO: 214271 - protein, 34 aa, Glycine max
  Clone ID: PAT_MRT3847_35513C.1.pep
LELYRIFYFRRTYSKPDGCEMTHHSLSHSTGTLP

SEQ ID NO: 214272 - protein, 31 aa, Glycine max
  Clone ID: PAT_MRT3847_35514C.1.pep
RQYKLNVTYRGNHCILFFVHPCSNSYYFHHF

SEQ ID NO: 214273 - protein, 46 aa, Glycine max
  Clone ID: PAT_MRT3847_35515C.1.pep
QVTCCCLHQEIRQFSPRLLDLYRGPQYVRGYHGDKVRGSNIECIQS

SEQ ID NO: 214274 - protein, 105 aa, Glycine max
  Clone ID: PAT_MRT3847_35516C.1.pep
MRQLANRFEHLNSWNTDEEFQNKKRTRCQPCPAYLLNLSCPRSLYDLAFEPSKTVKFKDWAPILNFIVKAIKQFWEENVACDPSNGATYMVEDQHHFSSIRYVKV

SEQ ID NO: 214275 - protein, 76 aa, Glycine max
  Clone ID: PAT_MRT3847_35517C.1.pep
FFFFFVFVSLFYWGKGKLVDFQTLSFKAGLCCHPHQTFFHVKRDNRFCLCPTQALPVAIQSKLANKCSVNDPLSRM

SEQ ID NO: 214276 - protein, 101 aa, Glycine max
  unsure (1)..(101): unsure at all Xaa locations
  Clone ID: PAT_MRT3847_35518C.1.pep
HQMGRSLFSTKLFDDTYLPGCTFRARMQCTYAPNVLFIIITLFIIQXITMSRAACACTSTVEGAPRADAELAAGVLGVVYPWVDRTGSLPVALQRTVGGPD

SEQ ID NO: 214277 - protein, 48 aa, Glycine max
  Clone ID: PAT_MRT3847_35519C.1.pep
IVLWCVHRCAIVSYASVSKRGSYISSTVLVRQIWFSVPTIAHMLPLIH

SEQ ID NO: 214278 - protein, 43 aa, Glycine max
  Clone ID: PAT_MRT3847_3551C.1.pep
STDNPLPYSESQVLCHNIHCLEQKKCTMYPMAHSPRRSSSEFE

SEQ ID NO: 214279 - protein, 42 aa, Glycine max
  Clone ID: PAT_MRT3847_35520C.1.pep
SVIWCERLRRRMYVRIMQCLFFNGCLCACPLRIYQASAFRYE

SEQ ID NO: 214280 - protein, 64 aa, Glycine max
  Clone ID: PAT_MRT3847_35521C.1.pep
EFMLPDAKRSRLRAYSLVTADTIHTDTIDQLAYASRRTRLVRRPYGRSEYDSSRCLLWLRDYFP

SEQ ID NO: 214281 - protein, 41 aa, Glycine max
  Clone ID: PAT_MRT3847_35522C.1.pep
NVTRISWTPLGSQNVNINNHVGTFLFVYLSLNTFDVCLGKS

SEQ ID NO: 214282 - protein, 214 aa, Glycine max
  Clone ID: PAT_MRT3847_35523C.1.pep
MEAVLTPHATAQKQPFAPNKNIRMKTPKKNGRGNFICANNRSENFDTYAGLLNPPSRAMSFSYSHPLSASSLFTHHCAQQPPLLPLPHVVSPTYGSGQGLVVVVNKNKNRSRDMSLTPKKSKPTKREEAKKRSVTQSDNRWGPDPKDLPKVVLGMGNSHHDVVSGSVFNLAPPPSSLPLPKFSLRSKLGCNAETAAGGVDDGATNNLRRLVRLR

SEQ ID NO: 214283 - protein, 97 aa, Glycine max
  unsure (1)..(97): unsure at all Xaa locations
  Clone ID: PAT_MRT3847_35524C.1.pep
PIRNIAILWPDEASHPDSLXAGLAECISTLIFVFAGSGPGIPYDKLTDDCAATPSGLSCVFIVHAFYIFDLRFRLRHTSSADTSTPSVLLVFRGGLY

SEQ ID NO: 214284 - protein, 535 aa, Glycine max
  unsure (1)..(535): unsure at all Xaa locations
  Clone ID: PAT_MRT3847_35525C.1.pep
MQLHISPSLRHVTVFPSKGFKEFIKVKVASKRVSYRMLFYSLLVFTFLLRFVFVLTAVDGIDGENKCTTIGCLGKKLGPRILGRRPESTVPEVIYEILDEPLGKEELEGRSDIPQTLEEFMTQLKEGGYDAKTFAIKLREMVTLMEQRTRMAKIQEYLYRHVASSSIPKQLHCLSLTLANEHTNNAAARLQLPSAELVPALVDNSYFHFVLASDNVLAASVVAASLVRNFLRPQKVVLHIITDKKTYYPMQAWFSLHSLSPAIIEVKALHHFDWFTKGKVPVLEAMEKDQNVRSQFRGGSSAIVANTTEKPKVIAAKLQALSPKYNSVMNRXHIRIHLPELFSSLNKVVFLDDDIVVQTDLSPLWDIDLNGKVNGAVKTCSGEDKFVMSKRLKSYLNFSHPLISKIFNPNECAWAYGMNIFDLEAWRKTNISNVYHYWVEQNIKSDLSLWQLGTLPPGLIAFHGYVHVIDPFWHMLGLGYQENTSFADAESAGVIHFNGRAKPWLEIAFPQLRKLWTKYVDFSDKFIKSCHIRAS

SEQ ID NO: 214285 - protein, 92 aa, Glycine max
  Clone ID: PAT_MRT3847_35526C.1.pep
TISSGLLSITLNCVGASMGEKPSLPKKLPATTTVGKLKFLCESFFMLKSMKLKLYLPEEGSPFPMLLDNDTSSIMDLGIGNDSIILVDEESS

SEQ ID NO: 214286 - protein, 92 aa, Glycine max
  Clone ID: PAT_MRT3847_35527C.1.pep
MPLGLILGIGRAFRRKRPSSLDILSSKRAPRGYYKGKNCKPTGFHTRKGGYVVMQEKLPNYVVPDLTDFKLKPYVSQCPIEANTSEASQTAK

SEQ ID NO: 214287 - protein, 43 aa, Glycine max
  Clone ID: PAT_MRT3847_35528C.1.pep
LNLKNNHLLNHLMLRRSWNEIKIYNKIINLTTFISVDELDNYF

SEQ ID NO: 214288 - protein, 489 aa, Glycine max
  Clone ID: PAT_MRT3847_35529C.1.pep
QHWGNGEGKHDGSINGVRYFHAKSERSGSFVRGHNPRFRISLLESLESRYKSESTKDEDDDMFVLSTSNQRVSVQLLGKDKIHDKLSRFEELTSVSLSYMGISSPGIPSHINNTVPNIKELDLTGNLLSEWKDVGTICEQLPALRTINLSDNLMSPYKSKLLVLKNIQVVVLNNTGVDWEQVELLRQSLTTIEELHVMGNSISRILPGSSSMVQGFDYLRLLNLEDNCIDEWKEIMKLSQLRCLEKLYLNNNCLKSVFYPDNGGHYESEVTCYKPFQNLRHLLLANNNISDLASIDSLNLFPNLVDIRLSDNPITDSGRGGVPRFVLIARLAKIQILNGSEVTPRERKDSEIRYVRLVVSRLHASPEEIKQHPRFYELEKIHGIEDERPSIGATVPQTISSGLLSITLNCVGASMGEKPSLTKKLPATTTVGKLKFLCESFFKLKSMKLKLYLREEGSPFPMLLDNDTSSLMDLGIGNDSIILVDEESS

SEQ ID NO: 214289 - protein, 91 aa, Glycine max
  unsure (1)..(91): unsure at all Xaa locations
  Clone ID: PAT_MRT3847_3552C.1.pep
QAGSSRFWFGCVGSAPPFGCSFVLXXLLLLYARQFQLPPLGLRRHEGPTALQFSFVSCGHRSCGSGNALACRAVLFSGPQTDRVLPSQKKE

SEQ ID NO: 214290 - protein, 103 aa, Glycine max
  unsure (1)..(103): unsure at all Xaa locations
  Clone ID: PAT_MRT3847_35530C.1.pep
KIDACLCTHLLLAWGSMMAICGKDFCRAECXIPSGFPLXTVICNSIFNEMLIRYSYXKLLCQAKAPCLFLQSFIKFVFYILLLLIITLSLFMLFVMPILLLLL

SEQ ID NO: 214291 - protein, 183 aa, Glycine max
  Clone ID: PAT_MRT3847_35531C.1.pep
LQGVPYLATGKHLCGAATDLTLRCCFPEYREDSSGQYTANSKFGGLAIATCCHHLCQWKHYINKRFFLDLGLTKEEFHAITWFTSWAVDANHGSDLPDTTNCISHLQTIKEQGDECANGVEKILSDMQADKRAALGFKCKWIIDMGRLMWLRQHGLDAKLVKFVPPSISPENHLLLARPSNRL

SEQ ID NO: 214292 - protein, 107 aa, Glycine max
  Clone ID: PAT_MRT3847_35532C.1.pep
IFSSVISMGWGNTTNALSCRFHKFGDDQKILVFQGDTTSSFFAIELTKLHGGRKPLGGFGGRVLYYFPQHLWKSSTVVACFASYFTFSILSNSTSQGDRPCLPHCTI

SEQ ID NO: 214293 - protein, 85 aa, Glycine max
  unsure (1)..(85): unsure at all Xaa locations
  Clone ID: PAT_MRT3847_35533C.1.pep
XRXXAXXXXGXXXWPXXXXCXXXIXXMMXARTRXXXXXGXXGXFXXXVTLXXXXCXXXXXXXLPXXXXXXXXAXMVXRXSXRXSF

SEQ ID NO: 214294 - protein, 155 aa, Glycine max
  unsure (1)..(155): unsure at all Xaa locations
  Clone ID: PAT_MRT3847_35534C.1.pep
VVKRTKLHEDLLDICPPTKRPIAALSEPSTNEXLMASVEYNEKTLTEVTLVAMTCCLTAHMTEEADTSEVTETVALPMTDALLPQMEVVHILWHVMMEAAHGTGQNMHPTAKAGLCQAKTWAEXAHTFCTSGKLELELVYKAHMQCYDDAKLMNL

SEQ ID NO: 214295 - protein, 95 aa, Glycine max
  Clone ID: PAT_MRT3847_35535C.1.pep
GQGSQMGEGGTLNGGGKMGGFEYRKKIGPAPKGANKFLEGGDLKNGGRKGKIFPPGKKKKGKTPPKKGHERGAKGCTRGFPKRGKKTVWGGQTGG

SEQ ID NO: 214296 - protein, 66 aa, Glycine max
  Clone ID: PAT_MRT3847_35536C.1.pep
KRFLVGVKSLENKSEFPRGSIRAETCRLNSSVRCNIPKKNFAPFFFCRKSNLFLSIKRKHPKESKN

SEQ ID NO: 214297 - protein, 133 aa, Glycine max
  Clone ID: PAT_MRT3847_35537C.1.pep
VLANAVLNLSSGAHQMPPPFQGLVLLGNKAVRGVGKGVSPSLFHNIMVFFFSPFEGFFFGALFGGGGGNPMKKTPPAVGGARGNIIEALKRVFWGFSLFSHIDILNFVGLGSCFTSSKNNQTPTLWKGWLHMF

SEQ ID NO: 214298 - protein, 254 aa, Glycine max
  unsure (1)..(254): unsure at all Xaa locations
  Clone ID: PAT_MRT3847_35538C.1.pep
MMGSGDTSSSSDFFCRRHVFLCYKNPAVWPPRIEAAEFDRLPRLLHAAINARKPHIKKETCLTICEGHDGTETSNGDVLIFPDMIRYRRLTHFDVETFVEEVLVKEGEWLPGNPESLKASYVFVCSHGSRDRRCGVFGPILVSRFREEIELHDLLGKVLISSCSHIGGNNYAGNVIXFGSSINREVTGHLYGYVTPDDVPLLFRQHIXKGKIFDSLWRGQXGLSEDEQKKKAETASAMVERNFRRHGVLGLLSN

SEQ ID NO: 214299 - protein, 57 aa, Glycine max
  Clone ID: PAT_MRT3847_35539C.1.pep
IVQFPNKTYPQNIHKPSKNQLHLYNSTFNTLITFSKNKNKSFHLHFIIYKTINPFYI

SEQ ID NO: 214300 - protein, 111 aa, Glycine max
  Clone ID: PAT_MRT3847_3553C.1.pep
KCSLIDTKSCALQKKERRERRSWWGELDRISNLIYTSLFYYALKAQTLLSLLFFLVLIDIPCLHPLRKEEANNYTTIILTNVIIANNHSIIVTDRCDNSSDIEPTGLSYYS

SEQ ID NO: 214301 - protein, 58 aa, Glycine max
  Clone ID: PAT_MRT3847_35540C.1.pep
NFINDNSSLLIMFPVCACHNWECFRFGHTVVLLCLLLLKPMLKLEVSGVGTKVVLIRV

SEQ ID NO: 214302 - protein, 91 aa, Glycine max
  Clone ID: PAT_MRT3847_35542C.1.pep
LKFDELGMEIVLIALPAALALAADPIASLIDTAFVGHIGAVELAAVGVSASGFNLVSKAFNVPLLNVTASFVAEEQALIRKEEESIPSDKN

SEQ ID NO: 214303 - protein, 49 aa, Glycine max
  Clone ID: PAT_MRT3847_35543C.1.pep
FKFFQIYLLDIYVFYTLVLAVYGFLQGARDRLGEVSSIGKLWFTNDKSF

SEQ ID NO: 214304 - protein, 36 aa, Glycine max
  Clone ID: PAT_MRT3847_35544C.1.pep
LHRSRRKQMLHHLQLLNTTIDYNTSTPHIMKQKYDY

SEQ ID NO: 214305 - protein, 84 aa, Glycine max
  unsure (1)..(84): unsure at all Xaa locations
  Clone ID: PAT_MRT3847_35545C.1.pep
LVALRTCGRALCRKCAHRFMADHKVCLVSNEVCRESNLVXLDKGGPGFSDHGDHXLEARHFKHFGSGSGVGLVSPAMKPCRFII

SEQ ID NO: 214306 - protein, 33 aa, Glycine max
  unsure (1)..(33): unsure at all Xaa locations
  Clone ID: PAT_MRT3847_35546C.1.pep
LSGLNIWXPFTGENLLXGQRQRXMXIXEGWVQD

SEQ ID NO: 214307 - protein, 98 aa, Glycine max
  Clone ID: PAT_MRT3847_35547C.1.pep
MREGGQGGGGSHSLAFRVMRLCRPCFNVEPALRLDPADLFAGEDLLNDPVAGGASLSSSCDSDPNCRNRFLLRHFCNAMGLSGLLGVPEALRAVGLGE

SEQ ID NO: 214308 - protein, 143 aa, Glycine max
  Clone ID: PAT_MRT3847_35548C.1.pep
LTMKSECCIRVRKCHKCQAFADNVNALPMPLNVLAAPWPFSMWGTDVIGAIKPKASKEHHFILVVIDYFTKWVEAASYSSVTRSMVVKFIKKEIICWYGLPRKIIAINATNLNNKMMKEMCEDFKIQHHNSMPYPCLSSSRSR

SEQ ID NO: 214309 - protein, 43 aa, Glycine max
  Clone ID: PAT_MRT3847_35549C.1.pep
GKLLMAGAKCLKLYIFTLSMGNVTFSLRTPTNLIILVASSLDS

SEQ ID NO: 214310 - protein, 103 aa, Glycine max
  Clone ID: PAT_MRT3847_3554C.1.pep
TINNNRRKKKEPTEMANKYTALLLVVCLIVVASVDAISDAKRGCIDDCHANSCTLQSMLCKNYCCFVCLTVNRRETSEVHTLGNGASRKMKAQMIKDPTEPKH

SEQ ID NO: 214311 - protein, 77 aa, Glycine max
  Clone ID: PAT_MRT3847_35550C.1.pep
VAEITRTLKNGGVFVGSTFLRYSSKTPWFLRPFRERTPQGYGYLTEEEIKDLCTSCGLTNYSSKIQQAFIMFTAQKP

SEQ ID NO: 214312 - protein, 49 aa, Glycine max
  Clone ID: PAT_MRT3847_35551C.1.pep
ASMAATHTGYNLAGFWLKEYYEAGSGECKAYTSGFSFSAHSRRGFLNAI

SEQ ID NO: 214313 - protein, 341 aa, Glycine max
  Clone ID: PAT_MRT3847_35552C.1.pep
MAKSVANPPFLRPLHQLEFLRCPRLSSKSQFHPRRFRSQTQSIIRAISAVAAESELGTQQDQAIEADIFACPVCYEPLIRKGPSGLNLPAIYRSGFMCKRCKKSYSSKDRYLDLTVTAGLRDYTEIQPARTELFRSPLVSFLYERGWRQNFRQSGFPGPDEEFEMAQEYFESAKGGLIVDVSCGSGLFSRKFAKSGAYSGVIALDFSENMLRQCYEFIKKDDTLSTTNIALVRADVSRLPFPSGSVDAVHAGAALHCWPSPSNAVAEITRVLKSGGVFVGSTFLRYSSLTPWFLRPFRERIPQGYGYLTEEEIKDLCTSCGLTNYSSKIQQAFIMFTAQKP

SEQ ID NO: 214314 - protein, 51 aa, Glycine max
  Clone ID: PAT_MRT3847_35553C.1.pep
PKEKSTWKIINHLTMGLAGVKNTLFFQTPINHFTTSPPQGKIKTGTQNTTR

SEQ ID NO: 214315 - protein, 81 aa, Glycine max
  Clone ID: PAT_MRT3847_35554C.1.pep
LTPTVTQNITCLYLHSASSIWESFLYISRTSLYMGTEDHCKFYITRQFASSYDDQCDLTPHGLKTFSCRSLAANDHSELLM

SEQ ID NO: 214316 - protein, 42 aa, Glycine max
  Clone ID: PAT_MRT3847_35555C.1.pep
NFRRKPCAMLLVKKTKFISNDALVCFAFLKDLIYLFRLQNQW

SEQ ID NO: 214317 - protein, 99 aa, Glycine max
  Clone ID: PAT_MRT3847_35556C.1.pep
FPLAQRQSLQKFLEKAKKQVGKQIPLSLNKKSVSQQRPQLFSLRHPKFWFLKLELFLRQQGLVLLNVKGSFLKKHLHACRPKETNITLLLLSSPFFMPN

SEQ ID NO: 214318 - protein, 60 aa, Glycine max
  Clone ID: PAT_MRT3847_35557C.1.pep
NTYRSAFVLFENILRLYLVYTDYNSALDHDPAWCRFIPPAFWFGLSTLICPDTKRGRLTT

SEQ ID NO: 214319 - protein, 97 aa, Glycine max
  unsure (1)..(97): unsure at all Xaa locations
  Clone ID: PAT_MRT3847_35558C.1.pep
FSRXQIXPSVGXLPXLGVPXXXXNXPNXXRXXXXQXXAKLHXXPSTXXLXNNXLSGXIPDXFAQLKKLDDIDISFNNSXAPXQXRLVNAXIASLDLS

SEQ ID NO: 214320 - protein, 52 aa, Glycine max
  Clone ID: PAT_MRT3847_35559C.1.pep
PNFNPKLMTFNHALTITPRFNYLNRGGFLNFRRRTFWHEMEHPKRKFLLRNF

SEQ ID NO: 214321 - protein, 109 aa, Glycine max
  unsure (1)..(109): unsure at all Xaa locations
  Clone ID: PAT_MRT3847_3555C.1.pep
LVQLQPGPLFLKNQGCKSPGGTVLDTERLIGRRTSDAXITRRHEIXSTKVIPALVDKPMIVVNYTGEEKQVSSAHICCMALLQMTDSAQANLGCTVTNADDTVPADLKD

SEQ ID NO: 214322 - protein, 57 aa, Glycine max
  Clone ID: PAT_MRT3847_35560C.1.pep
KTGKKLIGESLDMRNRKKDALRTAALAGREDERDDKKRRAEYILKQSMENPQELTLL

SEQ ID NO: 214323 - protein, 538 aa, Glycine max
  unsure (1)..(538): unsure at all Xaa locations
  Clone ID: PAT_MRT3847_35561C.1.pep
MVPKVYAGQEMAMVENENCIMNGKWKKRVHVFGERVMRFPNKAWQTTWKVGREDPRRLIHAFKVGLSLTLASLLYFMEPLYKGIGQSAIWAVMTVVVVLEFTAGATLCKGLNRGLGTLLAGLLAFLVGYIASASGRVCQAIIIGAAVFSIGALATYMRFIPYIKKNYDYGLVIFLLTFNLIAVSSYRAENVLKIAHDRVYTIAIGCAVCLLMSLLVFPNWSGEDLHNSTVYKLEGLAKSIEACVNEYFYGEIEGSGDMKLSEDPIYKGYKAVLDSKSIDETLALHASWEPRHSRYCHRFPWQQYVKVGAVLRQFGYTVVALHGCLRTEIQTPRSVRAMFKDPCIRLAAEVSKVLIELSNSIRNRRHCSPEILSDHLHEALQDLNTAIKSQPRLFLGPKNRHNQATNMLKIAAEQVGQERHGKTSLSSVKTDSSALLEWKTKRVSVEQTKESERKSFXGPQLSKIAITSLEFSEALPFAAFASLLVETVAKLDLVIEEVEELGRLACFKDFIPGDDFVVTCQEPRIDVSQNHLPSHGAD

SEQ ID NO: 214324 - protein, 130 aa, Glycine max
  Clone ID: PAT_MRT3847_35562C.1.pep
LKIAAAQVGQERHGKPSLSSVKTDSSALLEWKTKRVSAEQTKESERKSLRPQLSKIAITSLEFSEALPFAAFASLLVETVAKLDLVIEEVEELGRLACFKEFIPGDEFVVTCQEPRVDVSQNHLPSHGVD

SEQ ID NO: 214325 - protein, 106 aa, Glycine max
  Clone ID: PAT_MRT3847_35563C.1.pep
MGLGFVVGFLGLLILFHAAYSTIQYKGLLKITEEEFSGPPLNVVIEVTLGLVFCMWAALTVPGKFLSIHPHSEENRIVSLPSNVDFMIFNHRYKVFPVEMDVKLKH

SEQ ID NO: 214326 - protein, 65 aa, Glycine max
  Clone ID: PAT_MRT3847_35564C.1.pep
MASAQLTAIASSISTASFEGLRPSAVQFASTGRIRIGNLSQRSFRGLVVKAATVVAPKVYISFFF

SEQ ID NO: 214327 - protein, 52 aa, Glycine max
  Clone ID: PAT_MRT3847_35565C.1.pep
RTFDVSTFWCSVSDPNIVRSWHSMLHYFEFWLISPFVCGTENSYQQLKELRF

SEQ ID NO: 214328 - protein, 118 aa, Glycine max
  unsure (1)..(118): unsure at all Xaa locations
  Clone ID: PAT_MRT3847_35566C.1.pep
ANKETGRTNVMRGAKKEQGHQRVNYIVVVRQALREQWGGAWTKTQRXINIVLGLDDVMENLCAXVDKNEAESPPFTLYAIDYVMENDPLVYGSHYNTFGTRLIDLSMITNSLTGGDDL

SEQ ID NO: 214329 - protein, 120 aa, Glycine max
  unsure (1)..(120): unsure at all Xaa locations
  Clone ID: PAT_MRT3847_35567C.1.pep
MLYIYIYIYITPYHPWMREDGASDKPXLDVFVLSRMKQFRTMNKLKKAALKEMFKSMDIDNSGTITFEELKAGLPKLGTKVSESEVRQLMEAVYLWEFSILQLWYHSQYYIVGGKFIGLA

SEQ ID NO: 214330 - protein, 83 aa, Glycine max
  Clone ID: PAT_MRT3847_35568C.1.pep
PTTRWPNAPERPTPVQHQKELKPWTLTQKPAEPPYRNLLWGKKTLCACPPPGKIFPAGLNTPPVVSLKKAPPPKPRVGASWSP

SEQ ID NO: 214331 - protein, 61 aa, Glycine max
  Clone ID: PAT_MRT3847_35569C.1.pep
KTLIFVIASIIWVLMVCAHQLEPLILLSPTKPATKSEILESKPVNKINDATPDFLSSINFN

SEQ ID NO: 214332 - protein, 48 aa, Glycine max
  Clone ID: PAT_MRT3847_3556C.1.pep
QVKKKRINFESLSLGFLVQPCPLSRYLRQPVFIRAAIHLVTVSCCHVK

SEQ ID NO: 214333 - protein, 143 aa, Glycine max
  Clone ID: PAT_MRT3847_35570C.1.pep
MATTLTPIQTLKFCSPNPKPLFTPKPLFSPKPPSISTPHTFRADKLSLSVSAATSSSNGPPSPPSPARSKVRRHTISVFVGDESGMINRIAGVFARRGYNIESLAVGLNEDRALFTIVVSGTDKVLRQVMEQLQKLVNVLKVE

SEQ ID NO: 214334 - protein, 116 aa, Glycine max
  Clone ID: PAT_MRT3847_35571C.1.pep
VLLSALCKAFMIFIHLSTIKRSGIRCTHGIAGWAALQTCVGVYYDYESNINLGSYDSYAILWPPCYLLPPTCLGLRDFLRPPNGLLPPYCLLFCFLLLQTLISWLRKLEIKGRGVV

SEQ ID NO: 214335 - protein, 48 aa, Glycine max
  Clone ID: PAT_MRT3847_35572C.1.pep
FKLTSPTLYRSDQFPNIYIFLFIKKKGHHDLNTPITSPKHLNFLKGKK

SEQ ID NO: 214336 - protein, 90 aa, Glycine max
  Clone ID: PAT_MRT3847_35573C.1.pep
KLGLKGNPSYLGKNGQAMITKLSFYAGQNNTMVNAKTVCWLKPSLGVHATPWHYSLLGPSRCYRNLQNPINGIPSESAPQKISPQKSSLV

SEQ ID NO: 214337 - protein, 237 aa, Glycine max
  Clone ID: PAT_MRT3847_35574C.1.pep
ESDERNVANEKQLLPAKRNGNLQRGILQGIGLHLNALAALKEYNGTQVEKLSSGRQLSLPSSTSLQITTSQEHQHLSLVAASSERELDPSDIGVQPAEDCSQPSAYMAGEDFNQNSPKKKRRKSETPGETEGCKRCNCKKSKCLKLYCECFAAGVYCIEPCSCQDCFNKPIHEDTVLQTRKQIESRNPLAFAPKVIRNSDSVPEIGDDPNKTPASARHKRGCNCKKSSCLKKYCECY

SEQ ID NO: 214338 - protein, 484 aa, Glycine max
  unsure (1)..(484): unsure at all Xaa locations
  Clone ID: PAT_MRT3847_35575C.1.pep
MAEKHLRELLKEDQEPFLLKHYIWERRRQLKRPSPNSPLQQQLKKKNSNFPLNKCFLTSLQNATKSPLLLSLKNSTSPLLRPFIAKTASLHLDTDLRINNKKKKPMEPKPNSALGIFGSLFKKLTNRKRETLEGVLVKVKDSDDDVVVVGSCEVGFSCSCNGRPSSAVWSESNEDKSLDLESSSSGHSFDDSVAEEIEFLNKRKHVTDSACFDDDDDHGFFCESPFRFSLQRSPGYSGRHTPDFSSPAASPCRRKTEDKKINGADGVNKFQSGEEEEDKEQCSPVSVLVPPFDDDDXDDGHDHDNGDDVFDLDCSYANVQRTKQHLLDRLCRFEKLAELDPVELEKRMLDHEDREYETFTEEDDDHEDVDSETACEENILRGEMFEILCCPEDLKRLVYDLIKEEETTRVDNNSSDMVIRRVLRRLELWKEVESNTIDMMIEEDFSREQCRWKKNAEHTSELAVELELAIFCFLVEELSEELVC

SEQ ID NO: 214339 - protein, 95 aa, Glycine max
  unsure (1)..(95): unsure at all Xaa locations
  Clone ID: PAT_MRT3847_35576C.1.pep
SNYTPLREGVGTTLVTSTSGMLAMLNEPHLXVKLHALCNLNNLVDTFWPEISTSLPKIESSHEDEESDQHPMQLAALLVSKVFDYSGELNDSLSY

SEQ ID NO: 214340 - protein, 32 aa, Glycine max
  unsure (1)..(32): unsure at all Xaa locations
  Clone ID: PAT_MRT3847_35577C.1.pep
RXSXSEGTEXFLLNNCXGVDCSXVXQLXSLGT

SEQ ID NO: 214341 - protein, 34 aa, Glycine max
  Clone ID: PAT_MRT3847_35578C.1.pep
FSKAICMIIHILFQRLRTTLKYSRDQPKTKEKLC

SEQ ID NO: 214342 - protein, 392 aa, Glycine max
  Clone ID: PAT_MRT3847_35579C.1.pep
MMEEAQGSSSSLPPFLTKIYEMVDDPSTNSIVSWSATNRSFIVWNPPEFSRDLLPKYFKHNNFSSFIRQLNTYGFRKIDPEQWEFANDDFVRGQPHLLKNIHRRKPVHSHSLQNIQGQGVSSLTESERQSFKDEIEKLKHEKEQLLRELEMHEQEWKMYEVQLQHSNDRLEKLEKKQENLVSSVSQVLQKPGIALNLLLLTENMDRKRRLPRSGLFSDDASIEDHMETSQVLPRENADGASIFSSSTERLDLLESSMTFWENITHDVGDVFVQSHLNLDFDESTSCADSPAISCVQLEVEDQPKSHGINVNSEPAVVAAPDLDASKEQPVETAPLTTGVNDIFWERFLTENPGSSEMQEAQSEREDSDGRSNAKFWWNIRNVNNPPEQMGHS

SEQ ID NO: 214343 - protein, 82 aa, Glycine max
  Clone ID: PAT_MRT3847_3557C.1.pep
GNEVNTHGKVVSKDYKIVMKRKFISVVVLGVCLVLGISQYVDARNLEEKSKEEVKKPENCLDGGSIGGVGGIGDVGGGGGGL

SEQ ID NO: 214344 - protein, 62 aa, Glycine max
  unsure (1)..(62): unsure at all Xaa locations
  Clone ID: PAT_MRT3847_35580C.1.pep
MMEEAQGNSSSLPPFLTKTYEMVDDPSTNSIVSWSATNRSFIVWNPPEFSRDLVPQXLKHNN

SEQ ID NO: 214345 - protein, 127 aa, Glycine max
  Clone ID: PAT_MRT3847_35581C.1.pep
DVGDIFVQSHLNLDFDASTSCADSPAISCVQLEVEDQPKSPGINMNSEPSVVAVPDLDASKEQPVGKAPVTTGVNDIFWERFLTENPGSSEMQEAQSERKDSDGRSNAKFWWNIRNVNNPPEQMGHS

SEQ ID NO: 214346 - protein, 81 aa, Glycine max
  Clone ID: PAT_MRT3847_35582C.1.pep
SGSPAPQLPSIAAEFVVNERHDRTADPKAIQIFLGSDALRAHNADLLFSSNQLTLYDDDRCKLQIPLVRPEDERTFKSLAI

SEQ ID NO: 214347 - protein, 396 aa, Glycine max
  Clone ID: PAT_MRT3847_35583C.1.pep
MSQRVPNCDVDDNNNIPTTTKIPLLPNFNFISHEVPMLGYQAAELPCKKGQPSTYKGSHGNLTSTWDKPRTSGGTLESIVSQHVSENRYKLVTMDALVPCSEQQGTQKAVVSERLDACGKSRFPRVVAQEEVEKRAGVVARGTRGTTTLELGGCKDWSVSGSETCRRELSVTFNSATKGSPENTTSSGKQCTGTTTNDDRDSISHRISQGEVPDEDYKATKVHRSPGSFSRISASSVVHKQAERRRRDKINQRMKELQKLVPNSSKTDKASMLDEVIQYMKQLQAQVQMMNWMKMYTTQMLPITMQQQQQQQLKMSMMMAQMGMGMGMSKDMVMNMNSMNIPGFPPMLPFPSFMPMAPCGDQLQGTPEKSVTMDAYSTMASLYQQLFHPPASSSKN

SEQ ID NO: 214348 - protein, 69 aa, Glycine max
  Clone ID: PAT_MRT3847_35584C.1.pep
ALTISGYQSSKASSRRRAWPLTTVRRSSHGGSLSRWAPNFPGTLPRADSARARAEYRAHELSACVLITS

SEQ ID NO: 214349 - protein, 38 aa, Glycine max
  Clone ID: PAT_MRT3847_35585C.1.pep
EAQELKNLLPKFYKMGSGFIKNIAKLSPTSKKIHSFYI

SEQ ID NO: 214350 - protein, 43 aa, Glycine max
  Clone ID: PAT_MRT3847_35586C.1.pep
MRSLTPISFQIKFFGGPKAPYLSVPPKSMEGSLPPPGPCILSL

SEQ ID NO: 214351 - protein, 132 aa, Glycine max
  unsure (1)..(132): unsure at all Xaa locations
  Clone ID: PAT_MRT3847_35587C.1.pep
PVPCVSMGNPPCVTFTREGSPNFFVVELKLAEIGPKFXPPGVFPARTTPEFVQGLFNFPFKMCVWERGAGTTLACGTGACAPVVSPVFXGRAGRNCPVFFPGGPFPIEWGGGDFLVFLPGSPHVVFFGFLPL

SEQ ID NO: 214352 - protein, 78 aa, Glycine max
  Clone ID: PAT_MRT3847_35588C.1.pep
LSLHLLHTLQTKHLHLQPTKPKACFLIDTFILKQTFTTTTTFKKHGPILSYLAHPTVCSHQNVQLFSNPSNFLTQVKP

SEQ ID NO: 214353 - protein, 884 aa, Glycine max
  unsure (1)..(884): unsure at all Xaa locations
  Clone ID: PAT_MRT3847_35589C.1.pep
MLPTLTELRRALDMQSALESLVEEGNYWKAFQVLSEYLQLLDSLSELSAIQEMSRGVEVWLGRTLQKLDALLLGVCQEFKEDGYITVIDAYALIGDTAGLAEKIQSFFMQEVISETHSVLKAIVHEDEEGLSQNSWLTYSDLCLRIPDSKFRQCLLRTLAVLFDLMCSYHEIMDFQLERKDSAAQTSNKCNEEISCSPGETQEVDSDVRACNNSMSSSRDVIHGSSSREESATKSSLTETSGSPYSDFHDTIKEAGKEDSATSSIESPWYHLRKEATTFVSQTLQRGRRNLWHLTASRVSVLLSSAAVCTASIHQFLKNYEDLGVFILTGEAFCGIEAVEFRQKLKVVCENYFIAFHRQNVHALKMVLXPKETWLKLPPETVHMISFAGLIGDGAPLISLSSGKSTNVSAVHSIKSVNMVHTGARKNGFSHWIKSGNPFQQKLPTSNEGRGYSQPNGSVCGEFDGSSTNNFHDDKTPRKNDINQMNGANSVSEDENEDLLADFIDEDSQLPSRSSKPHHSRALSSHVNDEENTTQTGSSLCLLKSMDKYARLMQKLEVVNVEFFKGVCQLFGFFFYFIYETFGQQNASSTGKGTSSSLNYXLRTALSRVNQDCEEWSXTQSSSPTSLSSPFVHAELTPTHPPNTNYGHSSGTSLGLKERCVAVDTISLVARILNRSKAHLQSMLLQSNSTILEDFYVHLVDAVPDLTEHVHRTTVRLLLHINGYVERVANCKWEVKELGMEHNGYVDLLLGEFKHYKTRLAHGGIRKEVQDLLLDXGLEIVAETLVEGLSRVKRCSDEGRALMSLDLQVLINGLQHFVALNVKPKLQMVETFIKAYYLPETEYVHWARAHPEYSKSQIVGLVNLVATMKGWKRKTRLDILEKIE

SEQ ID NO: 214354 - protein, 45 aa, Glycine max
  Clone ID: PAT_MRT3847_3558C.1.pep
DPFFLFLWPVHNTRFIGRACWLPLICWFNSSDANYSTIVILRTCK

SEQ ID NO: 214355 - protein, 61 aa, Glycine max
  Clone ID: PAT_MRT3847_35590C.1.pep
MYFVSKTLAEKEAWKFAKEHGMDFIAILPALVIGPFLLPTIPSSVISALSPINGTFFFCEY

SEQ ID NO: 214356 - protein, 231 aa, Glycine max
  unsure (1)..(231): unsure at all Xaa locations
  Clone ID: PAT_MRT3847_35591C.1.pep
SXDVLTLSATPIPRTLYLALTGFRDASLMSTPPPERVPIKTHLSSFSEDKVVSAIKYELDRGGQVFYVLPRIKGLDEVMTFLAESFPNVEIAIAHGKLYSKQLEDTMEKFALGEIKILICTNIVESGLDIQNANTIIIQDVQQFGLAQLYQLRGRVGRADKEAHAYLFYPDKSLLSDQALERLAAIEECRELGQGFQLAEKDMGIRGFGAIFGEQQSGDVGNVGIDLFFEM

SEQ ID NO: 214357 - protein, 152 aa, Glycine max
  unsure (1)..(152): unsure at all Xaa locations
  Clone ID: PAT_MRT3847_35592C.1.pep
AXSSYLDRTVQGPVTSNFAGRLPPSVDYYFSSLACYSLTYCYLCCCSSSGFARVFFVFRFRDGVICVSVRRLFIIFTVFVFVFSTYTNNPNNYPLFVLVFVGCPLLLLFIPXFRLNHXVVVLPLRYASLITTRHYTLVXVATTGDHVERARP

SEQ ID NO: 214358 - protein, 83 aa, Glycine max
  unsure (1)..(83): unsure at all Xaa locations
  Clone ID: PAT_MRT3847_35593C.1.pep
RMKTGYGERSSEVKCASFRLAVXAHNIRXXKTIPEECVNXNKGYINGEQXRSXSKTVNNKLLYVVNAKSSXRHIIFGMITRTL

SEQ ID NO: 214359 - protein, 40 aa, Glycine max
  Clone ID: PAT_MRT3847_35594C.1.pep
AILSKEYKCVLKSRIELRCIFYVLASCKCRCPSTWTKRST

SEQ ID NO: 214360 - protein, 78 aa, Glycine max
  Clone ID: PAT_MRT3847_35595C.1.pep
YIWNPYHPRISQAEFIYEELPFLLHKLYNHSPLPIQVGIGTTTLICNRRLGDPCLDSKVWMLCLTLVSSQRELGFSTS

SEQ ID NO: 214361 - protein, 72 aa, Glycine max
  Clone ID: PAT_MRT3847_35596C.1.pep
IYPAFKGTQPGPIYACPRNSTRGLYGYIKTLSHPVQLKWEERYSYSPPLHHLNILSHHCFECWTPVVGEEKY

SEQ ID NO: 214362 - protein, 111 aa, Glycine max
  unsure (1)..(111): unsure at all Xaa locations
  Clone ID: PAT_MRT3847_35597C.1.pep
GRGTRNRLCFFYRERLTQITLVRSPFKKNNKKKLFYSKDKGHPAFFQLFALFDIPKXGWHHTSHLGFKAKSHESNEGLGEKKTHPKEIFMLAEEIFQKKTSRMENWPTQGN

SEQ ID NO: 214363 - protein, 146 aa, Glycine max
  Clone ID: PAT_MRT3847_35598C.1.pep
VQKLFDEMKARRIYPNDLTYSTLIKIYTKGRMYAEAMDVYRELKQEGMKTDVVFYSALIDALCKNGLIESSLRLLDVMTEKGSRPNVVTYNSIIDAFKIGQQLPALECAVDTPFQANEHQIKPSSSMLIVGNFQDQKTDGNNDEIM

SEQ ID NO: 214364 - protein, 46 aa, Glycine max
  Clone ID: PAT_MRT3847_35599C.1.pep
PFFPNFTTYCNKLNEKYLTGAKLSTMKSYLKLNQTHKNYTKSQKKK

SEQ ID NO: 214365 - protein, 199 aa, Glycine max
  Clone ID: PAT_MRT3847_3559C.1.pep
MATAEEISTLKLLRQYLLGDISDPFLTNLIPVKLEDPSSGLDMGSNFSEQSSFCKFLECFDFEAEVVGLTSHHKVQSSIATSPPQNFNFPEEPMVSMKKEATCYATRHYRGVRRRPWGKFAAEIRDPKKKGSRVWLGTFDTEIDAAKAYDCAAFRMRGHKAVLNFPLEAGMSHPEPNSSGRKRRREYTTAATSSRHVMS

SEQ ID NO: 214366 - protein, 871 aa, Glycine max
  Clone ID: PAT_MRT3847_355C.1.pep
MATSRGNGIVSSYWDSHGQWQVCVEDDRNVGSLGIFIGDRPFEFVLPVTLCQLFTVILVSRTLYFLLRPLRTPKFICNVLVVEAVPNYSSKSPMLDSTSPIVVEECLRFSLNVKVVSSENVQGGIILGPTFLGRNKTYWQVLFPPRQTEYLVMASLTGAVYFVFLVALKMDVLMTIRAAKSTWRLGVIPFLASFVVILALLCLYYHPQQISSASLTIARVSVSCLMSLSNFPVVSDAMLELNLTATELGQIALSSSMINDIILWLFIVMHSFTSNVDVKKSIALLGNWCLLVFFNFFVLRPTMKLIAMRTPVGKPVKELYVVLILLGVLVMAGVGDLMGVTFLMGPLIFGLVVPSGPPLGTTLAEKSEVLTTEFLLPFFFVYIGINTDLSALEDWRLFLTLQGVFFAGDLAKLLACVLVSLAYNIRPKHGTLLGLMLNIKGITQLISLARFKKQKMLDEDTFSQLVFCVVLITAIVTPLVNILYKHRPRVHAESLFEGELRTIQSTPRNREFHIVCCVHNEANVRGITALLEECNPVQESPICVYAVHLIELVGKSAPILLPIKHRHGRRKFLSVNYPNTNHIMQAFENYSNNSSGPVKVLPYINVAPYKSMHDAIFNLAQDNMVPFIIIPFHENGNIDLVGHVAASIRKMNTRFQAHAPCTLGILVDRHSRLGASNNNNMYFNVGVFFIGGAHDREALALGIRMSERADTRVSLFRFVIVNKKPCGCKIILTREEREEEEEDTMLDEGLIDEFKSMKYGIGNVCWYEITVDDGVEVLEAVHSLEGNYDLVMVGRRHNDGSLNGKEMTTFMENADALGILGDMLSSVEFCMGMVPVLVTQCGGVKISSSSNNKLDRVGSVNVSQKRLSVHK

SEQ ID NO: 214367 - protein, 83 aa, Glycine max
  unsure (1)..(83): unsure at all Xaa locations
  Clone ID: PAT_MRT3847_35600C.1.pep
DSASKIIWSLKIPPRATXFAWRIFKNRLSTKDNLRRRHVELPSYNCPLCDMEEESVGHVMYSCIKTRNLWWEILSWVNRVPFP

SEQ ID NO: 214368 - protein, 159 aa, Glycine max
  Clone ID: PAT_MRT3847_35601C.1.pep
PVRLQKDNRGGSGVVVDSSFSISSTQKSGSSSSSLTSSDAFETTEITSQQSKVSSDSSVLSSLPSLSAASTMKPTSASLLLPASAVSEDSISVLPNNEGGKKESLSRSNSLKDNQKKIQKKGQSQHQVAVQSPSVANVPFQAVDGDIPVGEVSETVRTK

SEQ ID NO: 214369 - protein, 532 aa, Glycine max
  Clone ID: PAT_MRT3847_35602C.1.pep
RIISSNLNFTGKLSLDASNGNTEVYMNGREITKLELRVLKLANVQCPRDTHFWVYDDGRYEEEGQNNIRGNIWEKASTRFVCALFSLPFPHGQPHGQKDETSHYTTVPNYLEQKKTQKLLLLGIQGSGTSTIFKQAKFLYGNRFSDEELQDVKLMIQSNMYKYLSILLDGRERFEEEAVSRMNGQGSPGQTMETGSNGEASNTSECIYSLNPRLKHFSDWLLDIIATGDLDAFFPAATREYAPLVEEVWRDPAIQETFKRKDELHFLPDVAEYFLSRAVEISSNEYEPSERDIVYAEGVTQGNGLAFMEFSLDDRVPKSDTYLENLDAQLPPLTKYQLIRVNAKGLNEGCKWVEMFEDVRAVVFCVFLSDYDQLSLSPDSSGSGTLVQNKMVQSKELFETMVRHPCFKDTPLVLVLNKYDIFEEKISRVSLNTCEWFSDFCPVRAHHNNQSLAHQAYFYVAMKFKDLYASLTGKKLFVAQARARDRVTVDEAFKYIKEILKWDEEKEENFYGPPEDSFYSTDISSSPFIRQE

SEQ ID NO: 214370 - protein, 67 aa, Glycine max
  Clone ID: PAT_MRT3847_35603C.1.pep
LVVLPMVVSKPKAPSWGGGLVFNKGIDNSKSVPLILIKDRDDPNLGLKINGTLALSLPDACQTLTNI

SEQ ID NO: 214371 - protein, 63 aa, Glycine max
  Clone ID: PAT_MRT3847_35604C.1.pep
FFFFTEKKSTLQRKRPVREGPITSLYSPKPKNTFLRKHIISTKSHSQNTQINHEIAACEFGTR

SEQ ID NO: 214372 - protein, 41 aa, Glycine max
  Clone ID: PAT_MRT3847_35605C.1.pep
TPLPCWSSLPCSRALCLLKCFCTSLANCVCPFAVSVSQEST

SEQ ID NO: 214373 - protein, 206 aa, Glycine max
  Clone ID: PAT_MRT3847_35606C.1.pep
RLGLLFVFSLTMKKLYRKGTVHPSPSPSPPTISDHLSFLPAAILTLTLSLSSEDREVLAYLISCSSNNNFSGNPRRKPKVVADGDHPPLFNCSCFRCYMSYWVRWNSSPNHQLIHEIIDAFEDSLTHTAKPSRKDKRNKRGSKPKPPEMTRSEFPSSPPESVPESSSSGAGAGEVEAGQGGDDEEKGSVRRFVSFIGERIWGAWAQ

SEQ ID NO: 214374 - protein, 46 aa, Glycine max
  Clone ID: PAT_MRT3847_35607C.1.pep
VFFDNPTLKEGLHKTIMGNNFVYGVLNYKLVPYYWKNLGEKTIFGY

SEQ ID NO: 214375 - protein, 63 aa, Glycine max
  Clone ID: PAT_MRT3847_35608C.1.pep
LLSFGTILLSVISSFLDFLAFCHCMAYPLFGEDPHEACLIFHAIICGMPSMLELSKSIECLYI

SEQ ID NO: 214376 - protein, 139 aa, Glycine max
  Clone ID: PAT_MRT3847_35609C.1.pep
FSPNSVSSNTSLVRVLQGVHGTLRTVRLIAFEPLVSVSAAVVQVAPAYTIALFHVCHLCSDINNNTRALVSRHHIFGAVVEICTAESGNCTPVYILVAFQFASLGGGSVGIAISPPVVFCEANHFDRRASRHLCREVRL

SEQ ID NO: 214377 - protein, 90 aa, Glycine max
  Clone ID: PAT_MRT3847_3560C.1.pep
HLSSLCSRIHCKAMYTQRKRLGIMEKSHTCTAVCVEKEDLMRAWRALFRCEGSTIHSAKPSREVFAMYNLPCRCLYMRFDTAIGELCKTC

SEQ ID NO: 214378 - protein, 62 aa, Glycine max
  Clone ID: PAT_MRT3847_35610C.1.pep
YNVIALSPRSVLGPKLGFSDPRALHFLTRCLLMPEAQHCGRFISSYIVCAAIIVGVSIVGGF

SEQ ID NO: 214379 - protein, 56 aa, Glycine max
  Clone ID: PAT_MRT3847_35611C.1.pep
KRPCLVNPKRETHAPPPGYPKPNNFQHMDRHNIHAPVLLNTLPMTLNTPSIQAHSG

SEQ ID NO: 214380 - protein, 322 aa, Glycine max
  Clone ID: PAT_MRT3847_35612C.1.pep
MFLIKTWRQTAFGVFGYLNFTKAGFLDHSKKFNPEDMELRIPGKNCIVTGANSGIGYATAEGLAKRGATVYLVCRNKERGEAALSDIQTKTGNQNVYLEICDLSSVNEIKSFASRFSKKNVPVHVLVNNAGVLEQNRVTTSEGFELSFAVNVLGTYTMTELMVPLLGKASPDARVITVSSGGMYTTPLTKDLQYSESNFNGLEQYARNKRVQVALTEKWAETYKNKGIGFYSMHPGWAETPGVAKSMPSFSKSLSGKLRTSEEGADTVIWLTLQPKEKLVSGAFYFDRAEASKHLAFAGTSDSHAMIDYVVDSLDSMASPFV

SEQ ID NO: 214381 - protein, 75 aa, Glycine max
  Clone ID: PAT_MRT3847_35613C.1.pep
FFFFFFFFFFFFFFFFFFFFFFFIKWEWTIRLCVFLKSMANFSPTDGIFSRKKNLYTQHFCKIFKINPINKYMDL

SEQ ID NO: 214382 - protein, 84 aa, Glycine max
  Clone ID: PAT_MRT3847_35614C.1.pep
MQQSRPRWEQILVACTVQAQYSQQVIMGVRQRIIIIIIQVICHKYPLQKDGTYRMRRVHGDKLGTFLVLVVPTICHPSSTNGWI

SEQ ID NO: 214383 - protein, 198 aa, Glycine max
  Clone ID: PAT_MRT3847_35615C.1.pep
MATNILSTSNPFLLTNSFSSSSFVTPTYVYYNPIMKCTVKRELTLCKAANQPAPPHSPIVVTKRGLSISFITSFVLSLASKKNANAAILEADDDEELLEKVKRDRKKRLEKQGVISSSKQETGYLQDLVYKLSTVGQALEKNDLSAAGSVLGGNADADWVQRANIAFNKLSSSPEEKTEVDSFNSSLASLISSVSKND

SEQ ID NO: 214384 - protein, 221 aa, Glycine max
  Clone ID: PAT_MRT3847_35616C.1.pep
MAKNILSTSNPILLPSSSPSSSSSSFVKPIHVCSNPIIKSTSKRELTLCKATPHSPIVVTKRGLSISFITSFVLSLAGKKNANAAILEADDDEELLEKVKRDRKKRLEKQGVISSSKQETGYLQDLVYKLSAVGQALEKNDLSAAGSVLGGSTDADWVQRANIAFNKLSSSSEEKTEVDAFNSSLASLISSVSKKDVESSKIDFVFSATAFAKMASNHRTR

SEQ ID NO: 214385 - protein, 459 aa, Glycine max
  Clone ID: PAT_MRT3847_35617C.1.pep
MASEEAECISNLFKPIYLKEVAELRQYVPNLQSRPNPLDHNPYFDTRQLQQQQGFYLTESDVLLRQIGNDLSPSPRFAYHRAGPRKNIYFDPSIVRVAIVTCGGLCPGLNTVIRELVVGLWQLYGVRHIFGITAGYRGFYSSVPLPLNPKLVHHWHNVGGTLLQTSRGGFDLHNIVDAIQTHAFNQVYIIGGDGTMRGAVKIFDEIKHRKLEVAVVGIPKTVDNDVGIIDRSFGFQTAVEMAQEAISAAHVEAESAVNGIGLVKLMGRSTGHIALHATLSSRDVDCCLIPEIDFFLEGKGGLLEFLGQRLKENGHAVLVVAEGAGQDIIPRTDSQKDERDESGNPVFLDVGVWLKSELNKWWKREHPNELFTVKYIDPTYMIRAVHANATDNLYCTLLAHSAIHGVMAGYTGFVAGPINGNYAYIPLEDVARANNPVDTQDHKWSWVRSVTNQPDFVRR

SEQ ID NO: 214386 - protein, 78 aa, Glycine max
  unsure (1)..(78): unsure at all Xaa locations
  Clone ID: PAT_MRT3847_35618C.1.pep
FEAAQSMREFFSLQYPIEHGRGNTWEDTENICHHTNYNELRAASEEHPVLLTDAPXLTPRPNREKMTQIMCGPKHSGY

SEQ ID NO: 214387 - protein, 155 aa, Glycine max
  Clone ID: PAT_MRT3847_35619C.1.pep
MADVEVDAAAAAGAAQPKKRTFKKFSFRGVDLDALLDMSTDELVKMFSARARRRFQRGLTRKPMALIKKLRKAKREAPAGEKPEPVRTHLRNMIIVPEMIGSIIGVYNGKTFNQVEIKPEMIGHYLAEFSISYKPVKHGRPGIGATHSSRFIPLK

SEQ ID NO: 214388 - protein, 42 aa, Glycine max
  unsure (1)..(42): unsure at all Xaa locations
  Clone ID: PAT_MRT3847_3561C.1.pep
MGYAMLMTVIRMSILETWYKNPMTXISDLRGYTEGSDVPPER

SEQ ID NO: 214389 - protein, 60 aa, Glycine max
  unsure (1)..(60): unsure at all Xaa locations
  Clone ID: PAT_MRT3847_35620C.1.pep
MSMKLSVADGHLCNMGRMIEEMESKLMNSLDHVYFGKTXXMVCTLRPPSXMAQMRMADSA

SEQ ID NO: 214390 - protein, 61 aa, Glycine max
  unsure (1)..(61): unsure at all Xaa locations
  Clone ID: PAT_MRT3847_35621C.1.pep
IERCFYAQGRYQHTTHPSQGTXAFNQVRKYDFKMNYYPYFTPHCEKMLIYEINLGVVDKGV

SEQ ID NO: 214391 - protein, 79 aa, Glycine max
  Clone ID: PAT_MRT3847_35622C.1.pep
FIISFFQLNIFNIFSLFSFRNIFRTLKLKPVKKYSTISNYFCDYAQLLVDANVCTHSNITHTKNLTFMYLANIKNYMVN

SEQ ID NO: 214392 - protein, 112 aa, Glycine max
  Clone ID: PAT_MRT3847_35623C.1.pep
KNKNKKKKRGEKKKKRRNQPKGGPTKGPNRTNPGKPRKSPKKGAPKTKARADVQQRRDGKNPGPTQLKRQAKQPPIASGRKSKKARTERPTKQGPSQKGEGAAPRNGPKSPP

SEQ ID NO: 214393 - protein, 37 aa, Glycine max
  Clone ID: PAT_MRT3847_35624C.1.pep
MTSSCPCVTSGRVADIVDKGSTSRGASGAHDTLICCV

SEQ ID NO: 214394 - protein, 131 aa, Glycine max
  unsure (1)..(131): unsure at all Xaa locations
  Clone ID: PAT_MRT3847_35625C.1.pep
MSYHNARQSPGGFRSGAAPHHRAFDSPPHRSPGRGGGFRPMGAEGPAEFGFNGHQAPPPLAGQKRGFPFSGRGGGSPDRLDGGSCAKLXVGSVPRTASEEDIRPLLDEHGNVTEAALITDKQTGQHQRICY

SEQ ID NO: 214395 - protein, 55 aa, Glycine max
  Clone ID: PAT_MRT3847_35626C.1.pep
NRGGICYSRNHHSLKSNLPSPLFLLLNIVPYFLPAFSTCRSFDYTMHVGGLKKTK

SEQ ID NO: 214396 - protein, 129 aa, Glycine max
  Clone ID: PAT_MRT3847_35627C.1.pep
KSKWFFLTQTILRFWWGPGGRAPGPQKAYFWNLKLAGGKPFLCWDPSFYDRTLVNNPEVQDLGSPFRAHGLNPAPGARWETIHPFCKLKKSPHPTKRPTPPSPQKKKNPGGNPLIKWGPGKKKNPKKFS

SEQ ID NO: 214397 - protein, 160 aa, Glycine max
  unsure (1)..(160): unsure at all Xaa locations
  Clone ID: PAT_MRT3847_35628C.1.pep
CLQPDQFWDERMKDTRIVRNGAKIMSVRXNAGFVRDVAKEHGSFGQFLAGWPSSDEIGLLDLLAKRGSRLGGNTGQMLLRFLGWDGFVTSRDVVLCLRDAGLDITETVTSKRDLAKVQAQFNAWAEETGLAYVQISRICALSIGENYSIEKLERMMGGED

SEQ ID NO: 214398 - protein, 53 aa, Glycine max
  Clone ID: PAT_MRT3847_35629C.1.pep
NIFFFCISYSLVRFISLLHFRMQSCNHLPFFSITNEILSTARCYQIVERNFIF

SEQ ID NO: 214399 - protein, 146 aa, Glycine max
  Clone ID: PAT_MRT3847_3562C.1.pep
LLECIDFEADTEVVGLTSHHKVENSIETSLPHNSNLPEEPMVSTKKEATCYATRRYRGVRRRPWGKFAAEIRDPKKKGSRVWLGTFDTEIDAAKAYDCAAFRMRGHKAVLNFPLEAGMSHPEPNSSGRKRRRDYTTAVTSSSHVMS

SEQ ID NO: 214400 - protein, 55 aa, Glycine max
  Clone ID: PAT_MRT3847_35630C.1.pep
SYHWKLGGLLNSRTSWVWPHRQACELCTTMDVASWLYQSADIGTADQHAVTASME

SEQ ID NO: 214401 - protein, 35 aa, Glycine max
  Clone ID: PAT_MRT3847_35631C.1.pep
SKISTDQSLASIFLDLQAQGNLGWIQASFLVILKQ

SEQ ID NO: 214402 - protein, 76 aa, Glycine max
  Clone ID: PAT_MRT3847_35632C.1.pep
EQKHLEHTLHKLSHLCSHSTGAGAGAGAGISVIVSTNVGRDAGAHSSANGSTGAGTSHSIHIFILIKPILLNLLSR

SEQ ID NO: 214403 - protein, 46 aa, Glycine max
  unsure (1)..(46): unsure at all Xaa locations
  Clone ID: PAT_MRT3847_35633C.1.pep
XXEKLXXXXLACXSQALHXXVSXVIXRMSAXHXXXEXXHHXPSLFX

SEQ ID NO: 214404 - protein, 52 aa, Glycine max
  unsure (1)..(52): unsure at all Xaa locations
  Clone ID: PAT_MRT3847_35634C.1.pep
IRDSSISKTLVIHREWELGELGXSSVIPEKNGIVLGFFPFLSLSLVSNFAVD

SEQ ID NO: 214405 - protein, 65 aa, Glycine max
  unsure (1)..(65): unsure at all Xaa locations
  Clone ID: PAT_MRT3847_35635C.1.pep
LFXNKXXSFYLXXXITXXLTFXFTNFXPFSTYLXXLXHPPPXLHHFNTPNXTTSFPSFXSFSSSS

SEQ ID NO: 214406 - protein, 169 aa, Glycine max
  Clone ID: PAT_MRT3847_35636C.1.pep
PTRHEQSIVRAKKAGVAGASKKAREQQRTSISMVQQHVVVQVHVVVYRCIGTVQSVRGGLQAEQNQQRRRESPAVRWPFAAVSLWSPKQQVHHLGRLSVPVKVVLAPAPRRRRLRRRRRAGPRQPKLLRGVARQRAQRGQLEPPAGGSALAPAAHGRRRRRARPPVASN

SEQ ID NO: 214407 - protein, 484 aa, Glycine max
  unsure (1)..(484): unsure at all Xaa locations
  Clone ID: PAT_MRT3847_35637C.1.pep
TFSKVSLLLLVSLSFSYATSGFNHEHAYPPQSQAEMLTRNLNLFPKDPVNIIKGDFDSFVPGKIVEKKFSLLGHSGPSIQHLGHHAGQYSLPHSKAGSRFYFFFESRNNKDDPVVIWLTGGPGCGSELALFYENGPFHIANNLSLTWNDYGWDQASNILFVDQPTGTGFSYSSDDSDIRHDEASISNDLYDFLQEFFKAHPKFVKNDFYITGESYAGHYIPAHASRIIQGNKENQGIYINLKGLAIGNGATNPAIQYQAYPDFAXLDNKIITKANYDEINKLIPDCEQAANTCETQGGQSCAIAFNTCQKIFYHILDFAPGINYYDIRXKCKGDWCYDFRNVETLLNLPKVKSVIGVSNDLQYVSCSKRVHEAMMQDYMRNMEVEIPSLLEDGIKLLVYVGEEDLICNWLGNSRWVHAMKWSGKKAFGKSPTVKFVVDGSKAGSLNSYGPLSFLKVHEAGHLVPMDQPKAALQMLQSWMAGKLT

SEQ ID NO: 214408 - protein, 60 aa, Glycine max
  Clone ID: PAT_MRT3847_35638C.1.pep
GAITIEGYRANPSRKRQTKYFCLPAALGWNNFSFTEPASHEFSYAQLNIWCSKDSTLPTA

SEQ ID NO: 214409 - protein, 205 aa, Glycine max
  unsure (1)..(205): unsure at all Xaa locations
  Clone ID: PAT_MRT3847_35639C.1.pep
LQQVLVLHGGMEEPMQDYFSMEGKQLTCLAWNNMGNVLITGSITGNIEFIDVIRPERIHRCNLVSCSGSARIEGGNLSAICLSPDGTSMLSVHENGSVVMEWSVTPIMVAVTSQTDASSDVRGSIIDVKPTLMCTYEMDKPLASRDAEVDTSIRFVGAGDHFVAADSAALHVFKRGEERAMLTXVPNQATIADLDCHPNLPVRCS

SEQ ID NO: 214410 - protein, 102 aa, Glycine max
  unsure (1)..(102): unsure at all Xaa locations
  Clone ID: PAT_MRT3847_3563C.1.pep
XXXXXVSSXFGSSXVXATTXXXXXXIXWXXXLXRPRARXXXSGVPTXGXGCPKXXAIKRFLXXXXSNRLXQRCVGXXXLXRXSSSXSXFXDCSTVFLFAIHS

SEQ ID NO: 214411 - protein, 108 aa, Glycine max
  unsure (1)..(108): unsure at all Xaa locations
  Clone ID: PAT_MRT3847_35640C.1.pep
MGVLIFVARTSGIKRRAKQHSGHIEDSAESTFHLQRKLVQAALAVKSSGGLHSSFSPVSPTSXVFDVTSGSFVFDGGGSSAIATALAGGAAASDDAPAADKNEQNVDE

SEQ ID NO: 214412 - protein, 45 aa, Glycine max
  Clone ID: PAT_MRT3847_35641C.1.pep
MATITRLRPIGERYALVSLKMNAILKNISINFKFDGYKYYIHKHQ

SEQ ID NO: 214413 - protein, 328 aa, Glycine max
  Clone ID: PAT_MRT3847_35642C.1.pep
MAQLNLILIWLFLLSLCLYSCPTSAQLSRHHYAKTCPNVENIVREAVKKKFHQTFVTVPATIRLFFHDCFVQGCDASVLVASTKNNKAEKDHPDNVSLAGDGFDTVIKAKEAVDAVPLCRNKVSCADILALATRDVIELAGGPFYEVELGRFDGLRSKDSDVNGRLPHPEFNLNQLNSLFAANGLTQTEMIALSGAHTVGFSHCNKFTNRVYNFKSKSRVDPTLNEKYATQLKSMCPRNVDPRIAIDMDPSTPRSFDNVYFKNLQQGKGLFSSDQVLFTDSRSKATVNAFASSSKIFHANFAAAMTKLGRVGIKNAQNGNIRTDCSVI

SEQ ID NO: 214414 - protein, 106 aa, Glycine max
  unsure (1)..(106): unsure at all Xaa locations
  Clone ID: PAT_MRT3847_35643C.1.pep
MLTILRLHGQRTRGRILKQQKNRWDPSIFTPSDMAFLDRGYTCXWKLYIQGILPTPYYEWSXTNKDFTVYXNFVQCISNFCEYITVNGPLEGFLGFSQGAAMSSLL

SEQ ID NO: 214415 - protein, 85 aa, Glycine max
  Clone ID: PAT_MRT3847_35644C.1.pep
MAMRSWVSRGSVTRLMDSANRGAFSRFFSDKGRVLSEEEQAKENVYIQKWERERLEKQKQQAEKTKADKGKDAAADKKPEGSQKG

SEQ ID NO: 214416 - protein, 101 aa, Glycine max
  unsure (1)..(101): unsure at all Xaa locations
  Clone ID: PAT_MRT3847_35645C.1.pep
KKIRLKGFKGKARKKSIKAMVKRAGKKSXKWGEGGGLYSGVTNGLKKARGAHEXKKRAVAXAINGATLELTLEGSIHEQVVQCAINGAAIFSGANLRTGIF

SEQ ID NO: 214417 - protein, 46 aa, Glycine max
  Clone ID: PAT_MRT3847_35646C.1.pep
IIRRNELVKSSSLPFFPNTGLGQTSYRRYPPKERASNPRKPETINT

SEQ ID NO: 214418 - protein, 49 aa, Glycine max
  Clone ID: PAT_MRT3847_35647C.1.pep
TPSYSSSLIHSSKLFPSSTSLSYLQQTHLLHSKSIHLQNLSITHITKSI

SEQ ID NO: 214419 - protein, 60 aa, Glycine max
  Clone ID: PAT_MRT3847_35648C.1.pep
NKHPCYFVNRYYFRGAASCTQFLFSFVCQERVTFTQGINVGEPKGLLETCKAVGSPFKES

SEQ ID NO: 214420 - protein, 64 aa, Glycine max
  Clone ID: PAT_MRT3847_35649C.1.pep
TLKFWSSPRLACLMYNYIGSSLYAAKPILQACADVHTATIVNDAQWATTRNGDDTDGDALCALN

SEQ ID NO: 214421 - protein, 119 aa, Glycine max
  Clone ID: PAT_MRT3847_3564C.1.pep
MDVKKIVVAVEDVDAARTALQWALRNIIRYGDIITLLHVYHHSTRSKSKARLLRLNGFKLALSFQDMCNNYPNTKVEIIVTEGDQEGAKIAATVREIGASMLVVGLHDSSFLYKVPRTP

SEQ ID NO: 214422 - protein, 70 aa, Glycine max
  Clone ID: PAT_MRT3847_35650C.1.pep
LIAFDARAPLPFFHSWMTGLLSTTLFMGLFSLTPAANFLYASRFVGSQVFQHSSDAVCHFFRVSINSYTS

SEQ ID NO: 214423 - protein, 135 aa, Glycine max
  Clone ID: PAT_MRT3847_35651C.1.pep
IRHQELQKENRELRIQLAQHQQKLLTLQAQSLASHSSPTPPPSAGPLSTPLTSAQPIEKRRTRSSFLAGTCFTPETKQKGAELTIKTLQRTVKTLEAEIEKMRKDHSLQLKQKDDLIRELSQKGGKQALATGELG

SEQ ID NO: 214424 - protein, 63 aa, Glycine max
  unsure (1)..(63): unsure at all Xaa locations
  Clone ID: PAT_MRT3847_35652C.1.pep
HSIDYLXALPKPTHCQLLFHALQFLVYTFNNSIMDSILVFFLWIVILSIVPIGKVLAICWLLA

SEQ ID NO: 214425 - protein, 55 aa, Glycine max
  Clone ID: PAT_MRT3847_35653C.1.pep
GYSHGNCALVGDTEECTELNTLPHEVDEYRIAKQIPCGFGGPIYPSCKTMALSHT

SEQ ID NO: 214426 - protein, 241 aa, Glycine max
  unsure (1)..(241): unsure at all Xaa locations
  Clone ID: PAT_MRT3847_35654C.1.pep
MSTPSRRSVAVAVSGGSKGSRRAVQWAADNLVPQADRFILVHVIPRITSIATPTGEYIPISEADADVFAASVLDAKLKSEQIFVPFKKXCDSNTMETVLLEDDNAAEALLSFISESGSQILVLGSDSSNFITRKLKGPGIPTTILRCAPDSCDVYIVARDRIISKLADFSSSRSHETSPRYFLSTKVNKEDNGIGREMSGISSSSTEPKILRNFRFLSISERSYIGLQSSSRRNSFENSTK

SEQ ID NO: 214427 - protein, 41 aa, Glycine max
  Clone ID: PAT_MRT3847_35655C.1.pep
ARAAFRCTNSEVTVQPSPYLSYRLPKDFVDLSTGEDAHKLI

SEQ ID NO: 214428 - protein, 37 aa, Glycine max
  Clone ID: PAT_MRT3847_35656C.1.pep
VCFIFFSFQHVRLFWPSLHCNSRPNNFMRFCKLMWSS

SEQ ID NO: 214429 - protein, 119 aa, Glycine max
  Clone ID: PAT_MRT3847_35657C.1.pep
RNAARNSARASKVPFCHRPPLGQDLHCRPTRGTLCTSLTPLTAMELLDSPVRWPELLDGPSILTDVPELARTPPDTTAPDNLASSSRAPPRTVQRMYHRRGLPRCCLTITIPLALVSPS

SEQ ID NO: 214430 - protein, 46 aa, Glycine max
  Clone ID: PAT_MRT3847_35658C.1.pep
KDLAIIFEYTFSFNTTLTLLFYFFLSSYHIISLIILIFLSLFSNDT

SEQ ID NO: 214431 - protein, 81 aa, Glycine max
  unsure (1)..(81): unsure at all Xaa locations
  Clone ID: PAT_MRT3847_35659C.1.pep
MSAIFPLVGMLSPITSAQFIGGCYGVIGDDLPSRQEVVDLYNTDGIXGRMHIYYPYEEALLALRGSSIDLIMDVANDTLAS

SEQ ID NO: 214432 - protein, 80 aa, Glycine max
  Clone ID: PAT_MRT3847_3565C.1.pep
IDEPPCEQRTRFSSNTMENKGFHFRGHDINFHCSYDVFRGMISINNRWVVMMNMGSHSQHLGTGYIRTYSVYGDKLTGSM

SEQ ID NO: 214433 - protein, 48 aa, Glycine max
  Clone ID: PAT_MRT3847_35660C.1.pep
LTTQYTHLNTHVFHLLSQVQFMTYSQFDSQFQNLNITIYTKGLSQHGK

SEQ ID NO: 214434 - protein, 69 aa, Glycine max
  unsure (1)..(69): unsure at all Xaa locations
  Clone ID: PAT_MRT3847_35661C.1.pep
SHNRXGKAIYEAGGAYLVLLTDGMTRAPVVRFPSAQRAGQVKFFLEEPLNFDXLAVAFNKGKLCWFKVG

SEQ ID NO: 214435 - protein, 247 aa, Glycine max
  Clone ID: PAT_MRT3847_35662C.1.pep
MDFLGKIPWFNAQVNTDLATNSIPIETFTEQPKQELGNDPKLPFLSLFPWGNRAGEKFQRPSTINKELKRQARCGNGVGKDGEATPSRFRPYVCQVPWHTGVRAFLSQLFPRYGHYCGPNWSSGKDGGSLVWDRRPIDWLDFCCYCHDIGYDTHDQAKLLKADLAFLECLEKQHGSTKGDPHVAHLYKTMCVNGLRNFLIPYRRNIVNLQQFGQPMIQFGWLSNLRWGGWNFQKTHRLSSLGGSTVS

SEQ ID NO: 214436 - protein, 65 aa, Glycine max
  Clone ID: PAT_MRT3847_35663C.1.pep
DHRENNTNSSKIGPRRLLPVPEPKVRGDQRRDKPILVAREEMNDNLLPCESSTAYEAAYRPATTE

SEQ ID NO: 214437 - protein, 60 aa, Glycine max
  Clone ID: PAT_MRT3847_35664C.1.pep
KGLAPPDVNSYEEAGTPVINEKDDENCATIVNDEQHVMHIPSPCSMSSSPDMIFMEFYKA

SEQ ID NO: 214438 - protein, 128 aa, Glycine max
  Clone ID: PAT_MRT3847_35665C.1.pep
PWSWLMDIEPLWAIGGWSFLSNYCMAEPKASSSSSPISEPFSKSPSFLHFLSLFFILLLLINLSHQPHPSTMASSEKNTKSSESAMPTTSMHPQNTQKSHTPSSTKDAGREFGADAHEVPSGPNPISN

SEQ ID NO: 214439 - protein, 117 aa, Glycine max
  Clone ID: PAT_MRT3847_35666C.1.pep
SIISFLIFFLSLPIFTEFMVTITTSRAYHSQHHFSLLFYATLVLSYSLLLLNIYPTLHIQHQFFTLSTSSSFSTFPQSPISHSNYLHILYAFLYIQNIHIPFSTIHQQSHQTNHTQL

SEQ ID NO: 214440 - protein, 82 aa, Glycine max
  Clone ID: PAT_MRT3847_35667C.1.pep
ACMFVLCVCVRWKVLPQNTILGNISFAWPHHLTFVFVHFLSSPNAHERSLSCRFLLFFCPQDPVDCKLYKIYHTYHVIALIW

SEQ ID NO: 214441 - protein, 63 aa, Glycine max
  Clone ID: PAT_MRT3847_35668C.1.pep
LHFYAVIHLSTVIIIIITINYSKRHVQLLLVQLHANHPLRSLSPIRPPPPKEGGRHTVMTGNL

SEQ ID NO: 214442 - protein, 260 aa, Glycine max
  Clone ID: PAT_MRT3847_35669C.1.pep
MASPLSAQLVQCQNSLPPLQGNFSQDVSKVQRSRVVCYGTRSPLGYYGKALTSRSHNALRFSVTRQSEARSIGYRRMTCVNAADNVVELQAKVTTKCFFDVEVGGEPVGRIVLGLFGEVVPKTVENFRALCTGEKGYGYKGSSFHRIIKDFMIQGGDFTEGNGTGGISIYGPSFKDESFALKHVGPGVLSMANAGPNTNGSQFFICTVKTPWLDNRHVVFGHIIDGMDVVKTLESQETSRLDVPRKPCRIVNCGELPIEG

SEQ ID NO: 214443 - protein, 79 aa, Glycine max
  Clone ID: PAT_MRT3847_3566C.1.pep
ITRTEIYESIQENFLTRGRISCTLKSPHRHSVVEENFVICEPMFHTKNGMRIRKHAENHNVTKRRGKLVSYSFKALQFD

SEQ ID NO: 214444 - protein, 92 aa, Glycine max
  unsure (1)..(92): unsure at all Xaa locations
  Clone ID: PAT_MRT3847_35670C.1.pep
DFEQSGKLQDGREVAIKRLYEHNYRRVEQFMNEVQILTRLRHKNLVSLYGCTSSHSRELLLVYEHVPNGTVACHXHGELARRDTLXWHTRMK

SEQ ID NO: 214445 - protein, 72 aa, Glycine max
  Clone ID: PAT_MRT3847_35671C.1.pep
DAPGYTKSARAILRAAVFGVLLVVASAHRTIVTVVEEGEREGGCKQQIRSAENLKDCHSFLGDASEPKESQH

SEQ ID NO: 214446 - protein, 94 aa, Glycine max
  Clone ID: PAT_MRT3847_35672C.1.pep
GFQLPSKIRSALASLPQILTMCVCRTPSEHQDQIRGALSTLCGKVKTFWRPNSFVACLLPLEGVAWGTEHFFGASSNVGERVKMPFTFNIKAAQ

SEQ ID NO: 214447 - protein, 98 aa, Glycine max
  unsure (1)..(98): unsure at all Xaa locations
  Clone ID: PAT_MRT3847_35673C.1.pep
HSTTPTRTLRGLSSPKIIINNAKRINNNLXQKIIKLKSQMENLAXKAQLQEVKLKKTTKQLKEAIASAIEETTKYKTARKVIKSLTTQLKNMTKRLPS

SEQ ID NO: 214448 - protein, 100 aa, Glycine max
  unsure (1)..(100): unsure at all Xaa locations
  Clone ID: PAT_MRT3847_35674C.1.pep
TVSSSKQGRSDIYKDTGCVSTILNNLLKVSSVTSXHPVPTLXNVSYLFRFHKAPPAVPKSNGLTKTLLLMQNNSXAASASNYSDLLKIFPVNTKSPPSCK

SEQ ID NO: 214449 - protein, 60 aa, Glycine max
  Clone ID: PAT_MRT3847_35675C.1.pep
KKKVFPNTKIQDSFFSFFPSHEKTKSLVFVFKFVFLVGIRQEYRMQLQVYKARMCLLFRD

SEQ ID NO: 214450 - protein, 375 aa, Glycine max
  Clone ID: PAT_MRT3847_35676C.1.pep
IIYHKLWLIQTPTQAVEEKILYLSAKETMDDQFIDYVDWKKVAEKTALLRPIELKIVPMALEGSAFRSKVLDTDELMDYCGLFATFSSMIPQWLRKTKIFNKFSKGLVNHLGLTLTKEDLQNVVDLMEPYGQISNGIEYLSPPLDWTRETKFPHAVWAAGRGLTALLLPNFDDVDNLWLEPLSWQGIGCTKITKARNEGSINGNSESRSYLEKKLVFCFGSYVASQMLLPFGEENLLSTSEIQQAQEIATRMVIQYGWGPDDSPAIYYRSNAVTALSMGDDHEYVMAAKVEKMFDLAYLKAREILQKNRLVLEKIVEELLEFEILTGKDLERITKDNGVIREQEPFTLGEVQASEPTSGSFLERGNASGSALLAS

SEQ ID NO: 214451 - protein, 92 aa, Glycine max
  unsure (1)..(92): unsure at all Xaa locations
  Clone ID: PAT_MRT3847_35677C.1.pep
VPKVSTSTHHNTKHSITVFCPHCPFVLTKSQWHPLSLFSHRRPSSHGGLYWXVCVLGPRRQKRQTRTDLSGGSISPSKVQDNYKQYWSFFRR

SEQ ID NO: 214452 - protein, 54 aa, Glycine max
  Clone ID: PAT_MRT3847_35678C.1.pep
FILTPTKDLERITKDNGVIREQEPFTLGEVQASEPTSGSFLERGNASGSALLAF

SEQ ID NO: 214453 - protein, 95 aa, Glycine max
  unsure (1)..(95): unsure at all Xaa locations
  Clone ID: PAT_MRT3847_35679C.1.pep
XYPXRDLPQLXPEXXHXAYXSIXXNXISTSXXIXTSXNGXICXXXNRLXXXSAKXNXSRAXRHGXPXDFLRXRFHXRDXXXXXRXXXRXYVXXXX

SEQ ID NO: 214454 - protein, 70 aa, Glycine max
  Clone ID: PAT_MRT3847_3567C.1.pep
TGGGEKKKKTEETTHYTGGQETTKPSYCQVINTYKPTLFIKGIPSFFSFIKSDLIWGGGPTSTREVPGGK

SEQ ID NO: 214455 - protein, 101 aa, Glycine max
  Clone ID: PAT_MRT3847_35680C.1.pep
CLYFIFFILPIYDGGGPKNDRGFGFLLKSSPAYFCGGKQIFPKQEKAAKKMFLKKPLVFFFIRPHFSFPHWGKAKFLFILGGAPFTLGAQHMVSSFFLNRI

SEQ ID NO: 214456 - protein, 75 aa, Glycine max
  unsure (1)..(75): unsure at all Xaa locations
  Clone ID: PAT_MRT3847_35681C.1.pep
MADEELXIRXXXLXESCNPXCXKPLLDXQACIKRIHXDXSGQQXWTXQHXDXWXRIDNVLTPQLFTXLXYGEGFG

SEQ ID NO: 214457 - protein, 130 aa, Glycine max
  unsure (1)..(130): unsure at all Xaa locations
  Clone ID: PAT_MRT3847_35682C.1.pep
MASLPCLLVSIHFIVIMSSSLPTNSDEVFAKQSPMSPSTKPVEKITQLHFYFHNNVTEKNPTAMRIVGPPKGFITQFGTVVMMDDPLTEGPSPSSKLVGRSQXIYALASQHEFGSLLMVTNFFFTEGIYN

SEQ ID NO: 214458 - protein, 127 aa, Glycine max
  unsure (1)..(127): unsure at all Xaa locations
  Clone ID: PAT_MRT3847_35683C.1.pep
CVLPKVSNIPEENFIVRLPFYAKIFTPVNGAYFLILMGLVFEGTWAFCACRKKHPNEVPYQELXMALPEFASAPNVESPEGWDQDWDNFWPVNAPVKSPSALAGSIFGKPLIIRSSNKDGWENNWDD

SEQ ID NO: 214459 - protein, 118 aa, Glycine max
  Clone ID: PAT_MRT3847_35684C.1.pep
SKISVTVAETLPLPLPPIFNPTFSFSFNFFNIVTYTIICFFQTPPISFFPNNFVIWKLRLLFNSLARSMQLPCNMVLNYLIFRESGRKTNARIVIFIKPLWLTNIVLIGKKKKKKKTP

SEQ ID NO: 214460 - protein, 148 aa, Glycine max
  Clone ID: PAT_MRT3847_35685C.1.pep
SWDLQIYKPWPSKDPLRIQLFVNLVGKMIVSKAPIASGTNFNFGTYVVQGQIWDPPWSNLLFHGSFEHQATRPRALRFQCFEACNGACFRTPIFFAPSPPPLWPLGLLVPKSVRSAAFCAPPTGPAAWSFKTTLAGLILSPPPLSQPR

SEQ ID NO: 214461 - protein, 57 aa, Glycine max
  Clone ID: PAT_MRT3847_35686C.1.pep
TIDIVYVVHLVLIFERILEDLHALCIRCCEKVWWEVLAPHKAVLADIVFQLSISIIL

SEQ ID NO: 214462 - protein, 130 aa, Glycine max
  Clone ID: PAT_MRT3847_35687C.1.pep
MCKVANSTVRKLFNDVLPVETNQPSLRSNDFNEGDDLDKLPIYHDELTGLSYVESQEPGVLSQDNALDFVDRFLKDNTLEFDQETNSVKKIEEKSKSIPSTKRQHSLAKTVNDRGPFCRLLAAVLEPLEP

SEQ ID NO: 214463 - protein, 33 aa, Glycine max
  Clone ID: PAT_MRT3847_35688C.1.pep
MNCLTISLFKFLITLTSMLISSSHNFLSIFIHC

SEQ ID NO: 214464 - protein, 56 aa, Glycine max
  Clone ID: PAT_MRT3847_35689C.1.pep
HHTSLLPSWTLIFFPLNWGWMKKPRTVNNAGQPLKNNCAYHGKKKKKRKPLLKIQT

SEQ ID NO: 214465 - protein, 147 aa, Glycine max
  Clone ID: PAT_MRT3847_3568C.1.pep
HASAHASAHASAHASERFGSLVKMPLLKSDRNPLPEPVQSVLEEGIDLYKLHTKRHGRLESTKGSYAKEWIKWEKQLRDILCGNAEYFNSIQVPFEFAVKQVLEQLRSIAKGEYTPPDTERRKFGTIVFAALSMPVTEIHGVLNKLA

SEQ ID NO: 214466 - protein, 44 aa, Glycine max
  unsure (1)..(44): unsure at all Xaa locations
  Clone ID: PAT_MRT3847_35690C.1.pep
RKMSGVEIKFYLRKEXGKLKRCGLRNLSVNSXGVVFKKREGIRK

SEQ ID NO: 214467 - protein, 118 aa, Glycine max
  Clone ID: PAT_MRT3847_35691C.1.pep
GLNGKVIVVVALDQRVVQSSSMWSCLHFPFPFSTFFSLWLGVTEFRRGVVRLGIRMQETQLAQDSILGSRAYSKGFVPFDLWLFGMHIAFQFQYYYVCIFTISVGLNSLVFDENIWEV

SEQ ID NO: 214468 - protein, 48 aa, Glycine max
  Clone ID: PAT_MRT3847_35692C.1.pep
RRSRRGKRNLRVWTMKSRLLLACITYHNWFSILRKISFPFCRLLAASS

SEQ ID NO: 214469 - protein, 36 aa, Glycine max
  Clone ID: PAT_MRT3847_35693C.1.pep
GPAHMPQSLLLCKQHPHKSPSSSPLAIHSSPACYTS

SEQ ID NO: 214470 - protein, 130 aa, Glycine max
  Clone ID: PAT_MRT3847_35694C.1.pep
MVRVSVLNDALKSMYNAEKRGKRQVMIRPSSKVIIKFLLVMQKHGYIGEFEYVDDHRAGKIVVELNGRLNKCGVISPRFDVGVKEIEGWTARLLPSRQFGYIVLTTSAGIMDHEEARRKNVGGKVLGFFY

SEQ ID NO: 214471 - protein, 130 aa, Glycine max; identical to SEQ ID NO: 214470
  Clone ID: PAT_MRT3847_35695C.1.pep

SEQ ID NO: 214472 - protein, 56 aa, Glycine max
  Clone ID: PAT_MRT3847_35696C.1.pep
EFGSTNGSMNAPMLGLQDGGVAPAETSHAGYQKWSSPFLGKDLFSLPRQFVSSPSL

SEQ ID NO: 214473 - protein, 130 aa, Glycine max; identical to SEQ ID NO: 214470
  Clone ID: PAT_MRT3847_35697C.1.pep

SEQ ID NO: 214474 - protein, 87 aa, Glycine max
  Clone ID: PAT_MRT3847_35698C.1.pep
HLDSFQFDQPSADPVSYRRIKHQHGTAVHPSIAYDLPPPQHQRVRWPACEPGSVHLCQLQRQCGLSELSLDGGILEMTVRCRVRALV

SEQ ID NO: 214475 - protein, 78 aa, Glycine max
  Clone ID: PAT_MRT3847_35699C.1.pep
SFILIWTIFLVVFDHPKPIIMNLIFYSIKMSAFHCTKQYFRLRNITSLSGCIKYQQILFDNVIMGHNWSRDCINFLFT

SEQ ID NO: 214476 - protein, 41 aa, Glycine max
  Clone ID: PAT_MRT3847_3569C.1.pep
VLDQLHSCLIRGRTTKLRVQEQLHFLLRPSSAKCVSVRFLI

SEQ ID NO: 214477 - protein, 638 aa, Glycine max
  Clone ID: PAT_MRT3847_356C.1.pep
MDVVTTLKSAKRCWRFGVFPFLASFLVTVTLFSLYSPNGNANQNQMSIYHFPNIFTLSSFAVVSETLMELNLVATELGQIALSSAMISEILQWTTMELLFNSKFSMRFLIVLLIGATGFAVLLLLIIRPLVNIVLERTPPGKPIKEAYVVLLLLGPLVMAAISDTFGIYFVMGPFLYGLVLPNGPPLATTIIERSELIVYEFFMPFFFLLIGTRTDLTLIHEHWEVVLVVLAILFVGCLVKVIDTEVFSVAVMSVVVMTSICIPLIKSLYRHRRVCKTQTIQEGCVKTIQNITENTPFNIVSCVHTDEHVHNMIALIEACNPTTQSPLYVYVVHLIELVGKSTPILLPMNKNKRKSLSVNYPNTNHILRAFENYSNNSSGPVTVLSYVNVAPYRSMHEAVCNLAEDNSVHLLIIPFHQNDQTLGSHLASTIRNLNTNFLANAKGTLGILVDRYSVLSGSSSKLSFDVGIFFIGGKDDREALALGIRMLERPNTRVTLFRFVLPTNEDSRFNGLVENEDENLESTLDESLIDEFIAKNDISSDSVNVVYHEAVVEDCIQVLKAIRGMEKDYDLVMVGKRHSMGNFVEEEMSNFMDNADQLGILGDMLASNEFCNGKVPVLVMQCGDEKRVKQLEKVCHI

SEQ ID NO: 214478 - protein, 83 aa, Glycine max
  unsure (1)..(83): unsure at all Xaa locations
  Clone ID: PAT_MRT3847_35700C.1.pep
AFALFVGVSVAAKISGGHLDPAVTSXIGHXGNITLMTGFLYWIAQLSGSIRACLPLNFISAESIPSHAPATGVNDVQAVVFQI

SEQ ID NO: 214479 - protein, 77 aa, Glycine max
  unsure (1)..(77): unsure at all Xaa locations
  Clone ID: PAT_MRT3847_35701C.1.pep
GGDLVFXMLRWTSPYIQCPVSLFIAFGNQAXDTIKHEASPHKLEQLGESQEKVVLKXSQEEFLNRVAQHEDALQQQL

SEQ ID NO: 214480 - protein, 155 aa, Glycine max
  unsure (1)..(155): unsure at all Xaa locations
  Clone ID: PAT_MRT3847_35702C.1.pep
IGGYHVGRDMALILDVARFKYPPHWIPLKLLWEGMNYIDEDTGQSRGFMLVSRPHREPGLLYTXEDVKDILQVVSIIAASLPSNFEEFIKWIAEIRRREDGGPSLSAEEKARLAIKEEVLKQVQETGLFKHVASFLSSSCSRQHVLGDGDTLPII

SEQ ID NO: 214481 - protein, 70 aa, Glycine max
  unsure (1)..(70): unsure at all Xaa locations
  Clone ID: PAT_MRT3847_35703C.1.pep
AGSMISSPSVTTVNRNGAGMVVPFICLKFMAGFHTRKTNNDITFIASIGGRVQXLHVRPPVGTKKIESVT

SEQ ID NO: 214482 - protein, 68 aa, Glycine max
  Clone ID: PAT_MRT3847_35704C.1.pep
KHNFTYLFNQQYGTQIFNIKPVLKPCSRLLIANTLKVIQHQPTGIICFRILIRSTKIQSIFIECINLL

SEQ ID NO: 214483 - protein, 497 aa, Glycine max
  Clone ID: PAT_MRT3847_35705C.1.pep
MATAGLYRRLLPCPPAVEFASSQGKQLFLESIQNGTMEGFYKLVSYFQTQSEPAFCGLASLSMVLNALAIDPGRKWKGPWRWFDESMLDCCEPLETVKARGITFGKLVCLAHCAGAKVEAFHATHSSIDDFRKYVKKCSMSDDCHVISSYHRAALKQTGIGHFSPIGGYHVGRDMALILDVARFKYPPHWIPLKLLWEGMNYIDEDTGQSRGFMLVSRPHREPGLLYTLSCKHESWINIAKFLMDDVPLLLKSEDVKDILQVVSIIAASLPSNFEEFIKWIAEIRRREDGGPSLSAEEKARLAIKEEVLKQVQETGLFKHVASFLASSCSRQASGDGDTLPFIAASVCCQGAEILGGKPSSSGYCCRETCMKCWKAEDDKPITMVSGTVVNGNTEQGVDVLIPSSSGKLCCICSKSKYIRVHPASTDVLTVLLLSLPSTTWAGITDEQLLAEIHDLVSIENLPTLLQEEVLHLRHQLHLLKRCQEGKVDEDLGAPLS

SEQ ID NO: 214484 - protein, 279 aa, Glycine max
  Clone ID: PAT_MRT3847_35706C.1.pep
MAGKEENRIFVGGLSWEVTERQLEHAFARYGKILECQIMMERDTGRPRGFGFITFADRRGMEDAIKEMHGREIGDRIISVNKAQPKMGGDDADQGYRGGYSSGGRGSYGAGDRVGQDDCFKCGRPGHWARDCPLAGGGRGRGGSSFPSRPRFGAAGGHGDRLGGERDRYVDDRYEGGRYGDRDRFDNRDYKYGSRDRYASDRYPTSGDRFASDRYGGGSDYPQNGYGKERGYDRYGGPRGGADRYGSGMGGRDEGRSYRGRPGPYDRPSRGSRSSLDRY

SEQ ID NO: 214485 - protein, 96 aa, Glycine max
  Clone ID: PAT_MRT3847_35707C.1.pep
KKGKQGNITKFKNMAKKKLERGGEKKAKTNTKFKALQQGKNKAGLSSWGTKKKVLKKTKLLEGGRKKRQKQKASLKLCNRGKTKRAFRLWGPKKNF

SEQ ID NO: 214486 - protein, 33 aa, Glycine max
  Clone ID: PAT_MRT3847_35708C.1.pep
VLSTCQSNPTAPVAMIPSIHVNYVADHEIRAYA

SEQ ID NO: 214487 - protein, 96 aa, Glycine max
  unsure (1)..(96): unsure at all Xaa locations
  Clone ID: PAT_MRT3847_35709C.1.pep
GASVSLLPFFSPPPPPXXGVFVXXFCWRRGPPPLKRSVGLSPLGPLLSLPLAFFGRSLLLFCAFFAPSRCAPPFVVFSLLXALAGRAEXSGPVLAG

SEQ ID NO: 214488 - protein, 84 aa, Glycine max
  Clone ID: PAT_MRT3847_3570C.1.pep
KQHPTLKLREKEMGSLEPSLPLHAVILPFMAKGHTLPLLHLAGVLLGRQPPLSSPKHCKTLTPLRMQWLLFVCKHKMALQGDPN

SEQ ID NO: 214489 - protein, 56 aa, Glycine max
  Clone ID: PAT_MRT3847_35710C.1.pep
FCKNKSKMGKGSFGKVTIQIVRVVMLGPVFGEYTLLPESKSGPSRNLKIEFQWFNK

SEQ ID NO: 214490 - protein, 43 aa, Glycine max
  Clone ID: PAT_MRT3847_35711C.1.pep
FADESYLNTKTHLLFYVFIPRFKSVTKSTTTLDNFFSNDATDS

SEQ ID NO: 214491 - protein, 70 aa, Glycine max
  Clone ID: PAT_MRT3847_35712C.1.pep
GSYVVKIAMLWGTVSVSLMVNTTMSKTGSATILIPGRHPFRQTLLSKPLTVTHSKKKGQVELKGIHTLKY

SEQ ID NO: 214492 - protein, 120 aa, Glycine max
  unsure (1)..(120): unsure at all Xaa locations
  Clone ID: PAT_MRT3847_35713C.1.pep
LSIFLCXEEADLQPCEGVHLASPHYFKFIKFVNKILYFYILFYFIYIILNPRILFFIIWKDLDLLVSMNCYVPWCMSIISLVKEIDKGKKEVVKACNWWRHVMKLVMNDISLSIQNRDAM

SEQ ID NO: 214493 - protein, 75 aa, Glycine max
  Clone ID: PAT_MRT3847_35714C.1.pep
MPMSIRCGAGPYRAIIVPMPHAVFLVGQLSVEQFVFAVINKSSAYIRWANTVSIILVDPGGDTINYGHFFNNLTQ

SEQ ID NO: 214494 - protein, 103 aa, Glycine max
  Clone ID: PAT_MRT3847_35715C.1.pep
FRLDHLYTLCRAVMGLFKSWLTDSRHDSEVLDDALQEAFSTLRRLFDTTPPLLSGIRVALTASQVDEDGSLCLFSNYRGVGRIHAQSAYKVLIPGEEPQLWDV

SEQ ID NO: 214495 - protein, 85 aa, Glycine max
  Clone ID: PAT_MRT3847_35716C.1.pep
TYIHYCPQLFIPSSVHPSLVNCSMIVITVHHIEASNSILHLMTDIFHLANSSFVDQFIPIIHILIIPQNTSITIIYQASSTVALT

SEQ ID NO: 214496 - protein, 65 aa, Glycine max
  Clone ID: PAT_MRT3847_35717C.1.pep
NFSANKLFKSIHHSHDHFYSYTNDISTFKPKFNIYKRESSVLHQLFPLLMTNPLHRYHNIMVFSK

SEQ ID NO: 214497 - protein, 94 aa, Glycine max
  unsure (1)..(94): unsure at all Xaa locations
  Clone ID: PAT_MRT3847_35718C.1.pep
GGILVDKGGDFITLTRNSXPISNSLRVAVWKKGCLMVKIVMSGNASVKRCDWALLEQVVLTNSNSTKHFDACKLSKSEPHSWELIXFPIEVCGP

SEQ ID NO: 214498 - protein, 58 aa, Glycine max
  Clone ID: PAT_MRT3847_35719C.1.pep
MSWIFFFWLYNIDRCYGLNLMHNFSQKFVFTLLFSLLFSNALFGVKYKENKSQCLSGD

SEQ ID NO: 214499 - protein, 90 aa, Glycine max
  Clone ID: PAT_MRT3847_3571C.1.pep
MHHDAFNHGYKAAKPSFDITTHSILRHACYKRLKAHAINTLFTTWMHLVLSHTRTSHLSLFSTHLTSSYSFHFHSLQLLFLPLLHNINFS

SEQ ID NO: 214500 - protein, 183 aa, Glycine max
  Clone ID: PAT_MRT3847_35720C.1.pep
MANTKHLTFTFTIVLTLLFSFATAKSPTALGSSRIGSRREKTTEGDIVSGPKPTAVRVAQAHMTNTSSTLFGLLMMADDPLTVGPEPGSKLVGKAQGIYGFASQEDMGLLMIMNFAFTEGKYNGSTLSLLGWNAVLSTVREMPIVGGSGAFRFARGYAQAKTHTVDYKTGDAVVEYNVYVLHY

SEQ ID NO: 214501 - protein, 133 aa, Glycine max
  Clone ID: PAT_MRT3847_35721C.1.pep
MANTKHLTFTFTIVLTLLFSFATAKSPTALGVQKEKLSHLHFFFHDIVSGPKPTAVRVAQAHMTNTPSTLFGLLMMADDPLTVGPEPGSKLVGKAQGIYGFASQEDMGLLMIMNFAFTEGKYNGSTLSLLGWN

SEQ ID NO: 214502 - protein, 42 aa, Glycine max
  Clone ID: PAT_MRT3847_35722C.1.pep
TFPQLGPPPPPPPPPPPPPPPPPPPPPPPPPRRRHCNSVARQ

SEQ ID NO: 214503 - protein, 785 aa, Glycine max
  Clone ID: PAT_MRT3847_35723C.1.pep
EFPGLEPKLKKAAILKSLQTIMVVFLLIVLFSSNTKAEKETIHDHANKKTYIIHMDETTMPLTFTDHLSWFDASLKSASPSAEILYTYKHVAHGFSARLTPKDVDTLAKQPGILSVIPELKYKLHTTRTPNFLGLDKATTLLPASEQQSQVVIGLLDTGVWPELKSLDDTGLGPVPSTWKGQCEIGNNMNSSNCNRKLVGARFFSKGYEAALGPIDTTTESKSARDDDGHGSHTLTTAAGSVVPEASLFGLASGTARGMATQARVAVYKVCWLGGCFTSDIAAGIDKAIEDGVNVLSMSIGGSLMEYYRDIIAIGSFTAMSHGILVSTSAGNGGPSQGSLSNVAPWITTVGAGTIDRDFPAYITLGTGKTYTGASLYSGKPLSDSPLPLVYAGNASNSSVGYLCLQDSLIPEKVSGKIVICERGGNPRVEKGLVVKLAGGAGMILANSEAYGEELVADSHLLPAASLGQKSSEILKNYVSSSPNPTAKIAFLGTHLQVQPSPVVAAFSSRGPNALTPKILKPDLIAPGVNILAGWTGAVGPTGLTVDTRHVSFNIISGTSMSCPHVSGLAAILKGAHPQWSPAAIRSALMTTAYTSYKNGETIQDISTGQPGTPFDYGAGHVDPVAALDPGLVYDANVDDYLGFFCALNYSSFQIKLAARRDYTCDPKKDYRVEDFNYPSFAVPMDTASGIGGGSDTLKTVKYSRVLTNVGAPGTYKASVMSLGDSNVKTVVEPNTLSFTELYEKKDYTVSFTYTSMPSGTTSFARLEWTDGKHKVGSPIAFSWT

SEQ ID NO: 214504 - protein, 360 aa, Glycine max
  unsure (1)..(360): unsure at all Xaa locations
  Clone ID: PAT_MRT3847_35724C.1.pep
PIRGTRSLSDIYQRCNVAVMEPEGYEEATADQKWRNAMKEELIMIEKNKTWELVDRPNHKKAIGVKWVYRTKLNSDGSINKYKARLVVKGYAQVFGVDFSETFALVARLETLTTRPSLAAQKGWIIHQMDVKSAFLNGYLEEEIFVEQPEGFVVQGQEEKVYRLRKALYGLKQAPRSWYSRIDAHLVNLGFKKSLSESTLYVKKTNGEMLVVSLYVDDLLVSGSSGEHIDKFKEEMKDAFEMTDLGRMTFFLGMQVDQKQNEIFLCQEKYANEILKKFNMEWCKPTATPMNQKEKFYKEDGAEKVDEKLYRSLIGCLMYLSASRPDILHAVSLLSRYMNCASRIHXQAAKRILRYVKGTI

SEQ ID NO: 214505 - protein, 73 aa, Glycine max
  Clone ID: PAT_MRT3847_35725C.1.pep
LPPLDTSSVTESGDTESASTGNDSSGSLQSSSDTDVSHNTKGTLTVIKNPTGQVLNGLLRRWDVKFFRNSQNR

SEQ ID NO: 214506 - protein, 53 aa, Glycine max
  Clone ID: PAT_MRT3847_35726C.1.pep
TLSSKYKKTVRRISITMLTRHSNLAQYPNITQTNHNPMEYKIPDPLIHSYTVP

SEQ ID NO: 214507 - protein, 157 aa, Glycine max
  Clone ID: PAT_MRT3847_35727C.1.pep
SLSTCTHLHTNILQGLRQTILDLISDFGDKNSVKGVVEKNHSCDQEERLLEWGESNGLMTQLKIAYIEGASRGAIARKDLKVGDIALEIPVSIIISEELVHETDMYGVLKEIDGISSETILLLWSMKEKYNCDSKFKIYFDTLPEKCNTGLSFSIQA

SEQ ID NO: 214508 - protein, 269 aa, Glycine max
  Clone ID: PAT_MRT3847_35728C.1.pep
FADGMESTWKECIVSEIPRLIGDIFFQVELSGPSSKLVKEISDASFSIKKTLVEVLLPSLAMADIPGFLTVIESQIWSTASDSPVHMVSLLTLIRIMRGSPKNSAQYLDKVVNFILQTIDPSNSVMRKTCFQSSMTTLKEVVRVYPMVAVTDSWTKLAVGDVIGEINNAGIRVYDMQSVTMVKVLDASGPPGLPTLLPAATSGTMLTTAISALSFSPDGEGLVAFSENGLLIRWWSLGSFWWEKQILCDHNHTRFLYQNHSNFLANICN

SEQ ID NO: 214509 - protein, 239 aa, Glycine max
  Clone ID: PAT_MRT3847_35729C.1.pep
LFESLIRCPGSTHASVAPSRRNTNGRSPLVNQQSQITSFFTKSASPSPSPTLSKTNPNPNPNPNPSPTPATPSPLNPKRSKPLLVIGASTSPPSASPSLYFQELIGRRIKVYWPLDKAWYEGSVKSFDSLTSKHVVRYDDGEEESLDLSKEKIEWLQESSSKKLKRLRRGVPAVRKMMIDDDDEEVEEEESHKKDDDDDDDSNDEDWGMKAALEDAGDAEEDTDLEDENDVAERAKGKR

SEQ ID NO: 214510 - protein, 162 aa, Glycine max
  unsure (1)..(162): unsure at all Xaa locations
  Clone ID: PAT_MRT3847_3572C.1.pep
RPXAAPGPKXXXPRXQQGQQGQXXXGRXTXAXQQXQQPXPRXPQQXLPRGXXNXXXPGRGXPXXXMPGXXGXXXXXPXXXXGXPXXXAXXXQQNPGGXXATXRAKXXPEQQRTKXXEXXXPXXEQXEXDXXAKXTGXXXEKDQXEXXXXXEXPEAXKAKXAE

SEQ ID NO: 214511 - protein, 83 aa, Glycine max
  Clone ID: PAT_MRT3847_35730C.1.pep
MPGLTHDSPQILASSHQLDLAPYASGPYNAQWNAPGLLYEKHTLRSSRILGEMEVDEPWLGLWLPLNYQVAFVIGSAVDRLYG

SEQ ID NO: 214512 - protein, 218 aa, Glycine max
  Clone ID: PAT_MRT3847_35731C.1.pep
TRPRLQPRKRRPRGSSFTSPKVNDLNVLSSLLQLTDQISSFSTSSKPCSLNLTATLLNRVSSSTIRKTQLLGVVFEELFRVSNLNSDSVLFLCLEEMIIQDFSNGSKFNLLMQIDTVAESFHRLTGELSTLLDVFPLQDLDLNDDVRELVLLVRKQCSEAKAFIGAEHVSLRNDVVLVLDRIKNEIRPDQTHLASIFEKMGDSRTRRAAERRLRASRK

SEQ ID NO: 214513 - protein, 80 aa, Glycine max
  unsure (1)..(80): unsure at all Xaa locations
  Clone ID: PAT_MRT3847_35732C.1.pep
EAKMKFINPPKVPKDYDILAIPLTDAALIMLSLRKGTPEQWRQYLKSPSVNHQXSCIVLYVMSSTLNLFFLTPXTRFHYY

SEQ ID NO: 214514 - protein, 310 aa, Glycine max
  Clone ID: PAT_MRT3847_35733C.1.pep
MALSPETFTTRKRRPRGSSFTSPKVNDLNVLSSLLQLTDQICSLNLTATLLNRVSSSTIRKTQLLGVVFEELFRVSNLNSDSVLFLCLEEMYIVLHKLKTLIQDFSNGSKFNLLMQIDTVAESFHRLTGELSTLLDVFPLQDLDLNDDVRELVLLVRKQCSEAKAFIGAEHVSLRNDVVLVLDRIKNEIVPDQAHLASIFEKLEIRDASSCRAEIGSLEEEIHNRSEEQPKTDLVALIGLVRFAKCVLYGASTPSQKTVTMRRNQSLELTIPADYRCPISLELMRDPVVVATGQTYDRASIKLWMDSGHN

SEQ ID NO: 214515 - protein, 183 aa, Glycine max
  Clone ID: PAT_MRT3847_35734C.1.pep
MGSNKTYEEEESTVLFSHSQTQTELLPFNENDPQDMVIYQVLNEANALTNTFLPQRLHQPQLCLEPTRNITKKHYRGVRRRPWGKYAAEIRDSARHGARIWLGTFQTAEEAAMAYDRAAFKMRGSKALLNFPAEIVAATELSFNNTNSNNHDAVSDSSAGSSCTNNSVQLNRNQSESCTSSTG

SEQ ID NO: 214516 - protein, 46 aa, Glycine max
  unsure (1)..(46): unsure at all Xaa locations
  Clone ID: PAT_MRT3847_35735C.1.pep
NXXHKIKIFNFGDNXIPFLXFIIITKKELNYPQNXKXVVFLYSLKV

SEQ ID NO: 214517 - protein, 157 aa, Glycine max
  Clone ID: PAT_MRT3847_35736C.1.pep
MGSKKTYEEEESTALFSHSQTQTDLLLPFNENDPQDMVIYQVLHEANALTNTFLPQPTRNITKKHYRGVRRRPWGKYAAEIRDSARHGARIWLGTFQTAEEAAMAYDRAAFKMRGSKALLNFPAEIVAAATATELSFKSSSNNNNNNNNNNPDAVSD

SEQ ID NO: 214518 - protein, 118 aa, Glycine max
  Clone ID: PAT_MRT3847_35737C.1.pep
VFINQGYADVAMNQIVSLVATQFRSQLSKALILTNRKWTSSIREQEKHRLTPIVEALSSSYLGPDYSQSREYADISLKDIDQVAKSSFPLCMRHLFDKLKEDHHLKHGGRMQLGLFLK

SEQ ID NO: 214519 - protein, 57 aa, Glycine max
  unsure (1)..(57): unsure at all Xaa locations
  Clone ID: PAT_MRT3847_35738C.1.pep
AIEDYQVPXNFSSRKATARSSRQPKKIPCYERSGCFSFNTQKSKLTLVKSQTPQTAF

SEQ ID NO: 214520 - protein, 147 aa, Glycine max
  Clone ID: PAT_MRT3847_35739C.1.pep
IVSLLVHFLFVVSTLFPVHSSQFGDHHPVANQTFRPKEELRKLNAIRNRLQLINKPPVKTIQSSYGDIIDCVASHMQHAFDHPQLKGQKPLDPPERPRGHNQMDDDLSDSFQLWSLSGESCPEGTIPIRRTTEEDMLRANSCRRFGR

SEQ ID NO: 214521 - protein, 46 aa, Glycine max
  Clone ID: PAT_MRT3847_3573C.1.pep
RAWECDRALMEVSCEGNEEKRGIVPKFIHKIWLLMLIFVHNEDWDW

SEQ ID NO: 214522 - protein, 104 aa, Glycine max
  Clone ID: PAT_MRT3847_35740C.1.pep
IPPSYQGPKKKNVWSPFFFGTKVPVAPFNFVGFSQDQTPGKVLVLVKIPRKVPWKIGPFVFGPYNLYVKGPAFITFGPPNTGIALGKNPLKYQLVQPCPVGGFM

SEQ ID NO: 214523 - protein, 118 aa, Glycine max
  unsure (1)..(118): unsure at all Xaa locations
  Clone ID: PAT_MRT3847_35741C.1.pep
ARASMTHKMSTHYPNDMIPXLGILYSFRLXSFHPTFFNSFPLLLIYKIQTNLSILIISSFTTTMSSLSAKNLAEGSSSPTENYQHSPRTLNRYESQKKKDSNTFCQLFNNKTPPNPFF

SEQ ID NO: 214524 - protein, 52 aa, Glycine max
  Clone ID: PAT_MRT3847_35742C.1.pep
LHMRNKAGQFQSIILDTQEISVTGKSASSQFIGIQSMIGYPPHVKYVRMFLL

SEQ ID NO: 214525 - protein, 82 aa, Glycine max
  Clone ID: PAT_MRT3847_35743C.1.pep
EFKPKPGHLKVITLITMLVGPVAKPLVAKGIFYEAGGLKTSKRWEFGSPRKKNLAWFCFTFIPTQHLSLKFNSSFIDLVVLD

SEQ ID NO: 214526 - protein, 57 aa, Glycine max
  Clone ID: PAT_MRT3847_35744C.1.pep
GLLFIFKTFVLVITCYMDILTSWFFSGHQYYLYFGISDSLDLESGSVVYSVSLLRVT

SEQ ID NO: 214527 - protein, 153 aa, Glycine max
  Clone ID: PAT_MRT3847_35745C.1.pep
ARRTNSTFNQVVLKRLFMSRTNRPPLSLSRMIRKMKLPGRENKTAVVVGTITDDVRILEVPKLKVCALRVSSRARSRILKAGGKILTFDQLALESPKGRGTVLLSGPRKGREVYRHFGKAPGTPHSHTKPYVRSKGRKFERARGRRASRGYKN

SEQ ID NO: 214528 - protein, 48 aa, Glycine max
  Clone ID: PAT_MRT3847_35746C.1.pep
GRMKPSDNTTPLRHLCDRNFCRSFCVWQVHVPQKDSAKNEYAFRYIPH

SEQ ID NO: 214529 - protein, 55 aa, Glycine max
  Clone ID: PAT_MRT3847_35747C.1.pep
SITEGRIATPMESIEGEQPTVSNRLPSCSYHPQDLLRRSDNFLPLPEETTWFPPC

SEQ ID NO: 214530 - protein, 45 aa, Glycine max
  Clone ID: PAT_MRT3847_35748C.1.pep
AYACDVYMYRSIVLHARTLSRARCHNTVDQSHAHLIQLPCIFKLY

SEQ ID NO: 214531 - protein, 142 aa, Glycine max
  unsure (1)..(142): unsure at all Xaa locations
  Clone ID: PAT_MRT3847_35749C.1.pep
HEPNTAALEPPSSSILSLIPKCTSLRELKQIQAYTIKTHQNNPTVLTKLINFCTSNPTIASMDHAHRMFDKIPQPDIVLFNTMARGYARFDDPLRAILLCSQVLCSGLLPDDYTFSSLLKACARLKALEEGKQLHCLAVNXG

SEQ ID NO: 214532 - protein, 89 aa, Glycine max
  Clone ID: PAT_MRT3847_3574C.1.pep
RQQQSKESVLDCLRLCKHIWWHRVKKGPENLTQPPRTFFLRPACDMIHVSLKFALLHNGYVELQQGTLLERERLATLKGQERLEPNSEL

SEQ ID NO: 214533 - protein, 211 aa, Glycine max
  unsure (1)..(211): unsure at all Xaa locations
  Clone ID: PAT_MRT3847_35750C.1.pep
MEDGSEKWNFQGNKKLNASSISVRGVYNMLMERVNNSRDKKPLVPLCRVDPTENPLFRTTPEATDSVSTAVNSYNFNCYPPTVGLPDAKRAIANYLSSDLPYQLSPENVFLTIGGTQAIDIILPALARSDANILLPRPGYPQYDSRASCCLLEVRHFDLLPERGWEVDLDSLESQADENTVAXMVLINPSNPCGNVFTYQHLKRVAEIATK

SEQ ID NO: 214534 - protein, 126 aa, Glycine max
  Clone ID: PAT_MRT3847_35751C.1.pep
IIYRHHETHATSLFAKVQSDDLPLQRHQLSMPIRDSEKYFKGSSKIMCRSKGGQALLRCRKSVDLIHGEGKVKMGKIWSRTCTFVFMKELFDICLLYFFLVTVIYIMSAVLPFSHKKSILLSFINF

SEQ ID NO: 214535 - protein, 40 aa, Glycine max
  Clone ID: PAT_MRT3847_35752C.1.pep
TLSAPDKLVGVVEINHELKETKWVEYLDKVPSPHNNSISF

SEQ ID NO: 214536 - protein, 71 aa, Glycine max
  Clone ID: PAT_MRT3847_35753C.1.pep
CWFIFIFWILASYLCSVILKSLFSWIILSIVFDSFLIVMTTNPRASLVAYTISHSVFFVIRKQAWVAPRIG

SEQ ID NO: 214537 - protein, 217 aa, Glycine max
  Clone ID: PAT_MRT3847_35754C.1.pep
HLVCFTCIYTCVIFHTDVELFVIQDFSVVVLLPKIWIFRFFCSFSLFGFYVTRDNHVIWHKEVAVKKEGGKSKKRQTKGALSTPKAKKPRKPKDNGNAPVQRAKPPKKTMELVINGIDMDISGLPTPVCSCTGAPQQCYRWGCGGWQSACCTTNVSIYPLPMSMKRRGARIAGRKMSQGAFKKVLEKLAAEGYNFANPIDLKTHWARHGTNKFVTIR

SEQ ID NO: 214538 - protein, 67 aa, Glycine max
  Clone ID: PAT_MRT3847_35755C.1.pep
RLHCLSSSSLSTHTSFIIFQFNNLILTLTHSHIYTPIGPSMALKRILNELKDLHKDSTTSCSSCPVH

SEQ ID NO: 214539 - protein, 173 aa, Glycine max
  unsure (1)..(173): unsure at all Xaa locations
  Clone ID: PAT_MRT3847_35756C.1.pep
MDDDVLNMPNWGYYEPFRGGHLGLQLMPGMTERDTKPFLPGRDPAMLMGANGTFHPRDCVVSEAPMPLNYVRDSWINQRDRFFHMQQPTNPNYAVLPETSGAPNLKIIQPPDTSRDEKVDRVEEVVVKKELGKSKXRHTKGALSTPKAKKPKKPKIIAMFQFHVRSHRKDYGA

SEQ ID NO: 214540 - protein, 63 aa, Glycine max
  Clone ID: PAT_MRT3847_35757C.1.pep
ADDTRGQENLDQTYVSLTGSIGQTPMAPHGFFPSYQHLPCRIRPSLEAPPSVVTIGWCRLHTI

SEQ ID NO: 214541 - protein, 62 aa, Glycine max
  Clone ID: PAT_MRT3847_35758C.1.pep
KKYTRHELQFFTTFIYVFFSTHVHSIFYAAVLIPFLLSLDSCVKLSEKNLGENIKLSYRSFS

SEQ ID NO: 214542 - protein, 53 aa, Glycine max
  Clone ID: PAT_MRT3847_35759C.1.pep
SLRLLGDSSASFEKNCVRGIQANRERISKLLHESLMLVTSLNPKIGYDKAAAV

SEQ ID NO: 214543 - protein, 76 aa, Glycine max
  Clone ID: PAT_MRT3847_3575C.1.pep
TCGWGRGGFPTTAWRGSAHNRRSSDINKRIRTALGKGKKIVFLTRVDPFPHAILAVLFGANNEILSANAASPMLTL

SEQ ID NO: 214544 - protein, 50 aa, Glycine max
  Clone ID: PAT_MRT3847_35760C.1.pep
KEFPLFIKRLGVLQIKPSKGGPAPQNKARWSFVNKSKSKFFQVRNFTPLF

SEQ ID NO: 214545 - protein, 76 aa, Glycine max
  Clone ID: PAT_MRT3847_35761C.1.pep
NLGLPSDQQIASAPSLRIPNQHRLMKTFSTLVRQSATFHKNLYPLHTDAPPDSEGSHKVLYFAAHPQWFLKEDPHS

SEQ ID NO: 214546 - protein, 70 aa, Glycine max
  Clone ID: PAT_MRT3847_35762C.1.pep
LFFFFLYFFFFFFFFFFFFFFFFFLFFKGNKPLFGPPLNPQESKKFPVILPPKGFPPNYFSPSNYTNQFT

SEQ ID NO: 214547 - protein, 376 aa, Glycine max
  Clone ID: PAT_MRT3847_35763C.1.pep
MGSSGTTDYGAYTYQNLEREPYWPSEKLRISITGAGGFIASHIARRLKTEGHYIIASDWKKNEHMTEDMFCHEFHLVDLRVMDNCLTVTKGVDHVFNLAADMGGMGFIQSNHSVIMYNNTMISFNMIEAARINGVKRFFYASSACIYPEFKQLETNVSLKESDAWPAEPQDAYGLEKLATEELCKHYNKDFGIECRIGRFHNIYGPYGTWKGGREKAPAAFCRKTLTSKDRFEMWGDGLQTRSFTFIDECVEGVLRLTKSDFREPVNIGSDEMVSMNEMAEIVLSFEDKNIPIYHIPGPEGVRGRNSDNTLIKEKLGWAPTMKLKDGLRITYFWIKEQLEKEKAEGVDLSGYGSSKVVQTQAPVQLGSLRAADGKE

SEQ ID NO: 214548 - protein, 62 aa, Glycine max
  Clone ID: PAT_MRT3847_35764C.1.pep
VGFSSLWISFPGEFLSDLFGGTDISLRFLWLWSTLEVFQFQEMIMPLWRLMRLRKKGQFSDP

SEQ ID NO: 214549 - protein, 202 aa, Glycine max
  unsure (1)..(202): unsure at all Xaa locations
  Clone ID: PAT_MRT3847_35765C.1.pep
KHTKHSYTSEVWFWEARMYGDCQVMSSMGGNVVVNPDTLFSSSIQNSSFNXIPTMPFQPFPSMKEEDGILRGKEEIESGSGSEQLVEDKSGNEQESHEQPTKKKRYHRHTARQIQEMEALFKECPHPDDKQRLKLSHELGLKPRQVKFWFQNRRTQMKAQQDRADNVILRAENESLKSENYXLQAALRNVICPNCVAMHNGC

SEQ ID NO: 214550 - protein, 90 aa, Glycine max
  Clone ID: PAT_MRT3847_35766C.1.pep
LERKLTTPFSQARAYGPGDQQRRVPFPTNPNPCSNAAGRNGTERQNMAPPYRLEGHMQDPSGGACVSCSQSQSGLTGPACIIGDHYGTTT

SEQ ID NO: 214551 - protein, 123 aa, Glycine max
  unsure (1)..(123): unsure at all Xaa locations
  Clone ID: PAT_MRT3847_35767C.1.pep
TGDTRLEVALIKLNPLLHSGLCHGTQASLNVRFFIPHTVEDELTGAAREFFENHGIEASPEKRAVYLTRMFKWFSGAFGRETEISLRIMNLXEPNNVGLVTHFMGESGXGTSVHQNYHWSMNS

SEQ ID NO: 214552 - protein, 76 aa, Glycine max
  Clone ID: PAT_MRT3847_35768C.1.pep
VCSNTILYTDGYNDIFFNSPVNTSRSYNCPCFHILITNTRRLLTLFIFGNNMETYKGEKRKDERFFFCTRQIIILS

SEQ ID NO: 214553 - protein, 211 aa, Glycine max
  Clone ID: PAT_MRT3847_35769C.1.pep
MHISSELPEEMALNTTKSKNSTSPSNFYLCTTLFFIVLFTIPVLFLLHAPTTTISICTNPAKTWSGDLQLVEFAWNRLSFFEHKPPPFALKVAVFSRKWPIGTTPGGMERHAHTLHTALARRGHQIHVFTSPPDQDESISISSFSEVNKNNHQSSPYIHFHEGEPGRWHYNKAWEQFVEENKPEPFDVVHSESVALPHWLARNMSNLAVSW

SEQ ID NO: 214554 - protein, 190 aa, Glycine max
  Clone ID: PAT_MRT3847_3576C.1.pep
EQAIEHLISCCPLIEDVTLKCCSVLNNGGIGGLLEPRTSRMQSISMNALPKLKKVDVQGIPEIIIIDAPSLEYFCFCPGGDVHSPFKMNFDKCRNLRVLYLWSLKSTTITDKWFLDLFTKFPFLECLKFVNCTMSETINISSAQLKVLELSNCSKLKELNLDAPNLLSCGYCGDGASEPIISFLKSSSQL

SEQ ID NO: 214555 - protein, 69 aa, Glycine max
  Clone ID: PAT_MRT3847_35770C.1.pep
LGFSVTAMDFESRRLHLLISVVAIIALSFTGTLLYSNSNYSINLRSGLVQIANLSNFLLLVLTLQFFYI

SEQ ID NO: 214556 - protein, 48 aa, Glycine max
  unsure (1)..(48): unsure at all Xaa locations
  Clone ID: PAT_MRT3847_35771C.1.pep
VXKSXPXAGXSPFXSXXCTXTQXXSFXYXXLEXRIXXXLGIKKLQQLP

SEQ ID NO: 214557 - protein, 47 aa, Glycine max
  Clone ID: PAT_MRT3847_35772C.1.pep
KPRRGPKGDTITTKFGTYNNNNKFKPGHYCKIGRRHGTKGGTLPNVP

SEQ ID NO: 214558 - protein, 53 aa, Glycine max
  unsure (1)..(53): unsure at all Xaa locations
  Clone ID: PAT_MRT3847_35773C.1.pep
MDXDXWISKVXEGXHXLXDELQLLCEXCKXARIXXSNXXXVNSPVTVXGDIHX

SEQ ID NO: 214559 - protein, 72 aa, Glycine max
  unsure (1)..(72): unsure at all Xaa locations
  Clone ID: PAT_MRT3847_35774C.1.pep
RDDHLDHELAQLTKLTSSPHDLXVKXVPGRITLPVSTEKMLSGKEGNYSLKGTFSSXHGSHVLTLYWPTKCP

SEQ ID NO: 214560 - protein, 315 aa, Glycine max
  unsure (1)..(315): unsure at all Xaa locations
  Clone ID: PAT_MRT3847_35775C.1.pep
MEDSEQRKKRLKEMRVQADQAEVSGGVEGSVVPGFLSNPLMEAPSTMPSQDKSYAAPRFDYYTDPMSAFSSNRRNIASIQAALDNFPPSKFGGSPMAQYSSPHPESTNPQRTPHPIQAXAAAYMKPIWSGPGGPAHYNFPIHPSSGGTYPSPRFEPSGGPLYNSGQGIAHPPSYSPNPPYPGYGDSPRPSYNPNPSPGYGNSPRPSYNPNPSPGYGDSPRPSYNSNPSPGYGNSPRPSYRPNPSPGYRNSPSPGQGRGRGFWRNTGSPVSGRGSGQGPNFHGHRSNENTARGPDRFYNRSMVEDPWEHLEPIIWK

SEQ ID NO: 214561 - protein, 68 aa, Glycine max
  unsure (1)..(68): unsure at all Xaa locations
  Clone ID: PAT_MRT3847_35776C.1.pep
HAPIQKLLQFISXTQQQMRVVKSQTLTASKLNSPTPNPSINHYNYTNTLSNLKSSTTSNTYNYTLFTI

SEQ ID NO: 214562 - protein, 78 aa, Glycine max
  unsure (1)..(78): unsure at all Xaa locations
  Clone ID: PAT_MRT3847_35777C.1.pep
MALRSQQTVDYPSFRLVIVCDGGTGKTSFVGRHRTGRIXGRRYEPGSGVGVHPLEFFRDCGKSRCYCRGAAGQEKFGG

SEQ ID NO: 214563 - protein, 36 aa, Glycine max
  Clone ID: PAT_MRT3847_35778C.1.pep
FDSRSVVSLPSFTTAAALVSVGNRQLLIQLPFYLPG

SEQ ID NO: 214564 - protein, 45 aa, Glycine max
  unsure (1)..(45): unsure at all Xaa locations
  Clone ID: PAT_MRT3847_35779C.1.pep
XXXXRVRXARXSAXXRXXVDVXXHXRSVXXXXLRXXYRAXQRDPC

SEQ ID NO: 214565 - protein, 58 aa, Glycine max
  Clone ID: PAT_MRT3847_3577C.1.pep
LLNNINYQQLNLSGSSQKKYNIVASSWFCFPQASFFSGSWHKFIWKYMLERFYFPSDI

SEQ ID NO: 214566 - protein, 76 aa, Glycine max
  Clone ID: PAT_MRT3847_35780C.1.pep
IAVGRAVSSRRSDSQPVQDPNNKVAWHGIYATMPSPQVRIANRGTAMAVTRRRDASTILRRHYTRYRCHDTIGQSR

SEQ ID NO: 214567 - protein, 168 aa, Glycine max
  unsure (1)..(168): unsure at all Xaa locations
  Clone ID: PAT_MRT3847_35781C.1.pep
RAGNIPVYPQRARRLLGSDIISVTGVTVTPMRGVYATIHWFMTSQECAPRTLLVLNPHKPSEKDRWMGKLTSPQGTARSVKRLPMPIGGGANAKNALXMNMPNAVLXMWRYLDGDLXLQVSKMTCFYNKCTGSHFIAVVKLAVGTINVEAFAHTVLQTAETHDRVDSK

SEQ ID NO: 214568 - protein, 89 aa, Glycine max
  Clone ID: PAT_MRT3847_35782C.1.pep
MGAKFGHGVMILFVISASMFSMSMANKDWSFGFNYTDWWSRFGNHAQNKTQQPPRQILVGGSEHWHYGFNYTDWAFKNAPFYLNDTLVY

SEQ ID NO: 214569 - protein, 61 aa, Glycine max
  Clone ID: PAT_MRT3847_35783C.1.pep
FKTVHLLHINFFFHFLFYFPTLITRKNNASDRLTMRTFYLTLKINLYCNLVSTAMHIICIR

SEQ ID NO: 214570 - protein, 100 aa, Glycine max
  unsure (1)..(100): unsure at all Xaa locations
  Clone ID: PAT_MRT3847_35784C.1.pep
QPHPFXRXSXSXAXTPXXDXFXHQXXKPHFXXXPQKXXPTTPLDXLXXFMTXXXSPXXLFXNXXEPAXPPRNXXFXXXXLXXLGXQPXAEFXXXXTLAXX

SEQ ID NO: 214571 - protein, 46 aa, Glycine max
  Clone ID: PAT_MRT3847_35785C.1.pep
LNKELSESHNEFKSDTGVVYHIGECSANNLRVEKIMIHKVCGQPTE

SEQ ID NO: 214572 - protein, 160 aa, Glycine max
  unsure (1)..(160): unsure at all Xaa locations
  Clone ID: PAT_MRT3847_35786C.1.pep
EYPSTPIENVLLVGGLKPSLLSVSQLCDKGFLVSFDSHNCVIENKHDKNIKHIGDRSNNVYMINLDKNXSNHDQCFLGXDDDSWLWHRRIAHINMEHLNKLISKDLVIGLPKLKFEKDRLCDAHQKGKQVRVSFKSKNIISTTXPLQLLNVDLFGPSRVD

SEQ ID NO: 214573 - protein, 43 aa, Glycine max
  Clone ID: PAT_MRT3847_35787C.1.pep
VLNGTYIGELTGYSTQDIYGSYRLKRDTICDYIIPQNITELVD

SEQ ID NO: 214574 - protein, 62 aa, Glycine max
  Clone ID: PAT_MRT3847_35788C.1.pep
LYAQPGLIKGHQILTLQLTLNHVLNSLYRIKTERTTHTRTKAPYYIIYWQNRTNTMLTRARI

SEQ ID NO: 214575 - protein, 63 aa, Glycine max
  Clone ID: PAT_MRT3847_35789C.1.pep
ESSNLKETAKNNLTTALFHHRTPIAGNFTERRGSHNFHTATTYTLSPHPLLNETTSTALTYLI

SEQ ID NO: 214576 - protein, 104 aa, Glycine max
  Clone ID: PAT_MRT3847_3578C.1.pep
WKTTSTPPLTALPPTTDPSVTIPPPTPCSSPTTSTTVPTPPTPPSKPPTLPLPASPSESPPPPPPRISSPPGPLSPPPPPCLPPLTSNASPTLSTIQQFWVQLG

SEQ ID NO: 214577 - protein, 319 aa, Glycine max
  unsure (1)..(319): unsure at all Xaa locations
  Clone ID: PAT_MRT3847_35790C.1.pep
GFAHLLNVLAPEYTNPSTLAVKNPFERAKLVLEHADKMGCKRYLTARDIVEGSPNLNLAFVAHIFQHRNGLSAQTKQQMSLLETFPDDTQDSREERAFRLWMNSLGNSTYINNVFEDLRNGWVLLETLDKVSPGIVNWKIANKPPIKMPFRKVENCXQVVKIGKQIKFFDADVAGXDIVQGYKNLIAKXRMDSFKDKSLSDGIFFLELLSSVTPRAVNWGLVTKGVTYQEKKMNATYIISIARKLGCSIFLLPEDITEVNPKMILTLTASIMSWCLKHPHEERTVGTSDNESGGQLETTSNSTLDDSASDSSLDENGNI

SEQ ID NO: 214578 - protein, 328 aa, Glycine max
  Clone ID: PAT_MRT3847_35791C.1.pep
ARGCKRYLTARDIVEGSPNLNLAFVAHIFQHRNGLSAQTKQQMSLLETFPDDTLDSREERAFRLWMNSFGNSTYINNVFEDLRNGWVLLETLDKVSPGIVNWKIANKPPIKMPFRKVENCNQVVKIGKQLKFSLVNVAGNDIVQGNKKLILAYLWQLMRYNILQLLKNLRFYSRGKEINDADILEWANSKVSSSGSQSRMDSFKDKSLSDGIFFLELLSSVQPRAVNWGLVTKGVTDQEKKMNATYIISIARKLGCSIFLLPEDITEVNQKMILTLTASIMSWCLKHPREERTVGTSDNESGSQLETTSNSTLDDSASDSSIDENGNM

SEQ ID NO: 214579 - protein, 239 aa, Glycine max
  unsure (1)..(239): unsure at all Xaa locations
  Clone ID: PAT_MRT3847_35792C.1.pep
MYTTPHPPIVYRFWLRDDWSGGHFQYMKHNGRTLKMPKMILLATNISSAEFDKAKATGSTDTVIKKPRRASMVAACLQQVLGMGKKRQLGKDMPNGFLHSLLYGKKILVVDDNGVNRRVAAGALKKFGADVKCAESGKVSXMLQLPHNFDACFMDIQMPEMDGFEATSRIRMMESKANEEMNGSEWHVPILAMTADVILATYDKCVKCGMDGYVSKPFEEENLYQEVAKFFKSKTISDS

SEQ ID NO: 214580 - protein, 83 aa, Glycine max
  unsure (1)..(83): unsure at all Xaa locations
  Clone ID: PAT_MRT3847_35793C.1.pep
TCDGRDNHMVHVFFRLLVIHIERITHNNVHGFTDDFRVHPPNGVVSXLRMDKDRYYFLDLKAKARAAFDKEHDTTFSPEDIMQ

SEQ ID NO: 214581 - protein, 450 aa, Glycine max
  unsure (1)..(450): unsure at all Xaa locations
  Clone ID: PAT_MRT3847_35794C.1.pep
RRSVAISSSYLGSWNNVAETSTFSNKVLSKPFKQGDHVQSSLQSNKAESLAASLQKGLQIIDYHQQNSALNKSSTSFSFEHLTXTPCLDIDKDDSYDQTIQQKPSSDEVTAAFLCASCWAKISNEDSSKAQAGNPDGMTDKEVQEELAQSDVSFDSTEKESLLKEIQNLRSKLQLCSDAPVKKSTDKLRSSLVSRSIQLQKSGVFSYDNGHEYLENERQRWTEXESEWIYLTDELRADLESYRQRTERLEMDDALKRAVMGHARMVEHYADLQEKYDDLVTKHDATMEGIAEVKKAAAKASEKGHARFAKSLSAELSASREERERESKLLKKENQSLKIQLRDTAEAVQAAGELLVRLREAEHATAVAEVHFYLTXEKQNLKMQIAKMKRKHKTEINTMKQYITESKLPESALQPLYKEDSDGAHNATFSYTYDDQAWRAEFGAIYQEHF

SEQ ID NO: 214582 - protein, 61 aa, Glycine max
  Clone ID: PAT_MRT3847_35795C.1.pep
VVVIIVHIRKCPKKKKKKLRCINVAKPVMILFSNLNRHFISILIIIEVTIIEIKYLFLIRG

SEQ ID NO: 214583 - protein, 104 aa, Glycine max
  Clone ID: PAT_MRT3847_35796C.1.pep
KAMGAEKPGIAKVKGANIAWKCKFSAAVSLLSARIEGYPALMSRSPCGCSCKGGGCFECVRERQSGDKNHIDSPWPNQATQDLMTGPELEHDARSLKSHENKVV

SEQ ID NO: 214584 - protein, 171 aa, Glycine max
  unsure (1)..(171): unsure at all Xaa locations
  Clone ID: PAT_MRT3847_35797C.1.pep
SSLSSELANVRKAAAMDSEVXSSDVLKLPKGIASLAEAVQLNQXXASDESSQKFTESMNKFIRMAEEEIPKIQAQESVASSHVKEITEYFLGNLTKEEAHPFRIFMVVRDFLAVLDRVCKEVGMINERTMVSSAHKFPVPVNPMLPQPLPGLHERQQYNDSSDDDSSSSSP

SEQ ID NO: 214585 - protein, 213 aa, Glycine max
  Clone ID: PAT_MRT3847_35798C.1.pep
IFLDIACFFKNSDRCWVTRVLEAFEFFPAPGINILLDKALITISDSNLILMHDLIQEMGREIVHQESKDPGRRTRLWRHEEVHDVLKYNKGTDVVEGISLDLSRLNEDLNLSSNSLAKMTNLRFLRIDGESWLSDRIFNGYLPNGLESLYLSNDVEPLYFPGLESLVLYFPNGHVSSYLPNGLTFLMVLCHCTFLMVLSHCTFLVVLSHCLIN

SEQ ID NO: 214586 - protein, 64 aa, Glycine max
  Clone ID: PAT_MRT3847_35799C.1.pep
GPLVAPFKNPFFVPGFFKWGKGCAKKRKNPLFSKVSAFLKWIFRSIKTRVGAPFGPPRLTPPPN

SEQ ID NO: 214587 - protein, 107 aa, Glycine max
  unsure (1)..(107): unsure at all Xaa locations
  Clone ID: PAT_MRT3847_3579C.1.pep
TDGALLLTIICIKFSHGSSELVYLLDITSCSKTNMGFKTPSECYLYDPVWSCILEEFSVLPVIDHKFYGKQIXTYTDELKQIWAAVDSDEDIQKIADLLNRSITYFD

SEQ ID NO: 214588 - protein, 1668 aa, Glycine max
  Clone ID: PAT_MRT3847_357C.1.pep
MATSRGNGIVSSYWDSHGQWQVCVEDDRNVGSLGIFIGDRPFEFVLPVTLCQLFTVILVSRTLYFLLRPLRTPKFICNVLVVEAVPNYSSKSPMLDSTSPIVVEECLRYGVTFVCGRRRDMEDTILVCLSFCQENLSHDKKFSLNVKVVSSENVQGGIILGPTFLGRNKTYWQVLFPPRQTEYLVMASLTGAVYFVFLVALKMDVLMTIRAAKSTWRLGVIPFLASFVVILALLCLYYHPQQISSASLTIARVSVSCLMSLSNFPVVSDAMLELNLTATELGQIALSSSMINDIILWLFIVMHSFTSNVDVKKSIALLGNWCLLVFFNFFVLRPTMKLIAMRTPVGKPVKELYVVLILLGVLVMAGVGDLMGVTFLMGPLIFGLVVPSGPPLGTTLAEKSEVLTTEFLLPFFFVYIGINTDLSALEDWRLFLTLQGVFFAGDLAKLLACVLVSLAYNIRPKHGTLLGLMLNIKGITQLISLARFKKQKMLDEDTFSQLVFCVVLITAIVTPLVNILYKHRPRVHAESLFEGELRTIQSTPRNREFHIVCCVHNEANVRGITALLEECNPVQESPICVYAVHLIELVGKSAPILLPIKHRHGRRKFLSVNYPNTNHIMQAFENYSNNSSGPVKVLPYINVAPYKSMHDAIFNLAQDNMVPFIIIPFHENGNIDLVGHVAASIRKMNTRFQAHAPCTLGILVDRHSRLGASNNNNMYFNVGVFFIGGAHDREALALGIRMSERADTRVSLFRFVIVNKKPCGCKIILTREEREEEEEDTMLDEGLIDEFKSMKYGIGNVCWYEITVDDGVEVLEAVHSLEGNYDLVMVGRRHNDGSLNGKEMTTFMENADALGILGDMLSSVEFCMGMVPVLVTQCGGVKISSSSNNKLDRVGSLGVWMGDNPFDFVVPVTLFQIILVSLLSKALHYVLRPINTPKFICCVIAGILLGPTFLGRHEDILGALFPVRQSLFLNTLSKIGTTYCVFLTCLKMDVVTTLKSAKRCWRFGVFPFLASFLVTVTLFSLYSPNGNANQNQMSIYHFPNIFTLSSFAVVSETLMELNLVATELGQIALSSAMISEILQWTTMELLFNSKFSMRFLIVLLIGATGFAVLLLLIIRPLVNIVLERTPPGKPIKEAYVVLLLLGPLVMAAISDTFGIYFVMGPFLYGLVLPNGPPLATTIIERSELIVYEFFMPFFFLLIGTRTDLTLIHEHWEVVLVVLAILFVGCLVKVLACALISPTYNIKPKHGVVLGLILNVKGIVELIFYGRMNKLRVIDTEVFSVAVMSVVVMTSICIPLIKSLYRHRRVCKTQTIQEGCVKTIQNITENTPFNIVSCVHTDEHVHNMIALIEACNPTTQSPLYVYVVHLIELVGKSTPILLPMNKNKRKSLSVNYPNTNHILRAFENYSNNSSGPVTVLSYVNVAPYRSMHEAVCNLAEDNSVHLLIIPFHQNDQTLGSHLASTIRNLNTNFLANAKGTLGILVDRYSVLSGSSSKLSFDVGIFFIGGKDDREALALGIRMLERPNTRVTLFRFVLPTNEDSRFNGLVENEDENLESTLDESLIDEFIAKNDISSDSVNVVYHEAVVEDCIQVLKAIRGMEKDYDLVMVGKRHSMGNFVEEEMSNFMDNADQLGILGDMLASNEFCNGKVPVLVMQCGDEKRVKQLEKVCHI

SEQ ID NO: 214589 - protein, 295 aa, Glycine max
  Clone ID: PAT_MRT3847_35800C.1.pep
GRNSQCDPRVRNLEEVEISTQYFSELNLLGKSNFSATYKGVLRDGSVVAVKSISKTSCKSDEAEFLKGLNILTSLRNENLVRLRGFCCSRGRGECFLVYDFVSNGNLSCYLDVKEGDGEVLEWSTRVSIVKGIAKGIAYLHAYKAKKQALVHQNISAEKVLIDQRYNPLLSDSGLYKLLTNDIVFSALKGSAAKGYLAPEYTTTGRFTEKSDVYAFGVLLFQILTGKQKITSAMRLAAESFKFPEFIDPNLHGKFFEYEAAKLARMALLCSHESPFERPSMEAIVQELGNCSSCL

SEQ ID NO: 214590 - protein, 46 aa, Glycine max
  Clone ID: PAT_MRT3847_35801C.1.pep
RNNDSTKADPPHHANNHQNPVDQIPPPAYEIELGPKEIQSPPGPHK

SEQ ID NO: 214591 - protein, 112 aa, Glycine max
  Clone ID: PAT_MRT3847_35802C.1.pep
TQKRKFLPQMPSGSLFFASRLRSFWSPVRLLIHLIIPPSFFVFIFFIPQTRTYISRHPFKEERAFLFGYLFFLGATMSLFSTFDLLQTTLTYSCLPLHVMFLRIDKPLELHR

SEQ ID NO: 214592 - protein, 131 aa, Glycine max
  unsure (1)..(131): unsure at all Xaa locations
  Clone ID: PAT_MRT3847_35803C.1.pep
MPFTMLLLGAKTFFHANNTHADWKEATQTGYLNVEILGKETGRKAGNPYNKAGPKTAKNFRAGSSPVKGTANSGWGVXTKGTSIPKLVTNFLPKRSDTKKRNPLGQPSICRERFENENPWERRPDLAFYKR

SEQ ID NO: 214593 - protein, 140 aa, Glycine max
  Clone ID: PAT_MRT3847_35804C.1.pep
KKKKKKKKKKKKKKKKKKKKKKKKKKKKKKKKKNKKKEKKNKKKKKKKKNKWGGGFFGVPFLGRGFAKHNFFFWGPFPLFSGGGFFPLWGGEPLGLPPFLLFVPIPFFAGGGIGKGPCPVPFSQIWPAFRRNGPPPLPGL

SEQ ID NO: 214594 - protein, 44 aa, Glycine max
  Clone ID: PAT_MRT3847_35805C.1.pep
GLVSHLSLFLSFSLSLYEKIASFSSYICIKAKFWFSLLISGSTF

SEQ ID NO: 214595 - protein, 52 aa, Glycine max
  Clone ID: PAT_MRT3847_35806C.1.pep
KNSLIMLGVINFIGMLFPLLVPEAKGKSLEELSGENNENDAEHAVSARTVPV

SEQ ID NO: 214596 - protein, 45 aa, Glycine max
  Clone ID: PAT_MRT3847_35807C.1.pep
ASGQNCYSVRTGYDLGIKVDAINGGGCIVGTNRVEASSLYAISAA

SEQ ID NO: 214597 - protein, 78 aa, Glycine max
  Clone ID: PAT_MRT3847_35808C.1.pep
FGNLGTGRGLEMVAAFEKASSKAISYYFSSSSARSHESSTQPDFLILQKIPLIMCPRRPRDATAVYASMDKAEKELVG

SEQ ID NO: 214598 - protein, 64 aa, Glycine max
  unsure (1)..(64): unsure at all Xaa locations
  Clone ID: PAT_MRT3847_35809C.1.pep
KTXTHNXTHSXTRNXXTNRNQQHTHTHIYIYISCLPLIILLICTIFPLISHLPCTHPFSLLKSL

SEQ ID NO: 214599 - protein, 65 aa, Glycine max
  Clone ID: PAT_MRT3847_3580C.1.pep
TLPPHPSPNQAFNFFKPHPRFWGRGNCSKENRFCSTFPKITILNQARSKGFFPRPNNHQKFSPHN

SEQ ID NO: 214600 - protein, 99 aa, Glycine max
  Clone ID: PAT_MRT3847_35810C.1.pep
GDGTGGQSIWGREFEDEFHKSLRHDRPFTVSMANAGPNTNGSQFFITTVATPWLDNKHTVFGRVAKGMDVVQAIEKVKTDRPDKPHQDVKILNVTVPKS

SEQ ID NO: 214601 - protein, 43 aa, Glycine max
  Clone ID: PAT_MRT3847_35811C.1.pep
LLCLMTQGFTPYDTQPIQGPLSGGSKARADLTPCTSGTPTNDR

SEQ ID NO: 214602 - protein, 95 aa, Glycine max
  Clone ID: PAT_MRT3847_35812C.1.pep
MFHAMVLKSKAVFLVLLVLVVCQLSCGLGEDWSTRRLSRHNNNNKVIPPSCGELVLKSQCSENSKCRWCTSEDLDDMCFSKSEALRLPHQVFSCA

SEQ ID NO: 214603 - protein, 47 aa, Glycine max
  Clone ID: PAT_MRT3847_35813C.1.pep
TAMRDQMYDPHATLLVIRSQIDQMKHVFVRSVYLMHDPLQLHGLCTE

SEQ ID NO: 214604 - protein, 157 aa, Glycine max
  unsure (1)..(157): unsure at all Xaa locations
  Clone ID: PAT_MRT3847_35814C.1.pep
GGRPIREATFPNTIVQMEPDRNSREQARRTTTKGEXGQGKDLAKVKGKGKRAADGXTSKNTPTPMREXGSQKDRGVIEEKYGRKTRGAQNEKQPQKKELKEGKNNPRKKKPNPKRKKIPIKKDKKVGEKTLKNEIXGAGSQRSKKIYRKGKNKKKPK

SEQ ID NO: 214605 - protein, 266 aa, Glycine max
  Clone ID: PAT_MRT3847_35815C.1.pep
MEQHDLRRRRRSPPLTFDPKPLPELARSASASSAVTVDNASKGFSHPPLDQSTRWTDQQHSLYIRSLEASFVNELHRSMRLHHLSLKNSTDEAYKCRFLQNSHNMPKQSLALQDGCQKKINLERVAPMLESTADSHVLAGSQFQLTSVDGGCSLREHGLLCDEEIHARGSSIFTLEMACSSTEVTDQNFKDEDARSSCMPLVKRLKTATADSSSTDQVVPFGKVHTPDVSTSSNASSENKGHELLSEPPVSYHFPTSDLPYFLRGR

SEQ ID NO: 214606 - protein, 93 aa, Glycine max
  Clone ID: PAT_MRT3847_35816C.1.pep
RNSVCIKKKKKKKKKKKKKKKKKKKKKKKKKKKKKKKKKKKKKKKKKKKKKKKKKNKKKKKRAPPPIFFPIYFFFHPATPQNFNKKIQYGESP

SEQ ID NO: 214607 - protein, 51 aa, Glycine max
  Clone ID: PAT_MRT3847_35817C.1.pep
TWFFMGHLNVKRVFQGWVYRMLPEKSKPISIRGSVDNEGWDSSDNCVYGDC

SEQ ID NO: 214608 - protein, 73 aa, Glycine max
  unsure (1)..(73): unsure at all Xaa locations
  Clone ID: PAT_MRT3847_35818C.1.pep
RSFGPLFLFSPRFPVVPCFPFALFSFLYGNPLCSGFAVPYSRSSPFFLDLLPAPVRXFWVFPCFKKKTALLSL

SEQ ID NO: 214609 - protein, 221 aa, Glycine max
  Clone ID: PAT_MRT3847_35819C.1.pep
HEYGSVLSFDANELDPENSLAGFLDRVPLSLRRWACYPMLLGRVRRNFKHVTLVDVKNVVIFNDPLGRVRNQSPESVFVYPNAKHGRNSERTQSHHPVNSVILMGGARGIRRVSHAMLVAIVRAAMQPHKRKNSVSDSAILSQLVRNKFALRNVHLIVSGESIPEASSLAGSTSFSDCAIIQRGTGNYYDLNSIVKKQICSSVMDSFVYNSDCKHLVKVEQ

SEQ ID NO: 214610 - protein, 95 aa, Glycine max
  Clone ID: PAT_MRT3847_3581C.1.pep
PERPGHRTGHSGGPYTNRPVIHSFSLFASLEKYEAEVILSYRYGLYYVQANHCIVFSSSVCALYSLVTFDRLSPPPPPPPPPPQAGGRAHSVDTA

SEQ ID NO: 214611 - protein, 246 aa, Glycine max
  Clone ID: PAT_MRT3847_35820C.1.pep
MVSDASKKKAAQKKAAAAAKRGGKAAAASSKTTSSEKAADKLANGIGEIQISDRTCTGVLCSHPLSRDIRIESLSVTFHGHDLIVDSELELNYGRRYGLLGLNGCGKSTLLTAIGCRELPIPDHMDIYHLTREIEASDMSALEAVISCDEERLRLEKEAEALAAQDDGGGEALERIYERLEAIDASTAEKRAAEILFGLGFNKQMQAKKTRDFSGGWRMRIALARALFMNPTILLLDEPTNHLGMH

SEQ ID NO: 214612 - protein, 106 aa, Glycine max
  Clone ID: PAT_MRT3847_35821C.1.pep
MAMAKLVCVLLLAFLGISMITTQVMATDSAYHLDGRSYGPGSLKTSQCPSECTRRCSQTQYHKPCMFFCQKCCKACLCVPPGYYGNKSVCPCYNNWKNKRGGPKCP

SEQ ID NO: 214613 - protein, 107 aa, Glycine max
  unsure (1)..(107): unsure at all Xaa locations
  Clone ID: PAT_MRT3847_35822C.1.pep
MAMAKVFCVLLLALLGISMITTQVMATDSAYHLDGRNYGPGSLKXLTQCPSECTRRCSQTQYHKPCMFFCQKCCKACLCVPPGYYGNKSACPCYNNWKNKRGGPKCP

SEQ ID NO: 214614 - protein, 70 aa, Glycine max
  Clone ID: PAT_MRT3847_35823C.1.pep
PVIGLSGHIQRYLLFLIIPSGHINYAYWLKMHTLLSCETQHHLCGKEQTFSAFLLTSAMDGICVERAIKE

SEQ ID NO: 214615 - protein, 72 aa, Glycine max
  Clone ID: PAT_MRT3847_35824C.1.pep
MPGFFWGAPHLVSFGFGVQKFPVLFTFVGAPVFLGPPFWGAFPVWPPHGFVPNCALFAFPQILVFLFNFRPF

SEQ ID NO: 214616 - protein, 150 aa, Glycine max
  Clone ID: PAT_MRT3847_35825C.1.pep
MNAKGHKFVRFEDWKSESSFSPEQEDSIDSGNHKRRPSVGTVLKSIGRRLESGSEKMKNLRRASAVHPVSDGQKKLPPRKKILDPQGPVLQKWNKIFVITCVLAVSVDPLFSYIPVINNEEKCVHLDGALQITASVLSTFFDLFYILSII

SEQ ID NO: 214617 - protein, 46 aa, Glycine max
  Clone ID: PAT_MRT3847_35826C.1.pep
GLYIAELYTTHSRIYRIERILFRAITYIDAKQSLISTEYASFTTSC

SEQ ID NO: 214618 - protein, 95 aa, Glycine max
  unsure (1)..(95): unsure at all Xaa locations
  Clone ID: PAT_MRT3847_35827C.1.pep
PRXPKIFFSLNPLKATRQKKNAVPPEPYRTEFRPAAPADQNSPPCLPTPPSPFLRRRHDPNQHRRRARQKRLNPFSTADESAHATRGGRAAPPPP

SEQ ID NO: 214619 - protein, 72 aa, Glycine max
  Clone ID: PAT_MRT3847_35828C.1.pep
SVTKTCLMRLSKKALNPPKTLTSSTLSIRIFLFDLLNNIVEPLSAQSSPTQCASPSLAIPPHPSSTMCVIRR

SEQ ID NO: 214620 - protein, 105 aa, Glycine max
  Clone ID: PAT_MRT3847_35829C.1.pep
ENPTKGKSQTFNCGFGPKGQLWGKIPGSRFKGRRGPGGPPLAPLKEKKENPKVLIWERPGVGFQRFPPRIWILVLGGRVLRTNFQPFQVFYWTSFSQKKKKKKKK

SEQ ID NO: 214621 - protein, 488 aa, Glycine max
  unsure (1)..(488): unsure at all Xaa locations
  Clone ID: PAT_MRT3847_3582C.1.pep
MASWLLGRSSRILIHQHHHLHKKYLPFLLGPFLNHNNSSCSSFPSTEPFRCRDAFPGKNSSPTLFRFSRHESTKAEAQLELEQDVATEDEPNQVIDFPGGKVGFTSEMRFISESPEKRVPCYRVLDDNGEIVKYSNYVQVSKEMGVKMYSDMVTLQTMDNIFYEVQRQGRISFYLTQMGERXLLTIASAAALAPDDIILPQYREPGVLLWRGFTLQQFVHQCFGNTHDFGKGRQMPIHYGSNQHNYFTVSSPIATQLPQAVGAAYSLKMDGKSACAVTFCGDGATSEGDFHAAMNFAAVMEAPVVFICRNNGWAISTPVEDQFRSDGIVVKGKAYGIWSIRVDGNDALAVYSAVHTAREIAIKEKRPVLIEALTYRVGHHSTSDDSTKYRGTDEIEYWKMARNPVNRFKRWVERNGWWSDKDELELRSSVRKQLMHAIQVAEKAQKPPLQDLFNDVYDQIPSNLQEQERLIRKTIEKHPKDYPSDVPL

SEQ ID NO: 214622 - protein, 53 aa, Glycine max
  unsure (1)..(53): unsure at all Xaa locations
  Clone ID: PAT_MRT3847_35830C.1.pep
PFFXXRQCCFSNVELAQQGTLVSXXLVMMNDHPLLSXRIFSXSPFXXFVLXFX

SEQ ID NO: 214623 - protein, 103 aa, Glycine max
  Clone ID: PAT_MRT3847_35831C.1.pep
MSQPRQNKMMSPNLAKQVGDATYTKIFVGGLAWGTKRDTLKRYFDQFGEILEAVVITDKITGRSKGYGFVTPTSLFFRHLGLSLLGIFLLHSLQYVCTFGFGR

SEQ ID NO: 214624 - protein, 40 aa, Glycine max
  Clone ID: PAT_MRT3847_35832C.1.pep
LISMRMAEFMLLRRGGFRDISRTNVLHPEQSSFGLRGIID

SEQ ID NO: 214625 - protein, 81 aa, Glycine max
  Clone ID: PAT_MRT3847_35833C.1.pep
DRTVQLPETTERYGCQQHDTKVQLRQHDNKVRLPQHDKKVRLLLRRQQRDISNSQHFHILSSPPPSLMFSQKLLKIAGIPF

SEQ ID NO: 214626 - protein, 43 aa, Glycine max
  Clone ID: PAT_MRT3847_35834C.1.pep
AECSLDSCQVFQYYGLLGTMHLQNVQVITLKMPVRVPSYNAVS

SEQ ID NO: 214627 - protein, 78 aa, Glycine max
  Clone ID: PAT_MRT3847_35835C.1.pep
QPTHKLSVFSLRSCWQIMTTQAPSCKRLPYAPRSRRMKYEEDYGLLHNLGIGDLDKLRRRTPNALASDNLMESASVAE

SEQ ID NO: 214628 - protein, 60 aa, Glycine max
  Clone ID: PAT_MRT3847_35836C.1.pep
SIYSFFFFFLSIFSFHFWGASFLIIGKQNPCPLMGALAELKKPSTLKKMPNHQPDPAREI

SEQ ID NO: 214629 - protein, 85 aa, Glycine max
  Clone ID: PAT_MRT3847_35837C.1.pep
MRGQKGEYELWLRWYQEKFFQTAFAKWMQLEETRQFIAHHKKHYSLDLCMNCGSALQNIMAIVNCLEEAPLWIVVSFLKFLCIDL

SEQ ID NO: 214630 - protein, 158 aa, Glycine max
  unsure (1)..(158): unsure at all Xaa locations
  Clone ID: PAT_MRT3847_35838C.1.pep
IKGTMVVVPINVSDINLLTFVDGRISAGLNLLGSTLDAGTFIXTSSASYLLDATTDDGGKXNSEIDTHSRGLTILPSIXIXEQADDPQFDCDXDFGKPRAXILMNYMLNEFYLTSLIVKHIPDHGTIHFICNVCGYNSAAXHTDRSYFADDPYLTSET

SEQ ID NO: 214631 - protein, 47 aa, Glycine max
  Clone ID: PAT_MRT3847_35839C.1.pep
CSVGAKSCLMFPAFSTKKSRTGYQAESEAPEHWKRQARTYSAPVPLE

SEQ ID NO: 214632 - protein, 44 aa, Glycine max
  Clone ID: PAT_MRT3847_3583C.1.pep
RAVALFFFIFHFILTIFLKGYIYSITSTSYFTTNYYTLQTYRIL

SEQ ID NO: 214633 - protein, 62 aa, Glycine max
  Clone ID: PAT_MRT3847_35840C.1.pep
NYTSTTHGLGHTQCAHIDTVRPYLLFFSDLYLGKTHKYYTFDLGKQLHSYDIIPPTLNNFRF

SEQ ID NO: 214634 - protein, 107 aa, Glycine max
  unsure (1)..(107): unsure at all Xaa locations
  Clone ID: PAT_MRT3847_35841C.1.pep
YVSAQTMTRPGRRIIANGHRSKNLSQKVRVQIVPSEKXHWHEXDPDTIKMQDNSETGLYPNTTLEDIPHSAWDLSCRDRQKTQPNNSPXEPPSRKQETDTGQNNPEG

SEQ ID NO: 214635 - protein, 62 aa, Glycine max
  Clone ID: PAT_MRT3847_35842C.1.pep
KNSLNQPNSENHDSLILSPTETINQIKKTFLEIQSDPFPAEPKFQNLTHPPHKMQKSIQFYL

SEQ ID NO: 214636 - protein, 85 aa, Glycine max
  Clone ID: PAT_MRT3847_35843C.1.pep
FNFSLTPCISRRITTNKSANILLTSLPSYLCNHKQKSPLNKSSITSQQHFIQPNKVMLTSTVLQSQSSPKKFKLHSNKDITAFKP

SEQ ID NO: 214637 - protein, 85 aa, Glycine max
  Clone ID: PAT_MRT3847_35844C.1.pep
YVSLRHKDVYTGNRHFLWSVDISQCLVNWFFIPNWLWLDILISVNIISFAIGANVSIIDFMVCIGGSALCHVLAIIILYLFSFDQ

SEQ ID NO: 214638 - protein, 81 aa, Glycine max
  unsure (1)..(81): unsure at all Xaa locations
  Clone ID: PAT_MRT3847_35845C.1.pep
RIMTDSKETNHKSVETLELHLGLKNYDPXSDKRLSGSANLPRIPRLLMKICLLGHAQHVEYADNIXLDYMDVCAWKKLISN

SEQ ID NO: 214639 - protein, 179 aa, Glycine max
  Clone ID: PAT_MRT3847_35846C.1.pep
MGTPEFPDLGKHCAVSDCKLIDFLPFTCDRCDQVYCLEHRSYIKHLCTKADKQDVTVVICPLCAKGVRLVPDQDPNITWENHVNTECDPSNYEKVTKKKKCPVPGCREILVFSNTIKCRDCTVEHCLKHRFGPDHKCPGPKNVESSFSFMNLLNGSKKQESKPKSSATTSSKWSTSFLN

SEQ ID NO: 214640 - protein, 261 aa, Glycine max
  Clone ID: PAT_MRT3847_35847C.1.pep
MLNFGRSRNQSRAARATTMGGMDYADPKRKGNFVGKVFLAAALTTLCIIMIKQSPFLNSPSPFAVHEPGVTHVLVTGGAGYIGSHATLRLLKENYRVTIVDNLSRGNLGAIKVLQDLFPEPGRLQFIYADLGDPISVNKIFLENKFDAVMHFAAVAYVGESTGDPLKYYHNITSNTLVVLESMAKHDVKTLIYSSTCATYGEPEKMPITEETKQVPINPYGKAKKMAEEIILDLSKNSDMAVMILRYFNVIGSDPEGRLGE

SEQ ID NO: 214641 - protein, 349 aa, Glycine max
  Clone ID: PAT_MRT3847_35848C.1.pep
TSVVLAMATNSSDVLSPKQPPLPSPLRFSKFYQSNMRILITGGAGFIGSHLVDRLMENEKNEVIVADNYFTGSKDNLKKWIGHPRFELIRHDVTEPLTIEVDQIYHLACPASPIFYKYNPVKTIKTNVIGTLNMLGLAKRVGARILLTSTSEVYGDPLVHPQPEGYWGNVNPIGVRSCYDEGKRVAETLMFDYHRQHGIEIRVARIFNTYGPRMNIDDGRVVSNFIAQAIRGEPLTVQSPGTQTRSFCYVSDLVDGLIRLMEGSDTGPINLGNPGEFTMLELAETVKELINPDVEIKVVENTPDDPRQRKPIITKAMELLGWEPKVKLRDGLPLMEEDFRLRLGFDKKN

SEQ ID NO: 214642 - protein, 108 aa, Glycine max
  unsure (1)..(108): unsure at all Xaa locations
  Clone ID: PAT_MRT3847_35849C.1.pep
DVPTIAHIEGLHSLQRATNAPDSNDXMDLLLSIDGPGXQGSGLVFTNMNAFNDQLALANTQXAWEEIFQGILGDQFKLIXRHAGSHLPSEAVCYNGTCCNGRGGSPTT

SEQ ID NO: 214643 - protein, 774 aa, Glycine max
  Clone ID: PAT_MRT3847_3584C.1.pep
MTESMPAVEPSPEPPASDIVFDDFSTDFSAFPIPSMDSLFNTTDGLPFPSDLEFGMDFNNNNGEFEITFDDLDDIYIPSDAEDFLLPDACNPNYASVSPPIDDSSAKNSDSDASAVSGDGVSRFFNSQVSESDSADNVRVPSVPSPEAEFCEREESSNGPVSSQGSGNGGSGVYEAMHSPSPDSGPYERDITSFHAHAATNNGVKMEEVPAFDLKRKKGSCEGSATKHRRFSSSVENNNNNTEKQSQSGLNGIDDEDEKRKARLMRNRESAQLSRQRKKHYVEELEEKVRSLNSIIADMSSKMSYVVAENATLRQQVGAAAGVMCPPPPAPAPGMYPHHPPMAPMPYPWMPCAPYVVKPQGSQVPLVPIPRLKPQQPASAPKSKKSESKKSEGKTKKVASISLLGLFFFIMLFGGLVPVVDFRFGGLVDNVPGTGSSNYVSDRVYGHGGGKVWSLNGPRNGSGRDGDVGFSNGRFSVSDRVKNYEKRGRNLREERHDRKGPDDSSRQGNASEPLVASLYVPRNDKMVKIDGNLIIHSIMASEKAMASQTAEAKKDKRETGLAIPKDLDSALAIPGVGRSRDQHPHVYRVSPEQRKALGSGSTKALKDHMKSSATDGKMQQWFREGLAGPMLSSGMCTEVFQFDASPSPGAIVPATSVANVSTENHQNATSVKKTRNRRTLHELPEPLNGSSLNITEEQVKNLQKDHFHGNKSSMVVSVLVDPREAGDGDVDVDGMMRPKSLSRIFVVVLIDSVKYVTYSCGLPRASPHLVTGYV

SEQ ID NO: 214644 - protein, 45 aa, Glycine max
  Clone ID: PAT_MRT3847_35850C.1.pep
LEHSRPWGKLIFYFGSRCGPFCHLAEPDDALDCLSAGLCGKLMPL

SEQ ID NO: 214645 - protein, 68 aa, Glycine max
  Clone ID: PAT_MRT3847_35851C.1.pep
FIYAQTCNPCVNMPTLTSLPRPLTTGQASLNDLRPLLLSRRPRRLPDNTPRQMATHAKDSKANIPLTL

SEQ ID NO: 214646 - protein, 79 aa, Glycine max
  Clone ID: PAT_MRT3847_35852C.1.pep
LSFLHFFHKHIAFTVLLEFNVKYLIRKAKKTIDLEKWVKVYPTRVLGPNRSIPLRVWNIEKNYGLDAAYKNIKLEKRQK

SEQ ID NO: 214647 - protein, 609 aa, Glycine max
  Clone ID: PAT_MRT3847_35853C.1.pep
MVVAFEGINWQGLDWKMQQQQHYDEKLNQMEEQMREVEQERGRAFNDLRQIKRVAEETNVMVDQSLASKRSISEPRIIEQQMGANDRNNESSEKDALLDNIRNEMDSLRSSEDNAMALLSDYKRRIQELEAELDKRKESEANLFDTLVMQTKQLEQNKILLEESKLEIISLEEKIKALQVSASQIIKTPVTEDGFSTKESVENMEIEAELEKVLFSGEESTMEVKTMLEELQMLKNELKSATEAEENSKKAMDDLAFALKEVATEANQVKAKLTLSQVELEHTKGDAERWRTMLGTTEERYKEILETTRKEADRYKNTAERLRLEAEESLLAWNDKETEFVNCIRRAEEERLLAQQESTRVLELFKEAENKTRVSKEENQKLRDILKQALNESNVAKEAAEIAKAENARLQDSLNLLVHENEMLKIHEAASFENIRELKRMLSESSMKEFKNEDMDKPSTKEGSKEDNNNNKESGGRKAKAHNNNSIDSKSLHKTFSFNLKEMITPHNHNKQQHSKEEANNKDTDDDTLRGSIFDEVDSSSDSESRPDVDMGNSPDDYDHLGESHFDDPHSDSNSRKRRALLRRFGDLIRRRGYHNHRKEPSNEEHLQT

SEQ ID NO: 214648 - protein, 223 aa, Glycine max
  Clone ID: PAT_MRT3847_35854C.1.pep
MDSSSHQQNPCLLIADKQTQHQDHPLPLSPLATPTKSPSPAVPRNTSPPPEFPDSAGVRRRCKTRAPQTASPRNPRKSRRRSELEIREEKDSIFLEEVGKPRKRRQTARTKKEKPNSAPPSTPSPKSEEENGGDFDRVGQVVSDLIMWKNSSKSTFWFGFGSLCLVSSCFTQGLNFSIFSALSQLGILLSGVSFFSNSICQRNEVEEKREIKLKEDDISRLAK

SEQ ID NO: 214649 - protein, 79 aa, Glycine max
  Clone ID: PAT_MRT3847_35855C.1.pep
MSKVATLFTLALLLSFNLIHASRLNPSLKVFSSLREDVAATKEEINEESCEEGTEECLIRRTLAAHVDYIYTQKHKPKP

SEQ ID NO: 214650 - protein, 111 aa, Glycine max
  Clone ID: PAT_MRT3847_35856C.1.pep
MHIYVATLCGMTITLEVERSDTIYNGKAKIQEKERQPPDQQRLMFVRKQLEDSRTVADYNIQKESPLHLGLRIRGGMQSLNKTLSRKTITLEVESYDTIDDGKAKIQDKEG

SEQ ID NO: 214651 - protein, 58 aa, Glycine max
  Clone ID: PAT_MRT3847_35857C.1.pep
EDQTRKMEPLEHLADCPLKHASINACLHPTEINKIIIVYISHNIKPLVDDGLIILLTT

SEQ ID NO: 214652 - protein, 160 aa, Glycine max
  Clone ID: PAT_MRT3847_35858C.1.pep
MEEAGLGDCCSSNSTITRKSDKRKQQHQQQEKPYRGIRMRKWGKWVAEIREPNKRSRIWLGSYATPVAAARAYDTAVFHLRGPSARLNFPELLSQDDDVSTQQQGNMSADSIRKKATQVGARVDALQTALQQSSSSHSANSSHVSSSDKPDLNEYPKPED

SEQ ID NO: 214653 - protein, 73 aa, Glycine max
  Clone ID: PAT_MRT3847_35859C.1.pep
VSTNARMPLASENIRSPLLNASVPVHCDLQHHRALDQPYGNKKRSGHATSINKLAYLYRVGKIYVSINGRCVH

SEQ ID NO: 214654 - protein, 634 aa, Glycine max
  unsure (1)..(634): unsure at all Xaa locations
  Clone ID: PAT_MRT3847_3585C.1.pep
MNIPPLDKMMSSTTVRKLQVVSPVPADIDIANSVEPVHISQIAKDLNLSPNHYDLYGKYKAKVLLSVLDELQGSEDGYYVVVGGITPTPLGEGKSTTTVGLCQALGAFLDKKVVTCLRQPSQGPTFGIKGGAAGGGYSQVIPMDEFNLHLTGDIHAITAANNLLAAAIDTRIFHESTQSDKALFNRLCPPNKEGKRSFSDVMFRRLTKLGISKTNPDDLTPEEVNKFARLDIDPNSITWRRVMDINDRFLRKIAIGXQGPDEKGMVRETVLVISVASEFMAILALTTSRGYAGWMLGKMVIEISKRVDPVTADDVGGGEALTVLVNDALSLEEGLHLIKVSGVESWSQEGLLDIALXLLLAAGFVEVEGSGGGVAVADILIMVLNLEECDEPILGLLTNLGVTLEIGFTRAAICGERLRMNXLTENVALVEAGCVNMARHISNTKSYGVNVVVAINKFSTDTEAELNAVRSAALAAGAYDAVICTHHANGGKGAVDLGIAVQKACENVTQPLKFLYPVDLSIKEKIEAIAKSYGASGVEYSEQAEKQIEMYSKQGFSGLPICMAKTQYSFSDNAAAKGAPSGFVLPIRDVRASIGAGFIYPLVGTMSTMPGLPTRPCFYDIDLDTTTGKVIGLS

SEQ ID NO: 214655 - protein, 159 aa, Glycine max
  Clone ID: PAT_MRT3847_35860C.1.pep
MEEAGLGDCCSSNTTITRKSEKRKQQHQQQEKPYRGIRMRKWGKWVAEIREPNKRSRIWLGSYATPVAAARAYDTAVFHLRGPSARLNFPELLSQDDDVSTQQQGKMSADSIRKKATQVGARVDALQTALQQSSSTHSISSSHVSYEKPDLNEYPKPED

SEQ ID NO: 214656 - protein, 86 aa, Glycine max
  unsure (1)..(86): unsure at all Xaa locations
  Clone ID: PAT_MRT3847_35861C.1.pep
DRSTIQQRRTSWQDGVLGTNYHIPAKWNWTYQFQVKDQIESFFYFSSLHLQRXRGFIINNKLVIPIPFDTXMGDIVVFIGVVHFMF

SEQ ID NO: 214657 - protein, 78 aa, Glycine max
  Clone ID: PAT_MRT3847_35862C.1.pep
RKNLGLLGKRVLFWGCPLFFQLKPRDPGPPFKLASPPPPFPFKPFGCNGAGWFFAPRAPPPNLGGFFKQSGRGTNCPI

SEQ ID NO: 214658 - protein, 53 aa, Glycine max
  Clone ID: PAT_MRT3847_35863C.1.pep
KHLATQFHVICTPHSQCSAGGRFHNDSHMLAPCDSLCRMHLFWVSHVKHGFSQ

SEQ ID NO: 214659 - protein, 60 aa, Glycine max
  Clone ID: PAT_MRT3847_35864C.1.pep
RFIAKARQCCLNLNHDCGQKLISPPCKPPKVKFHVKWEFLCLYKLECFFEQHLEIFGPPP

SEQ ID NO: 214660 - protein, 119 aa, Glycine max
  Clone ID: PAT_MRT3847_35865C.1.pep
TLLAEMSSAGNLAKGDYTTAAVKIAEDHSDFVIGFISVNPASWPGAPINPSFVHATPGVQMVTGGDALGQQYSTPHSVVYDGGSDIIIVGRGIIKAANPAQAAREYRLQGWNAYLAKCS

SEQ ID NO: 214661 - protein, 59 aa, Glycine max
  Clone ID: PAT_MRT3847_35866C.1.pep
TYGKGFHVLSLCQTRMCWSVPFVCSLRQSVIARPLAIFTKSSGTPCSEFLVSASDQSAS

SEQ ID NO: 214662 - protein, 45 aa, Glycine max
  Clone ID: PAT_MRT3847_35867C.1.pep
IWIMHTSEGLRFKSSFSQNDAVPVKLCNNNKFSIFDIYKCWVLKE

SEQ ID NO: 214663 - protein, 94 aa, Glycine max
  Clone ID: PAT_MRT3847_35868C.1.pep
VVPHSAVRSSSNLVPPISLSLSFHFLCTLYPFSPQSYAPNSHGYEVARVTMSLACLVCHSVDSPSPSHSFRSYSVSSAENEGRCHAVATCLTRK

SEQ ID NO: 214664 - protein, 83 aa, Glycine max
  Clone ID: PAT_MRT3847_35869C.1.pep
KTAACGPRRGRVLNRPHKRRLRDPLRLAWLNEHCTEHHVHVHDTTGCRMIHTRGELRGAFANRIGIAIAFNARWNSRQIPHGG

SEQ ID NO: 214665 - protein, 265 aa, Glycine max
  unsure (1)..(265): unsure at all Xaa locations
  Clone ID: PAT_MRT3847_3586C.1.pep
MTASMPAVEPSPEPPASDLVFGDFSSNFNAFLIPSMDSLFNTTDALPFASDLEFGMDFDNNGEFEITFDDLDELDDIFIPSDAEDFLLPDVCNSNYDSASPPIDAKNSDSPDSDVSAVSGEGDSADNVRVSSVPSPEAEFCDREESSNGPVSSQGSGNGGSGVYEAMHSPSPDSGPYERDITSSHAHAVTNNGVKMEETPAFDLKRKKESCDGSATKHRRFSSSVENNNNNTEKQSQSGLNGIDDEDEKRRXRLMRNREXAQLSR

SEQ ID NO: 214666 - protein, 269 aa, Glycine max
  Clone ID: PAT_MRT3847_35870C.1.pep
QAEVSFIKRDSCRKVSRLVTALPLEFLKTGPISITVPDSDFHDFDKDRSEECFRPKQIWALYDEEDGMPRLYCMIREVVSVNPFKIHISYLSSKTDSEFGSVNWLDSGFTKSCGNFRAFNSDAVDQVNIFSHVLSKEKAGRGGCVRIYPRSGDIWAVYRNWSPDWNRSTPDEVRHQYEMVEVLDDYSEELGVCVSPLIKLAGFKTVYQSNTDKSAIKWIPRREMLCFSHQVPSWLLKGEASNLPERCWDLDPAATPDELLHAATEPNAL

SEQ ID NO: 214667 - protein, 94 aa, Glycine max
  Clone ID: PAT_MRT3847_35871C.1.pep
FFPPFQPSLLTRARGGPLIPAKLPPRCARLVVYSRKTNETSIWIVELSQVHAVTRGGHHRGKVISSHVVPDVQPPMDAEEYAKCEAVVKSFPPF

SEQ ID NO: 214668 - protein, 59 aa, Glycine max
  Clone ID: PAT_MRT3847_35872C.1.pep
KHKIIERVEVNSDGDKAACSECDLLESYVKPSCFSLCLIYTSQSWEKRNDCYILLQVES

SEQ ID NO: 214669 - protein, 94 aa, Glycine max
  Clone ID: PAT_MRT3847_35873C.1.pep
HTVHSCAYFENLRISTSEYYRIGNVWIPIGSSPGASFGRESGSRWPIVGARSIDHIRVHICQKSSSSKSTELEIAYEYGYGLAEGLQVRHYQGP

SEQ ID NO: 214670 - protein, 41 aa, Glycine max
  Clone ID: PAT_MRT3847_35874C.1.pep
SYLLTLFIIYYSSYKSVLMTLIIITKINIKPILIYVIKFVN

SEQ ID NO: 214671 - protein, 121 aa, Glycine max
  Clone ID: PAT_MRT3847_35875C.1.pep
CNSRTDVYAFGILLLEILIGKKPGKNGRNGEYVDLPSMVKVAVLEETTMEVFDVELLKGIRSPMEDGLVQALKLAMGCCAPVASVRPSMDEVVRQLEENRPRNRSALYSPTETRSGSVTPF

SEQ ID NO: 214672 - protein, 46 aa, Glycine max
  Clone ID: PAT_MRT3847_35876C.1.pep
DGLMVYVLEYIIKIRVIDYDEEYPFRETNDGCYSYLIDANVCSIDD

SEQ ID NO: 214673 - protein, 38 aa, Glycine max
  Clone ID: PAT_MRT3847_35877C.1.pep
VSYPCRSLPVTMQRRDEPSPKDGTTWSYSGPVYVFELG

SEQ ID NO: 214674 - protein, 62 aa, Glycine max
  Clone ID: PAT_MRT3847_35878C.1.pep
IAYDLSHSSNDPVGHDHLGSDHLPIHHLPVSTSSNLQYLSPPKSQRRMNASLVVTPCRCSWW

SEQ ID NO: 214675 - protein, 147 aa, Glycine max
  unsure (1)..(147): unsure at all Xaa locations
  Clone ID: PAT_MRT3847_35879C.1.pep
MAASLGLAHEAAPFYAAAYPPAGAAYAYLAPPPGDLVVEFPPRAATMADDCCYQFGQEMGGAYCSPPVFDNGMTSLLNYGVEGDGRRPVGGPAGGTGNGGGRPRPASRIGFRTRSEVDVLDDGFKWRKSGRRRXQSSPTREHYRCSR

SEQ ID NO: 214676 - protein, 49 aa, Glycine max
  Clone ID: PAT_MRT3847_3587C.1.pep
LGFIAPSFLCCNFGLVALILILCVPISGLPACIRHSIFSDHHSLAVLHC

SEQ ID NO: 214677 - protein, 50 aa, Glycine max
  unsure (1)..(50): unsure at all Xaa locations
  Clone ID: PAT_MRT3847_35880C.1.pep
XFRLYTAQHDIGGLYSFYPTDTFSQPNPSVDFLHPYPSDIFFQPHRPIFL

SEQ ID NO: 214678 - protein, 82 aa, Glycine max
  unsure (1)..(82): unsure at all Xaa locations
  Clone ID: PAT_MRT3847_35881C.1.pep
SRRIGRLKHSSSHHQWPRLVFSPLFLLSSXCCFAFSSREQPQRNECQIXKLNALKPDNRIESEGGLIETWNPNNMHSAWTSR

SEQ ID NO: 214679 - protein, 340 aa, Glycine max
  Clone ID: PAT_MRT3847_35882C.1.pep
MDTQCICDMIGNHNSALSFNKISTLCRVTLPCDIDPPVPHDPVSPVPSTAPESESPAPTPSVPSQEPESPTSTPSVAPSPEPQSPTSTPSVAPSPESQSPTSTPSVPSPKAQPTTSPKPKRSSASLAAQSHCLLVLVLLAIYIASMRDKWENRFGFVRFIDVQNEKVLERKFDQIMIRNGKMNVNIPKFRRDEKGLQEVICEEEKNLEWLEKSWIKDIIFGDDNASETLRKSIDNNIGVQTDDLGFMLIDLKKLAYQNPCDERWLVVLHDKTIGVNVEDDDDSLIDTYVSPLSTQISPNVNGEDEVNDADGYTTQLLPSYSSSSSSSSSSSSYCYYYIMH

SEQ ID NO: 214680 - protein, 127 aa, Glycine max
  unsure (1)..(127): unsure at all Xaa locations
  Clone ID: PAT_MRT3847_35883C.1.pep
MESRSCMNVACATSTTIRWRKGWALRSGEFADLCDKCGSAYEQSTYCDMFHSNDSGWRECTSCDKRLHCGCIASMSQLELLDXXGVSCISCGRNSPQPIASNEKPNGSGTSVQNVSTQQQCTSLANQ

SEQ ID NO: 214681 - protein, 52 aa, Glycine max
  Clone ID: PAT_MRT3847_35884C.1.pep
MTIITLGKFTKDENDLFDIMNDGLDHFIFVGCNFLTAAVFTPANSLAHYSTK

SEQ ID NO: 214682 - protein, 79 aa, Glycine max
  unsure (1)..(79): unsure at all Xaa locations
  Clone ID: PAT_MRT3847_35885C.1.pep
FRVCVELELKMESRSCMNVACATSTTIRWRKGWALRSGEFADLCDKCGVCXEIDASAYEQSTYCDMFHSNDSGWRECTS

SEQ ID NO: 214683 - protein, 56 aa, Glycine max
  Clone ID: PAT_MRT3847_35886C.1.pep
FVLRLICLPRSCMVVAVDIFGAIGLAISSNVFGLCHWDYVVFISISGINTSYPFCL

SEQ ID NO: 214684 - protein, 216 aa, Glycine max
  Clone ID: PAT_MRT3847_35887C.1.pep
KELSLHPRIPGTCCDSRVKGEFFHQTTFSISLSVAKKFIEDVQKLVQLEPKGFCGIELYNGILMRYVKASSAYLGKQEDALDIDITYYRSKDPMTPRLYEDILEEVEQLGIFKYGGLPHWGKNRNLAFEGAIKKYKNAGRFLRVKEKYDLQGLFSSTWTDQMLGLKDGVTILKDGCALEGLCICSQDSHCNPSKDYYCKPGKVYKEARVCTHLKSK

SEQ ID NO: 214685 - protein, 48 aa, Glycine max
  Clone ID: PAT_MRT3847_35888C.1.pep
LTTLGQVHSGWIFGGIAELVDNSRDAKATKMDIFVRSDQLTEICGRLS

SEQ ID NO: 214686 - protein, 49 aa, Glycine max
  Clone ID: PAT_MRT3847_35889C.1.pep
LPNGLNINRHSQLNFGTPHLHIHQLPVEQEPYGSFFTHVLDDHHQVVWL

SEQ ID NO: 214687 - protein, 565 aa, Glycine max
  Clone ID: PAT_MRT3847_3588C.1.pep
MNSSTTVRKLQVVSPVPADIDIANSVEPVHISQIAKELNLSPNHYDLYGKYKAKVLLSVLDELQGSEDGYYVVVGGITPTPLGEGKSTTTVGLCQALGAFLDKKVVTCLRQPSQGPTFGIKGGAAGGGYSQVIPMDEFNLHLTGDIHAITAANNLLAAAIDTRIFHESTQSDKALFNRLCPPNKEGKRSFSDVMFRRLTKLGISKINPDDLTPEEVNKFARLDIDPNSITWRRVMDINDRFLRKIAIGQGLDEKGMVRETGFDISVASEIVAVLALTTSLADMRERLGKMVIGNSRSGDPVTADDLGVGGALTVLMKDAIHPTLMQTLEGTPVLVHAGPFANIAHGNSSIVADKIALKLVGPGGFVVTEAGFGADIGAEKFMNIKCRYSGLTPQCAIIVATIRALKMHGGGPAVVAGKPLDHAYLTENVALVEAGCVNMARHISNTKSYGVNVVVAINKFSTDTEAELNAVHSAALSAGAYDAVICTHHAHGGKGAVDLGIAVQKACKNVTQPLKFLYPVELSIKDKIEAIAKSYGASGVEYSQHAEKQTEMYSKQGFSRLPICM

SEQ ID NO: 214688 - protein, 85 aa, Glycine max
  unsure (1)..(85): unsure at all Xaa locations
  Clone ID: PAT_MRT3847_35890C.1.pep
ETLSPFRCFLSPIPTFYRVCLKKTTECFQSLPYLATLLTPLLXIFYAYIKTNDTLLITIYALDLFIDTDYLVIYITYCHKKAKFF

SEQ ID NO: 214689 - protein, 41 aa, Glycine max
  Clone ID: PAT_MRT3847_35891C.1.pep
ENRALKEHWGILMFVFGLIGLETALGLLSGIGLVIVLQLSK

SEQ ID NO: 214690 - protein, 129 aa, Glycine max
  Clone ID: PAT_MRT3847_35892C.1.pep
MNWPTLTFTIGICIGFVVGVSLALSIVSCVIRGRKRTDIERSSSHSAVTIPVQVQVVDSNSTLSEGEESPRTSEWSNTCIWVERLRRNWCNGGCVVINGVFFDVQEAAWCLAAVVGGGGIGGWGWGAGG

SEQ ID NO: 214691 - protein, 81 aa, Glycine max
  Clone ID: PAT_MRT3847_35893C.1.pep
ETLISTWLPLVPGHFTARSTRLSRHWRVRAESPWASFSCRILTEPTSHCGSFLTGWISGAARLTFVLAIVAEGNALEAQGP

SEQ ID NO: 214692 - protein, 122 aa, Glycine max
  unsure (1)..(122): unsure at all Xaa locations
  Clone ID: PAT_MRT3847_35894C.1.pep
SSEFGSSLTPGSIRIAALETLFSLITGAGALKSEPWRSKVDSSIVRYINVLCYGRIRSCRLKGLIXREPAASSTELQLAALRALLVYILSFARVLTSYLYXGLELFLRGRTQTGTKLAAVCA

SEQ ID NO: 214693 - protein, 58 aa, Glycine max
  Clone ID: PAT_MRT3847_35895C.1.pep
AVNRALLNPNGSGPGVSAASSCFFGSSLKKAIGSRVPDTETSYGSFKIDACEETTEID

SEQ ID NO: 214694 - protein, 61 aa, Glycine max
  unsure (1)..(61): unsure at all Xaa locations
  Clone ID: PAT_MRT3847_35896C.1.pep
VACNPLTKSGCPLIHQSMRLTFGSLANSTPYLXRLLLLINSAYLASSKSLNTQFTALRKED

SEQ ID NO: 214695 - protein, 48 aa, Glycine max
  Clone ID: PAT_MRT3847_35897C.1.pep
FLPPRHWFCSLMLRVIMLCVIVNAFHSGCRWQLLSMFTSCFEFGLGIG

SEQ ID NO: 214696 - protein, 69 aa, Glycine max
  Clone ID: PAT_MRT3847_35898C.1.pep
GNRHVSISKLILITSHYHIGKVLSYNYKQRKEKLRVCLLLFSVFIFLFNKLCFETILLNLSINLSSKVT

SEQ ID NO: 214697 - protein, 73 aa, Glycine max
  Clone ID: PAT_MRT3847_35899C.1.pep
QDANYFNNMGAPGVQYSKKDRDIQAYFSLIAQCGELDAERSLDLWKAQRSSDSSIICGTGSLIQLIGISMALD

SEQ ID NO: 214698 - protein, 148 aa, Glycine max
  unsure (1)..(148): unsure at all Xaa locations
  Clone ID: PAT_MRT3847_3589C.1.pep
GPMLSSGMCTEVXFQFDVSPSPGAIVPATSVANVSTENRQNATSVKKTRNRRTLHELPEPLNGSSLNITEERVKNLQKDHLHGNKSSMVVSVLVDPKEAGDGDVDVDGMMRPKSLSRIFVVVLIDSVKYVTYSCGLPRASPHLVTGYV

SEQ ID NO: 214699 - protein, 58 aa, Glycine max
  unsure (1)..(58): unsure at all Xaa locations
  Clone ID: PAT_MRT3847_358C.1.pep
CSALVPAQELRLSSLSDRLPSSEKNRFRSPSKYAPPPCRRRAYQPQGQSQIQXVDRVG

SEQ ID NO: 214700 - protein, 64 aa, Glycine max
  unsure (1)..(64): unsure at all Xaa locations
  Clone ID: PAT_MRT3847_35900C.1.pep
LASYGDNQKINLKPIIYLHSYGIVIXFFFLVNTLNLINFWSASHLLLIPLASLEFPSNILFLYF

SEQ ID NO: 214701 - protein, 60 aa, Glycine max
  Clone ID: PAT_MRT3847_35901C.1.pep
PASSFSNINIIGNGQLFRESAGYDCSCGRPIGPSSCSLTASSITSFKLYATLVCGRCSII

SEQ ID NO: 214702 - protein, 128 aa, Glycine max
  unsure (1)..(128): unsure at all Xaa locations
  Clone ID: PAT_MRT3847_35902C.1.pep
RDLWGHFPSDVXMELSNVLNNLNGTXESITNARIWFMPRSSFAPTLAEALRDRVFALDEVERQLHIIYLANDILFDSLNRRTSNSDLDNEALAFKPVLSSMLARIYHNPQSNEEYRKRMPPMVEFWSS

SEQ ID NO: 214703 - protein, 56 aa, Glycine max
  unsure (1)..(56): unsure at all Xaa locations
  Clone ID: PAT_MRT3847_35903C.1.pep
GFAPPLXKTHKWQAYVQXQLQAXXDXEXXKLXDYINXKHXXXANHXXXVEPGXXXX

SEQ ID NO: 214704 - protein, 160 aa, Glycine max
  Clone ID: PAT_MRT3847_35904C.1.pep
PVVIVAFVMSVFWISTTAGELVNCLEAIGVLLELPPALLGLTVLAWGNSVGDLVADVAVAKAGHPAMAMAGCFAGPMFNMLVGLGTALVIQTANIYPRAYQLNFHVGIVIAFVFLLLSLMGSLLVITWCRFRVPRFWGFCLVGIYVAFTAVSLVIAMFSG

SEQ ID NO: 214705 - protein, 70 aa, Glycine max
  Clone ID: PAT_MRT3847_35905C.1.pep
LPSGQSLLLEGFFPIAWDHLMVVQSPNFCRCLVRCNNYLPSAHYGSQPAPQSRERERRENPDCLPMPARA

SEQ ID NO: 214706 - protein, 72 aa, Glycine max
  Clone ID: PAT_MRT3847_35906C.1.pep
YNSSSLSFLPSFPSSSPNFLETSNPKLNKTFNSPINPSSNYYYFIQIIIIKKSITQTHSFFSEIFFLSFSGS

SEQ ID NO: 214707 - protein, 68 aa, Glycine max
  Clone ID: PAT_MRT3847_35907C.1.pep
EPELCIASHVLQMPITVYMYAKDAGGLISIAEYGQEYGKENPIRVLYHGFGHYDALEIPRRKGPKPRL

SEQ ID NO: 214708 - protein, 43 aa, Glycine max
  Clone ID: PAT_MRT3847_35908C.1.pep
RRELEYCHIIRHSVKTLSTVLTGYNSQKGIYKIHDKRRVLTTS

SEQ ID NO: 214709 - protein, 47 aa, Glycine max
  Clone ID: PAT_MRT3847_35909C.1.pep
TVCVDIRSNYIRKIFHTHLPNPFSLRILLYMNLQIGMYHAVLETVCP

SEQ ID NO: 214710 - protein, 49 aa, Glycine max
  Clone ID: PAT_MRT3847_3590C.1.pep
YHLCAVTVRRICGLWCTVYMRMVLRVTYTPSVAVSRGPLEVLIYDRTRD

SEQ ID NO: 214711 - protein, 127 aa, Glycine max
  Clone ID: PAT_MRT3847_35910C.1.pep
MAPAKAEKKPAEKKPAEKKISKEGGSEKKKKRTKKSVETYKIYIFKVLKQVHPDIGISSKAMGIMNSFINDIFEKLAQESSRLARYNKKPTITSREIQTAVRLVLPGELAKHAVSEGTKAVTKFTSS

SEQ ID NO: 214712 - protein, 138 aa, Glycine max
  Clone ID: PAT_MRT3847_35911C.1.pep
MAPAKAEKKPAEKKPAEKAPAEKKPKAEKKISKEGGSEKKKKRTKKSVETYKIYIFKVLKQVHPDIGISSKAMGIMNSFINDIFEKLAQESSRLARYNKKPTITSREIQTAVRLVLPGELAKHAVSEGTKAVTKFTSS

SEQ ID NO: 214713 - protein, 138 aa, Glycine max
  Clone ID: PAT_MRT3847_35912C.1.pep
MAPPKAEKKPAEKKPAEKAPAEKKPKAEKKISKEGGSEKKKKRTKKSVETYKIYIFKVLKQVHPDIGISSKAMGIMNSFINDIFEKLAQESSRLARYNKKPTITSREIQTAVRLVLPGELAKHAVSEGTKAVTKFTSS

SEQ ID NO: 214714 - protein, 154 aa, Glycine max
  Clone ID: PAT_MRT3847_35913C.1.pep
MKATLLRPCSGPLILDTHSNRTSATMRHASTVVCCSSKNQPYIPKLEPFSRTKFERAVKDPPLIEKSEKEILDYCSTLEGDQSYSCWQAYFELKDLEVCSYFYSLCYWSPFLTCFVINWHVIYKIWPSFFSVFVFFTCIIWCGVLILLSVFFHD

SEQ ID NO: 214715 - protein, 40 aa, Glycine max
  Clone ID: PAT_MRT3847_35914C.1.pep
LHVRCTSSPSDAQLTLQQRQEFLEVIKSNLAAAQQNEVLC

SEQ ID NO: 214716 - protein, 86 aa, Glycine max
  Clone ID: PAT_MRT3847_35915C.1.pep
PNRLEYGCDMTTDYHRCKVFEPKVQLSYCLSSLSCYPYWLVCLLQVQLHDAQCQASMFPHSSDAFVHPRYSVESALLLTMPKVQQV

SEQ ID NO: 214717 - protein, 39 aa, Glycine max
  Clone ID: PAT_MRT3847_35916C.1.pep
HASDHAFALTHPSTTTTSLSLDMGSGAEQLYWILEIMPS

SEQ ID NO: 214718 - protein, 78 aa, Glycine max
  Clone ID: PAT_MRT3847_35917C.1.pep
KDYFFTHNQNPRPLDTFCITCNFKKHHAGRTSHNFMPAQLAKLFMLELKLPALVQFYIQKVSTICISPMGTIGSTHGL

SEQ ID NO: 214719 - protein, 45 aa, Glycine max
  Clone ID: PAT_MRT3847_35918C.1.pep
PKLGIRLEKTIKTKTLTKIFVTTQFHLNILDLWVMVQFESLYIIT

SEQ ID NO: 214720 - protein, 84 aa, Glycine max
  unsure (1)..(84): unsure at all Xaa locations
  Clone ID: PAT_MRT3847_35919C.1.pep
THFSVTAIVHIVSGVLSAKKTGDVTDLQSGVRHRPVACXVQAYKGDIFNQYCRVNFSDRTVIDSSFDRINPIEVELGTELVITG

SEQ ID NO: 214721 - protein, 52 aa, Glycine max
  Clone ID: PAT_MRT3847_3591C.1.pep
LWLLYGNHKKNTDLEVPYLDHTKRRSICFHLQRIYKTHLRLDKIWAVRVLYL

SEQ ID NO: 214722 - protein, 66 aa, Glycine max
  Clone ID: PAT_MRT3847_35920C.1.pep
EKPQTHQFSSDLSSVDFAPQVDCGWKEPNLNLNLDLDAARLMFEDFVLLVASVAGHVAALIEPALF

SEQ ID NO: 214723 - protein, 120 aa, Glycine max
  unsure (1)..(120): unsure at all Xaa locations
  Clone ID: PAT_MRT3847_35921C.1.pep
GNYKNYPPGGGGGKVFWGERAPKKNSLDLCPNPRVKSFVWEGGFKKFWVGKQGPFFKFGGGKKKFFFWGAGKLSPPLGPPPLSYGPRNPLWALEPYRGGFKKKKFFLAPXXXXXKKKNPX

SEQ ID NO: 214724 - protein, 70 aa, Glycine max
  Clone ID: PAT_MRT3847_35922C.1.pep
ARGTMHVMIRFSDTVYGILMMGNKTIGKAQLNNAYIHCIYGWSPYDVRKNIASDQLRNHIVKCIAALQRL

SEQ ID NO: 214725 - protein, 81 aa, Glycine max
  Clone ID: PAT_MRT3847_35923C.1.pep
LRVNHFLPGRRTKENFRVLKGGAGYPPAHHPIFISPIFSSPSRIVLAHSLSLCVCSSLKSTLFPLRTPPLSAYGGKLRNPS

SEQ ID NO: 214726 - protein, 38 aa, Glycine max
  Clone ID: PAT_MRT3847_35924C.1.pep
FFFFFFFFFFFFFFFFLTSNHRQEALLILCHELTTREA

SEQ ID NO: 214727 - protein, 60 aa, Glycine max
  Clone ID: PAT_MRT3847_35925C.1.pep
DSNPSRLEITKVDFAFPTKSSPYASPGNLTLVSKLKEPSYLPTLLDLIGSTSSVTYTSSN

SEQ ID NO: 214728 - protein, 35 aa, Glycine max
  Clone ID: PAT_MRT3847_35926C.1.pep
ALSITNRIYMLLHLIMTNSILYSLKLFDYSISLNS

SEQ ID NO: 214729 - protein, 102 aa, Glycine max
  unsure (1)..(102): unsure at all Xaa locations
  Clone ID: PAT_MRT3847_35927C.1.pep
LSLPPXPTWCLIQRLEISPIQFAKIYPNPPPSSISSSLLPINPPHSSLAHAFSQRKLYCSISSSTFSSKFFFILTRRRGFTRRLLPIHRASIHFPCPSFSLT

SEQ ID NO: 214730 - protein, 103 aa, Glycine max
  unsure (1)..(103): unsure at all Xaa locations
  Clone ID: PAT_MRT3847_35928C.1.pep
MKMKALVSFVATIXVAWECHAYDMLPMTMNTGYGARTPEVRCASWRLAAEAHNIFGFETIAEQCVDGTQEYIHGEQYRSDSQTANQQAYFYVRDLESHPKDTF

SEQ ID NO: 214731 - protein, 48 aa, Glycine max
  unsure (1)..(48): unsure at all Xaa locations
  Clone ID: PAT_MRT3847_35929C.1.pep
XSPNATLKXLXGSXTSVHXPKKTNVLVXFGMLFXLLVEDAEILNXXLL

SEQ ID NO: 214732 - protein, 76 aa, Glycine max
  Clone ID: PAT_MRT3847_3592C.1.pep
YELPDDARPYCATEYLDGGVLSLSVWYLSSAEMVLDAVNNRDMVCFYHGPVTRSTYAWHRICCRFCGPFCRLLAAV

SEQ ID NO: 214733 - protein, 58 aa, Glycine max
  Clone ID: PAT_MRT3847_35930C.1.pep
FVLLEEIPALPSPELITCFYYVVVVVFTASFLWILLIIFLPFPKVFWLFLYHGWYSWG

SEQ ID NO: 214734 - protein, 76 aa, Glycine max
  unsure (1)..(76): unsure at all Xaa locations
  Clone ID: PAT_MRT3847_35931C.1.pep
MGKDKVHISIVVIGHVDSGKSTTTGQLIYKLXGIDXKXXIEXFXKETXPEMNXXSFKYAWGXWISLRAERXXXXPN

SEQ ID NO: 214735 - protein, 89 aa, Glycine max
  unsure (1)..(89): unsure at all Xaa locations
  Clone ID: PAT_MRT3847_35932C.1.pep
LTVRIDGHISHAHDVSNXPAAYDSSDVHKQKCTAEGLNTHDLVTLDGAHTTVTTGGAGFNDMMHNFNANGXDPASYTLCLKKLQSLCPQ

SEQ ID NO: 214736 - protein, 60 aa, Glycine max
  Clone ID: PAT_MRT3847_35933C.1.pep
LFQTLHFDSVNENPDERQMTGQNFSILYISFTCWDYSYAHCPRHRRLLMPRCLVLYAGPK

SEQ ID NO: 214737 - protein, 48 aa, Glycine max
  Clone ID: PAT_MRT3847_35934C.1.pep
APWPMGVTRGFFNWPDGDRCQNSKVRTPALPFYVPKVEKNCFKEDNLA

SEQ ID NO: 214738 - protein, 327 aa, Glycine max
  Clone ID: PAT_MRT3847_35935C.1.pep
GPLESIETSDCANFKCPPFYYAYGDGSLIARLYRDTLSLSSLFLRNFTFGCAHTTLAEPTGVAGFGRGLLSLPAQLATLSPQLGNRFSYCLVSHSFDSERVRKPSPLILGRYEEKEKEKIGGGVAEFVYTSMLENPKHPYFYTVSLIGIAVGKRTIPAPEMLRRVNNRGDGGVVVDSGTTFTMLPAGFYNSVVDEFDRRVGRDNKRARKIEEKTGLAPCYYLNSVADVPALTLRFAGGKNSSVVLPRKNYFYEFSDGSDGANGNGKVGCLMLMNGGDEADLSGGPGATLGNYQQQGFEVEYDLEEKRVGFARRQCALLWERLNRDKN

SEQ ID NO: 214739 - protein, 47 aa, Glycine max
  Clone ID: PAT_MRT3847_35936C.1.pep
ERCGDFRIGRAISTRGSCLVSFILLNERTGGRVYKFQVMQRVPHFQM

SEQ ID NO: 214740 - protein, 63 aa, Glycine max
  Clone ID: PAT_MRT3847_35937C.1.pep
RNYHSNVQVQKTISECDKIGPSRFPLRDSPLSSQLKKSSKSWANKHIRMFTIYSCKQTKTGRD

SEQ ID NO: 214741 - protein, 69 aa, Glycine max
  Clone ID: PAT_MRT3847_35938C.1.pep
LIVTRNSWTSLCNDVCIILVQGFMCIKGGICLSSMGRPVSYERAVAWKVLNEEESAHCICFMFINWSFV

SEQ ID NO: 214742 - protein, 175 aa, Glycine max
  Clone ID: PAT_MRT3847_35939C.1.pep
AYKKQQQMPRGSVMTRLVLTMVWRNLIRNPNTYACVLGLAWSLISFRWNIKMPSIAKGSILILSKTGTGMAMFSLGLFMALQPKTIACGKTWTTISMVARFVVGPAVIAVTSIVIGIRGVLLRVAIVQAALPQAVLSFVFAKEYNLHADIISTAVIFGTVISLPITIIYFVLLGL

SEQ ID NO: 214743 - protein, 89 aa, Glycine max
  Clone ID: PAT_MRT3847_3593C.1.pep
SQIIFLPFFTVFSCKTIHINLDSPHLVFGNASKFRLLLRFWYMECSKNSLKRPMITLKEQFGCKRERESNKPRSKEVMHENNKFDQEND

SEQ ID NO: 214744 - protein, 48 aa, Glycine max
  Clone ID: PAT_MRT3847_35940C.1.pep
DAAGIIIRLFQYFNHDGHRKLIFSSWKGLHGVIKKSGQNRQCTRPSQK

SEQ ID NO: 214745 - protein, 94 aa, Glycine max
  unsure (1)..(94): unsure at all Xaa locations
  Clone ID: PAT_MRT3847_35941C.1.pep
MESPHAKKSGGLKLPAGMSGTSLRLDTAPASSSFRSSISTLNSASSLRSICILTSPSKSNSAXSDRFIPCRSSSRLHTFQARWTGRLPVEGSGV

SEQ ID NO: 214746 - protein, 24 aa, Glycine max
  Clone ID: PAT_MRT3847_35942C.1.pep
PIVLLKKLSKLICQPVFYVIKLIN

SEQ ID NO: 214747 - protein, 58 aa, Glycine max
  Clone ID: PAT_MRT3847_35943C.1.pep
NLGTVIFCCPISLGVFIQNPAFCFPISWSLVLYENRDLWYVILVSPFCPLKKSHVKIK

SEQ ID NO: 214748 - protein, 78 aa, Glycine max
  Clone ID: PAT_MRT3847_35944C.1.pep
PGLHPLDAFSLQSSECWGVPMYRAFFQKFFEEEYFPGGQIPPRENFFLLFAHVCLAPTEKFKNTCHHHLTINKNKENT

SEQ ID NO: 214749 - protein, 224 aa, Glycine max
  Clone ID: PAT_MRT3847_35945C.1.pep
LSCHRNCTGNGMCLSSGICECKSGYTGIDCSTAVCDEQCSLHGGVCDNGVCEFRCSDYAGYTCHNSSMLFSSLSVCKNVLGNDISGQHCAPSESSILQQLEEVVVMPNYHRLFPGGARKLFNIFGSSYCDEAAKRLACWISIQKCEKDGDNRLRVCHSACQAYNLACGASLDCGDQTLFSSEGGDEGLCTGSGEMKLSWFNRLRNSFSLRNSFSKGISVRYRQF

SEQ ID NO: 214750 - protein, 59 aa, Glycine max
  Clone ID: PAT_MRT3847_35946C.1.pep
LLFSYSFFTIIPFVYIYGSDSARKMKNDFSLWSSQLDSCSRNHFKIGRILTIPSAPHSH

SEQ ID NO: 214751 - protein, 249 aa, Glycine max
  Clone ID: PAT_MRT3847_35947C.1.pep
TSAKAPSTPGGQFDINGSSSSKRNSAPVSVNGKVDVCRNQPSAVNGHVKDSASLENGKEDSSLPTRNGIDENKVSVDKLKRKESTVSNGHTGNQTVDIHSVKSDLNEDTDRSRIIAGRVPDNFKHESNVLNNKPTILGNKRKLQGDPCILLAHDGQSQARVQELKDILGKEAKSVLRSIGWTDKVYEFMRSKKLRAQEAGNLTNGDEIRKLLIGDAQGAFISKIPESLKQDMIQRLQSFSQEKIQFSGP

SEQ ID NO: 214752 - protein, 126 aa, Glycine max
  Clone ID: PAT_MRT3847_35948C.1.pep
HNHHSDSPLSSESSMIIEGMSRACRYSPEEKKVRIERYRSKRSQRNFNKKIKYACRKTLADSRPRIRGRFARNDEIDKNTTIQWSQIGAGEDEDEEDENWITMLDSIVAANFAQESQGSSSFGLFY

SEQ ID NO: 214753 - protein, 32 aa, Glycine max
  Clone ID: PAT_MRT3847_35949C.1.pep
HDGAASVFSSGLSQKTWPEGLITRCRHTHSSP

SEQ ID NO: 214754 - protein, 68 aa, Glycine max
  Clone ID: PAT_MRT3847_3594C.1.pep
KTGRRTRTTRFRTVSKRLQNGMMTRMRSRINMGVRCPFKRRSSDFLQLDGSIFITNIYTYVIISYLRY

SEQ ID NO: 214755 - protein, 214 aa, Glycine max
  Clone ID: PAT_MRT3847_35950C.1.pep
MASNGNGSVANGNGTARNGLAKIQTHKKHNGICHDDSGPTVKAQTIDELHSLQKKKSAPTTPVTGFQAPFATLTEEERHKQQLQSISASLASLTRETGPNLVKGDPARKSDTQKVTHVHHHHVSTPTIAVSDSALKFTHVLYNLSPAELYEQAIKYEKGSFISSTGALATLSGAKTGRSPRDKRVVKDDLTKNDLWWGKGSPNIEMDEHSFMVN

SEQ ID NO: 214756 - protein, 54 aa, Glycine max
  Clone ID: PAT_MRT3847_35951C.1.pep
GSNKKTWGRRILTEAKVTKDRPKGEVNLGEPVYQAMLVTINVVLLCRTNCQFIG

SEQ ID NO: 214757 - protein, 68 aa, Glycine max
  Clone ID: PAT_MRT3847_35952C.1.pep
MFVDGKEIKVVSDRNPANLPWKDLEIDLVIERTRVFRNKESAWKHIQSRAKKVLITTPGERYMPTYVV

SEQ ID NO: 214758 - protein, 40 aa, Glycine max
  Clone ID: PAT_MRT3847_35953C.1.pep
PTRPHTPPAPPYTRLSTFPTTTPTRALLAFSNPSDDHTTT

SEQ ID NO: 214759 - protein, 45 aa, Glycine max
  Clone ID: PAT_MRT3847_35954C.1.pep
CPEAYNACPKGTGYLKLCELESCPSATDFPVQCMRGCSHRFPANN

SEQ ID NO: 214760 - protein, 59 aa, Glycine max
  Clone ID: PAT_MRT3847_35955C.1.pep
IMVHKADCVYDIICYYVWHCLNFHSQRLIRVILVLYSHSKRGCISRWRDMPWSLDLLQS

SEQ ID NO: 214761 - protein, 55 aa, Glycine max
  Clone ID: PAT_MRT3847_35956C.1.pep
CVQEEFKIRKESDLYHVIHKVPYGDSPYVKAKHAQLVDKDPEAAIVLFWKAINCG

SEQ ID NO: 214762 - protein, 75 aa, Glycine max
  unsure (1)..(75): unsure at all Xaa locations
  Clone ID: PAT_MRT3847_35957C.1.pep
FSFWWANYNQRQLFPLVFVHQYIMICVFFMSKKCFXLRFXVTKLXXPFLGMXTXSXDXXVPRKXEXKVQXXVCXP

SEQ ID NO: 214763 - protein, 61 aa, Glycine max
  Clone ID: PAT_MRT3847_35958C.1.pep
HHKQFNIKKIHSSALKTYNNAPCLNSSILLDPLFGPRNPPSTPRTPPPRCPSIQQFPWGQT

SEQ ID NO: 214764 - protein, 62 aa, Glycine max
  unsure (1)..(62): unsure at all Xaa locations
  Clone ID: PAT_MRT3847_35959C.1.pep
MRTPMMPLDEDLLTNXRQDFGDEWFDCVDEEDTSDEASLNAALTEDVDYYYIERIPLATSDG

SEQ ID NO: 214765 - protein, 70 aa, Glycine max
  Clone ID: PAT_MRT3847_3595C.1.pep
SRSPMDPVRSVATVSELLAFSVRVPGGKLHDGVLHLARSLEHARCFGADVPYHYLVQWHPRVLFPCGRYS

SEQ ID NO: 214766 - protein, 94 aa, Glycine max
  Clone ID: PAT_MRT3847_35960C.1.pep
FKGLPVVMFSAEGIATPADAALNIKLGMNGVFVGSGIFKSENPEKFAGTVVLATTHYQDPVKLPKISWGLGEGIKGESRLGAKAGKVMTPDRGY

SEQ ID NO: 214767 - protein, 66 aa, Glycine max
  Clone ID: PAT_MRT3847_35961C.1.pep
SPQKEFGALAKGSGSKRYPVMSVLSTRTSGVSQKGLSSLEWSHKVHQGLALETMHVGPRTRAFPGK

SEQ ID NO: 214768 - protein, 107 aa, Glycine max
  Clone ID: PAT_MRT3847_35962C.1.pep
VPPPFPLYFSDCNFFGIFNGKPFSPGNHHSPYFPQLLKGPPLGKLGPPPGAVPNFPGAPRGREKTGSLPRGFFLFPFFPPFIFLGDFLLPTFFFWGPFPPLFRGETG

SEQ ID NO: 214769 - protein, 115 aa, Glycine max
  Clone ID: PAT_MRT3847_35963C.1.pep
DILDHAPEVYSIDAPHKTLVSEHHRRFNLVQQRPRDAHYRQRAQASRRFVIFGPYDAHQAGMNARSQANGLQFRHSSVCLRSSELCQSTNTLSVSDSLSGVIGSGHQLVRDRYVD

SEQ ID NO: 214770 - protein, 149 aa, Glycine max
  unsure (1)..(149): unsure at all Xaa locations
  Clone ID: PAT_MRT3847_35964C.1.pep
FHCRWAMFAVNXVLTXQCICLWVAAREWEVVRGGHDPSIGYSFTWGSLPSFRDIDYRDICCVFFQRHVEKPPEKKIYCGGACYFLIFSRDSNTFCVYSAIDFKSDTLAVGVCEILCVTQASYPGSAFVEIWCALLCDPWHHNFENFFIP

SEQ ID NO: 214771 - protein, 48 aa, Glycine max
  Clone ID: PAT_MRT3847_35965C.1.pep
KVYALLPQCFASDNYYGNLKVLECFVTDFKWEAQYWLAGILDWSSNPP

SEQ ID NO: 214772 - protein, 500 aa, Glycine max
  unsure (1)..(500): unsure at all Xaa locations
  Clone ID: PAT_MRT3847_35966C.1.pep
MSPSSEHHGGNHRFPGEEINGFGNGQAEMSAPSTASSSAVRCIVDSIPSKEREKLRRILVASAKGFSIGAGLKGGLALFAILARLTRKKPPRKGIVVSNGEAIVAALKETLRYGLFLGTFAGTFVSTDEVIGALAGHRRXSKVEGSGCRGGCRVVHASNGVRRSAYEFGHLHSHACSCFGVXCGIKSKRFGKICKPLTWKHGDIFLMCLSSSQILSAYILKQDSLPASYKSFLNKHGGKDLVILQGXKDIASGKPFTNLGAIEKYYKTMGVNVKLDPNMKVPCSIVHGNQSCSGHILSFLVQAYQRALPVYLPVYLIPPPFLLRAGLXARPAYVPVYLIPALIVHRKGLLKRPYTILAKGLFGTARSSLFLSVYCASAWMWTCFLFRILKRCNIPMVAMGTFPTGLALAIEKKSRRIEISLYCLARAIESFFTCIADAGYLPQSRRIKRADVVVFSLSTAIIMHCYAEEREVFRSKYLNVLDWVFGVPPPPCETPRCKDG

SEQ ID NO: 214773 - protein, 47 aa, Glycine max
  Clone ID: PAT_MRT3847_35967C.1.pep
LMFAASPNWMRKAMKSAIATPDNVLRAVGIGSAVVGLILIWVMRRPI

SEQ ID NO: 214774 - protein, 46 aa, Glycine max
  Clone ID: PAT_MRT3847_35968C.1.pep
ARVIADEEFFYDASVKRVASESYEQVTLMVSVEDTGIGIPFSAQDR

SEQ ID NO: 214775 - protein, 55 aa, Glycine max
  Clone ID: PAT_MRT3847_35969C.1.pep
TITRVRWWSFETALCQHGMPLSFYPQQASHFFQEKGLQEADKLELAHLPANTNLS

SEQ ID NO: 214776 - protein, 55 aa, Glycine max
  Clone ID: PAT_MRT3847_3596C.1.pep
PTRSKNKKKKKKKKKKKKKKKKKKKKKKKKKKKKKKKKKKKKKKKKKKKKRGRPF

SEQ ID NO: 214777 - protein, 218 aa, Glycine max
  unsure (1)..(218): unsure at all Xaa locations
  Clone ID: PAT_MRT3847_35970C.1.pep
MKYVLVTGGVVSGLGKGVTASSIGLILKACGLRGTSIKIDPYLTLARGSKTHMGXTMRLGSRRTYFEVADCKSAKLYGNVSFVDERHRHRYEVNPDMISPLENAGLSFVGKDETGRRMEIVELPSHPFFIGVQFHPEFKSRPGKPSPLFSGLIAAASESRRTIMVPSNGHAKLTNGNGMCNGHSPKLKAHQKGNGFNSSNGSLNGIYTNNGVYVDGSC

SEQ ID NO: 214778 - protein, 101 aa, Glycine max
  Clone ID: PAT_MRT3847_35971C.1.pep
MLGLSRFRSHLLCALTKVEFLACCSQRFKHSSDWLLDIMATGDLDAFLPAATREYATMVDEIWRDPAVHGTCKRRKELHGLPDVAKYFSDRAIEISSDECE

SEQ ID NO: 214779 - protein, 391 aa, Glycine max
  Clone ID: PAT_MRT3847_35972C.1.pep
STMPIPVVSASKPAQTSRLPMAPLQFEGTLGWKGSAATSAFRPAYPRNNSDNEENRQDCLDFDLNVAEGEEGLLKQIGESSGLPSGQSSVELSPKRSSRFKLDLNSIGDDGDAQPSDQRMEGPLFPRRNGYWSPSPASSSSSMQPLVRNIDLNDRPFFQTDLVDQGLSKSSSIIEAYKQSKSDAPVISILGAKVEVGTREYIPQTLSFPNGKAIEPAMDLPLSGAGSVLGMGPTLSYNHSTAFGYNGLTSVPALSFSPAMYGSPGGPIPYMVDSRGSPVVPQVGGSSSTALSSYSQPPFIVSITGTQLGLNGVGSSRPNFDLNSGFPIDGGNRDMLTARQFFFPAQGRAMEDHVRTLPQSSSFGVSVKRKEPDGGWDTYPFSYKHQQPPWK

SEQ ID NO: 214780 - protein, 36 aa, Glycine max
  Clone ID: PAT_MRT3847_35973C.1.pep
LGHFEPELKSASNTSDQLKKQLFHLIFFFTYHVCDD

SEQ ID NO: 214781 - protein, 57 aa, Glycine max
  unsure (1)..(57): unsure at all Xaa locations
  Clone ID: PAT_MRT3847_35974C.1.pep
XSLRRTRSIIRFQDRRCSLGRGRPFFFFFSFFNIVVTINTPGGWVTVQLHWNLLISI

SEQ ID NO: 214782 - protein, 174 aa, Glycine max
  Clone ID: PAT_MRT3847_35975C.1.pep
MTTIRRFCCNDLLRFAAVNLDHLTETFNMSFYMTYLARWPDYFHVAEGPGNRIMGYIMGKVEGQGESWHGHVTAVTVAPEYRRQQLAKKLMNLLEDISDNIDKAFFVDLFVRASNAPAIKMYEKLGYVIYRRVLRYYSGEEDGLDMRKALSRDVEKKSIIPLKRPVTPDELEYD

SEQ ID NO: 214783 - protein, 98 aa, Glycine max
  unsure (1)..(98): unsure at all Xaa locations
  Clone ID: PAT_MRT3847_35976C.1.pep
PMMLYNKKKVSRKQFRIGSKAMXXHFGIXXVHRGFRESFRQRQSDHDFFIMECSSEFVNGYQASANLEGTNHSQIYVFWGFFPRLETWGDAVTESFTI

SEQ ID NO: 214784 - protein, 58 aa, Glycine max
  Clone ID: PAT_MRT3847_35977C.1.pep
MTTIRRFCCNDLLRFAAVNLDHLTETFNMSFYMTYLARWPDYFHVAEGPGNRIMGYSE

SEQ ID NO: 214785 - protein, 67 aa, Glycine max
  Clone ID: PAT_MRT3847_35978C.1.pep
FLVGLQKVMKGDWRGIFKNYVKTRTSSHVASHAHKYFLSLSILIRCRPKSILFDITTDTVFVFPMDE

SEQ ID NO: 214786 - protein, 532 aa, Glycine max
  Clone ID: PAT_MRT3847_35979C.1.pep
MSISSTSNSLIPPKSLIPQSHPLIPNTRPGLRPKPGPSPSILAVHAAEPAKNPVVTDKPKPQAQQSPSPAAARATKWAVDSWKSKKALQLPEYPSQEELESVLKTLEAFPPIVFAGEARTLEEHLAEAAMGNAFLLQGGDCAESFKEFNANNIRDTFRIILQMSVVMMFGGQMPVIKVGRMAGQFAKPRSDSFEEKNGVKLPSYRGDNINGDSFDEKSRIPDPQRMIRAYCQAAATLNLLRAFATGGYAAMQRVTQWNLDFTDHSEQGDRYRELANRVDEALGFMAAAGLTVDHPIMRTTEFWTSHECLLLPYEQSLTRLDSTSGLYYDCSAHMLWVGERTRQLDGAHVEFLRGVANPLGIKVSDKMDPNELVRLIEILNPQNKPGRITVITRMGAENMRVKLPHLIRAVRRAGQIVTWVSDPMHGNTIKAPCGLKTRPFDFIRAEVRAFFDVHEQEGSHPGGVHLEMTGQNVTECIGGSRTVTFDDLSSRYHTHCDPRLNASQSLELAFIIAERLRKSRIRSQQPLAPLGV

SEQ ID NO: 214787 - protein, 67 aa, Glycine max
  unsure (1)..(67): unsure at all Xaa locations
  Clone ID: PAT_MRT3847_3597C.1.pep
YERKLSGSNYKVLDLSPILNVWDSSVCMVYKFLGFSITTTIFCGVVXSRPPPQTFYLWGQTLSHCMK

SEQ ID NO: 214788 - protein, 126 aa, Glycine max
  Clone ID: PAT_MRT3847_35980C.1.pep
AASGVLAGSPGVARPEVGPHSPQDGQSPQGCAMLRVTPVVQVGRQEGRKSPGSKTFIQTGVLRTQLTEPLCGLGTTQKSVKSAQPECSFTRPGEPSHQRTRGSCHLGLAEESRAGSRSLSRMLSSD

SEQ ID NO: 214789 - protein, 45 aa, Glycine max
  Clone ID: PAT_MRT3847_35981C.1.pep
WRFVKSKTQDTTKKSYLYYKKFPAVCGPKRSVKSPLIYPELNPTR

SEQ ID NO: 214790 - protein, 95 aa, Glycine max
  Clone ID: PAT_MRT3847_35982C.1.pep
GIMGICISVAEGVNDDNVTIFQARKVPNESQRLCSVYSQQGSKGLNQDAASVHEVCLTVSLLAHEIIHNIFFVIVFIFHLFFISWHLGISQVLAK

SEQ ID NO: 214791 - protein, 108 aa, Glycine max
  Clone ID: PAT_MRT3847_35983C.1.pep
GFPLFAWVPQVSGPKGVRVRYAPVFGGRFFWFPQALGSPGLPLFVWALCAVRLFFLRSLFSRDWLCPYCRPLLVCLGLWAVRVLTSPGAMSAGCPTRNSAQFKETTLP

SEQ ID NO: 214792 - protein, 71 aa, Glycine max
  Clone ID: PAT_MRT3847_35984C.1.pep
ILAMSRGSRLSPDSFSTKTHAPETRRLPGGAWAEGDPQAAPGGRGFVAHTEVQTRCQVVLGDEMGWARLCK

SEQ ID NO: 214793 - protein, 55 aa, Glycine max
  Clone ID: PAT_MRT3847_35985C.1.pep
KIAPVLVSKLGKKPFQLFPQALLIFWTGQPPGYLNRAWGLLSRIPMTTIFLRSTH

SEQ ID NO: 214794 - protein, 90 aa, Glycine max
  Clone ID: PAT_MRT3847_35986C.1.pep
LSTGRFPVDGRRHSFTRPVVAQINSIAWDTYTPLAHWPASHGHWQSSSRADGLILKHLLEGYYSLLTDLTGLEGGRWKINFYHPKGNPCG

SEQ ID NO: 214795 - protein, 340 aa, Glycine max
  Clone ID: PAT_MRT3847_35987C.1.pep
MAIGFQFILTLFSLFSVPSLTFAFAPILPRFPSSAVSAELKQRSHSSQNGLYRTKFFTQILDHFNFNPQSNHTFQQRYLINDTFWGGAKNNAPIFVYTGNEGNIEWFTQNTGFMFENAPSFQALLVFIEHRFYGKSIPFGGNKTVAYANTSTLGYLSSTQALADYATLIIDLKKNLSATDSPVVVFGGSYGGMLAAWFRMKYPHVAIGALASSAPILHFMGLVSPDIFNNIITQDFRSEISECCKGSMRIHSPIAASPGYPGGMELLRQTFRICKSRECGPGPWDGWLRPAGSRSALSARPTPSAGLNPLPAHPLKKVPITRVLNFYFIFNDKKYIIIWI

SEQ ID NO: 214796 - protein, 239 aa, Glycine max
  Clone ID: PAT_MRT3847_35988C.1.pep
PRVRRRCSYMIANALDKDGKFTTAQVSRKLKQLGLSLPLKSSGGKMHPKGADLMDRSNERMDESDDETLVSLVKRKKMESDKLSRGQLHGQTSEDKLSKDDSDDEMLSSVLKKKINSKVSTEQLLEPINVDSSSRDDSDDEMLSSALKRTRRPSLKSKQVELENIQIHERIMGDDSFNGGITKVSEGKYRVDSMNPSQEEYQQMDVLAVLEDQVAVSAVPANARSKRNLRMVFDPEANA

SEQ ID NO: 214797 - protein, 71 aa, Glycine max
  Clone ID: PAT_MRT3847_35989C.1.pep
ITPNKNFIMNLHSSSHFKKNVNQLFQEPIQTITSTGIGTTNSYANKSNPKIKKLNLEDDLKGTCLTHARIS

SEQ ID NO: 214798 - protein, 67 aa, Glycine max
  Clone ID: PAT_MRT3847_3598C.1.pep
KNHEPTKPCKGCISLGFRQVQANFRKLQTASFRGGPPSPKGIPLLLEEPRGMITGHIELNLPDLARF

SEQ ID NO: 214799 - protein, 163 aa, Glycine max
  Clone ID: PAT_MRT3847_35990C.1.pep
PVDDASNVRLRETTEGGKLDENVIKAVKKLKLWSKKKRKKKTHGHEHPPHYCCSCYCSSSIQPSAPPLPSSSCLDFEYSNYGTFLPTPEPEPEPEPQPQEIASLNSSYQQYMVSVSEPVYGIPVPVIHASRTERSAGQFGCLFSFGSYLFRCLFPCFYIRQVV

SEQ ID NO: 214800 - protein, 63 aa, Glycine max
  Clone ID: PAT_MRT3847_35991C.1.pep
MYHISVCPFSHSGCITLDTLSASRPCCLHIVCKCVSANVVSLALYRQGASSHIVVTLAPDDSI

SEQ ID NO: 214801 - protein, 125 aa, Glycine max
  Clone ID: PAT_MRT3847_35992C.1.pep
AEVQKLEADRFQLATEIATTGDSSLFLPVNLKRLIWNAQKTFKVDFRRPSDMHPMEIVEAIDKLQERLKVVPGEDLLSQEAQKNATLLFNILLRSTFASKRVLEEYRLSREAFEWVVGEIESRFL

SEQ ID NO: 214802 - protein, 100 aa, Glycine max
  unsure (1)..(100): unsure at all Xaa locations
  Clone ID: PAT_MRT3847_35993C.1.pep
PFRGRWGAPGFPPGSPVVWPRVGGHWAWSGGMVGGFWMVFGFFAPLPPLFVPLPAWFNAFVGGLFFFQVAVCFFRVDPFCRSWPPLLXVGLVKSEKRVKT

SEQ ID NO: 214803 - protein, 225 aa, Glycine max
  unsure (1)..(225): unsure at all Xaa locations
  Clone ID: PAT_MRT3847_35994C.1.pep
SEFGSRDASRDKLEKLAFKDQASSFWRLAKMNSPEWLYALIGSVGSVVCGSXLSAFFAYVLSAVLSVYYNPNHRHMIQEIEKYCYLLIGLSSAALLFNTLQHSFWDIVGENLTKRVREKMLTAVLKNEMAWFDQEENESARIAARLSLDANNVRSAIGDRISVIVQNTALMLVACTAGFVLQWRLALVLVAVFPVVVAATVLQKMFMTGFSGDLXAAHAKATQLA

SEQ ID NO: 214804 - protein, 236 aa, Glycine max
  Clone ID: PAT_MRT3847_35995C.1.pep
MSGDLAYKSILQSSALMKYIFETSAYPKEHEQLKLLRETTVQKCQENSEYIMNVPVDEAQFVSILLKIMNAKKTLEIGVFTGYSLLATALALPHDGKITAIDVNRKTYEIGLPFIQKAGMEHKIDFILGDALSVLNDLINDKHEDSFDYVFVDADKAEYIKYHELVLKLVKKGGIIAYDNTLYFGTVAMPEEDVKWDILRQNRKPLIEFNNFIANDSRLESAIVSIGDGVTLCRRL

SEQ ID NO: 214805 - protein, 481 aa, Glycine max
  unsure (1)..(481): unsure at all Xaa locations
  Clone ID: PAT_MRT3847_35996C.1.pep
MEDLEAKISDSKPDDSSPLKLYLLPFLAPGHMIPQINLAQVFAFRGHHVTILTTPSNAKLIPKHLNVHILNFPSEEVGLPSGLENISLAKDNNTAYKIWKASKLLKPEIENFLNHNPPHALIIDIMYTWRSTLNNSIPTLAYSPMPVFALCVSEAINRHPPALASDSSLPYVVPGGLPHSVTLNFNPSSTXLCNMARTLLHAKENNKHGVIVNTFPELEDGYTQYYEKLTRVKVWHLGMLSLMVDYFDKRGKPQEDQVDDECLKWLNTKESNSVVYICFGSLARLNKEQNFEIARGIEASGHKFLWVLPKNTKDDDVKEEELLLPHGFEERMREKKRGMVVRGWVPQGLILKHDAIGGFLTHCGANSVVEAICEGVPLITMPRFGDHFLCEKQATEVLGLGVELGVSEWSMSPYDARKEVVGWERIENAVRKVMKDEGGLLNKRVKEMKEKAHEVVQEGGNSYDNVTTLVQSLRRMMNVHG

SEQ ID NO: 214806 - protein, 53 aa, Glycine max
  Clone ID: PAT_MRT3847_35997C.1.pep
SLQTMAQKVFLQVSKECRHSFSLSMKFAWKLVTTNLNLEKVSFQPFLSAATWV

SEQ ID NO: 214807 - protein, 141 aa, Glycine max
  unsure (1)..(141): unsure at all Xaa locations
  Clone ID: PAT_MRT3847_35998C.1.pep
GREEHDIKSXTGLLFSALVRGRFFWSSKKQDXEAEYVATTTAVNQAIWLRRILANLHMEQKEPTQILVDNQTTISISNNHVFHGRTKHFKIKLFFLRETQREGEVKLIYCRSEDQSADILTKVFPKVRFEVLRNKLGVCNH

SEQ ID NO: 214808 - protein, 51 aa, Glycine max
  Clone ID: PAT_MRT3847_35999C.1.pep
EKIYLRGKIRKRLLFCYFCFLILPNMTRSFLISFFLIYILNALHFFLIFHF

SEQ ID NO: 214809 - protein, 548 aa, Glycine max
  unsure (1)..(548): unsure at all Xaa locations
  Clone ID: PAT_MRT3847_3599C.1.pep
NRLTGALSHTIGSLVELTKLNLGNNQLSGRIPSEILSCSKLQLLDLGSNSFNGEIPNEVGLIPSLAISLNLSCNQFSGKIPPQLSSLTKLGVLDLSHNKLSGNLDALSDLENLVSLNVSFNGLSGELPNTLFFHNLPLSDLAENQGLYIAGGVVTPGDKGHARSAMKFIMSILLSTSAVLVLLTIYVLVRTHMASKVLMENETWEMTLYQKLDFSIDDIVMNLTSANVIGTGSSGVVYKVTIPNGETLAVKKMWLSEESGAFNSEIQTLGSIRHKNIIRLLGWGSNKSLKLLFYDYLPNGSLSSLLHGSGKGKAEWETRYDAILGVAHALAYLHHDCLPAIIHGDVKAMNVLLGPGHQPYLADFGLARTATENGCNTDSKPLQRHYLAGSYGYMAPEHASLQPXTEKSDVYSFGMVLLEVLTGRHPLDPTLPGGAHLVQWVRNHLSSKGDPSDILDTKLRGRADPTMHEMLQTLAVSFLCVSNKADERPTMKDVVAMLKEIRPLETSRADPDVLKGGLTAHSSPPPPKNVVSHGSSTCSYNFSDNSIN

SEQ ID NO: 214810 - protein, 239 aa, Glycine max
  Clone ID: PAT_MRT3847_359C.1.pep
MDYLDHDHDHDPFHDHDDFNRRILIMAIVSLSVVLVLVFALHLYARVFLRRQTRRRAAIYQLSLNVAQAHAEPHNNTGLNPALITTLPSFPFKQNQHHDSAECAVCLSVLEDGEHVRLLPNCKHSFHVSCIDTWLSSHSTCPVCRTKAGPVQLEPVRLEPQPREGPTGLVLADVVAPTAPLLFENVEGTSDGANNNGSPKVSGSNSRLSSFRRILSRERSMRRILPSSHDDVEHDLERQ

SEQ ID NO: 214811 - protein, 241 aa, Glycine max
  Clone ID: PAT_MRT3847_35C.1.pep
SGIPASTHASASFYVQKPVSLLEENILQLSNDIFEEIGVLSTKVVILSLDPLPQSNTTKVVFAVDPDSKYSEMSAAAISLIRASFKYLVIRQSYLQLSTSLFGVPSVFEVLKFKGGITIIPQQSVFPLQMVQTLFNFTLNFSIYEIQSNFDELTSQLKSGLHLAPYENLYVILSNSEGSTVTAPTVVQSSVLLAVGIPPSKERLKQLAQTIMGHHSWNLGVNNTQFGRGKQVRLSSILQHS

SEQ ID NO: 214812 - protein, 93 aa, Glycine max
  Clone ID: PAT_MRT3847_36000C.1.pep
MSNPQTNNNRHQPSRLQRRAPSSLQINRAVEWNVAIPLLSPLASSPPPMELKPPQEPPQREAEKVTVSFKKWQHPAAPFCYEPAPMVPPFVPV

SEQ ID NO: 214813 - protein, 70 aa, Glycine max
  Clone ID: PAT_MRT3847_36001C.1.pep
AHLPGPTGIGSRPGINRPTLYSTTSHLMEAGRTVHVSLMHHDSTRSSSITRTLVGTVGSIGGGGRVLVTR

SEQ ID NO: 214814 - protein, 78 aa, Glycine max
  unsure (1)..(78): unsure at all Xaa locations
  Clone ID: PAT_MRT3847_36002C.1.pep
RXLLQXXLIXXVPKCXLAGXXLRXXEXXRSAALXKKXXAMFXQCRSPIXRRXXWPLFXXLRYSQRXVYPVXPGXXAXS

SEQ ID NO: 214815 - protein, 40 aa, Glycine max
  Clone ID: PAT_MRT3847_36003C.1.pep
QISAKHRESVGKRAQSVTRISQFFFCIDWIGLDDMDFEIV

SEQ ID NO: 214816 - protein, 315 aa, Glycine max
  unsure (1)..(315): unsure at all Xaa locations
  Clone ID: PAT_MRT3847_36004C.1.pep
MLHALMSLIARCWKPFGHGDDAGNAAAGRECKDGLLWFRDIGKFAAGDFSMAVVQANQVIEDQSQIESGAFGTFVGVYDGHGGPDCSRYVCDNLFRNLQAILAESQSVVTSEAIHQAFRRTEEGFTALVSELWSSRPQIATTGTCCLVGVICRQTLFVASLGDSRAVLGRRVGNTGGMAAIQLSTEHNANFEAVRQELKELHPNDPQIVVLKHGVWRVKGIIQXGLWEHLSNEKAVDIVNSNPHAGSAKRLIKAALHEAARKREMRYSDLRKIDKKVRRHFHDDISVIVLFLNHDLISRGTVLDPALSIRSALDH

SEQ ID NO: 214817 - protein, 94 aa, Glycine max
  Clone ID: PAT_MRT3847_36005C.1.pep
PRPEARIALRGHTSLPTRERTSPFLFLHHRTHTRPWLPSSPRANLHPPSYPAHPFFIQFFPQIRSTARATIGKRGSGAGGLGLGFLRDVGCSMH

SEQ ID NO: 214818 - protein, 376 aa, Glycine max
  unsure (1)..(376): unsure at all Xaa locations
  Clone ID: PAT_MRT3847_36006C.1.pep
MLQALMNLFSLCWKPFGRDADHMESXSIGVIGREGKDGLLWFRDFGKYGSGDFSMAXVVQANQVLEDQSQIESGPLGTFVGIYDGHGGPDASRYVCDHLFRHFQAISAESRGXVTTETMXNRRNSSQGYMSGSWNARPHIASAGTCCLVGVIELIFQQTLFVANAGDSRVVLGKKVGNTGGMAAIQLSTEHNANLEAVRQELKELHPHDPQIVVLKHGVWRVKGIIQVSRSIGDVYLKHAQFNREPLNAKFRLPEPMNMPILSANPTILSHPLQPNDSFLIFASDGLWEHLSNEKAVDIVNSNPHAGSAKRLIKAALHEAARKREMRYSDLRKIDKKVRRHFHDDISVIVLFLNHDLISRGTVLDPTLSIRSALDH

SEQ ID NO: 214819 - protein, 267 aa, Glycine max
  unsure (1)..(267): unsure at all Xaa locations
  Clone ID: PAT_MRT3847_36007C.1.pep
TLSDENVQIGDTTCPWVAKVWNSVEKHMHGDYTSVIHGKYAHDETXATASFAGKYIIVKNMKQTEYVCDYILGGELNGSSSTKEAFLEKFKFAVSEGFDPDRDLIKAGIANQTTMLKGETEDIGKLLERTMMHKYGVENINEHFMSFNTICDATQERQDAMYKLVEEDLDLMLVVGGWNSSNTSHLQEIAEERGIPSYWIDSEQRIGPGNKIAYKLNHGELVEKENWLPEGPITIGVTSGASTPDKVVEDALIRVFDLKREEAMQLA

SEQ ID NO: 214820 - protein, 185 aa, Glycine max
  Clone ID: PAT_MRT3847_36008C.1.pep
PTRPEAIRQELKELHPNDPQIVVLKHGVWRVKGIIQVSRSIGDVYMKHAQFNREPINAKFRLPEPMNMPILSANPTILSHPLQPNDSFLIFASDGLWEHLSNEKAVDIVNSNPHAGSAKRLIKAALHEAARKREMRYSDLRKIDKKVRRHFHDDISVIVLFLNHDLISRGTVLDPALSIRSALDH

SEQ ID NO: 214821 - protein, 462 aa, Glycine max
  Clone ID: PAT_MRT3847_36009C.1.pep
MLSPMALSAHICRFPATRADTSLPESLTRIRCRKPLSVRCSGDSPSGSVGSEFDPKVFRKNLTRSKNYNRKGFGYKEETLQLMNREYTSDIIKTLKENGYEYTWGTVTVKLAEAYGFCWGVERAVQIAYEARKQFPTETIWLTNEIIHNPTVNKRLEEMNVQNIPLEEGGKQFDVVNKGDVVILPAFGAAVEEMLTLSEKNVQIVDTTCPWVAKVWNSVEKHKQRDYTSVIHGKYAHEETVATASFAGKYIIVKNMAEAEYVCDYILGGELNGSSSTKEAFLEKFKFAVSEGFDPDRDLIKAGIANQTTMLKGETEEIGKLLERTMMRKYGVENINEHFMSFNTICDATQERQDAMYKLVEEDLDLMLVVGGWNSSNTSHLQEIAEERGIPSYWIDSEQRIGPGNKIAYKLNHGELVEKENWLPEGPITIGVTSGASTPDKVVEDALIRVFDLKREEAMQLA

SEQ ID NO: 214822 - protein, 26 aa, Glycine max
  Clone ID: PAT_MRT3847_3600C.1.pep
RSQGPTRTRRRTTRSANGQQGRRALM

SEQ ID NO: 214823 - protein, 93 aa, Glycine max
  Clone ID: PAT_MRT3847_36010C.1.pep
THLWRGEKSWGLCFAPLSRRNWNFFPPPFFRIFAFDLFGKIFFFFPAQFLRALCLVIFQAVGTPTLLINAPPPKKKKKKKKKKKKKKKKKKKK

SEQ ID NO: 214824 - protein, 73 aa, Glycine max
  Clone ID: PAT_MRT3847_36011C.1.pep
MLQALMNLFSLCWKPFGRDAADRIDSIGVTGREGKDGLLWFRDGGKYGSGDFFMAAVHANQVLGDHSQIESGA

SEQ ID NO: 214825 - protein, 374 aa, Glycine max
  Clone ID: PAT_MRT3847_36012C.1.pep
MLQALMNLFSLCWKPFGRDADRIDSIGVIGREGKDGLLWFRDFGKYGSGDFSMAVVQANQVLEDQSQIESGPLGTFVGIYDGHGGPDASRYVCDHLFRHFQAISAESRGVVTTETIERAFRQTEEGYMALVSGSWNARPHIASAGTCCLVGVIFQQTLFVANAGDSRVVLGKKVGNTGGMAAIQLSTEHNANLEAVRQELKELHPHDPQIVVLKHGVWRVKGIIQVSRSIGDVYLKHAQFNREPLNAKFRLPEPMNMPILSANPTILSHALQPNDSFLIFASDGLWEHLSNEKAVDIVNSNPHAGSAKRLIKAALHEAARKREMRYSDLRKIDKKVRRHFHDDISVIVLFLNHDLISRGTVLDPTLSIRSALDH

SEQ ID NO: 214826 - protein, 81 aa, Glycine max
  unsure (1)..(81): unsure at all Xaa locations
  Clone ID: PAT_MRT3847_36013C.1.pep
MGGVEDEEPALKRMKLSSKGLVGLSNGSSSXSLGDCSSSDLMARPLSSEGDGEVIGSKGVIXREEFVRIITKAFDSLGYKK

SEQ ID NO: 214827 - protein, 56 aa, Glycine max
  Clone ID: PAT_MRT3847_36014C.1.pep
SLFPPLPKVKPKNFFICFLNKQRGTQTTFYGLTLLFYPATTDNFSLYLNTPGTLFL

SEQ ID NO: 214828 - protein, 374 aa, Glycine max
  unsure (1)..(374): unsure at all Xaa locations
  Clone ID: PAT_MRT3847_36015C.1.pep
DATXMPAXXDSIFKGVSTGTISYSSSSRQKMHANHFLVTNYLKNKLKFRGFVISDWLGIDKITSPPHSNYSYSIQVGVGAGIDMIMVPFNFTEFIDVLTYQVKNNIIPVSRIDDAVKRILRVKFVMGLFENPLADLSLVNQLGSEEHRQIAREAVRKSLVLLKNGKSAEKPLLPLPKKAAKILVAGSHADNLGYQCGGWTITWQGLGGNDLTSGTTILDAVKQTVDPATEVVFNENPDKNFVKSYKFDYAIVVVGEHTYAETFGDSLNLTMADPGPSTITNVCGAIRCVVVLVTGRPVVIKPYLPKIDALVAAWLPGTEGQGVADVLYGDYEFTGKLARTWFKTVDQLPMNVGDKHYDPLFPFGYGLTTNITKY

SEQ ID NO: 214829 - protein, 132 aa, Glycine max
  unsure (1)..(132): unsure at all Xaa locations
  Clone ID: PAT_MRT3847_36016C.1.pep
MPNSKEASKILDQLEGEMISERXRIEAPPTPSVDSSMTPPPXSYEEVNGVYASQAHNGSTDSMGYFLGEVLFPYHAESEVELNLSVGDYIVIRKVTNNGWAEGECKGKAGWFPFGYIERRERVLASKVAEVF

SEQ ID NO: 214830 - protein, 67 aa, Glycine max
  unsure (1)..(67): unsure at all Xaa locations
  Clone ID: PAT_MRT3847_36017C.1.pep
NNRFYLRKSNXSFKIFFXNQKSCILFLQKYNKRSPQLDNILDYRIVQFQSKTNTILXPHHADADFLL

SEQ ID NO: 214831 - protein, 395 aa, Glycine max
  Clone ID: PAT_MRT3847_36018C.1.pep
FSCLCWTFLDFGIRIQKQRERWTDEEHKKFLEALKLYGRAWRRIEEHVGTKTAVQIRSHAQKFFSKILRESSGNSTTLEESIEIPPPRPKRKPIHPYPRKLVEFPKTGISNSEHPLRSNSLKSSDFGQENNSPKSVLSTVVSETVGSSDSDTSSRCLSPASSISGVPTNRFPLAEPKTSFKEEGSAPSSAHDEQPPVKLEFFHKESVSTRDDATEESSGRTLKLFGTTLLVTDTCKPSSPTTEPCKPTPAAAMYLMQLQNVCSDVTEGHASIVPWWTLPHNTPFMPLHKEPKGKHLYSNLGEFEHKEVQKEGSWTGSNTSSIDDGDNTEKSDDQAKSHVHGFSKSETLTISELRVRPKTCGKGFVPYKRCMAERENQCSSVYYEEREEQRIKLSL

SEQ ID NO: 214832 - protein, 78 aa, Glycine max
  unsure (1)..(78): unsure at all Xaa locations
  Clone ID: PAT_MRT3847_36019C.1.pep
LAFSYLFANFFRRTALDFQLLFMFLMTFKNFAEKKMAFKIFKTHACFFFPIKFRSRKLKHXNLLFQYSTSVFLNQIPT

SEQ ID NO: 214833 - protein, 87 aa, Glycine max
  Clone ID: PAT_MRT3847_3601C.1.pep
IDSARTPGTRATSFHARRSPNHEASRRTRSPAVQRRKRRKLSDAGGGEGQRLQPLAAEANLRVRVERESGSEGHGLLSMKEHRTMDR

SEQ ID NO: 214834 - protein, 81 aa, Glycine max
  Clone ID: PAT_MRT3847_36020C.1.pep
LSVSDLLEFISPDPKGNDARSKQRRAKILSTSDDNSQEHDDAIANESILFDNSKDAPSMTEVKIEETNGKLDSQVQKENGD

SEQ ID NO: 214835 - protein, 224 aa, Glycine max
  Clone ID: PAT_MRT3847_36021C.1.pep
NSARAHFSSVNPTMAGNKKSLDTFACQAMFGILQLQAEMHEVVDSMVQKLQSWSQNSNGKFIAVDLRTEMVGKECHKKDVSGRKLCYQPHEIGEFLKKIGFSPETTVVYVTQTKWNSDLDALKDIFPKTYTKETVMAEDKKGKFLRSKSSEFEKVIDFYICSKSEVFVPSIPGLFYANVAGMSLCPRLCQLLVPAVPSSPSASASLFFSPPGAQKNHFAYACFC

SEQ ID NO: 214836 - protein, 200 aa, Glycine max
  Clone ID: PAT_MRT3847_36022C.1.pep
LAMADVYVKWLETMESVARDGECAGEIIVLKGSAIMMGYFKDHEATSKAFFGSNNSKGDWFRTGDVGVIHPDGYLEIKDRSKDVIISGGENISSVEVESLLYRHPRVLEAAVVAMPHPRWGESPCAFVSLRKNNNNNNSSKKIDHVTEAEIIAYCRKNLPHFMVPKVVKFMEELPKTSTGKIQKFELRVMAKVTPRSLAK

SEQ ID NO: 214837 - protein, 179 aa, Glycine max
  Clone ID: PAT_MRT3847_36023C.1.pep
ITLLTNLNAGKKRLCRVVRDDPLVMKSWALGRRIQPFVNSYLEYESKEQKKKFMLKLGYVENSKKMNETIRLFRGKGAELEERLDFIVKAGLDYEVVCKMIRDSPRILNQTTDRINMKIENLVSLGYSISDLASFPSFLSYSPRRVKLRFLMYDWLKEHGAVEAGLALSTIIACSDKAF

SEQ ID NO: 214838 - protein, 51 aa, Glycine max
  Clone ID: PAT_MRT3847_36024C.1.pep
SSGSSEKTTDWLEGGGIWQISISGGRGYYGWSYIYYTFTVSDLLTEWFRCA

SEQ ID NO: 214839 - protein, 124 aa, Glycine max
  unsure (1)..(124): unsure at all Xaa locations
  Clone ID: PAT_MRT3847_36025C.1.pep
GAPERPRPTPDKNTHRGKKTPGDKNRRDRQDPTXEEHHQTTRTGKQQDTNKAKEGKPQPGPNKSRPKKHKETQNDPTRQWRAQPQENTAAPAGKKKNKAPRGKQEQDNQPHTPRQERGGTKKTP

SEQ ID NO: 214840 - protein, 424 aa, Glycine max
  Clone ID: PAT_MRT3847_36026C.1.pep
MLRSLTTSMGIVSVAPTQTVVYLVPRYPPSISTYIYASSLTKAKTIHQPTQSYVHSKSVETAIESTSQLVPFPLLTNGNYTACTIPWRFPSDDPSIPTPTELSWINLLLNTIPTFKKHAENDTSVPDAANKAENFAQRYARILEDFKKDPASQGRPLDILILCRLREQVLREQGFRDIFKKIKDVENANAISLFQNVVHLNDAIEDEGKRLENLVRGIFAGNIFDLGATQLAEVFSRDGVSFSTTCQNLVPRPWIIDDLETFRIAWSKKSWKKVIIFVDNSGADVILGILPFARELLRRGSQVILAANDLPSINDVTYSDLIEIIPKLKDEEGRLTGVSTSNLLIANSGNDLPVIDLTRVSQELAYLANDVDLVILEGMGRGIETNLYAQFKCDSLKIGMVKHPEVAEFLGSRLYDCVIKYDEV

SEQ ID NO: 214841 - protein, 364 aa, Glycine max
  Clone ID: PAT_MRT3847_36027C.1.pep
MGSISQPQLVPFPLLMNGNYTASTIPWRLPSDDPSIPTPIELSWLNLFLNTIPTFKKHAESDTSVPDAVNKAEEFAQRFARIIEDFKKDPASQGVPLDVLLPCRLREQVLKELGFRDIFKKIKDVENANAISLFENVVRLNDAIEDEGKRLENLVRGIFAGNIFDLGASQLAEVFSRDGMSFSVTCQNLVPRPWVIDDLETFKMKWSKKSWKKVIIFVDNSGADIILGILPFARELLRHGSQVILAANDLPSLNDVTYAELLEIISKLKDEEGCLMGVSTSNLIIANSGNDLPVIDLTRVSQELAYLANDADLVILEGMGRGIETNLYAQFKCDSLKIAMVKHPEVAEFLGSRLYDCVIKYDEL

SEQ ID NO: 214842 - protein, 96 aa, Glycine max
  Clone ID: PAT_MRT3847_36028C.1.pep
MMRGPLPAIFTNPGGKPNNILVGGSRGFYPGTRDFYAFANSLAALGLGSPFGGSKVESGGYSGLCENYGDLEAVKNFNDSGGALLDDEGGFFFFNP

SEQ ID NO: 214843 - protein, 84 aa, Glycine max
  Clone ID: PAT_MRT3847_36029C.1.pep
SRRFGSRIAAVYVETIQGEDGIYSATTEFLQSLHSACYEAGALLALDEVQCGLGRSGLLWAHEAFGVFPDMMTLAKPLAGGLPI

SEQ ID NO: 214844 - protein, 44 aa, Glycine max
  Clone ID: PAT_MRT3847_3602C.1.pep
INCCFLCPFMFYLASQKNFSQILLDSVFFSTYYYYLVLVLFEIR

SEQ ID NO: 214845 - protein, 48 aa, Glycine max
  Clone ID: PAT_MRT3847_36030C.1.pep
MELNYYSYHARMAILRAACVPVQCLSIVNSENKVITNWTKIFRGKKHH

SEQ ID NO: 214846 - protein, 79 aa, Glycine max
  Clone ID: PAT_MRT3847_36031C.1.pep
FKKQKSETKIQTRTKCCRIESSRQQKTNKLTILTFVDKKKGRSVLHISASESSLSQYFHSSTFCDTGNKFSYEQLLINM

SEQ ID NO: 214847 - protein, 74 aa, Glycine max
  unsure (1)..(74): unsure at all Xaa locations
  Clone ID: PAT_MRT3847_36032C.1.pep
THNNIPHLIPSPKYSAKTTKESIHSEQYKSYSXTTNQQTHFYAKDLPLHSKNTFLFYIESTGLFNISNKLIKNQ

SEQ ID NO: 214848 - protein, 61 aa, Glycine max
  unsure (1)..(61): unsure at all Xaa locations
  Clone ID: PAT_MRT3847_36033C.1.pep
XXXXXXXPXMXLSSXNAVPPXSCXDXPKDQRXTLQQLIPKPTXYXSIGCFXADQGSDCXXC

SEQ ID NO: 214849 - protein, 62 aa, Glycine max
  Clone ID: PAT_MRT3847_36034C.1.pep
EKRKDMKEKALQWTELTKGAGFTPVGSSLANTYNIFHDVFLVKNVNYSNQKNSHILTYSIIM

SEQ ID NO: 214850 - protein, 89 aa, Glycine max
  Clone ID: PAT_MRT3847_36035C.1.pep
TFESMKTRMLLARNVCPSTCRPVRNRASTLLNIEESLFFWLIKPSPGSTNNINATVLELGPYIFDFLNIGLVLLAEKFYHTLYKVTVFK

SEQ ID NO: 214851 - protein, 183 aa, Glycine max
  unsure (1)..(183): unsure at all Xaa locations
  Clone ID: PAT_MRT3847_36036C.1.pep
EAFFTAAVTHIDQHPPHAWTLDAYPQGFAATLATLFPDSXEVHELAWIERALDESFVAADAEPLPMAVLASMDWETACXRFTASLRTGALASNAEPIWSGLSEGLPLPAPERLTETAGLLIWRRQRVVRLRPVEALEHQALLRLQENGSFSGLCEWLVERLGETAGIAKAGSLLASWLAGELL

SEQ ID NO: 214852 - protein, 255 aa, Glycine max
  unsure (1)..(255): unsure at all Xaa locations
  Clone ID: PAT_MRT3847_36037C.1.pep
NSVQTQFQSRIQVLXTDNGRECYNLALNSYLQKVGIVHQSSCVNTPQHNGVVEQKNKHLLEVTRAIMLASNVPKQFWGEAVLSATYLXNRMSSYILDFKIPFSTLQTFFPTNKIFSSIPLKIFGCSAFVHNLNPHRSKLDPKSIKCIFVGYSPHKKGYRCYSPHTKKFYHTRDVTFFENQHYYPKVGIQGEQPNTYPTENSEYQPLALEITELALLLHKLEQTLPDQNHNTQTTEPVPKPAERTAEVVQNRRQQA

SEQ ID NO: 214853 - protein, 120 aa, Glycine max
  unsure (1)..(120): unsure at all Xaa locations
  Clone ID: PAT_MRT3847_36038C.1.pep
KLAYIPFCIVIEIPGLQIIVXVVKCSLYTFQAEYITVSPTNHATEDQQKETTNNNTSTENLATHKHLHQHPKTKIQEQAIKMIHQNWYLMKLQHEIYRLHSTATFIRTHTYPGQTNNTLR

SEQ ID NO: 214854 - protein, 302 aa, Glycine max
  unsure (1)..(302): unsure at all Xaa locations
  Clone ID: PAT_MRT3847_36039C.1.pep
MKMAMGGLISGAGVIIVSFFLLILCGMVCGTESDLFCLKSVKSALEDPYNYLQSWNFNNNTEGYICKFIGVECWHPDENKVLNLKLSNMGLKGPFPRGIPSRSSLTGLDLSINKLSGTIPGDISTLIPFATSIDLSTNEFSGAIPVSLANCTFLNTLKLDQNRLTGQIPPQFGVLSRIKVFSVSNNLLTGQVPIFRDGVELHYANNQGLCGGNTLAPCQATPSKSNMAVIAGAAAGGVTLAALGLGIGMFFFVRRVSFKKKEEDPEGNKWARSLKGTKRIKGSMFEKSISXMKLSDLMKATN

SEQ ID NO: 214855 - protein, 95 aa, Glycine max
  Clone ID: PAT_MRT3847_3603C.1.pep
MDHYGSSGGSWTMIPTHNSSIQSQSQSNQDPNLFLQQQQQQFLQSQPFQQALPPQSPFQQHHHLYQQQQQQQQQQRLLPQPQQQQQQQQQQQQPQ

SEQ ID NO: 214856 - protein, 618 aa, Glycine max
  Clone ID: PAT_MRT3847_36040C.1.pep
MKMFMGGLIFGAGVIIVSFFLLILCGMVCGTDSDIFCLKSVKRTLDDPYNYLQSWNFNNNTEGYICKFTGVECWHPDENKVLNLKLSNMGLKGPFPRGIQNCSSMTGLDFSLNRLSKTIPADISTLLTFVTTLDLSSNDFTGEIPASLSNCTYLNTIRLDQNQLTGQIPANLSQLPRLKLFSVANNLLTGQVPIFANGVASANSYANNSGLCGKPLLDACQAEASKSNTAVIAGAAVGTAARRRHKVGIGMFFYVRRISYRKKEEDPEGNKWARSLKGTKKIKVSMLEKSISKMNLNDLMKATDNFSKSNIIGTGRSGIVYKAVLHDGTSLMVKRLQESQYSEKEFLSEMNILGSVKHRNLVPLLGFCVAKKERLLVYKNMPNGTLHDQLHPDAGACTMDWPLRLKIAIGAAKGLAWLHHSCNPRIIHRNISSKCILLDADFEPTISDFGLARLMNPIDTHLSTFVNGEFGDLGYVAPEYTKTLVATPKGDIYSFGTVLLELVTGERPTHVAKAPETFKGNLVEWIQQQSSNAKLHEVIDESLVGKGVDQELFQFLKVASNCVTAMPKERPTMFEVYQFLKAIGINYNFTIEDEIMLPIDTGDADNLEELIVAREGHN

SEQ ID NO: 214857 - protein, 65 aa, Glycine max
  unsure (1)..(65): unsure at all Xaa locations
  Clone ID: PAT_MRT3847_36041C.1.pep
XFHLMAXXEXXHHEXDAXXYXXRXRKXXQQRXXXQXQPPTXRXETXXKXKXXLEPXAEXTYAXXR

SEQ ID NO: 214858 - protein, 50 aa, Glycine max
  Clone ID: PAT_MRT3847_36042C.1.pep
FPNEKFFKKKLRGSKIDKFEKLNPKMPQPVDDMLAYDIPNFLKNFRNPYD

SEQ ID NO: 214859 - protein, 295 aa, Glycine max
  Clone ID: PAT_MRT3847_36043C.1.pep
MATLNLSSLQALAFHRLSSSFPQSTPTLSFNFQPKPFANPRPISLKPYVSEKPRARVVALAVKSLGETEAVAVSPEDGQSAGELPSGSGVYAVYDTNGDVQFIGLSRNIAASVAAHWKSVPELCGSVKAGVVDEPDRETLTQAWKSWMEEYIKVSGKVPPGNESGNATWVRQPPKRKPDLRLTPGHHMQLTVPLENLIDALVKENKVVAFIKGPRSAPLCGFSQRVIAILENEGVDYESVNVLDEEYNYGLRETLKKYSNWPTFPQIFVDGELVGGCDILTSMYEKGELASLFKK

SEQ ID NO: 214860 - protein, 53 aa, Glycine max
  Clone ID: PAT_MRT3847_36044C.1.pep
QHQQIFHQIRVGMCSTLTSGLIGSSMAAAVLNLLSPAPRAPLPLEYQTKGSIY

SEQ ID NO: 214861 - protein, 272 aa, Glycine max
  unsure (1)..(272): unsure at all Xaa locations
  Clone ID: PAT_MRT3847_36045C.1.pep
DAESLLHPCKVAFLRKGAELPSGISSFVCRGVYDIANRCLWWLNDQDYINDCQEEVDPLLYRTCVGMHAAVQPGGRSLKPLSPPTSTSQLKSVSDSVQNNTSSFPSHIKGRKRERADQGSEPVKRERSIKTEDGDSGHFRHDNILKTEIAKITEKGGLVDNEGVEKLVQLMVPDRNEKKIDLASRSLLAAVIAATEKLDCLSQFVQLRGLPVFDEWLQEVHKGKIGDGVGSRDGDKSVEEFLLGLLRALDKLPVXNLQALQTCNIGKSVNHL

SEQ ID NO: 214862 - protein, 66 aa, Glycine max
  Clone ID: PAT_MRT3847_36046C.1.pep
ILNTFFPAFCVMYYKWCKGTHTATTSREHPEPHNTKVSGTESKEDHTIHRMQTGREARRVAPPGKP

SEQ ID NO: 214863 - protein, 130 aa, Glycine max
  Clone ID: PAT_MRT3847_36047C.1.pep
PPAHVCYVTKSEKPEEHILVSSTSDRTFLSRDLRMNLSLQPIIFRGHSDGISSFSVWGQDVISISRNRIGLLSLSKSANETDGQHHISPQKLYISDNGQRSLSALSSISILPFSRLFLIGTEDGYLRICC

SEQ ID NO: 214864 - protein, 74 aa, Glycine max
  Clone ID: PAT_MRT3847_36048C.1.pep
YQSKGVRYDGLAIGIRRTCNRKGYTHIVYFTPQLSSLGLHNNQCFDLNRVKYDVKDGLYCRILARPASRVPNSP

SEQ ID NO: 214865 - protein, 187 aa, Glycine max
  unsure (1)..(187): unsure at all Xaa locations
  Clone ID: PAT_MRT3847_36049C.1.pep
SAGWGSSNASDDDDSSYRIYTIDWVDCWAGYRGFTDSKAGASLXDYATTPRESGNHAADFEDPYIKKLHMRLQALEADRESMRQAIISMRTDKAQVVLLREISQHLCKEMTPKKKSSKEXPFFAGNSNSMLFSIFKWISSIVFWRKRAHQSKYMFGLPLESVGLLMLLDKGMHARPWRCVSSTQVWD

SEQ ID NO: 214866 - protein, 55 aa, Glycine max
  unsure (1)..(55): unsure at all Xaa locations
  Clone ID: PAT_MRT3847_3604C.1.pep
LATMAAVHSIQMSDNRHSWVPYSKSEGVWEEDKHIDRIKLRPRAEFRAYVXVXXX

SEQ ID NO: 214867 - protein, 74 aa, Glycine max
  Clone ID: PAT_MRT3847_36050C.1.pep
SIHCSYWKPEDSFFLFLAVSFYIIVKARAKMWLKHSVYHVCDVKQHRCCKLFSTEYKCKKHNSIYYFMLIAYQI

SEQ ID NO: 214868 - protein, 246 aa, Glycine max
  unsure (1)..(246): unsure at all Xaa locations
  Clone ID: PAT_MRT3847_36051C.1.pep
LSSSSSSSQFSFNIGILSVFGHLEDNYRDQLKENYCIVEKGYNSFPNRIPGTVYSKALLARRRIREIISEIICKRKEQRLMEMDLLGHLLNYKDEKEQTLSDDQIADNVIGVLFAAQDTTASVLTWILKYLHDDQKLLEAIKADQMAVYEANEGGKKPLTWGQTRNMPTTHRVILESLRMSSIISFTFREAVVDVVYKGYLIPKGWKVMPLFRNIHHNPEIHPSXHNFDPSRFEVASKPNTFTPFG

SEQ ID NO: 214869 - protein, 103 aa, Glycine max
  unsure (1)..(103): unsure at all Xaa locations
  Clone ID: PAT_MRT3847_36052C.1.pep
MARFKHNALKSTRGYAXTKQLATEAARISATATGGVKTPHRYHPVNVALRVIKLYLKITDLLMRNLSFQXLVLEIAHDVTTDMRFXSHAVLALQGTAVAFLVR

SEQ ID NO: 214870 - protein, 119 aa, Glycine max
  Clone ID: PAT_MRT3847_36053C.1.pep
YIQFFTSFFTRVGGEGDFFLSLHPFLFLRKTQLFGIKKLLGQAIKRQGNFLQCWGGVFKPGGIAFCGRGGGPHRRAKECPKPFRTVLPREALCVEPYTVLKTFLGKGHLVTKLVPGGGG

SEQ ID NO: 214871 - protein, 60 aa, Glycine max
  unsure (1)..(60): unsure at all Xaa locations
  Clone ID: PAT_MRT3847_36054C.1.pep
MPDEPLQCANTQAFVHEHGPVASRFPIKVNYLYPGGRXPPDASVVDVTCGSGRGGRPTTA

SEQ ID NO: 214872 - protein, 109 aa, Glycine max
  Clone ID: PAT_MRT3847_36055C.1.pep
NQIHICQNLKLIIISIVDFLINVFITLYFLKCLIHPLEEPNPSSTQAVGRARAFKLTKKVSSQSGTSLILEYEYLLCNQVSLISLHVCFTKSLVWLQVVFCIKWLFKGL

SEQ ID NO: 214873 - protein, 93 aa, Glycine max
  Clone ID: PAT_MRT3847_36056C.1.pep
AREKIKRRTSSLNKPNKDNRDELAFSSEDAQPDVYTCVSRCSDRQATHAGYRPTAHFNSPDESIIKTMAAGEFKKKIYHLCAVVASSAHIENI

SEQ ID NO: 214874 - protein, 179 aa, Glycine max
  Clone ID: PAT_MRT3847_36057C.1.pep
MASFGGTTQKCMACAKTVYLVDKLTADSRVYHKACFRCHHCRNTLKLSNYCSFEGVLYCRPHYDQLYKRTGSLDKSFEGIPKIQKPEKPVTGNENTKVLANVFLGTRDKCVCCNKTVYPTERVTVNGTPYHKGCFKCTYGGCTVSSSNFITHEGKPYCKHHHIQLFKEKGNYSQLENEC

SEQ ID NO: 214875 - protein, 111 aa, Glycine max
  Clone ID: PAT_MRT3847_36058C.1.pep
KSGFFKNFCLPKMVRFLKKTPHQGFLFKLRRKSRSSLWPGCNSKPQRKLYVKAPPKLCVPNKLNFKMTQKESYAISFGVFAKKIIRLGKKIMLFSPQKIEKRKGFPLSFFF

SEQ ID NO: 214876 - protein, 34 aa, Glycine max
  unsure (1)..(34): unsure at all Xaa locations
  Clone ID: PAT_MRT3847_36059C.1.pep
TXPKFNFXPXLDXITFIXVEFYVNEXXYFCIKSX

SEQ ID NO: 214877 - protein, 146 aa, Glycine max
  Clone ID: PAT_MRT3847_3605C.1.pep
MNINRFIFFAFNSLFNNTGLFGIYASTGSDFVAKAVDLAARELIAIASPGQVSQVQLDRAKVSTKSAVLMNLESRMIASEDIGRQILTYGERKPLEQFFKAVDGITLNDITKISQKIISSPLTMASYGDVFNVPSYESVSRKFHAK

SEQ ID NO: 214878 - protein, 185 aa, Glycine max
  Clone ID: PAT_MRT3847_36060C.1.pep
TKASSNPGAGDILMGFLGSVILSFSFSMFKQRKLVKRHAAEIFTSVIISTVFSLYSTALVGRLVQLEPSLTVSILPRCITVALALSIVSLFDGANSSLTAAVVVLTGLVGANFVQATLDKLSFRDPIARGIATASSAHGLGTAALSAKEPEALPFCAIAYALNGIFGSILCSIPAVRQSLLAIVG

SEQ ID NO: 214879 - protein, 91 aa, Glycine max
  unsure (1)..(91): unsure at all Xaa locations
  Clone ID: PAT_MRT3847_36061C.1.pep
MADQTEKAFVKQPIVFLSSKKTATGXRPAKGENRFWKSIGLGLNTPRLAIXXTYIDMTCRFTAADHIRVWIVAVTLDIAMIITTTSVRWIY

SEQ ID NO: 214880 - protein, 432 aa, Glycine max
  Clone ID: PAT_MRT3847_36062C.1.pep
MASLLRNANTSLLKRSLFHSDLLTRFCFKPGVLGTSQVLSFSTRKRRSKSDGSDSGEENMSKKDMALQQAIDQITSAYGKGSIMWLGRSMAPKNVPVVSTGSFALDIALGVGGLPKGRVVEIFGPEASGKTTLALHMIAEAQKLGGYCAFVDAEHALDKTLAESIGVDTKNLLLSQPDCGEQALSLVDTLIRSGSVDAIVVDSVAALVPKGELDGEMGDAHMAMQARLMSQALRKLCHSLSLSQCILVFINQVRSKNSTFGGYGGPTEVTCGGNALKFYASVRLNIKRIGFVKKGEETLGSQVLVKVVKNKHAPPFKTAQFEIEFGKGISREAEIIELSVKYKIIKKSGSFFEYNGRNFHGKDALKRFLAESDGVQELATMLREKILDAEPELEPEEQEMMGDVMELMEEMVSLDSTDEAASRAPAPVAAEA

SEQ ID NO: 214881 - protein, 50 aa, Glycine max
  Clone ID: PAT_MRT3847_36063C.1.pep
PSLALISPLGFPLHQTFLVSDQGTHVLGFSNCNNCSELTRLAIELYNCYM

SEQ ID NO: 214882 - protein, 44 aa, Glycine max
  Clone ID: PAT_MRT3847_36064C.1.pep
FRLSSARWLNVFSISHLLQPCTNEARFTGEVVRWCSNKTTPQGV

SEQ ID NO: 214883 - protein, 39 aa, Glycine max
  Clone ID: PAT_MRT3847_36065C.1.pep
TNHCIAVWNPWEKKYKATVDLGDKEYKAIEKPITLNSGE

SEQ ID NO: 214884 - protein, 44 aa, Glycine max
  Clone ID: PAT_MRT3847_36066C.1.pep
TCFHVGIVLDSGDGVSHTVPIYEGYALPHAILRLDLAGRDLTDA

SEQ ID NO: 214885 - protein, 143 aa, Glycine max
  unsure (1)..(143): unsure at all Xaa locations
  Clone ID: PAT_MRT3847_36067C.1.pep
WSPADRSGFSGAQQPTTRPPRVRWIPVSNLERAAAKENPDALKAARKLLKGADGEPVPGXLLYRGVHGTHIAAKNARENRRPARDIRLGMHIAAIETARSGLGVQDANSTECEPDTKRPYIIFMPEGSKSHMGGTRRLGSKRT

SEQ ID NO: 214886 - protein, 288 aa, Glycine max
  Clone ID: PAT_MRT3847_36068C.1.pep
SPLLSLANFFNLSSSSSNFISPQHSLRHHHHHHHHHAHPTTTRLTSRVAQFTVKAYMENPNTLGSFANRVIGALPVVGLIARILSDEGGVGDDLVDFAEFRRRVGKKCSQADSSAFYEFQDRRGRAGDPLYVLLCCWLAAIGAGLLKTEDILEGVARLRIFNDIEFEEQSFMALMNESKERRARQNADPPAVPMEIRAGKALDAIYVCCFGKDSIEEEDERLLTAMLGAVFPSVQREESCRLVKDKAEKVAAGVDEEYVTELKLKPLTKEAVELQMKDLQFLQQNSET

SEQ ID NO: 214887 - protein, 110 aa, Glycine max
  Clone ID: PAT_MRT3847_36069C.1.pep
WLIQSTYTFVSYYEDTHVCCEPYMNTKQIAQTARINVSFFNRVAGIMPPFYKSCISNLITLPFYFEPTLCGPLLYDTSYSDHHLEGAPKQGTPLPNELMSWGCPTAEMRA

SEQ ID NO: 214888 - protein, 115 aa, Glycine max
  unsure (1)..(115): unsure at all Xaa locations
  Clone ID: PAT_MRT3847_3606C.1.pep
SHSSYYLVQLLDSSLGDFKTFNMNPPPPSVESTANIKNESPSLPFNVQRLIIGLPXLRTNKKGKHKASKNSHISYALNKLMEHTKHAVKVLESISPPTFNDLRKDTFMEHLVKQF

SEQ ID NO: 214889 - protein, 62 aa, Glycine max
  unsure (1)..(62): unsure at all Xaa locations
  Clone ID: PAT_MRT3847_36070C.1.pep
SFKMLIFVKTLTGKAITLEVESSXTIDNVKSKIHDKEGIPPDQQRLIFAGKQLDDGRTLADY

SEQ ID NO: 214890 - protein, 179 aa, Glycine max
  Clone ID: PAT_MRT3847_36071C.1.pep
QFLGESNIEDIQQLLFYNSESGILLSKFIEKLCQTLESFVSGVNKQFAFQENEVFPIFRKNCTNGMQERLLSLSLYMMPLGLLRCVITWFSVRLSEKESSSILYCIKKGNNSVCKAFSSLLHEWFRIGYSGKTSIEKFRQELQHMFKRRCSLLPEQIKEAHEFSFLNSEKQPHKVSGQN

SEQ ID NO: 214891 - protein, 198 aa, Glycine max
  unsure (1)..(198): unsure at all Xaa locations
  Clone ID: PAT_MRT3847_36072C.1.pep
MASQESIEKMLSRQNYRNLWHTDLLRSIQADTPYCCLALWCAPCVSYLLRKRALYDDMSRYTCCAGYMPCSGRCGESKCPEFCLCTEVFLCFGNSVASTRFLLQDEFNIQTTQCDNCIIGFMFCLQQIACIFSIVAMIVGSSEIQEASQLLSCLADFVYCTVCACMQTQHKIEMDKRDGKFGXPPXMAVPPVQQMSRI

SEQ ID NO: 214892 - protein, 251 aa, Glycine max
  unsure (1)..(251): unsure at all Xaa locations
  Clone ID: PAT_MRT3847_36073C.1.pep
MASQESIEKMLSRQNYRNLWHTDLLRSIQADTPXAPCVSYLLRKRALYDDMSRYTCCAGYMPCSGRCGESKCPEFCLCTEVFLCFGNSVASTRFLLQDEFNIQTTQCDNCIIGFMFCLQQIACIFSIVAMIVGSSEIQEASQLLSCLADFVYXTVCACMQTQHKIEMDKRDGKFGPQPAMAVPPVQQMSRIDQQVPPFVGFPPQPVYGQPAQGYPPAGYHPPATYPPPEYPPAGYPPPVVYPPPGYSGHPK

SEQ ID NO: 214893 - protein, 248 aa, Glycine max
  Clone ID: PAT_MRT3847_36074C.1.pep
MASQESIEKMQARQNYRNLWHTDLMRSIQADTPYCCLALWCAPCVSYLLRKRALYDDMSRYTCCAGYMPCSGRCGESKCPEFCLCTEVFLCFGNSVASTRFLLQDEFNIQTTQCDNCIIGFMFCLQQIACIFSIVAMIVGSDEIQEASQLLSCLADFVYCTVCACMQTQHKIEMDKRDGKFGPQPAMAVPPMQQMSRIDQQVPPSVGYAPQPAYGQPAQGYPAPGYPPTGYPPAAYPPPGYPPSGYPK

SEQ ID NO: 214894 - protein, 82 aa, Glycine max
  unsure (1)..(82): unsure at all Xaa locations
  Clone ID: PAT_MRT3847_36075C.1.pep
MNNASFRAADRGGKKIKTDMPYGINGGMALMEGDEASDSIGKGKGVYQXVDKYRANVDGYSPIYYTKDWSPCGDVHSGCATG

SEQ ID NO: 214895 - protein, 43 aa, Glycine max
  Clone ID: PAT_MRT3847_36076C.1.pep
EFPGRPTRPTRLRGPLTKPNGFRGSMMPTHHACAGIFGIIGRQ

SEQ ID NO: 214896 - protein, 78 aa, Glycine max
  Clone ID: PAT_MRT3847_36077C.1.pep
ENPNHGFDVGTLITGVQVRSKKFGSYKSSNEHNYVIKKLTTPLPKGSFLCESIGDCYMNTYCYPAIRLPVLYLHGSYT

SEQ ID NO: 214897 - protein, 112 aa, Glycine max
  Clone ID: PAT_MRT3847_36078C.1.pep
EMAYQMQMQKQNLRYRGWCPSNDYQVHEVIGPALLRKGLDRPRHQKGRVAFKTDLEESITVAEPTPVPAETETPTTTNHANGFRSVDQKADAFIKQEHRRIELARLKSLGQI

SEQ ID NO: 214898 - protein, 88 aa, Glycine max
  Clone ID: PAT_MRT3847_36079C.1.pep
CSTLHNIPSITVFTDLLLPLGVCGFGEFDNHLYIQQAIVTLTGMLLTDEHAYDGPSLLLLERVQPSDIAKFYRGLCKKLTESTTDDES

SEQ ID NO: 214899 - protein, 79 aa, Glycine max
  Clone ID: PAT_MRT3847_3607C.1.pep
NPPGGPPPSIEFFWAQMGSPLWGLRGTKFLGGYDTGSQRGFVVVPPTVFLKPPRFFFLGMGFKFVFPDFLFFQKTNSVN

SEQ ID NO: 214900 - protein, 90 aa, Glycine max
  Clone ID: PAT_MRT3847_36080C.1.pep
MVKTRDTAASMTDVIEEQGNMALSNAQEERIFVSIRVRPLNEIEKARHDVSDWECISGNTIRYKNNGHAEPRPLSMDTYAFDRVFGEKCN

SEQ ID NO: 214901 - protein, 87 aa, Glycine max
  unsure (1)..(87): unsure at all Xaa locations
  Clone ID: PAT_MRT3847_36081C.1.pep
GFSLRLFSWVSPCGSALWGLASLFLGVFSRFSXCFEGGVCSFNVGGGLLGCWGGPALLLFIAPFXVPXAWGVVFKGAWVDPVFPSRP

SEQ ID NO: 214902 - protein, 46 aa, Glycine max
  Clone ID: PAT_MRT3847_36082C.1.pep
VPVGQLLRSDKSSCQSLVTDSQARSVLNVVVCRGILSHRSKKFMHR

SEQ ID NO: 214903 - protein, 373 aa, Glycine max
  Clone ID: PAT_MRT3847_36083C.1.pep
MEAKSSNQIKEESNDSNYDRKAEIKAFDDSKTGVKGLVDSGVKKIPRMFLSGIDITENVASDSNLSIPVIDLQDIHNNPALHNEVVTKIRSACQEWGFFQVINHGIPISVMDQMIDGIRRFHEQDTDVRKQFYSRDLKKTILYNSNTSLYLDKFANWRDSLGCSMAPNPPKPENLPTVFRDIIIEYSKEIMALGCTIFELLSEALGLNPSYLKEMNCAEGLFIQGHYYPPCPEPELTLGTSKHTDSSFMTIVLQGQLGGLQVLHEKLWFNVPPVHGALVVNVGDILQLITNDNFVSVYHRVLSNHGGPRVSVASFFSNSHDPAKGASMVYSPIKELLSEENPAIYRDTTIGEIMAHHFAKGLDGNSALQPFRL

SEQ ID NO: 214904 - protein, 45 aa, Glycine max
  Clone ID: PAT_MRT3847_36084C.1.pep
IERLHAYIKLSPEYTLMYKMELCRMQYSLNRIRCSARCLHNIDEN

SEQ ID NO: 214905 - protein, 53 aa, Glycine max
  Clone ID: PAT_MRT3847_36085C.1.pep
YLGFRPSFFFFPVLATDLMCENLRARTFDISTIQELGRQSPTAWAVHLTLHEK

SEQ ID NO: 214906 - protein, 46 aa, Glycine max
  Clone ID: PAT_MRT3847_36086C.1.pep
ICPCLSLNHSLILSSNSNLRGSTTSLFYTLKTYFQFTLTIYSILIS

SEQ ID NO: 214907 - protein, 873 aa, Glycine max
  unsure (1)..(873): unsure at all Xaa locations
  Clone ID: PAT_MRT3847_36087C.1.pep
MAEPLSNTELSSSKTLDPTNGHDSTSEPHQTAPEDAQLNREDDVVPTAKRKRDDDVEDRSLHPLWKTSLCSYFRSHNGSCSHGGACRYAHGEEELRPRPDNTWDPTSERAKKALKTESDEKRAVSEEVMMTEAVVDDGDDGCGANHALNICLVHLPRKWSSENLRTFLCEQGIPFKHAKKKKGMMIGFEIPFEDXKQLKSSTMELEGKSIGNKTVKVANVLPGSFEKKSNAIVNMSSAGLARHRAKSMPISEAFHPVKAMAVDLFPHTPHCELVMLLERFQILKKLTRNARKACPNGVSLPEWILKSREIGGLPCKLEGIIASPIVNGYRNKCEFSVGYSLEGKVTVGFMLGNFREGVTAVEEAVDCPNVSTVACKYATIFQEFLQDSDLPVWNRFKNTGFWRQLTVREGRTNGNVVDAETFSGVAEVMLIVSTASFDDAKVAAEFKRLAQAFVAGATSHCPILPLTALVVQDHQGISNVAPADAPLHSLPIPKAAGDPEVDENNNAKDVRIHDHINNLQFSISPTAFFQVNTLAAEKLYSLAGDWSCLGPDTLLFDICCGTGTIGLTLAHRVGXIGIEMNASAVSDAHRNAEINGIKNIKFICSKAEDVMGSLLREHLNVTKEQVDDPNISGKGNDSPEDSACPEPENGELASHCPENNNAEVGSEVQKGSTCEQADGISEQAEDVMGSLLRDDANMPKEQSDYPNISGSGNDIPEDSTFPVPENGETTSHSESNNAEVGGEVQKGSTSKNGKTSLQQFKNVVAIVDPPRAGLHPTVIKALRTHPGLRRLVYISCNPETLVANAIELCTPSPVKIEKGNKDNRGWRNMSSAGLARHRAKSMPISEAFHPVKAMAVDLFPHTPHCELVMLLER

SEQ ID NO: 214908 - protein, 33 aa, Glycine max
  Clone ID: PAT_MRT3847_36088C.1.pep
KPQAANILDTSTDELLHIYNSPGFIKHNDSSFS

SEQ ID NO: 214909 - protein, 58 aa, Glycine max
  Clone ID: PAT_MRT3847_36089C.1.pep
LKKTPLFFFFFFFFFFFFFFFFFFFFLILILSIIIEVNIIYTRDNALSASPTGGVTRK

SEQ ID NO: 214910 - protein, 416 aa, Glycine max
  unsure (1)..(416): unsure at all Xaa locations
  Clone ID: PAT_MRT3847_3608C.1.pep
EWKMSFFSCCTSQEKIDKSPLKRSSKNYHHAKALPSLASLCFKSGTSKRRYMNSARAKIGKGNITSQTFSYHELCVATRNFHPDNMIGEGGFGRVYKGRLKSINQVVAVKKLNRNGFQGNREFLVEVLILSLLHHPNLVNLVGYCADGDQRILVYEYMVNGSLEDHLLELSPDRKPLDWRTRMNIAAXGAAKGLEYLHEVANPPVIYRDFKASNILLDENFNPKLSDFGLAKLGPTGDKTHVSTRVMGTYGYCAPEYASTGQLTSKSDVYSFGVVFLEMITGRRVIDNARPSEEQNLVLWAQPLLRDRMKFTQMADPLLEDNYPIKSLYQALAVAAMCLQEEADTRPLISDVVTAIEFLARKKVEVDEPRHTKETSSTQDGDSSEHNESDEESDGEEDDENEDEEKDKNVEINKKE

SEQ ID NO: 214911 - protein, 85 aa, Glycine max
  Clone ID: PAT_MRT3847_36090C.1.pep
GCIPVCFVTLVRNGGAFTPEKAENYLKMGVLNGLFVLGRPIGLIAPFPAQKRLRIGLYRHPWEDITYLLPPLQAGGPKGRVKVSL

SEQ ID NO: 214912 - protein, 143 aa, Glycine max
  unsure (1)..(143): unsure at all Xaa locations
  Clone ID: PAT_MRT3847_36091C.1.pep
MLRFLPRTNLERLEWAKCPXENHYIVVRERCNRFVEWIDMIILSGRNHAIRLMRLADNWWAGLEIYDDSSVTRPAPSNLPYERIVFDINYILXAGKKKGIWRWGVKLLNKMEDKGLKPCCTEWNAALVACYKASETTAAGQIF

SEQ ID NO: 214913 - protein, 204 aa, Glycine max
  Clone ID: PAT_MRT3847_36092C.1.pep
MDVKALAKSKRNHTQHHSKKSPHSHKPKAPTSSSSSSVGPNDAAKKNPLGKQQVSEEKKKKSHHSALPSNWDRYEDEEEELDSGSGIASKTVDVVLPKSKGADFRHLVAEAQSLAETSLEGFPAFNDLLPGEFGVGLSSMLVVRGEGIVSWAGDDNFVVEDKTNGNLEASFLSLNLHALAESFAKVDLAKRLFIEADLLPTELC

SEQ ID NO: 214914 - protein, 160 aa, Glycine max
  Clone ID: PAT_MRT3847_36093C.1.pep
MMGAWLLAFRKLVNITRSSSESTQLTLNAGKGDCVLHMVSNIPEENFILRLPSYDKILTPVNGAYFLILMVLVFGGTWACCACRKKHRNEVPYQELEMALPESASATNVESAEGWDQDWDDDWDVNVAVKSPAALAGSISANGLTSRSSNKDGWENNWDD

SEQ ID NO: 214915 - protein, 78 aa, Glycine max
  Clone ID: PAT_MRT3847_36094C.1.pep
NQPLGRPRSGGNNTGGPGGRNLDEPNLLGAPNPVFGGGKTPKGGGGGPRGKNPPNKAHGGGGEGPPPTPKKEGEGHPE

SEQ ID NO: 214916 - protein, 91 aa, Glycine max
  Clone ID: PAT_MRT3847_36095C.1.pep
RWNPTPKELGGHNSPQSMGMAHKIYLIRANTRPTVGRYRCSINLRIHLAVNIVRFIGKMSVPNSMANMPIAQTSEFRLILWPTLWDSNLTA

SEQ ID NO: 214917 - protein, 63 aa, Glycine max
  Clone ID: PAT_MRT3847_36096C.1.pep
KSYNGEVGHRKELSIPTFLYLLYKTQPQNGNFKFNLLTIKRFVCSKDEFKSLLKALHHPHHLS

SEQ ID NO: 214918 - protein, 92 aa, Glycine max
  Clone ID: PAT_MRT3847_36097C.1.pep
LPFPGSTSLSTRRRTRLLTRDGDMQNLRCHRKELMLGTGSLIGRFLVLRNFIGITLLLRLGSSMITMERTTVSLRKTRSTFFFELFSGAKFF

SEQ ID NO: 214919 - protein, 57 aa, Glycine max
  Clone ID: PAT_MRT3847_36098C.1.pep
KKKKKKKKKKKKKKKTKRREKNTSKKKKKEKKKKKKKKKKKKKKNGRKGGQKRGAGF

SEQ ID NO: 214920 - protein, 55 aa, Glycine max
  unsure (1)..(55): unsure at all Xaa locations
  Clone ID: PAT_MRT3847_36099C.1.pep
LLPRLAFACCLPMCSHPSSTICNPFPILKFRXXSLGVRTYKNRLGEXHFGFFQIT

SEQ ID NO: 214921 - protein, 78 aa, Glycine max
  Clone ID: PAT_MRT3847_3609C.1.pep
WKGSARVLVAWSHLGSLMFCMATAQRALNPYRLLCSFWVLLSKIIFWVSSMLLCDSKPSIMYAGSRKKKKCCFLASGC

SEQ ID NO: 214922 - protein, 30 aa, Glycine max
  Clone ID: PAT_MRT3847_360C.1.pep
ICGSLCYLILCFYSDFKEIRLLFLPLPLLF

SEQ ID NO: 214923 - protein, 327 aa, Glycine max
  Clone ID: PAT_MRT3847_36100C.1.pep
MDSEIEKKKNLFSELTDDIVLNIFYKLEDDPRHWARLACVCTKFSSLVRDFCWKTKCSLTIPQDLLSAAASDPPLSLHKLSFCCPGLRHAGLLFDTSDFGLERDLGPGNFNVITDDSPSNTTPPPPPPPPQQQQQQPPQSDDCSSSCWSLYDDLYYDTLYVPTESESPRLTESVSVRAGVDVASISACSKKRKLSRAWSSHLASGSWTLSREQGSKLLARKFRYDCLYVCEWPGCVHKEEKRKYCLFRGVFKNFRRTMVWRTIQAGKKRKMDLPCAFRISEFTWDMHYSFCFMPGFGFHDDGEPMVRAYVCENGHVSGAWTDLPIYT

SEQ ID NO: 214924 - protein, 155 aa, Glycine max
  Clone ID: PAT_MRT3847_36101C.1.pep
KTRDDPRDRGENTERETETGGEATTTGGLGKHTQKNELTETQTNGNLSAKNEAAREIRKMDRKTTTTTTKTRAKLAAAGVNEPHEQTHTTTNDDARQSTHLAQHNHAGRNERNKGKKRTEGATPPPGELPKKQNSSRRETATGANTTPPAAASNK

SEQ ID NO: 214925 - protein, 36 aa, Glycine max
  Clone ID: PAT_MRT3847_36102C.1.pep
NLLEGVLLGVANLEPELEIPLILIDRMKVKNPISNS

SEQ ID NO: 214926 - protein, 83 aa, Glycine max
  unsure (1)..(83): unsure at all Xaa locations
  Clone ID: PAT_MRT3847_36103C.1.pep
QNQKQRHTIKQKPTKYYKAIKNKPYPKSHFYHNIPNPKIKIYNINIKQTNINKFPFYIHLINXKTANISNKTLKTTRITYNKY

SEQ ID NO: 214927 - protein, 64 aa, Glycine max
  unsure (1)..(64): unsure at all Xaa locations
  Clone ID: PAT_MRT3847_36104C.1.pep
VLLVGYGSGLYAPVRFKENPHWLIKNSWRYSWANQVFYKIRRGRNGCGVNXMVSTDAAIHVSNN

SEQ ID NO: 214928 - protein, 95 aa, Glycine max
  Clone ID: PAT_MRT3847_36105C.1.pep
PISVLRWGRPPQCEGPVLHHHPFGAFFFDTALDFFFIKTRWIELVHGWVLKHRRCVGFLSFKGVCKPCLKKFPPGLLFIGPQQWVFLFSWKKRAF

SEQ ID NO: 214929 - protein, 92 aa, Glycine max
  unsure (1)..(92): unsure at all Xaa locations
  Clone ID: PAT_MRT3847_36106C.1.pep
TVFMPPKWSLSYHQCHSRYXSDERVLEVAKTFRRKSIPCDVIWMDNRYMDGYRCFTYDKERFRHPTSLVKDLHYSRCRAIRMLDPGIKVEEG

SEQ ID NO: 214930 - protein, 58 aa, Glycine max
  Clone ID: PAT_MRT3847_36107C.1.pep
FLVQCLLYALVIVAEFGIQSGIYHHTVERNAIVEYDGTCIHRSIIISSEQRIICHASI

SEQ ID NO: 214931 - protein, 123 aa, Glycine max
  unsure (1)..(123): unsure at all Xaa locations
  Clone ID: PAT_MRT3847_36108C.1.pep
GSTKQVGRAPPVTPPPSVELGPQPVFGRSRKVSANFSGVLTFSGPERERIYGRLARTGSEATMAVEVAXGQGVLKHISKGGVPWILGTRGVITLGAXISLFQGGSVEYKSKGFMTSEAELWNG

SEQ ID NO: 214932 - protein, 153 aa, Glycine max
  unsure (1)..(153): unsure at all Xaa locations
  Clone ID: PAT_MRT3847_36109C.1.pep
ETLDVQEAEKLYMKAEVQEYQNEQCMVIKEEKDELCPNTKEKMDELQLPENYNTCHHFYHLWKDLCMPTITFFRSLQLLGKELGILFKDLCRLISTCASGHKREKQEDPEKHQQCQISMAEDLGHEHVPPNLVSCLQSVKLAYIYTLGLSGXG

SEQ ID NO: 214933 - protein, 53 aa, Glycine max
  Clone ID: PAT_MRT3847_3610C.1.pep
SITVADDLSVGLLSQPSFMRMRAQVMLFLRHRSLAFLLLVRIDTSIRGPHNRF

SEQ ID NO: 214934 - protein, 329 aa, Glycine max
  Clone ID: PAT_MRT3847_36110C.1.pep
MESLPKIRHSHISLNHSLLQRGSQCHRSSFPTPFSSLSPPLPPFSPIRVSSSPSPSPKPQNPLTLNLLLPPLVKPTCIAIAATAFFFMRLHSPPVAFASTPVAPPESAESETLPNESATEEQLRTTDTDALQSLLQTKIRALEINEAIRVLDRLTELEPEESEYPLLKAHLHMRYLEHELAANVFEELLHRDPFHVEAYRGLLMLTSETNKPTEELLKRIEEAAAKVCEEQERDSDVRDLKLLIAQIKVINGDLSEALKVYEELVKEEPKDFRPYLCQGIVYSMLRKKDEAEKQFEKYRALVPEDHPYKHHFEENTQFLERRGVGGAKS

SEQ ID NO: 214935 - protein, 82 aa, Glycine max
  Clone ID: PAT_MRT3847_36111C.1.pep
LTYSQLTPIISNSPLHTNSTSNHSLASNYPNIFNNATASIKIIHSPNASNIINIQLRITSSIWYRIVQRTNVHTPKRPNISN

SEQ ID NO: 214936 - protein, 58 aa, Glycine max
  Clone ID: PAT_MRT3847_36112C.1.pep
TDACGEQYDPILDSIQPSSYSLKKMHLDHKNEATPESNIILMPKNSYMSLYSNDNNNL

SEQ ID NO: 214937 - protein, 60 aa, Glycine max
  Clone ID: PAT_MRT3847_36113C.1.pep
QRDCIIYNKVSIVRVVSSMLDQRVHIVKKARLKSTKTSISTSVSQNDSLKKCICVLHKCV

SEQ ID NO: 214938 - protein, 56 aa, Glycine max
  Clone ID: PAT_MRT3847_36114C.1.pep
IKQCRGLGVETGTAFILLCISEVAAWLGSNKKRRANSAPKNNFCSSYIWLTYKYLV

SEQ ID NO: 214939 - protein, 124 aa, Glycine max
  unsure (1)..(124): unsure at all Xaa locations
  Clone ID: PAT_MRT3847_36115C.1.pep
PIAFMINILCCVDGKFLREWTHPLLTCSLRIAIYKKYVCKVXCGIPSELPFTVISNSMFNEMLLKYSYEKLLRQAQTTSMFLQSFKKFVSSSVYGDDILISAHEFIKPHFNGSILKNSLACHNI

SEQ ID NO: 214940 - protein, 46 aa, Glycine max
  Clone ID: PAT_MRT3847_36116C.1.pep
NLFKGLVCYDKGNGSVTTLFPFNQFGIFLLFHRRHLHFSFVIHMKR

SEQ ID NO: 214941 - protein, 78 aa, Glycine max
  Clone ID: PAT_MRT3847_36117C.1.pep
KPKTSQKGPGAITTPQPPGAKTREQQHSQGGQRGNQNGAKDREENRDEHGTDHTGKNSGDDEPKRERTKDNHNEARRG

SEQ ID NO: 214942 - protein, 55 aa, Glycine max
  Clone ID: PAT_MRT3847_36118C.1.pep
FLCDFSIQINICITLIIFHAEKFPVNLEVANPILSPRHASNLGLKPGSTLDKVGA

SEQ ID NO: 214943 - protein, 101 aa, Glycine max
  Clone ID: PAT_MRT3847_36119C.1.pep
ISYYWSHITGNFKRCEFKYIEEACYWSVVNWKDESSFVYGSGLSKYSSDFDICNASISDIRGRGLSFYPTMFRHLLCLELCTNGKLLSSGHDCECLYCLYR

SEQ ID NO: 214944 - protein, 107 aa, Glycine max
  unsure (1)..(107): unsure at all Xaa locations
  Clone ID: PAT_MRT3847_3611C.1.pep
ASDPDDHCSTSWADVYLGPATISGGSTKQTVVARSTAEEAEYCSLAQFTTELLWYQTLLRIASSFLLXQPTLFFMTIRILFLSQXPILHAKTKHMEYHFSLVSIVYF

SEQ ID NO: 214945 - protein, 102 aa, Glycine max
  Clone ID: PAT_MRT3847_36120C.1.pep
KKKSCILRWAGGSFFIKCHPPPLPMGFCYQGLPPNRLSPKGFLGLRVSPKKAYIFWFLLGFTLPFPFFLFSFFKNTWGAVPCLENLNLLCCKAAFFCSFHQG

SEQ ID NO: 214946 - protein, 106 aa, Glycine max
  unsure (1)..(106): unsure at all Xaa locations
  Clone ID: PAT_MRT3847_36121C.1.pep
PASGRRTSVVVSSWRTTHAXACLEVHSFGCVLCCSFDCKNCGGIRWVILFPSIISFPSGRPSLILCGLFCFSARRSGVSWAPSLDAGSCVFHPCGRGPVRVIKFNH

SEQ ID NO: 214947 - protein, 122 aa, Glycine max
  Clone ID: PAT_MRT3847_36122C.1.pep
GRSTIYSMARSPYARVYPGSMLKGGGVAVEGEPSSSARHAIDHDMLSGSKQGVLKRGSSLLGNDIGSFGPIRRIRHKSNLVSAKSLTLPHLGNALPIDRSRVGIDAAHQPSSSMQKPNLLGE

SEQ ID NO: 214948 - protein, 162 aa, Glycine max
  Clone ID: PAT_MRT3847_36123C.1.pep
MVEVEKLSALKYLEVACAEGREYPDLPLQLEELDICNITENQLRCVQRMPGLSSLQIHSYHGPNMTLPASQYGRLLWLGVTFDTDHKSTMLSLIRANASSLRELHVCCAPCAETDTEYYFPDLGQELAPLGLRVLRRLVLARPEASWASHPFAKCVLQRRAV

SEQ ID NO: 214949 - protein, 98 aa, Glycine max
  Clone ID: PAT_MRT3847_36124C.1.pep
VSVFSDLRELASAESLDTFTLIYTNILEHQPDCPPEVVEKLVGLREGIPRKDAKEVIQECKEIYENSLVDGRPPKAGFVFRRVKCLTATKGGLWRKLT

SEQ ID NO: 214950 - protein, 69 aa, Glycine max
  Clone ID: PAT_MRT3847_36125C.1.pep
ASTANLPLSSLLRPLYTLYFCLYAILPISGLTGILYVIRSSGIPGLHRYFTSFPPPPPKEGGRHTVMTE

SEQ ID NO: 214951 - protein, 555 aa, Glycine max
  unsure (1)..(555): unsure at all Xaa locations
  Clone ID: PAT_MRT3847_36126C.1.pep
SFSLCFSYSRVVEMQEILDQQIAEEAAXEAEGDGAMASVANPRNNGIKSTSAMASSKNLTQQKLKVQGKGYKDKCYEQIRKTVEGRFNKLLNELVFEDLKAALEEARAIGEELGDVYDYVAPCFPPRYEIFQLMVNLYTERFIQMLRLLSDRANELTNIEILKVTGWVVEYQDNLIGLGVDESLAQVCSESGAMDPLMNSYVERMQATTRKWYLNILEADRTQPPKKTEIRISFILAYFATKEDTNVFVSNXDTAITLISYDXNLKMLTIQVMIDFQSAEKKRLEEPASEIGLEPLCAMINNNLRCYDLAMELSNSTIEALPQNYAEQVNFEDTCKGFLEVAKEAVHQTVSVIFEDPGVQELLVKLYQKEWSEGQVTEYLVATFGDYFGDVKMYIEERSFRRFVEACLEETVVVYVDHLLTQKNYIKEETIERMRLDEEVIMDFFREHISVSKVENRVSVLSDLRELASAESLDTFTLIYTNILEHQPDCPPEVVEKLVGLREGIPRKDAKEVIQECKEIYENSLVDGRPPKAGFVFRRVKCLTATKGGLWRKLT

SEQ ID NO: 214952 - protein, 135 aa, Glycine max
  Clone ID: PAT_MRT3847_36127C.1.pep
PNQKPRGCKGRKPFWCPTLWVLPRTPQGPPQNTFLSFFAPFYPNRSLKSKKFHPRRTTLLIHSIQLKSEGLHPKSSFGFTWARINLSRREIPPVKPKASGGGTLVEPGGKKKGSPGPPRGDSFARAAAEYAPLGA

SEQ ID NO: 214953 - protein, 103 aa, Glycine max
  Clone ID: PAT_MRT3847_36128C.1.pep
VQIIGETNMGGKGIDSETSNKTPQNRVSVHQANGKTLGSQLLKPRVKNPNFFPQRKFTNPQPWHQENFWLKKIRAPLTSRMYPESQNYGFWKDPIFFEKPLTG

SEQ ID NO: 214954 - protein, 137 aa, Glycine max
  Clone ID: PAT_MRT3847_36129C.1.pep
QQSRNKSIIAANGLVNKFSSRHQYPHGSSIHPHDSDLSDNMYGQQQISRFQILSSLQKNQRFMQIENLPPLKLAPPAVYHEKVSKVANFLTGETSNSSSAIEKQNRNKHNRELRFKGSSIRFPLKSTIFGKEKTNKR

SEQ ID NO: 214955 - protein, 134 aa, Glycine max
  Clone ID: PAT_MRT3847_3612C.1.pep
MKLSTLFLFLFHLAHAALSDEATFIRDGLKSYSQLDLPHSVFGSESVAFDCHGKGPYVGVSDGRILKWHETKREWIDFAVTSPHRNKKLCDGLTNDKMESMCGRPLGLKFNTLTCELYIADAYFGLLVVGPGGG

SEQ ID NO: 214956 - protein, 68 aa, Glycine max
  Clone ID: PAT_MRT3847_36130C.1.pep
GGNKPISFLGGGTNPRNKIALGTNRLGWFFPPGFFVKKTQLHKPPPLRPWAPGFGKPLGEIFYLSQMV

SEQ ID NO: 214957 - protein, 81 aa, Glycine max
  Clone ID: PAT_MRT3847_36131C.1.pep
CVFGGWVFLHSQAGFHVRGCHTPNGNGGPPTAVWGENYIGQFGWGHAGGSSAVGFYNTPRRVRRGRPPPPNLAIGSIFNYH

SEQ ID NO: 214958 - protein, 51 aa, Glycine max
  Clone ID: PAT_MRT3847_36132C.1.pep
KLHGTIPNPKLWQGRFSFPWVYTPLGPFWFPRINRTKFFFPKTTRGITETL

SEQ ID NO: 214959 - protein, 83 aa, Glycine max
  Clone ID: PAT_MRT3847_36133C.1.pep
KWQRKRVGKTDRHPPDDPRLCQRKWPPQVKPFAKHKLYSSRMRRKHGPKRMTEQSSPRREPEPRPRAQAAKRGRIAEHPIQGQ

SEQ ID NO: 214960 - protein, 85 aa, Glycine max
  Clone ID: PAT_MRT3847_36134C.1.pep
ALFRVSALLTLVYLFLLLPCIINSLTLKPSQTIHFSAYFLFLTKNEELMESIRRISKKLHKRPILKITDFSPPKKKEKYKFRARA

SEQ ID NO: 214961 - protein, 49 aa, Glycine max
  Clone ID: PAT_MRT3847_36135C.1.pep
PYTILNNDNFKTPNRSVNPKELTLKDLCLTPLSTPSNYLHSTTDCSTAA

SEQ ID NO: 214962 - protein, 87 aa, Glycine max
  Clone ID: PAT_MRT3847_36136C.1.pep
KTKDCFEVYALVPALLRKKGGVQSDPAERLVIIGKPKNFANPWGGPPFKKVVSFPSRIDTHQRWAVVPWNGQLFVQVPFEAPQNKKG

SEQ ID NO: 214963 - protein, 64 aa, Glycine max
  unsure (1)..(64): unsure at all Xaa locations
  Clone ID: PAT_MRT3847_36137C.1.pep
LVISESRSDALVHIAALAIRSENGLLLXKGGTXSRRSYAVLLKVITSVMPDTLGDRLIGLVISR

SEQ ID NO: 214964 - protein, 131 aa, Glycine max
  Clone ID: PAT_MRT3847_36138C.1.pep
QKGQGNKKGRAKGKGSKKGQKFLKTGPGPRPLEGWGVKPQQKKKNSLFCPGPMVPRPQKPKKKPGGKVPGPKKPPPPIIKGGVKKKEKKTPPQTTFGGPKNQIHPSHFGNPPGWPNWPGFPGWPNWPGFPG

SEQ ID NO: 214965 - protein, 293 aa, Glycine max
  unsure (1)..(293): unsure at all Xaa locations
  Clone ID: PAT_MRT3847_36139C.1.pep
LESGFCPSNTSFFYLKVLTLNSLGVLVESHVDLGFLLQALTPSWNSVPLLVGFFTYLAVAGSILPGKLVPGVALLDGTRLHYCCNGLLSLLLLVALLGIGAKMGFVSPTAISDRGLELLSTTFAFSFLVTLILHFSGCKSQSKGSSLKPHLSGNLIHDWWFGIQLNPQFMGIDLKFFFVRAGMMGWLLINLSILMKSIQDGTLSQSMILYQLFCALYILDYFVHEEYMTSTWDIIAERLGFMLVFGDLVWIPFSFSIQGWWLLMNSVELTPAAIEAYCFGYLIGXMVFRGANK

SEQ ID NO: 214966 - protein, 349 aa, Glycine max
  Clone ID: PAT_MRT3847_3613C.1.pep
MKQSTLFLFLFLFPLVHALSYEAAYIRDGLKSYSQLDLPHSVFGSESVAFDCHGKGPYVGVSDGRILKWQETKREWIDFAVTSPHRNKKLCDGLQNDKMESMCGRPLGLKFNTVTCELYIADAYFGLLVVGPSGGVAKQLATSAEGVPFRFTNALDIDTKTGEVYFTDSSILFQRRVYISIILSGDRTGRLLKYVPSTQSVHVLVKGLAFPNGVALSKDNSFILVAESTTFKILKIQLRDSKTNNNNNIEPFAQVPRSPDNIKRNNKGEFWVAQNSGRGLIQKLGNEIETTLPWNADPVAIKFDEKGRAIVVLDGEYGRQLDSVSEVEEHEGSLWIGSAVQPFIGLIKA

SEQ ID NO: 214967 - protein, 127 aa, Glycine max
  Clone ID: PAT_MRT3847_36140C.1.pep
VHVQESRWNCGSELRWILWPLKPARVVPTRWLPLCFQFFPARALVSSFLRLKGHRFRTRPQLGHQLNHLVLMSVESETGSFRDSETRNNLRRILESCSKLAEAGDFHESENTAVSELVEFLDSLLDA

SEQ ID NO: 214968 - protein, 43 aa, Glycine max
  Clone ID: PAT_MRT3847_36141C.1.pep
SSLHCEATLTMISDHSFVASKVNIVSLGILNSEVVISFGAFRS

SEQ ID NO: 214969 - protein, 78 aa, Glycine max
  Clone ID: PAT_MRT3847_36142C.1.pep
GGGPKKKIFFPPQRGSFPFQTLPENWKALLKDGGSTKKNGEKSRRPPLGILLNWGGGLVSKLPVPTPPLEAWVPKFFS

SEQ ID NO: 214970 - protein, 96 aa, Glycine max
  unsure (1)..(96): unsure at all Xaa locations
  Clone ID: PAT_MRT3847_36143C.1.pep
MESREGKSISDLEEEFFHKFRDFMTGITNIDELGIAGSKLLSGFQQTLEFIKRPPIDMNSKLVHNIIVANETERVKAYINSGCXKLNESIHTTYLH

SEQ ID NO: 214971 - protein, 57 aa, Glycine max
  Clone ID: PAT_MRT3847_36144C.1.pep
QITVSLTSSIQASKVLISTSVSFRSFELLFFAISFKSGIIEVKPCASSGSLSDKSDN

SEQ ID NO: 214972 - protein, 118 aa, Glycine max
  Clone ID: PAT_MRT3847_36145C.1.pep
SSLQYYVTGCICIYNGNSFSIFLPNAFKHYETTTHYFLCIANDSSLHIDKTPPAVFIAGLSAQQTSESPHNSMQMDLSIQCPAKLLPLYLLLDFLFSSHANRSYPPVLLVPISLLNFS

SEQ ID NO: 214973 - protein, 71 aa, Glycine max
  Clone ID: PAT_MRT3847_36146C.1.pep
YVFHERLYYLNPTQNGHQKRRQEFNHETYRNIPHSPALEWVKVSLPSLCFWGLGNEEETRENDIGRTEYNN

SEQ ID NO: 214974 - protein, 78 aa, Glycine max
  Clone ID: PAT_MRT3847_36147C.1.pep
RAFYVINQLATSSTLSTQASIHIMSKDNLVIYDVMIPFDMVDKHTGFRHVLLREKSEAPLSTLVISPGGLIINMGNKS

SEQ ID NO: 214975 - protein, 78 aa, Glycine max
  Clone ID: PAT_MRT3847_36148C.1.pep
LWCPLVCLWWFGRWPGRFLCLRCWGCSCWWRRRRPCFGWWRAPRSAFRWCLGPCAHSCPPCFRWRRLLLPLGFVVFAG

SEQ ID NO: 214976 - protein, 127 aa, Glycine max
  unsure (1)..(127): unsure at all Xaa locations
  Clone ID: PAT_MRT3847_36149C.1.pep
MDGRNGSGSRRSGEAGGMGKAIIALVIGSLVYYHCAYRNSTLVSLFSDVFIVLLCSLAILGLLFRQMGIQXSANAIVAWLANTIGGAESVFRVAATGHDKRLFLKVILSLYLFSALGRLARGITVAY

SEQ ID NO: 214977 - protein, 121 aa, Glycine max
  Clone ID: PAT_MRT3847_3614C.1.pep
RLCFPPPGELNLGCAIGPPPLRRGGYLGLGPGPPFSPLVWGGVLGFAPGLAVDPAVLLSVPFLPRGFEQDPVLPFFSPPPPRVCFLYSFYSPFSLPPSRAFFFPPVNKKNVNKTIKAKKNT

SEQ ID NO: 214978 - protein, 173 aa, Glycine max
  Clone ID: PAT_MRT3847_36150C.1.pep
MDGRNGSGSRRSGEAGGMGKAIIALVIGSLVYYHCAYRNSTLVSLFSDVFIVLLCSLAILGLLFRQMGIQVPVDPLEWQISQESANAIVAWLANTIGGAESVFRVAATGHDKRLFLKVILSLYLFSALGRLARGITVAYAGLCLFCLYIFAECSQSITFFGRTTETEEQDTII

SEQ ID NO: 214979 - protein, 372 aa, Glycine max
  Clone ID: PAT_MRT3847_36151C.1.pep
MGIIEKIKEIEAEMARTQKNKATEYHLGQLKAKIAKLRTQLLEPPKGSSGGGEGFEVTKFGHGRVALIGFPSVGKSTLLTMLTGTHSEAASYEFTTLTCIPGIIHYNDTKIQLLDLPGIIEGASEGKGRGRQVIAVAKSSDIVLMVLDASKSEGHRQILTKELEAVGLRLNKRPPQIYFKKKKTGGISFNSTLPLTHVDEKLCYQILHEYKIHNAEILFREDATVDDLIDVIEGNRKYMKCVYVYNKIDVIGIDDVDRLARQPNSVVISCNLKLNLDRLLARMWDEMGLVRVYTKPQGQQPDFGDPVVLSADRGGCTVEDFCNHIHRSLVKDVKYVLVWGISARHYPQHCGLSHNLRDEDVGHLYFFVTQVL

SEQ ID NO: 214980 - protein, 64 aa, Glycine max
  Clone ID: PAT_MRT3847_36152C.1.pep
ISGAHRVHVLHFLDQRATACCIYVKTISTLIVSFRSGAPPHGGSRLRVDRVGLLFCGLYSIRKT

SEQ ID NO: 214981 - protein, 85 aa, Glycine max
  Clone ID: PAT_MRT3847_36153C.1.pep
KHFSPMDRLVSKVHARLKIRLPKHAQLFTGPGFIYLPRNINFLALSTGVFQNLIFIGNHDVNAPRLFPKDLVLTMLCREKVPSKY

SEQ ID NO: 214982 - protein, 100 aa, Glycine max
  Clone ID: PAT_MRT3847_36154C.1.pep
QPDFGDPVVLSADRGGCTVEDFCNHIHRSLVKDVKYVLVWGTSARHYPQHCGLSHNLHDEDVVQIVKKKEKEEGGRGRFKSHSNAPARISDREKKAPLKT

SEQ ID NO: 214983 - protein, 49 aa, Glycine max
  Clone ID: PAT_MRT3847_36155C.1.pep
ENECSIFTSVIENVITCTERNYQKLKNYKDSENPKRINWITFHGKKTLI

SEQ ID NO: 214984 - protein, 93 aa, Glycine max
  Clone ID: PAT_MRT3847_36156C.1.pep
MVLLEKLWDDVEAGRQPERGLGELTKLTTLNTIDEGESSTLQKTMPRRWPLHLRGRRRRLRRLCHHRLHHATGKIAWHHVSNSPHKYHTVLRC

SEQ ID NO: 214985 - protein, 38 aa, Glycine max
  Clone ID: PAT_MRT3847_36157C.1.pep
SRLECSFSKLRGKNLILEFINRKVSILNDKKQQNTNRH

SEQ ID NO: 214986 - protein, 38 aa, Glycine max
  Clone ID: PAT_MRT3847_36158C.1.pep
IGSAVRANTKQHLSIRRCKPESTVPTYSPKTQLGCFFS

SEQ ID NO: 214987 - protein, 82 aa, Glycine max
  unsure (1)..(82): unsure at all Xaa locations
  Clone ID: PAT_MRT3847_36159C.1.pep
MAAAASMCMSFNMATAFKGLSXSSSSSSFYAGRSSYALRVGTTSVVSLNRRCTLSIENAYTKGVGSTMNGCDSHGKRLVVKI

SEQ ID NO: 214988 - protein, 318 aa, Glycine max
  Clone ID: PAT_MRT3847_3615C.1.pep
MLGSRFCVRTVSGVGSAAADHTNAASTARSVPSSVAVDFSPLHLSPFRSRRRRSILISCDSSRRRSSSGDSHDNNNDYLEASLLLSETFSHYHMWKHRFQPEFQWKSSTPSIPLSRTDNTLLRHGFLQRFKNPTIFLRISCDGDYILPIVVGQIAIEKLMDAESEHESVECPDQYQFVENLVGRLDHEVIMVRITERVVSTYFARLYLSQPGKTDLISVDARPSDAINVANRCKAAIYVSKEIVFTDAIRIGYGMGGVCNKKTIYDVLLDSAVDGPDLVAQELSMMHNMRIAIKQERFKDAAIWRDKLANLRKSAHEL

SEQ ID NO: 214989 - protein, 48 aa, Glycine max
  unsure (1)..(48): unsure at all Xaa locations
  Clone ID: PAT_MRT3847_36160C.1.pep
FYARSTSMGWWIXRXTLFRELYFPXPLLXSKXQASSELLHXGXPPXLX

SEQ ID NO: 214990 - protein, 47 aa, Glycine max
  Clone ID: PAT_MRT3847_36161C.1.pep
REDLKRNLLQKKKISTDNLFHLIATSVIVSLKHVFQESNQFVDFLAK

SEQ ID NO: 214991 - protein, 71 aa, Glycine max
  Clone ID: PAT_MRT3847_36162C.1.pep
SCDPNKRHTILLEHIEPICKVLLLNSYKGKQTHNICFFSPSVFHECYNNLVPHIFQDETRPETWTAHLNSR

SEQ ID NO: 214992 - protein, 42 aa, Glycine max
  Clone ID: PAT_MRT3847_36163C.1.pep
NMEISLSDSVHLCSIDYELAFFMKMIMLVEELSFLDYAISYG

SEQ ID NO: 214993 - protein, 47 aa, Glycine max
  Clone ID: PAT_MRT3847_36164C.1.pep
SDWNLDFLYFKGSKIRNKFVYLTHKLLDNCFKVNQFYLELTPLGSNM

SEQ ID NO: 214994 - protein, 37 aa, Glycine max
  Clone ID: PAT_MRT3847_36165C.1.pep
LTARRKRIINSLISMQIYPNLPIEKLQLQIQQCLENV

SEQ ID NO: 214995 - protein, 51 aa, Glycine max
  unsure (1)..(51): unsure at all Xaa locations
  Clone ID: PAT_MRT3847_36166C.1.pep
WQEVADFGLAKQSMEGQSHLTTLVAGTHGYLTPKYALYGXLTEKSDVYSFG

SEQ ID NO: 214996 - protein, 57 aa, Glycine max
  Clone ID: PAT_MRT3847_36167C.1.pep
VRNYWDRKLQLTDFKWLTHIHPFLNPILRFQALTNSNLTRLPLKEKVFEEFWQILKP

SEQ ID NO: 214997 - protein, 68 aa, Glycine max
  Clone ID: PAT_MRT3847_36168C.1.pep
SLHVATLVADPACKLRFFHQAGSSQVFKSERLALSIRRCNAGFNGPLPAGSKHSVLGRSQPTCPRKCR

SEQ ID NO: 214998 - protein, 78 aa, Glycine max
  unsure (1)..(78): unsure at all Xaa locations
  Clone ID: PAT_MRT3847_36169C.1.pep
IQGITKPAIKXNRPNSGGDKRNSGLIXEETRGGHKTILENVIRDAGPNTEHARRKTVPAMEDVYAPKRQGRTPYGLGG

SEQ ID NO: 214999 - protein, 108 aa, Glycine max
  unsure (1)..(108): unsure at all Xaa locations
  Clone ID: PAT_MRT3847_3616C.1.pep
PRVRPRVRAQMQIFVNSLTGKTIRLXVESYDTIDNVKAKIQDKEGIPPDQQRLIFAVKQLEDGQTLADYNIQNESTLHLVLPLMGGMQIFVKTLTGKTITLKVESSDT

SEQ ID NO: 215000 - protein, 107 aa, Glycine max
  unsure (1)..(107): unsure at all Xaa locations
  Clone ID: PAT_MRT3847_36170C.1.pep
MDGRSTSGYCVLLXGNLISWRNKKQNIVARFSIKAXHCAMVAATCEITRLRHSXDTKLICDNQTALHIASNMVFHEQTKHTXIDCHFARVKVLSGEIMTDFVGSNEQ

SEQ ID NO: 215001 - protein, 57 aa, Glycine max
  Clone ID: PAT_MRT3847_36171C.1.pep
VVYDYKSMCSVVSMENVSVSEVVFLGLSYDMIFINTRYKWMRVVCHRNCLNDRRIRH

SEQ ID NO: 215002 - protein, 99 aa, Glycine max
  Clone ID: PAT_MRT3847_36172C.1.pep
KSTTQTYSLLVVPLCLTSPTWPPWVGLPPHINAYLSLSARPSVETWHPTHYQFLAYFPLTPPSFPRFPYSFLSTSTYTPPLLSVCGGPPPPPPTPKRQE

SEQ ID NO: 215003 - protein, 172 aa, Glycine max
  Clone ID: PAT_MRT3847_36173C.1.pep
EDAMPVSSSKPSTRGRKGSSGASQTTTRGRGRGRGRGRGSSTMKQTTIDGALGFRVSQRSASVAAATAIRSGADDDNLASASSDDANKNDVEEIDDSSENESNLPGQKRAASKGRGRGSTQSSKRGRKSDNSSIHRMLVNNDDDDDDDDTDIRKRLNKSQPRVTKSYGALRR

SEQ ID NO: 215004 - protein, 77 aa, Glycine max
  Clone ID: PAT_MRT3847_36174C.1.pep
WTDTCTVSTSGTQLIYIIKFADKKKYIYIYINLKVKLKDYIKVKLDNLTLCFGWKVALVVVWSPLGQCLRKDYLQRG

SEQ ID NO: 215005 - protein, 386 aa, Glycine max
  Clone ID: PAT_MRT3847_36175C.1.pep
RRNMYSRGSGGYGQSYTGQSAYGQNLGGNYSGSSVGGHDVGQHSVASRHSTILGGSQDVDVGGYRPSAATQYGGQYSSVYGSAALSSAQQVPSLSTKGSASSALDGRGGYALGVSDSPKFASGDYVSSSSHGYGHKSDQLYGDKGLEYSGIDRRQYGERQSGYLGRDLTSDPAGRYAADPVGFSHQRQQSEIYDRIDQAALLRQEQLLKAQSLQAASLDGGARQADYLAARAAATRHPTQDLVSYGGRMDSDPRASSMLSATSYSGQHAPSILGAAPRRNVDDLLYSQNASNPGYGVSLPPGRDYASGKGLHGNAMELDYPGNVLPHGGHTDRKDDRASYLREFELREEERRRERLRERERDREKEKERERLRERERERERERDRI

SEQ ID NO: 215006 - protein, 38 aa, Glycine max
  Clone ID: PAT_MRT3847_36176C.1.pep
LKNLFWRKLSSSFFMVISYQHNSYLFHTKTVVTIRIVI

SEQ ID NO: 215007 - protein, 103 aa, Glycine max
  unsure (1)..(103): unsure at all Xaa locations
  Clone ID: PAT_MRT3847_36177C.1.pep
SKTAEPELAVNNKGAYTYAKQLDEKGKAPXDANKPNRPSSAFYGFMDEFRKVFNKQHPEHKSLSAWSKLLRAKLDTMSDAEKAPYVAKCVNRKVVYQMNMTAY

SEQ ID NO: 215008 - protein, 143 aa, Glycine max
  Clone ID: PAT_MRT3847_36178C.1.pep
NNVTVNGQPISDCMIKKAEKLAGPIQPGNYWYDSRAGFWGVMGGPCLGIILPFIEEFRHPMPDKCAGGNTGVYVNGRELHQKDLDLLSRRGLPRDSNRYYIVEISGRVQDEDTGEDLDSLGKLAPTVEKERRGFGMKVPRAAA

SEQ ID NO: 215009 - protein, 58 aa, Glycine max
  unsure (1)..(58): unsure at all Xaa locations
  Clone ID: PAT_MRT3847_36179C.1.pep
XKTTLITSVENQQLLGSVVIQSKSIFHWITTXPRSCWLSPVAVGVFCTSCRLPRFRSR

SEQ ID NO: 215010 - protein, 40 aa, Glycine max
  Clone ID: PAT_MRT3847_3617C.1.pep
RFFLRIIKVIVEKCFFFFDQCFFYIILKCSVSINFNLVFL

SEQ ID NO: 215011 - protein, 57 aa, Glycine max
  Clone ID: PAT_MRT3847_36180C.1.pep
HRLRLYFLTMWNWNSPRDSDLMSFGFRIGLISKHMIPIHICTFMHPYFLAIRNSHSP

SEQ ID NO: 215012 - protein, 51 aa, Glycine max
  Clone ID: PAT_MRT3847_36181C.1.pep
INFFLNLCFTNLTIWRSFYLIIVLFYGLFGCQIPCFATGIQGKCIILLLLY

SEQ ID NO: 215013 - protein, 256 aa, Glycine max
  Clone ID: PAT_MRT3847_36182C.1.pep
FQKRQYMMNGSGGFMMLTLKSGGFPVEVNTQKLKRTDSRQTGVFSVERFITYSVVGMQRLLSLKITKVIKAEKVNIVNLSFAEKSGKSSLANLKLQIIRNDRYGVLCFMDNELSGSYELRKINYCVPALDTEIVCYVCRESGDRSCFTLEKKKANDYSNVVERVKGTHSFVVGDETLNVKVKITNDSRVGLRVDVDGPVKVATDYSEYVLEKIQEKINGETEASAMLHFGNSTDQPPYVTNSGRSCYKMKLSLPNE

SEQ ID NO: 215014 - protein, 109 aa, Glycine max
  unsure (1)..(109): unsure at all Xaa locations
  Clone ID: PAT_MRT3847_36183C.1.pep
MHISRDNPNWRRLYPSEVESSDTFDNXVNANIHDREGMPLDQHRLILTVXQMKDGRTFADYIIQNESALDLVLLLRGGATKRMRNTYTEPCRIKRMHTHSLAKSFFSST

SEQ ID NO: 215015 - protein, 137 aa, Glycine max
  unsure (1)..(137): unsure at all Xaa locations
  Clone ID: PAT_MRT3847_36184C.1.pep
SSEFGSSSSQSLLTFLVMFYALAVITFGTAVPAGQFVPGIMIGSTYGRLVGMFVVKYYRRLNIEEGTYALLGAASFLGGSMRMTVSLCVIMVEISNNLKFLPLIMLVLLISXXCCDAFXESIYXEQAQLRGIPLLEI

SEQ ID NO: 215016 - protein, 87 aa, Glycine max
  Clone ID: PAT_MRT3847_36185C.1.pep
CSLGKGGAQSLMFLLVMIIPPVRSISIGFMWEASLRCKSLIEVAVGLVTRDAVIRARAIALQEAFCGRRLKVMLVCAADSMCWTDPP

SEQ ID NO: 215017 - protein, 144 aa, Glycine max
  unsure (1)..(144): unsure at all Xaa locations
  Clone ID: PAT_MRT3847_36186C.1.pep
NIFGSKPDEFAEDKQNLFDIIQMYHQLKARQLSVQSDANSLITYPEYILPYLVHALAHNSCPNVDDCEDVGAYDDIYRQLHLILSMLLQREEDAXSEVTTDKEKEPISTITSIFLSIKHSEDMGDTSKSKNSHALCELGLAITK

SEQ ID NO: 215018 - protein, 236 aa, Glycine max
  Clone ID: PAT_MRT3847_36187C.1.pep
MATQMSKKRKFVADGVFFAELNEVLTRELAEDGYSGVEVRVTPMRTEIIIRATRTQAVLGEKGRRIRELTSVVQKRFKFPENSVELYAEKVNNRGLCAIAQAESLRYKLLGGLAVRRACYGVLRFVMESGAKGCEVIVSGKLRAQRAKSMKFKDGYMISSGQPVKDYIDSAVRHVLLRQGVLGIKVKIMLDWDPKGKQGPKTPLPDLVTIHSPKEEEEYIQPAPVLAANDIEVPVA

SEQ ID NO: 215019 - protein, 239 aa, Glycine max
  Clone ID: PAT_MRT3847_36188C.1.pep
MATQMSKKRKFVADGVFFAELNEVLTRELAEDGYSGVEVRVTPMRTEIIIRATRTQAVLGEKGRRIRELTSVVQKRFKFPENSVELYAEKVNNRGLCAIAQAESLRYKLLGGLAVRRACYGVLRFVMESGAKGCEVIVSGKLRAQRAKSMKFKDGYMISSGQPVKDYIDSAVRHVLLRQGVLGIKVKIMLDWDPKGKQGPKTPLPDLVTIHSPKEEEEYIRPAPVLAANNDIEVPVPVA

SEQ ID NO: 215020 - protein, 235 aa, Glycine max
  unsure (1)..(235): unsure at all Xaa locations
  Clone ID: PAT_MRT3847_36189C.1.pep
MATQMSKRKFVADGVFFAELNEVLTRELAGDGYSGVEVRVTPMRTEIIIRATRTQAVLGEKGRRIRELTSVVQKRFKFPENSVELYAEKDNNRGLCAIAQAESLRYKLLGGLAVRRACYGVLRFVMESGAKGCEVIVSGKLRAQRAKSMKFKDGYMISSGQPVKDYIDSAVRHVLLXQGVLGIKVKIMLDWDPKGKQGPKTPLPDLVTIHSPKEEEEYIQPAPVLAANDIEVPVA

SEQ ID NO: 215021 - protein, 355 aa, Glycine max
  Clone ID: PAT_MRT3847_3618C.1.pep
MEKEESTEQRKQARLAIMELANMISVPMALNAVVRLNVADAIWQGGANNPLSAAEILPRLLPAGGGDAENLQRLLRMLASYGVFYEHLSAGERKYSLTDVGKTLVTDEQGLSYAHYVLQHHQDALMRAWPMVHEAVVDPTKEPFERANGEPAYGYYLKHPEMNDLMVRAMSGVSVPFIRAMLEGYDGFQGVEKLVDVGGSGGDCLRMILEKHPTIKEGINFDLPEVVAKAPQIPFVTHVGGDMFKFIPQGDAIFMKWVLTTWTDEECKHIMQNCHKALPEGGKLIACEPVLPEDSDESHRTRALLEGDIFVMTIYRAKGKHRTEEQFRQLAIDAGFPRFRAFHVDHFYTVLEFQK

SEQ ID NO: 215022 - protein, 236 aa, Glycine max; identical to SEQ ID NO: 215018
  Clone ID: PAT_MRT3847_36190C.1.pep

SEQ ID NO: 215023 - protein, 175 aa, Glycine max
  Clone ID: PAT_MRT3847_36191C.1.pep
MPLHIAMLPWLAVGHVNPYLELSKILAQKGHFVTFISTPKNIDGMPKIPETLQPSIKLVRLPLPHTDHHHHLPEDAESTMDIPSNKSYYLKLAYEALQGPVSELLKTSKPDWVFYDFATEWLPPIAKSLNIPCAHYNLTAAWNKVFIDPPKDYQLNNSITLQDMCLPPTWLPFTT

SEQ ID NO: 215024 - protein, 102 aa, Glycine max
  unsure (1)..(102): unsure at all Xaa locations
  Clone ID: PAT_MRT3847_36192C.1.pep
LVYQDLLTGDELLSDSFRYKEIENGMLREVEGKWVVKGALDTHNGAKPXSGEGGREDEGVDDAAXVRVVAMVDAFLLQEHAGCAAMQTVTFMDKSSIKFTGP

SEQ ID NO: 215025 - protein, 141 aa, Glycine max
  Clone ID: PAT_MRT3847_36193C.1.pep
ATSTLLQKIIREPHGWLMDPPPGLMASLSKDIMRILMVIILGPTNPPYKGGVSKWNYFWPKKYPRVAPKVRFLPKLYNPTMVNLARICLDILKNNGSPALGIPTGLLNIQASLRAPTQENPLPETFAKHLKSNEGQVVETA

SEQ ID NO: 215026 - protein, 74 aa, Glycine max
  Clone ID: PAT_MRT3847_36194C.1.pep
PNDSGLSLFFFVTLFTCLLSATSHYDHIFLPRRLHEDDSGSCTDSDPHLRYQAPIQINTHTDDADSKTIHNETG

SEQ ID NO: 215027 - protein, 75 aa, Glycine max
  Clone ID: PAT_MRT3847_36195C.1.pep
REAWQSKTSLARRLEKRRVAWIWLEAFTASLFPLSSRGPASPIALARFHPTHSSYAADVLIPSLFSLQFPNALER

SEQ ID NO: 215028 - protein, 106 aa, Glycine max
  Clone ID: PAT_MRT3847_36196C.1.pep
MVGKAVPEVVLNSGHSMPMLGFGTAGVPLPPLDELVPVFVVAIEAGYRGGDTATLYGSEEALGLALAQAQRQGLIKNRGEIFVTTKLWCSDSHPDLVLLALKKSLQ

SEQ ID NO: 215029 - protein, 38 aa, Glycine max
  Clone ID: PAT_MRT3847_36197C.1.pep
KKKKKKKKKKKKKKKKKKKKKKKKGRPAKLGNLVKPGK

SEQ ID NO: 215030 - protein, 103 aa, Glycine max
  Clone ID: PAT_MRT3847_36198C.1.pep
ASSSYLDRTVQGPVTRQWPMYIAPVIGTKWWKNRETSEVYGGVLVANAKAYTWLIVILVIVSNNNNNDETATTKCKHATKLASTVGIVVLFLGVVSNCVDVPV

SEQ ID NO: 215031 - protein, 32 aa, Glycine max
  Clone ID: PAT_MRT3847_36199C.1.pep
VYHGELQKFNHLSIMKIAFCLKVLLTKLKMYA

SEQ ID NO: 215032 - protein, 280 aa, Glycine max
  unsure (1)..(280): unsure at all Xaa locations
  Clone ID: PAT_MRT3847_3619C.1.pep
SPLRSRRRFRCRRSILISCNSSRRRSSSDNSHDNNNKNDYLEASLLLSETFSHYHMWKHRFQPEFQWKSSTPSIPLSRTDSSLLRHGFLQRFKNPTIFLRISCDGDYILPIVVGQIAIEKLMDAESEQESXECPDQYQFVENLVGRLDHEVIMVRITERVVSTYFARLYLSQPGKTDLISVDARPSDAINVANRCKAPIYVSKEIVFTDAIRIGYGMGGAHNKKAIYDVLLDSAIDGPDLVAQELSMMHNMHSAIKQERFKDAAIWRDKLANLRKSTHEL

SEQ ID NO: 215033 - protein, 150 aa, Glycine max
  Clone ID: PAT_MRT3847_361C.1.pep
ARGVHGLEMALDEISHDLAVSGGRVSNIDATEDTCCKLPGTDFLSSKFWKKTEGRYSTSRFSLGSIPSTDAVHIATNKDGKREILTANNNRLQHGKGGYFVNPSAEVQSDLKGHHTYKVSKNMVQDAMRRYDGIQPATESLRNQNIRSSV

SEQ ID NO: 215034 - protein, 35 aa, Glycine max
  Clone ID: PAT_MRT3847_36200C.1.pep
CYVGSEKKKKKKKKKKKKKKKKKKKKKKKKKKNKI

SEQ ID NO: 215035 - protein, 111 aa, Glycine max
  unsure (1)..(111): unsure at all Xaa locations
  Clone ID: PAT_MRT3847_36201C.1.pep
HPRLLFLFSXYIXFFSHLKISXFHINLPYINFFFSATNKNAAKCTHTLATLSQPPPRPLSWDSHLLMLNFMLLKSLSPLKTIATNIDQTSPSTPSLPTKLFLYQTSNRDTP

SEQ ID NO: 215036 - protein, 60 aa, Glycine max
  Clone ID: PAT_MRT3847_36202C.1.pep
SDIICFEVRRSIDFLSQLLTALEFTEIRKCDCHFNFRECMLDDCLDECELVRMSMNLKSN

SEQ ID NO: 215037 - protein, 63 aa, Glycine max
  Clone ID: PAT_MRT3847_36203C.1.pep
SPIQRKKASKKVMNAKNKSKLFDTHAYTSIYIVYLDSNFTSWGTSTFFLLLRITPPCEYTHSI

SEQ ID NO: 215038 - protein, 100 aa, Glycine max
  unsure (1)..(100): unsure at all Xaa locations
  Clone ID: PAT_MRT3847_36204C.1.pep
TGHNNILAYSCLVLGVSKPVQNNVLDLQESVGPFRFLPDFLISHALLYMKLGTMASIFLHHLMSRNTRKNVKENPLPLPPSPGERTKRXKRPPEVMQAYV

SEQ ID NO: 215039 - protein, 269 aa, Glycine max
  unsure (1)..(269): unsure at all Xaa locations
  Clone ID: PAT_MRT3847_36205C.1.pep
MFQTKMASNSLHYSIQHHQHSLTKRHHPSDTPPPTSLFLKPPTPPIHHNITLSHTXSNSYITYSISQTTPSSTTSPTTPSFDLLRHHLSNKNFELADEETRRLLIVLAGEAAQKRGYVFFSEVKFISEGGLRAIDSLWREYSGGKFGYSVQKKLLEKANGDFTKFFIKVGWMKKLDTEMEQYNYRSFPTEFIWELNDDTPEGHLPLTNALRGTQLLNNVLKHPAFDVVDDKEEKEKDGENKENGGAISATGLKDNGSSSKRIFKTDYSF

SEQ ID NO: 215040 - protein, 100 aa, Glycine max
  unsure (1)..(100): unsure at all Xaa locations
  Clone ID: PAT_MRT3847_36206C.1.pep
IKLGWMKKLDTEMEQYNXRSFPTEFIWELNDDTPEGHLPLTNALRGTQLLNNVLKHPAFDVVDXKEEEEDGETKDNGAITDNGSSSKTLGQRIFKPDYSF

SEQ ID NO: 215041 - protein, 71 aa, Glycine max
  Clone ID: PAT_MRT3847_36207C.1.pep
TLYYMANKRFKIKKFSHPFFWGGSKLYIYFRPDFFKLFHFTKFKDFCLRDFLSSPLGIVTYRVFFSTGFGF

SEQ ID NO: 215042 - protein, 70 aa, Glycine max
  Clone ID: PAT_MRT3847_36208C.1.pep
PWMHTVRWLPCMISSCFILQLLVPRTELFVLVYLPHNMIRNKLIKSVHVCIFLVRKIEVWRANSFFFLSA

SEQ ID NO: 215043 - protein, 47 aa, Glycine max
  Clone ID: PAT_MRT3847_36209C.1.pep
SNHHQMANMSLQRKYKIPRKTPSHKGNQITCLLFMSSSQSFQQKITT

SEQ ID NO: 215044 - protein, 163 aa, Glycine max
  Clone ID: PAT_MRT3847_3620C.1.pep
AVVPQSVSELYTRCEVEQQRSNEVILLIQDLLSYEDQHPHSLQTPLETLYQTLLYHRQYSACLQEMLSQCLLLTDEVKSQVDALLSENDELATMIELHSTIEKEIVYPKFTRLASRYRSLVQKQRLCDELNQRLQLLKQNSQQADSKADINTADTQLIHRHID

SEQ ID NO: 215045 - protein, 145 aa, Glycine max
  Clone ID: PAT_MRT3847_36210C.1.pep
MEGQTSDSLSKQQCLETTLTNELQNVEPPEMYGFDMQCIYRVPPAIRENNPKAYTPQMVSIGPFHKARDAGKEDSIFESMEDLKVKYLKAFLNRTQVPVGTFVDTLQNLEDEIRRCYAVHIKYNSDDFLKMILIDACFIIEHFLR

SEQ ID NO: 215046 - protein, 92 aa, Glycine max
  unsure (1)..(92): unsure at all Xaa locations
  Clone ID: PAT_MRT3847_36211C.1.pep
MKSTIFFALFLFCAFTTSYLPSAIVDFVLDNEGNPLEKGGPYYILSDITAXGGIRAAPTGNERCPLSVAHPRIDLDIGMGTLISSTYQMRFI

SEQ ID NO: 215047 - protein, 42 aa, Glycine max
  Clone ID: PAT_MRT3847_36212C.1.pep
IPLSLSLENPCFLRESRVSNSETQSSASKQTQESRWHVLFPH

SEQ ID NO: 215048 - protein, 151 aa, Glycine max
  unsure (1)..(151): unsure at all Xaa locations
  Clone ID: PAT_MRT3847_36213C.1.pep
SATFVQILPLHKMAHVMDSVRDKLGFDLHAVYAPLPWTLLNISAGMDTVSGHRRLLPRGLQNYLPPQGEISIVSHYLNGLGIVLALPATVTGALEYLGLVQGKNGQRFKSGAKQFDQNKSMESNKQTAKDLASREETKILGLATVHXLLNA

SEQ ID NO: 215049 - protein, 563 aa, Glycine max
  unsure (1)..(563): unsure at all Xaa locations
  Clone ID: PAT_MRT3847_36214C.1.pep
TDAIAPGSTPIHVPLFQPDRAAYASLKNYADALADAKKTVELKPDWSKGYSRLGAAHLGLSQYDDAILAYKRGLEIDPHNEPLKSGLADAQKALAAASRPRPSASNPFGDAFSGPEMWAXLTRSTPTTRAYLQQPDFVKMMQDIQRDPNNLNLHLKDQRIMQALGVLLNVKIQTPPTGADTDMPDSPSPSAAASERKRAAEAEPAKQPEPEPEPEPVPMELTGEEKDAEQKKAEALKEKEAGNAAYKKKDFDTAIQHYTKALELDDEDISYLTNRAAVYLEMGKYEECIKDCDKAVERGRELRSDFKMIARALTRKGNALVKMAKCSKDYESAIETYQKALTEHRNPDTLKKLNEAEKAKKELEQQEYFDPKLADDEREKGNEFFKQQKYPDAVKHYTESIRRNPKDPRAYSNRAACYTKLGAMPEGLKDAEKCIELDPTFVKGYTRKGAVQYFMKEYDKALETYREGLKYDSNNQELLEGIRTCIQQINKASRGDLSPDELKERQAKAMQDPEIQNILQDPVMRQVLIDFQENPKAAQEHTKNPMVMNKIQKLVSAGIVQMK

SEQ ID NO: 215050 - protein, 37 aa, Glycine max
  Clone ID: PAT_MRT3847_36215C.1.pep
VPRSHPQPAYACVDRMALITLTTLNLRTLYYTTPSSY

SEQ ID NO: 215051 - protein, 43 aa, Glycine max
  unsure (1)..(43): unsure at all Xaa locations
  Clone ID: PAT_MRT3847_36216C.1.pep
NXFLSSSFSLSXPXPMAKDREKKLYVAVLXNXAAEXKLLLXTL

SEQ ID NO: 215052 - protein, 71 aa, Glycine max
  Clone ID: PAT_MRT3847_36217C.1.pep
MHVYGSIEKQSEAEEELKEAFKLFDKDQDGYISPNGSLLSAMRNIGVKITEEELEHMIRLADLDGDGRVNY

SEQ ID NO: 215053 - protein, 51 aa, Glycine max
  unsure (1)..(51): unsure at all Xaa locations
  Clone ID: PAT_MRT3847_36218C.1.pep
FSQHGPPAICILSANGAISSVTLRQPYSYGGTLXEGQLEILALTVSYMPNE

SEQ ID NO: 215054 - protein, 169 aa, Glycine max
  unsure (1)..(169): unsure at all Xaa locations
  Clone ID: PAT_MRT3847_36219C.1.pep
IKLLTHMDLANVMTMKDIIHAPHKENFNDAXPLYPDVMDHRIVASNITTSCISRLMIIVLLSALMRAEALKYDTFNQMVTYPNLPPTDLLXNAKCDLNIDDFGLVRTTFXPDYMTAIDDTRWILTSKQLLNCEHYTKSIAICEXGCILGETITRPPLFPGENYDHKLTL

SEQ ID NO: 215055 - protein, 56 aa, Glycine max
  unsure (1)..(56): unsure at all Xaa locations
  Clone ID: PAT_MRT3847_3621C.1.pep
CMVSCVSTRINXLDDPLTSLGTRFELFFINLKSISPNFHNTGVTGRNSDANQTETY

SEQ ID NO: 215056 - protein, 127 aa, Glycine max
  Clone ID: PAT_MRT3847_36220C.1.pep
QHTNLQSHNFHIPNTTTTSTANNNISSSFLHHHQHPNKSMITSPFRDLHERTQPPSNAATSAHLSSTALLQKAATVGAAAITGPTHMTQLSMAELGTETTHLDSVPLPPDQRYMSMRGINSNNDGLT

SEQ ID NO: 215057 - protein, 138 aa, Glycine max
  Clone ID: PAT_MRT3847_36221C.1.pep
RPTRPDTLVTSNVLLGDDFEPRIADFGFRKFGRESATANCSTETDVYCFGVVLMELLTGRAGTAETVVWVRKAVREGHAVRALDERLKLGGGSGDSESEMVESLRVAYLCTAESPGKRPTMQQVLGLLKDIHPSHALD

SEQ ID NO: 215058 - protein, 46 aa, Glycine max
  Clone ID: PAT_MRT3847_36222C.1.pep
KYMDKWLQVHRLPTKLTYIYESHFLNPFKSELFSLTQESHQYFNLY

SEQ ID NO: 215059 - protein, 66 aa, Glycine max
  Clone ID: PAT_MRT3847_36223C.1.pep
GAVSMAKKSVGDLSAPDLKGKTVSGRVDLNGPLYDNQNISDDTRMRAAFPTIKHLIHNRAKDILSS

SEQ ID NO: 215060 - protein, 129 aa, Glycine max
  Clone ID: PAT_MRT3847_36224C.1.pep
TKKQGFPREKKKPTGNTQRKINPKQPLKKQRRTRGPLLNPIRKKNNAGPKKKKKAPIIKEQGENPGGERPARKKGSKKKGPKKTGVPKERALQAKLPGEQKQTGRPAPGAVNPFWGKAHPKSLGIKGAL

SEQ ID NO: 215061 - protein, 72 aa, Glycine max
  Clone ID: PAT_MRT3847_36225C.1.pep
GLINPMEDTLVLTAPSTTSIVLFFPGTLCCLHKLRLCDCFFSFKSDYYNWLRLWMMMMMVLAPSYLGCLMML

SEQ ID NO: 215062 - protein, 457 aa, Glycine max
  unsure (1)..(457): unsure at all Xaa locations
  Clone ID: PAT_MRT3847_36226C.1.pep
TRAHEAIRPTDIRKLPSMLSAILDEESLKLYTLIWSRTVSGEMGPAVFEQIQLDIGNPDESIILRSSSSRVEFPGYRAVFTDIVTEAVQDKDSDEFSRDQTFGVLNSLKTGDPLHVVQTEPNQHHTQPPPRYSEASLVKKLEELAIGSPSSXALHLYRFSGLTXVSGKCRALSPVFRGSMVSACPSLLASEVLDYGFTADMETELDNVSGGLTEWKGLLRDYWTRFKSYCERTSNVHIHQVEKMLEKKFGDYLFASLPDQSRVCPSCMEGTLIFKVSRFGAGYFIGCDQHPRCKYIAKTLYGTEEEEDASQPNSRVEEPKLLGVTSGSYEKVLLKSGPYGVYVQLGEDRKGYIPKRASVSHIKDVDSITLKDALEVLQYPLTLGNHPKDGQPVILKLARAGLCVRHRRTVASVPKNVKPSDVTLEKALEYLSGDDVRRSGRPKGKSKVQEVEVIEAF

SEQ ID NO: 215063 - protein, 71 aa, Glycine max
  Clone ID: PAT_MRT3847_36227C.1.pep
SLFGIFCYPISLLESFVLCFCGLQLLVILLSLFVQFEDLLQFLCYYSPVLFSCSAFIIVCSLVIAIVVQYL

SEQ ID NO: 215064 - protein, 68 aa, Glycine max
  unsure (1)..(68): unsure at all Xaa locations
  Clone ID: PAT_MRT3847_36228C.1.pep
ASLLKASPVLDKSEXVKGQTLRQPSASVVRFNPTTPSGLTISAGSYADEXVKIAKTVGSPRTGILAMD

SEQ ID NO: 215065 - protein, 66 aa, Glycine max
  Clone ID: PAT_MRT3847_36229C.1.pep
STYKAQVSAPSLFNIQVDPSALSLTSKGQKKSLFVIIEGTIDASIMFDTLILDFGKHQVKSPIVAF

SEQ ID NO: 215066 - protein, 107 aa, Glycine max
  Clone ID: PAT_MRT3847_3622C.1.pep
PKKCIPEFLVGHETRCYENFRMKKDVFMNFCETLKEVGNLCDGKKVNIEEAVAMFLIIICHNLCHRVVAERFQHSLRHRVPNYPKSSLQARHGHNPSKKSNKFTSSY

SEQ ID NO: 215067 - protein, 164 aa, Glycine max
  unsure (1)..(164): unsure at all Xaa locations
  Clone ID: PAT_MRT3847_36230C.1.pep
MDTLLEDVLVGPSQVPERLPIVALAQGDTAYKEPLPVLLMEPDAVDTWSLYXSAIAEVVVTLLFLDFTIATGMGVNTSPSEXTAVGILRMRWVHGGMTYASSRXSDGMSRLHILLAVTIGFSLARNLFLTRTVLYIIMHGVGAISGAGLVQAYEVKARHEMHKG

SEQ ID NO: 215068 - protein, 111 aa, Glycine max
  Clone ID: PAT_MRT3847_36231C.1.pep
KNIRLDAFWGGGPWVINSISQSRGGIQTLGFPQFRKRLWGFFFTKKKKIGNFSSNGERYKPRPSLFGRELYGAPIKGGPKLKRVKTPPPIGTKLFWGKPLFNPLRSQNSPL

SEQ ID NO: 215069 - protein, 76 aa, Glycine max
  unsure (1)..(76): unsure at all Xaa locations
  Clone ID: PAT_MRT3847_36232C.1.pep
NXXXXADXSXXPXAXHXXTXLXWQXXMARLVALQXXEISFSNLASSLSDFSGXRLETQIXXKRSXMXSKRVFLVXX

SEQ ID NO: 215070 - protein, 63 aa, Glycine max
  Clone ID: PAT_MRT3847_36233C.1.pep
VPSGFVALSYRTHTPKCVKSLHFFPHELQFPLIPLWCLYLMRSSPHYQHQRSLSQIFWPTSQV

SEQ ID NO: 215071 - protein, 69 aa, Glycine max
  unsure (1)..(69): unsure at all Xaa locations
  Clone ID: PAT_MRT3847_36234C.1.pep
KTGKHIDVNTWKXEFVKDLPVQKNGYDCGVFMIKYADFYSRGLELCFNPENMSYFRRRTAKEILRLKAE

SEQ ID NO: 215072 - protein, 63 aa, Glycine max
  Clone ID: PAT_MRT3847_36235C.1.pep
RYGDTILLAIGYGSGRLFGRMWDNGGKNAGGFNGEALFCVSVLRRDAERVGISYEGVSHKCTV

SEQ ID NO: 215073 - protein, 100 aa, Glycine max
  Clone ID: PAT_MRT3847_36236C.1.pep
HRNEGTGKCAGRMHERYLNQRCSPELRTEERCACRREKIFAHLQCRTEIEDLELIRGEENNKSRRQSGCNLKLPPNTLGMIHCPCLHPPSVPLSQLSDEP

SEQ ID NO: 215074 - protein, 166 aa, Glycine max
  Clone ID: PAT_MRT3847_36237C.1.pep
ILATSIVASGAYADDLDNSDGLIYTGQGGNVMNTDKEPEDQKLERGNLALKNSIEEKNSVRVIRGSESMDGKCRIYVYDGLYVVESCWQDVGPHGKLVYKFRLRRILGQPELALKEVKKSKKFKTREGVCVDDISYGKERIPICAVNTIDDENPPPFNYITSMIYP

SEQ ID NO: 215075 - protein, 59 aa, Glycine max
  Clone ID: PAT_MRT3847_36238C.1.pep
KKKKLFCNPRLWFMLTNLYFPGGWGFFNTLEPFSSLFIKAGGLILPSPGSLFCQKLRGG

SEQ ID NO: 215076 - protein, 74 aa, Glycine max
  Clone ID: PAT_MRT3847_36239C.1.pep
NRFSSSTILHWSLNHLKSHNLNCHDSNSKTTSQNPSNLFFQKGLRITTQISLCCTCLTRQAPPPYDGLNEKQKP

SEQ ID NO: 215077 - protein, 62 aa, Glycine max
  unsure (1)..(62): unsure at all Xaa locations
  Clone ID: PAT_MRT3847_3623C.1.pep
CYQWFLSLSQXTTYDRMMNSQTTPVRPILGLFIKLNTSVGVILTQEHKNRCTFYVEGGRAWG

SEQ ID NO: 215078 - protein, 623 aa, Glycine max
  Clone ID: PAT_MRT3847_36240C.1.pep
GCLGVGVMAVEVVGFEMVQGPVENGTGGKPVLNEKENGKLEKDVGAADAIKFGTHGEESAKTEGIDVSDVNAPKDAAEDWPAPKQIHSFYFVRWRPYDDPTIKSKIDLSDKDISKKNQARFQITEALKAKRSERAELISQVKSLRGDSRQFQSIVDEKLKEIGPLQQALGKLRTTNNAGRGGLCSSEDELNSVIYSLQYRIQHESIPLTEEKQILREIKQLEGTREKVIANAAMRAKLQESMGQKETIQDQVKLIGGDLDGVKKEREAIRSKIKQIDDALKAIDKDIQSLQEELTAVSQKRDKAFESMQQLRKQREEGNTYFYQSRTVLNKARELAAKKDINALDEVSQTEVEKFMALWNKDKAFRNDYEKRILASLDMRQLSRDGRMRNPDEKPILEEPKPAEAEALPKTFTKQPKEEPKPSPQETLPAQKESKNKGRDLKSKPESKDVAETDEYEFKNPQKEAPAKECEIDPAKLKEMKREEEIAKAKQALERKKKLAEKAAAKAAIRAQKEAEKKLKDREKKAKKKSGAAAVANPEDEPKDEVVEATEPEKVNDDVQVLAPVKEKVQKESGIRSRGRARGPDSIPKAIIKRKKSNNYLIWAAAAALLVLLLAVLGYIYLF

SEQ ID NO: 215079 - protein, 355 aa, Glycine max
  unsure (1)..(355): unsure at all Xaa locations
  Clone ID: PAT_MRT3847_36241C.1.pep
MARASSGLQYPERFYAAASYVGFDGSSPTKSLTSKFPQSTALLLYSLYQQASVGPCNITEPSTWKIVEHGKWASWNQLGNMSSTEAMRLFVKILEEEDPGWYSRLSNSVVEPVVDVQMNHNSKVEPVIENGNSYPETKTISISTQNGSEVGTQDKDTVVEGFGSVEVYDQWIAPPVSGGSPKARYEHGAAVVQDKLYIYGGNHNGRYLNDLHVLDLRSWTWSKIEAKTGVESPTTSIPCAGHSLIPWGNKLLSIAGHTKDPSESIQVKVFDLQMATWSTPKIFGKAPVSRGGQSVNLVGKTLVIFGGQDAKRTLLNDLHILDLETMTWXDEIDAVGGAAFSKSDHTAAVPVERYL

SEQ ID NO: 215080 - protein, 83 aa, Glycine max
  Clone ID: PAT_MRT3847_36242C.1.pep
LHVAVGTVAGGYGGGGGSGGGGAVEHGGRGYEDRAGGRACAGAGYASFRGVDSGGNKSNTDKPYGINGGMALRERADATCRRR

SEQ ID NO: 215081 - protein, 45 aa, Glycine max
  unsure (1)..(45): unsure at all Xaa locations
  Clone ID: PAT_MRT3847_36243C.1.pep
SQGFPTIIFRDXVIGLLGQRTKFGDLEPLRKLRKELLTHWDGLLT

SEQ ID NO: 215082 - protein, 90 aa, Glycine max
  unsure (1)..(90): unsure at all Xaa locations
  Clone ID: PAT_MRT3847_36244C.1.pep
EDNIKILSYAQLQELSPPGTMEHHXAHSLNPIHQTIPGTHQIEDMXHQNMERANQYYTDMADLDQQTMDALAPYIELHYNIFEYDTAPYA

SEQ ID NO: 215083 - protein, 156 aa, Glycine max
  Clone ID: PAT_MRT3847_36245C.1.pep
TILFSRTFNYCKSVRLYRFNWTVGHWCHVRTLLQVGLLGEQLEIYEEKSNSSIQWSPLGNTCNQTLTWYKTAFDSPKGDEPVALNLESMGKGQAWVNGESIGRYWISFHDSKGQPSQTLYHVPRSFLKDIGNSLVLFEEESGNPLHIFLDTISSTN

SEQ ID NO: 215084 - protein, 40 aa, Glycine max
  unsure (1)..(40): unsure at all Xaa locations
  Clone ID: PAT_MRT3847_36246C.1.pep
WILCCSSLLLFRSCPSIFSVSPSPPLCDANXPPWAVSLDA

SEQ ID NO: 215085 - protein, 144 aa, Glycine max
  Clone ID: PAT_MRT3847_36247C.1.pep
PWPQKLYSSFFVKTGTKSFSLWKKKRGTPKVTWWKGLKAPLPLWLGHRPSMLKCKKPNPPKLVYGFMWKAPPRVPRIIWNMFWRKSRGKLMVRLRLVPCSHFEKNPATPRMFGNPGDPGSKINYFFPKGNLPPLKKFGNLLPVP

SEQ ID NO: 215086 - protein, 44 aa, Glycine max
  Clone ID: PAT_MRT3847_36248C.1.pep
LQLLLSNNYAEAEGLDKEFFSSGKKKNGGFVGELDFTVGNGRLS

SEQ ID NO: 215087 - protein, 103 aa, Glycine max
  unsure (1)..(103): unsure at all Xaa locations
  Clone ID: PAT_MRT3847_36249C.1.pep
SFALASAHASVHSSGHSSGTVFLHLGGIECPKDENLPRRKYLDTSKTRCLTIVPMEVNHAARQKFLXYVRFTMKKRATLRWQAGINPYSMEWTGLANWFLDKG

SEQ ID NO: 215088 - protein, 120 aa, Glycine max
  unsure (1)..(120): unsure at all Xaa locations
  Clone ID: PAT_MRT3847_3624C.1.pep
GTPQIVVTFXVEALGILNVQAXVNGSGKSDKLSISYVNVRLSQPQIDRMVREAEEYAXEVNDVEDRIDAIGSLETYVYDIKHQIGVKVXLADKLXSDEKDNIETAVKQALEWLDHNQSVQ

SEQ ID NO: 215089 - protein, 75 aa, Glycine max
  unsure (1)..(75): unsure at all Xaa locations
  Clone ID: PAT_MRT3847_36250C.1.pep
FGEPTLQRVAIPRELGRTTGPTRRSTKGQWTPXEDDSLLHADARFQGKKRKQIALCCMDRTDVHCLHLWQKVLNP

SEQ ID NO: 215090 - protein, 54 aa, Glycine max
  Clone ID: PAT_MRT3847_36251C.1.pep
VCHYSRWISFRRSMNNTGRFRNMGDAVYGCRERKNPPFGSRQIRARSISTSRFG

SEQ ID NO: 215091 - protein, 68 aa, Glycine max
  Clone ID: PAT_MRT3847_36252C.1.pep
RVVRVLLQSAALSRFVTPLPLAPSPALVSMPLPSPSPFRYGFRRGSFERPSAWFNPRVEKAKFFLRQP

SEQ ID NO: 215092 - protein, 57 aa, Glycine max
  unsure (1)..(57): unsure at all Xaa locations
  Clone ID: PAT_MRT3847_36253C.1.pep
GLKGXGFFFSFIYVPYKGPKGIPLFFSFLGNTPPHCTKWFPHRVFLIGNTCFFFTNW

SEQ ID NO: 215093 - protein, 89 aa, Glycine max
  Clone ID: PAT_MRT3847_36254C.1.pep
SALFVSSPHPQCKSVSPGPPGAVVILTRCWGRASHHRFANAMGFKSLWLLLGCSGPPAMEEFAYPFYFVIFFSNRVIVFFFRFGFSNVC

SEQ ID NO: 215094 - protein, 98 aa, Glycine max
  Clone ID: PAT_MRT3847_36255C.1.pep
WLWEKQVTLLLMLSQSLLVNSRSTLLLPSFRLSMARLVIKHVPPIRALVMSLVLYRNDRRILLMIATLISQLFVTVTCWLPSTVVPMTPMMHMPYLHI

SEQ ID NO: 215095 - protein, 83 aa, Glycine max
  unsure (1)..(83): unsure at all Xaa locations
  Clone ID: PAT_MRT3847_36256C.1.pep
NPQFKQANSYYSNRFLLVRTTFGLTVQPPGKXPEGPVPNSSHYRHATTRFLRGNNSRSPPTAXGFGPGTPRPSPHSQPFGRGY

SEQ ID NO: 215096 - protein, 75 aa, Glycine max
  unsure (1)..(75): unsure at all Xaa locations
  Clone ID: PAT_MRT3847_36257C.1.pep
FSXVXVPPPPPPXXLLXXLLCXLAGGPLCXXLLGXLXXLRLGXXXVPXPVAXVGGXXPRLALWSAXVQSPSXRRR

SEQ ID NO: 215097 - protein, 48 aa, Glycine max
  unsure (1)..(48): unsure at all Xaa locations
  Clone ID: PAT_MRT3847_36258C.1.pep
VLVGVEALGILRVGFGLHMPSXSVRESERNFGFLLSHVPADAWVRPGI

SEQ ID NO: 215098 - protein, 67 aa, Glycine max
  Clone ID: PAT_MRT3847_36259C.1.pep
KPQHFWDFRLKQKREQVALDLTTLEGSLLHRQWGKKKKGGPQGGKIKKASPKTSGQRLYTFKIPGQG

SEQ ID NO: 215099 - protein, 65 aa, Glycine max
  Clone ID: PAT_MRT3847_3625C.1.pep
TRFRNVPGATHAYRIDMGVIGPYEISTCVIKTGHSGGHSKHKLLAEKRALQAQSCACLVDTEYTL

SEQ ID NO: 215100 - protein, 69 aa, Glycine max
  unsure (1)..(69): unsure at all Xaa locations
  Clone ID: PAT_MRT3847_36260C.1.pep
SCNLDPCLILGPGEGTFQLVQCEGLSLTSMTCQVHHRXVVGGESWLDAKKDLAIEMVAPAYTLMFKLVK

SEQ ID NO: 215101 - protein, 55 aa, Glycine max
  Clone ID: PAT_MRT3847_36261C.1.pep
LYENQKPYHNYSLEFASSQFKMHHNPFCFLLFIKQKSPSPVIKGYPSSRELRDSS

SEQ ID NO: 215102 - protein, 75 aa, Glycine max
  Clone ID: PAT_MRT3847_36262C.1.pep
TILIQTAAKTAYCRNGSLIHVVLSELGQHCEQSQEEGDEIQVLKSQEAQAPICEFVMGAEGEPYGMVEAIEDRMT

SEQ ID NO: 215103 - protein, 49 aa, Glycine max
  Clone ID: PAT_MRT3847_36263C.1.pep
ERPIFCFFFYYFFASTQTLFMSYIIPTTSLLYSNIFNKMRYSLTLQDPN

SEQ ID NO: 215104 - protein, 78 aa, Glycine max
  Clone ID: PAT_MRT3847_36264C.1.pep
VGKQGLVVAHIHVHIMQFQQEICLQQRVTTHSTNWATPKTMMRDSSNARLCLVAKACMPPFGPWICAEPVLVNRLTKT

SEQ ID NO: 215105 - protein, 69 aa, Glycine max
  Clone ID: PAT_MRT3847_36265C.1.pep
MGLLLWVGGGVRVKEVPNKDSSFKEAASVVPQSHLPSRVNSDKSKSRNGADIKKDTPVPKDGPTAHIAA

SEQ ID NO: 215106 - protein, 84 aa, Glycine max
  unsure (1)..(84): unsure at all Xaa locations
  Clone ID: PAT_MRT3847_36266C.1.pep
LEITKTKHCEFSSIQIAIQEAWRPRYKLWDSICYMLKATRNLTSCQLKIKKPKWCVHHSTTPACISNTLFXTTTYQQDKRLDSL

SEQ ID NO: 215107 - protein, 261 aa, Glycine max
  Clone ID: PAT_MRT3847_36267C.1.pep
MGGCFPCFGSSNKEGSGGVRGEEVPNRDSSFKEAAASVVPQSHHPSRVNSDKSKSRSGADTKKETPVPKDGPTAHIAAQTFTFRELAAATKNFRPECLLGEGGFGRVYKGRLETTGQVVAVKQLDRNGLQGNREFLVEVLMLSLLHHPNLVNLIGYCADGDQRLLVYEFMPLGSLEDHLHDLPPDKEPLDWNTRMKIAAGAAKGLEYLHDKANPPVIYRDLKSSNILLDEGYHPKLSDFGLAKLGPVGDKTHVSTRVMGTY

SEQ ID NO: 215108 - protein, 70 aa, Glycine max
  Clone ID: PAT_MRT3847_36268C.1.pep
LKEQMETYCENGLQPWSPNKQPYVSDVPDSALILRRHGLGSNLFSCLIFNELQAFNPRDQLPLALAATLV

SEQ ID NO: 215109 - protein, 43 aa, Glycine max
  Clone ID: PAT_MRT3847_36269C.1.pep
KMKGVYPLLYKEKKNYVFFTLTSYRYLGKKVYLSKCVNLQKFK

SEQ ID NO: 215110 - protein, 57 aa, Glycine max
  Clone ID: PAT_MRT3847_3626C.1.pep
IQYQICSLSCCISSPTLPSCGNEALAVANLILYLCLILKEEKDINTISNLLLVVLHQ

SEQ ID NO: 215111 - protein, 53 aa, Glycine max
  Clone ID: PAT_MRT3847_36270C.1.pep
APKAGNFSSSGGSRASLVGYSGRGILSQGSLIRLRIGFCRVSLSSRLGTLQAS

SEQ ID NO: 215112 - protein, 73 aa, Glycine max
  Clone ID: PAT_MRT3847_36271C.1.pep
DVCLGRHGSLSVFAFCSLCVLLPHTQTLGIIVIYTGKCETLASQSTNAQTQTGSRPKPTTHTSVSKENLVTSL

SEQ ID NO: 215113 - protein, 48 aa, Glycine max
  Clone ID: PAT_MRT3847_36272C.1.pep
GPKCFPYARDSKSASLCHKVLGIMQPSVEFSTRTMHGPPHRADCINTP

SEQ ID NO: 215114 - protein, 78 aa, Glycine max
  Clone ID: PAT_MRT3847_36273C.1.pep
GHTSRLQSLLMCHIIHERVRTYLYSLTWCPDLSPTLTLSIILHPVHTSMAECTRLGSLLCHPYLQLLAMLQQISDVHD

SEQ ID NO: 215115 - protein, 73 aa, Glycine max
  Clone ID: PAT_MRT3847_36274C.1.pep
YKKKKKKRECWGALINHGDVVCTHRFNSHLLILGENQVSVITYQPNRKEFRFDSERTTLKNDHHNHHHHQRRA

SEQ ID NO: 215116 - protein, 64 aa, Glycine max
  Clone ID: PAT_MRT3847_36275C.1.pep
DLTLTCLWVPLTYGGYFIFTWGVFNGQAISLAYARLLGEYYFNSLNITLSLLGKILRFRLFFLL

SEQ ID NO: 215117 - protein, 169 aa, Glycine max
  unsure (1)..(169): unsure at all Xaa locations
  Clone ID: PAT_MRT3847_36276C.1.pep
PPHPRTAPQPTPKPPRKPPTQQRAHRQGRAPTAAAPSNPPNPGAXHRTATAVRPPIEHAPRTIQAAKKRATRPEPQAGAPEIRPRRSQRRAHEPGHKERPPRHRRRAGRDSSTRRTTAHMAKPRPDQEPARQKKPGTARTRAARTEPPPDPRPRHGFRGRSKPAQGPRR

SEQ ID NO: 215118 - protein, 275 aa, Glycine max
  Clone ID: PAT_MRT3847_36277C.1.pep
MKLDTIFAFIVVYILLVTSSEFPSVAADDVSSIISASQFEQLLKHRNDQICEGKNGFYSYNAFVTAARTFDGFGTTGDVNTRKREVAAFLAQTSHETTGGGGWPNAPDGPYAWGYCFVTERDKSNNYCEISKAPCASGKSYYGRGPLQLTHNYNYDLAGKAIHSDLINNPDLVAQDPVVSFQTAIWFWMTSQANKPSCHDVITNRWTPSSVDMAANRAPGYGVITNIINGRIECGNGPSPASNDRIGFYKKYCEIFGLSDATNLDCSSQKSFDQD

SEQ ID NO: 215119 - protein, 42 aa, Glycine max
  Clone ID: PAT_MRT3847_36278C.1.pep
EVGSFLVRGIIMNHPAQIGNGYPPVLGRHTSHIGGKILDIVT

SEQ ID NO: 215120 - protein, 103 aa, Glycine max
  unsure (1)..(103): unsure at all Xaa locations
  Clone ID: PAT_MRT3847_36279C.1.pep
MPLFGLPHPPAXPCPCPLRQAWGSLDALIGRLRAAYEENGGXPKPXPFGARAVRFYLHDVRDFQAKARGVSYEKKRKRPKQQNIANAAATSVTTSPNATATAT

SEQ ID NO: 215121 - protein, 76 aa, Glycine max
  Clone ID: PAT_MRT3847_3627C.1.pep
RRSIMAYISSLSSFCLWNFSAPGPVSICSLSLAFLTCQIPCLPTTRSRPHCHPVLKASRIMSLYTLSPHPTSEIPS

SEQ ID NO: 215122 - protein, 145 aa, Glycine max
  Clone ID: PAT_MRT3847_36280C.1.pep
SYVLMIMAHKAYGDRGVMIEAGVVSSLLELTLVGTTLAQKRASRILECLRVDKGKQVSGSYGGNFNLGVSAPICGSSSSNGGKGCLVVDDGMMSEEKKTVKQLVQQSLQSNMMKIVKRANLRQDFLPSGNFASLTSTSTSKSLPF

SEQ ID NO: 215123 - protein, 58 aa, Glycine max
  Clone ID: PAT_MRT3847_36281C.1.pep
PLCVIMPPLINDCLQWLLGRCIKLSALTRSGAAFSLLASYRACVMLVGVLALILMRVS

SEQ ID NO: 215124 - protein, 58 aa, Glycine max
  Clone ID: PAT_MRT3847_36282C.1.pep
NGQDNDKCPSRRDISVAAEFDLTACAAGSGWSTPTPVSYPPPRPPPPPPPPPPRPPAP

SEQ ID NO: 215125 - protein, 74 aa, Glycine max
  unsure (1)..(74): unsure at all Xaa locations
  Clone ID: PAT_MRT3847_36283C.1.pep
ARELLGGGRSXGRVRQLLLHFETQVELFLVGKGHEAWTKKEGFFPRAGATDEDVSRHKIFGIFFWGGEKKSIIS

SEQ ID NO: 215126 - protein, 181 aa, Glycine max
  Clone ID: PAT_MRT3847_36284C.1.pep
VYKAEMSGGQVFAVKKLKCDSNNLNIESIKSFENEIEAMTKTRHRNIIKLYGFCCEGMHTFLIYEYMNRGNLADMLRDDKDALELDWHKRIHIIKGVTSALSYMHHDCAPPLIHRDVSSKNILLSSNLQAHVSDFGTARFLKPDSAIWTSFAGTYGYAAPELAYTMEVTEKCDVFSFGVLA

SEQ ID NO: 215127 - protein, 103 aa, Glycine max
  unsure (1)..(103): unsure at all Xaa locations
  Clone ID: PAT_MRT3847_36285C.1.pep
MVKLPCVSVSLSAYEPEEYMAHETNVLTSDSNHEGHHDKLCDQIYDAMLDACXLQNHDSKVVCNTCTMTNMVTAYEXITTDANVKYEKNVXNTCMNIGLYLMM

SEQ ID NO: 215128 - protein, 132 aa, Glycine max
  Clone ID: PAT_MRT3847_36286C.1.pep
SIAVSSFKDSLSSVELHIALLSIVVSFFKDSLSSVQVSRALLSIGASLFKDSRSSLYLVRVIVRVSGYTMYESKSASRVCYRQYCPQITPPRRLGLGEESSCPDAASRCMVRRRSRIPSWGKTDCSRGGSRA

SEQ ID NO: 215129 - protein, 130 aa, Glycine max
  Clone ID: PAT_MRT3847_36287C.1.pep
KRVKDEDEGWWRLGLCGFIGYKYKVTTHKTKLVDKTKTRKMGASHPHAFLFLFFQASSKASLPFFTATKTKTLFALNLQCHTPKQICKCYLASILPLQLNGNHFSSSSLTTACSCTILVQIPSFSLPLND

SEQ ID NO: 215130 - protein, 78 aa, Glycine max
  Clone ID: PAT_MRT3847_36288C.1.pep
KALTSNHQTSSEPWSSSQIWLQHKCLGHPPFSVLKSLFLFFTKRSVESFHCDVCEFAKHHRTTFLPSTNKSSKPFDLV

SEQ ID NO: 215131 - protein, 151 aa, Glycine max
  unsure (1)..(151): unsure at all Xaa locations
  Clone ID: PAT_MRT3847_36289C.1.pep
GYSVNAPMLRWKRYTLLVGLIIFFRRGIMFTITFFLHMQTFVFKRPVIFTRSLIATIVFSSLYAIGVALFKDIPDIEGDKKYGIHFFSPRLGQKQVFWICVSIFEMAFGVALLAGVTSSACLWIKIDTGIGNGITASILSYXTKYVYITSP

SEQ ID NO: 215132 - protein, 74 aa, Glycine max
  unsure (1)..(74): unsure at all Xaa locations
  Clone ID: PAT_MRT3847_3628C.1.pep
QQQKPHHRHQYRXSIPHTXYEQSHETPNEIVFGAVQEQDRKQESVVIKPVDYGESMYEQNIRSRMSSMGYGYRY

SEQ ID NO: 215133 - protein, 194 aa, Glycine max
  unsure (1)..(194): unsure at all Xaa locations
  Clone ID: PAT_MRT3847_36290C.1.pep
TKTGLKTLSIIDYGYTDHMTPHSSYFSSYTFLIGNQHIIVANGSHIPIIGCGNIQLQSSLHLNNVLYVPKLSNNLLSIHKITXDLNCVVTFFHSHCVFXDLAMGRMIGIAKEXGGLYYLQHEDNKDSEPWSSSQIWLQHKKKGHPPFSVLKSLFLFFTKRSVESFHCDVCEFAKHHRTTFLPSTNKSSKPFDLV

SEQ ID NO: 215134 - protein, 431 aa, Glycine max
  Clone ID: PAT_MRT3847_36291C.1.pep
MPSLEEELFPSTPGKFKIERSHHMNRQLYRCFASTSTMFLWALFLIALTASYLSFQGFVDSGSRYLTASWGGIQWEKQVRTSAQIHRQGGMSVLVTGAAGFVGSHVSLALKRRGDGVVGLDNFNDYYDPSLKKARKSLLATHDVFIVEGDVNDAKLLAKLFDVVAFTHVMHLAAQAGVRYAMENPHSYVHSNIAGLVTLLEACKTANPQPAIVWASSSSVYGLNEKVPFSESDQTDQPASLYAATKKAGEEITHTYNHIYGLSITGLRFFTVYGPWGRPDMAYFSFTRNILQGKPITVYRGKNHVDLARDFTYIDDIVKGCVGSLDTSAKSTGSGGKKRGPAPYRIFNLGNTSPVTVPTLVSILERHLKVKAKRNIVDMPGNGDVPFTHANISSARRELGYKPTTDLQTGLKKFVKWYLSYYGYNHGKPVN

SEQ ID NO: 215135 - protein, 119 aa, Glycine max
  Clone ID: PAT_MRT3847_36292C.1.pep
MPSLEEELLPSTPGKIKIERCHHMNRQLYRCFASTSTMFLWALLLIALTDSYLSFQGFVDSGSRYLTGYWGGIQWEKQVRTYGQIHREGGMSVLVTGAAGFVGSHVCFALKRHGDGVVG

SEQ ID NO: 215136 - protein, 124 aa, Glycine max
  Clone ID: PAT_MRT3847_36293C.1.pep
PHVPLVTAITRVRTQAYNSVHDTSKRMTSNLGAAEGVALFDTCYHLTFLQSARVPTVTVHCTGDRAWTQPSKNYLIPVDDAWTYCFTTAPTTMIMYIIENVQHQRTDVTYYLANFLVRFWSIKC

SEQ ID NO: 215137 - protein, 195 aa, Glycine max
  Clone ID: PAT_MRT3847_36294C.1.pep
EVEFKQNYHQCPDCAKSYTHNTWRACVQVRQKVPHKRTFLYLEQLILKHGAHKDTINIKEVHDGIDFFFAARNHATAFCDFLKAVVPVNIKDSQELISHDIHTSTKNYKFSYSVELVPICKDDLVALPVQLAKKIGNIAPLGLCSRIGTSIQILDPQTLQTADVDTKLYWRTPFRPLADVQELTEFIVLDIEPAG

SEQ ID NO: 215138 - protein, 431 aa, Glycine max
  Clone ID: PAT_MRT3847_36295C.1.pep
MPSLEEELFPSTPGKFKIERAHHMNRQLYRCFASTSTMFLWALFLIALTASYLSFQGFVDSGSRYLSASWGGIQWEKQVRTSAQIHRQGGMSVLVTGAAGFVGSHVSLSLKRRGDGVVGLDNFNDYYDPSLKKARKSLLAKHDVFIVDGDLNDAKLLAKLFDVVAFTHVMHLAAQAGVRYAMENPHSYVHSNIAGLVTLLEACKSANPQPAVVWASSSSVYGLNEKVPFSESDQTDRPASLYAATKKAGEEITHTYNHIYGLSITGLRFFTVYGPWGRPDMAYFSFTRNILQGKPITVYRGKNHVDLARDFTYIDDIVKGCVGSLDTSAKSTGSGGKKRGPAPYRIFNLGNTSPVTVPTLVSILERHLKVKAKRNIVDMPGNGDVPFTHANISSARRELGYKPTTDLQTGLKKFVKWYLSYYGYNHGKPVN

SEQ ID NO: 215139 - protein, 91 aa, Glycine max
  Clone ID: PAT_MRT3847_36296C.1.pep
HRGESAHHIMYTLSLPCLSYSLHTHTYQYGRFSTPISFIFTHNRRSHNHLLTTSSYLIQRERESLKHLRTIITSPSRSGLYRLFIPNNNKT

SEQ ID NO: 215140 - protein, 91 aa, Glycine max
  unsure (1)..(91): unsure at all Xaa locations
  Clone ID: PAT_MRT3847_36297C.1.pep
NHFLLTSSSSSSSISLHHFSKSSLNTVSSNTNNKQDIRYRAISKPQTQEYSDIFQDSLATLKFHKINIKDDIEKXQDIGTCITNKIKNRVT

SEQ ID NO: 215141 - protein, 108 aa, Glycine max
  unsure (1)..(108): unsure at all Xaa locations
  Clone ID: PAT_MRT3847_36298C.1.pep
ELSDRIVPVLLLQTDMFFETTVXGVSFWDXYFFFMNPRPVYEVTFLDPLPEEMSCKAGGKTXIEVANHVQKVVGDVLGFECTGLTRKDKYMFLGGNDGKVESLYGAKK

SEQ ID NO: 215142 - protein, 275 aa, Glycine max
  Clone ID: PAT_MRT3847_36299C.1.pep
MAFFGRIGNLLRQTASRQVSSKLRSPPSFFQAIRCMSSAPSTKLFIGGVSYSTDEQSLREAFSKYGEVVDARIIMDRETGRSRGFGFITYTSVEEASSAIQALDGQDLHGRPIRVNYANERPRGYGGGGGGFGSYGAVGGGGYEGGGGSGYRGNVSDGYGGGNYSRNDGGGYGYGAGSYGSGGNYGDSGPGNNYSGGYSGSNSGHFGDAGSVGNHESSTGFAGNGYDGSVVDGGVGAGSEFGSSGQLDSKTSSNGDEGFGDYRDDNDADNFAKRA

SEQ ID NO: 215143 - protein, 61 aa, Glycine max
  Clone ID: PAT_MRT3847_3629C.1.pep
VMRIHRIGQTKKVAIGRFIVKGTVEERMEAVQARKQRMISGALTDQEVRTARIEELKMLFT

SEQ ID NO: 215144 - protein, 50 aa, Glycine max
  Clone ID: PAT_MRT3847_362C.1.pep
KQQNKGKVDVNKYMLELFLLFIIIIINAYFLQINNRKKMFISKSILMQCL

SEQ ID NO: 215145 - protein, 68 aa, Glycine max
  Clone ID: PAT_MRT3847_36300C.1.pep
ETRSWTLVVHLRGPQEDIQGFSWSTFYSNARALLSHDGIILRTYALTPEWKAATTPLIKFTEGTHYIF

SEQ ID NO: 215146 - protein, 52 aa, Glycine max
  Clone ID: PAT_MRT3847_36301C.1.pep
KIYMTYENILCSILLFLSNRRYNIFMLACLKYDGLNSFNFFFVQKFQCLHAF

SEQ ID NO: 215147 - protein, 168 aa, Glycine max
  Clone ID: PAT_MRT3847_36302C.1.pep
MAFSSALILWSLLAINMALPTLATVYTVGDTSGWAIGTDYSTWTGDKIFSVGDSLAFNYGAGHTVDEVKESDYKSCTAGNSISTDSSGATTIALKSAGTHYFICSVPGHCSGGMKLAVTVKSGKASDATPTTSTTTATKSNSSSASSVSPIVAMFIVSSISYYVLRML

SEQ ID NO: 215148 - protein, 56 aa, Glycine max
  Clone ID: PAT_MRT3847_36303C.1.pep
YIGDANPHNDHPTTLHGQPEHNPHLIYPDNIVPLHATYPPYPHIPIDPPFKHLNHS

SEQ ID NO: 215149 - protein, 541 aa, Glycine max
  Clone ID: PAT_MRT3847_36304C.1.pep
MCQLSSPSTLCESNEGHPNMPPTKIHEEPDMFALLIPKPPTTTTFFEQGQNNQKPHKTHFSLALDEVKCVANIALPMVLTGLLLYSRSVISMLFLGRVGELALAGGSLAIGFANITGYSILSGLAMGMEPICGQAFGAKRFKLLGLAMQRTMVLLLLTSVLISFLWFNMKKILVLCGQQEDIATEAQSFILFSIPDLVAQSLLHPLRIYLRSQSITLPLTYTASLSILLHVPINYFLVSVLKLGIKGIALGAVWTNFNLVVSLILYIWVSGVYKKTWPGVSLKGILSGWKSLLNLAIPSCISVCLEWWWYEIMILLCGLLINPQATVASMGVLIQTTALIYIFPSSLSFAVSTRVGNELGAENPKKAKLAALVGLCFSYGLGFSALFFAVSVRHVWASMFTSDAEIIALTSMVLPIIGLCELGNCPQTTVCGVLRGTARPKLGANINLGCFYLVGMPVAVRLSFFAGFDFKGLWLGLLAAQASCMFTMLIVLARTNWEGQVQRAKEPTSSSDSSEEEEEQDQKCLFSSGATKECSHSDSLV

SEQ ID NO: 215150 - protein, 88 aa, Glycine max
  unsure (1)..(88): unsure at all Xaa locations
  Clone ID: PAT_MRT3847_36305C.1.pep
GWHRRQDASKESAVAAGEAGGPETGRVRWSARLXGAGCGGSKRSKEEEKGSMLRRWRRGEESESGDGGGGDDVAVAADGVCLMGWIIV

SEQ ID NO: 215151 - protein, 54 aa, Glycine max
  Clone ID: PAT_MRT3847_36306C.1.pep
CYQCLPLSPSISCSFSEYPFSQFDTYHHLKLPPPYHTPISFPLIMTLHQIYTTL

SEQ ID NO: 215152 - protein, 56 aa, Glycine max
  Clone ID: PAT_MRT3847_36307C.1.pep
AGCSERPAVFFFFFFFFWQTTQYWFTGFEQGPDNFLENTSATLALTRKADLVKMLG

SEQ ID NO: 215153 - protein, 86 aa, Glycine max
  Clone ID: PAT_MRT3847_36308C.1.pep
SVCVMFRPGRIMFGFIERNYAMTAPWATMAWIYGRILAFHSFHRPPLITLWFRDIIGIINILSEILVHEEQHRISWHELFMINSCV

SEQ ID NO: 215154 - protein, 127 aa, Glycine max
  Clone ID: PAT_MRT3847_36309C.1.pep
AALRRRNSARALILVVCAVAISIESTMEATSTSSSCSNGFFSLRSTNSGESRVRGCGKSDGVAMWFINGVTTAFFASLERCCIRIATEEDVEDGNDDVPLILNDGNLRHRTVDTTTRQRKKVKGKKS

SEQ ID NO: 215155 - protein, 81 aa, Glycine max
  Clone ID: PAT_MRT3847_3630C.1.pep
RRCSKHHCGVRTCVTRGGDHHYPSEKACSGDIISNQCHMRACTYDLEEEPKNHATQIVCNPNESVTSSACMTYYICYVYFL

SEQ ID NO: 215156 - protein, 49 aa, Glycine max
  Clone ID: PAT_MRT3847_36310C.1.pep
CLFFISYLFIYNLFSLIFVCYFYFCSFYYFISSGHIEREKDKRKKLLIK

SEQ ID NO: 215157 - protein, 95 aa, Glycine max
  Clone ID: PAT_MRT3847_36311C.1.pep
KIFAIHEDNSGILGTHSVTRVMEKLLLITSMKLSSKFKIMFLTHIQTFWSMQKSCLTLKFGASKAHPYTLLVVEFDAFGHFSECTGRVLRSCPVF

SEQ ID NO: 215158 - protein, 79 aa, Glycine max
  unsure (1)..(79): unsure at all Xaa locations
  Clone ID: PAT_MRT3847_36312C.1.pep
GASYVNSGYTKGDGLGDWIVGTCVLVYTVXSATDAERNAGDSHVRVMAPLADRLAKFXGQLGRIANIGAGFNPTRELGS

SEQ ID NO: 215159 - protein, 81 aa, Glycine max
  Clone ID: PAT_MRT3847_36313C.1.pep
SSNGTTPIKNFCRISDPLFLSSNSTTKIGQGTVSDESSQFKILSDDKGFHTPYFLSIFPLLFCLVLSSSIVRRQGVLQFFQ

SEQ ID NO: 215160 - protein, 159 aa, Glycine max
  unsure (1)..(159): unsure at all Xaa locations
  Clone ID: PAT_MRT3847_36314C.1.pep
RPPTSVRTGAARKTVQKGVHAQYQERASIFSKEPRASFSNNSIWGRLIQLILSYIKGISLSVLCVCHNSTIRLPDEVDVKGNLLHFPNPDLPTCYXYKHWFIEEYRKKKHFELXDSLPRDGLRINSSLSNGFFRSNTLSESYQYLSNLFLSNEALWDQM

SEQ ID NO: 215161 - protein, 73 aa, Glycine max
  Clone ID: PAT_MRT3847_36315C.1.pep
GRVEPHTEDFWEILELNAVQVEVYILIQGMIDHEGMRVPTWLHGHTVVTYTAAADDSMNVVVQLMLRTGVVDS

SEQ ID NO: 215162 - protein, 65 aa, Glycine max
  unsure (1)..(65): unsure at all Xaa locations
  Clone ID: PAT_MRT3847_36316C.1.pep
KKPXRPTRPKHPYYHTNFYIIKXHKTTGWLYNNKIPHLSFYIFTLNLYLTILFTYSLISNTNPLP

SEQ ID NO: 215163 - protein, 134 aa, Glycine max
  Clone ID: PAT_MRT3847_36317C.1.pep
MGSIGSVCSSFITAPPSSSSLSRTTPSFCCAFPSRRIIIKPRMGPYPAQAQPKEAKLWGGRFEEGVTDVVERFTESISFDKQLYKQDIMGSRAHATMLAHQGLITVSDRDSILQGLDEIERRIENGEFNWRADR

SEQ ID NO: 215164 - protein, 46 aa, Glycine max
  unsure (1)..(46): unsure at all Xaa locations
  Clone ID: PAT_MRT3847_36318C.1.pep
PKXEXFXXPGGNVTGRAXDTHXPFQRXXSFSRXXXVFSSAXCXSES

SEQ ID NO: 215165 - protein, 138 aa, Glycine max
  Clone ID: PAT_MRT3847_36319C.1.pep
IIFSSDPTKINLHSVSVFIFFLCYHVDKRTFYFSLFLFTSATLHSVQTKRTKKAGIVGKYGTRYGASLRKQIKKMEVSQHSKFFCEFCGKYAVKRKAVGIWGCKDCGKVKAGGAYTLNTASAVTVRSTIRRLREQTEG

SEQ ID NO: 215166 - protein, 81 aa, Glycine max
  Clone ID: PAT_MRT3847_3631C.1.pep
QNHLKTTFNFVMFLCDSFASYDPIPHQHLQTRTTVSSLLLHDMKPPYFFDTHNTHNLQYLAFFFYQFLCFGSSQSEVGVRN

SEQ ID NO: 215167 - protein, 84 aa, Glycine max
  Clone ID: PAT_MRT3847_36320C.1.pep
NHQDFGFYASRFWSKQPQIFGSSESCGWCGLCSPCSTILMECEDFRLENGSVFCDVFCKKFSNNDKSAFVNTPILFCKKKKGDH

SEQ ID NO: 215168 - protein, 68 aa, Glycine max
  Clone ID: PAT_MRT3847_36321C.1.pep
GGSTAFPLVWRMAETRGSSTATTDHHCLNLTDARAGRRSEAPPAPPFAGRRVKTASSTASPRKAKKAM

SEQ ID NO: 215169 - protein, 83 aa, Glycine max
  Clone ID: PAT_MRT3847_36322C.1.pep
TSSDSFSVLCLITSSSCRNLGLVLPLFYVAYDFLGRLFYGSAFFHSLLLTDPHCRSKRSYLKNTCALKTNVCSVNILCRQHVY

SEQ ID NO: 215170 - protein, 105 aa, Glycine max
  unsure (1)..(105): unsure at all Xaa locations
  Clone ID: PAT_MRT3847_36323C.1.pep
MGTRNFEKMASIDAQLRLLAPSKVSDDDKLVEYDALLLDRFLDILQDLHGDDIRETVQDCYELSAEYEGQNNPQKLEELGNMXTXLDAGDSIVISKSFAHMLKFG

SEQ ID NO: 215171 - protein, 47 aa, Glycine max
  Clone ID: PAT_MRT3847_36324C.1.pep
SQVAPYGVPPLGPTCKLYKLWCSVALSMGSISKLKIHPYVLMCNSFS

SEQ ID NO: 215172 - protein, 359 aa, Glycine max
  Clone ID: PAT_MRT3847_36325C.1.pep
MGFLVLLLFSLLGLSSSSSISTHRSILDLDLTKFTTQKQVSSLFQLWKSEHGRVYHNHEEEAKRLEIFKNNLNYIRDMNANRKSPHSHRLGLNKFADITPQEFSKKYLQAPKDVSQQIKMANKKMKKEQYSCDHPPASWDWRKKGVITQVKYQGGCGSGWAFSATGAIEAAHAIATGDLVSLSEQELVDCVEESEGCYNGWHYQSFEWVLEHGGIATDDDYPYRAKEGRCKANKIQDKVTIDGYETLIMSDESTESETEQAFLSAILEQPISVSIDAKDFHLYTGGIYDGENCTSPYGINHFVLLVGYGSADGVDYWIAKNSWGEDWGEDGYIWIQRNTGNLLGVYRIRDRASVLKRHP

SEQ ID NO: 215173 - protein, 53 aa, Glycine max
  Clone ID: PAT_MRT3847_36326C.1.pep
NDKKPQNQLFLKKKEGKTTQNRKCPQNWVDGAPNPNPVMDSAGFFETKGGLFI

SEQ ID NO: 215174 - protein, 66 aa, Glycine max
  Clone ID: PAT_MRT3847_36327C.1.pep
EDKSTFHKRYNFSCFRFSFKETKCFNYKIMYPNIFLGLLIIKKCKYIRMYKYFFLLHEYTSIDCEI

SEQ ID NO: 215175 - protein, 57 aa, Glycine max
  Clone ID: PAT_MRT3847_36328C.1.pep
YLYDRDKPEVTNRNHQLIYLHLFHQIDRKKNRAVRPLKQKSGQTGFWHGLWSVELIT

SEQ ID NO: 215176 - protein, 96 aa, Glycine max
  Clone ID: PAT_MRT3847_36329C.1.pep
PEKFLTEEYIYLFLFYKNDKTLIITTAYNIYHYQIHNKTSSTGLLLQSISHNFHIEPNVKSQLMLIVKSIQVPVKHTKTFKINIIMKIHHNDRKHA

SEQ ID NO: 215177 - protein, 127 aa, Glycine max
  unsure (1)..(127): unsure at all Xaa locations
  Clone ID: PAT_MRT3847_3632C.1.pep
RKGQRDHGGAAKTRTKGERDRKPRTRPEPEXKXARREKNEQGGXPARDGXGDATTKEEEGDVFFKQXLLWHKKDGVNRTTGRREGADPAAQSAGEXSTKVAIHRGSQDNLSGIGIDVKGQRKIKRKP

SEQ ID NO: 215178 - protein, 151 aa, Glycine max
  Clone ID: PAT_MRT3847_36330C.1.pep
SSSVPGDPLESTCRAGLVGEAVELIKTMPMPPDVQILGALLSSRNTYGNVGFTQEMLKSLPNVEFQDSGIYVLLSNLYATNKKWAEVRSVRRLMKQKGISKAPGSSIIRVDGMSHEFLVGDNSHPQSEEIYVLLNILANQIYLEGHINTLS

SEQ ID NO: 215179 - protein, 114 aa, Glycine max
  Clone ID: PAT_MRT3847_36331C.1.pep
VIYINGKPFVLREVERPYKNMLEYTGIGRERVEKMEARLKEDILREAEQYGNAIMVIHETDDGHIYDAWEHVTSEMIQTPLEVFKSLEADGFPIKYARVPITDGKAPKSSDFDT

SEQ ID NO: 215180 - protein, 58 aa, Glycine max
  Clone ID: PAT_MRT3847_36332C.1.pep
KAAVSSCLFHQQSILSEVIHLWPCELPILLDYYILDHLHHIERSLLLSMDHMLYKFSL

SEQ ID NO: 215181 - protein, 74 aa, Glycine max
  Clone ID: PAT_MRT3847_36333C.1.pep
FEMLSLLHLQSQPSLVAMGTAAAKGEDVVVKVPPGTVGQITSKNHVIMVSAGHKRVLLSNSGILKGNASFKSRT

SEQ ID NO: 215182 - protein, 30 aa, Glycine max
  Clone ID: PAT_MRT3847_36334C.1.pep
IIFISSFVTYKVIAVVLHFGNFGNDIILVI

SEQ ID NO: 215183 - protein, 47 aa, Glycine max
  Clone ID: PAT_MRT3847_36335C.1.pep
TNYLCRSLNLLLSKYILFINACYRHGSLIDTNYVPFMSVASPSTNPF

SEQ ID NO: 215184 - protein, 45 aa, Glycine max
  Clone ID: PAT_MRT3847_36336C.1.pep
AKRHSWQLSSNACGSHSAERFYCPLNTHSFALKMHDLAKRAQSLA

SEQ ID NO: 215185 - protein, 33 aa, Glycine max
  unsure (1)..(33): unsure at all Xaa locations
  Clone ID: PAT_MRT3847_36337C.1.pep
RPFXFLFFFFFFFFFFFFFFXXQTRYHFILIPK

SEQ ID NO: 215186 - protein, 85 aa, Glycine max
  unsure (1)..(85): unsure at all Xaa locations
  Clone ID: PAT_MRT3847_36338C.1.pep
LWGGVFFVDFVAAPGGDGEGLFFIRLFGLXWGLFSLQDLLXRCPSTTRPRPEREXHRPKVVAPTSLLLSHTPSCPSXKSFCSLSP

SEQ ID NO: 215187 - protein, 102 aa, Glycine max
  Clone ID: PAT_MRT3847_36339C.1.pep
TRCVDSLTGWRSTRSSRSIFHLYLTHQEPNFKNLILRRNAKTHPWLSVPHNSANWAKQTTIVFMTNNRVICSSDTKLTDWYQPTLPTRLRDFGLFSFRTRTF

SEQ ID NO: 215188 - protein, 94 aa, Glycine max
  Clone ID: PAT_MRT3847_3633C.1.pep
CAERGFCGDILSVTISFFKEFHASGFIEFFPLPPLLFSCVFFFFFFFNPLIYFLIFGICYSFGGFWCSHWQLNFVFLMPGIVRDSSNFPSFIIA

SEQ ID NO: 215189 - protein, 62 aa, Glycine max
  Clone ID: PAT_MRT3847_36340C.1.pep
ALHERRGKRNGFDLVEDHWVLAIRVRKTLHVLLGIKMQTTGTKVNGLLFSCANQRSITRHRS

SEQ ID NO: 215190 - protein, 152 aa, Glycine max
  unsure (1)..(152): unsure at all Xaa locations
  Clone ID: PAT_MRT3847_36341C.1.pep
IHTPLKVLCILLGLNQIKARATSNFFMVFSASLAFFWGLLTKEHSTDPVFLTLNRLNPVKPNILFKKEAGFXSLGGYQLTKVGRTGGPTWGFLGGAFYAAQIQIWASKTGRVASWVTSFKLNIFEPNKXKXVDGLAFFWEPVGFKPKSDDGF

SEQ ID NO: 215191 - protein, 151 aa, Glycine max
  unsure (1)..(151): unsure at all Xaa locations
  Clone ID: PAT_MRT3847_36342C.1.pep
MQRNTNTLAGNVPPKANLGDLRGLAGGLNGLNTSAMIDGGSFDGTKAYKDSKVCNMFTMQEFHRRYHEETGITFASLYPGCIATTGLFREHIVMIDNXARCVSDPSLTKSGVYWSWNAAYASYENQMSQEASDADKARKVWEISEKLTGLA

SEQ ID NO: 215192 - protein, 113 aa, Glycine max
  unsure (1)..(113): unsure at all Xaa locations
  Clone ID: PAT_MRT3847_36343C.1.pep
FESFFSIKDHLQRPTTKGAIFAGFXSLKKXKPRKDYFFGLVLKLXTRGFPNYIGITLKILAKGLAGPLFFESFSKLQFFSQPTKRGVTLLGMAFGRKPNACGVFDLGLLKRFL

SEQ ID NO: 215193 - protein, 399 aa, Glycine max
  Clone ID: PAT_MRT3847_36344C.1.pep
MALQAASLVSASFSIAKEGKSGVSLRDTTMFGVSLSDTLKSDFSSPSSTCKREFQQKFGPLRVQSVATTTPGVTKASPEGKKTLRKGSVIITGASSGLGLATAKALAETGKWHVIMACRDFLKAERAAKSAGIAKENYTIMHLDLASLDSVRQFVDNFRQSGRPLDVLVCNAAVYLPTAREPTYTADGFELSVGTNHLGHFLLSRLLLDDLNKSDYPSKRLIIVGSITGNTNTLAGNVPPKANLGDMRGLAGGLNGLNTSAMIDGGSFDGAKAYKDSKVCNMLTMQEFHRRYHDETGITFASLYPGCIATTGLFREHIPLFRLLFPPFQKYITKGFVSEDESGKRLAQVVSDPSLTKSGVYWSWNAASASFENQLSQEASDADKARKVWEISEKLTGLA

SEQ ID NO: 215194 - protein, 79 aa, Glycine max
  unsure (1)..(79): unsure at all Xaa locations
  Clone ID: PAT_MRT3847_36345C.1.pep
AKNGXKFPTXDQTNRDGAHFRPLDQHPFQQTNLSWLITIHINPQFKTNAHTPKPPFLQSTPQTLKQTKICKLLRNIACT

SEQ ID NO: 215195 - protein, 347 aa, Glycine max
  Clone ID: PAT_MRT3847_36346C.1.pep
MTSGVDADLSELTPVSSSLESELVANDEETAHLIVDNSDFPILLALMKSELSLDEVPSSNLENNIDVDNTERSDYESTSQLTVPQILSAEVASHGEKTSKTELFLISGAACLPHPSKALTGREDAYFISHQNWLAVADGVGQWSLEGSNAGLYIRELIEKCENIVSNYENNSTIEPAEVITRGAAETQSPGSCSILVTNFDGQVLHAANVGNTGFIIIRDGSIFKKSTPMFHEFNFPLQIVKGDDPSELIEGYTMDLHDGDVIVTATNGLFDNLYEQEIASIISKSLEASLTPQEIAEFLATRAQEVGRSTSMRSPFADAAQAVGYVGFIGGKLDDVTVIVSLVQPR

SEQ ID NO: 215196 - protein, 41 aa, Glycine max
  Clone ID: PAT_MRT3847_36347C.1.pep
VSSAINISFQTGLWSGEGLSGVEQKSSLYIICINILVKPLF

SEQ ID NO: 215197 - protein, 123 aa, Glycine max
  Clone ID: PAT_MRT3847_36348C.1.pep
GGGFGGAKGNSGFGNAAWGFEPTPAFGNFGAPPGNGGPVGFGVGYGGGQFFQAPPPLFWWVNFLGGFKPPPGGPGVFKVFNPGGPKNFSPPHGGGQRSMSIPHGAGWGALIPGVSRAPFPGFF

SEQ ID NO: 215198 - protein, 110 aa, Glycine max
  unsure (1)..(110): unsure at all Xaa locations
  Clone ID: PAT_MRT3847_36349C.1.pep
APHGLHSMCSGRVLCGNVSGYHFLTENTYVHVFAPSALFPLYRGHKMWIPRXXARSIDSGSPGGQGFFFFFFTSPFTRFYILMCALXVDPXXPHLLXXSASLYIEGRHHS

SEQ ID NO: 215199 - protein, 112 aa, Glycine max
  unsure (1)..(112): unsure at all Xaa locations
  Clone ID: PAT_MRT3847_3634C.1.pep
NKRYIAARIFSHPAVTAEEPSTGIEQEXSLWHKNVPWTPAWPLGXISSTTYAHYSTCIYAGINITGITGXVMPGQWEIQVGPSVGISAGDEVXAAHYILETITEISGTIVSI

SEQ ID NO: 215200 - protein, 37 aa, Glycine max
  Clone ID: PAT_MRT3847_36350C.1.pep
LRYWCKTLGTHKVDSCTLFTVLRAKSVSVFSCSGRRG

SEQ ID NO: 215201 - protein, 96 aa, Glycine max
  Clone ID: PAT_MRT3847_36351C.1.pep
NIHPSTNTERASNRDCIARACREWGAFHVTNQRGLHSLLDCLRLAGLWFFSETRIPDKLRYSCFASACEGYGSILLAASRCDQNHLRLCRHGWLRP

SEQ ID NO: 215202 - protein, 122 aa, Glycine max
  Clone ID: PAT_MRT3847_36352C.1.pep
GTCSSSFGGRRAEIVCHVGTDLSKVNPKAAESLADPEEYPNLFDDWQVALAVESKATEARGVYPPASEYVNQADKSHITLVEAFRNMQIEEGDQPLENGDSNHELTEQNGEEHYTEEHEEHQ

SEQ ID NO: 215203 - protein, 416 aa, Glycine max
  Clone ID: PAT_MRT3847_36353C.1.pep
ILHAGKTNKNSYKTLIAAEYAGVQVDFAPNFEMGVSNKTPEFLKINPIGKVPVLETPDGPIFESNAIARYVTRLKGDNTLYGSSLIEYAHIEQWIDFSSLEIDANIIKWYAPRVGRGPYLPPAEEAAISALKRALAALNTHLASNTYLVGHSVTLADIIMTCNLYLGFANILVKCFTSEFPHVERYFWTLVNQPNFRKIIGQVKQAETIPPVQSAKKPSQPKESKPKVKNEPKKEANKEPEKPKEEAEEEAPKPKAKNPLDLLPPSPMILDEWKRLYSNTKTNFREVAIKGFWDMYDPEGYSLWFCDYKYNQENTVSFVTLNKVGGFLQRMDLARKYAFGKMLVIGSDPPFKVKGLWLFRGQEIPQFVIDECYDMELYEWTKVDISDEPQKERVNQMIEDCEPFEGEALLDAKCFK

SEQ ID NO: 215204 - protein, 127 aa, Glycine max
  Clone ID: PAT_MRT3847_36354C.1.pep
IRLEEQEKLLTKKDQALPVWSPKSFPNEVEPEGTGKEKDWDLRDQLQKKTLQLQAKEKECRELHSELDNLSDEYLSCLRKLQHCREELNQSQQLPPRRQCGRWLPVLMVVIAAALAVFLANKDNLMI

SEQ ID NO: 215205 - protein, 88 aa, Glycine max
  Clone ID: PAT_MRT3847_36355C.1.pep
FHKKAPITYLFLPLFLLCALTHSRTTPHSPQTTLLDVVSCLQNAHNVVGFTHHHPNKHQRQQESSLLTSSLGIQLHSRGSIQKSSHSG

SEQ ID NO: 215206 - protein, 420 aa, Glycine max
  Clone ID: PAT_MRT3847_36356C.1.pep
MTPLILHAGKTNKNSYKTLLASEYAGVQVDFAPNFEMGVSNKTPEFLKINPIGKVPVLETPDGPIFESNAIARYVTRLKGDNTLYGSSLIEYAHIEQWIDFSSLEIDANIIKWYAPRVGRGPYLPPAEEAAISALKRALGALNTHLASNTYLVGHSVTLADIIMTCNLYLGFANILVKSFTSEFPHVERYFWTLVNQPNFRKIIGQVKQAEAIPPVQSAKKPSQPKESKAKAKDEPKKEAYKVPEKPKEEAEEEAPKPKPKNPLDLLPPSPMILDEWKRLYSNTKTNFREVAIKGFWDMYDPEGYSLWFCDYKYNDENTVSFVTLNKVGGFLQRMDLARKYAFGKMLVIGSVPPFKVKGLWLFRGQEIPKFVIDECYDMELYEWTKVDISDEAQKERVNQMIEDYEPFEGEALLDAKCFK

SEQ ID NO: 215207 - protein, 89 aa, Glycine max
  unsure (1)..(89): unsure at all Xaa locations
  Clone ID: PAT_MRT3847_36357C.1.pep
MGXRGMGKIXKKLAELNYPRASAPAQSLLFAGMGRYALLEWVFFRLLGEXGPFSQQNLQGEWHXRDXESWXIXYLAESAKVXGITTTGT

SEQ ID NO: 215208 - protein, 57 aa, Glycine max
  Clone ID: PAT_MRT3847_36358C.1.pep
DMVLSRMIYFSFQKACLPFRWKKPVDHLVLQTNFFRSPMNLLPSAVHVSSTIESGAP

SEQ ID NO: 215209 - protein, 51 aa, Glycine max
  unsure (1)..(51): unsure at all Xaa locations
  Clone ID: PAT_MRT3847_36359C.1.pep
ESLMFIKKCVSPLYQIKRGDLKQGHVILERPLXLRLCKKSRAIIVKLFVYS

SEQ ID NO: 215210 - protein, 60 aa, Glycine max
  unsure (1)..(60): unsure at all Xaa locations
  Clone ID: PAT_MRT3847_3635C.1.pep
NKQTITHLKFQTRVDSGELVAESKEYMHIRVQHINGEKSLSTVXGWKIEFTYNKLLNDVK

SEQ ID NO: 215211 - protein, 99 aa, Glycine max
  Clone ID: PAT_MRT3847_36360C.1.pep
MLLPNAVHASSTFQNGAPGSYCVALFANSPFPTFFSEPHECYCQALFMHPPPTSLEPAKLLRSAVRQFSILHFFRSPMNVIAQRCSCILHLRLGAPRSY

SEQ ID NO: 215212 - protein, 168 aa, Glycine max
  unsure (1)..(168): unsure at all Xaa locations
  Clone ID: PAT_MRT3847_36361C.1.pep
MKICCVLKKKKKKKKKKKKKKKKKKKKKRKKKKKKKKWGGGPAPISPFRDFFYPPXLGRVLKTWEWENPWVSQFYCLXAIPLFPSGFNKKKAPPDXPFQTLPHLNGKWEPPFNRPLNPGGWXVTPXETVTFPSPLAPVLLVFFLSFFPRWPGFPRKPLIRGAPLGVPI

SEQ ID NO: 215213 - protein, 347 aa, Glycine max
  Clone ID: PAT_MRT3847_36362C.1.pep
MVPPTERVPDSDKRCQQQHTLYKIDGPTDERVSESEAMNGGATTATFRSILNKPLNQLTEDDISQLTREDCRRFLKEKGMRRPSWNKSQAIQQVISLKALLEPSDDDTPPPPPPPMHHRSHAQPQPQVNLNEPPPPPPKAPPPEEPSFHADEDIQKSASSGEKPTETNDTNTNVASPKGCATSGSFGQMTIFYCGKVNVYDRVSPDKARAIMQLATSPVQLTQDDPLNGNAAVWTSPCHLPMDKDVLVPVDTTILQVAQADKMVEYPLQYREKGSIARDADVEGQEHRKVSLQRYLEKLKVHSSNGNSSRSSTSSPPQPRLPLVSSGSDQLKVALPIDLNDKDVQEC

SEQ ID NO: 215214 - protein, 40 aa, Glycine max
  Clone ID: PAT_MRT3847_36363C.1.pep
VYNFLIFFSFIITFGTLMFLCYLFLNFSQILFLTRILGIV

SEQ ID NO: 215215 - protein, 70 aa, Glycine max
  Clone ID: PAT_MRT3847_36364C.1.pep
LNARVELPRSSDAAWPLTGDSSCVTWGFQRVSGHMYVFGRFCLCFYLSPVVATLQTLLANIQLPSNLESV

SEQ ID NO: 215216 - protein, 182 aa, Glycine max
  Clone ID: PAT_MRT3847_36365C.1.pep
TRPNAANNNTALYKIDGPTDERVSESEAMNGGATTATFRSILDKPLNQLTEDDISQLTREDCRRFLKEKGMRRPSWNKSQAIQQVISLKALLEPSDDDTPPPPPPAMHHRSHAQPQPQVNLSEPPPPPPKAPPPEEPAFHAAEDIQKSASSGEKPTETNDTNTNVASPKFVFLSLSLSLDGF

SEQ ID NO: 215217 - protein, 339 aa, Glycine max
  Clone ID: PAT_MRT3847_36366C.1.pep
MNGGATTATFRSILDKPLNQLTEDDISQLTREDCRRFLKEKGMRRPSWNKSQAIQQVISLKALLEPSDDDTPPPTAMHHRSHAPPPPPQPQSQVNLTEPPPPPKAPPPEESSFHAAEDIQKPASSGEKPSETNDTNTNVASPKGCATSGSFGQMTIFYCGKVNVYDRVSPDKARAIMQLATSPVQLTQDDPLNGNAAVWTSPCHLPMDKDVLVPVDTTILQVAQADKMVEYPLQYREKGSIARDADVEGQEHRKVSLQRYLEKRKDRGRLKGKKLTGITSSNFEMYLNLPVKVHSSNGNSSRSSTSFPPQPRLPLVSSGSDQLKVALPIDLNDKDVQEC

SEQ ID NO: 215218 - protein, 81 aa, Glycine max
  Clone ID: PAT_MRT3847_36367C.1.pep
AATIKGDMVTAQCTCEDHSNNRISSSGNNNNNNIGNLNLDSRLVYLNLGATASMSSRLDNAEDEREAMNQTMYHHYHSHDY

SEQ ID NO: 215219 - protein, 44 aa, Glycine max
  Clone ID: PAT_MRT3847_36368C.1.pep
IRYPRTSPVDVIPLGGTTTTSAGRIPSVAAAEESVVAATLLVVL

SEQ ID NO: 215220 - protein, 31 aa, Glycine max
  Clone ID: PAT_MRT3847_36369C.1.pep
KTYVIYEHLFEQGNNMPTQLGAILLIQKQLS

SEQ ID NO: 215221 - protein, 54 aa, Glycine max
  Clone ID: PAT_MRT3847_3636C.1.pep
YFIKVKVFVEQNTILLLYIVYHINRQICWYRKLKFIMNTLNVSIVYPFCRFSQP

SEQ ID NO: 215222 - protein, 140 aa, Glycine max
  unsure (1)..(140): unsure at all Xaa locations
  Clone ID: PAT_MRT3847_36370C.1.pep
RGFLTTFPEIFINIGILLGDVXNYSFSGFSPHINWRIMLAVGILPSVFIGFALFIIPESPRWLVMQNRIEEARSVLLKTNESDREVEERLAEIQQAAGVANCENYEEKPVWYELLFPFASLRRMMITGIGIQWFQQNSGI

SEQ ID NO: 215223 - protein, 229 aa, Glycine max
  Clone ID: PAT_MRT3847_36371C.1.pep
IRLEAINCFSGLGKNAKKQVDTLVITKYGASGDNPACTDLAYNQAKSDGADVLDCPVQMSKDGIPFCLSSIDLSESTTVADTQLKNRAMTIPEIKYRSGIYTFSLTWDEIKTLTPSILNPYEKYILSRNPKSKNLGKLIALSDFLSLTEGSRILISIENAAYLAEKQNLRVTDAVLDALQKAKPRSHKVMIQSTHSSVLKIFKDKSKFERVYKVDENIRDAADSAIEDI

SEQ ID NO: 215224 - protein, 49 aa, Glycine max
  Clone ID: PAT_MRT3847_36372C.1.pep
FNDYQMQAQLCTNPDKAQSLKLTTDSRFLHKLRELGGFKLGNTDKVQGS

SEQ ID NO: 215225 - protein, 241 aa, Glycine max
  Clone ID: PAT_MRT3847_36373C.1.pep
MGPVVHLLRRWCGDPKSLLILEDVLNPLSLLPYQPVAMKVLQCVFPVGIGLHEVQPLLKTLQPKTVLCPEELRLHINFSSEKKSFSVLYYTEAETLKVPYRKDSSELKIATDLASHFYWKTFKKEEINIAKLKGELLMENGRHHLLFDNDNKNSLSNNRSLVHWGLPDSEKLMAALSKMGISGNIQHGVSDAKSQTVCIVHIQDPYKASIEIGTTSTIITTADENVAAFIYKIVDNILDGV

SEQ ID NO: 215226 - protein, 331 aa, Glycine max
  Clone ID: PAT_MRT3847_36374C.1.pep
MSTTVQRTPRSSRHSLFFQDLASPVSARRGKFSSPGQAAAVSSLWRENFGSSDLPPPPVFTLEDRSDFSPESGILDYQISPEAKSDTRTPIQTSNKEFSTPLKSKSEASTSYALRGVQQNQQGSPGLSWWSPTTAKSVGEQDERGRSSPVEGVVQPGALITLPPPLEVARPEVQRNSLPAGNLNEEEWVTVYGFSPGDTNMVLREFEKCGEILKHVPGPRDANWVHILYQNRSDAHKALNKNGMQINGVLIVGVKLLDPMQRQALNERLKNQGFMPLPLASARNSEVSTLKAPSRPYYLQNGNSTARQTGGTIASPTKSLVSKIMDLMFGV

SEQ ID NO: 215227 - protein, 83 aa, Glycine max
  unsure (1)..(83): unsure at all Xaa locations
  Clone ID: PAT_MRT3847_36375C.1.pep
NKGLLFVAIDHNRAMSHQGPYDIXSHKLXGLEWRQVLEDYRLSHPDITXLDPSDAIQHLLSRQNMLHARPDMNLSESHGIIGA

SEQ ID NO: 215228 - protein, 78 aa, Glycine max
  Clone ID: PAT_MRT3847_36376C.1.pep
QKCMYILVTFLRWTILSKARESGDYITPNLVTSSSYSFLLKLVLCTKVPVYSRHFCLLLTPCLFFIISGCIYQVISCN

SEQ ID NO: 215229 - protein, 254 aa, Glycine max
  Clone ID: PAT_MRT3847_36377C.1.pep
YGCEKTTEGGGGGVVVVLDFDRTIIDDDSDRWIVAELGLTELFKELRHSMPWISLMDRIMAQLHSNGVTVDHIADCLKRLPFPPPIVSAIKSAHALGCDLRIISDANTFSIRTILQHHALFHCFSQIHTNPAFLDNQGRLRVTPFHHSTHSPHSCPLCPPNMCKGLVIDQIRSSLLSGTGNEEERRFIYIGDGAGDYCPTLKLKGGDFVMPRKNYPLWNKIHSDPKLVAAQLHDWSTGEDLETILLNLINKISL

SEQ ID NO: 215230 - protein, 36 aa, Glycine max
  Clone ID: PAT_MRT3847_36378C.1.pep
LILTYHANKSLEKLALYMSCLKRCKSIFKHIFYELF

SEQ ID NO: 215231 - protein, 54 aa, Glycine max
  Clone ID: PAT_MRT3847_36379C.1.pep
ICFFFFYIIWRVLLTFTCNFGGFFSLITPSLSYLFSKYTTFSKNSQIGPTLIQI

SEQ ID NO: 215232 - protein, 140 aa, Glycine max
  unsure (1)..(140): unsure at all Xaa locations
  Clone ID: PAT_MRT3847_3637C.1.pep
MPTRSIVHYSFLILWNKIINIVSVAFLCLITLHFCFVSGLSAVLLWLVTAACIKTGRPQIARRAIELAESRLLKDGWPEYYDGKLGRYIGKQARKYQTWSIAGYLVAKMMLEDPSTWGMISLEEDXQMKPVIKRSSSWTC

SEQ ID NO: 215233 - protein, 56 aa, Glycine max
  Clone ID: PAT_MRT3847_36380C.1.pep
NWHGLGAGFLKFHKPATDKFPIQKSSANTAIFTTFFKSHLITSFKGLISLEGQNTP

SEQ ID NO: 215234 - protein, 300 aa, Glycine max
  Clone ID: PAT_MRT3847_36381C.1.pep
NILSEDVVQHKTCNEMAFFPANFMLQTPHHDDHHHHQPPPSLTSILPTCAPQEYHGGVTILGKRSMSFSSGIEHGEEANNAEEDLSDDGSQAGEKKRRLNMEQVKTLEKSFELGNKLEPERKMQLARALGLQPRQIAIWFQNRRARWKTKQLEKDYDVLKRQYEAVKSDNDALQAQNQKLQAEILALKSREPTESINLNKETEGSCSNRSENSSDIKLDISRTPAIDSPHSTHQQSRPFFPPSSARPAGVAQLFQTSSRPDLPSCQKIDQMVKEESLSNMFCGMDDQSGFWPWLEQQHFN

SEQ ID NO: 215235 - protein, 159 aa, Glycine max
  Clone ID: PAT_MRT3847_36382C.1.pep
RFCGRHKTCNEMAFFPANFMLQTPHHDDHHHHQPPPSLTSILPTCAPQEYHGGVTILGKRSMSFSSGIEHGEEANNAEEDLSDDGSQAGEKKRRLNMEQVKTLEKSFELGNKLEPERKMQLARALGLQPRQIAIWFQNRRARWKTKQLEKDYDVPKRQH

SEQ ID NO: 215236 - protein, 317 aa, Glycine max
  Clone ID: PAT_MRT3847_36383C.1.pep
MPSSHLGRNASSLALPKVERPQFKVDGGSNGSPYMLQVQANSSANQPLVNAPTWSIQTQAASLARSASENKVPVHNSVKVEGTPDATVSRAGTQITTDSSFRPFITQTAPGNLPSVHQPLPRTNIVQAPLIPSHTDIAKIVQKVLQPKLPVHPTWTPPSRDYMNKAFTCQMCELSVNEVDTVLLCDACEKGFHLKCLQPSVLRGIHNRVDWHCMRCLSLSGGKPLPPKYGRVMRSSNTPPKLPSNTGGVQPCSEKKVENIDPKVIPQTLATNGSSVPTVSGGHHNVELPSESKIPDTKDMQGTGISSTIEAIDKKPD

SEQ ID NO: 215237 - protein, 134 aa, Glycine max
  Clone ID: PAT_MRT3847_36384C.1.pep
PTRSLQAQNQKLQAEILALKSREPTESINLNKETEGSCSNRSENSSDIKLDISRTPAIDSPHSTHQQQPSRPFFPPSSVRPAGVAQLFQTSSRPELASCQKIDQMVKEESLSNMFCGMDDQSGFWPWLEQQHFN

SEQ ID NO: 215238 - protein, 140 aa, Glycine max
  Clone ID: PAT_MRT3847_36385C.1.pep
DDTDFTGPFDVDDDDMTDPESRAESLDHGHMTETLEAGGFFPIRKSQDAAVGVLVHMLKKAPPLRQDFSTSQHLSQGSHPETRNHNTRGPNQILEPSRPVSIMSSGIIATRKTTADALEEFHGYKEMKNLLLTRGSKHQI

SEQ ID NO: 215239 - protein, 44 aa, Glycine max
  Clone ID: PAT_MRT3847_36386C.1.pep
RRPTHRREGLNACCPPPQTLFFLPETRRVSIAMTHIAPAVLLAD

SEQ ID NO: 215240 - protein, 48 aa, Glycine max
  unsure (1)..(48): unsure at all Xaa locations
  Clone ID: PAT_MRT3847_36387C.1.pep
TKQSSLSLGLRFLHPKGGFSKFTFKDSHFYTLYFWYFHRPLEFXWALS

SEQ ID NO: 215241 - protein, 78 aa, Glycine max
  unsure (1)..(78): unsure at all Xaa locations
  Clone ID: PAT_MRT3847_36388C.1.pep
SSRPQKTGPHAHSPTKSGEDIPKETAKDWKGLRATAKLTVHKGQAXKATVAPIAAALDIKALTEPQPDRTDHQHHHST

SEQ ID NO: 215242 - protein, 69 aa, Glycine max
  Clone ID: PAT_MRT3847_36389C.1.pep
KEFPFFKKRWGVFPINPSKGGTGPQYKAQGGFVNKFISKFFPVGNFPPRFWIKGKKKRPWGFWALTGFF

SEQ ID NO: 215243 - protein, 182 aa, Glycine max
  Clone ID: PAT_MRT3847_3638C.1.pep
FGSRFRSLPLFFLFSVTATLLLPSISDVNFNTSSVLEGKNHSNRGSATATLKIVNKRSKGRHFKVDYVFMACDDRKNCSSSVITRSLGSDGDSGNVARVKLYAVNNSYTRTNKTVNATTQTQQVKILPRLGRSTTLPPLSPPPTFLSPTGSPAQVTTFSSPSILIRVSGVVSAVISEMRLYR

SEQ ID NO: 215244 - protein, 51 aa, Glycine max
  Clone ID: PAT_MRT3847_36390C.1.pep
ALNSKSFSNVTSVLNPLLLDHDYQDSIRQIQLFGTISTINTTSKYLACLEL

SEQ ID NO: 215245 - protein, 43 aa, Glycine max
  Clone ID: PAT_MRT3847_36391C.1.pep
FSSYSHLQSKYGGHHCFLIELYQKLFLKQYQQLPSSYHPPIRR

SEQ ID NO: 215246 - protein, 310 aa, Glycine max
  Clone ID: PAT_MRT3847_36392C.1.pep
REGFSIPKDKTGDYLRKKRAVEAWKRAFQFRPIRTCIMARKMHCAPQEIGNDSPKVSEARKDSISTVYQQQNKLTSLEDCQESSLLKINTDSRCAILPIFSFEPDGTWRIVALPVQCQNHINLASGVNMDGLQLLFPPPLNRLKIDQCKGPRVPLPPYAYSAKSCTKKGFTGSNVRRRCQNKIANRASKLNELPDNSSSQSSLVCGPGLFPDSSTALNSSDKDTSHSKEDDKSSKKKSRKRARKKVKRSKKKSSDSGSPECEVLTEEYVCVSLTSETCSSNDVDKEGVGEFSTSDDRLVKSDCERNGTSM

SEQ ID NO: 215247 - protein, 56 aa, Glycine max
  Clone ID: PAT_MRT3847_36393C.1.pep
PCLLLYTHYHWLHPFTISLAYPYLLTINKLSMFINVTCCMCSIPGSKSNSTMNFTD

SEQ ID NO: 215248 - protein, 243 aa, Glycine max
  Clone ID: PAT_MRT3847_36394C.1.pep
MADSSQDLDQLLDSALDDFQSFNLNPPPPSGEATANSKKESPSLPSGVQGLGMGLPDLRTKKKGKQKASKDSHVSEALNKLREQTKEAVKGLESISPPTADDLGKDALMEDWVKQFEQLAGSQDMESIVETMMHQLLSKEILHEPMKEIAEKYPKWLEEHKSSLSKEEHERYSLQYELIRNLNEVYENDPGNFNKIVELMQKMQECGQPPNDIVQELAPDFDLASLGQLSPEMLETQPNCSIM

SEQ ID NO: 215249 - protein, 51 aa, Glycine max
  Clone ID: PAT_MRT3847_36395C.1.pep
MTTELLKDYISAKSSVDRLVVSKLALIQRQDEYEWLAKTLMESHGQRATFG

SEQ ID NO: 215250 - protein, 86 aa, Glycine max
  unsure (1)..(86): unsure at all Xaa locations
  Clone ID: PAT_MRT3847_36396C.1.pep
FRFVTSKMADMINSLCGGDEKLTRERTHLLRSCXTRKANLEKDVWRVECGIPSGFALTDICNGIFHEMLIRYSCANLLRQAKAPRM

SEQ ID NO: 215251 - protein, 63 aa, Glycine max
  Clone ID: PAT_MRT3847_36397C.1.pep
IVQRTEFSTRPSTYNSFVKGCLSPVAFSLCFSVFLLKSGYVCIPITALQFAFCYTKNQQPNNT

SEQ ID NO: 215252 - protein, 94 aa, Glycine max
  Clone ID: PAT_MRT3847_36398C.1.pep
AFFGGLCCVRVWSCGWVGPLAAGAVRLVSLALRSAVSVGRRWMAGSLGVCFSLWLCGVGPVLWVCAVSRSLAVLWSGFFAVKGGLAFSRRGAGV

SEQ ID NO: 215253 - protein, 102 aa, Glycine max
  Clone ID: PAT_MRT3847_36399C.1.pep
CHAQIPNTTPSPPPPPQKPYKYPSPPPPIYKYKSPPPPYKYPSPPPPPYKYPSPPPPVYKYKSPPPPDYKYKSPPPPYKYPSPPPTPKKPYKYSSPPPPYHY

SEQ ID NO: 215254 - protein, 93 aa, Glycine max
  Clone ID: PAT_MRT3847_3639C.1.pep
LNYPIKTNPINKQIHSIIKKLNIFILTLYIKLYHFSKPYLSTTHPSLLKTILFNSSKYNITILLYTSTIIYLLFYFKSIYPHILIYILSKHPL

SEQ ID NO: 215255 - protein, 92 aa, Glycine max
  Clone ID: PAT_MRT3847_363C.1.pep
KVQGESNNSSTPVDESQFSLLNVLINEVGKGKADDNFLRDTAINLLAAGRDTISSGLSWFFWLVATHPSVESKILEEIRKNLPAREGNWKNL

SEQ ID NO: 215256 - protein, 115 aa, Glycine max
  unsure (1)..(115): unsure at all Xaa locations
  Clone ID: PAT_MRT3847_36400C.1.pep
MTLLEVIKDASVNSKPLDSPLDYPIVLNPGGILPNLKPEVEDESSSSLIKPLIGWQISQTDAEIIDVSKKFFTQLKAKLKNTNNLDKGEFISSLNSYLENIRDKLXGCELGLIHL

SEQ ID NO: 215257 - protein, 37 aa, Glycine max
  Clone ID: PAT_MRT3847_36401C.1.pep
NKLNIINIYLLQTFYKITTILYLINQTFLRNMTNSLT

SEQ ID NO: 215258 - protein, 90 aa, Glycine max
  unsure (1)..(90): unsure at all Xaa locations
  Clone ID: PAT_MRT3847_36402C.1.pep
GNRXDIGEMFIDNAGVPTTXKKKMEKEDQNEEAAYPKDHKETEAPERYRKAAKTEGETTDTKTVEPCGPSSIERKANGLPREGKKKGGPE

SEQ ID NO: 215259 - protein, 72 aa, Glycine max
  Clone ID: PAT_MRT3847_36403C.1.pep
ELEGKQDNSKKSRNESQTCKKLSVNKASSEGVNDNSKVGSKEIKMKKLIEIINITGLLRSNGFNYKQRQPGE

SEQ ID NO: 215260 - protein, 140 aa, Glycine max
  Clone ID: PAT_MRT3847_36404C.1.pep
MNDGGSRQSDNAKPLDLENLRVVSAVGRGAKGVVFLARTGDWSSEECVALKVISKALIIQKKAKLNDTEEYTRVSFEEQVLRRFDHPLLPKLRGVFETDRVAGFAIDYCHGGTLRSLRKKQTEKMFSDDTIRFYAAELVL

SEQ ID NO: 215261 - protein, 90 aa, Glycine max
  unsure (1)..(90): unsure at all Xaa locations
  Clone ID: PAT_MRT3847_36405C.1.pep
PFCLLCAFASAPATHRHXPPNTQYSLAHHGQRRPPHQPRPVLAARHHCPCLGLAVGGFRSDDFCRSGPLSHGIYHSPRPXPVPPXRXXXL

SEQ ID NO: 215262 - protein, 79 aa, Glycine max
  Clone ID: PAT_MRT3847_36406C.1.pep
KKKKREENFFFWQGFYNKRIPQILKGTTPKHGRVSIFTNSASKVFSQGIQHWNSKKKSLLVCHRLTPKNHEAAAWGKNI

SEQ ID NO: 215263 - protein, 124 aa, Glycine max
  unsure (1)..(124): unsure at all Xaa locations
  Clone ID: PAT_MRT3847_36407C.1.pep
GLQHTRSDSAKQCCLTHTVGSLTKEDSRSPWRVPILTETXHLICLXKRLGELEEKDHILRSXPYVMPYEKEELLNAVDYRVDALYAELSAAKTSXFEAWSIQDELLAYIASREGRYSYNHKFEL

SEQ ID NO: 215264 - protein, 91 aa, Glycine max
  Clone ID: PAT_MRT3847_36408C.1.pep
LSGPIVQSVQSNSIMGLGFGKHITGEIRRGRIGIRERNWFMREQIWHNALYSGRGERKELAFGYLLVVDKDVNLCRSTSSGYCRIHSVVYS

SEQ ID NO: 215265 - protein, 106 aa, Glycine max
  unsure (1)..(106): unsure at all Xaa locations
  Clone ID: PAT_MRT3847_36409C.1.pep
XXIAPKKXGFXFYSPXXKFTXTPHKSNRITEIDIXXXXLGICTIQWXXKXXVXESHXXTEKRRXRVKXXXCCRXXTEXXXXTSSXIXXSXXERSXSXXXXHXHXXX

SEQ ID NO: 215266 - protein, 68 aa, Glycine max
  Clone ID: PAT_MRT3847_3640C.1.pep
EPLSNALDGGSKESPFNDEDPIYSPPASLMRDFEAPEANDIRQLLKDHDCLFLKVIYRTEDMIMSSVW

SEQ ID NO: 215267 - protein, 156 aa, Glycine max
  Clone ID: PAT_MRT3847_36410C.1.pep
FEYVPESRTKTTYSLLAAGVREVRSKERYAHHQYIVKTMASYKELLDLRNHLASLNFSQTNKMEDQLQQKDFFFMNAFRASYQLLFCEAADFPSVHVTDSELRRYLNCNNLYFLSTSDRQKAETSLWKNNFGDKSKIAQFIVYNTIMLVILGSVSF

SEQ ID NO: 215268 - protein, 83 aa, Glycine max
  Clone ID: PAT_MRT3847_36411C.1.pep
REHTLEPRYRIDDSPYPVVLSKRTWRRPFSSSINPRYLYYHMINAENEAGGPACNQYQYDHRSKVTSLAMKIISSLYITKCTL

SEQ ID NO: 215269 - protein, 166 aa, Glycine max
  Clone ID: PAT_MRT3847_36412C.1.pep
MTVALSDIVVLRNLLRPLRDLNDALGFCKYLESFYTLRKPVASTINTLAGALYKVFCASPDPARKEMRQACFDYLSLGGLFSEGPVSLLSGLNPRPLSLVLHFFAVAIYGVGRLLLPFPSPKRMWIGVRLISSASGIILPIIKAEGVRQMFFPATVPAYYRNPPAQ

SEQ ID NO: 215270 - protein, 296 aa, Glycine max
  Clone ID: PAT_MRT3847_36413C.1.pep
MASSAFLSVYLIISVIVLLSNRCCAFQCGVSYDTITVLNAFPHDPQAFTEGLLYHGNDTLFESTGLYGESSVRKVALRTGKVENIQKMDDSLFGEGLALLNNRLFQLNWLQKDGFIYEPKNLSQIGTFKYDMKDGWGLATDGKVLFGSDGSSTLYQFEPQPFKVVSKQVVYYKGHQVHNLNELEYINGEVWANVLPTDCIVRISPHDGRVLGWILLQNLRKELVEAGEISDRDILNGIAWDGEQNRIFVTGKQWPKLYEIKVSPIKKPIEEGIIEQLCLYEPLNGGFVLADPAQRE

SEQ ID NO: 215271 - protein, 39 aa, Glycine max
  Clone ID: PAT_MRT3847_36414C.1.pep
FFFCIHFHFFQPHLKFIYRVAFHIYTTKKNILQNNFISF

SEQ ID NO: 215272 - protein, 82 aa, Glycine max
  Clone ID: PAT_MRT3847_36415C.1.pep
HEQRLISRSVLVRFVFFGRYKTTPVRTILRLWTFRTIWLLRLTWAIALMARSLKLGWQSTMSATYIRSGVNGHFPGVVLVGL

SEQ ID NO: 215273 - protein, 76 aa, Glycine max
  unsure (1)..(76): unsure at all Xaa locations
  Clone ID: PAT_MRT3847_36416C.1.pep
MGRREARLLVSQLVXKGRRKQLATKAAXKSAGGGGGVKXPHRYRPETVALREIGEHRGSRHLLVRKLPFQRLVREI

SEQ ID NO: 215274 - protein, 51 aa, Glycine max
  Clone ID: PAT_MRT3847_36417C.1.pep
NQNCGSQMTKVSIVYICNEVMCGLENHNFYVWYYDMILHAHTFYFGLEDTN

SEQ ID NO: 215275 - protein, 106 aa, Glycine max
  unsure (1)..(106): unsure at all Xaa locations
  Clone ID: PAT_MRT3847_36418C.1.pep
MFRLNSLSALAELAVGSRWYHGGSQPTQIRRRLMMVAFLGASAVTASTGLLWKRALAESPPSANNIKSELGDKGKSKEEGEDCNAEKKAAGVXLEPYPEEKKKKRS

SEQ ID NO: 215276 - protein, 161 aa, Glycine max
  Clone ID: PAT_MRT3847_36419C.1.pep
MTTTLERGFSEEQEALVVKSWNVMKKNSGELGLKFFLKIFEIAPSAQKLFSFLRDSTVPLEQNPKLKPHAVSVFVMTCDSAVQLRKAGKVTVRESNLKKLGATHFRTGVANEHFEVTKFALLETIKEAVPEMWSPAMKNAWGEAYDQLVDAIKSEMKPPSS

SEQ ID NO: 215277 - protein, 86 aa, Glycine max
  Clone ID: PAT_MRT3847_3641C.1.pep
DERHRLIKPKQMRRYKAKKLGGLEILPQLFFRSVLVTQIVFICMWGSGKLRGENLFHIDKVRWNKFIGFLLKKEVYLYHPLLSSSR

SEQ ID NO: 215278 - protein, 65 aa, Glycine max
  Clone ID: PAT_MRT3847_36420C.1.pep
FSLLGDERCKWAPWLLGPQALMGLKNGGGGLFSLGPGGYDIPKKALYKGLAPGDPPPCGQCFFFL

SEQ ID NO: 215279 - protein, 161 aa, Glycine max; identical to SEQ ID NO: 215276
  Clone ID: PAT_MRT3847_36421C.1.pep

SEQ ID NO: 215280 - protein, 161 aa, Glycine max
  unsure (1)..(161): unsure at all Xaa locations
  Clone ID: PAT_MRT3847_36422C.1.pep
MESDLNDAVFPEEDLDDDDDDDDETPEDEEDYDDETEPPPFVLAVVAVAPPASTASETLDTTLIPISAVADSSLKPLHPELIEEKKALDDSRRLFQRLWTDEDEIGLLQGFLDYTAQRGSSHHSDTALFYDQIKSKLQLGFNKNQLVEKLRRLKXKYRNVV

SEQ ID NO: 215281 - protein, 137 aa, Glycine max
  Clone ID: PAT_MRT3847_36423C.1.pep
MESDLNDAVFPEEDLDDDDETPEDEEEEEDDDVLDDDETEPPPSVIAVAPPASQTLDTALIPISSVADSSPKPLRTELIEEKKALDDSRRLFQRLWTDEDEIGLLQGFLEYTAQRGSSHHNDTALFYDQIKSKLQLG

SEQ ID NO: 215282 - protein, 445 aa, Glycine max
  Clone ID: PAT_MRT3847_36424C.1.pep
MAEPPKGDEEDGGAAFVLQSKGEWWHAGFHLTTAIVGPTILTLPYAFRGLGWGLGFMCLTVMGIVTFYSYFLMSKVLDHCEKSGRRHIRFRELAADVLGSGWMFYFVIFIQTAINTGVGVGAILLAGECLQIMYSNISPHGPLKLYHFIAMVTVIMIVLSQLPSFHSLRHINLCSLLFALGYTILVVGACIHAGTSENAPPRDYSLEPKKSARAFSAFTSMSILAAIFGNGILPEIQATLAPPATGKMVKGLFMCYSVIFVTFYSAAVSGYWVFGNKSNSNILKSLLPDSGPPLAPTWVLGLAIIFVLLQLFAIGLVYSQVAYEIMEKKSADVRQGMFSKRNLIPRIILRTIYMIFCGVLAAMLPFFGDINGVVGAIGFIPLDFILPMLLYNMEYKPPKSSFTYWINVSIMVIFTGAGMMGAFSSIRKLVLDANQFKLFSSDVVD

SEQ ID NO: 215283 - protein, 339 aa, Glycine max
  Clone ID: PAT_MRT3847_36425C.1.pep
PTRPRVWKNQEEFAGFKSNSGLVKAIVIAGEKILTGHQDGRIRVWKVSGKNDQQHKRVATLPTLRNYIKCSMKPSNYVEVRRRRNLIWIKHYDAISCLSLTEDHSLIYSASWDKTFKVWRTSNFKCLESVTAHDDAVNALVVGLDGMVFTGSADGTVKIWRREVQGKGTKHLFSQTLLKQECAVTALAINEEGNVLYAGSSDGLVNYWVRETNLEHKGVLRGHKLAVLCLATAGSLVFSGSADMAICVWKRSLNDDHTCVNILSGHTGPVKCLAAERDPEAMCNERRWILYSGSLDKSVKVWKVSENAASAHNNHQPPRPSLDQFPRVSSLRKMGSKRY

SEQ ID NO: 215284 - protein, 127 aa, Glycine max
  Clone ID: PAT_MRT3847_36426C.1.pep
ARPVRDGAEVLGNLGLFQVGDGVRNLDAGHAAQGVEQQADAVVAVHAQDRHALGAQVAADLGPLVLGGGLQGAGHVEEGREAERIRDQAVLGQQSVELGALAGGGEGAERDKHGGLHVGCVVCCGRP

SEQ ID NO: 215285 - protein, 43 aa, Glycine max
  Clone ID: PAT_MRT3847_36427C.1.pep
LTSREPPFFFFYGGFLTYEEHAPQDLLNQNPKQCCTLCNSKVI

SEQ ID NO: 215286 - protein, 79 aa, Glycine max
  Clone ID: PAT_MRT3847_36428C.1.pep
RTKSDPLRYIFADEIRLTTGGAIAALAHHRRPPLAVPCTHQFHKGKDASSVSNRQHGTAVAIPIPEHWDDAQKRLEWLS

SEQ ID NO: 215287 - protein, 77 aa, Glycine max
  Clone ID: PAT_MRT3847_36429C.1.pep
NLLLLPSSMSFASFFLIFLCYHALPALADPRATEVAVLCTNTTSPMPQRQAFLTNFYDALEALTALVTRQKYAFVVK

SEQ ID NO: 215288 - protein, 157 aa, Glycine max
  Clone ID: PAT_MRT3847_3642C.1.pep
MGNYVSCTLAPPLMKNSKATRVIIPTGEVKQFREIVKAAELMLEHPSYFLVNSRSLHIGRRFSALGADEELESGNVYIFFPMRRVNSVVTPTDMAVLFLAANSAAKRLSGGKARVLPDNCDGGAWQHKEESSKDGSLSEIPRLSLEGVESGFQCRNY

SEQ ID NO: 215289 - protein, 95 aa, Glycine max
  unsure (1)..(95): unsure at all Xaa locations
  Clone ID: PAT_MRT3847_36430C.1.pep
EILGALVWMRPLSEEATAVLGSTSSISCMVWFMNGKQLSTRQNAALVLKEMHVEALVKCVDVVEALVNMMSEPXGNGSTKSGLSTSFNLWRRFYM

SEQ ID NO: 215290 - protein, 342 aa, Glycine max
  Clone ID: PAT_MRT3847_36431C.1.pep
HASDLVPQINNTNVDKSVAAIHATVFSCLRRREVGEQLYDPVRNTVTVVYEEYRNQCAANSLSSKGMFQLIQRKGSSRNLMALVNDDGSVAKAWPVNLVDCNGKPVWCHGPENGVGHPMYGPLRIGKAEPVNLQFGFYGISAWPSDGGTSRAGSVDESRADGTDTGSRYVSSCCSSPRMSDVAAKELKEDFSVHGSDEEIDDQPEVGSDEDFSDDGGKHALEEVGSVDEESTKSDEEYDDLAMQDVLETGYWSDDEEYRIRVDGVSGELGTKMHGGYKYRRNLDIFLRSRSELAEPLCSYSSLLVEKNERKSKLRTRSLSIPALGKHRSAVNDPILSGAPQR

SEQ ID NO: 215291 - protein, 122 aa, Glycine max
  unsure (1)..(122): unsure at all Xaa locations
  Clone ID: PAT_MRT3847_36432C.1.pep
HTCGENRCIRRCIQWIKSPNANANAAEFFGKAYGRTGLMNLANHGPAHIFPSMFRXVWYEVCGPIXNPVYGSGCLRWSVCXALCQDVVEGALKGALTTPVTCRAPGTPLKASVMAYVIHDVY

SEQ ID NO: 215292 - protein, 123 aa, Glycine max
  Clone ID: PAT_MRT3847_36433C.1.pep
PRPQSRKEIRIQGRERKVREEKNGRRGTSDWCPQRGGVGGTSQEGTRVQEIGHYPLNLLLHFVLPFTVLICISIGALGFPHLEILLSFVASMSDFVLSMSTLDSFVAYIFVNFVSGRCGCVRC

SEQ ID NO: 215293 - protein, 58 aa, Glycine max
  unsure (1)..(58): unsure at all Xaa locations
  Clone ID: PAT_MRT3847_36434C.1.pep
RCXSLELNXFXAGVENQSXKWXWYVIRKKNIFFXLILLVMFRVINGCVGLEVXGAGVL

SEQ ID NO: 215294 - protein, 67 aa, Glycine max
  Clone ID: PAT_MRT3847_36435C.1.pep
FSARHLHTAHQPPHRIPLLPHSIRHRHRRLHSIQIRQGILIIRCRRGMKLLGQWKVLKAAQNQSLSI

SEQ ID NO: 215295 - protein, 44 aa, Glycine max
  Clone ID: PAT_MRT3847_36436C.1.pep
GPAQDIENLITSQRESYFVDAHPQQKEEVNQGRKGPSPSLLRAL

SEQ ID NO: 215296 - protein, 326 aa, Glycine max
  Clone ID: PAT_MRT3847_36437C.1.pep
SPQCKDEESSDCDKACNALLPSTSIDQHQTTGSRNVDVNDQTHLGSQVSLEKLDSRIDSKSTSRVPTSSTLLCQEMNSTGSSLKVSVLEQEQCRESKPPEAMGRSATSRIVETKTDSDISVKQENTVSLFPSEKGAASNIDKDKISEKMNSDEDQQRPKKKQEEDCPYIDLEANIENQETVAASNFSRDQNSVTIVVDEDQQRPKRKQKDDHYIDLEATLEDQETGAVTNICEDKTSEKMDVEEDWQWLKRKQKADHYIDLEATFHEDPSEEGINCALPYDKVQHVDLSDTIMQGSGISCQKIPWNEGNAQLEDRESSGKKLKTIF

SEQ ID NO: 215297 - protein, 56 aa, Glycine max
  Clone ID: PAT_MRT3847_36438C.1.pep
FLTSNNLQSPLIFTPTLPLTNQPPPHTYNPFSDSDFHATWSLQSHSYLIQINILRF

SEQ ID NO: 215298 - protein, 149 aa, Glycine max
  unsure (1)..(149): unsure at all Xaa locations
  Clone ID: PAT_MRT3847_36439C.1.pep
PRVRLMSSGGFPTFDEHMTVFQRDRLKDHYGVTSLVFNYTLSAMPXLILNTYLSETIXMXMVHLHPXLXHYLFFVSNLYTNDTVDESLMMAIAIIDPNFLMTIIIEAGIEDIFMLNSRYFRLTHDIPKPXWRYTMTYIIFHFCSLHGQY

SEQ ID NO: 215299 - protein, 198 aa, Glycine max
  unsure (1)..(198): unsure at all Xaa locations
  Clone ID: PAT_MRT3847_3643C.1.pep
IVELANIKKDIIAPYRHLVGTIPRAESASFEKRTXMYMVYRKDGGAIRQELYYLLKDENDVHFTFGSEMGLKHGLRQARACAXPTSNRRFGLEPNRLXVIISDEIELPFXDDLDYSDFSIIVHASDAMKKGYLLNLLCSIKRDEWNKMWERLKQITHHFEYQYPSQPGDAVNMIWLQVERKISSIRFNLHRKNRYQRS

SEQ ID NO: 215300 - protein, 126 aa, Glycine max
  Clone ID: PAT_MRT3847_36440C.1.pep
PTRPEYSVEETGGGHKASKLSVSDRQVMHSGGNRSSSSEISASSMKGCHTERDAIDQGTAPNRSKVDEISKRKQQREAVDAILYSSLISAKKDETLPKVSAKRPFSSFVASGSTKPPKTKSARQDQ

SEQ ID NO: 215301 - protein, 26 aa, Glycine max
  Clone ID: PAT_MRT3847_36441C.1.pep
EKKGLLVVLRVRCHRMPGSDYHNFLS

SEQ ID NO: 215302 - protein, 61 aa, Glycine max
  unsure (1)..(61): unsure at all Xaa locations
  Clone ID: PAT_MRT3847_36442C.1.pep
TASANDMEKSAPSLASKSNKIXTLIWIFLKSEINHFFPKXNNXSVKMSFSSVNCRPXAXXK

SEQ ID NO: 215303 - protein, 87 aa, Glycine max
  Clone ID: PAT_MRT3847_36443C.1.pep
LLVRTHPSPVMGRSNNFGSVIMSGSAGNYMSQYYQQQHQQVHIDALSSLGFLSSSSSRNATFPQETALLSDYGLLQDVVSSHMLKED

SEQ ID NO: 215304 - protein, 58 aa, Glycine max
  Clone ID: PAT_MRT3847_36444C.1.pep
EEGLRFKIGRGTIGREGRKLYLLDYIKRLHDRWINPRLFIGASRLWGSLDDALDACCS

SEQ ID NO: 215305 - protein, 83 aa, Glycine max
  unsure (1)..(83): unsure at all Xaa locations
  Clone ID: PAT_MRT3847_36445C.1.pep
SQVAAPXNRKQHAIFTRXHESXRIFLLLCARLRTGKKSTLCAGHRLRESLSFTLLVNLLNTVLYDIGLRVRLRLLLTLSQFSA

SEQ ID NO: 215306 - protein, 63 aa, Glycine max
  unsure (1)..(63): unsure at all Xaa locations
  Clone ID: PAT_MRT3847_36446C.1.pep
NAPCIVSEQVIAAMPIGSVVSDHISSTTYTCFFSQLDTATRRTRGRTRGRTRGRTRGXTRGRT

SEQ ID NO: 215307 - protein, 109 aa, Glycine max
  Clone ID: PAT_MRT3847_36447C.1.pep
WTLGCYANIQVCHQGLPTTYSPFYTFFKCIEEGHDIFFEKNIHWQLNLRAQIHGQRNWNILKCGSKCSSLPRMNGARSPVCKVILPTNFLRRRIQSTEDLTRKFLCFFG

SEQ ID NO: 215308 - protein, 100 aa, Glycine max
  Clone ID: PAT_MRT3847_36448C.1.pep
AMVGGVFWFVFSRFCGRILNRIFFFKIKVIYKMKPYYARLTQPLFYCIVPIICILFNEMERMIDVKSGVPHITDCLIPPEPPPMNFPLIPTEALFNVPFL

SEQ ID NO: 215309 - protein, 42 aa, Glycine max
  Clone ID: PAT_MRT3847_36449C.1.pep
MEASTPKYSKASFDEIAKEFSTFWKKVGYTPDQIPLVTISGF

SEQ ID NO: 215310 - protein, 68 aa, Glycine max
  Clone ID: PAT_MRT3847_3644C.1.pep
LFQPALEAKYANPSHSHVMSLKNQLQRSHKGSQSVTKYLFFVKRIVDELSVIDHVISDDDVTLYVLNG

SEQ ID NO: 215311 - protein, 533 aa, Glycine max
  unsure (1)..(533): unsure at all Xaa locations
  Clone ID: PAT_MRT3847_36450C.1.pep
MNLQQIGQPKSSNGYGHQKSEKEGATKSDNKLPSVKSNSSSRLAGVVTGNKGGGYGSPSHDRLVYLTTCLIGQHVXEVQVKNGSIYSGIFHATNSDKDFGIILKMARLTKAGSLRGQESGPEFVSEAPSKTLIIPANDLAQVIAQDVAVSRDGLPSESHYDMHHEIMVDSLISQSRHVETGRELKPWVPDEDDPQCPELENIFDGHWNRGWDQFETNEALFGVKSTFNEDLYTTKLEKGPQTRELEKQALRIAREIEGEETQDLHLAEERGLHLHEDFDIDEETRFSSVYRGKRVDDSGFDEDILFDSHNSETFGDETFGGVFGSVVKRPGEISGGKGNDGARTLANSSSMDHTQSCQSNTCVDLSRSGSYDHAKQLASELPAKSYSTSDGESRIQENLNSNQHGDNAITKEENPIQAEEDVQLSRSEDSQGPLYMNKDGSDKGVLSPNASSYAPSSHTSSKTHEKMGSHGDLVDGSASGKANGETKSVNSRGTQSGSDLVGSIPASSALGLSPSSSVGSLSSEKSTLNPNAK

SEQ ID NO: 215312 - protein, 231 aa, Glycine max
  unsure (1)..(231): unsure at all Xaa locations
  Clone ID: PAT_MRT3847_36451C.1.pep
MATVISSFSFSTLTQSSSQRNLTTLSSNSPTFRFRVGFSCLNVGVRASNSASKMVVRCSSSVAEPPTVSETKLNFLKAYKRPIPSIYNTVLQELIVQQHLMRYKRSYRYDAVFALGFVTVYEQLMEGYPSDEDRDAIFQAYIQALKEDPEQYRVDAKKLEEXWARSQNPNSLLEFSSREGEVEGILKDIAERAGGKGDFSYSRFFAIGLFRLLELANAMEPTILEKVTQFI

SEQ ID NO: 215313 - protein, 179 aa, Glycine max
  Clone ID: PAT_MRT3847_36452C.1.pep
MYGCSIFISVFVMEGYPSDEDRDAIFQAYIQALKEDPEQYRVDAKKLEEWARAQNPTSLVDFSSREGEVEGILKDIAERAGGKGDFSYSRFFAIGLFRLLELANAMEPTILEKLCAVLNVDKRSVDRDLDVYRNLLSKLVQAKELLKEYVDREKKKREERAEPQKSNEAITQQQQFSSL

SEQ ID NO: 215314 - protein, 90 aa, Glycine max
  Clone ID: PAT_MRT3847_36453C.1.pep
RPLAQPLPLPGTHRLSTNRANSGTSVTSKPESTRGSKSSLYFPLPKPGCVFNGGEPTDAEEDIGTASISSGTLLIVMTNVTHIFLVLWHL

SEQ ID NO: 215315 - protein, 135 aa, Glycine max
  unsure (1)..(135): unsure at all Xaa locations
  Clone ID: PAT_MRT3847_36454C.1.pep
GQCPFVPLTSDEHDNRLTQWTNPSPQYPPHFWGIIKEYVEEMEKLSFKLMELIALSLGLEAKRFEEFFIKDQTSFLRLNYYPSCPYPHLAXLGVGRHKDSGPLTILAQDEVGGLEVRPKAHQDWIRVKPIPNAYI

SEQ ID NO: 215316 - protein, 43 aa, Glycine max
  Clone ID: PAT_MRT3847_36455C.1.pep
TENQDLNPSHLSNKQFLHASNSSTLFFFNVLVTCWCPSVVFSQ

SEQ ID NO: 215317 - protein, 135 aa, Glycine max
  unsure (1)..(135): unsure at all Xaa locations
  Clone ID: PAT_MRT3847_36456C.1.pep
MAAFTEKQEALASSSFXAFKXNIPLYRDVFYTSILQKAPALKDLFSVLSNGGHPSNPKLXSMLNSFLDCRVTRAGQLKVNGTVVTDAELGSIHAQKEITDPQIDXRLTEVLLXTINEAGGDKCSDELSXAWKEAY

SEQ ID NO: 215318 - protein, 148 aa, Glycine max
  unsure (1)..(148): unsure at all Xaa locations
  Clone ID: PAT_MRT3847_36457C.1.pep
MTNIAAKLKTLGMVVNENFHVECMLKSLLSEXGSFQMSYNTIKDKWNVHELHSMLVQEEMRLKNQGSHLVHYVSHQGNQGARKKFVKKHDKGKGPLKINNNSKQIQKKTSKRNNCHFCGKSGHFQKDCPKRKSWFEKKGIPNNPNHKP

SEQ ID NO: 215319 - protein, 91 aa, Glycine max
  unsure (1)..(91): unsure at all Xaa locations
  Clone ID: PAT_MRT3847_36458C.1.pep
LXXDYXXLRAXXXXXXCXXVXXVXXVXXXVXXTXXXXXXSXRXXXXXPXXXXYRPXXXXXXXGXXXXXXVXXHXXXKXSXXNQXXXXXVXX

SEQ ID NO: 215320 - protein, 86 aa, Glycine max
  Clone ID: PAT_MRT3847_36459C.1.pep
QKSTFYPQRNVHFLKYNLLPFNEFKPKLVLGFRKISMTGHKLNSISRRHYLIIMIWALHHICKRGDGPTSLRGMRINNRFFNFQIF

SEQ ID NO: 215321 - protein, 84 aa, Glycine max
  Clone ID: PAT_MRT3847_3645C.1.pep
REIAAIDERGRFCSKLHDLSFRDIKFVFICSSELNILVYGSYGLWTRVVVIYIQTMCKFCLLFFSANSGSFFKNQKKKKKGGRR

SEQ ID NO: 215322 - protein, 71 aa, Glycine max
  Clone ID: PAT_MRT3847_36460C.1.pep
RILNLLIIDSLLVGLLNLVILPNSRALNLIAGTGLSASIVVVASSVGGSLSLKRLRALFNSNTNTYCILLV

SEQ ID NO: 215323 - protein, 159 aa, Glycine max
  Clone ID: PAT_MRT3847_36461C.1.pep
PRVRFYDFKQEDGRIESLRKMQCTKFHRNKSLHTMKGQRTPTPFVDPKGQSSHCLIYFIMGYKKMLPLHLRGECFGPSSRKRIEHGITILKMWVWRKLAWVLISEKIMERPLSWLMWRLWKHCPRHASSNLIEQGSMQNTFGPSVSRHLWLVAHMPHVR

SEQ ID NO: 215324 - protein, 51 aa, Glycine max
  Clone ID: PAT_MRT3847_36462C.1.pep
CPDISKQKQENQHIYLISFQIQYVITVFFVPRFVLFFLIIIRPFCRLLAAV

SEQ ID NO: 215325 - protein, 156 aa, Glycine max
  unsure (1)..(156): unsure at all Xaa locations
  Clone ID: PAT_MRT3847_36463C.1.pep
ALSKKCSIQNLKAGLDLLSKLHHPNLVSLFGHCIDGDGQDDSSGLKLHLVYEYVPNGKYGTHLSEFSSDKALKWSDRLAILIGVAKAVHFLHTGVIPGCFRNQLKTNNILLDEHHIPKLSDYGMSIIAEEIEYLEAKGENLKSCQRAXLEDDVYNF

SEQ ID NO: 215326 - protein, 54 aa, Glycine max
  Clone ID: PAT_MRT3847_36464C.1.pep
GTHCDTTLPAIPRSHSLARDSNSHYLARHWFRLSVLISVVHTNVSHTHMWSVIV

SEQ ID NO: 215327 - protein, 65 aa, Glycine max
  Clone ID: PAT_MRT3847_36465C.1.pep
VFIFSAHARGISRAHGPPLGKDYIKGGTGSPPKKLTGLKGPFVESRYFLGGLYDYIMRLRGGGIF

SEQ ID NO: 215328 - protein, 62 aa, Glycine max
  Clone ID: PAT_MRT3847_36466C.1.pep
HFTLPLTNTKTSRRSYRSILTPTIIPHYTSSIIAPNINSMTVLTQLQNLEHPFITQLNHLSI

SEQ ID NO: 215329 - protein, 69 aa, Glycine max
  Clone ID: PAT_MRT3847_36467C.1.pep
KLVDSSCINLHKLYNINVKFQISPLMLCLRRGKLYIFHKVIYDTNLILDLFYKTHYFFLYFFFFQILFI

SEQ ID NO: 215330 - protein, 57 aa, Glycine max
  Clone ID: PAT_MRT3847_36468C.1.pep
KHGQNILRQWQLVIAWAQSSRYSSLLLLRLVLMPLENMSYTLMLSLRFLCSPGVKSL

SEQ ID NO: 215331 - protein, 66 aa, Glycine max
  Clone ID: PAT_MRT3847_36469C.1.pep
MEKTMACLVRAIVILWCCISHVTSDSSYHRYMKGDSVPFYANKVGPFHNPSERYRYFDLPFCSPSN

SEQ ID NO: 215332 - protein, 152 aa, Glycine max
  unsure (1)..(152): unsure at all Xaa locations
  Clone ID: PAT_MRT3847_3646C.1.pep
MVVQLWETLKXAIVXXXXFSPSTFLHGAGTSICXLSTSSQVFMXXPXXXPPSPPRXXDXXPPLRPPVHLGRXSRXGRXSRGYXXGTDPQIXLCSIVHXXPLIXDVLXXCXMFXXPGGPXAXFXXKGXTLSLTKMSXXKKDXTGDIXGLGPFQ

SEQ ID NO: 215333 - protein, 53 aa, Glycine max
  Clone ID: PAT_MRT3847_36470C.1.pep
SCTNWLSLTGRKHKIIVGQRVKLVKLNHQWFVLSYHQSPVFVMMRVIGDFRHM

SEQ ID NO: 215334 - protein, 35 aa, Glycine max
  Clone ID: PAT_MRT3847_36471C.1.pep
NSALYGGDADKFIDLVQAYHVLSDSEKHEIYDHYG

SEQ ID NO: 215335 - protein, 100 aa, Glycine max
  unsure (1)..(100): unsure at all Xaa locations
  Clone ID: PAT_MRT3847_36472C.1.pep
PLIRPLVRLIKLLTHMDHANIMTIKDIXRTTHKERLQXLYHDSEXMDTDLHQIISFNQQXTDEHCPDYTHQXGRGLKYAHSANVVYRDLQPTDLLLNGKC

SEQ ID NO: 215336 - protein, 115 aa, Glycine max
  unsure (1)..(115): unsure at all Xaa locations
  Clone ID: PAT_MRT3847_36473C.1.pep
PTKLKFPTQAXSLTHLSLSTTTPAASKTSFKSTISTNPLHAPVSLSPHQPRDPCNTTALHHAAIVYFRDNLLLRDNKCLTSSNNNSLCILRMYYFDPCNYDEAAWNFYETHPYHS

SEQ ID NO: 215337 - protein, 192 aa, Glycine max
  Clone ID: PAT_MRT3847_36474C.1.pep
LGIRYTVGKEASILRELKQGDFDPKEKFWTRFPTEGSKLTPPHQSAEFRWKDYCLVVFRHLRKLFQVDPADYMLAICGNDALRELSSPGKSGSIFYLTHDDRFMIKTVKKSEVKVLIQMLRSYYQHVSRYENSLVTKFYGVHCVKPIGSQKIQFIVMGNLFCSEYPIHRQFDLKRSSHGRTTDKPEEDIDET

SEQ ID NO: 215338 - protein, 565 aa, Glycine max
  unsure (1)..(565): unsure at all Xaa locations
  Clone ID: PAT_MRT3847_36475C.1.pep
RVRHASEFERLLVRVVHHGPSLTCVRGFSFSQSPTLVLPLHSHRPAKTLLQIATTPSFRSCGCAPMSTFQVRDKIDLSDVERRIFDRLLATLRHFDLQTQLRVAGGWVRDKLLGKECYDIDIALDNMMGTEFVDKVREYLLSIGEDAQGVCVIESNPDQSKHLETARMRLFDIWIDFVNLRSEEYAENSRIPSKQRFGTAEEDAYRRDLTINSLFYHINTDSVEDFTKRGISDLKSGKIVTPLPPKATFLDDPLRVLRAIRFGARFEFTLDEDLKVAAACDDVKDALAAKISRERIGTEIDLMISGNQPVKAMTYICDLTLFWIVFSLPPEFEPYISDGCERLCISYLDTAWNLIHLLGESTFTAEQKRLTLCAALFLPLRNTTYREKKAKKIPVVNHIIRESLKRKAKDAEMVLNLHQASHKFLSLIPCLASSEDVQVVDHDWLGDLVDVPVSSRVRVLTGFLLRELKDYWHVALLISTILHPIDIKDEPSQLGKRRDLFNTVENSIIKLGLEKVWDIKQLINGKDVMNALQLKGGPLVKESLDKAMAXNLPIHLELQRNASNG

SEQ ID NO: 215339 - protein, 61 aa, Glycine max
  Clone ID: PAT_MRT3847_36476C.1.pep
YTSTLISAQLLLTSYSMTFNIHNHILHPYSQTIRPFPVRIFNRHATTTITIIYTYRQRHAL

SEQ ID NO: 215340 - protein, 132 aa, Glycine max
  unsure (1)..(132): unsure at all Xaa locations
  Clone ID: PAT_MRT3847_36477C.1.pep
GSRHASTHASEFERPLYPATPLPPKATFLDDPLRVLRAIRFGARFEFTLDEDLKVAAACDDVKDALAAKISRERIGTESDLMISGNQPVKAMTYNCDLTLFWIVFSLPPEFEPYISDGCXRLCISYLDTAWN

SEQ ID NO: 215341 - protein, 123 aa, Glycine max
  unsure (1)..(123): unsure at all Xaa locations
  Clone ID: PAT_MRT3847_36478C.1.pep
FGSRAEQKRLTLCAALFLPLRNTTYREKKAEKIPVVDHIIRESXKRKAKDAEMVLNLHQASHKFLSLIPCLASSEDVQVVDHDWLXDLVDVPVSSRVRVLTGFLLRELKDYWHVALLISTILH

SEQ ID NO: 215342 - protein, 83 aa, Glycine max
  Clone ID: PAT_MRT3847_36479C.1.pep
LKPKKFNKGPLSSKPPPPWGAKNKILQLSKNSLKIKKMGPQGVQKWAQKNYLTLASKFGREGGFKKDPFGEGAFPLFFLSFQP

SEQ ID NO: 215343 - protein, 85 aa, Glycine max
  unsure (1)..(85): unsure at all Xaa locations
  Clone ID: PAT_MRT3847_3647C.1.pep
QKLEDISVSPISRRLALTVLIGAAAVGSXVQPADCIHGEAASVFGKPKTEHTSLPYNGDGFKLSIPLKWNPSKEVEYPGQVVRYE

SEQ ID NO: 215344 - protein, 48 aa, Glycine max
  Clone ID: PAT_MRT3847_36481C.1.pep
LHHPRLWNGGPRPIKCLWASPFGLLKRFLGLVIVFLQMLTITRFSLYL

SEQ ID NO: 215345 - protein, 78 aa, Glycine max
  Clone ID: PAT_MRT3847_36482C.1.pep
QCNYLMWMKHSLPLIWLTYTSIRILRDRESYCRGTRFILKASWSSIRRRRTARPAGKTHRDWGVFDARARKINNGCIR

SEQ ID NO: 215346 - protein, 109 aa, Glycine max
  unsure (1)..(109): unsure at all Xaa locations
  Clone ID: PAT_MRT3847_36483C.1.pep
EIFGGYLYFHKAPNKEEFHIETYHKIKXLHQYNYLRANKSTFTXNLEAHIPFLDKAFINTTISINPKSKIIKRNKRRIKXXILKRAFNNKEHPYLPKHILYRQKKQFSN

SEQ ID NO: 215347 - protein, 132 aa, Glycine max
  unsure (1)..(132): unsure at all Xaa locations
  Clone ID: PAT_MRT3847_36484C.1.pep
TRTNGPAPPEDKEGNHKQTAGHHEAGSKGRQGHAPQKPHEEPDGQAQSAEGNTDTTPAEAERQEGAAHTXEPKTGGDDPRPTKTKQGETPKERQQDPPRDKKPRAQTTTEERPEGTEQDGKEPPPGGNKNKP

SEQ ID NO: 215348 - protein, 33 aa, Glycine max
  unsure (1)..(33): unsure at all Xaa locations
  Clone ID: PAT_MRT3847_36485C.1.pep
MAQERXXRMKKXGXXRVSHPKRHRHRTEQSXGM

SEQ ID NO: 215349 - protein, 71 aa, Glycine max
  Clone ID: PAT_MRT3847_36486C.1.pep
FEKGRASFLSCSFSSVCSVVTNLRGQCVFLKKFLSSHGSCGGNILPIQRPLKGAGPLLLVCCPWLVRLLVC

SEQ ID NO: 215350 - protein, 213 aa, Glycine max
  Clone ID: PAT_MRT3847_36487C.1.pep
MGWGRFVERDVDEKVMDTDDYATGLYAGDDADGEKLARKVGPEIMNQLTEGFEEMTSRVLPSPLEDEFLDALDINYAIEFEPEYLVEFDNPDIDEKEPISLRDALEKAKPFLMSYEGIQSQEEWEEIMEETMARVPLLKKIIDHYSGPDRVTAKKQQEELERVAKTLPGSVPSSVKQFTNRAVISLQSNPGWGFDKKCHFMDKLVWEVSQHYK

SEQ ID NO: 215351 - protein, 549 aa, Glycine max
  unsure (1)..(549): unsure at all Xaa locations
  Clone ID: PAT_MRT3847_36488C.1.pep
SPRVGANKCAPIYSLAIRGEWKETEAMIDADRRLATSAISQGRATLLHVAAEANQLHFVKELVKLLSDEDLELQDRKGNTAFCLAAASGNVRIVKVMARRNSRLPTIRRGDGLTPLHMAALQGKNKMAWHLYHDTVQTFNDADWDALFFFCLKTDIYDLALKVLREKPRVALARNENQETGLHVLARKPSSFSCRXGLGQRFLYMLTNSGKSPTLALQLVKCLWETLLSLDGTEMQTIIKVISEPSQVIFIATEVGNFEVLAELVRSCPELMWEVDTKNRSIIHIAALHRHIDIYNLIHETSSIRNFVVTLEDEDKNNLLHYAAKLSPPSKLNLLPGPVLQMKFELMWYEEVKKIMQPCFIEMRNSNGKTPRELFTEEHLELVTKAESWMKSMINSCITISTVTATLVLATAFSIKREDNHKPTITRDFMLYIGIAMISSSISSLIFLSILITSPCVEEDFLKSLLRKIWWGLVTLYTSIAYLSTTFTIAFFTTYQVRVPKSFFWGPLISLLIMEYLLFPYGSLVNINPRYWLPSKYIFYTGKAKGRVN

SEQ ID NO: 215352 - protein, 105 aa, Glycine max
  Clone ID: PAT_MRT3847_36489C.1.pep
PFKGFCKKNMEHYAFPNCLEIFPWGEFLVIVQPPKFGPHISFQSVQIIKTVFGHYSTFEVCHQPKSFQRGQIKTTVVHISVSNGPFFWGKKKKKKKKKKKKKKNT

SEQ ID NO: 215353 - protein, 42 aa, Glycine max
  unsure (1)..(42): unsure at all Xaa locations
  Clone ID: PAT_MRT3847_3648C.1.pep
AYDIAYHAFNGYMDHAFLLHXLTPPSCTRHNTLASYAITLID

SEQ ID NO: 215354 - protein, 64 aa, Glycine max
  Clone ID: PAT_MRT3847_36490C.1.pep
VDPSVKSGAGMGGYPFWVSQCLGVKEKSPSLRCVYKIFEFGRSPLINFGLKGPLKLTWGPFPCV

SEQ ID NO: 215355 - protein, 66 aa, Glycine max
  Clone ID: PAT_MRT3847_36491C.1.pep
IPMCQFHSRKIGILELFSLSLSLSLSSLSLSLSLSLSLYIYIYIYIYIFVKDTQLHTERCYVYVIR

SEQ ID NO: 215356 - protein, 103 aa, Glycine max
  unsure (1)..(103): unsure at all Xaa locations
  Clone ID: PAT_MRT3847_36492C.1.pep
MPPPRTPPTSPPTSMYNDDHEHDMVMPCFRLHPIEEELEXLPLTLRVQGXRLNDELIIFLNLYRYDPWEHSALAAXISEKEWHLYVPIDRKYLNCDRPIRVTT

SEQ ID NO: 215357 - protein, 100 aa, Glycine max
  unsure (1)..(100): unsure at all Xaa locations
  Clone ID: PAT_MRT3847_36493C.1.pep
DTVEVDAITHRMTCKTGVVNIPYGGTKGGIGCYPAELTISELDRLTRDFTLTNHDQIGSHTDVPAPDMXTGPQTMSWXILYQFSKFLRYFSAVVYWKTFI

SEQ ID NO: 215358 - protein, 67 aa, Glycine max
  Clone ID: PAT_MRT3847_36494C.1.pep
QSLSEALEKIRTELMLLGFTSLLLTVSEKSIANICIPKGAGETLIPCASITFDDAKKQNVQSRYVNI

SEQ ID NO: 215359 - protein, 50 aa, Glycine max
  Clone ID: PAT_MRT3847_36495C.1.pep
IFYTFAFFCFVIFFFLYFFFFFFFFFFFFFFFLQSVKGNQHQSDGVINEM

SEQ ID NO: 215360 - protein, 49 aa, Glycine max
  Clone ID: PAT_MRT3847_36496C.1.pep
LAHAFQNFNPDYMYGPMHSMEHVHENTRFPLVPLGGSPTRPPTGQTTKA

SEQ ID NO: 215361 - protein, 50 aa, Glycine max
  Clone ID: PAT_MRT3847_36497C.1.pep
ARALHQVHHETQQLQTPQRLVLTLLSSHNFICTLSSLTLYLELPFPCPRL

SEQ ID NO: 215362 - protein, 46 aa, Glycine max
  Clone ID: PAT_MRT3847_36498C.1.pep
SGAIAMSLPFSCILGLLASLTAPTMVRRNHVWIYAPVPLCLAAFPG

SEQ ID NO: 215363 - protein, 74 aa, Glycine max
  Clone ID: PAT_MRT3847_36499C.1.pep
EGQFLTQRTPFPIHFSTAFNKAMVRPWVPLAWKQGAPIYEADLIRWVYFGESSFPFLKTQPSPVLPIGGDSKKG

SEQ ID NO: 215364 - protein, 127 aa, Glycine max
  unsure (1)..(127): unsure at all Xaa locations
  Clone ID: PAT_MRT3847_3649C.1.pep
PTLASXAVTEQAEMCIQLGLLCTQGDLNLRPTMGRVIVVLSKKPPGHMEEPTRPGIPGSRYRRVSRRPYAMSSGEVDDDSNLHTFDSSRNCGTNTTTSATTPTTSSNTTAEVDRRGKRPMQRLVLRD

SEQ ID NO: 215365 - protein, 147 aa, Glycine max
  Clone ID: PAT_MRT3847_364C.1.pep
YPSNSIIFSRGKDCSLDHSSKKGVGKKSLSFLLKKMLACKSGFQPTPLFKDPLSTESRMEKILRAILQKKIYPQGSCSTTPFVKKYLEATPISQFDDEEDDDEEEELAAAAAENGSKWVKTDSECKFYTLINLFILYGLLITYISLT

SEQ ID NO: 215366 - protein, 69 aa, Glycine max
  Clone ID: PAT_MRT3847_36500C.1.pep
LLLLLLLLLLLLLLCKQRRLVIKKKLFFIVIMYKPFSVSNTLSSSMNRSLVQMILCLILLNQILNSNYE

SEQ ID NO: 215367 - protein, 222 aa, Glycine max
  Clone ID: PAT_MRT3847_36501C.1.pep
MSHSAREFFLRTPALFFPHKQVCKGNNLYYPHYPKSEKMATRGLKICLAVSSLFLIILAIVIVTLILTIFKPKNPDIFLHPVDLENFQLLSPNTTSAPLGIVITIVNPNYGNFKYVNSSGYLKYRDTIIAEVPLGIRSFPARSTTNVSTTVGIMTDKLIQDPKFLSDIEGGVFNLTAEATLPGKVTMIKILRLKAKIYISCGVSFNIIAVDASSSCMSKIKL

SEQ ID NO: 215368 - protein, 84 aa, Glycine max
  Clone ID: PAT_MRT3847_36502C.1.pep
WGGGGGGGGGGGSEKGGRRKIMNETGINPQTHSPTEPIIRFKPLVNQKVKALRGESSRCCPKIKLAPKITILESIQYRDQEHPN

SEQ ID NO: 215369 - protein, 73 aa, Glycine max
  Clone ID: PAT_MRT3847_36503C.1.pep
IMYTQRTMHIHNLRSAIGSRRNEKSLSAQNNKPLIPWLRVENKKNMGEKTKLESRILDQPWAYSLDVGGANKS

SEQ ID NO: 215370 - protein, 68 aa, Glycine max
  unsure (1)..(68): unsure at all Xaa locations
  Clone ID: PAT_MRT3847_36504C.1.pep
IRELDXMFRRICCWNXIELXSKLKCAYIXIFXTSXIXNXYVXPXXFPCSEGXHXHSSLAXXXXXSHXC

SEQ ID NO: 215371 - protein, 265 aa, Glycine max
  Clone ID: PAT_MRT3847_36505C.1.pep
MSISTTTTTPLFCFNHYFTRERELSIHRSRPKPFSLTSASTLTLFNSNNNNNCNYSFASCKPHKFHTPKFEAFATNTDTLESIQSSDVSFDQTFPINRTELVEGKIFVRLDQGKDLGNWELTVGCNLPGKWIVHWGVSRVDDVGSEWDQPPRDMIPPGSIPIKDYAIETPMKKSLSSAEGDILHEVKIDLKPNNDISAINFVLKDEETGAWYQHKGRDFKVPLVNYLKEDANIIGPKKGFSLWPGFLKSYIVIFFASVFSISSLF

SEQ ID NO: 215372 - protein, 61 aa, Glycine max
  Clone ID: PAT_MRT3847_36506C.1.pep
SSVLERPHYIESQLGAPEISRSHFLWIQDRPKKKSDNSNSHMNRVASLFHGNVELRFSQSI

SEQ ID NO: 215373 - protein, 83 aa, Glycine max
  Clone ID: PAT_MRT3847_36507C.1.pep
IATTGLGNHPCGTWRVLGDGLGRKRPFFPGLVNSRMFVSMFSLKTSPNFFFFKGSTSQAIPYSTPLPVKTILFFQQSLPTSKP

SEQ ID NO: 215374 - protein, 38 aa, Glycine max
  Clone ID: PAT_MRT3847_36508C.1.pep
LFNKRGSSPTQGKPSIKGFAATAVGRKARFKRSCRFST

SEQ ID NO: 215375 - protein, 143 aa, Glycine max
  unsure (1)..(143): unsure at all Xaa locations
  Clone ID: PAT_MRT3847_36509C.1.pep
VRNSRVDPRVRQVRNKQVLLKDYVTGFPKESDMNIVESTITLKLPQGSNDVLLKNLYLSCDPYMRNLMNKPEGPPNSRAYTPGXCMPGVTAYAGLFEVGSLQKGENVFVSAASGAVGQLVGQFAKLNGCYVVGSAGSKEKVLL

SEQ ID NO: 215376 - protein, 70 aa, Glycine max
  Clone ID: PAT_MRT3847_3650C.1.pep
MTSPCSSLLGVEEPIFSRQKANTNLTHVSAFGHGLMRPVASFYGEKAVEELTSSKVFSVKVTNSVQMNVA

SEQ ID NO: 215377 - protein, 94 aa, Glycine max
  Clone ID: PAT_MRT3847_36510C.1.pep
ANTNTATTTTLTTANVNPSPAPPKFMKVKSRSLLDQMLADDTKAKVPKASDGNANPITIPGVIEPLEKILVLNRVNDHEDRTTDKSLAIVPAKK

SEQ ID NO: 215378 - protein, 130 aa, Glycine max
  unsure (1)..(130): unsure at all Xaa locations
  Clone ID: PAT_MRT3847_36511C.1.pep
MSSTKFDVEKFTGKNNFNLWRVKMLALLTQQECELALEGEEMLPAEMTAAQKRVIMKKAYSAILLSLGDEVLGXVSGEKTADKLWAKLESRYMTKXLHNRLCLKKQLYTMHMHEGESIHKHIDNFNPVWT

SEQ ID NO: 215379 - protein, 343 aa, Glycine max
  Clone ID: PAT_MRT3847_36512C.1.pep
MAQVRNKQVLLKDYVTGFPKESDMNIVESTITLKLPQGSNDVLLKNLYLSCDPYMRNLMNKPEGPPNSRAYTPGSPLIGYGVSKVLESGHPDYKEGDLVWGFTKWEEYSLLPSAQILFKIEHTDVPLTYYTGILGMPGVTAYAGLFEVGSLQKGENVFVSAASGAVGQLVGQFAKLNGCYVVGSAGSKEKVDLLTNKFGFDGGFNYKEEPDLDAALKRHFPEGIDVYFENVGGKTLDAVLLNMRVRGRIPVCGMISQYNLTQHEGVTNLAQIIYKRIRLQGFNFMDFVHLYPKFLEFLLPNIREGKVVYVEDIAEGLENGPSALVGLFSGRNVGKQVLVVSHE

SEQ ID NO: 215380 - protein, 46 aa, Glycine max
  Clone ID: PAT_MRT3847_36513C.1.pep
FLVITLHSFIRIVVVCFDSYSSQQAMNQSFICIDIRLAIVRYLTRR

SEQ ID NO: 215381 - protein, 48 aa, Glycine max
  Clone ID: PAT_MRT3847_36514C.1.pep
RPCYIGTSEHNMYVTPVPPIMTTLFDRTPLIHPHNSSLFPTLYITQRL

SEQ ID NO: 215382 - protein, 123 aa, Glycine max
  Clone ID: PAT_MRT3847_36515C.1.pep
APMAPRLYEAILEENPQVGIFKYGGPPHWGKNRNLAFKGVIKKYKDAKKFLKVKEKYDSHGLFSNTWTDQVLGLKDGVTILKDGCALEGLCICSQDSHCNPSKGYYCRPGKVYKKARVCTHLK

SEQ ID NO: 215383 - protein, 51 aa, Glycine max
  Clone ID: PAT_MRT3847_36516C.1.pep
KIKLFCFQKCHMCEFPLRGFPVLWYVNYVIICTFVKITIHYVSLVPDGKDL

SEQ ID NO: 215384 - protein, 96 aa, Glycine max
  unsure (1)..(96): unsure at all Xaa locations
  Clone ID: PAT_MRT3847_36517C.1.pep
MAATTNPPAIPLPCFFLAAEGNTHPMASTTNLYQAXLSDKGIPTFFHQQNLPSGQEITPALFKAIKDSKIATTALSQHPPPPSFCLDELTSIAHCP

SEQ ID NO: 215385 - protein, 76 aa, Glycine max
  Clone ID: PAT_MRT3847_36518C.1.pep
EFVNLLSVRDCIIEMSSPLKNHLQRVMKMATFAMKTSIFLSTNNKWKAMIYGQQKKETMMLGKFWWLVWKAGCSLT

SEQ ID NO: 215386 - protein, 273 aa, Glycine max
  Clone ID: PAT_MRT3847_36519C.1.pep
MGSVPLASAAALARRLEGKVALITGGASGIGECTARLFSKHGAKVVIADIQDELGHSICKDLDSSSATYIHCDVTKEENIEHAVNTTVSKYGKLDIMHSSAGIVGAWNPSILHNKKSHFEQVISVNLVGTFLGIKHAARVMIPSGRGSIVAMASICGRIGGVASHAYTSSKHGIVGLVRNTAVELGTLGIRVNSVSPYAVPTPMSKTFLNTDDEGIAALYSNLKGTVLKPQDVAEAVLYLGSDESKYVSGHDLVVDGGFTVVNPGLCVFGQSV

SEQ ID NO: 215387 - protein, 40 aa, Glycine max
  Clone ID: PAT_MRT3847_3651C.1.pep
SHSVILCYFVQLEQRSFFPLVKWKLLFKLYTINNCGVAGP

SEQ ID NO: 215388 - protein, 58 aa, Glycine max
  Clone ID: PAT_MRT3847_36520C.1.pep
YHLNLGNLAKQRVLKLAKTKSLGLTRNKENNGLKHYFILKPAWVFCTEGSRELLAWGL

SEQ ID NO: 215389 - protein, 92 aa, Glycine max
  unsure (1)..(92): unsure at all Xaa locations
  Clone ID: PAT_MRT3847_36521C.1.pep
FLYSPTNPLPPPPKHEKRXKXKTXTKKTRXPNKXKRKXPKPRPRXRSNRKPTPKRKPHPKPEKNPTPKPKPSRKPNPHXKNTENPXPHEKKK

SEQ ID NO: 215390 - protein, 61 aa, Glycine max
  Clone ID: PAT_MRT3847_36522C.1.pep
NEKRMPFMYFFEESPFISGGLKNISSPFQRICCPECYILGIFAETTIGLFIAPFLAPRPLH

SEQ ID NO: 215391 - protein, 47 aa, Glycine max
  Clone ID: PAT_MRT3847_36523C.1.pep
QEQYLTKFKYNINHMIIHAICFKKIEFHLSINYFLNPILDKLYFFIN

SEQ ID NO: 215392 - protein, 59 aa, Glycine max
  Clone ID: PAT_MRT3847_36524C.1.pep
EVGSVRGFLSSVFFRRNAPHFYPAHCITHVCVYVVLPPLGDPHPSKKKMTHLLACKILL

SEQ ID NO: 215393 - protein, 73 aa, Glycine max
  Clone ID: PAT_MRT3847_36526C.1.pep
FLLILKIFTFFSKKVLKSLVNENPFQARRLFPKQPLATRKTFNWARRKFPPKSGQGPPGLEIVRKGFKPTGDG

SEQ ID NO: 215394 - protein, 46 aa, Glycine max
  unsure (1)..(46): unsure at all Xaa locations
  Clone ID: PAT_MRT3847_36527C.1.pep
ETDGSSLCLQCDMIDHVGGKEXHGRSLLIRQRVEFPGDQSRHDENP

SEQ ID NO: 215395 - protein, 86 aa, Glycine max
  Clone ID: PAT_MRT3847_36528C.1.pep
MEKNNSLPKYSCSYSEFGFAERSNSYNFNGPIQKGSGFCAANDPELKRKKRIKAYNVFTVEEKLKTSVRNGFKWIKDKFGDIHSGV

SEQ ID NO: 215396 - protein, 52 aa, Glycine max
  unsure (1)..(52): unsure at all Xaa locations
  Clone ID: PAT_MRT3847_36529C.1.pep
YLPQDEAVAAGLGTVYGAXDPLECQKVVYLLNTQVSGLLKNEPKQVMDTRGY

SEQ ID NO: 215397 - protein, 317 aa, Glycine max
  unsure (1)..(317): unsure at all Xaa locations
  Clone ID: PAT_MRT3847_3652C.1.pep
MVESMIEAITNIQPTCLRSLTLRDCSSAVSFPGGRLPESLKSLYIEDLKKLEFPTQHKHELLETLSIESSCDSLTSLHWSARARAESAXSNNCENMESLLVSGAESFKSLCSLIISQCPNFVSFCREGLPAPNLITFMVIGSDKLKSLPDEMSTLLPKLELLHISYCPEIESFPEGGMPPNLRTVVIENCEKLLSGLAWPSMGMLTDLTVGGRCDGIKSFPKEGLLPPSLTYLYLYDMSNLEMLDCTGLLHLTSLQELEIKRCPKLENMAGESLPVSLIKLTINSCPLLEKRCRMKHPQIWPKICHIPGIKVDDRWI

SEQ ID NO: 215398 - protein, 148 aa, Glycine max
  unsure (1)..(148): unsure at all Xaa locations
  Clone ID: PAT_MRT3847_36530C.1.pep
HLFGNPRFELIRHDVVEPILFEXHSPVKTIKTNVMGMLNMLGLAKRIGARFLLTSTSEVYGDSLEHPQKETYWGNVNPIGEXVNEWTMLLCFNINNLCFRCWFGLVITGERSCYDEGKRTAETLAMDCHWGVGAEVGYVFVELIRASL

SEQ ID NO: 215399 - protein, 218 aa, Glycine max
  Clone ID: PAT_MRT3847_36531C.1.pep
MADFGDYFGLLFIWLASIFILRVILFTKSRIKSRLPPSPRALPVLGHLYLLTKLPHQAFHNISIRYGPLVYLLFGSKPCVLVSSPEMARQCLKTHETCFLNRPKRTNLDYITYGSSDFVLAPYGPYWSFMKRLCMTELLGGRMLHQHLPIREEETKLFFKSMMKKACFGEEVNIGKELAMLANNIITRMALGRKCCDDVEGEGDQLIELVKEMTELGG

SEQ ID NO: 215400 - protein, 49 aa, Glycine max
  Clone ID: PAT_MRT3847_36532C.1.pep
TCSWYSNICTTHVKELEYFVHRFINIPLIFTVFFIKFNLFHQPDYTFFV

SEQ ID NO: 215401 - protein, 169 aa, Glycine max
  Clone ID: PAT_MRT3847_36533C.1.pep
FGSSGSRWIIHEFIKEHNHELLPALAYHFRIHRNMKLAEKNNIDILHAVSERTRKMYVEMSRQSSGCQNIGSFMGDINYQFDRGQYLALDEGDAQVMLEYFKHVQKESPNFFYSIDLNEEQRLRNLFWIDAKSINDYLSFNDVVSFDTTYIKSIDKLPFAPFVGVNHHS

SEQ ID NO: 215402 - protein, 69 aa, Glycine max
  unsure (1)..(69): unsure at all Xaa locations
  Clone ID: PAT_MRT3847_36534C.1.pep
LXVNRDHRLPHLKTGNKSNRYLISRISQFLPTSLCSIPHGKENHSLCWSQTSGINFFSTPGLFAEHSPI

SEQ ID NO: 215403 - protein, 117 aa, Glycine max
  Clone ID: PAT_MRT3847_36535C.1.pep
FEIYYFDSLNFSASISFYSSVRLLYFLLILKPPICSSVTSFFFFSKRFFVNSICLLSSLIFIFFSSCSLCKASNSDSVVPVAVLFDIPPSIASLLLLLLYTLVSKEYSSVHTHTHTK

SEQ ID NO: 215404 - protein, 384 aa, Glycine max
  unsure (1)..(384): unsure at all Xaa locations
  Clone ID: PAT_MRT3847_36536C.1.pep
MATFKDEKEEEEAPMHVDILEAIFSHVPLIHLVPASHVSNSWKRAVSTSLRHVKPAKPWLTVHTQSPRAPHVTTTFAYDPRSREWFQIHAPSPNHTTALRSSHSTLLYTLSPREFTFSLDPLKLAWHHARPPRVWRTDPTVARVGTKIILAGGACDFEDDPLAVEAYDAESHAWLRCEPMXXILKGSTASTWLTVAVAGDKMHVTEKNSGVTCSFDCGTMTWQGPFNLRPDQSVFHCVTGTIRGRLMVAGLVGDAENVKEVKLWEVKGGLGLGLGLGFEEIGAVPKEMVVKLVMGEGDCCCCWGVAGSIEVNWIGDYVYFQNRMEPEEMVVCEVVNGRCEWGSVRNVTVNDVSRMGRMVFSGGHVGLEDLKRAVKDNCMFVEKK

SEQ ID NO: 215405 - protein, 67 aa, Glycine max
  Clone ID: PAT_MRT3847_36537C.1.pep
IHSYWLILQMNSLDRSLLFYIRLTTAKLLSLPFVLLISLVILLIVLLIERKNHYLYADQLEIRNKNL

SEQ ID NO: 215406 - protein, 525 aa, Glycine max
  unsure (1)..(525): unsure at all Xaa locations
  Clone ID: PAT_MRT3847_36538C.1.pep
HLLITFSCNMVGILXKPKQMGLKELLQAFLDFRCSVVERRARFKLSQAQERRHIVEGILIGFDNLDGVIRIIREASSNSAAAAGLRNAFSLSEKQAEALLDISLRRLSLRESGNFVAESKSLMEQISKLEELLSSRKNILELIEQEAIELKSKFSNPRRSMLEDTDNGQLEDIDVIPNEEMILALSEKGYMKRMKPSTFNLQNRGTIGKSVGKLKVNDSMSDFLVCHAHDHVLYFSDKGTVYSARAYKIPECSRTAAGTPLVQILSLSDGERITSIIPVSEFAEDQFLLMLTMQGYIKRVSLNLFSSIRSIGIIAIQLVPGDELKWVRLCSNDDFVAMASHNGMVMLSQCSKIRTLSRNTRGAPAMRLKKGDKMASVDIIPAAMWNNLETTSKFPGINAKSQNGPWLLFVSENGYGKRVPLSSFRISSLNRVGLIGYKFSAEDRLAAVFVVGFSSAEDGESDEQVVLVSQSGTVNRIKVRDISIQSRFARGVILMRLDHSGKIQSASLISATDCEPEEVLAIAQG

SEQ ID NO: 215407 - protein, 356 aa, Glycine max
  unsure (1)..(356): unsure at all Xaa locations
  Clone ID: PAT_MRT3847_36539C.1.pep
VDMGDLFCEPFPHVSWLLPPNFPLNSQFPNFGQKSDQCYGQMLKNKSTTNSMVPSFVYLHLAHDYDDQDKLFFCDEDQAFLQKVPWLVVRTDNYFVPSLFLMPSFEKQLSDLFPNKETVFHFLGRYLFHPTNKVWGLVSRYYQAYLAKVDERVGIQIRVFDTGTGPFQHVLDQILACTLKENLLPDVNRKXDIVNSLAKPKSKAVLMTSLSSGYFDMVRDMFLEHPTVTGEVVGIYQPSHEGHQQTEKKMHNQKAWAEMYLLSLTDMLVTSSWSTFGYVAQGLGGLKPWILYKPENGTAPDPPCQRAMSMEPCFHAPPFYDCKAKRGTDTGALVPHVRHCEDMSWGLKLVDSNSWQ

SEQ ID NO: 215408 - protein, 73 aa, Glycine max
  Clone ID: PAT_MRT3847_3653C.1.pep
RLREDDRRDLSRSTSISDYCSIATRGLIYYCVDGKSSSINIPSIFQIHPFILPPTSLTPLDFIHVSIVPPTHP

SEQ ID NO: 215409 - protein, 61 aa, Glycine max
  Clone ID: PAT_MRT3847_36540C.1.pep
DLVCGQKSNPILGLFLQMGRLSSVGWHASSHTMYFIGKYMCIKPFLSCKALCSIFSFFLRS

SEQ ID NO: 215410 - protein, 63 aa, Glycine max
  Clone ID: PAT_MRT3847_36541C.1.pep
FARFEARAKKSGNPCDDVEPAAERGAENEVGNEKTQVHKNVAVPFSRAEDTDVKGFYLFTYFH

SEQ ID NO: 215411 - protein, 42 aa, Glycine max
  Clone ID: PAT_MRT3847_36542C.1.pep
KGSPFWFTTNRVKPFLIENVRPPRVSPCLVKTKPLGLPTSKL

SEQ ID NO: 215412 - protein, 66 aa, Glycine max
  Clone ID: PAT_MRT3847_36543C.1.pep
MQSGRFGKLNKRVTFPETLDLSPYMSEVGDGSDIYKLYAVVVHIDMLNASFFGHYICYIKDFCGNW

SEQ ID NO: 215413 - protein, 122 aa, Glycine max
  unsure (1)..(122): unsure at all Xaa locations
  Clone ID: PAT_MRT3847_36544C.1.pep
GEREGGFRAALTWLFILVCLLGWDEVWGKHALRVKLDAVTPMLPLQGRVXSLSSEEDTSIYSSLLGDTESDPPCLPSAVAQGMGASNVAIYSNHANNINFLDDEKPPWGWRDGSTGNTRTSV

SEQ ID NO: 215414 - protein, 54 aa, Glycine max
  Clone ID: PAT_MRT3847_36545C.1.pep
NQDALLIARMQPFLVGDILYIWLVKIFNFACNSFSVATENYKKFPRQKKKKKKN

SEQ ID NO: 215415 - protein, 178 aa, Glycine max
  Clone ID: PAT_MRT3847_36546C.1.pep
FSNKGNKTCDVCKEEVRNLPVTLLRIRSVRAQNTRARSEQGDDFRAWQELPVLVIVSMLAYFCFLEQLLVGRMRTKAIFISLPFACVLGLLSSVTSSTMVKSRFIWIYASVQFVLVVIFAHIFYPLVGKHAVLAILLATFAGFGVVMSGSSILLESSRWRRRWQAQQRGSSAMTQEGL

SEQ ID NO: 215416 - protein, 68 aa, Glycine max
  Clone ID: PAT_MRT3847_36547C.1.pep
KKMLKFTSDCRTSYVLIFMVIFNSLIKLLLSIVSFFKPSPNIWYTNYYLLLFRLNYFFTYIEVRRKHT

SEQ ID NO: 215417 - protein, 75 aa, Glycine max
  unsure (1)..(75): unsure at all Xaa locations
  Clone ID: PAT_MRT3847_36548C.1.pep
MAPEADNKPAXKKPVDDNRSTVGDKAPAAKKPKAXNKLPIDGGAGGEGKKNKTSTKSVETYKIYIFNDLNQVHPD

SEQ ID NO: 215418 - protein, 55 aa, Glycine max
  Clone ID: PAT_MRT3847_36549C.1.pep
SSAVESIIQGTRWLLRGRSYYTQIFKKWNFRVQRLYWSFRMTLPSIVFADCSAGL

SEQ ID NO: 215419 - protein, 446 aa, Glycine max
  Clone ID: PAT_MRT3847_3654C.1.pep
YFEIAGLNRLKTIDAGFYKNEDCRSGTPFPSLESLFIYGMYCWGVWSSFDSEAFPVLKRLEIRGCPKLEGSLPNHLPALTKLVIRNCELLVSSLPTAPAIQSLEIRESNKVALHAFPLLLETIEVEGSPMVESMIEAITNIQPTCLRSLTLRDCLSAVSFPGGRLPESLKSLRIKDLKKLEFPTQHKHELLETLSIESSCDSLTSLPLVTFPNLRYLTIEKCENMEYLLVSGAESFKSLCSLRIYECPNFVSFWREGLPAPNLIYFSVSGSDKLKSLPDEMSTLLPKLEHLYISNCPEIESFPEGGMLPNLTTVWIINCEKLLSGLAWPSMGMLTHLYVGGRCDGIKSFPKEGLLPPSLTSLKLCNLSNLEMLDCTGLLHLASLQELKIRRCPKLENMAGESLPVSLIKLTINSCPLLEKRCRMKHPQIWPKICHIPGIKVDDRWI

SEQ ID NO: 215420 - protein, 211 aa, Glycine max
  unsure (1)..(211): unsure at all Xaa locations
  Clone ID: PAT_MRT3847_36550C.1.pep
MYKAVVFDFDGTVIDTEKHLFDLINTHLKIHQVAPISLEFYKQFIGGEATELHTYLXNAIGFKNKEKIYDQYYQTSVELPVNSTIIQLMQYLKKRHIPMAITTSSYKKNIYPIFKQLGLDTYIDVVVGRENVDSVQPNPEIYLKAVQELNYNPTTCLAIXDSVNGATAAMLAGLDVVVNTNIITKDQDFSTVQCVGQDMEFEDIKISLFKE

SEQ ID NO: 215421 - protein, 68 aa, Glycine max
  Clone ID: PAT_MRT3847_36551C.1.pep
FMSGVAIKYCIQPSVITFDIPVFSKNMVFHSMIHLSLDQLISIDEMSCIRRILIICIFCDLTFVVSLF

SEQ ID NO: 215422 - protein, 56 aa, Glycine max
  Clone ID: PAT_MRT3847_36552C.1.pep
RQSNKVTALRWVRLSSVGDVKLQGRILYLQVQLFVGKATSSSGKQSVCTSSTAEPI

SEQ ID NO: 215423 - protein, 64 aa, Glycine max
  Clone ID: PAT_MRT3847_36553C.1.pep
LMASAKLLLPYPFTTKLPGPRYSHRRFTCSSVIAQSGSAKEHLLALIADQDRGIRTQSDSAKPP

SEQ ID NO: 215424 - protein, 63 aa, Glycine max
  Clone ID: PAT_MRT3847_36554C.1.pep
PYVITFVSTLLNQICTFLKHKGGRNHIDGPTAEGKNTIQADPFEQQTLNQIIYSLFSSNDSPS

SEQ ID NO: 215425 - protein, 71 aa, Glycine max
  Clone ID: PAT_MRT3847_36555C.1.pep
LNPSTTLLGCMLLLARRRRCSDRYYHGAETRISIKNKVRAKRSFNGQVRDISVRFRIFKISVIKVETATNE

SEQ ID NO: 215426 - protein, 75 aa, Glycine max
  unsure (1)..(75): unsure at all Xaa locations
  Clone ID: PAT_MRT3847_36556C.1.pep
MGKPFFTLSLSSLCLLLLSSACFAITSSKFNECQHNNHNAIEPDHRDXDEGXLIVTSNTLHPVQLSSGDTAPYAP

SEQ ID NO: 215427 - protein, 46 aa, Glycine max
  Clone ID: PAT_MRT3847_36557C.1.pep
MSCGMSPSLLSIYSINLSGSRELQYPLLAFDDYPSFLDVIFMLFYL

SEQ ID NO: 215428 - protein, 118 aa, Glycine max
  Clone ID: PAT_MRT3847_36558C.1.pep
VTAAFAFSGTELVGLAAAETKNPLKSLPGAVRQVFWRITLFYVLGLLFVGLLIDSTDPRLLGSGALIDVTASPFVLVGEYAGLKGFDSFMNVVILVSVVSIGVSGVYGGSRTLTALAE

SEQ ID NO: 215429 - protein, 149 aa, Glycine max
  unsure (1)..(149): unsure at all Xaa locations
  Clone ID: PAT_MRT3847_36559C.1.pep
HRPGSSSRKMLPLRPQSQVGAPKTSLSLVSSDPLLSPDEPRSNSDNLRESPAESASSQETWPIADAAAAKKMENGKAEINCLEQKVIHRVSSADKVTLQDVARESIATICEKMHRLPEXYLEEEEWTRVIHSFELEKVSLRYVKNCIVS

SEQ ID NO: 215430 - protein, 221 aa, Glycine max
  Clone ID: PAT_MRT3847_3655C.1.pep
MLQLLYTAIFSEMLLILTLVFKTPLRKLVIVSLDSVKRGRGPVVVSTVGATLMVVLASSLYSMAKIQQRTLEAGIVNPTDQVLMSKHMLEASLMGFLLFLSLMIDRLHHYIRELRSLRKTMEAIKKQSRSFEDGKNGNSEEHKALNEEITTLKSKIKKLESECEAKGSQAKTLETEVEALKKQSEGFLMEYDRLLEDNQSLRSQLQAIDQSPLNFDNKKSM

SEQ ID NO: 215431 - protein, 118 aa, Glycine max
  unsure (1)..(118): unsure at all Xaa locations
  Clone ID: PAT_MRT3847_36560C.1.pep
HYLLLYQMSQPGFLTSWSTQVHPPTTLMADGSSYLYAMLHHSSLSTIPGDFDIDVKVTSINNMCPYGLNPGISGSHFFSTIPQSISQQTAWNQMPTLRTPXNFDSSKQSFCQLSIDLL

SEQ ID NO: 215432 - protein, 464 aa, Glycine max
  unsure (1)..(464): unsure at all Xaa locations
  Clone ID: PAT_MRT3847_36561C.1.pep
MNNCTAKRRENARSSREEDQLIVTPLGAGNEVGRSCVYMSYKGKTVLFDCGIHPAYSGMAALPYFDEIDPSTVDVLLITHFHLDHAASLPYFLEKTTFRGRVFMTYATKAIYKLLLSDFVKVSKVSVEDMLFDEQDINRSMDKIEVIDFHQTVEVNGIRFWCYTAGHVLGAAMFMVDIAGVRVLYTGDYSREEDRHLRAAETPQFSPDVCIIESTYGVQHHQPRHTREKRFTDVIHSTISQGGRVLIPAFALGRAQELLLILDEYWANHPELQNIPIYYASPLAKKCLTVYETYTLSMNDRIQNAKSNPFSFKHVSALSSIEVFKDVGPSVVMASPGGLQSGLSRQLFDMWCSDKKNSCVLPGYVVEGTLAKTIINEPKEVTLMNGLTAPLNMQVHYISFSAHADSAQTSAFLEELNPPNIILVHGEANEMGRLKQKLISQXADRNTXXLTPKNWSSCEMYFNS

SEQ ID NO: 215433 - protein, 66 aa, Glycine max
  unsure (1)..(66): unsure at all Xaa locations
  Clone ID: PAT_MRT3847_36562C.1.pep
TGPAKFKKGKSPNGSPSKSWSFSAPQFQRKKRVPSFKVYAVXGKLKGSFRKSFKWLKDRCHKVVFG

SEQ ID NO: 215434 - protein, 59 aa, Glycine max
  unsure (1)..(59): unsure at all Xaa locations
  Clone ID: PAT_MRT3847_36563C.1.pep
IWRKQTSVREEDSNWFSXWEEELPPPEELMPLSXTLISHILAIAFDITNPSQLHHPQQC

SEQ ID NO: 215435 - protein, 157 aa, Glycine max
  Clone ID: PAT_MRT3847_36564C.1.pep
MVKDTKPLAYAANNGYQQKGSSFDFDPSAPPPFKIAEIRASIPKHCWVKNPWRSLSYVLRDVLVIAALVAAAIHFDNWLLWLIYCPIQGTMFWALFVLGHDCGHGSFSDSPLLNSLVGHILHSSILVPYHGWRISHRTHHQNHGHIEKDESWVPLTE

SEQ ID NO: 215436 - protein, 48 aa, Glycine max
  unsure (1)..(48): unsure at all Xaa locations
  Clone ID: PAT_MRT3847_36565C.1.pep
SEFPPFGYXSDXESVPLVCGPXNLXGWXRCFLFRVLYXLHXXLGCGFS

SEQ ID NO: 215437 - protein, 79 aa, Glycine max
  Clone ID: PAT_MRT3847_36566C.1.pep
THVIHHLFPQIPHYHLVEATQAAKPVLGDYYREPERSAPLPFHLIKYSTRPMRQDHFVSDTGDVVYYQTDSLLLHSQRD

SEQ ID NO: 215438 - protein, 376 aa, Glycine max
  Clone ID: PAT_MRT3847_36567C.1.pep
MVKDTKPLAYAANNGYQKEAFDPSAPPPFKIAEIRVAIPKHCWVKNPWRSLSYVLRDVLVIAALMAAASHFNNWLLWLIYWPIQGTMFWALFVLGHDCGHGSFSDSPFLNSLVGHILHSSILVPYHGWRISHRTHHQNHGHIEKDESWVPLTEKIYKNLDNMTRLIRFTVPFPLFVYPIYLFSRSPGKEGSHFNPYSNLFPPSERKGIAISTLCWATMFSLLIYLSFITSPLLVLKLYGIPYWIFVMWLDFVTYLHHHGHHQKLPWYRGKEWSYLRGGLTTVDRDYGWINNIHHDIGTHVIHHLFPQIPHYHLVEATQAAKSVLGEYYREPERSAPLPFHLIKYLIQSMRQDHFVSDTGDVVYYQTDSLHLHSHRD

SEQ ID NO: 215439 - protein, 56 aa, Glycine max
  Clone ID: PAT_MRT3847_36568C.1.pep
GHGFLDQRSRWEAQVERRTKVTRASLRRGKVPDKQNLRRHKRTSFTNQASSCSPTK

SEQ ID NO: 215440 - protein, 87 aa, Glycine max
  Clone ID: PAT_MRT3847_36569C.1.pep
YGKNFRGDSRWLINRASSIHHCVNDNRQKTRHRTKYPWELTSYRTRQFVPLAKPHTLPVYNLFPVLTPQHTLQHLPQCKNDTHSFDL

SEQ ID NO: 215441 - protein, 77 aa, Glycine max
  unsure (1)..(77): unsure at all Xaa locations
  Clone ID: PAT_MRT3847_3656C.1.pep
XIIKXXXPXXXXVQIXXXQKXXVXGYYDYGXLLSPHFFXXLAFISHHINDXILSYLFFXLSLFXSYIHSILGVYAHD

SEQ ID NO: 215442 - protein, 101 aa, Glycine max
  Clone ID: PAT_MRT3847_36570C.1.pep
LTSGSIALDMGPKIQEKSGRFIWCVIVWSIWCHRNDCVFNDFSFVGDKLLEETKYSFSHWQSNTAACIVDGHLQLLVSCLILAATEVWSFQLYGRRGFVSS

SEQ ID NO: 215443 - protein, 290 aa, Glycine max
  Clone ID: PAT_MRT3847_36571C.1.pep
MFNENVGFHYGAKQERLLRTSCNGNHLSPGSVLEASFSSSSLDESSGHGFHPDSMNYSYYGQLEHDTELSDSATSFKKGSTGEMLSDLINQIPRALESLLTLGTELTRSKLGHMKDILLHAELVLGIATDRREDDGPQLLIYRFLGDDLDSMASDAMWTDANGVVVGCEDSKQRKELKGFLLDCVIEYLESNCCQYFNSGFKKWTKLPLCMKAEMLAQEVKREINEWLSMVGMVPDEIIEWEMSHSLGKWTDFDIEAFEAGVDIDGDILQILVDEVVQDLAGCKQGTISF

SEQ ID NO: 215444 - protein, 95 aa, Glycine max
  Clone ID: PAT_MRT3847_36572C.1.pep
KMPLKGECFPKPSFRGAQEGGPFPHSKNAALKGVFYCRGPFAHLFMEKGNSTHGLQIVAHRRTGSSPPPLLKEPSQKPAPPAFHEGQTKKKPPLE

SEQ ID NO: 215445 - protein, 64 aa, Glycine max
  Clone ID: PAT_MRT3847_36573C.1.pep
TSICYWTPRGIKKEKYMYDRYYDVIGKISVNRVFIMKRCSCQHSIVNMMTMVALRSRNIASETT

SEQ ID NO: 215446 - protein, 67 aa, Glycine max
  Clone ID: PAT_MRT3847_36574C.1.pep
KFGAVSVVSFGGAPLMSLVIALVATLLSCSFWQRPFHFFLSNRPLIFFFCPFLFKFWDGFRFSWEWG

SEQ ID NO: 215447 - protein, 91 aa, Glycine max
  Clone ID: PAT_MRT3847_36575C.1.pep
RGKKGATNKVLQKTLETRMTGPLRKMEHKIFFWAETHWVRFESPKPTLNKGADNFAALNTTATSVFFSRDCFSMGSPDPRKESSGGSTNIG

SEQ ID NO: 215448 - protein, 105 aa, Glycine max
  Clone ID: PAT_MRT3847_36576C.1.pep
QHHASSKQNPYHHSENQCLTLQPSLLLFPNDLFLEAFFSIKQSMHQFTGHYYPMPKPSKFLGGKENPERIRSPTTQPKKIKLCSAQLQDTQTNPPSITDKNLNFG

SEQ ID NO: 215449 - protein, 323 aa, Glycine max
  unsure (1)..(323): unsure at all Xaa locations
  Clone ID: PAT_MRT3847_36577C.1.pep
YIKREKNGELXAYLMKHINNWVTRAYCHKVLRLSAATQDLPKSVICNVHGVNPKFLKIGEKIAAERELGQKAFTKGAYFLGKMVWAKGYKELIDLLAKHKADLDGFKLDVFGNGEDANEVQSAARRLDLNLNFQKGRDHADDSLHRYKVFINPSISDVLCTATAEALAMGKFVVCADHPSNEFFRSFPNCLTYRTSEDFVTKVKEALENEPYPLTPEQRYQLSWEAATQRFMEYSELDGILNKENNGEKSRVDKGKLIAKSASMPNLTELVDGGLAFAHYCLTGNEFLRLCTGAIPGTRDYDKQHCKDLHLLPPQVENPIYGW

SEQ ID NO: 215450 - protein, 131 aa, Glycine max
  Clone ID: PAT_MRT3847_36578C.1.pep
QDPNLCPLRNLSLSLFNYYSFYAGVRSDPSDHRYTERDREPIYANTVGPLHNRNETYRDYDLTFCEPGDLTEMKEALGEVLTGDRAGSAPYKLEFHRDKESPSVCNRKLCKQDVSRCRSAVRKDYYCQMHY

SEQ ID NO: 215451 - protein, 123 aa, Glycine max
  Clone ID: PAT_MRT3847_36579C.1.pep
AKVKEALKNEPYPLTLEQRYQLSWEAATQRFMEYSELDRILNKENNGEKASVDKGKLIAKSASMPNLTELVDGGLAFAHYCLTGNEFLRLCTGAIPGTRDYDKQHCKDLHLLPPLVENPIYGW

SEQ ID NO: 215452 - protein, 97 aa, Glycine max
  unsure (1)..(97): unsure at all Xaa locations
  Clone ID: PAT_MRT3847_3657C.1.pep
IKNIPFQKPKKATHPYTLKAALAXFISTFIFIFPSSSSSIAYNKLTNNCSSTPSNLISSSITHTFSLFIPISLSSNIFLSHLNPSITFSTFLRSNIT

SEQ ID NO: 215453 - protein, 44 aa, Glycine max
  Clone ID: PAT_MRT3847_36580C.1.pep
QTSFFTSYQTNPQGLNQNLHVSISKLSVITLHKVLRAKLGKEKA

SEQ ID NO: 215454 - protein, 63 aa, Glycine max
  unsure (1)..(63): unsure at all Xaa locations
  Clone ID: PAT_MRT3847_36581C.1.pep
EXRKFXQXWSXLXXSFXXLRLRXSLPQYSXXXILXRHCIVSVIXSQCDSDPEIXAWXEXDDKQ

SEQ ID NO: 215455 - protein, 74 aa, Glycine max
  Clone ID: PAT_MRT3847_36582C.1.pep
PLLQLTLVESVLFTFFDIETLFIGKKKKKKKKKKKKKKKKKKKKKKKKKKKKKKKKKKNRGGDFKKAKFTKRGI

SEQ ID NO: 215456 - protein, 69 aa, Glycine max
  Clone ID: PAT_MRT3847_36583C.1.pep
TKENTLLGPECEDTGYQFLVSQKGGRGVLINDYIQADDRVKVKNLTTGAFTIMDLGRDHHGPSPCRAFD

SEQ ID NO: 215457 - protein, 86 aa, Glycine max
  Clone ID: PAT_MRT3847_36584C.1.pep
SFKNKAKWEHRGVSINDFECPSIIKDQEHTLWMVKGGCKYLNPSNGAREQLVTNLRSIQRSLGSRIYIYIYIYTDRYSISFILINI

SEQ ID NO: 215458 - protein, 127 aa, Glycine max
  Clone ID: PAT_MRT3847_36585C.1.pep
MKVDDNQEVLGELNSADHLLEVADSEDVPVETAASGFDDSCASSCQRNSSPECHFTQQFSIAIGKAKNLQLLDLSNNGFSAQAAEAFYGSWATLRPLSSQNHITEQIIHFSTRENKCCRVKPCCKKV

SEQ ID NO: 215459 - protein, 83 aa, Glycine max
  Clone ID: PAT_MRT3847_36586C.1.pep
TPTPYGGSSTHSPRHLFPKLYFHVMPQHFLMGLTNSDGSWLQPSPITILWPALWSSFFLTFMSSFSTSFRRPHLQTKQPALML

SEQ ID NO: 215460 - protein, 217 aa, Glycine max
  Clone ID: PAT_MRT3847_36587C.1.pep
MDPKNVKSDLVLILDYGSQYTHLITRRIRSLSVFSLCISGTSSLSTIADLNPSVVILSGGPHSVHTPDSPSFPDGFLQWAQSNGVTVLGICYGLQLLVQRLGGDVRVGDKQEYGRMEICADKPSALFGPEKVGKRQVVWMSHGDEAVALPDGFHVVARSDQGAVAAIENPPAKLYGLQYHPEVTHTEDGMETLRRFLFDVCGVGAGWKMEDVMEEEI

SEQ ID NO: 215461 - protein, 206 aa, Glycine max
  unsure (1)..(206): unsure at all Xaa locations
  Clone ID: PAT_MRT3847_36588C.1.pep
MASSIGCILLLTLCVVLVALVHAQQQIGFISIDCGSSPPNNEYTDDITKIRYTTDGAYIQTGVNKNISSEYAYPKNPNLPLPLSDLRSFPQGERNCYRLVAGRRGSLHLIRASFLYGNYDGVNKPPEFDLYVDVKFWSTVKFRNASEEVTMEIISVAESGVTHVCLVNKGAGTPFISXLELRPLNSSIYSTEFGESASLSLFKRWD

SEQ ID NO: 215462 - protein, 103 aa, Glycine max
  Clone ID: PAT_MRT3847_36589C.1.pep
MASAASGFVLSLNVAASTTNSRVVLFNTKNNASRFLVRASDEPAAAAPATTTPPAEAEAKPKPPPIGPKRGAKVSYPQNSTFFVVVVAHVVQNNSLLSHEHDP

SEQ ID NO: 215463 - protein, 74 aa, Glycine max
  Clone ID: PAT_MRT3847_3658C.1.pep
PYGGSECHILCAYLVKNGAHPGINALHTHFSTNNWGLRQFKPKCLNGKMPNYFCLTDHIYIRKKMREDNNNTDL

SEQ ID NO: 215464 - protein, 61 aa, Glycine max
  unsure (1)..(61): unsure at all Xaa locations
  Clone ID: PAT_MRT3847_36590C.1.pep
GNVGVNQKNLGRAGSNCWLGKRPVVRGVFFNPXYNPYGGGEGRAYFGAKTCDCLFFFFSRA

SEQ ID NO: 215465 - protein, 242 aa, Glycine max
  unsure (1)..(242): unsure at all Xaa locations
  Clone ID: PAT_MRT3847_36591C.1.pep
HLQKPCFIAIGSPFLRTVLKIHIEPELLHKDSVLKVESRQDLIFYKGGKLVLSNSALAKFISGYKKYGRIGELSKLLLSIQGELNSVAGSSLCSDVIGACIQLGWLECAHDILDDVEATGSPMGRDTYMLLVSAYQKGGMQRETKALLKQMKKVGLDKGLSDDAIDEHNLCEETLNSLGKADLAIALVQILKDEESDSFPLVYNLNSSFFFFCXARMIEDALRAYRRMVDMKIQTTSQTFAF

SEQ ID NO: 215466 - protein, 56 aa, Glycine max
  unsure (1)..(56): unsure at all Xaa locations
  Clone ID: PAT_MRT3847_36592C.1.pep
XSFGFAGVTNSFIYLTLMFAGXIRHFKLKVVVDNXEVXQCIHIEXPXAVLXGTKEX

SEQ ID NO: 215467 - protein, 60 aa, Glycine max
  Clone ID: PAT_MRT3847_36593C.1.pep
CLIFVSVESKFVQLSFRFHDLIVYAICFPNLVTIPDLIFLLIKVRLCGLIFLIEVLGLVF

SEQ ID NO: 215468 - protein, 60 aa, Glycine max
  unsure (1)..(60): unsure at all Xaa locations
  Clone ID: PAT_MRT3847_36594C.1.pep
AYIDTEVLLKQEYDGKVVDDWXXGVTLYVMIEGEYTFEHHNEKKDFRETIQRRLNDQYYI

SEQ ID NO: 215469 - protein, 109 aa, Glycine max
  Clone ID: PAT_MRT3847_36595C.1.pep
TGRKAIDNSKSAGEQNLVAWARPLFKDRRKFSQMADPTLQGQYPPRGLYQVIAVAAMCVQEQANMRPVIADVVTALSYLASQRYDPNTQHTGQSSRHAPGTPPRNRRGQ

SEQ ID NO: 215470 - protein, 185 aa, Glycine max
  unsure (1)..(185): unsure at all Xaa locations
  Clone ID: PAT_MRT3847_36596C.1.pep
KDLTWHANGRNCDRMLRHLADSLQWKKIDRLYPDFGKETKNLTLGLATDAMNPYGCLSTQHNSWPVLLVIYNLPHWLCMKRKYMMLSMMITGPRQPGNDINVYLNPLIEDLTKLXDEGVLVFDGFRNETFNLCAMLFCTINDFPTYENLSGYSVKGHRACPICEEDTSYIQQKHGRKTVYTRHRR

SEQ ID NO: 215471 - protein, 38 aa, Glycine max
  Clone ID: PAT_MRT3847_36597C.1.pep
IEHVLLNFETLDPGILYQSTKSIIPKKYPTTKHTKYFI

SEQ ID NO: 215472 - protein, 170 aa, Glycine max
  unsure (1)..(170): unsure at all Xaa locations
  Clone ID: PAT_MRT3847_36599C.1.pep
GTPAYPTGATIAVLSTSLTFIAGLPTTRTXTDISSLASTTWXSHCAQALPPLVANNSQTVYYSPDLAHAPLANDVXYPLLKRWXIPCLEYKLDHGTLYHEHNTSLXGTMDGHYCTMWNLPMYGCTDAAYVLKELQXAETAYHNGVVHIIGIHHCTAVQCISFIVYNPLSF

SEQ ID NO: 215473 - protein, 156 aa, Glycine max
  Clone ID: PAT_MRT3847_3659C.1.pep
MSSTTTTNYELGMRSSIENEHSGHLRGLLNSQHNGNNLTMYHNVLKLPKKMSQNNLGLCFGGSDKLTLDFLGVGGMVRNMNNGGGVSQRERQQQHSMGITMSPLDPKLESAQANQHYGTSTLFLPGGGFDGLLTRVGLVYAVVRALVSSHIKKNVG

SEQ ID NO: 215474 - protein, 438 aa, Glycine max
  Clone ID: PAT_MRT3847_365C.1.pep
MSQLKQMSHIDSAPPTPGKFKMDKASYFNRVRWHTSLAKLAVWSFVFLGAILIFFLRSPASSPVPADLSRRSLRTYNWGGPVWEKRVRASAQVRSRNGFAVLVTGAAGFVGTHVSAALKRRGDGVLGLDNFNDYYDPSLKRARQGLLERNGVYIVEGDINDEALLRKLFEVVPFTHVMHLAAQAGVRYAMENPGSYVHSNIAGFVNLLEVCKSVNPQPAIVWASSSSVYGLNTKVPFSERDRTDQPASLYAATKKAGEEIAHTYNHIYGLSLTGLRFFTVYGPWGRPDMAYFFFTRDLLKGKPIPIFEAANHGTVARDFTYIDDIVRGCLGALDTAEKSTGSGGKKRGPAQLRVFNLGNTSPVPVSDLVSILERLLKVKAKRNIMKLPRNGDVQFTHANISYAQSELGYKPTTDLQSGLKKFVRWYLNYYSGGKKAVE

SEQ ID NO: 215475 - protein, 94 aa, Glycine max
  Clone ID: PAT_MRT3847_36600C.1.pep
LPHYFAFLSHSLSYLTFFYYIQLRGCVFLLGLFIRIYSVLHCSRFFVLPITLFFTCTGDTWYSYSIVFFHLSVVLFLMIHTYFIITWSFLYIFL

SEQ ID NO: 215476 - protein, 161 aa, Glycine max
  unsure (1)..(161): unsure at all Xaa locations
  Clone ID: PAT_MRT3847_36601C.1.pep
WRCCNCEEKHSNPDSHRHHVVQEHMGSLSPQMQRLLPQNVDSEWIEMILNCSWNPLDVLAAVRMLDNKAKLKSSPLPEDLYLDHHALDYNDCFKDASSSYIEKESSGDSRRNCSVECNNHCKIENDVRKGVEDQLSMANPIIDCWPVSDDPXRAKLLGKIH

SEQ ID NO: 215477 - protein, 147 aa, Glycine max
  Clone ID: PAT_MRT3847_36602C.1.pep
MGTLVGHVAPGFGFLLIGLWHLFNHIKLHALNPKSYKGPSWFPSAKFRYIELVLIMVGSTASVAMELFIGPERHQPLDPDGTIPSNHLHNFEHSSISITFFLYAACAIILDRARVQAQFELTQLLGAIAFAQQLLLFHLDSADHMGP

SEQ ID NO: 215478 - protein, 26 aa, Glycine max
  Clone ID: PAT_MRT3847_36603C.1.pep
DMGDKSIWFTSIKTPSHVVYLRETEI

SEQ ID NO: 215479 - protein, 137 aa, Glycine max
  Clone ID: PAT_MRT3847_36604C.1.pep
RWYRSQASARMRFVAIALVLMLACCCCCMGSDRWRNIEAKMHGKNKQVSRENNDHHSIPLKDYGKPGSGHHDVTAADDNNDHHYIPRKDFGKHGSAQFHVTDDHNRYHCVHNSNYKEDRTCYGQPGGGIKVNPGPGH

SEQ ID NO: 215480 - protein, 79 aa, Glycine max
  unsure (1)..(79): unsure at all Xaa locations
  Clone ID: PAT_MRT3847_36605C.1.pep
LVYQDLLTGDELFSDSFCCREIENGFLWEVEGKWVGKGGGDVDIAANPXXEGXGEDEGVGDVXXKGSDXXVTXSLXEQP

SEQ ID NO: 215481 - protein, 143 aa, Glycine max
  Clone ID: PAT_MRT3847_36606C.1.pep
RRVRGRYVKVVSITSVRMRFGAIAFVLMLAFCCCTGSDRWRNIEVKMHGKNKQVSSENNDHHSIPLKDYGKPGSGHHDVTAADDNNDHHYIPRKDFGKHGSAQFHVTDDHNRYHCVHNSNYKEDRTCYGQPGGGIKVNPGPGH

SEQ ID NO: 215482 - protein, 55 aa, Glycine max
  Clone ID: PAT_MRT3847_36607C.1.pep
WCCHHVHECKIAHLFNPVFQSLYLTHAMSNLLVAVVLQYETLYKNARSLQANLVK

SEQ ID NO: 215483 - protein, 110 aa, Glycine max
  Clone ID: PAT_MRT3847_36608C.1.pep
MCSFSSKQTLYLALPRPWTSKRHHHSHRHLRLGMLNRRRAHLKEARQRKRIVVKSEIQMKNLKLYMENQTIIEENEKLRKQAMLLHKENQALSSQLQKKLSGQNNNTNNN

SEQ ID NO: 215484 - protein, 249 aa, Glycine max
  Clone ID: PAT_MRT3847_3660C.1.pep
MATENEKRKRKESSDVRSKKKKKQRSEDEEATKQLRFFESAMGIELSSLELESLKDNKCILEVSEAADSDVTVLGKTIRAAFGASWKEALCEGKPVEGKVIAGSPAVLIITSSALRCIDLLRGFRSMTEQCHAAKLFSKHMKLEEQISLLKNRVNIASGTPSRIKKLIDAEALDLSRLQVLVLDLHPDVKGYSLLTLPQVRDEFWDLFKNYFYQPMLQGHLRICLYGYQVSVRLKAKHKHKQGHTIPDA

SEQ ID NO: 215485 - protein, 73 aa, Glycine max
  Clone ID: PAT_MRT3847_36611C.1.pep
AHLIRRTNPTWDFFNDPMTVIFMRLSMTGGDGPKTIFWWHFCAPWMRRARCLTTHVIRNIHYEGGILTATVFQ

SEQ ID NO: 215486 - protein, 192 aa, Glycine max
  Clone ID: PAT_MRT3847_36612C.1.pep
MREQNVESFYAKLRQTALSSSSSPVLIFPSTSDVDSLCALKIIFHILESDSIQYACYPVSSFHEIHKYTNSSSNDEPLSVVLVNWGNHRDLSNTLNLPSNARVFVVDSHRPIHLRNLSDQNDAVVVLFTKEDEGQSDLAYDFDLTTLANAATTVDSDSDSESESESDSDSDSGSERTGSRKRRKKNPQDDDD

SEQ ID NO: 215487 - protein, 87 aa, Glycine max
  unsure (1)..(87): unsure at all Xaa locations
  Clone ID: PAT_MRT3847_36613C.1.pep
SEPTWSCYGTFAFWFQSFFLFKCERIFIYEYSPTTYEPEAPGLEKENLXRVAQIIGPGLHEAFPPGEMPSVDNTLIEKGHDTVGQQM

SEQ ID NO: 215488 - protein, 148 aa, Glycine max
  Clone ID: PAT_MRT3847_36614C.1.pep
MVAAIAYEESRRKRVEENRKRMEALNLPLLSQALHKSPSPKSSPLKQVKNRTIQKELVVVRRSSRVANLPTPVYKEVVVDRVTIPRRTLGRPYNRHRDYANRVYASDEAREEALEKAETLMSGLESEHPAFIKSMLQSHISGGFWLGL

SEQ ID NO: 215489 - protein, 67 aa, Glycine max
  Clone ID: PAT_MRT3847_36615C.1.pep
KDNCALQAFLLENMPLVNCNNHVSSADSKAYIFYLLQNTNQYINICILCPSIRNLTQNKIICMNSFF

SEQ ID NO: 215490 - protein, 63 aa, Glycine max
  Clone ID: PAT_MRT3847_36616C.1.pep
LSFFGTSYIFHSLKIDSYREVGANGVYHLQVFNNYFDIYEDDTAFATSESKTDFYHKFQEFGI

SEQ ID NO: 215491 - protein, 54 aa, Glycine max
  Clone ID: PAT_MRT3847_36617C.1.pep
FHHNIERMLFKKSLESSQIANHRFFTLFYSTRAYVIVKNVHLSSLLRTSLFLCF

SEQ ID NO: 215492 - protein, 59 aa, Glycine max
  unsure (1)..(59): unsure at all Xaa locations
  Clone ID: PAT_MRT3847_36618C.1.pep
STAPILDIVTENPPNRIDQNTYPDYYFKITNSYHMTRLKEKSXRTVVKDTIKTRHMGLN

SEQ ID NO: 215493 - protein, 46 aa, Glycine max
  Clone ID: PAT_MRT3847_36619C.1.pep
IVYLRSTTIIRSHSLRSHLTMATSSAKSGHEFTGKAATGHATNRGD

SEQ ID NO: 215494 - protein, 46 aa, Glycine max
  Clone ID: PAT_MRT3847_3661C.1.pep
QDPNQPGVGKPVLEGYSRVLEGQAFNIVAWIENVLYVDKPMGTRDV

SEQ ID NO: 215495 - protein, 102 aa, Glycine max
  Clone ID: PAT_MRT3847_36620C.1.pep
PVQPGEKVPKAFQKKPPKKTPQGPGGINPDGPKNWPIFPFVVQVSLFLIFHKEFVENFWGPYSWGMKAFQKYHGRLDQKTCPSLKNFALWGKFQNLILFLEK

SEQ ID NO: 215496 - protein, 95 aa, Glycine max
  Clone ID: PAT_MRT3847_36621C.1.pep
MRIDKFCALCHSDFANWVINAHRRILRPLSFRNNKLGGKCAETDSAPFIIQEQQAEWINAYRRILRLLSFWNNKLGGKCAHESADAWVVPGNSGP

SEQ ID NO: 215497 - protein, 140 aa, Glycine max
  unsure (1)..(140): unsure at all Xaa locations
  Clone ID: PAT_MRT3847_36622C.1.pep
VLNGVAGLDYMERIPLATSEGCTHVLSRKNGEKGNXRVVSGDGEEMTLITGTSDEEAYNTLICELEKSVPTLVGIECAKDEKLSRGRNFDKPKTRCFTIVPMDVKIVVQHXIVNCVTIIMKKKDKLSCQVGINPYSMEWT

SEQ ID NO: 215498 - protein, 85 aa, Glycine max
  Clone ID: PAT_MRT3847_36623C.1.pep
FAQGELQTDVIPGKDFVHSELNEDDSDTVVPVNYAVSPHELTLCLHEVIQSRLEGRVQELEIALENSQGYGLWLSMRVIPSILKL

SEQ ID NO: 215499 - protein, 418 aa, Glycine max
  Clone ID: PAT_MRT3847_36624C.1.pep
GKELDDHFLKASGCIKEIAVLIDINGGDTLLRQNSGHLDRKRGNSAKVFSVLSWSRYSKSPPSTKDGAEFSGRSEPCKPGAHCATLKKLYAAEKKLFKALKEEGIVALEFDRKSMLLRKQEDENLDVVKIDKTRSSVDKLESDLISLRQCISDTTSSILEMIDEELLPQLVALTAGLTQMWRTMHESHKAQALISQHLSNLSDNHNMILNSEYHHQATIQFETEASYWYNSFCKLVKFQREYVRTLYEWIKLAESLKDSNECSNHSSILAICDQWERGLNESPDKETSEAIKSLVSCIRSITGQQIQEDNILKRLEKLDRKFQKCLNSLAEMQQRIDGDMADTSPRHPIHLKKTETEALKKQVESAKANYLDAVQYSRAMTLDHLQKTLPPLFQSLMEFSNASAQAIEAINTTGKPVE

SEQ ID NO: 215500 - protein, 50 aa, Glycine max
  unsure (1)..(50): unsure at all Xaa locations
  Clone ID: PAT_MRT3847_36625C.1.pep
VLSCFSWLTYNSNKSADYPVSVLPGKGCDPCREFYFYFLRDTPKNPXTNG

SEQ ID NO: 215501 - protein, 156 aa, Glycine max
  Clone ID: PAT_MRT3847_36626C.1.pep
FMCLHGREKMIEGDNINTSLTAPEYLLLRLSPPPFPALPPLAVVLSRESRYSKTSVRLKSRTFLNWTIAQSWKAGLPRFGISIISYLSALAPFLSVVFPIVTFPADSFILMAFRKLIHNKATAPPVRHLWAASVSTKSCKNSSNEDEVRGFKIAIK

SEQ ID NO: 215502 - protein, 108 aa, Glycine max
  Clone ID: PAT_MRT3847_36627C.1.pep
SLMNFGMESSHKIKPMFLGSGFTYFKQQVCILFSFLNSKYCFLDLQNVKQGFFGGLVPAYRDNVTPVFCIEKGPTQFYMALRILKKFFPTQKNPQSLTIASFCFFGPP

SEQ ID NO: 215503 - protein, 189 aa, Glycine max
  Clone ID: PAT_MRT3847_36628C.1.pep
MASQSGASRRSISSSTRRASESGAPRKSISSSRPLALAGERTVKSLRLTKALTVPETTTVYEACRRMAARRVDALLLTDSNALLCGILTDKDIAARVIAKEINLEETPVSKVMTRNPVFVLSETLAAEALQKMVQGKFRHLPVVENGEVLALLDIAKCLHDAIARMERAAEKGKSIAAAVEGVEKHWGT

SEQ ID NO: 215504 - protein, 109 aa, Glycine max
  Clone ID: PAT_MRT3847_36629C.1.pep
LMTHRQFEPLTSLVTRSRHERAILQVVTRILAVDPVIDRRIGPTSCLFLPVGKTALSDLFPPAYGSKEIVCSGLCMIQSRPRSGPMQTAVPCFGSRIFQESFMCAFVSY

SEQ ID NO: 215505 - protein, 51 aa, Glycine max
  Clone ID: PAT_MRT3847_3662C.1.pep
WYVVVFEPHSCDCHIELYICIYYWIFRGNYICPPIYPIVMVLIHMRQCTRV

SEQ ID NO: 215506 - protein, 72 aa, Glycine max
  Clone ID: PAT_MRT3847_36630C.1.pep
FFFFFFSKNPVHIFFQKSKHYTQFNTLTNSQKAYLNENPVYAQKQHTHVHTFIQGPTLQNVTSPKSHVNFFP

SEQ ID NO: 215507 - protein, 58 aa, Glycine max
  Clone ID: PAT_MRT3847_36631C.1.pep
GRTILLAVLAVLLSNLPAPVFTHSVSRLSWTPPVIRSLNVGFYVRPPSPPFASAGAND

SEQ ID NO: 215508 - protein, 63 aa, Glycine max
  Clone ID: PAT_MRT3847_36632C.1.pep
VFSIDLLIRQFQFGFILLGAVPFPIDVPRLKELGVRGVITLNESYETLVPTTFYYAYGIDHLV

SEQ ID NO: 215509 - protein, 327 aa, Glycine max
  Clone ID: PAT_MRT3847_36633C.1.pep
MHIEELKGGEVVANRLEGGSRFVGYDAKRVLVGAGARALFYPTLFYNVVRNKIQTEFRWWDKVDEFILLGAVPFPIDVPHLKELGVRGVITLNESYETLVPTALYYAHGIDHLVIPTRDYCFAPSLHDICRAVDFIHENALSGRTTYVHCKAGRGRSTTIVICYLVHHKMMTPDAAYAYVKSIRPRVLLASSQWQAVQEYYYHLMVRRAVGCAPTANLLVKASQTAAGSRDLVMFDDNSVVMVTESDLEGYDPSSQSAMASEIWADLSVVYRVRVAGQAALARISCLWLRYATTDQKISSEKLSSRESSCSIRANHLGEISVDIHVY

SEQ ID NO: 215510 - protein, 834 aa, Glycine max
  Clone ID: PAT_MRT3847_36634C.1.pep
MHRLANVSLLSPSASASHGDDGMNLLATVAAGEISRSENASPMSSPERKSLPADELSSANDFKLKHSVEAAGCTVSQLDGGAIAEHPLNTVDSLQIKNDLRHPATTSGDGEAISSSCVEKSGDGRSQINSSPTDFLQNAEGPCLRPEIKEDTSETILPDKKETNVDLGGSDSKLKSCTSSIDDDQKVDHMNEGTIENEELLVPKAVASVKSENESGEKQAELSSGVDNENQICSEKATGTGILVQKASPIAENCESLYLKKESPTSGNAVMVSRDENADDMKSVVIEPDERRMEQDLSVSDDVNECAEDTMGRNEAIGQCSGSSVQPDLPTMPRKENDVFKACERKLDANQSEVAGERHAGSAAGSDTAVKLDFDLNEGFPVDDVSQGEIARQEDPITSSAVHVPCLLPFPISSISGGFHASITVASAAKGPVVPPENPLRIKGELGWKGSAATSAFRPAEPRKNAETASTTNDIASVDGTSIKQGRPPLDFDLNVADERCFEDVGLRGSLEAGPLDRSTGGFDLDLNKVDETPEIGTFSLSKLEIPSLPSKPSLSSGLSNGGSVSRDFDLNNGPGLDEVGSEVPARSQQMKSTVPFPTAVHSTRTNNAEFGNYSAWFPPGNSYSAITVPPLLSGRGEQSYVAGAGAQRIMGPTGSAPFGPEIYRGPVLSSSPAVAYPPTTPFPYPGFPFETNFPLSSNSFSGCSTAFMDSSTVGGLCFPTMPSQPVGPGGVVSSTYPRPYVMSLPGGTSNVIPDSRKWASQSLDLNSGPGGMDTERRDDRLPSGLRQMSVPNSQASMEDHLKMFQMAGALKRKEPDGGWEGAERFGYKQTSWQ

SEQ ID NO: 215511 - protein, 52 aa, Glycine max
  unsure (1)..(52): unsure at all Xaa locations
  Clone ID: PAT_MRT3847_36635C.1.pep
VTPTKSVNLVVLPVQYGRSTGRHWRNLQSRCPLMQVXPARTCTGCHFWVNCE

SEQ ID NO: 215512 - protein, 82 aa, Glycine max
  Clone ID: PAT_MRT3847_36636C.1.pep
ELNSFVMLPHSPSSKSNLDPFSPLTPLSSVPRNSNPTPLTTHPSLDSCSHLPRFANFPSGSPSFIVGFLFPLWNPSPMLTTT

SEQ ID NO: 215513 - protein, 34 aa, Glycine max
  Clone ID: PAT_MRT3847_36637C.1.pep
MGSEGSSVVVPRNFRLSEELERGEKGIGDGTCSF

SEQ ID NO: 215514 - protein, 266 aa, Glycine max
  Clone ID: PAT_MRT3847_36638C.1.pep
GSGWVVLSCFGGMEGLQTCLVALLSRWFKHAGESYIKVPFLGAISYLTLAVSPFCITFAVLWAVYRNVSFAWIGQDILGIALIITVLQIVHVPNLKVGTVLLGCAFIYDIFWVFVSKKFFKESVMIVVARGDRSGEDGIPMLLKFPRIFDPWGGYSIIGFGDILLPGMLVAFSLRYDWLANKSLRSGYFLWAMVAYGFGLLITYVALNLMDGHGQPALLYIVPFTLGTLMTLGRKRGDLRVLWTSGEPETPCPHIRLQHSGELSLE

SEQ ID NO: 215515 - protein, 543 aa, Glycine max
  Clone ID: PAT_MRT3847_36639C.1.pep
MASEKISSILLFSAVILLVRDAPSAIAGDIVHDDDSTPKKPGCENQFVLVKVQTWVNGVEDVEFVGVGARFGRAIVSKEKNAKHTRLILSDPRDCCIPPKNKIVGDVIMVDRGNCTFTKKANIAQNANASAILIINNQKELYKMVCEPDETDLNIHIPAVMLPLDAGTRLEKMLTTTSSVSVQLYSPFRPAVDIAEVFLWMMAVLTILCASYWSAWTTREAAIEQDKLLKDASDELPNTKYASVSGVVNMNVKAAVLFVVFASCFLFMLYKLMSSWFIDVLVVLFCIGGIEGLQTCLVALLSRWFKHAGESYIKVPFLGAISYLTLAVSPFCITFSILWAVYRNESFAWIGQDILGITLIITVLQIVHVPNLKVGTVLLGCAFIYDIFWVFVSKKFFKESVMIVVARGDRSGEDGIPMLLKFPRIFDPWGGYSIIGFGDILLPGMLVAFSLRYDWLANKSLRSGYFLWAMFAYGFGLLVTYVALNLMDGHGQPALLYIVPFTLGTLMTLGRKRGDLRVLWTSGEPERPCPHIRLLHSGELNCE

SEQ ID NO: 215516 - protein, 72 aa, Glycine max
  Clone ID: PAT_MRT3847_3663C.1.pep
NQGLLLNGNNLSSTKVCLLLGQCRPTKQVCIRLSVAGTALPVFPTLLSTLYHLLRLPGSNRGAYLSIKFCLG

SEQ ID NO: 215517 - protein, 147 aa, Glycine max
  Clone ID: PAT_MRT3847_36640C.1.pep
TKIPPRVRTAERRTQKGKNGDEENHLVGWPPVKSWRRKELHQQHPARGRIRNDRIQANENQSRGPNSLYVKVNMEGVAIGRKINLRLFNSYQTLTSSLISMFAKYQKFEEVGESYTLTFQNEQDEWLQVGHVPWQSFIGTVRRLVIL

SEQ ID NO: 215518 - protein, 222 aa, Glycine max
  Clone ID: PAT_MRT3847_36641C.1.pep
MEVDLVLALPTQNSVEEFKLNKSKQIVSLQLWRASCGSESEKRVKHNKRSFEESFGHFLKPFPLLVWSGQPNEEEDRSEKVQRNIHTPNKNGDEENHLVGWPPVKSWRRKELHQQHPARGQIRNDRIQANENQSRRPNSLYVKVNMEGVAIGRKINLRLFNSYQTLTSSLISMFAKCILNFLCYARYQKFEEVGESYTLNFQNEQGDWLQVGHVPWQYVHIL

SEQ ID NO: 215519 - protein, 110 aa, Glycine max
  unsure (1)..(110): unsure at all Xaa locations
  Clone ID: PAT_MRT3847_36642C.1.pep
TGSXPVYPAAGHSARFPGRSEEPPYPDSVPYILLKLLLLPQASRRSQPLSPSSRHHLFIISMSAFSTESEFSQGAQEFHVREATSGLSTEGVESEGVVADRVGRPGNSXT

SEQ ID NO: 215520 - protein, 74 aa, Glycine max
  Clone ID: PAT_MRT3847_36643C.1.pep
ASNHQSLKKALSSFFVLCLSLFSFPLKTHPLYRSCYFSLSLSTISILSSFVATKTIFSILLKVSAIKSDVANVV

SEQ ID NO: 215521 - protein, 49 aa, Glycine max
  Clone ID: PAT_MRT3847_36644C.1.pep
ALPFNEISNLTVAVASSSVHRTYRTFTFFIEASQQHFPSKIQKLSSEIL

SEQ ID NO: 215522 - protein, 54 aa, Glycine max
  Clone ID: PAT_MRT3847_36645C.1.pep
RCSRLHQHLLSIKMTFISGQMCLQIWTLDYWIYDAMGYIRSSVGLVFHRQFSRS

SEQ ID NO: 215523 - protein, 82 aa, Glycine max
  Clone ID: PAT_MRT3847_36646C.1.pep
HKVLTNALKYMSQSLLNRNGKKEKHLLNYKSSEHITREYRHVASLYTILKNNCAQGLGCFFLYYTNNPSYPVKKHKFSSCAI

SEQ ID NO: 215524 - protein, 58 aa, Glycine max
  Clone ID: PAT_MRT3847_36647C.1.pep
WDIKKHTKAVTCFSLYVPKNNPLCGSSDETILVWKMLHYKLGCVEAIALNGPNHDLWA

SEQ ID NO: 215525 - protein, 143 aa, Glycine max
  Clone ID: PAT_MRT3847_36648C.1.pep
CNRNVKIFSSLFYANSHPAAKTTITAHHLKGNPFEEISSGVSYKERWMHCSSLLSAVTTDMHLLYGTNPLPHASGPTLTFSLDIADVSLAARAESARARPSSPMGEERPPTPMLKGIGLHASIVGNGLQVSVTNRALPKSLKA

SEQ ID NO: 215526 - protein, 36 aa, Glycine max
  Clone ID: PAT_MRT3847_36649C.1.pep
RWTETHKALENTFLLVFSTFRTAIGGLHLKLNGLSA

SEQ ID NO: 215527 - protein, 60 aa, Glycine max
  Clone ID: PAT_MRT3847_3664C.1.pep
ITHEISNFKTLNSLSLIRCEFSCTITDSIRSLKHLTFLALNSNMFTVTIPLSLDHLSNID

SEQ ID NO: 215528 - protein, 65 aa, Glycine max
  Clone ID: PAT_MRT3847_36650C.1.pep
WAEPLFPALYCPYNITSARHIFFSRVRAKPEWRYTPCDRDYGEFVLYPQAQGSKCLVPMTTNSPL

SEQ ID NO: 215529 - protein, 47 aa, Glycine max
  Clone ID: PAT_MRT3847_36651C.1.pep
HFKVQMCKLKYTCNQLIHGQKKHKHKLLQMHTHTHKSRLTIATARLE

SEQ ID NO: 215530 - protein, 51 aa, Glycine max
  Clone ID: PAT_MRT3847_36652C.1.pep
CYLVVSGKVTMICIYAYVILFLRITLAQHPLEHANNIQISQKLKLVQIKMQ

SEQ ID NO: 215531 - protein, 76 aa, Glycine max
  Clone ID: PAT_MRT3847_36653C.1.pep
NYPLASQFVTNFFKANFSRGLKNKGGKIIKMGAPRNLFLQIPPGWLFFLWGKKKSWGFLGGLPIFMDPFFFSWNLG

SEQ ID NO: 215532 - protein, 109 aa, Glycine max
  unsure (1)..(109): unsure at all Xaa locations
  Clone ID: PAT_MRT3847_36654C.1.pep
PTVLHLAVNPDIENPETMLQLQLQNSHGGRMQGQHQLDEEENSGSDLSGFSRHFLAQSFDTSEDISEKLLSPDDXRKQIGSVERGLSAINPXCQEHPDDYEYENQDDED

SEQ ID NO: 215533 - protein, 143 aa, Glycine max
  Clone ID: PAT_MRT3847_36655C.1.pep
VRKGKLVGYNTDCEAAITAIEDALIDRAKSLACAVFGEAQPFKELVNFQPEKGAILANATPVGMHPNTDRIPVAEATLEDYRLVFDAVYTPRRTRLLNEADAAGAITVAGVEMFLRQAIGQFNLFTGLEAPEEFMREIVLSKF

SEQ ID NO: 215534 - protein, 148 aa, Glycine max
  Clone ID: PAT_MRT3847_36656C.1.pep
KLAEALRSKGVPYTIYWKNDFSKYAASHFRHSLFSVAQSTSSHTWDAFQLALASFRLYCIHNNVLPSNCHKGAGKLGPQILGVPPNIDVSPCVADMKEEEEDSPETISAVKIYDDDVNMRFLICGVPCTLDACLLGSLEDGLNALLFA

SEQ ID NO: 215535 - protein, 63 aa, Glycine max
  unsure (1)..(63): unsure at all Xaa locations
  Clone ID: PAT_MRT3847_36657C.1.pep
RISVVKGNVNHFHNTYKMDKPYKLKLNMLGDNTNHEPXERYVCSKANYQRMLQGTPCMNCTFM

SEQ ID NO: 215536 - protein, 75 aa, Glycine max
  Clone ID: PAT_MRT3847_36658C.1.pep
GVLITRKSSSTLTSLVKINDVGTKVTVGLQLAPLGSAVWLRSMMKVNGRSQFLQSHSDYHNEYHQNGSRACQEDT

SEQ ID NO: 215537 - protein, 42 aa, Glycine max
  Clone ID: PAT_MRT3847_36659C.1.pep
IMCQSIWLSAWIILGCLKLFLNSFILHHMLSFYLSAEIVYRS

SEQ ID NO: 215538 - protein, 163 aa, Glycine max
  Clone ID: PAT_MRT3847_3665C.1.pep
MTSLHFAEMEKKERKIMVAVDESQESMHALSWCITNLISETNKLVLLYVRPPSAFYSLDAAGYNFSSDVVDAMEKYSMHLANSVMERAEAVCRDLNATNINMERVVGVGHAKNVICSAVKKLEADTLVMGTHGYGFFKRALLGSVSDHCAKHAKCPVVIVKQP

SEQ ID NO: 215539 - protein, 609 aa, Glycine max
  unsure (1)..(609): unsure at all Xaa locations
  Clone ID: PAT_MRT3847_36660C.1.pep
MDVCESGKNKAPETPRVRPPSVLAEKNAVTITTTRRSRTREISSRYPRVRPPASPSAPPRRCPSPNLTRTTPASSSSSSSHLFPKRSLSTERKRPSTPPSPTPQRPSTPVSVDGKLLSRXRLPDGLWPSTMRSLSVSFQSDTISIPVSKKEKPVVSASDRSLRPASNVAHKQPEIPTIRKPTLERKRSPLKGKNASDQSENSKPVDSSLSSRLIDQHRWPSRIGGKVSSNVLNRSVDCADIRTSNTSVSGTGVSSSLRRFSLSISDESSKPLQRASSDAVRLLSLVGSGRIGSEVKSVDDCLPQELRPHKSFAATPTDKAGLAFAGVRSQSLFAPGSRLPSPSRTSVLSSSSSRGVSPSRSRPSTPPSRGVSPSRIRPTNSSIQSNNSISVLSFIADFKKGKKGAANIEDAHKLRLLHNRYLQWRFANARAEAVLYIQNAIVEKTLYNVWITTLSLWESVIRKRINLQQLKLELKLNSVFNDQITFLDDWAVLERDHIDAVSGAVEDLEASTLRLPVTGGAMADIEHLKVAICQAVDVMQAMASAICSLLSQVEGMNNLISEVAAIAVQEKTMLDECEMLLASVAAMQVEESSLRTHLMQIMQALGMSK

SEQ ID NO: 215540 - protein, 680 aa, Glycine max
  unsure (1)..(680): unsure at all Xaa locations
  Clone ID: PAT_MRT3847_36661C.1.pep
MLLKLLPLLVFLLIPVSSQPNQLFYAGFKGLGSNNMTLDGVAEIEPNGVLKLTNDSSKVMGHAFYPTPFRFKNSSGGKAFSFSSSFALAIVPEFPKLGGHGLAFTIAPSKDLKAHPSQYLGILDSSNIGNFSNHLFAVVFDTAKDFEFGDIDYNHVGFDFNSLASSSTPFAGYDTXSGDANKQNLTLQSRGPILAWVDYDAAKSVVHVTISASSTKPKRPLLSYHVDLSPILKESMYVGFSASTGLLASSHYILGWSFKINGPAPPLDLSSLPQLPGPKKKHTSLITGVSISGFLALCGFLFGIYMYRRYKNADVIEAWELEIGPHRYSYQELKKATKGFKDKELLGQGGFGSVYKGTLPNSNTQVAVKRISHDSNQGLREFVSEIASIGRLRHRNLVQLLGWCRRRGDLLLVYDFMENGSLDKYLFDGPKTILSWEQRFKVIKDVASALLYLHEGYEQVVIHRDVKASNVLLDGELNGRLGDFGLARLYEHGTNPSTTRVVGTFGYLAPEVPRTGKATPSSDVFAFGALLLEVACGLRPLEPKAMPEDMVLVDCVWNKFKQGRILDLVDPKLNGVFNEREMLMVLKLGLLCSNGSPTARPSMRQVVRFLEGEVGVPDELRKPGEGGYQEGFDEFLHSLESSSFDQMSTGSYGRNRDMDSSFPSLTDTSLFSPHGKGQTM

SEQ ID NO: 215541 - protein, 68 aa, Glycine max
  Clone ID: PAT_MRT3847_36662C.1.pep
LNCEPLALHLTKHTFYRIYNASLYFTSDIEKRYHAKYGYRETIPVAAHDVAISNHAVLLTAITLFQIA

SEQ ID NO: 215542 - protein, 97 aa, Glycine max
  Clone ID: PAT_MRT3847_36663C.1.pep
GFLFDAIRPEAFVSRIFLIIFFPAYQVRLCLVMFADFIFVSVVAFKIICSGLNFFPMFFKEYEFWLGGKMDIISYACRYEICTKGRQVGLPYSIFNM

SEQ ID NO: 215543 - protein, 92 aa, Glycine max
  unsure (1)..(92): unsure at all Xaa locations
  Clone ID: PAT_MRT3847_36664C.1.pep
GAPYWVGIATGGIGDPFANLVWEPAVVKINAINSATKAARPFFSVGGTIXNPQSXSAPGNAAASALGRGRGGGFRGRGPGMRKLLLKGDFSG

SEQ ID NO: 215544 - protein, 264 aa, Glycine max
  Clone ID: PAT_MRT3847_36665C.1.pep
MAATTRSRASIYDVFLNFRGEDTRYGFTGNLYRALSDKGIRTFFDEEKLHSGEEITPALLKAIKDSRIAITVLSEDFASSSFCLDELTSIVHCAQYNGMMIIPVFYKVYPSDVRHQKGTYGEALAKHKIRFPEKFQNWEMALRQVADLSGFHFKYRDEYEYKFIERIVASVSEKINPARIHVADLPVEQESKVQDTHQEQEYREAFKVFDKDQNGYISASELRQVLIKLGQNTTVGEVEEMIATADFDGDGQISYDEFVKTMKI

SEQ ID NO: 215545 - protein, 79 aa, Glycine max
  Clone ID: PAT_MRT3847_36666C.1.pep
CIQCRASRFLCASLPESLSGRVPSGNFAPSRCPKPHRAAPAATTRTVLQNVSPLRNKQRREKAPRAINTLANISLVENA

SEQ ID NO: 215546 - protein, 60 aa, Glycine max
  Clone ID: PAT_MRT3847_36667C.1.pep
VGHNVGASALNFDSWGVYPLGNCFRLIICRWEQICPLLSLSLLKTLLNEYLVPGRGTGFY

SEQ ID NO: 215547 - protein, 63 aa, Glycine max
  unsure (1)..(63): unsure at all Xaa locations
  Clone ID: PAT_MRT3847_36668C.1.pep
MXGKRKLTIDSRFGYGXTKTCITTGLMHVKNSITVVTKGFRYKRIFLYAHFAINAIIVVQQAV

SEQ ID NO: 215548 - protein, 51 aa, Glycine max
  Clone ID: PAT_MRT3847_36669C.1.pep
KRKKKETLGNSTIYYKTKFMTSKAPLNWVLTIYFKGKGNFGKLFQNPGTGD

SEQ ID NO: 215549 - protein, 57 aa, Glycine max
  Clone ID: PAT_MRT3847_3666C.1.pep
MMVNYNNQYYKLTEALELQSLKIKGRNVVINKISRRLELKFCKTRETKITRSPILKH

SEQ ID NO: 215550 - protein, 67 aa, Glycine max
  Clone ID: PAT_MRT3847_36670C.1.pep
ADHDYTSLLKGCPIRTLLGSSRIRTLLKLSGSHYPLSGFWRPTLPANSLFVPLLLSSCSSHTLLADP

SEQ ID NO: 215551 - protein, 44 aa, Glycine max
  Clone ID: PAT_MRT3847_36671C.1.pep
HASLFILEKHIILQPLNMDNLCIAIKLPDEHYIIMHKHHVLVPS

SEQ ID NO: 215552 - protein, 59 aa, Glycine max
  Clone ID: PAT_MRT3847_36672C.1.pep
AAMILNSHKGKFKEASVTLVMRIYCCPKIYLSSSYFDLAPHKYKLLPQIYLSRKCGLLP

SEQ ID NO: 215553 - protein, 103 aa, Glycine max
  Clone ID: PAT_MRT3847_36673C.1.pep
LVYQDLLTGDELLSDSFRCKEIENGMLWEVEGKWVVKGAVDVNIGASPSAEGGGEDEGMDDAVVGEGDMEDKYEVSERTRMRRKRESKSMRRRMSSLSAMLDT

SEQ ID NO: 215554 - protein, 59 aa, Glycine max
  Clone ID: PAT_MRT3847_36674C.1.pep
WRRRSHDLGEDESKHNPRQSLDEKSKPKPSAFSRAPEGFYVAREEGRLVRQNRRREELM

SEQ ID NO: 215555 - protein, 62 aa, Glycine max
  unsure (1)..(62): unsure at all Xaa locations
  Clone ID: PAT_MRT3847_36675C.1.pep
FSSINCHGSPKTETKYTWMMESSKSKNKMGMEXKAQTNQSGGGRLQNAYANFFTTPESLGAL

SEQ ID NO: 215556 - protein, 55 aa, Glycine max
  Clone ID: PAT_MRT3847_36676C.1.pep
DFPKNYGQRPSDIVREVDRRFVVEYVLATVAGKNTSVFKFVRITSLLVNNFCHSP

SEQ ID NO: 215557 - protein, 147 aa, Glycine max
  Clone ID: PAT_MRT3847_36677C.1.pep
LHRDTAGQERFRSLIPSYIRDSSVAVIVYDVANRQSFLNTNKWVEEVRTERGSDVIIVLVGNKTDLVEKRQVSIEEGDAKSREFGIMFIETSAKAGFNIKPLFRKIAAALPGMESLSSTKQEDMVDVNLKPTVNSSQTEQQGGGCSC

SEQ ID NO: 215558 - protein, 70 aa, Glycine max
  unsure (1)..(70): unsure at all Xaa locations
  Clone ID: PAT_MRT3847_36678C.1.pep
CLQLLGAPGKSPVSGSGIGQKKRVFPFRATIFPAXEDKPDIMDSFQKVHDGFMEPYQDDKGYLRVLKNPC

SEQ ID NO: 215559 - protein, 82 aa, Glycine max
  Clone ID: PAT_MRT3847_36679C.1.pep
FGTCQGYGACCTYLWFLNSHHATFSHNSYMVKNKQQCYVSTRHNKCSSSITYEESKAICNITVSFLGTWFKLECYAMQQNVH

SEQ ID NO: 215560 - protein, 92 aa, Glycine max
  Clone ID: PAT_MRT3847_3667C.1.pep
HWCIKRTKMSASYLQPTNEWMTPIVMRGMVQALLCTNLEASRSQNNPKVLQDKHLSQLNQVQRLKAMLLPPWPETHFLCWAPIDWTLKILTR

SEQ ID NO: 215561 - protein, 188 aa, Glycine max
  unsure (1)..(188): unsure at all Xaa locations
  Clone ID: PAT_MRT3847_36680C.1.pep
PTRPASRRRNGDQXQRRQTXTRNESTQQTRTTEDRNTQQETKRQHQPRGEXXTEXKGEKRKRPTSRARARTAAAEAGEAEAKKEQGXSRRNRGRRTAQHQAKQKTRXRTQTKKPKPQAAGTAXAKAKEEKAKQAEEAXRTDRDPRGGGPNETQKQGXEANREGQATHAPGKRTAGRREREDAKEAPTR

SEQ ID NO: 215562 - protein, 45 aa, Glycine max
  Clone ID: PAT_MRT3847_36681C.1.pep
SLKDKGYCGINFFSIIILLLATVSSYRDYVKHSSSNYSFYYYLIP

SEQ ID NO: 215563 - protein, 88 aa, Glycine max
  unsure (1)..(88): unsure at all Xaa locations
  Clone ID: PAT_MRT3847_36682C.1.pep
YNEVQAQMETNLFKLSLDDVETPKGSMLDLKMTQSKIALPKITVXGTILRIVLLAYYLTRGXFRASGDVQLPHSIIRIVFFGALILFY

SEQ ID NO: 215564 - protein, 71 aa, Glycine max
  Clone ID: PAT_MRT3847_36683C.1.pep
PPTHQIGHQLGPDRSPIKDYVVYPYTLSSQSQHSKVQLSKSDKANVHLQVAKQDLDLASAILHVFASLGGS

SEQ ID NO: 215565 - protein, 422 aa, Glycine max
  Clone ID: PAT_MRT3847_36684C.1.pep
LQVPVPNSRGDPASGYEYVPMDDKRECSSVSNPPTDNFETKFLSASHDCFIQKMPIARSQRFSEEITSDERVKMQHPTSSDSTVTEPTHQTAHECCMQMANEMICIQNQLSDIEIKQANMMHQLQMFTTGIMDALSTIQSRITGLENVFDRLSQESLQRGRHSYSENSKLGRQSENVASPRFSICTPTPRPSVEINNKQSDSMSVKNSESWEKKAFSRSQPRIHSGDSLDMWKSNKVKATRKFTEKDVLNSSSKDTLQMGSVKNDGIFSATRITNARNDCSESNNNYWKHVKRLVCEGDLNSAYREALCFSDEFILVELLNTTGPVIESLSVKTMNVLLSTLASYLLEGKLFNTIIPWLQQIVEMSTIHGPNCIAISIEAKKHLLSAVQEAMNLHFFSHAERRRVAELAMKLHHIWGKITES

SEQ ID NO: 215566 - protein, 68 aa, Glycine max
  Clone ID: PAT_MRT3847_36685C.1.pep
ECCPQRGGSCQGCAGAVNRVLGKMEVPVGLRLYNYVVFLFTINFWTPSRIPCTSEVLVWWVYFLLNVV

SEQ ID NO: 215567 - protein, 87 aa, Glycine max
  Clone ID: PAT_MRT3847_36686C.1.pep
PQQPATREKRKQNNGNRCVDDEGVSGGINFRFSFASLLRICHLCLHSHLRFRSTSSFASPLRIRIFTPLSLLMSAFLRLYFRLGYET

SEQ ID NO: 215568 - protein, 74 aa, Glycine max
  Clone ID: PAT_MRT3847_36687C.1.pep
NANYPPKLYRICKKAVSRSSDTGEWYFHKMRGVLPPRAGHIFKWLEDNCWWSRKGITYESFYLGKIYNLRKRTY

SEQ ID NO: 215569 - protein, 133 aa, Glycine max
  Clone ID: PAT_MRT3847_36688C.1.pep
CFNGIKVLQEQYETESIAQHGVELLYATMTKIFSSLQEAYKGQIVGIIYCHVATTQESGKKFDVIFTPHHPYARWLAETNAVNATLPEVVLVRRTLAWVTGIILLISTFMGICYLMNMPLTRDTLLYSNVKLD

SEQ ID NO: 215570 - protein, 125 aa, Glycine max
  Clone ID: PAT_MRT3847_36689C.1.pep
MEFRVSVIWSLLLIVSLFSPEIKGEASGSVFFVDSSSNQFIRARSSNDEQPSMLLQEVGAAVSVLLGFAPPSTFSAASSSKLNDVLIPNPFKRPRAVFLLEVNGINGLWPWINYNNQILYWFSLS

SEQ ID NO: 215571 - protein, 75 aa, Glycine max
  unsure (1)..(75): unsure at all Xaa locations
  Clone ID: PAT_MRT3847_3668C.1.pep
FLNKEQXXGSSGGNVLVIVVAVVSSVIVLVVGIAIVVYIRKHRYIQMNPRGSNDAEKLAKSLHHNSLAFXYSTLE

SEQ ID NO: 215572 - protein, 369 aa, Glycine max
  Clone ID: PAT_MRT3847_36690C.1.pep
MEFRVSVIWSLLLIVSFFSPQIKGEASGSVFFVDSSSNQFIRARSSNYEQPSLLLEEAGAVVSVLLGFAPPSTLPAASSSKLNDVLIPNPFKRPRAVFLLEVNGINGLGNIVQDNPMFSNSFWSTNSDKVDIQLPDENDVSVVSLDEQLEDWTDKEISDFSSSIGGSYAPDALEPLNGVLTIPLANGASVNLHMSKKAERKFIIGLMSLTRNVQRAIQMHDNLSQSAKSPAELLTGCFNGIKVLQEQYETGSIAQHGVELLYATLTKIFSSLQEAYKGQIVGIIYCHVATTQESGKKFDVIFTPHHPYARWLAETNAVNATLPEVVLVRRTLAWITGIILLVSTLMGICYLLNMPLTRDTLLYSNVKLD

SEQ ID NO: 215573 - protein, 174 aa, Glycine max
  Clone ID: PAT_MRT3847_36691C.1.pep
MEFRVSVIWSLLLIVSLFSPEIKGEASGSVFFVDSSSNQFLRARSSNDEQPSMLLQEVGAAVSVLLGFAPPSTFSAASSSKLNEVLIPNPFKRPRAVFLLEVNGINALGKIVQDNPMFSNSFWSTNSDKVGIQLPDETDVSVVSLDEQLEDWTDKEISDFVSFDLYYTCNYCII

SEQ ID NO: 215574 - protein, 34 aa, Glycine max
  Clone ID: PAT_MRT3847_36692C.1.pep
SLKYEKNNMSAQRESTSARWETTRSYENLFNLIL

SEQ ID NO: 215575 - protein, 105 aa, Glycine max
  Clone ID: PAT_MRT3847_36693C.1.pep
FFKNLIGVGYIFNSHRSPIMGIIWFFNSPIFFFFPPLGPRPPESMGLFGFGKGEKKILNFFMVSKKGGLRGFLFDVLVPPSPPGSFFKILFWPAFSLYPLGFFPG

SEQ ID NO: 215576 - protein, 68 aa, Glycine max
  Clone ID: PAT_MRT3847_36694C.1.pep
GVDAGATFASRIVVNNAPKWVPHKSVDIADHTTIVPNVAHACSAPLIVDGGAYVRSCPVCCPRSTVYR

SEQ ID NO: 215577 - protein, 86 aa, Glycine max
  unsure (1)..(86): unsure at all Xaa locations
  Clone ID: PAT_MRT3847_36695C.1.pep
RSPLFCLVFPWXIMGSTXPCTFKLHLFGFSLRXXFGRXSRFLLKEXACLGXLSSPPXSXIXXNXXQTXTXGFXTSSYSFFLSSNEI

SEQ ID NO: 215578 - protein, 45 aa, Glycine max
  Clone ID: PAT_MRT3847_36696C.1.pep
SIFVDKVPLSSNICQREFFLFKKKVHHKLYNNFMNLLVVKIHHNF

SEQ ID NO: 215579 - protein, 276 aa, Glycine max
  unsure (1)..(276): unsure at all Xaa locations
  Clone ID: PAT_MRT3847_36697C.1.pep
GPDSRVDPRVRLCIPTSSSVVLQTLFLICCAFFVSQALGARIPQPQPQPHKSLPFIWPLPAKFIFGNDSLSVGPALSLSGNGAASAIVRDAFDRYKGILFKHGDRFSFLRTLRPVYDVTKLSINVHSHSEELQLGVDESYNLFVSRAQALSGAGQVTIEANTVFGALRGLETFSQLCSFDYTTKTVQIYKAPWSIRDKPRFPYRGLMLDTSRHYLPVDVIKQIIESMSYAKLNVLHWHIIDEQSFPLGVPTYPNLXESSYTEWGRYTVEDAYEIVN

SEQ ID NO: 215580 - protein, 69 aa, Glycine max
  unsure (1)..(69): unsure at all Xaa locations
  Clone ID: PAT_MRT3847_36698C.1.pep
MALSSXXLGWQGREAGPSAPEVGRVSMRKTVTKQASSGSXWYGXPDRVKYLGPXSWRAPSYXXGEXPGD

SEQ ID NO: 215581 - protein, 130 aa, Glycine max
  unsure (1)..(130): unsure at all Xaa locations
  Clone ID: PAT_MRT3847_36699C.1.pep
KIRQFEGTPKPCSNSPWEESAVVRNKGRSAHRVGTGASEYLGGDIEYLAAQVLEWAGNAARDNXNNRIIPRHXLLALRNNEXLGKWVAGMTIAHGGVLTNMNSVLLPKKTDRACKEPKCTSKATKSPKKA

SEQ ID NO: 215582 - protein, 75 aa, Glycine max
  Clone ID: PAT_MRT3847_3669C.1.pep
LEFIIYFSTTTKMTSSTLFLMLFTLSLILISHAPMSTLGITLYESLCDQAGQDKARCLEVLQAEPQIVGAKDNVE

SEQ ID NO: 215583 - protein, 54 aa, Glycine max
  Clone ID: PAT_MRT3847_366C.1.pep
GYKFPRTLPFSSDMVCTCIQSLSIKDGGELKSFNYPPRNQIIPPNRSEKCPQKK

SEQ ID NO: 215584 - protein, 123 aa, Glycine max
  Clone ID: PAT_MRT3847_36700C.1.pep
HNPEPNIRVQWARAQSMRHNEQWLHQSPTEMLVSSSPGLFLDFIALRDIEEREEVFIDYGPKWELAWQAHVEYWTTSNYSHSYQSARVYSKANANKPFRSQSEQEVDPYPSYYEFRCLDVAWY

SEQ ID NO: 215585 - protein, 53 aa, Glycine max
  Clone ID: PAT_MRT3847_36701C.1.pep
RWMKKFDTVGVVGPVSNRGGRGSVCSFSFLAASIGRCLCVSQFGIAPVFLFFG

SEQ ID NO: 215586 - protein, 273 aa, Glycine max
  Clone ID: PAT_MRT3847_36702C.1.pep
MSFQDIEAGRSFASRRNLINGKQDPTQAVASGIFQINTAVSTFQRLVNTLGTPKDTPELRDKLHKTRLHIGQLVKDTSAKLKQASEIDHNVEVNASKKIADAKLAKDFQAVLKEFQKAQRLSAERETAYTPFVPQGALPSSYTASEVDISSDKTPEQRALLVESRRQEVLFLDNEIAFNEAIIDERDQGIQEIQSQIGEVNEIFKDLAVLVHEQGAMIDDIGSNIEHSHAATVQAKSQLAKASKTQRSNSSLTCLLLVIFGIVLLIVIIVLAA

SEQ ID NO: 215587 - protein, 113 aa, Glycine max
  unsure (1)..(113): unsure at all Xaa locations
  Clone ID: PAT_MRT3847_36703C.1.pep
QYFHHLVACCALRWQDILRLSSSCSISSQRIILDRDASKGTTQKLVYSVTQLXKDSMYLSSIDXDNSHDRLCEIYMKNNLNYVKLMNAYRISLHFNRLGLNKCADITSQEISK

SEQ ID NO: 215588 - protein, 90 aa, Glycine max
  Clone ID: PAT_MRT3847_36704C.1.pep
SFFLLYLCTNYFNGKRKITFFVLGHMTFGELIFFFLFLSYILFEPPFTILNIGNFRDKNINTYLFCLLYFQVPSDVNFQRYNTWLKIFWI

SEQ ID NO: 215589 - protein, 301 aa, Glycine max
  Clone ID: PAT_MRT3847_36705C.1.pep
SSRFGSRANPPPVRPWFRLASIRSSPPPPPPPAPAPAQEPRLPAFRTASAPSSPQIQPTQPAPQPQEHPSSQHNRFSSSSLPTSPENKNITRVPLPSPSHSPNTSPPPSPLALTPSQSRSETMIPDQPEPKTVLVQKTIDPRPKPWHNARHGQHDTVKESESKEKVVHRKLSESEESGMRVITIAGENRGAYMELIQSPKKHDPKYLHKKGNSNINVDGVESEGSSAEEGTVNKKDKNQKGTSSSSFPMSAYMNSNVQCVNNSLLYHASCSHHDPGVRLSLSKKPFGEGFHLKEHADSKHI

SEQ ID NO: 215590 - protein, 39 aa, Glycine max
  Clone ID: PAT_MRT3847_36706C.1.pep
SLPMGGRRPPGNMKPKVRQALEGVTYRLGSSSQCTIDGE

SEQ ID NO: 215591 - protein, 86 aa, Glycine max
  Clone ID: PAT_MRT3847_36707C.1.pep
FEALYQDIEYDEGAITSFPCSAGSPFYVPPPASSPVAKSQAVGSVPSVSSGSFVLKKLHTSVDVLDGLASPLSALGMDNHRFCPSN

SEQ ID NO: 215592 - protein, 43 aa, Glycine max
  Clone ID: PAT_MRT3847_36708C.1.pep
NKALNARDFRVSKFLKHPPTLGHSICSTIKTFFTPNLHVALSI

SEQ ID NO: 215593 - protein, 79 aa, Glycine max
  Clone ID: PAT_MRT3847_36709C.1.pep
PRVRSSSSMFYDSSSRSFSSTSLFYDVAMTSSPHDTVITATSYDVDRRTPYEPVHQHSNNTPDRLKLMENLKMLIMVKL

SEQ ID NO: 215594 - protein, 150 aa, Glycine max
  Clone ID: PAT_MRT3847_3670C.1.pep
MLSGVKFISRDQVHDEDLDSVSKERKKSDRRREKNKRKRRSSRDSSDDDDDGLEKIKKGSRKKKWYSSDEDSLIYTTESESEKDEKKRRRRAKKKRDDGSSRDSGERSKGRSRSRSGKKEYTSEDEEDSYSSDGSDKFFRVFKGKHQKSD

SEQ ID NO: 215595 - protein, 349 aa, Glycine max
  unsure (1)..(349): unsure at all Xaa locations
  Clone ID: PAT_MRT3847_36710C.1.pep
MVAESWFRSLWKAPRKHDANSEKVVIEVLAFEIASLMSKLVNLWQSLSDKQIVRFREEITNSVGIRKLVSDDDHFIERLICLEILENMAHVAESVARLAKKCSDPILKGFGNAFYEFITTGSDPYGWEFTGKKMEKKIKRMEKFISTNASLYQEMEVLAXDLEQTFTRVKANGESDGVTLMEYQKKVAWKRMEVKHLQDISLWNRTYDYTILLLARALFTIFCKINHVFGLTEMVDVGRTTNSSVLNSDFIYRSQSVSTILQSSYQPSQNNIPRFSSGPLNAITARSGPIGQTTNKTSISHSGPLGDSSTKSGPILEKHSTNVNFYSGPLGRKFNPSVPVTGKEKKSKI

SEQ ID NO: 215596 - protein, 57 aa, Glycine max
  Clone ID: PAT_MRT3847_36711C.1.pep
FFFFFSKETTEISGHKTLNTFQYWMSFFTYSKIILLLLDVQFYKPSFTLRHYCDCLG

SEQ ID NO: 215597 - protein, 75 aa, Glycine max
  Clone ID: PAT_MRT3847_36712C.1.pep
CTRALSSSAFGPTSPSESVYSAVLSSARAGMNAEVNESGSHWMLSSTSTLKALGYEKERRRSMARPFTEPRVMSF

SEQ ID NO: 215598 - protein, 82 aa, Glycine max
  Clone ID: PAT_MRT3847_36713C.1.pep
TIPKRYSAAARRGQWPSVGSPIRSSQFPTTYSLSFNKSAAELLPPDTDHRDYSSSQLHSSSNSQANHGTNMKPPSASESLDH

SEQ ID NO: 215599 - protein, 195 aa, Glycine max
  Clone ID: PAT_MRT3847_36714C.1.pep
MKGMRKLLILYASQTGNALDAAERLSREAERRACPFNLLSVDQYDPSLLPQEEAVIFVVSTTGQGDTPDSMKVFWRYLLQRNLGQRWLSGVLYAVFGLGDSSYQKYNFVAKKLDKRLMDLGGTTIVERGLGDDQHPSGYEASLDPWLSSLWRMLNMVKPEFLPNGPDVVIQDTVLIDQPIVRITYHNIANDESHF

SEQ ID NO: 215600 - protein, 75 aa, Glycine max
  Clone ID: PAT_MRT3847_36715C.1.pep
NCHYARLRFFSATLRITWLKQVLNKWRSRISLRIVTQRHATSLHFIFKFVQLMQFLLRLGYVYKGTSEGHASGLF

SEQ ID NO: 215601 - protein, 177 aa, Glycine max
  unsure (1)..(177): unsure at all Xaa locations
  Clone ID: PAT_MRT3847_36716C.1.pep
MATHFPFPLSAAQVGTYFVGQYYHVLETNPELVYQFYSDASTMVRIDGNARDTATAMLQIHALVMSLSFIGIEIKTAQSLESWSGGVLVMVSGSVQLKGYNVRRQFMQTFFLAPQEKGFFVLNDVFHFVEEEPVHHHQPVFLAXSNLDSKLNAPSTINKPVSNHLLGGDIHAGDFGA

SEQ ID NO: 215602 - protein, 54 aa, Glycine max
  Clone ID: PAT_MRT3847_36717C.1.pep
LCGHIITVFKTKLKLIILLYDKILVNGTTCKLVGETHCVGFLLNQNSLFTLQLC

SEQ ID NO: 215603 - protein, 75 aa, Glycine max
  unsure (1)..(75): unsure at all Xaa locations
  Clone ID: PAT_MRT3847_36718C.1.pep
GFFFFFFFFFLPFFFFFNKQISNTYLLDFFPVGYMPDFVTLIYIPKLTTKTILNKLMTLICSLFPXFQATLMILS

SEQ ID NO: 215604 - protein, 116 aa, Glycine max
  Clone ID: PAT_MRT3847_36719C.1.pep
GCYWGLGNNLLFFFFVLLFKVLGSWFRESFQHANKSCHWLFQLSCFLFPRTWSLFVVVAFYILLSSAPSASETRSLDFWGWCVVFKSREFYSKGKGHIFFSSYVGLLCLSARYADL

SEQ ID NO: 215605 - protein, 487 aa, Glycine max
  unsure (1)..(487): unsure at all Xaa locations
  Clone ID: PAT_MRT3847_3671C.1.pep
MLSGVKFIPRDQVHGEDLDSVSKERKKSDRRREKSKRKGRSSRDSSDDDDGLEKIKKGSRKKKWYSSDEDSSIYTTESESEKGEKKRRMRAKKKRGDGLSRDSGERSKGRSRSRSGKKEYTSEDEEDSSYSSDGSDTILGRQGKRQKLDRKDGSKRNKIKGEATCGTVDSTSEMEIARKEMGLDWMLRSESKKPVVTETEETLSEEVPVEESKKANPKELNPYLKDNGSGYPEESGAKVGADQLLSSSLVGDGGASWRLKALKRAQEQAAREGRRFNEVVEERWSSLGELTAAVASHAAAPARAHLRAIKNRQRGITEENSQDSDKLGRRDSKRDYLKDVSVRHHEMKAPKVQDSLSWGKRKSQQVVAEGAGVISAAVSSLNKFANDGNFMHDFGSKMSNNSDGSAXTQAPVLESSELEKVSLEANTPGERSVVVKNEMSENQLAAKVMQLRLKGKHEEADKLMVRHKIREYRVSSGLCLPLINFAI

SEQ ID NO: 215606 - protein, 94 aa, Glycine max
  Clone ID: PAT_MRT3847_36720C.1.pep
TVLRNTSSHGLTSAPATLESLASESQCASCILVILRRTLVYVTQCIHSPGPAQACVLQSTSVQDPVPSATTIQCWIKTTRSPSHAECAFLLLVL

SEQ ID NO: 215607 - protein, 63 aa, Glycine max
  unsure (1)..(63): unsure at all Xaa locations
  Clone ID: PAT_MRT3847_36721C.1.pep
XPKSCXYIXXXSEYSXXAYKRYGXXKXXVXXAWRICRCNPLGGHGYDXXRWFGEVSPLEDARD

SEQ ID NO: 215608 - protein, 67 aa, Glycine max
  unsure (1)..(67): unsure at all Xaa locations
  Clone ID: PAT_MRT3847_36722C.1.pep
STNSGQLGVLPFLAPFATTVXIGTFIIRLLKAQWSMMHLMSVXSKMNNNEIAVLVNYTENCSIIDPQ

SEQ ID NO: 215609 - protein, 52 aa, Glycine max
  Clone ID: PAT_MRT3847_36723C.1.pep
YQNFNLLSSFCSFKNSVWPAKYNCMVSITINKYIISVGKKRLYPFCRLLAAV

SEQ ID NO: 215610 - protein, 90 aa, Glycine max
  unsure (1)..(90): unsure at all Xaa locations
  Clone ID: PAT_MRT3847_36724C.1.pep
SIKIIKIRGKVVKNFYFGNRKGENFVADCVSPKGKGIYCVGEDRNIKCLRYIFGKLKNXMKVXKKKVIGVNNHPHRNLVETFSEECTMKL

SEQ ID NO: 215611 - protein, 121 aa, Glycine max
  unsure (1)..(121): unsure at all Xaa locations
  Clone ID: PAT_MRT3847_36725C.1.pep
SKSLSSPLSNGCGSSLPDTGPRHFGRPISXNGGWQDANIRMVKLVLLGDSGVSNSCIVLLFVRGQFDIASIVPVGPSLLSRTITLQYSTSVTSEIWDTAGLERYAALAQRYYRSATVAVYC

SEQ ID NO: 215612 - protein, 157 aa, Glycine max
  Clone ID: PAT_MRT3847_36726C.1.pep
MQASRARLFKEYKEVQREKAVDLDIQLVCDDSNIFKWTALIKGPSETPYEGGVFQLAFSVPEQYPLQPPQVRFLTKIFHPNVHFKTGEICLDILKNAWSPAWTLQSVCRAIIALMAHPEPDSPLNCDSGNLLRSGDVRGYQSMARMYTRLAAMPKKG

SEQ ID NO: 215613 - protein, 82 aa, Glycine max
  Clone ID: PAT_MRT3847_36727C.1.pep
VRGQHLLAEFEITDWGRFCCSDLRNAQAAQVFRWCDGSYLEDQDQWRLSGIHRDVLLMAKPEVFITDYFFKSNLAEIYLAQR

SEQ ID NO: 215614 - protein, 158 aa, Glycine max
  unsure (1)..(158): unsure at all Xaa locations
  Clone ID: PAT_MRT3847_36728C.1.pep
MQASRARLFKEYKEVQREKAVDPDIQLVCDDSNIFKWTALIKGPSETPFEGGVFQLAFSVPEQYPLQPPQVRFLTKIFHPNVHFKTXGEICLDILKNAWSPAWTLQSVCRAIIALMAHPEPDSRLNCDSGNLLRSGDVRGXNPMARMYTRLAAMPKKG

SEQ ID NO: 215615 - protein, 66 aa, Glycine max
  Clone ID: PAT_MRT3847_36729C.1.pep
PNFSFFPSPFPIFTFYSITHPFFLSASLFTFLTCPVFNYFSPFSIFSPLYFLPLHRPFNFPLIPTC

SEQ ID NO: 215616 - protein, 319 aa, Glycine max
  unsure (1)..(319): unsure at all Xaa locations
  Clone ID: PAT_MRT3847_3672C.1.pep
KFVVSLNQTRFTLSFSEFQWPITQILLLSFLPFPSPTLLSDSSPLVPPLPLADPSEIDLEAGPSEQIQCRICLETNGSDFIAPCKCKGTSKYVHRECLDHWRAIKEGFAFAHCTTCKAPYHLRVHVAADRKWRTLKFRFFVTRDILFIFLSVQLVIASLAYLLYLFFALLGLSGCFITCYDRRVRNDLAQPCRELCLCCCQPGSCGTMATECGGCLGGAGEARLPLLFIMALMLLGLFTGYGIXHSVLVATMVGQRIWQRHYHILAKRMLTKLSHMWKXRMLTKEYVVEDADGELTGSDWSPPALPPEHVQQLKTLGLL

SEQ ID NO: 215617 - protein, 105 aa, Glycine max
  Clone ID: PAT_MRT3847_36730C.1.pep
MGSSRLSFILALVLVTFSFIMIIDSRVAEARTLPKSALLPSKVYIPTVPLPTLPLLPKEELPVPVPPVTVPDLPIPEVPKVPIPELPKVPVPIPNLIVNNAKIIP

SEQ ID NO: 215618 - protein, 58 aa, Glycine max
  Clone ID: PAT_MRT3847_36731C.1.pep
FTYIETSPKTNQRHLYDTDQQIACIDAGVHHWKCKTRIDSFKLHKHQNHNVHLARSKL

SEQ ID NO: 215619 - protein, 70 aa, Glycine max
  Clone ID: PAT_MRT3847_36732C.1.pep
KKIGPAFGKGKKIVFFTKVDPFPVALPVVLFGVKNEILSFNAPNRMLKRLLENGKSFKNRVDECPFAFVY

SEQ ID NO: 215620 - protein, 95 aa, Glycine max
  Clone ID: PAT_MRT3847_36733C.1.pep
DARITLLIFIPMSNPQTNNNRRQPSRLQGRAPSSLQINRADEWNVDIPLFSAVAAPPTPIELKPPQEPPEREPEKGTRTDKKGQHPAAACCTSPL

SEQ ID NO: 215621 - protein, 189 aa, Glycine max
  Clone ID: PAT_MRT3847_36734C.1.pep
PRIIVKVTCPNGIVIYCSLCDLIFGFCYGGGQSIVLENLYVQSGNDGTGVPTDMLSLNSTVRILYRNPATFFGVHVTSTPLLISYYQLAIASGQMQKFYQSRKSRRSLAVVVSGHQIPLYGGVSVLGNTKEHLESVALPLKLTFVVRSRAFILGRLVKSKFYRRIRCSVTLHGNKLGKHLNLTDSCVYK

SEQ ID NO: 215622 - protein, 74 aa, Glycine max
  Clone ID: PAT_MRT3847_36735C.1.pep
VPSTLGHHLKCIITNYCSYTWNRLKKHHQCGIPDSSVISVFWIHITKPGRIGERAMYFFRCELRPVLSIPYNKG

SEQ ID NO: 215623 - protein, 59 aa, Glycine max
  unsure (1)..(59): unsure at all Xaa locations
  Clone ID: PAT_MRT3847_36736C.1.pep
SLCRVATGLKTHCTTPRSWTARLGLFEQAHLLVSDPSEKEHXTACVAQATEHLPLKDHP

SEQ ID NO: 215624 - protein, 136 aa, Glycine max
  unsure (1)..(136): unsure at all Xaa locations
  Clone ID: PAT_MRT3847_36737C.1.pep
TRPQGTXHQHPHPPPPTAPKRLARYQGPPSTCKQKPSLKSLPPGGGEXAPKAPKRKTPKGEGAKGPQTQRXETPRAAQQTRPNNREQXPQRXRGATGAGPPPKKTRTPQRNETRPEKQAKPPPQEGGKEANPQGPK

SEQ ID NO: 215625 - protein, 41 aa, Glycine max
  Clone ID: PAT_MRT3847_36738C.1.pep
TSRFLLTLQHNISRIFPAYLIHDLFQSFKLEYLPIESNILT

SEQ ID NO: 215626 - protein, 87 aa, Glycine max
  Clone ID: PAT_MRT3847_36739C.1.pep
YYFYFKFVLITKLFLLSIIRVHAKILNTNNFLMEGRVSGTGYSSGAIFRNHTGASLGCFSAYIGFQSLLYVELFAVILAIQYALERN

SEQ ID NO: 215627 - protein, 45 aa, Glycine max
  Clone ID: PAT_MRT3847_3673C.1.pep
SSDSVKSNFHISEREDMAKAYEQAIEDLQKLLREKSELKATAAEK

SEQ ID NO: 215628 - protein, 130 aa, Glycine max
  unsure (1)..(130): unsure at all Xaa locations
  Clone ID: PAT_MRT3847_36740C.1.pep
XLARVRKLGIRLEVLXCCXPHXXXQXXXGXLGAXLXGXXPKASXVXXXTXGNYXKKCAXSRXIXNXXXXGXXXXCIEDEGPKVVSXXIPDXAGXWIHRXSXXCRXWVXXXXVGFXIXAXXXXXSXLXGXG

SEQ ID NO: 215629 - protein, 60 aa, Glycine max
  Clone ID: PAT_MRT3847_36741C.1.pep
QTGSLNNENNIYACTYNLTDSRLITCETDKNDKNVYKKIKVALPKNIHLTLRLLKTYVDF

SEQ ID NO: 215630 - protein, 59 aa, Glycine max
  Clone ID: PAT_MRT3847_36742C.1.pep
ECMNREVKKDQYNHNCQVQGFLGVALKTLFQSSLTHHHPMQFLKNHATTKEKKANYFFL

SEQ ID NO: 215631 - protein, 136 aa, Glycine max
  unsure (1)..(136): unsure at all Xaa locations
  Clone ID: PAT_MRT3847_36743C.1.pep
HPYFLWCVRARNNVTDATFVXGEKHVDPVESMPCGLGERTXKEKGAVCPSWAHQIQIISXQSRMKDILTHCGWNSILSSVVKGAPSMTCALYAEYEKSAILLCESIKVXSGQELIKMDRRNRAEIGTERKCIMEEE

SEQ ID NO: 215632 - protein, 135 aa, Glycine max
  Clone ID: PAT_MRT3847_36744C.1.pep
IDAIFGTIRPVSVPRKSAIYVWGYNQSGQTGRKGKEDQLRIPKQLPPELFGCPAGTNACWLDVACGREHTAAIASDGSLFTWGANDFGQLGDGTEERRKHPEKVKQLESEFVKSVSCGAHCSACIAEPSENDGSI

SEQ ID NO: 215633 - protein, 114 aa, Glycine max
  Clone ID: PAT_MRT3847_36745C.1.pep
LHVGVAVFVSQGAFTKGDAFSPNKCWRELHNKFLPLKVGPGSAKADSALAHVVNHTRSGGEGLQAKHRAATFFIKILMQVMIPMPFDSALPRNGESLFLGRSQQVSQKKMNGHF

SEQ ID NO: 215634 - protein, 128 aa, Glycine max
  unsure (1)..(128): unsure at all Xaa locations
  Clone ID: PAT_MRT3847_36746C.1.pep
ELFSEFLVDKDSVPVSILQYVDDTVFFGEPTMQNVRVIKTILRGFELASGLKINFAKSYFGVVGKSDHGVEKLLNXLNCRIFSLPFTYLGIPIEANPRRGELWDLVIRKCERKLARWKQRHLSFVRRV

SEQ ID NO: 215635 - protein, 131 aa, Glycine max
  Clone ID: PAT_MRT3847_36747C.1.pep
ELVEKMEALRNTIGEVNGQFKDADLTTFVCVCIPEFLSLYETERMIQELNSYEIDTHAIVVNQLLFPKKDNPCEQCNARRKMQKKYLDQIEELYDEFNVVKMPLLVEEVRGKEKLEKFSEMLVNPFVPPEE

SEQ ID NO: 215636 - protein, 74 aa, Glycine max
  Clone ID: PAT_MRT3847_36748C.1.pep
EKVSLFIDPCLTVTGNSEIVCAPQLVKLGLACLIQEPAERPTMVEVVSSLLKIYTSYMEQIIPPSISNSPSMER

SEQ ID NO: 215637 - protein, 57 aa, Glycine max
  Clone ID: PAT_MRT3847_36749C.1.pep
YLVTFTSYILFYSHNNNCQPINKQFWEENIGKSQLLHVPSQFLLLHIPNSKLIPYNN

SEQ ID NO: 215638 - protein, 377 aa, Glycine max
  Clone ID: PAT_MRT3847_3674C.1.pep
MADHSDSSPLVPPLPLTDPSEIDLEAGPSEQIQCRICLETDGRDFIAPCKCKGTSKYVHRECLDHWRAIKEGFAFAHCTTCKAPYHLRVHVAADRKWRTLKFRFFVTRDILFIFLSVQLVIASLAYLVYLIDGYQQYWLRLLWGFDSEMSFYYICGALLFFALLGLSGCFITCYDRRVRNDLAQPCRELCLCCCQPGVCADCHLPGTLCMWTDCTTCFESCGTMATECGGCLGGAGEAGLPLLFIMALIVLGLFTVIGIFYSVLVATMGGAVVLGSTDVTERLPYGCQICHCGSGSSLASAAGCSVQPKSGPFINIFSLHELMCNNQSTVMIWLQTRLAGEDEYVVEDVDGELTGSDWSPPALPPEHIQQLKTLGLL

SEQ ID NO: 215639 - protein, 96 aa, Glycine max
  unsure (1)..(96): unsure at all Xaa locations
  Clone ID: PAT_MRT3847_36750C.1.pep
LMLKVENFMQNXXQILHLFXYRNXKYKLLFQEVGFLNFLWXVKVQRIEFNWGSGPKIKMHTFHFNDSRTTFSTAHIRCLLVCSMCVTQGAIGLCNI

SEQ ID NO: 215640 - protein, 165 aa, Glycine max
  Clone ID: PAT_MRT3847_36751C.1.pep
FIKTFIDFSLCVSFSFSFSLLEFMVRGGGLQSMDSDPIGSFFLHKPIVLNSFPAEDTNNKWKKLSLHHNMDATASNTKDNTIPFQVSLRCSPNNHDDASSPPSLHNNRTEMDLFSDKNSTKDDDNNNNKVDASASLPDNDHHSTTPPTLEFKLNVSHRPIIIFYM

SEQ ID NO: 215641 - protein, 53 aa, Glycine max
  Clone ID: PAT_MRT3847_36752C.1.pep
RHCNSRAIGLELTSTNNIHKVESKRTKVLFVTKGRRMPLPPFFQQAMEIIFYQ

SEQ ID NO: 215642 - protein, 118 aa, Glycine max
  Clone ID: PAT_MRT3847_36753C.1.pep
MPGLSSGRADHSLPPDATSTLFVEGLPSNCTRREVAHIFRPFVGYKEVRLVSKESRQPGGDPLVLCFVDFMSPAHAATAMEALQGYKFDELDRNSVNLRFQFARYPGARSGGVHRGKR

SEQ ID NO: 215643 - protein, 39 aa, Glycine max
  unsure (1)..(39): unsure at all Xaa locations
  Clone ID: PAT_MRT3847_36754C.1.pep
FLCYSSDHAQIVDSFLRXLRSFRTYPKNDEISITLVDWF

SEQ ID NO: 215644 - protein, 230 aa, Glycine max
  Clone ID: PAT_MRT3847_36755C.1.pep
MSDAYWRYAAESRQAPSSIAGKRSRSDYDVSGVHDLPGYFPHDDDRGGLRVIRDTESLDASYERYLRSAQVSSYGSGQSTRTISGRIPNRAIDDSHVANIGGIDRGTNAKDKMLGLSSGRTDHSLPPDATSTLFVEGLPPNCTRREVAHIFRPFVGYKEVRLVSKESRQPGGDPLVLCFVDFLSPAHAATAMEALQGYKFDELDRNSVNLRFQFARYPGARSGGVHRGKR

SEQ ID NO: 215645 - protein, 124 aa, Glycine max
  Clone ID: PAT_MRT3847_36756C.1.pep
AERDFEVVSCGVSGCNHSLFHFSISFFNQSIGILMSDAYWRYAAESRQAPSSIAGKRSRSDYDVSGVHDLPSYFPHDDDRGGLRVIRDTESLDASYERYLRSAQVSSYGSGQSTRTIGGRIPNR

SEQ ID NO: 215646 - protein, 87 aa, Glycine max
  unsure (1)..(87): unsure at all Xaa locations
  Clone ID: PAT_MRT3847_36757C.1.pep
CRLPNXWGGDDNFFFFXKFWRPTFSDPFPVYSSPRIVTLFXXAWRSLTHVWKIMMXLRLMFLRVLIFCLXFFWFWVLWXFCFFFSRV

SEQ ID NO: 215647 - protein, 65 aa, Glycine max
  unsure (1)..(65): unsure at all Xaa locations
  Clone ID: PAT_MRT3847_36758C.1.pep
XVLXXXXTGSLXWXHXAYHXEXIAAEGEXXVPXLFARXXLLGFPXCPPVNXSSSPWNPFLLRXLC

SEQ ID NO: 215648 - protein, 59 aa, Glycine max
  unsure (1)..(59): unsure at all Xaa locations
  Clone ID: PAT_MRT3847_36759C.1.pep
NPYFDSSIFRTQLLHTGWGGLFLLEPEMVITRPPPFGDLFPPVRRRGRRRGSTGNSXPV

SEQ ID NO: 215649 - protein, 90 aa, Glycine max
  unsure (1)..(90): unsure at all Xaa locations
  Clone ID: PAT_MRT3847_3675C.1.pep
IWNSCEEPENDHIAVIGVCMTLGDYIXNECNKSLMSVYADMRLNVKTGEYTRILIICMFQRVXLDAGVVNRINLGLXDAFGGLTLVEPWS

SEQ ID NO: 215650 - protein, 148 aa, Glycine max
  Clone ID: PAT_MRT3847_36760C.1.pep
KLLDGMQDHYTFAQPGIQRLVFKLKELVRRIDDPASNHMEEQGLEFLQFAFRWFNCLLIREIPFHLVTRLWDTYLAEGDALPDFLVYISASFLLTWSDKLQKLDFQEMVMFLQHLPNKNWTQQELEMVLSRAFMWHSMFNNSPSHLAN

SEQ ID NO: 215651 - protein, 70 aa, Glycine max
  unsure (1)..(70): unsure at all Xaa locations
  Clone ID: PAT_MRT3847_36761C.1.pep
DPRIRGHLHTLIFQILVSYPHXLKQFDKKREGALKPIKVNQPRHHQNITHRSIKNEHDENLHQTLYERHP

SEQ ID NO: 215652 - protein, 78 aa, Glycine max
  Clone ID: PAT_MRT3847_36762C.1.pep
RVRECTLSLDQHDTQPRGVNTILRHAFFLQGLRHVLHTPSRLIEHHSTFGSATCSYCTSMDSENSSSRFTSAGAESRT

SEQ ID NO: 215653 - protein, 46 aa, Glycine max
  Clone ID: PAT_MRT3847_36763C.1.pep
SDLKELMDLQTILLPNATPLFCFVILVFMQVLYTIHDSLSLNDRVL

SEQ ID NO: 215654 - protein, 64 aa, Glycine max
  unsure (1)..(64): unsure at all Xaa locations
  Clone ID: PAT_MRT3847_36764C.1.pep
LVGVNMAGFLPYRGTYLPNLSLTRSITLSMPAFTNHSLRRYLLXPHSPTFSSFDSVSPSPFIFF

SEQ ID NO: 215655 - protein, 38 aa, Glycine max
  Clone ID: PAT_MRT3847_36765C.1.pep
GFSLDDINTFGARIPRMLKLGMSIDKEAGEADFYMPPL

SEQ ID NO: 215656 - protein, 52 aa, Glycine max
  Clone ID: PAT_MRT3847_36766C.1.pep
KKKILKNKKKKKKKKKKKKKKKKKKKKKKKKKKKKKRGGVLFFQILILLTFN

SEQ ID NO: 215657 - protein, 66 aa, Glycine max
  unsure (1)..(66): unsure at all Xaa locations
  Clone ID: PAT_MRT3847_36767C.1.pep
VPGLFYERKRLVAVGQILQVVFIDTEGPCPAXENLTRQLDYASVALEARKKPSQEHGSYIIGGGLV

SEQ ID NO: 215658 - protein, 130 aa, Glycine max
  unsure (1)..(130): unsure at all Xaa locations
  Clone ID: PAT_MRT3847_36768C.1.pep
IQQRNETHHSTKEIAGTPGYMAPETFLTSRATVETDVYAFGVLVLEVVCGRKPGSVYAQDDYKNSIVYWVWDLYGKGEVVGVVDARLXKEEIKEEEVECVVVLGLACCHPNPXPWPSMRTVLQGLNGEAP

SEQ ID NO: 215659 - protein, 48 aa, Glycine max
  Clone ID: PAT_MRT3847_36769C.1.pep
GIGHVDHQFLSHQSGMMHGSAMKNPSRSPHSISGTTNGHFCELKPSFS

SEQ ID NO: 215660 - protein, 65 aa, Glycine max
  Clone ID: PAT_MRT3847_3676C.1.pep
PLKGISHISSGRHLTQSRRKGAKIILFISLFLCTTLFYWFPSKKTVLIINAHKLMMFKKIRAKGT

SEQ ID NO: 215661 - protein, 84 aa, Glycine max
  unsure (1)..(84): unsure at all Xaa locations
  Clone ID: PAT_MRT3847_36770C.1.pep
KFDELRSKIVRRSGKELYKEPKFLKXGDAGFVKMIPTXPMVVQTFSEYPPLGRFAVRDMCPPVAVGVVKNVHKKDPSRTRGQRV

SEQ ID NO: 215662 - protein, 113 aa, Glycine max
  Clone ID: PAT_MRT3847_36771C.1.pep
AHSSLHSQRRSPAACPQTTATSALGVPPRSNPPQSRFDNCGICIRAKVTLFDSSLLPSNHFAIRGNRAVTTTVPTASPLAYILQTHIHPNITRTVHLLHVSFGLPQHTNLFYI

SEQ ID NO: 215663 - protein, 86 aa, Glycine max
  Clone ID: PAT_MRT3847_36772C.1.pep
YTARRLVKATPFHYGSGHVNPSDALDPSLIFHAVDQDDIGIMSTSPSNDDHDIRIHTHTPCNSSMGNPTSFSAPSITISHKMGNLE

SEQ ID NO: 215664 - protein, 70 aa, Glycine max
  Clone ID: PAT_MRT3847_36773C.1.pep
LKNLDLCHFTFNSIYCENFLCLLVHCIIWFQVKDINARLQGIQPKVRSSDGIPGGYITGEIKHRVTLMEE

SEQ ID NO: 215665 - protein, 43 aa, Glycine max
  Clone ID: PAT_MRT3847_36774C.1.pep
IIKVVFCESLLLPFFHFGYTTIITCTHQQLHKPPLLINLFFLS

SEQ ID NO: 215666 - protein, 309 aa, Glycine max
  Clone ID: PAT_MRT3847_36775C.1.pep
GVEFAVKRISHENDGLREFLAEVSSLGRLKQRNLVGLRGWCKKDVGNFLLIYDYMENRSLDKWVFDCDESKMLSYEDRIRILKDVAFAVLYLHEGWEAKVVHRDIKASNVLLDKDMNGRLGDFGLARMHSHDQVASTTKLVGTVGYMAPEVIKTGRASTQTDVYMFGILILEVLCGRRPLEEGKSPLVEWIWQLMVQGQVECALDERLRAKGDFNVQEMERVMHLGLLCAYPEPKARPTMRQVVNVLEGKNEVDDSEIENMDTYLLQQLKSRDILSEYSQYFSYTSHPTFQDIRHSSSMSLTWSEVEGR

SEQ ID NO: 215667 - protein, 89 aa, Glycine max
  Clone ID: PAT_MRT3847_36776C.1.pep
IDTDPFLAFHWNLLKGHLFLPNNIKKEPRNRPFRNSDMNTLVAFYSWITLCDKKGPAKGSHKGPTGSLWSDKNLYAPLGSEQTRSWKGG

SEQ ID NO: 215668 - protein, 96 aa, Glycine max
  Clone ID: PAT_MRT3847_36777C.1.pep
YGCEKTTEGYGCEKTTEGDSITEEEEEEKRRSFFLVTLTDREWSKRQISELEHFVFGGDAYSELGRSGATKPTEILDRRRRYDDRSCVTSRLHDVP

SEQ ID NO: 215669 - protein, 88 aa, Glycine max
  unsure (1)..(88): unsure at all Xaa locations
  Clone ID: PAT_MRT3847_36778C.1.pep
RYRRREXKLLLFYTLTDKSASGNIFILCLVEMPIRSLVEVEPPSPLRYLIGAAVMMIGVVLPVGYMMFRNKRVPSSSSYSKQTNKVLI

SEQ ID NO: 215670 - protein, 65 aa, Glycine max
  Clone ID: PAT_MRT3847_36779C.1.pep
GITGFCPMHQNLSFEGTLALIKRSNIILQMLEMVYSPLLPLKPAPAVVSPQNPPHSPQSPLSQTA

SEQ ID NO: 215671 - protein, 34 aa, Glycine max
  unsure (1)..(34): unsure at all Xaa locations
  Clone ID: PAT_MRT3847_3677C.1.pep
GVFHKNCMFTSPAXKKKFPIWGLGEHQSQVLQSR

SEQ ID NO: 215672 - protein, 165 aa, Glycine max
  Clone ID: PAT_MRT3847_36780C.1.pep
MATLSSFIATPKNPNTHFLSGSSLTMDKCFLKISSSEHFPGSSLKTKATRNQPLVIRAGGDGGRPSSGSGFVGGFVLGGLIVGALGCLYAPQISRALAGADSKDLMRKLPKFMYDEEKALERTREVLTEKIAQLNSAIDGVSAQLRLDEDSNEIALNSEEIEASI

SEQ ID NO: 215673 - protein, 130 aa, Glycine max
  unsure (1)..(130): unsure at all Xaa locations
  Clone ID: PAT_MRT3847_36781C.1.pep
PRVTLALGLFIVNGITDNDFISSIDLYVIVTFWAARYKEXTCDNDAGSKSQWIEIFIFTGSDSXASDLNLEMMDKDIYSRDDSLGVVTIHVDPVFEPGCVPQTACNDVNDNECGGEIREASTSAVEINDD

SEQ ID NO: 215674 - protein, 39 aa, Glycine max
  Clone ID: PAT_MRT3847_36782C.1.pep
PAFLLSDTIVQIVCSQQLFTKVPCDPRPHALCVTCPFCS

SEQ ID NO: 215675 - protein, 53 aa, Glycine max
  Clone ID: PAT_MRT3847_36783C.1.pep
MANIERWIILTMLQQRPKHELSDGQNLQGHCYSDSIKPQLEHQAKQNRQIDAW

SEQ ID NO: 215676 - protein, 120 aa, Glycine max
  unsure (1)..(120): unsure at all Xaa locations
  Clone ID: PAT_MRT3847_36784C.1.pep
GVTPKVFSHCLKGGENGGGVLVLGEILEPSIVYSPLVPSQPHYNLNLQSIAVNGQLLPIDSNVFATTNNQGTIVDSGTTLAYLVQEAYNPFVXAITAAVSQFSKPIISKGNQCYLLSNSF

SEQ ID NO: 215677 - protein, 113 aa, Glycine max
  unsure (1)..(113): unsure at all Xaa locations
  Clone ID: PAT_MRT3847_36785C.1.pep
HLDEDCSTLILPALTIANEEHLGADLXLSSMTSDRREFVEDPNGLPSVETDAHGPFTQRDLPLAMDAYDSPSNASIITLQTSPGVNGKTIDHTKYMVDCLARTVNKIMGVLSI

SEQ ID NO: 215678 - protein, 98 aa, Glycine max
  unsure (1)..(98): unsure at all Xaa locations
  Clone ID: PAT_MRT3847_36786C.1.pep
SXIFSIKYKHRILISYYLALSYESTLLYHILEHPKPIQTHSHLSSNSHTTYYQKNYLXLEDLILYHNIFENNNPLITKDFHNYSTPXIFNKPNNSQPL

SEQ ID NO: 215679 - protein, 71 aa, Glycine max
  Clone ID: PAT_MRT3847_36787C.1.pep
VFRPSSLGGVSHVTTYMGKNTTSLTVRPILKNAITPLRNTCMASNINHTPVQITPSSPLCLIPRITSKPHI

SEQ ID NO: 215680 - protein, 103 aa, Glycine max
  Clone ID: PAT_MRT3847_36788C.1.pep
APTTECGGDQNANAPIVRIKDAPCMTGTDGDLSLHACQYDYNAAALAIMASTSDIPSVTAYCYLDAAAGLQALRSSSLPITDVNALLLRRSLHNYRTVRMLTV

SEQ ID NO: 215681 - protein, 237 aa, Glycine max
  unsure (1)..(237): unsure at all Xaa locations
  Clone ID: PAT_MRT3847_36789C.1.pep
TGSVASLLHDERLPPLDWKTRHKIAIGTARGLHYLHKGCKRRIIHRGHXASNILLTKDFEPQISDFGLAKWLPSQWTHHSIAPIEGTFGHLAPEYYLHGVVDEKTDVFAFGVFLLEVISGRKPVDGSHQSLHSWAKPILNKGEIEELVDPRLEGAYDVTQLKSFACAASLCIRASSTWRPTMSEVLEIMEEGETDIEKWKMPEEEKEQEEEFWGFEDLEYEYDSSFSMSLLDSIGST

SEQ ID NO: 215682 - protein, 94 aa, Glycine max
  Clone ID: PAT_MRT3847_3678C.1.pep
MTTGDEINPSEVEAQTQVEKEVHPPKGKEDEPTKATIRTQTWAKLENSDLVLFPRPCKYRIPRFKGENEAVEKLAQLDIFKNAKVVKVNLDKAH

SEQ ID NO: 215683 - protein, 54 aa, Glycine max
  Clone ID: PAT_MRT3847_36790C.1.pep
VGIQIVKVTMGLLLGSIPSKRPVKRNNPLHILYSVWLVFELKMCECVRTKKTCV

SEQ ID NO: 215684 - protein, 91 aa, Glycine max
  Clone ID: PAT_MRT3847_36791C.1.pep
HKSKNFLFLKINLFKLPKLYNGVGPPITEIIFSGPRGFTCNLVTQSGGKGQHFDLIGGKKNNGPRKQGLGGGREPQLGGGLYLKGGGGSPT

SEQ ID NO: 215685 - protein, 88 aa, Glycine max
  Clone ID: PAT_MRT3847_36792C.1.pep
IASGAANTLHTGYISTIWTWNTGIDSTITILSYTLYLSQILNSEQKGTTTTTLLRRYKPGRVLWCLNYSKCHKPPYLNTEMRVARMVI

SEQ ID NO: 215686 - protein, 41 aa, Glycine max
  Clone ID: PAT_MRT3847_36793C.1.pep
YRVKHLPQLGVCVYSEVSALSLKYPSSPLIKRGGKLGLSLE

SEQ ID NO: 215687 - protein, 62 aa, Glycine max
  unsure (1)..(62): unsure at all Xaa locations
  Clone ID: PAT_MRT3847_36794C.1.pep
KEKEREREXGXPSSLYLKQCKTIPETTNQGEPYGKLSDVALSVFSSVLFLNTRKISFFMYCL

SEQ ID NO: 215688 - protein, 81 aa, Glycine max
  Clone ID: PAT_MRT3847_36795C.1.pep
GSSLVRSRRTWLLHHRALLDWLHENGNGTWRFILRSCQSPAKAHRTGEACRVVCSNDTKRTFCLLKNKNKKHHARNKKTNF

SEQ ID NO: 215689 - protein, 208 aa, Glycine max
  Clone ID: PAT_MRT3847_36796C.1.pep
TTKPSTPINIDNDAKTPQGPQGIGPLVLFLGDLRDTSLACPATKKNQKRPQTLDRKAQNPNFQTHDTLDNPLKTTKKPRGEPREPPNFPNRCYRRSRPSPHLFPKCPKSQQNKPLASVDQHTQGSLRHAAGPKPKKPDLPALPRPWRTWFWKELKKWGPRNPLGTRFSCFPRTKKTTLWPLRGGLGGRLRLLNRINIFGSKCSSPVKR

SEQ ID NO: 215690 - protein, 553 aa, Glycine max
  Clone ID: PAT_MRT3847_36797C.1.pep
ALRNFSKHVQVRDPQTEIPHAREIKLGELLKKKAEEGVAVRVMIWDDETSLPFIKNKGVMKTHDEDAFAYFKHTKVICRKCPRLHHEFPTLFAHHQKTITVDTRAPNSVRAREIMSFLGGVDLCDGRYDTEKHSLFQTLTEESHYHDFYQTNIAGASLNKGGPREPWHDAHASVTGDAAWDVLTNFEQRWTKQCDASLLVPANTLENLIPTCSSPPKERNWKVQVYRSIDHVSASQLFRKLTVERSIHEAYVEAIRRADRFVYIENQYFIGGCHLWQKDRHSGCRNLIPVEIALKVVSKIKARERFAVYIVIPMWPEGVPESEPVQDILHWTRETMIMMYKLIGEAIIESGEPGHPRDYLNFFCLANREKKGKEEYLSPHSPHPETQYWNAQKNRRFPVYVHSKIMIVDDIYILIGSANVNQRSMDGQRDTEIAIGAYQSQDGADHHIISRGDIHAYRMSLWYEHTGITEELFLEPESLSCVKRMLSIGDHMWGVYSSEETVDMEGVHLVSYPVKVTQEGSVKDTVDGGDHFPDTKSPVKGKRSKFLAPIFTT

SEQ ID NO: 215691 - protein, 58 aa, Glycine max
  Clone ID: PAT_MRT3847_36798C.1.pep
CRTGSQFLAATLTFSEAPTNIKLFINHMLTYPSSTVWFCLRTLRTRFYVNLAAMLGWA

SEQ ID NO: 215692 - protein, 81 aa, Glycine max
  Clone ID: PAT_MRT3847_36799C.1.pep
TTAGLMYSWFLELMVILSKNLFFIASLSLLNTLHYFTFFLVLLEFVSLCAVTPYLCVHICQLFLNTSIIKQFVAKSIYLNV

SEQ ID NO: 215693 - protein, 51 aa, Glycine max
  Clone ID: PAT_MRT3847_3679C.1.pep
MGLSSTKLFSGFFPKKEMGILMVGPDPAGRTTIFKNPNLGKIVTIIPTMGF

SEQ ID NO: 215694 - protein, 77 aa, Glycine max
  Clone ID: PAT_MRT3847_367C.1.pep
GVKMRALLPRKESRVNLLVAHGSSAVEEAEVVAMAVKSRSGGGHGRRNSEDVGEHDVVIEGGIEISDRRNRSAKECI

SEQ ID NO: 215695 - protein, 144 aa, Glycine max
  unsure (1)..(144): unsure at all Xaa locations
  Clone ID: PAT_MRT3847_36800C.1.pep
PWTCPGDDVFYNASIIWGVVGPKRMFTKDGVYPGMNWFFLIGLLAPLPVWLLSRKFPNHKWIQLINFPIIIACASNIPPFRSVSYITWGIVGIFFNFYVYRKFKASWAXNGIFGPTWWGLDADHCHLAKCPTAPDVHAKGCPLL

SEQ ID NO: 215696 - protein, 57 aa, Glycine max
  Clone ID: PAT_MRT3847_36801C.1.pep
KYNPFIIVGKNPISQKMKFTQSDTSEMIRMALAIVAIFDDTVYYYYFTNKPTRVLPF

SEQ ID NO: 215697 - protein, 91 aa, Glycine max
  unsure (1)..(91): unsure at all Xaa locations
  Clone ID: PAT_MRT3847_36802C.1.pep
ASLFPVFPPLGKTGGGALDLIVFXRGCPFFGGTAPSLYYARPFPPNLVSDFNPRTPXRPGAPPLNFVFSLFFXNPNPPRFLKFWGVFFPKT

SEQ ID NO: 215698 - protein, 447 aa, Glycine max
  unsure (1)..(447): unsure at all Xaa locations
  Clone ID: PAT_MRT3847_36803C.1.pep
MDHQNKHVAVFAFPFGSHLMPLLNLVLKLAHSLPNCSFSFIGTDKSNAILFPKPHIPNNIKAYAIGLDVIWDVGXGKNPTENLNLFLQTGPENLHXGIELAEAETKKRVTCIIADAVVTSSLLEAHTLHVPWIALWLPNSCSLSLSFSTDLIHQHCASRAGNKTMDFVPGLSKLRVEDMPQDLLDVGEKETVFSRELNSLGKVLPQAKVVVMNFFEELEPPLFVQDMRNKLQSLLYVVPLPSTLLPPSDTDSSGCLSWLGMKNSKSVAYVCFGTVVAPPPHELVAVAEALEESGFPFLWSLKEGLMSLLPNGFVERTKKRGKIVSWAPQTHVLAHDSVGVFVTHCGANSVIESVSSGVPMICRPFFGDQGVAARVIEDVWEIGMMIEGKMFTKNGLVKSLNLILVHEEGKKIRDNALRVKKTVEDAGRPEGQATQDFNTLVEVISRS

SEQ ID NO: 215699 - protein, 92 aa, Glycine max
  Clone ID: PAT_MRT3847_36804C.1.pep
KTAMGQAEVLRRSFWGWARHQLILSLCVSRDVPSFVDPASHCAVKCRIHKTWASLGSQQSVPHVLPGSTNGLCALCLPHNCFYTLKAKKTNP

SEQ ID NO: 215700 - protein, 81 aa, Glycine max
  Clone ID: PAT_MRT3847_36805C.1.pep
NAYASLVPSECPYQSTELLQRYLLEILCLYEGLHTKNRPRTIMTRLPPAIGVPTNYSNKTHPGREVIFEFWATPGDCNGAN

SEQ ID NO: 215701 - protein, 222 aa, Glycine max
  unsure (1)..(222): unsure at all Xaa locations
  Clone ID: PAT_MRT3847_36806C.1.pep
MDHQNKHVAVFAFPFGSHLMPLLNLVLKLAHSLPNCSFSFIGTHKSNAILFPKPHIPNNIKAYSISDGIPEGHVLGKNPTEKLNLFLQTGPENLHKGIELAEAETKKRVTCIIADALVTSSLLVAQTLNVPWIALWLPNSCSLSLYFYTDLIRQHCASRAGNKTLDFIPGLSKLRVEDMPQDLLDVGEKETVXSRELNSLGKVLPQAKVVVMNFFEELEPPL

SEQ ID NO: 215702 - protein, 111 aa, Glycine max
  unsure (1)..(111): unsure at all Xaa locations
  Clone ID: PAT_MRT3847_36807C.1.pep
NPHWWELFFPKKVWGPKNGFKMWSFKWAKQTSGNXSSLVKKPNQPPPFNVLLGISQNFEIAGNPQTPPFFFPQAKPNFFKKQKFLEKWGGRVSFQMVLVSNQKKKLGLPPV

SEQ ID NO: 215703 - protein, 118 aa, Glycine max
  unsure (1)..(118): unsure at all Xaa locations
  Clone ID: PAT_MRT3847_36808C.1.pep
MGSYLPHPTKENNLADFFIDRGTGGPSAAGSKTAAAPIERVKLXLIQNQDEMIKXGRLTTPYKGITERFSRVIAEEGFNSLWRGNLANGFRYFPTQALNIXFKDQFKRMSRYSQAKDG

SEQ ID NO: 215704 - protein, 72 aa, Glycine max
  Clone ID: PAT_MRT3847_36809C.1.pep
KNNNHFQIGLLKDTNTNQYQFLCDIYISRYVQIYNACSLRFPVLSDYLPKFINHKLYGMLIMELCLLVTPPC

SEQ ID NO: 215705 - protein, 77 aa, Glycine max
  Clone ID: PAT_MRT3847_3680C.1.pep
AKDSTTKHPSTCTTAGATPAPAPAPAPADKESPPGMPGSLKNRYHGADGQNCGYLITDRPCTMDHAAPRGGSCLHYL

SEQ ID NO: 215706 - protein, 85 aa, Glycine max
  Clone ID: PAT_MRT3847_36810C.1.pep
GYLKFHKMNNVFVTFLDLLVVYVLTVTASESKPPVTTNSAPNDYNCSQAMNNFIVSCLNYPIGEHPVTSSVRFQNVNASNALTQT

SEQ ID NO: 215707 - protein, 123 aa, Glycine max
  Clone ID: PAT_MRT3847_36811C.1.pep
HSSAPSYFSSLKILLYHSHHTHSYTLILSLSLSLLPINTKPSYPNLSMLKLATSSILTITSLHLLSSNMPHYPFHDIPPSLTHLTKLISNIYPPNTPLTHINPISPTPSTLPFILTTHYIHPY

SEQ ID NO: 215708 - protein, 60 aa, Glycine max
  Clone ID: PAT_MRT3847_36812C.1.pep
KERTVQGSKNMANSAIHQYKKFATTVSSLRAVLLNNGSPLNGLAIGASKGLTNNPDIKYT

SEQ ID NO: 215709 - protein, 98 aa, Glycine max
  Clone ID: PAT_MRT3847_36813C.1.pep
RKKVLWNVKPPPQDKSKVRMEPQRISPVVPRVGPSVPSKQKDSRRETKPKEPPLEIKTDSTPINKALTAGQNNKGKTLKDAVKPKHKKKKIVSSNNEN

SEQ ID NO: 215710 - protein, 57 aa, Glycine max
  Clone ID: PAT_MRT3847_36814C.1.pep
VLPYTILYNDKLKPHHSRHKQLNTVQRLIGYLHIQPLHTKETPHNECKTGAINLKIN

SEQ ID NO: 215711 - protein, 181 aa, Glycine max
  Clone ID: PAT_MRT3847_36815C.1.pep
MGLSFTKLFSRLFAKKEMRILMVGLDAAGKTTILYKLKLGEIVTTIPTIGFNVETVEYKNISFTVWDVGGQDKIRPLWRHYFQNTQGLIFVVDSNDRDRVVEARDELHRMLNEDELRDAVLLVFANKQDLPNAMNAAEITDKLGLHSLRQRHWYIQSTCATSGEGLYEGLDWLSNNIANKA

SEQ ID NO: 215712 - protein, 181 aa, Glycine max; identical to SEQ ID NO: 215711
  Clone ID: PAT_MRT3847_36816C.1.pep

SEQ ID NO: 215713 - protein, 59 aa, Glycine max
  Clone ID: PAT_MRT3847_36817C.1.pep
HLYSDTIQCSKLILYPSCTIHGICCFFENSDSSDWGMVVKHQDLGNSCAFFFSPLGRRG

SEQ ID NO: 215714 - protein, 152 aa, Glycine max
  unsure (1)..(152): unsure at all Xaa locations
  Clone ID: PAT_MRT3847_36818C.1.pep
MGKGNYSFFFGTYQGRDFVAQEHHRLYLEVQCLIFLLPFPEYTSLTCGIYRHGNSGXKATLPMKLLAILLPSHITGSTLDFSXQGLSDGDYVRLGCHEEDDLMMAVSYLKSSKRRSRIXLWGRSMGAVTSLVYGAQDPDIAGKDMDSAFPDL

SEQ ID NO: 215715 - protein, 114 aa, Glycine max
  Clone ID: PAT_MRT3847_36819C.1.pep
FIVKCLSINIIMVSLFIIISIFGSRYIAKSTSQAPLWVQGLVKNGFVGKFLLIQVSSKELADIDSEMAKLNIQSQSSTGTTEMDQRSSDWILLTAILDRLFLIIYTISFIIYHS

SEQ ID NO: 215716 - protein, 320 aa, Glycine max
  unsure (1)..(320): unsure at all Xaa locations
  Clone ID: PAT_MRT3847_3681C.1.pep
MTFYSLRYNVFCFSILFSLLIAIASADLSSDFYASTCPNALSTIKSAVKSAVAKERRMGASLLRLHFHDCFVNGCDASVLLDDTSSFTGEKSAAANLNSLRGFDVIDDIKSQLESSCPGIVSCADIVAVAARDSVVAXGGPSWTIGLGRRDSTTASKDAATSDIPSPLMDLNDLISAFSNKGFTSQEMVVLSGAHTTGQAKCQFFRGRIYNETNIDSDFATSAKSNCPSTDGDSNLSPLDVTTNVLFDNAYFKNLVNKKGLLHSDQQLFSGGSTDSQVTTYSTSSSTFYADFASAMVKMGNLSPLTGSSGQIRTNCRNVN

SEQ ID NO: 215717 - protein, 100 aa, Glycine max
  unsure (1)..(100): unsure at all Xaa locations
  Clone ID: PAT_MRT3847_36820C.1.pep
MTMAPDAYDALAGRQNVQLFVNAARTGSIELXQKLSLQMDEGKDTSKITGINXDCHTRGALHXVAREGQTDGCDYLLTDMKLSVPSQDDDGETALIHATR

SEQ ID NO: 215718 - protein, 77 aa, Glycine max
  Clone ID: PAT_MRT3847_36821C.1.pep
INIILKTFALSKFPIFTRVRFFIVQRAESYNFIQHFTNCGDKRLITTIKRSPRIFKIYYHILFLSIEILNKFSSFLF

SEQ ID NO: 215719 - protein, 48 aa, Glycine max
  Clone ID: PAT_MRT3847_36822C.1.pep
VMRNSYADGLYGIFLSLGFRRGKLELIELQNFLMATSDYSRTEILKKK

SEQ ID NO: 215720 - protein, 38 aa, Glycine max
  unsure (1)..(38): unsure at all Xaa locations
  Clone ID: PAT_MRT3847_36823C.1.pep
SQLHPVRTRQHLVRFRIDASLPILSLTYDMXSVHQRKR

SEQ ID NO: 215721 - protein, 82 aa, Glycine max
  Clone ID: PAT_MRT3847_36824C.1.pep
ILDTTLPQCIYYTKKLFFKANALFGTLFIMVHRLNNGASFPNKDRSLVINHILFYKQYKASLWRLKPLVGPLMNWRRTPGPE

SEQ ID NO: 215722 - protein, 41 aa, Glycine max
  unsure (1)..(41): unsure at all Xaa locations
  Clone ID: PAT_MRT3847_36825C.1.pep
XXXXFFFFFFFEPNIKVDITMCNSYREITSHHILKPPNTNV

SEQ ID NO: 215723 - protein, 68 aa, Glycine max
  Clone ID: PAT_MRT3847_36826C.1.pep
FSPAIKCLQIGKAGSSSRTRSKLITGLSSTQIGGRPYFQITLFFYDPSSYGLVSSSTLYFKRIEIFFF

SEQ ID NO: 215724 - protein, 34 aa, Glycine max
  unsure (1)..(34): unsure at all Xaa locations
  Clone ID: PAT_MRT3847_36827C.1.pep
QMLFTDXLXLSSSTFSXIRRKNXGXXEXFNXLXL

SEQ ID NO: 215725 - protein, 129 aa, Glycine max
  Clone ID: PAT_MRT3847_36828C.1.pep
FFFFFFFFFFFFFFLLIFLFFFFFCFFGKNLVGIFLKERKKGMKRAAGYKKTTGKGYRESQGTKKNTMAPLGPLRFRAQKKNPPYFQKFGGSPGGKLPHPWARTLRKPGTLERVSVRKPPTKAGENAGH

SEQ ID NO: 215726 - protein, 62 aa, Glycine max
  Clone ID: PAT_MRT3847_36829C.1.pep
VTFSINVLHSVTLFILFFAAKLLKGDKLLIYSLTFVKCREISYACISMLYSEGRLSSNLHVC

SEQ ID NO: 215727 - protein, 256 aa, Glycine max
  unsure (1)..(256): unsure at all Xaa locations
  Clone ID: PAT_MRT3847_3682C.1.pep
MSETEVNPTISKSTGLPRKRFYRARAHSNPLSDSHFPVPISPSHVDYSLHYPQLFPLSGQADSSKKIQFADVGCGFGGLLISLSTLFPETLMIGMELRDKVTEYVKERISSLRVANPGQYQNVSVVRTNSMKYIPNYFEKGTLSKMFFLFPDPHFKEKNHRRRVISPFLLDEYAYVXLRVGGFIYTISDVEELGDWMKSCLENHPMFEALTEKELEADPVVKLLSSATEEGQKVARNEGQTFQAVFRRIVPSDQAS

SEQ ID NO: 215728 - protein, 76 aa, Glycine max
  Clone ID: PAT_MRT3847_36830C.1.pep
ASLRSLFNMWWCRLVKRCIFPILLTPGKVYVLFMGCILRSNGQHIVTVALWYVVIVSYGNNRMPTRHTYVDKPKKH

SEQ ID NO: 215729 - protein, 81 aa, Glycine max
  Clone ID: PAT_MRT3847_36831C.1.pep
GEIKSSGSVFIKTHWGRMTSICMPFCLFNYGARCNRIVYTIFLFGVEVIPHIVLKYQCQALRDVNRRGGSIRGFFYRLGHM

SEQ ID NO: 215730 - protein, 85 aa, Glycine max
  unsure (1)..(85): unsure at all Xaa locations
  Clone ID: PAT_MRT3847_36832C.1.pep
KSTRISKGNKGGTXNAVYPFVKNDWYDIKVPXTIXVTNIGKTLVSRIQXPILYAKXLKHWLFEVSLTDLKGDEYHSFKKIPMRAE

SEQ ID NO: 215731 - protein, 547 aa, Glycine max
  Clone ID: PAT_MRT3847_36833C.1.pep
MGDKHQQHHQDDSSDFTSEDEGTEDYRRGGYHAVRIGDAFSAGRYVVQSKLGWGHFSTVWLAWDTKHSRYVALKVQKSAQHYTEAAMDEITILQQIAEGDPDDKKCVVKLLDHFKHSGPNGQHVCMVFEYLGDNLLTLIKYSDYRGLPIAMVKEICFHILAGLDYLHQQLSIIHTDLKPENILLLSTIDPSKDPRKSGAPLILPNSKDKMAMESAGMKDTKMLNGDLVKNHKKKIKRKAKQAAHGCVEKEASEGVEGNAETSGAVESSPNASSAREQASSSAGTSRLSDADGTKLKEQGNKRGSRSMRQKLLALVDLKCKLVDFGNACWTYKQFTNDIQTRQYRCPEVILGSKYSTSADLWSFACICFELATGDVLFDPHSGDNFDRDEDHLALMMELLGMMPRKIALGGRYSRDFFNRYGDLRHIRRLRFWPLNKVLLEKYDLSEKDANDMTDFLVPILDFVPEKRPTAGQCLLHPWMNAGPRLLEPSVPSNHNPAAETSVSDQKRKDKDEREAMETGMGNIVINSDFKPLMHSPSKKVFQGRSQK

SEQ ID NO: 215732 - protein, 86 aa, Glycine max
  unsure (1)..(86): unsure at all Xaa locations
  Clone ID: PAT_MRT3847_36834C.1.pep
LCSEKRPTAGQCLLHPCMNVGPRFLQPSMPSXARNSARASASDQKKRDKDEREAMEAGIGNIVINSDSKPLMHSPSKKVFQGSSLK

SEQ ID NO: 215733 - protein, 57 aa, Glycine max
  Clone ID: PAT_MRT3847_36835C.1.pep
RIVTTIIRRNYASLRLDSVILKAFVVDIHPLLPSIIKRVEPQWCFLGMFFWLIWEFN

SEQ ID NO: 215734 - protein, 57 aa, Glycine max
  Clone ID: PAT_MRT3847_36836C.1.pep
MLYRNYFSDFVANFYDETSTKFFISSFQIKQLKLDYYFHNKIPHQEYVAEFGGEGGI

SEQ ID NO: 215735 - protein, 48 aa, Glycine max
  Clone ID: PAT_MRT3847_36837C.1.pep
KKKVILNLSNGQKRRNIKVLLRFACPCHEDFQRFDANVNRVIKKLYHM

SEQ ID NO: 215736 - protein, 45 aa, Glycine max
  Clone ID: PAT_MRT3847_36838C.1.pep
SVSMRETLSPKTPMHVLQSNSTMGNSNLPRRIIKGTQRLLNEPTP

SEQ ID NO: 215737 - protein, 65 aa, Glycine max
  unsure (1)..(65): unsure at all Xaa locations
  Clone ID: PAT_MRT3847_36839C.1.pep
TLTRLXSMSLSVTVLXIYPMAVGTFITKPQPRIIFLKIIVVVGNTYSLFGLPXCGVNLXQNPKVG

SEQ ID NO: 215738 - protein, 94 aa, Glycine max
  Clone ID: PAT_MRT3847_36840C.1.pep
LGFGFFFFFFFYTSMDILFLNFIWVHSFFHALTEGKPFFVGGCFFFPGPKKKIWGLFETHPGGRGPPLKKGLGGGPTLGVLFVKKSWRCWCLHP

SEQ ID NO: 215739 - protein, 254 aa, Glycine max
  Clone ID: PAT_MRT3847_36841C.1.pep
GWKRTTKGESPNHLVRKMASCVALALSKIIDPKNPLYLDDSCSGETIDWEFGFTIPKKGNLAASNCGGKGVEGTKISTVSCPEKDSDSPSNKEKSICLKGKKKLLDFNALDPDEIIDPASLNLESDDSDEDADDGASENSYSSSDSSLRPYDLSDDDSDLKRKISQLADVVAALRKSNDADGVERAIDVAEKLIRASPDELKHAARDMTRTLVQVRCSDIALEGAEESTEDKRQRSLVALVVTCPFESLESLNN

SEQ ID NO: 215740 - protein, 124 aa, Glycine max
  Clone ID: PAT_MRT3847_36842C.1.pep
EGGKCSNRPSILNKRAMAKYLLLQKRPNNPEITKFRTMPGIPHFLKIRETTVEQKKLSFQDYPQFRNLGKIPKKKQKPPTGWASPQRNPTAPNLVLALHKPPRNKIPLLPRPPPCGKTTQPQKR

SEQ ID NO: 215741 - protein, 234 aa, Glycine max
  Clone ID: PAT_MRT3847_36843C.1.pep
MNVKCPFSEGAESIDAVVCLLLEDIKRINLSDSGLMSDNYNDRQWYNQGAVQCAISKNSYVPCLKNWMISATQPDALMNANFCLLNDVLSLVELVANKMSWHWVDMKLVPQLLNLLDSCVEENFAVRIIVLLGQLGRTGVDVGGYEDNGVGNLRCYLYTYFCRTSSMKAGLSLQVAAATALFDLLPLDFETLFHTKINLSAYSKSVSDNAESLRKWFSGLDKDQQKLLSDVFNM

SEQ ID NO: 215742 - protein, 902 aa, Glycine max
  Clone ID: PAT_MRT3847_36844C.1.pep
RCVKPNNVLTPAIFENLSIIQQLRWGGVLEAIRISCAGYPTRRTFYEFLNRFGVLAPEVLDGNCPDKVACQMILDKMGMKGYQIGKTKVFLRAGQMAELDARRAEVLGNAARIIQRQVRTHIARKEFIELRRAAICLQSNLRGILSRKLYEQLRREAGAVKIQKNFKGYIARKSYLTGRSSAVILQTGLRAMKARDEFRFRKQTKAAIYIQAYLRRLIAYSYYKRLQKAAVVTQCGWRRRIARRELRMLKMAARETGALKEAKDKLEKRVEELTWRLQIEKRLRTDLEEEKAQEIAKLQEALHAMQIQVEEANTKVIKEREAARKAIEEAPPVVKETPIIIQDTEKINSLLAEVNSLKESLLLEKEAKEEARKAQAEAEARNKEMVKKVEDSDRKVDQLQELVQRLEEKISNAESENQVLRQQALAVSPTGKALSARPRTVIIQRTPENGNALNGEAKIGSDMTLAVSNVREPESEGKPQKSLNEKQQENQDLLIKCITQDLGFSGGKPVAACVIYKCLLHWRSFEVERTSVFDRIIQTIASAVEAQDNTDVLAYWLSNTSTLLLLLQRTLKASGAASLTPQRRRTASSSLFGRMSQGLRASPQSAGLSFLNGRGLNRLDDLRQVEAKYPALLFKQQLTAFLEKIYGMIRDNLKKEISPLLGLCIQAPRNSRQSLVKGRAQANAVAQQALIAHWQSIVKSLNNYLKIMKANYAPPFLVRKVFTQIFSFINVQLFNSLLLRRECCSFSNGEYVKTGLAELEQWCIEATEEYTGSAWEELKHIRQAVGFLVIHQKPKKSLNEITKELCPVLSIQQLYRISTMYWDDKYGTHSVSTDVITNMRAMMSEDSNNAVSTSFLLDDDSSIPFSVDDISKSMQQVEVADVDPPPLIRENSGFGFLLARLE

SEQ ID NO: 215743 - protein, 86 aa, Glycine max
  Clone ID: PAT_MRT3847_36845C.1.pep
NSARGWDDKYGTHSVSTDVITNMRAMISSRSNNAVSTSFLLDDDSSIPFSVDDISKSMHPVEVADVDPPPLIRENSGFGFLLARSE

SEQ ID NO: 215744 - protein, 46 aa, Glycine max
  Clone ID: PAT_MRT3847_36846C.1.pep
KIVFNHVNALFTAYPCEYPYQKQPELLGLEHLTPTSGSRKKSCYLP

SEQ ID NO: 215745 - protein, 181 aa, Glycine max
  Clone ID: PAT_MRT3847_36847C.1.pep
MRTKAHQPGLNLKLLIVAVLVAITLLFVLIRSSNTKGVKQQEALLVKSDGSCNKMKIPGSVSEALIHYSTSSITPQQTVKEISVTARVLEKKSPCNFLVFGLGHDSLMWNALNHGGRTIFLEEDESWIQQMRRRFPMLEAYQVNYESKVNEAESMMEVGRGRECRSVRDPRYSMTRGRTRG

SEQ ID NO: 215746 - protein, 37 aa, Glycine max
  Clone ID: PAT_MRT3847_36848C.1.pep
IFTSALSNHNCELRCMDSEESILEKADTHKLQLGFVL

SEQ ID NO: 215747 - protein, 170 aa, Glycine max
  Clone ID: PAT_MRT3847_36849C.1.pep
MRKKLLFATTKGLSFRSNRNFTPKSNHLFYEVCYSADPPKFQQRGWSHAASVPSEEPEAPKGQKRVPRHERRAMVESFVNKYRAENAGKFPKISDTQKQVGGSYYVIREIVLELEYKSKMNSSNSVNKFFVGKQFDESKLLTTESVNVPSGNIEIANESSVKDDSQSVVL

SEQ ID NO: 215748 - protein, 210 aa, Glycine max
  unsure (1)..(210): unsure at all Xaa locations
  Clone ID: PAT_MRT3847_36850C.1.pep
GGGGAGPFSHTPPNPTTTPPPPPPPPPPPPPPPHPSPLSLXPPPPPPHLFPPPYPPPPPPPPPTSFPPPPPPPPPLPPPPPPLPSPPPPPHTPLPSPPPPPPPPPLPTPHSPPPSSPPPTPPHPHPPPXSPPLSHHPPSSPFSYPHPFKPSQISPSPQPPPIPYYPPSHLTINPFQKHSPILPFFLHSNTYTKILTTTPIYDIYIISPSF

SEQ ID NO: 215749 - protein, 44 aa, Glycine max
  Clone ID: PAT_MRT3847_36851C.1.pep
PTFVAWGVEPLLGAFTLLGLALRPVNKGIAPAAEVTVAMSMDEE

SEQ ID NO: 215750 - protein, 68 aa, Glycine max
  Clone ID: PAT_MRT3847_36852C.1.pep
LDLDVIIVIKSIDSFASCIIRSLLTAVHLTAGTHMVFFVLNIVEGLGILMLFKPFLVEKKKTHSNQLH

SEQ ID NO: 215751 - protein, 89 aa, Glycine max
  Clone ID: PAT_MRT3847_36853C.1.pep
VSSRRNNLLYSRHSFTRIFKRAANHQAIERQCLRYSTAGGSFTKVSKFLSHGGDFFFFLLDLLIQLILFPPMHSTVIKIFPFCCLLATD

SEQ ID NO: 215752 - protein, 52 aa, Glycine max
  Clone ID: PAT_MRT3847_36854C.1.pep
QTLITPNSDGPSVYRILIKTYLLCPSYLYMLFKLRIWLNGPDSAIMTVTNSL

SEQ ID NO: 215753 - protein, 109 aa, Glycine max
  unsure (1)..(109): unsure at all Xaa locations
  Clone ID: PAT_MRT3847_36855C.1.pep
ASTDASAFPDDQSEGRGSTCCIFVTAPSRRRPSEMAADESAVKQCVSTHDHAHLHDSVQVHYLNRGXFHAPRIGHGTKHVPEXVKSATTMSRHDSPVVMVKSKSNAETN

SEQ ID NO: 215754 - protein, 54 aa, Glycine max
  Clone ID: PAT_MRT3847_36856C.1.pep
KQTSAKLTQINNVNHYKHSSFCWSPKLVIKNALKEKIFNFYFPKQIRKEFFLFP

SEQ ID NO: 215755 - protein, 43 aa, Glycine max
  Clone ID: PAT_MRT3847_36857C.1.pep
RLREDDRRDVVCLRVSPLVGYIMQMQKLNVIAFMEVKVDPGHS

SEQ ID NO: 215756 - protein, 95 aa, Glycine max
  unsure (1)..(95): unsure at all Xaa locations
  Clone ID: PAT_MRT3847_36858C.1.pep
RHAYSSEFGSXALARLAPFGRVGGRLLRGCRARAAGDGGVRHVGDGXHIQPRYREFPQLTQSQVIHGEVLSSLMWFWILWRFWHDSDAVLGHFSY

SEQ ID NO: 215757 - protein, 54 aa, Glycine max
  Clone ID: PAT_MRT3847_36859C.1.pep
VFLGMTAIKSCLNGGAGGFCCRYTVLPVLGNGDNLSYDLNCSRWPFRSIKVKLI

SEQ ID NO: 215758 - protein, 144 aa, Glycine max
  Clone ID: PAT_MRT3847_36860C.1.pep
LTKLDPEYGLYTSVEPPIMYALMGTLIEISVAPVADVYLMCSSMIYMLIDPGNEPYACRKRVCTTTYCAGIFEAAFGLFMLGALVDFLCHAGMERLMGGAAIMTGLQQLKGLCEISCLTNNTYIFSVMKSRTESGDHSWKPRSF

SEQ ID NO: 215759 - protein, 234 aa, Glycine max
  Clone ID: PAT_MRT3847_36861C.1.pep
MRKDYNAGAGFVSSRPYHKGEISEPHLDEYAHVKPQRWNQSADGDHLSRNTEIDSDFHENYFERFGDGRTQGHSRGNPCPPFPERTYPNSESEGPYALGRSRYSVRQPRVLPPPSLGSVHRTYKNENEHPGPSAFLENEMHYNQATRSDSTLPTGYDNGNRGQPEVVDARQETTENEDHKVESTPKCDSQSSLSVSSPPSSPTHLSHDDLDDSGDSPTILTSEGSKNDPLTAPD

SEQ ID NO: 215760 - protein, 136 aa, Glycine max
  unsure (1)..(136): unsure at all Xaa locations
  Clone ID: PAT_MRT3847_36862C.1.pep
MPLQLFFLSPQNTLQMLINLLFKNPYSFTGTKDHLTQKTQTRHLISGMEIIIPTTXVEREQHYDVTHTTLHQIYVDXKKDETFAIVINIKNTVLPXMIKCVDAIXDMSGKNDDVSLSXNIWKLILNNYGHIIGTKY

SEQ ID NO: 215761 - protein, 101 aa, Glycine max
  unsure (1)..(101): unsure at all Xaa locations
  Clone ID: PAT_MRT3847_36863C.1.pep
DLTCLYGKIYSPYPQKTPLFVWGGCLVEINPFPGPFVIFLPPLLGGKSLIFGRRVEVLFRMVQFTSYVGPLGSPINACEKKIWGPPFRXHPWYAQLKSFNR

SEQ ID NO: 215762 - protein, 149 aa, Glycine max
  Clone ID: PAT_MRT3847_36864C.1.pep
VGSRESFFFSQKKPPLIFFFCGVPWPEIWVFSKKPGPPLPPNPWGGNFCKNPLKPIKFFGNYFQIRVLGGPNFSISQFFFFWGVPTPKFFPPKVRFLFVLQNFDEFWKRFFLGKIFFPGKNVPQKISPLPKICLLLGKNFFFSPPEGVF

SEQ ID NO: 215763 - protein, 107 aa, Glycine max
  Clone ID: PAT_MRT3847_36865C.1.pep
LALPLTKVFSRQITWLANFVEFVNLHLTLNNLTPLQQGLRAFVNRNWVSIVENKLESLEGFEGLSKLTRDHIINFVCLRLFVVLLFRIHSRNKQHKGVLFCMGHRTS

SEQ ID NO: 215764 - protein, 522 aa, Glycine max
  unsure (1)..(522): unsure at all Xaa locations
  Clone ID: PAT_MRT3847_36866C.1.pep
MEVKTKSDIVHQEQHSGRDSSVSDPSPADIRSIEAHEPKKATEKKSKKQKSAKSQSSDQTKGVLKSVTSQPANQAEVEIPKLSELGEANRAESLHETNMQQTRVKGTQIGSAVIEAVDHQQAGGWSANVTGNVTGSVDVGEAKAASSIVMQKAEVPAGRAWKPAPGVKPKSFLEIQQEEQRKAETEMLVSNIAVSVNSMSLVSPWAGVVSNPDSMKVSSESHKGANTEYPVKSETSQNLKSKKSHLHDLLAEXVLKKSNEIEAEVLDSILPLHNIAVHSESLDDGNFIEAKDTKRSRKKSGKSKGSGPTHYESFXVKVTKEPIQNILLNLKRLKIFAARPGSSLTWWLWLWXGERVPPSPSPSPAWSPDSXLAPRPASVGDGLFIEAKDTKRSRKKSGQSKGSRTKASLPVASSEAPIVSSPIEKGKNSCSAQQEKDQASQSKYKGDDDLFWGPIEQSKQDTKQSDFPQLASQGSGPSPTAPWDGLKPRVWTGPSAVPGSPTPPPLESPPPPSTWGRENCLP

SEQ ID NO: 215765 - protein, 113 aa, Glycine max
  Clone ID: PAT_MRT3847_36867C.1.pep
DCVFGEGHLLEIPPRSSPEKFHLLSLRAPPFRSPTSTAAASPFSLSNFIHVFGYLGIVVFDYLIHFMGCYWHHDIVRASALPHHNGKRKRKGDLRLFKYPFHKSCLSSLVIKE

SEQ ID NO: 215766 - protein, 136 aa, Glycine max
  Clone ID: PAT_MRT3847_36868C.1.pep
TASYMIEAVCAKSYEDPTQKLKDNEAQILRKRNELRQFEAEYRKALARYQEVTDRYTKEKQSVDELLKQRDGIHSSFTTVKSTNFSGSGSNLSNGSSSKINGDESPGEDGGSDGKDKSGKKKWFNLNLRGSDKKLI

SEQ ID NO: 215767 - protein, 82 aa, Glycine max
  unsure (1)..(82): unsure at all Xaa locations
  Clone ID: PAT_MRT3847_36869C.1.pep
EAVLMMEVVNNVVKNDGGFCVVAEVEQGTGLFFDXNRDLLGGGRFFFFGKQSESECAVACGQLNAPPEARAGYXITGLTVVE

SEQ ID NO: 215768 - protein, 43 aa, Glycine max
  Clone ID: PAT_MRT3847_3686C.1.pep
RLTRTCYPLKVHICSMVTMNSKEGPSLFWVQETDRLVRFAKAN

SEQ ID NO: 215769 - protein, 128 aa, Glycine max
  Clone ID: PAT_MRT3847_36870C.1.pep
MGMGSKMEGPSTPAIRRDPYEVLSVSKDSTDQEIKTAYRKLALKYHPDKNASNPEASELFKEVAYSYSILSDPEKRRQYDSAGFEALDADSMDMEIDLSNLGTVNTMFAALFSKLGVPIKTTISANVL

SEQ ID NO: 215770 - protein, 410 aa, Glycine max
  Clone ID: PAT_MRT3847_36871C.1.pep
MGMGSKMEGPSTPAIRRDPYEVLSVSRDSTDQEIKTAYRKLALKYHPDKNASNPEASELFKEVAYSYSILSDPEKRRQYDSAGFEALDADSMDMEIDLSNLGTVNTMFAALFSKLGVPIKTTISANVLEEALNGTVTVRPLPIGSSVSGKVEKQCAHFFGVTINEHQAESGIVVRVTSTAQSKFKLLYFEQDANGGYGLALQEDSEKTGKVTSAGMYFLHFQVYRMDSTVNALAMAKDPEGAFFKRLEGLQPCEVSELKPGTHIFAVYGDNFFKTASYTIEAVCAKSYEDTTQKLKDIEAQILRKRNELRQFEAEYRKALARYQEVTDRYTKEKQSVDELLKQRDGIHSSFTIVKSTNISGSGSNLSNGSSSKINGDESPGEDGGSDGKDKSGKKKWFNLNLRGSDKKLI

SEQ ID NO: 215771 - protein, 145 aa, Glycine max
  Clone ID: PAT_MRT3847_36872C.1.pep
PNSVQLPALKSLLLEYVSFTATDNGCAEPFSTCHSLNTLVLCSLHIDAKVLFISNSNLSILNLKDLKILDTIQQKIVFSTPNLSSLTITNYLGFSHQPFSSTCNLSCLEEGTIHTTTYISYSVFIGWLQLFANVKIPFCRLLAAV

SEQ ID NO: 215772 - protein, 55 aa, Glycine max
  Clone ID: PAT_MRT3847_36873C.1.pep
LEPNSVLLSTGRGYFDDGIHKHSKNTTTTKKVNLIIDYYDYAKNSYELFILTIPY

SEQ ID NO: 215773 - protein, 205 aa, Glycine max
  Clone ID: PAT_MRT3847_36874C.1.pep
VIIILIIVIVITNKTTQSSAEEGSGNSATAGTEWTFSAKSHAPSSDPSWDAIQRCGGATLALGDLRFVQRLGSGDIGSVYLVELKGSNGCLFAAKVMDKKELVARNKNRRAKVEREILQMVDHPFLPTLYASLDSPRWSYLLTEFCPGGDLHVLRQRQPDKRFHHAARRFYASEVVGCVEYLHMMGIIYRDLKPGNVLIRSDGHI

SEQ ID NO: 215774 - protein, 101 aa, Glycine max
  Clone ID: PAT_MRT3847_36875C.1.pep
QKTAMDSADAWRVAACGNSNVNKIMLRFRPIAPKPVTGISAAEAGSAVGEVTQNNHVSVLGKRPKRKYVRIRRDSGYVRKNTETVTEKVTVTVTMSLPTWR

SEQ ID NO: 215775 - protein, 46 aa, Glycine max
  unsure (1)..(46): unsure at all Xaa locations
  Clone ID: PAT_MRT3847_36876C.1.pep
FXPLIIPPPGPNNGVLIIIKTGLPKASRYKFRMRENLDDPYSNFKR

SEQ ID NO: 215776 - protein, 139 aa, Glycine max
  Clone ID: PAT_MRT3847_36877C.1.pep
MRSSAVQRRLLNGIREKLDGVVVNGSLERRYVGNLNLSFAYVEGESLLMGLKEVAVSSGSACTSASLEPSYVLRAALGVEEDMAHTSIRFGIGRFTTDAEIDRAVELTVHQVEKLREMNPLYEMVMEGINIKDIHWAQH

SEQ ID NO: 215777 - protein, 48 aa, Glycine max
  Clone ID: PAT_MRT3847_36878C.1.pep
MRSADRDVYPSCEQMLLQRYYDELSEVYCLAYVSQYRNRNVTIHSLPI

SEQ ID NO: 215778 - protein, 169 aa, Glycine max
  Clone ID: PAT_MRT3847_36879C.1.pep
MNTFSSEICSSGCESGWTLYLENSFLNQNAAASHRGGTEGFYEEEHKDKRFKGEEEDLSMVSDASSGPPHFPDYDEAYFNEEVNGCFYSASNKAVKLAKSGAKKQKVKENQQHLQDQQHLPSFLHDTASSPVFDFSTNNVNVANQQTSIGSMLDYSQGFSATYFEGRPS

SEQ ID NO: 215779 - protein, 55 aa, Glycine max
  Clone ID: PAT_MRT3847_3687C.1.pep
LGFPGGGDPKFFPLFYSPRRAIPNFNNRFRCPFSPVCSLSFPGGKFFWGGAPLGP

SEQ ID NO: 215780 - protein, 58 aa, Glycine max
  Clone ID: PAT_MRT3847_36880C.1.pep
YQVNARGDYDLVPPFLPGEGRRHHLPHLGGLFLTFCKALSCYDSGPHGGQPVLIRHAD

SEQ ID NO: 215781 - protein, 91 aa, Glycine max
  Clone ID: PAT_MRT3847_36881C.1.pep
RGRDQRGRGNHPICCRNLKWWFCFLQCLCCLFLFEVWEWICQFVTWTWNNVVMATEGGKLRRLLFNSFTNLFIWILICCNVAIVAGIWAHV

SEQ ID NO: 215782 - protein, 121 aa, Glycine max
  unsure (1)..(121): unsure at all Xaa locations
  Clone ID: PAT_MRT3847_36882C.1.pep
KAAWVLPRRTRNIREAVKVGRKLGXGQFXTTLXCTRRASGGXFXCXSIADPALLCGERLEDXRXXIHIIHHLSEHARVDRIXGPTXDATAVLLVMXLCDGGELVDTITQNGHFTDIHAATL

SEQ ID NO: 215783 - protein, 168 aa, Glycine max
  Clone ID: PAT_MRT3847_36883C.1.pep
LLNNVFGSSPPVFPLPGAESPPRGVLAKTTALPTAFWVPWVPQLFPFSGGGFFGPPPPESQGGLPCWFSKPPPQAVPPNLGKPLFFFFPPRFLRVFMWVLRGPFPGFIIKMGPCLGPKGPFLPAPPLWEVVFFPSFNFARGFLLGGFRGVIWGPPARAPFFPLFFLWV

SEQ ID NO: 215784 - protein, 288 aa, Glycine max
  Clone ID: PAT_MRT3847_36884C.1.pep
AVFLSPHKFLGGPDSPGVLLMNKALYLLGSSPPSTCGGGTVTYVNGFNEQDTLYLENIEERETGGTPPIIQTVTAALAFWVKEYISYEEIEKREQLYINKAFERFGSNPNIEVLGNLKAKRQAILSFLIYSTTTNSSSAGEWSDGNKENEGELDLWAETGNQRGKPLHGPFVAALLNDLFGIQARGGCACAGPYGHELLHINKSQSLAIRSAVQEGYIGVKPGWTRVSFPYYMSEEDFEYILRAIEFLAVYGQRFIPLYSFNLINGSWRLKTEKFEALTKEDMRRDES

SEQ ID NO: 215785 - protein, 68 aa, Glycine max
  Clone ID: PAT_MRT3847_36885C.1.pep
IMNLWSRLPTSPNWGWTYNIGILFGILRCSLSTSYENKKNVFMVHFSRETIARGPIKKKTPPHTGRPV

SEQ ID NO: 215786 - protein, 79 aa, Glycine max
  Clone ID: PAT_MRT3847_36886C.1.pep
PGSPPRFNAPPIGKIWTPPGTGPVFPGWPPGPIKGPFHVQGRLKQKKRGGGDHGVEVPNQNQGPGKGPFPGSGPKKELG

SEQ ID NO: 215787 - protein, 37 aa, Glycine max
  Clone ID: PAT_MRT3847_36887C.1.pep
WVLNNSWTKNFIAHSDPNQIRLSLVKNICNFFKKKPY

SEQ ID NO: 215788 - protein, 95 aa, Glycine max
  unsure (1)..(95): unsure at all Xaa locations
  Clone ID: PAT_MRT3847_36888C.1.pep
DEHVPETSEISSAENFTRIRRFXQSFLERVIXPAAAGQEDEEHSEEVMSMSHKCKWERRMGLGDTLDKGRGVVSYVMSAHMRREKSSSFSSYFTH

SEQ ID NO: 215789 - protein, 41 aa, Glycine max
  Clone ID: PAT_MRT3847_36889C.1.pep
PNKVMWKGNPFSCRHIQNTHCNINRGFSFNKVLLLKQQIRA

SEQ ID NO: 215790 - protein, 291 aa, Glycine max
  unsure (1)..(291): unsure at all Xaa locations
  Clone ID: PAT_MRT3847_3688C.1.pep
MSNFTSLVFINLGENNFSGVLPTKMPKSMQVMILRSNQFAGKIPPETCSLPSLSQLDLSQNKLSGSIPPCVYNITRMDGERRASHFQFSLDLFWKGRELQYKDTGLLKNLDLSTNNLSGEIPPELFSLTELLFLNLSRNNLMGKIPSKIGGMKNLESLDLSNNHLSGEIPAAISNLSFLSYLNLSYNDFTGQIPLGTQLQSFDARSYAGNPKLCGLPLTKNCSKEENYDKAKQGGANESQNKSLYLGMGVGFVVGLWGLWGSLFLNRAWRHKYFRLLDRILDWXYVFVALR

SEQ ID NO: 215791 - protein, 143 aa, Glycine max
  unsure (1)..(143): unsure at all Xaa locations
  Clone ID: PAT_MRT3847_36890C.1.pep
EFSREDSNIVSALIYHHIPSHLKRCFAYCAIFPRDLHMFVRELLILLXMAENFIQCPHEXYLDDILCGYVVKQSSRDKXCLVMHDLLNDLAKYVWGTFVYVGSQRSTRVFGQNLSFLDDRYDVSKRFDALHEANSLLMFLPLR

SEQ ID NO: 215792 - protein, 78 aa, Glycine max
  Clone ID: PAT_MRT3847_36891C.1.pep
QQHSPSKRKKDQPCKTLKLSSHFIATPPNHTNTQFSNQKKKQFYHPNKTPINNLTHLLLNNKKKQPLQTKIYFFPSPT

SEQ ID NO: 215793 - protein, 77 aa, Glycine max
  Clone ID: PAT_MRT3847_36892C.1.pep
NTKNWKIKKLLSISLDFDKWYVYFGLLQNLVQFCVLKKTMVAGRGQNCRMRWLQIYGARIRSILRRHLNFLRYACNY

SEQ ID NO: 215794 - protein, 40 aa, Glycine max
  Clone ID: PAT_MRT3847_36893C.1.pep
RGNNFGVDNVQRCINYITSIGGHIISPAFHCKTSDVKAPA

SEQ ID NO: 215795 - protein, 36 aa, Glycine max
  Clone ID: PAT_MRT3847_36894C.1.pep
DKANELLTGDGEIIIGTDFNGPYKTIFTVNPITYLL

SEQ ID NO: 215796 - protein, 122 aa, Glycine max
  Clone ID: PAT_MRT3847_36895C.1.pep
MEEPNKTENEDDRDESEQRVWSWGAGTEGQLGTKILQDEHFPQLLHQFSLSSISSLACGGAHVIALTSAGKALSWGRGNSGQLGHGEVVSNTLYPKAVTSLDGYFITHVSAGWSHSGFVSDT

SEQ ID NO: 215797 - protein, 86 aa, Glycine max
  Clone ID: PAT_MRT3847_36896C.1.pep
LGLALLGIGGKIWVNFPKGETNFASENPLNRFGWVFSGIVRSGLLMLLPAFVFIGLEQDYCCGCFGHENCGKRCAMLSSVLAALIG

SEQ ID NO: 215798 - protein, 92 aa, Glycine max
  unsure (1)..(92): unsure at all Xaa locations
  Clone ID: PAT_MRT3847_36897C.1.pep
VQFIPICLIQELIWIPPKSFSKFIGRIVKALNQVIKAPLLLICPSFRDPLKITRNLPLPFHPEKPLCPLIFIPKVNLGRKKPRGTNLCXTAT

SEQ ID NO: 215799 - protein, 226 aa, Glycine max
  unsure (1)..(226): unsure at all Xaa locations
  Clone ID: PAT_MRT3847_36898C.1.pep
HASDQNIEEIAALDAIDAGKLYHWCKAVDIPAAANTIRYYAGAADKIHGEVLKASREFHAYTLLEPIGVVGHIIPWNFPSTMFVAKVSPSLAAGCTMVLKPAEQTPLSALFYAHLAKLAGIPDGVLNVVPGFGQTAGAAISSHMDIDKVSFTGSTEVGREVMRAAANSNLKPVSLELGGKSPFIIFDDADLDKAGELALMAVVYNKGEIXCAAXSRVFVQERVYDE

SEQ ID NO: 215800 - protein, 82 aa, Glycine max
  Clone ID: PAT_MRT3847_36899C.1.pep
GFPKKKTLKWPPQNPLFWVLPGGRILRGPLRRGRKGWGGAGSFPQIQNWCFKKGGPRWTPPPTGVKRGEPSPGKKQPPGGGR

SEQ ID NO: 215801 - protein, 130 aa, Glycine max
  Clone ID: PAT_MRT3847_3689C.1.pep
NELYFYCTPNKPPKPPAKRPGGKKREGGGEEPREQPGQQKKQEERPKNQVKRRAQKGPQGGDPGGPQGPPQGYQQNKQRGEQGGAQPKTKAGPRGAPRSPQKAAQKTTREPRGKPRPRGKRGPPKNTPEV

SEQ ID NO: 215802 - protein, 234 aa, Glycine max
  Clone ID: PAT_MRT3847_368C.1.pep
DDGDPQTANLYVGNLSPKVDENFLLRTFGRFGPIASVKIMWPRTEEERRRQRNCGFVAFMNRADGQAAKDEMQGVVVYEYELKIGWGKSVALPSQALPAPPPGHMAIRSKEGSTVILSGPSGPPVTTVPNQNSELVLTPNVPDIMVTPPEDDHLRHVIDTMALYVLDGGCAFEQAIMERGRGNPLFNFLFVLGSKEHTYYVWRLYSFAQGDTLQRWRTEPFIMITVVEVLYYSF

SEQ ID NO: 215803 - protein, 71 aa, Glycine max
  unsure (1)..(71): unsure at all Xaa locations
  Clone ID: PAT_MRT3847_36900C.1.pep
XXGTWTQKLCPFHSHAHHHHTHXXXXXXXXFHHFSNNSLLFPACLTLLNTTSSSFMATHLQVSEGAPMKHS

SEQ ID NO: 215804 - protein, 73 aa, Glycine max
  Clone ID: PAT_MRT3847_36901C.1.pep
FLRGLTNLAEQKETHSDTLWLAKTLYFSIVFAVAYTMLSNPFIPSYEKVKPVLLLIFADCVLNITKWRPVLHV

SEQ ID NO: 215805 - protein, 178 aa, Glycine max
  Clone ID: PAT_MRT3847_36902C.1.pep
WGTFILLTWMPTYYNQVLKFNLTESGLFCVLPWLTMAIFANIGGWIADTLVSKGLSITSVRKIMQSIGFLGPAFFLTQLSHVRTPAMAVLCMACSQGSDAFSQSGLYSNHQDIGPRYAGVLLGLSNTAGVLAGVFGTAATGYILQRGSWDDVFKVAVALYIIGTLVWNIFSTGEKILD

SEQ ID NO: 215806 - protein, 96 aa, Glycine max
  Clone ID: PAT_MRT3847_36903C.1.pep
ASLSLSFSLQPQPWLLPLPLSLSPKPYSAPPPPISPPPPPPPSASPPLSALPHPPSPSRDASPPPSAPSTSPKPIRRQPWTPRWLKNPSTPPDSSS

SEQ ID NO: 215807 - protein, 246 aa, Glycine max
  Clone ID: PAT_MRT3847_36904C.1.pep
MVSAAIARNVVGVIGNIISFGLFFSPAPTFYGIVKKKTVEEFKPDPYIATVLNCAFWVFYGMPFVHPNSILVVTINSVGLAFEFVYLTIYYVYATNKGRKKLLIFLLIEVVFFAAVALITMLALHGTRQRSLVVGVLSDIFNVMMYVSPLTIMAKVIKTKSVKYMPFWLSLANFLNGACWTTYALIHPFDLYVLISNGIGAISGLIQLILYACYCSCKSKNDEDGDQDLKPSGFQLSNLNGRAAVV

SEQ ID NO: 215808 - protein, 162 aa, Glycine max
  unsure (1)..(162): unsure at all Xaa locations
  Clone ID: PAT_MRT3847_36905C.1.pep
MLRRVIEXQRCTLCNAEIETGSLIPXNHALRAAAAAVKHEDDRRLFRNAALRKRRKEMGDQMDSMRRVNRENGDFNATDGLQRGVQYPFSVNEKVVIKGNRRTPEKFVGKEAVITSQCLNGWYLLKIIETGENVRLQYRSLRKILNSPADQCPSQPIQNSSS

SEQ ID NO: 215809 - protein, 62 aa, Glycine max
  Clone ID: PAT_MRT3847_36906C.1.pep
TVMFEAGQTGPPFLEKIGVGWEVKGYRGLGPPIKNKEALYFELWIKARPQNFSPKLFRPGKK

SEQ ID NO: 215810 - protein, 70 aa, Glycine max
  unsure (1)..(70): unsure at all Xaa locations
  Clone ID: PAT_MRT3847_36907C.1.pep
SKIVFLLHFLLRSLXLMMLCFILKNEIVPYPFTATTLHRLYTVHATRSHHLATKSNFHHPDLTVLKDCHM

SEQ ID NO: 215811 - protein, 124 aa, Glycine max
  Clone ID: PAT_MRT3847_36908C.1.pep
SSLFWRPPSFLVVGGVPFFFFFFGFLVFCCLFPANTFLGGLFLFPCSAPVRINGRGQFTLPWGAVPYLGGGLGGPLFAPLFFSRGWGRLSGAPLPFEARWRVSFSSLRFGLLLPAFGLSLLRAA

SEQ ID NO: 215812 - protein, 96 aa, Glycine max
  unsure (1)..(96): unsure at all Xaa locations
  Clone ID: PAT_MRT3847_36909C.1.pep
LFTRGAKHHTPGPIAEHHPHSPKHANTTXTPAQETRQTRKDTNAKRNGQGQRRARRSKSKNGGTQGRTNSHDRNTREPEKNPQRTEQXDAGSKAQS

SEQ ID NO: 215813 - protein, 89 aa, Glycine max
  Clone ID: PAT_MRT3847_3690C.1.pep
ILLNFKVMFDVDNLRLVFDSDVPFVVRLFRFIDQLLDDVFAPFSNRHVMGIIPIQLQGCSVRFRPQFRGIPHIAASTAARSTPRELSNP

SEQ ID NO: 215814 - protein, 60 aa, Glycine max
  unsure (1)..(60): unsure at all Xaa locations
  Clone ID: PAT_MRT3847_36910C.1.pep
SSDNKGLPSTYGXELRPRCGKHRLKIVEFIAVLLKTGNEVAEKELANSGTIQRVIDLFFE

SEQ ID NO: 215815 - protein, 60 aa, Glycine max
  Clone ID: PAT_MRT3847_36911C.1.pep
EILCVGHFYFILFRILRLSQLKILLLASCNRTFWVFLQPEPFGGLSQPEGRVGGNVCGNV

SEQ ID NO: 215816 - protein, 75 aa, Glycine max
  Clone ID: PAT_MRT3847_36912C.1.pep
QTRCMQHEEQKRGCYPSVQVHHANTAPIYRTTNTTTNAKSSIQQSTPIIRQHTDLNADGNSTSQSTISRRTGKGS

SEQ ID NO: 215817 - protein, 177 aa, Glycine max
  unsure (1)..(177): unsure at all Xaa locations
  Clone ID: PAT_MRT3847_36913C.1.pep
MTVLSPSLSRQKLQSSFLCCPFKYSKPTHRNIQPKPTSYPLISALDLDLNTIVAISVGVVSVAVGIGMPVFYETQIDNAAKRENTQPCFPCNGSGAQEXCRFCLGNANVKVELGGGEEEASRCINCDGVGSLTCSTCQGSGIQPRYLDRSVFFGGLWGQLRFSAADVLSKYEVIVLV

SEQ ID NO: 215818 - protein, 56 aa, Glycine max
  Clone ID: PAT_MRT3847_36914C.1.pep
LSTHIHDTHNSTSQSQLFFAGRSNGSRYYQCPKSVEGCRSIFHTNVLNPEMLQLIR

SEQ ID NO: 215819 - protein, 157 aa, Glycine max
  Clone ID: PAT_MRT3847_36915C.1.pep
MTVLSPSLSLPKLHSSFLCCPLKSKLSSSATNRIQQKPTSYPRIRALDLDQNTVVAISVGLVSVAVGIGIPVFYETQIDNAAKRDNTQPCFPCNGSGSQKCRFCLGSGNVTVELGGGEKEVSRCINCDAVGSLTCTTCQGSGIQPRYLDRREFKDDD

SEQ ID NO: 215820 - protein, 107 aa, Glycine max
  unsure (1)..(107): unsure at all Xaa locations
  Clone ID: PAT_MRT3847_36916C.1.pep
LSLILIQYPPPPPLSPPSLSPFPPFPXDXSPLSPPIPPPLSPPPPXPPPPPPPPPPPPPPLEPPPSLPPLPPASPPPLLPPPPALPPPPSLPPPPALPPPPWLPPPP

SEQ ID NO: 215821 - protein, 155 aa, Glycine max
  Clone ID: PAT_MRT3847_36917C.1.pep
MTVLSPSLSRPKLQSSFLCCPLKYSKPTNRNIQPKPTSYPRIRALDLDQNTVVAISVGVVSVAVGIGIPVFYETQIDNAAKRENTQPCFPCNGSGAQKCRFCLGNGNVTVELGGGEEEVSRCINCDGVGSLTCTTCQGSGIQPRYLDRREFKDDD

SEQ ID NO: 215822 - protein, 91 aa, Glycine max
  Clone ID: PAT_MRT3847_36918C.1.pep
MTVLSPSLSLPKLHSSFLCCPLKSKLSSSATNRIQQKPTSYPRIRALDLDQNTVVAISVGLVSVAVGIGIPVYYETQIDNAAKCFDFTLYH

SEQ ID NO: 215823 - protein, 63 aa, Glycine max
  Clone ID: PAT_MRT3847_36919C.1.pep
SHHQILTLHSPLSFINPPTSIVSEGVSVTILHSIVYAIASCSTAEYTTKFAKYPNDSTIFTNT

SEQ ID NO: 215824 - protein, 71 aa, Glycine max
  Clone ID: PAT_MRT3847_3691C.1.pep
SFILAAGVVEPPSKKKDFPLMVSPTVVFLPLRIEQLPLQRFYVLEEKHHSLDCRISEKIVFVKKKTPRAAY

SEQ ID NO: 215825 - protein, 49 aa, Glycine max
  Clone ID: PAT_MRT3847_36920C.1.pep
AMLGGKMSTKEVDEQMINVQNKNSSYFPEWIPNTVKATVCDIPATALKI

SEQ ID NO: 215826 - protein, 91 aa, Glycine max
  Clone ID: PAT_MRT3847_36921C.1.pep
RREENTAASHGSAISYIYKFELLSFEIVTLWPEKCRFCLGNGNVTVELGGGEEEVSRCINCDGVGSLTCTTCQGSGIQPRYLDRREFKDDD

SEQ ID NO: 215827 - protein, 97 aa, Glycine max
  Clone ID: PAT_MRT3847_36922C.1.pep
NPHLPNRSVSFQRIAFSFYILMILLKPFIIRFSLSLILYLPLFLLFYPKFFNIMKLFLILIYQFCFLHTFLAYLFLPLIYIHNLLLSFSLNLTFLFF

SEQ ID NO: 215828 - protein, 361 aa, Glycine max
  Clone ID: PAT_MRT3847_36923C.1.pep
MMKFQACSNPISNLFYACCVLLLPPTMALGDCTCDTKEATKSDSIEVLHYKIGSIASVLVAGALGVSLPLLSKRIPTLNPKNDIFFMVKAFAAGVILATGFVHILPEAYESLTSPCLKENPWGKFPFTGFVAMLSSIGTLMVDSFATGFYHRQHFNPSKQVPADDEEMGDEHAGHMHVHTHATHGHAHGSAVSPEGSITSEVIRQRIISQVLEIGIVVHSVIIGISLGTAGSIDTIKPLLVALSFHQFFEGMGLGGCISQAKFESKSMAIMATFFSLTTPIGIAIGMGVSSVYKENSPTALTVEGIFNSASAGILIYMALVDLLAADFMSPRLQKNLKLQLGANISLLLGAGCMSLLAKWA

SEQ ID NO: 215829 - protein, 182 aa, Glycine max
  unsure (1)..(182): unsure at all Xaa locations
  Clone ID: PAT_MRT3847_36924C.1.pep
MVHVSFYRNYGKTFKKPRRPYKKEHLNTKLKLVDKYRLRYKKELXKVXYTLSRIRNNTQNLLTLDKKNPRQIFEEEALLREIFHYSLLDETQNKLDYILALTVENFLEHRLQTLFFNFSMTKCIHHTKILIKQRHIRVSRRVMNIPSFLVKVDSQKHIDFFTYNALCSSRALKSKKRNQKAS

SEQ ID NO: 215830 - protein, 74 aa, Glycine max
  Clone ID: PAT_MRT3847_36925C.1.pep
PSTRPVTIPDTVTPPAPPPILSLSQYTPASKCSKNRAHNRVMPGPPPPLNQVRVDLSSRTTVPAFHTLILQRRV

SEQ ID NO: 215831 - protein, 211 aa, Glycine max
  unsure (1)..(211): unsure at all Xaa locations
  Clone ID: PAT_MRT3847_36926C.1.pep
KERDVSDLNSLGLSKRSQENQSGPTNEKGSXDEERAEHEIPGHRLSRKQREDMSSDDEQQDSRRGRSKLERWTSHKERDFSVNKSSSSLKYKDIDKDNNDGSSEAGKPADEPAKTVDVDNQHLLSVEARDSADMENRDADTKESGDRHLDTVERLKKRSERFKLPMPSEKEALVIKKLESEPLPSAKSENPVVDSEVKQERPARKRRWVTN

SEQ ID NO: 215832 - protein, 77 aa, Glycine max
  unsure (1)..(77): unsure at all Xaa locations
  Clone ID: PAT_MRT3847_36927C.1.pep
PHASARGERRRSKRRSDTQRGLRRERALSXSPAPFPSNSFAPFARPHSQLKPHWLLITPPPPRRRPPPQTQASYICA

SEQ ID NO: 215833 - protein, 92 aa, Glycine max
  unsure (1)..(92): unsure at all Xaa locations
  Clone ID: PAT_MRT3847_36928C.1.pep
IRNLGHYYFARSLIYSLAQGKFQLCLIFFIILEPCKPAMLSISISITILYHYQTLKMASVGFGTICTSVMSSCRPYYLYIYCPLYIYKXNVK

SEQ ID NO: 215834 - protein, 63 aa, Glycine max
  unsure (1)..(63): unsure at all Xaa locations
  Clone ID: PAT_MRT3847_36929C.1.pep
KPESHIHIKFIFLIISSGWSYTPGRETLPRRRFPRNSIIHNSXFYFHFPPFRNQRGEAARGWG

SEQ ID NO: 215835 - protein, 74 aa, Glycine max
  Clone ID: PAT_MRT3847_3692C.1.pep
QQNAPFSYSDSDSDYSYNEAEDEAFHCAFGQHDDGDNSSSMENPNRDDPEVNFRAFSEALESPAMKEFHNGVFA

SEQ ID NO: 215836 - protein, 49 aa, Glycine max
  unsure (1)..(49): unsure at all Xaa locations
  Clone ID: PAT_MRT3847_36930C.1.pep
FGTSNNFLCSTPEXRKHYQMLVKSKDQVWSPKLETISENKVRFSPCRFI

SEQ ID NO: 215837 - protein, 278 aa, Glycine max
  Clone ID: PAT_MRT3847_36931C.1.pep
CGANSPLLSLILAEVGGGNVFGGGGGGAKSPPGFLEEFFRDPDFDSLDKILKGLYEELRGSVMKVSALGNFQDSLRALLYLVRFPVGAKSLVNHEWWIPKGVYMNGRAIEMTSILGPFFHISALPDHAFFKGQPDVGQQCFSDASTRRPADLLSSFSTIKTVMNNLYDGLAEVLLILLKSQDTRENVLKYLAEVININASRAHIQVDPITCASSGMFVNLSAVVLRLCEPFLDANLTKRDKIDAKYVHYSNRLKAKGLTALHASSEEVIEWLNSKNPA

SEQ ID NO: 215838 - protein, 112 aa, Glycine max
  Clone ID: PAT_MRT3847_36932C.1.pep
MVSFKLLMRLATNFLKCCMGQVLLDPNEVTEICMATTGLNIKKMAMDGFIIKMPSMIHSRSRALLMKDAKRTGRLSGYGMRKGTREARLPTKILWMMRMLVLKRLPRMYRES

SEQ ID NO: 215839 - protein, 108 aa, Glycine max
  Clone ID: PAT_MRT3847_36933C.1.pep
NLYFTFFFIFFKILFFFLTIIQTPKKKPVKSWRSNNGSPNITQDKNLSLRTLNPGQDIKKNKFFGTQKNPKIFDGINYHKTQGSHKHFLTLKKNGRPPEAPLHVKNPS

SEQ ID NO: 215840 - protein, 89 aa, Glycine max
  Clone ID: PAT_MRT3847_36934C.1.pep
ARAARVRLREDDRRGGRIGNEFTVTCGVASQIPLSLERTPQQSKSASHYHHHHHQYFIYGVLLATILVCCRLPTKRSRHFGSDILALQA

SEQ ID NO: 215841 - protein, 255 aa, Glycine max
  unsure (1)..(255): unsure at all Xaa locations
  Clone ID: PAT_MRT3847_36935C.1.pep
RTAAPDLTEELDPHVTHITIPSXLHXSLCKGKDDNDTNAGASPGGKGFMIRGXNYLKDSSKVVGGDPLLKLVAVDWFTVDKSADRIALHPKCLVQSEAGKTLPFILVINLQVPAKPNYSLVLYYAADRPINKNSLLAKFVDGSDAFRDSRFKLIPSIVEGYWMVKRAVGTKACLLGKAVTCKYFRQDNFLEIDVDIGSSSVARSVIGLVLGYVTSLVVDLAILIQANEEVELPEYILGTVRLNRLKLESAVPLEV

SEQ ID NO: 215842 - protein, 118 aa, Glycine max
  Clone ID: PAT_MRT3847_36936C.1.pep
AGASHNLPQSMLHPGTKPSASVGSTFPQGQTPLPGQPSSQPPYQVGNMPLGPDFGNQAGNAMQVDRGSSWMLGPSENLAHLSGPPGPPSVVSGQMGAAAKQPLRPPGLTPEMEKALLQ

SEQ ID NO: 215843 - protein, 85 aa, Glycine max
  Clone ID: PAT_MRT3847_36937C.1.pep
MYSAMARIWQHARTSPGRNAPTKQLASYAARTSAVTCAGLKNAQRSHPRTGAHSKPKKYLKTTEDLIQSHPYQSYARAIAQDSYI

SEQ ID NO: 215844 - protein, 77 aa, Glycine max
  Clone ID: PAT_MRT3847_36938C.1.pep
IISSDQHLGTTNAYRIEPTVVRVYCASRSMADLAMSPKALTVPVEHRNTTLATGYAHVTERHIPTIMSRESAHLATQ

SEQ ID NO: 215845 - protein, 62 aa, Glycine max
  Clone ID: PAT_MRT3847_36939C.1.pep
LGVIYDTSSILLQAALYCTKEYILNKLIYIICIYITIPKCSASASSPTSPQASKCEIFSKHL

SEQ ID NO: 215846 - protein, 189 aa, Glycine max
  unsure (1)..(189): unsure at all Xaa locations
  Clone ID: PAT_MRT3847_3693C.1.pep
MAAEKLRDLSQPIDVPLLDATVAAFYGTGSKEQRTAADQILRDLKNNPDTWLQVMHILQNTQSLNTKFFALQVLEGVIKYRWNALPVDQRDGMKNFISDVIVQLSGNEASFRTDRLYVNKLNIILVQILKHEWPVRWRSFIPDLVSAAXTSETICENCMAILKLLSEEXVFDFSRGEMTQQKDKELKHS

SEQ ID NO: 215847 - protein, 51 aa, Glycine max
  Clone ID: PAT_MRT3847_36940C.1.pep
CWSMKLAVYSMENYNLAKLVRNTIREYNLCSEPFTVGRLMKVTKKPAMLTS

SEQ ID NO: 215848 - protein, 48 aa, Glycine max
  Clone ID: PAT_MRT3847_36941C.1.pep
SPGNTNVLGIVVFYLSCLPCFFHNIKASLLPLDFVFFPLLILLCFVML

SEQ ID NO: 215849 - protein, 132 aa, Glycine max
  unsure (1)..(132): unsure at all Xaa locations
  Clone ID: PAT_MRT3847_36942C.1.pep
PPSFPSGPSFRPRLSPPRPXRPPPPSGSSSSPGPSXLWPPLPPPCPAPSPSPAPLSCPRRSLPPXSCSRPALSPSSRRCXPSGSXXPVPVPXXCCXCPLASRLASALPRPAVGGGGFLLRLRPGRSRSPVRF

SEQ ID NO: 215850 - protein, 103 aa, Glycine max
  Clone ID: PAT_MRT3847_36943C.1.pep
RVVSNQLGVEVYASIVSCCHCPVAHVCHRISSTFNVNLVPATELYPFWSWFLRLSVKPLNIGNLNLVSLNVLILVTVVITMLFLVVFVFSVPIVVLIVVTTVT

SEQ ID NO: 215851 - protein, 89 aa, Glycine max
  unsure (1)..(89): unsure at all Xaa locations
  Clone ID: PAT_MRT3847_36944C.1.pep
NTSLAFASFLGRVVFASVIRLVAYQLFNDFGLDVGPARSALETKFDAFTHLVHSLIGFHIPXINLKFLSAGAIALKGLGRVPYTPGGSF

SEQ ID NO: 215852 - protein, 137 aa, Glycine max
  unsure (1)..(137): unsure at all Xaa locations
  Clone ID: PAT_MRT3847_36945C.1.pep
MGLKMALLIXGLSLMLLLVSSEVASTNTKEEANGVDDAKYPGGSYGGGYPGHGGGGYPGHGGGGYPGHGGGGGYPGHGGGHPGHGGGYPGRGGGYCRHGCCGGRTYNGGCRWRSCWIRLTIKTMQFYLISTLDILIS

SEQ ID NO: 215853 - protein, 130 aa, Glycine max; identical to SEQ ID NO: 214470
  Clone ID: PAT_MRT3847_36946C.1.pep

SEQ ID NO: 215854 - protein, 75 aa, Glycine max
  Clone ID: PAT_MRT3847_36947C.1.pep
NAVRIFTFYTHLINTYHFSLSHHITYKGYTFFLFFPSLTWCYITMSINYFPFYYQPRRNVACVVILALLIKNVIF

SEQ ID NO: 215855 - protein, 130 aa, Glycine max; identical to SEQ ID NO: 214470
  Clone ID: PAT_MRT3847_36948C.1.pep

SEQ ID NO: 215856 - protein, 130 aa, Glycine max; identical to SEQ ID NO: 214470
  Clone ID: PAT_MRT3847_36949C.1.pep

SEQ ID NO: 215857 - protein, 107 aa, Glycine max
  Clone ID: PAT_MRT3847_3694C.1.pep
YILSKVPLQFKSLNYIRGRSFQQSLILIDECQNLTPHQMKTIITRAGAGSKVVCLGNLAQIDTPYLSATSSGLTYLTERFKDFPNGVHITLQGVPRSILAEYAESHL

SEQ ID NO: 215858 - protein, 74 aa, Glycine max
  unsure (1)..(74): unsure at all Xaa locations
  Clone ID: PAT_MRT3847_36950C.1.pep
NSLHHDRASPNRRIRLVRRNRRIGGLSRVAVCNIRCILRQWNWCWDGRTWQAFDGDHRVXYKVVVVAVVGREGF

SEQ ID NO: 215859 - protein, 72 aa, Glycine max
  Clone ID: PAT_MRT3847_36951C.1.pep
KKKRGAKKKGGGPPPPKGGEKKPGGRKKSGPAPNFRAPARGRETHPGHKGVLIFKGGAAFKKRGGGKTGGSG

SEQ ID NO: 215860 - protein, 70 aa, Glycine max
  Clone ID: PAT_MRT3847_36952C.1.pep
HYKACLHQIYRKPTSIILENSRASRSKLQNEKCIHKIIINRSIKNDKILNLPHSAENHVFLACFSFVPSN

SEQ ID NO: 215861 - protein, 452 aa, Glycine max
  Clone ID: PAT_MRT3847_36953C.1.pep
RGLKIIPVDLLGSLLPRHLQILYEINFKFMEELKKKIGLDYNRLSRMSIVEEGAVKSIRMANLSIVGSHAVNGVSKLHLDTLKMNTFKDFYELWPEKFQYKTNGVTQRRWIVVSNPSLCALISKWLGTEAWIRNADLLTGLRDLVDNTDFRCEKKMDKKVNKMRLAEYIETMSGVKVSLDAMFDVQVKRIHEYKRQLLNILGIIHRYDCIKNMDKNDRRKVVPRVCIIGGKAAPGYEIAKKIIKLSHAVAEKINNDTDIGDLLKLVFIPDYNVSVAELVIPGADLSQHLSTAGHEASGTGSMKFMMNGCLLLATADGSTIEIIEEIGSDNLFLFGAKVQEVAELREKGSTLKVPLQFARVLRMVRDGYFGHKDYFESLCDTVEIGNDFYLLGPDFGSYLEAQAAADKAFVEPEKWIKMSILSVAGSGRFSSDRTIQDYAERTWKIDPCRCPL

SEQ ID NO: 215862 - protein, 123 aa, Glycine max
  Clone ID: PAT_MRT3847_36954C.1.pep
TIYGLGSLMKEIAGGSVLYWMPPAASAIPTMPPLALARMVLTWLGVASTNCGTRYVSSETAADWATRQYQWRDICNVDQSRHWFLRDRRGLMVLPSRLHTPATTRVLPSRLHTPATARALFAG

SEQ ID NO: 215863 - protein, 75 aa, Glycine max
  Clone ID: PAT_MRT3847_36955C.1.pep
LTKIHSFDSVASFLPIIHQIQHLHLEKKLSFFTLLSTDPLDVQALIKPRNLYSRHYSSPDVLHGLVLQHNLGPLY

SEQ ID NO: 215864 - protein, 90 aa, Glycine max
  unsure (1)..(90): unsure at all Xaa locations
  Clone ID: PAT_MRT3847_36956C.1.pep
MVQDXYFGHKDYFESLCDTVEIGNDFYLLGPDFGSYLEAQAAADKAFVEPEKWIKMSILSVAGSGRFSSDRTIQDYAERTWKIDPCRCPL

SEQ ID NO: 215865 - protein, 51 aa, Glycine max
  unsure (1)..(51): unsure at all Xaa locations
  Clone ID: PAT_MRT3847_36957C.1.pep
TPTARELAWLAQIQITPITHHFSESLGGADXIPGFEQEGRFIYTKLLHEDG

SEQ ID NO: 215866 - protein, 329 aa, Glycine max
  Clone ID: PAT_MRT3847_36958C.1.pep
MPSIPEEPLLAPNPDRFCMFPIQYPQIWEMYKKAEASFWTAEEVDLSQDLRHWDSLTDGERHFVTHVLAFFAASDGIVLENLAGRFTKEIQLPEARAFYGFQIAIENIHSEMYSLLLETYIKDSDQKNHLFRAIDTIPCVAKKAQWALRWIDSSDSFAERLVAFACVEGIFFSGSFCAIFWLKKRGLMPGLTFSNELISRDEGLHCDFACLLYSLLRQKLTEERVREIVRDAVDIEREFVCDALPCALVGMNGDLMSQYIEFVADRLLGALGCGKVYNVQNPFDWMELISLQGKTNFFEKRVGEYQKASVMNSLNGNGGTHVFKMDEDF

SEQ ID NO: 215867 - protein, 47 aa, Glycine max
  Clone ID: PAT_MRT3847_36959C.1.pep
SSAESVWPSCTPKTIVSGIALSAMTITVEMIESHRPSVKSHSGNLEP

SEQ ID NO: 215868 - protein, 38 aa, Glycine max
  Clone ID: PAT_MRT3847_3695C.1.pep
FILESGYHFNKGLSVQTRLISTPMWVLLRDSRRPYHPG

SEQ ID NO: 215869 - protein, 41 aa, Glycine max
  Clone ID: PAT_MRT3847_36960C.1.pep
RAIIADEKESTSHYSYSRGKCISRRSRRPSQAYTKISQLLH

SEQ ID NO: 215870 - protein, 156 aa, Glycine max
  Clone ID: PAT_MRT3847_36961C.1.pep
MPSIPEEALLAPNPDRFCMFPIQYPQIWEMYKKAEASFWTAEEVDLSQDLRHWDSLTDGERHFVSHVLAFFAASDGIVLENLAGRFTKEIQIPEARAFYGFQIAIENIHSEMYSLLLETYIKDSSQKSHLFRAIDTIPCVTKKAQWALRWIDSSDS

SEQ ID NO: 215871 - protein, 118 aa, Glycine max
  Clone ID: PAT_MRT3847_36962C.1.pep
GGGGGSPLMVGDRACGGSPKAPLGFEGWVLVLFDCLETSAILFMERALSIRPCCVSGARPTFFYFGVEALYSFVLEDGVNYFVLVVSSPILVVLWLALLVCQIWSRNFGPYRTRRPIN

SEQ ID NO: 215872 - protein, 213 aa, Glycine max
  unsure (1)..(213): unsure at all Xaa locations
  Clone ID: PAT_MRT3847_36963C.1.pep
LVAETPCKLLRYLVADDSHVDADTPYAEVEVMKMCMPLLSPASGIIHFKMSEGQAMQAGELIARLDLDDPSAVRKAEPFTGSFPVLGPPTAISGKVHQKCAASLNAARMILSGYEHNIDEVVQSLLNCLDSPELPFLQWQECLAVLATRLPKELKNELEKXRSLRGISSSXIVDFPAKLLKGIIEAHLSSCPDKEKGAQERLVEPLLSLVKSY

SEQ ID NO: 215873 - protein, 70 aa, Glycine max
  Clone ID: PAT_MRT3847_36964C.1.pep
YSAIEIFFKAVGEFGTRCHLLGEKLCEPTYQSATHKVNLISYVPYFKMLPLHFILYAEAQTTTFNVLDKV

SEQ ID NO: 215874 - protein, 134 aa, Glycine max
  unsure (1)..(134): unsure at all Xaa locations
  Clone ID: PAT_MRT3847_36965C.1.pep
MFLCVPALPLTYEAHVLAVVDSTLIPGWVINLRGGLTMYTDNKFLIFNIHPDIIVVGLLDHGGEAIISYKAFALKKRXTKLRHLALHATGXILGIVQHHTAYKVHIECGIGNLHRTHSLLGTGAIALYGIQRIH

SEQ ID NO: 215875 - protein, 62 aa, Glycine max
  unsure (1)..(62): unsure at all Xaa locations
  Clone ID: PAT_MRT3847_36966C.1.pep
YLNKLLASILNSHGFPEKDAGXNXXLXSXGEWWXAGXHLTXAIXXXTIXTLPXXXRXLXXXX

SEQ ID NO: 215876 - protein, 118 aa, Glycine max
  Clone ID: PAT_MRT3847_36967C.1.pep
PCLCFQSPLNAIPLFSSIFLFLGPFKSCTVFSPPLAVHLCYLSQRIIAMSVAPVDSIPSLSSDLFYDIFRRLDGATLASAACTCAALCSISKEENLWENVCSSMWPSTNREDVKSLIS

SEQ ID NO: 215877 - protein, 84 aa, Glycine max
  Clone ID: PAT_MRT3847_36968C.1.pep
IYKLPCPTLYSLYFFPSLLHYSMILITFHHIITSNSIFHYLTYIFHLTNSSFLYQFIPIIYNLIITQITNITIIFFSSINYYTF

SEQ ID NO: 215878 - protein, 67 aa, Glycine max
  Clone ID: PAT_MRT3847_36969C.1.pep
FKTKSRIFCISRRSTLQADIETHYRRHQLQLHHFPLLLHPRRTVGGAGTTLGGRACHPSRPNIQFWS

SEQ ID NO: 215879 - protein, 266 aa, Glycine max
  Clone ID: PAT_MRT3847_3696C.1.pep
LIWINKEEMIFQIPWKHAAKHGWDINKDACLFRSWAIHTGRYKAGEKEPDPKTWKANFRCAMNSLPDIEEVKDQSRNKGSSAVRVYRMLPPLTRNQRKERKSKSSRDTKSKTKRKLCGDVSPDTFSDGLSSSTLPDDHSSYTTQGYLGQDLDMERDITPALSPCVVSSSLSEWHMQMDIIPDSTTDLYNLQVSPMPSTSEAATDEDEEGKIAEDLMKLFEQSEWQPTHIDGKGYLLNEPGTQLSSVYGDFSCKEEPEIDSPRGDIG

SEQ ID NO: 215880 - protein, 59 aa, Glycine max
  unsure (1)..(59): unsure at all Xaa locations
  Clone ID: PAT_MRT3847_36970C.1.pep
GIRSFARREETTTRDDSTFTATGLTXQINATRDSSXYSWHSTDVVVKHKEGLLRNGTNP

SEQ ID NO: 215881 - protein, 74 aa, Glycine max
  Clone ID: PAT_MRT3847_36971C.1.pep
AELYAGTPAGKYMRSSVSVILTTQANVVLMLSKHDLFETKTHGVVMTMHGDRIKVHNLMHLISSFYHQEQAFSR

SEQ ID NO: 215882 - protein, 223 aa, Glycine max
  unsure (1)..(223): unsure at all Xaa locations
  Clone ID: PAT_MRT3847_36972C.1.pep
MLLHTHHLHPHLLFPSPHSHASPFPFPFPSRTNTLRSRTFPATSIRTGSSSLRFRSYGRRIRNSAAKGGVSETEHNKQPVTRAYPFHEIELKWQRFWDHNRTFRTPDDDIDTSKPKYYVLDMFPYPSGAGLHVGHPLGYTATDILARYKRMQGYNVLHPMGWDAFGLPAEQYAIETGTHPKLTTVRNINRFRTQLKSLGFSYDWDREVSTIEPDYYXWDSWIF

SEQ ID NO: 215883 - protein, 147 aa, Glycine max
  unsure (1)..(147): unsure at all Xaa locations
  Clone ID: PAT_MRT3847_36973C.1.pep
CWSPFPRTQRPFRRLRCPKQKQINHPYLVFDPPRVSSFSLDKLIRNLVKITSQASVFKQILKRCSIXGKKNEYDDDGLPLDVPKGHFAVYVGQNRSRYIVPISFLTHPEFQSLLRQAEEEFGFDHEMGLTIPCEEVVFRSLTSMLRC

SEQ ID NO: 215884 - protein, 84 aa, Glycine max
  Clone ID: PAT_MRT3847_36974C.1.pep
CSSLGKKNGYDDDGLPLDVPKGHFAVYVGQNRSRYIVPISFLTHPEFQSLLRQAEEEFGFDHEMGLTIPCEEVVFRSLTSMLRC

SEQ ID NO: 215885 - protein, 144 aa, Glycine max
  Clone ID: PAT_MRT3847_36975C.1.pep
DPCTNNRELRELGNQETREEHHVINRGLTFTRLGMRHQKGLSWITKLRNALQSSENKTRGQGHQAHRGLFLFPQHLPPLLLSLPRTSPSLPIPWVQLVLLSRVVSWWFCNQRNISFSHSHSDPSFPILFTRSICKQHHNFIIYQ

SEQ ID NO: 215886 - protein, 171 aa, Glycine max
  Clone ID: PAT_MRT3847_36976C.1.pep
HASDFNCVCVTNVKSTFFYDFNSTLLFIIYYAAEKLNLPYLSAYLNSLGTNYRHGANFATGGSTIRKQNETIFQYGISPFSLDIQIVQFNQFKARTKQLYEEAKAPHEKSKLPVPEEFSKALYTFDIGQNDLSVGFRKMNFDQIRECMPGVVRRGGNAGGGVCGRGGGKLG

SEQ ID NO: 215887 - protein, 382 aa, Glycine max
  Clone ID: PAT_MRT3847_36977C.1.pep
MGIGVLFVGFFLLSCVVCVKGVEPKASPTCTFPAVYNFGDSNSDTGGISASFVPIPAPYGEGFFHKPSGRDCDGRLIVDFIAEKLNLPYLSAYLNSLGTNYRHGANFATGGSTIRKQNETIFQYGISPFSLDIQIVQFNQFKARTKQLYEEAKAPHEKSKLPVPEEFSKALYTFDIGQNDLSVGFRKMNFDQIRESMPDILNQLANAVKNIYQQGGRYFWIHNTSPFGCMPVQLFYKHNIPEGYLDQYGCVKDQNVMATEFNKQLKDRVIKLRTELPEAAITYVDVYAAKYALISNTKKEGFVDPMKICCGYHVNDTHIWCGNLGTDNGKDVFGSACENPSQYISWDSVHYAEAANHWVANRILNGSYTDPPTPITQACYRH

SEQ ID NO: 215888 - protein, 142 aa, Glycine max
  Clone ID: PAT_MRT3847_36978C.1.pep
REGPPKKISQGNPFPRARAVPFYRGGDRAVKKFGGTGKLFGGERLHQKGPEDFGGAGAFGRKTGGGIRANPFATLFIKGVGPPPGRDLGPPPRSGNPPLLVVFKTPMFFFFPGVGKKKGGKPPRPFLAFPFPGFSWRGAPKN

SEQ ID NO: 215889 - protein, 85 aa, Glycine max
  Clone ID: PAT_MRT3847_36979C.1.pep
NIKENGDIKTANIPPPRKKKTGGKKGPGEQQGLKLGGQPQEPPFWETHKFFFFRMAPSTPRAFLGNNIIKSLIRGGAMGIPHPGK

SEQ ID NO: 215890 - protein, 121 aa, Glycine max
  unsure (1)..(121): unsure at all Xaa locations
  Clone ID: PAT_MRT3847_3697C.1.pep
RRSRKGRERKQGPHTRGPQPPGGKKDKRGGXXKXKXXQEESXTPDDXSEKTXPXGTAATTQRKAXEGEAGKKGPEPKNRDXRTRGXXEQKQRKARQXDKXAETQRGQKPXAEEEEAAHKRK

SEQ ID NO: 215891 - protein, 83 aa, Glycine max
  unsure (1)..(83): unsure at all Xaa locations
  Clone ID: PAT_MRT3847_36980C.1.pep
SEDFDYRMVYHFVQXSGKRTFKDIIXNPIALIRLRTDFERAKRTLFFIAQTNIEIDFLFQGNDFFSSVTLAKFXKLNMDLFWK

SEQ ID NO: 215892 - protein, 121 aa, Glycine max
  Clone ID: PAT_MRT3847_36981C.1.pep
KFGDLLEVSPSINNNNCVEQDLQVDPSLSDFDEKKAEEEYTKLKEKYDNEHFNFKGLKVSATPLCPYILPKVKNTIYVLLEIKVGKKQEEEKKKRSPYAVSIVLDRSGSMSGSKLDKAKAA

SEQ ID NO: 215893 - protein, 375 aa, Glycine max
  Clone ID: PAT_MRT3847_36982C.1.pep
RKYSAKDNDDLCIVCWDGGNLLLCDGCPRAFHKECAALSSIPRGDWYCQFCQNMFQREKFVAHNANAVAAGRVEGVDPIEQIANRCIRIVKDIEADLSSCALCRGVDFSRSGFGPRTIILCDQCEKEYHVGCLRDHKMAYLKELPEGNWLCCNDCTRIHSTLENLLVKGAERLPESLLGVIKKKQEEKGLEPIIDVRWRLLNGKIASPETRPLLLEAVSIFHECFNPIVDAASGRDLIPAMVYGRNVRGQEFGGMYCALLIVNSSVVSAGMLRIFGSDVAELPLVATSNGNHGKGYFQTLFSCIERLLAFLNVKNLVLPAAEEAESIWTDKFGFSKMNPDELTNYRKNCHQMVSFKGTNMLHKMVPSCRVINNQS

SEQ ID NO: 215894 - protein, 350 aa, Glycine max
  unsure (1)..(350): unsure at all Xaa locations
  Clone ID: PAT_MRT3847_36983C.1.pep
MEALLCRKLGDPTVSLEDNDDSPIVLSKNHPIPQLDSPTAVRVRIKATSLNFANYLQILGKYQEKPSLPFIPGSDFSGFVDAVGSKVSKFRVGDAVCSFAGLGSFAQFIVVDESQLFQVPQGCDLVAAGALAVASGTSHVALVHRAQLSSGQVSVXLLVLGAAGGVGLAAVQIGKACGAIVIAVARGAEKVQLLKSLGVDHVVDLGNENVTQSIKQFLQARKLKGIDVLYDPVGGKLTKESLRLLKWGAHILIIGFASGEIPLIPANIALVKNWTVHGLYWGSYKIHRPGVIEDSLKELLSWLARGLISIHISHSYPLSEANLAFSAIKDRKVIGKVMIVFDEKPTRSKL

SEQ ID NO: 215895 - protein, 239 aa, Glycine max
  unsure (1)..(239): unsure at all Xaa locations
  Clone ID: PAT_MRT3847_36984C.1.pep
PADSAKPXVPLAVVSLDSRQXDSGNLVNPFMRVTNXMTRHLATLRESXVTPAVYPRLVEFLHFDIQSTGQKSHCVNIRRDHRNALFXLNSRIPLVRTSSELTVRRPGKXPEGPVPNPSPDRHATTRSRRGSSSSSPPTADGFGTGTPVPSPQSQSFSRGYGSILPTSLAYIVPSTRGCSPWRPDAVMSTTGRGRHSVLRIFKGRRGRTGHHATCGALPAAGPYLRLSRFQGGQAVKQKR

SEQ ID NO: 215896 - protein, 55 aa, Glycine max
  Clone ID: PAT_MRT3847_36985C.1.pep
TFLFIVKKIKNKFHLLLATISPIKMNLTENPAKLRTSIPHPKHENPHIFFSFFTN

SEQ ID NO: 215897 - protein, 60 aa, Glycine max
  Clone ID: PAT_MRT3847_36986C.1.pep
VMTLVYRTLELTLLLAREMARHYLVFTRNLYAAITLVVHHNHNKGTITNVHIQGHVQLNV

SEQ ID NO: 215898 - protein, 104 aa, Glycine max
  unsure (1)..(104): unsure at all Xaa locations
  Clone ID: PAT_MRT3847_36987C.1.pep
MGSESNSNLRITIESDPXSARLAELSIKCWAKGGVAPGECQLRFEAEETCDLLRGEGKAYPKGGSEVVRGGAWDLVTIPKGLNCAWEWSXAVGKYYKFEAPNSS

SEQ ID NO: 215899 - protein, 533 aa, Glycine max
  unsure (1)..(533): unsure at all Xaa locations
  Clone ID: PAT_MRT3847_36988C.1.pep
MNLSLAAPSAFRGNLLVPLSRCTSCFKLDLRFQHSDGFRHSRCRRSLFKLIRDPRSSRRRGIACSVTEPDNGSDEKEKEADKNGETLRVEDSSEQSIPPPVDAEQLNEFSDENKGQSDVQNMDDSNEVASGSPLPGMKPQKLDEAIKIPKETXEVLLYEXLGLSFLVTSQSXVGGVLFKGNLRGQAAKSYDKISKRLKDKFGDEYKLFLLVNPEDNKPVAVVVPRTTLQPETTAVPEWFAAGSFGLITVFTLLLRNVPSLQSDLLSTFDNLNLLKDGLPGALVTALILGVHELGHFLAAKDTGVKLGVPYFVPSWQIGSFGAITRIRNIVPNREDLLKVAAAGPIAGYALGLLLLLLGFVLPPSDGIGVVVDASVFHESFLAGGIAKLLLGNVLKEGPTFSMNPLVMRXTAISINPLVIWAWAGLLINAINSIPAGELDGGRISFALWGRKASLRFTGVSIALLGVSSLLNDVAFYWVVLIFFLQRGPIAPLSEEITDPGEKYVAIGVTVLLLGLLVCLPYPFPFTEETLTSF

SEQ ID NO: 215900 - protein, 82 aa, Glycine max
  Clone ID: PAT_MRT3847_36989C.1.pep
VCFAVEYQVISYEMEMGRWWSSTLVFTVLSAPILIIALLSSTFEEVDHDNTVPVTGLLHTDSRWILDQDGRRVKLACVNWVS

SEQ ID NO: 215901 - protein, 78 aa, Glycine max
  unsure (1)..(78): unsure at all Xaa locations
  Clone ID: PAT_MRT3847_3698C.1.pep
PPKNIKKENSHTLLKKINKIFFLTKIEPFPETKXAVLFKSLKKIYXSSNTPIPIQSQLLKNCKSLKIQVNGCPLAFVN

SEQ ID NO: 215902 - protein, 146 aa, Glycine max
  Clone ID: PAT_MRT3847_36990C.1.pep
MDDSNEVASGSPVPGVKPQKLDEAIKIPKETIEILKNQVFGFDTFFVTSQDPYEGGVLFKGNLRGQAAKSYDKISKRLKDKFGDEYKLFLLVNPEDNMPVAVVVPRTTLQPETTAVPEWFAAGSFGLVTVFTLLLRNVPSLQSDLL

SEQ ID NO: 215903 - protein, 30 aa, Glycine max
  Clone ID: PAT_MRT3847_36991C.1.pep
RKAIILMEVKDRATKTHKKGVGLVTPLKER

SEQ ID NO: 215904 - protein, 394 aa, Glycine max
  Clone ID: PAT_MRT3847_36992C.1.pep
MPDFLATNPLTFSAAVPPTFPLTISAAESPRFPFFNSCPTLTPRPQLNPNFRIPFSPKPSKNKSVSLALSSRSNEGSSRGYGFYNELEFEDRKDKTFGLEMNPVVGEDSQSETGSIPFDGVEGGDDKGEDDLVRAQGDADGDGDGLKKGYDDEEGENEKFGGKLRVRRGKEVIRRSNLLAKQVISIHSALSLGFVSQLWVDTSSWMVLFVEVRPNLLSGDSEKFLLDDISQVGDVVLVQDESVTDNEFKMVGLETLVGYKVVTPSRRNIGKVRGYTFGINSGAVEELELDSFGLSIIPSSLVSTYSLLVEDVLEVVSDAVVVHEAAALRIQRLSKGFLGNQNVRVSVDDFEDFDSEQSDTYGPISRRRKSFGRKKPSHRDWDDEDNWELPMDYL

SEQ ID NO: 215905 - protein, 77 aa, Glycine max
  Clone ID: PAT_MRT3847_36993C.1.pep
PLHALLHNLDALHKLKTWFAKPNFTTLQPTLKGTRGKTQPLWEEEQENLPVYSFYSEWPHPALLSLNAALHKQIFFF

SEQ ID NO: 215906 - protein, 106 aa, Glycine max
  Clone ID: PAT_MRT3847_36994C.1.pep
SSECKITRLSAPQARVMPIHPSPGLKALNRCHKPWAMTLKVQVIAYIGLSCAVDNHILHKRRTCSSYTFDHVNMFTITVSGLGMTTLIQCIHRESVYDQTDEFPSA

SEQ ID NO: 215907 - protein, 57 aa, Glycine max
  Clone ID: PAT_MRT3847_36995C.1.pep
WISLLYLIQEQVDHHGHYPEVVPPTSTYSDVSPDDPMDDKWYTPVMQELQISETTNP

SEQ ID NO: 215908 - protein, 161 aa, Glycine max
  Clone ID: PAT_MRT3847_36996C.1.pep
MATRGKLEVDIDLKSNADTPTNKKKISSTSRLTLYYKGHTSSQPFILLFLLFTPIFLFPMDPQKVVLKVLTMTDDKTKKKAIEAAADIYGVDSIAADVTEQKLTVIGEMDAVAVVKKLKKVGKVDIISVGPAKEEKKEEKKAEKMEEKPEGKPEEKQEEKK

SEQ ID NO: 215909 - protein, 76 aa, Glycine max
  Clone ID: PAT_MRT3847_36997C.1.pep
KNNPRFKGSIFFPKSLPVEAVVLFKEAIQGRDGTFFSAGPGRKKLINLLTASGFTFKFLQLVSLKILFLLLKISFI

SEQ ID NO: 215910 - protein, 357 aa, Glycine max
  unsure (1)..(357): unsure at all Xaa locations
  Clone ID: PAT_MRT3847_36998C.1.pep
FGPSAHLGPVLSLTFVNPGDLWSGSEGGGIKIWPLEAVEKSIHLTKEERHSAAIFVERSYVDLRSQLSTNGFSNMLTSDVKYLVSDNSRAKVWSAGYFSFALWDARTRELLKVFNSDGQIENRLDVSSIQDFSVELISSSRKDKTQSSIGFFQRSRNAIMGAADAVRRVAAKGGFGDDNRRTEALVVTIDGMIWTGCTSGLLVQWDGNGNRIQDFLYHSSSIQCFCTFGMQIWVGYVSGTVQVLDLKGSLIGGWVAHGSPIVKMTVGAGYVFALANHGGIRGWNITSPGPLDSILRSELGGKEFLYTKIENIKILSGTWXNVGQGKASLDSLTSWLGSVASDVSLCXWLGCKELKMG

SEQ ID NO: 215911 - protein, 148 aa, Glycine max
  Clone ID: PAT_MRT3847_36999C.1.pep
TVSSISNQASFPASLVPPSSLSTVPTNRFSPPLLFPLQKSTHFHSLSFSLCIFFFLFIKIVFLSVTPINLCLFISWYLSLFALSLFVTHLRSPIVKLHVKKTASWFRRAYSGIVLAFLHLSMLIGFVDVQRENPLLLLWVLEVEDQGG

SEQ ID NO: 215912 - protein, 159 aa, Glycine max
  Clone ID: PAT_MRT3847_3699C.1.pep
RRIVQYKTAYYSFYLPVACALLMAGEDLDKNVDVKNILVEMGTYFQVQDDYLDCFGDPQTIGKIGTDIEDFKCSWLIVKALELSNEQQKKVLQENYGKPDPENVAKVKALYNELNLQGVFEEYESGSYAKLVSSIEAHPIKAVQAVLKSFLAKIYKRQK

SEQ ID NO: 215913 - protein, 114 aa, Glycine max
  Clone ID: PAT_MRT3847_369C.1.pep
VITAEYLPILKLIERLCNKQKPVRTTIMPSQVAYKHYLGPFHQQANEYEMTPFVDNHCHDKIIIFSTISCRSCCCPEKAQISGLPNNPDDRKPDHMPYTYGGDYAHCGYHSDTQ

SEQ ID NO: 215914 - protein, 75 aa, Glycine max
  Clone ID: PAT_MRT3847_36C.1.pep
WHCFQDSVGLVSASDSICELNKVKLRVFGGSHSTSLVWVSSRRGIVIRTSAGERIDRLVLFPPSVGVGRIYKKGG

SEQ ID NO: 215915 - protein, 55 aa, Glycine max
  unsure (1)..(55): unsure at all Xaa locations
  Clone ID: PAT_MRT3847_37000C.1.pep
RFXSEXXSPLPXFHSERXPWLPAPXHXHATKLXQQQGXXTTSYXXXDXLXIAHNN

SEQ ID NO: 215916 - protein, 42 aa, Glycine max
  Clone ID: PAT_MRT3847_37001C.1.pep
KNKQLDSVMFFREINQGLYPVGSSLGRDLINKPCLGAFLVVL

SEQ ID NO: 215917 - protein, 70 aa, Glycine max
  Clone ID: PAT_MRT3847_37002C.1.pep
FPCLSVLGLCPSSAGWVLAFVLCVVCSLVRGSCSRRCGFVWLVLSAFVVVSSSRSVGFFGVFCAASADSL

SEQ ID NO: 215918 - protein, 51 aa, Glycine max
  Clone ID: PAT_MRT3847_37003C.1.pep
GSSSYSPNIWPTMILLSTFKAETLCPCYHWGTKVYDKWRIGKNDFSGRITT

SEQ ID NO: 215919 - protein, 58 aa, Glycine max
  Clone ID: PAT_MRT3847_37004C.1.pep
VGCRREAHQHCRGCRRRFYTSSFEYIYPRVLLYTTDAVYLIQKIEKKNWIRGQHLQTR

SEQ ID NO: 215920 - protein, 45 aa, Glycine max
  Clone ID: PAT_MRT3847_37005C.1.pep
SDPCIYCGKLKSYNKFSLLFNYMTFHICYYSSPFQLLHLVPLFDA

SEQ ID NO: 215921 - protein, 80 aa, Glycine max
  Clone ID: PAT_MRT3847_37006C.1.pep
AEYIATLNHEETRLAVVCERAFLQTLDGSCRTPIAGYACRNEDGNCLFRGLVAYPDGTRVLETSRVGPYAVEDMIEMGVQ

SEQ ID NO: 215922 - protein, 94 aa, Glycine max
  unsure (1)..(94): unsure at all Xaa locations
  Clone ID: PAT_MRT3847_37007C.1.pep
HMMIKETFMXLFNSCYXPPRXCLQQXKVTEXXXYXXHIIXLTPKYGPRFPMXTFSTXYSXFLXVRHYIXHVMGSXXPXXXIYPSXTTKSTVXTK

SEQ ID NO: 215923 - protein, 76 aa, Glycine max
  unsure (1)..(76): unsure at all Xaa locations
  Clone ID: PAT_MRT3847_37008C.1.pep
KGQGPSQLKTQGGCNNXPCPVFKTDQDCCNSGNWGPPYYSKFFKQRGPHVYSFPKDGPPSPFPWKGGANKRGVFCP

SEQ ID NO: 215924 - protein, 101 aa, Glycine max
  Clone ID: PAT_MRT3847_37009C.1.pep
QTPEIEHSPIVAAIQKILYAPDDNGMAVVEAQAMISVGRKEIEGLSPIAEVSEEKSSSETHKRKNIANIDFDVAGLATLSPRQRLSDVSDVHCSESPLMTC

SEQ ID NO: 215925 - protein, 342 aa, Glycine max
  unsure (1)..(342): unsure at all Xaa locations
  Clone ID: PAT_MRT3847_3700C.1.pep
MADLKSTFLNVYSVLKSELLHDPAFEFSDDARNWVDRMLDYNVPGGKLNRGLSVIDSYRLLKEGQALNDDEIFHASALGWCIEWLQAYFLVLDDIMDNSHTRRGQPCWFRVPKVGMIAANDGVLLRNHIPRILKKHFRGKPYYVDLLDLFNEVEFQTASGQMIDLITTLEGEKDLSKYTLTXHRRIVQYKTAYYSFYLPVACALLMAGEDLDNHVDVKNILVEMGTYFQVQDDYLDCFGDPQTIGKIGTDIEDFKCSWLVVKALELSNEQQKKVLHENYGKADPENVAKVKALYNELNLQAVFEEYENGSYAKLVSSIEAHPSKAVQAVLKSFLAKIYKRQK

SEQ ID NO: 215926 - protein, 68 aa, Glycine max
  Clone ID: PAT_MRT3847_37010C.1.pep
MISVGRKEIEGLSPIAEVSEEKSSSETHKRKNIANIDFDVAGLATLSPRQRLSDVSDVHCSESPLMTC

SEQ ID NO: 215927 - protein, 78 aa, Glycine max
  Clone ID: PAT_MRT3847_37011C.1.pep
HGYGPDQATQWARKHEGYKQIISHHLLKAGLIRPSFIDELGPKSSAHRFLAFTLYILAINKSVISHRIDSRTSRLKSR

SEQ ID NO: 215928 - protein, 58 aa, Glycine max
  Clone ID: PAT_MRT3847_37012C.1.pep
SFAHHTNVTAHTSRCSGIRMKTRLGWQYTNDVACDSSRHGMEANDVFQCHAVPTPYCH

SEQ ID NO: 215929 - protein, 145 aa, Glycine max
  unsure (1)..(145): unsure at all Xaa locations
  Clone ID: PAT_MRT3847_37013C.1.pep
LEANVACKSVRMRGKDRPSMDKVTTVLERALAQLMGSPCIEQPILPTEVVLGSNRLHKKSSSNRSASESTDVEDQRFEFRAPSWITFPSVTSSQRRSGSEAEVEGKNAEGRNLSNVDDXVAVCRSLDEEIGLASPRERLFLAHNF

SEQ ID NO: 215930 - protein, 250 aa, Glycine max
  unsure (1)..(250): unsure at all Xaa locations
  Clone ID: PAT_MRT3847_37014C.1.pep
LCSAPFPFCYLGIPIGVNPKRKVVWDPIIRKFEARLNRWNQRSISMAGRLTLINVVLTALPLFYLSFFQXPKAVINRLSVIQRLFLWRGNREGKKIALVSWRQCCASRDVGGLGIXDLNILNNALLIKWKXLMFHQPHQLWNRILISKYKGWRGLDQGPQKYYFSPWWADLRAINQHQNMIATSNQFCWKVGRGDQILFWEDALADDGIPLKDQFPELYRISSQKNFIVADMGSFSESGWEWNLLWRRPV

SEQ ID NO: 215931 - protein, 98 aa, Glycine max
  Clone ID: PAT_MRT3847_37015C.1.pep
CCSVLLWYYSMIGAFLLLSLDACTLVLLPTLFLYLTLFFKKKIQFVVYSINFDPCNIVCDVVSICMPIPVTMTMTMNCFHLFFMCFHHRSLLSSSRSR

SEQ ID NO: 215932 - protein, 445 aa, Glycine max
  unsure (1)..(445): unsure at all Xaa locations
  Clone ID: PAT_MRT3847_37016C.1.pep
TRPRRERVNRSSKQHQVGAYGGERQNPRDYGAFVQPPSQTEKVPKGAVVRLKGDHQEEARRLRTIPKPQGEQEKDEQRMETIPKLLEHEIDMSSLDVFSMPSPPPPPPPLPAERVIVESASFHKEANINPPKKSPVPPTFVKTFTIASLQQYTNSFSQDNLIGLGMLGSVYRAELPDGKILAVKKLDKRVSDHQTDDEFLELINSIDRIRHPNIVELIGYCAEHGQRLLIYEYCSNGSLQDALHSDDEFKTRLSWNARIRIALGSARALEFLHEKYTTYVSDHKSEDEFILIDKHVFERISVCXLLSTLMDTLWSXLSAQDLMTNGLMGRGIKPSIYIFKTDNDSFGVVMLELLTGRQSYDRTRPRGEQFLVRWAIPQLHDIDALSKMVDPSLKGNYPAKSLSNFADIISRCVQSEPEFRPAMSEVVLYLINMIRKENQKSQSNE

SEQ ID NO: 215933 - protein, 129 aa, Glycine max
  unsure (1)..(129): unsure at all Xaa locations
  Clone ID: PAT_MRT3847_37017C.1.pep
MMVQCNNTNNNVCSCKRSPSATLDLLILLLVLFSGAFLLYSYLCYIFNSLSLLLPCLPLSYLLPFLLFFSLSLAAFFCGSRSRRCQRQGCTGLKKAMEFDLQIQRFGFFYDEIDXLPWKGRTEANPDYD

SEQ ID NO: 215934 - protein, 78 aa, Glycine max
  Clone ID: PAT_MRT3847_37018C.1.pep
IKLFPCVFPPKNENVKVFKNCWAQIEKLGKNPSCLWAVMLSNPPKMFGADPKVAITIPKRCTLVNCPVGYKCGPSPLP

SEQ ID NO: 215935 - protein, 78 aa, Glycine max
  Clone ID: PAT_MRT3847_37019C.1.pep
HCSVVLEREREERKKALPSPQPTRPRSESCYKKGFAFWVTLYFSGISISELKSEFLKEFDRGVSGCLFWGCHQVPLIN

SEQ ID NO: 215936 - protein, 193 aa, Glycine max
  Clone ID: PAT_MRT3847_3701C.1.pep
MYFISVEEMKVDAGLGRVVWDDEDKAMLGAVLGGRALEFLMTNSVPNESVLMAVGSDEGLQKKLSDLVERPHVSNFSWNYAIFWQLSQSKSGDWVLGWGDGCCREPNEEEEEGAVTVRRRTLRVDEEEMHHRMRKLVLQKLHTTFGGEDDDNYAFGLDHVTDTEMFFLASMYFSFPRGHGAPGKCFAFGNHFW

SEQ ID NO: 215937 - protein, 54 aa, Glycine max
  unsure (1)..(54): unsure at all Xaa locations
  Clone ID: PAT_MRT3847_37020C.1.pep
ADICVALDICHLMGILLEPSVXLEGIQMVLSSPNFSALSYEAGSLHGCNALYXR

SEQ ID NO: 215938 - protein, 217 aa, Glycine max
  Clone ID: PAT_MRT3847_37021C.1.pep
FVQFELVIYPVPRFFSIRSRRLEDDRGLAVEWSVDEQYRLEEGLAKYADEPSIMRYIKIAALLPDKTVRDVALRCRWLTRKRRKSEEHNLGKKVNNRKDKPVELASKTNLHSALPSSMATYPRMSHHMDQSQQIQYDGICSPLKQLMEQNAQAFNQITANLSTYKLQDNIDLFCHTRHNINTILNNMSEMPGIMSQMPPLQVTINEDLASSILPNRT

SEQ ID NO: 215939 - protein, 63 aa, Glycine max
  Clone ID: PAT_MRT3847_37022C.1.pep
SFFSSPDTDFGFFWALTSGFAFWVTLYFSGISISELKSEFLKEFDRGVSGCLFWGCHQVPLIN

SEQ ID NO: 215940 - protein, 114 aa, Glycine max
  unsure (1)..(114): unsure at all Xaa locations
  Clone ID: PAT_MRT3847_37023C.1.pep
NLIGDXRGKVAVMVDDMIDTAGTIAKGAALLHQEGAREVYACTTHAVFSPPAIERLSSGLFQEVIITNTIPVAEQNYFPQLTVLSVANLLGETVWRVHDDCSGGIEPYSSLGID

SEQ ID NO: 215941 - protein, 104 aa, Glycine max
  Clone ID: PAT_MRT3847_37024C.1.pep
TFSTYTTHTASSTYPPNLAKRSINTTPWNLPETHPRLRTPTRNPLYVHTINHVMNRARHAPVICSGTRDQCIKEHPSIWDSNMMQAAAIVGTIERCDRRVTTDS

SEQ ID NO: 215942 - protein, 314 aa, Glycine max
  Clone ID: PAT_MRT3847_37025C.1.pep
MIFNKGSMHSNLDCFVRCTTPVVQSQFLPKSEITSLNRLWHPWERESVEYFTLGDLWNCYDEWSAYGAGVPITLTSGETLVQYYVPYLSAIQIFTSNSFREETESGDCETRDSYSDSFSDESEYDKVWRWDGTSSEDGGSEQDCLWHFSDRLGHLYCQYFERATPYGRVPLMDKITGLAQRYPGLMSLRSVDLSPASWMAVAWYPIYHIPMGRTIKDLSTCFLTYHTLSSSFQGMDLDDDIEGGHQKKKEGEGIALPAFGLATYKMQGGNVWVAGNRGRDQERLLSLLSVADSWLKQLRVQHHDFNHFMGIRHG

SEQ ID NO: 215943 - protein, 83 aa, Glycine max
  unsure (1)..(83): unsure at all Xaa locations
  Clone ID: PAT_MRT3847_37026C.1.pep
ISLALISQVTFIMLPFSSSIYAFIFHFYWTHPYISSTLSQLSLXSYSYLITIFIIFFSTSYFFIFFSIYLFLHYQFISLFFFL

SEQ ID NO: 215944 - protein, 96 aa, Glycine max
  Clone ID: PAT_MRT3847_37027C.1.pep
VMVDDMIDTAGTIAKGAALLHQEGAREVYACTTHAVFSPPAIERLSSGLFQEVIITNTIPVAEQNYFPQLTVLSVANLLGETVWRVHDDCSLMTLW

SEQ ID NO: 215945 - protein, 398 aa, Glycine max
  Clone ID: PAT_MRT3847_37028C.1.pep
MSTLLHSAPTSSPSFSRIITPRFAFAPITRISLRNGVRSKAIEAVKLENGRPSASEFVVSGSGNAIPSYVVAPNARVQDLVNRNDTRLRIFSGTANPALAQEIACYLGLELGKIKIKRFADGEIYVQLQESVRGCDVFLVQPTCPPANENLMELLIMIDACRRASAKNITAVIPYFGYARADRKTQGRESIAAKLVANLITEAGANRVLACDLHSGQSMGYFDIPVDHVYGQPVILDYLASKTICSDDLVVVSPDVGGVARARAFAKKLSDAPLAIVDKRRHGHNVAEVMNLIGDVRGKVAVMVDDMIDTAGTIAKGAALLHQEGAREVYACTTHAVFSPPAIERLSSGLFQEVIITNTIPVAEQNYFPQLTVLSVANLLGETVWRVHDDCSVSSIFL

SEQ ID NO: 215946 - protein, 41 aa, Glycine max
  unsure (1)..(41): unsure at all Xaa locations
  Clone ID: PAT_MRT3847_37029C.1.pep
LSGLQRTCYGCGSLWIRGYCXVRLCMCYPTCDSRSQSSASW

SEQ ID NO: 215947 - protein, 80 aa, Glycine max
  Clone ID: PAT_MRT3847_3702C.1.pep
KKANKKKKTKPNGRPPTEHARNKSPDIQGPPYQVDRFRDEITTDEAGEAPSDRWVWQSTEQCSTATGRSIASRMPGWPKG

SEQ ID NO: 215948 - protein, 202 aa, Glycine max
  Clone ID: PAT_MRT3847_37030C.1.pep
CGSSRFGSRGHCHIVSTSPPEVYKAYLKQFQQDFKLFLKSRSEELVPGGAMVLLFFGRDETPRRTSFEVTSLILNDMLLEGLIEEEKMDSFNIPAYKPTVEEIRHVIEEEGSFFVQRLEILISPWYEGINIEGGDGFFVNGNVRAEYITKNIRAVMEPLLSTKFGGEVINELFIRFKKKIEQIMEVEKLEGATLVISMTKNH

SEQ ID NO: 215949 - protein, 55 aa, Glycine max
  unsure (1)..(55): unsure at all Xaa locations
  Clone ID: PAT_MRT3847_37031C.1.pep
XXXAXRXXXDXTQDXXGISATXYXQXRXHTKLTXVLXHIGLSIVPXSMKKWIXMK

SEQ ID NO: 215950 - protein, 126 aa, Glycine max
  Clone ID: PAT_MRT3847_37032C.1.pep
PECLLLAKKNLIWHITRDFTNHASSDVHTRWKKKRYFTHKRHNKYSKSFCCFHPRHTQRLMKLEWVLSVDRVGSIDWKRHFFFSVLVSFTYHSLEKMSHFSSPRWQPQHDYPHHFHPPEKPFVAAL

SEQ ID NO: 215951 - protein, 54 aa, Glycine max
  Clone ID: PAT_MRT3847_37033C.1.pep
YKEWFIWLSRAMLSIFGYRDSLCLSFGLLLNSTYSANRKSKHKFEDHNLAKASP

SEQ ID NO: 215952 - protein, 39 aa, Glycine max
  Clone ID: PAT_MRT3847_37034C.1.pep
MHLLVVIWFIFSYPTSYCRVHLNNMILLQKKKKKTPQDT

SEQ ID NO: 215953 - protein, 73 aa, Glycine max
  unsure (1)..(73): unsure at all Xaa locations
  Clone ID: PAT_MRT3847_37035C.1.pep
KCCSCLKGYDIPCGWKVLPVIAAVHLDPSLFDLSXHFNPWRWQVNSTYNYRQHALHNYYCASFSFLLFFFFFS

SEQ ID NO: 215954 - protein, 62 aa, Glycine max
  Clone ID: PAT_MRT3847_37036C.1.pep
LFTMSHIATARFAAVPFGRGRVYLFFFKETSVPQSQHSGLLYHAVPESVGNQLFFSCRNFSP

SEQ ID NO: 215955 - protein, 89 aa, Glycine max
  unsure (1)..(89): unsure at all Xaa locations
  Clone ID: PAT_MRT3847_37037C.1.pep
TTHGPHVCALEKMTLARMTIIVGAVLYVTLITGKMPNIYYDLMRMGRDTRAQQVXVTSEVQXIFXYNLMRAVAISATEGLMRGMKVTVT

SEQ ID NO: 215956 - protein, 53 aa, Glycine max
  Clone ID: PAT_MRT3847_37038C.1.pep
VFQYMHIGCSNDIMTLVHLDKGVMKVHTCIDNQPQTMLFLLPMQSLCKVSLCV

SEQ ID NO: 215957 - protein, 66 aa, Glycine max
  Clone ID: PAT_MRT3847_37039C.1.pep
SLCYNVLKPPYYRNIYYIFSICSFSEGLWISLNCQILAYFCDTPAHCLSLINQGVRRDCHNCHVVQ

SEQ ID NO: 215958 - protein, 31 aa, Glycine max
  Clone ID: PAT_MRT3847_3703C.1.pep
MAPLRPLLILALLAWVALADQESCKVRCTEG

SEQ ID NO: 215959 - protein, 50 aa, Glycine max
  Clone ID: PAT_MRT3847_37040C.1.pep
LCDHCRKILRMLAPFWGGEHIYEVRITPQPLLFKRTDKHRDFMKTSQGIR

SEQ ID NO: 215960 - protein, 57 aa, Glycine max
  Clone ID: PAT_MRT3847_37041C.1.pep
SFMGQRKLYFQRQMLSVGIGHLSCRLVHPQESHNVNNNFVSVPLTKGYRRLWSVRLN

SEQ ID NO: 215961 - protein, 97 aa, Glycine max
  unsure (1)..(97): unsure at all Xaa locations
  Clone ID: PAT_MRT3847_37042C.1.pep
MEKPYPTESADYQKAVEKAKKKLIGFIADKTCAPLMLHXAWHSAGTYDTSSNTGGPFGTIKHPSGLGHGSNNGLDIDVRLLEPLKAGFPILSLPDFY

SEQ ID NO: 215962 - protein, 48 aa, Glycine max
  Clone ID: PAT_MRT3847_37043C.1.pep
TLNECKATLVQLIHLYLFFLLRKETTKTSIGELIELMWLYTRLRFKIL

SEQ ID NO: 215963 - protein, 94 aa, Glycine max
  Clone ID: PAT_MRT3847_37044C.1.pep
MHVWIIGQWGRLRGPLLQGKGHIIYKHKNIYTSVTQSGVVLNGVIKSKYRYQNAKREGGGVAGKPHCKGMHRTRQVMEKKRVLLKYLNPYASLP

SEQ ID NO: 215964 - protein, 71 aa, Glycine max
  unsure (1)..(71): unsure at all Xaa locations
  Clone ID: PAT_MRT3847_37045C.1.pep
SDWRGRHVNPAILRVLTCCSPAYDRYMTRHTIGGRSPWTIHHSWASPAQRPGRHSWTIRSGXLVHSIYLRH

SEQ ID NO: 215965 - protein, 69 aa, Glycine max
  Clone ID: PAT_MRT3847_37046C.1.pep
LGPLVPRWDSEVSPQASILWVDYGTNPRSRSHLKFLASLQECIRRGGSIPHKLSMYCQLSYTIGLLHCD

SEQ ID NO: 215966 - protein, 55 aa, Glycine max
  Clone ID: PAT_MRT3847_37047C.1.pep
NFDNQTANLTFYTSCRTTCIQTLIISNTHGMGPKRKKLCFRPSMIQFTVHFQNEN

SEQ ID NO: 215967 - protein, 109 aa, Glycine max
  unsure (1)..(109): unsure at all Xaa locations
  Clone ID: PAT_MRT3847_37048C.1.pep
HASEEERDFLRCQLDKFMSSARLDADDHCRGKPGPRRAEGDGRGGTVGEASDPESAASYLSGASEEGSTVERKRQKQKGGPGRQRFGKPKARXRQRLKDAYGVLCRYKK

SEQ ID NO: 215968 - protein, 146 aa, Glycine max
  Clone ID: PAT_MRT3847_37049C.1.pep
MAFCSPKFLSLLLLLSAIPIGIIVTLERAKPATHVYHYHSNGWFRECAKWDSHNRRFIVSFFEGGLGQVLLPEKDYESSPPLEEVTVVKETHLAGNASLGIAIDAPRNRVLVVNADVIGNRYGALAAYDLSTWNRLFLPNLALPVM

SEQ ID NO: 215969 - protein, 135 aa, Glycine max
  Clone ID: PAT_MRT3847_3704C.1.pep
MLRGRGWRHGAFWDFPGAGLRAEKEKRVDKTLVALSFVLGVGGTARVLIDDVQFPTSVALSSGFSNDTINKNTSLMKSKSSTFTKRENNIINFRTKSLSNKELRTIMQDRPINNNLNNNVGTVRSPFYNLLTAST

SEQ ID NO: 215970 - protein, 39 aa, Glycine max
  Clone ID: PAT_MRT3847_37050C.1.pep
IEGGIPKTKNILHKMLANELMTCYLGQKLHYISMCNRRM

SEQ ID NO: 215971 - protein, 317 aa, Glycine max
  Clone ID: PAT_MRT3847_37051C.1.pep
SEPNPPAIPIGIIVTLERAKPATHVYHYHSSGWFRECAKWDSHHRRFIVSFFEGGLGQVKLPEKDSESSSSSPPLEEVTVVRDAHLAGNASLGIAIDPPRNRVLVVNADVIGNRYGALAAYDLSTWNRLFLTQLSSPSDEKSFADDVAVDAEGNAYVTDIKGNKIWKVGVEGKLISIIRNPLFSAKEWYKNLVGLNGIVYHPDGFLIVIHTFSGNLFKIDLTKGEEVKIIKLKGGTLSFGDGLELLSPTKLVVAGNPSGRLVESSDGWNTASVVGTFSGPKHRLASAATVKEGKVYLNHMVGIGYPKKKHAIVEAVF

SEQ ID NO: 215972 - protein, 202 aa, Glycine max
  Clone ID: PAT_MRT3847_37052C.1.pep
PDATLLAHEKTMHRISRDVWSLGYTPVTGDEDIDIGGQRLRVIFAPGHTDGHMALLHANTHSLIVGDHCVGQGSATLDIKAGGNMSEYFQTTYKFLELSPHALIPMHGRVNVWPKQMLCGYLKNRRSREANIVKAIEGGAKSLFDIIVYVYSDVDRRAWIAASSNVRLHVDHLAQQHKLPKDFSLETYKSSLDTFAESVGKL

SEQ ID NO: 215973 - protein, 826 aa, Glycine max
  Clone ID: PAT_MRT3847_37053C.1.pep
MLGGLLHRGHKIKGTVVLMRKNVLDVNSVTSVGGIIGQANGKGKLGKATFLEGIITSLPTLGAGQSAFKINFEWDDGSGIPGAFYIKNFMQTEFFLVSLTLEDIPNHGSIHFVCNSWIYNAKLFKSDRIFFANQTYLPSETPAPLVKYREEELHNLRGDGTGERKEWERIYDYDVYNDLGDPDKGENHARPVLGGNDTFPYPRRGRTGRKPTRKDPNSESRSNDVYLPRDEAFGHLKSSDFLTYGLKSVSQNVLPLLQSAFDLNFTPREFDSFDEVHGLYSGGIKLPTDIISKISPLPVLKEIFRTDGEQALKFPPPKVIQVSKSAWMTDEEFAREMLAGVNPNLIRCLKEFPPRSKLDSQVYGDHTSQITKEHLEPNLEGLTVDEAIQNKRLFLLDHHDPIMPYLRRINATSTKAYATRTILFLKNDGTLRPLAIELSLPHPQGDQSGAFSQVFLPADEGVESSIWLLAKAYVVVNDSCYHQLVSHWLNTHAVVEPFIIATNRHLSVVHPIYKLLHPHYRDTMNINGLARLSLVNDGGVIEQTFLWGRYSVEMSAVVYKDWVFTDQALPADLIKRGMAIEDPSCPHGIRLVIEDYPYAVDGLEIWDAIKTWVHEYVFLYYKSDDTLREDPELQACWKELVEVGHGDKKNEPWWPKMQTREELVEACAIIIWTASALHAAVNFGQYPYGGLILNRPTLSRRFMPEKGSAEYEELRKNPQKAYLKTITPKFQTLIDLSVIEILSRHASDEVYLGERDNPNWTSDTRALEAFKRFGNKLAQIENKLSERNNDEKLRNRCGPVQMPYTLLLPSSKEGLTFRGIPNSISI

SEQ ID NO: 215974 - protein, 81 aa, Glycine max
  Clone ID: PAT_MRT3847_37054C.1.pep
GMPFDPSRICQTNCLEFDPKGNLSNANNTNSQLVMLLIYCSKFCSPCLIVICIGESCIVCHIRILPSVVFSQPYGRVGRPE

SEQ ID NO: 215975 - protein, 236 aa, Glycine max
  unsure (1)..(236): unsure at all Xaa locations
  Clone ID: PAT_MRT3847_37055C.1.pep
PNGGGFYIFPYNLLLQEFPPRSKLDSQVYGDHTSQITKEHLEPNLEGLTVDEAIQNKRLFLLDHHDPIMPYLRLINATSTKAYATRTILFLKNDGTLRPLAIELSLPHPQGDQCGAFSQVFLPADEGVESSIWLLAKAYVVVNDSCYHQLVSHXVEPFIIATNRHLSVVHPIYKLLHPHYRDTMNINGLARLSLVNDGGVIEQTFLWGRYSVEMSAVVYKDWVFTDQALPADLIKR

SEQ ID NO: 215976 - protein, 857 aa, Glycine max
  Clone ID: PAT_MRT3847_37056C.1.pep
MLGGLLHRGHKIKGTVVLMRKNVLDVNSVTSVGGIIGQGLDLVGSTLDTLTAFLGRSVSLQLISATKADANGKGKLGKATFLEGIITSLPTLGAGQSAFKINFEWDDGSGIPGAFYIKNFMQTEFFLVSLTLEDIPNHGSIHFVCNSWIYNAKLFKSDRIFFANQTYLPSETPAPLVKYREEELHNLRGDGTGERKEWERIYDYDVYNDLGDPDKGENHARPVLGGNDTFPYPRRGRTGRKPTRKDPNSESRSNDVYLPRDEAFGHLKSSDFLTYGLKSVSQNVLPLLQSAFDLNFTPREFDSFDEVHGLYSGGIKLPTDIISKISPLPVLKEIFRTDGEQALKFPPPKVIQVSKSAWMTDEEFAREMLAGVNPNLIRCLKDFPPRSKLDSQVYGDHTSQITKEHLEPNLEGLTVDEAIQNKRLFLLDHHDPIMPYLRRINATSTKAYATRTILFLKNDGTLRPLAIELSLPHPQGDQSGAFSQVFLPADEGVESSIWLLAKAYVVVNDSCYHQLVSHWLNTHAVVEPFIIATNRHLSVVHPIYKLLHPHYRDTMNINGLARLSLVNDGGVIEQTFLWGRYSVEMSAVVYKDWVFTDQALPADLIKRGMAIEDPSCPHGIRLVIEDYPYAVDGLEIWDAIKTWVHEYVFLYYKSDDTLREDPELQACWKELVEVGHGDKKNEPWWPKMQTREELVEACAIIIWTASALHAAVNFGQYPYGGLILNRPTLSRRFMPEKGSAEYEELRKNPQKAYLKTITPKFQTLIDLSVIEILSRHASDEVYLGERDNPNWTSDTRALEAFKRFGNKLAQIENKLSERNNDEKLRNRCGPVQMPYTLLLPSSKEGLTFRGIPNSISI

SEQ ID NO: 215977 - protein, 84 aa, Glycine max
  unsure (1)..(84): unsure at all Xaa locations
  Clone ID: PAT_MRT3847_37057C.1.pep
MCHFKGKYHDELIANAAYIGTPGKGILAVDESTGTIGKRLASISVENVESNWXALRELLFTVPGALKYLXAVILFEETSFYSTS

SEQ ID NO: 215978 - protein, 37 aa, Glycine max
  Clone ID: PAT_MRT3847_37058C.1.pep
KGWCMVGYSAPTTKKVRVGPNRIEVMLPPVFTGYVQD

SEQ ID NO: 215979 - protein, 71 aa, Glycine max
  Clone ID: PAT_MRT3847_37059C.1.pep
GERLTCDIQRCISCGQNRGGRLIVGETQQIKTQSIRKRSSAFTFICGSRFTGRCDTRLGDHSPMQIYGGGD

SEQ ID NO: 215980 - protein, 218 aa, Glycine max
  Clone ID: PAT_MRT3847_3705C.1.pep
MDSYEATRVVFSRIQNLDPENASKIMGLLLLQDHGEKELIRLAFGPEALVHSVILKARKELGLPFNSAHTTSTLTSASPYLSKQNLNTSSRLSGTNIPPALTIPNPSSWPTMSELQTPDDLMSPNHLVVGSSTTSLSLPFYANGGSDPIDEFQLQDQLAFLNDGSPTSTALSHKNNPDMFYPSNSDLSSSLLLLLTLPFFLPMVGEGLFIVRVGQSMM

SEQ ID NO: 215981 - protein, 45 aa, Glycine max
  unsure (1)..(45): unsure at all Xaa locations
  Clone ID: PAT_MRT3847_37060C.1.pep
METISLALQETPKPIALPSTKIRLHLRLFQQSSNAXIXTGNLTRQ

SEQ ID NO: 215982 - protein, 216 aa, Glycine max
  Clone ID: PAT_MRT3847_37061C.1.pep
RGRWVRISIQTLLLPEPQFPNPKQNDNPEDPNGVVSFPNLPNSPFYPWWQITHLFHDTERGGPEWKFHRENMLLNIDSWGVVINTFTELEQVYLNHLKKELGHERVFAVGPVLPIQTGSISTKPEERGGNSTVSRHDIMEWLDARDKGSVVYVCFGSRTFLTSSQMEVLTRALEISGVNFVLSVRVPEKGHLANEHGTVPRWFSDRVKGMGFVIEG

SEQ ID NO: 215983 - protein, 39 aa, Glycine max
  Clone ID: PAT_MRT3847_37062C.1.pep
VPFWSRDHSRNTGAGTVKWFRLTCEIIQIVFGKQLSSCL

SEQ ID NO: 215984 - protein, 190 aa, Glycine max
  unsure (1)..(190): unsure at all Xaa locations
  Clone ID: PAT_MRT3847_37063C.1.pep
FISYHSMSPSYSSYICSXSSLAIPSTVREALDHPGWRQAMIDEMQALENNGTWELVPLPPGKTPVGCRWVYTVKVGPTGEVDRLKARLVAKGYTQVYGIDYCDTFSPVAKLTTVRLFLAMAAICHWPLHQLDIKNAFLHGDLEEDIYMEQPPGFVAQGEYGLVCKLHRSLYGLKQSPRAWFGKFSHVVHM

SEQ ID NO: 215985 - protein, 55 aa, Glycine max
  Clone ID: PAT_MRT3847_37064C.1.pep
FFFMARFRLKFCLFYFVLFLVCLIGFNLLRCKKSVHKEEAIQLRVRRNSFLDIYD

SEQ ID NO: 215986 - protein, 41 aa, Glycine max
  Clone ID: PAT_MRT3847_37065C.1.pep
ISVLDSDPMQCCCECTWTLQTVAMLTNATQSATVTDAKGEL

SEQ ID NO: 215987 - protein, 57 aa, Glycine max
  Clone ID: PAT_MRT3847_37066C.1.pep
MPEGKVCEDCNKNLQSFKFLICVLVLHFDKERGEGVGMWSPGFNISLIYQVGYFIWE

SEQ ID NO: 215988 - protein, 86 aa, Glycine max
  unsure (1)..(86): unsure at all Xaa locations
  Clone ID: PAT_MRT3847_37067C.1.pep
YVKSYSYCSIDTVEIKSDGEMEHELIQALQAFYYEGKAIMSHEECDDLKDXLIADGSTVVMLSPEEQKCLEASMGHVSGKPISSDR

SEQ ID NO: 215989 - protein, 84 aa, Glycine max
  unsure (1)..(84): unsure at all Xaa locations
  Clone ID: PAT_MRT3847_37068C.1.pep
REXNKGTLPQYKESLNNIYVEMCLTILLNTECFALTNEQCSIFNREKKALRIPTIQSLFCFIIRTLMEIYLQNGNSFFQQKNKI

SEQ ID NO: 215990 - protein, 48 aa, Glycine max
  Clone ID: PAT_MRT3847_37069C.1.pep
DVFTIYYLRGPITVERLRVIGSFTLQEAYSEHIIMQPCTREMQGRNSV

SEQ ID NO: 215991 - protein, 215 aa, Glycine max
  unsure (1)..(215): unsure at all Xaa locations
  Clone ID: PAT_MRT3847_3706C.1.pep
DAPQXTLQILDIVLRELSSKRFCPIGRSFFSPDIRTPQRLGEGLESWCGFYQSIRPTQMGLSLNIDMASAAFIEPLPVVEYVDQLLGKDILSRQLSDADRIKIKKVLRGVKVEVTHRGSVRRKYRVSGLTSQPTRELVFPVDENSTMKSVVEYFQEMYGFTIKYSHLPCLQVGNQKKANYLPMEACKIVEGQRYTKRVNEKXITALFEVTCQRPR

SEQ ID NO: 215992 - protein, 56 aa, Glycine max
  unsure (1)..(56): unsure at all Xaa locations
  Clone ID: PAT_MRT3847_37070C.1.pep
GRYVQSYSNKRKYMSCEDLLQGATQLIXXIYIFPQQTKIILYLYIGYLLIMQKKTL

SEQ ID NO: 215993 - protein, 118 aa, Glycine max
  unsure (1)..(118): unsure at all Xaa locations
  Clone ID: PAT_MRT3847_37071C.1.pep
KVIHTILVKVPRLTCSTVPGGIAYDGLYLESRDSTCTFDRXLNPTAMTYRLHMKAFTLXMLAVKVAXQLDETSCHNLKLESCTYSPMIDSFIRVRDFSHAFVYHQEMIMSMLVNDLNY

SEQ ID NO: 215994 - protein, 90 aa, Glycine max
  Clone ID: PAT_MRT3847_37072C.1.pep
FHLLKPISLALDHVKYYVDLPTEMETHGCEGNWPRLLGDGSGALRPGVLTSLACVTVAGKTTLMDVLAQTRKLVALLKKHQNMCYPKNHA

SEQ ID NO: 215995 - protein, 76 aa, Glycine max
  unsure (1)..(76): unsure at all Xaa locations
  Clone ID: PAT_MRT3847_37073C.1.pep
ERQRERDSDLYIDPDRAGAFVAVGKVPPFLNGXSTGLHFRVLTADVSVVDLTVPLDKPASYGLIKSAITDASIGTL

SEQ ID NO: 215996 - protein, 56 aa, Glycine max
  unsure (1)..(56): unsure at all Xaa locations
  Clone ID: PAT_MRT3847_37074C.1.pep
NMVAWHCASWXYTCSMHTSQKDSKREKKYRGEKHFGLSFFASMSPLLSSSQSRTRA

SEQ ID NO: 215997 - protein, 244 aa, Glycine max
  Clone ID: PAT_MRT3847_37075C.1.pep
MSHLNGAYYGPSVPPPKSYHRPSRGGRDGCCCGCLSCFCGCIFDCILGLICKILTTILIIVAILGFLFWFIVRPNVLKFHVTDASLTRFDYTTNNTLHYDLALNVSIRNPNRRVGVYYDHIEAHALYQDVLFGNQTLGPFFQHHKNTTFVNPLFKGQRVTPLAGNQVEVFDKEKGSGVYTIDLKLFMVVRFKFLLFKSASVKPKIRCALHVPLKSRNATTTISPDAAFQPTECGWDYGKKWWIH

SEQ ID NO: 215998 - protein, 55 aa, Glycine max
  unsure (1)..(55): unsure at all Xaa locations
  Clone ID: PAT_MRT3847_37076C.1.pep
PXPKXNTNDTKHLXRASIFIXXSFXTXXXVXDFXXPIXXRAEFRAYVRVREXEPX

SEQ ID NO: 215999 - protein, 100 aa, Glycine max
  Clone ID: PAT_MRT3847_37077C.1.pep
CNGQSRLVSVGGPLLLHPQSFLGPMPPASFCCSMLGPLINSFHLYSFPITGFQSLDWVPNNYFVHICIYVYLSFMFFYVCTDFIISLLYITKLQCPCLLE

SEQ ID NO: 216000 - protein, 83 aa, Glycine max
  Clone ID: PAT_MRT3847_37078C.1.pep
GGPKREGKEKIRVRSIKEGGVTRQVMAAVRKGEGRDVGIVNSEEGCLYQIAFSQKGEIAEGETLKVGPTSEKERRRERGSKRC

SEQ ID NO: 216001 - protein, 92 aa, Glycine max
  Clone ID: PAT_MRT3847_37079C.1.pep
MGFHLPSIRRALFAANQVSSKTVDGPKGYLAAYVGDKMKRFVIPVSNLNQPSFQELLSQAEEEFGYDHPMGGLTIPCSEDVFQHITSCLNGL

SEQ ID NO: 216002 - protein, 40 aa, Glycine max
  Clone ID: PAT_MRT3847_3707C.1.pep
ITSILPLATTDNVQHNIQAHPTRRKTVRKKTGSNRTTKSL

SEQ ID NO: 216003 - protein, 576 aa, Glycine max
  Clone ID: PAT_MRT3847_37080C.1.pep
KYFTCKNCRGCFPSSNVERVGLLCLSCVESRKSEKSSIHAVGKRIRSPRPVLFSRSCSCCASESELCITPQTKKQWKTRTKSSKLSVKLKTAPITSKCLSPQNKSQWRISKRYQRLHKLIFEEDGLPNGAEVAYYARGQKLLEGIKTCSGIVCRCCNTEISPSQFEVHAGWASRRKPYAFIYTSNGVSLHELAIFLSKDHKCTTKQNDYVCVVCWDGGNLLLCDGCPRAFHKECASVSSIPRGEWYCQICQHTFLRERPVLHNADAVAAGRVEGVDPIEQIAKRCIRIVKDIGAEMGGCVLCRSSDFSRSGFGPRTIIICDQCEKEYHVGCLRDHKMAYLKELPEGDWFCCNDCTRIHSTLENLLIRVAERLPESLLDVIKKKQVGRCLEPLNEIDVRWKLLNGKIASPETRPLLLEAVSMFHECFDPIVDPAAGRDLIPAMVYGRNLQTQDFGGMYCALLIVNSSVVSAGMVRIFGRDIAELPLVATRYKNRGKGYFQTLFACIERLLAFLNVKNLVLPAAEEAASIWTEKFGFSKMKPNQLTNYRMNCHQIMAFKGTNMLHKTVPQCRVINTQL

SEQ ID NO: 216004 - protein, 121 aa, Glycine max
  Clone ID: PAT_MRT3847_37081C.1.pep
MYCALLIANSSVVSAGMVRIFGRNIAELPLVATRYKNRGKGYFQTLFACIERLLAFLNVKNLVLPAAEEAESIWTEKFGFSKMKLDQLPNYRMNCHQIMAFKGTNMLHKTVPRCRVTNSQA

SEQ ID NO: 216005 - protein, 155 aa, Glycine max
  Clone ID: PAT_MRT3847_37082C.1.pep
MADDFIVCIDRIIASTPCFGSVDGRQCDGVGVDPLIIPVPENGGEGCSSSSSSSSSNKDDDDDDVVVVVVECRICQEEDLAQAMEAPCSCNGTLKFAHRKCIQRWCNKKGNTICEICNQAFSPNYSLPPVRSNAIMAIDIRQEWGHDADLHVALA

SEQ ID NO: 216006 - protein, 118 aa, Glycine max
  Clone ID: PAT_MRT3847_37083C.1.pep
SHLFFHCSKILPIWWESLSWVKLVGAFPHHPRHHFHQHSHEVYQGLQGNRWKWWWLALTWTIWKHRNDIIFSNATFNAHKVMDDAVFLIWTWFRHLENDFTSHYNQWSSNLKEGFLRT

SEQ ID NO: 216007 - protein, 82 aa, Glycine max
  unsure (1)..(82): unsure at all Xaa locations
  Clone ID: PAT_MRT3847_37084C.1.pep
GICGINTLPSYPVKTKPNRAIPTPPGPARCNXSTHCSQGETCXCAKRFLGICFTWKCCGLTPAVRCKDKRHCCPQDYPICDT

SEQ ID NO: 216008 - protein, 58 aa, Glycine max
  Clone ID: PAT_MRT3847_37085C.1.pep
WIKWGAQSNTPFDLLRIRISYFACPLLVFASEGTFFVWHTFCTRPFLDGIVVFDRDEL

SEQ ID NO: 216009 - protein, 64 aa, Glycine max
  Clone ID: PAT_MRT3847_37086C.1.pep
MLLTFNIRSIMSHALIRRYSSGIKYESFRIKDVNDDMLIFFNRFIVFFSRVCMWVKYASISVPV

SEQ ID NO: 216010 - protein, 115 aa, Glycine max
  Clone ID: PAT_MRT3847_37087C.1.pep
FFFFFFFFFFFFFFFFLFLVFFFFFFNHKLLNRKFVAVFLWKQYQTKENDVNAGNELPKDAQYSRVLCRIYRHCCVNNPGCGSASQNSTEITKFIELNSHFTYLVGDHRKGLFMF

SEQ ID NO: 216011 - protein, 87 aa, Glycine max
  Clone ID: PAT_MRT3847_37088C.1.pep
RWLRRGFFLRFSPVSPFFKASIFTPGGVFPFFVPFSVFSNFSILRDPFSWGPFVTFPLLPFLPFSLFCGPPLRGSFFSFSFVQKFIN

SEQ ID NO: 216012 - protein, 332 aa, Glycine max
  Clone ID: PAT_MRT3847_37089C.1.pep
MEEEEVNRCQIQEWYPKFKSVSFKTLIHQLPESFIQYLLDDSGPFLLPDSVLNEDALPNRIHNPDEEEDFQVSEGSGDEAEASAPPSFPELELKIKDFIESLGGAVFPKLNWSAPKDSAWISTSGTIFNFSPSVLSFLFRASDSSVHDLCHAYDSCQDKSSTRPQNFFLALRKWYPSLQPDMEFRCFVRNQKLIGISQREVTTFYPVLLEKKNDLLFLIQAFFINHVRAKFESENYTFDVYITKDDRVKIVDFNPWGAFTLSLLFTWDELDHIHSEGNDVEFRIVEDRCAVRPGLKTAVPFDYLDTSPGSGWDQFLRNADEELRRQSTGAGA

SEQ ID NO: 216013 - protein, 122 aa, Glycine max
  unsure (1)..(122): unsure at all Xaa locations
  Clone ID: PAT_MRT3847_3708C.1.pep
KGGLGGCEIPARPFFYGKAWAIHRGPKGGKGPEXFYPGGFLNGPKIFXGQDFGFFPLGGGGRKGPGKKKALAARGLKPGNFLXSLGGGRPPGMKKGALVTEGGPGVSPPKKNPLGGGAQCFL

SEQ ID NO: 216014 - protein, 60 aa, Glycine max
  Clone ID: PAT_MRT3847_37090C.1.pep
DWGPGVFLLVIGGGHLRSSDLLWDLLGDVTGGRFACSARDRLFVVWVLSCYALLCSVSAA

SEQ ID NO: 216015 - protein, 203 aa, Glycine max
  unsure (1)..(203): unsure at all Xaa locations
  Clone ID: PAT_MRT3847_37091C.1.pep
MGDIVKQILAKPIQLADQVTKAADEASSFKQECGELKAKTEKLAALLRQAARASSDLYERPTRRIIDETEHVLDKALALALKCRGNALMKRVFTLNPGAAFRKVSLLLENSIGDVSWLLRVSAGDGGGDYIGGLPPIATNEPILCFIWEQIAVLHTGTLEDRSDAAAQLVSLASNSDRYGKLIIEEGGWXPLLKLLKEGKAEG

SEQ ID NO: 216016 - protein, 65 aa, Glycine max
  Clone ID: PAT_MRT3847_37092C.1.pep
YCKYYTISVLTLVLIEPILYGTYNIKFSRIDIIFFFVYLLLYYISFEENRYCIMNFIKNDLLLTT

SEQ ID NO: 216017 - protein, 96 aa, Glycine max
  unsure (1)..(96): unsure at all Xaa locations
  Clone ID: PAT_MRT3847_37093C.1.pep
LAACSIYTVLHCQKAPAAKDLLSFLANGVNPTNPNLTDSAENILALXHDSIAQLIVSGTVXTDAALGSVHAQXIITDAHIEESKQSLLKTIKAAAM

SEQ ID NO: 216018 - protein, 74 aa, Glycine max
  Clone ID: PAT_MRT3847_37094C.1.pep
HRPNSLTNKQTYFPNLKLYSLGSVMHFFSKTTFFSFLSFFIQCHHLSCDLLLFSRPVCSNSPKELEQTLLFSLS

SEQ ID NO: 216019 - protein, 88 aa, Glycine max
  unsure (1)..(88): unsure at all Xaa locations
  Clone ID: PAT_MRT3847_37095C.1.pep
KDCIPTTEDQKGKXVVSLLHWTTKPKRKKRKLMEFKDKFELSXKLFKVTNYHRLRWSVLESSKMVLNDVNYAMPRVSFSIEQSIIVDI

SEQ ID NO: 216020 - protein, 55 aa, Glycine max
  Clone ID: PAT_MRT3847_37096C.1.pep
SCRQPLCPPSHFFPRHLQPQALKIPFPSFLHSMTWWCLCKIACMQQIWLDSFPHL

SEQ ID NO: 216021 - protein, 29 aa, Glycine max
  Clone ID: PAT_MRT3847_37097C.1.pep
EVRHSTYSGRCSLSSRQLVLMSQQGSCVL

SEQ ID NO: 216022 - protein, 92 aa, Glycine max
  Clone ID: PAT_MRT3847_37098C.1.pep
CNQTGQMLAGLLKWPQGTFASKVTLDTGEQKATDEREVDGGIETICLDLPAVITTDLRLNQPRYATLPNIMKAKSKVIKKVAAEDLGVDIRS

SEQ ID NO: 216023 - protein, 44 aa, Glycine max
  unsure (1)..(44): unsure at all Xaa locations
  Clone ID: PAT_MRT3847_37099C.1.pep
TSLVNIHGCNRXCCISSGVRLGKRXGRIRSGQVRSGHGRGSVAR

SEQ ID NO: 216024 - protein, 41 aa, Glycine max
  Clone ID: PAT_MRT3847_3709C.1.pep
SLDLVGGVHIFMESITILVINRTKNKYIHNIYILRTNTNYM

SEQ ID NO: 216025 - protein, 61 aa, Glycine max
  unsure (1)..(61): unsure at all Xaa locations
  Clone ID: PAT_MRT3847_370C.1.pep
PGWTKAFCIXRQAKDDQYRSTDSVFKGGGKLMIAIVPNSLSDMTEFIDPEATGETWMTLFS

SEQ ID NO: 216026 - protein, 54 aa, Glycine max
  Clone ID: PAT_MRT3847_37100C.1.pep
FIVLICIHTFRMDRLTLRRIYPLNTTKYYNERRIHLTVAIRTKRYFEYNTSTSK

SEQ ID NO: 216027 - protein, 104 aa, Glycine max
  unsure (1)..(104): unsure at all Xaa locations
  Clone ID: PAT_MRT3847_37101C.1.pep
GHSAGVPRTKAEILVTYNAAPGLLVASRTHPSKETSWILCDPVNLERNLPXWVSVGFFATPGLQEGSVGTHQGIKGLLLPRGQRVAAMRFWFFQAMCPMRPCNF

SEQ ID NO: 216028 - protein, 233 aa, Glycine max
  Clone ID: PAT_MRT3847_37102C.1.pep
EKRNILEPAGALALAGAEAYCKHHGVQGKDIVVITSGANMNFDKLRVVTELANVGRKQEAVLATVLPEEPGSFKQFCELVGQMNITEFKYRYNSNEKAVVLYSVGIHTVSELRAMQERMESSQLKTYNLTESDLVKDHLRYLMGGRSNIQNEVLCRFTFPERPGALMKFLDPFSPRWNISLFHYRGEGETGANVLVGIQVPKSEMDEFHDRANKLGYDYKVVNNDDDFQLLMH

SEQ ID NO: 216029 - protein, 81 aa, Glycine max
  unsure (1)..(81): unsure at all Xaa locations
  Clone ID: PAT_MRT3847_37103C.1.pep
MVARVWSLMRFLIKGSVAGGAVYLVYDQELLGPSDXSEAVLRKAEEVVPPAMYHFCQSVCQQTGLEMSQLPXPPKINFPNF

SEQ ID NO: 216030 - protein, 67 aa, Glycine max
  unsure (1)..(67): unsure at all Xaa locations
  Clone ID: PAT_MRT3847_37104C.1.pep
QRRAEDPLAGAPPKIXFPPRDFITLSGFLKIFGVFPPYRKTGYKNNKARGPGGPKPKNNRTIGGWDN

SEQ ID NO: 216031 - protein, 83 aa, Glycine max
  Clone ID: PAT_MRT3847_37105C.1.pep
AKPSLSDKSKFKSIMDERIEGQYSTKAALKATQLTLKCLERDLKKRPHMKDVLETLECIKAIKVTRKEGKKRCSKFATTNNVQ

SEQ ID NO: 216032 - protein, 85 aa, Glycine max
  Clone ID: PAT_MRT3847_37106C.1.pep
NNEILSLYLINPPLSSKVAAAMAASNLGHQLSAHNTVRPFEKTTLLNALSISDATKPWYMSHITLIIIFIFRINMDPTSNTRDRY

SEQ ID NO: 216033 - protein, 96 aa, Glycine max
  unsure (1)..(96): unsure at all Xaa locations
  Clone ID: PAT_MRT3847_37107C.1.pep
KYATAMMPIDEXTLCTVAQHMGEQWVDXLDEEDSFXDTNASAALNGDAGXDYMAXIAIDTSVGYTHVLIHKNGEKGITRLLCNDDDXISLVPGTSA

SEQ ID NO: 216034 - protein, 61 aa, Glycine max
  Clone ID: PAT_MRT3847_37108C.1.pep
VFLFFPLLPWHPARLDPEPVSRKRRVSAQSETVMHSLLRFQDCPDAFHIKNCFRVSAGGKK

SEQ ID NO: 216035 - protein, 161 aa, Glycine max
  unsure (1)..(161): unsure at all Xaa locations
  Clone ID: PAT_MRT3847_37109C.1.pep
TDTKSTNIYNNHKSHKPFTTQTKPPPHQPYQLPNKHTPPQAPXKPPPSPKHIHNHDTITKKPFKNIXQHYTLRKKLERNQFXITYLYTKNSTNLQYTYKSMSKRKLMNRADNNDIKKEIQIMQHLSRQSNISKFKNTFENKRSIHVCVELVANSERCKQII

SEQ ID NO: 216036 - protein, 56 aa, Glycine max
  unsure (1)..(56): unsure at all Xaa locations
  Clone ID: PAT_MRT3847_3710C.1.pep
DGHIKLKRGLVNSRSGXCGIAIEPYYPLKNGSNPPIPGPSPPSPEKPPNVCDSYYS

SEQ ID NO: 216037 - protein, 80 aa, Glycine max
  Clone ID: PAT_MRT3847_37110C.1.pep
GSDSPDVCRRKWCDSQRGTALAQSRLPSHDSVVYNFAVTGGCHSRDDQCCGLTGHGDIHVTTGVNGYRRSDLVLLPHSQS

SEQ ID NO: 216038 - protein, 202 aa, Glycine max
  Clone ID: PAT_MRT3847_37111C.1.pep
PRVRERKPSAQTREAELENEKLHTEISSLKDKLEQKAAIEEQIFTIDGKIRKLQDLVGDALSVPETENLVSCSANIDSLEELLRKLIENHAKLSLMKPAYGVVGDGLHSQKEDATLLEERSMDVHDKEAADIDIYKRDLEESSNELMHVKEERNRSLEKQISLSGEVEALTKRIEELQGLLNQEEQKSGSFREELASEVETL

SEQ ID NO: 216039 - protein, 260 aa, Glycine max
  Clone ID: PAT_MRT3847_37112C.1.pep
LVPHEGQTDEHISRQPSKILELREALSRIRFLEKENAEQDKEIKKCKEYISEIVLHAEAQALQYQQKYKCLESMFHEVKTEVSNSTSMVSASEKIEKSSVRTRGSSSPFRCISNIVQQMNQEKDQELLVSRLRVEELEALAASRQKEVCMLQTRLAATESMTHDVIRDLLGVKLDITDYANLIDENQIVKLVEEAHHHREEFIAKEKENLDLRLQINDLIEERECCISELKTKEADILATHIAMQQLQERDQLLSAQNEM

SEQ ID NO: 216040 - protein, 468 aa, Glycine max
  Clone ID: PAT_MRT3847_37113C.1.pep
MEVLLPKLPSFKFPSATYCCSITSRSSSYVRFGFRRVSVCASTVNETVAEPTVGSSSLGHSTRPHFPILHQEVNGSKLVYLDNAATSQKPTTVLKALQNYYEAYNSNVHRGIHFLSAKATDEYESARRKVASFINATDSREIIFTKNASEAINLVAYSWGLSNLKPDDEIILTVAEHHSAIVPWQIVAQKTGAVLNFVDLNQDEIPDIDKLKEMLSRKTKIVVVHHVSNVLASVLPIQDIAQWAHDVGAKVLVDACQSVPHMMIDVQSLNVDFLVASSHKMCGPTGIGFLYGKIDLLSSMPPFLGGGEMISDVYLDHSTYAEPPSRFEAGTPAIGEAIGLGAAIDYLSGIGMQTIHDYEVELGRYLYERLLSVPNIRIYGPAPSEKVERAALCSFNVENLHPTDLATLLDQQHGVAIRSGHHCAQPLHRYLGVSSSARASLYFYNTKEDVDNFIHALNDTVSFFNSLM

SEQ ID NO: 216041 - protein, 81 aa, Glycine max
  Clone ID: PAT_MRT3847_37114C.1.pep
NDKNSTVSLGRQAGGVGELINKCRRIGNRPSLARSSGMVNNNLLQYSQCCSRTSPRGKTEEFSFCWFVAEDRFSIFIIKNQ

SEQ ID NO: 216042 - protein, 428 aa, Glycine max
  Clone ID: PAT_MRT3847_37115C.1.pep
MGGSISKRRRSRQRSASNFLPRYQQPHFPQSQDNGSVGHYGYSSQSYSGGRAPEQVKSLDRKYLRIGDDYKSLKQVTDALAKAGLESSNLIVGIDFTKSNEWTGGRSFQRRCLHHIGHEQNPYEQAISIIGKTLSSFDEDNLIPCFGFGDASTHDQEVFSFYPDERFCRGFEEVLERYRELVPQLKLAGPTSFAPVIEMAITIVEQSGGQYHVLVIIADGQVTRSVDTEHGQLSAQEKKTVEAIVKASEYPLSIILVGVGDGPWDMMKQFDDNIPARAFDNFQFVNFTEIMSKNMDRSRKETEFALAALMEIPSQYKATLELNILGACRGKDIDRIPLPPPLYGAASFNSPKTSRQYSSRPSAPSSRHDVSTNPPATSASDNQVCPICLTDPKDMAFGCGHQTCCDCGQDLELCPICRSTIDTRIKLY

SEQ ID NO: 216043 - protein, 53 aa, Glycine max
  Clone ID: PAT_MRT3847_37116C.1.pep
MGRKKLETHSLRNVDTYVYEKYNHCYATHISSMEQCDELILPHSTGGATPLPM

SEQ ID NO: 216044 - protein, 33 aa, Glycine max
  Clone ID: PAT_MRT3847_37117C.1.pep
SLGFFFFNFEKLAHLFQVNVHNFLSLKDYIAFM

SEQ ID NO: 216045 - protein, 55 aa, Glycine max
  Clone ID: PAT_MRT3847_37118C.1.pep
LFGGAVLLMNAHNHKPPSLLLNHYLKAMVVQFMFGNRLVKPLYWEGNIFTFSSLD

SEQ ID NO: 216046 - protein, 63 aa, Glycine max
  unsure (1)..(63): unsure at all Xaa locations
  Clone ID: PAT_MRT3847_37119C.1.pep
RLELELTLARLTKSELDDEEVVLVCDKVIEEADLDGDGKLGFADFEDMXAKAPDFLSTFHIRI

SEQ ID NO: 216047 - protein, 79 aa, Glycine max
  Clone ID: PAT_MRT3847_3711C.1.pep
KRNPQFIFISMVQETRSCMETRHNGELQLLLSMLNITGAGIRPRCMSMCMMKNAIQAILMNPKTFIGTSAFWRRVHLCY

SEQ ID NO: 216048 - protein, 65 aa, Glycine max
  Clone ID: PAT_MRT3847_37120C.1.pep
LMGNLDRCRVKAMKHSLRDVVTQGSYPRLTMFSFYVARQACSLFLNHSRLPSRYVCVLRLDTSLY

SEQ ID NO: 216049 - protein, 52 aa, Glycine max
  Clone ID: PAT_MRT3847_37121C.1.pep
DKAPFGIAADLKIHEYEKTMVAYNKKLEGKNSEERLSDIVKSEVNDDDEHEE

SEQ ID NO: 216050 - protein, 61 aa, Glycine max
  Clone ID: PAT_MRT3847_37122C.1.pep
NKFLPWKLKPGFSEKGLNLWGKDTLIQLILFSKFWVWGCFFSKGTVVKEKSAGILISFIKM

SEQ ID NO: 216051 - protein, 44 aa, Glycine max
  Clone ID: PAT_MRT3847_37123C.1.pep
TNKRQTWRLQKTRNKLDGVIIMVLWYNRIGHFRDKNVQNSYYHT

SEQ ID NO: 216052 - protein, 60 aa, Glycine max
  Clone ID: PAT_MRT3847_37124C.1.pep
TILNVFYLSLFIWCLNIFYITQRGVKSVHSNSIPYTHLHHKFGGLGKQKLAYKIGAPKEG

SEQ ID NO: 216053 - protein, 43 aa, Glycine max
  Clone ID: PAT_MRT3847_37125C.1.pep
GQGIFLGKSREPPLFWAWKEIWAKSQFGNRFSGVQWNPVASFK

SEQ ID NO: 216054 - protein, 145 aa, Glycine max
  unsure (1)..(145): unsure at all Xaa locations
  Clone ID: PAT_MRT3847_37126C.1.pep
AWFDIYTICSHDCEFWNPACTKAMTMSFNPNPGADAWSLESLKRAGFDXEITCVTGWTVTPMQDVQVTIEWLISSQEXVPRTYCALNPQNPFGXKRGMGKLTFPQGTXSRSVKRTPLFIGGGAGAKMLFLXDMPKAVLSXWKNFV

SEQ ID NO: 216055 - protein, 67 aa, Glycine max
  Clone ID: PAT_MRT3847_37127C.1.pep
WIGLKSKNVCIFKAYDPARAWPIFWPCKGHENPSFKRWNSCQLYSLVPQQLLAPYLYGLQYLQQFPL

SEQ ID NO: 216056 - protein, 75 aa, Glycine max
  Clone ID: PAT_MRT3847_37128C.1.pep
HSFQIREKAYLRVPVEPNSDLSRLIPCGVTVTYLPSLEVASLSVNISVSNVLPRKVHVRRGYRRGVGSRSYLDET

SEQ ID NO: 216057 - protein, 77 aa, Glycine max
  unsure (1)..(77): unsure at all Xaa locations
  Clone ID: PAT_MRT3847_37129C.1.pep
MASSVLVSVDLNPVPFTVANSSFTGLTALVRNSSSVRVVGIGCKKITTDNSXGINGGMALQEGVAATGKNRNETGVY

SEQ ID NO: 216058 - protein, 80 aa, Glycine max
  unsure (1)..(80): unsure at all Xaa locations
  Clone ID: PAT_MRT3847_3712C.1.pep
NFGFDEESXGGXXVNXGAGVSGYXXPXNXXDXFSGXGEXXGCDXXXWTGDLHMFVWSSSXSPXSEGXXHVFXGGXGDYGS

SEQ ID NO: 216059 - protein, 99 aa, Glycine max
  Clone ID: PAT_MRT3847_37130C.1.pep
MVVRKSMGRAKSLLLLLMVLIFSFATYNWVAMIMNLKTDGSQSFNIKIMRSGETNSKFHVALTATESPYSQWQCLIMHYWYKKVNDMPGSDMGKLTRIL

SEQ ID NO: 216060 - protein, 155 aa, Glycine max
  Clone ID: PAT_MRT3847_37131C.1.pep
MVVATMAWRHKAVPRAEVLGILAFDAGKTMCHLISLYHSLSDKEITKLRKEVINSKGVTYLNSQHECFLLNLAAAERLEELDTAADTVSRFGRKCSDPSLSRFDLVYADLKLGLIDLRKLSYGARNTPKIISKMEKFVSSTRSLYFAMEYMAGLE

SEQ ID NO: 216061 - protein, 37 aa, Glycine max
  Clone ID: PAT_MRT3847_37132C.1.pep
VVVVLVVRGGCGGGCGGCGGGCGNWLESSGCGGCGGG

SEQ ID NO: 216062 - protein, 157 aa, Glycine max
  Clone ID: PAT_MRT3847_37133C.1.pep
PRVRPESLRWNVQAELVHCRWAMLGAAGIFIPEFLTKIGVLNTPFWYTAGEQQYFTDTTTLFIIELILIGWAEGRRWADIIKPGSVNTDPIFPSNKLTGTDVGYPGGLWFDPLGWGSGSPEKIKELRTKEIKNGRLAMLASMGAWFQAEYTGTGPID

SEQ ID NO: 216063 - protein, 136 aa, Glycine max
  Clone ID: PAT_MRT3847_37134C.1.pep
MSAFDNVVGGKLKLKGKALDVAGGVKKKKKKNKRNQEQLLQVAEDEVSAGGNTEQAKDPNDGDINDVSELSGKGKTAHYDDHLTPAERRYIEQREQLDVHRLAKISNKSHRDRIQDFNQYLANMSEHYDIPKVGPG

SEQ ID NO: 216064 - protein, 65 aa, Glycine max
  Clone ID: PAT_MRT3847_37135C.1.pep
LSPPYFLIFGGVQTNLPNSIIFDSICFFYEGILDPHWLCSSISLLVNCHKLHPFNDRDRLLVKNS

SEQ ID NO: 216065 - protein, 56 aa, Glycine max
  Clone ID: PAT_MRT3847_37136C.1.pep
SCIEVKHLYSMLSATVHSLACCSFLTLLVYDGDHGAGLRLLRIPYSISWVTLPILR

SEQ ID NO: 216066 - protein, 45 aa, Glycine max
  Clone ID: PAT_MRT3847_37137C.1.pep
AFLTIIYVAAAVAFDCAQEIKSSLLAINQHTFSSVCLNAAASFLK

SEQ ID NO: 216067 - protein, 101 aa, Glycine max
  Clone ID: PAT_MRT3847_37138C.1.pep
EQTESPSYYLCLHYDQGIKERGVFQGVHDIFHGSPDRLRCPDEPRLNNIGFIGKNLDANDLEYGIQGPFTLILRISLQGFTFISFVHMIHVEDIRVCLSSM

SEQ ID NO: 216068 - protein, 325 aa, Glycine max
  Clone ID: PAT_MRT3847_37139C.1.pep
MALFQVPTQSDPWEFSILDFRSDKSFKQQESSTRESNAHTFSEAPISAGPPSLNAWVLDRGSLSHNRNNGTNGLSEHRLQPIEEIASSSLASISINKAENSVTSSMVESSNFHYSSSATYSLPVPSAPLLPDNAAWFTDAQSSLSSPLFPDNSVPKSGYPDWSSTYGPHGYDPRFPVLSSGYTPPGRMTSSEWLRWYRENYKPERTNNYMQPTHLNSPGPGNHVNVPYHDTYRFGQFDRWSNPLPSNQYTYMESPGPPPLQPGFLSAFGEHKGSVYNNFQRPTPYGCGVVTDPRNEPQSLLECLKEKEWRLQPDPNVRGPTFMGN

SEQ ID NO: 216069 - protein, 141 aa, Glycine max
  Clone ID: PAT_MRT3847_3713C.1.pep
ARFGVSFERHYGLHPNGSAMFIVDVNEPSSDPFPWDINKDSLSVDIKHVFTGEGISNGYGFRYPGSKPGSLFVFQNGVLAFVWKDTRAVLTLQRLDLQDLLKKGERIPSLPPINNFSYLTKSYSNVFTGFPGASTWSPSPR

SEQ ID NO: 216070 - protein, 80 aa, Glycine max
  Clone ID: PAT_MRT3847_37140C.1.pep
WELFTPPSKRSGCAGESVDVTMRRDERAELVRSLLSGKCTIHESLIGSFSEAADCEFTTLACIPGVITSRGSMIEWKDLP

SEQ ID NO: 216071 - protein, 67 aa, Glycine max
  Clone ID: PAT_MRT3847_37141C.1.pep
CVRAITEMKRALCAGQSLLELTLWNLLGYVQVLIIFVIRTTRRNTRRKNLCHQSLGIRLRIADQELL

SEQ ID NO: 216072 - protein, 123 aa, Glycine max
  unsure (1)..(123): unsure at all Xaa locations
  Clone ID: PAT_MRT3847_37142C.1.pep
KSYDVGKISATKGLGGWPERWNSMEPGDLQLPLKDRSSLHPWPLPEVAKRAXNHPKGLVAVKKWLRKKGWPXVRMDLRLRADYWPFDPTTVLAGKPKEKKNSLRELTGKLFQDFSIRVLARKI

SEQ ID NO: 216073 - protein, 65 aa, Glycine max
  Clone ID: PAT_MRT3847_37143C.1.pep
SIIINIIVDTPLTHILNTNTYIHLTSSTTNDLYKPNFKPITFDTTIQNNKYLIPNHHDYLIYYLM

SEQ ID NO: 216074 - protein, 585 aa, Glycine max
  Clone ID: PAT_MRT3847_37144C.1.pep
MIDKNDGTVALVKSGSEKVKTTPAGEYLTAALNDFNPDQYEGLAAISDGADKLLMLVLAAVIKAGLCSEHEILAEIRDAVFSFIRKMEPRRVMDTMLVSRVRILYIRSLLARSPELQSIKVLPVECFLEKANTGPSRSSSRASSPGRSSMQYVDEQIQGFKVNLKPEKKSKFSSVVLKIRGIDEDIWRQQVTGGKLREITEEAKSFAIGNRALAALFVHTPAGELQRQIRSWLAENFEFLSLTGEDASGGSTGQLELLSTAIMDGWMAGLGAALPPHTDALGQLFFEYSKRVYTSQLQHLKDIAGTLATEEAEDAAQVAKLRSALESVDHKRRKILQQMKSDIALLTLENGGSPIQNPSTAAEDARLASLISLDSILKQIKDIIRLSSVNILSKSKKKTMLTSLNELTEQMPSLLEIDHPCAQRHIADAHYLVESIPEEDDPIQDISHGRKPSTDLGSGSETDVAQWNVLQFNTGSSSPFIIKCGANSNSELVIKADARVQEPKGSEIVRVAPRPSVLENMSLEEMKQVFNELPEALSLLALARTADGTRARYSRLYRTLATKVPSLKDLVGELEKVGALKDVRT

SEQ ID NO: 216075 - protein, 102 aa, Glycine max
  Clone ID: PAT_MRT3847_37145C.1.pep
RPMCHISCANHLSCSSVLYTKRVIKECNRTVQNLLGSEQESRAIKQQGQNKGTGSHRFWPENAGEKHELCITGKASHKHIHLFQIQQNCTEFHFRKNTHENP

SEQ ID NO: 216076 - protein, 35 aa, Glycine max
  Clone ID: PAT_MRT3847_37146C.1.pep
NAPREQIRANLYIPTATINFEHFTELYMSEILAYS

SEQ ID NO: 216077 - protein, 55 aa, Glycine max
  unsure (1)..(55): unsure at all Xaa locations
  Clone ID: PAT_MRT3847_37147C.1.pep
MPILNIAVRMPEQATHPDTLKAALAXFISTFIFMFFCSRFGIAYNKLTHNKSDTP

SEQ ID NO: 216078 - protein, 95 aa, Glycine max
  unsure (1)..(95): unsure at all Xaa locations
  Clone ID: PAT_MRT3847_37148C.1.pep
MARYHKHEDNDGRNVDQSGNIXTRSDEYGNPXVHAAGVTYVTTMTAAGGYNDXLPRQQETTNAYGXDTGRQHSRRGYNGDTNPHHQVTDGYADDH

SEQ ID NO: 216079 - protein, 111 aa, Glycine max
  Clone ID: PAT_MRT3847_37149C.1.pep
NTNRRNLLQKPRIEEPVKAGKVKAGGNGQGHIGPSKKQQEKKRKGKGKGEGKPGKWEKRTSGNGMARKQGESQLNGEQGGGGKGGSGYRAHWKPEMRMAKTMKWGARGLGG

SEQ ID NO: 216080 - protein, 92 aa, Glycine max
  Clone ID: PAT_MRT3847_3714C.1.pep
VELLCIPVLCAYGLAPGISGSRLLGTNPQSISQLTVWNLVAAVRASLDLESSNQRLWRFPIDLLGGGLLVGLTGDWIALIAGCRATSLLRVA

SEQ ID NO: 216081 - protein, 121 aa, Glycine max
  Clone ID: PAT_MRT3847_37150C.1.pep
ASNTLACTTTTRSGGSHPSNNHPYISFPQNTPFSPHAFAHPYSHSQATAFPCQSQPPLGSILVHPFYFMCRSAAPFPAPPRSSNFAFINQVHAFFPVLFSSPIALSNICPPPPPPSRRHSY

SEQ ID NO: 216082 - protein, 63 aa, Glycine max
  Clone ID: PAT_MRT3847_37151C.1.pep
GQIRIGRIPPYLQRMIFAAKQLKDGRSLTDYMIQKESTLHLVLRLRRGVLRSLWNVVCVPIRL

SEQ ID NO: 216083 - protein, 103 aa, Glycine max
  Clone ID: PAT_MRT3847_37152C.1.pep
MYLLIYNFLSSKKFPSCCFRPQTSCCRQRLLETHDLAGSCILSRVQSWNRGNLRQLSDRPSRTGSKSSRMSTKREKQVCFFLNQNKIRKMQNNGMGSDVHGEG

SEQ ID NO: 216084 - protein, 93 aa, Glycine max
  Clone ID: PAT_MRT3847_37153C.1.pep
ASGPPGLNLCVPRCPPSSAIGCIGVHFKVPRTSLTIVGFKGRASLPALKIKIKQMQPKNLVNIAILPVILLTMLAEEKENTILETYWIMWWLE

SEQ ID NO: 216085 - protein, 88 aa, Glycine max
  Clone ID: PAT_MRT3847_37154C.1.pep
DSLTSRRTTLSVELYNCLIFSAMCAVVVVALPLPAEAGDHGCRCDLHPIKMSPWITTQTPGAKPHNACCTKLNLQKACLCGYLTNACL

SEQ ID NO: 216086 - protein, 41 aa, Glycine max
  Clone ID: PAT_MRT3847_37155C.1.pep
LPDDNLPLKVSNVTLGHLGTLARIRLMLTTMQTYNHGYTLT

SEQ ID NO: 216087 - protein, 80 aa, Glycine max
  Clone ID: PAT_MRT3847_37156C.1.pep
PFILTSNCLCLKSETVQRLKGQRDAYVLQSRQLQQELDILKRRNRRGDSGFSFTFAVFVGLIGLLCGLLLKLSLSSPPTE

SEQ ID NO: 216088 - protein, 115 aa, Glycine max
  unsure (1)..(115): unsure at all Xaa locations
  Clone ID: PAT_MRT3847_37157C.1.pep
AGDLVLEVKKTTCPYIKRTVYLMIAVGKLADDTIDSEGLPHKLVPCGEIQXKMLSKSNXEEVFTEWSTHVRPATTLLTEGGPYLFAMVHETSVSTIPQDDDIAAKQTTINTTCAY

SEQ ID NO: 216089 - protein, 76 aa, Glycine max
  Clone ID: PAT_MRT3847_37158C.1.pep
IYELFIDKNVEKCLALSVSYSHALSKFPSDDGKVVRLTMSPFQQFRSHGRNVFVMEDPPARSIYHVGKKSYRAIVA

SEQ ID NO: 216090 - protein, 231 aa, Glycine max
  Clone ID: PAT_MRT3847_37159C.1.pep
WRRVHLIVKFFRGARNKSKEERGIYVKHFKNIPMADMEIVLPEKKNPGLTPMDWVKFLGSAVVGLVAVVSSLEMPSADWWVIIAVVSTVIGYIAKTYFTFQQNMAQYQNLITQSMYDKQLDSGKGTLLHLCDDVIQQEVKEVIISFFILMEQGKATRQDLDQWCEELIKEEFDEECNFDVDDAVEKLEKLGIVTRDSVGRYQCVGLKRANEIIGTTTEELVLKAKQGSMTS

SEQ ID NO: 216091 - protein, 57 aa, Glycine max
  Clone ID: PAT_MRT3847_3715C.1.pep
LLADTTHLFKSNIHSLHLNIYNIASHPPSLKHFDQQHYIINIYSLSIHPLPLSHISS

SEQ ID NO: 216092 - protein, 70 aa, Glycine max
  Clone ID: PAT_MRT3847_37160C.1.pep
LVVTVDCQRVGIAKPSLLVGKGPVQAQGEQNCESEHDGLDNQGTDSLDVVGSGDGEQSDQADLTEVDTSE

SEQ ID NO: 216093 - protein, 815 aa, Glycine max
  unsure (1)..(815): unsure at all Xaa locations
  Clone ID: PAT_MRT3847_37161C.1.pep
MGDSEAVVTEASAAEAYASAGYAETGSNPAPEAGATVDQSAGEAAQASSTYGYGYSNVGDVNSYAGDPNSILQQAQFSATGESKPAGGAADSNEASAGVGSTAADSTMVSDYNSSVNGGVAGAVTNTSGLENGNALENADGSADEKQQADGYAALSAEEDRLWNIVRANSLDFTAWTSLIEETEKAAEDNILKIRRVYDAFLAEFPLCYGYWKKYADHEARLGSIDKVVEVYERAVQGVTYSVDMWLHYCIFAITTYGDPDTVRRLFERGLAYVGTDYLSFPLWDKYIEYEYMQQDWARLAVIYTRILENPNQQLDRYFSSLWTSPGPLARNLTPRLEEXALGKMEDAFSLYEHAIAIEKGKEHSQTLPMLFAQYSRFVYLASGNAEKARQILVEGLENVLLSKPLLEALLHFEAIQPLPKRVGVDFLESWVVKFIMPNSESAGVASPTEREELSSIFLEFLNLFGDVQSIKRAEDRHAKLFLPHRSMSELKKRHAEDFLVSDKTKVPRSYSAQSPAQSAMAILMYIFSVICWLLPLYEQAIAIEKGKEHSQTLPMLFAQYSRFVYLASGNAEKARQILVEGLENVLLSKPLLEAILHFEAIQPLPKRVDIDFLESWVVKFIMPNSESPGVASATEREELSSIFLEFLNLFGDVQSIKRAEDRHAKLFLPHRSMSELKKRHAEDFLASDKTKAPRSYSAQSPAQSGMGAYPNAQNQWSNYGVQPQTWPPVTQAQGQQWTAGYTQQASYGAYAGYGGNYANSQLPTSVPQSTAYGAYPPAYPAQPAVPQQNYAQPVAAAPAQQPAAVPQAYYGSYY

SEQ ID NO: 216094 - protein, 89 aa, Glycine max
  Clone ID: PAT_MRT3847_37162C.1.pep
INRKVSRRTANYPGRAIVRRLFFFFFFFFFVQIIIIWFTNIKLFNCVTNYTYRQKCAIHKNHSQLLKCYHDIRIPFLKDQFPRCTFQLT

SEQ ID NO: 216095 - protein, 85 aa, Glycine max
  Clone ID: PAT_MRT3847_37163C.1.pep
ISNFGEAIDKRERAKNLTQIRMIDDQKIALKSVNGNILVHQKALRSSKSTRRKRNNRAREIQNPIPISIKGKAKSLIEKEASEKP

SEQ ID NO: 216096 - protein, 117 aa, Glycine max
  Clone ID: PAT_MRT3847_37164C.1.pep
QSPAQSAMGAYPNAQNQWTNYGVQPQTWPPVTQAQGQQWTAGYTQQASYGAYAGYGSNYVNSQLPTSVPQSTAYGAYPPAYPAQPAVPQQNYAQPVAAAAPAQQPFAVPQAYYGSYY

SEQ ID NO: 216097 - protein, 80 aa, Glycine max
  Clone ID: PAT_MRT3847_37165C.1.pep
MGVSKEQVELFLKATLIPYDLEVVDVSGGCGARVVAEFVSDQVDGNRVFERHIMDGAALQEVVILVHAVFITIAVYTGYV

SEQ ID NO: 216098 - protein, 113 aa, Glycine max
  Clone ID: PAT_MRT3847_37166C.1.pep
FQDIKSLFYKRFVLESKGNTHNQGKVKGKISETFLLSQNFRTHAGVLKLSQSTIELLFRFFPHSIDVLKPETSLIYGEGPVVLECGSRKNAIVTIFGNSGHVAGKIVGFGAEQ

SEQ ID NO: 216099 - protein, 250 aa, Glycine max
  Clone ID: PAT_MRT3847_37167C.1.pep
SILDSNFMNLVKSLEADIREQIVEVYSRPKMKVAVVPAELEQRSGESDAEYIKRVRVFVEKQCSEIQDLVLRNASMAEDLAKTGSTLQPEQRVSGGSDRVPIETLHRDLQEASQRLEMLKAEKAKVESEAIMYRNLAGKTEADLRSLSDAYNSLEQSNLLLENEVKALKREGHSTFPDVDAIKAEAREEAQKESEGELNDLLVCLGQEQSKVERLSARLLELGEDVDILLEGIGDDAGAAEDGEDEEDDE

SEQ ID NO: 216100 - protein, 96 aa, Glycine max
  unsure (1)..(96): unsure at all Xaa locations
  Clone ID: PAT_MRT3847_37168C.1.pep
XXXRXLVXGXXXXXXXXXXXXXXXXXXXXXXXXPXVXXXXXXXXXXXXXXXXXXXXXXXXXVXSXXXXXXAKEXXSVXXSAXTXRXXXPXLGHPVG

SEQ ID NO: 216101 - protein, 120 aa, Glycine max
  Clone ID: PAT_MRT3847_37169C.1.pep
MLILSKETPPTKFKRSPSLSLPMPTPVVFLRQCLTPDAARALDEAVYVVRRRSHAQTTSLHAVYGLLSLPSSPLLRDTCSRAINCAYSPRLQFKVLDLCLSVSLDRAPSSHKHSSVDHDP

SEQ ID NO: 216102 - protein, 48 aa, Glycine max
  unsure (1)..(48): unsure at all Xaa locations
  Clone ID: PAT_MRT3847_3716C.1.pep
SLFKILPCXXTSISPMATNILIDSLYTIPYYIITSTKNVDGIVTSALL

SEQ ID NO: 216103 - protein, 41 aa, Glycine max
  Clone ID: PAT_MRT3847_37170C.1.pep
QCRYDSTAMSRSPSQQLARILHLLLVMSAPISHLCMISPLY

SEQ ID NO: 216104 - protein, 52 aa, Glycine max
  unsure (1)..(52): unsure at all Xaa locations
  Clone ID: PAT_MRT3847_37171C.1.pep
MKVLATTLIGKKSTREVGSAETIADVKDKLKSXGGMTPGXQSLIWAGKQLED

SEQ ID NO: 216105 - protein, 61 aa, Glycine max
  Clone ID: PAT_MRT3847_37172C.1.pep
GIGLTWHVPYTFALKRPLFLSSYARVAPFRERPDICSYLTCAWYPISSASLPSGTPVYKYF

SEQ ID NO: 216106 - protein, 80 aa, Glycine max
  Clone ID: PAT_MRT3847_37173C.1.pep
ISYLVKIYVIVGFLYVEAQQIRWQSIANRFCFFKERRKGLMCCISLEVSVLLELAFINKHAAFEEHWRQWMNLLKKYMYR

SEQ ID NO: 216107 - protein, 86 aa, Glycine max
  unsure (1)..(86): unsure at all Xaa locations
  Clone ID: PAT_MRT3847_37174C.1.pep
MNIVKIGITCFGSIDCMIDTLTLXRNDVELMTVMQPFDNTVYMTYMLVNVNVHSQWSHQEVTVKDENTXVFGDKALTVFGHSYPEE

SEQ ID NO: 216108 - protein, 61 aa, Glycine max
  Clone ID: PAT_MRT3847_37175C.1.pep
GNLADVILKVGLFERSEIAWRDAKYAQIYEYLRDEYEVAQRFGNLDFKLKFVEHNIHFLQE

SEQ ID NO: 216109 - protein, 86 aa, Glycine max
  unsure (1)..(86): unsure at all Xaa locations
  Clone ID: PAT_MRT3847_37176C.1.pep
ATRPAAAPDLAHGTGAARAEDCMYRVPRTVVIHDLISRHAQAYGRMEVVXEDHLGREAYPGDVMTLSFTLSEYEPDLQRVNYAEGC

SEQ ID NO: 216110 - protein, 70 aa, Glycine max
  Clone ID: PAT_MRT3847_37177C.1.pep
IHLKPEYNVFITSSAWGASLRSESPFLSRQATVHQLTINLGCYWATFNIRSNCVLPWASIFCVVEHLFID

SEQ ID NO: 216111 - protein, 47 aa, Glycine max
  Clone ID: PAT_MRT3847_37178C.1.pep
SRVLSELLASHHTVSGHEQKLQQWPTIKKCIFAYKIRGKKSLAKIKQ

SEQ ID NO: 216112 - protein, 30 aa, Glycine max
  Clone ID: PAT_MRT3847_37179C.1.pep
LSAFPVGTWENGRELIILGEMLITHFFIHD

SEQ ID NO: 216113 - protein, 82 aa, Glycine max
  Clone ID: PAT_MRT3847_3717C.1.pep
NKLSHVIYQELYSNIPKHKHFLTLKYSIYGDMNHNGFKPANMVNNANLFSVIIMSLGSVTLHSLYWAGSVRQTTGSFYVQVT

SEQ ID NO: 216114 - protein, 86 aa, Glycine max
  unsure (1)..(86): unsure at all Xaa locations
  Clone ID: PAT_MRT3847_37180C.1.pep
THNLSTLDGPHTTVTTACQVSNNILHNFTPNSTDPAIYTLFLTKIHSLCPNNRNXPKTTAIMIGXQTKFDISYYTNLRNSTQILHI

SEQ ID NO: 216115 - protein, 39 aa, Glycine max
  Clone ID: PAT_MRT3847_37181C.1.pep
HTESEEKILLQSDSFCLEHSSSYHSKQSSLVSSSINCFL

SEQ ID NO: 216116 - protein, 50 aa, Glycine max
  unsure (1)..(50): unsure at all Xaa locations
  Clone ID: PAT_MRT3847_37182C.1.pep
HGPLITGARVSLGAKINEPPPGFCITFYKWMYFEFKEEKTKVXKKKKXKK

SEQ ID NO: 216117 - protein, 97 aa, Glycine max
  Clone ID: PAT_MRT3847_37183C.1.pep
KAHIFRVILHTLPNIKLIKNFSKDSPVAHVCQIQYALFASDTKHSQWHFVSSFTGGSLLHVHKLTLLHQYFQRSLQRSSSNAVTTFPLTFIKAPLFI

SEQ ID NO: 216118 - protein, 123 aa, Glycine max
  Clone ID: PAT_MRT3847_37184C.1.pep
PLSSTHERPPGSSSSTSFPHNTWRNDSTISSVNHSSDVLYPPTSVATHCPRKTIRYPTSTAHPHPHSRSPYASVSPIIKPPSAIDSGCRNLFKVTDRVKFDDMSARVHHPCTNSRKRPSTSFV

SEQ ID NO: 216119 - protein, 59 aa, Glycine max
  unsure (1)..(59): unsure at all Xaa locations
  Clone ID: PAT_MRT3847_37185C.1.pep
ETILQHQGSSLGSLFDYSFLVLVSLALSLSGLLYXRLVVSFRLFLAPFLLCNSSCAFSF

SEQ ID NO: 216120 - protein, 67 aa, Glycine max
  Clone ID: PAT_MRT3847_37186C.1.pep
MGRKFFVGGNWKCNGTTEEVKKIVTTLNEAKVPGEDVVQVVASPTFVFLTAVKSLLRPDLHVSAHNC

SEQ ID NO: 216121 - protein, 117 aa, Glycine max
  Clone ID: PAT_MRT3847_37187C.1.pep
MMDSNSPFLPHCNSDTKNAFRKPSGDAANRNYRRRSPVEGSPSPDASPRHGHSSSPNLVRENSARVSHHSRKYDDREQDQQYGRNHYGRSSDSLRHSDRQSFKSSYGHSRHDKYANE

SEQ ID NO: 216122 - protein, 70 aa, Glycine max
  Clone ID: PAT_MRT3847_37188C.1.pep
ILVSQQLKKMVKHQQLQPYGSNTLKKGPQLHTNLLIHQSVASCHISYLCNWDCYRSHSFNHLGGYHTLYI

SEQ ID NO: 216123 - protein, 66 aa, Glycine max
  Clone ID: PAT_MRT3847_37189C.1.pep
LYIFDRAKERYIYREKKLSKPGKWALSIKARATTFNHFLPCLSTILTSAVAIEIWCFNLHSIQCSV

SEQ ID NO: 216124 - protein, 172 aa, Glycine max
  unsure (1)..(172): unsure at all Xaa locations
  Clone ID: PAT_MRT3847_3718C.1.pep
TRPPISCSCVDGIRRSMSTIYTVHAADTLASISEGYGGLVSAEQIKIVNAINATNPLTYRGTLVIPLPCTCFDNVNNGGNAIYMSYVVQRRESLXSIATKFGTTVSDLETVNGFGEATVDPGDILSIPIAACSSATLNWYDESMIVPNGSYTLTATNCIKCTCEPTDITLQC

SEQ ID NO: 216125 - protein, 468 aa, Glycine max
  Clone ID: PAT_MRT3847_37190C.1.pep
MMDSNLPFLPPSNSDTKNSFRKPSGDAANRNYQHRSPVDRSPSPDASRHGHSSSPNPVRENSARVSHHSRKYDDREHDQQYGRNHYGRSSDSLRHSDRQSFKSSFGHSRYDKYANEDRYRERLLSRSGHESRDDHVREESDSRPKNYQCSVDKYSHDKYDRSDHRSKEKRRDTYSEHQKYKDMDSSYEKSASSKRHALYDEVEREGHSRDWDGQNERRDSRRSSGDYRSDQRDESGPQRDCGKSSLKEAYKSEQKESNDQNLPWEEKRKHDDTETGKGKDWKTRKAGEQCAIEDKESSGKKLKLFDPDKDDNYRKDDESKTSSSNLSHKSKEDLWAVKSSGFDGDNDLDAAKIAAMRAAELVNRNLVGPGCLTTDQKKKLLWGGKKSTPTEESGHRWDTGMFSDRERQEKFNKLMGMRGEAKVEQNSNNQSSNEILRAEKQKELQMDLEKQYTAGLRRRDGRTVGLGL

SEQ ID NO: 216126 - protein, 38 aa, Glycine max
  Clone ID: PAT_MRT3847_37191C.1.pep
TRRIDTQIVPSLMKRSRLCLYHHCIAVGLIVIHLATVS

SEQ ID NO: 216127 - protein, 73 aa, Glycine max
  Clone ID: PAT_MRT3847_37192C.1.pep
FGLTSTTPLTLTKFPTSPNALRFLPYNNVAHFNKGDRLLLFQKLKFTFTMLTSKTKFTLCAIYTRRSQIDERN

SEQ ID NO: 216128 - protein, 62 aa, Glycine max
  Clone ID: PAT_MRT3847_37193C.1.pep
KHHGGCLYKISQKARQPLTGVLHTTNFLKITSHIITFQFNPTRPNLIYHFIKTWSQLTIANY

SEQ ID NO: 216129 - protein, 61 aa, Glycine max
  Clone ID: PAT_MRT3847_37194C.1.pep
FLSLLILSLHLISYIFSVSSLVVIKSLFLSLSNSHQSSTLQLVSLPSLTPLHGKCLCYLTG

SEQ ID NO: 216130 - protein, 284 aa, Glycine max
  unsure (1)..(284): unsure at all Xaa locations
  Clone ID: PAT_MRT3847_37195C.1.pep
MGSFLNFLLDSTFTNIHSFSLIFHLHHIFFNFISFFTKISFFLFFLFSFSFLIYIYIYIYIYIYIYIYIYIYIYIYIYISKDGQIRHFFHRPSKAYTTGTRKRRKVHTDDEGIETRWHKTGKTRAVFAXSGGAVKGFKKILVLYTNYGRQKKPEKTYWVMHQYHLGSTEEEKDGELVVSKVFYQTQPRQCGNPIIIKDSYEKMLNDGSGQDNINISLIPKTTATLLDCYTAPYIDYDHVHVSHNRESSSQLIIPSSVVQVDGSYIRLTMDAKKARFESNTGKRF

SEQ ID NO: 216131 - protein, 45 aa, Glycine max
  Clone ID: PAT_MRT3847_37196C.1.pep
FIKKWALDIMGSENKLLFTRFVSTQNRSPLVLLGAFFIPLSKQFN

SEQ ID NO: 216132 - protein, 321 aa, Glycine max
  unsure (1)..(321): unsure at all Xaa locations
  Clone ID: PAT_MRT3847_37197C.1.pep
MTWCNDSDEDRVIESMTPTITITPNTDGIKLTEEIRTITCPSCGHNIDFVKYXGGIHDLPGLPAGVKFDPNDQEILEHLEAKVASDACKLHPLIDEFIPTLEGENGICYTHPEKLPGVSKDGQIRHFFHRPSKAYTTGTRKRRKVHTDDEGSETRWHKTGKTRAVFAAGGAVKGFKKILVLYTNYGRQKKPEKTYWVMHQYHLGNTEEEKDGELVVSKVFYQTQPRQCVNPIIIKDPYEKMLNGGSVQDSTNTSITKTTATLLDCYNAPYIDYDHAHASHNRESSSQLIIPSSVVQVDGSYIRSTMDAKKARFESNTGKSF

SEQ ID NO: 216133 - protein, 73 aa, Glycine max
  Clone ID: PAT_MRT3847_37198C.1.pep
LALNVLYIATTSSTHGRLWRIIILVSHTPLGVGPGPAGSFCMNHLRFTTRCRCPHWPPVWLPPIRMCPLFGQS

SEQ ID NO: 216134 - protein, 75 aa, Glycine max
  Clone ID: PAT_MRT3847_37199C.1.pep
VGSTRSRYHYPSILCCSSHFMSYSERQPSVVSSAHVGVQCDVVRLYSLTRGPMRIRVTYEKQACADAAWINKDDP

SEQ ID NO: 216135 - protein, 149 aa, Glycine max
  Clone ID: PAT_MRT3847_3719C.1.pep
EYQFIPEKPSVRNETYERVAPSIHYSSLDGIPHSRTLLSSGRSFLNGNESAPYGYGIQGHSRGLNLLSRQGRQNHLLPSASGENDGIPRKNPFVDVTADIHNGAHPITLIDSPLMPSDGRVIHVEELSRLQRKRKNDDTKMQQELEAQE

SEQ ID NO: 216136 - protein, 111 aa, Glycine max
  Clone ID: PAT_MRT3847_371C.1.pep
YNIASGLPTIAPGHACSLARHFKFPYASIKIQLLFIYLLLLLLWISNDKTEKLKVQNISASCSLTFSSLINEQNEKKNNVAIYSPKHCSKLAQTFFYRSGTDLMRRKQKIL

SEQ ID NO: 216137 - protein, 71 aa, Glycine max
  Clone ID: PAT_MRT3847_37200C.1.pep
YLQDTGRNDPANCLLEVPRKGLTKRATADLAGSLKIISAAKPTIAANLSHARSITCQLASAGENAITSRMM

SEQ ID NO: 216138 - protein, 519 aa, Glycine max
  unsure (1)..(519): unsure at all Xaa locations
  Clone ID: PAT_MRT3847_37201C.1.pep
MATHPQTPTSSNAFSFISKGWREVRDSADADLRLMRDRANSFKDLATSFDRELENFFNSATPXFSVPAMRSPTPKEIEFVKSLRPKLSEIRRAYSYPDFSKKVLEKWRPRPQIRPSLIVFXHSQRRRQGIVDFEKRRRRRLRRPEEWKGEGEGESRDWEPIRVLKTRLKEFEKRGSSFDAFKNSEFVEKFKSSLKSMCKEPLESKEVPPLDVPELLAYIVKQSGPFLDHLGVKRDICDKIVESLYSKCKNHQLLHSLSGEESSVLGNGNINDELDLRIASVLQSTGHRYEGGFWTDHAKHDPLDNERHVAIVTTASLPWMTGTAVNPLFRAAYLSQSAKQKVTLLVPWLCKSDQELVYPSNLTFTSPEEQEAYIRSWLEERIGFKADFKISFYPGKFSEARRSIIPAGDTSQFIPSRDADIAILEEPEHLNWYHHGKRWTDKFNHVVGIVHTNYLEYIKREKNGALQAFLVKHINNWVTRAYCHKGLRLSAATXDXPKSVIANXHCVNPKFLKIGEKIA

SEQ ID NO: 216139 - protein, 150 aa, Glycine max
  unsure (1)..(150): unsure at all Xaa locations
  Clone ID: PAT_MRT3847_37202C.1.pep
MQRQSHISVAISLICILFCSTLTSALDEPEYGYNEKSANGPXHWGDLKEEWAACKIGQIQSPIDLSTNGVEVIPKLGGLKYWNYKPQHATVSNRGHDVAVIWEGDAGSIEINGTPFFLQQAHWHWPAEXTIXGRRYDWEXHMVHVSPQPD

SEQ ID NO: 216140 - protein, 223 aa, Glycine max
  unsure (1)..(223): unsure at all Xaa locations
  Clone ID: PAT_MRT3847_37203C.1.pep
MATHPQTPTSSNAFSFISKGWREVRDSADADLRLMRDRANSFKDLATSFDRELENFFNSATPPFSVPAMRSPPPKEIEFVKSLRPKLSEIRRAYSSPDFSKKVLEKWRPRTQIRINLSAIKNAIVSAEEEEEGIVDFEKRRRRRLSFWEEWKGEGEGESRDWEPIRVLKTRLKEFEKRVLLLXAFRNSEFVEKVKSSLKSMCKEPXESKEVPPLXDVPELLAY

SEQ ID NO: 216141 - protein, 78 aa, Glycine max
  unsure (1)..(78): unsure at all Xaa locations
  Clone ID: PAT_MRT3847_37204C.1.pep
LQHGLVYREHIRXPGYYEGRCGTMGKLPMFGCTXAYEVWXELQEAKTAYPNGLIRIIGYDNGRQVQGIRFIVYKSPGF

SEQ ID NO: 216142 - protein, 43 aa, Glycine max
  Clone ID: PAT_MRT3847_37205C.1.pep
GALYIQFNKDKATATYGVLPAANVPPPYALASISALQFDHFGH

SEQ ID NO: 216143 - protein, 100 aa, Glycine max
  unsure (1)..(100): unsure at all Xaa locations
  Clone ID: PAT_MRT3847_37206C.1.pep
WTDGLMSTHMPCYFSSISKGVATIMASYSTWNGLRXHAQQDRITGFLNKTLHFSGFVNSEFEGLEKITSPTRACNTESLEPGVSAGIDMFMVSKHYTQLI

SEQ ID NO: 216144 - protein, 100 aa, Glycine max
  unsure (1)..(100): unsure at all Xaa locations
  Clone ID: PAT_MRT3847_37207C.1.pep
GPPGGENPIPAAECPLCLGEFEKGAKVXMLPKCNPGFPVRGIDPWLLLHSSCPNFPPSLLKKTSPPPENGSGRRSKVVFLVDPASLMAFPVKGGKKAQFW

SEQ ID NO: 216145 - protein, 40 aa, Glycine max
  Clone ID: PAT_MRT3847_37208C.1.pep
AKQLLICCKHAKQHGSKLYRLWPVLIVRTVVQFYTWLISN

SEQ ID NO: 216146 - protein, 80 aa, Glycine max
  unsure (1)..(80): unsure at all Xaa locations
  Clone ID: PAT_MRT3847_37209C.1.pep
WVSGEVLVVLCAFFGASGYSFSGVDLCLPVKIEQGVXSIPVMGSSLVEXLLGSASVGRSAVTGFYSLRTLVFPLGCSVFM

SEQ ID NO: 216147 - protein, 361 aa, Glycine max
  Clone ID: PAT_MRT3847_3720C.1.pep
ASLVPILLAAKYRPHGVYKDARSILVIHNIAHQGVEPAITYSNLGLPPEWYGALGWVFPTWARTHALDTGEAVNFLKGAVVTSDRIVTVSKGYSWEITTSEGGCGLHDLLSSRKSILSGITNGIDVTEWDPSCDKHIASNYSADDLSGKAECKISLQKELGLPVRPDCPMIGFIGRLDYQKGIDLIRLAMPELMEADVQFVMLGSGNPIYEDWMRATESAYKDKFRGWVGFNVPISHKITAGCDILLMPSAFEPCGLNQLYAMRYGTIPVVHETGGLRDTVHNYNPYTEESKAESTGWTFSPLTKDSMLAALRYAIQTYNEHKPSWEGLMIRGMTRDYTWVNAATQYEQVIEWAFTDPPYC

SEQ ID NO: 216148 - protein, 87 aa, Glycine max
  Clone ID: PAT_MRT3847_37210C.1.pep
YTANSTLIIWQPSKTKTYTIEIVGTMARESQGLERPKPNLRIRPFIYSKNSLLKLPWLNSHFCSPMCNLLINVSLKDENTKFSPCPC

SEQ ID NO: 216149 - protein, 78 aa, Glycine max
  Clone ID: PAT_MRT3847_37211C.1.pep
KKNYTHIVYLLNCNYKHTFILSFITFLLHFLGFLLHLSLSPPTFFSFLFLSSSTRNGMYIFLRYFNFIPLIKIADAWV

SEQ ID NO: 216150 - protein, 38 aa, Glycine max
  Clone ID: PAT_MRT3847_37212C.1.pep
SARLTGSGGASVACSTAQTVELDSAWSNHPVSFGRTAP

SEQ ID NO: 216151 - protein, 48 aa, Glycine max
  Clone ID: PAT_MRT3847_37213C.1.pep
LWESELKNFWPGPYTKTIGLTIALLGPTKTPPPKLIGQTRGGLPGFSP

SEQ ID NO: 216152 - protein, 35 aa, Glycine max
  Clone ID: PAT_MRT3847_37214C.1.pep
VARTQQTRLHFPSRSYTTEGSLTKTKSPYIPCCKA

SEQ ID NO: 216153 - protein, 54 aa, Glycine max
  Clone ID: PAT_MRT3847_37215C.1.pep
LGYEIKCQPRLIRSLEFHSTLLIEKVHFHNVRKHLCGMQIWLTLREGLLYCECC

SEQ ID NO: 216154 - protein, 44 aa, Glycine max
  Clone ID: PAT_MRT3847_37216C.1.pep
RLREDDRRDSSNGAADLTSSEQKPRKKKVIISHENISNNSFSNV

SEQ ID NO: 216155 - protein, 89 aa, Glycine max
  Clone ID: PAT_MRT3847_37217C.1.pep
PPKRKMASPKFFLEIFFPKSGTKKFEKTFGGGEFFASQKRAPNNFFRAGGEGFSQDWKNLGSGGMGVTPFWAGFLERGVPFGRNNWGPV

SEQ ID NO: 216156 - protein, 102 aa, Glycine max
  unsure (1)..(102): unsure at all Xaa locations
  Clone ID: PAT_MRT3847_37218C.1.pep
EPYGRLNRAFKEAPLPIGGELGGEELLGQLLKDFTPQAEGRAKKKGPKKRSFSGGITPGKGDPGKPIGHPSLNSPKGTIKGPXXPTGNTPHFGRTGDKGXKF

SEQ ID NO: 216157 - protein, 121 aa, Glycine max
  Clone ID: PAT_MRT3847_37219C.1.pep
MGWIPCSGYSGTKNKVEKMEVQDSLVGQIKATPGKLKRNSSTKSKDTSKNGNPDHIAAQTFAFRELATATRNFRNDCLLGEGGFGRVYKGRLESINQVVAIKQLDRNGLQGNREFLVEVLM

SEQ ID NO: 216158 - protein, 82 aa, Glycine max
  Clone ID: PAT_MRT3847_3721C.1.pep
DKTRKQSFIFEKKGEKTWIYHGIRVTYLAYLDSRTAQLPTPHELQIRGVGDVILKLPQTPCMFFPKGTLQFFGSKKKKTLGR

SEQ ID NO: 216159 - protein, 124 aa, Glycine max
  unsure (1)..(124): unsure at all Xaa locations
  Clone ID: PAT_MRT3847_37220C.1.pep
HEERMDKEANRGTPGKGNLAAEETTGTMGKRMGRSSGENEEANRRALRVLXXTAPGAPKDVSGASHREEARHQSKAAGEPHXEVMKEAGVPPGSRXDKGTGERAGTKGETAAQGQEGHGQRGSK

SEQ ID NO: 216160 - protein, 69 aa, Glycine max
  Clone ID: PAT_MRT3847_37221C.1.pep
VYASDVAHRRWWKVHDAMDENLQKLCRLTRQRRMELNWERRKAGKLGLPDMHWKINVTDPRRAGSMLIG

SEQ ID NO: 216161 - protein, 127 aa, Glycine max
  Clone ID: PAT_MRT3847_37222C.1.pep
LSVSQIKDRIKQFEKVGKTVIISNQPYFYKKAELFPGSAFVIGADTAVRLINPEYYDGDYNKMLKILVGCKETGCTFLVGGRNVDGAFKVLDDIDVPKELKDMFVSIPAEQFRMDISSTEIRNRSGM

SEQ ID NO: 216162 - protein, 72 aa, Glycine max
  Clone ID: PAT_MRT3847_37223C.1.pep
LAGLQTLLFQINHLVVKVIRGLGQFPWHPLPHFPQPKAVLGLSLVPPPQQLGIKVLNASARKGATAAILLVV

SEQ ID NO: 216163 - protein, 70 aa, Glycine max
  Clone ID: PAT_MRT3847_37224C.1.pep
GSSNKMLKILVGCKETGCTFLVGGRNVDGAFKVLDDIDVPKELKDMFVSIPAEQFRMDISSTEIRNRSGM

SEQ ID NO: 216164 - protein, 88 aa, Glycine max
  Clone ID: PAT_MRT3847_37225C.1.pep
GVPAFLFSFTLCVSWKAHCPDGKRTIDDSATNGEINPGVFTFSLLEDIPSSHTAGQALALHALKTLVLSFYRRLKDNIAARLKCPHPP

SEQ ID NO: 216165 - protein, 42 aa, Glycine max
  Clone ID: PAT_MRT3847_37226C.1.pep
PKTDDVYTPFSLYPWPRQLHVPVLLNPVFHCTHSINKPSNPH

SEQ ID NO: 216166 - protein, 93 aa, Glycine max
  Clone ID: PAT_MRT3847_37227C.1.pep
PQTETQQQTQQGNNKRKKGNPGGKKTRIRDPEGKLKKGGKKKRHQGQGQRRPRPEPLSVKTQPWWKTNHQALKTKIIQIKLDHVGDMKTQLRP

SEQ ID NO: 216167 - protein, 40 aa, Glycine max
  Clone ID: PAT_MRT3847_37228C.1.pep
ILYQCFNYKNHLYKNSLSIIFNFSDLVFLFNLFINPFHCY

SEQ ID NO: 216168 - protein, 567 aa, Glycine max
  Clone ID: PAT_MRT3847_37229C.1.pep
MSDLEAPLRPKRKKVWVDYFVQFRWILVIFVVLPISFTIYFLTYLGDVRSEWKSYKTRQKEHDENVKKVIKRLKQRNPSKDGLVCTARKPWIAVGMRNVDYKRARHFEVDLSAFRNVLEIDKERMIARVEPLVNMGQISRVTVPMNLSLAVVAELDDLTVGGLINGYGIEGSSHKYGLFADTVVAYEIILADGTLVRATKDNEYSDLYYAIPWSQGTLGLLVAAEIRLIPVKEYMKLTYKPVVGTLQDLAQAYCDSFAPRDGDQDNEEKVPDFVEGMIYTPTEGVMMTGRYASKEEAKKKGNKINSVGWWFKPWFYQHAQTALKKGEFVEYIPTREYYHRHTRCLYWEGKLILPFADQFWFRYLFGWLMPPKVSLLKATQGDAIRNYYHEMHVIQDMLVPLYKVGDALEWVHREMEVYPIWLCPHKLFKLPVKTMIYPEPGFELHRRQGDTQTAQMYTDVGVYYAPGPVLRGEVFDGAEAVRKMENWLIENHGFQPQYAVSELSEKNFWRMFDAGLYEHTRRKYGAVGTFMSVYYKSKKGRKTEKEVQEAEQAHLETAYAEVDQPVD

SEQ ID NO: 216169 - protein, 65 aa, Glycine max
  Clone ID: PAT_MRT3847_3722C.1.pep
RGVKGGAFPNFDSMNGFAPGFFFEKNPFWGNIIVFGTRNNYTLVFWLCMPPLVYPLLACPPFYFK

SEQ ID NO: 216170 - protein, 45 aa, Glycine max
  Clone ID: PAT_MRT3847_37230C.1.pep
IYTDIAAERGLLLDSSFALINDGYIERENQMLIQMKSLILSIYSL

SEQ ID NO: 216171 - protein, 103 aa, Glycine max
  Clone ID: PAT_MRT3847_37231C.1.pep
FIGINEYNEPTYSLEESLMDIFRIDYHYRHLFYLQSAIKNVVNVIGYYVWSLFDNFEWSSGYTSRFGMIFVDYKNNLKRYEKLSAQWFKNFLKKETRLYSSTK

SEQ ID NO: 216172 - protein, 41 aa, Glycine max
  Clone ID: PAT_MRT3847_37232C.1.pep
MFINIQCILKFLHIIYMRLGGPSIKFDHSCSILVNTQLGCP

SEQ ID NO: 216173 - protein, 150 aa, Glycine max
  Clone ID: PAT_MRT3847_37233C.1.pep
FWPLCDFILIRELFSTGWFDYRFEGGNIGNYPIRSAEGTGGDRFMVPLLGQKYISVFKPIDEEPMAVNNPRGLPFSEDGEGLKKGTTVGQGAFREVAAYILDHPMSGRRSLFGDEKGFAGVPPTVMVKCLHKGFNHPGELTTKIGSCKCS

SEQ ID NO: 216174 - protein, 472 aa, Glycine max
  Clone ID: PAT_MRT3847_37234C.1.pep
FNLHGWKLAVECALEPNRLEKEKRFADPEQQEVVCNGELLEDQTLIDGICSKYNDAVIHLFVRVKYAEVRTGQDELSVVAKELKDTKDYDVSETNCRKKYDVSKEDTGREYGVVEPIVPRKAIDRDLLLEPVIVNKKIELASEVWNMINSTYEGLDSGNYPIRSAEGTGGAYFMLDSTGQKYISVFKPIDEEPMAVNNPRGLPFSEDGEGLKKGTTVGQGAFREVAAYILDHPMSGRRSLFGDEKGFAGVPPTVMVKCLHKGFNHPGDLTAKIGSLQMFMENNGSCEDIGPGAFPVKEVHKISVLDMRLANADRHAGNILIGKEEENDQAVLIPIDHGYCLPTSFEDCTFEWLYWPQARQPYSPEIIDYIKSLDADEDIALLKFHGWNLPVECARTLQISTMLLKKGVKRGMTPFAIGSLMCRESLNKESVIEGIVKAALDSVLPCTSEATFLDTVSEIMDQHLDEITGSIS

SEQ ID NO: 216175 - protein, 38 aa, Glycine max
  Clone ID: PAT_MRT3847_37235C.1.pep
SRLIFIPSLKHNKSHFDNFFYFWSFLLLIIHQMVGDVA

SEQ ID NO: 216176 - protein, 326 aa, Glycine max
  Clone ID: PAT_MRT3847_37236C.1.pep
MAPESEAPPNFWGHTPEEEYYTSQGVRNTKSHFETPNGKIFTQSFLPLNLQPHQVKATVFMTHGYGSDTGWLFQKICINFATWGYAVFAADLLGHGRSDGLQCYLGDMDKIAATSLSFFLHVRNSHPYKNLPAFLFGESMGGLATLLMYFKSEPDTWTGLMFSAPLFVIPEDMKPSRVHLFMYGLLFGLADTWAAMPDNKMVGKAIRDPEKLKVIASNPRRYTGPPRVGTMRELLRVTQYVQDNFSKVTTPFFTAHGTSDGVTCPSSSKLLYEKGSSEDKTLKLYDGMYHSLIQGEPDESANLVLGDMREWIDERVRRYGPNKNSQ

SEQ ID NO: 216177 - protein, 210 aa, Glycine max
  Clone ID: PAT_MRT3847_37237C.1.pep
LEVSASLAPAGTYLSKFAAGAESGKETRNQVSASKADVSLQGDGPPQAVQQPAVPIESGGLPDGGVPPQSSAQASAMPPSQLQEPTSSQPLDLSIFGVPNASDSGKPPQTGSPPSSVRPGQVPREAAASVCFKTGLAHLELNHLSDALSCFDESFLALAKEQSRGSDIQAQAAICAQYKITVTLLQEIGRLQKVHGPSAISAKDEMARLS

SEQ ID NO: 216178 - protein, 48 aa, Glycine max
  Clone ID: PAT_MRT3847_37238C.1.pep
FASWNRSNLAQGVLTGGFLKHNERLRLTKSQGSGHEQLRVYYCDTCLA

SEQ ID NO: 216179 - protein, 129 aa, Glycine max
  unsure (1)..(129): unsure at all Xaa locations
  Clone ID: PAT_MRT3847_37239C.1.pep
MDLPPSATSEVNCLNGGTWRRSMTGASESTKAGPHGVGVAFRIHSMSYIYPSWLTGDXKYWRNAKSYSRSGLXFYGGRYKLWTKHEKNLALTDDEMMGVIKNRGNPADGLAQRAHEFVQHGAHERLKGQ

SEQ ID NO: 216180 - protein, 46 aa, Glycine max
  Clone ID: PAT_MRT3847_3723C.1.pep
TTTTDTLCMRVSPVKAQLEGAAMGVPAENDGCKCGPNWSCNPFTCK

SEQ ID NO: 216181 - protein, 35 aa, Glycine max
  Clone ID: PAT_MRT3847_37240C.1.pep
CYYLTKASRFDFCFAFLGVILWSCNFVSMYKNYLL

SEQ ID NO: 216182 - protein, 40 aa, Glycine max
  Clone ID: PAT_MRT3847_37241C.1.pep
AAFFLGVFFLRLTKKIFFKLNLTNLAQILPQSACNQAKLN

SEQ ID NO: 216183 - protein, 50 aa, Glycine max
  Clone ID: PAT_MRT3847_37242C.1.pep
ICACSGLHRGSFSCPFLIALLVGMPRCSIPVITFQYRPLAVFWCGFGKLT

SEQ ID NO: 216184 - protein, 122 aa, Glycine max
  Clone ID: PAT_MRT3847_37243C.1.pep
MDPTQSNDVQQYPQTLISEPKDSPMHDANESLFDSMVCDSSSRLVPTGLTRSDNAEEECFMFVNAGGDAFSEAAGGITFLGDTYFDGGNVMRTNEQIVEGGDYPFIYQSARLGSFCYRFANL

SEQ ID NO: 216185 - protein, 133 aa, Glycine max
  unsure (1)..(133): unsure at all Xaa locations
  Clone ID: PAT_MRT3847_37244C.1.pep
GEPRGGPRGPPYKPPPRKKGEAPPHPKRGGPRGXPPPPGVKKPPQKKKEGPPKKTGPRKNPGGEEPKKGAGQNLKRGDGVGGPPPKKKRXGPPRGGPPXWGPKXGKGNFPPGGRKKIFVPKLGYPQQEPGGAP

SEQ ID NO: 216186 - protein, 104 aa, Glycine max
  Clone ID: PAT_MRT3847_37245C.1.pep
QIGKPESTATRSKSDLHSHDKRPFMPPHNTWKIETERGGKSSYLERIGWVMGYLSLWIDLSAKQRRRLYMYVLSQRELTERDLNIMRKRVIRRSGGERNTTERV

SEQ ID NO: 216187 - protein, 187 aa, Glycine max
  Clone ID: PAT_MRT3847_37246C.1.pep
HAYAEKGGLNINNNRGENFYYLYQQILAHYNLHRMANYLPEMNDFDWNMPIWYGYNPDLKYHSGKAFPARPENSELTTLKCYTVEDVKMIEKRIKDAIDSGYVIGKDGHVISIMNHIHGINILGNIMEGNYDAVNCRYYGCYTTMLHNLVALIVDPTNEHGVAPRVIGHYETALREPGFYYMQKHIN

SEQ ID NO: 216188 - protein, 125 aa, Glycine max
  Clone ID: PAT_MRT3847_37247C.1.pep
GSLGDNIGLKEEFITNVCGLAFQAHMSPENLYHFHEIEIFSEIYHVFSFSGSWNPHEWLVNNKPFGETKIDHALFPSLRSIGNDEAALVNEGFAKRFDHILKTSSIKSEVNKAMVDGKQVVFTGH

SEQ ID NO: 216189 - protein, 102 aa, Glycine max
  Clone ID: PAT_MRT3847_37248C.1.pep
QRFDMQELLRASAEILGSGCFSSSYKAALLNGPTIVVKRFKQMNNVGKEEFQEHMRRIGRLTHPNLLPPVAYYYRKEEKLVVTDYVQNGSLAVRLHGHQSIG

SEQ ID NO: 216190 - protein, 373 aa, Glycine max
  Clone ID: PAT_MRT3847_37249C.1.pep
MGRAPCCSKVGLHKGPWTPKEDALLTKYIQAHGEGQWKSLPKKAGLLRCGKSCRLRWMNYLRPDIKRGNIAPEEDDLIIRMHSLLGNRWSLIAGRLPGRTDNEIKNYWNTHLSKKLKIQGTEDTDTHKQVQITMGRSPCCNKNGLKKGPWTPEEDDLIIRMHSLLGNRWSLIAGRLPGRTDNEIKNYWNTHLSKKLKIQGTEDTDTHKMLENPQEEAASDGGNNNKKKKKKKNGGKKNKQKNKGKENDEPPKTQVYLPKPIRVKAMYLQRTDSNTFTFDSNSASGSTSQEKEESPVTKESNVVSEVGNVGEESDGFGFFSEDHDLVNVSDIECHSYFPTDHGNLQQLYEEYFQLLNMDHGQFELNSFAESLLD

SEQ ID NO: 216191 - protein, 72 aa, Glycine max
  Clone ID: PAT_MRT3847_3724C.1.pep
RLALCRPLRDTLQIALQEPAHSYLGQLSQDTKLRALTLQLRPIMPRHLLVDKRILAALSRLVECKEQNNCRL

SEQ ID NO: 216192 - protein, 71 aa, Glycine max
  Clone ID: PAT_MRT3847_37250C.1.pep
KKSKIYHSQIQRSRLDYITSRLAPLIFSTITWTLLRDHIFQSQLKNGDNICSERTSLIERDHIQYVDSFFI

SEQ ID NO: 216193 - protein, 75 aa, Glycine max
  Clone ID: PAT_MRT3847_37251C.1.pep
TKGGRMDCGSVALVYNHYHSHSMIPIFHHGIQKRGKCEHRTFYASITIDWCMQELDLTWQCDTAKPLSEESLLTP

SEQ ID NO: 216194 - protein, 48 aa, Glycine max
  Clone ID: PAT_MRT3847_37252C.1.pep
SQTSCDPCRVISVTIQLRHRHTLTYSQLNSSSASHVLKAHSQKNKRLP

SEQ ID NO: 216195 - protein, 195 aa, Glycine max
  unsure (1)..(195): unsure at all Xaa locations
  Clone ID: PAT_MRT3847_37253C.1.pep
MSSHGGSSLRNGSLSNSPTRAKKKAFGSEHSTPDFIARKTFTSPRTMGERTVKSLRLSKALTVPETTTVYEACRRMAARKVDALLLTDSNALLWGILTHKDIAARVIAKEINLEETPVSKVMTRNPVFVLSETLAAEALQKMVQGLLRKDKXIAAAVEGVEKHWGTSDSNTSFIESLRXQIFKLSLSTIIPENSK

SEQ ID NO: 216196 - protein, 80 aa, Glycine max
  Clone ID: PAT_MRT3847_37254C.1.pep
IFFFFFFFFFFFFFFLFFWVLLGPKYTKNPTTKITIKNKPQPLTNAPHPVPRVLPTNQQNKGYSKKKARGKKKITIINQS

SEQ ID NO: 216197 - protein, 43 aa, Glycine max
  Clone ID: PAT_MRT3847_37255C.1.pep
MVSSQEKDHRVDVRRLSYQELDIFRKRWEKAVEEDKCWVDPFQ

SEQ ID NO: 216198 - protein, 86 aa, Glycine max
  Clone ID: PAT_MRT3847_37256C.1.pep
WPLQSFYMKNWQMLVEELYVAHKLHLEPEAPIRDLRTRISCTDIESLMPIVTSTDYIHACHLCSQLTLKAMLSVQCHNLDIRMIAL

SEQ ID NO: 216199 - protein, 132 aa, Glycine max
  Clone ID: PAT_MRT3847_37257C.1.pep
LPQIEIGGSIDRSTNLGNWNSTTNRRRNDIKDEKVGPENCEEYFPGKIKPCFFRKRVDRGRVVIVICKREKNRGKICQEEKEKGKRIGRERGSWEMESLTLDLVESEENGSFAQQTLHPKLSGSRSLIFSQP

SEQ ID NO: 216200 - protein, 93 aa, Glycine max
  Clone ID: PAT_MRT3847_37258C.1.pep
VLQFVNFTDIMTKKSSPSEKETAFALAALMEIPFQYKAAIELELLGRATGRSNKIVPRPPPAPYSRLVPPARVLSNMPTFMDDERNQMVYIYD

SEQ ID NO: 216201 - protein, 45 aa, Glycine max
  unsure (1)..(45): unsure at all Xaa locations
  Clone ID: PAT_MRT3847_37259C.1.pep
MLYFKNLEASKVSTLCKSINTGCVKPLSKVSLYLGLLSQXGPKHK

SEQ ID NO: 216202 - protein, 85 aa, Glycine max
  unsure (1)..(85): unsure at all Xaa locations
  Clone ID: PAT_MRT3847_3725C.1.pep
LVSSWIEPLQEEAELGYEIDYISRYIDEGGLTGERKXWVPRRGXTPLDPDAHGFIYSNPMETSFKQRCLEELKLHNKKLLKTLQN

SEQ ID NO: 216203 - protein, 97 aa, Glycine max
  unsure (1)..(97): unsure at all Xaa locations
  Clone ID: PAT_MRT3847_37260C.1.pep
METEDRFIHHAHRPKYDCFLFDLDDAVYALRAALAKPCVQNSKDYTXEKLGIHPSKSDDLSNLVYKXHGTAIAVLRAIGYDLPYDEYYSXAHGRSPY

SEQ ID NO: 216204 - protein, 308 aa, Glycine max
  Clone ID: PAT_MRT3847_37261C.1.pep
GSRKENVKPSLFTYRILIDSKGQSNDIAGMEQVFETMKEEGFEPDIQIQALLARHYTSSGLKEKAEAMLKEMEGENLKENQWVCATLLRLYANLGKADEVERIWKVCESKPRVDDCLAAVEAWGKLDKIEEAEAVFEMASKKWKLNSKNYSILLKIYANNKMLAKGKDLIKRMADSGLRIGPLTWNALVKLYIQAGEVEKADSVLQKAIQQSQLQPMFTTYLDILEQYAKRGDVHNSEKIFLKMRQAGYTSRISQFKVLMQAYVNAEVPAYGIRERMKADNLFPNKTLANQLFLVDAFRKNPVSDLLD

SEQ ID NO: 216205 - protein, 40 aa, Glycine max
  Clone ID: PAT_MRT3847_37262C.1.pep
LYSLADPQWGQLPPQSNFVFYLICQVIIFSHKKISITPIR

SEQ ID NO: 216206 - protein, 61 aa, Glycine max
  unsure (1)..(61): unsure at all Xaa locations
  Clone ID: PAT_MRT3847_37263C.1.pep
MQTTNALLISPVLIRSCTRGLIRPVSASLLFRPEAPSKKPSCCSXXLQVARREFQTSVISR

SEQ ID NO: 216207 - protein, 46 aa, Glycine max
  Clone ID: PAT_MRT3847_37264C.1.pep
RTLSITYSNILSPESKHIVISYKNSINFYKILCLIILNMEFLILST

SEQ ID NO: 216208 - protein, 44 aa, Glycine max
  Clone ID: PAT_MRT3847_37265C.1.pep
IKLSSLTKLLVSLNHKSNHELNKFLLSQVGSIQLNLFSNLVMLV

SEQ ID NO: 216209 - protein, 53 aa, Glycine max
  Clone ID: PAT_MRT3847_37266C.1.pep
MFHGVRSQKLWEQGDMAIKTQVPFSLVGFLSCIAHCMVCFLSIHTEHGLIKYV

SEQ ID NO: 216210 - protein, 161 aa, Glycine max
  Clone ID: PAT_MRT3847_37267C.1.pep
TREHPHACPSKIDPVRQLDWKNFQQSSEIIDVLSTIHSEIPRGVVLGDYVIEYGDDDSADEFEDFPGDEGNWWTSCILYHAFNNFRSSRNRRRTRVGDQSRVNRHLSSDTSNSDEGSVASVEYGEYRLDEIDDDFVSTIGHLKGESGFRRSRRRHSRSNDN

SEQ ID NO: 216211 - protein, 77 aa, Glycine max
  unsure (1)..(77): unsure at all Xaa locations
  Clone ID: PAT_MRT3847_37268C.1.pep
LIVQVIRIGQFGGLVYIEVTQIYKLKGGLLPIKKIVDIKFFITFLNFILSRCYKISLNXFFVSIKRSIILCLLTLFG

SEQ ID NO: 216212 - protein, 563 aa, Glycine max
  Clone ID: PAT_MRT3847_37269C.1.pep
MAKGEDALIRKKNKKLRKKNSSGSSSVSAKVAAVIAAKKRRKAGKRRMCQGMCFSLPTLDDPFNDRGGKEETKTKGPKKKSHSKPKDKMDHLNGKSADGKKGAVGGRKIARELNDLQRENESVTASNNLTHKCIINSERKNIDMTEMAHLCGTKQRDCDISEFPSKFIFWCLSSIENALRHGDAYTDGEGNSFFLNPWGLEFLKCYSTGKDLIETSGTSATAEQIAWMVSGAADTFVRKEKEGLSFPGPFLLFLVPSQEKSTQVRTVCKPLKSVGIHTVSIHPGASLDHQIQGLKTCEPEFLVSTPERLLELVSTKAIDISGVSMLVIDGLNTICSAGHADTVKSIKNCISGNPRVVIFNDCVSHMSIPMVRYLLTGSICRVSLNNSINSLSSYIIQSVEVCTSEEDKVVMSIEALDQFQSNSTQNSNMLYILSKDVKCHKLVKTLKSKGYSVSLDSDAANINDRVDSDRRAAVSLIDLVQISTTDIGTYDVVVLPSFVPSIDTYVHILTKMARTSVNGVLHSFLTKRDTELAAPLIAVLEQCGQEVPQTLQDLNHTSNMLED

SEQ ID NO: 216213 - protein, 92 aa, Glycine max
  Clone ID: PAT_MRT3847_3726C.1.pep
MVRVSKEALQKAAKTLSEILVCPLSKQPLRYCEESNSLISDAIGVAFPIKNGIPCLVPRDGKILEEEDASKPDNDTNLSAVNEENQGRSGLR

SEQ ID NO: 216214 - protein, 88 aa, Glycine max
  Clone ID: PAT_MRT3847_37270C.1.pep
GLKHVEKGLYHVKGAWQRERAGTHQYVTRRGKSKVLSFPCSTLLLAFLQSSFPFTGIMFLFLLLDDHVFLFNPGSEIMIVFQLIGVRD

SEQ ID NO: 216215 - protein, 69 aa, Glycine max
  unsure (1)..(69): unsure at all Xaa locations
  Clone ID: PAT_MRT3847_37271C.1.pep
AITYSEADYMTICIYTIDRSVCGCMTAVIGNYFRDAGLSGLSIIKKCSXPLACFLTPGMNICLAGEAND

SEQ ID NO: 216216 - protein, 139 aa, Glycine max
  Clone ID: PAT_MRT3847_37272C.1.pep
QYELSKALAKHSDHCRDNSLFFLPSVIYFITLNIVIQRTAQMDCWLYFLIFLLLVNYINIVLPSPFFFSVTPNFSCSSLSHCLILFFIFSQFFRFLFTTLPFCPYIMFMTALSLVISSEQLSKISIFPSPSLDSYQYFP

SEQ ID NO: 216217 - protein, 56 aa, Glycine max
  Clone ID: PAT_MRT3847_37273C.1.pep
ANGDDCLLCATDNTPQWLNAPMGPKTLCNSRGGLVQTGLLVPHDTTAARPTLVLTK

SEQ ID NO: 216218 - protein, 46 aa, Glycine max
  Clone ID: PAT_MRT3847_37274C.1.pep
LIIDIMSVTNQVSLLEFQAKWQMRERLIAPVAFPFAALLTAVRTRA

SEQ ID NO: 216219 - protein, 67 aa, Glycine max
  Clone ID: PAT_MRT3847_37275C.1.pep
QSHILGCLVAIPSLLLYPPSRSVKLRRVAPTKRSTKPAVFSALRRRQLSIIQRPRLRILPCCKSFWS

SEQ ID NO: 216220 - protein, 363 aa, Glycine max
  Clone ID: PAT_MRT3847_37276C.1.pep
PKQEKSDLRVIDDARTADRLLNWINKQLGSSFGLDDQKFQNELLSSNVSDPGQIARAIYDVEEATSTAFDIILEHKMIKPGTRASLIKFLQLLAAHHPSRRCRKGTAEFLVSFDDLYPTDFGSTNKQEDDKSSVRNLKICGKDVPRGYWMFCRGSKNETRGFSCGLWVLLHSLSVRIDDGESQFTFNAICDFVHNFFICEECRQHFYKMCSSVSSPFNKARDFALWLWSSHNKVNERLMKEEASLGTADPKFPKTIWPPKQLCSSCYLSVDQRNNKIEWNQDEVFKFLADYYSKTLASLYKDKSIVGNDGSEGAVEDLIVATNAIVVPVGAALAIAVASCAFGALACYWRSQQKSRKPRRTWK

SEQ ID NO: 216221 - protein, 157 aa, Glycine max
  Clone ID: PAT_MRT3847_37277C.1.pep
MPCPPFNKARDFALWLWSSHNKVNERLMKEEASLGTADPKFPKTIWPPKQLCSSCYLSVDQRNNIIEWNQDEVFKFLADYYSKTLASLYKDKSIVGNDGSEGAVEDLIVATNAIVVPVGAALAIAVASCAFGALACYWRSQQKSRKYFHHLHSLKNI

SEQ ID NO: 216222 - protein, 120 aa, Glycine max
  unsure (1)..(120): unsure at all Xaa locations
  Clone ID: PAT_MRT3847_37278C.1.pep
RSLMIFVAARMIAWQSHAYHMFPXRMNTXYGARTPSARSASCTLDPKAHNMFCFDTITAELVQTSKACIHDELLISVFPSAYQHAYFYTTDLXVHPKDTLELKVECTVLSNVPYYKIHGY

SEQ ID NO: 216223 - protein, 250 aa, Glycine max
  Clone ID: PAT_MRT3847_37279C.1.pep
MEAERPPLPQHNSHTKPLSRLNEYVAKTRVGKWFKLSQRNSTFTTELRAGTATFLTMAYILAVNASILSDSGGTCSVSDCVPLCSDPSTPLSACSGPSLRVIQPDVSCKFSPVNPGYAACLENTRKDLIVATIASSLIGCFIMGTFANLPLGLAPGMGSNAYFAYTVVGFHGSGNVSYQSALAAVFIEGTIFLLVSAIGLRAKLAKLVPKPVRISSSAGIGFFLALIGLQNNQGIGLIGYSPSTLVTLGA

SEQ ID NO: 216224 - protein, 77 aa, Glycine max
  Clone ID: PAT_MRT3847_3727C.1.pep
KGKQDEYEVRHTQPGAVIKDGRQSLGGSFILQPWRARRTQIRNSAFGQPIITTAYMKGGRPSYMKNIKNILVKKLWL

SEQ ID NO: 216225 - protein, 37 aa, Glycine max
  Clone ID: PAT_MRT3847_37280C.1.pep
SPIIFAIFLGRAYTILYLPSLTAQFVLETDDDPFQNG

SEQ ID NO: 216226 - protein, 128 aa, Glycine max
  Clone ID: PAT_MRT3847_37281C.1.pep
FMIKGEKLKSLIAQPFPETFAQPSLTISRSTNSDFCCRRAPAGVDAHGHREIRAGAVSGGGPHGAAALRLAPVTAVIGGVVVVGVVIGVVVGGEGEFGRGCAIGEAGVLEKHKFSLFLSFHSEVSTVS

SEQ ID NO: 216227 - protein, 38 aa, Glycine max
  Clone ID: PAT_MRT3847_37282C.1.pep
RSSHSRLRTSWVSSGTRSHPPSWGLHRSMTIHPLELNS

SEQ ID NO: 216228 - protein, 204 aa, Glycine max
  unsure (1)..(204): unsure at all Xaa locations
  Clone ID: PAT_MRT3847_37283C.1.pep
MSLRGVAEIESNGILKLTDDSSRVVGQAFYPTGLRFKNSSDGKAFSFSSSFALIIFPEYEKLGGHGLAFTIAXFGTRKAHPSQYLGILDSSNIGNFSNHLFAVEFDTAKDFEFGDIDDNHVGIDINSLASNASASAGYYTGDDDSSKQNLTLQSRVPILAWVDYDAAKSVVHVTISASSTKPKRPLLSYHVDLSPILKESMYVG

SEQ ID NO: 216229 - protein, 66 aa, Glycine max
  Clone ID: PAT_MRT3847_37284C.1.pep
MDQSQNASHQAGQAMGQAREKASNMMNSAGNAAQNVKESCQETGQQMQQKAQGAADAAKNAVGANK

SEQ ID NO: 216230 - protein, 79 aa, Glycine max
  unsure (1)..(79): unsure at all Xaa locations
  Clone ID: PAT_MRT3847_37285C.1.pep
SXASKIXLESLNPXXIRHNQSQXXXIXXXXVLRNXINXTNKCXXXFPLRCSGMMEXPXLMPCVRXXXNFHXSVRXQGVL

SEQ ID NO: 216231 - protein, 44 aa, Glycine max
  Clone ID: PAT_MRT3847_37286C.1.pep
LARAESSRGGFLLLHLLLGPIVLYSMFLYLRCMGWILHSNWGWN

SEQ ID NO: 216232 - protein, 35 aa, Glycine max
  Clone ID: PAT_MRT3847_37287C.1.pep
GPILCSNVAALILGFSCLSFSLSSSLECEPAPVYI

SEQ ID NO: 216233 - protein, 67 aa, Glycine max
  Clone ID: PAT_MRT3847_37288C.1.pep
QIPTEEELQDMINEVDNSARAAREFVEFLNLMAKKMKETDAEEDLKEAFKVFDKDQNGYISASEVYV

SEQ ID NO: 216234 - protein, 44 aa, Glycine max
  Clone ID: PAT_MRT3847_37289C.1.pep
VNTQAEERRALVEAKRAEQIRKAKERAAKDRAAGSSTKKASGCF

SEQ ID NO: 216235 - protein, 280 aa, Glycine max
  Clone ID: PAT_MRT3847_3728C.1.pep
KKKQVPEWMNSSLWSTPSDPPASVSVREEPPTIPTNQNASPPLSSSSSVSSPTATADDISRHALFFVQLLAELSRKVIDMRELRRVVASQGISDAGALRPTLWKLLLGYLPPDRSLWSSELAKKRSQYKNFKDDLLTNPSEITRRMYNSNSAALGIDDAKSHTQTRLLLSRSRITHQDHPLSLVKTSIWNQFFQDTEIIDQIDRDVNRTHPDIHFFSGDSLFAKSNQEALKTILIVFAKLNSGIRYFQGMNEVLAPLFYVVKNDPDEENETFAEANTFFW

SEQ ID NO: 216236 - protein, 30 aa, Glycine max
  Clone ID: PAT_MRT3847_37290C.1.pep
SSSVHNNITPILESQQPFKVLAYILRRVLK

SEQ ID NO: 216237 - protein, 163 aa, Glycine max
  Clone ID: PAT_MRT3847_37291C.1.pep
SSSFLFPFSHYPLFSFSLSLSLLSLDMSSAGGDSGGSATSGEPRQYFCHQCNRTVSISPSPSSDLLCPTCNGGFLEELEIPIPDPNPPNPFFSDFPLGGAATIPLVLPGAATSPPFGDLSALFGDRSDAAASDAFNPLVFLQNYFQTLRAGGGGNRQLLIEYF

SEQ ID NO: 216238 - protein, 84 aa, Glycine max
  Clone ID: PAT_MRT3847_37292C.1.pep
QYYFPVLGVFLFRSEVHGDLRQMFHLSGTDNPIIGTFSNFFYSNLSLHLFSFFKILHIITTRSCGVHSRIRGVEISQVATRSTT

SEQ ID NO: 216239 - protein, 502 aa, Glycine max
  unsure (1)..(502): unsure at all Xaa locations
  Clone ID: PAT_MRT3847_37293C.1.pep
MNKRTTLLIRTLLFLFVLNSLYLSLYFTHKPSSSSPSEEKEKSELEPDTYLTPFSHEPHSSKPWPILPSYLPWTTSARSHSCEAYFGNGFTRRRDALLSRGGAGWFRCHHNDALRSSVCEGGRLRMEPEKITMAKGGEDLAAVMGRTEDEEMPVFQNGAFQVDGGEGRRWTGRXLVDQEFLDEYXQGXGIDRHTMXRDLIAKIRIVRGKDFQCDEWIEEPALLVTRFEYANLFHTVTDWYSAYVSSRVTGLPNRPHLIFVDGHSKAPLEETWEACVRYAKSFSGSVCFHHAILSPLGYETAMFRGLSEHIDCYGAPAQELLQNPNDHKTARLSEFGEMVRAAFGLPLNVNHDGKPLAGHNVLFVRREDYLAHPRHSGKLESRLSNEQEVFDSLKSWASNYKGCKINLVNGLFAHMSMKDQVQAIHDASVIIGAHGAGLTHIVSALPKTVILEIISSYYRRPHFAYISRWKGLEYHAINLAGSHADPGAVIKELANIMKSLGC

SEQ ID NO: 216240 - protein, 50 aa, Glycine max
  Clone ID: PAT_MRT3847_37294C.1.pep
SLQDIWLVACLLKHKPQSFGRVDIIQNRTVSICRFIHSLKARVELRENGR

SEQ ID NO: 216241 - protein, 69 aa, Glycine max
  Clone ID: PAT_MRT3847_37295C.1.pep
VSPLYIGPPGFTFLFSVFYCVCYFFWTSFSLREVAFTNIPPSFFSPHFWAMFFLRRVRFGLPWSPLVRL

SEQ ID NO: 216242 - protein, 118 aa, Glycine max
  Clone ID: PAT_MRT3847_37296C.1.pep
KKKFFLKRGGKTQPPPSQKNQPQLKPPPENPTPRAKGTPSGGGSQGGPPPPLAGGQKKKPPGGRGGTPPGPGSSPSHGKGGGSPPPGGEKPNPEGAGRKSASPPENPPPRGEGPPSGG

SEQ ID NO: 216243 - protein, 49 aa, Glycine max
  Clone ID: PAT_MRT3847_37297C.1.pep
DPHKTDKMGTADKAHIILRRARTCQAQLVDQHWAQRSTRPAGLDKSTID

SEQ ID NO: 216244 - protein, 149 aa, Glycine max
  Clone ID: PAT_MRT3847_37298C.1.pep
SEFKAGASVYDYYATTPRDFVDHADFEDLHVKKLYMRLQALEADRESMRQAIISMRTDKAQLVLLKEIAQELCKEMSQQKKMTARSFISSFSFFTVFKWIASIVFWRKKAHQIKYMFGLPSDSGGLLMLLDKGPHVRSWRYLQSTQVGD

SEQ ID NO: 216245 - protein, 93 aa, Glycine max
  Clone ID: PAT_MRT3847_37299C.1.pep
WFKGLRPDGVARIAVSDFIGGAAVSENCLHELSYRLRDWEGKGNGVIYFGERVVPSEERSNAAVKPVKGMTVSKDSGDYKSNEVACPVSVELP

SEQ ID NO: 216246 - protein, 168 aa, Glycine max
  unsure (1)..(168): unsure at all Xaa locations
  Clone ID: PAT_MRT3847_3729C.1.pep
MHKQTHRHVWKRIRDREAGKLRANHFANRIKSNRISQLQLSNHKDIVSPHKGAINSLQVDSTEGRYLLSAASDASVAVYDVQRPTVYEAGGGGGGGISKHSSIFVVDKQHHQGHKYAVSTAIGDPIDTGXFVTGSYDHHINVWDTNSTQVAVNFIMPVYAHRAAMSSV

SEQ ID NO: 216247 - protein, 75 aa, Glycine max
  Clone ID: PAT_MRT3847_372C.1.pep
RWLLARGTLAERHPVKVVKVVARKALHKLFRKTHSKIKQASIHFLYKVSLLWVSYTSINVTFIIYTNNFYIILNF

SEQ ID NO: 216248 - protein, 61 aa, Glycine max
  Clone ID: PAT_MRT3847_37300C.1.pep
PIIGGDVVQNDLDRILLNQHFYSDYSDINAHFKTPYIILFILGSNIIIQSIFGLCATHDYN

SEQ ID NO: 216249 - protein, 114 aa, Glycine max
  Clone ID: PAT_MRT3847_37301C.1.pep
SVSNSMWSQTGQFMDFESVCEQYRTSCFAEKNCTQLFSSKPKHSRISLVAVYEKIAPGSPSSTVYTQNTNRGIICDTIKHHSLRRVAQTKLRRNSKSIVISTHPTLGAMASCSS

SEQ ID NO: 216250 - protein, 39 aa, Glycine max
  Clone ID: PAT_MRT3847_37302C.1.pep
PKNKNDWFLVYHERTINSTHYHDAEFVKTSLGLLQGLPK

SEQ ID NO: 216251 - protein, 81 aa, Glycine max
  unsure (1)..(81): unsure at all Xaa locations
  Clone ID: PAT_MRT3847_37303C.1.pep
IPIFVLGXYCACHPKSGFLVLNFCTHLVSACPISQVFYRSLAFYVKDITHSDNVWSGHPALWLTWPNQISPTGRTMSPLLS

SEQ ID NO: 216252 - protein, 44 aa, Glycine max
  Clone ID: PAT_MRT3847_37304C.1.pep
LYTPTHSKINIIIIKHILKYTYNNFFPTLINHIFSILIYSIHLT

SEQ ID NO: 216253 - protein, 177 aa, Glycine max
  Clone ID: PAT_MRT3847_37305C.1.pep
MVVKVGINGFGRIGRIVFRNAVEHQDIDIVSVNDPFIEPEYAAYMLKYDSTHGVFKGDIQVSGKNLIVNGKEITFYTERDPANIPWSEKGAEYVVESTGVFTTNEKASLHLKGGAKKVIISAPSADAPMFVMGVNEKEYKSDIPVLSNASCTTNWLAPLAKVIHDKYTIIEGSYDHH

SEQ ID NO: 216254 - protein, 84 aa, Glycine max
  Clone ID: PAT_MRT3847_37306C.1.pep
DLSSQITMVPFVFSDESNSEKYDKFFCPKLDVEELEMLLEAYFAQTNGILQRLSSVSIDLLNSFILLNTNEKDYCRFSEKEKHL

SEQ ID NO: 216255 - protein, 66 aa, Glycine max
  Clone ID: PAT_MRT3847_37307C.1.pep
GAASRTRHLGTHLLHLFSLHPVLSVTSIMASRAVLLLAKCMHPDMGVDIPSSLIPFFLKGLVQGDA

SEQ ID NO: 216256 - protein, 75 aa, Glycine max
  Clone ID: PAT_MRT3847_37308C.1.pep
MPNPKVFFDMTIGGQSAGRIVMELYADVTPRTVENFRALCTGEKGVGRSCKPLHYNGSSFQRVIPSFMCHGCDFT

SEQ ID NO: 216257 - protein, 63 aa, Glycine max
  unsure (1)..(63): unsure at all Xaa locations
  Clone ID: PAT_MRT3847_37309C.1.pep
FVXXXXXXXXXIXXXXAEXPXXXFRIXXRHXXYXXXVXRRCGXSXLRXARARAEFRAXVXVXL

SEQ ID NO: 216258 - protein, 65 aa, Glycine max
  Clone ID: PAT_MRT3847_3730C.1.pep
VTTSQPPRQYHLRKSNYDNDDTTKNNSSFQSQNDDNTSTIDNNYHENNTPFQTNNDYINLPFSHW

SEQ ID NO: 216259 - protein, 70 aa, Glycine max
  Clone ID: PAT_MRT3847_37310C.1.pep
YKYARGRAPPVKKAERQTWVYNLGFACSYCRTMVVATEVFPVLLVHRLVYVVTGHYVKCRSSYPGMLYLP

SEQ ID NO: 216260 - protein, 228 aa, Glycine max
  unsure (1)..(228): unsure at all Xaa locations
  Clone ID: PAT_MRT3847_37311C.1.pep
YKQAITGKICFSLFFCPILVSEKKHVEDWQATVHGHAAGTCLTVARTRTFVTDHKQFGARPATXTGRSAKAVHFVTFYMPLWGAILYNGFTYLQVIRMLNNATRMAVGMSGQTFVSDTRDNMRALNRWGYYPLILIGSWTFGTINRIHDFFEPNHKIFWLTFLDVGTAALMGLFNSIAYGLNSSVRRAICERLDKFWPERLNRWLPNSLKYKNLQQESELVLFKTEDQ

SEQ ID NO: 216261 - protein, 346 aa, Glycine max
  Clone ID: PAT_MRT3847_37312C.1.pep
SFEWSTTLPLVLFTIFLGFFIFYHYLVVTNKDQNRELNSKSFPPKKKKARKSVKNNITVDNRQDKPMSSAEEDILTHMETNTDTYTQMQVDGRRIGKLFVSNKEIAKGSNGTIVFEGTYEGRVVAVKRLVKAHHDVAHKEIQNLIASDRHPNIVRWDVVSGLVHLHHASAHASAHASENVLILKEKSLCAKLSDMGISKRLLEDMSSLGHTVTGCGSSGWQAPEQLVQGRQTRAVDLFSLGCILFFCMTGGRHPFGERLERDFNIVKNQKDLFLVEFIPEADDLISCLLNPNPDLRLTAIEVLHHPLFWSSEMRLSFLRDVSDRVELEDREIDSDLLKALESIAPL

SEQ ID NO: 216262 - protein, 115 aa, Glycine max
  unsure (1)..(115): unsure at all Xaa locations
  Clone ID: PAT_MRT3847_37313C.1.pep
IRLTEKTIFTCRDLDNLEDDYTPATKVTTRPAHFIRRHLNRLDDQQLRHVHAPVRGESTPRGVTLIPGDRIGPLXTRTVEQVMEAMHAAMNFEKYEVHGDRNAAPADVLESTTKN

SEQ ID NO: 216263 - protein, 61 aa, Glycine max
  unsure (1)..(61): unsure at all Xaa locations
  Clone ID: PAT_MRT3847_37314C.1.pep
SSESARVFSHLPRLCLLEFQVPPSHKNSSSPHLTHPXFSLFLFFFFITHATQLLRAFLHGI

SEQ ID NO: 216264 - protein, 132 aa, Glycine max
  Clone ID: PAT_MRT3847_37315C.1.pep
GVGFFFFSEKKKKGPGTERTPKNWENGRYKGTQIIFPPSCPKVNRGGAPFLGKGETWLPKIKGQKTGGGFIYIATRGKRALNPRKGSDFFCQRGFGPGPWIQGGALWGPFGTHSPVFLDIQEGAALKKRGGG

SEQ ID NO: 216265 - protein, 179 aa, Glycine max
  unsure (1)..(179): unsure at all Xaa locations
  Clone ID: PAT_MRT3847_37316C.1.pep
IGWKYYDPHMVMRFSVSGGVAHIHRPKIKIYMLGDAHHEEQAGNIRLDXMDEKALKKLNINKKLVNKLTKKYHAFLASEAVIKQIPILLGPGLNKAGKFPTLVADHETLESKVNESKVMVKFQLKKVLCMGVAVANVNMEEKHILQNGQLSFKKLGSFLKKNWQNVRCSYLMSSMGKSY

SEQ ID NO: 216266 - protein, 115 aa, Glycine max
  Clone ID: PAT_MRT3847_37317C.1.pep
PQNIITQIKLFQISHHKLLTKLPISFHLHLSYPYQIHLSFPYLLIITILLILMSTLFIITTTLSIMLNTVIITFTISIHTTYVSKSTTITLTKLFLHKLNIILTINTIQFYLNIT

SEQ ID NO: 216267 - protein, 94 aa, Glycine max
  Clone ID: PAT_MRT3847_37318C.1.pep
LLREMVQMYYSILRAGSAKKQVASGDGAPTRLVRLGCSPSATRSDGKPFPPWCTGWMRFGLCHGTWPCPGSHRSELANLTMMACSVSCRGDAVI

SEQ ID NO: 216268 - protein, 163 aa, Glycine max
  Clone ID: PAT_MRT3847_37319C.1.pep
MRSSNNNHDAPPPPPLLQDLKVIIHNASMIFPSKEIERKSLFLSNIDKVLSFDVETVHFFGAHKDFPPRVVNERLKNALEDALVVYDFLGGRLKLNFDTKRLEMDCNSEGAGFVVASSEYNLDQIGDLDYPNPAFAQLVQKNKDFLKHGDVPLCVAQVTSFKC

SEQ ID NO: 216269 - protein, 58 aa, Glycine max
  Clone ID: PAT_MRT3847_3731C.1.pep
TNAALSDTKFSRIRVLPSHPPQIQAIPRKLINSRILQSSFGSEFEVKNNKTTVKFKWL

SEQ ID NO: 216270 - protein, 37 aa, Glycine max
  Clone ID: PAT_MRT3847_37320C.1.pep
APTYFSSYHLHPHTWFYHFILIRTLTECYYKISFDYF

SEQ ID NO: 216271 - protein, 47 aa, Glycine max
  Clone ID: PAT_MRT3847_37321C.1.pep
LICEEVRWTLPLGILVLATIKPPSSIRFVHTYSFARNRANYCIGLVS

SEQ ID NO: 216272 - protein, 71 aa, Glycine max
  Clone ID: PAT_MRT3847_37322C.1.pep
HAAIAWHEDRTKWVGDKSQHPPRTAKDPIISWSTSYEELLSTNEPFAEPIPLPEMVDFLVDIWLEDEGFFD

SEQ ID NO: 216273 - protein, 100 aa, Glycine max
  Clone ID: PAT_MRT3847_37323C.1.pep
SSRDKAQKAHRSSHSNGKQNVKQTSTFVNHAAIAWHEDRTKWVGDKSQHPPRTAKDPIISWSTSYEELLSTNEPFAEPIPLPEMVDFLVDIWLEDEGFFD

SEQ ID NO: 216274 - protein, 54 aa, Glycine max
  Clone ID: PAT_MRT3847_37324C.1.pep
GSLIILATVLYLNSIRVPAIAAYIFCAIFGFQVLLGIVKVKKLDERERLITGIA

SEQ ID NO: 216275 - protein, 66 aa, Glycine max
  Clone ID: PAT_MRT3847_37325C.1.pep
SAHVSRYAPATPALPNQVLGDPASTRYSPYLGIIMIYSCETKNLSIMSVMGFEPYESLCSTTVLRI

SEQ ID NO: 216276 - protein, 99 aa, Glycine max
  unsure (1)..(99): unsure at all Xaa locations
  Clone ID: PAT_MRT3847_37326C.1.pep
PPPPPPPPPTPSPXSSDAGALRAINKRFEGLLTVRTKAMKGKGAWYWAHLEPILVPHPDTGLPKSVKLXCSLCDSLFFSSNPSRTAFEHXKRGTCSNFT

SEQ ID NO: 216277 - protein, 110 aa, Glycine max
  unsure (1)..(110): unsure at all Xaa locations
  Clone ID: PAT_MRT3847_37327C.1.pep
MAPQHPSTGLFVGLNKGPVVTKKELPPRPSDCKGKTSKRVPFVRNLIXEGAGFAPYXKRITELLKVGKNKRALKVAKKKLGTHKRAKKKKEEMFHVFRKIKAGGAGNKKK

SEQ ID NO: 216278 - protein, 159 aa, Glycine max
  Clone ID: PAT_MRT3847_37328C.1.pep
TSPPEKHTRVPVSSPTHSPKIIKQSDPSPMHSPNNNRTTASPPSPLTLPPSQLMAEPNIPQQPDPKTVLVQKTIDRPKPWLTGATGSHKNHGKHVTVKESESKEKGIHRKLSQSEESGMRVITIAGENRGAYMELIQSPKKHDPKYLHKKGNSNINVDG

SEQ ID NO: 216279 - protein, 51 aa, Glycine max
  Clone ID: PAT_MRT3847_37329C.1.pep
ANASLNLTGLFIAWSFYNNCIIPKKKKKKEAATVTQWHCGQKFVPLQFFLL

SEQ ID NO: 216280 - protein, 139 aa, Glycine max
  Clone ID: PAT_MRT3847_3732C.1.pep
FGMGCQKVFLGGLLKEGGFPLKPGGFFIKCDRRFWPKKKKRGGKKGFLKPRGYLVGGPKPLFWTFKVFPWGGGTSFGFFKDPLWDGGGNPLKGRGIFLKRENLTAPFFSRKKRKKKMNQTQRKKMCRKKKKKKKKKKGE

SEQ ID NO: 216281 - protein, 78 aa, Glycine max
  Clone ID: PAT_MRT3847_37330C.1.pep
TIFRIAKDQSSIQVIFFIHFLNHFTLITPYFISLAKNLVKTNTCQQPCKTILLSKSILAEKHVGNILAISNILPDAWV

SEQ ID NO: 216282 - protein, 97 aa, Glycine max
  unsure (1)..(97): unsure at all Xaa locations
  Clone ID: PAT_MRT3847_37331C.1.pep
MLYTLGRILNRSLXRFICFFFNHKTNLFFFDYMPNRNLCEVFFLKKSGHFLFDSKYXISPEAPKGLFFFHHNCLPLIFHPDLKTNNILLYFNNKTHL

SEQ ID NO: 216283 - protein, 55 aa, Glycine max
  Clone ID: PAT_MRT3847_37332C.1.pep
QARRACMIRFRLTSHDTDDKFLSIQIKMSSHEINNKGHAPPQFIAGAHIYYHNYK

SEQ ID NO: 216284 - protein, 117 aa, Glycine max
  unsure (1)..(117): unsure at all Xaa locations
  Clone ID: PAT_MRT3847_37333C.1.pep
DSDLKEIIQREGPDALPESNKTTLKTATRLREDDVAHTAFTPYVELCPHYKSAWMMRIILQLYKLANDARARRARLDGLEMSYTVIKHRMGEQSYRLASQXLEDPANRQAALVAIFQ

SEQ ID NO: 216285 - protein, 48 aa, Glycine max
  Clone ID: PAT_MRT3847_37334C.1.pep
VLFFPAASHTTGQTICVEGGLTVTGLYINQRSSTNTLCNTLVLTHILP

SEQ ID NO: 216286 - protein, 79 aa, Glycine max
  unsure (1)..(79): unsure at all Xaa locations
  Clone ID: PAT_MRT3847_37335C.1.pep
ILFYIISYFFFHIIILFIFIIFLYFFFIFIIFLFIFYYYFFFIYFIIYNFFFXFILIFFLYIFYFILFYFINFLYFFFL

SEQ ID NO: 216287 - protein, 520 aa, Glycine max
  unsure (1)..(520): unsure at all Xaa locations
  Clone ID: PAT_MRT3847_37336C.1.pep
MPLRRRVPLPLLLLLLLLSPAATSAVAFRKKHKIPGPIKTIVVIVMENRSFDHVLGWLKSSRPDIDGLTGTESNPLSIFPRSSPNVPGYDDGHSIDPQPAQASQTIRELKSCSNPSGINPXLASQLNGDYVLHSYPNIGKTMTVKEANRYAEDAVKRFLEAAKAALKAGANESAIVTMRPSLTSRVAEGXPQTSRILLILSLYRCKYGIYLAYSPXMFRXKKLRVFLVKFYDYILEFKKHAEKGKLSNYVVVEHRYLYVEVFPANDDHPSHDVAAGQMFVKEVYEVLRKSPQWEEMAVLITYDEHGGFYDHVATPVEGVPNPDGIVGPHPYYFRFDRLGVRVPTFIISPWIDKGTVIHEAEGPTPYSQYEHSSIPATVKKLFNLKSNFLTKRDAWAGTFEKYFYIRDTPRDDCPETLPDIKMLRQHGPREDSSLSEFQVELIQLASQLNGDYVRLSYPNIRITMTVKEANRYAEDAVKRFLEAAKAALKAGANESAIVTMRPSLTSRVADGDNHKLVESY

SEQ ID NO: 216288 - protein, 146 aa, Glycine max
  unsure (1)..(146): unsure at all Xaa locations
  Clone ID: PAT_MRT3847_37337C.1.pep
APVKKLFHLKSNFLTKRXDAWAGTFEKYFYIRDTPRDDCPETLSDIKMLRQHGPREDSSLSEFQVELIQLASQLNGDYVLNSYPNIGKTMTVKEANRYAEDAVKRFLEAAKAALKAGANESAIVTMRPSLTSRVAEGDHPKLVESY

SEQ ID NO: 216289 - protein, 91 aa, Glycine max
  unsure (1)..(91): unsure at all Xaa locations
  Clone ID: PAT_MRT3847_37338C.1.pep
GVWTNNLLELILDEGGPLNEADYTYTPTHGTCXFHKTKLAATASNCXGAIXDEEQTVLILLPNGPYVEAISALSMRTYNRGVLCPYLCNKH

SEQ ID NO: 216290 - protein, 56 aa, Glycine max
  Clone ID: PAT_MRT3847_37339C.1.pep
LIVMFGKPWGKILEHKLVFMSWTCIFIKPLLLWAKNYCPLYHVSLGSPFARCSRFY

SEQ ID NO: 216291 - protein, 49 aa, Glycine max
  unsure (1)..(49): unsure at all Xaa locations
  Clone ID: PAT_MRT3847_3733C.1.pep
FFXLLTLRRKKIRPKPKQKKLKIKPTPLTVNPLSNGHLAEQNHNSSFMG

SEQ ID NO: 216292 - protein, 126 aa, Glycine max
  Clone ID: PAT_MRT3847_37340C.1.pep
APPPPQMAFVFVPRAFSLRFVFNTPKPFFEAFFRPLPLGQPKRALFPPKAGANSQGPNNAFFKEKAVAGLPPAFLAAFLGGPGGAPPPGYGFSPSPQTPLLSLFFGGVVFVPPFGAVFGVSPFGPG

SEQ ID NO: 216293 - protein, 48 aa, Glycine max
  Clone ID: PAT_MRT3847_37341C.1.pep
PVRAYYISHRLHEQVCHASKLMWVATQTYQSHGCVPAPRQSIIGDYKY

SEQ ID NO: 216294 - protein, 166 aa, Glycine max
  Clone ID: PAT_MRT3847_37342C.1.pep
QENKGNGEVMGGHAATTYSAAKISVWWDIDNCRVPKGHNANSIAQNITSALVGINYAGPLSISAYGDTNRIPPPVQHALSSTGVSLNHIPTGANDASDMKILVDMLLWAVDNPAPANYLLISGDTNFSNALHQLSLRKYNILLAHPPHVSPSLAAAAKVVWLWTTL

SEQ ID NO: 216295 - protein, 86 aa, Glycine max
  unsure (1)..(86): unsure at all Xaa locations
  Clone ID: PAT_MRT3847_37343C.1.pep
MMVTDFARPVGRVRAVTSDDEWGPYNEDDXLRLMSXRDDKPTDTETEKLKMAFVDPFYGTDLGLQAPCDTRAEIVELITHLEVKNP

SEQ ID NO: 216296 - protein, 188 aa, Glycine max
  Clone ID: PAT_MRT3847_37344C.1.pep
PTRSIRLNAIEQVAEYLRRTKFQQAKLSIDMFSFDPQIRPEIVAKPFDEKSIQTEDFTKGEESMPISLVNAIDVSKIDPNFVYRPRRTGIKRMQNDEGAEQSIDPCFCSGCSCTDDCADSKTCECRRLTAVAHERLSKSLQIHKACVKGYNFRRLDDKIISGIYECNSLCKCFKSTCYNRVVQQDIKI

SEQ ID NO: 216297 - protein, 28 aa, Glycine max
  Clone ID: PAT_MRT3847_37345C.1.pep
CCLVLFSVFVAEFKARLSLVYRINHLVP

SEQ ID NO: 216298 - protein, 116 aa, Glycine max
  Clone ID: PAT_MRT3847_37346C.1.pep
MNEGAQEIEDRRRLAILDAPDHVKEFLSLWNAFIKKHRGRVLADGHINWACEAFTKYHSAEFAQSNSLAWNWRMFMIKLINQGLLKTSTFVACNNILEQCRKQNQDPQRQNQDPQS

SEQ ID NO: 216299 - protein, 51 aa, Glycine max
  Clone ID: PAT_MRT3847_37347C.1.pep
VCWFYVQGTVPDGMCHCNNYNLQSEQCFIVKDTKKKKKKKRPRRGSKANEA

SEQ ID NO: 216300 - protein, 89 aa, Glycine max
  unsure (1)..(89): unsure at all Xaa locations
  Clone ID: PAT_MRT3847_37348C.1.pep
XKXVNXAESFDXHKXPMHCFMGRDAXRYRLVGNELXSSVXXSXXXLVXFXVVLLSCXSXXISSSEFISXSXMHLAMXPYXRXYAADXXX

SEQ ID NO: 216301 - protein, 66 aa, Glycine max
  Clone ID: PAT_MRT3847_37349C.1.pep
ELTAFRKGNIGIPHLVILVPPQSNCPRFIIPFGSHFSLRSKKLMIQVTGPIPRQSMKSHSYIITTW

SEQ ID NO: 216302 - protein, 142 aa, Glycine max
  Clone ID: PAT_MRT3847_3734C.1.pep
AQWHHPDGSLIVSTDEVKSMENLKLKQEGLSDSPIAGLKLGIRKNSNGVWEVSKPENTNTSSGNNRLNEDFENHEHVIIPMSSSDTGSGRDEDDPSINQGGGEHIGYSTTNGIEMNSVVNNNIDSAYGYTVNNASATMGDAK

SEQ ID NO: 216303 - protein, 96 aa, Glycine max
  Clone ID: PAT_MRT3847_37350C.1.pep
MEGLIPFVYKAVMQYKNEKQGPIGSWLCESPSYSYMKLPGDSGRFQTSASSPFGSDYGFSASSPSSKLCTSSSTQIIVSSSVQSPHRGMNSPRVPT

SEQ ID NO: 216304 - protein, 86 aa, Glycine max
  Clone ID: PAT_MRT3847_37351C.1.pep
LAIVSEIQTDGNQTKNFRWTVAMDHWLGKILVDQVRKGLKVDKVFLTEAYNTAVSAVNAKFGLHLTKFNVKNRLKTWKKQFEQLKE

SEQ ID NO: 216305 - protein, 61 aa, Glycine max
  Clone ID: PAT_MRT3847_37352C.1.pep
ICRIIRLQLFVRFILSIDFIFLRFLEKIFPRFYCHLKYDSMRIVPKKKKKKGIREKTKILC

SEQ ID NO: 216306 - protein, 62 aa, Glycine max
  Clone ID: PAT_MRT3847_37353C.1.pep
KREQNTKSRLFLKNTRPQINPGKILWINMKHQLSVFTNQSIKQNAATYLKTNPEITNSLTPF

SEQ ID NO: 216307 - protein, 98 aa, Glycine max
  unsure (1)..(98): unsure at all Xaa locations
  Clone ID: PAT_MRT3847_37354C.1.pep
AADQKAXSAALALSSILLSAPLPGGADIFGLTPCKESKQFAKREKQPPSKXVLXXKXYEAGKKPPLGRGASAPKINRRGDNXAKQGALCGGEGEPTRT

SEQ ID NO: 216308 - protein, 81 aa, Glycine max
  unsure (1)..(81): unsure at all Xaa locations
  Clone ID: PAT_MRT3847_37355C.1.pep
LREKRDQGRDKLVFHKILFFFGFRVKWQAYKIQFKNGVGKXSQLCETLLMECEHDAKKRMIEREREKLTAYGCDTVLMLIT

SEQ ID NO: 216309 - protein, 169 aa, Glycine max
  unsure (1)..(169): unsure at all Xaa locations
  Clone ID: PAT_MRT3847_37356C.1.pep
MEIVPIPADSYNLGFIGAGKMAESIARGAVRSGVLPPSRIRTAVHSNPARRDTFESFGVTALPSNDDVFMFPLLFYFFSHXNNNRRDADFTFFFSSLSKVARDSNVVVFSGKPQLVKDVVCKLTPLLTKNKLLVSVAAGTKLKDLQVIECSILFFLTFYSCIRAASGLQ

SEQ ID NO: 216310 - protein, 99 aa, Glycine max
  Clone ID: PAT_MRT3847_37357C.1.pep
GTGARGRLKGTLLCSTSIPSIRRVTVERVAIMAKVTSRDVQEIVEKLSSDKAKAREVVFFSQTHCLYSLSSSLICDFEWILKTFVVRANDMHITMDKLT

SEQ ID NO: 216311 - protein, 105 aa, Glycine max
  Clone ID: PAT_MRT3847_37358C.1.pep
ALSRIMEPVLLSQAGCESDKCRSQETFLEEFTIAAMNCGQPHLMSNHVLSCSPVRTPLDGSCSYIPSSHTLELDKIFNSTMETLPKERNRKLSKEYVRVALDTAA

SEQ ID NO: 216312 - protein, 56 aa, Glycine max
  Clone ID: PAT_MRT3847_37359C.1.pep
PVFGKKKKKKKKKKKKKKKKKKKKKKKKKKKKKKKKKKKGGARFKGSKFTYPCLQR

SEQ ID NO: 216313 - protein, 369 aa, Glycine max
  Clone ID: PAT_MRT3847_3735C.1.pep
MEFASSSSSFPKSKSRWTYDVFINFSGEDLRKNFISHLSYALSKAGINTVLDGQQMELEELMKPEKSQISIVVFSKSYTESTWCLDELAKIIEIHETYGQRVVVVFYEIDPSHVRDQEVLNSMKKTQDYRVLEKPFSKIVQGCARYPIHWDLHNLLLINLKDCTSLSNLPREIYKLKSVETLILSGCLNIDILEEDIVQMESLTTLISDNTAVKQVPFSIVNSKSIGYISICGFKGLSHDVLHSIILSWMPTTMNPLSHIRLFSGTSSVSKHLLHNDLGDLPPMLSSISNLRSFLVQCDTEFQLDKQVKAMHIVYGVNYTELENSKNYLRSDFIGIDRYQVFNTLTDDSISEVPSLNFGLSTFTIHISY

SEQ ID NO: 216314 - protein, 74 aa, Glycine max
  Clone ID: PAT_MRT3847_37360C.1.pep
VNKIKGKMQKALPELLNEYNLPIGIFPHNTTNYKFNEETRNLVIYIPQIYKINYKDSSVLHFFTTITRLSEKKK

SEQ ID NO: 216315 - protein, 140 aa, Glycine max
  Clone ID: PAT_MRT3847_37361C.1.pep
PRVRALVPAVVDRLGDAKQPVRDAARRLLLTLMEVSSPTIIVERAGSFAWTSKSWRVREEFARTVTSAIGLFSSTELPLQRAILPPILQLLNDLNPAVRETAILCIEEMYTQAGSQFRDELQRHNLPSSLVKAINARLEG

SEQ ID NO: 216316 - protein, 78 aa, Glycine max
  unsure (1)..(78): unsure at all Xaa locations
  Clone ID: PAT_MRT3847_37362C.1.pep
MLINSTTSDPDVIALEKKNLXRIAQIIXYRLYVSFTPHKMPNIYNTLIVKGRDTLGQQIYVTXEVQQLLGNNPIRAVA

SEQ ID NO: 216317 - protein, 86 aa, Glycine max
  unsure (1)..(86): unsure at all Xaa locations
  Clone ID: PAT_MRT3847_37363C.1.pep
THPSRSSXMASVALKPALFTVXNSLVKGLPSLSRNSSSFKIFSNVNNINTYKPYXLIVSLLLRIELXSSYKKRKGKGVYQFVNKYR

SEQ ID NO: 216318 - protein, 82 aa, Glycine max
  Clone ID: PAT_MRT3847_37364C.1.pep
QFLLRIRARERKMSYCEQIQSAVDLESIGLAKHAANALCKVLTTGDITGLHLPSCRNTFHIPKTDEYHCLYPQSRGLALSPF

SEQ ID NO: 216319 - protein, 98 aa, Glycine max
  Clone ID: PAT_MRT3847_37365C.1.pep
FFFKCKFSIFIPLLVHSNWGVHRVTSEYIGELRGFNYWKKKKKGPHQILRILNFFNFLVFFFIQNHRKSWAKKITKPSKRTKVTVITAHILMLPCCHH

SEQ ID NO: 216320 - protein, 66 aa, Glycine max
  unsure (1)..(66): unsure at all Xaa locations
  Clone ID: PAT_MRT3847_37366C.1.pep
XHSRRFPSDDSSPYDSVASVSFGARSESEGVVFSELAELSAGGGCPQWWRPNGSGFTIREEIPRCR

SEQ ID NO: 216321 - protein, 151 aa, Glycine max
  unsure (1)..(151): unsure at all Xaa locations
  Clone ID: PAT_MRT3847_37367C.1.pep
AEMLEKQLASELSKMTLEEALPLARAFSHHLTLMGIAETHHRVRKGGNMVLAAKSCDDIFNNLLQDGVSPVELYKTVFKQEVEIVLTAHPTQINHRTLQYKHLKIAHLLDYNDXPDLSPEDRDMWIEDLVGEKTSIWQTDELRRSKPTPVD

SEQ ID NO: 216322 - protein, 46 aa, Glycine max
  Clone ID: PAT_MRT3847_37368C.1.pep
HLLDLKKAGATDAILENAETSLHLRSKLLKGLGVMSDDVASLSPLY

SEQ ID NO: 216323 - protein, 54 aa, Glycine max
  Clone ID: PAT_MRT3847_37369C.1.pep
KGLVVKVFAPQSEVDRHAHFTRFRSLMTDNLRKNFAKSMMHNMSNPYSICIGCR

SEQ ID NO: 216324 - protein, 56 aa, Glycine max
  unsure (1)..(56): unsure at all Xaa locations
  Clone ID: PAT_MRT3847_3736C.1.pep
LVMXEXSKXXLYQAXRSVKNXRSTCMXMQKXXXXXCRXACKLAAXXXLLQAXGXXA

SEQ ID NO: 216325 - protein, 208 aa, Glycine max
  Clone ID: PAT_MRT3847_37370C.1.pep
AQFVGHLREVSNKVHNAELKLFLEVEPGMDSCPIAPPDKTKDDILLFFKLYDPEKEELRYVGRLFVKCTGKPLEILARLNEMAGYDPEEDIALYEEIKFEPNVMCEPIDKKVTFRTSQLEDGDIICFQKASSMDIEENVRYPDVPSYLEYVHNRQVVHFRSLERPKEDDFFLEMSRLFTYDDVVERVAQQLGLDDPSKIRLTPHNCYF

SEQ ID NO: 216326 - protein, 46 aa, Glycine max
  Clone ID: PAT_MRT3847_37371C.1.pep
QQHKAGYCLFKLSSLSLSLSASLPEVNMRRETFLFRCKLDNEGHPD

SEQ ID NO: 216327 - protein, 104 aa, Glycine max
  Clone ID: PAT_MRT3847_37372C.1.pep
KEFKFQGVIVLCTSLEKKGPPVAVPVLGEGTTPTWKICADFISCFFLIFYLTTYRPGKIHFFFFKPPIMLLQFFKNFVSLCVYGDDNLISVHEYVKPLFFFFNL

SEQ ID NO: 216328 - protein, 168 aa, Glycine max
  unsure (1)..(168): unsure at all Xaa locations
  Clone ID: PAT_MRT3847_37373C.1.pep
MDSSSSFSSLRAYLNALSHTPTRLAQRALSVSTSYDEMSQVRSRSGTSMRKTLRWFDLVGLGIGGMVGAGVFVTTGHATRYAGPAVLLSYAIAGFCALLSAFCYTEFAVDMPVAGGAFSYLRVTFGEFAAFLTGANLVADYVLSNAAVARGLTVYLGTXWGISSAKWR

SEQ ID NO: 216329 - protein, 222 aa, Glycine max
  Clone ID: PAT_MRT3847_37374C.1.pep
MVRGGGLQSMDSDPIGSFFLHKPIVLNSFPAEDTNNKWKKLSLHHNMDATASNTKDNTIPFQVSLRCSPNNHGDGILVPRQFMDLGLAANNGTSTGIEPSSSSGGRSQDRSRSPNVEVASKELGTNDEEEKKEYGRGIEREDDSPSGHAHKVPRFSPPKDNNSVEAEATMRKARVSVRARSETPMIADGCQWRKYGQKMAKGNPCPRAYYRCSMASACPVRK

SEQ ID NO: 216330 - protein, 29 aa, Glycine max
  Clone ID: PAT_MRT3847_37375C.1.pep
MLPMFSLFCTYFLCVTARALFTSVAFLIF

SEQ ID NO: 216331 - protein, 274 aa, Glycine max
  unsure (1)..(274): unsure at all Xaa locations
  Clone ID: PAT_MRT3847_37376C.1.pep
IKETLINVVEEDNEKFLLKLKERIDRFGIDMPTIEVRYEHLNVEAEAYVGSRALPTFLNFLTNKVXSLFTSLHILKGKKKHVTILKDVSGIIKPHRMTLLLGPPSSGKTTFLLVLSGRLTPNLNVSGKVTYNGHGMNEFVPQRTAAYISQHDVHIGEMTVRETLAFXARCQGVGTRYDLLSELGRREKSAKIKPDPDIDVYMKAAATRGQEASVVTDYVLKVTLESKISYINLIGDSTRSGQQPFPQTVVSGEFLKCSPFQIFHHLLHAAAKTL

SEQ ID NO: 216332 - protein, 185 aa, Glycine max
  Clone ID: PAT_MRT3847_37377C.1.pep
AEVALEKLIELEPDDSGNYVILANMYAQSGKWEGVARLRQLMIDKGIKKNIACSWIEVKNKVYAFLSGDVSHPNSGAIYAELKRLEGLMREAGYVPDTGSVFHDVEEDEKTDMVCSHSERLAIAFGLISTLPGTRLLITKNLRICEDCHVAIKFISKITEREITVRDVNRYHHFRHGLCSCGDYW

SEQ ID NO: 216333 - protein, 103 aa, Glycine max
  Clone ID: PAT_MRT3847_37378C.1.pep
QYVNFFLGFTHRGPFYFKENYSWPQNKIVYTWAGFGTRSCKNFRSFFFKVFNKKFFAAPRANNLTFLFQKSNFFLVAPKKTPIFLGTFSNPVMLRVWYPLQRF

SEQ ID NO: 216334 - protein, 78 aa, Glycine max
  Clone ID: PAT_MRT3847_37379C.1.pep
MGGGNGQKAKMAREKNIEKQKAASKGSQLDSNKKAMSIQCKVCMQTFMCTTSEVKCREHAEAKHPKSDVYACFPHLKK

SEQ ID NO: 216335 - protein, 106 aa, Glycine max
  Clone ID: PAT_MRT3847_3737C.1.pep
MEISFPWILVATMVMAMRPLSFRIKANQLSYDYYKFSCPNLESIVKSELLSLFLTDATAPAAFLRLMFHDCQVQGCDASILLDSNYLAHSHSSEMISSRNFGIRKR

SEQ ID NO: 216336 - protein, 51 aa, Glycine max
  unsure (1)..(51): unsure at all Xaa locations
  Clone ID: PAT_MRT3847_37380C.1.pep
FHDGAINLLSGALYGTAMKTDVTFGSAVVSWTWNNQWIXWSGPLIGGGIVG

SEQ ID NO: 216337 - protein, 49 aa, Glycine max
  Clone ID: PAT_MRT3847_37381C.1.pep
QVGAKVANVIMKYKYAKTNKEPHAMLFLLILSGKNCPSMGIESHLKGTQ

SEQ ID NO: 216338 - protein, 77 aa, Glycine max
  unsure (1)..(77): unsure at all Xaa locations
  Clone ID: PAT_MRT3847_37382C.1.pep
HSKPXAXPIXADLTSHQDAQXKMTGAVFXLRVSQGPSRDXXNAXFLVSTLNSIXSXDNIXXNVNSKSPXYSXXMTGX

SEQ ID NO: 216339 - protein, 80 aa, Glycine max
  Clone ID: PAT_MRT3847_37383C.1.pep
VVRSMDEMRECGMVDYDELRVRGYEMVLVGLVMGIIGLNVILVVSDNVGKGIARSVGQRDVAVGVVVLDNVLDCLGLECY

SEQ ID NO: 216340 - protein, 86 aa, Glycine max
  Clone ID: PAT_MRT3847_37384C.1.pep
CCKNATSLFFQKGYMFSTPDQKRDGSLKGIDFRFSPPWLPPFWYLPRGSKFPIGSLYPGPIISLEKKPNGLLLFGRPSLLLEVLRI

SEQ ID NO: 216341 - protein, 82 aa, Glycine max
  Clone ID: PAT_MRT3847_37385C.1.pep
LHTAACAAAISLMIHDKFQRIFWVLNKGIDWLRKIPFALTAIKGSYHIYTHIMIIKSFINHIKKPTVLNIDHVQLLINIIQI

SEQ ID NO: 216342 - protein, 32 aa, Glycine max
  Clone ID: PAT_MRT3847_37386C.1.pep
SSLTLTLIVGRANPLDQVHFVSPNYIYYPLIN

SEQ ID NO: 216343 - protein, 306 aa, Glycine max
  unsure (1)..(306): unsure at all Xaa locations
  Clone ID: PAT_MRT3847_37387C.1.pep
MAEGRSEEDKDDRTMKRLLLTTNCLLLTIGTSGGPLVMRLYFLHGGHRVWLSSFLETAGFPLMLLPLAVSYLRRRRTASAAGTAKPKLISMKPPLLAASTFIGILTGLDDYLYAYGVARLPVSTSALIIATQLGFTAFFAFLLVRQKFTAYSVNAVVLLTVGAGVLALHTSGDRPPGESVKEYVMGFVMTVIAAALYGFILPLVELVYKKIKQPLTYSLVMEIQFVMCFSATLFCLLGMIINNDFKVIPREAKKFEHGEGSYYAVLVGSAILWQAFFLGAIGVIFWAWLLIXGFLIAVLLPVTEVL

SEQ ID NO: 216344 - protein, 62 aa, Glycine max
  Clone ID: PAT_MRT3847_37388C.1.pep
VVDLTKHDDITMLALDDAMDPSLSAVISYKTRSAAPHRCVYAYKNALADAVQTVHSLSRARQ

SEQ ID NO: 216345 - protein, 79 aa, Glycine max
  Clone ID: PAT_MRT3847_37389C.1.pep
PSCHSVLKHCCHYSSSSIHYVHSYTFIPTQYYACMAPILIGQGPLLRPVSWVPPPPPPPPPKIGGRHTVMTGNLPGTES

SEQ ID NO: 216346 - protein, 47 aa, Glycine max
  Clone ID: PAT_MRT3847_3738C.1.pep
RVQVCKSSKLQTYSFLDDVVGVLYYPIRVIGNRLPRVIDGCIRSSCE

SEQ ID NO: 216347 - protein, 61 aa, Glycine max
  Clone ID: PAT_MRT3847_37390C.1.pep
CSWVGSYFRSKVRASIRCAKPACAYIVITSVSQHSPILCSISCVIGRGVSICSSVQYRAVT

SEQ ID NO: 216348 - protein, 59 aa, Glycine max
  unsure (1)..(59): unsure at all Xaa locations
  Clone ID: PAT_MRT3847_37391C.1.pep
NGSSNXVLGKCHRRLRPIRIRPIYFGSLSVQLGRMFRHLSTSLTSVFRTRPFASITILF

SEQ ID NO: 216349 - protein, 51 aa, Glycine max
  Clone ID: PAT_MRT3847_37392C.1.pep
CEREGIGTLDIYSESVTTTKTGLVPNFFFNSSNIRIPKPYRNKTQSKFFIL

SEQ ID NO: 216350 - protein, 61 aa, Glycine max
  Clone ID: PAT_MRT3847_37393C.1.pep
LPTNNCFFPLFIQKLNFVDLICHAPLKSTFTNRRRLFSLQLEIFSLGFQCLVMDDFSILLS

SEQ ID NO: 216351 - protein, 274 aa, Glycine max
  Clone ID: PAT_MRT3847_37394C.1.pep
AGFGSNLEEETLDGENLEEEYLQEGENNSGGENLDGENNPERENLEEETLDGENLEEEYLQEGENNSGGENLDGENNPEGENLEEETLDGENLEEEYLQEGENNSGGENLDGENNPEGENLEEETLDGENLEEEYLQEGENNSGGENLDGENNSEGENLEEETLDGENLEEEYLQEGENNSGGENLDGENNPEREYSYVTGGIPILTLFEGENLEEETLDGENLEEEYLQEGENNSGGENLDGENKRRNLDENPEGENLNGENLEVENNFEAET

SEQ ID NO: 216352 - protein, 59 aa, Glycine max
  Clone ID: PAT_MRT3847_37395C.1.pep
YWSSWSPSIFLICLLPSGNILVNKPFGLAVRNIIITPGSCKALSLAIHSTMDTPVYGAF

SEQ ID NO: 216353 - protein, 134 aa, Glycine max
  Clone ID: PAT_MRT3847_37396C.1.pep
RSFLFFFFFFFTRQHNEFVFILVCIHIQTTRAPEQRGERAKNPGPRPTEGEKRGNGGTQSPPGPRPRDGGTTLKPGAAGQGPPAPADRLHTKPEGGAGGPKPLTKPLKGGKANQLGEKEPTQNPGHRRLSEGAF

SEQ ID NO: 216354 - protein, 189 aa, Glycine max
  Clone ID: PAT_MRT3847_37397C.1.pep
MSSIASSHQSFLTNALIPLTHNPKFRTTVTFPSSLKTVSCSSPQHEQQQSPRKKNENKLAKLAIVALAAGVLTLGSVHDASAAKTGGRIGGQAFKSAAPRSSPRINNSRTNIYINPRVAPPLVGGYGYGYGVPFYGGWGWSPFSFFAPGPSVAVGVGGGFDTILLFMFLGAAAAVVRRFFGSRNEDDDY

SEQ ID NO: 216355 - protein, 38 aa, Glycine max
  Clone ID: PAT_MRT3847_37398C.1.pep
RGLGHTTDSIRHLLTACQGILLLITTLTNLLSLSLHTS

SEQ ID NO: 216356 - protein, 81 aa, Glycine max
  Clone ID: PAT_MRT3847_37399C.1.pep
LFYYYGGAPRGGGVRHKFFFLLIRGRGIPLHQGVPKYPITFWGNSPSTRGETTPLNFFYLHSRLIPTSTCHKDILKHFQGP

SEQ ID NO: 216357 - protein, 148 aa, Glycine max
  Clone ID: PAT_MRT3847_3739C.1.pep
MHFTQALAPLAFATAALGQTLNIPARNGAIQVLEGPRTLSGANNDFNNQEFELNRPCDTDDDLGSEGAVFILNDGATLSNVIIGVNQLEGVHCKGKCTLKNVWFRDVCEDAISILGNGDALIEGGGAQEAKDKVIQHNGKGTVTIKGF

SEQ ID NO: 216358 - protein, 74 aa, Glycine max
  Clone ID: PAT_MRT3847_373C.1.pep
LYKVIRNFVSFCLIQPFPVCFLTHKIKADSSAPYLHSTGEREREKSRFLKKDMTEHCSDHCGQTLLKEMLGHRT

SEQ ID NO: 216359 - protein, 56 aa, Glycine max
  Clone ID: PAT_MRT3847_37400C.1.pep
VSQWEPHDLSYMLRAAMLGGLLTGSNFMQGAILAHITSRYNSAQYMEKWDAHRSQS

SEQ ID NO: 216360 - protein, 127 aa, Glycine max
  unsure (1)..(127): unsure at all Xaa locations
  Clone ID: PAT_MRT3847_37401C.1.pep
LGYKTTPNLIYLYFVLGHVPLTLAIPTNSYPCISLRTSKFSYQTGVXLYAYGGTPINQHLPELDRSLDILVATPGRLLDLLERAIVSLPMIRYTSLYEANIMLDIDFEPQIKKIVEQMDMPSTSARH

SEQ ID NO: 216361 - protein, 63 aa, Glycine max
  Clone ID: PAT_MRT3847_37402C.1.pep
LLRVTLLLQDTYRKKLSSIKLYTIHERSRYLSPISRTTNFHWQFSRNTCCKNSQENRHCCINI

SEQ ID NO: 216362 - protein, 88 aa, Glycine max
  unsure (1)..(88): unsure at all Xaa locations
  Clone ID: PAT_MRT3847_37403C.1.pep
PXISQGLHLLXXXDVHLXXXNSXRVXXAEPPXVXESSXXGPXLXWKIXTRXLKXDLKGLXLKFXXASXWXWEXQGCXIQXPXDXGKVP

SEQ ID NO: 216363 - protein, 627 aa, Glycine max
  Clone ID: PAT_MRT3847_37404C.1.pep
GTVPSRLLALLAAEASVPPLDGLLLSLRASTSAVVPLVLPYRGLPPWPPVGAHAPAARNFNQGIGKAFHLCTVLPPLLHTMGDDDKEVQTLVQEASETVVLVIDEEGIEPLMSELVKGVNDSQAAVRRSSSYLIGYFFKNSKLYLVDEAPNMISTLIILLSDSDSSTVTVAWEALSRVIISVPKEVLPSYIKLVRDAVSTSRDKERRKKKGGPILIPGFCLPKALQPILPIFLQGLISGSAELREQAALGLGELIEVTSEQSLKEFVIPITGPLIRIIGDRFPWQVKSAILSTLTTMIKKGGISLKPFLPQLQTTFVKCLQDSTRTVRSSAALALGKLSGLSTRVDPLVSDLLSSLQGSDGGVRDAILTALKGVLKHAGKNLSSAVRTRFYSILKDLIHDDDDRVRTYASSILGILTQYLEDVQLTELIQELSSLANSSSWPPRHGSILTISSLLHYNPATICSSSLFPTIVDCLRDTLKDEKFPLRETSTKALGRLLLYRSQVDPSDTLLYKDVLSLLVSSTHDDSSEVRRRALSAIKAVAKANPSAIMSLGTIVGPALAECMKDGNTPVRLAAERCALHAFQLTKGSENVQAAQKYITGLDARRLSKFPEYSDDSDDSDEDTSSS

SEQ ID NO: 216364 - protein, 73 aa, Glycine max
  Clone ID: PAT_MRT3847_37405C.1.pep
GGPLLFCGGSLIFNAPAKRPHLGYFWPLSIFLGGVLSSPGGLEKFLGYPQKYGGAFLPQKRLPPSRMMVPPLA

SEQ ID NO: 216365 - protein, 145 aa, Glycine max
  Clone ID: PAT_MRT3847_37406C.1.pep
ENTITLLLREAGDEGYEVEELFSSDESEDSDEEEGKGAASPQKKPEGLTIDIDLGLSPWANASQYYEQKKVAAVKAEKTSQSSAKALKSHERKVQDDLKRNLKQEKQVLRPARKPFWFEKFLFFVSSEGYLVLGLVFISTTKCGC

SEQ ID NO: 216366 - protein, 71 aa, Glycine max
  unsure (1)..(71): unsure at all Xaa locations
  Clone ID: PAT_MRT3847_37407C.1.pep
PTKSCKARSTNLKVHFKNTKKTAFAIKKLPLVKAKKYLEDILTHXQTIPFKHFYRGVKRTXRANNRHSNDQ

SEQ ID NO: 216367 - protein, 317 aa, Glycine max
  unsure (1)..(317): unsure at all Xaa locations
  Clone ID: PAT_MRT3847_37408C.1.pep
PRVRIFCHTKTSVELWEALELKYGSVEKGLSRYSCEKMIDGKSISDQIHEFENIVYDMKLKGIVLPDIMLVAFMISKLPPSWTDFARSLKHKHESFTFDDLLVCLRIEDKHRSSQKHLQKSDSHSKAYLVESSNKPFFKSFKRHGFNKNKFGRKPSFSKNKNNAFNNNNKPKDKNPGNEIFCFVCGRANHLAKNCFQRHRQPTSFPKPQANVVTTSAASDSPSXQESSTRTVSMGNGSMAHVLGEGQVKLELSSGNFIVLDGVYHISDIRKNLISTSLLVQQGYKVVFESNRVVITRHGNFIGKGYICDGLFKKKKK

SEQ ID NO: 216368 - protein, 97 aa, Glycine max
  Clone ID: PAT_MRT3847_37409C.1.pep
LEATGDAIALLGALVMPHNLFLHSALVLSRKVPSSVRGINDACRYFLMESGFALFVAFLINVAMISVAGTVCSADNLSAENADQCSDLTLNSASFLL

SEQ ID NO: 216369 - protein, 113 aa, Glycine max
  Clone ID: PAT_MRT3847_3740C.1.pep
MEISFPWILVATMVMAMRPLSFRIKANQLSYDYYKFSCPNLESIVKSELLSLFLTDATAPAAFLRLMFHDCQVQGCDASILLDSNYLAHSHSSEMISSRNFGIRKRETIGQMK

SEQ ID NO: 216370 - protein, 45 aa, Glycine max
  Clone ID: PAT_MRT3847_37410C.1.pep
KKALLKPKHHDLYKTQSQTMHIPQHILIQALHRMPKIYLARVIFY

SEQ ID NO: 216371 - protein, 165 aa, Glycine max
  Clone ID: PAT_MRT3847_37411C.1.pep
MRTIPTTTTTPIAPAATTISPYSQHSTWHSPVPYLFGGLAAMLGLIAFALLILACSYWKLSGQLLNEENAERDLESVAGEKQGDSANKDSVKVYEEKILVIMAGDDKPTFLATPKASSVTRCVPNHFEENLENHVTSEKLEKNPVQQPTSPQPQETTQQQSLPRQ

SEQ ID NO: 216372 - protein, 139 aa, Glycine max
  Clone ID: PAT_MRT3847_37412C.1.pep
MSSTAYLLLLFLGISLHACYARHLSPLNKKLEEKSYFSIKSDEKNGLDSSPKQLNEAGHNKTETRLVGDSVKPRNQRSTNHHRVVHKATDANASGGGALQKSLVSVSWRVPHNNKKPRQKHPGFDLDYSPPKTHPPHHN

SEQ ID NO: 216373 - protein, 137 aa, Glycine max
  unsure (1)..(137): unsure at all Xaa locations
  Clone ID: PAT_MRT3847_37413C.1.pep
LDGTILPGVIRQSALELLRQRRPAAAGAAAAAAGCGSFTVCERPVSLPELQRAAARGQLLEAFGTGTPACVXPIGRVLWEGRWIDCKGCGSKSGISEEVRRASGVWLLDGARLKTTSVPSSARLVEGTGRNLVVHRG

SEQ ID NO: 216374 - protein, 63 aa, Glycine max
  Clone ID: PAT_MRT3847_37414C.1.pep
KTYTSHSISMAINYLFTLNFACEIAIPKYFAITLPHTVHFQCIYLPYDYQIKSQNFCIKQKSS

SEQ ID NO: 216375 - protein, 84 aa, Glycine max
  unsure (1)..(84): unsure at all Xaa locations
  Clone ID: PAT_MRT3847_37415C.1.pep
ALYEARARVVINVGTVAVTPEEGRLTVGRYGPLCEQNEQLNAVGHEMMLGSTGANRMRRKRLPYRKRMNRTXTTLQKPQLELDA

SEQ ID NO: 216376 - protein, 105 aa, Glycine max
  unsure (1)..(105): unsure at all Xaa locations
  Clone ID: PAT_MRT3847_37416C.1.pep
GPARVKGHEPLAKWRDRLDKAGYNAXHLGSNACKQASMLVTLFFVEGYSVEYIQGCMTLGWQTPPPIAGPAWRGAPMQERYTLRFCQSVLNSGENVVLKEYLVTQ

SEQ ID NO: 216377 - protein, 60 aa, Glycine max
  Clone ID: PAT_MRT3847_37417C.1.pep
STFFFFFFFFLLKNNKFYGDLSYKNNIKASLFSNKQKGVKNIENNFTLSNPLKRPFSAPK

SEQ ID NO: 216378 - protein, 247 aa, Glycine max
  unsure (1)..(247): unsure at all Xaa locations
  Clone ID: PAT_MRT3847_37418C.1.pep
MSWMSVDEFLVQCKKSGDAAYASLRSLLERLDNPETRSQARIFLSHLQKRFPTKDSCERIAFTHYXSLMHCIAGHHGRNKLGSRVIPSIFLPEDWSFTFYEGINRHPDSIFKERTVAELGCGNGWISIAMAEKWXPYKVYGLDINPRAVKVSWINLYLNALDENGQLIYDEENKTLLDRVEFHESDLLSYCREKDIQLERIVGCIPQILNPNPDAMSKMITENASEEFLHSLSNYCALQGFVEDQFG

SEQ ID NO: 216379 - protein, 188 aa, Glycine max
  Clone ID: PAT_MRT3847_37419C.1.pep
MTTQFLILSLLISCHVLTATLAEETGFVGSLDRKALGLDKKDKVSHFRFYFHERFTGSNATSVTVVPPLPQYNSTTNFGLVGITDNALTVGPEPGSKVVGKIEGLYAGTSQSEFNLLIVVNFALTEGKYNGSTITVVGRNRLSLKIREMPVIGGSGVFKFATGYVETSTLYVDADRSTIEYNIYVSHY

SEQ ID NO: 216380 - protein, 32 aa, Glycine max
  Clone ID: PAT_MRT3847_3741C.1.pep
FHVLCACQVIIFRGTVTGYYNTTYNLNDLFLT

SEQ ID NO: 216381 - protein, 60 aa, Glycine max
  Clone ID: PAT_MRT3847_37420C.1.pep
VLLIKGLIHPIISKPFITNFSSPYYNIFPIIIHSISSHFLLLILFYLNKLQKLITIYNFF

SEQ ID NO: 216382 - protein, 67 aa, Glycine max
  Clone ID: PAT_MRT3847_37421C.1.pep
AICRIRISKSLIKLSYDLNMAYFVSDQLSQYCVHQQLIPLDGPIFLQKLDLYLTLYLFSHAVRETQI

SEQ ID NO: 216383 - protein, 275 aa, Glycine max
  unsure (1)..(275): unsure at all Xaa locations
  Clone ID: PAT_MRT3847_37422C.1.pep
MEEQECQVVENKETPTPPVRVYADGIYDLFHFGHARSLEQAKKXFPNTYLLVGCCNDEITHKYKGKTVMTEKERYESLRHCRWVDEVIPDAPWVITREFLDKHQIDYVAHDSLPYADASGAGKDVYEYVKSVGKFKETKRTDGISTSDIIMRIIKDYNQYVMRNLDRGYTRKELGVSYVKEKRLRMNMGLKKLQERVKKQQEKVGKKIQTVGKIAGMHPNEWVENADRLVAGFLEMFEEGCHKMGTAIRDRIQEQLKAQQLKSLLYDEWDDDRIL

SEQ ID NO: 216384 - protein, 56 aa, Glycine max
  Clone ID: PAT_MRT3847_37423C.1.pep
ERKGHRFLTLILLATLLKKQMRIIRGVSNTRIQRSQKELMHSFKNSAQHALPDPQV

SEQ ID NO: 216385 - protein, 64 aa, Glycine max
  Clone ID: PAT_MRT3847_37424C.1.pep
RSFNGRRGRSFNGRTSEGASMEEGVGLQCQREGGFKRRSKQKGRVQTKEQGASSLGFKAILKAS

SEQ ID NO: 216386 - protein, 178 aa, Glycine max
  Clone ID: PAT_MRT3847_37425C.1.pep
SRPADPSLNSTKSRERQSFHSSSPSTSNDENSSEVMAAPSEALKSIHQPTKASQSSPGGSFNNAVNRLGKGNQSSRSDQETEKIEKNASRQNSLKELVLATEMDVIDYSNNGISQDLGDASGEHDHPRSSKRGESFLANIIKKDNEKNNVTVNGQPISDCMIKKAEKLAGPIQPGNYW

SEQ ID NO: 216387 - protein, 90 aa, Glycine max
  Clone ID: PAT_MRT3847_37426C.1.pep
GKGGPGGMGSNPGGKSENNAEKMYVKKRLRMKSAPIVKSRFGTRMGCPFPIIKTKVQPFKVRDFLLGIDNQGIALEVIQLRYSDGVKLPV

SEQ ID NO: 216388 - protein, 56 aa, Glycine max
  Clone ID: PAT_MRT3847_37427C.1.pep
PRLCLCISYSQGFFNLNGHENPQDGYIAFYFFFVNFALLRGPIVIYQWKRNLNVHK

SEQ ID NO: 216389 - protein, 36 aa, Glycine max
  Clone ID: PAT_MRT3847_37428C.1.pep
GVHSVNGNDWVYQITASLGAIVVLMVATFVSRCSLS

SEQ ID NO: 216390 - protein, 66 aa, Glycine max
  Clone ID: PAT_MRT3847_37429C.1.pep
NMLTHGFQKFYGSITEATKAPKTIFQQRGGACRPVASPLSNPNCLDSNCYLHPYLDKFTPLFLCFW

SEQ ID NO: 216391 - protein, 52 aa, Glycine max
  Clone ID: PAT_MRT3847_3742C.1.pep
CSKFGTKTRHGSNESRGKKWYSTRTTVSQSPRSFEILATDAKGSEKVRISYF

SEQ ID NO: 216392 - protein, 69 aa, Glycine max
  Clone ID: PAT_MRT3847_37430C.1.pep
CHASGTDYCGRFSGWGRPSMGRYLFVGRRSAPRRGHCSFTQPSCCAPRVEVRARCQSVDSWALDRSVSL

SEQ ID NO: 216393 - protein, 38 aa, Glycine max
  Clone ID: PAT_MRT3847_37431C.1.pep
LQQPVISVRSVGLIKAGTHTPCRLYTDGLLNVPKALGC

SEQ ID NO: 216394 - protein, 59 aa, Glycine max
  Clone ID: PAT_MRT3847_37432C.1.pep
TIWVVTLNRFESWLPHARRTSLEYYLRLLRLRLLNKQPGRFGSFTENLRCHRKLSSRYG

SEQ ID NO: 216395 - protein, 84 aa, Glycine max
  Clone ID: PAT_MRT3847_37433C.1.pep
SQFGSRRLRDDHRRRIPQVLIAQKMRFHPSANSSDIHLSPDEEATIEAKTRDSFDGVAPQRHTKPQRSEYSAQYVDAFSNVHHS

SEQ ID NO: 216396 - protein, 182 aa, Glycine max
  Clone ID: PAT_MRT3847_37434C.1.pep
EMGLSFTKLFSRLFAKKEMRILMVGLDAAGKTTILYKLRLGEIVTTIPTIGFNVETVEYKNISFTVWDVGGQDKIRPLWRHYFQNTQGLIFVVDSNDRDRVVEARDELHRMLNEDELRDAVLLVFANKQDLPNAMNAAEITDKLGLHSLRQRHWYIQSTCATSGEGLYEGLDWLSNNIANKA

SEQ ID NO: 216397 - protein, 181 aa, Glycine max; identical to SEQ ID NO: 215711
  Clone ID: PAT_MRT3847_37435C.1.pep

SEQ ID NO: 216398 - protein, 354 aa, Glycine max
  unsure (1)..(354): unsure at all Xaa locations
  Clone ID: PAT_MRT3847_37436C.1.pep
PEVTHSEDGMETLRRFLFDVCGVGAGWKMEDVMEEEIKVIKETVGPDEHVICALSGGVDSTVAATLVHKAIGDRLHCVFVDNGLLRYKERERVMETFEKDLHLPVVCVDAVGQFLTKLKGVVDPETKRKIIGKEFICIFDAFAXELEGKLGKKPSYLVQGTLYPDVIESCPPPGTGRTHSHTIKSHHNVGGLPKDMKLKLIEPLKLLFKDEVRQLGRILDVPVAFLKRHPFPGPGLAVRVLGDVTEGNALDILRQVDEIFIQSIKDAGLYDSIWQAFAVFLPVRSVGVQGDQRTHSHVVALRAVTSQDGMTADWYYFEHKFLDDVSRKICNGVRGVNRVVQDITSKPPSTIEWE

SEQ ID NO: 216399 - protein, 67 aa, Glycine max
  Clone ID: PAT_MRT3847_37437C.1.pep
DVEDSMYRRVPSPYSMLQCDLDYDFNLVLMHATRLQPCYSSHVKNSGSFETRPYWTAKLLTGKMWTP

SEQ ID NO: 216400 - protein, 113 aa, Glycine max
  Clone ID: PAT_MRT3847_37438C.1.pep
IAANFVAPANVLVNLSPKWFTFRRGALLTALLGIAFQPWRLLKSSESFVYTWLVGYSALMGPIGRIVLADYYIVQKTNLNVSDLYSKDPLWGILGIQEGLMWLIFLALIVGSI

SEQ ID NO: 216401 - protein, 192 aa, Glycine max
  Clone ID: PAT_MRT3847_37439C.1.pep
MLPRLAWWTGRSLSHSLLLPPPTSSTRFIAKCLNKNMGVDNNLLAKPRRRANFRLCNVSCYTSEVLEIQSDAPTLHVLFVPGNPGVILFYKDFVEFLYELLEGTASVTAIGHVSHSRKNLEHGRMFSLQEQIDHKIDFIREELENVEIPILLVGHSIGSYISIEMFKKSPEKAKYCIVLYPFLTLNPHSTTQ

SEQ ID NO: 216402 - protein, 115 aa, Glycine max
  unsure (1)..(115): unsure at all Xaa locations
  Clone ID: PAT_MRT3847_3743C.1.pep
RTRGRTRGKSPGKKKTRSHVNTCRLGFIXXVSNLQVLICDLYVVFRGLFKRFFFFICGLFLISGSFVLDFVGVPVFFLNGILFDLFLYLFISFVFIVGGGGFILCFLYFYLLIFL

SEQ ID NO: 216403 - protein, 91 aa, Glycine max
  Clone ID: PAT_MRT3847_37440C.1.pep
REHPGDTQKILPSGTNKNSGNRHSIEEARTQRSAKHTRTLTGEWDAHRNCASPPAGDVGTHKLTGTIARALARGEAACVLGSLPRSPSLTR

SEQ ID NO: 216404 - protein, 280 aa, Glycine max
  unsure (1)..(280): unsure at all Xaa locations
  Clone ID: PAT_MRT3847_37441C.1.pep
FQGRGRYYTSSCQVKLCPSPQIRLVCVKTNLKTLTKASSQNCVESMSSLTSLAPLEAVLFDVDGTLFHSDPLHYYALREMLQELRVLSAAPIKVEFCSLTFSEQFRDDTALVVFPGDLERGLKFVEDKEAMFRRLASEQLNPLKGLDKVRKWVENHGLKRAAVTNAPRKNAELIISKLGLTDFFDAVIIGDECEHAKPHPEPYLKALEVLKASKDHAFVFEDSASGIKAGVAAGMPVIGLRYKKPXANLLMEAKPAFLIKDYEDSKLWAALEELDKAGAR

SEQ ID NO: 216405 - protein, 94 aa, Glycine max
  Clone ID: PAT_MRT3847_37442C.1.pep
WGGTGRVPFAILVENRSGRAIRGALYTKYVCRPPGYVNSGPFKLGPRHGFSQSLSLFISRSVGRFFCFLSPFFFFFACFFFFCLVPFVKNKNFF

SEQ ID NO: 216406 - protein, 106 aa, Glycine max
  unsure (1)..(106): unsure at all Xaa locations
  Clone ID: PAT_MRT3847_37443C.1.pep
MGGVGPLSQGGGPVVLRRXGPTAAAKRGEKARNAGRGSGAGIETLKKCNAGTNKAASSSTSLSTKRGGEETENLAHERVPTELKKAIMRARRGKKLTQAQVAQLSN

SEQ ID NO: 216407 - protein, 62 aa, Glycine max
  Clone ID: PAT_MRT3847_37444C.1.pep
PRVRATSNDSETLVPAFKEAAKSFKGKVYFIQATNYYTLLCYSFSGKICMSLISEIKTVQIK

SEQ ID NO: 216408 - protein, 54 aa, Glycine max
  Clone ID: PAT_MRT3847_37445C.1.pep
LLDQVNDLQLRLGSNINTTFLNYIYSIPPRIMAQAFLASFAGPMMKSLIETSKP

SEQ ID NO: 216409 - protein, 118 aa, Glycine max
  unsure (1)..(118): unsure at all Xaa locations
  Clone ID: PAT_MRT3847_37446C.1.pep
LSHARKALRSEVMALSVXLFTLGLARESHAKDXSFWHAAWTNTPITSSLRDLVKPDPASXELYDHPMQXEETQNPETLFYKXDHHPSKTMRGQFSKPPYXQPWSVRAWVKEIKDTTQE

SEQ ID NO: 216410 - protein, 127 aa, Glycine max
  Clone ID: PAT_MRT3847_37447C.1.pep
MAEKLHLREFLQEDQEPFLLKHYISERRSQLKRVTPSPNSTLQQHLKKNPQNSNFPLNKCFLTSLQNATKSPLLLSPKKSTPLTLRPSNAKTASLLLEAALRIHTNKNAKPKPKPNRALGIFGSLFK

SEQ ID NO: 216411 - protein, 68 aa, Glycine max
  Clone ID: PAT_MRT3847_37448C.1.pep
KWILIYCLIMFQLCLMNKQGSGAFFLFCNVDVRTFLNELFRYMHVHACEILIVLIIYILYDCQDLLKK

SEQ ID NO: 216412 - protein, 64 aa, Glycine max
  Clone ID: PAT_MRT3847_37449C.1.pep
SWLVTITITAAIVAPMARNLRKSVRSLLVLAMEDTALKLMIEFITKNKKKWLSARTSFYLKHTI

SEQ ID NO: 216413 - protein, 64 aa, Glycine max
  Clone ID: PAT_MRT3847_3744C.1.pep
VGLREADRRACLFIQEIFIWSQTSTWRLAYIHKETGFRCRSLKGIKNFEKYGSPPRRHKVKSLA

SEQ ID NO: 216414 - protein, 43 aa, Glycine max
  Clone ID: PAT_MRT3847_37450C.1.pep
AKPFLDRWTLAQTNKQVSIQVANLNALRPSLSCISSNLRQDGT

SEQ ID NO: 216415 - protein, 395 aa, Glycine max
  Clone ID: PAT_MRT3847_37451C.1.pep
MDDHRNSTTKNAVGLCLLPQELIQNIFLSLVLPEIIRLKLLNKSFSRIISDNTFVRQYNSLSTSTTWLFVYKKRWLRDAALHSFTDRSSDRWFRIPISELLKPIQFHGEDLYFLAASNNVFLFASNTVREVVAVNLISVTVKKIPPSPLGPRGTSSWRRSGMKLVTDPSGSGQFRFMFAEFVDNRPVLFAYESETDTWKSTEAEEDNNKEFSFSFSPRGASHVFLNVVHGPMESVLVAATPECDKPVVLRPRFNVTEANDDLTVGFSWGNVMDMLHVYGDGYMMIVKSEGGNTRNVRVLKGVELWGLSLNGRKWEFVSAVPGVIEKPYAAMMGCLEEKNGVVRAALVSNCEGVWDMTWLSFDTRWNRWTFMPLPDCKMKGWNMAGISFSSGLTLP

SEQ ID NO: 216416 - protein, 102 aa, Glycine max
  Clone ID: PAT_MRT3847_37452C.1.pep
RNVRVFKRVELWGLSLDGRKWEFVSAVPGVIEKPYAAMMGCLEEKNGVVRAALVSNCEGVWDMTWLSFDTKWNRWTWMPLPDCKMKGWNMAGISFSSGLTLP

SEQ ID NO: 216417 - protein, 179 aa, Glycine max
  Clone ID: PAT_MRT3847_37453C.1.pep
ATWGGKTFCMFYALAGIPLGLVMFQSIGERLNTFVAYSLRYCKKCFKMKKKEVSETNLVMFVLFLSTLVMTTGAAAFSKWERWSYFDAFYYCFITLTTIGFGDYVALQKESALQSKPEYVIFSLVFILFGLSVVSGGINLLVLRFLTLNTEDERRDEAEAALTAAGAVHLEGDVITANG

SEQ ID NO: 216418 - protein, 82 aa, Glycine max
  Clone ID: PAT_MRT3847_37454C.1.pep
RIRLKIEDVNTDKVAAPVRDFMEREQGNEMNVRALAWQTLAHDAASSPHGSSFVNMDNVDRHVLMNKIAYTVVFTLLQFSMA

SEQ ID NO: 216419 - protein, 91 aa, Glycine max
  Clone ID: PAT_MRT3847_37455C.1.pep
LREIRRYQKSTDLLLLKLPFSRLVREVAYNVAPASLEGHRWQSQAIQALQEAAEAFLVHLFEDTNLCALHAKRVTIMQKDIQLARRLRGAL

SEQ ID NO: 216420 - protein, 78 aa, Glycine max
  Clone ID: PAT_MRT3847_37456C.1.pep
GMCITLKVIWWRIKRWHSATMVGHLWMLIIKHLHVALLDLSRLLISFLSQLPESMKTAPPHHPSSSNSIVPKLHVCDI

SEQ ID NO: 216421 - protein, 276 aa, Glycine max
  Clone ID: PAT_MRT3847_37457C.1.pep
MCMGSALKRNYQVSEEIGRGRFGTIFRCFHPLSNQPYACKLIDKSLLLDSTDRHCLQNEPKFMSLLSPHPNILQIFHVFEDDHYLSIVMDLCQPHTLFDRMLHAPFSESQAASLIKNLLEAVAHCHRLGVAHRDIKPDNILFDSADNLKLADFGSAEWFGDGRSMSGVVGTPYYVAPEVLLGREYDEKVDVWSCGVILYIMLAGIPPFYGDSAAEIFEAVVRANLRFPSRIFRTVSPAAKDLLRKMISRDSSRRFSAEQALRHPWILSAGDTAELT

SEQ ID NO: 216422 - protein, 74 aa, Glycine max
  Clone ID: PAT_MRT3847_37458C.1.pep
CRILITTFIINKYKHASLTLDKKTTLLNQPNFYKIHTWPNYKMQQVMKVYFHKKPDAWADAWVLPHGQGQSFVA

SEQ ID NO: 216423 - protein, 94 aa, Glycine max
  Clone ID: PAT_MRT3847_37459C.1.pep
NNCWFRVKTNVAKPHKGEIGIVFEHPTQPANQPGGWMVKEKHLEKSLEKLPSLKKSGSTPSMNTASKMFTISEVKKHCTSDSTWIIIHGHVYDC

SEQ ID NO: 216424 - protein, 78 aa, Glycine max
  Clone ID: PAT_MRT3847_3745C.1.pep
VGANVKICDSEMKGHRKSIRLESNNPVVIESGASKASERYMENVVSHHLPFIRVVGLSGRTFSIHPAYVCTVRNLGAF

SEQ ID NO: 216425 - protein, 92 aa, Glycine max
  unsure (1)..(92): unsure at all Xaa locations
  Clone ID: PAT_MRT3847_37460C.1.pep
NLPRHHYLYSIAVPHAPLQAPAPPRMTNPDAPFRAPDRQETAPAAPNAPNGPRKQEGSCEPPPKPAVLRWGPQCITNVPCXGVRXKNQXVPF

SEQ ID NO: 216426 - protein, 617 aa, Glycine max
  Clone ID: PAT_MRT3847_37461C.1.pep
WGWYLKGFAEGLMIFGEFAGRRVQEAKPLIRNKLLETGQAIIYSEPEKRVMSRSGDECVVALTDQWYITYGESEWKKLADECLSNMNLYSDETRHGFEHTLSWLNQWACSRSFGLGTRIPWDEQFLVESLSDSTIYMAYYTVAHHLQSGDMYGSGESAIKPHQLTDDVWDYIFCGGPYPKSTDISSSLLERMKQEFEYWYPFDLRVSGKDLIQNHLTFCIYNHTAIMAKHHWPRGFRCNGHIMLNSEKMSKSTGNFRTLRQAIEEFSADATRFSLADAGDGVDDANFVFETANAAILRLTKEIAWYEDNLAAESSMRTGPPSTYADRVFANEINIAVQTTEQNYTNYMFREALKTGFYDLQAARDEYRFSCGAGGCNRDLVWRFMDVQTRLIAPICPHYAEFIWRELLKKDGFVVNAGWPTADAPDLTLKSANKYLQDSIVLMRKLLQKQLSGSKKGNKKGPPAASLTDSKVTGLIYVNEQFDSWEAECLSILQKKFSRDTRTFAPESEILQALQQSSVGQSSNFKQVQKRCMPFLRFKKEEAIALGAQALDLRLPFGEIEVLKENLELIKRQIGLEDVEILSAADADSLARAGPLASLLNQNPPSPGKPTAIFVTL

SEQ ID NO: 216427 - protein, 202 aa, Glycine max
  unsure (1)..(202): unsure at all Xaa locations
  Clone ID: PAT_MRT3847_37462C.1.pep
MNRYKLPSWAKFEIGRAAVYWKTMNGLPPSSGEKLKLFYNPAATQLVPNEEFGIAFNGGFNQPIMCGXGEPRAMLRKYRGKADAPIYSIQICIPKHALNLIFSFTNGVDWDGPYRLQFQVPKALQNKPIDFFNKGLAEELSKEGACEQAIFPDTNKVITKCAMIGNLSKEGXCTDPSSHLYNPLANVDDGTCTIELDSESEE

SEQ ID NO: 216428 - protein, 92 aa, Glycine max
  Clone ID: PAT_MRT3847_37463C.1.pep
FGYDDASYLGKLGYSPGQNRVVRSAGFEGDNMLWTCTDLGRYKGPSLVDALDHISELIRLFDPALTLSLHGAYWIVRLETVPVGHDQTGALY

SEQ ID NO: 216429 - protein, 278 aa, Glycine max
  unsure (1)..(278): unsure at all Xaa locations
  Clone ID: PAT_MRT3847_37464C.1.pep
MAATNASIFASSTQSCLPVSPTISNTLVSPFLNVSSPRSYLVKKKHVKFSKHISAAAVATTTTTEEIQEYKLPSWAKFEIGRAAVYWKTMNGLPPSSGEKLKLFYNPAATQLVPNEEFGIAFNGXGFNQPIMCGGEPRAMLRKYRGKADAPIYSIQICIPKHALNLIFSFTNGVDWDGPYRLQFQVPKALQNKPIDFFNKGLAEELSKEGACEQAIFPDTNKVITKCAMIGNLSKEGGDRCDLNFVVGCTDPSSHLYNPLANVDDGTCTIELDSESEE

SEQ ID NO: 216430 - protein, 69 aa, Glycine max
  Clone ID: PAT_MRT3847_37465C.1.pep
LKPSRASCHRVLSAAMGKVVLSNGAPANTYNRDRPTTFYPSSLSVGPGVTRDRNRSSTHLSRQTRCSRL

SEQ ID NO: 216431 - protein, 106 aa, Glycine max
  Clone ID: PAT_MRT3847_37466C.1.pep
QALHQSSVGQSSNFKQVQKRCMPFLRFKKEEAIALGAQALDLRLPFGEIEVLKENLELIKRQIGLEDVEILSAADADSLARAGPLASLLNQNPPSPGKPTAIFVTL

SEQ ID NO: 216432 - protein, 140 aa, Glycine max
  unsure (1)..(140): unsure at all Xaa locations
  Clone ID: PAT_MRT3847_37467C.1.pep
NWEGCAMLENHRGPADAPIYSIQIGIPKQALNLIFSFTNGVAWDGPYRXQFQVPKALQNKPIDFFNKGLAEELSKEGACDQAIFPATNKIIPKCAMIGNLSKEGGDRCDLNFVLGCPDPSSPLYNPLANVDDGTCPIELD

SEQ ID NO: 216433 - protein, 270 aa, Glycine max
  unsure (1)..(270): unsure at all Xaa locations
  Clone ID: PAT_MRT3847_37468C.1.pep
MFREALKTGFYDLQAARDEYRFSCGVGGYNRDLVWRFMDVQTRLIAPICLEPAEFIWRELLKKDGFVVNAGWPTADAPDLTLKSANKYLQDSIVLMRKLLQKQLSGSKKGNKKGPPAASVTENKVTGLIYVNEQFDGLEADCLSILQNKFNRDTRTFAPDSEILQALQQSFCXQSSNYKQIQKRCMPFLRFKKEEAIALGPQALDLRLPFGEIEVLKENLDLIKRQIGLEDVEILSAADVDSLARAGPLASLLNQNPPSPGKPTAIFLTQ

SEQ ID NO: 216434 - protein, 113 aa, Glycine max
  Clone ID: PAT_MRT3847_37469C.1.pep
ARGLSVALILELSGFGFVYLKSGDCVYRCCAAINALFRKTSLQYYFEKVGSCVSSFFENHNNHFPYISVFLIPLPLFHFTFFKKIKIKKLALILVTYDIVLYCCHFVDVLFSK

SEQ ID NO: 216435 - protein, 72 aa, Glycine max
  unsure (1)..(72): unsure at all Xaa locations
  Clone ID: PAT_MRT3847_3746C.1.pep
VLSLQPVFGVDPQFLKSEDPDQISXEFPVGFKNFRKSFATSMSKMGNSRVLPAPQGEIPRNSRNPKKGPPNK

SEQ ID NO: 216436 - protein, 272 aa, Glycine max
  Clone ID: PAT_MRT3847_37470C.1.pep
MAATNASIFASSTQPCLPVPPTIPNTLATPFLNVSSPRSYLVKKKHVKFSKKISAAAVATTTTTEEIQEYKLPSWAKFEIGRAAVYWKTMNGLPPTSGEKLKLFYNPAATQLVPNEEFGIAFNGGFNQPIMCGGEPRAMLRKDRGKADAPIYSIQICIPKHALNLIFSFTNGVDWDGPYRLQFQVPKALQNKPIDFFNKGLAEELSKEGACEQAIFPDTNKIITKCAMIGNLSKEGGDRCDLNFVLGCTDPSSHLYNPLANVDDGTCTIELD

SEQ ID NO: 216437 - protein, 93 aa, Glycine max
  Clone ID: PAT_MRT3847_37471C.1.pep
MFKNSATHFPPYGATTSFLQIRTRATQPRLHQLHRHLRRRRSAPATQLLIKKMRRPLPKECSVPSTANGSAQKSNFNRKSHPQQRNRRTTQFF

SEQ ID NO: 216438 - protein, 127 aa, Glycine max
  Clone ID: PAT_MRT3847_37472C.1.pep
MALNEQKGKDDIPESQYQKGVKQLCEKGHLNAVPKKYILPVSERPTKSSVEDPNVVKQNLQLPIIDFAELLGPNRPQVLQSLANACQQYGFFQLVNHCMLEDVVRSMIDASGTFFDLPLEERAKYMT

SEQ ID NO: 216439 - protein, 21 aa, Glycine max
  Clone ID: PAT_MRT3847_37473C.1.pep
CYLDCILTAGLVSILGYPVKD

SEQ ID NO: 216440 - protein, 100 aa, Glycine max
  Clone ID: PAT_MRT3847_37474C.1.pep
CGGRKGLHKKGGLAGKWGGGAPGNQWGGIFLKLRSCVGWLLFFRVCRWVWDILIGSSGGKRENCFSFIWAPGIFGGGYGIDNGVFRLVLKKRKRKATELK

SEQ ID NO: 216441 - protein, 57 aa, Glycine max
  Clone ID: PAT_MRT3847_37475C.1.pep
YDVLRSAQDILCNWCYECLIFYPSNYLVTLIEYAKFSSGKYIYKHSLNALVMNSALM

SEQ ID NO: 216442 - protein, 112 aa, Glycine max
  Clone ID: PAT_MRT3847_37476C.1.pep
LATGMYILVQQSIGFTSKRRRRNLPKYPNGITSTIYTGEYIYSLKEPLHDFRIRQEFFQPDKFAVLQGDPANSGYIGDKKAGTLQPAGKYSDAMLPHSPPGGSEQQPIHTSE

SEQ ID NO: 216443 - protein, 171 aa, Glycine max
  unsure (1)..(171): unsure at all Xaa locations
  Clone ID: PAT_MRT3847_37477C.1.pep
GNHIYTGGTYYILSDITAXGGIRASPTANETCPLTVVQSNTELDKRIGTIILSPFLIQFIAERNTLTLKPDSFANIMLXIKITTEWYVVEDLPXRPDVKIGYNKYALVGWFRIERVSDDEFNNYKLVFCTQQAEDDKCGDIGISIDHDDGTRRLVVSKNKPLVVQFQKVDK

SEQ ID NO: 216444 - protein, 89 aa, Glycine max
  Clone ID: PAT_MRT3847_37478C.1.pep
FFFFFFFFFFYLFFFFSWGGLFFVIHYFQLDHRGNNKKSLLVNTKKTPTGVFVGEDRTTKKEVGGSNALEKMEFSPPHVMPEMRKRPFY

SEQ ID NO: 216445 - protein, 104 aa, Glycine max
  Clone ID: PAT_MRT3847_37479C.1.pep
RKEQGLKWRYKSAIAPASSKISWSLKPPQCKNICVQFSAILRFPRLQSCNHNCNLKPLEGDWKWDRRFQSGFHQLKTRKWKTRCIQEIHKQLVSSAINGSKRLG

SEQ ID NO: 216446 - protein, 187 aa, Glycine max
  Clone ID: PAT_MRT3847_3747C.1.pep
PRVRPRVREPWLEGTFNGNGFLYDRKWGGIVTKQGSTDAGADFGFGIYNDHHYHLGYFLYGIAVLVKIDPVWGWKYKPQAYSLMADFMTLSRRSNSNYTRLRCFDLYKLHSWAGGLTEFGDGRNQESTSEAVNAYYAAALMGLAYGDTHLVAIGSTLTALEIHAAQMWWHVKEEDYQYDEEFGKDKQ

SEQ ID NO: 216447 - protein, 30 aa, Glycine max
  Clone ID: PAT_MRT3847_37480C.1.pep
IYSYPSGMMKNVLFITSAPLKENFCSPGLT

SEQ ID NO: 216448 - protein, 316 aa, Glycine max
  Clone ID: PAT_MRT3847_37481C.1.pep
MESEDSFSDLIKMAKKLESDILAKINFSSAHVIDLDRLLCDTFIRQCPTPLDYDNRRDLVHIFNTMTKEIYGNGDGSPVVEEYGSFVMDMFDGKSDIDLSLNFNNSIEVSRQKKISALYRFNKKLQSIQSKGHVTGLQLIFSARVPIIKVTDSGTGIECDLSVDNRDGINKSHIIRAISDIDERFRKLCFLMKSWAKVHDINSPKDSTLSSFSIVSFVAFHLQTRNPPILPPFSILLKEGDNPAYVAKVVETYFNYGKQNKESLAMLFITLLVKLASVENLWQKGFCASLYEGSWILKSWKCSYSMSVIKFISTNP

SEQ ID NO: 216449 - protein, 90 aa, Glycine max
  Clone ID: PAT_MRT3847_37482C.1.pep
GSGQNVNATDTSTVSDAYAKMLTIFIPLLVDESSFFAHFMCFEVPTLVPPGGVVNGNKAGYDDDDDLGIMDIDENDSKSGKNSAELEALN

SEQ ID NO: 216450 - protein, 123 aa, Glycine max
  Clone ID: PAT_MRT3847_37483C.1.pep
PTNFFRPLEKKKKATNLGGGRDKKKKRFGPPKKKTPHNGEKIPFGGKLSKGWGGTQTGPALKKKIFGPREKKTKGPLWGTLQQKAHGVGREKGKTPLFWGGNPPGGGKPGENLFPKTKKVGFP

SEQ ID NO: 216451 - protein, 179 aa, Glycine max
  Clone ID: PAT_MRT3847_37484C.1.pep
MIRACDYNDNAICFFVYQTIFRNPKAIKPYAVPSPEHCNLPAAAMHTSSHMVEVVGLNAPAAQVAQHKWQPNTPDGQGTPFFFQHGKATSGSVGGNLTRTFKGPAGTGEEWQYPQALAFSVSGIRSQAIVSITCDKEIITGIACFYSESEETHHSNKIKMLHHHQVASWICTLWRYFMY

SEQ ID NO: 216452 - protein, 77 aa, Glycine max
  Clone ID: PAT_MRT3847_37485C.1.pep
KRKKEKEQICRWFLLKKGSKTSHHTNGGYRGGIKKEEENRLVIENNPKMSHYKTCMGRAPHSGYWASHYCTPYLKGK

SEQ ID NO: 216453 - protein, 49 aa, Glycine max
  unsure (1)..(49): unsure at all Xaa locations
  Clone ID: PAT_MRT3847_37486C.1.pep
MDLSFPSKTGKAAXLSPSAPLVGWVCMRITVTKHAYYRNPYVGPDRDAY

SEQ ID NO: 216454 - protein, 97 aa, Glycine max
  Clone ID: PAT_MRT3847_37487C.1.pep
FQRGGRKKTRHTTVTPAATEAQATANPTGMDLELPVDPNEPTYCFCNQVSYGAMVACDNPNCKIEWFHFGCVGLKEQPKGKWYCSNCAATKNRRRSK

SEQ ID NO: 216455 - protein, 159 aa, Glycine max
  unsure (1)..(159): unsure at all Xaa locations
  Clone ID: PAT_MRT3847_37488C.1.pep
SWIQFEPPDSGSNPMSLPRLPKNSPVGCLEDNTYSRYAGASRFDQFPLSKKTKDALRESKFVAMTDIQRASLPHALCGRDILGAAKTGSGXEKLYRERWGPEDGVGSIIISPTRELAGQLFDGLKGGGKHHNFSAGLLIGGRKDVDMEKERVNELNILI

SEQ ID NO: 216456 - protein, 52 aa, Glycine max
  unsure (1)..(52): unsure at all Xaa locations
  Clone ID: PAT_MRT3847_37489C.1.pep
LPRRSRPTRVWRMAXELHFNKNGTGINKLHSGVNKLADLGAPTLGHSGKNDP

SEQ ID NO: 216457 - protein, 73 aa, Glycine max
  Clone ID: PAT_MRT3847_3748C.1.pep
LRRESIKKFFLAKKIFNNFGSLYSLKKLKKLNWGRVFHLFDLAVAQGGHPQKTFPLLIGRPLVFPLANPPCFP

SEQ ID NO: 216458 - protein, 239 aa, Glycine max
  Clone ID: PAT_MRT3847_37490C.1.pep
MSFLEEFHANLDSLPVILRKKYTLLRDLDKSLQDIKRQNEQRCEQEIEDIKRGVRSGNITPDTSAIRFSDEALDEQKHSIRVADEKVALAVQAYDLVDTNIQQLDQYLKKFDEEIRRERENAAITGVPASGPEGNTKSGRGNESGTGRGGRKKTRQTTMVTEAQATSNPTGMDLELPVDPNEPTYCFCNQVSYGAMVACDNPNCKIEWFHFGCVGLKEQPKGKWYCSNCAATKNRRRSK

SEQ ID NO: 216459 - protein, 153 aa, Glycine max
  Clone ID: PAT_MRT3847_37491C.1.pep
MMVATSTPSGKDIQVVPPASTSATIPLSHEENPTIQKDINDISALNPTLNVDDKTISVVTLAGDNRGVTMHVAGSHSTRPKPEGKKSASTEKDEAGKTYVNSNIQSINNSIMSNGSINGRDPGVRVILPQQPQPDVKQPCLEKPKAEVSINRV

SEQ ID NO: 216460 - protein, 168 aa, Glycine max
  Clone ID: PAT_MRT3847_37492C.1.pep
HIFLQKILWHFQMEDVDDKLPLPEPSSVSAELKPQAETTEENPEVINPPSSQSFVEAPINQINNNNNRMDSGTHLPVTEFSDLGVSLNAFDGAEQNHQGATVADSERGPSEEDIFNRQQDGVSTATASGDVDNPMNLSTSSSERKDLQTSLIELITEPPQLSLLMFPR

SEQ ID NO: 216461 - protein, 63 aa, Glycine max
  Clone ID: PAT_MRT3847_37493C.1.pep
GSRARVMISQLWQVLWYFLTVFIFVFYVEFLSSAKLMWPSSINHLHERGLQLFNLNIYVLFYA

SEQ ID NO: 216462 - protein, 275 aa, Glycine max
  unsure (1)..(275): unsure at all Xaa locations
  Clone ID: PAT_MRT3847_37494C.1.pep
MATSTSALNKRLEGKVALITGGASGIGKRTAEVFAQQGAKVVIADIQDELGHSVAQSIGPSTCCYVHCDVTDENQIKNAVQKAVDAYGKLDIMFNNAGIVDPNKNRIIDNDKADFERVLSVNVTGVFLGMKHAAQAMIPARSGSIISTASISSYVGGAASHAYCCAKHAVVGLTKNAAVELGQFXIRVNCLSPYALATPLATKFVGANDEELETIMNSLANLKGVTLKAEDVANAALYFASDDSRYVSGQNLLIDGGFSIVNPSFHMFQYPDSES

SEQ ID NO: 216463 - protein, 36 aa, Glycine max
  Clone ID: PAT_MRT3847_37495C.1.pep
GMGRYNICSSNTGHKVDHLKIFWFNLMVQDFSGLVD

SEQ ID NO: 216464 - protein, 189 aa, Glycine max
  Clone ID: PAT_MRT3847_37496C.1.pep
HASADAWVRVEPQMNGGGQERGIRSGTVPTPLVVGMGAACEVAKDEMEYDEKRISALQQRLLNGIREKLDGVVVNGSLERRYVGNLNLSFAYVEGESLLMGLKEVAVSSGSACTSASLEPSYVLRALGVEEDMAHTSIRFGIGRFTTEAEIDRAVELTVQQVEKLREMSPLYEMVKEGINIKDIQWAQH

SEQ ID NO: 216465 - protein, 97 aa, Glycine max
  unsure (1)..(97): unsure at all Xaa locations
  Clone ID: PAT_MRT3847_37497C.1.pep
XXPAXXXLXXFFLXXXLXXIHPFHXXXNASYPXLPXXXVFXSQAXRXXXXXXMCVELEXQXXXFLXLGXACKXXSXSXYRSXSXLEPNSELTYPXAX

SEQ ID NO: 216466 - protein, 118 aa, Glycine max
  Clone ID: PAT_MRT3847_37498C.1.pep
MATFMLKLVLPLLFLFMIPPKTAYAEFEQWCVADEQTTESELQAALDWACGKGGADCSKIQVNQPCYLPNTLKDHASYAFNSYYQKFKHSGGSCYSRGAAITTEVDPSHGSCHYDFIP

SEQ ID NO: 216467 - protein, 73 aa, Glycine max
  unsure (1)..(73): unsure at all Xaa locations
  Clone ID: PAT_MRT3847_37499C.1.pep
YYSGRSVSDFSASLSLHRGGLSSEIAIEPPQTFIIRGVILKHFAWYIXLIKVKVCEKKPYCWEVLQEVMQGHP

SEQ ID NO: 216468 - protein, 80 aa, Glycine max
  unsure (1)..(80): unsure at all Xaa locations
  Clone ID: PAT_MRT3847_3749C.1.pep
LFSLXPQPWXQXPFAQAHLLPQGSHXXXQGHXHCLGIXHXAMLTSLSLVLGGAANIXRSXISVXXXXXXLLXSLETXTXX

SEQ ID NO: 216469 - protein, 127 aa, Glycine max
  Clone ID: PAT_MRT3847_374C.1.pep
MVGRIKNVYSKVYDVPRRPFEKERLDQELKLIGEFGLRNKREVWRVKLSLAKIRKRARELLTLEDKDPKRLFEGNALLRRLVRIGVLEEDTMKLDYVLGLRVEDFMERQLPTQVFKLGLAKSIHQGR

SEQ ID NO: 216470 - protein, 134 aa, Glycine max
  unsure (1)..(134): unsure at all Xaa locations
  Clone ID: PAT_MRT3847_37500C.1.pep
MTADCSRQVGADGIMTSQTCKPGTQRCNATLHKLGKKSDIALNIQGDEPLIEPEIIHGDGKTLHAATDAMFNTATTSLKPADAHASNRVKXRRHNSGGAIELSPGIIPLNKTXKVKQQDPHEPQRGIQSYDAKH

SEQ ID NO: 216471 - protein, 97 aa, Glycine max
  Clone ID: PAT_MRT3847_37501C.1.pep
KKNLASFKGPKKVFIPDSLPKTAPGKILGGFVAEPFVSQILATPVLHFKTLNPAKQSWRPPPLNFPRSLATWHLGGGNFCKWFFKPEPGNWSFQRFM

SEQ ID NO: 216472 - protein, 88 aa, Glycine max
  unsure (1)..(88): unsure at all Xaa locations
  Clone ID: PAT_MRT3847_37502C.1.pep
CVSTPSHRVFYQPHPPRHXPTARYPVFAAFCIATGGPYLSAFPTAALIIRVSVATPSLARITPASAVCYPCSATSGYAGSASAAGPPY

SEQ ID NO: 216473 - protein, 61 aa, Glycine max
  Clone ID: PAT_MRT3847_37503C.1.pep
VLGFEKLSPIMKEALSSERYGVAILYSCFKVIFSLCNIRCFLVQKVKTPGAWVDSANPGTA

SEQ ID NO: 216474 - protein, 59 aa, Glycine max
  Clone ID: PAT_MRT3847_37504C.1.pep
YSVHHLIHYYLQFNNQQLTCSLCPCWPCQALLVYWQSIPFFFVRSQPYRLALNFSESCA

SEQ ID NO: 216475 - protein, 324 aa, Glycine max
  unsure (1)..(324): unsure at all Xaa locations
  Clone ID: PAT_MRT3847_37505C.1.pep
MAAATATASSISAWFTPHAFARRKTRNPKIQKPVLPVPGGGEATTYTRLPLKHDYSAPSPLSSPEIKLSETAPPITRLLRNRKPQNIKQDDVVFEYSDSEPESDGEYEAFDFSGDENVGEGEEETPSVKEKGVPAVMRCFDRAKIYVKSGDGGNGVVAFRREKYVPMGGPSGGDGGRGGDVYVEVDGAMNSLLPFRNSVHFRAGRGGHGQGSMQSGAKGEDLVXVKVPPGTVVRMSGEDNVLLEMVYXGQKGLLLPGGRGGRGNASFKSGTNKVPKIAENGEEGPEMWLELELKLVXDVGIVGAPNAGKSTLLSVVSAAKPAVA

SEQ ID NO: 216476 - protein, 97 aa, Glycine max
  Clone ID: PAT_MRT3847_37506C.1.pep
NFQRRSAFPVFGGLGPTELFKKWGQKPKNPRVNKPVGSVKAPRVFFGPEFFLSLKAISIQWSLWGLFKTRKKIRNPKSFWELYRDFFCKNPPMIFFV

SEQ ID NO: 216477 - protein, 103 aa, Glycine max
  unsure (1)..(103): unsure at all Xaa locations
  Clone ID: PAT_MRT3847_37507C.1.pep
IHYXPYNVIKNXNYTFXIYXIHFFYIKIFTSHFFLIISNIINFFIYXPKKDSLCFIXVIVHXDDTNKELFELVSRVFCFQNPIFQFLIIFLIYFLFLIFLIFS

SEQ ID NO: 216478 - protein, 93 aa, Glycine max
  Clone ID: PAT_MRT3847_37508C.1.pep
ITKHHTWSYEPTLWADILDQSKDGKAHRNTSDTSPSHVNNVTDPFNLLELGASTNGSRWRNILMHAYSPVGSTCSLEHFGYDRGANALTLVDL

SEQ ID NO: 216479 - protein, 119 aa, Glycine max
  unsure (1)..(119): unsure at all Xaa locations
  Clone ID: PAT_MRT3847_37509C.1.pep
NRSVPADVLAKRAHEFEKHAAHERLMDQIPAGDKLTSTNVNKXAKIMNLTQTAGGDIKLVTAAQGYEGKHSCRSNIXGMHYDANDIPLXAQEEILSSRASDFITARVSKNSMPQTTALH

SEQ ID NO: 216480 - protein, 100 aa, Glycine max
  unsure (1)..(100): unsure at all Xaa locations
  Clone ID: PAT_MRT3847_3750C.1.pep
RPAAMHSMXIFKGQGIGGEGSPHLDYLDLRTGQITRTGLGLAASRTNILDGCLATIAACDXLGLVRRCLRLENGRQCHRPSPSYQEHDGEAIAFKARSLV

SEQ ID NO: 216481 - protein, 80 aa, Glycine max
  Clone ID: PAT_MRT3847_37510C.1.pep
VMNIRNIYSEGENNQNQNSICFSSLKIRHTFYIQFAPGRAESEAQPCLIGVMRAWQKGDDILGLGVIVEDETAVFPIYEV

SEQ ID NO: 216482 - protein, 174 aa, Glycine max
  Clone ID: PAT_MRT3847_37511C.1.pep
MRSQLVCNGCRSILVYPRGATNVCCALCNTITSVPPPGMDMSQLYCGGCTTLLMYTRGATSVRCSCCHTINLVPESNQVIHCANCRTTLMYPYGASSVKCAICCYITNISMTNGRLSIPVQRPNGTANSGTVSSTSSSMPYSQSQTVVVENPMSVDSSGKLVRNVVVGVTTDKK

SEQ ID NO: 216483 - protein, 67 aa, Glycine max
  Clone ID: PAT_MRT3847_37512C.1.pep
PLKMLVCFETLTLFCCLRKSKVLNKIFSLNPRPSKYPKKAKINRYVYFFFESSGVQGCLENFRVTIN

SEQ ID NO: 216484 - protein, 91 aa, Glycine max
  Clone ID: PAT_MRT3847_37513C.1.pep
MGSQLVCNGCRNILVYPRGATNVCCALCNTVTSVPPPGMDMSQLYCGGCTTLLMYTRGATSVRCSCCHTINLVPVLGTYHIFLCCQICEAY

SEQ ID NO: 216485 - protein, 112 aa, Glycine max
  Clone ID: PAT_MRT3847_37514C.1.pep
SCCHTINLVPVLESNQVIHCTNCRTTLMYPYGASSVKCAICRYITNVSMTNGRLPIPVQRPNGTANSGTVSSTSSSMPHSQSQTVVVENPMSVDSSGKLVSNVVVGVTTEKK

SEQ ID NO: 216486 - protein, 62 aa, Glycine max
  Clone ID: PAT_MRT3847_37515C.1.pep
CCTTPVVGSSLELVSVIVVEERVIHFPSFPPSIVRDRCVGAGLPCVCSLAQPREWRRLSYPR

SEQ ID NO: 216487 - protein, 134 aa, Glycine max
  unsure (1)..(134): unsure at all Xaa locations
  Clone ID: PAT_MRT3847_37516C.1.pep
XPXPPXXXLXXHXXXXGXXXXPXASXXXXXPXTXGXPXXXXXTHXXXXXXXHXXXXXHXXXXTTXTXXXXTXXHTXXXXXXPPXXVXTHSPRXHXXXXHXXXXXXXXXSXXGVXXAXXXXXXXPXXXYXXXXXX

SEQ ID NO: 216488 - protein, 74 aa, Glycine max
  Clone ID: PAT_MRT3847_37517C.1.pep
TILRTGSPLRIGNKPLFIYSRNASAARFSSRVTGNSHLGVYNGGPLWYGSIWARSPDLFGAFIPPWLNTGGATN

SEQ ID NO: 216489 - protein, 82 aa, Glycine max
  Clone ID: PAT_MRT3847_37518C.1.pep
QMAAANPKISRIALLWSNPCLDSRIVLPSPTQKMWKWENENHVSALTQPSSIFFWRSATLLFLCAKGSAQKRRTRGSTRDSR

SEQ ID NO: 216490 - protein, 78 aa, Glycine max
  Clone ID: PAT_MRT3847_37519C.1.pep
TFSAVVQESLQCQRRLLLHRRRLQPSNANIKEAYEPLKYGLPKTTLLILETLTEAKTGMRIKDSEWPEYERMDQKRTV

SEQ ID NO: 216491 - protein, 94 aa, Glycine max
  unsure (1)..(94): unsure at all Xaa locations
  Clone ID: PAT_MRT3847_3751C.1.pep
NTRRPPENNTEAENKQDPERTGKXAQEHGAQPRQEADWCQNRPARGKTKQTQRDYRAPKAKNHAQKPNAGTRKQDNEAIQKQSNEKKPQLMQEE

SEQ ID NO: 216492 - protein, 86 aa, Glycine max
  Clone ID: PAT_MRT3847_37520C.1.pep
HYLYTNNMVRYIEGYVQKVNRGNAPLVVGQLLDDECAEDFIKGLILSVRSLLPVEPLVEECEKRNRLRMLTQFLEHLVSEGSQDVH

SEQ ID NO: 216493 - protein, 83 aa, Glycine max
  unsure (1)..(83): unsure at all Xaa locations
  Clone ID: PAT_MRT3847_37521C.1.pep
SSLEEEVLLYPASTLIKVANAYAVSLLIPTDVVIAYKYASDANTKTVPASIKPNWRMGLHIXTESNKTLGEPFDMSHTCILNV

SEQ ID NO: 216494 - protein, 142 aa, Glycine max
  Clone ID: PAT_MRT3847_37522C.1.pep
VVPLTVVCPSTQDEMLISRSHEQSLRQAKAPRMFLHSLKNYVSWGGYGDDDLIRDHEYDKPYYNGSKWKTLLAGHNVTMTDGIDKTSATLQLIKLADCDLLKRNCAHTPNAVRGAPEDTARLWSQLHYVSCHRSEMQEADLV

SEQ ID NO: 216495 - protein, 75 aa, Glycine max
  Clone ID: PAT_MRT3847_37523C.1.pep
LRAQNVTSAVEKRIFGGLQERVLRMNVWSSFFDNKPLCKLECREMTVHKSINLMPVSLEDYRQQFQQLAYSRGVI

SEQ ID NO: 216496 - protein, 220 aa, Glycine max
  unsure (1)..(220): unsure at all Xaa locations
  Clone ID: PAT_MRT3847_37524C.1.pep
MTDITDDIAEEISFQSFDDDCRLLGNLLNDILQREVGTNLLDKIERTRVLAQSGCNMRQAGIVNMAEMLEKQLASELSKMTLEEAFTLARAFSHYLTLMGIAETHHRVRKGGNMAQIAKSCDDIFNQLVQGGVPPEELYDTVCKQEVEIVLTAHPXQINRRTLQFKHIRHAHLLDYXDRPDLSTEDREMVIEDLVREITSIWQTDELMRQKPTPVDEARA

SEQ ID NO: 216497 - protein, 106 aa, Glycine max
  unsure (1)..(106): unsure at all Xaa locations
  Clone ID: PAT_MRT3847_37525C.1.pep
MQLTQIYFFSSFSLRVIDKELYALVRALKIWLHYLYPKEFGIHSDHESLKYLKGQGKLNKRHAKWVEFLEXIPLCYYKKGKGNIVADALSRRHFLLSMLETKMIGF

SEQ ID NO: 216498 - protein, 57 aa, Glycine max
  Clone ID: PAT_MRT3847_37526C.1.pep
MVSAAIARNVVGVIGNIISFGLFFSPAPTFYGIVKKKTVEEFKPDPYIATVLNCAFW

SEQ ID NO: 216499 - protein, 99 aa, Glycine max
  Clone ID: PAT_MRT3847_37527C.1.pep
NGWGDGPLTFNNLKITLLFQTKTPGKGNVCEHPTKFLGGKKVPTHTNFVLKKENFFFKTVITLGVKAIFRGPIRNRLFPGFFYFFGALGALKTTRGAKT

SEQ ID NO: 216500 - protein, 55 aa, Glycine max
  Clone ID: PAT_MRT3847_37528C.1.pep
GGRALKGKKITPCAGHRLRESFTFPFLVHLLNTLLFDIGLRDRCKLILTLFQNSV

SEQ ID NO: 216501 - protein, 68 aa, Glycine max
  Clone ID: PAT_MRT3847_37529C.1.pep
RSSSFTRSHGGVKERHPTLFGGLTLVYFFLGEGPSIFPFLGVVSFFFPIALYKLLIGVFYCGGVVLFL

SEQ ID NO: 216502 - protein, 106 aa, Glycine max
  Clone ID: PAT_MRT3847_3752C.1.pep
AKFGTRGGSPNLQKGSFFLGKTMGGKGPSRNKPNYARVRTNWAIKLQRRPQNPPNFFPGRGGNLWEALFKGVNPGGNFLHRKKETVFKATGGHANREGFFFHGLHP

SEQ ID NO: 216503 - protein, 291 aa, Glycine max
  Clone ID: PAT_MRT3847_37530C.1.pep
MARPSLLCMLSSLPCPRPTLLWCHLTFHSSPVVFDDGNLIATPATPGAIQAYAGVTGFIGDYKYDVVINITEGCDIDLGDLVYEPPRDGPTLWEIGIPDRSAAEFYVPDPNPKYINKLYVNHPDKFRQYGLWERYAELYPDKDLIYTIGVSDYTKDWFFAQVTRKKDDNTYQGTTWQIKFKLDSVNKSSSYKLRVALASATLSELQVRVNNPKAPRPLFSSGLIGRDNSIARHGIHGLYWLYNVGIPGTQLVEGDNTIFLTQTRGNGPFQAIMYDYIRLEAPPSSSFNKKN

SEQ ID NO: 216504 - protein, 67 aa, Glycine max
  Clone ID: PAT_MRT3847_37531C.1.pep
TVPHVTYPNIMMSTCTLVQTYVLHLHYAHLLNGRTKRVSPEGKGRKKKIYVPTFIKRGRAYHNEGGT

SEQ ID NO: 216505 - protein, 26 aa, Glycine max
  Clone ID: PAT_MRT3847_37532C.1.pep
HSIFQFWSKQIRFMYEILLCIDSSTQ

SEQ ID NO: 216506 - protein, 65 aa, Glycine max
  Clone ID: PAT_MRT3847_37533C.1.pep
LLAPLFFLCSLIQLFSLFAHNNNTFFLFIIQELINPKGVCFIWGSDRLSVGGGRDLDKNQCFEID

SEQ ID NO: 216507 - protein, 76 aa, Glycine max
  Clone ID: PAT_MRT3847_37534C.1.pep
EHQRSLLTVQSKDEAMRNLDISLITTFPGCQAYFETKFIHVLDDQQWSIDIACTLHVRFSCRCQDRQLSPKIAHGQ

SEQ ID NO: 216508 - protein, 229 aa, Glycine max
  unsure (1)..(229): unsure at all Xaa locations
  Clone ID: PAT_MRT3847_37535C.1.pep
MDWDGKEFAWDPRGLELANGEGQKSEAASVDLRLGEEKTAPDVVAKDTKDSKTVSSPSGSSKRSRLQNGLQNMCCSVDGCNSDLSDCREYHRRHRVCEKHSKTPVVMVGGKQQRFCQQCSRYGSLGEYVGVKSFCMRLCDSQLFRXLDVFCDMGWCQLLLLCRFHSLGEFDEVKRSCRKRLDGHNRRRRKPQPPSLFMAAEKFMYNYKGRFASSWFFFCLLLLNWISIV

SEQ ID NO: 216509 - protein, 72 aa, Glycine max
  Clone ID: PAT_MRT3847_37536C.1.pep
VRLYKLDRPPFFFFFFFFFFFFFFFFFFFFKISATFFFFTQSVKDTRNKNKNANNRTQDANKNETRCKQKRK

SEQ ID NO: 216510 - protein, 70 aa, Glycine max
  unsure (1)..(70): unsure at all Xaa locations
  Clone ID: PAT_MRT3847_37537C.1.pep
PQIVAKDTKESKTVSSPSGSSKRSRLQNGSQNMCCSVDGCNSDLSDCRDYHRRHRVCEKHSXTPXVLVGG

SEQ ID NO: 216511 - protein, 397 aa, Glycine max
  Clone ID: PAT_MRT3847_37538C.1.pep
MMQAGPGGMAQQANQQYAQQQQQPYMMMPPQPQPPQMWATSAQPPSQSVAPPQPTSADEVRTLWIGDLQYWMDENYLYTCLAHTGEVASVKVIRNKQTSQSEGYGFIEFTSRAGAERVLQTYNGTIMPNGGQNFRLNWATLSAGERRHDDSPDHTIFVGDLAADVTDYLLQETFRARYPSIKGAKVVIDRLTGRTKGYGFVRFGDESEQVRAMTEMQGVLCSTRPMRIGPASNKNPSTQSQPKASYQNPQGAQNEHDPNNTTIFVGNLDPNVTDDHLRQVFGHYGELVHVKIPAGKRCGFVQFADRSCAEEALRVLNGTLLGGQNVRLSWGRSPSNKQAQPDANQWNGSGGGYYGYAQGGYENYGYAPAGQDPNMYGSYPGYANYQPPQQQQQIGYS

SEQ ID NO: 216512 - protein, 406 aa, Glycine max
  unsure (1)..(406): unsure at all Xaa locations
  Clone ID: PAT_MRT3847_37539C.1.pep
MMQAGPGGMAQQANQQYAQQQQQQQQQAYMMMPPQPQPPQMWAPSAQPPSQSVAPPQPTSADEVRTLWIGDLQYWMDENYLYTCFAHTGELASVKVIRNKQTSQSEGYGFIEFTSRAGAERVLQTYNGTIMPNGGQNFRLNWATFSAGERRHDDSPDHTIFVGDLAADVTDYLLQETFRARYPSAKGAKVVIDRLTGRTKGYGFVRFGDESEQVRAMSEMQGVLCSTRPMRIGPASNKNPSTQSQPKASYQNPQGAQNEHDPNNTTIFVGNLDPNVTDDHLRQVFGQYGELVHVKIPAGKRCGFVQFADRSCAEEALRVLNGTLLGGQNVRLSWGRSPSNKHDFQAQPDANQWNGSGGGGYYGYAQGGYENYGYAPAGQDPTYXYGSYPGYANYQPPQQPQQIGYS

SEQ ID NO: 216513 - protein, 61 aa, Glycine max
  Clone ID: PAT_MRT3847_3753C.1.pep
RAPIKRFIKDFRNNTKPCLKKPIKKMFGIPRLVQKGKPNLPKEVKGFFPFKKIAKIKISCF

SEQ ID NO: 216514 - protein, 49 aa, Glycine max
  Clone ID: PAT_MRT3847_37540C.1.pep
SDKGAMAIAIAVFFISVVAEQVLFVVCLIIDDSLRVLALVLPICSRCGP

SEQ ID NO: 216515 - protein, 40 aa, Glycine max
  Clone ID: PAT_MRT3847_37541C.1.pep
VTKPIYPLTKLTSIYCIGRSHVNEVSCFPYPHRSGFSSPH

SEQ ID NO: 216516 - protein, 46 aa, Glycine max
  Clone ID: PAT_MRT3847_37542C.1.pep
ESILDSLSDHLYLLRSKLVVLGEECYKAALIAVTLSLPCCGSLGLP

SEQ ID NO: 216517 - protein, 80 aa, Glycine max
  Clone ID: PAT_MRT3847_37543C.1.pep
GSIPRLVFASTNQGLDGVEFAFVVPFEGVFIRIKVQDPPQFHKWNYRRCNASSFVLDLGGFFYLDKCIDALCFIQVVSLG

SEQ ID NO: 216518 - protein, 47 aa, Glycine max
  unsure (1)..(47): unsure at all Xaa locations
  Clone ID: PAT_MRT3847_37544C.1.pep
VEALQESPEYFLVIYTLYGNHKLFSWLLDMLXLXASITLFTFSRCLM

SEQ ID NO: 216519 - protein, 163 aa, Glycine max
  Clone ID: PAT_MRT3847_37545C.1.pep
MEELKSAMEEHMDLMADLVQKLSSDLRAGFRPAYDNFIGFFYAIDWKEPWLMALLGFHVVLLLVTIISRKKTNFQMFLFLLTLAGVYLAERLNRFLGKNWKSFSSQNYFDPSGLFMSVLWSGPLLVISMIILINTLFSLCYLIVRWKRAELRHRARAARNKQD

SEQ ID NO: 216520 - protein, 53 aa, Glycine max
  Clone ID: PAT_MRT3847_37546C.1.pep
IGNSIRKVLHMRVLSLLSKILKYLTENKYTDIIINEKSFTSYPVSLNLNANNL

SEQ ID NO: 216521 - protein, 64 aa, Glycine max
  unsure (1)..(64): unsure at all Xaa locations
  Clone ID: PAT_MRT3847_37547C.1.pep
LXXTAXSXVLDSLTXXVXLXXTIHVVLQXHAMRMLLIFXTHDDLNFARTXKSXVRNPQPQTQRQ

SEQ ID NO: 216522 - protein, 61 aa, Glycine max
  Clone ID: PAT_MRT3847_37548C.1.pep
FSFFFFFFFFFFFFFFFFFFFLGKKNPPPKNIKIFPRGGDLPFGEGCQKRFLKPKRRMSFF

SEQ ID NO: 216523 - protein, 39 aa, Glycine max
  Clone ID: PAT_MRT3847_37549C.1.pep
ESIQLTLFFNLVYCYQLLKLIKIDYPLMALILFSMTASI

SEQ ID NO: 216524 - protein, 96 aa, Glycine max
  Clone ID: PAT_MRT3847_3754C.1.pep
KHRWAPPRAIWVWGMDQRVFRVLGGNHSNPWSGGPPLGKESRKFCLGHQTPKAFGARKKFWDPHGLIRGKPVLWAKTSYGEIKWGRLFLFGVFCSI

SEQ ID NO: 216525 - protein, 136 aa, Glycine max
  unsure (1)..(136): unsure at all Xaa locations
  Clone ID: PAT_MRT3847_37550C.1.pep
IRLERTLGVPENASQDEIKKAFHSMRTRGSEDIEYDRDDAERFRNAYRSHFSDSFHKVFYEIFEEATTQFSSNIEVEMSLTFSEAARGCTKHVSFDALVPCDHCNGQGYSLVAXPKVRPTCRGLGRSTILPFTLTC

SEQ ID NO: 216526 - protein, 90 aa, Glycine max
  Clone ID: PAT_MRT3847_37551C.1.pep
KGNLSPTNDRHAEERTGAGASALQLQQRRRLREEEISPAGAEEIEQCPSRSLGIPLPKHRLRYVQEFRYLYTRLPSLLKHRPQKRGRRVS

SEQ ID NO: 216527 - protein, 50 aa, Glycine max
  Clone ID: PAT_MRT3847_37552C.1.pep
ANTASQWIPIVVYGEKWCQYQNVREHKSVRIVCGAHPCCLFHKLCRTLKA

SEQ ID NO: 216528 - protein, 73 aa, Glycine max
  Clone ID: PAT_MRT3847_37553C.1.pep
SQHGLEPLFTILIPKGESTINNEGSIFAYSVCYDWSKGAENSNPATAKTYIFLHLPQESEVRGKPRIGATGRK

SEQ ID NO: 216529 - protein, 122 aa, Glycine max
  Clone ID: PAT_MRT3847_37554C.1.pep
HILWKYGKTWRLCSSFFYCSNGFEHVLRDQNCGTIRNCTHIANGDWCRVCFVCFWGDLMFFCVGFYCGIYDAVNCKAYWLLFMFDWSYHVRVEIIFYDEFKGLFLFLYYACFLNTVLSFLAL

SEQ ID NO: 216530 - protein, 145 aa, Glycine max
  Clone ID: PAT_MRT3847_37555C.1.pep
RVAPVANRFPKRGLIFGDFSLNPGGPRCEIFSRFLAPCGTLGPSCALGQIGCSDMSLLFPGSPWGPWEFFVESKRVLSVFLRPFPHNPSGPVLSRFGYFWVWFLPGFGFLGVSPGEHWLVCPCLYPMLFLGALFVQFFKNFFFFF

SEQ ID NO: 216531 - protein, 102 aa, Glycine max
  unsure (1)..(102): unsure at all Xaa locations
  Clone ID: PAT_MRT3847_37556C.1.pep
MATFTFEAVVIPXLTGLKAGAGKVSAAVKAXSSPXTRWGLKASLKDVEVAVGATAASAVLASNAMAIEGLLGGDNGSLAFVPNIXSGAFGEKIGSKTTPGFP

SEQ ID NO: 216532 - protein, 91 aa, Glycine max
  unsure (1)..(91): unsure at all Xaa locations
  Clone ID: PAT_MRT3847_37557C.1.pep
IMVYKKITYPYEGKNQKEKNTFFYWPFXXKKRKIKGGGGGETTALLTLXXHFFFLAXXASPQKLXHXFFFPXFFFDGWVGXILXCNTFFFY

SEQ ID NO: 216533 - protein, 43 aa, Glycine max
  Clone ID: PAT_MRT3847_37558C.1.pep
HAYAITMVYGAIVSFGSRSLSLVGLSKILCAVHCDNSFMNHHP

SEQ ID NO: 216534 - protein, 189 aa, Glycine max
  Clone ID: PAT_MRT3847_37559C.1.pep
MRMRSLAFVVILLLLSPTIVKSLSLPHTPSPSPSPSPSPPSTSSSSTLDPKQATALESLNFPTSKDPCAKPSFHNATLCDAAKPFRHLISLRLANCSSYLSLSFTALKSLSTLRSLSLLNCPVTPIRLPADLALSLTSFTCVNSLRQLSGVWLSNLQNLTDLTVSDVNVKASGPFVILARMTKLQTLAI

SEQ ID NO: 216535 - protein, 58 aa, Glycine max
  Clone ID: PAT_MRT3847_3755C.1.pep
RINEVYSMKVIMFIKRHDLIVKTYYDERSEFINEVQDMIIYKAWNMHEKRDVYLNPAL

SEQ ID NO: 216536 - protein, 49 aa, Glycine max
  unsure (1)..(49): unsure at all Xaa locations
  Clone ID: PAT_MRT3847_37560C.1.pep
KEMRSPVTKERSIYARHDAASIPILSTNLXVMEFKVHQFVQLKKQNTVT

SEQ ID NO: 216537 - protein, 80 aa, Glycine max
  Clone ID: PAT_MRT3847_37561C.1.pep
AEAEKNSNAAVHQLGIDSGATLIIHILTSHEGLTQDTHARHIRTYRLYLMLAAQHVEADPALSGKHFYLRTASQDGYVRL

SEQ ID NO: 216538 - protein, 178 aa, Glycine max
  Clone ID: PAT_MRT3847_37562C.1.pep
MEKGKGVMGSGGRRWGVDFSDNSTSRDIPDPPGFSRASLDQDDSTLSRQKKDAESNWKAQKAWEVAQAPMKNLLMMGFMMWMAGSTVHLFSIGITFSALWQPISALQSVGKMFEPYKDNKVELLGPKLLFIALNLGGLALGVWKLNALGLLPTHTSDWVSSLAPAQEVEFSGGGVNLG

SEQ ID NO: 216539 - protein, 178 aa, Glycine max
  Clone ID: PAT_MRT3847_37563C.1.pep
MEKGKGVMGSGGRRWGVDFSDNSTSRDIPDPPGFCRTSLDQDDSTLSRQKKDAESNWKAQKAWEVAQAPMKNLLMMGFMMWMAGSTVHLFSIGITFSALWQPISALQSVGKMFEPYKDNKVELLGPKLLFIALNLGGLALGVWKLNALGLLPTHTSDWVSSLAPAQEVEFSGGGVNLG

SEQ ID NO: 216540 - protein, 47 aa, Glycine max
  Clone ID: PAT_MRT3847_37564C.1.pep
SSISPMSFRKTDSSYGASLQMVFHSTQAHFTYTLTIARYFRHHAHPW

SEQ ID NO: 216541 - protein, 61 aa, Glycine max
  Clone ID: PAT_MRT3847_37565C.1.pep
LDVSVDVGTSPSVTRLYDGILSIGLGRMNADDSLTHTVASYQLVNASHGGECAWCGCIVRE

SEQ ID NO: 216542 - protein, 57 aa, Glycine max
  Clone ID: PAT_MRT3847_37566C.1.pep
PHRPLASSILYENAHISKRYCIIYQISLYPITFVSTYYPSQISFINQYNNIFNTPQY

SEQ ID NO: 216543 - protein, 312 aa, Glycine max
  unsure (1)..(312): unsure at all Xaa locations
  Clone ID: PAT_MRT3847_37567C.1.pep
MAVEASYMNLLPSQLLTNRELIKSNQQLQHQLNSDYMYNTTTQMDSSSALPQPATMPESLLSFYQSNFCDPNKADSGLTYHIPLQRKRSRDFTTELTSLPAHQKNKISSDPSFLNQEILYQFQNQQSEIDRVLAHHTEKVRMELEEQXNSRMLVSAVRDPRSNGLKXEKDEEIQRMEKLNWALQERVKSMCMENQIWRELAQTNEATANYLRSNLEQVLAHVGEERATAAEVADDAQSSCGSNDAADAGDDTAASAAATGRGRLCKNCGVRESVVLLLPCRHLCLCTMCGTTIRNCPICDSGMDASVHVNLS

SEQ ID NO: 216544 - protein, 207 aa, Glycine max
  unsure (1)..(207): unsure at all Xaa locations
  Clone ID: PAT_MRT3847_37568C.1.pep
VSRTGECLLVIWFGSAGEIERPDYFRIRTKKAMPVGRCMXVPLIXNPRAQSFYYIGLSGLGVGGLRVSISEDVFKLSELGDGGVVMDTGTAVTRLPTVAYEAFRDGFIAQTTNLPRASGVSIFDTCYDLFGFVSVRVPTVSFYFSGGPILTLPARNFLIPVDDVGTFCFAFAPSSSGLSIIGNIQQEGIQISVDGANGFVGFGPNVC

SEQ ID NO: 216545 - protein, 135 aa, Glycine max
  Clone ID: PAT_MRT3847_37569C.1.pep
MGLKVNSYTSTTRVIRLVKAHKGFILCDLIIHSGLLDENGNWHASAIATLVDMLASFASYSITSCQQVTLDLSISFYSTAKVQEEVEVEAKVIRKKDELISVIVEVRKKHNGELVALGKLWMVARKNPKHPASKL

SEQ ID NO: 216546 - protein, 86 aa, Glycine max
  Clone ID: PAT_MRT3847_3756C.1.pep
HFLTYNSLDWINHGKRIELCQKTMGSHSYLNKTFIWGALIINILQIIPRAFHFFNSFSNLIPLLPHYQTILKVMKVFPYDAILPNF

SEQ ID NO: 216547 - protein, 142 aa, Glycine max
  unsure (1)..(142): unsure at all Xaa locations
  Clone ID: PAT_MRT3847_37570C.1.pep
KPPQEARSERXPGISHLRVFESIAHVHVLDKRRANLDDKSERFIFIGYDSRSKGYKLYSLNNKKRLVSRDVVFNEEGQWVFETHEKEYKFFPPLEEENTPQHIQQELPLSTSTTHEDTSPSPESERVVLITANYEYILGVKV

SEQ ID NO: 216548 - protein, 134 aa, Glycine max
  Clone ID: PAT_MRT3847_37571C.1.pep
FKFSELGDEGVVMDTGTAVPRLPTAAYEAFRDAFIAQTPNLPRASGVSIFDTCYDLFGFVSVRVPTVSFYFSGGPILTLPARNFLIPVDDVESFCFAFAPSSSGLSIIGNIQQEGIEISVDGANGFVGFGPNVC

SEQ ID NO: 216549 - protein, 66 aa, Glycine max
  Clone ID: PAT_MRT3847_37572C.1.pep
FLTHFFFWWGKMIRVILGWLSYCIVRCSYSLLFEFCDTAFPKYVACLIILFIFIILVKRSFTIRYL

SEQ ID NO: 216550 - protein, 126 aa, Glycine max
  unsure (1)..(126): unsure at all Xaa locations
  Clone ID: PAT_MRT3847_37573C.1.pep
RFLGPDIFFNPDIXACDFTTPLSVVINKCIQSAPIDTWRSLYNNVLXSGGSTMFKDIHRKLQRYLKKIENARVLLSEARLNGEIKSQPAYVNVLINPIQRYSVWLGRSVLASTPDFFTACHTKAEY

SEQ ID NO: 216551 - protein, 343 aa, Glycine max
  Clone ID: PAT_MRT3847_37574C.1.pep
MRNPTHKSPEVENDGDFKVHLFSSSSELLEKLHEKWSSVEKPPYPAMYSSIYGGIILDPAMMVIPIDDHMVHRGHGVFDTAIVLDGYLYELDVHLDRFLSSASKAKISSPFSRSVLHSILIQLTAASKCKKGTLRYWLSAGPGDFLLSSAGCPTSAFYAVVIDQDISQCKEGVKVITSNIPMKPSLFATAKNVNYLPNVLSVMEAEEKGASSSIWVDEEGYIAEGPNVNVAFITQDKELVMPPFDNILHGCTAKRLLELAPKLVDQGLLKGVATKKLTVEEAKAAAEMMYVGSTLPLLPIIVWDDQPIGNGRVGELTMLLSDMLWDDMVAGPGTQRIPVPYVE

SEQ ID NO: 216552 - protein, 244 aa, Glycine max
  unsure (1)..(244): unsure at all Xaa locations
  Clone ID: PAT_MRT3847_37575C.1.pep
SRPAERKNRTIMNMVRSMLKGKSLLKYLWGEVVSTTVFILNRSPSKRLEGITPEEAWSGAKPNVSHFRIFGSLCFRHISDQLRRKLDDKGEQMILLRYHSTGGYKLFDPKSKQIIISRDVVFDESKSWDWEQNTEMKGPSIMIRSEEEETSEGNGKTTQREVRLQRNAPKPARFQGFEMLSDADVSADGNLIHFAMXYEAEPINFEDAMTDQRWVQAMTEELKSIEKIKCGKLVSQPKSKKPID

SEQ ID NO: 216553 - protein, 54 aa, Glycine max
  Clone ID: PAT_MRT3847_37576C.1.pep
AYCAVPFKISHLQEFPVFFLCNNFGFYIHLKVSIRYLTIETHCICIIFGLLISI

SEQ ID NO: 216554 - protein, 94 aa, Glycine max
  Clone ID: PAT_MRT3847_37577C.1.pep
EKRMIVVLIQWAFLKSIFPVLQIGALPKCICLQMTLGTESNIAGFIRHKLCVKTFTPSISYKLYSFGNSSLQRVETLDGIGLSIWVLVSMLNFI

SEQ ID NO: 216555 - protein, 115 aa, Glycine max
  unsure (1)..(115): unsure at all Xaa locations
  Clone ID: PAT_MRT3847_37578C.1.pep
XXXXMQXXTQXGXRKXXAXXXXXKXRXPPDTXXXPXNXGGQXXXXRXXKPRLXGVXMXXGXXGXXSXHGXXXXKQXXXGXRXXXXXXXTXHXSXXXXXVXXAXAXLXDXVRMXEX

SEQ ID NO: 216556 - protein, 53 aa, Glycine max
  Clone ID: PAT_MRT3847_37579C.1.pep
VDQAGSLDLNLDVISGENENHLLHIADNHHNKGVSVEEKVCCSEAKKEEDIMV

SEQ ID NO: 216557 - protein, 74 aa, Glycine max
  Clone ID: PAT_MRT3847_3757C.1.pep
KRAPLGGTCGHDQPGGRLLDGGGPLLRSFFLFCEPKKLEKDPGLHTRWKRKEPGAGGKKKKKKGEKGGSSRSRT

SEQ ID NO: 216558 - protein, 93 aa, Glycine max
  Clone ID: PAT_MRT3847_37580C.1.pep
IIYPMMCWEKYSFDYHLDSLQNASVCKRWLRLISSPSFPTKFVSRQHSLSPRQLILGFFPSDLDFNGLFLLLTFFPKLMISKKKNLYKKNLSL

SEQ ID NO: 216559 - protein, 82 aa, Glycine max
  Clone ID: PAT_MRT3847_37581C.1.pep
MSGTRRDAPPHHKHKDSVPDAGLRSLDHYKRALPKWRYNLRQQALPLIRWETPYLAALQSKLRTPALDSYFAITANLGTHTF

SEQ ID NO: 216560 - protein, 90 aa, Glycine max
  unsure (1)..(90): unsure at all Xaa locations
  Clone ID: PAT_MRT3847_37582C.1.pep
RIKGXIXMXATVGIPENXGIXALACXMHSSFRGRXSSXIFTPICSQDCELWNPACTKAMAMSFNPXNPCSDAWSLEFLQAXRISCDIIVS

SEQ ID NO: 216561 - protein, 152 aa, Glycine max
  Clone ID: PAT_MRT3847_37583C.1.pep
AGICCGVFGEGDTPASLEGTPRPFRLRRSDILPLTDISDMPMPPTEALRKRTKLILRDWDNSIENSHEFTGHKVTNKESEVDYNDDGASETNIVSASERADEAPMFGVTSACGMRRDMEDSVSVRACFTHCLHYYRVFDGHRWCHVATMCNE

SEQ ID NO: 216562 - protein, 173 aa, Glycine max
  Clone ID: PAT_MRT3847_37584C.1.pep
SYTSNTFPTDYVPTVFDNFSANVVVDGSTVNLGLWDTAGQEDYNRLRPLSYRGADVFLLAFSLISKASYENISKKWIPELRHYAPTVPIVLVGTKLDLREDRQYLIDHPGTTAIATAQGEELKKAIGAAVYIECSSKTQQNVKAVFDAAIKVVLQPPKSKKKGKKKNTPCVFL

SEQ ID NO: 216563 - protein, 109 aa, Glycine max
  unsure (1)..(109): unsure at all Xaa locations
  Clone ID: PAT_MRT3847_37585C.1.pep
XKPRKASQDRATIYKFPYLLGTLGMVTLATTYLADRRLLSVEDGYEHHHHHPTKKHWAPTAHIEPSDVENKENTEVEDGQEHNHHYPPKKHWPPTTHNEPSQDENKEGS

SEQ ID NO: 216564 - protein, 572 aa, Glycine max
  Clone ID: PAT_MRT3847_37586C.1.pep
MAEDDGYTKDGTVDYCGNPANKKETGTWKACPYILGNECCERLAYYGMSTNLVLYFKNRLNQHSATASKNVSNWSGTCYITPLIGAYLADSYLGRYWTIAVFSIIYAIGMTLLTLSASVPGIKPTCHGHGDENCRATTLESAVCFLALYLIALGTGGIKPCVSSYGADQFDDTDSAEKERKSSFFNWFYFSINIGALIASSLLVWIQDNVGWGWGFGIPAVAMAIAVVSFFSGTRLYRNQKPGGSAITRICQVVMASIRKYNVEVPADESLLYETAETESAIKGSRKLDHTNELRFFDKAAVLAQSDKVKESTNPWRLCTVTQVEELKSILRILLKWATGIIFSTVYGQMSTLFVLQGQTMDTRVANSESARAPASLSIFDTLSVIFWVPVYDRIIVPIATKFTGNKNGLTQLQRMGIGLFISIFSMVAAAILELIRLRMVRRHNYYQLEEIPMTIFWQVPQYFIIGCAEVFYFIGQLEFFYEQAPDAMRSFCSALSLTTVALGQYLSSLLVTIVTKISTRNGSPGWIPDNLNFGHIDYFFWLLALLSVVNLIAFLVVSMLYTYKRPVGTLR

SEQ ID NO: 216565 - protein, 219 aa, Glycine max
  Clone ID: PAT_MRT3847_37587C.1.pep
DIPSYKRVMLLKDKMGDVPRQTVEEIKKHADAVNLPKTSIIKVSNSILVGMTNVVKELKDANLTVFVHNLKNEYTTLAFDYWSDPNVEIATYVQTAKVDGIVTDFPATASRFMRSPCSDPTHDPTILPAKPGDLLNTIPTELLPPAQAPLPPLEVADVVDPPLPAVTKNSNSTKAEPAAGPGAKPASPPASPSGARVNVANSGLSIVAILVFAMLFAAH

SEQ ID NO: 216566 - protein, 81 aa, Glycine max
  unsure (1)..(81): unsure at all Xaa locations
  Clone ID: PAT_MRT3847_37588C.1.pep
MAEDDGYTKDGTVDYCGNPANKKETGTWKACPYILGNECCERLAXYGMSTNLVLYFKNRLNQHSATASKNVSNWSGTCYIT

SEQ ID NO: 216567 - protein, 110 aa, Glycine max
  Clone ID: PAT_MRT3847_37589C.1.pep
TSNSPKSIRRSKLKMASGDDTSAGGYAQSVNSAQQAKGPSDINVGSGVADSADGTGGDINQGGGVADSSGSIGQAEPGNGRNLQTYSAAEAGSHEDKGVGQKIKDAFKPK

SEQ ID NO: 216568 - protein, 63 aa, Glycine max
  Clone ID: PAT_MRT3847_3758C.1.pep
HTSGTSLKGTPPNIFLFTVDENAPDVVIHNETGVDSASCTLELLSSHACTCHLQLCPFRSGYS

SEQ ID NO: 216569 - protein, 369 aa, Glycine max
  Clone ID: PAT_MRT3847_37590C.1.pep
AGPNHNVGWGWGFGIPAVAMAIAVVSFFSGTRLYRNQKPGGSAITRICQVVMASIRKYNVEVPADESLLYETAETESAIKGSRKLDHTNELRFFDKATVLAQSDKVKESTNPWRLCTVTQVEELKSILRILPVWATGIIFSTVYGQMSTLFVLQGQTMDTRVGNSTFKIPPASLSIFDTLSVIFWVPVYDRIIVPIATKFTGNKNGLTQLQRMGIGLFISIFSMVAAAILELIRLRMVRRHNYYQLEEIPMTIFWQVPQYFIIGCAEVFYFIGQLEFFYEQAPDAMRSFCSALSLTTVALGQYLSSLLVTIVTKISTRNGSPGWIPDNLNFGHIDYFFWLLALLSVVNLIAFLVVSMLYTYKRPVGTLR

SEQ ID NO: 216570 - protein, 80 aa, Glycine max
  Clone ID: PAT_MRT3847_37591C.1.pep
NLFLNRPTKVENLYQSGNAVRTTLGPKRDIRAEKGKESSRKIEEKSNTKWVERTRLQSKVKDEKEAEMKRLKHNVKGTSS

SEQ ID NO: 216571 - protein, 73 aa, Glycine max
  Clone ID: PAT_MRT3847_37592C.1.pep
PPPTPPPQPPPPPPPPPPPSPLPPPYPPPPPPPPPPFPSSPSPPNLPTPPSSNSFLKNPNVNITILPFSVKIF

SEQ ID NO: 216572 - protein, 161 aa, Glycine max
  Clone ID: PAT_MRT3847_37593C.1.pep
IGIRLEIMERMGDKDIVKRAFKTFHNSFNQPKTSVEDKSLTKKQVPSRGTVPKVPTSTTLRKENGRPTKVENLYQSGNAVRTTLGPKRDIRAEKGKESSRKIEEKSNTKGVERTRLQSKVKEEKEAEMKRLKHNVKGTSSPAFNRGQKVVKSRPEKGDAKT

SEQ ID NO: 216573 - protein, 86 aa, Glycine max
  unsure (1)..(86): unsure at all Xaa locations
  Clone ID: PAT_MRT3847_37594C.1.pep
KREKVGRGKEPQEARRRVQYSQRGEENSHTERKGYRLEAXFXGQGXEVGHKGINPRKVITRNKLHAAIKVGLFSXSXGPTRETWGG

SEQ ID NO: 216574 - protein, 83 aa, Glycine max
  Clone ID: PAT_MRT3847_37595C.1.pep
SKVDRQWSNGVTGYIFLSKDHLPPHHNKTLLFLNRSDYKPHFSFASGQNFPASGCKILRVSQATALHLKNMYTYLQCLPPTPK

SEQ ID NO: 216575 - protein, 123 aa, Glycine max
  unsure (1)..(123): unsure at all Xaa locations
  Clone ID: PAT_MRT3847_37596C.1.pep
VLLSVVGVAXAVXPXFVXCLGSRFPFXXXVVVVXGXGAGPXPGFXSLXAWSLLCCVCFFRLCLPPRCLXALVWXLPPFFLVPXXAXARFLXCCLPSRXLCLFVXFGLIXSXXRXCFGXGIXXK

SEQ ID NO: 216576 - protein, 56 aa, Glycine max
  Clone ID: PAT_MRT3847_37597C.1.pep
NALSDFDEARAILISLVNEYKACESPDYIEWGMKDPHNMLSEEGVSTGLLNSKSEA

SEQ ID NO: 216577 - protein, 263 aa, Glycine max
  Clone ID: PAT_MRT3847_37598C.1.pep
IEQLTAIESSRTSLVSLLREARGGHHCRRGLVRRLIQAAHVQSERATNTCQQLLNVNNIPSLAEQSSKEIQTSMTPASFNISSEREQSAPLMYTPQVSFSQKSGHIEEDPRKSAAAAVAAKLTASTSSAQMLSYVLSSLASEGVIGNPMKESSADYHSEKRTKLENDQPSFVPSQNPQQPLPPFPLSESIQHNPPTTNQQSTPNEPPPPPSSSPPPLPPPPPPPMSQYPVPQFMQTAGSISSMAYSYGVTQQPSIAAYPGVGP

SEQ ID NO: 216578 - protein, 59 aa, Glycine max
  Clone ID: PAT_MRT3847_37599C.1.pep
DLNIWSTTFGPLGIGTTTPRRASIYYIQPTTEKEPCLGPTKPKEINYRCKKNNINQNQN

SEQ ID NO: 216579 - protein, 105 aa, Glycine max
  Clone ID: PAT_MRT3847_3759C.1.pep
MMVVRRSLQYPLLLALTSLHLQHLSGLDNNPSGAKNENKDVNHHASRSSVGLKIIIIFLGVVTVIAFCVFLFKLWQRKKREEQHARLLKLFEDDDELEVELGMRD

SEQ ID NO: 216580 - protein, 63 aa, Glycine max
  Clone ID: PAT_MRT3847_375C.1.pep
TLNLSLPNKARLHCSAISNMDTVCLCFFTGIGKLLRQNPVFPLRLIRRDFLIGKDVTFDEWGF

SEQ ID NO: 216581 - protein, 387 aa, Glycine max
  Clone ID: PAT_MRT3847_37600C.1.pep
TRLEANYCSKKTDDLCSNVCDQESSQVLGMSRIRCILRGLDVKTYIFIFAVIPMCVFGLYLHGQKISYFLRPLWEKPPKPFHVIPHYYNENMSMGNLCRLHGWGVREFPRRVYDAVLFSNELEILNLRWRELYPYITQFVLLESNSTFTGRPKPFVFKGNREQFKFVESRLTYGTIGGRFKKGENPFVEEAYQRVALDQLLKIAGITDDDLLIMSDVDEIPSAHTINLLRWCDDVPSVLHLQLKNYLYSFEFLLDDNSWRASVHRYQSGKTRYAHYRQSDDLLADAGWHCSFCFRYISDFVFKMKAYSHNDRVRFSHYLNPKRIQDVICKGADLFDMLPEEYTFKEIIGKMGPIPHSYSAVHLPAYLLENAEKYKFLLPGNCLRESR

SEQ ID NO: 216582 - protein, 50 aa, Glycine max
  Clone ID: PAT_MRT3847_37601C.1.pep
FNAFNLFLHLPITSWGLAYIAEDAKASPHCCNLLSLIFPQTIISFLPSQR

SEQ ID NO: 216583 - protein, 44 aa, Glycine max
  Clone ID: PAT_MRT3847_37602C.1.pep
FYVNLILYFVFFVFVILSNSCCSAPSFSKVSYRLSLYRFLLNFS

SEQ ID NO: 216584 - protein, 182 aa, Glycine max
  Clone ID: PAT_MRT3847_37603C.1.pep
TETKSDLLIMSDVDEIPSAHTINLLRWCDDVPSVLHLQLKNYLYSFEFLLDDNSWRASVHRYQSGKTRYAHYRQSDDLLADAGWHCSFCFRYISDFVFKMKAYSHYDRVRFSHYLNPERIQKVICKGTDLFDMLPEEYTFRDIIGKMGPIPHSYSAVHLPAFLLENSEKYKFLLPGNCKRER

SEQ ID NO: 216585 - protein, 103 aa, Glycine max
  unsure (1)..(103): unsure at all Xaa locations
  Clone ID: PAT_MRT3847_37604C.1.pep
AGWHCSFCFRHISDFIFKMKAYSHNDXRVRFSHYLNPKRIQDVICKGADLFDMLPEEYTFKEIIGKMGPIPHSYSAVHLPAYLLENAQKYKFLLPGNCLRESR

SEQ ID NO: 216586 - protein, 145 aa, Glycine max
  unsure (1)..(145): unsure at all Xaa locations
  Clone ID: PAT_MRT3847_37605C.1.pep
PGGTARGPEDYERTGRGGLLFFSLTSFLSLCNQILPREESSHHRALLLSSPPLPSFSSHSIPQQNKGQRVFRVLGERKPKSQSHGGRRHRCEPPEGDRLCVNNGGVFGGAATRSLCAKCDSASRVREQEEAXXKSTIETARSSAS

SEQ ID NO: 216587 - protein, 231 aa, Glycine max
  unsure (1)..(231): unsure at all Xaa locations
  Clone ID: PAT_MRT3847_37606C.1.pep
MTSSVVEGGRDEGKHEPSDFITETMNLPSPNLSLPSETETFLSAAISLKDKVVEETWNRRDQVVDPTVYTGLLGTAFTCLRSYQVTGCRNDLILCSDIIDTCVTAARASLRHVTFLCGRGGVYALGAXFLGLFFEVAKERALPVGPEXGGFGMSYDLLYGRAGFLWGALFVNKHLGDDAVPKDILMPXYXTVLAXRSAAASDDCPCPSMYCWHGTIYYMRSTSSIFCSIEL

SEQ ID NO: 216588 - protein, 62 aa, Glycine max
  Clone ID: PAT_MRT3847_37607C.1.pep
SKNPNSMMEIDFCSQQVAVYDWFSYTLRPIQKSSCQWKSLHCMRRTKMIFISHMHAYQPISY

SEQ ID NO: 216589 - protein, 169 aa, Glycine max
  unsure (1)..(169): unsure at all Xaa locations
  Clone ID: PAT_MRT3847_37608C.1.pep
MVEGGRDEGKHEPSDLITETMNLTAPNLSLPSETETFLSAAISLKDKVVEETWNRRDQVVDPTVYTGLLGTAFTCLRSYQVTGCRNDLILSSEIIDTCVTAARASLRHVTFLCGRGGVYALGAVVANYMGDLQKRDLFLGLFIERALPVGPXEGGFGMSYDLLYGRAGF

SEQ ID NO: 216590 - protein, 259 aa, Glycine max
  Clone ID: PAT_MRT3847_37609C.1.pep
ETPPTENTFNAGVESSGVEQFTPDGGVTLAAVPSETANGKRIRNIVSAVKHVHRKRKGSPAQRQGRARPLEWVAALEAEPVSASRSGTYEVYKSNRRPVTDDETRKIESLAKAACTDDSIYVVMKPTHVYKRFFVSIRGTWIGKHISPSSQDVILRMGKGEWIARYSYNNIRNNGGLTGGWKHFSLDSNLEEGDACVFKPAGQINNTFVIDMSIFRVVPETVPLTPMSRGTRTGTRTGTGRRGRKPATMKSIQTQLSSP

SEQ ID NO: 216591 - protein, 97 aa, Glycine max
  Clone ID: PAT_MRT3847_3760C.1.pep
TVLNMKSFGSGRRNSVLVLGATKKIKKSTIYYSILRWMSVWCATCVEPLIFIHSVLAGSDKLTMGILEANTPTCNLLLCIEASIYIALGGGSHRAMF

SEQ ID NO: 216592 - protein, 77 aa, Glycine max
  unsure (1)..(77): unsure at all Xaa locations
  Clone ID: PAT_MRT3847_37610C.1.pep
ENMNLVVIFLAVVHSVTWSFHDANYHXLPLLMKTMYREHSSXVKTPHFRLSNHAHKMRAFKTILHXCLAPSNDFFNG

SEQ ID NO: 216593 - protein, 43 aa, Glycine max
  Clone ID: PAT_MRT3847_37611C.1.pep
GTYQFADQHNYKRGDLKKGSMFLLCYNSGSKPIPLIPLVPISQ

SEQ ID NO: 216594 - protein, 52 aa, Glycine max
  Clone ID: PAT_MRT3847_37612C.1.pep
EGRGVESKGGCSAPVKKPLFGRSPWLLCTSAQTLVVDSNAALSAPLIFPEHT

SEQ ID NO: 216595 - protein, 48 aa, Glycine max
  Clone ID: PAT_MRT3847_37613C.1.pep
ERRCFRSMGLEQANSQSLVRVATASFTLSHPSGSRLISCCRKIGYAAG

SEQ ID NO: 216596 - protein, 54 aa, Glycine max
  Clone ID: PAT_MRT3847_37614C.1.pep
PNNIYTGDLYKKLFISFFRTEYKIFYSLGYSVENIIILVKTIISHKNLIELFPK

SEQ ID NO: 216597 - protein, 100 aa, Glycine max
  unsure (1)..(100): unsure at all Xaa locations
  Clone ID: PAT_MRT3847_37615C.1.pep
EARAPEEAILGVVEGGPNNXTPPPDGPAVSQKRXGMTPFVFVPLKKGETFVLNLPGEKKDYFGPGGIIKTPQKKTGPFVKNPKLKVKKLGNLLLGGLRGN

SEQ ID NO: 216598 - protein, 183 aa, Glycine max
  Clone ID: PAT_MRT3847_37616C.1.pep
MPMFHLTFAIWGLLSVSCFIVVVCASWCPYQIFQQSNQRFQQKTDKFWVFSEQTETWVEAKLPYDLLSCVNGDCRKVGSILQTDKKSTQEVLELKHKLDEQKRSVENKDSKLEAEDVVLPQRKRISLSKISETSVWITGESGSIYERFWNGMEWVIVPHDLPVSAGSAISIFVINQTILALSE

SEQ ID NO: 216599 - protein, 41 aa, Glycine max
  unsure (1)..(41): unsure at all Xaa locations
  Clone ID: PAT_MRT3847_37617C.1.pep
NHNVNLMGPFPFPDKVNHNVLAISFPSIPIVIQTXKXIXXX

SEQ ID NO: 216600 - protein, 162 aa, Glycine max
  Clone ID: PAT_MRT3847_37618C.1.pep
LNEARGGWVGPSQPDALSQDARIESNHAAVPSQTDKMDNTFSVVPSKIAEMENNDSALPFQFAKTKCNCSAIPSQGSIPESNHGDCLGDNVERALEQLLSRMDRIEEICLGFQEKMVMPMSSIEARLQQVEQQLDTLTKKFQTSAFPSCPRISALDASCIES

SEQ ID NO: 216601 - protein, 76 aa, Glycine max
  Clone ID: PAT_MRT3847_37619C.1.pep
TPFKGLKTNRPSLGKKKPKIGGGLFQPQNMGPPLHLFFPPKTPPPKLKGPTRGGPPGFPPLKPLRGSTGGPEIPPG

SEQ ID NO: 216602 - protein, 75 aa, Glycine max
  Clone ID: PAT_MRT3847_3761C.1.pep
TPKLGPGKEPTWFPGDKTQLRVWDGHTNLTQGVPATQPSRVTSWTLALIPHFFAKRNLSSPGLTILKKKSKKTNL

SEQ ID NO: 216603 - protein, 50 aa, Glycine max
  Clone ID: PAT_MRT3847_37620C.1.pep
PRVRPRVRRQFQLRMQGEKRKDDAKWKLLARKVASAKVMSSLSLPKRKRD

SEQ ID NO: 216604 - protein, 60 aa, Glycine max
  Clone ID: PAT_MRT3847_37621C.1.pep
PPPLFFYNVILYPVFFLPLSLRTKQIFSFPRFFQIFFIALSGEGLFTFFPFPFWKFFLFL

SEQ ID NO: 216605 - protein, 71 aa, Glycine max
  Clone ID: PAT_MRT3847_37622C.1.pep
LWREMLFISLFLFWLELWPNYTGSIAWCPRVMETRVYSFHFLFWIFSFVFKRGEPSFVFFLVPNWLWEKLE

SEQ ID NO: 216606 - protein, 64 aa, Glycine max
  Clone ID: PAT_MRT3847_37623C.1.pep
KVLPVEFEQKSVTFHLGFTGSHFGSISSTPDNRQSLDVPAEKAGLLVLRLAFHSISSSYRAYSK

SEQ ID NO: 216607 - protein, 365 aa, Glycine max
  Clone ID: PAT_MRT3847_37624C.1.pep
MATNIGIMDAAYFVGRSEILSWINSTLQLNLSKVEEACSGAVHCQLLDAAHPGIVPMHKVNFDAKSEYEMIQNYKVLQDVFNKLAIPLHIDARKLVKGRPLDNLEFMPSMKRIHKAKKNKRQSKKEMATNIGIMDAAYFVGRSEILSWINSTLQLNLSKVEEACSGAVHCHVCDKTQEGIVPMHKVNFDAKSEYEMIQNYKVLQDVFNKLKITKHIEVSKLVKGRPLDNLEFMQWMKRYCDSVDSGLQYNYNPLERREVCKGGRETSKKSANSQASTKGSTAQRPHSSHNARRNEVSNANPTNQAAKVARAAPSAGNPAPVYEEKITELKVSIDSLENERDFYFAKLKDIEILCQNSEIEHSPIV

SEQ ID NO: 216608 - protein, 42 aa, Glycine max
  Clone ID: PAT_MRT3847_37625C.1.pep
ELFSIGSSSACTLLHSHGYHLFQSGSITQLSLSWRQSMTAVD

SEQ ID NO: 216609 - protein, 89 aa, Glycine max
  Clone ID: PAT_MRT3847_37626C.1.pep
PRVRCLYYGITIMILNGQGSFLLSSLRLSRASHEDRRHDFYFLCGGTSLRRRVRRLTRRQQPCYRRRHRQQRLDEGKEEDRQRPLVDEA

SEQ ID NO: 216610 - protein, 43 aa, Glycine max
  Clone ID: PAT_MRT3847_37627C.1.pep
CDLNSINGPFFFISVTVITTPYNNYIILIYISISPFGLLSNRP

SEQ ID NO: 216611 - protein, 61 aa, Glycine max
  Clone ID: PAT_MRT3847_37628C.1.pep
VKYIDSYSVTIQELESVTAKFKFNSMMRGNLLLFFLPFHWCIDLLIFTLLLMFEPHAVIIM

SEQ ID NO: 216612 - protein, 118 aa, Glycine max
  Clone ID: PAT_MRT3847_37629C.1.pep
SNASCHTLSVAQKSFLEPMITFARVFPENLPSTHNHMLCLGKLHKIFQFYRTEFCYFFIFTCSILMSIAGKGKSSEKAKAEPSKVEMHRVAVDILKEVDFNKVSNDFLCQFMYLFSLI

SEQ ID NO: 216613 - protein, 34 aa, Glycine max
  Clone ID: PAT_MRT3847_3762C.1.pep
GNEISSIKVVVSGKSLLKFSRCSGKFSLANDCPD

SEQ ID NO: 216614 - protein, 96 aa, Glycine max
  unsure (1)..(96): unsure at all Xaa locations
  Clone ID: PAT_MRT3847_37630C.1.pep
MQKTCCFHAVILHFLILAVKKLDKRVSNHQTNDEFLELINSIDIIRHPNIVELIGYCAXHGQRLLIYEYCSNGSLQDALHSDDEFKTRLSWNSRYK

SEQ ID NO: 216615 - protein, 98 aa, Glycine max
  Clone ID: PAT_MRT3847_37631C.1.pep
MKDFSCNKYKDPFKRSRSASLVGIQTYKGGSPRSEFHTAESEKHGEGFRGKSSSDMVVRREAHVVPKLRCRVLGAYFEKLGSTSFAVYSIAVTDGQEK

SEQ ID NO: 216616 - protein, 182 aa, Glycine max
  unsure (1)..(182): unsure at all Xaa locations
  Clone ID: PAT_MRT3847_37632C.1.pep
PFPLVGKFFEIFPQIPRPFGKGLXKGPHFFKNGDAGLVKMVPPPPPGGGPFFGAPPPGRFPVGAPRPPLPVGAPQRVGKKAPPGPRVPKAPPQKKGFPFGHFAAPCVPPRGFKKPCPLPGVFLSRVLGVCFPPFFFKGPPFSCTRPPPTWVFVRRAPFCFCLFFMGPVFCFSPQKKKKKKKK

SEQ ID NO: 216617 - protein, 678 aa, Glycine max
  unsure (1)..(678): unsure at all Xaa locations
  Clone ID: PAT_MRT3847_37633C.1.pep
FGSRLAQAQECVFENTIAKGSTPEFCAKIXRQVGIYYEEALAALNVAPLSQHFDKSWIVHVQLKAALFYAEACYRYGLELHDKEEIAEEIARLRSAVNVLTEAKKSSKGAAAQILDAIGKLEANINRNLERAVKENDRVYLMRVPSPSSLQPLPAFSMVKSMVMNEMLDASKENMFASLVPDNSAKALSRYTEMVDDVIRTQAEKLQQASELTRVRLLEMELPEAILALEGNSLSKSCLKEDVEAVQISGGPAGLEAELQQLKDLRRVNQELLVQTEELLQKEAREDSQFRSQFGTKWTRPQSSTLTKNLQDRLNRFAGNLKQAAESDGRIERSVREHSALMSILDARPIESALPSLARPIMSFDQNEDAIVGSLKQSLRQLETLGAQRAGLEDMLKEMKRKDDILPKLMTSTGSYDDLFKKEIAKYDHICEEIAQNIEAQEQLLLQIQAQNDEFSVIFNLEDYKASREKAYKQIEAAIAKFREIKDNINEGLKFYVTLQDAITNVKQQSNDFVMTRNIQCREMIEDVQRQVAGLSFQDNKNTGGFNSNYPSVGSQNQRSPTQTDPARPQAPYYQQPVEQPPVPPYGHHPPPPYGGPAQHHQPPPPYHIPPSSTAPYPPPQVHQQPPANHEYGQPAYPGWRGPYYNAQAQQPGSVPRPPYTIPSPYPPPHQSGYYKQQ

SEQ ID NO: 216618 - protein, 75 aa, Glycine max
  Clone ID: PAT_MRT3847_37634C.1.pep
GCEKTTEGGNSNFQHCPLPFPQVRPSSLLPDLCYHPITFPSIISFHSISHHSPTPTQIIIQLTATRYSKLEACSC

SEQ ID NO: 216619 - protein, 129 aa, Glycine max
  Clone ID: PAT_MRT3847_37635C.1.pep
MEQEDNTIIPTFLRKPAADQNNNNNNNNNSPTTPSHKSLHVFRRSRRRWRKEVAVKEDEDVDEGDDREEIERKIHALQRIVPGGESLGVDKLFDETAGYILALQYQVKALRALTGFFDKLEKEKTKFGG

SEQ ID NO: 216620 - protein, 155 aa, Glycine max
  unsure (1)..(155): unsure at all Xaa locations
  Clone ID: PAT_MRT3847_37636C.1.pep
MGMVPDERCVKNRYWIERTTDLAVXPMVLDSHTFVLNEEDRPKDLYLLPTYEGQXFVNLGARVARFTVELAKKAGPVLAVXLLRVLLKRSDSIIGHHMNVKVMCADLTFPNLYIAEGSADLLFCYWVFMCASXTEVANSAARMIVWYKGDAYVLF

SEQ ID NO: 216621 - protein, 37 aa, Glycine max
  Clone ID: PAT_MRT3847_37637C.1.pep
GSWCPLHLWERHSPDSNFSPSPLLLSLLLNILERFLL

SEQ ID NO: 216622 - protein, 139 aa, Glycine max
  Clone ID: PAT_MRT3847_37638C.1.pep
MPSPSSMEQEDNTIIPTFLRKPAEDQNNNNSPTPSHKSLHVFRRSRRRWRKEVAVKDAVQEEEDEEKEEGEDGGDDREEIERKIHALQRIVPGGESLGVDKLFDETAGYILALQYQVKALRALTGFFEKLEKEKTKFGG

SEQ ID NO: 216623 - protein, 90 aa, Glycine max
  Clone ID: PAT_MRT3847_37639C.1.pep
GLVEVYEADRCGSLRARLKHGLCLRLSPGSLLCECPLPTLRLCSFSYMHSLGPTSTDFILWILTQAVGLLVTGMKIFMNVLATIRWKSSA

SEQ ID NO: 216624 - protein, 81 aa, Glycine max
  Clone ID: PAT_MRT3847_3763C.1.pep
FNLLVFILVILVFYAFSSLHIFNARYSRKPNLSVYFVTPRRRDTYTLPTSYIFPSYAATRHPPPQTNGWSVIQLMIGKAFL

SEQ ID NO: 216625 - protein, 82 aa, Glycine max
  Clone ID: PAT_MRT3847_37640C.1.pep
NELPIDRPAVHMAFHIYYDHYHGHKHDVNTLENTRFHDCFKDCKEDRKIDICHHNCHHKWVQRLAQLAFPPDCATDGFNDPY

SEQ ID NO: 216626 - protein, 157 aa, Glycine max
  Clone ID: PAT_MRT3847_37641C.1.pep
SPFSKIPLNFSHFLSFFHSKVNLISISIFLSLYLFCFFFFLLTENRTKWRKKRKRESYKRNQKRHGGDEDDSDDDNEPDDNDDSDDQFRSPSAQFADPQRVEIEVVSPDGVQNSRFPPAIRRAVTRPHAAVTAIAALEAGGDKSQHSSISVLENVSH

SEQ ID NO: 216627 - protein, 132 aa, Glycine max
  unsure (1)..(132): unsure at all Xaa locations
  Clone ID: PAT_MRT3847_37642C.1.pep
GRLVSIERERGKRWWKVKQKRDLASLLRKSWYHLRLSVRDPCRVPTWDAILLTAASPEQAQLYNWQLXSGTKRMGRISASTFTLAVPDPLGQRIGSGAATLNAIHALSHCINHGSDIDVSLLARKHILLLHA

SEQ ID NO: 216628 - protein, 152 aa, Glycine max
  unsure (1)..(152): unsure at all Xaa locations
  Clone ID: PAT_MRT3847_37643C.1.pep
SPSHQVSHFPLKTHLSHLSQYVYSLFRKCFSFSSXNPDPGTDSDPDPTRDRRRIVRVAWEKIVRWSRSWRSKANTDVLQRTNNVVVLGGGSFGTAMAAHVANRKAELEVIMLVRDPQVCLSINERHCNCKYFPDHTLPENVVATMDAKSALL

SEQ ID NO: 216629 - protein, 70 aa, Glycine max
  unsure (1)..(70): unsure at all Xaa locations
  Clone ID: PAT_MRT3847_37644C.1.pep
MVGGGSRRDEGSLVLNNTNVFAALDTLKKKKKSDKEKKSKGSSTKSQAQSAKAEAPVFWAPAPLXAKSWA

SEQ ID NO: 216630 - protein, 25 aa, Glycine max
  Clone ID: PAT_MRT3847_37645C.1.pep
MALYNQQTVDYTSFNRVIVDDCGTG

SEQ ID NO: 216631 - protein, 83 aa, Glycine max
  Clone ID: PAT_MRT3847_37646C.1.pep
SPERTCCGGNCGGRSACTCANRGGGCASAHTRATPREHTAETLRIGAAAPKAAHCRPAERGGPADNEGCKRGSSRACGPCSCK

SEQ ID NO: 216632 - protein, 87 aa, Glycine max
  Clone ID: PAT_MRT3847_37647C.1.pep
LSKRKTLFSTLTFQHQLFSDEESYFSNVTRMLSKRGGGKQRIYQMLHLFLPLGALVLPFTSIILLLMIQMLKMNNLLYILEGPNGKN

SEQ ID NO: 216633 - protein, 56 aa, Glycine max
  Clone ID: PAT_MRT3847_37648C.1.pep
FFFFFFFFFFFFFFFFFFFFFFFFLTVEGDPLHHQKIDLIFFVRICYYSYRFEHLI

SEQ ID NO: 216634 - protein, 43 aa, Glycine max
  Clone ID: PAT_MRT3847_37649C.1.pep
YNFALDVCLCVYDCNCTLVGALVVSAIMHSWSCLNYTTMIVAI

SEQ ID NO: 216635 - protein, 240 aa, Glycine max
  unsure (1)..(240): unsure at all Xaa locations
  Clone ID: PAT_MRT3847_3764C.1.pep
SSRIGSRKNPAFKPPADYRPPKLQKKLYIPMKEYPGYNFIGLIIGPRGNTQKRMEKETGAKIVIRGKGSVKEGRLQQKRDLKPDPSENEDLHVLVEAETPESLEAAAGMVEKLLQPVDEVLNEHKRQQLKELAALNGTIRDEEYCRLCGEPGHRQYACPTRTSTFKSEVVCKHCGDGGHPSIDCPVKGATGKKMDDEYHNFLAELGGSVPESATKQTSTLAVGAGTSXGSNPPWANNFNT

SEQ ID NO: 216636 - protein, 123 aa, Glycine max
  Clone ID: PAT_MRT3847_37650C.1.pep
MERDMISTLPKTILHDILSRMPEEDAVRTSVLSKSWAEAWSTYPILYFSDTMIVGTFPRPWEDFLRKRKNFIDHVKRTLLRFHTQGLAIKQFRLIINFDLQYMSLDVDHWLKLASESGVHVLE

SEQ ID NO: 216637 - protein, 150 aa, Glycine max
  Clone ID: PAT_MRT3847_37651C.1.pep
LSFQREMVLGLPQIKPPSEVCDGCLQCKQSRSTFKQNVPIRAKEKLEVIYSDVCGPMQTESLGGNRYFISFIDELTRKVWVYLIRRKSDFFEVFEKFKNMAKKQSGSLIKILRTNGGGEYVSTEFQEFCDQQGIIHEVTPPYTPQHNGAA

SEQ ID NO: 216638 - protein, 81 aa, Glycine max
  Clone ID: PAT_MRT3847_37652C.1.pep
EKKMKNAPSFSYEEAVQTPLFAPQPVFQGGFKPPQIGVGVGRKDIPNFRVFPPPEIFGPLPPISGGAWVFYKEVVFPPFLG

SEQ ID NO: 216639 - protein, 50 aa, Glycine max
  Clone ID: PAT_MRT3847_37653C.1.pep
ALFPHRGNLSLLTPAQLSLMLFSLHLINPCLLFSPTCVNSSQISKEASIL

SEQ ID NO: 216640 - protein, 65 aa, Glycine max
  Clone ID: PAT_MRT3847_37655C.1.pep
RMIGNFTRCSMNLNNTLPTPTPLIILLITIPTILSSLTLKLLFHQSHHPQLLSLYHQHFNISKQD

SEQ ID NO: 216641 - protein, 89 aa, Glycine max
  Clone ID: PAT_MRT3847_37656C.1.pep
SYFKIIRGQNDCTIESRRVTAGLPKIAGQNIKYPVETSTVIDGARQQIAIDEEVIEIAKYGVSQLAASRGINRFHGVKQAFAQVQNGIV

SEQ ID NO: 216642 - protein, 295 aa, Glycine max
  Clone ID: PAT_MRT3847_37657C.1.pep
ANIESSLNLKSFTRSSAASMEDIADSDNNDLSEQKNMDHPILSSILDSYFVNLVKGLEADIREQIVEAFSHPKVQVAVVPAELEQKMGESDGEYIRRLKAFLEKQCSEIQDLLSRNASLAEDLARTGGGSNSQSEQRVSGSSDKVQINALSRDLQETSKRLEMLKAEKAEVESEARKNRTLAEKMEADLRSLSGAYNSLEQSNIEQEKQVKALKSGAPSTFLDLEAIKAEAREEAQKESEGELNDLLVCLGQEQSKVDRLSARLLELGEDVDKLLEGVGNDVGNVEDDEDDEGPE

SEQ ID NO: 216643 - protein, 160 aa, Glycine max
  unsure (1)..(160): unsure at all Xaa locations
  Clone ID: PAT_MRT3847_37658C.1.pep
MANQFPESLAPSEEDVQRLLATQAHIGTTRLEAAMERYVYKRSSDGVHLINVRKTWEKLQLAARVIVTIENPADICVISSRPQGQRAVLKFARYTGAHAIAGRYTPGSXINRVQDRFLEPRFLVLTDPRSDHQPIKESSYVNIPTIAIWHTDSXINYVDI

SEQ ID NO: 216644 - protein, 66 aa, Glycine max
  Clone ID: PAT_MRT3847_37659C.1.pep
LIHSQQPQSSLPPSNLYNIRRRSSLYRVPPLLSLRPLLLFRPTPSLLGSYPKPIISINLSRVSVRT

SEQ ID NO: 216645 - protein, 61 aa, Glycine max
  Clone ID: PAT_MRT3847_3765C.1.pep
NRTFHFRRMHSHQVQRTLESYRTVFILCHADHDATWTAFKSRSDSSRIIFSDVYRITKVTH

SEQ ID NO: 216646 - protein, 56 aa, Glycine max
  Clone ID: PAT_MRT3847_37660C.1.pep
MPNVKITRVPRRGSFWALSKPRSHMWASIYESFKQVVPWRRKQQTQKKCASQLKTV

SEQ ID NO: 216647 - protein, 62 aa, Glycine max
  Clone ID: PAT_MRT3847_37661C.1.pep
PQHRGNKTLHKGTTPNTYTITRRSKHTHVNLTNGPPVKTKTLHNLFLTPQAHRFIFLGSFIG

SEQ ID NO: 216648 - protein, 70 aa, Glycine max
  Clone ID: PAT_MRT3847_37662C.1.pep
PARLLCPWDSPGKNSGAGCHALLQGILLVALFKYFFLPVGVMFEDKLYLLLVVQFLTCVPLFVTPWTAAS

SEQ ID NO: 216649 - protein, 407 aa, Glycine max
  unsure (1)..(407): unsure at all Xaa locations
  Clone ID: PAT_MRT3847_37663C.1.pep
MATLTFISCSKMMFFFLTNLMMLYRRLARRRRQKGTAARRRQKESISKKNIIKMINIIGALVLLFAFLFLSCVYAQDTTTLVPAIITFGDSAVDVGNNDYLPTLFKADYPPYGRDFVNHQPTGRFCNGKLATDFTADTLGFKTYAPAYLSPHASGKNLLIGANFASAASGYDENAATLNHAIPLSQQLSYFKEYQGKLAKVAGSKKAASIIKDALYVLXLEAVTLCKIIMSILGXNKVYTPDQYSSYLIGSFSSFVKDLYGLGARRLGVTSLPPLGCLPAARTIFGFHENGCVSRINTDAQGFNKKLNSAAASLQKQLPGLKIAVFDIYKPLYDLVQSPSKSGFVEANRGCCGTGTVETTSLLCNPKSPGTCSNATQYVFWDSVHPSQAANQVLADALILQGISLVT

SEQ ID NO: 216650 - protein, 217 aa, Glycine max
  unsure (1)..(217): unsure at all Xaa locations
  Clone ID: PAT_MRT3847_37664C.1.pep
FAADTLGFKTYAPAYLSPHASGKNLLIGANFASAASGYDENAATLNHAIPLSQQLSYFKEYQGKLAKVAGSKKAASIIKDALYVLSAGSSDFVQNYYVNPWINKVYTPDQYSSYLIGSFSSLXQDLYGLGARRLGVTSLPPLGCLPAARTIFGFHENGCVSRINTDAQGFNKKLNSAAASLQKQLPGLKIAIFDIYKPLYDLVQSPSKSGRQYFDLN

SEQ ID NO: 216651 - protein, 139 aa, Glycine max
  unsure (1)..(139): unsure at all Xaa locations
  Clone ID: PAT_MRT3847_37665C.1.pep
MEELPGAFGSSASLALRLGQTVFSXASLLFMCLDVDFYGYTAFCYLVTVMGLVIPWSITLLVVDAYSVFIKCLPLQRRLIMIVFLGDMPVSQIXLLDADRSYCLQKLCGRYQLSAAMAFLSWFLSSASCLFNFWLFPSL

SEQ ID NO: 216652 - protein, 126 aa, Glycine max
  Clone ID: PAT_MRT3847_37666C.1.pep
MINIGALVVLFAFLFLSCAYAQDTTTLVPAIITFGDSAVDVGNNDYLPTLFKADYPPYGRDFANHQPTGRFCNGKLATDFTADTLGFKTYAPAYLIPQASGKNLLIGANFASAASGYDENAATLNH

SEQ ID NO: 216653 - protein, 148 aa, Glycine max
  unsure (1)..(148): unsure at all Xaa locations
  Clone ID: PAT_MRT3847_37667C.1.pep
CQGRWKQRQLALQLGQTVFSTASFXFHVFGSYFYGYTAFCYLVTVMGCVMLQSITLLVVDAYSVFIKCLPLQRRLVLIVFLGDMILSYLSLAAACSTASVTDLLLDADRSYCPPKLCGRYQLSAAMAFLSWFLSSASSLFNFWLFPSL

SEQ ID NO: 216654 - protein, 290 aa, Glycine max
  Clone ID: PAT_MRT3847_37668C.1.pep
LISGNSSKIDDDFESEVMLISNVHHRNLVQLLGCCSKGQDRILVYEYMANNSLDKFLFGNRRCSLNWKQRYDIILGTARGLTYLHEEFHVSIIHRDIKSCNILLDEELQPKISDFGLVKLLPEDKSHLSTRFAGTVGYTAPEYALHGQLSKKADTYSYGIVVLEIISGQKSTDVRVDDDGEEESLLRQAWKLYERGMHLELVDETLNDNYDAEEVKKIIEIALLCTQASAAMRPAMSEVVVLLSSNALEHMRPSMPIFIESKLKPHRDIFASTSSSTSNATASSSIVPAR

SEQ ID NO: 216655 - protein, 71 aa, Glycine max
  unsure (1)..(71): unsure at all Xaa locations
  Clone ID: PAT_MRT3847_37669C.1.pep
LPINYGHWVLNHDPKLNTRCCILLHPTRCMRTLXIGDPGDDAFSLIEWLHHSXCAVWHGLALVPPVKQAIV

SEQ ID NO: 216656 - protein, 54 aa, Glycine max
  Clone ID: PAT_MRT3847_3766C.1.pep
VTLGSPDLVLLLTSIFSSSSASAVVSKSVLILSGFHLCFSKKTLWWSFLINQKK

SEQ ID NO: 216657 - protein, 170 aa, Glycine max
  unsure (1)..(170): unsure at all Xaa locations
  Clone ID: PAT_MRT3847_37670C.1.pep
MLRACLGLNYHGRMEELPGAFGSSASLALRLGQTVFSTASLLFMCLDVDFYGYTAFCYLVTVMGLVIPWSITLLVVDAYSVFIKCLPLQRRLIMIVFLGDMFFYTXILSYLSLAAACSTASVTDLLLDADRSYCLQKLCGRYQLSAAMAFLSWFLSSASCLFNFWLFPSL

SEQ ID NO: 216658 - protein, 298 aa, Glycine max
  unsure (1)..(298): unsure at all Xaa locations
  Clone ID: PAT_MRT3847_37671C.1.pep
MKNGKVVAVKKLIXINSSKIDDDFESEVMLISNVHHRNLVQLLGCCSKGQDRILVYEYMANNSLDKFLIXCSLNWKQRYDIILGTARGLPYQYIEFHVSIIHTNINLVNIFLDEEIYLNIFEVVYVKFFPEDKSHINTRFAETVGYTAPEYALHGQLSKKADTYSYGIVVLEIISGQKSTDVRVDDDGEEESLLRQAWKLYERGMHLELVDETLNDNYDAEEVKKIIEIALLCTQASAAMRPAMSEVVVLLSSNALEHMRPSMPIFIESKLKPHRDIFASTSSSTSNATASSSIVPAR

SEQ ID NO: 216659 - protein, 63 aa, Glycine max
  Clone ID: PAT_MRT3847_37672C.1.pep
AVTTRTGSNIIIDLPNKSYNPFRLCVYSHPRPSSCLLLLCPALATFNRYCFFVFIVAAAHANR

SEQ ID NO: 216660 - protein, 58 aa, Glycine max
  Clone ID: PAT_MRT3847_37673C.1.pep
SLLVKDLTMQTTSYSHPLFCFSCRNISTNGKSKGSVKFRAPYPSQLGRKCGFNGRPRV

SEQ ID NO: 216661 - protein, 70 aa, Glycine max
  Clone ID: PAT_MRT3847_37674C.1.pep
ITSLTIALYYLLSRTSSFYQANTVPCLFTPIYKPLTLKFSSLNISVFLYLTGPTQHSPLVTYLDHTYDRT

SEQ ID NO: 216662 - protein, 60 aa, Glycine max
  Clone ID: PAT_MRT3847_37675C.1.pep
GHHLCVPVKDTSLWSLSAAPPRWTLYTVSPLLLTKVTNFVLKYCERVVSWQVFRLSGCVS

SEQ ID NO: 216663 - protein, 56 aa, Glycine max
  Clone ID: PAT_MRT3847_37676C.1.pep
SPRRSISTAMSFSKCQTLTPLNLFAKQACYYDYMADATSVSDSGAPRYEAEYVLVH

SEQ ID NO: 216664 - protein, 43 aa, Glycine max
  Clone ID: PAT_MRT3847_37677C.1.pep
MVNPNPMILVVGILGNLASFCGFLAPVPTFYRVCKKKPTEGFN

SEQ ID NO: 216665 - protein, 83 aa, Glycine max
  Clone ID: PAT_MRT3847_37678C.1.pep
VNQAAPSAESGSMNETEGGVATRTEADQSQKAEHASDDRAKIGNITVVLASAGNTLEGADAELILNPLRLAFETKNLKILESA

SEQ ID NO: 216666 - protein, 45 aa, Glycine max
  unsure (1)..(45): unsure at all Xaa locations
  Clone ID: PAT_MRT3847_37679C.1.pep
LERIRHHNTDSGTKPSKRLNGQIRQICXDTGRLTATEEAFVASNE

SEQ ID NO: 216667 - protein, 103 aa, Glycine max
  Clone ID: PAT_MRT3847_3767C.1.pep
MEKTWLKPDFRIIFHLMSRERICAFAQGKVDNLDSLKITVPSVPQIEFVSSKLTEKLEQQMRDSLAVSICGMPLWCNQLMASCPFLFSFEARCKYFRLAAFGQ

SEQ ID NO: 216668 - protein, 117 aa, Glycine max
  unsure (1)..(117): unsure at all Xaa locations
  Clone ID: PAT_MRT3847_37680C.1.pep
NTYPQTKQADQNCNFCFYVLPVGYRLSAIADTPDNATGLMFTPSYIDIKTNNDITFIAINTRRVQYMHVYPLIHKKKFETLFYLPHLNYTQFVYELXYLLTNLLISCXKFYLEHGFL

SEQ ID NO: 216669 - protein, 91 aa, Glycine max
  unsure (1)..(91): unsure at all Xaa locations
  Clone ID: PAT_MRT3847_37681C.1.pep
VNILFHALGDDLHLILHIYCQGTGAIINXTALSRPLALSALVNELILYANFLDYGQYQRTAATVIQDFTDXSNDVCQETLSIXRIVRAYAT

SEQ ID NO: 216670 - protein, 65 aa, Glycine max
  Clone ID: PAT_MRT3847_37682C.1.pep
REGLDGGLGTRRYTIVGSSVGDGRIVCHSLSLLPNLDQFISACVDNCSKQQPQQHRRTRRLYLHG

SEQ ID NO: 216671 - protein, 59 aa, Glycine max
  Clone ID: PAT_MRT3847_37683C.1.pep
DDDETLADWAKLESMQSSHPMYFAKKLAEIASDDPVDWMEQPPACVAIQGVIRPAFVDD

SEQ ID NO: 216672 - protein, 180 aa, Glycine max
  Clone ID: PAT_MRT3847_37684C.1.pep
LANPTSSSKAFFCCSQLVAITVYAFLYGRFYLSLSGLEEAIIKIARKKGDDPLKAAMASQSLVQIGLLMTLPMVMEIGLERGFRTALSDIIIMQLQLAPVFFTFSLGTKMHYFGRTLLHGGAKYRATGRGFVVRHERFADNYRMYSRSHFVKGIEIAILLICYGLYGSATSDSTSYALLS

SEQ ID NO: 216673 - protein, 29 aa, Glycine max
  unsure (1)..(29): unsure at all Xaa locations
  Clone ID: PAT_MRT3847_37685C.1.pep
FDRICIIVSXAFKLQGSVYKFHERLPHFH

SEQ ID NO: 216674 - protein, 68 aa, Glycine max
  Clone ID: PAT_MRT3847_37686C.1.pep
RQGPDREQRHWPYSLLFGEMLGIEQNKTKKNAWKWKRLRVRRFCLDRDNRSTWLYACGSEGLQLRLDR

SEQ ID NO: 216675 - protein, 127 aa, Glycine max
  unsure (1)..(127): unsure at all Xaa locations
  Clone ID: PAT_MRT3847_37687C.1.pep
LELNPNFTLMENVVHLIKFAVGFLGTYTLSRLLQMNYQARLXIMTAGAYGITKLLXHVSIWRAAPFQNMTQLPFTTHDDIVRGGIALEFEINTEAYDQGHKVELQNKLLLMDAIHDLAQVENNERLD

SEQ ID NO: 216676 - protein, 69 aa, Glycine max
  Clone ID: PAT_MRT3847_37688C.1.pep
QKFNSFHFFISFSYKYIWRNLFKHHLGIFRFYSFFVVVLIKIAKENYELYGTNGERKVVWTLLSSSRSR

SEQ ID NO: 216677 - protein, 27 aa, Glycine max
  Clone ID: PAT_MRT3847_37689C.1.pep
HVKCLRQLDKHSCHTIVMMKMTKILMK

SEQ ID NO: 216678 - protein, 82 aa, Glycine max
  Clone ID: PAT_MRT3847_3768C.1.pep
WRPKRSISTRFLEHPGIITCFICQRACFKNVYYSTSSCALAFLEKLVFVLTVIMAFYGQSCPAITPASSLSDVSSRGCCPLL

SEQ ID NO: 216679 - protein, 279 aa, Glycine max
  Clone ID: PAT_MRT3847_37690C.1.pep
HKAPKKVATVDQNSGHSKLKITIPREPDLETAHRAQRIRPKPAAEAEVVTVAVPRFKARPLNRKILNAPSFPLPKRSTPRLPEFLEFHLRTQERAMQHTSATSSSSLHCNDFDKDLDKHTAVSAQENRIRDLRRPSALGAPKHDGLDFAHCFKARPLNKKILSSKGDIAVFLNRKQETTVPMEFNFHTEKRVQHNPPSELFSKMSLTSEVQSNNGSQLKLPRHSRVFREDSKENIGSSFHLDVKETPFVFGGRQIHSGREGCDGDAGTMLTARRSLGIR

SEQ ID NO: 216680 - protein, 82 aa, Glycine max
  Clone ID: PAT_MRT3847_37691C.1.pep
EFFFFPKFWGGFEKILVLRISWGKGGSELRSNEGRVSRSWCGQFFKHNAFGPFLPLSVGGLAFVVGIMRNLFYFVAVTIVLY

SEQ ID NO: 216681 - protein, 88 aa, Glycine max
  unsure (1)..(88): unsure at all Xaa locations
  Clone ID: PAT_MRT3847_37692C.1.pep
FSFLPMEFNPGGRHKFLRSVLFIIKKRDKLSSLVRINPYSMECTGLANRLLRQANYILCCDYARFDGLFTKQGLXKMASMINSLCGPD

SEQ ID NO: 216682 - protein, 316 aa, Glycine max
  Clone ID: PAT_MRT3847_37693C.1.pep
MGKASRDKRDIYYRKAKEEGWRARSAFKLLQIDEEFNLFDGVKRVVDLCAAPGSWSQVLSRKLYLPAKLAPDAKDENLPLIVAIDLQPMAPIEGVIQVQGDITNARTAEVVIRHFDGCKADLVVCDGAPDVTGLHDMDEFVQSQLLLAGLTIVTHVLKEGGKFIAKIFRGKDTSLLYCQLKLFFPVVTFAKPKSSRNSSIEAFAVCENYSPPEGFNPKDLHRLLEKVGSPSGVDDTDCCSGWLEGPNKVYIPFLACGDLSGYDSDRSYPLPKVAGGTYQSLDPVQPPIAPPYKRALELKKASSQGFRELENLSLDS

SEQ ID NO: 216683 - protein, 359 aa, Glycine max
  Clone ID: PAT_MRT3847_37694C.1.pep
MKKAGSISSGLKLTVPAASDRDSFTKFRSEPESGTFKAGDLLVNNEGVRIVSENEVEAPPPIRPQDNQLSLADIDTIKVIGKGNGGVVQLVQHKWTNQFFALKEIQMPIEEPIRRQIAQELKINQSAQCPYVVVCYNSFYHNGVISIILEYMDGGSLEDLLSKVKTIPESYLSAICKQVLKGLMYLHYAKHIIHRDLKPSNLLINHRGEVKITDFGVSVIMENTSGQANTFIGTYSYMSPERIIGNQHGYNYKSDIWSLGLILLKCATGQFPYTPPDREGWENIFQLIEVIVEKPSPSAPSDDFSPEFCSFISACLQKNPGDRPSARDLINHPFINMHEDLNVDLSAYFFNSGCTLATI

SEQ ID NO: 216684 - protein, 55 aa, Glycine max
  unsure (1)..(55): unsure at all Xaa locations
  Clone ID: PAT_MRT3847_37695C.1.pep
RPPMDQHAVLFRGPKHARXTVYPVGPAPGVPHSLTYLYVPAHVRKSEMARGRSII

SEQ ID NO: 216685 - protein, 65 aa, Glycine max
  Clone ID: PAT_MRT3847_37696C.1.pep
MTERFILWIDNHRKDLFMIYTMILLVLFLFLLLQHHLLSLEFQVCHNWNLTLFIKFHSLPPLLHY

SEQ ID NO: 216686 - protein, 96 aa, Glycine max
  unsure (1)..(96): unsure at all Xaa locations
  Clone ID: PAT_MRT3847_37697C.1.pep
ARVRKLGIRLEXAASKVKQDMPPPGGYGPIDYKRNLPRRGLSGYSMFALGIGALIFGYWRIMRWNRERRRLLIEDLEARIALMXLLQADXXRRTLX

SEQ ID NO: 216687 - protein, 51 aa, Glycine max
  Clone ID: PAT_MRT3847_37698C.1.pep
INPSWSSLHSKSEGSDGRPLLLIHGYLWIQIRKHVKVMGLHEFEDGATLIF

SEQ ID NO: 216688 - protein, 179 aa, Glycine max
  unsure (1)..(179): unsure at all Xaa locations
  Clone ID: PAT_MRT3847_37699C.1.pep
GAHMAMTKWDETVSTDTELMVTVNGIMSFKLIMAYIRPLMINDDLLLQXSKNYNSLGPLPIVHAQNAHAMIYXHENMIELKITDPEXHTLSSPALLKRQSTSPTIRLANVLNTPLYLLHIIITNALTQISHARKSLLKLIIYPVASHYTLYQSKLIHAYFNTTTNYVMTPPHMRLKHHH

SEQ ID NO: 216689 - protein, 202 aa, Glycine max
  unsure (1)..(202): unsure at all Xaa locations
  Clone ID: PAT_MRT3847_3769C.1.pep
MEDEMYGVSSTTEYSDGALMTPENIFPAEYHSFLMSSAARIPMFGSDELLSAVTAGNETEPYPGATIAPEIQRQNDASSLIKAKIASHPHYPRLLQAYIDCQKVGAPPEIACLLEEIRRENDVCKXDVVVSTCVEADPELDEFMETYCDMLVKYKSDLTRPFDEATTFLNKIETQLYDLCSGSSLQTLSDKGGVSSKKGFSA

SEQ ID NO: 216690 - protein, 48 aa, Glycine max
  Clone ID: PAT_MRT3847_376C.1.pep
FSGGVDDRSPFVEKRVFPLSFYAALSTGYGDCHFSLLASRSMIWYAAR

SEQ ID NO: 216691 - protein, 53 aa, Glycine max
  Clone ID: PAT_MRT3847_37700C.1.pep
KELNRYIFTFLKKIYLQHLIKSITTKNSFFPSIHEGKNDKIQLPHKKIVKIIA

SEQ ID NO: 216692 - protein, 133 aa, Glycine max
  unsure (1)..(133): unsure at all Xaa locations
  Clone ID: PAT_MRT3847_37701C.1.pep
VIVFCVTGMVTSLMYNLLREMKMNVREIHSRKPQLYRTRISNEFRESKQLILVSSDGSSRGMNYPDGTLVIQXGIPFDREQYIHRLGRTRREDQKREGGPVNAXWKKFFLNEIKVLPFQNFPYPVLIPLPRLK

SEQ ID NO: 216693 - protein, 73 aa, Glycine max
  Clone ID: PAT_MRT3847_37702C.1.pep
IICTVEHTYENDCAWQRFLPTGPIALLPMGDKFSNIVWTMSPTESNNRKSITEEEFLKDVNYALDYGHGPHPF

SEQ ID NO: 216694 - protein, 50 aa, Glycine max
  Clone ID: PAT_MRT3847_37703C.1.pep
VKNKKYGKLTPKVTFLSISNSIIDINLKQVLLKYFTDLSSVRATNYTNSD

SEQ ID NO: 216695 - protein, 35 aa, Glycine max
  Clone ID: PAT_MRT3847_37704C.1.pep
GLFCFARKDCNKCGVRRKAILGLVPFPTHKSAHAS

SEQ ID NO: 216696 - protein, 73 aa, Glycine max
  Clone ID: PAT_MRT3847_37705C.1.pep
ENGMVFLLFFFLMLVLKDTSLWAINDEISSDSVYTIQLTRIIFFLLCFDVNNLTRHISEWCFMCITVKHNILI

SEQ ID NO: 216697 - protein, 67 aa, Glycine max
  unsure (1)..(67): unsure at all Xaa locations
  Clone ID: PAT_MRT3847_37706C.1.pep
HACGNVEQLMLVMGLTTVWIGKYILRGENLEMTYAHQLLAYEWKGIXTWFDSLTCAELQSLVEEVEE

SEQ ID NO: 216698 - protein, 153 aa, Glycine max
  Clone ID: PAT_MRT3847_37707C.1.pep
MGAVTSSMAAKFAFFPPDPPSYTVAEEVEGRARMAEVALRENVDVLKVKTERGNSVVAMYIKNPTASLTLLYSHGNAADLGQMYELFSELSIHLRVNLMGYDYSGYGQSSGKPSEQNTYADIEAVYKCLLEKYGAKEEDIVLYGQSVGSGPTI

SEQ ID NO: 216699 - protein, 64 aa, Glycine max
  unsure (1)..(64): unsure at all Xaa locations
  Clone ID: PAT_MRT3847_37708C.1.pep
MPKARETPSLSFLFSPPSMXPRVATWMGVKKVAPINLFRPRXNKLMSLVLLHHRETKEDFHLQI

SEQ ID NO: 216700 - protein, 64 aa, Glycine max
  Clone ID: PAT_MRT3847_37709C.1.pep
PLTPIKNRQYTKLGATRYVGGLSKEDGSISNSRQTPKERIMWMITVPLKQRNCYLLKDSYTVTA

SEQ ID NO: 216701 - protein, 132 aa, Glycine max
  Clone ID: PAT_MRT3847_3770C.1.pep
MAGGVVPVDASPIGNGFVGKITLSVIITCIVAASSGLLFGYDLGISGGVTTMVPFLEKFFPDILRKVAGTEVNMYCVYDSQVLTLFTSSLYLAGLVSSLAASRVTAAWGRRNTILIGGVTFLIGGALNGSAE

SEQ ID NO: 216702 - protein, 50 aa, Glycine max
  Clone ID: PAT_MRT3847_37710C.1.pep
TTVADWLSKYAHNIAFGLHVLDVPQHGCVKYLTDVSAGVYKLRTVRVNDS

SEQ ID NO: 216703 - protein, 62 aa, Glycine max
  Clone ID: PAT_MRT3847_37711C.1.pep
RPKKNRRGPQGTQPSRFIRAIKESFRPNFGTLPICIFRKNCCLTFFKAVGAQRNNVSVGVAP

SEQ ID NO: 216704 - protein, 62 aa, Glycine max
  Clone ID: PAT_MRT3847_37712C.1.pep
ARVSLINHITESKERKSLFLSFAHFTSLERQDREEVASRPKNSWLRSMHTSSTRSRKTHELN

SEQ ID NO: 216705 - protein, 414 aa, Glycine max
  unsure (1)..(414): unsure at all Xaa locations
  Clone ID: PAT_MRT3847_37713C.1.pep
MEMDSLPNGNNTSGTPISATATANPAQLXSSNLPQLTESLKLEHQFLRVPFEYYKKTLRANHRAVEKEMSAVISGVNEAAATDLSPDDAVNHLNSLVSRLQGLKRKLEEGSRAEHLQAQKCRVRLDHLESADAENMSEWNNTRMKRILVDYMLRMSYYDTAVKLAESSNLQDLVDIDVFQEAKKVIDALQNKDVAPALAWCADNKSRLKKSKSKLEFQLRLQEFIELVRAENNLRAITYARKYLAPWGATHMKELQRVIATLAFKRDTECATYKVLFEAKQWDYLVDQFKQEFCKLYGMTLEPLLNIYLQAGLSALKTPYCYEDDCTKEDPLSQEAFRTLAMPLPYSKQHHSKLVCYITKELMDTENPPQVLPNGYVYSTKALEEMAKKNNGTIICPRTGLVCSYTELVKAYIS

SEQ ID NO: 216706 - protein, 66 aa, Glycine max
  Clone ID: PAT_MRT3847_37714C.1.pep
SSNSTSAVTKLQYINYYIYNIFKTTPHNSYLKETTTNFLTSISTSTRIGWDKNRKLKWWRTCRPTV

SEQ ID NO: 216707 - protein, 39 aa, Glycine max
  Clone ID: PAT_MRT3847_37715C.1.pep
DVPGKLGYDLFTRVVHKYYTRTIFKLKSAHLHVHTPVEL

SEQ ID NO: 216708 - protein, 147 aa, Glycine max
  Clone ID: PAT_MRT3847_37716C.1.pep
EPKNYSWEGLKCNYSTSLPPRIISLNMSSSSLSGIITSAISNLSSLESLDLHNNSLTGTMPQFLEELKSLKYLDLKDNQFSGSVPTILVERSRDGLLTLRVDDQNLGDSGGNNKTKEIVIPIVVSVSGLVIVVAFILFWKLRRNERS

SEQ ID NO: 216709 - protein, 67 aa, Glycine max
  Clone ID: PAT_MRT3847_37717C.1.pep
MGKEKVHINIVVIGHVDSGKSSTTGHLLYKLGGIDNRVIDRFVTEAAEMDKRSFLYAWVLDKLTAER

SEQ ID NO: 216710 - protein, 175 aa, Glycine max
  unsure (1)..(175): unsure at all Xaa locations
  Clone ID: PAT_MRT3847_37718C.1.pep
TPVLLSPAVVLLIDHNPASPFVPQLRKKKEIWNLLNLIVDKDNDHYPVHAVPPKDQVDLDTVEPQAQQSEQTNESKFVRVSFQLEKTCNFGEQFLIVGDDPVLGSWDPLKGITMTWXDXNVWAVEMDLPCCKSFSFIHLYKLDGGGIIMQHRLRIRFVFRSSRYRLIIFEDWENS

SEQ ID NO: 216711 - protein, 128 aa, Glycine max
  Clone ID: PAT_MRT3847_37719C.1.pep
DSSSGGGGGPIPRVGRGGFFQSGARGVKYPPRGMLFLGPFFRPRVSFFQFPPLGLPFTPNFFGFGANVPPVGGWWPPFFRLWPAPGFVGRFSCHRPSSLVLVIKSYVGYTNSKHENREVYKTKKKLKK

SEQ ID NO: 216712 - protein, 153 aa, Glycine max
  Clone ID: PAT_MRT3847_3771C.1.pep
QVDKGVNAEFVRSILVERANFPCLAAKSAYKMEELSKGNLFPKVVEAYSRPTRIVRGKEDELHMEVDETAFVTNEERVLWSTFLSVKKSVNPGLGIDDFVEISCQLIQPLEDFFNNVFVMVDDDKIRVNRLALLKGIAELPKGIADLTVLPGF

SEQ ID NO: 216713 - protein, 59 aa, Glycine max
  unsure (1)..(59): unsure at all Xaa locations
  Clone ID: PAT_MRT3847_37720C.1.pep
AFASQYVYCLKKXGLDPRKVNVNGGAIALGHPLGVTGDVEMFSQKFNLLLPYYFLIKWK

SEQ ID NO: 216714 - protein, 80 aa, Glycine max
  Clone ID: PAT_MRT3847_37721C.1.pep
DRISYHSPSFPPRQRPQKRFSQSLNFQQGQGNEDKHQEENNWKLTQYTSSMAPYKFNPTIVFPEMQRALCIASPYKSSRN

SEQ ID NO: 216715 - protein, 37 aa, Glycine max
  Clone ID: PAT_MRT3847_37722C.1.pep
LKSLVAMRFQFDHRYPSALTATGSLQPSYKSHAPLFV

SEQ ID NO: 216716 - protein, 62 aa, Glycine max
  Clone ID: PAT_MRT3847_37723C.1.pep
CREWENLGGALKKGDGGNPPFARFGKTLEDTTFSPLEKIHKGHAEWDFQSMGALSVARGAAS

SEQ ID NO: 216717 - protein, 78 aa, Glycine max
  unsure (1)..(78): unsure at all Xaa locations
  Clone ID: PAT_MRT3847_37724C.1.pep
LNDEKQRRDRENQSTHKTKKGGQHKPKRARWRKSEKATTXRPNQQASSXNGERDAHRRKPLTAAGEEATRKATATQGG

SEQ ID NO: 216718 - protein, 64 aa, Glycine max
  unsure (1)..(64): unsure at all Xaa locations
  Clone ID: PAT_MRT3847_37725C.1.pep
FSFFGQSSMARLMPLFQSQRVKGYKLFTFSLFKRXNTMAPYRPIASPPLLADLLIHLASRVFRF

SEQ ID NO: 216719 - protein, 119 aa, Glycine max
  unsure (1)..(119): unsure at all Xaa locations
  Clone ID: PAT_MRT3847_37726C.1.pep
SIQCGTIPIGYAELSNFLLTKAPPTSDKTHTITHIMPTQRYSXPQYVTTAQPTAKSDIYIYPDVFLQPLPAIHDAYKSKTFXEPNLVENSKPYLPYKRTLFLIIHTQTIIHNSQKGAYI

SEQ ID NO: 216720 - protein, 102 aa, Glycine max
  unsure (1)..(102): unsure at all Xaa locations
  Clone ID: PAT_MRT3847_37727C.1.pep
MALTLGTGLIAVLPSRWMYLLPYTSSIDTLFLTARERFGLKLYGGMVIKGIKVRAQLXVGTDGTVANSGEQAQRLAIKESQRPEYPLYGIVGQEEMKLCTVL

SEQ ID NO: 216721 - protein, 106 aa, Glycine max
  unsure (1)..(106): unsure at all Xaa locations
  Clone ID: PAT_MRT3847_37728C.1.pep
ATTSDRCHHCASWPETNFKDSITASLLLSPPFFQIHHVISSSAATSLSELALPFVVVSLRRXXIVSLRFTVSSSTSVTTNSRRNIINEDLKSLFSKQIDMRSYRRN

SEQ ID NO: 216722 - protein, 78 aa, Glycine max
  unsure (1)..(78): unsure at all Xaa locations
  Clone ID: PAT_MRT3847_37729C.1.pep
DFFRVDPQKHEGLSYVGIRIALCIFQAHDMDEVAPLAAHYATGELKFSAEYTIIIXKADHTIIDGLLNDPLPKGTFSP

SEQ ID NO: 216723 - protein, 130 aa, Glycine max
  unsure (1)..(130): unsure at all Xaa locations
  Clone ID: PAT_MRT3847_3772C.1.pep
LVPNFGTRLETNIQENSTLVQVKIQSGRPHQIRIHLSFIGHPLKGXPLYGVGGQPKCLDCDFVDESFAEDGGYQRPTKPVPGDCGYYLHAHKLVLSHPTTNELIEIIAPLPSALHTAEEAKEIAIMQQTA

SEQ ID NO: 216724 - protein, 82 aa, Glycine max
  Clone ID: PAT_MRT3847_37730C.1.pep
FETLLWRCTLLCIFSALQLYSAERPSRGPERWSGPSQISRLSILIFLPGSVTDMLILQEVSSVLFVYKTEGQEDCLLPHPLS

SEQ ID NO: 216725 - protein, 38 aa, Glycine max
  unsure (1)..(38): unsure at all Xaa locations
  Clone ID: PAT_MRT3847_37731C.1.pep
MMIDYVNEWKGLSXKKKKKKKKKKKKKKKKKKNKKKKK

SEQ ID NO: 216726 - protein, 58 aa, Glycine max
  Clone ID: PAT_MRT3847_37732C.1.pep
NVFFMNDKIESTIIKCIDDCKSKNLPFYVQADLFFYEIYTLLQIFNIYFLFLFHFVLY

SEQ ID NO: 216727 - protein, 80 aa, Glycine max
  unsure (1)..(80): unsure at all Xaa locations
  Clone ID: PAT_MRT3847_37733C.1.pep
SQLQNXXXXXXXXXNPIPVSTXTQHTQQSSFLYKKITPTKRNKLKPTGKKEIFTSASSVPSFLVAAPEHLAASSTASSRG

SEQ ID NO: 216728 - protein, 53 aa, Glycine max
  Clone ID: PAT_MRT3847_37734C.1.pep
LFLVLCFSGTEQRQEQPSGILHFLYPRASVPFLDLIFIHYTFHLIGRFVSNAV

SEQ ID NO: 216729 - protein, 113 aa, Glycine max
  Clone ID: PAT_MRT3847_37735C.1.pep
MWTQQVLPLPPHKPFLRCSPSNPSFVNGKNGYCRVKALTLDELPPNALRKKREPQWRGGFSLGLDLGLARTGLALSKGFSIRPLTVLELRGQKLEVQIINIAEEEEVDEFIIG

SEQ ID NO: 216730 - protein, 85 aa, Glycine max
  unsure (1)..(85): unsure at all Xaa locations
  Clone ID: PAT_MRT3847_37736C.1.pep
RIAWXPLEPGAXXXFFFFFFLSTFYLRRRSTMYPSRRCYFTGNSCYPLFLFFIMIRVQWDFLTNVAGKRTAHSRRNLEHFYRTHS

SEQ ID NO: 216731 - protein, 30 aa, Glycine max
  Clone ID: PAT_MRT3847_37737C.1.pep
AREILISHARPCFACCPSVPKTISSSPYAR

SEQ ID NO: 216732 - protein, 62 aa, Glycine max
  Clone ID: PAT_MRT3847_37738C.1.pep
VVLTGFIFISGMARLILTFYRFSLCTYCLFLIYKVFGSQRFAGGHLPSPLLLQFFPPPPPQR

SEQ ID NO: 216733 - protein, 84 aa, Glycine max
  Clone ID: PAT_MRT3847_37739C.1.pep
PKETNLNLKSFTTLPKLHLHMKKQRIVFRIHELPGEKTHWPFFRPQTNYEFFLTPPSPFSTPLLCAPPTCFSRPPRKKAQPQLL

SEQ ID NO: 216734 - protein, 59 aa, Glycine max
  Clone ID: PAT_MRT3847_3773C.1.pep
EFNHFLRGTKHIRETNKQNSPPRGTFLFERGQPPLCFLTTFLFLNMPPIPFLASPTKPR

SEQ ID NO: 216735 - protein, 107 aa, Glycine max
  Clone ID: PAT_MRT3847_37740C.1.pep
PPLLHQAPLQGQVYQHLLVPSSSFALSALARGLIFFIFFPKATFLLMVRFIVLSMFYFLVYKTLLYYIALGLCSSVSKCCLSRFSLGVFSLPLHKRMFLPPPPPPQR

SEQ ID NO: 216736 - protein, 82 aa, Glycine max
  Clone ID: PAT_MRT3847_37741C.1.pep
RRASTTQGDSVRCTRIATTNSCSCIRIGSQTMRKGSNIYVAISNPEKVPMQCMRIVLCMSESLGTKPSYRDLILHLEETKEC

SEQ ID NO: 216737 - protein, 117 aa, Glycine max
  Clone ID: PAT_MRT3847_37742C.1.pep
HGAGEKFSRKFNRQAETGGGGINPQPQGWAQPPGGKQKKKIPSPLRQKGPSKENFPGAQKKRQVFGPPGYWLKKKRKKKPLKTQKDNLVGKMDFFPTRQLKHRQGKGKTPAFFLMGP

SEQ ID NO: 216738 - protein, 63 aa, Glycine max
  Clone ID: PAT_MRT3847_37743C.1.pep
LKTKTLEIAHFNQVHRKSLLPNIELITSKTSKLKNDCLINFLAMCLSSKSKICFDVIHIQTEN

SEQ ID NO: 216739 - protein, 57 aa, Glycine max
  Clone ID: PAT_MRT3847_37744C.1.pep
NHIVTTVAFASTAFIYNFPQYQGLSEIVIATSQPQFKTFATMLNTNTFDPKNTEYIG

SEQ ID NO: 216740 - protein, 78 aa, Glycine max
  unsure (1)..(78): unsure at all Xaa locations
  Clone ID: PAT_MRT3847_37745C.1.pep
SSCIGTLLTGRGYRRWTELSVKAHSLNGQQCIHCMLIVRDGCVTITKWESITMSFDHAXNAEEEXDDYSIDYDGNDLD

SEQ ID NO: 216741 - protein, 95 aa, Glycine max
  unsure (1)..(95): unsure at all Xaa locations
  Clone ID: PAT_MRT3847_37746C.1.pep
VAALLQSIDASTIPTVVXFLDKNPDNHPYLMKFFQSSAPKXMLSLNFSTGPFDSFKYDYSXAAAEEFQVXEIKCLIGDIEARHGAFQYSSLKEDQ

SEQ ID NO: 216742 - protein, 62 aa, Glycine max
  Clone ID: PAT_MRT3847_37747C.1.pep
QNGNFPTPDFFHVCLPTLKPKQIDLTIGTCAENRHQEKGNQKQIFLTVSGREEESLQSPEDI

SEQ ID NO: 216743 - protein, 129 aa, Glycine max
  unsure (1)..(129): unsure at all Xaa locations
  Clone ID: PAT_MRT3847_37748C.1.pep
RSVGHQRRAVASVRREPPWLHRQRRRRQGATGRGGGRRGGGRRESNHRRAPACHEQTXXXMSSDPPCASQLRKLPVAELRRDVQRRDVSILSLQLEVKRLQEEKAHEKDLKHDQEPRLRVREQLRARND

SEQ ID NO: 216744 - protein, 78 aa, Glycine max
  Clone ID: PAT_MRT3847_37749C.1.pep
LSRHMQAYIISQYPLTNNFSNLPTGISGALIYFIQHLNTFNFHNLHNSTINFLPYILLQKTPFNYQTKFTNITTHPHN

SEQ ID NO: 216745 - protein, 55 aa, Glycine max
  Clone ID: PAT_MRT3847_3774C.1.pep
GSSIPIYDHSLCGMAYLLRSRCISSTIPLPARPLPLKWTCSDTIDNVMANIQDKE

SEQ ID NO: 216746 - protein, 442 aa, Glycine max
  unsure (1)..(442): unsure at all Xaa locations
  Clone ID: PAT_MRT3847_37750C.1.pep
MKRNTESTMFRNDDVRIVSSSIKIPLPYISKRPTCPLRTAHSHIANATNSIAQLVNSFTSHSTELTRSVLQKSSLLCSATLSLTGDLERKCPIRRLASLSLAEEAQQKARQNEERVLISEVLVRNKDGEELERKDLEAEAAQALKACRPNSALTVREVQEDVHRIINSGXFXRALPVAVDTRDGIRLVFQVEPNQEFQGLVCEGANVLPAKFLEDSMRDGXMNVVERPSGGFSAGGGISSGITNGPLRGLIGSFAYSHRNVFGKNQKLNISLERGQIDSVYRINYTDPWIQGDDKRTSRTIMIQNSRTPGTIVHGNADGNGSLTIGRITGGIEFSRPIRPKWSGTVGLVFQHAGVRDEKGIPIIKDCYSSPLTASGNTHDDTLLAKLETVYTGSGDHGSSLFVLNMEKGLPLLPEWLSFTRVNARARKGVEIGPARLHLSIS

SEQ ID NO: 216747 - protein, 116 aa, Glycine max
  Clone ID: PAT_MRT3847_37751C.1.pep
SKGLPGPKKKPQGKPKGAGFLQKVPKPGGKKGGGPKGNRIPIPNPAPKRLKPWLPPGGTWGKKPKEKPGKKKKYLWQNQGPQPQRHGPFGFKLSPGTGKKKPFYFGKKHLLPQEPF

SEQ ID NO: 216748 - protein, 70 aa, Glycine max
  Clone ID: PAT_MRT3847_37752C.1.pep
ASEILPCLSLIRSTVTSHSRDLRCELYGVGVPLLSAFSATINDLSYVFKLELEINIKIRLSFLRILSSVI

SEQ ID NO: 216749 - protein, 69 aa, Glycine max
  Clone ID: PAT_MRT3847_37753C.1.pep
LNSLVHRREMCWRACGSILYRLTQVNPAWLDLDLLIKTIHHLMRNAVQLFPRLNCFVFAVQVYPTYIWN

SEQ ID NO: 216750 - protein, 53 aa, Glycine max
  unsure (1)..(53): unsure at all Xaa locations
  Clone ID: PAT_MRT3847_37754C.1.pep
LEKRXAIGEILKLDPSYKPPRGFKPLLKXASIPLPVQXYXGYNFVGLIYGLEG

SEQ ID NO: 216751 - protein, 151 aa, Glycine max
  unsure (1)..(151): unsure at all Xaa locations
  Clone ID: PAT_MRT3847_37755C.1.pep
LRPTASDFRTAIVGENRKPHAAAMHVGAIASILDGCAGPDRNTDGAMLXVDTNHTNTENAVRNNLVAPTIGGRPIRVVTSANTIVHVEPNMNTKSQFTSTTASADXDQGEDLAMANGKEACAALGLTSSYTPTTLLASGTEKDTRLSGEPF

SEQ ID NO: 216752 - protein, 42 aa, Glycine max
  Clone ID: PAT_MRT3847_37756C.1.pep
IKECECMTRRKLLSKENGHSILKFCEFYTIKGEKWISSLSKT

SEQ ID NO: 216753 - protein, 61 aa, Glycine max
  Clone ID: PAT_MRT3847_37757C.1.pep
SPFSFVFFYIETLYDMDVFFSCSYKWWLHLLPVFHSLFGQHVLLVALPARSRFWMPDSTVS

SEQ ID NO: 216754 - protein, 192 aa, Glycine max
  Clone ID: PAT_MRT3847_37758C.1.pep
MKILKPDPRLGDLIQSECGKSSWQGIITRLWPNTKYVDVIVTGTMSQYIPTLDYYSNGLPLVCTMYASSECYFGVNLNPLCKPSEVSYTLIPTMCYYEFLPVNRSNGVSHDSLHTPRSLNEKEQQELVELVDVKLGQEYELVVTTYAGLYRYRVGDVLRVAGFKNKAPQFHFVCRKNVVLSIDSDKTDEVEL

SEQ ID NO: 216755 - protein, 390 aa, Glycine max
  Clone ID: PAT_MRT3847_37759C.1.pep
MGGPAEPKLVQSVLLYAASAALSCLDLFAGLRHLDPNREPSKKALEHKKEIAKRLGRPLIQTNPYEDVIACDVINPDHIDVEFNSIGGLETIKQALFELVILPLKRPDLFSHGKLLGPQKGVLLYGPPGTGKTMLAKAIAKESGAVFINVRISNLMSKWFGDAQKLVAAVFSLAYKLQPAIIFIDEVDSFLGQRRTTDHEALLNMKTEFMALWDGFTTDQNAQVMVLAATNRPSELDEAILRRLPQAFEIGIPDQRERADILKVILKGERVEENIDFDHIAYLCEGYTGSDLFDLCKKAAYFPIRELLDEEKKGRSFSAPRPLSQLDLEKVLATSRKTTVAAFEYNGLSADALRWSGQGEQDDYQVQAAINELKFVVSHMINRQPDAKDL

SEQ ID NO: 216756 - protein, 30 aa, Glycine max
  Clone ID: PAT_MRT3847_3775C.1.pep
SMFGNSLIIEVSHLRRGSYNYYFLKITFQT

SEQ ID NO: 216757 - protein, 76 aa, Glycine max
  unsure (1)..(76): unsure at all Xaa locations
  Clone ID: PAT_MRT3847_37760C.1.pep
SPGLREIHGKVRNLILSAQDPANTLAIDAYXKIIDSRSVFLSNVDYSCTPEEIQLHSQSTVTRNKLTIQTVKIVQP

SEQ ID NO: 216758 - protein, 125 aa, Glycine max
  Clone ID: PAT_MRT3847_37761C.1.pep
MPELVRKQVGDVGFGLMGLTWRQSPPPKEQSFETMRTALSHGANNWNGGELYGPPDANSLQLLSAYFEKYPEDAEKVVLSIKGGLLPGQMKPDGSQKNVQRSIDECLKWLDGKKSLDLFECARVD

SEQ ID NO: 216759 - protein, 67 aa, Glycine max
  unsure (1)..(67): unsure at all Xaa locations
  Clone ID: PAT_MRT3847_37762C.1.pep
KLTPNGSPASASKLTPNRVMVYDMKDSRRXSVSRXDNASALNSFPXXXSXWXLVEXNCWXSSNXSDW

SEQ ID NO: 216760 - protein, 93 aa, Glycine max
  Clone ID: PAT_MRT3847_37763C.1.pep
MMISCAAAASSLLELRPSRSHQMTPKELCENDDLCTAILVDTILGFQTHKMSLDHKPLAEEERRQLIEMLSNFVDNGHALVLTQSLLSLSTVT

SEQ ID NO: 216761 - protein, 65 aa, Glycine max
  unsure (1)..(65): unsure at all Xaa locations
  Clone ID: PAT_MRT3847_37764C.1.pep
PFSSLLVXNTFSVXXSLQTCCXEVLKFETLTIXIHLXLACXNAEMNTILDLEALEIEEGSPRSQG

SEQ ID NO: 216762 - protein, 59 aa, Glycine max
  unsure (1)..(59): unsure at all Xaa locations
  Clone ID: PAT_MRT3847_37765C.1.pep
PHNIVQVAVLCSQYLPAHRPIMSXHVRMHPGKGLAQTWAASQSSVPPKCNPPSLFSSDR

SEQ ID NO: 216763 - protein, 125 aa, Glycine max
  Clone ID: PAT_MRT3847_37766C.1.pep
EDVFGSQIQSPARIQVHQNVNQQLRGYPSNLYNSSVIGSPSFRVDPSGAAAAMALNPRNAAFANRSQSFMVNGDTEFPSPATSTAAKPSTFSGWGPSDGKLDWSIRGDELKKPSKSSSVGFLKQQ

SEQ ID NO: 216764 - protein, 65 aa, Glycine max
  Clone ID: PAT_MRT3847_37767C.1.pep
KISYVGNIYEWGKLYIGDVSEPGVFIRNDLLEHNDTQTADFQYISKHNGLVFRRVSIQGAIIDGL

SEQ ID NO: 216765 - protein, 125 aa, Glycine max
  unsure (1)..(125): unsure at all Xaa locations
  Clone ID: PAT_MRT3847_37768C.1.pep
MAKLEVQVRHCFCCGLTPGSVLVGLYTLFLYALLTGLAAWALSDTALNGDKPIYEDCELEVQGNSSGDAREXKKLKIHGGQTTIQFEDTSSYHCSIGMYTEEMKWSYGNRYVLLVIALCLYIPLI

SEQ ID NO: 216766 - protein, 282 aa, Glycine max
  unsure (1)..(282): unsure at all Xaa locations
  Clone ID: PAT_MRT3847_37769C.1.pep
WNNDHDLLFVSSSRIKGTQVISLGIPVTTITDFFTPVGANLSLVTKDGKMLVEGIQNTRLGFSNDMVYFQSVNANGDQTSYDGVVSCKDGDAEAASILNIQGVEYLIRCSTIDIMEIKSVYVLAVPRKGLDHFVLDIKKKGLALLTTMIVMILIAMVSFLYINVRSLRREMHLCWSLIKQNEATQQAERKCMNKSLAFASASHDVRASLAGLTGLIEMSFHEVSPDSELGTNLRQMDSCTKDLLGLLNSILDASKVEAGKMLLEEEEFVVFXLLEDVADLYH

SEQ ID NO: 216767 - protein, 303 aa, Glycine max
  Clone ID: PAT_MRT3847_3776C.1.pep
FLTKDHDIRLGDFGLAKMLTSDDLTSSVVGTPSYMCPELLADIPYGSKSDIWSLGCCIYEMTSLKPAFKAFDIQALINKINKSIVAPLPTKYSGSFRGLVKSMLRKNPELRPSASELLGHPHLQPYVLKVHLKINSPRRSTLPVHWPESNYMKKTRFLVPEDDPVSIYRDKRHSFTNDRTLNPSVSGADQDSLCSTLEIDCTPDHLNQRLAELRIGDSHQVKSIHKPAVSRTSINAKTPRLAASKASATPKKSMVFSRNHKTLRVSYNTKEPVHTTRRASLPFPRSCAIQQPRRPSIGLLDHV

SEQ ID NO: 216768 - protein, 82 aa, Glycine max
  Clone ID: PAT_MRT3847_37770C.1.pep
FYKSLDPRFYNGKKAKGFGKIVDSGSPCQNKLEVGQEPLVPGSAFGNDTCIRIFYAESLSPLQAVVEKIKKALGPLSSAALV

SEQ ID NO: 216769 - protein, 73 aa, Glycine max
  Clone ID: PAT_MRT3847_37771C.1.pep
AKKGDKNLKKFPLDKKGNLGYPKKKGGVKGKKGKKKQLKIWGKAICPKKEAIRELEPPNFSSPPSKKSLGGGD

SEQ ID NO: 216770 - protein, 144 aa, Glycine max
  unsure (1)..(144): unsure at all Xaa locations
  Clone ID: PAT_MRT3847_37772C.1.pep
YENEVKRQLDRNVKXIRYDRGGEYYGRYDETEQYXGPFAKLIQKRGICAQYTMLGIPQXNGVSEKRNRILMDMVTSMLINLTLPISLWMYALKIVMYLLNRVPSKAVPKTHFELWTNRTPSIRHLDVWGFQTEIRIYNPQERKL

SEQ ID NO: 216771 - protein, 328 aa, Glycine max
  Clone ID: PAT_MRT3847_37773C.1.pep
MREATRTGGAGGAERACKWLQSKANQAFSECALSISFDLGTNPNPLRTVASSGSQNLSRRKPSSSSSSSSQQTPGSTRIVYRESRIPSESDFPIWQQNWFIALLFVMALGFFALAIFLFLTLDSDIAPSSTASASASAASSEGVEVQVTYGTVLKLMHEKTKFRLHSHDVPYGSGSGQQSVTGFPNVDDSNSYWIVRPEPGTSAKQGDPIKSGTIIRLQHMRTRKWLHSHLHASPISGNLEVSCFGGESESDTGDYWKLIIEGSGKTWKQDQRIRLQHIDTGGYLHSHDKKYSRIAGGQQEVCGVREKRADNVWLAAEGVYLPVTESK

SEQ ID NO: 216772 - protein, 55 aa, Glycine max
  Clone ID: PAT_MRT3847_37774C.1.pep
IILKRPLNSRDYERPTKLFGSLTIVMGGESFLCWGCSKPRAGTLTNPNNRGGYFS

SEQ ID NO: 216773 - protein, 184 aa, Glycine max
  Clone ID: PAT_MRT3847_37775C.1.pep
TRPVTYGTVLKLMHEKTKFRLHSHDVPYGSGSGQQSVTGFPSVDDSNSYWIVRPEPGTSAKQGDPIKSGTIIRLQHMRTRKWLHSHLHASPISGNLEVSCFGGESESDTGDYWKLIIEGSGKTWKQDQKIRLQHIDTGGYLHSHDKKYSRIAGGQQEVCGVREKRADNVWLAAEGVYLPVTESK

SEQ ID NO: 216774 - protein, 49 aa, Glycine max
  Clone ID: PAT_MRT3847_37776C.1.pep
KISIILSKHDLNFHNDVVHHIPYAMSCLPSSYCYCQNCLKRKAYHEQET

SEQ ID NO: 216775 - protein, 104 aa, Glycine max
  unsure (1)..(104): unsure at all Xaa locations
  Clone ID: PAT_MRT3847_37777C.1.pep
IVKLYERCVIACANYPEYWIRYVLXWEASGSMDLANNVLARATQVFVKRQPEIHIFCARFKEQTGDIDGARAAYQLVHTETSPGLLEAIIKHANMEYRLEKKEM

SEQ ID NO: 216776 - protein, 69 aa, Glycine max
  Clone ID: PAT_MRT3847_37778C.1.pep
VFALGNYLSSFILTMVTYFTTQGGKLGWIPDNLNKGHLDYFFLLLAGLSFLNMLVYIVAAKRYKQTKTS

SEQ ID NO: 216777 - protein, 94 aa, Glycine max
  Clone ID: PAT_MRT3847_37779C.1.pep
AYPKYYWGYDCHSRHCDSFPRGNNLPRKVVVFRVSLIISQRQCGKNGCIQQIEAAACCILMSLSFGQVCKEFLEVFSLVVNSVGATGCTTAQVL

SEQ ID NO: 216778 - protein, 65 aa, Glycine max
  Clone ID: PAT_MRT3847_3777C.1.pep
SARGNTPHESPIMALHLRIGPKNKWVPSLDRAPYPLRPSLGTSYGNINTASVSLRTPRILRSKRL

SEQ ID NO: 216779 - protein, 81 aa, Glycine max
  Clone ID: PAT_MRT3847_37780C.1.pep
MEPKCTINCRRPEFVPTPLPESPRVPMEFLSRSWSASALEVSKALAPHSSYNNSSSIPEQTSASAPNHNNNPFSEDLSNIS

SEQ ID NO: 216780 - protein, 58 aa, Glycine max
  Clone ID: PAT_MRT3847_37781C.1.pep
HPMNTCLFLKMMNDDHHGLHTMIKERDLSYMNIMKTVHDNGNSCICELLLTYRLTTLT

SEQ ID NO: 216781 - protein, 102 aa, Glycine max
  Clone ID: PAT_MRT3847_37782C.1.pep
GPVKKVIKPRVGGLRKKRLLSFPGGGSGQLGESPWGEAFLKKGESVCNPIFGGMPQGGEGPEICFGGDRASVYEGGDPWGVSGLAPGLRGGKRGVAAFMGFF

SEQ ID NO: 216782 - protein, 120 aa, Glycine max
  unsure (1)..(120): unsure at all Xaa locations
  Clone ID: PAT_MRT3847_37783C.1.pep
MAFQEKQNRFKRQPEKSASASQYGRTPAPIKFSNDTERLQHVNSIRKAPVGAQMKRVIDLLFEPRKALTIEQINEAWXTXHEEANKDVFXEYEGKTPKVKYDGXRFSYKSKHDVRDKNQL

SEQ ID NO: 216783 - protein, 493 aa, Glycine max
  Clone ID: PAT_MRT3847_37784C.1.pep
MVFPKPSSESDLFLYSNFASRYARDSLPRFSMPENSMPKEAAYQNIHDELQLDAIPKLNLASFVTTSMEEECNKLIMESINKNYVDMDEYPATTDLHNRCVNMIARMFHAEIGENENAIGAGTVGSSEAIMLAGLAFKKKWQNKRKAEGKPYDKPNLVTGSNVQVCWEKFARYFEVELREVEVREGYYVMDPAKAVELVDENTICVAAILGSTYNGEFEDVKLLNDLLLEKNKQTGWDTPIHVDAASGGFIAPFLYPELEWDFRLPLVKSINVSGHKYGLVYAGIGWVIWRTKDDLPEDLVFHINYLGADQPTFTLNFSKGSSQIIAQYYQLIRLGHEGYRSIMENCRDNAMVLKESLEKSGHFNILSKDNGVPVVAFSLKDRSQYDEYKISEMLRRHGWIVPAYPMPPAAQHINVLRVVIRAEFSRTLAERLVFDIYNVLHELEKLHPPKVTNFIKEENKALVETGVKKTALDAHREIIAQESNKRQKIMAA

SEQ ID NO: 216784 - protein, 82 aa, Glycine max
  Clone ID: PAT_MRT3847_37785C.1.pep
QVQLAYKHREDTCFGLCFVLKSLISLPSHQSSINSSYVLFMCQLQHGHPSSCQLPPTLCHCYLYKFCLHFFLECIQINFLKP

SEQ ID NO: 216785 - protein, 57 aa, Glycine max
  Clone ID: PAT_MRT3847_37786C.1.pep
SHSSSLSHLFSLSTVPYPAWILYTLSSFPLLSSLFILPTFTIILIIIIFILLHIHSF

SEQ ID NO: 216786 - protein, 81 aa, Glycine max
  Clone ID: PAT_MRT3847_37787C.1.pep
VVSEHTLSLYCAVAAMPTKLFSQLRLLHPLLPMKPRTLPLLSRVFFFPSSTFLRTAPFKVRAFSSRDHSREKLPLRSSKSL

SEQ ID NO: 216787 - protein, 212 aa, Glycine max
  Clone ID: PAT_MRT3847_37788C.1.pep
GVLPLELNKLLIIVVVLSMALTPFLNEAGRRAASFIEENFDPENKQNVSETVNFNISEPVVILGFGQMGQVLANFLSNPLASGGDSDEVGWPYVAFDLDPSVVKAARKIGFPVLYGDGSRTDVLHSAGVSSPKAFMIMYTGKKKITEIVPRVGLTLKESVRLRLLLSQGGDFGFVVISLANRLGVLTLELNTLLIIVEVLGMASTPFLNEAG

SEQ ID NO: 216788 - protein, 62 aa, Glycine max
  Clone ID: PAT_MRT3847_37789C.1.pep
HQVEFLSMKLNAASTYYDFNSESDVLETMQRARASEVKELDRYVREECEGVSCFEPTWSWPL

SEQ ID NO: 216789 - protein, 85 aa, Glycine max
  Clone ID: PAT_MRT3847_3778C.1.pep
MDAPRKQQVSLRGASAKEITRDALLQKVSQERELRNYAKRAAAAALFIQVLRLCFLSLILKNHHTSWCRNMINFTNYITRQTYNI

SEQ ID NO: 216790 - protein, 50 aa, Glycine max
  Clone ID: PAT_MRT3847_37790C.1.pep
RPNGSHVRSHRQVVTTEVCIQDCDSRDHHLSSELWIIHQGRALDATTGCR

SEQ ID NO: 216791 - protein, 54 aa, Glycine max
  Clone ID: PAT_MRT3847_37791C.1.pep
MTEGKQKKLNRIGENAISAIAEVNIFYDDVIMLFLHTKGQAFIAANTCNSCGSP

SEQ ID NO: 216792 - protein, 154 aa, Glycine max
  unsure (1)..(154): unsure at all Xaa locations
  Clone ID: PAT_MRT3847_37792C.1.pep
MLEKMDDGEISNAFPHQNPSTAASNNQPPTLKRKRNLPGNPDPEAEVIVLSPKTLMATNRFVCEICLKGFQRDQNLQLHRRGHNLPWKLKQRTTKEVRKRVYXCPEKTCVHHHPSRALGDLTGIKKHFCRKHXEKKWKCEKCXKRYAVQSDWKH

SEQ ID NO: 216793 - protein, 56 aa, Glycine max
  Clone ID: PAT_MRT3847_37793C.1.pep
CRNHSPGTLITERVLHRLEHLSISCLYHHSADVHEVGTMIARAYNIFPCSTSEALI

SEQ ID NO: 216794 - protein, 88 aa, Glycine max
  unsure (1)..(88): unsure at all Xaa locations
  Clone ID: PAT_MRT3847_37794C.1.pep
PSTLKLSVVARHASVDDHLLCEIXVTTYPYAVFIGHDXSVWAQSTNFPQLVLRKLLPLIMILMGPGSLGPTGLAIGGTNFMAIQCEAL

SEQ ID NO: 216795 - protein, 40 aa, Glycine max
  Clone ID: PAT_MRT3847_37795C.1.pep
ITVSKSSDSDSRGVCLKSTSQVSSLVVDTPNERQWMAPVI

SEQ ID NO: 216796 - protein, 55 aa, Glycine max
  Clone ID: PAT_MRT3847_37796C.1.pep
QQFHSVKGAKRVMDVAFKKCMMLCSICVIVLNDVKVCESYEEFILSLTKLLQCKS

SEQ ID NO: 216797 - protein, 52 aa, Glycine max
  Clone ID: PAT_MRT3847_37797C.1.pep
RCGYTIRDHGGIITHAHLAQFRTSRCKIIRSRSLYNSLQLIYLLTKCLDTRL

SEQ ID NO: 216798 - protein, 33 aa, Glycine max
  Clone ID: PAT_MRT3847_37798C.1.pep
QHGKGYNIMLGALSPSGFTPRFIPFKVTLTYIK

SEQ ID NO: 216799 - protein, 119 aa, Glycine max
  Clone ID: PAT_MRT3847_37799C.1.pep
SSSGSSHDGSVTWLDDILGGYYEDFLVDETHKEANSEERTYFEEQPSGTSSSVLEDTNGSTETQENLTNTQDNGGEDEKHKDDDEASCNTKPLDEETIDNTQCQKMSGTCKIEETNENG

SEQ ID NO: 216800 - protein, 56 aa, Glycine max
  Clone ID: PAT_MRT3847_3779C.1.pep
LFNESDKGTGSAPILLPYVSPTVEGHFPSTKPGLPVATMSRVGTFIERVTAEREGS

SEQ ID NO: 216801 - protein, 85 aa, Glycine max
  Clone ID: PAT_MRT3847_377C.1.pep
TARAFGGPRPPTAGFYPPLDGNCASRRLVGLIRLTRVTNGTCLWGAHGLLIRYLKTQIPLFFLINATSHWMGWSSLASSPRYPGA

SEQ ID NO: 216802 - protein, 57 aa, Glycine max
  Clone ID: PAT_MRT3847_37800C.1.pep
FLGIPVGLILGAKLHKGVMGIWSGKLLGALFQTWGLFFMGDRTNWNKKASPAEDKIN

SEQ ID NO: 216803 - protein, 87 aa, Glycine max
  Clone ID: PAT_MRT3847_37801C.1.pep
LVVRFATVMLPQVGLTTIYKASFPEPLASFPVVQSLFASSVVPLLSKLPPLKHFLSMCMYRLGLQREKVTTQSHLTLVPIILLPPSN

SEQ ID NO: 216804 - protein, 475 aa, Glycine max
  unsure (1)..(475): unsure at all Xaa locations
  Clone ID: PAT_MRT3847_37802C.1.pep
MQRPLKRTIAIAKQRACFSSLLPSAAAAAAADTVAPPQLPPFDHQPHPYNGPSADEVFAKRKTFLGPSVFHYYKKPLNIVEGKMQYLYDDSGRRYLDAFAGIVTVSCGHCHPEILNAITEQSKLLQHATTIYLHHTIGDFAEALAAKMPGNLKVVYFVNSGSEANELAMMMARLYTGNLGMISLRNAYHGGKVXYSFGSTALNSWKYPIPEGHVHHVMNPDPYHGAFGTDAASYANDVQDHIDYGTSGKVAGFIAESIQGVGGAVELAPGYLKLVYDIIHKAGGVCIADEVQTGFGRTGSHYWGFETQGVIPDIVTMAKGIGNGLPLGAVVTTPEIASVMAQKIQFNTFGGNPVCSAGGLAVLRVLDKEKRQAHCADVGSYLLERLRFLMERHDIIGNVRGRGLMVGLELVTDRTNKTPAKAETAVVFEKLRELGVLVGKGGLHGNVFRIKPPMCFSKDDADFLVDALDYSLSKL

SEQ ID NO: 216805 - protein, 92 aa, Glycine max
  Clone ID: PAT_MRT3847_37803C.1.pep
MIMLHLPPSRSYQELEYLRRTRKTKHLYQQLNTTTLIHPTNVIEHSHRLSVTHSILEALSKPKSNRNPKAFIPKKLFYGGVHSKREPLRHNT

SEQ ID NO: 216806 - protein, 41 aa, Glycine max
  Clone ID: PAT_MRT3847_37804C.1.pep
MFYRELPFQAGLLFSCKKHIFLEFTRKNLIPCYWFGLEDSR

SEQ ID NO: 216807 - protein, 495 aa, Glycine max
  Clone ID: PAT_MRT3847_37805C.1.pep
MAAMQRPLKRTIAIAKLRACFSSLRPAAAADIVASPPPQLPPFDHQPHPYNGPFADEVLAKRKTFLGPSVFHYYKKPCRCVSDQAKIYGFSQCSSVKLNIVEGKMQYLYDDSGRRYLDAFAGIVTVSCGHCHPEILNAITEQSKLLQHATTIYLHHTIGDFAESLAAKMPGNLKVVYFVNSGSEANELAMMMARLYTGSLGMISLRNAYHGGSSSTLGLTALNTWKYPIPEGHVHHVMNPDPYRGAFGADAASYANDVQDHIDYGTSGKVAGFIAETMQGVGGAVELAPGYLKLVYDIIHKAGGVCIADEVQTGFGRTGSHYWGFETQGVIPDIVTMAKGIGNGLPLGAVVTTPEIASVLAQKIQFNTFGGNPVCSAGGLAVLRVLDKEKRQAHCADVGSHLLERLRFLMERHDIIGNVRGRGLMVGIELVTDRDNKTPAKAETAVVFEKLRELGVLVGKGGLHGNVFRIKPPMCFSKDDADFLVDALDYSLSKL

SEQ ID NO: 216808 - protein, 78 aa, Glycine max
  Clone ID: PAT_MRT3847_37806C.1.pep
DPPTGTLPSLLPPSGSEVPAEIAMEIPIEHGILLDNILDLALAAFSHPSTLATGGSVPSLMKWVIPASGRNRCWGAYP

SEQ ID NO: 216809 - protein, 86 aa, Glycine max
  Clone ID: PAT_MRT3847_37807C.1.pep
AARRRQKDTAARRRQKDTAARRRQKGPNLESYIFLLTLVKLLYNSQLTIQVISHQVLITHLFTTISHVYNSTSHNLTNYKIYLTIR

SEQ ID NO: 216810 - protein, 71 aa, Glycine max
  Clone ID: PAT_MRT3847_37808C.1.pep
GLGNGLSSGEKQKGPRHFFGGLKKKKGFTPWGHHLVKFFPPEGIGLKFFKMVKMRELTFPKKFQESRVLFV

SEQ ID NO: 216811 - protein, 90 aa, Glycine max
  Clone ID: PAT_MRT3847_37809C.1.pep
RVPCHPKNVSAAKGRGVGGNSTFVCELGKFFVGFFFSGPLFIKEVPAKFFFFLGEGKGRNFCRMRGFFEFAKSMDCFQTGPWGWVLTVDP

SEQ ID NO: 216812 - protein, 104 aa, Glycine max
  Clone ID: PAT_MRT3847_3780C.1.pep
QRPKLPAIKDACIDRTGTCIYGNALPCRQLTLQANLYDERSHNQRTSFKSSSPTLSNRPQSPFDCNGMPTAGSENRLREVISGYTVQLPHLSVSTAMKTIAGPR

SEQ ID NO: 216813 - protein, 420 aa, Glycine max
  Clone ID: PAT_MRT3847_37810C.1.pep
MKNIIAPVQSAMPSPTFLWRFKVTLFLIWGFTCCKIGWDSVMRMDANLRDLFLYEVFLYYNPLLLVTMMVWLWGVNLWVFLQSTVSYAKVFDLDQNHLTHKEIWKCSTWMTIIVPTSMTAYLYLYSHGEVSLAASQPVLLYILVAVILIFPFDIFYLSSRYFFLRTLFRIAFPFQPITFPDFFLADILTSMAKVFSDLERSVCRMVNRQVATIAWLEADSVCGSHSVAIPIALVLPYIWRLFQCLRQYRDTKEKNCLFNALKYSTAVPVIFLSALKYHVLHEKWTTLYRPLWLLSSVINSLYSFYWDITRDWDLSGFSRIFKFNKSNPISNLLYGRQWVYFWVIGSNFVLRCSWTYKLSAHLRHNYLTVFTITLLEMFRRFQWVFFRVENEWNKITRSGVQLTEIPREEEKLLGSNIHDV

SEQ ID NO: 216814 - protein, 45 aa, Glycine max
  Clone ID: PAT_MRT3847_37811C.1.pep
FFVQNLLCHHFIKNLKLLRGPAEMTHGQNMLTPHKNSPLVRQTAV

SEQ ID NO: 216815 - protein, 40 aa, Glycine max
  unsure (1)..(40): unsure at all Xaa locations
  Clone ID: PAT_MRT3847_37812C.1.pep
EGEVDHFMFVFCWVKGFLKIXGFEFVDKCFENRVGIDDRC

SEQ ID NO: 216816 - protein, 47 aa, Glycine max
  Clone ID: PAT_MRT3847_37813C.1.pep
DQRATVKRPLNIASSKYNSSKLILSLSVEGPYRMKQSKGFNHANGSH

SEQ ID NO: 216817 - protein, 96 aa, Glycine max
  Clone ID: PAT_MRT3847_37814C.1.pep
EIHLPANAQQRPSILSRPGSPHPCLGLTGLGEGPDRIIKRFKWNLPISADPVPLSTALAFFRKVRASLTLSPSQEPLPFSRLLSSCKHAGGEPGIP

SEQ ID NO: 216818 - protein, 464 aa, Glycine max
  Clone ID: PAT_MRT3847_37815C.1.pep
NSARAFNSQAVYLRRRGAFHGPPTNSSKTLDGAGRLSSVESTEDKSELYVVSTEDPENDDDRNDGSDPAEGMPGFQNVLKDMIPGVKVKVFKVITPDKVDKDISNVIEQIIEDEDEDEDGNEDEDEDEDEDEDEDEEEDEDEDEDEDEGKENDTESLELEDIKSETDQEGDDEIEVNAGLGTFEREDQNEFAVKIAIGGLVQKLSGNLSSRDLLRVPAKLEMKGRGSFSFTVEKEVNQQVGLDKGKSSSDKSTKFQGRRRVDHVIFDLAKFIGRGKIPSKVLKEVGELINLTLSQAQSHHQLSGSTIFNRIEIPTSFDPLNGLYIGAHGLYSSEVIHLRRRFGQWQEDNGAKEPSNLEFYEYVEALKLTGDPYVPAGQVAFRAKIGKRYQLPHKGIIPEEFGVIARYKGEGRLAEPGFQNPRWVDGELVILDGKHLKAGPVVGFVYWAPGYHFLVFFNRLRLQQ

SEQ ID NO: 216819 - protein, 218 aa, Glycine max
  unsure (1)..(218): unsure at all Xaa locations
  Clone ID: PAT_MRT3847_37816C.1.pep
KCIVRVIYMEAVVDKISSHQKEDEVRSGGTVDMEDELVGKDRYIGSIESLIRNNIQQYKIDMADEVINAGRFDQRTTHEERRLTLETLLHDEERYQENVHDVPSLQEVNRMIARSEEEVELFDQMDEELDWPEDVMQHDEVPEWLRANTREVNAAIAALSKRPLKNTLLGGKXLPLNPVRXVGSERRRGRXQGKKHPNYKELEDENGEYSEASSEDRN

SEQ ID NO: 216820 - protein, 230 aa, Glycine max
  Clone ID: PAT_MRT3847_37817C.1.pep
GSSLKQRGAFHGPPTTSSKTLDAAGRLSSVESTEDKSELFVVSTEDPENGNDRNDGSDPAEGMPGFQNVLKDMILSSEFGSSKVITPEKVDKDLSNVIEKIIEDEDGDEDEDEEMENDAESLELEEIKSETDQEGDDEIEINAGLGTFEREDQNEFAVKIAIGGLVQKLSGNLSSRDLLRVPAMLEMKGRGSFSFTVEKEVNQQVGLDKGKSSSDKSTKVQGRRRVDHVI

SEQ ID NO: 216821 - protein, 57 aa, Glycine max
  unsure (1)..(57): unsure at all Xaa locations
  Clone ID: PAT_MRT3847_37818C.1.pep
VRDSPLLYWLCIGFLRSHAYYAVVCIALVCIXGHAACCRLPCILALLYAVADQAGAS

SEQ ID NO: 216822 - protein, 47 aa, Glycine max
  unsure (1)..(47): unsure at all Xaa locations
  Clone ID: PAT_MRT3847_37819C.1.pep
FSRQAMASAILXTSDXIXXITXNSLLTDXCALAPVTGRRPWMAXXTR

SEQ ID NO: 216823 - protein, 75 aa, Glycine max
  Clone ID: PAT_MRT3847_3781C.1.pep
NKTMSSPIIFPGILGSIFPKSSFLSLFNKAGFFSCPTQAFFNHFGPVKGNSRCTADCQVWQVRPSWGGGFLLPGG

SEQ ID NO: 216824 - protein, 117 aa, Glycine max
  Clone ID: PAT_MRT3847_37820C.1.pep
ASIAVRGVLFANSHPLSSRWHAIRRPKLWQVEKASLYKNEVDRLRIPACRRFSSYHMSIMTTEYMPMLKLLGNGAWGGHHEPSPESLLNLEMEDFDFDKMDLDGQSREISDDDIEDW

SEQ ID NO: 216825 - protein, 71 aa, Glycine max
  Clone ID: PAT_MRT3847_37821C.1.pep
TRLFSFPFQNKILSSLHFLTRILPINLAHPKPIDLKAKIMHPALHSKSLPSPKLKKTFLYPKTTPLHRLQD

SEQ ID NO: 216826 - protein, 72 aa, Glycine max
  unsure (1)..(72): unsure at all Xaa locations
  Clone ID: PAT_MRT3847_37822C.1.pep
TNTYQNSTSSVNVMYSFTYSSKFGQTGELVSSTSHEWMINLFGVNLNTSNXATSYLASLQQFDAPYSFGEQG

SEQ ID NO: 216827 - protein, 346 aa, Glycine max
  unsure (1)..(346): unsure at all Xaa locations
  Clone ID: PAT_MRT3847_37823C.1.pep
MEEDDYVEYVPVAKRRALEAQKILQRKGKASAVTDDDLEKQRVAETKPSLLVKASQLKREQPEISVTEQIVQQEKEMIENLSDRKTLMSVRELAKGITYTEPLPTGWKPPLHVRRMSKKECDLIRKQWHIIVDGXDIPPPIKNFKDMRFPEPVLKKLKAKGIVQPTPIQVQGLPVILSGRDMIGIAFTGSGKTLVFVLPMIMVAMQEEIMMPIVPGEGPFGLIICPSRELARQTYEVIEQFLIPLKEAGYPELRPLLCIGGVDMRSQLDIVKKGVHIVVATPGRLKDMLAKKKMNLDNCRYLTLDEADRLVDLGFEDDIREVFDHFKAQRQTLLFSATMPTKIQNF

SEQ ID NO: 216828 - protein, 61 aa, Glycine max
  Clone ID: PAT_MRT3847_37824C.1.pep
LGITTKNTSPPLSFNPHYFYHPVLLFIHQNTLFLSLQRRFTLSLFLMDKKELLLLEILLIP

SEQ ID NO: 216829 - protein, 88 aa, Glycine max
  unsure (1)..(88): unsure at all Xaa locations
  Clone ID: PAT_MRT3847_37825C.1.pep
KQGERPFSLGALFGVPRSGSPLGSERGFNTVVCVAGLFLIARPRGRVAGRLAPGVRWVWRVLIYRRGAACVFGTSPFSAVLGXVFIRG

SEQ ID NO: 216830 - protein, 72 aa, Glycine max
  Clone ID: PAT_MRT3847_37826C.1.pep
NIFFRKLKHKLFNLIKHYILIYMMKMHMNKNTFRKYPLIIISNMKRLYIQQTILFSFFKKKETSKHASILLY

SEQ ID NO: 216831 - protein, 51 aa, Glycine max
  Clone ID: PAT_MRT3847_37827C.1.pep
LNKLSSGTYHKTWASVEHSNKLHNSIRHNPKSQRNGPPYAYSILNMTLDRQ

SEQ ID NO: 216832 - protein, 67 aa, Glycine max
  Clone ID: PAT_MRT3847_37828C.1.pep
YPLHQRVFDCKHLTQKDKFRLTKQIIWTYHYNSRPMVNKRSYHIMCPECMPTRYVTEKPSTSTCFLW

SEQ ID NO: 216833 - protein, 137 aa, Glycine max
  Clone ID: PAT_MRT3847_37829C.1.pep
PRKEVPKFGINLNIIELLTHLHYLVTFVRYRHKIMWPMHKRTLPRRLDFQSNMLQFISLDSINKPLGSKLSQEDKRLLEEVTMRKRSPGVSKSENLEVTKKRSAKVWHHSNSVGSSPVTREGLEHQRSNVLDIIDGL

SEQ ID NO: 216834 - protein, 43 aa, Glycine max
  Clone ID: PAT_MRT3847_3782C.1.pep
FKSNYYPKLCIKACQNINLNHRQVHRDIHSLRQIKLKPTETKG

SEQ ID NO: 216835 - protein, 86 aa, Glycine max
  Clone ID: PAT_MRT3847_37830C.1.pep
NLGPNSGLTTPGLPPPSPLKGAPKFKPRARVLQPPDGENPGGPQLNRLGTNPPFPRGGKTEKARTVRPSQKWAPLKGKWAPPCDGA

SEQ ID NO: 216836 - protein, 452 aa, Glycine max
  Clone ID: PAT_MRT3847_37831C.1.pep
MSTVVLQEVFNVVPTSESEEFQLPTQTSLSLTFFDILWLRLPPVQRVFFYEFPHPTHLFFDTLLPKLKHSLSLALAHFFPLAGHLTWPLHSQKPIINYKSGDTVPLTVAVSEADFNHLAGTDLYEAKEIPHLLPHLTISHEKATLLALQATLFPNSGFSIGITSHHAVLDGKTSTSFIKSWAYLCRESQSPTSLPPELIPFYDREVIKDPNHLGVKYVSDWLEQNGPNNRSLLVWDLQAPEDATRGIFQLSRSDIEKLKQIVVSKKKGNNTNLRLSTFVLSIAYACVFRVRAEETKNKRVMLALNVDCRARLEPPIPPTYFGNCVGARLAIAETREILGEDGLIVVVDALNDALGNLKDGALSGAENWSRWLLESFSDDVRIIGVAGSPRFEAYSNDFGWGRPKKVEMASIDRTGALCLSDSKNGDGVEVSFVSNKRAMETFAYLFANGLRS

SEQ ID NO: 216837 - protein, 43 aa, Glycine max
  Clone ID: PAT_MRT3847_37832C.1.pep
VRKSFVLRQGVRESDALCQCVWKSFVLRQCVRKFDALIHNLNE

SEQ ID NO: 216838 - protein, 86 aa, Glycine max
  unsure (1)..(86): unsure at all Xaa locations
  Clone ID: PAT_MRT3847_37833C.1.pep
XTQPXXSPPTLSXXXXTYXLXEXCXXTSVLFXIIGGXLXXTYVXAYHSEXENVETXENAPLXXHFSQWCLKLLLTLRTLFLLWFGV

SEQ ID NO: 216839 - protein, 403 aa, Glycine max
  unsure (1)..(403): unsure at all Xaa locations
  Clone ID: PAT_MRT3847_37834C.1.pep
MPKVRRLKSLSTDCNRPYPYPSNSKNIELHKPMNLLESADEMKEWEEARCPICMEPPHNGVLLKCSSYEKGCLPYMCNTSYRHSNCLDQFCKSFASHLSSEVLQEIPVTGRVSHSREIQSESWHPAQCGSQLQPKLICPLCHWKIYGYMIVWSLLXRYMNSKLRSCSSETCEFQGTYPELRKHARSEHPSVRPSEVDPSRQCDWLRMEQERGLGDLFSSIHASSGADYNRDTILTGGLADLMSSFLYEIFISIEDVNRMASLLTNSRHRVPLYDRRSGTTNRVSNDTQTSQSARWRSNLPSVHQLERIARSRVRSNFPYLSSRDLEAEANRTARWRTNLSSLRTPRNEHQYRDLSAEVTSSTRMPRASQGTQTNPQSNISSSGRFPGRQLRWRDQSWSTNNHQ

SEQ ID NO: 216840 - protein, 153 aa, Glycine max
  Clone ID: PAT_MRT3847_37835C.1.pep
MAGLMPGELSHHGTSDGNSGKSSIEKQEESLGRWYMSRKEIEEHSPSRKDGIDLKKETYLRKSYCTFLQDLGMRLKVPQVTIATAIIFCHRFFLRQSHAKNDRRTIATVCMFLAGKVEETPRPLKDVILVSYEIIHKKDPAAAQRIKQKVFYY

SEQ ID NO: 216841 - protein, 54 aa, Glycine max
  unsure (1)..(54): unsure at all Xaa locations
  Clone ID: PAT_MRT3847_37836C.1.pep
QFVYLAKLPEQAVRNEEMEDFMHNDAVEWTPATXLTVDDHNLLSVAYKNENGSL

SEQ ID NO: 216842 - protein, 109 aa, Glycine max
  Clone ID: PAT_MRT3847_37837C.1.pep
MTGLMPGELPHHGTPDGNSGKSSQDKQEESLGRWYMSRKEIEEHSPSRKDGIDLKKETYLRKSYCTFLQDLGMRLKVPQVTIATAIIFCHRFFLRQSHAKNDRRTIATV

SEQ ID NO: 216843 - protein, 216 aa, Glycine max
  Clone ID: PAT_MRT3847_37838C.1.pep
MVQFHEHIITELLEDSNGGLVVLSSGLALSKLIASLLILHSSSQGTLLLLSPSSTSLKSKITFHLKTLNPQFYQIPAEITADLHAPHRHALYTSGNAFFITPRILIVDLLTNKLPTSKIAGIIILNAHSLSETSTEAFIVRIFRSLNRGAYVRAFSDKPHAMVSGFAKAERTMKCLHVRKLHLWPRFQVYVSQELERDPPEVVDIRVPMSRYMVGI

SEQ ID NO: 216844 - protein, 85 aa, Glycine max
  Clone ID: PAT_MRT3847_37839C.1.pep
QKFDSKDRSPLTVSYLKNNVNKKWHLSAKIPRNRTFSRIYFVKKKKLFKYIKKYQKFLGCLFFALFLKIFVDQHVFYCFSKSPSC

SEQ ID NO: 216845 - protein, 80 aa, Glycine max
  Clone ID: PAT_MRT3847_3783C.1.pep
LLNFDESLRTTDAGSFRIGRGEPPHVPDSLSRDARDFILQCLKVDPDDRPSAAQLLNHTFVQRPLHSQSSGSASPYIRRG

SEQ ID NO: 216846 - protein, 86 aa, Glycine max
  unsure (1)..(86): unsure at all Xaa locations
  Clone ID: PAT_MRT3847_37840C.1.pep
SSELCLPGPLAPVRTXRARAVLLGLHTREPVTCSCCTPAGSGSACKGXRSRRGEGWXXGSGEPTHPGQSPWXLEGAEGRKSXSWTV

SEQ ID NO: 216847 - protein, 179 aa, Glycine max
  unsure (1)..(179): unsure at all Xaa locations
  Clone ID: PAT_MRT3847_37841C.1.pep
NNHDAPTPPLLKDLKSAMXNASMIFPSNQIERKCLILTQLXDWILNFYVKTAHFFGAHKDPASHVRNDTLTNALXSAIGSNDFLAGTLTLNXDTGRLMMDCHSEGAGFAAASIEYTXDHIGDLDYPNPTFAQLVHQNNDFLKDGDGPLCVAQVTSFICGXLALAISTIHTTFDGLSFKT

SEQ ID NO: 216848 - protein, 42 aa, Glycine max
  Clone ID: PAT_MRT3847_37842C.1.pep
MAILLFSLCFLLFTGCCFACSSIEHPQHNESHIQLLNALIPV

SEQ ID NO: 216849 - protein, 205 aa, Glycine max
  Clone ID: PAT_MRT3847_37843C.1.pep
MEVPEYFVGSFFGTGGAEQFCPPEKRHSDQKTGEPFAIDDLLDFSHADAIMSDGFFDNVAGNSTDSSTVTAVDSCNSSISGSDNRFAATIVPRGFPSDPQFSGELCVPYDEMAELEWLSNFVEDSFSAEDELKTLQLLSGALGASTAIGAKPQAPESSSSTDSLRHASADDTLRNAPKRNSETPLPSSPRSKRSRAAPGDWSTRL

SEQ ID NO: 216850 - protein, 75 aa, Glycine max
  unsure (1)..(75): unsure at all Xaa locations
  Clone ID: PAT_MRT3847_37844C.1.pep
DRKCDPDIRHVDIDPDAELSILARDSVXKVMANQXLTHISLKIKDPQKASKQLFVESLNRDSXDDIPSIVVPFKG

SEQ ID NO: 216851 - protein, 63 aa, Glycine max
  Clone ID: PAT_MRT3847_37845C.1.pep
GANVKGYYVWSLFDNFEWSSGYTSRFGMIFVDYKNNLKRYQKLSAQWFKNFLRKETRLYSSCK

SEQ ID NO: 216852 - protein, 96 aa, Glycine max
  Clone ID: PAT_MRT3847_37846C.1.pep
PLIYFFGKAFGGGGTAIFLSLKLKASRGDQEMQNLGGGGAPWGLNWHWNLGRGLNKQTPVSGGATWVEKCRGPKEITTLFFFSQGKTPGGPQRGVF

SEQ ID NO: 216853 - protein, 441 aa, Glycine max
  Clone ID: PAT_MRT3847_37847C.1.pep
MMELEATAATSPPSRVLLISAGASHTVALLSGNVVCSWGRGEDGQLGHGDTDDRLLPTHLSALDAQQIDSIACGADHTLAYSESRNELYSWGWGDFGRLGHGNSSDLLIPQPIIALQGLRIKQIACGDSHCLAVTMEGEVQSWGRNQNGQLGLGTSEDSLVPQKIQTFQGVPIKMVAAGAEHSVAITENGELYGWGWGRYGNLGLGDRNDRWIPEKVSSVDCDKMVMVACGWRHTISVSSLGGLYTYGWSKYGQLGHGNFEDSLVPQKLQALSDKLISQVSGGWRHSMALTSTGLLYGWGWNKFGQVGVGDNVDRCSPVQVKFPHDQKVVQISCGWRHTIAVTEKENVFSWGRGTNGQLGHGDTVDRNSPKIIEALSVDGSSGPHIESSNTDLLSGKSGASLSERYAVVPDETVSGQTASSSSGDRLDISVPESDVKRIRV

SEQ ID NO: 216854 - protein, 200 aa, Glycine max
  Clone ID: PAT_MRT3847_37848C.1.pep
MYVLKLCDKMVMVACGWRHTISVSSLGGLYTYGWSKYGQLGHGNFEDSLVPQKLQALSDKLISQVSGGWRHSMALTSTGLLYGWGWNKFGQVGVGDNVDRCSPVQVKFPHDQKVVQISCGWRHTIAVTEKENVFSWGRGTNGQLGHGDTVDRNSPKIIEALSVDGSSGPHIESSNTDLLSGALFCSSLICNIVPLFFSHY

SEQ ID NO: 216855 - protein, 27 aa, Glycine max
  Clone ID: PAT_MRT3847_37849C.1.pep
SDIYERQSERTLIPITITLLLLCRLFA

SEQ ID NO: 216856 - protein, 52 aa, Glycine max
  Clone ID: PAT_MRT3847_3784C.1.pep
NFFNDSLEGVVPLTKHAPLHSWTQLSSRDYYFYLNYSTTAPLPPKHVSNVIS

SEQ ID NO: 216857 - protein, 98 aa, Glycine max
  Clone ID: PAT_MRT3847_37850C.1.pep
PFGYPLPPGSLSLGVKRGYGPFQYPPHMGSYLVGGGGKKTFTPKGIRRVKIGTASPRAFPGAGGGAKFGGSVLYNRPAKKPEWGFNLFCLSMPWPMLP

SEQ ID NO: 216858 - protein, 78 aa, Glycine max
  Clone ID: PAT_MRT3847_37851C.1.pep
LLADVAKWVDLIEAHLRKGTIKSVAWYRDRLCELVDDFEEIKASYGHEPWQTQSDGTDMRTTGCKLIGIVPNDSPVKL

SEQ ID NO: 216859 - protein, 41 aa, Glycine max
  Clone ID: PAT_MRT3847_37852C.1.pep
YCNVYVFNFFTCAIRDTYYHKVNRKIQTKKETKDELILFMH

SEQ ID NO: 216860 - protein, 139 aa, Glycine max
  unsure (1)..(139): unsure at all Xaa locations
  Clone ID: PAT_MRT3847_37853C.1.pep
MSKRGRGGSAGNKFRMSLGLPVAAVVNCXDNTGAKNLYIISVKGIKGRLNRLPYACVGDLVMATVKKGKPNLRKKVLPAVIVRQRNPWRRKDGAYMYFEDNASVIVNXGEMKGSALTGPISKECADLWPRIASAANAIV

SEQ ID NO: 216861 - protein, 65 aa, Glycine max
  Clone ID: PAT_MRT3847_37854C.1.pep
VNELHSWGYGDTQHNFARKGLVLSGDPKSHAYRTLCTFATLTIILELATTLNIGPRAEMKSFLLA

SEQ ID NO: 216862 - protein, 112 aa, Glycine max
  Clone ID: PAT_MRT3847_37855C.1.pep
MTSPPLGHFPDEDGCWQIRNLVEKDFDDVFELCSKAFPLDYPLDWYKSVVAGQFISFGLFRDDLLTALIVAQRKQIFECEYEDRNLYKDPNASAIYILSLAVSDRYRRRGIG

SEQ ID NO: 216863 - protein, 80 aa, Glycine max
  unsure (1)..(80): unsure at all Xaa locations
  Clone ID: PAT_MRT3847_37856C.1.pep
GDVTPKNLKKVGFNKWKKLIXGDQSEYFGKLSFEYKSVEREKLEKKGYRIIGKVGDQWSDFLGSNKGIRIFKLPNPLYYD

SEQ ID NO: 216864 - protein, 560 aa, Glycine max
  Clone ID: PAT_MRT3847_37857C.1.pep
MDSWVRMLFLIACIVPALVECKVRHYKFNVVLKNTTRLCSSKPIVTVNGKFPGPTLYAREDDTVLVKVNNLVNHNVTIHWHGVRQLRTGWADGPAYITQCPILSGQSYLYNFTLTGQRGTLLWHAHVNWLRSTLHGAIVILPKRGVPYPFPKPDKELVVILGEWWKSDTEDVINEALKSGLAPNVSDAHTINGLPGIVSVANCSTQDVYKLPVESGKTYLLRIINAALNEELFFKIAGHPFTVVEVDASYVKPFKTDTLSIAPGQTTNALLTADQNSGKYTIVASTFMDSPVVAVDNLTATATLHYTGTLATTPTLLTTPPPRNATQVANNFTNSLKSLNSKKYPAKVPQKVDHSLLLTVGLGINPCPSCTAGNGSRVVAAVNNVTFVMPTTALLQAHYFNIKGVFTTDFPGNPSHVYNYTATPPAAAWQTTNGTKAYRLAFNSTVQVVLQDTGVIAPESHPVHLHGFNFFVVGSGVGNYDPKTDQNNFNLADPVERNTIGVPTGGWVAFRFRADNPGVWFLHCHFEVHTTWGLKMAFLVDNGKGPNESLLPPPKDLPKC

SEQ ID NO: 216865 - protein, 37 aa, Glycine max
  Clone ID: PAT_MRT3847_37858C.1.pep
LKKKVKPAKARFKLKYFFLGIIMVTWLICKLFLGTVF

SEQ ID NO: 216866 - protein, 178 aa, Glycine max
  Clone ID: PAT_MRT3847_37859C.1.pep
ILEKPSLSLSVPNGHHHSSINRDIFATEEMSPASKSKSKDKKAGKEAQKSSAKSSGSGNAVAGVPASAYNPLSGTFHTLEMSPTSTSQVHSNGRFRNIDETDEHPAGSVVAGVEYDSVSNNGSWSGDSEDHKDKASNPPARLEAVPGADNDKREKIRQKNEKKHQRQKERRAQELHDR

SEQ ID NO: 216867 - protein, 392 aa, Glycine max
  Clone ID: PAT_MRT3847_3785C.1.pep
MPFPWKKNRVPRISQFVADLQSPKRGGSLVVETGFPTSLIDLFVKNQSRFQKHRSKKPPPPKSLSATDPPPPPPPPPPSPATSPPPSRVPAVPTTPVEQDDTAVSAPDRITECSGSHWSRVNAVVLVAKILMVLVLVASVERLTVGITASAFALLLLEYAGLRRAVVSCSVAESRWRWFQKVSRKERVVVERIEFEFAELNKGLSIDEIEVVGTTNEGGICCSEIGDVASKVLEPCLCDEDVSECKIRPSRSGRFRSKMVKLVSKKFRGSKKKNKHNEGESGSEISSAVGEEKLPILEIEEEEEEENGDNKSSNTKPDCGITCSYEKKVNRVENSGSSMVLVMIIALVGLLLGRFPALVLLMTWCCLMKILGILWRTQKVPMNMIKCSVSNS

SEQ ID NO: 216868 - protein, 53 aa, Glycine max
  Clone ID: PAT_MRT3847_37860C.1.pep
SRWKAPDNELNFGGPIKHKKVDLTSDLRWLHIHSPPRITCPSTHFNILIFVNH

SEQ ID NO: 216869 - protein, 51 aa, Glycine max
  unsure (1)..(51): unsure at all Xaa locations
  Clone ID: PAT_MRT3847_37861C.1.pep
RAEDAAIGQRPARCYRQIKNEPYPEXEVXSGVHDPXIRIYDVGMKKKGSDE

SEQ ID NO: 216870 - protein, 291 aa, Glycine max
  unsure (1)..(291): unsure at all Xaa locations
  Clone ID: PAT_MRT3847_37862C.1.pep
MSTAEAPPSFQEAARCVVCNCSFNTFRRRHHCRSCGRTLCNEHSSNQMALPQFGLYSNVRVCADCFNNLRSGKDEPQTSSDGVNSVTDTISKLDINANVDSKSILTAETKLLSGIKECKCGMPLCICEAPTPSSDAFPQQKPNPVIAAPSNPKPKKTDTVPKIRSSISTSKFSSMFNVGHVTNGTSDRPQIDYEVTGEGLREAIKNSDVAAVKKLLNEGVDANYRDKQGLSLLHLAAVFNQTDIVFILMDSGAXWSTTMDQGETPIDCVYLSLQYKMRKKMEEGGTVDQSI

SEQ ID NO: 216871 - protein, 179 aa, Glycine max
  unsure (1)..(179): unsure at all Xaa locations
  Clone ID: PAT_MRT3847_37863C.1.pep
MSTAEAPPPFQEAARCVVCNCSFNTFRRRHHCRSCGRTLCNEHSSDQMALPQFGIYSNVRVCADCFNNSRSGKDEPQTSSDGVNSVTDTISKLDINTNVDSKSIPTAENKLVLGIKECKCGMPLCICEAPTPSSDALXQQKPNPVIAAPSNPKSKKTDTPKNEAPVQLANLVLLLTVVM

SEQ ID NO: 216872 - protein, 50 aa, Glycine max
  Clone ID: PAT_MRT3847_37864C.1.pep
LCYYVRAIIMPCMVMSCYVPASTPPILNMGPRHGIGNRAFNTPHDWADAS

SEQ ID NO: 216873 - protein, 108 aa, Glycine max
  unsure (1)..(108): unsure at all Xaa locations
  Clone ID: PAT_MRT3847_37865C.1.pep
QEEMLSARASDVRTAKVSKNSKXLKHTAMHGGAIEIINDSCASPDRNIGGAKLLEDTYHTKPENAERRIFGAPIRGGRPIRVVTFPNTIVQNEPDMNPRFQLASTTTN

SEQ ID NO: 216874 - protein, 102 aa, Glycine max
  unsure (1)..(102): unsure at all Xaa locations
  Clone ID: PAT_MRT3847_37866C.1.pep
WTEPKTNRCFSPSESSVFIENGFYMHRALDSNNVMYATKYLAYMLYELRTCKHLPHNHYYLYMRPCEQLRNPXDALRVTDSYXRSIIDLYELLQNTGNILPR

SEQ ID NO: 216875 - protein, 76 aa, Glycine max
  Clone ID: PAT_MRT3847_37867C.1.pep
LKAKCLSSVASICAPSWASLYRLVSQARAQFRPFKSLLLIVLPSKLGLGPQFLSLLTELCLSCNAIVCSLRQFRGV

SEQ ID NO: 216876 - protein, 69 aa, Glycine max
  Clone ID: PAT_MRT3847_37868C.1.pep
PDSLQFLPKHMPKLTLWVLELPNSHASTIISSTTRTVHNDASPHTLKHSEKPFRVRKGEETTTTPATCP

SEQ ID NO: 216877 - protein, 155 aa, Glycine max
  Clone ID: PAT_MRT3847_37869C.1.pep
MAYSQLQKVEANVHIKASADQFHNVLCNRTHHIANIFPGKVQSVEIHKGEWGTEGSVISWNYLHEGKVCVAKEMVEGIDMKNNKMTFKVIEGDLLGHYKSFKFLLQVTPKEKGSVVNWVLEYEKQNDNTPDPYTLLELTVEMSKEIGAYLSQDHN

SEQ ID NO: 216878 - protein, 53 aa, Glycine max
  Clone ID: PAT_MRT3847_3786C.1.pep
LNYFYALCTIHTISFFLLSLLPWVVLLKKWGGGYNLPNTQIKPLFHLKSSAII

SEQ ID NO: 216879 - protein, 29 aa, Glycine max
  Clone ID: PAT_MRT3847_37870C.1.pep
ARGQEAPVDHFCTNFWSSVIWVELVCKIM

SEQ ID NO: 216880 - protein, 91 aa, Glycine max
  Clone ID: PAT_MRT3847_37871C.1.pep
MHGCGRDQSKHNRHMWPVPANATTDGRKIRAGDCALFKAPRDSPPFIGIIRKLTFDKEESPSLEVNWLYRPADLKLAKGIVLEAAPNEVFY

SEQ ID NO: 216881 - protein, 264 aa, Glycine max
  unsure (1)..(264): unsure at all Xaa locations
  Clone ID: PAT_MRT3847_37872C.1.pep
MHGCGRDQSKHNRHMWPVPANATTVAIDPSPSQFKCKDGRKIRAGDCALFKAPRDSPPFIGIIRKLTFDKEESPSLEVNWXYRPADLKLAIGIALEAARNEVFXAVLPSGISAFVCRRVYDIENNCLWWLTDKDYLNERQEEVNQLLAKTKLEMHGAVQSGGRSPKPLNGPTSTQSLKSGSDNVQNSSSFGAQGKGKKRERGDQVSDSSKKERLFKVEDGDSGQFRLESMLKSEIAKITDNKGGLVDFEGVERLVQLMQPDSGD

SEQ ID NO: 216882 - protein, 52 aa, Glycine max
  Clone ID: PAT_MRT3847_37873C.1.pep
RIRLEVFVFFFFPPVASMGQEAGLGVLSFHLYINKRLEGFKDFHDVRVITHI

SEQ ID NO: 216883 - protein, 86 aa, Glycine max
  unsure (1)..(86): unsure at all Xaa locations
  Clone ID: PAT_MRT3847_37874C.1.pep
VGGRVGTNYVAMLSVDTYHTNPENALRIFFCRQHQRXGRTIWVVTFSNKIPLLEPFMYTKSALLRTTATGDSDQGKDFAMDKGNVA

SEQ ID NO: 216884 - protein, 93 aa, Glycine max
  Clone ID: PAT_MRT3847_37875C.1.pep
FFFSSSASPPTSPRPCPPTCTSTTSYQSSESPPSSKPTTTSPPTPKTTATPSPPPSHKPRPKTTVPSPSMSASKSTTRVAVLRRRRRAKFRRR

SEQ ID NO: 216885 - protein, 90 aa, Glycine max
  unsure (1)..(90): unsure at all Xaa locations
  Clone ID: PAT_MRT3847_37876C.1.pep
EVRSVTISATYKEYVIEFSVSMDCGIVALKEEVAVGWNLQAGAFDIYCLDDDHEWVLIACDADLLDCMDISRSSRXNVVRLVVHDVLPIL

SEQ ID NO: 216886 - protein, 425 aa, Glycine max
  Clone ID: PAT_MRT3847_37877C.1.pep
MKPLLRFGIAFILLLHSSLASHIPYPKAISDLKDTIVKGFGFTAEDDVTITGFDPRDAEVGHSVEYQFDLEIDHKVIPFKLLEDVKHWDYVDLPIFRAEAQSGLVPKPRPNQGWSVNGFPLTALPALAPFVLAGPMELWIHDASDIILSGRHDVDAGVLKKVVLAEGAAVTVKGARSVSLRQPLDFPLPLNRTENGFANGLLTLAEHLRHASRTQGSPILSLRIVGPTSLTAAPSSDTTTSTSTSLKLKRLAPGLVELSSPLKSKEIEPFSRVDLEGEAPTVLTPTQFATLWPLASLNGSNANLLGFEKLLHSVLGAKAEKKGSFRLLKADVSAQTYVKMGFKAEKKVKKGELEGYYPSWRTKPETVTTHFEVLAKVDGEKVVPEKVMPVEPVIAVDSVAPNLLTQNVSMSKTQVVHPPPNPFYL

SEQ ID NO: 216887 - protein, 228 aa, Glycine max
  Clone ID: PAT_MRT3847_37878C.1.pep
MKPLLRFGIAFILLLHSSLASHIPYPKAISDLKDTIVKGFGFTAEDDVTITGFDPRDAEVGHSVEYQFDLEIDHKVIPFKLLEDVKHWDYVDLPIFRAEAQSGLVPKRASADGLPVLAPFVLAGPMELWIHDANDMRLSLPHDVDAGVLKKVVLAEGAAVTVKGARSVSLRQPLDFPLPLNRTENGFANGLLTLAEHLRHASRTQGSPILSLRIVGPTSLTAAPSSDT

SEQ ID NO: 216888 - protein, 109 aa, Glycine max
  Clone ID: PAT_MRT3847_37879C.1.pep
GARPDERQPSGGCLRKWSAEDTIENKTFALRTDERLMPASIERGVRATRESQTAKEAMRAPSCQSDVIEGGQGMHETDYGVHEEDCTDPPYVPSYAKHSGGIINELCQL

SEQ ID NO: 216889 - protein, 123 aa, Glycine max
  unsure (1)..(123): unsure at all Xaa locations
  Clone ID: PAT_MRT3847_3787C.1.pep
QSPYVAQVQLXGQADEFPEAAGTEVATIDSFQGREADAVILSMVRSNTLGAVGFLGDSRRINVAITRARKHLALVCDSSTICHNTFLARLLRHIRHFGRVKHAEPGSFGGYGLGMNPILPSIN

SEQ ID NO: 216890 - protein, 66 aa, Glycine max
  unsure (1)..(66): unsure at all Xaa locations
  Clone ID: PAT_MRT3847_37880C.1.pep
XCXXYQXSSFFXRSTPXXLESQFCLVGPLIPVSSQQNQLFYAGFKGLKSNNMTLGWGSRNRGQMGY

SEQ ID NO: 216891 - protein, 85 aa, Glycine max
  Clone ID: PAT_MRT3847_37881C.1.pep
SNIYLTIIINQSSKTKNLYIILFFLYYKHILNIIFYFTNYFIFLNSYLIPIIIVKNTNFPSSPFLYTHQSPQKLNYTYYSNLFPK

SEQ ID NO: 216892 - protein, 77 aa, Glycine max
  Clone ID: PAT_MRT3847_37882C.1.pep
DRPNSPLAVRQRNAVCDSDPASASSRCMVRSVVVHAYRIFDDITAKVSVSNSRSHWSSAASPTSHYLFSARVCVSSS

SEQ ID NO: 216893 - protein, 69 aa, Glycine max
  Clone ID: PAT_MRT3847_37883C.1.pep
HRVFRKPMLTFDMLTLFFFFSRKLMLTSVFFKKPMLNLYFKKYGEPYEARALSSSPSKLLRSLLLLISV

SEQ ID NO: 216894 - protein, 75 aa, Glycine max
  Clone ID: PAT_MRT3847_37884C.1.pep
MLEKRQDFLRSYQVWRKKSVTERITGTVVRAKKKVGLRLKTACKLRRNLKSAHYDRMKRILHLLHNINSRRTNIY

SEQ ID NO: 216895 - protein, 57 aa, Glycine max
  Clone ID: PAT_MRT3847_37885C.1.pep
IECTLFEKKIPSAKTKSKNVIHPVFQISLEDTLIKHVNTRIIRILNIMPLYFFIDFV

SEQ ID NO: 216896 - protein, 166 aa, Glycine max
  Clone ID: PAT_MRT3847_37886C.1.pep
MGTTTTPLSHTVRVSNIPQSATAKDLLDFLESTLGSSTVFALEIFSDNPNWKSRGFGRVQFETLDARSRALSLSQLNQLLFNRHFLRLSETDSDIIFRPQHRLQNGVLYAGFMLSDHRMSVLESWEGIAGWVLPQRKRLDFWGGHNGDWYRLEFLVEDILECYGYC

SEQ ID NO: 216897 - protein, 41 aa, Glycine max
  Clone ID: PAT_MRT3847_37887C.1.pep
FDDKQALLNTSNRKVIKKNSIALTFCHMQLFSFYLIMKLQL

SEQ ID NO: 216898 - protein, 73 aa, Glycine max
  Clone ID: PAT_MRT3847_37888C.1.pep
SFVFVAHNLIFIGMVKAKKSEGNNRLFTIKGTSPIHCDARRFRTRSCRNRNYLRIRESQMGLLKWRKGKNDKG

SEQ ID NO: 216899 - protein, 58 aa, Glycine max
  Clone ID: PAT_MRT3847_37889C.1.pep
TMVVLVQASHHTLSYASCSMEATSPGAERSFDTLCACQNFTGQYVNREDSGTMVSLVA

SEQ ID NO: 216900 - protein, 61 aa, Glycine max
  Clone ID: PAT_MRT3847_3788C.1.pep
ARILLCLSSLLRGRNKFVPSRILGQKTSFWGLLPVISIFQLSKDIFVSLLYWFVQDLGYRF

SEQ ID NO: 216901 - protein, 40 aa, Glycine max
  Clone ID: PAT_MRT3847_37890C.1.pep
SFLGTVGFCFCSSCFSLVELHESVVNPLNLASHDQVRREW

SEQ ID NO: 216902 - protein, 204 aa, Glycine max
  Clone ID: PAT_MRT3847_37891C.1.pep
MKFYPGQNVSEIVYHFQSNETANRLDAYFACGCEEDTEVLARLKQCNPRLLHLSYAAFCLEMGSHSVEEIEYDDGELVFLYFQNFLLSIVSNSSKTANLRAYIRSAFAYHFQHFVEFDQYTNDSLNVMDTSVSAQGIADLALSMVRWIPTQIKKVVNFGVGSVIESFSEHFNKLIMQYCPIVFQAFSWVNNIWTMVKEWIEEAA

SEQ ID NO: 216903 - protein, 78 aa, Glycine max
  Clone ID: PAT_MRT3847_37892C.1.pep
ITTFYPIWKKLINKTAHTKEQTRITRPVPAGITTSAHSETQYSKTKRWTKIFPERKSKPLPIKHSIRSRSLKREDPGA

SEQ ID NO: 216904 - protein, 53 aa, Glycine max
  Clone ID: PAT_MRT3847_37893C.1.pep
FITNMITGTSHADCAVLIIDSTTGGFEARISNDGQTREHAQLSYSLDVKQMIG

SEQ ID NO: 216905 - protein, 89 aa, Glycine max
  Clone ID: PAT_MRT3847_37894C.1.pep
FSNCIQIYPNASSIFFRFTHKQMSVVTDSPVHSSSSDDFIAFLDAELDASSPDSSPDKEVEKQDDDELESVRIKRRKFESIEETPRIYL

SEQ ID NO: 216906 - protein, 115 aa, Glycine max
  Clone ID: PAT_MRT3847_37895C.1.pep
ANFLRVYSNSRNFEGVYLFGGPFKGLFLGPTPFFIEPGGFFPKRVGYFHWANFQGGFLCFFGKKKHPFFVLERANKGFGSPTPLGPKFLPFSLIPGPGGFFFFLFWKPRFYIWFF

SEQ ID NO: 216907 - protein, 135 aa, Glycine max
  unsure (1)..(135): unsure at all Xaa locations
  Clone ID: PAT_MRT3847_37896C.1.pep
CYKVIKGSWDLIDDTANKXGGMELLRKTFRICKSDIFGPDSLEGWLRAAWIYTAMTDYPTPSNFLNPLPAYPVKKMCEAIDSSVTGNNRLAKLYAAANVYYNYTGKATCFDLDDNSDPHDLGGWQWQLQTEKSSC

SEQ ID NO: 216908 - protein, 72 aa, Glycine max
  Clone ID: PAT_MRT3847_37897C.1.pep
PGGADPPAGPNAALQGGAPSPIRLRNRWERRTGRAGLASTAPGEKGTCCKTDKLGNARDFPVPTVVNTRPAD

SEQ ID NO: 216909 - protein, 51 aa, Glycine max
  Clone ID: PAT_MRT3847_37898C.1.pep
NSQQQRMRLLPHFASSTQTSHRSFRYRVSDLEITTLPLYIFPQQKSSFGAA

SEQ ID NO: 216910 - protein, 116 aa, Glycine max
  unsure (1)..(116): unsure at all Xaa locations
  Clone ID: PAT_MRT3847_37899C.1.pep
MLSSNLNLISLAPEMIMYXGAYTLTANIRSSSSTTIEMATLIPLXNYSEVAAAISKIDNSKHIPEIPEHLSNDAQNLMTLCXTKRPXARPTAHKLLDHLLIRHQSASKAANVSITR

SEQ ID NO: 216911 - protein, 52 aa, Glycine max
  Clone ID: PAT_MRT3847_3789C.1.pep
KRSNPSLFQRLGFFFFFSLPAVIMKHRVPQRQLKRGNEVWFSRGSKLSRQSD

SEQ ID NO: 216912 - protein, 41 aa, Glycine max
  Clone ID: PAT_MRT3847_378C.1.pep
RSHFRCRVFMYPPPECATNIKDFHSSRMCVSLSIILYPLVL

SEQ ID NO: 216913 - protein, 163 aa, Glycine max
  Clone ID: PAT_MRT3847_37900C.1.pep
MPNLKGRLQKQHYALFVVSEDQSQYCSDGKPGLLSFYNRPYRRDSKILLPNSERSQNSILWFLGPAVLVASFIFPSLYLRKVLSIIFEDSLLTDFLILFFTEAIFYCGVGVFLYLLDHVRRPLLVDIAANNSDTLPPQLGQRVSSCATLVLSLVIPMVTMGLV

SEQ ID NO: 216914 - protein, 191 aa, Glycine max
  unsure (1)..(191): unsure at all Xaa locations
  Clone ID: PAT_MRT3847_37901C.1.pep
MYTKDKSCQLKFIHGMPNLKGRLQKQHYALFVVSEDQSQYCELETTALVLENSNTVAEDISPASNSYFHLSGSDGKPGLLSFYNRPYRRDSKILLPNSERSQNSILWFLCITYSIYAKCYPSFGCNSXFEDSLLTDFLILFFTEAIFYCGVGVFLYLLDHVRRPLLVDIAANNSDTLPPQLGQRVSSVATL

SEQ ID NO: 216915 - protein, 59 aa, Glycine max
  Clone ID: PAT_MRT3847_37902C.1.pep
GCEKTTEGGQQILRLGIAEIGNMRVPWDYKNQNLAVRGEKSSKKPDYLGIKILYQGGTN

SEQ ID NO: 216916 - protein, 127 aa, Glycine max
  Clone ID: PAT_MRT3847_37903C.1.pep
MTQIRPSITGAWSEVVYNSFHQFGGRLRSFVNTIMPGSGSVNNSNPRGYYGTPQIAYYPPPPQSLRPSYNAYGPKRAVLCGICYHGKDNQLNGTVNDVKNMNIFLVKECGFPRESILILTDDMEERN

SEQ ID NO: 216917 - protein, 119 aa, Glycine max
  Clone ID: PAT_MRT3847_37904C.1.pep
RPRVRREANFTVSSMHSDMEQKDRDAIMKSFRAGESRVLISTDVWARGLDVPQVSLVINYDLPNNRELYIHRIGRSGRYGRMGVAINFVKNDDIRILRDIEQYYSTQIDEMPMNVSELI

SEQ ID NO: 216918 - protein, 70 aa, Glycine max
  Clone ID: PAT_MRT3847_37905C.1.pep
VLFGLCLAPLCSLFLAICCAFFFPFMEGRGDLVFAYLVFFLRFLNFGVAGRAETADGTAKSSVRVGLYPG

SEQ ID NO: 216919 - protein, 93 aa, Glycine max
  unsure (1)..(93): unsure at all Xaa locations
  Clone ID: PAT_MRT3847_37906C.1.pep
DCCAHSLKDQVQAHQDASVIIGAHGAGLIHIVSALPKTVILEIIXSSYFRRPHFAYISRWKGLEYHAINLAGSHADTGTVIKELVDIMKSLGC

SEQ ID NO: 216920 - protein, 60 aa, Glycine max
  unsure (1)..(60): unsure at all Xaa locations
  Clone ID: PAT_MRT3847_37907C.1.pep
LHSXFXSXXXPLSFENVXDAVXQFNRMLCLIHTIPIVXPKKILDSFXXMMQXXTAXSXSQ

SEQ ID NO: 216921 - protein, 79 aa, Glycine max
  Clone ID: PAT_MRT3847_37908C.1.pep
VSSQKPFFLSSQHFQNFGSTNFAFLKPTYTLATWRVINDMPKTSNGPRSKALVGATVVPPLDEAQLPPMRLRQCCHRLR

SEQ ID NO: 216922 - protein, 47 aa, Glycine max
  Clone ID: PAT_MRT3847_37909C.1.pep
CKTATNQQARLEGGDLKTSGWPRPCKLCTGEPGEKPPGSSPTHKACT

SEQ ID NO: 216923 - protein, 125 aa, Glycine max
  Clone ID: PAT_MRT3847_3790C.1.pep
KHANLFLLPTCVRSKQARKKAKKVERSFSNTPPSKDDLGRVNQVTSRTPPAIQCLLGRSPSFKEKDIFFIQSSTILCIRYCEEIVIENSSNLLTFNRVVGANKLGHSQLELKYLFNQSLWLVLIN

SEQ ID NO: 216924 - protein, 59 aa, Glycine max
  Clone ID: PAT_MRT3847_37910C.1.pep
RDTCYKMHTVLHRPQKRQLLFDKMRSNFINQNANFTKSNLITHTLVKHLGKKHIQRGVV

SEQ ID NO: 216925 - protein, 85 aa, Glycine max
  unsure (1)..(85): unsure at all Xaa locations
  Clone ID: PAT_MRT3847_37911C.1.pep
QATEPLGGPLKGGVGHRDRIFESAAQMMDLHANNKVVLEVEYDEXVGTGLGPTLEFYTLVGQEFQKFCLAMWRGNDSFFTPKTNF

SEQ ID NO: 216926 - protein, 68 aa, Glycine max
  Clone ID: PAT_MRT3847_37912C.1.pep
FCPVRTRLCIGRVGRPVRGGLGYISGQPSSLDSGRALSYFLYGVPMLFIVQRVLVCCSNTSFETNHPS

SEQ ID NO: 216927 - protein, 87 aa, Glycine max
  Clone ID: PAT_MRT3847_37913C.1.pep
LEGQSFLLLYGTRVRVRGPLRMIVAMLQLLGGAAGDIVYRWRLTCTKHMGREHTSRVLGERSHDEGCRWSQSRRMGSCSTWNSVRRR

SEQ ID NO: 216928 - protein, 645 aa, Glycine max
  Clone ID: PAT_MRT3847_37914C.1.pep
QKALSNFTAAEWLDGGEKEYHCQRCKQKVKALKQLTIHKAPYVLTIHLKRFHAHDTGQKIKKKVQFGCALDLKPFVSGSNDGDVKYSLYGVLVHAGSSTHSGHYYCYVRTSNNMWYTLDDNRVSHVSEREVLNQQAYMLFYVRDRKSIVPRKPVDIAKKENMKTNLNVNRESSTSNHVLKEYPNGTVENKAEKGALVLQKHSVILAENLIQSKRHGSELSSEAQAQKDSPDGLSVAKSELGCLSSLDHSGKDYSLPHNLKSLAAPVGKNNLRNENVFSKEGIKDSPSIVPSSTNPQNGELTTEWKSQSLKKNLVKIVDVATPQDSSTNMTNGICPKTSLIHLKVNHQLGTSAIGSVCEKASSVVHEDLVGSQGLVLNKSVNTSLNTESLNQKPLKKSKKKFLKYQVSWMHLRPIFYYMAYLGPRKKNHKRIKRRTLSMKNPNKDKLDKLAFSSEDAKPDVFPCLSSCSDSKATKAGYRPSANFKSSDESLIETRAEGEFRKRIDHSCAVLASAAQIENISGSGSVVSQFEARQADSAQDSTRDQMHNGLMSMPNGGPEETVVARWDDIELPSSQHLESKNDKTVSIGYVGDEWDEEYDKGKRKKIRGFKHSFGGPNLFQEIAVEKSKFKRAKFDQSCSGNPPFRI

SEQ ID NO: 216929 - protein, 169 aa, Glycine max
  unsure (1)..(169): unsure at all Xaa locations
  Clone ID: PAT_MRT3847_37915C.1.pep
HASADAWASLPPVAFWGTPASETIDSSFQFTAGPRPSHSPPHFREHPPFDHLHLRTSTTAAQFTLHAIATMQKVIQRTAMAKRQAARKAQKIAELDKAFDKRQNRKELQQIKSMTNKTIVDARKRRREDWLLGPLAPRRDVREWREKYATIDSRRIQLAXADPDTKLEL

SEQ ID NO: 216930 - protein, 72 aa, Glycine max
  Clone ID: PAT_MRT3847_37916C.1.pep
PISMTSLKRRVGSYISSYFKPNNQQTPFLDLLTNFPYCHLNKSRTLPKQHGSFQNIPQYHLYYALQRDYLHN

SEQ ID NO: 216931 - protein, 52 aa, Glycine max
  Clone ID: PAT_MRT3847_37917C.1.pep
PFKLIVWCRCFPFSYPIYVHREHVIFFLSVFKGKVCSTSVIIVFEYKDFSCT

SEQ ID NO: 216932 - protein, 167 aa, Glycine max
  unsure (1)..(167): unsure at all Xaa locations
  Clone ID: PAT_MRT3847_37918C.1.pep
NTAISVGVSNTLGMLHPRAAIYSSCVTMFQSLXLGILFMTVIFFSKDEFAKIFTDSEDMILAAADLAYLLGVTIVLNSASQVMSGVAIESGWQVMVGYINLACYYIVGLPIGIFLGFKLHLGVKGLWGGTMCGSILQTLVLFTIIWKTNWSKEVEQTAHRMRLYVEQ

SEQ ID NO: 216933 - protein, 35 aa, Glycine max
  Clone ID: PAT_MRT3847_37919C.1.pep
IQEELIYAHSKGTGYFFAIICGIVQWFLPIPIIKR

SEQ ID NO: 216934 - protein, 87 aa, Glycine max
  unsure (1)..(87): unsure at all Xaa locations
  Clone ID: PAT_MRT3847_3791C.1.pep
LSERHSTRSSCRAPPVRAHGRIPGAHRPRNNVEPCLSQVSRRAGDGGLLSQETRASSELDLRQRGLCRVPLFSKTLVAFLKATLXRL

SEQ ID NO: 216935 - protein, 37 aa, Glycine max
  Clone ID: PAT_MRT3847_37920C.1.pep
CGFLASFYSSYWSYFIAFLLSQMLEVNMFSLTSFHVC

SEQ ID NO: 216936 - protein, 84 aa, Glycine max
  Clone ID: PAT_MRT3847_37921C.1.pep
TTFQFTDTYIVVSLLSRNLFFGVMATVKVACVVLIYMAVKNALTLVQAVSYNDLSVNVTSSRSKLTQGAHVLQSFSTRLRNILG

SEQ ID NO: 216937 - protein, 39 aa, Glycine max
  Clone ID: PAT_MRT3847_37922C.1.pep
SPGQTNALTNLKNSPYKSGSLYSTPTQLLTYLRYWTAQT

SEQ ID NO: 216938 - protein, 37 aa, Glycine max
  Clone ID: PAT_MRT3847_37923C.1.pep
FFFFFFFFFFFFFFFFFFFFFFFFFFTEKKAKFLLGV

SEQ ID NO: 216939 - protein, 128 aa, Glycine max
  Clone ID: PAT_MRT3847_37924C.1.pep
MATSVAVAGALTAHDRRILTAVNVGASSLSLAGSSFIVVCYLLFKELRKFSFKLVFYLALSDMLCSFFGIIGDPSKGFFCYAQGYSTHFFCVASFLWTTTIAFTLHRTVVKHKTDVEDLEAMFHLYVW

SEQ ID NO: 216940 - protein, 122 aa, Glycine max
  Clone ID: PAT_MRT3847_37925C.1.pep
MATSRIAGALTAHDRRILTAVNVGASSLSLAGSSFIVVCYLLFKELRKFSFKLVFYLALSDMLCSFFGIIGFSSMDPSKGFFCYAQGYSTHFFCVASFLWTTTIAFTLHRTVVKHKTDVEDL

SEQ ID NO: 216941 - protein, 102 aa, Glycine max
  unsure (1)..(102): unsure at all Xaa locations
  Clone ID: PAT_MRT3847_37926C.1.pep
KTPPTPLERPPTLGPQKXSPPPGGPPKRFKKRKILPPQFGLEIKNPTPGQGTRPMPFIGLTEPPWYKNKAYQGKKKNLAPGKKKPRLGNKRGERAGQPRPKI

SEQ ID NO: 216942 - protein, 210 aa, Glycine max
  Clone ID: PAT_MRT3847_37927C.1.pep
PNRSSTKSSWEIVKDFMADGEQRELLAERAENVLLSLKQRFPGLTQTTLDTSKIQCNKDIGKSILESYSRVLESMAFNIVARIEDLLYVDDLTKHSDRFPLVPMTVSVSGTPHKAIGTPRSFSPAPPLISPARGERSPFLGNNHNNNNNIKPQRRGFGVRRVLSNYLGAESKETKILSNSTVVNGSNTSNNKEEQPERQKKSHAMHGKTK

SEQ ID NO: 216943 - protein, 69 aa, Glycine max
  unsure (1)..(69): unsure at all Xaa locations
  Clone ID: PAT_MRT3847_37928C.1.pep
PVXIRFYXRNYIWMSRXKCQIFNKTITHQXGTTFRTNXRXXXXXXXXXHKNFRTHSFFVXTLHFXXNKT

SEQ ID NO: 216944 - protein, 51 aa, Glycine max
  Clone ID: PAT_MRT3847_37929C.1.pep
HQDSTSECHLNMCNWLGRRIVHWSYRLMSMLMRPMLNLFDMQCAFISGNHL

SEQ ID NO: 216945 - protein, 442 aa, Glycine max
  Clone ID: PAT_MRT3847_3792C.1.pep
MGKRKERIQNPEPFDPYGADPAKTKKRSKAPKRHQQEEQFIAPKLSSKIMKQALIQQKEEEKEETHENNAAANLFEEVPNFEEDGGDDIDDFAGFSETQSQFAEYDEEINEEDERLMEASALKEPGQQKTLADLIVQRIKEKDATVASENRPVPKLDNSIIDIYKGVGTHLSRYTIGKIPKAFKHIPSMQLWEEVLYITEPENWSPNALYQATRIFASNFGAKKAERFYKLVLLPRVREDIRKNKRLHFALYQTLKKALYKPAAFFKGILFSLCESRTGTLREAVIIGSIIEKVSIPPLHSSVALLKLSGMEYCGTTSYFIKLLLEKKYALPYRVVDAVVAHFMRFFNETRIMPVIWHQSLLAFVQRYKNELQKEDKDRLRNLLEKQKHKLVTPEISRELDHSRNRGEKEEDLMSISSPVYVINKTIEEDRFDIPDVPMEED

SEQ ID NO: 216946 - protein, 67 aa, Glycine max
  Clone ID: PAT_MRT3847_37930C.1.pep
LRILVNSSSSNRHVISRSTGSRRGREGGRGGGPSGGAGNAQAPYSCPPSIIKNIVLHSRHSECSVPP

SEQ ID NO: 216947 - protein, 69 aa, Glycine max
  Clone ID: PAT_MRT3847_37931C.1.pep
AIHVCPSVRMPYRYGLFLFSASCRLLNVVQLDLVGSRAGFHRRAVVELWPVSVPRGGTLGEFCCRMQRS

SEQ ID NO: 216948 - protein, 71 aa, Glycine max
  unsure (1)..(71): unsure at all Xaa locations
  Clone ID: PAT_MRT3847_37932C.1.pep
RERELVSSFFFFFFLSQKLNIYCMVNRKQIRSHTHTHIYNXDAXSKVTTNLYYISSIRSSCHLQLYGITSA

SEQ ID NO: 216949 - protein, 90 aa, Glycine max
  Clone ID: PAT_MRT3847_37933C.1.pep
STHSALLLLHLVDADQSAHVQTQGSLLQKIDCNGACAARCRLSSRPRLCKRACGTCCRRCNCVPPGTAGNQEVCPCYASLTTHGGKRKCP

SEQ ID NO: 216950 - protein, 67 aa, Glycine max
  Clone ID: PAT_MRT3847_37934C.1.pep
MPKSRLHLAHRHVLRPRFFLAGIGANSIQFSVNFALFLDLNLRNDCLYAYFIIFLNVFFLRINSAIC

SEQ ID NO: 216951 - protein, 62 aa, Glycine max
  Clone ID: PAT_MRT3847_37935C.1.pep
TKYRNHLDSRTGTRISFFTVLKNLVHMHRLRTMVPLSNWSKRLYLIFLTKPVCHWLNTYYQP

SEQ ID NO: 216952 - protein, 65 aa, Glycine max
  unsure (1)..(65): unsure at all Xaa locations
  Clone ID: PAT_MRT3847_37936C.1.pep
QGNITHCYXXGTHISISYTPQSWXHPQEQKTMXXXXXXXXXAPIPDLQISLILAAWDRXXEXXRR

SEQ ID NO: 216953 - protein, 206 aa, Glycine max
  Clone ID: PAT_MRT3847_37937C.1.pep
MPTDPSGLLKYIFKIFEEKEEEFQIGLPTDVRHVAHIGSDDPSANAPSWMTDFKRGKEPPSGNPTQTVEEREKKASSNSKRSKIRNHLIPKSRHNSIDIDPDAPKPKATRRHNRSSDPSADSSNHESSSGSRQRHHRGSNHDPGSLSSQEMPPTGPKTNRRKSKASEDGSTKKPSSRRSSKGDSLTDISISDFGSDSRPESELTTH

SEQ ID NO: 216954 - protein, 76 aa, Glycine max
  Clone ID: PAT_MRT3847_37938C.1.pep
MSTKVKGILKGLRYISQIFEEKEEEFQIGLPTDVKHVAHIGSDDPSANAPSWMTDLKEEKNPHQETLLKQLKNVRK

SEQ ID NO: 216955 - protein, 77 aa, Glycine max
  Clone ID: PAT_MRT3847_37939C.1.pep
TEDGEGIRQPDINTDNATIIATISPSYSASGSPTGGYTTGYYTLEDTLKDLSSDGVSYGAYLRASHDDGNHTGVVTV

SEQ ID NO: 216956 - protein, 57 aa, Glycine max
  Clone ID: PAT_MRT3847_3793C.1.pep
PFSAVVSIHIGYAAMDVLSKAALNKGMSTYVFIVYRHAVAFFAMAPSAWVLDNKVHA

SEQ ID NO: 216957 - protein, 136 aa, Glycine max
  Clone ID: PAT_MRT3847_37940C.1.pep
GIYTYWAPGENQTKWILYIDLQELVSFNILQLQEPINMGQRVIEFHLEALSLDGVWMRVVYGTTIGYQRLLRFPKLKSQYLKLVVDKLRRPVDIFGIYMDPVTVLSDLSDRKSGACFNGGQVLQTTRNSSYLSATM

SEQ ID NO: 216958 - protein, 40 aa, Glycine max
  Clone ID: PAT_MRT3847_37941C.1.pep
DTLLISRLLISIHLLSLQFFKRVDSNSSKRCNFAGVKMGG

SEQ ID NO: 216959 - protein, 164 aa, Glycine max
  Clone ID: PAT_MRT3847_37942C.1.pep
CLTLWYFKNALHERGIIVLQLVSTEIDPRTMEPKLSNPVELEWLKCYKVGAERSTYKVEFEIDSDFGFPVAITVTNKYDKEIFLEGFSIESVVDIACNSWIQPEKVHPEERVFFSNKQAYLPCHTPAGLKKLRKEELKQLRGNGKGVRRGCERVYDYDVYNDLG

SEQ ID NO: 216960 - protein, 53 aa, Glycine max
  Clone ID: PAT_MRT3847_37943C.1.pep
KTEGKAPKSFIFPSPRLKSCFVVFAHGTQGTCLIKKLCGPKISKTPLPSSIFM

SEQ ID NO: 216961 - protein, 73 aa, Glycine max
  Clone ID: PAT_MRT3847_37944C.1.pep
WEAVPLPVPARTSWADPCLPCCEMTTEGGGVFCRHGLVSTGRWTGSTFFTPRVPSWWTYHASDHSSFPSKVLA

SEQ ID NO: 216962 - protein, 95 aa, Glycine max
  unsure (1)..(95): unsure at all Xaa locations
  Clone ID: PAT_MRT3847_37945C.1.pep
QPETLSFLFGLSPIASLPTPITPSRRRTLLKVIILGDNIVEKTDSMNQAVNKHFSYXCRATIGADCSTPEVQFGNKLFTLHIWDTACQQRFQYLG

SEQ ID NO: 216963 - protein, 81 aa, Glycine max
  Clone ID: PAT_MRT3847_37946C.1.pep
PPSDPTLFQGQQSWQQQHPPQTQPQHFNPQTHNYPNPPPPPNQFPHHHNHQSRQHNVPPRPFPENGRNHNQWNPQPTHLKI

SEQ ID NO: 216964 - protein, 71 aa, Glycine max
  Clone ID: PAT_MRT3847_37947C.1.pep
KPLTGPLGFNKIDQKKGWISIKNPTKSFYKGQDPTFSKKNKKCETPRPHFKQKSRANNFGLGKIMPVLRGL

SEQ ID NO: 216965 - protein, 62 aa, Glycine max
  Clone ID: PAT_MRT3847_37948C.1.pep
KNFQLETHLPLPEAKVASITRSFLFNHLNHREGWTHDLSHSYRRPKTKKLHDSKLRNEETQS

SEQ ID NO: 216966 - protein, 98 aa, Glycine max
  Clone ID: PAT_MRT3847_37949C.1.pep
LLGIETPTTMKQGSVSQFSLMSEKIHLRNWIADYAYRLLVGSAANCNLDSLSKSLVDNPICLIKTKPCNKIKAQNLSFLIINHTVFNLETHTHENYES

SEQ ID NO: 216967 - protein, 25 aa, Glycine max
  Clone ID: PAT_MRT3847_3794C.1.pep
PGVPRALKAPDAGHPNGTTGHMHHN

SEQ ID NO: 216968 - protein, 169 aa, Glycine max
  Clone ID: PAT_MRT3847_37950C.1.pep
VTLKIKPEGVLFSNGPGDPSAVPYAVETVKNIIGKVPVFGICMGHQLLGQALGGKTFKMKFGHHGGNHPVRNLRSGHVEISAQNHNYAVDPATLPEGVEVTHINLNDGSCAGLAFPAQQLMSLQYHPEASPGPHDSDYAFREFVELMKQGKNRTKESLHQLSAAQALDA

SEQ ID NO: 216969 - protein, 149 aa, Glycine max
  unsure (1)..(149): unsure at all Xaa locations
  Clone ID: PAT_MRT3847_37951C.1.pep
AVPYAIETVKNIXGKVPXFGICMGHQLLGRALGGKTFKMKFGHHGGNHPVRNLRSGHVEISAQNHXYAVDPATLPEGVEVTHINLNDGSCAGLAFPAQQLMSLQYHPEASPGPHDSDYIFREFIELMKQGKNRTKGRLHQLSTAHALDA

SEQ ID NO: 216970 - protein, 132 aa, Glycine max
  unsure (1)..(132): unsure at all Xaa locations
  Clone ID: PAT_MRT3847_37952C.1.pep
IHILTYNLFIVLIVYIAFLWVLLTNSHSIHTCSFNLNMFNPFQPNIILQKDSSISSSLVLQLTKIGSYGVPTLXSLDRTLYASPIHIIDSESFIFSXFSTSFKFNIFSSHILYLSYCLAFFLAPFCFYSNFY

SEQ ID NO: 216971 - protein, 37 aa, Glycine max
  Clone ID: PAT_MRT3847_37953C.1.pep
LEANKETHSRMGFFVCLLFYLVRDPFMPRVISVKELC

SEQ ID NO: 216972 - protein, 70 aa, Glycine max
  Clone ID: PAT_MRT3847_37954C.1.pep
ASINDTMYTHTHSNIISCIKIVCMSLWSSTYKIPLEILGTSPNIPLPLGLVLNRFYIESDFFFNYRKINN

SEQ ID NO: 216973 - protein, 37 aa, Glycine max
  unsure (1)..(37): unsure at all Xaa locations
  Clone ID: PAT_MRT3847_37955C.1.pep
MLCGKYENDGRALLVIFSFVXXWXVSEENXMKRWRNK

SEQ ID NO: 216974 - protein, 67 aa, Glycine max
  Clone ID: PAT_MRT3847_37956C.1.pep
QLWSSMHGRYVLRDLAVLILLAGRIALLPVLREPQLVHVLMFVFGARRAGVVARGHCCIEIIAMSRE

SEQ ID NO: 216975 - protein, 130 aa, Glycine max
  Clone ID: PAT_MRT3847_37957C.1.pep
SSSSSSLPRLHHGFVRIHIRNPVYNGRRNPDVCLNPSPRPKYSLTHIGIRPPDYALRDGDLHPNNLHHNVLDRVRGSLCLVHLFIVLFAGTVSAVITLPSPTITARLMVSLSVTLLLICAKILLQAPREH

SEQ ID NO: 216976 - protein, 80 aa, Glycine max
  Clone ID: PAT_MRT3847_37958C.1.pep
KIDTKGAPPGVKGIFGNPPGFPKRGKGKSGSLKSPLGGKKGWANIKRGRGSEKKVFKKKEFPKNFNAFLEKFHSGASQLN

SEQ ID NO: 216977 - protein, 120 aa, Glycine max
  unsure (1)..(120): unsure at all Xaa locations
  Clone ID: PAT_MRT3847_37959C.1.pep
SSRFGSRGKLTFPQGTFRSVKRMPLSIGGGAGAKNAILMEYGQMLGLFQCGRIFSFGDTRRLEVFLRLTSXPYIKCTASFFIAFENLADDTINFEAFSHKLVHFAKTHEKLYLNFYTRNF

SEQ ID NO: 216978 - protein, 105 aa, Glycine max
  Clone ID: PAT_MRT3847_3795C.1.pep
FISGLNFSFSPLQIPPPGIRRFPLPGKKKETDFDIFLPGYDGEHPQHHKSLEDPPPKGGNGDKAFLPLSFPPWNAFSASNGAAVTPTSSFSPTILTPPPPSLPPP

SEQ ID NO: 216979 - protein, 54 aa, Glycine max
  Clone ID: PAT_MRT3847_37960C.1.pep
MPPYVSSEFGSSKNHDVFLLISSIVTPIKYTIFKILHTVLDKKQKSGIGELPIL

SEQ ID NO: 216980 - protein, 372 aa, Glycine max
  unsure (1)..(372): unsure at all Xaa locations
  Clone ID: PAT_MRT3847_37961C.1.pep
MSAGGKKRNTLKFTTTCAVAAGRSMIIDASYAGERDLHYGGKILKRKNQKPLYEALQKIKEELMLLGFISLLLTITQNGIIRICVPVGWTHHMLPCSLKDHGKEESTKTTSHFQTFFSFSDISGTARRLLAESESENEDHQPATGEKLGPWKGKVPLLSVEALRCASLKLFFTVLINADSIKTKKINSDXQIREWKHWEDSIGNDNKNETQPVLEPTVTHVHQHAFIQNRFTGLGKDSAVLGWVKSFFKQFYGSVTKLDYVTLRLGFIMTHCKGNPKFNFHKYMIRTLEDDFKKVVGISWYLWIFVVIFMLLNVHGWHAYFWISFIPLILLLAVGTKLEHVIIQLAHEVAEKHSAIEGELVVQPRDDHFWFN

SEQ ID NO: 216981 - protein, 85 aa, Glycine max
  unsure (1)..(85): unsure at all Xaa locations
  Clone ID: PAT_MRT3847_37962C.1.pep
RINLYRGILSPPYPPIPCKACPIQKKAVFLSLPKKPPSKGNPYGVIVEPXKGYPQPVFMDVPPPEHDGKCKCGPNCPCPGCPFGP

SEQ ID NO: 216982 - protein, 402 aa, Glycine max
  Clone ID: PAT_MRT3847_37963C.1.pep
MAEEYEEGGEVEEEFSVWKKNTPLLYDFFISHPLQWPSLTVHWLPSSPQPHSHPSFNLHKLLLATHTSEGESNFLMLADASLPVDTSQHIVATDPNNPVLPKVEISQRISVDGEVNRARCMPQNPSIVGAKTCNSEVYVFDFTKERGSACDPDLRLRGHDKEGYGLSWSPFKNGYLLSGSHDHKVCLWDVPAAASQDKVLDAFHVYEGHENVVEDVSWNLKDENMFGSGGDDCKLIIWDLRTNKPQQSVKPHEKEVNFLSFNPYNEWILATASSDTDVGLFDTRKLAVPLHILSSHTDEVFQVEWDPNHETVLASSGADRRLMVWDLNRVGGEQIEGDGEGGPPELLFSHGGHKGKISDFSWNRNQPWVISSVAEDNSFHVWQMAESIYNDGDDDNMWTADD

SEQ ID NO: 216983 - protein, 140 aa, Glycine max
  Clone ID: PAT_MRT3847_37964C.1.pep
SGIKAKGVRADLIGSIITHYASKWLPDLSAGDMAERGLTQFEESPESVTASWMKKRFFVETLVGVLPPEKDAIPCNFLLRLLRTANMVGVEGTYRQELEKRISWQLDQASLKELVIPSFSHTCGTLLDVELVIKLVKRYV

SEQ ID NO: 216984 - protein, 154 aa, Glycine max
  Clone ID: PAT_MRT3847_37965C.1.pep
IKPHEKEVTFFSFNPYNEWILATASSDTIVGLFDTRKLAVPLHVLTSHTDEVFQVEWDPNHENVLASSGADRRLMVWDLNRVGDEQIEGDGEGGPPELLFSHGGHKGKISDFSWNRNQPWVITSVAEDNSFHVWQMAESIYNDGDDDNMWTAND

SEQ ID NO: 216985 - protein, 86 aa, Glycine max
  Clone ID: PAT_MRT3847_37966C.1.pep
MGALDHISELFDCSHASSKLKKKRKQFQTVEVEVKMDCEGCERKVKKSVEGVTEVEVDRQGSKVSVSGYVEPSKVVSRIAHRTGLT

SEQ ID NO: 216986 - protein, 58 aa, Glycine max
  Clone ID: PAT_MRT3847_37967C.1.pep
IIVMSNNKIKMEKFIIKKFLIKKNGNIVLQRSIIAAIVDLILKNNELKIIVLKKVNYM

SEQ ID NO: 216987 - protein, 48 aa, Glycine max
  unsure (1)..(48): unsure at all Xaa locations
  Clone ID: PAT_MRT3847_37968C.1.pep
SHSCTLYTLYAWDRKLYDEVNAVXFIKNDYDRKCDLLKHQFTKFISIN

SEQ ID NO: 216988 - protein, 169 aa, Glycine max
  unsure (1)..(169): unsure at all Xaa locations
  Clone ID: PAT_MRT3847_37969C.1.pep
MAGSSSSRIGSSAISASVSTTEPHTQPYRNSVKLGSSKTFSSARKAATLEVRNASDLASALXNRVGDALTVKDLNAALYHFKKSNKFNHISQLFSWMQENNKLDALSYSHYIRFMASHNLDAAKMLQLYHSIQNQSAKINVLVCNSGLRCVIKKAKFNSAVNLFQQMKL

SEQ ID NO: 216989 - protein, 61 aa, Glycine max
  unsure (1)..(61): unsure at all Xaa locations
  Clone ID: PAT_MRT3847_3796C.1.pep
NFYFSIFLNSLSLYLNLTSIISTDIDASXSXLASSFFFLKTILINFLYPTLXYFYPNSYLT

SEQ ID NO: 216990 - protein, 49 aa, Glycine max
  Clone ID: PAT_MRT3847_37970C.1.pep
EIYSVCYNYLKIDGSPVKGVLLTWKSKSIFLICSFSRIIIVIPVPSSYT

SEQ ID NO: 216991 - protein, 48 aa, Glycine max
  Clone ID: PAT_MRT3847_37971C.1.pep
KLMSHCHILSERCVSTSFSIMFLKAVHLVVYSPEHKVQDHRTRGRTRG

SEQ ID NO: 216992 - protein, 190 aa, Glycine max
  unsure (1)..(190): unsure at all Xaa locations
  Clone ID: PAT_MRT3847_37972C.1.pep
TKKAQKRGTAGRTXEXRTGERNXTXAKDXKNGGGGTXWLVYAXXTLXGDPGRREGATTHXHKDAGSNPTGNXPXKXTXNEXXAKEXXXXXEXKXXXDRTXGDTGXGTXQGXXREPRDXPGDDXXXRQXXXQGRKQXGKXKGXXXXXXKGGEQGPAPAXKAPKTGQEPGKXXXPTGAGXXXEXXGTPXXPP

SEQ ID NO: 216993 - protein, 64 aa, Glycine max
  Clone ID: PAT_MRT3847_37973C.1.pep
SIQHYIFYILSPKFNTVTFILQLYHSQNPTHSQLNHPSSHPPIIIYHNIQHSLTNHPSLHFHNL

SEQ ID NO: 216994 - protein, 71 aa, Glycine max
  Clone ID: PAT_MRT3847_37974C.1.pep
IYSFKYLSLYIYLNNLNIPHCELQKLPYIHASPWLILSYKDHSIHDNTLLRDSIINYLVHHGINDHSDQTA

SEQ ID NO: 216995 - protein, 79 aa, Glycine max
  Clone ID: PAT_MRT3847_37975C.1.pep
QKTKQEIFFIAHLQIQMLHTYILLQHRQALHLQHFLLHLRTNGFDLSPRSISIINLFVLCLHWMMPLISINNISSIATP

SEQ ID NO: 216996 - protein, 62 aa, Glycine max
  Clone ID: PAT_MRT3847_37976C.1.pep
TRSNYPVGDCLQLNRKSLYIFFCLCTVFLTLIMACLSCLVLYYWFKSVPYSFLPVHDDEKNQ

SEQ ID NO: 216997 - protein, 56 aa, Glycine max
  Clone ID: PAT_MRT3847_37977C.1.pep
YNKAFKYTLKAAADIYIGGGGGGPLIKKNSMKLTLDKAPFISPIKQNLKTRHIAYK

SEQ ID NO: 216998 - protein, 41 aa, Glycine max
  Clone ID: PAT_MRT3847_37978C.1.pep
EYEVVFFVALMIFLLFIFLFFFFMVFFVFYMFWILFFVLMN

SEQ ID NO: 216999 - protein, 79 aa, Glycine max
  Clone ID: PAT_MRT3847_37979C.1.pep
TCMQYVVFSMLEISDLFFLFLCYLFFFSLVLFLFIFYFFFRGRDDFMIVASLGCSYSTSTLVHKYSAIQKKKKRSALAI

SEQ ID NO: 217000 - protein, 56 aa, Glycine max
  Clone ID: PAT_MRT3847_3797C.1.pep
EVLISCTAFSFIKRFLVAIWYSLYQYNWMIPFFTQTISYLCFVQKKKKKKKQKSGH

SEQ ID NO: 217001 - protein, 242 aa, Glycine max
  unsure (1)..(242): unsure at all Xaa locations
  Clone ID: PAT_MRT3847_37980C.1.pep
WLKADNQRPFSSALHPHLTYRSRSRSRSPLPSSSSIPIRNMSSEAAPEIIARTRAAASGQTGESVEPRQTLPTEDMEPDPSKSIPLPPNRQKLIDDVIALYSCQPTVERVARYAPACVYDDQFVYANDRYKMAGQWFGLPKLFPASENLGYEIVRNDDTLIQFKNKQRWSFHLIPKKATINALVSIVLDPATKDSTSRSSCTTRTRRTRRTTRTRAXXFKFKKTQADLVSSFMSSKGVKWFK

SEQ ID NO: 217002 - protein, 62 aa, Glycine max
  Clone ID: PAT_MRT3847_37981C.1.pep
HPNPLVTNRVFWCWCKFLEIFLLCRHHLVIVLATHRPCPRIVFPEFGMGNKLNPSRSTVRLW

SEQ ID NO: 217003 - protein, 45 aa, Glycine max
  Clone ID: PAT_MRT3847_37982C.1.pep
MPLAKDLLHPSPEEEKRKHKKKRLVQSPNCHFMDVKCPGCYKITT

SEQ ID NO: 217004 - protein, 73 aa, Glycine max
  unsure (1)..(73): unsure at all Xaa locations
  Clone ID: PAT_MRT3847_37983C.1.pep
LAPGFVFGSPPRSPGSPHGLSWPLXSLPMFGGPSASPVLPGLLGAASASLPGFVRIVAFPSVRLAQCLSFLAC

SEQ ID NO: 217005 - protein, 40 aa, Glycine max
  Clone ID: PAT_MRT3847_37984C.1.pep
RLFQPNQFPHLLPPQHSTPITIRFSVPSLQIIIVSSISID

SEQ ID NO: 217006 - protein, 66 aa, Glycine max
  Clone ID: PAT_MRT3847_37985C.1.pep
PFYFFREKLITSLEGVDFFLQTKPMYSHALVIANNKQAISVYTIHRMFAPRSRIHVTCSLRSCKVT

SEQ ID NO: 217007 - protein, 98 aa, Glycine max
  unsure (1)..(98): unsure at all Xaa locations
  Clone ID: PAT_MRT3847_37986C.1.pep
AFPGAGPEIKPRKLWGHFHFPAPILRENGPKTLPLLVFVMGAQYFIFLPRSQVLCXKFIYFVRAPPMFNKTQNWGIFKKNLFPPPFYKKSLGGGGCGS

SEQ ID NO: 217008 - protein, 57 aa, Glycine max
  Clone ID: PAT_MRT3847_37987C.1.pep
MLTSLLNSYILWRWQWWHWSVYACVCRSCCSLEFTLATARASDFVYHTWILIIRVIH

SEQ ID NO: 217009 - protein, 73 aa, Glycine max
  Clone ID: PAT_MRT3847_37988C.1.pep
YLGVQIDCLFHYFGWRLLYRFANKGCISVTAKRVLCVVFSIHPLGLGLFHFFYFSSFLEYLLSLCSLFMENVV

SEQ ID NO: 217010 - protein, 32 aa, Glycine max
  Clone ID: PAT_MRT3847_37989C.1.pep
AFIIFLGYTKLISCIINLNRDFFIILGILNET

SEQ ID NO: 217011 - protein, 52 aa, Glycine max
  Clone ID: PAT_MRT3847_3798C.1.pep
RPHGPGFNLKINFSSKAGTTWSKTSKQIRIWKALTGLPYYRPFPKTLTTPWV

SEQ ID NO: 217012 - protein, 78 aa, Glycine max
  Clone ID: PAT_MRT3847_37990C.1.pep
HSVQWKLHTGFSPSMMSCSKELMLPNPLLLLTLDYNSKTETTSDSKLELLPLHSPLLRQSSLISFPPLSNILSSAGVL

SEQ ID NO: 217013 - protein, 167 aa, Glycine max
  Clone ID: PAT_MRT3847_37991C.1.pep
TRPAELKHGYKKEADILMAKALQECPNSGILWAASIEMVPRPQRKTKSADAIKKCDHDPHVIAAVAKLFWLDRKVDKARTWLSRAVTLAPDIGDFWALLYKFELQHGTEENQKDVLKRCIAAEPKHGEKWQAISKAVENSHQPTESILKKVVVALGKEENAAENNKH

SEQ ID NO: 217014 - protein, 82 aa, Glycine max
  unsure (1)..(82): unsure at all Xaa locations
  Clone ID: PAT_MRT3847_37992C.1.pep
HIIQDYCTNSNMLLSYTTSNTLWKVITYCTNHIXADAPDDRPYADDLYAWDSEFIKVDHAXTLLDLILAANYLNTKILADLT

SEQ ID NO: 217015 - protein, 99 aa, Glycine max
  unsure (1)..(99): unsure at all Xaa locations
  Clone ID: PAT_MRT3847_37993C.1.pep
RHGRRRKQRRGRKTXXAAETXXXGDGESXKXHAKXXEXEGXXGKHARDDHXXNRDXQQXTDDGGKRKHKTEDRNGTRKTAAANRTAHSHEENXNTGXTK

SEQ ID NO: 217016 - protein, 69 aa, Glycine max
  unsure (1)..(69): unsure at all Xaa locations
  Clone ID: PAT_MRT3847_37994C.1.pep
MIASMFIKCLPVGDGAVGKTCLLISYTMHTFLLDYGPTVFDNFSAHVVXSYGSIVNLGLWYTGGHYDYD

SEQ ID NO: 217017 - protein, 186 aa, Glycine max
  unsure (1)..(186): unsure at all Xaa locations
  Clone ID: PAT_MRT3847_37995C.1.pep
MGTVPLMSTEVVLKSCKARGSNLRVHFKNTREAAKTIRKMSLRRAVRYLKNVTEKKECVPFRRFNGGVGRCAQAKAWKTTQGRWPKKSAEFLIQLLKNAESNADYKGLDVDRLVIEHIQVNRAPCLRRRTYRAHGRINPYMSSPCHIEVILTEKEDVVSKATDDEPAKXRSPKTKLAKQKEKMMRE

SEQ ID NO: 217018 - protein, 70 aa, Glycine max
  Clone ID: PAT_MRT3847_37996C.1.pep
FFFFFFFFFFFFFFKPLITIITYLNTIIIRQISHCAILRYCLCTEKRKKKQKKLIILKYSKNPFQALIST

SEQ ID NO: 217019 - protein, 102 aa, Glycine max
  unsure (1)..(102): unsure at all Xaa locations
  Clone ID: PAT_MRT3847_37997C.1.pep
MFCWSTIRSIGNKLATEERNQNSELKQTWPKEEMKPKTEPWKRLLLTTNCLVLTIGTSGGPLVMRLYFLHRRHLVXLSSFLETVGFPSKFSFFPFFFNSGLR

SEQ ID NO: 217020 - protein, 367 aa, Glycine max
  Clone ID: PAT_MRT3847_37998C.1.pep
GYGGPLYAGTGCFHKRESLCGMKFSDQYCNDWNSEDDQFKEANLQELEQQSKVLASCNYEENTLWGKEMGLKYGCPVEDVITGLSIQCQGWKSVYYNPPRKAFLGLAPTTLPQTLVQHKRWSEGDLQILLSKYSPAWYGFGRINFGLQMGYSVYCLWAPNCLATLYYSIIPSLYLLKGIPLFPKISSPWFIPFAYVIVGETTYSLLEFFFCGGTFQGWWNDQRIWLYKRTSSYLFACIDTILKLFGFSESTFTITTKVTEEDASKRHEKEIMEFGTSSPMLTVLATLALLNLFCFLSVLKDAILGEGDIGAYETMGLQVLLCGFLVFINLPIYQGLFLRKDNGRLPSSIAIKSIVFALGVFISFIFT

SEQ ID NO: 217021 - protein, 63 aa, Glycine max
  Clone ID: PAT_MRT3847_37999C.1.pep
YRYCSHKAQMVLSNKIKDDSLQHEQSSLRYQVAILHHEADSIKDLTSIKLVQFQCFLYKIQHN

SEQ ID NO: 217022 - protein, 90 aa, Glycine max
  Clone ID: PAT_MRT3847_3799C.1.pep
YNVQHHEHHAFGSLFPNSFGRQLIYILSTFLPTLAAGPIFFRAKLTCGLYHCPLRHLWVSAKPSPPPPPPPPPPPPKEGGRHTVMTGNLP

SEQ ID NO: 217023 - protein, 62 aa, Glycine max
  unsure (1)..(62): unsure at all Xaa locations
  Clone ID: PAT_MRT3847_379C.1.pep
TIVFRIATEHFVRNWITITVVRVQTXKAWIFPPVSLLKGYSRLKNLLINILHLKKKQKKKTR

SEQ ID NO: 217024 - protein, 59 aa, Glycine max
  Clone ID: PAT_MRT3847_37C.1.pep
ACSYEGPELLQLQPIIRWRDAGIIIVQPSHGWRMQTIYNNREGDGFSCQLNPRKLLLFK

SEQ ID NO: 217025 - protein, 58 aa, Glycine max
  Clone ID: PAT_MRT3847_38000C.1.pep
FQVIRNKSIQKEQNFSKYKPEIKFKDYNKNLEPQKLVIIVRIPYFQCETQVPYLAKPN

SEQ ID NO: 217026 - protein, 27 aa, Glycine max
  Clone ID: PAT_MRT3847_38001C.1.pep
AVSSRPGRLELRLRDYLCNNDICEIIN

SEQ ID NO: 217027 - protein, 94 aa, Glycine max
  Clone ID: PAT_MRT3847_38002C.1.pep
GIFTFEDETTCPVAPATLYKAVVTDADNVMPKAGEAFMSVENLEGNGIPRTIKKITFVKNRESDFILLKIESVDDTDLEYGCNIISKVELPDAV

SEQ ID NO: 217028 - protein, 93 aa, Glycine max
  Clone ID: PAT_MRT3847_38003C.1.pep
TMADRVSLCKKLHLVNQTLGMKVWLETTTLAMTIAARRLNEFHNDNSHLMDNPLETMFNRKFTVNFNWDGQGALPEEVMISGLSRVLHDDLHQ

SEQ ID NO: 217029 - protein, 269 aa, Glycine max
  Clone ID: PAT_MRT3847_38004C.1.pep
VSSEFGSAANKFSVISPSYCVPNSLNLQINTEKGVTYNVKGNRVFYIKDTLFTFHGRRVLCDDKGSPIVTLYKKNVTLHGQCKVFRGNSNGPSELLFSVKRSSIIPSGKMIRLDVFLENKRKGSMCDFRVIVRGSKNSCTIYAGESPTIVAKMENNGGFKVLVYPNVDYAFIVTLLMIIDDIKDYDVLVNATVSGVLTVATGGILPILTLFEGENLEEETLDGENLEDEYLQEGENNSGGENLDGENNPEGENLDGENLEVENNFEAET

SEQ ID NO: 217030 - protein, 103 aa, Glycine max
  unsure (1)..(103): unsure at all Xaa locations
  Clone ID: PAT_MRT3847_38005C.1.pep
KXLIXXXKGXXXXXXXXXVXXXXXXMXXLEXSXXXXXXGXSXIXXXSXXXXXXXXXXXXXXXXXXXXXXXXXXVXXXFXFLXXXCCVEEARXEFRXYVRLXXM

SEQ ID NO: 217031 - protein, 44 aa, Glycine max
  Clone ID: PAT_MRT3847_38006C.1.pep
GIFISLHLSVWFLCICCLISYFELSINLLLLTSHMLIILKDVKR

SEQ ID NO: 217032 - protein, 203 aa, Glycine max
  unsure (1)..(203): unsure at all Xaa locations
  Clone ID: PAT_MRT3847_38007C.1.pep
GSRLIGVVACLAGAATFALDKGPSLKFLSHFHLLDYHISIQHQGHAQSGAWIKGCFLMLLSNTFFGLWLVLQTVIIKGYPSKLLFTAIQXLLSSIQSFVIALAXERDIEQWKLGWNVRLLAVLYXGIMVTAVSYYLPXMGHMKARTPLISHVFATASVLGKIISLGCLLEGFVLILGLYSVLWGKNREHMPKATLDMEQASSG

SEQ ID NO: 217033 - protein, 53 aa, Glycine max
  unsure (1)..(53): unsure at all Xaa locations
  Clone ID: PAT_MRT3847_38008C.1.pep
LYTGGFSTCGLYKPHLYKPPVYKPPVYKPPVYKPPVYKPPVXKPPVEQPPIYR

SEQ ID NO: 217034 - protein, 55 aa, Glycine max
  Clone ID: PAT_MRT3847_38009C.1.pep
PGTIEGEIVDIHYQGTHTHCERMHNMKRNSSSEYLYSVLPSEPVTFPDQSFASQG

SEQ ID NO: 217035 - protein, 110 aa, Glycine max
  Clone ID: PAT_MRT3847_3800C.1.pep
KKKTPLTKKAFNFYPQKNRPTRNYKNGFQGKKPEFQTPFEKKTLLREEFPGLTGELAQPTALDPEGGGGDPPPGKGPPFWQGATTEKGPRPEGPKEGNPSHGSPPPRGTR

SEQ ID NO: 217036 - protein, 133 aa, Glycine max
  Clone ID: PAT_MRT3847_38010C.1.pep
MALQPIPLNCSSSTPRSYSSLHFLKFRVSCSNQTSQLDTPQRVKVANKTKNSSHRPSFLHQIQDKWSLKLGSQREKFPWQEQKHEVEQQQQIEEEKEEKKREQFQNQKKPSASNFQFPKRVSPWAQAINPNSA

SEQ ID NO: 217037 - protein, 185 aa, Glycine max
  unsure (1)..(185): unsure at all Xaa locations
  Clone ID: PAT_MRT3847_38011C.1.pep
MIFHSGIESLKIKTTPGXAKLIGVVACLAGAATFAFYKGPSLKFLSHFHLLDYHKSIQHQGHAQSGAWIKGCFLMLLSNTFFGLWLVLQTFIIKGYPSKLLFTTIQCFLSSIQSFVIALAVERDIEQWKLGWNVRLLAVLYCGIMVTGVSYYLQTWVIEKKGPVFLAMSTPLALIITIFASAGRL

SEQ ID NO: 217038 - protein, 158 aa, Glycine max
  unsure (1)..(158): unsure at all Xaa locations
  Clone ID: PAT_MRT3847_38012C.1.pep
AVLQGLVDHELGSQTTVLAGTMGYLAPECVTTGKSSKESDVYSFGVVALEITCGRKPVEVREEPSKVRLVEWVWSLYGKGKLLEAADKKLNWEFEEQQMECLMIVXXLWCCHPDHTMRPSIRQVISVLNLEAPLPSLPSKLPVPMYYAPPMDMCKFSY

SEQ ID NO: 217039 - protein, 49 aa, Glycine max
  Clone ID: PAT_MRT3847_38013C.1.pep
LLFHREDTFLRIDCDTSVLRRRCIFTLSMRQSRRCCWWCNTRRVWCWRP

SEQ ID NO: 217040 - protein, 35 aa, Glycine max
  Clone ID: PAT_MRT3847_38014C.1.pep
PFKKGSLREIQFQVSAKDKTNAHASADAWSTGNPD

SEQ ID NO: 217041 - protein, 109 aa, Glycine max
  Clone ID: PAT_MRT3847_38015C.1.pep
GGGHFYTICPNVVIFYKPHSHSLKHFNSRYTFVSWVHIFKPKSNPCKVQQHCFLLTVPPTHFKNSTPSYPTPNPNGLLVQPTHQANPKQKPKQPNHLEKPTPMNHPPPW

SEQ ID NO: 217042 - protein, 35 aa, Glycine max
  Clone ID: PAT_MRT3847_38016C.1.pep
KNFVPLLISQAMKNVIIGLCVKVNFYINFKIVFYM

SEQ ID NO: 217043 - protein, 47 aa, Glycine max
  Clone ID: PAT_MRT3847_38017C.1.pep
LRLKGASMSTLVIHFPTYRYRKRTAAEISQSLKDACANKARKWMPPR

SEQ ID NO: 217044 - protein, 51 aa, Glycine max
  Clone ID: PAT_MRT3847_38018C.1.pep
QKHRVHRAVCTIMGAVIIGMHVTSIYVTFKAGIGQKNQLRGTSDTTMYVCV

SEQ ID NO: 217045 - protein, 118 aa, Glycine max
  Clone ID: PAT_MRT3847_38019C.1.pep
MNNSIPGWDFESDTCLTNQRKLIGPDQELVELLWKNGQVVMHNQTHRKTLGNSSNLRQVQKSDQSVLKSNGPYGNSSNLDQEDAVPWVQFPLEDPLEQDFCSNLFSELPTCEFESYKP

SEQ ID NO: 217046 - protein, 52 aa, Glycine max
  unsure (1)..(52): unsure at all Xaa locations
  Clone ID: PAT_MRT3847_3801C.1.pep
IENEXMFHHQNNPKLHQRCHQHFFLSAQPDIYKIKHHILDVSNLXITHHISK

SEQ ID NO: 217047 - protein, 54 aa, Glycine max
  Clone ID: PAT_MRT3847_38020C.1.pep
LRSSCRDLTYAPCRRRVLRYPAAYVTSRTQCIFTPVDNPEWGLKGTYFRHLHHS

SEQ ID NO: 217048 - protein, 69 aa, Glycine max
  unsure (1)..(69): unsure at all Xaa locations
  Clone ID: PAT_MRT3847_38021C.1.pep
MGKPGGTLYHACLCLLLXSSACFAMTFSKFNECQLNNLNALEPDHRVXPKVVLLEHWNYQHHQLQNAGV

SEQ ID NO: 217049 - protein, 45 aa, Glycine max
  Clone ID: PAT_MRT3847_38022C.1.pep
YRKNQLRCLHKCLNFNYVINKIITCSTFHNVTRDMKQINSLSSML

SEQ ID NO: 217050 - protein, 52 aa, Glycine max
  unsure (1)..(52): unsure at all Xaa locations
  Clone ID: PAT_MRT3847_38023C.1.pep
LYRSLTSXXXGADCDSRGLPAVRKEVXEXILRREGXPTDPEHIYITXGASKG

SEQ ID NO: 217051 - protein, 104 aa, Glycine max
  Clone ID: PAT_MRT3847_38024C.1.pep
TAGSTDAQLQRGHTLKYGSHAAGSHFTNHWGDRADPATPAQVPPRSRHEGAPQYNEDQAQILTHWSTLPLDDLDTPTGYMLDLTVSKSRSALTNNTGSTNHNAY

SEQ ID NO: 217052 - protein, 108 aa, Glycine max
  unsure (1)..(108): unsure at all Xaa locations
  Clone ID: PAT_MRT3847_38025C.1.pep
HDPCLCYSRHCTYVVPLVDNIYPKNLIQMLNCILDFVTFNAVYFIFLIMNLNLYISYFSPLQICGLIFFSRKQKKERRRSQKEEINPSMSHMIKVLILILLPTFQSXV

SEQ ID NO: 217053 - protein, 159 aa, Glycine max
  Clone ID: PAT_MRT3847_38026C.1.pep
MMEENSRGWDSGGMVLETLRKRGWCLEDTDRLKAIIDIQSALADDRSRLVDSVESELLNSDLRSIAAKSLPQPSLLRNASTFLHGPKVLQISSVRDISKSSVDEFLKNSGDRRVLRLCLTDGHYEITAVEYSHIPSIPDNVVPGTKIRLENKVAVHNGI

SEQ ID NO: 217054 - protein, 315 aa, Glycine max
  Clone ID: PAT_MRT3847_38027C.1.pep
LDQTALERNKKGHLPVHLACKRGCVEMVKEFFEPGSGWPINPYVLLNQKGQNILHIAAKNGRDNVVEYLLGNCNTGHLHINQKDYDGNTPLHLASKNLFQQVISLITEDKRTDLNLTNEDGLTAGDISKTFEHPMLRGREILSMELSKGAGVPVNHMLHSQRQPQPEKDTSDFQRKSLSEKDTREAFLIVAALLMTVSFAAGFTVPGGLYSSDDPNPKIRGTAVFAGNSGFWIFIIFNTITMYSSAMACGLLSVGIVNRSKLSRFSDLFLTCAFLAASVAFLAAVLLVVANNRLLAGATILIGALHYILYFFVIK

SEQ ID NO: 217055 - protein, 46 aa, Glycine max
  Clone ID: PAT_MRT3847_38028C.1.pep
YLLFSKIWVLEFHGSITNYLYADVVITNYQLCIIINLWTSYHLFNT

SEQ ID NO: 217056 - protein, 64 aa, Glycine max
  Clone ID: PAT_MRT3847_38029C.1.pep
PFSLYGSQLFKKLTSLIPAFARPISIPLPPPLYKKASVAFHFGQKNPKESLPTLGNLPNYATSH

SEQ ID NO: 217057 - protein, 94 aa, Glycine max
  unsure (1)..(94): unsure at all Xaa locations
  Clone ID: PAT_MRT3847_3802C.1.pep
MLVYQDLHTGDELMSDSFRYKEIENGMLWQVEGKRAVKGTVAVYIGANPYAEGGXEHEGVDDAYVQVDDIVDTFRLHEQPGFYKKQFVTFMKRF

SEQ ID NO: 217058 - protein, 48 aa, Glycine max
  Clone ID: PAT_MRT3847_38030C.1.pep
NQRECGGTSNLYPFLAPIHVRTSKNNPPSISKFSNEDTKRCFINHNNR

SEQ ID NO: 217059 - protein, 736 aa, Glycine max
  unsure (1)..(736): unsure at all Xaa locations
  Clone ID: PAT_MRT3847_38031C.1.pep
RTCGFVSVTCFLPIILVLLTPSSVAQLSPSEGRILFQVQKLLEYPQALQGWNRWTNLCFLPSSPSLKIVCSNGHVTELTIIGNKTSPSLHNPKESAWTSLQTLSGRFSIDSFFTVMTKLSNLKMLSLVSLGLWGPLPAKINRFWSLEVLNISSNFIYGGIPQSLSSMRNLRSLVLVDNLFNGSVPDLQRLTSLEELNLGGNNLGAQFPSVGKNLVTIMLRNNSLRSHIPPQLVHFDKLQVFDVSSNNFFGNIPSFLISLPSLQYLNLASNHLSGNLSVNMACSSSLTFVDISHNLLVGKLPSCFGSVSSKAKVLYSGNCLSTEKRLNDQQHPFSFCKREGALAVKPPAKNLKKESGSGAEIXSLRSHIPPQLVHFDKLQVFDVSSNDFFGNIPSFIISVPSLQYLNLASNHLSGNLSVHIPQAMKQAAVGLPPYRIFTSEEIEDATNNFDPSNLIEXGSLGQLYKGWLRDGSVVLVNCVKIKQKGLPHSIMQQVEVLHNLRHRHMVSVLGHCIITEQEHPQTTSTVFIVFEYISNVSLRDQLSDGRKREMLKWPQRMAMSIGIARGVQFLHTGVAPGIYGNNLKIENILLDDSLNAKVSRYNIPLPSKIAHIEQNATNHIGSTNDAEKEDIYQLGIILLEVITGKQITSSSEIEELKEELENGSSEATSVIRSAIDPSLRGTYAYESMKTAVQITINCLSKVSSQRPSIEDVLWNLQYAMQVQESWTSSGNLSTKL

SEQ ID NO: 217060 - protein, 64 aa, Glycine max
  Clone ID: PAT_MRT3847_38032C.1.pep
TWSSGTFSDVHTLSTKQNSVLSITKPAKDVIEQQGNDAVMTHDDSRGSHSIFMMEIWPKETLWN

SEQ ID NO: 217061 - protein, 96 aa, Glycine max
  Clone ID: PAT_MRT3847_38033C.1.pep
MLIIFVCFVVPPSNFPPPLGFLSFRPGGGRILSLCARGPGCRVQVLWSNKVLSLWVFGSKSLYSSLGGVPPAFGFVVPSHGFFPPRLELEFFPPVG

SEQ ID NO: 217062 - protein, 519 aa, Glycine max
  Clone ID: PAT_MRT3847_38034C.1.pep
IRPRNSLRSHIPPQLVHFDKLQVFDVSSNDFFGNIPSFIISLPSLQYLNLASNHLSGNLSVNMACSSSLTFVDISHNLLVGKLPSCFGSMSSKAKVLYSGNCLSTKNRLNDQQHPFSFCKREGALAVKPPAKNLKKESNLGTKLGLMLGIIVGIVVIGGLLVLLVVCIIRKSKAERSPHKMDKSVANKYSTSVSPRPIGTRHIPQAMKQAAVGLPPYRIFTSEEIEDATNNFDPSNLIEEGSQGQLYKGWLRDGSVVLVNCVKIKQKGLPHSIMQQVEVLHNLRHRHMVSVLGHCVITEQEHPQTTSTVFIVFEYISNVSLRDQLSDGRKREMLKWPQRMAMSIGIARGVQFLHTGVAPGIYGNNLKIENILLDDSLNAKVSRYNIPLPSKSAHNEQNATNHISSTNNTEKEDIYQLGVILLEVITGKQITSSSEIEELKEELENGSPEATSVIRSAIDPTLRGTYAYESMKTAVQITINCLSKVSSQRPSIEDVLWNLQYAMQVQESWTSSGNLSTKL

SEQ ID NO: 217063 - protein, 60 aa, Glycine max
  Clone ID: PAT_MRT3847_38035C.1.pep
PGPPFVGNPPLEFEKVFLGSVYFGGGQKARAGLKGPNFFGIQGEGVFFPGNNFFRGVFRG

SEQ ID NO: 217064 - protein, 181 aa, Glycine max
  Clone ID: PAT_MRT3847_38036C.1.pep
GTIFPGKCYSIPARGLEPEELITVHSLEHIESVEVTSESLSSYFTSDTYANEHSALAARLAAGLCADLASAIVSGRAKNGFALVRPPGHHAGVRQAMGFCLHNNAAVAALAAQAAGARKVLILDWDVHHGNGTQEIFEQNKSVLYISLHRHEGGKFYPGTGAAEEVHDCRQIFKLNCCCWQ

SEQ ID NO: 217065 - protein, 132 aa, Glycine max
  unsure (1)..(132): unsure at all Xaa locations
  Clone ID: PAT_MRT3847_38037C.1.pep
MAAAPSGAVLNGLRSYFLSVMKQGAKSLLDLCYCCAHVVLLLLFSPXRLIVVSAAAPXKSWLPVVRGRALLFVPKWLAVSLPIVYRLVPLCLLLDPALLACLMEAVLLHGRWALAAGLGIFVWRSPCGVPWF

SEQ ID NO: 217066 - protein, 41 aa, Glycine max
  Clone ID: PAT_MRT3847_38038C.1.pep
GSNAVRKNLMIFRTCIRSVPHSSVAIHHQLHNLDPLSAIRN

SEQ ID NO: 217067 - protein, 78 aa, Glycine max
  Clone ID: PAT_MRT3847_38039C.1.pep
CQKRKSPCIIFIDEIDALGTQRFYSEVSGDTEVQRTMFELLNHLDGFSSDDHINVIVATNRADIIDPALIRSGRLDRK

SEQ ID NO: 217068 - protein, 100 aa, Glycine max
  Clone ID: PAT_MRT3847_3803C.1.pep
TRPPALSPFFDYLLFYSLSDDHPFRCSFSFVLPTFYFSLFAFHFRSSADRLRICSTTLIVSLFFIIFFFPSATSVLSFRNIYISYSFIFVELLLLCIWNL

SEQ ID NO: 217069 - protein, 200 aa, Glycine max
  unsure (1)..(200): unsure at all Xaa locations
  Clone ID: PAT_MRT3847_38040C.1.pep
MADTIVVFRLEKLTRLLAEEAKLLGSAHDKVTSLRNELRFMNLFLNNSQGKRKDHNMVAELVDQIRDIAHEAEDVIDNYISDMIKQRRRNMLEKFGRGVDHALMLRNLTVKIDRIKTTINDIFDNKVKYGIEAGRRDSEEEAERIRKQRRDVEEQEVVGFAHDSKVVIEKLMASGSRLKLVSIVGMGGLGKTTLARXIYN

SEQ ID NO: 217070 - protein, 82 aa, Glycine max
  Clone ID: PAT_MRT3847_38041C.1.pep
MQNEEGQITELYIPRKCSATNRLITAKDHASVQVNIGHVDENGVYNGHFSTFALCGFIRAQGDADSALDRLWQKKKVEVKQQ

SEQ ID NO: 217071 - protein, 83 aa, Glycine max
  Clone ID: PAT_MRT3847_38042C.1.pep
TWSLKRQVFSDLGDTLCSFCHNQQEYANHLFFKCLVNSQARYLIYVWSGFHRVISFSREAHFHQQYYALLIKGRNTKNAWYIV

SEQ ID NO: 217072 - protein, 153 aa, Glycine max
  Clone ID: PAT_MRT3847_38043C.1.pep
MGENEKGERWSGAMTNLTEMASNLDSLQKLLLTKAVFVDDDTFSKASLAADQARTIKLLQQRVQTLEREVDAAITTAARARSEKRQAEAAQKSAESRAHQLTAELENTTKVFELHMEELRAKQEEIEKRDEDIKLLEAIIRTLGGKESLSSSQ

SEQ ID NO: 217073 - protein, 159 aa, Glycine max
  Clone ID: PAT_MRT3847_38044C.1.pep
MLGSETMGESEKGERWSGAMTNLTEMASNLDSLQKLLLTKAVFVDDDTFSKASLAADQARSIKLLHQRVQTLEREVDAAITAAARARSEKRQAEAAQKSAESRAQQLTAELENTTKVFELHMEELRAKQEEIEKRDEDIKLLEAIIRTLGGKESLSTSQ

SEQ ID NO: 217074 - protein, 143 aa, Glycine max
  Clone ID: PAT_MRT3847_38045C.1.pep
MLGSETMGESEKGERWSGAMTNLTEMASNLDSLQKLLLTKAVFVDDDTFSKASLAADQARSIKLLHQRVQTLEREVDAAITAAARARSEKRQAEAAQKSAESRAQQLTAELENTTKVFELHMEELRAKHEEIEKRDEDIKLLT

SEQ ID NO: 217075 - protein, 153 aa, Glycine max; identical to SEQ ID NO: 217072
  Clone ID: PAT_MRT3847_38046C.1.pep

SEQ ID NO: 217076 - protein, 66 aa, Glycine max
  Clone ID: PAT_MRT3847_38047C.1.pep
ESAASLCCSSIGWVKEPSNRIHLSFYVKYYWQDLCFELSNLKSVGHKSSFRLSDRILKRVRLIILL

SEQ ID NO: 217077 - protein, 34 aa, Glycine max
  Clone ID: PAT_MRT3847_38048C.1.pep
CQWYIITPSAIHILASVSSSGSGDQGTESRDQNL

SEQ ID NO: 217078 - protein, 53 aa, Glycine max
  Clone ID: PAT_MRT3847_38049C.1.pep
VGKGHTPSKAFCVKPSQWKKVKSHVKSKSPEFASLFSTLFDADNPILHSDPFP

SEQ ID NO: 217079 - protein, 160 aa, Glycine max
  unsure (1)..(160): unsure at all Xaa locations
  Clone ID: PAT_MRT3847_3804C.1.pep
ARATIELVEKLAALPEIAEISEEIVIPAPQFELASNSTANAGVLANEWGVTXIQAPSVWAAGYTGXNIVIGSLDTGALATHTSIAANFRSTYNWYDAVSKKTTPYDDVGHGTHTIGTMLGSDGLGVXPGAXFIACKGFTTPAVRRCSPCRSSHARTRHQQ

SEQ ID NO: 217080 - protein, 71 aa, Glycine max
  unsure (1)..(71): unsure at all Xaa locations
  Clone ID: PAT_MRT3847_38050C.1.pep
MAGQGLTFLAVLXCVSPLALDSFGCGERPNNGPGINLYQGSCPXSXDLITEPGKLLYQRHQNTVFFWLKNL

SEQ ID NO: 217081 - protein, 77 aa, Glycine max
  unsure (1)..(77): unsure at all Xaa locations
  Clone ID: PAT_MRT3847_38051C.1.pep
RLQIKRXXXPXPXLVGLXLWRLRXXXDRXQRPIRXLGRXISXXSXSEIRYXGXLXSIVSEXXXYWPRXVXXLXXXGG

SEQ ID NO: 217082 - protein, 165 aa, Glycine max
  unsure (1)..(165): unsure at all Xaa locations
  Clone ID: PAT_MRT3847_38052C.1.pep
MAMAFETTHFLLSRPTASTSTLFLLSSNLTRPKPASLPSRFFHCRSKRLVLTPRFAVKACAVNVEEKNVAAISGEWGKVSAVLFDMDGVLCNSEEPSRRAGVDLFAEMGVDVTVDDFVPFMGTGEANFLGGVASVKXELRGFDPEAAKKKXLEIYLDKYAKTRFW

SEQ ID NO: 217083 - protein, 81 aa, Glycine max
  Clone ID: PAT_MRT3847_38053C.1.pep
QLIFEPARSSFFIFPYKFYPNPNGTVIATYSFFDCLMFLSLSPPGSRDFSVSWKKRRENLNYRFMAEEHLIWTSRRSPTLV

SEQ ID NO: 217084 - protein, 90 aa, Glycine max
  Clone ID: PAT_MRT3847_38054C.1.pep
SVFPPPPLRWGGKKCVLPLLPPTYFHSGQKPLLFPLRVIPSYKANPAVGLFQCLSVGFDLRHEPAGVGFIRYIYCKGWASFFDKKENNHI

SEQ ID NO: 217085 - protein, 62 aa, Glycine max
  Clone ID: PAT_MRT3847_38055C.1.pep
WGQFQNPFCPNQGKNPWVHNRGKGYPMAGFPGQDWKEGMGRRATRALANLILLNFFPCLKGH

SEQ ID NO: 217086 - protein, 63 aa, Glycine max
  unsure (1)..(63): unsure at all Xaa locations
  Clone ID: PAT_MRT3847_38056C.1.pep
SSIFILYFEFRNFMYLVIMPYIVSYVSSWNPLVGWVPMQRNFTYLKQXSLRNLIKRISMGGFT

SEQ ID NO: 217087 - protein, 50 aa, Glycine max
  Clone ID: PAT_MRT3847_38057C.1.pep
IYNLFIIELILLITYHILLLHPKNIPLINSSFHQITDLHNTYTPTLNILS

SEQ ID NO: 217088 - protein, 62 aa, Glycine max
  Clone ID: PAT_MRT3847_38058C.1.pep
RKLELWKEVESPPIDMMIEEVFSRDQCRWKKNDEHPKELAVEVELAIFCFLVEELSEELLIC

SEQ ID NO: 217089 - protein, 85 aa, Glycine max
  unsure (1)..(85): unsure at all Xaa locations
  Clone ID: PAT_MRT3847_38059C.1.pep
RIAXDTVXHXXVPPEARNSDGEFGFQCLSLHLLIESLWHNNREDLYTTARPKHYCFIETPGGVSQMLKNDTGIYTWYGRELFGET

SEQ ID NO: 217090 - protein, 59 aa, Glycine max
  Clone ID: PAT_MRT3847_3805C.1.pep
LLQLIDSSLNFLFSLKKSSIRSNMQQVIHAMPFLRGQTKKEKEYRNKLQNRESRLLPNS

SEQ ID NO: 217091 - protein, 61 aa, Glycine max
  Clone ID: PAT_MRT3847_38060C.1.pep
EPTGKRSSRPTPFAGNLFSNWRRGLMWPWARYGRTRTWTVVCLWTTNLGFWPEPKFEAKEG

SEQ ID NO: 217092 - protein, 678 aa, Glycine max
  unsure (1)..(678): unsure at all Xaa locations
  Clone ID: PAT_MRT3847_38061C.1.pep
MPRSSSAMHHHRQSSDNFMFDAHGRWLHSSAYAQELGTRSSSLRRNDDDRVLTSGLLDLHSFDTELLPEGQSFDGYESILSGNKLVPRSRGLPESHLLKSVSADKERANNVAKIKVVVRKRPLNKKEIAKKEEDIIYIDSNFLTVHERKLKVDLTEYIEKHEFVFDAVLNEDVSNDEVYAETVEPIVPLIFQRTKATCFAYGQTGSGKTYTMQPLPLKASHDILRLMHHTYRNQGFQLFVSFFEIYGGKLFDLLNERKKXLCMREDGKQQVCIVGLQEYRVSKVETIKEFIERGNSTRSTGTTGANEESSRSHAILQLCIKRSADGTESKPTRLVGKLSFIDLAGSERGADTTDNDKQTRIEGAEINKSLLALKECIRALDNDQGHIPFRGSKLTEVLRDSFVGDSRTVMISCISPSSGSCEHTLNTLRYADRVKSLSKGNTSRRDPLSSSNLRDSTVLPGSSVLSHDDTLEDETTYVSSDKNRFGWPKQLEREPSPPNNVDRVPSGRMGGNLIPSVYSDPQNGQRGSQKARTANEYDYLGPTYEQDRTRKTSKRVDNNQLSAVGDKRKIESRVKLVDELHFEANHSDPDDNLNALLKEEEDLVTAHRRQVEETIDIVREEMNLLVGADQPGNQLDDYISKLNTILSLKAAGIFQLQTQLAQFQRRLNEYNVVVTSGN

SEQ ID NO: 217093 - protein, 60 aa, Glycine max
  Clone ID: PAT_MRT3847_38062C.1.pep
REEMNFLVGAAQPGNHLDDYISKLNTILSLKAAGIFQLQTQLAQFQRRLNEYNVVVTSGN

SEQ ID NO: 217094 - protein, 180 aa, Glycine max
  unsure (1)..(180): unsure at all Xaa locations
  Clone ID: PAT_MRT3847_38063C.1.pep
MPRSNSAVHHHRQSSDNFMFDAHGRWLLSSTYSQEFGTRSSSLRRNDDDRVLASGLLDLHSFDTELLPEMYGVHNEYLTNHTVRGQSSDDYESILSGNKLVPRSRGLPESHLLKSVSTEKERAKNAAKIKVVVRKRPLNKKEIAKKEEDIISIDSNFLTVHERKLXVDLTEYIEKHEFCF

SEQ ID NO: 217095 - protein, 70 aa, Glycine max
  Clone ID: PAT_MRT3847_38064C.1.pep
FSPALIYNMVSQVCVCVTVDARDQWIQFTPSIQCNMLLLREGGCAPSHISSFAAFIRTECDIRVKRAIKR

SEQ ID NO: 217096 - protein, 78 aa, Glycine max
  Clone ID: PAT_MRT3847_38065C.1.pep
THFFRQFYRECDIYGTVDFIFGNAAVVLQTCNLYPRLPMSGQFNAITAQGRTDPNQNTGTSIHNATIKPADDLAPSVG

SEQ ID NO: 217097 - protein, 109 aa, Glycine max
  Clone ID: PAT_MRT3847_38066C.1.pep
RTPGPDHQKLVTTGEPTREGTMKEQAPPKQPADTEKEETRQKGKQGPQEANDRPRGSPRPQKNGEANHAQKANDPAKTTSRRGAKNKWHPNQHTKKSKEKTEEPPPKPE

SEQ ID NO: 217098 - protein, 116 aa, Glycine max
  Clone ID: PAT_MRT3847_38067C.1.pep
PRVRMDSPKVYLNGLKTSVTLILIISLTLFPSNSVGSASAKDGGKVLKQKKLVLGSRPPKCVNKCLSCKPCMAALVISPHHRDGHTHKAKTVQRDEGYYLSHGNANAVTSSFSPES

SEQ ID NO: 217099 - protein, 93 aa, Glycine max
  unsure (1)..(93): unsure at all Xaa locations
  Clone ID: PAT_MRT3847_38068C.1.pep
XXPXQXMXSLXLXXXXXXXXXRXDXPXXXXXDXXRIXXXEXIXMKXXHHXHXXXXXXSXXXXQGXGXSCSAXPSXVXXQPYSSRIPSLRTRFX

SEQ ID NO: 217100 - protein, 53 aa, Glycine max
  unsure (1)..(53): unsure at all Xaa locations
  Clone ID: PAT_MRT3847_38069C.1.pep
PIDWDYYRXEFALAYXAMYKEHYHSIAVRKFVDTVTGQYMTKFDALLIELKEA

SEQ ID NO: 217101 - protein, 60 aa, Glycine max
  Clone ID: PAT_MRT3847_3806C.1.pep
SGEFPNQLGVCKKLHFVDLSSNNLTGELSEELRVPCMSVFDVSGNMLSGSVPDFSNNVCP

SEQ ID NO: 217102 - protein, 91 aa, Glycine max
  Clone ID: PAT_MRT3847_38070C.1.pep
TFFTKVPKFDQPFSLLTLWKGTMGFFINRDSMEGQVMDYSKRGCLSQLKQMGFSMNGKGAPGSAGFGGSFYQHFWNIIQYNIFNFVSQFFL

SEQ ID NO: 217103 - protein, 47 aa, Glycine max
  Clone ID: PAT_MRT3847_38071C.1.pep
SNNQSLLIGLPNNKAITLRVLYNITYPPSTVKYSSTLNQTNTSFLCN

SEQ ID NO: 217104 - protein, 65 aa, Glycine max
  Clone ID: PAT_MRT3847_38072C.1.pep
SYDVRISGGRQLGCEEPTERHRRADTREAVAAGTYPDGNRPAYTMAHDDRERVDCADEENPRTWS

SEQ ID NO: 217105 - protein, 571 aa, Glycine max
  Clone ID: PAT_MRT3847_38073C.1.pep
MGNSRKKHRRVQDSPSSSSSSCSDSDDSSRRRRRRRREKEMLRKSEEKEERRRKKRDRERKKKKKRLHDSDDSCSSEEEDEQPSVQPETVITEMMKEFPNVGNDLKQLLQMIDDGQAVDIKGISEKSLAKHLKKLFLSLNLMENGDRVFLLHSKARPTLDVVFPLIQSYMNMNPMNEQADTSAPVPESSSVPIDTGNKQMVDDHATAAPEDHSVGPRRRMIGPAMPSVELLAAAAKLTEAQTELRDAELDDDTELFVGPPPPALVSEAESANEAERFEEVTRIMEVEADSPYDVLGANHNMSSDNMKKKYWKMSLLVHPDKCSHPQAHQAFIKLNKAFKELQDPEKRKAMDEKIKLKQEQEQFQAELKTMREAALWRRSQGISMEGDEELLAQTEVKVEPKRDEWMTTLPPERKPGGMTMQSTTFSRGPKEGRGDTSVWTDTPLDRAQKAKMNYLEAYNEATALASNEEDKKRASADAELVDKYNKAKRSKTLVQKYQEEVASKSKKKSKELKEVKQQPEKEDWVGQHPWKPWDREKDLTAGRKTVNFDSESMTKNLSSRFSSGNFQRNFL

SEQ ID NO: 217106 - protein, 65 aa, Glycine max
  unsure (1)..(65): unsure at all Xaa locations
  Clone ID: PAT_MRT3847_38074C.1.pep
MLRARFPLLLLXGLVFLASXVSGSFGIVYWVKXYSIHVKCLQSGISESDSYRYQACHARCNLLKV

SEQ ID NO: 217107 - protein, 59 aa, Glycine max
  Clone ID: PAT_MRT3847_38075C.1.pep
ACCLQRSYRSTHWRPRPSVFQIRPLCPAMRISEYKRVKQRREIEWSTLEVLYQIGECKR

SEQ ID NO: 217108 - protein, 45 aa, Glycine max
  Clone ID: PAT_MRT3847_38076C.1.pep
FPLDPASANLRFCEWRNGGDFLSAIPGGAVPAAFEQVQRFGRRTT

SEQ ID NO: 217109 - protein, 103 aa, Glycine max
  unsure (1)..(103): unsure at all Xaa locations
  Clone ID: PAT_MRT3847_38077C.1.pep
GSKGGFFPGSQMGQFGETLGKPLWGIPYQNWEVFSHFGKRNRFAFYGRVGFFFFFSLLWLLNLVPRGFVKTLGNGFPFFPWFPLPLFPGVSPVFXWWVFPVFP

SEQ ID NO: 217110 - protein, 38 aa, Glycine max
  Clone ID: PAT_MRT3847_38078C.1.pep
MGDVAKVLSAGTVGGAAPLIVGHPFDTIKVKLQSQSTP

SEQ ID NO: 217111 - protein, 50 aa, Glycine max
  Clone ID: PAT_MRT3847_38079C.1.pep
VGSKQYERSALIHTFLLLHLNFVTDLYYYIFPNLHHSVTPISSLVILSFT

SEQ ID NO: 217112 - protein, 72 aa, Glycine max
  unsure (1)..(72): unsure at all Xaa locations
  Clone ID: PAT_MRT3847_3807C.1.pep
KGPGLQRFFFLNKIVFWGANSQAGGGGNLFXLPAIHETKGAFSNRTKIMTXXFFNRTSKFLFICNPXXSIXI

SEQ ID NO: 217113 - protein, 96 aa, Glycine max
  Clone ID: PAT_MRT3847_38080C.1.pep
MANFFAAMILSLYAISILQTIVMASNEQRCHLYDNNIKYLSSTVKNYQCPSQYSTRCIQTQYHNPCMLFCHKFFITCLYLPHLYYCHKTFFPFYNN

SEQ ID NO: 217114 - protein, 121 aa, Glycine max
  Clone ID: PAT_MRT3847_38081C.1.pep
QNSCSDPETEKIEKNASRQNSLKHVLATEMDVNDYSNNGVFHDTGDASGEHDRSRSSKRRESFLANIIKKDNGKSNATVNGHPIPDPMIKKAEKLAGPIQPGNYWYDSRAGFWGVMGGPCL

SEQ ID NO: 217115 - protein, 50 aa, Glycine max
  Clone ID: PAT_MRT3847_38082C.1.pep
GQENLTKFKKKNQFWIHCQCIGMNAVAALSMYWNECSSSFKIKFEIAYRN

SEQ ID NO: 217116 - protein, 128 aa, Glycine max
  Clone ID: PAT_MRT3847_38083C.1.pep
SPTSQDSMIQVTEESYKSCNIKDPILYMNNGNTLFNITSKGQFFFTSGEPGHSQKNQKLHVAVGEGIMETMDTAPGPSSSLPASAPSYPTVFGNIPVAPSTSTSTQLISTSQLLIIGFVICALFSSLM

SEQ ID NO: 217117 - protein, 40 aa, Glycine max
  Clone ID: PAT_MRT3847_38084C.1.pep
VLRDFVNFIHVSSSLCSEKLSRYIYDSTGGWLFKANGKPI

SEQ ID NO: 217118 - protein, 104 aa, Glycine max
  unsure (1)..(104): unsure at all Xaa locations
  Clone ID: PAT_MRT3847_38085C.1.pep
VSINKPIQGYGPKYVGSLMEWNESQLDNETIFRQILGAPFPTYIGDVVKAILXRVFGVQAHISHSHVQKIVSWKQXAHSYTXFKHCVLFTWEIRLKCKAKLAPL

SEQ ID NO: 217119 - protein, 184 aa, Glycine max
  unsure (1)..(184): unsure at all Xaa locations
  Clone ID: PAT_MRT3847_38086C.1.pep
SDELSRHKLRNVEHREIERGSGGWYGGTSLKVLENHISEESKQAGPLKVVDHHGMLSSDGSSSYGETCGRVILKKIDIRWRXYGGSDWLDSEKSGPHFGRDTSVCLELALSGMKFQYDVFPVGGLRVSKMSVSVQDFFLYDRSQDAPWKLVLGYYHSKGHPRESYSRAFKXDLEAVRPDPLTSP

SEQ ID NO: 217120 - protein, 44 aa, Glycine max
  Clone ID: PAT_MRT3847_38087C.1.pep
VLIKAECGYTWKVFTFCYWNILLFIFYFFYVYLHFKFLNQLNTG

SEQ ID NO: 217121 - protein, 70 aa, Glycine max
  Clone ID: PAT_MRT3847_38088C.1.pep
RSYFPSSMSLSRYRLIFFCLMALLEALDILGSSGALIQAGSICFKCKSQVYVKSNRPISVIALGHLFTNL

SEQ ID NO: 217122 - protein, 87 aa, Glycine max
  unsure (1)..(87): unsure at all Xaa locations
  Clone ID: PAT_MRT3847_38089C.1.pep
MNVTVGNIHGAGSAVTRKSHPXKQLWADMSYGKSYXGPDXKMPFSGACRANGLVLWHRGHAAKLRRSAIRICARVQLIIRRKNIAAF

SEQ ID NO: 217123 - protein, 92 aa, Glycine max
  unsure (1)..(92): unsure at all Xaa locations
  Clone ID: PAT_MRT3847_3808C.1.pep
VSAAXHFARIRXSLVERGVTSTLNSGFLTPCRDRLLVALGLDLFAVKDEKFMDMFVAPGAIDVLESERESLAKRQKILQSCLNEFKNVARAL

SEQ ID NO: 217124 - protein, 43 aa, Glycine max
  Clone ID: PAT_MRT3847_38090C.1.pep
GGLYVYAVVSILIYFRIKLVSKFLCLYHAVLKLNNGMWIYLLT

SEQ ID NO: 217125 - protein, 363 aa, Glycine max
  Clone ID: PAT_MRT3847_38091C.1.pep
MASTASEVSQQVQSNNNRPIFKSVKALTESPELTFLPPSYTYTTNSDDEIVADPDEDDPIPIIDYSLLVTGTPDQRAMTIHDLGKACEEWGFFMLINHFVSKTIMEKMVDEVFAFFNLREEEKQEYAGKDVMDPVRYGTSSNVSMDKVLFWRDFLKIVVHPEFHSPDKPPGFRETSAEYCRRTWKVGKELLKGISESLGLEANYIEDTMNLDSGWQMIAANMYPPCPQPELAMGIPPHSDHGLLNLLLQNGVSGLQVLHNGKWINVGSTSNCQLVFVSDHLEVVSNGKYKSVLHRAVVSNKATRMSLAVVIAPSLDTVVEPAKEFLDNQRNPAAYVGMKHRDYMQLQKSNRLNGKSVLDRVKI

SEQ ID NO: 217126 - protein, 86 aa, Glycine max
  Clone ID: PAT_MRT3847_38092C.1.pep
DVPWVSFGNRITQGLKRSIANLQSHQSRGSPESARALPPRLVGPICIYAPSARSSLVVPRFTICCFSCVSTSHVRDFTMLFSLSWL

SEQ ID NO: 217127 - protein, 73 aa, Glycine max
  Clone ID: PAT_MRT3847_38093C.1.pep
GKKMGKGYRMIPKIIKGGGWKILGVNLRNIWGGAPMNTLRNGMKRLRGCYEKLKGGHDIRLGIRGGGKHWGVP

SEQ ID NO: 217128 - protein, 57 aa, Glycine max
  Clone ID: PAT_MRT3847_38094C.1.pep
PIAVHHRPQGGQEKMLSDPSRGWRDPSLGYRDPGRRRGEGQLSAAAVNPSSPWTLQD

SEQ ID NO: 217129 - protein, 123 aa, Glycine max
  Clone ID: PAT_MRT3847_38095C.1.pep
MATYAAMKPTKPGLEESQEQIHKIRITLSSKHVKNLEKVCADLVRGATDKRLRVKGPVRMPTKVLHITTRKSPCGEGTNTWDRFELRVHKRVIDLYSSPDVVKQITSITIEPGVEVEVTIADA

SEQ ID NO: 217130 - protein, 102 aa, Glycine max
  Clone ID: PAT_MRT3847_38096C.1.pep
NSQFLVKLHLLTVLHPRELHRTRGINHCTVPLRKTLIRSHLNPFPFVVFLHFQGFTFSELKQMLFFFLFLFWFLIQLVIYSPSSSRPVPCRGKDPFHHPCMM

SEQ ID NO: 217131 - protein, 83 aa, Glycine max
  Clone ID: PAT_MRT3847_38097C.1.pep
SLSSSPNPKPHFNDPPPSNNVPTPLKNDKNQKKKNPQPMFPFPHTIIFTLAFPIIISGSGASPLGLSSIGRTIYGALSEQGLP

SEQ ID NO: 217132 - protein, 123 aa, Glycine max
  Clone ID: PAT_MRT3847_38098C.1.pep
MATYAAMKPTKPGLEEPQEQIHKIRITLSSKHVKNLEKVCADLVRGAKDKRLRVKGPVRMPTKVLLITTRKSPCGEGTNTWDRFELRVHKRVIDLYSSPDVVKQITSITIEPGVEVEVTIADA

SEQ ID NO: 217133 - protein, 123 aa, Glycine max
  Clone ID: PAT_MRT3847_38099C.1.pep
MATYAAMKPNKPGLEESQEQIHKIRITLSSKHVKNLEKVCGDLVRGAKDKRLRVKGPVRMPTKVLHITTRKSPCGEGTNTWDRFELRVHKRVIDLYSSPDVVKQITSITIEPGVEVEVTIADA

SEQ ID NO: 217134 - protein, 68 aa, Glycine max
  Clone ID: PAT_MRT3847_3809C.1.pep
APKEKGPNGKILGLAKTLVWGDPLFGQGPPPRVGPQGKNFSPPPKKHLIRGAFMGPGTGILGPQTLLA

SEQ ID NO: 217135 - protein, 40 aa, Glycine max
  Clone ID: PAT_MRT3847_380C.1.pep
GLVCLRDDWKEIGTGNGYILRRRWFSSFVQKIKGVGGRVG

SEQ ID NO: 217136 - protein, 155 aa, Glycine max
  Clone ID: PAT_MRT3847_38100C.1.pep
MADVEVDVAAAAAAGQPKKRTFKKFSFRGVDLDALLDMSTDELVKMFSARARRRFQRGLTRKPMALIKKLRKAKREAPPGEKPEPVRTHLRNMIIVPEMIGSIIGVYNGKTFNQVEIKPEMIGHYLAEFSISYKPVKHGRPGIGATHSSRFIPLK

SEQ ID NO: 217137 - protein, 149 aa, Glycine max
  Clone ID: PAT_MRT3847_38101C.1.pep
ADHACVQKHGLFASVLDNPSWTSNGCACKVAAAVLDWARDHKAAVCTHWFQPLAAAGVREGQTGQVHTCMVNFGPDGTPIWELEGKTLLKGETDGSSFPNGGLRATHTAGRYTILDPSSPIFLRGDTIYFPSIFVTWKGHFVDEKTSFL

SEQ ID NO: 217138 - protein, 231 aa, Glycine max
  unsure (1)..(231): unsure at all Xaa locations
  Clone ID: PAT_MRT3847_38102C.1.pep
SMFFAAAFVFRAVLDAFDSPDGLQKXLGFLNDAASVRSGVILEPLSLSNSGSLRNDRSSAEVLTSSEKQIAYHTCVALRQYFRAHLLVLVDSIRPNKSNRSAARNIPSVRAVYKPLDISNEAMDAVFLQLQKDRKLGPAFVRTRWLAVEKFLASNGHITMLELCQAPPVERYLHDLLQYALGVLHIVTLVPSSRKMIVNVTLSNNRVGIAVILDAANIASNHVDPEVRFFW

SEQ ID NO: 217139 - protein, 114 aa, Glycine max
  Clone ID: PAT_MRT3847_38103C.1.pep
MATYAAMKPTKPGLEESQEQIHKIRITLSSKHVKNLEKVCADLVRGAKDKRLRVKGPVRMPTKVLHITTRKSPCGEGTNTWDRFELRVHKRVIDLYSSPDDGKVWLCKIDCLVN

SEQ ID NO: 217140 - protein, 73 aa, Glycine max
  Clone ID: PAT_MRT3847_38104C.1.pep
PQKACSWPQQRISITKTVSFWAIILRTMSSKCLTFDVFYFTNILYFFLMFTDDLKRLLLFASDLRFEILKQTL

SEQ ID NO: 217141 - protein, 46 aa, Glycine max
  unsure (1)..(46): unsure at all Xaa locations
  Clone ID: PAT_MRT3847_38105C.1.pep
HLSKNGSSQVEMRKKTKIRFFSRNLINQXXXAIILVEVQRAPTLDP

SEQ ID NO: 217142 - protein, 99 aa, Glycine max
  unsure (1)..(99): unsure at all Xaa locations
  Clone ID: PAT_MRT3847_38106C.1.pep
RDVLAVDIGRLEVQVILPRHEELGVRYVHADDHIISVARFPNSSVQQLQAFFIIQDVGSKPAFIPHIGGIFPIFLLDDILQDVXNMCSNAHVFSDAWVD

SEQ ID NO: 217143 - protein, 77 aa, Glycine max
  Clone ID: PAT_MRT3847_38107C.1.pep
VLLDVIFLVRLACYKSDIWLDSNISQFLLLFGDMQMHQHIYTHHFLPSFLYFLFIILPLFFLLKSLSRFCSILSCNK

SEQ ID NO: 217144 - protein, 219 aa, Glycine max
  Clone ID: PAT_MRT3847_38108C.1.pep
MSDEVVLLDTWASMYGMRARIALAEKGVRYEYKEENLMNRSPLLLQMNPIHKKIPVLIHNGKPICESAIIVQYIDEVWNDKSPLMPSDPYKRSQARFWVDYIDKKIYDTWKKMWLSKGEEHEEGKKELISIFKQLEETLTDKPFYGDDTFGFVDLCLITFSSWFYTYETYGNFKMEEECPKLMAWVKRCMERETVSNTLPDAKKVYGLIVELQKTLESK

SEQ ID NO: 217145 - protein, 71 aa, Glycine max
  Clone ID: PAT_MRT3847_38109C.1.pep
GGSRASNFKGYRKAGLIVYSLALTRATCLCFAYHQRSYDKAFNLTLCGNRFSLVITTASFGRVLGLSTILP

SEQ ID NO: 217146 - protein, 61 aa, Glycine max
  unsure (1)..(61): unsure at all Xaa locations
  Clone ID: PAT_MRT3847_3810C.1.pep
GLTSAVDDGQKGSIMAKIVTCGNAACKRSDSDSSVQXVCLTYSDRTHHFVACKXTKSEPHC

SEQ ID NO: 217147 - protein, 163 aa, Glycine max
  Clone ID: PAT_MRT3847_38110C.1.pep
PGLTPISISYIPFHSQFQPGTCHYSLQSWIHQINKIDLPEKARPASRRESAHCHWSNITHRITALDPISAHGHSLRAGLHTRDLHLHDQQQQHQFPSLNQATEDENSGSSGAQKREREENSNNNEGAGEAEITRRPRGRPAGSKNKPKPPIIITRDSANAMRT

SEQ ID NO: 217148 - protein, 114 aa, Glycine max
  unsure (1)..(114): unsure at all Xaa locations
  Clone ID: PAT_MRT3847_38111C.1.pep
PEEIGAGERCHMFGYATDETTELMPLSHVLATKLGARLNXVRKNGTGPWLRPDGKTQETLEYDMTMVPERLSEITAGLISTQHDKTVTNDEVVVYRXYHMVNAVIPDNCLDEKT

SEQ ID NO: 217149 - protein, 76 aa, Glycine max
  Clone ID: PAT_MRT3847_38112C.1.pep
LVLYPPTKFFFFLLPPWKKDLDFFHPLFIKGKKSSPQWGMFLMGWGQTDLLIYMGMRGFFKKKGTIWKLHGPVLIV

SEQ ID NO: 217150 - protein, 52 aa, Glycine max
  Clone ID: PAT_MRT3847_38113C.1.pep
CPNNKYISNKNLTNVLRRLAFTYIINLLSNINQENKTLWKLIKKVEVFEPQS

SEQ ID NO: 217151 - protein, 58 aa, Glycine max
  unsure (1)..(58): unsure at all Xaa locations
  Clone ID: PAT_MRT3847_38114C.1.pep
XCFMMYPTYNTARRSNHCHPQRVMRLWPLTCPNLDCRTTLVFHFQEQHFKFLQIPLEA

SEQ ID NO: 217152 - protein, 59 aa, Glycine max
  Clone ID: PAT_MRT3847_38115C.1.pep
FVPPVISYGSSHEILGFVGSGILLGNPLFWKNLTFVSPPPLRFLPYICDLGPPPIFFFP

SEQ ID NO: 217153 - protein, 112 aa, Glycine max
  unsure (1)..(112): unsure at all Xaa locations
  Clone ID: PAT_MRT3847_38116C.1.pep
HKSPGMVNMTGINFEDSHVASGLGNHLGSPILRDEWHEILAFEQGVKLLEKCMGVLXNQDRSAVSSIQISKIPHKGAPVFPPFSFSTNWKLXAFKNPGVGAEGSMVTRLVVK

SEQ ID NO: 217154 - protein, 66 aa, Glycine max
  Clone ID: PAT_MRT3847_38117C.1.pep
LGRVGSNNFGAMIMEINASPDNINSVKYNVHEKQPYRTWYHFQPPQNWMNGIILTPWHSLILSFHF

SEQ ID NO: 217155 - protein, 143 aa, Glycine max
  unsure (1)..(143): unsure at all Xaa locations
  Clone ID: PAT_MRT3847_38118C.1.pep
GLEAAKVYGAVPSAAASVSPSIGGAIESLPVLDVVPISQQAEAARKALLENVRRLKESHGRTMSSLSKTDENLSASLLNITALENSLVVADEKYRFMQKLRNYVTNICDFLQHKACYIEEXEEQMKKLHQDRASAIFEEEPTT

SEQ ID NO: 217156 - protein, 63 aa, Glycine max
  Clone ID: PAT_MRT3847_38119C.1.pep
WFFANVVLPFLIWFLDLCPQFCLLQSGVLFLFRSLFFSLPCFREVRLCLWFLGHPTFELDCPF

SEQ ID NO: 217157 - protein, 258 aa, Glycine max
  Clone ID: PAT_MRT3847_3811C.1.pep
EESSNQFRIMSVGLDGYLKVFDYGSLKVTHSMRFPAPLLSVAYSPDCSTRATRRRQKGIYASKKKIREKEKERESEASLFWKIAPVENTEKKAMRPSHFRYFHRGQGTKPSEGDFLVMKPKKKKWAEHDMLLNKFEHGEALVSVLQTMNPGHVVAVLEELVARKKLLKCVSNLDVKNLELLLEFLHKYCTMPRYSSLLMGFAKKVLEMRADDIRASDSEAIKSHIINLKRAVAQEIQIQQSLQEIQGIISPLLKIAGR

SEQ ID NO: 217158 - protein, 62 aa, Glycine max
  Clone ID: PAT_MRT3847_38120C.1.pep
SPKQGVRPFYLKKFKIRKQRFIEKYNRLKSYGKLQAFVEKRRRRNVAKAHTFMPYCRSGDVE

SEQ ID NO: 217159 - protein, 73 aa, Glycine max
  Clone ID: PAT_MRT3847_38121C.1.pep
LRRFSMEAMTVAAALIVSKVLFTALASPPLAPCIIYYLFLYKYRWISKQSSGEQGNRFFYIHHIQIIQTSLKS

SEQ ID NO: 217160 - protein, 308 aa, Glycine max
  unsure (1)..(308): unsure at all Xaa locations
  Clone ID: PAT_MRT3847_38122C.1.pep
MGCLYFLRKDTMEEKVNKEHQVCTSDGAIDSHGHPAVREKTGDWVAAILILVNQGLATLAFFGVGVNLXTLFLTRVMGQDNAEAANSVSKWTGTVYLFSLLGAFLSDSYWGRYMTCAIFQVIFVIGLVSLSLSSYIFLLKPSGCGNKELPCGSHSSYQTILFYVSIYLIALGNGGYQPNIATFGADQFDEGDPREQHSKIVFFSYFYLALNIGSLFSNTILNYFEDDDGLWTLWFWASAGSMXALALILFLCGTRRYRYFKPNGNPLPRFCQVFVAATRKWKAKVLQDDKLYEVDEFSTNEGRKMFHT

SEQ ID NO: 217161 - protein, 89 aa, Glycine max
  Clone ID: PAT_MRT3847_38123C.1.pep
SNRKGHEKALLSDGYSRDELSQRSKRDERRTLLFYRTGKLLSMKTYDSYVKEVELGTHRSQPYKVLINAISSSNLFLKKVKKIKRWERG

SEQ ID NO: 217162 - protein, 92 aa, Glycine max
  Clone ID: PAT_MRT3847_38124C.1.pep
VDNLNTPPLPRKEVSAYSVGSDHLKPPEPPHGQRAVFPASPSLMPNSSSGQRVPPSPVNVGPKKAGLPTGHLQTLRFSYSSPGVSRGELSAI

SEQ ID NO: 217163 - protein, 91 aa, Glycine max
  Clone ID: PAT_MRT3847_38125C.1.pep
TAASAIYLKGLCGPYFRRLCLNNCICLCICISISVIPFYLSSDRFMSEKTKGVKLCVNLVANTSAIRLCLDWFETPILELCMIVYYTIETK

SEQ ID NO: 217164 - protein, 125 aa, Glycine max
  Clone ID: PAT_MRT3847_38126C.1.pep
IRFFIIKKVYYANIIRVTSGVPEQCRKPHICLQKSTSQKLFLYFYLLYPLILLLYTFNCATLNSHLHRLLLQLNSQFLEPNPNPFSPLSPFSLLLTPSSSPLLLHNISAVITLLPIFTMVVESLP

SEQ ID NO: 217165 - protein, 37 aa, Glycine max
  Clone ID: PAT_MRT3847_38127C.1.pep
ATCTCHGLLLVGQYTEMVCAVLSHGCVLNHSSQGLLM

SEQ ID NO: 217166 - protein, 48 aa, Glycine max
  Clone ID: PAT_MRT3847_38128C.1.pep
GWQTISFIASAVANKPPLIGPGIATAHDHLLHLISVPQGIVVSDISVA

SEQ ID NO: 217167 - protein, 45 aa, Glycine max
  Clone ID: PAT_MRT3847_38129C.1.pep
SDPYITRSIAREHESVITLSTRDLHSIPSLRNSITLMGSNLSRRT

SEQ ID NO: 217168 - protein, 76 aa, Glycine max
  Clone ID: PAT_MRT3847_3812C.1.pep
HLFTILTDTQHFKHLQHLENQSGVAGLKIVFFHIYSYPSHIIIQQRDAWLHLKRARICITKSWVGAFIGEQGNRAS

SEQ ID NO: 217169 - protein, 69 aa, Glycine max
  Clone ID: PAT_MRT3847_38130C.1.pep
WEPPLLRTVSIHSSASNHDREESSWLPFRTPSQNISLAPNPLIQVSERTNLHLPDLDRTHAGWLMLNRA

SEQ ID NO: 217170 - protein, 126 aa, Glycine max
  Clone ID: PAT_MRT3847_38131C.1.pep
FEKKKILFKKKKKKKKKKKKKKEKKKKKKPGGPPPKRPQPTDPGRAPSSLWCGAPKTPSRARHLPPVGGENPGPPPPYPPGAPSPFGPGRKNQTSPPPTALPKGAPPEMATGPPPVGGINPRGRGG

SEQ ID NO: 217171 - protein, 36 aa, Glycine max
  unsure (1)..(36): unsure at all Xaa locations
  Clone ID: PAT_MRT3847_38132C.1.pep
EGAEDAKGRGRHVXSTARTCDCIXIALEAKKPIFYK

SEQ ID NO: 217172 - protein, 64 aa, Glycine max
  Clone ID: PAT_MRT3847_38133C.1.pep
TRADSARASHYTKKNKKIKKNYEQELNNSTTPILCCCCCWLKKEKKNTNTKKRLANIIDILTSL

SEQ ID NO: 217173 - protein, 92 aa, Glycine max
  Clone ID: PAT_MRT3847_38134C.1.pep
TLNKIVGEHVMVSHKFIWFMVHHFILHPPSLISSSFPNSLLQPSSLAHCVILSEVIVGNDNFFFFFRFQILSLGLGQEKTKTFLKDVSMCDN

SEQ ID NO: 217174 - protein, 46 aa, Glycine max
  Clone ID: PAT_MRT3847_38135C.1.pep
FHHLRKKKKKKKKKKKKKKKKKKKKKKKKKKKKKNLGGGPGPKFPL

SEQ ID NO: 217175 - protein, 132 aa, Glycine max
  Clone ID: PAT_MRT3847_38136C.1.pep
MQVQEELLVASKDHTHQMMMIKGKRTKRQRAPSPLSLAMPYNNSTSSSTNNSIDSATTSPSPTNTIELREDEDMANCLILLAQGRHHVAAPTSYHNNDNNDNHKSTSLYLYQCKTCNRYFPSFQALGGHRAS

SEQ ID NO: 217176 - protein, 262 aa, Glycine max
  Clone ID: PAT_MRT3847_38137C.1.pep
MKIGMFGFRKCFFFHFLFSLVITKFWGHIVMAYAFTFWTCYVLLKEYGKVATMRLGFLAAEKRRPDQFTVLVRNIPPDPDESVSELVEHFFLVNHPDHYLTHQVVYDANKLAKLVEKKKKFKNWLVYYQNKLERTSKRPEIKTGFLGLWGKKVDAIDHHITEIDKLSKEIVEERENVTNDPKAIMPAAFVSFKTRWAAAVCAQTQQTRNPTLWLTEWAPEPRDVYWRNLPIPYVSLTVRRLIIAVTFFFLTFFFMIPIAFVQ

SEQ ID NO: 217177 - protein, 148 aa, Glycine max
  Clone ID: PAT_MRT3847_38138C.1.pep
MSPKEAAFWKAQQSVLTLFKQCSSMKHLKEMHARVVQSGFGKTPLVVGKIIEFCAVSGQGDMNYALRVFDRIDKPDAFMWNTMIRGFGKTHQPYMAIHLYRRMQGNGDVPADTFTFSFVLKIIAGLECHLNLESTALTILNSTRFYTT

SEQ ID NO: 217178 - protein, 72 aa, Glycine max
  Clone ID: PAT_MRT3847_38139C.1.pep
SETLILPHQSTLSETEQAFLNAILDLLNSASIDAKRSDIYTVGIYDGENITRPYGINHFVILAHLGLQDGVN

SEQ ID NO: 217179 - protein, 62 aa, Glycine max
  unsure (1)..(62): unsure at all Xaa locations
  Clone ID: PAT_MRT3847_3813C.1.pep
LXYFCLVHIRTVIVPLFKLLYCCFLNLIFKKLFQYSVWAQTSCLSDFGLLSFEGVRFLACLF

SEQ ID NO: 217180 - protein, 80 aa, Glycine max
  Clone ID: PAT_MRT3847_38140C.1.pep
AASPDRTGTAGPTQPTRAFSFGLMSALQPSQTAEPSIAVRLLTKVGHRTISEPVLPPSERILYKECLTCGPLWVILGVQT

SEQ ID NO: 217181 - protein, 64 aa, Glycine max
  Clone ID: PAT_MRT3847_38141C.1.pep
CYHLRVTRMDDKITFFNIISLYKELEIGESFALITFEQFLKTNGHGIILRIFENHNIFFIHEMV

SEQ ID NO: 217182 - protein, 49 aa, Glycine max
  Clone ID: PAT_MRT3847_38142C.1.pep
EGLYCLMKEIYSFTKKVTPLTVCHRHNSCNILRCSITGDKVFQTFDFAN

SEQ ID NO: 217183 - protein, 49 aa, Glycine max
  Clone ID: PAT_MRT3847_38143C.1.pep
STGTSDFSPQPLANSPNFLNTMNAAKAIYNIRLWNPKINLQSIIKNAIR

SEQ ID NO: 217184 - protein, 71 aa, Glycine max
  Clone ID: PAT_MRT3847_38144C.1.pep
LLFDATGEDLNTRRFQLIHGLQREICKEIEGSIFQFSKNKANGVQPSLHFKLKVEKLMKANKARLVCSSCN

SEQ ID NO: 217185 - protein, 214 aa, Glycine max
  unsure (1)..(214): unsure at all Xaa locations
  Clone ID: PAT_MRT3847_38145C.1.pep
MFSFNYLFTTIFLVLTFFLYPSNAQLSSTFYSSTCPNVSSIVRSVVQQALQSDPRIAASLTRLHFHDCFVNGCDGSILLDVGGNITLSEKTAGPNNNSARGFDVVDNIKTSIENSCPGVVSCADILALAAEVSVSLGXGPSWNVLLGRRDGLIANQSGANTSIPNPTESLANVTAKFAAVGLNITDLVALSGAHSFGRAQCRFFNQRLFNFSGT

SEQ ID NO: 217186 - protein, 39 aa, Glycine max
  Clone ID: PAT_MRT3847_38146C.1.pep
SISILICIRLPLPHGQLLLLINSLETCQDNPKSLAPTSN

SEQ ID NO: 217187 - protein, 159 aa, Glycine max
  Clone ID: PAT_MRT3847_38147C.1.pep
FLFLSSLYTTCSLSNSRILNVFSLFLVQPFKRYVEIGRVAQINYGKEYGRLVVIVDVIDQNRALVDAPDMVRSQVNFKRLSLTDIKIDIKRVPKKKDLVKAMEDADVKNKWEKSSWGRKLIVRKRRASLNDFDRFKIMLAKIKRAAVVRQELAKLKKSA

SEQ ID NO: 217188 - protein, 109 aa, Glycine max
  Clone ID: PAT_MRT3847_38148C.1.pep
PYRVASLQSTAKMPFKRYVEIGRVAQINYGKEYGRLVVIVDVIDQNRALVDAPDMVRSQVNFKRLSLTDIKIDIKRVPKKKDLVKAMEDAGSLLFYRLLLLLILSLGYN

SEQ ID NO: 217189 - protein, 59 aa, Glycine max
  Clone ID: PAT_MRT3847_38149C.1.pep
TPFLVRFTILHYLPQWCTSDSSCPQRGNTKHACSYTTVQFPVYAVHLCMRSLGNAPAEQ

SEQ ID NO: 217190 - protein, 116 aa, Glycine max
  Clone ID: PAT_MRT3847_3814C.1.pep
MGKPTGKKKGTVTPGAANSHAKHGKSSKAFDEDTAVFITMSQEFREEGNKLFQKKDHEGAMLKYEKALKLLPNNHIDVAHLRTNMATCYMQLGLGEYPRAIHQCNLALEVSPRYSK

SEQ ID NO: 217191 - protein, 149 aa, Glycine max
  Clone ID: PAT_MRT3847_38150C.1.pep
CSSTPVPSLPLCNPQPKMPFKRYVEIGRVAQINYGKEYGRLVVIVDVIDQNRALVDAPDMVRSQVNFKRLSLTDIKIDIKRVPKKKDLVKAMEDADVKNKWEKSSWGRKLIVRKRRASLNDFDRFKIMLAKIKRAAVVRQELAKLKKSA

SEQ ID NO: 217192 - protein, 148 aa, Glycine max
  Clone ID: PAT_MRT3847_38151C.1.pep
DGEPPYRVASLQSTAKMPFKRYVEIGRVAQINYGKEYGRLVVIVDVIDQNRALVDAPDMVRSQVNFKRLSLTDIKIDIKRVPKKKDLVKAMEDADVKTKWEKSSWGRKLIVRKRRASLNDFDRFKIMLAKIKRAAVVRQELAKLRKSA

SEQ ID NO: 217193 - protein, 47 aa, Glycine max
  Clone ID: PAT_MRT3847_38152C.1.pep
SSEWSDSVVLTFSSMALTHSLPPSLDSTPHRGPPPQHQIFANVRFRL

SEQ ID NO: 217194 - protein, 36 aa, Glycine max
  Clone ID: PAT_MRT3847_38153C.1.pep
RTMKNEVNGLTKIDTPLALGLEDTNVINSTPPHTLF

SEQ ID NO: 217195 - protein, 70 aa, Glycine max
  Clone ID: PAT_MRT3847_38154C.1.pep
SSPSLSIVRRKKKIKKENLVVTKELNKFLSNPILLDHFIQSSISRLLKSDLVGILAKFQRQNQFFLCVKL

SEQ ID NO: 217196 - protein, 104 aa, Glycine max
  Clone ID: PAT_MRT3847_38155C.1.pep
LHHYNLKLLIVTEGARGCRYYTKDFKGWVAGFEVEAIDTTGAADSFVGGLLSIVAAHNHIYKDEKRLREALDFANACAAFTVTGRGAIPSLPTKDAVLRIMFSY

SEQ ID NO: 217197 - protein, 476 aa, Glycine max
  unsure (1)..(476): unsure at all Xaa locations
  Clone ID: PAT_MRT3847_38156C.1.pep
RIINAMWQYLMTYRLADEEKLDETSVWYVMDDLGSALRHSDEPNFRVAPFLFMPEGNLTSAVSFSILWPTQNVCKGDECTRDFLLGIGEDKQRSARLTAWFHTPENYFIHAYEKHHQKLLSTSLMLPTFQSSETRSIHQPGGRPLRVYTDIPHVEEYLTHPKFAITKEPKDADIIWTSVQVDEDMKKATGITDQQYINQFPFEACLVMKHHLAETIQKAHGSPQWLQPTYNLETHLSQLIARSIVRKKGRPLRVXLVYPWNMARTIDTTVTDNLPAIIRLMETGPKICQKYIEQPALFQGRKFDLRYILLVRSMHPLEIFLSDCFWVRIANNQYSLDRSSLFEYETHFTVMNYRGAINHKNASDFVREFEEEHQVKWLDIHTRVRKIIRSVFEAAAVTHPEMHSPTSRAMYGVDVMLDSSFQPKLLEVTYCPDCTRACKYDMDIVVGEGGVAKASDFFNNVFRCLFLNEISQVSPL

SEQ ID NO: 217198 - protein, 83 aa, Glycine max
  Clone ID: PAT_MRT3847_38157C.1.pep
GGGKSFASSDTKDEPPFRPQSLGESLPPTVVDMHGFSHQKRPPGGEKKQHKGGGGPLGSKECGSPLFTILSILLAPSCSKNRL

SEQ ID NO: 217199 - protein, 42 aa, Glycine max
  Clone ID: PAT_MRT3847_38158C.1.pep
LVSEKNGGLTWDVFYSRSQSVRHSCSKGCQYPPLFGLTLSAL

SEQ ID NO: 217200 - protein, 119 aa, Glycine max
  unsure (1)..(119): unsure at all Xaa locations
  Clone ID: PAT_MRT3847_38159C.1.pep
ITLLFLLQHTIRYLFHFKGPHPXNQIDSKFCKVIYDEHIIYPTGKYNXNSTAASNSXRINVYYNXSSYKRYVPHTLLIHLQPATMDSIIYFPYCKIFLPDNFLFGQSCPINNFTKNHYT

SEQ ID NO: 217201 - protein, 89 aa, Glycine max
  Clone ID: PAT_MRT3847_3815C.1.pep
LTRGHAVNQNYGAKVLIHSEDFAYHNAFDLMEKYTSTYFDFNVDLPGSAFVALAALLASLKLVAGTLVDHTFLLLCAGEALTAISELIA

SEQ ID NO: 217202 - protein, 46 aa, Glycine max
  Clone ID: PAT_MRT3847_38160C.1.pep
LSNQSSAHSRTSYPIVRISPKIRGRQIDLDMFSEESYIDERSRSLF

SEQ ID NO: 217203 - protein, 57 aa, Glycine max
  Clone ID: PAT_MRT3847_38161C.1.pep
HYDLLLQNEATLEITITKSSQSVQQIGTPHFFFIPFWAGDKRRRKNDRLVLQCGNQP

SEQ ID NO: 217204 - protein, 55 aa, Glycine max
  Clone ID: PAT_MRT3847_38162C.1.pep
FLSPLLPLPLLPNYSFFSQIKLNRQSYTPESFLATSTSEPTLATGFAETHASLSH

SEQ ID NO: 217205 - protein, 106 aa, Glycine max
  Clone ID: PAT_MRT3847_38163C.1.pep
RTLTSVPELGSSANPFCFAIYSIELGPSSSVPDITHIAIFHCTHRIIHAADSPINIDRLPIIDLPRYWDLFKLLQSRLHFITSFCRITHRQVLHAINHLIIDIHLL

SEQ ID NO: 217206 - protein, 84 aa, Glycine max
  Clone ID: PAT_MRT3847_38164C.1.pep
EKPVTGVGFCNPEEIPWGEVGADYVAEATGVFTDKDKAAAHSKGGAKKAVISAPSKDAPTFEVGVNEKESRPELDIVANASCTT

SEQ ID NO: 217207 - protein, 356 aa, Glycine max
  Clone ID: PAT_MRT3847_38165C.1.pep
MPQQLQHGLREGGPGRFTRRRRTLPPPRKRSWVGTKKGSLERPKWVGETPLSRLVQALISFKPLFSVLKLGARRALIITAEKNNIPWRKMAQEILESEVYRELESIQNQSLVYPDYYLNPFHAYERGLNLTWLAAEEAVAATILMARRAFPDASSLQEANKILRGNWLTANNHHHMQYSESCVIDDILDIGCSVGISTRYLADKFPTAKVTGFEMSSYFVAWNQQKQERAMPRKFPIKWIHANGEDTVLPSKSFDLVSIAFVLHECPTRVIVNLVREAFRLLRPGGTLALTDFSLKSKVLQELSPVLFTLVKSTEPFLDEYYLTDMDETLREAGFVNITSILTDPRHVTITATVPQ

SEQ ID NO: 217208 - protein, 84 aa, Glycine max
  unsure (1)..(84): unsure at all Xaa locations
  Clone ID: PAT_MRT3847_38166C.1.pep
PKCFSYKTHSERRIRISEKKSVKERHEIEESTHAFLYQIGEXGSTNPRYHQLELGIKQRTDREAESGLNVSKESYIKWEMCPAK

SEQ ID NO: 217209 - protein, 103 aa, Glycine max
  unsure (1)..(103): unsure at all Xaa locations
  Clone ID: PAT_MRT3847_38167C.1.pep
GSSSDPTEYGSCAXRCTGEPCNSAFACILQAGGIQEEKDYPXTGRHGTLKAVKTKGXATASNYREGSLEEEQIAACVAKNGPIAAAINATSMQTCXEAVSCPY

SEQ ID NO: 217210 - protein, 83 aa, Glycine max
  Clone ID: PAT_MRT3847_38168C.1.pep
TPPPTPTPHPPPSPTHPPNTTQSATATQPILTIKPATQQLRKTRVNAAVPTPTPINATVHEKSKKESKELNLGMKSISQSLII

SEQ ID NO: 217211 - protein, 58 aa, Glycine max
  Clone ID: PAT_MRT3847_38169C.1.pep
RPTTPYFKNQRRNGGTKGIYPKRKNLPYPTQGFFFVFAAKKLIQQGPDILNQPHSFNK

SEQ ID NO: 217212 - protein, 110 aa, Glycine max
  unsure (1)..(110): unsure at all Xaa locations
  Clone ID: PAT_MRT3847_3816C.1.pep
LSDGTFLRKGSRVIXHLSERGRMGTIWGPDCLELRPERWMGDGVLAPECPFKYPVFQAGVGVCLGKDLALMEMKSVVLALVRRFDIRVVQSGQEPRFEPGLTGTLRGGFP

SEQ ID NO: 217213 - protein, 111 aa, Glycine max
  unsure (1)..(111): unsure at all Xaa locations
  Clone ID: PAT_MRT3847_38170C.1.pep
FTRGRTRGRTRGKEAKLKSAFEKEDVQYGTGYDLXVSTFCGDGRVFQIEYVSKDGDNSGTVIGIKSKDGVVLGVEKVIRDKRMLTGFDRRIQSXVSRYSGMDVGGLANDGG

SEQ ID NO: 217214 - protein, 107 aa, Glycine max
  Clone ID: PAT_MRT3847_38171C.1.pep
RHQHTLQPTHTLEHRHVGNERLGRCHGARTQCASSRSPVDTNVVYMPKMYSRVTLIPKRLASPVSLMLPLLLWLWMTAIYDLEEKVQVLLAQLDLNDMQGSDSAARF

SEQ ID NO: 217215 - protein, 197 aa, Glycine max
  unsure (1)..(197): unsure at all Xaa locations
  Clone ID: PAT_MRT3847_38172C.1.pep
QFMQSPHEEHLEVVHRILRYLKSTPGRGLFSKKIGQQAIEVFTDADWARSITDRKSTSGYCTFVXENLVTWRSKKQDVVARSSAEAXYRAMAQGVCEILWLKRILEELQLPMTLPMKLYCDNKAAINISQNPVQHDRTKHVEIDRHFIKEKVDTGLICMPFVPSSQQVADILTKGLFRPNFEFLVSKLDMLDIYAPT

SEQ ID NO: 217216 - protein, 60 aa, Glycine max
  Clone ID: PAT_MRT3847_38173C.1.pep
KNILPNKEFNQILASCTKNKLPNIIFLWNFLIALLDAPFIAFLYIMHYYQGPTHPHEIIT

SEQ ID NO: 217217 - protein, 86 aa, Glycine max
  unsure (1)..(86): unsure at all Xaa locations
  Clone ID: PAT_MRT3847_38174C.1.pep
GLLFLNAVGGGTSSGXGSLLLKRXSADYGKKSKLDYTGCPSPQVSTSVVEPYNSFLSAHSLLKHTSVTELFYNEAVYDICRRSLNI

SEQ ID NO: 217218 - protein, 300 aa, Glycine max
  Clone ID: PAT_MRT3847_38175C.1.pep
KPPLFLFCLILLQDKWRGIPTRLNNIPHSREIRKYFYDDVLQATQRAISDGKTRVKVDINIPELNPEMDVYRIGTLMELVRALALSFADDGKRVKVCVQGSMGEGALAGMPLQLAGTRKILEFIFWGDYGAKGTFINIGSIGAAEVEEQDDMFILVAPQNAVGNCIIDDLRAMTNAAEHRPVILINARLKDLPGSSGIMQTIGRDQRLKYAASFESCYFFRLLYYAGTQYPIMGAIRMTYPYQYDLYKRVDESPGKEKYVILSTFPERPTTDEINDAFQGKPSKDPRKTSGIWGFLSGIL

SEQ ID NO: 217219 - protein, 98 aa, Glycine max
  Clone ID: PAT_MRT3847_38176C.1.pep
ARLKDLPGSSGIMQTIGRDQRLKYAASFESCYFFRLLYYAGTQYPIMGAIRMTYPYQYDLYKRVDESPGKEKYVILSTFPERPTTDEINDAFQGKPSI

SEQ ID NO: 217220 - protein, 57 aa, Glycine max
  Clone ID: PAT_MRT3847_38177C.1.pep
NTRSRTRPLLVLTLLLKPLTLASLYQTRATYEGCLALPTLTLRTRQPLRSPQSLSTS

SEQ ID NO: 217221 - protein, 93 aa, Glycine max
  Clone ID: PAT_MRT3847_38178C.1.pep
CPPRPSPAPHVEPMFSQFLSSAIWSFSSLQRVVFLFVDKVPSTHKNIHGEKIFSFVKFPKHQKGAFHMFLGAPLKFSWKGISKIEKMLYGGVS

SEQ ID NO: 217222 - protein, 77 aa, Glycine max
  unsure (1)..(77): unsure at all Xaa locations
  Clone ID: PAT_MRT3847_38179C.1.pep
MELMVCGKLRGCLVLVFFAALLVGLVNGIGVNWGTQLTHPLPASTIVKMLKDNGIQKVKLXFDADPDILNALKKSGI

SEQ ID NO: 217223 - protein, 79 aa, Glycine max
  Clone ID: PAT_MRT3847_3817C.1.pep
NCFRHGTPGVEGLAGGVELAAGRDKHLQHLVLAAFDVGASVLPAIEVHELSRAEIGQHAPAAGDAAVDLDLDAVVLVGK

SEQ ID NO: 217224 - protein, 54 aa, Glycine max
  Clone ID: PAT_MRT3847_38180C.1.pep
SQRGSLLSAKPSATTGLFFQRKRHTLLAIYSKSLSHGPRLSLSYCFDNFTITFL

SEQ ID NO: 217225 - protein, 111 aa, Glycine max
  unsure (1)..(111): unsure at all Xaa locations
  Clone ID: PAT_MRT3847_38181C.1.pep
IFVGIQDLFDQPNLFAPAQTEGFFLFFQDPVEYKKKVRHQSNQYPPFVXSVISAPFRNCYSMLVVASYFLFWVXCYVIVGCHNMQPPXFNNFCLLSGLENVLIYNNVKVHQ

SEQ ID NO: 217226 - protein, 93 aa, Glycine max
  unsure (1)..(93): unsure at all Xaa locations
  Clone ID: PAT_MRT3847_38182C.1.pep
TQESHHRGQFQKPHDRHQSVYLFTYPYWIGVPTAVAXSMYNIINTPVVAVSIIHTNTLVNQLDHMPRTFYLAVNQEQXFLTYQHQQHGCSHTN

SEQ ID NO: 217227 - protein, 278 aa, Glycine max
  Clone ID: PAT_MRT3847_38183C.1.pep
MDAGGLDSDGREFNTAEDMWREQAGDPSKKTQWYRDGVSYWEGVKANMDGVLGGFANVNEPDISCSEDFLNILLSERFPPAADARRQPLVALDCGSGIGRVTKNLVIRYFNESDLLELLSHFLVTARETLASGCQSHSFMNVAVNFYCVPLQDFTPDTARYDVIWIQWCIGHLTDEDFVSFFKSAKVGLKAGGFFVLKENIARSGFVLDNEDRSVTRSDLYFKELFSRCGLHVYKSKDQKGFPEELFAVKMYALTTDPPKKAPRAKSKTSTNRPRTIM

SEQ ID NO: 217228 - protein, 159 aa, Glycine max
  Clone ID: PAT_MRT3847_38184C.1.pep
MSGIARGRLAEERKSWRKNHPHGFVAKPETLPDGTVNLMVWHCTIPGKTGTDWEGGYFPLTMHFSEDYPSKPPKCKFPQGFFHPNVYPSGTVCLSILNEDSGWRPAITVKQILVGIQDLLDQPNPADPAQTEGYHLFIQDAAEYKRRVRQQSKQYPPLV

SEQ ID NO: 217229 - protein, 87 aa, Glycine max
  Clone ID: PAT_MRT3847_38185C.1.pep
TGFHCDISCVSGWTDNPMQYVQVTIDWWISSQECVPRTYCVVNPQYPIWLDRWMGKLAFPQGTSRSVKRMPLAIGGRSSALGTILMN

SEQ ID NO: 217230 - protein, 76 aa, Glycine max
  unsure (1)..(76): unsure at all Xaa locations
  Clone ID: PAT_MRT3847_38186C.1.pep
MKESLLLRGCQCCNEIGSKFXYVIFYXHVIDPTGKYNYXSNSYIQLERINVYYNVAFDIRYVSRALLMDLEPCNHG

SEQ ID NO: 217231 - protein, 543 aa, Glycine max
  Clone ID: PAT_MRT3847_38187C.1.pep
MALPANETSMAERSQWVLNAPAPPSTWHNLMASSIGYATLAKLDPEYGLYTSVVPPLIYALMGTSREIAIGPVAVVSLLLSSMIQKLIDPAIDPNGYRKLVFTTTFFAGIFQAAFGLFRLGFLVDFLSHAAIVGFMGGAAIIIGLQQLKGLFGINHFTNKTDIISVMKSVWESVDHPGKRNKKLFWLPAISPLVSVMLSTLIVFLTRADKSGVNIVRHIKGGLNPSSINQIDLNSPHIGALAKIGLVVAAVALTESVAVGRSFASMKGYHLDGNKEMVSLGFMNIIGCFTSCYVATAGCETLASNIVMAIVVLISLQCLTKLLYFTPTAILASIILSALPGLIDINEAYKIWKVDKLDFLACVGAFFGVLFASVELGLLVAVGISFTKIIWISIGAGTETLGRLPGTDVFCDAQQYPMAVKIPGVAIIRVKSSLLCFSNANSVRERILKWISREEAKGNIEDNTGSIIQLVILDTSNLVSIDTSGIASLEELHKSLVSSGKHLAIANPRWQVIYKLKATNFVTRIGGRVFLTIGEAIDCKLDF

SEQ ID NO: 217232 - protein, 125 aa, Glycine max
  Clone ID: PAT_MRT3847_38188C.1.pep
SAASPLWGFFLGLLAFSPLTRFVSCYSPVRMPAVFPFFFFGRGSNFYFGGPFFQKGPFASRFIKKKRGAPGVYPPPQGSKPCNFAEEGNPSPLFFRGVWYNPQPPWVGRNPLPGLLFLWGVGAPP

SEQ ID NO: 217233 - protein, 75 aa, Glycine max
  unsure (1)..(75): unsure at all Xaa locations
  Clone ID: PAT_MRT3847_38189C.1.pep
MKNEECPAPASTYSYQNEKRDFTXNKQEKPFVINXGEACLLVRVRSLGFRKLNPLLXSIVRGPFNKARVXRSRFL

SEQ ID NO: 217234 - protein, 58 aa, Glycine max
  Clone ID: PAT_MRT3847_3818C.1.pep
PPGRRSYACLLSMKPAIDEGMSQMPNPQKSKRAMNDDGRYKRRASEENLGDMYECPMM

SEQ ID NO: 217235 - protein, 687 aa, Glycine max
  Clone ID: PAT_MRT3847_38190C.1.pep
MQRTEFSQTLQSNMALPANETSMAERSQWVLNAPAPPSTWHNLMASVRNTISSYQKMCSYIRGQPGPKVVLSFLRSIFPILHWGRNYSPTKFRNDLLAGLTIASLCIPQSIGYATLAKLDPEYGLYTSVVPPLIYALMGTSREIAIGPVAVVSLLLSSMIQKLIDPAIDPNGYRKLVFTTTFFAGIFQAAFGLFRLGFLVDFLSHAAIVGFMGGAAIIIGLQQLKGLFGINHFTNKTDIISVMKSVWESVDHPWNPRNFVLGCSFFIFILFTRFLGKRNKKLFWLPAISPLVSVMLSTLIVFLTRADKSGVNIVRHIKGGLNPSSINQIDLNSPHIGALAKIGLVVAAVALTESVAVGRSFASMKGYHLDGNKEMVSLGFMNIIGCFTSCYVATGSFSRTVVNFTAGCETLASNIVMAIVVLISLQCLTKLLYFTPTAILASIILSALPGLIDINEAYKIWKVDKLDFLACVGAFFGVLFASVELGLLVAGSYPRSPVGPHFNRKPHSLATLTYVLLIRSNSVDQVGISFTKIIWISIGAGTETLGRLPGTDVFCDAQQYPMAVKIPGVAIIRVKSSLLCFSNANSVRERILKWISREEAKGNIEDNTGSIIQLVILDTSNLVSIDTSGIASLEELHKSLVSSGKHLAIANPRWQVIYKLKATNFVTRIGGRVFLTIGEAIDCKLDF

SEQ ID NO: 217236 - protein, 100 aa, Glycine max
  Clone ID: PAT_MRT3847_38191C.1.pep
LFYTGPDQPHMIPFIMSTPRPMMSPPIVFYLGTIGLGTCFSEVNYSEKYRCHGRGCAICYVHICEALTLRTNILLLCNRTHTANAIGPIINRTLRKVKDE

SEQ ID NO: 217237 - protein, 102 aa, Glycine max
  Clone ID: PAT_MRT3847_38192C.1.pep
VLGKRKLKLQEKRLRNYPEYCNASLNWRKRRYRNCDGKLNLILLVVRERGIQSNIAVDLRSCFKRRRFVDDCCGDNGALQWTSSLLFQSKKPTKRTRGRTRG

SEQ ID NO: 217238 - protein, 63 aa, Glycine max
  Clone ID: PAT_MRT3847_38193C.1.pep
RHVSTEICELQKAVFFVPHLCCDCCLLSANDGISQVSYSVTRGRSWDFNFDGSPQLLDVVPFK

SEQ ID NO: 217239 - protein, 101 aa, Glycine max
  Clone ID: PAT_MRT3847_38194C.1.pep
KFLCFWCSQLFQEMDECNLFGHMHSLVEVFKGENLVQQEKSCKSHPCDSNITKESTTILLRNPINDSSSLEKNPGFDNRSSLKQHASQDEPLFSSSSMPYT

SEQ ID NO: 217240 - protein, 46 aa, Glycine max
  unsure (1)..(46): unsure at all Xaa locations
  Clone ID: PAT_MRT3847_38195C.1.pep
PPQVXTHCXXCXXCLXEQXIXPVXPXAXXXRRLELXFELTXXXXRR

SEQ ID NO: 217241 - protein, 51 aa, Glycine max
  Clone ID: PAT_MRT3847_38196C.1.pep
NAIGLCQRSVARMTGIPLLNCAEFFEHRQSCTYVKLRLKPHRSQLCKRQSL

SEQ ID NO: 217242 - protein, 189 aa, Glycine max
  Clone ID: PAT_MRT3847_38197C.1.pep
EKHRHLVFTDFPGGSETFELAAKFCFGAKIDLSSSNVVPLRCAGEFLEMTEQHSKENLISKTETFLSHSVLNSIKNSIIALKSCERLLPLADTLAITRRCVDSIVSETLFRLPVSDSASTLLLPTGGRRSRRTGEDDSWFEELRLLGLPMFKQLILAMKGSDSALKSEIIETCLLQYAKKHIPALSRSN

SEQ ID NO: 217243 - protein, 55 aa, Glycine max
  Clone ID: PAT_MRT3847_38198C.1.pep
LLGWLGHCCLLVLAFRGLCFFACRVCPPSVGRFGPFPPWVSWAPPSGSPCVRTRG

SEQ ID NO: 217244 - protein, 97 aa, Glycine max
  Clone ID: PAT_MRT3847_38199C.1.pep
VHQVKLITPFSIRKSPSWSAIPLIFQVYRLHQLNRAAQLVTALSFTVRGAEMTSHNMAINSSLGTLLNVLQFLGVICIWSLSSFLMRFIPYASTTKQ

SEQ ID NO: 217245 - protein, 51 aa, Glycine max
  Clone ID: PAT_MRT3847_3819C.1.pep
PNKSPNIIYKNYILIHKNISIHLVLIFAPFLLLLSLIINPNHCLGFHRKEI

SEQ ID NO: 217246 - protein, 79 aa, Glycine max
  Clone ID: PAT_MRT3847_381C.1.pep
YDPPVARVLCMLLSSLFSGNRSVAVRLFARSSILTCLLAYISPPCTLISLCLSFSLYIYIRVKSITVFSCPLCFRSGMI

SEQ ID NO: 217247 - protein, 75 aa, Glycine max
  Clone ID: PAT_MRT3847_38200C.1.pep
GAVSESAAAYSTGVWVARFSLFKSTLFNSATTQYAHCLLFCPRLNLYSDLSWFLFIYLASLPFIPPPPPPPPPPP

SEQ ID NO: 217248 - protein, 120 aa, Glycine max
  Clone ID: PAT_MRT3847_38201C.1.pep
NTFRNMDMVNNANSAATSSPSQTQVVVPMASAQFSSPSVELTTSSPPAHVVQMASPQPRHPSRHILENKREYLEKCIPLYKLALRGDWNAARRMIDADTSLLNAAITKEWGTLLHVVAGT

SEQ ID NO: 217249 - protein, 120 aa, Glycine max
  Clone ID: PAT_MRT3847_38202C.1.pep
NGVESAITIIRSHLCIDDDSNTDEECYGPNEALPEVEARVLGKEVLIKIYCGKQKGILLKIMSQLERLHLYISTSNVLPFGNTLDITITAQMGDKYNLVVNDLVKELRQVAMMKSCDVQQ

SEQ ID NO: 217250 - protein, 243 aa, Glycine max
  unsure (1)..(243): unsure at all Xaa locations
  Clone ID: PAT_MRT3847_38203C.1.pep
DVLDPHVRKIRDEKYGWKYGCGAKGCTKLFHAAEFVHKHLKLKHPEIVMELTSKMREDLYFQNYMNDPDAPGGTPVMQQPQKSIPLKRRXRSRGPIXEEIGNRLHQDRSDKMNGDRNEGITSQESQMGNHVEEMYDAYGWLCVPQFTXDMAPPPVLLRHGRIDSLGPFVPAPPEVAMQMFREQGGPSSYDASGRKMRSGPHMGGPAPIIAVPPSFRPDPRRMRSYEDLDAPEDEVTVIDYRSL

SEQ ID NO: 217251 - protein, 84 aa, Glycine max
  Clone ID: PAT_MRT3847_38204C.1.pep
SVLKGKWVGFKAGPSPPKFEAPKNWSFFFIGPPLKKTWGGLLEKGKLFGGTGGFLKQGFAHGGIWPRGRPPGRGEKGEKNFFQG

SEQ ID NO: 217252 - protein, 191 aa, Glycine max
  Clone ID: PAT_MRT3847_38205C.1.pep
KMREDLYFQNYMNDPDAPGGMPVMQQPQKDRPLKRRLGGLEGRLKDDRGNRRDQDRSDRMNGDRPDGSPSHERQMGNHDEAMYDAYGGPGVPAFTSDMPPPPVLMPVPGAGPLGPFVPAPPEVAMQMFREQGGPTSFDASGRKMRSGPHMGGPAPIIAVPPSFRPDPRRMRSYEDLDAPEDEVTVIDYRSL

SEQ ID NO: 217253 - protein, 36 aa, Glycine max
  Clone ID: PAT_MRT3847_38206C.1.pep
QGSTGSGSASSDRAGTPSSDRVGSTSPSRSAVVYAL

SEQ ID NO: 217254 - protein, 46 aa, Glycine max
  Clone ID: PAT_MRT3847_38207C.1.pep
EKGFICKTTIPFCYFSYLNCSVGERNLCYDFIISKLCMFHKLLQSC

SEQ ID NO: 217255 - protein, 157 aa, Glycine max
  Clone ID: PAT_MRT3847_38208C.1.pep
MVNPFAGTHRRSSGSAFRLVLKFSHRCEKMADCDDEHVNRIGDLPMNVIVSILQRLPFQDLVKTSVLARAWRYMWSSTPRREFRDDFFEKCNHLGYLETSAIITEALLFHTGPIHVFAVIPPSHYPIKLECLNKWILFLSRKGVKYIGLASEQEDPY

SEQ ID NO: 217256 - protein, 79 aa, Glycine max
  unsure (1)..(79): unsure at all Xaa locations
  Clone ID: PAT_MRT3847_38209C.1.pep
MSCCGDNCGCXNSCKCGNSCGGCKMXPDLSYSESNTTHTXVTGVAPVNAQFEGAEKGVLAENDGCKCGRNCSCKRCTCK

SEQ ID NO: 217257 - protein, 55 aa, Glycine max
  unsure (1)..(55): unsure at all Xaa locations
  Clone ID: PAT_MRT3847_3820C.1.pep
LEEGEEVNDHLEQMGHNIGIRLIDEIXAKSNVSRRNEFRETTDVIAKAGFKMLLG

SEQ ID NO: 217258 - protein, 62 aa, Glycine max
  unsure (1)..(62): unsure at all Xaa locations
  Clone ID: PAT_MRT3847_38210C.1.pep
MXXSRXXXXXXMKPXXAXXNELTXXXPXMMVGXXXXWACISXXMXKVAEGFPLHPLRXVXNK

SEQ ID NO: 217259 - protein, 88 aa, Glycine max
  Clone ID: PAT_MRT3847_38211C.1.pep
GKRLEGYLTLLHCWIYEHFPNVYDCVTNDAYDETFPRACRWLTTKTYMKGLPIALYRTRLDALTITDVCWMPYGDHRGVRGFDLSSCF

SEQ ID NO: 217260 - protein, 231 aa, Glycine max
  unsure (1)..(231): unsure at all Xaa locations
  Clone ID: PAT_MRT3847_38212C.1.pep
MRKLWNSLSLLARRRSTFSFSKSYSSDAPFNRCTKTHGLLIRPNNKFATTPFRNMETLVQKSSPIPSRQRKIMEKSQLDEAFESAETTEEMLKVFSNMEGVFDERELGLASLKIGLKLDHEGEDPEKALSFANRALKALEKDNNNNNFPSSLPVAMCLQLLGSVSFSLKRFSDSLRYLNRANRVLGRLQDEGGVSVDDVRPVLHAVQLELSNVKNAVGRTEEALENLXKCL

SEQ ID NO: 217261 - protein, 61 aa, Glycine max
  Clone ID: PAT_MRT3847_38213C.1.pep
RVSTKQFCSRYRTVHYLKEEKTHGGPGMLSYPTIRTCLIELTYIYIIQYFIYIHSRDLLYF

SEQ ID NO: 217262 - protein, 83 aa, Glycine max
  Clone ID: PAT_MRT3847_38214C.1.pep
ESSTTFFKLVPICNPGSKRPWIHFSKLKDGDCMRSCTRTSWHLILGRLKNTPGLKHQIKYIIAKKEASTTISSQLIDTGGGAR

SEQ ID NO: 217263 - protein, 91 aa, Glycine max
  Clone ID: PAT_MRT3847_38215C.1.pep
ACLAIRFEFQLSTPSLNLFRITFFWHFWTTCDLSSKTHDEQMSTQDVTQSTYFYSNPTFDGVFSPFKVAHKGNAIIGKPKAFCRLHTNPSL

SEQ ID NO: 217264 - protein, 220 aa, Glycine max
  unsure (1)..(220): unsure at all Xaa locations
  Clone ID: PAT_MRT3847_38216C.1.pep
MGNILNLNNSKTRRNDSHGVLQGESCKRQRLSPNSCEDNPRLIPSLPDEISIQILARVPRIYYLNLKLVCRAWKETFVSSELFCVRKELGSMEEWLYILTKVNDDKLLWYALDPLSRRWQKLPPMPKVGFEDETKKGLISFPLRMWSMMGSSIRIVDVIMSWLGRRDALDWMPFCGCSIGAVDGCIYALGGFSRASAMKYVWQYDPIXNSWAEASPMSVG

SEQ ID NO: 217265 - protein, 51 aa, Glycine max
  Clone ID: PAT_MRT3847_38217C.1.pep
NLAGDMSAVRIANTIAMFRSQRIGMVQTQDQYIFCYNAIIDELEDLVSQQQ

SEQ ID NO: 217266 - protein, 65 aa, Glycine max
  Clone ID: PAT_MRT3847_38218C.1.pep
SHQPFIFDPTPCVLQPHSLFFKLFNFPFFFNPWPFHFYHGSFFIPLLFPLENGLIFLFPSLVLIN

SEQ ID NO: 217267 - protein, 173 aa, Glycine max
  Clone ID: PAT_MRT3847_38219C.1.pep
FVQGLASIDGVHKRAPWLNPLIEMAFIKSFIQGFLPGIALKLFLIFLPTILMIMSKFEGFGSISSLERRSASRYYLFNFVNIFLGNILTGTAFQQLSSFIHQPADQYPVTIGTAIPLKASFFITYIMVDGWASIAAEVLMLKPLIVYHLKNFFLVKTEKDREEAMDPGSIGFN

SEQ ID NO: 217268 - protein, 303 aa, Glycine max
  Clone ID: PAT_MRT3847_3821C.1.pep
MEFLDEDARPRFVFQSGAAARSSEPPHPIHKPTKPFLFATVSLSSLFLTLSLFFLEAEPFKSLLFWLALSLLVGPFAPPSITGGDVRVGRGEVVNFPDPEPEPDEDASRKSSQRRSRQRRAEEASAAVGPVVSVSAAEKRKESSGIEKRATVVEEEKGWSEEDVEVLKKQMVKNPVGKPGRWEAIAAAFGGRHGVDSVIKKAKELGEKRVDDSESYALFLKKRKALDKRVVEENADEGEKVVDNGWSSAEDIALLNALKAFPKEVSMRWEKVAAAVPGRSKAACMKRFAELKKGFRTAKAAAE

SEQ ID NO: 217269 - protein, 103 aa, Glycine max
  unsure (1)..(103): unsure at all Xaa locations
  Clone ID: PAT_MRT3847_38220C.1.pep
GDHPNGCWGYHDSGPIFHDGTXNWSRCKNTSNDHSLFLEIPGCYTRXHTPAKQVITPVKKNTMPSPTADCSTNASSKDSCPRCQHGFFCSDHGSXSKPGNIIG

SEQ ID NO: 217270 - protein, 153 aa, Glycine max
  Clone ID: PAT_MRT3847_38221C.1.pep
GAGAATVTVEHAKANDGSGPSSGNQSHGQGHVHVHGPWLPFSSPANESPPRHHNIYRQYPPHYYAPPPPPPPPPTTPAVHTVMSYHTAHPSSSYGTAYYTSPQPYSYAHVVRPGNEMEPPPPYTYERESYASSQPSDSFELFSDENPNACSVM

SEQ ID NO: 217271 - protein, 78 aa, Glycine max
  Clone ID: PAT_MRT3847_38222C.1.pep
AVMLLNPTKICLVEERWKHNMIITLGKGQDTEEDQVFRMSINTMRMKMTKFMEIGLVRTVPSEKSIITKRRHQNISRD

SEQ ID NO: 217272 - protein, 318 aa, Glycine max
  Clone ID: PAT_MRT3847_38223C.1.pep
SRGRPTRPQFLAAEKRRPDQFTVLVRNIPPDPDESVSELVEHFFLVNHPDNYLTHQVVYNANKLAKLVKKKKKLQNWLVYYQNKVERTSYGCEKTTEVLGLCGNKVDAIDHHNTEIDKLSKEIALERDNVSNDPKSIMPAAFVSFKTRWGAAVCAQTQQTRNPTMWLTEWAPEPRDIYWSNLAIPYVSLTVRRLIMAVAFFFLTFFFMIPIAIVQGLASIEGIRKRAPWLNPLIDIPFIKSFIQGFLPGIALKLFLIFLPTILMIMSKFEGFGSISSLERRSASRYYLFNFVNIFLGNILTGTAFEQLDSFIHQPANE

SEQ ID NO: 217273 - protein, 249 aa, Glycine max
  unsure (1)..(249): unsure at all Xaa locations
  Clone ID: PAT_MRT3847_38224C.1.pep
AAEVLMLKPLIVYHLKNFFLVKTEKDREEAMDPGSIGFNTGEPRIQLYFLLGLVYAAVTPAVLPFITVFFGLAYLVFRHQIINVYNQEYESGAAFWPDVHFRIVMALIVSQIVLMGLLTTKKAASSTPFLIVLPILTIWFHRYCKGXRFESAFVKFPLQEAMMKDTLERTTEPNLNLKGYLQNAYVHPVFKDSMDDDDDEEDRLSIDLETESVTVRTKRQSRRNTPLPSKNNDASSPSLSDGIGNHPEP

SEQ ID NO: 217274 - protein, 68 aa, Glycine max
  Clone ID: PAT_MRT3847_38225C.1.pep
ILRERKRESEWETHSLISCPHLHTAHHITKSRFLISRDRLSYTLTCQSACPSNMIMIFVNLRPVSDSL

SEQ ID NO: 217275 - protein, 101 aa, Glycine max
  Clone ID: PAT_MRT3847_38226C.1.pep
MKFGKRLKQQIQESLPEWRDKYLSYKELKKLVRLISAAPPTLLNGSLEFGKTEAEFVYLLNNEIDKFNGFFMEKEEDFIIRHMVMFYSLNSIVVLKFLTLT

SEQ ID NO: 217276 - protein, 110 aa, Glycine max
  Clone ID: PAT_MRT3847_38227C.1.pep
KVVFVEKRGDQKKGGRGIQGCPLVQIFHLSFLGKKRHPLKGFAFRGQGFFKINPLPRGSFFLQTKFVLLKGFVFMISKTVTHFFREGGFMDKKFSEAGGKKKFLKCGNYF

SEQ ID NO: 217277 - protein, 40 aa, Glycine max
  Clone ID: PAT_MRT3847_38228C.1.pep
FAGNCSFPMQKTNALPTIEVNIIWEGTQRDTPFCILIPHF

SEQ ID NO: 217278 - protein, 93 aa, Glycine max
  Clone ID: PAT_MRT3847_38229C.1.pep
LRPLLLGGDLSISFPVLIPISVTLARPLAVLPSASHPDLYDDFHGLYHSHASSFARLMHGRSAPLLLHVCLLSLFAHGRALSINLCVDLVSVR

SEQ ID NO: 217279 - protein, 129 aa, Glycine max
  unsure (1)..(129): unsure at all Xaa locations
  Clone ID: PAT_MRT3847_3822C.1.pep
KNQGSVHELPDDSKIKVFAPDLIGKIESFILTFPLLMKRAKKKSSGAPNQNQLDTPFQQIQWTFXKKVVKLKELPKKKKNWKKNFWPPKPEDIQVLLGLIYVNPLSRVLRMPRMTKNPLFWCEKKILSN

SEQ ID NO: 217280 - protein, 104 aa, Glycine max
  unsure (1)..(104): unsure at all Xaa locations
  Clone ID: PAT_MRT3847_38230C.1.pep
MGWERTVKFDVFXLDEEGKKWVELTDLGERVLFLGDDCAFSASAKDLNLGRGNCVXXRDDGLGFNRVLNGMGVFRLDDGKISPLSECAGFSELFCPPPDWVGLQ

SEQ ID NO: 217281 - protein, 68 aa, Glycine max
  Clone ID: PAT_MRT3847_38231C.1.pep
TNLSFSLLPCSFSLYNSISSSILWSMQIHFKYLITRTCLWFNGLLLRDPLLFELLRESMVEDAGYMFS

SEQ ID NO: 217282 - protein, 59 aa, Glycine max
  Clone ID: PAT_MRT3847_38232C.1.pep
TPSAAGPAMYSSKKSFENGSGVTLRNPRYLAPFVYCTIAARSTCSRNVALVRLITGTRI

SEQ ID NO: 217283 - protein, 95 aa, Glycine max
  Clone ID: PAT_MRT3847_38233C.1.pep
RHKGSTMGNIPSGNYSERFPLDDSSVAVLLKTNSLKGSDEEVMETLECRVLLIWKDNQRTRIDQNQLQQQARTRVGPSQSLITHQAMKKRTFIFR

SEQ ID NO: 217284 - protein, 96 aa, Glycine max
  Clone ID: PAT_MRT3847_38234C.1.pep
MYEEANQVATDAVGSIRTVASFCAEPKVMEMYRKKCSGPEKQGVRLGLVSGAGLGFSFVVLYCTNAFCFYIGSILVQHGKATFGEVFKVCDYNGPP

SEQ ID NO: 217285 - protein, 38 aa, Glycine max
  Clone ID: PAT_MRT3847_38235C.1.pep
GLFPGISPFDWRWSLLTTRLLWSPRPVSDAWHPESGRY

SEQ ID NO: 217286 - protein, 129 aa, Glycine max
  Clone ID: PAT_MRT3847_38236C.1.pep
MRSRGSQNRLSGDSFGSRVSALMLAMIATMATDYVAGRLWQDAESRAYFIEELEKRTGQGQSAVSVDDTLKVTACREQQKKLSVLEMELAAARQEGFVPKRLPGNHGKHPTKKELLVVGVMTTFGRKKN

SEQ ID NO: 217287 - protein, 97 aa, Glycine max
  unsure (1)..(97): unsure at all Xaa locations
  Clone ID: PAT_MRT3847_38237C.1.pep
MSRGRSDGSXKKRLVASICVVATFLGFLYVYGGSIFGSQNSGSSTLEYGRSLKRLGSSYLGAEDDTDGKQDESSSSFRQGDGEDNIVPKSFPVCDDR

SEQ ID NO: 217288 - protein, 63 aa, Glycine max
  Clone ID: PAT_MRT3847_38238C.1.pep
MSRGSDGSQKKRLVAAICVVAIFLGFLYVYGGSIFGSQNSGSSALEYGRSLKRLGSSYLGAEM

SEQ ID NO: 217289 - protein, 60 aa, Glycine max
  Clone ID: PAT_MRT3847_38239C.1.pep
SATFDGQLLLDQAAKMSSALSYCTRLLLCQYAHLVIIGWRCAKRICTFNRLYQTVLVMLS

SEQ ID NO: 217290 - protein, 54 aa, Glycine max
  Clone ID: PAT_MRT3847_3823C.1.pep
SCTKYTAHLIHCVRGLCSYTSLDAWRDHTILDRKANVYTLSIWGVTYYLGEIWV

SEQ ID NO: 217291 - protein, 621 aa, Glycine max
  unsure (1)..(621): unsure at all Xaa locations
  Clone ID: PAT_MRT3847_38240C.1.pep
MSRGRSDGSQKKRLVASICVVATFLGFLYVYGGSIFGSQNSGSSTLEYGRSLKRLGSSYLGAEDDTDGKQDESSSSFRQGDGEDNIVPKSFPVCDDRHSELIPCLDRHLIYQMRMKLDLSVMEHYERHCPPAERRYNCLIPPPSGYKVPIKWPQSRDEVWKANIPHTHLAHEKSDQNWMVVKGEKIVFPGGGTHFHYGADKYIASIADMLNFSNNNLNNEGRLRTVLDVGCGVASFGAYLVSSDIIAMSLAPNDVHXNQIQFALERGIPAYLGVLGTKRLPYPSRSFEFAHCSRCRIDWLQRDGLLLLELDRLLRPGGYFAYSSPEAYAQDEEDLRIWKEMSDLVGRMCWKVAAKRNQTVVWQKPPTNDCYMEREPGTRPPLCQSDDDSDAVWGVNMKACITPYSDHDNRAKGSGLAPWPARLTSPPPRLADFGYSNDMFEKDTELWQRRVEKYWDLLSPKITSNTLRNIMDMKANMGSFAAALRDKKVWVMNVVPQDGPNTLKLIYDRGLIGTTHDWCEAFSTYPRTYDLLHAWTVFSDIENKGCSKEDLLIEMDRMLRPTGFAIIRDKQSVIDFIKNYLSALHWEAIDSSSNSVQDGDEVVLIIQKKMWLTSESFRDTE

SEQ ID NO: 217292 - protein, 62 aa, Glycine max
  Clone ID: PAT_MRT3847_38241C.1.pep
HSTADRMQLYDVTKPKFICNTKRHSTYKDQQKGRETPFFLKGENIPLFMENPMNQMSFLLAA

SEQ ID NO: 217293 - protein, 620 aa, Glycine max
  Clone ID: PAT_MRT3847_38242C.1.pep
MSRGSDGSQKKRLVAAICVVAIFLGFLYVYGGSIFGSQNSGSSALEYGRSLKRLGSSYLGAEDDTDGKQDESSSSFRQGDGEDNIVPKSFPVCDDRHSELIPCLDRHLIYQMRMKLDLSVMEHYERHCPPAERRYNCLIPPPSGYKVPIKWPQSRDEVWKANIPHTHLAHEKSDQNWMTVKAEKIVFPGGGTHFHYGADKYIASIANMLNFSNNNLNNEGRLRTVLDVGCGVASFGAYLLSSDIIAMSLAPNDVHQNQIQFALERGIPAYLGVLGTKRLPYPSRSFELAHCSRCRIDWLQRDGILLLELDRLLRPGGYFAYSSPEAYAQDEEDLRIWKEMSDLVGRMCWKIAAKRNQTVVWQKPPTNDCYMEREPGSRPPLCQSDDDPDAIWGVNMEACITPYSDHDNRAKGSGLAPWPARLTSPPPRLADFGYSSDMFEKDMELWQRRVEKYWDLLSSKITSNTLRNIMDMKANMGSFAAALRDKDVWVMNVVPQDGPNTLKLIYDRGLIGTTHDWCEAFSTYPRTYDLLHAWTVLSDIEQKGCSPEDLLIEMDRMLRPTGFVIIRDKQPVIDFIKKYLSALHWEAIDSSSDSVQDGDEVVFIIQKKMWLTSESFRDTE

SEQ ID NO: 217294 - protein, 47 aa, Glycine max
  Clone ID: PAT_MRT3847_38243C.1.pep
AGCQLMKKRLLNVDQVKAWEKIFVVENILEPRPKGEATARSTFATKT

SEQ ID NO: 217295 - protein, 49 aa, Glycine max
  unsure (1)..(49): unsure at all Xaa locations
  Clone ID: PAT_MRT3847_38244C.1.pep
VIKKKWLRIKLCTGHSRFEGENFPYKIHPRGVVXGEYKKKKIIKKKRPL

SEQ ID NO: 217296 - protein, 65 aa, Glycine max
  Clone ID: PAT_MRT3847_38245C.1.pep
AIASWFQESYNIFLLLCVRVLKERKSLSVLVTDFANHGSFPFLSNLLYTLLFDIRTSVSELNFFC

SEQ ID NO: 217297 - protein, 59 aa, Glycine max
  Clone ID: PAT_MRT3847_38246C.1.pep
TPALSFGIIKRPKWTLLAGPKNLLSYLRFHLKKKGFRTRISLFLPVCFQKFSTPIGGLG

SEQ ID NO: 217298 - protein, 160 aa, Glycine max
  Clone ID: PAT_MRT3847_38247C.1.pep
LPLPYIFQFAAMKFSVTSRIAILASVAYSQGATSTTTATGSTTGNATPTTSGAGTTHTVAVGGTGNRFEPHNTNVEVGDVVILQFRTNTHNILQSDTQGGCTKSTNPAVKQFPAYGLAAQGQTWTYTVAPLTPTAEGIWIYCAPHCKGGMTAGLLLVTQL

SEQ ID NO: 217299 - protein, 79 aa, Glycine max
  Clone ID: PAT_MRT3847_38248C.1.pep
LTCETEWFLTLINLLLEPKSSKRNCLHNLLLNHLGINHSEPALNWPILPWFNWETLNLEFTLLNDLTLRHYLIQVSFTC

SEQ ID NO: 217300 - protein, 70 aa, Glycine max
  Clone ID: PAT_MRT3847_38249C.1.pep
QVLLVLEQTCKRFPSVNFLKVEIEDHPYLAKSEGVNCIPAFKIYKNGSRIKEIPGNNHDLLEKLVKLYSS

SEQ ID NO: 217301 - protein, 491 aa, Glycine max
  Clone ID: PAT_MRT3847_3824C.1.pep
MPSKEDSPLVEAKLPLLEAHPLTDEREQDQSFPRRFWLESKRLWHIVGPSIFSRIASYSMLVITQAFAGHLGDLELAAISIANNVVVGFDFGLLLGMASALETLCGQAFGAKKYYMLGVYMQRSWIVLFICCIFLLPLYLFASPVLKLLGQPEELAELSGAVSIWMIPVHFAFAFQFPLQRFLQCQLKTAPIAWVSLVALVVHVFVSWLFVFKLQFGVVGAAATINFSWWVLTLGLFGYVVWGGCPHTWSGFSVEAFSGLWEFLKLSAAAGVMLCLENWYYKILIVMTGNLENAEIAVDALSICMTINSLELMIPLAFFAATGVRVANELGAGNGKGAKFATMVSVVTSVIIGLFFWMLILILHDKFGYIFSNSKAVLDEVNNLSLLLAFTILLNSVQPVLSGVAVGSGWQSYVAYINLGCYYIIGVPLGILMGWVFNQGVMGIWAGMIFGGTATQTLILSLITIRCDWDKEAERAKLHLTKWTDPKQELN

SEQ ID NO: 217302 - protein, 86 aa, Glycine max
  Clone ID: PAT_MRT3847_38250C.1.pep
LAPLIPKELVQIHYSYHHLSLASSAFPLVWTSPGQLIPGPMLSLSGLLEVCPQFPFPPCSPSIMYPFILFNWLLNSQQSESAVSTP

SEQ ID NO: 217303 - protein, 99 aa, Glycine max
  unsure (1)..(99): unsure at all Xaa locations
  Clone ID: PAT_MRT3847_38251C.1.pep
EHGTVLGDKITLLCATHLCIFTLKKDFYHFKYIHCTEFSSLDEIAAIFCVASEXEASNKRVGYLCRLYAFELAHRLVPQSSGRGVRLFQTALFTSREEN

SEQ ID NO: 217304 - protein, 173 aa, Glycine max
  unsure (1)..(173): unsure at all Xaa locations
  Clone ID: PAT_MRT3847_38252C.1.pep
MSFLRPSALYNFLISYPALRWLPCQSWGFLRWPGLDGFFRLFVVVLLWSTLSELRFIPSSSMYPTLRVGDRIIVEKASYYIRSPAIHDIVTFKDPTQSSGENTDAVFIKRIVAKAXDTVEVNHGALYINGVAQHEDFIAEPPAYALQLTHVPNGHVXLDNRNNSYDSHVWGPL

SEQ ID NO: 217305 - protein, 60 aa, Glycine max
  Clone ID: PAT_MRT3847_38253C.1.pep
KLFSKIVLYYLLDYFSLKIDQVLKIIFKTRILQSKKLKQLKDVFFLFFLTRLSNTYFDPV

SEQ ID NO: 217306 - protein, 102 aa, Glycine max
  unsure (1)..(102): unsure at all Xaa locations
  Clone ID: PAT_MRT3847_38254C.1.pep
SLVIKAVVDKCIQQLQESLDADIHDRIMKNRQIQSYIEEAERGITKHETTXTTNLSLRNTXISLQKAKLKIDTYNLEKXKSIXVRTTSYQHDQDESLESTVS

SEQ ID NO: 217307 - protein, 432 aa, Glycine max
  unsure (1)..(432): unsure at all Xaa locations
  Clone ID: PAT_MRT3847_38255C.1.pep
MSFLRPSALYNFLISYPALRWLPSIKPNRGLILHLFVLWCIITFCTMPSLFARNQRFSLATLLLLLELLTGNLRMADAQIGVCYGMLGNNLPSANDVIGLYRSNNIKRMRLYDPNQAALEALRNSGIELILGVPNSDLQGLATNPDTSRQWVQKNVLNFWPSVKIKYVAVGNEVSPVGGSSWEAQYVLPAIQNVYQAIRAQGLHDQIKVSTSIDMTLIGNSFPPSQGSFRGDVRSYLDPIIGYLVYANAPLLVNVYPYFSYTGNPRDISLPYALFTAPNVVVWDGQYGYQNLFDAMLDSVHAAIDNTKIGYVEVVVSESGWPSDGGFAATYDNARVYLDNLVRRANRGSPRRPSKPTETYIFAMFDENQKNPEIEKHFGLFNPNKQKKYPFGFGGKRLXKLLLTTSMQQLPLRVMCKVGILLLKISVIPPIK

SEQ ID NO: 217308 - protein, 130 aa, Glycine max
  Clone ID: PAT_MRT3847_38256C.1.pep
RRAAAVSGGIRRRRVGRAGGVHRRQAFQHGLMVLLPPRNSWRRNGDALRRMRHRFLLRLRRRFHHRLASVDGRENLVAGGDEHRARVSVGDGHVHGSNSGWARHCKPCTLEPSSQTHSQLRSMPNSKFKI

SEQ ID NO: 217309 - protein, 91 aa, Glycine max
  unsure (1)..(91): unsure at all Xaa locations
  Clone ID: PAT_MRT3847_38257C.1.pep
MSRKIESLGVERVISGEGSHGMFGGYLYFSKAPSKEEFLPEXCGSIKALLXYDCLRATRSTFDRGLEARVPFLNKEXMRVAMNIDPQCAMI

SEQ ID NO: 217310 - protein, 85 aa, Glycine max
  Clone ID: PAT_MRT3847_38258C.1.pep
PQSCELILPITVCGPNNGSVMCSSEWSNPTSGHLSFLIDVPPQCTVSDILVGISQDFESAGNTLMPAFSVPQATARSSENAVSSA

SEQ ID NO: 217311 - protein, 107 aa, Glycine max
  Clone ID: PAT_MRT3847_38259C.1.pep
KRSNPLISTPWFDDNLLGSQHKYRATGCTPIPTYKRLLLRLGGKLHHASPGSADFHEPPSWLALIRPPPPLGGSRLRRARLVHPEPQAFRVHPRHRAGPALPKKWAP

SEQ ID NO: 217312 - protein, 98 aa, Glycine max
  unsure (1)..(98): unsure at all Xaa locations
  Clone ID: PAT_MRT3847_3825C.1.pep
YDYNIQNEFTLHXLVLRLRGGTQTFVXTLTCKLLTLKVKSLSTLVNVKVNIQYKEGLPPDQQSMIFSGKQFEDERILSECNIQKDSTLRLVFRVRGGF

SEQ ID NO: 217313 - protein, 53 aa, Glycine max
  Clone ID: PAT_MRT3847_38260C.1.pep
WFLLRRPDGALFKGGRYRTLIALRIPIHTDRCLTAENTLTYDYMRSLPWNANC

SEQ ID NO: 217314 - protein, 87 aa, Glycine max
  Clone ID: PAT_MRT3847_38261C.1.pep
NVVAVVAAHIFKGWFCRPIKIGNKGHSKSHFNRQNHLPWLRRIHMSSLIMNGIITVRLRQPPHGFSLLIFLFLMPHNRRQKPVLLLR

SEQ ID NO: 217315 - protein, 96 aa, Glycine max
  unsure (1)..(96): unsure at all Xaa locations
  Clone ID: PAT_MRT3847_38262C.1.pep
PRVQVLRAAIHATVHTQEDTRVDGIVGGPFLSPFQIXALQIDPNXYKFLYKNLGNKRDLLIEFLLEYNNVPKIVPNVHPIAQSIANAVYIDENIDN

SEQ ID NO: 217316 - protein, 172 aa, Glycine max
  Clone ID: PAT_MRT3847_38263C.1.pep
NFFYLSSETNGIGKYEVNSQPKEAFLPEESKDPEMKLLDLYCGCGAMSTGLCLGGNLSGVNLVTRWAVDLNQHACECLKLNHPETEVRNESAENFLSLLKEWQELCSYFSLVEKKVSHEKYVNLFSEDDDDTRSIEEANSVDDTELNEDDEIFEVSEILAVCYGDPNKKKEQ

SEQ ID NO: 217317 - protein, 130 aa, Glycine max
  unsure (1)..(130): unsure at all Xaa locations
  Clone ID: PAT_MRT3847_38264C.1.pep
MILLKQIGPAQIEALYQYAKFQFECGNYSGAADYLYQYRALCTNSERSLSALWGKLAAEILMQNWDIALEELNRLKEIIDSKNFASPLNQVQSRIWLMHWSLFIFFNHDNGRTXIIDLFNQDKYALPILS

SEQ ID NO: 217318 - protein, 36 aa, Glycine max
  Clone ID: PAT_MRT3847_38265C.1.pep
WSVIQFFERGYWPIALSMNASANVTIHFSCTFMYSP

SEQ ID NO: 217319 - protein, 76 aa, Glycine max
  unsure (1)..(76): unsure at all Xaa locations
  Clone ID: PAT_MRT3847_38266C.1.pep
MGRAHITLHSRSLQLKYSFVHKGLTTFEPGYDVAKSTWDFXALGRSYRGTXSLMAYYLTSNVVIGIQWSLVPMHTA

SEQ ID NO: 217320 - protein, 42 aa, Glycine max
  Clone ID: PAT_MRT3847_38267C.1.pep
PVYLHEIFTRPCSHKTASSIIELTRSSCQMLLVFGTVVYLTQ

SEQ ID NO: 217321 - protein, 75 aa, Glycine max
  Clone ID: PAT_MRT3847_38268C.1.pep
LSRGTPPPGFFLGQKNFSLLGSFLVFEKFGTRTPPLNFGLFPKKGSPRGTTPPFGRGAKFSHSKRPRSVINFFGF

SEQ ID NO: 217322 - protein, 88 aa, Glycine max
  Clone ID: PAT_MRT3847_38269C.1.pep
CCPEPEYWLPKLIRNLLPAKVSSSSGRFFECHSKSQSVSPRKELSSSQKFNAASFSAQKLLSARGDLKKNRRRSFNGDKSTPEHKRWV

SEQ ID NO: 217323 - protein, 110 aa, Glycine max
  unsure (1)..(110): unsure at all Xaa locations
  Clone ID: PAT_MRT3847_3826C.1.pep
MLLMRFELFSTLLFVPLLDGSDVLGITPCTESKQVSMLKTLLNKKLESAVNLCEAGIDHXLAQIASDDNTKRRFDSYSXLQKLCCVDGVPYLILSGDLTQCVQYIHHGIL

SEQ ID NO: 217324 - protein, 216 aa, Glycine max
  Clone ID: PAT_MRT3847_38270C.1.pep
RSFHASGESVVYVSFGSGGTMSYEQMTELAWGLELSEWRFVWVVRAPMEGTADAAFFTTGSDGVDEVAKYLPEGFVSRTRKVGLLVPEWAQQVTILKHRSIGGFLSHCGWGSTLESVTNGIPLIAWPLYAEQRMNATLLAEELGLAVRTTVLPTKKVVRREEIARMVREVLQGDENVKSNGIRERVKEVQRSAVNALSEGGSSYVALSHVAKTIQG

SEQ ID NO: 217325 - protein, 94 aa, Glycine max
  unsure (1)..(94): unsure at all Xaa locations
  Clone ID: PAT_MRT3847_38271C.1.pep
NXHNLKDLSENKVQXEVSXIXKEAWKLLXDXVVTYCGNXVXTVAXXXPADKQXLXNXDQVXIRDFVPSAXAXLLNGERELSGISXSHIAXXIWE

SEQ ID NO: 217326 - protein, 99 aa, Glycine max
  Clone ID: PAT_MRT3847_38273C.1.pep
KPHPFRPGRGVLREILKAQKSPELLIRKLPFQRLVKEIAQDFKTDFRFQKNPVLAFQETPEAFLVGLFEDPNLCAIPVKRVSLMPKGIQLARKIKGEKA

SEQ ID NO: 217327 - protein, 328 aa, Glycine max
  unsure (1)..(328): unsure at all Xaa locations
  Clone ID: PAT_MRT3847_38274C.1.pep
MGTKSLKRRARESQNPPMAAADPPRRKPRSYAKASVVLSAFLVVSVIAPLVLSSNKFRAFQRRVSYETITVVNVFPHDPEAFTQGLVYNGNDTLFESTGLYGKSSVHKVALHTGKLEDVQKMDSSLFGEGLTLLNNRLFQVTWLQKAGFIYNPKXLRKIGAFSEDIXLNGIAWDGWGLATDGKVLFGSDGSSTLYQMIQTDPQTFKAVSKQVVYYKGHEVHNLNELEYINGEVWANVLPTDCIVRISPSDGNVLGWILLQNLRKELIKAGNNDIDVLNGIAWDGEQKRIFVTGKLWPKLYEIKVSPVNKPIEEGIIEQLCLRNPFKFP

SEQ ID NO: 217328 - protein, 79 aa, Glycine max
  unsure (1)..(79): unsure at all Xaa locations
  Clone ID: PAT_MRT3847_38275C.1.pep
AFVVISVIDCLYSIDTEQLLECYKNVILFPLXKKKKKKKKKKKKXXKXXXXXXXXKXXXXXKXXKKKKKKKGGPVLKDP

SEQ ID NO: 217329 - protein, 74 aa, Glycine max
  unsure (1)..(74): unsure at all Xaa locations
  Clone ID: PAT_MRT3847_38276C.1.pep
PSNHTTVPQNTSHDSVINNSXVQDHTPPPLSFNHSLAGTTCAVTCLNTNDLLPTSRRHDRPKTPLYDKQLMSFM

SEQ ID NO: 217330 - protein, 80 aa, Glycine max
  Clone ID: PAT_MRT3847_38277C.1.pep
TVSTTPEAQPLSLPFIPVRIRLKSLNRDQDQGDHHFKAKSLKDAHKTDDHKAEKEDRQNPAANQEGPPPSSEQITQASRH

SEQ ID NO: 217331 - protein, 99 aa, Glycine max
  Clone ID: PAT_MRT3847_38278C.1.pep
TILVYGYYWLYVCIWMLWIGLQVIRVFSLSLCKKKKKKKKKKKKKKKKKKKKKKKKKKKKKKKKKKKKKKKKGAPFKEPKLTYPLLQLKNFFIGYPKLN

SEQ ID NO: 217332 - protein, 87 aa, Glycine max
  Clone ID: PAT_MRT3847_38279C.1.pep
LFLEQKNFSILSTLIQTFTGKKNFGEANPNRNTDSSTTGRGALLPKRKLPMGEITPRKNPAIGEKKNPFSKTKTGLLRAKPNILNSY

SEQ ID NO: 217333 - protein, 100 aa, Glycine max
  Clone ID: PAT_MRT3847_3827C.1.pep
MEFQENGNGEMALSGIPLRASNLYKKMNSELPEDHDDVLHHQPVDDRMSCAINYVLACAIFAYVNSVLLGSDVCVMNEAVISIEQDLKISEVHEEILIGI

SEQ ID NO: 217334 - protein, 82 aa, Glycine max
  unsure (1)..(82): unsure at all Xaa locations
  Clone ID: PAT_MRT3847_38280C.1.pep
FSSSATFPLKVARKQMQLGAFSGRQVYKNVFHALACIFEQKGIHGLXKGLAPSCIKLVPPPGIFFMCFEAFKRILLKNPEED

SEQ ID NO: 217335 - protein, 103 aa, Glycine max
  Clone ID: PAT_MRT3847_38281C.1.pep
LREDDRRGQQKVGEENFGQKMECYTRPNRSDIHLSAEEEATIEAKTREYFDGVAPQRHTKPQRSDYSAQYVDAFSNAHHSSLTIPELTQFQLLQNDPQEKVGS

SEQ ID NO: 217336 - protein, 171 aa, Glycine max
  Clone ID: PAT_MRT3847_38282C.1.pep
MEFYTRPNRSDIHLSAEEEATIEAKTRDYFDGVAPQRHTKPQRSEYSAQYVDAFSNAHHSSSSSSIPEFMQFQRLQNDPQEKKLVYNGSQVPEEFVETEYYQDLNSVDKHHHTTGTGFIKVEKNGNDFHIEPDNDTGCHHSCKGNPATNDWVPAPSTEVGFNSGKPNRSDN

SEQ ID NO: 217337 - protein, 165 aa, Glycine max
  unsure (1)..(165): unsure at all Xaa locations
  Clone ID: PAT_MRT3847_38283C.1.pep
KVGFAVVKDRDLPNPPPLXPWWSRLKMGRIPSCRPTIVVLSLPALGIAPKGPLDAHAXLLNPPAYFPRAGPSGIFSPSPMPLRRNPPSQGRTTLWLGFRLIWKLEPKTPPPPLVSSRHSFFPLLPWVSLVVISYYHYALGVIWILLFSILILVRNVFFNPPKTQG

SEQ ID NO: 217338 - protein, 281 aa, Glycine max
  Clone ID: PAT_MRT3847_38284C.1.pep
MANRWWTGSVGLENSGHSMKKPDLGFSMNESTVTGNHIGEEDEDRENSDEPREGAIDVATTRRPRGRPPGSRNKPKPPIFVTRDSPNALRSHVMEIAVGADIADCVAQFARRRQRGVSILSGSGTVVNVNLRQPTAPGAVMALHGRFDILSLTGSFLPGPSPPGATGLTIYLAGGQGHVVGGRVVGPLLAAAPVLLMAATFSNATYERLPLEDDDQEQHGGGGGGGSPQEKTGGPGEASSSISVYNNNVPPSLGLPNGQHLNHEAYSSSPWVHSPHARPPF

SEQ ID NO: 217339 - protein, 170 aa, Glycine max
  unsure (1)..(170): unsure at all Xaa locations
  Clone ID: PAT_MRT3847_38285C.1.pep
MECYTRPNRSDIHLSAEEEATIEAKTREYFDGVAPQRHTKPQRSDYSAQYVDAFSNAHHSSLTIPELTQFQLLQNDPQEKKLVYNGSQVPEEFVETEYYQDLNSVDKHHHTTGTGFIKVEKNGNDFHIEPDNDTGCHHSCKGNPATNDWVPSPSNEVGFNSXTKPNRSDN

SEQ ID NO: 217340 - protein, 736 aa, Glycine max
  unsure (1)..(736): unsure at all Xaa locations
  Clone ID: PAT_MRT3847_38286C.1.pep
MASSGAATAALQSDASSRMEGWLYLIRFNRIGLQFSRKRYFVLDGNLLRSFKSVPVSNNQDPVRSAIVDSCIRVMDNGRESVNRKVFFIFTLYNTSNHNDQLKFGASRPEEAARWIQSFHEASLRGAPDGGDDAVGCSKRRWQSFRLSGSSSSISHPNSVDWTLSSADVIAPSPWTLFGXENGRGLFKEAKDRDSSGKKWDDHPAIMAVGVVDGTSEAIFQTLMSLGPSRSEWDFCFYKGNVVEHLDGHTDIIHKQLFSDWLPWGMKRRDLLLRRYWRREDDGTYVILYHSMFHKKCPPQKGYVRACLKSGGYVISPVNKGKQSVVKHMLAIDWKCWRLYLKSSSAHSITIQMLGRVAALRELFKAKLGNCSSSDYSSGELTRNRELHIKEEHIINSDTEIQADENNHDISVGEVDQTQSEHASLVTLNDADDEFYDVPEPSDCDVSENGWMTECRQQKSQDIRHQKLSTAANFVKRLHDLAVQKRGYVDLQEMVREDSITCSYGSTLPQDPTCTLPCSLTETDPYTFLIRGENYLEDRQKVKAKGTLMKMVAADWVRSDKREDDLGGRPGSIAQKYAAQGGPEFFFIVNIQVPGSTTYSLALYYMMNTPVEDAPLLESFIKGDDAFRNSRFKLIPYISKGSWIVKQSVGKKACLVGQALEINYFQGSNYLELGVDIGSSTVARGVVSLVLGYLNHLVIEMAFLIQGNTREELPEFLLGTCRLNHLDASKAVCLTL

SEQ ID NO: 217341 - protein, 94 aa, Glycine max
  Clone ID: PAT_MRT3847_38287C.1.pep
SFISFCPENTVMLQEKLLQHLRWILEFHDLVVDLVNSSLDDLYLISCTCCIPLCQNRKGKLSSNSQFCSPVFSNSCEGGCEIRHPGQVQIYHAS

SEQ ID NO: 217342 - protein, 252 aa, Glycine max
  unsure (1)..(252): unsure at all Xaa locations
  Clone ID: PAT_MRT3847_38288C.1.pep
APSSTLTLSKVSLFLVLLFFVSLSSSYATSRLTHDRVNNPPKSRAEKLIRSLNLSPKDPVNIVKGDDLANGFVPGNIVEKKFSFLGDSGPSIEDLGHHAGYYSLPNSKAARMFYFFFESRSNKDDPVVIWLTGGPGCGGELALFYENGPFHIANNLSLVWNDFGWDQASNILFVDQPTGTGFSYSSDASDIRNDEVGISNDLYDFLQEFFKAHPEFVKNDFYITGESYAGHYVPALASRVXQGNKENEGIHI

SEQ ID NO: 217343 - protein, 63 aa, Glycine max
  Clone ID: PAT_MRT3847_38289C.1.pep
KIQFVCPAFSPLNIKKKGLKGGQAKFGGKKKWKFFDYPSGQGLHLNKFNLFFIKARAQIKLIL

SEQ ID NO: 217344 - protein, 59 aa, Glycine max
  unsure (1)..(59): unsure at all Xaa locations
  Clone ID: PAT_MRT3847_3828C.1.pep
XXTSPPCISXLMVRVTFNXPSITPVSMSSSYRELDFEWXSLWSPRAARAEFRAYVRVXX

SEQ ID NO: 217345 - protein, 78 aa, Glycine max
  Clone ID: PAT_MRT3847_38290C.1.pep
KTKNLSKPKPNHDGFKENKERSENFWFFAVVRRGLKRTMRITHRDTRVTKREGPILLLCTTQNPYSTRIVIYLLADFS

SEQ ID NO: 217346 - protein, 86 aa, Glycine max
  Clone ID: PAT_MRT3847_38291C.1.pep
THVPELKTGATGATRLWGPLPSYDRARRPCLRGRLHRNLCHWGAYLWRSRPCCRRFPFLRLNCCATCPCVCPPPIAASGPHRQELL

SEQ ID NO: 217347 - protein, 61 aa, Glycine max
  Clone ID: PAT_MRT3847_38292C.1.pep
SRWVYSSIYWVAPLKELIHSSDPMLYLFFSETPHCAPHFGHPFNWLSAIRPSTGPSPMQNE

SEQ ID NO: 217348 - protein, 47 aa, Glycine max
  Clone ID: PAT_MRT3847_38293C.1.pep
STGNCQIFYKCGILRMIWNVCFHSLDRLFNSIKETRHDPSEECAVPI

SEQ ID NO: 217349 - protein, 85 aa, Glycine max
  Clone ID: PAT_MRT3847_38294C.1.pep
DLPEKVVQISSEKAIETAKLLALKKGFLVGKSSGGAAAAAVKITKRPENAGKPLVAVFPSFGERYLSSGLFEPVKRKTKSLVFDP

SEQ ID NO: 217350 - protein, 76 aa, Glycine max
  Clone ID: PAT_MRT3847_38295C.1.pep
CFYERRDAHTYFGQKVTLTKKMWFLKQGPAVILPNKPELFCGKETNSPHSLDRCILHFSQSCALKFLLLTLTVDKL

SEQ ID NO: 217351 - protein, 38 aa, Glycine max
  Clone ID: PAT_MRT3847_38296C.1.pep
ADPMQPNLKNLLLTSQMYYTPANHMCLLRIRNRSGRVG

SEQ ID NO: 217352 - protein, 40 aa, Glycine max
  Clone ID: PAT_MRT3847_38297C.1.pep
MAFHLSPLPGRARRSNLSVCSLTARISNTSATLSQPLNDW

SEQ ID NO: 217353 - protein, 47 aa, Glycine max
  Clone ID: PAT_MRT3847_38298C.1.pep
SQRLIAEPDAGRGHFRSIEIYLNLTVTGLLIHRTIKIVVLTPSDSEI

SEQ ID NO: 217354 - protein, 90 aa, Glycine max
  unsure (1)..(90): unsure at all Xaa locations
  Clone ID: PAT_MRT3847_38299C.1.pep
MAQKLEVGESIPEGQATNFIASEIVIIVKFAFLILYILYVIXFIFCNISFLFFLSVLYLFYFFIIFYDLIFYFIFFYLILYIITYYLPFF

SEQ ID NO: 217355 - protein, 128 aa, Glycine max
  unsure (1)..(128): unsure at all Xaa locations
  Clone ID: PAT_MRT3847_3829C.1.pep
MVSSLSKLPTLSCESCQFGKHVQSSFPYCVICRDRFPFVLVHSDVWGLCHGMPTLESRYFVTFIEDYSXQTWLFLMVNRSELFXIFTSFYQEIKNNLXVLIHTLQSDTTHEYLSQQFQSFMASNVQVP

SEQ ID NO: 217356 - protein, 200 aa, Glycine max
  unsure (1)..(200): unsure at all Xaa locations
  Clone ID: PAT_MRT3847_382C.1.pep
MFTCIACTKQAAKEKEEEGESGTPSTNKEAVKSLSAQLKDMALKFSCAYKQCKPCTGSSTYKKGQRPYPDFDTISEGVPYPYIGRAISTSTPAWDFTSSNFLGARSDQRFMGGFSGDRTPRGPQSAPACDVVVEDEDETKEWMAQVXTRVHITFVSLPNGGNDLKRIRFSREIFDKWQAQKWWGENYDRIMELYNVQRFN

SEQ ID NO: 217357 - protein, 44 aa, Glycine max
  Clone ID: PAT_MRT3847_38300C.1.pep
NQLKVFDIFLGISQNFEMVGNTFRPAFFVPRAPASFFENAESSA

SEQ ID NO: 217358 - protein, 48 aa, Glycine max
  Clone ID: PAT_MRT3847_38301C.1.pep
MGARCSKFSFCWFHSHLKPSVLESSDQENGEKGERKLWPSFGEFSLEQ

SEQ ID NO: 217359 - protein, 69 aa, Glycine max
  Clone ID: PAT_MRT3847_38302C.1.pep
KCGIFYMQGKRVFICFVFEDLIGQFYTVCYRTYWKCMFINGHMSIVLEVHVWRIDSRCIKENRVIFSLN

SEQ ID NO: 217360 - protein, 59 aa, Glycine max
  Clone ID: PAT_MRT3847_38303C.1.pep
IRCVCMQILYCVYILFLKALGKIRKINDVCQRGLSWTLTLYTLLPIYLTIHNIHTTTSF

SEQ ID NO: 217361 - protein, 73 aa, Glycine max
  unsure (1)..(73): unsure at all Xaa locations
  Clone ID: PAT_MRT3847_38304C.1.pep
KPGVAFKAGLTAPPGPCKGQPGTNFSGGKGPSPNKIXTPKETGVKVLESPPQIGTATLKVFKQKGLGQKIGVL

SEQ ID NO: 217362 - protein, 77 aa, Glycine max
  Clone ID: PAT_MRT3847_38305C.1.pep
IPIWSSRKLCPRRGSTHIFCSLMILFMPEVVPDSAPPPPPPLLLLLSITSHETLAGTETIFPLQQNRLEREAEFLVI

SEQ ID NO: 217363 - protein, 380 aa, Glycine max
  unsure (1)..(380): unsure at all Xaa locations
  Clone ID: PAT_MRT3847_38306C.1.pep
MPPSYCVKERKPCVRWVEKYFKDCLCNLKDEISFSFGLTSLVFWGVAEIPQIITIFRTKKSHGVSLVFLLTWVAGDICNLTGCILEPATLPTQYYTALLYTITTIVLLLLIVYYDYISRWYKHRQKVNLVRDHEEEKKPLKPPKPTNKSGIPIPNGSPKAAPRQEYYYMSARSLAGSGTPPWGIYMRAAKSGPSAIESIDDSSFDDEAPPASSNNSASQAMPIPRSVAGSYGTYPAAANNLPLKGNALRQGYIGYGGRKLLQDYEKHSTFGQWLGWLMAAIYISGRVPQXIWLNIKRSSVEGLNPFMFVFALVANVTYVGSILVRTTEWESIKANMPWLLDAVICVALDIFIISQYIYYRYFRRREAKDDYEEAGKVAAS

SEQ ID NO: 217364 - protein, 94 aa, Glycine max
  Clone ID: PAT_MRT3847_38307C.1.pep
GKSFEKNACHKYLDPKKSCHKRQLSLRKPVESVKWFRPNKIKIIGTRKWVFVLKKASGKGVFPKNLETHILFSKLGAVNFPTTTPGISHLGGGG

SEQ ID NO: 217365 - protein, 76 aa, Glycine max
  unsure (1)..(76): unsure at all Xaa locations
  Clone ID: PAT_MRT3847_38308C.1.pep
KXHSXQVNRXKDFEXXDRXXFRTNLGTFKFIETXXXXSSKXGTSXIDXFLDYXLIRDXXXSLVLRHSSFXXXLXNX

SEQ ID NO: 217366 - protein, 74 aa, Glycine max
  Clone ID: PAT_MRT3847_38309C.1.pep
KKVISIKQNLCFSHENYARCRIYIDYKKSDILNDMGTFLIELLLFKSVWTVFVKPLSTRTLRSQDLCRCMLRPS

SEQ ID NO: 217367 - protein, 43 aa, Glycine max
  Clone ID: PAT_MRT3847_3830C.1.pep
NTTKSLFIYKSNNLTAGLILIIINNLFSFASSSASLFSSTPHS

SEQ ID NO: 217368 - protein, 62 aa, Glycine max
  Clone ID: PAT_MRT3847_38310C.1.pep
LLGTCTYIYIYKRVVLEPRGSFVSISSSLSLTHPCCAACLMQYICTYNNVCIYTYICIYIIC

SEQ ID NO: 217369 - protein, 72 aa, Glycine max
  Clone ID: PAT_MRT3847_38311C.1.pep
QRFYFQTESKVPSTCLPRESSVALILGLNERVLTTPHRAADRKPLEGTNCLHFSAPFETVDRLPSLPKEKVA

SEQ ID NO: 217370 - protein, 207 aa, Glycine max
  Clone ID: PAT_MRT3847_38312C.1.pep
MSLNVDDDELVSEMDEAPSFASSLPVPNVQEMVRNNPLQVPERYARSQEELEKVNHMPHLSSEVPVIDLALLSNGNKEELLKLDVACKEWGFFQIVNHGVQEHLQKMKDASSEFFKLPIEEKNKYASASNDTHGYGQAYVVSEEQTLDWSDALMLITYPTRYRKLQFWPKTPEGFMDIIDAYASEVRRVGEELISSLSVIMGMQKHV

SEQ ID NO: 217371 - protein, 392 aa, Glycine max
  Clone ID: PAT_MRT3847_38313C.1.pep
LETPMEDPFSNLPDEILSCIVSFLPLETSLISTRWRDLWNQALVRHGSTQDDVASVVAGFLSRFEELDPLKHPRKLHFHFSDQDTALFASIATNSKLLLDFPAGIKDLKKQYELKFILNKHHITHNTVPPTFLVKTLYLKSVSHLTSELISSIVSNLEHLEKLVIVECTGLQSLFIESESKLHELTILDCPQLKSLHLRTSKLKSFRLDGPLPKIWPESHFNLSHAMLDFRLGPSCADFKAQDFNQTLLTIKNCEALTLCEWTFQELIWPSISPSGNFIFYKIRELWWIHNHRGENSMDTLVSFLKLCPALEQLFVTNDSTSYSAPRSNSYCLTQETEYSTKLEHLKRIKFMGFTNRVDEISVAKKLIELVKGEPPKIETSDESCLNVVIVQ

SEQ ID NO: 217372 - protein, 232 aa, Glycine max
  Clone ID: PAT_MRT3847_38314C.1.pep
KPALISTRWRDLWNQVLVRHGTTQDITGVVAGFLSRFEELDPLKHPRKLQFHFADQDTALFASIATNSKLLLDFPGGGNKDLKKQYELKFMFNKDLNTVPPTFLVKTLYLKSVSHLTSELVSSIVSNLEHLEKLMIVECTGLQSLFIESESKLHKLTILDCPQLKSLHLRTSKLKRFRLHGPLPKIWPESHFNLSHAMLDFRLGPSCADFKAQDFNQTLLTIKNCEALTLCE

SEQ ID NO: 217373 - protein, 77 aa, Glycine max
  unsure (1)..(77): unsure at all Xaa locations
  Clone ID: PAT_MRT3847_38315C.1.pep
NIFIKTKKVLELDLCSWFWLSSVYYSSLSFLWSTALFFXLVLIGFQENNYGFFMTTHNYSPGNQSTPKRSTEQYTKE

SEQ ID NO: 217374 - protein, 106 aa, Glycine max
  unsure (1)..(106): unsure at all Xaa locations
  Clone ID: PAT_MRT3847_38316C.1.pep
MGDASSGMEHHDDCRLKVTXLKAKRTHPAIFYKIEEHQKQGIVEKLGEPAHGCXDYTGSLPADECQGAVYDFEHLTEGNVPKSRIFFIECSSDTXTVRSRMIYASS

SEQ ID NO: 217375 - protein, 133 aa, Glycine max
  unsure (1)..(133): unsure at all Xaa locations
  Clone ID: PAT_MRT3847_38317C.1.pep
PGXNELIEQITENDRQXXAPAPERAIEAIPTVKIESAHLKENSQCPVCQEEFEVGGEARELQCKHIYHSDCIVPWLRLHNSCPVCRHEVPVPSSSSSSEGDECVGDGARGYSPSNSPTLFSRANRRQPSCCIL

SEQ ID NO: 217376 - protein, 50 aa, Glycine max
  unsure (1)..(50): unsure at all Xaa locations
  Clone ID: PAT_MRT3847_38318C.1.pep
PIDPPLPHGDTQIHQRYSCEAKSTDGPNGDKQIKLSTLDXYGDTRKAELS

SEQ ID NO: 217377 - protein, 119 aa, Glycine max
  Clone ID: PAT_MRT3847_38319C.1.pep
KGKGGFLKAVKGIARAITDMKTAPFKNAETWKELSRKMFFLGSPMLVAGSPKFYVYGAAFGFGNPTKVGMMFPPRILCVPFAKSGAKKGGVKLGFFFSSSGGFEYFSSVLEQGLAPLKS

SEQ ID NO: 217378 - protein, 44 aa, Glycine max
  Clone ID: PAT_MRT3847_3831C.1.pep
ILYSFIPLSLFFFFFFFFLVGKFLKKSASLWLIMLWLPIFECET

SEQ ID NO: 217379 - protein, 77 aa, Glycine max
  Clone ID: PAT_MRT3847_38320C.1.pep
MVEEEEKSGKKTKVIGAPTASTTPASNRAVCQVQDCRADLSNAKDYPRRHKVCDIHSKAPMALVGNVMQRFCQQCSR

SEQ ID NO: 217380 - protein, 48 aa, Glycine max
  Clone ID: PAT_MRT3847_38321C.1.pep
IFTHPRCIAKACGKIFFLPMSLLGSLNERISVSNCARASANASSDARK

SEQ ID NO: 217381 - protein, 35 aa, Glycine max
  Clone ID: PAT_MRT3847_38322C.1.pep
SKCLLMCLSGQSGHAHSSKDSFKTSEGSYGIVDFE

SEQ ID NO: 217382 - protein, 51 aa, Glycine max
  Clone ID: PAT_MRT3847_38323C.1.pep
TKSSRGMDGSRRTPMEGASLSTRHRKRGTLLLLGRAFGYWPILGPMAKNLE

SEQ ID NO: 217383 - protein, 97 aa, Glycine max
  unsure (1)..(97): unsure at all Xaa locations
  Clone ID: PAT_MRT3847_38324C.1.pep
LCSPEAFSYVGTMDRDRVIVAEPLDGPIMNHYXSLARESVIWESLGGWQEIESDPQHLXNTHVIREDTARHIRSYRMMLLFDTDVPGGRVYRESSLT

SEQ ID NO: 217384 - protein, 59 aa, Glycine max
  Clone ID: PAT_MRT3847_38325C.1.pep
PGKFVFALGTFIFLRVRTRTFFLPQLSPVEFNERALCLGQVQPLKNKNGCFGGGFCFFY

SEQ ID NO: 217385 - protein, 60 aa, Glycine max
  unsure (1)..(60): unsure at all Xaa locations
  Clone ID: PAT_MRT3847_38326C.1.pep
FPGWPGCYTEKIPFRGPPRRSRDPLRFXSPXRSGXRNFTRIPFGSRRRERYXRGFPGXLG

SEQ ID NO: 217386 - protein, 44 aa, Glycine max
  Clone ID: PAT_MRT3847_38327C.1.pep
SKTTFCDSIELVLCIHFPTIENHPKTFPQIWDKFFWIHEFPPIT

SEQ ID NO: 217387 - protein, 164 aa, Glycine max
  unsure (1)..(164): unsure at all Xaa locations
  Clone ID: PAT_MRT3847_38328C.1.pep
MAYFSCLNRGLKPNLXLRRIDGAIQVRSNVDPTFSSLVGSGRSGGXTTAPLFSRIHTSLISIWTVISRAQVXVWPQWXKNGAPNNVSSQTKNYEIXLSFWGDGGIVPFEPFFHAFPGGLEKIAINRILLILPSRKEEREKFFFLSTGTRRLDLAIRRIECLADK

SEQ ID NO: 217388 - protein, 133 aa, Glycine max
  Clone ID: PAT_MRT3847_38329C.1.pep
FEQVRAASNALALGNSPHNFSNPHVNGDEECAKSGGESCQSLDNQMCPMKIRDDPLQKNGKFTKKSSKTPRSGLQFLPFRSRRIFSKLWIVGKGQGENKSSEPSGSSNSPTFVVPGDTKSFGSSLRPRRPFFF

SEQ ID NO: 217389 - protein, 41 aa, Glycine max
  unsure (1)..(41): unsure at all Xaa locations
  Clone ID: PAT_MRT3847_3832C.1.pep
HAVNPPAVDXCHGSGLPDHMPIXHTDVNXSLPIFLKSRKXX

SEQ ID NO: 217390 - protein, 106 aa, Glycine max
  Clone ID: PAT_MRT3847_38330C.1.pep
MGLALIVGLLGLLILFHAAYSTIQYRGLLKITEEEFSGPPFDVVIELFLGLLLCFWAALTAPGKFLSIHPHSEDNRIVSLPANLDFMIFNHRGKAFPVEMDLKLRQ

SEQ ID NO: 217391 - protein, 205 aa, Glycine max
  unsure (1)..(205): unsure at all Xaa locations
  Clone ID: PAT_MRT3847_38331C.1.pep
VVLVLHIPICWVLVFGLGLGQNGAAISIGISYWLSVMLLLIYTKYYPSCQKTKIALGSNALRSIKEFFFLAIPSALMICFEWWSFELVVILAGLLPNPKLETSVLSICLNICTLHYFIPYGTGAAVSTRVSNELXARRPQAAREAVXAVIVLAFTDAVVFSSVLFCFRHVLRFAFSNEMEVVHYVAXIVPVLCLSFMGDGYLGVL

SEQ ID NO: 217392 - protein, 571 aa, Glycine max
  Clone ID: PAT_MRT3847_38332C.1.pep
MVLVITTCLPPPAKMHDENIEILSLNKLSGSLEKLLIEAEYDYCDAEILVEDIPVGIHRCILASRSQFFHELFKKGTDGSGKEGKPRYLMSDLMPYGTVGYQAFQVFLYYLYTGRLKASPTEETTCVDETCIHVACRPAINHALELMYASATFQMKELVLLFQRHLLNFVEKALVEDVIPILMAAFNCQLDQLLSRCIQRVARSDFDNTSLEKELPREVVTEIKLLRLPFQPESTPNAMEVESLNEKSIRRIHKALDSDDVELLKLLLNESSVTLDDAHALHYACAYSDSKVIQEVLSLGMADILRRNSRGYTVLHVAARRKDPSILVALLNKGACASDTTPDGQTALAICQRLTRYKDYQEQTVQCKESNKDRLCVDVLEREMRRNSMTVNMSVSSQLTADDLHMRLDYLEDRVAFARLLFPAEARVAIENAEADSSSLYANSSALKVTNGNPKEVDLNESPSARTRKLQLRLHALMKTVENGRRFFPHCSEVLDKFLEDDEMPDVFFLEKGSEEEQRIKKARFMELKDDVQKAFHKDMAENNHSGFSSTVSSSSSSTRREGLNHRVRRK

SEQ ID NO: 217393 - protein, 569 aa, Glycine max
  Clone ID: PAT_MRT3847_38333C.1.pep
VRNSPSTHASGLFAPVVLTWLLCISAIGVYNIFHWNPHVYEALSPYYMFKFLKKTQKGGWMSLGGILLCITGSEAMYADLGHFSQLSIKIAFTFLVYPSLILAYMGQAAYLSRHHSLESDYRIGFYVSVPVKLRWPVLAIAILQAVVGSQAVITGTFSIIKQCSAMGCFPKVKIIHTSSKMHGQIYIPEINWSLMLLCLAITVGFRDTKRMGNAAGLAVITVMLVTTCLMSLVIVLCWHKNILLAVCFILFFGSIEALYFSASLIKFLEGAWVPIALSLIFLISMYVWHYGTLKKYEFDVQNKVPINWLLSLGPSLGIVRVKGIGLIHTELVSGIPAIFSHFVTNLPAFHQVVIFLCIKSVQVPHVRPEERFLVGRVGPKEYRLYRCIARYGYRDIHQDDIELERDPLCSIAEFIRSDASEYGLGFGSFEEDTKMTVVGTSASNLEGSIRMTEDDDQQDSQMEEGPSELMEVKSSPEKVRKRVRFVVPDSPQIDLDAREELLELMDAKEAGMAFILSHSYVRAKSGSSWLKKVVINYGYDFLRRNSRGPAYALSIPHASTLEVGMIYHV

SEQ ID NO: 217394 - protein, 53 aa, Glycine max
  Clone ID: PAT_MRT3847_38334C.1.pep
SRVDSIKLTVTGYTTSTLELPCLYQDKLPCKKFPLQPIMENLSLPHQSFTLKV

SEQ ID NO: 217395 - protein, 101 aa, Glycine max
  Clone ID: PAT_MRT3847_38335C.1.pep
GALYVDRIDFSDHHIFHARDIEMIRAKLGELDGKFVPKPIVVMTEKDYDRDPEILKQLHPFKVFVLCSALKVLPYRGSTEDSFKKFLKDHLKLELPPALRH

SEQ ID NO: 217396 - protein, 56 aa, Glycine max
  Clone ID: PAT_MRT3847_38336C.1.pep
MLCLFYCMVFCASENPHFLWPFFFSHRKNILSLGLFLGPPLNPPKSPGRVFEIPLH

SEQ ID NO: 217397 - protein, 343 aa, Glycine max
  Clone ID: PAT_MRT3847_38337C.1.pep
MMAATMEQQQQRPQQQDEAEEIQHGPLPVEQLQASGIAATDVKKLKDAGICTVESVAYTPRKDLLQIKGISEAKVDKIIEAASKLVPMGFTSASELHAQRDAIIQITTGSTELDKILEGGVETGSITELYGEFRSGKTQLCHTLCVTCQLPLDQGGGEGKAMYIDAEGTFRPQRLLQIADRFGLNGADVLENVAYARAYNTDHQSRLLLEAASMMVETRFAVMIVDSATALYRTDFSGRGELSARQMHLAKFLRSLQKLADEFGVAIVITNQVVSQVDGSAVFAGPQIKPIGGNIMAHATTTRLALRKGRGEERICKVISSPCLAEAEARFQICAEGVSDVKD

SEQ ID NO: 217398 - protein, 144 aa, Glycine max
  Clone ID: PAT_MRT3847_38338C.1.pep
MLMDSPSRSSVIIVGAGISGIAAAKVLAENGVEDLVILEASDRVGGRICKESFGGVTVELGAGWIAGVGGQQPNPIWELAAQFELRTCFSDYSNARYNIYDRSGNIIPSEIAADSYKKAVDSAIHKLRHQDEEEEEAYGDDHWN

SEQ ID NO: 217399 - protein, 170 aa, Glycine max
  unsure (1)..(170): unsure at all Xaa locations
  Clone ID: PAT_MRT3847_38339C.1.pep
HRTTDRIIASGNIEQSSRVLVKTGSEPXCDSLAGLTPSVFVVHDSLLTLACIKEKYDRVKCWQGEIIYVPELWAPFDAVFLYFLPALPFKLHQILESLARVGAPGAGVPIGQPYGNGVVDRPRMLYPLAVLSDLPYKALLLPVPAARPFVVADLADVPPLCSALGICSRA

SEQ ID NO: 217400 - protein, 103 aa, Glycine max
  Clone ID: PAT_MRT3847_3833C.1.pep
KVSDLINHSAQLLQRRTASDAERALEHINKALIISSYSEKLLEMKAEALLMLCRYEEVIQLCGKTLDSAEKNACPLDAGCKVTDLDNSQLSKGFYFRIWRCSM

SEQ ID NO: 217401 - protein, 41 aa, Glycine max
  unsure (1)..(41): unsure at all Xaa locations
  Clone ID: PAT_MRT3847_38340C.1.pep
QSLTLEDSXLFKFXTFSPKTNXCLFWXSLCNLNXAWVVFXD

SEQ ID NO: 217402 - protein, 60 aa, Glycine max
  Clone ID: PAT_MRT3847_38341C.1.pep
GIYSGFQTAGSVSGLFKAYMFFRFMLRSSVFLVSAVCLTCVYSVLRTFKTSAFYCFTIFC

SEQ ID NO: 217403 - protein, 68 aa, Glycine max
  unsure (1)..(68): unsure at all Xaa locations
  Clone ID: PAT_MRT3847_38342C.1.pep
CXXQXLXXWKTXGYXRYTYIXVGXSWAXRDRIXXDQTWGXRKICXWVFXQXQWGXXRXTKXXXNFGXL

SEQ ID NO: 217404 - protein, 68 aa, Glycine max
  unsure (1)..(68): unsure at all Xaa locations
  Clone ID: PAT_MRT3847_38343C.1.pep
DTSVYGPVVPIIWTGIHVVPSGRXIIGALTPARCEPGLIRGDLHIDMRRNVIHGSNSVESAYKEIALW

SEQ ID NO: 217405 - protein, 50 aa, Glycine max
  unsure (1)..(50): unsure at all Xaa locations
  Clone ID: PAT_MRT3847_38344C.1.pep
NRETLAEPSFPSPXTXMDFNKAADXGRFHGRKAXHXRXSPTXXMTXIFLP

SEQ ID NO: 217406 - protein, 43 aa, Glycine max
  unsure (1)..(43): unsure at all Xaa locations
  Clone ID: PAT_MRT3847_38345C.1.pep
MRFNLKILKLIVVDYYKHNKFXCDYYLHVTLHVEMKITCLVAI

SEQ ID NO: 217407 - protein, 43 aa, Glycine max
  Clone ID: PAT_MRT3847_38346C.1.pep
STLSLKVYFFTVISRHSTVTRFIILINNKPCEHYYYYTQFAFF

SEQ ID NO: 217408 - protein, 69 aa, Glycine max
  unsure (1)..(69): unsure at all Xaa locations
  Clone ID: PAT_MRT3847_38347C.1.pep
MAKLASSLCLLHCSWCCFAFSSREQPQQNECQIAXLNALKPDNRIESVXGLIETWSPNSKPFQCAGVAL

SEQ ID NO: 217409 - protein, 143 aa, Glycine max
  Clone ID: PAT_MRT3847_38348C.1.pep
MAMAFKMATTGMWVTDECKNSFMEMKWKKVHRYIVFKIDEKSRLVTVDKVGGPGESYGDLAASLPDDDCRYAVFDFDFVTVDNCRKSKIFFIAWSPTASRIRAKMLYATSKDGLRRALDGISYEVQATDPTEMGFDVIQDRAK

SEQ ID NO: 217410 - protein, 57 aa, Glycine max
  Clone ID: PAT_MRT3847_38349C.1.pep
CPSKFKQTNRLSVIESNFKAIYLVSQISKMTIKHINVKQPYYGKRKIRSRFQSLNIS

SEQ ID NO: 217411 - protein, 48 aa, Glycine max
  Clone ID: PAT_MRT3847_3834C.1.pep
GSRAFGGFLFSHRQGGTFWALIRSAAGDHRGSSWIHVIRDPIVLRIKP

SEQ ID NO: 217412 - protein, 102 aa, Glycine max
  Clone ID: PAT_MRT3847_38350C.1.pep
MAMAFKMATTGMWVTDECKNSFMEMKWKKVHRYIVFKIDEKSRLVTVDKVGGPGESYGDLAASLPDDDCRYAVFDFDFVTVDNCRKSKIFFIAWYILFIYMS

SEQ ID NO: 217413 - protein, 84 aa, Glycine max
  Clone ID: PAT_MRT3847_38351C.1.pep
MGGSISKRRRSKQHSSNFFPRYQQPHFPQSQDNGSVGHYGYSPQSYGGGRAPEQGKSLDRKYSRIGDDYKSLDQVTDALAKAGL

SEQ ID NO: 217414 - protein, 64 aa, Glycine max
  Clone ID: PAT_MRT3847_38352C.1.pep
KIQMSLVLRTAIYIFSANSSRCNAVILISFSMTYPLYQSNETCIVCFNLNMINIPNHNNLIQLP

SEQ ID NO: 217415 - protein, 39 aa, Glycine max
  Clone ID: PAT_MRT3847_38353C.1.pep
TESAFLSLTSIALYIVVRPLPPSSTQASPCLWVEPSLNR

SEQ ID NO: 217416 - protein, 70 aa, Glycine max
  Clone ID: PAT_MRT3847_38354C.1.pep
PCYIHYISSHDFAYLCVTTALFPPQPELFLAVFSCMLLHPGTQRRTTQKLALIKIVSMKQPLHPTNIPVM

SEQ ID NO: 217417 - protein, 140 aa, Glycine max
  unsure (1)..(140): unsure at all Xaa locations
  Clone ID: PAT_MRT3847_38355C.1.pep
PPPQPSHVXFPGGVPPPLFFGGAPPPPGCSKQFSPWGCSFQTPPPRFFFFPPPKGGGAPPREGVKSLWCQTPLFKIRPLLGRLVFFPPFSPPQGGGRMGAKELCPQQEKTISGGPSLPLFPQGPAVFKHFPPVFFSGRAP

SEQ ID NO: 217418 - protein, 38 aa, Glycine max
  Clone ID: PAT_MRT3847_38356C.1.pep
RSRIIHINQRACEISNRQRSINNRLMHKCQLSLKPRQA

SEQ ID NO: 217419 - protein, 120 aa, Glycine max
  Clone ID: PAT_MRT3847_38357C.1.pep
LSSHPPVLSGGGILGDKGVNWITLGQNPPISNSLRVAAWKKGCLMVKIAMSGNATVKRSDWASLAQVFLTNSNSTEHFDAGQWTKSEPHPWELSFPIEGCGPNNGIEMWSSERAKSTSRI

SEQ ID NO: 217420 - protein, 69 aa, Glycine max
  Clone ID: PAT_MRT3847_38358C.1.pep
SRRVLYYKLIIFLKKKKWCVFKGGIKKSSDHIIIAKHTGKIFFFFLLYVNGYNLLIQKSNSPTRHLYYS

SEQ ID NO: 217421 - protein, 47 aa, Glycine max
  unsure (1)..(47): unsure at all Xaa locations
  Clone ID: PAT_MRT3847_38359C.1.pep
NFKXXTXQNXVXQKVSLCHEXNNLXFEXPRQXXALYKXXIKLQSIYE

SEQ ID NO: 217422 - protein, 53 aa, Glycine max
  Clone ID: PAT_MRT3847_3835C.1.pep
TQNTIITCTHLCFYIHRFKYIYPQDNCYYHVPQNSLIGIYIELCLKCHCLFYM

SEQ ID NO: 217423 - protein, 95 aa, Glycine max
  Clone ID: PAT_MRT3847_38360C.1.pep
FDRIRDVWGNPRFTSLFRSYPFAGSKKLISIPYPPDNCLLCSFFHKPSTIRGFSLFLFLLIKPNLGCGGLLFLFLMCSIFRFQSADLHFIQAIRL

SEQ ID NO: 217424 - protein, 68 aa, Glycine max
  Clone ID: PAT_MRT3847_38361C.1.pep
GCEKTTEGAILKDEAQTLACLVGSNTCADLMKYEIHKADIDMKYAHEEQDNILLNYLQDTLSFWTCCS

SEQ ID NO: 217425 - protein, 45 aa, Glycine max
  Clone ID: PAT_MRT3847_38362C.1.pep
AKGGGYLQSCFKTGPFMPPYTRCLVCYQTLQRVLAFTELELNTGC

SEQ ID NO: 217426 - protein, 74 aa, Glycine max
  unsure (1)..(74): unsure at all Xaa locations
  Clone ID: PAT_MRT3847_38363C.1.pep
ASQCSVQVEARTVVPEIKVLLAXVYKDCSICHMGLXSDSHQFGASIAFGCSCKNDLXIAHKPCAQXWFNIKGNR

SEQ ID NO: 217427 - protein, 63 aa, Glycine max
  Clone ID: PAT_MRT3847_38364C.1.pep
HKAFSQGILMSPPTKIKRAGLTRQFSSPKTCCGKNKNHSARAPRESSCVFLARAKFPLTRDDL

SEQ ID NO: 217428 - protein, 334 aa, Glycine max
  Clone ID: PAT_MRT3847_38365C.1.pep
MSWCTIESDPGVFTELIQQMQVKGVQVEELYSLDLDSLNSLRPVYGLIFLFKWRPGEKDDRVVIKDPNPNLFFASQVINNACATQAILSILMNSPDIDIGPELTKLKEFTKNFPPELKGLAINNSEAIRTAHNSFARPEPFVPEEQKVATRDDDVYHFISYLPVDGVLYELDGLKEGPISLGQCSGGQGDIEWLKIVQPVIQERIERYSQSEIRFNLLAVIKNRKELYTAELKELQKRRERILQQLAASKSDRLVDNSSFEALNNSLSEVNAGIEAATEKILMEEEKFKKWKTENIRRKHNYIPFLFNFLKILAEKKQLKPLIEKAKQKTSSPR

SEQ ID NO: 217429 - protein, 236 aa, Glycine max
  unsure (1)..(236): unsure at all Xaa locations
  Clone ID: PAT_MRT3847_38366C.1.pep
RNLKQNPPIEPGLPAISIENGYFSWDRKEEKPTLSDINVEIPVGSLVAIIGGTGEGKTSLISAMIGELPPLANGNATIRGTVAYVPQISWIYNATVRENILFGSKFEYEQYRKVIDMTALQHDLNLLPGRDFTEIGERGVNISGGQKQRVSIARAVYSNSXDIYIFDDPLSALDAHIAQEVFRNCIKEGLRGKTRVLVTNQLHFLPQVDKIILVSEGMIKEQGTFEELSKSGPLFQ

SEQ ID NO: 217430 - protein, 55 aa, Glycine max
  Clone ID: PAT_MRT3847_38367C.1.pep
RFKEGLKNLEPLFFERNGTPKFKTQNGAGLVPSELFKPFSKPGVTGKGVPRGKSF

SEQ ID NO: 217431 - protein, 76 aa, Glycine max
  Clone ID: PAT_MRT3847_38368C.1.pep
AESSSSASVLSSSSAITSSSQILSILLYPNSYVMSLFVRRGSPSPRDGYRHSQWSRETSKTSKSSWFRRLFVASKF

SEQ ID NO: 217432 - protein, 736 aa, Glycine max
  Clone ID: PAT_MRT3847_38369C.1.pep
ITSSIYKKVLDPDNDYRRQLIDQVVSTALPESTSPEQVSAAVKAFMTADLPHELIELLEKIVLQNSAFSGNFNLQNLLILTAIKADPSRVMDYVNRLDNFDGPAVGGMAVEAQLYEEAFAIFKKFNLNVQAVNVLLDKIHSIDRAVEFAFRVEEDAVWSQVAKAQLRDGLVSDAIESFIRADDATQFLDVIRAAEDGNVYHDLVKYLLMVRGKAKEPKVDSELIYAYAKIDRLSDIEEFILMPNVANLQNVGDRLYDEALYEAAKIIFAFISNWAKLAITLVKLQQFQGAVDAARKANSSKTWKEVCFACVDAEEFRLAQICGLNIIIQVDDLEEVSEYYQNRGCFNELISLMESGLGLERAHMGIFTELGVLYARYRPEKLMEHIKLFSTRLNIPKLIRACDEQQHWKELTYLYIQYDEFDNAATTIMNHSPEAWDHMQFKDVVVKVANVELYYKAVHFYLQEHPDLINDVLNVLALRVDHARVVDIMRKAGHLRLVKPYMVAVQSNNVSAVNEALNEIYVEEEDYDRLRESIDLHDNFDQIGLAQKIEKHELLEMRRVAAYIYKKAGRWKQSIALSKKDNLYKDAMETASQSGERELAEELLVYFIDQGKKECFASCLFVCYDLIRADIALELAWMNNMIDFAFPYLLQFIREYTGKVDELVKDKIEAQNQVKAKEQEEKEVIAQQNMYAQLLPLALPAPPMPGMGGGFAPPPPMGGLGMPPMPPFGMPPMGSY

SEQ ID NO: 217433 - protein, 57 aa, Glycine max
  unsure (1)..(57): unsure at all Xaa locations
  Clone ID: PAT_MRT3847_3836C.1.pep
SSRAAALAFXYSHPTLFLTFTLQNLYHDYINLGVLCYILNRILLTLYFYPFIKHYIT

SEQ ID NO: 217434 - protein, 66 aa, Glycine max
  Clone ID: PAT_MRT3847_38370C.1.pep
PCPGGRSILYVIIYGEYYKQRNNESIIHPCIHFDLKTFCPIAEVAPWIYTNYLCNHGVSFVNFAGL

SEQ ID NO: 217435 - protein, 1702 aa, Glycine max
  unsure (1)..(1702): unsure at all Xaa locations
  Clone ID: PAT_MRT3847_38371C.1.pep
MAAANAPIAMRETLTFPTIGINPQFITFTHVTMESDKYISVRETAPQDSVVIIDMNMPNQPLRRPITADSALMNPNSRSLALKTQLQGTTQDHLQIFNIEFKSKMKSYQIPEQVSFWKWITPKLLGIVTQTSVYHWSIEGDSEPVKMFERTANLPNNQIINYRCDPTEKWLVLIGILHGSPERPQLVKGRMQLFSVEQQRSQALEAHAASFAQFKVPGNENPSTLFLFATNPNAGQIITKLHVIELGAQPGNHHLPRNKQIFSSPQIFSDDFPVAMQISHKYNLIYVITKLGLLFVYDLETATAVYRNRISPDPIFLTSEATSVGGFYAINRRGQVLLATVNEQTIVNFVSGQLNNLELAVNLAKRGNLPGAEKLVVERFHELFAQTKYKEAAELAAESPQGILRTPDTVAKFQSVPVQAGQTPPLLQYFGTLLTRGKLNALESLELSRLVVNQNKKNLLENXVRLAEDKLECSEELGDLVKTVDNDLALKIYIKARATPKVVAAFAERREFDKILIYSKQVGYTPDYLFLLQTILRTDPQGAVNFALMMSQMEGGCPVDYNTITDLFLQRNLIREATAFLLDVLKPNLPEHGFLQTKVLEINLVTFPNVADAILANGMFSHYDRPRIAQLCEKAGLYVRALQHYTELPDIKRVIVNTHAIEPQSLVEFFGTLSREWALECMKDLLLVNLRGNLQIIVQVAKEYCEQLGVDACIKLFEQFRSYEGLYFFLGSYLSSSEDPDIHFKYIEAAAKTGQIKEVERVTRESSFYDPEKTKNFLMEAKLPDARPLINVCDRFGFVPDLTHYLYTNNMLRYIEGYVQKVNPGNAPLVVGQLLDDECPEDFIKGLILSVRSLLPVEPLVEECEKRNRLRLLTQFLEHLVSEGSQDVHVHNALGKIIIDSNNNPEHFLTTNPYYDSRVVGKYCEKRDPTLAVVAYRRGQCDDELINVTNKNSLFKLQARYVVERMDGDFWEKVLNPDNAYRRQLIDQVVSTALPESKSPEQVSAAVKAFMTADLPHELIELLEKIVLQNSAFSGNFNLQNLLILTAIKADPSRVMDYINRLDNFDGPAVGEMAVEAQLYEEAFAIFKKFNLNVQAVNVLLDHIHSIDRAVEFAFRVEEDAVWSQVAKAQLREGLVSDAIESFIRADDATQFLDVIRAAEDGNAYHDLVRYLLMVRHKTKEPKVDSELIYAYAKIDRLSDIEEFILMPNVANLQNVGDRLYDEELYEAAKIIFAFISNWAKLAVTLVKLKQFQGAVDAARKANSAKTWKEVCFACVDAEEFRLAQICGLNIIIQVDDLEEVSEYYQNRGCFNELISLMESGLGLERAHMGIFTELGVLYARYRHEKLMEHIKLFATRPNIPKLIRACDEQQHWKELTYLYIQYDEFDNAATTIMNHSPEAWDHMQLKDVVVKVANVELYYKAVHFYLQEHPDLINDVLNVLALRVDQARVVDIMRKAGHLRLVKPYMVAVQSNNVSAVNEALNEIYVEEEDYDRLRESIDLHDNFDQIGLAQKIETHELLEMRRVAAYIYKKAGRWKQSIELCHKKDTLYKDAMETVSQSGDRELVEELLVYFIDQGKKECFASCLFVCYDLIRADIVLELAWMNNMIDFAFPYLLQFIREYTGKVDELVKDKIEAQNQVKAKEQEEKEVIAQQNMYAQLLPLALPAPPMPGMGGGFAPPPPMGGLGMPPMPPFGMPPMGSY

SEQ ID NO: 217436 - protein, 138 aa, Glycine max
  unsure (1)..(138): unsure at all Xaa locations
  Clone ID: PAT_MRT3847_38372C.1.pep
XLXSLXXXXXXXXXLXXLXXXSXXXSXXSXXCXXXXXXXCXXXXLSLXQXNNXXIXXYXPXXXSXXHIDXSHSVXYXXXXVXSVXXXXVGXLCSXXHXSYXXEVLGCXXLWXXPVXCPXXXXXFXXFXAXXXXYXSXD

SEQ ID NO: 217437 - protein, 101 aa, Glycine max
  Clone ID: PAT_MRT3847_38373C.1.pep
NQQPKKCLNYNPEKTINLQDYYATSKQKLHIILNWDLPPPPEAKKECCIQIPKKNLLHKTSKFLPCSSQGPVHAKLKTAAHGGHAIRRHWGHPQSTHGGGG

SEQ ID NO: 217438 - protein, 69 aa, Glycine max
  Clone ID: PAT_MRT3847_38374C.1.pep
DRSPPGQLALPPWPRWRGQPPRARRRAEPGSPPPALPRSPRRSGSGPRQWPWVTIRRLMTTRPSGLATS

SEQ ID NO: 217439 - protein, 69 aa, Glycine max
  unsure (1)..(69): unsure at all Xaa locations
  Clone ID: PAT_MRT3847_38375C.1.pep
XXSXXXXXXXGIRLEXQAXXXAXXXXXXYPXTXXVFQSXXATXXLXXSXLXXHMXXXXQHLXRPXMLNG

SEQ ID NO: 217440 - protein, 223 aa, Glycine max
  unsure (1)..(223): unsure at all Xaa locations
  Clone ID: PAT_MRT3847_38376C.1.pep
RVREVCFACVDAEEFRLAQICGLNIIVQVDDLEEVSEYYQNRGCFNELISLMESGLGLERAHMGIFTELGVLYARYRPEKLMEHIKLFSTRLNIPKLIRACDEQQHWKELTYLYIQYDEFDNAATTIMNHSPEAWDHMQFKDVVVKVANVELYYKAVHFYLEEHPDLINDVLNVLALRVDXARVVDIMRRXHLRLVKPYMVAVKATTICCYEALXEIYVEEKI

SEQ ID NO: 217441 - protein, 1772 aa, Glycine max
  unsure (1)..(1772): unsure at all Xaa locations
  Clone ID: PAT_MRT3847_38377C.1.pep
MAAANAPIAMREALTLPSIGINPQFITFTHVTMESDKYICVRETAPQNSVVIIDMNMPNQPLRRPITADSALMNPNSRILALKVASETLVLLTRLSNDYYGKSTMGYDFIMDFIACNAMNLSICFWIIFPSKLHPSLEAQLQGTTQDHLQIFNIEMKAKMKSYQMPEQVVFWKWITPKLLGLVTQTSVYHWSIEGDSEPVKMFERTANLANNQIINYRCDPSEKWLVLIGIAPGSPERPQLVKGNMQLFSVDQQRSQALEAHAASFAQFKVPGNENPSTLISFATKTLNAGQIISKLHVIELGAQPGXHHLQRNKQIFSFPQXFADDFPVAMQISHKYSLIYVITKLGLLFVYDLETATAVYRNRISPDPIFLTSEATSVGGFYAINRRGQVLLATVNEQTIVNFVSGQLNNLELAVNLAKRGNLPGAEKLVVERFHELFAQTKYKEAAELAAESPQGILRTPDTVAKFQSVPVQAGQTPPLLQYFGTLLTRGKLNAFESLELSRLVVNQNKKNLLENWLAEDKLECSEELGDLVKTVDNDLALKIYIKARATPKVVAAFAERREFDKILIYSKQVGYTPDYLFLLQTILRTDPQGAVNFALMMSQMEGGCPVDYNTITDLFLQRNLIREATAFLLDVLKPNLPEHGYLQTKVLEINLVTFPNVADAILANGMFSHYDRPRIAQLCEKAGLYVRALQHYTELPDIKRVIVNTHAIEPQSLVEFFGTLSREWALECMKDLLLVNLRGNLQIIVQVAKEYCEQLGVDACIKLFEQFRSYEGLYFFLGSYLSSSEDPDIHFKYIEAAAKTGQIKEVERVTRESSFYDPEKTKNFLMEAKLPDARPLINVCDRFGFVPDLTHYLYTNNMLRYIEGYVQKVNPGNAPLVVGQLLDDECPEDFIKGLILSVRSLLPVEPLVEECEKRNRLRLLTQFLEHLVSEGSQDVHVHNALGKIIIDSNNNPEHFLTTNPYYDSRVVGKYCEKRDPTLAVVAYRRGQCDDELINVTNKNSLFKLQARYVVERMDGDLWEKVLNPDNAYRRQLIDQVVSTALPESKSPEQVSAAVKAFMTADLPHELIELLEKIVLQNSAFSGNFNLQNLLILTAIKADPSRVMDYINRLDNFDGPAVGEMAVEAQLYEEAFAIFKKFNLNVQAVNVLLDHIHSIDRAVEFAFRVEEDAVWSQVAKAQLREGLVSDAIESFIRADDATQFLDVIRAAEDGNAYHDLVRYLLMVRHKTKEPKVDSELIYAYAKIDRLSDIEEFILMPNVANLQNVGDRLYDEELYEAAKIIFAFISNWAKLAVTLVKLKQFQGAVDAARKANSAKTWKEVCFACVDAEEFRLAQICGLNIIIQLSSDFQLESLNNTFFQNVDDLEEVSEYYQNRGCFNELISLMESGLGLERAHMGIFTELGVLYARYRHEKLMEHIKLFATRLNIPKLIRACDEQQHWKELTYLYIQYDEFDNAATTIMNHSPEAWDHMQFKDVVVKVANVELYYKAVHFYLQEHPDLINDVLNVLALRVDHARVVDIMRKAGHLRLVKPYMVAVQSNNVSAVNEALNEIYVEEEDYDRLRESIDLHDNFDQIGLAQKIEKHELLEMRRVAAYIYKKAGRWKQSIALSKKDNLYKDAMETASQSGDRELAEELLVYFIDQGKKECFASCLFVCYDLIRADIALELAWMNNMIDFAFPYLLQFIREYTGKVDELVKDKIEAQNQVKAKEQEEKDVVAQQNMYAQLLPLALPAPPMPGMGGFAPPPPMGGLGMPPMPPYGMPPMGSSF

SEQ ID NO: 217442 - protein, 157 aa, Glycine max
  Clone ID: PAT_MRT3847_38378C.1.pep
SNQYTYMEPPGPPPPGRMTSSEWLRWYRENYKPERTNNNMQPTHLNTPGPGNHVNFLYHDTYRFGQFDTWNNNPPLSSNQYTYMEPPGPPPVQPGFLSAFGEHKGSVYNNFQRPSPYGCGVVTDLRNEPQSLLECLKEKEWRLQSDPNVRGPTFMGN

SEQ ID NO: 217443 - protein, 88 aa, Glycine max
  Clone ID: PAT_MRT3847_38379C.1.pep
ASPSPYSACFFFCPQNHFFFKLWGNVHPNFLLFGFHPPLHPFLKVLTPFFFFPQKRKYLFLFFPRVIFFNKMFFLPILGLFFAKKKKA

SEQ ID NO: 217444 - protein, 81 aa, Glycine max
  Clone ID: PAT_MRT3847_3837C.1.pep
QIGGAGSDDSVHELLPGTKHHSQVQKIMPDSAGIASDEKKERSFLRPKGDTNNVVIKQVERKRRAVCLFDDDDDDKPKTPV

SEQ ID NO: 217445 - protein, 48 aa, Glycine max
  Clone ID: PAT_MRT3847_38380C.1.pep
FLWNCEGLNFFVRGGVSTVFRQGFKWPLIRKMGGQSGWGWKNNCRGGD

SEQ ID NO: 217446 - protein, 105 aa, Glycine max
  unsure (1)..(105): unsure at all Xaa locations
  Clone ID: PAT_MRT3847_38381C.1.pep
MLFQKLQKLLAASVLKRGTGKAWXDPNEINETSMANSTLNIKKSVNDGFIIRNPTKIDSRSRAHTMKEAKKKGQHSGYGSRKGTREASIPTIILWMRTMHLLMRL

SEQ ID NO: 217447 - protein, 96 aa, Glycine max
  unsure (1)..(96): unsure at all Xaa locations
  Clone ID: PAT_MRT3847_38382C.1.pep
APHPPXXXKKXXPXXTMQXXXXXRDNXLXXXTRTXPXXXLKRXXXXPQKHXXTXXXDIVXXXHXXPGXGTHXPXXXXQGXXXXDLXPNXEXTXERX

SEQ ID NO: 217448 - protein, 64 aa, Glycine max
  Clone ID: PAT_MRT3847_38383C.1.pep
RCNLLDVFEYPISMNCERTAMDRLSNTFMPASLTSPAITGTTNTTISTLNSEPSSSSSNQDQQL

SEQ ID NO: 217449 - protein, 90 aa, Glycine max
  unsure (1)..(90): unsure at all Xaa locations
  Clone ID: PAT_MRT3847_38384C.1.pep
SVERSLNCTAFFTRLSPPNSIISSSVSTCDGLLVNPNSKNTMGVLGPSLQHGDVYEGNFKKGRLGRGYTITCMGVEGEGDGKMMVWXGHG

SEQ ID NO: 217450 - protein, 86 aa, Glycine max
  Clone ID: PAT_MRT3847_38385C.1.pep
RPTLRSFFSLPQKGGAGWPLFSNFWFRFTQNPTTHTWVKYMQEVQNRRGRRRRDHGGSTDTLPPRRGGGRQNSNPPKYLPGLLTTT

SEQ ID NO: 217451 - protein, 32 aa, Glycine max
  Clone ID: PAT_MRT3847_38386C.1.pep
KLKKIFHNTKNGIMGGGNNLFSFEIILDTNEA

SEQ ID NO: 217452 - protein, 51 aa, Glycine max
  Clone ID: PAT_MRT3847_38387C.1.pep
LDPHSVPSEELSTWFVYIVQRLNPGIHNLAAPTLHNSSFAGSCSPILQRNS

SEQ ID NO: 217453 - protein, 122 aa, Glycine max
  Clone ID: PAT_MRT3847_38388C.1.pep
ILILSYALFHPNQPQDDDKAHPPGAKPLPIIGNLHMLGKLPHRSLQALAKKYGPIMSIKLGQVPTIVVSSPETAELFLKTHDTVFASRPKTQASEYMSYGTKGLVFSEYGPYWRNMRKFCTT

SEQ ID NO: 217454 - protein, 217 aa, Glycine max
  unsure (1)..(217): unsure at all Xaa locations
  Clone ID: PAT_MRT3847_38389C.1.pep
MSTNENANLPAARLNRFKNKGKDSTEMRRRRIEVNVELRKAKKDEQMLKRRNVSSFPDDATSPLQENRNNQGTVNWSVEDIVKGINSNNLESQLQATQAARKLLSREKQPPIDNIIRAGLIPKFVSFLGKTDCSPIQFESAWALTNIASGTSEQTKAVVDGGAIPAFISLLASXHAHISEQAVWALXNIAGDGSAFRDLVIKHGAIDPLLALLAVPD

SEQ ID NO: 217455 - protein, 93 aa, Glycine max
  unsure (1)..(93): unsure at all Xaa locations
  Clone ID: PAT_MRT3847_3838C.1.pep
FSGPFLPPRSRXSGLVFGSLSAXGRPGPVSSLLGPPXPLPRLVLXCXPSXRSXSFPPSRPCXWALSLALAVXXLGSFSPPXCLPGLSAAAAWV

SEQ ID NO: 217456 - protein, 142 aa, Glycine max
  Clone ID: PAT_MRT3847_38390C.1.pep
AGGPFWVGFKSPPLGRGKKGGGKPLGYPGPTKIGQKNMDFNLPKQGKISPGFHSTQHHSKVHPFGVNFPLYPEKGGVNSSLQTGWNSFLLKIQIQFPNLNSHGLRNLKAGSLEKWGGIGTPNFPQGTNPRIGYRNPIWAFRQ

SEQ ID NO: 217457 - protein, 218 aa, Glycine max
  Clone ID: PAT_MRT3847_38391C.1.pep
MASAQLLHDPNFPLFKTPRKTPSSPAVTTTATNKPPSTAANPTSNGERIEDHPDETATDTDADAETFGDLGLAEWAVKTCRELGMRRPRGVQRRCIPRVLEGRHVLGVDETGSGKTAAFALPILHRLAEHPFGVFALVVTPTRELAFQLAEQFRALGSAVHLRITVVVGGMDMLRQAKELAARPHLVIATPGRIHALLRNNPDIPPAFSSPRFLVLDE

SEQ ID NO: 217458 - protein, 47 aa, Glycine max
  Clone ID: PAT_MRT3847_38392C.1.pep
HFFNTHILKGMLSLLTKTHQMIHYQHNRMILSSERASPVKMLITLLL

SEQ ID NO: 217459 - protein, 96 aa, Glycine max
  unsure (1)..(96): unsure at all Xaa locations
  Clone ID: PAT_MRT3847_38393C.1.pep
XTXTASHILXXXIXPGTIALTVHXXSSXVIDHPNSTGSVKSHPFMIXXXLDFWLYXXVLQYWTVSLXLESSSVRFLXKHLLHNNERXQAATQXXVL

SEQ ID NO: 217460 - protein, 45 aa, Glycine max
  unsure (1)..(45): unsure at all Xaa locations
  Clone ID: PAT_MRT3847_38394C.1.pep
PPTPGGAYNGQRFPRLSPSGLLNHVGKALRPVHSPLCLXSLXVVF

SEQ ID NO: 217461 - protein, 237 aa, Glycine max
  Clone ID: PAT_MRT3847_38395C.1.pep
IFSSVLAHFILKEKLHIFGVLGCALCVVGSTSIVLHAPKEKDIHSVKEVWELATGPGFIVYICAIVILVCVLHFRFVRSHGQTHMMVYLGICSPTGSITVMGVKAVGIALKLTFEGTNQFVYFETWIFTVVVIGCCLLQINYLNKALDAFSTAVVSPVYYVMFTSFTIVASIITFKEWAKQDSTQIATELCGFVTILSGTFLLHRTKDMGNKPSDASVHSSPEDNNSNTKTPLSNQI

SEQ ID NO: 217462 - protein, 120 aa, Glycine max
  unsure (1)..(120): unsure at all Xaa locations
  Clone ID: PAT_MRT3847_38396C.1.pep
GEREREREREREREREREREREREREREREERLVQFFFFFFESIAGVMTIRAFRKQKKFCEENLKRVNANLRMDFHNYSSTXWVGFRIELFGSFVFCISAMFMIIFPSSIIKPVFRQVEP

SEQ ID NO: 217463 - protein, 398 aa, Glycine max
  unsure (1)..(398): unsure at all Xaa locations
  Clone ID: PAT_MRT3847_38397C.1.pep
YSVDMWLHYCIFAISTYGDPNTVRRLFERGLAYVGTDYLSFPLWDKYIEYEYMQQDWACLAVIYTRILENPNQQLDRYFSSFKELAGNRPLSELRTADEAAAVAGVASEATGQATEGEVHPDGAERSPKSVSAGLTEAEELEKYIAIREEMYKKAKEFDSKIIGFETAIRRPYFHVRPLNVGELENWHNYLDFIEREGDLSKIVKLYERCVIACANYPEYWIRYVLCMEASGSMDLANNVLARATQVFVKRQPEIHLFXARFKEQTGDIDGARAAYQLVHTETSTALLEAIIKHANMGYRLEKMEDAFSLYEQAIAIEKGKEHSQTLPMLFAQYSRFVYLASGNAEKARQILVEGLENVLLSKPLLEAILHXEAIQPLPXRVDIDFLESWVVKFIMPN

SEQ ID NO: 217464 - protein, 80 aa, Glycine max
  Clone ID: PAT_MRT3847_38398C.1.pep
TNPGVFSLNEILYMFRYYVYPYFSWNIFTLEEQVKVIDAPRIINELIVAKLNKEFPKLLSIMDSLIKYVLEPNQRVIALV

SEQ ID NO: 217465 - protein, 89 aa, Glycine max
  unsure (1)..(89): unsure at all Xaa locations
  Clone ID: PAT_MRT3847_38399C.1.pep
TSAEPAWFYRHVTCQTSAYIVGVAGWGTGLKLGSDSVGIKYNTHRXIGITLFXLGHLQVFALLLRPNKDQKXRIYWNIYHKPLDIPHNH

SEQ ID NO: 217466 - protein, 121 aa, Glycine max
  unsure (1)..(121): unsure at all Xaa locations
  Clone ID: PAT_MRT3847_3839C.1.pep
MEGLKLIAKPLFGRTLKGTDAFEDPLNVGGVRDLVFSFAKKEGLFSNPNSLEIVGLVGFFHDLVASKSLRAQFGEKIGGNFLDEKGFXGATRFKILKIFKGLVFWEEVLGKGKFVRFFQNF

SEQ ID NO: 217467 - protein, 85 aa, Glycine max
  unsure (1)..(85): unsure at all Xaa locations
  Clone ID: PAT_MRT3847_383C.1.pep
KFIFISDKRKFILLTKLIPFTCRTSPREKIMKHIXLHKPSNNKIPGIHMQHVLILKLELMKKKPQQNPPSESPIAHVIDERIFHL

SEQ ID NO: 217468 - protein, 86 aa, Glycine max
  Clone ID: PAT_MRT3847_38400C.1.pep
PNIKAYACIINDASLLCHCRLSPRSFSSNDLCHASFRVPYFMSLIESNNCSLNIRHSICSVNTYKGCDCLALEGHCHSEYSSCSLV

SEQ ID NO: 217469 - protein, 54 aa, Glycine max
  Clone ID: PAT_MRT3847_38401C.1.pep
DLFMRRYTSDDNHSFSKMLAKVYYMRKERAGSLNEDRQGIEGRMRDRNTGGHRP

SEQ ID NO: 217470 - protein, 63 aa, Glycine max
  Clone ID: PAT_MRT3847_38402C.1.pep
MAFQEKQNRFKRQPEKSAPASQNGRTSAPIKFSNDTERLQHVNSIRKAPVGAHMKRVIDLLFE

SEQ ID NO: 217471 - protein, 77 aa, Glycine max
  unsure (1)..(77): unsure at all Xaa locations
  Clone ID: PAT_MRT3847_38403C.1.pep
AAXSRFLSLPPSRVFSVVXXXVSXFAFSSLLFFCFRGPLVXLPLLXPVXCSFVSGPPRFRSAXPRVLFXPFXPFXAP

SEQ ID NO: 217472 - protein, 274 aa, Glycine max
  Clone ID: PAT_MRT3847_38404C.1.pep
NKKNMMMKQGASENEVAEILLSLPSLIREFECGCGILPPPSWGCKRKRSTIAVDPKTLQKAASSPATPLSFSLSESDENPTTLVSRRRRRRRRNVSLKRKREHYLRIIQDLTKDNDLLRGEIKNVNGYCDMKKEYNLKLKARKQELSQGGLVHKQAQQQFQFSGMAHHPPLILNQTAGSGQIKGGEGVVGLAHATTSLGVASLSSSNNVGPVGIPDLNLPLDEPMTMEFCDALDVSLANKDLSRTMAAQARQNMLQKYRFKNPIGISKPRYSCR

SEQ ID NO: 217473 - protein, 277 aa, Glycine max
  Clone ID: PAT_MRT3847_38405C.1.pep
MMMADNSDNTSLPPEKTESTSSLATLHSDIIHAHILTRLDGATLASAASVSSLMHRLCTQDDLWREISTATWPSLQNPIARHVISAIPGGYRSIFSDAFPSLHNSSFRRHRPPPPTPELISAVDMYYQGKPVFSRVIRTETQKNWFFASPLWIDALQHKELIPTTVKFARKDEEWLKHLEENLSVSWIIVDPTRKRAANVSSRRAVLAQRHWLTREVEVVYAAEMAGERGGATERVQCLVKVTCCGKVGGELHVREVNLVMEDTEGRRVSGKESVEI

SEQ ID NO: 217474 - protein, 157 aa, Glycine max
  Clone ID: PAT_MRT3847_38406C.1.pep
GDSPELNPLPPLPRHKFKPWTTEEENNDKDIIEKENEEEEEEEQFFSPSGSSGGNINKQQKSSPSPSGVVASSSRVFHVDKFGSRSFTSRTPSYPRSNSLSFSRSPSLNFSPPSVKSLPPNNNPASPSFSSSSSSPREEWHVPSQGKNSPAATDLPT

SEQ ID NO: 217475 - protein, 119 aa, Glycine max
  Clone ID: PAT_MRT3847_38407C.1.pep
SRIDDDDLEDSLIHPVSLRSRPLSDPTTTPQPSPLDVPKFPPFDFWDDDEYKGVPWEHSYPEPSCDPKCPVYASSTETGASPNRYWMLLRGDHLLKLSYQVLDHLLVQEARERKPRAVL

SEQ ID NO: 217476 - protein, 229 aa, Glycine max
  Clone ID: PAT_MRT3847_38408C.1.pep
NITEGSIWPMLAQESLKALGGLGLLSLGAKYILRRVFEVVADTRSSEAFVALCLLTVAGTSLVTQNLGFSDTLGAFLAGAILAETNFRTQIEADIRPFRGLLLGLFFLTTGTSIDMQLLLREWPNVLSLLGGLIVIKTLIITAIGPRVGLTLKESVRIGLLLSQGGEFGFVVFSLANRLGVLPLELNKLLIIVVVLSMALTPFLNEAGRRAASFIEDKFDAENKQNASE

SEQ ID NO: 217477 - protein, 73 aa, Glycine max
  Clone ID: PAT_MRT3847_38409C.1.pep
VVRDISACDRVEQEPSSGSVVVVQVSIVCELVDVDPGASCIHINLITIVPLQSVCLRGCVVPGGAYPVSVNLA

SEQ ID NO: 217478 - protein, 56 aa, Glycine max
  Clone ID: PAT_MRT3847_3840C.1.pep
KQNKFKTYHRSTASNHYCFHLAAMVDTHLPTITYCIYLSAIATNFEAFGTQNVKLM

SEQ ID NO: 217479 - protein, 122 aa, Glycine max
  Clone ID: PAT_MRT3847_38410C.1.pep
KRVILLCQIYLLSHIFHLCTHLTPFEGVSFKSEVGLSPPTTTCFPSYITSFNTSSNISIHMPNAYLPCCHRLSPYCYKPEENIHLINAYRDKLSSLCLLHPNATHCQEVADAVTVHCPNASP

SEQ ID NO: 217480 - protein, 50 aa, Glycine max
  Clone ID: PAT_MRT3847_38411C.1.pep
SEHCILRMCLNAPKIILIRMDRVIYDEWYINTLLRKCNPKVKISNLSLGS

SEQ ID NO: 217481 - protein, 57 aa, Glycine max
  Clone ID: PAT_MRT3847_38412C.1.pep
SLALPIFFSLAAVSRFPTFETRLILNYKSLKDAFHRRLFCQCGGAFWGSSRGGPTST

SEQ ID NO: 217482 - protein, 70 aa, Glycine max
  unsure (1)..(70): unsure at all Xaa locations
  Clone ID: PAT_MRT3847_38413C.1.pep
QCHRGDNLELPPKAEMSAWSXLTGDEMFSWGDHMLGIQGQPEMTXDLVLCFIDRIIEGILFHQEYAGGCK

SEQ ID NO: 217483 - protein, 66 aa, Glycine max
  Clone ID: PAT_MRT3847_38414C.1.pep
QRICAEPATRSGVYKRAGDPLRPAATRRRGPTPRSISVAPPPSSSAIGRTAAGGNDLLRRRHYGSC

SEQ ID NO: 217484 - protein, 75 aa, Glycine max
  Clone ID: PAT_MRT3847_38415C.1.pep
ARGKKKEQMGNPRKPSTADELHTAARSGDLIAVNSILASNPLAVNSRDKHSRTPYPAHFLTSFLPLLINSILFFM

SEQ ID NO: 217485 - protein, 169 aa, Glycine max
  Clone ID: PAT_MRT3847_38416C.1.pep
HSFAHVDVFVYKRCRNIACQNQLPVEDCTCETCTNGNGFCNLCMCVICSKFDFEVNTCRWIGCDLCSHWTHTDCAIREQLICMGPSAKNGAGPSEMVFRCQACNRTSELLGWVKDVLQHCAPSWDGEALMRELDFVSRIFHGSYDPRGRKLYWKCDDLNEKLTSGKGGI

SEQ ID NO: 217486 - protein, 73 aa, Glycine max
  unsure (1)..(73): unsure at all Xaa locations
  Clone ID: PAT_MRT3847_38417C.1.pep
SXVAXXRSSXLIEPXLAXHKXPLRVAFLHXXPSGFGSMXFXXLLFGXFXXCWFQMXLSHWXXXSPILXRLLTW

SEQ ID NO: 217487 - protein, 76 aa, Glycine max
  unsure (1)..(76): unsure at all Xaa locations
  Clone ID: PAT_MRT3847_38418C.1.pep
ISPKKEXSSITSLSVSNPXPSDVEAAGNKKKRIFDMNLPCDAVSLSWTKKHSLKLLLVRQGLLQQKXXPRNQXDXX

SEQ ID NO: 217488 - protein, 47 aa, Glycine max
  unsure (1)..(47): unsure at all Xaa locations
  Clone ID: PAT_MRT3847_38419C.1.pep
CTLILLRLSSHTHQTIRVQTQLGMSKXQSFQVIREKQQLGMXXKNEP

SEQ ID NO: 217489 - protein, 42 aa, Glycine max
  Clone ID: PAT_MRT3847_3841C.1.pep
FLAINVVFKFHRWTSLVCKSGMPLSTQTCWLLLWVVAFMFDI

SEQ ID NO: 217490 - protein, 254 aa, Glycine max
  Clone ID: PAT_MRT3847_38420C.1.pep
IGYRARGRRYRFRLELKQEEDQDLDEGAWNIAMAGGTCLGLVARTVGDDIVPLVMPFIEENITKPDWRQREAASYAFGSILEGPSPDKLAPLVNHALPFMLSALVKDPNNHVKDTTAWTLGRMFEFLHSSIVGTPIINEGNCQQIITVLLQSMKDVPNVAEKACGALYFLAQGYEDVGPTSPLTPFFQEIVQSLLTVTHREDATESRLRTAAYETLNEVVRCSTDETATLVVQLVSCIMMELHKCLEVTQNIGS

SEQ ID NO: 217491 - protein, 92 aa, Glycine max
  unsure (1)..(92): unsure at all Xaa locations
  Clone ID: PAT_MRT3847_38421C.1.pep
RGKMKTRQELIDSCTILIWTASALHAAVNFGQYPYGGYILNRPTLSRRFMPXKGSPEYDELAKNPQKVYLKTITGKSINIYFLTTFFRNLDL

SEQ ID NO: 217492 - protein, 28 aa, Glycine max
  Clone ID: PAT_MRT3847_38422C.1.pep
NTLLSFQLINIPPTYLRNASFFLPLPPH

SEQ ID NO: 217493 - protein, 41 aa, Glycine max
  unsure (1)..(41): unsure at all Xaa locations
  Clone ID: PAT_MRT3847_38423C.1.pep
MATXTSLIXLXNKXQRACTXLGXHGGEGLSLXEALXSVAVV

SEQ ID NO: 217494 - protein, 65 aa, Glycine max
  Clone ID: PAT_MRT3847_38424C.1.pep
SNQLELSCSLSTIGYCLPTLIVGNYGLLITTALAPNPDYYRKLLLDTSTRQRYPSLLSLKVLEDQ

SEQ ID NO: 217495 - protein, 102 aa, Glycine max
  Clone ID: PAT_MRT3847_38425C.1.pep
AGHAGKRPHKAVSGSNQIDSQLDQTSKTVSSETLSNRSFPLINECRYLDPRLSKITLFSSHPFVAVMFDLPITIFVMKQFDDVRDTYIASMFFSTILLYMHG

SEQ ID NO: 217496 - protein, 265 aa, Glycine max
  unsure (1)..(265): unsure at all Xaa locations
  Clone ID: PAT_MRT3847_38426C.1.pep
MASPAAARTPVSTGASPMQRLSTFKNPSSAAASTATTTPSSSALDSLASDPIFSAFLSPSFSSTSFSSAALSSGSPASTAEKLHHAIRLLENQLRSEVLSRHHDLLSQLSSLHHADHALSTLRSALSSLQSSVRRLRSELSDPHRSVAAKTAQLSNLHRTTELLQHSIRALRLSKKLRDLMAAPDPEKLDLAKAAQLHFEILSLCDEYDLSGIDAVDEELNWVRETGDLLRSVAMKVLERGMDGLNQAEVGTGLQVXYNLGELKV

SEQ ID NO: 217497 - protein, 89 aa, Glycine max
  Clone ID: PAT_MRT3847_38427C.1.pep
HASDNMDSSRHSVVIVAFLLAFSIMASDICIKSEARGPIYKSHCDKDFECRVGCHNIMCGCRAVCIDHVCQCPHPSSTNNNILGVAPPN

SEQ ID NO: 217498 - protein, 173 aa, Glycine max
  Clone ID: PAT_MRT3847_38428C.1.pep
IPHTHSIFTFLSRSQTQIIKNKVLAMASKRILKELKDLQKDPPTSCSAGPVAEDMFHWQATIMGPPDSPYAGGVFLVTIHFPPDYPFKPPKVAFRTKVFHPNINSNGSICLDILKEQWSPALTISKVLLSICSLLTDPNPDDPLVPEIAHMYKTDRNKYESTARSWTQKYAMG

SEQ ID NO: 217499 - protein, 73 aa, Glycine max
  Clone ID: PAT_MRT3847_38429C.1.pep
KHSRGFPKEPPSLKKFLKNRALPDPNYQNTRWVFKAKFLGGKKGLCSNKPPLKKKTPNFLFPAIPKKGKIIPC

SEQ ID NO: 217500 - protein, 63 aa, Glycine max
  Clone ID: PAT_MRT3847_3842C.1.pep
AHVQLLQSPYSCLMAHVPLTGWLAFSVTHGCFFLGVGVDGSFPPGSLVCSLAPFSAFVSYIYL

SEQ ID NO: 217501 - protein, 36 aa, Glycine max
  Clone ID: PAT_MRT3847_38430C.1.pep
LGMFTSVLFIGLVLWFVRYDPSFERTSKRTSEGTNG

SEQ ID NO: 217502 - protein, 44 aa, Glycine max
  Clone ID: PAT_MRT3847_38431C.1.pep
FFLLIFSSGGVVLASRDGKIVCENTLDARLDVVFRKKLPEVKKN

SEQ ID NO: 217503 - protein, 396 aa, Glycine max
  Clone ID: PAT_MRT3847_38432C.1.pep
MEEDYGYRRTAKIALVAIMVLASVAVFALLVVFAYYCYILNKVSNRRKSLKKVEDANLNEKSDFANLQVVAEKGLQVFTFKQLHSATGGFSKSNVIGHGGFGLVYRGVLNDGRKVAIKFMDQAGKQGEEEFKVEVELLTRLHSPYLLALLGYCSDSNHKLLVYEFMANGGLQEHLYPVSNSIITPVKLDWETRLRIALEAAKGLEYLHEHVSPPVIHRDFKSSNILLGKKFHAKVSDFGLAKLGPDRAGGHVSTRVLGTQGYVAPEYALTGHLTTKSDVYSYGVVLLELLTGRVPVDMKRPPGEGVLVSWALPLLTDREKVVKIMDPSLEGQYSMKEVVQVAAIAAMCVQPEADYRPLMADVVQSLVPLVKTQRSPSKVGSCSSFNSPKLSPGPTF

SEQ ID NO: 217504 - protein, 164 aa, Glycine max
  Clone ID: PAT_MRT3847_38433C.1.pep
MERIMIVGCSGTGKSTLARTLSEILGIEAYHNDRLYWSPGWVEVSEEQHSKAHEEIISKEKWIFDGNHSKTMGKRLERADTVIYLDFSVWSCLYGVVKRKFQYGSQTRPDVTEGCPEKVDWEFIKFIMNYNKERAPKMKQKIAEYPEKKVFIFKNRGEVDAFVE

SEQ ID NO: 217505 - protein, 109 aa, Glycine max
  unsure (1)..(109): unsure at all Xaa locations
  Clone ID: PAT_MRT3847_38434C.1.pep
MFSYCPRMMLLIASILPALVECTERHYKFHEVPKQTNRTCSSKSIVTINGKYPGPTLYAREDDTVLGKDINQVNHNVTIHWLGVRQLXTGRADGPANVTQCPIQPRAKP

SEQ ID NO: 217506 - protein, 54 aa, Glycine max
  Clone ID: PAT_MRT3847_38435C.1.pep
IITYEVLHDVSKKMRNSSSLWWCPQPLLVPGKHSHIRHNRNTVVSYRCLHMFLA

SEQ ID NO: 217507 - protein, 68 aa, Glycine max
  unsure (1)..(68): unsure at all Xaa locations
  Clone ID: PAT_MRT3847_38436C.1.pep
KEVSLLQKHWTQTAKYSYSDKXXYGAMRTXQKXLWAISNQTRQNHDHLVRCAYPVASSSLNMYSLGHR

SEQ ID NO: 217508 - protein, 129 aa, Glycine max
  Clone ID: PAT_MRT3847_38437C.1.pep
GSPGLHFVPVSPLPFWVPGPPCRQGTFFRLLPCDNGIVPTKMPFPGSFLDVAPWSHLVHRYMVSPDLPPLGGSPQPNACLVFNRSSCFPDGRQVVIIDQCPGFPIHGCGGSLIRGWVFFSKKKKKNPNK

SEQ ID NO: 217509 - protein, 107 aa, Glycine max
  Clone ID: PAT_MRT3847_38438C.1.pep
KAQADTHFFCSISLSDRSFGFLPKRLIFWCLCFGFQSSRFGFDRVNVHGFKLTEPSFRFRRYQVLNLSTLYFSTIVKFFYYPRFMLYDFCVCMSVLLSLIYGGGDFF

SEQ ID NO: 217510 - protein, 87 aa, Glycine max
  Clone ID: PAT_MRT3847_38439C.1.pep
QFCSSIKKFGRIRCLFCCYRGLGLFVEFRVTSISMAASRHGGYRDNEFRDRESNFDVSRRGFNNNSKQEYDKITNGGRDVVRVGSKD

SEQ ID NO: 217511 - protein, 364 aa, Glycine max
  Clone ID: PAT_MRT3847_3843C.1.pep
MHTLLRSTLRTKTASSLAYAVVSRSAHENLLQAPLLSRSNSTEASLAKDNSSNDVKNGQGYKGHSMLAPFTAGWQSSDLHPLIIEKSEGSYVYDINGKKYLDALAGLWATSLGGSEPRLVDAAVAQLKKLPFYHSFWNRTTLPSLDLAKELLEMFTARKMGKAFFVNSGSEANDTQVKLVWYYNNALGRPDKKKFIARAKSYHGSTLIAASLSGLPALHQKFDLPAPFVLHTDCPHYWRYHLPGETEEEFSTRLAKNLEQLILKEGPETIAAFIAEPVMGAGGVIPPPSTYFEKVQAVVKKYDILFIADEVICAFGRLGTMFGCDKYNIKPDLVSLAKALSSAYLPIGAVLVSPEISEVIHDQS

SEQ ID NO: 217512 - protein, 138 aa, Glycine max
  Clone ID: PAT_MRT3847_38440C.1.pep
MAPLKLYGMPLSPNVVRVATVLNEKGLDFEIVPVDLTTGAHKQPDFLALNPFGQIPALVDGDEVLFESRAINRYIASKYASEGTDLLPATASAAKLEVWLEVESHHFHPNASPLVFQLLVRPLLGGAPDAAVVEKHAE

SEQ ID NO: 217513 - protein, 96 aa, Glycine max
  Clone ID: PAT_MRT3847_38441C.1.pep
LHNLCVSSSAISMELEVQVVGGIDSCFVSLPLSLIQTLQSTRSSPIPQILALELRSPTHPPHTWFVAWSGATSSSSSAIEVSPQFAECVSLPNHAT

SEQ ID NO: 217514 - protein, 56 aa, Glycine max
  Clone ID: PAT_MRT3847_38442C.1.pep
MPATAGRVRMPANNRVHSSAALQTHGIWQSAIGYDPYAPNKEDKRDSSQNLPNAEP

SEQ ID NO: 217515 - protein, 89 aa, Glycine max
  unsure (1)..(89): unsure at all Xaa locations
  Clone ID: PAT_MRT3847_38443C.1.pep
ISIRGWGGLIFYEGGEHFLCIVIFLEEAKYVVLGGGFLRVGILSSCWDIISLAGGVALXXCVVWGGVKCFLKISSIPLVCVLKTLKIXX

SEQ ID NO: 217516 - protein, 74 aa, Glycine max
  unsure (1)..(74): unsure at all Xaa locations
  Clone ID: PAT_MRT3847_38444C.1.pep
XRVXGXXXFNXXXXQXXXXXXXIXXXXAXLILPXRXGNXVXXXXVKSXXSSXATXLXTXXLEPXXXXCXTRAXD

SEQ ID NO: 217517 - protein, 57 aa, Glycine max
  Clone ID: PAT_MRT3847_38445C.1.pep
LSFRLHTFIMQPQMRHWCVARFKKDSLEKLINLHSHVVSPSCYSYNTGVSCIGASLP

SEQ ID NO: 217518 - protein, 117 aa, Glycine max
  unsure (1)..(117): unsure at all Xaa locations
  Clone ID: PAT_MRT3847_38446C.1.pep
VRETEGRKSKRGHGGSAGNKFLMSLGLPVAATVKCPDNTAANKLDIIAVKGIKGHLNRLASACVGDMVMATVKKGRPDLRKNVLPAVIVRQRAPXRLKDGVYMYCEDNAGVIVNPKR

SEQ ID NO: 217519 - protein, 86 aa, Glycine max
  unsure (1)..(86): unsure at all Xaa locations
  Clone ID: PAT_MRT3847_38447C.1.pep
HWXXSPRFSTMTCXLXXXTXXXYXNXXSSLSSAPKTLTYSHHXTTIPDXAFAMGXRCCCDRXERXTXXEXISXRVRXIEGSERKWE

SEQ ID NO: 217520 - protein, 82 aa, Glycine max
  Clone ID: PAT_MRT3847_38448C.1.pep
CISAVHTQRSSAAHIAETLLSTAANQRPREEDLTSSLVGGGGGQLLTLSRSRVNSWAWEEVSDCLMGQRNGGDDNHHHHVRV

SEQ ID NO: 217521 - protein, 238 aa, Glycine max
  unsure (1)..(238): unsure at all Xaa locations
  Clone ID: PAT_MRT3847_38449C.1.pep
MASLGVQAVHPPPLTSTSDPPPLFDGTTRLYISYSCPYAQRVWIARNFKGLKDKINLVPINLQDRPAWYKEKVYPENKVPSLEHNGKVLGESLDLIKYVDENFEGTPLFPRDPAKKEFGEQLISHVDTFSRDLFVSLKGDAVQQASPAFEYLENALGKFDDGPFLLGQFSLVDIAYFHLLVERXQIVFAANXHNIARRPKLATWFEELNKLNAYTETRVDPQEIVDFFKKRFLASFKK

SEQ ID NO: 217522 - protein, 131 aa, Glycine max
  Clone ID: PAT_MRT3847_3844C.1.pep
MPSSLHFDRFNPITHAATTVAIANGVNCPKQPQAPPSSTAARRLVVPSLSSGRGIAAPDTVALHHAHVVDPNQCCSIVTQHINAPVSAGWAEVRRFDNPQGYKNFVRSCHVITGDGIRVGAVREVRLPPTP

SEQ ID NO: 217523 - protein, 56 aa, Glycine max
  Clone ID: PAT_MRT3847_38450C.1.pep
STRFFACGTVILAEYTEYTGNFTSVAAHCLLKLPSSNNKFTYNCYGHTSNYFGVTG

SEQ ID NO: 217524 - protein, 237 aa, Glycine max
  Clone ID: PAT_MRT3847_38451C.1.pep
MASLGVRPVLPPPLTSISDPPPLFDGTTRLYISYSCPYAQRVWIARNYKGLQDKINLVPINLQDRPAWYKEKVYPENKVPSLEHNGKVLGESLDLIKYVDANFEGTPLFPSDPAKKEFGEQLISHVDTFSKDLFVSLKGDAVQQASPAFEYLENALGKFDDGPFLLGQFSLVDIAYIPFVERFQIVFAEVFKHDITEGRPKLATWFEELNKLNAYTETRVDPQEIVDLFKKRFLPQQ

SEQ ID NO: 217525 - protein, 71 aa, Glycine max
  Clone ID: PAT_MRT3847_38452C.1.pep
VVKPVLISFKFHFSPFLYISCQWYRRDEPIIGVTIKTNSTFICWEEKICQLLEPITQTRPSSLPFLNISSS

SEQ ID NO: 217526 - protein, 65 aa, Glycine max
  Clone ID: PAT_MRT3847_38453C.1.pep
LVTKKTFPNYIKKCEKIWECLNYLLFLEIFVGQHVLYCCSITPSFKKIFCPQNKVCIGSNAQPKI

SEQ ID NO: 217527 - protein, 61 aa, Glycine max
  unsure (1)..(61): unsure at all Xaa locations
  Clone ID: PAT_MRT3847_38454C.1.pep
LTRGGSSFFLFXXXXYQVSAQTTGXEXXXPXKAQNPXLTXPAAXFRXGGLNXLEXRNSSVF

SEQ ID NO: 217528 - protein, 63 aa, Glycine max
  unsure (1)..(63): unsure at all Xaa locations
  Clone ID: PAT_MRT3847_38455C.1.pep
RXHAYVSSEFGSXXXXRNTWXXKXDXSFRXRRRRXRXRRXXSSGIXXEFXEDXGXYNIKSSXP

SEQ ID NO: 217529 - protein, 33 aa, Glycine max
  unsure (1)..(33): unsure at all Xaa locations
  Clone ID: PAT_MRT3847_38456C.1.pep
YYYYMSSETXQARTCIIFXLCVIVIPHLLVLKY

SEQ ID NO: 217530 - protein, 346 aa, Glycine max
  Clone ID: PAT_MRT3847_38457C.1.pep
MSDHDYHAYYSGNKSFAKRRFRDRSKEALSKQAVKLAKQAEEHERFINKVTHLLGVLGFGWFCFIFGARPQAVPLVYCLFYVIFVPLRWIYYRFKKWHYYLLDFCYYANTIFLIYLLFYPKNEKLFLVCFSFAEGPLAWALIVWRCSLVFSSVDKIVSVLIHLLPELVFFTIRWWNPATFEAMRPAGMAGRSTWPYIEDKSYLWMWLFLVPLAVYILWQVLYFLIVNVLRQQRFLRDPEAMTSYRELSKKAQKANNIWWRLSGLLGDQNRMLMYIFLQGIFTVATMALTVPIFLSYELHVVFQILKVSASIWNGGSFLLEVMPRQAILKEKKKSEMQPVEAQPNHQ

SEQ ID NO: 217531 - protein, 54 aa, Glycine max
  Clone ID: PAT_MRT3847_38458C.1.pep
KAYSYTYYDATSTFTCSGADYTITCCPCVPSLKSSTDSSPKGMDAGSGSGGGSS

SEQ ID NO: 217532 - protein, 61 aa, Glycine max
  Clone ID: PAT_MRT3847_38459C.1.pep
PSSMKCTVSCESGQGGSISIQDVVLDGKKEPYPSTYTRNLPQHMVGHEFANKRMNVVLVSD

SEQ ID NO: 217533 - protein, 101 aa, Glycine max
  unsure (1)..(101): unsure at all Xaa locations
  Clone ID: PAT_MRT3847_3845C.1.pep
MSRPHDGHRSFFPMGNPLRMILPRGARLPPKLTELLTPYEDGLASSSRKVKPEATSXVFTLSWMKLAVECLSELHTTIATLITELELALSDWDETWVDSYL

SEQ ID NO: 217534 - protein, 86 aa, Glycine max
  unsure (1)..(86): unsure at all Xaa locations
  Clone ID: PAT_MRT3847_38460C.1.pep
MASLNVAFLAAVLCMVVASAPMAHAPITCGQVTNILINCIGYLQNGRTPPSGCCNXVNNLNATANTNADRQTACNCLKSVSSPISG

SEQ ID NO: 217535 - protein, 127 aa, Glycine max
  unsure (1)..(127): unsure at all Xaa locations
  Clone ID: PAT_MRT3847_38461C.1.pep
MSVSMASLKVAFLAAVLCMVVVSAPMAHAAITCGQVTSSLANCIGYLQKGGTPSSGCCNGVKSLNAAAKTTDDRQTACNCFMSAASQICGFNADNAGXLSGKCXVCIPYKISTCTNCATIKVLKRKS

SEQ ID NO: 217536 - protein, 108 aa, Glycine max
  unsure (1)..(108): unsure at all Xaa locations
  Clone ID: PAT_MRT3847_38462C.1.pep
AAVLCMVVVSAPMAHAAITCGQVTNSLINCISYLHNGGTPPSGCCNXLKSLNAGAKTTRDRQTACNCLKSAASQISCFKTNNAASLPSKCIFSIPYNISTSTNCSTIN

SEQ ID NO: 217537 - protein, 107 aa, Glycine max
  Clone ID: PAT_MRT3847_38463C.1.pep
AAVLCMVVVSAPMAHAAITCGQVTNSLINCIGYLQNGRTPPSGCCNGMKSLNVYVKTTAEPQTACNCLKSDGSQIFGFKVNSAVSLPGKCGVFIPYNISTCTNCATI

SEQ ID NO: 217538 - protein, 50 aa, Glycine max
  Clone ID: PAT_MRT3847_38464C.1.pep
PLVQANNVVPTKPQLGLTTQSNWVLKLGGNLPLPNFAQIKKGSGELPGHR

SEQ ID NO: 217539 - protein, 106 aa, Glycine max
  unsure (1)..(106): unsure at all Xaa locations
  Clone ID: PAT_MRT3847_38465C.1.pep
XLCMVVVSAPIAHPTITCGQVTNSLINCISYLQIGGTPTSVCCNGVNILNAADNTTADRQTACNCLKSAASQISGFKANNSPSLPSXCRVSIPYKISTSTNCATIK

SEQ ID NO: 217540 - protein, 127 aa, Glycine max
  Clone ID: PAT_MRT3847_38466C.1.pep
VCRKSKVDKNKEVVEKMGDGSSKKTINEDDERKDSGVDSGKKVIMESKVDDGKDSLVANKHSGNKKEEEDLEWDEIENLSRIDEEKEVRTGSPTKVDLRKRLSAAQEQDEEDDLSWDIEDDDEHAKA

SEQ ID NO: 217541 - protein, 92 aa, Glycine max
  unsure (1)..(92): unsure at all Xaa locations
  Clone ID: PAT_MRT3847_38467C.1.pep
MARLTVAFLAAALCMVVVSAPMAHAAITCGQVTNSLINCXIGYLQNGGTPPSGCCNGVKSLNADVKTTADRQTACNCLKSAVSQIFGFKANN

SEQ ID NO: 217542 - protein, 69 aa, Glycine max
  Clone ID: PAT_MRT3847_38468C.1.pep
GPGIPGDPASRMCIYSDSQPRRNETANPTEIGSRDSQQETTHDGYRPRRLITYEPPFRGGRSRRGSITS

SEQ ID NO: 217543 - protein, 117 aa, Glycine max
  Clone ID: PAT_MRT3847_38469C.1.pep
MASLKVAFLAAVLCMVVVSAPMAHAAITCGQVTSSLANCISYLQNGGTPSSGCCNGVKSLNAAANTTADRQTACNCLNSAASQISSFNTNNSSSLPIKCRISIRYNIITSTNYSTIK

SEQ ID NO: 217544 - protein, 81 aa, Glycine max
  unsure (1)..(81): unsure at all Xaa locations
  Clone ID: PAT_MRT3847_3846C.1.pep
FVXXFXWLLRCFSSXGCXLPARGFSQQFERLXXYRESPXLRLXSXPXSIXSLXTPFIVSGCLGIHXKXRAEFRAYVXVXXT

SEQ ID NO: 217545 - protein, 118 aa, Glycine max
  unsure (1)..(118): unsure at all Xaa locations
  Clone ID: PAT_MRT3847_38470C.1.pep
MASAKVAFVAAVLCMVVVSAPMAHAAITCGQVTSSLANCIGYLQKGGTPSSGCCNGVKSLNADVKTTVDRQTACYCLKSAVSQISGFNANNAVXLPGKCGVSIPYKISTFTNCATIKV

SEQ ID NO: 217546 - protein, 100 aa, Glycine max
  unsure (1)..(100): unsure at all Xaa locations
  Clone ID: PAT_MRT3847_38471C.1.pep
SVENSNXNIENYKAEWEQREHHLVNCLKLTEEENSSLGNXINRLIRLLKETXEEANXKREXEGQLKENLKEVEAEVIHLQEDLXEAXAEXMKLKDSLLDX

SEQ ID NO: 217547 - protein, 115 aa, Glycine max
  Clone ID: PAT_MRT3847_38472C.1.pep
MASLKVAFLAAVLCMVVVSAPMAHAAITCGQVTSSLINCIGYLQNGGTPPSGCCNGVKSLNAAAKTTADRQTACNCLKSAASQISGFKANNAASLPGKCGVSIPYKISTSTNCAT

SEQ ID NO: 217548 - protein, 53 aa, Glycine max
  unsure (1)..(53): unsure at all Xaa locations
  Clone ID: PAT_MRT3847_38473C.1.pep
YGXXXXSPRGRSPRHRSLSPRARTYSRSHLYRVRAXVPYANGNALRNPRTSRR

SEQ ID NO: 217549 - protein, 60 aa, Glycine max
  Clone ID: PAT_MRT3847_38474C.1.pep
INLSQELQQCGLALNSMRRIMLFPPYTRGCLRNSDWSFLLGNASYVIYHGRLAKILASVL

SEQ ID NO: 217550 - protein, 57 aa, Glycine max
  unsure (1)..(57): unsure at all Xaa locations
  Clone ID: PAT_MRT3847_38475C.1.pep
KMPKGSFNNPGKKEVIFPAPPLLKDFFKPTQGSPKFVLDTPIKFXVGPKFQVKNPRF

SEQ ID NO: 217551 - protein, 201 aa, Glycine max
  unsure (1)..(201): unsure at all Xaa locations
  Clone ID: PAT_MRT3847_38476C.1.pep
HASGHSGIASVLVVAIWVLTEGKDKCLNSEESPLITALIGAVIGHYSCCNGDTWSSELGILSDEKPRLITNFKFVKKGTNGGVTKRGLLAAAAAGSVIGLSFVLLGISATRCEGKGSTVLKQLLVIPIATLAGLCGSVIDSLLXATLQFTGFCSIRGKMVGKPGPTVRRISGANILDNNAVNFVSILLTSFFTSIACLYIF

SEQ ID NO: 217552 - protein, 57 aa, Glycine max
  Clone ID: PAT_MRT3847_38477C.1.pep
ILVSLTMTTLAVFSSHHQISPYHRFQPSLMQKFTLKQFHLTIHLNKPFEFSQELLDC

SEQ ID NO: 217553 - protein, 71 aa, Glycine max
  Clone ID: PAT_MRT3847_38478C.1.pep
ADPTKIEEELEKNKAEAAEKIENKVATIHKEAEERRTIIEAKKGEDLLKAEEQAGEYGATGTATKKLLGCF

SEQ ID NO: 217554 - protein, 54 aa, Glycine max
  unsure (1)..(54): unsure at all Xaa locations
  Clone ID: PAT_MRT3847_38479C.1.pep
TIDDVKAKIHDXDRIPHDQELLIFVGKHLEDGRTLADYNIHNETTLYLGLRLRG

SEQ ID NO: 217555 - protein, 54 aa, Glycine max
  Clone ID: PAT_MRT3847_3847C.1.pep
LQPSPMVVAIFLEYPHIGRCVVRNMCQTVAVEVIMSVEKKDPTGAKVTKAAAKK

SEQ ID NO: 217556 - protein, 94 aa, Glycine max
  Clone ID: PAT_MRT3847_38480C.1.pep
LNDVVSKSFVGRYFKLEARKSCFTRELRAAMATFLTMVYIITVNATIIAVSGGTCSVEDCSSPTRPDCKVKPDVGYESCLAKTKSDLVVATAVS

SEQ ID NO: 217557 - protein, 569 aa, Glycine max
  Clone ID: PAT_MRT3847_38481C.1.pep
MALSMTQQIGTLAGATVPDSSAGESTAAVSAAAVWKSPTASLKCKVMRTDGCAEGLSPPLSPCRSPVLRADLSAACQAFTAEVAEEEYVAGGKEEKGKGKEGVPVFVMMPLDSVTAGNAVNRKKAMNAAMAALKSAGVEGVMMDVWWGLVEREKPGEYNWGGYVELMEMAKKHGLKVQAVMSFHQCGGNVGDSCTIPLPKWVVEEIDNDHDLAYTDQWGRRNYEYISLGCDTLPVLKGRSPVQCYADFMRAFRDTFKHLLGDTIVEIQVGMGPAGELRYPSYPEQNGTWKFPGIGAFQCYDKYMLSSLKAAAEAHGKPEWGSTGPTDAGHYNNWPEDTQFFRKEGGGWDGPYGEFFLTWYSQMLLEHGDRILSSATSIFDNTGVKISVKVAGIHWHYGTRSHAPELTAGYYNTRFRDGYLPIAQMLARHGAIFNFTCIEMRDHEQPQEALCAPEKLVKQVALATQKAQVPLAGENALPRYDEYAHEQIIRASQLDVDGESGDREMCAFTYLRMNPHLFEPNNWRKFVGFVKKMKEGKSAHKCWEEVEREAEHFVHVTQPLVQEAAVLMH

SEQ ID NO: 217558 - protein, 74 aa, Glycine max
  unsure (1)..(74): unsure at all Xaa locations
  Clone ID: PAT_MRT3847_38482C.1.pep
DTRVLSISRDQGKVNQVSCIIECEGISGENVTNLCPVQFPAGTSQTCNREQRFYSLDPDHKGPLLXRVLNFIQS

SEQ ID NO: 217559 - protein, 73 aa, Glycine max
  Clone ID: PAT_MRT3847_38483C.1.pep
YFLGSIFPSHSYMHFVSHGSIRSLSVSYMKSQHHMSCGVPRWHLTTLLWWFNAHVFDEVLVSLAVARLKGRQL

SEQ ID NO: 217560 - protein, 74 aa, Glycine max
  Clone ID: PAT_MRT3847_38484C.1.pep
GFLPMTARNLLSCAISGAVVVSAIVLKSLQVVLGVHQWLPLLESITMWSSPSVTNVMSLSVVPALMVPVLPASY

SEQ ID NO: 217561 - protein, 87 aa, Glycine max
  Clone ID: PAT_MRT3847_38485C.1.pep
AKHTHTNTHTHTHTEEKRYIEREGERDRETERERCTSGYDRYHVAAQQSICASLGKVTSNLLQLSLRFRYNFAVENKEECIQEALQK

SEQ ID NO: 217562 - protein, 54 aa, Glycine max
  Clone ID: PAT_MRT3847_38486C.1.pep
FIRELSSNLRAALASYNNFGGEARMHPFGTRPLVILFCPPAVLRGQLFQHCFME

SEQ ID NO: 217563 - protein, 71 aa, Glycine max
  Clone ID: PAT_MRT3847_38487C.1.pep
TSCVEIQMWEGPMIFEDEVAIVPKICLFFESDTSAHTVESTNGCFEESSPYFSNIMVSYDSSFQSRLLLTS

SEQ ID NO: 217564 - protein, 31 aa, Glycine max
  Clone ID: PAT_MRT3847_38488C.1.pep
NFWLGQLKLCFPPCLLKYYILVFLSYFPRLF

SEQ ID NO: 217565 - protein, 44 aa, Glycine max
  Clone ID: PAT_MRT3847_38489C.1.pep
HASDVVWDDRFCSIFCSQCLTADGPLFASEHYRWFLETWLSVIT

SEQ ID NO: 217566 - protein, 50 aa, Glycine max
  Clone ID: PAT_MRT3847_3848C.1.pep
GTPHHTYLNLITTYNITPNYYYYTPTKRSSKQKIKQTITYIKSYKHIKIS

SEQ ID NO: 217567 - protein, 135 aa, Glycine max
  unsure (1)..(135): unsure at all Xaa locations
  Clone ID: PAT_MRT3847_38490C.1.pep
RSRITGLTHASGENTTARKSVLGAPRSSWRILSSIQHHAYTNGNYLSANQHIEYIRTVELDLAIICCDVMIVIDEHLMPSAATGESTVFYYHIIRHYYRYLAKFQSSPDTNEAADQSTIASESATAAXQADLPPT

SEQ ID NO: 217568 - protein, 810 aa, Glycine max
  Clone ID: PAT_MRT3847_38491C.1.pep
MEDNERVCDYFTRLFRIVNKMQECESYGRKREPGSSNKGGKGKFDKSKIRCYNCQGWGHFANECGSADVKEKKEKYSKNEAHMAQAKQHDDSESDSNGEAVVLMTTTCNFTSNGDSETWYLDTSFSNHMTCNLSWLVSLDDSNKCTIKFAGQNTIRSVGIGNVAFRRSNESLVVIEEVMYVPDMGCKLMSYGQLLEKEFSTSLKNKIIVSNKICERCLTSKQPRNFFKSESHARATEVLGVVHSNVYGPLEVFSMGEFKVLNENHSGKSIKIIRTDGGGEYTSNDFESFCTNHGIMHEITASYTPQHNGLAERRNRTMMNMARCMLKEKHFPSTLWGEAMSTTTYILNKCPTKKIKNRVPEEAWTRRKPTMKHLRVFGSLCFKHMPDERRKKLQDKSVPMILVGYHPTDAYRLYDPLTHKIFISIDVVIDEDGSWDWKRKCTISTLFGDENNETRLSEVEEIGADHEKPADVHQRPQRDKHLPLKYKDYHVDMPNILGHAAVADEEEKEEAKRKTSEFVHFAFLADTEPIDHKDALQQDHWKAAMEEELRAIERNQIWKLVDLPPNKSSIDVKWVFKLDVKSTFLNGTLEEEVFVKQPPGFEIKGEEDKKYATNLLKRFKMMSCNLASTPVDPGLGLVKDESEKSVDSTLFKQVVGSLRYLCNTRPDISFAVGLISRFMDNPKASHWVVAKRIMRYLRGTLSYGVLFSKDSDQTALTGLVEILESITMLMGFSDSNWCRDKVERKSTTGYLFKFLAHERSKHIETRFHFICEKMSKKQLDLKYCNTEMQLADILTKGLKVKRFIVLRDKL

SEQ ID NO: 217569 - protein, 43 aa, Glycine max
  Clone ID: PAT_MRT3847_38492C.1.pep
IGSCVDAAEGDASTELTVDISTGLLDVGPWLLANDIGRILDVS

SEQ ID NO: 217570 - protein, 898 aa, Glycine max
  Clone ID: PAT_MRT3847_38493C.1.pep
MNERSPVKFQDQALYASKQKQGGKTKKWKGNFKRQSNKQEGKSFSFQGKHDHTDSDQDQSESYGRKREPGSSNKGGKGKFDKSKIRCYNCQGGPFTNECGSADVKEKREKSSKNEAHMAQAKQHDDSESDSNGEAVVLMTTTCNFTSNGDSETWYLDTSFSNHMTCNLSWLVSLDDSNKCTIKFAGQNTIRSVGIGNVAFRRSNESLVVIEEVMYVPDMGCKLMSYGQLLEKEFSTSLKNKFLDLLDLSDVRVFKVPLSRNRTFQVNMNNADVQCLASTVNEDESWLWHSRLGHLNFKGLNKLPLPKLVRAWPRIKVSIRFCERCLPSKPTQELFQIRITARATEVLGVVHSNVYGPLEVFSMGAKSEVPFVFKEFKVLNENHSGKSIKIIRTDGGGEYTSNDFESFCTNHGIMHEITASYTPQHNGLAERRNRTMMNMARRKKLQDKSVPMILVGYHPTDAYRLYDPLTHKIFISIDVVIDEDGSWDWKRKCTISTLFGDENNETRLSEVEEIGADHEKPADVHQRPQRDKHLPLKYKDYHVDMPNILGHAAVADEEEKEEAKRKTSEFVHFAFLADTEPIDHKDALQQDHWKAAMEEELRAIERNQIWKLVDLPPNKSSIDVKWVFKVKLKPYGIVAKHKARLIARGFLQRAGLDYSEVFAPIARLETIRLLDVKSTFLNGTLEEEVFVKQPPGFEIKGEEDKKYATNLLKRFKMMSCNLASTPVDPGLGLVKDESEKSVDSTLFKQVVGSLRYLCNTRPDISFAVGLISRFMDNPKASHWVVAKRIMRYLRGTLSYGVLFSKDSDQTALTGLVEILESITMLMGFSDSNWCRDKVERKSTTGYLFKFLGAPISWCSKKQPIVALSSYQAEYIAACYVACQALWLDSLLEELKIEI

SEQ ID NO: 217571 - protein, 908 aa, Glycine max
  Clone ID: PAT_MRT3847_38494C.1.pep
MNERSPVKFQDQALYASKQKQGGKNKKWKGNFKRQSNKQEGKSFSFQGKHDHTDSDQDQSESYGRKREPGSSNKGGKGKFDKSKIRCYNCQGWGHFANECGSADVKEKKEKYSKNEAHMAQAKQHDDSESDSNGEAVVLMTTTCNFTSNGDSETWYLDTSFSNHMTCNLSWLVSLDDSNKCTIKFAGQNTIRSVGIGNVAFRRSNESLVVIEEVMYVPDMGCKLMSYGQLLEKEFSTSLKNKFLDLLDLSDLVEGLPRIIVSNKICERCLTSKQPRNFFKSESHARATEVLGVVHSNVYGPLEVFSMGAKSEVPFVFKEFKVLNENHSGKSIKIIRTDGGGEYTSNDFESFCTNHGIMHEITASYTPQHNGLAERRNRTMMNMARCMLKEKHFPSTLWGEAMSTTTYILNKCPTKKIKNRVPEEAWTRRKPTMKHLRVFGSLCFKHMPDERRKKLQDKSVPMILVGYHPTDAYRLYDPLTHKIFISIDVVIDEDGSWDWKRKCTISTLFGDENNETRLSEVEEIGADHEKPADVHQRPQRDKHLPLKYKDYHVDMPNILGHAAVADEEEKEEAKRKTSEFVHFAFLADTEPIDHKDALQQDHWKAAMEEELRAIERNQIWKLVDLPPNKSSIDVKWVFKVKLKPYGIVAKHKARLIARGFLQRAGLDYSEVFAPIARLETIRLLDVKSTFLNGTLEEEVFVKQPPGFEIKGEEDKKYATNLLKRFKMMSCNLASTPVDPGLGLVKDESEKSVDSTLFKQVVGSLRYLCNTRPDISFAVGLISRFMDNPKASHWVVAKRIMRYLRGTLSYGVLFSKDSDQTALTGLVEILESITMLMGFSDSNWCRDKVERKSTTGYLFKFLGAPISWCSKKQPIVALSSYQAEYIAACYVACQALWLDSLLEELKIEI

SEQ ID NO: 217572 - protein, 243 aa, Glycine max
  Clone ID: PAT_MRT3847_38495C.1.pep
NINYMILEYGKEGLGDKALWIFVDMLQSGLKPSDYTFTNLISVCDSSVGLYVGKQLHGLAVKYGFMCKTSLGNAVITMYGQHGKVKEAERVFGELDERSLISWSALLSVFVKNGHSNKAFEIFLNMLQVGVPLDSGCFSTVLDGCSEWNNLKFGIQIHGLAIKLGHVSDVNSGTSLVDLYANCGSLQSARVIFDRLPNKTIASFNAILVGYQNSKIRDDEEDPMGFFSKVRFNGVKPDCVTFS

SEQ ID NO: 217573 - protein, 52 aa, Glycine max
  Clone ID: PAT_MRT3847_38496C.1.pep
PSNILGMNHQMFHHFMGVVLGPTLVSHFFGSRPFLWVPNLFVDIAYQTNIVV

SEQ ID NO: 217574 - protein, 55 aa, Glycine max
  Clone ID: PAT_MRT3847_38497C.1.pep
NHSPSLFHKLLIQSNPNNSSSNYSPILKSTTTMIKRFLNNLLSLSLSITKKCHHT

SEQ ID NO: 217575 - protein, 83 aa, Glycine max
  Clone ID: PAT_MRT3847_38498C.1.pep
KKKKGSLFFFGTNLGQIIVLNLFEIQRGSLHKGFLTSMKNLLVLHIETPPSPPLKKKLGSLGCLIWGHLLGILIGGPFQGVLK

SEQ ID NO: 217576 - protein, 201 aa, Glycine max
  Clone ID: PAT_MRT3847_38499C.1.pep
MESPHASLFIKFKTPIFFCFFLSTLSVSASSKSTHLFPKEALPNKYGYLPISTTSTSSIFYAFYEAQNSTLPLLQTPLLIWLQGGPGCSSMLGNLYELGPWRVTKSLTLQSNPGAWNRIFGLLFLDNPIGTGFSVASTPEEIPKDQNTVAKHLFAAITRFVQLDPVFKHRPIYITGESYAGKYVPAIGYYILKKKLEVSES

SEQ ID NO: 217577 - protein, 143 aa, Glycine max
  Clone ID: PAT_MRT3847_3849C.1.pep
PPKRGPQLKFPPNFPPTIPARGKGGKGLGKGAVKRPRKVLRPPIQGLRTPPIRRLPRRGRVKRTSGLISEEPRGVLKIFLDPLIPDPVPPPEHARRKPVPPMDVVYALKSQGSPLYAFWRLKNRIFRFNACVAASPIGSFEFA

SEQ ID NO: 217578 - protein, 257 aa, Glycine max
  Clone ID: PAT_MRT3847_384C.1.pep
MSRRPGNPYRRFGDSGGGLFSKSRSPPVLSIALVVVGGLFLVGYVYRGSGGIGNRIESVSRVEGDYLCSGEVQQAIPLLQKAYGDSMHKVLHVGPDTCYVVSKLLKEDETDAWGIEPYDTEDADNNCKALIRRGSVRVSDIKFPLPYRPKSFSLVIVSDALDYLSPRYLNKTLPDLVRVASDGVVIFTGFPTTQKAKVADVSKFGRAAKMRSSSWWVKFFLQINLEENEAAVKKFEQASTKSSYVPKCQIFHLKSLH

SEQ ID NO: 217579 - protein, 43 aa, Glycine max
  Clone ID: PAT_MRT3847_38500C.1.pep
KPPWNQARTAGPPGLGTRKRPFKDGPTFHSPSANSKAERQTPS

SEQ ID NO: 217580 - protein, 168 aa, Glycine max
  Clone ID: PAT_MRT3847_38501C.1.pep
LRKGKGKLGFWEVVLMKKPKAGAVITLLCGNVGKNWPVPPSRERGGPGEFGVSEKKNGGGGGFKGVSKGGKNRPKVPKWGPGGCAPPRPFLVPFVGWGFGFNTGFCFFFWGFVWPELWAFFCLLFFTFWPRIFGLSILFVFWPPNKGKREMVIIKKKERKGKKMEICF

SEQ ID NO: 217581 - protein, 70 aa, Glycine max
  Clone ID: PAT_MRT3847_38502C.1.pep
YFIYFVFEIYDQLIARQNNTKCVEGKRTSIIVLHTEEYGSKKSGSRRFSWTKWSWKASEQEECAVCLESF

SEQ ID NO: 217582 - protein, 363 aa, Glycine max
  Clone ID: PAT_MRT3847_38503C.1.pep
MLLTASLDTESDLTYQSSVLMVLIITFTGKAVLGMRLLPPPQRGVPKVMLDMSSPSRQSKSRNLTLNEDSVNHSTKASVSKISSPASLSSLASKSISYKEVALAPPGTVLKPLLEKADMERVNAGDEICCNPAVTSISEGSCQSSITNTVCQHDETEETHENEPQQESSGSELEKVSDQAKSTAETNGSKLSAAAKPFNPGMLSMSHHLNSASFTSMYDTDVSQGMHVETVLPPAVARVPCGPRSPLYYRTNYTFRMKHGSTKGQTSIRERSGFGSPRIMNPHAPEFVPRNASQIEANDANSNVSNEHNSLSDIGMSEENKLDENFVEINGSSNKNSISESEKSEIARHFTAKFSREIFQGKY

SEQ ID NO: 217583 - protein, 63 aa, Glycine max
  Clone ID: PAT_MRT3847_38504C.1.pep
GKKNGPNQKKSRTNQKTKPWPRLNKMSTKIESGQPSAGGSCQVSREESILRQSNRGFVSSALG

SEQ ID NO: 217584 - protein, 54 aa, Glycine max
  Clone ID: PAT_MRT3847_38505C.1.pep
GPYWAFLGSRYLAYLKFSVIPTPRFPFEVLSFGGAKVPPPPPPPPPPPPPPPPP

SEQ ID NO: 217585 - protein, 54 aa, Glycine max
  Clone ID: PAT_MRT3847_38506C.1.pep
LGFVAPGPARKVPMCYHHSYLEFERIFLFFLRARIRCALKMLYEASKCFIVRPI

SEQ ID NO: 217586 - protein, 417 aa, Glycine max
  Clone ID: PAT_MRT3847_38507C.1.pep
MGLGNDDDDGDTHKSFGSVPCSICLEAVTDNGDRSWAKLQCGHQFHLDCIGSAFNIKGAMQCPNCRKIEKGQWLYANGCRSYPEFSMDEWTHDEDLYDVSYSEMSFGVHWCPFGNLTRLPSSFEEGDFSSIAYHDVLGQHAIFAEHTAVSSASHPCPYIAYFGPIHPSTSNSGLTVSEASNFNHWNGPPVPGDMPTSYTFPAVDLHYHSWEHNSSHFSSANSRLGTSEQTSVSPGSQRPARGGSDVPRSGSFMHPFLVGHSSAARAGNSVASSMIPPYPGSNARARDRVQALQAYYQPQQPHNSTTIRTPVASSTRRSSSHSGPVQLAPVASPPDQSAGFVYIPSGSSGRNFQEETHLPSRFHAWEREHLPSLALNNVGRESSWRAYHQTASVSDPSIRSSSFRLRHESDRMPSQNR

SEQ ID NO: 217587 - protein, 34 aa, Glycine max
  Clone ID: PAT_MRT3847_38508C.1.pep
FGLRKIILQEFWHLGTLQKHGFTSLWLAFYNSCA

SEQ ID NO: 217588 - protein, 98 aa, Glycine max
  Clone ID: PAT_MRT3847_38509C.1.pep
NNHGARAGSRNELLPCPSYTTEPVRFRKSALLAVKRSAPGLIPRTEGIMKHIMHANNRGPNELITLQLGACAKGLISPKDGESQQGDKLRGPLSRETA

SEQ ID NO: 217589 - protein, 119 aa, Glycine max
  unsure (1)..(119): unsure at all Xaa locations
  Clone ID: PAT_MRT3847_3850C.1.pep
GNLVNARVVFSRETRRSRGFGFVPIFFXPEIKNRVSPLFGPSLAGSPLWVSVSQARPRRGSFLAFFPVVPPVPRGGFLPFFLKPGVSYRAPFCSKENPFLGPPFPIKFPVFVVFSLNPP

SEQ ID NO: 217590 - protein, 67 aa, Glycine max
  Clone ID: PAT_MRT3847_38510C.1.pep
FVKGIINCGGLVYILIQLYKSDFLIGDCNSDSSFTPCFLLECGGLTCFLLYMEFGINLFCRLFLYKT

SEQ ID NO: 217591 - protein, 67 aa, Glycine max
  Clone ID: PAT_MRT3847_38511C.1.pep
RRAHDRCEAVVTIAYEAQARIRDPVYGCVSHIFALQQQVPLYMLLQTSSKLLNFFFSRNNRSCHAHL

SEQ ID NO: 217592 - protein, 36 aa, Glycine max
  Clone ID: PAT_MRT3847_38512C.1.pep
HNLTFLFIVNNLNYDYIPGVLPLNIYYLSISTHKKN

SEQ ID NO: 217593 - protein, 59 aa, Glycine max
  Clone ID: PAT_MRT3847_38513C.1.pep
DGIQDIKVITPQPTDSSWNSHIDRLINTLSLTFHKVADVSHSKKVHTFSIIPESTDRKT

SEQ ID NO: 217594 - protein, 44 aa, Glycine max
  Clone ID: PAT_MRT3847_38514C.1.pep
DLDLGCDHELRKDVYLESCPFAIYIINEQVNLFYIPPHEHSILL

SEQ ID NO: 217595 - protein, 100 aa, Glycine max
  Clone ID: PAT_MRT3847_38515C.1.pep
EISLSQKSSKKSSVRILSPKKSEDVSRSFNSSSSSTSGVSQDGGDLFDRSGSRPSEGNVSIGLISSENSDNDSSIRSEERSSMHLDHTSSRSEEGSVYYR

SEQ ID NO: 217596 - protein, 448 aa, Glycine max
  unsure (1)..(448): unsure at all Xaa locations
  Clone ID: PAT_MRT3847_38516C.1.pep
MGLDFAGKAVYTAVWVAAVSLFMELLGFSTQKWVTAGGLGTVLLTLAGREIFTNFLSSIMIHATRPFIVNEWIQTKIEGYEVSGTVEHVSWWSPTIIRGDDREALHIPNHKFTLNVVRNLPTKSILRIKSYKNNSKMDLLSLXSSVRPSLEENILLGVAIEGSKRTLPIEEEMTPSPMPAESQEFAVQQHGGVTPASKDKKDGQSSFXLVNRMTKISSXLGRLELDISVHLSDRNYSRMIQLSFLXVGIMHCILIEPPYKVNGEDKVNASTRSTRANEEKDSKIDETMASDTKEDENFTATSTSSPDVISKDKSKSLSDAQPKKENAVDAGKGTTVPVSKNLVQSAVPEASLATTQEITSATSSQSKQDEEKSSVSLPSVRPSLEENILLGVAIEGSKRTLPIEGEMTPSPMPAESQEFAVQRNGGGPPASKDKKDGQSSFPTGKQND

SEQ ID NO: 217597 - protein, 93 aa, Glycine max
  Clone ID: PAT_MRT3847_38517C.1.pep
SLQRHVCGMPKLATKYTTPSLLNLQLQLSSIPSYSSSAFHYHYCFFKDDYVFSDEDDNIYCGLVLGDMDIIFSEFSCLVVFKPEKSINPFSGN

SEQ ID NO: 217598 - protein, 68 aa, Glycine max
  Clone ID: PAT_MRT3847_38518C.1.pep
NSASEINKGTATFLNTLFMYPSRVEKKQHCFSNLRHLNLYGTKLKSTNHRGSKLEKRRLVFTTRVSNP

SEQ ID NO: 217599 - protein, 122 aa, Glycine max
  Clone ID: PAT_MRT3847_38519C.1.pep
SSRHDISAFHSAAPLIPKFHEAAMHGRMRPLQEMLTFRLLCPAERVGNIIGKGGAIIKTVQQETASEIKVLEAPPDSEDCVIVISGPAHPEDRISPVQEAVFRVQTRIAKPIPDAKDHIMLA

SEQ ID NO: 217600 - protein, 136 aa, Glycine max
  Clone ID: PAT_MRT3847_3851C.1.pep
MKKVVLKVELHDDKIKKKAMKAVSGISGVESVSVDMKDQKMTIIGDVDPVTVVGKFTKFSLGKLRKFCHVEILSVGPAKEEPKKEEKKPEAKKDPKEEYAELLKVVEANYYQTRHLQYPYYYSRTVEENPTGCVIC

SEQ ID NO: 217601 - protein, 48 aa, Glycine max
  Clone ID: PAT_MRT3847_38520C.1.pep
FSVKLKHQFNMIILLDAHLTKVTRYSLKLVIIQERIVIDCFDKRKRLI

SEQ ID NO: 217602 - protein, 80 aa, Glycine max
  unsure (1)..(80): unsure at all Xaa locations
  Clone ID: PAT_MRT3847_38521C.1.pep
XPXXLXNNXSKXXRLAXFXFXLQXXXLXHVXECTGTFLLQXVXTQQKPLQSLARNETGSSXRIDGVKSXPRLVMXPFVXX

SEQ ID NO: 217603 - protein, 51 aa, Glycine max
  Clone ID: PAT_MRT3847_38522C.1.pep
GPFSRFYLGQQLRFWPKKKKKKKKTRKKKKKKKKKKKKKKKKKKKKGRPPS

SEQ ID NO: 217604 - protein, 41 aa, Glycine max
  Clone ID: PAT_MRT3847_38523C.1.pep
LGVKAAGLSQQLYTYDTRVRLEVLKTSYSSSSSGSHRNHLS

SEQ ID NO: 217605 - protein, 50 aa, Glycine max
  Clone ID: PAT_MRT3847_38524C.1.pep
VGIYLMSNHLVLMYLLHATSQVLQQYCMSFFCYVNTTGFVGFCALSFFLK

SEQ ID NO: 217606 - protein, 72 aa, Glycine max
  unsure (1)..(72): unsure at all Xaa locations
  Clone ID: PAT_MRT3847_38525C.1.pep
KDLLEGNFSFDXKSRSRLEKASSTKAQLXSGKTFKXYDNQGAGHSLLCDFLQRDDQRNPKRFDPELGPIIYP

SEQ ID NO: 217607 - protein, 56 aa, Glycine max
  Clone ID: PAT_MRT3847_38526C.1.pep
RQGCWALRDHNCGHICLPLPATLRIATFKNLDPDKALIRNCQVKPPKTIISQRPRA

SEQ ID NO: 217608 - protein, 142 aa, Glycine max
  Clone ID: PAT_MRT3847_38527C.1.pep
RSYGRGFVAVLIRESQASLLVLVSLVGTRLMGRSLTASASYLRFTIRSLARLSCRNSANTGTTRYALRTYKRMDLLISLVSSAYAGKKLWLLTYTGPGVSVVVVVAPVIFVLFFSLGSSLDLRGLLRGYYPLLSSSHDHAST

SEQ ID NO: 217609 - protein, 253 aa, Glycine max
  Clone ID: PAT_MRT3847_38528C.1.pep
MEKEQLEYVLVPLGLLVYLTYHIWLVYTIVHNPLRTVIGLNAESRHQWVLSIMSDPLKNGVLAVQTIRNNIMASTLLSTTAITLSSLIGIFASSMWSSDDTAFIPSGRTSIKHISVTIFFLVAFLCNVQSIRYYCHVSFLITAPTLRDKREYMEYIAVTLNRGSHAWSIGLRAFYLSFPFFLWIYGPIPMFACCCLTSLVLFFLDTTAKITRNLHSNSFRKERGTHDVESAVEPDYHPLPANNLSQNSGVNHV

SEQ ID NO: 217610 - protein, 87 aa, Glycine max
  Clone ID: PAT_MRT3847_38529C.1.pep
RFKSGNSSVNKGSQKILRVNIVQSKIVFTGPGFCYFGQIDLVYGIGIKFIDISKKGSVGPWSTNMEGSISAISPREFWVLGYGLPRL

SEQ ID NO: 217611 - protein, 64 aa, Glycine max
  Clone ID: PAT_MRT3847_3852C.1.pep
QQTQYYILKGGRFLGSRSYSLQVWKMERTFSRAAPKANHGPSPLSHWGEKTIGFPVFIFKKPQL

SEQ ID NO: 217612 - protein, 51 aa, Glycine max
  Clone ID: PAT_MRT3847_38530C.1.pep
KLQMTDTRCQRCSEKKVGISDIIHAGHGDRYQLECTPCGYTWFSSRDFITP

SEQ ID NO: 217613 - protein, 86 aa, Glycine max
  Clone ID: PAT_MRT3847_38531C.1.pep
TMKEADLGPSLIFMGPTFDFPPSKTKIIPNIGKFIRESHQYSNRNPWGGKFFQRPGNAIVHGLGHFPTVLTPFYTEFIFLIKNLSK

SEQ ID NO: 217614 - protein, 156 aa, Glycine max
  Clone ID: PAT_MRT3847_38532C.1.pep
YITTHPFFSSACLLIFRIIRTDFGKWIAFIAIVLHLLFPRHFSDWLELPAVFILLIVAAPDFFTNTFIRNKVGVIICLIIACCLLQGNILAVCGIRIFLFIPCNLLRERENIGVAIGLVDAVGFGSLQVIVFKIILLVYHMLMPMLNVIVTKIYAE

SEQ ID NO: 217615 - protein, 66 aa, Glycine max
  unsure (1)..(66): unsure at all Xaa locations
  Clone ID: PAT_MRT3847_38533C.1.pep
QWTTSERHSWDLIXPITVCGPNNGFEMWNSEWGNQTSWHLSFLIDNPKXATVFDILLGISQDFEIA

SEQ ID NO: 217616 - protein, 63 aa, Glycine max
  unsure (1)..(63): unsure at all Xaa locations
  Clone ID: PAT_MRT3847_38534C.1.pep
RCPKRVFSRKKVSGNNKGQKDAFGGKKCLPVSKLKFGIRQGPFQXKKGGKLKSGKILKGFPFR

SEQ ID NO: 217617 - protein, 82 aa, Glycine max
  Clone ID: PAT_MRT3847_38535C.1.pep
AAAAYFGILRGIINHWHRRRIGARGGAFRCSMSDSHRSCRRRSGSCSSSLRYAIRRRHYDELKLRGTKERHGYFAKRSDICL

SEQ ID NO: 217618 - protein, 71 aa, Glycine max
  Clone ID: PAT_MRT3847_38536C.1.pep
NGKKTDCFSFSQLRLNLLLCLNDLLFRRPELVGKILSALVPEETEYLQYEVKIILMALGAWFQLFGIKEEI

SEQ ID NO: 217619 - protein, 300 aa, Glycine max
  Clone ID: PAT_MRT3847_38537C.1.pep
MSLKGFFEGGVASIVAGCTTHPLDLIKVRMQLQETHTLRPAFAFHAPTPMPPPPPSGPISVGLRIVQSEGLAALFSGVSATVLRQTLYSTTRMGLYDVLKRHWTDPDRGTMPLTRKITAGLVAGGIGAAVGNPADVAMVRMQADGRLPPAERRNYNGVFDAIRRMSNQEGVGSLWRGSALTVNRAMIVTASQLASYDQFKESILGRGWMEDGLGTHVLASFAAGFVASIASNPIDVIKTRVMNMKAEAYNGALDCALKTVRAEGPLALYKGFIPTISRQGPFTVVLFVTLEQVRKLFKDF

SEQ ID NO: 217620 - protein, 113 aa, Glycine max
  unsure (1)..(113): unsure at all Xaa locations
  Clone ID: PAT_MRT3847_38538C.1.pep
TSDATRADLGILVSYLSIARILDQICRDIQYGSKFLNDREPVTVHIGVKTRSSVRGVCRLFTIDNDRHAXIITQPMGTMLPSILLGKCLNGRLCTFLFLDQLVWLGGTGVYHN

SEQ ID NO: 217621 - protein, 112 aa, Glycine max
  Clone ID: PAT_MRT3847_38539C.1.pep
PSTFVKNNKCHQLPILPPHHFPTPHRLGFSMVIGWCSKEFLLTHIVFRCPFVCFSYSFQDLSRILLVSCVLQSGQVCFGLGDLWLFVYPSFVLCFERLYLFLGTSATFCIFL

SEQ ID NO: 217622 - protein, 37 aa, Glycine max
  unsure (1)..(37): unsure at all Xaa locations
  Clone ID: PAT_MRT3847_3853C.1.pep
VSLIIYISSSFXNXHALNXXLRPPYLTRKXVSYRTIR

SEQ ID NO: 217623 - protein, 58 aa, Glycine max
  Clone ID: PAT_MRT3847_38540C.1.pep
HTNSSVSASPPSELKRCGLPLTRALSRLFANNEMRTLMARLKANVKTTIIVQPQRVRK

SEQ ID NO: 217624 - protein, 90 aa, Glycine max
  Clone ID: PAT_MRT3847_38541C.1.pep
GVPRSFLTLAPGEFKKKNLVLNTTFWKWAKGGCNQTFLMTGFEKKFWKTGLNLRKNTPRAFPGSIKIFKGVFGGDNLCKQIPKFSDWLSN

SEQ ID NO: 217625 - protein, 114 aa, Glycine max
  Clone ID: PAT_MRT3847_38542C.1.pep
ATRTNCGNMQKVISLFLNYGFSCEDIVAMSKKQPQILQYNHTSLEKKMEYLIEEMGRDIEELLLFPAFLGYKLDDRIKHRFEVKKLVRGRGMSINKLLTVSEETFAGKRKKVMP

SEQ ID NO: 217626 - protein, 42 aa, Glycine max
  unsure (1)..(42): unsure at all Xaa locations
  Clone ID: PAT_MRT3847_38543C.1.pep
RXSXPLPHNGRSSSPXYFYXVVLKIPQXVFGDLRGFSXLHFS

SEQ ID NO: 217627 - protein, 115 aa, Glycine max
  Clone ID: PAT_MRT3847_38544C.1.pep
HPQTDDIYLKLAQFTKLLGKKGGYIAQTKFVFHNVSEEEKTQMLYGHSERLALGYGLLVTPKGTCIRITKNLRICDDCHTFFKIASEVSQRALVVRDANRFHHFERGLCSCGDFW

SEQ ID NO: 217628 - protein, 66 aa, Glycine max
  Clone ID: PAT_MRT3847_38545C.1.pep
RSVRLSCASRGGPSKITPITVFSISGGGRYDFFFFFLCIIYICLAPPFYHLLTTMQAHKSAQRFQA

SEQ ID NO: 217629 - protein, 93 aa, Glycine max
  Clone ID: PAT_MRT3847_38546C.1.pep
KEIMMKTKIAAAEAREKRESKKGAKYEYPSRTRPKSMTPSSRGSSKFQKASSPRPVSPFIVKKKKKVIPNWTKIFRGKKNHQQYVAAGKLVTL

SEQ ID NO: 217630 - protein, 62 aa, Glycine max
  unsure (1)..(62): unsure at all Xaa locations
  Clone ID: PAT_MRT3847_38547C.1.pep
LKKLQVIYSSIKYNFLTXKKKKKKKKKKKKKKKKKKKKKKKKKGKKKKKKKKKKGAVLKDPI

SEQ ID NO: 217631 - protein, 69 aa, Glycine max
  Clone ID: PAT_MRT3847_38548C.1.pep
YLETYLAQIALLINCFNCCVQLGGPHVPLTTGRSGWGKEQDCWGGAGPPGPRLSSVYGYSLTSVGAMGN

SEQ ID NO: 217632 - protein, 87 aa, Glycine max
  Clone ID: PAT_MRT3847_38549C.1.pep
PYVLICYVVMFFSFIFLFLHSIHHLKRELLFFKHWFVVSNIERLSWTIWTMRAQVISPIFIDFFTLPIECPSLLGSFFVSFFSSLSI

SEQ ID NO: 217633 - protein, 49 aa, Glycine max
  unsure (1)..(49): unsure at all Xaa locations
  Clone ID: PAT_MRT3847_3854C.1.pep
NKILKRTGTFVSTRMFFLCFVRFHLKVSGSEEMXXDSQHLKCNCRSCSN

SEQ ID NO: 217634 - protein, 70 aa, Glycine max
  Clone ID: PAT_MRT3847_38550C.1.pep
SRTKDVLIRSNPRVNGWHIIYHFFLRILKSVFQWHMFRIAGASKRYAKLICSSQVFVGSDSPTIQVPRCY

SEQ ID NO: 217635 - protein, 81 aa, Glycine max
  Clone ID: PAT_MRT3847_38551C.1.pep
ASSPLLPDLVSFSQAGHALSEVTIKLYSLIDRKGLIAGTQASVAFLLTIIWVFCINIKVEHLGSGLVRCHRPSQAICLCSQ

SEQ ID NO: 217636 - protein, 40 aa, Glycine max
  unsure (1)..(40): unsure at all Xaa locations
  Clone ID: PAT_MRT3847_38552C.1.pep
ARXDSAEQTLTILLCKXTIAPQISHLNHSGALSLWFSSSS

SEQ ID NO: 217637 - protein, 40 aa, Glycine max
  Clone ID: PAT_MRT3847_38553C.1.pep
LPRIRQNSTCRPYRACSSIKEKTLVLLPLITFHNLYFNPW

SEQ ID NO: 217638 - protein, 65 aa, Glycine max
  Clone ID: PAT_MRT3847_38554C.1.pep
EEQCYFVPLFYNEKIDLISFSYISISKRLLKIIGNKFLLAKFDVYKTFFNVIYTLYSSIISLSDN

SEQ ID NO: 217639 - protein, 87 aa, Glycine max
  Clone ID: PAT_MRT3847_38555C.1.pep
TTRPHVFGFNGRFYACKGSVVKAADVILTTFLWQISRFYNTTHGYSARICLFGSAQDRDKNSTKSVIQEQVQVVAKQWGVFRYPPIC

SEQ ID NO: 217640 - protein, 59 aa, Glycine max
  Clone ID: PAT_MRT3847_38556C.1.pep
KKEEKIEIESKKSVDICVMKFRIRFFLGRDIRNKSKMCIANSVSKLFPPCNIMMFSSDT

SEQ ID NO: 217641 - protein, 52 aa, Glycine max
  Clone ID: PAT_MRT3847_38557C.1.pep
FFHKKCHHSFNKKDIHNFYFIFKQAPPTIKTSFLRFSSTKNIPYIISLQCML

SEQ ID NO: 217642 - protein, 110 aa, Glycine max
  unsure (1)..(110): unsure at all Xaa locations
  Clone ID: PAT_MRT3847_38558C.1.pep
NSARAQTLLLLLKLFSSKGKKLMVIVTSSEQXFIGITQIPEXFSVTHALPNPITRDRLLXLEQFNELTDENIYSAAXAVNDMPINKLYMLIEMAAQREHGGSAQTIIVGV

SEQ ID NO: 217643 - protein, 162 aa, Glycine max
  unsure (1)..(162): unsure at all Xaa locations
  Clone ID: PAT_MRT3847_38559C.1.pep
VIGYKIQFDTKSCGVDCGGVGILGIAWAFGGMIFILVYCTAGISGGHINPAVTFGLFLARKVSLIRAVLYMVAQCLGAICGDGFCEGIXSSHYVNYSGGANFLADGYNTSTGLAVEIIXTFVLVYTVYVASEPKHNGXDFHVPDLAPLSHGVAVFMVQFGPF

SEQ ID NO: 217644 - protein, 66 aa, Glycine max
  unsure (1)..(66): unsure at all Xaa locations
  Clone ID: PAT_MRT3847_3855C.1.pep
GEIYFGRDSTTLCSFRLNGIPPSPCGDPHSEVXFDIDARAILTEGAIDKGPAERLDXTITRSCTLP

SEQ ID NO: 217645 - protein, 50 aa, Glycine max
  Clone ID: PAT_MRT3847_38560C.1.pep
LESLRISSLAARAFISSRSAVVVRVLGDTACQCASQASDALTWLFPARAI

SEQ ID NO: 217646 - protein, 268 aa, Glycine max
  unsure (1)..(268): unsure at all Xaa locations
  Clone ID: PAT_MRT3847_38561C.1.pep
LSVKDASDSVKLWEITKGVVIEDYGKVSFEEKKEELFEMVSIPAWFTVDTRLGSLSVHLDTPQCFSAEMYSADLNIVGKPEDDKINLARETLKGLLAHWLRKRKQRMESPAPANGELLSGKDISSRSLAHSRIEVDGSSENDAMVYPPFEFSVTSPPSIITEGTHGGPWRKKITXFRWTKDEKDFPWWCLDCVLNNRLPPRENTKCSFYLQPCEGSSVQILTQGKLSAPRILRVHKVLSPEMSLATVRAYIWKKSDDLVLNYQLLQSR

SEQ ID NO: 217647 - protein, 363 aa, Glycine max
  unsure (1)..(363): unsure at all Xaa locations
  Clone ID: PAT_MRT3847_38562C.1.pep
KVVRVWDARSGSKTLKLRGHTDNIRALLLDSSGRYCLSGSSDSMIRLWDIGQQRCVHSYAVHTDSVWALASTPTFSHVYSGGRDFSLYLTDLQARESSLLCTGEHPILQLALHDDSIWXVASTDSSVHRWPAEGCDPQKIFQRGNSFLAGNYAFSSSRVSPDXVNXVPVYKEPILTILGTPAIVQHEVLNNKRHVLTKDASGSVKLWEITKGVVIEDYGKVLFEEKKEELFEMVSIPAWFTVDTRLGSLSVHLDTPQCFSAEMYSADLNIVGKPEDDKINLARETLKGLLAHWLRKRKQRMESPAPANGELLSGKDISSRSLAHSRIEVDGSSENDAMVYPPFEFSVTSPPSIITEGTHGGPW

SEQ ID NO: 217648 - protein, 524 aa, Glycine max
  Clone ID: PAT_MRT3847_38563C.1.pep
MGFTPTSTATCFLIIAPLVVLWCWKLLKWVWLRPKRLERALRAQGLQGNPYSLLIGDTKEMYTVLMQAARSQQSTSSFLSKDKDAAPHITTFNHHIVNKFGKNSFFWEGTKPKVVITDPEQIKEVFNKIQDFEKPKLSPIVKLLGSGLANLEGEKWRTHRKIINPAFHLEKLKVMLPIFLECCDDMVSKWERLLSSNDKSEIDVWPFLQNLTCDIISRTAFGSSYEDGKRIFELLKEQTGLMMKLQNAYIPGWWLLPTTTNKRMKKIDTEIRALLKGVINKRENAMKAGEVLNNDLLGMLLESNRMEIQDHGKNNIIAMTSLEVIEECNAFYIAGQETTSVLLVWTMVLLSRYPHWQERAREEVLHVFGNQKPDYNGLSHLKIVTMILYEVLRLYPPLIYFARAIKNDVKLGNLSLPAGVQVSLPILLIHQDRDIWGDDATEFNPERFAEGVAKATKGQVVFFPFGWGPRVCLGQNFALLEAKLVLSLLLQRFSFELSPTYAHAPVTVLTLNPKFGAHIILHKL

SEQ ID NO: 217649 - protein, 77 aa, Glycine max
  Clone ID: PAT_MRT3847_38564C.1.pep
EMLDIRPGEALAVIFPLQLYHTADVSVHVSNPRVGLLSLVRLLSPKVTTFVEQESNTNTTPFFNRFIETLDYYLAIF

SEQ ID NO: 217650 - protein, 88 aa, Glycine max
  Clone ID: PAT_MRT3847_38565C.1.pep
FMYGRGEKGHTYCIGGAHGLHLHIKMAGAMAVESTLDLRRQFTLFDPFKGHLIHISVDKDVNRLQLHLCYYNTSEKAIIRVYVVIITL

SEQ ID NO: 217651 - protein, 67 aa, Glycine max
  Clone ID: PAT_MRT3847_38566C.1.pep
CMPYSILSFFCVWLDVVSIEKAYGKTGTLALGQKNAFHHVLCIMCYPSPLCFHVDACDAWVDPGFRP

SEQ ID NO: 217652 - protein, 53 aa, Glycine max
  Clone ID: PAT_MRT3847_38567C.1.pep
GAKSRAIAISSNHGIAIKALGKARVMYVSDIKNLRPALRLLGWRGPKGKPPEG

SEQ ID NO: 217653 - protein, 106 aa, Glycine max
  Clone ID: PAT_MRT3847_38568C.1.pep
ARCNMLVQLSEISNKLKMTKLTLLITYMSTWALDLVNNNTLPGKTRDCTSSIASQPHPFIQISADPQSGNPQSCVKPDLQIPSPDQLNHVQTQTLSYPGSRGQSAI

SEQ ID NO: 217654 - protein, 45 aa, Glycine max
  Clone ID: PAT_MRT3847_38569C.1.pep
RRPTKGVPKKNNVGCISPSSTTLSWGTAQGRVNYYWILTRVKDGS

SEQ ID NO: 217655 - protein, 329 aa, Glycine max
  Clone ID: PAT_MRT3847_3856C.1.pep
MASTPFSTFCHFHKPTLLFLASDGFRLGGAPAIAFGKVRKNRKMGIFPVCRAGSAVVFRDLDADDFRHPLDQQNTLLLRAIPGLNELGKALLGTVSEQVMLLENIGTSVLVSKNQLPDLYHLMVEAAEILNVDAPDLYVRQSPVPNAYTLAISGKRPFVVIHTSLVELLTKAELQAVLAHELGHLKCDHGVWLTYANILTLGAYSVPGIGGMIAQTLEEQLFRWLRAAELTCDRAALLVAQDPKVVISVLMKLAGGCPSMADQLNVDAFLEQARSYEKAASSPIGWYIRNAQTRQLSHPLPVLRASEIDEWSRTPAYKSLLKRGIQIKS

SEQ ID NO: 217656 - protein, 87 aa, Glycine max
  Clone ID: PAT_MRT3847_38570C.1.pep
WAKPYGPPSKVMDIHQKVFYRSNHARKAFVKMCANEYVQNMTFNSYLSKMAVPANPLWDIQLASTTIGSLVRANAIWTQMKSLHVYT

SEQ ID NO: 217657 - protein, 35 aa, Glycine max
  Clone ID: PAT_MRT3847_38571C.1.pep
KSENMCHLTTLTAFGTMYSSYTKTTYGEVNNFEGM

SEQ ID NO: 217658 - protein, 115 aa, Glycine max
  unsure (1)..(115): unsure at all Xaa locations
  Clone ID: PAT_MRT3847_38572C.1.pep
VAXRXSXXXSXXXXXXXXXXXXXWXVXXXXXXXXVXVSXXVXRXXXXXPXXXXXRLXXXXXXHLFTXLVXRKXXMEXXXXQAXXKRXSIXXTCDCXXXXCSQSSRXPSLRTRACD

SEQ ID NO: 217659 - protein, 44 aa, Glycine max
  Clone ID: PAT_MRT3847_38573C.1.pep
VLGKIKLEWWQKKGPQGTLGWMSRSKPGKEKKIFFTYAMGGLAP

SEQ ID NO: 217660 - protein, 78 aa, Glycine max
  Clone ID: PAT_MRT3847_38574C.1.pep
NSARENMEEGRIWKPDAIEDEGSHRSQSVLAEKLFLLRQPVSTHKQGSLRGGCFHSHYGRLDGSFVRDPSRRLHVGLA

SEQ ID NO: 217661 - protein, 59 aa, Glycine max
  Clone ID: PAT_MRT3847_38575C.1.pep
FVVRSSFQKGLQFHPNSYHYNPSRQLNCRSFCPLIGRTQARLTMVCIRTQCLLHIIYVI

SEQ ID NO: 217662 - protein, 34 aa, Glycine max
  Clone ID: PAT_MRT3847_38576C.1.pep
RHYDVIASERRCVLPCHVVARRNCVSNLNSTRGR

SEQ ID NO: 217663 - protein, 54 aa, Glycine max
  Clone ID: PAT_MRT3847_38577C.1.pep
IALLCLHCLTKILATAPHASSDALDLAILLYPEMHFTGATADYGSCPVGVATSF

SEQ ID NO: 217664 - protein, 153 aa, Glycine max
  unsure (1)..(153): unsure at all Xaa locations
  Clone ID: PAT_MRT3847_38578C.1.pep
PKTKKKGPGGGKETEATPPPTTGXNEKGPQRGKHKRGEKXGNPPQPKENHAQQTPAREKTGKHQKERATKPXXKXEQKQPXXGKQNTPPTEQQQGKHKPRQTPNQAPQKRQAQEQQGGPPNEQQRGPXGQPPGQQTQHGQKQHTAQDPQKRKP

SEQ ID NO: 217665 - protein, 71 aa, Glycine max
  Clone ID: PAT_MRT3847_38579C.1.pep
LRVLIFLLLETPHVFSSILSSQSLAHYSIVWLANNSNIKKPLTSFCKCFFFIREFTLFNQLNSTLSLVSFF

SEQ ID NO: 217666 - protein, 102 aa, Glycine max
  unsure (1)..(102): unsure at all Xaa locations
  Clone ID: PAT_MRT3847_3857C.1.pep
KKPPPSLGPPQKINKSFPTLLKKGPPGAPPFFNPKKKPFPPNWGGSPPKGETPPPGLRGSLSXKKRGGPQLTPPFWGGPPKRLVFPPPRGGVPIQKSPQGIL

SEQ ID NO: 217667 - protein, 38 aa, Glycine max
  Clone ID: PAT_MRT3847_38580C.1.pep
IAPRATNSGMFCGLIKRNLVGYIELAGGLLHFVVYTSK

SEQ ID NO: 217668 - protein, 74 aa, Glycine max
  Clone ID: PAT_MRT3847_38581C.1.pep
NMMLYIYMAQQFKDSSNFRHHCINRRNKIVTKLTQTNFGKIHIGCLWIIVAHDMYPSCGLIFCVVWSGYPNLVV

SEQ ID NO: 217669 - protein, 70 aa, Glycine max
  Clone ID: PAT_MRT3847_38582C.1.pep
EPYNFMYACSTVFCLNCINSMVVCDFLFLAMLIPYSSMTHIEIYFIRNTLLTIPSSSNTTHFLVWFAKVK

SEQ ID NO: 217670 - protein, 78 aa, Glycine max
  unsure (1)..(78): unsure at all Xaa locations
  Clone ID: PAT_MRT3847_38583C.1.pep
WLKVDGVLIXLRETRLPCVFGGNTNPLFLXEGCWREFPFQNFFVKGPPFDFGGEGGPSFFSPKLPLLMLKAPKLVISF

SEQ ID NO: 217671 - protein, 180 aa, Glycine max
  Clone ID: PAT_MRT3847_38584C.1.pep
MESKRNLLWVMGICMWLVLAHHRSGAAEEKIGKELIKSICKNRGNNELCMQVLSSDPDSDHADLEELAMISLKAAASNASSILNDCKRMIDDQNLEPKVQQGLADCKENLLDAEGQIQDAIASILNNDKLDAQVWLKAALAAIDTCDDSIPGDDDVLSRKSVSFRQLCNIAVAINKAMLA

SEQ ID NO: 217672 - protein, 95 aa, Glycine max
  unsure (1)..(95): unsure at all Xaa locations
  Clone ID: PAT_MRT3847_38585C.1.pep
SYLDGSHPGDYGLNPLGLSDPEGTGWFIDLKWLAYGEINNGRCALLGAVGAITPEILRMAGLMPQDTPLPWIXTGVSLPARTYTYCADFYSQFVS

SEQ ID NO: 217673 - protein, 96 aa, Glycine max
  Clone ID: PAT_MRT3847_38586C.1.pep
AKLTQVLRPLMALPALGMRNLLPLAVSENPWKGGRLRLKVPHVDPDMSPRPMTRSEFTHRLSASTTASRALVMPSCSEQTTYTRRSNSDAWADAWV

SEQ ID NO: 217674 - protein, 50 aa, Glycine max
  Clone ID: PAT_MRT3847_38587C.1.pep
SMSLVKHYIPMFYKSIHSNSSSWQNINPLGNYLSYIMWLDFVIYFPLRIL

SEQ ID NO: 217675 - protein, 132 aa, Glycine max
  Clone ID: PAT_MRT3847_38588C.1.pep
ADHGFWFGLEQEYTLLDEFGWPYGWPKNGFPAPQGPYYCGVGTGKVFCRDIVEAHYKACMYAEIAISGTNAEVMPAQWEYQVGPCPGISLGDQLWMSRFLLHRVAEEFGAKVTFAPKPIPGDWNGAGLHTNV

SEQ ID NO: 217676 - protein, 97 aa, Glycine max
  Clone ID: PAT_MRT3847_38589C.1.pep
GPGFVFREPPRSPGFFDGRFWPLWKLPMFGCPEAFPVLKGLPEVKIAFPPGFFRFFGFATVCPGQCFSFFAQKPPGFLVLKICQGFVAPPPLCLFVL

SEQ ID NO: 217677 - protein, 152 aa, Glycine max
  unsure (1)..(152): unsure at all Xaa locations
  Clone ID: PAT_MRT3847_3858C.1.pep
WGACKXGVLTNGLLGRWKVGPTNQGGLRWXPSKKEGPQNQKGLVALPEAKACLFGQSGQKATGAXWGFLGERTGQGCPSVLWKSSHWRANVCPNRSNPRAMSLGSRGGRLFPGDVQRKSLRGNXLVLGVVRPVVLSNGGGWPKPGLTQREPD

SEQ ID NO: 217678 - protein, 68 aa, Glycine max
  Clone ID: PAT_MRT3847_38590C.1.pep
ARAGVIYSSVLQRISTLSYHTPPPFMRPSTNRRLNMVDLIQSKPSFLPPSVQDHPTVPSLDRKERQLT

SEQ ID NO: 217679 - protein, 90 aa, Glycine max
  Clone ID: PAT_MRT3847_38591C.1.pep
CLSQRFPTSFLGFKYILRMDVFNATPLDAIYFPPMVNTVALEAKHSTKFCYVCAKPTTPDSWRKLCWLFLTFIRWILGLSDTCEVVMQER

SEQ ID NO: 217680 - protein, 147 aa, Glycine max
  Clone ID: PAT_MRT3847_38592C.1.pep
FFLFSEFQRPFHGLSFSIPHSTHQNTMGLGFGFGLNPRLRYCLLLHTPHSFTNSPLCLSPSSAGVRETCFNFTRLSFPSTFYEEGEALQNLEFAFSSSALETLENDSLGREEIQENKGKRSLSSVNKMIDNTQMHFGERKRLLIMKH

SEQ ID NO: 217681 - protein, 66 aa, Glycine max
  Clone ID: PAT_MRT3847_38593C.1.pep
PSPCNRKPLENLFKAKRNQSKLRGKINHGNPIKHSHQNLICMESCCICIKMLNHSSFIPSIHYRDF

SEQ ID NO: 217682 - protein, 82 aa, Glycine max
  unsure (1)..(82): unsure at all Xaa locations
  Clone ID: PAT_MRT3847_38594C.1.pep
LKFFSLVHXXXXRDARQVFLKXXHSYINMHLNFQLLLVNLYHFVITIYYNKQSNILKNVQNQSKSIMLPLELLKKLLIRFAP

SEQ ID NO: 217683 - protein, 57 aa, Glycine max
  Clone ID: PAT_MRT3847_38595C.1.pep
IFSRSSIYKWVRNTSEEIKIRLNLHPMISRPQIARTSLDLFEQRRNASLKVCSTPGE

SEQ ID NO: 217684 - protein, 64 aa, Glycine max
  Clone ID: PAT_MRT3847_38596C.1.pep
CHPNSISWAAITNECYGEKPCSAHNNSVKKKSLLAGCHKKKKGLTAYPFKKRATPFGQQASPHF

SEQ ID NO: 217685 - protein, 115 aa, Glycine max
  Clone ID: PAT_MRT3847_38597C.1.pep
AKAAKVAKCARTRVVVAAAGPAKVDGCKGRGSGGGHGVVLLLFFETLHCGFGEAAAAAGGGAEGVVAGKGVLGTALGTGVLLRQQIFGSLRLETAIKEVCAELQHVVGLVFENLA

SEQ ID NO: 217686 - protein, 72 aa, Glycine max
  Clone ID: PAT_MRT3847_38598C.1.pep
TSKTFWYKLVVMESEIQSILPQNSKIWSTKRKSEIHNHSKTPAAPNALSFSMMGLASTLVRPFFGAQKTLTT

SEQ ID NO: 217687 - protein, 74 aa, Glycine max
  Clone ID: PAT_MRT3847_38599C.1.pep
DNAGNRPYSAGPGIDHRRVGVAEQVQNHMRGCVRPFQSVQTVGSFSSPQHASSALKLRQHIPRMTSNTLLNRPA

SEQ ID NO: 217688 - protein, 107 aa, Glycine max
  Clone ID: PAT_MRT3847_3859C.1.pep
IFCTLGLFLLYGFFFQVKNLTTNIQLILDSLRTSTVVEVQGDKLRRLNEWMRWLPSAQRRSNSGSISPSGSTHNNLTANFQTIILEETTADESPTQPNGGDATKSSI

SEQ ID NO: 217689 - protein, 217 aa, Glycine max
  unsure (1)..(217): unsure at all Xaa locations
  Clone ID: PAT_MRT3847_385C.1.pep
MSRRPVNPSRRFGDSGGGLFSSSKSKSSPVVSVGLIIVGCLFLIAYVYKGSGVFGSRLESVSRVEGDYLCAGEVLRAIPILQKAYGDSLHKVLHVGPDTCYVVSKLLTEEETEAWGIAPYDIEDADNNCKTLIXGSVRVSDIKFPLPYRPKSFSLVIVSDALDYLSPRYLNKTLPDLVRVASDGVVIFTGFPTTQKAKVADVSKFGRAVSVFYIKKY

SEQ ID NO: 217690 - protein, 124 aa, Glycine max
  Clone ID: PAT_MRT3847_38600C.1.pep
LTEFLYPEESYKKNKFLGSTVVNLMSNIITEGHSISRPPYFNGRNYTEWKERMRVFIQSVDFKLWLVIKNGPKVPTKLVDNKEVEKSEDEYDEDDMKSLELEAKAKNILHCALNDIFEIFSDDP

SEQ ID NO: 217691 - protein, 70 aa, Glycine max
  Clone ID: PAT_MRT3847_38601C.1.pep
CFLNIMHKQKYKSTCKWTIIYMCSKTMMMLLPLPLFMRKDKRGRLLTPIMNETYYQLDHFPPKEPPRPLI

SEQ ID NO: 217692 - protein, 62 aa, Glycine max
  unsure (1)..(62): unsure at all Xaa locations
  Clone ID: PAT_MRT3847_38602C.1.pep
ERVGFTNQGAMMKLSEIAPPVWRXVFITGFQFYLGVGALIAGCINFATATRAWGWYISLSLV

SEQ ID NO: 217693 - protein, 111 aa, Glycine max
  unsure (1)..(111): unsure at all Xaa locations
  Clone ID: PAT_MRT3847_38603C.1.pep
KFPXKXFPFHPQPVLXLRKKPPXTQTYKPCXPAGNXXPPXNXXNQXHAXXLXAXXPKFPSTQQXLXLRSPXAXVXYVPPXFAXRTXRMRKNGXCGCXXAEHGXXILLLXLN

SEQ ID NO: 217694 - protein, 446 aa, Glycine max
  Clone ID: PAT_MRT3847_38604C.1.pep
MDGDDETSGPMIDEIYANGGGVGDDGDKRSRRAIMSGDQLDIEAYAALYSGRTKIMRLLFFADKMNNAATQLEALRMAYDEIKKGENTQLFREVVQKIDGRLGPNYDMDAAWCDTVDRRAEQKKEKLENELNAYRTNLIKESIRMGFNDFGDFYYAHGQLGDAFKSYVRTRDYCTTSKHIIHMCMSAILVSIEMGQFSHVTSYVSKAEQSPDAPEAVTVAKLRCAAGLANLEAKKYKLAARKFLETGPELGSHYNDVIAPQDVATYGGLCALATFDRAELKSKVIDNSNFRNFLELVPEVRELINDFYSSHYASCLEYLGNLKANLLLDIHLHDHVETLYDQIRHKALIQYTHPFVSVDLNMMANAFKTTVAGLEKELEALITDNQIQARIDSHNKILYARHADQRNATFQRVLETGREFDRDVRSMLLRSNLIKHEFNLRALRKL

SEQ ID NO: 217695 - protein, 82 aa, Glycine max
  Clone ID: PAT_MRT3847_38605C.1.pep
NAFKTTVAGLEKELEALITDNQIQARIDSHNKILYARHADQRNATFQRVLETGREFDRDVRSMLLRSNLIKHEFHLRAIRKL

SEQ ID NO: 217696 - protein, 182 aa, Glycine max
  unsure (1)..(182): unsure at all Xaa locations
  Clone ID: PAT_MRT3847_38606C.1.pep
HGQLGDAFKSYVRTRDYCTTSKHIVHMCMSAILVSIEMGQFPHVTSYVSKAEQSPDALEAVTVAKLRCAAGLANLEAKKYKLAARKFLETGPELGSHYNDVIAPQDVATYGGLCALATFDRAELKASSPLYFIDNSNFRNFLELVPEVRELINDXYSSHYASCLEYLGNLXXXLXLDIHLHD

SEQ ID NO: 217697 - protein, 107 aa, Glycine max
  unsure (1)..(107): unsure at all Xaa locations
  Clone ID: PAT_MRT3847_38607C.1.pep
QLLDSTKKTQHCLTKSVQRAEGKRRICVTVGTGLPALCIIKSLLVHGYAVNTTIRSDPRRKRDVSFLTDLPGASENAKIFNAYLSDPXSIGSSPEGWVGIFDTDTPI

SEQ ID NO: 217698 - protein, 103 aa, Glycine max
  unsure (1)..(103): unsure at all Xaa locations
  Clone ID: PAT_MRT3847_38608C.1.pep
RWKLRFCKPFRNNXPNLEGPNLQLLMIQLEEFKIAKKEGFPXGLKFLFLDTTRAXMLLRPDGHPFLYGFWPILNMTLYNDCVHWCFPGAIPLWSDFLLVLLKI

SEQ ID NO: 217699 - protein, 190 aa, Glycine max
  Clone ID: PAT_MRT3847_38609C.1.pep
MGKLTLPFVGMIMAEFAQVGLIILSKQVMAQGMTNFIFIFYSNSIGALLLLPISLLIHRFERPPITFSTLCGFFLLALLGYLAQAFGYAGIYYGSATLSTSILNLVPGFTFILAVLFRMEKLDWRKLSSLAKLLGTIVSIAGAFIVTLYKGPALLMGVSSANTSHQPLLSKDSNWILAGLFFAADCVMAS

SEQ ID NO: 217700 - protein, 155 aa, Glycine max
  Clone ID: PAT_MRT3847_3860C.1.pep
ELVKSAALRSITRSKRVNFIGQISPPLSPSPSPSSSPPSPPSPSSSSSSPAESIITPIPDHGEYLMRFSLGTPSVERLAIFDTGSDLSWLQCTPCKTCYPQEAPLFDPTQSSTYVDVPCESQPCTLFPQNQRECGSSKQCIYLHQYGTDSFTIGR

SEQ ID NO: 217701 - protein, 75 aa, Glycine max
  Clone ID: PAT_MRT3847_38610C.1.pep
TQKIKNFSYNPNQIPRWFLKKPVPNIHPSQPPSYYTYIILYSQAIFKYSFPYSNNITIIFHFYTLQPEPIPTYKI

SEQ ID NO: 217702 - protein, 67 aa, Glycine max
  Clone ID: PAT_MRT3847_38611C.1.pep
RSYNKYSKAYTETYPIWQYTCSLQRCGQGNHGSNIMGDIGKNTLSWKRHPILGVLNCSIPSQIRVPL

SEQ ID NO: 217703 - protein, 38 aa, Glycine max
  Clone ID: PAT_MRT3847_38612C.1.pep
FKMTSQLLGGGTFLCHLKQNTLEKMRSSALLHLVIIIL

SEQ ID NO: 217704 - protein, 85 aa, Glycine max
  unsure (1)..(85): unsure at all Xaa locations
  Clone ID: PAT_MRT3847_38613C.1.pep
QTRGASSESINALPTYKFKMKRNKSKGESNSAVGEGGVVAAXTEKERMISGEDAACCICLAKYENNDELRELPCSHLFHKDCVDK

SEQ ID NO: 217705 - protein, 111 aa, Glycine max
  Clone ID: PAT_MRT3847_38614C.1.pep
KFANTNQKFRQVALKNSRTTENLTGQPSFSLGVVIRILNCSANIISMRRNFNPKFSGHHTKSSSFLWKAVRLKVSPTRFPNPSNIQTVPYVYGHVNFNTIPAVSPRDPKSK

SEQ ID NO: 217706 - protein, 61 aa, Glycine max
  Clone ID: PAT_MRT3847_38615C.1.pep
SLNSFIFYYINYYYYYYKIYNLVIYINLYFYILISYNFSYINFSFYFLFYMLVNELLHFNY

SEQ ID NO: 217707 - protein, 89 aa, Glycine max
  Clone ID: PAT_MRT3847_38616C.1.pep
ARARAARADSARGLLLPIGRPALLSLSLSLSSNSDAPFHLSLSLQPKPESLIPSPSPFSFLSSLCCTTSQPHFLFTPIFTPNFHQGIHR

SEQ ID NO: 217708 - protein, 73 aa, Glycine max
  Clone ID: PAT_MRT3847_38617C.1.pep
MCIFGSTDSDILVINQCSGASMQALWELSQKHAEITIKNHGEANIRYAWLASYIGELSTMMNYGLSHYGLSGS

SEQ ID NO: 217709 - protein, 61 aa, Glycine max
  Clone ID: PAT_MRT3847_38618C.1.pep
VDRFFRLRKPPFIFFLASFFLAHVVPFLKYHLSLLVAFNKIIGAFYLFTMCFYNNLQLQYL

SEQ ID NO: 217710 - protein, 72 aa, Glycine max
  Clone ID: PAT_MRT3847_38619C.1.pep
RAFKVPASHGKEMIFGAYKKMLVEKTSFEVADRNGIISLNGFDEPTIKAHGPTKSCPYKNLTRESQTAVQEI

SEQ ID NO: 217711 - protein, 76 aa, Glycine max
  Clone ID: PAT_MRT3847_3861C.1.pep
YVWLLSSGRPVFFFFFFFFRRGRNSYVPLGKGRPYRVGTPFFLKPSWGWPNLLRRVPWDEKSTWLFCLFREYWWRV

SEQ ID NO: 217712 - protein, 52 aa, Glycine max
  unsure (1)..(52): unsure at all Xaa locations
  Clone ID: PAT_MRT3847_38620C.1.pep
VXNXRRSDXXTRXPXXXQXXXTDAVAXXAXSXXXEVQLXXEXXSEXTXAXXP

SEQ ID NO: 217713 - protein, 62 aa, Glycine max
  unsure (1)..(62): unsure at all Xaa locations
  Clone ID: PAT_MRT3847_38621C.1.pep
XYLXLFFLLFPSLTLLYTKLTTSNQFLYCISFSIRTPANTSTAKNMEGSDKINILIHLCQCR

SEQ ID NO: 217714 - protein, 56 aa, Glycine max
  Clone ID: PAT_MRT3847_38622C.1.pep
NDGVTRWSWTSRQGGGFPFLNFPFTCQRRMIIYTTNPLFNAKNVKPNDKRFNAFPS

SEQ ID NO: 217715 - protein, 75 aa, Glycine max
  Clone ID: PAT_MRT3847_38623C.1.pep
YHELTNYMERKEVYAPRFVKVLLIIIFGYKMHKSINLNLKQQGMIMLFAVWVYAYITRVFDNQIKIFLLLLNRII

SEQ ID NO: 217716 - protein, 57 aa, Glycine max
  Clone ID: PAT_MRT3847_38624C.1.pep
PNGFLSSFIISFTSKVLYSYLITQLAELCRFFYFTLPVKSAPSLKFSPLLCNRQLVW

SEQ ID NO: 217717 - protein, 103 aa, Glycine max
  Clone ID: PAT_MRT3847_38625C.1.pep
LSVPPGPLRVSRGVFSGPCSCWLAFGRCFLWRLAGGSPLGARGSSCGGPSFCRRVRACCLGLSGAAPGLLSRCVPLACVFPLLPGLRPWGFGVYFGGCPLEPD

SEQ ID NO: 217718 - protein, 57 aa, Glycine max
  Clone ID: PAT_MRT3847_38626C.1.pep
HIRGIVTSTMKGAPLSTGTLAGGSSSSCPCGARMPSPTWSFVVVVSLRVLLEVCVCF

SEQ ID NO: 217719 - protein, 68 aa, Glycine max
  Clone ID: PAT_MRT3847_38627C.1.pep
KNRKAKSFFGRIINVLILLKGAHHVFFMLLKTNSIHSLYEPQPTNHMILFLKRKGEGFQNDFLNTTIP

SEQ ID NO: 217720 - protein, 255 aa, Glycine max
  Clone ID: PAT_MRT3847_38628C.1.pep
MSFSHSPSSSSHPPSAQSNPLIPANCCLELGKRMQQSTCHNCDQRGHWSYYCPSKSPKTKPFSPGKDSTVPSNKKIQCPCGHGSCVIKSRYGRDYYACPIKRGEKCTKEVVKWCNEAIVERDFQPPPFKYPHCACSAGVCKRVKGTYSKYYFICPIKQGQGSCGYIVSEDDVKLLSRKSTVPVQQSRQRTHDDFWEGCLNDEMGDELGKGDGLHVQIKRMRIADSPASPFSVNLSETLGKKECSAALNAANSNVM

SEQ ID NO: 217721 - protein, 47 aa, Glycine max
  Clone ID: PAT_MRT3847_38629C.1.pep
PHLPLLRDRRMIYNPERQYQGLAAGASPCARRKQRISLLPRVVTPSL

SEQ ID NO: 217722 - protein, 75 aa, Glycine max
  Clone ID: PAT_MRT3847_3862C.1.pep
PRVRGASNKKEGDVADKLSYFQAITGLEDPELCTEILAAHNWDLGDSLSLLSPLTQTLTTLQRLPIWLGNSSPYP

SEQ ID NO: 217723 - protein, 82 aa, Glycine max
  Clone ID: PAT_MRT3847_38630C.1.pep
AHQEHRHTLQMRHPYHYTMWIRDLGSVNEPPSHIVRINSHPPCCVTMSCPRTQQHKLCIVQALRQLSQSTMHSSTFVSSSDD

SEQ ID NO: 217724 - protein, 60 aa, Glycine max
  Clone ID: PAT_MRT3847_38631C.1.pep
KRSKIPPCYKTRQQQSFSLLREKTINRYMLPPKCIAIPEDRVFNSQLDLQHCKRVKRRCK

SEQ ID NO: 217725 - protein, 240 aa, Glycine max
  unsure (1)..(240): unsure at all Xaa locations
  Clone ID: PAT_MRT3847_38632C.1.pep
IELSLTCYSRAFISACVNTLSRRLSKTSSWTVALKTLILIQRLLSDGDPAYEQEIFFSTRRGTRLLNMSDFRGNSKYNSWDFCAFVRTYALYLDERLEYMMQNKRGKRSRFAIDEEEEETMERESRYSREREKNREILKVTPLCEMKTEELFSKMQHLQLLVERFLACRPTGRAKTHRIVIVALYPIVKESFQIYDNITEILCIFIDRFIGMELPDCIKVYDIXCRVGKQYDELDLFYSW

SEQ ID NO: 217726 - protein, 54 aa, Glycine max
  Clone ID: PAT_MRT3847_38633C.1.pep
RVPTTQGQGSTSAAVDAYYATALLGLAYRGSRLVDTGSTLVAFVTLAARTWWHV

SEQ ID NO: 217727 - protein, 67 aa, Glycine max
  unsure (1)..(67): unsure at all Xaa locations
  Clone ID: PAT_MRT3847_38634C.1.pep
MLELAERDEIVGRGGLNDPTKNGTYWKIPGMLXLLERGAQPTGTVHDISKRGGAHTELNADQRPKGH

SEQ ID NO: 217728 - protein, 172 aa, Glycine max
  unsure (1)..(172): unsure at all Xaa locations
  Clone ID: PAT_MRT3847_38635C.1.pep
MSISTTTTPLFSFNHYFTREREPSIHRSKPKPFSLTSSSTLTLFNSNNSCNYSFASCKLHKFHTPKFEAFAANTDTLESLQSSDVLFDQIFPINRXVEGKIFARLDRGEGFGKLEAYKGCNLSGKWILHWGVSRVDDVGRYIMLNKVFELAFILILRYVVIHDCALCFASWY

SEQ ID NO: 217729 - protein, 155 aa, Glycine max
  Clone ID: PAT_MRT3847_38636C.1.pep
NSLLRVRVPSRKLMILSLAIFAILPPIFFHFRLRRLQQLQLTKCRWLNDPPLVCAHGGDSSKASPNTMASYFHALQSRVDCIEIDVSRSSDGVLFALHDRDLQRLNGNTSSKVGYMNSEEIRELSASRQSTSKFTDESILTIQDALMLTISMIPR

SEQ ID NO: 217730 - protein, 118 aa, Glycine max
  unsure (1)..(118): unsure at all Xaa locations
  Clone ID: PAT_MRT3847_38637C.1.pep
LDSSLSSYCFDYSLGEPRPSLEAYFXLVDDAECPRLTEKQMLNMARLFLNVTLGAAYVETSRHSVDVIVYMVLYGMTDYHTEAPNALVEPVKTRTCIIALGSDLLRENGWRPLLYDMG

SEQ ID NO: 217731 - protein, 44 aa, Glycine max
  unsure (1)..(44): unsure at all Xaa locations
  Clone ID: PAT_MRT3847_38638C.1.pep
LKRKRMPEMXGIFRKILVLQTNITQRLRSQITTNYPPLSTPQGH

SEQ ID NO: 217732 - protein, 322 aa, Glycine max
  unsure (1)..(322): unsure at all Xaa locations
  Clone ID: PAT_MRT3847_38639C.1.pep
MMQSSRSRKAALRVRVPSRKLMILSLAIFAILPPIFFHFRLRRLQQLQLTKCRWLNDPPLVCAHGGDSSKASPNTMASYFHALQSRVDCIEIDVSKRXSMQKVLFSHGVLFALHDRDLQRLTGSATSKVGYLNSKEIRELSASRQSTSKFTDQSILTIQDALMLTANSVRQIVLDVKVGPPFYEKELAKDVLSIVEKTECSNCLIWAKSDILARDVIKLSSEITVGYIVMREPSTGARTNLLRMKGAEVVGVYHPLIDEKLMKVLHWRNKKVYAWTVDDAESMQKMLFEHVDAIVTSNPTVLQRLMQDIKTQCLEEGYSLPR

SEQ ID NO: 217733 - protein, 193 aa, Glycine max
  unsure (1)..(193): unsure at all Xaa locations
  Clone ID: PAT_MRT3847_3863C.1.pep
MANATLSVTKPALHAYGKGLSEFSGLPSXSRFLPFARKSSEDGHSVIAFQTYAAGSSGGYKMGVTESKLRVAINGFGRIARNFLRCWHGRKDSPLDVIAINYTGGVKQASHLLKIDSILRTFDADVKPVGSDIFSVPGYEIKVASDRILANLPWKDSGIDLVIEGTVVFVDREGAGXHFQAGAKKALVTAPGG

SEQ ID NO: 217734 - protein, 71 aa, Glycine max
  Clone ID: PAT_MRT3847_38640C.1.pep
THISFANSSIMDATPNNIAVDPSPEVCSSISSFHSTLLSSQSWTIVYPVSRAQRAIVSTCKATAHFKDLAA

SEQ ID NO: 217735 - protein, 53 aa, Glycine max
  Clone ID: PAT_MRT3847_38641C.1.pep
SYCLLASNLLRIFFFLFGLFFSSIHTGNFQTNFFFFPSDLTFTLISAKLEDKS

SEQ ID NO: 217736 - protein, 82 aa, Glycine max
  Clone ID: PAT_MRT3847_38642C.1.pep
QNYVNTWFNQPSQKTRIQLSQQIKTVNIIHKPTAGSLTPIAHGQTLKYNMKVIARKGFSLEELTATKIPKKLAPTIGISDDH

SEQ ID NO: 217737 - protein, 55 aa, Glycine max
  Clone ID: PAT_MRT3847_38643C.1.pep
GSEHHINYKVKSERYYQLFYAISINTCCTKFTDAFNLLCLNIYIQNYLNVKRIFI

SEQ ID NO: 217738 - protein, 127 aa, Glycine max
  Clone ID: PAT_MRT3847_38644C.1.pep
TTPECTVQKPASCKDNLVPKKKPLRDIQNSMAKLDDQKQGKKKKARKPVIQLITNDPISSSPENSSSIETQENNPTGLDKVANSTTENNSGQTNEFATSISDAPGFRRLRNPTRQAKSVVEKDNCLI

SEQ ID NO: 217739 - protein, 50 aa, Glycine max
  Clone ID: PAT_MRT3847_38645C.1.pep
SHEKSCYINCNIKVQTLTNCTQFAHPRVSIIIVQTYRARGLYRILAYGSV

SEQ ID NO: 217740 - protein, 96 aa, Glycine max
  unsure (1)..(96): unsure at all Xaa locations
  Clone ID: PAT_MRT3847_38646C.1.pep
TSRTLNTDGFDLHNMPVPKVCMLHLAXVGVTAARMGLSFFKSDQSSSYDYDEYSTPCCDHRMCTRSMPPQCNCADITLSSCHSHWYSCMCTPSHSR

SEQ ID NO: 217741 - protein, 83 aa, Glycine max
  unsure (1)..(83): unsure at all Xaa locations
  Clone ID: PAT_MRT3847_38647C.1.pep
AGXTKEGQTREQXPRXXNAGGKQKSXGXNKKEAXTPKXXKARKEEXAKEAXXNTKKXXXNSFKSTEEPNXXXEGDNRXERATK

SEQ ID NO: 217742 - protein, 132 aa, Glycine max
  unsure (1)..(132): unsure at all Xaa locations
  Clone ID: PAT_MRT3847_38648C.1.pep
AADNHATKIPLMAHEEILPCRARDVPTVMESKNSKPQTTVMHAGAIEIIMDSIACPDCNIXGAMLSVATYDTNPENAVRSISAAPYRGGRPIQVGTCATTIGQIEPVMKSRLLLLRTTTNGDIVQRKHLAMV

SEQ ID NO: 217743 - protein, 45 aa, Glycine max
  Clone ID: PAT_MRT3847_38649C.1.pep
RNRFGHVKQLENLLLKRVSVWVENDKKTRHRLTDNSEPPKSPSLL

SEQ ID NO: 217744 - protein, 247 aa, Glycine max
  Clone ID: PAT_MRT3847_3864C.1.pep
MAARRPGLIALFDVDGTLTAPRKVVTPEMLTFMQELRKVVTVGVVGGSDLIKISEQLGSTVTNEYDYVFSENGLVAHKEGKLIGTQSLKSFLGEEKLKEFINFTLHYIADLDIPIKRGTFMEFRSGMLNVSPIGRNCSQEERDEFEKYDKVHNIRPKMVSVLREKFAHLNLTFSIGGQISFDVFPQGWDKTYCLRYLDGFNEIHFFGDKTYKGGNDHEIYESERTIGHTVTSPDDTVKQCKSLFLEN

SEQ ID NO: 217745 - protein, 85 aa, Glycine max
  Clone ID: PAT_MRT3847_38650C.1.pep
ERPLKYFLSIKRTLLHHNYQIPCWEKQIREGNPKNASSAPTGEKLGSIAAKNPELARGGIDWRGGGKIGGGIEGERKKKSRSDAW

SEQ ID NO: 217746 - protein, 99 aa, Glycine max
  Clone ID: PAT_MRT3847_38651C.1.pep
LASIILKMKLATPKIIRKIPTPLKLVSRSSSSAAKKPLLVSGSGQPSSSSDGSSNQRVIPKRSLAIYVNPNLRKFVIPISFFTIPNFKFLIDRVQKNIA

SEQ ID NO: 217747 - protein, 58 aa, Glycine max
  Clone ID: PAT_MRT3847_38652C.1.pep
QCLASLAQSPENRVICAATCMRARQVLAKLRLPPSQPRSPGEKVHALHPLSHLTMHNY

SEQ ID NO: 217748 - protein, 326 aa, Glycine max
  Clone ID: PAT_MRT3847_38653C.1.pep
MPSLHLLPGATTAPNSTFLLRPHSPLLPSKTLTPKKPKPKPPSALPQWNRKPELSGSIPRVTVITSGKGGVGKTTTTANIGLSLARLGFSVVAIDADVGLRNLDLLLGLENRVNYTVIEVLNGDCRLDQALVRDKRWSNFELLCISKPRSKLPLGFGGKALTWLVDALKARPQGSPDFILIDCPAGIDAGFITAITPANEAVLITTPDITSLRDADRVTGLLECDGIRDIKMIVNRVRTDMIKGEDMLSVLDVQEMLGLPLLGAIPEDTEVIRSTNRGYPLVLNKPPTLAGLAFEQAAWRLVEQDSMQAVVVEEQPKRGFFSFFGG

SEQ ID NO: 217749 - protein, 36 aa, Glycine max
  unsure (1)..(36): unsure at all Xaa locations
  Clone ID: PAT_MRT3847_38654C.1.pep
XAXPFMXLSRLSSNTRLXCQSXNPSLKRNVIKKNEI

SEQ ID NO: 217750 - protein, 92 aa, Glycine max
  Clone ID: PAT_MRT3847_38655C.1.pep
SIAVAVPSVRACVNRSLPRMGTLTVCLPSWTLHCAMYSSIMVFYRWVPPTGTVYGTVSGADPCTGASRVLWSVSFAAPVRRGGSCDRPSQWA

SEQ ID NO: 217751 - protein, 60 aa, Glycine max
  Clone ID: PAT_MRT3847_38656C.1.pep
ESYHSCLRFSMPNLHENVSHILSLIFNLLRISHQFFADGVILVAEAKLVISTYRKLLAEL

SEQ ID NO: 217752 - protein, 75 aa, Glycine max
  unsure (1)..(75): unsure at all Xaa locations
  Clone ID: PAT_MRT3847_38657C.1.pep
GFLEKPCKTVGGEAXLAEMSPEPNFQPEVKIQQVVPETVEGEILESDNLKPVFQGKVWDDLGGTFCETDFKRGVY

SEQ ID NO: 217753 - protein, 65 aa, Glycine max
  Clone ID: PAT_MRT3847_38658C.1.pep
PGFSHRPPLLSSSDLLSGSEHAALRPLKYHYLAKYNSCAFIRDLGLTSRTVLMCTHFMCSLLDPK

SEQ ID NO: 217754 - protein, 53 aa, Glycine max
  unsure (1)..(53): unsure at all Xaa locations
  Clone ID: PAT_MRT3847_38659C.1.pep
LLDFVITVDSTESVRQWIIKRXGRSEFXIDVFMKXGKFKIDQSGTHFTHQRSI

SEQ ID NO: 217755 - protein, 82 aa, Glycine max
  Clone ID: PAT_MRT3847_3865C.1.pep
ASPQIFSEGGLDYLLNPSLIHAQSILAIWAVQVTLMEFVECYGFGEGPLVEWLDPIYHGGALDPFGLSDDPDAFTKLKFLDF

SEQ ID NO: 217756 - protein, 92 aa, Glycine max
  Clone ID: PAT_MRT3847_38660C.1.pep
TLDPSEPKEKVVDFGVGILQPNWVDGATYLGKQNVKNFLFNVWAKVYFIVYKKEVPTRRPVRWDFSQGNTHTSIFLQILQKKFQSNGPLSSP

SEQ ID NO: 217757 - protein, 91 aa, Glycine max
  Clone ID: PAT_MRT3847_38661C.1.pep
TWLQLDVLLQVQWLKHAPELVDFHVCWGQTQVFPHWDLGLSTWESNQQEYHFFLLQISFLVDSDNLIPDRVCFKLIQYIHRLILRQGFPIS

SEQ ID NO: 217758 - protein, 66 aa, Glycine max
  Clone ID: PAT_MRT3847_38662C.1.pep
ALAKLRASPAYIDHEILSVQCSPHISTGYRVQPFLKPFYLLRHEPPVRSSIIFIVHTSSMCRLRHP

SEQ ID NO: 217759 - protein, 157 aa, Glycine max
  unsure (1)..(157): unsure at all Xaa locations
  Clone ID: PAT_MRT3847_38663C.1.pep
MKRSRDDVYMSSQLKRPMVSSRGEPSGQPQMTSGGAQKLTTDDALAYLKAVKDMFQDKREKYDDFLEVMKDFKAQRIDTSGVIARVKELFKGHKDLILGFNTFLPKGYEITLPLEDEQPPQKKPVEFAEAIXFVGKIKARFHDNDRVYKSFLDILNM

SEQ ID NO: 217760 - protein, 66 aa, Glycine max
  Clone ID: PAT_MRT3847_38664C.1.pep
MKRSRDDVYMSSQLKRPMVSSRGEPSGQPQMTSGGAQKLTTDDALAYLKAVKDMFQDKREKYDDFL

SEQ ID NO: 217761 - protein, 54 aa, Glycine max
  Clone ID: PAT_MRT3847_38665C.1.pep
YNYNNEIKTENTVLFKEPGSKSFLLSESNYKVHLIQLHLGLRKMSSSKYRIQSS

SEQ ID NO: 217762 - protein, 99 aa, Glycine max
  Clone ID: PAT_MRT3847_38666C.1.pep
HREVATINNNTGLIESGKRDEYNVNPLTRIHCRAGLYANRRGNYSSCSEYISCCRKKVLRGPWVGTIGPSPVCTDRLEPSADDALLFLTGRVVPSVLLL

SEQ ID NO: 217763 - protein, 119 aa, Glycine max
  unsure (1)..(119): unsure at all Xaa locations
  Clone ID: PAT_MRT3847_38667C.1.pep
LHSWELLRAATTQGGRVIVNDNYHHNSQVIGYRNSWKTNTTGTTXHEFDCLANPDIKRFDNETTYMNNTSSKTPWALDKTNALPETTTTNAIATLKAETTNNYCTAIEAPGHMDFIKNM

SEQ ID NO: 217764 - protein, 32 aa, Glycine max
  Clone ID: PAT_MRT3847_38668C.1.pep
LNSDTEMHCNQSHFQAYNIIMKCLYKGLQPMK

SEQ ID NO: 217765 - protein, 103 aa, Glycine max
  Clone ID: PAT_MRT3847_38669C.1.pep
GSRLTVMVEKGNHSGIVLHLHVRTEKTVKVDDRRGRSLKKHAVEQGNNMMVIKVIVSLRLRMRMKKTWKHREGGKKPEEGRHCDGPGRKWKECGVGFMAKGMQ

SEQ ID NO: 217766 - protein, 117 aa, Glycine max
  Clone ID: PAT_MRT3847_3866C.1.pep
AIFLLILSNPSRKPTLYNSEPLIAKPLKIALLLCWPRFVRGNKLEKQEKDDIILLKIVPPVDQIYAKWLARDLARIHSFTPKRIRAVQPPDHYVEHMKLNGWLDVDLDDPDLAHLFK

SEQ ID NO: 217767 - protein, 42 aa, Glycine max
  Clone ID: PAT_MRT3847_38670C.1.pep
MWPPHPHNPYSSSTTFNYHFLHIDSSLSLLSSLDLPLYLYYP

SEQ ID NO: 217768 - protein, 29 aa, Glycine max
  Clone ID: PAT_MRT3847_38671C.1.pep
IPDAFTIKNFMQVQFYLKSLTLEHIPNHP

SEQ ID NO: 217769 - protein, 104 aa, Glycine max
  Clone ID: PAT_MRT3847_38672C.1.pep
CPKPVHVRLARGSKPVLHSQEVAHLSPQVVLPICPELDQTPYTSTKEARQGTIARPFQSSTSFNYPVQFIEAPVQGSCLSAIAAKSTQGPPYTDHSPTALAPFR

SEQ ID NO: 217770 - protein, 40 aa, Glycine max
  unsure (1)..(40): unsure at all Xaa locations
  Clone ID: PAT_MRT3847_38673C.1.pep
XKSLFACDRHGXGRGGVTXXHDAXQKEEXRRKQQQQXREA

SEQ ID NO: 217771 - protein, 48 aa, Glycine max
  unsure (1)..(48): unsure at all Xaa locations
  Clone ID: PAT_MRT3847_38674C.1.pep
LLRRSHVSHRRFLLLPRASSLLASLXPXVPSRFGASNGVRVLNWNTEL

SEQ ID NO: 217772 - protein, 59 aa, Glycine max
  unsure (1)..(59): unsure at all Xaa locations
  Clone ID: PAT_MRT3847_38675C.1.pep
GNIVNVPLVLDPALCGDQSNPFGDMXKCCPSGTASVSCVQRVLALILYTYVLQMLSPPS

SEQ ID NO: 217773 - protein, 54 aa, Glycine max
  Clone ID: PAT_MRT3847_38676C.1.pep
HKSFCKCYKEPIKLAYVPINFFQRISIYLLGKLIKKKKLPFYFKISLPSFLLNF

SEQ ID NO: 217774 - protein, 55 aa, Glycine max
  unsure (1)..(55): unsure at all Xaa locations
  Clone ID: PAT_MRT3847_38677C.1.pep
RGGPKEGKPGGKKGGAPGPIKKGKTRERGGKKGAPRGGEKDPRKGXRGGPSPPGG

SEQ ID NO: 217775 - protein, 37 aa, Glycine max
  Clone ID: PAT_MRT3847_38678C.1.pep
GVICRDAKFIQVLDLFILNSEVMTDSLGANSVQFSIP

SEQ ID NO: 217776 - protein, 39 aa, Glycine max
  Clone ID: PAT_MRT3847_38679C.1.pep
FPRSKLPPFSWPPPPPPPPPPPPPPPPPSRRTCSHVARQ

SEQ ID NO: 217777 - protein, 257 aa, Glycine max
  Clone ID: PAT_MRT3847_3867C.1.pep
TRPYGSECWKKACTLQYPHCQYRYLDCQSMGDPDRIVWLRSSNLSRLCDQNSDFFQFGIFVDALNLEVTASQFFNKYCYCLWWGLRNLSSVGQNLLTGTRVAEINFAMIIAVLGLVLFALLIGNMQTYLQSTTTRLEEWRIRRTDTERWMHHRQLPRYLKQNVRRHEQFRWVATRGVDEETILRDLPIDLRRDIKRHLCLNLVRQVPLFDHMDERMLDAICERLKPSLFTPGACVVREGDLVNEMLFIVRGRLDSCT

SEQ ID NO: 217778 - protein, 335 aa, Glycine max
  unsure (1)..(335): unsure at all Xaa locations
  Clone ID: PAT_MRT3847_38680C.1.pep
MDEKGARSSNTLLSCEDEMDLRRGPWTVDEDLTLINYIATHGEGRWNTLALSAGLKRTGKSCRLRWLNYLRPDVRRGNITLEEQLLILELHSRWGNRWSKIAQYLPGRTDNEIKNYWRTRVQKHAKQLKCDVNSKQFKDAMRYLWMPRLVERIQAAATAXTTVTAAVSPTASAGATTTITTNNNTTTYNYYDNNNLNNSFEVHSGNMMVRNPTIMNNNNFCGSHSYTPENSSTGASSDSFGTQVSPVSDLTQDYYNNVTAGNNNNNNPNPDQYYQQAHDQLSFLDCITSPSGLFDFQPMEPNTPWINLSNVGDTSNGFWNVENMLLFQQFSDNNM

SEQ ID NO: 217779 - protein, 137 aa, Glycine max
  Clone ID: PAT_MRT3847_38681C.1.pep
QIKREEAFCYLRIQQTSMSALNSTHFTSLRDQVLNVFKELQEILIKFLTLSIALISLTNTESGKLLFTEQHKLMMFLILTIVLYFLFASTGTILQIYKGNLLPLVIWVMLIVGGIVSVLALSFISATVAWITLAMWV

SEQ ID NO: 217780 - protein, 85 aa, Glycine max
  Clone ID: PAT_MRT3847_38682C.1.pep
NRFKHKQFSKQGQSIYKSLFIIILGFFKVQTKFIFERPQQIFLYQTYMATLATVFLPSKLKPSHSGNQVSPFTHKTPLWKKVNQP

SEQ ID NO: 217781 - protein, 31 aa, Glycine max
  Clone ID: PAT_MRT3847_38683C.1.pep
ICIALVCRYFPIQYLNSDAGVKLIYCSDLPL

SEQ ID NO: 217782 - protein, 91 aa, Glycine max
  unsure (1)..(91): unsure at all Xaa locations
  Clone ID: PAT_MRT3847_38684C.1.pep
VFPCLVGVAFXLVCSASPLAGRLAGVAPSALVWSGPLFVSGAFFFFGLFSLPVFGRLFVGRPGGAGLGGVCSGALLLLVALXFPFRVFCGG

SEQ ID NO: 217783 - protein, 94 aa, Glycine max
  Clone ID: PAT_MRT3847_38685C.1.pep
GKQIAPPPRKKSLQWGFPGCGGSMEFVAYKLRSQSGNSPNFVGRVKGPPKEELGGFKSVPNQGGNSPPGSLSKKNLILLRSRPRKCNTKTGNVG

SEQ ID NO: 217784 - protein, 48 aa, Glycine max
  Clone ID: PAT_MRT3847_38686C.1.pep
HTAPPTCDPHDPPKPDHASRPLTHVVRAGDSLGHSVRPPADLERLRNG

SEQ ID NO: 217785 - protein, 250 aa, Glycine max
  Clone ID: PAT_MRT3847_38687C.1.pep
MTFVPSTSSSFRPTLIRCANSNERQALFSRIAPVYDNLNDLLSLGQHRIWKRMAVSWTGAKMGDCVLDVCCGSGDLSFLLSDQVGSHGKVIGLDFSKDQLSFALSRQQSLSKNCFMNIEWVEGDALDLPFSDGWFDAITMGYGLRNVVDKQKAMQEIFRVLKTGSTVSILDFNKSNELLTSAVTEWMIDNIVVPVATGYGLSEEYRYLKRSIREFLTGKELEKLALGVGFSAARHYEIGGGLMGCLVAKR

SEQ ID NO: 217786 - protein, 53 aa, Glycine max
  Clone ID: PAT_MRT3847_38688C.1.pep
HALTGSLFHPTIQDSMDLEGSCCQRKTLEFTRTSQLERYAEHCNAKGWMVFQH

SEQ ID NO: 217787 - protein, 36 aa, Glycine max
  Clone ID: PAT_MRT3847_38689C.1.pep
LIYLVVISKWCVMIHPSFLHLTVLMVMNSSTLLFVI

SEQ ID NO: 217788 - protein, 39 aa, Glycine max
  Clone ID: PAT_MRT3847_3868C.1.pep
ESKSPFFITESIKSNSYCDRSRRHFVEYHSKILGIERKY

SEQ ID NO: 217789 - protein, 29 aa, Glycine max
  Clone ID: PAT_MRT3847_38690C.1.pep
YPLSFPSFSNQNSELGHFCFPKPINIHGK

SEQ ID NO: 217790 - protein, 73 aa, Glycine max
  Clone ID: PAT_MRT3847_38691C.1.pep
QLLCFACFCFLLKYLSAIFCTPLVFSLNSLSVQIVVVYLCFFIDGSSKVDLLDWVEGRLRAHFSIYPEPREIV

SEQ ID NO: 217791 - protein, 39 aa, Glycine max
  Clone ID: PAT_MRT3847_38692C.1.pep
MILYFDLCLLCWNLEKYTCNIENSYIRKADRCKSFALTF

SEQ ID NO: 217792 - protein, 233 aa, Glycine max
  unsure (1)..(233): unsure at all Xaa locations
  Clone ID: PAT_MRT3847_38693C.1.pep
GEENTSPKKVAPIVKMKYPESKDPKQVYFLLLKLYNMADNRVISRNFYWLHLSGGDYKLLEPYREKKIPLKITSKVSVEESIYNIQVLVTNTSTRSDSTSSTGRLSDGFYGXTSLETLDCGVGIEQETESGWFKRIHKCFAGKSDGLKVTEISGPDVGVAFFLHFSVHTSKRDHNEGKDTRILPVHYSDNYFSLVPGETMPINISFEVPQGVTPRVILHGWNYDGGEIICEVV

SEQ ID NO: 217793 - protein, 134 aa, Glycine max
  unsure (1)..(134): unsure at all Xaa locations
  Clone ID: PAT_MRT3847_38694C.1.pep
MKGLEEVNITPTSSQAXLLCWMNLKCLLEEPTFEAELKLWRAIILEVKLNVSPGSSFNCSEPGWFTVCFDGMDDETVDAALNRIRAFVGKETKXPVGFKRWQPNLRLSFSSWMFEESVMSPHSPIPTSPLVGAA

SEQ ID NO: 217794 - protein, 489 aa, Glycine max
  Clone ID: PAT_MRT3847_38695C.1.pep
IRTYTKQLLLGLEYLHKNGIMHRDIKGANILVDNKGCIKLADFGASKQVVELATISGAKSMKGTPYWMAPEVILQTGHSFSADIWSVGCTVIEMATGKPPWSQQYQQEVAALFHIGTTKSHPPIPDHLSAAAKDLLLKCLQKEPILRSSASELLQHPFVTGEHMNSLPLSSNVTENFEASSPSCAPNDDESFLFRSTVNPLDSGNKQSWGMSNDDDMCVIDDKEDFSQSDSKYKSFMSTNNIESFNPMSDPSDDWGYKFDASPELENRGVSFGTDVSYMPPDQSGDDDKGQKDFSFPGVPSLSEEDDELTESKIKAFLDEKALELKKLQTPLYEEFYNSLNTSCSPNVIESTSEDTACRKYLKLPPKSRSPSWVPISTPSKAVDNSESPGSNGRSSSTVGHVNNHSPQDIPASPLNEWKGLTVDSQQQPSSPSLSFSERQRKWKEELDQELERKREMMRQAGMGGKTSSPKDRALNRQRERTRFASPSK

SEQ ID NO: 217795 - protein, 122 aa, Glycine max
  Clone ID: PAT_MRT3847_38696C.1.pep
LQYITPLPNFLKQRSLLSYIFLCGGFPQHRSFEKKTPPGGVPGGSSPPQGGPPSHPPARLTPPPSPPPFPPFAHLPPAPPPSPPPPPPLPPPPHPPPPPYRPPLIYPSPPRSSSLTYSFPPP

SEQ ID NO: 217796 - protein, 333 aa, Glycine max
  Clone ID: PAT_MRT3847_38697C.1.pep
MLNPEPPPPPPPMMVPPATPMNRETTSLRKKNRLRTRTRIPPFDVDSSFFTTPISLQGTTKSNAISVEQYDGVSASASSPVHVINLSDTEDDDEVRILNFTPINTSFGKRSKKSSSKGECSNSASFVCEICTETKTARDSFSIIGCHHVYCNSCVAQYVESKLEENIVSIPCPVPGCRGLLEADDCREILAPRVFDRWGKALCEAVIAAEEKFYCPFADCSVMLIRGIEENNIREAECPNCRRLFCAQCRVPWHDNMPCEDFQKLNADERDKEDIMLMNLANQMQWKRCPRCRFYVPKSDGCMYMKCRCGNAFCYNCGAPNLTSSHSCSYCFR

SEQ ID NO: 217797 - protein, 97 aa, Glycine max
  Clone ID: PAT_MRT3847_38698C.1.pep
VDVKIGHVEESPVYVHENVVVAEDQRVPVVVGVSVSAVDGRMRHGQKMVLPGLEQVVHQAHRMSVVVGRSGPCNRCICCMMNNQRSVMRKELVGVRK

SEQ ID NO: 217798 - protein, 60 aa, Glycine max
  Clone ID: PAT_MRT3847_38699C.1.pep
PRVRTGSRKPQKGIIRRRRKRRDIRVRCPLEKRSSDFFPRDGSRYIPNRKTKVLLPYLGD

SEQ ID NO: 217799 - protein, 81 aa, Glycine max
  Clone ID: PAT_MRT3847_3869C.1.pep
AIRVKWIISVMKTYDTACSALRERGLKISFMRRTDAKVFRTYLTSSGTANDDKLSFTAPIDTDSLERTSHDNTTTEGTLCT

SEQ ID NO: 217800 - protein, 105 aa, Glycine max
  Clone ID: PAT_MRT3847_386C.1.pep
MSRRPGNPTRRFGDNGGGLFSSKSRSPPVLSIALVIVGGLFLIGYMYRGSGGSSSRIDSVSRVEGDYLCSGEVQQAIPLLQKAYGDSMHKVLHVGPDTCYVVSKL

SEQ ID NO: 217801 - protein, 101 aa, Glycine max
  Clone ID: PAT_MRT3847_38700C.1.pep
IEENNIREAECPNCRRLFCAQCRVPWHDNMPCEDFQKLNADERDKEDIMLMNLANQMQWKRCPRCRFYVAKSDGCMYMKCRGKTQKQLLLLIHYRKVASVY

SEQ ID NO: 217802 - protein, 47 aa, Glycine max
  Clone ID: PAT_MRT3847_38701C.1.pep
AAAPAPSGVGTAVRIRRKPTPFSISLCSLSHRTIAIQRRRRRRRRRR

SEQ ID NO: 217803 - protein, 265 aa, Glycine max
  unsure (1)..(265): unsure at all Xaa locations
  Clone ID: PAT_MRT3847_38702C.1.pep
MAFPPHVVEDCMGLLTLLSDGTVLRSNINFQEQPQPTQHDNLVQFKDFLFHKKFNLHLRLYKPKFDDNINNDDDKNNNNKSLPVVMFLHGGGFCFGSRVWPHIHSCCVRLATSLHAAVVTPDYRLAPEHRLPAAVDDGVEALRWLQRQGHHGGDEWVTRGVDFDRAFILGDSSGGNIAHHLAVQLGPGSREMDPVRVRGYVLLGPFFKWGWFGPGSEVGPPEQMLTLELLDKFWRLSIPIGETRDHPLAXPFGANSQTLDMVSLT

SEQ ID NO: 217804 - protein, 68 aa, Glycine max
  Clone ID: PAT_MRT3847_38703C.1.pep
RYLFIVTKSCSLQETYSRERRSCWVELDWISNLIYTFLFSYAFKAQTLLSSLFYLLLIVIPWLYPLGR

SEQ ID NO: 217805 - protein, 60 aa, Glycine max
  unsure (1)..(60): unsure at all Xaa locations
  Clone ID: PAT_MRT3847_38704C.1.pep
MXXCIXXHIGXAGIQVGXXCWXLYCLXHXIXXDGQMXSXXTVGGGDDXFNTFXSATGAGK

SEQ ID NO: 217806 - protein, 85 aa, Glycine max
  Clone ID: PAT_MRT3847_38705C.1.pep
EFHWFVVFDLCIFCCSLLRLKPGRGLLMQIILMSSQSNYRLDNYHIIIHTAITIRRQFIVCFVAREEKCGSKLGLILVGYVNSLD

SEQ ID NO: 217807 - protein, 197 aa, Glycine max
  Clone ID: PAT_MRT3847_38706C.1.pep
MAGVRRDALLTRDKGQSSVRFRIVVAVVIGVLLGCVFAFFSSAPTPLHIPYPIKMVSSACESPEQVNALKVDILSAKVKNSELKKRVKDLMEKLRLAEQGKGHAQEQFVVLGESHKAGPFGTVKGLRTNPPVIPDESVNPRLTKILGEVAIYKELIVALANSNVKEMLQLWFTNIKRVGIPNYLVVALDDNIEEVCK

SEQ ID NO: 217808 - protein, 53 aa, Glycine max
  Clone ID: PAT_MRT3847_38707C.1.pep
IACVLHLIYRFIRRRPRFSRVCSLSQIRVPEFFGSSHIGYGKHRFVVKSKSRG

SEQ ID NO: 217809 - protein, 79 aa, Glycine max
  Clone ID: PAT_MRT3847_38708C.1.pep
LFFEGCLTKCFYGDKTDSIHCYNEPHDTDFLKRTGRIQRGTVSKWTSITPGFPKLGVEEKKMGNTTPGETPHWKPPTHG

SEQ ID NO: 217810 - protein, 87 aa, Glycine max
  unsure (1)..(87): unsure at all Xaa locations
  Clone ID: PAT_MRT3847_38709C.1.pep
MLTHRGITSMVGYQHMVFTIIEATSFGYGYLSLPXAAVSDELGMIIANDTCCSAFNNATPFWRHEYWKCQCLFPKLKCLTQDIPQHV

SEQ ID NO: 217811 - protein, 75 aa, Glycine max
  unsure (1)..(75): unsure at all Xaa locations
  Clone ID: PAT_MRT3847_3870C.1.pep
NQLTNHSTTFLFWLGGYITSHHFIFTYHIPYYTYLIFTIPSTSNNKNQLILILILTNLPIQTTIQVCXVSPTTTN

SEQ ID NO: 217812 - protein, 47 aa, Glycine max
  Clone ID: PAT_MRT3847_38710C.1.pep
MRDNNKSSKHTSFNLNSINNYPSITRWVHIPSRRVILYNLHHPLQIN

SEQ ID NO: 217813 - protein, 52 aa, Glycine max
  Clone ID: PAT_MRT3847_38711C.1.pep
STRASLVQIVGWGDFITSSPACPCSSTEVWLGVFMSFNLVISPISTRRVFIF

SEQ ID NO: 217814 - protein, 65 aa, Glycine max
  Clone ID: PAT_MRT3847_38712C.1.pep
KKARQNLRVDAYIPISMKGAVSESLNKPNGLYVGNHYALTGQQKPDLFLLIQKNQTYLAGVFTTQ

SEQ ID NO: 217815 - protein, 344 aa, Glycine max
  Clone ID: PAT_MRT3847_38713C.1.pep
MGSVERSRKKVMSWKKAMVHFSLCFVMGFFTGFAPTGKSIFHSHVDYSNRSEFAPQPIEVSQKTTNVNRSWIAPTPRSLVHKQKLHVKIGPQLKPRRLIIIVTPTSTKLPFQTVILARLANTIKLVPQPLLWIVVEGQTDSTELSKTLRKTGIMYRHLVSKENFTDLEAELNHQRNLALKHIVHHRLSGIVHFAELSNGYDLEFFQQLRYIEVFGTWPTASLAANRKKVMIEGPVCDSSKVIGWHLRNMNNETDIITPPIHISSFAFNSSILWDPERWGRTSSLQDTSQNSIKFVKEVVLEDQEKLRGIPPEDCSRILLWRFNFHARTTSNHKFPTTASGVIRK

SEQ ID NO: 217816 - protein, 192 aa, Glycine max
  Clone ID: PAT_MRT3847_38714C.1.pep
VLCWTALIAGLAMHGYAEKALWYFSEMAKKGFVPRDITFTAVLTACSHAGMVERGLEIFESMKRDHGVEPRLEHYGCMVDLLGRAGKLRKAEKFVLKMPVKPNAPIWRALLGACRIHKNVEVGERVGKILLEMQPEYSGHYVLLSNIYARANKWKDVTVMRQMMKDKGVRKPPGYSLIEIDKKVPDAGSARI

SEQ ID NO: 217817 - protein, 45 aa, Glycine max
  Clone ID: PAT_MRT3847_38715C.1.pep
KASSVKLNYFSTDYTASATTLNTTFYLMINDNVNGDHQKGQGKWC

SEQ ID NO: 217818 - protein, 84 aa, Glycine max
  Clone ID: PAT_MRT3847_38716C.1.pep
RPKTTQSNHSIIENPDSDNTLLITPKLKHIINNNSNHSEFSLSLSHVLLETNHLLNLKIPKTCLSRVLTLMSWAYTGVFNSGMT

SEQ ID NO: 217819 - protein, 35 aa, Glycine max
  Clone ID: PAT_MRT3847_38717C.1.pep
FPNHSLRLCPHYSLSSATMEVSLFLMSSTFINSSS

SEQ ID NO: 217820 - protein, 62 aa, Glycine max
  Clone ID: PAT_MRT3847_38718C.1.pep
KKNNKPPNLGKTKLNFKKSPATNIKWGPHQNSGQPPQKSNKRSDFYLKNIKRPPFPLALKVK

SEQ ID NO: 217821 - protein, 147 aa, Glycine max
  unsure (1)..(147): unsure at all Xaa locations
  Clone ID: PAT_MRT3847_38719C.1.pep
SCEIFDCLIPQGTTLLVNIWAIGGALTEWIDPLEFKHARFLLGGEKSXVHVMGPNFEVIPFGAGRRICVGMGLGLKVVQLLTATLAHTFVWELEKXLDPKNLNMDEAHGFILQRKMPLFVHPYPRLSPHVYSSSSSPMSSSRFGNLF

SEQ ID NO: 217822 - protein, 40 aa, Glycine max
  Clone ID: PAT_MRT3847_3871C.1.pep
SGKSLLLSNLVLSVNITPPLNVHFQDRAAEDEGSPFSLIW

SEQ ID NO: 217823 - protein, 37 aa, Glycine max
  Clone ID: PAT_MRT3847_38720C.1.pep
DQNIMRDGFMESIAVGGQPKPSEKVWVLYYLKSNRNL

SEQ ID NO: 217824 - protein, 161 aa, Glycine max
  Clone ID: PAT_MRT3847_38721C.1.pep
AMKKRKELGHGSPSISPPPKSRRLELERDVMMEEEENVMVKQPCVDPTPSPVTDMEERAIVLYEPTATTPFLKSPSSPEFSIVIKSDLIPGLKDYLLSWGIAKQDDPVEDEMRREKSSEMSNDCLAVVPWVAFHSPMTCEEIVPETGQPLEVEEGDMMEMD

SEQ ID NO: 217825 - protein, 123 aa, Glycine max
  Clone ID: PAT_MRT3847_38722C.1.pep
MDFFAQGHHHTTAYPTISATGTISVNPPGGTHTAHDPKHTGGLPPPHTGFPVPVNKFIQHSHVGQTALWVVFGLFTAGLVGIFILSQRVEKRARLYHFTLWPCADHRHGLSPRHSDRAGRYVR

SEQ ID NO: 217826 - protein, 211 aa, Glycine max
  Clone ID: PAT_MRT3847_38723C.1.pep
MDVEAEIDRLPIDLLAHIFVLFTSFTDLAQASGVCKKWKQGVKESLARRHNLSFAGWKMDDDSTARLVYHAYNLTKLDIPRSRWGCQITDAGLLRISFAKCISNLTSISLWGLTGITDEGVVQLISRTRSLQHLNVGGTFITDESLFVIARSCPKLETIVLWSCRHVTESGLFALVDQCLKLKSMNVWGTRVPVECLNNLLIVSPALQIKV

SEQ ID NO: 217827 - protein, 278 aa, Glycine max
  unsure (1)..(278): unsure at all Xaa locations
  Clone ID: PAT_MRT3847_38724C.1.pep
PNISGNIKISQGEAYLPHDRGGTPASNRFPSNQSVLPTAGVSRMFASRYVSRFLNSESASSREKVSQSSGSVPVNKSTQVEKQMEQIQIKPNVEIRLNDLKLVLGPELKIVYPLILNFGVSGELELNGQAHPKWIKPRGILSFENGEVDLVATQVRLKREHLNIAKFEPECGLDPMLDLALVGSEWQFRIQGRASNWLGKLEMTSTRSVEQDALSPAEAAQRFESQLAESILERQXVQLAFEKLATATLEKLMXEIERKGELGQPRWRLMYAPQNPKL

SEQ ID NO: 217828 - protein, 59 aa, Glycine max
  Clone ID: PAT_MRT3847_38725C.1.pep
KNLFLIFIILVSSCDFMKHLKTLPKITTNLILRYLYMKEMHLGTKSMYAQENIANTKQA

SEQ ID NO: 217829 - protein, 134 aa, Glycine max
  unsure (1)..(134): unsure at all Xaa locations
  Clone ID: PAT_MRT3847_38726C.1.pep
ANWYGERQPIRTAAQTQDAKDCTEAPPAPWFEPRELTSWXFYRAGIAEXAATLLVLYVTVKTAMGVAQCSSKCSTGGEQGVAWPFGGMIFGLGYRTAGIXRGHTNPSATLGLVLARXIFTRTVVYIIMQGLRAI

SEQ ID NO: 217830 - protein, 63 aa, Glycine max
  Clone ID: PAT_MRT3847_38727C.1.pep
LILYDMIDMIERLRKRELYLTFPLTRRVAIFKNRSFCAPAAATGVGITLLYRIPQQRVDTSIW

SEQ ID NO: 217831 - protein, 46 aa, Glycine max
  Clone ID: PAT_MRT3847_38728C.1.pep
NDTHASNARGKVDMAIEIPKYYTLTKKYNSNARGNVNNGSYGKAKI

SEQ ID NO: 217832 - protein, 53 aa, Glycine max
  Clone ID: PAT_MRT3847_38729C.1.pep
FTFLFSLTTTNFICSPHSHISTRWTRIWTWRRRYPMGEDLDLRRSGSNPVLKV

SEQ ID NO: 217833 - protein, 58 aa, Glycine max
  Clone ID: PAT_MRT3847_3872C.1.pep
NKITKTIALHQMFTHIQRDPPKMVSSHTFFSPTLFYLDFMKGNVCSKCHEQGPKNSGG

SEQ ID NO: 217834 - protein, 43 aa, Glycine max
  Clone ID: PAT_MRT3847_38730C.1.pep
DKLIMYGESKEICYTRRFCEHDSFREAHSNDILLIGDNLYVKG

SEQ ID NO: 217835 - protein, 78 aa, Glycine max
  Clone ID: PAT_MRT3847_38731C.1.pep
ARFINHSCDPNLFVQCVLNSHYGVKQARLVLFAGRNIRPKQELTYDYGYRLDSVVDADGKIKQLPCYCGEATCRKRLY

SEQ ID NO: 217836 - protein, 66 aa, Glycine max
  Clone ID: PAT_MRT3847_38732C.1.pep
LKLPSKVSWGKVNLLQKFPLPFGFNESNVDHSLKSSIHKIKILIYKKWLWGGDQKMMAQRKTGGGI

SEQ ID NO: 217837 - protein, 54 aa, Glycine max
  Clone ID: PAT_MRT3847_38733C.1.pep
RLREDDRRGCRTTLNSCVCYYFSYGVIFVVFSRSFVGLNNFICVSVDYPTYHIM

SEQ ID NO: 217838 - protein, 61 aa, Glycine max
  unsure (1)..(61): unsure at all Xaa locations
  Clone ID: PAT_MRT3847_38734C.1.pep
FRPLTIFLRLYLNNQXDKKTPIYELQIFFYIXEPNYDXKPTSYLGKLLAFIGVPNRHRDSP

SEQ ID NO: 217839 - protein, 54 aa, Glycine max
  unsure (1)..(54): unsure at all Xaa locations
  Clone ID: PAT_MRT3847_38735C.1.pep
MLPFMLSFQILCGFIANXNNDXQIAXXQGGXQPXTKGXXXLYHXPXXLXXXCGH

SEQ ID NO: 217840 - protein, 67 aa, Glycine max
  Clone ID: PAT_MRT3847_38736C.1.pep
PIYVKNIKIYLTTRLDSYMLHTVESVILLGSNTVTTYITLISTTLRNHHISWPGLLDAKTTMVRNSP

SEQ ID NO: 217841 - protein, 114 aa, Glycine max
  unsure (1)..(114): unsure at all Xaa locations
  Clone ID: PAT_MRT3847_38737C.1.pep
DTLQRVSITIKNVDGFSILWTCLYKASFCPAFIATKCTYCYDNNSSYCSLPSLIQDRPVYAAPAPIITPTVIQDMTXEYDQAIEDLQILTRDFSELIATTAEKVEQITASLGTS

SEQ ID NO: 217842 - protein, 81 aa, Glycine max
  Clone ID: PAT_MRT3847_38738C.1.pep
IFTLPPARPKQQQEKNWPTQTATQLFLGGGNPTKAGWEKNRPPGGKYLPPLARNEINFYNQKRGSRIHPPPEKPLENEKGP

SEQ ID NO: 217843 - protein, 59 aa, Glycine max
  Clone ID: PAT_MRT3847_38739C.1.pep
SVGLTSEEFVNEWPVNCVYITQRRVIPVNARARSTRTTLKPCPISTFHFFLFLVFFFLK

SEQ ID NO: 217844 - protein, 163 aa, Glycine max
  Clone ID: PAT_MRT3847_3873C.1.pep
MGAIRNIEIHGAKGGESNPKSPVEAADSLRSTNLAKILIAVGEGEFEGVPTNRDIYLDNTPIEDASGNVNFPNVKWEWRGGSVDQAYIPGIPSVENETSLNIELRSDSPWVRSITNTQLSAVRMRLAWPALQRQDESGNVGGYRIEYAIDVSTDGGAYKQALA

SEQ ID NO: 217845 - protein, 56 aa, Glycine max
  Clone ID: PAT_MRT3847_38740C.1.pep
YYYCCFGCSCCYWLWLLLLYVSLITFCFIIPTIKYVDIDSTITHIKFYINQTFVVR

SEQ ID NO: 217846 - protein, 75 aa, Glycine max
  Clone ID: PAT_MRT3847_38741C.1.pep
GKINYFSFYLSLKRKKIRGDKKNRGDASIYTSASCDFIFLSSACESVLFLIHWPFSLPCIRNTTILRLYISFLLH

SEQ ID NO: 217847 - protein, 185 aa, Glycine max
  Clone ID: PAT_MRT3847_38742C.1.pep
MEKAEEESVDLGEICLRPLQVSDLDDLLVWTSDEKVAAFCSWDPYSSKDEGINFIQNIASKFLWCRAICLKDRAIGCISLSSNSEHDKSRSRSAELGYVLGSKYWGKGVATVAVKKVVKAALSELPHLERIEALVDVFNVGSQRVLEKAGFQKEGILRKYIFQKGKPRDMVIFSLLSTDPKPSFP

SEQ ID NO: 217848 - protein, 98 aa, Glycine max
  Clone ID: PAT_MRT3847_38743C.1.pep
IGGNSPYQFPWPLKVSGMDLEKWSIRAISYQLAFAIRHGNSVFDHGGLLYGHQPAQKKLFSQALIKKVWKKTSNLILVWLVIKRKYQPNLTYGFNRIY

SEQ ID NO: 217849 - protein, 56 aa, Glycine max
  Clone ID: PAT_MRT3847_38744C.1.pep
LFLPKKHLTCGGVIIQVQLNLQNFYLITLVLHLIPYLSTYSLSFLTSQIKYKPYFT

SEQ ID NO: 217850 - protein, 117 aa, Glycine max
  Clone ID: PAT_MRT3847_38745C.1.pep
IYIIAPYKKKKSWNHPTEKKGKKQKIWFFPKKDPEQPQPAGKKTPLLPSLKAKETKEKTPCHPSPKRTPQASRGQTGPQQIPGESKRKKNRGAFLPKGGAPPPLGGPPQGGNRAPFL

SEQ ID NO: 217851 - protein, 56 aa, Glycine max
  Clone ID: PAT_MRT3847_38746C.1.pep
TPRKVFTSDPSALELCRGGTSLFKGTQIYGGKLTVELKSIFYKGIQSPLIYIILVK

SEQ ID NO: 217852 - protein, 122 aa, Glycine max
  Clone ID: PAT_MRT3847_38747C.1.pep
CLLTSWDWFVSEGAREEDWSIVWTRASSRSIEVITPYCITEVAGVDYVHGRQCTANGSFVQSNPTVQYHWVSYSTTWISMKISSHKSNVMWIHTRVSTRKFHVVSYRKKKGRQAGSRLVSWE

SEQ ID NO: 217853 - protein, 120 aa, Glycine max
  Clone ID: PAT_MRT3847_38748C.1.pep
TFNWFYLKIWLSSSLSICHICTCNMLILLCILHIILNGPTLCLGNKVEDQILKLERAWRGQTPETNKTHIWEKPRRIAMVLFENLAVVFIINLSHLHVQYAYSALHSPHHLEWPNSLPWE

SEQ ID NO: 217854 - protein, 53 aa, Glycine max
  Clone ID: PAT_MRT3847_38749C.1.pep
LEPQFRARPTLSLLYMKKLILISFSQIPCPKEKDILLINLLNLQRDSKIWSNP

SEQ ID NO: 217855 - protein, 59 aa, Glycine max
  Clone ID: PAT_MRT3847_3874C.1.pep
KSPPQFQKKVFFFPHPLYRKGGALPLGKLGVKLAPLTKSPGDSPRGPVEGPSKPAPSGF

SEQ ID NO: 217856 - protein, 201 aa, Glycine max
  unsure (1)..(201): unsure at all Xaa locations
  Clone ID: PAT_MRT3847_38750C.1.pep
SLFFFFFFFFFFFFFFFFFFFFFFFFFFFFLKKGNRAPPTPGKSSPENPTKKGGAQDFSLGPKPPPQKSRPGGPLNPPPPKKLNNPPPNKSPRGKTPPXFPRGPPPPRGPPQNPEPQHKRGGGKXLNPPKVPLKNFFPPTRGGTPPFQGFFQRRPKFPLFKKPQLGKELGPGTGRGPPGGHQGSKKGGSKKPPPPPLGLPG

SEQ ID NO: 217857 - protein, 469 aa, Glycine max
  unsure (1)..(469): unsure at all Xaa locations
  Clone ID: PAT_MRT3847_38751C.1.pep
MAPSISDEMPSTTTSLLRRNRWLPSSIKLKTTLFSELSGAVGDLGTYIPIVLALSLVNNLDLTTTLVFTALYNIATGLLFGLPMPVQPMKSIAAVAISAAXPLTIPQISAAGLSVAAVLLLLGATGLMSVLYRYLPLPVVRGVQLSQGLSFAFSAVKYIRYDQDLAKSKSGPPRPWLAVDGVAVALAAVLFLVLTTGAGDEPPPPPPQQQEEEIDDRREKVRRRLRVLSTIPAALIVFLFGLVLCFIRDPSIFGDLRFGPSRISLIKITWEDLKIGFVSAAIPQIPLSVLNSVIAVCKLSGDLFPEREASAMHVSVSVGLMNFVGCWFGAMPCCHGAGGLAGQYRFGGRSGASVVFLGIAKLVLALVFGNSLGRILGQFPIGILGVLLLFAGIELAMAAKDMNTKQESFVMLVCAAVSLTGSSAALGFFVGIVLYLLLKLREVECRGFGFCGSNHTKSSLEDEQASLIA

SEQ ID NO: 217858 - protein, 146 aa, Glycine max
  unsure (1)..(146): unsure at all Xaa locations
  Clone ID: PAT_MRT3847_38752C.1.pep
SCLRGDELPEGQRVDQWEPVLCDSVKTPLEVFEELQVEGYLAVYERVAITDEKSPKELDFDILLLMNYGLTIQDSRVVLFGTIPINVEKSILFILLFEVNKNYQADVNTEIGCNCXMGSGTTTAGMDIATLVYLNRIAGSGFSRSN

SEQ ID NO: 217859 - protein, 76 aa, Glycine max
  Clone ID: PAT_MRT3847_38753C.1.pep
TVAAPALFFFFFFFEFFFTWWGGGRTLLGDLTKHYHITVNIRVYGWPTKPNPANQKGVIFLYPKKRGLSEGKKHLF

SEQ ID NO: 217860 - protein, 42 aa, Glycine max
  Clone ID: PAT_MRT3847_38754C.1.pep
WYRAPTLLNTLNQIIKPKNPSDKPLRLPLQNIYKIKDVRTRP

SEQ ID NO: 217861 - protein, 41 aa, Glycine max
  Clone ID: PAT_MRT3847_38755C.1.pep
PSYIIGCVEYFKTFSDTQTYVIANLIYQLNAIDIRRIPHYG

SEQ ID NO: 217862 - protein, 366 aa, Glycine max
  Clone ID: PAT_MRT3847_38756C.1.pep
CKSGALKDLRAVFTFSPKQRLAPDRSPGAPEIEPTQPAVQQWSQADCWMQLYDRWSSVDDIGSLAVVHQMLANDPGKSLLHFRQSLLLLRLNCPKSAMRSLRLARNYSTSDHERLVYEGWILYDTGHREEALAKAEESISIQRSFEAYFLKAYALADSNLDSESSKYVISLLEEALRCPSDGLRKGQALNNLGSVYVDCDKLDLAADCYMNALNIKHTRAHQGLARVYHLKNHRKAAYDEMTKLIEKARGNASAYEKRSEYCDRDMAKSDLGMASQLDPLRTYPYRYRAAVLMDDHKEVEAIEELSRAIDFKPDLQLLHLRAAFYDSIGDFVFAVRDCEAALCLDPNHNEILDLCNKAREHIREPK

SEQ ID NO: 217863 - protein, 63 aa, Glycine max
  unsure (1)..(63): unsure at all Xaa locations
  Clone ID: PAT_MRT3847_38757C.1.pep
DTMGDGCVPAKKTLXLSXIKESTXVNIKSRSTPTGVQFKSIVHLEHVNXVQFRQIIINLIHIS

SEQ ID NO: 217864 - protein, 117 aa, Glycine max
  Clone ID: PAT_MRT3847_38758C.1.pep
MLLQGVQRVLRPFSVDPFWAPTPGNPCTCLTVQPTLDNQYSQSKPSFSSTNQPSFSKPHHQENQTSYSGLVDSREDKSQEETPAIISELFEGFLTIGTLGAETVTNEPGTPTFAMPS

SEQ ID NO: 217865 - protein, 71 aa, Glycine max
  unsure (1)..(71): unsure at all Xaa locations
  Clone ID: PAT_MRT3847_38759C.1.pep
QNKYENSEVEVQNRGVFYFLGKKKDEXYKPHPQEEVIATEFQKVTVSYQXRXKHSLLEKLHLSDSSSISSN

SEQ ID NO: 217866 - protein, 57 aa, Glycine max
  Clone ID: PAT_MRT3847_3875C.1.pep
GGGGGGGGGGGGESKKIGGLQSHYRNKPTCIPTKSTHNTNYRHSEPNANGYTLRKFD

SEQ ID NO: 217867 - protein, 90 aa, Glycine max
  Clone ID: PAT_MRT3847_38760C.1.pep
YEITDHVQVTVILTQVCHLNFLFSTFLFFLHVRGEWNWHGERAKTLLELWRRTLLPRHGVETPNPRERSRSRERERERERERCLFVCSLD

SEQ ID NO: 217868 - protein, 75 aa, Glycine max
  Clone ID: PAT_MRT3847_38761C.1.pep
LFKIQSKLLMRLLKKKLDTLNSDSSVKHNTFRGGKKLLHFCYCNLTFKYSRTSLVSLSNTGFRMLLRGFPLIFSA

SEQ ID NO: 217869 - protein, 75 aa, Glycine max
  Clone ID: PAT_MRT3847_38762C.1.pep
MRATPQVTHGKKLPCKKGPWSSLGGPFKGIPNLRVQKVTFLALFKKKKKKTTKKKKKKQKKKKKKKKKKGRPPPY

SEQ ID NO: 217870 - protein, 97 aa, Glycine max
  Clone ID: PAT_MRT3847_38763C.1.pep
PSVPMGGLKGPPKVINWAPKGKIPLWFGMEGGHPFPMGFRVRGRGFPSRGPAPGFKKFWVWVNRDFCVPLFPRFFGQKKVKKENKKKKRKQKKKNQT

SEQ ID NO: 217871 - protein, 83 aa, Glycine max
  Clone ID: PAT_MRT3847_38764C.1.pep
GLSFPRIQYLSQPLPLSRMISLSSAFHRSLSAKTELRGFSMTARTSSVTLPTKSRYAILFPLSAHSHSPMLSSVPDFDTFESG

SEQ ID NO: 217872 - protein, 63 aa, Glycine max
  Clone ID: PAT_MRT3847_38765C.1.pep
FPTKSKVLQEMFPVLFTLVKSTEPFLDEYYLPDMDETLREAGFGKITSILTDPKHVTITATVP

SEQ ID NO: 217873 - protein, 44 aa, Glycine max
  Clone ID: PAT_MRT3847_38766C.1.pep
NSFSRFSDDGVSYLCPSIRTPLEMGLCVCTRLVSVKRKFESNRH

SEQ ID NO: 217874 - protein, 99 aa, Glycine max
  Clone ID: PAT_MRT3847_38767C.1.pep
SLSLHLSTKPLFVMWPALVMALHRAVSPNKVSYVLATMFPMVIQFVLIHAWCSAVCSSSIKSPPTQRVSPMHGHITSQYPRCNQVLHTFSGMVCIKIPP

SEQ ID NO: 217875 - protein, 71 aa, Glycine max
  unsure (1)..(71): unsure at all Xaa locations
  Clone ID: PAT_MRT3847_38768C.1.pep
NQRVEKANEGLVLANEPLXAIGFRPLKLTTPSLGDLNHLILAPMRGVTCGLRFPGQLNFDLRKLAGNLFPF

SEQ ID NO: 217876 - protein, 49 aa, Glycine max
  unsure (1)..(49): unsure at all Xaa locations
  Clone ID: PAT_MRT3847_38769C.1.pep
RIRIHFDTCTLXHFNGRSLQXLLLLFLPXPSVXLXRSXSKPVXPNXXXA

SEQ ID NO: 217877 - protein, 142 aa, Glycine max
  Clone ID: PAT_MRT3847_3876C.1.pep
MANGQTANAAMAIDLGSEFMKMALIKPGVPMETVLNRDSQRITPMALTIRDGERLLGDAALKKLLVRPKNTFIFFLDLVGKQFDDPTVTAFRNEFPYLRLKAHPKRGTVQFETDVGDMSLECALAMLLWNARQDGMHMLDNL

SEQ ID NO: 217878 - protein, 122 aa, Glycine max
  Clone ID: PAT_MRT3847_38770C.1.pep
NTHDPGVLHAVLVAGLYPRVGRFLTNKGGKRVIVETTSGDKVRLHNHSTNFKLSFKKNLGNTLIVYDEITRGDGGMNIRNCTVVGPLPLLLLSTEIAVAPAEENDEGDVDDAVGSEDEAGSE

SEQ ID NO: 217879 - protein, 127 aa, Glycine max
  Clone ID: PAT_MRT3847_38771C.1.pep
AKSGSVVVDIAKPQKPSSINKLSGLHRSDGTTNGPSSENIEDGEVIGIITLEDVFEELLQEEIVDETDEYVDVHKRIRVAAAAAASSVARAPSSRRLTNQKGAGIQSKPGQAQKKSAEENGLNSTKQ

SEQ ID NO: 217880 - protein, 493 aa, Glycine max
  Clone ID: PAT_MRT3847_38772C.1.pep
MRAVSALMVARMLTRDHSLPVLGNESIPFGSVWWFAYAGVSCFLVLFAGIMSGLTLGLMSLGLVDLEILERSGSPAEKMQAAIILPVVKKQHQLLVTLLLCNAVAMEALPLYLDKLFNQFVAIILSVTFVLFFGEVIPQAICSRYGLAVGANFAWLVRILMIICYPVSYPVGKVLDHLLGHNEALFRRAQLKALVSIHGQEAGKGGELTHDETTIISGALDLTEKTAEEAMTPIESTFSLDVNSKLDWEAMGKVLARGHSRVPVYSGNPRNIIGLLLVKSLLTVRPETETPVSAVSIRRIPRVPSDMPLYDILNEFQKGSSHMAAVVKARGKGKETPQIIDEEKNEENKSIGGDSQLTTPLLQKQDAKSGSVVVDIVKPSKPSSINKLSVLQRSDSTTNGPSSENIEDGEVIGIITLEDVFEELLQEEIVDETDEYVDVHKRIRVAAAAAASSVARAPSSRRLTSQKGAGIQSKPGQAPKKSAEENGLNSTKQ

SEQ ID NO: 217881 - protein, 183 aa, Glycine max
  unsure (1)..(183): unsure at all Xaa locations
  Clone ID: PAT_MRT3847_38773C.1.pep
SQADCAVLIIDSTTGGCEAGFTNDGQTRQHALLSFTLGVKQMIRCCNKMDAPTPKDYKVTSDEIVKEVYYYLXKVGYSPDXDSFCLLSSGFEGYIMIDRSSNLDWYNGXALLDALDQMNEPIRPSDKPLMLTLHDVYTIGRIVAVPVRRDETCVLTPEMEVTYARTGLTSEGQSVEMHHESLT

SEQ ID NO: 217882 - protein, 108 aa, Glycine max
  Clone ID: PAT_MRT3847_38774C.1.pep
MLKRPGRQESLADKIYRFRGTLLVVAIPLLLITFVLYVMPSSTSNESVGDYALVNRKMSPEKKSVGSYAVIFDAGSSGSRVHVFHFDHNLDLVHIGKDLELFVQVKSV

SEQ ID NO: 217883 - protein, 109 aa, Glycine max
  unsure (1)..(109): unsure at all Xaa locations
  Clone ID: PAT_MRT3847_38775C.1.pep
AATKPEXXEPXTDTRXPQTPXIFKATRLQXQSAVPSSSTGDAPSAEASLPLRRRPDSLSLPFLRRTPCHRRAGSRNHQNAETLRPAPVDDAGVVHRQDLPPPGCVTDGG

SEQ ID NO: 217884 - protein, 97 aa, Glycine max
  unsure (1)..(97): unsure at all Xaa locations
  Clone ID: PAT_MRT3847_38776C.1.pep
EGSKMHLVFHISLLKKAVKPTCSRQLLPTAVNENWELQVQPEKVMQSITXEDGRKEVLIKWRGLPHHEDSWELADEMQAVFPQLDLENKVHLEGRGY

SEQ ID NO: 217885 - protein, 156 aa, Glycine max
  Clone ID: PAT_MRT3847_38777C.1.pep
FSPAQREAVEALIQELPSFRLTAVPTNCSECLICLEEFHVGNQVRGLPCAHNFHVECIDEWLRLNVNCPRCRCSVFPNLDLSALSNIRSESEQSSATAVTSRDMTGQTSSQSYLLRLQGPLHPVCVDFAGPAGETDNALENAENGVVPVVTQKYVK

SEQ ID NO: 217886 - protein, 45 aa, Glycine max
  Clone ID: PAT_MRT3847_38778C.1.pep
KRCQVVLHSFIVSHIGISSQYYLSESRLIDLLHVSEYCLTYEHMV

SEQ ID NO: 217887 - protein, 59 aa, Glycine max
  Clone ID: PAT_MRT3847_38779C.1.pep
PFPGPWKGPKNDPLRPKRRLLQRETHPGRKSRFDHPGLIHPPDVGSGLLKTQGPRGTSL

SEQ ID NO: 217888 - protein, 43 aa, Glycine max
  Clone ID: PAT_MRT3847_3877C.1.pep
CLTIFDDFLPGTGPFVKAVFSYTIQYDEEDTFHTTHLVSCILE

SEQ ID NO: 217889 - protein, 51 aa, Glycine max
  Clone ID: PAT_MRT3847_38780C.1.pep
NGVAEAEDAPPNRVVDVVVAVEEAAPNGVVGAEGVPPNGVVVEAEDPAPNG

SEQ ID NO: 217890 - protein, 72 aa, Glycine max
  Clone ID: PAT_MRT3847_38781C.1.pep
GAPLIQLSISGGVFLFLKKKRGIDQSWLRGGTYLGEAPPRRALGVLNHGERRTFWGRSQERLSSTGGAGKIF

SEQ ID NO: 217891 - protein, 340 aa, Glycine max
  Clone ID: PAT_MRT3847_38782C.1.pep
HASGNGRSVSRSPVRGRNGRNVNRTPVRGGNGKSVSRSPVRTRSLKSVSRSPVRTRSLRSVSKSPVRARSQSHRSRSSPRAPSGKTISRSPVRVLRKSISRSPVRSPARSLSRSSGWVPSKKSISRSPVRAPSRSIRRSYSRSPSPVRRTRTPRGRSVSRSVSPDASPKRIRRGRGFSERYSYARRYRTPSRSPVFCCEKTTEGDRDRYSSYRRFSPRRFRSPPPRGRTPPRYRSRRSRTPSVSRSPRYRARRYSRSRSPVRSRSPVRSRSPVDRSRPTRVERRASSSRSRSPSKSRSRSRSRSSVESLPRASRDSRSRSSSRSPDGKKGLVSYGDGSPY

SEQ ID NO: 217892 - protein, 88 aa, Glycine max
  unsure (1)..(88): unsure at all Xaa locations
  Clone ID: PAT_MRT3847_38783C.1.pep
RQSSTHIHNEGFPIHQTWWKAIKSHELGGPQVLKWEDVXEMGDPKESEVRCEEQXALGVNFIDVYFRKXVYKAASFRFTPGMEAVGGV

SEQ ID NO: 217893 - protein, 86 aa, Glycine max
  unsure (1)..(86): unsure at all Xaa locations
  Clone ID: PAT_MRT3847_38784C.1.pep
FLTSLYYTASPSALENSVLKHGLRLLSLAKPALQANGKGFSEFSGLRSSSGFLPFSRKSSXXFHSVXAFQTXQLXSXGXXXGGKPM

SEQ ID NO: 217894 - protein, 843 aa, Glycine max
  unsure (1)..(843): unsure at all Xaa locations
  Clone ID: PAT_MRT3847_38785C.1.pep
MTKKKNPLVFMDVSIDGDPVERMVFELFYDVAPKTAENFRALCTGEKGISPNTGKSLHYKGSFFHQIIKGSIVQGGDFVNRNGTAGESIYGSKFPDESPKLKHDATGLLSMAIADRDTLGSHFIITLKADHHLDRKHVVFGKLVQGHNVLKKIEEFGDEEGHPTVTVKIINCGEYSEDGKKVNKSKMGKNKKSSKDRRKRRKYYSSESGSSSDSDTESLETDSDSESDMSSSSYMSSSSDDRRRKRKRSKKDKYRREKRRDKRRDKRRRKKDKRSKRKSKRESGSDSDSESNSDNSSEGENIGAQHKGLKRKDNSQKNAETKSPLVAEKDLPPAHHEKEEMGMLENEEKFSKENGERRSNGIGGADYGSDRSEERQPDVMDDHSGKTRSRSVSPKRPISKSMSISPRRSARLSKSPSVTPKRRLSKSPSVTPKRRLSKSPSVRSPPPSQRSLSRSPARSISRSPSRSISRSPVRGRNGRSVSRSPVRGRNGRSVSRSPVRVRNGRSVSRSSVRVRNGRSVSRSPVRVRNGRSVSRSPVRGRNWRSVSRSPVRGRNGRSVSRSPARTRSLRSVSKSPVRSHSRSIRSRSSSRVRSGKIISKSPAPARSLSRSSGWVPSKKSIIRSPVRAPSXSIRRSSSRSPSPVRRTRTPRGQKCVKVRITXLPRGRSVSRKGFPYTSPKRIKRGRGFSERYSYARRYRTPSRSPVRSFRYNGRNDRDRYSTYRRFSPRRFRSPPPRGRTPPRYRSRRSRTPSVSRSPRYRARRYSRSRSPVRSRSLVDRSRPSRVERHASSSRSRSPSKSRSRSRSSVESPPRASRDSRSRSSSRSPDGKQGLVSYGDGSPY

SEQ ID NO: 217895 - protein, 52 aa, Glycine max
  Clone ID: PAT_MRT3847_38786C.1.pep
SQSSVLIVIGFHARSDHREFHTPPFYTSLTPGSSNPLFSRSPYIYIFSLTCW

SEQ ID NO: 217896 - protein, 86 aa, Glycine max
  Clone ID: PAT_MRT3847_38787C.1.pep
TCSDSTLSTKVPLALVMFLLALVFGFALVHAPSPLLLPTRSLLPEHHFVVELRPRMLSGFSLLFFFLHSSLAWIIWWKPCRSNLWP

SEQ ID NO: 217897 - protein, 128 aa, Glycine max
  Clone ID: PAT_MRT3847_38788C.1.pep
SVSMASPAWLPQESQPPVSGETPLPMASSAHTTSSTGPQPASPFAHGMLQNVNASGSSQLLSTHPAIISNSAVNPMVVQPPGVSSHAAPSFSYNIPQSGAIFSSNQQHAQSSTLLHGCQLPCLFLCIQ

SEQ ID NO: 217898 - protein, 113 aa, Glycine max
  Clone ID: PAT_MRT3847_38789C.1.pep
VARIGRAHGSPSASPNKQHMHSSGLLEQTSRTLLAIKNTTTPSALHCYTLFRALDGPTDGLYDRFYKLTALQHILRFIWFFTPVDETPWFLASPGSPPPSRNSGSIRTWHEMT

SEQ ID NO: 217899 - protein, 198 aa, Glycine max
  unsure (1)..(198): unsure at all Xaa locations
  Clone ID: PAT_MRT3847_3878C.1.pep
MHLPWLVKYQLASTIFIIITLTKVTCFYFNFPTFQKDNESELLLSKNSQIYFDAIQVTPDIRGPIQDYSGRAFYKKPYKLWNKKKNQIASFNTTFVLNIKPETTPGGEGLAFILTSDTTLPQNSSGEXLGIVNATSNGTSQAGILAVEFDTRKSFSQDGPDNHVGVNINSINSIQQVPLINTGVNVSSXINVTFKIQY

SEQ ID NO: 217900 - protein, 54 aa, Glycine max
  Clone ID: PAT_MRT3847_38790C.1.pep
VCTIIVSHHFKQREAFEHRNTLVLFYPKPLCLSLSLFQVHYKMYISCRAPNGSL

SEQ ID NO: 217901 - protein, 187 aa, Glycine max
  Clone ID: PAT_MRT3847_38791C.1.pep
HSSLCSQLHTLTLVRYHSLSLSALFISFLNCFISNFASLCLSPYKLRFAFAKILVRCRVSAIADCSDRRSVSMASPAWLPQESQPPLSGETPLPMAYSAHTTPSTAHAKLFNATAFVAPAPAPPFAYGMLQNVNASGSSQQSSTHPGMKSNSAVNPMVVQPPGVSLHAAPSFSYNIPQSGAIFSSNP

SEQ ID NO: 217902 - protein, 65 aa, Glycine max
  unsure (1)..(65): unsure at all Xaa locations
  Clone ID: PAT_MRT3847_38792C.1.pep
ARFPLLVLGLVFLASVSVSCGIAYWEKEXPKHNKCLQICNSERYSYRNXACHARCNLVKVCEEVC

SEQ ID NO: 217903 - protein, 39 aa, Glycine max
  Clone ID: PAT_MRT3847_38793C.1.pep
ICIIMIVSIYGTKTKTSRALFIDIDIQPMSKRGSKILKI

SEQ ID NO: 217904 - protein, 108 aa, Glycine max
  Clone ID: PAT_MRT3847_38794C.1.pep
RLHVIGLVGISLIFFYSHKSNAYVRINVGLALFVVSLLIIPLLDAFYLKGRVGLYSGFYVTAAAVGLSAVADALVQGSIVGCAGELPERYMQAVVAGTAGSGIYLVNY

SEQ ID NO: 217905 - protein, 80 aa, Glycine max
  unsure (1)..(80): unsure at all Xaa locations
  Clone ID: PAT_MRT3847_38795C.1.pep
NARIKKKRQREKKFIRQGYNNVGINGEKWSDLLEGHKGKSRTFKLPKPXNTLSSSLTSQQLSXAPIYLYVIRCVQIGAQA

SEQ ID NO: 217906 - protein, 41 aa, Glycine max
  Clone ID: PAT_MRT3847_38796C.1.pep
AVLVSQIGSVCHKEVIVLIPSDETRLFLLWHTTFKPLLFSI

SEQ ID NO: 217907 - protein, 71 aa, Glycine max
  Clone ID: PAT_MRT3847_38798C.1.pep
MVNEYKEIVLIKGLEDMKDYAFRTIKSLLRKELNLTKKMQDDYDRIQLADLLEDKFPQDAGLKQMIEVCES

SEQ ID NO: 217908 - protein, 102 aa, Glycine max
  unsure (1)..(102): unsure at all Xaa locations
  Clone ID: PAT_MRT3847_38799C.1.pep
YIRVCLILAVLGCSDSFLSQQXVSVLELISQLVHRRSDWRALHQYADNHLAYQRLAIDDPAYGDQLLYNEDNTCVATVHGEIHTYEELRXTVXNHTFRTGSD

SEQ ID NO: 217909 - protein, 56 aa, Glycine max
  Clone ID: PAT_MRT3847_3879C.1.pep
MSASVNLSGDNRFTETTHFNCTDLDIVAVYYTIATQFRKLVPHSHKWHLYTLLIYI

SEQ ID NO: 217910 - protein, 218 aa, Glycine max
  Clone ID: PAT_MRT3847_387C.1.pep
MERFHEEEIEEPVSPTGQYLTSSSLSVYILGVLESEVPIDDSQTVPLLQNLFLPINSRFSSIMIRDKNGEKKWKKVEVKLEDHIKVPTFPNGKSSNLFLYDEYLDEYMSTIAVEHLPQNRPLWELHIIKYPTSNAKGTLVFKLHHALGDGFSLMGALLSCMQRADNTSLPFTLPSSQRPKASSISNTKGFFKKLPSIFFQTISEFGWSFLKSKLIEDD

SEQ ID NO: 217911 - protein, 52 aa, Glycine max
  Clone ID: PAT_MRT3847_38800C.1.pep
ICHHLNPNLFSVRSSNSIWVIESYPIYIEIRDTRQTRLSSESPALKECPSCN

SEQ ID NO: 217912 - protein, 50 aa, Glycine max
  Clone ID: PAT_MRT3847_38801C.1.pep
KCMVSSSGVNSICILGSCDRSTLIRTHVSTQFQTFYYYSNKLSLKKSIIL

SEQ ID NO: 217913 - protein, 59 aa, Glycine max
  Clone ID: PAT_MRT3847_38802C.1.pep
CNFNHLFSLTYSMHSPLRLLILFLIKSCCDTAQLGHHPAIFASTDISFHSTFGTLKKFV

SEQ ID NO: 217914 - protein, 161 aa, Glycine max
  unsure (1)..(161): unsure at all Xaa locations
  Clone ID: PAT_MRT3847_38803C.1.pep
RPLSRPFSPFIHGSSFVPTLSVATLIIFASLFLPHPTYRNQRGVVFCIIHIYLRFRFPCSTITCVCCALFFVHLYTFPWRITTAXIGFFCTPFGTGLMVGVLRFTSMVNKLKLGGLPHVGTTVAPSGSPRGHMYWPRVLLPLGLVRYAPVVVPCWRLGMAT

SEQ ID NO: 217915 - protein, 70 aa, Glycine max
  Clone ID: PAT_MRT3847_38804C.1.pep
GPTNQYLPKIVSVFAEVLCAGKDLATEQTAGRMVNLLRQLQQTLPPSTLASTWSSLQPQQQLALQSILSS

SEQ ID NO: 217916 - protein, 698 aa, Glycine max
  Clone ID: PAT_MRT3847_38805C.1.pep
PRVRVLTSFPDQHPRVRWAAINAIGQLSTDLGPDLQVKYHQGVLPALAGAMDDFQNPRVQAHAASAVLNFSENCTPDILTPYLDGIVSKLLVLLQNGKQMVQEGALTALASVADSSQEHFQKYYDAVMPYLKAILVNATDKSNRMLRAKSMECISLVGMAVGKEKFRADAKQVMEVLMSLQVSQMETDDPTTSYMLQAWARLCKCLGQDFLPYMEFVMPPLLQSAALKPDVTITSADSDNDIEDSDDESMETITLGDKRIGIKTSVLEEKATACNMLCCYADELKEGFFPWIDQVAGTLVPLLKFYFHEEGRKAAVSAMPELLRSAKLAIEKGQSQGRDVTYLKFLTDSIIPALVEALHKEPDTEICASMLDSLNECLQISGMLLDESQVRSIVDEIKQVITASSSRKRERAERTQAEDFDAEEGDLIKEENEQEEEVFDQVGEILGTLIKTFKANFLPFFDELSSYLTPMWGRDKTPEERRIAICIFDDVAEQCREAAIKYYDTYLPFLLEACNDETPDVRQAAVYGLGVCAEFGGSVFKPLVGEALLRLNAVIQHPNALHSDNVMAYDNAVSALGKICQFHRDSIDSAQVVPAWLNCLPIKGDLIEAKVVHDQLCSMAERSDSELLGPNNQYLPKIVSVFAEVLCAGKDLATEQTAGRMVNLLRQLQQTLPPSTLASTWSSLQPQQQLALQSILST

SEQ ID NO: 217917 - protein, 86 aa, Glycine max
  Clone ID: PAT_MRT3847_38806C.1.pep
ITHVQAPVTDHSCVHVFVKARRISPHHHQKPSKAMPHLQSIPSSHMHDKVTNNSKVICNKHDFRISLNFTLRITNVKATKYGHTIE

SEQ ID NO: 217918 - protein, 278 aa, Glycine max
  unsure (1)..(278): unsure at all Xaa locations
  Clone ID: PAT_MRT3847_38807C.1.pep
MLPRALLAKFVLKPSTVVSPFQFNQQRALHSRNKKALEFIAKGWNALKEVDRVIDYSDPKHSGIVSLLRTAKENFELALEADNTNTHARYWLSRLHMKYPVPGANKAVGAALLVEAAEMGDPEAQYALGCHLRVENDXYSNPYIMXHHFGENCGPVQHPSAQEHLDAVYLTGDCVKKDIASALWCFHRASEKGHAGAAIAYGSLLLKGVEVPESVIKFSLTRGAAAHRRGRNKGALAIDPVEMAREKFQIAAKAGCELGFKWLARLEEEEKRALTEEH

SEQ ID NO: 217919 - protein, 238 aa, Glycine max
  Clone ID: PAT_MRT3847_38808C.1.pep
MSPKYQILHNRPINQWKVTELKDELKRRKISTKGLKDDLVKRLDEVLRLEREVDEASEKDEANGFDGHADGKKVPEAVTVDAEMVDSTDRASAKTFDTAEKGKGGFVDPIETGNVEKIQEIVDHDSDKNDKQDSVSNQVNINNSVSAMDQEVEPKGLPAGGDYANVGHEAIAHASTVETIITVTESVVTEVVASGEDTYRAEKNNEDSAAQLENEVSKAQLDGEDSKPQLDYDTKPLH

SEQ ID NO: 217920 - protein, 101 aa, Glycine max
  Clone ID: PAT_MRT3847_38809C.1.pep
PYGSWLLEPTKGPVSSNLRKGAEHLSATHWETQHMLWQVRSLRNETLDGICFFKDRASLNALHGCGMKKIDLYVAGDDPSEFGSSNLKRKVTHCSKARAKI

SEQ ID NO: 217921 - protein, 98 aa, Glycine max
  unsure (1)..(98): unsure at all Xaa locations
  Clone ID: PAT_MRT3847_3880C.1.pep
XXPXXXXXPXXPXXXXXXXXXXXXXXXPXXXXPPPPXXSPTHXXPXPXXXXPVLXTXQPLXXHTXAXRXXTLHNTXLXLXXPFNPRAQXRAHVRAXAT

SEQ ID NO: 217922 - protein, 136 aa, Glycine max
  Clone ID: PAT_MRT3847_38810C.1.pep
MKGSSKRKTEKEKIEDEVEEMLRAAQDQILLNLTQAHIAARPSPDHDHDLDLDLDLERRFQALKMKTKSQPQDDLSARFDALKAKSSSSVVTASNSNAQFDYAEEDPEAQVQKLIQWAKDAARLDPSPPSDHDQDI

SEQ ID NO: 217923 - protein, 108 aa, Glycine max
  Clone ID: PAT_MRT3847_38811C.1.pep
NAPGPHLTIGTLGITRVITPGMRLRRRSCAGETLDFNDARGVGMNQLTMLPHISMQQLTDSQQADACRDQALTLRRQNGHRLITRQRADNDVSTYKRRITMIHDVLDR

SEQ ID NO: 217924 - protein, 75 aa, Glycine max
  Clone ID: PAT_MRT3847_38812C.1.pep
TRNHWVSEAHRNYWHVLLDASALVLGKDRLHLGLHRPDFLVCCLHSTHSNPSRITCLLVRTKSFGTSTASSQVNG

SEQ ID NO: 217925 - protein, 97 aa, Glycine max
  unsure (1)..(97): unsure at all Xaa locations
  Clone ID: PAT_MRT3847_38813C.1.pep
RAVVGLACGSLSGIASSXTTFPLDLVRRRMQLEGVGGRARVYNTGLFGAFGRMKTTEGVRGLYRGILPEYYKVVPGVGIVFMTYETLKMLLSSISSY

SEQ ID NO: 217926 - protein, 242 aa, Glycine max
  unsure (1)..(242): unsure at all Xaa locations
  Clone ID: PAT_MRT3847_38814C.1.pep
MKEETMRISTLEIVILLFFSFALFCDGNESTMRVLLEVKSSFTQDPENVLSDWSENNTDYCSWRGVSCGSKSKPLDRDDSVVGLNLSESSLSGSISTSLGRLQNLIHLDLSSNRLSGPIPPTLSNLTSLESLLLHSNQLTGQIPTELHSLTSLRVLRIGDNELTGPIPASFGFMFRLEYVGLASCRLTGPIPAELGRLSLLQYLILQENELTGPIPXEFGYCWSLKYSPAXNRLNDSIPSKL

SEQ ID NO: 217927 - protein, 189 aa, Glycine max
  Clone ID: PAT_MRT3847_38815C.1.pep
MKVLINNPKPFLSSPNSIFPNNNPRFHLRPFPKRQWIGPRLCLARAALDWATIEQFGLPEFDVRNPALSSSYRRSELPRPNQTVLEAQARVCTGPTQTRPLDEQQAFKVFDLILRSARGGMKDEDEVSKAQLGAFFAGMTIRANAFPEATQWSEGETRAMKTFWPLLVRVLPPEVIFIADPGGLMMGGG

SEQ ID NO: 217928 - protein, 259 aa, Glycine max
  unsure (1)..(259): unsure at all Xaa locations
  Clone ID: PAT_MRT3847_38816C.1.pep
MAAATSGAVLNGLGSSFLSGGNRSQTLLASAIGGKVGAAVTVNPRRLIVVAAAAPKKSWLPGVRGGGNLVDPEWLDGSLPGDYGFDPLGLGKDPAFLKWYREAELIHGRWAMAAVLGIFVGQAWSGVPWFEAGADPNAIAPFSFGTLLGTQLILMGWVESKRWVDFFNPDSQSVEWATPWSRTAENFANATGEQGYPGGKFFDPLSFAGTIKDGVYIPDTEKLERLKLAEIKHARIAMLAMLIFYFEAGQGKTXLGALG

SEQ ID NO: 217929 - protein, 89 aa, Glycine max
  unsure (1)..(89): unsure at all Xaa locations
  Clone ID: PAT_MRT3847_38817C.1.pep
LWEVEGKWVVKGAVDXXIGANPSAEGGGEDEGVGDAVVXVVDIVDTFRLXEQPAFXKNHFVTFMTRSIXNLTPYLLAYXHEFVYYSHSR

SEQ ID NO: 217930 - protein, 261 aa, Glycine max
  Clone ID: PAT_MRT3847_38818C.1.pep
MAAATSGAVLNGLGSSFLSGGNRSQTLLATAIGGKVGAAAVTVSPRRLIVVAAAAPKKSWLPGVRGGGNLVDPEWLDGSLPGDYGFDPLGLGKDPAFLKWYREAELIHGRWAMAAVLGIFVGQAWSGVPWFEAGADPNAIAPFSFGTLLGTQLILMGWVESKRWVDFFNPDSQSVEWATPWSRTSENFANATGEQGYPGGKFFDPLSLAGTIKDGVYIPDTEKLERLKLAEIKHARIAMLAMLIFYFEAGQGKTPLGALGL

SEQ ID NO: 217931 - protein, 79 aa, Glycine max
  Clone ID: PAT_MRT3847_38819C.1.pep
ALSDSPPIFFTPFPALGFFPGWLFLVPILFDSVVRSISFKIHSGPFSEARPRCHLLNGSRIMLSITYLAECYSLFGPPN

SEQ ID NO: 217932 - protein, 66 aa, Glycine max
  Clone ID: PAT_MRT3847_3881C.1.pep
VVSRIRGFTTRGPSLSSPPCTSEGLYSVGATVLSVLLGVSLEIRIDSSFSLLSHLYRTPCRVVVFP

SEQ ID NO: 217933 - protein, 171 aa, Glycine max
  unsure (1)..(171): unsure at all Xaa locations
  Clone ID: PAT_MRT3847_38820C.1.pep
MSAKFLTVPPFECAWREDLKFREAGRGCVAFEAFACNDVTLVFRENVGSQGYHYKRDSSPHYTIILGSHRNRRLRIEVNGKAVVDVAGVGLCCSSSFQSYWISIYDGLISIGNGKYPFQDVVFQWVDSYPNWNGQYIGLSSWDKHVKYRNVXVLSLTHTHVPLSKHVGFGD

SEQ ID NO: 217934 - protein, 111 aa, Glycine max
  unsure (1)..(111): unsure at all Xaa locations
  Clone ID: PAT_MRT3847_38821C.1.pep
KRLYKTHGLTQGADRYANWATAADTGTVDGILYAVLYAGKRARRNAMVTRELTAGPNAHXSVYLIEGVQRATKGAHLCAQMGAAKAYSRACAEADDNEGYMKGRQEHERDQ

SEQ ID NO: 217935 - protein, 219 aa, Glycine max
  unsure (1)..(219): unsure at all Xaa locations
  Clone ID: PAT_MRT3847_38822C.1.pep
MNMNIFKKKTSPKEALRSSKREMAVATRGIEREIASLQMEEKKLVAEIKREAKTGNEAATRILARQLVRLRQQITNLQGSRAQGGVATHTQALYASTSISTGMKGAAKAMVAMNKQMAPAKQVKVIKEFQKQSAQLDMTIKMMSESIDEXTLDKDEAEEETEELTNQVLDEIGVDIASQLSSAPKGRIASINTENVAPRPAESQDVEDLEKRLASLRRI

SEQ ID NO: 217936 - protein, 60 aa, Glycine max
  Clone ID: PAT_MRT3847_38823C.1.pep
FQKVPSRILKFVFRGTGFFNQIPSLSRYFTEPHLTFQVTYLGLPRLWFFPKKKKKRATLA

SEQ ID NO: 217937 - protein, 31 aa, Glycine max
  Clone ID: PAT_MRT3847_38824C.1.pep
MLTSTRFTIHVSAPILIVIIIVYEYNVIGLS

SEQ ID NO: 217938 - protein, 45 aa, Glycine max
  Clone ID: PAT_MRT3847_38825C.1.pep
SFGPWGKHFFFFSFGPLFESSLAFFSLNHCWTKLDHGGGWNINDV

SEQ ID NO: 217939 - protein, 222 aa, Glycine max
  unsure (1)..(222): unsure at all Xaa locations
  Clone ID: PAT_MRT3847_38826C.1.pep
MNMNIFKKKTSPKEALRSSKREMAVATRGIESLSASLWMVTSTVVPDLVIVAKTGNDAPTRILARQLVRLRQXRTNLQGSRAQGRGVATHTXQALYASTSISTGMKGATKAMVTMNKQMAPAKQVKVIKEFQKQSAQLDMTXLRLMSESADETLDKDEAEEETEELTNXEVLDEIGVDIASQLSSAPKGRIASRNTENVAPRPAESQDVEELEKRLASLRRI

SEQ ID NO: 217940 - protein, 43 aa, Glycine max
  Clone ID: PAT_MRT3847_38827C.1.pep
KKNILPYLALYFKIKILEIFSIFIKLVYYLKCVVTANIFIRYI

SEQ ID NO: 217941 - protein, 163 aa, Glycine max
  Clone ID: PAT_MRT3847_38828C.1.pep
MKNIPLILMGCGGVGRQLLQHIVSCRSLHSTQGLCLRVVGVGDSKSLVVTEDLLHEGLNDGFLLELCRVKSVGESLLKLLDFGKCQAFVHPESQGKILEIAFQLGKKTGLVFVDCSASSDTVAVLKQAIDMGWCAVMANKKPLTSTMEDFKKLFIYPRRIRHE

SEQ ID NO: 217942 - protein, 143 aa, Glycine max
  Clone ID: PAT_MRT3847_38829C.1.pep
STHNTTTINGTMIGNRHLQFQVRYQACDQIGTLIDIISGSGIWQSNVWSNVEPGIVPCSSSVCSKMSHKESGKQIDHHKKRSSTCSTSSAVRATMCSCQRSGHRLGRSVPRRWTLWWRPPRRSTPGPRPGPPCERAHERADAG

SEQ ID NO: 217943 - protein, 62 aa, Glycine max
  Clone ID: PAT_MRT3847_3882C.1.pep
VEGSSCLPLLSLVPMNLLPRMMTHDTLTLMLILVTRFKTPFPLLSRHLATKMMSVFRLALPM

SEQ ID NO: 217944 - protein, 70 aa, Glycine max
  Clone ID: PAT_MRT3847_38830C.1.pep
PHDKGVFSIIYWRTKMHFGDMGEVTKREDTIFHLHLPKDNCSLLRTTQGRQGPPVFYSTLRVIIFSRMTI

SEQ ID NO: 217945 - protein, 36 aa, Glycine max
  Clone ID: PAT_MRT3847_38831C.1.pep
GRLSLSPDTIQNPGTPAGTGPRFFLRKQESGGCRSR

SEQ ID NO: 217946 - protein, 211 aa, Glycine max
  unsure (1)..(211): unsure at all Xaa locations
  Clone ID: PAT_MRT3847_38832C.1.pep
MRARIPLLLLGVVFLASVSVSFGIEYWEKQNPSHNKCLRSCNSEKDFYMNQACHARCNLLKVEEDEECEYGQIPRPRPQHPERERQQHCEKEEDEGEQTRPLSFPRPRQPHQEEEHEQKEEHECYRKEENHXGQVSEEEHDEREHPRPHQPHLKEEEXHEWXHTQEKHHGKDSDEDEEDLDDDEEHDIESQDSDGSESHRVPRRHMNEXLF

SEQ ID NO: 217947 - protein, 211 aa, Glycine max
  unsure (1)..(211): unsure at all Xaa locations
  Clone ID: PAT_MRT3847_38833C.1.pep
MRARFPLLLLGVDFLASVTVSFGIAYWEKQNPSHNKCLPSCNSEKDSYRNQACHARCNLLKVEEEEECEEGQIPRPRPQHPERERQQHGEKEEDEGEQPRPFPFPRPRQPHQEEEHEQKEEHEWHRTEDKHGGQGSEEEQDEREHPRSHQPHQXEEDKHEWSHKQEXHQRXESEEEEEDXDEDEEXDIESLDSEGSESHREPRRHKISTLF

SEQ ID NO: 217948 - protein, 73 aa, Glycine max
  Clone ID: PAT_MRT3847_38834C.1.pep
PTIPLKAISAPCPQVVEDEFLPQHIHLKYFPPFFSFNTASYLNFFNPSFLLQYFLVLPKNLGMALVIKMALLA

SEQ ID NO: 217949 - protein, 46 aa, Glycine max
  Clone ID: PAT_MRT3847_38835C.1.pep
INYSRTTFALVMVYWVNFEPIQSNGLWEDHQKRKPLFTVITQSIQK

SEQ ID NO: 217950 - protein, 158 aa, Glycine max
  unsure (1)..(158): unsure at all Xaa locations
  Clone ID: PAT_MRT3847_38836C.1.pep
MMRARFPLLLLGVVFLASVSVSFGIAYWEKQNPSHNKCPRSCNSERDSYRNQACHARCNLLKVEEEEECEEGQISRPRPQHPERERXQHGEKEEDECEQPRPFPFPRSRQPHLEEEHEQKEEHEWHSMEVIHWWKGSEDEHDEREHSRAHQPYLNVEE

SEQ ID NO: 217951 - protein, 218 aa, Glycine max
  unsure (1)..(218): unsure at all Xaa locations
  Clone ID: PAT_MRT3847_38837C.1.pep
MRARVPLLLLGVGFLASVSVSFGIAYWEKQNPSHNKCLRSCNSEKDSYRNQACHARCNLLKVEEEEECEEGQIPRPRPQHPERERQQHGEKEEDEGEQPRTFPFPRPRQPHQEEEHEQKEEHEWHLKEDKHGGKGSEEEHDEREHPRSHQPHQKEEEKHEWQHMQDXHQGKDSDDDEEDQDDDEEHDQESQDSDGSESHXVPRRHKNKTPCHCDSRGF

SEQ ID NO: 217952 - protein, 150 aa, Glycine max
  unsure (1)..(150): unsure at all Xaa locations
  Clone ID: PAT_MRT3847_38838C.1.pep
MMRARLPLLLLGVVFLASVSVSFGIAYWEKQNPSHNKCLRSCDSEKDXYRNQACHPRCNLLKVEEEEECEXGQIPRPRPQHPERERQHHGEKEENQGEQPRPFPFPRPRQPYKEEEPDQKEEHECARMEENHGGKVSEEEQYEREHPRPH

SEQ ID NO: 217953 - protein, 255 aa, Glycine max
  unsure (1)..(255): unsure at all Xaa locations
  Clone ID: PAT_MRT3847_38839C.1.pep
RAAVPITVCWELVSLESIPVSLGMAFWEKKIPSNNKCLRSCNSEKDSYRNQACHARCNLLKVEEEEECEEGQIPRPRPQHPERERQQHGEKEEDEGEQPRAFPFPRPRQPHQEEEHEQKEEHEWHRKEEKHRGKGSEEEQDEREHPRXHQPHQKEEEKHEWQHKQEKHQGXESEEEEKDXDEDEEQDKESQKSDGSNLIENXRRLRNKNPXYFTLRGSTFFKTXYCHVRSLQVRQRFKNLEISKLRIIEFNSNPH

SEQ ID NO: 217954 - protein, 85 aa, Glycine max
  Clone ID: PAT_MRT3847_3883C.1.pep
YCVFVYIINNHVFCVSWRNSHLSAPPFVCCQCLKFRHSRCTALLSMIGSLLMIYVLGAYGQLVQSHNMVIRWVLSIRFCGITKSI

SEQ ID NO: 217955 - protein, 207 aa, Glycine max
  unsure (1)..(207): unsure at all Xaa locations
  Clone ID: PAT_MRT3847_38840C.1.pep
MMRARFPLLLLGVVFLASVSVSFGIAYWEKQNPSHNKCLRSCNSEKDSYRNQACHARCNLLKVEEEEECEEGQIPRPRPQHPERERQQHGEKEEDEGEQPRPFPFPRPRQPHQEEEHEQKEEHEWHRKEEKHGGKGSEEEQDEREHPRSHQPHQKEEEKHEWQHMQVKHQGKESXEDEEXDPXRGXEQDXESXESEGSXSQREPRXP

SEQ ID NO: 217956 - protein, 52 aa, Glycine max
  unsure (1)..(52): unsure at all Xaa locations
  Clone ID: PAT_MRT3847_38841C.1.pep
YXXXNSIASNXSQNRRHXLWLVXLLLRSXTLYLSYGLDXXTXLSXLHXXXXG

SEQ ID NO: 217957 - protein, 178 aa, Glycine max
  unsure (1)..(178): unsure at all Xaa locations
  Clone ID: PAT_MRT3847_38842C.1.pep
MMRARFPLLLLGVVFLASVSVSFGIAYWEKQNPSHNKCLRSCNSEKDSYRNQACHARCNLLKVEEEEECEEGQIPRPRPQHPERERQQHGENEEDEREQPRPFPFPRPRQPHQEEEHEQKDEHEWHRXEEKHGGXGIEEEQYERERARPHQPHQREEEKHXWQHXQDKHQGKESVDED

SEQ ID NO: 217958 - protein, 64 aa, Glycine max
  Clone ID: PAT_MRT3847_38843C.1.pep
FIEYSFEFAYQNSVSPYYLLFKLTFHFLTSFTVNCLIYNIILLIQLIILKIDFSYFCFYYLSLS

SEQ ID NO: 217959 - protein, 95 aa, Glycine max
  Clone ID: PAT_MRT3847_38844C.1.pep
GYLFLGSWGAFLCLRIGSCRVFSPVAALWRFHSLCYLRPVGCVQDCFSFFLGVYLLRQNFYGCFQSAPLKKKKGGRPQVSSLIRPVNSVRVGAGV

SEQ ID NO: 217960 - protein, 349 aa, Glycine max
  Clone ID: PAT_MRT3847_38845C.1.pep
ASTKCEASGFCYVNDIVLAILELLKQHERVLYVDIDIHHGDGVEEAFYTTDRVMTVSFHKFGDYFPGTGDVRDIGYGKGKYYSLNVPLDDGIDDESYHFLFKPIIGKVMEVFRPGAVVLQCGADSLSGDRLGCFNLSIRGHAECVKYMRSFNVPLLLLGGGGYTIRNVARCWCYETGVALGIEVDDKMPQHEYYEYFGPDYTLHVAPSNMENKNSRHLLEEIRSKLLENLSKLQHAPSVQFQERPPDSDLGEADEDHDDGDEPWDPDSDMDVDVERELVSSKVKKEIAEPQPNDLEDQRSGEHLRDSDTAVAETCMKALDISSQKADEDNVKVEQNTVNDLAKETDLKG

SEQ ID NO: 217961 - protein, 142 aa, Glycine max
  Clone ID: PAT_MRT3847_38846C.1.pep
GAQPTLFQKRAALRKNMNMSDNKKRKEKDEVVVEDVSFDGSGLNYDSDDLTESNYNDPKEKNGGGGVSSNANSTVTGLDQKGKKKGMPAKNLMAQPRPPKKLNDRLYMLRSVVPKISKMDRASILGDAIEYLKELLQRINDL

SEQ ID NO: 217962 - protein, 132 aa, Glycine max
  unsure (1)..(132): unsure at all Xaa locations
  Clone ID: PAT_MRT3847_38847C.1.pep
MESDAPTWGDKLMLRGLSFHGFHGAKPEERTLGQKFFIDIDAWMDLKAAGKSDHLSDSVSYTEIYDIAKDVLEGSPHNLLESVAXKIAITTLTNHKEISAVRVKVGKPHVAVRGPVDYLGVEILRRRSDLSG

SEQ ID NO: 217963 - protein, 64 aa, Glycine max
  Clone ID: PAT_MRT3847_38848C.1.pep
KSFTITAYTFYSTYLTFSKLCFECLAYVTVGTKTNCHMDYLPTSILTIGNRGAGRSPLDWDSRV

SEQ ID NO: 217964 - protein, 53 aa, Glycine max
  unsure (1)..(53): unsure at all Xaa locations
  Clone ID: PAT_MRT3847_38849C.1.pep
YSSQKECCGVIGRAIQSRASCTPYLVTHTKXRRVRSLLSLSAAHSLPIITPPP

SEQ ID NO: 217965 - protein, 152 aa, Glycine max
  Clone ID: PAT_MRT3847_3884C.1.pep
MSESEVACQRYRVGYALQGKKVESFIQPSLLDHAKQHSIDLVQIDPTAPLQQQGPFHCIIHKLHTQHWKNLLQQFSSKHPNTVIIDPPELVDRLHNRVSMLDAVTHLQFSLENATIGVPKQVVVNEPKSFDLHKFEEEQGLRFPVIAKPLAA

SEQ ID NO: 217966 - protein, 39 aa, Glycine max
  Clone ID: PAT_MRT3847_38850C.1.pep
KNGPRYPPFPFIVYTIDPLLYHEQLYIFPLGENVAPFSF

SEQ ID NO: 217967 - protein, 72 aa, Glycine max
  Clone ID: PAT_MRT3847_38851C.1.pep
PARRQHLPVVLGDGAQAPRRLPPPHDRHHLRRRRLHHEPRRHLRLRLRHDRGNDEHTHTQLALVLCMYVRLC

SEQ ID NO: 217968 - protein, 60 aa, Glycine max
  Clone ID: PAT_MRT3847_38852C.1.pep
GPRYVSYYYDHYTYYRSKPSTACAAPYMKSNININHNHRIQLNSELGNKIKGAKDRNLTL

SEQ ID NO: 217969 - protein, 60 aa, Glycine max
  unsure (1)..(60): unsure at all Xaa locations
  Clone ID: PAT_MRT3847_38853C.1.pep
EAPXAAQAIISHFFSIFFQNHPNLGFFKNHRPAKSPPPIHPNQSSILLKTSSLILILIFP

SEQ ID NO: 217970 - protein, 55 aa, Glycine max
  Clone ID: PAT_MRT3847_38854C.1.pep
VPVLDQIPELNPLLNFFFWPNLVQNLSFIQVVGVNLNLTRNFWNQLKFQASGTWL

SEQ ID NO: 217971 - protein, 87 aa, Glycine max
  Clone ID: PAT_MRT3847_38855C.1.pep
ITHCVTYSASNAFMCICWWGVIISHQPVDRNGRRSFSCKKTCYCLCNTPIQLPSSLKRIRQNSFHADNSAPAPTYSVPSSSSCCFLL

SEQ ID NO: 217972 - protein, 320 aa, Glycine max
  unsure (1)..(320): unsure at all Xaa locations
  Clone ID: PAT_MRT3847_38856C.1.pep
MGVPEKDPLSQLSLPPGFRFYPTDEELLVQYLCRKVAGHHFSLPIIAEIDLYKFDPWVLPSKAIFGEKEWYFFSPRDRKYPNGSRPNRVAXGSGYWKATGTDKIINQLRIMHXIETSPPSRKNTGTKLDDWVLCRIYKKNSSAQKTAQNGVVPSNEHTQYSNGSSSSSSSQLEDVLESLPSIDERCFAMPRVNTLQQQQHHEEKVNVQNLGAGGLMDWTNPSVLNSVADFVSGNNQVVQDQTQGMVNYNCNDLYVPTLCHLGTSVPLKMEEEVQSGVRNQRVGNNNSWFLQNDFTQGFQNSVDTSGFKYPVQPVGFGFRN

SEQ ID NO: 217973 - protein, 343 aa, Glycine max
  Clone ID: PAT_MRT3847_38857C.1.pep
MGVPEKDPLSQLSLPPGFRFYPTDEELLVQYLCRKVAGHHFSLPIIAEIDLYKFDPWVLPSKAIFGEKEWYFFSPRDRKYPNGSRPNRVAGSGYWKATGTDKIITTEGRKVGIKKALVFYVGKAPKGTKTNWIMHEYRLLDSSRKNTGTKLDDWVLCRIYKKNSSAQKTAQNGVVPSNEHTQYSNGSSSSSSSQLEDVLESLPSIDERCFAMPRVNTLQQQQHHEEKVNVQNLGAGGLMDWTNPSVLNSVADFASGNNQVVQDQTQGMVNYNCNDLYVPTLCHLDSSVPLKMEEEVQSGVRNQRVGNNNSWFLQNDFTQGFQNSVDTCGFKYPVQPVGFGFRN

SEQ ID NO: 217974 - protein, 103 aa, Glycine max
  unsure (1)..(103): unsure at all Xaa locations
  Clone ID: PAT_MRT3847_38858C.1.pep
YLHVKNRVFLITSLLQHLADSYRSLHGFILLQGVXEQTRYHTDHLHLFMQDSFFAYLFXVIYPGFYSSIDVSTLNSILFAPMLPSDYSSLIXDINPLSYFKEH

SEQ ID NO: 217975 - protein, 370 aa, Glycine max
  unsure (1)..(370): unsure at all Xaa locations
  Clone ID: PAT_MRT3847_38859C.1.pep
MGVPEKDPLSQLSLPPGFRFYPTDEELLVQYLCRKVAGHHFSLPIIAEIDLYKFDPWVLPSKAIFGEKEGDFFSELNKFDXLIFAGKAIFGEKEWYFFSPRDRKYPNGSRPNRVAGSGYWKATGTDKIITTEGRKVGIKKALVFYIGKAPKGTKTNWIMHEYRLLDSSRKNTGTKLDDWVLCRIYKKNSSAQKAVQNGVVPSNEHTQYSNGSSSSSSSQLDDVLESLPAIDERCFPMPRVNTLQQQQHEEKVNVQNLGEGGLLDWTNPSVLNSVVDFVSGNNNHNQLVQDQTQGMVNYNACNDLYVPTLCHVGTSVPQKMEEEVQSGVRNQRVQNNSWFLQNDFTQGFQNSVDTSGFKYPVQPVGFGFRN

SEQ ID NO: 217976 - protein, 115 aa, Glycine max
  Clone ID: PAT_MRT3847_3885C.1.pep
ESLKRTGFHCDIICDTGWTATPMQDVQVTIDRFIPSQECAPRTYCVLNPQNPFELNRWMGKLTLPQGTSRRVKRMPISIGGGAGAKNAIHMNMPNAVLSNEEDNSLENPALKLPR

SEQ ID NO: 217977 - protein, 230 aa, Glycine max
  unsure (1)..(230): unsure at all Xaa locations
  Clone ID: PAT_MRT3847_38860C.1.pep
MGVPEKDPLSQLSLPPGFRFYPTDEELLVQYLCRKVAGHHFSLPIIAEIDLYKFDPWVLPNLXINFAGKAIFGEKEWYFFSPRDRKYPNGSRPNRVAGSGYWKATGTDKIITTEGRKVGIKKALVFYVGKAPKGTKTNWIMHEYRLLDSSRKNTGTKLDDWVLCRIYKKNSSAQKTAHNGVVPSNEHTQYSNGSSSSSSSQLGDVLESLPSIDERCFAMPRVNTLQHSTT

SEQ ID NO: 217978 - protein, 106 aa, Glycine max
  Clone ID: PAT_MRT3847_38861C.1.pep
DFTNYYAWLLGGPQSDANLFPNVDSTWKTFNELQKLLSKTNGQVVGDLMTPTPLVVHESTSLEEAARLLLETKYRRLPVVDDDGKLVGLITRGNIVKAALLSKRAG

SEQ ID NO: 217979 - protein, 602 aa, Glycine max
  unsure (1)..(602): unsure at all Xaa locations
  Clone ID: PAT_MRT3847_38862C.1.pep
MLMIFSAFDNRLSGISDLINGDDSKSSDEEELDRFEAAEKVILADASHSGEPSRQSTSLFNPPNNPAEYFSAVDEIIHWMEQFSIAPPPSSAAGRTIQVIADRAENAIQLAMSRLEEELRHVLICNTIPLDAVSRYGSIRRVSLSFGSHDGAAAIDDSPLQSFGEVDSSRFHDRAASLGDDLFVDLVRPEAVQDLREIIDRMVRSGYERECLQVYSSVRRDALDECLIILGVERLSIEEVQKVEWRSLDEKMKNWVQAVKVVVGVLLSGEKRLCDGLFGDLDDLKEICFNETAKGCVMQLLNFGEAIAICKRSPEKLFRILDMYEALRDAMPDLQAMVSDEFVIGEANGVLSGLGEAAKGTFAEFENCIRNETSKKPVITGDVHPLPRYVMNYLKLLVDYGDPMDSLLELSEEDLYRFKNDLGGDGSQLEAMSPLGQRILLLMSELEYNLEEKSKLYEDSAMQQVFLMNNLYYLVRKVKDSDLGKVLGDNWIRKLRGQIPQYATGYLRASWSRALSFLKDEGIGGSSNNASKMALKERFKSFNACFEEIYRVQTAWKVXDDQLREELRISISXKVIPAYRSFVGRFKCQLKGKHVGKYIKYT

SEQ ID NO: 217980 - protein, 156 aa, Glycine max
  Clone ID: PAT_MRT3847_38863C.1.pep
MSSIHLLNTLAVPLRSFSPPSLFPQCHSPLRSSSAVPKRRRFSNSSGFRLASSQTVNSVPRANGTYTVSDFMTKKQDLHVVKTTTTVDEALEALVNNRISGLPVIDEDWNLVGVVSDYDLLAIDSISGGPQSDANLFPDVDSTWKTFNEVQKLLIR

SEQ ID NO: 217981 - protein, 58 aa, Glycine max
  Clone ID: PAT_MRT3847_38864C.1.pep
MAGFLPCWIPFVGVRRTLPKQTSSYFWCVAMWKSVKTWITNENPNMHLTNYTSMLEIN

SEQ ID NO: 217982 - protein, 222 aa, Glycine max
  Clone ID: PAT_MRT3847_38865C.1.pep
MTSIHLINTLAAPLRSFSPPSLFPQCHSPLRSSAAPKRRRFANSSGFRLASSQTVNSVPRGNGTYTVADFMTKKQDLHVVKTTTTVDEALEALVNYRISGLPVIDEVWNLVGVVSDYDLLAIDSISGGPQSDANLFPNVDSTWKTFNELQKLLSKTNGQVVGDLMTPTPLVVHESTSLEEAARLLLETKYRRLPVVDDDGKLVGLITRGNIVKAALLSKRAG

SEQ ID NO: 217983 - protein, 60 aa, Glycine max
  Clone ID: PAT_MRT3847_38866C.1.pep
KKKKKKKEKKKFKKKQRKQKKMKIQEKLNKDKKKKNKNKRGCRNKGPNFTYPIMQLFIYS

SEQ ID NO: 217984 - protein, 48 aa, Glycine max
  Clone ID: PAT_MRT3847_38867C.1.pep
SSIVRVLSYPFCDGLLIVKYQTHTLCDDRRPLIIANDVQVSSTPMQHK

SEQ ID NO: 217985 - protein, 192 aa, Glycine max
  Clone ID: PAT_MRT3847_38868C.1.pep
MGLSSTTLLPIVVLLSLLCTACARNSAENNFVHCLVNHSEPSHPISAAIFTQKSSSFSSVLQAYIRNLRFNTSTTHKPFLIVTPFQVSHVQAAIVCAKKHSLLMKIRSGGHDYEGVSYVASQPFFILDMFNLRSIEIDMDTETAWVQAGATLGEVYYRIAEKSKTHGFPAGVCPTVGVGGHISGGGYGNLMR

SEQ ID NO: 217986 - protein, 42 aa, Glycine max
  Clone ID: PAT_MRT3847_38869C.1.pep
MAAECNHHHHHHHHQYHDHHHYHHDHHHHHDREGQTNSWLGN

SEQ ID NO: 217987 - protein, 63 aa, Glycine max
  Clone ID: PAT_MRT3847_3886C.1.pep
SSRYRLEHTKRYHSIMQRLLILSGPKQNAFPSGEMQNGVSNGRRFYQVYTTRSTPFPALSERV

SEQ ID NO: 217988 - protein, 123 aa, Glycine max
  unsure (1)..(123): unsure at all Xaa locations
  Clone ID: PAT_MRT3847_38870C.1.pep
SVEHKVAEISRTGYDKLIVISDFDYTLSRYHRNGEHCKTTHGIFSGVCVNEKNLEFYEKAHALETKYKPIEFCPTMPMCDKNSFMELRWKESHLLIVHQRFYMXTIGNFGSNSRIIFRPLIES

SEQ ID NO: 217989 - protein, 66 aa, Glycine max
  Clone ID: PAT_MRT3847_38871C.1.pep
NSSHIQINCEASLKCLHSKGFPCYFQINDKSIERFTQLNNDPVSHPAQDLTDPNFHLSNQYQKPYN

SEQ ID NO: 217990 - protein, 87 aa, Glycine max
  Clone ID: PAT_MRT3847_38872C.1.pep
GLLVNNGPLHLVDDTFPFLIVRYSAIGASHAEFSSDAKTHQKAVLYRSFHGASAIRYPPYSDLKLRLINTLVGGRILAINRAHFAWS

SEQ ID NO: 217991 - protein, 118 aa, Glycine max
  unsure (1)..(118): unsure at all Xaa locations
  Clone ID: PAT_MRT3847_38873C.1.pep
TEVGAYILESTADTRAYVTQWALTRTCIAQSLLCHWGLMSPCHAIGDTYGTAKIPXDEEILHIAKENCDFLPGMITINLNLTRGVHRFLKTAAYGHYVKDDPDYTWEGVRPLTSDKPQ

SEQ ID NO: 217992 - protein, 113 aa, Glycine max
  unsure (1)..(113): unsure at all Xaa locations
  Clone ID: PAT_MRT3847_38874C.1.pep
MKMKVLVFFVATILVAWQCHAYDMFPLRMXNTGNGALIPEVNSPIWRLAVKAHTIFGFETILKNSFKXTNGYIQCEQYILNSKTLYQQAYIYARDIQIYLTETYVFTIDGTVF

SEQ ID NO: 217993 - protein, 51 aa, Glycine max
  Clone ID: PAT_MRT3847_38875C.1.pep
MDPQPEPVSYICGDCGMENTLKPGDVIQCRECGYRILYKKRTRRIVQYEAR

SEQ ID NO: 217994 - protein, 154 aa, Glycine max
  unsure (1)..(154): unsure at all Xaa locations
  Clone ID: PAT_MRT3847_38876C.1.pep
MVKDKKYYDILEVNTSATDHDLKKAYRKLALKYHPDKNPNEGERFKLISQAYEVLSNPEKRKVYDEYGEEGLKGGGEGGGMHNPMDIFEMFFGGGGFRGGGEKPTKVRDTVHQLTVSLDKLYNGCTKHLRITRHILCPKCNGVXGAKEGVKQCE

SEQ ID NO: 217995 - protein, 151 aa, Glycine max
  unsure (1)..(151): unsure at all Xaa locations
  Clone ID: PAT_MRT3847_38877C.1.pep
MGEVTFKDDISFTVVPATVYKAVGPDACDGIPKAQHSFWSGVHAEGSGRPRTIRIITFGVDRKANLVLLKKNSIADANLGYIYRVGVSAALPDTVDKITSNSPLIATTNGGGAGRILSNTKHNXDAEHHPDDLSTGKAKADAFFEDIEADL

SEQ ID NO: 217996 - protein, 58 aa, Glycine max
  unsure (1)..(58): unsure at all Xaa locations
  Clone ID: PAT_MRT3847_38878C.1.pep
SSFYLAVLFGVXNEILSSNATNPMLTRLLXENRKSLKYLVDECPLAYENYYVVFYSLK

SEQ ID NO: 217997 - protein, 40 aa, Glycine max
  Clone ID: PAT_MRT3847_38879C.1.pep
FFFFFFFFFFFFFFFFFFFFFFDQNIKKSMKSSKFKSHFL

SEQ ID NO: 217998 - protein, 414 aa, Glycine max
  Clone ID: PAT_MRT3847_3887C.1.pep
MTEVLHSSSPPHFVASSSPPTKTRTTTTTTTTSSFSSHNNAFLLRPLLALLLTLLRKSFQLSRKNIGSIMDIGSPTNVRHVAHVTFDRFNGFLGLPVEFEPEVPRRPPSASASVFGVSTESMQLSYDSRGNSVPTILLLMQRHLYVQGGLQVEGIFRINADNGQEEHVRDQLNLGVVPEGIDVHCLAGLIKAWFRELPTGILDSLSPEQVMQCQTEDECSELVRHLPHTEASLLDWAINLMADVVLHEHVNKMNARNIAMVFAPNMTQMADPISALMYAVQVMNFLKTLILRTVRERKDSVVESCPRFYLQPSVDNENRRILESFRQDTPAENEEAQENFVLEKTALDRSPESLQNNSTGGEPGSLTNSSENLVCNEDLYCEFPPVGNMGKSKTGQSSKSNARKESKKTRGSNL

SEQ ID NO: 217999 - protein, 75 aa, Glycine max
  Clone ID: PAT_MRT3847_38880C.1.pep
NGGGTGLIPFYPQNKKGKFGKKKNPLYGPPPTPRGIKGGFWGPALTLGGWKKKIIKSSLPGGFKFIFRGEKIQAP

SEQ ID NO: 218000 - protein, 63 aa, Glycine max
  Clone ID: PAT_MRT3847_38881C.1.pep
RKLEELEPHEKGSGDGTASDGMDEGEDNNKRYRNDTIIGPHKAVHEGRYKQMKLRYKKKYTER

SEQ ID NO: 218001 - protein, 59 aa, Glycine max
  Clone ID: PAT_MRT3847_38882C.1.pep
ADNISLHFSCNKNAFGAKTRTFLLLKMKDRARYAIWGAGLNTPVTNYISNGETVQGGNK

SEQ ID NO: 218002 - protein, 262 aa, Glycine max
  Clone ID: PAT_MRT3847_38883C.1.pep
MGVWKARLLSTNLLLLHPNAKHVCWRSTTTTTTKSVSWSVICCVMLFGLGLISLLTGHVASHLEWYSHRLRHRALYYSTPDGSDHAPIDIWESQYSKYYYGCKERGRHFRPAVRERKSKGYLLIATSGGLNQQRNGITDAVVVARILNATLVVPELDHQSFWKDDSDFANIFDMNWFITYLAKDITIVKRVPDKVMRSMEKPPYTMRVPRKSEPEYYLDQVLPILSRRRVLQLTKFDYRLANNLDDELQKLRGVLISCLRLL

SEQ ID NO: 218003 - protein, 327 aa, Glycine max
  unsure (1)..(327): unsure at all Xaa locations
  Clone ID: PAT_MRT3847_38884C.1.pep
MEVVQEQQLQNTDGRKLHNSDRNSNVTQQLQHPRFRKYKWWLRVSLYIIFLLVGQSAATLLGRLYYDNGGNSKWMATFVQSAGFPVLLPLLFYFPRQTHAKFNNNPSNNDYSYKTKPKFSTLVFLYLAFGLILTGDNLMYSYGLLYLPLSTYSLLCATQLVFNAVFSFFLNSQKFTAFIINSVVLLTISASLLAINSDSDEDSTGLSREKHVIGFFCTIGASATFSLYLSLVQLSFQKVIKRETFSAVLDMQFYPSFIATCACVVGLFASGEWKSLNNEMKGYDKGSVPVVMTVLXIAVTWYICSLGMLGGTLEESALLSDVRSTWG

SEQ ID NO: 218004 - protein, 183 aa, Glycine max
  Clone ID: PAT_MRT3847_38885C.1.pep
MAEAIMGFTPFKSHTLSSCLQTNKFQVNQSSILPKQHSNSSLINRPWQVLEGKSKKRGSLCKVNGLPDWPLMAIIVEQMEGQRDLITEKTVSHLSDQAIKNVYSWYIMFTVWGCLFFGAMKDPYYDSETYRGDGGDGTGNWIYEKQDAMEAEAREALWREELIEEIEQKVEGLRELEEAGKKN

SEQ ID NO: 218005 - protein, 49 aa, Glycine max
  Clone ID: PAT_MRT3847_38886C.1.pep
FLDVSVGSHQAVQISYCRGISALSIYAIRIIHVLFLKKKKKGGALSEHS

SEQ ID NO: 218006 - protein, 42 aa, Glycine max
  Clone ID: PAT_MRT3847_38887C.1.pep
VRLLGPACFLGDTYVHMSFASGTTRDTMALNLVTDNVLGSTE

SEQ ID NO: 218007 - protein, 146 aa, Glycine max
  unsure (1)..(146): unsure at all Xaa locations
  Clone ID: PAT_MRT3847_38888C.1.pep
MAESILGFTLFKSHTLSSCLQTKKFQVNHSSRLPKQHSKSTLFNRPWQVLEGKSEKRGSLCKVNGLPDWPLMAIIVEQMEGQRDLITEKTVSHLSDRAIKNVYSWYIMFTVWGCLFFGAMKDPYYDSETYMGDGXDGTGNWIYEKQ

SEQ ID NO: 218008 - protein, 48 aa, Glycine max
  Clone ID: PAT_MRT3847_38889C.1.pep
EDIGLHPSAVVESRDLWEHNPLERPFRGKLTDPVEPHSCKMYVLKPIA

SEQ ID NO: 218009 - protein, 404 aa, Glycine max
  Clone ID: PAT_MRT3847_3888C.1.pep
MGGEEVARVKAELFDDNESDRNDDDVLSESKDSGVTTAHAVKEEMDDGAANWSSSSSTSPKPMEGLHEVGPPPFLKKTFEMVEDPHTNPIVSWSQTRHSFVVWDSHEFSKTLLPKYFKHSNFSSFVRQLNTYGFRKVDSDRWEFANEGFQGGKKHLLKNIRRRSKCNKLHQGAFNMMKPDVDSEVEKLKKDQNILKVEILKLRQQQENSHVQLTNVQERIRCAEMKQFQMMYFLTRMARRPAFVEQLVHKIRRKREIDGNDMVKRPRLMGNPCHVPFPKTMETTPNFDYRHQQGHKQFATLQSELNVTEVNSSRMEHPTPSPLEDELGNSLQGLRAHGCSRARAQDASSSAYHVMSEKLMRENSIVDEELDVNDSNIYLELEDLITKPTDWSVGSASGLVEQTS

SEQ ID NO: 218010 - protein, 75 aa, Glycine max
  Clone ID: PAT_MRT3847_38890C.1.pep
YLSSTYKSFLFPPNNMEHQQVVCDCQPRQIQMPLASCCKCSKRVHPGVAVHEKNRMGRSTQSVRARTGRRTSLTY

SEQ ID NO: 218011 - protein, 176 aa, Glycine max
  Clone ID: PAT_MRT3847_38891C.1.pep
PRVRTAARRRQKGKLKMTKRELETLMGKVRGLSLLSLGGCFDGCYDHTQAYGLGTRIWNFSDRPVELQIRVGSILKKVHTLKPGSCKRLRSKRIYKAYMPGKNGNDGGGLKSLLYYYDETCHPYVWIHDIGGDSMRMVKQQYISLENLRDSSEIRIFRDQQRGCISVLKRTRPDFC

SEQ ID NO: 218012 - protein, 48 aa, Glycine max
  Clone ID: PAT_MRT3847_38892C.1.pep
HASADAWVGCLVMPLSCTQIVWLDDLIPPHILYCLGSHLPLLWSPEFL

SEQ ID NO: 218013 - protein, 130 aa, Glycine max
  Clone ID: PAT_MRT3847_38893C.1.pep
KAKNEASVKIREDEEETNRFLKSQREALITCLEIAARRYKTPWCQTVIDILVKHAFDNVARFTARQRDAVGKLWASIREQQTRRKQGKSVNGKLDVNAFEWLQQKYAGEKISIRHSVGASGDRRAQQWLG

SEQ ID NO: 218014 - protein, 500 aa, Glycine max
  unsure (1)..(500): unsure at all Xaa locations
  Clone ID: PAT_MRT3847_38894C.1.pep
MFSPRDMPSPSSIFSAYASMTASIMLLRSMANDLVPQPIRGYLYSTFRYLIKPRSPTLTLIIEESTGIARNQVYDAAEAYLSTRVSPENERLKISKSAKEKKLTVRLEKGEKVVDCFDGACFKWRFICAESEKNNPNDHSNNSISVRSEKRSFELSFPKKYKEMVLDSYLPFILDKAREMKDEERVLKMHTLNTSYCYSGVKWDSINLEHPSTFETLAMEPELKNAVIEDLDRFVKRKEFYKRVGRAWKRGYLLYGPPGTGKSSLIAAMANYLKFDVFDLELGSIVRDSDLGKXASATAYRXILVLEDIDCSVDLDHKLTDDXDGWMQLTLSGLLNFIDGLWSSCGDERIIIFTTNHKERLDPALLRPGRMDMHIHMSYCSYQGFKILASNYLETPSDHPLFGEVEGLIEDIQITPAQVAEELMKNEDPEATLEGFVKLLKRKKMEGDVCENSTPDKAEPTHQQSKRRKVGCKQKRGVGINKSISGVTQIRTRRMRGCSL

SEQ ID NO: 218015 - protein, 66 aa, Glycine max
  Clone ID: PAT_MRT3847_38895C.1.pep
PRVRHKVVTNVIDLYSYIHTAPIYFCAFLLIRKPRALMAVEYSIASTPNRRRSTQSACTLKWSYAT

SEQ ID NO: 218016 - protein, 324 aa, Glycine max
  Clone ID: PAT_MRT3847_38896C.1.pep
MHETHSIGGGRFYGGGDRRLRPHHQQQQPPPLKCPRCDSLNTKFCYYNNYNLSQPRHFCKNCRRYWTKGGVLRNVPVGGGCRKSKRSNKPKTTTTTTTSNTNNNRSSFSATAPATAPTPPAPELEHHSHSHSSSESSTLTVTATEEMSAPPPTTSNAPSKNSLLLDNDHREAKMFANPNPNPSLDSGGIFSEIGNFTSLINLNNNEAFGFGNNKNNNSILDATSFRFGISVTNQVQAAAGGGHGQWQQQNHQEFGTASFLDHTVPLEFSSLQHKTGHQGGFGSLDWQPGADQGLFDLPNTVDQPYWTHAHWSDQDNTSSLFHLP

SEQ ID NO: 218017 - protein, 80 aa, Glycine max
  Clone ID: PAT_MRT3847_38897C.1.pep
HQLTSDNVIAAAKAASAHSAVSSAITQVAVTAFAIASGACLSTKVDFLWPKLQEQPGFFCLFSLSLFFYFLEVANIYTDT

SEQ ID NO: 218018 - protein, 81 aa, Glycine max
  Clone ID: PAT_MRT3847_38898C.1.pep
KSPSLWPVSLSIYILGKKKWNLIKIALVLFLDKSVFHFQISHEEGYEYDAIKSEKEITILFWDKFVFWFCLLAVNPQLTQN

SEQ ID NO: 218019 - protein, 42 aa, Glycine max
  Clone ID: PAT_MRT3847_38899C.1.pep
MSDAFCIDCKKETEVVFEHAAGDTVFSELRLVPESQSNRRRT

SEQ ID NO: 218020 - protein, 59 aa, Glycine max
  Clone ID: PAT_MRT3847_3889C.1.pep
MSLQQPNQEVPLQEPEATFSQLSKQNSILSLTLDEFYCKNGKSLGSMNMDEFLSSNLEL

SEQ ID NO: 218021 - protein, 37 aa, Glycine max
  Clone ID: PAT_MRT3847_388C.1.pep
EMRPLYPAYRSALMVALGAPTFLVKIAQHRSAFHYHI

SEQ ID NO: 218022 - protein, 71 aa, Glycine max
  Clone ID: PAT_MRT3847_38900C.1.pep
KDEGTQFAKDRITLFPSTWFVNIMIYSEGQEGKGWEYTLSGTHIFAMHAKVECLCINDLRSQIHAICMPCI

SEQ ID NO: 218023 - protein, 149 aa, Glycine max
  Clone ID: PAT_MRT3847_38901C.1.pep
HRQEVRNLRDMSPWSRSYDYVVRLLARSLFTILERIILVFAINQPPTVQEQNDYQHMNANNLLRSHSFSVMHSSVHPSENDLYGFNSGPVGGRPVSKSGFLVDKGRRKKKQQQALHEPALFRKNLHSESKQLGHIVAFTGCMSAANNSP

SEQ ID NO: 218024 - protein, 94 aa, Glycine max
  Clone ID: PAT_MRT3847_38902C.1.pep
QHYTFLYQIKQRGYWTTNIRSTDYSNSTQIYSTYNINISIYIHIYILPTFIIAPYTLPYIPLPIQVLPYIFTSYSIFLDPKILSILLIIHIFNY

SEQ ID NO: 218025 - protein, 57 aa, Glycine max
  Clone ID: PAT_MRT3847_38903C.1.pep
TRVCGYGGTYNSFICNCPNGINTTADCFFISSYNNGFRNGVAWLIYPVACSFVWFFL

SEQ ID NO: 218026 - protein, 98 aa, Glycine max
  Clone ID: PAT_MRT3847_38904C.1.pep
ATEILGWEMNDKVKAVENHGLKASQKLVESMMSEKAQNKTKRCKIGVFSQNKFDGVETPGTKMHKVDDAVTRNHDQKKCQMCRQALSREVIWQQNWHT

SEQ ID NO: 218027 - protein, 44 aa, Glycine max
  Clone ID: PAT_MRT3847_38905C.1.pep
PLIPIHIFFTSLCYLYSYSFGVLTYYNFHSNFNSYSDATILPFK

SEQ ID NO: 218028 - protein, 89 aa, Glycine max
  Clone ID: PAT_MRT3847_38906C.1.pep
PHWAPPNKIKGLKTAPLVGGSYPKKGGFLRGLLDYSFPPGRFFPLHDFSPACWLPVRGKKNLPHGGFGYPKGFTGLPSPPVFIKASFFP

SEQ ID NO: 218029 - protein, 109 aa, Glycine max
  unsure (1)..(109): unsure at all Xaa locations
  Clone ID: PAT_MRT3847_38907C.1.pep
MLMLALMGLFILAVLLVVSAMSQTHSVAGDGQCHGLVMNFYXESCSRAVDIISVTSXLLYMCHMNTAFSXLTNIIHDCAVQSCDASLLLDSTRRSLSDKEADINVGLIN

SEQ ID NO: 218030 - protein, 87 aa, Glycine max
  unsure (1)..(87): unsure at all Xaa locations
  Clone ID: PAT_MRT3847_38908C.1.pep
MASDLELKAKEAFEDDNHDLPYDLLTQAIGLSPNNADLYADRAQTNCSCFFLPRAVADANXAIKXEILLTXKAYLRKGESGATSFFF

SEQ ID NO: 218031 - protein, 543 aa, Glycine max
  unsure (1)..(543): unsure at all Xaa locations
  Clone ID: PAT_MRT3847_38909C.1.pep
MVSPISHLVTLILLLSVSLAASASLEENFVQCLSFYSDKAAPFYASIYTPQNASFNKILESSAQNLRYLVPSAPKPELIFTPLTDSHVQVAVTCSKKLGIHLRIRSGGHDYEGLSYVSEVESXFIIVDLSKLRAVDVDIEDNTAWIQAGATIGEVYYKIYEKSSVHGFPAGLCTSLGVGGHITGGAYRPMMRKYGLGADNVVDARIVDANGQILDREAMGEDLFWAIRGGGGASFGILLWWKIKLVPVPETVTVFTVTRSLEQDATKILHRWQEVAPYIDEDLFIRVIIQPATVGNKTERTITTSYNAQFLGGADRLLQVMKESFPELGLTKKDCLETSWIKSVLYIAGYPNDTPPEVLLQGKSTFKNYFKAKSDFVRDPIPETGLEGLWQRLLEEDSPLMIWNPYGGMMSKFSESDIPFPHRNGTLYKIQYLTLWQDGDKNASKHEDWIRKLYNYMTPYVSKFPREAYVNYRDLDLGMNKKNSPSYIQATAWGNMYFKDNFNRLVKIKTKVDPDNVFRHEQSIPPLPVSSMRLKDKKCKTWE

SEQ ID NO: 218032 - protein, 277 aa, Glycine max
  unsure (1)..(277): unsure at all Xaa locations
  Clone ID: PAT_MRT3847_3890C.1.pep
MAVAIGRSFSIQPGSLFNNKSLDRGSPAGRLSWLGDGAAATPRYRQTCVGAQQRPTWLPGLDPPPHLDGTLAGDFGFDPLGLAEDPASLRWYVQAELVHCRFAMLGVFGILVTDLLRVTGISKIPVWFEAGAVKYDFANTKTLFLVQLVLMGFVETKRYMDFVSPGSQAKEGSFYGFEAASQAXRAVFPWGPRLTERLXPGYPGGPLLNPLGLAKDINNAHDWKLKEIKNGRLAMVAMLGIFVQASVTHVGPIDNLVEHLSNPWHKTIIQTLANSSS

SEQ ID NO: 218033 - protein, 65 aa, Glycine max
  unsure (1)..(65): unsure at all Xaa locations
  Clone ID: PAT_MRT3847_38910C.1.pep
SSYGWRGSQLEAIATMLEEXEKEITEALYKXLGXPRXXSIYXRXFXXXNPHXXQGLKEXXXWVKA

SEQ ID NO: 218034 - protein, 55 aa, Glycine max
  Clone ID: PAT_MRT3847_38911C.1.pep
FLALSLIAYIAVMVVIYVHLLLENMDKTNVFYACNKNNTQAGMQCFSFMMYIFQY

SEQ ID NO: 218035 - protein, 44 aa, Glycine max
  Clone ID: PAT_MRT3847_38912C.1.pep
EIEVEANWMWQHSAQSLYPQLCCDGHLNFEQQELEINLRIKIGG

SEQ ID NO: 218036 - protein, 607 aa, Glycine max
  unsure (1)..(607): unsure at all Xaa locations
  Clone ID: PAT_MRT3847_38913C.1.pep
MEQLVNFIIRPPRAEYDPKSDLLDQEFMLKGKWYQRKDVEIKNSRGDVLQCSHYLPIVSPEGKPLPCVIYCHGNSGCRADASEAAIILLPSNITVFTLDFSGSGISGGEHVTLGWNEKDDLKAVVNYLRDDGNVSLIGLWGRSMGAVTSLMYGAEDPSIAGMVLDSPFSDLPQQQKNVSHXRRVNIPFLSEPFPXMWCREAIQKKAKFDITDLNTIKVAKSCFVPALLGHAIDDDFIQPHHSDRIFEAYMGDKNIIKFDGDHNSPRPQFYFDSINIFFHNVLQPPEDEVGESFFDPMNDYFGKDVWRSVHELGYSNESSSKNKDEPSTSSTINAIEQVRSRRPMSRMEVPSDISSKDEHREHEEKCGNISPSSSSMISFELSNDDPFGSHVPATLEDDQYVEYQLDDLAGFPSTAEEEERMFMEAVMESLKDLEVRNPNAEQPTSSVSSVYVDAVEPSDKDASSGEISRPVETESSSLKHTTESKFKTTSSTSEEFEPLNGESNSISVKHSQNVVSEPSPVPSVSLEGPAHLQLQPPPSAPTDTSSVTESSNTSGSASSDSSASLQSSSETDVSHNTKATVTVVRNPAGHVMDGLMRRWDFNFFKNK

SEQ ID NO: 218037 - protein, 104 aa, Glycine max
  Clone ID: PAT_MRT3847_38914C.1.pep
VFFIFFFFFFFPFFFNKTKRQGLNLRGSWQKGHFATYNTPAGIKNGCPRFKGSPEGNCPLRGKIRLIRVTRGTNSSCLWGAEAPYCWWENGRGAPPPLLTRILN

SEQ ID NO: 218038 - protein, 129 aa, Glycine max
  Clone ID: PAT_MRT3847_38915C.1.pep
HSSTRIQDTLEKLKELENLSKLVCEAKKKKEKARRSRKKEIEQLQLMMLRNCQRARTNSKYPKDGTKGSHTSFQLPFPKPTLNLEVPKIIKAPPREKEREKEAKKDCSKKELKRSPWKQSIMQTTLISA

SEQ ID NO: 218039 - protein, 121 aa, Glycine max
  Clone ID: PAT_MRT3847_38916C.1.pep
GKAFDEHHQLTSNASSTVDCIDRKIGLSDTLTLGTAVFNGKGREMYERYKLSEETKPAMAAGKQKARSAGSAIMNNPYVKSGASWFSRAFTAIAKAAEDGNTKTQEKVEQAGVGRNQNHLW

SEQ ID NO: 218040 - protein, 46 aa, Glycine max
  Clone ID: PAT_MRT3847_38917C.1.pep
NGVDFLSKKKKKKKKKKKKKKKKKNKKKKKKKKKKKKKKKKKKKKK

SEQ ID NO: 218041 - protein, 49 aa, Glycine max
  Clone ID: PAT_MRT3847_38918C.1.pep
GKGLYWFYNLTLQYTQNLVHLLPILSCFHSIIYLLIKKISKTTANVYYH

SEQ ID NO: 218042 - protein, 89 aa, Glycine max
  Clone ID: PAT_MRT3847_38919C.1.pep
MESDQKVQIASWSEVMSGAGVEFHQGAPNLGQGGGGGLQRQPSMTKNNCLCSPTTHSGSFRCRFHRSPRLQRTKSMESESLRDHASKVH

SEQ ID NO: 218043 - protein, 106 aa, Glycine max
  Clone ID: PAT_MRT3847_3891C.1.pep
VHHQPEVGALSCGTRSPLSTGPLPGPGLGGGRQVVGVGQQPRPGASAGHPSRAEGQQGVADQTVGGDHGEGSPPGGADGQRMKLERNLAMYRAAHRQRPAATAEKK

SEQ ID NO: 218044 - protein, 105 aa, Glycine max
  Clone ID: PAT_MRT3847_38920C.1.pep
MESDQKVQIASWSEVMSGAGVEFHQGAPNLGQGGGGGLQRQPSMTKNNCLCSPTTHSGSFRCRLHRSPSLQRTKSMESESLRDHASKVHASIVDAVADANKDPVH

SEQ ID NO: 218045 - protein, 71 aa, Glycine max
  Clone ID: PAT_MRT3847_38921C.1.pep
SSLFQCYLLLPQQRAFPLLLRVEPQSIRSRLVLLYSPPLTLAQHLPNYDELQQRADHLVQLSQDTSLPVDS

SEQ ID NO: 218046 - protein, 73 aa, Glycine max
  Clone ID: PAT_MRT3847_38922C.1.pep
RNAFVLRSFSLKMGSSASKATSSSSSSGSCRKGRSKGHRGFPSYCLGASSGSRDIDSDDQVTLTSHPFRCYVN

SEQ ID NO: 218047 - protein, 47 aa, Glycine max
  Clone ID: PAT_MRT3847_38923C.1.pep
PQRLMYNSSEFPPRLLFLIHFHILYSVLVIVYRIRSSSSYSAPTFRS

SEQ ID NO: 218048 - protein, 93 aa, Glycine max
  Clone ID: PAT_MRT3847_38924C.1.pep
NILEAAYDQGSTRVTRFCFRKQEGQPHRQHGLDESVIGELSSGQIRALNKRARRSSTKTIALDVRPLPVMIRGRVCCTRRWSRPLPIGPSRIP

SEQ ID NO: 218049 - protein, 134 aa, Glycine max
  unsure (1)..(134): unsure at all Xaa locations
  Clone ID: PAT_MRT3847_38925C.1.pep
MSTTLLFLFSNKMAKIPDIEKCLDVVATLQAKRGYXTLTADFEVXSEEKYSQACVEETDSVCLWLGPNVMSEYSLEEAIDLLQNQDNAKASLEVLATDIQFLRDQVTLTPVRLPIFTCSISVCAFAITYPSKVN

SEQ ID NO: 218050 - protein, 59 aa, Glycine max
  Clone ID: PAT_MRT3847_38926C.1.pep
FLCLIILVTLLVGSIERAPGNVESSHDVVPFNMSVFPSGLLLGIGSAAYQIVGAAALDG

SEQ ID NO: 218051 - protein, 86 aa, Glycine max
  Clone ID: PAT_MRT3847_38927C.1.pep
GIFNCMWQICGKKDTNCFLTLYISCGTRMEVHENSLQDVPLSPRGPKCMQPDSFCAEPQYPEADKYTRRIPSEGSSSHIVARTGRV

SEQ ID NO: 218052 - protein, 42 aa, Glycine max
  Clone ID: PAT_MRT3847_38928C.1.pep
LLGLIKLVQLCNLQGLVIVTISRETVKTWHMLAGKLLTTRRV

SEQ ID NO: 218053 - protein, 67 aa, Glycine max
  Clone ID: PAT_MRT3847_38929C.1.pep
LKRTAPKPSGGYLMILTLLMLDGTIIVLAIVTHTACQMNSGSETLRDYHRTVDRGVPCLARHGCAGD

SEQ ID NO: 218054 - protein, 76 aa, Glycine max
  Clone ID: PAT_MRT3847_3892C.1.pep
SYYSIIKFAKLSDSISCRYLVWFFGFNDVIMYANNTPAFLFCDINYVEISMWTYYIVCTPKKVPDCSWYFTFFYNM

SEQ ID NO: 218055 - protein, 82 aa, Glycine max
  Clone ID: PAT_MRT3847_38930C.1.pep
PSPPPPGYKYKSPPPPVYKYKSPPPPYKYPSPPPPPYKYPSPPPALYKYKSPPALGGGPPSPWCSWAPASPPFVGAWDGLWS

SEQ ID NO: 218056 - protein, 55 aa, Glycine max
  Clone ID: PAT_MRT3847_38931C.1.pep
VLNVVITRDPLDCVLKNKTRTLGFCSCHCLIFYMVIVRPYNVHKLPLMPVLFIRL

SEQ ID NO: 218057 - protein, 53 aa, Glycine max
  Clone ID: PAT_MRT3847_38932C.1.pep
HCLTSGKNLLAYSLLIMGAMPSVKDSGGLTVLERPMERGSFTDEKLYILLAEC

SEQ ID NO: 218058 - protein, 57 aa, Glycine max
  Clone ID: PAT_MRT3847_38933C.1.pep
HKQQRHNRILDKKLLMISRIIYKCNSKCTQIYKKEHVGHKQDEPSNVVTTKYDYGGS

SEQ ID NO: 218059 - protein, 48 aa, Glycine max
  Clone ID: PAT_MRT3847_38934C.1.pep
VLSVRYSFTLLFILLLLSPSHIALTTPTLAYTLTQLATKNRHTNRNIH

SEQ ID NO: 218060 - protein, 50 aa, Glycine max
  unsure (1)..(50): unsure at all Xaa locations
  Clone ID: PAT_MRT3847_38935C.1.pep
RXSGPESMDQLIARDKKYMWVAERPHPNALIRLNQSIQLCKLVIRSDCTS

SEQ ID NO: 218061 - protein, 62 aa, Glycine max
  Clone ID: PAT_MRT3847_38936C.1.pep
SQNMFCAGHPSLKQDACQGDSGGVFAVRDPNTDRWVATGIVSWGIGCSRGYGFYTKVLNYVD

SEQ ID NO: 218062 - protein, 50 aa, Glycine max
  Clone ID: PAT_MRT3847_38937C.1.pep
FINKRAELPLMGARAATGGSPLPMCSLCSHLHIAGAQVPYRFYNWNNTLW

SEQ ID NO: 218063 - protein, 132 aa, Glycine max
  Clone ID: PAT_MRT3847_38938C.1.pep
LHPNKNKHVKLSNLCSNSHIMDHNHHNNNRVPRIHAFLSPTPPSPPMLSFIAALSITTLIFMCLYVLSPIVSVAILLALYITTLFLCRFMQDRRELRERTSFHAQTPQNNQRVVRVFNSFFGLLRKKGVARG

SEQ ID NO: 218064 - protein, 113 aa, Glycine max
  Clone ID: PAT_MRT3847_38939C.1.pep
MDDGMQLQISLDKLPIKRLDSIEENGIERFPLDVDYDEKRLSLIRRIDFAWAVEKDEEKKKKKQKSSKETSAPWQWQGMVENLQLAHQELSVIIDLINTVEANDAVTVASMTR

SEQ ID NO: 218065 - protein, 78 aa, Glycine max
  Clone ID: PAT_MRT3847_3893C.1.pep
QYIKIKLMLLYKNMRSLMHVGFIFCYIVFMCFFIFLYSVLVFNILKNETLSCIQVYQTKFQHYILEKYGFNVYSFSNL

SEQ ID NO: 218066 - protein, 56 aa, Glycine max
  Clone ID: PAT_MRT3847_38940C.1.pep
KMPFYQHVIMATSCQHGNGLLKPYINQHRSDLTKMFLPSFIENYEFHATRINCIAF

SEQ ID NO: 218067 - protein, 168 aa, Glycine max
  unsure (1)..(168): unsure at all Xaa locations
  Clone ID: PAT_MRT3847_38941C.1.pep
MDDGMQLQISLDKLPIKRLDSIEENGIERFPPDVDYDEKRLSLIRRIDFAWAVEKDEEKKKKQKSSKETSTPWQWQGMVENLQLAHQELSVIIDLINTVEANDAVTVASMTRPKLLPNEALSDLAVSAATKLQCYXHXXKYFKQSAKAFETQVARGARFYGALIRLQQ

SEQ ID NO: 218068 - protein, 80 aa, Glycine max
  Clone ID: PAT_MRT3847_38942C.1.pep
TAPFFVLFSYHKYSIQCFILIYFLLHSYLALFSLLLLVLLLCLLSIVSIELVLNPSLFRHVYFSWCEIISTLSGRRLSDF

SEQ ID NO: 218069 - protein, 98 aa, Glycine max
  Clone ID: PAT_MRT3847_38943C.1.pep
MDDGMQLQISLDKLPIKRLDSIEENGIERFPLDVDYDEKRLSLIRRIDFAWAVEKDEEKKKKKQKSSKETSAPWQWQGMVEILQLAHQELSVIIDLIN

SEQ ID NO: 218070 - protein, 91 aa, Glycine max
  Clone ID: PAT_MRT3847_38944C.1.pep
YPLPPISRRRIPFPIFHPFQSRATVPTALFRRAFQQATTAPPNHTHCAPHFWRSTLGANLERRDCVVDKGEIWRKGKLLYVTILKMFSSVI

SEQ ID NO: 218071 - protein, 52 aa, Glycine max
  Clone ID: PAT_MRT3847_38945C.1.pep
GGSFNGGGGPYLKKGPGKKGGPPKKSPKSKTRKISSGGSPPPRRPRKPILKG

SEQ ID NO: 218072 - protein, 137 aa, Glycine max
  unsure (1)..(137): unsure at all Xaa locations
  Clone ID: PAT_MRT3847_38948C.1.pep
GTTRSLGLGRPLNSLQQFLFFFWAAQIQAGGFVCSASQNYSECSLFSPGFCKSRLQCLHSSAQISHLFLTHQQLTGHDNGGKFQAVSPPTTAAXEPDRAQSARKDIKELLKXTNCPAGLIRSGRGDAGTYNKNIAEW

SEQ ID NO: 218073 - protein, 44 aa, Glycine max
  Clone ID: PAT_MRT3847_38949C.1.pep
KCSPDLIARMYAEELLCHITNFLAQIRFWDRASSSRWENPFSGS

SEQ ID NO: 218074 - protein, 89 aa, Glycine max
  unsure (1)..(89): unsure at all Xaa locations
  Clone ID: PAT_MRT3847_3894C.1.pep
VTCIQFNHIHDDYFISGSLDAKVRIWNIXERQVVNWTDIHEMITAVSYTPDGQGALVGSLKGSCRTYRTEGIRYSTSLFFIFLFLLEPS

SEQ ID NO: 218075 - protein, 107 aa, Glycine max
  Clone ID: PAT_MRT3847_38950C.1.pep
QGQVHRLKKTLKKVGFVPRPEAGWHDLNYEEKEENLSFHSERIAVAYGLISTAPGTTLRITKNLRACVNCHSAIKLISKLVEREIIVRDANRFHHFKDGLCSCGDYW

SEQ ID NO: 218076 - protein, 80 aa, Glycine max
  Clone ID: PAT_MRT3847_38951C.1.pep
VVKSPLLNIECSQALVNSHGAVSCQEKCSPVVSVTLVRQVDKRNDERKRISLSTESSEFLFSDVIPGKYSLEVKHSAPGS

SEQ ID NO: 218077 - protein, 81 aa, Glycine max
  Clone ID: PAT_MRT3847_38952C.1.pep
FINARVRVWKPMVEEIHTLETKATGSKDNCGINEGTSSATGGDTSHPRALGNIGLNSIPETQFQGIDMGSSIAANAEESGL

SEQ ID NO: 218078 - protein, 128 aa, Glycine max
  Clone ID: PAT_MRT3847_38953C.1.pep
MLCLAISRCDLTQLLGFEKFIPPFANTSGSNILKGVNYASGGAGIRIETGSDMGATISLGLQLANHRVIVSEIATKLGSPDLARQYLEKCLYYLNTGNNDYMGNYFRPQLYPASRIYSLEQYAQALIE

SEQ ID NO: 218079 - protein, 51 aa, Glycine max
  Clone ID: PAT_MRT3847_38954C.1.pep
VFFFFFFFFFFFFFFFFFFFFFFLRGTKLPQIWADLFALFYSWFLKFKEKN

SEQ ID NO: 218080 - protein, 91 aa, Glycine max
  unsure (1)..(91): unsure at all Xaa locations
  Clone ID: PAT_MRT3847_38955C.1.pep
LTIDTLRWTSFDEIEDRPPKTLXYGVTEIHRPHCPLFSHNLLKDIFVSMGDYVYGLMFSVGSHTMMPMATLKLMIDMALKQDVFVMHEWLG

SEQ ID NO: 218081 - protein, 100 aa, Glycine max
  unsure (1)..(100): unsure at all Xaa locations
  Clone ID: PAT_MRT3847_38956C.1.pep
PRVRGVPADMAKKKTSVISNNWFPVWDEEFDFPXLTVIIPELALLRIEVRENDKSQKDDFGGQTCLPVSELKSGFRSVPLHDEKGDKLKSVKLLMWFQFR

SEQ ID NO: 218082 - protein, 59 aa, Glycine max
  Clone ID: PAT_MRT3847_38957C.1.pep
SSPPLANVKAKFPAKEGFPPDHQRFFFAGHQLEDGRPPPDSTLQKESPPPLVLGLRGGF

SEQ ID NO: 218083 - protein, 522 aa, Glycine max
  unsure (1)..(522): unsure at all Xaa locations
  Clone ID: PAT_MRT3847_38958C.1.pep
MASHNYKVFSCFNRKFTVTEPGPPPDVQKAFSEFADGASSLSGDHLLRFLAKHQGEVDCTAVDSERILQQSRKEDRESGLDLHDVXKVLDDXDFNLVKLDDFPSQIFXSCSFVRYLLCXLYKLLMDIFLNSCRTLTTPVSLIQCLKSIKEYAFVKSHYPLIITLEDHLTPDLQAKAAEMATQVFGELLYYPQTDSLMEFPSPESLKGRILISTKPPKEFLESKECDDKDNEKESADEVLSLPDQTSERETDDKSAPEYKRLITINSARAKGDIQDELKAAGAVRRLSLSEQALEKASESYGADIVRFTQNNILRVYPKGTRLNSSNYKPHIGWTYGAQMVAFNMQGYGKSLRYMQGMFRANGGCGYVKKPEFLIEKGPYNEVFDPKRTLPVKKILKVKVYMGTGWSLDFSQTDFDTYSPPDFYVKVCIVGVPADMAKKKTCVISNNWFPVWDEQFDFPLTVPELALLRIEVRENDKSQKDDFGGQTCLPVSELKSGFRSVPLYDEKGDKLKSVKLLMRFQFR

SEQ ID NO: 218084 - protein, 84 aa, Glycine max
  Clone ID: PAT_MRT3847_38959C.1.pep
LPFGTGQDVLDVHGDPMPHGIIYYVWPAIRGNCGGIQRAALCKDTWPITVAQSPNPNSNGSEHMHDLAYPAYYVNETLILQIKF

SEQ ID NO: 218085 - protein, 128 aa, Glycine max
  unsure (1)..(128): unsure at all Xaa locations
  Clone ID: PAT_MRT3847_3895C.1.pep
PWGVSIKKGMPNNPYFPGGGIVRPKMVKEGAVEXKKGTPATKFQMGKKIVSFLPWGGDPXMEKKKLMGFKGIFVLSRALIQAAYFRRLGGAVLKFRKMVFKVVKKGPSGFISFFPPGKIIVGKNFVKC

SEQ ID NO: 218086 - protein, 90 aa, Glycine max
  Clone ID: PAT_MRT3847_38960C.1.pep
NIKKILIKFFLARFYVTGTGEPFETILGAKKSPPWPKTGDIRKSSPYNLNFFVFFHNAGKFFGKKGDLAFWGGQNPDFSPQKNPPLLEYF

SEQ ID NO: 218087 - protein, 140 aa, Glycine max
  Clone ID: PAT_MRT3847_38961C.1.pep
MILSMKQVFSLAIFIAFWELSSVVADGGDVVRVRVSKNQGLSLSFTIHCKTNNKDLGTQVVNPNYYERFKLHRDNAPGSTFLFCKITWRDASILYVLYQDARDFRRRCTTDCNWEVNNKNLLGINQYSENPDIIVQWPKN

SEQ ID NO: 218088 - protein, 100 aa, Glycine max
  Clone ID: PAT_MRT3847_38962C.1.pep
FFFFFFFFFFFFFFFFFFFFFFLKKKTPHFLFFFSGFQNPQKEKWGEKISRPPFLVPKGNFFCPWPLRGAANFLNGENAPFFSPLMTLKAPPKFPKGKFA

SEQ ID NO: 218089 - protein, 76 aa, Glycine max
  Clone ID: PAT_MRT3847_38963C.1.pep
LPQRVVETLCGTRRYEFLKKGKVTSLARRITIRFSSELVQNLLYQNEMKLYMYYYINSGLFTETKLHSALADMDIL

SEQ ID NO: 218090 - protein, 72 aa, Glycine max
  unsure (1)..(72): unsure at all Xaa locations
  Clone ID: PAT_MRT3847_38964C.1.pep
XHGVVIRTGDAFWGALREKGTSALTRYVRTYRGGDFVERKVNGAARWGTPPKFYQGRFFFLWNDAKRAGGGD

SEQ ID NO: 218091 - protein, 78 aa, Glycine max
  unsure (1)..(78): unsure at all Xaa locations
  Clone ID: PAT_MRT3847_38965C.1.pep
HVSEACSIGKPVYVLGAKHCRWKFTEFHXSLREQGVVRPFTGSEDISESWSYPPLTDTADAAKKVHEALAARGWKLKV

SEQ ID NO: 218092 - protein, 61 aa, Glycine max
  Clone ID: PAT_MRT3847_38966C.1.pep
REDRYRVGRTRCCGVHLFRCFETDDLLLALQVDLRFNLTDRDLHFETCKVFAYGQSATSIG

SEQ ID NO: 218093 - protein, 268 aa, Glycine max
  Clone ID: PAT_MRT3847_38967C.1.pep
KKVSKVEQFRSVQSKKALTVGVPKSRVVAKALVFHSPKKVLKIKSSIELKTAMRTLCSAMNKLELNGVKKNGKGGSNSLAVATSKKQLRGREVKSRVFDSLYSNNRKEPETNTKTSLKEKKVKKGTQKCPVAVPHENDTSHMEIDEKSRCGSLEGCHESGTSGSGGELSFGDEKSHKSTRGESSVPVLTEASRSDITSLSSLNNEENKTTERSENEETKNSVSNKGKVSVAKKRKAEENSLASDDRENERQLTENDEKENVSAPHENM

SEQ ID NO: 218094 - protein, 95 aa, Glycine max
  Clone ID: PAT_MRT3847_38968C.1.pep
MMHAALGPELGLRLEGSEAWRLSHGKTISADHMSGGTVCAMHIWLCTTNINYGARDLHPHAVLRMCCQETRNTVYKCLLKGAEEGLLILYEKKTC

SEQ ID NO: 218095 - protein, 51 aa, Glycine max
  Clone ID: PAT_MRT3847_38969C.1.pep
RPQACYPLEGPPFPFFFLSTLITLSLEYIHNACGVQEASSFRGFLRMTAWS

SEQ ID NO: 218096 - protein, 232 aa, Glycine max
  Clone ID: PAT_MRT3847_3896C.1.pep
MKVYQRERQNGHYGVTAFVIGNTLSSIPYLLMVTFIPGAISYYLPGLQNGCEHFLYFICVLFSSLMLVESLMMIVASVVPNYLMGIIAGSGIQGIMLLLSGFFKLPNDIPKPVWKYPLHYVAFHTYANQGMFKNEYKGLRFNTDHQVGSGGSHGYISGEEVLRNTWQVDTSYSKWVDLAILIGMIVVYRVLFLVIIKIKEKMKPLVVSLSCMSASPKRTMQVMENPNATPLH

SEQ ID NO: 218097 - protein, 54 aa, Glycine max
  Clone ID: PAT_MRT3847_38970C.1.pep
LNNNLKGLLYLQAYYGPRVTMLQYSTPVVASGQVLHPYMWGPPQVALLSSSRSR

SEQ ID NO: 218098 - protein, 83 aa, Glycine max
  unsure (1)..(83): unsure at all Xaa locations
  Clone ID: PAT_MRT3847_38971C.1.pep
MATAIEFIELITGATIPSLGLRTWQAEPGVVAQALTTAIHVGYRHYLTCANAXKESSRDRDHAHKIHSDDCVVKREDLRITSK

SEQ ID NO: 218099 - protein, 43 aa, Glycine max
  Clone ID: PAT_MRT3847_38972C.1.pep
YYYYYPKANEFLICSIICHFSFTPFIPLKLKLGVLVHHRGLVL

SEQ ID NO: 218100 - protein, 44 aa, Glycine max
  Clone ID: PAT_MRT3847_38973C.1.pep
IILVTLLAGSIERGLAYVNARHYLASFYRSECLSGFLCGIGSAA

SEQ ID NO: 218101 - protein, 35 aa, Glycine max
  Clone ID: PAT_MRT3847_38974C.1.pep
LLYPLIYPAIKIIKGWVTSVGGSNKSLYHMLIKLA

SEQ ID NO: 218102 - protein, 35 aa, Glycine max
  Clone ID: PAT_MRT3847_38975C.1.pep
HASGSFNMLWAHSSIYYNQTLSLIDLIRFLFLIDL

SEQ ID NO: 218103 - protein, 45 aa, Glycine max
  Clone ID: PAT_MRT3847_38976C.1.pep
KGRPFFFFFFFGKREVLIDKRGAFNPIKFNIRQFYNEQEAQTLFF

SEQ ID NO: 218104 - protein, 153 aa, Glycine max
  Clone ID: PAT_MRT3847_38977C.1.pep
STSTTPFGVASSASTTPFGGTSSSSTLFGFGGTASATTTPFGNSSTASASTSAFGASSSAAPLFGGASSAATTPFGGSSTASASTSAFGASLSASPSSAATTSPLFSGAFATTGASSSSASTTSFSGFAKPSTPAATTTPSSSSGFSLASHPS

SEQ ID NO: 218105 - protein, 462 aa, Glycine max
  Clone ID: PAT_MRT3847_38978C.1.pep
MIWSTSCFQEFTNSFCNDSTINHIVSSHHQRAEPWSYKHFKSSPVRNVSEETTKTRSQTAALSIPQKNVSSPPFPLSPLGKKSSKNENLGECRNIDVILDDGNFTFNSVEQSLDRTCQGILSAQEIPGKSQLNLNNMQQKSDLFTPDNMIDMKEYWTHSGSFPPRDAKLCGTMSRLPIRRSLVGSFEESLLSGRLLSGKVSPKIEGFLALLNVTGGNFSPQSQKIPFAVTSVDGDKYLLYYSSINLSGKLLSGKSRVAKFQRTLSMDESRSEKPRIRIPMKGRIQLVLSNPERTPIHTFFCNYDLSDMPTGTKTFLRQKVTLTASRSKSMMGKESQTDSDTRADAKSSLISVTSHRDKDLLTSKCGEFDSFTCSKAGILLYALHLRFMCPLPKRRSRSHASGKSGPVSADMRNIVDIEQERSFYLYDDMRVVFPQRHSDSDEGKLHVEYHFPSNPKYFDISC

SEQ ID NO: 218106 - protein, 87 aa, Glycine max
  Clone ID: PAT_MRT3847_38979C.1.pep
NNLTPILISIFILKHPPPIRGILYLERSPATKNTYNDNITYQPFPPNIFNYISYYYYFEGLDASATHVANLLSTKTAHSHKKNINIL

SEQ ID NO: 218107 - protein, 115 aa, Glycine max
  Clone ID: PAT_MRT3847_3897C.1.pep
LAARITVILYLSTVTEQLSHRPICPGPDRNGCRCLMIRIRIGVASTSAIARSRYHDHSARPSRSRNRIVFILVFVLASPSSTSTTTAVVVIVPRLISSSDVSSLLVVSCVSTLRF

SEQ ID NO: 218108 - protein, 91 aa, Glycine max
  unsure (1)..(91): unsure at all Xaa locations
  Clone ID: PAT_MRT3847_38980C.1.pep
MVQTSTYRKSQSYATSSNXLRVVKIPDGELVYYNIXLRARGRNCPVSGKKIQWILYLSPAEFKRSRLPMNRMTVDRSYRCLLSWGAVTELI

SEQ ID NO: 218109 - protein, 109 aa, Glycine max
  unsure (1)..(109): unsure at all Xaa locations
  Clone ID: PAT_MRT3847_38981C.1.pep
KALTPSTTVKANYHDKEGIPPNHXRIIVTGKXLEDSRTLAEYNIKMESTFSLXLSLRCGMPILHKTLTXRHISLEVESIHXMDNLKARSQDTEGIPSDQKTLMISLKST

SEQ ID NO: 218110 - protein, 76 aa, Glycine max
  unsure (1)..(76): unsure at all Xaa locations
  Clone ID: PAT_MRT3847_38982C.1.pep
RSSRGGPVPNSPYSESYYNSLAVVLQRRDWENPGVTQLNRLAAHPPFASWRNNEXARTDXPSQQLRXLNGEWXIVS

SEQ ID NO: 218111 - protein, 54 aa, Glycine max
  Clone ID: PAT_MRT3847_38983C.1.pep
RKWVRIRCIAAGYVGGATMAAIALNPPSIEASVDAISKCRIAAWNNNHLAIYEP

SEQ ID NO: 218112 - protein, 51 aa, Glycine max
  Clone ID: PAT_MRT3847_38984C.1.pep
ILQEKIGGVGGPSVPPNALAFKRDGFSLSSAGQHGYERMPPSAPGYFNIKI

SEQ ID NO: 218113 - protein, 49 aa, Glycine max
  Clone ID: PAT_MRT3847_38985C.1.pep
HVIYSHSTSYMRGISKLIGAFWGGRGMDGRVGLKQNNFQWLSGRFTNIH

SEQ ID NO: 218114 - protein, 94 aa, Glycine max
  Clone ID: PAT_MRT3847_38986C.1.pep
MRRDAWFSGMGLAVPPHAVSQMFADLVLPNRADMPCSDASSCPPRASLVSFARSTLLPWRSLTVVFICQALILLSLFPSMGPLVKLVRLMQMIM

SEQ ID NO: 218115 - protein, 53 aa, Glycine max
  Clone ID: PAT_MRT3847_38987C.1.pep
HSYKPCTHMHLGQLAPLGGEHTAAQLPGDWVSIGHSSQWLRYSVYASTQVSWQ

SEQ ID NO: 218116 - protein, 87 aa, Glycine max
  unsure (1)..(87): unsure at all Xaa locations
  Clone ID: PAT_MRT3847_38988C.1.pep
AVXLTXILEKGGQXTTLIXLLXDTQHLTQXESQLXSISXXFTLFAPXDNVFQXXNPGALNDLRDDKRVKLILFHXTPKFYTISXLLS

SEQ ID NO: 218117 - protein, 66 aa, Glycine max
  Clone ID: PAT_MRT3847_38989C.1.pep
KSVASCNDNKSAIRQEEVKTFGCVSFFFLLAWHMAVRCKRQEHYDTAKIILQDYGLWICYGIKVHN

SEQ ID NO: 218118 - protein, 299 aa, Glycine max
  unsure (1)..(299): unsure at all Xaa locations
  Clone ID: PAT_MRT3847_3898C.1.pep
MVVLARKKRVTDPFDDEAKARLVGGGDHRQLSYVSSGSEHSGNGDGHSPCLSELVHDFLEDNGDSENNNSAGNEFDSERVDSVTDCIDSVEELLMLNASNVSDSYKSLLLEHASEASEKFEFXKEGNVSSHRRNAMSFLREKGHNAAICKTRWDSSGGVTAGNYEFIDVVQSGPATWHKRYFVDLDFVAQFEIARPTSEYLEFLNYVPRIFVGTEEELKRTVRVLCGVARRCFGKRGLSLPPWRKNRYMQNKWFGPYRRTANPVHGNPVPTVVSALSGAKCRFVGFDDAFRRPDMAVWL

SEQ ID NO: 218119 - protein, 111 aa, Glycine max
  Clone ID: PAT_MRT3847_38990C.1.pep
CVPNVVTPLSNTPGSPLRDSPFSMMSWVTSCGSSTPILSPRFLFPTVSWHLISWRMGPPLAPNPLIVSPSSQDTDGDRISVVEKEGEPLGSRLPCLNRPSLEWSLGFSGRV

SEQ ID NO: 218120 - protein, 41 aa, Glycine max
  unsure (1)..(41): unsure at all Xaa locations
  Clone ID: PAT_MRT3847_38991C.1.pep
SHNTQHMNXTXXSSTRSHNSXTXLIAHYGVIMXXIEITTXX

SEQ ID NO: 218121 - protein, 177 aa, Glycine max
  Clone ID: PAT_MRT3847_38992C.1.pep
SRAGKSSKSKLLIAKFKSASSLNGWQVRQGTYFQDVVATKYDGGMDAKFEFNENGDAVFSGYVFNRGGYVELSKKLSLPLGYTLDRYEGLVLSVGGNGRSYVLILEAGPSADPSQSRLYFARISTKVGFCRVRVPFSSFRPVKPDDPVLDPFLVHTLKIRFEPRRQVHFLIALNSLC

SEQ ID NO: 218122 - protein, 77 aa, Glycine max
  Clone ID: PAT_MRT3847_38993C.1.pep
DNSLIHGDITKSDKVWSKLSEKPVIMKNIFVKFWLIDTFFFSQVKYYHFKIDISSMHNFYSCLSSPVFIAVLSRYLH

SEQ ID NO: 218123 - protein, 54 aa, Glycine max
  Clone ID: PAT_MRT3847_38994C.1.pep
NYSKKPVPNRYCFFPKFKIIALFFISYNYLILINSLILFSYSFLHNFFNFLILF

SEQ ID NO: 218124 - protein, 101 aa, Glycine max
  unsure (1)..(101): unsure at all Xaa locations
  Clone ID: PAT_MRT3847_38995C.1.pep
ANARAKGDKLRXFFVSIAAYTAILWTAYPIVWGVADGARKASVDAEIISYAILDVLAKAVFGAWLLVAHANMRESDVELNGFWANGLSREGAIRIGEDDGA

SEQ ID NO: 218125 - protein, 92 aa, Glycine max
  Clone ID: PAT_MRT3847_38996C.1.pep
KVLRLILFCIFQTLPSSMLQSLLHLMYFLLNIRSVALHVRQDAQCQSNTSRPFNGRHGGVTSRRAPSDDSALESCPPINSPLVVLQRACRRN

SEQ ID NO: 218126 - protein, 152 aa, Glycine max
  Clone ID: PAT_MRT3847_38997C.1.pep
LEFSSYTILTGNQHITVANGSHTPVIGCDLATGRTIGIAKEQGGLYYLQHEDNQECAKQKAFTSNHQTSSEPWSSSQIWLQHRRLGHPPFRVLKSLFPSLVAKMAIESFHCDVCEFAKHHRTNLLASTKKSSKPFDLVHSDVWGPALINNIS

SEQ ID NO: 218127 - protein, 61 aa, Glycine max
  Clone ID: PAT_MRT3847_38998C.1.pep
SILYYLTYHCFYVLLFLLFCCLKYKQLGISLVNRIFFNNSCTLFTSNCNNLYLNIFIIKPS

SEQ ID NO: 218128 - protein, 55 aa, Glycine max
  Clone ID: PAT_MRT3847_38999C.1.pep
TINYKYNQISIVSLTSNSPSTFLPPCITTRDPRFNFTINIDSSSITHFFLPFLLI

SEQ ID NO: 218129 - protein, 67 aa, Glycine max
  unsure (1)..(67): unsure at all Xaa locations
  Clone ID: PAT_MRT3847_3899C.1.pep
HHATKPDTAAPPLXFYLSFXSFFFIGKVSNGIHFFEKGRNKFTLDKYSVFPTFTIYNSLLQELINWE

SEQ ID NO: 218130 - protein, 92 aa, Glycine max
  unsure (1)..(92): unsure at all Xaa locations
  Clone ID: PAT_MRT3847_389C.1.pep
XXPLXXXXXRGXXXFFSSXXCXXXRXRSSFLXXXFPSSXLFXXFFSGGGXXXPPPFPXXXCFPFSKKVNTLPPPHINSNNESLXXXXSFVPX

SEQ ID NO: 218131 - protein, 120 aa, Glycine max
  unsure (1)..(120): unsure at all Xaa locations
  Clone ID: PAT_MRT3847_38C.1.pep
DSAHEFDKPHFSGPGVKSSLASHNYHSLHDWYATYTRCNFCTFRKFADCDFLNRNFKQMSNVLWVAXPAVMASLWSQLGYASCNNLEXQEAYLANLVDVLRELYLHNSKEACHMRRDGLF

SEQ ID NO: 218132 - protein, 190 aa, Glycine max
  Clone ID: PAT_MRT3847_39000C.1.pep
MGRGLRRMKQRKETKSLDFDGGCEADEAKKTTNFAENNDDVAGGSSSSSDREGVRKKLGEKGKKDKEDVKEKEMLEGDLMDKKDDVQDENRGRKRKMFPKDDGESEADEGKTVIKFAEKNDDVAGSSSSAQEGGRKSKVDKEDVKKKKNKILEGNLLDKKDEKGGESGGERKRKKLKSDEGEIEVPVSTT

SEQ ID NO: 218133 - protein, 131 aa, Glycine max
  unsure (1)..(131): unsure at all Xaa locations
  Clone ID: PAT_MRT3847_39001C.1.pep
FKHTIINISIEPENHQLTNVLLHNLIYVVILTWIMISEDCITSLNNSEKSYQRCSKVVTAPQKLLKAVNPFCYSAQIMTRNYGKPRDKICSRKCVQGINDVAVTRTNVATVKXISDGTKEIHHLVITHTPL

SEQ ID NO: 218134 - protein, 45 aa, Glycine max
  Clone ID: PAT_MRT3847_39002C.1.pep
LLFSKAATIINTEYKRIKSPHFSSLVKVWLGITITYPFHPSVVFV

SEQ ID NO: 218135 - protein, 77 aa, Glycine max
  Clone ID: PAT_MRT3847_39003C.1.pep
VCVFFFFFFFLFFFFLLFFSLFSLKIFFFCSFHIDMGPEREGVYGCVLHWLKKGGGDLPAPLVGKNLFKKAGRGKGL

SEQ ID NO: 218136 - protein, 164 aa, Glycine max
  Clone ID: PAT_MRT3847_39004C.1.pep
FKHTIINISIEPENHQPTNVRLHNSIYFSMNLGGVKQVFVVILVWIMISEDCITSLNNSEKSYQRCSEVVTAPQKLLKAVNPFCYSAQIMTRNYGKPRDKICCRKCVQGINDVAVTRTNVAPVNSISDGTKEIHHLVITHTQLIFDDSLVLKNLNIAGATYQII

SEQ ID NO: 218137 - protein, 64 aa, Glycine max
  Clone ID: PAT_MRT3847_39005C.1.pep
KMKKPLKRETFLEEGSLVNGEREEGSAHEAANQRTPTKAKPMLCPKAESFHPLLPNPGNPKTRV

SEQ ID NO: 218138 - protein, 61 aa, Glycine max
  Clone ID: PAT_MRT3847_39006C.1.pep
SSRWRPKGTLEGITKRDPSTLITSSNHIINSTCETGFKKKKFFFGRRGMGHFPLISFLYAI

SEQ ID NO: 218139 - protein, 79 aa, Glycine max
  Clone ID: PAT_MRT3847_39007C.1.pep
SSQRIHGLMVVVMDKLNPYNVIWLKFHDLIWLMNHKKYVNAHMIIFAMIVFTIDMWSQELIVSANVCPRSRQRNRERKG

SEQ ID NO: 218140 - protein, 248 aa, Glycine max
  Clone ID: PAT_MRT3847_39008C.1.pep
LEPNRLEYGCGEDDRRGDFVKLSAASAVMLCLETWYFQVLVLITGLLDNPQLSLDSISVCMAITGLTMHIGIGFNAAASVRVGNELGAEHPKSAAFSVIVVNMISFIIAVIEAVVVLALRRVVSYAFTDGETVANAVSDLCPYLAVTLILNGIQPVLSGVAVGCGWQAIVAYVNVGCYYGIGIPLGCVLGFTFGLGVQGIWSGMIGGTMLQTLILLWITLRTDWNKEVNPAKKRLNKWGYKKEPKIQS

SEQ ID NO: 218141 - protein, 137 aa, Glycine max
  Clone ID: PAT_MRT3847_39009C.1.pep
IRLEDENPSTLIRTRTRNVSLKRKREHYVKILQDLTKHNDLIRGEIKNVKCHNEKLKEYNLKLKARKQERSHGPSQGGLVHKQPQQQFQFSGMAHHPPLILNQTAGPAQIRGGEGVVGPAHATTSLGSNDVGPIGNF

SEQ ID NO: 218142 - protein, 74 aa, Glycine max
  Clone ID: PAT_MRT3847_3900C.1.pep
MGGKGGSSDGGSGGGNAKSGGGGNSSKGGGSGGGSGGYMKAPGGDGSYISRGTFENNPQGYFSGLHGADKGNKK

SEQ ID NO: 218143 - protein, 94 aa, Glycine max
  Clone ID: PAT_MRT3847_39010C.1.pep
LFLLSFFSQTLYLHQPATPSSNYATQQATTNLHEFKLICTHHATAQALPATPTTPQPSHPNPKAKAALTMKTPTREVGLRARALALVMTEMSIH

SEQ ID NO: 218144 - protein, 45 aa, Glycine max
  Clone ID: PAT_MRT3847_39011C.1.pep
GLRFIHDVSMVGFFHMYSGLSVIKRGGEHGTHGRLSVATIYKLHS

SEQ ID NO: 218145 - protein, 44 aa, Glycine max
  Clone ID: PAT_MRT3847_39012C.1.pep
PLVSLACNIDPQLREGGQISKETDQQMRPHNPQHEFMTTINYNP

SEQ ID NO: 218146 - protein, 59 aa, Glycine max
  unsure (1)..(59): unsure at all Xaa locations
  Clone ID: PAT_MRT3847_39013C.1.pep
RRLCPSHSHQKNSSSPVIDTYVQKTWTQLWDEFCIHNLXLSITWCGFSEIYELQILVLF

SEQ ID NO: 218147 - protein, 52 aa, Glycine max
  Clone ID: PAT_MRT3847_39014C.1.pep
SHYTLDSHDIPPFNTTDYCMLTSILNNPFCSSISPYAILCYLSKGFARLLST

SEQ ID NO: 218148 - protein, 119 aa, Glycine max
  unsure (1)..(119): unsure at all Xaa locations
  Clone ID: PAT_MRT3847_39015C.1.pep
FKNGPHPSQALLHRLSGDYHPMQADPMGAKVAGFCRPRXPGLCTVVXPVRPISEGICIGDPYLVTSNAGRFLLHVNPGQSLVSQMWVXGSKVSLRTMLKERKRTVLCAYVDVRGLALTL

SEQ ID NO: 218149 - protein, 74 aa, Glycine max
  unsure (1)..(74): unsure at all Xaa locations
  Clone ID: PAT_MRT3847_39016C.1.pep
CVIVSCCNSFFFFWWSGVGVGFSLNLKWLGSGVTWGSGTSCSAGTACEAXKMYPDFSFTXSTTTETFVMGVAPV

SEQ ID NO: 218150 - protein, 88 aa, Glycine max
  unsure (1)..(88): unsure at all Xaa locations
  Clone ID: PAT_MRT3847_39017C.1.pep
CNHIYHTDCVGPWLGEHNXCAGCRVELPPYGQASSRGTYNWGGRNDNTTSSDGIRDSYRGTENTRLNHGWKNPLSVLWPFRSSNSNNN

SEQ ID NO: 218151 - protein, 39 aa, Glycine max
  Clone ID: PAT_MRT3847_39018C.1.pep
KGFSPRSRHCSSDLGNNRMDKHWRGSRCRFQRSQSSHAG

SEQ ID NO: 218152 - protein, 39 aa, Glycine max
  Clone ID: PAT_MRT3847_39019C.1.pep
PFNFFSILNGTRAHNLLKPLKKKQLMEVFYMICWHTFKT

SEQ ID NO: 218153 - protein, 124 aa, Glycine max
  Clone ID: PAT_MRT3847_3901C.1.pep
IPRKGGPEIRQVDILVIKKIAHGLLIGDNLKVRHRISLWIKDKGPLAFYQVKLKIEVQEMCIILSKVWKEAPKNKVFPISLKNGFMCVVYLLRMLSKNSRNMMFPTRIRVIMLCLLLNETLPSS

SEQ ID NO: 218154 - protein, 55 aa, Glycine max
  Clone ID: PAT_MRT3847_39020C.1.pep
KCSPVRGCPARKHVERAPDDPAMLIVTYEGEHRHPVQAPMQENPAGVVGLVFEST

SEQ ID NO: 218155 - protein, 74 aa, Glycine max
  unsure (1)..(74): unsure at all Xaa locations
  Clone ID: PAT_MRT3847_39021C.1.pep
VQNSKTIINKILIXKFSKSLMKNFNIGTXHNYKKIFQGFLNLKNFSLKENFEILKHKINFFCVFKPFRILIWEK

SEQ ID NO: 218156 - protein, 84 aa, Glycine max
  Clone ID: PAT_MRT3847_39022C.1.pep
GLGPFLGFYPTPLWMPPRVVCVWGPPFPPLPKLFFKKVVAPFFFVRGKTVSLPFFLKVPPVCFPFFWPPFFLFFNVFGPFRPNF

SEQ ID NO: 218157 - protein, 89 aa, Glycine max
  unsure (1)..(89): unsure at all Xaa locations
  Clone ID: PAT_MRT3847_39023C.1.pep
VTINEQFAASFKRIDEMKXRKVGSRVDIVREVTLFVFKIKMPSAVRVQLMNDLADIEYRLSFGCNDKLQLGSVIASFSRARSALVAAAT

SEQ ID NO: 218158 - protein, 309 aa, Glycine max
  Clone ID: PAT_MRT3847_39024C.1.pep
MMLSAKSESDITSLAPSSPSRSPKRPVYYVQSPSRDSHDGDKSSSMQATPISNSPMESPSHPSFGRHSRNSSASRFSGIFRSSSGRKGSRKRNDKGWPECDVILEEGSYHEFQDKGFTRRFQALIAVLTFVVVFTVFCLIIWGASRPYKAEIAVKSLTVHNFYVGEGSDFTGVLTKMLTVNGTLRMSIYNPATFFGIHVHSTPINLVFSEITVATGELKKHYQPRKSHRIVSVNLEGTKVPLYGAGSTITVSQTGVEVPLTLNFEIRSRGNVVGKLVKTRHRKEITCPLVLNSSRSKPIKFKKNSCTYD

SEQ ID NO: 218159 - protein, 48 aa, Glycine max
  Clone ID: PAT_MRT3847_39025C.1.pep
QGIFYFEIALFSGLRFSKSIKKTTVKHQTILQNQFNPNYNKFILLLKI

SEQ ID NO: 218160 - protein, 121 aa, Glycine max
  Clone ID: PAT_MRT3847_39026C.1.pep
GGRNTRFWDLFSWLIKSPKQEPSWCFRKEEAWGKRVEKKVVKGTATYWILEDKKTIATRQSKPMEEISSSVAVPFTLGVGNLIQKESAVTTHMEITGLKLMANTAAAGLMLNPAMECLKEN

SEQ ID NO: 218161 - protein, 81 aa, Glycine max
  Clone ID: PAT_MRT3847_39027C.1.pep
TPFLAKQNFREPANPGGRRGPIFKMGINWLTKPLVLEPISILPLNPPFVQGLAYKTHKFCCNIKNHRGDLRVSKIFIPKLR

SEQ ID NO: 218162 - protein, 68 aa, Glycine max
  Clone ID: PAT_MRT3847_39028C.1.pep
AIGSKRNERTIRGGVLVIHTAGKVPKKIRSGGTLVWLEKPPGGNFLPIVKEQVHFYFHNIKRILFLGN

SEQ ID NO: 218163 - protein, 84 aa, Glycine max
  Clone ID: PAT_MRT3847_39029C.1.pep
GGRNTRFWDLFSWLIKSPKQEPSWCFRKEEAWGKRVEKKVVKGTATYWILEDKTTIATRQSKPMEEISSRVAVPLHLVLEIDSK

SEQ ID NO: 218164 - protein, 82 aa, Glycine max
  Clone ID: PAT_MRT3847_3902C.1.pep
PPPHPPSPPPPPPPPPPSPPPSPPPPLLLLPPLPPPPPPPSPPTPHPPPSPSPTKTPPLPPPPSPPNPPPLPQSQTPQVLLF

SEQ ID NO: 218165 - protein, 65 aa, Glycine max
  Clone ID: PAT_MRT3847_39030C.1.pep
LLTCIKIIVLIILLCIIAPRLFGHPYNFFSSILAFLGWGSIVIVDPGWERLHPSIMHFFTFQLVS

SEQ ID NO: 218166 - protein, 39 aa, Glycine max
  Clone ID: PAT_MRT3847_39031C.1.pep
YFLRFFPSIMLIILASLIPSKSITIEYDSIYCVICLTVA

SEQ ID NO: 218167 - protein, 164 aa, Glycine max
  Clone ID: PAT_MRT3847_39032C.1.pep
MERCPEKSFEDGDQEIRLQDLKKISTTEADDNQSVNLVEVNGHCSNQVDFLRFEVSPYTGRIHLYTCILGTDKRPQPLHENFRSEELELLSSVADDEKQAHDEKQKTEFVTVKDNPAYRHALMAFAEEWKNLRSIERRKLLGKPLQLPLAVELCYLSVSNNHNN

SEQ ID NO: 218168 - protein, 116 aa, Glycine max
  unsure (1)..(116): unsure at all Xaa locations
  Clone ID: PAT_MRT3847_39033C.1.pep
DVIFPILGQQSQSIPSLEKQVWRKKIIWMTNSLGAIIHNRMIKTMILMQVKSQKKKKRKRFTLNKALWVVLMKTSSFNPAPSTTHQFRKKQAILSMGGVDXNQFVQPCKFNHSSNK

SEQ ID NO: 218169 - protein, 62 aa, Glycine max
  Clone ID: PAT_MRT3847_39034C.1.pep
MMTSNFWTISNELAPPQYQFNSVESFQQQSVDYNGSNDDHDGMDFWYDIFIKSGESIELPEF

SEQ ID NO: 218170 - protein, 50 aa, Glycine max
  Clone ID: PAT_MRT3847_39035C.1.pep
GMDIGIYVSAHWSIVCSSELRLCFLEGGDGSHSDHVGISYYLFMFSSVFV

SEQ ID NO: 218171 - protein, 414 aa, Glycine max
  Clone ID: PAT_MRT3847_39036C.1.pep
QIITVLLQSMKDVPNVAEKACGALYFLAQGYEDVGPTSPLTPLFQEIVQSLLTVTHREDATESRLRTAAYETLNEVVRCSTDETATLVVQLVSVIMMELHKCLEAQNLSSDEREKRSELIGLLCGCMQVIIQKLGSLDSTKYLLLQYSDQIMGQFFRVFACRNATAHEEAMLAIGALAYSIGQEFAKYMPEFYKFLEMDLQNFEEYQVCAVTVGVIGDICRALELKILPYCDGIMTQLLKNLSSDNLHRSVKPPLFSCIGDIALAIGDNFNKYLMYAMNTLQLAAEMYAHTSGFDDEMTEYINSLRNGILEAYSAIFQGFKNSSKTQLLIPYAPHILQFLDSIYMEKDMDDVVMKTAIGVLGDLADTLGSNAGSLIQQSLSSRDFLNECLTSEDHLIKESAEWARLAINRAISV

SEQ ID NO: 218172 - protein, 53 aa, Glycine max
  Clone ID: PAT_MRT3847_39037C.1.pep
KRGPKSFLFGTPIRDNVFSPPNVLLHLENQLMTGLTSRPRVNDPSLWFSLYVF

SEQ ID NO: 218173 - protein, 151 aa, Glycine max
  Clone ID: PAT_MRT3847_39038C.1.pep
MYQAELTSEQVLRRDIPWETYMSTKLISGTSLQLLRRYDHRPESHRAQLLDDDGPSYVRVFVRVLRDIFKEDTVEYVLALIDEMLAANPKRARLFHDSALADEDTYEPFLRLLWKGNWFIQEKRVKILCIYSNMFLLRILYINYSLSLLWR

SEQ ID NO: 218174 - protein, 338 aa, Glycine max
  Clone ID: PAT_MRT3847_39039C.1.pep
TRFGSSRPNDTVLLLINNFGGMSNFELEALTASTRRLLKKDWSIAPERLYVSAFETSLNAPGWSLSLLNVSGIERTTGTSVADLLKLLDSDTNASAWPRNGYREVQETSEELDRTDSKISPQATSQGSTVDPARLERALRSACSAAIAAEPQITKWDIEMGDGDCGEAVVGMCEGILRKLDNGLCQSGKIFHILDEIDEAVEEIGGTLGAIIAISVAAYATNLRQAAAAQGDGFDLDEKAAGQAAGKALRNLMGYTSARQGGRTVMDTLMPFCETFEKDSFEQAVKAAEEGAKSTGGMKAKFGRATYVGDKADVGDAPPDPGAMAAYYFLEGFLKGYA

SEQ ID NO: 218175 - protein, 67 aa, Glycine max
  Clone ID: PAT_MRT3847_3903C.1.pep
MTHNANFFKGKSYNKLILHNCHYKVSVTRKRNRFLKPFNDTKDMDTDRDDSKFINHYNYIKAPTLTT

SEQ ID NO: 218176 - protein, 172 aa, Glycine max
  Clone ID: PAT_MRT3847_39040C.1.pep
PAGATRTSELIYFPSPSYFCRSLCGKSKNSPNRGAKLQFLERTLRVLGFPHCHGPGRINLRTGSEEGHPMHKDPIFWRENINNFEENDFQILRVLLTILDTSSDPRTLAVACYDLSQFIQHHSAGRIIVSDLKAKERVMKLMNHENVEVTKNALLCIQRLFLGAKYASFLQV

SEQ ID NO: 218177 - protein, 452 aa, Glycine max
  Clone ID: PAT_MRT3847_39041C.1.pep
MDQAELTSEQVLRRDIPWETYMSTKLISGTSLQLLRRYDHRPESHRAQLLDDDGPSYVRVFVRVLRDIFKEDTVEYVLALIDEMLAANPKRARLFHDSALADEDTYEPFLRLLWKGNWFIQEKSCKILALIVSVRPKNQNGIVSNGEASNGKKPFTTIDDVLIGLVKWLCDQLKKPSHPIRGVPTAINCLATLLKEPVVRSSFVRADGVKLLVPLISPASTQQSIQLLYETCLCIWLLSYYEPAIEYLATSRTLPRLIDVVKSSTKEKVVRVVVLTLKNLMSKGTLGAQMVDLQLAQVVQSLKAQAWSDEDLLEALNSLEEGLKDNIKRLSSFDMYKQEVLLGHLDWSPMHKDPIFWRENINNFEENDFQILRVLITILDTSNDPRTLAVACYDLSQFIQCHSAGRIIVSDLKAKERVMKLMNHENAEVTKNALLCIQRLFLGAKYASFLQV

SEQ ID NO: 218178 - protein, 36 aa, Glycine max
  Clone ID: PAT_MRT3847_39042C.1.pep
EQAGKLQFNYVFRLRETLNCGMNEGPKERLLLLFSV

SEQ ID NO: 218179 - protein, 201 aa, Glycine max
  Clone ID: PAT_MRT3847_39043C.1.pep
MVSPSSTRPTTTATTTLVTPPSGFDNRSIERSIVLELALAAMDELVKMAQTDEPLWIRSLEGGREILNHDEYTRTITPCIGLRPNGFVTEASRQTGMVIINSLALVETLMDSNRWSEMFPCMIARTSTAEVISNGINGTRNGALQLHAEGLWAVVDVSIDTIRDTSGAPTFVNCRRLPSCCVVQDMPNGYSKVTWVEHAEY

SEQ ID NO: 218180 - protein, 48 aa, Glycine max
  unsure (1)..(48): unsure at all Xaa locations
  Clone ID: PAT_MRT3847_39044C.1.pep
GRCVFINLWTMSRHVFYNILAAVIMFYTILSSKRSCFFICQIKKLXRI

SEQ ID NO: 218181 - protein, 822 aa, Glycine max
  Clone ID: PAT_MRT3847_39045C.1.pep
MSFGGFLETKQSDGGGGRIVVSDIPYNSNNGSNHSNDIMPSGAISLPRLATPTLAKSMFNSPGLSLALQSDIDGQGDMNRLMPENFEQNGLRRSREEEHESRSGSDNMDGGSGDDFDAADNPPRKKRYHRHTPQQIQELESLFKECPHPDEKQRLELSRRLNLETRQVKFWFQNRRTQMKTQLERHENSLLRQENDKLRAENMSMREAMRNPICSNCGGPAMIGEISLEEQHLRIENARLKDELDRVCALAGKFLGRPISSLTGSIGPPMPNSSLELGVGSNGFGGLSTVPSTMPDFGVGISSPLAMVSPSSTRPTTTALVTPSGFDNRSIERSIVLELALAAMDELVKMAQTGEPLWMRSLEGGREILNNEEYTRTITPCIGLRPNGFVTEASRQTGMVIINSLALVETLMDSNRWSEMFPCMIARTSTTEVISSGINGTRNGALQLMHAELQVLSPLVPVREVNFLRFCKQHAEGLWAVVDVSIDTIRETSGAPTFVNCRRLPSGCVVQDMPNGYSKVTWVEHAEYDESQIHQLFRPLLSSGMGFGAQRWVTTLQRQCECLAILMSSAAPSREHSAISSGGRRSMLKLAHRMTNNFCSGVCASTVHKWNKLNAGNVGEDVRVMTRKSVDDPGEPPGIVLSAATSVWLPVSSQRLFDFLRDERLRSEWDILSNGGPMQEMAHIAKGQDHANCVSLLRASAINANQSSMLILQETCTDASGSLVVYAPVDIPAMHVVMNGGDSAYVALLPSGFAIVPDGSVEENGGASQQRAASGGCLLTVAFQILVNSLPTAKLTVESVETVNNLISCTVQKIKSALHCES

SEQ ID NO: 218182 - protein, 71 aa, Glycine max
  Clone ID: PAT_MRT3847_39046C.1.pep
SGFAIVPDGSGEEQGGASQQRAASGCLLTVAFQILVNSLPTAKLTVESVETVNNLISCTVQKIKSALHCES

SEQ ID NO: 218183 - protein, 171 aa, Glycine max
  unsure (1)..(171): unsure at all Xaa locations
  Clone ID: PAT_MRT3847_39047C.1.pep
MSFGGFLETKQSGGGGGRIVADIPYSNNSNNIMPSSAISQPRLATPTLVKSMFNSPGLSLALQSDIDGKRDVNRLMPENFEQNGLRRNREEEHESRSGSDNMDGGSGDDFDAADNPPRKKRYHRHTPQQIQELESLFKECPHPXDEKXRLELSRRLNLETRPVKXFWFQNR

SEQ ID NO: 218184 - protein, 123 aa, Glycine max
  Clone ID: PAT_MRT3847_39048C.1.pep
FRHMGLEILEEFRPITPIRTVVPTVRTTLKHDLGTTTTTTKEVLNEDVLIEEECHTPTSPSQKLSTNPLVCPPAPKKPRVVPRRHNLDPPSQQGFFKVPHDLASVFVLRTPNLPRRTAQQALF

SEQ ID NO: 218185 - protein, 101 aa, Glycine max
  Clone ID: PAT_MRT3847_39049C.1.pep
LQFWSWMEILISSSGCFKLLPRNQKEPLLRNQPPISFYEVDFFVFIISMLKLMWGTLIKEMIMFSLGGISEGQIRFGGRSFASPPFGSTLFSFIPVLGICM

SEQ ID NO: 218186 - protein, 57 aa, Glycine max
  Clone ID: PAT_MRT3847_3904C.1.pep
RANYHCITIQYITYIWMHYTVHSQRMHFHETVQHSKTLIYAENPQNRFLNAYSLKIT

SEQ ID NO: 218187 - protein, 108 aa, Glycine max
  unsure (1)..(108): unsure at all Xaa locations
  Clone ID: PAT_MRT3847_39050C.1.pep
MYCDSITQCTMQLAMDLTTGRIVEATTANWITLIQTHPHHDXNLADGGHRTKLNDREDWHDNATVKHXSXTINGTGATCIQSLDCTDGHIXAVTYKPSSGDIDHTYKS

SEQ ID NO: 218188 - protein, 112 aa, Glycine max
  Clone ID: PAT_MRT3847_39051C.1.pep
VFFFFFFFDKQILFFMGESQPNNKRGVAWVYTSYIRPFFLGGPQIKKFLKLSHTKDKFRGVNPFKITAWFGKNRSSFIDKDQNLKALEEIIIYALAEAAVGIYIKVYSKTFP

SEQ ID NO: 218189 - protein, 47 aa, Glycine max
  Clone ID: PAT_MRT3847_39052C.1.pep
PCGIVLPNNFSRKDPCYIVNNWFQADLNKLAARIFHFMGCLHIFCEH

SEQ ID NO: 218190 - protein, 77 aa, Glycine max
  Clone ID: PAT_MRT3847_39053C.1.pep
TTRTPTRTNASRLLVRASDEPAPAGPATDTPPAEAVAKPKPPPTGPKRGAKEKILRKECYWHKCTGSGGAGDHDPNT

SEQ ID NO: 218191 - protein, 98 aa, Glycine max
  Clone ID: PAT_MRT3847_39054C.1.pep
CSKCQKRSLNSQPKGSPRGGGGGSLPRRGGSTATRILYFEPILKKSRVLKITSKISHRFSQKNALCNNLMVVRVKGKFFYLPLGPFRGKGQNKNRSTK

SEQ ID NO: 218192 - protein, 69 aa, Glycine max
  Clone ID: PAT_MRT3847_39055C.1.pep
LQRLFLMQSLICLIYLRCFLFPIILGFNTLIQLLFIFCSESVNDRIINIYYQNTKGMNGLLTVTLLWNQ

SEQ ID NO: 218193 - protein, 60 aa, Glycine max
  Clone ID: PAT_MRT3847_39056C.1.pep
KRTLDRIRKKRKALSVLHRQIGLKKTDALRNRRDEVRLVLRVSNHVVRKTGGRKKTGLFV

SEQ ID NO: 218194 - protein, 70 aa, Glycine max
  Clone ID: PAT_MRT3847_39057C.1.pep
LGDVDDFKGARTPPLITLFKKETAKGGRNFHEWSGHQKFQNKKIWGGKMGFYCPLAGGGMPNHKIINMGG

SEQ ID NO: 218195 - protein, 122 aa, Glycine max
  Clone ID: PAT_MRT3847_39058C.1.pep
ALRKYGYLTQAISQYYKSEIFEDNVKGSGACPPFDEFIKRCQDLEKTTVSDVFAMQLMQVPQVTEEVAMAVLDLFPTLFSLARAYSLLDGDGCAQEEMLRRQSNSVINAVASRNIFQFVWGS

SEQ ID NO: 218196 - protein, 64 aa, Glycine max
  Clone ID: PAT_MRT3847_39059C.1.pep
AIIHSRISLSNGRNLGCSCNSQLGLRQGLVHSQEQATQCQLSFFIGRLLSVYIRESYDKIQSLR

SEQ ID NO: 218197 - protein, 83 aa, Glycine max
  Clone ID: PAT_MRT3847_3905C.1.pep
PRFGSDARGLSGMPTRRVPRSGAICSWGVVRILSAPRFLSFFCGPSSGNADLSAPVPNDATRSKVDEESQVYRQIWQCFSPIS

SEQ ID NO: 218198 - protein, 91 aa, Glycine max
  unsure (1)..(91): unsure at all Xaa locations
  Clone ID: PAT_MRT3847_39060C.1.pep
MKIVFATLLVCTLASNAPLSWMQTSPMKTLLIASTRCSDRCSSLGRKDKCLKNCAIIWADCKXIPSGDYENEDQCPCYRDELYKNGLAKWP

SEQ ID NO: 218199 - protein, 218 aa, Glycine max
  Clone ID: PAT_MRT3847_39061C.1.pep
MVQTRKFRGVRQRHWGSWVSEIRHPFLKRRVWLGTFETAEEAARAYDQAAILMSGRNAKTNFPILQTPEGDPKTTLTPIDHETSSSSTTTSKELEEILHAKLRKCGKLPSPSMTCLRLDPENSHIGVWQKRAGQRSDSNWVMMVPPLGKKGGANEGGTGGDASCSNSFPFSECDPTPQVARQELLRTEMDEEERIALQMIEELLSRNCPTSPSFNNLY

SEQ ID NO: 218200 - protein, 165 aa, Glycine max
  unsure (1)..(165): unsure at all Xaa locations
  Clone ID: PAT_MRT3847_39062C.1.pep
RLREDDRRGGSCSVDRLEVFEVGPCKDGYQVGLLIGQRFSETIRSRVASDLILQNQLRPFAHSPHSQSLLKPLFYNNQTKXKILLINLRKEILAFIQKEGAKSANSDTSDDCSDVLVVSESMAIAAHNEDISHFDPLLYIYSCRWTLFLSPMLRSITSHPLYCPY

SEQ ID NO: 218201 - protein, 61 aa, Glycine max
  Clone ID: PAT_MRT3847_39063C.1.pep
RNLLLLIIQENNVIKLTLTIYNHKLIQFRPYLTLLSCYHIIIQSPDYHYYSSITTTLNQFY

SEQ ID NO: 218202 - protein, 377 aa, Glycine max
  Clone ID: PAT_MRT3847_39064C.1.pep
RLLEDDGRGGRCSVDRLEVFEGGPCKDGYQMGLLIGQRFSETIRSRVASDLILQNQLRPFAHSPHSQSLIKPLFYNNQTKFPRYWDELLGTAAGSGVPFLDILLINLRKEILAFIQKEGAKSANSDTSDDCSDVLVVSESMAIAAHNEDANVALVGHTYIIKGILPDGLFFVGYTYAGELPSCAFGFNSHGLAFTLDSVPPAEDEIVAGGIGRNFISRDLLEATSMDDAMNRIKSSEISVGHSYNLFETSTRRIVNVETASRKRISVYEVGNTPFFHANMYLHLPINQVQDESSISRHKRAAVLTKESKGDFLSLLGDMDDKKHPIYMTGPLLHTLCTALIDLDKQTLSIIEGNPKKGDVSHVSLSPLKSHHDSKAA

SEQ ID NO: 218203 - protein, 78 aa, Glycine max
  Clone ID: PAT_MRT3847_39065C.1.pep
CQEKNVTTSSAPYAEALPSPSEEGSTEKDDQAAEETPAPRAPEPAPGNLIDLEEVESDEEPIANRWAPGITNRPLSRK

SEQ ID NO: 218204 - protein, 101 aa, Glycine max
  unsure (1)..(101): unsure at all Xaa locations
  Clone ID: PAT_MRT3847_39066C.1.pep
TNTLCTLTRMLDRVQIVVEALRTTGHTISATXKTVAGPSTQDWKGGSAAXLPVLPRCNGADNAVWTGLPALNANMTAMAFLVLIADVSSGDTTVRLANESS

SEQ ID NO: 218205 - protein, 309 aa, Glycine max
  Clone ID: PAT_MRT3847_39067C.1.pep
MPSSSTMPLSPDPPFLCADEAAIAGLLDAEPHHMPEKDYLRRCRDRSVDVTARLDAVNWILKVHAYYEFSPVTAFLSVNYFDRFLSRCSLPQQSGGWAFQLLSVACLSLAAKMEESHVPFLLDLQLFEPKFVFEPKTIQRMELWVMSNLKWRLRSVTPFDYLHYFISKLPSSSSSQSLNHFFSTSSNLILSTTRVINFLGFAPSTVAAAAVLCSANGQLPLSFHDIRDDEMVRCCHQLMEEYVVDTCPASIKVRITEAAAPSSPVGVLDAATCGSCDTPSERNFAGSAEEQAEPPNKRLRSSASDAPRR

SEQ ID NO: 218206 - protein, 142 aa, Glycine max
  unsure (1)..(142): unsure at all Xaa locations
  Clone ID: PAT_MRT3847_39068C.1.pep
MAPILFAAFVARLFLTLARTTNANYIYASPPPPKKVYYPPPVYHSPPPPKKSYYPPPVYHSPPPPKKVYYPPPVYSPPPPKKVYYPPPVYKSPPPPKKVYYPPXVYKYPSPPKKVYYPPPVYKSPPPPKKVYYPPAVYKYPP

SEQ ID NO: 218207 - protein, 104 aa, Glycine max
  Clone ID: PAT_MRT3847_39069C.1.pep
FLRCGSCLVLLLAQRKMLSKQAVQTKQMLSKQAVKIAKQAEEHERFINKVTHLAGVLGFGGFCFLLGARPQDIPYVYCLFYVIFVPLRWIYYRSKKWHYYLLVS

SEQ ID NO: 218208 - protein, 67 aa, Glycine max
  Clone ID: PAT_MRT3847_3906C.1.pep
PYLLSSQEIHYTSVRRQRRATVINLDCCVFDICFSSVACFSRDSLFHLPLFFFSDPRRVHFAFPRSL

SEQ ID NO: 218209 - protein, 186 aa, Glycine max
  unsure (1)..(186): unsure at all Xaa locations
  Clone ID: PAT_MRT3847_39070C.1.pep
ITLEVESSDTIDNVKAKIQDKEGIPPDQQRLIFAGKQLEDGRTLADYNIQKESTLHXLVAPCFVGGXCKSFVNEPFTGKDHAPLRWXXSDXPLTMSSAIDVKTKEGIPNPTQQKAEFFAGKQAWRMCRTLWPITNIQERVPPFHLVLXRLRGGMQIFVKTLTGKTITLEVESSDTIDNVKLRSRQE

SEQ ID NO: 218210 - protein, 98 aa, Glycine max
  Clone ID: PAT_MRT3847_39071C.1.pep
KVKPPKYVSENSISELDINDKCSFNRLIYLLMIIQKCQIPLIYVKLFNPSPLSTLTLLHPYLIQFQLLHHFGSHFSHTFTGSKTPSPSLNISSPKALL

SEQ ID NO: 218211 - protein, 54 aa, Glycine max
  Clone ID: PAT_MRT3847_39072C.1.pep
PHPLMETRRFFEDSKKNETKGGAVNVFLPAPPAVESTQHPRDLYAEYILHPLGR

SEQ ID NO: 218212 - protein, 71 aa, Glycine max
  Clone ID: PAT_MRT3847_39073C.1.pep
QILGLKEISGSAYGSSCFFPSSTRKIRGGFGGDGAFLTFLTVYESWEGRTARFTSILSTKNRSDDVLTVND

SEQ ID NO: 218213 - protein, 113 aa, Glycine max
  unsure (1)..(113): unsure at all Xaa locations
  Clone ID: PAT_MRT3847_39074C.1.pep
MDSKKSLHLRISLGDDSVGAGGKVNFSVTSYFANQLESLMKKCCPNEVDFVRSMIRCLRWSAQGGKSHVYLAKSXDERSIIKHVTKTELESSEELAPKYLKYLMDALNSGGPT

SEQ ID NO: 218214 - protein, 73 aa, Glycine max
  unsure (1)..(73): unsure at all Xaa locations
  Clone ID: PAT_MRT3847_39075C.1.pep
WVEYNRYMGCLTVPSCIAGEXVICYINKKISVVSRAQVKLLREAVHDHAEKNARPIQPINRRGIQLYAQKRKE

SEQ ID NO: 218215 - protein, 35 aa, Glycine max
  Clone ID: PAT_MRT3847_39076C.1.pep
SRSHSEFQARRQMDGNEQDVSLGSNKFPDRQPIGT

SEQ ID NO: 218216 - protein, 285 aa, Glycine max
  unsure (1)..(285): unsure at all Xaa locations
  Clone ID: PAT_MRT3847_39077C.1.pep
VPCYLQVSKEGTSPFTYIIVDNQTKTRTCIHTAGYPPMIPDELSKSSLLSALDGAKFAYFDGRLPDTALVVAQECXAVRKNIPILIDAERPREGLDDLLKLADYVVCSAKFPASWTKASTVPQALVSMLLRLPNIKFVIVTLGKDGCIMXERSVDGPSTEEVDVDSLLESLEIKRDKSVSIPTCISSSVAKLKAEGIGTVSGKLYVGTAESIPPSELVDTTGAGDAFIGAVIYAICAKFTPETMLSFAANVAGAKCRDLGARSGLPYRADPRIASFVLEKLSSSA

SEQ ID NO: 218217 - protein, 37 aa, Glycine max
  Clone ID: PAT_MRT3847_39078C.1.pep
KKSPTAECGAGTFMATPFVRHYCGKCGLPYVSQKAEA

SEQ ID NO: 218218 - protein, 59 aa, Glycine max
  Clone ID: PAT_MRT3847_39079C.1.pep
GQACLHSVSERFIWTGRILDRVQLGILDVGWDRELRQLHNSVGGSKTPCVKNAGEEKNN

SEQ ID NO: 218219 - protein, 54 aa, Glycine max
  Clone ID: PAT_MRT3847_3907C.1.pep
CDHSCECSQGHRFWLQPSLSCRLNLKYCFICTLESRPSGHKLQHIEVQTSFDSI

SEQ ID NO: 218220 - protein, 59 aa, Glycine max
  Clone ID: PAT_MRT3847_39080C.1.pep
EASLKVPSTCKHKSAGGTAVPCSSQHHSRSTVPSSLHSAQTVQSSVYSLIAARAISSLD

SEQ ID NO: 218221 - protein, 69 aa, Glycine max
  Clone ID: PAT_MRT3847_39081C.1.pep
KNHNPNLSKVKTLESFPKLCGNYITKSLQIEELLLITASSTLSRLFMLSEGFPISNSSANHVVCHEQDD

SEQ ID NO: 218222 - protein, 94 aa, Glycine max
  Clone ID: PAT_MRT3847_39082C.1.pep
MSCVAARTGRQRQRYEDNMRLVSGCIPYRWKKGKVDQMGDAEEIIEVLMISSPKRDDLVFPKGGWEDDETVTEAACREALEEAGVKGIVREIPL

SEQ ID NO: 218223 - protein, 122 aa, Glycine max
  Clone ID: PAT_MRT3847_39083C.1.pep
MERELWGSVFIYWVLLARPLWLVSANMEGDALHSLRTNLQDPNNVLQSWDPTLVNPCTWFHVTCHNDYSVIRVDLGNAVLSGPLVPQLGQLKNYRIWMVYFHPLILHILVFLFCIFMNLVCG

SEQ ID NO: 218224 - protein, 108 aa, Glycine max
  unsure (1)..(108): unsure at all Xaa locations
  Clone ID: PAT_MRT3847_39084C.1.pep
HLKSLKRITIGFLIVNLAMGSLMGPQXIPHAINLVLGVDSGCMVRVISGSSTYDETQCQNMMFIVNESDAYLLPMSHPEAXMSVKSRPLVFLGLSISSQNYHPPILAG

SEQ ID NO: 218225 - protein, 542 aa, Glycine max
  Clone ID: PAT_MRT3847_39085C.1.pep
FASLRRFRPSPTMGACFSATKVSGSNGNGVNVNKKRRGTTKKPKSETAKANPQRHKAASSRHVPCGKRTDFGYKKDFNQRYSLGKLLGHGQFGYTYVGIDKANGDRVAVKRLEKSKMVLPIAVDDVKREVKILKALTGHENVVQFYNAFEDDSYVYIVMELCEGGELLDRILAKKDSRYTERDAAVVVRQMLKVAAECHLHGLVHRDMKPENFLFKSTKEDSPLKATDFGLSDFIKPGKKFHDIVGSAYYVAPEVLKRKSGPQSDVWSIGVITYILLCGRRPFWDKTEDGIFKEVLRKKPDFRRKPWPTISNAAKDFVKKLLVKDPRARLTAAQALSHPWVREGGEALEIPIDISVLSNMRQFVKYSRFKQFALRALASTLNEEELADIKDQFDAIDVDKNGSISLEEMRQALAKDLPWKLKESRVLEILQAIDNNTDGLVDFREFVAATLHVHQLEEDSDKWQQLSQAAFEKFDLDKDGYITPEELRMHTCLRGSVDPLLEEADIDKDGKISLPEFRRLLRTASMGSQNVSSPSVHRRQRF

SEQ ID NO: 218226 - protein, 87 aa, Glycine max
  unsure (1)..(87): unsure at all Xaa locations
  Clone ID: PAT_MRT3847_39086C.1.pep
GEFKREMQRHSVAVRQFFHYKAQFVPFKNDALDKAXRDTAHXAISAIFSEDNNNNNKPSPAEYLNRRIQGFGNTNYEPSSEDKKSFI

SEQ ID NO: 218227 - protein, 258 aa, Glycine max
  Clone ID: PAT_MRT3847_39087C.1.pep
SSREDGIFKEVLRKKPDFHRKPWPTISNAAKDFLKRLLVKDPRARLTAAQGLSHPWVREGGEALEIPIDISVLSNMRQFVKYSRMKQFALRTLASTLNEEELADIKDQFDAIDVDKNGSISLEEMRQALAKDLPWKLKESRVLEILQAIDNNTDGLVDFREFVAATLHVHQLEEDSDKWQQLSQAAFEKFDLDKDGYITPEELRMHTCLRGSVDPLLEEADIDKDGKISLPEFRRLLRTASMGSQNVSSPSVHRRQRF

SEQ ID NO: 218228 - protein, 56 aa, Glycine max
  Clone ID: PAT_MRT3847_39088C.1.pep
IFHNKKALMHEKCIIRPSHFSLQLLLQIKTYHIILSKSTYPRVTSNANHQSHQPLP

SEQ ID NO: 218229 - protein, 46 aa, Glycine max
  Clone ID: PAT_MRT3847_39089C.1.pep
TRPHFLRVHALSLSTYSNLKSSGDNRRPLGLITMSGARELFLADRD

SEQ ID NO: 218230 - protein, 59 aa, Glycine max
  Clone ID: PAT_MRT3847_3908C.1.pep
KSQFRNSYQTLKYTSITLKYTTIASKYINFRFEISSEYDFLKPQNPKISSNCLCLIFTS

SEQ ID NO: 218231 - protein, 47 aa, Glycine max
  Clone ID: PAT_MRT3847_39090C.1.pep
PVDPLLKEADIDKDGKISLPEFRRLLRTASMSSKNVSSPSVHRRRRF

SEQ ID NO: 218232 - protein, 41 aa, Glycine max
  Clone ID: PAT_MRT3847_39091C.1.pep
LCTSTTRVYMMPLLSKPILLCCQERNCSIDNFALEMTKPIV

SEQ ID NO: 218233 - protein, 126 aa, Glycine max
  Clone ID: PAT_MRT3847_39092C.1.pep
LAESCFCVPELISSSFAGIRKDSRYTERDAAVVVRQMLKVAAECHLHGLVHRDMKPENFLFKSTKEDSPLKATDFGLSDFIKPGKKFHDIVGSAYYVAPEVLKRKSGPQSDVWSIGVITYILLCGR

SEQ ID NO: 218234 - protein, 60 aa, Glycine max
  Clone ID: PAT_MRT3847_39093C.1.pep
RKSLPWFGSRKKAVNNYAMKQKSRRAMAYWVGRDGSLRRTCRLNAAQLYLNACRNRQGAI

SEQ ID NO: 218235 - protein, 35 aa, Glycine max
  Clone ID: PAT_MRT3847_39094C.1.pep
CARFCASCFSHGPFLVQVFASVFTPHYIETDCTHT

SEQ ID NO: 218236 - protein, 63 aa, Glycine max
  unsure (1)..(63): unsure at all Xaa locations
  Clone ID: PAT_MRT3847_39095C.1.pep
PGKRMKTTRIYFRFLFLWSXFCCVDVQMCNQXRCGFNLDALLYXXRWSWYXXKMXXXIGLXWF

SEQ ID NO: 218237 - protein, 37 aa, Glycine max
  unsure (1)..(37): unsure at all Xaa locations
  Clone ID: PAT_MRT3847_39096C.1.pep
VNGLPLKPEEMAELLGCPLPPRKLKPXRYWYDKESXL

SEQ ID NO: 218238 - protein, 57 aa, Glycine max
  Clone ID: PAT_MRT3847_39097C.1.pep
RRIADTENGEACRPGESDLCTYGAHDYFLVAYFLRSDQVIMAPSCTVEMTTSFLIHR

SEQ ID NO: 218239 - protein, 142 aa, Glycine max
  Clone ID: PAT_MRT3847_39098C.1.pep
MGKEKTHINIVVTGHVDSGKTTTTGHLIYKLGGIDKRVIERFEKEAGEMNKRSFKYAWVLDKLKAERERGITIDIALWKFETTKYYCTVIDAPGHRDSIKNMTTGTFQADCADLIIDSTTGGYGTGLSKEGQTLEQPLVAFS

SEQ ID NO: 218240 - protein, 447 aa, Glycine max
  Clone ID: PAT_MRT3847_39099C.1.pep
MGKEKVHINIVVIGHVDSGKSTTTGHLIYKLGGIDKRVIERFEKEAAEMNKRSFKYAWVLDKLKAERERGITIDIALWKFETTKYYCTVIDAPGHRDFIKNMITGTSQADCAVLIIDSTTGGFEAGISKDGQTREHALLAFTLGVKQMICCCNKMDATTPKYSKARYDEIVKEVSSYLKKVGYNPDKIPFVPISGFEGDNMIERSTNLDWYKGPTLLEALDQINEPKRPSDKPLRLPLQDVYKIGGIGTVPVGRVETGVVKPGMVVTFGPTGLTTEVKSVEMHHEALTEALPGDNVGFNVKNVAVKDLKRGFVASNSKDDPAKEAANFTSQVIIMNHPGQIGNGYAPVLDCHTSHIAVKFSEILTKIDRRSGKELEKEPKFLKNGDAGMVKMVPTKPMVVETFSEYPPLGRFAVRDMRQTVAVGVIKSVEKKDPTGAKVTKAAAKKK

SEQ ID NO: 218241 - protein, 146 aa, Glycine max
  Clone ID: PAT_MRT3847_3909C.1.pep
LNKFKDSLTSSLVAQAIDSRKHEAQTRRLLTFFLWSCKNLSHRLEDKDYNHALRVFAEKKDYTAMDILMGDLKKEGRAMDAETFSLVAENLVKLGKEDEALGIFKNLDKYKCSIDEFTVTAIVNALCSKGHGKRAEGVVWHHNDKI

SEQ ID NO: 218242 - protein, 61 aa, Glycine max
  Clone ID: PAT_MRT3847_390C.1.pep
AKFSLSDGASCCPCELKSRCHMLKPPSVCSLLVPVWLMECCLAGVHFSAKKSAKQSPIGTI

SEQ ID NO: 218243 - protein, 447 aa, Glycine max
  Clone ID: PAT_MRT3847_39100C.1.pep
MGKEKTHINIVVIGHVDSGKSTTTGHLIYKLGGIDKRVIERFEKEAAEMNKRSFKYAWVLDKLKAERERGITIDIALWKFETTKYYCTVIDAPGHRDFIKNMITGTSQADCAVLIIDSTTGGFEAGISKDGQTREHALLAFTLGVKQMICCCNKMDATTPKYSKARYDEIVKEVSSYLKKVGYNPDKIPFVPISGFEGDNMIERSTNLDWYKGPTLLEALDQINEPKRPSDKPLRLPLQDVYKIGGIGTVPVGRVETGVVKPGMVVTFGPTGLTTEVKSVEMHHEALTEALPGDNVGFNVKNVAVKDLKRGFVASNSKDDPAKEAANFTSQVIIMNHPGQIGNGYAPVLDCHTSHIAVKFSEILTKIDRRSGKELEKEPKFLKNGDAGMVKMIPTKPMVVETFSEYPPLGRFAVRDMRQTVAVGVIKSVEKKDPTGAKVTKAAAKKK

SEQ ID NO: 218244 - protein, 345 aa, Glycine max
  unsure (1)..(345): unsure at all Xaa locations
  Clone ID: PAT_MRT3847_39101C.1.pep
TRPQVESLMPIMDMKVSNLFEEETPQIYTLCGRGPRSSLRILRTGLAVSEMAVSKLPGIPSAVWTVKKNVIDEFDAYIVVSFTNATLVLSIGETVEEVSDSGFLDTTPSLAVSLIGDDSLMQVHPNGIRHIREDGRINEWRTPGXTISKVGSNRLQVVIALSGGELIYFEVDVTGQLMEVEKHEMSGDVACLDIAPVPEGRQRSRFLAVGSYDKTIRILSLDPDDCMQALSVQSVSSAPESLLFLEVQASVGGEDGADHPASLFLNAGLQNGVMFRTVVDMVTGQLSDSRSRFLGLRAPKLFPIIVRGKRAMLCLSSRPWLGYIHQGHFLLTPLSYETLEYAASF

SEQ ID NO: 218245 - protein, 88 aa, Glycine max
  Clone ID: PAT_MRT3847_39102C.1.pep
ISQFFISYTIRTFGALTFAPIMPTRQLVSIMLSCVWFAHPLSWEQWIGAVIVFGSLYGKSFSRKMPQKTTPSIALVQNGDPNNLKDNL

SEQ ID NO: 218246 - protein, 64 aa, Glycine max
  Clone ID: PAT_MRT3847_39103C.1.pep
LILLDSNLVDYINLNLQHCERLAYSVSTSVKLIFSIFHVLLVYTPKHFNHSSKLRYTTKAVTAS

SEQ ID NO: 218247 - protein, 247 aa, Glycine max
  Clone ID: PAT_MRT3847_39104C.1.pep
MAEQNQNQTTEAGRHQEVGHKSLLQSDALYQYILETSVYPREPESMKELRELTAKHPWNIMTTSADEGQFLNMLLKLINAKNTMEIGVYTGYSLLATALALPEDGKILAMDINRENYELGLPVIKKAGVDHKIEFREGPALPVLDEMIKDEKNHGSYDFIFVDADKDNYLNYHKRLIELVKVGGVIGYDNTLWNGSVVAPPDAPLRKYVRYYRDFVLELNKALAVDPRIEICMLPVGDGITICRRIK

SEQ ID NO: 218248 - protein, 42 aa, Glycine max
  Clone ID: PAT_MRT3847_39105C.1.pep
LFPNHSGALYNYFIAINPVINKLASLHNRCRCHINLVISKLF

SEQ ID NO: 218249 - protein, 60 aa, Glycine max
  Clone ID: PAT_MRT3847_39106C.1.pep
SILGVRSCPLGVGGWPPSFCWLGACFCPVGRRPSLFEESSKIEQGKTKFLTEKKKNTNSK

SEQ ID NO: 218250 - protein, 134 aa, Glycine max
  unsure (1)..(134): unsure at all Xaa locations
  Clone ID: PAT_MRT3847_39107C.1.pep
MGNQSSLNKIETLPIDTPFKLPAXIPVRPQGGGFATGTIDIGRLEVFQISTVIKVCKTXEGGPGDARAAYFEPAGIPDGCFTLGHSSQRNSMPLLGSILVAGDETGLGDNRVALRKPIADTLVRFSTTLLIKQD

SEQ ID NO: 218251 - protein, 174 aa, Glycine max
  Clone ID: PAT_MRT3847_39108C.1.pep
MGRYSIPFMGVLLLFCLVSSSEAEYLKYKDPKAPLNVRISDLLKRMSLEEKIGQMTQIERSVATPDVMNKYFIGSVLSGGGSVPATKASAATWQQMVNQMQKAALSTRLGIPMIYGIDAVHGHNNVYNATVFPHNVGLGVTRDPVLIKKIGEATALEVRATGIPYVFAPCIAVC

SEQ ID NO: 218252 - protein, 188 aa, Glycine max
  Clone ID: PAT_MRT3847_39109C.1.pep
EERYKQEVQMKNILPAVADMFFLDGEENEKGASILCFAQFQTVDVFAIVALSGILSRLLSSGTIIVATSNRAPKDLNEAGMQKEIFQKLVSKLEEHCEKVLIGSEIDYRRFIAQKSENQAHLFWPIEKEAMNEFEKKWHDVTGRFGGRIISNTISVMFGRTLEVPQSFDGVARFTFEYLCGRPVRAAV

SEQ ID NO: 218253 - protein, 69 aa, Glycine max
  unsure (1)..(69): unsure at all Xaa locations
  Clone ID: PAT_MRT3847_3910C.1.pep
VQPDVSTRLNGTHIGQRQVHTSSHPGEVLKPKSYIAIIHEGMXMYPTSFMTGKLYIHFTVAFPYSHNSD

SEQ ID NO: 218254 - protein, 63 aa, Glycine max
  Clone ID: PAT_MRT3847_39110C.1.pep
CPLGVLNASPQHDSHSPFLNFYQRPISDIRNAVAKTDFDVSVESKNKVLTQLRYVTIAATHTF

SEQ ID NO: 218255 - protein, 607 aa, Glycine max
  Clone ID: PAT_MRT3847_39111C.1.pep
MSGPVTIADYSNGGALSCAERTKSVDAIPELDHLSILTNGEIDGFSVGQLLLFNGESYSGSLYGNVSEGHGTYVWCDGCVYEGEWRRGMRNGYGKLRWPSGAVYEGDFSGGYIHGTGTYIRSDKLKYKGRWRLNLKHGLGFQVYPNGDTFEGSWMQGTQEGPGKYTWTNGNVYVGNMKGGIMSGKGTLTWINGDSYEGNWLNGMMHGFGVYTWSDGGCYVGTWTLGLKDGKGTFYPRGSCLPSAQEIYLNALRKRGLLPDLRKQKQIHIHHAASVDMGDVKVGESQRSNRVSSDKLAKGNLLNLEQSRSKNISLERRWSLEVSIEKVIGHDSRLGSTDSVAENGDKVPILEREYMQGVLISELVLNNSFSSMSRRAKQLQKKLAKEIKRPGEAIIKGHRSYDLMLSLQLGIRYTVGKITPIQRREVRASDFGPRASFWMNFPKEGSQLTPPHQSEGFKWKDYCPMVFRNLRDVLVPRGGDDDSVVVGSHMRGSRLRASSAGDEEVDLLLPGTARLQIQLGVNMPSRAEQISGKQKQEKQMFHEVYDVVLYLGIIDILQDYNMTKRIEHAYKSLQFDSLSISAVDPTFYSHRFLEFIQKVFPPNATTG

SEQ ID NO: 218256 - protein, 119 aa, Glycine max
  Clone ID: PAT_MRT3847_39112C.1.pep
KKKICGHLSPWFWEPGKTLTLPKARALGKTPRKKPPFYRFLPQPPRKTKKNPPGKGAPLNFFSGAKSLFFSPPGPIKNFFFFGTKRLIKISPFPKESGLTIRGAPFTEAAENFFKKSFW

SEQ ID NO: 218257 - protein, 169 aa, Glycine max
  Clone ID: PAT_MRT3847_39113C.1.pep
MDWFSWLSKTGLEPTLVYEYGLTFAHNELEEEDITYFNHEFLMSMGISIAKHRLEILKLARKVKGKRAAPPRPVARLMVAIKRTKRCLANYIRSFISTCEEESSALVVVPSSSSRSYYGTRWKSNHVMKRNKKMVVAKQERLLLTNGSPNTVVHGLDAFTSPNIVYHFQ

SEQ ID NO: 218258 - protein, 96 aa, Glycine max
  Clone ID: PAT_MRT3847_39114C.1.pep
QGKIGATNQAGQRAFGGGLRKQKLGFFSISEFPNREKGKKQRPNLKSERNYLPKGGGPGFKNFGRAEILGKARVLIYPLKFFTPGEKAIRVNGGFF

SEQ ID NO: 218259 - protein, 186 aa, Glycine max
  Clone ID: PAT_MRT3847_39115C.1.pep
IKERSGFGSPRIMNPHAPEFIPRSASQIEAKDANSNVSNEHNPLSDEGMPEKNKLDENFVEIKGSSTKNSISESEKSEIARQILLSFLVKSVKENIDYVDESKDDEGKIENLESCSDEITKDRAVINIMYGNEEKNKTVPHSSDSVEPEKLGVTENKNGDGEGFIVVSLIISPKTKWNGWTKNSIF

SEQ ID NO: 218260 - protein, 89 aa, Glycine max
  Clone ID: PAT_MRT3847_39116C.1.pep
QAILPGGPQILLYLLPEKKNSYLYGPWKNNNLADFEIATQCISPTTDNDQYMTNVMLTITAKLGNLISLLDVEHSPSTPIVSKGPTLLL

SEQ ID NO: 218261 - protein, 59 aa, Glycine max
  Clone ID: PAT_MRT3847_39117C.1.pep
VLDKGQLAAVAEATVVSTSMMEGGRCMHDDKLRRIRAMHSTLAFFNSYFTTLSDILIHS

SEQ ID NO: 218262 - protein, 91 aa, Glycine max
  Clone ID: PAT_MRT3847_39118C.1.pep
GHTLYLPVKKTKKFSQILNINDHNTTQLTYLNLKQSNLISPIISLTTPTLPNLTTPFPNLNQSSFLIQIATAPLPSSVTHLIRIIIPYHLH

SEQ ID NO: 218263 - protein, 246 aa, Glycine max
  Clone ID: PAT_MRT3847_39119C.1.pep
ILEEKGVEGKFDLGGWREEINVQKHKFPLGYKTFQDAISPQHAIEVLDELTNGDAIVSTGVGQHQMWAAQFYKYKRPRQWLTSGGLGAMGFGLPAAIGAAVANPGAVVVDIDGDGSFIMNVQELATIRVENLPVKILLLNNQHLGMVVQWEDRFYKSNRAHTYLGDPSSESEIFPNMLKFADACGIPAARVTKKEELRAAIQRMLDTPGPYLLDVIVPHQEHVLPMIPSNGSFKDVITEGDGRTRY

SEQ ID NO: 218264 - protein, 132 aa, Glycine max
  Clone ID: PAT_MRT3847_3911C.1.pep
MGTTKMPTMNPDSFKFIEAIIILMVCLMMMMMLQVVCAEEEIMCIEREREALLLFKAALVDDYGMLSSWTTADCCRWEGIRCSNLTDHILMLDLHSIYSYLVIPQRRDPHVVNGVATIKLFKPDLSDSGSEG

SEQ ID NO: 218265 - protein, 454 aa, Glycine max
  Clone ID: PAT_MRT3847_39120C.1.pep
ITKHNYLILDVDDIPRIVAEAFFVATSGRPGPVLIDIPKDVQQQLAVPNWDEPINLPGYLARLPRPPTEAQLEHIVRLITEAQKPVLYVGGGSLNSSDELRRFVELTGIPVASTLMGLGTYPIGDEYSLQMLGMHGTVYANYAVDNSDLLLAFGVRFDDRVTGKLEAFASRAKIVHIDIDSAEIGKNKQAHVSVCADLKLALQGINMILEKKRVGGGKLDLGGWREEINVQKHKFPLGYKTFQDAISPQHAIEVLDELTNGDAIVSTGVGQHQMWAAQFYKYKRPRQWLTSGGLGAMGFGLPAAIGAAVANPGAVVVDIDGDGSFIMNVQELATIRVENLPVKILLLNNQHLGMVVQWEDRFYKSNRAHTYLGDPSSENEIFPNMLKFADACGIPAARVTKKEELRAEIQKMLDTPGPYLLDVIVPHQEHVLPMIPSNGSFKDVITEGDGRTRY

SEQ ID NO: 218266 - protein, 48 aa, Glycine max
  Clone ID: PAT_MRT3847_39121C.1.pep
ERESISYRNSHATPFTVCLRAAYFSVANRGRERKEGACFVPNRTEEMT

SEQ ID NO: 218267 - protein, 39 aa, Glycine max
  Clone ID: PAT_MRT3847_39122C.1.pep
ARFFFFFLGFEQKKLFVIAKRKLIFGVPEGIMSPPHQNN

SEQ ID NO: 218268 - protein, 74 aa, Glycine max
  unsure (1)..(74): unsure at all Xaa locations
  Clone ID: PAT_MRT3847_39123C.1.pep
KKIEKKAKFLKXGEGGFXKMIPTXPRGVGAFXGYPXXGRXXVRDMGXXXXVGVIKXVEKKGPXGAKVXXXXQKK

SEQ ID NO: 218269 - protein, 102 aa, Glycine max
  unsure (1)..(102): unsure at all Xaa locations
  Clone ID: PAT_MRT3847_39124C.1.pep
VLPRGQNARQLSIWKGLLYGFMRLYLLRYKSLRGASLSLSGTHFXRAVNLSSSLQIQEVACTRDIYAXPLHHEDTATXGVVAPSEAAPIIAALSKIDLNLTY

SEQ ID NO: 218270 - protein, 110 aa, Glycine max
  Clone ID: PAT_MRT3847_39125C.1.pep
KGLLDRSCSLSNGSLHSPKQPTTTKSNFLKHRKELVVTVKAPHDFRERWKTGSGSFVQNSSTLGKNLYSISICQADTVNLTDTNFLLFLSNNHLRNNHLPLITFQITQPT

SEQ ID NO: 218271 - protein, 65 aa, Glycine max
  Clone ID: PAT_MRT3847_39126C.1.pep
KPYALCQIKLQKYCSLRKYIFGPQRRKSSISFPLLQSFKLAICFCIFILQPYKSTALLKTYILVP

SEQ ID NO: 218272 - protein, 75 aa, Glycine max
  Clone ID: PAT_MRT3847_39127C.1.pep
MSYIKIASASGFSDINLIIIKATAPDDLPLHEKYIQHLLKLFSISPSTCHSFAISFTRRFGTTRCWRVALKCLIL

SEQ ID NO: 218273 - protein, 73 aa, Glycine max
  Clone ID: PAT_MRT3847_39128C.1.pep
RRNHRSFMQGPVPKPQKVFGKAPKQTPQILSNRHFLRSLFCSPAPLTPGLNPLNLVPVTALWCVSHRKNLPGF

SEQ ID NO: 218274 - protein, 388 aa, Glycine max
  unsure (1)..(388): unsure at all Xaa locations
  Clone ID: PAT_MRT3847_39129C.1.pep
MALASSVVELQASSVKKKTAVSRSWILLDHYGKGTVLDADKYAIMRLVQIHARDLRILDPLLSYPSTILGREKVIVLNLEHIKAIITADEVLLIDIKDDDVVTIVEELRXRFPKECAAEQGQGKEEAWAQDGEGGEENEFPFEIRALEVLFEAICSFLDARTRELETSAYPALDELTSKISSRNLDRVRKLKCAMTRLTIRVQKIRDELENLLDDDDDMADLYLSRKLAASSSPTSSSDAPYWLYGSPNTGSKRHKSSRASGTTVQRENDVEELEMLLEAYFMQIDGTLNKLATLREYIDDTEDYINIQLDNHRNQLIQLELFISAGTVCMSLYSLVAAIFGMNIPYTWKAPGHEHVFKWVVIFGGMVCASLFLSIVSYARRKGLVGS

SEQ ID NO: 218275 - protein, 179 aa, Glycine max
  unsure (1)..(179): unsure at all Xaa locations
  Clone ID: PAT_MRT3847_3912C.1.pep
PDICKDTSSVWTCPSDTVFYDASVXWGLIGPRRIFGDLGTYEKVNWFFLGGAIAPLLVWLAARSFPQQEWIRLINMPVLIGATGMMPPATAVNYTSWIIAGFLSGFVVFRYKPEWWKRHNYVLSGALDAGLAFMGVLLYLCLGLEDISLNWWGNDLDGCTLAHCPTAKVVEVQGCAVFT

SEQ ID NO: 218276 - protein, 211 aa, Glycine max
  Clone ID: PAT_MRT3847_39130C.1.pep
MALAGSVVELQASSVKKKTAVSRSWILLDHYGKGTVLDADKYAIMRLVQIHARDLRILDPLLSYPSTILGREKVIVLNLEHIKAIITADEVLLRDPTDDDVVPIVEELRRRLPKVSAAEQGQGEEEACAQDGEGGEENVFASVAIMENWLLWLVEFPFEIRALEVLFEAICSFLDARTRELETSAYPALDELTSKISSRNLDRVRKLKCAM

SEQ ID NO: 218277 - protein, 58 aa, Glycine max
  Clone ID: PAT_MRT3847_39131C.1.pep
WFWNYKIKIIELNKLLGVINVHLHNLSSVEQVRTSVWRMMMVVKGHIHRFISRGFICL

SEQ ID NO: 218278 - protein, 157 aa, Glycine max
  unsure (1)..(157): unsure at all Xaa locations
  Clone ID: PAT_MRT3847_39132C.1.pep
SKRPKSSRVSGTTVQRENDVEELEMLLEAYFMQIDGTLNKLATLREYIDDTEDYINIQNLNTPLIAXQLFVTCRTCMQLDNHRNQLIQLELFISAGTVCMSLYSLVAAIFGMNIPYTWKAPGHEHVFKWVVIFGGMVCASLFLSIVSYARRKGLVGS

SEQ ID NO: 218279 - protein, 31 aa, Glycine max
  Clone ID: PAT_MRT3847_39133C.1.pep
LVPSGKSFVPPKIRSYSSLNFIFFCVFFAFY

SEQ ID NO: 218280 - protein, 87 aa, Glycine max
  unsure (1)..(87): unsure at all Xaa locations
  Clone ID: PAT_MRT3847_39134C.1.pep
TNTIVLNVQFISGRDDSTGHRALANMVAPFTGLKSVGGFTRSKTTNASTLLDSNGMKRTXSMLEWPPIDNKKTETTLYXLPNLIDAQ

SEQ ID NO: 218281 - protein, 114 aa, Glycine max
  Clone ID: PAT_MRT3847_39135C.1.pep
VRNPRVRNLSHNSVSYCIVRELRTRILTHNTSHSERGIRTRMSDIAMLVAEEYERRVKSLRKAGGGGTGAGEFDMVSCVSVMVSRLKEKKQLLQWVWEPKTQVAMAASNSFFSA

SEQ ID NO: 218282 - protein, 39 aa, Glycine max
  Clone ID: PAT_MRT3847_39136C.1.pep
RKKKEQNAEKKKSYRTKVEKEVTFCGMVKEEGFKILLCF

SEQ ID NO: 218283 - protein, 137 aa, Glycine max
  unsure (1)..(137): unsure at all Xaa locations
  Clone ID: PAT_MRT3847_39137C.1.pep
ITSDCGAVSIIHDEQGYAKTAEDAIADVFRAGMDVECGDYITKHGKSAVSQKKLPISQIDRALQNLFSIRIRLGLLDGNPTKLPFGTIGPDQVCSKQSXQLALEATGDGIILLKNTNSLPPTSKNKXTIALIGPNAN

SEQ ID NO: 218284 - protein, 28 aa, Glycine max
  Clone ID: PAT_MRT3847_39138C.1.pep
VLIWALITPVALTKTYLDQLQLSGVLTN

SEQ ID NO: 218285 - protein, 41 aa, Glycine max
  unsure (1)..(41): unsure at all Xaa locations
  Clone ID: PAT_MRT3847_39139C.1.pep
MISTLQTILPDSDCAINGHLSXVVLTFHLLKDFPTIISNNI

SEQ ID NO: 218286 - protein, 53 aa, Glycine max
  unsure (1)..(53): unsure at all Xaa locations
  Clone ID: PAT_MRT3847_3913C.1.pep
GANVFDSYRQDSERVKTCXYPSTFKIVVPIMFPYRGKETKTKTISNNKLSHGF

SEQ ID NO: 218287 - protein, 283 aa, Glycine max
  Clone ID: PAT_MRT3847_39140C.1.pep
MSMQREKMAKKSIGSLMRKKLSDITNNTNPPLSQQQLDTTLPSDNNFIQQLLKERTALIQLLAERNKIIEASGVELRRLRADVTKLQIQNWNLAQSNSHMLAELNMGRERIKTLQHEILWRAALIKGKNVDVQEKVEIDCEKNPTLSQLPEASEKAGVPSPKASNDEQHKCMNRRRIRSKSTGSSTASKNTNKDKVKDNRRRLRRHSTTFKTHEHEPLENLFELEDATYLVTQSPTSKTERGKSSASRNEATRCSFERPLRRAVQKVHSYKEIPVNVKMRRLD

SEQ ID NO: 218288 - protein, 98 aa, Glycine max
  unsure (1)..(98): unsure at all Xaa locations
  Clone ID: PAT_MRT3847_39141C.1.pep
LGLGGAGPSGAVGRSSAGVGLGGRARRVASCGCARCLGARVPPLGGVVFGLAPSLPPPPAXALLFGGFALVSLVCVFFFVFXXLFWGFPAPFGPLPPA

SEQ ID NO: 218289 - protein, 63 aa, Glycine max
  Clone ID: PAT_MRT3847_39142C.1.pep
MTNASLDLFLPLFFATGCTLNLRQRCHRVSSALEKLSRWRFRTLISSQRGEGTRRGKRRGRGS

SEQ ID NO: 218290 - protein, 56 aa, Glycine max
  Clone ID: PAT_MRT3847_39143C.1.pep
CRRGFSNISPSVLCTVLVPCPHPVFDERPQPNAPQLNGHPFSPLFNLNQELSEASA

SEQ ID NO: 218291 - protein, 98 aa, Glycine max
  Clone ID: PAT_MRT3847_39144C.1.pep
HASDGWRRRQKGTAARRRQKGTAARRRQKGTAARRRQKGTAARRRQKDTAARRRQKGNKKNFVPHCPEALRYAKVWGRDIVRSLTLAYAKRLFPDSNP

SEQ ID NO: 218292 - protein, 54 aa, Glycine max
  Clone ID: PAT_MRT3847_39145C.1.pep
GSIRKLGTIKTMEHLFIIYCFFSFFFSSFFFIISLFFSFFLFFYISFFFFSDAW

SEQ ID NO: 218293 - protein, 65 aa, Glycine max
  Clone ID: PAT_MRT3847_39146C.1.pep
NMEHNHKQPITKIHYNHTSQNSLTHTCYTNPTSIHPLNKYSNSTTHWANKTLLFEIKGITKANKH

SEQ ID NO: 218294 - protein, 53 aa, Glycine max
  unsure (1)..(53): unsure at all Xaa locations
  Clone ID: PAT_MRT3847_39147C.1.pep
MRTLGPSLGSLAQSTWSLLSNALAGDHKSLKYLFDQKELNMRQXRWMEFLKDY

SEQ ID NO: 218295 - protein, 123 aa, Glycine max
  Clone ID: PAT_MRT3847_39148C.1.pep
LISPRIFIFASALVVTCTDSSSLPAGLRSAGQMHASFTTDGKHIISVSEDSHVCIWNYTGQDRSTSKAKKIWSSESFLSHNAAIAVPWCGIESMPGTLLSPSLGEDVNQKCSLPSPDWFFLSR

SEQ ID NO: 218296 - protein, 62 aa, Glycine max
  Clone ID: PAT_MRT3847_39149C.1.pep
DYLNLSNSIQSFYIKLLSHDNISPTTHHYLMPFKNMPKLFLNNFQQFITLNSFQTTQHVFIQ

SEQ ID NO: 218297 - protein, 276 aa, Glycine max
  Clone ID: PAT_MRT3847_3914C.1.pep
ASTRKMGSFIGHILPGTLFLLVGTWHIWGSVMRYVSNPKTFRVQVWNPVPGFNGRLKHLELYVISIGAFIDLCVELLLATRLRFFVGGALNTTYFNNFEHSGMLLMFLIFGVVALLSEKTRRLPLPENALCLIAAAAFCAEYLLFYFHSTTHKGLEGYYHVLLAFLIGLCIISSVSGALLPTSFPVDLCNGIAIALQGIWFYQTAFVLYGPMLPSGCKLRDSNITCHPKESEVRGELFANAQLFVAVLAVLVGTVASYGFAASRYGNCEELASNAS

SEQ ID NO: 218298 - protein, 116 aa, Glycine max
  Clone ID: PAT_MRT3847_39150C.1.pep
QTAPAKTDTMRGPSHGGTSNDMVINYPALTDLIQMSNERKDIIRYEMYDQKVEIYNEQVRDLLAEDMTDIGVEIRSCNEDWLRLTDAILHTEKSATDAMTLIKLGEDNPAARITAK

SEQ ID NO: 218299 - protein, 140 aa, Glycine max
  Clone ID: PAT_MRT3847_39151C.1.pep
LGSIVAFLLLAFVNAFPGSAIGLSAGVGVGNALVVEIVNTFGLVDTVYAPSGDPKKGHFGNNASIALGFNGGANHLVGWAFFGTTINPSFTIWPAVVNWTLAHPWDFLAGPFHGRGNAGAIYKVVFTAHPDSSSLTLEGK

SEQ ID NO: 218300 - protein, 73 aa, Glycine max
  Clone ID: PAT_MRT3847_39152C.1.pep
LLISRSSNRCRTIGRQRKCSLCNLMLVPCGAALDLLVNYRVPSLCRQIAKIGLKLGMGEIKVATCIGSFHQVS

SEQ ID NO: 218301 - protein, 58 aa, Glycine max
  Clone ID: PAT_MRT3847_39153C.1.pep
LHMITKRERKKDYEMMDMKKEKKRCRSEKIMIDYYFQSMYRACLQNEISRFRKLLKLN

SEQ ID NO: 218302 - protein, 121 aa, Glycine max
  unsure (1)..(121): unsure at all Xaa locations
  Clone ID: PAT_MRT3847_39154C.1.pep
MYLDFLSFSISFFRVNYTSSPCNMPMCKFFLSFLQAFSQMRLSEASAHLGSFSARIKEEPIYLQENVGREAQIGASWISSTASTAADAVLSTCPSPYXKRCLLQLLAATDFGDGDITAGHA

SEQ ID NO: 218303 - protein, 81 aa, Glycine max
  Clone ID: PAT_MRT3847_39155C.1.pep
GSSLCLYLHHSSLMALLQTVKAIVHSPNGFSYLSLRKKVLTTFAEKNIPSNPHLICLRNQPGWCQCVNPKANGPLILIYFR

SEQ ID NO: 218304 - protein, 149 aa, Glycine max
  Clone ID: PAT_MRT3847_39156C.1.pep
HFGCINVPSDSHEGPASLSKMVAVLCEQQLFLPLLRAFEMFLPSCPLLPFIRALQAFSQMRLSEASAHLGSFSARIKEEPFYLQANVGREAQIGASWISSTASTAADAVLSTCASPYEKRCLLQLLAATDFGDGGHTAAHYRRFYWKII

SEQ ID NO: 218305 - protein, 71 aa, Glycine max
  Clone ID: PAT_MRT3847_39157C.1.pep
LFPRMVKRGHGMFYSPPAFSQYPPPMFLFRSEGPQSDTFANEHSLGGVSKTYPQFSWPSMTPSPQHDAPIF

SEQ ID NO: 218306 - protein, 120 aa, Glycine max
  unsure (1)..(120): unsure at all Xaa locations
  Clone ID: PAT_MRT3847_39158C.1.pep
IVSNEPFALAIHERVDWWDRYVVICPENGTDTLVRXEILGDERDDTDKCAXATYCRLGMRYKAFEGQPPLLEGAVPTTNIVTPGCNSATGSTTAGAGRTVRAFTSTLRCAAPALGPSHGG

SEQ ID NO: 218307 - protein, 68 aa, Glycine max
  Clone ID: PAT_MRT3847_39159C.1.pep
MASEAPSWADQWGAGGIGAMEADDTISQKETGKNKSSGSKGAFGKVKATASNCVKWLKSLCKRKSTTK

SEQ ID NO: 218308 - protein, 71 aa, Glycine max
  unsure (1)..(71): unsure at all Xaa locations
  Clone ID: PAT_MRT3847_3915C.1.pep
DFIQFDVGKVVMVTGGRNRGGVXVIQNREEPKGSFQTIHVQEAPGTEFATRKGQVVPNGQGAKPWISPPQG

SEQ ID NO: 218309 - protein, 183 aa, Glycine max
  unsure (1)..(183): unsure at all Xaa locations
  Clone ID: PAT_MRT3847_39160C.1.pep
TXNKPLGNSKFLXEGIGKYWXEGYWQGKKNSXELXPXXKNLGFGAXKXKPSNIWQXXPKXLGNSPAQGIXPVQXXILXTXQTXNLLGYYGMGFGFTGKSFLXPLPFVGFXPLFXXXXXXXFFXXXKFXYLTPXSFPFXGINYFPXFPFPXXPXXPXFXVFXXPXXXTQIXPPXIPFFNFFXKF

SEQ ID NO: 218310 - protein, 152 aa, Glycine max
  Clone ID: PAT_MRT3847_39161C.1.pep
MREPRDGANNKPSKAAAAAAASPPQSFPLILDVDDFKGDFSFDALFGNLVNELLPTFKLEESESDGGDALPNGHLRVPSTDGSKYSQGIVSPLFPEVEKLLSLFKDSCKELLELRKQIDGRLYNLKKDVSVQDSKHRKTLAELEKGVDGLFD

SEQ ID NO: 218311 - protein, 125 aa, Glycine max
  Clone ID: PAT_MRT3847_39162C.1.pep
ECYSSDPDRNKTPERRTRCNSETKKPSKIQERGSQNRNLHHHYHGDDDEEAPAHDGGDGGLPEGLMIEILVWIRVSNPLQLRCVCKRWKSLVVDPQFVKKHLHTSLSDITDLASNAMEDMNAFQL

SEQ ID NO: 218312 - protein, 172 aa, Glycine max
  unsure (1)..(172): unsure at all Xaa locations
  Clone ID: PAT_MRT3847_39163C.1.pep
PPPPISPPPPQGPPXPPPQPLVNPPQAPKPAVSPPQQSPPPPLKPQGKPFFCAPPRPPPIGPRGGPXTPKGPPLPPGSSKKPVSPWAPTKRPPAHPITPPPAPGXEPPLPPPKEIISQVAPPPVYPMPKPYPCMIIPDLKILSGIPPPPGMSFPPLPPNCFLIKQNPWLPPP

SEQ ID NO: 218313 - protein, 215 aa, Glycine max
  Clone ID: PAT_MRT3847_39164C.1.pep
PHPRRPFISRAFGERTRLRSVHSRASAFHVPLARKLKSRKQSPLPALKNWVDEGNDVSHSELRRIARTLVKSKCYHHALVVVKWIENQKNFHMIPADYAMKLELIIENYDLMEAEEYFMNLPDSAAKKAACLTLLRGYIRVRDTNKAETFMVKLYELGLVLSPHPFNEMMKLYLATCEYRKVPLVIQQMKRNKVPCNVLSYNLWMNACTEEEGYG

SEQ ID NO: 218314 - protein, 33 aa, Glycine max
  Clone ID: PAT_MRT3847_39165C.1.pep
SYIRLATLTLWNLLKYSHSQSIVDASVDTQTLV

SEQ ID NO: 218315 - protein, 137 aa, Glycine max
  Clone ID: PAT_MRT3847_39166C.1.pep
SCNSVQAPHQRVNERQQNYDQFLFHGETEMLLDMEDEDLRAAIAASLMDSSPVVTNAEASTPQNDNQSSKQVATTEATPLNDQHSKQVEPIEATPPLNAQSNKHLPATEAGSPLNDQNSKEVASTIGDNAQDDNQKK

SEQ ID NO: 218316 - protein, 99 aa, Glycine max
  Clone ID: PAT_MRT3847_39167C.1.pep
MPNPKGFFDMTIGGQSGGRIGMELFPDVNSRTGQNFRALCTRQKGVRRNGKPLHFKGLFLHRVIPSFMCQGGDFTGGNRTRGESIYCAQVADQNSVKKH

SEQ ID NO: 218317 - protein, 85 aa, Glycine max
  Clone ID: PAT_MRT3847_39168C.1.pep
KRSLLLKFLAEIAPYLDGFLKNNEIVSLVQNGPCQKTEPLGPFFCPFLFIVKSGPSLFTIEPGRNMGPENYLFFFPKNPFLNFFA

SEQ ID NO: 218318 - protein, 374 aa, Glycine max
  unsure (1)..(374): unsure at all Xaa locations
  Clone ID: PAT_MRT3847_39169C.1.pep
IAPQRSHRLSQAPVADEALLVPDDLMFNDTRTAQEPLSSMTTIPVAHGPKGRPCGTDVPTSHRVQTPPTESLFPKHKQSPIVQRVRQILTVADNLTSRSSVFEASLRATLARLSTTLSFSAFGSSLDQHQAINSSVDGEPSYGGRAALDMATLRLVDVPEKARKLFNLLIYEDWDPXVAHPVASQRVAAFTDTVYELVYDVLISKVRQRLSDVSRLPIWSSVEEQGSFPLPTFSAYPQSYVTSVGEYLLTLPQQLEPLAEGISNNEVNDEAQFFATEWMFKVAEGATALYIEQLRGIQYISDRGAQQLSVDIEYLSNVLSALSMPIPPVLATFQSCLSTPRNQLKDLLKTDSGNQLDMPTANLVCKMRRVNLDS

SEQ ID NO: 218319 - protein, 69 aa, Glycine max
  Clone ID: PAT_MRT3847_3916C.1.pep
IRHEVHRSLFNTYSCYIFYSLLYFICAHIHRSLSYTLYLGHPCGVMAIYEYHLFIFTLSRELFSLFLFC

SEQ ID NO: 218320 - protein, 141 aa, Glycine max
  unsure (1)..(141): unsure at all Xaa locations
  Clone ID: PAT_MRT3847_39170C.1.pep
KVQEFVVSYKLVYREENMNLSVFYDAALVLVAWPCHGAGYQRFPLRMKTVYGERSSEVKCASFKLAVHAHTIRAFNPIPENALDPPKDYINCXPFKSDFXTLKPHAILYANERXVHHNDIFIFGIYNTVLSNIPYYEKHGY

SEQ ID NO: 218321 - protein, 46 aa, Glycine max
  Clone ID: PAT_MRT3847_39171C.1.pep
SYLIPLISLAVANFNNFSMASANVDFLGFVGGLPWATGNNPPKKPF

SEQ ID NO: 218322 - protein, 54 aa, Glycine max
  Clone ID: PAT_MRT3847_39172C.1.pep
RGERGYVPVLREIEGGESGWDMAERYLCTREYLLELFKADIPKPKFLVSFGSPI

SEQ ID NO: 218323 - protein, 80 aa, Glycine max
  Clone ID: PAT_MRT3847_39173C.1.pep
KKGPKATPLWGGLSGVLGGQNPPLRALFFQGKFSGGPQALSGPQFLSYEMPGVFPKLKGFPPKWDGGSFFFKGMPPPALF

SEQ ID NO: 218324 - protein, 78 aa, Glycine max
  Clone ID: PAT_MRT3847_39174C.1.pep
AVLLIPIRRKASSHCPIYSLNTSVSGLSGVMDFNRYLYSTIFLVMEASCNLYLRRNYDLFPKQFSSERGKNTQNETCL

SEQ ID NO: 218325 - protein, 46 aa, Glycine max
  Clone ID: PAT_MRT3847_39175C.1.pep
PNCDVDDGSCVVGMDASQFLIVLIMMICMLYMIVLMHHVRPVFSLN

SEQ ID NO: 218326 - protein, 54 aa, Glycine max
  Clone ID: PAT_MRT3847_39176C.1.pep
KGVNQGSRKKKRRVKLGLPSEAGGNKVVGLWNWNLVNGFVASATHIPFYFIPFP

SEQ ID NO: 218327 - protein, 50 aa, Glycine max
  unsure (1)..(50): unsure at all Xaa locations
  Clone ID: PAT_MRT3847_39177C.1.pep
LSLSXXXXXXQPLSHTPXKPTXLSXXKNFLVPGYSXRTXPGXAXPXIFXL

SEQ ID NO: 218328 - protein, 43 aa, Glycine max
  Clone ID: PAT_MRT3847_39178C.1.pep
ETFMDYHINWVRTGKCRASESVALRVLIELRRTVLRGGPCPSS

SEQ ID NO: 218329 - protein, 196 aa, Glycine max
  unsure (1)..(196): unsure at all Xaa locations
  Clone ID: PAT_MRT3847_39179C.1.pep
MEFWGVEVKNGESLKVDPGDDKIIHLSNACMGDVTKDIGXWTSSPEFELSHNWKYGSVFFTGFKAQPQSESDDDEDSDDIDEDIPVSAVNGKPEVGVKPDANEAKQKKIADPRKRDANGEDDDSSESDSDDDSSEDKPTANGDIESSERDDDSDDDEEEEGDDESDEETAKKIEASNKRGIESSKKTPVPVKKTKF

SEQ ID NO: 218330 - protein, 247 aa, Glycine max
  unsure (1)..(247): unsure at all Xaa locations
  Clone ID: PAT_MRT3847_3917C.1.pep
MFRFSCFHANVQGNKAKKTVQPSSEAMVKGLQDVTENHGCKDSSNLPCAYSSPSKEQAHKQINVMENHSNWDSVGRSCRSEDLNSKFSFENDNNVHQTRHIKKSQSLQSGLDQGIREADEDLGLSCDGAKSQNESTISISRRYHDANPIDQYGNNPNVEFQVSSGLANDGSLFSIGDPMPSDKDAHEISDTPLSVEFAGDIPDQTFVPGSLFLRKSRSLPNIRASIXSSERDAFKHALSRSSDDLHA

SEQ ID NO: 218331 - protein, 288 aa, Glycine max
  Clone ID: PAT_MRT3847_39180C.1.pep
MEFWGVEVKSGESLKVDPGDDKIIHLSNACLGDVTKDKEGLPVALYVKFGNQKLVLGTLSSEAFPQISYDLVFEKEFELSHNWKHGSVFFTGFKAQSQSESDNDEDSDDFDEDIPVSAANGKPEIEVKNGIKPDANEAKQKKIANGEDEDSSESESDDDSSEDQLTANGDIESSEGDDDSDDEEEGDDESDEETPKKIEASNKRGIDSSKKTPVPVKKTKFVTPQKTDSKNVVHVATPHPSKQTGKATANNKQQTPKSGGDYSCKPCNRSFKTEDALSSHNKAKHSTK

SEQ ID NO: 218332 - protein, 90 aa, Glycine max
  unsure (1)..(90): unsure at all Xaa locations
  Clone ID: PAT_MRT3847_39181C.1.pep
PRGELVITFGGFRTKNPIRRFFGQENCRVGFSGHLLKFLKGRGKQSKVRVKTKEQGLGHRREPEIXPPVAETKTRKAPPRAAKKAPPKET

SEQ ID NO: 218333 - protein, 179 aa, Glycine max
  unsure (1)..(179): unsure at all Xaa locations
  Clone ID: PAT_MRT3847_39182C.1.pep
MLDITENSVMKMKALVVFVATHSGSXQCHANDMSPLRKITGYGGRSQXVKRAGXRIAGEAHNIFGFDTISGECGAATKEYLHSRTYTSDSQTISQGAYFYARDLEPHSKDTFLFSVYSNGLYYIPFYKKHGYWEEKHNSALDNXWANKGNVPALTETLKIYNKLAVLGFKNIFLSGRTL

SEQ ID NO: 218334 - protein, 116 aa, Glycine max
  unsure (1)..(116): unsure at all Xaa locations
  Clone ID: PAT_MRT3847_39183C.1.pep
MFVTSLGETSPVSIVGWAPNQSADTTICLIVKAYEDANDYGFHKAINKCVNTNDSRSSAFVLXTNKSFSVLLTIYETLMTDXYNIRNMNMLSRKELMEAGGMIHQIFLTGPCAGEI

SEQ ID NO: 218335 - protein, 214 aa, Glycine max
  Clone ID: PAT_MRT3847_39184C.1.pep
MGFTSTSEKEEMFMADAERAKELKAFDDTKLGVKGLVDAGITKIPRIFYHPSDNFKRVSEFGHEDYTIPVIDLARIHEDHSVRKRVVERVKEASETWGFFQIVNHGIPVSTLEEMSDGVLRFFEQDSEVKKEFYTRDQRPFMYNSNFNLYTKAPTSWKDSFFCDLAPIAPKPENFPSVCRCMFQSGHQFSLNYLSFMIRTCVISALGLRVHINS

SEQ ID NO: 218336 - protein, 87 aa, Glycine max
  Clone ID: PAT_MRT3847_39185C.1.pep
LPPKNTHQTPIPTKPPNTLPASNHKTPPTNPRPPRNLTNPPTSTKPTCNHTTPLKPLPIYPPNHYHEAPPRNKAITKPLSKRLKCGK

SEQ ID NO: 218337 - protein, 36 aa, Glycine max
  Clone ID: PAT_MRT3847_39186C.1.pep
RELSKMQQIDDNLQLLYETTSSPSAHLRYTLLQGFI

SEQ ID NO: 218338 - protein, 43 aa, Glycine max
  Clone ID: PAT_MRT3847_39187C.1.pep
WGINNANYHMLTKRAYIRLLSNLIAPLPNKTLSTFTFYNYNKT

SEQ ID NO: 218339 - protein, 78 aa, Glycine max
  Clone ID: PAT_MRT3847_39188C.1.pep
LFSHTTCMTLLLLLILLLHAAEAKGQWQVLYKIICTVAMYILLLHNDRVIIFYRSDFGLSNLTLHAEICRNEAYELLV

SEQ ID NO: 218340 - protein, 52 aa, Glycine max
  Clone ID: PAT_MRT3847_39189C.1.pep
PQFFLGRPLGFSTYQGKTFDLPLGSLEAYARFFLLPQGRGGGDPLLSFVMTL

SEQ ID NO: 218341 - protein, 681 aa, Glycine max
  Clone ID: PAT_MRT3847_3918C.1.pep
MFRFSCFHANAQGNKAKKTVQPSTEAMEKGLQDGTQNHGCKESSNPPRTYSSPSKEQAHKQINITENHISNWDSVECSCRSEDLNSKFSFENESNVHQTRRIRKSQSLQSGLDQGIREGDEDLGLSCDGAKSQNESTISIRRYHNPNVEFQVCSGLLNDVSLFSIGDPMPSDKDAHEISDTPLSVEFAGDIPDQTFVPGSLFLRKSRSLPNIRASILSSERDAFKHALSRSSDDLHALRMWQKEEFINEFDDQIRADQERENDMGKPEDGRMDNFFDDGFDSYLLSGSAENWVMPITDDSSDVKTLQGDSSVHCVGEFPKKDFKIKRIEDWVVGLQHCGPPLEETNEDLSEVIEPLVDVNTVNGVTAASVNHKVTPGMEAAKRYISSLSANATAAQLGNHGLVVIPFLSAFVSLKVLNLAGNAIVRITAGALPRGLHALNLSRNKISTIEGLRELTRLRVLDLSYNRILRIGHGLASCSSLKELYLAGNKISEVEGLHRLLKLSILDLRFNKISTAKCLGQLAANYNTLQAINLDGNPAQKNKNVGDEHMKKYLQGLLPHLVYYNRQPMKVSSLKDGAERSVRLGMNSHQFDRGLRADRKTTRKGSQGVAATRRPSITSTHARRSVDSPKLSKGKQPLLPPTRTKVSTQSRYHFDAPDKALNLVSELSMRKSRSEGNFGVL

SEQ ID NO: 218342 - protein, 95 aa, Glycine max
  Clone ID: PAT_MRT3847_39190C.1.pep
RRTRPPEGGAENSPAQQRKKPFPGKKGKRGKKEKKKKTGRGKKKTGGPKGKNQPPKTGKGKPPPPKGGNLAPRVPEGKRHPPGREKSPSPPEGSP

SEQ ID NO: 218343 - protein, 87 aa, Glycine max
  Clone ID: PAT_MRT3847_39191C.1.pep
SILIFILVVFLKIEAFLLYHIVSPSYIYCLDTIAWILTLVELFFLFTLRTYPSGPKHFLMSITNPCGFSRAAKGPPRMGWAQNLNSR

SEQ ID NO: 218344 - protein, 77 aa, Glycine max
  Clone ID: PAT_MRT3847_39192C.1.pep
ICIRRCRPHHLLSLGPKRFDLCSTRLSTSLVSARPTSCHHSSLPTGIARIGGQHSPRRRSLSASAEIAQNLLLVPRA

SEQ ID NO: 218345 - protein, 73 aa, Glycine max
  Clone ID: PAT_MRT3847_39193C.1.pep
SQALRTALSEPLGPYSLDFLRASIGYSSSLVRPMRPLAHYPRRFSRLSPSPSHVSCLAPAYAVAHQPIPTWIP

SEQ ID NO: 218346 - protein, 51 aa, Glycine max
  Clone ID: PAT_MRT3847_39194C.1.pep
MQILIFNGKRVVWSGAGYMLEGRMQGVKSQRRGVVYFKYIKVFDGSVSHKL

SEQ ID NO: 218347 - protein, 48 aa, Glycine max
  unsure (1)..(48): unsure at all Xaa locations
  Clone ID: PAT_MRT3847_39195C.1.pep
SXAXLFXAAMXCCIRVAKLFXXXFXXLSTXQDKXXXXLEPEFRAYDSX

SEQ ID NO: 218348 - protein, 53 aa, Glycine max
  Clone ID: PAT_MRT3847_39196C.1.pep
ELGWCAKLVNSTWYWFLSSSYLLGVFEGVLTKLILNEIGFAKLILVQIDFEVT

SEQ ID NO: 218349 - protein, 96 aa, Glycine max
  unsure (1)..(96): unsure at all Xaa locations
  Clone ID: PAT_MRT3847_39197C.1.pep
CIEALSVLKAVLKLKSSSRVIDHFAHLYIIFKPKQCIVFGSLFNRHEICYHVLGLIHGICTPITGSVKDYMSIPYTNXGFHSIQTNVIPFVYDSMF

SEQ ID NO: 218350 - protein, 126 aa, Glycine max
  Clone ID: PAT_MRT3847_39198C.1.pep
DSDMAYLRFSHAAPQPHLTLGFPSPPQFLSIAAPKFSPSSSTIRCKGFSRLIVNQRLVTVFATNPNSVGEKSPTEGSDVNETSNAAQGPPLLTILAGFFVLFVVCWSIWSIITWLISLIVNVPAPK

SEQ ID NO: 218351 - protein, 108 aa, Glycine max
  unsure (1)..(108): unsure at all Xaa locations
  Clone ID: PAT_MRT3847_39199C.1.pep
HAESARAGSRVEQLHRLFTYCGSPPGECWNXSKLPPATLLKPEQPYDSCLRQAFNDSPTTSVHXLQTLISAEPYKLGTAASALSXECCKTNLYACDPSSMAVYPPSKE

SEQ ID NO: 218352 - protein, 75 aa, Glycine max
  Clone ID: PAT_MRT3847_3919C.1.pep
FDNITKTSTMQAAIVRIHARSLLACLDGCVLLHPFEHLTIFEECVALHKLLRENERDYSIVISCGCSVCMLLLIG

SEQ ID NO: 218353 - protein, 76 aa, Glycine max
  Clone ID: PAT_MRT3847_391C.1.pep
LVELYFNLICYFGLFLLYINHIDSYNFVSYEIVKLFDFLHKWSNAVYPLKYYSYLGKEYFHPKEFNHIWLKKHISV

SEQ ID NO: 218354 - protein, 47 aa, Glycine max
  Clone ID: PAT_MRT3847_39200C.1.pep
RLSIPTAHSEESQLLYNTLRVMIILYVSNIETEGLYTILILNHVTLV

SEQ ID NO: 218355 - protein, 464 aa, Glycine max
  unsure (1)..(464): unsure at all Xaa locations
  Clone ID: PAT_MRT3847_39201C.1.pep
MERARLNMRGHCSGSTPSEESALDLERNCCSHSNLPSLSPPTLQPFASAGQHCESSAAYFSWPSRLNDAAEERANYFLNLQKGVLPETLGRLPKGHQATTLLELMTIRAFHSKILRCYSLGTAIGFRIRRGVLTDIPAILVFVSRKVHKQWLSPIQCLPTALEGPGGVWCDVDVVEFSYFGAPEPVSKEQLYTEIVDDLRGGDPCIGSGSQVASQETYGTLGAIVKSQTGSRQVGFLTNRHVAVDLDYPNQKMFHPLPPTLGPGVYLGAVERATSFITDELWYGIFAGINPETFVRADGAFIPFADDFDMSTVTTSVRGVGDIGDVKIIDLQAPISSLIGKQVVKVGRSSGLTTGVVLAYALEYNDEKGICFLTDLLVVGENQQTFDLEGDSGSLIMLKGDNGEKPRPIGIIWGGTANRSPLKLKVGQPPXNWTSGVDLGRLLNLLELDLITTDERLQVAVQEQ

SEQ ID NO: 218356 - protein, 48 aa, Glycine max
  unsure (1)..(48): unsure at all Xaa locations
  Clone ID: PAT_MRT3847_39202C.1.pep
HYSILIXNGLSVHINKHQNAVTRPXXSSXAXSSXTGXRVKXTXXXXIA

SEQ ID NO: 218357 - protein, 637 aa, Glycine max
  Clone ID: PAT_MRT3847_39203C.1.pep
MAFWRSLVAFSAVLLLLIHGSHCFYLPGVAPQDFQKGDSLQVKVNKLTSTKTQLPYSYYSLPYCAPSKIQDSAENLGEVLRGDRIENSLYVFKMREPQMCNILCNLKLDAKTAKEFKEKISDEYRVNMILDNLPLVFPLKRTDQDSTAYQLGFLVGLKGQYSGSKEEKYFIYNHLAFTVKYHKDMLTESARIVGFEVTPFSVKHEYEGKFDVRTTRLTTCDPHAKHTVVNSNSPQEVEEGKEIIFTYDVEFQESDVKWASRWDAYLLMNDDQIHWFSIVNSLMIVLFLSGMVAMIMLRTLYRDIAKYNELETQEEAQEETGWKLVHGDVFRPPNNSDLLCVYVGTGVQFFGMILVTMIFAVLGFLSPSNRGGLMTAMLLLWVFMGIFAGYSSTRLYKMFKGSEWKRVALRTATMFPAVVSAIFFVLNALIWGQKSSGAVPFGTMFALIFLWFGISVPLVFVGSYVGFKKPAIENPVKTNKIPRQIPEQAWYMNPVFSVLIGGILPFGAVFIELFFILTSIWLNQFYYIFGFLFLVFIILIVTCAEITVVLCYFQLCSEDYLWWWRSYLTSGSSALYLFLYATFYFFTKLEITKLVSAIFYFGYMLIASYAFFVVTGTIGFYACFWFTRLIYSSVKID

SEQ ID NO: 218358 - protein, 77 aa, Glycine max
  Clone ID: PAT_MRT3847_39204C.1.pep
RRMYQRGPFLQFCWYTSQYRFLSSYCYLHSFRLTPLHWSIRFSLRSQRLVRVIYNSVPCPVCTALVRVAQTASNLLI

SEQ ID NO: 218359 - protein, 59 aa, Glycine max
  Clone ID: PAT_MRT3847_39205C.1.pep
KSLYVTNSIFLFPLPLLIPIIITSIKPLTSHLFTPFYNLIKLYLFIHIKSSNNSSLLII

SEQ ID NO: 218360 - protein, 63 aa, Glycine max
  Clone ID: PAT_MRT3847_39206C.1.pep
SVVWAGCSSRRHFSMLLSAWADMWRICVNELYKSENIESEVRIVNNMYQEAIEWKMKRVKIDD

SEQ ID NO: 218361 - protein, 235 aa, Glycine max
  Clone ID: PAT_MRT3847_39207C.1.pep
MHQPLDPQDEHGHVLDRTNMKAIMMTMIVAAIDTSATAIEWAMSELLKHPRVMKKLQDELESVVGMNRKVEESDMEKLPYLDLVVKETLRLYPVAPLLVPRECREEITIDGYCIKERSRIIVNAWAIGRDPKVWSDNAEVFYPERFANSNVDMRGYDFRLLPFGSGRRGCPGIHLGLTTVKIVLAQLVHCFNWELPLGMSPDDLDMTEKFGLTIPRSNHLLAVPTYRLAGEVGKE

SEQ ID NO: 218362 - protein, 69 aa, Glycine max
  Clone ID: PAT_MRT3847_39208C.1.pep
VGHSKDARNKLKSLLVGELEGYKSSGAKDEVSSSTTSSSASSGSSVMPIIVGIVGVVIAVGFYFSKIAQ

SEQ ID NO: 218363 - protein, 45 aa, Glycine max
  unsure (1)..(45): unsure at all Xaa locations
  Clone ID: PAT_MRT3847_39209C.1.pep
XXNXPXMRXCXHAXVSSHRPTXMGIQLSISMLHSSRXSMLIDILQ

SEQ ID NO: 218364 - protein, 53 aa, Glycine max
  Clone ID: PAT_MRT3847_3920C.1.pep
VSSMFSTFIMSIVCSKGSIAYTAVSIISHQYGLWSCICVETSGEHACGMSNFW

SEQ ID NO: 218365 - protein, 71 aa, Glycine max
  unsure (1)..(71): unsure at all Xaa locations
  Clone ID: PAT_MRT3847_39210C.1.pep
ESFLSRNNIAFTDGLDXTYATLSFTKLGESDCLKASLNHMSNGEGAASENKAGLWCHIHSGPCNNLEMHEA

SEQ ID NO: 218366 - protein, 91 aa, Glycine max
  Clone ID: PAT_MRT3847_39211C.1.pep
MTQKQRDRVPDSMETQYEESEKDESSSVYSSSEDEEEEEIEKGLADVTFEELQKARSNGTHAFFQKPKEDKKLKRANKNRPMEASSKKPVS

SEQ ID NO: 218367 - protein, 129 aa, Glycine max
  Clone ID: PAT_MRT3847_39212C.1.pep
PKKRSRASRRAPTTVLTTGTGNFRGVGEEFTGIPAPPFTSSSSSFPRTRLDLFATSNASSSSIIREQTPYLLRPFAHKVQAQVPSSIPPPSSFQPMLNNYHHHHHQHNPILSFQSILQPHQLIGSKTQQ

SEQ ID NO: 218368 - protein, 86 aa, Glycine max
  Clone ID: PAT_MRT3847_39213C.1.pep
PTSWLAGRARTLVVRRVWPKVCEGGHQRPIWVHWQQSLRQLKHGRNPKSECVIRYLVDGGFLSMWAFSVTVFQWRGSRLFRGVLVF

SEQ ID NO: 218369 - protein, 121 aa, Glycine max
  unsure (1)..(121): unsure at all Xaa locations
  Clone ID: PAT_MRT3847_39214C.1.pep
QKRGLGENQKKPPLFKSPMEGDQGKKFCSQIKEIKEAGVKAFPQKGSPPPKISNLAFKGPPKFKKELFPFKYWPLTYQKSLCKHALKKKIGEGGVNFPPPKKKKKKKKKKKKKKKKKKKXX

SEQ ID NO: 218370 - protein, 78 aa, Glycine max
  Clone ID: PAT_MRT3847_39215C.1.pep
LFFFFFVGDFNEIFSLVRTTNVFITTFFKREFFKNHTLFRVGKTTKYKKLLLSHPLSSFLGKKLLLCSGFRWGLGSHD

SEQ ID NO: 218371 - protein, 112 aa, Glycine max
  unsure (1)..(112): unsure at all Xaa locations
  Clone ID: PAT_MRT3847_39216C.1.pep
KCSVPNRFSAMLLTLPPMLSDKMMPLSIAVFPQTAPLAFIFDFHVGFSGSVGTXGVXVRXGGGGGGXAIVTVRPKEGKDGLRVLYSFGVWRREMVPRAVCSPGSVSGYEQGD

SEQ ID NO: 218372 - protein, 208 aa, Glycine max
  Clone ID: PAT_MRT3847_39217C.1.pep
LTSFFCRDTIQVSVLFNSLGSSSASTVPVAEYFPVQEETRLLVVDIKLDVLCYSSRELPLKYAVSNLIIPGLVDQLNVVQKLMLPNLLAQHPRLKSYHFSPPGILHPITVFYELSFGETEMKQVEVRRSLHSRLGLPYDRPLLRISNALDFSKLKNNDMVSLQKGSTLLRDVHIGIPSSGVTGGTVSLVQGSYEYFHYLHNGYNDSGW

SEQ ID NO: 218373 - protein, 68 aa, Glycine max
  Clone ID: PAT_MRT3847_39218C.1.pep
FTSYYLQFELIALRGEGSKVLTESLTVNSLMTNSCLCHLMRTYEVRSNNISVAISYNCCSDYCCLASI

SEQ ID NO: 218374 - protein, 103 aa, Glycine max
  Clone ID: PAT_MRT3847_39219C.1.pep
FRRDLSLTHSLFLSLPFSLISLSQCDPSLFVYKDKGHIIYILVYVDDNIITRTSNVLVQQLTTKLHSHYSLKQLGKLDYFLGIEIKSVTDGFILLTQSKSRAE

SEQ ID NO: 218375 - protein, 60 aa, Glycine max
  Clone ID: PAT_MRT3847_3921C.1.pep
DVQVFQKKLTHLLPEIDKKDSQPYDNMLARKAKNPSMSINRLKVEKDQGENQRLQEWKFR

SEQ ID NO: 218376 - protein, 57 aa, Glycine max
  Clone ID: PAT_MRT3847_39220C.1.pep
LSLYLFVFAFDTQGIDLKAGGKSKKTKRTAPKSNDIYLKLLVKVPQINLFATKRITP

SEQ ID NO: 218377 - protein, 125 aa, Glycine max
  Clone ID: PAT_MRT3847_39221C.1.pep
PESSSRLALGPAFGFFPPKERVGVDIAPPLTLFFFCPNKTFLFLEPPDRPGFLVVFVKIFSALPLAVESGEFSPGGFLVKAKFLFSSHGKAFSQPFPRVFFSPFRFFLGGPPPGEFSFWGGLFGK

SEQ ID NO: 218378 - protein, 61 aa, Glycine max
  Clone ID: PAT_MRT3847_39222C.1.pep
SSRIRSSFSSDAYYYRSEAIFHLRKASQRSGCNLFHPPNIYSSSFNPSTNWYTSPSDSPHL

SEQ ID NO: 218379 - protein, 72 aa, Glycine max
  Clone ID: PAT_MRT3847_39223C.1.pep
SFMLPPSLVLPSLYRLLFGIVFMVVFSLVSHFRQDTAWSLIVPSFKLSAYSDISQATTIRFDIPGSIQAYYR

SEQ ID NO: 218380 - protein, 70 aa, Glycine max
  Clone ID: PAT_MRT3847_39224C.1.pep
NPLFGPKRAWPFFFGVGGMVPKPFRVSGLPQKSFPEPFKALSGFSNPQAFWPLSWANKNLTCNPPQRRGD

SEQ ID NO: 218381 - protein, 159 aa, Glycine max
  unsure (1)..(159): unsure at all Xaa locations
  Clone ID: PAT_MRT3847_39225C.1.pep
DTINLPFPTFNASELIKSFXSTWFSAQEMVALSGAHTLGVARCASFKNRLKQVDPTLDAQFAKTLARTCSSGDNAPQPFDATSNDFDNVYFNALLRRNGVLTSDQTLYNSPRTRNFVNAYAFNQAMFFFDFQQAMVKMGLLDVKDNSNGEVRENCRKIN

SEQ ID NO: 218382 - protein, 66 aa, Glycine max
  Clone ID: PAT_MRT3847_39226C.1.pep
MAVKSGFVYIKMEYQQVLISDIDALIILTSAVPQTKLGFDPTKGLRPEFYFDGDAYPELLQFLHYA

SEQ ID NO: 218383 - protein, 50 aa, Glycine max
  Clone ID: PAT_MRT3847_39227C.1.pep
CGLLDVRSCYFQLQIGPPLMLGRHFILWVKVDQVFAFAPVQWVSFGPISC

SEQ ID NO: 218384 - protein, 111 aa, Glycine max
  unsure (1)..(111): unsure at all Xaa locations
  Clone ID: PAT_MRT3847_39228C.1.pep
SVLNERGPLVGAKVGXYIQIVGPHDAGSKGRLGYAXXIPYVETVVHVXRAEVYFDSFPVEDDSQEGVAHIVEQKPGVYAPLSTKXNLVETSKEXQLYLPCDKISSVLTTTV

SEQ ID NO: 218385 - protein, 46 aa, Glycine max
  Clone ID: PAT_MRT3847_39229C.1.pep
MENSRRPFDRSREPGPKKPRLMEELDRASNSGARQFHQRQVASGIT

SEQ ID NO: 218386 - protein, 134 aa, Glycine max
  Clone ID: PAT_MRT3847_3922C.1.pep
MVKSEHKIKTEPSSKAMRLSSPSSSTSDCKKKKYKGVRMRSWGSWVSEIRAPNQKTRIWLGSYSTPEAAARAYDAALLCLKGSSANLNFPLSSSQQYIPGDAVMSPKSIQRVAAAAAYSFIDNATTPPSPPSAS

SEQ ID NO: 218387 - protein, 258 aa, Glycine max
  unsure (1)..(258): unsure at all Xaa locations
  Clone ID: PAT_MRT3847_39230C.1.pep
MPPLASLQLRRLLLRSRSLPFTSPSPIHHSPLFPRHSSSHFYSRTLFTPSFFITRHFSSETQTDEIASSLSSELLKEPDSDALSVSQRLNLSFSHITPTPNLILQTLNLSPQAGRTVLGFHQWLSSNPQFSHTDDTLSYFVDYFGRRKDFKATHDVLAAASPAVGPKTLASAIDRLVRAGRSSQAVQFFERMERDYGLKRDRDSLKVVVEKLCSEGFASYAEKMVKDLAREFFPDEATCDMLIRGWCIDGKLDEAXRL

SEQ ID NO: 218388 - protein, 86 aa, Glycine max
  Clone ID: PAT_MRT3847_39231C.1.pep
MSSAQKAWIVATSVGVVEALKDQGICRWNYALRSAQKQVKSHVGSLSQAKKLPSSAMVSTSCGLKGQKQSEESLRTVMYLSCWDPN

SEQ ID NO: 218389 - protein, 110 aa, Glycine max
  Clone ID: PAT_MRT3847_39232C.1.pep
MATPLVAGIAVAAAAYAGRYGIQAWQAFKARPPSMRKFYEGGFQATMTRREAALILGVRERTPTDKIKEAHRRVMVANHPDAGGSHYLASKINEAKDMLLGKTKGGGSAF

SEQ ID NO: 218390 - protein, 94 aa, Glycine max
  Clone ID: PAT_MRT3847_39233C.1.pep
VTFYEVQGEMAPTEATLLFDDAETSKGSMEDINKYQPRRDHLTPTPGGTLMLTALSAPLVRKANRTKRAHSQKSQPRKGSTTMYSTGGLSRNTL

SEQ ID NO: 218391 - protein, 237 aa, Glycine max
  Clone ID: PAT_MRT3847_39234C.1.pep
MFLTRTEYDRGVNTFSPEGRLFQVEYAIEAIKLGSTAIGLKTKEGVVLAVEKRITSPLLEPSSVEKIMEIDEHIGCAMSGLIADARTLVEHARVETQNHRFSYGEPMTVESTTQALCDLALRFGEGDEESMSRPFGVSLLIAGHDENGPSLYYTDPSGTFWQCNGKAIGSGSEGADSSLQEQYNKDLTLQEAETIALSILKQVMEEKVTPNNVDIAKVAPTYHLYTPSEVEAVISRL

SEQ ID NO: 218392 - protein, 63 aa, Glycine max
  Clone ID: PAT_MRT3847_39235C.1.pep
NLLLICTIGDSTTSPIFTQTIHASPFALSEGGKIHIDRPGGPYLCAGEHDLRINVSLHIDINA

SEQ ID NO: 218393 - protein, 133 aa, Glycine max
  Clone ID: PAT_MRT3847_39236C.1.pep
MLNTSSLLRWISKKLRPRNSISNGDSSSDTFHNGASTDTVVVDDNPFSSGVECYACTQVGVPVFHSTSCDSAYHQLQWEASAGSSLVPIQSRPKKVLGFRTVSGLTRGPFGRFLDPRSKRVQRWNRALMLARG

SEQ ID NO: 218394 - protein, 81 aa, Glycine max
  unsure (1)..(81): unsure at all Xaa locations
  Clone ID: PAT_MRT3847_39237C.1.pep
NVGFNXKNVAVKDLKRGFXASXSKDDPAKEAAXFTSQXHIMNHPGQIGNXXAPGLMPXSHNAVXLACKMAGVRDERANLKW

SEQ ID NO: 218395 - protein, 74 aa, Glycine max
  Clone ID: PAT_MRT3847_39238C.1.pep
LNHNKQIKDIRIFTSTIILLPIPCAFPAYIANSPPSQFLYSASSFIRQDHCDNLNQDAFSSLVAYLEGSPSFSC

SEQ ID NO: 218396 - protein, 237 aa, Glycine max; identical to SEQ ID NO: 218391
  Clone ID: PAT_MRT3847_39239C.1.pep

SEQ ID NO: 218397 - protein, 260 aa, Glycine max
  Clone ID: PAT_MRT3847_3923C.1.pep
GREKDGSMPNFLRFEAPCVLQNNREIVDKNGEINYFSGLFLCRPTGQGKSMLIVRFGGTKRSPLAKVFPKWYFHQNASKVFEQDMGFLSSQNEILLREKVPTKELYLNLKSSDTWVAEYRKWMDKAGHGMPYHFGHSTISLPKEPAVVEHAPAGLVAGQSASSPTKGGIGTMHAPNFANRYFRHVIHCKGCRTVVKAFEAWKNALSAVAIALTALAILLSGRQWKVLLLASAALCSVGVYACSTAIAMNTTNFIRTHRRL

SEQ ID NO: 218398 - protein, 271 aa, Glycine max
  unsure (1)..(271): unsure at all Xaa locations
  Clone ID: PAT_MRT3847_39241C.1.pep
MFLTRTEYDRGVNTFSPEGRLFQVEYAIEAIKLGSTAIGLKTKEGVVLAVEKRITSPLLEPSSVEKIMEIDEHIGCAMSGLIADARTLVEHARVETQNHRFSYGEPMTVESTTQALCDLALRFGEGDEESMSRPFGVSLLIAGHDENGPSLIXWERERNRKIEKERGKKRRKERRNRIERIEGKRRETERYYTDPSGTFWQCNAKAIGSGSEGADSSLQEQFNKDLTLQEAETIALSILKQVMEEKVTPNNVDIAKVAPTYHLYTPSGVKA

SEQ ID NO: 218399 - protein, 62 aa, Glycine max
  Clone ID: PAT_MRT3847_39242C.1.pep
ISIPTSVCDVRRTTFPLSLSLVWHNEFYPTYHEFYLTPPLRSLLTFPSLLSRPSHILESGET

SEQ ID NO: 218400 - protein, 69 aa, Glycine max
  Clone ID: PAT_MRT3847_39243C.1.pep
VGEEPCSLMGNGKEKGFQSLPYSNIPNTTNTYVFILFTGVEERIPEFQEPLDLRSNPFQGGGNDAILPP

SEQ ID NO: 218401 - protein, 67 aa, Glycine max
  unsure (1)..(67): unsure at all Xaa locations
  Clone ID: PAT_MRT3847_39244C.1.pep
PMNSCQLMTYGTFPRNDXXVTSLGSSPTETVYMVWSYISAIKSNEVMTXXSLTSLIKSLTLSSHYHC

SEQ ID NO: 218402 - protein, 50 aa, Glycine max
  Clone ID: PAT_MRT3847_39245C.1.pep
MLCATFSYFKFLNFNLLCVHIQSCALQSISIRDFDHHATRIVGKYEVCIT

SEQ ID NO: 218403 - protein, 39 aa, Glycine max
  Clone ID: PAT_MRT3847_39246C.1.pep
LSNHLRCLTKKLFISLIIIKAPLGGPTFNKRAPSLTYSP

SEQ ID NO: 218404 - protein, 131 aa, Glycine max
  Clone ID: PAT_MRT3847_39247C.1.pep
DGGTFIYGDPSRKPEEEEAVCIRAGQQHVVEIETKEDTILYWQFPTVSSDVGFSVAKITTKGKRDVCGYFKYQGNKWHESHIMVPEGKYELVWDNSYSMIATKTVTFKVEIMEAVPSDDFNPVSPGPVVSC

SEQ ID NO: 218405 - protein, 62 aa, Glycine max
  Clone ID: PAT_MRT3847_39248C.1.pep
NGTLSTIGGDETICTMRLRQNIGQNSSPDMYYPEAGSITIDGVRDLPGHLLLKLIAQYGSSP

SEQ ID NO: 218406 - protein, 48 aa, Glycine max
  Clone ID: PAT_MRT3847_39249C.1.pep
DPRKSCPKKPFVFFKPVRNIYWKHNDLKTFPDTKSLGFHFQKSLSQTL

SEQ ID NO: 218407 - protein, 98 aa, Glycine max
  Clone ID: PAT_MRT3847_3924C.1.pep
LEDLPPQIFERKPTLGPPGFSLGKKKRLGFFWPGGFNPVSPPRSWLCLCRARSKFKCWFSPQGAPPPPRFCLSWFPLEAFSLRLKKMAIHPPARAFPK

SEQ ID NO: 218408 - protein, 146 aa, Glycine max
  unsure (1)..(146): unsure at all Xaa locations
  Clone ID: PAT_MRT3847_39250C.1.pep
GKEWEIPKYQQVLQPIVPLEGQEMQVKAKRPKPHCVNCGSEEHQMKECPMPRNAARITEKRKEYMDACGEASGQSFQQRYHAEEVEERFGRFKPXVISEELQDALGVTDKSVAPLIYRMRQVSYPPGWVKGAELENGGLGLCGWRR

SEQ ID NO: 218409 - protein, 44 aa, Glycine max
  Clone ID: PAT_MRT3847_39251C.1.pep
YYLILFNIFLNSTLCSVSCTTLPSANSLSNLIKFYLKTKNSFPH

SEQ ID NO: 218410 - protein, 343 aa, Glycine max
  Clone ID: PAT_MRT3847_39252C.1.pep
MCEKEVYGEQSICCGRCRAVVYCSSICQKQHWNDTHKSMCGLYKAMMEREEELAIMIFMFPCSADQPCKWLESLGIHQKGMWRRKCSCYSHCSFGLLPVKGGLQELWGGIDEFEYPHDSPFNNHFISSPFLLSGWPEYYNLRSLPLSSPVADILSHPLTVYHILTTLNISSKNLILKGKEVIVHYLGPEGELDWMPAFAEVGHLLNGLGNVQIVMVGPEVPTNLSGTTSGIGSRVRVNLVRGVYQVEASYLPSPHVVIALNSRLESYSSWGGALDVIKSIGVPAFFTDQSEVSCVNAKQVLRNAGLHITHPVTPNPFRSPVKNLTASSNLPSYSNGFVFGVNT

SEQ ID NO: 218411 - protein, 61 aa, Glycine max
  Clone ID: PAT_MRT3847_39253C.1.pep
CKLWDIGVLHLMVPQVFNANNYFLTVVFDLIFPKSCFNFSLDMVKTGWLIYSERTKAGGII

SEQ ID NO: 218412 - protein, 93 aa, Glycine max
  Clone ID: PAT_MRT3847_39254C.1.pep
TTRPCIMKGHCHLSLDSRTRRPHHHPFIDSFDQQYSSLTLVLLIAALSSLILSNGRNVMRLSFVAYYELLEQENVRQGFVLYFIVKKVEEKRG

SEQ ID NO: 218413 - protein, 44 aa, Glycine max
  Clone ID: PAT_MRT3847_39255C.1.pep
STGGSTNVGRGKPKSSKSVLRSQKAGLQFPVGRFCRFLKVGNNP

SEQ ID NO: 218414 - protein, 67 aa, Glycine max
  Clone ID: PAT_MRT3847_39256C.1.pep
NRPRNGKKINPFLHRALQEAVNKKRGNKLELHWMQLISSSVLFMMPKTNGVLLGASFFIFFSKTFNL

SEQ ID NO: 218415 - protein, 69 aa, Glycine max
  Clone ID: PAT_MRT3847_39257C.1.pep
TYRGGELDSKPLVLTGDFYPGSRISQVGGATRRSTFFGQIASKLIESRFYPIKPIPPFFQRSPLILLKT

SEQ ID NO: 218416 - protein, 67 aa, Glycine max
  unsure (1)..(67): unsure at all Xaa locations
  Clone ID: PAT_MRT3847_39258C.1.pep
KNKTKGGGEFFLAIKEEKNVVSPKKKDVQKTVGIVLLKAIXSVPKVKSYLGGRFSLKAGVKPPEVVF

SEQ ID NO: 218417 - protein, 234 aa, Glycine max
  unsure (1)..(234): unsure at all Xaa locations
  Clone ID: PAT_MRT3847_39259C.1.pep
GASETASPLSPPPPARQSHDSTSILFTFLSFFAIVALVLLPSASPSFQNSLSILHQVPEGHVGVYWRGGALLKTITEPGFHLKMPFITQFXKIEVVNQLHKEFVFETLLNYGVHYDKTWIYDKIHHEINQFCSSHSLQQVYIDVFDQIDEKMKDALQVDCTRYAPGIEILSVRVTKPTIPESIRRNFEQMEEERTKVLIAIEKQKVSEKEAETMKKMAISEAEKXANVSKILME

SEQ ID NO: 218418 - protein, 140 aa, Glycine max
  unsure (1)..(140): unsure at all Xaa locations
  Clone ID: PAT_MRT3847_3925C.1.pep
KKKCKKENLKKKILEKKIEEKKKRVEXKRYRKKILRKKKMKKNRVRKKKKXKKILKKKSEKKESCRKSEERKRIKKKNGKKKKEKKKSRKKRAKKKSIKKXDEKKMRNKIKGSVGREKDYDCRKRKKKIWKKMGLWNCKA

SEQ ID NO: 218419 - protein, 27 aa, Glycine max
  Clone ID: PAT_MRT3847_39260C.1.pep
IIKITVIRIVSHSNDEFFLSISVKILG

SEQ ID NO: 218420 - protein, 90 aa, Glycine max
  Clone ID: PAT_MRT3847_39261C.1.pep
SSPLNFFSLNLFRPLLNYGVHYDKTWIYDKIHHEINQFCSSHSLQQVYIDVFDQIDEKMKDALQVDCTRYAPGIEILSVRVTKPTIPESI

SEQ ID NO: 218421 - protein, 88 aa, Glycine max
  Clone ID: PAT_MRT3847_39262C.1.pep
LILLILFVVFLLAPLTKNRHPPRFAPICTLSLQSPPFLCSCDIIGNVLMFFGITLSLLTSAQATILSLAASRSLSRLSSQIEMKANKG

SEQ ID NO: 218422 - protein, 148 aa, Glycine max
  unsure (1)..(148): unsure at all Xaa locations
  Clone ID: PAT_MRT3847_39263C.1.pep
RLLLGRRRDQGHDSTAILFTLLSFFAIVALVLLPSASPFFQNSLSILHQVPEGHVGVYWRGGALLKTITEPGFHLKMPFLTQYEPVQVTLQTDMVTDIPCGTKGGVMISFGKIEXVVNRLRKEFVFETLLNYGVHYDKTWIYDKIHHE

SEQ ID NO: 218423 - protein, 69 aa, Glycine max
  Clone ID: PAT_MRT3847_39264C.1.pep
MLAGCSSSTLLSPRHRLRSEASAQLQACHFQLPSSMSTHRLDLPCTTTTFTRNNKDTTYSRSVLSVDQK

SEQ ID NO: 218424 - protein, 60 aa, Glycine max
  Clone ID: PAT_MRT3847_39265C.1.pep
NKRLSTTSIYFPEPKDTGLHFGLRGKKLRLIIMSVVSDRRNPRIKVLLCFPILKTTVQEW

SEQ ID NO: 218425 - protein, 305 aa, Glycine max
  Clone ID: PAT_MRT3847_39266C.1.pep
KVHLADNRKSIMNGKHDTFLNGESDEVFHISGDYHFKTLSGCEAADERNSWDNFKHLIADEEYGLDSSRETMAACESSEQVTLRVCVEDTGIGIPFSAQDGIFMPFVQADSSTSRNYGGTGIGLSISKCLVELMGGQINFISRPQVGSTFSFTAFCEAFKKSSVTNRKKNLEDLPSSFRGMKVIVVDGKPVRAAVTRYHLKRLGILVKVANRISKAVALCGKSGSLKSGMFQPDIIMVEKDTWITGEDGIFNTWKHNGRTIKMPKMILLATNISNAEFDKAKFTGFTDTVIMKPLRASMVAACLQ

SEQ ID NO: 218426 - protein, 92 aa, Glycine max
  Clone ID: PAT_MRT3847_39267C.1.pep
NSARVKVKLRHNSTCSSHPRFLFILSPLFFRDKFPLFSPIIKINQPHFHLPHNPAISNQPSFRHSKQTKHRSSCTTRQHHVFNHSPSLFLTK

SEQ ID NO: 218427 - protein, 51 aa, Glycine max
  Clone ID: PAT_MRT3847_39268C.1.pep
NYCFLNLYKTIKDDNYFKYYVFYYQIVCLFKYACCSLCIVLEIVWDSTKSI

SEQ ID NO: 218428 - protein, 44 aa, Glycine max
  unsure (1)..(44): unsure at all Xaa locations
  Clone ID: PAT_MRT3847_39269C.1.pep
SSIYNHTRGKTSSAPTPLLEHNYLGLPILLGEREXPYYMHAGSW

SEQ ID NO: 218429 - protein, 85 aa, Glycine max
  Clone ID: PAT_MRT3847_3926C.1.pep
MKNRTSGFLKEIIANLSSMAKSKTMALKSKTNAIRARLIIFSLMKNKKFLMSSLSEKFHSVWGQSSSQQKEDHCLLEDGSNDHQS

SEQ ID NO: 218430 - protein, 204 aa, Glycine max
  Clone ID: PAT_MRT3847_39270C.1.pep
GTVAQTQAQTLLRWKQSLPHQSILDSWIINSTATTLSPCSWRGITCDSKGTVTIINLAYTGLAGTLLNLNLSVFPNLLRLDLKENNLTGHIPQNIGVLSKLQFLDLSTNFLNGTLPLSIANLTQVFELDLSRNNITGTLDPRLFPDGSDRPQSGLIGIRNLLFQDTLLGGRIPNEIGNIRNLTLLALDGNNFFGPIPSSLGNCT

SEQ ID NO: 218431 - protein, 54 aa, Glycine max
  Clone ID: PAT_MRT3847_39271C.1.pep
KDPQYLIICPLGGSEPNNDSDIPILLHTFPSNTKFHKGYYNINHFHDHAVEPNL

SEQ ID NO: 218432 - protein, 52 aa, Glycine max
  Clone ID: PAT_MRT3847_39272C.1.pep
HMMNLGLPNNLQLFYARLVIRIWLNIPSIQPHYTPNPYHDYDAHLESDSDTV

SEQ ID NO: 218433 - protein, 88 aa, Glycine max
  Clone ID: PAT_MRT3847_39273C.1.pep
LYFTDSTIQIMSFWFYHFHLRWCFSSITLSPNQNITPTFCTNISSSFNLCFLTVQKCCNILSFLSFLTIHYLLSVFSKFFYTHLQTIL

SEQ ID NO: 218434 - protein, 44 aa, Glycine max
  unsure (1)..(44): unsure at all Xaa locations
  Clone ID: PAT_MRT3847_39274C.1.pep
LFFFLLFMXGGGIETRGLFLILQKGQSQPYITRGLGLFQLKSRG

SEQ ID NO: 218435 - protein, 78 aa, Glycine max
  unsure (1)..(78): unsure at all Xaa locations
  Clone ID: PAT_MRT3847_39275C.1.pep
MAPRWKGKDAKAKKDAQAEALKEPMSKIVSQIQSSLVQSDTRGFLSGSSVHLVVEAENTHLLXXACFGSPVRTVEKDN

SEQ ID NO: 218436 - protein, 42 aa, Glycine max
  Clone ID: PAT_MRT3847_39276C.1.pep
LCLVRFDIVFRDCTCTRCECGRVARVSSHPQPVTHSCMCHRI

SEQ ID NO: 218437 - protein, 54 aa, Glycine max
  Clone ID: PAT_MRT3847_39277C.1.pep
KVSTHCNNVGLTIGVMLTLASVAYPSETVKLGGPYGLMRYTILPYTNELVISAY

SEQ ID NO: 218438 - protein, 32 aa, Glycine max
  Clone ID: PAT_MRT3847_39278C.1.pep
ISRVLGRVREGQRSFAQDVLAIMSIFNTSMRM

SEQ ID NO: 218439 - protein, 90 aa, Glycine max
  unsure (1)..(90): unsure at all Xaa locations
  Clone ID: PAT_MRT3847_39279C.1.pep
HIKTTLAEIXTVTTQITPPLTHLCAPPPKIFLKHESKFPLWKISXTPLLLYVLSVFFQALWFLSPVLPILAXASAQAXAERGSTRESGPV

SEQ ID NO: 218440 - protein, 155 aa, Glycine max
  Clone ID: PAT_MRT3847_3927C.1.pep
LTFFIDYYFSLRFRFNLPSPFRSILLSRLDDLDSRLSSSSEAAVKTCGFSIDKLSHGGHGSSTTSRSFKRRIRKGSEGLKSIGRSLGLGVSRAVFPEDLKVSEKKIFDPQDKFLLTWNKLFVISCILAVSGDPIVFYLPVINDSFHCLGIDRKLA

SEQ ID NO: 218441 - protein, 121 aa, Glycine max
  Clone ID: PAT_MRT3847_39280C.1.pep
MSDHLPREVVTDILSRLPAKSLLRFRSTSKSWKSLIDSQHFNSVHLSRSLSLTSNTTLILRLDSDLYQTNFPTLDPPLFLNHPLMCYSNNITLLRFLQRTSSVYPTSPTTSPFGNPFLRQH

SEQ ID NO: 218442 - protein, 38 aa, Glycine max
  Clone ID: PAT_MRT3847_39281C.1.pep
NTINKQFINNKNHTNLILIGITNRVINRLNHPIKNHIR

SEQ ID NO: 218443 - protein, 369 aa, Glycine max
  unsure (1)..(369): unsure at all Xaa locations
  Clone ID: PAT_MRT3847_39282C.1.pep
NSGLVNLSVNLPNGTSLYRRALFVTASAPSKYAEEVMWETITSICGNLVQQCVGIVADRFKAKALKNLENQNHWMVNLTCQYQGFNTLIKDFAKELPLFRTVVQNCLKLANLFNYTSQVRNSFHKYQLQEYGHTWLLRVPAHEFEFGPVCAMMEDTLSSVRALQLVLMDEPFKMVAIEDQGAREVGDMIRDVGFWNDLEAVHGLVKLVKDMAQEIEAERPLVGQCLPLWDELRAKVKDWCSKFHIAEGVVEKLVERRFKKNYHPAWAAAYILDPLYLVRDTSGKYLPPFKYLTPEQEKXDVDRLITRLVARHEAHIALMELMKWRTEGLDPVYAQAVQMKERDPVXGKMRIVNXQXXRLXXETNWPEFS

SEQ ID NO: 218444 - protein, 58 aa, Glycine max
  Clone ID: PAT_MRT3847_39283C.1.pep
GFKASLIVLDVSGGFNFESLSNNIKLCVIYECRVYDKLRATNFGWNFFNDENLWKRMD

SEQ ID NO: 218445 - protein, 286 aa, Glycine max
  unsure (1)..(286): unsure at all Xaa locations
  Clone ID: PAT_MRT3847_39284C.1.pep
FFALYWYEENSKKRQALYVMNPNKFRACEFLINFHLGSIQNXQRYFADNLFPLSEXAMKYRRRMIYDSERHVERTKILQAFKTSKDINTIFLSKVGDNSIDIPEACVIIQISSHAGSRRQEAQRLGRILRAIGVPAVRMAGGKEEYNAGFNPRYQCLXESMYYSLERCXVLVTIKLDYNVITNLPPTDEGPNLSYXGLEDQLALLGKVLSAGDDQVGLEQLDEDADEIAIQRTRRSQGSMSAMSGAKGMVYMEYSTVRKGQQGQIKSKPKDPAKRHFLFKRRYGAT

SEQ ID NO: 218446 - protein, 121 aa, Glycine max
  unsure (1)..(121): unsure at all Xaa locations
  Clone ID: PAT_MRT3847_39285C.1.pep
ASNFLIDQGYSFKXVITSXPPPMKGPNLSYHRLEDQLALLEKVLSAGDDQVGLEQLDEDADEIALQSARRSQGSMSAMSGAKGMVYMEYSTGRNKGQGQIKSKPKDPAKRHFLFKRRYGAT

SEQ ID NO: 218447 - protein, 71 aa, Glycine max
  Clone ID: PAT_MRT3847_39286C.1.pep
RGLCAQLARLTKINTKRLKGKPWGRSLRSERAWRRGKKMLIQFQGLGESKRSLTPDFQANTNYPLLVEKKA

SEQ ID NO: 218448 - protein, 75 aa, Glycine max
  unsure (1)..(75): unsure at all Xaa locations
  Clone ID: PAT_MRT3847_39287C.1.pep
SECSLASLRAVAREVSDGALAAADKKGLEKDPRALWRRYVGGLXEDMELGIDCDVSRVVVSDEFVKEMEARFQAA

SEQ ID NO: 218449 - protein, 64 aa, Glycine max
  Clone ID: PAT_MRT3847_39288C.1.pep
PLLTNNTSRGHLQRSAGGIIWNNIHLNYRLNQLEIYMEKFTKTQRNIHTQIQKLELSTDPMLKQ

SEQ ID NO: 218450 - protein, 101 aa, Glycine max
  unsure (1)..(101): unsure at all Xaa locations
  Clone ID: PAT_MRT3847_39289C.1.pep
SXPXXNLXXXFXXXXSLEMIXTXEGXXICXPXXXRGKLNIIFRXRXVXXLXXIFXSYXXXXXEELRCDNESXXXXXXXGNPNTMEXRAEFRAYVRVXAXXX

SEQ ID NO: 218451 - protein, 72 aa, Glycine max
  Clone ID: PAT_MRT3847_3928C.1.pep
VVPQCILVRSRFSRSALCTLCIRVCMSSRMVLGFLFLSVSCYVHIIADLERYCIMINFVRLPVRVRKCLSHQ

SEQ ID NO: 218452 - protein, 74 aa, Glycine max
  Clone ID: PAT_MRT3847_39290C.1.pep
CYKTKLFHFTASHLMTCCDPLRPQTIVHDNMKVQWLFYSANVKLELGIHITFLDDKNDFCTNLVKNQNWSQLLA

SEQ ID NO: 218453 - protein, 44 aa, Glycine max
  Clone ID: PAT_MRT3847_39291C.1.pep
YLVCSKFPMIVVHTIIQFFPYFSFISQRNFLQTTKRRKPIRSQN

SEQ ID NO: 218454 - protein, 105 aa, Glycine max
  unsure (1)..(105): unsure at all Xaa locations
  Clone ID: PAT_MRT3847_39292C.1.pep
YYVAPEVLXGREYDEKVDVWSCGVILYIMLAGIXPPFYGDSAAEIFEAVVRANLRFPSRIFRTVSPAAKDLLRKMICRDSSRRFSAEQALRHPWILSAGDTAELT

SEQ ID NO: 218455 - protein, 89 aa, Glycine max
  Clone ID: PAT_MRT3847_39293C.1.pep
KTSYVTRIEWIEADARNTDVKIDVRWYYRPEESIGGHRQFHGSKEVFLSYHFDVQSADTVKARCTVHSFKSYTKLNAIRNDDFFYRFEY

SEQ ID NO: 218456 - protein, 117 aa, Glycine max
  Clone ID: PAT_MRT3847_39294C.1.pep
QLETQIEKDKPKVLFADAVATTKTSILVGELAKIIKQNGVNIGQRRLFEWLRQNGFLIKRQGVDYNMPTQYSMERELFEIKETSITHSDGHTSISKTPKVTGKGQQYFINKFLAEEL

SEQ ID NO: 218457 - protein, 53 aa, Glycine max
  Clone ID: PAT_MRT3847_39295C.1.pep
LGFFFFFFFLPYLNGNTNREKFIQPHLSSLNPKKYMGYLTMTKKIPPKFFGFL

SEQ ID NO: 218458 - protein, 469 aa, Glycine max
  Clone ID: PAT_MRT3847_39296C.1.pep
MGKTGKWLRNLLTGKKDKEKEKGKSTTNLNCSSNGTENSTTPTCTTPKEKKRWSFRRSSASATTATTTPPTTSKELNFVETNVTVSQTVQTDTDIQNEQRKHAMAVAAATAVAADAAVAAAQAVAAVIRLTSASNGTSKSIEEAAAIKIQSSFRSHLARKALCALRGLVKLQALVRGHLVRKQAKATLRCMQALVTAQVRARAQRIQMGSEGNPNQKHRNATEDNLFRHIYNEMDRGLEDNIKIVKMDVCESKGNSISRNSSVCHHGHEEQYDNRFSTHYSTNGFYSKEENYKVSPAPFSLTELSPRTCSGHFDDSFSTAQSSPHPQFYSAVSRTEDSKHPFAFPRPAYAESMSYDYPLFPNYMANTESSRAKVRSHSAPKQRPDSFERQPSRRRASVEGRNVPRPMRMQRSSSHVGATVHNYHYPWSIKLDRSAVSLKDSECGSTSSVLTNGNYCRSLVAYGSRGDGY

SEQ ID NO: 218459 - protein, 103 aa, Glycine max
  Clone ID: PAT_MRT3847_39297C.1.pep
DTDVWRRIGRAYIQTARPCFYQNTWNRAIEHTDGRIGGSGERHTQEETRHALDMTPIIRASLDRLPTYSHGMTHLRRFTIEGHDHFPCEGRAYCYRVLPTMQS

SEQ ID NO: 218460 - protein, 125 aa, Glycine max
  unsure (1)..(125): unsure at all Xaa locations
  Clone ID: PAT_MRT3847_39298C.1.pep
DCPLLREQVAPDTTIDTDMLSDLQSLCPXNGDENVTTVLDRNSSDLFDNHYFENLLSGKGLLSSDQILFSSDEANSTTKPLVQSYSNDSGLFFGDFANSMIKMGNINIKTGTDGEIRKNCRVINS

SEQ ID NO: 218461 - protein, 41 aa, Glycine max
  unsure (1)..(41): unsure at all Xaa locations
  Clone ID: PAT_MRT3847_39299C.1.pep
QKACGTCCRPCNWGPPGPAGNQKGCPRXASLNTHGGKRKGP

SEQ ID NO: 218462 - protein, 47 aa, Glycine max
  Clone ID: PAT_MRT3847_3929C.1.pep
WYGCEDAHRRCKAYENTTCKVQLASRRVQRYSNSMGRHFGTAAIRQH

SEQ ID NO: 218463 - protein, 198 aa, Glycine max
  unsure (1)..(198): unsure at all Xaa locations
  Clone ID: PAT_MRT3847_392C.1.pep
LLHCECILACFLSSVLFHESLCFLFASLQESMKDDRGYFEFKCQYLIPYSXKKISMKFYSLQAHRFLFIIVILCPLVIADLSSDKQALLDFAAAVPHRRNLKWNPATPICSSWVGITCNPNDTRVVSVRLPGIGLVGTIPANTLGKIDSLRNISLRANLLSGSLPADITSLSSLQYLYLQHNNLSGNIPTSLSTRLNV

SEQ ID NO: 218464 - protein, 51 aa, Glycine max
  Clone ID: PAT_MRT3847_39300C.1.pep
KITYLSLAILKSTRPSAATCNCLEIAGGCLVRPLPFHVFLLRIVNHNISPI

SEQ ID NO: 218465 - protein, 53 aa, Glycine max
  Clone ID: PAT_MRT3847_39301C.1.pep
TQAWIGLYKIIRRSKTEYFQTQEWSMSKYISNEFRFVAITNSCSHRSHQIKAV

SEQ ID NO: 218466 - protein, 66 aa, Glycine max
  Clone ID: PAT_MRT3847_39302C.1.pep
EHHNDLSSSKFPGRLCLTSIGDRFQPIIPFNSRDDQHPSHNLSLFLLLDLPGTPHKWNKMSILYPL

SEQ ID NO: 218467 - protein, 69 aa, Glycine max
  Clone ID: PAT_MRT3847_39303C.1.pep
SGAKAKTFKWLSFFFKGGPCLVSSSPQINLGLSFLLGAPCSQDFLFSPLKEKGKFIFFRGVVFFWFLGI

SEQ ID NO: 218468 - protein, 53 aa, Glycine max
  Clone ID: PAT_MRT3847_39304C.1.pep
SLECSINKYMEIMTVWYKVSKLMCVRMSIDFIQRCDIPPHRINSNKVMCRDIC

SEQ ID NO: 218469 - protein, 81 aa, Glycine max
  unsure (1)..(81): unsure at all Xaa locations
  Clone ID: PAT_MRT3847_39305C.1.pep
RNDPVFAMRGSMHSIQRDMIMLENQLPLFVLDRLWELNWXTRMKGLVSSLVLRFFDPLMPTDEPLTKSDRNKLESSLGGTN

SEQ ID NO: 218470 - protein, 72 aa, Glycine max
  Clone ID: PAT_MRT3847_39306C.1.pep
VPCEIKFSGFCWRLAVAVDICSTYQISKYLSTLGYFNKKLNLPLLTRQKNIWVKYRNVYGFFPCGLMFFSSA

SEQ ID NO: 218471 - protein, 54 aa, Glycine max
  Clone ID: PAT_MRT3847_39307C.1.pep
IDGVSSVCVTRYVEVTIVVFPYAPVSVQVGNLAAAFRESQTVVNYVDRVSVDLE

SEQ ID NO: 218472 - protein, 104 aa, Glycine max
  Clone ID: PAT_MRT3847_39308C.1.pep
LRGGNHTFISKINNLLSGFYTSVQTSYFDYQNNLSNCFPKTILNAKMINKKNKLRQALHQPLAYKINTKQLSTKKEPKYQTTVRKNLYLLSSSRGASWKSKQLY

SEQ ID NO: 218473 - protein, 81 aa, Glycine max
  unsure (1)..(81): unsure at all Xaa locations
  Clone ID: PAT_MRT3847_39309C.1.pep
NDSISLRLVLPCAPPRKEGVSFADRPSLYTATFAFQAEINQLLNLIINTCYFNKEIFLXELISIAFDSLDKIRFESLTCKI

SEQ ID NO: 218474 - protein, 197 aa, Glycine max
  unsure (1)..(197): unsure at all Xaa locations
  Clone ID: PAT_MRT3847_3930C.1.pep
MFDCGYKSQYVGGQCEKFVRLDDLDSRLSSSSEAAVKTCGFSIDKLSHGGHGSSTTSRSFKRRIRKGSEGLKSIGRSLGLGVSRAVFPEDLKVSEKKIFDPQDKFLLTWNKLFVISCILAVSVDPLFFYLPVINDSFHCLGIDRKLAITVTTLRTFIDAFYLVHMALQFRTAYIAPSSXRVFGRXELVIDPAQIAKR

SEQ ID NO: 218475 - protein, 153 aa, Glycine max
  Clone ID: PAT_MRT3847_39310C.1.pep
MAPKADSSKKADPKAQALKTAKAVKSGANFKKKTKKIRTSVTFHRPRTLKKDRNPKYPRISAPPRNKLDHYQILKFPLTTESAMKKIEDNNTLVFIVDLRADKKKIKDAVKKMYDIQAKKVNTLIRPDGTKKAYVRLTPDYDALDVANKIGII

SEQ ID NO: 218476 - protein, 126 aa, Glycine max
  unsure (1)..(126): unsure at all Xaa locations
  Clone ID: PAT_MRT3847_39311C.1.pep
MAPKADSLKKADPKAQALKTAKAVKSGATLKKKTKKIRTSVTFHRPKTLKKDRNPKYPRISAPPRNKLDHYQILKXALTTESAMKKIEDNNTLVFIVDLRADKKKIKDAVKKMYDIQAKKVNTLIR

SEQ ID NO: 218477 - protein, 70 aa, Glycine max
  Clone ID: PAT_MRT3847_39312C.1.pep
GVTSLDREGQRLNVRGSTESRTTYGEFKEGRGGGPSLQLSPEPPPPGKTAHTPQHTQPDKINSNLMAYNI

SEQ ID NO: 218478 - protein, 80 aa, Glycine max
  Clone ID: PAT_MRT3847_39313C.1.pep
EDDRRENGIKKKGKRIKKKVGVSEDLSPCMSVRNATVSAQRYSHLTYRLLTNNATIGKITVLFKLPRSELYLCPDSTVHH

SEQ ID NO: 218479 - protein, 134 aa, Glycine max
  unsure (1)..(134): unsure at all Xaa locations
  Clone ID: PAT_MRT3847_39314C.1.pep
MEIDLNDAVTSEAEKSASCNGECEKGAALSSPTCSSSGSSSTRVSSSYIELWHACAGPLTSLPKKGNVVVYFPQGHXEQAASFSPFSPMEMPTYDLQPQIFCRVVNIQLLANXENDEVYTQVTLLPPAELAGMY

SEQ ID NO: 218480 - protein, 51 aa, Glycine max
  unsure (1)..(51): unsure at all Xaa locations
  Clone ID: PAT_MRT3847_39315C.1.pep
IPRLATPKIEDQEHVHSMLITSARTXPTYVRRSSWNTQSYLLLLLLPPSLI

SEQ ID NO: 218481 - protein, 286 aa, Glycine max
  Clone ID: PAT_MRT3847_39316C.1.pep
EGHIVTNYHVIGNALSRNPNSGEVVARVNILASEGLQKNFEGRLIGADRLKDLAVLKVEAPKDILRPIKVGQSSSLKVGQQCLAIGNPFGFDHTLTVGVISGLNRDISSQTGVTIGGGVQTDAAINPGNSGGPLLDSKGSLIGINTAIFTRTGTSAGVGFAIPSSTVLRIVPQLIQFGKVVRAGLNVDIAPDLIANQLNVRNGALVLLVPANSLAAKAGLNPTTRGFAGNIVLGDIIVAVDNKPVKSKADLLKALDDYNVGDKVVLMIQRGSEKLELPVALEEQSS

SEQ ID NO: 218482 - protein, 312 aa, Glycine max
  unsure (1)..(312): unsure at all Xaa locations
  Clone ID: PAT_MRT3847_39317C.1.pep
SPTRPPTRPVPNPIWKYHKYXGYSNPTKKVHDQIQLYGDVKDLDDFCLKAQLVNYIQYRALLEGWTSRMWKKYTGVLIWKTQNPWTGLRGQFYDHLLDQTAGFYGCRCAAEPIHVQLNLATYGSRVVNTTSEELSNLAMEVSVWDLEGTCPHYKVHENLTALPKKVTPIVDMKYLKSKNPKPVYFLLLKLYKMSDNTILSRNFYWLHLPGGDYKLLEPYRKKKIPLKITSEVFIEGSTYILQMHVQNTSKKPDSKSLTMVHSSTARQSSGCFVTDSLETVYSGTGKEHEVGWFKGIHTCFAGKSHGXKVSEI

SEQ ID NO: 218483 - protein, 133 aa, Glycine max
  unsure (1)..(133): unsure at all Xaa locations
  Clone ID: PAT_MRT3847_39318C.1.pep
FFRIDFVVLIAASNATKEKAQVIRTYTKQLLLVLEYLHKNGIMHRDIKGXNILVDNKGCIKLADFGASKQVVELIISATIYGAKSMKGTPYWMAPEVILXTGHSFSVDIXSVGCTVIEMATAKPPWSQQYQQE

SEQ ID NO: 218484 - protein, 110 aa, Glycine max
  unsure (1)..(110): unsure at all Xaa locations
  Clone ID: PAT_MRT3847_39319C.1.pep
TPTSSAQYGSGKTLKYDISGAGSHSIEDLSEKEDQEAPKEIDXARLRQRIYPQYNEVQAHMETNLFKLPLDDVETPNGSMXDLKICQSTTALPKNTAGGTILRRETIGKF

SEQ ID NO: 218485 - protein, 54 aa, Glycine max
  Clone ID: PAT_MRT3847_3931C.1.pep
SSSSRIGSRVNKTQLLGSCYNLLCYLKLIDLGLQIFSSLISHLPTVYFFQFLCS

SEQ ID NO: 218486 - protein, 68 aa, Glycine max
  Clone ID: PAT_MRT3847_39320C.1.pep
YIETLEIEQRKLSRNFNGHNFSHKCPIRGHNISRRSKLNNGSCPEIRMVQTFHTEDRFGDIIYRDARN

SEQ ID NO: 218487 - protein, 121 aa, Glycine max
  Clone ID: PAT_MRT3847_39321C.1.pep
MASLLTLALLLFCIAFTSHVAVQAHMEDTAFNLMSDALEWPTTMSLYDEDDAQEDVENAYSRRSLFWRRMKYYISYGALSANRIPCPPRSGRSYYTHNCYRARGPVHPYSRGCSAITRCRR

SEQ ID NO: 218488 - protein, 27 aa, Glycine max
  Clone ID: PAT_MRT3847_39322C.1.pep
VFFHDLLILLLCSLQADRVNYIFGLMN

SEQ ID NO: 218489 - protein, 43 aa, Glycine max
  Clone ID: PAT_MRT3847_39323C.1.pep
PHIPSLSLSTFIQTLNLYPGSHLQTMSAYHILQLSLPKLITPQ

SEQ ID NO: 218490 - protein, 90 aa, Glycine max
  Clone ID: PAT_MRT3847_39324C.1.pep
HASDLLPHLLRSSLVISSDHPSSFFSSSFVSITEKFNKATNLRYEYKQFRNRWDSLKKEWQLWAKLIGKDTGLGWDGEKKTIAASDEWWE

SEQ ID NO: 218491 - protein, 359 aa, Glycine max
  unsure (1)..(359): unsure at all Xaa locations
  Clone ID: PAT_MRT3847_39325C.1.pep
HEYSFFQRSKAGGFPAQLRKPIPHLSPNAITFGSLIGSVAIEQQTKVALIRISTRRSPLSLAQAYETRDKHMASHPDLAXEGTIEIVIIKTTGDKILTQPLADIGGKGLFTKEIDEALLNSEIDIAVHSMKDVPTYLPDKTILPCNLPREDVRDAFISLTAASLADLPPASVIGTASLRRKSQILHRYPSLNVQENFRGNVQTRLRKLNDGXFVQATLLALAGLKRLSMTENVTSILSIADMLPIINQRDIGIPCRRDDDKMAEYIDSALXYEEARLSLDSERAFLXKKDGSRRLLNAGYSSRKEDGNCLFRGLVASPDGTRVLETSRVGPYAVEDMIEMGKDAGKEHLSRAGPNFFSS

SEQ ID NO: 218492 - protein, 83 aa, Glycine max
  unsure (1)..(83): unsure at all Xaa locations
  Clone ID: PAT_MRT3847_39326C.1.pep
LACLQWHLQDFXFPSEAKLAMDIAHAETTSEFAGLSASNSKGSNGNLREVDLNETPIVQNKRLLSRMEALTKTGNCSLYFIFL

SEQ ID NO: 218493 - protein, 129 aa, Glycine max
  unsure (1)..(129): unsure at all Xaa locations
  Clone ID: PAT_MRT3847_39327C.1.pep
KKKNRAFNGGAPQDQGAPSGESQSPSPQGIKRXLGPGPGPGTPPAPPPRKPGTPPGLTKGIPPTTGGGNLSPQTGNLKTQGGTPLSKKNPPPFKGGAPTMVAPPIGPPQGKGFKTLGGKLYGPWNRGPP

SEQ ID NO: 218494 - protein, 52 aa, Glycine max
  Clone ID: PAT_MRT3847_39328C.1.pep
LRFLVLPVPVFSSSAFAPVVMLLRPNGAVAGLIRYLLLKTAPALPSVLWGSY

SEQ ID NO: 218495 - protein, 371 aa, Glycine max
  Clone ID: PAT_MRT3847_39329C.1.pep
MGRAPCCEKVGLKKGRWTAEEDEILAKYIQANGEGSWRSLPSLEGLLRCGKSCRLRWINYLRADLKRGNISAEEENTIVKLHASFGNRWSLIANHLPGRTDNEIKNYWNSHLSRKIYSFPGAGAGASAGIMDTPKVVYIPPKRKCGRTSRWAMKKNKTYTQKVNDRINQRHTQIGFPQQNSDTAVPTPPTPSLESEGLSNAVNDFKVLDGDVAEFDEPRTEELEAEVNKRDNSVGGVEESSNTDEDILGLCELEGINEDSGMLLGFSDILESCLAETTCGVWDISEERESNDVVAADACRDKIASSEEGSCSSMNQDWDWESVLEFSNAVDNWEDQDKLLTWLWEDDDCKRLGETDTQILQNDMVIDWFLS

SEQ ID NO: 218496 - protein, 45 aa, Glycine max
  unsure (1)..(45): unsure at all Xaa locations
  Clone ID: PAT_MRT3847_3932C.1.pep
LDVLHASRCESFFSLEHLSISSSGLLRTRSTSFSYVSYVSLPXVR

SEQ ID NO: 218497 - protein, 118 aa, Glycine max
  Clone ID: PAT_MRT3847_39330C.1.pep
GLLFCMAGDTASSFSTCMAIFFSLLLLSHFTMAMLEHNNFSPSTSNKEGAKKRNTKVVASAREESEQNSKKDMALGDTGKGSIHVPKREHSQHSQSQNRIFNASAHEVPSGPNPISNR

SEQ ID NO: 218498 - protein, 200 aa, Glycine max
  Clone ID: PAT_MRT3847_39331C.1.pep
ASSMAANSTDVKLFSKWSYDDVQIMDISLVDYIAVKQKPKYQCYTPHSAARFNKQRFRKAQCPIVERLVNSLMKHGRNNGKKLLAIKIVQHAFEIIHLLTDKNPIQVLVEAIANSGPREDSTRIGSAGTVRRQAVDVSPLRRVNSALMLLTTGAREASFRNIKTISECLADELINASKESSNSYAIKKKDELERVAKSNR

SEQ ID NO: 218499 - protein, 52 aa, Glycine max
  Clone ID: PAT_MRT3847_39332C.1.pep
KSKAIEYAIFMECCLPVKGLPHKFKKRDPGYSGSPPFTYKSFMLTVFPFLIA

SEQ ID NO: 218500 - protein, 261 aa, Glycine max
  Clone ID: PAT_MRT3847_39333C.1.pep
TVPQFLVGCSILSIRQPSGIAGFGRGQESLPSQMNLKRFSYCLVSHRFDDTPQSSDLVLQISSTGDTKTNGLSYTPFRSNPSNNSVFREYYYVTLRKLIVGGVDVKIPYKFLEPRSDGNGGTIVDSGSTFTFMERPVYNLVAQEFVKQLEKNYSRAEDAETQSGLSPCFNISGVKTVTFPELTFKFKGGAKMTQPLQNYFSLVGDAEVVCLTVVSDGGAGPPKTTGPAIILGNYQQQNFYIEYDLENERFGFGPRSCRRKA

SEQ ID NO: 218501 - protein, 57 aa, Glycine max
  Clone ID: PAT_MRT3847_39334C.1.pep
LSSKRTSFMLMPHEFFNCSPAVNVPLPSPCELDSKENDMNETEASKEIEGCVLVAKL

SEQ ID NO: 218502 - protein, 178 aa, Glycine max
  unsure (1)..(178): unsure at all Xaa locations
  Clone ID: PAT_MRT3847_39335C.1.pep
MLGEEDNFLSVEVNMVILIPSEFWAYAKQSNKLDGDLFVEDVECASLIIDPNQQGKAMIFEKPIEEMGRHLKPLYIRAHINDKTLSRVIVDGGVVLNVIPINTMKKIGKGVEDLTTNMKMIKFTCGGTYAWRVLVVDITVGTKTKKIVLFVVDAKPAYTLLLXRDWIHRSKCVTSTIH

SEQ ID NO: 218503 - protein, 116 aa, Glycine max
  Clone ID: PAT_MRT3847_39336C.1.pep
IRLERSEAPIEERKMNKHSRNFSLQVRMLRAILSLRHFISRDLVPIARHTKIVNSHVLCCGSDLPRRTSPDLSDGTIDLRAKRPSPPPPPLPPPGAADRVHQHLSAADHRGSRRAI

SEQ ID NO: 218504 - protein, 205 aa, Glycine max
  Clone ID: PAT_MRT3847_39337C.1.pep
ASANRLSWKSKNQNVNKKECLEDVNLSPGHEKFPSLSSYFNSNHTEENSTGHTSEKRRYGSNLSDKVTMPPQLSSSSPSSALIDCQILQERCSANDEVRNKTYEDSSMSKQHVVSPDSSVEFLASDATNEVVGRSHNNPTKRQYKSAAFILSQEIDSLSHTYASKKQVFFSFTQFRNVHIFSIIFLMVRVGTRQILNFYNTCILK

SEQ ID NO: 218505 - protein, 89 aa, Glycine max
  unsure (1)..(89): unsure at all Xaa locations
  Clone ID: PAT_MRT3847_39338C.1.pep
MVHVVFALANKNVSXAMHKDVSDLQWFGTLLSAPSATATATATARXWVADALAVISESKEVPHDWITDAVIDQVLGDIAFQKFGKGLIS

SEQ ID NO: 218506 - protein, 44 aa, Glycine max
  Clone ID: PAT_MRT3847_39339C.1.pep
ILPLQYMLSCGLYSDNNNRYGGPPLSFLLKKHAYHIIMLSPTFN

SEQ ID NO: 218507 - protein, 43 aa, Glycine max
  Clone ID: PAT_MRT3847_3933C.1.pep
ATGLSPPPCLMLLQSSCCRCRVSHPQQFPILSHDVKPAHCPVS

SEQ ID NO: 218508 - protein, 100 aa, Glycine max
  Clone ID: PAT_MRT3847_39340C.1.pep
LGGERPPKGDQFCVHVYSFSHQGRISKNHKHQQASLDEEREAWHSEWEEPHDSLGLQRDNIQGSTRLVIRRLDRRAGVKRIRWSTLYERNVAMFSRSLLE

SEQ ID NO: 218509 - protein, 55 aa, Glycine max
  Clone ID: PAT_MRT3847_39341C.1.pep
PQPPWFLLFVGPNPLAKSAYFPPPPPPPPPPPPPPPPPPPPPPPPPPPKKEDVIQ

SEQ ID NO: 218510 - protein, 85 aa, Glycine max
  Clone ID: PAT_MRT3847_39342C.1.pep
VSSTRTNLVLCDRTRCIYFALLPRCYPTALSKQVHGHLIRLNRYIGTGIGYFGAPSPDSPGVTPTHLLTYLWLCSAASVYYQVFS

SEQ ID NO: 218511 - protein, 95 aa, Glycine max
  unsure (1)..(95): unsure at all Xaa locations
  Clone ID: PAT_MRT3847_39343C.1.pep
QAYKVKEDRRIKAFHKAMLAKQMWRLIDNKDALVTXVLTAKYFPNSSLLDAKKKLICLITLGVVFDSQKILRXGAIWRIGDGRSVLEVEIFLLLL

SEQ ID NO: 218512 - protein, 68 aa, Glycine max
  Clone ID: PAT_MRT3847_39344C.1.pep
RGECKRGAKEGIRRREGANRGDENGGGREEEEAELAHGSPIGALNRLQIWTLAKIRAETQLEKAVGER

SEQ ID NO: 218513 - protein, 139 aa, Glycine max
  Clone ID: PAT_MRT3847_39345C.1.pep
MSLHNKSLNTLPSHIAFVSKFDQSFSSPMMEEDHKMFGLTSEQEEYCKELDAAVRAVQVACFLCQKLQDSLISKSRSNNNLNSPLTVAGWSVKAIVSRILFECLENENVSIVTEKEVQTLSSTDASELLEAVVKIVNEC

SEQ ID NO: 218514 - protein, 83 aa, Glycine max
  Clone ID: PAT_MRT3847_39346C.1.pep
GGWPNVGETFKTIFPHWVFRANPGKFPWGGGANFSSFPGELSKLGGLVRGGGIFGAPVSPLLFNLPAPSWAKKKGNSGGGFVF

SEQ ID NO: 218515 - protein, 134 aa, Glycine max
  Clone ID: PAT_MRT3847_39347C.1.pep
MEEEDHKMFGLVSEPEEYCKELGVAVRAVQMACFLCQKLQDTLISKSRSNNNLNSPLTVAGWSVKAIVSWILFECLGNENVLIVTEKEVRTLSSTNASELLEAVVKTVNECLAEAPRFGVEEPKSTLGTSKVLE

SEQ ID NO: 218516 - protein, 50 aa, Glycine max
  Clone ID: PAT_MRT3847_39348C.1.pep
WLSNHKDICQHNQYSESILISERDQHHHMSSDQLHSMHDSVPYMSDRYHL

SEQ ID NO: 218517 - protein, 89 aa, Glycine max
  Clone ID: PAT_MRT3847_39349C.1.pep
AGPPPEQAKVFKKAQSNNRGGGDWGPGQNGALMRHASHGWGGNIITNPGGAQGGCVGTPWGGHPGGGEVILTLGAKPTGAHNYKGGGRS

SEQ ID NO: 218518 - protein, 72 aa, Glycine max
  Clone ID: PAT_MRT3847_3934C.1.pep
GLWGNPVSRPRKRDPNTDHREKSRPLPPGPKMIDDQHLGIFANDVGGCIFALVIAYHHVMADPKLKGTYTRY

SEQ ID NO: 218519 - protein, 72 aa, Glycine max
  Clone ID: PAT_MRT3847_39350C.1.pep
KEFYPQFLKILSASLVAGTLKLIFSSQVCPWNYLRRGSPQFSFLGVKAHTTFLNSPPSLEGKKMIKKKNKKG

SEQ ID NO: 218520 - protein, 44 aa, Glycine max
  Clone ID: PAT_MRT3847_39351C.1.pep
NSRADARVRPLVRTPLKRLFIADPLNYHKRFFSIALEHPNDPQL

SEQ ID NO: 218521 - protein, 404 aa, Glycine max
  unsure (1)..(404): unsure at all Xaa locations
  Clone ID: PAT_MRT3847_39352C.1.pep
EKYEMIIEVEAEMEVTVVDGNRTDTGHIIVSTVGGRNGQHKQTIIYMAERVVGHGSFXVVFQAICLETGETVAIKKVLQDRRHKNRVVKTMRLLDQPNVVTLKHCFFPTIEKHELYLIVVLXYFPESKSWMIKQYSNLIRWMTLIIVNLSNNQTIKAXSFMLIYIGVYNCEIISALLFYNLLGLRVCHRXIKLQILLLKPHTHQVKLCEFASAKVMVXCEPNILXICSRYYRAHELIFSATEYTVAFDVWAVGRVLGRDANWIALTYVLRCRXMTQFLIESTFYTIKAHAWYKGFHISKPQXDVHLVSGQLRDSPNLXGTALDAWTHPIYDELSDPPXLLPNDLFIPXTIHFXSNELKGIPGVILVKLVPEHARKQCPFLGLGRVTELQVLFPYENAALSSYLK

SEQ ID NO: 218522 - protein, 123 aa, Glycine max
  Clone ID: PAT_MRT3847_39353C.1.pep
MVQSRKFRGVRQRHWGSWVSEIRHPLLKRRVWLGTFETAEEAARAYDEAAILMSGRNAKTNFPVGENQIVGNHSSNTSSSSTTTLSAVLSAKLRKCCKSPSPSLTCLRLDTENSHIGVWQKRA

SEQ ID NO: 218523 - protein, 69 aa, Glycine max
  Clone ID: PAT_MRT3847_39354C.1.pep
YYENSNGMRNYPETTRPWQHLNLQIPQNHNFIRAQLPDGHRYAELRPLPTEPPRDHRGRHPSGTPMICY

SEQ ID NO: 218524 - protein, 79 aa, Glycine max
  unsure (1)..(79): unsure at all Xaa locations
  Clone ID: PAT_MRT3847_39355C.1.pep
MSWCVGSCVCARVCKCXNGCVGCEMYPNLSYTESTTTETLVMPASTVNAQFXVVKCGIPHENDGCECVANCTCNXCTCK

SEQ ID NO: 218525 - protein, 60 aa, Glycine max
  Clone ID: PAT_MRT3847_39356C.1.pep
TIYLLICLGLTWVPIAGVMVAMMIMLIIPVRQYFLPKFLIGIHLQHLDATSCEDQTALPF

SEQ ID NO: 218526 - protein, 92 aa, Glycine max
  unsure (1)..(92): unsure at all Xaa locations
  Clone ID: PAT_MRT3847_39357C.1.pep
GPPPPKKIVKAPALAGLLXTLFFPGAKRAKKKTPSLARVFQKCEHAFVHYGGLGKGYGFAGNSTPTRDTRFAGDVSGPMAIFVLKGENPRIF

SEQ ID NO: 218527 - protein, 87 aa, Glycine max
  Clone ID: PAT_MRT3847_39358C.1.pep
TINFSIKPDIHIEQERSRVTHKEDAAIKVNVFTHSPKNKSRGTKNRQGTATKTTVTSHFVPQNMCLHCIIRVHHLHIHLFVPIFFIR

SEQ ID NO: 218528 - protein, 155 aa, Glycine max
  unsure (1)..(155): unsure at all Xaa locations
  Clone ID: PAT_MRT3847_39359C.1.pep
TKEDEKSKFHVLLNELQAXLMSTFFVFRLLFHFTGWIDKLKGLHARLDLFFKDFXNSYQEXTAHHIXPLDNKCNNIIPADLLLQSKNDHPLSIDLTYDHIKKAPMDILVPGTXTTASTSTRAMTALIKNPTRTKKAQEDIRNVGGTKNFLHEDDG

SEQ ID NO: 218529 - protein, 65 aa, Glycine max
  Clone ID: PAT_MRT3847_3935C.1.pep
ILLNCIGIYLIVSSIKCPFFHFVPQPLKKCYIHISSHSCLPQSANCQLVFFLLEEAFYSSNFMKQ

SEQ ID NO: 218530 - protein, 121 aa, Glycine max
  Clone ID: PAT_MRT3847_39360C.1.pep
IGGGMLISPLLLHVGIAPEVAIGPCSFMVFFSSTMSALQYLLLGMDHIETALILALICFVASLIGLLVVQRAIQSYGRPSLIVFSVSIVMTLSIVLMTSFGVIRTWKDYTSGRYMGFKLPC

SEQ ID NO: 218531 - protein, 52 aa, Glycine max
  Clone ID: PAT_MRT3847_39361C.1.pep
IGHFSHMALEMRRSDPLSVLQVTGQLELGHALIELVTNGAFQVREESKSPRL

SEQ ID NO: 218532 - protein, 48 aa, Glycine max
  Clone ID: PAT_MRT3847_39362C.1.pep
ETILIPPPLSTAFRPHSIRPSAPISIIFLDEVSHRMNQPNYMSFIPLV

SEQ ID NO: 218533 - protein, 65 aa, Glycine max
  Clone ID: PAT_MRT3847_39363C.1.pep
VVWNDDTVRSTLCFFREREIVSGGKKRYQKKLRKKCTWCIYFRRMRGWKWRDLIACIGLSSTSKF

SEQ ID NO: 218534 - protein, 34 aa, Glycine max
  Clone ID: PAT_MRT3847_39364C.1.pep
PRVRTRVRTLLRSPKDDAKTELKHVCTSISWRST

SEQ ID NO: 218535 - protein, 190 aa, Glycine max
  unsure (1)..(190): unsure at all Xaa locations
  Clone ID: PAT_MRT3847_39365C.1.pep
LEVFLLLSLLSHIAFTSSNPNTITLPLSPLLTKPHSSDSDPFHSVKLAASSSLTRAHHLKHRNNNSPSVATTPAYPKSYGGYSIDLNLGTPPQTSPFVLDTGSSLVWFPCTSHYLCSHCNFPNIDPTKIPTFIPKNSSTAKLLGCRNPKCGYLFGPDVESRCPQCXKPESQNCSLTCPSYIIQYGLGATA

SEQ ID NO: 218536 - protein, 110 aa, Glycine max
  Clone ID: PAT_MRT3847_39366C.1.pep
MTENNPKTHYPSSGGIPSPSDDGPKKLPGKQKMHFNPPEKEIPDAATLRDQWRYAIRQYSKWYSHAWGTAILAGTAFFALGWFIKGENPIPSFNSNKDKDKDKDNHNSHP

SEQ ID NO: 218537 - protein, 54 aa, Glycine max
  Clone ID: PAT_MRT3847_39367C.1.pep
ITLREIVYFCGRLVPPYTVPQNRMVPALLATLHCSTRDRSTYIGRGSCSLLHIL

SEQ ID NO: 218538 - protein, 60 aa, Glycine max
  Clone ID: PAT_MRT3847_39368C.1.pep
RLSVASFLCPNDEALISPAKPLTEGGSEAIYRGFTYAEYYKKFWSRNLDQEPCLEFFKNK

SEQ ID NO: 218539 - protein, 47 aa, Glycine max
  Clone ID: PAT_MRT3847_39369C.1.pep
GSQHTIFKLVQWRVFTTHHCNKIEAEQLNKEHYLFELKLVKSHCKIN

SEQ ID NO: 218540 - protein, 56 aa, Glycine max
  Clone ID: PAT_MRT3847_3936C.1.pep
MSIKLLVSAATIPNPKVFFEMTICGQSAGRIMMELYAHITHRNAENFRALFNGQNG

SEQ ID NO: 218541 - protein, 100 aa, Glycine max
  Clone ID: PAT_MRT3847_39370C.1.pep
ARNSARGWNLAPFYYKVHTPLDNGGKIVIQFIPKKIDALLKKKVQKHEKNTFTKKTNKIHLIAYINKIAGRPLTMAQVTPGINSTPNPIHDPPAPYRIPL

SEQ ID NO: 218542 - protein, 66 aa, Glycine max
  Clone ID: PAT_MRT3847_39371C.1.pep
RPRFHNFFCLNLIFILLLLPTVWSFADRVHKTWQTMRIERIRLLVGINCMFYLLQHQHIQLLLVLI

SEQ ID NO: 218543 - protein, 41 aa, Glycine max
  Clone ID: PAT_MRT3847_39372C.1.pep
QHNVDKSITIIHLANYIRHSESSGIQKGDRVGTLRVIASCE

SEQ ID NO: 218544 - protein, 166 aa, Glycine max
  Clone ID: PAT_MRT3847_39373C.1.pep
MGEQLGLLKVMVVQGKRLVIRDFKTSDPYVVLKLGNQTAKTKVINSCLNPVWNEELNFTLTEPLGVLNLEVFDKDLLKADDKMGNAFLNLQPIVSAARLRDILRVSSGETTLRKVIPDGENCLVRESSINCVNGEVVQNVWLRLRGVESGELELTIKLATPVAPAI

SEQ ID NO: 218545 - protein, 166 aa, Glycine max
  Clone ID: PAT_MRT3847_39374C.1.pep
MGEQLGLLKVIVVQGKRLVIRDFKTSDPYVVLKLGNQTAKTKVINSCLNPVWNEELNFTLTEPLGVLNLEVFDKDLLKADDKMGNAFLNLQPIVSAARLRDILRVSSGETTLRKVIPDGENCLVRESSINCVNGEVVQNVWLRLRGVESGELELTIKLVTHVAPAI

SEQ ID NO: 218546 - protein, 139 aa, Glycine max
  Clone ID: PAT_MRT3847_39375C.1.pep
QFSQPIVGHVAHRTQPLRYATHYSPVLSEHAYMQPSSPAVMVGRSPQLVYVQPVSHDLIHGTTTVPPVSARPLLNHVQFPKQQGGTIGPAMPVSVPPPVLTSGHQPFALQSHIPLLQPGFPVTRPISFPGPNGFYGTKY

SEQ ID NO: 218547 - protein, 43 aa, Glycine max
  Clone ID: PAT_MRT3847_39376C.1.pep
ISKENHTQLRTGHSVIWRPHTNWPFSRQTMTKTGGMIEFGGIC

SEQ ID NO: 218548 - protein, 57 aa, Glycine max
  unsure (1)..(57): unsure at all Xaa locations
  Clone ID: PAT_MRT3847_39377C.1.pep
GPLFGVSSLSGYRPFLSALLVIWPIWPLCPPSRLIVLPLCLALPLSKRCFCXLCAFV

SEQ ID NO: 218549 - protein, 92 aa, Glycine max
  Clone ID: PAT_MRT3847_39378C.1.pep
PGLAANVKFGGCGSYPNLPWVSTSGSGPNGMTISGVTYKYSTDQVRIVCACHGSHMTPEEFVRHAYEDQAFAEGNARLGTVTNGNPAACSHS

SEQ ID NO: 218550 - protein, 342 aa, Glycine max
  unsure (1)..(342): unsure at all Xaa locations
  Clone ID: PAT_MRT3847_39379C.1.pep
MAFPQHHFQQHYQTQQQQQPQNKSFRNLQTIDGQMSQQVAFYNPTDLQDQSQHPPYIPPFHVVGFAPGPVPPADGSDGGVDLQLQWNYGLEPERKRLKEQDFLENNSQISSVDFLQPRSVSTGLGLSLDNTRLTSTGDSALLSLIGDDIERELQQQDAEIDRFLKVQGGRLRQAVLEKVQATQLQSVSLIEDKIXQKLREKEAMVEXINKRNIELEDQMEQLTVEAGSWQQRARYNENMIAALKFNLQQAYVQSRDSKEGCGDSEVDDTASCCNGRSLDFHLLSRENTDMKEMMTCKACRVNEVTMVLLPCKHLCLCKDCESKLSFCPLCQSSKFIGMEVYM

SEQ ID NO: 218551 - protein, 89 aa, Glycine max
  Clone ID: PAT_MRT3847_3937C.1.pep
LLFFSHSLSKSKGSFFLSVSTLLSLLSIILLHFNSYPIHFNHPIHHHHPLFSTHNYIYTITKFILLSKIHNSSKLPTNQTISFIINSFL

SEQ ID NO: 218552 - protein, 142 aa, Glycine max
  Clone ID: PAT_MRT3847_39380C.1.pep
VWICSAFGPFWGFQEGFWKWFSGVMDNALYPVLFLDYMKQSFPIFDRLAARIPALLGITLSLTYLNYRGLHIVGFSAVFLALFSLSPFLIMALLSIPQIRPSRWLLVDFAKVDWPGYFNTMFWNLNYWDKASTLAGEVEDPS

SEQ ID NO: 218553 - protein, 72 aa, Glycine max
  Clone ID: PAT_MRT3847_39381C.1.pep
WSSRLTIMGLGKVAVKIRGAECASEAIILGVITSIGGFLFGYDTGQISGMPTLEDSIHGFGKDQGNGEKAFS

SEQ ID NO: 218554 - protein, 31 aa, Glycine max
  Clone ID: PAT_MRT3847_39382C.1.pep
WNGLVTVSFIWLYSVLLEFIFYSQFSCLFNL

SEQ ID NO: 218555 - protein, 45 aa, Glycine max
  Clone ID: PAT_MRT3847_39383C.1.pep
INKVNVPNLPLSLSYLVNVIFICLFLFINVYQISTKCNLNFFPLK

SEQ ID NO: 218556 - protein, 187 aa, Glycine max
  unsure (1)..(187): unsure at all Xaa locations
  Clone ID: PAT_MRT3847_39384C.1.pep
MAGAKGFVEADNAEAIITRIEHKSRKIETLLKXYKPVEALKTALEGTFAIIGDERCKSAHWLVVHRAIMAIKDVDGMLSSLDPEYYDILMKYLYRGLATGDRPTCDQCLLIHEKLTEKAGLGCILRFLTDIVNTSLISGHSFLFGILCSFPFWCFDFSRVCKTAAIKAVKYQGKYINFGFIAPVLLF

SEQ ID NO: 218557 - protein, 44 aa, Glycine max
  Clone ID: PAT_MRT3847_39385C.1.pep
PGSFGTRICCLYLERHSLPCSEGHSTHCSQGRRVPCLHVLGRVG

SEQ ID NO: 218558 - protein, 95 aa, Glycine max
  Clone ID: PAT_MRT3847_39386C.1.pep
HPPTVAHPTYWPIQAILTTHVKACCRDRLVPLHVLPPTLGNAFLYNWPPPKHPFPFTVVFTLGSSISAFPSRTAYALKCSPPPPQRRRTSYSDDG

SEQ ID NO: 218559 - protein, 73 aa, Glycine max
  Clone ID: PAT_MRT3847_39387C.1.pep
CFHYPLLLPSMGLVLFAWRPGFNTIGVFYMPRVHRCQQPHAQIPFDPNHNRRLCIDLHSHIIIGNSYILLRKQ

SEQ ID NO: 218560 - protein, 73 aa, Glycine max
  Clone ID: PAT_MRT3847_39388C.1.pep
GWETQLDSSNLKSRVGIRSFLSTHASFVRRQTHHIMRYVPTSVNVHSPYRQPVIFQGCKSGYNLTHHPSEDMR

SEQ ID NO: 218561 - protein, 61 aa, Glycine max
  Clone ID: PAT_MRT3847_39389C.1.pep
TPLADKAWFNPETLTLFDYDPMGGGRALFNKEQQILHLTTGKIRYHGPIPNLQGENWAEFG

SEQ ID NO: 218562 - protein, 55 aa, Glycine max
  Clone ID: PAT_MRT3847_3938C.1.pep
PTRPALKKKKKKKKKKKKKKKKKKKKKKKKKKKKKKKRVADKKKAKIKKDYLQKK

SEQ ID NO: 218563 - protein, 94 aa, Glycine max
  Clone ID: PAT_MRT3847_39390C.1.pep
SMGIQSVVDKPIERPSYSWNGAGCTACEMAVVWIKNPLRLNETEDQILDYANALCDMLPSPNGESVVECSTLSEMPNVSFTIGGKVFELSPEQE

SEQ ID NO: 218564 - protein, 76 aa, Glycine max
  Clone ID: PAT_MRT3847_39391C.1.pep
RRIASDQAAHTKTREWERNRLRQPCATHIFCQNHVAKRFWAMHHEHRLPRVVNIVKVMTTFQSQSLHQAGFRQDHQ

SEQ ID NO: 218565 - protein, 66 aa, Glycine max
  Clone ID: PAT_MRT3847_39393C.1.pep
SNVTSQERPSMSLLKTTTLLPISSHTTTFPFLLPRHSFTKTLDPQALPNETLLFRPSTCDILVLNL

SEQ ID NO: 218566 - protein, 195 aa, Glycine max
  Clone ID: PAT_MRT3847_39394C.1.pep
GSRNTSSSVVSTSNSQPVAVPPVVPTLPAVESLPVVVQQVKEITPPAKRGRGRPKRITSDKSPAVVISPVTSGTVEVDTQLQKGIGSGHLASSTPDSVAHSAEVVGVNAPVQQSDPGVSPNSQPVIPMPSIPPNSQVAAVPVSVPIQARGQGRKSHGGEGIRRRGKKQVMTSSPIPCWFCVPDLRLMRNKIHCQS

SEQ ID NO: 218567 - protein, 133 aa, Glycine max
  unsure (1)..(133): unsure at all Xaa locations
  Clone ID: PAT_MRT3847_39395C.1.pep
MADQSEHSKTASPPEDQDRPVRVYADGIYDLFHFGHARSLEQAKKSFPNTYLLVGCCNDEVTHKYKGKTVMTEAERYESLRHCKWVDESIPDAPWVINQEFLXQHYIDYVAHDSLPYADASGAANDXYEFVKS

SEQ ID NO: 218568 - protein, 195 aa, Glycine max
  Clone ID: PAT_MRT3847_39396C.1.pep
MADQSEHSKTALPPEDQDRPVRVYADGIYDLFHFGHARSLEQAKKSFPNTYLLVGCCNDQVTHKYKGKTVMTEAERYESLRHCKWVDEVIPDAPWVINQEFLDKHNIDYVAHDSLPYADASGAANDVYEFVKSVGRFKETKRTEGISTSDVIMRIVKDYNQYVLRNLDRGYSRNELGVSYVKEKRLRVNRRLKTR

SEQ ID NO: 218569 - protein, 101 aa, Glycine max
  Clone ID: PAT_MRT3847_39397C.1.pep
GAQGQVVGGVVVAPLVASSHVVLVAASFANAMFERLPLPLNQHDDDDQVLQEAPRGVMGTEQVADGRNYPFSASLQGEVFGWGGTGTTSSTSTAPPKTHPF

SEQ ID NO: 218570 - protein, 116 aa, Glycine max
  Clone ID: PAT_MRT3847_39398C.1.pep
DGQHHAVFASPSFPDPSSSFSSSSISLVENQSQDTELEPPPAASSNGQIRYRSPSSAELFDGQASSNSPPSHAADQHSPEFESSKMLKRPGRQESLADKIYRFRGTLLVVAIPLLL

SEQ ID NO: 218571 - protein, 179 aa, Glycine max
  Clone ID: PAT_MRT3847_39399C.1.pep
MAIRGVNFKWFDGLIRLEILTCRAIVAINWKRYQSCTHPLHIWTVVDYAAVFTFRLLMFVDNGLASGMGLDFGWPQRYARFCGRVVVLSILALLLYPFLWAWTIVGTLWFSNTKICLPGGGQKWGFLIWLLFSYCGLLCIACLAMGKWLKRIQARMLSAQKGIPVSAFGVLIEMIRVPD

SEQ ID NO: 218572 - protein, 67 aa, Glycine max
  Clone ID: PAT_MRT3847_3939C.1.pep
LESELKTDLNSLHAVLPRVMSGHKQVRQELQRENEDLTVHPSLPAKERPLDAALGALGRPLFSFLMS

SEQ ID NO: 218573 - protein, 125 aa, Glycine max
  unsure (1)..(125): unsure at all Xaa locations
  Clone ID: PAT_MRT3847_393C.1.pep
MKRKEGKPTNNKRGKNRDKKKKKKTRGRKHKKGGSGKPKRXKKKHHGPDEQRHDNKKEKTKRKGHPEEQAQRPNKPKRTIKKDKQSKSKESPKPHDNRAHKNKNSQKRKPREAKNTKPKRRKNEP

SEQ ID NO: 218574 - protein, 75 aa, Glycine max
  unsure (1)..(75): unsure at all Xaa locations
  Clone ID: PAT_MRT3847_39400C.1.pep
GVVGQNNFLIINFYNESFPHSIYIITYHVKLFIQAPXNTFFSWLKNIFLHCSFYVFLIALLFLDSTLTIFSNNET

SEQ ID NO: 218575 - protein, 207 aa, Glycine max
  Clone ID: PAT_MRT3847_39401C.1.pep
MAIRGVNFKWFDGFFLSMLATSIAIVAINWKRYQSCTHPLHIWTVVDYAAVFTFRLLMFVDNGLASGMGLDFGWPQRYARFCGRVVVLSILALLLYPFLWAWTIIGTLWFSNTKICLPGGGQKWGFLIWLLFSYCGLLCIACLAMRKWLKRRQARMLGAQEGIPVSAFGVLVEMIRVPDWAFEAAGQETRSMAQDAAYHPGLYLTPA

SEQ ID NO: 218576 - protein, 38 aa, Glycine max
  Clone ID: PAT_MRT3847_39402C.1.pep
ANPISFPFEFLFTNYLTHQIYHFSLIFNTKFICVHFLL

SEQ ID NO: 218577 - protein, 78 aa, Glycine max
  unsure (1)..(78): unsure at all Xaa locations
  Clone ID: PAT_MRT3847_39403C.1.pep
LIRLTFXWAFKKKKKKKKKGGKIKKKKKKKKGGRYKKTQAYIHLHTKKIKCSFVLPNSIFLAAVLQQKTLLKPSLNPI

SEQ ID NO: 218578 - protein, 60 aa, Glycine max
  Clone ID: PAT_MRT3847_39404C.1.pep
GHLLLGSGLAFSFCILNPYFSAYCNEQCCCFIPFCRFGLSRLNFGLLACYYRSPLPFCYP

SEQ ID NO: 218579 - protein, 37 aa, Glycine max
  Clone ID: PAT_MRT3847_39405C.1.pep
KFQNIHSIMDTLKDHILSKFEIRSLTFSCVGEWNMGR

SEQ ID NO: 218580 - protein, 49 aa, Glycine max
  Clone ID: PAT_MRT3847_39406C.1.pep
GRIYRVKEVHTLPMKHNSKRNSLSHQRATNAEHMVLTTPLNEQGEGITN

SEQ ID NO: 218581 - protein, 216 aa, Glycine max
  Clone ID: PAT_MRT3847_39407C.1.pep
MWCCLWILGSAAQSKRSFLFGSIEMLIKLVPGNSAGTVTAYYIKLPGSKHDEIDFEFLGNSTGQPYTVHTNIYTQGKGSREQQFYLWFDPTADFHNYTIHWNPTAIVWYVDSVPIRVFRNHEKEGIAYPTKQGMRVYTTLWNADDWATRGGLVKTDWHGAPFTARFHHFRARACKWGGAKSINQCASNLPANWWTSRRYKQLSHSQIGQLNWVRNN

SEQ ID NO: 218582 - protein, 44 aa, Glycine max
  Clone ID: PAT_MRT3847_39408C.1.pep
GDDEGCLKVWDAIERTCSNSFNANEDDIYNMTFVSDAMNLVATS

SEQ ID NO: 218583 - protein, 83 aa, Glycine max
  Clone ID: PAT_MRT3847_39409C.1.pep
MWCCLWISGSAAQSKRSFLFGSIEMLIKLVPGNSAGTVTAYYLSSAGSQHDEIDFEFLGNSTGQPYTVHTNIYTQGKGSREQQ

SEQ ID NO: 218584 - protein, 50 aa, Glycine max
  Clone ID: PAT_MRT3847_3940C.1.pep
LNFNVQWSLKCKKVGLLLYMIEYWCVCPLPMRKHQGYGCSKTKNGGVCGY

SEQ ID NO: 218585 - protein, 76 aa, Glycine max
  Clone ID: PAT_MRT3847_39410C.1.pep
AVTCAFYAALILALVTWQAFHPGKVSLSLILVALLLYATGGIIAPAHATTLPHRLLYFSDRCSFFCFCFSSRIFTV

SEQ ID NO: 218586 - protein, 84 aa, Glycine max
  Clone ID: PAT_MRT3847_39411C.1.pep
PSKPLQSLGFLFYILTFSSHYIVHMIHYIPQGIFIINTFSPLFLFWGGGVGLQEDIGFFFSSTHLIFYKIRENKLILPIRFEFP

SEQ ID NO: 218587 - protein, 177 aa, Glycine max
  Clone ID: PAT_MRT3847_39412C.1.pep
MLRSLPKLSLLFSSARNPHYLSSAQRFISQGRIAASRVKIGVVSTVPIRSMSTSTISSAIASEMAAEDQVQRVNLLTSTDDNYDGVIVELDQHMDSATFVSILRASVSHWKLLGKKGVWIKLPIHLVNLVEALVKEGFWYHHAEPKYLMLVYWIPESPSTIPANATHRVGSWFICHE

SEQ ID NO: 218588 - protein, 94 aa, Glycine max
  Clone ID: PAT_MRT3847_39413C.1.pep
KKKKKKKKKIKKKKKKKKIRDIKKKKKKKKKKKKKKKKKKKKKKMGSLFKESIFTYPSLQPITFFLGYLNLILLAVFLKLYICKNLDFTQFNRF

SEQ ID NO: 218589 - protein, 44 aa, Glycine max
  Clone ID: PAT_MRT3847_39414C.1.pep
RKFPLTHRLHRRRVLLQCQHSHSIGKMSLSLEHNTIREKPSLVM

SEQ ID NO: 218590 - protein, 90 aa, Glycine max
  Clone ID: PAT_MRT3847_39415C.1.pep
NSARGKEVGGEQIPQMRAALFVVNCSMLMGNTVTHSPELRNEHSQTLNSFTAQLPFRQHLSRQFPPQLPEDSPFRQEARSAFMALALFQS

SEQ ID NO: 218591 - protein, 267 aa, Glycine max
  unsure (1)..(267): unsure at all Xaa locations
  Clone ID: PAT_MRT3847_39416C.1.pep
KTPSESTLIRDLSLTIKEKDSLLVMGPSGSGKTSLLRAMAGLWKTGTGKITYYVKGGEYPEQSICSDINPGPQRYMFLINQKNCSXLGTLREQLMYPTWTDDVVPMSDSTKEKNALPFLTNLPNLDNANDKPMKPTTDELIKVLEDVRLAHFLARFSLDSIHEWSSVLSLGEQQRLAFARLLLSKPQLALLDESTSALDEVNEVHLYQKIGAANITYVSIGHRSSLCAYHDKILSISTFNSDSEQLNWCIEPIEPTRPESSLKFTNL

SEQ ID NO: 218592 - protein, 212 aa, Glycine max
  Clone ID: PAT_MRT3847_39417C.1.pep
MSNSNWVLDYDYLDNIPLTTLEPPNFSWSSSSPPPTLSVELDDSFGISDGLKENRSRKRLRSSDSKACREKMRRDRLNDRFMELGSILDPRKPLKMDKAVILSDAVRVVSQLREEAQKLRESTENLQEKINALKDEKNELRDEKQRLKVEKENLEQKVKALSSQPSFLAAAGQVVGSKLVPFMGYPGVAMWQFLSPAAVDTSQDHVLRPPVA

SEQ ID NO: 218593 - protein, 80 aa, Glycine max
  Clone ID: PAT_MRT3847_39418C.1.pep
FGSRNPCFIAPLVNSPGATLGYDDSKELFSMGRIDSQWLNRSANKGNIPNGNNTQILDFDEADLFEIVLDGSEKSQNTVS

SEQ ID NO: 218594 - protein, 76 aa, Glycine max
  unsure (1)..(76): unsure at all Xaa locations
  Clone ID: PAT_MRT3847_39419C.1.pep
SKFIDEKIKNFPSRDQQKKLREYSEKFTEIIDRAQQKPTPXLLLCTVYNQSPXPHRQTHHRSKLLKACSXSKITYL

SEQ ID NO: 218595 - protein, 80 aa, Glycine max
  Clone ID: PAT_MRT3847_3941C.1.pep
SCESIPVSGYKSAEGKSGKMAIVHAILIHMPIVYVNKRLSLTGIHLVGAEAFLRIVRSIDWPSLVWHLWLSPVNFFRKDL

SEQ ID NO: 218596 - protein, 72 aa, Glycine max
  Clone ID: PAT_MRT3847_39420C.1.pep
NSARAYLTATSSRIAHSFYYSRHPSLGGFLFDPLPPLIWTFIIIIFHTTPTHSNGHSYFFSSIYTLSLNYPL

SEQ ID NO: 218597 - protein, 119 aa, Glycine max
  Clone ID: PAT_MRT3847_39421C.1.pep
NKPLPHQTTLYYSPLPHPPISHHSLSPVLLQFYYTPNMYTTKREQQRFRFQNDSKTPSFSSTLLDKVYRSIDQSNDMKLYNETMGKKQSRVVVEEEEITACSIRRACCLKMESKRKGGL

SEQ ID NO: 218598 - protein, 175 aa, Glycine max
  Clone ID: PAT_MRT3847_39422C.1.pep
LRVGRITTTSGKSVNKQQKLIRQGMGFLLQQIRADNAPSDVSTSQRESSITKKNTASEEITSKEQIVSLPNKNLIHSAVVEKRENKELPNDSSFFANLKPAQVISNCFNEGTTPDFGLHIHRFIGENNYVRSCRWSPDGNWLLTDSVDRITPTFLYSDSIVFRFCTFAYGRGEEE

SEQ ID NO: 218599 - protein, 62 aa, Glycine max
  Clone ID: PAT_MRT3847_39423C.1.pep
NRALPEHTRREEHKCYGVASIGRIFRQRAYFRACDDLRELILLKGMITEVVTDGITDISCIG

SEQ ID NO: 218600 - protein, 70 aa, Glycine max
  Clone ID: PAT_MRT3847_39424C.1.pep
WHMLPVPPPRTLEQIVRKDMARRGTWMDLGLDTETIGFEMGEAILAELMEDTILSLVIESPESKCFSASI

SEQ ID NO: 218601 - protein, 165 aa, Glycine max
  Clone ID: PAT_MRT3847_39425C.1.pep
IKAVLHASGLTTDQLLMKCLSSDKILDPSLFDQVEYFSNLLCHDQKLLFDSINEVLMEICQHYFGASPWVSFVNPSTRLTPSMKRVTLKVWEGVCWHILPLPPPRTLEQIVRKDMARRGTWMDLGLDAETIGFEMGEDILGELMEDTILSLVSESPESKCFSASI

SEQ ID NO: 218602 - protein, 63 aa, Glycine max
  unsure (1)..(63): unsure at all Xaa locations
  Clone ID: PAT_MRT3847_39426C.1.pep
KVRIKKTASKTVYXRSPWYGPDRVKYLDPFXGDPQSYLTGEFPGDYGWDTAGLSADPQTFVKK

SEQ ID NO: 218603 - protein, 50 aa, Glycine max
  unsure (1)..(50): unsure at all Xaa locations
  Clone ID: PAT_MRT3847_39427C.1.pep
NISSLKILFREIERGRKNGSLHYLLPHNISKPKXXNSXPSKTQXSXHHTT

SEQ ID NO: 218604 - protein, 706 aa, Glycine max
  unsure (1)..(706): unsure at all Xaa locations
  Clone ID: PAT_MRT3847_39428C.1.pep
MLGEAGKKDKAPPGGVAWKTYSRSVSWTDRSPNSRKPPTNSKTRPLLPPLQPLSINKRNVEEWPSAGSDDLGVWPLPQTPXRLHQNLFKSQQPTKDFLFKRDKLAFFDKECSRIAEHIYLGSDTVAKNHELLRQNGITHMLNCVGFVCPEYFKGDFVYKTLWLADSPTEDITSILYDVFDYFEDVREQGGRVLVHCCQGVSRSTALVIAYLMWREGQSFEDAFQFVKTARAVTNPNMGFACQLLQCQKRVHAMPTSPNSVHKMYRMAPHSPYDPLHLVPKMVNQPGARALDSRGGFIIHIPSAIYVWNGKHCNSVMSCNARTAAFQMIRYEGAKGPILTIHEGEEPPGFWIALSGDSDKEEEVMVMEEPSEGMESAELVDSGTTGPRKVDAYDLDFEIFHKALAGGVVPPFSLSDTGLETCLPAREQGWARLRRKFASGLLTSPKLNCDADSDPCNDHQPSVDVEVEKQDSADEPLSPSSIPPCGSPDSFECYPNREKGSPDVRDFSVHGVASSLPLSPPGTSNPFPCFISCSPKFNSKSPTLSPSSSDYASSFTFSPSSTNWSDLSFLSPRQPLSSGLESAEPFNVKDSSFSKNSSLLHKEDVPSPLEEFSANHTFGGVNSNLPMKGSFLSIAECRGSHPPSLMLPPSASESSHVPKNNLVRSLSFSLPELDDNASEINHKEDRSTELCNIMAELDIEEKGNGMT

SEQ ID NO: 218605 - protein, 71 aa, Glycine max
  Clone ID: PAT_MRT3847_39429C.1.pep
QKCNQGFRQTQHIKTQVNKSNFGTGDQEPRSGNNRCEVMGETSNFGRKTRYLEKETQWFRKGTNIYWNQHP

SEQ ID NO: 218606 - protein, 254 aa, Glycine max
  unsure (1)..(254): unsure at all Xaa locations
  Clone ID: PAT_MRT3847_3942C.1.pep
MELQTLCCALPSQPLHFSNHRILSSPAFGTHAPLTNQIHRFRFGNPSKCLKWVIKETSLLGLSESKKLLVHASDSNLNGGLEVHPKQSSSVPVTTFNGVEPFHGKSGSVSFCGLTHQSVEEGKLESSPFGVKGGSFLWVLAPAAFIASLTLPQFFVDNVVEAFLNNVMLIDIVTTFSHEVLFYIGLATFLHVTDRVQRPYLQYSSXRWGLITGLRGYLFSAFFTMGLKIIAPLILLFVTWSAIXIAAFVAITPF

SEQ ID NO: 218607 - protein, 676 aa, Glycine max
  Clone ID: PAT_MRT3847_39430C.1.pep
MAGKKEHETKGRGLKFGLATNAGLIKKIEVYNVHAMYALRYNKRNVQECPSAGSDDLGVWPLPQTPRGSIRTYYSSQPTKDFLFKRDKLAFFDKECSRIAEHIYLGSDTVAKNHELLRQNGITHMLNCVGFVCPEYFKGDFVYKTLWLQDSPTEDITSILYDVFDYFEDVREQGGRVLVHCCQGVSRSTALVIAYLMWREGQSFEDAFQFVKTARAVTNPNMGFACQLLQCQKRIHAMPTSPNSVHKMYRMAPHSPYDPLHLVPKMVNQPGARALDSRGGFIIHIPSAIYVWNGKHCNSVMSCNARTAAFQMIRYEGAKGPILTIHEGEEPPGFWIALSGDSDKEEEVMVMEEPSEGMESAELVDSGTTGPRKVDAYDLDFEIFHKALAGGVVPPFSLSDTGLETCLPAREQGWARLRRKFASGLLTSPKLNCDADSDPCNDHQPSVDVEVEKQDSADEPLSPSSIPPCGSPDSFECYPNREKGSPEAMDFSVHGVASSLPLSPPGTSNPFPCFISCSPKFNSKSPTLSPSSSDYASSFTFSPSSTNWSDLSFLSSRQPLSSGLESAEPFYVKDSSFSKNSSLLHKDVPSPLEEFSANHTFGGVNSNLPMKGSFLSIAECRGSHPPSLMLLPSASESSHVPKNNLVRSLSFSLPELDDNVVKGDTCKQSDLENKGK

SEQ ID NO: 218608 - protein, 77 aa, Glycine max
  Clone ID: PAT_MRT3847_39431C.1.pep
VIWTCHSFWNMFTASQAYYEEVQGYYGASHKIKNNTLTNSKKCPSHIKEPFFRILPALSLCMLLSLPHEADRRSYRN

SEQ ID NO: 218609 - protein, 157 aa, Glycine max
  Clone ID: PAT_MRT3847_39432C.1.pep
MSSPHNSAPHNSSPDNSTPDDATPNNSIPDNSTPDNSIPDNSTPDNSTSNKSAPHNSTPDNATPDNSTPNNSNKSHKSSSVSPPSMEGQSTPTSGKDSSNKSLSNEKSLGSNNDSSNKVAMGAGIVGVILSCASHLCVSFGVVGRRCETIVLLSKPF

SEQ ID NO: 218610 - protein, 62 aa, Glycine max
  Clone ID: PAT_MRT3847_39433C.1.pep
RALEGTKLHYYKNNKSTHLEASTGPVVKSTRHLVEHLLSAQYPMKDPLMRTYNRSYAKKLRI

SEQ ID NO: 218611 - protein, 74 aa, Glycine max
  Clone ID: PAT_MRT3847_39434C.1.pep
RVIPSKARYLVGSFYWSEARGLGDGHRAIRMGPNVLLNGDAFPGDKNSGGVGEGPPIVLWDWTQGDNPQGKIFP

SEQ ID NO: 218612 - protein, 63 aa, Glycine max
  Clone ID: PAT_MRT3847_39435C.1.pep
SHLFFLFPPPRFGFGGSPFGVELNPFFCLLKKKKKKKKKKKKKKKKKKKKKKKKKKKKKKKNK

SEQ ID NO: 218613 - protein, 73 aa, Glycine max
  Clone ID: PAT_MRT3847_39436C.1.pep
QFLNELHPNQHKHSLAVVGESDSKDTYIINELDITRHKNTNDLNLILKVDLKHSTHLLSSKNFIKQSKPTIMV

SEQ ID NO: 218614 - protein, 53 aa, Glycine max
  Clone ID: PAT_MRT3847_39437C.1.pep
ARGIFSHRRLSVSVGIATAAFALAILEGSTQPGVWFPEEVCVEYKCEVKSHIG

SEQ ID NO: 218615 - protein, 51 aa, Glycine max
  unsure (1)..(51): unsure at all Xaa locations
  Clone ID: PAT_MRT3847_39438C.1.pep
YLTKALXVKVXXLXRPLKIMCYFFLGMSFISGSVSLRSECVLTCVNFQCFF

SEQ ID NO: 218616 - protein, 206 aa, Glycine max
  unsure (1)..(206): unsure at all Xaa locations
  Clone ID: PAT_MRT3847_39439C.1.pep
MEEMNRSSSSTSSSSHCCSLESNHRSPNKPDRIKGPWSAQEDRILTRLVEQYGPRNWSLISRYIKGRSGKSCRLRWCNQLSPTVEHRPFSTQEDETIIAAHARXXNRXATIARLLPGRTDNAVKNHWNSTLKRRAKGINVNVNDADNEDDPLTALTLAPPGIANATLTEDAVPDHRASPESAAEGFWDMMRDAIAREVRENAPSNF

SEQ ID NO: 218617 - protein, 30 aa, Glycine max
  Clone ID: PAT_MRT3847_3943C.1.pep
SGKRVIVHLYLKFTDKLPLLKHIELHASNF

SEQ ID NO: 218618 - protein, 226 aa, Glycine max
  Clone ID: PAT_MRT3847_39440C.1.pep
VFLNRMEATNRSSSSTSSSSDCCSSESNPNKPDRIKGPWSAEEDRILTGLVERYGPRNWSLISRYIKGRSGKSCRLRWCNQLSPAVEHRPFSAQEDDTIIAAHAQYGNRWATIARLLPGRTDNAVKNHWNSTLKRRAKGININVNHANNEVAASSSAPSRHFDFEDDPLTALTLAPPGIANGTVAEDAVPDHRASPEGFWDMMRDVIAREVREYVSSNFSDNSGFH

SEQ ID NO: 218619 - protein, 170 aa, Glycine max
  unsure (1)..(170): unsure at all Xaa locations
  Clone ID: PAT_MRT3847_39441C.1.pep
NMKLPVSFVAALFLVAWPCHGASYQRLPLRMKTAYGERSSDVKCTTYKLAVEAHNIRPFKTIPEESVEPTQDYTSGEQLRSDSRTVNHQAVLYACEREYHHNDIFIFGIDNTRLSNIPYYEKHGYGVEESNDTSYDQCSNEGDCPALPXTLKTHDQLSTLDYTYVSPVGR

SEQ ID NO: 218620 - protein, 134 aa, Glycine max
  Clone ID: PAT_MRT3847_39442C.1.pep
MDVCICNCFINSISNCTVLTIWFHIYCKGRFEPAFVRYPLQEAMMKDTLERATDPNFNLKAYLQNAYVHPVFKASLFDEDEEDEEVMSLKLETESVTVPTKRQSRRNTPLASRISGASSPSLPDHGIRNHNPEP

SEQ ID NO: 218621 - protein, 42 aa, Glycine max
  Clone ID: PAT_MRT3847_39443C.1.pep
PLGRPRTRTLKGGTQLRKRINTGRTTLCAYIGPMIKKIQNLN

SEQ ID NO: 218622 - protein, 76 aa, Glycine max
  Clone ID: PAT_MRT3847_39444C.1.pep
HNYRNPGGVYLGPAELNEHNQTHLCTRIAGTYGYMAPECAMHGYMTDKANVHSSGITTLEIVWGMSITINHPTAEC

SEQ ID NO: 218623 - protein, 333 aa, Glycine max
  unsure (1)..(333): unsure at all Xaa locations
  Clone ID: PAT_MRT3847_39445C.1.pep
MSLILDSLLLLKNNGLILYYERFLLINNIFNIIDQEFVWLCQAPITIGTAIPLKASFFITYIMVDGWAGIAAEVLMLKPLIIYHLKNFFLVKTEKDREEAMDPGSIGFNTGEPRIQLYFLLGLVYASVTPTVLPFIIVFFGLAYVLFRHQIINVYNQEYESGAAFWPDVHFRVIIALIVSQIVLMGLLTTKKAASSTPFLIVLPVLTIWFHIYCKGRFEPAFVRYPLQEAMMKDTLERAXDPNFNLKAYLQNAYVHPVFKASLFDEDEDEEVMSLKLETESLTVPTKRQSRRNTPLPSXLSCSSSPSLPDHVIRNNTEPQITGIMYIYDYLWP

SEQ ID NO: 218624 - protein, 95 aa, Glycine max
  Clone ID: PAT_MRT3847_39446C.1.pep
NCKQEAMMKDTLERATDPNFNLKAYLQNAYVHPVFKASLFGEDEDEEVMSLKLETESLTVPTKRQSRRNTPLPSRISGASSPSLPDHGIRNHPEP

SEQ ID NO: 218625 - protein, 54 aa, Glycine max
  Clone ID: PAT_MRT3847_39447C.1.pep
RLYLGSGAPYVEVIRPMAFMACHSMDVSSLHSSSPAAVVHPSLLLCFDGPRKLQ

SEQ ID NO: 218626 - protein, 56 aa, Glycine max
  Clone ID: PAT_MRT3847_39448C.1.pep
MNFKSFGNETGGGGGRPSGNFSLTRQPSVYSLTFDEFMNSMGGSGKDFGFMNMFLP

SEQ ID NO: 218627 - protein, 33 aa, Glycine max
  Clone ID: PAT_MRT3847_39449C.1.pep
LLIEFYWNKWNWIVEGSFTLCFLDLNFPSAIMI

SEQ ID NO: 218628 - protein, 186 aa, Glycine max
  unsure (1)..(186): unsure at all Xaa locations
  Clone ID: PAT_MRT3847_3944C.1.pep
MLYSQSPAFGTHAPLTNQIHRFRFGNPSKCLKWVIKETSLLGLSESKKLLVHASDSNLNGGLEVHPKQSSSVPVTTFNGVEPFHGKSGSVSFCGLTHQSVEEGKLESSPFGVKGGSFLWVLAPAAFIASLTLPQFFVDNVVEAFLNNVMLIDIVTTFSHEVLFYIGLATFLXXTDRVQRPYLQYSS

SEQ ID NO: 218629 - protein, 200 aa, Glycine max
  unsure (1)..(200): unsure at all Xaa locations
  Clone ID: PAT_MRT3847_39450C.1.pep
GGAPPKKKKKKGLFSTYLERKLKHQHFPQGGKNQKKGGGFPFQPPPFHKWGGPPPTPLTPKEPPSARFFFSPQTGAPPWGGPFFRPPPGRGKFGGAQSPGGAPKNPPWGLFFPKPXPGPLSFWPKLXPFKPRGAQRGPGPPGGPKHPWPPFRGGPPPNGGGGVSEPRTPVGQNPGNPPFFSKKCPPPPPGGKNCPGGAPR

SEQ ID NO: 218630 - protein, 93 aa, Glycine max
  Clone ID: PAT_MRT3847_39451C.1.pep
PPLLVRLPSQPISVGRCFSRLPFVPRMWSLSLVRSLVPRLACSLACPSSGPVPCVLFCVSVVSAGGACPRCSKAPRCRVGVWGCRARVASPGV

SEQ ID NO: 218631 - protein, 70 aa, Glycine max
  Clone ID: PAT_MRT3847_39452C.1.pep
SSTIEIPHHLQHNNDRRGPETDDSVDDLRGCSTSYDSYGRNSTRCCRRAALPDLRNPRYTDGTHDDTGLY

SEQ ID NO: 218632 - protein, 75 aa, Glycine max
  unsure (1)..(75): unsure at all Xaa locations
  Clone ID: PAT_MRT3847_39453C.1.pep
MLXXASPLPVRNVCAMMVTNYTLCSEESKPNQNKDEQTSPPPMPCYALGISVLCKTPAFXLASSRIPSLRTRACD

SEQ ID NO: 218633 - protein, 53 aa, Glycine max
  unsure (1)..(53): unsure at all Xaa locations
  Clone ID: PAT_MRT3847_39454C.1.pep
MLXSILYETYLNSLFPILYILGYLIITTSPNYHYYMYLFWTIYYGKFSKLNVK

SEQ ID NO: 218634 - protein, 72 aa, Glycine max
  Clone ID: PAT_MRT3847_39455C.1.pep
SGFNLDLKSALSPCSICFKIFVACPRRIRRWTKVKTFLEAKTNLLFVRLFIYFSFQGYLFISKVEKKKALLQ

SEQ ID NO: 218635 - protein, 62 aa, Glycine max
  Clone ID: PAT_MRT3847_39456C.1.pep
GLCKALSGWEISCHFCTWFILHEEGDELFEKKIIRTHLLGSVFYLLSLIYVHAYRDWLVTYS

SEQ ID NO: 218636 - protein, 71 aa, Glycine max
  unsure (1)..(71): unsure at all Xaa locations
  Clone ID: PAT_MRT3847_39457C.1.pep
QLKDLQKDPPTFCRASPITEDMFHSQPPITGPAHSAYTAXVSLITITFPPDHPRVLPRLPLTQGVMPHITT

SEQ ID NO: 218637 - protein, 70 aa, Glycine max
  Clone ID: PAT_MRT3847_39458C.1.pep
QADMTGRLLAGSLAFESCILHYLIVRILLPRSSNLAQFLKKISLSCGPFIKVYKLIGHTLLDITCIRHCD

SEQ ID NO: 218638 - protein, 45 aa, Glycine max
  Clone ID: PAT_MRT3847_39459C.1.pep
PILVLAYYSRLACSDRHLWRGVLGSFTLSASILRVQLIYLLCNFT

SEQ ID NO: 218639 - protein, 79 aa, Glycine max
  unsure (1)..(79): unsure at all Xaa locations
  Clone ID: PAT_MRT3847_3945C.1.pep
GIQHKKNSWQDGVSGTNWPISPRWNWTYXFQGEDHIGSFFYFPSLNFQRASRSYGGIILNYRPGIPVPFGLPNGDITLF

SEQ ID NO: 218640 - protein, 271 aa, Glycine max
  Clone ID: PAT_MRT3847_39460C.1.pep
AKKDQTVIWQKPLTNECYMEREPGTRPPLCQSHDDPDAVFGVNMEACITPYSDHDNRAKGSGLAPWPARLTTPPPRLADFGYSNEMFEKDTELWQGRVENYWNLLGPKISSNTVRNVMDMKANMGSFAAALKGKDVWVMNVVPRDGPNTLKLVYDRGLIGSIHDWCEAYSTYPRTYDLLHAWTVFSDIETRGCSKEDLLIEMDRLLRPTGFIIIRDKQHVIDFVKKYLTAMHWEAVATADASADSDQDGNEVIFVIQKKLWLATESLRNTE

SEQ ID NO: 218641 - protein, 315 aa, Glycine max
  unsure (1)..(315): unsure at all Xaa locations
  Clone ID: PAT_MRT3847_39461C.1.pep
LDRLLRPGGYFAYSSPEAYAQDEEDQRIWREMSALVXRMCWRIAAKRNQTVIWQKPLTNECYMEREPGTRPPLCQSDDDPDAIWGVNMEACITPYSDHDNRAKGSGLAPWPARLTTPPPRLADFGYSNEMFEKDTELWQGRVENYWNLLGPKISSNTVRNVLDMKANMGSFAAALRGKDVWVMNVVPRDGPNTLKLIYDRGLIGSIHDWCEAYSTYPRTYDLLHAWTVFSDIETRGCSPEDLLIEIDRLLRPTGFIIIRDKQHVIDFVKKYLTAMHWEAVATADASADSDQDGNEVIIVIQKKLWLTTESLRNTE

SEQ ID NO: 218642 - protein, 101 aa, Glycine max
  Clone ID: PAT_MRT3847_39462C.1.pep
MAESNYEYPRLRRPEIVTILAQLQIANVTEQDFTNPNPDFISDLYTRVLIHLDILLEEDNEQLEFHALEHLENPDFHLDSVRAVKLYNQINEVLTTLECPR

SEQ ID NO: 218643 - protein, 87 aa, Glycine max
  Clone ID: PAT_MRT3847_39463C.1.pep
SRGKERQDHGHRAKGTTRITRSFNGTADSSPKPYIRYLRGTCGNRGFAFTVNYELGLATIASPLEEIAVAIHGNHVKRPSLSLLMVI

SEQ ID NO: 218644 - protein, 214 aa, Glycine max
  Clone ID: PAT_MRT3847_39464C.1.pep
PSVGAFTVQCASCFKWRLIPTKEKYEEIREHILEQPFVCQKAREWRPHVSCDDPEDISQDGSRVWAIDKPNIAQPPAGWERLLRIRAEGSSKFADIYYIAPSGKRLRSMVEIQKFLMEHPEYTRDGVTLSQFSFQIPRPLQENYVRKRPARLTSSYEVSEPVEHEQVSPLAWVDPEGHGRRLGLPAPPFMESHDIDPISISRPSKRQATHKGAL

SEQ ID NO: 218645 - protein, 71 aa, Glycine max
  Clone ID: PAT_MRT3847_39465C.1.pep
MPCSSITSTADDSSSNNNNKKKDGSSLHDFKLNESTFLASLMPKKEIGGNRFFDAHPEYDGRGALIAIFDS

SEQ ID NO: 218646 - protein, 174 aa, Glycine max
  Clone ID: PAT_MRT3847_39466C.1.pep
YGCEKTTEGSSIVRKLIQYLMRETLPSWFLSATMFEQDGGESGVMVAKLKGYALAFFVFLSAAFAWGIDNSYSPKQRAEVVGLHLKFLASTLNRNGAMFSRCTTWKAYVSGLVSSMVGQAPSWVREVDADLLKRLSWGLSQMDEHKLALRLLEIGGIGVMGAAAEMIIGFEHRS

SEQ ID NO: 218647 - protein, 38 aa, Glycine max
  Clone ID: PAT_MRT3847_39467C.1.pep
MSELHDQIPTAFDPFADANADDSGAGSTDYVHIRVQQR

SEQ ID NO: 218648 - protein, 51 aa, Glycine max
  Clone ID: PAT_MRT3847_39468C.1.pep
LAADACDYQRSQGRIGQCDERKRAQMRGIASINEPLSPSKDRSAFMWSPRA

SEQ ID NO: 218649 - protein, 74 aa, Glycine max
  unsure (1)..(74): unsure at all Xaa locations
  Clone ID: PAT_MRT3847_39469C.1.pep
PWLSTIVVLLLLLMPIKIIVPLLLPIPKLFNSKSHXFKGPFFIYTNCVSVCQTXTFHXGHCLGFLLICFFTKHC

SEQ ID NO: 218650 - protein, 90 aa, Glycine max
  Clone ID: PAT_MRT3847_3946C.1.pep
LLISKGKAMGLLKAIRWLSDMGMSNAIFELDCNLVVDRITSFDIDFSKSDSIILQCKNILMQNLINSVKLARLMLVLKKFIIYPHVYFKL

SEQ ID NO: 218651 - protein, 61 aa, Glycine max
  unsure (1)..(61): unsure at all Xaa locations
  Clone ID: PAT_MRT3847_39470C.1.pep
MSLKNNMXVLKVFLLLLLLARVTAVRMELCFIKCDQLSSYEDEEYXKACLDLCMCTRSMPA

SEQ ID NO: 218652 - protein, 61 aa, Glycine max
  unsure (1)..(61): unsure at all Xaa locations
  Clone ID: PAT_MRT3847_39471C.1.pep
GPRFWGWEKNCRVCFKKRAANPHRGEISSFYKAKLKKREWQEKNPLLPKETLXQEKRREIS

SEQ ID NO: 218653 - protein, 81 aa, Glycine max
  Clone ID: PAT_MRT3847_39472C.1.pep
PTRPGGSNTSLIVCQSLSGCFGVFPIAVYLSAYQLAVRRESFCIVITLIASQIELNQRQIKGDEPATEHSTVDRRLTTAQI

SEQ ID NO: 218654 - protein, 40 aa, Glycine max
  unsure (1)..(40): unsure at all Xaa locations
  Clone ID: PAT_MRT3847_39473C.1.pep
SQSENMLXXHKGHSQVPELIPXDASLLIAEEDIIKHEEMH

SEQ ID NO: 218655 - protein, 64 aa, Glycine max
  Clone ID: PAT_MRT3847_39474C.1.pep
VGTGRVKPDNKDEKSFKITLCSSGEGSRSVSHSVRISSTITFQSSLLKHRFVRNVHTCFIICDR

SEQ ID NO: 218656 - protein, 76 aa, Glycine max
  Clone ID: PAT_MRT3847_39475C.1.pep
KNRKWWGPQVGICVCAQCGSPPDVIALFVNQALRGVFRLITLRSFLTLSKKESLLPPRGKKRPSFFFHFFFARGPV

SEQ ID NO: 218657 - protein, 100 aa, Glycine max
  unsure (1)..(100): unsure at all Xaa locations
  Clone ID: PAT_MRT3847_39476C.1.pep
AALGGWGCFFFFFFRGRGLAFGALCGFRRPGEPAPACCSPKHLYRNNCLQFSXXXLRGGGPAHFFKPNRLVTPKLLAINLSKYPGIVFLSVFLTLEFFLD

SEQ ID NO: 218658 - protein, 58 aa, Glycine max
  Clone ID: PAT_MRT3847_39477C.1.pep
LIEHVPKVFDLERSNLIPLYLSSKRTTKCSPSKARTQITGWFYCRDILQGLNDSSPAI

SEQ ID NO: 218659 - protein, 38 aa, Glycine max
  Clone ID: PAT_MRT3847_39478C.1.pep
FPRPILRPPPLDVSLYPQFLSALFSRLSPSGAFWYMAS

SEQ ID NO: 218660 - protein, 44 aa, Glycine max
  Clone ID: PAT_MRT3847_39479C.1.pep
KFFYTGATAKKWHYYNVLLVILKIGACDIPLTKNRKSPDIITCE

SEQ ID NO: 218661 - protein, 65 aa, Glycine max
  Clone ID: PAT_MRT3847_3947C.1.pep
LSWVHSLYPTYKNSGKGCDKQQSQVSDLLNLFEIHMCSFWDNFGASIIKFLERGPISLPFFFFML

SEQ ID NO: 218662 - protein, 31 aa, Glycine max
  Clone ID: PAT_MRT3847_39480C.1.pep
KELQSGMGNPTRFMFIIMQSCFQIKSTAFII

SEQ ID NO: 218663 - protein, 61 aa, Glycine max
  Clone ID: PAT_MRT3847_39481C.1.pep
PLNPLFSFLAQHKLYTHTSSFKTGHLITYRHITHQLFTPNISQHKTTTTQTVPISHKIHPS

SEQ ID NO: 218664 - protein, 373 aa, Glycine max
  unsure (1)..(373): unsure at all Xaa locations
  Clone ID: PAT_MRT3847_39482C.1.pep
RGATVCYRDNVKSLCYRLNHRHLSSLVTDVAGYARSPGRSPVIFGPTDLVCCRTLQGHAGKVYSLDWTSEKNRIVSASQDGRLIVWNALTSQKTHAIKLPCAWVMTCAFSPTGQSVACGGLDSVCSIFNLNSPTDRDGNLPVSRMLSGHKGYVSSCQYVPDEDTHLITGSGDQTCVLWDITTGLKTSIFGGXEFQSGHTADVLSISINGSNSRMFVSGSCDATARLSDTRVASASXVRTLHGHYEQCSDFKCMREMFIHSTSSDEGTCRLFDIRTGHQLQVYYQQHSDNDITPVTSIAFDASGRLLFAIYTNGDCYVWDTLLAKVVLNIGSLQDSHEDRISCLGLSADGSALCTGSWDTNLKIWAFGGHRRTT

SEQ ID NO: 218665 - protein, 171 aa, Glycine max
  Clone ID: PAT_MRT3847_39483C.1.pep
DAWVNVEHVHIIGMSESAHIAGVTGEFISSGRVARITGLDPSRPFIDMTKKRGRLSVDDADLVDVVHTNAGTLGEQSAVGHIDFYPNGGKKQPGCENEFIGSCSHERAVLLFVESINSPHAFQAWRCENEWAALHDRCQISDTLATMGEHLSYRVNGSYLLKTTGSSPFER

SEQ ID NO: 218666 - protein, 84 aa, Glycine max
  Clone ID: PAT_MRT3847_39484C.1.pep
HALAFLRDREIHGDALKRKKGQRHGQGTYPDQPLNPKELHGPSGRISTRRRKIVKAERFDRPNGTTRANLWGAQPNYTKRTGQE

SEQ ID NO: 218667 - protein, 147 aa, Glycine max
  unsure (1)..(147): unsure at all Xaa locations
  Clone ID: PAT_MRT3847_39485C.1.pep
SLIRNVVTLISILLKEIKFIYYXSFGICLSIRQFNLSIFHGLFLSNEKLVFYFFVCSLPNIVRTYWLFFLALCCKFIVCHESMHFSTLIKIERRIDVKIPEFICLFNGRLSTALVMLFRGEKGYDHCHWCRYLTCVPTSKWECSNDG

SEQ ID NO: 218668 - protein, 59 aa, Glycine max
  Clone ID: PAT_MRT3847_39486C.1.pep
VGEFYKPGTPGGRPLNPEPKALVLGFQEFLNFFFFLGTILRGKKSLFGWHRLRDHFFSL

SEQ ID NO: 218669 - protein, 55 aa, Glycine max
  Clone ID: PAT_MRT3847_39487C.1.pep
IRHSKASVSIHSRPWQQHQWIVNECCINQSQANPAWPLGDFYAFPKSKLEHALLP

SEQ ID NO: 218670 - protein, 61 aa, Glycine max
  Clone ID: PAT_MRT3847_39488C.1.pep
LCHTEEGLNTNVLQRTSKACPHGIGRNQTHQSLDPYWSTGNVKLPELPRCSTQDYSAMPIK

SEQ ID NO: 218671 - protein, 61 aa, Glycine max
  Clone ID: PAT_MRT3847_39489C.1.pep
SRHRKQLFWLNYQHYPLLIGYKDGDNSTSTRNSNNNRQKTPPRRPHNPRERRRPGASKTRT

SEQ ID NO: 218672 - protein, 227 aa, Glycine max
  Clone ID: PAT_MRT3847_3948C.1.pep
MASAKRWLPLEANPDVMNQFLWGLGLREDEAECCDVYGLDEELLEMVPKPVLAVLFLYPITTQSEEERLQQENEKKEYNSRVYFMKQTVGNACGTIGLLHALGNLTSEVKLVEGSFFDNFFKSTASLDPLQRATFLENDKEMEVAHLVAATAGDTEASDNATAHFICFACVDDELYELDGRKSVPISHGPSSPSTLLRDAAKAIQSMIQKNPDSFNFNVIALCKKSG

SEQ ID NO: 218673 - protein, 86 aa, Glycine max
  Clone ID: PAT_MRT3847_39490C.1.pep
DWWWEHKLTHWYESATASSRSCLGSSLRQGHPCSSIYFGGPLQFHVQWVSGGLCSPTSPLSSGRRSCQFSADRPPSDLSWLATFDG

SEQ ID NO: 218674 - protein, 337 aa, Glycine max
  unsure (1)..(337): unsure at all Xaa locations
  Clone ID: PAT_MRT3847_39491C.1.pep
MAPKGLTFLAVLICVSALSLSPSVAGEGQNNGLVMNFYKESCPQAEDIITEQVKLLYKRHKNTAFSWLRNIFHDCAVQSCDASLLLDSTRRSLSEKETDRSFGLRNFRYIETIKEALERECPGVVSCADILVLSARDGIVSLGGPHIPLKTGRRDGRRSRADVVEQFLPDHNESISAVLDKFGAMGXIDTPGVVALLGAHSVGRTHCVKLVHRLYPEIDPALNPDHVPHILKKCPDAIPDPKAVQYVRNDRGTPMILDNNYYRNILDSKGLLIVDHQLANDKRTKPYVKKMAKSQDYFFKEFSRAITLLSENNPLTGTKGEVRKQCNVANKHHDQDP

SEQ ID NO: 218675 - protein, 68 aa, Glycine max
  Clone ID: PAT_MRT3847_39492C.1.pep
VQIMKEVPSERTGAALFLLCSLLIHIHYSLFLANSQTLKPFSMMLFRSNTFTMVGRRTWKTTPFLFIW

SEQ ID NO: 218676 - protein, 54 aa, Glycine max
  Clone ID: PAT_MRT3847_39493C.1.pep
ASRKERTSRQESETIFNTDQLYEYTNVTNNVDMDQYLNITMKIGYNTPKTPNVN

SEQ ID NO: 218677 - protein, 74 aa, Glycine max
  Clone ID: PAT_MRT3847_39494C.1.pep
KFYIKTLFILTGVHLKWQPGPNISGLLILKLIPSSHLSSHLYTSITSNLHPHSAPTIFTLHLTHHLVSYTTKYH

SEQ ID NO: 218678 - protein, 75 aa, Glycine max
  unsure (1)..(75): unsure at all Xaa locations
  Clone ID: PAT_MRT3847_39495C.1.pep
FFLWDDIDVLQVIPRPFSSLWSPXLVITLCKGRCVDARHGAQALDQQARLTFQSQVTCVVQWCPHLAHSRSMAFI

SEQ ID NO: 218679 - protein, 104 aa, Glycine max
  Clone ID: PAT_MRT3847_39496C.1.pep
THFPKHKRGSKKFPNLSTGGPPGKIFKRGGLGKKRGTGGFSPTILRVSPPIFWRGGAFPPKKLGPPQKNTGGGLKPRFPPPKKRGQPNFWGPQAPLPPPGRGGP

SEQ ID NO: 218680 - protein, 183 aa, Glycine max
  Clone ID: PAT_MRT3847_39497C.1.pep
MSNRKDNTDDESSERGIFSHLGYPSAPPYPPPHGYPPSGYPPPGGYPPTAYPPPAYPPPGVYPHSGYYPSEYPPAYPPPGGYPPTTYPHSGYHPPAYPAPHGYPPAAPPYPAGRGAGMGGLLAGGVAAAAAAYGAHHMAHGYHRFGHGAYHGHGKFKHGKFGKRWKHGRFGFGKYKHGWKRWK

SEQ ID NO: 218681 - protein, 179 aa, Glycine max
  Clone ID: PAT_MRT3847_39498C.1.pep
MSNRKDKNDDESSERGIFSHLGYPSAPPPYPPPHGYPPSGYPPPGGYPPTAYPPLGGYPHSGYYPSEYPPAYPPPGGYPPTAYPHSGYHPPAYPAPHGYPPAAPPYPGGRGAGMGGLLAGGVAAAAAAYGAHHMAHGYHRFGHGAYYGHGKFKHGKYGKRWKHGRFGFGKHKHGWKRWK

SEQ ID NO: 218682 - protein, 53 aa, Glycine max
  Clone ID: PAT_MRT3847_39499C.1.pep
MDADYKAPCFLNNCYWPLDLVAELLGEWNLNVRDVHSGKPQSCRAAASEEFRK

SEQ ID NO: 218683 - protein, 43 aa, Glycine max
  Clone ID: PAT_MRT3847_3949C.1.pep
EYRNTNCGHHLNHYFNTMTALQINTCSRHCTLSDNLPIEHYAE

SEQ ID NO: 218684 - protein, 311 aa, Glycine max
  Clone ID: PAT_MRT3847_394C.1.pep
MGVEWLLVCHGLVTAVVVVSFLCGRWPIFEGTFIQRIHYFLTFGAYDYFLRFVGAVFGPKCTDAVLSVEYYCCDRPNPLLQITYIVIIGVTYYFIAKSCFAYIPGYYLSGIHRYTSFLAVVVGILLFLLTSFSDPGTINTENVAHYISAYPYDNIIYSEKECSTCKIPKPARSKHCSICDRCVARFDHHCGWMNNCIGEKNTRYFMAFLLWHFLICLYGTVAIVLVLAGRLRELRVVDILTVYYGIENSFLDLAPNVVQWLLGSYNTQILLMVFLAIVGMLLAGFFGYHAKLCLTNTTTNEVPSTCNLQMY

SEQ ID NO: 218685 - protein, 235 aa, Glycine max
  Clone ID: PAT_MRT3847_39500C.1.pep
MGLWNTTNAVSCRFHKFGDDQKNLVFQGDATSSSRGIELTKLDGGGKPVGGSVGRVLYSSPVHLWESSTVVASFETDFTFSISSDSTTPGDGLAFFIAPFDTKIPPNSGGSNLGLFPSDNVVAVEFDTYPNRDKGDPDYRHIGIDVNSIVSKATARWEWQNGKIATVHISYNSASKRLTVAAFYPGTQTVTLSHDIELNKVLPEWVRVGLSASTGQQKQTNTIHSWSLAFNNSIG

SEQ ID NO: 218686 - protein, 71 aa, Glycine max
  Clone ID: PAT_MRT3847_39501C.1.pep
CSHARGLGSPRRTAPPTSGGPGPNAWHVASGVESESSWEEGVALDGRRKEKRVEKQDEAAIDVGLECEVGT

SEQ ID NO: 218687 - protein, 147 aa, Glycine max
  Clone ID: PAT_MRT3847_39502C.1.pep
MSGCSNEEEEISFSESDRHGYEGGSDDDDSEIGKNEHRSSRRRRMGSGFGKVVVHQFTKAKKQVRRISSRKSLVPKPKGKVVNVERGVSGRSGCRFCFSRPIVLESLYEESPTSDPNDPNFTHAMLTTLLDTNDFYSKECNPHLDLD

SEQ ID NO: 218688 - protein, 128 aa, Glycine max
  unsure (1)..(128): unsure at all Xaa locations
  Clone ID: PAT_MRT3847_39503C.1.pep
PPGGPPPPTPTRRPPPRPPPPPTARPSPRSLPRPPPTGLQHPALPRPPGCLPSPPPNHPALSPPGXPHGRPPPPYAPGPHRPVLPPDAPPAVGKQRTVTRRHRRLVPPPRERRHSGKKNPMKPVAAPN

SEQ ID NO: 218689 - protein, 68 aa, Glycine max
  Clone ID: PAT_MRT3847_39504C.1.pep
VRDTEDYEGSFSQSEAEFATVSTEKKEKHFSFYVILTLISFFFLVLSLDSSFNVYFLYVFLGRSTSRD

SEQ ID NO: 218690 - protein, 73 aa, Glycine max
  Clone ID: PAT_MRT3847_39505C.1.pep
REIVTLIQIHSVSNGCLLSFGVDRHEMCRYVCPGARGHYKVCVVPSYLGVPEYNGALVHHLLVHSLYHQCLYY

SEQ ID NO: 218691 - protein, 70 aa, Glycine max
  Clone ID: PAT_MRT3847_39506C.1.pep
FDYLKQTHSESNELLDDVIKYDRLEIDPNIIGSGGSASVRVAYCNNTLAKFAVKIFNESFQEEIIKEVCY

SEQ ID NO: 218692 - protein, 187 aa, Glycine max
  unsure (1)..(187): unsure at all Xaa locations
  Clone ID: PAT_MRT3847_39507C.1.pep
SRTTLMVHESWEYFIKCLCGGEDDALILCGSGTTAAIYKLQXLMGITVPSVLRERVLNILVSQERWVAFVGPHEHHSNLLSWRQSLDDVEEIVLDLKGVLDIDALKIQLDAYRDTNPPMLGSFSACSNVTAIYSHTLAVAHLLHKYIAYACFDCAATGPYVDIDMMSGESDGYDAGFPDAHKFLEGP

SEQ ID NO: 218693 - protein, 109 aa, Glycine max
  Clone ID: PAT_MRT3847_39508C.1.pep
AFSFSAVSGGYAASLGAALFLLHFCYRSVVSSFGRRVFFGVGVLSAPVGVVLGVRVWSASVGLGFCSVFLAPLFCCGWVSLYGVGRRPVSLRGVWRRPLYHPRWFAGRG

SEQ ID NO: 218694 - protein, 47 aa, Glycine max
  Clone ID: PAT_MRT3847_39509C.1.pep
FNTGGNVQRTVVLQITIPFLATLTLFSTNPFAGSQKGGYSNRANLTI

SEQ ID NO: 218695 - protein, 32 aa, Glycine max
  Clone ID: PAT_MRT3847_3950C.1.pep
MTTQASAFFVTVPSVATPFRLHRNPFLVLAQS

SEQ ID NO: 218696 - protein, 57 aa, Glycine max
  Clone ID: PAT_MRT3847_39510C.1.pep
LFFKIVIDGYGHPFFIRYVFFQIVDFFFSILFSFSIVFCHCHRRCLFLKPPSYRFVF

SEQ ID NO: 218697 - protein, 59 aa, Glycine max
  unsure (1)..(59): unsure at all Xaa locations
  Clone ID: PAT_MRT3847_39511C.1.pep
XFFLAFCTSWLSPXCXPSSSFCLCPQGXXXXXXXSNAFCPLFLXXHDLXLEPPXXLAVG

SEQ ID NO: 218698 - protein, 123 aa, Glycine max
  Clone ID: PAT_MRT3847_39512C.1.pep
MASDLEAKAKEAFVEDHFELAVDLLSQAIHLEPNKAELYADRAQANIKLNNFTEAVADANKAIELNSSLPKAYLRKGTACMKLEEYETAKAALEVGASLSPDNSRFATLIKECDKLIAGLIYL

SEQ ID NO: 218699 - protein, 167 aa, Glycine max
  unsure (1)..(167): unsure at all Xaa locations
  Clone ID: PAT_MRT3847_39513C.1.pep
MKLSQTLVRTPFSTTSPALLRTQNSILFSNGKRVSVLEYQSLRLPSCACSNSGSAVTSSSSAAAKKNPSPPAPQVVTNSGYDSAVTQELPGKLEALEEGIENAIYRCRIMAILGVCGSLTGSSLXSITGCTFDTASFMQYSVNRSRVIQTLIEAIDVYLLRTVMLDL

SEQ ID NO: 218700 - protein, 50 aa, Glycine max
  Clone ID: PAT_MRT3847_39514C.1.pep
THPLVKNKKPRVYLTIVVKYIYIIACMSEQFFVFFKKTKPKKTKKKKKKK

SEQ ID NO: 218701 - protein, 75 aa, Glycine max
  Clone ID: PAT_MRT3847_39515C.1.pep
SPLLCPVCAVCSLSEGPFPSLGSLFWARFGPSAPSSFLPRWGAVAPLSFIYPPPCCVVGALLSTRGSARPFRPGP

SEQ ID NO: 218702 - protein, 22 aa, Glycine max
  Clone ID: PAT_MRT3847_39516C.1.pep
KHSILHSKAHFIVNSPSLSSSY

SEQ ID NO: 218703 - protein, 79 aa, Glycine max
  Clone ID: PAT_MRT3847_39517C.1.pep
MKKRQVVVKRDYATSSPAVGNIRYGECQKNHAANTGGYAVDGCREFMASAGEGTNAALTCAACGCHRNFHKREVLHGVN

SEQ ID NO: 218704 - protein, 50 aa, Glycine max
  unsure (1)..(50): unsure at all Xaa locations
  Clone ID: PAT_MRT3847_39518C.1.pep
FXXQKLQTCXIGQVXIXCLXXINXQKFHLPMXQVCXFGKXXXFLLISIVF

SEQ ID NO: 218705 - protein, 86 aa, Glycine max
  unsure (1)..(86): unsure at all Xaa locations
  Clone ID: PAT_MRT3847_39519C.1.pep
ARSTRVADLGCXXISXXCXAXEWQICGCXRFRXEWPQNAXSXVVIXXXXILSSDLCHDQVRLHGRSKXVNXXSFMVWXXXARGXPG

SEQ ID NO: 218706 - protein, 322 aa, Glycine max
  Clone ID: PAT_MRT3847_3951C.1.pep
ARVSYRRIFIEQRMAFIEFDAKIVEMEANLKQHEKFALQASLHFDNCKKESENCRQDLTDSLKYAKSIARLTPELKKEFLEMPTTIEDLEAAIQDTTSEANSILFVNHNILEQYEDRQQQIEDLAAKLEADKKESTRCLAELNNIKGKWLPTLRNLVAKINETFSFNFQEMAVAGEVSLDERDMDFDQFGILIKVKFRENGQLQNLSAHHQSGGERSVSTIVYLVSLQDLTNCPFRVVDEINQGMDPINERKMFQQLVRAASKPNTPQCFLLTPKLLPDLQYSEACSILNVMNGPWIEQPSKVWTAGDRWSIITGLVGDTHC

SEQ ID NO: 218707 - protein, 91 aa, Glycine max
  Clone ID: PAT_MRT3847_39520C.1.pep
MKKRQVVVKRDYATSSPAGGNIRYGECQKNHAANTGGYAVDGCREFMASACEGTNAALTCAACGCHRNFHKREVLHGVNWNSARELVMTLE

SEQ ID NO: 218708 - protein, 37 aa, Glycine max
  Clone ID: PAT_MRT3847_39521C.1.pep
FMITASSSCTIEHSLSVIRGHSKASINDTLRLCKYIV

SEQ ID NO: 218709 - protein, 114 aa, Glycine max
  Clone ID: PAT_MRT3847_39522C.1.pep
GSRASPILLAKCSDSLCSLDLYVLGVYIHLFLCTWSIYTFGDDCPFNLCVFSLPHRLILSAIPHYVLHTVNAHSLRYSAPIALLDTEPLAYIIGFFCLSKPSMTIPLAPYKSAH

SEQ ID NO: 218710 - protein, 538 aa, Glycine max
  Clone ID: PAT_MRT3847_39523C.1.pep
QNLISQNRSTNVDSSNSSLDIQTSGALWDMIQLVGERARRNTVLLMDRDNAEVFYSKVSDLEDLFYCLDAELEYVIRPEHPLGIQIQRACKLSTACVTIIRTCFNYKNENRLWYPPPEGLTPWYCQPVVRTGIWSVASVLLHLLNEISGLDKTAKLDLYNHLEALAEVLFEAYSGAVTAKNECGEEHKGLLNEYWERRDSLLESLYQKLCGQFVVINIMHESLGPNGGFSYYVFMKLHESRQFSQLLRLGEEFPEELSIFLREHPDLLWLHDLFLHQFSSASETLHALALSQNLLSTSVAEEEGEQEYMKMKLKLTDRKNLLFLSKIAAFAAGNDAGTQVKVDRIEADLKILKLQEEVMKRHPSIEDRQLVEAQLLHPEDLIKLCLEGEDRELSLSAFDVFAWTSSSFRKIHRKLLEDCWKKAASQDDWSKFHDSYRAEGWSDQEILQNLKNTILFQASSRCYGPQSETFEEGFGQVFSLRQENMETSILGDMGSSVQTILMQHKDFPVAGKLMLMAIMLGSEHCGDIRIEEGPSPME

SEQ ID NO: 218711 - protein, 177 aa, Glycine max
  unsure (1)..(177): unsure at all Xaa locations
  Clone ID: PAT_MRT3847_39524C.1.pep
MVSFFPGFITEGRDVQSLKVDLYEAIAPLDRGAEATPEDQQRVDQIARKLEAVNPVKEPLKSDLLNGKWELFYTTSQSILQTQRPKLLRPNGKIYQAINVDTLRAQNIETWPFYATATAVPLNSKRVAVKFDFFKIASLIPIKSPXSGRGQLEITYLDEDLRISRGNRGNLFILKMV

SEQ ID NO: 218712 - protein, 610 aa, Glycine max
  unsure (1)..(610): unsure at all Xaa locations
  Clone ID: PAT_MRT3847_39525C.1.pep
TLTEDEDILCAQYVNCIKYHIGVLDGKSLSWYGKFKLHDLIEQIGKEIVRQESPKEPGKRSRLWLPEDIIQVLEVNKVTVIIPEQRNINDFGFKVEAMAIKXRWYRKVFRYNNNFKIHIIRDGNFSNNPKYFPKSLKILVMGKYPAHCLTIEDHPKKISKYILFIQFLFLTFSFLFFVITEVRGSKNFKFGRFKCFIQIPNVTDLPFLXECSSERCLKQITVHASIGCLCKLKILSSYTRKKLRSFPPIKLTSLEKLDLSFCYSLESFPEVLGKMENIRELYLLKSSIKEIPFSFQNLTGLPKLPTIFFKQCNGXVPSSIIMMPELTNTSATGLKGWKWLKQEEDEGKMGSIVSSKVKQLSTLSCNLDDDFFSIDFTWFAHVKELYIAENNFTILPECIKECQFLRLLDVCDCKHLREIRGIPPNLKHFFAINCKSLTSSSISMFLNQELHEAGNTVFCLPGDRIPEWFNQQSRGXSISFWFRNKFPDKVLCLLVAPMQDQIFRPMVFINGNECSSYSHHYLIGMHHAYLSDLREIKFRNSPYEVPVENDWNHLKVTGPCGLDTYIHPVKIGIHIFKQENSMEDVQFTDPYSKRKSDDDLESLESQTTSC

SEQ ID NO: 218713 - protein, 46 aa, Glycine max
  Clone ID: PAT_MRT3847_39526C.1.pep
REISKIVFFFFTMQSQSLNFIDFQSIKSNYWNHIVITFLQSFIYAP

SEQ ID NO: 218714 - protein, 299 aa, Glycine max
  Clone ID: PAT_MRT3847_39527C.1.pep
GPEFPGRPTRPRTRGFATVTRAAELMFYLEDPLNFDTLAVVFNRSSRFGRLQSIKCSIAGKNVYIRFTCSTGDAMGMNMVSKGVQNVLDFLQSDFPDMDVIGISGNYCSDKKPAAVNWIEGRGKSVVCEAIIKDDVVKKVLKTSVAALVELNMLKNLAGSAVAGALGGFNAHASNIVSAIFIATGQDPAQNVESSHCITMMEAINDGRDLHISVTMPSIEVGTVGGGTQLASQSACLNLLGVKGASKESPGSNSRLLATIVAGSVLAGELSLMSAIAAGQLVNSHMKYNRSSKDVTKIS

SEQ ID NO: 218715 - protein, 67 aa, Glycine max
  Clone ID: PAT_MRT3847_39528C.1.pep
DINQGIIKVGIYARDAKDMQPSLTDRPRVSFSSFGYVTFLVDMVAMRSKYSKIVSPVCVVNRCCCKL

SEQ ID NO: 218716 - protein, 241 aa, Glycine max
  Clone ID: PAT_MRT3847_39529C.1.pep
MMLIDTHVHLNDEQYDEDLNEVISRAREAGVDRMFVVGFDTPTIERTMELIDKYDFIYGIIGWHPVDAIDCTDERLEWIESLSKHPKIIGIGEMGLDYHWDKSPSDVQKEVFKKQIALAKRVQLPIIIHNREATQDCIDILIEEHVEEVGGIMHSFSASPEIADVVINKLNFYVSLGGPVTFKNAKQPKEVAKHVPMDRLLCETDAPYLSPHPYRGKRNEPERVTLVAQQIADLRGMTYEE

SEQ ID NO: 218717 - protein, 57 aa, Glycine max
  Clone ID: PAT_MRT3847_3952C.1.pep
GGFPSAFLLTDFIALFTAFLIAASGFFRKGQNQTTRLSPGHKMSSCQWALFAELLKD

SEQ ID NO: 218718 - protein, 94 aa, Glycine max
  Clone ID: PAT_MRT3847_39530C.1.pep
NTSIIYIYIYIYIYIYIYIYIKLLAAHDIGQLKSYLNFTTIIHFSQKHKRRRRRKHVMNFTTLETILEIFSGNPQMLASPLMMCSSIPTKSDMA

SEQ ID NO: 218719 - protein, 86 aa, Glycine max
  unsure (1)..(86): unsure at all Xaa locations
  Clone ID: PAT_MRT3847_39531C.1.pep
RPCWRPRVREHEGDDPFLGGIXKYATPMMPLDEEILSKVAQDMGEEWLDCVDEEDSFEERIFKCYHLKEAEAFGLYCHEYRPSHLS

SEQ ID NO: 218720 - protein, 41 aa, Glycine max
  Clone ID: PAT_MRT3847_39532C.1.pep
MQRRTTRLSWVLSRHYSPHLRSILPSPESVVETEGCSVTLR

SEQ ID NO: 218721 - protein, 41 aa, Glycine max
  Clone ID: PAT_MRT3847_39533C.1.pep
YVPPRPPKNGFLEIAVVVWWFLILIIMYRSFYTQLYSYNWK

SEQ ID NO: 218722 - protein, 161 aa, Glycine max
  unsure (1)..(161): unsure at all Xaa locations
  Clone ID: PAT_MRT3847_39534C.1.pep
GNLVAARELFDAMSQRDVISWTNMITSYSQAGQFTEALKLFKEMMESKVKPDEITVASVLSACAHTGSLDVGEAAHDYIQKYDVKADIYVGNALIDMYCRCGVVEKALEVFKEMRKKDSVSWTSIIACLAVNGCADSALDYLSRMWREVXQPSHGPFVGIL

SEQ ID NO: 218723 - protein, 73 aa, Glycine max
  Clone ID: PAT_MRT3847_39535C.1.pep
MVYPILLFSSPVPYILLMSIYTTDIAFHSPALIIFLKQRAPPSLFISLVQPGPKQTTLPRWFFAIIERLTVRV

SEQ ID NO: 218724 - protein, 46 aa, Glycine max
  Clone ID: PAT_MRT3847_39536C.1.pep
EGTNQPWQEGLWKAIAKRSSPPIQANGLGLKEGSSQMLRLGSMGCH

SEQ ID NO: 218725 - protein, 95 aa, Glycine max
  Clone ID: PAT_MRT3847_39537C.1.pep
HLKSDKEVANLWNGMSKSLRLSRVPLLDNVIEDVNKYYNGRTKVKIWKFMKVYVFSSWQFLTFLAAICLLLLMALQAFCSVYTCSRFFRSALNSQ

SEQ ID NO: 218726 - protein, 151 aa, Glycine max
  Clone ID: PAT_MRT3847_39538C.1.pep
MAGKQSKARKPEVFGKGKVTPTQIAFIVDRYLCDNNFSSTRSTFRNEASSLISHSPIHEAPKTLLTLGEMLDEYICLKEQKVMLDQERAVVEQEKNRVQMLLQGMHNVMTAYNASGNLPAPAPAVKSAVVAVPKPTLGYKISTRQSYFCAK

SEQ ID NO: 218727 - protein, 63 aa, Glycine max
  Clone ID: PAT_MRT3847_39539C.1.pep
LLAPLFHLSEVSKKSGVEIYYSHPLLFAYTILFIPYSCPNTRVASRQLCTCTQMLSFFLCSLY

SEQ ID NO: 218728 - protein, 92 aa, Glycine max
  Clone ID: PAT_MRT3847_3953C.1.pep
GMTPPLTSSPLSSVATPWLKITIERSHWSSKIRDGFHPCHNQGAYTLKSFTSLILRLRVFSLFQWKSELKSLMKKTMIIGIENLCAVTFILL

SEQ ID NO: 218729 - protein, 277 aa, Glycine max
  Clone ID: PAT_MRT3847_39540C.1.pep
MANGPAPFSEIGKRAKDLLYKDYNFDHKFSLSIPNSTGLGLIATGLKKDKLFVGDISTLYKSGNTTVDVKVDTYSNIYTKVTVNDILHGTKAALSFNIPDHKSGKLDVQYLHPHAAVDSSIGLNPSPLLELSAAIGSKDLCLGAEVGFNTTSASFTKYNAGVAFNKPDFSVALMLADKGQTLKASYIHYVDRPDGFTVAAEISHRFSSLENRFTIGSSQSIDPKTVLKTRFSDDGKAAFQCQRAWRPNSLITLSAEYDSTKIFGSSTKFGLALALKP

SEQ ID NO: 218730 - protein, 154 aa, Glycine max
  unsure (1)..(154): unsure at all Xaa locations
  Clone ID: PAT_MRT3847_39541C.1.pep
EQTHIIIVVIGHVDSSKSTTTGHSIYMLAGIDKRVIDRMEKEAVDMNKKXFTAAWVLDTLKAERERGITIDIALCKFEXTKHSCTVIDAHGHRDFINNMITGTSQGDSAAPIIDSTTAGLEARITQDRQTCEHSMTSFXPLAEKQIICCLNKMD

SEQ ID NO: 218731 - protein, 47 aa, Glycine max
  Clone ID: PAT_MRT3847_39542C.1.pep
MANGPAPFSEIGKRAKDLLYKDYNFDHKFSLSIPNSTGLGLIATGLK

SEQ ID NO: 218732 - protein, 52 aa, Glycine max
  unsure (1)..(52): unsure at all Xaa locations
  Clone ID: PAT_MRT3847_39543C.1.pep
CWKNKYFSQKRRYPGWPKEKSCLVGHCWYAVGKEIIVLIREPNQREXMFPYY

SEQ ID NO: 218733 - protein, 170 aa, Glycine max
  unsure (1)..(170): unsure at all Xaa locations
  Clone ID: PAT_MRT3847_39544C.1.pep
TLSLSPSVAEEGRNNGLVINFYKESCPQAEDIITEQVKLLCKRHKNTDFSXLKNILHDCAVQSSYAXTIVCTTTDGACSENETYRSFGLRNFXYIETIKEALVRECPGVVSCADIHRLSAIYGIVLLGSPHIPLXDWMNGWYKEXSDVVEQVQPYHYRYISAILDKLSAI

SEQ ID NO: 218734 - protein, 319 aa, Glycine max
  Clone ID: PAT_MRT3847_39545C.1.pep
MVSSNCYYLALVCCCVLLLLNPTVGEQDEHYLASLLLLLLLNPHTTLGAQNLMLPYHNGALLKGTITVNLLWYGSFTPIQRSIILDFINSLSSTAGAPLPSVASWWKTTDKYRGGSTTIVLGKQILEQTYSLGNYLNGTQLVSLSSRFDHLNAINVVLTSSDVGVDGFCRSRCGTHGSITNGQKARIPYVWVGNSEAQCPGQCAWPFHQPAYGPQAPPLIAPNGDVGLDGMVINVATLLAGTVTNPFNEGFYQGPPTAPLEAVSACTGIFGSGAYPGYPGRVLLDKTTGASYNAYGGNGRKYLLPAMWDPQTSACKTQV

SEQ ID NO: 218735 - protein, 334 aa, Glycine max
  Clone ID: PAT_MRT3847_39546C.1.pep
MASERQALMLILLTTFFFTIKPSQASTTGGITIYWGQNIDDGTLTSTCDTGNFEIVNLAFLNAFGCGITPSWNFAGHCGDWNPCSIVLEPQIQYCQQKGVKVFLSLGGAIGTYSLCSPENAKEVANYLYQNFLIGKPGPVGSVTLEGIDFGIEVGSNLYWDVLVKELDALRHQNDHYFYLSAAPQCFMPDYHLDNAIKTGLFDHVNVQFYNNPPCQYSPGNTQLLFDSWNKWTSYVLPNNSVFLGLPASPDAAPSGGYIPPQVLISEVLPYVKQASNYGGVMLWDRYHDVLNYHSDQIKDYVPKYAMRFVTAVSDAIYESVSAATHRILQKKPY

SEQ ID NO: 218736 - protein, 93 aa, Glycine max
  Clone ID: PAT_MRT3847_39547C.1.pep
GQIVVLKMPPPLLHITRTGFCPLSSQSNIDGVYLAHVFGISHQFPNFHRSSKFTCEVPAAVEHSQFMADSEAMDEGAPPAMWTPKRMNYRRRT

SEQ ID NO: 218737 - protein, 79 aa, Glycine max
  Clone ID: PAT_MRT3847_39548C.1.pep
TLSTFKHSQPIQTSRNLDQIREQRMMWKIRRSLQHLKLQPCSILIMGHIFTHHSPSPLINMRPSPSRILMARYPQTKSH

SEQ ID NO: 218738 - protein, 64 aa, Glycine max
  unsure (1)..(64): unsure at all Xaa locations
  Clone ID: PAT_MRT3847_39549C.1.pep
MAAASSMALSSPSLAGKAVKLGPSAPEVGRVSMRKTVTKQVSSXKPWYGQXESILGPIPGQAPV

SEQ ID NO: 218739 - protein, 50 aa, Glycine max
  Clone ID: PAT_MRT3847_3954C.1.pep
FLLIYEESLMTRGGGNNTGLIKRSYEYIKRNGDGKTPLLDMMINLIKKGG

SEQ ID NO: 218740 - protein, 59 aa, Glycine max
  Clone ID: PAT_MRT3847_39550C.1.pep
MSVAKAMVLFRQVGLRHMLVVPKYQASGVSPVIGILTRQDLLAYNILTVFPHLAKSKRK

SEQ ID NO: 218741 - protein, 96 aa, Glycine max
  Clone ID: PAT_MRT3847_39551C.1.pep
HHSPTLTFIAGTMALKFTHLQFSRLEGDRLLDEAHDNKSAVFVRKVTEPRENNDPIFIALTYVNRTFLLTAPNQTCVKAQIATFLQHSLSLRRMTP

SEQ ID NO: 218742 - protein, 78 aa, Glycine max
  Clone ID: PAT_MRT3847_39552C.1.pep
PILYMQDNTFLVRDIRQTYLTIETRKNILGDTRISDNNERHYESDDEYEHNSNSNHSFTPFSPHPNPNHRVNEPPTSF

SEQ ID NO: 218743 - protein, 181 aa, Glycine max
  Clone ID: PAT_MRT3847_39553C.1.pep
GFAVNIFGKRATLYSNDISGIPGRASPQPNPRPEWTLEKMSMPPPAVMDAALQAYFDHMHWFIFIFHEIEFMQSVTPLLRQSSWSESSRGRVIAALTAAAVGLQCVAHDSRWPGHSLLASFSLQATRLRDSLIAEVRLHVLKLLDECSLESVQVSLLLEPYYVYHGSPGLAWNMVGLSKTT

SEQ ID NO: 218744 - protein, 82 aa, Glycine max
  Clone ID: PAT_MRT3847_39554C.1.pep
FHDTKLALSSERFSSEHQSYVAEVAYGRSKGLPSIPSTLQVEKACDRSLSTSSMAIRRPLIFFATAPYLGALGGIRRARYSL

SEQ ID NO: 218745 - protein, 36 aa, Glycine max
  Clone ID: PAT_MRT3847_39555C.1.pep
SGPSVMTHNMRMKRTTPTIKMSCLTLTLLNDQAVGG

SEQ ID NO: 218746 - protein, 90 aa, Glycine max
  unsure (1)..(90): unsure at all Xaa locations
  Clone ID: PAT_MRT3847_39556C.1.pep
FLFFVPGLPFFFRPFGVGPFSAPXLXFLWGVVSAPPALXGVFFSWPLWGWSQNFLLXPKLNARLLCSYVMGSLEEERLWVLSFFSSFVSC

SEQ ID NO: 218747 - protein, 52 aa, Glycine max
  Clone ID: PAT_MRT3847_39557C.1.pep
LCLCYFKPFHFNPVPDWPIKPFVIPGTHEIPLLPFPYIGGKTKFFNGVGGAK

SEQ ID NO: 218748 - protein, 98 aa, Glycine max
  unsure (1)..(98): unsure at all Xaa locations
  Clone ID: PAT_MRT3847_39558C.1.pep
RLSVRSSEFGSRXAAXXXXXXSXAXXXEINXAXXKXYXXTXXLXXFFRYTSLVGDDGKXQVXXXYLXXXLALXPXXVQILHTKRAQXKXGVXXHVXXS

SEQ ID NO: 218749 - protein, 96 aa, Glycine max
  unsure (1)..(96): unsure at all Xaa locations
  Clone ID: PAT_MRT3847_39559C.1.pep
SSPYPFFFSHQLHRLLPRSCLTCKGKYHDXLIXNXAYIGTPGKGIXAXDESTGTIGXAFXXGISVXXVESNXRXLRXLXXTDXGXREXAQXSALLE

SEQ ID NO: 218750 - protein, 75 aa, Glycine max
  Clone ID: PAT_MRT3847_3955C.1.pep
RVVTKTIKVANLCRSILRRHRSRFRRRYYLQGILLVMNRSERCLRTYAYSISSVDGNPSELGDDDGWNADDDAVR

SEQ ID NO: 218751 - protein, 192 aa, Glycine max
  unsure (1)..(192): unsure at all Xaa locations
  Clone ID: PAT_MRT3847_39560C.1.pep
PSRSLDDSEEGETDGGKEDSSVRKSFSYGTLASANAGASFHSNARVNCNDEDWVYYSHRKSDVGCSQREDSTASSSQPYLVQSSKRSILPWRKRKLSFRSPKAYKGEPLLKKVYAEEGGDDIDFDRRQLSSDESLSLTWYKIEDDTSAHRSSISDFGDDRFAVGSWEQXEVTSRDGHMKLQTQVFFASLINA

SEQ ID NO: 218752 - protein, 95 aa, Glycine max
  unsure (1)..(95): unsure at all Xaa locations
  Clone ID: PAT_MRT3847_39561C.1.pep
HLAWADAFVVXADSVSMISEACSTXXKPVYIMGAELCRWKFTEFHKSLRERGVVRPFTGSEDISENWSYPPLDDTADAARRVHEALAARGWKLKI

SEQ ID NO: 218753 - protein, 69 aa, Glycine max
  Clone ID: PAT_MRT3847_39562C.1.pep
TSTRSCTRPVYFPRIPKSNRGGLLGGRGYPILSKTLTLILLNERQFKLTWSSFTTAYPSDFSFSPRFKV

SEQ ID NO: 218754 - protein, 147 aa, Glycine max
  Clone ID: PAT_MRT3847_39563C.1.pep
FEKIYLLQVVSRRSIDMKKRGSGRRFLMWVMVIWLHAHLSIAAELSKSNDTDTASESSVCDGSVEDCLNNVHRLDSELLPTISSSHFRRILAGGANKVVFDTLKSAAFLCTTINGYRRCGARVPPGGIPNRCANKGSFLRNCHKIDR

SEQ ID NO: 218755 - protein, 57 aa, Glycine max
  Clone ID: PAT_MRT3847_39564C.1.pep
PPAPFLRDLFGPGITPCLKIFLCLKMYFFYPGSVFPHCRRCTVQYFPSLCSGVCLPK

SEQ ID NO: 218756 - protein, 167 aa, Glycine max
  Clone ID: PAT_MRT3847_39565C.1.pep
MERESEKAKPHLIFAYGTLKRGFPNHYLMEELRSKDDAVLLGSYVTNEPYPLVCGPHGIPYLIKLPGSGHRVKGEVYAVSEEAVVVLDEFEGVSAGYYERLAVTAAEEEGGGKVEAEAYWGHRRFGEVLWKMKGEVGLREYGEKEAREYVRKEDRSGGRNTILDLVP

SEQ ID NO: 218757 - protein, 44 aa, Glycine max
  Clone ID: PAT_MRT3847_39566C.1.pep
PHILPSSYFPELFHCLCVMAQLLTGGVDKVQLVIMIFTPPILFN

SEQ ID NO: 218758 - protein, 109 aa, Glycine max
  Clone ID: PAT_MRT3847_39567C.1.pep
EAHLLAGLYLSFNCAKAPSSCRIFLSLLQHSTSLLVVIILDASTVTTMSTKSPCTVIFFRNDNFEEGKRHNTRRRRKPNHHTAPFLADPRTTIVSTLVEYAYKRCLLKA

SEQ ID NO: 218759 - protein, 36 aa, Glycine max
  unsure (1)..(36): unsure at all Xaa locations
  Clone ID: PAT_MRT3847_39568C.1.pep
MIDCVAIYIEKSGIQVGNACXELXCIEHCSQPDWQM

SEQ ID NO: 218760 - protein, 99 aa, Glycine max
  unsure (1)..(99): unsure at all Xaa locations
  Clone ID: PAT_MRT3847_39569C.1.pep
KKAAASSMALSFPSLTGKVGKLGPSAQDAGTVSMMKTVTKHDYXRSLRDGPNPVKDLGPFYGETACYLTGVFPGHYSWDTAGLNTYPDTCDKNRELELN

SEQ ID NO: 218761 - protein, 54 aa, Glycine max
  Clone ID: PAT_MRT3847_3956C.1.pep
IFKKSLEKNLKRWHKTLQEALWVCRNTPTKATSCTPFQLTYGHDAILFAELLKD

SEQ ID NO: 218762 - protein, 102 aa, Glycine max
  Clone ID: PAT_MRT3847_39570C.1.pep
FLTLRYISIKKIILKMVTGLLSSPNPNATNINFCASNTLIIPDRKININSDTTHYCNVGNSDQHASILPAQNIHKIILLRRNKTLNFTGRPPNSLKLKYMWK

SEQ ID NO: 218763 - protein, 77 aa, Glycine max
  Clone ID: PAT_MRT3847_39571C.1.pep
VAKKEHVVPAKTKGIKENPSRLHGTPVNHRCQRHFPARERDTLVLKRCLCSCMCVFVLCVLLCFSKLVLRISEGLLL

SEQ ID NO: 218764 - protein, 177 aa, Glycine max
  Clone ID: PAT_MRT3847_39572C.1.pep
GSVRDPLEVELVQNTQRHHILDINLPWNASVPEFDKQAVAQVIVCESGSSATKATSRKQIDLNLCMNEDEAFVTNIPATNLETKAEIDLEVPAVPEAEEDAIPEEKKLETPLVSPLGPQDTVEKLQDELMRHAAEAIVVLSSSCCQQVDDVISSPSEGPVVDSLSWFVDIVSSCVKT

SEQ ID NO: 218765 - protein, 122 aa, Glycine max
  Clone ID: PAT_MRT3847_39573C.1.pep
LLLKGFEIVVFGPRVWGGIKGVLFFPYEGPPFPVFFGGGVKIGLPPKAKVKPPQGGAPFVGWGPPCEKEPVNFSLGTLLTSPFVKKGLVTKPLSLKGGFFAFVKGFFGFWGLQLGLAPFFSG

SEQ ID NO: 218766 - protein, 72 aa, Glycine max
  Clone ID: PAT_MRT3847_39574C.1.pep
VFKKKKKKKPKKKTNKKKEKKNKKTKKKKKKKKKKKKKKKKKKKKKRGAPPIRRFNTLKKTQPRIKRATKIS

SEQ ID NO: 218767 - protein, 36 aa, Glycine max
  Clone ID: PAT_MRT3847_39575C.1.pep
ILIGKGGDSRLIPVKSILNRAFFKNHNQPLLLPQGN

SEQ ID NO: 218768 - protein, 52 aa, Glycine max
  Clone ID: PAT_MRT3847_39576C.1.pep
SLPLLGVHSQTTIVLPVLIIMAPHRPTPAMAILHQATTNKINNYSNFSWKLN

SEQ ID NO: 218769 - protein, 50 aa, Glycine max
  Clone ID: PAT_MRT3847_39577C.1.pep
PNLSLFRQIEVSAYLVALSRQQIHPLRISTTLPIRHSVREIINEPVLVRV

SEQ ID NO: 218770 - protein, 66 aa, Glycine max
  Clone ID: PAT_MRT3847_39578C.1.pep
CVVSSNYLVKKSRASRIVCQLKQVWIFSNSQSILTRGSCLFSFISLYGVLAKYTRIADHAEDSAFS

SEQ ID NO: 218771 - protein, 78 aa, Glycine max
  unsure (1)..(78): unsure at all Xaa locations
  Clone ID: PAT_MRT3847_39579C.1.pep
RSARRELRWRXEQDVSXXAXKFPXRQPLGTXXQXQDDGXDYQEPAPXPLXPDGFTSWSFYRAXXAEFVALFLFLYITV

SEQ ID NO: 218772 - protein, 49 aa, Glycine max
  Clone ID: PAT_MRT3847_3957C.1.pep
LKGAPIRISITATWSGTHHHLTMDCQPADQTMAHLRTGAGTSFGPIGSA

SEQ ID NO: 218773 - protein, 50 aa, Glycine max
  Clone ID: PAT_MRT3847_39580C.1.pep
KKKIKNKKKKKKKKKEKKKKKKKKKKKKKKKKKKKKKKKKKKKKKNKKKK

SEQ ID NO: 218774 - protein, 66 aa, Glycine max
  Clone ID: PAT_MRT3847_39581C.1.pep
LNSLLHSPSHMKWIHPSSFLGSIRTGWKDPKPTPLTIIIIIIIRAETNTTLPSPIKCISVHKTLQS

SEQ ID NO: 218775 - protein, 74 aa, Glycine max
  Clone ID: PAT_MRT3847_39582C.1.pep
ETVDVTNNTYRGWILHELSAIHNYIFDGNPLEIRTASVSTTVTPPNTSGSHSRHHSASGSHCKTHSSAHVNSNG

SEQ ID NO: 218776 - protein, 96 aa, Glycine max
  unsure (1)..(96): unsure at all Xaa locations
  Clone ID: PAT_MRT3847_39583C.1.pep
CCTWXVAAAFSLVSRYLRSSISFTRENRMGCQGSKEKKSKTEFSTSYGSXDTGSGGGTSYNTVQPPPPPPPPTTTATTTTQAQTSGAPTPHSSSSP

SEQ ID NO: 218777 - protein, 79 aa, Glycine max
  Clone ID: PAT_MRT3847_39584C.1.pep
PGFCPYYNNPSYAYSTRVWFLNNHMVTSLPHSPSETTPDSTPTVDIDGIPRKAQSFNILFRAHENHPLDYPTECTAPHY

SEQ ID NO: 218778 - protein, 45 aa, Glycine max
  Clone ID: PAT_MRT3847_39585C.1.pep
CSTCIAYLQPKPLHVKFMIMINNRKGYRVFPSHKLQYQFFKKLPF

SEQ ID NO: 218779 - protein, 335 aa, Glycine max
  Clone ID: PAT_MRT3847_39586C.1.pep
QTESGNDLASLHQEKQELEQQCEKMKLEVDSIQNPKSEIEEQMRAKDHENSELREEILGLHGTITALEKTLVEKESELSTLQEKLHEKESEASGQITAFTAQIDNLKHDLVSLQNEKHELEQQCEKLKMELDSTHNQKSEVEEQSRAKGHENTELREEILGLQGTITALEKTLAEKESELSTLQEKLHEKESEASGQITSFTVQIDNLKHDLVSVQNEKHELEQQCEKLKMELDSTNNRKGEIEEQLIAKDRENTKLRGEILGLQGTITALEKTLAEKESELSTLQEKLHANESKASGQITTFTVQIDNLEHDLVSVQNEKHELEQQCEKLRMEL

SEQ ID NO: 218780 - protein, 77 aa, Glycine max
  Clone ID: PAT_MRT3847_39587C.1.pep
PNAPPVCVFSHTGLRTRFSHRGVHFFNSPPGPFKAFNHPTEPGWVIYPKNLVMFFLGEKCFHILFLTMYVTKAPIPH

SEQ ID NO: 218781 - protein, 94 aa, Glycine max
  Clone ID: PAT_MRT3847_39588C.1.pep
PPFFFPKLTRGIFIFPPLFGVSLIEVHWGGMGRGPPLPPFICPRGVLWDPLLPFPGMGFAQPPFNFLETVPPFVKPLKTVLGGPFFPRGPRNPF

SEQ ID NO: 218782 - protein, 64 aa, Glycine max
  unsure (1)..(64): unsure at all Xaa locations
  Clone ID: PAT_MRT3847_39589C.1.pep
TTTGREYTVTDLTQADFGRLEIDLADVXMTGLMACRSEYGPSQLFKGARITGSLHMNMQTAVLI

SEQ ID NO: 218783 - protein, 482 aa, Glycine max
  Clone ID: PAT_MRT3847_3958C.1.pep
MGVSRSQKPHVVCVPFPAQGHVNPFMQLSKLLLCTGFHITFVNTEFNHKRLVKSLGQEFVKGQPHFRFETIPDGLPPSDKDATQSIAALCDATRKHCYEPLKELVKKLNASHEVPLVTSIIYDGLMGFAGKVARDLDISEQQFWTASACGLMGYLQFDELVERGIIPFQDESFTTDGSLDTNLDWISGMKNMRIRDCPSFVRTTTLDETSFICFGIEAKTCMKSSSIIINTIQELESEVLNALMAQNPNIYNIGPLQLLGRHFPDKDKGFKVSGSNLWKNDSKCIQWLDQWEPSSVIYVNYGSITVMSEDHLKEFAWGLANSNLPFLWIKRPDLVMGESTQLPQDFLDEVKDRGYITSWCPQEQVLSHPSVGVFLTHCGWNSTLEGISGGVPMIGWPFFAEQQTNCRYICTTWGIGMDIKDDVKREEVTTLVKEMITGERGKEMRQKCLEWKKKAIEATDMGGSSYNDFHRLVKEVLHNDVV

SEQ ID NO: 218784 - protein, 94 aa, Glycine max
  Clone ID: PAT_MRT3847_39590C.1.pep
VAFRARHIAPCLEGKRQSDKSARLGVGRLNLSKEASRRRRHDRDESYAEVRDCRHDRSDPERCRVKSYRSWKHFDETESGSRIDGESWESEGFS

SEQ ID NO: 218785 - protein, 106 aa, Glycine max
  Clone ID: PAT_MRT3847_39591C.1.pep
EDRKIQHSLFQLPLSLFPTKMSINSESTPPPVIGKIGPYTVFMTPPSTPKPADDNPVTTTKIAPPPPQIPKAVPSPKPKPLSDSDDSVFGFFRNAVAKVQTGKRRH

SEQ ID NO: 218786 - protein, 128 aa, Glycine max
  Clone ID: PAT_MRT3847_39592C.1.pep
MSINSESTPPPLIGKIGPYTVFMTPPSTPKPSDDHPVTTKIAPPPPQIPKAVPSPKPVSDPDDSVFGFFRNAVTKVQTAHSSLDDHLARWFGLNQSKYQWALDDYYESKGMEKGDIKVKEISSKVQSV

SEQ ID NO: 218787 - protein, 131 aa, Glycine max
  Clone ID: PAT_MRT3847_39593C.1.pep
MSINSESTPPPVIGKIGPYTVFMTPPSTPKPADDNPVTTTKIAPPPPQIPKAVPSPKPKPLSDSDDSVFGFFRNAVAKVQTAHSSLDDHLARWFGLNQSKYQWALDDYYESKGVEKGDIKVKEISSKVQSV

SEQ ID NO: 218788 - protein, 43 aa, Glycine max
  Clone ID: PAT_MRT3847_39594C.1.pep
TNLTSIRGVFHQRGTPNQILLTPSCTLNSHIFPFKHYPKNIDP

SEQ ID NO: 218789 - protein, 66 aa, Glycine max
  Clone ID: PAT_MRT3847_39595C.1.pep
LLTAHVPRPLKGQVYERELQLHGHLRSLNNKPNTEIYERELQLNGRLRSLNDKSNILLIINIKKSP

SEQ ID NO: 218790 - protein, 37 aa, Glycine max
  Clone ID: PAT_MRT3847_39596C.1.pep
KTKRRNFIEMHKIMLSITFFLCSYMFFTLNTFSFRSC

SEQ ID NO: 218791 - protein, 115 aa, Glycine max
  Clone ID: PAT_MRT3847_39597C.1.pep
AKLFKSPHAPIGITLTLIKTMEIGSLAPLLPGRLPIPERSLGFSLPATQVTQQKIKILIWFLYQMQLLDTLSTNPSYPSGRKLRRQGAPTSKILNRPETHFARAGLHHAFPWTQA

SEQ ID NO: 218792 - protein, 81 aa, Glycine max
  Clone ID: PAT_MRT3847_39598C.1.pep
RRFPGKNKGFSFHILFSKLHKKERFGESNRFSSSGQNSFSALRQKKFNSFLSGAYPIKGGGSFLNSQFLRPQLTWALNFSK

SEQ ID NO: 218793 - protein, 136 aa, Glycine max
  Clone ID: PAT_MRT3847_39599C.1.pep
SFLHVCGESRFFPPWGGCAVYTTWCSPEAFFLVATRATPLSGVVENPFHKKIGGVSGLGENDLSRFVLFRGAPKESIRYRRAQEMGGALAPQKERVLGLFFLKKTPPTWEEESLKIPGGGSFLPPKRREKVIRIET

SEQ ID NO: 218794 - protein, 53 aa, Glycine max
  Clone ID: PAT_MRT3847_3959C.1.pep
TFGLVNHLVHDPGKGGRAKMPIYRKKDPRKLGGWRGQTQEWAGPFPRRTERKD

SEQ ID NO: 218795 - protein, 47 aa, Glycine max
  unsure (1)..(47): unsure at all Xaa locations
  Clone ID: PAT_MRT3847_395C.1.pep
NXLGRLLGRNPSXSPSPGSXXTPATXKCXLGXXARXFXEXSHYQXXF

SEQ ID NO: 218796 - protein, 95 aa, Glycine max
  Clone ID: PAT_MRT3847_39600C.1.pep
HCAIIELIISFMTSISASAHAWPDLVIGPGSTIFIKCVIDNGNGSNVNYDLDNKSALSKIGPLLYSIGCDHHSYGFIHRAIWDDCDPLDDAAIMH

SEQ ID NO: 218797 - protein, 188 aa, Glycine max
  Clone ID: PAT_MRT3847_39601C.1.pep
MGDAIDLSGDGGVIKTIVRKSKADAVGPTENFPLVDVHYEGTLADTGEVFDTTHEDNTIFSFEIGKGSVIKAWEIAVKTMKVGEVAKITCKPEYAYGSAGSPPDIPPDAQLVFEVELVACRPRKGSSLGSVSEERARLDELKKQRELAAAAKEEEKKKREEAKAVAAARVQAKLEAKKGQGKGKGKAK

SEQ ID NO: 218798 - protein, 39 aa, Glycine max
  Clone ID: PAT_MRT3847_39602C.1.pep
QPKLATHLIWVMLQKNIKFLRKVGSRTSGLVKPHPLFFC

SEQ ID NO: 218799 - protein, 39 aa, Glycine max
  Clone ID: PAT_MRT3847_39603C.1.pep
WSSTACGLCTVPLKTTLDEESVRLVLLKGFLPPVPIGKY

SEQ ID NO: 218800 - protein, 121 aa, Glycine max
  Clone ID: PAT_MRT3847_39604C.1.pep
KHPFFIYNQRKRKEGKRRENKGGNKPQQREGGNARQNRPQRGRPRPGTKPNRRTKNTLKTCQSNRTRLSSSGGGQPPETTRPPRSKETHPRARRSIKPHGTCTPKQRRRPPPERGDNGAQR

SEQ ID NO: 218801 - protein, 155 aa, Glycine max
  Clone ID: PAT_MRT3847_39605C.1.pep
MGDAIDLTGDGGVIKTIVRKSKADAVGPTENFPLVDVHYEGTLADTGEVFDTTHEDNTIFSFEIGKGSVIKAWEIAVKTMKVGEVAKITCKPEYAYGSAGSPPDIPPDATLVFEVELVACRPRKGFSLGSVSKERARLDELKKQRELAVFGKEEE

SEQ ID NO: 218802 - protein, 85 aa, Glycine max
  Clone ID: PAT_MRT3847_39606C.1.pep
YNRVGNGALSKSSGHGFSTQSTTTEYKWWYRYHAFQHSESSPWNRCGSRSSAGSDTVSDAELDEAFMDSNSSVSVILCSKQSARH

SEQ ID NO: 218803 - protein, 54 aa, Glycine max
  Clone ID: PAT_MRT3847_39607C.1.pep
ARGVALSATTKAHKPPSATINREAVPRKFHPVSEPLSQSLKYKFSPPPPHSLFY

SEQ ID NO: 218804 - protein, 96 aa, Glycine max
  Clone ID: PAT_MRT3847_39608C.1.pep
ITTLNTVIKSLCMCTVIGMVGDPVSIITWLTSPYACIHHRCSICRIGIYRCWPMTGLSSPCSCIYMVSSLPRSFPVTRIHWRQPLSRSSPSCIFIC

SEQ ID NO: 218805 - protein, 75 aa, Glycine max
  Clone ID: PAT_MRT3847_39609C.1.pep
VLLRWYMDPLIMPPIRGCFFPIKCLPGFTPSSLHHGDIFQIFLSSVITHHDNVALFTHLETKWLPTMSNQVEFQC

SEQ ID NO: 218806 - protein, 54 aa, Glycine max
  Clone ID: PAT_MRT3847_3960C.1.pep
TNLGRAFLPPQNDAPKNQGVKGPKLFIYPSTGAPGPFGPPKTENPEGVFYPLHF

SEQ ID NO: 218807 - protein, 55 aa, Glycine max
  Clone ID: PAT_MRT3847_39610C.1.pep
PGMEACSISALDNPPAVEEVSHIQFGCLITLRIALLLFHNSFRERPRGARSMLTT

SEQ ID NO: 218808 - protein, 61 aa, Glycine max
  Clone ID: PAT_MRT3847_39611C.1.pep
TAWDPSKDSTLQYALAQPDILKALTIKASKPEHRERLQGDPKCARKQGIAPMTEERGSESS

SEQ ID NO: 218809 - protein, 76 aa, Glycine max
  Clone ID: PAT_MRT3847_39612C.1.pep
MPIPRNPPVTQRMAAPACSIVCLEILAPFYFIFLKKISPTYVGMGSFYFFMRIFGMLMLNHNVNICHWRVLIVYLS

SEQ ID NO: 218810 - protein, 72 aa, Glycine max
  unsure (1)..(72): unsure at all Xaa locations
  Clone ID: PAT_MRT3847_39613C.1.pep
ASTYVVEACTGGNIAGMDGRFPTKERMDRNAVMTYNVYIYKAXSHALEKHTACNXKGPAVSNLTNTNAFILK

SEQ ID NO: 218811 - protein, 77 aa, Glycine max
  unsure (1)..(77): unsure at all Xaa locations
  Clone ID: PAT_MRT3847_39614C.1.pep
ESDTLFENPEAFDDSSEFTASELCDISAFATENKRLTRVSNSTKPNVHSRTPQTCCHVSTQSCHPGVWVTIXSKRAK

SEQ ID NO: 218812 - protein, 142 aa, Glycine max
  Clone ID: PAT_MRT3847_39615C.1.pep
EPMAAFHGCHSHLHTPKLLHTPPPFAHPTQFLGIDFESTRQRLLSLFDSERTPPSFQQPPYKASMAVVHGCHLPYGASTFHYHHSFPSHSFHTANHQQPCPQHPFPSMFDTSKHEGSLTHLEAVLTRLDESMHSMNLKIDEL

SEQ ID NO: 218813 - protein, 38 aa, Glycine max
  unsure (1)..(38): unsure at all Xaa locations
  Clone ID: PAT_MRT3847_39616C.1.pep
LRXXXXXEEXXVSNXEMTXDERECXRXKVREWXKQQRX

SEQ ID NO: 218814 - protein, 77 aa, Glycine max
  Clone ID: PAT_MRT3847_39617C.1.pep
GNNKGRALDPPQGNKVVNGGVKNVVASKQGLNSPGIQVTAYAMGLISNRGSDAITRVANSNTVFIKCMLSPFYFILS

SEQ ID NO: 218815 - protein, 71 aa, Glycine max
  Clone ID: PAT_MRT3847_39618C.1.pep
SHIITKNLPLNLSELYTGSSFPSHFFLIGLTKFQIKMIIPTIIQIPSDHLIILFLSILPKCISWKYKPTAL

SEQ ID NO: 218816 - protein, 59 aa, Glycine max
  unsure (1)..(59): unsure at all Xaa locations
  Clone ID: PAT_MRT3847_39619C.1.pep
LRRPLGSGQLPDSLARLTNLRFLDLSFNNLXGPIPSXFSKLSNLVSLPLDRNRLTAPIP

SEQ ID NO: 218817 - protein, 66 aa, Glycine max
  Clone ID: PAT_MRT3847_3961C.1.pep
LLLFTLTGTKFFAIDGDPIQCFPRMHHCSACVLRLLDPITSTTLQEPNGSVSYQRNARRSEERTTL

SEQ ID NO: 218818 - protein, 81 aa, Glycine max
  unsure (1)..(81): unsure at all Xaa locations
  Clone ID: PAT_MRT3847_39620C.1.pep
XLEXXVSQTTQPGGGLNISPIAPDFHRPSLKRGGVRGSHXAQLFITLHLSFRMCKDNNASCLGLTERSLPAARYTTLPRLF

SEQ ID NO: 218819 - protein, 36 aa, Glycine max
  Clone ID: PAT_MRT3847_39621C.1.pep
VVGGSQEAKNIWIHHLFTMSNGIRNCIHPNGPTAYK

SEQ ID NO: 218820 - protein, 39 aa, Glycine max
  Clone ID: PAT_MRT3847_39622C.1.pep
LTLSNTHSIKLSPKPLQSDTTYKYSINYFKILLLINLNL

SEQ ID NO: 218821 - protein, 47 aa, Glycine max
  unsure (1)..(47): unsure at all Xaa locations
  Clone ID: PAT_MRT3847_39623C.1.pep
FFFFXXXXFFFXXXFXXXLXXPPRPTKEGGSFINPLSSKWNEQIXGV

SEQ ID NO: 218822 - protein, 87 aa, Glycine max
  Clone ID: PAT_MRT3847_39624C.1.pep
NADTWFALLPDLFCVFCSWVVKKKLFCSCSLLSISEYLLSTSIFSLSFPFAWVKMTKPKRWVVNLGFKVYVLLFFARNDNEGDVSKV

SEQ ID NO: 218823 - protein, 96 aa, Glycine max
  unsure (1)..(96): unsure at all Xaa locations
  Clone ID: PAT_MRT3847_39625C.1.pep
STVQRXLXXFVXCYSXNTKQXARAXNSXTKSXITIVXEXASSNSCKTKXFGVSXQSXRKXVHPXXGSSXVLQXXEXTNKXRWALXNDGLXXMNLMP

SEQ ID NO: 218824 - protein, 139 aa, Glycine max
  unsure (1)..(139): unsure at all Xaa locations
  Clone ID: PAT_MRT3847_39626C.1.pep
QNWNIVTPMGQFLDKVERYFNKIKTELDGLERTKDEESKKFKGHNIEFDFHILIKIKEAMVDVSSNCMELAXKERRNDAAARGSGSNISDGKRKEYAKLLWRAFQLAFRVYTFAGGHDDRADKLTRELAKEIESGPNQP

SEQ ID NO: 218825 - protein, 41 aa, Glycine max
  Clone ID: PAT_MRT3847_39627C.1.pep
GSIEAAAEIPYRLHLRSPLMGYQLEKVNEGTPPLPTTTFPL

SEQ ID NO: 218826 - protein, 63 aa, Glycine max
  Clone ID: PAT_MRT3847_39628C.1.pep
IERERKIRNHRYRTLSIDASDACFVCIVLLSFMRSLCVVRVLSNSSSCLNSLILSISESSSSK

SEQ ID NO: 218827 - protein, 239 aa, Glycine max
  Clone ID: PAT_MRT3847_39629C.1.pep
MAENLDDGEFWLPPQFLADDDVLPTPFEAKFPSLPDDTVLFPSEWPYGSPVDSTVGGSSETESDEEEQLVAELTRRLTRSSLQSDTKSAGRFVSSSPQSTLCAFGSGCGCGKGSSQGSPDGVCKLSSAKTTWDLLHAAAGEVERMRLKQEGYAFNHQNGNLIPQRKPSPVIPLPSKDTTSTPNPQQGGSHQQLQIAQFQLERQQQLAKQQNSVWNVQKQCDGVYSQRQQQSNQMVPNRG

SEQ ID NO: 218828 - protein, 145 aa, Glycine max
  Clone ID: PAT_MRT3847_3962C.1.pep
MVSLEPIEGNLRSSDAPSSPRISFSAEFLDENNFISISPNAEYEGPDQEKERERARNAAEFEFLSNNTSNNNTVVTADELFFEGKLLPFWQMQHLEKLSKINLKTKEGEEEELKEEVIVVSNNNPAHSNSNSNSRVNWFVDDDPS

SEQ ID NO: 218829 - protein, 70 aa, Glycine max
  Clone ID: PAT_MRT3847_39630C.1.pep
RMTSAYLGLFLKSLQVSQIPFSCRFLYAHSSGFVNLSFLVYQVLSVQLLFSPCIGCPPPPPPPPPPPPPP

SEQ ID NO: 218830 - protein, 195 aa, Glycine max
  Clone ID: PAT_MRT3847_39631C.1.pep
DPVLATSFAILALQQLVSRESDPLHSQVLSVTFVEGGTALNVIPSYVKFGGTLRSLTNEGMYHFRQRLKEIIEGQAAVHRCNAYVDFKEEYFTPYPAVVNDNNLHLHVERVGQILLGPDNVHAAKKVMAGEDFAFFQQVIPGVLFSIGIRNDKVGAIHSPHSPFFFLDEEVLPIGASLHTAIAELYLNEHKHTIY

SEQ ID NO: 218831 - protein, 243 aa, Glycine max
  Clone ID: PAT_MRT3847_39632C.1.pep
MAENLDDGEFWLPPQFLVDDDVVVFPTPFEAKFPPLSDDAVLFPYGSPVDSTVGGSSETESDEEEQLVAELTRHLTRSSLQPDTESVGRFVSGSPQSTLCAFGSGCSCGKGSSQGSPDGVCKLSSAKTTWDLLHAAAGEVERMRLKQEGYALNHHNGNFVPQRKPSPVTTLPSKNTTANPNPDVGGFYTQQQSLSHQQLQIAQFQLLRQQQLAKQQNSVWNVQKQCDGVYSQRQQQSNQMVPN

SEQ ID NO: 218832 - protein, 63 aa, Glycine max
  Clone ID: PAT_MRT3847_39633C.1.pep
CPAARIGQKGSAARTRQKGSAARIRQKDSVARRPQKGTAARRRQKGTVARSRQKGTASRTRQK

SEQ ID NO: 218833 - protein, 80 aa, Glycine max
  unsure (1)..(80): unsure at all Xaa locations
  Clone ID: PAT_MRT3847_39634C.1.pep
RXLXNGXEGEGGXXDFRXXXXQXXXFGXGRRMXXGXNLVXXGMXXXXXFXXXWFXXXVVXXKGKILKGDDXKFIIHQRGG

SEQ ID NO: 218834 - protein, 156 aa, Glycine max
  Clone ID: PAT_MRT3847_39635C.1.pep
IVLGDRPIEITLQRAWKAMKWTQKLSLVLSIIRGIASSSNSSINKLKEASSDDGTFQLYEQLSFSYPSLLPPLIHERDTYLAWSLKRSKAVNNSKNVVGVIGKGHMNGVIYALLSDTGNLRFRDLVGKDSYDGGSSGWIDDLIKSLVRDTIIMGLI

SEQ ID NO: 218835 - protein, 46 aa, Glycine max
  Clone ID: PAT_MRT3847_39636C.1.pep
WFSRLWKVKNSCNGSFWGFHLLKVWVNHSHSYTWFFYIWNISYLAW

SEQ ID NO: 218836 - protein, 137 aa, Glycine max
  unsure (1)..(137): unsure at all Xaa locations
  Clone ID: PAT_MRT3847_39637C.1.pep
SQFSPNGRTSRYNIVMAGALPEKQLHELLSRSMVDIYVGTENTHWILHEKLLCHYSPFFRRVFYAKGSNTTSFGLPEEEDAPFKTFVGWLYSSSLPVPREETDLGLLFDLYLMAEKFQIPNLIXRRSPSCARVVQVL

SEQ ID NO: 218837 - protein, 214 aa, Glycine max
  Clone ID: PAT_MRT3847_39638C.1.pep
MNIMSTHQCSWPVRIQDHPDKGSINRAPFSRGSDFLNVGYHTQKYGHSARKCRPVFSSSVSNSTDPSDSDNTDKKKPQNGEMGGVNSEMLRESLEKIVGKDDSTFSGFDLATLIRNKYGRSYDVQLIKKEFMGRNLLAMNVMWKYMEQRSFPLTEEEYILRLDDIANNLKCWGAVSHIRNSLEKSKERPRIGKAVSIFIDMDESGARSNEWIYK

SEQ ID NO: 218838 - protein, 56 aa, Glycine max
  unsure (1)..(56): unsure at all Xaa locations
  Clone ID: PAT_MRT3847_39639C.1.pep
GWLWKLLLAKNTLRVRGTSSAALAAASFLLPRLGEXGCARYXYVTLXSYIHHPSXP

SEQ ID NO: 218839 - protein, 69 aa, Glycine max
  Clone ID: PAT_MRT3847_3963C.1.pep
RDQGEHLHQDVTSYDVPDPDAIPQRSSWTGRWSRWAKLLAGPRTRSTVTTLDTDVDYACPDTTVTLDMA

SEQ ID NO: 218840 - protein, 201 aa, Glycine max
  unsure (1)..(201): unsure at all Xaa locations
  Clone ID: PAT_MRT3847_39640C.1.pep
DVICCRPVVRVYGQDPSIPANRSSKLLFSTSISKKHVRHYVQAECMLVKIDIRCRVQWDADLECLHLNEDFVREDMMFRVMFHTAFVLSNILMLNRDEIDILWDAMDLFLLDLEAXVLFLDADAVIPELTTVMVSEDANETESAETESASPEEFYEVEEIFSNVIDAQEGKTEYDSQAFHENAVDVETHKEVWRQESDPYT

SEQ ID NO: 218841 - protein, 132 aa, Glycine max
  Clone ID: PAT_MRT3847_39641C.1.pep
KTLSPACYGAGYVVSGVVDKRKCRPRGILTVEKNYSCSDKIAANSFDNDEKKKVIDTNDHASPSLLPLPTEAVVHWLSSPFNKGKKIPSKEFGNGLNQSQGLAESTTLASSTSPSSSSKTFWNGRQLRKRKN

SEQ ID NO: 218842 - protein, 100 aa, Glycine max
  Clone ID: PAT_MRT3847_39642C.1.pep
MGGQTTKRGPRGKTLWGNRGGPRGGKKRVLGPQGDPPGPRLKNPFFPGKTIWPKGDGGPRGHGKHPPGFWGGIPKKKKGGGGPPTQQRGGLFRAQGGNPF

SEQ ID NO: 218843 - protein, 80 aa, Glycine max
  Clone ID: PAT_MRT3847_39643C.1.pep
SFIIGFPSLDSLIFVALSVFLYILFLPVLFYILTFNVMYCCIMIYLLGSLCFLHSFYCDLSIGVALGFLNQYVEKSLIIR

SEQ ID NO: 218844 - protein, 70 aa, Glycine max
  Clone ID: PAT_MRT3847_39644C.1.pep
HASGSILDIKWHHTLNYEQPMLITSDNHVVRIWDPETVEEFAPTLIFHINSSTVFLQIDLYPLVMLIFIH

SEQ ID NO: 218845 - protein, 104 aa, Glycine max
  Clone ID: PAT_MRT3847_39645C.1.pep
TNNEKGLNEERYIGVKQGRATGQEYADLMHELMTAGKLTYGEKGLIRVEDFANHKAKELFFFYRATHLGFTDGIAAPASGGRAGLGAGRKAAGGNGAEQGNLIL

SEQ ID NO: 218846 - protein, 94 aa, Glycine max
  Clone ID: PAT_MRT3847_39646C.1.pep
LNYNFKMLKQSNIKISPSIKMGSSSLYLSQNMVTLFHLLSCSFTIQFKTQVWMTMFYCLVKGCLNMLDLQQHYSLYSSTLPCESYYCERSHLFL

SEQ ID NO: 218847 - protein, 88 aa, Glycine max
  unsure (1)..(88): unsure at all Xaa locations
  Clone ID: PAT_MRT3847_39647C.1.pep
HAVPPTSVRARRTSNLVFPSPREPRGTPSENHRASGGDYTSSSLVMPQAVDDRPVYHTSLVKGRXILTDIDPECRYLEWICVRPNVFL

SEQ ID NO: 218848 - protein, 157 aa, Glycine max
  Clone ID: PAT_MRT3847_39648C.1.pep
MGQQQQGSQPSPTKVERKIVEKNRRSQMKNLYSELNSLLPTRNPKEAMSLPDQIDEAINYIKSLETKVKLEQEKKERLKERKRTRGGCSSSSEAQGSLKSPNIQIHETGNLLEVILTCGVDSQFMFCEIIRILHEENVEVINANSSMVGDLVIHVVH

SEQ ID NO: 218849 - protein, 43 aa, Glycine max
  Clone ID: PAT_MRT3847_39649C.1.pep
SMHGSASPALSFGYGFVNAFHLPSCSWMLKPTTSPTIHPTFEI

SEQ ID NO: 218850 - protein, 85 aa, Glycine max
  Clone ID: PAT_MRT3847_3964C.1.pep
ARAKGPKQHPTDWAALTVGPSRGSITCEALDFYATPYDYLQLALRWSHPYCLTQEGSCLATGAHDLTIVCLDAMRRGGPHTLPGP

SEQ ID NO: 218851 - protein, 114 aa, Glycine max
  unsure (1)..(114): unsure at all Xaa locations
  Clone ID: PAT_MRT3847_39650C.1.pep
MCIWGISHLDKAAEVCKNYIRDDSSSYICKTPGLMTPTGLRQLEAAMNVSYRLYHYGPFSDALPNXRFRSEHIPDINNIHCPGLQIIRQSIHIGSVSLSPAVTSALIFGDIYAI

SEQ ID NO: 218852 - protein, 54 aa, Glycine max
  Clone ID: PAT_MRT3847_39651C.1.pep
PRVRRLREDDRRGWREMKFYDKRRSHAAKKKKIVRCLVRICQPNWGKKVEDRVA

SEQ ID NO: 218853 - protein, 61 aa, Glycine max
  Clone ID: PAT_MRT3847_39652C.1.pep
FTCYPPTSSTSFPKETNITSPVSALLQIPQVLLCSLLRPNLDNYSLTFFIINLCLNAYPPM

SEQ ID NO: 218854 - protein, 48 aa, Glycine max
  Clone ID: PAT_MRT3847_39653C.1.pep
CARVNLLILTFSMYYLISICTMGSSSELGLSKFWGNFYWRHLDQLLII

SEQ ID NO: 218855 - protein, 65 aa, Glycine max
  Clone ID: PAT_MRT3847_39654C.1.pep
RKTPPPTGGPNERRINLFLAPRALFFINPPQGGPPANNPPCFMEIVSIQNPVPIFEPFSGVSGPL

SEQ ID NO: 218856 - protein, 479 aa, Glycine max
  unsure (1)..(479): unsure at all Xaa locations
  Clone ID: PAT_MRT3847_39655C.1.pep
MSGYSPMFLVILSVVVGFTIRWFLFKTGLIHTIRIRFPRVVDWFHVYQLLKVPEFNETNMQPNNLHRKVSLYLHSLPSIEDADFTNLITGNDQTDIVLRLDPNQTIEDRFLGATLYWFNQKTEPNRISTFVLQIRKTDKRRILRQYLRHINTVADEMENQSKRNLRLFMNASAVEDGGTRWRSVPFTHPAMFETMAMEKDLKNKIKSDLESFLKAKQYYRKIGRAWKRSYLLYGXPAAPGKSSFVAAMANFLCYDVYDVDLSKIRGDSDLMFLLTETTAKSVIVVEDLDRFLEPEPETATAVTASGIQSFMDGIVSACCGEERVMVFTMNSKECVDPDLLRPGRVDVHIHFPVCDFSAFKTLASSYLGVREHKLFAQVEDIFRHGATLSPAEISELMIANRNSPSRAIKSVIGALQSDGEGRRSYADSIGRRIEGDDVDEAPCGGDGFSTVKDLRKFYGFFKLRNPRRTPRPMIDNDER

SEQ ID NO: 218857 - protein, 64 aa, Glycine max
  unsure (1)..(64): unsure at all Xaa locations
  Clone ID: PAT_MRT3847_39656C.1.pep
XXXXXRTXXRNSXRAXNKGXXPXSFXFXMXIXXTXXXXXGXKSLXXXXQXLIXXIRXGVXXKXX

SEQ ID NO: 218858 - protein, 107 aa, Glycine max
  Clone ID: PAT_MRT3847_39657C.1.pep
KRQDSPNWKAYRPLDNSISTMSVVRSIIRALSFVCEAILLLLAAPCRLVKIIGVDLTAYGGLRLEDSPPQHPWKRLSDPFRRHYQGAQQAQRGSKLTQHLCCYNPHF

SEQ ID NO: 218859 - protein, 155 aa, Glycine max
  Clone ID: PAT_MRT3847_39658C.1.pep
RAARADSARDYFHCMKCNGCLGIKWASHKCLEKGLEMNCPICCDDLFTSSATVRALPCGHYMHSSCFQAYTCSHYTCPICSKSLGDMAGYFGMLDALLAAEELPEEYKDRCQDILCHDCNRKGTSRFHWLYHKCGFCGSYNTRVIKCETSNSSCS

SEQ ID NO: 218860 - protein, 77 aa, Glycine max
  Clone ID: PAT_MRT3847_39659C.1.pep
LAEIWNSGWRRITVSTSTCWALRVATKNTPRTVYRLSNIVKKLHRREIMYDRDRAFFMTDAHDRLRNIRSQEESEPH

SEQ ID NO: 218861 - protein, 54 aa, Glycine max
  Clone ID: PAT_MRT3847_3965C.1.pep
HGYFSSELISAVARSSIRKCRRLARGVGLWTPVTAHHLYPVLGIHAADHIWKHK

SEQ ID NO: 218862 - protein, 882 aa, Glycine max
  unsure (1)..(882): unsure at all Xaa locations
  Clone ID: PAT_MRT3847_39660C.1.pep
MHSSCFQAYTCSHYTCPICSKSLGDMAVYFSMLDALLAAEELPEEYRELYQDIDHIMETIQRHFHNEEVQVLPLARKHFSFRRQCELLYQSLCMMPLKLIERVLPWLVGSLTEDQAKTLQGNMQLVAPETDPAPFKLFCEGFCKARNKGLCVSSSALDCCPVQRLSAIEENFVGPSCAFAFAHLIHIARDXLIKXGNNRSVKRNISELHKNEDLPETSEAEDIQKQCCSARSCCVPGLGVSSNNLGLSSLSTAKSLRSLSFCSSAPSLNSSLFIWETESSSCNVGSTQRPIDTIFKFHKAIRKDLEYLDVESGKLSDGDETILRQFNGRFRLLWGLYRAHSNAEDDIVFPALESKEALHNVSHSYMLDHKQEEQLFEDISCVLSEFSVLHEALQMTHMSDNLSESNFGTSDANTSDVIKKYNELATKLQGMCKSIRVTLDQHLFREECELWPLFGRHFTVEEQDKIVGRIIGTTGAEVLQSMLPWVTSALTQDEQNKMMDIWKQATKNTMFNEWLSECWKESRVSTAQTETSARSTSRRGAEYQESLDHNDQMFKPGWKDIFRMNQNELESEIRKVYRDSTLDPRRKAYLVQNLLTSRWIAAQQKSPKALSEGSSNSVEIEGLSPSFQDPEEHVFGCEHYKRNCKLRAACCGKLFTCRFCHDNVSDHSMDRKATSEMMCMRCLNIQPIGPLCITPSCNGFSMAKYYCNICKFFDDERNVYHCPFCNLCRVGQGLGIDYFHCMKCNCCLGIKSSSHKCLEKGLEMNCPICCDDLFTSSATVRALPCGHYMHSACFQAYTCSHYTCPICSKSLGDMAVYFGMLDALLAAEELPEEYKDRCQDILCHDCDRKGTSRFHWLYHKCGFCGSYNTRVIKCETSNSSCS

SEQ ID NO: 218863 - protein, 74 aa, Glycine max
  Clone ID: PAT_MRT3847_39661C.1.pep
IQLIFTAKLKLHQRIRIPIKHTAQLLMNPYFSRYVHTSYMLNIPAYSAIGLPSELPLCLQKKKKKKKRPSGRRS

SEQ ID NO: 218864 - protein, 38 aa, Glycine max
  Clone ID: PAT_MRT3847_39662C.1.pep
GPQVGMLLESTRNSVNHIKAMDMLNATVLVERNDCNYM

SEQ ID NO: 218865 - protein, 43 aa, Glycine max
  Clone ID: PAT_MRT3847_39663C.1.pep
NIKSSSHTQRQKESNQLNLKIEKNRQVSSGPTLSIKLYELASY

SEQ ID NO: 218866 - protein, 88 aa, Glycine max
  Clone ID: PAT_MRT3847_39664C.1.pep
KKKLKLWAGFVNPFFRNPSPCPPNQVPPKAQQPPLLRVVSSSPHPLRRILMPGLIKMVGAMVIQPPPQHFFNPWGLANPRTQGLVKFW

SEQ ID NO: 218867 - protein, 411 aa, Glycine max
  Clone ID: PAT_MRT3847_39665C.1.pep
DLWPLLQQLVGKTPLFSSSSSEASSSFFQNLRESMTNSSCGGAELELCRDESAALVLKFVAIASILLSGMAGIAIPLIGKHRRFLRTDGNLFVAAKAFAAGVILATGFVHMLSDATKALRHPCLPAFPWSKFPFTGFFAMLAALLTLLLDFVGTQYYERKQGMNRAPSEEPVRVGSSEPGGNGKVFGEEESGGMHIVGMHAHAAHHRHNHPHGNDACHGIGNIKEQVHAHSHSHSHSHGHSHSHIEDGEDTDVRHVVVSQVLELGIVSHSVIIGLSLGVSQSPCTIRPLIAALSFHQFFEGFALGGCISQAQFKASSATIMACFFALTTPLGVGIGMAISSGYNPYSPGALIAEGILDSLSSGILVYMALVDLIAADFLSKRMSCNFRLQILSYCMLFLGAGLMSSLAIWA

SEQ ID NO: 218868 - protein, 48 aa, Glycine max
  Clone ID: PAT_MRT3847_39666C.1.pep
TRLCEFLIEEGAEVDAVDRAGQTPLMNAVICYNKEVCLFYVCAHVCML

SEQ ID NO: 218869 - protein, 63 aa, Glycine max
  Clone ID: PAT_MRT3847_39667C.1.pep
NFFNQGSLICGGRQINGLYTGILFLGGQKWGTPALHGPLALAFHSDSWGKWGWNLYQARQFMG

SEQ ID NO: 218870 - protein, 49 aa, Glycine max
  Clone ID: PAT_MRT3847_39668C.1.pep
CFHGNPPPAPAPAPPPAPAPAPASTQSPAPPPSPPPAQSPNPPSSRRPI

SEQ ID NO: 218871 - protein, 58 aa, Glycine max
  Clone ID: PAT_MRT3847_39669C.1.pep
QQQQQQQLKNLPVQQQLPNVISPMSKSAWEEIETGYLMQSPPMQALAYIVSSRAFLNL

SEQ ID NO: 218872 - protein, 54 aa, Glycine max
  Clone ID: PAT_MRT3847_3966C.1.pep
FTLRSALITLLLHLLYFFWVSPLPFDFLCFIFVLVVYPSPTISRRAASPHTTNS

SEQ ID NO: 218873 - protein, 150 aa, Glycine max
  unsure (1)..(150): unsure at all Xaa locations
  Clone ID: PAT_MRT3847_39670C.1.pep
KAISRSLKATEDWLYDDGDDETVDAYSAKLEDLXQLVDPIEFRYKDTEARPQATRDLLSCIVEYRMSADSLPPQDKEQIINECNKAEQWLREMRQQQDLYPKNFDPVLLSSDIKSKTEDLNSVCQQILKSKGSPFPKDKGEDKQNTSNHQ

SEQ ID NO: 218874 - protein, 65 aa, Glycine max
  Clone ID: PAT_MRT3847_39671C.1.pep
GLQVLQYRARPYGCKSTRLSGVHRTPYPGVSNGQFRSLWAGPLALSWFRLGYFPRFGIICLAPCV

SEQ ID NO: 218875 - protein, 79 aa, Glycine max
  Clone ID: PAT_MRT3847_39672C.1.pep
GLYTRTLKEIEAVPKDEGYRKAVESFTNHRLQICQEEDDWKRIEDRIGCGQVEELIEEAEDELKLIAKMIESDPWGVPD

SEQ ID NO: 218876 - protein, 582 aa, Glycine max
  Clone ID: PAT_MRT3847_39673C.1.pep
MVNGCFSSSPRHDAFPAGLRVLVVDDDLTWLRILEKMLKKCLYEVTTCCLATEALKKLRERKEAYDIVISDVNMPDMDGFKLLEQVGLEMDLPVIMMSVDGETSRVMKGVQHGACDYLLKPIRMKELRNIWQHVFRKRMHEARDFESHEGFDFEGIHLMRNGSDHSDDGNLFAVEETTSIKKRKDADNKHDDKEFGDHFPTKKARVVWSVDLHQKFVKAVNQIGFDIGPKKILDLMNVPWLTRENVASHLQKYRLYLSRLQKENDQKSSSSGIKHSDSPSKDLGSFSFLNTANKQQNDIATDSFSYSDGTLLIQMDATSYEGDLKGIVSEPTTEKRRASTSEIPDPKVQKSSQKSLNKPFTSVESSEANHAVFDCTIPTEYSWSEFPKGPLKEEQKTPVQLEDSLCQLPLHGTQHHIQIDQSQSIASINSNPSITEEEVAAKLETKPLYAGYESDYVNPVSSIGSAVEAFRSQSKSLMVSDQSSEPTFTSNLSLKTQGFNLDCISDLDFYQRNLLLGGEVASAPLDEDLNFFLLQSECYNMNFGLQNIDMSEYYDPRLTAEVPSHFYDSADYSSVDQSLFIA

SEQ ID NO: 218877 - protein, 53 aa, Glycine max
  Clone ID: PAT_MRT3847_39674C.1.pep
KLLIESHQLRKNHPFIIMGKKPPLVNPYIHLKKAGKKTWALKKKGFEKSPPLS

SEQ ID NO: 218878 - protein, 168 aa, Glycine max
  unsure (1)..(168): unsure at all Xaa locations
  Clone ID: PAT_MRT3847_39675C.1.pep
YAWGAPRTYWVVNTQNPFEXNRGKGKLTTPQGTSRSEKRMPLSIGGGAGAKNAILMNMPNAVLSMRTYYVGDLVFEESKMTYAYIKCAGSFFIAIGNLAGDTSNIEAAPHKLEHYGEIQEKAVLKFSQEDILTARSTQVRTATTLMADGXPYMNAMVHDSSATTIPGD

SEQ ID NO: 218879 - protein, 205 aa, Glycine max
  unsure (1)..(205): unsure at all Xaa locations
  Clone ID: PAT_MRT3847_39676C.1.pep
MNLQQVGQPKSSNGYGCWKSEKEGATKSDNKIPSGKSNASSRLASVVTGNKGGSYGSPSHDRLVYLKTCLIGQHVEVQVKNGSIYSGIFHATNSGKDFGIILKMAHLTKDAALQGKESGVEFVSKAPFKTLIIPANDLVQVIAKDVAVSRDGLPSESHYDMHXIMDSVISRSCHVEVSASLQRWVTDFRESTGPKLERYTTFSHI

SEQ ID NO: 218880 - protein, 91 aa, Glycine max
  unsure (1)..(91): unsure at all Xaa locations
  Clone ID: PAT_MRT3847_39677C.1.pep
MVAWPLYAKQKLNKVILVEEIKVXLSVNQNKDGLVSSPKLGDRMMELMASDKGKVIRQRIFKIKISAPAAMAKGGSSNMTFNKLVALCREH

SEQ ID NO: 218881 - protein, 304 aa, Glycine max
  unsure (1)..(304): unsure at all Xaa locations
  Clone ID: PAT_MRT3847_39678C.1.pep
LEPNRLEAIPISWPSTNNNHHALLLVSPGMGHIIPALELAKRLVTHKIISKLTFFYGSIKTSTPSKAETQILQSAIKENLFDLIQLPPIDLTIHVSPHDTLETKIAIIMHEIPLLFVSTISSMNLNPTMIITDFFFSQVIPLAKNLNLPIFAFAPTNAWVIALSLQCPTLDKEIEGEYSIESKPISIPGCKSVHPLDLIPMLRDRTQRVYHEFVGVCEGAALADGIFVNTFHELEPKTLEALGSGHIITKVPVYPVGPLVRDQRSPNGSNEGKIGDVFEWLDNNKKXSVVYLSLGSGYTMSFEE

SEQ ID NO: 218882 - protein, 82 aa, Glycine max
  Clone ID: PAT_MRT3847_39679C.1.pep
LEKRYFCVTFCKKIKRFVTRVSGFPKKRAALSLKFLVPKLPKSLVLCIVPYQVCSNRLVFSASVSFYLVKQVHCHHFKIFVR

SEQ ID NO: 218883 - protein, 33 aa, Glycine max
  Clone ID: PAT_MRT3847_3967C.1.pep
GPVNLYFMELGFLKKKVVNYWGVENKLKKIFFF

SEQ ID NO: 218884 - protein, 396 aa, Glycine max
  unsure (1)..(396): unsure at all Xaa locations
  Clone ID: PAT_MRT3847_39680C.1.pep
MVGNSEEDRDGLHQSPLGIPELLYVSVKMENPNLTLSGDLLPHISGSCPSGDPSKALSMERESASVWELSFVVPPNHEALEFKFLLKPKYIDNPCFVEEGPSRVLIGGALQDGDRLALFRLDSDQVLEYRVFVEAKRASPFDLAARWRAYQENFRLSTVRGIPDVSINSEVQTGSENISSASLELDLEHYIVPSPPVSASSAPVYAANLTENPRSLGSGSASISSSTVDGSVSMINQPETVKLTEVNVPDPSKVDAWPGMVKSQSVGTISPLQKEDDLRGLLVDRGVGVPRLVKSSSSNAFTNLNLVTDTKNSIPAAAGAVAAAAIADQMLGPKEHRHLAIVMVSLPARGKTYTAAKLTRYLRXGHNTKHFNVGKYRRLKHASQLLILRADNPGGT

SEQ ID NO: 218885 - protein, 71 aa, Glycine max
  Clone ID: PAT_MRT3847_39681C.1.pep
SSCILPFALSCLFLIAGETWYFEHFYSPALWMVLFSSSLAHYVALEFVVGWCRFKMMNLVLLIPVGASLCS

SEQ ID NO: 218886 - protein, 207 aa, Glycine max
  Clone ID: PAT_MRT3847_39682C.1.pep
SESFIREFPVDPASQKETYWGNVNPIGVRSCYDEGKRTAETLTMDYHRGAGVEVRIARIFNTYGPRMCLDDGRVVSNFVAQALRKEPLTVYGDGKQTRSFQYVSDLVEGLMRLMEGEHVGPFNLGNPGEFTMLELAKVVQETIDPEAKIEYRPNTEDDPHKRKPDISRAKEQLGWEPKVDLRKGLPLMVSDFRQRIFGDQKEGTTSA

SEQ ID NO: 218887 - protein, 60 aa, Glycine max
  Clone ID: PAT_MRT3847_39683C.1.pep
AQGLVSPCVNPKDQTIILFRTKIGFHGLQCLKENVISTSFLVLGSIPQARKATSTKSNNP

SEQ ID NO: 218888 - protein, 167 aa, Glycine max
  unsure (1)..(167): unsure at all Xaa locations
  Clone ID: PAT_MRT3847_39684C.1.pep
TLTMDYHRGAGVEVRIARIFNTYGPRMCLDDGRVVSNFVAQALRKEPLTVYGDGKQTRSFQYVSDLVEGLMRLMEGEXVGPFNLGNPGEFTMLELAKVVQETIDPEAKIEYRPNTEDDPHKRKPDISRAKEQLGWEPKVDLRKGLPLMVSDFRQRIFGDQKEGTTSA

SEQ ID NO: 218889 - protein, 127 aa, Glycine max
  Clone ID: PAT_MRT3847_39685C.1.pep
FTIMDVVALATSLASVVVFLSILTSPCELWDFHKSLPRKLNLGFALLFLSLMTTMLAFSATMLLTIRLEWKNWTSTLIYSAAFFPVTIFAMIQFPVYVMTRSIVKHLWKQIKKVLPMRLVKCFTNLN

SEQ ID NO: 218890 - protein, 84 aa, Glycine max
  Clone ID: PAT_MRT3847_39686C.1.pep
SHKVYFPLLNRADHQQINFSEPAFSSLLPDNVKTEDALKLPPHKPLLVQINLGFLEGQDQVVSIRVPTEENPIFTLRATGPKNQ

SEQ ID NO: 218891 - protein, 59 aa, Glycine max
  Clone ID: PAT_MRT3847_39687C.1.pep
FISISALNLFIGSITIQFRRISFRYSDISSALLGFFSPVRVTIVKEQIFDHVIFPCARA

SEQ ID NO: 218892 - protein, 36 aa, Glycine max
  Clone ID: PAT_MRT3847_39688C.1.pep
GKNYYTSSRLSTSTWVNVISNAGTYTILGMMYDTSF

SEQ ID NO: 218893 - protein, 108 aa, Glycine max
  Clone ID: PAT_MRT3847_39689C.1.pep
MAIKFLMFVSPICVHLFSLILEVLPTYNFILLLPFQVANKWFALQTMSDISGNVENVRKLLSHSTFDLRNLMLLNWFICLVITQFDQVCDGCPYILISFENSFRPKWT

SEQ ID NO: 218894 - protein, 87 aa, Glycine max
  Clone ID: PAT_MRT3847_3968C.1.pep
ARALSKVAYIVYLIASGIWLMSSVGNTFFLHPFTHTRIIPDHDLNLEIFKSPVLTSCWRALSSKLPLSLLPHRDADIALIVVTRFIP

SEQ ID NO: 218895 - protein, 407 aa, Glycine max
  unsure (1)..(407): unsure at all Xaa locations
  Clone ID: PAT_MRT3847_39690C.1.pep
MAPPATSTGGTLPELTNRTPFLGLKLYVLLLIAVLIVIATVILILVCVRRSRSSKKRKMRVKHSSGAIPLVSKEIVEVNTLELKIDEEVEIEIEESASAESPNIGWGRWYSLKELENATEGFAEVNVIGEGGYGIVYIGILMDGSVVAVKNLSYVQLERKIXPSAVRTFPLKFLIHHQSXCRNRRKIKMEIIVCNXLVMQLWGSIYLYKDFRDVMNEFXVSVHILYVVAFSFRFQHHFVVLHYLGTEKSMACKYAPHYLSIFVCFTGMLNEGSDVYSFGILLMELITGRSPIDYSRPPGEMNLVDWFKVMVASRRGDELVDPLIDIQPYPRSLKRALLVCLRCIDLDVNKRPKMGQIVHMLEADDFPFRSEHRTNREKDPVHSKAAVSSKILYPTRHVEPADKSSWR

SEQ ID NO: 218896 - protein, 402 aa, Glycine max
  unsure (1)..(402): unsure at all Xaa locations
  Clone ID: PAT_MRT3847_39691C.1.pep
MAASATSTGGALPELTNRTPLLGLKLYVLLLIVALIVIATVVLILVFVRRSRSSKKRKMRVKHSSGAIPLVSKEIVEVNTLELKIDPKKKEVEMEESASVESPNIGWGRWYSLKELENATEGFAEQNVIGERGQGXVYKGILMDGSVVAVKNLLNNKRSSEXHGNLEQWLHXDVPASPLTWDIRMRIAIGTXKGLAYLHEGLEPKVVHRDIKSSNILLDKNWNAKVSDFGLAKLLGSEKTHVTTRVMGTFGYVAPEYASSGMLNERSDVYSFGVLLMEIITGRSPIDYSRPPGEMNLVDWFKAMVASRRSEELVDPLIEIPPPPRSLKRVLLICLRCIDMDVVKRPKMGQIIHMLETDDFPFRSELRSVREKDPVPSHADVSIKVPYPPPKHAETVEKSRWR

SEQ ID NO: 218897 - protein, 128 aa, Glycine max
  Clone ID: PAT_MRT3847_39692C.1.pep
VYSFGILLMELITGRSPIDYSRPPGEMNLVDWFKGMVASRHGDELVDPLIDIQPSPRSLKRALLVCLRCIDLDVSKRPKMGQIVHMLEADDFPFRFELRTNREKDPAASSKIPYPTRHVEPADKSSWR

SEQ ID NO: 218898 - protein, 96 aa, Glycine max
  Clone ID: PAT_MRT3847_39693C.1.pep
RAQMNLVDWFKAMVASRRSEELVDPLIEIPPPPRSLKRVLLICLRCIDMDVVKRPKMGQIIHMLETDDFPFRSVSTTLHPLLLSFSQNTISSSLND

SEQ ID NO: 218899 - protein, 77 aa, Glycine max
  Clone ID: PAT_MRT3847_39694C.1.pep
QIHFGPTFLIAWARVYFCERVHILIETGISIRTSMPVIHLGCSPFKRKKMMLHYFYQIMKQINFLHFKLSPAYLRRP

SEQ ID NO: 218900 - protein, 75 aa, Glycine max
  unsure (1)..(75): unsure at all Xaa locations
  Clone ID: PAT_MRT3847_39695C.1.pep
DINTPYLSLCPILVIIPLSSSLLLFFQLGHLFHSNGFLFRLXFCLILLSLTVYVIIESQVSSSNFVSFASLFFLT

SEQ ID NO: 218901 - protein, 191 aa, Glycine max
  unsure (1)..(191): unsure at all Xaa locations
  Clone ID: PAT_MRT3847_39696C.1.pep
DPRVRPRVRLRGRPHFVHSNSQTALKQIIEFHRKTDGSXKGSTTMRSCERSATNSLCDGLDRAKGXSSWYKHIPXCLTEQFPGDYGWNTAVLSDDPLTLDTNRGLHVIHTVCAMLGVLGCNVSEILDKNGGKFAQAGWIEASAXTYCDMEELDYLDNPHLIHAESILDIGSVQDGLMWGGQSYKGLRIPIC

SEQ ID NO: 218902 - protein, 105 aa, Glycine max
  Clone ID: PAT_MRT3847_39697C.1.pep
MVNVPKTKKTYCKSKECRKHTLHKVTQYKKGKDSIAAQGKRRYDRKQSGYGGQTKPVFHKKAKTTKKIVLRLQCQGCKHVSQHAIKRCKHFEIGGDKKGKGTSLF

SEQ ID NO: 218903 - protein, 228 aa, Glycine max
  Clone ID: PAT_MRT3847_39698C.1.pep
GKVTIREMKRSRDMEKRSEIKSAIEELSMLVIVKPEGNHVMIAHIPTKPFLSLCHLVLQVLDKIGPTMAVLRQDVSQNIKRLEVMHELNPSMNSNLVEILKSEASKGKSRKRSSCSKAFLWLTRSLDFSSALLQSLENDPKKDLEQIVQECYDATLSPWHGWISSAAFRVAKKLVPDSKTLMDLLKEKDENCETLKEKMQILVSLLVPFLEDVHCILKIYNLDRIKST

SEQ ID NO: 218904 - protein, 90 aa, Glycine max
  Clone ID: PAT_MRT3847_39699C.1.pep
FNGSDPCFLSKKFRYPWCRIRHQGKRRYDRKQSGYGGQTKPVFHKKAKTTKKIVLRLQCQGCKHVSQHAIKRCKHFEIGGDKKGKGTSLF

SEQ ID NO: 218905 - protein, 206 aa, Glycine max
  unsure (1)..(206): unsure at all Xaa locations
  Clone ID: PAT_MRT3847_3969C.1.pep
VYPLFSGASSTKSALSTTPYNTGPFTVSIRKPIEIPLNCTAYNLTRTCSTNQFPIPENDQSHPSSATCPEYFRWIHEDLRPWARTGITQDMVERAKETANFKLVILKGKAYLETYEKAYQTRDVFSIWGILQLLRRYPGKIPDLELMFDCVDWPVVLSDRYNGPNVEQPPPLXFRYCGNDATLDIVFPDWXSFWGWAEVYIKPLED

SEQ ID NO: 218906 - protein, 131 aa, Glycine max
  Clone ID: PAT_MRT3847_396C.1.pep
MGVEWLLVCHGLVTAVVVASFLCGRWPIFEGTFIQRIHYFLTFGAYDYFLRFVGAVFGPKCTDSVLSVEYYCCDRPNPLLQIIYIVIIGVTYYFVAKSCFAYIPGYYLSGIHRYTSFLADAVGILLSLLTS

SEQ ID NO: 218907 - protein, 73 aa, Glycine max
  Clone ID: PAT_MRT3847_39700C.1.pep
GDNRRIYEMPPIDPRNNTPKSHTHGHGSLGGSRRRTTREKGRTRERNRRSTTEDYARRGMITRGRRLINIMIT

SEQ ID NO: 218908 - protein, 38 aa, Glycine max
  Clone ID: PAT_MRT3847_39701C.1.pep
MCFNTNGKGQFLIVLSHTHLGQRLINQLLQVLLNRKTK

SEQ ID NO: 218909 - protein, 115 aa, Glycine max
  Clone ID: PAT_MRT3847_39702C.1.pep
LWNFNCSLLMGSIFELYLCSQNKEIFCPAFLRVSTLKSGGQHRKTFFSSLFPFSRESMGAGEYPSGLKIVLNCWGQKLCLSYFFFGLLSLKFVKKMLVGQFFFTFFVRLNSWGSY

SEQ ID NO: 218910 - protein, 38 aa, Glycine max
  unsure (1)..(38): unsure at all Xaa locations
  Clone ID: PAT_MRT3847_39703C.1.pep
TLRDFTFXKLICYICYLLKTXEQNIXLLSIFFTHKSDV

SEQ ID NO: 218911 - protein, 45 aa, Glycine max
  Clone ID: PAT_MRT3847_39704C.1.pep
GNLVCVMYGRPSPRGLINLQIRCQLGVNLAVPAKRFFKGHCSIQK

SEQ ID NO: 218912 - protein, 123 aa, Glycine max
  unsure (1)..(123): unsure at all Xaa locations
  Clone ID: PAT_MRT3847_39705C.1.pep
MSWEDEIVMRDVTNAGLVISDRIGREVSSQLDLEEALEASRYASHPYSTQPRERTPLVEVVNTCELPPVLIERYNAAGGEGTAFCGIFAGIRRAXASRDNXIVLXPYDKREGRGPEXKGEEQA

SEQ ID NO: 218913 - protein, 48 aa, Glycine max
  Clone ID: PAT_MRT3847_39706C.1.pep
LLKEKKKSVFLDIACCFKGCEWEEVEHILHAHYENCIEYHMGVPIDKS

SEQ ID NO: 218914 - protein, 74 aa, Glycine max
  Clone ID: PAT_MRT3847_39707C.1.pep
LTPSDSSSLINCNSLLAFSLKFTFYGEPFLGEVDIWSVPTLMEWRPCIRRLLSRQTSSTIINLWIYYTVLLWGA

SEQ ID NO: 218915 - protein, 143 aa, Glycine max
  Clone ID: PAT_MRT3847_39708C.1.pep
MIVCVAVVGHQNNPLYIQSFTEADDALKLHHIVHCSLDVVDERVNNPKKSGPMLNETFLGLLYPIENYKVYGYLTNTKVKFILVTTDLDVKDADVRNFFRRFHAAYVDAVSNPFHVPGKKITSRTFAERVSTIVKSFGLSSAG

SEQ ID NO: 218916 - protein, 411 aa, Glycine max
  unsure (1)..(411): unsure at all Xaa locations
  Clone ID: PAT_MRT3847_39709C.1.pep
WLFTVPNVHPESSVGALPAACVVVFRGLAAPAAYLAGIEVATAASSGDIKGYKLWYYKSREESHTKDPVSVFPKAQRRILISNLQPCTEYTFRVVSFTDMSDLGHSEAKCFTKSIEILEKNSSSSVAMNKKKENLQTECNSSGSEMEPNPTMEDDLFKLLRLGKIMHPSWAQGPLDMKDFCCADKRNCCGQSETIKPTKLQEQLPSVSRDLLINVVFXNDLNEELTPPFESSRDEDNGCTLQQAVEADDDAASHDLEKNLARSHGSGGSQTWNHGPTGEVPAVDSRGDACRKRVASTNEETHDCDSTLINDSPLRASDGPFSLDENFEYCVKVIRWLECQGHIKQEFRLKLLTWFSLRSTEQERRVVNTFIQALIDDPSSLAGQLVDSFSDIISNKRPRNGLSSNKAVSSS

SEQ ID NO: 218917 - protein, 89 aa, Glycine max
  Clone ID: PAT_MRT3847_3970C.1.pep
KASFANKKKPAKIYLPSLFPKSGGLIKDLMMLGKAGLIKRKGEGKGNLPKAHKGGCSDLGVPIWGAIFPWAWKPVPPNLEIVAAAAAAA

SEQ ID NO: 218918 - protein, 108 aa, Glycine max
  Clone ID: PAT_MRT3847_39710C.1.pep
PVKLPVKTARKKPKVPPKETAKYTRAVFPKNWEAKMGKGILKKGLQKKKRRGQKAVNSGNPTGFPPIFFQKLRPKKLTQCVQKKKLKKETPPWLTFLSFKTRCPYFFF

SEQ ID NO: 218919 - protein, 72 aa, Glycine max
  Clone ID: PAT_MRT3847_39711C.1.pep
QPAAIINVAIALPGSDSLHQTKEGVWVRPDTKTLRKLLYYHLKTLTFSFTDDDTATNGSDSAFNRFTTLSRC

SEQ ID NO: 218920 - protein, 414 aa, Glycine max
  Clone ID: PAT_MRT3847_39712C.1.pep
MAYSIPLIITFFFFLFGTLSHAQAPASFLIPVTKDASTLQYITTLSYGTPLVPTPLVLDLGGPFLWLHCASRNTPSSSSLTTPHRSLQCFTAKTHKSTNSFLSSPVDEVDQYQPCQVFPENSITGTIAAEGELVEDLMALQSAKEKGQLVEHQSRFTCSPTTLLHGLAKGARGMVGLGRSRSSLPSQVFDNFSTHRKLTLCLSSSKGVVLLGNVATYESEVLKSLTFTPLVTSFPTQEYFINVNSVKINGKRLSNEHEGGGGVLTLLSTIVPYTTMQSSIYNSFKTSFEDAAVAMNITRVASVAPFELCFSSRGSQVGPSMPVIELVLQSEMVKWTIHGRNSMVRVSDEVLCLGFLDGGVNPRNSIVIGGYQLEDVIVQFDLATSMVGFSSSLVAKNTKCSDFKYASSITADSI

SEQ ID NO: 218921 - protein, 74 aa, Glycine max
  Clone ID: PAT_MRT3847_39713C.1.pep
CVVVKRDCSSPQIRFCPWLARHLFITSEYCLRAVASAYPAVGVVPELACIWLVQQYLCISETFDLSVHGEHSYV

SEQ ID NO: 218922 - protein, 136 aa, Glycine max
  unsure (1)..(136): unsure at all Xaa locations
  Clone ID: PAT_MRT3847_39714C.1.pep
MASKTCSSLALFLTLNLVFFSLVSACGYTPCPGPNPKPRPNXTLTLTLAQSGSCPRDALKLGVCANVLNLVNVTLGQPPVTPCCTLLDGLVDLEAAVCLCTALKANILGINLNLPISLSLLLNVCSRKVPRDFQCA

SEQ ID NO: 218923 - protein, 249 aa, Glycine max
  unsure (1)..(249): unsure at all Xaa locations
  Clone ID: PAT_MRT3847_39715C.1.pep
DLLEDLICFIDETCDEGAILVFLPGMSEINYLHDKLVASSQFGGPSSEWVIPLHSAVASSEQKRVFLRPPGNIRKVVIATNIAETSITIDDVIYVIDCGKHKENRYNPQKKLSSMVEDWISRANATQRRGRAGRXVKPGICFSLYTRHRFEKLMRPYQVPEMLRMPLVELCLQIKLLSLGYIKPFLSEALEPPKVEAMDSAISLLYEVGALEGDEELTPLGHHLAKLPVDVLIGKMMLYGAMFGCLSPI

SEQ ID NO: 218924 - protein, 61 aa, Glycine max
  Clone ID: PAT_MRT3847_39716C.1.pep
SLETGGSAVRLGNLDRCSPGVTWRRRRRMSLELMPGDVMDQPHQLRRVVTGELLHGLCRRC

SEQ ID NO: 218925 - protein, 182 aa, Glycine max
  Clone ID: PAT_MRT3847_39717C.1.pep
DALLGGRKPYLFSGFLPSLSKIAAVVGDSARELDRMKQTRNGVVGLPRKYLEGKARDMASQEKWGAFADILALLIFGVVLFPNVDGLVDLAAIDAFLAYHHNKESPVVAILADLFDTFDRRCEKNSARIVCCLPALCVWLVSHLFQQDTRHPCPLQSFAHAPKKEESIGTNICGRGVDPGIP

SEQ ID NO: 218926 - protein, 116 aa, Glycine max
  unsure (1)..(116): unsure at all Xaa locations
  Clone ID: PAT_MRT3847_39718C.1.pep
CVIKPDTDLVPVKDRIKNFLGRPWKEYSRTIIMETQIDDLIHPDGFLPWEGNFALSTLYXGEYNNNGAGSITTDRVNWPGRKVINRDEATRYTVEAFLQGTWINGTGVPAQIGLYN

SEQ ID NO: 218927 - protein, 215 aa, Glycine max
  Clone ID: PAT_MRT3847_39719C.1.pep
KYMFPDAEWVCGNYLHCHNPRLEQKWIEVMVDTQVDELIKAVNHRFRSEDLVNAGGIHRTMVFANTVEAVEAVAKILLRSGIECSRYHKNCTLEERAQTLVDFQDKGGVLVCTDAAARGVDIPNVLHVIQADFATSAVDFLHRVGRTARAGQIGLVTSMCTESNRELVNAVRRAGELDQPVETAFSRKRSFRNKLKKRGTNKVRDSATIKESVLG

SEQ ID NO: 218928 - protein, 209 aa, Glycine max
  Clone ID: PAT_MRT3847_3971C.1.pep
MDPHLPKNGTQQHHGTPTPSPASVANNIIIPHPEFRIPSFKEHHKNVPQLAMIVMACMVGVIMFLCAVSVLIRYFYSRRYSRNNQNRRVDAPILFDLNGDSPPSSDNDDDVEELAVVHPIWYIRTVGLQQSLIDSITVFRYKRGEGIIDGTECSVCLGEFEHDESLRLLPRCSHAFHIPCVDTWLRSHKNCPLCRAPVLRDETDGAHVI

SEQ ID NO: 218929 - protein, 49 aa, Glycine max
  Clone ID: PAT_MRT3847_39720C.1.pep
PQDIRMNRSVKDALAYEVEFFLSHPVYSCLRDRCGLTELEKKLTRAESS

SEQ ID NO: 218930 - protein, 46 aa, Glycine max
  Clone ID: PAT_MRT3847_39721C.1.pep
SLTPAYPDGPGKPTHPQSSSGTHEANKIALWFCLHFSDNCPRLNKS

SEQ ID NO: 218931 - protein, 63 aa, Glycine max
  Clone ID: PAT_MRT3847_39722C.1.pep
SGPGWSYLSRSQVTMITLASQSSTISGIHTGHAPSLVAQHGRTCPFHTTRSRRGLGSPYEGPL

SEQ ID NO: 218932 - protein, 77 aa, Glycine max
  Clone ID: PAT_MRT3847_39723C.1.pep
ISSFEGTESTLEDSDSDSDEDFNSTKKRSVHVRKNNGRSSAATGFSSRNSEIRTSSRTVRQVSYVEGEESEEADEGK

SEQ ID NO: 218933 - protein, 65 aa, Glycine max
  Clone ID: PAT_MRT3847_39724C.1.pep
LYNKALQQLLKFFSIDQIAFSPVTYTASGFLCCWNICCKGYGWLVELFHHATESKGVMEEWNNLC

SEQ ID NO: 218934 - protein, 40 aa, Glycine max
  unsure (1)..(40): unsure at all Xaa locations
  Clone ID: PAT_MRT3847_39725C.1.pep
TPYLLNPWXILDXQXXERXRPXAXRXCXXLAMCTLVCLCX

SEQ ID NO: 218935 - protein, 132 aa, Glycine max
  unsure (1)..(132): unsure at all Xaa locations
  Clone ID: PAT_MRT3847_39726C.1.pep
DDERKIETTGKXQGRREAAKKKRKPTEEADEKHHQETKGEEATKKRRRXAATKQKAEGTSSQTNTTTRQTGQNKHRTGDQRTETTKRDQQTKRNKQRTTSGKQKGRRRRGKRKSHQRRTKKKQKNRKEERAK

SEQ ID NO: 218936 - protein, 71 aa, Glycine max
  Clone ID: PAT_MRT3847_39727C.1.pep
PHKQVQPGETQEKAAPKAPQEEFLTAGTTQVRPATTLAADGWPQPHATAHDSSVSTIPGDSATGAKLTTKN

SEQ ID NO: 218937 - protein, 98 aa, Glycine max
  Clone ID: PAT_MRT3847_39728C.1.pep
SGKNPFGHNLSHNSVSYCIVRELRTRMSDIAMLVAEEYERRVKSLRKSGGGTGAGEFDMVSCVSVIVSRLKEKKQLLQWVLEPKTQVAMAASNSFFSA

SEQ ID NO: 218938 - protein, 136 aa, Glycine max
  Clone ID: PAT_MRT3847_39729C.1.pep
RVRTKTVKKAARLVIEKYYPRLTLDFQTNKRVCEEVAVIPSKRMRNKIGGYVTHLMKRIEKGPVRGISFKLQEEERERKDNYVPEFSVINTDNVEVDSTTKQLLKSLGLENLQGVTEVARSHVPAGRGDKSNRNRK

SEQ ID NO: 218939 - protein, 52 aa, Glycine max
  Clone ID: PAT_MRT3847_3972C.1.pep
AVVPAGIICVGLGIWVCWSDHRNLRYRGGGVVCFQEDHLFSACMCHSTRGAN

SEQ ID NO: 218940 - protein, 82 aa, Glycine max
  Clone ID: PAT_MRT3847_39730C.1.pep
PPRFKLREPAPSYISTPPSSLTPLLLFSNSLFPSPRLASSYAEDKLLGAPPVARISGSVGNNSRLLQSDGTEFSCLAVKRSP

SEQ ID NO: 218941 - protein, 71 aa, Glycine max
  unsure (1)..(71): unsure at all Xaa locations
  Clone ID: PAT_MRT3847_39731C.1.pep
LXFVTPPPXLCCLTTLAMXSLKXRXSSPLXIXVCILIDSTFCIIXXTLLPHGXIRGGPXIXPSNXAXPLQG

SEQ ID NO: 218942 - protein, 42 aa, Glycine max
  unsure (1)..(42): unsure at all Xaa locations
  Clone ID: PAT_MRT3847_39732C.1.pep
GTCGKIDSHLGVVMGGYVVXQNFGKNSGCGSPRSSLKCWNQQ

SEQ ID NO: 218943 - protein, 71 aa, Glycine max
  unsure (1)..(71): unsure at all Xaa locations
  Clone ID: PAT_MRT3847_39733C.1.pep
MDISEYTRIVFDKLQRFEPEHTTKIIGYLLLQDHGEQEMXKLASLPDHLIRGVAYKARTELQRLAARSAIQ

SEQ ID NO: 218944 - protein, 110 aa, Glycine max
  Clone ID: PAT_MRT3847_39734C.1.pep
QIRGYQSVTPQNEEQLLTAVASQPVSVLLEAKGQGFQFYSGGVFSGECGTELNHAVTIVGYGEEAEGKYWLIRNSWGKSWGEGGYMKLMRDTGNPQGLCGINMQASYPFL

SEQ ID NO: 218945 - protein, 97 aa, Glycine max
  Clone ID: PAT_MRT3847_39735C.1.pep
GSLMRSGHNGAHIRTLGDNVLRKRCHTTDQPHSYCVEPTGHYERGNRQRPSCANSRPIRGETKSANCINEWDNARREGLPTSDAPEAYGYNREARNG

SEQ ID NO: 218946 - protein, 93 aa, Glycine max
  Clone ID: PAT_MRT3847_39736C.1.pep
WTWLSILLIINFHGVVCTFVCFPLFIGLSSIFTHNTVIMGRQNPSHRASSTVVVCSVLLAIITSVMGPVYPHSYHESPVLMLTINKSVLCFGL

SEQ ID NO: 218947 - protein, 66 aa, Glycine max
  Clone ID: PAT_MRT3847_39737C.1.pep
YFFKLTVCWRMCSASNHIISDFYTTRHVWGACVSNEERRPFDSHRAIWMLFAVSRTRGSTRAFRPG

SEQ ID NO: 218948 - protein, 104 aa, Glycine max
  Clone ID: PAT_MRT3847_39738C.1.pep
FRHFGRPRQADHLSPGVQDQPGQHSETPISIFKNYLKINNGKKNRGWKSRLGLSKLPHIGNELNLDRQNGIPQNGLTTGLLVCRLSPLFPSLKKSSTVPVFTYK

SEQ ID NO: 218949 - protein, 63 aa, Glycine max
  Clone ID: PAT_MRT3847_39739C.1.pep
PQPAFFCFKHELFRNNFKIPQNCPGKKIPTAPRFVAENVVRYSSSTILLIFYRRDRGQINKPG

SEQ ID NO: 218950 - protein, 76 aa, Glycine max
  unsure (1)..(76): unsure at all Xaa locations
  Clone ID: PAT_MRT3847_3973C.1.pep
CXSXXXQMXXXQXXXWDXHLRLXXKDTLSXIXRRXFYSIXNISSXMXXXWPSXFAMCRXTSSNFSSPFSDISLRLV

SEQ ID NO: 218951 - protein, 89 aa, Glycine max
  unsure (1)..(89): unsure at all Xaa locations
  Clone ID: PAT_MRT3847_39740C.1.pep
XRXHAYVNSXFXSXSXXPLSXLSXXXXXLVXHSXTPEXWSXXKXHHTXXNHXXSKNKKTNXXXGTRNXLHXVPEXXXXQPREXVIPXXX

SEQ ID NO: 218952 - protein, 55 aa, Glycine max
  Clone ID: PAT_MRT3847_39741C.1.pep
VASLAITSHICSNTYRISFPCASRHMISYSSLIYPTHIVSSPLPPTQGGEACHSM

SEQ ID NO: 218953 - protein, 92 aa, Glycine max
  Clone ID: PAT_MRT3847_39742C.1.pep
KKTVKTLPNLFIKGPDKDIEEITNTSMLKTERGALNCMLVHLFEGPDYQRGLYGSRSSLFLPLLECWTHTRYWEDSHCLERPLTFFKMVLLV

SEQ ID NO: 218954 - protein, 66 aa, Glycine max
  Clone ID: PAT_MRT3847_39743C.1.pep
HCESTLKYKNMPPMIGYKCSKSLNAEDRTNYKERHSSRLGPRSDRRQNKRRHREDNFPPSVCLLPA

SEQ ID NO: 218955 - protein, 92 aa, Glycine max
  Clone ID: PAT_MRT3847_39744C.1.pep
GSTPASGLPLKFLGEGDLTKKLSFKARAFSPSAKENLGNGGCSLPVLPGPKNWVKPSVAKTLGRADEFFAKKGPMVVSEPASVLLLAPPRPP

SEQ ID NO: 218956 - protein, 59 aa, Glycine max
  unsure (1)..(59): unsure at all Xaa locations
  Clone ID: PAT_MRT3847_39745C.1.pep
RRNYGNLFKILAQIPQIEKSPSVRPPFCYPSSTLAITRNFHHENKNIFFQAEREXPPFL

SEQ ID NO: 218957 - protein, 109 aa, Glycine max
  unsure (1)..(109): unsure at all Xaa locations
  Clone ID: PAT_MRT3847_39746C.1.pep
XLXXRTIHEXELXALXGSGXWLIXTXXXXXEWVIXXXXGLXXXXRGXRTGSXNLXXXXXXXXAXXXVXXXRCXXXVGCQDXXXSMDXXXTXXXXXXKXVXXVGXXXKXX

SEQ ID NO: 218958 - protein, 270 aa, Glycine max
  unsure (1)..(270): unsure at all Xaa locations
  Clone ID: PAT_MRT3847_39747C.1.pep
MATLKELLPPAKSSSTAYYDHTNDPWFKQRFSSEEEEKSAAAAAAKQKPVPPYLKRAGFVPRKIEDFGDGGAFPEIHVAQYPLDMGREKSGAKPGSKILPVTVDANGNVAYDAIVRQNENARKIVYTQQKDLIPKFLKNDEDDDDVVSDDEAQKQIEETMQETKAALEKIVNVRLSAAQPKNVPKQNSDAKYIKYKPSQQSDAFNSGAKERVIRMVEMPVDPPEPKQYKHKRVSGSPRVPPVPVMHSPPRPVTVKDQQDWKIPXCISNWK

SEQ ID NO: 218959 - protein, 65 aa, Glycine max
  Clone ID: PAT_MRT3847_39748C.1.pep
DLVWGSLERLKGGFKVWECVPIYKESRRRLIFVAHVCTLIDLLKACRYRALEIIVESLFSFHASK

SEQ ID NO: 218960 - protein, 198 aa, Glycine max
  unsure (1)..(198): unsure at all Xaa locations
  Clone ID: PAT_MRT3847_39749C.1.pep
MATLKELLPPAKSSSTAYYDHTNDPWFKQRFSSEEEEKSAATAAAKQKPVPPYLKRAGFVPRRIEDFGDGGAFPEIHVAQYPLDMGREKSGAKPGSKILPVTVDANGNVAYDAIVKQNENARKIVYTQQKDLIPKFLKNDEEDDDVSDDETQKQIEETMQETKAALEKIVNVRLSAAXPKNVPEQTXDAKYIKYKPSR

SEQ ID NO: 218961 - protein, 114 aa, Glycine max
  Clone ID: PAT_MRT3847_3974C.1.pep
PTHNLRISITTTPVGRPIESQLPPTLFDFTIRRARWSGQLTIKHAHTTAGGSSITSNLLFQHTSLWEGPLLFLEKNPRRHCLPQAGTCTGSWIRQNHSYKGIEQDLTRGDRLCL

SEQ ID NO: 218962 - protein, 77 aa, Glycine max
  Clone ID: PAT_MRT3847_39750C.1.pep
LEKKKHLVPRALFVGHFIHILGPNLSLPPGKAFFDFVKNPVPQTANIMDSVYGPFKEGEGFLSMGYSAEKTFGSGTM

SEQ ID NO: 218963 - protein, 73 aa, Glycine max
  Clone ID: PAT_MRT3847_39751C.1.pep
KGFRAPLEEKVAQQKAGKKEKERDEIPLGPNHGGGEREAPRGTKISPRVTGKGFEPPIHGRSSQEEGEGDHLG

SEQ ID NO: 218964 - protein, 55 aa, Glycine max
  Clone ID: PAT_MRT3847_39752C.1.pep
RLHHCHRPRHTRAQFHGRRDGGTRPTIFHGLEVAAMEIKTYKIIDQENTHIALNR

SEQ ID NO: 218965 - protein, 102 aa, Glycine max
  Clone ID: PAT_MRT3847_39753C.1.pep
TKGEHLPLQSNEQPWHTATEERLRVMEGFSLFDMDGDGRITPKELVTVMSGSGQTPAEATLQDMINEAHAKGNGTMDLPEHLNRMAGKDERHWTVRRTLKEA

SEQ ID NO: 218966 - protein, 250 aa, Glycine max
  unsure (1)..(250): unsure at all Xaa locations
  Clone ID: PAT_MRT3847_39754C.1.pep
MPTFTAMALDRLIEPGASKPVDKSAPTSMPVPNSQKLERSTSAPAKKSKVPQPPLKPALYTTPEVTPLPDAPSSFPPSPYIINHKRRGPRLLKSSSEASALSEVNIRCDDDNDKSVDAVVTSSAGDLQVTSTKPELVKEEKVNGVYDGQLDRSNDVDHANGHRETGSGSLTNGLLKEKPPALNLDRVSEVEDFFXPLDSMSFSSNTDGEENAGTELSMKLSSPSTEFYDAWEELSSEGMSQNSTYDIEAE

SEQ ID NO: 218967 - protein, 149 aa, Glycine max
  unsure (1)..(149): unsure at all Xaa locations
  Clone ID: PAT_MRT3847_39755C.1.pep
KPPQRGTGAEKRXRSGDPPPGKANTTAPAPPNGQPQTAHRGRHPPGNGPRPRKRRXTPTPAGPAPQATARPPENAGNPRTNPEPGGPPQPRPPRPHPKQEHQGKTPPGRRKRPPNPKEPHNPPTXGPNERAQQGRPPPNNTQPAQPPPT

SEQ ID NO: 218968 - protein, 67 aa, Glycine max
  Clone ID: PAT_MRT3847_39756C.1.pep
LYKFSTVAMDVAQAASCSSQLQMSDKQVENIGPQSVVLVVGLERAYRYRDRWSSFTIASIPPAANAY

SEQ ID NO: 218969 - protein, 62 aa, Glycine max
  unsure (1)..(62): unsure at all Xaa locations
  Clone ID: PAT_MRT3847_39757C.1.pep
ISFDRTVECRAXCTVARLPYXDDDYLSXATEDLIYQLRQEEDGRKQNKKGTTKKTITKRALK

SEQ ID NO: 218970 - protein, 110 aa, Glycine max
  unsure (1)..(110): unsure at all Xaa locations
  Clone ID: PAT_MRT3847_39758C.1.pep
MSFIIYVSCKACNATLVFLCADGIKPEDVGLRPDMPYFRTSATQRVPRITYLHIYECEKFSMGIFCLPPSGVIPLHNHPGMTXXSKLLFGTMHIKSYDWVVDSPXESPTT

SEQ ID NO: 218971 - protein, 151 aa, Glycine max
  unsure (1)..(151): unsure at all Xaa locations
  Clone ID: PAT_MRT3847_39759C.1.pep
SAHGLLDHPHAIIPISVFWLLPQYSLNGMAEAFMSIGHLEXFFYDQAPESMRSTAMALFWASISAGNYVSTLLVTLVHKFSARPNGSNWLPDNNLNKGKLEYFYWLITILQIFNLIYYLICAKLYTYKPIEFQDKGDSSSKGNQIELSSTV

SEQ ID NO: 218972 - protein, 94 aa, Glycine max
  Clone ID: PAT_MRT3847_3975C.1.pep
PCVAFVFFFRFELFTSTLFSKIGMTLLLRTLCSGPPVGGATPGGPLGDLPPASKSRLQAEGYLNCLVLIAGPTLFTLTHVTPGGLVVGQDHIGA

SEQ ID NO: 218973 - protein, 160 aa, Glycine max
  Clone ID: PAT_MRT3847_39760C.1.pep
YESNTEHRLAISIELSKDPVTCKPKQCVISQRNLMSYTAAAEGHGFTPVLVGQICEVNGCYVKTRGQQQVVTQNVVWSTTKVHNGGSIQSSHAGNYDTPWRAGEGPQPHPATPSAQRCRLIVRLVGLVGFYVQRGLGQRHYTGRGLKVSRFFVWKTVGDP

SEQ ID NO: 218974 - protein, 78 aa, Glycine max
  Clone ID: PAT_MRT3847_39761C.1.pep
EGAPFICFFIFFFFFLLSFFFFFFFFFFFFFFFNHQSRCEDSQTCLLTFTCKYQPLLHNSIRCQIQSKPPLNPVTWNT

SEQ ID NO: 218975 - protein, 253 aa, Glycine max
  Clone ID: PAT_MRT3847_39762C.1.pep
DDFQSVSPAIPFSSWLPSFYDELLLYLEQEWKWCMIAFPDDYKTLVPRLLSETMMAIGSSFISRINLAIGDAVPETKALAKGLLDILAGDMQKGIKLQTKHLEALIELHNMTGTFARNIQHLFSVSDVRFLMDVLKSVYLPYESFKQRYGQMERAILSAEIAGVDLRGAVIRGLGAQGVELNETVRKMEESIPQIIILLEAAAERCINFTGGSEADELILALDDIMLQYISTLQETLKSLRTVCGVDYGSDGT

SEQ ID NO: 218976 - protein, 84 aa, Glycine max
  Clone ID: PAT_MRT3847_39763C.1.pep
DKLKNVSSSSENTNGCTEDSSLSSDKSAPSLSGSTKVVSDSSNTYSTAVERVVVYSRKTNVEIEDGGTILPISDDRWVAYSYSH

SEQ ID NO: 218977 - protein, 56 aa, Glycine max
  Clone ID: PAT_MRT3847_39764C.1.pep
HLFFAPNTLGMLKMLHASSITTFNTWFSTTTFTNKNIYLPSLLCLQFKTGRKLPSE

SEQ ID NO: 218978 - protein, 62 aa, Glycine max
  Clone ID: PAT_MRT3847_39765C.1.pep
KVSNTTCVWTILYNVNGPCHSLAYKYTCIDKNKLPLKICTFIRAPCARFNAIKSQTYPFCND

SEQ ID NO: 218979 - protein, 41 aa, Glycine max
  Clone ID: PAT_MRT3847_39766C.1.pep
FVHCAQDAHPEDHFHKQRRLEYMNHAIAYSTWGSHLLWERE

SEQ ID NO: 218980 - protein, 58 aa, Glycine max
  Clone ID: PAT_MRT3847_39767C.1.pep
FNISKGSNYTFIQNGVQLMDVLALKNYTTQEKSRWPLLKHGIRMATDGQRLFQIMPFF

SEQ ID NO: 218981 - protein, 51 aa, Glycine max
  Clone ID: PAT_MRT3847_39768C.1.pep
HRLIYTKIILIDTIIHTQIIPLLARTHHPKQFHICRLFYFIVTGPWTVRSR

SEQ ID NO: 218982 - protein, 155 aa, Glycine max
  Clone ID: PAT_MRT3847_39769C.1.pep
ASADVEYRCFVGGLAWATDNYDLEKAFSQYGDVVESKIINDRETGRSRGFGFVTFASEDSMRDAIEGMNGQNLDGRNITVNEAQSRGSRGGGGGGYGSGGGYNRSGGAGGYGGRREGAYNRNGGGYGGDRDHRYGPYGDGGSRYSRGGGDGSWRN

SEQ ID NO: 218983 - protein, 71 aa, Glycine max
  Clone ID: PAT_MRT3847_3976C.1.pep
VSNKQEIPSSSKWHFILVLFVCFIFVMVWYEFHTMLQINELIENLVYFDFLVILRMDYLTLVSKEILNVRT

SEQ ID NO: 218984 - protein, 56 aa, Glycine max
  Clone ID: PAT_MRT3847_39770C.1.pep
FKSGYFSNMFSYCHLSPSLPSHRGRQMGRTTSANGGRLARFSNIDFYTSFVCELHF

SEQ ID NO: 218985 - protein, 110 aa, Glycine max
  Clone ID: PAT_MRT3847_39771C.1.pep
MASADVEYRCFVGGLAWATDNYDLEKAFSQYGDVVESKIINDRETGRSRGFGFVTFASEDSMRDAIEGMNGQNLDGRNITVNEAQSRGSRGGGGGATLVVVVMEAGEIRA

SEQ ID NO: 218986 - protein, 205 aa, Glycine max
  unsure (1)..(205): unsure at all Xaa locations
  Clone ID: PAT_MRT3847_39772C.1.pep
MASADVEYRCFVGGLAWATDNYDLEKAFSQYGDVVESKVRIAYDLTQFGSGISPSRSDLXSLIYLRYLFYDMILVLLYDSFITHANXIINDRETGRSRGFGFVTFASEDSMRDAIEGMNGQNLDGRNITVNEAQSRGSRGGGGGGYGSGGGYNRSGGAGGYGGRREGAYNRNGGGYGGDRDHRYGPYXDGGSRYSRGGGDGSWRN

SEQ ID NO: 218987 - protein, 98 aa, Glycine max
  Clone ID: PAT_MRT3847_39773C.1.pep
HKIIRRSHKDPSLFSNPETFDASRFEGAGPTPFSYVPFGGGPRMCLGQEFARLEILVFMHNIVKRFKWDLVIPDEMFKYDPMLEPIKGLAIRLHPSHF

SEQ ID NO: 218988 - protein, 42 aa, Glycine max
  Clone ID: PAT_MRT3847_39774C.1.pep
HYSSTLISGNLFIYSILHNQRYIGKKPYPGTPNQDKLPNRNT

SEQ ID NO: 218989 - protein, 353 aa, Glycine max
  Clone ID: PAT_MRT3847_39775C.1.pep
MKASALLNLKSFTLSRHSPTSNSFFPPFLCPSHPRHRRIHHSRNPIMSATSVNSERARAPPAIPLPPPPLSNFKIGLCQLSVSPDKDSNIAHARTAIQDAASKGAQLVLLPEIWNSPYSNDSFPVYAEDIDAGASPSTAMLSELSRLLKITIVGGSIPERSGGLLYNTCCVFGTDGNLLAKHRKIHLFDIDIPGKITFIESKTLTAGETPTIVDTEVGRIGIGICYDIRFPELAMIYAARGAHLLCYPGAFNMTTGPLHWELLQRARATDNQLYVATLFTLPGNTGSGYVAWGHSTLVGPFGEVLATTEHEEAIIIAEIDYSILEQRRTNLPVTKQRRGDLYQLVDFQRLNSQ

SEQ ID NO: 218990 - protein, 83 aa, Glycine max
  Clone ID: PAT_MRT3847_39776C.1.pep
VTLASVGANVSRVFHALTGFNHVPLRTTVEAIVNSQLGFIWFPYPTLLYITWLKSIILGQTQQRLPRCLVPNWVTCTYPYPTW

SEQ ID NO: 218991 - protein, 77 aa, Glycine max
  Clone ID: PAT_MRT3847_39777C.1.pep
AFCRSSEHALTPFHVDRQTERERERERRSHFHFSGATFRIGSTNQTCLRKRRATTLRFSSVTCRLATKSYDTTCHKS

SEQ ID NO: 218992 - protein, 80 aa, Glycine max
  Clone ID: PAT_MRT3847_39778C.1.pep
KRTGCESHVGTASRDPLRGGLLHTPEPFFFFHFHIFLVSWLQFRNSLVFCSKFHFLLAHRVDFNNSLVYFFNSPSCQYHL

SEQ ID NO: 218993 - protein, 85 aa, Glycine max
  Clone ID: PAT_MRT3847_39779C.1.pep
TEVDCMPSFEKRLYRKQILPVKVKLGFSLKKKKNFASENFQSKKCLFVHWAKKPFLFLVSKKKKEKKKKKKKRGGGGGGGGGGGA

SEQ ID NO: 218994 - protein, 96 aa, Glycine max
  Clone ID: PAT_MRT3847_3977C.1.pep
GWYPYLQLSDFISIHKIPRHKPFSGQQVTGVTATAITVLGVPPPRLSGQVQNSQGNNQRIRAVAADLHLSIAFQSRYNYSSSRQGTVHLTGCLSLG

SEQ ID NO: 218995 - protein, 112 aa, Glycine max
  Clone ID: PAT_MRT3847_39780C.1.pep
RGPTFLKNKIVGAFFYYPPPPKRASPPPRLIGEPPGFPPPTFIKAPPPEIIFRAPKKRKFPPPPKVGRPGTLKHPPPLKDFPHSYRFYHFRPTKFKLVGSHKTFIFFLCKRS

SEQ ID NO: 218996 - protein, 92 aa, Glycine max
  Clone ID: PAT_MRT3847_39781C.1.pep
ICKKNAQGQRGLAQIHNFNQKQQFGGQEQANSGQNSFQKPSPLIEGLIGTFWGERTSSFGGKPTRGGGTAGLPSPTGGNAITRKWGGGIMVN

SEQ ID NO: 218997 - protein, 45 aa, Glycine max
  Clone ID: PAT_MRT3847_39782C.1.pep
SKESSCVSIAPDRACVVLLCYKCIPSRSRGLLHVLALPLLRLFEY

SEQ ID NO: 218998 - protein, 76 aa, Glycine max
  unsure (1)..(76): unsure at all Xaa locations
  Clone ID: PAT_MRT3847_39783C.1.pep
FLHILTSMKFHSLLQLIKIVVLDDICICRKPLFLVFIILVFVDLLVLFFFLSIVEASARNDRSRSSRIPSLRTRXC

SEQ ID NO: 218999 - protein, 60 aa, Glycine max
  Clone ID: PAT_MRT3847_39784C.1.pep
QELGDISAEALAYIFNLASPLASLKKELPEVKKEKGCLQMEQFGGKGKNHLLGYLGNLSP

SEQ ID NO: 219000 - protein, 52 aa, Glycine max
  Clone ID: PAT_MRT3847_39785C.1.pep
GWLSSIKLAPPRIVNRMPFSIWGGAGSKNAILTYMPDELHSSVKIFIRGFLC

SEQ ID NO: 219001 - protein, 72 aa, Glycine max
  Clone ID: PAT_MRT3847_39786C.1.pep
ILSKIKLYFDKNKEHKQTFHTMSSQNHQIKKKNYFTNACVEMSQFLFLYQTIIITTYLTTPRGHSFLFLKIL

SEQ ID NO: 219002 - protein, 296 aa, Glycine max
  Clone ID: PAT_MRT3847_39787C.1.pep
MGLRDIGASLPPGFRFYPSDEELVCHYLYKKIANEEVLKGTLVEIDLACAIILMHAEVAKLNANEWYFFSFRDRKYATGFRTNRATTSGYWKATGKDRKVEDPATQEVVGMRKTLVFYRNRAPNGIKTGWIMHEFRLETPHMPPKEDWVLCRVFHKSKEDDNSSKLLQYETTPSSLTLLASSSPTNQAMPHGVGYNNRLATSFSNSFMPTHQYHHHFNPTQNANSLMDLLHFSRETNTNNTGFLTQIGAKGDDEYGFLWDMDLEENSLDDGVASNLDAIRFEVDNNNTNNNNMVLL

SEQ ID NO: 219003 - protein, 65 aa, Glycine max
  Clone ID: PAT_MRT3847_39788C.1.pep
VAGLSQSTTIMGQIIIDFLGVFNLINICQACGVVLCCISKIERFCAFLFLSIESQHVNVIETFLN

SEQ ID NO: 219004 - protein, 85 aa, Glycine max
  unsure (1)..(85): unsure at all Xaa locations
  Clone ID: PAT_MRT3847_39789C.1.pep
ARSAXVNTSQXVMPTXKRKRYSVITNHXXLSXALMGVIXLFXCLELNXAYEXXLLXFQXGRKEXRWXIYTFXIFXSXPTKKKVXG

SEQ ID NO: 219005 - protein, 181 aa, Glycine max
  Clone ID: PAT_MRT3847_3978C.1.pep
MVKYSREPDNPTKSCKARGADLRVHFKNTRETAFAIRKLPLVKAKRYLEDVLAHKQAIPFRRFCRGVGRTAQAKNRHSNGQGRWPVKSAKFILDLLKNAESNAEVKGLDVDALYISHIQVNQAQKQRRRTYRAHGRINSYMSSPCHIELILSEKEEPVKKEPETKLATSKKSQALRSGTSS

SEQ ID NO: 219006 - protein, 73 aa, Glycine max
  unsure (1)..(73): unsure at all Xaa locations
  Clone ID: PAT_MRT3847_39790C.1.pep
TXLXXRLVLFWEHHHXXLDXXVVAVSLQAXASXMXXXXXXXXQHFGAKVXXVHXXXFWFXTCWSXKGHMLPSG

SEQ ID NO: 219007 - protein, 78 aa, Glycine max
  unsure (1)..(78): unsure at all Xaa locations
  Clone ID: PAT_MRT3847_39791C.1.pep
LQADSLEEAINLINENKYGNGASIFTPSSVAARKFQAEIEAGQVGINVXPVPLPLFSFTGNKGSFGGDFHFFGIVISP

SEQ ID NO: 219008 - protein, 75 aa, Glycine max
  Clone ID: PAT_MRT3847_39792C.1.pep
CMASRGEPWCNSKALLPYDLEVVGLNLGNNLSPCWSKTVYLLTLTKSQLSVGASYTRLPFLIYGFKFILFAQNGR

SEQ ID NO: 219009 - protein, 47 aa, Glycine max
  Clone ID: PAT_MRT3847_39793C.1.pep
NKRVIKHILKSKLHPLYTNSPIVAPNPSKKHDIYSTCNHILKPLTLI

SEQ ID NO: 219010 - protein, 62 aa, Glycine max
  Clone ID: PAT_MRT3847_39794C.1.pep
MQEWLQEGSIQPSLHAPLPASIVSLRVYVRRHVFTPSVPFIRPFSENMFVPMYVPIYKCTLH

SEQ ID NO: 219011 - protein, 99 aa, Glycine max
  Clone ID: PAT_MRT3847_39795C.1.pep
DQHNKLKETISPHLKWVAICINRKTVYTHNNACQLPIATTRDIKMQIMQSILLLPNINKARKLLLVGKGNSTLYTSRQCRYYFAFRFGFNFQDHGHFIR

SEQ ID NO: 219012 - protein, 108 aa, Glycine max
  Clone ID: PAT_MRT3847_39796C.1.pep
PRRTFVPPHCPVKLVSVPNVHVDCSSSLWSASRQFCAWSATYVSVPACLAIGFLPVLCISGSLRELLTLLLLPCSARAVPFLFPPFPFPLVAVLNAKMFFFLCVFPRA

SEQ ID NO: 219013 - protein, 76 aa, Glycine max
  Clone ID: PAT_MRT3847_39797C.1.pep
QFLNPLSNLSTQLINLNLEYLSVVQCLSYDLDSCRAQKTNKLARVTIRICRTVERCLHNKQRLLNKEQPHASADAW

SEQ ID NO: 219014 - protein, 64 aa, Glycine max
  Clone ID: PAT_MRT3847_39798C.1.pep
NDELGIQLSSGLTKKRVAESLIRAWMMMSKLEGSQARESIGFNLPYTISIQAEKRHVESKRNDP

SEQ ID NO: 219015 - protein, 226 aa, Glycine max
  unsure (1)..(226): unsure at all Xaa locations
  Clone ID: PAT_MRT3847_39799C.1.pep
MAIFYALVARGTVVLAEFSAVTGNTGAVSRRILEKLPAESDSRLCFSQDRYIFHILRSDGITYVCMANDTFGRRIPFSYLEDIQMRFMKNYSRVANYAPAYAMNDEFSRVLHQQMEFFSSNVEVPITTQSCEGDRSWRDDATIMVDNIEKILERXGTGLSLLVDKTATMQDQCIFTLAKQSKRLRRALWMKNFKLLASLTCSIVVVLYFIIAACCRHMSRPFLQLY

SEQ ID NO: 219016 - protein, 62 aa, Glycine max
  Clone ID: PAT_MRT3847_3979C.1.pep
MFFIFRFLNVELDHGQLLLKEIVVKRKYLNEQIEKKKKKKKKKKKKKKKKKKKKKKKKKKKK

SEQ ID NO: 219017 - protein, 169 aa, Glycine max
  Clone ID: PAT_MRT3847_397C.1.pep
RFGSSGRLRELRVVDFLTVYYGIENSFLDLAPNVVQWLLGSYNTQILLMVFLAIVGMLLAGFFGYHAKLCLTNTTTNETFKWQDYMDWQRKLKEAHVSAEALKQSIGGMSSEKQPLLSKWRAFFRKSPLEDVVVVKNNVYDKGFFHNIQEVISPFSTRRSFTQNKLKSS

SEQ ID NO: 219018 - protein, 132 aa, Glycine max
  Clone ID: PAT_MRT3847_39800C.1.pep
KNYSRGANYAPAYAMNDEFSRVLHQQMEFFSSNASADTLNRVRGEVGEIRTIMVDNIEKILERGDRIELLVDKTATMQDSAFHFRKQSKRLRRALWMKNFKLLALLTCLIVVVLYLIIAACCGGISLPSCRS

SEQ ID NO: 219019 - protein, 546 aa, Glycine max
  unsure (1)..(546): unsure at all Xaa locations
  Clone ID: PAT_MRT3847_39801C.1.pep
MRHPINNVLSEAYASNDLYNYCPSWALSWPYRRQNLLREIIGYRPDIICLQEVQSDHYDEFFSPELDKHGYHGLYKRKTNEVYSGNTNTIDGCATFFRIDRFSHVKKYEVEFNKAAQSLTEATIPTTQKKTALNRLGKDNVALIVVLEAKVNNQPFDNAGKRQLLCVANTHVNVSQDLKDVKLWQVHTLLKGLEKIAASADIKMXKKKDFNSVPGSAPHALLAMGKVDPSHPDLAVDPLNILRTHSKLVHQLPLVSAYTSFTIQTFLKINIPGWRFVPTTTHRRMKEINKDIEASLMDMINKRETALKAGEATKNNLLDILLESNHKEIQEQGNKNVGMNLEEVIEECKLFYFAGQETTSVLLVWTMILLSMYPDWQTRAREEVLQVFGNRKPNFEGLNHLKIVTMILNEVLRLYPPVVGLARKVNEDVKLGNLSLPAGVQISLPIVLVHHDCELWGDDAKEFKPERFSEGLLKATNGRVSFFAFGGGPRICIGQNFSFLEAKIALSMILQRFSFELSPTYTHAPTSVITLQPQHGAHLILHKVEI

SEQ ID NO: 219020 - protein, 83 aa, Glycine max
  Clone ID: PAT_MRT3847_39802C.1.pep
YEQHKRRMDGGTNELLFTNVTRDFIGILDYIFYTADSLVVESLLELLDEESLRKDTALPSPEWSSDHIALLAEFRCCKNKSRR

SEQ ID NO: 219021 - protein, 385 aa, Glycine max
  unsure (1)..(385): unsure at all Xaa locations
  Clone ID: PAT_MRT3847_39803C.1.pep
MLSVLRVHLPSDIPIVGCELTPYVLLRRPDKIVTTDDVPETAPLDGHFLRYKWXWYRVQSDKKVAVCSVHPSEPATLQCLGCVKSKIPVAKSYHCTPKCFSDAWQHHRVLHDRAASAANENGNEEEELYGRFNNSGSGSINXGRFNSTGSGATHSSLSASASSASLTNGSATPLYPAAITQRSGETWFEVGRSKTYTPTADDVGHVLKFECVVVDAETKLPVGHVNTILTSRVIPAPSPIPRRIIPVDGMAHLDVDGRMTSSGTFTVLSYNVLSEAYASNDLYNYCPSWALSWPYRRQNLLREIVGYRPDIICLQEVQSDHYDEFFSPELDKHGYYGLYKRKEVYSGNTNTIDGCATFFRRDRFSHVKKYEVEXNKAAQSLTEAT

SEQ ID NO: 219022 - protein, 47 aa, Glycine max
  Clone ID: PAT_MRT3847_39804C.1.pep
SLVVESLLELLDEESFRKDTALPSPEWSSDHIALPTRPRCCKNKSRR

SEQ ID NO: 219023 - protein, 30 aa, Glycine max
  Clone ID: PAT_MRT3847_39805C.1.pep
GDLDDKWIYWVGQLIGGGLDGLIYGEVLIG

SEQ ID NO: 219024 - protein, 242 aa, Glycine max
  Clone ID: PAT_MRT3847_39806C.1.pep
MFPISSGMMNGSSTIPTTQKKTALNRLVKDNVALIVVLEAKVNNQPFDYAGKRQLLCVANTHVNVSQDLKDVKLWQVHTLLKGLEKIAASADIPMLVCGDFNSVPGSAPHALLAMGKVDPSHPDLAVDPLNILRPHSKLVHQLPLVSAYTSFARTVGLGYEQHKRRLDGGTNEPLFTNVTRDFIGTLDYIFYTADSLVVESLLELLDEESLRKDTALPSPEWSSDHIALLAEFRCCKNKSRR

SEQ ID NO: 219025 - protein, 87 aa, Glycine max
  Clone ID: PAT_MRT3847_39807C.1.pep
VEDIPLVKLWNPRPGSFQGRICMDWPNGSVHRSCILRGRHLSDQTPIHQTGNLDGLCRRLWITSHSNDGSIGYQGLFLRSNAYCHKI

SEQ ID NO: 219026 - protein, 189 aa, Glycine max
  unsure (1)..(189): unsure at all Xaa locations
  Clone ID: PAT_MRT3847_39808C.1.pep
RDQELQGHNELIEMIKGNPSKICEIVSSSRKDFTKEFFMHLHTIAESYGYNLERQNDLLKLWNTCLAAVKVXDAATESIEALNAAELNFQDIIKSPPDAFCWKIDNLAEKSQCFNPELVAHWLRLCYNMEEVGRVPPIVLKFFIHPVTYVDNNLICSYLRLGKLAQARRVFDGMSKKNTVTWAAIIDGY

SEQ ID NO: 219027 - protein, 95 aa, Glycine max
  Clone ID: PAT_MRT3847_39809C.1.pep
LNVSASVSGVRLAGGMNYAEALLHRFGILGPDGAPGIGLCKGLENLQKGPLSKLFKATPLIVDNSEDVGSGREGKETGFPQLKKPGDVDVTVELR

SEQ ID NO: 219028 - protein, 81 aa, Glycine max
  Clone ID: PAT_MRT3847_3980C.1.pep
LESGWIWASGEKQEFCLRQACLERPASRGAVSRQWAVLGQVQWRDEGWRGKSSLAHKYDFKGQKAITWALWHLEVSWSYRI

SEQ ID NO: 219029 - protein, 40 aa, Glycine max
  unsure (1)..(40): unsure at all Xaa locations
  Clone ID: PAT_MRT3847_39810C.1.pep
KWYGPDRMIFLPDGLLDRADIPEYXTGQDLGHYGYDPFEL

SEQ ID NO: 219030 - protein, 71 aa, Glycine max
  Clone ID: PAT_MRT3847_39811C.1.pep
KKRGFFLMGALFIICPPPKCLFSFPQGGGRFLGPFFKKVPEEDSSLGGGNPKEREKGFLHPSLKFVYTPKI

SEQ ID NO: 219031 - protein, 69 aa, Glycine max
  Clone ID: PAT_MRT3847_39812C.1.pep
QLNNPSFSQKPYHQIQHAKPQFPLPNHHFHFSDPQLQHPSPSPDLTLRHCSTQSLQGLNQTLLHHTMVM

SEQ ID NO: 219032 - protein, 148 aa, Glycine max
  Clone ID: PAT_MRT3847_39813C.1.pep
MRYANKVLSVDEAIAHVRSGSRLMLGEFVGAGEPACCIEALLASGTNQLTLIANTAGLRGGFLKARLFASGQLAEYIGTHVGTTDESTQAYLSDSVRVAEFFPMGTWAEKVRAGAMGLGGALVPVGVGILDQPGMFPARGAPKQTLTE

SEQ ID NO: 219033 - protein, 387 aa, Glycine max
  Clone ID: PAT_MRT3847_39814C.1.pep
MASDFNLSPSDAHPETMDFLSLAWCNFAVQALQPEPQHGSVVLLDNNSMKQLEPSSPNAPPSMEKSDRMDGADFGSFPAWKSNNVKSWIWMQQAMHPELNYNSCFRKKWMPWKQIIPLKNVSIKKWFKEIKMKRKEDQRLQRAEVHAAISVAGIAAALAAIAAESSKNESNQDRDAAVASAAALVAAQCAKVAEAMGAKKELLSTVIGSAMSGTSASDILTLTGAAATSLKGAATLKVRSGCKNRLNGGVPILPLEDNNDLDFDFEKGRSILAQGAELYVETPEGKYMPRSVSVILNSEAKVVLMMRKHNLFKSKREGVVMTLHADLYKGSEAEAADTCYLIVLTTRGGVFKLDMADDFRRYKTWATTINHMLKISSSFAKYELQFY

SEQ ID NO: 219034 - protein, 219 aa, Glycine max
  unsure (1)..(219): unsure at all Xaa locations
  Clone ID: PAT_MRT3847_39815C.1.pep
ISECEFKGFLDIDGDRSFSEAVQLDIQVPGAFPKFGTTDGTITKNVVIEKCYFGCSDHPKMKAWNRAIGSHASRYXCYYENIHINQNIFDNLNEYALPPLKSKDTFITKNKFINCNGGIRFLGVKDGKNAADPITGQVMETQAGENFNVIGNTFIGKMKRDAIHIRSYHHVQHQNVFIAANQFEDASQSIHLENINGLTLNQEQTKIKIKSIDVKNISN

SEQ ID NO: 219035 - protein, 165 aa, Glycine max
  unsure (1)..(165): unsure at all Xaa locations
  Clone ID: PAT_MRT3847_39816C.1.pep
TGRILGRRNLHEQGHPERAQGREPREGDXHSGQTGRKGKEDQLRXPKQLFSEXVXXKXGTKGRXKDPAXGGEHTPTIASDGSLLTWGANDLGQLGDGTEERRKHPEKVKQXRGRVCKILIXGAHCSACIAEPRENDGSISTRRLWERGQNQGSNLPRLFWGALNL

SEQ ID NO: 219036 - protein, 73 aa, Glycine max
  unsure (1)..(73): unsure at all Xaa locations
  Clone ID: PAT_MRT3847_39817C.1.pep
IKEKIHVEEGIGPNKLVKYVLYXGDKHYGVVKLQEVEDVQKVIEGHKXDDKFLPLNLGLTHCGPCLESLTTVG

SEQ ID NO: 219037 - protein, 57 aa, Glycine max
  unsure (1)..(57): unsure at all Xaa locations
  Clone ID: PAT_MRT3847_39818C.1.pep
MVATDGSPEYDGIAEACARXQIIXGRASAHRYTRCTQDWEIWTPACRKARTTSVGPH

SEQ ID NO: 219038 - protein, 160 aa, Glycine max
  unsure (1)..(160): unsure at all Xaa locations
  Clone ID: PAT_MRT3847_39819C.1.pep
KKKKKKKKDIQKKNKKQKNTHAKTKKGPPLLKNPTFLPRPAKTKAFLKGPQIPIPGPSLHTPGPEKPRASPTLTPXTPPPFPQRAKNQKPPPEPPSPPLPHPKCQRAPPLNRPINPXGWGVPPQGTRYLAQPPNPRPFPXSPPFPPPSPGFPRKALNGGP

SEQ ID NO: 219039 - protein, 50 aa, Glycine max
  Clone ID: PAT_MRT3847_3981C.1.pep
NKLLFLIYCLKTLLIIFINTLLKINHNITTLKNSEQCIYFFFNNSIKKHP

SEQ ID NO: 219040 - protein, 67 aa, Glycine max
  Clone ID: PAT_MRT3847_39820C.1.pep
AGRGQSSDSAMSIGLLKKVQGLVQKWMLRLSGMLFGIEAGENDYTKEPPSLYDTGSPLPFEVVHDLP

SEQ ID NO: 219041 - protein, 71 aa, Glycine max
  Clone ID: PAT_MRT3847_39821C.1.pep
CIIQHISTKSQGTATRKACRGCVPLSKLQSLTNLFLSLCILKMTTLRLFNSVHVPSDMLQNAKNAHARRRS

SEQ ID NO: 219042 - protein, 86 aa, Glycine max
  unsure (1)..(86): unsure at all Xaa locations
  Clone ID: PAT_MRT3847_39822C.1.pep
HYVLMVVMAHRREAFLVFDFQKCYPWVQSSKLVWVCSIRFRELRIIRVSISRFFFCTYNFPIFLRVYIRIYDKNXLYYEHSSYSLK

SEQ ID NO: 219043 - protein, 91 aa, Glycine max
  unsure (1)..(91): unsure at all Xaa locations
  Clone ID: PAT_MRT3847_39823C.1.pep
QDVSLAANNFPERQPIGTNGDGPXDCRGYQQREQSPLFAPTDFTFLFFDRVRIAEFAGTFLFLCINVLTVMGAAGAKSECITVKTGGIAWA

SEQ ID NO: 219044 - protein, 71 aa, Glycine max
  unsure (1)..(71): unsure at all Xaa locations
  Clone ID: PAT_MRT3847_39824C.1.pep
MVAVRNIVLLLLCVTVVAPIVLYTDRLGTFESPSNKQEFIEDVTAFTHXSAADSSHLNLVPQETSRLLKTP

SEQ ID NO: 219045 - protein, 118 aa, Glycine max
  Clone ID: PAT_MRT3847_39825C.1.pep
IAPPWVSYTFIPRPVYFLFASIRYLSLSLALLWRGLSLRLNWASTYTTKCFRFSFKPSLLSGRYISLAFTHQATPFAKLIGFRTSNFQQTPKLAYVNLWCVCLAIYARAHPLLHIFLA

SEQ ID NO: 219046 - protein, 68 aa, Glycine max
  Clone ID: PAT_MRT3847_39826C.1.pep
LEILTHLRSIVGRCLGCNLQVPSSWMLSSEPRLLGHRQSAPAVRSEHGLHRCRARYWLLSPTKKQRRS

SEQ ID NO: 219047 - protein, 194 aa, Glycine max
  Clone ID: PAT_MRT3847_39827C.1.pep
MPTLNHVLTFTFFLLLSCHCHLLNGQEDTSFGRAIDRKLLGLKRKEKLSHFKFYWHDIVSGRNPTSVAVVPPPPKVNTTTAFGLVNMIDNPLTLGPELSSKLVGKSQGFYASASQTEIDLLMAMNFAFIEGKYNGSTITILGRNCVFHKVREMPVIGGSGLFRFARGYAEARTHWLDLKGGDAIVEYNVYVMHY

SEQ ID NO: 219048 - protein, 194 aa, Glycine max
  Clone ID: PAT_MRT3847_39828C.1.pep
MPTLNDVLTFSFFLLLSCYCHLLNGQEDSSFGHAIDRKLLGLKRKEKLSHFKFYWHDIVSGRNPSSVAVVMPPTRMNTTTAFGLVNMIDNPLTLGPELSSKLVGKSQGFYASASQSEIGLLMAMNFAFIEGKYNGSTITILGRNCVFHKVREMPVIGGSGLFRFARGYAEARTHWFDLKAGDAIVEYNVYVMHY

SEQ ID NO: 219049 - protein, 58 aa, Glycine max
  Clone ID: PAT_MRT3847_39829C.1.pep
SIIFSRVSVVLPKWSNHHRQDSIIFSQVGATTFSHALIHDLIFSCIILFLLLYYPMLI

SEQ ID NO: 219050 - protein, 103 aa, Glycine max
  Clone ID: PAT_MRT3847_3982C.1.pep
VKFSLPSNPASQRPSTLVSASIDPPSEHDKTLPSTTTVIVCTITISHPMRSKYHSTRLTHSHPSSPINNGIFTSLLHSLLPSFLASPSTMRLPPFFFFFDQQK

SEQ ID NO: 219051 - protein, 162 aa, Glycine max
  unsure (1)..(162): unsure at all Xaa locations
  Clone ID: PAT_MRT3847_39830C.1.pep
FFAGSMHGXLRPILLKHWANKEPDMKIFGPMPRDLEGKKMYMEYMNSSKYCICARGYEVHTPRIIEAIFSGCVPVIISDNYVPPLFEVLKWEAFSLFVRERDVPSLRDILLSIPEEKYLALHLGVKKVQQHFLWHKVPVKYDLFHMILHAIWKNRLSQIRPR

SEQ ID NO: 219052 - protein, 92 aa, Glycine max
  Clone ID: PAT_MRT3847_39831C.1.pep
PFFFFFFFFAKEKKHFIAFENKNSNLLKLYGLQVINLQGKLNHQNNKCNFFPLQQFDKEYQSFPKCIDFLKTRIILSVVTQTTNLSITSIFM

SEQ ID NO: 219053 - protein, 153 aa, Glycine max
  unsure (1)..(153): unsure at all Xaa locations
  Clone ID: PAT_MRT3847_39832C.1.pep
GSRYLKRSSRVFFLTELCLLSVCMLTSPILTLLGQHENITHVAGTISLWPTPISPAYTASLIRLTLLXSQSKNGVMAFLADLSTMIHVLTCWLLTIQFKFGIPGALISTIETLRIPTIGQVIMTTSGWCHETRQGLSLIAYIDLEPVVKLSLS

SEQ ID NO: 219054 - protein, 48 aa, Glycine max
  Clone ID: PAT_MRT3847_39833C.1.pep
DVEMSWCKGNWRDLVLLTTLAMYLVRDGSKKPRNHYLLPHCSTISLWC

SEQ ID NO: 219055 - protein, 114 aa, Glycine max
  unsure (1)..(114): unsure at all Xaa locations
  Clone ID: PAT_MRT3847_39834C.1.pep
KVLHKRTHRLLACGSRLSFCRRDDCRAGCELHGGYALTAMWSSINNETLINSSCEKLLRQTEAPGVRXQSLKNFDSLCVYGDDNLISDHECDKPYFCVCKMTSSVSGYKIAITD

SEQ ID NO: 219056 - protein, 81 aa, Glycine max
  unsure (1)..(81): unsure at all Xaa locations
  Clone ID: PAT_MRT3847_39835C.1.pep
SRWQVALSVSLLVQSMYSARSVLFIVGRFPLVSCLLWVFVPLCPPRXRGFVLXWXLXGLSHTLREGVSNSSVYALEGPSSL

SEQ ID NO: 219057 - protein, 98 aa, Glycine max
  Clone ID: PAT_MRT3847_39836C.1.pep
FFFFFFFFFFFFFFFFFYFFFFFFNGKLKIFIFLGFFTIKHTPGGGVSNQPNHKFFALELATNSPHNFPLLFFPLNNKSPNRVLGQIQLHWKTNNAHP

SEQ ID NO: 219058 - protein, 215 aa, Glycine max
  Clone ID: PAT_MRT3847_39837C.1.pep
GFVYARGGPFLPLLVIRVRFVGWRCCAYCWDVETGKVKMVFKGHMDYLHCIVARNSSNQIITGSEDGTTRIWDCKSGKCTQVIDPARDLKLKGSASWVGCVALDASESWLACSSGRNISLWNLPASECVSKIPTRACVQDMSFDNNQILTVGTDPLLNRFDMNGTILSQIQCAPSSSFSISLHPAGVMAVGGYGCLVDVISQFGSHMCTFRCQCV

SEQ ID NO: 219059 - protein, 45 aa, Glycine max
  Clone ID: PAT_MRT3847_39838C.1.pep
KKKKIKKKKKKKKKKKKKKKKKKKKKKKKKKKKKKNKKKKKKKKN

SEQ ID NO: 219060 - protein, 86 aa, Glycine max
  Clone ID: PAT_MRT3847_39839C.1.pep
SKIPTRACVQDMSFDNNQILTVGTDPLLNRFDMNGTILSQIQCAPSSSFSISLHPAGVMAVGGYGCLVDVISQFGSHMCTFRCQCV

SEQ ID NO: 219061 - protein, 89 aa, Glycine max
  unsure (1)..(89): unsure at all Xaa locations
  Clone ID: PAT_MRT3847_3983C.1.pep
FSMLRFWRTKVKIGLRVGVQPXIGIMERALLKKNPFKRLLRRFMFEKKPKKLRTKPKKLAGMPKRLVKKEGSYSTDFNSLIKNLSWGPG

SEQ ID NO: 219062 - protein, 57 aa, Glycine max
  Clone ID: PAT_MRT3847_39840C.1.pep
IHGQRLYMTMEQRRYFREEYGIETWTFIQKLRDAVFMRVGLALYVINQDGCIKAALE

SEQ ID NO: 219063 - protein, 203 aa, Glycine max
  unsure (1)..(203): unsure at all Xaa locations
  Clone ID: PAT_MRT3847_39841C.1.pep
MNEDNLSSSDSSTQRRGVTVDQCQRMIHKSLLSPQVKFLREHLEKAGCLVGDNFIKAVKCDNIAIAGGYTQGEGIVVCCNEMESQDDVDQLLKHELIHVFDDCRAGNLDWTKCAHHACSEIRAGHLSGDCHFKXELLKLASLKIRGHEQECIXRRGMKSLSANPYCSGVAKASLESVWDVGYNDTKPSGQSPLTKQLPGCYCI

SEQ ID NO: 219064 - protein, 165 aa, Glycine max
  Clone ID: PAT_MRT3847_39842C.1.pep
AAQETKRGISAEKKIFGSAANLKTTPRGGAGNKPRTPGGNFGEEFPLGKPPGGKKTKTREGPFSKGGGKHPNPPTIGTNWPTGEGPRNLGQARGPQTQIFGVYSTLGKQKTTPPNKFFLYKEQNRGGPPPLDKFWAPAFEKPIKPPMGDHFKKNPPGPLGRGAPG

SEQ ID NO: 219065 - protein, 128 aa, Glycine max
  Clone ID: PAT_MRT3847_39843C.1.pep
SVRCAVFKEDVNAAILDGKEIDVSFDNFPYYLSENTKNVLVAACFMHLMHKEHEKFTADLTTINPRILLSGPAGSEIYQEMLVKALAKYFGAKLLIFDSHLLLGGLSSRKLSYSKMDLMLKNPSAALN

SEQ ID NO: 219066 - protein, 53 aa, Glycine max
  Clone ID: PAT_MRT3847_39844C.1.pep
LLEPSRPEQEDEVLLLEERVGEAKRLAAMKMKDTGRKNKPRGHQHMWDRIRFF

SEQ ID NO: 219067 - protein, 155 aa, Glycine max
  unsure (1)..(155): unsure at all Xaa locations
  Clone ID: PAT_MRT3847_39845C.1.pep
LILYHYHHHNNNHYLPPTTTLPPPNTFLLQPQPNNFFALCQALFTRQPLKLTQPSPPPSHLTCRIRLLLYNTFFSFLTLPSGTVCCFHTDQANLHSPDHSNIVLEAFIGPARTSSTSLLQYVPNSXSIPNPKWILRTRRPPGSKSSWSTPVDWHS

SEQ ID NO: 219068 - protein, 50 aa, Glycine max
  Clone ID: PAT_MRT3847_39846C.1.pep
TDLVAYGRLFLANPDLPKRFGQDAPLNKYNRENFYTHDPVIGYTDYPFLE

SEQ ID NO: 219069 - protein, 250 aa, Glycine max
  unsure (1)..(250): unsure at all Xaa locations
  Clone ID: PAT_MRT3847_39847C.1.pep
MALIGLLLMGFLTMFSSAHAYGGGWTNAHATFYGGSDASGTMGGACGYGNLYSQGYGTNTAALSTALFNNGLSCGSCYEIRCANDHRWCLPGSIMVTATNFCPPNNALPNNTGGWCNPPMQHFDLSQPVFLRIAQYKAGIVPVSYRRVAWRRKGGIRFTINGXHSYFNXLVLITNVGGAGDVHSVSIKGSRTGWMPMSRNWGQNWQSNNYLDGQSLSFKVTTSDGRTIVSNNVAPSGWSFGQTYTGAQFR

SEQ ID NO: 219070 - protein, 62 aa, Glycine max
  Clone ID: PAT_MRT3847_39848C.1.pep
KIYISVMLTLLAVQTDDTLEFNESIVFLRGSFVQEFLYKFGISICLFFPMSHELCSSVCCVS

SEQ ID NO: 219071 - protein, 78 aa, Glycine max
  Clone ID: PAT_MRT3847_39849C.1.pep
WEGLWPFCLGRGFSNPFHCSGLEVFCALPFGLVSGPGLFPCLALFLSLLALVFWFWSVFLFLFFCSLYALSAWLEGLP

SEQ ID NO: 219072 - protein, 38 aa, Glycine max
  Clone ID: PAT_MRT3847_3984C.1.pep
GIYPTTILEKHGGSMNYQPYLSYHIQKIKIPNLLNYYP

SEQ ID NO: 219073 - protein, 63 aa, Glycine max
  Clone ID: PAT_MRT3847_39850C.1.pep
PNIKQVELLVSQFPLDLSNVCHLFHNLLVQLGLTREVVNGIQGLPIFAASSRRSIWALGASVP

SEQ ID NO: 219074 - protein, 54 aa, Glycine max
  Clone ID: PAT_MRT3847_39851C.1.pep
FSSKICLPCPSPFFIHVPSHFTWLFFFSSCFILFSSRRFPTSHSANFYLIFFFY

SEQ ID NO: 219075 - protein, 54 aa, Glycine max
  Clone ID: PAT_MRT3847_39852C.1.pep
IINLSKLGFDKLKIMCEHSMLNANRHSDEEEKNQQKKRYKYDKLYIYEVIKREK

SEQ ID NO: 219076 - protein, 122 aa, Glycine max
  Clone ID: PAT_MRT3847_39853C.1.pep
NFAKSLLDVADNLGRASSVATENFSKIDTSSDSAEVVKLLKTLLQGVEMTEKQLVEVLKKFGVEKFDPTNEPFDPHRHNAIFQIPDGSKPPGTVAAVLKAGYMLYDRVIRPAEVGVTHANRG

SEQ ID NO: 219077 - protein, 47 aa, Glycine max
  Clone ID: PAT_MRT3847_39854C.1.pep
SIICLLFIVWITGFQFEIYIVGDNACITNEIQSKNTYRRLKKKKKNS

SEQ ID NO: 219078 - protein, 223 aa, Glycine max
  unsure (1)..(223): unsure at all Xaa locations
  Clone ID: PAT_MRT3847_39855C.1.pep
MDLHLKSLFNRFLEQFGSGPGLGPGSGTCMMKVDGIAPNFIKSIYKASAALYRAEPWKRLRPGHLFGVRVGKDSDWPGKKQPFPCVQFIGGDGGDVGFYMFRSENDAKKMTGSRETIHVPNVELLRVTYEVESLMFPSNRKMIKSLSLEASGSDRFPVIDVARCTPSGDLRFRNPNLEELRFVYAFMXAISLVHSLLQVDRESGPKYSTVVCFEPFIETVDVQ

SEQ ID NO: 219079 - protein, 45 aa, Glycine max
  Clone ID: PAT_MRT3847_39856C.1.pep
NQNFYQKKPNIYFKKKKKNNGPHLLNWYTHQLIKYRNLHTYHHFL

SEQ ID NO: 219080 - protein, 70 aa, Glycine max
  Clone ID: PAT_MRT3847_39857C.1.pep
MEGEEYLNCALRPHTQPKNHAVLRGKMGFQRSLNLAPLITDRATIMAVIAATTPLFKTLQWPLCAAKVRY

SEQ ID NO: 219081 - protein, 192 aa, Glycine max
  unsure (1)..(192): unsure at all Xaa locations
  Clone ID: PAT_MRT3847_39858C.1.pep
MADSDNDSGGAHNGGKGSEMSPREQDRFLPIANVSRIMKKALPANAKISKDAKETVQEVRVKVSSAFITGEXADKCQREKRKTINGDDLLWAMTTLGFEDYVEPLKGYLQRFREMEGEKTVAARDKDAPPLTNATNSAYESANYAAAAAVPGGIMMHQGHVYGSAGFHQVAGGAIKGGPAYPGPGSNAGRPR

SEQ ID NO: 219082 - protein, 137 aa, Glycine max
  Clone ID: PAT_MRT3847_39859C.1.pep
ASGLSSAVSSAASGATSEGSSLASAVSSGSITGSAASASASSIIAGANSTVASRLSSLNSELSTIASTATSLRSSISAEISRASASLSSVQAQVTSAVDSAGASASASATGEGAAIQYAAPAAGSFLAAALAAFGLF

SEQ ID NO: 219083 - protein, 100 aa, Glycine max
  unsure (1)..(100): unsure at all Xaa locations
  Clone ID: PAT_MRT3847_3985C.1.pep
MSTIEYLLLLGGWTSPYALRVPIALTLIDLEYHDEDXTYHTKRDLLDMSNPVHTKIPAVFHADKVTXQCAIIVEHIHDAWTNVPYILPQNAXDRANARSW

SEQ ID NO: 219084 - protein, 64 aa, Glycine max
  Clone ID: PAT_MRT3847_39860C.1.pep
MFFGNWLEFRDLFQIINNLIYKNEVNIFFLTLVALLLFCGSVAKSAQFPLHVWLPDAMEGPGRV

SEQ ID NO: 219085 - protein, 92 aa, Glycine max
  unsure (1)..(92): unsure at all Xaa locations
  Clone ID: PAT_MRT3847_39861C.1.pep
SNLSHSFFLIFFTPSXFXTYNGLSLXPFKLQVSXVLPKFXNFXSXXSXSXEPDPXPSXEETTETSVQXDEEXXSXXPXXFGRXXXXIXARAX

SEQ ID NO: 219086 - protein, 66 aa, Glycine max
  Clone ID: PAT_MRT3847_39862C.1.pep
PGAGWLNVMTQWMAYHAGCMASYCLFGANVFLTGTAWIWCATLWSVQSAWITDTSAASADQERCIA

SEQ ID NO: 219087 - protein, 88 aa, Glycine max
  Clone ID: PAT_MRT3847_39863C.1.pep
ARGATKRLASSFESNPSIDAVATPVTPKPRVVVERNGAVLSKWVLLLCLLSSIRSTHLGAACEEKKREKNRNRNIKSSCQFHVLILPN

SEQ ID NO: 219088 - protein, 51 aa, Glycine max
  Clone ID: PAT_MRT3847_39864C.1.pep
IYLPRTYNSIHDVQDSDDITYSVIFRWIFLRQSRYPRIYYSEFPQLFCYLQ

SEQ ID NO: 219089 - protein, 58 aa, Glycine max
  Clone ID: PAT_MRT3847_39865C.1.pep
LWAVLSETLYNRTISGLDLFYLDELSAVEPLLNGLALKWLDEHSRLKRGPLSDCVHNH

SEQ ID NO: 219090 - protein, 36 aa, Glycine max
  Clone ID: PAT_MRT3847_39866C.1.pep
IIFWKLSFHSTITFFHPNQIYEHKVLSKYLMMAREG

SEQ ID NO: 219091 - protein, 80 aa, Glycine max
  Clone ID: PAT_MRT3847_39867C.1.pep
SFCYTSVADKNYCLCCPRTSRSFNDEYLERPAKWEIFFDCPRPFSNPNLILLIDTVSIELVIFKIRKKSRPGRPSRGAAS

SEQ ID NO: 219092 - protein, 83 aa, Glycine max
  Clone ID: PAT_MRT3847_39868C.1.pep
LIPFPLVISSKFLFGNSSRIECYVLFRVSRMPLKPCKVRPKVATVGSANTIFKEFYSILLRRPHQLTLTLFPSMTVLEMSSCL

SEQ ID NO: 219093 - protein, 151 aa, Glycine max
  Clone ID: PAT_MRT3847_39869C.1.pep
VAEAQLALQVAQDAAQAKLARDLSNELYEVDVILEELREMVVKRFRKMSTEEKRKLGDALTRLSPEDLSKALEIVAQNNPSFQATAEEVDLDMDAQSESTLWRLKFFVKEALEVQGKNSGSMGGNENQNNIRKRELCDAIAKTKRKTKRLT

SEQ ID NO: 219094 - protein, 54 aa, Glycine max
  Clone ID: PAT_MRT3847_3986C.1.pep
TCAPNIGSGTCFVRTSQRQYGRKDTSSYLTSSYCCYYIRSASLRVLEPGFSVSV

SEQ ID NO: 219095 - protein, 113 aa, Glycine max
  unsure (1)..(113): unsure at all Xaa locations
  Clone ID: PAT_MRT3847_39870C.1.pep
LSLIINLFPKPGKRARPMGVYGFVCTGAESIGVLLGGLFKSXLLWHWIFLVNLPIGIAFXAMCAALLLQMRARTGPAGIDIPPEITVTGSLMLAVYGIVVENEAGCLSTREFR

SEQ ID NO: 219096 - protein, 89 aa, Glycine max
  Clone ID: PAT_MRT3847_39871C.1.pep
SMGLFHLKTQIPNQRIFNLFFINDMECFQPKPEGKKKSKVLNKLFNWKKKSFFKDTKFFVFFSSWSPISKKKKAFCFSLCSKNFFPPKF

SEQ ID NO: 219097 - protein, 214 aa, Glycine max
  Clone ID: PAT_MRT3847_39872C.1.pep
MAPVLPPGFRFHPTDEELVAYYLKRKINGRKIELEIIPEVDLYKCEPWDLPGKSLLPGKDLEWYFFSPRDRKYPNGSRTNRATKSGYWKATGKDRKVNSQARAVGMKKTLVYYRGRAPHGSRTNWVMHEYRLDERECETNSGLQDAYALCRVVKKTAVIPPKVGGHYVNVPNANKITSDQSSSIELYSEGRHEDLDSSNYLMSMDICSPCNMGN

SEQ ID NO: 219098 - protein, 84 aa, Glycine max
  unsure (1)..(84): unsure at all Xaa locations
  Clone ID: PAT_MRT3847_39873C.1.pep
HSKHSLDLQWVSVCLVFKGDVPKKKGYLAVYVGENEKKHFVIPISYLNQPSIQDXFGFDHPTGGLTIPCREDVFQDITSCFHRS

SEQ ID NO: 219099 - protein, 60 aa, Glycine max
  Clone ID: PAT_MRT3847_39874C.1.pep
LSSNQLTLSSSTSKMVSVFPFLERSFYRSKRLIIPVNGKVMSRGKILSCLMSPRSSCAHK

SEQ ID NO: 219100 - protein, 91 aa, Glycine max
  Clone ID: PAT_MRT3847_39875C.1.pep
HPTLPHPLTELSVHSPPPKPLGVLSPPAWGPFLPYRVDCGHRPVLIMPVLEHAQNLAARAGRSRVTLHIDPGQAGLGLPSGTPKHIYSYST

SEQ ID NO: 219101 - protein, 86 aa, Glycine max
  unsure (1)..(86): unsure at all Xaa locations
  Clone ID: PAT_MRT3847_39876C.1.pep
MXKREAIILVLDGQKMLGLPLLGVIPEDSEVIRSPNRGFPLVLNKPPTLAGLAFEQTAWRLVEQDSMQAVVVEEQPKRGFFSFFGG

SEQ ID NO: 219102 - protein, 98 aa, Glycine max
  unsure (1)..(98): unsure at all Xaa locations
  Clone ID: PAT_MRT3847_39877C.1.pep
FLKSRPGTEPFNACKWAKSDPHSWELIFPIKVCGPNNGFEMWSSEWGNQTSXPLSFLIDNPKQWPVFDIFLGIFQDFEIAGNTLMPAFFVPQAYARFF

SEQ ID NO: 219103 - protein, 77 aa, Glycine max
  Clone ID: PAT_MRT3847_39878C.1.pep
PVRNSRGDPRVRAMAPTFKGWGGGRLLALFSAGSAEELSPASSPGPGPEAGAADSVPCAAIMSGASLVLGGGGGFKV

SEQ ID NO: 219104 - protein, 43 aa, Glycine max
  Clone ID: PAT_MRT3847_39879C.1.pep
MLGIGFMGIEISTSWREVNFWCCHSGQLTNVINCPIFCTLFTI

SEQ ID NO: 219105 - protein, 73 aa, Glycine max
  Clone ID: PAT_MRT3847_3987C.1.pep
KTPKGFFCIEDDRLLRRLNDYGRDSFCFSIAGSSRIPIHIMIRLCVHVCAYELSLYFDRSRFLSDLIYLLKHT

SEQ ID NO: 219106 - protein, 111 aa, Glycine max
  Clone ID: PAT_MRT3847_39880C.1.pep
MNMNMNMNMNTKSRMITLWVELYFCSITNSLAASKQSHNPAIINFGDYNSDTGGLSAAFGQAGTSHGECYLHHTAGRYCDETVIADVLSKKLRLPYLSALLDPAGSKYKHG

SEQ ID NO: 219107 - protein, 341 aa, Glycine max
  Clone ID: PAT_MRT3847_39881C.1.pep
RQHQSSSTILWNNQSASMPPASRRKAKQAKKLKTLTILNHHSPPSDQFQGAAVSPNHGQKMEGSLNVTLQDSHKVETQTSGEDKKVVVEVDEEEAPQSVENKELVESGKVEDVQEDVSESVGETFEPDTVKDAQVENTMESDTIELELKKEKGKGFLSDLAVDNHEVKETDFPFSENNNELFSVSGNEGLRETEVVVVETFFKSMMFGGEEKDVLSSVVTDKLLRESEEPNEVYGDSSLPLTDVASEETSVPKSDDSDQVAPTIIEKSLDLEPTLDEKVEEPSGCQEESSYESAKESFQPSPSVPDAESTENPTIVPVAQRENTSSKRSCGLFEIMWGGDR

SEQ ID NO: 219108 - protein, 76 aa, Glycine max
  Clone ID: PAT_MRT3847_39882C.1.pep
PDLCLKIQAILPLSCTRDPYINSPIAPPARTFIYKVRLCRVRLRMAIREARERERVLGLWKGERPKTTTHVRKTKC

SEQ ID NO: 219109 - protein, 72 aa, Glycine max
  Clone ID: PAT_MRT3847_39883C.1.pep
WEQNARCAYDLFEKDGNKAIVIDELASELGLGPSVPVHAVLHDWIRHTDGKLSFLGFVKLLHGPSRSLAKGQ

SEQ ID NO: 219110 - protein, 81 aa, Glycine max
  Clone ID: PAT_MRT3847_39884C.1.pep
HNSDKYDGWKYKKYVLKFQIDGQNMWQPSHEQIGVTGKIIHWNFPLIMFAWKVAPELACPKTIVLKTAEKTPLSALYAEKR

SEQ ID NO: 219111 - protein, 42 aa, Glycine max
  unsure (1)..(42): unsure at all Xaa locations
  Clone ID: PAT_MRT3847_39885C.1.pep
PRXXELVMPTXRXYXMVMVXXGITRGXKSXSXLPQMXQFCXA

SEQ ID NO: 219112 - protein, 65 aa, Glycine max
  Clone ID: PAT_MRT3847_39886C.1.pep
RICGCGCWCLGDDFGLWNFTPKRGFVLTEIQWREGGCKMELTSCTFCKSFELSVSFLRYTETKKQ

SEQ ID NO: 219113 - protein, 43 aa, Glycine max
  Clone ID: PAT_MRT3847_39887C.1.pep
ARDREADEMLSRGCNDQSCAASQVLTSKIHGAAQCATVRASAL

SEQ ID NO: 219114 - protein, 45 aa, Glycine max
  Clone ID: PAT_MRT3847_39888C.1.pep
GRLAGLPLPLLMALEKELNSSISQSIAFQFSGFAGLTVVRRSSSF

SEQ ID NO: 219115 - protein, 64 aa, Glycine max
  Clone ID: PAT_MRT3847_39889C.1.pep
TYFSKLIIPDSLTIGSFSNFVGGGYENYPHSDRWDLQHNILNVRYEFFYRSRKIGVGSARLGEP

SEQ ID NO: 219116 - protein, 423 aa, Glycine max
  Clone ID: PAT_MRT3847_3988C.1.pep
MNSSPSSSQLPSSSADFDKFNSLPRFRPLECLQGNPVPAFLSKTFELVDDPSLDPIISWGSTGVSFVVWDPTLFARHVLPRNFKHNNFSSFVRQLNTYGFRKIDTEKWEFFNEAFQRGKRHLLKNIRRRGPPQSHQVGGNIVPYSDADKAGLEFELESLRKERSVLMQEVVELQQQQRTTLQRARQVNQRLQSAELIQKQMVSFLARLFEKPAFLTSLQHAKEQRDLGCPKVRRRFIKQHQGQTEISDFLNEGQIVRYQPDWRNVTTSSEIQEMYPVSLEESPNYLSQALAKEFSEGTENLISDEVMSIADTMGFKSSSFGLDGNLFKGKNVMSSNEGLLAEEFVSFPEDLTKETGFPEFSPLGTEGIIKREDKRNTNFDVSGADSSSGNEQWGNPINYEVPEFVVTSGMTDMWDINYLTHSK

SEQ ID NO: 219117 - protein, 227 aa, Glycine max
  unsure (1)..(227): unsure at all Xaa locations
  Clone ID: PAT_MRT3847_39890C.1.pep
MASSVTSSFRISNLKSVFVGETNKLRVSSVPGAHVGFNRKTVECKESRIGKQPIPVPSNVTVKLEGQDIQVKGPLGELALTYPREVLVEREESGTLRVKKAVETRRANQMHGLFRTLTDNLVIGVSKGFDKKLQLVGVGYRAMVEGNEVVLNLGFSHPVKMTIPDXLKVKVEENXTRITVSGYDKSEVGQFAASIMKWRPPEPYKGKGVKYADEIVRRKEGKAGKKK

SEQ ID NO: 219118 - protein, 74 aa, Glycine max
  Clone ID: PAT_MRT3847_39891C.1.pep
IRHEVESLEVIATDFDDYSPLENLVAPITKLLTALPTLREVRVYVPEDSGDDGSSSQESILRSRFPGAKINYIM

SEQ ID NO: 219119 - protein, 87 aa, Glycine max
  Clone ID: PAT_MRT3847_39892C.1.pep
PKRIITHHVQEDSKISLSSRTKSRNLTLHRPCKITSFDRVCMACHWKNTIWLGEGDGHFPQNQSTFQCSMHINVEGHSTTLSISSLK

SEQ ID NO: 219120 - protein, 51 aa, Glycine max
  Clone ID: PAT_MRT3847_39893C.1.pep
TRFVQISVKSFFYFFFQIFFSFCASPTNLTQVLKPEVLPFILQVPKLTKKT

SEQ ID NO: 219121 - protein, 249 aa, Glycine max
  unsure (1)..(249): unsure at all Xaa locations
  Clone ID: PAT_MRT3847_39894C.1.pep
HASGDVWAFLLTCKVNYCSLYDQGYTSIGSIYDTVPNSLLCISNSSNKFKPAYLLADGRLERAGRAKRPSTSTGGQHPAESNGLTSQDSYKNSMLTASIIAVGDEILFGIVEDQLGPYLCRKLHCIGWSVFQHSVVHNNIDSVAEEVERQKSKSDMVFIYGGVGPLHSDVSIAGIAKAFGVRLAPDEEFEEYLRHIIGDQCTGDRNEMAQLPEGITXIMASPSLSHYDKLAVPLIKCENVIILIATNVS

SEQ ID NO: 219122 - protein, 58 aa, Glycine max
  Clone ID: PAT_MRT3847_39895C.1.pep
NGCLLKKTVLPFPALHIYILACFSCTDQPITLPLHHTLSYSLLREHNWEEETRTQTMG

SEQ ID NO: 219123 - protein, 68 aa, Glycine max
  Clone ID: PAT_MRT3847_39896C.1.pep
GRLPKKKLKFFLMGRLKLKSYTTPLFILYYSFPFQGIYTSFFAVIQRDNFRFFFVIFTNNNDPDKFFP

SEQ ID NO: 219124 - protein, 91 aa, Glycine max
  unsure (1)..(91): unsure at all Xaa locations
  Clone ID: PAT_MRT3847_39897C.1.pep
WWGCSSSYCVGFALPVAVVLSFPPVVXLPLKPLLLRLLSILVLRVRMRLCFCLFGAVRFMYGGNLVWAVKHSSFCRLKKKKKKLSPRADLE

SEQ ID NO: 219125 - protein, 93 aa, Glycine max
  unsure (1)..(93): unsure at all Xaa locations
  Clone ID: PAT_MRT3847_39898C.1.pep
LLQKGALLVHGGGMIXTSYTAHRTPVAASTEQEDKSDLTSSLLAKTTEPGVXLQIPRDVEIANKLPANAHSEGVPASNTPDGXMGMELAPDSV

SEQ ID NO: 219126 - protein, 95 aa, Glycine max
  Clone ID: PAT_MRT3847_39899C.1.pep
WMLSLHTLNHPLIMCLCGFRDMLRLIHYLINGALRPAIIGWVCLVFSINVFAESPHTDMLHHRYEDRPLHDHELVHDNFQQCSHVDHLVPSPQGL

SEQ ID NO: 219127 - protein, 142 aa, Glycine max
  unsure (1)..(142): unsure at all Xaa locations
  Clone ID: PAT_MRT3847_3989C.1.pep
RAVFDQMRVRGLRPNERTYTTLIDGFCQKGLMNEAYKVLSEMIVSGFSPSVVTYNALVHGYCFLGRVQEAVGILRGMVERGLPPDVVSYSTVIAGSCRERELGKAFQMNDEMVEKGVLPDTVTYFXLIQGLCLLLKLAGSFL

SEQ ID NO: 219128 - protein, 75 aa, Glycine max
  Clone ID: PAT_MRT3847_398C.1.pep
YNNFKTRIFFFFFRAWPLMHLIIGDVGSNASKASQHKRKTQMKYKVTKVQQPSLNHLTNALKEGLHIKNATYNML

SEQ ID NO: 219129 - protein, 50 aa, Glycine max
  Clone ID: PAT_MRT3847_39900C.1.pep
MGFYFFFPPLKGISQAFLPPPPPPPPPPPPPPPPPPPPPPPKKEVLHTCS

SEQ ID NO: 219130 - protein, 39 aa, Glycine max
  Clone ID: PAT_MRT3847_39901C.1.pep
MYTLEQYSAHSRLTSFSYASRLVEIKFAKKLSMREEAGA

SEQ ID NO: 219131 - protein, 114 aa, Glycine max
  Clone ID: PAT_MRT3847_39902C.1.pep
PLLLMVNLYPQLSPQILMVGFNRSLFHLGQRGMPLYMLHRSMLLGKRLPLDPPLEHEGRIHKRLSIVKVCLWLCIYLCLLVLILISCRINGLNYCFFNASPATCSPFVLAPART

SEQ ID NO: 219132 - protein, 75 aa, Glycine max
  unsure (1)..(75): unsure at all Xaa locations
  Clone ID: PAT_MRT3847_39903C.1.pep
KVAILTSKLNYSRHPCEWILTELSIFVVYITCCTHVQWNLLQYLRWETKLCNINMIPLYKRIILSINVFHKSXLI

SEQ ID NO: 219133 - protein, 57 aa, Glycine max
  unsure (1)..(57): unsure at all Xaa locations
  Clone ID: PAT_MRT3847_39904C.1.pep
SXXIYXXQILXQQVXAXPXXRFXXESAPPALXGDEMLKKLFVAVXSKFEXAIGILXK

SEQ ID NO: 219134 - protein, 72 aa, Glycine max
  Clone ID: PAT_MRT3847_39905C.1.pep
GILDVHDNMNKPTADKETAPPLPTGKKKVQADKSGSVNGRSLASLWGRASAKPKPCSSSAEHNNKISNPLVS

SEQ ID NO: 219135 - protein, 91 aa, Glycine max
  Clone ID: PAT_MRT3847_39906C.1.pep
ARRRQKGDGRESRRRRRKYRNNRSTIKLKHKHQWTNRNNQDRHVGPQCLLPFLTPFLSRTFSLSLISINIPTNRPVDHTLLLPSKLFNSLQ

SEQ ID NO: 219136 - protein, 84 aa, Glycine max
  Clone ID: PAT_MRT3847_39907C.1.pep
LTGSTSALEKLPTRYSMFAGVGDRETFSDYVIIEEVFAVSDDDVVERVIESDSVVVLSSMQLIASISDMLTRLYVILRHPRDAI

SEQ ID NO: 219137 - protein, 79 aa, Glycine max
  Clone ID: PAT_MRT3847_39908C.1.pep
LINSHHSTNGNPKTKPKAKATTPPPYLQPLVLTAPLLSSAVTSEASSVESAVAIRIIRRRISRLLLLLPLLRRRRSVGG

SEQ ID NO: 219138 - protein, 122 aa, Glycine max
  Clone ID: PAT_MRT3847_39909C.1.pep
RLREDYRRGSMENENCTFVAQPIQRKRKRYAIRDFPEGCGSYGKRVDPNNFRQLNDTILELGLQDLEDEELISAAEVVVACDSSNVSKFSSFSEGVLCDGSEFASSEWQQHRWFQCWFEGEG

SEQ ID NO: 219139 - protein, 66 aa, Glycine max
  Clone ID: PAT_MRT3847_3990C.1.pep
FPNRGPPLYNTKNFRLVNVWKLSQSTNFPPKPFLPAFCTIFFLPPFRKTLFPPRELFPISPPTPPP

SEQ ID NO: 219140 - protein, 92 aa, Glycine max
  Clone ID: PAT_MRT3847_39910C.1.pep
SLLKCIKLENLVKGLFSMLITPLGGLMRLPHESYHCCNLFLLSFIMNLSILTRHVVLVRIYQLSIIIFCLFVLINFLIMLCILCCSTPEINT

SEQ ID NO: 219141 - protein, 71 aa, Glycine max
  Clone ID: PAT_MRT3847_39911C.1.pep
INWFSPPSVVARCGCLARVRTSYASTRIVPSPFTASRECRTTTSCTCSNCTMIPLQSSSHMLSTFSSTSQK

SEQ ID NO: 219142 - protein, 232 aa, Glycine max
  unsure (1)..(232): unsure at all Xaa locations
  Clone ID: PAT_MRT3847_39912C.1.pep
MAARNIEKMASIDAQLRLLAPRKVSDDDKLVEYDALLLDRFLDILQDLHGEDIRQTVQDCYELSAEYEGEHKPEKLEELGNMLTGLDAGDSIVIAKSFSHMLNLANLAEEVQIAYRRRIKLLKKGDFADENSAITESDIEETFKKLVAQLKKTPQEIFDALKNQTVDLVLTAHPTQSVRRSLLQKHGRIRNCLTHLYXXDITPXDDXQELDEALQREIQAAFRTDEIRRTPP

SEQ ID NO: 219143 - protein, 88 aa, Glycine max
  Clone ID: PAT_MRT3847_39913C.1.pep
HAFDCPSTPSDGGADAAGENTSPKVIVDAKKSIKAWKHDTLKLTSIMVRNMTRVICIKSMGRRRNALAALFIGFLDLTGTPVYVVHYR

SEQ ID NO: 219144 - protein, 105 aa, Glycine max
  unsure (1)..(105): unsure at all Xaa locations
  Clone ID: PAT_MRT3847_39914C.1.pep
TTHSPEHRAGHAGARQNQKXQKPKTKQTKKTQGTKNKPKPKSKPKTNXKKKKKNKEKKKKKKKNKKKKKKQKNKKKNKQSXKKKKKTKSNQYQKKTRKKRKQHPR

SEQ ID NO: 219145 - protein, 104 aa, Glycine max
  unsure (1)..(104): unsure at all Xaa locations
  Clone ID: PAT_MRT3847_39915C.1.pep
GAPGRAPRGTPPGDPRGGGPPPGRPHPGALPPGGKEKEEGLAKGTNKRGSSSQGEIPLGVPKSQPXAGGGFGGFESVQPFDTDLGGKGPKGVXIQGLWFGQLGS

SEQ ID NO: 219146 - protein, 57 aa, Glycine max
  unsure (1)..(57): unsure at all Xaa locations
  Clone ID: PAT_MRT3847_39916C.1.pep
NGMLVLTPDQGQAXASEIVPINFDGVTGAVKKGDNILISQNLFTGSETTSCPMTSDT

SEQ ID NO: 219147 - protein, 425 aa, Glycine max
  unsure (1)..(425): unsure at all Xaa locations
  Clone ID: PAT_MRT3847_39917C.1.pep
MATQLSDAELITSLQARVKELETENAKLLSQLADCRSHEMEKKVYVPDERGGKSKKGNRKSEEKIEKMPGYNTRFMSHHSRRYVALKVMYFGKRFYGFASEAQMEPTVESELFKAFEKTRLLVGNKKESQYSRCGRTDKGVSSVGQVIALFLRSNLKISETNNGNSGVVLDEQHGEIDYVRVLNRVLPNDIRIMGWCPAPVDFHARFSCLSREYKYFFWKENLNIQAMESAGNKLVGEHDFRNFCKMDAANVHNYRRRIKLFEISPTDVRYNDNQLWVIKIRGSAFLWHQVRCMVVVLFMVGKGLESPNVIDMLLDTARILRKPQYTMASEVPLVLQSCEFDNIKFMCSSEAGEALHVHLVNECQIYQLQAAIFHEALLNCVPLSNGSKLAAFSRXKKKVSHVPLMSRPTEPSYEERRAKLNTVA

SEQ ID NO: 219148 - protein, 116 aa, Glycine max
  unsure (1)..(116): unsure at all Xaa locations
  Clone ID: PAT_MRT3847_39918C.1.pep
GSGVEEFNETLSDEWVNKGDAPALPETLKNYNKLPSLGFKIVFLSRRSLDKMAXTXANLKKAGXHTWEQXIVKGPHGMTANGLXYKSAMRENLXGDXSKIXGIFXDXGRITXAXSW

SEQ ID NO: 219149 - protein, 73 aa, Glycine max
  Clone ID: PAT_MRT3847_39919C.1.pep
LLYVHLVNECQIFQLQAAIFHEALLNCVPLSNGVANALLHFQGSKKKVSHVPLMSRPTEPSYEERRAKLNTVA

SEQ ID NO: 219150 - protein, 52 aa, Glycine max
  Clone ID: PAT_MRT3847_3991C.1.pep
LAPSLSPNLQCVNLNYLHHFMGTKQVCWAIIVVWLTLFEGNTMPFCRLLAAV

SEQ ID NO: 219151 - protein, 79 aa, Glycine max
  Clone ID: PAT_MRT3847_39920C.1.pep
VVVVFLVGIGCMSGQVLMLTGKGVFVISVYVYGNSCVVRAAYYVKLVLGVVVMFGCVVVNYFRKGLVGVVVVQFVICQV

SEQ ID NO: 219152 - protein, 34 aa, Glycine max
  Clone ID: PAT_MRT3847_39921C.1.pep
SCNLSIYYVMFSLNYTLIGIKCFTSLLVGSNSIK

SEQ ID NO: 219153 - protein, 69 aa, Glycine max
  Clone ID: PAT_MRT3847_39922C.1.pep
AAEEPSRAALARRPLYSFFFAGCTVLGCTLASSALDKEDRKFARGSRPCEEGSARRPYPRPNRRTQGPN

SEQ ID NO: 219154 - protein, 45 aa, Glycine max
  Clone ID: PAT_MRT3847_39923C.1.pep
LFWQIMSSFGPNTICMNNSMQHPYKFNQINLHNRGYFGNMLFQSI

SEQ ID NO: 219155 - protein, 91 aa, Glycine max
  Clone ID: PAT_MRT3847_39924C.1.pep
TQGVFPLGLGGQGTPRGPPLIYGIFRGRRVFFFFFRGQKGPLQGDFLPGLGAPTQIGGPFIRKKNLFFVVGGGLSKIGGNLYSKVSKMRGP

SEQ ID NO: 219156 - protein, 69 aa, Glycine max
  Clone ID: PAT_MRT3847_39925C.1.pep
YAPHLQVNQCVLCISIALFTLYIWSKSEEFTSSSSSKYLAKLFSSLPCMSDLTEPQKVFETAPVIRGNQ

SEQ ID NO: 219157 - protein, 106 aa, Glycine max
  Clone ID: PAT_MRT3847_39926C.1.pep
VFFTNTNSPKPFLCIKLAKMDPPFWELIFPIKVGGPKKVFKKGSSEGANQTSWHLSFLIAIPKQFTVFAFLLGISQDFENAGNTLMPAFCVPQATARFFENGESSA

SEQ ID NO: 219158 - protein, 63 aa, Glycine max
  Clone ID: PAT_MRT3847_39927C.1.pep
WHLGIPPPWNGPGLLQKIPEIVIIPHKQWIPRIFVTHSLVIFSHCMPISIISTRTQVIMLTIT

SEQ ID NO: 219159 - protein, 47 aa, Glycine max
  Clone ID: PAT_MRT3847_39928C.1.pep
SYKPYNLQLQIIVKTFVIIGSQFPTPHKWSRYLPVTLFTSKQTHSSH

SEQ ID NO: 219160 - protein, 122 aa, Glycine max
  Clone ID: PAT_MRT3847_39929C.1.pep
SKTRKPFLFVLILANPLYALILAAFPMLLLPCVHQNANPVCYDAHAHRRVHLLVNPVCCDALPCPGYPLICCTTSTEFWCANKEVNILVNEEARLARQTKLSAHEAAWKASRQAFGGYWEKI

SEQ ID NO: 219161 - protein, 117 aa, Glycine max
  unsure (1)..(117): unsure at all Xaa locations
  Clone ID: PAT_MRT3847_3992C.1.pep
EKVAEQVGQHDASIDRLTIKNSYYKQPKQQPIQHPGEEHGAEQLVDYNENYNLSYYEVLDKPLAKLQGXATWXEALNDATNDEAEVDTIIHTKQLTERDALKDVKTDVETNEAEADP

SEQ ID NO: 219162 - protein, 94 aa, Glycine max
  Clone ID: PAT_MRT3847_39930C.1.pep
SQWAFLCPPLPSAIFPGYRPLPPPCWPVSAPPGHFHHPVTSPLFIFPPDQQRQAGHVLAVFRGWAIFSLCLIPLVYPLVLQKNPVPPPPSYFLS

SEQ ID NO: 219163 - protein, 94 aa, Glycine max
  unsure (1)..(94): unsure at all Xaa locations
  Clone ID: PAT_MRT3847_39931C.1.pep
PWFAVCCLPFSVRAWVXAAVALFFPSSSSLGCGLCSSVGVRGFSPFSFVVFRPFLCALCFVRVXWFSPGPSCXVWFRVAIHRSRGSSLVVRSGP

SEQ ID NO: 219164 - protein, 64 aa, Glycine max
  Clone ID: PAT_MRT3847_39932C.1.pep
TPSHELADEGLTSCAGIMHASTLTLIQELRINTNTSFMQCHNLLKHQVSYIHKQNTEFSIKDRS

SEQ ID NO: 219165 - protein, 47 aa, Glycine max
  Clone ID: PAT_MRT3847_39933C.1.pep
IPNRPLITLLLPYIYTNPLLTYLHTHNQIYLHPCHPITHIITKFIYN

SEQ ID NO: 219166 - protein, 78 aa, Glycine max
  Clone ID: PAT_MRT3847_39934C.1.pep
HYLLSNHRLIVSYIYTLIMLPMKQMLKGQVSYNKNFPCLAPQASVTTKPLDRLLESIVFEISDEFYTNITVLTPPSVV

SEQ ID NO: 219167 - protein, 119 aa, Glycine max
  unsure (1)..(119): unsure at all Xaa locations
  Clone ID: PAT_MRT3847_39935C.1.pep
FSQIWGNNLLTNGRIFLKKATIFTWTAVIFDGGGTGPRVHVFHLAQNWDLLPMGVGLGLNKRITPGFXAYGVDPGQAAKSLFPLWGEAEGVVPEDLLPNTPVWLGATAGLRFLKGNAFE

SEQ ID NO: 219168 - protein, 144 aa, Glycine max
  Clone ID: PAT_MRT3847_39936C.1.pep
MPPYDCMFLFKPHIRKEAVMDLVVRVGKHVCRRNGVVTDIKSLGKVQLGYGVKKLDGRYYQGLLMQMSMMATPEINKELHYLNKEDRLLRWLLVKQRNTKFGLDSYGDEGRYELSKLSQIGKHGDEDEDEDDEEYEVNEEETVN

SEQ ID NO: 219169 - protein, 108 aa, Glycine max
  Clone ID: PAT_MRT3847_39937C.1.pep
GGRLDKGNIGGEKTWFQGKGKIPKTQAGMPPGGWQQKRLNKVAPLKAFQKRDPPKNSLGNIQSLVIRRIGGPQVYGAIMGDRNKKPALTKNIHRRNFSFMPKKGGSQG

SEQ ID NO: 219170 - protein, 77 aa, Glycine max
  unsure (1)..(77): unsure at all Xaa locations
  Clone ID: PAT_MRT3847_39938C.1.pep
NLSXLIDXIXSDFDIGVXWKXXNDDXITKERLLXYXRAIHSEPNXXRDXXEGLLRDLGHYMXTLKAXHSGADLXXAY

SEQ ID NO: 219171 - protein, 126 aa, Glycine max
  unsure (1)..(126): unsure at all Xaa locations
  Clone ID: PAT_MRT3847_39939C.1.pep
VSVSIGHTELGSATMIPGSWLPWRPRYPFKGSVQTLVAKPWLKKIHHAXPFISVVNKAAYLSSVVTCXSVSARFLLDTLGPQPVSRNWAKRKGRGIFAWQGARCRFGMRGQKSRSXPGVIKGIEGC

SEQ ID NO: 219172 - protein, 92 aa, Glycine max
  Clone ID: PAT_MRT3847_3993C.1.pep
MQGAGVTFVMVVVQVLSVGLNTMIKASLSKGMSIFVFDAYTNLFAFCVLLLATTIRHRNRALTPINNSILFMIFVLGWLSVSIHTLIYTVLG

SEQ ID NO: 219173 - protein, 83 aa, Glycine max
  Clone ID: PAT_MRT3847_39940C.1.pep
PVNFSFISVSVKNSILVLGLTKCEQRICIMEHYSATCAWCKSYLCITGCFFRLTQAEAHVGSRRGKRDYCMHYTLGFLQQRWN

SEQ ID NO: 219174 - protein, 44 aa, Glycine max
  unsure (1)..(44): unsure at all Xaa locations
  Clone ID: PAT_MRT3847_39941C.1.pep
RRECQFPRSRVFGCNLEXVAXVREENGLXKHQXXGSXXKGQGEP

SEQ ID NO: 219175 - protein, 55 aa, Glycine max
  Clone ID: PAT_MRT3847_39942C.1.pep
STCLLLQGRVYREDGIESQLSLARAFHAPWFFFNASASHYNAHAIKFLLTPSLTV

SEQ ID NO: 219176 - protein, 58 aa, Glycine max
  Clone ID: PAT_MRT3847_39943C.1.pep
IRMITSCVFLFNEYVAWKFIDECRSDQLRLQGRTIKRTYHYSSYMSICESVLIENGTL

SEQ ID NO: 219177 - protein, 109 aa, Glycine max
  unsure (1)..(109): unsure at all Xaa locations
  Clone ID: PAT_MRT3847_39944C.1.pep
LLRFHSRGRALVLTCGRLSMGALRASHEKATSHAMMVEYEETGTARSSLSMRACGGVLRIYESLSAYHRSVXFIDSGRGGKSSSYWTDSXYILGMVVHHGYLFRWITGG

SEQ ID NO: 219178 - protein, 70 aa, Glycine max
  Clone ID: PAT_MRT3847_39945C.1.pep
KQLTFIAFFSRAVKNILGRRDKNIYRIVPRVPNTRICLAMWLSTEIKLVVIYFSSYSDTFQGLLFCTYCW

SEQ ID NO: 219179 - protein, 50 aa, Glycine max
  Clone ID: PAT_MRT3847_39946C.1.pep
CDKCESRKITVRFYLKNKKVKWIHNYNLEKATCILELCASQHLKCICLPN

SEQ ID NO: 219180 - protein, 63 aa, Glycine max
  unsure (1)..(63): unsure at all Xaa locations
  Clone ID: PAT_MRT3847_39947C.1.pep
LIIGGRAVVCAYEGTLGEMVHKVMQKDDAGDHFTEMDXNVSGNILIRIVSXQTDILEPFTDNM

SEQ ID NO: 219181 - protein, 164 aa, Glycine max
  Clone ID: PAT_MRT3847_39948C.1.pep
QYPPYPYPYDPYSVGVPSSSPPPQQRLPVSKPPPPPPSPPRSSPWDFLNFFDNSDDKYYSQTPYPATATATPSRDSREVREEEGIPDLEDEDYHHHEVVKQVHGDQKLVQPKHEPPPSSHHKPDEEDEDDDDDDDDDDDDDDDEDEVEYEVHVVDKKVVDGDNN

SEQ ID NO: 219182 - protein, 60 aa, Glycine max
  Clone ID: PAT_MRT3847_39949C.1.pep
LEPPRTTTPSTCHPKTPPPTKSPTTAPPICLISSDVVYLKGFLNLWVNYTTYGILRINKS

SEQ ID NO: 219183 - protein, 160 aa, Glycine max
  Clone ID: PAT_MRT3847_3994C.1.pep
FPKRGTSHVSQPFHDQSVSEKSKAGEVPHFGNQEGKRERKSAPSKRHHHSPNEVSVTSVEQAPTSADLLHDQRPSSGSGKNVNHNRFRRGHELHGDSKPPTQDNRHYNQPTNRERQGPNLHYEYHPVGSYDDGKSDNFERPKNGNHGGGRFRERGQTHSR

SEQ ID NO: 219184 - protein, 58 aa, Glycine max
  Clone ID: PAT_MRT3847_39950C.1.pep
DISEQSWTHYSQNLTNKCSMGWVSLQNPPIESFSKVKFIKTLIKLHYLSSSNNLQILQ

SEQ ID NO: 219185 - protein, 152 aa, Glycine max
  unsure (1)..(152): unsure at all Xaa locations
  Clone ID: PAT_MRT3847_39951C.1.pep
FRDCPTHSRVRACPHRLAQVGEIQEKVVLKFSQEEFLTARSTXVRPATTMLADGCPYLSAMVHDMPESTIPGDFVIGVKLTTINIMGAYGLNPGMSGSHLLGTITQSIFQHTVWHXMATVRTPXDIDSSKQSLCQFAIDLVGGGNLVDKTGD

SEQ ID NO: 219186 - protein, 45 aa, Glycine max
  Clone ID: PAT_MRT3847_39952C.1.pep
HTISLNHTPSTPSASYYVKGRTNSITVFTFHYLLRCHMIADHPYL

SEQ ID NO: 219187 - protein, 162 aa, Glycine max
  unsure (1)..(162): unsure at all Xaa locations
  Clone ID: PAT_MRT3847_39953C.1.pep
PPPPRPRSSTPPPPPGPPWRKPHQVPPPNXAPPKAPSPPPRGSPPPKPPTPIPGAPPPGGGPPRPTGFHYRGPPLGPPPQRGLCPIGAPPPKKDPPPPGPXPPFQGGPPPFPFGQGCVGPAQGPPLMFLGLGLPGNQIPRGGPPKASFPPGGNPVARKGGKS

SEQ ID NO: 219188 - protein, 45 aa, Glycine max
  Clone ID: PAT_MRT3847_39954C.1.pep
WEHVSPPGILIPPTCNAVALMYHESVMCNNQPSCRSLSKYRVFSQ

SEQ ID NO: 219189 - protein, 201 aa, Glycine max
  Clone ID: PAT_MRT3847_39955C.1.pep
PDWNELTADEVIHKFDVVEVLEDFTVGHGIDVIPLVKVAGFRTVFHHHLHPKEIRIIPREEMFRFSHQIPSYVLTGQEAPEAPKGCRVLDPAATPFELLQVIEVVKKENVAANEDSDVKKPSDDMKKDNDEEMIDAMGKHGEEKEAKVEAMQEVDPSDTMKKGNEEMPNDPGRLREEKEGKAKDMQEVEPLKEAKEREDLQ

SEQ ID NO: 219190 - protein, 79 aa, Glycine max
  Clone ID: PAT_MRT3847_39956C.1.pep
AFEFCKHRGTSRTGGKHKDDKGMKREGGSTRRVGMDFYSNRTGSTGNIYGALCTVKTGVRETEEPDHCKELLQNRRSRS

SEQ ID NO: 219191 - protein, 37 aa, Glycine max
  Clone ID: PAT_MRT3847_39957C.1.pep
KFNSDFIPMCINMISMTFYVTILLKMYRQTLQNLRIV

SEQ ID NO: 219192 - protein, 70 aa, Glycine max
  Clone ID: PAT_MRT3847_39958C.1.pep
DVGDEEVVDIGDDEMPVRNYPSVEIDKDNASSGSDSSSSSSSGSDSDSSSSDSDGEGEAQSPAVGSRSSP

SEQ ID NO: 219193 - protein, 161 aa, Glycine max
  unsure (1)..(161): unsure at all Xaa locations
  Clone ID: PAT_MRT3847_39959C.1.pep
RLREDDRGATLTVLDVSRNALSGEVPPEVGNLIKLEELKMANNSFTGTIPVELKKCGSLSVVDFEGNDFGGEVPSFFGDMIGLNVLSLGGNHFSGSVPVSFGNLSFLETLSLRGNRLNGSMPEMIMGLNNLTTLDLSGNKFTGQVYANIGNXNRLMVLNLS

SEQ ID NO: 219194 - protein, 61 aa, Glycine max
  Clone ID: PAT_MRT3847_3995C.1.pep
GHTIVSSLNQERRVRVLEDERAILQHQNLRRVLLRIINLRVRLLNHNRRVSLLNVHTGVPL

SEQ ID NO: 219195 - protein, 81 aa, Glycine max
  Clone ID: PAT_MRT3847_39960C.1.pep
EPCGRSCAPCLILLSRTYPPCVSCEGFMLWVLTSENTLTGGHRHPGCGTPSNAGDWVRGGSRSGCVFPPMCNRFPLVCTPR

SEQ ID NO: 219196 - protein, 506 aa, Glycine max
  unsure (1)..(506): unsure at all Xaa locations
  Clone ID: PAT_MRT3847_39961C.1.pep
GGGLQPKIPEAKGSIKAIRSVGSKMPLYEYLQTYGGIFRLTFGPKSFLIVSDPSIAKHIFQHNSKAYPKGILFEESTLXKGGEDIFISVWNLHRSPKLWDDADKFKPVGWVIDGPSPNETNQNFKYLPFGGGPRKCVGDLFASYETVVALAMLMRRFNFQIAVNDTGIEEATGTILQETEGLSVAVTHSWEPPIGKDLSPRLRKVNAALKLINDTLDDLIAICKRMVDEEELQFHEEYMNEQDPSILHFLLASGDDVSSKQLRDDLMTMLIAGHETSAAVLTWTFYLLSKEPRVMSKLQEEVDSVLGDQYPTIEDMKKLKYTTRVINESLRLYPQPPVLIRRSLEDDVLGEYPIKRNEDIFISVWXNLHRNPKLWDDADKFEPERWALDGPSRDETNXNFKYLPFGGGPRKCVGDLFASYETVVALAMLVRRFNFQIAVGAPPVEMTTGATIHTTQGLKMTVTHRIKPPIVPSLQMSTLEVDPSISLSDQDEVSQKGEVYQAQAQS

SEQ ID NO: 219197 - protein, 59 aa, Glycine max
  Clone ID: PAT_MRT3847_39962C.1.pep
TENITIHRFKASNLTYTYMHCISQPNSTTLKHTLRQFTTSIPQLSYPYPTNLTSITSII

SEQ ID NO: 219198 - protein, 57 aa, Glycine max
  Clone ID: PAT_MRT3847_39963C.1.pep
NLDFKETRIHFHNLQYQTTAYDGKASHCTVTICDMIKCLLWLLKPTDQVQARKRKYA

SEQ ID NO: 219199 - protein, 97 aa, Glycine max
  Clone ID: PAT_MRT3847_39964C.1.pep
ILITPTSSSCKLRLLTIRTSHLCKPTAALFIPFFLRTTPSFCAMSSSLGLPSTPFFGHGTRTLPLTRSRLSMTVSAGSQASLLDALFAGYKASTSFL

SEQ ID NO: 219200 - protein, 59 aa, Glycine max
  Clone ID: PAT_MRT3847_39965C.1.pep
YFPCHFHISWFLLSINWHSKTGLVGTQLVIQVSRCRKGNNRIWLQHNFMSKSRAESARG

SEQ ID NO: 219201 - protein, 74 aa, Glycine max
  Clone ID: PAT_MRT3847_39966C.1.pep
RFNCKFNHSTFLVLKILSFKFYFYKFYHSTFIILQNLLSKFLFNKFYHLPFNISQILSFKFVFYIYFIIILIIN

SEQ ID NO: 219202 - protein, 69 aa, Glycine max
  Clone ID: PAT_MRT3847_39967C.1.pep
GVSSQRAKSLASFLCDHAESLPAAKGHPLFQELPGPACLWFDLRAPANSRFPGYHSYMVKVFLVLILQA

SEQ ID NO: 219203 - protein, 112 aa, Glycine max
  unsure (1)..(112): unsure at all Xaa locations
  Clone ID: PAT_MRT3847_39968C.1.pep
MASVYSCTDCGSNLNLNSVYAYPPDFYIEAGNKGSVSFSAVDATKFKFDKEDKIRPFFETVNYWGIQRKRTKIKCXTPFTDSPGQFHMGPSQVIPRAPRYRFKTKTLRITST

SEQ ID NO: 219204 - protein, 125 aa, Glycine max
  Clone ID: PAT_MRT3847_39969C.1.pep
MASVYSCTECGSNLNLNSAHAYPPDFYFEAGNKGSVSFSAVDPTKFKFEKEDKLRPFFETVNYWGIQRKRTKIKCNTCDCLLGYVYDDGPPLTNSPGQFHMGPSQVIPRAPRYRFKTKTLRITST

SEQ ID NO: 219205 - protein, 369 aa, Glycine max
  Clone ID: PAT_MRT3847_3996C.1.pep
MSSNSRESQVHPEIAKVEDPYLSAVLLCFSRVLPAVLNAAIDLNLFDIIAKAQSSCDSSFSASEIASLLPNQHPQLANRLERILPLLASYSLLNCSIRTNEDGKRERVYALSPVGAYFAFDKDEGSSLAPLSSLIHRGFHDMWKDVKDAIVDPNNNNHFENVHGIPPYDYMEKNAELNDIFYKAVIHAAPLELKRALKLYKGFEGVSTLVDVGGGAGETLKQILPKYPSMKGINFDLPLVIQKAPPHPGIEQIAGDMFESVPTGDAILVKFVCHNWADEDCIKFLRNFHKALPQHGKVIVFEYIIPEVPNPSYISKHTCTLDNVMFLAHGGRERTQKEFENLCKSSGFSKFHVASSDISSTLGVMEFYK

SEQ ID NO: 219206 - protein, 200 aa, Glycine max
  Clone ID: PAT_MRT3847_39970C.1.pep
LGIRLEAKLKISQSRPMDAIETYQYLLALVQAQKKSFGSLQISSKVEYDKVNEFDIWHGLANLYASLSHWKDAEICLQKARELKEYSAALMHTEGVLFEGRGQNEEALCATINAILLEPNYVPCKILMGALFQKLGTKHLAIARSLLSDALRIEPTNRKAWYNLGLLHKHEGRISDAADCFQAASMLEESDPIESFSSLP

SEQ ID NO: 219207 - protein, 104 aa, Glycine max
  unsure (1)..(104): unsure at all Xaa locations
  Clone ID: PAT_MRT3847_39971C.1.pep
CWDREEFFTNNFPLLPLSCKMDTVTGQYYPEWAPINCRVXRQPIXITEGNFFRKQDXVNIEYDAXCTIPNDCGSLVAAKVGNHTQTGGFHAAGSKGRLGFASFD

SEQ ID NO: 219208 - protein, 100 aa, Glycine max
  Clone ID: PAT_MRT3847_39972C.1.pep
PPLWEVRQLPNVGGSGVFESSSGQIKTRTLGLDPPMRNSTVQFRRVHMLLMKVPSALGSLLFFTWKCVSPLGCLSLCFPSNYHFSLGHGVSWKKVMFGQI

SEQ ID NO: 219209 - protein, 116 aa, Glycine max
  Clone ID: PAT_MRT3847_39973C.1.pep
QEYMEPFLYHHEREIDEFITQSHDRAKSAGIAYVEMGIEWVKVNVLGFAPRKPDSPRPDGQTYAQNLMSRFQMPSARGSNDLYGLVNQALSGASALYGAAGTAGTRDAQASDLSRG

SEQ ID NO: 219210 - protein, 261 aa, Glycine max
  Clone ID: PAT_MRT3847_39974C.1.pep
MIPPPSSFLFQFLLLFPLILSHSDSDSGHPVLPRPLIVEYPEFDAVLRCGAWRVAGEANNLGAWAIIPEECAEYVKDYMSGKGYALDLEMVSKEAEEYARTVPLGYDGKDAWIFDIDETLLSNLPYYAAHGYGLEVFDHEKFNNWVEKGVAPAIEPSLKLYEDVLNLGFKVILLTGRSERHRSVTVDNLINAGFKEWDQLILRNSDDQGKRAVLYKSEKRSEMEKDGYRILGNSGDQWSDLLGSSVSVRSFKLPNPMYYIP

SEQ ID NO: 219211 - protein, 215 aa, Glycine max
  Clone ID: PAT_MRT3847_39975C.1.pep
MVPSAFLFHFLFFFSLLISFSFSDSDSDSDSDSNSVGPTFHRVFPRPLIVEYPEFEAGLRCGAWRVAGEANNLGAWRTIPEECTEYVKEYMTGKGYAVDLEMVSKEAEEFARSVPLGGDGKDAWIFDIDETLLSNLPYYAAHGYGLEVFDHEKFNNWVEKGVAPAIEPSLKLYEDVLNLGFKVILLTGRNERHRSVTVDNLINAGFKEWDQLILR

SEQ ID NO: 219212 - protein, 147 aa, Glycine max
  unsure (1)..(147): unsure at all Xaa locations
  Clone ID: PAT_MRT3847_39976C.1.pep
NHHLALNLMPHTLHKRTPKMTTPKHKKKHQIPXPFLKDMEXHIKKKMEXGKNNKTSLQTQNDLESQRKNNPKLQGMKGSKRANTPAQNPKPQTTAQKHNDQQVTXPPSDPLYAIALLSLIKSPKSTQHTGTEPRMGTXKPXXAEEXD

SEQ ID NO: 219213 - protein, 53 aa, Glycine max
  Clone ID: PAT_MRT3847_39977C.1.pep
IAGKHSSSDRARSSGDRFSRICNKLSLCKSRTYQEKARSHCVWASSIASVSLE

SEQ ID NO: 219214 - protein, 202 aa, Glycine max
  Clone ID: PAT_MRT3847_39978C.1.pep
PTRPASHAHPSVATMAKTLLSGANIVYNGNPLNDLSMTAFLDKFMEKKAKRSTWHGGSQIEPAKQMDVNNQLIGAEILLLAEEDVPPEDLVFHKFYTNKMSSSTKPKKKKKKSADEEAAEELFDVDDGEVDGGGRLSKEDIEKMVQEAEKYKSEDEEHKKKVEAKNALENYAYNMNTVKDDKIGEKLDADKKKIDAIEQAIQ

SEQ ID NO: 219215 - protein, 77 aa, Glycine max
  Clone ID: PAT_MRT3847_39979C.1.pep
WSRVLPRMALEGWGGPTEWGRGFYPGVANESSRARYTCFAAPRLREGSPQWPASPAPGSANGKFLIRWLPKDKKNCN

SEQ ID NO: 219216 - protein, 37 aa, Glycine max
  unsure (1)..(37): unsure at all Xaa locations
  Clone ID: PAT_MRT3847_3997C.1.pep
LGEKIXDEGVDEMIXEGDVDGDXXINXEEXVKVMMXK

SEQ ID NO: 219217 - protein, 50 aa, Glycine max
  Clone ID: PAT_MRT3847_39980C.1.pep
EFLLVHGVGVVMRDLVGGSAESRVHGSDGFRLGAWTCTFACWISLWQNRK

SEQ ID NO: 219218 - protein, 57 aa, Glycine max
  Clone ID: PAT_MRT3847_39981C.1.pep
DGKHQSQHMNLRHVNIVSHKVTSGTLHYCTLFKTERWEVPKMRCQFCEQWCEFFFLF

SEQ ID NO: 219219 - protein, 86 aa, Glycine max
  unsure (1)..(86): unsure at all Xaa locations
  Clone ID: PAT_MRT3847_39982C.1.pep
ESEQFQTQREGFGIGGIDAASLPLLFXIHPSFLILXSNHPQPHTSHIHISGTRIGPPMGFKAHPPXXFKXXAERXHQLLAALVPVS

SEQ ID NO: 219220 - protein, 76 aa, Glycine max
  Clone ID: PAT_MRT3847_39983C.1.pep
RGPLSFDKNPNPLEMFTQTQYHKTSKTYLMLLGTMLNRYVTLLRLAEKDPEPSNREFEVSNKLSFVTTKHQLKSLQ

SEQ ID NO: 219221 - protein, 94 aa, Glycine max
  Clone ID: PAT_MRT3847_39984C.1.pep
SQEGWACQVLQDIPYMNTLAQRTVPSHGNGSSPPSGKRHKAIHSFAMCWQPLNVALIMFIIQHYTRPLHGAILYDALLIKGISRRSSVPLPRTV

SEQ ID NO: 219222 - protein, 37 aa, Glycine max
  Clone ID: PAT_MRT3847_39985C.1.pep
ILFLVHRWKPCTSRGSYDLCMLPYITRFSSYFIESRL

SEQ ID NO: 219223 - protein, 100 aa, Glycine max
  Clone ID: PAT_MRT3847_39986C.1.pep
QRASTKVRGPGKCVVGTAPLAIVEKEVTFVLAQQRPPNGGERTNKESRTKKRPISMMENWWIKDIQQRVSNKQQNMQSAERRTFSLGLLVEAQTWRTRGR

SEQ ID NO: 219224 - protein, 61 aa, Glycine max
  Clone ID: PAT_MRT3847_39987C.1.pep
MVRVSVLNDALKSMYNAEKIGKRQVMIRPSSKVIIKYLTVMQRHGYIGEFEYVDDHRSGKI

SEQ ID NO: 219225 - protein, 65 aa, Glycine max
  Clone ID: PAT_MRT3847_39988C.1.pep
ILLGGAFCGAAMNPGVTFGPAVVSCTWAPPWIFWAGPLFGGGISGLVSRVVFFSRFLEQLPTADY

SEQ ID NO: 219226 - protein, 57 aa, Glycine max
  unsure (1)..(57): unsure at all Xaa locations
  Clone ID: PAT_MRT3847_39989C.1.pep
SHGGDFTRHNGTGGKSIYGVRFXDENFILKHTGPVILSMSNAGLNTNVSQFFICTDK

SEQ ID NO: 219227 - protein, 115 aa, Glycine max
  unsure (1)..(115): unsure at all Xaa locations
  Clone ID: PAT_MRT3847_3998C.1.pep
XTRTXXRIRLEVLDRERPPTSELVDPGINSGPVXAXVPAXPIXSXIRATRNXGXXCYXXXIXIRSXXXTTXKXXXTTXXEXXXRPXGXXAXEXXXTXXRXQRXKXXRXEXXXXRH

SEQ ID NO: 219228 - protein, 688 aa, Glycine max
  unsure (1)..(688): unsure at all Xaa locations
  Clone ID: PAT_MRT3847_39990C.1.pep
MAVAAPATVSSSFYKPSSLPFQTHSYSFPTTLPTLPTPRRAAVVKTPLIVYSKNPIFDIVSSTESRSGGAWDTEFDKDHLRWSHRATNQTRKKALVCYITCFLSSSSSSLLLLLLLLVMAAASNLSTLSSSSLSKPPSSFPFRNTPTNNNASFLHNKSLPNQNSLSHKLSSPLPLACNPKNQNTCVFFDDEDQKPREECGVVGIYGDPEASRLCSLALHALQHRGQEGAGIVAVHDNHLQSVTGVGLVSDVFDESKLSRLPGTSAIGHVRYSTAGQSMLKNVQPFLADYRFGSVAVAHNGNFVNYRSLRARLEHNNGSIFNTTSDTEVVLHLIATSKHRPFLLRIVDACEHLQGAYSLVFVTEDKLVAVRDPFGFKPLVMGRMTNGAVVLASETCALDLIEATYEREVYPGEVIVVDHTVVQSLCLVSHPEPKQCIFEHIYFALPNSVVFGRSVYESRKKFGEILASESPVECDVVIAVPDSGVVAALGYAAKAGVPFQQGLIRSHYVGRTFIEPSQKIRDFGVKLKLSRVHAVLEGKRVVVVDDSIVRGTTSSKNGRLVKEAGAKEFHSXIACQPIDASCYYGVYTPSLEEFLSNLMLVEEIRKFIGSDSLAFLPLXDXLNTLFGYEVFIDCYDYFSGKYPVELEVLQIKRLGVVQYNWEDDXNGNYKSIDVGGWVTNQDEFKIGSV

SEQ ID NO: 219229 - protein, 74 aa, Glycine max
  Clone ID: PAT_MRT3847_39991C.1.pep
MYVFFQVDLVANSLPALNDVTAMELPDIVAEAAKVLAPLPIGFVVFMVHLATIPITGTGINPARSLGATIMYNQ

SEQ ID NO: 219230 - protein, 93 aa, Glycine max
  Clone ID: PAT_MRT3847_39992C.1.pep
ARRRQKGDLRILMDSSLIEWKELGEEASPEHENEWEDRKVGRRKNCLVSTLELAKHSLRRTIEPESVALRPLSAFRPEFRPIIQIDGGQLMTS

SEQ ID NO: 219231 - protein, 223 aa, Glycine max
  unsure (1)..(223): unsure at all Xaa locations
  Clone ID: PAT_MRT3847_39993C.1.pep
PSAGFASIPEAIEDIRQGKMVVVVDDEDRENEGDLIMAAQLATPDAMAFIVKHGTGIVCVSMKEEDLDRLELPLMVNSKYNDEKLCTAFTVTVDAKSLXHGTTTGVSAHDRATTVLALASRDSTPGDFNRPGHIFPLKYREGGVLKRAGHTEASADLAVLAGLDPVAVLCEIVDDDGSMARLPKLRQFAERENLKIVSIADLIRYAVTIHGPCNKIHCMHIYV

SEQ ID NO: 219232 - protein, 58 aa, Glycine max
  Clone ID: PAT_MRT3847_39994C.1.pep
PIRQVKIKKLKPSIFVVEVVVFNIDLRVRHRARTVMLSAPPGSYNNNCRGENLVSHDS

SEQ ID NO: 219233 - protein, 168 aa, Glycine max
  unsure (1)..(168): unsure at all Xaa locations
  Clone ID: PAT_MRT3847_39995C.1.pep
MASFNLSYSSSPALSCPRASKQFKLFNDVPFVRMNSKFPSSDNAIGRIKAKLISGGGDLLSYPNGNGIVIGKNLVGDESVRIEVQPNRTLAADTGLTSNVFSIDNDEFDLDSPTAGFASISEAIEDIRQGKMVVVVDDEDRENEGDLIMAAQLATPEAMAFIXKHGTG

SEQ ID NO: 219234 - protein, 193 aa, Glycine max
  unsure (1)..(193): unsure at all Xaa locations
  Clone ID: PAT_MRT3847_39996C.1.pep
MNSKFPSSDNAFGRIKAMLISGGGELLSHPNGNDIVIGTNLVGDESVQIEVQPNGTLADDTGLTSNVFSMDNNEFDSDSPSAGFASIPEAIEDIRQGKMXXVVVDDEXDRENEGDLIMAAQLATPDAMAFIVKHGTGIVXCVSMKKEDLDRLELPLMVNSKANDEKLRTALTVTVVCSGHFYYFSSMNHHMWS

SEQ ID NO: 219235 - protein, 104 aa, Glycine max
  Clone ID: PAT_MRT3847_39997C.1.pep
LELQILVCMKRLEVKEQNLCNFNSVMKEYKSTLTSERYARHVCLRAFEHLIHRELICFTDNRGQSLSVEFRPVKLLISSAELHQGLRANNSCPPKLLNLMDREG

SEQ ID NO: 219236 - protein, 138 aa, Glycine max
  Clone ID: PAT_MRT3847_39998C.1.pep
NCEKPQKERRGNPRKRREGKRKKNRATPARDPHQPPRQTPQPQKKGKKKKKPKPTKKSKTDPSPKKGKKTRGLPGENKEGRGQGYHKRPRLGPWQKTPFAPQKKPSLVSLKLPQPQQKRNGRKQPKKRRGGPPPREGP

SEQ ID NO: 219237 - protein, 206 aa, Glycine max
  Clone ID: PAT_MRT3847_39999C.1.pep
FELAHVCSNDAGIHRLVNHWLRTHACMEPYIIATRRQLSSMHPIYKLLHPHMRYTLEINALARQNLINGGGIIEASFSPGKYAMELSSAAYKKLWRFDMESLPADLIRRGMAVDDPSMPCGVKLVIDDYPYAADGLLIWSAIKEWVESYVAHFYSDPNSVTSDVELQAWWREIKLKGHSDKKNEPWWPKLDTKEDLSGILTTMIWI

SEQ ID NO: 219238 - protein, 296 aa, Glycine max
  Clone ID: PAT_MRT3847_3999C.1.pep
MEEPSGCNKSAPKGKKDDLYHVLHKVPYGDSPYVRAKHAQLVEKDPEAAIVLFWKAINSGDKVDSALKDMAVVMKQLDRSDEAIEAIRSFRSLCSKQSQESLDNVLIDLYKKCTAARRRQKGLKRKLKLIYQGEAFNGKLTKTARSHGKKFQVSIKQETSRLLGNLGWAYMQKMNYMMAEVVYRKAQIIDPDCNKACNLGLCLIRQARYEEAQLVLEDVLKGNLPGSDDSKARKRAQDLRTELRSMLPPPHFSDLLGLDDEFIKGLEQLMNEWGPIRSKRLPIFEEISSFRDQLAC

SEQ ID NO: 219239 - protein, 33 aa, Glycine max
  Clone ID: PAT_MRT3847_399C.1.pep
HDIILPFIQNRLYLEYIIIFKLNSHLNQIIDFL

SEQ ID NO: 219240 - protein, 56 aa, Glycine max
  Clone ID: PAT_MRT3847_39C.1.pep
CSIFPFPCLHLHNFFIVKPYFINLLLNFYYVFPVKTLPLSILFPLHFFLLYPFSFL

SEQ ID NO: 219241 - protein, 76 aa, Glycine max
  Clone ID: PAT_MRT3847_3C.1.pep
QVGCLAQGLKKSKQGLDHLHLMHVFKSLRIMQNQEIKSNHYLTVIRSHISPDNYEVLGLPYHDFCSDVLTSSLLCF

SEQ ID NO: 219242 - protein, 44 aa, Glycine max
  Clone ID: PAT_MRT3847_40000C.1.pep
EKYTEGYLNFPATTPYAYLISSNEVSILDGYICNPNTLPCLNTL

SEQ ID NO: 219243 - protein, 106 aa, Glycine max
  Clone ID: PAT_MRT3847_40001C.1.pep
TRLQECSGWQKIGAIVNLGSFYFVGVPSSVVLAFVLHMKGKGLWLGIVSAFIVQVILFGVITIRTSWDKEANKAAMRVKDTKIPQELPQRDPFTITENELMSSLQN

SEQ ID NO: 219244 - protein, 92 aa, Glycine max
  Clone ID: PAT_MRT3847_40002C.1.pep
DIVIAAMSVVQRTPLICSVLHFVTTSAFNGRLVLVIVIPTFTQSSPLFCYSYISNLTSDCLTKMPHQSPNPVLILLIARHCAASYYASPCRR

SEQ ID NO: 219245 - protein, 70 aa, Glycine max
  unsure (1)..(70): unsure at all Xaa locations
  Clone ID: PAT_MRT3847_40003C.1.pep
LRKYRDLYRINNVTLLRHNVRLYFSFARMLMLPTYCRLISFFTXIWLPNLGLCCTPTFTMCSTRRFFRIH

SEQ ID NO: 219246 - protein, 545 aa, Glycine max
  Clone ID: PAT_MRT3847_40004C.1.pep
SQKWVLWHGFNSSRIGSSTNLAHENSSIKTRVRKEGGIPPLVHLLEFADTKVQRAAAGALRTLAFKNDENKNQIVECNALPTLILMLRSEDAAIHYEAVGVIGNLVHSSPDIKKEVLLAGALQPVIGLLSSCCSESQREAALLLGQFAATDSDCKVHIVQRGAVRPLIEMLQSSDVQLKEMSAFALGRLAQDTHNQAGIVHNGGLMPLLKLLDSKNGSLQHNAAFALYGLADNEDNVSDFIRVGGIQRLQDGEFIVQATKDCVAKTLKRLEEKIHGRVLNHLLYLMRVSEKAFQRRVALTLAHLCSADDQRKIFIDYNGLELLMGLLGSYNPKQQLDGAVALCKLANKAMTLSPVDAAPPSPTPQVYLGEQYVNNATLSDVTFLVEGKRFYAHRICLLASSDAFRAMFDGGYREKEARDIEIPNIRWEVFELMMRFIYTGSVDITLDIAQDLLRAADQYLLEGLKRLCEYTIAQDISLENVSSMYELSEAFNAISLRHTCILFILEHYDKLGGKPGHSQLIQHIIPEIQNYFVKAITKANSNIQP

SEQ ID NO: 219247 - protein, 49 aa, Glycine max
  Clone ID: PAT_MRT3847_40005C.1.pep
NSILCFLELIKFLFIILYISDALNTIIPVISIFHYFCHLSKSIIFTILL

SEQ ID NO: 219248 - protein, 38 aa, Glycine max
  Clone ID: PAT_MRT3847_40006C.1.pep
ELLVCGCKCKSSFSSGGVPLSEKKVSSHNNKLTKAISG

SEQ ID NO: 219249 - protein, 88 aa, Glycine max
  unsure (1)..(88): unsure at all Xaa locations
  Clone ID: PAT_MRT3847_40007C.1.pep
KDYRSRLGAXKSFRIKAEPFFEKAKAAGEYLIRVSFGQALIASIVIVYTTIIALVTSSRSEEDNRGRRGGRSYDSGFTFYFNPVDLFW

SEQ ID NO: 219250 - protein, 130 aa, Glycine max
  unsure (1)..(130): unsure at all Xaa locations
  Clone ID: PAT_MRT3847_40008C.1.pep
GELTFPQGTFLSAKRMPLSIGGGAGANKANLINMPNAALSMRRYSVGDLLFQASKMTSPYIKCTVSIFIAFRNLTDDTITFEAIPHKLVQFXXIQEQVVLKYSQEEFLTARSTQVRPATTLVADGRPYFY

SEQ ID NO: 219251 - protein, 116 aa, Glycine max
  Clone ID: PAT_MRT3847_40009C.1.pep
HNRSEDPSYMTWLATLILYQKGSRQTCPGPSFEKSSIGKSMGLTHGTAESQMHVLEPGEIALRRGPVALNKRATRHMGEGYPPSRECINPRGGEGTNTRCRIIRRTQSRLPLDAQL

SEQ ID NO: 219252 - protein, 60 aa, Glycine max
  Clone ID: PAT_MRT3847_4000C.1.pep
TLYPLHNRNHATSTVELLLVQSCRQLVFKTFLITPFFFARRRHLIAAGRKNSFQGRRHAT

SEQ ID NO: 219253 - protein, 74 aa, Glycine max
  Clone ID: PAT_MRT3847_40010C.1.pep
YDLTEDPYDHLFHEWVISYTCFTDRAYYRADRLQGDRVEDPSIYKLYDLSYNLCLIERLLSSRVDERYEAWVIA

SEQ ID NO: 219254 - protein, 52 aa, Glycine max
  Clone ID: PAT_MRT3847_40011C.1.pep
ITRRGTEKKGAGEKNPGGGGAPFLTGGEGPGGKKGAPTPGGGQSGQSKGGGG

SEQ ID NO: 219255 - protein, 58 aa, Glycine max
  Clone ID: PAT_MRT3847_40012C.1.pep
MNTAGHLSQMPPLDVPPIHDTLRPPFNAESGEFAVTYPDSDKRITREDRVELRVFVSA

SEQ ID NO: 219256 - protein, 102 aa, Glycine max
  Clone ID: PAT_MRT3847_40013C.1.pep
QILLMRMGLRKTLVFFRKIRRPIFPHFPREHIPYNIPKPLRRTFREGPGGRNGVFGQRGINNTGGGKSKWGQRVILVGGIININVKTLGFALGRGVPGGFNG

SEQ ID NO: 219257 - protein, 215 aa, Glycine max
  Clone ID: PAT_MRT3847_40014C.1.pep
MAVKVYGPHCASTKRVLVCLVEKEVEFEVVPVDVTKGEQKDPEYLKLQPFGVVPVIKDGDYTLYESRAIMRYYAEKYRSQGVELLGKTIEERGLVEQWLEVEAHNFHPQAYNLCLHGLFGSLFGVTPDPKVIEESEAKLVQVLNIYEERLSKTKYLAGDFFSIADISHLPFLDYVVNNMGKKYLLEERKHVGAWWDDISSRPSWNKVLQLYRAPI

SEQ ID NO: 219258 - protein, 58 aa, Glycine max
  Clone ID: PAT_MRT3847_40015C.1.pep
IVLCFPFNNIKLVELLRLLYFIPADCSSTLILCDYNYHFVPLIIPNHNVAIKCVCEGL

SEQ ID NO: 219259 - protein, 142 aa, Glycine max
  unsure (1)..(142): unsure at all Xaa locations
  Clone ID: PAT_MRT3847_40016C.1.pep
PPPGGAKKRQGGVGPQKKNIFPKPRGGGLFPKGQNPASPPPGGGPQKWGGPLGPRFPQKPLGGRCFSPXGGKNAPSGFFPPKGGPRVPGPPPPKGPKRGALLGVKDRGNLGEPVFVSEKPPGGGLGNQKEGAPRGPNQNFLG

SEQ ID NO: 219260 - protein, 200 aa, Glycine max
  unsure (1)..(200): unsure at all Xaa locations
  Clone ID: PAT_MRT3847_40017C.1.pep
MTRPKIYLFGDSITEESFSVGGWGASLAHHFSRTADVVLRGYSGYNTRWALKVLERVFPGSHGVDGGTGTAPIALTVFFGANDACVPDRCSAFQHVPLHEYKQNLHSIVSFFXVLLIPPPPIYEDARCWYGIHVNPQGMXERTNEAAXDGLHLTQSGNQVVFEEVITKLREEGLNLESIPVDLPLIADIDPNDPLKSFLQ

SEQ ID NO: 219261 - protein, 113 aa, Glycine max
  Clone ID: PAT_MRT3847_40018C.1.pep
MFTPQRKAWPAAAAFTPLRGGSASAKGKAVAEGPPPPPLGSLTETTVAVGLDAAGDAEDWKRFTKLGLLDEAVMQRKDHEALVEKVSRLERELQLVANVLNIVIDVTIDADMV

SEQ ID NO: 219262 - protein, 40 aa, Glycine max
  Clone ID: PAT_MRT3847_40019C.1.pep
KVVWLEKLLYNLVKGEEDMEDIIYVNCKILICVLIYEEKF

SEQ ID NO: 219263 - protein, 66 aa, Glycine max
  Clone ID: PAT_MRT3847_4001C.1.pep
HTTQTSGTGIHLKIQTSLNLYTNISPTLIKNNKPNQNFIETVTLLTTNHISKLLNQNFNSDTFYSL

SEQ ID NO: 219264 - protein, 79 aa, Glycine max
  Clone ID: PAT_MRT3847_40020C.1.pep
FLESKSPFLEDLSSSAESSDNSSIGLERSVFHAKITRLALAEEELQDNFKGLISLTTPAKRKTKQGLSISRYDFSAHVQ

SEQ ID NO: 219265 - protein, 509 aa, Glycine max
  Clone ID: PAT_MRT3847_40021C.1.pep
MALLLIIPISLVTLWLGYTLYQRLRFKLPPGPRPWPVVGNLYDIKPVRFRCFAEWAQSYGPIISVWFGSTLNVIVSNSEAESYGLIISVWFGSDPKRHRSKLGVSRDGKDLIWADYGPHYVKVRKVCTLELFSPKRLEALRPIREDEVTSMVDSVYNHCTSTENLGKGILSRKHLGVVAFNNITRLAFGKRFVNSESVMDEQGVLFNAIGETGLKLGASLAMAEHIPWLRWMFPLEEGAFAKHGARRDRLTRAIMAEHTEARKKSGGAKQHFVDALLTLQDKYDLSEDTIIGLLWDMITAGMDTTAISVEWAMAELIRNPRVQQKVQEELDRVIGLERVMTEADFSNLPYLQCVTKEAMRLHPPTPLMLPHRANANVKVGGYDIPKGSNVHVNVWAVARDPAVWKDPLEFRPERFLEEDVDMKGHDFRLLPFGSGRRVCPGAQLGINLAASMLGHLLHHFCWTPPEGMKPEEIDMGENPGLVTYMRTPIQAVVSPRLPSHLYKRVPAEI

SEQ ID NO: 219266 - protein, 86 aa, Glycine max
  Clone ID: PAT_MRT3847_40022C.1.pep
TVSFISIHGLTQASFFVFLGPYSCYDAIDFYRVIGFSCPLPPFILGLWPNSAKKKIFCVWIMIFFFFKLFFFLNRFKGPDVNVPWK

SEQ ID NO: 219267 - protein, 184 aa, Glycine max
  Clone ID: PAT_MRT3847_40023C.1.pep
VQEELDRVIGLERVMTEADFSSLPYLQCVIKEAMRLHPPTPLMLPHRANANVKVGGYDIPKGSNVHVNVWAVARDPAVWKDPLEFRPERFLEEDVDMKGHDFRLLPFGAGRRVCPGAQLGINLVTSMLGHLLHHFCWTPPEGMKPEEIDMGENPGLVTYMRTPIQALASPRLPSHLYKRVPAEI

SEQ ID NO: 219268 - protein, 242 aa, Glycine max
  unsure (1)..(242): unsure at all Xaa locations
  Clone ID: PAT_MRT3847_40024C.1.pep
MALLLIVPISLVTLWLGYTLYQRLRFKLPPGPRPWPVVGNLYDIKPVRFRCFAEWAQSYGPIISVWFGSTLNVIVSNSELAKEVLKEHDQQLADRHRSRSAAKFSRDGKDLIWADYGPHYVKVRKVCTLELFTPKRLESLRPIREDEVTTMVESVYNHCTTTGNLGKAILVRKHLGSVAFNNITRLAFGKRSVNSEGVMDEQGVEFKAIVENGLKLGASLAMAEHXPWLRWMFPLEERAFAK

SEQ ID NO: 219269 - protein, 90 aa, Glycine max
  Clone ID: PAT_MRT3847_40025C.1.pep
PPPISGKVLNHIDQVKPNFFFSAQNLEKGRWDNKKDIIFGLVSGLKTKKDPFFLKKPFFFLKIFLAPVRWNKFSFPYFFWEKKKIFLAFH

SEQ ID NO: 219270 - protein, 106 aa, Glycine max
  Clone ID: PAT_MRT3847_40026C.1.pep
RSRGALRKCGSQKTERSDDEANPERPASLSRDAMSKVTSLFATVTGSRRRTGAPRSQRGTRLKATTDRAFLVSTGSPTPARATERACPSLPGVRAGNSQPIHGSTT

SEQ ID NO: 219271 - protein, 29 aa, Glycine max
  unsure (1)..(29): unsure at all Xaa locations
  Clone ID: PAT_MRT3847_40027C.1.pep
SDFWYGVEGYXYKRXEDRVSRLFIDNINI

SEQ ID NO: 219272 - protein, 62 aa, Glycine max
  Clone ID: PAT_MRT3847_40028C.1.pep
TVLNGDTHTVVDVLMHRGTFGHGHFGKIAILCCSSCLSEGVMGFKKNCDLSGGKILFTQCSR

SEQ ID NO: 219273 - protein, 62 aa, Glycine max
  Clone ID: PAT_MRT3847_40029C.1.pep
GERGAFDDPSCSCPGILQTGPNKHFCNLREQPGHHVGKTIKKRENHYGCLSSLVVPLLSSSR

SEQ ID NO: 219274 - protein, 66 aa, Glycine max
  unsure (1)..(66): unsure at all Xaa locations
  Clone ID: PAT_MRT3847_4002C.1.pep
RGSLNSLRLVSMARGACGGEXRVSCRRSTALSGNTCGRLDLFQKATHPFFLRNLRQFASELECHPR

SEQ ID NO: 219275 - protein, 101 aa, Glycine max
  Clone ID: PAT_MRT3847_40030C.1.pep
QKCDVYSFGVLALEILLGEHPGDVITSLLTCSSNAMVSTLDIPSLMGKLDQRLPYPIKQMATEIALIAKTAIACLTESPHSRPTMEQVAKELGMSKSSLVY

SEQ ID NO: 219276 - protein, 82 aa, Glycine max
  unsure (1)..(82): unsure at all Xaa locations
  Clone ID: PAT_MRT3847_40031C.1.pep
NVNFTIVTSITTTIYYNXPQKPLPXGVXQXKQKFLRKKPPXGGGGGGQIFLVASKPRENHCKIRENLGHVYKTDQLLEIPLN

SEQ ID NO: 219277 - protein, 42 aa, Glycine max
  Clone ID: PAT_MRT3847_40032C.1.pep
RLLIGKEGTEYNDVKPVLISAYSGNNGYCFQVLTGFGAAGEK

SEQ ID NO: 219278 - protein, 76 aa, Glycine max
  unsure (1)..(76): unsure at all Xaa locations
  Clone ID: PAT_MRT3847_40033C.1.pep
VPQGGKGTLRKQLRKPRAARKSAXPTTGGVKKATSLSSWYRCSFVRLGNTQKSTELLIRKLPFQRLVREXAQDFKT

SEQ ID NO: 219279 - protein, 161 aa, Glycine max
  unsure (1)..(161): unsure at all Xaa locations
  Clone ID: PAT_MRT3847_40034C.1.pep
DGDMGDAHMAMQAKLMIHALRKXSHSLSLSQSILVFINQVKSKISTLGGYGGPTEFTXGGNALNFYASVRLNIKIIGFVNKGEYTLRIHVLVKVVNNNHAPAFKTAHFDIDFGKGVIRXSDIIYLIVKYKIINNIGSFFESNGRNFHGKDALNIFLADIDG

SEQ ID NO: 219280 - protein, 39 aa, Glycine max
  Clone ID: PAT_MRT3847_40035C.1.pep
AHQNRQDTTLKHILQRQKKNHKEQSFKYQGSIFHHQQII

SEQ ID NO: 219281 - protein, 41 aa, Glycine max
  Clone ID: PAT_MRT3847_40036C.1.pep
SFAFLSHLLFFSFFLLFLLDICFCSFASLIISQNLISTIIV

SEQ ID NO: 219282 - protein, 82 aa, Glycine max
  Clone ID: PAT_MRT3847_40037C.1.pep
RGSFSLSLSSVNSCLLYLVYFVIVRFLSDSISLVTRILCILLITFPSGFLCVISQFSSVQYVVHSFNSSSTFLGFGFQLLSP

SEQ ID NO: 219283 - protein, 35 aa, Glycine max
  Clone ID: PAT_MRT3847_40038C.1.pep
WDISPRGMNINNDTPLHYSQVSFKYSSGVGLLLFN

SEQ ID NO: 219284 - protein, 111 aa, Glycine max
  Clone ID: PAT_MRT3847_40039C.1.pep
LLAPLFYSYMAVELHTSLPSHFLPDDDDHDDIVSSQHSHRNDIHHALALNPLPEVPMNDNDDDFISELTHRMTRFLLPDDDTSDFSSIGSHSMDLENSVLFYLSTSISIIT

SEQ ID NO: 219285 - protein, 66 aa, Glycine max
  Clone ID: PAT_MRT3847_4003C.1.pep
YPLKISSVCVEKKKKKKKKKKKKKKKKKWLGSKKRNNPTEPRKPNYNVSKNRTLKMEWGAVIKKPL

SEQ ID NO: 219286 - protein, 55 aa, Glycine max
  Clone ID: PAT_MRT3847_40040C.1.pep
SVVIIEMQFLCFQKTVWISKGQKMRNRCFRVGLRVFVVGIMMLGSIWITFNASPG

SEQ ID NO: 219287 - protein, 107 aa, Glycine max
  Clone ID: PAT_MRT3847_40041C.1.pep
HSCSKSCDLCPMHMQMQQTRQDLKTTAAPIWTYTHSSTPSSSGDYTSDAPSNQVAEAPDKLIQDERIIGDMLIRRLPPHHSALRPRSASSPRQHVSPSVTHADSCMR

SEQ ID NO: 219288 - protein, 43 aa, Glycine max
  Clone ID: PAT_MRT3847_40042C.1.pep
QVTVCYYNREFCRLFIYDDTCSCINDYHNAFPIKNSSVTARVG

SEQ ID NO: 219289 - protein, 96 aa, Glycine max
  Clone ID: PAT_MRT3847_40043C.1.pep
IKGLAPPKASWGCRREQMVFRALGGNKTSPWSGGSPLGKKSPKFCLGGQTPKAFGAPKKFWTAHCLISGKTGLWAKTYDREFKWGEPFLSGGFFYP

SEQ ID NO: 219290 - protein, 91 aa, Glycine max
  Clone ID: PAT_MRT3847_40044C.1.pep
LVLRLHLDRPIRTGVRSKHRMRPKCYEVAAKMESTLLKLRPDDVDTPRGCMVDVKTTESTIALVEYETGGTNMGKSHLAKHYADIMNGGRD

SEQ ID NO: 219291 - protein, 33 aa, Glycine max
  Clone ID: PAT_MRT3847_40045C.1.pep
EPITMSPNKHSTHTTHWWANLLTYCTCFIYHSL

SEQ ID NO: 219292 - protein, 43 aa, Glycine max
  Clone ID: PAT_MRT3847_40046C.1.pep
AFIHSYASSTVSSLLPLTQVLSKALLIQALHNIFLFLFKHFLW

SEQ ID NO: 219293 - protein, 59 aa, Glycine max
  Clone ID: PAT_MRT3847_40047C.1.pep
PIPLCRPYLITQLQHFQAIARFSGSTYRLSVITFLHKCSAGSHEPMISTPSKLQFASMI

SEQ ID NO: 219294 - protein, 287 aa, Glycine max
  Clone ID: PAT_MRT3847_40048C.1.pep
MRNANMVLVLLFLMAIFSAMTTPSTSAIDTFIFGGCSQAKFTPGSAYENTVNSLLTSLVNSAAFANYNNFTVPASSDTVYGLFQCRGDLPNDQCSRCVSRAVTQLGTLCFASCGGALQLDGCFVKYDNTTFIGVEDKTLVSKKCGPSVGLTSDALSRREAVLAYLQTSDGVYKTFRTSGYGDFQGVAQCTGDLSPSQCQDCLSDSIQRFKTDCGPTTWAEIYLAKCYARYSEAGTRSRANNNDDSNHNDDEIEKTLAILIGLIAGVALIIVFLSFLSKVCEKHKGGK

SEQ ID NO: 219295 - protein, 161 aa, Glycine max
  Clone ID: PAT_MRT3847_40049C.1.pep
ENLLRNVLSAVPQDISRDAWLDALPHALAVGLVKTDIKTEQKGETSGTTATSAAADGWTITVATAGDSRCILHTQGGADALLTVDHTLEDNAEEKARDTDSGGEIGRLNVLGGNEGGPLGCWPRGWRLSRSICDTDGEKYIAPIPDVKPDKTPNAGGKPII

SEQ ID NO: 219296 - protein, 56 aa, Glycine max
  Clone ID: PAT_MRT3847_4004C.1.pep
PTRPGIFTAADLVWGRSQGSPCIERVEQGVGLLHHPCRSFSRILLPFTAGRMTRVV

SEQ ID NO: 219297 - protein, 40 aa, Glycine max
  Clone ID: PAT_MRT3847_40050C.1.pep
RCKIMIIRWGMCRVMGQCYPLLLSWKRPNSCVMYGCDCVI

SEQ ID NO: 219298 - protein, 607 aa, Glycine max
  Clone ID: PAT_MRT3847_40051C.1.pep
MASMARGRADVNSRKKLVTAVLVLVIVGGFFYFYSQNSDSSSVVYGDKSLSHFGLGGDKDDGESSSTVVGGEGSVVPKSIPVCDDRLSELIPCLDRNLIYQTRLKLDLSLMEHYERHCPTPDRRYNCLIPPPPGYKVPIKWPKSRDQVWKANIPHTHLATEKSDQNWMVVKGETIVFPGGGTHFHYGAGKYIASIANMLNFPNNDINNGGRVRSVLDVGCGVASFGGYLISSNVIAMSLAPNDVHQNQIQFALERGIPAYLGVLGTQRLPYPSRSFELAHCSRCRIDWLQRDGILLLELDRLLRPGGYFAYSSPEAYAQDEEDRRIWREMSTLVERMCWKIASKKDQTVIWVKPLTNSCYLKRLPGTKPPLCRSDDDPDAVWGVKMKVCISRYSDQMHKAKGSDLAPWPARLTTPPPRLAEIHYSTEMFEKDMEVWKQRVRNYWSKLASKIKPDTIRNVMDMKANLGSFAAALKDKDVWVMNVVPENEQKTLKIIYDRGLIGTVHNWCEAFSTYPRTYDLLHAWTVFSDIIKKECSPEDLLIEMDRILRPKGFIIVHDKRSVVEYIKKYLPALHWEAVTIYDVDDDDTVIIIQKKMWLTSQSIKVSE

SEQ ID NO: 219299 - protein, 615 aa, Glycine max
  Clone ID: PAT_MRT3847_40052C.1.pep
MAGMARGRADVKSRKNLVTTTVLVLVTVGGFFYFYSQNSDSSSSVEYGAKSLSHTGLGGDKDDGVSSSTLVGGEVIAVPKSIPVCDDRLSELIPCLDRNLIYQTRLKLDLSLMEHYERHCPTPDRRFNCLIPPPPGYKVPVKWPKSRDQVWKANIPHTHLATEKSDQNWMVVKGETIVFPGGGTHFHNGADKYIASIANMLNFPNNNINNGGRVRSVLDVGCGVASFGGYLLSSNVIAMSLAPNDVHQNQIQFALERGIPAYLGVLGTQRLPYPSRSFELAHCSRCRIDWLQRDGLLLLELDRLLRPGGYFAYSSPEAYAQDEEDRRIWREMSALVERMCWKIAAKKDQTVIWVKPLTNSCYLKRLPGTKPPLCRSDDDPDAVLGVKMKACISRYSDQMHKAKGSGLAPWPARLTTPPPRLAEIHYSTEMFEKDMEVWKQRVHNYWSKLASKIKPDTIRNVMDMKANLGSFAAALKDKDVWVMNVVPENEQKNLKIIYDRGLIGTVHNWCEAFSTYPRTYDLLHAWTVFSDIIKKECSPEDLLIEIDRILRPKGFIIIHDKRSMVEYIKKYLSALHWNAVTIYDVDQGKDDDDDEVVLIIQKKMWLTSESIKVSE

SEQ ID NO: 219300 - protein, 72 aa, Glycine max
  unsure (1)..(72): unsure at all Xaa locations
  Clone ID: PAT_MRT3847_40053C.1.pep
MRPMQXPXASASGAXPAPATTNNXNKEQRPXXRCKXLTLXXPQXETXLAVPLPLXPXXXXXXXASGGQSERS

SEQ ID NO: 219301 - protein, 115 aa, Glycine max
  unsure (1)..(115): unsure at all Xaa locations
  Clone ID: PAT_MRT3847_40054C.1.pep
MGQRYENNVFKSHISNIEAAPGMTQTVHLPPPLQTDPTIRGKQNGKPKGSRNAKSAAHRPYADSTNSTAVNNCRSDSSLXLLTKKFASLIHDAKDGTLDLNRTAEILEVQKKRIY

SEQ ID NO: 219302 - protein, 175 aa, Glycine max
  Clone ID: PAT_MRT3847_40055C.1.pep
YPTRPDPWYIEVGESIVNSLNLYTKVEGGFASIKDVTTMQLEDHQHSFFLAETCKYLYLLFDDSFVHENNYVFTTEGHPLPVLSTWHEELPEAYIPTNWTFVKRQPRVNRISAMSLQVCPAMNLKSGQHIESACHIPDARSDYRCLTDEDCGVDATTCRRRSCSIAGYCGLWLII

SEQ ID NO: 219303 - protein, 58 aa, Glycine max
  Clone ID: PAT_MRT3847_40056C.1.pep
KHLTIPKTITSLCPPTPMTFSLSRRGETNNLPFIQNQLAYYSKPISLNSNHMLPEPNT

SEQ ID NO: 219304 - protein, 66 aa, Glycine max
  Clone ID: PAT_MRT3847_40057C.1.pep
SQRWIGNKILINLNSGSILSAHKLSWGIKGRKHKMPTHSWGHRIQMNFEWYRLIPCLWLKFATVSK

SEQ ID NO: 219305 - protein, 87 aa, Glycine max
  unsure (1)..(87): unsure at all Xaa locations
  Clone ID: PAT_MRT3847_40058C.1.pep
PWGFLGPFPLGGGVGGSWVWRALWVFLFCWRFFFMAPGGLGAISQLQHRGFGGSICFNSWFVGVALPRGTFFLGFFPPDPPRXGVVF

SEQ ID NO: 219306 - protein, 63 aa, Glycine max
  unsure (1)..(63): unsure at all Xaa locations
  Clone ID: PAT_MRT3847_40059C.1.pep
ISSGACAIREQLVDLDLRILMGSSLIEXKRIRRIXSPYNENKXEDRKVGRXKDFLVQGIKLAK

SEQ ID NO: 219307 - protein, 106 aa, Glycine max
  unsure (1)..(106): unsure at all Xaa locations
  Clone ID: PAT_MRT3847_4005C.1.pep
AMSMPIGDLYLIPWIIPEPEFNIVRAXKNDQRLILAADGLWDAMTTEXACHDANKTILLCHTNMVTTAQQARMRMTGSCRSDTCAYLTKLAIHRGSSDHIIVNGID

SEQ ID NO: 219308 - protein, 699 aa, Glycine max
  Clone ID: PAT_MRT3847_40060C.1.pep
MGCANSELNLQIFILSMLIFTASLCVGDTDPLDVAAINSLYVALGSPPLEGWKAIGGDPCLEQWEGVSCVFSNITALRLGGMNLSGQLGSNLDFPSIIDMDLSNNQIGGTIPSTLSPTLRNLSLSANHLNGSIPDALSSLTQLSDLSLKDNHLNGQIPNAFLQLTGLMNMDLSGNNLSGKLPPSMGNLSSLITLNLQNNQLSGTLFVLQDLPLQDLNIENNIFSGPIPPELLSIPNFRKDGNPFNTTIIPSPPAAFPAPAAMAPSPEKSPWKMAHNPSDTIKAPIPAIAGRSFKTTKLVWIVGAGFLIFIALGVCLLMLWCFKRRQENKKYKKHNTNVYTRSLHKRTSSDSPFEATTDKEKGWSSKLPPLQPAPPHHIPIIPGENLIINQAISTTATKRQIVTNSIKVYTVASLQQYTNSFSQENYIGEGMLGPVYRAELPDGKLLAVRKLNATASMGQNHEQFLQLAFSISKIQHANIVKLMGYCAEYSQRLLVHEYCSNGTLHDALHTDDKLQIKLSWDNRIWVSLGAARALEYLHEHCQPPIVHQNFRSANVLLNDNLEVRVSDCGLGSLLSSGSASQLVGCHLTANGYSAPEFEYGSYTLQSDVFSFGVVMLELLTGRKSYDSSLPRGEQFLVRWAVPQLHDIDALSKMVDPSLNGEYPKKSLSRFADIISSCIQHEPEFRPVMSEIVQDLLRMM

SEQ ID NO: 219309 - protein, 93 aa, Glycine max
  unsure (1)..(93): unsure at all Xaa locations
  Clone ID: PAT_MRT3847_40061C.1.pep
ESYRVPTVPLETSQNQLXPPSWSPNPSAPKRPLHAPNPWVPKPSAQQRSPPSAPPRPRQFRTRSPRPSAQRRPLRPQQQQRRSVRCSQEASRL

SEQ ID NO: 219310 - protein, 95 aa, Glycine max
  Clone ID: PAT_MRT3847_40062C.1.pep
TTCFLTFHTLSSSFQDMDLDDDTDGAHEKRKEGEGISLPAFGLATYKMQGSVWVSGNCGRDQERLVSLLSVADSWLKQLRVQHHDFNYFMGARHG

SEQ ID NO: 219311 - protein, 141 aa, Glycine max
  Clone ID: PAT_MRT3847_40063C.1.pep
MVAAISEDPLTSSNGTIPRRPKGRQVSSRYMSHSPSPSPSPSSTTTTTTSTSTSTTTSSSRRFPSPLLSHSSNSSTPLVPKRSQSVDRRRPRPATPLPEAAKLLVTSTRSLSVSFQGEAFSLPVSKTKAVVVTPSAWKAVT

SEQ ID NO: 219312 - protein, 190 aa, Glycine max
  Clone ID: PAT_MRT3847_40064C.1.pep
VRVNPILPPPPAPKKPIFTDAGMIDYLSGDAYKTEASHEQSEPTSYAVPLHSSPTNPASTAATLSSSPPYSPSTPSRILSKQPVYDEPAPINKSSESLPLSPLETQSPGFLLPPPSSYNQRQQFFEQQGVPHSSSGFSSADDSLLAQTQNLSLNSSTPTKQEKTEDVLFKDLVDFAKSKTSSSSKPSRPF

SEQ ID NO: 219313 - protein, 78 aa, Glycine max
  Clone ID: PAT_MRT3847_40065C.1.pep
FFQISILEGSFGASILLLINSAQEVVLHSCPSVRLFLWASHLSQAFAAAYTVWPALCFLELCKCCVILSCFCKSPPFF

SEQ ID NO: 219314 - protein, 84 aa, Glycine max
  Clone ID: PAT_MRT3847_40066C.1.pep
LRKAFLDRCHTAMHGGCGVIRIPPLWLGGPWRLSRERMATRVGSFRHSFLEKSKERLLSIRTTNTLVASTAMTMPPPSVPFSTR

SEQ ID NO: 219315 - protein, 59 aa, Glycine max
  Clone ID: PAT_MRT3847_40067C.1.pep
FRDIHKHVMIVHHHIVRRFTSDKFRPRSIPGNKAPQPQYTFRTLIDHIVIYCRFKKHFA

SEQ ID NO: 219316 - protein, 88 aa, Glycine max
  Clone ID: PAT_MRT3847_40068C.1.pep
GNYGFVGPSKGNPGFFVSLETVPLQDFDVRVALKSRRLMFFFKSPGLQKKIILRPPSLFPISLIIICSCNVPNTHIALVFPPWKGNSL

SEQ ID NO: 219317 - protein, 289 aa, Glycine max
  Clone ID: PAT_MRT3847_40069C.1.pep
MAQLQKQQNFCFVLLLFVALGIAYAREAFEVSFQQNYKIAWGKHHIFFLQHGREVQLSIDKTSGAGFRSKLEYASGFFQMRIKIPNKDCRGVVTAFYLTSTAYKHLGAKHDEIDFEFLGNNGQPHTLQTNVFTNDEGGREQRHSLWFDPTIIFHTYGVLWNQHQIVFYVDEIPIRVFKNYSNVGVSFPSQQMHVTASIWNGEPWASNGKRIDWKQAPFTAQFQGFNIHGCQTQNYNKHACYSPYLWWNDKKHWKLNSQQQRAYEDVRKKHLLYDYCSDRGELHKECQIN

SEQ ID NO: 219318 - protein, 60 aa, Glycine max
  Clone ID: PAT_MRT3847_4006C.1.pep
QSILDKTLKRDQEYAATIIIIIIIIINFTFEFRLKSQLQSNIVPSSSCLSSNYARAEFRA

SEQ ID NO: 219319 - protein, 86 aa, Glycine max
  unsure (1)..(86): unsure at all Xaa locations
  Clone ID: PAT_MRT3847_40070C.1.pep
RGKVLSFFVLPTKGPPPSWLRTFCQEVKKIICKLAKKGLTPFKIVAILKNFHGFXQVNSLTCRKIPLILQGYRTLPENSQEPYHIS

SEQ ID NO: 219320 - protein, 65 aa, Glycine max
  Clone ID: PAT_MRT3847_40071C.1.pep
ILKEVVMMHAHSAIFVDMMYPETTGFGAYHAQSRYTNLHFGVTELVKYLDGHFKKSMNDHLVNGN

SEQ ID NO: 219321 - protein, 67 aa, Glycine max
  Clone ID: PAT_MRT3847_40072C.1.pep
SLEGHMNIKERVATTSIISLPKGKISVVRLGWSDLKFLDYYLLLISHILEMENIIDLRLVIMLILVY

SEQ ID NO: 219322 - protein, 80 aa, Glycine max
  Clone ID: PAT_MRT3847_40073C.1.pep
NGHPDQTSEGFCLGKIKPLVERREGSKKVFLMVGFFEKNWFPLVNMGFICNVAQCTPVPFLVKCNVESICFSSTPFSNLF

SEQ ID NO: 219323 - protein, 55 aa, Glycine max
  Clone ID: PAT_MRT3847_40074C.1.pep
TQTSSSRKRLQLHSIEKVQREHNVTTQSNNPLLLNLISFLPSPVAKLAPKQQAFP

SEQ ID NO: 219324 - protein, 187 aa, Glycine max
  Clone ID: PAT_MRT3847_40075C.1.pep
MNQKAHNFYLGMDVKRIMDGDRVGNTNWVIKEDGVEDSNDSSSIGFNSEDSICSSSSSELAEDASSSTSSNSPTHSNGPLFELSDLMSHLPIKRGLSMFYQGKAQSFTSLARVESIEDLPKKGTPYSKRMKSCKSFGGGLDSQRLLCSPKSTISKKTSRGSFASVLSKRGSFLGGSRYSIAVQQKNF

SEQ ID NO: 219325 - protein, 38 aa, Glycine max
  Clone ID: PAT_MRT3847_40076C.1.pep
QFTLRIHLSLVLQQGLLKTMFTLKMKIEKEGKRKHRLT

SEQ ID NO: 219326 - protein, 93 aa, Glycine max
  unsure (1)..(93): unsure at all Xaa locations
  Clone ID: PAT_MRT3847_40077C.1.pep
SLRHSSPGKVCFQSSFXTVVLRIDVKFNAPCNGCLVRIAFITCVFHDFKNIILWYDGLVNLNFNCFLSSYIHLTQDVLFQHEQYSFITACCIL

SEQ ID NO: 219327 - protein, 178 aa, Glycine max
  Clone ID: PAT_MRT3847_40078C.1.pep
MVNAKTEVPHKSVLSIKQDDKFFCRLLSKESSMANPSFRIALAVPFVWESEPGTPKHRFSEDTLPPLTPPPSYHFSNINSYKKKEKKHSSKSSLLLTMLPKMNLIKKMILSSPSSYPSSWPSSSSSSSKVVPMAKFGKKKLLSYGSCNDFKGDCEGCGGGANSPSSKLCFSVPRATCS

SEQ ID NO: 219328 - protein, 49 aa, Glycine max
  Clone ID: PAT_MRT3847_40079C.1.pep
FQQIMFKIFFASISLRYPNIQFPHPFHPPQFTHLILYGVTYNLLLYLKK

SEQ ID NO: 219329 - protein, 50 aa, Glycine max
  Clone ID: PAT_MRT3847_4007C.1.pep
FLISQSTRPQLLKHNDSRSVAFYSSICLTCRVITLNSGFVLSRTVIDGAV

SEQ ID NO: 219330 - protein, 52 aa, Glycine max
  Clone ID: PAT_MRT3847_40080C.1.pep
TKKKALKYGHTRKHLAKKELEKTTKMHLFLRGKYKCNSSPITIVLRVSHPTQ

SEQ ID NO: 219331 - protein, 110 aa, Glycine max
  Clone ID: PAT_MRT3847_40081C.1.pep
HLSLFETGFHQCSCSEISCYCSHCTFHHQLHPKMDLFLPQNHVAVRASLTKPLILRLVQSARWYSQMSPPEWTFLPLKGSTLMVSSAFSFTCFICKYCSLCSFFFSFIYK

SEQ ID NO: 219332 - protein, 61 aa, Glycine max
  unsure (1)..(61): unsure at all Xaa locations
  Clone ID: PAT_MRT3847_40082C.1.pep
NNFSXLYRKRXXAMLTQPFSILSSFFFFYLLYQSIYSLSHFFFCLTRPISYRTFTFTQLFF

SEQ ID NO: 219333 - protein, 167 aa, Glycine max
  Clone ID: PAT_MRT3847_40083C.1.pep
MACGIPLRLSAFPSTTIRATLPHLHAPSISSRPSPLSSNSMSQPATTNHADVVVQYVVLRRDLIDTWPLGSVVTQGCHASVSAVWFNKDDPFTVDYCSPDKIDSMHKVTLEVKGEPQIKNLSEKLTAGGIIHKLWIEQPENIPTCLATKPYPKSIVSSYFKKLKLCK

SEQ ID NO: 219334 - protein, 98 aa, Glycine max
  Clone ID: PAT_MRT3847_40084C.1.pep
RLQKTTEGGAFFLKPRLTVGSYQTPGGGHPTLAERNDRWSTGTQSTSYPTDQWGLALLHPEHLLQALCLLAHAGVHARDDHYCLVLANYRVDVQIDYA

SEQ ID NO: 219335 - protein, 72 aa, Glycine max
  Clone ID: PAT_MRT3847_40085C.1.pep
ILPPFWFWFPRTSPTNQGSLSIFLFPPLFCVPQLKKVPLLICQNFKKKKMWGSKFGFKKKKGIIPNGPVKRK

SEQ ID NO: 219336 - protein, 143 aa, Glycine max
  Clone ID: PAT_MRT3847_40086C.1.pep
MSQPAATADPSAIATTNDAPSQPENADVVVQYVVLRRDLIDTWPLGSVVTQGCHASVSAVWSNKEDPFTVDYCIPDKIDSMHKVTLEVKGEPQIKNLSEKLTAGGIIHKLWIEQPENIPTCLATKPYPKSSVSSYFKKLKLCK

SEQ ID NO: 219337 - protein, 74 aa, Glycine max
  Clone ID: PAT_MRT3847_40087C.1.pep
MALGSTYGEINLKRNPTKKGNNNSDKKSHPLLSFLALRRKKKTTARPEFARYLEYLKEGGMWDFNSNKPVMYYE

SEQ ID NO: 219338 - protein, 102 aa, Glycine max
  Clone ID: PAT_MRT3847_40088C.1.pep
MNKFKILLISPLFCIAQNCNASKWEHQQDSCRKQLQGVNLTPCEKHIMEKIQGRGDDDDDDDDDNHILRSIRGRINYMTRNEGQDEHQEQEGHMQNIFTKMN

SEQ ID NO: 219339 - protein, 157 aa, Glycine max
  unsure (1)..(157): unsure at all Xaa locations
  Clone ID: PAT_MRT3847_40089C.1.pep
MNYIQTKCVVKRKGKETGESETLCFTKSKDNNNNNMCDRHCGKRYPLLSFWELPEFMKDNEYILRYYRANWPFKQALFSLFRWHNETLNVWTHLIGFLLFLGLTLANLMKPKVVNLLELFTRSFSSNXPFFVFLGXGSMFCXLSSSMCHLXFCCHSR

SEQ ID NO: 219340 - protein, 75 aa, Glycine max
  Clone ID: PAT_MRT3847_4008C.1.pep
EVHSNTTPFPFKKNCHPHQISDYDLIRPYAKGQFSPILPQFYIINAIMSIKESASFGPPFSGRPKRQTKRPVIDR

SEQ ID NO: 219341 - protein, 319 aa, Glycine max
  Clone ID: PAT_MRT3847_40090C.1.pep
MGLVVPEEELSLDLRPSFVPKTITDFLCHLSTTPNASHKVSLLDDFVHRLELELAKIQAFKRELPLCMFLLNDAISALKVESEKCRACKSEPVFEEFIPLKKECDQRKEIEKEKECRDKKNWMSSFQLWNNDDKADNNNNAYECDKKHNYRVENKNNGEKRKSVLEPLFQYGRIRNGEKGFVIPFSSYPATKEEKEDCVANGLSLQTPGTAVKSTREGSGCRTSSCRVGSSAPSPLHQPQSSRKQRRCWSPELHSRFIKALEVLGGSQATPKQIRELMRVDGLTNDEKYRLHTQRVPVATSCKFSRSAVDLEACGCTMN

SEQ ID NO: 219342 - protein, 68 aa, Glycine max
  Clone ID: PAT_MRT3847_40091C.1.pep
KPKEFQNHNFKRIPQEHLAFIGRRFLKNQKLIFHNINLLFLLKISCEDSNTQFFSFSFLLSLLSLLFH

SEQ ID NO: 219343 - protein, 300 aa, Glycine max
  Clone ID: PAT_MRT3847_40092C.1.pep
MQQIHSMPGGRFFSGSGSADRRLRPHHQNQQALKCPRCDSLNTKFCYYNNYNLSQPRHFCKNCRRYWTKGGVLRNVPVGGGCRKSKRSSKPNKITPSETASPPPPPHPDHNNNSNSHSSSESSSLTAAAATTTEAVSAPETLNSDSNNNNNMQESKLLIPALETNNSLEQGTGDCGGIFSEIGPFTSLITTTTSTNEPLGSGFGFGNSTLPDASSFQWHYQKVSSNNEELKLPENSFLDHTVDLSGMHSKTSHGGGFGSLDWQGGADQGLFDLPNTVDHAYWSHTHWSDHDNSSSLFHLP

SEQ ID NO: 219344 - protein, 82 aa, Glycine max
  Clone ID: PAT_MRT3847_40093C.1.pep
GKSCIAIAPKSARFLSQPFFVAEVFTGSPGKYVSLAETIRGFKLILSGELDGLPEQAFHLVGNIDEATAKATKLEMESNLKK

SEQ ID NO: 219345 - protein, 60 aa, Glycine max
  unsure (1)..(60): unsure at all Xaa locations
  Clone ID: PAT_MRT3847_40094C.1.pep
GRYWTMLNLPMXRSTGASQETKDLKDAKTDYTIRLILLMGFHNVPHVLCIILIDYKPPCF

SEQ ID NO: 219346 - protein, 52 aa, Glycine max
  Clone ID: PAT_MRT3847_40095C.1.pep
KNNPGSFRFSSLSSSSVFAEYMAGLLGLFHNFHSHQRFLGNPRFCFQISSGV

SEQ ID NO: 219347 - protein, 133 aa, Glycine max
  Clone ID: PAT_MRT3847_40096C.1.pep
PSLITSEVLDPASILTVLSTTQPAFSTNVTSHTASSPFISPDFSNPQPTTSFINPNTQSLTTNTDQPQTDNLPSPDIVPALVRPTNTHPLCTRAKSRINPTFLHVYLEPKSTKAALNDPSGSQPFIKVYVPLE

SEQ ID NO: 219348 - protein, 78 aa, Glycine max
  unsure (1)..(78): unsure at all Xaa locations
  Clone ID: PAT_MRT3847_40097C.1.pep
DPLERPXXFFFFFFFFXLSQRTLIPNIGPSLTIKSRWPNKKLXNNFYPYHXPPSPFFPHLSHPSAQIYHFHQPLLSFF

SEQ ID NO: 219349 - protein, 127 aa, Glycine max
  unsure (1)..(127): unsure at all Xaa locations
  Clone ID: PAT_MRT3847_40098C.1.pep
LNVGLSKSIGWPFKLTACRNPSLDYGFKGAEIAMAXSYCSELQYLANPVTTHVQSAEQHNQHVNSLGLISSRKTAEAIDVLKLMSSTFLVAXLCQAIDLRHLEENLKNTVKNTVSQVAKRVLTAGIN

SEQ ID NO: 219350 - protein, 73 aa, Glycine max
  Clone ID: PAT_MRT3847_40099C.1.pep
LNGTTAESQGDFFSPEHPPHLLFLFSLLRANYLRVIAPSLRYACPSSLFLIGTNIVWIFSQHILVIKRSNNLR

SEQ ID NO: 219351 - protein, 46 aa, Glycine max
  Clone ID: PAT_MRT3847_4009C.1.pep
AVSASGKWLDGIRKWYYNAAGFNKLGLMRDDTIYEDEDVKEAIEDF

SEQ ID NO: 219352 - protein, 229 aa, Glycine max
  Clone ID: PAT_MRT3847_400C.1.pep
LPQVIRVIPYSAVQLFAYEIYKKIFKGKDGELSVLGRLAAGAFAGMTSTFITYPLDVLRLRLAVEPGYRTMSEVALSMLREEGFASFYYGLGPSLIGIAPYIAVNFCVFDLLKKSLPEKYQKRTETSLLTAVVSASLATLTCYPLDTVRRQMQLRGTPYKTVLDAISGIVARDGVIGLYRGFVPNALKNLPNSSIRLTTYDIVKRLIAASEKEFQTITEENRNKQKKPQ

SEQ ID NO: 219353 - protein, 137 aa, Glycine max
  Clone ID: PAT_MRT3847_40100C.1.pep
SRAESARAAREFSHSTEKTLRTNSEHREKKMHNKDACSPSSNGGFGGGASAGQIPSTGGLYSSLYSALSNENLPSLSASCSNGSGGGVSMYPYSESIQKHQDMVNRQSMCLNRLVETSKEVEALREENGLLRAANKE

SEQ ID NO: 219354 - protein, 54 aa, Glycine max
  Clone ID: PAT_MRT3847_40101C.1.pep
PIHMSKIQFPANFLKGRHHIHGHLGLLAFFPIHAPTSIKPTLRNILMYWIKKGI

SEQ ID NO: 219355 - protein, 90 aa, Glycine max
  Clone ID: PAT_MRT3847_40102C.1.pep
GCSKQRTLHTKIKLPMGYLRSHSCPCYYTCHPVNTETWGNYAETGITGTYENKNSLAIFGSRDFIGSQPITTDLKRDLCSPQQKRIISDV

SEQ ID NO: 219356 - protein, 71 aa, Glycine max
  Clone ID: PAT_MRT3847_40103C.1.pep
NAEQLLSHRICNFIAANDVQNAHSDLSVLSGIWSSSKYLFSQSNPKDSSEKLKNSFTSKLTSKLPLSLFQP

SEQ ID NO: 219357 - protein, 56 aa, Glycine max
  Clone ID: PAT_MRT3847_40104C.1.pep
GMRMIILSKYYTFLKVIEYRLLMRIIANIGCLTQDCSSDLNLTQNVKRGKGEIQGY

SEQ ID NO: 219358 - protein, 122 aa, Glycine max
  unsure (1)..(122): unsure at all Xaa locations
  Clone ID: PAT_MRT3847_40105C.1.pep
PPHHPPPTPPPPPTPTPPPPPPTPPXPPHHPPPPPHPTPPPPPTPPQPPPPPPAPPPPPPPXPPPPNNTPAPHAPPTGPPAPPVQPPEXPPPRPAPGQRPAGPSPRPARWLAPAQQCVEVWG

SEQ ID NO: 219359 - protein, 123 aa, Glycine max
  Clone ID: PAT_MRT3847_40106C.1.pep
MQTLNEVSQTCPQCCCCSCTTPFFNSPTSQQHNTAPKIRNSSAEWRHSFAVTTTSSIFPNTQFTNHESLPSLHESFNEFTKAYTQYSETEQVDHVRAKDYSHLSLSNQTCLDYIGIGLFSYSQ

SEQ ID NO: 219360 - protein, 92 aa, Glycine max
  unsure (1)..(92): unsure at all Xaa locations
  Clone ID: PAT_MRT3847_40107C.1.pep
STTSSPSPWTPTTFLDSFTTATTTSTLTTSSSSAPAKYRCSSSAXPATRSSTSSRTPWLTTSTYLPPCSPTTTLDVSHRKLFILSLGWDTTT

SEQ ID NO: 219361 - protein, 157 aa, Glycine max
  unsure (1)..(157): unsure at all Xaa locations
  Clone ID: PAT_MRT3847_40108C.1.pep
GSSNGRGSFAYTLTVDQGRTYXFRISTVGPTTSIHFRIHGHKMTIAEGEGTHTVQNINESLDVHLGQTNSAMVTGDQPPQDYLIGVTTRFTSQVLNATCIFRYSHSGGGVTGLYSCGPTIQVAWSLNQAHSLKRNLSASGPXPKPHGSAHYGLINTT

SEQ ID NO: 219362 - protein, 60 aa, Glycine max
  Clone ID: PAT_MRT3847_40109C.1.pep
GVHTGGNGTGVSKPYSRYKSPSGSGVFLGTAVLLTSVFLLLRAFTVDYFPAFPLYYQVCW

SEQ ID NO: 219363 - protein, 65 aa, Glycine max
  Clone ID: PAT_MRT3847_4010C.1.pep
KRTTQAHNSFLPNIFFFFSYKNLFFRAKALVFTSFGILLLHTSVETNWLSYLRRGIILLHTVKIN

SEQ ID NO: 219364 - protein, 101 aa, Glycine max
  Clone ID: PAT_MRT3847_40110C.1.pep
KKKKPRGLFLTENFPRSKVGKTPPLNPSPLAKKKKGGTPTKKGGPKNLFPPPFLGGGKRIPLRSREGCLYRGGPSGNFLGGGPSKKKKFCFLPPKTPFGGG

SEQ ID NO: 219365 - protein, 124 aa, Glycine max
  Clone ID: PAT_MRT3847_40111C.1.pep
MPATAVKTAPAKAAAKKAETTKAQKTEKKPAPAAKQPAKPAAVKKIPTKVAKPSKAISKSNKQKGKAGLKAKKKPLKFTIDCTHPVEDGLLDSSSFEKFLHDRIKVNGKAGVLGNAVTITRDKT

SEQ ID NO: 219366 - protein, 41 aa, Glycine max
  Clone ID: PAT_MRT3847_40112C.1.pep
RIFCVCRIRVSYPFQWGAPTFDAGEAFVMMMTSFVALVEVL

SEQ ID NO: 219367 - protein, 92 aa, Glycine max
  Clone ID: PAT_MRT3847_40113C.1.pep
GHWLPAQLVCTSLNTRFYDVIYIGKYRIEVMVNHKDENTKFLLWDHECANLIGQSADEVNRLKIADGDVDLNASPQALDRLLGCVLAFKSRF

SEQ ID NO: 219368 - protein, 37 aa, Glycine max
  unsure (1)..(37): unsure at all Xaa locations
  Clone ID: PAT_MRT3847_40114C.1.pep
DDGTAKDRKTLILGDRRGTDFGHRNPDXISWYSTGAE

SEQ ID NO: 219369 - protein, 58 aa, Glycine max
  unsure (1)..(58): unsure at all Xaa locations
  Clone ID: PAT_MRT3847_40115C.1.pep
PTRPARRLQNGSTDTNTVIPLAGXVFHFAVHALPTTSNSPTKSLLPSIARVQKGSTQL

SEQ ID NO: 219370 - protein, 77 aa, Glycine max
  unsure (1)..(77): unsure at all Xaa locations
  Clone ID: PAT_MRT3847_40116C.1.pep
EFGTRKDNDVTINPQTNSDHKSHTPMKTDDIWFSIRSISTSVLPNNHQLNLPIQPRARVCMGRFKMMIRCKIMXKKK

SEQ ID NO: 219371 - protein, 46 aa, Glycine max
  Clone ID: PAT_MRT3847_40117C.1.pep
VLLKIHFSLGQSSFGAIRFLLVAIVIAFIYRNSPKEYSTRLPCPPF

SEQ ID NO: 219372 - protein, 178 aa, Glycine max
  unsure (1)..(178): unsure at all Xaa locations
  Clone ID: PAT_MRT3847_40118C.1.pep
PPVFSPLSPPPPEFSPPGPNPGGPLSPPLSGPGGEGPPPVAPPPGEKKTPPGAQKANPPPPGVGPFFKPGAPPGFPPENGPVGPPPXNVSEPPPRXPPGFPLYTSGPYFVGNWDRKPFPPGNHLSPRFPPPLKPPPKGKIGPPPGPAPKSPGPPPPPVWCSPPQGKTGRFSQDNPHDQ

SEQ ID NO: 219373 - protein, 129 aa, Glycine max
  Clone ID: PAT_MRT3847_40119C.1.pep
MAYKTTSNTNKGQLDPGPEKTMFEVEPTDTAQSKQDANISPEEECLEGTQLDVEDETNDYLLARDRTMRQIKPPEKFGYVDLMAFSLVAASEVWDDEPKSYKAAMKLVGAKLVSCKWVYKMKVGIPGVE

SEQ ID NO: 219374 - protein, 67 aa, Glycine max
  Clone ID: PAT_MRT3847_4011C.1.pep
SSSAHTSNLFTYLLISETTFPSIPIIFFSSIYNNNPSLFFFFLFFFDRIETLFVVAMFFSTASTNNA

SEQ ID NO: 219375 - protein, 53 aa, Glycine max
  Clone ID: PAT_MRT3847_40120C.1.pep
VGALATVDIERGKISSVGHADAPKSLARKKTGTYRVLTVSSYCWKISQQTCAS

SEQ ID NO: 219376 - protein, 105 aa, Glycine max
  Clone ID: PAT_MRT3847_40121C.1.pep
NTFFRPRFSVQRCFQSLSPKTTVKEYASHGRIIKKHLLGLDLCRHTSSRNCFTVPDRRPSLCLNSTHLRAYSSESVGRYASEDNHAHVNDGVNFDKDGNKTSLGK

SEQ ID NO: 219377 - protein, 59 aa, Glycine max
  Clone ID: PAT_MRT3847_40122C.1.pep
ISTWTIHYIDDAESNNIIRFQFHLLKQITLPFVQTKKIGARKSKVSLRQNVFSSLHSNP

SEQ ID NO: 219378 - protein, 92 aa, Glycine max
  Clone ID: PAT_MRT3847_40123C.1.pep
MGYEDFVYFILSEEDKSSEPSLEYWFKCIDLDGNGFLTRNELQFFYEEQLHRMECMAQEPVLFEDILCQIIDMIKPEDESVITLRDLFKVKN

SEQ ID NO: 219379 - protein, 76 aa, Glycine max
  Clone ID: PAT_MRT3847_40124C.1.pep
LELKHYLHLLIFFLIRYEIPARLGETPGIINAGAKNMVLQKEDALVSGRSRDGRFLSQALATEDDFACAGNNESDI

SEQ ID NO: 219380 - protein, 174 aa, Glycine max
  unsure (1)..(174): unsure at all Xaa locations
  Clone ID: PAT_MRT3847_40125C.1.pep
MGEESSLLKESTSINDTNMVEEVEERDPESNPLNEPLLKRNRTLSSNPLALVGAKVSYIESLDYEINENDLFKQDWRSRSRTQVLQYIFWKWTLAFLVGLLTGVIATLINLAVENIAGYKFLAVVNFIQKERYLRGFLYFTGINFLLTFVASILSVCFAPTXAGPGIPEIKAIL

SEQ ID NO: 219381 - protein, 50 aa, Glycine max
  Clone ID: PAT_MRT3847_40126C.1.pep
KSLPLLNKVSPLRRMRPALGPWGLRSRAKTLVNHNWQTGHPPNPWQNVNS

SEQ ID NO: 219382 - protein, 79 aa, Glycine max
  unsure (1)..(79): unsure at all Xaa locations
  Clone ID: PAT_MRT3847_40127C.1.pep
IVDSRELRTQEGRDDWLYCHSEILVKNCKYFADRLSENWPTCQILDSRNXVDVYCQELNFDYHVNLIRLLYIVIDSSAH

SEQ ID NO: 219383 - protein, 51 aa, Glycine max
  Clone ID: PAT_MRT3847_40128C.1.pep
VPTIELPFTLPGQALWGPKNSPFRGAQFATIPLTRVGESDGCTYRNGYPRR

SEQ ID NO: 219384 - protein, 160 aa, Glycine max
  Clone ID: PAT_MRT3847_40129C.1.pep
IGLWINGYLSEWVGYKKTMYIALIASVLINFIHFFAQSIGMIVAGSVLLGLPWGIFQTLTVSYASDITPSTIRPYLTTYINLCWVMGQLIAAGVLRGCQTLGNDWGWRIPFAVQWTWAPFILIGTYLAPESPWGLVRKSRYKTHEKRGLSPRLPHPTLSS

SEQ ID NO: 219385 - protein, 145 aa, Glycine max
  unsure (1)..(145): unsure at all Xaa locations
  Clone ID: PAT_MRT3847_4012C.1.pep
KYDSEAKQLPPPKRSGNQALLKKVKDQEKFAAAKEKSKGKATANATTMRPHERGLIFVFYYSVESHSPRPPELTRPLLPLHHHSXSYPNREYFXLSNVDVGIDMGTRVPIXAPNGPGKSSLLNLRAGGGXPXGGEXKRKKKXGIG

SEQ ID NO: 219386 - protein, 113 aa, Glycine max
  unsure (1)..(113): unsure at all Xaa locations
  Clone ID: PAT_MRT3847_40130C.1.pep
MSEMASPDPEGLDGVRMTWNVWPRTKVESSKCVIPLAATVALIRPHPDIPRLQYAPLRCKTCSSALNPFSRVDFTAKIWICPFCYQRNHFPPHYHAISLSTIPXTLYPSYSSC

SEQ ID NO: 219387 - protein, 67 aa, Glycine max
  unsure (1)..(67): unsure at all Xaa locations
  Clone ID: PAT_MRT3847_40131C.1.pep
PPPKRPQNKSNKVPHHKNTPRPPSEEIPPKPKPXAPTKPXXPTPLSPKTPLPPPQRXQPPPPASFSN

SEQ ID NO: 219388 - protein, 366 aa, Glycine max
  unsure (1)..(366): unsure at all Xaa locations
  Clone ID: PAT_MRT3847_40133C.1.pep
MDNIPEHIVWEILSRIKKTSDRNAVSLVCKRLYYLDNAERNCIRVGCGMDPADEALSCLCIRFENFILSKVEITYSGWMSKLGKQLDDKGLLILANHCPLLCDLSLSYCTFITDVGLRYLASSSKLSSLRLNFTPRITGCLILCIISPGRGLACVLSKCKNLHXVHLDMCVGVRDFDIICLSQRSSELKSGSLRVPSDFSLPSLVNNPLRLTDESLKALAQNCSKLESVRISFSDGEFPSSSSFTLSGILCLIQRCLVRQLALDHVYSFNDVGMEALCSAEYLESLELVKCQEISDEGLQLVSQFPRLCILRLSKCLGISDDGLKPLVGSLKLDFLAIEDCPQISERGVQGAAKSVSFRQDLSWMY

SEQ ID NO: 219389 - protein, 49 aa, Glycine max
  Clone ID: PAT_MRT3847_40134C.1.pep
RYMGNLIQIIFSEIFKLINLWNSQNNYTKGIIFLKSLCCLIAELILCWV

SEQ ID NO: 219390 - protein, 298 aa, Glycine max
  Clone ID: PAT_MRT3847_40135C.1.pep
MVSSNCYYLALVCCCVLLLLNPTVGEQDEQNLVLQYHKGALLKGRITVNLLWYGSFTPIQRSTIVDFIKSLSSSPGAPLPSVAWWWKTTEKYNGGSTTLVVGKQILQQTYSLGKYLNGTQLLYLSSRFNDLNAINVVLTSNDVGVDGFCRSRCGTHGSINGKARIPYMWVGNSEAQCPGQCAWPFHQPAYGPQTPPLVAPNADVGVDGMGINISPLLAGTVTNPFNEGFYQGPPTAPLEAVSACTGIFGSGAYPGYPGRVLVDKTTGASYNSYGAGNGRKYLLPAMWDPQTSACKTQV

SEQ ID NO: 219391 - protein, 440 aa, Glycine max
  unsure (1)..(440): unsure at all Xaa locations
  Clone ID: PAT_MRT3847_40136C.1.pep
AFNSKTWLNPVSNGDLNNNQQQGQVQQQQQQGQWAAAAQGHQYQQQWMAMQYPAXAMAMMQQQMLMYPFVHHTSPYTNXCSPHHRLNSVPNVTLQEHTTWTLPSLFNSRMRXDPHLQHWLLQYLLLNCLTTNGEXIRLRSFRRKQTGQSEGYGFVEFYSRGTAEKVLQNYNGTMMPNTDQAFRLNWATFSAGERRSSDATSDLSIFVGDLAIDVTDAMLQDTFAGRYSSIKGAKVVIDSNTGRSKGYGFVRFGDENERTRAMTEMNGVYCSSRPMRIGVATPKKTYGFQQQYSSQAVVLAGGHSANGAVAQGSHSEGDINNTTIFVGGLDSDTSDEDLRQPFLQFGEVVSVKIPVGKGCGFVQFADRKNAEEAIQGLNGTVIGKQTVRLSWGRSPGNKHWRSDSNGGHYGGHQGYGGHGFAVRQNQDIAMQPAAAIQGAS

SEQ ID NO: 219392 - protein, 190 aa, Glycine max
  Clone ID: PAT_MRT3847_40137C.1.pep
MAQPSSNGDLNNNQQQGQVQQQQQQGQWAAAAQPHQYQQQWMAMQYPATAMAMMQQQMLMYPQHYMPYAHPHYPPPPPPPPSSHHHHHHKQAAASSDEIRTVWLGDLHHWMDENYLHNCFAHTGEVVSAKVIRNKQTGQSEGYGFVEFYSRGTAEKVLQNYNGTMMPNTDQAFRLNWATFNAGERRFSDA

SEQ ID NO: 219393 - protein, 89 aa, Glycine max
  Clone ID: PAT_MRT3847_40138C.1.pep
MRLDGVRGNAGFRPARGGNFGVLRNPRTQTPLQYAGGILSGPMQSMVNQGGMQRNSPDGERWHRATSFQHRGLISSTSTSQTPLQMMHK

SEQ ID NO: 219394 - protein, 93 aa, Glycine max
  unsure (1)..(93): unsure at all Xaa locations
  Clone ID: PAT_MRT3847_40139C.1.pep
XTDXXIADXXPXXVDXCXXXXXXXXXEXXXXXCXXXXXHXLRXSDFAXXLLXXCXNGTXXXNXXXXXXNXXSASSXCVXFAXXIPRAEFRAYV

SEQ ID NO: 219395 - protein, 162 aa, Glycine max
  unsure (1)..(162): unsure at all Xaa locations
  Clone ID: PAT_MRT3847_4013C.1.pep
AASGSTVGADNGAPLSLDSSGAGASFPSSAFFGTSLNKVIASKVPNAKISSGTFKIFAAETYIVEKQHTDYDRWKGLAYDVSDNQQDITRRNGLACSLLQTPPDTGTHYAILSSYDYPNAGLXTDNLGIRTDRDYIAPAIIDKXLVVTSTRNLVNLPHIQVP

SEQ ID NO: 219396 - protein, 118 aa, Glycine max
  unsure (1)..(118): unsure at all Xaa locations
  Clone ID: PAT_MRT3847_40140C.1.pep
GTNFISMHEAFKRXTLRKCPAVVTNKNDLMRYRVSXNNGFQVILAHIPKDKLNPINLVNPLXKFKVXFNLLAXTLNLYQMNXDPSLQKIYIXHSYITFSNFWXQGIYCIKVHKTLIFF

SEQ ID NO: 219397 - protein, 35 aa, Glycine max
  Clone ID: PAT_MRT3847_40141C.1.pep
YAILIFSSSQNPSLKGNFLINYGKYPQSFITPILY

SEQ ID NO: 219398 - protein, 80 aa, Glycine max
  Clone ID: PAT_MRT3847_40142C.1.pep
IIPSCLKLIYTFCCSCVQITFSVPFALASIYCSASGAGQGLSLGVLNLAIVVPQMVVSTLSGPWDALFGGGNLPAFMVGA

SEQ ID NO: 219399 - protein, 69 aa, Glycine max
  Clone ID: PAT_MRT3847_40143C.1.pep
LLFCLHIPRPITYVSANCQSWGHKYIVFTVQKTKRDRYLYESVCLPNRLCGFLKLPHHSVLETNDFLNL

SEQ ID NO: 219400 - protein, 154 aa, Glycine max
  unsure (1)..(154): unsure at all Xaa locations
  Clone ID: PAT_MRT3847_40144C.1.pep
DHTRITNQPNPFGLFFLNTNNRMEPVGAFPDGEWDCFRRIFASDEEHEHDLFTPQFPLLFDGDDGLNIVTQHTFCAAPEAGENACMFYSLDADHNSNSSQYISQESSYSNTSSNCSGDDTVFIANPGNAYYYXSYPDHVLANNNACVYSMDEKI

SEQ ID NO: 219401 - protein, 45 aa, Glycine max
  Clone ID: PAT_MRT3847_40145C.1.pep
NSQPKLGVSLHEIFVIPLTGCPYINFAFVTFSARSSKKSPIASFF

SEQ ID NO: 219402 - protein, 160 aa, Glycine max
  Clone ID: PAT_MRT3847_40146C.1.pep
GKLPASFFRIEDTEAQRFIGKCLITAAKRPSAKELLNDPFLLSDDASSMTKIGIQKPFLNYNEMEKLQLDDVSPRTEMSITGKLNPEHDTIFLKVQISDKDGSCRNVYFPFDIYTDTPIDVAMEMVKELEITDLKPSDIANMIEGEISVLLPNKRNSNCS

SEQ ID NO: 219403 - protein, 333 aa, Glycine max
  Clone ID: PAT_MRT3847_40147C.1.pep
CEKTTEGDSFFQYSHNTSILCHLYSTSIPVKQTMASETNQSKNVCVIGAGPSGLLAARELRKEGHKVVVLEQNHDIGGQWLYDPNVQEEDPLGRDPWLKVHSSIYESLRFMSPREIMGSTDFPFLVKKGRDTRRFPSHREFLLYLKDFCEWFKLSEMIKLNTKVHYVGPLNYGVPSEDLKWVVRSKENKSEEEVEQVFDAVVVATGHFSNPRLPCIQGMDTWKRKQMHSHIYRSSEPFRGEIVVVVGNFLSGQEISMELVKVAKEVHLMVYLQFSSKTLDIYEGLSKVISKHENFHLRPQVAPPIETLREDGTDISNDGFNIIADTILYCTGY

SEQ ID NO: 219404 - protein, 39 aa, Glycine max
  Clone ID: PAT_MRT3847_40148C.1.pep
DNDIKSTKHTLKEMIIHYSCLELPEGKAVIKSESMADLA

SEQ ID NO: 219405 - protein, 92 aa, Glycine max
  unsure (1)..(92): unsure at all Xaa locations
  Clone ID: PAT_MRT3847_40149C.1.pep
TNPEEAHARRSAAWTCNPLGLLEXVDXVYKHGSACEPSSDHGMGDGQEDDCFGNRQLKGTFDEGNYSLSHDAAWQERSYGCDEKWVIDLDMN

SEQ ID NO: 219406 - protein, 58 aa, Glycine max
  unsure (1)..(58): unsure at all Xaa locations
  Clone ID: PAT_MRT3847_4014C.1.pep
NCSLSICRHKNANAYLLVHYTQISRCCMRLYSTYNLYIWAHAMHIIPLKPXSYVNLTL

SEQ ID NO: 219407 - protein, 94 aa, Glycine max
  unsure (1)..(94): unsure at all Xaa locations
  Clone ID: PAT_MRT3847_40150C.1.pep
FLEANYMNLQRSYTVAIAGYALAQMGRLKGPLLNKFLTTAKDKNRWEDPGKQLYNVEATXYALLALMQLKDFDFVPPXVRWAHXTELYGGGYGS

SEQ ID NO: 219408 - protein, 79 aa, Glycine max
  Clone ID: PAT_MRT3847_40151C.1.pep
MSLMSPRTEKLVRRLTFVTTVAASYFLLTADYGPKPNALDPIKKQILSAQSTVKEYIVGSKKESQESHVGRLDSNKDNP

SEQ ID NO: 219409 - protein, 71 aa, Glycine max
  unsure (1)..(71): unsure at all Xaa locations
  Clone ID: PAT_MRT3847_40152C.1.pep
QRHRARREGKVVLVVVLLIGMATLSSILCSSLPLVHRYPNANPSLFRTCISLSXSRTKPRXPLIGLAASSH

SEQ ID NO: 219410 - protein, 60 aa, Glycine max
  Clone ID: PAT_MRT3847_40153C.1.pep
IIYYTLMLYAMSLWIEKKGREKANKKKERQTIGNGGAKPSLRARTTMSRRRCRWMTAQCS

SEQ ID NO: 219411 - protein, 76 aa, Glycine max
  Clone ID: PAT_MRT3847_40154C.1.pep
DSLPDKGTVVIDSEKNDNERELASDTTRSGTILNDDIEVDEGRRGIESCSGCGVQHERKFATKVDENNGFGETAEL

SEQ ID NO: 219412 - protein, 185 aa, Glycine max
  unsure (1)..(185): unsure at all Xaa locations
  Clone ID: PAT_MRT3847_40155C.1.pep
MSLVAGLEEKFIWGFTLRSQSQTLTPLFSYPSHLSSIKSVAISGPVVASGGEDDTIQLYDLAAAASLGSLHTHSATVTALSFYPPPHLPFPRNLVSADADGNVSIFDADGFVHLTTISVHPQXAINDLALHPSGQRALTDFRDDCLAVVNLVRGRRNCCLRLGMEASLVKFGATGGSVLSWWWKE

SEQ ID NO: 219413 - protein, 56 aa, Glycine max
  Clone ID: PAT_MRT3847_40156C.1.pep
NGPSPCWRTKFTTGFGWLIVSPELAHYVQLTWNYLYISMLPCIAVLEAAIFSRLAV

SEQ ID NO: 219414 - protein, 343 aa, Glycine max
  unsure (1)..(343): unsure at all Xaa locations
  Clone ID: PAT_MRT3847_40157C.1.pep
MRYCATFDTHRASLPYVARFHAKRVLKFQDALLKQAMHRNEVKFAELTLDIYRMIQCLEWEPSGVFYQKHTVKPKENGDIIDHSGASGIIDMNLTADMTDPTVPPNPRKASLYRPSVTHVIAVSFQAYWKVLATICEELPPDCVVLVYLSASGKAGLNNVSQVENSSGSSKYSRHKVLSQTSQGQNSGPSETQSNGKRELSYYDNYLWFGSKGNSGLNNLYTGDLIPFTRKPLFLIIDSDYSHAFKAAFCXLCGLTCNEADKDVYNEAKNIIANVFTEWEIIISKSLTEWLVMLCSSTAMDLVWAQVISDPSLTRLILRFIFCRSVISSFCPPEESELYLPLC

SEQ ID NO: 219415 - protein, 51 aa, Glycine max
  Clone ID: PAT_MRT3847_40158C.1.pep
PGVQVRNVASVLLVELDSSAVLRRSAVLCTSWQLSTYGQTCDLGYKNLSSS

SEQ ID NO: 219416 - protein, 369 aa, Glycine max
  unsure (1)..(369): unsure at all Xaa locations
  Clone ID: PAT_MRT3847_40159C.1.pep
NEVKFAELTLDIYRMIQCLEWEPSGVFYQKHTVKPKENGDIIDHSGASGIIDMNLTADMTDPTVPPSSRSRAAASLYRPSVTHVIAVLATICEELPPDCVVLVYLSASGKAGLNNVSQVENFSGSSKYSRHKVLSQTSQGQNSEPSETQNNGKRELSYYDNYLWFGPKGNSGSNNLYPGDLIPFTRKPLFLIIDSDNSHAFKVLHGAERGETAALFLSPLRPIFKNPSDVNSNSGSQFTYFLTAPLSAFCQMIGLTPNEADTDVYNEAENIIANAFTEWEIILCSSTTMDLVWAQVISDPFLRRLILRFIFCRSVISXFCPPEESELYLPLCLPHLPSSVAPTSEAVRSAVVQLAMHFDVADSFHFTET

SEQ ID NO: 219417 - protein, 54 aa, Glycine max
  Clone ID: PAT_MRT3847_4015C.1.pep
FTSLHRRSKFSVVLKFLRALMKHGQGFCRNREPSSSPFTRKISLPNLLKHYISA

SEQ ID NO: 219418 - protein, 135 aa, Glycine max
  unsure (1)..(135): unsure at all Xaa locations
  Clone ID: PAT_MRT3847_40160C.1.pep
XAXKXPXXXXXXXTPHXPKXKXXLGDXHDXXXCXQNXTXNXXPXXXXQYXCXHXINRXXQXXITXXHXXXXXXILTXXRXTLPTLXXXXXMACXXCFSSXRNHXXLVIXXXXXLXQSRIXXXXASXXXXXRXXAT

SEQ ID NO: 219419 - protein, 86 aa, Glycine max
  Clone ID: PAT_MRT3847_40161C.1.pep
ALAPCLGLGFFLGNPCGFHPKSRETPPPKAVGFGFFVGNFKPLLDPLTFPPPCQVVLGFGGLNPNRGSGLFPGRGRFTPRPGGPFV

SEQ ID NO: 219420 - protein, 87 aa, Glycine max
  Clone ID: PAT_MRT3847_40162C.1.pep
SIADNYGPLRLTARIPPISLLSSSSAGATPGSYVGHRQGGLSQAGPGPLGEELGKFGEFSAAGHMSLAGHLLVPNLPKKPTGNVTHP

SEQ ID NO: 219421 - protein, 162 aa, Glycine max
  Clone ID: PAT_MRT3847_40163C.1.pep
KETFVCEYVGEILPIMELYKRIMQDTGTKKHTYPVTLDADWGSEQGLKDEEALCLDATKNGNVGRFINHRCYDANLIDIPVEIESPDHHYYHLAFFTNRTVSANEELTWDYGIDFDDHDHPIKAFRCCCGSVFCCDKKQKGKGKIENQINVTRGMSELKQLE

SEQ ID NO: 219422 - protein, 55 aa, Glycine max
  Clone ID: PAT_MRT3847_40164C.1.pep
AAYPIIKTSGLQSVHTRLTRLSTQPCGQKPIRHDRCYSMHSKTVEALDLGSSSKC

SEQ ID NO: 219423 - protein, 155 aa, Glycine max
  Clone ID: PAT_MRT3847_40165C.1.pep
MRKRGSHEYDGDSGNTNSKRHLLLWILAAVILIALWSMFAGSVTLKWSLSNNDDLDSTILEDLDVLEVEEREKVVRHMWDLYSHTNTKSVGLPKFWWEAFEAAYQQLVSDVPAVRDAAVSEIAKMSLRSLPIQIQSHSSITASRKIKQAKSRTGQ

SEQ ID NO: 219424 - protein, 62 aa, Glycine max
  Clone ID: PAT_MRT3847_40166C.1.pep
TLEIRTKNQVHPYRKAHGVGEQLLLNQTEKEQRVKREAQTNYHEPSCSTDDFCNHTILFPIE

SEQ ID NO: 219425 - protein, 93 aa, Glycine max
  Clone ID: PAT_MRT3847_40167C.1.pep
VLSFSVVARISARVCTIGTRVSDGIVLVWPSLVVVRSSCLCAPVAVVLPSAMVLMPLLLRGAAIEVSELIGGMHMIMFMLDICAIGNRIMLRR

SEQ ID NO: 219426 - protein, 31 aa, Glycine max
  Clone ID: PAT_MRT3847_40168C.1.pep
LRLPYSICRLTFLIFPILLTRNHLYPCLLMH

SEQ ID NO: 219427 - protein, 85 aa, Glycine max
  Clone ID: PAT_MRT3847_40169C.1.pep
VCSSLNPLGSIIFSHRQVVFKSTLHRLNPHVNYATTARPLYSSRLNLSVVGHFVQSRVNESYLLKHTHIISQVEKSYYLSQDLVA

SEQ ID NO: 219428 - protein, 77 aa, Glycine max
  unsure (1)..(77): unsure at all Xaa locations
  Clone ID: PAT_MRT3847_4016C.1.pep
SLLDPKICSGIGTRYELLCQGFNXESHKSGRWNIELKEMASKLASLGFTMVWLPTPTEFVSPEGYMPKDLYNLNSWY

SEQ ID NO: 219429 - protein, 122 aa, Glycine max
  Clone ID: PAT_MRT3847_40170C.1.pep
MASDRMIRIGINGFGRIGRLVARVALERNDVELVAVNDPFITTDFMTYMFKYDTSDGQGKHFHVNLRDSKTLFFCEKPCTVLGVMNSEERPWWEAGADYDDELTGVFTDKDKGHVQLKGGAK

SEQ ID NO: 219430 - protein, 71 aa, Glycine max
  Clone ID: PAT_MRT3847_40171C.1.pep
GFVGGRVGEYIKKHKCVPLEDLAAEFKLRTQVFYFFPILFLYLNQRIYFFHYHFIFLILAVATSFMGETVN

SEQ ID NO: 219431 - protein, 46 aa, Glycine max
  Clone ID: PAT_MRT3847_40172C.1.pep
EVIVETTSFQFETILILEITISFLSRSRSTPPLRSPTSPFCRLLAA

SEQ ID NO: 219432 - protein, 67 aa, Glycine max
  Clone ID: PAT_MRT3847_40173C.1.pep
FFVRPRVREEEGSSRSYFANDFLKCNIFLIISFLINKLRYKINNIIIHKLLVNIIMTNICNSFFTCM

SEQ ID NO: 219433 - protein, 145 aa, Glycine max
  unsure (1)..(145): unsure at all Xaa locations
  Clone ID: PAT_MRT3847_40174C.1.pep
MGNCCASATESSSMDWGGDDWGSFSSSKRRRSSRKNKVFDEVHGESLGNVEKEKLLGALRASSDANGKVKIKISKKELEKLLGGKENNSNKQGDHGHASAEQVLARLIFAXDHASNEYRDVHHRSWGPVLQMLPEVYLMGSKVVV

SEQ ID NO: 219434 - protein, 52 aa, Glycine max
  Clone ID: PAT_MRT3847_40175C.1.pep
DDDSNGCLLEWSFAVDPVKGLVLEDLVRKYHVGLQLMALKMEDEIVSLASAM

SEQ ID NO: 219435 - protein, 91 aa, Glycine max
  unsure (1)..(91): unsure at all Xaa locations
  Clone ID: PAT_MRT3847_40176C.1.pep
LIXCIXTGXXRTEVXTCLXWTTHPLPLHQPXRTLXHPLHFXWQSNXGKLDHNYXXTVXHSQNLCXXMSKXRDXIXXIEFQDRXSXXRAEFL

SEQ ID NO: 219436 - protein, 248 aa, Glycine max
  unsure (1)..(248): unsure at all Xaa locations
  Clone ID: PAT_MRT3847_40177C.1.pep
KNSGIDRSVVESLPVFRFGALRGQKEGLDCAVCLNKFEAAEVLRLLPKCKHAFHVECVDTWLDAHSTCPLCRYRVDPEDILLVEDAKPFRQSHQQQRNKEEERVRLNLDLEKQEIVESRRRHSSAWGGGRRXTEEQQQSRRWTTSFRRSPGGRSATSRKKNESVGVGCFVRPRKDGMLLTQETERASVERRLEHRIIVSPGQGPGPGPGPGPCGLEQRWSDLQASDLLYLTSEMIMMRDSWNGRGSGV

SEQ ID NO: 219437 - protein, 90 aa, Glycine max
  Clone ID: PAT_MRT3847_40178C.1.pep
PKNFPQCIPFPMARAVPFFIGASFAVNMFVGTVLFFVWERFNKKDAKGFAGAVAFGLLWGGGIWTFPFAFLFFLGVGPPICLFFGPSPSS

SEQ ID NO: 219438 - protein, 54 aa, Glycine max
  Clone ID: PAT_MRT3847_40179C.1.pep
GGWLCFFFFLALFQLIFLILCIIVYWNLQIFGTSFGKLPTQYICSCSKLFLLTR

SEQ ID NO: 219439 - protein, 170 aa, Glycine max
  unsure (1)..(170): unsure at all Xaa locations
  Clone ID: PAT_MRT3847_4017C.1.pep
MLLLKFGALLSLMNLNYVCLLLIALCLSFHVRMGIYDAMNLYKADVSTVYLGLTTSIDTFILTCSTKXNKYYIPNSRVIIHQPLRTANKKTTEIIILITKITYHKIKINKILSLITNKPEEHIXLDTNHYNVMNAYKTKKYDVVNXIINNRKPRLVTPIRNSSPPPETRI

SEQ ID NO: 219440 - protein, 90 aa, Glycine max
  unsure (1)..(90): unsure at all Xaa locations
  Clone ID: PAT_MRT3847_40180C.1.pep
VTIPILHIFTFLLNPVIICTFSPTGLTTEIKSVEIHHESFTQPHPDDNFEYNVKNVSVKDLNPGNFSXNSKDNPPKEALNFTPQVIIINH

SEQ ID NO: 219441 - protein, 57 aa, Glycine max
  Clone ID: PAT_MRT3847_40181C.1.pep
RVKMCTHGMLETMKKYSMSFFKVDVRKQILLFCFRSLVELHYTVFSLIIKKNLSVFP

SEQ ID NO: 219442 - protein, 51 aa, Glycine max
  Clone ID: PAT_MRT3847_40182C.1.pep
TRSFIEVVSVSCHVDYGCVVDSGRVSCHWHDGCKSVRLWPFEFKIFCMSSS

SEQ ID NO: 219443 - protein, 98 aa, Glycine max
  Clone ID: PAT_MRT3847_40183C.1.pep
AYTIPISQPLDSLYNRAVLSVMYEINPGDVHTNFACIQKTPPTCQCSVLRLGRESPNHIAFSKHASPCFRVYPRNGSRSAPPSVGTAQARQLETVCFH

SEQ ID NO: 219444 - protein, 52 aa, Glycine max
  Clone ID: PAT_MRT3847_40184C.1.pep
MWGTIANFKENLNKIALDVHDDDDDDEIFRAYGAGSPANGDNSVVSDRRSSR

SEQ ID NO: 219445 - protein, 185 aa, Glycine max
  unsure (1)..(185): unsure at all Xaa locations
  Clone ID: PAT_MRT3847_40185C.1.pep
MTDRDRDRDRDRTRDRERERRRDKDDRDRDRDRARSKRSRSRSPDRGRSRHLRSPSPSERSHRRRHHRTPSPDPPRKRHRRDSTEEEHKETKKAVSDFVDGIVKEQQQKQQKDNGDGGGEAEXGTRPSWRIIKMFGIPPGFDSTKGKPVPGADVSGVRAVTKRQPRQYMNRRGGFNRPLPAEKNR

SEQ ID NO: 219446 - protein, 293 aa, Glycine max
  unsure (1)..(293): unsure at all Xaa locations
  Clone ID: PAT_MRT3847_40186C.1.pep
MGCYRVQLVAIISFMLLLSNTHGWGDDGHAIVCKIAQARLSTAAAKAVKKLLPKSANNDLASKCSWADSLRVVFPWSSALHFANTPDSVCNYKDTRDCVDKKTGIKGRCVVAAITNYTNQLLEYGSDTKSKYNLTQSLLFLSHFLGDVHQPLHCGFFSDKGGNEINVRWYRRKQNLHHVWDASIIETEVERFYDDIEDFVDAIQRNITKVWADEVEEWESCSNDDISCPTIYATRXAKNACKWAYKDATEGSVLEDEYFLSRXPIVNLRLAQGGVRLAATLNRIFDTQFAVSM

SEQ ID NO: 219447 - protein, 92 aa, Glycine max
  Clone ID: PAT_MRT3847_40187C.1.pep
GGASQRKNPFVFSLLLKIGEKLPWGPSLLWLGGPLMRKRGPLPFWDLPVCLAVPKVFLLMENAFFLYAPHRENYVPPCVKPFWGFWLEKPIS

SEQ ID NO: 219448 - protein, 36 aa, Glycine max
  unsure (1)..(36): unsure at all Xaa locations
  Clone ID: PAT_MRT3847_40188C.1.pep
IINSIIVLVPPLCYIHSSASCNLLPTTNTSTSGFXX

SEQ ID NO: 219449 - protein, 91 aa, Glycine max
  unsure (1)..(91): unsure at all Xaa locations
  Clone ID: PAT_MRT3847_40189C.1.pep
LRFLTNINIAEHFDACGWAKLXPHSWELIFPIEVCGPNNGFEMRSSEWANQTSWYLSFLIDNPKQSTDFRYFLGXSQHFENPGYTLITPIF

SEQ ID NO: 219450 - protein, 94 aa, Glycine max
  Clone ID: PAT_MRT3847_4018C.1.pep
ASLSSLELLLAVLILSPQALANSENPPLCGAPSEKGGGKKAPARHPPRSRPPGENTQNRGAPAHKNTKNTPQAEKPPGDRSTPRETPPAHAPAV

SEQ ID NO: 219451 - protein, 71 aa, Glycine max
  Clone ID: PAT_MRT3847_40190C.1.pep
EFNYHQSPSEVLLFLSEWEPQCMMSPACASNWPQSCWVSRGSLYLARHLISVSRVFSYQTKSVYHNHSVRL

SEQ ID NO: 219452 - protein, 98 aa, Glycine max
  unsure (1)..(98): unsure at all Xaa locations
  Clone ID: PAT_MRT3847_40191C.1.pep
NPVRGAISLGDLNVVTELMRLAKLALLRRPPSKCFACKYFPPPSPCSGSRSSSSKRTRLALASSSSHLSISALPNLVVSSLRIRVSXVVSAQHMVFSC

SEQ ID NO: 219453 - protein, 64 aa, Glycine max
  Clone ID: PAT_MRT3847_40192C.1.pep
MKKQCWLLHSPSSILAHTTYASCLLAIVPPNPKPFHSSTIRRLKPKTRHQRTTGPFATLSSKRR

SEQ ID NO: 219454 - protein, 233 aa, Glycine max
  Clone ID: PAT_MRT3847_40193C.1.pep
PASEASKTLMFFEGCPRRLGCTVLLKGTCREELKKIKHVVQYAVFAAYHLSLETSFLADEGATLPKVIVKNSTDMPESATADTDISIIPISFSTTMCQSEADNAFRVEDFVGLDLKLENLGSVPEHLDDLSCHSVTGTMADYRAESVLSDSFYNNLTSNLTVESDYLHQGNESDGDTIFSTRDLLQSELQQTTVQEEREYGEVADLTKDKTNEDELSGEYFSATDGHQSILVY

SEQ ID NO: 219455 - protein, 201 aa, Glycine max
  Clone ID: PAT_MRT3847_40194C.1.pep
MDASSFKIILGSSSVARRKILSEMGYLFTIMTADIDEKSIRKETPEDLVMALAEAKAEAILQRLPVDDYLKEAEPTLLITSDQVVVYEGVIREKPTSKEEARQFLKDYSGRHAATVGSVLVTNLKTGLRKGDSDRVEIYFNEIPDEIIEKLVDEGITLNVAGGLIIEHPLVLPFVKEVVGTTDSVMGLPKALTEKLLKEAL

SEQ ID NO: 219456 - protein, 64 aa, Glycine max
  Clone ID: PAT_MRT3847_40195C.1.pep
VSVIEVSILVYGFGLHCNLLPISVCTLMNTRSRYLRCLRIPVRVLNLPVNNILGNSPQHHQPPS

SEQ ID NO: 219457 - protein, 182 aa, Glycine max
  Clone ID: PAT_MRT3847_40196C.1.pep
MEIVRPQNRRNLLSSSNEAVSAPTIPLYRSAPPLEVRLEDFESFAIDRLRVLKGISDGMSRGKKAEEMENLVKDLWKVNMRHQEATQVLNKDIISHFVLRLVYCRTEDLRKWFLSMETALFRYRFRLLNAEAQRTVMEEFDLPYRAVSNVEFESIKEKLGQVARSMGQPSPTADAIFYKVPV

SEQ ID NO: 219458 - protein, 97 aa, Glycine max
  Clone ID: PAT_MRT3847_40197C.1.pep
FLLRGVLWLSGPVPGAFLSVSCPGPLPFGWWGVWPFLVCVLPVSRVVLFFLSLLPRSAFFPYASVLCPSFLCVGCFSVLLFPGPLSVFRHLLTYASN

SEQ ID NO: 219459 - protein, 142 aa, Glycine max
  Clone ID: PAT_MRT3847_40198C.1.pep
MDASSFKIILGSSSVARRKILSEMGYLFTIMTADIDEKSIRKETPEDLVMALAEAKANAIISKLQTTTNQQRVDEPTILIAADTVVVYEGVIREKPTSKEEARQFLKDYSGRHAATVGSVLVTNLKTGLRKGDSDRVEIYFN

SEQ ID NO: 219460 - protein, 71 aa, Glycine max
  Clone ID: PAT_MRT3847_40199C.1.pep
HHLLQGSLWVCYHLGLHDLRTDLGTRWDIASDDLVSKMVLYGGFYAGGATLPSLRATTANVTHPRTRTAEC

SEQ ID NO: 219461 - protein, 69 aa, Glycine max
  Clone ID: PAT_MRT3847_4019C.1.pep
IEGNRCGFWCEVRDLIVIHKVQNYYNNFVLYFFFSCVCVCARVKVKTKEESTEKRNNSKTNGKARTQDH

SEQ ID NO: 219462 - protein, 120 aa, Glycine max
  unsure (1)..(120): unsure at all Xaa locations
  Clone ID: PAT_MRT3847_401C.1.pep
VSEEVNLDDAKCKVLEXVEHHYPEISQGVTGNLTKRPIKIRTGDTGHMFDYATNETPELMPLNHVLATKLGMQLIELHKNEIXPWLRPDRKTQVTXEYAKDHGTMVTVRIHTALICTKHY

SEQ ID NO: 219463 - protein, 145 aa, Glycine max
  Clone ID: PAT_MRT3847_40200C.1.pep
LGMNHLKDSLPPNQSSADMNRNSGISLSSIVTSVSRTIVTLSKPRSDTPPPPQLLGHAIVLSIQPTTTLKPLVSNIRLSANKIVGPLPGILLGPPRTQSWPTGPCGWPSRPCGPPSSLRFFFWLFPFILSLNISIVLISATLFYI

SEQ ID NO: 219464 - protein, 108 aa, Glycine max
  unsure (1)..(108): unsure at all Xaa locations
  Clone ID: PAT_MRT3847_40201C.1.pep
SGVACVVVFVLLFCSGFLLCPSPPLLFRSPWXWVGPPCLXLAPGLCVLRXVPRSCLFSXVPPPCLCLXLVPSLFLRRPPLLLLGSLPPSASRRLSSPVRXRGSXRVFR

SEQ ID NO: 219465 - protein, 344 aa, Glycine max
  unsure (1)..(344): unsure at all Xaa locations
  Clone ID: PAT_MRT3847_40202C.1.pep
MASSSITCTFHCNLHPSISLPTSATRFSLSFSHPLLCTYNGLSLHPSSSSFRVFAKFEKFQSQPSQSQEPDPSPSLEETTETSVQDDEEDDSCLPSDLEGAVRQSSEDEGTFVSSGGMRALVELLIPQLQFLDEEVSXGELWELSRIFLDTLIGKTESDLVKVLFRDAGVXSLLQYLMTDALFSIASLSDRKPVDSDDEMGNVIVPNYQMLDYLXRIACNLKDVPEITPVFLLLEYVNRKDSNLSYIPEPTPLIMWNPRLISEVVGVGSIGGKLRRVFLISFTFVYFMRPMPRYLLVKEFESRPDADDIELLFADEDQKSEQGQGLLDKAAGIFSSISRMMKSI

SEQ ID NO: 219466 - protein, 81 aa, Glycine max
  Clone ID: PAT_MRT3847_40203C.1.pep
LLSHDHSAYKLEHVTHENRNEQERVREGNADRLGWLKNGCHPNGFLKKQRAGMHFSINNTKPLITDHRSPKESIKARSNFW

SEQ ID NO: 219467 - protein, 65 aa, Glycine max
  Clone ID: PAT_MRT3847_40204C.1.pep
KKEMEIIHYSAASSSCVPSLHRSSPSRSDSNTQNLFLTRRHSKPHAGLGEVPTCKLGGLRRTQHT

SEQ ID NO: 219468 - protein, 71 aa, Glycine max
  Clone ID: PAT_MRT3847_40205C.1.pep
TTTDAYDAHRVVYIAGRVTRLMRKDSVEREDVITNNFNIYTLQANASVFFLKSTYEFTSMLSAKSPMCPSF

SEQ ID NO: 219469 - protein, 69 aa, Glycine max
  Clone ID: PAT_MRT3847_40206C.1.pep
ILYSRRFEDQLSQNIKLLGKFSLVSLIGIYTLMNVCKSSFNMITFLSPRVGFLCNRFKYLLYSHSHMID

SEQ ID NO: 219470 - protein, 97 aa, Glycine max
  Clone ID: PAT_MRT3847_40207C.1.pep
KGRGGVSTPLFGEGAKIQKKKNGGNHLKGQAIYKVKKGPKLGGGEIKKFGEKKSFLAPFQQGGAHYPGLLFRKRIQFNGPILKKNRVWRGRPNLAPP

SEQ ID NO: 219471 - protein, 51 aa, Glycine max
  Clone ID: PAT_MRT3847_40208C.1.pep
RTTFSGIWVLSLLLLAYFVHLTMSCVFLCCLVVLIQLSSTSLGGIYYVLVG

SEQ ID NO: 219472 - protein, 362 aa, Glycine max
  Clone ID: PAT_MRT3847_40209C.1.pep
MMSLQRTKLFPFFIVLVSFTCSLSLAMSSNQLEQFASEEEVFQLFQAWQKEHKREYGNQEEKAKRFQIFQSNLRYINEMNAKRKSPTTQHRLGLNKFADMSPEEFMKTYLKEIEMPYSNLESRKKLQKGDDADCDNLPHSVDWRDKGAVTEVRDQGKCQSHWAFSVTGAIEGINKIVTGNLVSLSVQQVVDCDPASHGCAGGFYFNAFGYVIENGGIDTEAHYPYTAQNGTCKANANKVVSIDNLLVVVGPEEALLCRVSKQPVSVSIDATGLQFYAGGVYGGENCSKNSTKATLVCLIVGYGSVGGEDYWIVKNSWGKDWGEEGYLLIKRNVSDEWPYGVCAINAAPGFPIIKEVASSSAI

SEQ ID NO: 219473 - protein, 89 aa, Glycine max
  unsure (1)..(89): unsure at all Xaa locations
  Clone ID: PAT_MRT3847_4020C.1.pep
MVGKESLRTHEVLNFSFEKLMMVDCGGNSGKGVNFKAGVITEWKDIPVELLMQILSLVDDQTVMIASEVXLGWKEAICFGLTRLSLSWC

SEQ ID NO: 219474 - protein, 93 aa, Glycine max
  Clone ID: PAT_MRT3847_40210C.1.pep
TGFPFGHLTKDNRGPLLQFFGPKIKRCSIAFSPKLGCLKKPLPFFFFFQQFLGEGLGPISSFPTPAWKVIIFFLGPPNLIPWPGFYNLGAGKT

SEQ ID NO: 219475 - protein, 51 aa, Glycine max
  Clone ID: PAT_MRT3847_40211C.1.pep
KRDVNEETEEMSSVPINRLKSFTFPFLFVHLNLLSGYHSDRLIESGSCFRG

SEQ ID NO: 219476 - protein, 74 aa, Glycine max
  unsure (1)..(74): unsure at all Xaa locations
  Clone ID: PAT_MRT3847_40212C.1.pep
SPESGSLSGSSSTTHSISQSPKPFPRRVLXXQVVAISLSKPKLTQFSITFPLNLIIVIIILSHSKFRSSTQFSL

SEQ ID NO: 219477 - protein, 119 aa, Glycine max
  Clone ID: PAT_MRT3847_40213C.1.pep
VGYAVSVPLWILGTGGLWLFVPQAKQPKLWGVPLVPWLPSLSIAINIFLLGSIDKDSFIRFGVWTGFLLVYYVLLGLHASYDTAKVFESKKSSVDVDKQWNKVEEGAKGEVSLTAVSND

SEQ ID NO: 219478 - protein, 365 aa, Glycine max
  unsure (1)..(365): unsure at all Xaa locations
  Clone ID: PAT_MRT3847_40214C.1.pep
IKHLWRQNLCESKYGRQLVMRTDDFEKPAQTNVLCSNWKEWKQPIIWFQGTTDAVAAQFFLKNIHSQMRIAAFDLFGDPQVLGSQPNVFGELLRVLISPSKDVEAAVNWVIGGEENPDISLHMRMLMNRSIRAVQAALHCIKKVIESQHLTSRPKVVVVSDTPSLVKSIMPNISEFAQVLYFDYEKFKGNIFEGLPKLDFRVKDWGPAPRWVAFVDFFLASRAKYAVVSGAHRRVGTTXYAQLIAALAATRNLGDNSSSSSFSFLSSFQSTMLTEGLKNQVGWGHVWNRYAGPLSCHNQTNQCAFTPLLPPGWWDGLWQSPIPKDISRLAAYGIKLSGLGTVDYDSLQNYCSTRKNVERTVTFNL

SEQ ID NO: 219479 - protein, 65 aa, Glycine max
  Clone ID: PAT_MRT3847_40215C.1.pep
ARGSSSASGTPCESPLLQSHSPQSTSLPQIPSCPPHRCRGKCDCESFFPVSLVGREKEDYLKGLW

SEQ ID NO: 219480 - protein, 119 aa, Glycine max
  unsure (1)..(119): unsure at all Xaa locations
  Clone ID: PAT_MRT3847_40216C.1.pep
MTNNFPNEKVESRHTFHHLPNTSHHQHQQHSSGFADTHYVTKYEADAMKSEPQPMKLVXHWLHSVQPVDFALKETSPYLGGGRVVSGRVVHKDKTASTYDLVERMYFLYVRGSQGFVSF

SEQ ID NO: 219481 - protein, 143 aa, Glycine max
  unsure (1)..(143): unsure at all Xaa locations
  Clone ID: PAT_MRT3847_40217C.1.pep
IPPSKTKGPIQFXDWGPPGFKVGINTPPPPVVPGGDLAKVQKTVCMLSTPPPLFEAWAPLDPKFYLMYPKRAFVPWYVGKGMKKGEFFKAREDMAPLKKDFXEVGVDFLEGQXRKKERNFKLNVPRGCFPRDVYCVPPQKVLV

SEQ ID NO: 219482 - protein, 34 aa, Glycine max
  Clone ID: PAT_MRT3847_40218C.1.pep
WKLWRRAQFYFLLFFSFSFTMELSLLFKYIKAEN

SEQ ID NO: 219483 - protein, 117 aa, Glycine max
  Clone ID: PAT_MRT3847_40219C.1.pep
MTLFYDEDENLAQFLESEVLSEVSDKEEENVEEPKAKRKRVEEDEITKQKQSSDSSSAPKNIVVSNGVVLRRIETGYFSQIPPELFNHILKFLSSEDLVSCSLVCRFLNYAASDEAL

SEQ ID NO: 219484 - protein, 73 aa, Glycine max
  unsure (1)..(73): unsure at all Xaa locations
  Clone ID: PAT_MRT3847_4021C.1.pep
FGSSSLIARLALRCLVMSLSVVFTLGLARESHAREEDFSHAVWLNTLIPCSLRDLLXPGSVSDDIDVHPMLLA

SEQ ID NO: 219485 - protein, 39 aa, Glycine max
  Clone ID: PAT_MRT3847_40220C.1.pep
CAHILILLSPCKSTCCCSFLYPTIRSTHPPPSLFRFENA

SEQ ID NO: 219486 - protein, 203 aa, Glycine max
  Clone ID: PAT_MRT3847_40221C.1.pep
MEIEADARDSSLVLLKQGAEARVFESSFVGRKSVVKERFSKKYRHPTLDSKLTLKRLNAEARCMTKARRLGVCTPVLYAVDPALHTLTFEYVEGPSVKDVFLEFRSHVVNKEWLDDIASQIGDAIGKLHDGGLIHGDLTTSNMLLKSDTKQLVLIDFGLSFTSTLPEDKAVDLYVLERALISMHSSCGNVAEVYSTTPEINAI

SEQ ID NO: 219487 - protein, 100 aa, Glycine max
  unsure (1)..(100): unsure at all Xaa locations
  Clone ID: PAT_MRT3847_40222C.1.pep
VRVEPGSSFPEAAKVRGYLKGPSPFAVAAVAAPAAGSGAPAAAKAPPKKEGPAAXSDEKKGFCLLPSFVSCLCCVLVRALVFAFPFRCSFRGLLFRCRPF

SEQ ID NO: 219488 - protein, 340 aa, Glycine max
  unsure (1)..(340): unsure at all Xaa locations
  Clone ID: PAT_MRT3847_40223C.1.pep
MEIEADARDSSLVLLKQGAEAQLIATLCVFKGCKLTDNIPKSYCLYFSIEPNISVASMTLSSNFTSFVNIGARPNCEIVSKPSRFSEFPVKGSFFMSMMMSSVDELTLQLHSEASPLSKLLCSSWHERVFESSFVGRKSVVKERFSKKYRHPTLDSKLTLKRLNAEARCMTKARRLGVCTPVLYAVDPALHTLTFEYVEGPSVKDVFLEFRSHVVNKEWLDDIASQIGDAIGKLHDGGLIHGDLTTSNMLLKSDTKQLVLIDFGLSFTSTLPEDKAVDLYVLERALISMHSSCGNVMDQILAAYRKSSKQWSSTLNKLAQXLYPPSYTWRQRGRKRTMVG

SEQ ID NO: 219489 - protein, 95 aa, Glycine max
  Clone ID: PAT_MRT3847_40224C.1.pep
ARGLLNLGCATGHPSFVMSNSFTNQTLAQIELWTQKDSGKYVNGKVYVLPKHLDEKVARLHLGNLGAELTVLSKEQADYIGVSVEGPFKPETYRY

SEQ ID NO: 219490 - protein, 53 aa, Glycine max
  Clone ID: PAT_MRT3847_40225C.1.pep
VTERPIPLTYTCGRREEPIWGTTLRKLFALVRDTGDAGAYGPKVGIMNTPPRA

SEQ ID NO: 219491 - protein, 107 aa, Glycine max
  unsure (1)..(107): unsure at all Xaa locations
  Clone ID: PAT_MRT3847_40226C.1.pep
MGFLAAFTGGGFLGMSEMLGNPINLNGGTRATSFGSNPWLFKTGALFFQKKXNFKKKLQLLAPANDELAKWYGPXQRIFLPEGLLDRSEIPEYLTGEVPGDYGYDPF

SEQ ID NO: 219492 - protein, 95 aa, Glycine max
  Clone ID: PAT_MRT3847_40227C.1.pep
CLNTMSNFHALWLKFQWRYQDRSGRSRQKKKTLFTVKSWPKHSVCTEVVPRTELEHRYDQRKPLLHQLSDRLHGAPVANNCNKELLPLVDRNSLP

SEQ ID NO: 219493 - protein, 291 aa, Glycine max
  Clone ID: PAT_MRT3847_40228C.1.pep
LEPHPTKGKGGTVYDVDLVQRLLEHFIIQEQTESSSPSRQSFSDKQHMGMGCILNAKARVARLVDSYLTEVSRDRNLSLTKFQVLAEALPESARTCDDGLYRAIDSYLKAHPTLSEHERKRLCRVMDCQKLSIDACLHAAQNERLPLRVVVQVLFAEQVKISNALASSSVKDVESESHAMVTNRKTLLEGTPQSFQEGWTAAKKDINTLKFELESVKAKYMELQNDMASLQKQFDKMLKQKHTSAWSSGWKKLSKLGRTTHLVENQDDSPEIQDSLEQNRKTTRRWRNSIS

SEQ ID NO: 219494 - protein, 86 aa, Glycine max
  unsure (1)..(86): unsure at all Xaa locations
  Clone ID: PAT_MRT3847_40229C.1.pep
LGKEIPPKNPKIFHFGKKRCDQRRGKKGYKGQTNTTVIFWGCRGXKNPTLKKGGERGGGGGGYGGGNTTXXQKKSSHPHSPQQRGS

SEQ ID NO: 219495 - protein, 40 aa, Glycine max
  Clone ID: PAT_MRT3847_4022C.1.pep
FGREGLMQRPFVLAPTSLKGQLFPPCFMQALYKGVNVCFT

SEQ ID NO: 219496 - protein, 86 aa, Glycine max
  Clone ID: PAT_MRT3847_40230C.1.pep
INTLKFELESVKAKYMKLQNDLVSLQKQFDKMLKQKHISAWSSGWKKLSKLGRTTHLVENQDDSPKIPDSLEQNRKTTRRWRNSIS

SEQ ID NO: 219497 - protein, 85 aa, Glycine max
  Clone ID: PAT_MRT3847_40231C.1.pep
MRKKLDTRFPAARIKKIMQADEDVGKIALAVPVLVSKALELFLQDLCDRTYEVTLQRGAKTMNSLHLKHCVQSYSVFDFLRDIVS

SEQ ID NO: 219498 - protein, 92 aa, Glycine max
  Clone ID: PAT_MRT3847_40232C.1.pep
RRRVFFPLTCHGDVFIEFSFNLMKLSVMRVNSRVFEFCSYCMIGVYYCPGYGLCTCLFLIIEAFKCFWHLLSCFSFYVYEVFGQSFLLLANR

SEQ ID NO: 219499 - protein, 39 aa, Glycine max
  Clone ID: PAT_MRT3847_40233C.1.pep
KVGLLRTAGYYHFERCTMMYPISSIIAAGPFGGLVAAVP

SEQ ID NO: 219500 - protein, 90 aa, Glycine max
  unsure (1)..(90): unsure at all Xaa locations
  Clone ID: PAT_MRT3847_40234C.1.pep
NELEDKKFLAGQLFGAVXRGSVFIAFWIPIFQETARSQLFSSXRYPILDKWSQEFLRHPFVRXVLPHNHPLYAYVYSPAMKVFLLQNSLI

SEQ ID NO: 219501 - protein, 70 aa, Glycine max
  unsure (1)..(70): unsure at all Xaa locations
  Clone ID: PAT_MRT3847_40235C.1.pep
XMXXTXAXNSARAKXSXCXXXXXIDXXXXEXXXXVFXYIXLXNXSMWGNWNRITVXSSGXXTXXKCRXTF

SEQ ID NO: 219502 - protein, 113 aa, Glycine max
  unsure (1)..(113): unsure at all Xaa locations
  Clone ID: PAT_MRT3847_40236C.1.pep
LFGLAFPAPCFSVGSLLICRSFFSFVSGAFFVLCLAWRSSLCALVRSSSFLCPSVLAGAFPSPLGGFFWAARRLVLVLFSGVCGVGFLLLGVFAGSLILFRPXSGLVLGGYQP

SEQ ID NO: 219503 - protein, 87 aa, Glycine max
  Clone ID: PAT_MRT3847_40237C.1.pep
HIHYSLSLFYCMAGNSRIRSITFLWKQVPNRIWTYNAPPLTSMTGAYISGCMYDKNPDDEIHSCARARRCDPGRYTVRLILGHTSTD

SEQ ID NO: 219504 - protein, 69 aa, Glycine max
  Clone ID: PAT_MRT3847_40238C.1.pep
GSGARWKMRTPFTLSHFLLLLIFSAGLASDFVVQGRAHGVKIPEHWCHKMIHLSNCELQKCFQECSKQP

SEQ ID NO: 219505 - protein, 182 aa, Glycine max
  unsure (1)..(182): unsure at all Xaa locations
  Clone ID: PAT_MRT3847_40239C.1.pep
IYPNEKSSPVHIGGGGRLCGDNDIYIARPIVKIARRWGCDDVHFXSEHAGTSDREILYEMLGEPIKSXCTTLNIPDTAGITMPMEXQKLTVDIKVCGLGMRNDTMSTRXHSDLRLTTANTIYGARASATQLNMTIYGIGETAAYAHTAYDVMVYACCSHVTGPLYGGTRTKSIYVTSTHVAD

SEQ ID NO: 219506 - protein, 42 aa, Glycine max
  Clone ID: PAT_MRT3847_4023C.1.pep
AIHHVKLENVKYLRQCIQMTMTVITSTHLQCNQATTLTNLLT

SEQ ID NO: 219507 - protein, 67 aa, Glycine max
  Clone ID: PAT_MRT3847_40240C.1.pep
KEKEKVSSVLFIAVYSLPFLCKDENIEICQQDPSIISLFLFFSLWSARNMVYMVGTINDDLDSPSRI

SEQ ID NO: 219508 - protein, 112 aa, Glycine max
  Clone ID: PAT_MRT3847_40241C.1.pep
RSKRRSAKREVSDSDDSGEERRRRKRRWEPRRKRDNSSDEDDEYRPRHRKSRKEKRRRRSRLSDSDSSEDSIRRHKRKNKRASSSSDTDSRRKGRNVSKSEKRRSRHNANDE

SEQ ID NO: 219509 - protein, 87 aa, Glycine max
  Clone ID: PAT_MRT3847_40242C.1.pep
FGRQGFPPSRFGPLGQFAPRGGDQALPKFPGDGVPRGPTPQGLGVSVFPTSQFTWPPGVLARFIWPKGFFFGGVSGRVYFAPWFFSG

SEQ ID NO: 219510 - protein, 65 aa, Glycine max
  unsure (1)..(65): unsure at all Xaa locations
  Clone ID: PAT_MRT3847_40243C.1.pep
FKCVSVSFSLGALGYSAWGSVFDFGSLSSCSGFGQLPFCCVDCSAGAFVHCKNALFSCGXGPLDT

SEQ ID NO: 219511 - protein, 66 aa, Glycine max
  Clone ID: PAT_MRT3847_40244C.1.pep
SHHHHFTYFALSLSLSIASQFAQNLLRLHNFPSFYLCEHTQSPNHGSEYRERRNRLQRSRNDYALR

SEQ ID NO: 219512 - protein, 95 aa, Glycine max
  Clone ID: PAT_MRT3847_40245C.1.pep
RLRETTEGECGEPGHFARECRMRGGSGRRRSRSPPRFRRSPSYGRRSYSPRGRSPRRRSLSPRGRSYSRSPPYRGREEVPYANGNGLRERRRSRS

SEQ ID NO: 219513 - protein, 68 aa, Glycine max
  Clone ID: PAT_MRT3847_40246C.1.pep
KAYPIMIIISIKKKTFDYFLGHKLNSMHGSQLAFQDRNSKRNNRRQSRQPCMVLAPSKEEGQRLREVK

SEQ ID NO: 219514 - protein, 178 aa, Glycine max
  unsure (1)..(178): unsure at all Xaa locations
  Clone ID: PAT_MRT3847_40247C.1.pep
MASSTISSPTVTTVNRAGAGMDAPFTGLKAMAGFLTTKTNNDITSIASTGGRXHCMQVWPPPGNKNIETLSYLPHLDDAQLAKEGQHLLKKGWIPCLELQXEHSCRYREHNRSPRYYDGRYCTMXNLPMFGCTDAYHALNELRDADTAYPNGFIRIIRCNIVEQVQCINFIAYKPPDF

SEQ ID NO: 219515 - protein, 38 aa, Glycine max
  Clone ID: PAT_MRT3847_40248C.1.pep
FLATFKNHENRKKLKKWFKSSNFVVLIFSHILTNFQAI

SEQ ID NO: 219516 - protein, 103 aa, Glycine max
  Clone ID: PAT_MRT3847_4024C.1.pep
MLKQLSDMDTGKNSIRDNGEISEKEEHQHHTSKTEHRRGGIRTLPFILANELCDRFASSGFHANMISYLTQQLNMPLVSASVTLTNFNGTSSFTPLFGALIAD

SEQ ID NO: 219517 - protein, 70 aa, Glycine max
  Clone ID: PAT_MRT3847_40250C.1.pep
IEFTQHNENKNHSEETATNSVYQNHRVMLLTNHNLFSQTVIETISMSKCSFSNFFASYSYAIISLVFTVW

SEQ ID NO: 219518 - protein, 41 aa, Glycine max
  Clone ID: PAT_MRT3847_40251C.1.pep
KGSFGRETKKRKAKVNSSAVNDPIVRTQSYDERIIELTYST

SEQ ID NO: 219519 - protein, 131 aa, Glycine max
  unsure (1)..(131): unsure at all Xaa locations
  Clone ID: PAT_MRT3847_40252C.1.pep
DGFNNGEKKVCTFSPCPTYDWLELSFATLSARHWYSTNHLLPNDCQIIIGSXRQFNYEFFPKTHTTXKNIFSLPFVVQTNDPHEENNLYPFVFLNMESTLFIFANIKVILFDYTKNVIIQTFPIVPHGDPS

SEQ ID NO: 219520 - protein, 95 aa, Glycine max
  Clone ID: PAT_MRT3847_40253C.1.pep
YNANNPRLGNPKTPQYSWTAPQFKLTPVAPSQPCSRKKSYLTPRRGGLKRKNFLPLATPYTMPRYRWSPGTADPQQLEPSCYPGPRRSSYYSEPH

SEQ ID NO: 219521 - protein, 186 aa, Glycine max
  unsure (1)..(186): unsure at all Xaa locations
  Clone ID: PAT_MRT3847_40254C.1.pep
LYECVQTIMSVEDNGGLRVLAINILGRFLSHKDNNIRYVGLNMLMKAVTVDAQAVQRHRATILECXRFSPEKIWYIDQMLKVLSEAGNFVKDEVWHALIVVISNASELHGYTVRALYKAFKMSAEQETLVRVAVWCIGEYGDILINNAGMLDVEDPVTVSESDVVDVVEIALKCHASDLTTKAMAL

SEQ ID NO: 219522 - protein, 469 aa, Glycine max
  Clone ID: PAT_MRT3847_40256C.1.pep
MAKTTHIAIVSSPGYTHLVPIIEFSKRLIKHHQNFHVTCIVPSLGPPPESSKAYLKTLPSNIDTIFLPPISKEQVPQGVHAAILIQLTITLSLPSIHDALKSLCSKAPLTALVVDVFAFQALEYAKEFNALSYFYFPSSAMILSLLMHAPKLDEEVSGEYKDLTEPIRLPGCVPVMGVDLPDPAQDRSSEIYNYFLERAKAMVTADGILINTFLEMEPGAIRALQEFENGKIRLYPVGPITQKGASNEVDESDKCLRWLDKQPPCSVLYVSFGSGGTLSQNQINELASGLELSGQRFLWVLRAPNNSASAAYLEAEKEDPLKFLPSGFLERTKEKGLVVPSWAPQVQVLSHNSVGGFLSHCGWNSTLESVQEGVPIIAWPLFAEQRMNAVMLTDGLKVALRTKFNEDGIVEKEEIAKVIKCLMDGEEGIGMRERMGNLKDSAASALKDGFSSQTLSQLASQWECFSGNC

SEQ ID NO: 219523 - protein, 60 aa, Glycine max
  Clone ID: PAT_MRT3847_40257C.1.pep
EDKTFFINWVNSYLFYFSCHCSSSIYNLSPCRDHNQTNHADLSYVNRQRVLLIAYVHYET

SEQ ID NO: 219524 - protein, 108 aa, Glycine max
  Clone ID: PAT_MRT3847_40258C.1.pep
ESIVKACACFGQKKKKKKKKKKKKKKKKKKKKKKKKKKQKKKKKKKKKKKKKKGGPPINNPANPEINSGPVLAGVQVFPKGILIKPWGKQGKTGSLWKIVTRTNFNTT

SEQ ID NO: 219525 - protein, 59 aa, Glycine max
  Clone ID: PAT_MRT3847_40259C.1.pep
DWKREMVASDLRVHNMVDSLLVIVVDQEIYECTVSCIECISIILYGMHNSNRMVSKANG

SEQ ID NO: 219526 - protein, 108 aa, Glycine max
  Clone ID: PAT_MRT3847_4025C.1.pep
MAPKKDKAPPPSSKPAKSGGGKQKKKKWSKGKQKEKVNNMVLFDQGTYDKLLSEAPKYKLITPSILSDRLRINGSLARKAIRELMARGSIRMVSAHASQQIYTRATNT

SEQ ID NO: 219527 - protein, 75 aa, Glycine max
  Clone ID: PAT_MRT3847_40260C.1.pep
THYTYRPRQPNMATIGHRYVCAVQELIDTDRHDHTTRSAEDETLDEATTEEARKAAVKNVSDHEPRKAWDQATDS

SEQ ID NO: 219528 - protein, 106 aa, Glycine max
  Clone ID: PAT_MRT3847_40261C.1.pep
SHRSCPLPLSPQQLWSCTVQRLSQDRDFLFFLVLPASALGVVQHGLVPRLRRPCFSPRGVLRPPWPLIYCFAPLLGRRLLQLASAHRMHLSSCCLCRPPLYPLVQL

SEQ ID NO: 219529 - protein, 106 aa, Glycine max
  unsure (1)..(106): unsure at all Xaa locations
  Clone ID: PAT_MRT3847_40262C.1.pep
SCSYWGGCLYGVYVLLPTKTNVVETTTEWQLDLRRDKFASGLSTSDERXVGTEHEGYXDPFLGGIQKYATSMMPVDEEILSKDVQDMVEEWFECVDEEDSFVVILF

SEQ ID NO: 219530 - protein, 73 aa, Glycine max
  Clone ID: PAT_MRT3847_40263C.1.pep
RNQRPLNKPTRGQIFKKTLKKKLLQLITGPTEKRNYWGGYKKKQAFGFSALKIPGAKTKPKEFLEGQNSLRWI

SEQ ID NO: 219531 - protein, 108 aa, Glycine max
  Clone ID: PAT_MRT3847_40264C.1.pep
MFHTQHLQSMSMPRGSLRNAFDGTFIALCSLASQNSTHPILGASTRCNFLIRLNNSPAGLFTTFAIAYAMRDVVRFTGCDVSNGPSTTSSSGLQCRYFDLYHLRHPLA

SEQ ID NO: 219532 - protein, 59 aa, Glycine max
  Clone ID: PAT_MRT3847_40265C.1.pep
QTDAYIVLPGGRASYREREPSTGNINQSQCGSELSIYILHTNDPLTCSQSFYTGCATTS

SEQ ID NO: 219533 - protein, 80 aa, Glycine max
  Clone ID: PAT_MRT3847_40266C.1.pep
GFAINTKHVKTQVLVENGGTVVIGGIFQIDETESVNKVPVLGDIPYVGALFRNKTRSSNKTELLVFLTPKVITDRNAPAR

SEQ ID NO: 219534 - protein, 413 aa, Glycine max
  Clone ID: PAT_MRT3847_40267C.1.pep
MDLLKQELLKKRQSLAQDTGGKKFFKRSEIQQKEIQKLREQEKRELEAKSQKRLATSSDNAATAPSSSSTASASASSTIASSSAASLTNEQNIDNLVLPKPEVIRRLRFLKQPVTLFGEDDDARLDRLKYVLKAGVFEVDSDMTEGQTNDFLRDIAELRKRQKTGILGERKRQKADDGAAEDREGGAGDDDLSDCVGTDGADADKDLKRMKANFEELCDEDKILVFFKKLLNEWKQELREMPEAEKRTAKGKSMVATFKQCARYLNPLFKFCRKKVLPDDIRQALLLMVECCMRRDYLAAMDHYIKLAIGNAPWPIGVTMVGIHERSAREKIYTNSVAHIMNDETTRKYLQSVKRLMTFCQRRYPTLPSKAVEFNSLANGSDLHSLLAEERFSGGNQAASEERLRIMPAPRDS

SEQ ID NO: 219535 - protein, 88 aa, Glycine max
  unsure (1)..(88): unsure at all Xaa locations
  Clone ID: PAT_MRT3847_40268C.1.pep
TAWGGSGXDFXSMNMXXLLKNIWTAEEVQTMASAGXXADDGXAGVXHLQRQGSLXXPRXLXSHKTVDEVXXXISKXHGGXNLGPKXRR

SEQ ID NO: 219536 - protein, 183 aa, Glycine max
  unsure (1)..(183): unsure at all Xaa locations
  Clone ID: PAT_MRT3847_40269C.1.pep
MEFFFTVLIILSVITPGLSSTTTSFNVLQYGAVGNGQTNDSPAFLKAWKAACQSNSHISRLIIPAKRTFLLKPTTFSGPCKSNYTYIQLSGNIIAPKTKSEYSGFHTNTWLGFSFVNGLAISGKGTIDGRGSAWWQQPCVGNPLPGATCRPPTAVTFNRCNRLQLKGYTSINPXRSHMTLNSC

SEQ ID NO: 219537 - protein, 50 aa, Glycine max
  Clone ID: PAT_MRT3847_4026C.1.pep
YLHSSVSFIKKRFLLDSYAIDDLYRMILTVSPSFLVSCVVLLYSIHHQIC

SEQ ID NO: 219538 - protein, 82 aa, Glycine max
  Clone ID: PAT_MRT3847_40270C.1.pep
DAYTPRQLFTGNLYCQRTTGLSVSMGCIAGLLLECWIPNNGDPTDLRVVSRVGFRKQYWIDDSLAPSKIFKSLWIARRILQL

SEQ ID NO: 219539 - protein, 133 aa, Glycine max
  Clone ID: PAT_MRT3847_40271C.1.pep
MNAASQTFILNLTPQVATCKQRVHEFIVPSLNCRHFGLSWKLRHGARNILRREYIKCLPTADVLSDAQISSDQFEDFSVSVADNNDSSELKISVEVSGNKTQRIFDDVFKKMVAAAQPIPGFRRVKGGKTPDI

SEQ ID NO: 219540 - protein, 295 aa, Glycine max
  unsure (1)..(295): unsure at all Xaa locations
  Clone ID: PAT_MRT3847_40272C.1.pep
LVMRLGFWSGNWKNFTEPAHPHNPSGFFPHGAAGVFNGAALVYLSCIGYVAVSTMAVEVPDPVNELPVPVSGAIVLVTALPLPVATSKPPPYDIIGFQALSPLSSIFSGNSXWLVIWISSSXVPVLGSXFAVYVVADAGSYSRYVPPRTTNPWPTLSCLCSFSIPALRLPLSWKFVPTGGAKAGMLSVSGVIAIAILQLFHCMVPQVRKPEFWGVPFMPWIPSISIFLNVFLLGSLDGPSYVRFGFFSAVAVLFYVFYSVHASFDAAGDGSLTAIKMENHVESKEIEDQISLKCR

SEQ ID NO: 219541 - protein, 126 aa, Glycine max
  Clone ID: PAT_MRT3847_40273C.1.pep
MDEEKVHKILSKIFKNGDRNIYCAVLNEMMAELISKMTSDEVKRMMADLDRNVDRYIDLNDFWEVHCDVHCDGRELRKALQLDDLDKNRLIIGMELDYEMHLLMEKCSLNYCLRMSGNMNANGDGH

SEQ ID NO: 219542 - protein, 139 aa, Glycine max
  Clone ID: PAT_MRT3847_40274C.1.pep
LSFLCSFSITAIMFTLIWKFVPTGGAKAGMLSEFGSSAIAILQLFHCMVPQVRKPEFWGVPFMPWIPSISIFLNVFLLGSLDGPSYVRFGFFSAVAVLFYVFYSVHASFDAEGDDSLTANKNGEIHVESKEIEDQSFEV

SEQ ID NO: 219543 - protein, 100 aa, Glycine max
  Clone ID: PAT_MRT3847_40275C.1.pep
NPFKTPEPKTRFGVLVLTGPRGPPKAKGQIWFPFFMAWGFPWGGAWPKRGFAWEKLSYFHPHFFFCKRSLSWGETDSIQFFLGVRFVSFSNLKFMFGPHF

SEQ ID NO: 219544 - protein, 123 aa, Glycine max
  Clone ID: PAT_MRT3847_40276C.1.pep
LKFDESVCKSSFVLFFSTTEEVMLGRLLERGKTSGRADDNKESIVKRFRTFVETSMPVVDMYRKEGKVVEVDSSPSVDEVYAKVTLALEERLPKHQTESVKPLENATLPATSDGAIPQLGPVV

SEQ ID NO: 219545 - protein, 264 aa, Glycine max
  Clone ID: PAT_MRT3847_40277C.1.pep
MDTLPEDCVSKILSYTSPPDACRFSMVSSTLRSSADSDLLWRTFFPSDYSDIVSRALNPLSLNSSSSYKHLFYALCHPLLLDGGNMSFKLDKSSGKKSYILSARQLSITWSNDPLYWSWRPVPESRFKEVAELRTVSWLEIQGKIGTRILTPNTSYVVYLIMKTSHREYGLDSVACEVSIAVDNKVKQSGRVYLCQNEKDENNLKKESIGIPMRREDGWMEIEMGEFFCGEADEEVLMSLMEVGYQLKGGLIVEGVEIRPKIIV

SEQ ID NO: 219546 - protein, 106 aa, Glycine max
  unsure (1)..(106): unsure at all Xaa locations
  Clone ID: PAT_MRT3847_40278C.1.pep
MKMTALDFFVATTLVAWXCHAYDMCPHRMNTVYGARTPDVKCARWRLAKEAHNIYGYATIPDECVDVTQEYIHGLQYITDYLTVNQLAYFHAIDLEVHTKDKFENT

SEQ ID NO: 219547 - protein, 108 aa, Glycine max
  Clone ID: PAT_MRT3847_40279C.1.pep
HAAGIAIYWGQNGNEGSLADACNTGNYQFVNIAFLSTFGNGQTPQLNLAGHCEPSTNGCTKFSDVFKACQGKGIKVLLSLGGASGSYSLGSAEEATQLATFLWNTSFG

SEQ ID NO: 219548 - protein, 44 aa, Glycine max
  Clone ID: PAT_MRT3847_4027C.1.pep
PTCQESREPRVFQSKSHITWVDVIINELLIRRFDTVAAIPCMAN

SEQ ID NO: 219549 - protein, 53 aa, Glycine max
  Clone ID: PAT_MRT3847_40280C.1.pep
NDITLSDVYQKVIFLSKKMFLVTLWCMQLTHSEVPTMGRVVQILHSKLKTCIF

SEQ ID NO: 219550 - protein, 218 aa, Glycine max
  Clone ID: PAT_MRT3847_40281C.1.pep
MDWHHGTKPLVPRPETLSFFYNYNYNSPYPGVEVKQAALMETGEGSVPALMDSRNKEKKKRLTNNQIELLERSFQEEIKLDPERKMKLSRELGLQPRQIAVWFQNRRTRWKTKQLEHLYDVLKHQYDVVSNEKQKLQEEVMKLKAMLSKEQGFGKQTFGCYTEISGEETVESTSEGLTLRGKSNIEHVADQGYCSFTVEDYNTTVLLPPHCHWPAVPY

SEQ ID NO: 219551 - protein, 35 aa, Glycine max
  Clone ID: PAT_MRT3847_40282C.1.pep
VLYRIFLSLAVNVNIIQHSNYGSPSLYLLFLFLNI

SEQ ID NO: 219552 - protein, 95 aa, Glycine max
  unsure (1)..(95): unsure at all Xaa locations
  Clone ID: PAT_MRT3847_40283C.1.pep
LLFFYRSHPVHVEHKHPDLNTLQELPXLTLRTHHGHEDHTKGPAYNERVPGIDLKDPNASEAIHHAQPTSXANQVSNHGVRTSLLQNILRIGETL

SEQ ID NO: 219553 - protein, 72 aa, Glycine max
  unsure (1)..(72): unsure at all Xaa locations
  Clone ID: PAT_MRT3847_40284C.1.pep
GKXLEDGRTLTDYNMQKXSTLYLXLRLQGGMXICHKTCSGKSMTVDXXSSDAVGYVEAKIQESEXIPXXHRR

SEQ ID NO: 219554 - protein, 105 aa, Glycine max
  Clone ID: PAT_MRT3847_40285C.1.pep
RNPWGNPKPDYLEKRGFVEADVADGLLEVFGLNQGWHASFVMVELISAKHLVQASAIRLEVRGGQWKNAYMQMDGEPWKQPLSKDFSTYVEIKREPFQSLVISGK

SEQ ID NO: 219555 - protein, 66 aa, Glycine max
  unsure (1)..(66): unsure at all Xaa locations
  Clone ID: PAT_MRT3847_40286C.1.pep
LRKLPCGPYASEILDPGKNTLVCLITFYTAEDAVSSYYVFTLKXFVGPKAITNFPFLLYNNTYVYS

SEQ ID NO: 219556 - protein, 171 aa, Glycine max
  Clone ID: PAT_MRT3847_40287C.1.pep
KIIYSGYSCTQGWFFTPCVSDPGLRGLKNILRMHIKRANSSEWEQIAIPTSVRAIVALNLHSYGSGRNPWGKPKPEYLEKRGFVEADVADGLLEVFGLKQGWHASFVMVELISAKHLAQASAIRLEVRGGQWKNAYMQMDGEPWKQPLSKDFSTYVEIKREPFQSLVISGK

SEQ ID NO: 219557 - protein, 70 aa, Glycine max
  Clone ID: PAT_MRT3847_40288C.1.pep
LVKNRSISGNLYYGSHILLLGDARFSNVAFFLYAGTDPSNDDRHLAVYFFFWSLSQPFILRNADLILFRD

SEQ ID NO: 219558 - protein, 53 aa, Glycine max
  Clone ID: PAT_MRT3847_40289C.1.pep
QVQHRTDLYCSTCRLALSHLESSLCIIMNEVSIISSWQCSPCYSPGNRKSRPA

SEQ ID NO: 219559 - protein, 108 aa, Glycine max
  Clone ID: PAT_MRT3847_4028C.1.pep
MAPKKDKAPPPSSKPAKSGGGKQKKKKWSKGKQKEKVNNMVLFDQGTYDKLLSEAPKFKLITPSILSDRLRINGSLARKAIRELMARGSIRMVSAHASQQIYTRATNT

SEQ ID NO: 219560 - protein, 32 aa, Glycine max
  Clone ID: PAT_MRT3847_40290C.1.pep
YLDRFLLHIIPLTPYIKPQNLLSNTTTSMHIK

SEQ ID NO: 219561 - protein, 67 aa, Glycine max
  Clone ID: PAT_MRT3847_40291C.1.pep
QTIATPPLLCFLSYLRLCTNWAHELLTNHTLCLTLILPLIPILNLLNLTHGSSFGVLLLRALTHSIS

SEQ ID NO: 219562 - protein, 53 aa, Glycine max
  Clone ID: PAT_MRT3847_40292C.1.pep
ELCTGLLKAFKPYSVHFFPAPIINIQTLSQSSSRLLFLKPSPFFPPKYTSINP

SEQ ID NO: 219563 - protein, 400 aa, Glycine max
  unsure (1)..(400): unsure at all Xaa locations
  Clone ID: PAT_MRT3847_40293C.1.pep
MDDVKDKVKGFMKKVNNPFSSSSSAKFKGQGRVLGSSSSTPANSNPTPRPYPNSQKPSSSSAVTNPKPSPQKTEQNKTTDKPRKDDGFDPFDSLVTNSNRSQNGYSLNVFECPICKQPFRSEEEVSAHVDGCLNNPVERGSDDGNGVSESDGGSNDTNTELEVCVGTYISGKPSEGSVDVILKLLRNIGREPMKVPTEEQIMIIKKAIVLLDDVVXGVDLLREMISPSATAAEMGPKAEPKLVDRQVKVFFAVPERVAAKIELPDSFYSLSAEEVNXEAELWRKKIADSQLLIESLLREKQAKASRKRAAKAIIRIQFPDGVVLQGVFAPWESTAAAFKSLCSALKASGLVFEEMHPVYFQDSVIPLELNFKENLLHVKQLLLSMSALIKFKPLEVGNFV

SEQ ID NO: 219564 - protein, 139 aa, Glycine max
  Clone ID: PAT_MRT3847_40294C.1.pep
MSGAPKRSHEESVHSSSKHPNEDLGTYSKLVSSSVSNEYHMPHDITQDSRVAKVPRTEFHDADRRSPLNPVYRMSSPLNDSRTDHPIGPENRIESRDSKDNRDLRFENRDAKTEKKELHGEARRDPPSAKSEKDVRVEG

SEQ ID NO: 219565 - protein, 77 aa, Glycine max
  Clone ID: PAT_MRT3847_40295C.1.pep
HASDHAYGRSIKVRWHETSNIPRSERDSQWRIEPVFAPLALNPLPMPSPKRPRSNVATSFPDSSGLTREVSQASIYS

SEQ ID NO: 219566 - protein, 162 aa, Glycine max
  Clone ID: PAT_MRT3847_40296C.1.pep
MGLFTRTLKPDTNKRRQNKLNMNPIGFSLLSLASLALVSIVIAQERAPHGLVYENPEAFSPSAYNFFHPNERKPETKDPCAASKCSPMPLAAQVEATEIHESKASTPQGSKKQLGAGSVAGIIFGGAFVVLLALGVYHVRVTRRAIMSKAKANGAVQPDAIA

SEQ ID NO: 219567 - protein, 83 aa, Glycine max
  Clone ID: PAT_MRT3847_40297C.1.pep
MKVRSSVKKMCEFCQIVKRRGRIYVICSGNPKHKQRQGMATIARGVGSDPVSAYEVGNIIMLPPALSVLSAKRLIINAYGLRP

SEQ ID NO: 219568 - protein, 127 aa, Glycine max
  Clone ID: PAT_MRT3847_40298C.1.pep
SRLKEIKRFYVQNGKTIPNSVSTISGVPGNSVTDSFCTAQKSVFGDNNIFQKRGGLAGMSQALNAGMVLVLSIWDDHHSNMLWLDSNFPTDTDPAKPGIARGTCPTTSGDPDYFNSFAANAYVFYSN

SEQ ID NO: 219569 - protein, 165 aa, Glycine max
  unsure (1)..(165): unsure at all Xaa locations
  Clone ID: PAT_MRT3847_40299C.1.pep
SPINIILFPRSQYASLICLLHQLIPEHAKSEETLDSLTVFTAXRVTDRIVRKGSINTHGRHWKDADIVVFNTYLWWITGSKMKILLGSFNDEVKEIIEMSTEDAYRMAIKSMLRWVRLNMDSNKTRVFFISMSPSHAKSIEWGGEAGGNCYNETTPIDDPTYXGF

SEQ ID NO: 219570 - protein, 63 aa, Glycine max
  unsure (1)..(63): unsure at all Xaa locations
  Clone ID: PAT_MRT3847_4029C.1.pep
AVVILELVLXXLLHSXDWELPQGXIXXDIDXQVXXXLXQHEXNXLCXXAKTRSXXXLXDGLXD

SEQ ID NO: 219571 - protein, 57 aa, Glycine max
  Clone ID: PAT_MRT3847_402C.1.pep
KSSFIKEKNTYKMLFYFKISISLKSAECPVNQILNRHSSHFMPMHQLCTQHFINNYL

SEQ ID NO: 219572 - protein, 439 aa, Glycine max
  Clone ID: PAT_MRT3847_40300C.1.pep
MQKMMKPPSNSSFPSFLRVKPRLSSYLFTLLAFILFAAILYGHDFVFIFRPHLYSNEHTAQTLFFSTPVDVRSPPTEENKTVLTKTKREEEEQECDVFSGRWVRDELTRPLYEESECPYIQPQLTCQEHGRPEKEYQRWRWQPHGCNLPTFNARLMLEKLRGKRMIFIGDSLNRSQYVSLICLLHQIIPENAKSMETFDSLTVFTAKEYNATIEFYWAPFLLESNSDNAVIHRVTDRIVRKGSINTHGRHWKGADIVVFNTYLWWITGSKMKILLGSFNDKVKEIIDMPTEDAYRMAMKSMLRWVRLNMDSNKTRVFFTSMSPSHAKSIEWGGEAGGNCYNETTTIDDPTYWGSDSKKSIMQVIGEVFRKSKVPITFLNITQLSNYRKDAHTSIYKKQWNPLTPEQLANPASYADCTHWCLPGLPDTWNELLFAKLFYP

SEQ ID NO: 219573 - protein, 106 aa, Glycine max
  unsure (1)..(106): unsure at all Xaa locations
  Clone ID: PAT_MRT3847_40301C.1.pep
LLVPFRVNSVGITLYTNQRAWNKEAHVIILVSAAGVGYSYSNTASDYTKTADKSTVIDYYTFLXNWLERFSQNKTRDSVITGESYAXHYVPQIADTILTYNKLTNH

SEQ ID NO: 219574 - protein, 72 aa, Glycine max
  Clone ID: PAT_MRT3847_40302C.1.pep
KFRPRLNTGERPIANKNRKNLTWKKKKKKKKKKKKKKKKKKKKKKKKKKKKKKKKGGWFWGIQVNKPVFARL

SEQ ID NO: 219575 - protein, 79 aa, Glycine max
  Clone ID: PAT_MRT3847_40303C.1.pep
MKERLWSKQARSKKKKEEQYITAEDLLASKQQQELEVVQKVYDMRGAQVVVLTYYFDLNAEEKAKDDGFPIQARHYEAT

SEQ ID NO: 219576 - protein, 120 aa, Glycine max
  Clone ID: PAT_MRT3847_40304C.1.pep
FWAGFVCFPAGVAVIFLLRLSCASFLSSLFFAPAFPALVICLHVWCFLFVGGSPVLRMCLRLSLSVPPSLVPLGARGAFFCLSSVCRGGLWSFSLVVCLLCFLSKGGWIVAWVPARFSRA

SEQ ID NO: 219577 - protein, 49 aa, Glycine max
  unsure (1)..(49): unsure at all Xaa locations
  Clone ID: PAT_MRT3847_40305C.1.pep
XSXXVWXMXRDLPFEAXXFXHNXLKVXQLLDVWXXSLXALLQELYQFHP

SEQ ID NO: 219578 - protein, 71 aa, Glycine max
  unsure (1)..(71): unsure at all Xaa locations
  Clone ID: PAT_MRT3847_40306C.1.pep
FLKKGNPYXFWGFFPRGNLIGQKGFFLXGISRXGRAVEKFLVDEKKFLEREIIFWVEKSLEGKGVIAVWKD

SEQ ID NO: 219579 - protein, 91 aa, Glycine max
  Clone ID: PAT_MRT3847_40307C.1.pep
LYRFYPCVPNYKLRFTYFASFCTPKYTMFFGAFIMPHRLYLFFFAVVSLFQIPLLRLLCVPSLRVLYVGYAPPPPPPPPPPPPPKKEDVIQ

SEQ ID NO: 219580 - protein, 80 aa, Glycine max
  Clone ID: PAT_MRT3847_40308C.1.pep
QFIFVVWKMLLLLRMHAFLARCPPRLRPIISPRIRLISLCKMGFLVVFFRVEIGVPYPVVLVLITPPITYLSILYVGSYL

SEQ ID NO: 219581 - protein, 51 aa, Glycine max
  Clone ID: PAT_MRT3847_40309C.1.pep
PKVLNDFNTRVWRVSWSLTGIILSVDDGTVNVTLWKAAVDGEWQQVTTVEP

SEQ ID NO: 219582 - protein, 93 aa, Glycine max
  unsure (1)..(93): unsure at all Xaa locations
  Clone ID: PAT_MRT3847_4030C.1.pep
IXHXXTXVTXLSMXDDVDXRYXXYCXXXXMVXNSFDXMMXFGAAVPYTDTGAESNVLXIYRCLEGGDNSALIAKLXSTXDKDGAXSSGGLXXG

SEQ ID NO: 219583 - protein, 37 aa, Glycine max
  Clone ID: PAT_MRT3847_40310C.1.pep
SGIAYVSLKAPKLTFSESVRLRVGVSNISLVSDAVGL

SEQ ID NO: 219584 - protein, 210 aa, Glycine max
  unsure (1)..(210): unsure at all Xaa locations
  Clone ID: PAT_MRT3847_40311C.1.pep
MRGKTIIEEARAXAAELRKVFGEKESRVESLENELAGLKKVKAESDVRVRDLERKIGVLETKEIEERNKRIRFEEETRDKIDEKEREIKGYRQKVEELEKVAAEKKTELDELVKQKLRLEESLRESEEKVTGLESSILQLREEAKEAERVIISLNEKAVETVETIDRGLNGVHGEGKKGLKLQWPVVAAGSTGAVVAAAAVIYVCYGKRR

SEQ ID NO: 219585 - protein, 313 aa, Glycine max
  Clone ID: PAT_MRT3847_40312C.1.pep
MADEGVANGGGVDDQYGEESATKIAALQRERDELVSENVARKEEIKKLTAELDGLRSDGADKSEKIEELQREVEQSRDAAKATEVIAARAADLETEVARLHHDMVSEMTAAEEARADAAELRKVFGEKESRVESLENELAGLKKVKAESDVRVRDLERKIGVLETKEIEERNKRIRFEEETRDKIDEKEREIKGYRQKVEELEKVAAEKKTELDELVKQKLRLEEALRESEEKVTGLESSILQLRKEAKEAERVIISLNEKAVETVESIDRGLNGVHSEGKGLKLQWPVVAAGSTGAVVAAAAVIYVCYGKRR

SEQ ID NO: 219586 - protein, 186 aa, Glycine max
  unsure (1)..(186): unsure at all Xaa locations
  Clone ID: PAT_MRT3847_40313C.1.pep
MADEGVANGGVDDQYGEESATKIAALQRERDELVSENAARKEEIKKLTAELDGLRSDGADRSEKIEELQREVAQSRDAAKATEVIAARAADLETEVARLHHDMVAEMTAAEEARADAAELRKVLGETESRVESLERELAGLKKVKAESEVRVRDLERKIGVLETKEIEEKNKXFRFEEETRDKIDE

SEQ ID NO: 219587 - protein, 68 aa, Glycine max
  Clone ID: PAT_MRT3847_40314C.1.pep
ESFHAHSFSEATLDQSEEEPTLSTSCTQLDSEKSYGDISTSLLKAEYHNAFGSEAGSKIPNESFVSSS

SEQ ID NO: 219588 - protein, 73 aa, Glycine max
  unsure (1)..(73): unsure at all Xaa locations
  Clone ID: PAT_MRT3847_40315C.1.pep
ISPDHFLFHLISTXHFLPTSLLLFHFITNHIYHFIFLPFLLLIFLLSTPICLKMGWAFIITLSNTYQYCYRIT

SEQ ID NO: 219589 - protein, 38 aa, Glycine max
  unsure (1)..(38): unsure at all Xaa locations
  Clone ID: PAT_MRT3847_40316C.1.pep
DALKQLVHVHGAETLGDATATATADGGPSEGCSALCXL

SEQ ID NO: 219590 - protein, 69 aa, Glycine max
  Clone ID: PAT_MRT3847_40317C.1.pep
LRVVPPGLVSLLRRSCFRPLGVLGPPSPVVGLFGSCALASSFSARLFFSFAPRFLLPALAALVFFRATT

SEQ ID NO: 219591 - protein, 54 aa, Glycine max
  unsure (1)..(54): unsure at all Xaa locations
  Clone ID: PAT_MRT3847_40318C.1.pep
LESSRWMDVNVERCGRFADDTSNCGXXAVLLGRGMSRLGEGYLIVGYHGVGGTN

SEQ ID NO: 219592 - protein, 169 aa, Glycine max
  Clone ID: PAT_MRT3847_40319C.1.pep
AEKLKLEELLATQQMDLQGEISCLKEELDQRRHDVEAVNKEFDRHKQKCDVLMTEKDEANAKIHNLMAETRDRNNYIANLERDIILLRGQEAELSTGSAATLRLVKELKLKADGLEKEVILKNAMISDRAEEKREAIRQLCFSIEHYRSGYKELLQAFAGHKCHAVTAA

SEQ ID NO: 219593 - protein, 189 aa, Glycine max
  Clone ID: PAT_MRT3847_4031C.1.pep
MGDNNVNLPPGFRFYPTDEELVVHFLQRKANLLPCHPDVIPDLELYPYDPWELHGRALAEGKQWYYYSRRTQNRVTSNGYWMPMGMEEPVISNSSNKRVGMKKYYVFHLGEAPDGNTTNWIMQEYRLLDSASSSISSRRRSQPKPDHNKWVICRVYEQDNDDDGDGTELSCLDEVFLSLDDLEEISLPN

SEQ ID NO: 219594 - protein, 52 aa, Glycine max
  Clone ID: PAT_MRT3847_40320C.1.pep
GLLWIPRHLDSRKGLISDGVLLQVKKGRIYSHSLNRSTFLTVGESTGIQETT

SEQ ID NO: 219595 - protein, 54 aa, Glycine max
  Clone ID: PAT_MRT3847_40321C.1.pep
VFFFTLLFLFFKTEQMLGPHLDCTLLKQKVPNSIYQTFPSILQIVSYFNSTKKL

SEQ ID NO: 219596 - protein, 143 aa, Glycine max
  Clone ID: PAT_MRT3847_40322C.1.pep
AYGESGLRVSDLNAGQNEGYAWSQTTTRNGRRESSNTAFLEQQRKSRCNLHVVTSAQVTKVEIYCKTKTATGVIFTDVDGITRTVKARKEVVLSAGTYFSPQLLMLSGVGPAKVLREAGISVLADIPGVGSNLQDHLVVKTMP

SEQ ID NO: 219597 - protein, 71 aa, Glycine max
  Clone ID: PAT_MRT3847_40323C.1.pep
GYWIIPSLNGGVVRGGLSGLNLLMCTKVYPNGIDETKSDSTYKSFKVNGHLLKLFPHKPYFIWSKWKKRLI

SEQ ID NO: 219598 - protein, 76 aa, Glycine max
  Clone ID: PAT_MRT3847_40324C.1.pep
VCQAGRCRSRPIPHKADSCNSELALRPKPTTSLLYQCSLFSLLCPMFTLPLPFTFSCKLRARSELRSSFEIIFYIL

SEQ ID NO: 219599 - protein, 61 aa, Glycine max
  Clone ID: PAT_MRT3847_40325C.1.pep
RKFVIPREGLNFIGMFLLINPRTNLRDYLVCAFINSPPLVSLLHVSINIFSFSWLIKLWFA

SEQ ID NO: 219600 - protein, 164 aa, Glycine max
  Clone ID: PAT_MRT3847_40326C.1.pep
VKRLKYPLFTLLVFDSRQHALPVAWVITRSFTKPDVSKWLKALIDRARSVEPGWKVSGFLIDDAAAEIDLLRDIFCCPVLFSLWRVRRSWLRNIVKKCSNIEIQREIFKRLGRIVYNIWGGINASLALEQFLLDFVDQTAFMEYFKVMWVAQSVEMCGALSTMR

SEQ ID NO: 219601 - protein, 70 aa, Glycine max
  Clone ID: PAT_MRT3847_40327C.1.pep
MMEMLKEIQLCFLCSIHHRSETRVESADTCKDQIDGRKRSNGSKKVEILIGGRRRKGKRDASSLLEKRDY

SEQ ID NO: 219602 - protein, 42 aa, Glycine max
  Clone ID: PAT_MRT3847_40328C.1.pep
FFFFFFFFFFFFFFFFFFFFGLYKILALMGKIKPNFKIANFS

SEQ ID NO: 219603 - protein, 186 aa, Glycine max
  Clone ID: PAT_MRT3847_40329C.1.pep
YTCKYFTSTILGALLSYFLQPVYLSSITVGLPLDILENFRLEDSLKRALYERMLPLSNELTSPFLVNQPIFHAAPVPPKDFQQSESAANTLTCGYSICWNECGLHDVIMGTTGRKQGTSAKGALYPSTQSSLCKKRLLEVFLSLGPENLIGSLPNGITYRELKDGAEEYHLASKFLKGRHLLTSGS

SEQ ID NO: 219604 - protein, 129 aa, Glycine max
  unsure (1)..(129): unsure at all Xaa locations
  Clone ID: PAT_MRT3847_4032C.1.pep
ARAATATISTGGTPSSAPPAPLISPCARANSTGSVFNPLNVIVGVYSASSPWTWIAGGPNFNYYKAWPSVHHCMGLPRFRPELRXFESKTCFQGAETKLKEGHESFGRAFSAALKGGMLGACEEELTLA

SEQ ID NO: 219605 - protein, 63 aa, Glycine max
  Clone ID: PAT_MRT3847_40330C.1.pep
LCFLFFFFFFFTPKRGILLYLPPGASSTTTFRGTESMPTHDVYETPGGKRNSPLFRGLQPPWH

SEQ ID NO: 219606 - protein, 72 aa, Glycine max
  Clone ID: PAT_MRT3847_40331C.1.pep
TLEIPHKWLPLNPIIISRGICTSLNKAPSVCSVVPIVGPVNTPFGVWHEHNHPLSGSVSKVIKGLTLCYAVT

SEQ ID NO: 219607 - protein, 249 aa, Glycine max
  unsure (1)..(249): unsure at all Xaa locations
  Clone ID: PAT_MRT3847_40332C.1.pep
VSLVRSKDEAVQVSSAELIQNIASGDELVRQMVIKEGGIRVLLRVLDPKWSCSSKTREVVMRVIDNLCFSSRSCVSVLLTYGFVDQLMYYVRNGESSVQASSVELXAFRFCETSEEAKKALGDAGFMAELVKFLNAKSFEVREMAAEALSGMVMVAKNRKRFVQDDQNIALLLQLLDPGEGNSGNKKLLISILMSLTSCNSGRKKIVSSGYAKNIERLAEAEVSSDAKRLVRKLSTNRFRSMLNGIWHS

SEQ ID NO: 219608 - protein, 43 aa, Glycine max
  Clone ID: PAT_MRT3847_40333C.1.pep
FFFFFFFIQNNTMWNISEQGHSGDFMGLWILTTSYSRIRGRTF

SEQ ID NO: 219609 - protein, 201 aa, Glycine max
  Clone ID: PAT_MRT3847_40334C.1.pep
MAEPWRNIDVEKLISYSDDLVKVLSEGPRDLNNLSHSLQQTRALSSSCDSDLNEARSFLHDYQNKVDACKQKIEEARSETAADGDLDLLQRELEEELEKERWLKEEFRGIGDEFNDLEQQWISVQEQKKTLQKIEKNKQRTQMVLSMYASVTNIVPNLDEQSKISGYIVEKDKNAVEKFEYDTSNMTALDICNGIWKIISE

SEQ ID NO: 219610 - protein, 242 aa, Glycine max
  Clone ID: PAT_MRT3847_40336C.1.pep
FKGTKAIQLLKGIVVIVIGQQISKILNLTATSKLFDIVIQWGVLALIVIFQPEIRRALEQLGRGSFLKRYTNTYSRDEEKLIQSVSKAVQYMAKRRIGALIVFEKETGLQDYIETGIPMNSDISQELLTNVFIPNTPLHDGAMIIQGSKIAVAASYLPLSDSVKISKSLGTRHRAAVGISEVSDAFTVVVSEETGDISVTFDGKLRRDISKDVFEELLAEHWFGAHFQKKGGIHKCLKVNGD

SEQ ID NO: 219611 - protein, 198 aa, Glycine max
  unsure (1)..(198): unsure at all Xaa locations
  Clone ID: PAT_MRT3847_40337C.1.pep
MFSLQQFLPHTSSKLLDHSLSLKRHGHRRFHRHCPTTLSSSHQSGPSLCDSKTQVSRVPLLTSTQAYEKLKTFRENIKGKQQFLAMYSSIFGGITTDPAAMVIPMDDHMVHRGHGVFDTAAIMDGYLYELDQHLDRFLRSASMSKIDPPFDRGSIRRILIQTVSASKCRKGSLRYWLSAGPGDFQLSPSXCTDQVCMR

SEQ ID NO: 219612 - protein, 69 aa, Glycine max
  unsure (1)..(69): unsure at all Xaa locations
  Clone ID: PAT_MRT3847_40338C.1.pep
XXXLIFFYSRGKTKGNHYSQGADVIFLNVFNKRLHLLNDRTQMILFLLKGTEGPRGGGFRFGSLAPQNP

SEQ ID NO: 219613 - protein, 121 aa, Glycine max
  Clone ID: PAT_MRT3847_40339C.1.pep
MATTQSYEDLEAKYETEETSESVILVVHMPDGFAREHIGAKIEYDFGRVRVHGERSLGNNRRARFNALYQVPEYCDINKIKGKFDGKTVIITIPTIPGKVPKKETQPTEQEPPKEPSEAES

SEQ ID NO: 219614 - protein, 107 aa, Glycine max
  Clone ID: PAT_MRT3847_4033C.1.pep
FFFFFWCRTIGVLIQATRLCGGKLGVKLLLLVQKLLVNSLELVGSLGNERVGLRLLRIRQLELRVLIAVSARRGAEAHGHGPLLLRLELTEALGVVALQEERLLEAR

SEQ ID NO: 219615 - protein, 47 aa, Glycine max
  Clone ID: PAT_MRT3847_40340C.1.pep
TRLSLGIKFTTYDMDMYNFLLKDVSLYSLVYLYKSPKVTQVQNSNQL

SEQ ID NO: 219616 - protein, 285 aa, Glycine max
  unsure (1)..(285): unsure at all Xaa locations
  Clone ID: PAT_MRT3847_40341C.1.pep
MAETIVIQTEPPNPPDPSSSTTTTAAPPLLSRKIVFLPVKKPFKGFSNHFHVETLNPSSSSEPRPSGSVAKKHDASEFSEYGLDPEFSFGITFRRIGAGLRNLGNTCFLNSVLQCLTYTEPLAAYLQSGKHKTSCHGGKLKTSCHVAGFCALCAIQNHVSRALQSTGRILAPEDLVGNLRCISRNFRNARNLLECMHKCCLPSGIPSESPGAYEKSFVHKIFGGRLRSQVKCHQCSYCSNKFDPFLDXSLEIFKADSLQKALSNFTAAEWVDGGEKEVHWQRCKQ

SEQ ID NO: 219617 - protein, 257 aa, Glycine max
  Clone ID: PAT_MRT3847_40342C.1.pep
LGIEKLGFGGISVSNFVFGCGRNNKGLFGGASGLMGLGRSELSMISQTNATFGGVFSYCLPSTDQAGASGSLVMGNQSGVFKNVTPIAYTRMLPNLQLSNFYILNLTGIDVGGVSLHVQASSFGNGGVILDSGTVISRLAPSVYKALKAKFLEQFSGFPSAPGFSILDTCFNLTGYDQVNIPTISMYFEGNAELNVDATGIFYLVKEDASRVCLALASLSDEYEMGIIGNYQQRNQRVLYDAKLSQVGFAKEPCTFT

SEQ ID NO: 219618 - protein, 167 aa, Glycine max
  Clone ID: PAT_MRT3847_40343C.1.pep
MFMGFSCGEDHFDEKESEFPLIDETSATQEQNSIIMEVHHHLQGVADKSTDFCPVEHPMEPPDEDRPVKCPMPESSVINDERMHEKRFAESSKKRVETTRVVVNGERTTTMDAEPPARGVRKRHHTLTHEGGDLVMTPLMRMPPLPPLPSQNITIFQVLQQLDKFES

SEQ ID NO: 219619 - protein, 165 aa, Glycine max
  Clone ID: PAT_MRT3847_40344C.1.pep
ITHRAFCDALAQESSRVVNPHPLLSTQFRSHGLQLQAPSLLKREHDHFNLLTSEIPSWLTSPTVVEEAILLNNQTIRTTSDYFSTPQLFPTAHVNNNHSLLHDQNPNPNTTTTTTFLSSLSSFPNYSTSSSSSPHMSAALLQKASQIGETVSSAPSQAMLVRPHL

SEQ ID NO: 219620 - protein, 152 aa, Glycine max
  Clone ID: PAT_MRT3847_40345C.1.pep
MELAPSNSNQQHENNNSNKVQGLHCSVKNYEWGKPCRDSLVAKLFSMNSGSLQSSQLDEDQPYAELWMGSHVSGPSFIVFDGSQQRVTLKSWLLENPNVLGPKVVEKVGGDLPFLFKVLSVDKALSIQAHPDKELARTLHKLHPDVYKDGNH

SEQ ID NO: 219621 - protein, 80 aa, Glycine max
  unsure (1)..(80): unsure at all Xaa locations
  Clone ID: PAT_MRT3847_40346C.1.pep
FALCFYRIISHLKISRCNANSDCRNSCKFGNTCRNCKMYPNFNYTDSTTTYTLIMGDAPCKAQFHGTXMGTPAENYGCKC

SEQ ID NO: 219622 - protein, 93 aa, Glycine max
  unsure (1)..(93): unsure at all Xaa locations
  Clone ID: PAT_MRT3847_40347C.1.pep
KEENHKIXEFVIINKEXEPDLEDLSKLIYPRILHPPSPTGNIAHIVKHDKYVIRYFCNPPLEKGRDVDLKRLESWPLGMNDFFGIEMRKKRRG

SEQ ID NO: 219623 - protein, 54 aa, Glycine max
  Clone ID: PAT_MRT3847_40348C.1.pep
INTALGVQIMVQVIHFLHHKNVEYAIRSSYRRKVNDSITARVGFSRQCCSVSMR

SEQ ID NO: 219624 - protein, 93 aa, Glycine max
  Clone ID: PAT_MRT3847_40349C.1.pep
LSGEKEGFFQLPSDKALKSTLVFRHLVEKYASNEHPYFADNAEAHRKLSEYGFPEAKATILGLLQRPGAHNIKSINSMVMVSNAPLWGPLNIG

SEQ ID NO: 219625 - protein, 62 aa, Glycine max
  Clone ID: PAT_MRT3847_4034C.1.pep
HEFSVHKAWEAFSNSAYRWCLAFSQSSLKSVSEVCQLRLLRPLVVLGVQTVGSSVDGRACAP

SEQ ID NO: 219626 - protein, 92 aa, Glycine max
  unsure (1)..(92): unsure at all Xaa locations
  Clone ID: PAT_MRT3847_40350C.1.pep
DRDXXKXRSXFVDNWDRDCSEPFSDIFPGRIERDTLRCSHSMVSRKQNEILTHRVAVDTKSGGNSYQKSGNDLLSGSSIGSSVQKAVFNKXF

SEQ ID NO: 219627 - protein, 194 aa, Glycine max
  unsure (1)..(194): unsure at all Xaa locations
  Clone ID: PAT_MRT3847_40351C.1.pep
RNSRVDPRVRGRVGDLIRICRXCRCESLHKVLEKELIHQKYADYKALGDVDNSQKRYILQGLSLPQEDRLPAALHRILLTALSNSTRQSGQEDEIDKLVTRMGAMQMAKSLDDLADVCVRVDRKIFRCHQVILASRSEYFKARLSHMKDFHEDIDELSVDILPCLEEHDLSMEAEKMIEYMYTGSFAGYKSRSG

SEQ ID NO: 219628 - protein, 148 aa, Glycine max
  Clone ID: PAT_MRT3847_40352C.1.pep
YPPGSAGARNGNSEKIAYAWVGNSVTQCPGSGAWPFHQPLYGPQTPPLVAPNGDVGVDGMVINLATVLAGAVTNPFEDGYYQGPASAPLEAVSACTGIFGKGAYPGYAGDVLAENATGVSYNAVGMRGRKFLLPAMWDPLTSTCKTLV

SEQ ID NO: 219629 - protein, 47 aa, Glycine max
  Clone ID: PAT_MRT3847_40353C.1.pep
REEKVVVSVRGTRGKKKAHLTLWSSVLSISVVWLPWRTTTHITVSFF

SEQ ID NO: 219630 - protein, 42 aa, Glycine max
  Clone ID: PAT_MRT3847_40354C.1.pep
ENIKHKHHPNIDHVLWIMNFFANINLFFFFRFTAFCVSFVFL

SEQ ID NO: 219631 - protein, 139 aa, Glycine max
  Clone ID: PAT_MRT3847_40355C.1.pep
QWNSSSRPKGGKHYLKDEQNSQDFSSDHSKNTSTDAKEEPSSPSMSSEHQTIEREGNDSEKKDNKNMQHVSHQTHSNNLASNAPAFSVSQALDALAGMDDSTQVAVNSVFGVIENMISQLEQSSENEEVEDGKDVEQKI

SEQ ID NO: 219632 - protein, 50 aa, Glycine max
  Clone ID: PAT_MRT3847_40356C.1.pep
SNQHDKIRISQNFLKRTPCHRNLSRSQTQIEISIIKIKSEPTTIRSHMEK

SEQ ID NO: 219633 - protein, 204 aa, Glycine max
  Clone ID: PAT_MRT3847_40357C.1.pep
MSSQKGRHEHEEEMGTSESTGKVVVVAVKASRDISRTALVWALTHVVQPGDCIKLLVLIPTLSSNKRVWGLSRFTTDCASSHWRSSLGTISDQKEVITNSCSQLVLQLHDFYDPEKIKIRVKILSGSLCGAVSAEAKRVQSSWVILDKKLKHEKKYCMEQLHCNIVIMKRSTALELNSSSKMELNMACPLTLTKHFQQLSESFS

SEQ ID NO: 219634 - protein, 98 aa, Glycine max
  Clone ID: PAT_MRT3847_40358C.1.pep
GSNFNDHSAQSVFWPLLSPGPNGILNSAETSLSLSFSPVQHPPIGVPQPVGFFFQPLQPNILTSPFLGLFFTLPAGPLPLNPFPLSCSTMILLNFHKA

SEQ ID NO: 219635 - protein, 335 aa, Glycine max
  Clone ID: PAT_MRT3847_40359C.1.pep
MKKKKNKMISSLILFILCNFEGKEQVFVYPIVQLYTFELACCLFLSIEDSDHISKLSLKFDEFLKGMIGFPLNIPGTRFHRAMKAADAIRKEIRMILKKRKVDLEEKRASATQDLLSHMLVTSDPSGRFTTEMEIIDNILLLLFAGHDTSRSVLSLVMKYLGQLPHVFEHVLKEQLEISQGKEAGQLLQLEDVQKMKYSWNVASEVMRLSPPVSGAYREAKEDFTYADYNIPKGWKLHWNTGSSHKDPALFSNPETFDASRFEGAGPTPFSYVPFGGGPRMCLGQEFARLEILVFMHNIVKRFKWDLVIPDEKFKYDPMLEPVEGLAIRLHPSHF

SEQ ID NO: 219636 - protein, 30 aa, Glycine max
  Clone ID: PAT_MRT3847_4035C.1.pep
ARAGAFKSRMKSSKELQRRGSPAKYLHMKE

SEQ ID NO: 219637 - protein, 148 aa, Glycine max
  Clone ID: PAT_MRT3847_40360C.1.pep
METILHPLLLHLEAPQVLANNQSSTGGLLRKAQVEEFYVITWDSPKEQIFEMPTGGAAIMREGPNLLKLARKEQCLALGTRLRSKYKIKYQFYRVFPNGEVQYLHPKDGVHPEKVNAGRQGVGQNFRSIGKNVSPIEVKFTGKQPYDL

SEQ ID NO: 219638 - protein, 84 aa, Glycine max
  Clone ID: PAT_MRT3847_40361C.1.pep
MLMFYYKWRLWQALAIGRHSLTNLRPQLAHTLGLLVLKAYKSQSLCFTWVLNAPCLTVLFHLMGPDMCTLTLVLVLCYKTNRAS

SEQ ID NO: 219639 - protein, 69 aa, Glycine max
  Clone ID: PAT_MRT3847_40362C.1.pep
EDMELGVKKGLRMLERFKSGSCGPLGAKSQGGLIFPLGPLISYFLLWDVFFNNLIIFFYDCFVDVYGSC

SEQ ID NO: 219640 - protein, 150 aa, Glycine max
  Clone ID: PAT_MRT3847_40363C.1.pep
MDGIVQLERQLVDYTASLFHEGFLDDQFNQLQQLQDESNPDFVVEVVTLFFEDADRLLNELTKALGQPSIDFKRLDAHVHQLKGSSSSIGAQRIHRVCISFRNTCEEQNVEGCLKNLQQVKHEYSLVKSKLETLFRMEQQILAAGGSVSR

SEQ ID NO: 219641 - protein, 203 aa, Glycine max
  Clone ID: PAT_MRT3847_40364C.1.pep
MAMATQASLFTPPLSGLKPSDRATAPWKQSSTLSFSTSKPLKFSRTIRAAATDQTTEAPVGFTPPELDPNTPSPIFGGSTGGLLRKAQVEEFYVITWDSPKEQIFEMPTGGAAIMREGPNLLKLARKEQCLALGTRLRSKYKIKYQFYRVFPNGEVQYLHPKDGVYPEKVNAGRQGVGQNFRSIGKNVSPIEVKFTGKQPYDL

SEQ ID NO: 219642 - protein, 266 aa, Glycine max
  Clone ID: PAT_MRT3847_40365C.1.pep
PHPSPVSKPATAPPCHGKQKLQPLLLQPEAPQVLQNNQSSSRRRDHRGTSKSRGCTGSGSTQASLLTPPLSGLKASDRASVPWKQNSSLSFSSPKPLKFSRTIRAAAADETTEAPAKVEAAPVGFTPPELDPNTPSPIFGGSTGGLLRKAQVEEFYVITWDSPKEQIFEMPTGGAAIMREGPNLLKLARKEQCLALGTRLRSKYKIKYQFYRVFPNGEVQYLHPKDGVYPEKVNAGRQGVGQNFRSIGKNVSPIEVKFTGKQPYDL

SEQ ID NO: 219643 - protein, 72 aa, Glycine max
  Clone ID: PAT_MRT3847_40366C.1.pep
KKNKFVILRREWENWAFVLGSLSISFALLVQIFQSSLTTALLSRRRYSFHHNPFELQHKPTNFLVRVRPILE

SEQ ID NO: 219644 - protein, 80 aa, Glycine max
  Clone ID: PAT_MRT3847_40367C.1.pep
GLPGIVQNAGVYRGSPFTTGRTLDTALDLPAPVRELGIPETEPEARFPYRVDPLSSMFWCLALVLSSTSGLLSFFFFAHV

SEQ ID NO: 219645 - protein, 74 aa, Glycine max
  Clone ID: PAT_MRT3847_40368C.1.pep
NYNRSVFHLLIFFFWLVGLIILNNFSLGGLSFFFSYNFKIETPKHLLQKERKENISVEETKSSFGNMNLTVQGI

SEQ ID NO: 219646 - protein, 89 aa, Glycine max
  Clone ID: PAT_MRT3847_40369C.1.pep
LEGLPTRIESPLTFATPRSFKGTLKGPFQLTPRPIPRRLSRRKTPLKLRKTSTPRLSGRRAYGVRNLPLGREGYLLTTPTGLRQRRLRL

SEQ ID NO: 219647 - protein, 75 aa, Glycine max
  Clone ID: PAT_MRT3847_4036C.1.pep
EKIQSGLLSYYTCCSLFVNSAKNRSFISYTLAWPFQFLKMFCIFKCPHKHTRLLNSVKTEKCRTSPPNKTPSKDF

SEQ ID NO: 219648 - protein, 114 aa, Glycine max
  unsure (1)..(114): unsure at all Xaa locations
  Clone ID: PAT_MRT3847_40370C.1.pep
GLKAKNHGSTEISMAVTVAFLNLIIMFIELTTCKSLCLNYYSKTRPDSXCIAANAVKDATARDITVPIALLRMHFHDCFIWSCDAAGLFKSKGSSIVXIDRPTNDSLHALHVTD

SEQ ID NO: 219649 - protein, 100 aa, Glycine max
  unsure (1)..(100): unsure at all Xaa locations
  Clone ID: PAT_MRT3847_40371C.1.pep
PPPLPRRAPSPLSPSPPLVALIQPPPTTLPGPLPIVIVSLIANSNPHMSSDXAGSPFSESARSTSAVERSSTTPSPSPFTLQNGSTSATLTSICSFLHPF

SEQ ID NO: 219650 - protein, 57 aa, Glycine max
  unsure (1)..(57): unsure at all Xaa locations
  Clone ID: PAT_MRT3847_40372C.1.pep
FVQWMVDENELRVIHYTLXPLKPWDWWTSWLVKPVDVXQNVREQLEESPSGLEGAKS

SEQ ID NO: 219651 - protein, 872 aa, Glycine max
  unsure (1)..(872): unsure at all Xaa locations
  Clone ID: PAT_MRT3847_40373C.1.pep
RHASAHAPPASAPRLKQHLARVSGEVTYCEKAPDEVYLKMKENLEGCRSHKKQKQVDTQAYMNFHSNDDEDEEEQVGCRSKGKQLMDDRNVSVNLTPLRSLGYVDPGWEHGVAQDERKKKVKCNYCEKIVSGGINRFKQHLARIPGEVAPCKNAPEDVYLKIKENMKWHRTGRRLRRPEINELMPFYAKSDNDDDENELVEDLHHMNKETLTRXLLDDWIVDANVQSSDVDKIILYGVELDDEYDNDTXKLPKNQTPQAYKQVKVKTGPTKKLRKEVIXSICKFFYHAGIPIQAADSLYFHKMLEVVGQYGQGLVCPASQLMSGRFLQEEINSIKNYLVEYKASWAITGCSIMADSWIDTQGRTIINFLVSCPHGVYFVSSVDATNVVEDAPNLFKLLDKIVEEVGEENVVQVITENTPNYKAAGKMLEEKRRNLFWTPCATYCINRMLEDFTKIRCVEECMEKGQKITKLIYNQIWLLNLMKSEFTQGQELLKPSATRFASSFATLQSLLDHRVGLRRMFLSNKWISSRFSSSNEGKEVEKIVLNVTFWKKIQHVRKSIDPIMQVLQKLYSGESLSMPYLYNDMYRAKLAIKSVHGDDARKYEPFWKVIDSHWNSLFCHPLYLAAYFLNPSYRYRQDFVAHSEVVRGLNECIVRLEPDNMRRISASMQIAHYNAAQDDFGTELAISTRTGLEPAAWWQQHGISCLELQRISVRILSQTCSSFACEHDWSIYDQIRCKRQNRLSQKKLNDIIYVHYNLRLRECQLRKRSRDSKLSSVDSVLQEHLLDDWIVDTNVQNFDVDKNFLFGVELDDEYENDSIDYEDGAARHLKGSLELVTMADVAVGSPDVDHANIDADTDDESDLNYFDDDLSE

SEQ ID NO: 219652 - protein, 57 aa, Glycine max
  Clone ID: PAT_MRT3847_40374C.1.pep
SIRWIQLISRLILTRESTGWRQWMRLSAKRGGKRNKRYFLHLVKDTFGLEQLLWLTG

SEQ ID NO: 219653 - protein, 490 aa, Glycine max
  Clone ID: PAT_MRT3847_40375C.1.pep
MSRIFSAWNKKKLHLHLNLIPTIFSSSHTHFDALAAANSGLLRPSLRLYSSSSSSSNGEPPEDWPHDHYAATQTPISVNFIRASGPRDGWVGGSNLGRDFPTPKEICKGLDKFVIGQHRAKKVLSVAVYNHYQRIYQGSEADEGLSQGLDDGDDVELEKSNVLLMGPTGSGKTLLAKTLARFVNVPFVIADATTLTQAGYVGEDVESILYKLLAAAEFNVQAAQQGIVYIDEVDKITKKAESLNISRDVSGEGVQQALLKMLEGTMVNVPERGARKHPRGDNIQIDTKNILFICGGAFIDLEKTISERRQDSSIGFGSPVRSNMRTGGVTNAAVTSSLLESVESADLIAYGLIPEFIGRFPILISLSALTEDQLMQVLTEPKNALAKQYKKLFNMNNVKLHFTEKALRLIAKKAMAKNTGARGLRALLESILTEAMFEIPDVKAGNELIGAVVVDEESVGSVNAPGCGGKILCGDGALELYLAKMEGFSG

SEQ ID NO: 219654 - protein, 123 aa, Glycine max
  unsure (1)..(123): unsure at all Xaa locations
  Clone ID: PAT_MRT3847_40376C.1.pep
SRLIRLSGYCNLDWGTEXTKDADRNGPKGIISAVGISIVVGWGYILGITFAVTDILYLLSEDNDAGGYAIAQVFYQAFKKRYGHGTGGIICLVIVAVAIFFCGMSSVTSNSRYINVLPLSAFI

SEQ ID NO: 219655 - protein, 59 aa, Glycine max
  Clone ID: PAT_MRT3847_40377C.1.pep
DEDLFSTNLEANMGIYELEFLDHLLSLYWKPKEMRSGLPREFQMPHFQEIREAKMFIYE

SEQ ID NO: 219656 - protein, 129 aa, Glycine max
  unsure (1)..(129): unsure at all Xaa locations
  Clone ID: PAT_MRT3847_40378C.1.pep
XRAXFLXFSSWXXSVXXGXXXLXLXXXXXXFFFWXXSFXXSXCCXXXGVFXWLCPLLXXGSSXPXXXXXFXXXXXFXGXXFXXXXVXXXSGSXXXXLXXFCXFFVFXXGFXSXCXFSXXXXFXXXXSXX

SEQ ID NO: 219657 - protein, 114 aa, Glycine max
  unsure (1)..(114): unsure at all Xaa locations
  Clone ID: PAT_MRT3847_40379C.1.pep
LSCHVRINPYSMEWTGLVNRXTELGHXILCVADYASFDGSITNQVMSRMVTMINTIXSGDKKLMXERTHLLMLCRXRMDISKKDVMRVECRLCSEFSITAICYNTIYEMRIIYS

SEQ ID NO: 219658 - protein, 130 aa, Glycine max
  unsure (1)..(130): unsure at all Xaa locations
  Clone ID: PAT_MRT3847_4037C.1.pep
FANSPLYFYGVAPLAPEPRFFGWGNKKPGGFYNPGVRGVKAPLVVAFEKKKIIFGGAGAFFAPQTNKLWSWVFFHIGGSLSTKRAFXPFFPPXGRFFFFVLGPGPFKLFPPLTPNPPSPRFFCSPPNEKK

SEQ ID NO: 219659 - protein, 76 aa, Glycine max
  Clone ID: PAT_MRT3847_40380C.1.pep
CHITRPSSPCTNSHKNTTLKISVNIGNIYSTSLRYWHTWIQWAIFTLMVPSTVHFAFPGMRSLLLDTLQMLTLSCT

SEQ ID NO: 219660 - protein, 496 aa, Glycine max
  Clone ID: PAT_MRT3847_40381C.1.pep
MPPILPDFSNSVKLKYVKLGYQYLVNHILTLTLIPMMIAIFMEILRLGPEEILNLWHSLHLDLVQILCSAFLIIFIATVYFMSKPRTIYLVDYACFKPPVTCRVPFATFMEHSRLILKDNPKSVEFQMRILERSGLGEETCLPPAIHYIPPKPTMEAARGEAELVIFSAMDSLFNKTGLKPKDIDILIVNCSLFSPTPSLSAMVINKYKLRSNIKSFNLSGMGCSAGLISVDLARDLLQVHPNSNAVVVSTEIITPNYYQGKERAMLLPNCLFRMGGAAILLSNRTSERRRAKYRLVHVVRTHKGADDKAYRCVFEEEDREGKVGISLQKDLMAIAGEALKSNITTMGPLVLPASEQLLFLLTLIGRKIFNPKWKPYIPDFKQAFEHFCIHAGGRAVIDELQKNLQLSTEHVEASRMTLHRFGNTSSSSLWYELNYIESKGRMKKGDRVWQIAFGSGFKCNSAVWKCNRSIKTPVDGPWADCIDRYPVDIPEIVKL

SEQ ID NO: 219661 - protein, 70 aa, Glycine max
  Clone ID: PAT_MRT3847_40382C.1.pep
MDSVTNYTHHSLDPLTLSHFLDPTPHITHDQTPYLSILSNKRLTRKATIHIHHGGNSCYYMIIPCHFTGA

SEQ ID NO: 219662 - protein, 42 aa, Glycine max
  unsure (1)..(42): unsure at all Xaa locations
  Clone ID: PAT_MRT3847_40383C.1.pep
LGIYSDTKXFVCNCVIFQQNKYLPKQKVRLIHPLNIPLQVWK

SEQ ID NO: 219663 - protein, 61 aa, Glycine max
  Clone ID: PAT_MRT3847_40384C.1.pep
RITSTAATWDQAAFVLSVPRRKPADETQETLRTSAFPSTHVKEKWAKNLYIASICYGRTVS

SEQ ID NO: 219664 - protein, 82 aa, Glycine max
  unsure (1)..(82): unsure at all Xaa locations
  Clone ID: PAT_MRT3847_40385C.1.pep
MAQDLSLDLEELGRLHSIAERPLTLSLLYSEILNLXKLSSEEACAHITAPISTGSKAAPSPALKYAVLAFVIWDHYSDNIKI

SEQ ID NO: 219665 - protein, 683 aa, Glycine max
  Clone ID: PAT_MRT3847_40386C.1.pep
ATSPPAAGTRRREPAADALTGRIRRHNNAFAIAAVEIVNANADNVRGTRARKVKDDQGVKETINKKKVSGRVLEAKCLDEFDSGGRSGDKAPGAEDEGTTPPIPEKVQVGGSPLYRVERKLGKGGFGQVYVGRRLGAVNSSERTGSSRVEVALKFEHRSSKGCNYGPPYEWQVYNALGGSHGVPQAHYKGRQGDYYIMVMDILGPSLWDVWNNNNPHMMSTEMVACIAIEAISILEKMHSRGYVHGDVKPENFLLGPPGTPDEKKLFLVDLGLATRWRDSSTGLHVDYDQRPDVFRGTVRYASVHAHLGRTGSRRDDLESLAYTLVFLLRGRLPWQGYQGENKGFLVCKKKMATSPETLCCFCPQPFRQFVEYVVNLKFDEEPNYAKYISLFDGIVGPNPDIRPINTEGAQKLICQVGHKRGRLTIEEDDDEQPNKKVRMGMPATQWISVYNARRPMKQRYHYNVADVRLAQHIDKGNEDGLFISSVASCSNLWALIMDAGTGFTAQVYELSPHFLHKEWIMEQWEKNYYISAIAGANNGSSLVVMSKGTQYLQQSYKVSDSFPFKWINKKWREGFYVTAMATAGSRWAIVMSRGAGFSDQVVELDFLYPSEGIHRRWDSGYRITSTAATWDQAAFVLSVPRRKPADETQETLRTSAFPGTHVKEKWAKNLYIASICYGRTVS

SEQ ID NO: 219666 - protein, 187 aa, Glycine max
  Clone ID: PAT_MRT3847_40387C.1.pep
LITLASGARHDILRLPSEASTFFKAPGGDQNDEGTRWAVLIAGSNGYWNYRHQSDVCHAYQLLRKGGLKEENIVVFMYDDIAFNEENPRPGVIINSPHGNDVYKGVPKDYIGEDVTVGNFFAAILGNKSALTGGSGKVVDSGPNDHIFIYYSDHGGPGVLVLKKKHASGSYKSLVFYLEACESGSIF

SEQ ID NO: 219667 - protein, 484 aa, Glycine max
  Clone ID: PAT_MRT3847_40388C.1.pep
MDRFPILFLLATLITLASGARHDILRLPSEASTFFKAPANADQNDEGTRWAVLVAGSNGYWNYRHQSDVCHAYQLLRKGGVKEENIVVFMYDDIAFNEENPRPGVIINSPHGNDVYKGVPKDYVGEDVTVDNFFAAILGNKSALTGGSGKVVDSGPNDHIFIYYSDHGGPGVLGMPTNPYMYASDLIEVLKKKHASGTYKSLVFYLEACESGSIFEGLLPEGLNIYATTASNAEESSWGTYCPGEYPSPPPEYETCLGDLYSVAWMEDSDIHNLRTETLHQQYDLVKERTMNGNSIYGSHVMQYGDIGLSKNNLVLYLGTNPANDNFTFVHKNSLVPPSKAVNQRDADLIHFWDKFRKAPVGSSRKAAAEKEILEAMSHRMHIDDNMKLIGKLLFGIEKGPELLSSVRPAGQPLVDDWDCLKTLVRTFETHCGSLSQYGMKHMRSFANFCNAGIRKEQMAEASAQACVSIPASSWSSLHRGFSA

SEQ ID NO: 219668 - protein, 49 aa, Glycine max
  Clone ID: PAT_MRT3847_40389C.1.pep
KRLQFLGHGHSWAHLEPHLISRCIRCFFVEQSTEPTSFFACKSCLLRQF

SEQ ID NO: 219669 - protein, 216 aa, Glycine max
  Clone ID: PAT_MRT3847_4038C.1.pep
MMSNSKQKKKLKAHKKKDEWLKDMRGNLSLLATVIATMTFQSAINPPGGIRPASETGEITCPDTSKNITVPCPGEAVLSVLKADTYNSFLYCNTICFASSLAVCLLLVSGLPLNNRFFIWFFSICMCITLTALTLTYLYGLQMVTPNDVWDNSLFSMVGVVIFIWIILLGIVVIFLSLRLLFWIVTCRNKKQTEQGEDQNQSKQEDPKQSTGERCT

SEQ ID NO: 219670 - protein, 110 aa, Glycine max
  Clone ID: PAT_MRT3847_40390C.1.pep
NRVCFGCEKTTEGAFSQISANLSTLKFQDNIELFCQTRRNINTVLNEMRTMPGIMSQMPPFPVSMNEELASSIFPNKSEVSYWITELVSCIPLLKLYNHPSMCFVKHVAT

SEQ ID NO: 219671 - protein, 81 aa, Glycine max
  Clone ID: PAT_MRT3847_40391C.1.pep
ECFWVHVYHHICLGSFIDYQHPAGRRLLEGSSQMQLGNGEMLWPNKSSPNNHSIRIEMGMEHRSLLLHTSTPENEIWIKVE

SEQ ID NO: 219672 - protein, 104 aa, Glycine max
  Clone ID: PAT_MRT3847_40392C.1.pep
GCGCGTGEAIGPLPWSLFVSPTWFGPFVLVSFGSGPINFRSFRTKEASETSNIIRTKNKSASNACVLIVIELQHPQTHTFDYFLIRENWRKKTWEGEKKTERIW

SEQ ID NO: 219673 - protein, 95 aa, Glycine max
  Clone ID: PAT_MRT3847_40393C.1.pep
ITFLCSVSFLSRFGILFFMVQINLVQHHYIQFESLFRGKKLRRVRLLVWHATCWCLWLYRNSVIFKDNFFPDVQNVVYHIQRISWTWMKYKGHGS

SEQ ID NO: 219674 - protein, 69 aa, Glycine max
  Clone ID: PAT_MRT3847_40394C.1.pep
SNLRRRLEFLFPISDLRSPISDELSFEFVSGFVEEANCCLFHHLIFYSPLLMSKLSDEFIGVMGFWFCP

SEQ ID NO: 219675 - protein, 55 aa, Glycine max
  unsure (1)..(55): unsure at all Xaa locations
  Clone ID: PAT_MRT3847_40395C.1.pep
PNTIKDPKAKKPEDXNNKEFIPDPKNKKPDRYNNIPKXLPDPXSKKPEYWDNEKD

SEQ ID NO: 219676 - protein, 61 aa, Glycine max
  unsure (1)..(61): unsure at all Xaa locations
  Clone ID: PAT_MRT3847_40396C.1.pep
CYVTVYFVLKKKKKKKKKKKKKKKKKKKKKKKKKNKXKNKKKKKKKKKWGGRHKLIFLTWK

SEQ ID NO: 219677 - protein, 138 aa, Glycine max
  unsure (1)..(138): unsure at all Xaa locations
  Clone ID: PAT_MRT3847_40397C.1.pep
EKEPKFLKTGDAGFVKMIXPTPLVVDPFPESPPLGRFAVRAMRQPVAVGVLKTVEKKVPSGAKVPKAAQKKXESSGLVPQGMLVPINXWFLFCTLVSSFLGSLFFGQSLKFPPSFRNCCSQNWVFDRRWQNCFYLSVF

SEQ ID NO: 219678 - protein, 54 aa, Glycine max
  Clone ID: PAT_MRT3847_40398C.1.pep
LMFRLPRVIVLCGCGIFLLGVSAVRSSHTQTNQQGTSTGELWGSSQDHNRLVGY

SEQ ID NO: 219679 - protein, 55 aa, Glycine max
  Clone ID: PAT_MRT3847_40399C.1.pep
LLSVTFFAIATFIKLGNRRSILPCFVYVEMPSFHRVFLFGECFSSNGALSKCLFC

SEQ ID NO: 219680 - protein, 217 aa, Glycine max
  Clone ID: PAT_MRT3847_4039C.1.pep
MMSNSKQKKKLKAHKKKDEWLKDMRGNLSLLATVIATMTFQSAINPPGGIRPASETGEITCPDTSKNITVPCPGEAVLSVLKADTYNSFLYCNTICFASSLAVCLLLVSGLPLNNRFFIWFFSICMCITLTALTLTYLYGLQMVTPNDVWDNSLFSMVGVVIFIWIILLGIVVIFLSLRLLFWIVTKCRNKKQTEQGEDQNQSKQEDPKQSTGEDAT

SEQ ID NO: 219681 - protein, 78 aa, Glycine max
  Clone ID: PAT_MRT3847_403C.1.pep
PQECDMAQDPGLFRNMGMYYVEFPPPFLFPSRVIPPQFNFESPSQLRIWFYFYSDINLPTSAGCLISVTKSLINPSFS

SEQ ID NO: 219682 - protein, 54 aa, Glycine max
  unsure (1)..(54): unsure at all Xaa locations
  Clone ID: PAT_MRT3847_40400C.1.pep
VPFGKXPFFPGXLIHPNEFLVLLGEGYYAERPPTHPVEISTRRGKPLDSRVDLS

SEQ ID NO: 219683 - protein, 73 aa, Glycine max
  Clone ID: PAT_MRT3847_40401C.1.pep
NKFPGQQQRKAFFFKEDSGQNEQKGSFFFFFNKGSWLGKSIKKKKRAVGLPFFETIRPNQVKWLPLPIPILES

SEQ ID NO: 219684 - protein, 122 aa, Glycine max
  unsure (1)..(122): unsure at all Xaa locations
  Clone ID: PAT_MRT3847_40402C.1.pep
MESTKIINMCLSMLLHSYDNPILGRGYCSKPSKKHKPRKTPKTPTGRSDKTPVTIPTIGKPPVTTPTIGNPPVTIXPIANPPDTIPAIDKPPETVAPIVLATIGKHPGVLPTIINPPSTPTP

SEQ ID NO: 219685 - protein, 67 aa, Glycine max
  Clone ID: PAT_MRT3847_40403C.1.pep
HTISCFYSVLLLQIWDISFFPKRSTIINIDFDNHFRIWVCRINYLQVISETPNNNLIVRVIRIDSNI

SEQ ID NO: 219686 - protein, 68 aa, Glycine max
  Clone ID: PAT_MRT3847_40404C.1.pep
GDKHFSSSMGKKPIPYKDAAASHIDNLHLVISGDNDDRHCLYEQSLYRTLSPAFWGMGIYPNYEIYIG

SEQ ID NO: 219687 - protein, 52 aa, Glycine max
  unsure (1)..(52): unsure at all Xaa locations
  Clone ID: PAT_MRT3847_40405C.1.pep
TAVSCEIKDFRLINYCSFHMRLSSFPYSTLSKTRTSFPLRKFLAPCCSXPNA

SEQ ID NO: 219688 - protein, 54 aa, Glycine max
  Clone ID: PAT_MRT3847_40406C.1.pep
IKKRRGKTSTLNAEEITNLSKITLYVFFFLILGLLPICLLIIFLKGWRTPIIII

SEQ ID NO: 219689 - protein, 58 aa, Glycine max
  Clone ID: PAT_MRT3847_40407C.1.pep
LSFFFFFKNLKGLFNKFEGISDWVQWHKGLNGGTQTRSLPGPKFFKGKNFLQNIIHNI

SEQ ID NO: 219690 - protein, 145 aa, Glycine max
  unsure (1)..(145): unsure at all Xaa locations
  Clone ID: PAT_MRT3847_40408C.1.pep
MQIHVMTLTPKTMTLDVQSSDTIDNVQANIQDTGCIPPDQQRVIFAXKSSIEDCRTLVDYILQNESTLHXLVLRIRGGMQIFVKTLTGKAITLEVESYDTIDIVEGSIQDTEGIPPDXQHRFIFVGXQLDDRRILGDYNILIEST

SEQ ID NO: 219691 - protein, 363 aa, Glycine max
  Clone ID: PAT_MRT3847_40409C.1.pep
MKLTVKTLKGSHFEIRVQPSDTVMAVKKNIEDVQGKDNYPCGQQLLIHNGKVLKDETTLVENKVSEDGFLVVMLSKSKTSGSAAASSVQPASNPPTTVSTSNSTPPSDPPVQTQAANNSTSSTDAPTTNVSADTYGLAASNLVAGSNLEQTIQQIMDMGGGNWDRDTVSRALRAAYNNPERAIDYLYSGIPEAAEVAVPVPQTAGISSGAVPVGPNSSPLNMFPQETISSTGAGLGSLDFLRNNPQFQALRSMVQSNPQILQPVLQELGKQNPGLLRLIQEHHGEFLQLINEPVEGSEGDIFEQPEQDMPHAINVTPAEQEAIGRLEAMGFDRASVIEAFLACDRDEQLAANYLLENAGDFED

SEQ ID NO: 219692 - protein, 42 aa, Glycine max
  unsure (1)..(42): unsure at all Xaa locations
  Clone ID: PAT_MRT3847_4040C.1.pep
INNGGEXNKKGTRKNGVGNYGVASTIVFSSKFATTKAINAFD

SEQ ID NO: 219693 - protein, 41 aa, Glycine max
  Clone ID: PAT_MRT3847_40410C.1.pep
MSRMKGNYYILKYGLIMISNGGYNSGKILTNAGNWFQGNLD

SEQ ID NO: 219694 - protein, 49 aa, Glycine max
  Clone ID: PAT_MRT3847_40411C.1.pep
YKENLFFFQIIVVFLLRNQARNSFILIKELTIKFVFEISSLTHPSVVFS

SEQ ID NO: 219695 - protein, 137 aa, Glycine max
  unsure (1)..(137): unsure at all Xaa locations
  Clone ID: PAT_MRT3847_40412C.1.pep
MEKRLGNTESAFSIYKEALKMASAEKMLHALPXXYVHFSRLKYXSTNSVDAAGDVLIDGVRTLPQNKLLLEELIKFXMMHGGTKHMAVIDSIIADTISPRSEGSQGFSTEDAEDISNLYLEVIFSLSSIILESVFMI

SEQ ID NO: 219696 - protein, 69 aa, Glycine max
  Clone ID: PAT_MRT3847_40413C.1.pep
ACDETTEGGIIFIPSLSCRISQRSARIGPLIPQKTPPHWFSVSVQLNIFVDGLRPLSPHFLYASAIGTV

SEQ ID NO: 219697 - protein, 254 aa, Glycine max
  Clone ID: PAT_MRT3847_40414C.1.pep
NSARAETNDELNKQLALLKDGGGKSERVESLERQLRESDLQLQQAVASAEASQEKQSMLYSTIKDMEHVIKDLKSKVSKAESRADSAEEKCIILSESNSDLNEELNFSRSRLECLEGSLHQVEEAKVASAKDIGKQTKVFKNLVMQLAVERERLNKQLSSLASENKILVVKLKQTNKHPSQEVTVTFATDHEVDRTWKNSSTNDNEVKFTDTMPDAGTVRRIDAGVLNFKHLFMLSVLVLLFSAVTYLNVDANL

SEQ ID NO: 219698 - protein, 66 aa, Glycine max
  Clone ID: PAT_MRT3847_40415C.1.pep
PPFLLGGLFFRGVPPRLLDTPGPTLKGEPDLAWGLLLAPLFRQWRGLSLFQGERFSWLKRFIDFFF

SEQ ID NO: 219699 - protein, 56 aa, Glycine max
  Clone ID: PAT_MRT3847_40416C.1.pep
MLSIGERTPTDKIKEAHRRVMVANHPDAGGSHYLASKINEAKDMLIGKTKGGGSAF

SEQ ID NO: 219700 - protein, 66 aa, Glycine max
  unsure (1)..(66): unsure at all Xaa locations
  Clone ID: PAT_MRT3847_40417C.1.pep
MGIRCSSRFIVMRVINIYAAQVVIQTEGGTGEIDEKRLHCXYDTDQDCALDYTNESFSGGKCKRFL

SEQ ID NO: 219701 - protein, 56 aa, Glycine max
  unsure (1)..(56): unsure at all Xaa locations
  Clone ID: PAT_MRT3847_40418C.1.pep
KKSQAIYSQRPLPPTGVXGFWKHVSTLYPPXNRPYLQMFYAPKDPKLAESVPPAVE

SEQ ID NO: 219702 - protein, 53 aa, Glycine max
  Clone ID: PAT_MRT3847_40419C.1.pep
QDYKEKPDYGRCVAIVASASLREMIKPGALAIISPIVVGGLTFNFTCLHIYYH

SEQ ID NO: 219703 - protein, 58 aa, Glycine max
  unsure (1)..(58): unsure at all Xaa locations
  Clone ID: PAT_MRT3847_4041C.1.pep
THNPPSRSFSLYNXTDIGIKLIEDADEGKEVCIRGVMIGRDYCTKKRSLVEDYGLTLG

SEQ ID NO: 219704 - protein, 130 aa, Glycine max
  unsure (1)..(130): unsure at all Xaa locations
  Clone ID: PAT_MRT3847_40420C.1.pep
LLLQEEFLTVWSTHVRSTTTLVDDGCPYLSAMAHDSSVSTIPGDYDIGVKLTTINNMFAYGVNTGISGPRLLGTIPESMXEQTVWNQMATVRTPLYFDSSKQSLCXYCIVLLGGGILVDTTGDWITLIQN

SEQ ID NO: 219705 - protein, 41 aa, Glycine max
  Clone ID: PAT_MRT3847_40421C.1.pep
YFVSTRGAIPTSSQYSPSSMITSSSNSTNYPESWSACRSRS

SEQ ID NO: 219706 - protein, 36 aa, Glycine max
  Clone ID: PAT_MRT3847_40422C.1.pep
VDSFFFAARVVVHHHLDLGRMNSEIVKTHPNSKSTS

SEQ ID NO: 219707 - protein, 74 aa, Glycine max
  Clone ID: PAT_MRT3847_40423C.1.pep
RIPNWKNLPYKLIFKLLNDLPHSYNHDFINQYTCQFEAKVCWGLSRCFTIDIYIIPHNPNSFSTFMIDHWLKRI

SEQ ID NO: 219708 - protein, 125 aa, Glycine max
  Clone ID: PAT_MRT3847_40424C.1.pep
MDLDWSCSSTTTTTTGNPYCLLFQALSLIPISHYLLFSSFVFLSFLYRFLELHFLQDLFSLFSGSSVTLTYHPASQFYDAVVSKCRILHRTYLGTPWLFSPHLQNVSLNFFSRPTFFKFRRQLFT

SEQ ID NO: 219709 - protein, 250 aa, Glycine max
  Clone ID: PAT_MRT3847_40425C.1.pep
MAQICLLLVGLLSMFSSAYGYGYGGGWVNAHATFYGGSDASGTMGGACGYGNLYSQGYGTNTAALSTALFNNGLSCGSCYEIRCVNDHRWCLPGSIMVTATNFCPPNNALPNNAGGWCNPPMHHFDLSQPVFLRIAQYRAGIVPVSYRRVPCRRRGGIRFTINGHSYFNLVLITNVGGAGDVHGVAIKGSRTGWMPMSRNWGQNWQSNNYLNGQSLSFKVTTSDGRTAVSYNVAPAGWSFGQTYTGAQFR

SEQ ID NO: 219710 - protein, 99 aa, Glycine max
  Clone ID: PAT_MRT3847_40426C.1.pep
RGSSRVDLQLHNLMYEKSHYVKAIKACKDFKSKYPDIDLVPEEDFFRDAPQDIQDSFLSNDAAHNLMLRRLNFELFQVTMQYYSLAKNLTLGVCLTICN

SEQ ID NO: 219711 - protein, 43 aa, Glycine max
  Clone ID: PAT_MRT3847_40427C.1.pep
AVMFVYSLMLFGREMAGSMMETETVRKEMNHSDFKVSLETPMK

SEQ ID NO: 219712 - protein, 52 aa, Glycine max
  Clone ID: PAT_MRT3847_40428C.1.pep
INIIFKKINGIHNKSLDCKGQKEGYKEFQPSKLAIYFIILTTKNNNYINLLG

SEQ ID NO: 219713 - protein, 59 aa, Glycine max
  Clone ID: PAT_MRT3847_40429C.1.pep
YLPMVISCFVICIRNHYWHPWLGMRGTNKVHGVLVNGLTASSLCLKGASNYLTPLLLDV

SEQ ID NO: 219714 - protein, 97 aa, Glycine max
  Clone ID: PAT_MRT3847_4042C.1.pep
STASWFKSIPLSSHFSLTSCFKTFRPLHLTPKPSTEIGISLFTHSFYFLFFVTAFFPFSLLGNSIPLTNSSHPSYLLGPPPPTQRSRTSYSDDGQPS

SEQ ID NO: 219715 - protein, 51 aa, Glycine max
  Clone ID: PAT_MRT3847_40430C.1.pep
WKQSLPVLKEDLEKKKKEVEAWSFIEIGAFAKKPWLLENRLGAKRIKAYSK

SEQ ID NO: 219716 - protein, 73 aa, Glycine max
  Clone ID: PAT_MRT3847_40431C.1.pep
YSLSYSPEIASIFAHILLWLLLFLGGYFPLDKQITITAPYTFINIHLQKLQHLWESSLAGLMLENQVKLSGYL

SEQ ID NO: 219717 - protein, 242 aa, Glycine max
  Clone ID: PAT_MRT3847_40432C.1.pep
MGQTGKKSEKGPVCWRKRVKSEYMRLRQLKRFRRADEVKTMFSSNRQKILERTETLNQEWKQRRIQPVHIMTSCSVTSDLDFPAQVIPLKTLNAVASVPIMYSWSPLQQNFMVEDETVLHNIPYMGDEVLDQDGTFIEELIKNYDGKVHGDRECGFINDEIFVELVNALGQYNDDDDDDDGDDPDEREEKQKDLEDNRDDKETCPPRKFPADKIFEAISSMFPDKGTAERPEEKYKELTEQQ

SEQ ID NO: 219718 - protein, 54 aa, Glycine max
  unsure (1)..(54): unsure at all Xaa locations
  Clone ID: PAT_MRT3847_40433C.1.pep
SHPHPTXPKSHVAAIISCLTSSHVKCCIISHSVSCSKXXVVSLNGFIEAEIPSP

SEQ ID NO: 219719 - protein, 59 aa, Glycine max
  Clone ID: PAT_MRT3847_40434C.1.pep
CFMLVAVFLVIVIGGSWVLLSRGSFLVLPSMLLQVTITIGCYFRHALNGDEWQCRDKLE

SEQ ID NO: 219720 - protein, 206 aa, Glycine max
  unsure (1)..(206): unsure at all Xaa locations
  Clone ID: PAT_MRT3847_40435C.1.pep
MGNCFRKTAADDNKIHKNEYKTPTTNNPRPSPPERLVKETVEERGERPQNNSVPKLIKYTLDELRSATRNFRPDTVLGEGGFGRVFKGWIDKNTFKPSRVGVGIPVAVKKSNPDSLQGLQEWQSEVQFLGKFSHPNLVKLIGYCWEEYHCLLVYEYMQKGSLESHLLRRGSEPLSWDIRLKIAIGSAHGLALLHTXEEIVIYRDFK

SEQ ID NO: 219721 - protein, 35 aa, Glycine max
  Clone ID: PAT_MRT3847_40436C.1.pep
LEASPLKLSNRYNGTKKYLKWEGGIMLSFICGCQI

SEQ ID NO: 219722 - protein, 52 aa, Glycine max
  Clone ID: PAT_MRT3847_40437C.1.pep
RSITEVWLLVGPYSLGSELPPHCASEMKLHTAFRILLQAKTCQGATTASSVT

SEQ ID NO: 219723 - protein, 267 aa, Glycine max
  unsure (1)..(267): unsure at all Xaa locations
  Clone ID: PAT_MRT3847_40438C.1.pep
MLLSGGVSDLKWILQFVFYAFVLAIGLHALLKNTASKYFDLDATFHAHAIPGLLMDHSLCAVCRNPANKKCSRCKSVRYCSQACQQMHWKSEHKVRCKEFQGSSTSVMMNLAQTEVTNRVFKASSAAVNRSTCTSSIALIPECGRGTSRTIKQPKSVLFPYDEFVKLFNWDKPGFPPCXLLNCGNSCFANVVLQCLSFTRPLIAFLLEKGHHRECCHNDWCFLCELETHVEKRRLSSQAFSSKNIISRLPNISGTLGYGRQEDAHEF

SEQ ID NO: 219724 - protein, 88 aa, Glycine max
  Clone ID: PAT_MRT3847_40439C.1.pep
CHRWLALWFWLRTQSNNICKSGRDFTGYNLCKVGSYVLERAPIWWSGSVARGTISMLRLRPMRQPWLASAKKFQHSTTEIWRSLRRVS

SEQ ID NO: 219725 - protein, 40 aa, Glycine max
  Clone ID: PAT_MRT3847_4043C.1.pep
TYCREILMIGYIVAKAITIGGFALEVTVLFCKPANVWERF

SEQ ID NO: 219726 - protein, 80 aa, Glycine max
  Clone ID: PAT_MRT3847_40440C.1.pep
HPFDRYAHPLDGPKSLLPCVYLTVYMIMPVLALLACIESVVTTIQVCSMLLSTKVLVIDKWSGSPDSPFVTVYSPCQLSI

SEQ ID NO: 219727 - protein, 63 aa, Glycine max
  Clone ID: PAT_MRT3847_40441C.1.pep
PFISDLVDLFSGTLRNKVFVLWPSHLRMKHGQFGQLGSKTLPGPVVRCSHGVLSSEFGEPRCQ

SEQ ID NO: 219728 - protein, 56 aa, Glycine max
  Clone ID: PAT_MRT3847_40442C.1.pep
PHSKEQPKGDRESFLLPSNRKIYFQESPLPYGRLASFNGSITTCVDQHKGTICHQP

SEQ ID NO: 219729 - protein, 41 aa, Glycine max
  Clone ID: PAT_MRT3847_40443C.1.pep
NFILLSAPAGGGVVTVTGDATAVTRVVEKLRASSVAQDASP

SEQ ID NO: 219730 - protein, 107 aa, Glycine max
  Clone ID: PAT_MRT3847_40444C.1.pep
LFVSPANQLVIKNFHYLKNPFGPIVRKQHLDTRLGQYPVGGPVKKNWLQVHKVVGGENWTFEFPLPFFSPPMGWGKWGRGIPSAWWPRCQNGPGTTRNLHKTMETCQ

SEQ ID NO: 219731 - protein, 66 aa, Glycine max
  unsure (1)..(66): unsure at all Xaa locations
  Clone ID: PAT_MRT3847_40445C.1.pep
GQKKGRKGNPPFFSDLYPVTPSFLVVEVKKDTGAPLEXNQFFNKELCPAFKKIVWRAFPPKNPPLA

SEQ ID NO: 219732 - protein, 180 aa, Glycine max
  Clone ID: PAT_MRT3847_40446C.1.pep
KKKGKKLKNSGFRGFQIIRVLFGVTPTPPPFICPIKGGSHFPFRGANFLKRGFLGAFFFFPNLGKRDFFPKDLNWVNPGFFHFNVFKNRPHNFFFLAPKKKFFFSITGGKNLVFLKGPPPIFFFFFFFFFFFFFFFFFFFFFFFFFFFFFFFFFFFFFFFFFFFFFFLIKKKKKKKKGRP

SEQ ID NO: 219733 - protein, 139 aa, Glycine max
  Clone ID: PAT_MRT3847_40447C.1.pep
MAVNSYSSSAQISLQKYGSFMEYTNKELMSKRCCVPQKTAPVGPVVLRITSSIKNKIYEDQSQGIICYEDESGEIICEGYDEGPRYHRIPSPTQHPRDVEIMNLQQQQSWLQIVKGEEINHLAKGALHLQEDLNYNKWL

SEQ ID NO: 219734 - protein, 77 aa, Glycine max
  unsure (1)..(77): unsure at all Xaa locations
  Clone ID: PAT_MRT3847_40448C.1.pep
PVVGIPKALAKKGYKVMVSVYQGRVVGKNVXNHSLCFPEQKGVKSLFGDGPLFVAINEGTQMQFPVSLLKGLAFIPQ

SEQ ID NO: 219735 - protein, 199 aa, Glycine max
  Clone ID: PAT_MRT3847_40449C.1.pep
PASVSIESLKDGLRKNPSSGRAYDRMETEPGLDKLLHNRTGLKTALEPLLKWAQKQIPKTSHKTTSLFLYATAGVRRLPFDDSKWLLDNAWSFLKSSSPFVCKRDWVKIISGTEEAYLGWIALNYDSGILGVKPRKETYGALDLGGSSLQVTFEGNRNKEQQNQQLLNSETRLYVRIGSMNHHLTGYSLAGYGLNEAFE

SEQ ID NO: 219736 - protein, 99 aa, Glycine max
  Clone ID: PAT_MRT3847_4044C.1.pep
SYHHGTLTFMELITHSIHPVIILSTEEHQTHVNFENLGQTSHGHQPFTGNLPTNKYCYAFHASQYPTEWNVPTLKAYSITSAHDISEMRISIIYLSAIV

SEQ ID NO: 219737 - protein, 147 aa, Glycine max
  Clone ID: PAT_MRT3847_40450C.1.pep
QAKSKREKLRVKNLEKWKSRRELKGQKQKSVEEKRRCVIKEAAEGGGERERRMGSVTVFIRVREGKAIEDLITTHTNLAKHCFPKEIKTTVRKIHLYLFPAREFLLQETFLQTYDNEMGIEKQELSVFLSCFFLLCDITKSSTSLLP

SEQ ID NO: 219738 - protein, 62 aa, Glycine max
  Clone ID: PAT_MRT3847_40451C.1.pep
FLDEKSVKAIVMEYRQWYGDSIICKIRDSLFSQCIIVLALDSQFSPLKLHFVLYFDSCVVVW

SEQ ID NO: 219739 - protein, 84 aa, Glycine max
  Clone ID: PAT_MRT3847_40452C.1.pep
ELVFLSRLFITLVFLDSCTSTSTTPNTARSRPRAEAKSRSGSRPTTAIQGDLLRLNSPIPSAMEEGGFLSAALQQEGERDSHYL

SEQ ID NO: 219740 - protein, 49 aa, Glycine max
  Clone ID: PAT_MRT3847_40453C.1.pep
CLIVFWSFLFLVFYRYFFSNLMTTLSLGPSTLHISKLDTKETRSETNNY

SEQ ID NO: 219741 - protein, 73 aa, Glycine max
  Clone ID: PAT_MRT3847_40454C.1.pep
VTCVACDLIGMSVASVAVRAVRPVNLFLLMYTTDLSLSWGYDAAVCPQGTCDVPVRRDMLSSSADVSDRIPIR

SEQ ID NO: 219742 - protein, 118 aa, Glycine max
  Clone ID: PAT_MRT3847_40455C.1.pep
MAPRWKGKDAKAKKDAQAEALKEPMSKIVSQLQSSLVQSNTCGFLSGSSVHLAVGAEQLHLLDKACFGSPVRTVEKDKPRFQLSFEEAFYLCYSLKCLKINNDSDDTSPQTVKSCGIT

SEQ ID NO: 219743 - protein, 40 aa, Glycine max
  Clone ID: PAT_MRT3847_40456C.1.pep
RRSATNLSKFSRLDTVHTYIWLSTKFAHMCNGGDSLNINR

SEQ ID NO: 219744 - protein, 43 aa, Glycine max
  Clone ID: PAT_MRT3847_40457C.1.pep
VNNWIDTFIITVSLPHLIPFSYMNNVYFKQICCIDIILIDKLL

SEQ ID NO: 219745 - protein, 80 aa, Glycine max
  Clone ID: PAT_MRT3847_40458C.1.pep
YSAIYVRPQVAVRSYRVGTRPRTKVPEMTTLGIDAVKTARNGKISTVCCVGNLKALVVRIQCHYTAAWEDIPESHAPIAV

SEQ ID NO: 219746 - protein, 488 aa, Glycine max
  Clone ID: PAT_MRT3847_40459C.1.pep
MAQPASLTRIGLAGLAVMGQNLALNIAEKGFPISVYNRTASKVDETVERAKQEGNLPVYGYHNPKFFVQSIQKPRVIIMLVKAGAPVDQTIKTLSAHLEKGDCIIDGGNEWYENTERREKAMSELGLLYLGMGVSGGEEGARHGPSLMPGGSFEAYKYIEDILLKVAAQVPDSGPCVTYIGKGGSGNFVKMIHNGIEYGDMQLIAEAYDVLKSVGKLSNEELQSAFSEWNKGELLSFLIEITADIFGIKDDKGEGHLVDKVLDKTGMKGTGKWTVQQAAELSIAAPTIEASLDARFLSGLKEERVEASKVFKSSGFDEILSDQHVDKKQLIDDVRKALYAAKICSYAQGMNLIRAKSIEKGWDLKLGELARIWKGGCIIRAIFLDRIKKAYDRNPNLANLLVDPEFAKEIVDRQSAWRRVVCLAINYGTSTPGMAASLAYFDTYRRERVPANLVQAQRDYFGAHTYERIDMEGSFHTEWFKLAKQSRT

SEQ ID NO: 219747 - protein, 85 aa, Glycine max
  Clone ID: PAT_MRT3847_4045C.1.pep
DEIMDIASLEKYLQERFKGCGLACTVDYSITITSDNSTITDTFNSNFSKIELKYSSSTNSIKRRARDRHHSVESNTELSVYQWRC

SEQ ID NO: 219748 - protein, 88 aa, Glycine max
  Clone ID: PAT_MRT3847_40460C.1.pep
ATGYQWNSGLTRRSSSRNGGGRGRRRVQVAPSPLTPVATNETSTPLMQQLNNIEVGLEDRSLTGWGKTTRRPRRQRCPAGNPPLIQLT

SEQ ID NO: 219749 - protein, 66 aa, Glycine max
  Clone ID: PAT_MRT3847_40461C.1.pep
FQESLNCFLLLCARFLKGKKITLCAGHRLRESFSFPLLAYWLNTLLFDIRASVRFKHLLTVSQISV

SEQ ID NO: 219750 - protein, 57 aa, Glycine max
  Clone ID: PAT_MRT3847_40462C.1.pep
GYKSTSFFLREFSFSFQIHVSILFCVSYNECIQEGNANQRGKTKHWKQGDCFEYQCC

SEQ ID NO: 219751 - protein, 72 aa, Glycine max
  Clone ID: PAT_MRT3847_40463C.1.pep
VYLYTFIFISNTHILFGLIQGKQVSSTYAFTILIQKHNMLFIFLSKTYIPLKAIHYSHYNLYCSVLHFKILI

SEQ ID NO: 219752 - protein, 89 aa, Glycine max
  Clone ID: PAT_MRT3847_40464C.1.pep
PLHPFPRFGPFLYQVFNLLLVVAHFGPFGIRYGPASRPAPLLYPFGWGALTSCGFPSRISSLWLFVSPKSVFWLLCSWQRRHLVRSPFV

SEQ ID NO: 219753 - protein, 79 aa, Glycine max
  Clone ID: PAT_MRT3847_40465C.1.pep
GGFFKSKPGINYLKIPDRKKILPYPKGYLCPSAARAAPTNAWRGGPFLAGTPIPVGRGRLPNFNPPKPYTLIKISFPKA

SEQ ID NO: 219754 - protein, 122 aa, Glycine max
  Clone ID: PAT_MRT3847_40466C.1.pep
MSQPRFISMISLCLALVLFYTCNGLPFVDLNFHEVDVMTKRVCTKSIGECLSLTEPEMDSETNRRVLAMQKKYISYDTLKRDMVPCDRAGASYYNCHAIRANPYNRGCEVITACARGQDIKT

SEQ ID NO: 219755 - protein, 153 aa, Glycine max
  Clone ID: PAT_MRT3847_40467C.1.pep
AFRSCSTAKVTESWVTVESVTGTCMGEGDGEGGQGLLDCTDAEKVKSLEADTCPAFVCDGSLRVRWVNDAYKRMMLEGREGEGENIVVWLKVKDSAIASWWCYSHPAFTCGVRLQYTWRNEKCTKMVPCDVWRLDCGGFAWRLDVKAALSLGL

SEQ ID NO: 219756 - protein, 102 aa, Glycine max
  unsure (1)..(102): unsure at all Xaa locations
  Clone ID: PAT_MRT3847_40468C.1.pep
MKMKVLVFVLAGSLVAWQCDAYDVFPLRMNTGYGARTPEVKCASWRPAVEAHNIVGFETIPEKFLETSXEYIHGEQYGSHSRSVYQQAYLXPETVEIHPKGP

SEQ ID NO: 219757 - protein, 89 aa, Glycine max
  Clone ID: PAT_MRT3847_40469C.1.pep
SPLSFSVIVAFDEYCVCGVKAKSSQIIMRMLNTIVYGHLLSLLAVTSIMGIESIWDYISCKKADVGIRSRASELTDAYMHRVISAIAIP

SEQ ID NO: 219758 - protein, 93 aa, Glycine max
  Clone ID: PAT_MRT3847_4046C.1.pep
SALALEPIGGPNGLDMSRLIIDMQHWQCRRCAQYMSHAQLGSLSTVGGVATDIKAVDYVSRRSWLATSHCVQYVVLDVGVSYGSREMPRQHMQ

SEQ ID NO: 219759 - protein, 106 aa, Glycine max
  unsure (1)..(106): unsure at all Xaa locations
  Clone ID: PAT_MRT3847_40470C.1.pep
DNYEKPPADKPAXEKPPGQQPPXEKXPGNKXPGENPPTXKPAAEKPPASKPPAEKPPADKPPAEKPPXRKPAGEKPPANKPREEKPRGGKPGXEKRPADKPPGEKP

SEQ ID NO: 219760 - protein, 54 aa, Glycine max
  unsure (1)..(54): unsure at all Xaa locations
  Clone ID: PAT_MRT3847_40471C.1.pep
VGGLFEGSGSPIQQIIVLLAFYVRLEGFGSSLNFCAPPPPPQLXFFSFXSFFGS

SEQ ID NO: 219761 - protein, 147 aa, Glycine max
  unsure (1)..(147): unsure at all Xaa locations
  Clone ID: PAT_MRT3847_40472C.1.pep
SNPTSTFPNPIRTQSSPNFTFVIKVLAFNRLAALSRCLRSLAAAHYLADRVHLHLHIDHFAPDNAFHVEXKLREAHQILEFVDGFDWKFGEKVVHYRTGNVGLQAQWLEAWWPSSDHEFAFVVEDDXEVSPLYYEFVKALIMNIYYN

SEQ ID NO: 219762 - protein, 66 aa, Glycine max
  Clone ID: PAT_MRT3847_40473C.1.pep
SLVSLSSFNFQIKSCNVKSLLTFLCCGDDVNQTKWLIVILWDVHACCCLPCAVSYDISINCGLLSH

SEQ ID NO: 219763 - protein, 98 aa, Glycine max
  unsure (1)..(98): unsure at all Xaa locations
  Clone ID: PAT_MRT3847_40474C.1.pep
RDPAAPFSPQEDEGEAGDRHTDARGPCATPPSRTAAPKPHQPPPAPPAREGSPTPDEAHEPRXAPAREAAAPTKPXPEPDPREAPPEATTNPDARPTT

SEQ ID NO: 219764 - protein, 251 aa, Glycine max
  unsure (1)..(251): unsure at all Xaa locations
  Clone ID: PAT_MRT3847_40475C.1.pep
PAAIEVRNHVSPEPEPESEEDSSCCCPICLGPFLQLSYLDKCFHKFCFNCILRWTKVVAGKHRSPPSSVKCPLCKXILSRAHRYRLQCYYTEQGFLDDIFNISQYWRSLKYNQPNCWLENWLRREIQALIQEEDVDIILHHILAVVKAALWTRREQKSHMNAPEKKQEEFKMSVSEAARPFLAARTDRFVYEIQLFLASGMNIEAYDAAYIQRLGWSSPGVNTEVSHSELVDRSTVIPYMHLFDGDFDENE

SEQ ID NO: 219765 - protein, 93 aa, Glycine max
  Clone ID: PAT_MRT3847_40476C.1.pep
IHQGLCQLWFFVTIYGMDFDSSGTAPVSSFSYIWIALTPTFVDHLRRVFTCFITEQFGCVHSLLLMDGTGRRCRSLPPTKLNSLRITEDVLVP

SEQ ID NO: 219766 - protein, 78 aa, Glycine max
  Clone ID: PAT_MRT3847_40477C.1.pep
DSHYFKNLLSGMGLFSSDQIPIFRDEANSTTKPLVQSYSIDSGLFFGDFANSMIKMGNINIKTGTNGEIRKNCRVINS

SEQ ID NO: 219767 - protein, 63 aa, Glycine max
  unsure (1)..(63): unsure at all Xaa locations
  Clone ID: PAT_MRT3847_40478C.1.pep
RPRERPRGGNSGTSAEEAHNKXKGEPEKSDPTXKGTESPKDEKPPRRKXGDKPKTRRDTTPPK

SEQ ID NO: 219768 - protein, 65 aa, Glycine max
  Clone ID: PAT_MRT3847_40479C.1.pep
VSFLWGKSDMLFINFVALFVVGLQCYGTVYRAYFTDGSSSIAINSVQSGCFERLIQIFTELPQQL

SEQ ID NO: 219769 - protein, 61 aa, Glycine max
  Clone ID: PAT_MRT3847_4047C.1.pep
QAPSPSFLLLSPLSSLLGFDATRKWQAQPQYRPNKSAFYLDVGHLHLGINYWTGFNWPFFV

SEQ ID NO: 219770 - protein, 74 aa, Glycine max
  Clone ID: PAT_MRT3847_40480C.1.pep
MDSVRVSNELGAGDFKAAKFSVWVVSITSVSIGVVVMIGVLLTKDYFPYLFTTSVPVANETTRLSALLAVTVLL

SEQ ID NO: 219771 - protein, 85 aa, Glycine max
  unsure (1)..(85): unsure at all Xaa locations
  Clone ID: PAT_MRT3847_40481C.1.pep
MQIFVKTLTGKNIDLEVESSGTNDNVKXARIQAREGIPPEQATSAFSAEKATWRDGGTLAXDYNIQKASTLHIVLRLRGGMQISV

SEQ ID NO: 219772 - protein, 314 aa, Glycine max
  unsure (1)..(314): unsure at all Xaa locations
  Clone ID: PAT_MRT3847_40482C.1.pep
MEVRSEGIQVRCDKLQSSVIPRTRLRVWFIRVCSSIVVWTCLVQLMTVSELWHSHLISGITNGIYHIAQVQLPIQGDNGVAQSPPVVLPPRNYTSNGFLRVSCNGGLNQMRAAICDMVTVARFLNLTLVVPELDKTSFWADPSNFEDIFDVKHFIDSLRDEVRIVKRVPKKFSSKHGFSTLEMPPVSWSNEKYYLEQILPLFEKHKVXHLNKTDTRLANNGLPLDLQKLRCRVNYQALKFTPQIENLGHKLIQMLHEKGSFVALHLRYEMDMLAFSGCTCGCTDKEAEELKQLRYAFPWWREKEIVSDEKRSQG

SEQ ID NO: 219773 - protein, 53 aa, Glycine max
  Clone ID: PAT_MRT3847_40483C.1.pep
NEGSTLVVARLLLISIPLGFFNPANPIYKNRTGARRMPHIFFPLVGLGSPRIL

SEQ ID NO: 219774 - protein, 75 aa, Glycine max
  Clone ID: PAT_MRT3847_40484C.1.pep
RHRLQKIFYCFYKMPNATLCLFFNHKCIKILTLFLNIHQIIPITLLLCLQNIIYSILNIHILNIFIVKILTTLYF

SEQ ID NO: 219775 - protein, 182 aa, Glycine max
  Clone ID: PAT_MRT3847_40485C.1.pep
FGSRGGTTNFYSNLAVLAIITWQILLVCVPMVYITIRLQRYYFSTAKEVMRMNGTTKSIVANHVAETTAGVVTIRAFEEEDRFFEKNLDLIDINASPFFHSFASNEWLIQRLEIISAILLSSTALCMVMLPPGTFSSGFIGMALSYGLSLNAQLVFSIQSQCNLANYIISVERLNQYMHIPS

SEQ ID NO: 219776 - protein, 89 aa, Glycine max
  unsure (1)..(89): unsure at all Xaa locations
  Clone ID: PAT_MRT3847_40486C.1.pep
NICKFFNDDGEKEQFHCDDXGICTVGGLDNLFHCTKSGSWYAIGLRDHHLCVQIYMLHQLTICXDCLFDSLKDTXAMKCGHILLHECCV

SEQ ID NO: 219777 - protein, 61 aa, Glycine max
  Clone ID: PAT_MRT3847_40487C.1.pep
FGSLIVDVKHCSLQSTMLFNIIIVIFGYPNYTNTTLTLIIFSLSLSLWHPLSVFLHPTNAW

SEQ ID NO: 219778 - protein, 70 aa, Glycine max
  Clone ID: PAT_MRT3847_40488C.1.pep
LNFYIISKSITFLYLVSSFYLIIFNLKFQYGFKLKSYFFLSFALSKVKGCSYLNLDSLCSFFYIFTHLVT

SEQ ID NO: 219779 - protein, 101 aa, Glycine max
  Clone ID: PAT_MRT3847_40489C.1.pep
IKKFKISMMKPKKLGFFGSFGLGGMIKYGMVSCMLQSHLSIELARMINSQQHGHSEQRQSREQRQSRDVWLWYVHILKQLNMCCSSSWKSSTTCEAEADAV

SEQ ID NO: 219780 - protein, 75 aa, Glycine max
  unsure (1)..(75): unsure at all Xaa locations
  Clone ID: PAT_MRT3847_4048C.1.pep
VFGPAAIVRTRAPPRLCTHSRMPTXCIPSTCNRALVLRTLLTYQITPLCHFWNGIPLLTHSIPSDFIISTFSFPS

SEQ ID NO: 219781 - protein, 160 aa, Glycine max
  Clone ID: PAT_MRT3847_40490C.1.pep
MAMDNVGSLDAAIEQFLNAEKHAMLAGYVAATRNAVTEILRLCFEARAWKTLNDQIGLLFKRRGQLKQAVTAMVQQAMQYTDETPDLETRIELIKTLNSVSAGKIYVEIERARLIKKLAKIREEQGLIAEAADWMQEIAVETFGAMAKTEKIAFILEQVR

SEQ ID NO: 219782 - protein, 443 aa, Glycine max
  Clone ID: PAT_MRT3847_40491C.1.pep
MAMENAGNLEAAIEQLLNAEKQARLAGDVAATRNAVTEILRMCFEARAWKTLNDQIVLLSKRRGQLKQAVTAMVQQAMQYIDETPDLETRIELIKILNSVSAGKIYVEIERARLIKKLAKIKEEQGLIAEAADLMQEIAVETFGAMAKTEKIAFILEQVRLCLDRQDYVRAQILSRKISTRVFDADVSKEKKKPKEGDNVVEEAPVDIPSLPELKRIYYELMIRYYSHKNDYLEICRCYKAIYEIPSVKENPAEWIPILRKICWYLVLSPHDPMQSSLLNSTLEDKNLSEIPNFKLLLKQLVTMEVIQWTTLWDSYKDEFENESNLGKNLGEKAAEDLRERVIEHNIIVISKYYGKITLKRLAELLCLSVQKAEKHLSDMVVSKALVAKIDRPMGIVCFQRAKDSNDVLNSWAANLERLLDLVEKSCHQIHKETMVHKAALKV

SEQ ID NO: 219783 - protein, 97 aa, Glycine max
  Clone ID: PAT_MRT3847_40492C.1.pep
SVLVLAGLPGLKGVFPLKLPPLPPPPIVFFFFPLGIMGGLMLVGFFPPNQKGVVFGFTKKKGWETGSTGAPFWGFFKVPKGRLPFKVFFFFKFRGLY

SEQ ID NO: 219784 - protein, 69 aa, Glycine max
  Clone ID: PAT_MRT3847_40493C.1.pep
FSVLSDLRTHEKHCGDLKWLCSCGTSFSRKDKLMGHVALFVGHQPAINNNGLSYSGKLIRAAPHIANAD

SEQ ID NO: 219785 - protein, 116 aa, Glycine max
  Clone ID: PAT_MRT3847_40494C.1.pep
IWFPGRKRRKKKLSSPPPFLSSLLTEKTVVVLRKLRSVATGLSLLIFRPRNLYLILLLLLLLVPVLLILSPILCLLLPPYCLRLLICANSHGLIVFLAWPLSDCLALLNCLTLAVL

SEQ ID NO: 219786 - protein, 242 aa, Glycine max
  Clone ID: PAT_MRT3847_40495C.1.pep
DFSDENHAGEGPGGAVAMDCEMVGGGSDGSLELCARVCLVDEDERLIFHTYVQPEIPVTNYRYDITGLTEEHLRNAMPLKEVREKLLQILHNGESIGKVRLDGGKARLLVGHDLAHDLDCLKMNYPDHMLRDTAKYRPLMKTNLVSHSLKYLTRTYLGYDIQSGTHDPYEDCISVMRLYKRIRSQLHPEEDHGTMTLSNNIVGMPDSWISRELDNLTPDELYAMSRSDYKCWCLDLIPRLSA

SEQ ID NO: 219787 - protein, 79 aa, Glycine max
  unsure (1)..(79): unsure at all Xaa locations
  Clone ID: PAT_MRT3847_40496C.1.pep
LTRGGLTSFLGLSNGYLTGXALTTAPQGYKGPHQIALGNLLAKNILGGISAGGTLDWLGLIGKGWCYLIKASLEKTGGG

SEQ ID NO: 219788 - protein, 45 aa, Glycine max
  Clone ID: PAT_MRT3847_40497C.1.pep
MAPKGLTFLAVLICVSALSLSPSVAGEGQNNGLVMNFYKESCPLG

SEQ ID NO: 219789 - protein, 140 aa, Glycine max
  Clone ID: PAT_MRT3847_40498C.1.pep
ARAARAARAARAAAKTTEGGREMESNARYGSIDQVSRSAPRDVRTILSLTNLRSYSSLLFLSSLASRFVSFRKIVWTPLMLSGLLALCLMIATRETIELADIERDNLGFGLQPTDYLSAMKCTRGGTCFKANCSVLVTLQ

SEQ ID NO: 219790 - protein, 71 aa, Glycine max
  Clone ID: PAT_MRT3847_40499C.1.pep
NWDGFANYCLIKLFLKKNKILFRVGLGVCILSVKPETSSAEMLLKQRFGWPIAHSLDLNMHADFLLLYIFL

SEQ ID NO: 219791 - protein, 46 aa, Glycine max
  Clone ID: PAT_MRT3847_4049C.1.pep
TWWHDIMMTMLIFLKFFCQTKFIRRYTNLLLIKTHEHFFKIISLLN

SEQ ID NO: 219792 - protein, 80 aa, Glycine max
  Clone ID: PAT_MRT3847_404C.1.pep
MHLCATMLIRNNITLHDKIRHTIKLSKDRMQKTERIPPDQDTLIFTRKQMADGLTRAVYNMLSASTLHLILLLTLRNMSN

SEQ ID NO: 219793 - protein, 82 aa, Glycine max
  Clone ID: PAT_MRT3847_40500C.1.pep
TRFEREDGTGGNVDTMPTEDPSNGLTQPSLQIEDTDQGNMHELSEVHTEQSQRGDIINDESDIVDDVDLIESIALEGEQQEE

SEQ ID NO: 219794 - protein, 74 aa, Glycine max
  Clone ID: PAT_MRT3847_40501C.1.pep
FKQAIQFTCGGYFSPARASAVPVAGLHAVHAVIDIETVKKLWVYHKNEKVKEPLESVMVIDYVVPSSSIAHSAS

SEQ ID NO: 219795 - protein, 48 aa, Glycine max
  Clone ID: PAT_MRT3847_40502C.1.pep
DQHKDMQLNVDNMSYEELLALEEHIRNVSTGLNKEMVSRLLKKEEYSA

SEQ ID NO: 219796 - protein, 88 aa, Glycine max
  Clone ID: PAT_MRT3847_40503C.1.pep
RTIRLLLRFTFPYTHPLLLQAINKNEALPRTPVLVFDLITPATNPMSQAPNRAQCKTSSRVANNYNPIQKSFNINKHLCNIIVVPTTN

SEQ ID NO: 219797 - protein, 110 aa, Glycine max
  Clone ID: PAT_MRT3847_40504C.1.pep
MATSLSNMSLTGITGRTLSRPLHGVSYCTRDSTTASDDSDTHDDCKPTHSHENSGISMPNAIEQDVQDNAVMVYMKGVPDFAHCGLSSLAVRVVKHYDGTISARNILHDP

SEQ ID NO: 219798 - protein, 88 aa, Glycine max
  Clone ID: PAT_MRT3847_40505C.1.pep
KQLVPKGPLGSPKGQRERANAAAVATPITEGVAEPEAAVPEYGERGSVTDEEGAEGCTGGAQPRRSLQRRRKGQGPSRNNGAMLFGGS

SEQ ID NO: 219799 - protein, 146 aa, Glycine max
  Clone ID: PAT_MRT3847_40506C.1.pep
ELTTELKTALVFEADDQSAMVYELAYGKEHYGLHGYRGILVDRYEEMIENYHPGLGDHRWPLVTHFVGCKPCGKFGDYPVERCLKQMDRAYNFGDNQILQMYGFTHKSLASRKVKRVRNDTSNPLEVKDELGLLHPAFKAIKLPSS

SEQ ID NO: 219800 - protein, 100 aa, Glycine max
  Clone ID: PAT_MRT3847_40507C.1.pep
QHWRPFPEMVRRCQHCRHRRVFWPKHVSVKEWRRRVRYRRLLRLAWACDFNTGKWSQMKRIFFFFSFLLFLVWDSGCNERCVYGLSLGFYYLQGIIICEI

SEQ ID NO: 219801 - protein, 405 aa, Glycine max
  Clone ID: PAT_MRT3847_40508C.1.pep
MIVSQNMVTEAEIICKQNIPMLDVKKYHLRVAQELGVNVKVVEVSPTSNGVPVFGHVRVSSESVSTETTRFESVMGCSEMIEESIIETPATEFTPNVRSGCCADIGPRGSMDDEHIQIDDLAAHLGFVFKHPMPSAFYAVFDGHGGPDAAAFVKNNAMRLLFEDADMLQSYDADALFLKKLEDSHRRAFLGADLALADEQSVSSSCGTTALTALVLGRHLMVANAGDCRAVLCRRGVAVDMSQDHRPSYLPERRRVEELGGFIDDGYLNGYLSVTRALGDWDLKFPLGSASPLIAEPDVQVVTLTEDDEFLIIGCDGIWDVISSQDAVSFVRRGLRRHDDPQQCARELVKEALRLHTSDNLTVIVICLSPVQSIVESCPPQRRRFRACSLSEEARNRLRSLLEGN

SEQ ID NO: 219802 - protein, 76 aa, Glycine max
  Clone ID: PAT_MRT3847_40509C.1.pep
LTLKAVGKAFPLLSAAGLLSGKAAGSEYHSTLLFLTKDPKMMPTFPQHRNLKHKALPPNSNEEPASSLTNNLPISD

SEQ ID NO: 219803 - protein, 61 aa, Glycine max
  Clone ID: PAT_MRT3847_4050C.1.pep
SPCIESVHWFGQRCASGLHMIDSVYVVGKEMVLTIRSFVSVSALYTRSGAENHISTTDYAS

SEQ ID NO: 219804 - protein, 111 aa, Glycine max
  Clone ID: PAT_MRT3847_40510C.1.pep
HIKLFDINFFLGTADTYFTSTLSSRVVSFSHKGIICRATPTKRPVGDRHHTCHLFPIRRSRLLTKWLRFLPPEQLDDPLSNLPYPAMSMITPRWDRPRYLIWRIHSCLISG

SEQ ID NO: 219805 - protein, 49 aa, Glycine max
  Clone ID: PAT_MRT3847_40511C.1.pep
TPSSMMASRAFKQAPVTLNKSSSIVLPSLSRNSSSFIVVATTHININTH

SEQ ID NO: 219806 - protein, 114 aa, Glycine max
  Clone ID: PAT_MRT3847_40512C.1.pep
INVNGFFVAVARTTGTLMRYLLKLVRAGNCRRQAQKGEGINAGKNPYLGHVNKRTQPISRANNETHTKRPGGKVRQNDHRSPCQMQQQGQALNVYLEEDLQEGTNERCTRIRPL

SEQ ID NO: 219807 - protein, 69 aa, Glycine max
  Clone ID: PAT_MRT3847_40513C.1.pep
RKRGGGLKNPWGPAPFKKLPLLLWGDNNWGEIEGVFYSLTSRGHGLAPRGLKREGAHPSKKEGGGGKIQ

SEQ ID NO: 219808 - protein, 52 aa, Glycine max
  Clone ID: PAT_MRT3847_40514C.1.pep
ALALTMRGWAGGLTVWVTMSALKGPALPVVIGKANPAGPELNADVREQATAR

SEQ ID NO: 219809 - protein, 48 aa, Glycine max
  Clone ID: PAT_MRT3847_40515C.1.pep
RINITVRVVFRVSWINNALSDTKLAAYYDHSIGLVPWFSAIMQIRIRM

SEQ ID NO: 219810 - protein, 42 aa, Glycine max
  unsure (1)..(42): unsure at all Xaa locations
  Clone ID: PAT_MRT3847_40516C.1.pep
XEQAVLXXAITPXXRXTXAXXXNGXGSSSIXPXLLTPSFSXL

SEQ ID NO: 219811 - protein, 65 aa, Glycine max
  Clone ID: PAT_MRT3847_40517C.1.pep
HIPKNAKSNTYESQQIPFTIDYHIACLYIFLPSFLVAPFDKNIHINMSSDFYIITTSLINTWGLQ

SEQ ID NO: 219812 - protein, 55 aa, Glycine max
  Clone ID: PAT_MRT3847_40518C.1.pep
LHLSLPLLVLRIYSRSQSEHPSQWDPPHPPLRGTYHAECAPPPNISLLKVFPHSK

SEQ ID NO: 219813 - protein, 127 aa, Glycine max
  Clone ID: PAT_MRT3847_40519C.1.pep
FLTMQMQLFTIFKLLILTLLFQLQVTPTLTLSPCKTSCGNIPINYPFGLEDGCGAPQFRHMLNCSTDLFFQTPSGSYKVQSIDYDKKTMVIYDPSMSTCSILQPHHDFEMTQVQSAIIPPSQDTVFV

SEQ ID NO: 219814 - protein, 79 aa, Glycine max
  unsure (1)..(79): unsure at all Xaa locations
  Clone ID: PAT_MRT3847_4051C.1.pep
AVLRVSIETXTLXXXXXXIXXXVXEEXXXACDRXXCDAGGLXGGXXPWIDXVAFTLVPLLXFYFHEEVRKXAVSAXPEL

SEQ ID NO: 219815 - protein, 93 aa, Glycine max
  unsure (1)..(93): unsure at all Xaa locations
  Clone ID: PAT_MRT3847_40520C.1.pep
IFIKTLTGKTITLEEESSDTIDYVKANIQDKEXILPDQQRLILAGKQLDDGRTLADYDIQNEITLDLVLRLSGGLHIFANTLTGWTITPVVDS

SEQ ID NO: 219816 - protein, 135 aa, Glycine max
  Clone ID: PAT_MRT3847_40521C.1.pep
ARDFLMATTTHTDTPFWELHGANVGEPLRERWMYAMWGIHASPLETSILYAHTILESLTAYPALWDEDTDSAIQGRWIFMVCLIEPILQLMYLNPCRQELGLWIFLLKELAAYCCGAANHTLCVIRQREGCTVYL

SEQ ID NO: 219817 - protein, 113 aa, Glycine max
  unsure (1)..(113): unsure at all Xaa locations
  Clone ID: PAT_MRT3847_40522C.1.pep
WAGGAPSNVAMVPFMGDQNHVAPLGLLPCGFWGGPKGKGLVFLYWAPQIKILSPSXVGGFWLNWGWNSILGGVLRGVPLITWPLFAGQKLNAILFCGGLNGGVGPRVGENGLG

SEQ ID NO: 219818 - protein, 782 aa, Glycine max
  unsure (1)..(782): unsure at all Xaa locations
  Clone ID: PAT_MRT3847_40523C.1.pep
MATPILYNVPSLGHHPRSHLLFPSLPQMSSTFSPLLNLIAVFLLLFLVRHTCEARDPFACDPKNGATENMPFCKASLAIPERVKDLVGRLTLQEKVRLLVNNAAAVPRLGMKGYEWWSEALHGVSNVGPGVKFNAQFPGATSFPQVITTAASFNASLWEAIGQVVSDEARAMYNGGRAVLTYWSPNVHIFRKRWLDRGQKRPVKEPLLACIYAASCLMKLKGRTGNRLKVAACCKHFTAYDLDNXNGKDRFHFNAQVSKKDIEQTLDVRFWIFRSAANGASVMCPYMQFNGIPHHTDPNLLNITVCGLWQLAGXIVSDYETVAVFYDNQHXTIAIXDAGPDAFKSGLDLACGPFLAVHTNNAIEKWLLCEGAINGILITTLGPRDVCTQSHQELALEAARQGIVLLKNKGPSLPLSTRRGRTVAVIGPNSNVTFTMIGNYAGIACGYTSPLQGIGTYTKTIYEHGLAKVASTDDKQVVTAIIATQQADVKLLEMGLYQPIEFRLRGRXNSATYMNVSMXMFLKFKTAQVGPIFRLIMSGGSVDITFAKNNMYFVGSFYACFLFGHSVSGIASIGFLVRYVVSXQLLSWYPQESLTKLPMTNIAMRGSKSAGYPGRTYRFYNGPVVYPFGHGLTYTHFVHTLASAPTVVSVPLNGHRRANVTNISNRAIRVTHARCDKLSISLEVDIKNVGSRDGTHTLLVFSAPPAGFGHWALEKQLVAFEKIHVPAKGLQRVGVNIHVCKLLSVVDKSGIRRIPLGEHSFNIGDVKHSVSLQAAALGIIKS

SEQ ID NO: 219819 - protein, 92 aa, Glycine max
  unsure (1)..(92): unsure at all Xaa locations
  Clone ID: PAT_MRT3847_40524C.1.pep
FSPPNTILPPPLPPPPPYPSPTNHRQTPTALPPLAAPPNPPKPHQXTPPSNPLANKLWLTSKLSPPPPPPPPAPPPPEIDTETKKESGGEGA

SEQ ID NO: 219820 - protein, 69 aa, Glycine max
  Clone ID: PAT_MRT3847_40525C.1.pep
GLPKYSSSGGSHKHIQNPVKEGNRLREIKNDLIMDNRRSLHVMVSFPLDILSASQRCLSSLLHFLNYSQ

SEQ ID NO: 219821 - protein, 59 aa, Glycine max
  Clone ID: PAT_MRT3847_40526C.1.pep
RTEINVKLTFGEKQQENGWRRLCSIGLGSYHLYLGRNYIRAHLLRWSRSNHTVVLIQVI

SEQ ID NO: 219822 - protein, 68 aa, Glycine max
  Clone ID: PAT_MRT3847_40527C.1.pep
LGPFKTWAKTRYKCFQEKNISPLKFPTKFHARSQKGKTRGPQKGRLPNINGWAPPPPFQNGKPFGPLF

SEQ ID NO: 219823 - protein, 111 aa, Glycine max
  unsure (1)..(111): unsure at all Xaa locations
  Clone ID: PAT_MRT3847_40528C.1.pep
WVXTFVHXNFFKVGDRIPTVNFMAXFETQTPLLLFEEINPTMIDRMDTRQTFVRAEIQDXDIICIQKSILNEKASSNFFFLPIFFQTKLFKNFFFFPDNHPRVFISPPIII

SEQ ID NO: 219824 - protein, 45 aa, Glycine max
  Clone ID: PAT_MRT3847_40529C.1.pep
KELGGKIFRQPGPLLGIPTKIASFVDQDGWKVVLVENLDFLKELQ

SEQ ID NO: 219825 - protein, 46 aa, Glycine max
  unsure (1)..(46): unsure at all Xaa locations
  Clone ID: PAT_MRT3847_4052C.1.pep
VISFAELMLQDKSYCKLLTRVSHEGLIYQXXISPTSIYXLXTICLT

SEQ ID NO: 219826 - protein, 63 aa, Glycine max
  Clone ID: PAT_MRT3847_40530C.1.pep
FFFRLVLKLLLFKFLFLYILFWAYLHSSNCHLNCQDVATCTLTLTLTIVVSCCVHFKYWPILV

SEQ ID NO: 219827 - protein, 83 aa, Glycine max
  Clone ID: PAT_MRT3847_40531C.1.pep
GCQKNTKRETQFIIIICVNVASLLSYGYGFVHVTAFPVLLIQWLSNMLRMVRPTLLLLSSLCVTFKLHYLIETRNPNYADSVL

SEQ ID NO: 219828 - protein, 120 aa, Glycine max
  unsure (1)..(120): unsure at all Xaa locations
  Clone ID: PAT_MRT3847_40532C.1.pep
AISMIFTPAATTVNRAGAGMVAPFTGLKSMDGFPTKXTNNDITSIASNGGRVQCVHVWPSVGXKKSETLYYLPYLDDAQLAKEVEYLLTKGWIPCLXLQWEHGYLYRDHNRSPRYYRWTL

SEQ ID NO: 219829 - protein, 71 aa, Glycine max
  unsure (1)..(71): unsure at all Xaa locations
  Clone ID: PAT_MRT3847_40533C.1.pep
AAFXAXPXRXQPIXXYPCAXYQFVRKPCIXXXPPXNLAILSLSFSXSXSCXAXYNXVXNLCXYLVHCFLXX

SEQ ID NO: 219830 - protein, 77 aa, Glycine max
  Clone ID: PAT_MRT3847_40534C.1.pep
RVLSTSTSSYVSNCQNATATYNIERVTSLQQNTRRCCGRCSGATDEERGNLRRSGSRLVALPTEKIGTQAKSWRALY

SEQ ID NO: 219831 - protein, 92 aa, Glycine max
  Clone ID: PAT_MRT3847_40535C.1.pep
SIPLPLIDAKDVLLDENYMALVADSDLSTLVEKDVSHTMTTLTGTRGYLPPEWLLERGESEKTDVYSYRMVLLEIIGGRRTVPRLEDPRDRT

SEQ ID NO: 219832 - protein, 64 aa, Glycine max
  Clone ID: PAT_MRT3847_40536C.1.pep
RVRDPVYGCVGAISFLQRQVQRLQKELDAANADLLRYSYTDITPASLSVPPGLASFHHVPQEAV

SEQ ID NO: 219833 - protein, 77 aa, Glycine max
  Clone ID: PAT_MRT3847_40537C.1.pep
SNFHFHLFATLPNYRLVRVTFFSFFPPSLSFTMAKKPLLCWLLLLAVLAEAGASDEDGAELDYSKLSGIIIPGFAST

SEQ ID NO: 219834 - protein, 72 aa, Glycine max
  Clone ID: PAT_MRT3847_40538C.1.pep
LGPSTRFRLFECNFFHLSSSAVGNQTRARGYVTCVVFPFGPDSQKFVQGQSKTNLFNLFLFPPPKKFLLDLS

SEQ ID NO: 219835 - protein, 158 aa, Glycine max
  Clone ID: PAT_MRT3847_40539C.1.pep
FMVMHIRLAVLAAVVAAAATAAAQPQCSNSGWLEIKDQAGLQSLQGCTSFTGSIKLGGSVSDLSPLAGLASVSLSLNIEGTKLTSLKGLEALKEVNDKLYIKANPSLNSLAGLEGLNGIGHGLFVEYNNLLSDISSLKNVKVINRDPNMFGSPGEPSF

SEQ ID NO: 219836 - protein, 242 aa, Glycine max
  Clone ID: PAT_MRT3847_4053C.1.pep
EILTRAALVEKIDEEAGKLGTFWPGEWLSGDFPEARMFTLKYKTNLTQWSGASLPLQEVSSMLLEKLLAAGIGNRPVVFVTHSMGGLVVKQILHKAKEERFDNLVKNTIGIIFYSCPHFGSKLADMPWRMGFVLRPAPTIGELRSGSSRLIELNDYIRHLHKKGLLDVLSFCETKVTPIVEGYGGWAFRTEIVPIESAYPGFGELVVLESTDHINSCKPVSRLDPSYTETLKFLQKLKACHA

SEQ ID NO: 219837 - protein, 85 aa, Glycine max
  Clone ID: PAT_MRT3847_40540C.1.pep
AFILISLPNGGVTSYIFSTHQCEGILDQSNDNGHFYNSCKYNEIHDSASKDELENGKKSYVFSTSKVNRLLRKLEGKLLSYKMFA

SEQ ID NO: 219838 - protein, 35 aa, Glycine max
  unsure (1)..(35): unsure at all Xaa locations
  Clone ID: PAT_MRT3847_40541C.1.pep
FEWCHQNYHSIXLYFXMXYIXCXXLXYIFMKFXDF

SEQ ID NO: 219839 - protein, 81 aa, Glycine max
  unsure (1)..(81): unsure at all Xaa locations
  Clone ID: PAT_MRT3847_40542C.1.pep
GHYLFCPCRMSKTLILRKHHNEDVEKDNNEAEEQDQFFGQKYQRGVKQNPLLSHSKFNCLNQRCLKKWCCTRDNSXYYPQS

SEQ ID NO: 219840 - protein, 124 aa, Glycine max
  unsure (1)..(124): unsure at all Xaa locations
  Clone ID: PAT_MRT3847_40543C.1.pep
MLCHYVYGEGLRMIKLFFKKHSLLYCKNVTEKLGIKIERNPPEDKLTQLGVRQWPKWGCPPSKFPWTYESKETCYLLGGKXVKVTPSGANESVEIAAGDFVEFPKGMSCTWDVSVAVDKHYNFE

SEQ ID NO: 219841 - protein, 265 aa, Glycine max
  Clone ID: PAT_MRT3847_40544C.1.pep
MAKRVPVGELLVLVLLLLAPKTKAMSITRGHNKSRGKESSGSSDEGGAISFCLSWRLAVEANNVVAWPTVPPQCSRYVETYMINGQYDRDLDLIVEVILAYVNQTFLLGDAMDAWNLDVDDTCISNIYYYKGKKYGCDPYDPFSFRTWAMKGGCPAIPSVLRLFNILVDKGFKVFLLTGRDEETLGQVTRNNLHNQGFIGYERLILRSSAYKGKSAMKYKSDVRKQLEDQGYRIWGNVGDQWSDIQGDYLGNRTFKLPNPMYFVP

SEQ ID NO: 219842 - protein, 106 aa, Glycine max
  Clone ID: PAT_MRT3847_40545C.1.pep
LVVGLPTYNQPPVNSQGNMLSDRIYVSLYNQRSSDNILTIISPSFPNPLPMSGKLPRQFCLVRHQENLNVVRTAHSKQRYTLTPRQPNFSDNNPFSVFSHASAHAS

SEQ ID NO: 219843 - protein, 55 aa, Glycine max
  Clone ID: PAT_MRT3847_40546C.1.pep
VVIHSCLYFIGMLILLLFWFIHFIGMQKSCNLPMSCLVTDDNTHSLVGCENDYSL

SEQ ID NO: 219844 - protein, 71 aa, Glycine max
  Clone ID: PAT_MRT3847_40547C.1.pep
FGNGASSVHSLREGEGSFNYSFFSHNSKTNPPLFFTSALSLFARDLYQFQTLETSYSIGAATTAITPFLDI

SEQ ID NO: 219845 - protein, 84 aa, Glycine max
  Clone ID: PAT_MRT3847_40548C.1.pep
CRGCNFCIPRCENCGGCIESGEVEEGACEDIFCLECWLQLPKCSFCNKPYCKQHTNWWCTSSDSSLICKVCDENSHGYTYTDVL

SEQ ID NO: 219846 - protein, 59 aa, Glycine max
  Clone ID: PAT_MRT3847_40549C.1.pep
IFEIFRVEVYLFINFFFLNRIKKKKNSLPTNLWFEAKQQKSIFNNQAVSNQMACHTQGG

SEQ ID NO: 219847 - protein, 90 aa, Glycine max
  Clone ID: PAT_MRT3847_4054C.1.pep
LSLNPVFKRRGKDPMGGFLLGLTNFLFLLFFFFHIFQKPWTLSFGKNQYLSFSGLPFPKNPFFLVGTATRLSQPETGGLKKYVKSRLPGG

SEQ ID NO: 219848 - protein, 451 aa, Glycine max
  Clone ID: PAT_MRT3847_40550C.1.pep
MGKGPFSFRRSASRRRPKKTAAPPPPPSPPQPPYAAGIATSPDDNNNRLIAAGAGSSALTKAKKKTGGARLWMRFDRSGRSELVELEKNAIIRHAAIPARDLRILGPVFSHSSNILAREKAMVVNLEFIKAIVTAEEVLLLDPLRQEVLPFVEQLRQQLPGKSQPKLLGGVEEQEGEMQVSNGRQWLPMPEAADGLQSELPFEFQVLEIALEAVCTYLDSNVADLERGAYPVLDELARNVSTKNLEHVRSLKSNLTRLLARVQKVRDEIEHLLDDNEDMAQLYLTRKWLQNQQFEEAHLGATTSNNFPNTSRSVRRLGSNRSESLVTCHYEDDNNVEDLEMLLDAYFMQLDGTRNKILSVREYIDDTEDYVNIQLDNHRNELIQLQLTLTIASFAIAIETMIAGAFGMNIPCNLYHIDGVFWPFVWITSAACVLLFLLILAYARWKKLLGS

SEQ ID NO: 219849 - protein, 119 aa, Glycine max
  Clone ID: PAT_MRT3847_40551C.1.pep
MGKTPFSFRRSASRRRPKKTAAPPPPPSPPQHPYAAGFAASPDDNNRLIAAAAGSSALTKAKKKTGNVRLWMRFDRSGRSELVELEKNAIVRHAAIPARDLRILGPVFSHSSNILGTDN

SEQ ID NO: 219850 - protein, 79 aa, Glycine max
  Clone ID: PAT_MRT3847_40552C.1.pep
SKGLSKSVGLGAVVNVENPRLSGASFLCPKGEALLSPAKPLREGGFEAICRGFTYADHFKKFWSGILAQDPCLEFFKTK

SEQ ID NO: 219851 - protein, 80 aa, Glycine max
  Clone ID: PAT_MRT3847_40553C.1.pep
FETFTLVFLPINLGIHGIGHHFLLNLFLNCRVGRWGMEIFFKFNSILMLTNWARIGFLCLNPGILGGGGKRSLFNLRGNR

SEQ ID NO: 219852 - protein, 79 aa, Glycine max
  unsure (1)..(79): unsure at all Xaa locations
  Clone ID: PAT_MRT3847_40554C.1.pep
NQLSSSSEEKTEVXAFNSSLASLISSGPIHVKFLSKEIMLCYNFSKKDVESSKIAFVSLATAFEKWTSMTGLAAQLKGL

SEQ ID NO: 219853 - protein, 47 aa, Glycine max
  Clone ID: PAT_MRT3847_40555C.1.pep
FPLLPREYKRPANFDPFLRLGGTLLGLDPDGLLLPPRIFSPSIEGPP

SEQ ID NO: 219854 - protein, 43 aa, Glycine max
  Clone ID: PAT_MRT3847_40556C.1.pep
STTINNAAIGATIAFASPSSRSSDAPYVVFSQRIRADSIDDRA

SEQ ID NO: 219855 - protein, 175 aa, Glycine max
  Clone ID: PAT_MRT3847_40557C.1.pep
LEGESSYGEEAASDQQYGEVSHDRAGWPMREKDRGSERDWSGSSERRYRDDRDQGYERDASREKDMGHDHEWSERRHRDDRETGRERSRDRERSLDRDRDRDREKDLRERDRHREDRDGYADHHRFRDREAEHDDEWERGRSSRTHSKSRLSQEEEHHSRPRDADYGKRRRLTSE

SEQ ID NO: 219856 - protein, 456 aa, Glycine max
  Clone ID: PAT_MRT3847_40558C.1.pep
TDAELEAELSKYGSVKEVKFFDEKASGKSKGYCQVEFYEAFAATACKEGMNGHVFNGRPCVVAFASPFTVKKMGEAQINRNQQMNQTAVPQGRRGPADAGAKPGGSNISTGGNYQGGDGNRSYGRGGGGNWGRGNNPGMGNRGPINPMRNRGGGMGGRGIMGNGGNGFGQGMGATPPLLHPQSMMNQGFDPAFGPMGRMGSYGGFPGAPTPPFSGILPSFPGVGGVGLPGVAPHVNPAFFGRGMPVNGMGMMPGSGMDGPNMGMWSDPNMGGWGGEEPGGGKAGESSYGEEAASDHQYGEVSHDRAGWPMREKDRGSERDWSGTSERRYRDDRDQGYERDAPKEEDMGHDHEWSERRHRDDRETGRERSRDRDRERSRDRDRDRERDHRERDRHREDRDKYADHHRYRDREAEHDDEWERGRSSRMHSKSRLSQEEEHHSRPRDADYGKRRRLTSE

SEQ ID NO: 219857 - protein, 138 aa, Glycine max
  Clone ID: PAT_MRT3847_40559C.1.pep
LDWSGTSERRYRDDRDQGYDRDAPKEKDMGHDHEWSERRHRDDRETGRERSRDRDRERSRDRDRDRERDYRERDRHKEDRDRYADHHRYRDREAEHDDEWERGRSSKPHSKSQLSQEEEHHSRPRDADYGKRRRLTSE

SEQ ID NO: 219858 - protein, 356 aa, Glycine max
  Clone ID: PAT_MRT3847_4055C.1.pep
MGSITTSTIGAPPTRRTTLTPFSSLLPKPKPHSLALSTSNPHPFHLSKPLTISPNPNPPIPKSTPSSSSAATSPSSPLNLKSRLRNGETLYGLFLLSFSPTLAEIAGHAGYDFVVVDMEHGPGGIRDALPCLHALAAANTAAILRVPESTAAWAKKALDLGPQGLMFPMIDSLQSAQDAVSYCRFPPTGLRGAAHPIVRASKYGLDEGYLGNYLDELLIMCQVESEEGVANAGAIAAVDGVDCVQMGPLDLSASLGYLWDPGPKKVREVLREAENKVLESRNDDVESGAYLAGFATAYDGARDLRSRGYHMVSGAVDVGLFRSAALEDVTRFKMDGDGSESDEGEEKKGDEKYWSE

SEQ ID NO: 219859 - protein, 93 aa, Glycine max
  Clone ID: PAT_MRT3847_40560C.1.pep
RERSRDRDRDRERSRDRDRDREKDHRERDRHREDRERYADHHRYRDREAEHDDEWERGRSSRTHSKSRLSQEEEHHSRPRDADYVKRRRLTSE

SEQ ID NO: 219860 - protein, 109 aa, Glycine max
  unsure (1)..(109): unsure at all Xaa locations
  Clone ID: PAT_MRT3847_40561C.1.pep
MPVKVSQYSNLTVGNGGSGSQFSQPDLIHGTTAVPPVSARPLMNHVQFPKQQGWXTIGPAMPVCVPPPVLTSGHQPFTLRSHIPLLQPGFPVSRPISVPGPNGFYGTKF

SEQ ID NO: 219861 - protein, 95 aa, Glycine max
  unsure (1)..(95): unsure at all Xaa locations
  Clone ID: PAT_MRT3847_40562C.1.pep
YISLGFRLGTTHSHDSIWFAXPTYYFDIILYDKKLLDCIKNYIQIYIKISFGVYGIGQIKILKRIDLIQLIIYMGFPQIFIHGQCHYIKDLPTFM

SEQ ID NO: 219862 - protein, 146 aa, Glycine max
  Clone ID: PAT_MRT3847_40563C.1.pep
LHYISSPVEANTFSSKLDQSLVSQPTHTEIKCGSCPCGNPCDEQLLSPPPPPPASPPPLFLPEISSPTPPESCDDSSPLPPPPPPSRPPPPPPSRPPPTPPPPRFIYVTGVPGDGYAYYYSAAQNRVVGLLVFAGLGALSVTMLFG

SEQ ID NO: 219863 - protein, 41 aa, Glycine max
  Clone ID: PAT_MRT3847_40564C.1.pep
FPATSIVEQRPVRSYLGATTIDLIVLPAGLFFSCIIKWRSY

SEQ ID NO: 219864 - protein, 59 aa, Glycine max
  Clone ID: PAT_MRT3847_40565C.1.pep
VYWGILESISGLIVIFERLHRGIDVKYRLRSRMQHAHSGNIQKKTLLLIEDILDHRAKT

SEQ ID NO: 219865 - protein, 99 aa, Glycine max
  Clone ID: PAT_MRT3847_40566C.1.pep
IFFSRIKFSLESSVSVSNRPGTDMLIEEKREQLLIHKALLGMFSYALYLLSAGSILCMCLILHSLFTQLVAYGGCSISRQEKPKRRLRRGKLQIKCFWV

SEQ ID NO: 219866 - protein, 69 aa, Glycine max
  Clone ID: PAT_MRT3847_40567C.1.pep
SSMCSVKSLAFNTFMITTVEQFGDRSVIMGHLQIYSTVVGHVFLNKQYQFRCALTLHFHGLGYFHFWSK

SEQ ID NO: 219867 - protein, 75 aa, Glycine max
  Clone ID: PAT_MRT3847_40568C.1.pep
LSFDNKKVGSFDKPFSCRKLLVKCLLNLESDWHVIVMPLDRLLHSFSFPVNEYNTIIGEVLYTQNKLILLVMCYK

SEQ ID NO: 219868 - protein, 58 aa, Glycine max
  unsure (1)..(58): unsure at all Xaa locations
  Clone ID: PAT_MRT3847_40569C.1.pep
IRLXXGXXGXACRXRSXXNSRVXEXIXRRXPXFXXYNXNKSMNXEPNSELMYACXXAT

SEQ ID NO: 219869 - protein, 314 aa, Glycine max
  Clone ID: PAT_MRT3847_4056C.1.pep
MGYLNSVLSSSSEVHAAGDAIASGGGLSHNRKFSYGYASSPGKRSSMGDFYETRIDGVDGEVVGLFGVFDGHGGARAAEYVKKNLFSNLISHPKFISDTKSAITDAYNHTDSELLKSENIHNRDAGSTASTAILVGDRLLVANVGDSRAVICRVGNAIAVSRDHKPDQTDERQRIEEAGGFVMWAGTWRVGGVLAVSRAFGDRLLKQYVVADPEIQEEKIDSSLEFLILASDGLWDVVTNEEAVAMIKSIEDAEEAAKRLMQEAYQRGSADNITCVVVRFLMNQGGSKDKEVVAPPHNSSSASRNPSVEGLCDR

SEQ ID NO: 219870 - protein, 71 aa, Glycine max
  Clone ID: PAT_MRT3847_40570C.1.pep
GQPRLGHSHLLQKVNQKIPIPIASNVCNANVVQAEPYATETQQPTFVSECDTDYWCIREADSLLSGRNLPG

SEQ ID NO: 219871 - protein, 90 aa, Glycine max
  Clone ID: PAT_MRT3847_40571C.1.pep
TNDGTSVSRQDIEGKSMFGSLAQGINSGLNMENLQQVNSEQRDIPIEDFNGRQELAGSSDTSQDKVLAQVPPSQNVATLDPTEEKILFGS

SEQ ID NO: 219872 - protein, 72 aa, Glycine max
  unsure (1)..(72): unsure at all Xaa locations
  Clone ID: PAT_MRT3847_40572C.1.pep
KVTLTTGTCAGSSVRPLSTPPFEERKRATLMMAAXLVHGACIEPVIDLAIQIDPRPISCALGGTSLAFACVS

SEQ ID NO: 219873 - protein, 63 aa, Glycine max
  Clone ID: PAT_MRT3847_40573C.1.pep
RERGELTCSIHEMTCQNELQIRGHSVLHSIAPADEKWPKIKYIPQVTVFELSTLTTHIDRSPP

SEQ ID NO: 219874 - protein, 71 aa, Glycine max
  Clone ID: PAT_MRT3847_40574C.1.pep
PPPHSSARFWEGGENTHSSYHSLVSALWGFVLLPSSPRRHFFAWELVHAILILPSRFAGRTSPSRASVFAE

SEQ ID NO: 219875 - protein, 54 aa, Glycine max
  Clone ID: PAT_MRT3847_40575C.1.pep
ILNITLYTISFFNLLSECCLLFFSDQDDYEVVRKVGRGKYSEVFEGINVNSNER

SEQ ID NO: 219876 - protein, 48 aa, Glycine max
  unsure (1)..(48): unsure at all Xaa locations
  Clone ID: PAT_MRT3847_40576C.1.pep
SSPLLFIKKFFSIHLTLPXRLWMNHIFQQYISPPSTLINLIFVNPKFK

SEQ ID NO: 219877 - protein, 142 aa, Glycine max
  Clone ID: PAT_MRT3847_40577C.1.pep
MRRQVDAEDHQLRVLYELCSLIIHTLKFPPLPYPFPTSYPCSSSRASSSLSHSRRHHWWTTLATSQDSPAAFASLFLGMSLSLMLLGAVTFLVGLLLLPWVTLLVLVFYVAALVSNLSVLGRFILGSITLQRDLPHEANIYR

SEQ ID NO: 219878 - protein, 82 aa, Glycine max
  unsure (1)..(82): unsure at all Xaa locations
  Clone ID: PAT_MRT3847_40578C.1.pep
GPTYIYKKXKXAAXXLTIMFAIERAHSRSIRSRSEMRIRPECVSILAVHPVARIHPVHESRNQVKSRRMSGATSPILKHEWF

SEQ ID NO: 219879 - protein, 56 aa, Glycine max
  unsure (1)..(56): unsure at all Xaa locations
  Clone ID: PAT_MRT3847_40579C.1.pep
XQCIIFRFGKQDYNNVELHIVLVLPYIIPILKKTFLKSIHSIFCVLLYRIFCLSRH

SEQ ID NO: 219880 - protein, 312 aa, Glycine max
  Clone ID: PAT_MRT3847_4057C.1.pep
MGYLNSVLSSSSQVHVADDAIVSGGGLSHNGKFSYGYASSPGKRSSMEDFYETRIDGVEGEIVGLFGVFDGHGGARAAEYVKKNLFSNLISHPKFISDTKSAITDAYNHTDTELLKSENSHNRDAGSTASTAILVGDRLLVANVGDSRAVICRGGNAIAVSRDHKPDQTDERQRIEEAGGFVMWAGTWRVGGVLAVSRAFGDRLLKQYVVADPEIQEEKVDSSLEFLILASDGLWDVVSNEEAVAMIKPIEDAEEAAKRLMQEAYQRGSADNITCVVVRFLMNQGGSKELVAYPHNSSSAGKNPSVEGLCDI

SEQ ID NO: 219881 - protein, 64 aa, Glycine max
  unsure (1)..(64): unsure at all Xaa locations
  Clone ID: PAT_MRT3847_40580C.1.pep
NKPLKKGTAPGSPQDKSPPQNNDGGAPPFDFLISPSSNPGXQIRDFYLSKNDFSSGLISQTTFF

SEQ ID NO: 219882 - protein, 119 aa, Glycine max
  Clone ID: PAT_MRT3847_40581C.1.pep
ASRHIGIYVNSIKSVKTAPWGFANGQVAQILITYNADTSLLVASLVHPSRKTSYILSETVSLKSNLPEWVNVGFSATTGANKGFAETHDVFSWSFASKLSDGSTSDTLDLASFLLNEAI

SEQ ID NO: 219883 - protein, 243 aa, Glycine max
  unsure (1)..(243): unsure at all Xaa locations
  Clone ID: PAT_MRT3847_40582C.1.pep
MEMEVDIEKKQQDVVKEKDLFKAAEEGEASTFEALSSEILSKALSLRNEDARSLLHVAASSGHSQVVKIVLSCDASAGVVNCADEEGWAPLHSAASIGSVEIVETLLSKGADVNLKNNGGRAALHYAASKGWVKIAELLISHDPTITIKYYLXSTPLHRVARTGKSELCELLIAEREEVHAVDSAGHTPLMNTAICCKKQVAQLVIIHGADADLEDKEGYTVLGRATHEFRPILIDAAKAMLE

SEQ ID NO: 219884 - protein, 37 aa, Glycine max
  Clone ID: PAT_MRT3847_40583C.1.pep
KTFYIDNQLTLIEALFKYSTSTTKPYIFNLPIISINY

SEQ ID NO: 219885 - protein, 101 aa, Glycine max
  unsure (1)..(101): unsure at all Xaa locations
  Clone ID: PAT_MRT3847_40584C.1.pep
CSFLGAWGSSSGAVSSGAVSWGGFVARLFLVFGFGPGGAGVLAGWGVRFWVGLVLPVAGFRAVVFGXVPPSVXXXLRXLVGACGAFELAVLXSPXPGRMSD

SEQ ID NO: 219886 - protein, 77 aa, Glycine max
  Clone ID: PAT_MRT3847_40585C.1.pep
CLSNQTAWMSTPGKAPHKQLATKADRKSAPATGGVNKQHKFRPETVALLEIQNIQRSTATLMAKLPENQSITEIELE

SEQ ID NO: 219887 - protein, 92 aa, Glycine max
  Clone ID: PAT_MRT3847_40586C.1.pep
ATMQMNRMNREEHLYTAFQYFDKDNSGFITTEELEQALREYNMHDGRDIKEILQEVDGDNDGRINYDEFAAMMRKGNPEVMTKKRRDSLPLP

SEQ ID NO: 219888 - protein, 384 aa, Glycine max
  Clone ID: PAT_MRT3847_40587C.1.pep
MQKRREESDKIPVKRDSASSLPQPQSLVLFTSPFSPFPFLLPLSFAKWVIISFSHNTIFFTFSFFFASLRWGFKFHHRNRMFSRLIHPHEGQEDMQGGSNHAHLGDPCLVLTSDPKPRLRWTADLHERFVDAVTQLGGASKATPKAIMRTMNVKGLTLYHLKSHLQKYRLGKQSGKDSDEGLKDASYLQESPGTDNSSPKLPASDANEGHEVKEALRAQMEVQSKLHLLVEAEKHLQIRQDAERRYMGMLERACKMLADQFIGDVIIDRDGQKFQGLENKTSRSPLVDHGGFFPAACTEVGGMHVSEVPPILQPQGAECSSESCLKSLESLGGLTLEGSPGGSKKRMLNLDSMVAPLIWSEANTRTQGIHLAQVNPPGMTRYGM

SEQ ID NO: 219889 - protein, 124 aa, Glycine max
  unsure (1)..(124): unsure at all Xaa locations
  Clone ID: PAT_MRT3847_40588C.1.pep
GIATIVNTYWDIVIDWGLLRRXQKSMVERKTLLYQTXNVYFVAMVLNVILRLAWMQSVLGIRETPILHRTALTALVTCLEILRRGIWNFFRLENEHLNNVGNYRAFKSVPLPFNYEDEEENTVI

SEQ ID NO: 219890 - protein, 307 aa, Glycine max
  Clone ID: PAT_MRT3847_40589C.1.pep
MFSRLIHPHEGQEDMQGGSNHAHLGDPCLVLTSDPKPRLRWTADLHERFVDAVTQLGGASKATPKAIMRTMNVKGLTLYHLKSHLQKYRLGKQSGKDSDEGLKDGMSASYLQESPGTDNSSPKLPASDANEGHEVKEALRAQMEVQSKLHLLVEAEKHLQIRQDAERRYMGMLERACKMLADQFIGDVTIDRDGQKFQGLESKTSRSSLVDHVGFYPQACTEVGGMHASVVSPILQPQGADCFTESCLTSLESLGGLTLEGSPGGSKKRMLNLDSMVAPLIWSEANTRTQGIHLAKVNPSGMTRYGM

SEQ ID NO: 219891 - protein, 307 aa, Glycine max
  Clone ID: PAT_MRT3847_4058C.1.pep
GSSLFFMFPIAFADLRVGFYSSSCPRAEQIVGQVVQRRFNRDRSITAALLRMHFHDCFVRGCDASILIDSTRGNQSEKAAGANGTVRGYELIDEIKKALERECPSTVSCADIITLATRDSVFLAHGLKYDVATGRRDGHVSQSSEVNLPGPRSTVSRVLEVFSANGMSLDEMVTLLGAHTVGFTHCSFFRDRLNDPNMDPSLRAGLGRTCNRPNSDPRAFLDQNVSSSMVFDNAFYKQIVLRRGVLFIDQQLALDTLSKGLVTVFAGNNAAFQRSFADAMVKMGNIKVLVGNEGEIRRNCRVFNSAS

SEQ ID NO: 219892 - protein, 125 aa, Glycine max
  Clone ID: PAT_MRT3847_40590C.1.pep
MFSRLIHPHEGQEDMQGGSNHAHLGDPCLVLTSDPKPRLRWTADLHERFVDAVTQLGGASKATPKAIMRTMNVKGLTLYHLKSHLQKYRLGKQSGKDSDEGCKDASYLEESPETDNSSAKVPDAG

SEQ ID NO: 219893 - protein, 247 aa, Glycine max
  Clone ID: PAT_MRT3847_40591C.1.pep
SDRLQIWDGGESDARTPTMGSDLDEDLMALRVDDGSESLTQLQPLKAPKKSKRQGETICKGHKNYELMLNLQLGIRHSVARPAPTASLDLKPSAFDPKEKVWTRFPPEGSKYTPPHPSCDFKWKDYCPVVFRTLRKLFKVDPADYMLSICGNDALRELSSPGKSGSFFYLTHDDRYMIKTMKKAEVKVLLRMLPAYYNNFRDQQNTLLTKYYGLHCVKLNGPIQKKVRFIIMGNLFCSEYITHRRYD

SEQ ID NO: 219894 - protein, 154 aa, Glycine max
  Clone ID: PAT_MRT3847_40592C.1.pep
MFSRLIHPHEGQEDMQGGSNHAHLGDPCLVLTSDPKPPLFQSADLHERFVDAVTQLGGASKATPKAIMRTMNVKGLTLYHLKSHLQKYRLGEQFGKDSDEGCQDGMSASFLQESPGADNSSPKFPGAHEGSEVKGAFLSPVGRAKTSLTRGGGE

SEQ ID NO: 219895 - protein, 100 aa, Glycine max
  unsure (1)..(100): unsure at all Xaa locations
  Clone ID: PAT_MRT3847_40593C.1.pep
LITAVDTMNMEALTLMLVQCEAIQENVVSPFPQEEFLTARPTHVRPAPTVMADGYTYWYALVHDRXLPTTPRDYGNNVNMATINNLRAYRLNSAISGTRL

SEQ ID NO: 219896 - protein, 128 aa, Glycine max
  unsure (1)..(128): unsure at all Xaa locations
  Clone ID: PAT_MRT3847_40594C.1.pep
KPLFFKNFPFFENLILRKGSKRVNLSIHLDFFYPRFPLRISPYYTQVLFFRDFINLLQNSKGALFFLKLVXYNPQPYTPYFITPPVTAKFFKKPPSKMSKKKPLIFPRVCNLLFPSMPPTFQFKVLLL

SEQ ID NO: 219897 - protein, 29 aa, Glycine max
  Clone ID: PAT_MRT3847_40595C.1.pep
NGERTTWMSKSLLVKIVFAESMLSPDKIN

SEQ ID NO: 219898 - protein, 83 aa, Glycine max
  unsure (1)..(83): unsure at all Xaa locations
  Clone ID: PAT_MRT3847_40596C.1.pep
XCTXXXXXLRXLYGXXXKPHXXGXDTXXHXPAXSXXXTXXGAIRXXSQGXHXXXXAXXXXXXXSPXDXASRAEXRDXXXXHAX

SEQ ID NO: 219899 - protein, 63 aa, Glycine max
  Clone ID: PAT_MRT3847_40597C.1.pep
VILCLQCDKFYRKLKYQICTVQIVCHISWVLLVLLQYIIIIIYIILFKINKKKKKGDRRIMSS

SEQ ID NO: 219900 - protein, 53 aa, Glycine max
  Clone ID: PAT_MRT3847_40598C.1.pep
YRSGFPGRLHASACMLGGPSVTNRLAVSTHGGSLVLNAAKAFKPQKVTYIQLH

SEQ ID NO: 219901 - protein, 207 aa, Glycine max
  unsure (1)..(207): unsure at all Xaa locations
  Clone ID: PAT_MRT3847_40599C.1.pep
ILSDGDLSTLANMKLIGMKSPEFEDDMLQRNKSSXRMVLCLHLPWICSSESHHPDIMPDVVLGADVIYDPVCLPHLVRVLAMLLNQTNLGSCRQHASCKGHSPNIEHENGEHNHEYAIDKSDGGCKAIYNDGSSSLSKEAPVAYIAYVIRNIETFNYFLSLGKQANLDIVDLTDSLKPVNLLCYMKSYNQATVRLLRITCSNIRNIQ

SEQ ID NO: 219902 - protein, 60 aa, Glycine max
  Clone ID: PAT_MRT3847_4059C.1.pep
LGTKTNILISPYISKRSWGELAPTLSFIFDTAKDLSLNPWWSNPQPPKARKTLDPPFFGL

SEQ ID NO: 219903 - protein, 67 aa, Glycine max
  Clone ID: PAT_MRT3847_405C.1.pep
NLLSVVTLCYIGAYRQCPCLCFINAILLLIHLDLFIKSSVSNHYQCKNSAGYYIQAHSLFTFIICTN

SEQ ID NO: 219904 - protein, 100 aa, Glycine max
  Clone ID: PAT_MRT3847_40600C.1.pep
KGATLGISFPLNPPKISSKKIKARVHGVPTLGKAPFNFPPNFGEKFLFPFFPFSPFLQKKKVPVKITPFPCFLEKAGPFIPQKKFLNFFFCLEKKKPPPP

SEQ ID NO: 219905 - protein, 156 aa, Glycine max
  Clone ID: PAT_MRT3847_40601C.1.pep
IMLRSICQSGVVNKEVLIANSVTHSDDPLFWSWNWNRSLFVWKDEQMADLAEEFLAQGLQPVAQILRGGTRMKEMDALWHQLTSIYLLEHNKLDLNLQNPPLLSSKFWESKAPSKVLVFSWRLLQHKLPCDQLYKRGYRFKTSIPHVTSAIIAWKT

SEQ ID NO: 219906 - protein, 120 aa, Glycine max
  Clone ID: PAT_MRT3847_40602C.1.pep
NATAELHHQSGRLCAERGGWTNTVMGKAMGTGRAERNRNTNCPWGHGDHCHGGCLKQGLQTGSCKRWDTACIPLNANELIVLAGLGLTVFMKKPILLPDMGNRVTETTCEDRGVRAQWTT

SEQ ID NO: 219907 - protein, 57 aa, Glycine max
  Clone ID: PAT_MRT3847_40603C.1.pep
AQLPSVLSVVNKVLFCVANGYGCKHLKLFIFCYSLCMQIFNILKKKKGGPPTMVLVP

SEQ ID NO: 219908 - protein, 105 aa, Glycine max
  Clone ID: PAT_MRT3847_40604C.1.pep
GFFLYPDPLVFRPPLEKSPVFGVRGQLPPFHKMANQSRIFFSLANLKVGAPFVKSPGWHEGPLSFGGPFFPLGDPFFNRPQDPGILPLLAYVFGSFPFLGSRFFC

SEQ ID NO: 219909 - protein, 44 aa, Glycine max
  Clone ID: PAT_MRT3847_40605C.1.pep
TPLCLYYNICPLNKLFEQKNRMPLCNPLTYFGKIELVNFVTLSN

SEQ ID NO: 219910 - protein, 42 aa, Glycine max
  unsure (1)..(42): unsure at all Xaa locations
  Clone ID: PAT_MRT3847_40606C.1.pep
DYVEXXXPXSXHHHLXXILSPXVCLXSXYVXDXLRNATLHTT

SEQ ID NO: 219911 - protein, 58 aa, Glycine max
  Clone ID: PAT_MRT3847_40607C.1.pep
HTKSNLHYATFTTKLAIPTSLYFHISNLTYLTFTYTPITPKSMDSLPSHSCHGLEVYV

SEQ ID NO: 219912 - protein, 198 aa, Glycine max
  unsure (1)..(198): unsure at all Xaa locations
  Clone ID: PAT_MRT3847_40608C.1.pep
MWVPGGMTLAVDHHGTRYETKFIEEIVEKVYKKIPPKALYTNQNPVELGARIKEVMSLLDMXTGDNVLMLGIYGLGGIGNTELAKALXDNIVQDFDAASFLADTLLIDXSNKINGLEDLQKTLLLEMQEELETELGGSKSKRMYEIKRKLRRKKVPLVLDDVDDKDKLEKLAGGCDCFGSGSKIIITTRDRCTNCLSS

SEQ ID NO: 219913 - protein, 171 aa, Glycine max
  Clone ID: PAT_MRT3847_40609C.1.pep
MQETHIVLGIASVCSLLAIIATVVTLPSLYSEMSQMNSKVRDGVEAFRVNTDSAWTDLMDVQVVVTPPSKPRDNPFNSIFRAKRQLPGHCQCAGLQQPSCPPGPPGPSGPPGQPGQPGGAGQPGQPGQPGQPAPSCPPQNIPCPRCPAGPPGRPGRQGPAGQQGAPGQPGT

SEQ ID NO: 219914 - protein, 79 aa, Glycine max
  Clone ID: PAT_MRT3847_4060C.1.pep
GKRRPRINDNSNLTHLQVMGEVSAPSGHGEVYYQSLHLKIRWHHQIQIVHHNFPPRGKKWVSLFALGGGPPWTWKPAEK

SEQ ID NO: 219915 - protein, 101 aa, Glycine max
  unsure (1)..(101): unsure at all Xaa locations
  Clone ID: PAT_MRT3847_40610C.1.pep
MARVITGEWYTEAVLLCAKAGASCVEEAANPIRMVFGVXAEADRMIVECRRAMKFARFVSKDGKSYQNWEYMNDKYEIFSHNLXVIRYYNMKRWAYTLSVN

SEQ ID NO: 219916 - protein, 85 aa, Glycine max
  Clone ID: PAT_MRT3847_40611C.1.pep
EEKIVSLIKNLLVALKDFHSEYIVSASNFTSQLSSQVEQFLHRNIQEYLSILTDPDGKGKEKIAELSATAQEIIKSQAIATNKII

SEQ ID NO: 219917 - protein, 108 aa, Glycine max
  Clone ID: PAT_MRT3847_40612C.1.pep
PLIHPARPPSSCAPCPALHLRRRPSPAWVRFQLPASTRVSWGPRGIDPPCPRSDSLQNYFLQKRKKSYVKNQKTTYFIIEKVFFLHQTNGKKEERLTICTEMSCFVAT

SEQ ID NO: 219918 - protein, 98 aa, Glycine max
  unsure (1)..(98): unsure at all Xaa locations
  Clone ID: PAT_MRT3847_40613C.1.pep
ARGKXXXXXGXRGGGGGGXXGGGGVFGFPFSFSLFSRXGRAXPFCARPATQDRKSSCGFSFSGFGCCNNVXLXVXXXKEFRXIPREGGAREPGIPRAA

SEQ ID NO: 219919 - protein, 95 aa, Glycine max
  Clone ID: PAT_MRT3847_40614C.1.pep
MPPKPLDYGSINENVKKSQYAVRGELYLRASELQKEGKKIIFTNVGNPHALGQKPLSFPRQVVALCQAPFLLDDPNVGLLFPADAIARAKHYLSL

SEQ ID NO: 219920 - protein, 110 aa, Glycine max
  unsure (1)..(110): unsure at all Xaa locations
  Clone ID: PAT_MRT3847_40615C.1.pep
MPPKPLDYGSINEXNVKKSQYAVRGELYLRASELQKEGKKIIFTNVGNPHALGQKPLSFPRQVVALCQAPFLLDDPNVGLLFPADAIARAKHYLSLTSGGXGAYSDSRGL

SEQ ID NO: 219921 - protein, 304 aa, Glycine max
  unsure (1)..(304): unsure at all Xaa locations
  Clone ID: PAT_MRT3847_40616C.1.pep
HYGSINENVKKSQYAVRGELYLRASXELQKEGKKIIFTNVGNXPHALGQKPLSFRXRRVVALCQAPFLLDDPNVGLXFPADAIARAKHYLSLTSGGLGAYSDSRGLPGVRKEVAEFILRRDGYPTDPELIYLTDGASKGVMQILNTIIRGQDDGILVPVPQYPLYSATIALLGGTLVPYYLEETANWGLDVNELRQSVEQARFKGITXVKAMVIINPGNPTGQCLSEANLREVLQFCYQENLALLGDEVYQTNIYQDERPFISSRKVLMDLGPPISKEVQLISFHSVSKGYYGECGQRSGYFEM

SEQ ID NO: 219922 - protein, 84 aa, Glycine max
  Clone ID: PAT_MRT3847_40617C.1.pep
MPPKPLDYGSINENVKKSQYAVRGELYLPASELQKEGKKIIFTNVGNPHALGQKPLNFPRQVVALCQAPFLLDDPNVGLLFPAD

SEQ ID NO: 219923 - protein, 206 aa, Glycine max
  Clone ID: PAT_MRT3847_40618C.1.pep
EIAKSKAKEEKKKVEAEIELLLVVEKLQELRSIRIQKLKKQGHFLPEEDDKFLEKVQAAVEEEEREALAAVETDAAKDAIATAEESRKAIQNQGKLSKGSNYDSEVKERKELTVQSVTEEGSGAVDEKKSSKIGQISGGAYDPLANLPIEFYHYYHGSNNDMGTLIEVRRGWDAYIRPGGSRIPGHWVQPPPPANEIWASYLVRPK

SEQ ID NO: 219924 - protein, 40 aa, Glycine max
  Clone ID: PAT_MRT3847_40619C.1.pep
QLRIPLYILTYYASHMYTFRSIAHDSLMSDPIALSTPSVV

SEQ ID NO: 219925 - protein, 38 aa, Glycine max
  Clone ID: PAT_MRT3847_4061C.1.pep
MPLSIVAFCHMKPMRLSPNIPCKIGLFYVMNIMIKFPC

SEQ ID NO: 219926 - protein, 489 aa, Glycine max
  unsure (1)..(489): unsure at all Xaa locations
  Clone ID: PAT_MRT3847_40620C.1.pep
MLEISTLPETATENADGGSAAVSDGSKAEHSEDDDRNPAANRWPREETMALLNIRSEMDVAFKDANPKAPLWEQVSRKLSELGYNRSAKKCKEKFENIYKYHRRTKEGRFGKSNGAKTYRFFEQLEALDGNHSLLPPTTTVGDDVVLNAVPCSVSAAAHEHSSSTTSCSGKKKRKLTQFLEGLMREVIEKQETLQRKFVEVLDKCEKDRMAREEAWKKEELERIKKERELLAQERSIAAAKDEAVLAFLRKFAEAEDTVQLLEKIQVQNDKQKNMKQNGGNDNANGGGGVTVVTDMDKQECGNTNXRVSVGNFVHMSSSRWPKDEVEALIRLRTEFDVQAQGNNNNSNNGSKGPLWEEISLAMKSIGEVQVKWENINKYFKRIEMGEHNFCLSQPLHEETCPYYHHPEALYSKKPKKVDHGNELKPEELLMHIMVSQSQEQQQQQEMQTQTQSPSEDAERDQNQGDNEDQSEYQNQMVDNNSPSIAIMS

SEQ ID NO: 219927 - protein, 35 aa, Glycine max
  Clone ID: PAT_MRT3847_40621C.1.pep
IVIILAGWDRAFNYRGGYYSNPVSFFIKCCVVRID

SEQ ID NO: 219928 - protein, 112 aa, Glycine max
  Clone ID: PAT_MRT3847_40622C.1.pep
ENINKYFKRIKEKSKRKPQDSKTCPYYHHLEALYSKKPKKVDLGNELKPEELLMHIMVSQSQEQQQQQEMQTQTQSPSEDAERDQNQGDNEDQSEYQNQMVDNNSPSIAIMS

SEQ ID NO: 219929 - protein, 186 aa, Glycine max
  Clone ID: PAT_MRT3847_40623C.1.pep
INYKFRKLAELGYNRSAKKCKEKFENVYKYHRRTKEGRFGKSNGAKTYRFFEQLEALDGNHSLPPPTTTTDNNNNVDDDDVILNAVPCSVIAAAAHEHSSSTTSSSGKMKRKLTRFLEGLMREVIEKQETLQRKFMEVLDKCEKDRMAREEAWNKEELERIKKERELLAHERSIAACKDEAVLVFL

SEQ ID NO: 219930 - protein, 102 aa, Glycine max
  Clone ID: PAT_MRT3847_40624C.1.pep
LSLCVGSYYEVGLSPPPTTMSHPPTIKEAELFLKLEEKKKRSYEKKKLFSLGGGPYDSSRKISRLTKTTRSFIQKNLRRNWRPPPDYDNISGGKKKHGFWTN

SEQ ID NO: 219931 - protein, 110 aa, Glycine max
  unsure (1)..(110): unsure at all Xaa locations
  Clone ID: PAT_MRT3847_40625C.1.pep
MEDSGRFDEKSFSNGDVYIGMIKGIVPHDKGKYTWSDGTVYEGDWEGEKMTGKGLIVWSSGAQYEGEISGGYLHGYGTLTTSAGCIYRGGWRMNAQHGIGRXQYSNSDVF

SEQ ID NO: 219932 - protein, 89 aa, Glycine max
  Clone ID: PAT_MRT3847_40626C.1.pep
AGAECFPSCFPRVATSGFISTLPYSRPSLLRVGMASQGLIGSFPFWERPTHTGGRPPPFSTWFVGVPVLKDQSFLGVKVGFLRGQSMGF

SEQ ID NO: 219933 - protein, 95 aa, Glycine max
  unsure (1)..(95): unsure at all Xaa locations
  Clone ID: PAT_MRT3847_40627C.1.pep
XVXYXIRARXRXXYXXXXXXXXXXXXXXRSNXXWXLXKXXXXXXSXXXXXAXXXNXQXSXGPXNTXTPXPXKGGPLNHIXLXTKXKXXXXXXXTX

SEQ ID NO: 219934 - protein, 57 aa, Glycine max
  unsure (1)..(57): unsure at all Xaa locations
  Clone ID: PAT_MRT3847_40628C.1.pep
KKLVGSEYGPRTFEQPKITVYKLLLYGNMRVQERXNVKRVQLSGKCLNEHALDNASK

SEQ ID NO: 219935 - protein, 52 aa, Glycine max
  Clone ID: PAT_MRT3847_40629C.1.pep
FSVFYYEILNSPDRACNLAKQVRFRDSEYHGLCFALFICVLLYFEQSFGCLT

SEQ ID NO: 219936 - protein, 85 aa, Glycine max
  Clone ID: PAT_MRT3847_4062C.1.pep
ILEEITKSAETIYESVSEFSHLAHFKSVVEPNVSPEKPPLLHRGIIKPVVDIDNTVDHVEITIPDITTDSLEKEKAPITKPSEHL

SEQ ID NO: 219937 - protein, 86 aa, Glycine max
  Clone ID: PAT_MRT3847_40630C.1.pep
TRPPSVPESEHEYSLSGHETDPHSATQYNNIMLVPTQTLTLHTKLPEWRRTLARTITTPACTVRKDGFPPTKKNGGTLQDSHALVT

SEQ ID NO: 219938 - protein, 52 aa, Glycine max
  Clone ID: PAT_MRT3847_40631C.1.pep
LILIFFIFVCVNFPILNRTILVHLVSCYWILRDTKMTYLWCGGFLQMSSHAI

SEQ ID NO: 219939 - protein, 76 aa, Glycine max
  Clone ID: PAT_MRT3847_40632C.1.pep
RQINKPECFVFPQRFLAPLFVVSPDCETSILLFFIFFPVVDLNPRVQKMRLKKISFCLKCIFSQVVVGRDVVICRY

SEQ ID NO: 219940 - protein, 177 aa, Glycine max
  Clone ID: PAT_MRT3847_40633C.1.pep
MEDQNQCTTRDEQLKNLNLPKVLIHGPPGFSSVLQPPFSQKFHILNHSSLPLHKFAATHAHHCSSVAAVLCDGGYPVTADVLRLLPSLRLLVTASAGTDHVDLEECRRLGVRVAGAGNMFSEDVADLAVGVLIDVMMKISAANRCLRERILVVSRDFPLASIFKVCNFVIFHLRIGD

SEQ ID NO: 219941 - protein, 95 aa, Glycine max
  unsure (1)..(95): unsure at all Xaa locations
  Clone ID: PAT_MRT3847_40634C.1.pep
TELTKAGARYDVKLFDETASGKSNGXCQSSGLLTLLLALLDKNXMNGHVFNGTPSVVASASPFTVKKMLEAQINSNQQMNPSAVPQGMLTPADAR

SEQ ID NO: 219942 - protein, 52 aa, Glycine max
  Clone ID: PAT_MRT3847_40635C.1.pep
TETIAILPIFFFLECVHSQSIYFIDVKTQKRLHLTHINQRQNNLFEREENTK

SEQ ID NO: 219943 - protein, 315 aa, Glycine max
  Clone ID: PAT_MRT3847_40636C.1.pep
MAVELHTSLPSHLFPDDNHDVVSSQHNHKDDIHHASALNPLPELPMKDNDDDFISELTHRMARFLLPDDDTFDFSSIDLDSSRDSKQGSPEGSSQEASAPATPEECCWKSSYDMFGTVEEMKLNETGNSNNKLLRSSNIELYSYQSLIQEQIRAIEMSGVKPEHVVVSQKRKPSTRRAQTYEAKKGNGRRARPSRPGPQQGGAGMRVLFLKGPGSRAGTGVFLPRGDVATTPSDSTNKQGKGCSTVLIPARVVQALQLHFDQMAATSGPKAGGFPPLHDVLVSNRDGMYSLQKPRSQNAPASIQNDTILPQEWTY

SEQ ID NO: 219944 - protein, 183 aa, Glycine max
  unsure (1)..(183): unsure at all Xaa locations
  Clone ID: PAT_MRT3847_40637C.1.pep
AGSAYEAISNALSPVSTMVVILNDSRHSLLPKIEEGPKTFVNALSSTLSKLQSSKSFRRFREAAKGVTKRIGXMHELAAKVDEYARGMMGPLGSTLFEELGLYYIGPVDGHNIEDLICVLQEVASLDSMGPVLVHVITDENQGDENSQKSDISDGQQDEGSVKSDSLDNPVRPQTYGICFVET

SEQ ID NO: 219945 - protein, 78 aa, Glycine max
  Clone ID: PAT_MRT3847_40638C.1.pep
MWFRFVTLAFSLDRIVAPGTVVPLLAPHVSELDLYFVLLIAVQVFSDGLLLSFFAIVLSVLLLIHLLFYLTAATFQGV

SEQ ID NO: 219946 - protein, 202 aa, Glycine max
  Clone ID: PAT_MRT3847_40639C.1.pep
TRPVVSAKVKGGPDNNKFRYRGVRQRSWGKWVAEIREPRKRTRKWLGTFATAEDAARAYDRAAIILYGSRAQLNLQPSGSSSQSSSSRSSSSSTQTLRPLLPRPSGFTFNFPFNSAPATTVPYPYNNSHNYTYTPPVLYPIDNSKNHNINTVQVHHPHHYPRVREVVQVPHSESDLGGLGGNNNIVVDGSIRSTSYQRHGFG

SEQ ID NO: 219947 - protein, 65 aa, Glycine max
  unsure (1)..(65): unsure at all Xaa locations
  Clone ID: PAT_MRT3847_4063C.1.pep
XRLRRMANTTTKVLQHNTISPLFLENPVLDNTSSSXXXXDIIKXNSHHFESSLSXXCALGLEXFL

SEQ ID NO: 219948 - protein, 73 aa, Glycine max
  Clone ID: PAT_MRT3847_40640C.1.pep
ACTQGSEIRGEPSSALLGEELPPPKKLRRLGQAIFKEAGRSYSVPAKSPAKKKNGGGPCYVSHTLFLRPSVIK

SEQ ID NO: 219949 - protein, 57 aa, Glycine max
  Clone ID: PAT_MRT3847_40641C.1.pep
IEILILHWAYSCMTTKPSLSRSICDEHDGLTSSVIVGCTLAIGDGLGHSNSQEPCLL

SEQ ID NO: 219950 - protein, 52 aa, Glycine max
  Clone ID: PAT_MRT3847_40642C.1.pep
LDDAIFKHSTIGLNTLSIHLSTAILALILGYRQSLSKLGQSFKQCAFLNIVP

SEQ ID NO: 219951 - protein, 144 aa, Glycine max
  Clone ID: PAT_MRT3847_40643C.1.pep
DPCPLLSAAKKKGLRDEEKLFYAAMSGLGDLLYDKDAVYININDHLVQFSKVDENSAMTSKGKGGDIGEDLVKSLQNIKYSINEKLENSFINIFGQKTNVSSEALGDAHGTNKEVEPNGKTEAFDKYHPEAVITGEDNNKMDFD

SEQ ID NO: 219952 - protein, 117 aa, Glycine max
  unsure (1)..(117): unsure at all Xaa locations
  Clone ID: PAT_MRT3847_40644C.1.pep
HSKNLHRPTLDGVQFNMITHTQREELTAPFTDLELKDAMWSCGGDKCPGPDGFNFNFIKEFWRVLKPDFRRFVDEFHVNGSFSKGKNAYFGGXMAKTNHSQLLNDCRPVWLIGWVGE

SEQ ID NO: 219953 - protein, 301 aa, Glycine max
  Clone ID: PAT_MRT3847_40645C.1.pep
MSSRVWCVVMVSALALMLQWHEAFSSYAGSASAIIDPSKVKQVSWKPRAFVYEGFLTELECDHLISIAKSELKRSAVADNLSGESKLSEVRTSSGMFIPKNKDLIVAGIEDKISSWTLLPKENGEDIQVLRYEHGQKYDPHYDYFADKVNIARGGHRVATVLMYLTDVTKGGETVFPNAEESPRHRGSETKEDLSECAQKGIAVKPRRGDALLFFSLYPNAIPDTMSLHAGCPVIEGEKWSATKWIHVDSFDKVVADGGDCNDKQENCERWATLGECTSNPEYMVGSPGLPGYCMKSCKEC

SEQ ID NO: 219954 - protein, 58 aa, Glycine max
  Clone ID: PAT_MRT3847_40646C.1.pep
IPGRPRVRHASRQRGVGVETVIILGGIIGWGMNPNYEDPWIVLYCTTCLFPTNLDGRL

SEQ ID NO: 219955 - protein, 153 aa, Glycine max
  Clone ID: PAT_MRT3847_40647C.1.pep
DLLGRNMYLSHPNYIEHTLKQVVNEKQTLEHLRDFLVTEKPANFDDCIVWARNQFEAQYNNAIQQLLYNFPRDSTTSTGQPFWSGPKRAPTPLKFDSTNPTHLGFIIAGANLHAYNYGIKNPGVDKGYYRKIVDNMIIPRIYAQILCLRSKAS

SEQ ID NO: 219956 - protein, 181 aa, Glycine max
  Clone ID: PAT_MRT3847_40648C.1.pep
MPNANMLLLFLFLLALFSAMTTPSTSAIDTFIFAGCSQPKFTPGSAYENTVNSLLTSLVNSAAFANYNNFTVPASSDAVYGLFQCRGDLTNDQCSRCVSRAVTQLGTLCFASCGGALQVDGCFVKYDNATFIGVEDKTLVTKKCGPSVGLTSDALTRRDAVLAYLQTSMGLIRRSGERYGG

SEQ ID NO: 219957 - protein, 199 aa, Glycine max
  Clone ID: PAT_MRT3847_40649C.1.pep
ENGDDMSLFSFDTNTRSTEHTTTTTTTATHANYESKRVNRTCNLPPPLTTITDFGGVHVRPHREGGRLVLEAVASPSPRPYFHIERGDGRLRLCLLESFSASDSDDEVCDAEEGVDAQQEEENESEKNRGEEEEKECGEEDIATGAEEEEEEECVENVEDGMGVKKLARPSRCKESGKRDIFGDALANLSFPRFLSVSE

SEQ ID NO: 219958 - protein, 510 aa, Glycine max
  unsure (1)..(510): unsure at all Xaa locations
  Clone ID: PAT_MRT3847_4064C.1.pep
FQAHNGHVLVLLIALVTSFIIITEGVTTPNPEIASLNRNSFPTGFIFGTASSAYQYEGAANEGGRGPSIWDTFTHKYPDKIKDRDSGDVAIDSYHRYKEDVGIMKDMNLDAYRFSISWSRILPKGKLSGGINQEGIDYYNNLINELLANGLKPFVTLFHWDLPQSLEDEYGGFLSPRIVKDFQDYADLCFKEFGDRVKHWITLNEPWSYSQHGYATGEMAPGRCSAWMNPNCNGGDSATEPYLVSHHQLLAHAASVHVYKTKYQTFQNGLIGITLNVNWYVPFSDNKLDHKATERAIDFQYGWFMDPLTTGDYPKSMRFLVRARLPKFTKEQSKLLIDSFDFIGINYYSASYASDAPQLSNAKISYLTDSLSNSSXASNWLYVYPRGFRDVLLYTKKKYNNPLIYITENGINEYDDSSLSLEESLLDIYRIDYHYRHLFYLQEAIKNGVNVKGYFAWSLLDNFEWHLGYTVRFGMNFIDYKNDLKRYSKLSALWFKDFLKIEIKLEEDSM

SEQ ID NO: 219959 - protein, 191 aa, Glycine max
  Clone ID: PAT_MRT3847_40650C.1.pep
RLLPKLAGLSKQTRATFASLGSKDLSKQNNTANLARRDRLQFSKERLTDFGDLPAGEIPESLKFDRPVETSQLNNGVRVATQHWPGQLATISVFIKCGSRQETIENSGVAHFLEHLHFKGTKNRSRSQLELDVENMGGQLNAYTSRENTSYTMTVFKNDASKAVEILGDMLANSNYDKNQIEAERETIYRE

SEQ ID NO: 219960 - protein, 83 aa, Glycine max
  Clone ID: PAT_MRT3847_40651C.1.pep
MTASARSSLKKMSWARGQSSGWTAFDLKQRKNNNFESEDDKDPFPAIGTTDPMVGKNHVPAKPFSSVLLPTRNFPPFKRGGNS

SEQ ID NO: 219961 - protein, 46 aa, Glycine max
  Clone ID: PAT_MRT3847_40652C.1.pep
GNQMRVIHLTPKYSDIFCKWGHKDLCQKQKFMQVPSLPIQITCLLT

SEQ ID NO: 219962 - protein, 324 aa, Glycine max
  Clone ID: PAT_MRT3847_40653C.1.pep
MHKGNKGNHDVEQPAGSLKACSSVCFVTSKCRICGDTTCHCVIPSNSIQVSSDISSEGSEGGDVITRGADSLRQNCPTKCTSPIEKKSDPDSDGAVSSLDSEHVCPSSQHVTPTTDASSGEVWSTPVLPVQLSPKKALRAAMLKSRFADTILKAQQKTLLDHGDKGNPQKMQQEKERLERIQREERARIEAQIKIAEAAARMRAEEESRQRREKEREAARAAIEKMKRTVDIEHFLEIIKELESLSGCTLSYKAVGCRNGYKVALETLDKPQFENPLERLGLFIKEDFTADEDEEVLNGGFEEGEIFNCMKVYSVLPALTVYIL

SEQ ID NO: 219963 - protein, 169 aa, Glycine max
  unsure (1)..(169): unsure at all Xaa locations
  Clone ID: PAT_MRT3847_40654C.1.pep
MGSDGVRKPRFLCLHGFRTSGEILKTQLHKWPQSVLDNLDLVFVDAPFPCLGKSDVEGIFDPPYYEWFQFNKEFTEYTNFDECLQXIEECMIKYGPINGLLGFSXRSILSSEVPGILEKRDALLKVPRWRNGKKVAVETLDKPQFENPLERLGLIITEDFTTDDDDVIF

SEQ ID NO: 219964 - protein, 107 aa, Glycine max
  Clone ID: PAT_MRT3847_40655C.1.pep
IKSKLERNIYSGTEEFADDVRLTFSNAMKYNPPGNDVHMMAKELSKIFDRKWKDFGRKWKFEDEHDKSETETIKETGRKSLDAMLPRHKDSLPKKNTIIRTQRNAQD

SEQ ID NO: 219965 - protein, 268 aa, Glycine max
  Clone ID: PAT_MRT3847_40656C.1.pep
MIATETIVPSTKLKIKFSTKRIEIDSGPKCEFGQKVYHNDKNRRCNSNENSSALNSNKRGPPVSVEGQKEKRQKIDRKGSMQCATILKSLMSHSYSWVFLKPVDPVALSIPDYFTIISHPMDLGTIKSKLEKNIYSGTEEFAADVRLTFSNAMKYNPPSNDVHLMAKELSKIFDRKWKDLGRKWKCEDEHDKSESETIKETGRKSLDMLSRHRDSLPKKTQVSEHKGMPKIRSLATKLQACSYLIPRQEVIKADIVKRLDSKQYVHLQ

SEQ ID NO: 219966 - protein, 49 aa, Glycine max
  Clone ID: PAT_MRT3847_40657C.1.pep
KSRKLIVAISKPPFTGFFAQFLASSFRPQPHGRVGRAGHSGPDTCRPYH

SEQ ID NO: 219967 - protein, 79 aa, Glycine max
  Clone ID: PAT_MRT3847_40658C.1.pep
AGSSLCHTLNRMCSIYTETFDGSKSYTFTTSNGSFTVCATDYAKRCAGTLSDTVSMIRAIIATQTGTMTSNGYPLHLLG

SEQ ID NO: 219968 - protein, 84 aa, Glycine max
  Clone ID: PAT_MRT3847_40659C.1.pep
KGGFFPHLFLIPSKKGFFDLQKLFKNFFQKKLWEHLFSKKKLFPQVWTPLLKFGKKKPPLLTPFFCPVFFTPKFLFFLVCFLRV

SEQ ID NO: 219969 - protein, 66 aa, Glycine max
  Clone ID: PAT_MRT3847_4065C.1.pep
VSRSRFSVKCNRITLCGLTVIARHDNVALSAPHVHAQYNYEYVIRLSVIACHQFVRICNVLLPVHL

SEQ ID NO: 219970 - protein, 101 aa, Glycine max
  unsure (1)..(101): unsure at all Xaa locations
  Clone ID: PAT_MRT3847_40660C.1.pep
TESGPGDGGITATRESPHPQRKSPKAPRRRRSAGSXGQHEGKDTGVTPAAQPHMRHEGPARNRKTGQKETTLSTARAGARKGAAKRGRMNDRVGRRKTNLD

SEQ ID NO: 219971 - protein, 71 aa, Glycine max
  Clone ID: PAT_MRT3847_40661C.1.pep
SIFSFHSDSWLLTIGPTCWIFEGEAILEMEEAQVKGELPTFVGKTQLVGLLRLKILRYKKLFYSISCNMHS

SEQ ID NO: 219972 - protein, 261 aa, Glycine max
  Clone ID: PAT_MRT3847_40662C.1.pep
MVKTKQKRTGEVPGKKSGTSSHCLVDSGDGDNQHEDSDWIIVKKQRVTILVPAAPLNDRSLTANQGPNHMHLMPPEIASNHVQLPMQTSTVHPSGKEHEKATLALRKETRAERRAPPTLPKPTVVNPPSLDEIIESENPHQTNSLKSHKLLGISDTSKVIKQPRTLLAPRRSSNLETLNKSLRASNLERKLERAGGLSKWLTSLGLAQFVRIFQGNSLSKYQLVNLTMKKLKDMGASAVGPRRKLIHAMDCVCQPYCFEAL

SEQ ID NO: 219973 - protein, 47 aa, Glycine max
  Clone ID: PAT_MRT3847_40663C.1.pep
FDLDGFQLAAECDHKLWVFIRKQCTPILFSNMICYEPQVIYIFPVIQ

SEQ ID NO: 219974 - protein, 58 aa, Glycine max
  unsure (1)..(58): unsure at all Xaa locations
  Clone ID: PAT_MRT3847_40664C.1.pep
RAPGKTPLIFDPTKQSFCKFFIDLFGGGILGDKPWDWITLIPNFSIXNLLRVAAWKKA

SEQ ID NO: 219975 - protein, 69 aa, Glycine max
  Clone ID: PAT_MRT3847_40665C.1.pep
QTPPRMLTNGNKAQLCTKLLPSFAFNGQGWKNETITSSAKTKKSSWGCLLIIKIIRSSNLLQISTFSYL

SEQ ID NO: 219976 - protein, 122 aa, Glycine max
  unsure (1)..(122): unsure at all Xaa locations
  Clone ID: PAT_MRT3847_40666C.1.pep
VRYLXKKVRDEKETVKVLDKIGNKGFDLYVVGRGHGRKMSLAQTLDPVLEEPALGPLGDALTDLNSAAQTSILIFQRQAPLVHGNHVRSASSVAYDKVFDAMVEQQLLCHSTKFPMLLSHYA

SEQ ID NO: 219977 - protein, 56 aa, Glycine max
  Clone ID: PAT_MRT3847_40667C.1.pep
IHIDRTDKEKVGTSTRVRRSTRNGGSTRMDPYPDPYLCDINPPFLPLIPFSKNSPF

SEQ ID NO: 219978 - protein, 77 aa, Glycine max
  Clone ID: PAT_MRT3847_40668C.1.pep
RCLPCQACTHSRKSVLSKQLLSTEQIILAPEHRGRPPKIQKTDNKFTKEPEKLNNRIPNTRAPPNPNVPDALNSYLT

SEQ ID NO: 219979 - protein, 89 aa, Glycine max
  Clone ID: PAT_MRT3847_40669C.1.pep
LNTHWYQKALYEIPDSRISTSTQNSTFLNPESRWWRPFMAQDYFILLNTYWKNQACFLILINQLGVTGTPDFCFPWKLIQSPTRPQKGN

SEQ ID NO: 219980 - protein, 398 aa, Glycine max
  Clone ID: PAT_MRT3847_4066C.1.pep
EGKLSGGINQEGIDYYNNLINELLANGLKPFVTLFHWDLPQSLEDEYGGFLSPRIVKDFQDYADLCFKEFGDRVKHWITLNEPWSYSQHGYATGEMAPGRCSAWANPNCNGGDSASEPYLVSHHQLLAHAASVHVYKTKYQTFQNGLIGITLNVNWYVPFSDNKLDHKATERAIDFQYGWFMDPLTTGDYPKSMRFLVRTRLPKFTKEQSKLLIDSFDFIGINYYSTSYASDAPQLKSNAKISYLTDSLANFSFVRDGKPIGLNVASNWLYVYPRGFRDLLLYTKEKYNNPLIYITENGINEYDDSSLSLEESLLDIYRVDYHYRHLFYLRESIKNGVNVKGYFAWSLLEPIRLELNLPFGMNFVDYKNGLERYPKLSALWFKDFLKIEIKLHEDSMQ

SEQ ID NO: 219981 - protein, 31 aa, Glycine max
  Clone ID: PAT_MRT3847_40670C.1.pep
SIPVTYTIHKIILNPISYSLYLKPLSLLTYS

SEQ ID NO: 219982 - protein, 46 aa, Glycine max
  Clone ID: PAT_MRT3847_40671C.1.pep
LSFFHCEATPQGKSKQNRISIENQIVHEQAQILTTTQKRNQVKQRK

SEQ ID NO: 219983 - protein, 108 aa, Glycine max
  Clone ID: PAT_MRT3847_40672C.1.pep
NTNICNIFTFQSFYPFLNITQKQWYCRIKSSSSISQHRCSNNFHGNYLPMSEQFSSACLVLDNATSALLVKDTVTALTALYNVTRLQRILHSTISADVANWLGLRIHR

SEQ ID NO: 219984 - protein, 37 aa, Glycine max
  Clone ID: PAT_MRT3847_40673C.1.pep
GRLEIQKSWYGCCSIMYLLNSVCWLHNQFNPIQLVDY

SEQ ID NO: 219985 - protein, 76 aa, Glycine max
  Clone ID: PAT_MRT3847_40674C.1.pep
TVLHFGSRYRYQSDEYNGKTTRSHTRTNRYGEKKTAALVPLLKAIYSLWLPIFLHIHHRKHRYWVVLNHNTVKGEA

SEQ ID NO: 219986 - protein, 127 aa, Glycine max
  Clone ID: PAT_MRT3847_40675C.1.pep
VHRECVYDAAAAERGIDLEWVRVVLSADPGARLEDIEDQAPPLRKEHRRVPSTVAIEEVKAAAAKGEAPLELPLKGAGQDSSDAQPRVNGLNPKASDALSGELWEAKKDRICKASIYGKLHGWDLRS

SEQ ID NO: 219987 - protein, 121 aa, Glycine max
  Clone ID: PAT_MRT3847_40676C.1.pep
SDAFREAISGIMTDSKEKNRKFVETIELQIRLKNYDPQKDKRFSGSVKLRHIPCPKMKICMLGDAQHVEEAEKVGLDYMDVEALKKLNKNKKLVKKLAKKYLVTQLLQQVIISVKQYHVRN

SEQ ID NO: 219988 - protein, 40 aa, Glycine max
  Clone ID: PAT_MRT3847_40677C.1.pep
RHLQLLRISKTLCQIRLFRQLKGKQLNHSINRALLATGSM

SEQ ID NO: 219989 - protein, 62 aa, Glycine max
  Clone ID: PAT_MRT3847_40678C.1.pep
SRQNQKFLVFFFQPLLWHTIYWFLRQCGNFVKVVKFVHYAKKVTLWEVVKGSYYNPLKKSKN

SEQ ID NO: 219990 - protein, 82 aa, Glycine max
  Clone ID: PAT_MRT3847_40679C.1.pep
GSRYLWEMMWALEYDPDLFLMYEMPQSASEKAEGSKGKTKSIRQCGKYEREIVKSGAKNAEAPLPMSVFLVASVLKDKSAKL

SEQ ID NO: 219991 - protein, 187 aa, Glycine max
  Clone ID: PAT_MRT3847_4067C.1.pep
ARATSQRSLPRYSHYFSTEPIRAGKLYNTPIHTKDLDMPFTDSPRRSSKRRARRKTIYKPSPTVVSSSFIPSSGYDSANHWIKPCQVQSPDYDVSSAESSSESDLHEYAYSESECDSFSVPDLLNGMDTNCSCRVSSSTNDIIIDMNSESFLGNPEKQDGFDAISQLGLAPILTRPVKFDDKVIEAA

SEQ ID NO: 219992 - protein, 103 aa, Glycine max
  unsure (1)..(103): unsure at all Xaa locations
  Clone ID: PAT_MRT3847_40680C.1.pep
MVNAISGMAVHDDCKXEVLXELKAKRTHRLIDFKIEEQKKQVIVEKLGEPAQGYEDCTASLTADECRYAGHDVEYQTEGNVPKSRIXFIAWAPDTSRVRSKMI

SEQ ID NO: 219993 - protein, 68 aa, Glycine max
  Clone ID: PAT_MRT3847_40681C.1.pep
LSYNENRLATSPTSDEIGHTHPSCSIHHRCNNNIRAPFVFSLLNPRDTKTLDTTHTSGLSRDSTVHDP

SEQ ID NO: 219994 - protein, 107 aa, Glycine max
  Clone ID: PAT_MRT3847_40682C.1.pep
TRPLELLTGKAPLGYPGYEDMVDLPRWVRSVVREEWTAEVFDEELLRGQYFEEEMVQMLQIALACVAKLADNRPTMDETVRNIQEIRLPELKNPNTSSESDSNLQTP

SEQ ID NO: 219995 - protein, 71 aa, Glycine max
  unsure (1)..(71): unsure at all Xaa locations
  Clone ID: PAT_MRT3847_40683C.1.pep
MTGEETTVKKRVGTXCLGWLTEWWIMPKKHRAIAGVGTFSILELMAELCMIQEESRKTRELAGPDDEYQRA

SEQ ID NO: 219996 - protein, 113 aa, Glycine max
  Clone ID: PAT_MRT3847_40684C.1.pep
MESVLSHVGAGFFNGMIPRGVLGTHFKASSFVGVDGGRPRRVVLVKAEAVSINPDIRKSEEKVVDSVVVTELSKPLTPYCRCWRSGTFPLCDGSHVKHNKATGDNVGPLLLKK

SEQ ID NO: 219997 - protein, 140 aa, Glycine max
  Clone ID: PAT_MRT3847_40685C.1.pep
MEMKREIITKEEEHKEDSMHTIVFTAGTFLLMVCLKHFLVEQWRAWVFLILNVILLAILFMSMRPAKLEDHSSGSEISVEEVKSDNNKLEKKRSRETEEGKDCYTKQCCSSTSSSTYVHVETKKKKKKQNKSGRPRGFKT

SEQ ID NO: 219998 - protein, 65 aa, Glycine max
  Clone ID: PAT_MRT3847_40686C.1.pep
RLYDLRTRLRDTEYRISLTVTEEHRELALRGRDDYRTVQPSAVENKTQSCADMSPKGVSTAKTSP

SEQ ID NO: 219999 - protein, 70 aa, Glycine max
  Clone ID: PAT_MRT3847_40687C.1.pep
FKKITGIKDSMVGLNDRAYVEHRGSQQSWLATRHIAPPPFYGNRIQEELLRLKSHSIRSTKPVGREKSKP

SEQ ID NO: 220000 - protein, 179 aa, Glycine max
  unsure (1)..(179): unsure at all Xaa locations
  Clone ID: PAT_MRT3847_40688C.1.pep
ARGGNGSTALPILRANKDLIVYACDCSDETLERAKEIISAASTDASFKHRFRTFCCDLSTNGFPNWLACNPSQDNFLQKQSYCLSGVREDNGLHFTNLSPSEEFECCGGGVDFVTLIFTLSAVPLERMPKSVKECFIVLKPGGMVFFRDYGLYDMTMLRFEPDXQVGFMEYMRSDGTRS

SEQ ID NO: 220001 - protein, 62 aa, Glycine max
  Clone ID: PAT_MRT3847_40689C.1.pep
MWSNLEPHPWELVFPIQARGSNNGVDKLCSEWAYHSVWAMSFLIDNPKQSKVFGIILVIFPI

SEQ ID NO: 220002 - protein, 55 aa, Glycine max
  Clone ID: PAT_MRT3847_4068C.1.pep
VTCFPSLSFRRCVAMSACYALFQISSMTWASRLLGCSCMPVLLFVILPFASSFVV

SEQ ID NO: 220003 - protein, 318 aa, Glycine max
  Clone ID: PAT_MRT3847_40692C.1.pep
MRIRVLKMHTLNTSYGYGGFKWDSINLDHPSTFETLALEAEQKSAIMEDLNRFVRRREYYRKVGRAWKRGYLLYGPPGTGKSSLIAAMANYLKFDIYDLQLDNLVTDSDLRKLLLATANRSILVIEDIDCSVDLPERRHGDHGRKQADVQLTLSGLLNFIDGLWSSCGDERIIILTTNHKERLDPALLRPGRMDMHIHMSYCSYQGFKILASNYLETSSDHPLFGEIEGLIEDIQITPAQVAEELMKSEDADTALEGFLKLLKRKKMEGDVCENDGSDKTELHQSKRSKVGCKQKRPVCISKRKNGVGTQRRTRGRPL

SEQ ID NO: 220004 - protein, 112 aa, Glycine max
  unsure (1)..(112): unsure at all Xaa locations
  Clone ID: PAT_MRT3847_40693C.1.pep
MMLCRLGGRVXDSTCSMNPIEDEAVVLHCLLRARGRYELCDTAGQAAGLQWSAGLTRWPVMLQDGQLVASFDEVPEAEKKHVWNTMFPIPDEAVARALHLERCMRXLPHVQN

SEQ ID NO: 220005 - protein, 91 aa, Glycine max
  Clone ID: PAT_MRT3847_40694C.1.pep
VDHTSMKCITQLLDHENIYMLNKGFVQKPLDHKHKALPNLAFNFFSQHGKWHGLLHKQKKRISILPLQRQKLIKQPFHCPIHINQFQVFNP

SEQ ID NO: 220006 - protein, 62 aa, Glycine max
  unsure (1)..(62): unsure at all Xaa locations
  Clone ID: PAT_MRT3847_40695C.1.pep
LLSSDXILLTKNKVSADLVKQYAENNDIFFEQFAKSMVKMGNITPLTGSRGEIRKNCRRINK

SEQ ID NO: 220007 - protein, 140 aa, Glycine max
  unsure (1)..(140): unsure at all Xaa locations
  Clone ID: PAT_MRT3847_40696C.1.pep
RGGIEKYSSSHIYHKTGISSITAKNCCILPDHDPKTQPDSPTENPPNFYPCVDVXITHFNKHKPKPANLMASITPGTAQILIAGRFKEKRXVVVLKQLPSGLILVTCPLKVNGVSSRRVNQAYVIVTSTKSDVSVVNVNN

SEQ ID NO: 220008 - protein, 65 aa, Glycine max
  Clone ID: PAT_MRT3847_40697C.1.pep
VRDNFYLILLFTRTNVGFIGSVSFMQSIDARSSQCILILFICISLVLMIYIGIRKIKTLRTVRTY

SEQ ID NO: 220009 - protein, 48 aa, Glycine max
  Clone ID: PAT_MRT3847_40698C.1.pep
CNILNQRKNHNVCLRSHLDVVLMPLLLSERAKGHFVPDKVMLTTTNFL

SEQ ID NO: 220010 - protein, 87 aa, Glycine max
  unsure (1)..(87): unsure at all Xaa locations
  Clone ID: PAT_MRT3847_40699C.1.pep
LVPNRLDPILMQVYSHKSVPDSVVWPMAVIATLAAMIASXAMISATLACIKQSMALGCFTRLKIIRTSXMFIGHMYILIMNWFLMTM

SEQ ID NO: 220011 - protein, 175 aa, Glycine max
  Clone ID: PAT_MRT3847_4069C.1.pep
MSSSSGKDLGEGSSSPTENYQQSPGTLSRYESQKRRDWNTFGQYLKNQRPPVPLSQCNCNHVLDFLRYLDQFGKTKVHLQGCMFYGQPEPPAPCTCPLRQAWGSLDALIGRLRAAYEENGGSPETNPFASGSIRVYLKEIRECQAKARGIPYKKKKKASNPSKGNDESSSTMHFS

SEQ ID NO: 220012 - protein, 55 aa, Glycine max
  Clone ID: PAT_MRT3847_406C.1.pep
FKNEYYSFQRVYNHPLHSNHHNTCQLHLILNPLHKINATLKSFESRFSTHYSLKL

SEQ ID NO: 220013 - protein, 174 aa, Glycine max
  unsure (1)..(174): unsure at all Xaa locations
  Clone ID: PAT_MRT3847_40700C.1.pep
IXXXAYEKIKSXXAXXXSXXVXKLTPGSVAVASSXXKVFASVMXYPHEVIRSRLQEQXQAKNIGVQYAGVIDCTKKVFQKEGIPGFYRGCATNLFRTTPSAVITFTSYEMIHRFLERVVPQDKGYLHGLFKANELNKPQPKASGSDSDRGQXXSQSNTKASSIPHGNKDHLTRH

SEQ ID NO: 220014 - protein, 175 aa, Glycine max
  Clone ID: PAT_MRT3847_40701C.1.pep
MGNDDMTERVVFVTVGTTCFDALVRAIDSDNVKKALFAKGYTHLLIQMGRGSYLPTKSEGDDCSLAVDYFTFSSSIADHLRSASLVISHAGSGSIFETLRLGKPLVVVVNQDLMDNHQSELAEELADRKHLYCASPQTLHQTIADMDLSSLLPYSPGDATPVAKHINRFLGFPDD

SEQ ID NO: 220015 - protein, 83 aa, Glycine max
  Clone ID: PAT_MRT3847_40702C.1.pep
WTRKKVVAARGRGSGGEGKWKERRRKVRVYKWEKRMERRGKPCSVSFSGCFGGQVMFGSYNWNGNRSIAFVGKLTNKSKSHVY

SEQ ID NO: 220016 - protein, 39 aa, Glycine max
  Clone ID: PAT_MRT3847_40703C.1.pep
WGSRVCFGKYKGVLFFSAGGVGLNYDLFGLCKVIVQHPP

SEQ ID NO: 220017 - protein, 145 aa, Glycine max
  unsure (1)..(145): unsure at all Xaa locations
  Clone ID: PAT_MRT3847_40704C.1.pep
MAMSVIRTKGGLVKPAEETPLSTVLDLSAIDRLPVLRCNARTLHVFKHGGPEAPRVIREALSKALVPYYPLAGRLKESKPGCLQIECSGDGVWYVQASSDSTLHSVNXFDDVHSIPYDHLLPDAIPETQCIDPLVXMQXTQFGCG

SEQ ID NO: 220018 - protein, 127 aa, Glycine max
  Clone ID: PAT_MRT3847_40705C.1.pep
TRGSRQRIDSQYNEAHAHMETNSFKSSSDDVETPKGPMADLKTPEAKIALPKNTVGGTSLRSELLANTLTEGNYRASDDLQRTHRIKGMIKMAVTVGIPANTGISSARALNSSYRGRASSDIYTICP

SEQ ID NO: 220019 - protein, 178 aa, Glycine max
  Clone ID: PAT_MRT3847_40706C.1.pep
MAFEPLNWYCRPVANGVWTKSVENAFGAYTPCAVDSLVISVSNLILLGLCIYRIWLIMKDFTVKRFCLRSNLYNYILGLLALYCVAEPLYRLIMGISVLNLDGQTQLAPFEIISLIIEALAWCSILILIGIETKVYIREFRWFVRFGLIYAIVGDAVMFNLIISAKEFYSSSVLYFYI

SEQ ID NO: 220020 - protein, 77 aa, Glycine max
  Clone ID: PAT_MRT3847_40707C.1.pep
KCGKLIGTLKDVHTKIKLFSRLYSSIITHCIKDLIFTYCISNFFCFLIVKFQAICSSIFYIHMHVTILFYIFFFICL

SEQ ID NO: 220021 - protein, 201 aa, Glycine max
  Clone ID: PAT_MRT3847_40708C.1.pep
MQTRQPFGPTQMTPTTTQVIGSQYCKPSPTSLEIVRTANTFANEFRVYDHNSVFTLQSASFSVHKRCILLHQGNPIVTLRRKRMTAHNRWQVFRGKSDQIRDLLFSVKRPNKGYNIFQPNTALELEVFLAQNTEEKVCEFKIEGNWSNGSCEVCSVQHRNIIALMNKHAVQATGSDNFVVRVEANVDTAFIVALIAILCLE

SEQ ID NO: 220022 - protein, 82 aa, Glycine max
  Clone ID: PAT_MRT3847_40709C.1.pep
NKHPRAKLMDFPPPLFFPAGNKSSAPIPVDVDHTVKAFYKFLRKHASIPFQLQKPTSTAKTGSESSYVKESQSTSPDVKDEL

SEQ ID NO: 220023 - protein, 116 aa, Glycine max
  Clone ID: PAT_MRT3847_4070C.1.pep
MAATMIKLLFYLAILVILLTNSKGVSSSSTSEPTISASPGVLPYVTAPDISSFFPTPRANQPMSSGAPFEAEAPAPAPSSGEFEGKKSSASARLNCAGAIVGVLLCCAFLSSIVVV

SEQ ID NO: 220024 - protein, 537 aa, Glycine max
  unsure (1)..(537): unsure at all Xaa locations
  Clone ID: PAT_MRT3847_40710C.1.pep
NAAAELKIEEMELRIEKLEEELREVAALEVSLYSIAPEHGSSTHKVHTPARRLSRLYIHACKHWTQKRRATIAKNTVSGLVLVAKSCGNDVSRLIRGASAPIVLREIISQSFGNSCQASPLKRLVESNAAGKRNDGKSMALKWNCLRGPKRRDDYRAXVEDWQETGTFTFALERVESWIFSRIVESVWWQALTPYMHSPVGDSSNKPIGKLMGPALGDHNQGNFSINLWRNAFQDAFQRLCPVRAGGHECGCLPVLARMVMEQCIARLDVAMFNALLRESALEIPTDPISDPIGYSKVLPIPAGDLSFGSGAQLKNSVGNWSRWLTDMFGMDAEDCLLQEDQENSENDEKQGRDGEPKSFVLLNDLKDLLMLPKDMLIDRNIRHEVCPTINLSLIIRVLCNFTPDEFCPDPVPGTVLEALNAETIIERRLSAESARSFPYVAEPVVYMAPSSANVAEKVAEAAGKSHLARNVSAVQSRGYTSDEELEELDSPLTSIIDKLPSSPTVTENGKGNNHKEQGGNPTTNARYQLLREVWSM

SEQ ID NO: 220025 - protein, 65 aa, Glycine max
  Clone ID: PAT_MRT3847_40711C.1.pep
QGPKLLAAFCCGCKEGDDSSAMDVNGLALHFQNFKIILQGLSDCVATCTGGLLVSLRTKILISSI

SEQ ID NO: 220026 - protein, 182 aa, Glycine max
  Clone ID: PAT_MRT3847_40712C.1.pep
MLMEELLELQVGNWSRLLTDMFGIDAEDCLLQEDQENSENDEKQGRDSEPKPFVLLNDLSDLLMLPKDMLIDRNIRHEVSFMNQMLIFFSGMPPSLFWLVCHCLHSISFIVVQVCPTINLSLIIRVLCNFTPDEFCPDPVPGTVLEALDAEVYLTSLSFLSCSGGYINLLLDLTASKNLRVG

SEQ ID NO: 220027 - protein, 82 aa, Glycine max
  Clone ID: PAT_MRT3847_40713C.1.pep
NPGRAHYGTRKTVGPGASRNFKKPGKGRAEYIKKRGAPLEKGKRKKTEGGLLPCPERGGKSCPPWIAPPGKNPRKGGPEGGK

SEQ ID NO: 220028 - protein, 82 aa, Glycine max
  unsure (1)..(82): unsure at all Xaa locations
  Clone ID: PAT_MRT3847_40714C.1.pep
LGRMSYAAHFANQPQQKEWSEGNSSFDIKSRSRLEKVYYTKSQFDSGKTFRNDINGAGPHSSXDCSEKQDQEKPTKIDARWR

SEQ ID NO: 220029 - protein, 192 aa, Glycine max
  Clone ID: PAT_MRT3847_40715C.1.pep
MDWFSWLSKSGLEASLVYEYGLTFAHNELEEEDMFYFNHEFLQSMGISIAKHRLEILKLARKEKGKRPLAVARLVAAIKKTKNTFANYVRTLLMHKQESALAVVPVPVPTRSGLGTRWNKSAMMKRGRKKQETLFLTNGSSTLVPAQPGFSSPVVYHFQKEEKMDGDEDDGYWSAAVEEIKWDTMFQDLKPN

SEQ ID NO: 220030 - protein, 85 aa, Glycine max
  Clone ID: PAT_MRT3847_40716C.1.pep
DGHVYIYSFFATIAFLGAERALHEILYALVDQFHIGLQYKRNRLLLTLAYLLMLMGSLVNTIFRLIAIHVWDPVQEDHNPIGHIR

SEQ ID NO: 220031 - protein, 104 aa, Glycine max
  unsure (1)..(104): unsure at all Xaa locations
  Clone ID: PAT_MRT3847_40717C.1.pep
MLQCLEGLKPLFASILRCCDLDIYNQPRGLEDPELLARETVFSVSEIEALYELFKKISSAVIDDGLINKEEFQLALFKTNIKESLFADRVFDLFDTXHNGILGF

SEQ ID NO: 220032 - protein, 62 aa, Glycine max
  unsure (1)..(62): unsure at all Xaa locations
  Clone ID: PAT_MRT3847_40718C.1.pep
TIPSKLKWXVSSIRHLXHTIVCXFRCTTHYXXXHPXLCIXYFXQHXXXLXXLXXPMAVFSTT

SEQ ID NO: 220033 - protein, 506 aa, Glycine max
  unsure (1)..(506): unsure at all Xaa locations
  Clone ID: PAT_MRT3847_40719C.1.pep
MYRVAASSFRRHLKGHGGNLGSTRFSTSAAVAARTSSGGLFSWLTGERSSALPPLDMPLGGVALPDSLPDYVEQSKTKITTLPNGLKIASETSPNPAASIGLYLDCGSIYETPFSSGVSHLLERMAFKSTTNRSHFRIVREVEAIGGNIGASASREQMGYTFDALKTYAPQMVELLVDCVRNPAFLDWEVNEELRKVKAELGELSNNPQGLLLEAIHSAGYSGALAFPLLAPEAALNRLDGPNLEEFVVENYTAPRMVLAASGVEHEELLSIAEPLLSDLPKVPCPEEPKSVYVGGDFRXMVQGQGTHVAIAFEVPGGWQKEKDAIVLTVLQMLMGGGGSFSAGGPGKGMHSRLYLNVLNEYQQIQSFSAFNSIFNNTGLFGIYASTSPDFVPKTVDIAAKELIAIASPGQVTQVQLDRAKKSTKSAVLMNLESRMIASEDIGRQILTYGERKPVEQFLKAVDEITLNDITKIAQKIISSPLTMASYGDVMNVPSYESVNSKFHAK

SEQ ID NO: 220034 - protein, 69 aa, Glycine max
  Clone ID: PAT_MRT3847_4071C.1.pep
HHCFVWRLSLGAPSFLQTWQKCPGLLFLSRINLLRKRKNNSLSIILHISRYLFHGEIYTDIYFMIYSII

SEQ ID NO: 220035 - protein, 227 aa, Glycine max
  unsure (1)..(227): unsure at all Xaa locations
  Clone ID: PAT_MRT3847_40720C.1.pep
MLRCLEGLKPLFASILRCCDLDIYNQPRGLEDPELLARETVFSVSEIEALYELFKKISSAVIDDGLINKEEFQLALFKTNKKXESLFADRVFDLFDTKHNGILGFEEFARALSVFHPNAPIDDKIEFSFQLYDLKQQGFIERQEVKQMVVATLAESGMNLSDDVIESIIDKTFEEADTKHDGKIDKEEWRNLVLRHPSLLKNMTLQYLKDITTTFPSFVFHSQVDDT

SEQ ID NO: 220036 - protein, 69 aa, Glycine max
  Clone ID: PAT_MRT3847_40721C.1.pep
TVNMECSNERLRSHRAEAQSRVGTVSLHHTSNPQHPAQRFICVGMIQRASCSPYNSFNFPRTVGGPVFR

SEQ ID NO: 220037 - protein, 45 aa, Glycine max
  Clone ID: PAT_MRT3847_40722C.1.pep
LPAIRYVSEHSFHTNNSTIDVLHPSCICRQWLPLRHASRSNIIYP

SEQ ID NO: 220038 - protein, 80 aa, Glycine max
  Clone ID: PAT_MRT3847_40723C.1.pep
ASLPQCSSFSISAMSLSIVHFSPDRFPWRPQSFVQFGFMPALSYRTSQDRRLRFLFTVFSYLASKLTDISSTYCRIPHLL

SEQ ID NO: 220039 - protein, 53 aa, Glycine max
  unsure (1)..(53): unsure at all Xaa locations
  Clone ID: PAT_MRT3847_40724C.1.pep
XRVRKLRNSAPRXXPXXRXXKXXQXXXXPHXXXVXFEGLGXVYTTVXCXFRSS

SEQ ID NO: 220040 - protein, 96 aa, Glycine max
  unsure (1)..(96): unsure at all Xaa locations
  Clone ID: PAT_MRT3847_40725C.1.pep
MAETILFTSESMNEGHPDKLCDQICDAVLDACLEQDPDSKVDCETCTKTNLVMVFXEITTQANVDYEQSPDIAQGVHGHLTKKPEEIGAGDQGHMF

SEQ ID NO: 220041 - protein, 178 aa, Glycine max
  unsure (1)..(178): unsure at all Xaa locations
  Clone ID: PAT_MRT3847_40726C.1.pep
MAETFLFTRXTXTXRRYSESVNEGHPDKLCDQISDAVLDACLEQDPDSKVACETCTKTNLVMVFGEITTVRDTCRNIGFVSNDVGLDADNCKVLVNIEQQSPDIAQGVHGHLTKKPEEIGAGDQGHMFGYGTDETPELMPLEHGLATKLGARAHGGRKNGTWPWLXPEGKTQGPRGVT

SEQ ID NO: 220042 - protein, 197 aa, Glycine max
  Clone ID: PAT_MRT3847_40727C.1.pep
MIIIARLMFLLALFLLLVTNTGQMVFAQDDNNVRDACSVTRFQSLCVQTLGHFSRTAGTSPSKWARAGVSVSIGEVKNVEAYLAQVKRQGQLKGRNSVALSDCVETFGYAIDELHKSLAVLRSLSKSKFSTQMGDLNTWISAALTDEVTCLDGFEGSKGTNVKLLQNRVQNASYITSNALALINKLATEGLGSINDP

SEQ ID NO: 220043 - protein, 393 aa, Glycine max
  unsure (1)..(393): unsure at all Xaa locations
  Clone ID: PAT_MRT3847_40728C.1.pep
MAETFLFTSESVNEGHPDKXLCDQISDAVLDACLEQDPDSKVACETCTKTNLVMVFGEITTKANVDYEKIVRDTCRNIGFVSNDVGLDADNCKVLVNIEQQSPDIAQGVHGHLTKKPEEIGAGDQGHMFGYATDETPELMPLSHVLATKLGARLTEVRKNGTCPWLRPDGKTQVTVEYYNDNGARVPVRVHTVLISTQHDETVTNDEIAADLKEHVIKPVIPEKYLDEKTIFHLNPSGRFVIGGPHGDAGLTGRKIIIDTYGGWGAHGGGAFSGKDPTKVDRSGAYIVRQAAKSIVASGLARRCIVQVSYAIGVPEPLSVFVDTYGTGKIPDKEILNIVKENFDFRPGMISINLDLKRGGNNRFLKTAAYGHFGREDPDFTWEVIKPLKWEEA

SEQ ID NO: 220044 - protein, 49 aa, Glycine max
  unsure (1)..(49): unsure at all Xaa locations
  Clone ID: PAT_MRT3847_40729C.1.pep
WLGIWDASMFVKKLKFVLGKVGRLGDYGVFDENVXGLEEEFLLSEACVI

SEQ ID NO: 220045 - protein, 41 aa, Glycine max
  Clone ID: PAT_MRT3847_4072C.1.pep
TKKYLYLEMKWHQTVLLKSTEKFKIPNLFTRKCNFLQHLFW

SEQ ID NO: 220046 - protein, 392 aa, Glycine max
  Clone ID: PAT_MRT3847_40730C.1.pep
MAETFLFTSESVNEGHPDKLCDQISDAVLDACLEQDPDSKVACETCTKTNLVMVFGEITTKANVDYEKIVRDTCRNIGFVSNDVGLDADNCKVLVNIEQQSPDIAQGVHGHLTKRPEEIGAGDQGHMFGYATDETPELMPLSHVLATKLGARLTEVRKNGTCPWLRPDGKTQVTVEYYNDNGAMVPVRVHTVLISTQHDETVTNDEIAADLKEHVIKPVIPEKYLDEKTIFHLNPSGRFVIGGPHGDAGLTGRKIIIDTYGGWGAHGGGAFSGKDPTKVDRSGAYIVRQAAKSIVASGLARRCIVQVSYAIGVPEPLSVFVDTYGTGKIHDKEILNIVKENFDFRPGMISINLDLKRGGNNRFLKTAAYGHFGREDPDFTWEVVKPLKWEKA

SEQ ID NO: 220047 - protein, 393 aa, Glycine max
  unsure (1)..(393): unsure at all Xaa locations
  Clone ID: PAT_MRT3847_40731C.1.pep
MAETFLFTSESVNEGHPDKLCDQISDAVLDACLEQDPDSKVACETCTKTNLVMVFGEITTKANVDYEKIVRDTCRNIGFVSNDVGLDADNCKVLVNIEQQSPDIAQGVHGHLTKKPEEIGAGDQGHMFGYATDETPELMPLSHVLATKLGARLTEVRKNGTCPWLRPDGKTQVTVEYYNDNGARVPIRVHTVLISTQHDETVTNDEIAADLKEHVIKPVIPEKYLDEKTIFHLNPSGRFVIGGPHGDAGLTGRKIIIDTYGGWGAHGGGAFSGKDPXTKVDRSGAYIVRQAAKSIVASGLARRCIVQVSYAIGVPEPLSVFVDTYGTGKIHDKEILNIVKENFDFRPGMISINLDLKRGGNNRFLKTAAYGHFGREDPDFTWEVVKPLKWEKA

SEQ ID NO: 220048 - protein, 64 aa, Glycine max
  Clone ID: PAT_MRT3847_40732C.1.pep
GFKGWELPKVGIKVGLGFFGWGGTGFFAINLISQIRGEIRNWVVAKFGFLGNWVRYSRVELVPL

SEQ ID NO: 220049 - protein, 53 aa, Glycine max
  Clone ID: PAT_MRT3847_40733C.1.pep
MTPALNKPLPEIEAQATGGVKFTANAFLGKSVVLYFYPKDNTPPCPPQAMGSR

SEQ ID NO: 220050 - protein, 79 aa, Glycine max
  Clone ID: PAT_MRT3847_40734C.1.pep
MVSKHVFFNPLGWELNQFVLVFNYKKGGQNIFGGGKNLPIFFFLNGGGGTFFLKGFSGFPKGSVNEWGGNSTIIFRPNL

SEQ ID NO: 220051 - protein, 62 aa, Glycine max
  Clone ID: PAT_MRT3847_40735C.1.pep
LVQIKHIIIYNLPQSILCKSSKSMQSEWNPFKYRHPVKYLYFITPEAFHNQVLGSDLLALII

SEQ ID NO: 220052 - protein, 410 aa, Glycine max
  Clone ID: PAT_MRT3847_40736C.1.pep
FEICMKLPQWALQILRQLAPEVSYRSLVALGIASIQGLPIASFEKDDAERLLFFYQNCEKDSCTNKNNIIFSSPPGWLKPPPPTRKRCEPRQEASPGLHEGVFAGQGGVCKLNEEEKDRKIVNGISMPLTPARQRLKVSAMRPIPHIRRHRMTPFCGPSETDGFDGTQVEAILPLVAPTKRTSIGSTSGTHRKSFSSAAQSKQVISLNPLPLKKHGCGRGPVQTCSEEEFLKDVMEFLILRGHNRLIPQGGLTEFPDAILNGKRLDLYNLYKEVVTRGGFHVGNGINWKGQIFSKMRNYTTTNRMTGVGNTLKRHYETYLLEYELAHDDVDGECCLLCHSSAAGDWVNCGICGEWAHFGCDRRQGLGAFKDYAKTDGLEYICPHCSVTNFKKKQNFANGYSQGLMSSRPL

SEQ ID NO: 220053 - protein, 51 aa, Glycine max
  Clone ID: PAT_MRT3847_40737C.1.pep
TRLNSQKTLPCRTMIDIIINFISLLPKLSLITTSPLILLTIPFIYLFFNLN

SEQ ID NO: 220054 - protein, 330 aa, Glycine max
  Clone ID: PAT_MRT3847_40738C.1.pep
RREDTVLFIGTTSFLTPGIIYQCDLGTQTPDMKIFREIDIPGFDRSEFHVNQVFVPSKDGTKIPMFIVARKDIVLDGSHPCLLYGYGGFNVSLTPYFNISRTVLARHLGAVFCIANIRGGGEYGEEWHKSGSLANKQNCFDDFISAAEYLVSAGYTQPRKLCIEGGSNGGLLVGACINQRPDLFGCALAHVGVMDMLRFHKFTIGHAWATDYGCSEKEEEFHWLIKYSPLHNVRRPWEQHPDQSIQYPSTMLLTADHDDRVVPLHSLKLLATLQYVLVTSLDKSPQTNPIIGRIECKAGHGAGRPTQKMIDEAADRYSFMAKMLDAHWIE

SEQ ID NO: 220055 - protein, 53 aa, Glycine max
  Clone ID: PAT_MRT3847_40739C.1.pep
WATQDLTPCTKHSCHLGHPSYLDGCTLRVTRIADRPLGEATDPIYPDWHRLTH

SEQ ID NO: 220056 - protein, 69 aa, Glycine max
  Clone ID: PAT_MRT3847_4073C.1.pep
RSGVHQTSAYVLEHCQSYPGPVYFTCNHALNIHPYQISPNTSILLPITQLHITISVDKPQLKNFQLLPI

SEQ ID NO: 220057 - protein, 69 aa, Glycine max
  unsure (1)..(69): unsure at all Xaa locations
  Clone ID: PAT_MRT3847_40740C.1.pep
LQASAFAGSRTPNXXAVLAISKRPHSSLIQRPILYKVFXYYRKTHLRYFIYDERRNTMMNLIGNMTTCI

SEQ ID NO: 220058 - protein, 51 aa, Glycine max
  Clone ID: PAT_MRT3847_40741C.1.pep
ESSVVTHTQWSPPSFMPQINATNTMYGRVECSTSDMTVSLQVQQLAPHAKY

SEQ ID NO: 220059 - protein, 61 aa, Glycine max
  Clone ID: PAT_MRT3847_40742C.1.pep
AIFQWVLEDQGKRVVSIRHVNYRQKLAFFNLHRSWYKECYSHDYSKCCAFNDRISCISSRI

SEQ ID NO: 220060 - protein, 47 aa, Glycine max
  Clone ID: PAT_MRT3847_40743C.1.pep
RLREDDRRGRREVVSSETVKSFPFSMRPPSFHYKHCSLPQPHTNINS

SEQ ID NO: 220061 - protein, 367 aa, Glycine max
  Clone ID: PAT_MRT3847_40744C.1.pep
MAVTLTSTLFMALLFAASAFAALQPRVPEAYLQNGNFEEQPNPKNLQKTKLMGKYSLPKWEVNGLVEYVSGGPQPGGMFFPVTHGIHAVRLGNEASISQNIKVKPGQLYALILGASRTCAQDEVLRISVPPQTGDVPLQTLYSLNGDVIAWGFKATSSVVKVTFHNPGVQEDPSCGPLLDAIAIREFYPPMPTRVNLVKNPGFEEGPFPIFNSTNGVLLTPQQQDGFSPLPGWIIESLKAVKFIDSKHFNVPFGLGAVELVAGRESAIAQIIRTVTNKVYNITFSVGDAKNGCHGSMMVEAFAAKDTFKVPFKSEGKGTSKTVSFKFKAIAPRTRLTFYSSFYHTRIDDYGSLCGPVIDQVIVFPVA

SEQ ID NO: 220062 - protein, 231 aa, Glycine max
  Clone ID: PAT_MRT3847_40745C.1.pep
MDNIPEHIVWEILSRLKKTSDRNSVSLVCKRLYYLDNAQRTFVRVGCGMDPADEALTCLCTRFQNLSKVEITYSGWMSKLGKQLDDKGLLILANHCPLLCDLSLSYCTFITDVGLRYLASSSKLSSLRLNFTPRITGCGILSLVVGCKNLSSLHLIRCLNVSSVEWLEYLGKLGRLEDLSIKNCRAIGEGDLIKLGPGWQKLTRLQFEVDANYRYMKVYDRLSVDGGKSTC

SEQ ID NO: 220063 - protein, 217 aa, Glycine max
  Clone ID: PAT_MRT3847_40746C.1.pep
MGSDGVRKPRFLCLHGFRTSGEILKTQLHKWPQSVLDNLDLVFVDAPFPCLGKSDVEGIFDPPYYEWFQFNKEFTEYTNFDECLQYIEECMIKYGPIDGLLGFSQGSILSAALPGLQEKGVALTKVPKVKFLIIVGGAKFRSPSVMDKAYSSSISCPSLHFIGETDFLNKYGAELLESCVEPVVIHHPKGHTIPRLDDKSLKTMMDFIERIKKDVSK

SEQ ID NO: 220064 - protein, 604 aa, Glycine max
  Clone ID: PAT_MRT3847_40747C.1.pep
MPTWWGKKSSKTKDQQHQQQQDHPHGAAATTTLLHFNFIKPKPSKSFDDVVRNSPRASRDFGSSAAVDQGLPLPRPSVFSTQSFAIDQGLVFGSASVSGSSVSSSGSYDDHPQINASRGQGDMKFLVRSKSPGPGSRGPTSPTSPLHPKLLGLSLDSPTGRQEGECHPLPLPPGSPTSPSSSLPSMRANGMTEHTTSNLSKWKKGKLLGRGTFGHVYLGFNSDSGQLSAIKEVRVVCDDQSSKECLKQLNQEIHLLSQLSHPNIVQYYGTRFFSFYLEYVSGGSIHKLLQEYGAFKEPVIQNYTRQIVSGLAYLHGRNTVHRDIKGANILVDPNGEIKLADFGMAKHINSSASMLSFKGSPYWMAPEVVMNTNGYSLPVDIWSLGCTIIEMATSKPPWNQYEGVAAIFKIGNSKDMPEIPEHLSNDAKNFIKLCLQRDPLARPTAHKLLDHPFIRDQSATKAANVSITRDAFPCMFDGSRTPPVLESHSNRTSITSLDGDFASKPALAAPRALRSPRDNTRMITSLPVSPSSSPLRRYGPTHQSCFFSPPHPAYTIMGQSSYTLNDISSYPMTSNATFALDPWHETSRYRANTPPGGSPRMRLI

SEQ ID NO: 220065 - protein, 83 aa, Glycine max
  Clone ID: PAT_MRT3847_40748C.1.pep
QTHNTSFIHSFPAKFKRVKEKEGVLVHVRFPWKSVLTRFGVFVCYIYICKTIKKNISQFELIMVMLGKGNACVFQSPNARSNY

SEQ ID NO: 220066 - protein, 75 aa, Glycine max
  Clone ID: PAT_MRT3847_40749C.1.pep
ARNSARANIIERISLIKYHCQGALGAIYYFLLIGHQHKTMGYEHNTSPNSDQQEEPCEPTTMGLRTGHFVLKKEA

SEQ ID NO: 220067 - protein, 263 aa, Glycine max
  Clone ID: PAT_MRT3847_4074C.1.pep
ASDSSSLLHQHHHHQQQHQQHQQQLLQYWSDALNLSPRGMLTRLGPDGRPLFRLPTQPINTTKLYRGVRQRHWGKWVAEIRLPRNRTRLWLGTFDTAEDAAMAYDREAFKLRGENARLNFPELFLNKDKKEEQQQQEQEASSPVLSAIAKQHEPSSEHRDVPIEESNENDSGDATVSDDQVHATTESSEGVSQEMVWGEMSAWFNAIPAAWGPGSPMWDDLDATNNLLCQSHIPFSNPNQQELNDAERQEQNTGPGYLWKDQD

SEQ ID NO: 220068 - protein, 103 aa, Glycine max
  unsure (1)..(103): unsure at all Xaa locations
  Clone ID: PAT_MRT3847_40750C.1.pep
FIHVNNNVGMNPSALDTCGFDELAKTDLVFDVGYSNAMLYEPEEHTEHVAVIQYGRNVWNIHKAVVECTVEMFLGGXNASIWINIGEESLNGAPIMRDYGLLA

SEQ ID NO: 220069 - protein, 71 aa, Glycine max
  Clone ID: PAT_MRT3847_40751C.1.pep
SKQPTASTASIPKPCTSSLFLYPETLDLVLYTTSLLQSNTNTNSHTFILNKFASTFVTTMASNSIIQCIPS

SEQ ID NO: 220070 - protein, 153 aa, Glycine max
  Clone ID: PAT_MRT3847_40752C.1.pep
SQICKCINFACSCQICECSLLFARLEVLNISGNRLTDACGSYLSTILKNCTALCSLNIENCCVTSRTIQKVADALDSRSVLAHLCIGYNSPVSGNAIINLLSRLSTLKRFSELNMSGLKLGKPVVDTLCKLAGTLTLSGLILGGTGIGTEGAT

SEQ ID NO: 220071 - protein, 451 aa, Glycine max
  unsure (1)..(451): unsure at all Xaa locations
  Clone ID: PAT_MRT3847_40753C.1.pep
MASKAIIQYSSSSSSSHAIITTYDVFVSFRGEDTRNNFTAFLFDALFENGIHAFKDDTHLQKGESIAPELLLAIQGSRLFLVVFSKNYASSTWCLRELAHICNCTIEPSPSRVLPIFYDVDPSEVRKQSGYYGIAFAEHERRFREDIEKMEEVQRWREALIRVANISGWDIQNESCSKYKIYPRSQLSKSSKXGNLVGMESSLEELEKCLRLESVNGVRVVGISGMGGIGKTTLARALYEKISDQYDFHCFVNDVNKIYQHSGSLGIQKQLLSQCLNDENLEICNVSKGTYMVSTMLRSKQGLIVLDNVNKDEQLCMFTGGRETLLHECFGEGSRIIIISRNEHILRTYGVNHAYQVRPLNQDKAVKLFCINAFHCNYIMSDYEWLKRDVLSHAQGHPLAIKVIGKSLFGRNVSQWRGTLVRLSDNKSKDIMDVLRISYDDLEEKDKEIFL

SEQ ID NO: 220072 - protein, 91 aa, Glycine max
  unsure (1)..(91): unsure at all Xaa locations
  Clone ID: PAT_MRT3847_40754C.1.pep
YARFILMVVCECGSGDRSFVXRQLTGDFEXQYDACSGVEVHPLDLFTHCGXIRFSCWDTAGQDKFGGLTDGYYIHGRCAIIMSDLIARLTD

SEQ ID NO: 220073 - protein, 72 aa, Glycine max
  Clone ID: PAT_MRT3847_40755C.1.pep
SGSCRCTRLTFTCMRMHSYSIVIATPNSMAVAVQRQDWDCHDVADINLIGVDAHFASCSCSNKEQADSDCHQ

SEQ ID NO: 220074 - protein, 208 aa, Glycine max
  Clone ID: PAT_MRT3847_40756C.1.pep
EESLVRNLFAIWSFDGKLVYENIVEATEDFDTKHPSGVGGHGNVHKAKSHTGQILAVKKLHLVQNGELSNIKAFTSEIQALINIRHRNIVKLYGFCSHSQSSFLVYEFLEKGSIDKILKDDEQAIAFDWDPRINAIKGVANALSYMHHDCSPPIVHRDISSKNIVLDLEYVAHVSDFGAARLLNPNSTNWTSFVGTFGYAAPGMLFNA

SEQ ID NO: 220075 - protein, 88 aa, Glycine max
  Clone ID: PAT_MRT3847_40757C.1.pep
SLIKRPRYLPLCIRLVLCEKLLCVHYTRVLTNGCITTRTFHLPHHSWRVYAFILRCDPYVRCHEITSRRSSPSSLICYKAQRSNLHSP

SEQ ID NO: 220076 - protein, 46 aa, Glycine max
  Clone ID: PAT_MRT3847_40758C.1.pep
IILLYSQHLVYIASREVSDKEKLSYVRSAMDFDLITAPPHGSSTPE

SEQ ID NO: 220077 - protein, 40 aa, Glycine max
  Clone ID: PAT_MRT3847_40759C.1.pep
NYACQINFRMLSVIQHENYSLLTCLCLHQGFCRKKLHIGF

SEQ ID NO: 220078 - protein, 125 aa, Glycine max
  unsure (1)..(125): unsure at all Xaa locations
  Clone ID: PAT_MRT3847_4075C.1.pep
DPFHPLFLHHSDGPGLILTSQPLDHKNYTTWSLAMMVAFSVKNKVAFIDGSLPMPTIADPTYAAWTRGNNLVISWXYNSXSKDIISSILFANTTKEIWEDSXTRVFPKEWPKNVQLRKQLMSLQE

SEQ ID NO: 220079 - protein, 74 aa, Glycine max
  Clone ID: PAT_MRT3847_40760C.1.pep
WIQRQDSDDCHTAGTHNTDHDPAAAQPLIYILPNHATDYWTRLQTNACLLASGVAKNSDIMDDSVKDLLYDVLK

SEQ ID NO: 220080 - protein, 30 aa, Glycine max
  Clone ID: PAT_MRT3847_40761C.1.pep
FFCPHRTDDFLDLLIMVDCLVNRNSSSYKR

SEQ ID NO: 220081 - protein, 193 aa, Glycine max
  Clone ID: PAT_MRT3847_40762C.1.pep
MPALHLVRGKPLIFECGPFCSCPPHCRNRVAQKGLKYRLEVFRSKQTSWGVRSLDLIQAGSFICEFAGVVLTREQAQLLTMNGDSLIYPNRFSERWAEWGDLSQIYPDYVRPLYPSIPPLDFSLDVSTMRNVACYMSHSSTPNVLVQFVLHDHNNLMFPHLMLFAMENIPPMRELSLDYGVADEWTGKLSICN

SEQ ID NO: 220082 - protein, 106 aa, Glycine max
  unsure (1)..(106): unsure at all Xaa locations
  Clone ID: PAT_MRT3847_40763C.1.pep
MVGKDQDVSLGAYYFPERLTIGTDVQSQDYGTDYHEPAPAPLFDHTEFTSWSFYRARIAEFVGTFLFVYITDLTVMGDAGAXSKCTTVGIQGITWAFCGMIFGLVY

SEQ ID NO: 220083 - protein, 61 aa, Glycine max
  Clone ID: PAT_MRT3847_40764C.1.pep
PNQFAMSSLEEPLGLDKLPSMNTIDRIQRFSSGSCRPRVDNLGMGNCWIEGRSCRTSNSCK

SEQ ID NO: 220084 - protein, 39 aa, Glycine max
  Clone ID: PAT_MRT3847_40765C.1.pep
LERLKCSIFVIFRNSYFVFPKKKKLLFCKFFLSSKTKLF

SEQ ID NO: 220085 - protein, 52 aa, Glycine max
  Clone ID: PAT_MRT3847_40766C.1.pep
PEFPGRPSASGTICHGIVEVDPLLTPQEPHLNEMQNHGYENPTYKYLEQMHI

SEQ ID NO: 220086 - protein, 184 aa, Glycine max
  Clone ID: PAT_MRT3847_40767C.1.pep
MYRFASNLASKARIARSSSHQIGSRLSSSRNYAAKDIRFGVEARALMLKGVEELADAVKVTMGPKGRNVVIEQSFGAPKVTKDGVTVAKSIEFKDKVKNVGASLVKQVANATNDVAGDGTTCATVLTRAIFTEGCKSVAAGMNAMDLRRGISMAVDAVVTNLKSRARMISTSEEIAQVGTISAN

SEQ ID NO: 220087 - protein, 63 aa, Glycine max
  unsure (1)..(63): unsure at all Xaa locations
  Clone ID: PAT_MRT3847_40768C.1.pep
VYAPEPFDVGRVLHVDIIIYGHQITWSTTGTIDPSAESGTYVXALVRKHDTEYNAVVTQTGSD

SEQ ID NO: 220088 - protein, 49 aa, Glycine max
  Clone ID: PAT_MRT3847_40769C.1.pep
LSIRKKLFNQYLTYPDESHAENLRPGCTILQHVQHLLLYKCHEVEHITL

SEQ ID NO: 220089 - protein, 53 aa, Glycine max
  Clone ID: PAT_MRT3847_4076C.1.pep
GNPPPGIIKAAPAVSATLGDNCLHACPGSSHLCSPPQKPSFVFKQPPRGKPPP

SEQ ID NO: 220090 - protein, 131 aa, Glycine max
  Clone ID: PAT_MRT3847_40770C.1.pep
KKKDSPKRAPPLAKQAFYGAIWGLGPPREGSYKGPPFFKQLFKNNPTFWASDFPKGGGGGPKKAEKAQPFGPEPLCGSGVKNLRGSPKGPFSAFFPKDLGPPKRTGGAHSKILVFFKIFSQARRLAPLFFP

SEQ ID NO: 220091 - protein, 151 aa, Glycine max
  Clone ID: PAT_MRT3847_40771C.1.pep
MDAEADPPQNPITRHKCLACYKQYKKKEHLIEHMKTSYHSVHQPRCGVCQKHCKSFESLREHLTGPLPRGICSKIFSQQGCQLCLALFDSPGSLIGHRETCRLSAPTWPGTNSSDENHAGEGPGGAVAMDCEMVGGGSDGYLATCALACLV

SEQ ID NO: 220092 - protein, 133 aa, Glycine max
  Clone ID: PAT_MRT3847_40772C.1.pep
DVDAMDMSDNDSTPSASRRNSLDRDGLRKDVHKLAIQSPPPLDPSLRSPGEQSEAASEHQSELGVSEQDNEAWVQNMRMIEELRAFIKVKLERGDFEDGADSTEVKEESSEERRGSAGPSMSEEERSLYPVLR

SEQ ID NO: 220093 - protein, 189 aa, Glycine max
  Clone ID: PAT_MRT3847_40773C.1.pep
MAEPMAVDSNPESGLDFESPFAWGKKRGMGGKKKDVQFYESFSFDGAEYAINDTVCLQSGIGGGEPHIGRLIKIWETRDKSRKVKVQWFFRPAEICKYLVGIEVKPNELFLACGGDGAKGFANVNPLEAIVGKCNVVCISKDVGNPQPSGEAKADYVYYRFFDVVQLKVVDQIDVKVAAGIEVKNVSNK

SEQ ID NO: 220094 - protein, 74 aa, Glycine max
  Clone ID: PAT_MRT3847_40774C.1.pep
CTPYLSTQQVFSILLSFSIYISCITHLYIMLGVRCRCFLSYCLFSKRTKRKRHHNEIIARHRMIILCPCIKAHI

SEQ ID NO: 220095 - protein, 32 aa, Glycine max
  Clone ID: PAT_MRT3847_40775C.1.pep
RCWPKIHYTLTQVIVTPLLLGNMFKGGLTHYI

SEQ ID NO: 220096 - protein, 149 aa, Glycine max
  Clone ID: PAT_MRT3847_40776C.1.pep
KLTLEELLNPCRKMSHAPYSASSLSCQKYSKGKPKRDIIFYLTYDCMHRVYSSILIYTIAIDLAVEADVFPNLKFSIALHTKATWYRVPKSNISVTSDWLKLRVNYSDFFCTLKTFTENMHWNPYMHLSIFLHIFFSKQRRDLCNRNKI

SEQ ID NO: 220097 - protein, 100 aa, Glycine max
  unsure (1)..(100): unsure at all Xaa locations
  Clone ID: PAT_MRT3847_40777C.1.pep
PVIGGGDVKAVASISGGSDELTGQMMAEAIDKVGPDGVTSFESLCAFETTVEVEDGMHIDEGYIWPQFVTNPEKLIDEFENAIVLIMXHKIPEIKDIKPL

SEQ ID NO: 220098 - protein, 82 aa, Glycine max
  unsure (1)..(82): unsure at all Xaa locations
  Clone ID: PAT_MRT3847_40778C.1.pep
RGPCGCSTLVRRTYGLKGFASGPEIARGMLLSPYHAGLLQMLDITPSAETYNGDKMELADAALPLLKGVDATTXDVAEACTG

SEQ ID NO: 220099 - protein, 84 aa, Glycine max
  Clone ID: PAT_MRT3847_40779C.1.pep
IIYGACNKKKEYSLSIKKINGIIRKPPLYKPYPMNMRLRNHVYYKRAHINGGGTRGQKPIFCKLFKQRNGPLGLHQMGVGGFAS

SEQ ID NO: 220100 - protein, 69 aa, Glycine max
  Clone ID: PAT_MRT3847_4077C.1.pep
CLISFIELNMTLLLSMLCLISFIELNKRTSERKLGRAYSTRGACLIILRESNTRALGAGVHSRARYLGA

SEQ ID NO: 220101 - protein, 135 aa, Glycine max
  unsure (1)..(135): unsure at all Xaa locations
  Clone ID: PAT_MRT3847_40780C.1.pep
MAKVCWPYFDPEYENFSNRMNPPRVSVDNASCHDCTLIKFDSVNKPGILLEVVQILTDLDFIITKAYISSDGGWFMDVFHVTDQQGKKITDSKTIDFIEKTLGPKARAPEGLRSGNKKVGVHSXGDHTLIPLWKS

SEQ ID NO: 220102 - protein, 84 aa, Glycine max
  Clone ID: PAT_MRT3847_40781C.1.pep
IVLNVSFSLACGVKVNVCLPFVDKKVSLECRSPIARQHSAHHQTVLLGPSCIMVCEKCAQWRATCKRIFLLMFGESNDKCAYLI

SEQ ID NO: 220103 - protein, 207 aa, Glycine max
  unsure (1)..(207): unsure at all Xaa locations
  Clone ID: PAT_MRT3847_40782C.1.pep
MKRRGLVFFNGTVLAAWLCHADHMVPVLMNTVYGARTREVKCARWRLDEEAHTIFCFDTIPEKCGEATKEYMHGKQYKGDSETDNQRAYFYAKYLEGHPKDTLGISIKGTVLSNMPYYNKHGYGVEKINYNLHEECVNKDKAPSLTXTVINYSKLASLGXRLYFCEAVHCTNRRVSEASXENAGYHTWQKLLLTDPQDPSTPNAVSY

SEQ ID NO: 220104 - protein, 132 aa, Glycine max
  unsure (1)..(132): unsure at all Xaa locations
  Clone ID: PAT_MRT3847_40783C.1.pep
PRVRSNNTEIMLTKVKMPLPDIKAAVLAMDDSVLDVDHVENLIKFCPTKEEIELLKGYTGDKENLGKCEKYFLEVMKVPIVESKFRCFSFKIHFRTXIQSFKKSLNTVNSACEEVPNLFKLNEILMKFFICV

SEQ ID NO: 220105 - protein, 120 aa, Glycine max
  Clone ID: PAT_MRT3847_40784C.1.pep
GGLQVRSHEEKWIDISLFKGTQVVNIGDMMQAWSNDKLRSSEHRVVLKQSVSRFSLAFFWCFEDEKVVLAPDEVVGDGNKRLYNPFVCSEYLKFRENNQRGRFEKVGYTVKDFAGIKSNL

SEQ ID NO: 220106 - protein, 64 aa, Glycine max
  Clone ID: PAT_MRT3847_40785C.1.pep
TIVFKLFHTILSCGNMTRFLFTSLTENPTTYHRTQLSKTEQLQNQQESQENKLGRLYTGKKTPI

SEQ ID NO: 220107 - protein, 90 aa, Glycine max
  Clone ID: PAT_MRT3847_40786C.1.pep
SYLNISISKNIVPDEIKGRVLHHSFPVSLFLPRNVRLEHKTLKLLKYWTWQFVIVRPVCSILIIALQLLGLYPSWVSWTFSIILNFSVSM

SEQ ID NO: 220108 - protein, 89 aa, Glycine max
  Clone ID: PAT_MRT3847_40787C.1.pep
PSTRGHFIYKGVASSAKVVRKASPQKKVGVYVKQGNGGPLPVVNHSELGQSRASTVNRATGRLRFCWSKVSLFFLYIISLFLLSALSLP

SEQ ID NO: 220109 - protein, 72 aa, Glycine max
  Clone ID: PAT_MRT3847_40788C.1.pep
RENGERKGKFTVYYEEGLLQLRNGESENGWYRWQDLTELNGSVVRIWDGGLSGSSVRESWYNNYNSSCMHVW

SEQ ID NO: 220110 - protein, 109 aa, Glycine max
  unsure (1)..(109): unsure at all Xaa locations
  Clone ID: PAT_MRT3847_40789C.1.pep
VYLNSNRAGEVALLHFYPSPFGMKVMIALAEKGIKYDYKEDDLKNKSTVFLRMNPVYKKITGLIHYGKPNCXYTIDVQYIXEACNDRNPLLPXDPYQRAHARCLADNVD

SEQ ID NO: 220111 - protein, 188 aa, Glycine max
  Clone ID: PAT_MRT3847_4078C.1.pep
ASGSSSPLTSGGGAIPFHQTKQPLFSHEVVGMIQKSQNGAIPTGRPCAVSGSSSPRTSGGGVVPFHQTKKTLLSYEVVGMIQKSRNGAIPISSPHTASGSSSPLTSGGGAIPFHQTKQPLFSNEVVAMIQKSQSGAIPISSPRTGSGSSSPLTSGGGAIPFHQTNQPLFSHEVVGMIQKPPNVFYSNG

SEQ ID NO: 220112 - protein, 55 aa, Glycine max
  Clone ID: PAT_MRT3847_40790C.1.pep
PLSPIDYVVRVPRAMSSALLLVQASMPFWPIFLIEFLLAKGSRISSPDYSWNRCD

SEQ ID NO: 220113 - protein, 115 aa, Glycine max
  Clone ID: PAT_MRT3847_40791C.1.pep
RSRVCYSQSRYFLYKSLLSLSLSIIRFFPLPSLSLELPPPSASLFLSSSAIAASPSNKSLLLVNPNTVVTRGVRLQLRPAKAASPRTTPRVPPSASVPLTLAHLAVSNPQGDPLY

SEQ ID NO: 220114 - protein, 63 aa, Glycine max
  Clone ID: PAT_MRT3847_40792C.1.pep
PSGPLLTVNTLARFGAHLGWRTSRSSMMPTEKQYLDLANYPGCPGERDYENSTVLDESTSWTT

SEQ ID NO: 220115 - protein, 118 aa, Glycine max
  unsure (1)..(118): unsure at all Xaa locations
  Clone ID: PAT_MRT3847_40793C.1.pep
KESNQQPSPLEIESLKAELAALARQVNVSDLELQTLTKQIVKECKRGQDLATEVIVLKEEKEALTTECDNLTSFQKRMDEAKVKNRSQLARADLQALVEEIXHQLDHEKDLYAYLRLQ

SEQ ID NO: 220116 - protein, 631 aa, Glycine max
  unsure (1)..(631): unsure at all Xaa locations
  Clone ID: PAT_MRT3847_40794C.1.pep
MWRCIARGLRGPASTRSTSNHSLGSQLSRFFSSGANSSYTVVDHTYDAVVVGAGGAGLRAAIGLSEHGFNTACITKLFPTRSHTVAAQGGINAALGNMTEDDWRWHMYDTVKGSDWLGDQDAIQYMCREAPKAVIELENYGLPFSRTEDGKIYQRAFGGQSLNYGKGGQAYRCACAXADRTGHALLHTLYGQAMRHNTQFFVEYFALDLVMNSDGTCQGVIALNMEDGTLHRFKAASTILATGGYGRAYFSATSAHTCTGDGNAMVARAGIPLEDLEFVQFHPTGIYGAGCLITEGSRGEGGILRNSEGERFMERYAPTAKDLASRDVVSRAMTMEIREGRGVGPLKDHIYLHLNHLPPDVLKERLPGISETAAIFAGVDVTKEPIPVLPTVHYNMGGIPTNHYGEVVTIKGDNPDAVVPGLMAAGETACASVHGANRLGANSLLDIVVFGRACANRVAEIRRPGEKQKPLEKDAGQRTIAWLDKLRNSNGSLPTSQIRLNMQRVMQTNAAVFRTQETLEEGCQLIDKTWESFHDVQVKDRSLIWNSDLIETIELENLLINACITMYSAEARKESRGAHAREDFKVRDDGSWMKHTVGFWENEKVRLDYRPVHLNVLDDEVESFPPKARVY

SEQ ID NO: 220117 - protein, 263 aa, Glycine max
  unsure (1)..(263): unsure at all Xaa locations
  Clone ID: PAT_MRT3847_40795C.1.pep
GGGRLRAVLRGGGRGGERGWGGGRGAGTPLAAARGFAFLQSSDAGAASLACCRGSPAGGARKGAMALDGIRMPDGCYADGTWEKKRTWLLKTHWTLDKCGIQADAKLQFTPQHKLLRLQLPNMKYVKVKVNFSDRVFKAVSDICKTFNIRHPEELSLLKKPRDPTKKKKKKLDDQSEDEALELEGPLIMPGSGSIYSSPGLYSKTMTPTYDAHDGSPLSPTSAWFGDSALSXGNPGILAVSQPVTSPEILGKMFKPQALLDKA

SEQ ID NO: 220118 - protein, 230 aa, Glycine max
  Clone ID: PAT_MRT3847_40796C.1.pep
MASTVVPYMSFYAHTSSGRMNKFSNVKLLPVSSTRNRTFSYSVKAMAGGEASLQKSNQHQQQVQPKMKVPQGSPKVLLNQFPVARTVQQMMDTMERMGEDLLVYGRTSPVIVAGDDEYSKGKIPWAIKEGQKDYKMRFNMPGMNKNDVKVWVEENMLVVKAEKALEENHEGRANGNEDWPANSYGRYNHRIALPENIEFDKIKAQVKDGILYVTIPKSSTSAKIIGIDVQ

SEQ ID NO: 220119 - protein, 80 aa, Glycine max
  Clone ID: PAT_MRT3847_40797C.1.pep
PVSTKFLGTALPLTTASRLRFPPIAGVDIASRGLPETSFSLLLYLPCVAMVFSFVCFYFGALQLRTLPSLCASSRLFRVL

SEQ ID NO: 220120 - protein, 55 aa, Glycine max
  Clone ID: PAT_MRT3847_40798C.1.pep
FLNILFVTSKNKNAMTIELNEAVTFSASVVFHTEYCCHLNHNQNNRLICRVVNFQ

SEQ ID NO: 220121 - protein, 96 aa, Glycine max
  unsure (1)..(96): unsure at all Xaa locations
  Clone ID: PAT_MRT3847_40799C.1.pep
HARPLSALPSXRTILYGIGSLRLGGASSKLSEGQLRXLPSNRSFARTALTRGPRAEPAGGSWLCSASVRRVASFRSRVPLSDWSRPPGMWPSLPNP

SEQ ID NO: 220122 - protein, 169 aa, Glycine max
  Clone ID: PAT_MRT3847_4079C.1.pep
GLENHCEHFGLQKQSSIMGSDRKSKRASPSQREDEKRSKRQRTVEDEERKKRKREKKEKRKDKKSHQHSKENNSDKGKLKDKHRSKHSKGDDHMEFQELSNDDYFAKNNEFATWLKEEKNVFFSDLLAESARVLFSDFVKAWNKGKLDSNYYEGIATGPRTSHNWNIKK

SEQ ID NO: 220123 - protein, 142 aa, Glycine max
  Clone ID: PAT_MRT3847_407C.1.pep
METMMMRCVSIPSSIPKSRPSISLGLGTPKLFNSVSVRVAVNVNGRGRNKGLSCNAMFGLGVPELVVIAGVAALVFGPKKLPEVGRSIGKTVKSFQQAAKEFESELKKEPDSTEGDSSEKSIVVSEKQQQQDNEVSTSKETV

SEQ ID NO: 220124 - protein, 225 aa, Glycine max
  unsure (1)..(225): unsure at all Xaa locations
  Clone ID: PAT_MRT3847_40800C.1.pep
KVNSYIYQKQFLLDSLDLSYNNLTGKLHREFATLSYINLSYNSFDFSQDLESEFPDYCYFGEDSLISYHMPNFTSCYLTHINSVHQTNPRTKKGKPFVLIVLPIICFILVVLLSALYFRRCVFQTKFEGKSTKNGNLFSIWNYDGKIAFEDIIEATEDFHIKYCIGTGAYGXVYRAQLPSGKIVALKKLHQMESXNPSFTXSFHNEVKMLTQXIRHRNIVKLHGF

SEQ ID NO: 220125 - protein, 41 aa, Glycine max
  Clone ID: PAT_MRT3847_40801C.1.pep
KSFQGDHCFIRVKSKFKCFLSKIQLENFWDGPSQFNVLYKN

SEQ ID NO: 220126 - protein, 188 aa, Glycine max
  Clone ID: PAT_MRT3847_40802C.1.pep
MAAEDDRNLVEIMETLNPIDVAKYMNFVGAPQAGAIATFSGTTRDTFEGKTVVELRYEAYVPMAIRCIKSICSSARASWNIHSVAVAHRLGTVPVGETSVFVAVSSVHRADALEACRFLIDEIKAQVPIWKKEVYSNGEVWKENSEFLERRSELGNKNAACCGKKAEIKEHNKKSCCRTKVRADDECS

SEQ ID NO: 220127 - protein, 88 aa, Glycine max
  unsure (1)..(88): unsure at all Xaa locations
  Clone ID: PAT_MRT3847_40803C.1.pep
IQNXHQRXXSXELXMLVXXVXXXNXIIDLXHXESRKANMHLYKIACPWKISVAFXPLLEAIVACKXLLCFVLFXNXAAALYKXVSLTP

SEQ ID NO: 220128 - protein, 41 aa, Glycine max
  Clone ID: PAT_MRT3847_40804C.1.pep
SIKYKYIIQQKIHNTQLGRTNKYIPSRLLCSLIQPEKQLRN

SEQ ID NO: 220129 - protein, 169 aa, Glycine max
  Clone ID: PAT_MRT3847_40805C.1.pep
EACGTEIISQTVAKVDLKARPFKYWLHPMGDEEEIEEEEHTADALIIATGAKARRLDLKGEDKYWGNGVSACAVCDGSLPMFREQPLVVIGGGDSAVEEALYLTKKASKVTVLVRRDQLRASRTNARRLTTHPKIEILYNTSASEIKGEEKKNGLMTQLVVKNNVTKEE

SEQ ID NO: 220130 - protein, 119 aa, Glycine max
  unsure (1)..(119): unsure at all Xaa locations
  Clone ID: PAT_MRT3847_40806C.1.pep
RRERGRRRRRNGRRKPDRAKREQERRRKAKAGRSSSHSREKEKEKQRESRTXXKPXHAHQNDAAXERKXHQEEPXHDKARDXDNRTPXHXAXHHGRNDXATRRKRGGADXNAQERGKNT

SEQ ID NO: 220131 - protein, 105 aa, Glycine max
  unsure (1)..(105): unsure at all Xaa locations
  Clone ID: PAT_MRT3847_40807C.1.pep
LIDIIEHERSQKVQAAYTSHNEGLKIPHAEVKQTMSMIHNFSXGACGAVRGPTTDLNIXMDYWGARKASNMPGLGRKVPSTAVDGGTGPDVSPKSAQTQLCLPDE

SEQ ID NO: 220132 - protein, 145 aa, Glycine max
  Clone ID: PAT_MRT3847_40808C.1.pep
MARGPKKHLKRLAAPKKWMLDKLGGVFAPRPMCGPHKLRESLPLILFLRNRLKYAQSYNEARMICKQRLIKVDGKVRTEMRFPCGIMDVISIEKTNETFRLLYDVKGRFVIHRIQSREGQYKLCKVKKQAVGDKQVPYIVTHDAR

SEQ ID NO: 220133 - protein, 77 aa, Glycine max
  unsure (1)..(77): unsure at all Xaa locations
  Clone ID: PAT_MRT3847_40809C.1.pep
AVFPAEACGAVEVLACMVNMYPVTXLQPESKTPGVVIEVVXREYVQYXDAPTQVFXREACDDSSARFCQSEYQKGVG

SEQ ID NO: 220134 - protein, 63 aa, Glycine max
  unsure (1)..(63): unsure at all Xaa locations
  Clone ID: PAT_MRT3847_4080C.1.pep
TWIXXXXRXSIEXRXHQXRXSTFLIDXDXXXSSGXCDXXXXLXXXXGTHXXMNXXPXXIXXDG

SEQ ID NO: 220135 - protein, 42 aa, Glycine max
  Clone ID: PAT_MRT3847_40810C.1.pep
ELNLDDNIEEVLRRIHADVSLNHLVRPPLHSHSHHIMLPSVF

SEQ ID NO: 220136 - protein, 132 aa, Glycine max
  Clone ID: PAT_MRT3847_40811C.1.pep
HLSIENISPIGAKSQTHLLQQKSNLQLALLLPSIHILKMTTTVADSFKNWTSLAITISILAKLRDNLCDLFLVFLRQSFSQLQSNPHLLTLLLPIFRVSRHNPGLHTQHLESQISGHQIGALIPVITLANPG

SEQ ID NO: 220137 - protein, 65 aa, Glycine max
  Clone ID: PAT_MRT3847_40812C.1.pep
SGQGSGARIYQRKEAEEGQFDPMGNKIVKVEKAQKARAAEVRKKNKERMARRKQGEEVPTNQDGL

SEQ ID NO: 220138 - protein, 92 aa, Glycine max
  Clone ID: PAT_MRT3847_40813C.1.pep
AGAPHLLLCSHHPRSTHGCFYRRIRFVKRSICRTTHHFISALLTINFPNGHNLSASVLYRRFNPRRRFSILNSNIRCHYLSNILSTGVASVF

SEQ ID NO: 220139 - protein, 72 aa, Glycine max
  Clone ID: PAT_MRT3847_40814C.1.pep
NSARGERPPFLFFFFFFFFFFFLCFFFFFFFFSREGLKSARERRLPRKTTWFWEPGISPTPVFQFPVNYIPN

SEQ ID NO: 220140 - protein, 40 aa, Glycine max
  Clone ID: PAT_MRT3847_40815C.1.pep
SSRPWGPQAFKQWLYPNKIGRGVQVTLRKLWKEPGYKRFE

SEQ ID NO: 220141 - protein, 61 aa, Glycine max
  Clone ID: PAT_MRT3847_40816C.1.pep
AGFHGDETAPIFGYLGAAAALQFSWMGAVYGTAKSAVGDATMVAMIPELDMKSIIPLAMDA

SEQ ID NO: 220142 - protein, 68 aa, Glycine max
  Clone ID: PAT_MRT3847_40817C.1.pep
AYPTDQRCHQDDQHHRSTRSTLTINVTQMGVCTIHNNPCTCDHNSWGFCWDVWYNDYHGTLFKADYPP

SEQ ID NO: 220143 - protein, 126 aa, Glycine max
  Clone ID: PAT_MRT3847_40818C.1.pep
PPGRALVSFWGAVKTYVGAPQGAPPWVFPPKFFPPSPYIKRMWLLLYSPPWARPVNFLGPLGPDVILVIRGPVLLGGFLRALGHNVYTRKRAPPPSLAPTGSRKEFSVRGEVERARFCIKTRLVWF

SEQ ID NO: 220144 - protein, 155 aa, Glycine max
  unsure (1)..(155): unsure at all Xaa locations
  Clone ID: PAT_MRT3847_40819C.1.pep
VFLLVACSTRIQHTYRYLFFFFFFCLESQTNTVSRSRGHTIMEVGPDGVAIITIVNPPVNSLSYDVLRSFKENFDQALQRDDVKAIVVTGAKGRFSGGFDISAFGAQKPEERPKPGWLSVEIITDTIEAARKPLVAAIDGLALGGSLXIAMACNA

SEQ ID NO: 220145 - protein, 60 aa, Glycine max
  Clone ID: PAT_MRT3847_4081C.1.pep
LRAVKVGVRLQGCYAWSFSASFEWASGFSVRFGFIYVDVVTSLKRYPRFSAFWLQKFLLQ

SEQ ID NO: 220146 - protein, 43 aa, Glycine max
  Clone ID: PAT_MRT3847_40820C.1.pep
IIKGANSLKIVIGYGSLIFGRELIEICDIKLKVVVVLRRMDVC

SEQ ID NO: 220147 - protein, 104 aa, Glycine max
  Clone ID: PAT_MRT3847_40821C.1.pep
KNFGVLLRYNSRTGTHNLYKEFRDTSRTGAVNQLYSDMAARHRARFASVQIMDVKEIAAKDARRAATKQFHNSKIRFPLTHRVLRPSLPRFKTTFKAARPHTMF

SEQ ID NO: 220148 - protein, 104 aa, Glycine max
  Clone ID: PAT_MRT3847_40822C.1.pep
FTIANSTSCNCFSLLPSIQTKELENFGTPDFTIYNAGQFPCNRYTHYMTSSTSIDLNLARREMVILGTQYAGEMKKGLFGVMHYLMPKRQILFLHFGCNIGQRW

SEQ ID NO: 220149 - protein, 122 aa, Glycine max
  Clone ID: PAT_MRT3847_40823C.1.pep
CTKVDNWVGDRCIRPTPEELENFGTPDFTIYNAGQFPCNRYTHYMTSSTSIDLNLARREMVILGTQYAGEMKKGLFSVMHYLMPKRQILSLHSGCNMGKDGDVALFFGLSGIVSADHRLKSV

SEQ ID NO: 220150 - protein, 54 aa, Glycine max
  Clone ID: PAT_MRT3847_40824C.1.pep
SPAQTHHHPLKRCDLDTSIIDHTHLSQKTLIHHDHTYIPTSTNGPHKPNVLQTY

SEQ ID NO: 220151 - protein, 44 aa, Glycine max
  Clone ID: PAT_MRT3847_40825C.1.pep
RTRYQAKQNKLVIIEKNIQATLICRTSSQLYLISKTFDLYIKTK

SEQ ID NO: 220152 - protein, 80 aa, Glycine max
  Clone ID: PAT_MRT3847_40826C.1.pep
RTFYLGWNNISSLKSGIDSILSQQPFLLLNIFFASDSLTHLSLPVLLMRERRIPSCHSKFRASGSSFPREIATLVYFRSS

SEQ ID NO: 220153 - protein, 119 aa, Glycine max
  Clone ID: PAT_MRT3847_40827C.1.pep
GFSGLSMSRAFCSSWVQKKGFISGPGGPPRDITPQAPFFLLPPQGGWGGISHPKPGGIVFFTPAKTHFFQRFVEFSKGARKPQKRGLSKEENSPNCFFFPFSPSLGPGAPLEEKNPFFC

SEQ ID NO: 220154 - protein, 66 aa, Glycine max
  Clone ID: PAT_MRT3847_40828C.1.pep
KEHEDSAQWSFRHDGVYQALHLHIGVICCSQANEKPSAIQPLGHQQGSVILIGHSLLPCPVQYSFV

SEQ ID NO: 220155 - protein, 63 aa, Glycine max
  Clone ID: PAT_MRT3847_40829C.1.pep
QWHSRVSHSLATLLPSSANSKRSYLPVPTPLKATKFGGAANLADKSAGLTSPHPNLGWVIGSP

SEQ ID NO: 220156 - protein, 163 aa, Glycine max
  Clone ID: PAT_MRT3847_4082C.1.pep
MPPYLPLRWESTGEQWWYASPIDCAAANGHYDLVVELLHLDTNLLIKLTSLRRIRRLETVWDDEKHLENVAKCRSQVARNLMLQCETGRGHNSLIRAGYGGWLLYTAASAGDLDFVRELLGKYPALVFGEGEYGVTDILYAAARSNSCEVFELLLHSALSPPQ

SEQ ID NO: 220157 - protein, 100 aa, Glycine max
  Clone ID: PAT_MRT3847_40830C.1.pep
ASLVLFGGVLSMLEGCNLDAGSLGVLVCYLFLLLFFKISVSTGTCAFSFFYFFPSSTGSLFLSFGFFFFSGPFYIHVLEFYVPASSTFSSVGWPSPLYRL

SEQ ID NO: 220158 - protein, 305 aa, Glycine max
  unsure (1)..(305): unsure at all Xaa locations
  Clone ID: PAT_MRT3847_40831C.1.pep
MMAVARKEMDRIKGPWSPEEDEALQKLVERHGPRNWSLISRSIPGRSGKSCRLRWCNQLSPQVEHRAFTPEEDETIIRAHARFGNKWATIARLLSGRTDNAIKNHWNSTLKRKCASFMTADEAAAGGFSPRPLKRSFSAGTAVPPPGSPSGSDVSESSAAPGVXLSLSLPSQVFRPVPVRPVVETASSQDDADADAEDAGPTTSLSLSLPGVESSEISNRTSTVPVMPVHTVAAAAPVPLPAPEVGLGALNLNAEFMAVMHEMIRKEVRSYMEQQNGMMCFQGMEMMEGFRNVSVKRIGISRVDS

SEQ ID NO: 220159 - protein, 288 aa, Glycine max
  Clone ID: PAT_MRT3847_40832C.1.pep
KFLNIGSEAKLRKTTEILNEFVFKLINTRILQMQISKGDSGSKRGDILSRFLQVKEYDPTYLRDIILNFVIAGKDTTAATLSWFMYMLCKYPEVQEKAAEEVKEATNTKRISSYNEFVYSVTDEALERMNYLHAAITETLRLYPAVPVDAKICFSDDTLPDGYSVNKGDMVSYQPYAMGRMKFIWGDDAEDFRPERWLDENGIFKPESPFKFTAFQVNNNMKCTTCTGPRVCLRVRFAYRQMKIFAAVLLGCFRFKLKDEKKNVTYKTMINLHIDEGLEIKAFNRYRD

SEQ ID NO: 220160 - protein, 295 aa, Glycine max
  Clone ID: PAT_MRT3847_40833C.1.pep
MIAVARKDMDRIKGPWSPEEDEALQKLVERHGPRNWSLISRSIPGRSGKSCRLRWCNQLSPQVEHRAFTPEEDETIIRAHARFGNKWATIARLLSGRTDNAIKNHWNSTLKRKCASFMMAGDEAVAVSPRPLKRSFSAGAAVPPPGSPSGSDFSESSAPGVVSVSPSHVFRPVPVRPIVETASSQDDADDAGPATSLSLSLPGVESAEISNRATTVPVMPVNTVAAPAPVPAEVGLGALNLSGEFMAVMHEMIRKEVRSYMEQQKNGMMCFQGMEMMEGFRNVSVKRIGISRVDS

SEQ ID NO: 220161 - protein, 65 aa, Glycine max
  Clone ID: PAT_MRT3847_40834C.1.pep
FLSLVGRSECVIFSFVLPAKFHYLVFKKKIGWSKKVWEGPPVVFGLGIAGTGTWFLLMKKFGPNA

SEQ ID NO: 220162 - protein, 58 aa, Glycine max
  Clone ID: PAT_MRT3847_40835C.1.pep
SLLYGEGEKMKNALCFCRWPEHGRLFACLSARCLSTATGSTRGSWSVRVVPVFAHHNP

SEQ ID NO: 220163 - protein, 79 aa, Glycine max
  unsure (1)..(79): unsure at all Xaa locations
  Clone ID: PAT_MRT3847_40836C.1.pep
MGTLGRAIYSVGNWIPWTGXAIPRLGYLLLGGYYVYEHLSIYRLLIDISNKGPXVGACVSVAATTFVIQDVQLILCSSI

SEQ ID NO: 220164 - protein, 179 aa, Glycine max
  Clone ID: PAT_MRT3847_40837C.1.pep
GKDYEHYANTCFKAFGDRVKHWITFNEPHNFALHGYDLGIQAPGRCSLLGHLLCKKGKSSTEPYIVAHNILLSHAAAYRSYQLHFKEQQGGQIGIALDVIWYEPITELDEDKDAAARAMDFSLGWFLDPLFFGKYPLSMEKLVAKRLPEISDTASKFLVGSLDFIGINHYTSVYTRNDR

SEQ ID NO: 220165 - protein, 72 aa, Glycine max
  Clone ID: PAT_MRT3847_40838C.1.pep
ARNSARAGGPAEPRPQDHLRHDHADSIHETTKYLRETWPEDTEDNGASPNFSHPKEWFHDRDLGPNTTIKLS

SEQ ID NO: 220166 - protein, 91 aa, Glycine max
  unsure (1)..(91): unsure at all Xaa locations
  Clone ID: PAT_MRT3847_40839C.1.pep
AXSXXSEDXPEKEDQEKPKKIDARLRXRIDPQYNEVQAQMETNXFKLXRXDXETPKGSMXDLKXXQSKIAFPXNTVGGNHXXSXLLANXXT

SEQ ID NO: 220167 - protein, 63 aa, Glycine max
  Clone ID: PAT_MRT3847_4083C.1.pep
PTRAEDKEDHKALFLISPNIHGLVVSYFFKCYVSKCFFSYPITRFAIIKGGHYSFYHMFIREV

SEQ ID NO: 220168 - protein, 44 aa, Glycine max
  Clone ID: PAT_MRT3847_40840C.1.pep
GFGWNHVNKTSITVRQKLAPLLKLFAGSPPNLGVRGRIPSYTVR

SEQ ID NO: 220169 - protein, 118 aa, Glycine max
  Clone ID: PAT_MRT3847_40841C.1.pep
TDEDTHHGVHPPRFVAGVLHYDDHKDHVIHIRHVPMLFLHHWLNTGLPPLLIALNKLRACPVSSPCETHSSGDSSLYYDTCYHAICAPQIQAVIAFLHWMGTIPGHSFIAAVHQCHAD

SEQ ID NO: 220170 - protein, 77 aa, Glycine max
  Clone ID: PAT_MRT3847_40842C.1.pep
MKMDIYEPFQQVSLWGDNFKLDGGLNSIASPMLMVDSTSVENKSEDIPQESREPSGSGADQEATNKEVNKMLRRLAQ

SEQ ID NO: 220171 - protein, 77 aa, Glycine max
  unsure (1)..(77): unsure at all Xaa locations
  Clone ID: PAT_MRT3847_40843C.1.pep
AANTAQARTHFQRFLFLRXPXNCSLYHKRDVAHTPLLFISPKPIPLFILCHPTIFINICANNFNLLLFYTSKHTTPS

SEQ ID NO: 220172 - protein, 56 aa, Glycine max
  Clone ID: PAT_MRT3847_40844C.1.pep
RSIAINLTEVGGIGDPSSEGKHSEGLKSTYVGQGKTLVTVRYRMLTTYQRLHSQEL

SEQ ID NO: 220173 - protein, 61 aa, Glycine max
  unsure (1)..(61): unsure at all Xaa locations
  Clone ID: PAT_MRT3847_40845C.1.pep
ALEPLGWMYVHCVEKMIVRGTYDXSIKQSYLTVFCKYVRVVTARPSHPSTPRLLLSLHLIS

SEQ ID NO: 220174 - protein, 73 aa, Glycine max
  unsure (1)..(73): unsure at all Xaa locations
  Clone ID: PAT_MRT3847_40846C.1.pep
TISMWLVIEFGQLQRGEGGXVFFFLLTMILIRVVLVETTKKKIISEHTQDEYSLPNIICFILKDQMGFEIWTN

SEQ ID NO: 220175 - protein, 82 aa, Glycine max
  Clone ID: PAT_MRT3847_40847C.1.pep
SEAITSPSWTENGRTTSNSFALPESDDRPPRKKFNTSTSSTKECIDSENFPSFIGDPIPDDEAQKRWGWRYELKVVDLILSV

SEQ ID NO: 220176 - protein, 53 aa, Glycine max
  Clone ID: PAT_MRT3847_40849C.1.pep
WVDPSHAHRRSGFLISAFQVRIDPGLESGRSHHRRQLRSPRRRPVDGDLFSPD

SEQ ID NO: 220177 - protein, 331 aa, Glycine max
  Clone ID: PAT_MRT3847_4084C.1.pep
MNMVFSLSMAPSTLISSADADGFPSFLPRELHTIQDPFARKFALRIQRLPVPVRFSENPIMSSCVKPLVQTKETPVVLLHGFDSSCLEWRYVLPLLEESGIETWAIDILGWGFSDLEKLPPCDVVSKRDHFYQFWKSYIRRPMILVGPSLGSAVAIDFAVNYPEAVKKLVLIGASVYAEGTGKLATLPRAVAYAGVNLLKSLPLRLYATYLTFTKISFSTSLDWTNVGRLHCFLPWWDDATVDFMTSGGYNVSPLIGKVKQKTLIIWGENDRIISNKFAVRLHCELPDAIIRQIPNCGHLPHLERPDSTIKLIVEFVQRESKTLSQCVAQV

SEQ ID NO: 220178 - protein, 67 aa, Glycine max
  Clone ID: PAT_MRT3847_40850C.1.pep
NHIRRGEADIMVVGGTEAAIMPSGLEGFIACRALSHRNEGPKKASRPWDKDRDGFVMGEGSGVLVEP

SEQ ID NO: 220179 - protein, 64 aa, Glycine max
  Clone ID: PAT_MRT3847_40851C.1.pep
LRGGQGWGHFEGFGSGGGIGRGFGNQGTTGGKHFQVKRKTKPNPRPPKEEHRPTTTNNHTLEPT

SEQ ID NO: 220180 - protein, 50 aa, Glycine max
  Clone ID: PAT_MRT3847_40852C.1.pep
HIYKFSQVYVYILLFSSIRGASHGAPFSQPERSLELIMYVLYRGPLPQEF

SEQ ID NO: 220181 - protein, 85 aa, Glycine max
  Clone ID: PAT_MRT3847_40853C.1.pep
HIHWSYSHYVIDLCPPQRPICDTTGDKRVGPLLIGVQRYKTNLETLLTSSIIPSLYVEFISSWTLKLSLIARGQDAVARRSAILT

SEQ ID NO: 220182 - protein, 181 aa, Glycine max
  unsure (1)..(181): unsure at all Xaa locations
  Clone ID: PAT_MRT3847_40854C.1.pep
SYPDVEHHILPSKLFLKVPITRSCVDGIRKSMSTHYRTRPSDTLSSIANSIYGGLVSPDQLREANSIGDDPSVLDVGLNLVVPLPCTCFNESDNSLPSIYLSYVVQPIDTLAAIAARYFTTFTDLMNVNDMGTTAISDGDILVVPIPACASNFPKYASDYGLLVPNGSYTILXAGHCVQCS

SEQ ID NO: 220183 - protein, 82 aa, Glycine max
  Clone ID: PAT_MRT3847_40855C.1.pep
LLHRSIQIPTKKLYTYNSSKQVEKITISYLNSSRQRCGKHFFLINNLFNLHLVTYVKAFKKPFTNSMYYHSGLDESSVAAFC

SEQ ID NO: 220184 - protein, 83 aa, Glycine max
  unsure (1)..(83): unsure at all Xaa locations
  Clone ID: PAT_MRT3847_40856C.1.pep
MSSLNRLLWMICVGLCFLYHLTMSSCGGNCGCRSYCKFGIGRVRCKMYPDLSYXTESTTTETLAMGAAPDNAQFEDAQTGVPA

SEQ ID NO: 220185 - protein, 84 aa, Glycine max
  Clone ID: PAT_MRT3847_40857C.1.pep
QPCYKGCFPSSFLASNFDNSYNTPNSSHDFEAATSTTLDPHTQFTNHEALPSLEESYINFTRAYPSFGNTSQVDRIRDQEYHHL

SEQ ID NO: 220186 - protein, 96 aa, Glycine max
  Clone ID: PAT_MRT3847_40858C.1.pep
IFFPTKQKTPDTFKVTTLRSIVSVKGFIFIYIFFGPLWDGISSNIVLGPLQLLLLHFSIAFGASPIAFDPFIIRRRLGDSTNISHGESPTSIPSPS

SEQ ID NO: 220187 - protein, 207 aa, Glycine max
  unsure (1)..(207): unsure at all Xaa locations
  Clone ID: PAT_MRT3847_40859C.1.pep
LTLCWHFSKKPFPLFLEETGYTEENVLLREAKAGILKPAFTIIADHEMGCLLLLIRGTHSIKDTLTAVTGNVVPFHHTVVNQGGVSDLVLGYAHCGMVAAARWIAKLATPCLLEALGHYPDYKVKIVGHSLGGGTAAILTYVLRERKELSVATCVTFAPAARMTWELAESGDSFITSIINGADLVPTFSAASXDDXRSEVTASAWIN

SEQ ID NO: 220188 - protein, 105 aa, Glycine max
  unsure (1)..(105): unsure at all Xaa locations
  Clone ID: PAT_MRT3847_4085C.1.pep
MATSAIQQSAFTGQTALKQLNEVXRRTGAPGKGGPTRPGTVKRAPKSIGKGPAGPRSWGPCSKQIPSYRTGDYLGTSGGNTAELSVDPETLARNRELEVIHSRWA

SEQ ID NO: 220189 - protein, 32 aa, Glycine max
  Clone ID: PAT_MRT3847_40860C.1.pep
IKAPSLAQSRCILSYYVRLGLGVYISQQPYVF

SEQ ID NO: 220190 - protein, 283 aa, Glycine max
  unsure (1)..(283): unsure at all Xaa locations
  Clone ID: PAT_MRT3847_40861C.1.pep
ELLRKISENPDTDESNLDLSEFSSGYESESGSELDSVSQKSDLNCQDLDSKISFLGVSQRKNMRSQSLDNRIKLVDMMIERLKCLQEDELSSLATIVATYGLNAALAEVQNSKPHNPGSAIEYSSSSATNFPSRRMSSLGLGKSALDVMRKKQDEPELPSLDKFLVKHMTKLEREVWEAKKARKNETESVRDSSRKSVDETPPEMVPDLGSILVKNYSKLEKDIKEAKIKSGKETPAVPRGMPNSQKDHIEVPSLDKXLVKHVSRLEREVQEAKNRTIKETEA

SEQ ID NO: 220191 - protein, 133 aa, Glycine max
  Clone ID: PAT_MRT3847_40862C.1.pep
ALLTDRLRPKFDAEYDEVEAQMETKSLEEAVDDEGTTKGFMMDHNITELTKALAKGTIGGTILWRDLLADGLTEGSVRARGAQQRTGLIKGVITVVATDGTPVNTGIAMNCAMNRRSRGRANTDIYTDCYQDC

SEQ ID NO: 220192 - protein, 76 aa, Glycine max
  unsure (1)..(76): unsure at all Xaa locations
  Clone ID: PAT_MRT3847_40863C.1.pep
NCFTEIWYCWGDHMKWCYLKGRQLQKTKSAKKKKRPTHKPLLKQKXRAHFPDNQPLPTIRELYKRGPPRMKLKGYD

SEQ ID NO: 220193 - protein, 26 aa, Glycine max
  Clone ID: PAT_MRT3847_40864C.1.pep
IEKYIRNAVTYSEHASRKTVASMNVV

SEQ ID NO: 220194 - protein, 62 aa, Glycine max
  Clone ID: PAT_MRT3847_40865C.1.pep
MNRAAGALMKYAKKADDAPNKPARPPSALLVVKIEDKERFEMEHANNKYRLCRQKSWLRQHV

SEQ ID NO: 220195 - protein, 104 aa, Glycine max
  Clone ID: PAT_MRT3847_40866C.1.pep
ATRTGIYDLYNGLTNLFTTLADASSYASAKDITAPANAYTNWRTNLLALNHVLNNNNINYPVRSIGGRICKRSISSITISLAMANAKNNSDSTSNITSDNSGSR

SEQ ID NO: 220196 - protein, 88 aa, Glycine max
  unsure (1)..(88): unsure at all Xaa locations
  Clone ID: PAT_MRT3847_40867C.1.pep
MQETLLTLPLSHHEDIHIRAKKKKPQQHHHKPGSDNSHPTRVSRRVSPAVSPSSGGEKSLPNGDIYSGALSXNAPHGTGKYLWSDGCM

SEQ ID NO: 220197 - protein, 248 aa, Glycine max
  unsure (1)..(248): unsure at all Xaa locations
  Clone ID: PAT_MRT3847_40868C.1.pep
MARKTKSIFFTFLLCSWVVVVVAQEVAIAKSESEALGEPELEKRETLEIIIGGGGGGGYPAPSPSPSSPAYCPPPPPKPLSRLEKARRVLLKFKTLIYDPDCYTQSWNENTDTCDFNGVRCATYPNSEEKAVAGLDLNGAKLSTKDGCNLPLTGLVDSIPELTFFHVNSNNFSFTGGFPNNITTFPFFFELDLSNNKVSGQFPTQAIQNNQLVFLDLRFNQLTGPIDPKLFQXDLDVIFVNDNQFTGC

SEQ ID NO: 220198 - protein, 60 aa, Glycine max
  Clone ID: PAT_MRT3847_40869C.1.pep
PSSPPPDDHQEPLSSCKNTRRTPHEPTERAARNPTFIHPCSANIHNDNNYKTFFLGHLNG

SEQ ID NO: 220199 - protein, 63 aa, Glycine max
  unsure (1)..(63): unsure at all Xaa locations
  Clone ID: PAT_MRT3847_4086C.1.pep
YPTLVLVXWCTILSTYRIFANKFPMFCKVSCKECLSFQLLRQIHLSDTIKYLRYLVVMFGKLG

SEQ ID NO: 220200 - protein, 69 aa, Glycine max
  Clone ID: PAT_MRT3847_40870C.1.pep
YTLAVGLLEYLADTILILYHLFEYVVFIVYLYVDYNTTFLYIRDSLDTALLIEDNSKVHGSGGKWYSLW

SEQ ID NO: 220201 - protein, 74 aa, Glycine max
  Clone ID: PAT_MRT3847_40871C.1.pep
QLTDSMKWLSEIHLKHDPNYANASDPHGLKTPSLFQNHRPHGHDEKPMPPTGTYGIKIPLTEAPGAYPENPLRL

SEQ ID NO: 220202 - protein, 85 aa, Glycine max
  Clone ID: PAT_MRT3847_40872C.1.pep
VVVETADDVEKGDDGEGTWPHGVHLMSSLGSRIEVVIFQCYCKSIEREKERHETTPHSGSHFLRIRGMRLLLLKKEEWESEKETM

SEQ ID NO: 220203 - protein, 74 aa, Glycine max
  unsure (1)..(74): unsure at all Xaa locations
  Clone ID: PAT_MRT3847_40873C.1.pep
LECLDLYFLLPNRDGSLPFYFFCSSITVSSASACFHQNGFTIWCVPCHKKRKEIFLLPTPRQGRSEAALAAHXL

SEQ ID NO: 220204 - protein, 150 aa, Glycine max
  Clone ID: PAT_MRT3847_40874C.1.pep
MAKKAKGSHSASSASASSSSDKLVLRIKSNEGTKRSVRQTNSRKKLKAKQKKNKQKFDAMKPRKPPTAFFYFLEDFRKEFQEQNPDVKSMRDIGKACGEKWKTMTYEEKVQYYDIATKKREEFDSAMAEFNKKMENGEFDETDDESEFDE

SEQ ID NO: 220205 - protein, 101 aa, Glycine max
  unsure (1)..(101): unsure at all Xaa locations
  Clone ID: PAT_MRT3847_40875C.1.pep
MEWIIGLWTLMGFLLCWWFLCVRKENQNSKVKKKKGKVPKGNTGWPLLGETLEFIACGYTSNPVSFMEKRKSLYGSVFKTSILGTGVIVSAXPEVDKVITR

SEQ ID NO: 220206 - protein, 123 aa, Glycine max
  unsure (1)..(123): unsure at all Xaa locations
  Clone ID: PAT_MRT3847_40876C.1.pep
MAKKVKGSHSASSASASSRKLVLRIKSNEGIKRSVRQTNSRKKPKAKQKKNKQMFDAMKPKKPPTAFFYFLXCHLKSRWDSFYLVHFYFSREDFRKEFQEQNPDVKSMRDIGKACGEKWKTVT

SEQ ID NO: 220207 - protein, 55 aa, Glycine max
  Clone ID: PAT_MRT3847_40877C.1.pep
SSATLQCKRLPGSKGVASPDVNPAAIICPVQGSCCLLQMQKTFLTKGTHVGGPLV

SEQ ID NO: 220208 - protein, 37 aa, Glycine max
  Clone ID: PAT_MRT3847_40878C.1.pep
GKKKDKIFYKDIIWEYKAFRIFNMSTLSYMDDPIGSL

SEQ ID NO: 220209 - protein, 72 aa, Glycine max
  unsure (1)..(72): unsure at all Xaa locations
  Clone ID: PAT_MRT3847_40879C.1.pep
FXGGAXSTLXCITXXAXSPFNXXYNNFFSLHQALXSHLXSXLQSFKXNIFLFFLLIXTPSXIXHLXSYVXFX

SEQ ID NO: 220210 - protein, 390 aa, Glycine max
  Clone ID: PAT_MRT3847_4087C.1.pep
MALLTSQPKNPILHRFTTLHCPLPRLHRTVLGLGSFSHNSALSTKKLNFNPTQTKISLQNNPFTYNLAVTAKANANAAFGEGFKEEGASRHRKILLSEVEVKRERRVFFGRKWNSLDFGTAGIVLAMHLLCVFAPFHFNWPAFWVAVALYIVTGLFGITLSFHRNLSHRSFKLPKWLEYFFAYCGVLALQGNPIDWVSTHRYHHQFCDSERDPHSPTEGFWFSHMSWLFDTNSVLERCGEANNVGDLEKQSFYRFLRSTYLAHPFALGALLYAAGGFPFLVWGMGVRIVWVYHITWFVNSACHVWGNQAWNTRDLSRNNWWVALLAFGEGWHNNHHAFEYSARHGLEWWQIDMTWYVVRFLQAIGLATDVKLPTESQKQKMAFNSDSIAT

SEQ ID NO: 220211 - protein, 33 aa, Glycine max
  Clone ID: PAT_MRT3847_40880C.1.pep
FRRQSTTPTVRRRLGCRYSTCRPSYSWDMNERA

SEQ ID NO: 220212 - protein, 36 aa, Glycine max
  Clone ID: PAT_MRT3847_40881C.1.pep
KPLIEKITPVLQSEFYLKKSPKSAPSYLVIFAQLQL

SEQ ID NO: 220213 - protein, 110 aa, Glycine max
  Clone ID: PAT_MRT3847_40882C.1.pep
VMFRQPIHVGELVTFLASVNYTGTSSMEIGVKVVAENIRTQVVRHANSCFFTMVAVGDDGKPVPVPPLRPFNAEEKRRWANAQARRELRTEMEQRLRAVRTQPPAPASAG

SEQ ID NO: 220214 - protein, 56 aa, Glycine max
  Clone ID: PAT_MRT3847_40883C.1.pep
CWFQSHSLLAWSEPYRTVILGLAVEVPLPPMFLKRLTHRWTFRKFLQEGHHVLLEP

SEQ ID NO: 220215 - protein, 196 aa, Glycine max
  unsure (1)..(196): unsure at all Xaa locations
  Clone ID: PAT_MRT3847_40884C.1.pep
DNWVVELFIHANKQQLAFMVGPGILSLFCFLRELSMNLNSISKTTDDPLQRLLDFAQNDNQRLLTFHKLGCVRLSWKECDEAYCLFERAINVSHIHFAAGXGILDSIKGEKLASYDKISSYMSSDTPLGWMYDERSLYCDGDLRRQDLERATELDPTLIYAYXYRTASXMEVRNVQGALADIYRILGLKLSLECLE

SEQ ID NO: 220216 - protein, 860 aa, Glycine max
  unsure (1)..(860): unsure at all Xaa locations
  Clone ID: PAT_MRT3847_40885C.1.pep
MYSGVKGLFNRSQKVKGTVVLMRKNVLDINSITSVRGLIGTGINIIGSTIDGLTSFLGRSVCLQLISATKADGNGNGVVGKKTYLEGIITSIPTLGAGQSAFTIHFEWDADMGIPGAFLIKNYMQVELFLVSLTLEDIPNQGSMHFVCNSWVYNSKVYEKDRIFFASETYVPSETPGPLVTYREAELQALRGNGTGKRKEWDRVYDYDVYNDLGNPDSGENFARPVLGGSLTHPYPRRGRTGRKPTKKDPNSEKPGEAYIPRDENFGHLKSSDFLTYGLKSLTRSFLPALKTVFDINFTPNEFDSFEEVRALCEGGIKLPTDILSKISPLPVLKEIFRTDGESVLKFSVPDLIKVSKSAWMTDEEFAREMIAGVNPCVIRRLQEFPPQSKLDPSVYGDQTSKMTIDHLEINLEGLTVDKAIKDQRLFILDHHDTFMPFLRRIDESKSSKAYATRTILFLKDDGTLKPLAIELSLPHPGQQQLGAYSKVILPANQGVESTIWLLAKAHVIVNDSCYHQLISHWLNTHAVIEPFVIATNRNLSILHPIYKLLFPHYRDTMNINALARQSLINADGFIEKTFLGGKYAVEISSSGYKNWVFLDQALPADLIKRGMAIEDSSCPNGLRLVIEDYPYAVDGLEIWDAIKTWVQEYVSLYYATNDAIKKDHELQAWWKEVVEKGHGDLKDKPWWPKMQTLQELIQSCSTIIWIASALHAAVNFGQYPYGGFILNRPTLSRRWIPEEGTPEYDEMTKNPQKAYLRTITPKFQALVDLSVIEILSRHASDEVYLGQRDNPNWTSNPKAIEAFKKFGXKLAEIETKISERNHDPNLRNRTGPAQLPYTVLLPTSETGLTFRGIPNSISI

SEQ ID NO: 220217 - protein, 37 aa, Glycine max
  Clone ID: PAT_MRT3847_40886C.1.pep
SLHSQWIQKKTLNSQSINQISLPNIIRALYPVGIHSS

SEQ ID NO: 220218 - protein, 44 aa, Glycine max
  Clone ID: PAT_MRT3847_40887C.1.pep
GLRRISSSWSCVTISLGCKLFRMTLVSCGLVSGLISASQVCVLP

SEQ ID NO: 220219 - protein, 61 aa, Glycine max
  Clone ID: PAT_MRT3847_40888C.1.pep
KTHFFNTPITSKKSATFLNSRGPNSHPYTQNHTMHLSKQNHIKLFKKILSQSIPTFNTNQS

SEQ ID NO: 220220 - protein, 49 aa, Glycine max
  Clone ID: PAT_MRT3847_40889C.1.pep
NLGELPQSCVTQIMTYMDPPQICKLATLNCAFRGAYFNDFVWEYKLPTK

SEQ ID NO: 220221 - protein, 88 aa, Glycine max
  unsure (1)..(88): unsure at all Xaa locations
  Clone ID: PAT_MRT3847_4088C.1.pep
MDRWKTDPSQPRISNNRTSTDRPPKSTEPSSNGLSVTGTMHQEQVXPLLSLLDKEPPSXRFSGQLEYMRQFSGLERHESVLPFVHATE

SEQ ID NO: 220222 - protein, 64 aa, Glycine max
  Clone ID: PAT_MRT3847_40890C.1.pep
HEPRPFFFFFFFFFFFFFFFCIFFIFFFYFKLLICIFIFYIYIIYIYICFVFKFIFRIGDIHKK

SEQ ID NO: 220223 - protein, 118 aa, Glycine max
  Clone ID: PAT_MRT3847_40891C.1.pep
MPQKEYQIFKDRVMNRLTGEEANHSISQIMENDDSEDQTINVQAVKKGITARNRMEIKDKPQFKRKRAKGPNPLSCKKKKSEKQNIGPLKETDGDNTVKRSRKRKRSQRRKMPTETGS

SEQ ID NO: 220224 - protein, 261 aa, Glycine max
  Clone ID: PAT_MRT3847_40892C.1.pep
LRLREDDRRGNMKGGIMSGKGTLTWINGDSYEGNWLNGMMHGFGVYTWSDGGCYVGTWTFGLKDGKGTFYPRGSRLPWVQEIYLSALRKRGLLPDLRKQKQVRDVKVPENHMSSHVSSDKFAKGNLLNLEESNRRNVSLERRWSLEVSIEKVIGYDSALRFAESVPESRDGEVDAMIPILEREYMQGVLISEVVLNNMFSSMSRRARRLQKKLVKEIKRPGEAIIKGHRSYDLMLSLQLGIRYTVGKITPIPTRGVRASDF

SEQ ID NO: 220225 - protein, 167 aa, Glycine max
  unsure (1)..(167): unsure at all Xaa locations
  Clone ID: PAT_MRT3847_40893C.1.pep
AVPESVXAKIELPDSFYKLSAEEVRREAELRRKKIADSQLLIPQSLKEKQAKVSRKRYTKTIIRIQFPDGVVLQGVFAPWETTIALYEFVSSALKEPGLEFELMHPVLIQRRVIPHFPKAGENAKTIEEEDLVPSALIKFKPLETDSVVFTGLRNELLEISEPLVNG

SEQ ID NO: 220226 - protein, 523 aa, Glycine max
  unsure (1)..(523): unsure at all Xaa locations
  Clone ID: PAT_MRT3847_40894C.1.pep
MERRVVIIGAGISGLGACKYLLEFGFNPIVFEVDDGVGGLWRHTMDSTKLQNNKQMFQFMDFPWPSSVKEDNPSHKQVLDYVNSYAEHFSLIPYVKSNYKVILDYYVCXDSSEEMKSWVLCGGKGSPFCYDGELGSVAVQHTKNLAIEMXNSSLMVFALGKIMVFKMFLKMPKKNALEVLSTCLFRVYPDNFCNKLKXRILINGKRVTIIGSQKSGLDLAAECANANGVKHPCTVIQRTAHWFLPDFNFWGVIAGFLYFNRFAELLVHKPGESFLFGLVATLLSPWRWGISKLVETTLKWKLPLKKYGMAPNHSFLQDLSTCLFAVYPDNFFDKLKEGSIIMKGSQNFSFCREGVIIDGEAKPLESDIVFFATGYKGDQKIKNIFKSPLFQKYIIGQATSTVPLYRQIIHPQIPQLAIIGYAESPSNIFASEMKSLWLSHFLDGNIELPSIREMEKDVKLWEDNLKQYGGKYYWKTCIAHCGIWYHDQLCKDMKHDPRRKNGLFSELFEPYGHADYAGLTRKR

SEQ ID NO: 220227 - protein, 142 aa, Glycine max
  unsure (1)..(142): unsure at all Xaa locations
  Clone ID: PAT_MRT3847_40895C.1.pep
DLXXXXXXPXXXXXYCCTSXSXXTXVXXXSXIXXXXMXPXXXXXXVXXXXXLXXFXLXXCXXXSXTDXMXXXXXLXXXXXXXXXRXXSXXXXXXXXRSXXXHXXXXXXLXXXXXTXXXXXLXXXXSXTXQRXXXXXIXXXXX

SEQ ID NO: 220228 - protein, 79 aa, Glycine max
  Clone ID: PAT_MRT3847_40896C.1.pep
MAPTGVIFLAVLCFSALSLSHCLAEDNGLVMNFYKESCPHARDILKEQVMLFYKRHKNTDICWLRNILHDCAAQTCDAS

SEQ ID NO: 220229 - protein, 127 aa, Glycine max
  unsure (1)..(127): unsure at all Xaa locations
  Clone ID: PAT_MRT3847_40897C.1.pep
FGFCNXNNLNLNLEPCRCLPGFRRRPAGEIQDKGCVRKSTSSCIDKKDVMFLNLTNIKVGDLPDQESFDGTEAECQSLCLNNNTKCSESQCQAYSYSNSTSYDRDHSSTCKIWRRDLYTLLERYNSD

SEQ ID NO: 220230 - protein, 74 aa, Glycine max
  Clone ID: PAT_MRT3847_40898C.1.pep
VHCQVREAKRSLLNHGLGHGILKCIANHTAMGVLYPGPRFIVKLVALRDHCYTTSMDVMGSRTWRYWVLCGTKT

SEQ ID NO: 220231 - protein, 86 aa, Glycine max
  Clone ID: PAT_MRT3847_40899C.1.pep
ELVQVKKGGHIPTPNIEETMTEKELFEWLQNAVHAGAFDNFSSTATESPSPKSGNGMKSPGSSSAGASAGAGGSSSKRKKKGKKQW

SEQ ID NO: 220232 - protein, 70 aa, Glycine max
  Clone ID: PAT_MRT3847_4089C.1.pep
GSRRSRMVVKLSDNMRNVTTSMFFVRTRSSYGVQPLIHTMPMSSGGKNCRYHSWTSEIRTYAYNFDKMLV

SEQ ID NO: 220233 - protein, 152 aa, Glycine max
  Clone ID: PAT_MRT3847_408C.1.pep
KETLKQYPEPMKLLSYSSLLGTILSAIVSGIVERDINAWKIKRNKDVILIVLTALVGGVIRPNIQVWFTRMKGPLYVPLFKPFGIAFATTFAVCFFSNSLHYGSVIGTTVLGMGHYTVMYGQLRENEEETSCDESSDSLDKMVPLLQEKMEV

SEQ ID NO: 220234 - protein, 353 aa, Glycine max
  Clone ID: PAT_MRT3847_40900C.1.pep
PGRPTRSPTRPPTRPVPDRNAGIPSTSGVDSDLTSEDEVVRLLNCSDHYAALGFTRYQNIDVSILKREYRKKAMLVHPDKNMGNEKAAEAFKKLQNAYEILMDSLKRKAYDDELRREEILSVFRRFNDASRKNGRHGFFPSRFARSDADGEDPFGDSRRIACKRCGGFHVWIHTKKQKSRARWCQDCQDFHQAKDGDGWVEQSSQPFLFGLLQKVDAPSAYVCAGSRIYDATEWYICQGMRCPANTHKPSFHVNTNLMSKHNSGKGTSSGQRGGRMPTPNIEETMTEEEFFEWLQNAVQTGAFDNFSGTATESPSPKSGNGMKSPGSSSGGAGATATASGSSSKRKKKGKKQW

SEQ ID NO: 220235 - protein, 61 aa, Glycine max
  Clone ID: PAT_MRT3847_40901C.1.pep
MESGRISSEKNAIRIENPFSLKVGQVFTGFGIGCGVGIGVGRTLYLGAIPMLNQVMSATRG

SEQ ID NO: 220236 - protein, 81 aa, Glycine max
  unsure (1)..(81): unsure at all Xaa locations
  Clone ID: PAT_MRT3847_40902C.1.pep
LCWFSCPLVFCVXXXSFLXXGXVFPPPPFXCFALVXGVFRSRLLLFFFPSCLXGGRFCLXFGXSXXSLSAXXXXPPPPPPP

SEQ ID NO: 220237 - protein, 91 aa, Glycine max
  Clone ID: PAT_MRT3847_40903C.1.pep
GYSLREPAPPVSFIETGQGAPPSQFRLGHSLGTPAFPPYSLLSHFVKKGYVTTILTREQPGFCLCQAFIPPPNEKMEVPQEKGQNLVRGRK

SEQ ID NO: 220238 - protein, 54 aa, Glycine max
  Clone ID: PAT_MRT3847_40904C.1.pep
SEGGADDSAEEGDLLDDDDNEDRGDDQLELIKDDEKEAEEGEDDRDSANGEDDS

SEQ ID NO: 220239 - protein, 383 aa, Glycine max
  Clone ID: PAT_MRT3847_40905C.1.pep
EMQAYGVEPNAVTIPSLIPACGNISALMHGKEIHCFSLRRGIFDDVYVGSALIDMYAKCGRIQLARRCFDKMSALNLVSWNAVMKGYAMHGKAKETMEMFHMMLQSGQKPDLVTFTCVLSACAQNGLTEEGWRCYNSMSEEHGIEPKMEHYACLVTLLSRVGKLEEAYSIIKEMPFEPDACVWGALLSSCRVHNNLSLGEIAAEKLFFLEPTNPGNYILLSNIYASKGLWDEENRIREVMKSKGLRKNPGYSWIEVGHKVHMLLAGDQSHPQMKDILEKLDKLNMQMKKSGYLPKTNFVLQDVEEQDKEQILCGHSEKLAVVLGLLNTSPGQPLQVIKNLRICDDCHAVIKVISRLEGREIYVRDTNRFHHFKDGVCSCGDFW

SEQ ID NO: 220240 - protein, 50 aa, Glycine max
  Clone ID: PAT_MRT3847_40906C.1.pep
LCPRSVDSAGNLVVAHVVHPTLIPLFVGFIIVFGILGTLVVGLATLRLHI

SEQ ID NO: 220241 - protein, 58 aa, Glycine max
  Clone ID: PAT_MRT3847_40907C.1.pep
LIVADADEMLSHGNNDHSYYILQRPPSKIHVGVYSATMPDSPLDITRMSMNQPVRILL

SEQ ID NO: 220242 - protein, 123 aa, Glycine max
  Clone ID: PAT_MRT3847_40908C.1.pep
MAPSRKSRSVNKRFSTVREAASSKDKITENASKNRLKKRKLADMLGPQWNKEELEHFYEAYRKYGKDWKKVALAVHNRSVEMVEALYTMNRAYLSLPEGTASVVGLIAMMTDHYSVLGGSDSG

SEQ ID NO: 220243 - protein, 92 aa, Glycine max
  Clone ID: PAT_MRT3847_40909C.1.pep
KNMCVKKNKCFSKDQSALLLKKTLFSTKNTLLPHPKAMRKPPPFVIEPTNNSYYALPPPWVTTGILGRPPKSPPLPLCGAVLQIGRNIRTWR

SEQ ID NO: 220244 - protein, 90 aa, Glycine max
  Clone ID: PAT_MRT3847_4090C.1.pep
KKVSRKEEKTFKERMPSMEIGGEKDQFNKYACACAVVASMISIIFGYGKIFNSILLFTSPCCSLYIIQFLLFCSLCKKKKNKIYMVHLLY

SEQ ID NO: 220245 - protein, 58 aa, Glycine max
  unsure (1)..(58): unsure at all Xaa locations
  Clone ID: PAT_MRT3847_40910C.1.pep
MGIDSEYVISDKAYAKVGMLGNPSHVYSGKPIAXTVANSLATVTLGPSTQLFFKPNPF

SEQ ID NO: 220246 - protein, 56 aa, Glycine max
  Clone ID: PAT_MRT3847_40911C.1.pep
SSYVQSTMSSKSINIQNALCYTTRPAPRCNNSNSSSSGTQLPTIQKVFSRRYEKKN

SEQ ID NO: 220247 - protein, 48 aa, Glycine max
  Clone ID: PAT_MRT3847_40912C.1.pep
VTHTTHIFTCCWVNTNCLGYFRNYLKALISNRCRLMYLGTQVFANLGI

SEQ ID NO: 220248 - protein, 39 aa, Glycine max
  Clone ID: PAT_MRT3847_40913C.1.pep
FFPPPCSYNNGLSYFLHRVKMQPLTQVLSRTLYCSKHDV

SEQ ID NO: 220249 - protein, 44 aa, Glycine max
  unsure (1)..(44): unsure at all Xaa locations
  Clone ID: PAT_MRT3847_40914C.1.pep
TSGKKKTAPQPPPKKKEVKXKPSGDRLVWFPXAXPPXWLDXSMI

SEQ ID NO: 220250 - protein, 139 aa, Glycine max
  unsure (1)..(139): unsure at all Xaa locations
  Clone ID: PAT_MRT3847_40915C.1.pep
HXEXXPXXXXEXXXXXRAXRXXRPXXTXXXXRSXDXXXXXXMHXXXSRXXXXXXXXXXXXXXXXSXCSXXXAXXXRXGTXXXWQXXVXXXXXXXXXXXXXXXXXXLAXXLRXXXXTCTXXXXXRXRXXXAXXXXXXXXT

SEQ ID NO: 220251 - protein, 59 aa, Glycine max
  Clone ID: PAT_MRT3847_40916C.1.pep
GKRSTCFSLSVQAPRLGPSDMGAPLWWPTGGCYNEKVRIGSGIKSHRWSSNGSGRDYLF

SEQ ID NO: 220252 - protein, 55 aa, Glycine max
  Clone ID: PAT_MRT3847_40917C.1.pep
EQQAQRRVLSIFTSGRDLIMRCVLSIFFNILLTLRFYHIYYIYVHSHAVSLCVKT

SEQ ID NO: 220253 - protein, 97 aa, Glycine max
  Clone ID: PAT_MRT3847_40918C.1.pep
LVTGVFALIRAACLCMFCLRLVLGVALVLPVSLLQEAGLCIVSPWCYSCAFTWLSRARRFGSCIPGALFVSFFESVHAPGLAWHWLVFVGRWCRLDS

SEQ ID NO: 220254 - protein, 105 aa, Glycine max
  Clone ID: PAT_MRT3847_40919C.1.pep
ILVTEHSPQRQRLSRKLKLFIYLSEITLIIHIILRRICAVIEFGINSMYTVTNVELISFIEVEHLLLVPPAVFVLASCAILSCLIMMQSFQLVVRGCVQGSVHHV

SEQ ID NO: 220255 - protein, 618 aa, Glycine max
  unsure (1)..(618): unsure at all Xaa locations
  Clone ID: PAT_MRT3847_4091C.1.pep
MDSSKKGALMSNESAKDLSVMHQYKKNQPKLSSTPRKRRDQSHWLICRGNNSCQTVHARTKLMNTLIGKGKPHEAHXVFNNLTEEGHKPTLITYTXTLVAALTRQKRFDCAASVRAKVADNGMKPDSILLNAMINAFSESGKVDEAMKIFQKMKEYGCKPTTSTYNTLIKGFGIAGRPYESMKLLEMMGQDENVKPNDRTYNIFIQAWCTKKKLEEAWNVLHKMVASGIQPDVVTYNTMARAYAQNGETDKAERLILKMPYNKVKPNERTCGIIISGYCKEGNMPEALRFLYRMKELGVHPNPVVFNSLIKGYLDTTDTNGVDEALTLMEEFGIKPDVVTFSTIMNAWSSAGLMENCEEIFNDMVKAGIEPDIHAYSILAKGYVRAGQPRKAEALLTSMSKYGVQPNVVIFTTIISGWCAAGKMDRAFRLCEKMHEMGTSPNLKTYETLIWGYGEAKQPWKAEELLTTMEERGVVPEMSTMQLVADAWRAIGLFKEANRILNGSEEESELDQEFDSDKIQVQSLESIYKKQKLSASPSNLLQIPDVVVTHPTRTTNGNIRCRMVVKLSDNMRNVTTSMFFVRTRSSYGVQPLIVSRQQIQNQVVRPFLDCCRVVSILC

SEQ ID NO: 220256 - protein, 69 aa, Glycine max
  Clone ID: PAT_MRT3847_40920C.1.pep
WHPALPAPACWGRLGDIELRRAFRLPSLSSSAITNFERAPMQVHLALHLGCAPQLAERVGRPGNSGPGT

SEQ ID NO: 220257 - protein, 88 aa, Glycine max
  unsure (1)..(88): unsure at all Xaa locations
  Clone ID: PAT_MRT3847_40921C.1.pep
MPLSQRSGGRHLEVPPKKRQNXWQQFQSTKGKAKKIGFFSGKNRESIFKSPDDPQGKVGVTGTGKGLTKFPKREKHFHLKDGSVANHE

SEQ ID NO: 220258 - protein, 80 aa, Glycine max
  Clone ID: PAT_MRT3847_40922C.1.pep
LSPLYYVCTVITGITQSSCCNVSVFSSLNVFLHLHACKSSLEGPLFSGGGCIYSDALIIDNLFEKPQCCRCPQLQACLPQ

SEQ ID NO: 220259 - protein, 46 aa, Glycine max
  Clone ID: PAT_MRT3847_40923C.1.pep
IIKVWGPYSIPYKEKKVPNHFILNIPNLVIDIYSRPKNKSLLLLNL

SEQ ID NO: 220260 - protein, 77 aa, Glycine max
  Clone ID: PAT_MRT3847_40924C.1.pep
IKHPFYYNFINLHYVQEQRVYFPSLLQMPDPNPSLLQHCIQKSLWPIMHFSGPQSCATVAGPEVRTNATNIIPKRRA

SEQ ID NO: 220261 - protein, 111 aa, Glycine max
  unsure (1)..(111): unsure at all Xaa locations
  Clone ID: PAT_MRT3847_40925C.1.pep
HASGTLHSRVKHIKHCGYMGASGMQFMQHKIQGHLTAVLISDEAADGDGKSDRLEAGDPAFAGQIARDRQRMVYKAIXYELETVANAEDHMTTRHCCSSKRVVVKDHDNIH

SEQ ID NO: 220262 - protein, 57 aa, Glycine max
  Clone ID: PAT_MRT3847_40926C.1.pep
LFPGSTDASGHAFAHASESLSLASTNLNRGASFMTAYTINVDKCSNSPTAHALSLCE

SEQ ID NO: 220263 - protein, 62 aa, Glycine max
  Clone ID: PAT_MRT3847_40927C.1.pep
KAQEATLSAFFTCPGRPKHYGEREMSPAPTLPLPSISGPSQRRQGGPTEELQDLTGSQRPLA

SEQ ID NO: 220264 - protein, 79 aa, Glycine max
  Clone ID: PAT_MRT3847_4092C.1.pep
DRKRNRKRDRSFKRTLTLMERLTSRTSSRKSAPRAATCTSTSTQSPSPAPTHTTRAKQIAPQLEPEDEGEAQGRNKSGT

SEQ ID NO: 220265 - protein, 64 aa, Glycine max
  unsure (1)..(64): unsure at all Xaa locations
  Clone ID: PAT_MRT3847_40930C.1.pep
PKKFFGNXVDSNPXXGDRKKIXXLFTNTTSEKKVGKRIIYRKKGNLPXIPFNSLPKLSNQPALV

SEQ ID NO: 220266 - protein, 60 aa, Glycine max
  Clone ID: PAT_MRT3847_40931C.1.pep
VSQSACNIIVSPDLNEVIVVLAFHSIFFLGVRFIFWELIIYLFLYLCLQLSCGSLLSSAV

SEQ ID NO: 220267 - protein, 57 aa, Glycine max
  Clone ID: PAT_MRT3847_40932C.1.pep
MIDDDMMVSVEGFDFNPDLNKMSITPRKSFKHGFETQLNQCKRMPARIRPSTSPESL

SEQ ID NO: 220268 - protein, 53 aa, Glycine max
  unsure (1)..(53): unsure at all Xaa locations
  Clone ID: PAT_MRT3847_40933C.1.pep
IQLSYIIVDLLIWWGIRGIINDFRKRKLKLASIAYFXMYSGSISHLPTGYMWS

SEQ ID NO: 220269 - protein, 78 aa, Glycine max
  Clone ID: PAT_MRT3847_40934C.1.pep
MSCCGGNCGCGSSCRVGTGCRGCRIYPDLSYTESATTDILAIGVGPVNDEFPDVEMAVVAENDGCKCSPCCSCNPCTC

SEQ ID NO: 220270 - protein, 627 aa, Glycine max
  Clone ID: PAT_MRT3847_40935C.1.pep
MGKVQVSDKEEFSQMENNDFSDSQLVHHFRGVLVAVTTGDRENYDELVGYLHPKKHLNPDEVAILVTTLKALSGAVSYIDSVHHESLLFAVSRMSLWNYGIDIMDALLELIISLAASNGKYIDWCLEMLVKNFVPPFYLLDSVRQENGIERKNKVLSRVHAALKEIADLVPLAPLRLSPIVIQKMPSVFSKETEIVMYVENMLRLESGALGETVGSTMLPALVDRLLELDVEIGWDGILQEDAKGIFEMELEDVTEFADEDENCDSMPPSELLNRKNLQGNLVVEKLDSLMVLAFLHLESCQSSGRLTEVFDTLLASFQRTVLNAYKSKFTQYVMFYACALDPEGCGVKFAMVLADMFGCDVNPPITRMSAAAYLASYLTRAKFLSAALVTNIIQSLVDWCYAYCKLRDFDMNPRAHQVFYSGCQAIMYILCFRMRSLMDIPRLKLQLLNMPMEAILKHKLSPLKVCLPTVVVEFLRQAKAAQLFMASESFVFDDMLESDLSKAFGGIDRLDMFFPFDPCLLKKSESYIRPHFVRWSKVRTTYDDDDNDELSDSGSELSDDDFIDRNTKDMIDDDMMVSVEGFDFNPDLNKMSITPRKSFKHGFETQLNQCKRMPARIRPSTSPESL

SEQ ID NO: 220271 - protein, 115 aa, Glycine max
  Clone ID: PAT_MRT3847_40936C.1.pep
MGRVQVNNKEEFSQMENDDFSDSQLVRHFRGVLVAVTTGDRENYDELVGYLHPKKNLNPDEVAILVTTLKALSGAVSYIDSVHHESLLFAVSRMSLWNYGIDIMDALLELIISLG

SEQ ID NO: 220272 - protein, 72 aa, Glycine max
  Clone ID: PAT_MRT3847_40937C.1.pep
KKSILKKKKRRPGGAKKKAPSRGGPPLSFFNYRPKEGPFQTASWGAPNLRRGVSVLSPQKSNNLKKGGFFWV

SEQ ID NO: 220273 - protein, 62 aa, Glycine max
  Clone ID: PAT_MRT3847_40938C.1.pep
MSDMPRNRVMKFNVLVFFVATTVVAWHFHAYYMFPLRMNTDYGARTAHVKCSSWTLAVVAHI

SEQ ID NO: 220274 - protein, 70 aa, Glycine max
  unsure (1)..(70): unsure at all Xaa locations
  Clone ID: PAT_MRT3847_40939C.1.pep
EDIISIRTRKYTISNNWXYKPDRVKYXKPFSTQTPSYLKEEFPRNYEXNTTDLSTNPESFTKNRAREIIH

SEQ ID NO: 220275 - protein, 195 aa, Glycine max
  Clone ID: PAT_MRT3847_4093C.1.pep
SLKKKKLVLSYAQSNDGWSHVKTKDGVDVSKRKTDDSSHILVRGQGLVPGTVDSILDKISGDEYQKVIDPMLTSFKLVEQLEDCYKIVYQTNKMPSPLTDRDFVTFQHKQIVSKDLALTCATSTTHPSVPVDKNYVRGEVLLGGYVIERVDDTQCKVTYVVQVSLKGSVPTFVTNSASVDQGLTVLNLRKAMESA

SEQ ID NO: 220276 - protein, 64 aa, Glycine max
  Clone ID: PAT_MRT3847_40940C.1.pep
RRPNYLSGNPNDSEYVSSTDIGNVIQTLMFSNDRMISVYLSSAEYVVVLFIIIFFTWTVTCHKY

SEQ ID NO: 220277 - protein, 71 aa, Glycine max
  Clone ID: PAT_MRT3847_40941C.1.pep
MEVHHLQGVVVDKSTDFFPVEHPMEPPDEDRPVKCPMPESSVINDERMHEKRFAESSKKRVETTRAVVNGE

SEQ ID NO: 220278 - protein, 124 aa, Glycine max
  Clone ID: PAT_MRT3847_40942C.1.pep
SLSSATIKSVPEAKKKMSIRTNRFKAVDRVLKDLERVEKEGKLNDLKSELNKIKEVFLKVKENEEELHNFIRRRTCKLLRTIVTTLVLNPNVSSHLSCSFLKMLFSREGKSLSGGISLIIIFRI

SEQ ID NO: 220279 - protein, 43 aa, Glycine max
  Clone ID: PAT_MRT3847_40943C.1.pep
FFCMPHQSCIGSSVQACDTNEISITILLHNGWLTSLPQHSRLH

SEQ ID NO: 220280 - protein, 73 aa, Glycine max
  Clone ID: PAT_MRT3847_40944C.1.pep
LLLVAIQTYWISPRRPAVGEEAAPGAPELLAIYPSLPYGMRIMSMSPKDHDPHQTPPLIAPTLLQMPPGSCHP

SEQ ID NO: 220281 - protein, 101 aa, Glycine max
  unsure (1)..(101): unsure at all Xaa locations
  Clone ID: PAT_MRT3847_40945C.1.pep
KPLRRXSXEAFKSSSTIRRXFECHQXNXSPAXCKSXLLLXPTVDCLRXXLLLLLEASXHKLLHXPNKEXXXXLMVXXNEVFPAQXPXXTQXEDXXGXMAXS

SEQ ID NO: 220282 - protein, 133 aa, Glycine max
  Clone ID: PAT_MRT3847_40946C.1.pep
MWCSFLAPGSCSCLCWVWACWGEGHCCQRGTDFLMVLPKVNVGDTVAMLPKSRRALTIQEIAALARSSLHGISQVVKDHVTKPTAMAQGRVAHLIEWKGWSKPSDSPAALESAFSSYSDLSEGEQEARFAAGV

SEQ ID NO: 220283 - protein, 155 aa, Glycine max
  unsure (1)..(155): unsure at all Xaa locations
  Clone ID: PAT_MRT3847_40947C.1.pep
MREEYCTQPYPYICKEVVSGFKPMTNKSPRHNFTAAPGSPSADFKNIAYKFVNEWRAQEPRFHSIALQQYILLCAQEQEGGLRDKPGKRRDHYHTCYCLSGLSLCQYSWSKHPDSPPLPNLVLGPYSNLLEPIHXLFNVVLGRYREAHEFFFTES

SEQ ID NO: 220284 - protein, 56 aa, Glycine max
  Clone ID: PAT_MRT3847_40948C.1.pep
HQGLISPPQLPTTGTRSLSRAMPIRSRWLTPTRLRPPAQPTIPATRVLLDRIYGTS

SEQ ID NO: 220285 - protein, 220 aa, Glycine max
  unsure (1)..(220): unsure at all Xaa locations
  Clone ID: PAT_MRT3847_40949C.1.pep
MDPATSHPSDSDWPIAIRKGTRSSRNPHPIYNFLSYHRLSPSYSSFVFSLSSHSVPSNIHEALSHPGWRQAMIDEMQALEHSGTWELVSLPPGKKAVGCRWVYTVKVGPNGEIDRLKARLVAKGYTQVYGLDYCDTFSPVAKITTVRLFLAMAAMRHWPLHQLDIKNAFLHGDLEEEIYMEQPPGFVAQGEYGLVCKLRRSLYGLKQSPXAWVDRGNSGP

SEQ ID NO: 220286 - protein, 134 aa, Glycine max
  unsure (1)..(134): unsure at all Xaa locations
  Clone ID: PAT_MRT3847_4094C.1.pep
LTRPVYVNGAANRACIKNWIIEDTLVDTPDHLINLRISVYLGAFHGGINSGVFNNVSLEDYIVRDSCYHRCYMVLGQIXVIHDEIHEDVQTAIQVAIHLAFYDSXDDTMDSVMERLREWVVDNNIAIKVTLRLV

SEQ ID NO: 220287 - protein, 33 aa, Glycine max
  unsure (1)..(33): unsure at all Xaa locations
  Clone ID: PAT_MRT3847_40950C.1.pep
VKLLNNVPYGYCARPANPLFFVGHYSCLFSRXN

SEQ ID NO: 220288 - protein, 76 aa, Glycine max
  unsure (1)..(76): unsure at all Xaa locations
  Clone ID: PAT_MRT3847_40951C.1.pep
GARHXTTHKXILAXLMCVXXPMTNTXRXPSLXXXXXLXLXGFCTCLXXYXIXHXLIQYXXWSRQAXCNNXXRNVCX

SEQ ID NO: 220289 - protein, 398 aa, Glycine max
  Clone ID: PAT_MRT3847_40952C.1.pep
MDVAVTAVRSPLIVLGSPVNGSASARLGSTFGFSRKLCLNSVFIPKQVRRRGFVVRAASSSPEWDDAKIAPLQLESPIGQFLSQILKDHPHLVPAAVDQQLHQLQTDRDAHLQNQQQPSSPTDLVLYRRIAEVKANERRKALEEILYALVVQKFMDANISLIPSVTPDLSGKVDLWPNEDGKLEQLHSAEAYEMIQNHLALILGNRLGDSTSVAQISKIRVGQVYAASIMYGYFLKRVVQRFQLEKTMKILPNGAEENSIHRTVVDDSRISGGDGRSHVMSHPEVSAWPGGDVSPGGFGYGIKATRLRNYVMSFDGDTLQRYAAIRSKEAVSIIEKHTEALFGRPEIVVTPEGAVSKDENIKISFGGLKKLVLEAVTFGSFLWDVESYVDSRYHFVFN

SEQ ID NO: 220290 - protein, 114 aa, Glycine max
  Clone ID: PAT_MRT3847_40953C.1.pep
ILMVKGSTRSESAPANHHVFPRPPFSLSAGRDFCPRRTGRYKLIWETPCPTFSKKVVRNKLNCTPPATEPVQFASPTAYASHQKHLPGPKTNVPTTQVKRQTHSIWNRKGTGKK

SEQ ID NO: 220291 - protein, 404 aa, Glycine max
  Clone ID: PAT_MRT3847_40954C.1.pep
MDVAVTAFRSPLIILRRPVNESASARFGSTFGFSRKQRFSSVCIPKHKHKQGRRRGFVVRASASSSPESDDAKIAPLQFESSIGQFLSQILKDHPHLVPAAVDQQLQQLQTDRDAHQQNEQPSASTTDLVLYRRIAEVKANERRKALEEILYALVVQKFMDANISLIPSVTPDLSGKVDLWPNEDGKLELLHSHEAYEMIQNHLALILGNRAGDLTSIAEISKFRVGQVYAASVMYGYFLRRVDQRFQLEKTMKVLPNATEKENSAHQTTMDNARPSIEEDTSQVMSHPEVSTWPGGDVRPGGFGYGVKATRLRNYVMSFDGDTLQRYATIRSKEAVSIIEKHTEALFGRPEIVVTPEGAVSKDENIKISFGGLKKLVLEAVTFGSFLWDVESYVDSRYHFVLN

SEQ ID NO: 220292 - protein, 64 aa, Glycine max
  Clone ID: PAT_MRT3847_40955C.1.pep
QAGVDAALDAFKADKAYPMKKLQEILPDMIRGSSKLFHNVETATPAYMELEAFKTLAYCNNVRD

SEQ ID NO: 220293 - protein, 48 aa, Glycine max
  unsure (1)..(48): unsure at all Xaa locations
  Clone ID: PAT_MRT3847_40956C.1.pep
HTNMDTPXVPQLNRYAIAHTHTQFLLTFFIIQYNFPLSSFNGDVNFHH

SEQ ID NO: 220294 - protein, 84 aa, Glycine max
  Clone ID: PAT_MRT3847_40957C.1.pep
TQNGTAATRPHTGTAAKRPQNGTAAKIRHPGEEYRVGFPTNDICYQCVTLHQSYRLTGHLPPLYSISFAITRFVVSCLLLNICV

SEQ ID NO: 220295 - protein, 635 aa, Glycine max
  Clone ID: PAT_MRT3847_40958C.1.pep
MSNPASKATWTPGFHRVFVDLCLGEMLKNEPGSTRITKAGWRNIVGSFYAKTGVRYDKKQFKNHYDSTRKLWKVWVKLTEDSNMKWDPETGAFGASEEDWQNYVKAIPEAAQFQSKEIQFKDKLDIIFDGGNRIEEVKRWASLKWQNDSSTTSPLCGREREKKRKNFDRDCELDSTIVVDYSPTPKASWSPAYHKMFVDLCIEETLKGNKSATHFTKEGWRNIVGSFNAKTGMRYDKKQIKNHYDSTRKLWKIWAKLTGDDNMKWDPQTNTFGASEEDWHNCIKVFRAFPEAAQFRFKELQFSDKLNVIFDGAMPTEEMITRLKRQNDASATLRGKEREKKRRNVGRDCGLKSAIMVNAIPISTIPSEQSMSSSSYTKVKATWTPTLHKIFVDLCMQETLKGNKPGTHFTKEGWKNIMESFYAKTGVNYGRLQLKNHWDSTKEQWRTWCKLIGTSYMKWDPSDQKFEASEEDWTNYLQENPEAAQFRYKELKFTDQLETIFNGTTVTGETEPAVQQRKSDDSVVTFPLHIKEPDTDNFDEKTECHCDVVASRNGVSIQKNASAVSSTEGKRNYSIGECIECLDRMEEIEQGSDLYMFALDVFLKQEYREIFLQLKTPNLRISWLQRLQSCGPPPV

SEQ ID NO: 220296 - protein, 91 aa, Glycine max
  unsure (1)..(91): unsure at all Xaa locations
  Clone ID: PAT_MRT3847_40959C.1.pep
KSRATGRSNKIVPRPSSXPYSRLVPTARVLSNMPTFMDDERNQMTCAICLTNKKDLAFGCGHMTCRDCGSRLTNCPICRQRITNRLRVFSS

SEQ ID NO: 220297 - protein, 65 aa, Glycine max
  Clone ID: PAT_MRT3847_4095C.1.pep
MVKGRTGQRVRLYVRGTVLGYQRSKSNQYETTSLVQIEGVNTKEDVAWYCGKRMAYIYKAKTKSS

SEQ ID NO: 220298 - protein, 87 aa, Glycine max
  unsure (1)..(87): unsure at all Xaa locations
  Clone ID: PAT_MRT3847_40960C.1.pep
PVPFGVLAKRAYESAKQAAHESLRRQNPDGDKVASTNGTTSAEMMXLDKAGDGGLKLFTDGNGYEGTHMAVSYIYVGKTHAAHVTLM

SEQ ID NO: 220299 - protein, 240 aa, Glycine max
  Clone ID: PAT_MRT3847_40961C.1.pep
MYGQSSYESDLALLDSIRRHLLGDSEEHKFGAPNVSSGNTPAYSRSSCFSRLYPCLSNDWGELPLKEDDSEDMLLYGVLRDAINAGWVPSLDASSPESFSSGFIPAVTVKSEPDLFPAPEPVYIPPAAQKAEPAVVPAKGKHYRGVRQRPWGKFAAEIRDPAKNGARVWLGTFETAEDAALAYDRAAYRMRGSRALLNFPLRINSGEPEPVRVTAKRASAEPCSSSESGSWVKKRKKVVG

SEQ ID NO: 220300 - protein, 150 aa, Glycine max
  Clone ID: PAT_MRT3847_40962C.1.pep
KGAFNCLESWLWDKILPLLLPQNYRLITFDWPFAGTVKDQNLYDPVKYSSVEGFADDLITLLNKMDLKAVTFVGHSMSGMIGCIASVKSPQLFKTLILVGASPSYHLILFLNFYLLVCFVTLALISWICSTSIVPYYEHDQLKEAIASIL

SEQ ID NO: 220301 - protein, 207 aa, Glycine max
  unsure (1)..(207): unsure at all Xaa locations
  Clone ID: PAT_MRT3847_40963C.1.pep
PPGGPPEGGRGGXGGPRGPGPXXGKPQGGGGAPPPRGGGAPGRGGARGGREPGEDGRPGGGGGQEKGPPRPPRTKTGEGEREEPVPGPTAPPPRPEAQERAHQGRSQPTRKGEDGPPRGXPSPPGAAEQPGPPNQGLPXTNXEVGPAGGALRGGPRGGKGAKGKTRARKIKETPGPPNRNVGAGRQTGPKPGPVGPKRGPREGKAGA

SEQ ID NO: 220302 - protein, 53 aa, Glycine max
  Clone ID: PAT_MRT3847_40964C.1.pep
RLFYPAGAYYLSSSPNNLKNIHQLSLLIHPSLTHKIKFYFFIFDLLLIHHLST

SEQ ID NO: 220303 - protein, 75 aa, Glycine max
  Clone ID: PAT_MRT3847_40965C.1.pep
ILTYIMHPLVVYRSRGDIFNQALYPYQHGPQYIEGLLFVSIWHQSCSVFSVITCKQHFLKIVHQHQLYQMLRLLH

SEQ ID NO: 220304 - protein, 463 aa, Glycine max
  Clone ID: PAT_MRT3847_40966C.1.pep
CYCYVCDSVAPCPKWVTGLLGMDHCHATDESETWRTRRKIFKLGKTAPLPSSTNYSTLSDVTNAQQNNILPFRVMSPYSMLPNQTSMSTATHTCSPVNSIPQNQSSSPITMRTCSSIHSSFQNQVSWPNNVPSIATNFTIPSGTNRGRYPESGSTLARNRYQSQSIPQHSLGNRAIQRVRQHGVSTLVPQFHSHTLFNGLGSVGVGSTMPMNHSTHDASGGFSNHVNLAQQFAGYHAATGFSNDNRTSYGQNAYVPQNLWYPNPCSQPNNLSSVSNYATAHETQVSYQSNGSQNFYAVQGNNAPSSNNVAGLSRNENVCGNVTQSGTTRQYSCQQKPHDVSLIESALKADRIEHSKQSIPYQQSSGSTNTCLGSVDDIKRWLFGDENSFLVGADDALASSSAPSGLGSVDDIKRWLFSDENTVPVGADDALASELNTPSPDLSTFDGGSFFDFESSWECRARV

SEQ ID NO: 220305 - protein, 104 aa, Glycine max
  Clone ID: PAT_MRT3847_40967C.1.pep
LILDKSYCPGEFLALSKEMVSPFDAFSTPTDPVIREDEAFSFCGRALSFLENSQSCKSFRNPWKSYKRYGSGNIWSADLSVYAILISNPVDQLNGYADLQKAFM

SEQ ID NO: 220306 - protein, 201 aa, Glycine max
  Clone ID: PAT_MRT3847_40968C.1.pep
IKWLDDKPKQSVVYVSFGSVVVLNEEQIEEIAYGLSDSESYFLWVLREETKLPKDFAKKSEKGLVIGWCSQLKVLAHEAIGCFVTHCGWNSTLEALSLGVPMVAMPNWSDQCTNAKLIEDVWKMGIRARVDEKKIVRGEVLKYCIMEIMNSEKGKEVKRNIMQWKALAARAVSEEGSSHKNIAEFVNSLFNLKQGIANYPD

SEQ ID NO: 220307 - protein, 80 aa, Glycine max
  Clone ID: PAT_MRT3847_40969C.1.pep
FCPPWGGGKLKKGGFPFVVSGRTNPGNKKCSSKNIIKCGCFCDLTLERTPPFTHFEFRVILFRGVFLRFFFLFSGESDYL

SEQ ID NO: 220308 - protein, 61 aa, Glycine max
  Clone ID: PAT_MRT3847_4096C.1.pep
KDGILVLRYEQKVEIRILLSFYRKKKTHGLTFYCKIFLLLREKNMGYLLFYHLYLAYGRIE

SEQ ID NO: 220309 - protein, 90 aa, Glycine max
  unsure (1)..(90): unsure at all Xaa locations
  Clone ID: PAT_MRT3847_40970C.1.pep
PIVVLSXARXXEXYTPSLLXLQNXPWXSNLXXKLKEQXGRXXXREGXEAXLLVAKEASDSXKRXCHXPPCLLRTXSDLXXTIGKXYXGGW

SEQ ID NO: 220310 - protein, 91 aa, Glycine max
  Clone ID: PAT_MRT3847_40971C.1.pep
MVSMSSTPHPLDPSVPAVVGGGKEEEEAVESCAAAAPLPPVGIDDDEEGPRRVRKPYTITKSRESWTDPEHDKVLEALQLFDRDWKKIEAY

SEQ ID NO: 220311 - protein, 119 aa, Glycine max
  Clone ID: PAT_MRT3847_40972C.1.pep
KGKLLSLVDQRPKRNFVFKETSSKAFVVKYASEKESNDDDSNKEDNELSLITRKIKKIGKIRTPLGSIDHTKDPCTRKRKVQSSAISARNEGTSSQNVLTLKSQWIRRRNSSIPKRKAS

SEQ ID NO: 220312 - protein, 218 aa, Glycine max
  unsure (1)..(218): unsure at all Xaa locations
  Clone ID: PAT_MRT3847_40973C.1.pep
RSYLSLVSQTNATFGGVFSYCLPTTEAGSSGSLVMGNESSVFKNANPITYTRMLSNPQLSNFYILNLTGIDVGGVALKAPLSFGNGGILIDSGTVITRLPSSVYKALKAEFLKKFTGFPSAPGFSILDTCFNLTGYDEVSIPTISLRFEGNAQLNVDATGTFYVVKEDASQVCLALASLSDAYDTAIIGNYQQRNXQRVIYDTKQSKVGFAEESCSFA

SEQ ID NO: 220313 - protein, 60 aa, Glycine max
  Clone ID: PAT_MRT3847_40974C.1.pep
DWSTALLEGWTQECIGKLHMEAELCRCNYGFQCIQLATLLMRLSAMFSRVRQAPHLLVIG

SEQ ID NO: 220314 - protein, 31 aa, Glycine max
  Clone ID: PAT_MRT3847_40975C.1.pep
AFNPLDRPFDPYHRGVASILLRSVWIIFIRN

SEQ ID NO: 220315 - protein, 83 aa, Glycine max
  Clone ID: PAT_MRT3847_40976C.1.pep
VGPRTALRAVAVEVMNRDREVNHGRARDGAEAVSEGKVSQPVHSGTTLLIHDRRCKGCYCLSEDGCSERELAKRPEEVSFHCL

SEQ ID NO: 220316 - protein, 60 aa, Glycine max
  Clone ID: PAT_MRT3847_40977C.1.pep
GIRSLALKQKTNKFSIIVSAGRAYEHNKTNSSRISSPQLYLKAIEIHLGSVFKAYIDNLA

SEQ ID NO: 220317 - protein, 53 aa, Glycine max
  unsure (1)..(53): unsure at all Xaa locations
  Clone ID: PAT_MRT3847_40978C.1.pep
LDECWTYRMKREQDRTPKHPHCDWTGPPHSYTLYSKRIVPEHTDXPDCAGDGT

SEQ ID NO: 220318 - protein, 44 aa, Glycine max
  Clone ID: PAT_MRT3847_40979C.1.pep
LLVPAITFYCFLSLIASKPPLESSFLGPFGDCNFKALGKMITFF

SEQ ID NO: 220319 - protein, 55 aa, Glycine max
  Clone ID: PAT_MRT3847_4097C.1.pep
SSKAQTPTEFLSNLQRLNLIPSKLIITILLHQIPHYIILQSLSSSNTSPIPVISI

SEQ ID NO: 220320 - protein, 135 aa, Glycine max
  Clone ID: PAT_MRT3847_40980C.1.pep
MADPQPLLLNDSEPTQFQNTRIASLDVFRGLSVFLMIFGDYAASIFPIIAHAPWNGIHLADFVMPFFLFIAGISLALVYKRRPHRTQATWKAFARALNLFALGILLQGGYFHGVTSLTFGVDIQRIRWLGILQRI

SEQ ID NO: 220321 - protein, 47 aa, Glycine max
  Clone ID: PAT_MRT3847_40981C.1.pep
TIVTWTPTYNRLQTSNTLSSILPNTYPLKITLLQNYSAYYLTNINQL

SEQ ID NO: 220322 - protein, 205 aa, Glycine max
  unsure (1)..(205): unsure at all Xaa locations
  Clone ID: PAT_MRT3847_40982C.1.pep
ILFLPFLNFFQLMIFVDYAASIFPIIAHAPWNGIHLADFVMPFFLFIAGISLALXIRPHRTQATWKAFARALNLFALGILLQGGYFHGVTSLTFGVDIQRIRWLGILQRISIGYIVAALCEIWLPAPRWKELGFVKSYYWQWFVAVILLALYSGLLYGLYVPDWQFDVSAPTSSLPPIGGGDIYMVNCSVRGDLGPACNSAGMID

SEQ ID NO: 220323 - protein, 270 aa, Glycine max
  Clone ID: PAT_MRT3847_40983C.1.pep
INVSLVAEAESALILVRHGESLWNEKNLFSGCCSVPLTNRGVEEAIEAGQRISYIPIDMIFTSALIRAQMTALLAMTRHSQKKVPIIIHDESEQATTWTQVYSEKTTKQSIPVITAWQLNERMYGELQGLNKQETAERYGKEKVHEWCRSFDIPLPKALYWIFYDTDILLGIETYEISTGIEPPLKSGKHVMVAAHGNSLRSIIMYRDRLTSQEVTSLELSTGIPLLYIYKDEKFNSRGSPVGPTEAGVYAYTQNLAIYRQQLDETSNCY

SEQ ID NO: 220324 - protein, 253 aa, Glycine max
  unsure (1)..(253): unsure at all Xaa locations
  Clone ID: PAT_MRT3847_40984C.1.pep
MSATFKYQPTGLHGPGAPRSSSRNLARFFSMRFACNSRHHKILHASVSHPSSLSISHDSSTETESTLILIRHGESLWNEKNLFTGCCDVPLTKRGVEEAIEAGKRISYIPVDMIFTSALIRAQMTAMLAMTQHHQEKVPIIIHNESERATAWTQVYSEKTTKQSIPVITAWQLNERMYGELQGLNKQETAERYGKEKVHEWRRSFDIPPPKGESLEMCSQRAVAYFKDFIEPQLXSGKHVMGAAHGNSLRAII

SEQ ID NO: 220325 - protein, 82 aa, Glycine max
  Clone ID: PAT_MRT3847_40985C.1.pep
TQKGIYCYHLTQNFILLFYNTLQIISYYFNNYFHTFQPTLFLYSYNITTKFTLFLSLHQYLNQIVFSDTSCQILNSNIFPIY

SEQ ID NO: 220326 - protein, 79 aa, Glycine max
  Clone ID: PAT_MRT3847_40986C.1.pep
LDSGHLMFERHWVITNVEELFPREYQLRKPNFWSLECDFSNLSTGVAKKYYLTGAEDKTRNYYNKTLRAQPSDGPSICS

SEQ ID NO: 220327 - protein, 85 aa, Glycine max
  Clone ID: PAT_MRT3847_40987C.1.pep
LNLPHLNMLAATRKGSIGLHIGWSVSGQHELFFEWSVSLGGMSSHVLSMIGGCIREGKSKFSSCQFHFFSLYTFHHIITKGSQSE

SEQ ID NO: 220328 - protein, 55 aa, Glycine max
  Clone ID: PAT_MRT3847_40988C.1.pep
TLKEHVIKPVIPEKYLDEKTIFHLDPYGRYVIGGPDGDAGLTVRRIIIDTYMGWC

SEQ ID NO: 220329 - protein, 82 aa, Glycine max
  Clone ID: PAT_MRT3847_40989C.1.pep
NLQAARIYMEMKGLYVHLNPTPTINHNLNNQIHLAYQPKNTHINNHSKQWWWWWKPQQQRSESEPKPTTTVTTTTYEPFLAP

SEQ ID NO: 220330 - protein, 72 aa, Glycine max
  Clone ID: PAT_MRT3847_4098C.1.pep
KGLALRQWLHLYCRRDTEVLHHWSHAIITMTGLPTHVLRILDLRLSCPSIRLRREMANVISLAHTKVIMTSH

SEQ ID NO: 220331 - protein, 101 aa, Glycine max
  Clone ID: PAT_MRT3847_40990C.1.pep
HFIFAEPLGLRRGKEVRTNHGKQCILRLIIRCHAQIQMHLFIPLKRPSFRTTSTSPNPSLGPLLTTTFISLIFSLKLMHMLHVDAQIRYASNRVVTVVQLF

SEQ ID NO: 220332 - protein, 99 aa, Glycine max
  unsure (1)..(99): unsure at all Xaa locations
  Clone ID: PAT_MRT3847_40991C.1.pep
VKALTRSQPIPGQNLTLHWTGFRKNRELSXNSVAPKDPARNLFLFKYGQGLFSQGRNKGWLGCPIRNLSXFRGLPNYAFGAGGFPFWGNPPNLSLEFEI

SEQ ID NO: 220333 - protein, 63 aa, Glycine max
  Clone ID: PAT_MRT3847_40992C.1.pep
NCSNFKNIRCSLNYIENNLNNFKNIRCSLNCIEKIVQILLLVLVLIAIVFIVIVNILLAYVKK

SEQ ID NO: 220334 - protein, 82 aa, Glycine max
  Clone ID: PAT_MRT3847_40993C.1.pep
DTTTNHPYLASGAHVGVMSLGSAGLGLLRSLLQHIFVLSRLLTGTFMHVHGPGSSTCTVRACSFGRHLLRMDNWHLSAAHRD

SEQ ID NO: 220335 - protein, 83 aa, Glycine max
  Clone ID: PAT_MRT3847_40994C.1.pep
YPVLVRWKAYQETAFIWLKDSGRCAPPLAEGVILFTQWCHQRASEVRPVSPMSHALQERLDPIRHSCGSYSSSRKKKELKSCG

SEQ ID NO: 220336 - protein, 259 aa, Glycine max
  Clone ID: PAT_MRT3847_40995C.1.pep
MNMLGLRDLVFIAPTPSQLHHHQQHQPISAEHHSNLPLPSQASLSVGLGIFPLLTVPHTNDVQVQVQDCANNNNNTNTNYWNLKMCGATEVNSTRKGVMNMEDEGSNKQMMESEEGGGEFRVCQDCGNRAKRDCSFRRCRTCCKGRGFDCSTHVKSTWVPASMRRGGGGDSSGGDGNSDAGASKRLRTLGSSKNVAASATSHSSTSNATPTKSFDTSSCQQDAGFKQSLPRHVRAPAVFRCHRVSAIGSGEDEIVYMAT

SEQ ID NO: 220337 - protein, 78 aa, Glycine max
  Clone ID: PAT_MRT3847_40996C.1.pep
LKTLFIYTTHIIKLECFTSHQISNHTQTRTPPRFIKLKSRREVKTGKKKAGVKLINIYIYIYIYIYIYIYIYIIYVNY

SEQ ID NO: 220338 - protein, 78 aa, Glycine max
  Clone ID: PAT_MRT3847_40997C.1.pep
GLFFLKGPSFRGVVEWATNRLWEGLTPIAAGAGTALPEGPVPRPNRRNPRARNRLLFRLQECRPTWSCLLDGCGRTGI

SEQ ID NO: 220339 - protein, 167 aa, Glycine max
  Clone ID: PAT_MRT3847_40998C.1.pep
KLGIRLEYGCEKTTEGPAVLEGYNDADWNTLSDDSKATNGYIFSIAGGAVSWKSKKQTILAQSTMESEMIALATASEEACWLRSLLAEIPLWERPILVVLIHCDSTGAIAKIENHYYNGKKRQIRRKHNTVRELLSIGAVRVDHVRTDDKLADPLTKGLARETVHNT

SEQ ID NO: 220340 - protein, 155 aa, Glycine max
  unsure (1)..(155): unsure at all Xaa locations
  Clone ID: PAT_MRT3847_40999C.1.pep
ECSNILLDKDFAIPFATHFNXLYKTVTGAIVNIAEKPCERVITDGQPDEHGFKLGSENLTTEALAQKSGSLXMTSGIERLXLLKTTHLGCDNHLRDSLASIADPXEWMLITQCCSLWMHGDQSXHRACHRPVYLTDEYQEVKKELVDILSVPPYG

SEQ ID NO: 220341 - protein, 83 aa, Glycine max
  Clone ID: PAT_MRT3847_4099C.1.pep
LSPQKDPLYVTILSLAGVLGHNLYEQTPLLNRVIRWAHESLSVRTSHYLLHLNQFHGPRLLRKITNKVVLVHVRKPQGVRYRG

SEQ ID NO: 220342 - protein, 248 aa, Glycine max
  Clone ID: PAT_MRT3847_409C.1.pep
TEGGPYTILVFFFFVRQPAMDHVINWISLASSLSEFQPTIDRIVNGIVSQTSCLATKINLIVEKFTGHKFSGMSNTSVENYALLIDWGSSFLHSLQHTKDLVINRGSSFLHNLQHTMNPVVNELVSLIRSLVTKINGDLLLRVAGAVGVAVATIVVVRLLWTMISAVGWLLWTVISPVVRFLWKVISPVVSLPWKVISGGVRLLWKVIKAIFGGGKGGKTMKAPGRNYRMFRKDFELNPANYFRNLRK

SEQ ID NO: 220343 - protein, 104 aa, Glycine max
  Clone ID: PAT_MRT3847_40C.1.pep
RRGNLVSLREALAFPQSLHPHLLNPNPTLLHTGYVKPAARRWLKFGTPMGWSEGALKTPLAQQAWTLNGLFQPNWEFRVTNKPFSPTRTFFWANSLKRFFDSPT

SEQ ID NO: 220344 - protein, 249 aa, Glycine max
  unsure (1)..(249): unsure at all Xaa locations
  Clone ID: PAT_MRT3847_41000C.1.pep
PGIDQAESYSDVAKKDGSISKNLIPSLKEKVPVIKRNHSISTVKTATTAGAKGDGLDSVSNAQNKLQTSVRSTAKIELPVVEPPSDLKRTIEKIVEFILKNGKQFEAVLAEQDRPHGRFPFLLPSNRYHTYYLKVLQTAEESKLLGKGHQKHNPAGRTGDNNTAVHEDRDNLSHGSMASDLPYDMDRKEKFQMIIXQSKKDGQDPIPKEQAQNTISMDAAATAAILQAATRGIKNPNLEALTKTISGSG

SEQ ID NO: 220345 - protein, 46 aa, Glycine max
  Clone ID: PAT_MRT3847_41001C.1.pep
MPSGHGKGLRRFRRRWAVANAAPACVPSGVRSRRLWLARRQLVSSS

SEQ ID NO: 220346 - protein, 72 aa, Glycine max
  Clone ID: PAT_MRT3847_41002C.1.pep
LEPRYPTITESRLRERTPLTGPRCSGVSLLLWGASWEGVIRPRYEGGWTNVQAGCSSGSKRRRRGLLRSRFG

SEQ ID NO: 220347 - protein, 80 aa, Glycine max
  Clone ID: PAT_MRT3847_41003C.1.pep
DSAGRLFYFWPFFHSLLLTDPHCRPKWSYLKNTWALVQMLAPLLTPGTTGSLRKQLLLAEDRTSWLVIIQQQPNLERPPP

SEQ ID NO: 220348 - protein, 159 aa, Glycine max
  Clone ID: PAT_MRT3847_41004C.1.pep
MKDEDGTPQSAGKGQYKLWVLGAIILLALWSMFTASLTLKWSAGNLNRDFDSATLNDFDVLEVEEREKVVRRMWDVYTQSKSGRGSGLPRFWSDAFHAAYDHLASDVQSVRDAAVSEIAKISLHSLPLHHLKSHSIVQNIMGSRKMKQAESIVNTISSD

SEQ ID NO: 220349 - protein, 119 aa, Glycine max
  Clone ID: PAT_MRT3847_41005C.1.pep
MASTSAVSMAMPVTYASQKRVVPSSDAFFKPLPLRSSKAVTASKLNGRFQVRASMKEKVVTGLTAAALTASMMVPDVAEAAVTPSLKNFLLSIAAGGVVVVAIIGAVIGVSNFDPVKRS

SEQ ID NO: 220350 - protein, 68 aa, Glycine max
  Clone ID: PAT_MRT3847_41006C.1.pep
HMLFRYLIKIFSIILFILLDIFFSLSNYSSYLIFFPTVPISPGTAEPQAKENVISMCYTLRINPSVCI

SEQ ID NO: 220351 - protein, 84 aa, Glycine max
  Clone ID: PAT_MRT3847_41007C.1.pep
KGQYSEQNFFKVKIKTGNSRVPNMEALFMHRFLIGGTITTGQFPGTLKLTNFFSSPSESGWPWAHFKSCRICPMKIKKKFGPLR

SEQ ID NO: 220352 - protein, 93 aa, Glycine max
  unsure (1)..(93): unsure at all Xaa locations
  Clone ID: PAT_MRT3847_41008C.1.pep
WYXEENTTSAQGYVKPYRGGHKPKSTPAGHNITTTEGRDKTSATTQSRKGADRDRHKRNPKQTPNAPRAAPEDKARTRSQPHHETRNNPEKQE

SEQ ID NO: 220353 - protein, 107 aa, Glycine max
  unsure (1)..(107): unsure at all Xaa locations
  Clone ID: PAT_MRT3847_41009C.1.pep
LEPQVKGIMXIMALLMLDCWNPYPGIYGMNPGYEFWAQHCASDSGSIVHICRRAWLKIVIPGFGFSEVRRCILEDKVQLLSLIRKSMVENCDKIKYIFNKIIFLTHI

SEQ ID NO: 220354 - protein, 92 aa, Glycine max
  unsure (1)..(92): unsure at all Xaa locations
  Clone ID: PAT_MRT3847_4100C.1.pep
MTSASELFHSRRHRWGRNALELRLDTELNGTDXIQGHYQLRRLRHHTERAYDRIDGRYHGTVTSESVDYEENVRSSLIGSDSDRLPVGEVLA

SEQ ID NO: 220355 - protein, 418 aa, Glycine max
  Clone ID: PAT_MRT3847_41010C.1.pep
ARAATSQIHDFVLFLAKEAMTAHDISSDGDGISQKMKEFSVTFNKVTCNEASLLQFVLDLSNVLAKASEFRFNILGYKGREAETNSPDCIDKIALPENKLVQDNSPTGPFQNGRSHILNPCSDPEIPDDGNLAPGYESNATSQKFSMEDFEELKLEKEKAVVDLSKCVENLEMTKSRLLETEQHLAEVKSQLASAQRSNSLAETQLKCMTESYRSIEARTKEFETELNHLRMKTETLENELEDEKRAHEEALAKYKELEEQLQRNESSAADNDIKTKQERDLEAAAEKLAECQETIFLLGKQLKSMHPQTEPTGPPYSKAEGFAEREPNSPNFQDQAEMDSASSAFVQRLGGESPLHFSNSLYSPSDNESNFPAISSVQNPNHRPTKSTSSSASSTPTPEKHNRGFSRFFSSKGKNGH

SEQ ID NO: 220356 - protein, 73 aa, Glycine max
  Clone ID: PAT_MRT3847_41011C.1.pep
NQLWRPLMQRATSVILVFQLCAIMGKNLPFLSLLLYLLRLQRRPWTCCSTRYPNLVNYHSKVPDDSQTPTVNT

SEQ ID NO: 220357 - protein, 137 aa, Glycine max
  unsure (1)..(137): unsure at all Xaa locations
  Clone ID: PAT_MRT3847_41012C.1.pep
VESEVKGKEKKIFALNPNPKNGYLGGRLQGEFPYQPYGSXFGFIGKVISTLNLIQKERHWHALVKSSSRTGKSLSLLWSFFAWQHHLNFNMXHFKPALEATTDPLAFXGGFVPEEFQKFPNIPQLGSTRSRRKREPP

SEQ ID NO: 220358 - protein, 85 aa, Glycine max
  Clone ID: PAT_MRT3847_41013C.1.pep
MSEEMASERFYSVSQRLQSDEAKQDIYLKVNKPLTLRFEDVVHKIKISKGKGLLCYNKEVSSEETLVLKGISGVIFPGELLVILG

SEQ ID NO: 220359 - protein, 58 aa, Glycine max
  unsure (1)..(58): unsure at all Xaa locations
  Clone ID: PAT_MRT3847_41014C.1.pep
DAILSLFSDQVRVNLXKGDMXGHTGDIEAPVGACKAVDAAGKKMLRCIEQEVVFMRVQ

SEQ ID NO: 220360 - protein, 99 aa, Glycine max
  Clone ID: PAT_MRT3847_41015C.1.pep
TFYIFFFIIIYSSFFLPKKKKKKSIGHEASSPSATGGTRASLQWPGATSNGGRRLLHAGSTSAITGSHRGKGMPTRVPSKMHNVTSRKGILPPLGETSQ

SEQ ID NO: 220361 - protein, 64 aa, Glycine max
  Clone ID: PAT_MRT3847_41016C.1.pep
HMTIGRMIAKGVMRPWDHSVTIPVLVISTILLKGLDVEMQLMAAKYKSSRGVVAWTVMRNVCTE

SEQ ID NO: 220362 - protein, 137 aa, Glycine max
  Clone ID: PAT_MRT3847_41017C.1.pep
RLFKGNFSDSRLVKFMCRIYIFHEQTITTITQRLEVLKEDLSARVTSPETGPPISHNISYTKDVEKINLFLHVSDRINLHAIRYSNLLRSKGPLICGASCREQGSSIFKCRVIRSPWSVGVAACTTDRRIYIFHEQT

SEQ ID NO: 220363 - protein, 26 aa, Glycine max
  Clone ID: PAT_MRT3847_41018C.1.pep
MIKYFVGFMGLLLPMLRHQELSIFDS

SEQ ID NO: 220364 - protein, 83 aa, Glycine max
  unsure (1)..(83): unsure at all Xaa locations
  Clone ID: PAT_MRT3847_41019C.1.pep
LSQTFLNIFSICSFFFFLSYLIMLYKKWHLTXTSFLHNXIIXXMMXLYXXVYQXVSXVSXLQXCNSAGSTLEGIPRGTEARIR

SEQ ID NO: 220365 - protein, 102 aa, Glycine max
  Clone ID: PAT_MRT3847_4101C.1.pep
KEPFFIPRENVHQLYQTGENFPKGAEGRTKGDQHPCAARTEQGGPPPWGDSPISLGHSRLPHSRNAEPRAGATINNRETRTIGIPPSPRGASQGGAASPLGA

SEQ ID NO: 220366 - protein, 142 aa, Glycine max
  Clone ID: PAT_MRT3847_41020C.1.pep
MAESDITAMKETLRAQQQLLQKLYAELDEEREASATAASEAMDMIVRLQGEKAAVKMEASHYRRMAEEKIGHAEASLEVFEELMYQKEMEITSLEYQALAYKNKLLTLGSDFNASDFEFDEDLLLSRHDQQHNGENGHASNA

SEQ ID NO: 220367 - protein, 35 aa, Glycine max
  Clone ID: PAT_MRT3847_41021C.1.pep
SSQFNKDLILVSQGWINWITPPSIKTHLNEGSASQ

SEQ ID NO: 220368 - protein, 98 aa, Glycine max
  Clone ID: PAT_MRT3847_41022C.1.pep
KFNARVFQRTIFFGLKKTHPVRPRKSTLGFLTVYPVKSGSFPPLIFPPGKFKNGRKNGPLGKSPRKLRGICLNLLKGALSNLVPGNFLFNPKLGRFRG

SEQ ID NO: 220369 - protein, 151 aa, Glycine max
  unsure (1)..(151): unsure at all Xaa locations
  Clone ID: PAT_MRT3847_41023C.1.pep
TASGGALVAKGDLGAXLPFEEGPLLQEEIINLCRNMGKGVIGATNILKSIIVHPTSTRAKVLDFAIAVPEGSDGIMLSGETAYXKFPLKAVKVMHTVTLPTETSIPSGQMPPYIGPMLKNHISEMFAYHATIMSNTFGTLTVVFTKTGFMA

SEQ ID NO: 220370 - protein, 122 aa, Glycine max
  unsure (1)..(122): unsure at all Xaa locations
  Clone ID: PAT_MRT3847_41024C.1.pep
ITRNRAIKMKDPVFYVATIWVAXQCYAHIMSTLRMNTVNGAHTTEVKCASRTLSLVAHDIISFETLPTECVCRSEEYLRGELHTSYYKAVYHEPYFHAKGLDVHPKDTCVLRIYGTALYNIP

SEQ ID NO: 220371 - protein, 87 aa, Glycine max
  Clone ID: PAT_MRT3847_41025C.1.pep
MAVIPNNVQIYLNADSKNTGYMHGMNSKKKNWHITYTVLISFVNIVKTNTPKLYSYPLHIENVPEQNPRSLPHQNIFNGVRSFAPSL

SEQ ID NO: 220372 - protein, 41 aa, Glycine max
  Clone ID: PAT_MRT3847_41026C.1.pep
PLFQFSPSPLLKCKKRRPSIPFSQTKPKHLRYLSILKGFLV

SEQ ID NO: 220373 - protein, 78 aa, Glycine max
  Clone ID: PAT_MRT3847_41027C.1.pep
GLYLKIRPPTFVFSLHFRFSKNASCIFPQSVPVSLVAFLIFLGAFKALILLFLKSKLRPSSKEMEPKKFVLDLDEGMF

SEQ ID NO: 220374 - protein, 535 aa, Glycine max
  Clone ID: PAT_MRT3847_41028C.1.pep
MGVLSSHRIQLLLFPIVVLLWSASAANSANNTFLHCLVNHSEPSHPITSAIFTPNNTSFSSVLEAYIRNLRFNTSTTRKPFLIITALHVSHIQASIICAQKHNLQMKIRSGGHDYEGVSYVAEVPFFILDMFNLRTIEVDIGTETAWVQAGATLGEVYYRIAEKSKTHAFPAGVCHTVGVGGHISGGGYGNMMRKYGLSVDNVIDAQMVDVQGRLLDRKSMGEDLFWAITGGGGASFGVVLAYKIKLVRVPEIVTVFQVGRTLEQNATDIVYNWQHVAPTIDNDLFLRVILDVVNGTRNGTKTVRARFIALFLGDSKSLVSLLNDKFPQLGLKQSDCIETSWLRSVLFWDNIDIASSLDILLERQPRSLNYLKRKSDYVKKPISIEGFEGIWKKMIELEDTLFYFNPYGGRMAEIPSTASPFPHRAGNLWKIQYQANWNKPGKEVADHYINLTRKLHKFMILFVSKNPREAFYNYKDLDLGINPNGKNSYAEGRVYGVEYFKDNFDRLVQIKTKVDPHNFFRNEQSIPTLSYRKG

SEQ ID NO: 220375 - protein, 59 aa, Glycine max
  Clone ID: PAT_MRT3847_41029C.1.pep
HYDGIGSGATTNFFMWTSGLLNKSFVGFMLCTMILFWLCKILQVERCCSLLTQMDLPFS

SEQ ID NO: 220376 - protein, 40 aa, Glycine max
  Clone ID: PAT_MRT3847_4102C.1.pep
TPLGPFFSSLHNPRNHHGGNPFLLFFSNLTDPGADPWAAP

SEQ ID NO: 220377 - protein, 322 aa, Glycine max
  Clone ID: PAT_MRT3847_41030C.1.pep
MEVSLSSTSCIPLSSKLKHKHGLFHSQIPIPTASTKTRRTKPLSIVNASRQTLSSNWLVSPHDFSASTASPWLPRFEELDATNMLLRQRIIFLGSQVDDMTADFIISQLLFLDAEDSKKDIKLFINSPGGSVTAGMGIYDAMKLCKADVSTVCLGLAASMGAFILASGTKGKRYCMPNSRVMIHQPLGTAGGKATEMSIRIREMAYHKIKINKILSRITGKPEEQIELDTDRDNFMNPWEAKEYGLVDGVIDDGKPGLVAPIGDASPPPKTRVWDQWKIEGSRKAKKNLPSEHKFLQNASKGSQGSDGDKGTVQEGETPVAV

SEQ ID NO: 220378 - protein, 63 aa, Glycine max
  Clone ID: PAT_MRT3847_41031C.1.pep
IEYNGTGLVGQQGGTVTRLSLSMGGKNQPPTLLNSRGGGSLHLFNGDACMERTKHCLLPKACH

SEQ ID NO: 220379 - protein, 43 aa, Glycine max
  Clone ID: PAT_MRT3847_41032C.1.pep
EMKLMVERCDAVIVLIFVSRLFLPMIYSFFFLVQYSLPIYKQV

SEQ ID NO: 220380 - protein, 117 aa, Glycine max
  unsure (1)..(117): unsure at all Xaa locations
  Clone ID: PAT_MRT3847_41033C.1.pep
MGRAPCCDKANVKKGPWSPEEDETLKDYIEQHGTGGNWIALPQKVGLKRGGKSCRLRWLNYLRPNIKHGQFSDAEDKIICSLFASIGSXRWSIIASQLPGRTDNDIKNYWNTKLKKK

SEQ ID NO: 220381 - protein, 173 aa, Glycine max
  unsure (1)..(173): unsure at all Xaa locations
  Clone ID: PAT_MRT3847_41034C.1.pep
MVTRRQLSVIASIVAVASAQCPDYLDYAEVPHGPYSSGRYNLSYQRPEPACRTFNSSVVEDAITRVKGDIADPDLRRLFENTYPNTLDTAIRWKGTAEGSDEELTFVITGDINAMWLRDSANQMQSYLPLLEASSSSDSIASLYRGVINLQARYLLTSPYCNSFQPXVESGIE

SEQ ID NO: 220382 - protein, 53 aa, Glycine max
  Clone ID: PAT_MRT3847_41035C.1.pep
SETTTQRDNIHILQVTISMAMLYQFKNARVFFFLCVHLFTGESAHTHTNLNYT

SEQ ID NO: 220383 - protein, 124 aa, Glycine max
  Clone ID: PAT_MRT3847_41036C.1.pep
MADRANHPSVMQKFGGQFHLASSFSEGVRARNICPSVPSYERRFTTSCYMTQNLGISVPMMSSSPLFANAPPEKKGVKNFAIDFLMRGVSAAVSKTAAAPIERVKLLIQNQDEMIQGGRLSEPS

SEQ ID NO: 220384 - protein, 59 aa, Glycine max
  Clone ID: PAT_MRT3847_41037C.1.pep
TRYFSSRVPLAVLDEYRWFPSSVLHLKISSPSSESASVRSLVSRSTLCLRICFSPGRIA

SEQ ID NO: 220385 - protein, 73 aa, Glycine max
  Clone ID: PAT_MRT3847_41038C.1.pep
KIGTEDTYITPTITFVDGTHSILFLLRNSLVFLVPMEARGSLQSCAESVGSGHVSFPQPLMPFVNFTKHLSNG

SEQ ID NO: 220386 - protein, 524 aa, Glycine max
  Clone ID: PAT_MRT3847_41039C.1.pep
MASSSSNGSSSGSKSWDIDGDLAGFGYKVRSSELQHVAENMERLENVMDIVNSSTNNNISQLASDTVFYNPSDIGSWVDTLLSEFDQTASLPYDFSDFLDLDTDQNQNHKPTLVTMEEDSGIRLVHTLMTCADSVQRGDLAFAGSLIENMQGLLAHVNTNIGIGKVAGYFIDALRRRILGQGVFQTLSSSSYPYEDNVLYHHYYEACPYLKFAHFTANQAILEAFNGHDCVHVIDFNLMQGLQWPALIQALALRPGGPPLLRLTGIGPPSSDNRDTLREIGLRLAELARSVNVRFAFRGVAAWRLEDVKPWMLQVNPNEAVAVNSIMQLHRLLASDSDPIGSGIETVLGWIRSLNPKIISVVEQEANHNQDRFLERFTEALHYYSTVFDSLEACPVEPDKALAEMYLQREICNVVSSEGPARVERHEPLAKWRERLEKAGFKPLHLGSNAYKQASMLLTLFSAEGYSVEENQGCLTLGWHSRPLIAASAWQAAPMQDRETLRFRAMSFKKRKNCLIIVVTSKQE

SEQ ID NO: 220387 - protein, 65 aa, Glycine max
  Clone ID: PAT_MRT3847_4103C.1.pep
TLAINYFHIQSYQSQASLHFYYFFQSSPYTSHNPHTSLYTFTPYFSLTITPYYNPYTISNSLQST

SEQ ID NO: 220388 - protein, 296 aa, Glycine max
  Clone ID: PAT_MRT3847_41040C.1.pep
MEYSNWAESLQTETPLPSFPQPSSSYPPTYYPSYPQNPNPNPSSSLPLNPPGVDPQTPLNPISYAAHEPVPGLVYAQSLVGDDSSSGYCLDHNWVAREAVRQFGTDPTLYAPGISLPPNGSEQLAMANPSSLWWTNTTTQPHVNGTPKKNQKKTKVVQPAFCEVCKIECTGKEVLDQHKLGKKHKKNVEKLRESLTPTQVQPSGSSKPLIGPQLPYDKGKSTSGNKSKRKKVETAEDLEKKKMKVLMGGAAASAVKICAICNVVCNSETVYNYHLAGQKHAAMQKKASGHTQSNAG

SEQ ID NO: 220389 - protein, 62 aa, Glycine max
  Clone ID: PAT_MRT3847_41041C.1.pep
SLSFRSGDRVLSSGAVRHYHCGGHNVLVGGPPHGPKFEGVCREVSLQARRISPMQGLHYVLS

SEQ ID NO: 220390 - protein, 92 aa, Glycine max
  Clone ID: PAT_MRT3847_41042C.1.pep
DTACTNKEWEKEIPKHKMHPPLFSFPFLSLLHSHPYIFLQIQKQTILISFDKKPFSLQGSSEAVCFFISFKAHLDLRCNIDHLKIDAQYVPL

SEQ ID NO: 220391 - protein, 133 aa, Glycine max
  unsure (1)..(133): unsure at all Xaa locations
  Clone ID: PAT_MRT3847_41043C.1.pep
MPPTRATTRAELWIPGCTKAMTMPCNPDPRCDAWCVEWLKRTKVSXEIIRVTGWTGTPMQDVQVTIDWFISFQECVTRTYCVLNPQKPCVINTWMGKLTLTQGTTRSEKRMPLSIGGGARAKNAIVMNMPNAD

SEQ ID NO: 220392 - protein, 77 aa, Glycine max
  Clone ID: PAT_MRT3847_41044C.1.pep
KKKGRVFPKFGVVPQPFLPPFSFEKVGQRKGPFPPLKGGGPGVFFVGTRGFPISWGKQSFFKPRFGSLVLPGQKRGF

SEQ ID NO: 220393 - protein, 49 aa, Glycine max
  unsure (1)..(49): unsure at all Xaa locations
  Clone ID: PAT_MRT3847_41045C.1.pep
DVFRAIPPRCFGHFFNLLKSKXFSLRIKXNWGPLGTPEFQQGPPRVKVA

SEQ ID NO: 220394 - protein, 156 aa, Glycine max
  Clone ID: PAT_MRT3847_41046C.1.pep
MPANQVGQQHGNQYSNISSAGAAPGSYTSCTNCGVSGHSSALCPNIRNVPGHSAGGGFANRASAGLGGGGGASVECYKCHQSGHYARDCPGFSAAPPSSYGSNSGGGGSGECFKCHQTGHWARDCPGLSAAPSSYGSANAMQGRYGVAQKQQFGGY

SEQ ID NO: 220395 - protein, 47 aa, Glycine max
  unsure (1)..(47): unsure at all Xaa locations
  Clone ID: PAT_MRT3847_41047C.1.pep
HPILIAPKYKDQMQLLKFRIQNIKKKVTLSFHPFHTNQSQLVVSLXN

SEQ ID NO: 220396 - protein, 92 aa, Glycine max
  unsure (1)..(92): unsure at all Xaa locations
  Clone ID: PAT_MRT3847_41048C.1.pep
MEEGLGHNSGSPHGPIDKSKILDIKPLRSLIPIYSMSSQAPPAGQYPSGLSPMFPFGAPQQTPTXVSDRGAATPAPLRAYKNPLGAGDSISQ

SEQ ID NO: 220397 - protein, 72 aa, Glycine max
  unsure (1)..(72): unsure at all Xaa locations
  Clone ID: PAT_MRT3847_41049C.1.pep
LNSSNALVISLYTVLSLYWGRIVVFNLQRENVALXEPDQNGLAHFEAGDTRAMEYVILLYSNDSVGFNIVDV

SEQ ID NO: 220398 - protein, 69 aa, Glycine max
  Clone ID: PAT_MRT3847_4104C.1.pep
WQGKNSMPAFFFSGDLSRFFKNWESSYGSGICFFVRWLVFLKPKKQLGPPPLLLYFAPSLEFPPPFYLA

SEQ ID NO: 220399 - protein, 148 aa, Glycine max
  Clone ID: PAT_MRT3847_41050C.1.pep
MPPTWALVPLLLLFFVHFIDVGFARCYKASTKYNPPAEETTTETTELTTPTECPAPVCPCECPTEETSETPPSTGGGGGTDDDIVTSPEGEETTTPVFGCVPGPSGPSGPPGPAGQKGPQGKCGDNASKRKREAAVPNEFMTNLEPNV

SEQ ID NO: 220400 - protein, 57 aa, Glycine max
  Clone ID: PAT_MRT3847_41051C.1.pep
WSCLTFNQSIEILILGFSLFFFFLKKLRLFCTTRKHKALGSIVCPIEGWQWIVNLGM

SEQ ID NO: 220401 - protein, 70 aa, Glycine max
  Clone ID: PAT_MRT3847_41052C.1.pep
PSVSRCYHAYPRCDNRGVISIVMHVLLLSSSLLHYIRLAWLTPGRFSNSSTNCCFNPFTHPILFVHKYCS

SEQ ID NO: 220402 - protein, 126 aa, Glycine max
  Clone ID: PAT_MRT3847_41053C.1.pep
KKKIGIKGTLGIEPKPQEHTKQQNDWVFVTAANFLRKYGLTGEYEHNIESNNATLSGHRCHHELESARMNGLVGKIEAKTGDPEVGRETEKVIVDMQEATLRMRRVIRKGGLEAGGFDDEAKLRRE

SEQ ID NO: 220403 - protein, 139 aa, Glycine max
  unsure (1)..(139): unsure at all Xaa locations
  Clone ID: PAT_MRT3847_41054C.1.pep
MDAIKKKMQAMKIEKDNAIDRADAAEEKCRQTQERLERVEEELRDTQKKMMATENELDKAQEDLTAANNLLEEKEKKVQEAEAEVASLNRRMVLLEEELDKLEERLKLATEKXEEATANCDESERVRKVMENRSLQDEE

SEQ ID NO: 220404 - protein, 107 aa, Glycine max
  Clone ID: PAT_MRT3847_41055C.1.pep
YGADFVVYRHHPARVHSEYGVLVLSDGEDKDLNGRLRVWSDVHCTTRLLGGVAKILLVLYVNRNGSSNESPLCLANYTIEEHTITRWNPEQCREKMVIHANSDNGTG

SEQ ID NO: 220405 - protein, 89 aa, Glycine max
  Clone ID: PAT_MRT3847_41056C.1.pep
LFEIIKLFDIDYIFCLKNCGIIYFSYLFYLSKFNIVKWKVRRRYLKLGPHVFQFFKHGLLYALAMTEPASQVPSATIENGQVVFHLYFI

SEQ ID NO: 220406 - protein, 67 aa, Glycine max
  Clone ID: PAT_MRT3847_41057C.1.pep
GIAVQGFFWAKPENPLINWVLTRFCPPKSPGIQRVLHFHASSCMGDIFKVKRRKKGQDPPVRAYLIV

SEQ ID NO: 220407 - protein, 69 aa, Glycine max
  Clone ID: PAT_MRT3847_41058C.1.pep
FVLKMLYYCCGYYSPKKYPRGSFTTGGGKLFKTLRIFLTPNIIDGCRLGGITKTTCAVISLDGWPYSQF

SEQ ID NO: 220408 - protein, 36 aa, Glycine max
  Clone ID: PAT_MRT3847_41059C.1.pep
LNSSCCGEDDLVILLRWLLCDKRNHWNNVLLLLNIG

SEQ ID NO: 220409 - protein, 44 aa, Glycine max
  Clone ID: PAT_MRT3847_4105C.1.pep
KCEHSDVKLIYYTIILEMPKVTAYPGLLQLGYIATGELVLLTAV

SEQ ID NO: 220410 - protein, 687 aa, Glycine max
  Clone ID: PAT_MRT3847_41060C.1.pep
VFNRRMERLIGEMKIGVNGGGWVEEAVRSMQEDETWVEGCNGNNNNGFGVGLEFGKNKVLEMIFTRSGDVSVVGICGIGGSGKTTLAREVCRDDQVRCYFKERILFLTVSQSPNVEQLRESIWVHIMGNQGLNGNYAVPQWMPQFECKVETQVLVVLDDVWSLSVLDKLVLKIPGCKFLVVSRFNFPTIFNATYHVELLGEHDALSLFCHHAFGQKSIPMGANVSLVKQVVAECGRLPLALKVIGASLRDQNEMFWLSVKSRLSQGQSIGETYETNLIDRMAISTNYLPEKIKECFLDLCSFPEDRKIPLEVLINMWVEIYDIDAAEAYAIVVELSNKNLLTLVQEARVGGMYSSCFEISVTQHDILRDLALHLSNRGSIHQHRRLVMATRKENGLLPKEWSRYEDQPFEAQIVSINTGEMTKMDWFDLDFPKAEVLIINFTSTEYFLPPFINKMPNLRALIIINHSTSHARLQNVSVFRNLTNLKSLWLEKVSIPQLSGTVLQNLGKLFVVLCKINNSLDGKQFPNLSELTLDHCVDLTQFPSSICGIKSLQNLSLTNCHSLSQLPVEFGKLRSLEILRLYACPYLETLPPSMCDMKRLKYIDISQCVNLTCFPEEIGRLVCLEKIDMRECPMIRYLPKSAVSLQSLQLVICDEEVQDMWSDVEMSNSNVLIQVAEQHYDLDWLQE

SEQ ID NO: 220411 - protein, 49 aa, Glycine max
  Clone ID: PAT_MRT3847_41061C.1.pep
IEIYIVGIGFELESLKRLYYISCNLQISLRPPDKAISSFNCLRTQNPPS

SEQ ID NO: 220412 - protein, 84 aa, Glycine max
  unsure (1)..(84): unsure at all Xaa locations
  Clone ID: PAT_MRT3847_41062C.1.pep
HTNFTXITIPSLISPTYLLIKRSIITIFRYFVXTKHISSGLSYLKRLSSTPVDRDAYYKFWCDATSSTPNGSALLKNERQQLTS

SEQ ID NO: 220413 - protein, 44 aa, Glycine max
  Clone ID: PAT_MRT3847_41063C.1.pep
HNWCLNCSFPTDSYVYSRPKVIEKERNHSSLVFQIGWVLSTFTT

SEQ ID NO: 220414 - protein, 90 aa, Glycine max
  Clone ID: PAT_MRT3847_41064C.1.pep
ALDEPAAVASDTGSPHAEAEATPKPLPIGPKRGAEVKILRTESYWYKRSGSVDAVDHDLITRYPGEVRLNKVDYANVSTNNYAVDEIVEV

SEQ ID NO: 220415 - protein, 68 aa, Glycine max
  Clone ID: PAT_MRT3847_41065C.1.pep
LLPEVKFLMHIGVAYPQHCLWRTLLHAPIIRRITTTHYLNPIAQRTTYSDVTCFQNRFRALPVRRRLH

SEQ ID NO: 220416 - protein, 43 aa, Glycine max
  Clone ID: PAT_MRT3847_41066C.1.pep
PIQALFLLYGSDVTNGSVLSNRCHPTYAFILHHTFYIAGPNTN

SEQ ID NO: 220417 - protein, 198 aa, Glycine max
  unsure (1)..(198): unsure at all Xaa locations
  Clone ID: PAT_MRT3847_41067C.1.pep
LGQSAIAFGVSELILVGQRDFNCFGSHVSSSHLRFXHFHSLQDACNFLKDKDCDICGIEITNDALPVNQHPFTKSTAFLLGNEGTGLSPKEIEICDFFVYIPQYGGGTASLNVTVAASIVLHHFGVWAGFTERSRDGNKFVVAERPVKQGGRNYCTETEDSIIEERKARRENAANGFFDETESGNSSSNLLDALFVDG

SEQ ID NO: 220418 - protein, 56 aa, Glycine max
  Clone ID: PAT_MRT3847_41068C.1.pep
YKVSKIPSLLSSFTLIITPKKKKKKKKKKKKKKKKKKKKKKKKKKKKKKKKKNLGG

SEQ ID NO: 220419 - protein, 36 aa, Glycine max
  Clone ID: PAT_MRT3847_41069C.1.pep
AYDPDETRGISVTLNTFGMLNLNPMFSLIVVLVFFF

SEQ ID NO: 220420 - protein, 60 aa, Glycine max
  Clone ID: PAT_MRT3847_4106C.1.pep
WGLVSFSDILCGFYGLGKFNDCFRNMCVREWFALGLSGLVFLCGVWGVILSQWLWGFFRG

SEQ ID NO: 220421 - protein, 56 aa, Glycine max
  Clone ID: PAT_MRT3847_41070C.1.pep
PLNKGRLYNYDLCEKYAGDLGDFWEPILLCVTEKRSSAGQGLLHTWMNASAHHPEA

SEQ ID NO: 220422 - protein, 47 aa, Glycine max
  Clone ID: PAT_MRT3847_41071C.1.pep
GLLLLSCVDRIIIRSCHLGFLYLLLDMSQVTHACSERLDRDACTYRH

SEQ ID NO: 220423 - protein, 210 aa, Glycine max
  Clone ID: PAT_MRT3847_41072C.1.pep
MSSNKKSLLRTVFTANGSCGCSKTKSSKVHEPTPKSKTTHIHQKENNNLSSMASSTTSPEQVDEEEFTSTTISESETFHDHNNNNNNNDNNNNIVLKRSPLVNSVAIEKDSSNPYHDFRHSMLQMIFEKEIESENDLQDLLQCFLQLNAQCHHHVIVKAFKEICKEAFPHKVITTSVVSEPSPSQRAPSLFQRPMKVAISLCTQGVLVVL

SEQ ID NO: 220424 - protein, 45 aa, Glycine max
  unsure (1)..(45): unsure at all Xaa locations
  Clone ID: PAT_MRT3847_41073C.1.pep
GKMVWTGAXNQQQSKLAARMSAXIIQKLGFPSKFEDCQIHNIVGS

SEQ ID NO: 220425 - protein, 86 aa, Glycine max
  unsure (1)..(86): unsure at all Xaa locations
  Clone ID: PAT_MRT3847_41074C.1.pep
SSRSSRFGSSAGSLSPSLCSGDMLLDALVACSGVTLKAVATALDIPIISGTVRAEGDLDFKGTLGVKXNVAVGMSGIRLEFDLVFG

SEQ ID NO: 220426 - protein, 116 aa, Glycine max
  Clone ID: PAT_MRT3847_41075C.1.pep
NIFANAKAGMDKTKATVQETAERVTARDPLQKELATQKTEAKMNQAELDKQAARQYNTAAIQSETTDVHMGHAHHTTGTGTGTVTYCTIGEYGQRIVADQTSAMPGHGIEQTMGHV

SEQ ID NO: 220427 - protein, 143 aa, Glycine max
  Clone ID: PAT_MRT3847_41076C.1.pep
MEDDDAAIEVRNHVSPEPEVEDSSCCCPICLGSFLQLSYLDKCFHKFCFNCILRWTKVVASKHRSPPSSVKCPLCKTENFSIIYVVDGSCFQRHYVNQDFENSFILSRAHRYRVQCYYTEQGFVDDIFHISQYWRSQKYYQPN

SEQ ID NO: 220428 - protein, 56 aa, Glycine max
  Clone ID: PAT_MRT3847_41077C.1.pep
IFPPFSFIIPKFKIVFISLYKIQYIMFITLISFRVPMLLIKKTNILANNYSKKEKY

SEQ ID NO: 220429 - protein, 61 aa, Glycine max
  Clone ID: PAT_MRT3847_41078C.1.pep
ALIASSDIELAKIRTLTFPIPFLSLATHCHSRTTSKPRYNFQLISIRVTLTPLHACALCNI

SEQ ID NO: 220430 - protein, 39 aa, Glycine max
  Clone ID: PAT_MRT3847_41079C.1.pep
LLRADCVLGRFMVSDVYTQTELLCIFVVSARCLVHLIVS

SEQ ID NO: 220431 - protein, 75 aa, Glycine max
  Clone ID: PAT_MRT3847_4107C.1.pep
GAIKTTRPKFYSKGILISDPAIYTHVFLITPYTSPPLPLNYSLCLFLKKKYTYFAFQKCIWEITYTYSKKVFPEL

SEQ ID NO: 220432 - protein, 52 aa, Glycine max
  Clone ID: PAT_MRT3847_41080C.1.pep
LGYRAVGHGPHAYIGGKRCNINFLKMMQIALAFDFGDMVVRVSKFFLFIFVS

SEQ ID NO: 220433 - protein, 38 aa, Glycine max
  Clone ID: PAT_MRT3847_41081C.1.pep
NYLKDAVLQNLLTLIITNNIFLVHIKSKNTHPTHGRIK

SEQ ID NO: 220434 - protein, 46 aa, Glycine max
  Clone ID: PAT_MRT3847_41082C.1.pep
LRITIIQPTDVWEHKLCIYKNTFPGLFYKTELRPLYYILLQINKSF

SEQ ID NO: 220435 - protein, 68 aa, Glycine max
  Clone ID: PAT_MRT3847_41083C.1.pep
PLLPLACFSWWTPAIISTCRAHRFSIATLSSVSTPAMQTFNRVSLLDSPSFRYPPMSPLSNFCPKAQR

SEQ ID NO: 220436 - protein, 84 aa, Glycine max
  Clone ID: PAT_MRT3847_41084C.1.pep
RLSGNCPRQCISAGGQTRGLRLGHRVYHRLGECTDHADARSHSTAHTRSIPRPPRWTHSSDLTSRQALPVATRKHDNPAARMDY

SEQ ID NO: 220437 - protein, 60 aa, Glycine max
  Clone ID: PAT_MRT3847_41085C.1.pep
LDHGVTAVGYGVSDDGTEYWLVKNSRGPEWGEEGYIRMQRGVDSEEALCGIAVQASYPSA

SEQ ID NO: 220438 - protein, 149 aa, Glycine max
  unsure (1)..(149): unsure at all Xaa locations
  Clone ID: PAT_MRT3847_41086C.1.pep
RPGSKMHKKEVVEAATIIETPPMVAVGVVGYVETPRGLRSLTTVWAEHLSDEVKRRFYKNWYRSKKKAFTKYAKKHAESGSASSVARELERISKYCSVVRVLAHTQIRKTGLAQKKXHLMEIQINGGSIADKGEFAKSHFEKTFEVSSI

SEQ ID NO: 220439 - protein, 104 aa, Glycine max
  Clone ID: PAT_MRT3847_41087C.1.pep
PRVRPRVRPRVRPRVRKKKKKKKKKKKKEKKKKKGGRYKKRQDYEKARRKEKTKIRGADKGITMSGLGKEGSAKIMGLENKPLWTDAHLGRGKNRKEAPNRWPF

SEQ ID NO: 220440 - protein, 46 aa, Glycine max
  Clone ID: PAT_MRT3847_41088C.1.pep
YFVIVIFTYLSTSEHTHILILTISITALTLCQTSSHLVLKKTRFTY

SEQ ID NO: 220441 - protein, 84 aa, Glycine max
  Clone ID: PAT_MRT3847_41089C.1.pep
RARRFVVLSTRTREVHSQTCTTFDHWHMHTPVPNDTTRSRNHSAPLMDGEFKSLIPPAFSISHFSGQIAGPLVMALVHARELKT

SEQ ID NO: 220442 - protein, 77 aa, Glycine max
  unsure (1)..(77): unsure at all Xaa locations
  Clone ID: PAT_MRT3847_4108C.1.pep
RKKWSLPLTMETSLLCPCSSFVAAVFLFSKLFLXISLSFVFYTSIFFIVQFCLRFXXPFFLNCMIIYXPTVTAHXFS

SEQ ID NO: 220443 - protein, 97 aa, Glycine max
  Clone ID: PAT_MRT3847_41090C.1.pep
YDPSYQASCLYSIIVYYETISFHFLQRQECTDTLLTFRTLCISPHRRTCRLFFSLKVDKLSSIPFHCVDHVDPETVIYVSCFPIRLIIMHGSQYQDQ

SEQ ID NO: 220444 - protein, 99 aa, Glycine max
  unsure (1)..(99): unsure at all Xaa locations
  Clone ID: PAT_MRT3847_41091C.1.pep
YNEVXADMETNKGKMSVDDVETSKGAMSDLTIGGSKTGLAKNTVXGGTNVNSELWANFETXGNFKGSVDLQGTDGIKXMYKMLATVAMNENSRVSLHLC

SEQ ID NO: 220445 - protein, 69 aa, Glycine max
  Clone ID: PAT_MRT3847_41092C.1.pep
RSPQFNAGCCYPNTPLSPHPGLGPPQNSQPPLGRIPPQVKFLRLKIGGLHLYPMDVLPYKKFFFDKNLH

SEQ ID NO: 220446 - protein, 120 aa, Glycine max
  Clone ID: PAT_MRT3847_41093C.1.pep
NKHTKINRKPCIPLTDSETNQAQRGHESSRTPGGESSSGTQRDQPFQLTHTLRFLQNPNHSFAHLFTDSAEASTSLSSEGEIVGVHFILMVSAADCCFGVAVANWCTKKPLHDLNRSCHI

SEQ ID NO: 220447 - protein, 157 aa, Glycine max
  Clone ID: PAT_MRT3847_41094C.1.pep
MASTKKITLKSSDGEAFEVEEAVAVAVESQTIKHMIEDNCADSGIPLPNVTSKILAKVIEYCKKHVEANCADEKPSEDELKAWDADFVKVDQATLFDLILAANYLNIKSLLDLTCQTVADMIKGKTPEEIRKTFNIKNDFTPEEEEEVRRENQWAFE

SEQ ID NO: 220448 - protein, 155 aa, Glycine max
  Clone ID: PAT_MRT3847_41095C.1.pep
MASTKKITLKSSDGEAFEVEEAVALESQTIKHMIEDDCADSGIPLPNVTSKILAKVIEYCKKHVEANSADEKPSEDVLKAWDVDFVNVDQATLFDLILAANYLNIKSLLDLTCQTVADMIKGKTPEEIRKTFNIKNDFTPEEEEEVRRENQWAFE

SEQ ID NO: 220449 - protein, 60 aa, Glycine max
  Clone ID: PAT_MRT3847_41096C.1.pep
KEGQNPPIKIPLKITGQLQKLGLPPPVSKLGGGGSFHILPGTLSLSSFFSPPKKKRALFF

SEQ ID NO: 220450 - protein, 95 aa, Glycine max
  Clone ID: PAT_MRT3847_41097C.1.pep
MDVSELAKKLGLSDSKLVVRKAAELRRLCEVQFDSSVIGVGEVAKSIICLEIAAMRLSILFDRSSAARLSGMSERAYIRSYNSLHNGLGVKMKLD

SEQ ID NO: 220451 - protein, 101 aa, Glycine max
  Clone ID: PAT_MRT3847_41098C.1.pep
ASANSWSSIEGLGNIGGGVNKVHFVPPKRITAAGRCAASAINLCAGTVTLRSRHGYLECPPVSNHERSQTEALNLARVVAIQNNVLGISITVYYAALTLLM

SEQ ID NO: 220452 - protein, 122 aa, Glycine max
  unsure (1)..(122): unsure at all Xaa locations
  Clone ID: PAT_MRT3847_41099C.1.pep
SLLHVGTIKPIRGSPSRTDCFIRGAMTWVGTDHTDPEKTIRRMNVAPFKGXRAIRVGTLSNAIVQTEPDMNLRFXLSRTTTKGDCDQGIELAMGKDYVPCPAVDLTSRCSSTPLVESGLHKD

SEQ ID NO: 220453 - protein, 322 aa, Glycine max
  Clone ID: PAT_MRT3847_4109C.1.pep
VGLWLPQRPEDLRPVKLEEVNRGFNYQQWRIPLSGSFGNEVSTVLGGGLVPGSLTLVGGDPGIGKSTLLLQIAAMIANECSDYEGPPVVYVSGEESLQQIGIRADRLGIKSNIYLYSSTDIEDILTKTHGLSPRALVVDSIQTVYLETIIGSAGGIMQVKECTAALMRFAKTTNISVFLIGHVTKSGDIAGPRVLEHIVDVVLYMEGEKYSPYRMLRAVKNRFGSTDELAVLEMSQSGLQVVSNASEMFLTQQHSDSNVLAGLAIAVIMDGSRTFLIEIQALCLTHCPVSSSLSNGINANKANIIKCVLIKQTGLHLQDNVS

SEQ ID NO: 220454 - protein, 115 aa, Glycine max
  Clone ID: PAT_MRT3847_410C.1.pep
AFDVQYVIHKVETRFSSSGASYTGCEMMSARVSKRIKEQESCQDLFESKREKRFLKGIPRLKEVFTKYKAKTRKRASNHWAIRVGVWSSRSQGSKISGLSTISDKTSQNQFDFEQ

SEQ ID NO: 220455 - protein, 96 aa, Glycine max
  Clone ID: PAT_MRT3847_41100C.1.pep
LRRCSHYDTRRFIINVCRILTWFSPLCTSEFYCRSKWHWFVPLYLSMDPSTMRCNAQSRQCQQNSIPTSERDSSTYASEEIRGFVECSSSRSRSNS

SEQ ID NO: 220456 - protein, 80 aa, Glycine max
  Clone ID: PAT_MRT3847_41101C.1.pep
GDAEAVSSYVGVRARAEGGLLVTSAQSSVLDQRLDVSLAHSSVLESRVQKSLLCGGGGGCLGHTRGQASGKRLSGSYQGP

SEQ ID NO: 220457 - protein, 83 aa, Glycine max
  unsure (1)..(83): unsure at all Xaa locations
  Clone ID: PAT_MRT3847_41102C.1.pep
IVNIFFFMPNFHGDYSFRSHMLDAKLVVGTKTFFHSGLLISLVYFLGCRCQPLSTCXXMFXHSNATSHKWAFGGMFLPSPSVV

SEQ ID NO: 220458 - protein, 42 aa, Glycine max
  Clone ID: PAT_MRT3847_41103C.1.pep
VFQSKDMLSNVAGERTVIEQVVITVLTVFTQIWMSLCSSTRV

SEQ ID NO: 220459 - protein, 71 aa, Glycine max
  Clone ID: PAT_MRT3847_41104C.1.pep
IFKFYSVTLESENIFVRAGDLGLVASLGKGRIIQLLNVCIGRFIIFVPFKARNRKMILLLLQRRFICFFVS

SEQ ID NO: 220460 - protein, 99 aa, Glycine max
  Clone ID: PAT_MRT3847_41105C.1.pep
ASRRYKWLKTEDQYYLGANNSIRGACVQNVLDSVISALLEDKNRKFIYVEMAFFQRWWRQQSKATKIKVKELVNSGQLEFINGGMCMHDEATPHYIDLI

SEQ ID NO: 220461 - protein, 69 aa, Glycine max
  Clone ID: PAT_MRT3847_41106C.1.pep
YFEGYFPLFTWWVSPPCSKKQLLSVVAPTPVGVVINIIIAVTRGIVVFCGLQFGFGRRRFGTNVWAHAP

SEQ ID NO: 220462 - protein, 91 aa, Glycine max
  Clone ID: PAT_MRT3847_41107C.1.pep
IFRPPIWSTTSKGDCDQGNDHSLAKDTVACAAGGMTKRDTPTPLKESGDKKDSWFIEEYFARTTYVDHNVNQPQKKDWLEGQFSSDSKSSV

SEQ ID NO: 220463 - protein, 46 aa, Glycine max
  Clone ID: PAT_MRT3847_41108C.1.pep
LEDVSFLFSTKAKSRSDIGEVTMKMDQNCIELGKRRSNQIDQIADR

SEQ ID NO: 220464 - protein, 124 aa, Glycine max
  unsure (1)..(124): unsure at all Xaa locations
  Clone ID: PAT_MRT3847_41109C.1.pep
WGGKXYLENGYYLHGYWGILVDRYEEMIENYHPGFGDHRWPLVTHFVGCKPCGKFGDYPVERCLKQMDRAFNFGDNQILHIYGFTHKSLGSRGVKRIRNETSNPLEVKDELGLLHPAFKAVEVS

SEQ ID NO: 220465 - protein, 48 aa, Glycine max
  Clone ID: PAT_MRT3847_4110C.1.pep
RRCHCFYPPHQLCSALTETSQFNRKHPILLYAENPAQIRKNREEEEEE

SEQ ID NO: 220466 - protein, 79 aa, Glycine max
  unsure (1)..(79): unsure at all Xaa locations
  Clone ID: PAT_MRT3847_41110C.1.pep
FXVHYMSESHITFPRPMRIIENVLCAHQSRVRKLGPKCNFYLPRPSDHLPSTGKPLVHRISAYSPCWHIAVCKYQVRTM

SEQ ID NO: 220467 - protein, 139 aa, Glycine max
  Clone ID: PAT_MRT3847_41111C.1.pep
GSSMCRPVWTGEPRPNTHHGVAHHSNHPSCARKRTPSVEVVNFLRFVAAGYFAFSLLKEKFRNFVCVWFFFKLWILLGLEDVLSHPYEGGFGKWKLRVWFWLGRGFELPFEGGFGNCVYGFGNLIWFSLGEILKLGILY

SEQ ID NO: 220468 - protein, 57 aa, Glycine max
  Clone ID: PAT_MRT3847_41112C.1.pep
PHSPYCGHITLNVFVTFNETVKAIFLKLRRKKTDKIIQNCDFWQVHLSNKIKKMNKN

SEQ ID NO: 220469 - protein, 50 aa, Glycine max
  Clone ID: PAT_MRT3847_41113C.1.pep
TTNPTEDVSTHCFPSFPCVIGFLCQCPRLLSGIPQWCTHPFRLPLHVSWL

SEQ ID NO: 220470 - protein, 36 aa, Glycine max
  unsure (1)..(36): unsure at all Xaa locations
  Clone ID: PAT_MRT3847_41114C.1.pep
SXRRFLEKLKSCWXKRIYSVXLXXCFHFXVXLXFNK

SEQ ID NO: 220471 - protein, 100 aa, Glycine max
  Clone ID: PAT_MRT3847_41115C.1.pep
RGRVGGRVGGNSDSRNCKQKRNAVHGDAVATKNTLESDRQLNSGRITEPKCVTGNSDSRQCKALHNSHHGDAMVTDHAAADVIHTGVEDGSHKVGSSCKY

SEQ ID NO: 220472 - protein, 230 aa, Glycine max
  unsure (1)..(230): unsure at all Xaa locations
  Clone ID: PAT_MRT3847_41116C.1.pep
MTSVILRRSSSVISRRFFAALASVEPLPRRFPADRHGVSGNGARTFHANPGPLNFRASLVPRAAQFAIERDYSNYEEVSNANSDEGLEIAKLGIAPEIVDALARKGIAKLFPIQRAVLEPAMQGRDMIGRARTGTGKTLAFGIPILDRITQFNAKHGQGRNPLALVLAPTRELARQVEKEFNEAAPNLATICXYGGMPIQQQMRQLNYGVDIAVGTPGRNIDLLXRXALN

SEQ ID NO: 220473 - protein, 72 aa, Glycine max
  unsure (1)..(72): unsure at all Xaa locations
  Clone ID: PAT_MRT3847_41117C.1.pep
AHRPEKNAREXSKXTXENXXKXEQQXXXHYEAXTKTRXXSXDGGGTTAXXAGAXLXHXEDQNRAQTAXXHTQ

SEQ ID NO: 220474 - protein, 264 aa, Glycine max
  Clone ID: PAT_MRT3847_41118C.1.pep
MVRKMSGAPVLPRELIVEILSWLPVKALMRFRYVSETWNSLIFDPTFVKLHLERSPKNTHVLLEFQAIYDRDVGQQVGVAPCSIRRLVENPSFTIDDCLTLFKHTNSIFGSCNGLVCMTKCFDVREFEEECQYRLWNPATGIMSEYSPPLCIQFKDNNNTYYPWKCGFGFDDSSDTYKVVALLCDIKSQTKEIKVHCLGDTCWRKTSNFPAFPVLGEGHFACGTVNWLALRVSSFHYLWENVTIDHIDQLVIFSYDLMYETYTY

SEQ ID NO: 220475 - protein, 134 aa, Glycine max
  unsure (1)..(134): unsure at all Xaa locations
  Clone ID: PAT_MRT3847_41119C.1.pep
SECGSRFPWFYHNMLTFLKRHGDTSGNPVRGLVGPHDAPVYDQPPYKVLFKAVASGEYTYCDXGSLWTSKQLKGHGYCLIXIASSTLGDSGEAIYGKEPXLLHSWSGARSHXLRQTPGFYDTVHSDRYRPCAQM

SEQ ID NO: 220476 - protein, 205 aa, Glycine max
  unsure (1)..(205): unsure at all Xaa locations
  Clone ID: PAT_MRT3847_4111C.1.pep
MKFGKEYTSQMVPEWQEAYMDYNFLKSHLKEIQRFRQRTKPPTATPRGLRRKLTLYRAFSGLTQQKHYQQLSPSEHDIESQPIMVHSVNNHDGYEKYQTTFLMTSEEGGEYELVYFKRLDDEFNKVGKFYRSKVEEVMTEAAILNKQMDALIAFRIKVENPTGSFDRSIEMTRLASDVASSSAXLXASTPKGAKLNSNSFFQPFN

SEQ ID NO: 220477 - protein, 34 aa, Glycine max
  Clone ID: PAT_MRT3847_41120C.1.pep
NKPLDLKVKLVLEIHTLMVLYGRSKDAVNHATVN

SEQ ID NO: 220478 - protein, 564 aa, Glycine max
  Clone ID: PAT_MRT3847_41121C.1.pep
MKGKVLGSAVSLILVVGVVIGVVAVVQSPKGVNNNNNGGELKTSNRAVTALCQGSDDQKLCHEVLSSSNSTDPKEYIATVVRTSMDSVIKAFNMSDRLTVEHGNSSAGMKMALEDCKDLLQSAIHDLEASGVLVKESSLQDVHQRTAELKNWLGAVVAYQQSCLDGFDTDGEKKVQEQLQSGSLDNVGKLTGLALDVVSGITHILQSLDLNLALKPASRRLLDVDDDGFPTWVSSADRKLLAQLNDPVLPHATVAKDGSGQFNTVLDAINSYPKHHQGRYVIYVKAGIYDEYITVDKKKPNLFIYGDGPSKTIITGRKNFHEGTKTMRTATFSTVAEDFMAKSIAFENTAGAEGHQAVALRVQGDRSVFFDCAMRGYQDTLYAHAHRQFYRNCEISGTIDFIFGYSTTLIQNSKILVRKPMANQQNIVVADGTGQKNMPTGIVLHNCEIMPDPTLLADRLSVKTYLARPWKAFSRAVFIENVIGDLIQPDGYIPWNPIEPNTQDCYFAEFGNTGPGSVAQARAKFGKGLISKQEAAQFTAEPWLQASTWLPAAGVPFDASFTKA

SEQ ID NO: 220479 - protein, 64 aa, Glycine max
  Clone ID: PAT_MRT3847_41122C.1.pep
LDYTQISQQSICYSFYQVTHLGFPGFDLLYASVLIRKVGHRIGSGETDINSDSMRIAWITSGKW

SEQ ID NO: 220480 - protein, 77 aa, Glycine max
  Clone ID: PAT_MRT3847_41123C.1.pep
KDIIIRSKAAIIMCADLDLKADRIAIPPIVVVPSSSLYSSYSSLCQLGFFVMFRRMDIVVSMLDREVAHASFFFVSQ

SEQ ID NO: 220481 - protein, 56 aa, Glycine max
  Clone ID: PAT_MRT3847_41124C.1.pep
DITDIHCSYDSGVPTARRILFTITSPLHTHNLASNTPAITSKIAKSDYSIPEFIPS

SEQ ID NO: 220482 - protein, 100 aa, Glycine max
  Clone ID: PAT_MRT3847_41125C.1.pep
YHYFSFFFFLFSLLSNLPSPNMIDFPLFKKRQYFLFPCGSMQMDYLNGALSHTQKWCCWFWYLDSPVFNQFNFYLEKTKLTAFLLLLGKIYLKKFRPSIW

SEQ ID NO: 220483 - protein, 224 aa, Glycine max
  unsure (1)..(224): unsure at all Xaa locations
  Clone ID: PAT_MRT3847_41126C.1.pep
MNGIPRHERRWASDSVPGKATVSAGTSPGTESNSAAEEFVEVTLDLQDDDTIVLRSVEPASVINIDRGRTRGRTRGPASVSRSPTIRRSSSRGFRQFSQELKAEAVAKARQFSQELRRFSWSHGHASRALSSSSAPNGAGAGFETALAARALRKQRAQLDRTRSGAHKALRGLKFISNRSNGVDAWNEVQSNFDKLATDGFLKRTDFXAQCIGLKDFERIRLWN

SEQ ID NO: 220484 - protein, 88 aa, Glycine max
  Clone ID: PAT_MRT3847_41127C.1.pep
ALHPTVLVTMASCPSGLNAVFEASKASQPGVSTPESRAWPMWNQMPLSHFQRRRSKIEEAKEKKKEEKKWGFSEKSVFKTRSLGCLFC

SEQ ID NO: 220485 - protein, 82 aa, Glycine max
  Clone ID: PAT_MRT3847_41128C.1.pep
GFLKINELNPSGPVLTPASWVSNQRNKTFLKEGVHFFSNQRKVFSPNTGMAVRKMLAFGKEKRRAARGMGPYWESSKPSGCV

SEQ ID NO: 220486 - protein, 435 aa, Glycine max
  Clone ID: PAT_MRT3847_41129C.1.pep
AASYVRGLQGTDGNRLKVAASCKHFTAYDLDNWNGVDRFHFNAQVSKQDIEDTFNVPFRMCVKEGKVASVMCSYNQVNGVPTCADPILLKRTVRGQWGLNGYIVSDCDSVGVFYNSQHYTSTPEEAAADAIKAGLDLDCGPFLGQHTQNAVKKGLISEADVNGALLNTLTVQMRLGMYDGEPSSHPYNNLGPRDVCTQSHQELALEAARQGIVLLKNTGPSLPLSTQLDRTVAVIGPNSNVTFTMIGNYAGVACGYTNPLQGIGRYARTVHQLGCQNVACKNDKLFGPAINAARQADATVLVMGLDQSIEAETVDRTGLLLPGRQPDLVSKVAAASKGPTILVLMSGGPVDITFAKNNPRIVGILWAGYPGQAGGAAIADILFGTANPGGKLPVTWYPEEYLTKLPMTNMAMRAFKSAYTGRTYRFYNGPILFKF

SEQ ID NO: 220487 - protein, 52 aa, Glycine max
  Clone ID: PAT_MRT3847_4112C.1.pep
LCPNRNLKFTIGLTDEFSYSFVVFAGKKVLLEESFDISIIRSMCACFGPKRP

SEQ ID NO: 220488 - protein, 65 aa, Glycine max
  unsure (1)..(65): unsure at all Xaa locations
  Clone ID: PAT_MRT3847_41130C.1.pep
XXTRSQXGLRXEXXXRKTXNGVXLXSLXXXSXXXXQQXXXGXSKAPITQXRXEKCALFGLXSKEG

SEQ ID NO: 220489 - protein, 78 aa, Glycine max
  Clone ID: PAT_MRT3847_41131C.1.pep
NQVMLVLQSPLEPLTGYKVTLIIVPGPFFIERRLSPGHVLMGQRKQPMYFLFYGINIPMIRAHPPSIKKCPMVVNVPL

SEQ ID NO: 220490 - protein, 69 aa, Glycine max
  Clone ID: PAT_MRT3847_41132C.1.pep
VSSILIFVNYSYCRCSYRGCNVKKQIQRHTKDEEIVVTTYEGMHIHPVQKSTESFEHILRNDHIYSLTL

SEQ ID NO: 220491 - protein, 37 aa, Glycine max
  Clone ID: PAT_MRT3847_41133C.1.pep
MQRRIATIVLTNISSMPVELQRRDWQNAGETEPTRKA

SEQ ID NO: 220492 - protein, 79 aa, Glycine max
  Clone ID: PAT_MRT3847_41134C.1.pep
QNGDGQGTEHYIPRKCSNANRWCTSIMHHAADQINIAHVDDNGVNIGHTSSDALSRCKRAQGDADSALDRLWKGKRGEL

SEQ ID NO: 220493 - protein, 128 aa, Glycine max
  unsure (1)..(128): unsure at all Xaa locations
  Clone ID: PAT_MRT3847_41135C.1.pep
SGRPDYRWGRSFFFCALRLSFLTSFYGYELISSPIYLWIEKTTEEEISDDEDAEQTKAQEGEVEYVDEDIETEAKNPNIITEVSHEWSLLNKHKPIRVMKPEEITKQECAAVYTSHSNGXQEHLAVKH

SEQ ID NO: 220494 - protein, 67 aa, Glycine max
  Clone ID: PAT_MRT3847_41136C.1.pep
LCPCKNVATRQPNVPLIYTALTLSNCSFDHPQPPIIRTALPACNCWPAFNYFYFSRAIDFSYVHSTN

SEQ ID NO: 220495 - protein, 89 aa, Glycine max
  Clone ID: PAT_MRT3847_41137C.1.pep
VLFAPHSLFRGRVISEKGGRVSKLDSIKNGDSWMGMDVSVFNTWHCCTHTGSSQPSDYVQVNNNMFKDINRFVCYYKWLTTCANWVQIY

SEQ ID NO: 220496 - protein, 106 aa, Glycine max
  Clone ID: PAT_MRT3847_41139C.1.pep
EGVRPLYVSYVLLFYYTLLFFSQFYTSWQWVMLKRCVREVLFRNGLWCAVTVTVVVAVITVVAVTVTATITVTVVAVVILTITVIKFLLFNYSVNHSQTFLFLVKT

SEQ ID NO: 220497 - protein, 45 aa, Glycine max
  unsure (1)..(45): unsure at all Xaa locations
  Clone ID: PAT_MRT3847_4113C.1.pep
VWVRXRYSGVGMXQKKGTXRDHGYERIRKSLLQTLKDRVSRHRTT

SEQ ID NO: 220498 - protein, 97 aa, Glycine max
  unsure (1)..(97): unsure at all Xaa locations
  Clone ID: PAT_MRT3847_41140C.1.pep
PVNSIRAKFSICPGGSHHNLVLSSKSLSESFSTPWLARYNNPYAMHAGRMLTPVDKGPAEHSFIIARLISFHPFPILTNNNVRFTSTNGALPSIXAP

SEQ ID NO: 220499 - protein, 139 aa, Glycine max
  Clone ID: PAT_MRT3847_41141C.1.pep
MAERRVFTLSQVAQHKSNKDCWLVINGRVLDVTKFLEEHPGGEEVILEVAGKDATKEFDVIGHSKAAQNMVLKYQVGVLQGATVQEVDLKDVVDKESNTKEMSAFVIKEGARSKSLAFYEFFVPLLVAGLYFGYRCLPY

SEQ ID NO: 220500 - protein, 313 aa, Glycine max
  Clone ID: PAT_MRT3847_41142C.1.pep
SNNAMGEKGVRAFRSLLKSQINLEELYLMNDGISEEAAKAVSELLPSTEKLRVLHFHNNMTGDEGAIAIAEIVKRSPALEDFRCSSTRVGSDGGVALVEALGDCKHLRKLDLRDNMFGEEAGVALSKVVPAFTDLTEIYLSYLNLEDDGAEALANALKESAPSLEILDLAGNDITAKAAASVAACISSKQFLTKLNLSENELKDEGVVLISKALEGGHGQLIEVDLSTNSITWSGAKLVAEAVVGKPGFKLLNINANFISDEGIDELKNIFKNSPDMLGPLDENNPDGEDPDEEAEEDADHDELESKLKGLGI

SEQ ID NO: 220501 - protein, 57 aa, Glycine max
  Clone ID: PAT_MRT3847_41143C.1.pep
YKGRHQLMWHQIHQKEGLLNFKKYTHYRNCTKTSFHAYNFDTAERILRQFNLCHHDM

SEQ ID NO: 220502 - protein, 47 aa, Glycine max
  Clone ID: PAT_MRT3847_41144C.1.pep
GKLLWFFERFNLIFVDGLLVTIHGKKMTFKKVIGKKKLNKFIKNGDL

SEQ ID NO: 220503 - protein, 115 aa, Glycine max
  Clone ID: PAT_MRT3847_41145C.1.pep
LWQADSARLRAPLARLAAFSCLTSIIAHSTASPAGRAIRFVVLPIPGWRLLTVCLGLPVGYPLLVCALADVCSSSRLGFILVTALGYRIILALFLEVTSIALTLTATRSCYPFGC

SEQ ID NO: 220504 - protein, 111 aa, Glycine max
  unsure (1)..(111): unsure at all Xaa locations
  Clone ID: PAT_MRT3847_41146C.1.pep
AFKEFACPYPEVLNDLPNGWAPPRFGSLNLXGKTPPALFVSKCRKEKFVFSFPPGPPPPVSADAPANQGGPGPSLLLRPKAGFLIWLFGKVLNPTFFFFLSKLRENRSPFF

SEQ ID NO: 220505 - protein, 98 aa, Glycine max
  Clone ID: PAT_MRT3847_41147C.1.pep
MVAWRGASMEIEGRSTDTSFENKREGVVVWGPSLNFISSLSLANFQPNSCSFVQILGALRDTSVIVVTLDLDEVFIIARLYTRTDTHVIHINPTTRAS

SEQ ID NO: 220506 - protein, 80 aa, Glycine max
  Clone ID: PAT_MRT3847_41148C.1.pep
AYPLVVRYHAGLILIMLGVTPVFHRSITFLAVCVQAVSHHQNLYGRQFHQFQLLHFFSLFSLFELLTSSIGVHDRRFLLE

SEQ ID NO: 220507 - protein, 81 aa, Glycine max
  Clone ID: PAT_MRT3847_41149C.1.pep
GELNQTKMFQNLKKGKPGPLTNGGPIWQHNYKSTGNQLLGLTPNLDFCFIFGGFLFNPLKGFFFPCKKKKKKKKSQSYLNV

SEQ ID NO: 220508 - protein, 59 aa, Glycine max
  Clone ID: PAT_MRT3847_4114C.1.pep
NICYQLKLPYERRSKNPCRGTLLTQADIQIRHKHRTTYIYIDWNQSTTKSLVTAMEQHE

SEQ ID NO: 220509 - protein, 109 aa, Glycine max
  unsure (1)..(109): unsure at all Xaa locations
  Clone ID: PAT_MRT3847_41150C.1.pep
QKRCRAEKEAAFKDCRLEKTLLTHCSSLVHVDRRATNARRRVTDAVFSGTVSLQSSLSLFRHGPRRSHFSHPFATRSPLFLCFPARTLIIWTTYVRRKFKDLKNXLTNA

SEQ ID NO: 220510 - protein, 151 aa, Glycine max
  Clone ID: PAT_MRT3847_41151C.1.pep
MDSLRQEKVQRFEEFVDKRLKPDLVHAIAQRDKVFEQQKIFTDLRKNIENLEKNSVTSLRTLVNIGSEVYLQAEVPDTQHIFVDVGFGFHVEFTWSEALNYIDKREEKIARQIEEYTQLIASIKAQIKLVCEGIRELLQLPAEKSLPERIF

SEQ ID NO: 220511 - protein, 98 aa, Glycine max
  unsure (1)..(98): unsure at all Xaa locations
  Clone ID: PAT_MRT3847_41152C.1.pep
LFKPLFSGPKPDPKRIVPFFHPFGYISFRPPIYEKPGGPXFIELKEIGPRFXVRLFPIKLGTVGPAEAPIEWGLRPFMDPPQKREFFRNLCQPRVWAA

SEQ ID NO: 220512 - protein, 48 aa, Glycine max
  Clone ID: PAT_MRT3847_41153C.1.pep
CGSIVHRAELNAVAGAPPRTSISMVVPFCISSQPWSLSLVSRSIAHCA

SEQ ID NO: 220513 - protein, 80 aa, Glycine max
  Clone ID: PAT_MRT3847_41154C.1.pep
CVATPPPSLVANVKNGECQKNHAANIGGYAVDGCREFMASTGEGAGGALTCAACGCHRNFHRTEVNTEVVGEYSPPNSGR

SEQ ID NO: 220514 - protein, 50 aa, Glycine max
  Clone ID: PAT_MRT3847_41155C.1.pep
IIVWSICYCESGTGSFVRSLFPSPFCLPIFSGLDMICGSSLRKDIFLFKF

SEQ ID NO: 220515 - protein, 79 aa, Glycine max
  unsure (1)..(79): unsure at all Xaa locations
  Clone ID: PAT_MRT3847_41156C.1.pep
YSKINFTFSGHYDDAYNMANWERITYVRIFMRTGLAIYYITKGHSHFRXPGAYPYVYIRNKDFLCTLDGLFDSYHHDEH

SEQ ID NO: 220516 - protein, 222 aa, Glycine max
  Clone ID: PAT_MRT3847_41157C.1.pep
MMSSSPFPSCFRTSPTTESQPPPPPPPPHSTMSNLTIYHTDTGPVSLTWSRSIVGRSLHIQLHQNQNPLDSPPYPNPTTLSFHHHIRPFLFWKKHGSKKLAPDTFLFWNLSRAKFGAAPEPLSGFYVALVVHNHMTLLIGDSTKDAFSKSKARHPNTPQLLLLKKEHVFADRLYTTRATFGGKAREIQIDCGYHDHSRLCFSVDGEKVLQIKRLKWKFRGNE

SEQ ID NO: 220517 - protein, 77 aa, Glycine max
  Clone ID: PAT_MRT3847_41158C.1.pep
MAEIELKTAPADFRFPTTNQTRHCFTRYIEFHRCLAAKGENSGECERFAKYYRSLCPGEWVERWNEQRESGTFPGPL

SEQ ID NO: 220518 - protein, 184 aa, Glycine max
  unsure (1)..(184): unsure at all Xaa locations
  Clone ID: PAT_MRT3847_41159C.1.pep
ETKRGFTRPPPGGIKQPPPLGGARIARSGAPEPTFGENPDRQGGXQKGAPRRPRPRGGAKQKSRAGLTNKSGKKSRGRCPPQARKNGLYPKKPPRGAPQTRGKLPREPPTRRGKKDTXPYAQMTNNKLHRQCGGGPPPKGPLGFPPARERPPPSGAPQEMFCPNPLKKKKGVGGGRPPPRGGPP

SEQ ID NO: 220519 - protein, 60 aa, Glycine max
  Clone ID: PAT_MRT3847_4115C.1.pep
GPPFFRVGTILKEKISRTAVWLLSNPWQTTRPKFKIFHYFFPPESSERFTPFWIRAPIGS

SEQ ID NO: 220520 - protein, 142 aa, Glycine max
  unsure (1)..(142): unsure at all Xaa locations
  Clone ID: PAT_MRT3847_41160C.1.pep
LELSGMPHKVNDVSEGSDDAPLTFEALVLKHAQFLNSTSKLQVADLLIPLRELAHTDANVAYHLWVLVFPIVWVTLNKDEQVTLAKPMINLLSKDYHKRQQANRPNVVQALLEGLXLSHPQPRMPSELIKYXGKTYNAWHIA

SEQ ID NO: 220521 - protein, 265 aa, Glycine max
  Clone ID: PAT_MRT3847_41161C.1.pep
MAETKLSMMKDKRWSLRGMTALVTGATRGIGHAIVEELADFGATVHICARNQDDIDKCLEEWKNEGLNVTGSVCDLQCSDQRIRLMEVVGSIFHGKLNILVNNAGRCIAKTILDSTAEDISTTMGTNFESAYHLCQLAHPLLRESGYGSVVFISSTAGLMGFPFFSAYAASKGAMNQFTKNLAFEWAKDNIRGNAVASGPVMTVLMEGVMNSSEVSDVVNAATSQSLVGRMGEAKQISALVAFLCLPVASYITGQVICVDGGLTT

SEQ ID NO: 220522 - protein, 71 aa, Glycine max
  Clone ID: PAT_MRT3847_41162C.1.pep
SDSPFYQHQGDWTLKALFSKVPHPQVFSPLMNKSCGSFTLIPFWVNPPFKSPKRWFFFWWFLFPLTRDPLF

SEQ ID NO: 220523 - protein, 122 aa, Glycine max
  unsure (1)..(122): unsure at all Xaa locations
  Clone ID: PAT_MRT3847_41163C.1.pep
MGKLTFHQVTSQSVKRMRLSIGGGAGAKNAILMNMPNAGLSTWRYLVGDLHFEVSKMTHSYIKCTDTVFITXGDFAEDTIKAEASKHRPAHPVEIQEDVVSTPSHEVFHTPSQTQALLVPTL

SEQ ID NO: 220524 - protein, 148 aa, Glycine max
  Clone ID: PAT_MRT3847_41164C.1.pep
VCGNVGSGKSSLLSCIVGEVPKISGTLKICGTKAYVSQSPWIQSGKIEDNILFGKEMDREKYDKVLEACSLTKDLEVLPFGDQTTIGEKGINLSGGQKQRVQIARALYQDSDVYLFDDPFSALDAHTGSHPFKECLLGPLKSKTGIYI

SEQ ID NO: 220525 - protein, 204 aa, Glycine max
  Clone ID: PAT_MRT3847_41165C.1.pep
MGSSKLLGIMAMLFIVLLPMAAKGDNITDFFDKVCEEVECGKGSCVVNTSYPLNFVCECDSGWKRTQDDDDEYATSFLPCVIPECSLNYGCQPAPPPVPEKSFPHNFSAFDPCYWAYCGEGTCTKNRTHTHRCECQPNYYNLLNISVFPCYSECTLGSDCSRLGIKVANSSTDSGSQDSSASIFTGRFHWMVMLLMSTGMVMWS

SEQ ID NO: 220526 - protein, 255 aa, Glycine max
  Clone ID: PAT_MRT3847_41166C.1.pep
MAAYSSHALKTIPFSSFVKPVSTKPTSFFTPSPTKPFLPFTSPNHSLTKNLKLNSTLPHFCLSSVPKKSFTCRSQAEPVDSEKVQELSVYEINERDRGSPVYLRLSYKSVNSLGDLVPFSNKLYTGDLQKRIGITSGICILIQNKAEKKGDRYEAIFSFYFGDYGHIAVQGPYLTYEDTYLAVTGGSGIFEGVKGQVKLRQIVYPFKILYTFYLKGIKDLPQELLVKTVEPIPSVEPSPAAKALEPNATIAGFTD

SEQ ID NO: 220527 - protein, 216 aa, Glycine max
  unsure (1)..(216): unsure at all Xaa locations
  Clone ID: PAT_MRT3847_41167C.1.pep
MATYWSHALKTIPSSLGKPVTVSAKTTSLYLTLSITIPVLPFTSSNHSLTENLKLNSTLPHFCLSSVPKKSFTCRSQAEPVDSEKVQELTVYDINERDRGSPVYLRLSYKSVNSLGDLVPFSNKLYTGDLQKRIEITSGICILIHNKAEKKGDRYEAIFSFYFGDYGHIAVQGPYLTYEDSYXAVTGGSGIFEGVKRQVKLHQIVYPYKIVDALYV

SEQ ID NO: 220528 - protein, 111 aa, Glycine max
  Clone ID: PAT_MRT3847_41168C.1.pep
SCSFKWLCDIPCFNCSWICHWCCDGCFEHQNMSSCCSHCMPCNCCSSCLPSTICSCCPNGISHCCKDSCGCKICCTLPSCNIGWPFPSCCICKCSCSCSWSGPKKCPKVRP

SEQ ID NO: 220529 - protein, 120 aa, Glycine max
  unsure (1)..(120): unsure at all Xaa locations
  Clone ID: PAT_MRT3847_41169C.1.pep
GRGVSAVGGQSSLGYLFGIGVPTSNSNIHTANCARTHNTSSPCPPIDTHSPSPAPAPAPASSLIDIPTPSXIPASLKNNYHRAXWQNCGNFLTYRPSTQDHAAPSGGSSFDYLFGGPSGH

SEQ ID NO: 220530 - protein, 88 aa, Glycine max
  unsure (1)..(88): unsure at all Xaa locations
  Clone ID: PAT_MRT3847_4116C.1.pep
ETCLKLPTGGRGRVIDVRWIQKKGGSSYNPETIRIYILQKREIKVGDKVAGRHGNKGIVSKILSRQDMPDLQDGRPXDMVFNPLGVLS

SEQ ID NO: 220531 - protein, 74 aa, Glycine max
  Clone ID: PAT_MRT3847_41170C.1.pep
MVSAATYLNCSQMSIPFPYLGIPIGANPRSSAIWDPIIKKCERKLAKCKQKYISFGRRVTLIKSVLNSIPIYFL

SEQ ID NO: 220532 - protein, 41 aa, Glycine max
  Clone ID: PAT_MRT3847_41171C.1.pep
TKRQPSIILFLIVSPILVFPVSPLSNQFALMQKNVFVRTSG

SEQ ID NO: 220533 - protein, 54 aa, Glycine max
  Clone ID: PAT_MRT3847_41172C.1.pep
NSFLNLPIKQIPIISFFITIHYNSKYINYIHSTNTISVNIYSHTTNLLTIYNIF

SEQ ID NO: 220534 - protein, 47 aa, Glycine max
  Clone ID: PAT_MRT3847_41173C.1.pep
ARGIRLASLISGLTIFHYFLPGTGTGLSTVSSFNIQYDEDDTFHITH

SEQ ID NO: 220535 - protein, 103 aa, Glycine max
  Clone ID: PAT_MRT3847_41174C.1.pep
LCLKTTDVEEFSFVFRFCFCCVCCVSCNLMSAAFCFVWFVSFYVSSWLLLRASVQGQEFVVLSGQQGRAKQSSQTVTFVRLVGSVSFFFIFSTFFQESNCRFA

SEQ ID NO: 220536 - protein, 108 aa, Glycine max
  Clone ID: PAT_MRT3847_41175C.1.pep
MGHCCSKNIAVNNETLPADHAPKPPHYAAAVAASPLPPSGSSVSAATPGRNTPAQSFSMSPFPSPLPAGMAPSPARTPGRKFRWPLPPPSPAKPIMAALLRRQGKAKP

SEQ ID NO: 220537 - protein, 70 aa, Glycine max
  Clone ID: PAT_MRT3847_41176C.1.pep
APPFFPLRFPGFIFVGNGEGKYFFQKISLFLLLSKFFCPSLKGNYVSLWGTGGNSRVVFRCLPCVRFIFS

SEQ ID NO: 220538 - protein, 174 aa, Glycine max
  Clone ID: PAT_MRT3847_41177C.1.pep
MMGRRMMQWNTITKASILVTITLLLILPVAVNSMRLELVHRHHERFAGGGGDVDRVEAVKGFVKRDKLRRQRMNQRWGVVSNYDSRRKGFEMTTTPAEVEMPMHSGRDDALGEYFAEVKVGSPGQRFWLVVDTGSEFTWLNCVMQNATSTTTSRKIITQKKQQSHHHHVHKHHS

SEQ ID NO: 220539 - protein, 252 aa, Glycine max
  unsure (1)..(252): unsure at all Xaa locations
  Clone ID: PAT_MRT3847_41178C.1.pep
ISKPSFTLPKTLKLKTKQQELLIRVATLSLIYVLAFITRLFSVLRYESMIHEFDPYFNYRTTLFLTRNGFAEFWNWFDSESWYPLGRIIGGTLYPGLMLTAAAIHSLLRFLRLFVHIREVCVLTAPFFASNTTLVAYFFAKEVWDSGAGIVAAALIAICPGYISRSVAGSYDNEGVAIFALLLTFYLFVKAVNTGSLAXLGSAFGYFYMVSAWGGYVFIINLVPXYVLVLLVTGRYSMRLYVAYNCMYVLGM

SEQ ID NO: 220540 - protein, 93 aa, Glycine max
  Clone ID: PAT_MRT3847_41179C.1.pep
VEEDHPTLHCSRNQTLKRLNLSSSTLQLALQLHTNIPRVVCCLKRHRRWRWNARRPVQAFVVHGLGLVPLEPSKNQARRRIHVVLNLIQRKNE

SEQ ID NO: 220541 - protein, 448 aa, Glycine max
  Clone ID: PAT_MRT3847_4117C.1.pep
MSGKQAVRPRTRVGKYELGKTIGEGSFAKVKFAKNVENGNHVAIKILDRNHVLRHKMMEQLKKEISAMKMINHPNVVKIYEVMASKTKIYIVLELVNGGELFNKIAKNGKLKEDEARRYFHQLINAVDYCHSRGVYHRDLKPENLLLDSNAILKVTDFGLSTYAQQEDELLRTACGTPNYVAPEVLNDRGYVGSTSDIWSCGVILFVLMAGYLPFDEPNHATLYQKIGRAQFTCPSWFSPEAKKLLKRILDPNPLTRIKIPELLEDEWFKKGYKPTTFVEEEDVNVDDVAAAFNDSKENLVTERKEKPVSMNAFELISRSQSFNLENLFEKQTQGIVIRGSVKQETHFTSQRPANEIMSKIEEAAKPLGFNVHKRNYKMKLQGDKSGRKGHLSVATEVFEVAPSLHMVELRKTGGDTLEFHKFYKSFSSSSGLQDIVWHDTEGKNMKN

SEQ ID NO: 220542 - protein, 63 aa, Glycine max
  unsure (1)..(63): unsure at all Xaa locations
  Clone ID: PAT_MRT3847_41180C.1.pep
SEQSLISLLWVVFRYDANEYKRRKKKYIXLNFXDTKTLIFEEXHFLNHSPPTPSYYYIPSFNP

SEQ ID NO: 220543 - protein, 28 aa, Glycine max
  Clone ID: PAT_MRT3847_41181C.1.pep
TKKILNKLLTLKPIKTPNAPYKIKHLIQ

SEQ ID NO: 220544 - protein, 33 aa, Glycine max
  Clone ID: PAT_MRT3847_41182C.1.pep
SYIIHGHGVYQEMVIVKVLLQWSPYIRPRRLCL

SEQ ID NO: 220545 - protein, 122 aa, Glycine max
  Clone ID: PAT_MRT3847_41183C.1.pep
DYMKEKSLHYYPGPNQNLPLIGQTSQTGENKTFDGHLMNRNSVLDHIPGSYTQPWHYESNGSNSNTLEQLLKKNISNIDSANRNLDANNNMPARNPLLSMFYPQASSNVSDPYAGVQRGNIH

SEQ ID NO: 220546 - protein, 74 aa, Glycine max
  Clone ID: PAT_MRT3847_41184C.1.pep
NLATWRFKVSNFRQVNLKISVFGPVNWATEDFFFVKVLKSEAEDIQPSNERDSFIYNLKLNCKMIFFSSLFAPS

SEQ ID NO: 220547 - protein, 104 aa, Glycine max
  Clone ID: PAT_MRT3847_41185C.1.pep
NWLGWCFTWATVIIGGTNTCISKGPPKGICDAVNHYTGTQICGAPTLLDMMAKASPSDQRSPSNRVNVTNAGVLPPYHVPNTEPQHGCDGNMGTGMTKTFGPAT

SEQ ID NO: 220548 - protein, 71 aa, Glycine max
  Clone ID: PAT_MRT3847_41186C.1.pep
WLPCHCSYSFTNKIATEGVRVSLNMERSIALLTSLLSTVVGVYAYDFAAAVSTSRRSLRLAKFTQNHYTTL

SEQ ID NO: 220549 - protein, 692 aa, Glycine max
  Clone ID: PAT_MRT3847_41187C.1.pep
VFIVLKANDSGEGGTFALYSLICRYANVSLLPNRQQADEQISSFKLKLPTPELERALRIKDTLERTPFLKNLLLVLVLLGASMVIGDGILTPAISVMSAISGLQDQIDEFGTGEVVGISIVVLVALFSIQRFGTSKVGFMFAPILALWFFSLGAIGIYNILKYDITVLRAFNPAYIYYFFKNNGKDAWSALGGCVLCITGAEAMFADLGHFSVPAIQIAFTCVVFPCLLLAYMGQAAFLTKNPNSYASVFYKSVPESLFWPMFVIATLAAMIASQAMISATFSCIKQSMALGCFPRLKIIHTSKRFIGQIYIPIINWFLMIMCIVVVSIFQSTTDIANAYGMPEVGVMMVSTTLVTLVMVLIWQTNLFLAFSFALVFGTVELIYLSSVLSKIIEGGWLPLAFATFFLSVMYTWNYGSVLKYRSEVREKVSVDSMLELGSNLGTVRVPGIGLLYNELVQGIPSIFLQFLLNLPALHSTIVFVCIKYVPVPVVPQEERFLFRRVCPKDYHIFRCVARYGYKDVRKEDHHAFEQLLIESLEKFLRREALETALELEGNLSDEMDSVSVNTRVSDVPVDTTAEELRIPLVHDQKLEEAGASSASQEVASALPSSYMSSDEDPALEYELSALREALESGFTYLLGHGDVRAKKNSFFFKKLMINYFYAFLRKNCRGGTANMRVPHTNIIQVGMTYMV

SEQ ID NO: 220550 - protein, 71 aa, Glycine max
  unsure (1)..(71): unsure at all Xaa locations
  Clone ID: PAT_MRT3847_41188C.1.pep
FLYLTTTHPKRGEVRKTNTPRQTPRGKNRTKNPKRPKARTTKKGKDAXPRKNPPPTPGRRNTTPPKTEPKT

SEQ ID NO: 220551 - protein, 259 aa, Glycine max
  unsure (1)..(259): unsure at all Xaa locations
  Clone ID: PAT_MRT3847_41189C.1.pep
KYNQYKWLATRGVDEEALLKGLPADLRRDIKRHLCLELVRRVPLFDQMDERMLDAICERLKPALCTENTYLVREGDPVNETLFIIRGHLDSYTTNGGRTGFFNSCHIGPGDFCGEELLTWALGXRPSFILPSSTRTVKAISEVEAFALMAEDLKFVASQFRRLHSKQLRHKFRFYSHQWRTWAACFVQAAWRRYKKRKEAAELRARENVHEGETAAYRSGLVVVYATRMARKGVHHVRSGTDSGVSLQKPEEPDFSVDE

SEQ ID NO: 220552 - protein, 56 aa, Glycine max
  unsure (1)..(56): unsure at all Xaa locations
  Clone ID: PAT_MRT3847_4118C.1.pep
XPPXRXKKITELLLLTLVDSHKIIYGQSKKVIDMLGGIYIFIRWSQHDAIKMVENT

SEQ ID NO: 220553 - protein, 64 aa, Glycine max
  Clone ID: PAT_MRT3847_41190C.1.pep
SLTSFVNDFYILYLIKKNLDNMTEHVDFSFYYSFSIQFFMNFVIFFQIILQEISLSSATILVKI

SEQ ID NO: 220554 - protein, 73 aa, Glycine max
  Clone ID: PAT_MRT3847_41191C.1.pep
KGIKLMMLGNFEIHLISFAILYRGKLLSCIKQKIKLGGFRCVLNHLILCSLDFLVKEIDFWLNINCYLFESQP

SEQ ID NO: 220555 - protein, 31 aa, Glycine max
  Clone ID: PAT_MRT3847_41192C.1.pep
PLEPNDVINHLGNSTLVVGRERHIQVSQGYI

SEQ ID NO: 220556 - protein, 540 aa, Glycine max
  unsure (1)..(540): unsure at all Xaa locations
  Clone ID: PAT_MRT3847_41193C.1.pep
MEYERIEKVQAGIISPSKLRMKLLGPLHHRKKDGSNSNSSRTSPSRIEDAEFVNSLLGSKNDNLDDEVTSPSLDVLSLKPSSDAVLDRRQNGQISYEPKETMPKENSDTGRVKMQHFQKVDTRSSSAIHAVRAIEDENLDYDSNASSSSFEFDKGERPGNNPATRPYXRPIPSKWNDAEKWIMNRQNIQANHSKKNTCHNQANRMPTNMGRVAPESGNYDHKLPTGKATETKRVDFCQPTSHMGFEKFSFVPSDAHSVSGQAHGRNPVVESLPQSKDLKDVNELGLCCSRSTDDQSVMPGIRSVAMRDMGTEMTPVPSQEPSRTATPVGSATPLRSPVSSMPSTPRTGAPAPTPLDNTTNEDSQFPVENGKRHLSEEEMKIKTRREIAALGVQLGKMNIAAWASKDEQEKNKSSPRDMSVQEQERIEFEKRAALWEEAEKSKHTARFKREEIKIQAWESQQKAKLEAEMRRIEAKVEQMRAQTHAKMVKKIAMARQRSEEKRAAAEARKNREAERTVAQTEYIRQTGRLPSSNYICCGWL

SEQ ID NO: 220557 - protein, 37 aa, Glycine max
  unsure (1)..(37): unsure at all Xaa locations
  Clone ID: PAT_MRT3847_41194C.1.pep
XXXNRXDIXXKNXLNLXXLRYLNXXVIFFYHIYNLIC

SEQ ID NO: 220558 - protein, 145 aa, Glycine max
  unsure (1)..(145): unsure at all Xaa locations
  Clone ID: PAT_MRT3847_41195C.1.pep
MEYERIEKVQAGIISPSKLRMKLLGPLHHRKKDGSNSNSSRTSPSRIEDAEFVNSLLGSKNDNLDDEVTSPSLDVLSLKPSSDAVLDRRQNGQISYEAKETMAKENSNTXRVKMQHFQKVDTGKSSAIHAVRAIEDENLDYDSNA

SEQ ID NO: 220559 - protein, 50 aa, Glycine max
  Clone ID: PAT_MRT3847_41196C.1.pep
GPQLSLSFPCQYYSCCKSMHQPLNIIIIFIDCIKFLMHYRNILEIHKGQL

SEQ ID NO: 220560 - protein, 78 aa, Glycine max
  Clone ID: PAT_MRT3847_41197C.1.pep
ETPNLASVSATPVHLERAVGGGKVSKAGPIPVNSGMDPTFEPKGRGPTRPSGGVETVVVPLREFLSKTCNYSSICCSL

SEQ ID NO: 220561 - protein, 90 aa, Glycine max
  Clone ID: PAT_MRT3847_41198C.1.pep
IHGEKGPNGQQTGLLKFAGPGVFLKWKFFFTKKPGGFFFNPPRFFGQTMIFDQLHFVFFLKMGARTGTFFLSARRKNIYRLVFSRIGIFL

SEQ ID NO: 220562 - protein, 69 aa, Glycine max
  Clone ID: PAT_MRT3847_41199C.1.pep
FIPLFFPLFHKTKWGTFCNIILKKKSLSLPFLNRVIYIIFFPREQDYFYSTTCASILFILSFDFSLKPL

SEQ ID NO: 220563 - protein, 42 aa, Glycine max
  Clone ID: PAT_MRT3847_4119C.1.pep
LPKRYNNTAFIPHSQLLIPRKERTVHTTSSMAASSHQRTNPS

SEQ ID NO: 220564 - protein, 39 aa, Glycine max
  Clone ID: PAT_MRT3847_411C.1.pep
VLFNLFSHKKMFFFFTPYKTKECHFVVTKLWFQNNLHFN

SEQ ID NO: 220565 - protein, 67 aa, Glycine max
  Clone ID: PAT_MRT3847_41200C.1.pep
KKKDVYKKKKGLIKGGGFNWKKKKSYNLVKRWGKKKKKNVSKMGKNLVALPVFFLKKNWVRVFKPNL

SEQ ID NO: 220566 - protein, 45 aa, Glycine max
  Clone ID: PAT_MRT3847_41201C.1.pep
LISHRPDKPASQAPYNSRNYSTKSASPHDALTITNQRISSMKHSA

SEQ ID NO: 220567 - protein, 219 aa, Glycine max
  Clone ID: PAT_MRT3847_41202C.1.pep
CGDTFKVGLVQAVHFLGCLIGAGTFGHLSDSSLGRKGSLTVVCALNTIFGCLTALSPNYWIYVLLRLLTGFSSGGVGLTAFVLATEPIGPTKRGAAGMSTFYFFSGGIALLSGIAYIFQTWRYLYIASSIPSFLYIILVLPFISESPRWYLIRGKVTEAMKLMSTIASSNGKHLPDGVLLALDNETSPTTNQGSSSGYDITEIMTYKNENKDALIESII

SEQ ID NO: 220568 - protein, 72 aa, Glycine max
  Clone ID: PAT_MRT3847_41203C.1.pep
MASLATLAAVQPAALNGLAGTSLSGTKLSFKPSRQTGQFQDFRSRAVVTKYGDQSVYFDLEDLGNTTGQLGL

SEQ ID NO: 220569 - protein, 111 aa, Glycine max
  unsure (1)..(111): unsure at all Xaa locations
  Clone ID: PAT_MRT3847_41204C.1.pep
MDRFSSSTILPEAFQGAKDDFTMQLALVWNQIKAPLIVPLLRRALFLCLIMSVMMFIERVYMGIVITLVAWGRSWPEKRYNWEPMKDDIELGYSCYAVXLVQVPMYNDREV

SEQ ID NO: 220570 - protein, 81 aa, Glycine max
  unsure (1)..(81): unsure at all Xaa locations
  Clone ID: PAT_MRT3847_41205C.1.pep
VSAASWGLFXGPVAVXLVLCGAASGLLVASVVPPSPXARSXLSGPVSLSCLLPXWVRVGFSAAPGLHEGFVAPPRVGGFFS

SEQ ID NO: 220571 - protein, 67 aa, Glycine max
  Clone ID: PAT_MRT3847_41206C.1.pep
PQNNMCIDHHILTKLSFLISLPTMPPETLMSTPQNTISVPFMWEEAPSKPSHYHTESDPEDSATISK

SEQ ID NO: 220572 - protein, 49 aa, Glycine max
  Clone ID: PAT_MRT3847_41207C.1.pep
PIHLYSSKRFVLPLLTCLFHLMGVHKTPLKPRWGPPMSVTHSRSRWCCS

SEQ ID NO: 220573 - protein, 69 aa, Glycine max
  Clone ID: PAT_MRT3847_41208C.1.pep
FILHIHDKTLYVRKYICMKLIHRQHYHVYACVCTYVCSAAEVDSEEGAVHIGELTAGGSVGLPTTTNLL

SEQ ID NO: 220574 - protein, 113 aa, Glycine max
  Clone ID: PAT_MRT3847_41209C.1.pep
MASFGSLKSTIFEKEERKQQYQSHIRGLNAYDRHKKFMDDYVKFYGKERPSNLKLPIKTDQDTLREGYRFIRSEEDDMNPSWEQRLVKRYYDKLFKEYPLQTCSVFILILFIL

SEQ ID NO: 220575 - protein, 78 aa, Glycine max
  unsure (1)..(78): unsure at all Xaa locations
  Clone ID: PAT_MRT3847_4120C.1.pep
DWNIRRKISAGAAKVVEYLXHDRANPPVSDRDGICSEDITGCKVSDPKRSDGGLAKLVPSGDKSHGSYRVMGTYGYGA

SEQ ID NO: 220576 - protein, 107 aa, Glycine max
  Clone ID: PAT_MRT3847_41210C.1.pep
GIRGKEGGFPFFFKFKRSFEFRWGGKAPCFIPLGMFRQAWLCFVLFPPLGKKFGGFGNSLSFFLGKRGFKTKPAPGYFFFFLKLFLWSGLFSSRMMLKNLYKAFEPM

SEQ ID NO: 220577 - protein, 72 aa, Glycine max
  Clone ID: PAT_MRT3847_41211C.1.pep
EYRSVTNQKRGVGLALCRNPKFISCSHSQFFFYSHSDLPHTHKGLKYWDLIHWRWIKIAKNVICFVLDIATQ

SEQ ID NO: 220578 - protein, 77 aa, Glycine max
  Clone ID: PAT_MRT3847_41212C.1.pep
MVVKVYGPHCASTKRVLVCLVEKEVEFEVVPVDVTKGEQKDPEYLKLQPFGVVPVIKDGDYTLYGYTLCFFVLFFYL

SEQ ID NO: 220579 - protein, 77 aa, Glycine max
  Clone ID: PAT_MRT3847_41213C.1.pep
PLMLVSLIIFLSTTEYNTHKHKNKQIVNQRPEKERNRKKEPRKMKNNVVTPQLSPVSSSLLSLLSPSTCTHAHAVLN

SEQ ID NO: 220580 - protein, 53 aa, Glycine max
  Clone ID: PAT_MRT3847_41214C.1.pep
FFFLNNEKSFYCSMVTSVTENCEKSLCHSHPTHYHTLHCKPNLHLNHAQPRTY

SEQ ID NO: 220581 - protein, 127 aa, Glycine max
  Clone ID: PAT_MRT3847_41215C.1.pep
TGQFPIKNKMGEKFLAVATNTPFYDDDGSLVGLICVSIDLRPFLEMKVPMPSVRNIESDSDSGGTRPRSSITNKLGLDTQQPLQASIASKISNLASKVGNKVKSRIWTGENNLDRESGSGESHHSEH

SEQ ID NO: 220582 - protein, 275 aa, Glycine max
  unsure (1)..(275): unsure at all Xaa locations
  Clone ID: PAT_MRT3847_41216C.1.pep
AKRNALMASQARNAFQKVMSDGMRRPMHSILGLLSMIQXDKLKSEQXXIVDAMLRTXNVLSNLINDAMDNSTKDEGRFSLEIRSFGLHSMLKEAACLSKCMCVYKGFGFMVEVEKCLPDNVMGDERRVFQVILHMVGNLLEHNHGGGILVYRVFAETGSQGRSDKGWTTWRPSSSSGDVNIRFEIGINSSDSEVGSSISSGFGGRKYSSDRVGGRLSFSICKRVVQVSFIMSIICMHEYSKCIKTATFILVMCYISSIFAEFGGRLYYAVLHYSA

SEQ ID NO: 220583 - protein, 63 aa, Glycine max
  Clone ID: PAT_MRT3847_41217C.1.pep
KRQRERRTTWCPELMVRSAILTRPSSGLIDLVNCRHPRPGHCEGFQNQKQSNQSSLPSTAATR

SEQ ID NO: 220584 - protein, 79 aa, Glycine max
  Clone ID: PAT_MRT3847_41218C.1.pep
SPGSYLIKITDRLMGLFGGLNIRTRAEATERPNPLLCCRGGHHMGHQRSQGSIFPLWQVIICKLISLQREPDQGAIQDP

SEQ ID NO: 220585 - protein, 60 aa, Glycine max
  Clone ID: PAT_MRT3847_41219C.1.pep
FIGVNCFLQVIAGQVILAMLIFKPFMYKQKLVMTNYLHTHGFFICIISMSNVYQKKKKKS

SEQ ID NO: 220586 - protein, 61 aa, Glycine max
  unsure (1)..(61): unsure at all Xaa locations
  Clone ID: PAT_MRT3847_4121C.1.pep
MVIDIALGVALDFSKSRENAQXWGIENLAQKCDTIXVVHIDFNSRHDSIIKLWAESGSPLN

SEQ ID NO: 220587 - protein, 47 aa, Glycine max
  Clone ID: PAT_MRT3847_41220C.1.pep
NETKHFEEMVGASSNLHYFVKELLDIDYIIADIIGCSLVIHHACYNI

SEQ ID NO: 220588 - protein, 90 aa, Glycine max
  Clone ID: PAT_MRT3847_41221C.1.pep
RPRLFFFITGILLGLGNGGGGFPLSHIYYLHWHQPSPNQKSNTPNSYIYIFAYLFLQPAELKFPLESRYHFLSQKDRTNGTTNRGNSSIH

SEQ ID NO: 220589 - protein, 84 aa, Glycine max
  Clone ID: PAT_MRT3847_41222C.1.pep
GPIYSLALLPLTLTCLTTASFSHWTMHFKPNNTHTLVRHGTIRTTAFRPTDLHATTNGPQHAGFLNRSHFWRCSNRHIAIAYGR

SEQ ID NO: 220590 - protein, 88 aa, Glycine max
  unsure (1)..(88): unsure at all Xaa locations
  Clone ID: PAT_MRT3847_41223C.1.pep
MIVVTGDVLALLGGNPSPSADDIKHILGAIGAEADNELIELLMTELKGKDIXELIANGSAKMSAVSGGGAAVAVAAAVAGGAAAPAAE

SEQ ID NO: 220591 - protein, 102 aa, Glycine max
  Clone ID: PAT_MRT3847_41224C.1.pep
ADGSIIVAKFSTVFLLSWFTTHQVFSDYKTFLSFLTVSTGHSLLRVRRITTIVCACFLLLALDEFKFGNRLIAIFSKNIRLLLTFFFLNLLQQALHQLTFFG

SEQ ID NO: 220592 - protein, 117 aa, Glycine max
  unsure (1)..(117): unsure at all Xaa locations
  Clone ID: PAT_MRT3847_41225C.1.pep
ARVAVTELSGQICHICGDELXXTGNXNQLVAGNXFSFPLCKPCYYYXKKEGNQVCPQCKTIFYPIKSSPIVEGDEKDDYTYDLKSEFYIWSVFSALLNYCSQVNGSFIHTPSNFYSP

SEQ ID NO: 220593 - protein, 59 aa, Glycine max
  Clone ID: PAT_MRT3847_41226C.1.pep
NYNVQNKFSRRVYKDSYTCENAIGTYMGSTNSGLLINERRITRHVYHINVRKNTSQKIV

SEQ ID NO: 220594 - protein, 89 aa, Glycine max
  unsure (1)..(89): unsure at all Xaa locations
  Clone ID: PAT_MRT3847_41227C.1.pep
KVLTINVISCITQAFKLLKIYXXKVFXKLVISLCVXLIKVVINCFRNFYPIFYFGECLILVLICWSYSGYDQNSYLSNGHPSPHQRGVE

SEQ ID NO: 220595 - protein, 64 aa, Glycine max
  Clone ID: PAT_MRT3847_41228C.1.pep
KCVKLMEVDLDSLLHSFGKKKAYDNRQSGKALTVDKLFYNVGFKVAFGSPGVHPQKVWPRPLIF

SEQ ID NO: 220596 - protein, 103 aa, Glycine max
  unsure (1)..(103): unsure at all Xaa locations
  Clone ID: PAT_MRT3847_41229C.1.pep
MALAGGATFSSSAAAAAAACSSFFSRLGSSSDAKRSSKLILFXXPXTPXLPTAVANITQRRWRVRPGGRTPTQYSLLXLAATILDPEVEKEKDRFMSNYATRP

SEQ ID NO: 220597 - protein, 38 aa, Glycine max
  Clone ID: PAT_MRT3847_4122C.1.pep
WLFNLSFPLELKLSSLWCWKGNLGNFPWAQKKNAVLVW

SEQ ID NO: 220598 - protein, 76 aa, Glycine max
  Clone ID: PAT_MRT3847_41230C.1.pep
SYSNHKYMHLGVCSDTYNEHVWCRCSKHDVHQSVCKVGFSLWQVIYEIQVWSHHCRVILVRNQPGHVSQSEQYIIA

SEQ ID NO: 220599 - protein, 57 aa, Glycine max
  Clone ID: PAT_MRT3847_41231C.1.pep
CTTGRGFLYVNHGRGPAPEPAFYLECTIIPSLKPCDHCYTTERDDPGTHLSSYVPVF

SEQ ID NO: 220600 - protein, 153 aa, Glycine max
  Clone ID: PAT_MRT3847_41232C.1.pep
MAIGFMEVQLVKAKGLQETDIFAHMDPYVLLQYKGQERKSSVIHEGGRNPIWNEKFVFRVEYPGSGDQYKLNLRIMDKDVFSADDFVGQATIYVKDLLAEGAENGSAELRPHKYSVVRADQSYCGEIEVGITFTRKEEEYIEDDVGGWKESCF

SEQ ID NO: 220601 - protein, 111 aa, Glycine max
  Clone ID: PAT_MRT3847_41233C.1.pep
GRSRGFGFFPFPPQDSIRDPFKGITGPTLYGPPPPLNKAPSPGNPGGGGGGSESGGGSPPRGGFGGSGAPREGAFTRTGGGFGGAKTPLFGPSGGGGSPSFLGGGDGTWKN

SEQ ID NO: 220602 - protein, 95 aa, Glycine max
  Clone ID: PAT_MRT3847_41234C.1.pep
FFFFFFFFFFGFFFFFFQKKKWFPFLERNPIPGFWSSQKGAPIFGAPFLKFFTMEIFVKPRSPFQLDQPCFLPGGEQHRNEPAFFWPRLTPGGAP

SEQ ID NO: 220603 - protein, 61 aa, Glycine max
  unsure (1)..(61): unsure at all Xaa locations
  Clone ID: PAT_MRT3847_41235C.1.pep
ISSXSVNSLKYLENSICSYPHDNIQNALRILNTFEPSLWLPMMPGGQFQVTTQNSQLISHY

SEQ ID NO: 220604 - protein, 128 aa, Glycine max
  unsure (1)..(128): unsure at all Xaa locations
  Clone ID: PAT_MRT3847_41236C.1.pep
VNRTSAHEYGKXYFSGSKLKSVPAGHKITITEGIDKTSATWQLRKIANCDSLKRNSRQTGSGLWGATADKARQWTERNQMATKKTPMQEDYSENSVSELRRIXLHSPKEARQPRRKALSRNERLQKAD

SEQ ID NO: 220605 - protein, 45 aa, Glycine max
  Clone ID: PAT_MRT3847_41237C.1.pep
HNQMQQTRQGSLSNYGTIYGPILILVLLLNGANLTPMHCRIIHLK

SEQ ID NO: 220606 - protein, 64 aa, Glycine max
  Clone ID: PAT_MRT3847_41238C.1.pep
VFRMTGHISFVYGWYSFLTDCAMRAGSIWTALFKHWIGCGRFISPAPVYIHAWVRHILWMINLD

SEQ ID NO: 220607 - protein, 268 aa, Glycine max
  Clone ID: PAT_MRT3847_41239C.1.pep
VKFSVGILRAECLYNMDQEDNKMGTVNPPEMSSNPLSLGKDETMGTENPLSSGKDDVVGTENPPEVSSNSLSSAKDGMVDAANPTKVSSNHTPSVKDNMMGTENHPSSGKDGEMCAENKVKEGQNTSISEKSPKEESDVSQLKDTDPPDGSSKLELSDKNTPQPLKAKSIIVKKSQAGKLKAKKNNGSQQIRGKRRIKTSKKVDNAESCHNADEKQILDNSQLKETNDELPKGKSQEAENKVKESQNRSTSGKSPREKSQQAQKDKTS

SEQ ID NO: 220608 - protein, 181 aa, Glycine max
  unsure (1)..(181): unsure at all Xaa locations
  Clone ID: PAT_MRT3847_4123C.1.pep
XFXMCXGARCVXVPXSFAVVXVXSXCVVCRCXCVLXRXXXSVCALXCXGXSXLSSVLCALCAVCXXXXFVXGXXXXAXAXCXXPXIGVXXVXXCVCWXXRXXLCXFCFCLRSXRSTLGNXXVXVXVXXXCXXXRVXXXXXCVCVXXCXXGXLXCAXRXXXSXCCSVXXAXXXXXSXXXXVX

SEQ ID NO: 220609 - protein, 71 aa, Glycine max
  Clone ID: PAT_MRT3847_41240C.1.pep
TKQVMSKMAEMSNSGCGDDEKLMLETSHLLLACLSWMAHCRSDIWRDKCATRCASSIAAVSTSTSYDVHIL

SEQ ID NO: 220610 - protein, 71 aa, Glycine max
  Clone ID: PAT_MRT3847_41241C.1.pep
ISYTNKMWAITLHWVPSNSGQNFPVDRQDVDIVLGSALTGPPRKHNKQPRMNDLMLWKSTQNHVWLQLIEG

SEQ ID NO: 220611 - protein, 357 aa, Glycine max
  Clone ID: PAT_MRT3847_41242C.1.pep
MGSLEAERTTVGLAARDPSGILSPYTYNLRNTGPDDVYIKVHYCGICHSDLHQIKNDLGMSNYPMVPGHEVVGEVLEVGSDVSRFRVGELVGVGLLVGCCKNCQPCQQDIENYCSKKIWSYNDVYVDGKPTQGGFAETMVVEQKFVVKIPEGLAPEQVAPLLCAGVTVYSPLVHFGLKESGLRGGILGLGGVGHMGVKIAKALGHHVTVISSSDKKKQEALEHLGADQYLVSSDVTAMQEAADSLDYIIDTVPVGHPLEPYLSLLKLDGKLILMGVINTPLQFVSPMVMLGRRSITGSFIGSMKETEEMLEFWKEKGLSSMIEVVNMDYINKAFERLEKNDVRYRFVVDVKGSKLVD

SEQ ID NO: 220612 - protein, 358 aa, Glycine max
  Clone ID: PAT_MRT3847_41243C.1.pep
MGSLEAERTTVGLAARDPSGILSPYTYNLRNTGPDDVYIKVHYCGICHSDLHQIKNDLGMSNYPMVPGHEVVGEVLEVGSNVSRFRVGELVGVGLLVGCCKNCQPCQQDIENYCSKKIWSYNDVYVDGKPTQGGFAETMIVEQKFVVKIPEGLAPEQVAPLLCAGVTVYSPLVHFGLKESGLRGGILGLGGVGHMGVKIAKALGHHVTVISSSDKKKQEALEHLGADQYLVSSDATAMQEAADSLDYIIDTVPVGHPLEPYLSLLKLDGKLILMGVINTPLQFVSPMVMLGRKSITGSFIGSMKETEEMLEFWKEKGLSSMIEMVNMDYINKAFERLEKNDVRYRFVVDVKGSKLVDQ

SEQ ID NO: 220613 - protein, 440 aa, Glycine max
  Clone ID: PAT_MRT3847_41244C.1.pep
MGSLEAERTTVGLAARDPSRILSPYTYNLRNTSPDDVYIKVHYCGICHSDLHQIKNDLGMFNTPFQFVSPMVMLGRKSITGSFIGSLFEATLVFPFNFNSTLNQTHSVFSSIFISIQSSMAEEPQKPASAEEVVAVPAENPPSEAEAENIEAEKAQSGVEDKISQSVSFKEETNVVGDLPEAQKKALDELKKLVQEALNNHELTAPKPEPEKKKPAAEKKEEVEVTEGKKEAEVIEEKKEVEVTEEKKEIEVTEEKKEAEVIEEKKEVEVTEEKKEIEVTEEKKEAEVKEEKKEGEVTEEKKEVEVTEEKKEAEVIVEEKKEVEVTEEKKEVEVTEVRRTLEKKEEEVSEEKKEVEVTEEKKEAEVTEEKKEAEVTEEKKEVEVAEEKKEVEGTEEKKEVEVAEEKKETEVIKEKKESILLARHTQHPSFHHEESGKVIN

SEQ ID NO: 220614 - protein, 35 aa, Glycine max
  Clone ID: PAT_MRT3847_41245C.1.pep
AYIHIGINVFDRKEHTNQSNTCLIMGTNINILLFP

SEQ ID NO: 220615 - protein, 62 aa, Glycine max
  unsure (1)..(62): unsure at all Xaa locations
  Clone ID: PAT_MRT3847_41246C.1.pep
MWGSMVGEARRAACNWNWVSLRSMGGGPRTFLGGVNKWKXNRMHEKLYRDWQNRIIPREKQL

SEQ ID NO: 220616 - protein, 259 aa, Glycine max
  Clone ID: PAT_MRT3847_41247C.1.pep
MAEEPQKPASAEEVVPVPADTPPTTQSEAEAEVEANAESIEEVVAEAEKAQSGVEDKISQSEAEAEAEVEANAKSIEEVVAEAEKAQSGAEDKISQSVSFKEETNVVGDLPEAQRKALDELKRLVQEALNNHELTAPKPEPEKKKTELKALEKKEEEVSEEKKEVEVTEEKKEAEVTEEKKEAEVTEEKKEVEVAEEKKEVEGTEEKKEVEVAEEKKETEVIKEKKEVEVTEEKKEVEVTEEKKEAEVIEEKKEVDATE

SEQ ID NO: 220617 - protein, 73 aa, Glycine max
  Clone ID: PAT_MRT3847_41248C.1.pep
CERADIAGYSTGPYKRRKSLRAIIKLNNIHTYIALCWSMVSHTGTRDNSELTLKQTLLRQKSGTVQRGHARSG

SEQ ID NO: 220618 - protein, 69 aa, Glycine max
  Clone ID: PAT_MRT3847_41249C.1.pep
HFVPPPRIENYLPSSTGSFLYAADLSDGKNECLIEGWDIVEHPTFPPPPSQSEDVEHWTRAMFIDAKGK

SEQ ID NO: 220619 - protein, 193 aa, Glycine max
  unsure (1)..(193): unsure at all Xaa locations
  Clone ID: PAT_MRT3847_4124C.1.pep
EKKKKKKKQEKQNQKKTKKTTAKKQEKRKRPKQKAPKSNRKHQQKKKGGAPPKGPKLPTRGRPSKTPLKGPPKANPGPAVPHRRAGKTPGGPQQKRRATNPPLPGGGKTKEAPPNPPPNQWPPXRAKGPPPEGAHKARGGGGYPPGGPKHWAGPKAPFFGFFPLPFRPGGRGSPEKPKKGGPPRGPQKGLKGP

SEQ ID NO: 220620 - protein, 55 aa, Glycine max
  Clone ID: PAT_MRT3847_41250C.1.pep
TKICQRVVLLYIPCREEHGFNLQVGLICGYEGVFKSSFHTLGLIKSKGVKFPSID

SEQ ID NO: 220621 - protein, 98 aa, Glycine max
  Clone ID: PAT_MRT3847_41251C.1.pep
ARGTFGRKRLKTPNFCSSSLCNLYTEDLWITGANLVHCNTVPSQISSTDKCLTSWFRRFFNPSIDSFLGYAFYLPNNIQATLFVLLFSSEKKGLTVID

SEQ ID NO: 220622 - protein, 372 aa, Glycine max
  Clone ID: PAT_MRT3847_41252C.1.pep
MAPSLETSNGEAMHLKQVEEEQDGILFAMNMMSTMVYPFVVRTAIELGIFDIIAKAGEGAKLSAEEIIEQLGTKNPEAPTMLDRLLRLLASHSMLSSSLDTEDLQHGQNSPKRLYSLTYASKYFVTDADGVSFGATLNLLLDKVFLESWTELKGAILEGGVAFNRVHSMHSFEYPAVDPRFNDVFNKAMFNLTTIVMKRVLEFYEGFKNINRLVDVGGGLGINLNLITSKYPHVQGVNFDLPHVIEHAPTYPGIEHVGGDMFESVPNGDAIFMKWILHDWSDEQCLKLLKNCHKAIPSDGKVIVVDLILPILPESTVTAKSGFQADLLMMTQNSGGKERTQHEFMELALSSGFSGIKIVCSVSGFWVMEFYK

SEQ ID NO: 220623 - protein, 311 aa, Glycine max
  Clone ID: PAT_MRT3847_41253C.1.pep
ALGYVYEFHLNKGGQKGREIPDGDFPFVGKMHVSTSFTLCPNNCRIRETEFTLFHNMEISDKEMSTSEHSHRKSKGLSKVSKVFKTSPSSKRRTLSRFGGSSAIKESCPWEPYALGGTNLLDTDVPPNFEMATIVVKNHLPCKKPEKVGGWGLKFLNKSGENQITLPSESSNQNNGDCSSSTSILIPAGFHGGPRTRNGGPSSLIDRWKSGGHCDCGGWDEGCPLTVLERRSNKAEVMSKIDTGDGCKSVDLVIQGSSDYGPTLRMVNVHDGLYYIHFHPPLSALQSFSIAVAIIHAQSPTLQPNGAKKLS

SEQ ID NO: 220624 - protein, 121 aa, Glycine max
  Clone ID: PAT_MRT3847_41254C.1.pep
EPDLSLNISPPSISDSEAAKDVGSFGKVLYSDICSTSDSGSSGGSDLSHEFHNLGHHHHREPTLKLGFGTVDLNPHHHQVQGVPRSFIHHHLQPHIYGRDFKRSARVVHGVKRSVRAPRMR

SEQ ID NO: 220625 - protein, 65 aa, Glycine max
  Clone ID: PAT_MRT3847_41255C.1.pep
LSFSFGIITLGEAKPPLKTDKVLSQPSKAFGHSLQFINPKCCALKPNLWHKFFHNNLVQTFQKFT

SEQ ID NO: 220626 - protein, 59 aa, Glycine max
  Clone ID: PAT_MRT3847_41256C.1.pep
HASGILFVALVLGSGPVTGLSPPIFSCVGKCKTAADCNNICKPNCVCFKFEGEDYGCCK

SEQ ID NO: 220627 - protein, 57 aa, Glycine max
  unsure (1)..(57): unsure at all Xaa locations
  Clone ID: PAT_MRT3847_41257C.1.pep
KYEHIDFNXLSTITXGYTGSDLKNLCTAXXYRPVREVLQQERXRXXXXRXXKQFDQL

SEQ ID NO: 220628 - protein, 54 aa, Glycine max
  Clone ID: PAT_MRT3847_41258C.1.pep
APLLGTRLLSEMLSYINVIFTDILQQPVHISTLITLNFPDLYLTKKHTQLYHYQ

SEQ ID NO: 220629 - protein, 169 aa, Glycine max
  Clone ID: PAT_MRT3847_41259C.1.pep
MAPSTGKTLEEARKLVEQSFGNYVSSNVMLAAKEEINKIEKEIEFLMSEITDEAIDRKSRKALSPRQYKEIAELLEDLRAEKRVRSELRKQKEAKRISALKPLLEEPESGHLPFLCLQYRDSEGVEHSIPAVFLGKVDSLNASKLKDMISSVDSFALNLADAEPSVADS

SEQ ID NO: 220630 - protein, 86 aa, Glycine max
  unsure (1)..(86): unsure at all Xaa locations
  Clone ID: PAT_MRT3847_4125C.1.pep
SRNALEGKIPNACGVRSYIMVLVLXSKSLKGSSHKCISMVSNSGQXNLNHNHLXDKIYDGYRFDHARSLLLCNNESVCGKPLNPAC

SEQ ID NO: 220631 - protein, 41 aa, Glycine max
  unsure (1)..(41): unsure at all Xaa locations
  Clone ID: PAT_MRT3847_41260C.1.pep
YXXHSSTSPPXIRNLPVFGMFSXNLSALQQEYYEILPIVKE

SEQ ID NO: 220632 - protein, 89 aa, Glycine max
  unsure (1)..(89): unsure at all Xaa locations
  Clone ID: PAT_MRT3847_41261C.1.pep
TPGSSASQDPIHPLXWWKSPCCHMXXHIAFFCCLTVCPLLLFLPENYLLLVERNSAVFFEWGLKNGSQFVASEELCLKLEQCQAAHFVL

SEQ ID NO: 220633 - protein, 204 aa, Glycine max
  unsure (1)..(204): unsure at all Xaa locations
  Clone ID: PAT_MRT3847_41262C.1.pep
FPSHFPRKIRIPILSFGFIFLCECSLPMPRAXLFFPCSPSSFRCRAAAGDLSAGPSFIQSVAGGLRIGQFPDGAGLAVEGRRGGGGNEPIRVKKWSRKNESYLDNDAEPLPLPMTYPDSSPVSQEEIDKRLQCDPQIQDCKEVVYEWTGKCRSCQGSGYVSYYGKRGKPVTCKCIPCMGIGYVQKITARKDIDVMEDLENGKPP

SEQ ID NO: 220634 - protein, 97 aa, Glycine max
  Clone ID: PAT_MRT3847_41263C.1.pep
ARLNKMGNRDKNAAAKHSNQEVSESTPTLVQESRTKATAKIADGGSTNSTDDMSMRERRARDGEAIDAKGKREGESGRTRGLGNITRRKREEATEGI

SEQ ID NO: 220635 - protein, 61 aa, Glycine max
  Clone ID: PAT_MRT3847_41264C.1.pep
VRVYGMAKVSSKESHRVFLSQNLISSGAYREAQWPSFVLMSKAIKMADQHPHKIIIVWCHH

SEQ ID NO: 220636 - protein, 44 aa, Glycine max
  unsure (1)..(44): unsure at all Xaa locations
  Clone ID: PAT_MRT3847_41265C.1.pep
XCTXAXTXLLXPKXXXXFXXDIYXPPKSXXXLFLXXSXXCXXCX

SEQ ID NO: 220637 - protein, 96 aa, Glycine max
  unsure (1)..(96): unsure at all Xaa locations
  Clone ID: PAT_MRT3847_41266C.1.pep
XGGGGGRXKXSXTRGKGTPSXXPQRQNTGGHKRXXDNTXDTRARXHENPXXQXNRGGGXXDKEAKGKAXPPGRGXXPNATADEQRPGGGXQKRRRG

SEQ ID NO: 220638 - protein, 82 aa, Glycine max
  unsure (1)..(82): unsure at all Xaa locations
  Clone ID: PAT_MRT3847_41267C.1.pep
YREENITLSVLFIAPGVTGALPYHVSCYQRNPILMKTDYGKRSSXAKCSSFILADQSHNILSFKTIPXXCFKPTNDYINVEQ

SEQ ID NO: 220639 - protein, 62 aa, Glycine max
  Clone ID: PAT_MRT3847_41268C.1.pep
QCNPISSDTCFPTLTTKSIRLLLICGLTETYNVRGILFPFNAAYEMKPTSTRSDAVNKVTGE

SEQ ID NO: 220640 - protein, 60 aa, Glycine max
  Clone ID: PAT_MRT3847_41269C.1.pep
TKRPFTKFFFMSNLCAGLWKNMMTTEGLRAPQKGWAYCYARARTDKLIQHEGTIDLNDIN

SEQ ID NO: 220641 - protein, 197 aa, Glycine max
  Clone ID: PAT_MRT3847_4126C.1.pep
NLEPLYNVVGEDFWSSTWCNSTAFEGKQLEGTRITLVKMGENGFDFAIRTPCTPARWEDYDAEMAMAWEALCNAYCGENYGSTDFDVLENVRDAILRMTYYWYNFMPLSRGSAVVGFVVMLGLLLAANMEFTGSIPQGFQVDWEAVLNLDPNSFVDSVKSWLYPSLKVTTSWKDYHDVASTFATTGSVVAALSSSDD

SEQ ID NO: 220642 - protein, 74 aa, Glycine max
  Clone ID: PAT_MRT3847_41270C.1.pep
EIFIFFLFFFFFFFFFVGPELPQIFRCYWKNFFRSRHFPIMPWDNTIRALKNKREGKFPLFPSKGGPSNFLRED

SEQ ID NO: 220643 - protein, 39 aa, Glycine max
  Clone ID: PAT_MRT3847_41271C.1.pep
LLLLLLLHYTLQFARIFTEHTELRMYSQSEADNKNLAKH

SEQ ID NO: 220644 - protein, 122 aa, Glycine max
  unsure (1)..(122): unsure at all Xaa locations
  Clone ID: PAT_MRT3847_41272C.1.pep
GTTTVSWMSQIQKIVVLSTTEIEYVAVTEATEELIWRQGLLTELGFVXYKSVLHSNSQSAIHLAKNXHFRTKHIGLHYHFIRSLLEDEMLTLRKIQGSTDILTKVVTIDKLKLCSTSIGLLE

SEQ ID NO: 220645 - protein, 55 aa, Glycine max
  unsure (1)..(55): unsure at all Xaa locations
  Clone ID: PAT_MRT3847_41273C.1.pep
WTCITYRIILAVGGGLMPRLLQKDLIEXXXQMHLLTPHDLLKIRLFFCXDXXVLV

SEQ ID NO: 220646 - protein, 359 aa, Glycine max
  unsure (1)..(359): unsure at all Xaa locations
  Clone ID: PAT_MRT3847_41274C.1.pep
MERENENSVNAQRRVGLLYDETMCKHHTPDDEDHPENPNRIRAIWNRLQSAGVLQRCVILEAKEAEDKHLLLVHSINHVNLIKNISSKQFNSRRHKIASKLGSIYFNEGSSEAAYLAAGSAVEVVKRVASRELDSAVAIVRPPGHHAEQQEAMGFCLFNNVAVAARYLLDERRLEGVKKILIVDWDVHHGNGTQKMFWNDSRVLFFSVHRHEFGSFYPANDDGFYTMIGEGAGAGYNINVPWENGRCGDADYFAVWDHILLPVAKEFNPDIIIVSAGFDAAVGDPLGGCRVTPFGYSVLLEXLMNFAEGRIVLILEGGYNLDSIAKSMHACLEVLLEDSLLLDPXEAYPFESTWRVIKA

SEQ ID NO: 220647 - protein, 77 aa, Glycine max
  Clone ID: PAT_MRT3847_41275C.1.pep
KRVMNNPRIIIPCQDGPYKIKTHLFQQKKISFSLWKKNPPVPKVKNPLALNVKRERISKVATKNFWNLPKNVMALAS

SEQ ID NO: 220648 - protein, 150 aa, Glycine max
  unsure (1)..(150): unsure at all Xaa locations
  Clone ID: PAT_MRT3847_41276C.1.pep
MERENDNSAKSSVNGQRRVGLLYDERMCKHHTPDDEDHPETPNRIRAIWNKLQSTGVPQRCVILEAKEAEDKHLLLVHSENHVNLIKNISSKQFNSRRHKIASKLDSIYFNXGSSEAAYLAAGSAVKVXERVASRELDSAVAIXRPXGHH

SEQ ID NO: 220649 - protein, 86 aa, Glycine max
  Clone ID: PAT_MRT3847_41277C.1.pep
SNIAYKILVLLIGSHYTASAAITFIVKYLAKLPHIYYKFYQEQMEIAKLKSPTQLLNWDDNNKMHYSWNVSCEVMKITPSLKRSFT

SEQ ID NO: 220650 - protein, 69 aa, Glycine max
  Clone ID: PAT_MRT3847_41278C.1.pep
CCTAMASVKPSVAATVTAVRDSIHKEHCPSIQPYTSTKWKCHPMLMFPIDMHSETNDFYLATCATCNLI

SEQ ID NO: 220651 - protein, 128 aa, Glycine max
  Clone ID: PAT_MRT3847_41279C.1.pep
GTSANRQCNVYFPGYHCPRDFVFGTEGSPWTSSNGNSERENDCYRLGSLPLSSPCHISGHNKELLKQTILKHEAIFRDQIQELHRIYQKQRELMDEIKRIEFHKHSLRMEISSSSSSLYYSQNMPWLT

SEQ ID NO: 220652 - protein, 308 aa, Glycine max
  unsure (1)..(308): unsure at all Xaa locations
  Clone ID: PAT_MRT3847_4127C.1.pep
MSDHLVLFVDRLVRPVPMVQPLAQQPPEPATPVDEAAAGPSGSSTAAEEDGDYCGEDAPLLHMAECRICQEEDSGSCLETPCSCSGVSITSLSLFLANFYFLYAHRKCVQHWCDEKGDITCEICHQNLGCQGIAGPYQPGYTAPPPRPNPEETTIDIGGGWTISGTPLDLRDPRLLAIAEAERQFLDAEXDEYAASHASGAAFCRSVALILMALLLLRHALSVTDAEAEDDPSTFFSLFLLRAAGFLLPCYIMAWAISILQRRRQRQEAAALAATQVAFVLQTGQRRGLQFAIGPGPPTMNTHQPEQV

SEQ ID NO: 220653 - protein, 76 aa, Glycine max
  Clone ID: PAT_MRT3847_41280C.1.pep
SYSGSSFSYEWEKDLSSLDYDNYMEANVKFTTIFCCFQFIFIILNILKLVNKCYNFLLQSISKLGLDLVKVFLIKY

SEQ ID NO: 220654 - protein, 93 aa, Glycine max
  Clone ID: PAT_MRT3847_41281C.1.pep
LTKIITASSGSIKADEVAQKALDGIKCGDFIVSCNFEGIALSLATAGLSPQRSFLMAFLEVVAAGILRIVALGMQWTWYRSIEKYHSQRKGAS

SEQ ID NO: 220655 - protein, 48 aa, Glycine max
  Clone ID: PAT_MRT3847_41282C.1.pep
KNCNSISLTTTICESLCQERPAFAWYKGVLSHEHPTVISHSILFLLVL

SEQ ID NO: 220656 - protein, 382 aa, Glycine max
  Clone ID: PAT_MRT3847_41283C.1.pep
LPSHSYLASAGIDGVKVDVQNILETLGAGHGGRVKLARKYHQALEASIARNFPDNGIICCMSHNTDGLYSAKRSAVIRASDDFWPRDPASHTIHIASVAYNTIFLGEFMQPDWDMFHSLHPMAEYHGAARAVGGCPIYVSDKPGHHDFDLLKKLALPDGSILRAKLPGRPTKDCLFTDPARDGKSLLKIWNMNDFSGVIAVFNCQGAGWCKVGKKNLIHDDNPGVVTGVIRAKDVDYLSRVADDKWTGDAIIYSHLGGEVVYLPKDASIPVTLKTREYEVFTIVPVKELSNGVEFAPIGLIKMFNSGGAVKEFNWGSNESTNVAMKVRGCGQFGAYSSAQPKLITVDSEEVEFKYEEESGLVTIDLRVPEKELYQWSISIDF

SEQ ID NO: 220657 - protein, 68 aa, Glycine max
  unsure (1)..(68): unsure at all Xaa locations
  Clone ID: PAT_MRT3847_41284C.1.pep
RSLISMPIILYMGSRXSSMWWRGLCVPFLMGKKITLCAGHRLRESFSFPLLVYLLNTLLFDIGLLCQI

SEQ ID NO: 220658 - protein, 51 aa, Glycine max
  Clone ID: PAT_MRT3847_41285C.1.pep
PNTQISSVMCDLLNVVKRVLVATADDATVAAASTPTVRHSQNLWIEFHKLR

SEQ ID NO: 220659 - protein, 255 aa, Glycine max
  Clone ID: PAT_MRT3847_41286C.1.pep
MAAAALLELDRVLKSKKEMLTPREANILLSWKSKSLMDLAAGALGGTAAAGAATWKLNGLFRICLSAGFGTYCGPWMFNRSSYSHADQILTMDGSILQKELANITVTKYQNDPLLMRLISKHLYLERIFDDSTSNNPTLRWRYRNFFSDNAVNGHRTHDRESNDKSQGRSENVTDSKRTNLKTKRTFKNASPDIMSEGDPLDCLFGYAPPVEEIHHSNFPNKPSGIHNRARRKSHRRRRMHNHEDLSNSESAAAV

SEQ ID NO: 220660 - protein, 87 aa, Glycine max
  Clone ID: PAT_MRT3847_41287C.1.pep
LLHMQHLILLGSFALLLSHQGTLVVRVFCFCYPDSQRYQNKYMKECHVILCPLLISDWFWYGSFSVKCWFPPLILCFSPSRECGEFS

SEQ ID NO: 220661 - protein, 54 aa, Glycine max
  Clone ID: PAT_MRT3847_41288C.1.pep
NTRTSAYSFPDSRLGALVFSEMDFCSLQSFTLRKESCLAPPYPSCESDIVISSF

SEQ ID NO: 220662 - protein, 66 aa, Glycine max
  Clone ID: PAT_MRT3847_41289C.1.pep
KGRYLVINRISKHALLGLENSIKFEQRCCSHYVRSLLCVPIYSRSESRYTLYLPTPHLSSLPLLSS

SEQ ID NO: 220663 - protein, 254 aa, Glycine max
  Clone ID: PAT_MRT3847_4128C.1.pep
MNSAIFKASNSNNLHSSLRAALFHSTSPLQRKRRNHWDSRGSNHTSRRFRRVQAKHRVMNSINDYAESLFQSWKQGIDRDDPSSSRGTSWFKKQYSDGASGRYRNSNKGSSHRYRRDPSFCEDDFDVETILRSAFGGNRFFYWSFINEENPQWRRSERFSNFEKSWSWRYRNENDYDSSSESDSLDSDLVSDRLALGLSASGSLKLEDVKNAYRVCALKWHPDRHQGSSKAIAEEKFKLCSAAYQSLCDKLALD

SEQ ID NO: 220664 - protein, 58 aa, Glycine max
  Clone ID: PAT_MRT3847_41290C.1.pep
AYVDTYAPIDYECLNKRRRASVGGIFILDPLFPYISQPIKLLLNPRAGNETTLGTVTS

SEQ ID NO: 220665 - protein, 71 aa, Glycine max
  Clone ID: PAT_MRT3847_41291C.1.pep
NESIQKLKRLKIKFLKHKISKLKKYKGPKCYFTLSFILSTNTFPLKAITVLFCKNSPGNPPNTRTVLYPSL

SEQ ID NO: 220666 - protein, 153 aa, Glycine max
  unsure (1)..(153): unsure at all Xaa locations
  Clone ID: PAT_MRT3847_41292C.1.pep
PQIPAXSXIIRPRAPXISIHQTSSSVVEIPQAEVTPHESXLFGHLDNNFPXLRGRATRNQSLDXPLKLGSSXNCHLKHXTTTNXCRXXKKXRRFTGTQXXRXKPLNPPXXTNFSQSKXPHTRREXXRRCEELNXXEKRGKRKWKXXTWWEXGR

SEQ ID NO: 220667 - protein, 177 aa, Glycine max
  Clone ID: PAT_MRT3847_41293C.1.pep
LGPRKDSISTSGHCILPAVERHSTSSFNELPFEYCYELSPNQTVELSINLTMKGGDNYLVTDPIVTVSGEGINLLCLGVLKSNNVNIIGQNFMTGYRIVFDRENMILGWRESNCYDDELSTLPINRSNTPAISPAIAVNPEARSSQSNNPVLSPNLSFKIKPTSAFMMALFVLLAIF

SEQ ID NO: 220668 - protein, 269 aa, Glycine max
  Clone ID: PAT_MRT3847_41294C.1.pep
MACHRWLCISLLLLLLLSLASQSCHALHSFGFDIHHRFSDPVKEILGVHDLPDKGTRQYYVAMAHRDRIFRGRRLAAGYHSPLTFIPSNETYQIEAFGFLHFANVSVGTPPLSFLVALDTGSDLFWLPCNCTKCVHGIGLSNGEKIAFNIYDLKGSSTSQPVLCNSSLCELQRQCPSSDTICPYEVNYLSNGTSTTGFLVEDVLHLITDDDKTKDADTRITFGCGQVQTGAFLDGAAPNGLFGLGMSNESVPSILAKEGLTSNSFLFWI

SEQ ID NO: 220669 - protein, 89 aa, Glycine max
  Clone ID: PAT_MRT3847_41295C.1.pep
MSYNRIHRPTCFVIRHNLLIAKMFQIQSKLYFYKRINPTTCAPEVSALEKKKLRRLPQIIGPALDGPFPPGKTPNIDNAMIVKGSDTVG

SEQ ID NO: 220670 - protein, 137 aa, Glycine max
  Clone ID: PAT_MRT3847_41296C.1.pep
MIALFLNSIHRPGLPPHISERKPWGPQGILEGGIPIGLPDFPGGPPRRISGFAGGSQPIITSTTVEVVVPRAVVPVIYGEDGECLKQILQISDANITITDPKPGTVETKIIISGTPEQTHAAQSLIQAFVMSERESV

SEQ ID NO: 220671 - protein, 67 aa, Glycine max
  Clone ID: PAT_MRT3847_41297C.1.pep
TYIYPLTSFASNRIIPLLKALISSLIFIYTFFLSFLLFILPLRLLLSTSSYPSSSPNNHFNQLLLLL

SEQ ID NO: 220672 - protein, 36 aa, Glycine max
  Clone ID: PAT_MRT3847_41298C.1.pep
WSTYKTLTFTNRAIFHYLEIKSMIYLIASKPYGYTY

SEQ ID NO: 220673 - protein, 103 aa, Glycine max
  unsure (1)..(103): unsure at all Xaa locations
  Clone ID: PAT_MRT3847_41299C.1.pep
GPIPGKAWALLALPVLKILPRPAFFGVSLGPRAHPNWVVAPKAIPAFXKFGTHLKGIWAQISGGAQNSPLWARNGPAPIPPPVVFPPRGGGLSFRGIPPPLFF

SEQ ID NO: 220674 - protein, 40 aa, Glycine max
  Clone ID: PAT_MRT3847_4129C.1.pep
ARIRLEKPVNLSLLLKHHYTAHPSPQRGLFIIKPHPSTSN

SEQ ID NO: 220675 - protein, 79 aa, Glycine max
  Clone ID: PAT_MRT3847_412C.1.pep
SLPTKDHNPIFKDRGLRGKFFKVLKSARREKKLMLGFSWASLKKKITASTLACPHLVGFLFEAYLSKKFYAPKKNPARA

SEQ ID NO: 220676 - protein, 104 aa, Glycine max
  Clone ID: PAT_MRT3847_41300C.1.pep
MSLRIKAVVDKFVQELQEALDADIQDRIMNDREMQSYIEERERQVAESETAWKADLSRREAEIARQEARLTMERDNLDRQTCVLMGTVSIQDNLYGALEVTVSA

SEQ ID NO: 220677 - protein, 61 aa, Glycine max
  Clone ID: PAT_MRT3847_41301C.1.pep
SPMTNPARPQRLVKGRIKVIALPWVLVLNNGARVILLQKVVFAGWVSHQLPINCNLSCFRF

SEQ ID NO: 220678 - protein, 178 aa, Glycine max
  unsure (1)..(178): unsure at all Xaa locations
  Clone ID: PAT_MRT3847_41302C.1.pep
MGNDEGNDKKKRVVFVTVGTTCFDALVRAVDSNNVKQALFAKGYTHLLIQMGRGSYLPTKSEGDGSLAVDYFTFSSSIADHLRSASLVISHAGSGSIFETLQLGKPLIVVVNEDLMDNHQSELAEELADRKHLYCASPQTLHQTIANMGFXXSLFPYSPGDATPVAKHINNLLGFPDD

SEQ ID NO: 220679 - protein, 59 aa, Glycine max
  unsure (1)..(59): unsure at all Xaa locations
  Clone ID: PAT_MRT3847_41303C.1.pep
NSAVGKSVWRMEWQTSAGSAYXHRTAVGNEKSCYIPRGLGVHAADSRELQAQMRAVRMI

SEQ ID NO: 220680 - protein, 219 aa, Glycine max
  unsure (1)..(219): unsure at all Xaa locations
  Clone ID: PAT_MRT3847_41304C.1.pep
MDLDGDDNDNDIFRDDEDDPQAQLSLLENESSKEYVVYLVDASPKMFSTTCPAEEDDQNGETHFHIAISCISQTLESQIINRSYDQVAICFFNTREKNNLQDLNSVFVFNVPEREFLDRPTARLIKEFYQLEESFSKIIGSQHGIVSGTRENSLYNAIWAAQALLRKGSAKTVDKRILLFTNDDDPFGSIXGAVKSDMTRMTLQRAKDAQDLGISIELL

SEQ ID NO: 220681 - protein, 92 aa, Glycine max
  unsure (1)..(92): unsure at all Xaa locations
  Clone ID: PAT_MRT3847_41305C.1.pep
LVIDGYTMLESKRLFFIRITPLKLQVDKFCNRHRSTTNAQSQGSNSGKRVIFPSTLVXGCRNMNQLAFNGMVICGSVGFLDLFVTLICDIYM

SEQ ID NO: 220682 - protein, 39 aa, Glycine max
  Clone ID: PAT_MRT3847_41306C.1.pep
GARQMIMYIYKFVYKAVFFIHHPQDLLTPDVRINSLKCK

SEQ ID NO: 220683 - protein, 73 aa, Glycine max
  Clone ID: PAT_MRT3847_41307C.1.pep
YKPPQLDGLYQYLSTVFATDLHSRAFLRLPKSVGVDFRASCFCHKQTIDMGYVCSVCLSIFCEHHDKCSTCGG

SEQ ID NO: 220684 - protein, 60 aa, Glycine max
  Clone ID: PAT_MRT3847_41308C.1.pep
KKIFLILLHYITINMSYIKTYLISKKLNNTFLCGAIKKMTEKRTFYKNNREKIRLIIIVS

SEQ ID NO: 220685 - protein, 154 aa, Glycine max
  Clone ID: PAT_MRT3847_41309C.1.pep
LEIRLESKFLFAGPSKSAHTLFQYIAPELVPVQYGGLSREAEQEFTTSDPVTEVTIKPATKHAVEFPVSEKSHAVWEIRVVGWDVSYGAEFVPGAEDGYTVIVQKNRKIGPADETVITNAFKIGEPGKIVLTIDNQTSKKKKLLYRSKTKPIPE

SEQ ID NO: 220686 - protein, 116 aa, Glycine max
  Clone ID: PAT_MRT3847_4130C.1.pep
IGRSIFGVSHEQAHSVQASNESDSCDLELWSFQKRVTDQFQDLSGASDEQILSTDWIHNLLRTFICWQEEFRAILLNNEEHVTRPPLDRMNSEFFDRSVTALDMCNANRDETENTR

SEQ ID NO: 220687 - protein, 84 aa, Glycine max
  unsure (1)..(84): unsure at all Xaa locations
  Clone ID: PAT_MRT3847_41310C.1.pep
ESRSHLVVDRDSSGHQTRSAAGSIAVISTSVHDSSAIDSSTTGFGACSSARSRVVSQLHHLASVVGVXMQYARGSLMQPLSPAI

SEQ ID NO: 220688 - protein, 443 aa, Glycine max
  unsure (1)..(443): unsure at all Xaa locations
  Clone ID: PAT_MRT3847_41311C.1.pep
RVVEVTGENKEAEVIEKKKEVARAEEKKEAEVIVEEKKEVEVTEEKKEVEVTEGKKEVEVIEEKKETEVTEEKKEVEVEVMEEKKESEVKEEKKKVGLXVPEEVEIWGIPLLGDERSDVILLKFLRARDFKVKEALNMIRNTVRWRKEFGIEGLVEEDLGSDWEKVVFKDGYDKEGHPVYYNVFGEFEDKELYSKTFLDEEKRNKFIRWRIQSLEKSVRSLDFSPNGISTIVQVNDLKNSPGLGKRELRQATNQALQLLQDNYPEFVAKQIFINVPWWYLAFSRMISPFFTQRTKSKFVFAGPSKSADTLFRYIAPELVPVQYGGLSREAEQEFTSAYPVTEFTIKPATKHSVEFPVSEKSHLVWEIRVVGWDVSYGAEFVPSAEDGYTVIVHKSRKIAPADETVLTNGFKIGEPGKIVLTIDNQTSKKKKLLYRSKTKPIAE

SEQ ID NO: 220689 - protein, 118 aa, Glycine max
  Clone ID: PAT_MRT3847_41312C.1.pep
MKMKVLVFFVATILVAWQCHAYDMFPLRMNTGYGARTPEVKCACCTLAVVAHNIFGFYTIPEECVDAPMEYIHGDQSRSDSITGDQRAYFYATDLEGHPRDTFAVSIDRSVLSNIAYY

SEQ ID NO: 220690 - protein, 421 aa, Glycine max
  unsure (1)..(421): unsure at all Xaa locations
  Clone ID: PAT_MRT3847_41313C.1.pep
MVSTILPGSPILKPLVRTVSSAGAIFLLLFRHFPFLLLFFHFCFLLLFCYFNFLLLYRTVFLIMFKASFTLKSLALRNFSRITSLLSSASREIPHISTSSGTTSRPFSSSFTSLSFFSSLTSTSTSFFSSVTSDSFFSSITSTSFFPSVTSTSFFSSVTSTSFFSSTITSASFFSSVTYASFFSSVTSISFFSSVTSTSFFSSMTSASFFSSVTSISFFSSVTSTSFFSSMTSASFFPSVTSTSSFFSAAGFLSCSXASFTLKSLALRNFSRITSLLSSPSRGIPHISTSSGTTSRPFSSSFTSLSFFSSLTSTSTSFFSSVTSVSFFSSITSTSFFPSVTSTSFFSSVTSTSFFSSTITSASFFSSVTSTSFFSSVTSPSFFSSFTSASFFSSVTSISFFSSVTSTSFFSSMTSASFFSS

SEQ ID NO: 220691 - protein, 52 aa, Glycine max
  Clone ID: PAT_MRT3847_41314C.1.pep
RQACCCSFSYNSFYHEIMMFFLFVMLLNFPAFALMLGCMFAVLHCILGSSFS

SEQ ID NO: 220692 - protein, 151 aa, Glycine max
  unsure (1)..(151): unsure at all Xaa locations
  Clone ID: PAT_MRT3847_41315C.1.pep
MAAAFASRCSRVGRSLSGGLSNSSPGLFTSSHGMTCNNLFSQQQRTFIQMRTVLKVVDNSGAKKVMCIQALKGKKGARLGDTIIASVKEAHPNGKVKKGKGVYGVSXREAMPKVLGDKRGHKFGARVFGPVPHELRQKKHVNFLTCAGHIA

SEQ ID NO: 220693 - protein, 168 aa, Glycine max
  Clone ID: PAT_MRT3847_41316C.1.pep
MAAIFASRCSRVGRSLFGGLSNSSPGLFTTLHEMTCKNMFSQQQRTFIQMRTVLKVVDNSGAKKVMCIQALKGKKGARLGDTIIASVKEAHPNGKVKKGKGKVVYGVVVRAAMQKGRCDGSEVKFDDNAVVLVDKQGQPIGTRVFGPVPHELRQKKHVKILTLAGHIA

SEQ ID NO: 220694 - protein, 144 aa, Glycine max
  Clone ID: PAT_MRT3847_41317C.1.pep
TIGIGSSWLCAPPIPTIFLWFVHILHVFVGSPHVFITQVPTFYRAWCTTTTHTCCRTTAHPPLLPNQACPGCCALRHHCTDIHHYGFGALCRTTPSDVKIQHTLRKAWGYSSAGSPQLSYSRSPPPPPKEGGRHTVMTGNLPGT

SEQ ID NO: 220695 - protein, 178 aa, Glycine max
  unsure (1)..(178): unsure at all Xaa locations
  Clone ID: PAT_MRT3847_41318C.1.pep
KIQCCNKHMPTRFKFSRLLLISGVLGHSINGLSSFDSMDQEKDDLKSKMDRIEMCHPNVILVEKTVSRDIQESILAKGMTLVLDMKLHRLERVACCTGSPILSCDNLNGQKLRHCDXIYFEKFVEEHDAVGEGRKKPIKTLMFIEGCPTRLGCTIXLKGTHSDELRGSNVTCGVQCHG

SEQ ID NO: 220696 - protein, 537 aa, Glycine max
  unsure (1)..(537): unsure at all Xaa locations
  Clone ID: PAT_MRT3847_41319C.1.pep
MIKQIFGKXPRKPSKSSHNNSNGEGGFNDGFSLNSSSNNTLLKSNSVSSKSSSSCSVGSRSGNETIAQYYSNQSKKSAPTSGSVMASAAYEALPSFRDVPSSEKQNLFIRKLNMCCVVFDFNDPVKHLKEKDVKRQTLLELVDYVSSVNSKFNELAMQEMTKMVATNLFRALPSSNHDGNLEDMGEPDEEEHVLEPAWPHLQIVYEFLFRFVASPETDAKLAKRYIDHSFVLKLLDLFDSEDQRERDYLKTILHRIYGKFMVHRPFIRKAINNIFYRFIFETAXRSGIAELLEILGSIINGFALPLKEEHKLFLARALIPLHKPKCVALYHQQLSYCITQFVEKDVKLADTVVRGLLKYWPITNSAKEVVFLSELEEVLEATQAAEFQRCVIPLFRQIGRCLNSLHFQVAERALFLWNNDHIRNLILQNSKVILPIIFPAMEKNIRDHWNQAVQSLTMNVRKIFSDADQALFDECLKRFQEEEIKDREKQEKRESIWKQLEDVAAANAVSSEAILVSRFVSSVAIATSANQLATAGG

SEQ ID NO: 220697 - protein, 215 aa, Glycine max
  unsure (1)..(215): unsure at all Xaa locations
  Clone ID: PAT_MRT3847_4131C.1.pep
MARGKVQLKKIEDTTSRQVAFSKRRSGLLKKAYELSVLCDAEVAVIVFSQNGRLYEFSSSDMTKILERYREHTKDVPGSKILSTIXIQQLKLDSASLAKKIELLEHSKRELLGQSVSSCSYDELKGIEEQLQISLQRVRQRKTQLYTEQIDQLRSQESNLLKENAKLSAMWQRAEKSSQQQWPRHTQAEAEPHCSSSQSLDVDTELFIGLPKQQC

SEQ ID NO: 220698 - protein, 87 aa, Glycine max
  Clone ID: PAT_MRT3847_41320C.1.pep
MIKQIFGKIPRKPSKSSHNNSNGEGGFNDGFSLNSSSNNTLLKSNSVSSKSSSSCSVGSRSGNETIAQYYSNQSKKSAPTSSSMASA

SEQ ID NO: 220699 - protein, 82 aa, Glycine max
  unsure (1)..(82): unsure at all Xaa locations
  Clone ID: PAT_MRT3847_41321C.1.pep
LPSFSSRTYNSPLALVYNDLWXTCPSIIPPTNFCIVTSVDAYSRFTFIYILKNESETFTFQQFKSMAETLFNGKHKPLQTDW

SEQ ID NO: 220700 - protein, 70 aa, Glycine max
  unsure (1)..(70): unsure at all Xaa locations
  Clone ID: PAT_MRT3847_41322C.1.pep
TSGKSKKDKKFKPKNDMHHQVTPLSELIXAEPTNAXXMSFVGTXEFLAXXIXKVEGXGXXVTXWDFGDFL

SEQ ID NO: 220701 - protein, 41 aa, Glycine max
  Clone ID: PAT_MRT3847_41323C.1.pep
NFFSKNENSGTIFSKIILKCKFSKMIIQKIILEYIFKKNQN

SEQ ID NO: 220702 - protein, 54 aa, Glycine max
  Clone ID: PAT_MRT3847_41324C.1.pep
VFLHRPFIFFKNKTKQSKTPKQKPLSIPSSNLKSHPHLGQGWEQSSSHSDFYCP

SEQ ID NO: 220703 - protein, 81 aa, Glycine max
  Clone ID: PAT_MRT3847_41325C.1.pep
NKMEKDEGECLLQLLFPISPCFSCSKCLLDCRCGGGDLSFFVNLSVLKSLGLLSTRRLAQLSLSELGRAEREKRRHPRWAG

SEQ ID NO: 220704 - protein, 85 aa, Glycine max
  unsure (1)..(85): unsure at all Xaa locations
  Clone ID: PAT_MRT3847_41326C.1.pep
MAEKHNIKNPAVKRILQEVKEMQSNPSDDYMSLPLEENIFEWQFAIRGPRDTEFEGGIYHGRIQLPLEYPFKPPSXMLLTPSGRL

SEQ ID NO: 220705 - protein, 80 aa, Glycine max
  Clone ID: PAT_MRT3847_41327C.1.pep
LECLYSALPVTHSDRWIIEKRTLPRRLIVTEREVSVVSTFPFFLERGGETDLILHQRVSFVCRCDCRQVDTKGIAISIPY

SEQ ID NO: 220706 - protein, 136 aa, Glycine max; identical to SEQ ID NO: 143601
  Clone ID: PAT_MRT3847_41328C.1.pep

SEQ ID NO: 220707 - protein, 56 aa, Glycine max
  Clone ID: PAT_MRT3847_41329C.1.pep
PKPPEPSQQPCPGKGQPDQALVGWRAASAHPTSPWVTGFATGEATERPHAHADTVS

SEQ ID NO: 220708 - protein, 75 aa, Glycine max
  Clone ID: PAT_MRT3847_4132C.1.pep
LVSNRYMVLAEIDHTRRRASTRHAVKQHTTHMGQTSGDMTPCASSHAIFDPADAFARTSDMIPPPLIQGILLAHT

SEQ ID NO: 220709 - protein, 335 aa, Glycine max
  Clone ID: PAT_MRT3847_41330C.1.pep
NFAPGFSDGLILAVKRMNRISEQGDDEFCREIELLARLHHRHLVALKGFCIKKRERFLLYEYMGNGSLKDHLHSPGKTPLSWRTRIQIAIDVANALEYLHFYCDPPLCHRDIKSSNTLLDENFVAKIADFGLAQASKDGSVCFEPVNTEIRGTPGYMDPEYVVTQELTEKSDIYSFGVLLLEIVTGRRAIQGNKNLVEWAQPYMESDTRLLELVDPNVRESFDLDQLQTVISIVAWCTQREGRARPSIKQVLRLLYETSEPMHSEFLQAVEDEECQGSQHRGRRSKGKMLRNEALSHSGDGRYLASSSSTSRSYCSRTFLLESGSPQSPPNIFSL

SEQ ID NO: 220710 - protein, 67 aa, Glycine max
  Clone ID: PAT_MRT3847_41331C.1.pep
MAVIRVLAAAIMSAVLAVVLTVDASYDYPLFSPCTDTRVQRANGFTLLIGFAPNDKALYDNNYSLDW

SEQ ID NO: 220711 - protein, 61 aa, Glycine max
  Clone ID: PAT_MRT3847_41332C.1.pep
SQFFLTSPDLVRFPKPKKGGEKKGFLGIPRLIIYCQNPPEVQPNQILGGFGPRAKKQGWVN

SEQ ID NO: 220712 - protein, 144 aa, Glycine max
  Clone ID: PAT_MRT3847_41333C.1.pep
GSRFNGSPFYANSAPASTVGFRRNTTSQQPPRPPVPLFSSSTGNVSRHKHQRNFSTGTMMQDKEINIATFEGVTPFDTLNMVDFDWDTYNSASGFTSINDSMVGSIGTAATVSPKDIFNDPLASAPPSSAFTNLTSPSINESPY

SEQ ID NO: 220713 - protein, 84 aa, Glycine max
  Clone ID: PAT_MRT3847_41334C.1.pep
TFKLAWPSKKIKLEGEFFLFKPSPSFFNWSPSIFFFKSRANPNKIGVGPFKIKIIKILIFGPFYSKKSIDSLKLMTPSVVFSNR

SEQ ID NO: 220714 - protein, 187 aa, Glycine max
  Clone ID: PAT_MRT3847_41335C.1.pep
MLRSTPIPAPYNSVPVLSRARTCHSLAPARAVHSHSSFVSRLVFPQFRQYIVNVPGRVFVAAAAKKQRRGGAELAVTDDGFDDDEEYDDDDFYDEYDDDDDDEEEEFDDDEDDEGMLSLEKMNKWFEKKPRGFGEGKVYDTSVEDKLLEEMRQSRIAQAENLKKLMSNPVKHAFNESVQKKKDAELV

SEQ ID NO: 220715 - protein, 124 aa, Glycine max
  Clone ID: PAT_MRT3847_41336C.1.pep
MTRYHDPYYYYLWEYFSFPLHLIFFVLILFFVLAFSWYINYESLLEDLLVQVKIFLALVPLLLLLLVHCLSSGASFPIPLPEERESLHRAGGSPWGVALLLLFVLFMMAYQSSFHQRWFPLATR

SEQ ID NO: 220716 - protein, 50 aa, Glycine max
  unsure (1)..(50): unsure at all Xaa locations
  Clone ID: PAT_MRT3847_41337C.1.pep
FFGSLHKLDPSYAKKGFVHWHFGXGPKRXAFSQARKDLSPLGKQYQETGS

SEQ ID NO: 220717 - protein, 98 aa, Glycine max
  unsure (1)..(98): unsure at all Xaa locations
  Clone ID: PAT_MRT3847_41338C.1.pep
FAFPEKDHQENPAKLDARSGQRIEPQDNVVHAQVETNLRKLFVDDVEPPKGPMVDLTIAHCXMAHLTNTXGGTKLGNDVLPNFSTEGNFRASVDLQGT

SEQ ID NO: 220718 - protein, 60 aa, Glycine max
  Clone ID: PAT_MRT3847_41339C.1.pep
EDDRGGPLKRRKGRPVLLWLEIRILIIECQNSDSINQSISNKILQPLQWSVRGVTRYYCA

SEQ ID NO: 220719 - protein, 137 aa, Glycine max
  Clone ID: PAT_MRT3847_4133C.1.pep
FRFLTRFAKPHNPFPSTRRSPLSSLHAPPPHHDQPNLDDRLVLDQLSHLFPTLTSKSQNPVFPNPHPNAANAVDAFLPPEDKLRGVFLQKLKGRAAIESALSNVAVDVDLDVLSKVLNHGNLSGESMVRFFTWAIKT

SEQ ID NO: 220720 - protein, 96 aa, Glycine max
  unsure (1)..(96): unsure at all Xaa locations
  Clone ID: PAT_MRT3847_41340C.1.pep
MQIFVKTLTGKTITLEVESSDTIDNVKAXIQDKEGIPPDQQRLIFAGXTSLEVVLTLAAFXIQKDSIFHLALCLRGGMQIFVKTLTGKTITLEVES

SEQ ID NO: 220721 - protein, 167 aa, Glycine max
  Clone ID: PAT_MRT3847_41341C.1.pep
LGIRLELSLKCEKNLIEKMMRSEDLQFQWPFFEDMNSTFDQGVESYGFTTMYGHVGDCGPYDFTMNDHVGDCGLNTLLSTPEDSTSEICSIPFPSSPIFSIDHIHIQYPINEETMHLPSLMELDDFDSILDTQIISIQGHGESEGSFFPSQNFSSEVENAWSPTPSG

SEQ ID NO: 220722 - protein, 147 aa, Glycine max
  Clone ID: PAT_MRT3847_41342C.1.pep
FPSVWGTLTFWPHRSATVLLQLCSHGEHVVASRTLYGGTHALLSHFLPRTCGISTSFVEVTDLDMVDAAIVEGKTKVLYFESVSNPTLTVANIPELCHMAHRKGVTVVVDNTFAPMVLSPARLGADVVVHSISKFISGGADIIAGAV

SEQ ID NO: 220723 - protein, 553 aa, Glycine max
  Clone ID: PAT_MRT3847_41343C.1.pep
MCGLDKSTCLTVMFDLSSSDRSNTPGAINPQLYLQFLTSYQDPSGQSVLRVTTVTRRWVDSSVSSEELVQGFDQETAAVVMARFAKLVARSKSRFSPFSFITILKLLVSFSMGDTYVLATPKRNRSDDVDGGEAKKLLLQQGEADPAAALASARHEFGEHGGVNMSIEASATFTVMEPETMRRMFAGELGPDRDFFIYSRHFNPTVLSLSRLMAALEGTEAAYCTASGMSAISAVLLQLCSHGEHVVASRTLYGGTHALLSHFLPRTCGISTSFVEVTDLDMVDAAIVEGKTKVLYFESVSNPTLTVANIPELCHMAHRKGVTVVVDNTFAPMVLSPARLGADVVVHSISKFISGGADIIAGAVCGPARLVNAMMDLQQGSLMLLGPTMNAKVAFELSERIPHLGLRMKEHSNRALEFATRLKRLGMRVIYPGLEEHPQHQLLKSMHNKDYGYGGLMCVDMETEERANRFMSHLQNYGQFGFMAVSLGYYETLMSCSGSSTSSELSTEEKELAGISPGLVRMSIGYIGTLEQKWSQLQKALTRLNDSGYNKIA

SEQ ID NO: 220724 - protein, 86 aa, Glycine max
  Clone ID: PAT_MRT3847_41344C.1.pep
PLRGDTSPPTQEFNFSPTPPLWETFFNDPKGPPETFFWGSCAKLVFFFKAPPPGDFPFNFKGWQKFPPPNHSPFFYFSPHLLGQPI

SEQ ID NO: 220725 - protein, 563 aa, Glycine max
  Clone ID: PAT_MRT3847_41345C.1.pep
MCGCIADCNIPTRPYGCEKTTEGGGLVCSTCSYTGIRTRRFYTNNNTFPSFSFTFPHQPQSFSFPKPLRLMSQPLTTNSADGDSSVAAPPILFDYHLIDQKLLQNIVYDALVWSTLNCLLVGDKSVQRSGTVPGVGLVHLPLSLLPGPFPENHWKQACELAPIFNELVDRVSLDGKFLQESLSRTKNADEFTSRLLDIHSKMLQINKKEDIRMGIVRSDYMIDEKTKSLLQIEMNTISTSFALIGCLMTGLHKSLLSQYGKSLGLDSNRVPANNAVDQSAEALAKAWSEYNNPRAAILVVVQVEERNMYEQHYISALLREKHHIRSIRKTLTEIDQEGKILPDGTLSVDGQAISVVYFRAGYTPKDYPSESEWRARLLMEQSSAIKCPTISYHLVGTKKIQQELAKPGVLERFVENKDHIAKLRACFAGLWSLEDSDIVKKAIENPELFVMKPQREGGGNNIYGDELRETLLKLQEAGSQEDAAYILMQRIFPATSPAILVRDGNWDTGHVISEAGIFGTYLRNKDKIIINNESGYMVRTKISSSYEGGVLPGFGVVDTVYLT

SEQ ID NO: 220726 - protein, 121 aa, Glycine max
  unsure (1)..(121): unsure at all Xaa locations
  Clone ID: PAT_MRT3847_41346C.1.pep
MLTPFFLFSDRTMQASILHYSLTETVGTNIATVTDAQAKGARGRGRAYVTLLAGNGDYVKGVGGLAKGVMKVKSVYPLVGAVLPDVXEHHRNMVTFQGRIAREGEPVYPAENQTHTAMAYY

SEQ ID NO: 220727 - protein, 64 aa, Glycine max
  Clone ID: PAT_MRT3847_41347C.1.pep
GGGNGGTHNPETSFLTPSKPVIWITHIFVFDSSTLTYNGNITFIRTAALLIKEAIQAISGGHEY

SEQ ID NO: 220728 - protein, 61 aa, Glycine max
  unsure (1)..(61): unsure at all Xaa locations
  Clone ID: PAT_MRT3847_41348C.1.pep
MAKAHVLIFPLPLPGHLGSMXKLAELLALDNIHVTFVDTENIHIRXTRFGDIQELSEWPHA

SEQ ID NO: 220729 - protein, 69 aa, Glycine max
  Clone ID: PAT_MRT3847_41349C.1.pep
FASSHTKFCIMISKGFLMLRISMATILMISSNAAPDHAYHNFDKTYCKRIALGADESIYCPCAYVNYSG

SEQ ID NO: 220730 - protein, 54 aa, Glycine max
  Clone ID: PAT_MRT3847_4134C.1.pep
GPFRGLRGEIRSMHGPSRKAIQQNEYCSSRFSYQRDVTRAVASLFYPMMMTPIQ

SEQ ID NO: 220731 - protein, 58 aa, Glycine max
  Clone ID: PAT_MRT3847_41350C.1.pep
SNFPPTHQWLKNFPNFIFFYTNILRATTLQTLKILYHYSTIFFKTTGLQPTLLLTIFL

SEQ ID NO: 220732 - protein, 96 aa, Glycine max
  Clone ID: PAT_MRT3847_41351C.1.pep
GPKCPPGPLKGGPGFFGGNWFVPPRGALFFWAPPPFLGPAFLGSPGTPEFPILGATGPIADPKTLNFFSLSFFFFLSNFPHPGESSFYPQFLLWGR

SEQ ID NO: 220733 - protein, 95 aa, Glycine max
  Clone ID: PAT_MRT3847_41352C.1.pep
TVFVSLELFTRLLYYTPVAILASIILSALPGLIDLSEACYIWKVDKLDFLACIDAFLEVLFTSREMGLLVTLIISFTKILIQSIRPRIEFLGRVS

SEQ ID NO: 220734 - protein, 213 aa, Glycine max
  unsure (1)..(213): unsure at all Xaa locations
  Clone ID: PAT_MRT3847_41353C.1.pep
MSTKRHNQSAGMPVHPIEDLPGAPFGDAGSSFSESELRETAYEILVGAXCRSSGPKPLTFISQSERGDRDRAAPAPSLHRSLTSTAASKVKKALGLKTTSSSRGSSKRAATSTGELVRVQMRISEQSDTRIRKALLRIAAGQQCLEDAWSQWVLPLELIQXVQSSDFPSQQEYEAWLRRNLKVLEARLLLHPHLPLDKSDPSAQSLRHIIRGA

SEQ ID NO: 220735 - protein, 83 aa, Glycine max
  Clone ID: PAT_MRT3847_41354C.1.pep
REKTTEGILWMACHERMATKDRLMRFGMLNDDTCYCKEKEIIQHIFFQCNVLSHLWKHILKWLEVPHSPGGWNEELDWIIKKC

SEQ ID NO: 220736 - protein, 72 aa, Glycine max
  unsure (1)..(72): unsure at all Xaa locations
  Clone ID: PAT_MRT3847_41355C.1.pep
PGKQGFENKVFKTPPKAVLRFFKDGFRAIPPKGFAHFYNLXKVKGFSLKKKXKWGPLVNPEFQQGSPRVKVA

SEQ ID NO: 220737 - protein, 137 aa, Glycine max
  Clone ID: PAT_MRT3847_41356C.1.pep
LPTGRNSGHPPFFYAWAQECVPRTYCVLNPQNPFVLNRWMGKLTFPQGACRSVKRMPLSIGGGAGAKNAILMNMPNAGLLMRRYFGGNLGFAVFKMTSPYTKCTGCFFIAVGNLDDDTINFEAFTHKLAPPGEIHEK

SEQ ID NO: 220738 - protein, 114 aa, Glycine max
  Clone ID: PAT_MRT3847_41357C.1.pep
MVEVGIYQIPTSTFDPFAEAKETDAPGAKEYVHIRIQQRNGKKSLTTVQGLKKEFSYEKILKDLKKEFCCNGNVVHDKELGKIIQLQGDQRKNVSHFLIHARLVRKDQIKIHGF

SEQ ID NO: 220739 - protein, 78 aa, Glycine max
  unsure (1)..(78): unsure at all Xaa locations
  Clone ID: PAT_MRT3847_41358C.1.pep
PPPPRTQPPHRAHTTATRGAHKPITAGKTSTPARXGPQSGGQPIHRQHSXPRLHLPEVWWVSVQRAVRRFLGKLLKMS

SEQ ID NO: 220740 - protein, 57 aa, Glycine max
  Clone ID: PAT_MRT3847_41359C.1.pep
QITVAHNDIWPYSISNILPSYQLKETKRNKKTYLIRKVSGNIKTVIHIMLISKRILS

SEQ ID NO: 220741 - protein, 58 aa, Glycine max
  Clone ID: PAT_MRT3847_4135C.1.pep
MARDRERIIPKKEMFQFFPQVPNYLLSGQKAYNAPKDCLKLDPPPTPLDLLQIITEAN

SEQ ID NO: 220742 - protein, 63 aa, Glycine max
  unsure (1)..(63): unsure at all Xaa locations
  Clone ID: PAT_MRT3847_41360C.1.pep
MATRYCMASLTVTKFRYTLWNXLQEQMCKHYFDTAVYRFNIPNLRVGTLDCLLCLSDDTVKSN

SEQ ID NO: 220743 - protein, 178 aa, Glycine max
  Clone ID: PAT_MRT3847_41361C.1.pep
GIRHEAEISISLNVLQHYFTGSLKDAAKSLGVCPTTMKRICRQHGISRWPSLKIKKVNHSLSKLKCVIESVHGAEGAFGLNSLSTGSLPIAAGSFSDPFTSNKFHRQTTLTIRPSEPKINENDFDASGASETKRQVAMEDQFLGLEARTRSPEKVINDKGVSIQEIGTKGTNKFRTGS

SEQ ID NO: 220744 - protein, 61 aa, Glycine max
  Clone ID: PAT_MRT3847_41362C.1.pep
TYPLNSHNHAYPLQNQHLRLGSIYHRGAPTIRYLHSQKCYNQHIQRSLSAYISCHSHTYTN

SEQ ID NO: 220745 - protein, 109 aa, Glycine max
  Clone ID: PAT_MRT3847_41363C.1.pep
LFRPGAAGQPGQAGANGVVSRPIPGPKGPPGAPGQNGNPGSQGQPGQPGGQGPPGPPGAPGQPGQPGNSGQPGQPGAPGQPGKDSGYCPCPPRSSVLAVKKKMAAAKKA

SEQ ID NO: 220746 - protein, 73 aa, Glycine max
  unsure (1)..(73): unsure at all Xaa locations
  Clone ID: PAT_MRT3847_41364C.1.pep
YAKLNFTFCGNTQKKIVMLGLFSTGETTIQYKYHIXNXLSTVPTIDLNVEKVHYIFVIFTFILLLVYLFNSYF

SEQ ID NO: 220747 - protein, 36 aa, Glycine max
  Clone ID: PAT_MRT3847_41365C.1.pep
TVTLLHNVIVYTPTAWNGSTHPPYMSLARTTQSYLL

SEQ ID NO: 220748 - protein, 61 aa, Glycine max
  unsure (1)..(61): unsure at all Xaa locations
  Clone ID: PAT_MRT3847_41366C.1.pep
MKGFYLWLVVLPACXLAHGQYDLYPLPSFSDHYQFTHYIYQIDNPYYYDYYEVTPYTSEEH

SEQ ID NO: 220749 - protein, 102 aa, Glycine max
  Clone ID: PAT_MRT3847_41367C.1.pep
IQMLLKTLVLTNASNAGVEGAVVVGKLLEQENHDLGYDAAKGEYVDMVKAGIIDPLKVIRTALVDAASVSSLMTTTEAVVSELPNDDKDTPAMAGGMGGMGY

SEQ ID NO: 220750 - protein, 93 aa, Glycine max
  Clone ID: PAT_MRT3847_41368C.1.pep
LLKGNLQNRRENFLRRKSTERPYGDAKPDFQDTQHECNHDNTMDNKSTKEQMRAHAQLINHRATKITPKEPQGAPANHMNKTMKQEHANKEEY

SEQ ID NO: 220751 - protein, 53 aa, Glycine max
  Clone ID: PAT_MRT3847_41369C.1.pep
FLRGNSSTMNNSVGLPNRQCYVKRERIREMHTSFIRGGPYWFPPKNRLTYTLS

SEQ ID NO: 220752 - protein, 57 aa, Glycine max
  Clone ID: PAT_MRT3847_4136C.1.pep
NRGHSTTAGNSFHMSLGRSVAETVNCGLRSEATTLWFSSDERTQALSTVYPRPTLAT

SEQ ID NO: 220753 - protein, 196 aa, Glycine max
  Clone ID: PAT_MRT3847_41370C.1.pep
MRMLGNHHSSGTQGYAEQELQMNTEPNSKLEKQHPASCSNEAGQKLDFYLEGQHLDHKLTLYQAILHHIIKKNADSFSSAKLWSQVHIITYRRDVESEDVIPPECHSSPQHFSDEKVLAYYQHTPFFSDMFSCELVSDLEMSSPTYDILFLLKSLESMNRIIFHLMSRERICAFAQGKVDNLDSLKIQFLLHRFEL

SEQ ID NO: 220754 - protein, 132 aa, Glycine max
  unsure (1)..(132): unsure at all Xaa locations
  Clone ID: PAT_MRT3847_41371C.1.pep
HDGRVPFACDPRNGLTRXTRLCNTHVQIHARLHDLITRLTMAQKTKLFIDNAIGXPTLGKQRYKRRWDELHIHTKVGPLSNVDGAYPGAPMFIDDISTRWFYXNTTLRHEIGRVASDEERAMDTEGHAPLTD

SEQ ID NO: 220755 - protein, 153 aa, Glycine max
  Clone ID: PAT_MRT3847_41372C.1.pep
KPEKTRKKRVGFSYVKGSNNYEGSKSSGVTAFDIISMSWGLDLTRLFETKWDSGSKRKKRFTSSARVKVVEEKVKEVGGLLGFKVEVGKSNGAIALLKGKVALVFELLEIVPHQLLLVAVKVLEGALEFEELHWGDWKHALQDLVLSWHNQES

SEQ ID NO: 220756 - protein, 53 aa, Glycine max
  Clone ID: PAT_MRT3847_41373C.1.pep
WDTIEFNTNPTYFQGALLPTPLTLKFFKIFWDTFHITQRALNPPPRPRTRGKG

SEQ ID NO: 220757 - protein, 42 aa, Glycine max
  Clone ID: PAT_MRT3847_41374C.1.pep
FRGFEERPFPAMAEPVSKAYSLSYLRSTHITPSTISLSIPGT

SEQ ID NO: 220758 - protein, 94 aa, Glycine max
  Clone ID: PAT_MRT3847_41375C.1.pep
CLTIGGTILRRDLLAHNSANGTFVPSATRRRTQSMKGTIKRSVTVEFTESTPIGSHCAMNRCSTRLATVAIYAMWYNDCESCKPAWTNALTVMI

SEQ ID NO: 220759 - protein, 87 aa, Glycine max
  unsure (1)..(87): unsure at all Xaa locations
  Clone ID: PAT_MRT3847_41376C.1.pep
SIFIPPPPFPGPPPRVQFPHRGPALAGPXXFFFYIPRNPNKGPPHKLRWPPPPSPDLRPPNRWYTQKAAPPPKIFPFSFLGFFVRHI

SEQ ID NO: 220760 - protein, 213 aa, Glycine max
  Clone ID: PAT_MRT3847_41377C.1.pep
VKSNEHGNFVDHELLNNILNNPEVIEKLVGDYGAINNSQYVHNAGSSLAAFSNPPIPIQGQTTTPSSVVFSTTSSYTPPIGGQAEPVTTQWPPRPAVSSAIVSSPIEVPPARDVNYYKSLIQQHGGHKETLPYSSKRQIPQAATNYETTSYNHRGKVSKPKIMKPCIFFNSSRGCRNGANCAYQHDASFQPRGNTVSGIQSSKRMKMDHEISN

SEQ ID NO: 220761 - protein, 76 aa, Glycine max
  unsure (1)..(76): unsure at all Xaa locations
  Clone ID: PAT_MRT3847_41378C.1.pep
MSPKTYAIFMCGVDSDYLVKIHRCTYRVFMKILQDQLEDGDLYKLVNGEFPXQHDLALYDGYFIRRGFYDADANDP

SEQ ID NO: 220762 - protein, 250 aa, Glycine max
  Clone ID: PAT_MRT3847_41379C.1.pep
RRLALSGRQGGPPWLRISRAQLPQPGFRPAERVEETGRRLANYCKKFKVPFEYNCLAQKWETIKLADLKIDRNEVTVVSCFYRLKNLPDETVDVKSPRDAVLKLIRRINPNMFIHGVVNGTYNAPFFLTRFREALYHFSSLFDMFEANVPREDPERVMLENGLFGRDAINVIACEGAERVERPETYKQWQVRNQRAGFKQVRFDPLLVNDEKEMVKKEYQKDFVVAEDGKWVWLGWKGRILNAISAWTPA

SEQ ID NO: 220763 - protein, 127 aa, Glycine max
  Clone ID: PAT_MRT3847_4137C.1.pep
VAAAHSCYEAFDLLIELGTKYTGAFSYDDLEETMLHAAMCHPLCSRKLLKRLIYMDIPLKTKGCKCSLSKKAFCKDISPHLQEYAYEKYQERRAGRKGGPASPASPASPRSPFRFWRSSSSVKNSIE

SEQ ID NO: 220764 - protein, 82 aa, Glycine max
  Clone ID: PAT_MRT3847_41380C.1.pep
SRSSLLSSITIVPFLLDSFASPFSFIAVSSLSHSLLSCASRAPCLHGFIFSFLSHTFWGGLCSRNSYDISSVFSSCLLYNIG

SEQ ID NO: 220765 - protein, 54 aa, Glycine max
  unsure (1)..(54): unsure at all Xaa locations
  Clone ID: PAT_MRT3847_41381C.1.pep
EGCFAKSYGRYTSRIAWPNNGQFDKIKPKVKDGMLXIPIPKVTSNSNTLDIQVQ

SEQ ID NO: 220766 - protein, 64 aa, Glycine max
  Clone ID: PAT_MRT3847_41382C.1.pep
YSILVASSFNAGNPITLAFQPQYRFHPTDLNYHCEQHMKQSIGLCNSSQLSSGLMKKLVRMRVR

SEQ ID NO: 220767 - protein, 61 aa, Glycine max
  Clone ID: PAT_MRT3847_41383C.1.pep
NQKTQNFFIPWFFFPPPPSETSHPFLEVITIGTKIILHFFRHVILNFGLKKLRTLHEGDST

SEQ ID NO: 220768 - protein, 100 aa, Glycine max
  Clone ID: PAT_MRT3847_41384C.1.pep
SGSRPFIIPAAMIEDVLGPPHFFFCCVYSLLFPLFFPPLTMLWGCFPPCTSLQWFFFRGPRKCYSSASIILVVGSRCLESGFQTTIYVIASCNFSKLTQC

SEQ ID NO: 220769 - protein, 62 aa, Glycine max
  Clone ID: PAT_MRT3847_41385C.1.pep
IENSTFGSTNHLPIVWLTIDIPEYCAMQNIPNILINVNPISCVESGDEEVVQKFLLRNKVKM

SEQ ID NO: 220770 - protein, 58 aa, Glycine max
  Clone ID: PAT_MRT3847_41386C.1.pep
KRFLLFSRIVLRKISIFGNFIRDGWRPMTKPLWWNSNSHRNSNPTVTMLPYAVSLLLG

SEQ ID NO: 220771 - protein, 170 aa, Glycine max
  Clone ID: PAT_MRT3847_41387C.1.pep
MSTGKPRGGDFQMVPAPGTSKPPLPPAAASNAIVEYTPVSLKEEEEDLEVKLRRIIDNVPVRVSNTSGSSAGSGSGDFHQYRQMRRKEQDRLARMEVDYQKRKELAEFNLRREERLKAAEERTAKKRAKRQKKKQRKKEKKTKLNAGEELQKKEDSSSDGDSDNDEEAAP

SEQ ID NO: 220772 - protein, 63 aa, Glycine max
  Clone ID: PAT_MRT3847_41388C.1.pep
LWALPLRMGNLVVRFVGANFKAKNKIFRVKYFWVRLHALFGGARALGLVRVRNTKFASWPILS

SEQ ID NO: 220773 - protein, 51 aa, Glycine max
  unsure (1)..(51): unsure at all Xaa locations
  Clone ID: PAT_MRT3847_41389C.1.pep
LWQDHLDIQTTLRPCWCXTLILDPVHFPESNATPPRLLSPYLFIFYSISPP

SEQ ID NO: 220774 - protein, 146 aa, Glycine max
  unsure (1)..(146): unsure at all Xaa locations
  Clone ID: PAT_MRT3847_4138C.1.pep
MFIAPQCEAPSPISVTCALDYEPDSYGDGSSPADWHSSCAILDSKADAEEQPSAALSXEPPTHIAVGNGHKARQSVTFKWLQLXPSRGQQQARSLAKPAHKSPTSSPGPMHGSXFRARVPRGLPGAYSEADVGKAYPNCEAIPCDQ

SEQ ID NO: 220775 - protein, 184 aa, Glycine max
  Clone ID: PAT_MRT3847_41390C.1.pep
MDTKGRLVAGSHNRNEFVLINADETARVAVTELSGQICQICGDELEVTVNGEPFVACNECAFPVCRPCYEYERREGNQVCPQCKTRYKRIKGSPRVEGDEEEDDTDDLESEFDIGSVFSARLNYGSQVNGSVIHAPSEFDAASVASEIPLLTYGQEDVGISADKHALILPPFTASRETGVCHAF

SEQ ID NO: 220776 - protein, 89 aa, Glycine max
  Clone ID: PAT_MRT3847_41391C.1.pep
DEGNNVPRGSYCSSSAWVPLTIQDAQVLVRPIRGALFYYAHMRPKVGSFKGNKFCYPHGFPRHDVEKHGPLFYFQLTQDIFFLVAFTGK

SEQ ID NO: 220777 - protein, 333 aa, Glycine max
  Clone ID: PAT_MRT3847_41392C.1.pep
GSSKNTLIGKVRVRISTLHTGRVYKNTYPLLVLSPVSGLKKMGEIEIAIRFVRTTQRLDFLHVYSQPMLPLMHHVKPLGVVQQEALRNTTVRMVAGHLSRAEPPLRKEVVFYMLDADSHNFSMRKVRANWYRIINVIAAVVDIVRWIEHTRGWRNPTATILVHALLVMLVWFPDLIIPTFCFYVFAVGAWNYRFRARDPLPHFDPKISLAEVVDREELDEEFDTVPSNKASEVVRVRYDRLRALGARVQTVLGDLATQGERVQALVTWRDPRATGIFVFLCLTVAFMLYLVPSKMVAMAFGFYYLRHPIFRDRLPSPALNFFRRLPSLSDRIM

SEQ ID NO: 220778 - protein, 81 aa, Glycine max
  unsure (1)..(81): unsure at all Xaa locations
  Clone ID: PAT_MRT3847_41393C.1.pep
MALRCLVMSLSGLFNLGLGRXSHXRDEDLLHAVWPNTPIPSSVGDLLKPGPGSTEIDDHPMQIADTQYPVTFCSIEDLHPG

SEQ ID NO: 220779 - protein, 75 aa, Glycine max
  Clone ID: PAT_MRT3847_41394C.1.pep
SAGRPTCMQANKNFGFRSLKKKTKCDRQLYNSILRQFISDRYIRNPNFYYIVSINNQSQIMTYLNPVSHSYTITL

SEQ ID NO: 220780 - protein, 283 aa, Glycine max
  Clone ID: PAT_MRT3847_41395C.1.pep
ELRRKLLWCSDAPLSKRLEDKVALITGGASGIGEATARLFLRHGAKVVIVDIQDNLGHFLCQNLNFGNNISYVHCDVTNDNDVQIAVKAAVSRHGKLDILFSNAGIGGNSDSSIIALDPADLKRVFEVNVFGAFYAAKHAAEIMIPRKIGSIVFTSSAVSVTHPGSPHPYTASKYAVVGLMKNLCVELGKHGIRVNCISPYAVATPLLTRGMGMEKEMVEELFAEAGNLKGVVLKEEDLAEAALFLASDESKYVSGVNLVVDGGYSVNNTASAEVALGKFSAD

SEQ ID NO: 220781 - protein, 502 aa, Glycine max
  unsure (1)..(502): unsure at all Xaa locations
  Clone ID: PAT_MRT3847_41396C.1.pep
MATNGKTPAIGIDLGTTYSCVAVWQRDRVEIIANDQGNRTTPSYVAFNNTQRMIGDAAKNQAATNPTNTVFXARRLIGRRFSXQEVQSDMELWPFKVIADVNGKPMIAVDYNCEKKQFSAEEISSMVLAKMLDIAESFLGSTVKNAVITVPAYFNDSQRQATKDAGKIAGLNVLRILHEPTAAAIAYRLEMKNCNNDRRNVFVFDLGGGTLDVSLLVFEKDHIRVKATTGDTPLSLGLQEDGGIMKVIIPRNTSIPTKMEDVLTTHFDNQTNILIHVYEGERKRTRDNNLLGKFVLEIPPVPRGVPQISVCFELDYDGILHVSAEEKSRGISKKLAITNDKGRLSKKEIERMISEAEKYKAEDEMYRNKVQSRHALEKYAYNMRDAINIKEISLKLSPEDKKNINDAIDSALEWLEVSMDANPNDFDNMRSTLSSVFNPVIVKMIKDEDNVAPPDTVASSGSNSVKNGLLSILANFALDAVYSAATGDIIGFASVIVDCLSI

SEQ ID NO: 220782 - protein, 78 aa, Glycine max
  Clone ID: PAT_MRT3847_41397C.1.pep
GTVFKMTETVAVHETNAEEKLSVRNLPKKNVTLEAFLAPVKYIFSGPPPIIPLPYPRDYFFEQKICSVFPFKGRLAAL

SEQ ID NO: 220783 - protein, 126 aa, Glycine max
  unsure (1)..(126): unsure at all Xaa locations
  Clone ID: PAT_MRT3847_41398C.1.pep
LGYNFQCDAKQLAYSYEELRCFKNYEMLLDIQNVFKEPRGGLAGLAEKILGASLNKTRRNSNWEQRPLTPNQXEYAALDAVVLVHIFRHLPCQGHNKDKSEWKSCIVSLTENAKKFKKCVPKIVDT

SEQ ID NO: 220784 - protein, 219 aa, Glycine max
  unsure (1)..(219): unsure at all Xaa locations
  Clone ID: PAT_MRT3847_41399C.1.pep
PESLCKLWNLQILKLDYCVYLQNLPNNLTSLTALQQLSLNDCFSISSLPPQIGKLTSLRNLSMCIVGKERGFLLEELGPLKLKGDLHIKHLERVKSVSDAKEANMSSKKLNELWLSWDRNEVCELQENVEEILEVLQPDIQQLQSLGVVRYKGSHFPQWMSSPSLKQLAIGRCREVKCLQEVXQHMTSLHSLQLYNLPKLESLPDCFENLTLLRHLSIK

SEQ ID NO: 220785 - protein, 362 aa, Glycine max
  Clone ID: PAT_MRT3847_4139C.1.pep
LLIRQIMGNPESNLPPGFRFHPTDEELILHYLNKKGKKVASIPLPVSIIAEVDIYKLDPWDLPAKATFGEKEWYFFSPRDRKYPNGARPNRAAASGYWKATGTDKTIVTSLQGGAQESVGVKNALVLYKGRRPKGVKTNWIMHEYRLVDNNKPIKLKDSSMRLDDWVLCRIYKKSKHALTSTEASIGVGEVDQAEEHLFQETLLPISKSPAPPPQNTLISQKSVSFSNLLDAMDYSILSSFLSENHTNHPPWVGSSAGFNTGNLDQQCSPINNNNPTNNYMFQKNPQLNPSVSNMENMMRPKRQVSNMDEETLYPSKKYLSSSCNFPTNISNQYENPQWNYLMKQSLMNQRLMLGPHLQFQG

SEQ ID NO: 220786 - protein, 86 aa, Glycine max
  Clone ID: PAT_MRT3847_413C.1.pep
SLSTTLNLFGPQGEMFTPKVNMWRQAPLVKRGTGLPMGRNPLETYTLEKGKPASEASGAKPRLGIDVGKWDPGGGPSGKRVPYRWG

SEQ ID NO: 220787 - protein, 51 aa, Glycine max
  Clone ID: PAT_MRT3847_41400C.1.pep
ETEILLPLTKNTSTVTPEEWRWQGKGYCESNEEKKMRSQSLQRTPWKTREK

SEQ ID NO: 220788 - protein, 27 aa, Glycine max
  Clone ID: PAT_MRT3847_41401C.1.pep
ISRYIRAFMGLKIVLLLRWNLQGIVFF

SEQ ID NO: 220789 - protein, 36 aa, Glycine max
  Clone ID: PAT_MRT3847_41402C.1.pep
FFLLIFKPRARAKKGGLNLFQNLAYIWASLYYKVFF

SEQ ID NO: 220790 - protein, 59 aa, Glycine max
  Clone ID: PAT_MRT3847_41403C.1.pep
PLQKYLYPRSRRVETLIRFAELEYVFGNPSKWNMFTQVYRMYFWSPFDQRILRSDSNVM

SEQ ID NO: 220791 - protein, 75 aa, Glycine max
  Clone ID: PAT_MRT3847_41404C.1.pep
FIYLRKVNFGKKTDLQKFLKGRALNLIPRIVGKPNGPTNFLMVGWPEGGLILNFGNKGNPRYWKLAINPRPFKII

SEQ ID NO: 220792 - protein, 118 aa, Glycine max
  unsure (1)..(118): unsure at all Xaa locations
  Clone ID: PAT_MRT3847_41405C.1.pep
SXPTPXGKXPXTLSXFTXXXGHXKTPXALXRXXXXHTXXLXXPSTXRSCPSRAXLSIRXAQXEXXARXLXAGLXXRTGTXXTVRDEXGXEPXXXAFRNDEFRRRGXXXTXWRXXXRXE

SEQ ID NO: 220793 - protein, 41 aa, Glycine max
  unsure (1)..(41): unsure at all Xaa locations
  Clone ID: PAT_MRT3847_41406C.1.pep
XNXVLXXSXLXTXSXRNWXHLLXLSXRGXTYXSIXAIGKGC

SEQ ID NO: 220794 - protein, 143 aa, Glycine max
  Clone ID: PAT_MRT3847_41407C.1.pep
MGSYEALTEKPATATKWVVTCMVGGVIVGVSLLGAYSSQLWKSRRRNKKPVRVYMDGCFDMMHYGHCNALRQARALGDQLIVGVVSDAEIIANKGPPVTPLHERLIMVNAVKWVDEVIPEAPYAITEEFMKKLFDEYKIEYLI

SEQ ID NO: 220795 - protein, 75 aa, Glycine max
  unsure (1)..(75): unsure at all Xaa locations
  Clone ID: PAT_MRT3847_41408C.1.pep
KIEKLRQKAVLVCGLIFRNPVSYLNSVGCTRXLLVGCTFYGYVRHKLSQQPQVPGTPRTPRTPRTPRSRMELLLL

SEQ ID NO: 220796 - protein, 192 aa, Glycine max
  Clone ID: PAT_MRT3847_41409C.1.pep
WLCLLPDTEGLFRAAIIKSGSALVSWGYSENHRTLSNGSVAILQKWFPGQDTLNLLHYSNTLLLDLAFTYAAKHMSALSPETFDPPTITVERRSAGQEPVLVERDPESYMLRPVRSRVPKLMGITSCEYNPMADMYFMMGELPPTILEPMAPRSAIPLREARRDLGLDTYGYTYADVTTDLRATLFNLTAID

SEQ ID NO: 220797 - protein, 63 aa, Glycine max
  Clone ID: PAT_MRT3847_4140C.1.pep
ASLLFPHNLTLRLFRRLHKIINKSYRCWSEKALVHLKIKSFRLSTPFSIWSTLCHKFTSFQQL

SEQ ID NO: 220798 - protein, 87 aa, Glycine max
  unsure (1)..(87): unsure at all Xaa locations
  Clone ID: PAT_MRT3847_41410C.1.pep
SNLALIFETHFLDFNYHLGSSIYSLTHLSIYXXESLKFLTFSICFSQILLHSPILLIPYITTLTTFRSTNATYLYPYLKTALESQTL

SEQ ID NO: 220799 - protein, 89 aa, Glycine max
  Clone ID: PAT_MRT3847_41411C.1.pep
QIYSTFFWMSSEASGLCCVGLGLRDCYLRFHTRILLALFTPIISLTIVFSFSDHTFPFISTSIALHSVVPHLSISLFLSNIGRFTTRCE

SEQ ID NO: 220800 - protein, 86 aa, Glycine max
  unsure (1)..(86): unsure at all Xaa locations
  Clone ID: PAT_MRT3847_41412C.1.pep
PVTLQLIYSHATKDLPIDVQKSNMQTPTDIFLKDYKIPDYYFDTVDLTFFSLEEKTITSXSKIAVYSHIVCTTPPLVLDGPNLSLV

SEQ ID NO: 220801 - protein, 172 aa, Glycine max
  unsure (1)..(172): unsure at all Xaa locations
  Clone ID: PAT_MRT3847_41413C.1.pep
VWRXXTNLFLLGPLXXNFGIRXXMIVRXGVXLEKGPFDXRXGDFLWMMIFGXFVILXLXDIXIFWXXFLEVXXVFMXXYXXXSREFSNXQIKIYGXGXLRVYYFHGRCWVLDVIFGSAIIPXXLGIIXGXXRYYFFXSXWXQXAGGKXKFWKTXXXVXXIIFGRWELGVKTN

SEQ ID NO: 220802 - protein, 49 aa, Glycine max
  Clone ID: PAT_MRT3847_41414C.1.pep
WSYECHTMVLTQQLHSLVIGVSCQICLLGFPRVISPDVSLVLFTHCFSN

SEQ ID NO: 220803 - protein, 256 aa, Glycine max
  unsure (1)..(256): unsure at all Xaa locations
  Clone ID: PAT_MRT3847_41415C.1.pep
PETPSTVRPLVAIGHNVDTLRAFKVEGTTYNPADGQIENWPTSGLDANLQMIAKIAAVCNDAGVAQSEHKFVAHGMPTEAALKVLVEKMGLPEGSKVAQSASTRTLLRCCEWWSEHDQRLATLEFDRDRKSMGVIVDSGLGKRSLLVKGAVENVLDRSSKIQLRDGSIVNLDDNARNLVLQALHEMSTSALRCLGFAYKDELPKFENYSGNEDHPAHQLLLNPSNYSSIESELIFVGLVGLRDPPKXEVYQAIEDC

SEQ ID NO: 220804 - protein, 97 aa, Glycine max
  unsure (1)..(97): unsure at all Xaa locations
  Clone ID: PAT_MRT3847_41416C.1.pep
MASSMISSPAVTTVIRAGAGMVARFTGLKSMAGFRSSKTINDITSIATNGGRVHCMQVWSPVGNKLFETLSXLPFLDDVQLAHELXYLLMNGWIPCL

SEQ ID NO: 220805 - protein, 62 aa, Glycine max
  Clone ID: PAT_MRT3847_41417C.1.pep
EARICSSLYTSFSTEKTYPYERLPLIGAISTLSIIRKYTPIESTYSAFHRYVSMRITQHASF

SEQ ID NO: 220806 - protein, 52 aa, Glycine max
  Clone ID: PAT_MRT3847_41418C.1.pep
RERPVYLVIKVVYLTNGGDARALSRETVPLRVFLSLFSPMRSFYVVTLWPFL

SEQ ID NO: 220807 - protein, 52 aa, Glycine max
  Clone ID: PAT_MRT3847_41419C.1.pep
MARYCEGYKRWIEQDQSSTTNVHIWHCCKTNCLHWCKTYLTALPTNTGYSRQ

SEQ ID NO: 220808 - protein, 213 aa, Glycine max
  unsure (1)..(213): unsure at all Xaa locations
  Clone ID: PAT_MRT3847_4141C.1.pep
MVKHSQAWLAMRSKTCALTLLALLSLSTLTLLFLRTTSDSCTQPQVRNLDALQPRTDSKLPNPLEFMKSKLVLMVSHELSLSGGPLLLMELAFLLRSAGSDVVWITNQKPPKPDDVIYTLENKMLDRGVQVVDARGEKAVDTARNADLVILNTAVAGKWLDAVLKXSLEVLPKGLWWIHEMRGHYFKVEYVKHLPLFXGAMIDSHTTAEYSEE

SEQ ID NO: 220809 - protein, 648 aa, Glycine max
  unsure (1)..(648): unsure at all Xaa locations
  Clone ID: PAT_MRT3847_41420C.1.pep
MQLLCFFKKAVKSLETVEPHVVIVLLARIIDGVAIALAVTLTPLYISEVAPADIRGQLNTLTQFACSGGMFFAYILVFSMSLSDSPSWRLMLGVIFIPAIAYFLLAVFYLPESPRWLVSKGRLLEAEIVLKRLRGTEDVSGELALLVEGLSPGGEATSIEEYVVAPASELLVNQEAGKDYIKLYGPNDXVTMVAQPVNGQGSMISRSMLSQQGSFGTLTGGGLKDPIVTLFGSLHENTLPESGGSRSMLLHNANSIFSIGETSSPFGTSDNLHAPLMSFQGGAGEKDRAYGSKDILGMRSNSSLRSNSSLVHGNAVDAPKNTNIGGGWQLVYKSADGAGGGKREGLQRVYLHADTAALSHSQHVSFVSTSGYDIPIDGGEAYQAAALVSQSVLGTHDMLHLTEVAAKGPKWRALLEPGVKRALIVGVGLQILQQAAGINGFLYYAPQILEKAGVGDLLSNLGLSSASASFLVNIITTFCMLPCIAIAIRLMDISGRRSIMLYTVPILIVCLLILVIKQFFQINSVVDAAITAISVVVYESVFCMGFGVIPNIICAEIFPTSVRGICISLTSLTYWGCTLIVTLIFPYLLQLLGLTGVFGLFVVGCIISWIFVYLKVPETKGMPLEVIIEFFAIGAKPGTDPAALGIKG

SEQ ID NO: 220810 - protein, 50 aa, Glycine max
  Clone ID: PAT_MRT3847_41421C.1.pep
FLYQSILGSVLTTDSLSSGRVDIDHRSASWVRVCKLDGERYICLYESERE

SEQ ID NO: 220811 - protein, 347 aa, Glycine max
  Clone ID: PAT_MRT3847_41422C.1.pep
MVDQYPIFGRGENEIGETHVPVWDADESDAASDIDSDEVVKGDILEEHYEVYEEQVQQDIATITGVENIMVAPESWEVLKMLDSEQVAHAGNLEATIAQEAAANLNVENQLSLNSSPAEICVEAYESDTKQAQEKDAKLNVNEQSDISLDSDVAAVNDDVAKEKSVSIDAAIKGNEGRLGAIDIPPHVMLCLLLGAGTVLIAAAAFNLSRKGSKSMSSMEKPLELHNDSFPSKNKQISPEKSSGPVEMDVLEDSSCPSEASSIQQSSFYSEKEVNEGHRLGPEKKRKNNYRRESLASSASDYSMGSPSYGSLTLYEKIPIKQGHWEDEIITPVRRSSRIRNQATSPS

SEQ ID NO: 220812 - protein, 92 aa, Glycine max
  Clone ID: PAT_MRT3847_41423C.1.pep
MPSEASSIQQSSFYSEKEVNEGHRLGPEKKRKNNYRRESLASSASDYSMGSPSYGSLTVYEKIPIKQGHGEEEIITPVRRSSRIRNQATSPS

SEQ ID NO: 220813 - protein, 73 aa, Glycine max
  Clone ID: PAT_MRT3847_41424C.1.pep
VVKAAEGRLPVFLDGGVRRGTDVFGSSSSRSSRSSRKAAEGRLPVFLDGGVRRGTDVFKALALGASGIFVSTS

SEQ ID NO: 220814 - protein, 152 aa, Glycine max
  Clone ID: PAT_MRT3847_41425C.1.pep
GVSGGFPPITGTTGFFSLLFSLFSTRILGFCGPGGDHPLCGFFFMSRGQGGKGLSRFPFSKVKKPGPLGPKPPPPPRGGFSFSFLPRGFRFSNWAGGGWPIPFFWGLFRPPGPPALRFRLPVCLVLGTVTLFPFSPGFPLVPPCSKFFPPSV

SEQ ID NO: 220815 - protein, 271 aa, Glycine max
  Clone ID: PAT_MRT3847_41426C.1.pep
SEDTKSHELTETHVNSMNKRLVLKLPNRDISRSTNEFGYQAELVGSSSKTAQEATDFNGNRPSSKDSGYCSGSTSYPAVEKTDQAKLGQVTDHVDLLGKIRWGMVRARSSKPLRVGEAMPSDTDPYSGKCPNHLDEKENVSRGHGKEDKNFSALTPEVTPELEIHKDDYRVYSLTEINGKKENAISGHEKEDKNFSALTPELTPELEIQKDDYKVDSLTEINENCAGTTSQPFNLTEDGGEITASSNCRDKNESLISAYVIPHDIVTASIG

SEQ ID NO: 220816 - protein, 44 aa, Glycine max
  Clone ID: PAT_MRT3847_41427C.1.pep
PLSTCHPRVLVNFRSVCLYNTIVTQMFVSQSCVHLHMKAFANPP

SEQ ID NO: 220817 - protein, 69 aa, Glycine max
  Clone ID: PAT_MRT3847_41428C.1.pep
SLVDSLTTLIGHLLNHLVKRNRQTPVCRENNRLHVHILYMRTTILVLAITTCWGSQCFQQQKTKSYAIY

SEQ ID NO: 220818 - protein, 46 aa, Glycine max
  Clone ID: PAT_MRT3847_41429C.1.pep
RIETLNLGLGLSNLVGRTFGLRELSLMSGLDDQILTALDPFGDANA

SEQ ID NO: 220819 - protein, 95 aa, Glycine max
  unsure (1)..(95): unsure at all Xaa locations
  Clone ID: PAT_MRT3847_4142C.1.pep
XAXPXXXTPXPXSXTRPDXPATTPXGAXXXXQLSXTXPXXQXXXXXXPRHXHXKPXGYXSHAXXXPXSMTXXXXRXXXXXEXDXXXXLHXRVHAS

SEQ ID NO: 220820 - protein, 118 aa, Glycine max
  Clone ID: PAT_MRT3847_41430C.1.pep
NSAWTNIRPQKTSAISHLMGAPSNSQLRSVEFLHPYCLQQWRGGRKCKTERLKDKIICMQSWTNLVLDVIYLYHFNIYTYLDWLCNDNLAKIHGYKIKRNMNFLIIMSLIYEHNIFSV

SEQ ID NO: 220821 - protein, 403 aa, Glycine max
  Clone ID: PAT_MRT3847_41431C.1.pep
MADNVVTSTNSSTPSLNPTRIICHVCQKQFSQYTCPRCNSRYCSLQCYKSHSLRCTESFMKENVVQELQQMQPDEQTKNKMLDILKRFHSQQEMDENSFADSTLSEETMENFLSGQEISFDDLSLEEKKRFHRAIAYGELSKMIKPWDPWWSKPSARNICLSKEGTQLVQPLPDQELLDDDIGSDEFSKVPLGPETPLPPLSRLSSKEPSPLLTVHLVDILYSYCFTLRLYNGDWKSDALGSVMVVLSVSLVLGQGAQPETVLEALSHCLEQVCCPVYRHMGGLQFGLGVIDDVISLLGLGTPALVCALCDMHRLIQEGEKEAKSERPRKLRTDGTRSAIKLAERRIYFITCWVHEQPEEAWFSLAAIVRAEKTSAMEFQQSNKSENLNNKAEAKGKSLIQEI

SEQ ID NO: 220822 - protein, 71 aa, Glycine max
  Clone ID: PAT_MRT3847_41432C.1.pep
KKIDMEKGHICCYTSCQVRNLSGIGGLTLAHLRCLLHIPLICSDQLSAHIYSPYMVHPLTTIQEPPLFLVS

SEQ ID NO: 220823 - protein, 104 aa, Glycine max
  Clone ID: PAT_MRT3847_41433C.1.pep
TVMLLPSLCSSLPLCLPSLCLFFESFSSLSLPLSLLFISDVASILSKRSSLVPHIQTTHPSLSFGFNFSLLFLLNSIPIPLGLGFHHPFPFSSFPLLSAIVFVY

SEQ ID NO: 220824 - protein, 217 aa, Glycine max
  Clone ID: PAT_MRT3847_41434C.1.pep
MATTVASSMVVASFCSFSNPITTTPSSLSFKAKTITRTRPRTKTRTRTTRLTWLNPHPRGALVEATPQPTSSPPSPRDGSIKVLAFPENRADDIQAEARALARAANATSYTPQLVASKYGSQPIKVVGRALQVLGAVGLFGLKLLLDQKSGVLDQNKRIRALELRDTFTRLGPTFVKLGQGLSTRPDICPAEYLEELSELQALNLCTLLALNLIVVV

SEQ ID NO: 220825 - protein, 74 aa, Glycine max
  Clone ID: PAT_MRT3847_41435C.1.pep
GCMLIFLNCEWLFLCIFCFVFGYGINFLITKKLLEHHPNLIRFGFCDLDKSILTWFGQEKLVLAQVHSRTKIKI

SEQ ID NO: 220826 - protein, 98 aa, Glycine max
  Clone ID: PAT_MRT3847_41436C.1.pep
MTPAIKEPLWQRIQNLEAVVTEMANKPNTIPPEKEDILQESLSRIKCIEYDLQKTKKALLATASKQVELAESLESLKESKFDGRNSCWPKNRSYAPGR

SEQ ID NO: 220827 - protein, 51 aa, Glycine max
  Clone ID: PAT_MRT3847_41437C.1.pep
WEEKSGSYPPCLALSVSYLTLLATARLVNLLPVVGRVGGRVVAPINSGAVS

SEQ ID NO: 220828 - protein, 90 aa, Glycine max
  Clone ID: PAT_MRT3847_41438C.1.pep
RPVRRILFFEFELWCNFALSSGNFPGFGFPKQSFWDRIKSGTPEHFKFKWGEFHLFLYPKHLVQKRLRARNSWDPSLRLRIKNPDFKGLT

SEQ ID NO: 220829 - protein, 173 aa, Glycine max
  unsure (1)..(173): unsure at all Xaa locations
  Clone ID: PAT_MRT3847_41439C.1.pep
MIRHVDVTMDQVWGWLSCLQGLCQQKSEGVDRPQWSTFSDVNYSGSLSSTFGSKALATEGEKENLMTDYXLKGLEVCADTIVGNAMLRGISGGQRKRVTTWEMLVGLANAXFMDEISTGLDSSTTYQILNSLKQCVHILKGTTVISLNFNEISTGLDSSTTYYSLLHFNDMLV

SEQ ID NO: 220830 - protein, 69 aa, Glycine max
  Clone ID: PAT_MRT3847_4143C.1.pep
ARADLFKHFLVYDLLCLWVHIIVILSLLVVRTGFVCLRICTVQVMEVNEFLHLVSSIMLSESQMTYQEF

SEQ ID NO: 220831 - protein, 36 aa, Glycine max
  Clone ID: PAT_MRT3847_41440C.1.pep
SPWALGIGPISRSQVEDIDPLQIQTLVWYGEKTAFL

SEQ ID NO: 220832 - protein, 177 aa, Glycine max
  Clone ID: PAT_MRT3847_41441C.1.pep
FLDVNNAFLHGDLQEDVYMKIPDGVTCAKPNSVCKLQKSLYGLKQASRKWYEKLTNLLLKEGYIQSISDYSLFTLTKGNTFTALLVYVDDIILAGDSIDEFDRIKNVLDLAFKIKNLGKLKYFLGLEVAHSRLGITISQRKYCLDLLKDSGLLGCKPASTPLDTSIKLHSAAGTPYA

SEQ ID NO: 220833 - protein, 78 aa, Glycine max
  Clone ID: PAT_MRT3847_41442C.1.pep
PTTVTFTGETLAIAASRSVSDTRVYALPMRWTCALKLTLPYRTVFNVYSVRYRVEDWSGRRRRLVPVYFPLRSQNELS

SEQ ID NO: 220834 - protein, 48 aa, Glycine max
  Clone ID: PAT_MRT3847_41443C.1.pep
KLSTPNKKLYTLPERGRKPGTPKTAPPFLILNNLLILKPIKKHLVFFF

SEQ ID NO: 220835 - protein, 128 aa, Glycine max
  Clone ID: PAT_MRT3847_41444C.1.pep
MKMKLLGLLVLVLGSTISANGAVSEVSWREISKINREGPYVGIAVPNAFELNPLLRSPSFVPHNKFPYFDFAGNLYNHVLFNYIVIRFYPNRYPFFYLFFFLYQQMLMVDFLLVDEFEPTISPFFINH

SEQ ID NO: 220836 - protein, 109 aa, Glycine max
  unsure (1)..(109): unsure at all Xaa locations
  Clone ID: PAT_MRT3847_41445C.1.pep
TSIWGEVFSALLWFYRLGLSSSSSIVLFGQKSFCKLYLGFISXKKKKKKKKKKKKKKKKKKKKKKKKKKKKKKKKKKKKKKKXXGGPLLKDPILLPGAGKLKFFLWGPQ

SEQ ID NO: 220837 - protein, 79 aa, Glycine max
  Clone ID: PAT_MRT3847_41446C.1.pep
HKLFDFADKYRGKYDSSITVAQKYYRSISGYNDELLWAAAWLYQASNNQYYLDYLGRNGDSMGGTGWSMTEFGWDVKYA

SEQ ID NO: 220838 - protein, 62 aa, Glycine max
  Clone ID: PAT_MRT3847_41447C.1.pep
NQCLNACSYTLYPLYKVVLKTFHFCSHPRPSPEHNSIKNYIRIYISIPENNFLYACLHGYCV

SEQ ID NO: 220839 - protein, 625 aa, Glycine max
  Clone ID: PAT_MRT3847_41448C.1.pep
MEKLIRMFPLLLVLLLCPNFAFAGHDYGQALSKSLLFFEAQRSGYLPHNQRVTWRAHSGLQDGKASGVDLVGGYYDAGDNVKFGLPMAFTVTMMSWSIIEYGKQMAASGELGHAMEAVKWGTDYFIKAHPQANVLYGEVGDGNTDHYCWQRPEDMTTDRHAYKVDPSNPGSDLAGETAAAMAAASIVFRRSNPAYAGELLRHAYQLFDFADKYRGKYDSSITVAQKYYRSISGYNDELLWAAAWLYQASNNQYYLDYLGRNGDSMGGTGWSMTEFGWDVKYAGVQTLVAKFLMQGKSGHHAPVFERYQQKAETFMCSCLGKSSRNVQKTPGGLIFRQRWNNMQFVTSASFLATVYSDYLASSGRNLRCSSGNVPPAELLSLAKSQVDYLLGDNPRATSYMVGYGSNFPQRVHHRGSSIVSIKVNPSFVSCRGGYATWFSSKRSDPNLLTGALVGGPDAYDDFADERDNYEQTEPATYNNAPLIGILARLGGGHGGYNQLLPVVVPAPKPAVTKPQPTPSPKTTPSPASWSGPISIEQKRTTSWVANGKTYYRYSTVVTNKSNKSLNSLNLSISKLYGPIWGVTKSGDSYTFPSWLSSLSAGKSLEFVYIHSASPADVSVANYVLA

SEQ ID NO: 220840 - protein, 592 aa, Glycine max
  Clone ID: PAT_MRT3847_41449C.1.pep
MEKLIRMFPLLLLLLLFPTFAFAGHDYGQALSKSLLFFEAQRSGYLPHNQRVTWRAHSGLQDGKASGVDLVGGYYDAGDNVKFGLPMAFTVTMMSWSIIEYGKQMAASGELGHAMEAVKWGTDYFIKAHPQPNVLYGEVGDGNTDHYCWQRPEDMTTDRHAYKIDPSNPGSDLAGETAAAMAAASIVFRRSNPAYAAELLRHAYQLFDFADKYRGKYDSSITVAQKYYRSISGYNDELLWAAAWLYQASNNQYYLDYLGRNGDSMGGTGWKMTEFGWDVKYAGVQTLVAKFLMQGKAGHHAPVFERYQQKAESFMCSCLGKGDRNVQKTPGGLIFRQRWNNMQFVTSASFLATVYSDYLASSGRNLRCSSGNVPPAELISLAKSQVDYLLGDNPRATSYMVGYGSNFPQRVHHRGSSIVSIKVNPSFVSCRGGYATWFSSKRSDPNLLTGALVGGPDAYDDFADERDNYEQTEPATYNNAPLIGILARLGGGHGGYSPISIEQKRTTSWGPIRGVTYYRYSTVVTNKSNKSLNSLNLSISKLYGPIWGVTKSGDSYTFPSWLSSLSAGKSLEFVYIHSASAADVSVTNYVLA

SEQ ID NO: 220841 - protein, 59 aa, Glycine max
  unsure (1)..(59): unsure at all Xaa locations
  Clone ID: PAT_MRT3847_4144C.1.pep
TAARRRQKGAPFHFNTINIFSGHLPLQPTTIHFLDTLSFIYPXHCHKHYTDQRNSKWCG

SEQ ID NO: 220842 - protein, 53 aa, Glycine max
  Clone ID: PAT_MRT3847_41450C.1.pep
KSLFYDSCACFQRVGAWDIHYSSCLTSFCQIPIEVNGELEGSLGLYGFKFVEP

SEQ ID NO: 220843 - protein, 120 aa, Glycine max
  Clone ID: PAT_MRT3847_41451C.1.pep
AAAPPSQAIISAAFRWIFCFAISFFLHITYRRSSPLYALDLSAHPRMIPLFFVLIHLEVRGRNQDGASTGWNGRRVLLTPPFFGFHIFRQIGTLLTYPPTVVMLFPLSSEDAHCGGSATM

SEQ ID NO: 220844 - protein, 102 aa, Glycine max
  unsure (1)..(102): unsure at all Xaa locations
  Clone ID: PAT_MRT3847_41452C.1.pep
GAVLGLIFFLPLIIVSSPVXVPPGTLLFIVTAGFLSVCGFGVALVAALSXMYRYFRGLPPPGSDRVDYARSRIYDPPTHVKDYAREYGGYFQSKVKNPAPGA

SEQ ID NO: 220845 - protein, 69 aa, Glycine max
  Clone ID: PAT_MRT3847_41453C.1.pep
IASMVDHYNKLVKLAARAFYDDLTSKGENQPKSGRSDNRGIAVVILDALTRRQWVREEELAKDLKLHTK

SEQ ID NO: 220846 - protein, 30 aa, Glycine max
  unsure (1)..(30): unsure at all Xaa locations
  Clone ID: PAT_MRT3847_41454C.1.pep
FFFXFFFFFFFFFFFFFFFFFFLKNKILTS

SEQ ID NO: 220847 - protein, 44 aa, Glycine max
  Clone ID: PAT_MRT3847_41455C.1.pep
CFLSKDNDSWLWHKRIAHINMDHLNKLISKDLVIGLPKLKFERD

SEQ ID NO: 220848 - protein, 48 aa, Glycine max
  Clone ID: PAT_MRT3847_41456C.1.pep
PGRPTRSTVVRSRHKGTAARRRHKDTAARRRQKGPAARRRQKYTASSS

SEQ ID NO: 220849 - protein, 189 aa, Glycine max
  unsure (1)..(189): unsure at all Xaa locations
  Clone ID: PAT_MRT3847_41457C.1.pep
MAKTTHIAIVSSPGFSHLVPIIEFTKRLVKLHPNFHVTCIVPSLGSTPESSKAYLKTLPSNIDSIFLPPISKENVPQGAYAGLLIQLTITLSLPSIYEALKSLSSKFPLTALVADTFAFPTLEFAKEFNALSYFYTPLSAMVLSLALHMSKLDEEVSGEYKDLTEPIKLXGCVPTLSGDLPAPIQNRSS

SEQ ID NO: 220850 - protein, 81 aa, Glycine max
  unsure (1)..(81): unsure at all Xaa locations
  Clone ID: PAT_MRT3847_41458C.1.pep
KANIPHTHLVHXKFYQICMTVNAEKIMFSGCRTHFHYGANKNIASIVNMLNFSNNNLNNEGXLQTVLDVGCGVTSLTSKLI

SEQ ID NO: 220851 - protein, 54 aa, Glycine max
  Clone ID: PAT_MRT3847_41459C.1.pep
GRVLVHNPHFKDEHIFEVNQLNILAILKLQSTNTVKFSTLIFFLLVILLGLALV

SEQ ID NO: 220852 - protein, 84 aa, Glycine max
  Clone ID: PAT_MRT3847_4145C.1.pep
LALSLFIIFPSLSSFALSPCERSQLHRHRFPRFLGAAGVLYMLTSACAGEMCLRWKFSFILSIPHFSLAIYPSRIFSSIFWLWK

SEQ ID NO: 220853 - protein, 121 aa, Glycine max
  Clone ID: PAT_MRT3847_41460C.1.pep
NLCDYFLAANSREEMDEWVNACQQVAAEASNKMRQLRSREKQSRIASELSSLVIYCQAVPFHADFELQDPRSSFYEMCSFSESKHDKLVERGLQLFNKRQLSRVYPQASRFTSTNFNPVPM

SEQ ID NO: 220854 - protein, 80 aa, Glycine max
  Clone ID: PAT_MRT3847_41461C.1.pep
PLNKALGGPTPPPPKFWPPIGNPLKTILAEFPSPGPDFPIKIFYLSCPRGGPHILPLIKNPSKTKLQKCPPLLLCQFFYP

SEQ ID NO: 220855 - protein, 42 aa, Glycine max
  Clone ID: PAT_MRT3847_41462C.1.pep
QELSFYAVFNKSLSHKNLFKNLCKSLNKIHFWYRILLLILSF

SEQ ID NO: 220856 - protein, 165 aa, Glycine max
  Clone ID: PAT_MRT3847_41463C.1.pep
NSARVRLRETTERKNEEIPKVSPYFRNHYGNNGGNGEENQGKVATRKIVLALPAYCPQKLPTVVDLKEPMRTNKEAYNNIKIGHDLQSSGNEIGTGNTTTNNGKRTSIKHEEVQKVSPYFWNDYGKKGDNGKENGDEIAIETVKSKRKRRLKNRLKKYELHGDNE

SEQ ID NO: 220857 - protein, 112 aa, Glycine max
  unsure (1)..(112): unsure at all Xaa locations
  Clone ID: PAT_MRT3847_41464C.1.pep
DHVALGPAAGQGXXNRGQCQRTKSLNTIHSSNSRSSADGSITYGTGFTIYNSSLNDVHXNDXIQCAGNASYNKIGKTMASLNVLINFIHVCMRQSKVIILTDPVPDLSLQRN

SEQ ID NO: 220858 - protein, 127 aa, Glycine max
  unsure (1)..(127): unsure at all Xaa locations
  Clone ID: PAT_MRT3847_41465C.1.pep
WEFGMAIVDLFCFLLFCHLVLILSAGYGNGHQDCPHSFTCGNLGTFHYPFTKAEKPDCGLLAIHDCDNPHQHRKMIQLELNGKGIVLIGVAQQNAISILDEDFHKRLQXNPCGTLKNNYSLPSPFSS

SEQ ID NO: 220859 - protein, 190 aa, Glycine max
  Clone ID: PAT_MRT3847_41466C.1.pep
RPTRPVVRFGNRCKDPQWHNLDRYFEKLGSELTPQKQLKEEAEMVMQQLMTFVQYTAELYHELHALDRFDQDYRRKFQEEDNSNATQRGDSLAILRAELKSQKKHVRNLKKKSLWSKILEEVMEKLVDIVHFLYLEIHEAFGSSDTDKQAKDSQGNHKKLGSAGLALHYANIITQIDTLVSRSSSVPPNT

SEQ ID NO: 220860 - protein, 179 aa, Glycine max
  Clone ID: PAT_MRT3847_41467C.1.pep
MNLQQAGQSKSSNGYGRRKSEREGATKSENKILSGKLNANRLANAGAVTGSKGGSYESPSHDRLVYVTTCLIGHQVEVQVKNGSIYSGIFHATNTDKDFGIILKMACLTKDGSLRGQKSGTEFVSKPPSKILIIPAKDLVQVTAQDVAITRDGLANEYHHDMHQEIMVDSLISQSRHVD

SEQ ID NO: 220861 - protein, 83 aa, Glycine max
  Clone ID: PAT_MRT3847_41468C.1.pep
SYSLCYFLGALRPLLHGGERYQHQPRWPPCLCHGHLHGVDSMIYGSHHRSYVWLRPTTHQWWGVDAPVHEQDGADSEHRDNGR

SEQ ID NO: 220862 - protein, 67 aa, Glycine max
  Clone ID: PAT_MRT3847_41469C.1.pep
HSKQNTAPCHTLLSRDIATQLHPLWKHKSLKKPNATTSRFFKYDGEPYHTKDLDQRMERFSNIVPPI

SEQ ID NO: 220863 - protein, 406 aa, Glycine max
  Clone ID: PAT_MRT3847_4146C.1.pep
MGCFFGCFGSSKHRNHKHKVQRNDSSNSKQEQHSVSLVHGCSTNAINPIPQLQDESEEQLSVSSRKKVTFDSNVKTYEPVLADEVVERKNEQALAQPKSSSSEDSSVTSTGSNPPNHRYQNCRDSDDEEEEIDYGDSDLSDGDEDDDDAIKEECNEVSEDFGEDGIVATTVSDDHVFVEEEVSVKSIGSNPNVRDRSAYVHPVLNPVENLTQWKVLKAKRTPIRPQKENDFGVGVKGSPFSLNYSESDTPKKLNREIRVDASLSNWLVSPETTPVISKAGSVASFAGTPDRSTSQGSYSVISHEDRPILGALTLEEIKQFSATSSPRKSPSRSPDEMPIIGTVGTYWNAAGSAEDPGSVSSFKGIPNSTSKYREDKRVNWHSTPFETRLEKALNRGASSAYVPRVF

SEQ ID NO: 220864 - protein, 102 aa, Glycine max
  Clone ID: PAT_MRT3847_41470C.1.pep
GWRKKLLQRIRWISDSIFLQSFLFPCARIKCVMGVFSLTSSLFILLALFSYFIHIRIFPDRFFRMHFLYSGLRILFIVLLDNYAIRVIGMLAFSTRRYFYDY

SEQ ID NO: 220865 - protein, 44 aa, Glycine max
  unsure (1)..(44): unsure at all Xaa locations
  Clone ID: PAT_MRT3847_41471C.1.pep
RKSNLGYIGDRAVRVKWFKNPYSISITSXLYVTHSVGAILKSYR

SEQ ID NO: 220866 - protein, 80 aa, Glycine max
  unsure (1)..(80): unsure at all Xaa locations
  Clone ID: PAT_MRT3847_41472C.1.pep
QSKRKLSPMATYFHSNSEIQAGADGLQTLVLMNPGYVQYSDTPPPPHGGNLVFLNSAAGNASLQNXSHAPXPYTQQFVGV

SEQ ID NO: 220867 - protein, 188 aa, Glycine max
  unsure (1)..(188): unsure at all Xaa locations
  Clone ID: PAT_MRT3847_41473C.1.pep
MATYFHSNSEIQAGADGLQTLVLMNPGYVQYSDTPPPPHGGNLVFLNSAAGNASLQSLPHAPPPHTQQFVGVPLSAAAHEPPASMHHDVSALHGFLPRMQYNLWNTIEHNAAAREAPRAXRGLSLSLHGDHMRASPSSASGASNGGGVAGIQSVLLSSKYLKATQELLDEVVNVNGGIRVEHAKKLNF

SEQ ID NO: 220868 - protein, 102 aa, Glycine max
  unsure (1)..(102): unsure at all Xaa locations
  Clone ID: PAT_MRT3847_41474C.1.pep
KISFNYRELFDGLIQKSLSKPDSQHCKCELVTKAKERFSPMATYFHSNSEIQAGADGLQTLVLMNPGYVQYSDTPPPPHGGNLVLLNCDXGNASLQDSPTRR

SEQ ID NO: 220869 - protein, 157 aa, Glycine max
  unsure (1)..(157): unsure at all Xaa locations
  Clone ID: PAT_MRT3847_41475C.1.pep
MATYFHSNSEIQAGADGLQTLVLMNPGYVQYSDTPPPPHGGNLVFLNSAAGNASLQNLSHAPPPHTQQFVGVPLSAAAAHEPPPPPASMHHDVSALHGFLPRMQYSLWNTIDPNAAAREAPRATQXVVAEPARGRCARLPSSASASTAAAWRFRACC

SEQ ID NO: 220870 - protein, 116 aa, Glycine max
  unsure (1)..(116): unsure at all Xaa locations
  Clone ID: PAT_MRT3847_41476C.1.pep
MSGFRDARCFPRPILAVNLALALLHVVVAFLAFFQLLRIHMRNAQLGWTRQKVFHVLIGSSNLGYVIYLALTLVAACKGWTCWSHSCXFVFMAFPKXLFLEHFFSFILWVDLCIGR

SEQ ID NO: 220871 - protein, 103 aa, Glycine max
  unsure (1)..(103): unsure at all Xaa locations
  Clone ID: PAT_MRT3847_41477C.1.pep
PDHYTVCVIEHCHTFRRLTQHRLQFFFLFDGEYLSCILYTXISYFKGRVETKTYDIAHVPNLRSIQYRLINEHAEDAYYEXXNPHEHIQAYDFELTPAIVSEN

SEQ ID NO: 220872 - protein, 193 aa, Glycine max
  Clone ID: PAT_MRT3847_41478C.1.pep
MSGFRDTHGFPRPILAVNLALALLHAAVAFLAFFQLLRIHMRNAQLGWTRQKVFHVLIGSSNLGYVIYLALTIVASCKGWTCWSHSCGFIFMAFPKVLFFAAFLLLLSFWVDLCHQADDDDDYEGSFCDNPLLEKTLNESNLASIDSHRKCFPFRFARVGNRQKIVILVTLLVIIIRVAFAVEIWIGLGKNPI

SEQ ID NO: 220873 - protein, 64 aa, Glycine max
  Clone ID: PAT_MRT3847_41479C.1.pep
FKMLFPIMQLQGKLLTLFFRLFLEEHNHPGPRLLGTKLHINRTFEPGRPNTTSNAYYRATIGAQ

SEQ ID NO: 220874 - protein, 104 aa, Glycine max
  Clone ID: PAT_MRT3847_4147C.1.pep
PRVRFHLSLSLSLSLSLSVFSFACACERSQQLHHHHNRTVTDFQGFLVLLVYYTLTSACAGEMCLSWKFSFVLSVPHFSLAIYTSRIFSSSFWYMITYAFGFIL

SEQ ID NO: 220875 - protein, 176 aa, Glycine max
  Clone ID: PAT_MRT3847_41480C.1.pep
MGCTYSVYRKKKSSFPEVVVFVPSTRIPVQSDLQRVLKGVIPRDLADKLAALRNQIVLIAEDTGGSAVTELQRALNEYLSVLIGLTKKEYGPEGLIDFKWKNLEDGRQDSSISNTWFEVLSSVHLMAMLTLSDADSLMIPKDPSGSGFRVVSSDSKREAIDLLLKASGYLEFCVRD

SEQ ID NO: 220876 - protein, 92 aa, Glycine max
  Clone ID: PAT_MRT3847_41481C.1.pep
MGPAPFPPHKIKFGPKKNPPSSRGNQNSPPCWETQNLKNTPPPKKPGLPKKKTPSFPPPNLYPKFNGPILKPTPPGDKPEGPLKNPPPKGPP

SEQ ID NO: 220877 - protein, 42 aa, Glycine max
  Clone ID: PAT_MRT3847_41482C.1.pep
HFIHPSKRSLHFSLHNASSIQVQSLVCHPVCSSFSISNNYHI

SEQ ID NO: 220878 - protein, 27 aa, Glycine max
  Clone ID: PAT_MRT3847_41483C.1.pep
YLSQSGDRFLPHVETTSPIQLSNVDHN

SEQ ID NO: 220879 - protein, 47 aa, Glycine max
  Clone ID: PAT_MRT3847_41484C.1.pep
PRASYLGSLSQVDIVQYVNHQIAGCVYIGHLRPVTKDSNNSGSSEAG

SEQ ID NO: 220880 - protein, 51 aa, Glycine max
  Clone ID: PAT_MRT3847_41485C.1.pep
DAWETTSTLIIVDTHISKSYVYYHLGEDHKSEPTFIGQDHCSIHIICRLPI

SEQ ID NO: 220881 - protein, 68 aa, Glycine max
  Clone ID: PAT_MRT3847_41486C.1.pep
IITIKYLLISFIKSIIPYTIFLFPVIFYQNILYISSQQFNNDRWRSGLTQLIFVIPRIQVEIFIPYLL

SEQ ID NO: 220882 - protein, 130 aa, Glycine max
  unsure (1)..(130): unsure at all Xaa locations
  Clone ID: PAT_MRT3847_41487C.1.pep
LQSTQSXTLTAPPPIPTQSPRPALMPQHPVPLPDPLTIATVHLLADNQPQASSPSHHILLSDLDLFPSVMFIAITTDTELDYHFLPSDITIDSVGWLRFRNTYLHALIPSPILIWDPGSNFEAVVVAPTP

SEQ ID NO: 220883 - protein, 66 aa, Glycine max
  unsure (1)..(66): unsure at all Xaa locations
  Clone ID: PAT_MRT3847_41488C.1.pep
MAANLVLRGHMRDLTDVVTANGTPDRQSDMIINDSRDTSLILWHPTKEDKTXGVHRSRLTGHSHFV

SEQ ID NO: 220884 - protein, 48 aa, Glycine max
  Clone ID: PAT_MRT3847_41489C.1.pep
FVMMSGKVSFLGFIKVPCGFLPLLETFQLIFLMKQLATKSANTSQNFD

SEQ ID NO: 220885 - protein, 86 aa, Glycine max
  Clone ID: PAT_MRT3847_4148C.1.pep
FWASCSTFCPSYWWNPESFLGPGGLFPGYRWISATRFGYLKERLEALNEEFKFFWGPPKLNWGGACPKGLTPGKQFSQIKSFQPKV

SEQ ID NO: 220886 - protein, 68 aa, Glycine max
  unsure (1)..(68): unsure at all Xaa locations
  Clone ID: PAT_MRT3847_41490C.1.pep
ITAALREPTRVAXIRAMIMPMSMLGFAAGHTYNRISLQAESMSEIRRTTCPKASRVESAALERLEVCV

SEQ ID NO: 220887 - protein, 57 aa, Glycine max
  Clone ID: PAT_MRT3847_41491C.1.pep
FYLYHPSWPTLEAELIMEFQQTHVEIPIHISNGVKLKPIQEVALAESSSIIDYSQRA

SEQ ID NO: 220888 - protein, 107 aa, Glycine max
  Clone ID: PAT_MRT3847_41492C.1.pep
FVVKMGRLLKGDRVIRVYHMFKLFPLSSSARKRHLQIDPAFCAQAFVPTTRVPRASSMWHPCYVTRNGWSLMMSKTVTRFYHESSLMHIKVQDVGAMTCSQWVINDF

SEQ ID NO: 220889 - protein, 86 aa, Glycine max
  Clone ID: PAT_MRT3847_41493C.1.pep
ASMQGVTIHGRDVFKQARISGMRDKRIGISSIRCQGMECARALRRSTSNDHPCMSVSQIRMGIRGSISFEHRVWLVSHHGPNGQSE

SEQ ID NO: 220890 - protein, 54 aa, Glycine max
  Clone ID: PAT_MRT3847_41494C.1.pep
IKLSYIEYTLTGEGALRANNQGHQKLRPRKGKGRRLGTLRLATSTQHLNQGTRS

SEQ ID NO: 220891 - protein, 127 aa, Glycine max
  unsure (1)..(127): unsure at all Xaa locations
  Clone ID: PAT_MRT3847_41495C.1.pep
HAFACDKIASVLTTTDERLVGTXHEGYDPFLGGIEKYATTMMPLDEEILSKDAQDMVEEWFDCVDEEDSFAEVILTAALNGVVGVDYIESIPLDTCWGFTYVLSRKSGEXGTXRFVSWDGEEMTLIS

SEQ ID NO: 220892 - protein, 130 aa, Glycine max
  Clone ID: PAT_MRT3847_41496C.1.pep
TLLSPLRWGISKLVETILKWKLPLKKYGLVPNHNFLQDLSTCLLSLLPDNFFDKLKEGSILIKKSQSFSFSREGVIIDGEAKVLETDVVIFATGYKGDQKIKNMFKSPIFQNYIIGPTISTVPLYRSVCS

SEQ ID NO: 220893 - protein, 46 aa, Glycine max
  Clone ID: PAT_MRT3847_41497C.1.pep
ITNLFFRKHLYATARGTQRRTLADQITFGKRKQKRDPAGPRQKTPI

SEQ ID NO: 220894 - protein, 59 aa, Glycine max
  Clone ID: PAT_MRT3847_41498C.1.pep
QFSTKLNMRNSSNESVDQQSKKKKKNLFHALGNYNVKEKRGDIDGSKLDNLTIIRIILL

SEQ ID NO: 220895 - protein, 81 aa, Glycine max
  unsure (1)..(81): unsure at all Xaa locations
  Clone ID: PAT_MRT3847_41499C.1.pep
MCQCCVCLISHRKMSCCCGNCCFXSSCKCCNGCXGCKMYPDLSYNESTSIEILVIGVAPVNAQFDGAEMGVPADNDCCKCG

SEQ ID NO: 220896 - protein, 77 aa, Glycine max
  Clone ID: PAT_MRT3847_4149C.1.pep
FEMNTYFRIIQELQVVVKAPGTSKMMTFLQLVVFYPHDPNVNQMRRDENRRRKEGRGSQNCVGLAGADENPNGAKGT

SEQ ID NO: 220897 - protein, 75 aa, Glycine max
  Clone ID: PAT_MRT3847_414C.1.pep
ENILDDDKVLIKFRSDHSIGFVAFDGALYMVMSHNLSHYYDVASHNMIFELVWSIHIEFKFFFKKKIVRYVFFIF

SEQ ID NO: 220898 - protein, 166 aa, Glycine max
  Clone ID: PAT_MRT3847_41500C.1.pep
MPSFSFLRTLRLSLFPPYPPIAIPTATLHSQPHYHHHAVASFNLMLLMRPPPPTFLFNNILSSLVNNKHYPTVISLFKQFEPNGITPDLCTLSILINCFCHQAHITLAFSVFANILKRGFHPNAITLNTLIKGLCFRGEIKKALYFHDQLVAQGFQLDQVSYGTLI

SEQ ID NO: 220899 - protein, 891 aa, Glycine max
  Clone ID: PAT_MRT3847_41501C.1.pep
MEGDVGQHGDREIDDSVLDGEIGSHVEEIGGNGEREINGSVSDERGDGLVFGSTEAANKFLEDLELHQSRDAERIVTDSDEEEESDDEGEGKELFDTATLAALLKAASGADQDGGSITITSQDGSRLFSVERPAGLGSPLQSGKPAVRQTRPSLFTPSMSRPSAISDSNLSQEEKNKLEKLHEIRVKYLRLVHRLGFTTEESIAAQVLYRMTLVAGRQSGQMFSVESAKETASRLEAEGRDDFDFSVNILVLGKAGVGKSATINSIFGETKTSINACGPATTSVKEIVGVVDGVKLRIFDTPGLKSSAFEQNFNTKVLSAVKKLTKKSPPDIVLYVDRLDLQTRDMNDLPMLRSITSVLGSSIWRNVIVTLTHAASAPPDGPSGAPLSYDVFVAQRSHIVQQTIGQAVGDLRLMNPSLMNPVSLVENHPSCRKNRDGQKVLPNGQSWRPLLLLLCFSMKILSDASNSTKTQESFDHRRLFGFRPRSPPLPYLLSSLLQTHTYPKLPADQSGPDNGDSDVEMADLSDSDLDEDEDEYDQLPPFKPMKKSQVAKLTKEQQKAYFDEYDYRVKLLQKKQWREELRRMREMKKKGNTKENDYGYMEEDDQENGSPAAVPVPLPDMAMPPSFDSDNPAYRYRFLEPTSQLLTRPVLDNHGWDHDCGYDGVNIEQSLAIINKFPAAVTVHVTKDKKDFTIQLDSSVAAKLGENGSAMAGFDIQNVGKQLSYSVRGETKLKNFKRNKTSAGVSVTFLGENVCTGLKVEDQIAVGKRLVLVGSTGVVKSKTDSAYGANVEVRLREADFPIGQDQSSLSLSLVKWRGDLALGANLQSQISVGRGYKVAVRAGLNNKLSGQITVRTSSSDQLQIALVAILPIAKAIYKNFWPGASENYSIY

SEQ ID NO: 220900 - protein, 181 aa, Glycine max
  unsure (1)..(181): unsure at all Xaa locations
  Clone ID: PAT_MRT3847_41502C.1.pep
MASSRCFENPPVLEPASGGGEVVDDFGGQKAYVSGSAGSKAAVVLISDAFGFEAPNLRKIADKVASLGYFVVVPDFLHGDPYDPSNNAHSNPGTWIQSHNPQTAFEEAKPVIAAIKXRGVSSIGAAGYCWGXKVVVELAKVHEIQAAVLAHPSLLTVDDMKDVKCPISILGAEIDRSAPPE

SEQ ID NO: 220901 - protein, 348 aa, Glycine max
  Clone ID: PAT_MRT3847_41503C.1.pep
VIAIIFFFGGSRLYRLQIPGGSPLTRICQVIVAALRKIGLQVPNDKSLLHETIDLESVIKGSRKLDHTNRFKCLDKAAVETESDHTKDLSNPWRLCTVTQVEELKSVISLLPVWASLIAFATVYGQMSTMFVLQGNTMDQRIGPHFKIPSASLTIFDTLSVIFWAPVYDRFIVPFASKYTGHKQGFTQLQRMGIGLVISTIAMVVAGILEVYRLGIVRKNNYYDVETIPLSIFWQVPQYFLVGCAEVFTNIGSLEFFYGQAPDAMRSLGMALSLTTNALGNYISTLLVIIVTKVTTRHGKLGWIPDNLNRGHLDYFYWLLTVLSFLNFLVYLWVAKRYRYKKVAGNAH

SEQ ID NO: 220902 - protein, 66 aa, Glycine max
  Clone ID: PAT_MRT3847_41504C.1.pep
IGGKAMASALQAAGTFHATHQVFAAKVYSGHILRVLVWNLLEIIMSHSSFMLILRNLLTSVLMLPN

SEQ ID NO: 220903 - protein, 36 aa, Glycine max
  Clone ID: PAT_MRT3847_41505C.1.pep
HVYLGTVIRTDRHGSDNATPLCITQSIITNLSLTTN

SEQ ID NO: 220904 - protein, 67 aa, Glycine max
  Clone ID: PAT_MRT3847_41506C.1.pep
EILRWYVQAELGNGRWAMLGVAGMLLPEVFTKFGIINTPQLYNTKKSNDLSSSSTLFIIKFILLHYV

SEQ ID NO: 220905 - protein, 205 aa, Glycine max
  Clone ID: PAT_MRT3847_41507C.1.pep
FKIPPATLQSAITRSIILLMPLYDKIFIPITQVITRQERGISVMQRMGIGMVLSIIAMIIAALVEMRRLEIGSQMRSAGSQSETVPLSIFWLLPQYILLGISDIFTVVGMQEFFYGEVPRHMRTMGIALYTSVFGVGSFVSALLITLVEVYTSSKGIPSWFCDDMVEARLDSYYWLLAWLSTVSLLLYALLCRYYPKKSDSDNEY

SEQ ID NO: 220906 - protein, 191 aa, Glycine max
  Clone ID: PAT_MRT3847_41508C.1.pep
TLQEDVELDKSQVTWVPDWVKEKNRGTVDDASDKKVSRDRNEEGWNTQLAESLKGLNWQILDVGEVRIDADIKDGGMTLVTALSPHANWLHGNADLKLEVRGTVDQPVLNGHASFHRASISSPVLRKPLTNFGGNVHVQSNRLCITSLESRVTQKKKKKKKGKMPLRTSDASSDDKIESKCEGLEVRAQKY

SEQ ID NO: 220907 - protein, 294 aa, Glycine max
  Clone ID: PAT_MRT3847_41509C.1.pep
SWSCYFFPETSLECRRRAFELMKSEDAWSKGIVTTKENYTTKHIWAGPTPRKWGLQWNYLQPTTDINGTLLASHRKMDIRWWRAQAVRYLMRFPTEYTCNLMNEARHASFGKLAAKMVLQSLAGDWPKESSARARPDDIDEYVWSNHKPWVPRPLLCMHVRMGDKACEMKVVGFEEYMQLADRTRRHFPHLNNIWLSTEMQEVIDKTREYSHWNFYYTKVRRQAKINMSMAAYEASLGRETSTNYPLVNFLMAADSDFYVGALGSSWSFLIDGMRNTGGKVMAGYLSVNKDRFW

SEQ ID NO: 220908 - protein, 80 aa, Glycine max
  unsure (1)..(80): unsure at all Xaa locations
  Clone ID: PAT_MRT3847_4150C.1.pep
LIPVCEINYSLKSASGEIAAGTIPDPRSLNAQVLTMGDVAAMRWGIEHIEEPGXDIDYRMDHGQVFDGGVIGNFSSPLSE

SEQ ID NO: 220909 - protein, 74 aa, Glycine max
  Clone ID: PAT_MRT3847_41510C.1.pep
GSLWAVRLLRLRSFSVPGPAPSLCSGSTVALLPPPPPGGFCSSMVSPGGFTSLFRRTVTLGSGIHLSKLCLWFK

SEQ ID NO: 220910 - protein, 61 aa, Glycine max
  Clone ID: PAT_MRT3847_41511C.1.pep
GSDRIGAAMAFAATPKIITESLDMQIQRRSMKGLYGKRYLVTMKRSQDHSTKCVIERIISD

SEQ ID NO: 220911 - protein, 120 aa, Glycine max
  Clone ID: PAT_MRT3847_41512C.1.pep
WPSSKNHPYHNTTSHALLFQTARKPHATNCKIPYCPLPTPSSFSSLAFTASLLLVWLPIGLCFFTFIHVCYAYTRPGCLIKHCGRPACYYPTFPVCLSSSLTLLPPPPPPPPPKKEDVIQ

SEQ ID NO: 220912 - protein, 84 aa, Glycine max
  Clone ID: PAT_MRT3847_41513C.1.pep
FETIEQLGCEMVLFFALILLGFLLGVVAVVAAEALGFLWVIKRLQSKISKDQAKIASKTQLGGAQSDHPQQQLLKTEGVVWVLE

SEQ ID NO: 220913 - protein, 61 aa, Glycine max
  Clone ID: PAT_MRT3847_41514C.1.pep
ACTLVLVCHKPIKNVSEPDELTVAKYTIYEHNTYPNKKPFFAKVAERTTHVIFLTEDDLKI

SEQ ID NO: 220914 - protein, 57 aa, Glycine max
  Clone ID: PAT_MRT3847_41515C.1.pep
GKPCPQRFPTRNKSRGGGAPYWGPLFFFFFFFFFSSNILAMASNWETLPLLSSSRSR

SEQ ID NO: 220915 - protein, 84 aa, Glycine max
  Clone ID: PAT_MRT3847_41516C.1.pep
DVYIMFCFLYRCIPHPILPEYLLIPILIMARIVPNSRKSPAPGEHREQSIQHHLRGPFNHLTRPLSLLRDPGQMNFLGKNVFLP

SEQ ID NO: 220916 - protein, 47 aa, Glycine max
  Clone ID: PAT_MRT3847_41517C.1.pep
PTRPPTRPLTLPPTRPKLRRWTHIHKFGEKPEMANDIIEFGSLYEYI

SEQ ID NO: 220917 - protein, 83 aa, Glycine max
  Clone ID: PAT_MRT3847_41518C.1.pep
EPALIGVPGLQGTSTCGSFLSISPTSIHSPTPILTEKGKEIGKIIKIVDWDYFRVVSEDQFPDKGHNFVQFRPFPRWKEHLHS

SEQ ID NO: 220918 - protein, 71 aa, Glycine max
  Clone ID: PAT_MRT3847_41519C.1.pep
KQKLANVCPRKISIITCGRQIDHNKQNVPYNINPSRNFCFLINYRGPTSSQPSFFFSTELTIKSNVMISHY

SEQ ID NO: 220919 - protein, 41 aa, Glycine max
  Clone ID: PAT_MRT3847_4151C.1.pep
HSAFHSLIPCSYLHIHSLLFFRIRLILTVTITSNHHYTSSP

SEQ ID NO: 220920 - protein, 98 aa, Glycine max
  Clone ID: PAT_MRT3847_41520C.1.pep
PPPYVYKSPPPPSPSPPTPYVYKSPPPPSPSPPPSYIYKSPPPPSPSPPSPYVYKSPPPPSPSPPPLYYYKSPPPPSPSPSSPPYHPYLYNSPPPPVY

SEQ ID NO: 220921 - protein, 87 aa, Glycine max
  Clone ID: PAT_MRT3847_41521C.1.pep
SILPTLTLNLPFIISSAPVHSYTSCSTTYNPLSYHAPPFIIRQLKIPTLHTLTTTQTAFLLTFRSIISNVYITYYYYSLHILLIIAK

SEQ ID NO: 220922 - protein, 111 aa, Glycine max
  unsure (1)..(111): unsure at all Xaa locations
  Clone ID: PAT_MRT3847_41522C.1.pep
PLSFTRRGTTPGGLFCPMGDSPPGGVFAGNATSACTTIRALEAHSIKPNTYEVSQHRYSIVPIKRRSWVEGHISFNQTAGATMSXRKDSMRMGNTDAENLMEPGTKSITHE

SEQ ID NO: 220923 - protein, 72 aa, Glycine max
  Clone ID: PAT_MRT3847_41523C.1.pep
TLRESLGFLAIRTECPCAPHFASDGLQDKEPDWIPLRLQISPCPMLAPHGENMNYPPYFYVRLRGCVWPNRQ

SEQ ID NO: 220924 - protein, 69 aa, Glycine max
  Clone ID: PAT_MRT3847_41524C.1.pep
DHPLEALRGTKVQEWDLLSQVMRRVGDLNRSVQLYDNAYGMDLHRTRDDPAYMSIIAVLGYGPADASTV

SEQ ID NO: 220925 - protein, 40 aa, Glycine max
  Clone ID: PAT_MRT3847_41525C.1.pep
KSFAGCSLIHSLADPHFHCTTAICCASNRPTNCETNEFCL

SEQ ID NO: 220926 - protein, 58 aa, Glycine max
  unsure (1)..(58): unsure at all Xaa locations
  Clone ID: PAT_MRT3847_41526C.1.pep
PPRPFFFGQPPAGGRVPLPALCMFVVFPLFFLRGLSCLCASVPXCHLFYYLWGPLSLR

SEQ ID NO: 220927 - protein, 132 aa, Glycine max
  unsure (1)..(132): unsure at all Xaa locations
  Clone ID: PAT_MRT3847_41527C.1.pep
RLTGQKNPRVRQNANQLSGSGSEIHPWHLHGHDFWVLGYGEGKFKPSDEKKFNLTHAPLRNTAVIFPYGWTALRFKADNPGVWAFHCHIEPHLHMGXMGVIFAEGVHKVGKIPRDALTCGLTGNKLVGNRHY

SEQ ID NO: 220928 - protein, 576 aa, Glycine max
  Clone ID: PAT_MRT3847_41528C.1.pep
MVTMGLKALFVWCIIWLAFAQLSLGGRVRHYKFDVEYMIRKPDCLEHVVMGINGQFPGPTIRAEVGDILDIALTNKLFTEGTVIHWHGIRQVGTPWADGTAAISQCAINPGETFQYRFTVDRPGTYFYHGHHGMQRSAGLYGSLIVDLPKGQNEPFPYDGEFNLLLSDLWHTSSHEQEVGLSSKPFKWIGEAQTLLINGRGQFNCSLASKFINTTLPQCQLKGGEECAPQILHVEPNKTYRIRIASTTALASLNLAISNHKLVVVEADGNYVTPFAVDDIDIYSGESYSVLLRTDQDPNKNYWLSIGVRGRKPNTPQGLTILNYKPISASVFPTFPPPITPLWNDFERSKAFTKKIIAKMGTPQPPKRSDRTIFLLNTQNRVDGFTKWAINNVSLTLPPTPYLGSIKFKIKNAFDKTPPPVTFPQDYDIFNPPVNPNASIGNGVYMFNLNEVVDVILQNANQLSGSGSEIHPWHLHGHDFWILGYGEGKFKSGDEKKFNLTHAPLRNTAVIFPYGWTALRFKADNPGVWAFHCHIEPHLHMGMGVIFAEAVQKVGKIPRDALTCGLTGKMLGNRHY

SEQ ID NO: 220929 - protein, 93 aa, Glycine max
  Clone ID: PAT_MRT3847_41529C.1.pep
HSSEHSHPREKGLHQCTNVLFSEIFSNLMHGIQGFDSALSTFLTSVLLDMAVVFIREELALALCETALGIKLRVSNALNKQLAIVLEHLCFSW

SEQ ID NO: 220930 - protein, 153 aa, Glycine max
  Clone ID: PAT_MRT3847_4152C.1.pep
KRKGEKKANPKILVIWQKGLPTVVSTHTFSHVFHLQVHLQKFSCFFLKPFVGGKKKKVNQSLQLNFPLLLSFSGTLFFFFFSKTGFFFFSETLSLVPFVNLLVPREILKNSILYLYRLPRRNCPRTERVILLPLVWRPGSIIISLLLGPQSLY

SEQ ID NO: 220931 - protein, 193 aa, Glycine max
  Clone ID: PAT_MRT3847_41530C.1.pep
MLVARSLSPSKLKPLFYLSILCECQNHFHSSLIPYSKPHLQNFPKFYPQPSTNLFRFFSSQPADSTEKQNLPLSREGNYDEVNSQSLHVCPGCGVYMQDSNPKHPGYFIKPSEKDLSYRLYNNLEPVAQEPEFSNTVKRGIVIEPEKLDDDDANLIRKPEKPVVCARCHSLRHYGKVKDPTVENLLPDFDFDH

SEQ ID NO: 220932 - protein, 70 aa, Glycine max
  Clone ID: PAT_MRT3847_41531C.1.pep
KRPCFYTRKMNTYAPTTGHVTRNHFQVMDRNSIHAPVALYTLPRTFNTPAMQDHRGYYALLYSGGVWNLR

SEQ ID NO: 220933 - protein, 75 aa, Glycine max
  Clone ID: PAT_MRT3847_41532C.1.pep
LEILQHTFKCDYICSLDSDAHLIYIVMYHIIKSNNFLHSMSHTWSIVHAYLYCSPFIVGILHCRVYILNTYGALL

SEQ ID NO: 220934 - protein, 119 aa, Glycine max
  Clone ID: PAT_MRT3847_41533C.1.pep
MEAYTKVVCILGLLIFVSISDIHRVEGAGECGRSTTPDNEAIKLIPCVSAAKDENVKVTKNCCAQIEKLGKNPSCLCAVMLSNTAKMSGADPKVAITIPKRCNLANRPVGYKCGPYTLP

SEQ ID NO: 220935 - protein, 106 aa, Glycine max
  Clone ID: PAT_MRT3847_41534C.1.pep
KNGGQNTFFFLQKTPLVLEEKNGPCHKTRFWGHPLNLSMAPFNFIVQTQKLFRPVLITTPRIFPNLGFPPGTIFPGNLTEKKVPYNAPKHSTGNFLQKSKNKPFKA

SEQ ID NO: 220936 - protein, 396 aa, Glycine max
  unsure (1)..(396): unsure at all Xaa locations
  Clone ID: PAT_MRT3847_41535C.1.pep
MSTKLISIMCVVWYFVCFGFLVCLTIPLPSPSLFCRALLHFLDPDKFRSKDEFVQNYKNLSSFNENELANLHMELRPHILRRVIKDVEKSLPPKIERILRVEMSPLQKQYYKWILERNFHNLNKGVRGNQVSLLNIVVELKKCCNHPFLFESADHGYGGDSEVXDNSKLERIVFSSGKLVILDKLLVKLHETKHRVLIFSQMVRMLDILGEYMSLRGFQFQRLDGSTKAELRQQAMDHFNAPGSDDFCFLLSTRAGGLGINLATADTVIIFDSDWNPQNDLQAMSRAHRIGQQEVVNIYRFVTSKSVEEDILERAKKKMVLDHLVIQKLNAEGRLEKKEAKKGGSYFDKNELSAILRFGAEELFKEERNDEEXKQLLSMNIDEILGPPGTGGSCTV

SEQ ID NO: 220937 - protein, 28 aa, Glycine max
  Clone ID: PAT_MRT3847_41536C.1.pep
VFYSDVVTSLFLKFYLLTYLISFNFIIS

SEQ ID NO: 220938 - protein, 221 aa, Glycine max
  Clone ID: PAT_MRT3847_41537C.1.pep
MSISSLIFSNLHFQLPTTMASMASSSSFCNLKFITKPNNGRRSSLPRIVFCQKHHDSTPTDQINRRELILRSSEIATIGAILNFGGKKPDYLGVQKNPPALALCPATKNCVSTSENISDRTHYAPPWNYNPEGRKKPVNREEAMEELIDVIESTTPDKFSPRIVERKEDYIRVEYQSSILGFVDDVEFWLPPGKGSTVEYRSASRLGNFDFDVNRKRIKAL

SEQ ID NO: 220939 - protein, 55 aa, Glycine max
  Clone ID: PAT_MRT3847_41538C.1.pep
KGKGGFLKGKFLFKVLSTRPPLKFLSPFSPPKSAPPGSLCGPIIYEKKLLRGGYF

SEQ ID NO: 220940 - protein, 77 aa, Glycine max
  Clone ID: PAT_MRT3847_41539C.1.pep
MCDRSSPLLNTMELIAQQLSYYNGTDPAKPIYVAVNGRVYDVTTGKSIYSPSSSKAMFAGTDTGKTLEMMSKNDDDI

SEQ ID NO: 220941 - protein, 140 aa, Glycine max
  Clone ID: PAT_MRT3847_4153C.1.pep
MTCLCLTHSITQTHNHNHNLPHATTTFSSSLHNRNPLFQLFSVSNQFPLLSRALFQSIILRPRIRPFSTNLTASYSSSAFAQIMANFDADSVTYLTQRDAAEIDETLMGPLGFSVDQLMELDVLSVATSISEVYKPCEHS

SEQ ID NO: 220942 - protein, 113 aa, Glycine max
  Clone ID: PAT_MRT3847_41540C.1.pep
MLRFFGPPPNIAFCSTCYQFWRPPLLPPIFGSPLPPREAKRGPKDKPRPNLLGKRPPPLPPGEGPLPSVGKPQPSFLALRTPNPFSPPEPRFVFRPLVLPVLIGKVVIRVPNL

SEQ ID NO: 220943 - protein, 53 aa, Glycine max
  unsure (1)..(53): unsure at all Xaa locations
  Clone ID: PAT_MRT3847_41541C.1.pep
NTQNVLFKIACETXATGHSLTSLFPPFLLPSYFFSDQTLSTHINRFEQPVLKN

SEQ ID NO: 220944 - protein, 109 aa, Glycine max
  unsure (1)..(109): unsure at all Xaa locations
  Clone ID: PAT_MRT3847_41542C.1.pep
EAASPMASQLKSTFTKTLVAPKGLSTSSPLHLLPSKRQFSFTVKAIQSERPTYQVIQPINDNPFIKSLKTPVTSSPLITXYLSNLPTYRTTVSPLLRKNQINLTHNYLL

SEQ ID NO: 220945 - protein, 92 aa, Glycine max
  Clone ID: PAT_MRT3847_41543C.1.pep
VFFSELHIFQCADPEKQKSLDWTRRYKIVEGIARGIQYLHEDSRLKIIHRDLKASNVLLDGDMNPKISDFGMARIFGVDQTQANTNRIVGTY

SEQ ID NO: 220946 - protein, 136 aa, Glycine max
  Clone ID: PAT_MRT3847_41544C.1.pep
ALVDHEAGWMNTLAQPNATSLIYAVTRRHAHGVEEQTSTDPTQLEMTRYNGKNALHLAGRQGHVSGVKILLPKDQQLARRTGYKGQTALHMGVKGVSCEVENLILAADADIVMLSDKIVNTDLHVATMKKRTEIVH

SEQ ID NO: 220947 - protein, 79 aa, Glycine max
  unsure (1)..(79): unsure at all Xaa locations
  Clone ID: PAT_MRT3847_41545C.1.pep
VNHNHRDVLILPPSVEALIESICRDQIKPPLDYSTRHRLKLQGEEQSLRILNKIAATRIRLSFAGFVNHMLADIXHQHN

SEQ ID NO: 220948 - protein, 61 aa, Glycine max
  Clone ID: PAT_MRT3847_41546C.1.pep
RFKIMGAFYIRRFSRMMHISFQVFYYYHTLSIYFFSLPNYSLPHIFYNFFYQIIKINFFLF

SEQ ID NO: 220949 - protein, 46 aa, Glycine max
  Clone ID: PAT_MRT3847_41547C.1.pep
YYNIHLLHSVSMLPILETATFSIIIIKCEMHAPDKFPTPFVRVRPI

SEQ ID NO: 220950 - protein, 34 aa, Glycine max
  Clone ID: PAT_MRT3847_41548C.1.pep
KRRLRSEMRESQKQLTQLPERVTSRQHLAKLSCE

SEQ ID NO: 220951 - protein, 77 aa, Glycine max
  Clone ID: PAT_MRT3847_41549C.1.pep
TALSLRHTYSTSYHTSWIDLSPDQMLHLALKDIEKQDDITYFASSLADLHLHEQRIIATCHGLLATRHQTSACRAHR

SEQ ID NO: 220952 - protein, 80 aa, Glycine max
  Clone ID: PAT_MRT3847_4154C.1.pep
HLFTHLHTLPFSFFLLYLTLWFWVILHQTNLYSPLHIHTSVISHTTPTLPMNPITHTSINTILPLTYHFLLTCSSLHLPR

SEQ ID NO: 220953 - protein, 95 aa, Glycine max
  unsure (1)..(95): unsure at all Xaa locations
  Clone ID: PAT_MRT3847_41550C.1.pep
PLNPPIPLNLQWSRFLGPAHSWDXTLVIFCVLCYGFSSSLLAPGGKLQGSWSWCLLAALRWFLSSPFVPVGGLFSGGRVLALGNSLKRSAWLWAL

SEQ ID NO: 220954 - protein, 49 aa, Glycine max
  Clone ID: PAT_MRT3847_41551C.1.pep
HYSLNAFEFLPRKWMFAWLHLFWLYIDWCGNSSKVSNLTVENGPNFFLF

SEQ ID NO: 220955 - protein, 79 aa, Glycine max
  Clone ID: PAT_MRT3847_41552C.1.pep
DFTPENTHVELRGGNSDADPTPAWPDTTPSAPWPSLTNFGLSLSFMLFGAPLSSKMLGVLHDYSNDIDAAGEYSDNCGD

SEQ ID NO: 220956 - protein, 91 aa, Glycine max
  Clone ID: PAT_MRT3847_41553C.1.pep
LPYATDTTSTQPGFGDILLLQHSGGSTLATVNNDHINMEDNMDLDSHTANYTQTILYGQKHTPLKSNHTFGALATTRVSPSHFVTHHNIYP

SEQ ID NO: 220957 - protein, 67 aa, Glycine max
  Clone ID: PAT_MRT3847_41554C.1.pep
TGIEWPDRPTRACRRKHDREGMSRITFQDPFLWRNAYSPKFCLSLWRTTRKIIPILPPPLLLIYFWW

SEQ ID NO: 220958 - protein, 122 aa, Glycine max
  Clone ID: PAT_MRT3847_41555C.1.pep
LINCVSTFCFIVNQVDSRHSVVVPDSNIFYIIALLRFIPPPPKGPPTELLVEQNHEIIQLCYNRGFDFKLYLPHYQSQENWMRHYGDKWTRFVERKANFDPLAILAPGQKIFSRIPQTLSIT

SEQ ID NO: 220959 - protein, 194 aa, Glycine max
  unsure (1)..(194): unsure at all Xaa locations
  Clone ID: PAT_MRT3847_41556C.1.pep
ARASISGMEVSSLIIGNKTLLHFEVSCYKLRNNGKVQLAYNSSENSGKAAEMLFLLTFGEEYLHHGKLNAYEVALGGRLNNINIGDLKLFERMKLCDPVSIHSIEERASEDHISSNVSXLGWMEKAADDVINXDVDIXYVLHLGWXFGSHNLPXPGHVLIYGPSGSGKTILARTVAKSLENREDILAHIILFPA

SEQ ID NO: 220960 - protein, 187 aa, Glycine max
  unsure (1)..(187): unsure at all Xaa locations
  Clone ID: PAT_MRT3847_41557C.1.pep
RYGPQTANVTELEVVSGKGETLVCSESQNSELFFATLGGLGQFGIITRARVPVQQAPDMVRWIRVVYTEFGDFTRDAEWLVTLREGDGFDYVEGFVFVNSDDPCNGWTTVPVGPNQYFDPVRIPSTAGPXLYCLELALHYRNQDHPSAVDMEVDRLLGRLRFXEGLKFSVDVTYXEFLLRVKRVEGD

SEQ ID NO: 220961 - protein, 513 aa, Glycine max
  unsure (1)..(513): unsure at all Xaa locations
  Clone ID: PAT_MRT3847_41558C.1.pep
MIAYLEHFVHGNDTESMPNDDVSALDGAFHFGATAAAGKDFGGMKSVKPRAVIRPALAGDVERAVKEAARTTYLTVAARGNGHSINGQAMAEKGLVLDMRAMEDHFTLLSLDDGSLYVDVSGGALWEDVLKRCVSEFRLAPRSWTDYLGLTVGGTLSNAGVSGQAFRYGPQTANVTELEVVSGKGETLVCSESQNSELFFATLGGLGQFGIITRARVPVQQAPDMVRWIRVVYTEFGDFTRDAEWLVTLREGDGFDYVEGFVFVNSDDPCNGWTTVPVGPNQYFDPVRIPSTAGPVLYCLELALHYRNQDHPSAVDMEVDRLLGRLRFVEGLKFSVDVTYMEFLLRVKRVEEDAKANGIWDAPHPWLNMFVSKSNIAEFDREVFKKILKHGVGGPILVYPLLRSKWDSRHSVVVPDSNIFYIIALLRFIPPXPKGPPTELLVEQNHEIIQLCYNRGFDFKLYLPPYQSKENWMRHYGDKWSRFVERKANFDPLAILAPGQKIFSRIPQPLSIT

SEQ ID NO: 220962 - protein, 63 aa, Glycine max
  Clone ID: PAT_MRT3847_41559C.1.pep
SQLKLFEKSHCSHNPNHVILDMDLYPGFLNLGSKVNILSSFYLDILFHLKFISAPHRDITQVA

SEQ ID NO: 220963 - protein, 121 aa, Glycine max
  unsure (1)..(121): unsure at all Xaa locations
  Clone ID: PAT_MRT3847_4155C.1.pep
LTQLIFQGLLASTCLKPPMTPPTPPIAPTPPPTPPNPIPLXMPPPIPIPLXMPPPIPPPRPLPPPSPPTPPLPAPPPYPPPKPLSPPAPPPXPPPKPPPPDAWAPPIAPTPPQNNPNPIPL

SEQ ID NO: 220964 - protein, 298 aa, Glycine max
  Clone ID: PAT_MRT3847_41560C.1.pep
MAWTQVKYIRAPWAGQFLAQHPNCNSIYWSLGTMLSIFRQYTFDDSFSQVFVSAKFLKEYQIALTFASDYDDEGAPTNGVFRPTWDLSKVTPESIARFKDKNPNVDIKVFISIGNRGTQHPFKPLNNKTWIDNATESLTHLIKNEDYNLHVDGIDVLYEHIDASPGDFIECVGQLIRNLKEKGVVSEASISPSFALNEEYYPLLYSAVSFFVDWVDYQFQSELKPVFDPTTLVKRYNELTKLYPRRKLFAGYSAENEDWATLSPIVFFLGGMDILKKRKAPGVSIHYHNYYADAPNKD

SEQ ID NO: 220965 - protein, 355 aa, Glycine max
  unsure (1)..(355): unsure at all Xaa locations
  Clone ID: PAT_MRT3847_41561C.1.pep
LLYFMKLLQDLDVVCSYSLDPSLEAALLFVVKFQKSRPDLVARAHLQLLLVQDGKLYGRDPMFTMTTGAAGLPGVTENYDFQKNAFMVQLGQLSINLLKILXFAEASKTSNNKKICFKIYQHILAWVEEQTYWIAFRFLNLGFELELYSVHDYCMVYWYIYVVLIKLAEKKHLRMAMSSDSAKKKTKKKRDSFKDGEMDYQIPAAVLFLQSQIYLAEGLSMMFAALRNERRIVPLQSPFNTEHEIFIQQFELLQKACVPDHISYVTFKESTMHANFSTLAICDHFKEAQKIAKEVKSSFANDPDTMAELRRVEQVAERNSIALNVCRAGALDPKLKTFFTFCHHPFYATAIVKRS

SEQ ID NO: 220966 - protein, 61 aa, Glycine max
  unsure (1)..(61): unsure at all Xaa locations
  Clone ID: PAT_MRT3847_41562C.1.pep
FILILLFIFFLLFYIFFFFFFFFFFFFXNCMSKQDALDYCFAIFFTVKWCHRSPTFNHQSK

SEQ ID NO: 220967 - protein, 114 aa, Glycine max
  Clone ID: PAT_MRT3847_41563C.1.pep
NYMNYGIIFFCYFFIFLHHINHLPLDLIFLSLFVIQKIIHAQCIVYKYNIYIYIYIYIYIYIYIYIYIYIYIYLEHAGMHTQVNFVLVLFLFSFDLTEEKTARENRNEEESRCK

SEQ ID NO: 220968 - protein, 86 aa, Glycine max
  unsure (1)..(86): unsure at all Xaa locations
  Clone ID: PAT_MRT3847_41564C.1.pep
CLPTRMHSVMCTLDCVVXLCSAYVQANAFQWMCESSNPARLRAGSRWSQVATRYIEPSQSHLLSSSFSCFCFSTYHYPLLSSTPAV

SEQ ID NO: 220969 - protein, 195 aa, Glycine max
  Clone ID: PAT_MRT3847_41565C.1.pep
MENYSMLFPISNSSSYPISTSGVGSSQIGYNGQSSNAFLGLRPSNELLGSDDHDNGGEGGGDGDGNMLMSQISGGSNTNVSDELGGSGNSNNKKKGEKKVKKPRYAFQTRSQVDILDDGYRWRKYGQKAVKNNKFPRSYYRCTHQGCNVKKQVQRLTKDEGVVVTTYEGVHTHPIEKTTDNFEHILSQMKIYTPF

SEQ ID NO: 220970 - protein, 310 aa, Glycine max
  Clone ID: PAT_MRT3847_41566C.1.pep
ARGQESCAAMEFYHNLLKIRLLNEKDICVYQRADWLVDKLGTKVHSYFWLDEYSEKDDFARYWKNEWMSGLTSWRKALKIPDTDVIMEDGCAKVTDQDKAFVVWNTGSMLSICNCSWAQDGNLCEHILKVLSICRKRGSILPSVTLFQYHQALNNMLHCPPFDSFIRDHAVSLAVSVQKQLNTLLDKESDQTVMDPNEKRIIIDIPQEWFKVVSTNRDQDLVSKKRVINDILSEDDNGCEDRNNSNDAPGCASAMNDIADQEVVDHGIARNGKLFESAGEDSLPADMDVDPSSTCVNPPGLDPVDESRFR

SEQ ID NO: 220971 - protein, 51 aa, Glycine max
  Clone ID: PAT_MRT3847_41567C.1.pep
HASAHASDHASGFQVIYVNRFLPSSRKHASREINLSVFKALNNSEGSFVIT

SEQ ID NO: 220972 - protein, 66 aa, Glycine max
  Clone ID: PAT_MRT3847_41568C.1.pep
NAYNGKAEGIGNKLSVLMIERGEMLPPDQPRTLQMKDESLFRGKIARGKAALGTFGCPQKQWLRLK

SEQ ID NO: 220973 - protein, 78 aa, Glycine max
  Clone ID: PAT_MRT3847_41569C.1.pep
YAIFSGLFSYLLFFMASPVKIIQFFFLFTLHRLGTIITITWFITAKICPFLLSISIWAIIVNILTQSQSSAHASKNEK

SEQ ID NO: 220974 - protein, 257 aa, Glycine max
  Clone ID: PAT_MRT3847_4156C.1.pep
YLARKQNLSVTEAVIDTLSKAGYDKPGAPKVMIQSTNSSVLLKFKEKTKYELVYKIDEIVGDAVDSAILDIKRFAHSVVVKKASVYPVSKFFVTGSTKIVPKFKSSNLSVYVETFRNEFVSQAWDFMSDATVEINTFVQDAEIDGVITDFPKTANRYRRNRCLSLGDSKPPYMEPVRVGSLLLAMDKYSLPPALAPAPPLTEAKVTEPPLPPLSKTAPSSPIAGTGQGAQPPQNAQSKVTVCVFLSTLIVLVASLLL

SEQ ID NO: 220975 - protein, 55 aa, Glycine max
  Clone ID: PAT_MRT3847_41570C.1.pep
MGSANYLMEYCGLNVKISNSHLMTHEKGAICGLLRKTCPVGFRSGGGNILGVRNA

SEQ ID NO: 220976 - protein, 61 aa, Glycine max
  Clone ID: PAT_MRT3847_41571C.1.pep
MGIGTRSDGGLTIVCSFRPHNNAMAHHMNTPPRKTHAWDGYRRPTGYDALPTLNADWRACY

SEQ ID NO: 220977 - protein, 47 aa, Glycine max
  Clone ID: PAT_MRT3847_41572C.1.pep
NEFRGHNNRAITWQAREGKQGSYRRADLYGLYMYGVNAIELVSGGIG

SEQ ID NO: 220978 - protein, 54 aa, Glycine max
  Clone ID: PAT_MRT3847_41573C.1.pep
FTGLCTVSLMQIRSLLLIPYTQQNFRRRQLGIGAHEHPSSHWAEIACTHNSCCD

SEQ ID NO: 220979 - protein, 315 aa, Glycine max
  Clone ID: PAT_MRT3847_41574C.1.pep
MEVNTTTTTVPSGPPTRNHSYTQHRLHSERHSHNHSHGHFPSKTILIIIAFVTLVTVLFIIFVVLFLIRRQKSSSKNGTCEEDSRELPDTSSRLITSTTLNSSPNVKSGCLHGGNLSRTPAPKFRGVQVFTYRELEIATDGFSEANVIGSNGIIGGHGLIYRGVLSDGTFAAIKLLPAQGWQGERAFSAQVDLLSRLHSPHLVELLGYCADQHHRLLIFEYMPNGTLHYHLHTPNDQYQLLDWWARMRIALDCARALEFLHEHAVSPVIHRDFKSNNVLLDQNFRAKVSDFGLAKMGSEKRNGRVLGTTGYLAPE

SEQ ID NO: 220980 - protein, 98 aa, Glycine max
  Clone ID: PAT_MRT3847_41575C.1.pep
FATWEEKVQRFQTKDQLLSNFQTQGQFPDQASERDLSAVTSILNCMTIVTVTGTMMYYSFASFWFKLYVSLVCAYLVPATYFNTRPQPILSFLKMRAR

SEQ ID NO: 220981 - protein, 452 aa, Glycine max
  unsure (1)..(452): unsure at all Xaa locations
  Clone ID: PAT_MRT3847_41576C.1.pep
PGSTHASGNGGSGGACGGKGEKTAWGGSNLGKDFPSPKEICKGLDKFVIGQQRANKVLSVAVYNHYKRIYHATLHKGSAADSXASKVLDDDDNVELEKSNVLLMGPTVSGKTLLPKTLALFXNVPLDIAYATTLTHAGLVGEDVESILYKLLVAADFNVAAAQQGIIYIDEVDKITKKAESLNISRDVSGEGVQQALLKMLEGTIVNVPEKGARKNPRGDNIQMDTKNILFICGGAFIDLEKTISERRQDSSIGFGAPVRANMRAVGITDSAVTSSLLESVESADLIAYGLIPEFIGRFPILVSLSALTEDQLTMVLTEPKNALGKQYKKLFSMNNVKLHFTENALRLIAKKAMAKNTGARGLRALLESILTEAMFEIPDIKTGSDRVDAVVIDEESVGSLTAPGCGGKILHGDGALKQYLAKMKDSAVNVDVGESDLQEGDLELSSRAISL

SEQ ID NO: 220982 - protein, 80 aa, Glycine max
  unsure (1)..(80): unsure at all Xaa locations
  Clone ID: PAT_MRT3847_41577C.1.pep
LAVSPSRVVLRGFPPSLSFPPRPCGRSFPSCCFVRPRVWARACSXSXXRSRCVLCPPPLCSVPRLCFCRSSLRIPVLLLP

SEQ ID NO: 220983 - protein, 146 aa, Glycine max
  unsure (1)..(146): unsure at all Xaa locations
  Clone ID: PAT_MRT3847_41578C.1.pep
MLPEGRPGVAYNLNQPQEKDKLEGNFSFDXKSRSRLEKVXSTKAQFVSAKTFTNDIIGAGSHSXEELPEKEDQEKPKKIDARLRQIIYPQYNEVXAQMETNLFKLSIEDAETPKGSLMLLKIXQAKRALSKNTLGGTILRSDLLAN

SEQ ID NO: 220984 - protein, 50 aa, Glycine max
  Clone ID: PAT_MRT3847_41579C.1.pep
VFCLEEGNNTNVYIFTTMTHYRYNSSTITPRPGRVLDFIVRLFGSKFREN

SEQ ID NO: 220985 - protein, 121 aa, Glycine max
  Clone ID: PAT_MRT3847_4157C.1.pep
GEAHQWKCVLTMAGIRIFEDVSDHKNGKGVLAESVGVIDATADTVFEVILSTEQQKRYEWDTLMCDLELIDSYDGHYDVVYGTYDSKYLSRWHSKQDFVFSRQWFRGQDGTYTILQFPAIH

SEQ ID NO: 220986 - protein, 86 aa, Glycine max
  unsure (1)..(86): unsure at all Xaa locations
  Clone ID: PAT_MRT3847_41580C.1.pep
KWYGPDTRILLPEGLSDRSDIPXYLTGEFPGDYGYDPFGLSKKPNYFSRYHALELIHARWAMLGAAGFIIPEAFTDIDTLLPEAAW

SEQ ID NO: 220987 - protein, 46 aa, Glycine max
  Clone ID: PAT_MRT3847_41581C.1.pep
DKFFSFFIQLFFNNFYRTSIIEFSQFNHKYLFINDCFSFSLFPSLF

SEQ ID NO: 220988 - protein, 105 aa, Glycine max
  Clone ID: PAT_MRT3847_41582C.1.pep
ASEKKLSNPMREIKVQNLSLNISDGKSGDRITKAANVLEQLNGQTPVFAKARCTGRSFGIRRNEKIACYGTDRSDKAIQLLESGFKVNEYELLSKNSTDTGCFGF

SEQ ID NO: 220989 - protein, 71 aa, Glycine max
  unsure (1)..(71): unsure at all Xaa locations
  Clone ID: PAT_MRT3847_41583C.1.pep
MKLNLDGLYNSVRLVVSASDDYEAFKRDVDXKGLDVIEAGYXYGRRIGSKKMGSESMXPLMIASLIGSANV

SEQ ID NO: 220990 - protein, 200 aa, Glycine max
  Clone ID: PAT_MRT3847_41584C.1.pep
METLCQASKVDHDRPITKFRLNSKVKYNCFSLPEQNLGLRFQKDATKKMSMVVYASIPPGNLPSADSFPGSWKAWMIGTVVAALLSFTTNKWGPLLLLKEKIETTIEQAERVADIVEEVAERVDKIAEGAAKNLPEGKLQDVAEFVENVAENVDKLAEEAGDLLEKVEDKQEEVVSFFESTVRQQKSNDGTTATDSKDKK

SEQ ID NO: 220991 - protein, 124 aa, Glycine max
  unsure (1)..(124): unsure at all Xaa locations
  Clone ID: PAT_MRT3847_41585C.1.pep
QGRGEGRRQXHQQGEERRPQXXTKXKTKAKRNKNXRRQRQRKETKQQNHGRAEERGRXEEXKARXKEEQKNXGHRAARRTAERRPEXKEAHRQXEGRXXHXXASKXQKGERARKGERAEGEPKQ

SEQ ID NO: 220992 - protein, 190 aa, Glycine max
  unsure (1)..(190): unsure at all Xaa locations
  Clone ID: PAT_MRT3847_41586C.1.pep
MINIKSIXIATGGRIVPRFQELSPEKLGKAGMVREKSFGTTKDRMLYIEHCANSRAVTIFIRGGNKMIIEETKRSLHDALCVARNLIRNNSIVYGGGSAEISCSIAGKAAADRYPGVEQYAIRAFGNALEAIPMALAENSGLQPIETLSAVKSQQNVFETLIGKQQQLLLATQVVKMILKIDDVISPYEY

SEQ ID NO: 220993 - protein, 93 aa, Glycine max
  Clone ID: PAT_MRT3847_41587C.1.pep
ANVLKANYWPLIFFKSDQSSSYDDDEYSKPCCDLCMCTRSIPPQCSCENIRLNSFHSYCKSCMCTPLHPGQCFCFYTNDFFYKPCKFLYYYKN

SEQ ID NO: 220994 - protein, 517 aa, Glycine max
  unsure (1)..(517): unsure at all Xaa locations
  Clone ID: PAT_MRT3847_41588C.1.pep
MALAFDEFGRPFIILKEQEQKSRLRGLDAQKANISAGKAVARILRTSLGPKGMDKMLQSPDGDVTITNDGATILDQMDVDNQIAKLMVELSRSQDYEIGDGTTGVVVMAGALLEKAERLLERGIHPIRIAEGYEMASRIAVEHLERVANKFEFDESNLEPLIQTCMTTLSSKIVNRCKRSLAEIAVKAVLAVADLARKDVNLDLIKVEGKVGGKLEDTELIYGIDXDKDMSHPQMPKQNKDAKIAILTCPNDETXPKTNNSVXDDMVRRSKKLGATLVICQWGFDDEANNLLMHRNLPAVRWVGGVELELIAIATGGRIVPRFQELSPEKLGKAGMVREKSFGTTKDRMLYIEHCANSRAVTIFIRGGNKMIIEETKRSLHDALCVARNLIRNNSIVYGGGSAEISCSIAGEAAADRYPGVEQYAIRAFGDALEAIPMALAENSGLQPIETLSAVKSQQIKDNNPHFGIDCNDVGTNDMREQNVFETLIGKQQQLLLATQVVKMILKIDDVISPYEY

SEQ ID NO: 220995 - protein, 301 aa, Glycine max
  Clone ID: PAT_MRT3847_41589C.1.pep
MGDEKKGKPAASGVWSTIKPFVNGGASGMLATCVIQPIDMIKVRIQLGQGSAAQVTSTMLKNEGFAAFYKGLSAGLLRQATYTTARLGSFKILTAKAIEANDGKPLPLYQKALCGLTAGAIGATVGSPADLALIRMQADATLPAAQRRNYTNAFHALYRITADEGVLALWKGAGPTVVRAMALNMGMLASYDQSVEFFRDSVGLGEAATVLGASSVSGFFAAACSLPFDYVKTQIQKMQPDADGKYPYTGSVDCAVKTFKAGGPFKFYTGFPVYCVRIAPHVMMTWIFLNQVQKLQKSYGL

SEQ ID NO: 220996 - protein, 46 aa, Glycine max
  Clone ID: PAT_MRT3847_4158C.1.pep
RGGVSFVWVPRKKKNRPWNSLKQPGRLFFNKGFFLFWKGKGNCQYS

SEQ ID NO: 220997 - protein, 73 aa, Glycine max
  Clone ID: PAT_MRT3847_41590C.1.pep
KKKIFLPPKTSPFKKKNPLFALVGGGGVLILYNNQSLSLLKFLKLSSLSSSPFPLFEFSMPFSIHYLLIRFYV

SEQ ID NO: 220998 - protein, 301 aa, Glycine max
  Clone ID: PAT_MRT3847_41591C.1.pep
MGDENKTKSPASGVWSTIKPFVNGGASGMLATCVIQPIDMIKVRIQLGQGSAAQVTSTMLKNEGVAAFYKGLSAGLLRQATYTTARLGSFKILTAKAIEANDGKPLPLYQKALCGLTAGAIGASVGSPADLALIRMQADATLPAAQRRNYTNAFHALYRITADEGVLALWKGAGPTVVRAMALNMGMLASYDQSVEFFRDSVGLGEGATVLGASSVSGFFAAACSLPFDYVKTQIQKMQPDADGKYPYTGSVDCAVKTFKAGGPFKFYTGFPVYCVRIAPHVMMTWIFLNQIQKLQKSYGL

SEQ ID NO: 220999 - protein, 188 aa, Glycine max
  unsure (1)..(188): unsure at all Xaa locations
  Clone ID: PAT_MRT3847_41592C.1.pep
FILLDLAFSDLNICVDCIKEKHTMKRATRSTQLLEIMHTDICRPFDVNSFGKERYFITFIDDYSHYGYVYLLHEKFQAVDVLEIHLNEVERQLDRKVKVVRSDRGGEXYKRYDKIEXHPSPVAKLLXKYDICAQYTISGTQQXNYVSERHNRTLMDMXRSMLSNSTLPXSLWMYALKIVMHLLNRVPS

SEQ ID NO: 221000 - protein, 61 aa, Glycine max
  Clone ID: PAT_MRT3847_41593C.1.pep
ILYILKFYNLHPPLYSQRTLFTCIKIILTSLIILSNIINLQIILLIPTFMHFFHNNSFTLL

SEQ ID NO: 221001 - protein, 66 aa, Glycine max
  Clone ID: PAT_MRT3847_41594C.1.pep
NTNPQTWRYNVKGIYNIVIRRITRKLFTFLHPNHTRVKTPIAEISGAKDEEEPLSFFETFFLILAF

SEQ ID NO: 221002 - protein, 59 aa, Glycine max
  unsure (1)..(59): unsure at all Xaa locations
  Clone ID: PAT_MRT3847_41595C.1.pep
EXSXAVNSESTQVVQVKSVMRQTEQDDSTTIPSSTPGHVSQNXDPRTTXQRSNTXEPKT

SEQ ID NO: 221003 - protein, 110 aa, Glycine max
  Clone ID: PAT_MRT3847_41596C.1.pep
LSATRVFLVLCHTMKEENPSENRSKASKFSDQNQAPKPQNTKGANLNNNNKTRLWGAHIVKGFSADKKTKSFASKKLTSSTTTTAISENVVTNQNNSNKPFVPSSHSRVK

SEQ ID NO: 221004 - protein, 62 aa, Glycine max
  Clone ID: PAT_MRT3847_41597C.1.pep
DFAVNQNLFFEKFVFAMLKMGQLNVLTGKQGEIRANCSVRNANNKSLLTSVVEDVVETLIEM

SEQ ID NO: 221005 - protein, 156 aa, Glycine max
  Clone ID: PAT_MRT3847_41598C.1.pep
GVASAPFGNYWRVLRKMCTIELLSQKRVDSFQPIREEELTTLIKMFDSQKGSPINLTQVVLSSIYSIISRAAFGKKCKGQEEFISLVKEGLTILGDFFPSSRWLLLVTDLRPQLDRLHAQVDQILENIIIEHKEAKSKVREGQDEEKEDLVDILLK

SEQ ID NO: 221006 - protein, 143 aa, Glycine max
  Clone ID: PAT_MRT3847_41599C.1.pep
RFYGMLMETMDYEERDDFADKDFAIEQMHILMGGLKDLSTQAKDELESNGSALQDNNKNSTLTWLLDTIKKIDNGEAEPQSFYHKDLALIELKDKVKPPMDAAEEASTSGHQLQEMMREIFYDGITDGLLEAQNIFSSLDIGK

SEQ ID NO: 221007 - protein, 137 aa, Glycine max
  unsure (1)..(137): unsure at all Xaa locations
  Clone ID: PAT_MRT3847_4159C.1.pep
AEAHQWKCVLTMAFFRTFEDVCDHKNGKGVPAKSVGVIDATADTVFEVILSTEQQIRYEWDTLMCDLELIDSYDGHYDCDHGTYDAXDLSRWHSKQDFAFSRQWFRXHDGTYTILQFPAIHNTKPXRSGYRRAKDKP

SEQ ID NO: 221008 - protein, 223 aa, Glycine max
  Clone ID: PAT_MRT3847_415C.1.pep
MAFYNEEEKTEDYLFKIVLIGDSAVGKSNLLARFARDEFYPNSKSTIGVEFQTQKMDINGKEVKAQIWDTAGQERFRAVTSAYYRGAVGALLVYDISRRQTFDSIGRWLNELHTHSDMNVVTILVGNKSDLKDAREVATAEGKALAEAQGLFFMETSALDSSNVAAAFETVVKEIYNILSRKVMISQELNKQDVTRIENGKTVVLQGEGDVEAAQSKKGCCSS

SEQ ID NO: 221009 - protein, 43 aa, Glycine max
  Clone ID: PAT_MRT3847_41600C.1.pep
FRVILITSPNTNLKTLKSHFVLWRSLFGGQVCGLGPGVVFDRV

SEQ ID NO: 221010 - protein, 97 aa, Glycine max
  Clone ID: PAT_MRT3847_41601C.1.pep
QDLTPYRPYTYSARLFASVRGSYPCPVVLPPYLLSSGQYYMYPPPLFPDHVHYTHYSDQLDNPYYYHSHQGTPSTYVEHIPSQFQHHIHHECIPPTT

SEQ ID NO: 221011 - protein, 172 aa, Glycine max
  unsure (1)..(172): unsure at all Xaa locations
  Clone ID: PAT_MRT3847_41602C.1.pep
DLVYVVDDDMIPGRKMLQILAHVAGTDKYKNSVLGSIGRILPFRQKDFTFPSYRKFRSKEAGLYLPYPAYDITVDKIVQVDFLSSSWFLSADLVKTLFTETPFTFSTXYQLQKYKNAGSFVLPVDPKDKETWGDSEHRLAYVSETTVIVELLDDTCENNPILPCDPYQRALP

SEQ ID NO: 221012 - protein, 55 aa, Glycine max
  Clone ID: PAT_MRT3847_41603C.1.pep
EKEDIFCFQGVYLILFLKNKVFQIVEVVPIIFHIPGVCFSRRLMPSYLSKKKNKI

SEQ ID NO: 221013 - protein, 155 aa, Glycine max
  Clone ID: PAT_MRT3847_41604C.1.pep
MACRQLWASRAASYLRISVFHRSFSNVLNDLKYADSHEWVKVDGNSATVGITDHAQDHLGEVVYVELPEVGATVTQGEGFGAAESVKATSDINSPVSGKVVEVNEKLTSSPALVNTSPYKDGWIIKVEMSDSGELNNLMDSEKYSKFCEEEDSNH

SEQ ID NO: 221014 - protein, 47 aa, Glycine max
  Clone ID: PAT_MRT3847_41605C.1.pep
GWVLKSRCVGLHFFRYLKIGFLSNRHNQQINFRLNLHFAIMNRMNAI

SEQ ID NO: 221015 - protein, 71 aa, Glycine max
  Clone ID: PAT_MRT3847_41606C.1.pep
FQGVLILVPLLIVLTPSSMRFFVLAQEPAMVMESSCAVNSASVVSMIGLDLASISIVGDSGSDTMHYMLES

SEQ ID NO: 221016 - protein, 57 aa, Glycine max
  Clone ID: PAT_MRT3847_41607C.1.pep
QMTRAFITALLYYIRDGHHCCWQYTADRRAYGLLGTLTVATMSHEVVNAVHQRYRGN

SEQ ID NO: 221017 - protein, 70 aa, Glycine max
  Clone ID: PAT_MRT3847_41608C.1.pep
YEQNRGGGGFSIYPNILYHPLQDADYPIFSLNTKPISLLHSNLPFKTLLLINLTFLGSNILNRALSYICV

SEQ ID NO: 221018 - protein, 70 aa, Glycine max
  Clone ID: PAT_MRT3847_41609C.1.pep
TGKVFIFNPLLWGQTPNMKKTKQTQIKHLKPKVQTQLTPPTTGGSKFNSHPRFKVLQLDPTRKGLGHRGT

SEQ ID NO: 221019 - protein, 84 aa, Glycine max
  unsure (1)..(84): unsure at all Xaa locations
  Clone ID: PAT_MRT3847_4160C.1.pep
QRPPLPIVQFALVLFSPNTLFLPLLFQPLSHSSHPLTPHHDSLHFWSRRPSLSHSHHPQLXPPQTTSRRPGRSLGXARSSNPEP

SEQ ID NO: 221020 - protein, 58 aa, Glycine max
  Clone ID: PAT_MRT3847_41610C.1.pep
YKDLYLCHRAHIKIKQVVGSKDSRTATARQQNITGKRVEKKNNSCEKLAHQIQLGSEQ

SEQ ID NO: 221021 - protein, 113 aa, Glycine max
  Clone ID: PAT_MRT3847_41611C.1.pep
TRHKKVRLKQTLIATIGQLSRISGPFLLDLTGALTSDAHVLLNNLILTPDANIDIHHLHVGIILPHLSGTMNHANVGRAQVHRAIGPAARQCPNPQNPKTVHIHPSWRPHWTL

SEQ ID NO: 221022 - protein, 51 aa, Glycine max
  Clone ID: PAT_MRT3847_41612C.1.pep
LSYHWHRYFRLLISGHQREFHSKSPLQLILPPPRLSIITADWIRERFMHTH

SEQ ID NO: 221023 - protein, 92 aa, Glycine max
  Clone ID: PAT_MRT3847_41613C.1.pep
MGSSRLSFILVLVLVTFSSMIIDSRVAEARTLPKSALLPSKVDIPTAVPLPALVPLPPLANLPVTLPPVPELPAVPKVPIPEVIVNNAKIIP

SEQ ID NO: 221024 - protein, 188 aa, Glycine max
  unsure (1)..(188): unsure at all Xaa locations
  Clone ID: PAT_MRT3847_41614C.1.pep
MTTKDPKSVYDFVVKDAKGDDVDLSFYKGKVLLIVNVASQCGLTNSNYTELNQLYDKYKDQGLEILAFPCNQFGKQEPESNDKIVDFVCSRFKSEFPIFDKIEVNGDNSAPLYFLSKLGKLCFFGQNLEVXGKWGIFCDDIQWNFSKXVVDKNGQVVGRYYPTTSPLSLERDIHSFWEFPEGKKIISS

SEQ ID NO: 221025 - protein, 133 aa, Glycine max
  unsure (1)..(133): unsure at all Xaa locations
  Clone ID: PAT_MRT3847_41615C.1.pep
DSGLTNSNYTELNQLYDKYNXGLEILAFPCNQFGKQEPESNDKIVDFVCSGFKSEFPIFHKXNGDNSAPLYKFLKSGEXGIFGDDIQWNFSKFVVDKNGQVVGRYYPTTSPLSLERDIHSFWEFPEGGKIISS

SEQ ID NO: 221026 - protein, 186 aa, Glycine max
  Clone ID: PAT_MRT3847_41616C.1.pep
VTGIQNHSENQNEDGSEILNSTTARGAESWTESEIARLQQLRAEMETRYMQSGCSEEVMWEEIATKMACFGYERSAVVFKEKWESISNYARSVKDGSKKRKEDSRSCFYFDNSDQSSLYNQGGAYCDINDQRHKTGRLQTNDGSSPSNSNVGNTVALDNCFPFLMTESGNLWENYSLKVNKASQNQ

SEQ ID NO: 221027 - protein, 83 aa, Glycine max
  unsure (1)..(83): unsure at all Xaa locations
  Clone ID: PAT_MRT3847_41617C.1.pep
EIFGNDIQWTFPRFVVDKNXQVLGRYYPPTSPFSLEVKTILSMKLLHMLYAASINVSNSLGILFLLYCSETSIASGNFLKAKR

SEQ ID NO: 221028 - protein, 199 aa, Glycine max
  Clone ID: PAT_MRT3847_41618C.1.pep
MNTVGERMTKRETSENDEEESLLKNENSGTDDDSKINYRGWKVMPFIIGNEIFEKLGAIGTLSNLLADLTTVFNLENITATNIINIFNGSTNFATLLGAFLSDAFFGRYKILAFCTVASFVGLFAIQLTAAIEKLHPPHCEESTICQGPTEGQMTFLKTGLSLLMVGAAGIRPCNLAFGADQFNPNTDSGKKAITSFFN

SEQ ID NO: 221029 - protein, 422 aa, Glycine max
  unsure (1)..(422): unsure at all Xaa locations
  Clone ID: PAT_MRT3847_41619C.1.pep
SSRIGSRSGKKCREKFENLYKYYKKTKEGKAGRQDGKHYRFFRQLEALYGENSNQASVPETNFGSGSLRFHTSSRANXPRETNQEMFQSQKHCDSLSLTNFTDLDTSSSDDNDQNSTGRELNKDNDSMEKRRKRVSGRSWKVKIKDFIDSQMRKLVEKQEEWLDKLTKTLEQKEKERVLREEEWRRQESVRLEREHKFWAKERAWIEARDAALMEALHKLTRNEIMKSTHSHEGLMVTGIQNHSENQNEDGSEILNSTTARGAESWTESEIARLQQLRAEMETRYMQSGCSEEVMWEEIATKMACFGYERSAVVFKEKWESISNYARSVKDGSKKRKEDSRSCFYFDNSDQSSLYNQGGAYCDINDQRHKTGRLQTNDGSSPSNSNVGNAVAGDNCFPFLMTESGNLWENYSLKVNKACQNQ

SEQ ID NO: 221030 - protein, 79 aa, Glycine max
  Clone ID: PAT_MRT3847_4161C.1.pep
MRLFLLGQKHQMLTLNSELPCGFRQGLERNQTCFQQCVGSATNRKSQARHLHHSFLVAGQRLEDLRHCSGKLAQDGRWV

SEQ ID NO: 221031 - protein, 71 aa, Glycine max
  Clone ID: PAT_MRT3847_41620C.1.pep
SCSILTCMFSSWSQVSSWAVDCSKHHDHQGSKIRIRLCCQGWSSYLLSLISVSALSEFIYLDELGLLLSYF

SEQ ID NO: 221032 - protein, 61 aa, Glycine max
  Clone ID: PAT_MRT3847_41621C.1.pep
RDKIFIKKKGLALFRGNFKRIHKRKNWKPLRNGVRIKFGVGKFFKGGGPFFEINLGVNEVI

SEQ ID NO: 221033 - protein, 82 aa, Glycine max
  Clone ID: PAT_MRT3847_41622C.1.pep
EKLQLEGYAIFPLAFFPIQKSSHNIPRHSESNFVHKAKDEVFWMSTTVCGKSDVVFQFLRIKAWMCWNEQDHSPKDHGLALH

SEQ ID NO: 221034 - protein, 64 aa, Glycine max
  Clone ID: PAT_MRT3847_41623C.1.pep
EGVAVGRRFTAFKNYKADGNYEMMALGFMNVVGSFTSCYVTTCAFSRAALNNNARAKTAASKVV

SEQ ID NO: 221035 - protein, 47 aa, Glycine max
  Clone ID: PAT_MRT3847_41624C.1.pep
TSSLSDPSHPAFFHRTPLTTQTLPFHALKEGEQPTEKRCRIFQGSEE

SEQ ID NO: 221036 - protein, 74 aa, Glycine max
  Clone ID: PAT_MRT3847_41625C.1.pep
QALASMTMIGHHACNICNTHRLLNNIDHHALPAFCEHDDDEQELVFPLLLLTLLKPITYRSTRFYVGDKQYSCS

SEQ ID NO: 221037 - protein, 46 aa, Glycine max
  Clone ID: PAT_MRT3847_41626C.1.pep
GGNSPSNNSEFIFIFPSTSQGWSYSIKWSHHIRWILNVFLMSMRAM

SEQ ID NO: 221038 - protein, 100 aa, Glycine max
  unsure (1)..(100): unsure at all Xaa locations
  Clone ID: PAT_MRT3847_41627C.1.pep
QRSSEXLASSFLIHNXSSLXLFYXQXXNVSFRTFGSPXXPTLXLLXSTXLXNNGXELFLXXQXGKXXLXSQDXXXXRVDXVXIXXQSXKXRNVCXIXIXN

SEQ ID NO: 221039 - protein, 181 aa, Glycine max
  Clone ID: PAT_MRT3847_41628C.1.pep
PFLEKIAKKDLEVLFWGDPLNEVAFQILNSSKEKNFVDFTKENLDLGDKIEEKEKELNQDFGQPCDWIKKKLENKVPSVQISNRLTSSPWVLGSGKLGWPANLERLLKAQSLGDPSSLKFIRTKRVFEITLDLLIFRTWIDPFKPIPNNKNPLERLDLCVNPALVSQGFTPDNPPHLEGRI

SEQ ID NO: 221040 - protein, 82 aa, Glycine max
  Clone ID: PAT_MRT3847_41629C.1.pep
ITAFMDKSKHNLEYRFFLDYDQQHWVLAKVVHCALLCINATSNALLGPFSFLPTLMIEFNCLLVFNSRKMFHPFLDFPNFTW

SEQ ID NO: 221041 - protein, 56 aa, Glycine max
  Clone ID: PAT_MRT3847_4162C.1.pep
HNTTHRLSLSRTLLSHLVSFVLFMLCCFLSFPLNDFCTTCPIIYNNYSITIKYLSL

SEQ ID NO: 221042 - protein, 69 aa, Glycine max
  Clone ID: PAT_MRT3847_41630C.1.pep
QVLHSNYINPTFRTLILQSVRCNNNFSFVTLTHSPARCLRCPEHTLFCFRYPSARMIRLAPCSAPCSMS

SEQ ID NO: 221043 - protein, 45 aa, Glycine max
  Clone ID: PAT_MRT3847_41631C.1.pep
RTPSPFESLESHIDSRTTTRNSWAFVDNNFHIFLKLPNLRICILM

SEQ ID NO: 221044 - protein, 63 aa, Glycine max
  unsure (1)..(63): unsure at all Xaa locations
  Clone ID: PAT_MRT3847_41632C.1.pep
LFRTAFKTFGFSLDDPNPFGNRIHRMLKLGLSIYXNAGEANANMPPLXDADANAEGSQMEEVD

SEQ ID NO: 221045 - protein, 30 aa, Glycine max
  Clone ID: PAT_MRT3847_41633C.1.pep
IFIFNFWNCRLEYVHICSNHDSQLRVRSLP

SEQ ID NO: 221046 - protein, 85 aa, Glycine max
  unsure (1)..(85): unsure at all Xaa locations
  Clone ID: PAT_MRT3847_41634C.1.pep
YFIETRTSSFYLVLFSSLLEEDFCFISFFPSSPLQIHITXYVAQLVHTVREKEFDSFFWFSQPLFSGEPHERSCVIENRAFLLFL

SEQ ID NO: 221047 - protein, 78 aa, Glycine max
  Clone ID: PAT_MRT3847_41635C.1.pep
LKSPLPLASSLHKKVKKKTLEKVKRVIHPSNQEGPKKLGPHLLTREIKIKMKEQFKTCPFLDLNSLAFKITKKTYPFT

SEQ ID NO: 221048 - protein, 76 aa, Glycine max
  unsure (1)..(76): unsure at all Xaa locations
  Clone ID: PAT_MRT3847_41636C.1.pep
GGSAXRRXRXVEEQVVHFRXXLYQEAVYMSSSKMKLEQSARVNNASPNSSPKLGKLKSLSQTMDDAATSETRPTTT

SEQ ID NO: 221049 - protein, 258 aa, Glycine max
  unsure (1)..(258): unsure at all Xaa locations
  Clone ID: PAT_MRT3847_41637C.1.pep
GLGIKDIHTFNMAFLXKWMWNFMYQQGALWVAVLEAKYGGWRGLVGEGNSSCQSIWWRDLIKVMHMPYNGKTLYQQIKWKVEAGDKVRFWEDRWISHDQSLAEKYPRLYVNSNHQYQLVGSLGQHSNLGWNWNFSWRCQLFDREIESAISFLSEVEGISINSQGSDTWVWTAEASGIFSTRSAYSSFWEEVAVDNLHDCFKDLWKIKIPSKFLMFAWRLLWDRLPTKANLRARQVQISDLTCPFCRSTLEDPRVKSSN

SEQ ID NO: 221050 - protein, 60 aa, Glycine max
  Clone ID: PAT_MRT3847_41638C.1.pep
PFRVKKLRSRGPMVISAQLNDIFSSRHMHALEREVRLGDMIQMRALCSLMSPRPYQGSIL

SEQ ID NO: 221051 - protein, 83 aa, Glycine max
  unsure (1)..(83): unsure at all Xaa locations
  Clone ID: PAT_MRT3847_41639C.1.pep
LTLVLFEGAXGPDDDXNXWXPWLKPLXKXSXFVQXKXXADSHKSEXXMXCLDCMNGPICXXCLAHHMDHRQSMFVTSHHSVAQ

SEQ ID NO: 221052 - protein, 115 aa, Glycine max
  Clone ID: PAT_MRT3847_4163C.1.pep
FAPWGGRLFKPASPSGPFFAQFCQCSWGQHMGPMGFPPDPPRPTRSSQRQWKAIGWLSVVSATLSHFFMSRFPKCLRRHSVFSSPLPPQFWEVLLVLNDNYFFFSFFVHFNKNPP

SEQ ID NO: 221053 - protein, 32 aa, Glycine max
  Clone ID: PAT_MRT3847_41640C.1.pep
GSGFRGSKEYWIGKIDMQLKLVPGDCDGTETA

SEQ ID NO: 221054 - protein, 164 aa, Glycine max
  unsure (1)..(164): unsure at all Xaa locations
  Clone ID: PAT_MRT3847_41641C.1.pep
HSTPITTSSSFATALGWIPNPLFFLRYVNDDQDIRKYFAAFHLCDALPAAVLIDDFGDFFDDKRMXVINWLHFISKFCGSQKGSCKVLLSDTHTHQRDSPRFHFIYKKWIQTTFTIKEGDVPGSFIVKDRSHSPTDHTTTIKAAKYSIALQYLVFHGIVEDQLQ

SEQ ID NO: 221055 - protein, 131 aa, Glycine max
  Clone ID: PAT_MRT3847_41642C.1.pep
QISGSTTRCLAKSKQSKIAKPKKIKSQTQRCLQSVLKKRPFRRRLQIRHQSFLYLALLPPQMGHRPHHRLPFTKSEISSRTTTSPPPLSASQPLPWHGASRGALAFCILFHQKWVCATMLMVKMVRLCLQT

SEQ ID NO: 221056 - protein, 250 aa, Glycine max
  Clone ID: PAT_MRT3847_41643C.1.pep
MILEEMFFCSSSSSSQQLQPFENPSSNLLLLSGPPSSGKTSLLFQFAFNVALHSDSNNKVIFICNRHRLDSKPPFLSQGIDPSSHVFHRIQMKYVNDDEDIRKYFAAFHLYDTLPAAVLIDDFGDFFDNKICQQRYSNPRGRDMAMVKTLALCHNAITFANQKGSCKVLLSDTHTHQRDSPRFHFIYKKWIQTTFTIKEGDVSGSFILKDRSHSPTDHTATIKAAAKYSIALQYLVFHGLVERDQLYIQN

SEQ ID NO: 221057 - protein, 160 aa, Glycine max
  Clone ID: PAT_MRT3847_41644C.1.pep
MEFRNFDPRYTGELLKHMDSQNEVLMEAYRSMFHELRKLQVEEEMLMRKMHEVMSAHGPTKSVDEEESVAPEAVLATREGERNGKTISEAQLVEEATWEASETETETIKEKFPSLCFEENAEIREGDIDGNPVPMVLGQTTSEKALKVYTKRPKAKVPKS

SEQ ID NO: 221058 - protein, 72 aa, Glycine max
  Clone ID: PAT_MRT3847_41645C.1.pep
PLSTVLCFGKTLVHLRFYSFIIAFLIPLCTFIVFISFCPFLVFVRGKEPPPKEPPPPLFCAPLYISFLILIA

SEQ ID NO: 221059 - protein, 107 aa, Glycine max
  unsure (1)..(107): unsure at all Xaa locations
  Clone ID: PAT_MRT3847_41646C.1.pep
TXTXSTXXTXNXLQXQTYXPSLHXXXXLTXPNXIXHTLXPXXITHXXXXLLXXLXPSXSPLXXSXNPXXXYQLPSXXXXXXXXXXXXINXIIXFNLXXNSXXTXAXS

SEQ ID NO: 221060 - protein, 43 aa, Glycine max
  Clone ID: PAT_MRT3847_41647C.1.pep
FHSTSIQSQLSLISRYLNSNSRHCWPHGTVMHGRKSITESKIA

SEQ ID NO: 221061 - protein, 83 aa, Glycine max
  Clone ID: PAT_MRT3847_41648C.1.pep
LKYCFCRYMMNSVITVLYFNGRVYEDNDGVIFEGSKKPIQIKLGISFNALKKKIGDKVKLKNYNIIPELQTMKKGLMRDRRFW

SEQ ID NO: 221062 - protein, 81 aa, Glycine max
  Clone ID: PAT_MRT3847_41649C.1.pep
AIFFHRHSGFRFQHIGAIGEIKQLKRESQSFSSHVAVSHVSNISYYQSKPTSMVIECSLFMSESNFHVLVSQVRQGVGIIG

SEQ ID NO: 221063 - protein, 42 aa, Glycine max
  Clone ID: PAT_MRT3847_4164C.1.pep
RCSHGTTILRSSYGLMLCIGYISSYRSWIESMFKDEMVLCMF

SEQ ID NO: 221064 - protein, 99 aa, Glycine max
  Clone ID: PAT_MRT3847_41650C.1.pep
MQISLSNLAFKTPQLFPIQHPIFPPKAPLYHHQVSTQSHVNNVLKGSSGYLSEISKAVLLTHFSPRYTIEDIRQAASKLQSRLSAKVVPLTEGFKSMYS

SEQ ID NO: 221065 - protein, 60 aa, Glycine max
  Clone ID: PAT_MRT3847_41651C.1.pep
MPKAPLRTNIGILKAPPAWNEQLGGVCTRGANPKLYQPLMDGIWGAKFLLDFPTGLKENL

SEQ ID NO: 221066 - protein, 74 aa, Glycine max
  Clone ID: PAT_MRT3847_41652C.1.pep
SAKEAVTDLRPPPYVWMSFFVRKRLESSDIVFALWLTRVKIRVRKQRITQILRREGVPGITTFATDLLPHKEGR

SEQ ID NO: 221067 - protein, 488 aa, Glycine max
  Clone ID: PAT_MRT3847_41653C.1.pep
MKMISSASNENKTVVDMDDHLAGLGYKVRSSELCQVAANMERLENVISSTDLSQLASDTTLYDPSNIGLGSWVDTLLSEFDQTASLPLQYDFATDPNHNKQLALVTTVEEDSGIRLVHMLMTCADSVQRGDFSFAGSLIENMQGLLAHVNTNCGIGKVAGYFIDALRRRISNTLPTSSSTYENDVLYHNYYEACPYLKFAHFTANQAILEAFNGHDCVHVIDFNLMQGLQWPALIQALALRPGGPPLLRLTGVGPPSAENRDNLREIGLRLAELARSVNVRFAFRGVAAWRLEDVKPWMLQVSLNEAVAVNSIMQLHRVTAVDAAVEEVLSWIRSLNPKIVTVVEQEANHNGEGFLERFTEALHYYSTVFDSLDACPVEPDKAALAEMYLQREICNVVCCEGPARLERHEPLAKWRDRLGKAGFRPLHLGFNAYKQASMLLTLFSAEGFCVQENQGSLTLGWHSRPLIAASAWQAAPLRDDETLRFGH

SEQ ID NO: 221068 - protein, 237 aa, Glycine max
  Clone ID: PAT_MRT3847_41654C.1.pep
MERLEGVISDTILYDPSNIGLGSLVDTLLSDLDQTMSLPSHYHLSSDLPDFATTVEEHSGIRLIHTLMTCADSLQRGHFSFAASLIQNMQGLLAHVNTNCGIGKVAACFIDALRRRISNKFPASSAYENDVLYHNYYEACPYLKFAHFTANQAILEAFNGHDCVHVIDFNLMQGLQWPALIQALALRPGGPPLLRLTGIGPPSAENRDNLREIGLRLAELARSVNVRFAFRGVAAWR

SEQ ID NO: 221069 - protein, 168 aa, Glycine max
  Clone ID: PAT_MRT3847_41655C.1.pep
AVKSAVEEVLGWIRILNPKIVTVVEQEANHNGEGFLERFTEALHYYSSVFDSLDACPVEPDKAALAEMYLQREICNVVCCEGPARLERHEPLAKWRDRLGKAGFRALHLGFNAYKQASMLLTLFSAEGFCVQENQGSLTLGWHSRPLIAASAWQAAPLGDDETLRFEH

SEQ ID NO: 221070 - protein, 89 aa, Glycine max
  Clone ID: PAT_MRT3847_41656C.1.pep
TLLAMRLMNPFLVWSTLRALLGMIHLLGIAWTIIGLPERLLGNLVLTLLFMHLHDCGFVTIAIIEYCGELWTNTATTVVVLRWRRPQNP

SEQ ID NO: 221071 - protein, 120 aa, Glycine max
  Clone ID: PAT_MRT3847_41657C.1.pep
TTVAFRAPNNLALLTFSNLVPLMEGRRVAVLWDYDTCPITANVPAYQVVDNINNVAARYGIPTTFNLYLFDRSTANNVVLSEIASNGVSLVFSVPAVDKNQAVRVRADLMLFAGDYGAAS

SEQ ID NO: 221072 - protein, 67 aa, Glycine max
  Clone ID: PAT_MRT3847_41658C.1.pep
LADDVNLEEFVMTKDEFSGADIKAICTEAGLLALRERRMKVTHADFKKAKDKVMFKKKEGVPEGLYM

SEQ ID NO: 221073 - protein, 90 aa, Glycine max
  Clone ID: PAT_MRT3847_41659C.1.pep
MGNLGPFIHGPNNLIYSVKFTFYHLILPPFNAGIKSDLHDNETQSSVDHHAAAYPTSEIALAFTHNQLIRNNTHYHILIYINQPCDKMPI

SEQ ID NO: 221074 - protein, 71 aa, Glycine max
  unsure (1)..(71): unsure at all Xaa locations
  Clone ID: PAT_MRT3847_4165C.1.pep
LCGAAVTTVNRAGACMVSPFTGGKSMAGFPTMNTNTDITFIVSNWGRVAXMQAWPPVGQKMFETLAYLPDL

SEQ ID NO: 221075 - protein, 80 aa, Glycine max
  Clone ID: PAT_MRT3847_41660C.1.pep
GKMFSLPTDAMISSFRLTAPGNDQEGPTTTTTENDEITQGPHINPISNEENTNSPLCANESISFSSRGSKMDRLTWPKSA

SEQ ID NO: 221076 - protein, 38 aa, Glycine max
  unsure (1)..(38): unsure at all Xaa locations
  Clone ID: PAT_MRT3847_41661C.1.pep
GXXTTTLPLSTYDYHVSDPTFYMQYVLLSKTSLSADRN

SEQ ID NO: 221077 - protein, 141 aa, Glycine max
  Clone ID: PAT_MRT3847_41662C.1.pep
RGPFPIIWGPPAFLSANQFPFEKGFFSPLLKKKLLGGFPLFFGGPFPFFFALPPPFLGKIKNFFFGAICLAPFFFFFWPHPLGFSPLLKRKTGRVLPFFFGLVWAVNPPEGDPVLKKKPFLGFHPFGGLISVFARGGAPGV

SEQ ID NO: 221078 - protein, 87 aa, Glycine max
  Clone ID: PAT_MRT3847_41663C.1.pep
AVNPREKTTEGGDGENRRPHAPQEETEGRQAQRGRQRGAHRRRTGAKPPQENRRQRLRGHLRGAAPRRQTRTDSPPKRRRPAHSGQG

SEQ ID NO: 221079 - protein, 63 aa, Glycine max
  unsure (1)..(63): unsure at all Xaa locations
  Clone ID: PAT_MRT3847_41664C.1.pep
NXRIFHHQGKPAYGPMDLRPKXSXIXDLYLLGEKAWVNXLARVTRVPGNLNXPEXYVTAVAXX

SEQ ID NO: 221080 - protein, 97 aa, Glycine max
  Clone ID: PAT_MRT3847_41665C.1.pep
NRCLFSTVNTSISSINLPHVKHQRLLQLCDHAPLAPHMATVSRLPVVPCHHHHRKRQFVCTFKPWQQPIGHNHLKLDMSKIQPLYLAPYMNLNQTCA

SEQ ID NO: 221081 - protein, 50 aa, Glycine max
  Clone ID: PAT_MRT3847_41666C.1.pep
LKNNGGGSGGQCLSLQMYFLRGLVGENFQNGGILFIIKKGFGGVLFQLYY

SEQ ID NO: 221082 - protein, 33 aa, Glycine max
  Clone ID: PAT_MRT3847_41667C.1.pep
HAARTRHKGPPLVIHLHLILFSRHYEVEYVQLA

SEQ ID NO: 221083 - protein, 124 aa, Glycine max
  unsure (1)..(124): unsure at all Xaa locations
  Clone ID: PAT_MRT3847_41668C.1.pep
AVLWLNLPEKKTPPPLVNSSKKPAIPPKSCKARGADLKLLFKNTWGTAFAIRKLPLVKAKKYLEVVLAQKQAIPFRPFWGGVGRTAQAXSKHSNGQGPWPAKSTKFILNLLKNAESNAEVKGLD

SEQ ID NO: 221084 - protein, 78 aa, Glycine max
  Clone ID: PAT_MRT3847_41669C.1.pep
WVFFFFFFFFFFFFFFFKQKIFDFFPNYEIRLLFSQTLLKKDKKINPPRFKGEKQLEHLKKHTFLKEKFFKPRTFLDI

SEQ ID NO: 221085 - protein, 66 aa, Glycine max
  unsure (1)..(66): unsure at all Xaa locations
  Clone ID: PAT_MRT3847_4166C.1.pep
MISSLHSESHTMGLWDSFLNWLRSSFFKHEMELXLVGLQNAGKTSLVNAIATVGYSEDMISTAGST

SEQ ID NO: 221086 - protein, 128 aa, Glycine max
  unsure (1)..(128): unsure at all Xaa locations
  Clone ID: PAT_MRT3847_41670C.1.pep
KCVSHLLHRSRGASLAGRALKLYPSCHEVGRVSMRKTVTKQACSGSPWYGPYRGKYXGPFSGEPPCYLTGEFPCDYIWDTDGLSVDPETSTRNRELKVIHYTWAMLGAIGCIXPELLSRNGVKSGEAI

SEQ ID NO: 221087 - protein, 57 aa, Glycine max
  unsure (1)..(57): unsure at all Xaa locations
  Clone ID: PAT_MRT3847_41671C.1.pep
SREEAKRVGREVRRNLGEQGGEKLRETRRVEMDPGCPKXSPPPQEEGGGTGGSDLDR

SEQ ID NO: 221088 - protein, 97 aa, Glycine max
  unsure (1)..(97): unsure at all Xaa locations
  Clone ID: PAT_MRT3847_41672C.1.pep
XXPXXXLPXXXXXXPXXXXXXXRGXSXRXPXXPXXXFXRXXXXXLXXPXXXXXXLXSRXXXLXXRXXVXXXXXXXXXXAXXCXPXXXSXAXFXAYXR

SEQ ID NO: 221089 - protein, 137 aa, Glycine max
  Clone ID: PAT_MRT3847_41673C.1.pep
ARGNRCVEGFDHHCRWLNNCVGKRNYTTFFLLMIFVLLMLLIEGGTAIAIFIRCFVDRRGIEKELQRKLYVDFPRRVLATICVFLLLLTAYSSTALGQLFFFHVGLIRKGMKTYDYILALRKENEAMDLESLDDSDF

SEQ ID NO: 221090 - protein, 55 aa, Glycine max
  Clone ID: PAT_MRT3847_41674C.1.pep
KKIFTVNQKEFLVLLSANKTVIMMVSFPLFIVVSKSLAFSPPCLINVSHYRFLYK

SEQ ID NO: 221091 - protein, 45 aa, Glycine max
  Clone ID: PAT_MRT3847_41675C.1.pep
NHFPADLLVKLGIIRPGGCFFFFSGAGLRRCRYLLRFPLADVCIF

SEQ ID NO: 221092 - protein, 152 aa, Glycine max
  Clone ID: PAT_MRT3847_41676C.1.pep
MMHSVKGGWGQTFALAKHNESEGRKTRIRRSKQERKAMVESFIKKYQESNNGNFPSLNLTHKEVGGSFYTVREIVRDIIQENRVLGPAKFTLEELNTDQFFEQNPLGSIARDPQPFLAASLIENHCELDKLQDTNSKMISVSDVSYTEAVHQ

SEQ ID NO: 221093 - protein, 297 aa, Glycine max
  Clone ID: PAT_MRT3847_41677C.1.pep
MVMLIRCSCFFARPRFSQPQFYANNTKPLLPGKLAFLSLKPDKGVPHFEDTLDGSSKISCLLHCSKCKEDIHQRFPSLIFVASNILMFSMPNTALAETCEADTSVFNMPILLAVALIGATVGGLLARQRRNELHRVNEQLISITTACRKQAKIESYAPSLSYAPIGGGRILDNEIIVNPKKQELISKLKNGKNFLRNQRPDKAFPEFKNALELAQNLKDPIEEKKAARGLGASLQRQGKYRDAIKYHSMVLGISEREGEDSGSTEAFGAIADCYTELGELEKAGQFYDKYIARLEKD

SEQ ID NO: 221094 - protein, 36 aa, Glycine max
  Clone ID: PAT_MRT3847_41678C.1.pep
YLNIVSLYFYSPYSVDHPRCVCPFALLFRKKVPYAW

SEQ ID NO: 221095 - protein, 156 aa, Glycine max
  Clone ID: PAT_MRT3847_41679C.1.pep
GPKRGAKGFFPKKKKKFFFGRKIQKTPYKKKTRFWKGKQTKQEKWVQNGRGKKEGKNKRPKQGEREKSFKPGDREKKNREKFSQVSGGPRGGGPETIWGKLAPGVFTPGPGLGPRDPRAGPPLLGEPAGERIWGPPPFWNKGPPGPPPREKKIGAP

SEQ ID NO: 221096 - protein, 168 aa, Glycine max
  Clone ID: PAT_MRT3847_4167C.1.pep
KGTFPEVYVPTVFENYVADVEVDCKHVELALWDTAGQEDYDRLRPLSYPDSHVILICFAIDSPDSLDNVQEKWISEVLHFCQGLPIILVGCKKDLRYDQKTIEELHKTSQKPVAPEQAEDVRKKIGAQKYLECSAKTNEGVREVFEHATRAALLTRKDGHKKKKCLIL

SEQ ID NO: 221097 - protein, 178 aa, Glycine max
  unsure (1)..(178): unsure at all Xaa locations
  Clone ID: PAT_MRT3847_41680C.1.pep
DLTIIVLLLETPIPYLAHSMTYVTEHRDITVPLSNPFILDRTIICAYFTNHMLDDPSLIEMKRTANIPSLNDMAMLLMSGTQIVCIAPSGXGRDRPDPHTGKMVXPLPLDTSSDDNMRRLVEHSRTPGHAYPLARLCHDIMPSTLNVDIDIVEKRIIFSYVAGISVASALICTETTAT

SEQ ID NO: 221098 - protein, 94 aa, Glycine max
  Clone ID: PAT_MRT3847_41681C.1.pep
KNFFGPRVPFSPPFKFKGLGPPLFFGGVPPQEFSPGLYFLGGPFGLFSTPPGPGGPPEFLGRVLGGFHFFFMGGFLKPGQKRGNGVSWGKFFSL

SEQ ID NO: 221099 - protein, 75 aa, Glycine max
  Clone ID: PAT_MRT3847_41682C.1.pep
CLVLRPLPRQHHVVLHLISPGRTISRLSCAHGFFVDSRSSSLGWVPVLYTLAMVFFVRVHILVCVERTGDFFNPP

SEQ ID NO: 221100 - protein, 115 aa, Glycine max
  Clone ID: PAT_MRT3847_41683C.1.pep
MMNNMAYPNKAFFLFVMFFSASLHLGMFDTSLDQLLPGLGQGAFLQDAKCMQRLLPCQEYLKSPNNPSPACCVPLKEMQENNTQCLCNFVNSTTLFQSLGGSKDEILKLPQACGI

SEQ ID NO: 221101 - protein, 313 aa, Glycine max
  Clone ID: PAT_MRT3847_41684C.1.pep
NSARGNLRKAAAQEVVDKVRQHSGVLVDQAQLVSKELIRVAILWHEMWHEALEEASRLYFGEHNIEGMLNVLEPLHEMLEEGAMKNNVTIKERIFIEAYRQELLEAYECCMNYKRTGKDAELTQAWDIYYHVFRKIDKQLQSLTTLDLESVSPELLECRNLELAVPGSYRADAPVVTIASFARQLVVITSKQRPRKLTIHGSDGDDYAFLLKGHEDLRQDERVMQLFGLVNTLLENSPKTAEKDLSIQRYAVIPLSPNSGLIEWVPNCDTLHHLIREYRDARKITLNQEHKCMLSFAPDYDHLPLIAKVEVID

SEQ ID NO: 221102 - protein, 147 aa, Glycine max
  Clone ID: PAT_MRT3847_41685C.1.pep
SERSSSESQDTADDMAAAVTDMARRHTISQILVDLVKFAVGSAIDGSRRIIPGRKQVDKMVPEGLINIPLPTPLKAKKHPDLKVANDLPFETKMEEVKEDMNNLKQQYEASIKRVEESQPPNKSDGGFKEINLVQGNGRRVFIRSRL

SEQ ID NO: 221103 - protein, 353 aa, Glycine max
  Clone ID: PAT_MRT3847_41686C.1.pep
MELISGLPEDVARDCLIRVSYQQFPTVASVCKLWKSNHHEGDSREHETEPTPALHPKPRKHPAGYSFKHWYKSSPTRFLRTSFTNENPPSSPPELFSGLPLQIMFSCQLVSVGYDLVVLGGLDPNSWEASNSVFVYNFLSAKWRRGADMPGGPRMFFACASDSEGTVFVAGGHDNEKNALRSALAYDVTSDLWVMLPDMEAERDECKGVFCRGRFVAVGGYPTETQGRFVKSAEAFDPATRSWSEVKEDFLDCATCPRTFVDGGDDEGVFLCSGGDLMALRGDTWQMMATLPGEIRNVAYVGAFDGTLVLIGSSGYGEVHVSFAFDVKSCCWRKLESPEGFRGHVQTGCVLEI

SEQ ID NO: 221104 - protein, 74 aa, Glycine max
  Clone ID: PAT_MRT3847_41687C.1.pep
EMEKRHCEGRYSPMLQPHRHLMQVLMGVTTMVPIILGTAARVVVRASLAIVELMDIGRCRCMTIVTMGTEKTSP

SEQ ID NO: 221105 - protein, 36 aa, Glycine max
  Clone ID: PAT_MRT3847_41688C.1.pep
LVIFWFFFFSKMSYLNLSNHVIKSTILKPYPTQISL

SEQ ID NO: 221106 - protein, 43 aa, Glycine max
  Clone ID: PAT_MRT3847_41689C.1.pep
KLTKGNVALFSLFKSTTKIRIKLNASLIPQKASFFSLKKLLLY

SEQ ID NO: 221107 - protein, 30 aa, Glycine max
  Clone ID: PAT_MRT3847_4168C.1.pep
FLLLYQIKKNGTCVLSYLHYPWIRSIEAQT

SEQ ID NO: 221108 - protein, 61 aa, Glycine max
  Clone ID: PAT_MRT3847_41690C.1.pep
AVAVALDRKACPGLRFVSGPWHPEVARPQEGTCKLDKLKITLKKYQLNKKYASNKFRSKYK

SEQ ID NO: 221109 - protein, 73 aa, Glycine max
  Clone ID: PAT_MRT3847_41691C.1.pep
RIIKLLLIMLMTCLAPSTNNVTDGINGPMNEHTEGDIDEVKEESKAESKNSNEKDNNAHNYIHQITTTLNCTV

SEQ ID NO: 221110 - protein, 209 aa, Glycine max
  Clone ID: PAT_MRT3847_41692C.1.pep
MWRCVARAIRVPASERSIPNHQPLRSHISRFFSGGGGGGSSSYNVVDHKYDAVVVGAGGAGLRAAIGLSEHGFNTACITKLFPTRSHTVAAQGGINAALGNMTEDDWRWHMYDTVKGSDWLGDQDAIQYMCREAPKAVIELENYGLPFSRTEDGRIYQRAFGGQSLNFGKGGQAYRCACAADRTGHALLHTRELSTNPPLVENANLMNG

SEQ ID NO: 221111 - protein, 209 aa, Glycine max
  Clone ID: PAT_MRT3847_41693C.1.pep
MDPYDEKRLRDEVIYLHYLWHQGPPRPPPQNPITHRPFPSPSQPYIPQHTWHARPHQQQPAPARTRSLPPAIPTTTTTCFKKKKKHKRNTPEKNVSQPDPGPEWPCPVRPEPSPTTGWAQPKPKPGSASPPPEVAPEEKERLVAMQAQHKACKALKEFLSNNYDDDDDDDDDDDESECEEIEEFFLVLFLEDHELRGYYQRCYENGLFC

SEQ ID NO: 221112 - protein, 246 aa, Glycine max
  Clone ID: PAT_MRT3847_41694C.1.pep
MDLHDPNRFRNRKQTLSSRERFLGVPSSHAPRIENSSSSATDDDVVVFSNNDDLIEDDVVFSNNDDSTEPSSSSQIPNRHHNHNNHHKAFAFGPSDASFGILAALPENDHASSNGSHFFHHKPSVSVSVSVSLSSSSSSSAAARLIPAIPKPPPERTPSSSSSLKFHQSAPVNVPLMPMRRHHRRDFDDDDDATEEMLPPHEIVARNSAQSPMLAYSVLEGVGRTLKGRDLRQVRNAVWRQTGFLD

SEQ ID NO: 221113 - protein, 54 aa, Glycine max
  Clone ID: PAT_MRT3847_41695C.1.pep
CYHLSSLQFIIAIYRSKYYGLSSELQVVRWKWHISFGRHASVRTGRTRCPVIFI

SEQ ID NO: 221114 - protein, 113 aa, Glycine max
  unsure (1)..(113): unsure at all Xaa locations
  Clone ID: PAT_MRT3847_41696C.1.pep
DRRGRDVLSRSIIFVELNTGVKILSLGXWTWYAETDVVPEALSKVIQVGYTHIDCTSAYKHQAEIGSALKTRFDDRVVKREDLWITSNIWCSDHASXDVPTALCNTLQELQLD

SEQ ID NO: 221115 - protein, 76 aa, Glycine max
  Clone ID: PAT_MRT3847_41697C.1.pep
SVRLLYSPFRPAVDIAEAYTGMIAVLTTFDASYLVIVGHPEKLLLNRIMLLKDTSDEIPITKYASVMRSCEHECEN

SEQ ID NO: 221116 - protein, 40 aa, Glycine max
  Clone ID: PAT_MRT3847_41698C.1.pep
TLLGVYARLAYSPGKTAKPCLSKRGCDMNRSLFRALDRSP

SEQ ID NO: 221117 - protein, 91 aa, Glycine max
  Clone ID: PAT_MRT3847_41699C.1.pep
IRLVCYSATSCITLHLLVPLHYLHSTTSIALLTTSFHKISYVSIPIASPHHHLHYYLFSSIHHFPKILHSISYFSYLTNPYNNSFLFSFSS

SEQ ID NO: 221118 - protein, 40 aa, Glycine max
  Clone ID: PAT_MRT3847_4169C.1.pep
TSWLFTKANVSRTNVNTVQQFIYSSTRNNLKAMQGISAGS

SEQ ID NO: 221119 - protein, 45 aa, Glycine max
  Clone ID: PAT_MRT3847_416C.1.pep
SMIELRPLGQKKRKRKTYNCTGVTSVSASLAVLIFSFKNRNACPS

SEQ ID NO: 221120 - protein, 90 aa, Glycine max
  unsure (1)..(90): unsure at all Xaa locations
  Clone ID: PAT_MRT3847_41700C.1.pep
HLVECLKLLIRHQMLCAYDVQPTSTLRQAVQYEAVNXPDIARRRSVPLPASTLKCRAPSAIVLVWSSGMSIHMSLWRWLCKNLQCCTHCS

SEQ ID NO: 221121 - protein, 36 aa, Glycine max
  Clone ID: PAT_MRT3847_41701C.1.pep
SHKKEIFSPYQPSVSISSIINPISSRPVNSYPTHLG

SEQ ID NO: 221122 - protein, 156 aa, Glycine max
  unsure (1)..(156): unsure at all Xaa locations
  Clone ID: PAT_MRT3847_41702C.1.pep
IKADIFEDMNGVSSSEIQLYLDTLDDKWTNQYKNFDYVVIAGGKWFLKTAIYHENNTLTGCHNCHGKNLTEVGFRXTRNRKALQQVFDFMTHXEHKAVVFFRTTTPDHFENGEWFSGGYCNRTVPFKEDQVEVSYVDSIIRSIELEEFHKTKNSSA

SEQ ID NO: 221123 - protein, 234 aa, Glycine max
  Clone ID: PAT_MRT3847_41703C.1.pep
EVIINSEVWDLRKFRLLRSVPSLDQTSITFNARGDVMYAILRRNLEDVMSAVHTRRVKHPLFAAFRTVDAINYSDIATIPVDRCVLDFAAEPTDSFVGLITMDDQDEMYASARIYEIGRRRPTDDDSDPDDAESEEEDEDDDDDDPDVDPLLSPGLGGDSGSDADDMSNDDDDSVSDLDEDEDGDFILDDVDFDGGPGILEIVTEGDEEDDDSQLLESLSSSDDEDFVGNGFGY

SEQ ID NO: 221124 - protein, 97 aa, Glycine max
  unsure (1)..(97): unsure at all Xaa locations
  Clone ID: PAT_MRT3847_41704C.1.pep
RVSNVLLGAYARNGSXEEXNHYIFQHIXRRXVVPXXKXLEIPMEXYVNWQKMDEAIITMKELWXMKDCHWRPXHXIXXAIXEYLXKDXNPKYATRYI

SEQ ID NO: 221125 - protein, 76 aa, Glycine max
  Clone ID: PAT_MRT3847_41705C.1.pep
FRLNFLWGLGGRLPPLRGPKNAPRSPKKEPKISLLAPNPPYQSSTFQCPGKKPSHPPILSFGPGFPVKPPFRLSPW

SEQ ID NO: 221126 - protein, 80 aa, Glycine max
  Clone ID: PAT_MRT3847_41706C.1.pep
TLIVLGDKKDGVKTSNKKLSHPLPHLTDRTGEWDEDTVNITYNTILTEERPLAYVLSKGPIHTQETHNLDDPEERHCAIS

SEQ ID NO: 221127 - protein, 49 aa, Glycine max
  unsure (1)..(49): unsure at all Xaa locations
  Clone ID: PAT_MRT3847_41707C.1.pep
SPXANLFRXIGSRNXNXXXXNCVQLXXXNQSAXRXRARAXXXEXTYACX

SEQ ID NO: 221128 - protein, 60 aa, Glycine max
  Clone ID: PAT_MRT3847_41708C.1.pep
RQDLATSGVHSDVGASRAFCTGDTGAFPSPLNTYYIITERFSNPRTTNLSTNLSTISKNT

SEQ ID NO: 221129 - protein, 43 aa, Glycine max
  Clone ID: PAT_MRT3847_41709C.1.pep
TDEMNDLNITDDRQVAATITDGHTSATGHNTVTTIERRNGTAK

SEQ ID NO: 221130 - protein, 95 aa, Glycine max
  Clone ID: PAT_MRT3847_4170C.1.pep
MGKGTGSFGKRRNKTHTLCVRCGRRSFHLQKSRCAACAFPAARTRKYNWSVKAIRRKTTGTGRMRYLRNVPRRFKSGFREGTEAAPRKKGAATTA

SEQ ID NO: 221131 - protein, 44 aa, Glycine max
  Clone ID: PAT_MRT3847_41710C.1.pep
RLKNPGPYFTKSSGFLGVFFLSTRQPLFNASRVHPKQHPDNWAF

SEQ ID NO: 221132 - protein, 104 aa, Glycine max
  Clone ID: PAT_MRT3847_41711C.1.pep
MATNALAGTSLSMRSLLPQTQAFTSISGLRSASISSFGRKNVSFSLQPRSIRLKISCAAKPETVEKVCKIVKKQLAMPETDVVTGESKFATLGADSLDTVEIVM

SEQ ID NO: 221133 - protein, 169 aa, Glycine max
  unsure (1)..(169): unsure at all Xaa locations
  Clone ID: PAT_MRT3847_41712C.1.pep
MATNAFTGTSLSMRSVIPQTQAFASISGPTSASISSFGRKNVSFSLQPRLIRLKISCAAXAKPETVEKVCKIVKKQLAMPETDVVTGESKFATLGADSLDTVEIVMALEEAFGIAIEDNSAQYFDTVQEASNLIEVIVQKKILDSAQSIATVQDAADLIEEIVQKKFLE

SEQ ID NO: 221134 - protein, 211 aa, Glycine max
  Clone ID: PAT_MRT3847_41713C.1.pep
VAFEDYGLELYLYRTAYLVDLDREKVGRVLKLDSIKNGDSWMGMDVLVFNTWHWWTHTGSSQPWDYVQVNNKLFKDMNRFLAYYKGLTTWAKWVQRNVNPAKTKVFFLGISPVHYQGKDWNQPTKSCMSETQPFFGLKYPAGTPMAWRVVSKVLNQITKPVYFLDVTTLSQYRKDAHPEGYSGVMAVDCSHWCLPGLPDTWNELLGAVLSD

SEQ ID NO: 221135 - protein, 53 aa, Glycine max
  Clone ID: PAT_MRT3847_41714C.1.pep
VFLRNNKKLKFMLDCGFIQKETEKLVYAVVKLKLKYVILINMMFSTCPEETPP

SEQ ID NO: 221136 - protein, 230 aa, Glycine max
  Clone ID: PAT_MRT3847_41715C.1.pep
EFGTRKIYLKKKYHNTNSVYFFQDYGLELYLYRTAYLVDLDREKVGRVLKLDSIKNGDSWMGMDVLVFNTWHWWTHTGSSQPWDYVQVNNKLFKDMNRFLAYYKGLTTWAKWVQRNVNPAKTKVFFLGISPVHYQGKDWNRPTKSCMGETQPFFGLKYPAGTPMAWRVVSKVLNKITKPVYFLDVTTLSQYRKDAHPEGYSGVMAVDCSHWCLPGLPDTWNELLSAVLSG

SEQ ID NO: 221137 - protein, 72 aa, Glycine max
  Clone ID: PAT_MRT3847_41716C.1.pep
VTLSTFHLTLMCSGGWHKGQEMAMLVAGCSLVHLADAKQSYLLQCTFQWQQVARGCYSLNVDLAKKHGERFY

SEQ ID NO: 221138 - protein, 271 aa, Glycine max
  Clone ID: PAT_MRT3847_41717C.1.pep
PAGITGAMLLTFIKGPEVKMLSFHVNLFNHRNGHVVHPHATSGLMTIFGALASVASNVSYAMWLIIQAKMSERYPCPYSSTALMSLMGAVLSISFAFCVERDLSQWRLGWNIRLLTVAYAGIVVSGVMVAVISWCVRTRGPLFVSIFSPLMLVVVAFAGSTILDEKLYLGSIIGSMLIICGLYVVLWGKSKEMKKNQSGQSESTHKSDTIEIMVKPRVEDKSNNKSNTLINSVNVTGDNKDSWKNGRESNVSHIHCCKVQEEVTSQNVSRT

SEQ ID NO: 221139 - protein, 104 aa, Glycine max
  Clone ID: PAT_MRT3847_41718C.1.pep
LGGILLWRTLRFVFSRDTKRNYIIFKVHIKKKKKKKKKKKKKKKKKKKKKKKKKKKKKKKKKKKKKKKKKKGGGRFKGPKFTSRGWQGKTFFLGPQKLNSGPGF

SEQ ID NO: 221140 - protein, 72 aa, Glycine max
  Clone ID: PAT_MRT3847_41719C.1.pep
CASWLRCVPAFSRRVGYRALLSWSNFESVMLSICSRNTSSHIWSLMMMFMEPASSVCAELDAAFTLVGGNLA

SEQ ID NO: 221141 - protein, 60 aa, Glycine max
  Clone ID: PAT_MRT3847_4171C.1.pep
FPPHAYLGFKTQAVLKKLSWKNSLNFPSSTITRLLYFMLDIQQEHDTQLHSSSIPSNHKI

SEQ ID NO: 221142 - protein, 134 aa, Glycine max
  Clone ID: PAT_MRT3847_41720C.1.pep
MHYQAAAASWGSYVAGAPRNSAAAAVVVGDPLERIERLASESAVVIFSVSTCCMCHAIKRLFCGMGVNPTVHELDEDPRGKDLERALMRLLGTPSVVPVVFIGGKLVGTMDRVMACHINGTLVPLLKEAGALWL

SEQ ID NO: 221143 - protein, 104 aa, Glycine max
  Clone ID: PAT_MRT3847_41721C.1.pep
FDLCTQTDIKQAININVGMLKLDLNRIEYNIIRLVTFAYRRNGSLKKGYELSGFCDAEVALMIFSIRDKVYEHCSGHSKTHSNIIKSFVYGRFCVCPFGGFLQP

SEQ ID NO: 221144 - protein, 85 aa, Glycine max
  unsure (1)..(85): unsure at all Xaa locations
  Clone ID: PAT_MRT3847_41722C.1.pep
LLARGREGGHVGDVRQQRRKALXRTKGCQKTDVPTMAQMEEDQPMETMTKAPEANDHNEQPMSSEWFETQGAGKANPNKNGLDDR

SEQ ID NO: 221145 - protein, 110 aa, Glycine max
  unsure (1)..(110): unsure at all Xaa locations
  Clone ID: PAT_MRT3847_41723C.1.pep
GGYFPPLGHQPTRRRRPKRDPPPKGGAFPPPQKKKKKGGGTRPQGELKGVQKGGPPGERPGGNPPGPGRHGKKKEISGPPKXGPGGGKPPGGKPPPWAKKTPPPTIEILI

SEQ ID NO: 221146 - protein, 46 aa, Glycine max
  Clone ID: PAT_MRT3847_41724C.1.pep
LCSHRLYLGAFISSLTAMLSLAMYPVVTMILQFFLYLVVFVLCLFD

SEQ ID NO: 221147 - protein, 56 aa, Glycine max
  Clone ID: PAT_MRT3847_41725C.1.pep
CPIREQYQSTMSPLQELANCQLIEPRQCGIQKHSGNRTIGYPDLLSYPTIELSMLI

SEQ ID NO: 221148 - protein, 64 aa, Glycine max
  Clone ID: PAT_MRT3847_41726C.1.pep
APRTPSEPSPLIKPPSPNPLCFRPPFSLYIVYRPFIFPQLTSISIFPPSFSFFLLFFFLFFFPL

SEQ ID NO: 221149 - protein, 68 aa, Glycine max
  Clone ID: PAT_MRT3847_41727C.1.pep
ALVFFVGDSRLIGFNKPVIGFCEAMTGVFLLAGLEAALLSETLAGLDLGFAVVAAALALGGATACFLG

SEQ ID NO: 221150 - protein, 83 aa, Glycine max
  Clone ID: PAT_MRT3847_41728C.1.pep
TRPVGCKPCGKFGDYPVERCLKQMDRAYNFGDNQILQMYGFTHKSLGSRKVKRVRNDTSNPLEVKDELGLLHPAFKAIKLSSS

SEQ ID NO: 221151 - protein, 45 aa, Glycine max
  Clone ID: PAT_MRT3847_41729C.1.pep
PSKHVVNYCCIPSLLPFIIFSTRYEGVVWFLSDCLISRKIKNKKL

SEQ ID NO: 221152 - protein, 134 aa, Glycine max
  Clone ID: PAT_MRT3847_4172C.1.pep
VKFPLTLDQKVSTLVKRPKLLRSKEEKEKEEKVLVIDGIEFDRNKAVKFDVFINDEDDKVITPSNTEFAGSFVSVPHSHVHKNKKIKTCFRVGLTDLLEDLEAENDDSILVTLVPKYGKGLVTIRDIKIELETE

SEQ ID NO: 221153 - protein, 183 aa, Glycine max
  Clone ID: PAT_MRT3847_41730C.1.pep
SLTANRGLSDFLKLKEIDKKEDRYDENVNALFEENGLYRKKLPKDSTSLMRAVSDALYFNTNHHAEIQEILLKNLTQLIASDKLTPRLSSFQGNSMMLKDFCNNPQLPGFEKTNLELISLLFKVRVVLYTTNEEHILTATIFNHNFPNTIELFRTKTSHYNAVFTKDFIEKSGVCQNILLNLI

SEQ ID NO: 221154 - protein, 73 aa, Glycine max
  unsure (1)..(73): unsure at all Xaa locations
  Clone ID: PAT_MRT3847_41732C.1.pep
REXNTXXLLXLHSFLXXVLDTQKXXAXXSPQKXNGFSPXXLSPYXHLSXVXXFSPLXMXXFSIXFPILEPXXD

SEQ ID NO: 221155 - protein, 67 aa, Glycine max
  Clone ID: PAT_MRT3847_41733C.1.pep
RPQHYPLGGLLIKKQWGHPTHCFFFIIQTPGHDSWSLEFLKRPPLIAIPFAPLDGPPPPLQDVQATT

SEQ ID NO: 221156 - protein, 65 aa, Glycine max
  Clone ID: PAT_MRT3847_41734C.1.pep
GAPLGAGYNCDAKGPMHPKGLFKIPREITGGRFSIELRYLLVLEAHQDMTGYYGPKPTGMKPNWT

SEQ ID NO: 221157 - protein, 81 aa, Glycine max
  unsure (1)..(81): unsure at all Xaa locations
  Clone ID: PAT_MRT3847_41735C.1.pep
GXIAGRLSTRNIAVTATRAAPFFFLLNFSLKSLYGSFLLIHGGSELPTANYVATAHLLYRHDITDKWINLCLLIMGHYTNY

SEQ ID NO: 221158 - protein, 74 aa, Glycine max
  Clone ID: PAT_MRT3847_41736C.1.pep
VRKVEDEEKLSCWTARIGSVISCLSSWRLPVGIPAHVAACSCLLSVRIQNGANCPVCHYTILPLLNHEILSSFQ

SEQ ID NO: 221159 - protein, 63 aa, Glycine max
  unsure (1)..(63): unsure at all Xaa locations
  Clone ID: PAT_MRT3847_41737C.1.pep
TLLFIPSCTVLCLNANHTHTEIHTECNYKDTXFVHENTSGIYNWIWIPKCVKYEFNTNIHVPK

SEQ ID NO: 221160 - protein, 107 aa, Glycine max
  Clone ID: PAT_MRT3847_41738C.1.pep
IGRGFYFFARLGLLISIQGFGPGLESERKFWVNGFQKKKKKGGVKGSIYVLMLGGLSFSPNGYVRLWVHVLPFQFLGGVSFPGTLISCCKRRVFFIQKRICFWSCFP

SEQ ID NO: 221161 - protein, 248 aa, Glycine max
  unsure (1)..(248): unsure at all Xaa locations
  Clone ID: PAT_MRT3847_41739C.1.pep
ENLFEMAPMRDVVTWNTLITGFAQNGHGEESLAVFRRMIEAKVEPNHVTFLGVLSGCNHAGLDNEGLQLVDLMERQYGVKPKAEHYALLIDLLGRRNRLMEAMSLIEKVPDGIKNHIAVWGAVLGACXVHGNLDLARKAAEKLFELXNQNTGRYVMLANIYAASGKWGGAKRIRNVMKERCLEKEPACSRIELRNARHEFVAKDKFHPQVEEICEVNSKLVLHSKDAGYQPYTDYPFLPDYDDDFYFS

SEQ ID NO: 221162 - protein, 66 aa, Glycine max
  Clone ID: PAT_MRT3847_4173C.1.pep
ASTAPTTGRSRQCVEEYENDGSYYTKPGWVLGGGGNALLIQTGDQMLWCESIHPQILFLDISGWVG

SEQ ID NO: 221163 - protein, 474 aa, Glycine max
  Clone ID: PAT_MRT3847_41740C.1.pep
MEPALLLGLEEEAKVVVTESSSLSSSSSAHRLVPWLNWDEWLFVKNALFSDSPHSVSSALKRISAWRSRGSLPVLIEVTTSIIEIQLKDPFFRHDEWNDASLSEEMLAMLYCMAGSLPVLIEVTASIIEIQLKDPFFRQDESNDASLSEEMLAMLYCMAIMRLVNGVVEKTRKKEVTSIAVAADAIGIPRMLIDIRHEGSHRELPSLKIVRSASVKALDWLKSYYWEPQSKAIPFHGEGIANVNKEIKSKIRELAICLKVNGSAQSSSSLLALRLHSACSLGIPRVRGRVGLKALSSSELEENADDASIGLTTQNVLADWMLVILKLCNKPELLLNLLKEVLDMIESQEDMKYKEDNPNMGVSHSRTEFRLSSLFAWLVGILSKVPSAAANMPKRVLHELLRRCLLVSQLCNKQLVDSALQLAELMNDSYLMEKVRKFSLISLSNLESADDESPLLTLKNIFHIGESCSEQVKS

SEQ ID NO: 221164 - protein, 60 aa, Glycine max
  unsure (1)..(60): unsure at all Xaa locations
  Clone ID: PAT_MRT3847_41741C.1.pep
VNXLIGLVXWYQKXGVLTPISYXXLXXPITLLXYXTHXXXDXKIXXKXLXXFLXAXQSYS

SEQ ID NO: 221165 - protein, 204 aa, Glycine max
  Clone ID: PAT_MRT3847_41742C.1.pep
TPRTPGELLFGRNKLLSLIVSGSQTPRTGGSKKQITKILKYVLQLYSSFSSEIVSVLLEYLLKALSSSELEENADGASIGLTTQNVLADWKLIILKLCNKEPELLLNLLKEILDMIETQEDMKYKEDNPNMGVSHSRTEFRLSSLFAWLVGILSKDPSATAIMPKRVLHELLRRCLLVSQLCNKQLLDSALQLAKLMNDSYLME

SEQ ID NO: 221166 - protein, 88 aa, Glycine max
  Clone ID: PAT_MRT3847_41743C.1.pep
FVVNSFFFFFFFFFFFFFFFFFFFFFPNVRVCVRIRVGASELTRTDGRQIATSSISGGASEHMRMRAGGLAGGELQLERLCAVAELLL

SEQ ID NO: 221167 - protein, 83 aa, Glycine max
  Clone ID: PAT_MRT3847_41744C.1.pep
MANTSFFFFFMLLATSSLAQSPSASPAATPKASPSPPQAAAPKASPPTTSSAPPPTTSTPPPPAPAPVSKTAPASSPPSPTPV

SEQ ID NO: 221168 - protein, 37 aa, Glycine max
  Clone ID: PAT_MRT3847_41745C.1.pep
DAVPFPLAFAKPYIFIASVLKMLIFCYRRFQICLFQF

SEQ ID NO: 221169 - protein, 53 aa, Glycine max
  Clone ID: PAT_MRT3847_41746C.1.pep
RVQATANRPFNGIGTTNYDLSSFRTSRRKPKKLSCIGTRQKTHPPNSNHAYVM

SEQ ID NO: 221170 - protein, 114 aa, Glycine max
  unsure (1)..(114): unsure at all Xaa locations
  Clone ID: PAT_MRT3847_41747C.1.pep
KVAEAVIVKQNYTTNCSALYWIMNLLQVPITIGSNXYEVVLLYXGQSVIASNGDQQARWHVHQLILYCMCGIISGIIGGLLGLGGGFILGPLFIGLGIHPQGRRRPITQRVSLL

SEQ ID NO: 221171 - protein, 54 aa, Glycine max
  Clone ID: PAT_MRT3847_41748C.1.pep
SGIQEPKSLVWYVSSSYFVVVQLVAGLSTGSVPGSRSGNIVGPLTREPSILARA

SEQ ID NO: 221172 - protein, 119 aa, Glycine max
  Clone ID: PAT_MRT3847_41749C.1.pep
MKMKVLVFFVVPILEAWQCHASDLFLFRMNTGFGARPPEGKCPSWRLVVEAHTILGFETIPEEGVEAPKDSIHGDHFRSDSKPVNQQVYFIARDLEVHPRATFVFRLDGTVLFIFPYSK

SEQ ID NO: 221173 - protein, 60 aa, Glycine max
  Clone ID: PAT_MRT3847_4174C.1.pep
MRGKIILQKALKLQQKFSLGAGGEFKKGVHQGERVVEVNMTCLDVSIQKMVAVVRLGPLG

SEQ ID NO: 221174 - protein, 131 aa, Glycine max
  Clone ID: PAT_MRT3847_41750C.1.pep
VLSSKWVCSLRGLPNRPNRRLPRLTPVKLRQLRLPHRQIAHHVVHEHRRHRNPKGYPEPQSKSIFVLLFVSLKKNRKQKEKKKFAFFALSGESCKRVWRKMRRRSRAVMGGRWRITAEKELAIAMEGERKG

SEQ ID NO: 221175 - protein, 156 aa, Glycine max
  Clone ID: PAT_MRT3847_41751C.1.pep
FFTPKPNHWNFLPSHYLLPLLCFSNRLYSVSYEVCFSADPWKVHQCGWSHAASVPSEEPEAPKGNKRVPRHERRALVEPFVNNYRAQNAGKFPRISDTQKQVGGSYYVIPEIIQELEYKSKMNSSNSVKKIFVEKHFDESKLLTTESGNVPPVILD

SEQ ID NO: 221176 - protein, 141 aa, Glycine max
  unsure (1)..(141): unsure at all Xaa locations
  Clone ID: PAT_MRT3847_41752C.1.pep
QIFVKTLTGKTITLEVESSDTIDNVKAKIQDKEGIPSDHHRLIFAGKQMEDGRTLADYYIQKESTLNLVLRLRGGAKMRKKKTYTKPNKIKHKHXKVKLGILHFYMVDDSGNVQRLRXECPNVECGACTFMAHHFDLHYCG

SEQ ID NO: 221177 - protein, 66 aa, Glycine max
  unsure (1)..(66): unsure at all Xaa locations
  Clone ID: PAT_MRT3847_41753C.1.pep
LSMVTGSSSIRMACVAYLPGEFVVVILIDPFKLDSAVAFVRCTLSVGXYGVLGRSSLSQILGGDLC

SEQ ID NO: 221178 - protein, 89 aa, Glycine max
  Clone ID: PAT_MRT3847_41754C.1.pep
FSQFDLLLEPLVKSFHSQCPYLKLSHHQEARASIKDPKSNPLSSLLGDFSYLTMDTKLLQQQLFQAHTNSEGTLRTNECRKSKILAHSL

SEQ ID NO: 221179 - protein, 51 aa, Glycine max
  Clone ID: PAT_MRT3847_41755C.1.pep
VVVIYLLRQLQLYHTSMLLDIKYLRLHPGAMLLPFPRQGWPPTLCDCVHTH

SEQ ID NO: 221180 - protein, 78 aa, Glycine max
  Clone ID: PAT_MRT3847_41756C.1.pep
QKMLTLASAGNTRRKDNERHRSQAMATTSLVSRNHLSGGITGADSLSIRLGSRIPYSNFIRSQPGTKLYFTVSAISEV

SEQ ID NO: 221181 - protein, 45 aa, Glycine max
  Clone ID: PAT_MRT3847_41757C.1.pep
DPQSESKVRGHSEMLLLKLANLNHIINHPFIIHHVFGDHNDAQEF

SEQ ID NO: 221182 - protein, 59 aa, Glycine max
  Clone ID: PAT_MRT3847_41758C.1.pep
MWQKHMSSLQVCFQLIEILILMNIIVIDKVGLSDQTELLTSSFCFGLVEQMLSISLTHP

SEQ ID NO: 221183 - protein, 55 aa, Glycine max
  Clone ID: PAT_MRT3847_41759C.1.pep
HLGSWNLPVIHLLYVIDTQFVLHRHLHALSLSVHTVSTSDTGEHISVSFRLNVCS

SEQ ID NO: 221184 - protein, 57 aa, Glycine max
  Clone ID: PAT_MRT3847_4175C.1.pep
TTCMFRYECRLLVIVKVFTRTIARLKKEMELETVCVGSYLNMHVTFHQSQNKFLFYF

SEQ ID NO: 221185 - protein, 73 aa, Glycine max
  Clone ID: PAT_MRT3847_41760C.1.pep
LTLGNVPRKKLLGYGPYSSCVLRQLGCTMKRGWKQTMGWRKRGPQYSYDFISYRLNFTDGPSNDHIHMPPYLA

SEQ ID NO: 221186 - protein, 255 aa, Glycine max
  unsure (1)..(255): unsure at all Xaa locations
  Clone ID: PAT_MRT3847_41761C.1.pep
FGSGDLAPTHYVPSMSRHPLTGDWYPAINKPAAVLHWLNHVNIDAEFIVILDADMILRGPITPWEFKAARSHPVSTPYDYLIGCDNELAKLHTSHPEACDKVGGVIIMHIDDLRKFAMLWLHKTEEVRADRAHYARNITGDIYESGWISEMYGYSFGAAELKLRHTINNEILIYPGYVPVPSVNYRVFHYGLRFSVGNWSFDKADWRNVDMVNKCWAKFPDPPDSSPIDLGQHEDLQRDLLSIECAKTXDEALNL

SEQ ID NO: 221187 - protein, 46 aa, Glycine max
  Clone ID: PAT_MRT3847_41762C.1.pep
MANNLAVQQLVGSEIHGFHTPHASNAGSIMEEARTRWLRPNEIHAM

SEQ ID NO: 221188 - protein, 183 aa, Glycine max
  Clone ID: PAT_MRT3847_41763C.1.pep
VMMQKLVLRSAQHGMRASAVLGASCRVMMTTESSVSSSISEVSPVFAKVARDIPLKVVPRAERRAARKAAKHSADAVENKVVRTSSLPARFSFALLAGSISGSILWHFMLDDSTKSRVKETLGATFLGDVYVFVAKKVQETVKPFTDPSRQKLLPDWPIPQVPADTPPVSVLVLDLEDTLVHS

SEQ ID NO: 221189 - protein, 231 aa, Glycine max
  Clone ID: PAT_MRT3847_41764C.1.pep
MESIEMEEAAFGIDESNDDLCSSILSRFANSTDETHHHLCAVVGAMSQELKDNNQPSTPFAYFCAARVSLDKFTSEPNPPSHVIDALLTILSLALPRVPLVLLKKQNLQGEPFSELLSRVLLSPSASESAIVSGLKCLSRLLITRESVDWSDVSPLFYVLLGFLTDSRPKVRRQSHLCHRDVLLNFQHSSLLASASEGVTSLLERVILLVGGANANAGEGAKEAQQILYIL

SEQ ID NO: 221190 - protein, 75 aa, Glycine max
  unsure (1)..(75): unsure at all Xaa locations
  Clone ID: PAT_MRT3847_41765C.1.pep
GGWVDNEARNQQDCKNGPQTLEQSXITDAKNDPHGDMLVQKHDNVKKGQLASKILNXAVIGNANDDAIHRGTDSH

SEQ ID NO: 221191 - protein, 50 aa, Glycine max
  Clone ID: PAT_MRT3847_41766C.1.pep
IIFHYQNLHPFEQNHKFLSNIPKFHILTCLTQIQSFQHPKHRILHLYSLL

SEQ ID NO: 221192 - protein, 137 aa, Glycine max
  Clone ID: PAT_MRT3847_41767C.1.pep
RSFSRGPAIRRNTEFESNGSVGDLTPGFEDMDGTQRRGSLSPERDLVVRPRFSNTQSVSPPRNEPHSVGPSIGPTTIEPSIRLLPPPPGGSFLPRRLSGWYPPFFAVQLSLVLAKIAMALQPCSPLAVNPWVLYFLI

SEQ ID NO: 221193 - protein, 230 aa, Glycine max
  Clone ID: PAT_MRT3847_41768C.1.pep
STFPQLNFKVYYFDPEIVRNLISTSVRQALEQPLNYARNYLADLLEPCVERVIYLDSDLVVVDDIAKLWSTSLGSRTIGAPEYCHANFTKYFTAAFWSDTRFARAFAGRRPCYFNTGVMVIDLVRWRRIGYSKRIERWMEIQKNDRIYELGSLPPFLLVFAGHVAPIEHRWNQHGLGGDNVKGSCRDLHAGPVSLLHWSGSGKPWTRLDSKQPCPLDALWAPYDLYGHAH

SEQ ID NO: 221194 - protein, 86 aa, Glycine max
  unsure (1)..(86): unsure at all Xaa locations
  Clone ID: PAT_MRT3847_41769C.1.pep
NVFVLVFLAATILVAXECHAYQRXSLRIYVKAKGARTPEVKCASWRLAVEAHNIFGFETIPEKCLEATKEYIHGEQIXSDSQTVNP

SEQ ID NO: 221195 - protein, 109 aa, Glycine max
  Clone ID: PAT_MRT3847_4176C.1.pep
QRKMVAPFPPGVKQKFTFCFWGGGSSPLGGGGPTFMFGPIFPKNRFWVCPEVMGNKCLNYMAKFSVKPWSLADPNGGFLRKETWARAFYWLSPVILGDPLFQKPTPPQQ

SEQ ID NO: 221196 - protein, 354 aa, Glycine max
  unsure (1)..(354): unsure at all Xaa locations
  Clone ID: PAT_MRT3847_41770C.1.pep
MITYVSEYEAIAKEKLPKMVYDFYAXGADDQCTLNENRNAFSRILFQPRILIDVSKIDLTTTVMGFKISMPIMIAPTAMQKMAHPEGELATARAASAAGTIMTLXNRFLQVSVIKDRNVVXQLVSRAEXAGSKAIALTVDTPILDRREADIKNRFTLPPNLVWTMVLKNFEGLDLGKLNKTSDSFAASYAAELYDRSLNWKDIKWIQTITSLPILLKGVLTPEDTMIAIQAGAAGIIVSNHGARQLDYVPATIMALEEVVKATQGRIPVFLDGGIRRGTDVFKALALGAAGVFIGRPVVFSLAADGEAGVRKVLQMLRDEFELTMALSGCRSLKEITRDHVLTEWDRPRFSPKL

SEQ ID NO: 221197 - protein, 370 aa, Glycine max
  Clone ID: PAT_MRT3847_41771C.1.pep
MKMEMITNVTEYEAIAKEKLPKMVYDYYASGAEDQWTLKENRNAFSRILFRPRILVDVSKIDLTATVLGFKISMPIMIAPTAMQKMAHPEGELATARAASAAGTIMTLSSWATSSVEEVASTGPDIRFFQLYVFKDRNVVAQLVRRAERAGFKAIALTVDSPILGRREADIKNRFTLPPNLVLKNLEGLDLGKLDKTSDSSLASYVAEQIDQSLNWKDIKWLQSITSLPIVVKGVLTAEDTRIAIQAGAAGIIVSNHGARQLDYVPATIMALEEVVKAAQGKIPVFLDGGIRRGTDVFKALALGAAGVFIGRPVVFSLAADGETGVRKVLQMLRDEFELTMALSGCRSLKEITRDHVITEWDHPRFSPKL

SEQ ID NO: 221198 - protein, 130 aa, Glycine max
  Clone ID: PAT_MRT3847_41772C.1.pep
QLSFFSVEKNYFIFLISFFIFQEKVFLFWFLFFVFCFSFSVAAMTEVLHFSSSSSPATSSSDGILQEPPPPSSVSVVVDGFSTVTDCDARRVTVTDRTHQELSLLAILVTLLRKSLIACNKSDEGQGAMG

SEQ ID NO: 221199 - protein, 96 aa, Glycine max
  unsure (1)..(96): unsure at all Xaa locations
  Clone ID: PAT_MRT3847_41773C.1.pep
MEESKRLGMKCKRSFXRRMPPIQSGDRIVYKNMGLNRRFISDQGKILCRRVNRLSLKQHRLISGAIKQARMLSLLPFVNNEKQFKKXESTARTPLL

SEQ ID NO: 221200 - protein, 220 aa, Glycine max
  Clone ID: PAT_MRT3847_41774C.1.pep
MRKPCCDKENINKGAWSKQEDQKLIDYIQVHGEGCWRSIPKAAGLHRCGKSCRMRWLNYLRPGIKRGIFAEDEEDLIIKLHALLGNRWSLIAGRLPGRTDNEVKNYWNSHIRRKLIKMGIDPNSHKPHQSFPRPHVSSADHQGASTSESINNNKVPFFNSRGSAATDHHKISFTKEETSIISSPPLNLDLTISLPSPVEENKNSDHESAKTCDVDIDLNC

SEQ ID NO: 221201 - protein, 47 aa, Glycine max
  Clone ID: PAT_MRT3847_41775C.1.pep
KSPFYFERCPLLGIHDGKRPASFSCLLIPPRLSKLCFFKQLNYFFGI

SEQ ID NO: 221202 - protein, 50 aa, Glycine max
  Clone ID: PAT_MRT3847_41776C.1.pep
IQSYHGRDCIFVVNPEMDKLCYKDQPTPTLLSRPNLLHRQLVNPRVIWNV

SEQ ID NO: 221203 - protein, 73 aa, Glycine max
  Clone ID: PAT_MRT3847_41777C.1.pep
SLSLPSLLLALLLRRKSGRENDHHKENSDPLYRSNANYSQSRMRLDLTVNNNCLLIFVNVLGSINYINLVEFA

SEQ ID NO: 221204 - protein, 606 aa, Glycine max
  unsure (1)..(606): unsure at all Xaa locations
  Clone ID: PAT_MRT3847_41778C.1.pep
MDETEVENPIFMEINSEDKRNENQEFASEKGEGSSVVFSREAPLMRKESRMSTPYCCNAKKLKSGAVTIDCDLGSNEKYGLEKKLCRQDRIELGRLFQSAVSSHDWELAESLILVADPQTLNDALCITLDSIWFLSTELELNGIMGFIKKIIANGAYDFTRAALRTSFLASCVSACQSRTMSLADTVTVMAQRLHERLQECNGDEVLKAEAGAKVQKFTEWALKCIGIHSRLQDDRENVIHSSAVEIQLRLSAFKMFLDLAGNRLTGKDFSEAFDAACFPLTLFSSSFDPGWAFGLSATVIQGLLGMLVEGGSGNVNQCFLEASRFGSTELVRILLQIAQRNSLDVDVDLALGFASHYGKIGTMECLVEEGNAIAFLGPLMRAAERGCMQVVEWFVQRGCRDMELCLALTAATSSCQVHIAAYLLPHVPQQVLAALSVEILKAXAGERSGGSLDGVAFLLQSDFLGDPAATYAVADIIAKSEDEAVAPELKTFLKEHWSEGAYKEGLRLGQEHYMNLVRIIKWGESPICLRDLPAPLTVAIAYLPLYRECVKTGGCLFSQRLRGQLVEAARRVGNRVLDEVTHGRELVVVLEQHLPHFLLHPSRIA

SEQ ID NO: 221205 - protein, 59 aa, Glycine max
  Clone ID: PAT_MRT3847_41779C.1.pep
LTNQALSLKNHLKTILRSNALNDPLCFYLVKRGLLKAYSQRITLSLLSRNQDIINGPMP

SEQ ID NO: 221206 - protein, 59 aa, Glycine max
  Clone ID: PAT_MRT3847_4177C.1.pep
EAIPAPKRGEIVRQIGEALRAKLDPLGRLVSLEMGKILPEGIGDDHEIIAMSDYCVGLT

SEQ ID NO: 221207 - protein, 42 aa, Glycine max
  Clone ID: PAT_MRT3847_41780C.1.pep
NITINFNFKFVNDILLTFGWEVPEGENSGGWYQIKFGKFLNF

SEQ ID NO: 221208 - protein, 184 aa, Glycine max
  Clone ID: PAT_MRT3847_41781C.1.pep
RGRVAAYIYKKAGRWKQSIALSKKDNLYKDCMETCSQSGDRELSEDLLVYFIEQEKKECFASCLFVCYDIIRPDVALELAWMNNMIDFAFPYLLQFIREYTGKVDELIKDKIEAQKVEKAKEKEEKEVLAQQNMYAQLLPLALPAPPSMGGGGYAPPTPPIGGMGMPPMPPFGMPPMGGGSGSY

SEQ ID NO: 221209 - protein, 44 aa, Glycine max
  Clone ID: PAT_MRT3847_41782C.1.pep
MAPKIDNDLLPSCNPDKSGRANQNKKKWSKGKQNEKVNNILLLH

SEQ ID NO: 221210 - protein, 83 aa, Glycine max
  unsure (1)..(83): unsure at all Xaa locations
  Clone ID: PAT_MRT3847_41783C.1.pep
MKNTIFSALFLLCAFTTSYLPSTTAVVDTDGDIXXNSXTYYILPAPRFXGGVEFAATGYESCPLTVLHTLFGWWLSSILSHMF
